United States Patent Application Publication US 2012/0157512 A1 - sequence listing, part 2

SEQ ID NO: 31575 - DNA, 26 bp, Artificial sequence
  SiRNA target sequence
aatagtagaatttctatgaattatct

SEQ ID NO: 31576 - DNA, 26 bp, Artificial sequence
  SiRNA target sequence
atagtagaatttctatgaattatctt

SEQ ID NO: 31577 - DNA, 26 bp, Artificial sequence
  SiRNA target sequence
tagtagaatttctatgaattatctta

SEQ ID NO: 31578 - DNA, 26 bp, Artificial sequence
  SiRNA target sequence
agtagaatttctatgaattatcttat

SEQ ID NO: 31579 - DNA, 26 bp, Artificial sequence
  SiRNA target sequence
gtagaatttctatgaattatcttatt

SEQ ID NO: 31580 - DNA, 26 bp, Artificial sequence
  SiRNA target sequence
tagaatttctatgaattatcttatta

SEQ ID NO: 31581 - DNA, 26 bp, Artificial sequence
  SiRNA target sequence
agaatttctatgaattatcttattaa

SEQ ID NO: 31582 - DNA, 26 bp, Artificial sequence
  SiRNA target sequence
gaatttctatgaattatcttattaaa

SEQ ID NO: 31583 - DNA, 26 bp, Artificial sequence
  SiRNA target sequence
aatttctatgaattatcttattaaaa

SEQ ID NO: 31584 - DNA, 26 bp, Artificial sequence
  SiRNA target sequence
atttctatgaattatcttattaaaaa

SEQ ID NO: 31585 - DNA, 26 bp, Artificial sequence
  SiRNA target sequence
tttctatgaattatcttattaaaaat

SEQ ID NO: 31586 - DNA, 26 bp, Artificial sequence
  SiRNA target sequence
ttctatgaattatcttattaaaaatc

SEQ ID NO: 31587 - DNA, 26 bp, Artificial sequence
  SiRNA target sequence
tctatgaattatcttattaaaaatcc

SEQ ID NO: 31588 - DNA, 26 bp, Artificial sequence
  SiRNA target sequence
ctatgaattatcttattaaaaatccc

SEQ ID NO: 31589 - DNA, 26 bp, Artificial sequence
  SiRNA target sequence
tatgaattatcttattaaaaatcccg

SEQ ID NO: 31590 - DNA, 26 bp, Artificial sequence
  SiRNA target sequence
atgaattatcttattaaaaatcccgc

SEQ ID NO: 31591 - DNA, 26 bp, Artificial sequence
  SiRNA target sequence
tgaattatcttattaaaaatcccgcc

SEQ ID NO: 31592 - DNA, 26 bp, Artificial sequence
  SiRNA target sequence
gaattatcttattaaaaatcccgccc

SEQ ID NO: 31593 - DNA, 26 bp, Artificial sequence
  SiRNA target sequence
aattatcttattaaaaatcccgccca

SEQ ID NO: 31594 - DNA, 26 bp, Artificial sequence
  SiRNA target sequence
attatcttattaaaaatcccgcccaa

SEQ ID NO: 31595 - DNA, 26 bp, Artificial sequence
  SiRNA target sequence
ttatcttattaaaaatcccgcccaaa

SEQ ID NO: 31596 - DNA, 26 bp, Artificial sequence
  SiRNA target sequence
tatcttattaaaaatcccgcccaaaa

SEQ ID NO: 31597 - DNA, 26 bp, Artificial sequence
  SiRNA target sequence
atcttattaaaaatcccgcccaaaag

SEQ ID NO: 31598 - DNA, 26 bp, Artificial sequence
  SiRNA target sequence
tcttattaaaaatcccgcccaaaagc

SEQ ID NO: 31599 - DNA, 26 bp, Artificial sequence
  SiRNA target sequence
cttattaaaaatcccgcccaaaagct

SEQ ID NO: 31600 - DNA, 26 bp, Artificial sequence
  SiRNA target sequence
ttattaaaaatcccgcccaaaagctc

SEQ ID NO: 31601 - DNA, 26 bp, Artificial sequence
  SiRNA target sequence
tattaaaaatcccgcccaaaagctct

SEQ ID NO: 31602 - DNA, 26 bp, Artificial sequence
  SiRNA target sequence
attaaaaatcccgcccaaaagctcta

SEQ ID NO: 31603 - DNA, 26 bp, Artificial sequence
  SiRNA target sequence
ttaaaaatcccgcccaaaagctctat

SEQ ID NO: 31604 - DNA, 26 bp, Artificial sequence
  SiRNA target sequence
taaaaatcccgcccaaaagctctata

SEQ ID NO: 31605 - DNA, 26 bp, Artificial sequence
  SiRNA target sequence
aaaaatcccgcccaaaagctctatac

SEQ ID NO: 31606 - DNA, 26 bp, Artificial sequence
  SiRNA target sequence
aaaatcccgcccaaaagctctatacc

SEQ ID NO: 31607 - DNA, 26 bp, Artificial sequence
  SiRNA target sequence
aaatcccgcccaaaagctctatacct

SEQ ID NO: 31608 - DNA, 26 bp, Artificial sequence
  SiRNA target sequence
aatcccgcccaaaagctctataccta

SEQ ID NO: 31609 - DNA, 26 bp, Artificial sequence
  SiRNA target sequence
atcccgcccaaaagctctatacctaa

SEQ ID NO: 31610 - DNA, 26 bp, Artificial sequence
  SiRNA target sequence
tcccgcccaaaagctctatacctaaa

SEQ ID NO: 31611 - DNA, 26 bp, Artificial sequence
  SiRNA target sequence
cccgcccaaaagctctatacctaaac

SEQ ID NO: 31612 - DNA, 26 bp, Artificial sequence
  SiRNA target sequence
ccgcccaaaagctctatacctaaact

SEQ ID NO: 31613 - DNA, 26 bp, Artificial sequence
  SiRNA target sequence
cgcccaaaagctctatacctaaactc

SEQ ID NO: 31614 - DNA, 26 bp, Artificial sequence
  SiRNA target sequence
gcccaaaagctctatacctaaactca

SEQ ID NO: 31615 - DNA, 26 bp, Artificial sequence
  SiRNA target sequence
cccaaaagctctatacctaaactcaa

SEQ ID NO: 31616 - DNA, 26 bp, Artificial sequence
  SiRNA target sequence
ccaaaagctctatacctaaactcaat

SEQ ID NO: 31617 - DNA, 26 bp, Artificial sequence
  SiRNA target sequence
caaaagctctatacctaaactcaatg

SEQ ID NO: 31618 - DNA, 26 bp, Artificial sequence
  SiRNA target sequence
aaaagctctatacctaaactcaatgg

SEQ ID NO: 31619 - DNA, 26 bp, Artificial sequence
  SiRNA target sequence
aaagctctatacctaaactcaatggt

SEQ ID NO: 31620 - DNA, 26 bp, Artificial sequence
  SiRNA target sequence
aagctctatacctaaactcaatggta

SEQ ID NO: 31621 - DNA, 26 bp, Artificial sequence
  SiRNA target sequence
agctctatacctaaactcaatggtac

SEQ ID NO: 31622 - DNA, 26 bp, Artificial sequence
  SiRNA target sequence
gctctatacctaaactcaatggtact

SEQ ID NO: 31623 - DNA, 26 bp, Artificial sequence
  SiRNA target sequence
ctctatacctaaactcaatggtacta

SEQ ID NO: 31624 - DNA, 26 bp, Artificial sequence
  SiRNA target sequence
tctatacctaaactcaatggtactac

SEQ ID NO: 31625 - DNA, 26 bp, Artificial sequence
  SiRNA target sequence
ctatacctaaactcaatggtactaca

SEQ ID NO: 31626 - DNA, 26 bp, Artificial sequence
  SiRNA target sequence
tatacctaaactcaatggtactacat

SEQ ID NO: 31627 - DNA, 26 bp, Artificial sequence
  SiRNA target sequence
atacctaaactcaatggtactacatc

SEQ ID NO: 31628 - DNA, 26 bp, Artificial sequence
  SiRNA target sequence
tacctaaactcaatggtactacatcc

SEQ ID NO: 31629 - DNA, 26 bp, Artificial sequence
  SiRNA target sequence
acctaaactcaatggtactacatcca

SEQ ID NO: 31630 - DNA, 26 bp, Artificial sequence
  SiRNA target sequence
cctaaactcaatggtactacatccaa

SEQ ID NO: 31631 - DNA, 26 bp, Artificial sequence
  SiRNA target sequence
ctaaactcaatggtactacatccaat

SEQ ID NO: 31632 - DNA, 26 bp, Artificial sequence
  SiRNA target sequence
taaactcaatggtactacatccaata

SEQ ID NO: 31633 - DNA, 26 bp, Artificial sequence
  SiRNA target sequence
aaactcaatggtactacatccaataa

SEQ ID NO: 31634 - DNA, 26 bp, Artificial sequence
  SiRNA target sequence
aactcaatggtactacatccaataat

SEQ ID NO: 31635 - DNA, 26 bp, Artificial sequence
  SiRNA target sequence
actcaatggtactacatccaataata

SEQ ID NO: 31636 - DNA, 26 bp, Artificial sequence
  SiRNA target sequence
ctcaatggtactacatccaataatag

SEQ ID NO: 31637 - DNA, 26 bp, Artificial sequence
  SiRNA target sequence
tcaatggtactacatccaataatagg

SEQ ID NO: 31638 - DNA, 26 bp, Artificial sequence
  SiRNA target sequence
caatggtactacatccaataatagga

SEQ ID NO: 31639 - DNA, 26 bp, Artificial sequence
  SiRNA target sequence
aatggtactacatccaataataggac

SEQ ID NO: 31640 - DNA, 26 bp, Artificial sequence
  SiRNA target sequence
atggtactacatccaataataggaca

SEQ ID NO: 31641 - DNA, 26 bp, Artificial sequence
  SiRNA target sequence
tggtactacatccaataataggacat

SEQ ID NO: 31642 - DNA, 26 bp, Artificial sequence
  SiRNA target sequence
ggtactacatccaataataggacatc

SEQ ID NO: 31643 - DNA, 26 bp, Artificial sequence
  SiRNA target sequence
gtactacatccaataataggacatct

SEQ ID NO: 31644 - DNA, 26 bp, Artificial sequence
  SiRNA target sequence
tactacatccaataataggacatctt

SEQ ID NO: 31645 - DNA, 26 bp, Artificial sequence
  SiRNA target sequence
actacatccaataataggacatcttt

SEQ ID NO: 31646 - DNA, 26 bp, Artificial sequence
  SiRNA target sequence
ctacatccaataataggacatctttt

SEQ ID NO: 31647 - DNA, 26 bp, Artificial sequence
  SiRNA target sequence
tacatccaataataggacatctttta

SEQ ID NO: 31648 - DNA, 26 bp, Artificial sequence
  SiRNA target sequence
acatccaataataggacatcttttat

SEQ ID NO: 31649 - DNA, 26 bp, Artificial sequence
  SiRNA target sequence
catccaataataggacatcttttatt

SEQ ID NO: 31650 - DNA, 26 bp, Artificial sequence
  SiRNA target sequence
atccaataataggacatcttttattt

SEQ ID NO: 31651 - DNA, 26 bp, Artificial sequence
  SiRNA target sequence
tccaataataggacatcttttatttt

SEQ ID NO: 31652 - DNA, 26 bp, Artificial sequence
  SiRNA target sequence
ccaataataggacatcttttattttt

SEQ ID NO: 31653 - DNA, 26 bp, Artificial sequence
  SiRNA target sequence
caataataggacatcttttatttttc

SEQ ID NO: 31654 - DNA, 26 bp, Artificial sequence
  SiRNA target sequence
aataataggacatcttttatttttcc

SEQ ID NO: 31655 - DNA, 26 bp, Artificial sequence
  SiRNA target sequence
ataataggacatcttttatttttcct

SEQ ID NO: 31656 - DNA, 26 bp, Artificial sequence
  SiRNA target sequence
taataggacatcttttatttttcctt

SEQ ID NO: 31657 - DNA, 26 bp, Artificial sequence
  SiRNA target sequence
aataggacatcttttatttttccttc

SEQ ID NO: 31658 - DNA, 26 bp, Artificial sequence
  SiRNA target sequence
ataggacatcttttatttttccttct

SEQ ID NO: 31659 - DNA, 26 bp, Artificial sequence
  SiRNA target sequence
taggacatcttttatttttccttcta

SEQ ID NO: 31660 - DNA, 26 bp, Artificial sequence
  SiRNA target sequence
aggacatcttttatttttccttctaa

SEQ ID NO: 31661 - DNA, 26 bp, Artificial sequence
  SiRNA target sequence
ggacatcttttatttttccttctaac

SEQ ID NO: 31662 - DNA, 26 bp, Artificial sequence
  SiRNA target sequence
gacatcttttatttttccttctaaca

SEQ ID NO: 31663 - DNA, 26 bp, Artificial sequence
  SiRNA target sequence
acatcttttatttttccttctaacac

SEQ ID NO: 31664 - DNA, 26 bp, Artificial sequence
  SiRNA target sequence
catcttttatttttccttctaacacg

SEQ ID NO: 31665 - DNA, 26 bp, Artificial sequence
  SiRNA target sequence
atcttttatttttccttctaacacgc

SEQ ID NO: 31666 - DNA, 26 bp, Artificial sequence
  SiRNA target sequence
tcttttatttttccttctaacacgcc

SEQ ID NO: 31667 - DNA, 26 bp, Artificial sequence
  SiRNA target sequence
cttttatttttccttctaacacgcct

SEQ ID NO: 31668 - DNA, 26 bp, Artificial sequence
  SiRNA target sequence
ttttatttttccttctaacacgcctg

SEQ ID NO: 31669 - DNA, 26 bp, Artificial sequence
  SiRNA target sequence
tttatttttccttctaacacgcctgc

SEQ ID NO: 31670 - DNA, 26 bp, Artificial sequence
  SiRNA target sequence
ttatttttccttctaacacgcctgct

SEQ ID NO: 31671 - DNA, 26 bp, Artificial sequence
  SiRNA target sequence
tatttttccttctaacacgcctgctt

SEQ ID NO: 31672 - DNA, 26 bp, Artificial sequence
  SiRNA target sequence
atttttccttctaacacgcctgcttg

SEQ ID NO: 31673 - DNA, 26 bp, Artificial sequence
  SiRNA target sequence
tttttccttctaacacgcctgcttgt

SEQ ID NO: 31674 - DNA, 26 bp, Artificial sequence
  SiRNA target sequence
ttttccttctaacacgcctgcttgta

SEQ ID NO: 31675 - DNA, 26 bp, Artificial sequence
  SiRNA target sequence
tttccttctaacacgcctgcttgtag

SEQ ID NO: 31676 - DNA, 26 bp, Artificial sequence
  SiRNA target sequence
ttccttctaacacgcctgcttgtaga

SEQ ID NO: 31677 - DNA, 26 bp, Artificial sequence
  SiRNA target sequence
tccttctaacacgcctgcttgtagag

SEQ ID NO: 31678 - DNA, 26 bp, Artificial sequence
  SiRNA target sequence
ccttctaacacgcctgcttgtagagc

SEQ ID NO: 31679 - DNA, 26 bp, Artificial sequence
  SiRNA target sequence
cttctaacacgcctgcttgtagagcg

SEQ ID NO: 31680 - DNA, 26 bp, Artificial sequence
  SiRNA target sequence
ttctaacacgcctgcttgtagagcgg

SEQ ID NO: 31681 - DNA, 26 bp, Artificial sequence
  SiRNA target sequence
tctaacacgcctgcttgtagagcggc

SEQ ID NO: 31682 - DNA, 26 bp, Artificial sequence
  SiRNA target sequence
ctaacacgcctgcttgtagagcggcc

SEQ ID NO: 31683 - DNA, 26 bp, Artificial sequence
  SiRNA target sequence
taacacgcctgcttgtagagcggccc

SEQ ID NO: 31684 - DNA, 26 bp, Artificial sequence
  SiRNA target sequence
aacacgcctgcttgtagagcggcccc

SEQ ID NO: 31685 - DNA, 26 bp, Artificial sequence
  SiRNA target sequence
acacgcctgcttgtagagcggcccct

SEQ ID NO: 31686 - DNA, 26 bp, Artificial sequence
  SiRNA target sequence
cacgcctgcttgtagagcggcccctt

SEQ ID NO: 31687 - DNA, 26 bp, Artificial sequence
  SiRNA target sequence
acgcctgcttgtagagcggccccttt

SEQ ID NO: 31688 - DNA, 26 bp, Artificial sequence
  SiRNA target sequence
cgcctgcttgtagagcggccccttta

SEQ ID NO: 31689 - DNA, 26 bp, Artificial sequence
  SiRNA target sequence
gcctgcttgtagagcggcccctttag

SEQ ID NO: 31690 - DNA, 26 bp, Artificial sequence
  SiRNA target sequence
cctgcttgtagagcggcccctttagc

SEQ ID NO: 31691 - DNA, 26 bp, Artificial sequence
  SiRNA target sequence
ctgcttgtagagcggcccctttagca

SEQ ID NO: 31692 - DNA, 26 bp, Artificial sequence
  SiRNA target sequence
tgcttgtagagcggcccctttagcaa

SEQ ID NO: 31693 - DNA, 26 bp, Artificial sequence
  SiRNA target sequence
gcttgtagagcggcccctttagcaac

SEQ ID NO: 31694 - DNA, 26 bp, Artificial sequence
  SiRNA target sequence
cttgtagagcggcccctttagcaaca

SEQ ID NO: 31695 - DNA, 26 bp, Artificial sequence
  SiRNA target sequence
ttgtagagcggcccctttagcaacag

SEQ ID NO: 31696 - DNA, 26 bp, Artificial sequence
  SiRNA target sequence
tgtagagcggcccctttagcaacagc

SEQ ID NO: 31697 - DNA, 26 bp, Artificial sequence
  SiRNA target sequence
gtagagcggcccctttagcaacagct

SEQ ID NO: 31698 - DNA, 26 bp, Artificial sequence
  SiRNA target sequence
tagagcggcccctttagcaacagctt

SEQ ID NO: 31699 - DNA, 26 bp, Artificial sequence
  SiRNA target sequence
agagcggcccctttagcaacagcttc

SEQ ID NO: 31700 - DNA, 26 bp, Artificial sequence
  SiRNA target sequence
gagcggcccctttagcaacagcttca

SEQ ID NO: 31701 - DNA, 26 bp, Artificial sequence
  SiRNA target sequence
agcggcccctttagcaacagcttcat

SEQ ID NO: 31702 - DNA, 26 bp, Artificial sequence
  SiRNA target sequence
gcggcccctttagcaacagcttcatc

SEQ ID NO: 31703 - DNA, 26 bp, Artificial sequence
  SiRNA target sequence
cggcccctttagcaacagcttcatct

SEQ ID NO: 31704 - DNA, 26 bp, Artificial sequence
  SiRNA target sequence
ggcccctttagcaacagcttcatctg

SEQ ID NO: 31705 - DNA, 26 bp, Artificial sequence
  SiRNA target sequence
gcccctttagcaacagcttcatctgg

SEQ ID NO: 31706 - DNA, 26 bp, Artificial sequence
  SiRNA target sequence
cccctttagcaacagcttcatctgga

SEQ ID NO: 31707 - DNA, 26 bp, Artificial sequence
  SiRNA target sequence
ccctttagcaacagcttcatctggat

SEQ ID NO: 31708 - DNA, 26 bp, Artificial sequence
  SiRNA target sequence
cctttagcaacagcttcatctggatt

SEQ ID NO: 31709 - DNA, 26 bp, Artificial sequence
  SiRNA target sequence
ctttagcaacagcttcatctggatta

SEQ ID NO: 31710 - DNA, 26 bp, Artificial sequence
  SiRNA target sequence
tttagcaacagcttcatctggattaa

SEQ ID NO: 31711 - DNA, 26 bp, Artificial sequence
  SiRNA target sequence
ttagcaacagcttcatctggattaat

SEQ ID NO: 31712 - DNA, 26 bp, Artificial sequence
  SiRNA target sequence
tagcaacagcttcatctggattaata

SEQ ID NO: 31713 - DNA, 26 bp, Artificial sequence
  SiRNA target sequence
agcaacagcttcatctggattaatat

SEQ ID NO: 31714 - DNA, 26 bp, Artificial sequence
  SiRNA target sequence
gcaacagcttcatctggattaatatt

SEQ ID NO: 31715 - DNA, 26 bp, Artificial sequence
  SiRNA target sequence
caacagcttcatctggattaatattt

SEQ ID NO: 31716 - DNA, 26 bp, Artificial sequence
  SiRNA target sequence
aacagcttcatctggattaatatttg

SEQ ID NO: 31717 - DNA, 26 bp, Artificial sequence
  SiRNA target sequence
acagcttcatctggattaatatttgt

SEQ ID NO: 31718 - DNA, 26 bp, Artificial sequence
  SiRNA target sequence
cagcttcatctggattaatatttgta

SEQ ID NO: 31719 - DNA, 26 bp, Artificial sequence
  SiRNA target sequence
agcttcatctggattaatatttgtag

SEQ ID NO: 31720 - DNA, 26 bp, Artificial sequence
  SiRNA target sequence
gcttcatctggattaatatttgtaga

SEQ ID NO: 31721 - DNA, 26 bp, Artificial sequence
  SiRNA target sequence
cttcatctggattaatatttgtagaa

SEQ ID NO: 31722 - DNA, 26 bp, Artificial sequence
  SiRNA target sequence
ttcatctggattaatatttgtagaag

SEQ ID NO: 31723 - DNA, 26 bp, Artificial sequence
  SiRNA target sequence
tcatctggattaatatttgtagaagg

SEQ ID NO: 31724 - DNA, 26 bp, Artificial sequence
  SiRNA target sequence
catctggattaatatttgtagaaggc

SEQ ID NO: 31725 - DNA, 26 bp, Artificial sequence
  SiRNA target sequence
atctggattaatatttgtagaaggct

SEQ ID NO: 31726 - DNA, 26 bp, Artificial sequence
  SiRNA target sequence
tctggattaatatttgtagaaggctc

SEQ ID NO: 31727 - DNA, 26 bp, Artificial sequence
  SiRNA target sequence
ctggattaatatttgtagaaggctcg

SEQ ID NO: 31728 - DNA, 26 bp, Artificial sequence
  SiRNA target sequence
tggattaatatttgtagaaggctcga

SEQ ID NO: 31729 - DNA, 26 bp, Artificial sequence
  SiRNA target sequence
ggattaatatttgtagaaggctcgat

SEQ ID NO: 31730 - DNA, 26 bp, Artificial sequence
  SiRNA target sequence
gattaatatttgtagaaggctcgata

SEQ ID NO: 31731 - DNA, 26 bp, Artificial sequence
  SiRNA target sequence
attaatatttgtagaaggctcgatac

SEQ ID NO: 31732 - DNA, 26 bp, Artificial sequence
  SiRNA target sequence
ttaatatttgtagaaggctcgatacc

SEQ ID NO: 31733 - DNA, 26 bp, Artificial sequence
  SiRNA target sequence
taatatttgtagaaggctcgatacca

SEQ ID NO: 31734 - DNA, 26 bp, Artificial sequence
  SiRNA target sequence
aatatttgtagaaggctcgataccaa

SEQ ID NO: 31735 - DNA, 26 bp, Artificial sequence
  SiRNA target sequence
atatttgtagaaggctcgataccaaa

SEQ ID NO: 31736 - DNA, 26 bp, Artificial sequence
  SiRNA target sequence
tatttgtagaaggctcgataccaaaa

SEQ ID NO: 31737 - DNA, 26 bp, Artificial sequence
  SiRNA target sequence
atttgtagaaggctcgataccaaaaa

SEQ ID NO: 31738 - DNA, 26 bp, Artificial sequence
  SiRNA target sequence
tttgtagaaggctcgataccaaaaat

SEQ ID NO: 31739 - DNA, 26 bp, Artificial sequence
  SiRNA target sequence
ttgtagaaggctcgataccaaaaatc

SEQ ID NO: 31740 - DNA, 26 bp, Artificial sequence
  SiRNA target sequence
tgtagaaggctcgataccaaaaatct

SEQ ID NO: 31741 - DNA, 26 bp, Artificial sequence
  SiRNA target sequence
gtagaaggctcgataccaaaaatctt

SEQ ID NO: 31742 - DNA, 26 bp, Artificial sequence
  SiRNA target sequence
tagaaggctcgataccaaaaatcttc

SEQ ID NO: 31743 - DNA, 26 bp, Artificial sequence
  SiRNA target sequence
agaaggctcgataccaaaaatcttct

SEQ ID NO: 31744 - DNA, 26 bp, Artificial sequence
  SiRNA target sequence
gaaggctcgataccaaaaatcttctt

SEQ ID NO: 31745 - DNA, 26 bp, Artificial sequence
  SiRNA target sequence
aaggctcgataccaaaaatcttctta

SEQ ID NO: 31746 - DNA, 26 bp, Artificial sequence
  SiRNA target sequence
aggctcgataccaaaaatcttcttaa

SEQ ID NO: 31747 - DNA, 26 bp, Artificial sequence
  SiRNA target sequence
ggctcgataccaaaaatcttcttaac

SEQ ID NO: 31748 - DNA, 26 bp, Artificial sequence
  SiRNA target sequence
gctcgataccaaaaatcttcttaaca

SEQ ID NO: 31749 - DNA, 26 bp, Artificial sequence
  SiRNA target sequence
ctcgataccaaaaatcttcttaacaa

SEQ ID NO: 31750 - DNA, 26 bp, Artificial sequence
  SiRNA target sequence
tcgataccaaaaatcttcttaacaag

SEQ ID NO: 31751 - DNA, 26 bp, Artificial sequence
  SiRNA target sequence
cgataccaaaaatcttcttaacaagt

SEQ ID NO: 31752 - DNA, 26 bp, Artificial sequence
  SiRNA target sequence
gataccaaaaatcttcttaacaagtt

SEQ ID NO: 31753 - DNA, 26 bp, Artificial sequence
  SiRNA target sequence
ataccaaaaatcttcttaacaagttt

SEQ ID NO: 31754 - DNA, 26 bp, Artificial sequence
  SiRNA target sequence
taccaaaaatcttcttaacaagtttt

SEQ ID NO: 31755 - DNA, 26 bp, Artificial sequence
  SiRNA target sequence
accaaaaatcttcttaacaagttttc

SEQ ID NO: 31756 - DNA, 26 bp, Artificial sequence
  SiRNA target sequence
ccaaaaatcttcttaacaagttttct

SEQ ID NO: 31757 - DNA, 26 bp, Artificial sequence
  SiRNA target sequence
caaaaatcttcttaacaagttttcta

SEQ ID NO: 31758 - DNA, 26 bp, Artificial sequence
  SiRNA target sequence
aaaaatcttcttaacaagttttctaa

SEQ ID NO: 31759 - DNA, 26 bp, Artificial sequence
  SiRNA target sequence
aaaatcttcttaacaagttttctaac

SEQ ID NO: 31760 - DNA, 26 bp, Artificial sequence
  SiRNA target sequence
aaatcttcttaacaagttttctaaca

SEQ ID NO: 31761 - DNA, 26 bp, Artificial sequence
  SiRNA target sequence
aatcttcttaacaagttttctaacat

SEQ ID NO: 31762 - DNA, 26 bp, Artificial sequence
  SiRNA target sequence
atcttcttaacaagttttctaacata

SEQ ID NO: 31763 - DNA, 26 bp, Artificial sequence
  SiRNA target sequence
tcttcttaacaagttttctaacatac

SEQ ID NO: 31764 - DNA, 26 bp, Artificial sequence
  SiRNA target sequence
cttcttaacaagttttctaacatacg

SEQ ID NO: 31765 - DNA, 26 bp, Artificial sequence
  SiRNA target sequence
ttcttaacaagttttctaacatacgg

SEQ ID NO: 31766 - DNA, 26 bp, Artificial sequence
  SiRNA target sequence
tcttaacaagttttctaacatacggc

SEQ ID NO: 31767 - DNA, 26 bp, Artificial sequence
  SiRNA target sequence
cttaacaagttttctaacatacggca

SEQ ID NO: 31768 - DNA, 26 bp, Artificial sequence
  SiRNA target sequence
ttaacaagttttctaacatacggcat

SEQ ID NO: 31769 - DNA, 26 bp, Artificial sequence
  SiRNA target sequence
taacaagttttctaacatacggcatt

SEQ ID NO: 31770 - DNA, 26 bp, Artificial sequence
  SiRNA target sequence
aacaagttttctaacatacggcattc

SEQ ID NO: 31771 - DNA, 26 bp, Artificial sequence
  SiRNA target sequence
acaagttttctaacatacggcattcg

SEQ ID NO: 31772 - DNA, 26 bp, Artificial sequence
  SiRNA target sequence
caagttttctaacatacggcattcgt

SEQ ID NO: 31773 - DNA, 26 bp, Artificial sequence
  SiRNA target sequence
aagttttctaacatacggcattcgtg

SEQ ID NO: 31774 - DNA, 26 bp, Artificial sequence
  SiRNA target sequence
agttttctaacatacggcattcgtgt

SEQ ID NO: 31775 - DNA, 26 bp, Artificial sequence
  SiRNA target sequence
gttttctaacatacggcattcgtgtc

SEQ ID NO: 31776 - DNA, 26 bp, Artificial sequence
  SiRNA target sequence
ttttctaacatacggcattcgtgtca

SEQ ID NO: 31777 - DNA, 26 bp, Artificial sequence
  SiRNA target sequence
tttctaacatacggcattcgtgtcat

SEQ ID NO: 31778 - DNA, 26 bp, Artificial sequence
  SiRNA target sequence
ttctaacatacggcattcgtgtcatt

SEQ ID NO: 31779 - DNA, 26 bp, Artificial sequence
  SiRNA target sequence
tctaacatacggcattcgtgtcattc

SEQ ID NO: 31780 - DNA, 26 bp, Artificial sequence
  SiRNA target sequence
ctaacatacggcattcgtgtcattcc

SEQ ID NO: 31781 - DNA, 26 bp, Artificial sequence
  SiRNA target sequence
taacatacggcattcgtgtcattcca

SEQ ID NO: 31782 - DNA, 26 bp, Artificial sequence
  SiRNA target sequence
aacatacggcattcgtgtcattccac

SEQ ID NO: 31783 - DNA, 26 bp, Artificial sequence
  SiRNA target sequence
acatacggcattcgtgtcattccacc

SEQ ID NO: 31784 - DNA, 26 bp, Artificial sequence
  SiRNA target sequence
catacggcattcgtgtcattccaccc

SEQ ID NO: 31785 - DNA, 26 bp, Artificial sequence
  SiRNA target sequence
atacggcattcgtgtcattccaccca

SEQ ID NO: 31786 - DNA, 26 bp, Artificial sequence
  SiRNA target sequence
tacggcattcgtgtcattccacccac

SEQ ID NO: 31787 - DNA, 26 bp, Artificial sequence
  SiRNA target sequence
acggcattcgtgtcattccacccaca

SEQ ID NO: 31788 - DNA, 26 bp, Artificial sequence
  SiRNA target sequence
cggcattcgtgtcattccacccacaa

SEQ ID NO: 31789 - DNA, 26 bp, Artificial sequence
  SiRNA target sequence
ggcattcgtgtcattccacccacaag

SEQ ID NO: 31790 - DNA, 26 bp, Artificial sequence
  SiRNA target sequence
gcattcgtgtcattccacccacaagt

SEQ ID NO: 31791 - DNA, 26 bp, Artificial sequence
  SiRNA target sequence
cattcgtgtcattccacccacaagta

SEQ ID NO: 31792 - DNA, 26 bp, Artificial sequence
  SiRNA target sequence
attcgtgtcattccacccacaagtat

SEQ ID NO: 31793 - DNA, 26 bp, Artificial sequence
  SiRNA target sequence
ttcgtgtcattccacccacaagtata

SEQ ID NO: 31794 - DNA, 26 bp, Artificial sequence
  SiRNA target sequence
tcgtgtcattccacccacaagtataa

SEQ ID NO: 31795 - DNA, 26 bp, Artificial sequence
  SiRNA target sequence
cgtgtcattccacccacaagtataac

SEQ ID NO: 31796 - DNA, 26 bp, Artificial sequence
  SiRNA target sequence
gtgtcattccacccacaagtataacg

SEQ ID NO: 31797 - DNA, 26 bp, Artificial sequence
  SiRNA target sequence
tgtcattccacccacaagtataacgt

SEQ ID NO: 31798 - DNA, 26 bp, Artificial sequence
  SiRNA target sequence
gtcattccacccacaagtataacgtg

SEQ ID NO: 31799 - DNA, 26 bp, Artificial sequence
  SiRNA target sequence
tcattccacccacaagtataacgtgt

SEQ ID NO: 31800 - DNA, 26 bp, Artificial sequence
  SiRNA target sequence
cattccacccacaagtataacgtgtt

SEQ ID NO: 31801 - DNA, 26 bp, Artificial sequence
  SiRNA target sequence
attccacccacaagtataacgtgttt

SEQ ID NO: 31802 - DNA, 26 bp, Artificial sequence
  SiRNA target sequence
ttccacccacaagtataacgtgttta

SEQ ID NO: 31803 - DNA, 26 bp, Artificial sequence
  SiRNA target sequence
tccacccacaagtataacgtgtttaa

SEQ ID NO: 31804 - DNA, 26 bp, Artificial sequence
  SiRNA target sequence
ccacccacaagtataacgtgtttaat

SEQ ID NO: 31805 - DNA, 26 bp, Artificial sequence
  SiRNA target sequence
cacccacaagtataacgtgtttaata

SEQ ID NO: 31806 - DNA, 26 bp, Artificial sequence
  SiRNA target sequence
acccacaagtataacgtgtttaatat

SEQ ID NO: 31807 - DNA, 26 bp, Artificial sequence
  SiRNA target sequence
cccacaagtataacgtgtttaatatc

SEQ ID NO: 31808 - DNA, 26 bp, Artificial sequence
  SiRNA target sequence
ccacaagtataacgtgtttaatatca

SEQ ID NO: 31809 - DNA, 26 bp, Artificial sequence
  SiRNA target sequence
cacaagtataacgtgtttaatatcac

SEQ ID NO: 31810 - DNA, 26 bp, Artificial sequence
  SiRNA target sequence
acaagtataacgtgtttaatatcact

SEQ ID NO: 31811 - DNA, 26 bp, Artificial sequence
  SiRNA target sequence
caagtataacgtgtttaatatcactt

SEQ ID NO: 31812 - DNA, 26 bp, Artificial sequence
  SiRNA target sequence
aagtataacgtgtttaatatcacttt

SEQ ID NO: 31813 - DNA, 26 bp, Artificial sequence
  SiRNA target sequence
agtataacgtgtttaatatcactttt

SEQ ID NO: 31814 - DNA, 26 bp, Artificial sequence
  SiRNA target sequence
gtataacgtgtttaatatcactttta

SEQ ID NO: 31815 - DNA, 26 bp, Artificial sequence
  SiRNA target sequence
tataacgtgtttaatatcacttttag

SEQ ID NO: 31816 - DNA, 26 bp, Artificial sequence
  SiRNA target sequence
ataacgtgtttaatatcacttttagt

SEQ ID NO: 31817 - DNA, 26 bp, Artificial sequence
  SiRNA target sequence
taacgtgtttaatatcacttttagtt

SEQ ID NO: 31818 - DNA, 26 bp, Artificial sequence
  SiRNA target sequence
aacgtgtttaatatcacttttagtta

SEQ ID NO: 31819 - DNA, 26 bp, Artificial sequence
  SiRNA target sequence
acgtgtttaatatcacttttagttat

SEQ ID NO: 31820 - DNA, 26 bp, Artificial sequence
  SiRNA target sequence
cgtgtttaatatcacttttagttata

SEQ ID NO: 31821 - DNA, 26 bp, Artificial sequence
  SiRNA target sequence
gtgtttaatatcacttttagttatat

SEQ ID NO: 31822 - DNA, 26 bp, Artificial sequence
  SiRNA target sequence
tgtttaatatcacttttagttatatt

SEQ ID NO: 31823 - DNA, 26 bp, Artificial sequence
  SiRNA target sequence
gtttaatatcacttttagttatattg

SEQ ID NO: 31824 - DNA, 26 bp, Artificial sequence
  SiRNA target sequence
tttaatatcacttttagttatattgg

SEQ ID NO: 31825 - DNA, 26 bp, Artificial sequence
  SiRNA target sequence
ttaatatcacttttagttatattggc

SEQ ID NO: 31826 - DNA, 26 bp, Artificial sequence
  SiRNA target sequence
taatatcacttttagttatattggca

SEQ ID NO: 31827 - DNA, 26 bp, Artificial sequence
  SiRNA target sequence
aatatcacttttagttatattggcat

SEQ ID NO: 31828 - DNA, 26 bp, Artificial sequence
  SiRNA target sequence
atatcacttttagttatattggcatc

SEQ ID NO: 31829 - DNA, 26 bp, Artificial sequence
  SiRNA target sequence
tatcacttttagttatattggcatct

SEQ ID NO: 31830 - DNA, 26 bp, Artificial sequence
  SiRNA target sequence
atcacttttagttatattggcatctc

SEQ ID NO: 31831 - DNA, 26 bp, Artificial sequence
  SiRNA target sequence
tcacttttagttatattggcatctct

SEQ ID NO: 31832 - DNA, 26 bp, Artificial sequence
  SiRNA target sequence
cacttttagttatattggcatctcta

SEQ ID NO: 31833 - DNA, 26 bp, Artificial sequence
  SiRNA target sequence
acttttagttatattggcatctctaa

SEQ ID NO: 31834 - DNA, 26 bp, Artificial sequence
  SiRNA target sequence
cttttagttatattggcatctctaat

SEQ ID NO: 31835 - DNA, 26 bp, Artificial sequence
  SiRNA target sequence
ttttagttatattggcatctctaata

SEQ ID NO: 31836 - DNA, 26 bp, Artificial sequence
  SiRNA target sequence
tttagttatattggcatctctaatag

SEQ ID NO: 31837 - DNA, 26 bp, Artificial sequence
  SiRNA target sequence
ttagttatattggcatctctaatagc

SEQ ID NO: 31838 - DNA, 26 bp, Artificial sequence
  SiRNA target sequence
tagttatattggcatctctaatagct

SEQ ID NO: 31839 - DNA, 26 bp, Artificial sequence
  SiRNA target sequence
agttatattggcatctctaatagctt

SEQ ID NO: 31840 - DNA, 26 bp, Artificial sequence
  SiRNA target sequence
gttatattggcatctctaatagcttt

SEQ ID NO: 31841 - DNA, 26 bp, Artificial sequence
  SiRNA target sequence
ttatattggcatctctaatagcttta

SEQ ID NO: 31842 - DNA, 26 bp, Artificial sequence
  SiRNA target sequence
tatattggcatctctaatagctttaa

SEQ ID NO: 31843 - DNA, 26 bp, Artificial sequence
  SiRNA target sequence
atattggcatctctaatagctttaag

SEQ ID NO: 31844 - DNA, 26 bp, Artificial sequence
  SiRNA target sequence
tattggcatctctaatagctttaaga

SEQ ID NO: 31845 - DNA, 26 bp, Artificial sequence
  SiRNA target sequence
attggcatctctaatagctttaagac

SEQ ID NO: 31846 - DNA, 26 bp, Artificial sequence
  SiRNA target sequence
ttggcatctctaatagctttaagaca

SEQ ID NO: 31847 - DNA, 26 bp, Artificial sequence
  SiRNA target sequence
tggcatctctaatagctttaagacag

SEQ ID NO: 31848 - DNA, 26 bp, Artificial sequence
  SiRNA target sequence
ggcatctctaatagctttaagacagg

SEQ ID NO: 31849 - DNA, 26 bp, Artificial sequence
  SiRNA target sequence
gcatctctaatagctttaagacaggg

SEQ ID NO: 31850 - DNA, 26 bp, Artificial sequence
  SiRNA target sequence
catctctaatagctttaagacagggg

SEQ ID NO: 31851 - DNA, 26 bp, Artificial sequence
  SiRNA target sequence
atctctaatagctttaagacaggggt

SEQ ID NO: 31852 - DNA, 26 bp, Artificial sequence
  SiRNA target sequence
tctctaatagctttaagacaggggtt

SEQ ID NO: 31853 - DNA, 26 bp, Artificial sequence
  SiRNA target sequence
ctctaatagctttaagacaggggttt

SEQ ID NO: 31854 - DNA, 26 bp, Artificial sequence
  SiRNA target sequence
tctaatagctttaagacaggggttta

SEQ ID NO: 31855 - DNA, 26 bp, Artificial sequence
  SiRNA target sequence
ctaatagctttaagacaggggtttat

SEQ ID NO: 31856 - DNA, 26 bp, Artificial sequence
  SiRNA target sequence
taatagctttaagacaggggtttatt

SEQ ID NO: 31857 - DNA, 26 bp, Artificial sequence
  SiRNA target sequence
aatagctttaagacaggggtttattg

SEQ ID NO: 31858 - DNA, 26 bp, Artificial sequence
  SiRNA target sequence
atagctttaagacaggggtttattgt

SEQ ID NO: 31859 - DNA, 26 bp, Artificial sequence
  SiRNA target sequence
tagctttaagacaggggtttattgtt

SEQ ID NO: 31860 - DNA, 26 bp, Artificial sequence
  SiRNA target sequence
agctttaagacaggggtttattgttt

SEQ ID NO: 31861 - DNA, 26 bp, Artificial sequence
  SiRNA target sequence
gctttaagacaggggtttattgtttt

SEQ ID NO: 31862 - DNA, 26 bp, Artificial sequence
  SiRNA target sequence
ctttaagacaggggtttattgttttg

SEQ ID NO: 31863 - DNA, 26 bp, Artificial sequence
  SiRNA target sequence
tttaagacaggggtttattgttttgt

SEQ ID NO: 31864 - DNA, 26 bp, Artificial sequence
  SiRNA target sequence
ttaagacaggggtttattgttttgtc

SEQ ID NO: 31865 - DNA, 26 bp, Artificial sequence
  SiRNA target sequence
taagacaggggtttattgttttgtct

SEQ ID NO: 31866 - DNA, 26 bp, Artificial sequence
  SiRNA target sequence
aagacaggggtttattgttttgtcta

SEQ ID NO: 31867 - DNA, 26 bp, Artificial sequence
  SiRNA target sequence
agacaggggtttattgttttgtctat

SEQ ID NO: 31868 - DNA, 26 bp, Artificial sequence
  SiRNA target sequence
gacaggggtttattgttttgtctatt

SEQ ID NO: 31869 - DNA, 26 bp, Artificial sequence
  SiRNA target sequence
acaggggtttattgttttgtctatta

SEQ ID NO: 31870 - DNA, 26 bp, Artificial sequence
  SiRNA target sequence
caggggtttattgttttgtctattaa

SEQ ID NO: 31871 - DNA, 26 bp, Artificial sequence
  SiRNA target sequence
aggggtttattgttttgtctattaac

SEQ ID NO: 31872 - DNA, 26 bp, Artificial sequence
  SiRNA target sequence
ggggtttattgttttgtctattaact

SEQ ID NO: 31873 - DNA, 26 bp, Artificial sequence
  SiRNA target sequence
gggtttattgttttgtctattaactt

SEQ ID NO: 31874 - DNA, 26 bp, Artificial sequence
  SiRNA target sequence
ggtttattgttttgtctattaacttt

SEQ ID NO: 31875 - DNA, 26 bp, Artificial sequence
  SiRNA target sequence
gtttattgttttgtctattaactttt

SEQ ID NO: 31876 - DNA, 26 bp, Artificial sequence
  SiRNA target sequence
tttattgttttgtctattaacttttt

SEQ ID NO: 31877 - DNA, 26 bp, Artificial sequence
  SiRNA target sequence
ttattgttttgtctattaactttttt

SEQ ID NO: 31878 - DNA, 26 bp, Artificial sequence
  SiRNA target sequence
tattgttttgtctattaacttttttg

SEQ ID NO: 31879 - DNA, 26 bp, Artificial sequence
  SiRNA target sequence
attgttttgtctattaacttttttgt

SEQ ID NO: 31880 - DNA, 26 bp, Artificial sequence
  SiRNA target sequence
ttgttttgtctattaacttttttgta

SEQ ID NO: 31881 - DNA, 26 bp, Artificial sequence
  SiRNA target sequence
tgttttgtctattaacttttttgtaa

SEQ ID NO: 31882 - DNA, 26 bp, Artificial sequence
  SiRNA target sequence
gttttgtctattaacttttttgtaat

SEQ ID NO: 31883 - DNA, 26 bp, Artificial sequence
  SiRNA target sequence
ttttgtctattaacttttttgtaatt

SEQ ID NO: 31884 - DNA, 26 bp, Artificial sequence
  SiRNA target sequence
tttgtctattaacttttttgtaattt

SEQ ID NO: 31885 - DNA, 26 bp, Artificial sequence
  SiRNA target sequence
ttgtctattaacttttttgtaatttt

SEQ ID NO: 31886 - DNA, 26 bp, Artificial sequence
  SiRNA target sequence
tgtctattaacttttttgtaattttt

SEQ ID NO: 31887 - DNA, 26 bp, Artificial sequence
  SiRNA target sequence
gtctattaacttttttgtaatttttt

SEQ ID NO: 31888 - DNA, 26 bp, Artificial sequence
  SiRNA target sequence
tctattaacttttttgtaattttttc

SEQ ID NO: 31889 - DNA, 26 bp, Artificial sequence
  SiRNA target sequence
ctattaacttttttgtaattttttca

SEQ ID NO: 31890 - DNA, 26 bp, Artificial sequence
  SiRNA target sequence
tattaacttttttgtaattttttcaa

SEQ ID NO: 31891 - DNA, 26 bp, Artificial sequence
  SiRNA target sequence
attaacttttttgtaattttttcaaa

SEQ ID NO: 31892 - DNA, 26 bp, Artificial sequence
  SiRNA target sequence
ttaacttttttgtaattttttcaaat

SEQ ID NO: 31893 - DNA, 26 bp, Artificial sequence
  SiRNA target sequence
taacttttttgtaattttttcaaatt

SEQ ID NO: 31894 - DNA, 26 bp, Artificial sequence
  SiRNA target sequence
aacttttttgtaattttttcaaattc

SEQ ID NO: 31895 - DNA, 26 bp, Artificial sequence
  SiRNA target sequence
acttttttgtaattttttcaaattcg

SEQ ID NO: 31896 - DNA, 26 bp, Artificial sequence
  SiRNA target sequence
cttttttgtaattttttcaaattcgt

SEQ ID NO: 31897 - DNA, 26 bp, Artificial sequence
  SiRNA target sequence
ttttttgtaattttttcaaattcgtc

SEQ ID NO: 31898 - DNA, 26 bp, Artificial sequence
  SiRNA target sequence
tttttgtaattttttcaaattcgtcg

SEQ ID NO: 31899 - DNA, 26 bp, Artificial sequence
  SiRNA target sequence
ttttgtaattttttcaaattcgtcgc

SEQ ID NO: 31900 - DNA, 26 bp, Artificial sequence
  SiRNA target sequence
tttgtaattttttcaaattcgtcgcg

SEQ ID NO: 31901 - DNA, 26 bp, Artificial sequence
  SiRNA target sequence
ttgtaattttttcaaattcgtcgcgt

SEQ ID NO: 31902 - DNA, 26 bp, Artificial sequence
  SiRNA target sequence
tgtaattttttcaaattcgtcgcgtg

SEQ ID NO: 31903 - DNA, 26 bp, Artificial sequence
  SiRNA target sequence
gtaattttttcaaattcgtcgcgtgt

SEQ ID NO: 31904 - DNA, 26 bp, Artificial sequence
  SiRNA target sequence
taattttttcaaattcgtcgcgtgta

SEQ ID NO: 31905 - DNA, 26 bp, Artificial sequence
  SiRNA target sequence
aattttttcaaattcgtcgcgtgtaa

SEQ ID NO: 31906 - DNA, 26 bp, Artificial sequence
  SiRNA target sequence
attttttcaaattcgtcgcgtgtaat

SEQ ID NO: 31907 - DNA, 26 bp, Artificial sequence
  SiRNA target sequence
ttttttcaaattcgtcgcgtgtaatt

SEQ ID NO: 31908 - DNA, 26 bp, Artificial sequence
  SiRNA target sequence
tttttcaaattcgtcgcgtgtaatta

SEQ ID NO: 31909 - DNA, 26 bp, Artificial sequence
  SiRNA target sequence
ttttcaaattcgtcgcgtgtaattac

SEQ ID NO: 31910 - DNA, 26 bp, Artificial sequence
  SiRNA target sequence
tttcaaattcgtcgcgtgtaattacc

SEQ ID NO: 31911 - DNA, 26 bp, Artificial sequence
  SiRNA target sequence
ttcaaattcgtcgcgtgtaattacct

SEQ ID NO: 31912 - DNA, 26 bp, Artificial sequence
  SiRNA target sequence
tcaaattcgtcgcgtgtaattacctc

SEQ ID NO: 31913 - DNA, 26 bp, Artificial sequence
  SiRNA target sequence
caaattcgtcgcgtgtaattacctct

SEQ ID NO: 31914 - DNA, 26 bp, Artificial sequence
  SiRNA target sequence
aaattcgtcgcgtgtaattacctctt

SEQ ID NO: 31915 - DNA, 26 bp, Artificial sequence
  SiRNA target sequence
aattcgtcgcgtgtaattacctcttt

SEQ ID NO: 31916 - DNA, 26 bp, Artificial sequence
  SiRNA target sequence
attcgtcgcgtgtaattacctctttt

SEQ ID NO: 31917 - DNA, 26 bp, Artificial sequence
  SiRNA target sequence
ttcgtcgcgtgtaattacctctttta

SEQ ID NO: 31918 - DNA, 26 bp, Artificial sequence
  SiRNA target sequence
tcgtcgcgtgtaattacctcttttaa

SEQ ID NO: 31919 - DNA, 26 bp, Artificial sequence
  SiRNA target sequence
cgtcgcgtgtaattacctcttttaag

SEQ ID NO: 31920 - DNA, 26 bp, Artificial sequence
  SiRNA target sequence
gtcgcgtgtaattacctcttttaagt

SEQ ID NO: 31921 - DNA, 26 bp, Artificial sequence
  SiRNA target sequence
tcgcgtgtaattacctcttttaagtg

SEQ ID NO: 31922 - DNA, 26 bp, Artificial sequence
  SiRNA target sequence
cgcgtgtaattacctcttttaagtga

SEQ ID NO: 31923 - DNA, 26 bp, Artificial sequence
  SiRNA target sequence
gcgtgtaattacctcttttaagtgat

SEQ ID NO: 31924 - DNA, 26 bp, Artificial sequence
  SiRNA target sequence
cgtgtaattacctcttttaagtgata

SEQ ID NO: 31925 - DNA, 26 bp, Artificial sequence
  SiRNA target sequence
gtgtaattacctcttttaagtgataa

SEQ ID NO: 31926 - DNA, 26 bp, Artificial sequence
  SiRNA target sequence
tgtaattacctcttttaagtgataat

SEQ ID NO: 31927 - DNA, 26 bp, Artificial sequence
  SiRNA target sequence
gtaattacctcttttaagtgataatt

SEQ ID NO: 31928 - DNA, 26 bp, Artificial sequence
  SiRNA target sequence
taattacctcttttaagtgataattc

SEQ ID NO: 31929 - DNA, 26 bp, Artificial sequence
  SiRNA target sequence
aattacctcttttaagtgataattct

SEQ ID NO: 31930 - DNA, 26 bp, Artificial sequence
  SiRNA target sequence
attacctcttttaagtgataattctt

SEQ ID NO: 31931 - DNA, 26 bp, Artificial sequence
  SiRNA target sequence
ttacctcttttaagtgataattcttt

SEQ ID NO: 31932 - DNA, 26 bp, Artificial sequence
  SiRNA target sequence
tacctcttttaagtgataattctttt

SEQ ID NO: 31933 - DNA, 26 bp, Artificial sequence
  SiRNA target sequence
acctcttttaagtgataattcttttt

SEQ ID NO: 31934 - DNA, 26 bp, Artificial sequence
  SiRNA target sequence
cctcttttaagtgataattcttttta

SEQ ID NO: 31935 - DNA, 26 bp, Artificial sequence
  SiRNA target sequence
ctcttttaagtgataattctttttac

SEQ ID NO: 31936 - DNA, 26 bp, Artificial sequence
  SiRNA target sequence
tcttttaagtgataattctttttact

SEQ ID NO: 31937 - DNA, 26 bp, Artificial sequence
  SiRNA target sequence
cttttaagtgataattctttttacta

SEQ ID NO: 31938 - DNA, 26 bp, Artificial sequence
  SiRNA target sequence
ttttaagtgataattctttttactat

SEQ ID NO: 31939 - DNA, 26 bp, Artificial sequence
  SiRNA target sequence
tttaagtgataattctttttactatc

SEQ ID NO: 31940 - DNA, 26 bp, Artificial sequence
  SiRNA target sequence
ttaagtgataattctttttactatcg

SEQ ID NO: 31941 - DNA, 26 bp, Artificial sequence
  SiRNA target sequence
taagtgataattctttttactatcgt

SEQ ID NO: 31942 - DNA, 26 bp, Artificial sequence
  SiRNA target sequence
aagtgataattctttttactatcgtt

SEQ ID NO: 31943 - DNA, 26 bp, Artificial sequence
  SiRNA target sequence
agtgataattctttttactatcgtta

SEQ ID NO: 31944 - DNA, 26 bp, Artificial sequence
  SiRNA target sequence
gtgataattctttttactatcgttat

SEQ ID NO: 31945 - DNA, 26 bp, Artificial sequence
  SiRNA target sequence
tgataattctttttactatcgttata

SEQ ID NO: 31946 - DNA, 26 bp, Artificial sequence
  SiRNA target sequence
gataattctttttactatcgttataa

SEQ ID NO: 31947 - DNA, 26 bp, Artificial sequence
  SiRNA target sequence
ataattctttttactatcgttataaa

SEQ ID NO: 31948 - DNA, 26 bp, Artificial sequence
  SiRNA target sequence
taattctttttactatcgttataaat

SEQ ID NO: 31949 - DNA, 26 bp, Artificial sequence
  SiRNA target sequence
aattctttttactatcgttataaata

SEQ ID NO: 31950 - DNA, 26 bp, Artificial sequence
  SiRNA target sequence
attctttttactatcgttataaatat

SEQ ID NO: 31951 - DNA, 26 bp, Artificial sequence
  SiRNA target sequence
ttctttttactatcgttataaatata

SEQ ID NO: 31952 - DNA, 26 bp, Artificial sequence
  SiRNA target sequence
tctttttactatcgttataaatatac

SEQ ID NO: 31953 - DNA, 26 bp, Artificial sequence
  SiRNA target sequence
ctttttactatcgttataaatatacg

SEQ ID NO: 31954 - DNA, 26 bp, Artificial sequence
  SiRNA target sequence
tttttactatcgttataaatatacgg

SEQ ID NO: 31955 - DNA, 26 bp, Artificial sequence
  SiRNA target sequence
ttttactatcgttataaatatacgga

SEQ ID NO: 31956 - DNA, 26 bp, Artificial sequence
  SiRNA target sequence
tttactatcgttataaatatacggaa

SEQ ID NO: 31957 - DNA, 26 bp, Artificial sequence
  SiRNA target sequence
ttactatcgttataaatatacggaat

SEQ ID NO: 31958 - DNA, 26 bp, Artificial sequence
  SiRNA target sequence
tactatcgttataaatatacggaata

SEQ ID NO: 31959 - DNA, 26 bp, Artificial sequence
  SiRNA target sequence
actatcgttataaatatacggaatat

SEQ ID NO: 31960 - DNA, 26 bp, Artificial sequence
  SiRNA target sequence
ctatcgttataaatatacggaatatt

SEQ ID NO: 31961 - DNA, 26 bp, Artificial sequence
  SiRNA target sequence
tatcgttataaatatacggaatatta

SEQ ID NO: 31962 - DNA, 26 bp, Artificial sequence
  SiRNA target sequence
atcgttataaatatacggaatattaa

SEQ ID NO: 31963 - DNA, 26 bp, Artificial sequence
  SiRNA target sequence
tcgttataaatatacggaatattaat

SEQ ID NO: 31964 - DNA, 26 bp, Artificial sequence
  SiRNA target sequence
cgttataaatatacggaatattaatt

SEQ ID NO: 31965 - DNA, 26 bp, Artificial sequence
  SiRNA target sequence
gttataaatatacggaatattaattt

SEQ ID NO: 31966 - DNA, 26 bp, Artificial sequence
  SiRNA target sequence
ttataaatatacggaatattaatttc

SEQ ID NO: 31967 - DNA, 26 bp, Artificial sequence
  SiRNA target sequence
tataaatatacggaatattaatttca

SEQ ID NO: 31968 - DNA, 26 bp, Artificial sequence
  SiRNA target sequence
ataaatatacggaatattaatttcag

SEQ ID NO: 31969 - DNA, 26 bp, Artificial sequence
  SiRNA target sequence
taaatatacggaatattaatttcaga

SEQ ID NO: 31970 - DNA, 26 bp, Artificial sequence
  SiRNA target sequence
aaatatacggaatattaatttcagac

SEQ ID NO: 31971 - DNA, 26 bp, Artificial sequence
  SiRNA target sequence
aatatacggaatattaatttcagacg

SEQ ID NO: 31972 - DNA, 26 bp, Artificial sequence
  SiRNA target sequence
atatacggaatattaatttcagacga

SEQ ID NO: 31973 - DNA, 26 bp, Artificial sequence
  SiRNA target sequence
tatacggaatattaatttcagacgaa

SEQ ID NO: 31974 - DNA, 26 bp, Artificial sequence
  SiRNA target sequence
atacggaatattaatttcagacgaaa

SEQ ID NO: 31975 - DNA, 26 bp, Artificial sequence
  SiRNA target sequence
tacggaatattaatttcagacgaaag

SEQ ID NO: 31976 - DNA, 26 bp, Artificial sequence
  SiRNA target sequence
acggaatattaatttcagacgaaaga

SEQ ID NO: 31977 - DNA, 26 bp, Artificial sequence
  SiRNA target sequence
cggaatattaatttcagacgaaagat

SEQ ID NO: 31978 - DNA, 26 bp, Artificial sequence
  SiRNA target sequence
ggaatattaatttcagacgaaagatt

SEQ ID NO: 31979 - DNA, 26 bp, Artificial sequence
  SiRNA target sequence
gaatattaatttcagacgaaagatta

SEQ ID NO: 31980 - DNA, 26 bp, Artificial sequence
  SiRNA target sequence
aatattaatttcagacgaaagattag

SEQ ID NO: 31981 - DNA, 26 bp, Artificial sequence
  SiRNA target sequence
atattaatttcagacgaaagattaga

SEQ ID NO: 31982 - DNA, 26 bp, Artificial sequence
  SiRNA target sequence
tattaatttcagacgaaagattagac

SEQ ID NO: 31983 - DNA, 26 bp, Artificial sequence
  SiRNA target sequence
attaatttcagacgaaagattagacg

SEQ ID NO: 31984 - DNA, 26 bp, Artificial sequence
  SiRNA target sequence
ttaatttcagacgaaagattagacga

SEQ ID NO: 31985 - DNA, 26 bp, Artificial sequence
  SiRNA target sequence
taatttcagacgaaagattagacgac

SEQ ID NO: 31986 - DNA, 26 bp, Artificial sequence
  SiRNA target sequence
aatttcagacgaaagattagacgaca

SEQ ID NO: 31987 - DNA, 26 bp, Artificial sequence
  SiRNA target sequence
atttcagacgaaagattagacgacag

SEQ ID NO: 31988 - DNA, 26 bp, Artificial sequence
  SiRNA target sequence
tttcagacgaaagattagacgacagt

SEQ ID NO: 31989 - DNA, 26 bp, Artificial sequence
  SiRNA target sequence
ttcagacgaaagattagacgacagtt

SEQ ID NO: 31990 - DNA, 26 bp, Artificial sequence
  SiRNA target sequence
tcagacgaaagattagacgacagttc

SEQ ID NO: 31991 - DNA, 26 bp, Artificial sequence
  SiRNA target sequence
cagacgaaagattagacgacagttct

SEQ ID NO: 31992 - DNA, 26 bp, Artificial sequence
  SiRNA target sequence
agacgaaagattagacgacagttctt

SEQ ID NO: 31993 - DNA, 26 bp, Artificial sequence
  SiRNA target sequence
gacgaaagattagacgacagttcttt

SEQ ID NO: 31994 - DNA, 26 bp, Artificial sequence
  SiRNA target sequence
acgaaagattagacgacagttctttt

SEQ ID NO: 31995 - DNA, 26 bp, Artificial sequence
  SiRNA target sequence
cgaaagattagacgacagttcttttt

SEQ ID NO: 31996 - DNA, 26 bp, Artificial sequence
  SiRNA target sequence
gaaagattagacgacagttctttttt

SEQ ID NO: 31997 - DNA, 26 bp, Artificial sequence
  SiRNA target sequence
aaagattagacgacagttcttttttc

SEQ ID NO: 31998 - DNA, 26 bp, Artificial sequence
  SiRNA target sequence
aagattagacgacagttcttttttca

SEQ ID NO: 31999 - DNA, 26 bp, Artificial sequence
  SiRNA target sequence
agattagacgacagttcttttttcat

SEQ ID NO: 32000 - DNA, 26 bp, Artificial sequence
  SiRNA target sequence
gattagacgacagttcttttttcatt

SEQ ID NO: 32001 - DNA, 26 bp, Artificial sequence
  SiRNA target sequence
attagacgacagttcttttttcattt

SEQ ID NO: 32002 - DNA, 26 bp, Artificial sequence
  SiRNA target sequence
ttagacgacagttcttttttcatttt

SEQ ID NO: 32003 - DNA, 26 bp, Artificial sequence
  SiRNA target sequence
tagacgacagttcttttttcattttt

SEQ ID NO: 32004 - DNA, 26 bp, Artificial sequence
  SiRNA target sequence
agacgacagttcttttttcatttttt

SEQ ID NO: 32005 - DNA, 26 bp, Artificial sequence
  SiRNA target sequence
gacgacagttcttttttcattttttc

SEQ ID NO: 32006 - DNA, 26 bp, Artificial sequence
  SiRNA target sequence
acgacagttcttttttcattttttcc

SEQ ID NO: 32007 - DNA, 26 bp, Artificial sequence
  SiRNA target sequence
cgacagttcttttttcattttttccg

SEQ ID NO: 32008 - DNA, 26 bp, Artificial sequence
  SiRNA target sequence
gacagttcttttttcattttttccgc

SEQ ID NO: 32009 - DNA, 26 bp, Artificial sequence
  SiRNA target sequence
acagttcttttttcattttttccgct

SEQ ID NO: 32010 - DNA, 26 bp, Artificial sequence
  SiRNA target sequence
cagttcttttttcattttttccgctg

SEQ ID NO: 32011 - DNA, 26 bp, Artificial sequence
  SiRNA target sequence
agttcttttttcattttttccgctgc

SEQ ID NO: 32012 - DNA, 26 bp, Artificial sequence
  SiRNA target sequence
gttcttttttcattttttccgctgct

SEQ ID NO: 32013 - DNA, 26 bp, Artificial sequence
  SiRNA target sequence
ttcttttttcattttttccgctgctt

SEQ ID NO: 32014 - DNA, 26 bp, Artificial sequence
  SiRNA target sequence
tcttttttcattttttccgctgcttc

SEQ ID NO: 32015 - DNA, 26 bp, Artificial sequence
  SiRNA target sequence
cttttttcattttttccgctgcttct

SEQ ID NO: 32016 - DNA, 26 bp, Artificial sequence
  SiRNA target sequence
ttttttcattttttccgctgcttctt

SEQ ID NO: 32017 - DNA, 26 bp, Artificial sequence
  SiRNA target sequence
tttttcattttttccgctgcttcttt

SEQ ID NO: 32018 - DNA, 26 bp, Artificial sequence
  SiRNA target sequence
ttttcattttttccgctgcttcttta

SEQ ID NO: 32019 - DNA, 26 bp, Artificial sequence
  SiRNA target sequence
tttcattttttccgctgcttctttaa

SEQ ID NO: 32020 - DNA, 26 bp, Artificial sequence
  SiRNA target sequence
ttcattttttccgctgcttctttaat

SEQ ID NO: 32021 - DNA, 26 bp, Artificial sequence
  SiRNA target sequence
tcattttttccgctgcttctttaatt

SEQ ID NO: 32022 - DNA, 26 bp, Artificial sequence
  SiRNA target sequence
cattttttccgctgcttctttaattc

SEQ ID NO: 32023 - DNA, 26 bp, Artificial sequence
  SiRNA target sequence
attttttccgctgcttctttaattct

SEQ ID NO: 32024 - DNA, 26 bp, Artificial sequence
  SiRNA target sequence
ttttttccgctgcttctttaattcta

SEQ ID NO: 32025 - DNA, 26 bp, Artificial sequence
  SiRNA target sequence
tttttccgctgcttctttaattctat

SEQ ID NO: 32026 - DNA, 26 bp, Artificial sequence
  SiRNA target sequence
ttttccgctgcttctttaattctatt

SEQ ID NO: 32027 - DNA, 26 bp, Artificial sequence
  SiRNA target sequence
tttccgctgcttctttaattctatta

SEQ ID NO: 32028 - DNA, 26 bp, Artificial sequence
  SiRNA target sequence
ttccgctgcttctttaattctattat

SEQ ID NO: 32029 - DNA, 26 bp, Artificial sequence
  SiRNA target sequence
tccgctgcttctttaattctattata

SEQ ID NO: 32030 - DNA, 26 bp, Artificial sequence
  SiRNA target sequence
ccgctgcttctttaattctattataa

SEQ ID NO: 32031 - DNA, 26 bp, Artificial sequence
  SiRNA target sequence
cgctgcttctttaattctattataac

SEQ ID NO: 32032 - DNA, 26 bp, Artificial sequence
  SiRNA target sequence
gctgcttctttaattctattataaca

SEQ ID NO: 32033 - DNA, 26 bp, Artificial sequence
  SiRNA target sequence
ctgcttctttaattctattataacaa

SEQ ID NO: 32034 - DNA, 26 bp, Artificial sequence
  SiRNA target sequence
tgcttctttaattctattataacaag

SEQ ID NO: 32035 - DNA, 26 bp, Artificial sequence
  SiRNA target sequence
gcttctttaattctattataacaaga

SEQ ID NO: 32036 - DNA, 26 bp, Artificial sequence
  SiRNA target sequence
cttctttaattctattataacaagaa

SEQ ID NO: 32037 - DNA, 26 bp, Artificial sequence
  SiRNA target sequence
ttctttaattctattataacaagaat

SEQ ID NO: 32038 - DNA, 26 bp, Artificial sequence
  SiRNA target sequence
tctttaattctattataacaagaatc

SEQ ID NO: 32039 - DNA, 26 bp, Artificial sequence
  SiRNA target sequence
ctttaattctattataacaagaatcg

SEQ ID NO: 32040 - DNA, 26 bp, Artificial sequence
  SiRNA target sequence
tttaattctattataacaagaatcgt

SEQ ID NO: 32041 - DNA, 26 bp, Artificial sequence
  SiRNA target sequence
ttaattctattataacaagaatcgtg

SEQ ID NO: 32042 - DNA, 26 bp, Artificial sequence
  SiRNA target sequence
taattctattataacaagaatcgtgt

SEQ ID NO: 32043 - DNA, 26 bp, Artificial sequence
  SiRNA target sequence
aattctattataacaagaatcgtgtt

SEQ ID NO: 32044 - DNA, 26 bp, Artificial sequence
  SiRNA target sequence
attctattataacaagaatcgtgttt

SEQ ID NO: 32045 - DNA, 26 bp, Artificial sequence
  SiRNA target sequence
ttctattataacaagaatcgtgttta

SEQ ID NO: 32046 - DNA, 26 bp, Artificial sequence
  SiRNA target sequence
tctattataacaagaatcgtgtttaa

SEQ ID NO: 32047 - DNA, 26 bp, Artificial sequence
  SiRNA target sequence
ctattataacaagaatcgtgtttaag

SEQ ID NO: 32048 - DNA, 26 bp, Artificial sequence
  SiRNA target sequence
tattataacaagaatcgtgtttaagt

SEQ ID NO: 32049 - DNA, 26 bp, Artificial sequence
  SiRNA target sequence
attataacaagaatcgtgtttaagta

SEQ ID NO: 32050 - DNA, 26 bp, Artificial sequence
  SiRNA target sequence
ttataacaagaatcgtgtttaagtaa

SEQ ID NO: 32051 - DNA, 26 bp, Artificial sequence
  SiRNA target sequence
tataacaagaatcgtgtttaagtaaa

SEQ ID NO: 32052 - DNA, 26 bp, Artificial sequence
  SiRNA target sequence
ataacaagaatcgtgtttaagtaaat

SEQ ID NO: 32053 - DNA, 26 bp, Artificial sequence
  SiRNA target sequence
taacaagaatcgtgtttaagtaaatc

SEQ ID NO: 32054 - DNA, 26 bp, Artificial sequence
  SiRNA target sequence
aacaagaatcgtgtttaagtaaatca

SEQ ID NO: 32055 - DNA, 26 bp, Artificial sequence
  SiRNA target sequence
acaagaatcgtgtttaagtaaatcaa

SEQ ID NO: 32056 - DNA, 26 bp, Artificial sequence
  SiRNA target sequence
caagaatcgtgtttaagtaaatcaat

SEQ ID NO: 32057 - DNA, 26 bp, Artificial sequence
  SiRNA target sequence
aagaatcgtgtttaagtaaatcaatt

SEQ ID NO: 32058 - DNA, 26 bp, Artificial sequence
  SiRNA target sequence
agaatcgtgtttaagtaaatcaattc

SEQ ID NO: 32059 - DNA, 26 bp, Artificial sequence
  SiRNA target sequence
gaatcgtgtttaagtaaatcaattcc

SEQ ID NO: 32060 - DNA, 26 bp, Artificial sequence
  SiRNA target sequence
aatcgtgtttaagtaaatcaattcct

SEQ ID NO: 32061 - DNA, 26 bp, Artificial sequence
  SiRNA target sequence
atcgtgtttaagtaaatcaattcctg

SEQ ID NO: 32062 - DNA, 26 bp, Artificial sequence
  SiRNA target sequence
tcgtgtttaagtaaatcaattcctgt

SEQ ID NO: 32063 - DNA, 26 bp, Artificial sequence
  SiRNA target sequence
cgtgtttaagtaaatcaattcctgtt

SEQ ID NO: 32064 - DNA, 26 bp, Artificial sequence
  SiRNA target sequence
gtgtttaagtaaatcaattcctgttc

SEQ ID NO: 32065 - DNA, 26 bp, Artificial sequence
  SiRNA target sequence
tgtttaagtaaatcaattcctgttct

SEQ ID NO: 32066 - DNA, 26 bp, Artificial sequence
  SiRNA target sequence
gtttaagtaaatcaattcctgttcta

SEQ ID NO: 32067 - DNA, 26 bp, Artificial sequence
  SiRNA target sequence
tttaagtaaatcaattcctgttctac

SEQ ID NO: 32068 - DNA, 26 bp, Artificial sequence
  SiRNA target sequence
ttaagtaaatcaattcctgttctact

SEQ ID NO: 32069 - DNA, 26 bp, Artificial sequence
  SiRNA target sequence
taagtaaatcaattcctgttctactt

SEQ ID NO: 32070 - DNA, 26 bp, Artificial sequence
  SiRNA target sequence
aagtaaatcaattcctgttctacttt

SEQ ID NO: 32071 - DNA, 26 bp, Artificial sequence
  SiRNA target sequence
agtaaatcaattcctgttctactttt

SEQ ID NO: 32072 - DNA, 26 bp, Artificial sequence
  SiRNA target sequence
gtaaatcaattcctgttctactttta

SEQ ID NO: 32073 - DNA, 26 bp, Artificial sequence
  SiRNA target sequence
taaatcaattcctgttctacttttaa

SEQ ID NO: 32074 - DNA, 26 bp, Artificial sequence
  SiRNA target sequence
aaatcaattcctgttctacttttaaa

SEQ ID NO: 32075 - DNA, 26 bp, Artificial sequence
  SiRNA target sequence
aatcaattcctgttctacttttaaat

SEQ ID NO: 32076 - DNA, 26 bp, Artificial sequence
  SiRNA target sequence
atcaattcctgttctacttttaaatt

SEQ ID NO: 32077 - DNA, 26 bp, Artificial sequence
  SiRNA target sequence
tcaattcctgttctacttttaaattt

SEQ ID NO: 32078 - DNA, 26 bp, Artificial sequence
  SiRNA target sequence
caattcctgttctacttttaaatttt

SEQ ID NO: 32079 - DNA, 26 bp, Artificial sequence
  SiRNA target sequence
aattcctgttctacttttaaattttt

SEQ ID NO: 32080 - DNA, 26 bp, Artificial sequence
  SiRNA target sequence
attcctgttctacttttaaatttttc

SEQ ID NO: 32081 - DNA, 26 bp, Artificial sequence
  SiRNA target sequence
ttcctgttctacttttaaatttttca

SEQ ID NO: 32082 - DNA, 26 bp, Artificial sequence
  SiRNA target sequence
tcctgttctacttttaaatttttcat

SEQ ID NO: 32083 - DNA, 26 bp, Artificial sequence
  SiRNA target sequence
cctgttctacttttaaatttttcatt

SEQ ID NO: 32084 - DNA, 26 bp, Artificial sequence
  SiRNA target sequence
ctgttctacttttaaatttttcatta

SEQ ID NO: 32085 - DNA, 26 bp, Artificial sequence
  SiRNA target sequence
tgttctacttttaaatttttcattaa

SEQ ID NO: 32086 - DNA, 26 bp, Artificial sequence
  SiRNA target sequence
gttctacttttaaatttttcattaat

SEQ ID NO: 32087 - DNA, 26 bp, Artificial sequence
  SiRNA target sequence
ttctacttttaaatttttcattaata

SEQ ID NO: 32088 - DNA, 26 bp, Artificial sequence
  SiRNA target sequence
tctacttttaaatttttcattaatat

SEQ ID NO: 32089 - DNA, 26 bp, Artificial sequence
  SiRNA target sequence
ctacttttaaatttttcattaatata

SEQ ID NO: 32090 - DNA, 26 bp, Artificial sequence
  SiRNA target sequence
tacttttaaatttttcattaatataa

SEQ ID NO: 32091 - DNA, 26 bp, Artificial sequence
  SiRNA target sequence
acttttaaatttttcattaatataat

SEQ ID NO: 32092 - DNA, 26 bp, Artificial sequence
  SiRNA target sequence
cttttaaatttttcattaatataatc

SEQ ID NO: 32093 - DNA, 26 bp, Artificial sequence
  SiRNA target sequence
ttttaaatttttcattaatataatct

SEQ ID NO: 32094 - DNA, 26 bp, Artificial sequence
  SiRNA target sequence
tttaaatttttcattaatataatcta

SEQ ID NO: 32095 - DNA, 26 bp, Artificial sequence
  SiRNA target sequence
ttaaatttttcattaatataatctac

SEQ ID NO: 32096 - DNA, 26 bp, Artificial sequence
  SiRNA target sequence
taaatttttcattaatataatctact

SEQ ID NO: 32097 - DNA, 26 bp, Artificial sequence
  SiRNA target sequence
aaatttttcattaatataatctacta

SEQ ID NO: 32098 - DNA, 26 bp, Artificial sequence
  SiRNA target sequence
aatttttcattaatataatctactaa

SEQ ID NO: 32099 - DNA, 26 bp, Artificial sequence
  SiRNA target sequence
atttttcattaatataatctactaaa

SEQ ID NO: 32100 - DNA, 26 bp, Artificial sequence
  SiRNA target sequence
tttttcattaatataatctactaaag

SEQ ID NO: 32101 - DNA, 26 bp, Artificial sequence
  SiRNA target sequence
ttttcattaatataatctactaaagt

SEQ ID NO: 32102 - DNA, 26 bp, Artificial sequence
  SiRNA target sequence
tttcattaatataatctactaaagta

SEQ ID NO: 32103 - DNA, 26 bp, Artificial sequence
  SiRNA target sequence
ttcattaatataatctactaaagtat

SEQ ID NO: 32104 - DNA, 26 bp, Artificial sequence
  SiRNA target sequence
tcattaatataatctactaaagtatt

SEQ ID NO: 32105 - DNA, 26 bp, Artificial sequence
  SiRNA target sequence
cattaatataatctactaaagtatta

SEQ ID NO: 32106 - DNA, 26 bp, Artificial sequence
  SiRNA target sequence
attaatataatctactaaagtattat

SEQ ID NO: 32107 - DNA, 26 bp, Artificial sequence
  SiRNA target sequence
ttaatataatctactaaagtattatc

SEQ ID NO: 32108 - DNA, 26 bp, Artificial sequence
  SiRNA target sequence
taatataatctactaaagtattatcc

SEQ ID NO: 32109 - DNA, 26 bp, Artificial sequence
  SiRNA target sequence
aatataatctactaaagtattatcca

SEQ ID NO: 32110 - DNA, 26 bp, Artificial sequence
  SiRNA target sequence
atataatctactaaagtattatccaa

SEQ ID NO: 32111 - DNA, 26 bp, Artificial sequence
  SiRNA target sequence
tataatctactaaagtattatccaaa

SEQ ID NO: 32112 - DNA, 26 bp, Artificial sequence
  SiRNA target sequence
ataatctactaaagtattatccaaat

SEQ ID NO: 32113 - DNA, 26 bp, Artificial sequence
  SiRNA target sequence
taatctactaaagtattatccaaatc

SEQ ID NO: 32114 - DNA, 26 bp, Artificial sequence
  SiRNA target sequence
aatctactaaagtattatccaaatct

SEQ ID NO: 32115 - DNA, 26 bp, Artificial sequence
  SiRNA target sequence
atctactaaagtattatccaaatctt

SEQ ID NO: 32116 - DNA, 26 bp, Artificial sequence
  SiRNA target sequence
tctactaaagtattatccaaatcttc

SEQ ID NO: 32117 - DNA, 26 bp, Artificial sequence
  SiRNA target sequence
ctactaaagtattatccaaatcttct

SEQ ID NO: 32118 - DNA, 26 bp, Artificial sequence
  SiRNA target sequence
tactaaagtattatccaaatcttctc

SEQ ID NO: 32119 - DNA, 26 bp, Artificial sequence
  SiRNA target sequence
actaaagtattatccaaatcttctcc

SEQ ID NO: 32120 - DNA, 26 bp, Artificial sequence
  SiRNA target sequence
ctaaagtattatccaaatcttctcct

SEQ ID NO: 32121 - DNA, 26 bp, Artificial sequence
  SiRNA target sequence
taaagtattatccaaatcttctcctc

SEQ ID NO: 32122 - DNA, 26 bp, Artificial sequence
  SiRNA target sequence
aaagtattatccaaatcttctcctcc

SEQ ID NO: 32123 - DNA, 26 bp, Artificial sequence
  SiRNA target sequence
aagtattatccaaatcttctcctcct

SEQ ID NO: 32124 - DNA, 26 bp, Artificial sequence
  SiRNA target sequence
agtattatccaaatcttctcctccta

SEQ ID NO: 32125 - DNA, 26 bp, Artificial sequence
  SiRNA target sequence
gtattatccaaatcttctcctcctaa

SEQ ID NO: 32126 - DNA, 26 bp, Artificial sequence
  SiRNA target sequence
tattatccaaatcttctcctcctaaa

SEQ ID NO: 32127 - DNA, 26 bp, Artificial sequence
  SiRNA target sequence
attatccaaatcttctcctcctaaaa

SEQ ID NO: 32128 - DNA, 26 bp, Artificial sequence
  SiRNA target sequence
ttatccaaatcttctcctcctaaaaa

SEQ ID NO: 32129 - DNA, 26 bp, Artificial sequence
  SiRNA target sequence
tatccaaatcttctcctcctaaaaaa

SEQ ID NO: 32130 - DNA, 26 bp, Artificial sequence
  SiRNA target sequence
atccaaatcttctcctcctaaaaaag

SEQ ID NO: 32131 - DNA, 26 bp, Artificial sequence
  SiRNA target sequence
tccaaatcttctcctcctaaaaaagt

SEQ ID NO: 32132 - DNA, 26 bp, Artificial sequence
  SiRNA target sequence
ccaaatcttctcctcctaaaaaagta

SEQ ID NO: 32133 - DNA, 26 bp, Artificial sequence
  SiRNA target sequence
caaatcttctcctcctaaaaaagtat

SEQ ID NO: 32134 - DNA, 26 bp, Artificial sequence
  SiRNA target sequence
aaatcttctcctcctaaaaaagtatt

SEQ ID NO: 32135 - DNA, 26 bp, Artificial sequence
  SiRNA target sequence
aatcttctcctcctaaaaaagtattt

SEQ ID NO: 32136 - DNA, 26 bp, Artificial sequence
  SiRNA target sequence
atcttctcctcctaaaaaagtatttc

SEQ ID NO: 32137 - DNA, 26 bp, Artificial sequence
  SiRNA target sequence
tcttctcctcctaaaaaagtatttcc

SEQ ID NO: 32138 - DNA, 26 bp, Artificial sequence
  SiRNA target sequence
cttctcctcctaaaaaagtatttccg

SEQ ID NO: 32139 - DNA, 26 bp, Artificial sequence
  SiRNA target sequence
ttctcctcctaaaaaagtatttccgt

SEQ ID NO: 32140 - DNA, 26 bp, Artificial sequence
  SiRNA target sequence
tctcctcctaaaaaagtatttccgtt

SEQ ID NO: 32141 - DNA, 26 bp, Artificial sequence
  SiRNA target sequence
ctcctcctaaaaaagtatttccgtta

SEQ ID NO: 32142 - DNA, 26 bp, Artificial sequence
  SiRNA target sequence
tcctcctaaaaaagtatttccgttag

SEQ ID NO: 32143 - DNA, 26 bp, Artificial sequence
  SiRNA target sequence
cctcctaaaaaagtatttccgttagt

SEQ ID NO: 32144 - DNA, 26 bp, Artificial sequence
  SiRNA target sequence
ctcctaaaaaagtatttccgttagta

SEQ ID NO: 32145 - DNA, 26 bp, Artificial sequence
  SiRNA target sequence
tcctaaaaaagtatttccgttagtag

SEQ ID NO: 32146 - DNA, 26 bp, Artificial sequence
  SiRNA target sequence
cctaaaaaagtatttccgttagtaga

SEQ ID NO: 32147 - DNA, 26 bp, Artificial sequence
  SiRNA target sequence
ctaaaaaagtatttccgttagtagat

SEQ ID NO: 32148 - DNA, 26 bp, Artificial sequence
  SiRNA target sequence
taaaaaagtatttccgttagtagatt

SEQ ID NO: 32149 - DNA, 26 bp, Artificial sequence
  SiRNA target sequence
aaaaaagtatttccgttagtagattt

SEQ ID NO: 32150 - DNA, 26 bp, Artificial sequence
  SiRNA target sequence
aaaaagtatttccgttagtagatttt

SEQ ID NO: 32151 - DNA, 26 bp, Artificial sequence
  SiRNA target sequence
aaaagtatttccgttagtagatttta

SEQ ID NO: 32152 - DNA, 26 bp, Artificial sequence
  SiRNA target sequence
aaagtatttccgttagtagattttac

SEQ ID NO: 32153 - DNA, 26 bp, Artificial sequence
  SiRNA target sequence
aagtatttccgttagtagattttaca

SEQ ID NO: 32154 - DNA, 26 bp, Artificial sequence
  SiRNA target sequence
agtatttccgttagtagattttacat

SEQ ID NO: 32155 - DNA, 26 bp, Artificial sequence
  SiRNA target sequence
gtatttccgttagtagattttacatg

SEQ ID NO: 32156 - DNA, 26 bp, Artificial sequence
  SiRNA target sequence
tatttccgttagtagattttacatga

SEQ ID NO: 32157 - DNA, 26 bp, Artificial sequence
  SiRNA target sequence
atttccgttagtagattttacatgaa

SEQ ID NO: 32158 - DNA, 26 bp, Artificial sequence
  SiRNA target sequence
tttccgttagtagattttacatgaaa

SEQ ID NO: 32159 - DNA, 26 bp, Artificial sequence
  SiRNA target sequence
ttccgttagtagattttacatgaaaa

SEQ ID NO: 32160 - DNA, 26 bp, Artificial sequence
  SiRNA target sequence
tccgttagtagattttacatgaaaaa

SEQ ID NO: 32161 - DNA, 26 bp, Artificial sequence
  SiRNA target sequence
ccgttagtagattttacatgaaaaat

SEQ ID NO: 32162 - DNA, 26 bp, Artificial sequence
  SiRNA target sequence
cgttagtagattttacatgaaaaata

SEQ ID NO: 32163 - DNA, 26 bp, Artificial sequence
  SiRNA target sequence
gttagtagattttacatgaaaaatac

SEQ ID NO: 32164 - DNA, 26 bp, Artificial sequence
  SiRNA target sequence
ttagtagattttacatgaaaaatacc

SEQ ID NO: 32165 - DNA, 26 bp, Artificial sequence
  SiRNA target sequence
tagtagattttacatgaaaaatacca

SEQ ID NO: 32166 - DNA, 26 bp, Artificial sequence
  SiRNA target sequence
agtagattttacatgaaaaataccat

SEQ ID NO: 32167 - DNA, 26 bp, Artificial sequence
  SiRNA target sequence
gtagattttacatgaaaaataccatt

SEQ ID NO: 32168 - DNA, 26 bp, Artificial sequence
  SiRNA target sequence
tagattttacatgaaaaataccatta

SEQ ID NO: 32169 - DNA, 26 bp, Artificial sequence
  SiRNA target sequence
agattttacatgaaaaataccattat

SEQ ID NO: 32170 - DNA, 26 bp, Artificial sequence
  SiRNA target sequence
gattttacatgaaaaataccattatc

SEQ ID NO: 32171 - DNA, 26 bp, Artificial sequence
  SiRNA target sequence
attttacatgaaaaataccattatct

SEQ ID NO: 32172 - DNA, 26 bp, Artificial sequence
  SiRNA target sequence
ttttacatgaaaaataccattatcta

SEQ ID NO: 32173 - DNA, 26 bp, Artificial sequence
  SiRNA target sequence
tttacatgaaaaataccattatctaa

SEQ ID NO: 32174 - DNA, 26 bp, Artificial sequence
  SiRNA target sequence
ttacatgaaaaataccattatctaat

SEQ ID NO: 32175 - DNA, 26 bp, Artificial sequence
  SiRNA target sequence
tacatgaaaaataccattatctaatt

SEQ ID NO: 32176 - DNA, 26 bp, Artificial sequence
  SiRNA target sequence
acatgaaaaataccattatctaattc

SEQ ID NO: 32177 - DNA, 26 bp, Artificial sequence
  SiRNA target sequence
catgaaaaataccattatctaattct

SEQ ID NO: 32178 - DNA, 26 bp, Artificial sequence
  SiRNA target sequence
atgaaaaataccattatctaattcta

SEQ ID NO: 32179 - DNA, 26 bp, Artificial sequence
  SiRNA target sequence
tgaaaaataccattatctaattctaa

SEQ ID NO: 32180 - DNA, 26 bp, Artificial sequence
  SiRNA target sequence
gaaaaataccattatctaattctaat

SEQ ID NO: 32181 - DNA, 26 bp, Artificial sequence
  SiRNA target sequence
aaaaataccattatctaattctaata

SEQ ID NO: 32182 - DNA, 26 bp, Artificial sequence
  SiRNA target sequence
aaaataccattatctaattctaatat

SEQ ID NO: 32183 - DNA, 26 bp, Artificial sequence
  SiRNA target sequence
aaataccattatctaattctaatata

SEQ ID NO: 32184 - DNA, 26 bp, Artificial sequence
  SiRNA target sequence
aataccattatctaattctaatatac

SEQ ID NO: 32185 - DNA, 26 bp, Artificial sequence
  SiRNA target sequence
ataccattatctaattctaatatact

SEQ ID NO: 32186 - DNA, 26 bp, Artificial sequence
  SiRNA target sequence
taccattatctaattctaatatacta

SEQ ID NO: 32187 - DNA, 26 bp, Artificial sequence
  SiRNA target sequence
accattatctaattctaatatactaa

SEQ ID NO: 32188 - DNA, 26 bp, Artificial sequence
  SiRNA target sequence
ccattatctaattctaatatactaat

SEQ ID NO: 32189 - DNA, 26 bp, Artificial sequence
  SiRNA target sequence
cattatctaattctaatatactaatg

SEQ ID NO: 32190 - DNA, 26 bp, Artificial sequence
  SiRNA target sequence
attatctaattctaatatactaatgt

SEQ ID NO: 32191 - DNA, 26 bp, Artificial sequence
  SiRNA target sequence
ttatctaattctaatatactaatgtc

SEQ ID NO: 32192 - DNA, 26 bp, Artificial sequence
  SiRNA target sequence
tatctaattctaatatactaatgtca

SEQ ID NO: 32193 - DNA, 26 bp, Artificial sequence
  SiRNA target sequence
atctaattctaatatactaatgtcaa

SEQ ID NO: 32194 - DNA, 26 bp, Artificial sequence
  SiRNA target sequence
tctaattctaatatactaatgtcaaa

SEQ ID NO: 32195 - DNA, 26 bp, Artificial sequence
  SiRNA target sequence
ctaattctaatatactaatgtcaaaa

SEQ ID NO: 32196 - DNA, 26 bp, Artificial sequence
  SiRNA target sequence
taattctaatatactaatgtcaaaag

SEQ ID NO: 32197 - DNA, 26 bp, Artificial sequence
  SiRNA target sequence
aattctaatatactaatgtcaaaagt

SEQ ID NO: 32198 - DNA, 26 bp, Artificial sequence
  SiRNA target sequence
attctaatatactaatgtcaaaagtt

SEQ ID NO: 32199 - DNA, 26 bp, Artificial sequence
  SiRNA target sequence
ttctaatatactaatgtcaaaagttc

SEQ ID NO: 32200 - DNA, 26 bp, Artificial sequence
  SiRNA target sequence
tctaatatactaatgtcaaaagttcc

SEQ ID NO: 32201 - DNA, 26 bp, Artificial sequence
  SiRNA target sequence
ctaatatactaatgtcaaaagttcct

SEQ ID NO: 32202 - DNA, 26 bp, Artificial sequence
  SiRNA target sequence
taatatactaatgtcaaaagttcctc

SEQ ID NO: 32203 - DNA, 26 bp, Artificial sequence
  SiRNA target sequence
aatatactaatgtcaaaagttcctcc

SEQ ID NO: 32204 - DNA, 26 bp, Artificial sequence
  SiRNA target sequence
atatactaatgtcaaaagttcctcct

SEQ ID NO: 32205 - DNA, 26 bp, Artificial sequence
  SiRNA target sequence
tatactaatgtcaaaagttcctcctc

SEQ ID NO: 32206 - DNA, 26 bp, Artificial sequence
  SiRNA target sequence
atactaatgtcaaaagttcctcctcc

SEQ ID NO: 32207 - DNA, 26 bp, Artificial sequence
  SiRNA target sequence
tactaatgtcaaaagttcctcctccc

SEQ ID NO: 32208 - DNA, 26 bp, Artificial sequence
  SiRNA target sequence
actaatgtcaaaagttcctcctccca

SEQ ID NO: 32209 - DNA, 26 bp, Artificial sequence
  SiRNA target sequence
ctaatgtcaaaagttcctcctcccag

SEQ ID NO: 32210 - DNA, 26 bp, Artificial sequence
  SiRNA target sequence
taatgtcaaaagttcctcctcccaga

SEQ ID NO: 32211 - DNA, 26 bp, Artificial sequence
  SiRNA target sequence
aatgtcaaaagttcctcctcccagat

SEQ ID NO: 32212 - DNA, 26 bp, Artificial sequence
  SiRNA target sequence
atgtcaaaagttcctcctcccagatc

SEQ ID NO: 32213 - DNA, 26 bp, Artificial sequence
  SiRNA target sequence
tgtcaaaagttcctcctcccagatca

SEQ ID NO: 32214 - DNA, 26 bp, Artificial sequence
  SiRNA target sequence
gtcaaaagttcctcctcccagatcat

SEQ ID NO: 32215 - DNA, 26 bp, Artificial sequence
  SiRNA target sequence
tcaaaagttcctcctcccagatcata

SEQ ID NO: 32216 - DNA, 26 bp, Artificial sequence
  SiRNA target sequence
caaaagttcctcctcccagatcataa

SEQ ID NO: 32217 - DNA, 26 bp, Artificial sequence
  SiRNA target sequence
aaaagttcctcctcccagatcataaa

SEQ ID NO: 32218 - DNA, 26 bp, Artificial sequence
  SiRNA target sequence
aaagttcctcctcccagatcataaac

SEQ ID NO: 32219 - DNA, 26 bp, Artificial sequence
  SiRNA target sequence
aagttcctcctcccagatcataaaca

SEQ ID NO: 32220 - DNA, 26 bp, Artificial sequence
  SiRNA target sequence
agttcctcctcccagatcataaacag

SEQ ID NO: 32221 - DNA, 26 bp, Artificial sequence
  SiRNA target sequence
gttcctcctcccagatcataaacagc

SEQ ID NO: 32222 - DNA, 26 bp, Artificial sequence
  SiRNA target sequence
ttcctcctcccagatcataaacagct

SEQ ID NO: 32223 - DNA, 26 bp, Artificial sequence
  SiRNA target sequence
tcctcctcccagatcataaacagcta

SEQ ID NO: 32224 - DNA, 26 bp, Artificial sequence
  SiRNA target sequence
cctcctcccagatcataaacagctat

SEQ ID NO: 32225 - DNA, 26 bp, Artificial sequence
  SiRNA target sequence
ctcctcccagatcataaacagctata

SEQ ID NO: 32226 - DNA, 26 bp, Artificial sequence
  SiRNA target sequence
tcctcccagatcataaacagctataa

SEQ ID NO: 32227 - DNA, 26 bp, Artificial sequence
  SiRNA target sequence
cctcccagatcataaacagctataat

SEQ ID NO: 32228 - DNA, 26 bp, Artificial sequence
  SiRNA target sequence
ctcccagatcataaacagctataata

SEQ ID NO: 32229 - DNA, 26 bp, Artificial sequence
  SiRNA target sequence
tcccagatcataaacagctataatac

SEQ ID NO: 32230 - DNA, 26 bp, Artificial sequence
  SiRNA target sequence
cccagatcataaacagctataatacc

SEQ ID NO: 32231 - DNA, 26 bp, Artificial sequence
  SiRNA target sequence
ccagatcataaacagctataataccc

SEQ ID NO: 32232 - DNA, 26 bp, Artificial sequence
  SiRNA target sequence
cagatcataaacagctataataccct

SEQ ID NO: 32233 - DNA, 26 bp, Artificial sequence
  SiRNA target sequence
agatcataaacagctataataccctg

SEQ ID NO: 32234 - DNA, 26 bp, Artificial sequence
  SiRNA target sequence
gatcataaacagctataataccctgt

SEQ ID NO: 32235 - DNA, 26 bp, Artificial sequence
  SiRNA target sequence
atcataaacagctataataccctgtg

SEQ ID NO: 32236 - DNA, 26 bp, Artificial sequence
  SiRNA target sequence
tcataaacagctataataccctgtgc

SEQ ID NO: 32237 - DNA, 26 bp, Artificial sequence
  SiRNA target sequence
cataaacagctataataccctgtgca

SEQ ID NO: 32238 - DNA, 26 bp, Artificial sequence
  SiRNA target sequence
ataaacagctataataccctgtgcag

SEQ ID NO: 32239 - DNA, 26 bp, Artificial sequence
  SiRNA target sequence
taaacagctataataccctgtgcaga

SEQ ID NO: 32240 - DNA, 26 bp, Artificial sequence
  SiRNA target sequence
aaacagctataataccctgtgcagac

SEQ ID NO: 32241 - DNA, 26 bp, Artificial sequence
  SiRNA target sequence
aacagctataataccctgtgcagact

SEQ ID NO: 32242 - DNA, 26 bp, Artificial sequence
  SiRNA target sequence
acagctataataccctgtgcagactt

SEQ ID NO: 32243 - DNA, 26 bp, Artificial sequence
  SiRNA target sequence
cagctataataccctgtgcagacttg

SEQ ID NO: 32244 - DNA, 26 bp, Artificial sequence
  SiRNA target sequence
agctataataccctgtgcagacttgt

SEQ ID NO: 32245 - DNA, 26 bp, Artificial sequence
  SiRNA target sequence
gctataataccctgtgcagacttgtc

SEQ ID NO: 32246 - DNA, 26 bp, Artificial sequence
  SiRNA target sequence
ctataataccctgtgcagacttgtca

SEQ ID NO: 32247 - DNA, 26 bp, Artificial sequence
  SiRNA target sequence
tataataccctgtgcagacttgtcaa

SEQ ID NO: 32248 - DNA, 26 bp, Artificial sequence
  SiRNA target sequence
ataataccctgtgcagacttgtcaag

SEQ ID NO: 32249 - DNA, 26 bp, Artificial sequence
  SiRNA target sequence
taataccctgtgcagacttgtcaagc

SEQ ID NO: 32250 - DNA, 26 bp, Artificial sequence
  SiRNA target sequence
aataccctgtgcagacttgtcaagcc

SEQ ID NO: 32251 - DNA, 26 bp, Artificial sequence
  SiRNA target sequence
ataccctgtgcagacttgtcaagccc

SEQ ID NO: 32252 - DNA, 26 bp, Artificial sequence
  SiRNA target sequence
taccctgtgcagacttgtcaagccca

SEQ ID NO: 32253 - DNA, 26 bp, Artificial sequence
  SiRNA target sequence
accctgtgcagacttgtcaagcccat

SEQ ID NO: 32254 - DNA, 26 bp, Artificial sequence
  SiRNA target sequence
ccctgtgcagacttgtcaagcccata

SEQ ID NO: 32255 - DNA, 26 bp, Artificial sequence
  SiRNA target sequence
cctgtgcagacttgtcaagcccataa

SEQ ID NO: 32256 - DNA, 26 bp, Artificial sequence
  SiRNA target sequence
ctgtgcagacttgtcaagcccataag

SEQ ID NO: 32257 - DNA, 26 bp, Artificial sequence
  SiRNA target sequence
tgtgcagacttgtcaagcccataagc

SEQ ID NO: 32258 - DNA, 26 bp, Artificial sequence
  SiRNA target sequence
gtgcagacttgtcaagcccataagca

SEQ ID NO: 32259 - DNA, 26 bp, Artificial sequence
  SiRNA target sequence
tgcagacttgtcaagcccataagcaa

SEQ ID NO: 32260 - DNA, 26 bp, Artificial sequence
  SiRNA target sequence
gcagacttgtcaagcccataagcaag

SEQ ID NO: 32261 - DNA, 26 bp, Artificial sequence
  SiRNA target sequence
cagacttgtcaagcccataagcaagt

SEQ ID NO: 32262 - DNA, 26 bp, Artificial sequence
  SiRNA target sequence
agacttgtcaagcccataagcaagtg

SEQ ID NO: 32263 - DNA, 26 bp, Artificial sequence
  SiRNA target sequence
gacttgtcaagcccataagcaagtgc

SEQ ID NO: 32264 - DNA, 26 bp, Artificial sequence
  SiRNA target sequence
acttgtcaagcccataagcaagtgct

SEQ ID NO: 32265 - DNA, 26 bp, Artificial sequence
  SiRNA target sequence
cttgtcaagcccataagcaagtgctg

SEQ ID NO: 32266 - DNA, 26 bp, Artificial sequence
  SiRNA target sequence
ttgtcaagcccataagcaagtgctgc

SEQ ID NO: 32267 - DNA, 26 bp, Artificial sequence
  SiRNA target sequence
tgtcaagcccataagcaagtgctgcc

SEQ ID NO: 32268 - DNA, 26 bp, Artificial sequence
  SiRNA target sequence
gtcaagcccataagcaagtgctgccg

SEQ ID NO: 32269 - DNA, 26 bp, Artificial sequence
  SiRNA target sequence
tcaagcccataagcaagtgctgccgc

SEQ ID NO: 32270 - DNA, 26 bp, Artificial sequence
  SiRNA target sequence
caagcccataagcaagtgctgccgca

SEQ ID NO: 32271 - DNA, 26 bp, Artificial sequence
  SiRNA target sequence
aagcccataagcaagtgctgccgcag

SEQ ID NO: 32272 - DNA, 26 bp, Artificial sequence
  SiRNA target sequence
agcccataagcaagtgctgccgcagt

SEQ ID NO: 32273 - DNA, 26 bp, Artificial sequence
  SiRNA target sequence
gcccataagcaagtgctgccgcagta

SEQ ID NO: 32274 - DNA, 26 bp, Artificial sequence
  SiRNA target sequence
cccataagcaagtgctgccgcagtag

SEQ ID NO: 32275 - DNA, 26 bp, Artificial sequence
  SiRNA target sequence
ccataagcaagtgctgccgcagtagg

SEQ ID NO: 32276 - DNA, 26 bp, Artificial sequence
  SiRNA target sequence
cataagcaagtgctgccgcagtaggc

SEQ ID NO: 32277 - DNA, 26 bp, Artificial sequence
  SiRNA target sequence
ataagcaagtgctgccgcagtaggct

SEQ ID NO: 32278 - DNA, 26 bp, Artificial sequence
  SiRNA target sequence
taagcaagtgctgccgcagtaggctc

SEQ ID NO: 32279 - DNA, 26 bp, Artificial sequence
  SiRNA target sequence
aagcaagtgctgccgcagtaggctca

SEQ ID NO: 32280 - DNA, 26 bp, Artificial sequence
  SiRNA target sequence
agcaagtgctgccgcagtaggctcat

SEQ ID NO: 32281 - DNA, 26 bp, Artificial sequence
  SiRNA target sequence
gcaagtgctgccgcagtaggctcatt

SEQ ID NO: 32282 - DNA, 26 bp, Artificial sequence
  SiRNA target sequence
caagtgctgccgcagtaggctcatta

SEQ ID NO: 32283 - DNA, 26 bp, Artificial sequence
  SiRNA target sequence
aagtgctgccgcagtaggctcattaa

SEQ ID NO: 32284 - DNA, 26 bp, Artificial sequence
  SiRNA target sequence
agtgctgccgcagtaggctcattaat

SEQ ID NO: 32285 - DNA, 26 bp, Artificial sequence
  SiRNA target sequence
gtgctgccgcagtaggctcattaatc

SEQ ID NO: 32286 - DNA, 26 bp, Artificial sequence
  SiRNA target sequence
tgctgccgcagtaggctcattaatca

SEQ ID NO: 32287 - DNA, 26 bp, Artificial sequence
  SiRNA target sequence
gctgccgcagtaggctcattaatcac

SEQ ID NO: 32288 - DNA, 26 bp, Artificial sequence
  SiRNA target sequence
ctgccgcagtaggctcattaatcact

SEQ ID NO: 32289 - DNA, 26 bp, Artificial sequence
  SiRNA target sequence
tgccgcagtaggctcattaatcactc

SEQ ID NO: 32290 - DNA, 26 bp, Artificial sequence
  SiRNA target sequence
gccgcagtaggctcattaatcactct

SEQ ID NO: 32291 - DNA, 26 bp, Artificial sequence
  SiRNA target sequence
ccgcagtaggctcattaatcactcta

SEQ ID NO: 32292 - DNA, 26 bp, Artificial sequence
  SiRNA target sequence
cgcagtaggctcattaatcactctaa

SEQ ID NO: 32293 - DNA, 26 bp, Artificial sequence
  SiRNA target sequence
gcagtaggctcattaatcactctaag

SEQ ID NO: 32294 - DNA, 26 bp, Artificial sequence
  SiRNA target sequence
cagtaggctcattaatcactctaagc

SEQ ID NO: 32295 - DNA, 26 bp, Artificial sequence
  SiRNA target sequence
agtaggctcattaatcactctaagca

SEQ ID NO: 32296 - DNA, 26 bp, Artificial sequence
  SiRNA target sequence
gtaggctcattaatcactctaagcac

SEQ ID NO: 32297 - DNA, 26 bp, Artificial sequence
  SiRNA target sequence
taggctcattaatcactctaagcact

SEQ ID NO: 32298 - DNA, 26 bp, Artificial sequence
  SiRNA target sequence
aggctcattaatcactctaagcactt

SEQ ID NO: 32299 - DNA, 26 bp, Artificial sequence
  SiRNA target sequence
ggctcattaatcactctaagcacttg

SEQ ID NO: 32300 - DNA, 26 bp, Artificial sequence
  SiRNA target sequence
gctcattaatcactctaagcacttgt

SEQ ID NO: 32301 - DNA, 26 bp, Artificial sequence
  SiRNA target sequence
ctcattaatcactctaagcacttgta

SEQ ID NO: 32302 - DNA, 26 bp, Artificial sequence
  SiRNA target sequence
tcattaatcactctaagcacttgtaa

SEQ ID NO: 32303 - DNA, 26 bp, Artificial sequence
  SiRNA target sequence
cattaatcactctaagcacttgtaat

SEQ ID NO: 32304 - DNA, 26 bp, Artificial sequence
  SiRNA target sequence
attaatcactctaagcacttgtaatc

SEQ ID NO: 32305 - DNA, 26 bp, Artificial sequence
  SiRNA target sequence
ttaatcactctaagcacttgtaatcc

SEQ ID NO: 32306 - DNA, 26 bp, Artificial sequence
  SiRNA target sequence
taatcactctaagcacttgtaatccc

SEQ ID NO: 32307 - DNA, 26 bp, Artificial sequence
  SiRNA target sequence
aatcactctaagcacttgtaatcccg

SEQ ID NO: 32308 - DNA, 26 bp, Artificial sequence
  SiRNA target sequence
atcactctaagcacttgtaatcccgc

SEQ ID NO: 32309 - DNA, 26 bp, Artificial sequence
  SiRNA target sequence
tcactctaagcacttgtaatcccgca

SEQ ID NO: 32310 - DNA, 26 bp, Artificial sequence
  SiRNA target sequence
cactctaagcacttgtaatcccgcaa

SEQ ID NO: 32311 - DNA, 26 bp, Artificial sequence
  SiRNA target sequence
actctaagcacttgtaatcccgcaat

SEQ ID NO: 32312 - DNA, 26 bp, Artificial sequence
  SiRNA target sequence
ctctaagcacttgtaatcccgcaatc

SEQ ID NO: 32313 - DNA, 26 bp, Artificial sequence
  SiRNA target sequence
tctaagcacttgtaatcccgcaatcc

SEQ ID NO: 32314 - DNA, 26 bp, Artificial sequence
  SiRNA target sequence
ctaagcacttgtaatcccgcaatcct

SEQ ID NO: 32315 - DNA, 26 bp, Artificial sequence
  SiRNA target sequence
taagcacttgtaatcccgcaatcctt

SEQ ID NO: 32316 - DNA, 26 bp, Artificial sequence
  SiRNA target sequence
aagcacttgtaatcccgcaatccttc

SEQ ID NO: 32317 - DNA, 26 bp, Artificial sequence
  SiRNA target sequence
agcacttgtaatcccgcaatccttcc

SEQ ID NO: 32318 - DNA, 26 bp, Artificial sequence
  SiRNA target sequence
gcacttgtaatcccgcaatccttccc

SEQ ID NO: 32319 - DNA, 26 bp, Artificial sequence
  SiRNA target sequence
cacttgtaatcccgcaatccttcccg

SEQ ID NO: 32320 - DNA, 26 bp, Artificial sequence
  SiRNA target sequence
acttgtaatcccgcaatccttcccgc

SEQ ID NO: 32321 - DNA, 26 bp, Artificial sequence
  SiRNA target sequence
cttgtaatcccgcaatccttcccgca

SEQ ID NO: 32322 - DNA, 26 bp, Artificial sequence
  SiRNA target sequence
ttgtaatcccgcaatccttcccgcat

SEQ ID NO: 32323 - DNA, 26 bp, Artificial sequence
  SiRNA target sequence
tgtaatcccgcaatccttcccgcatc

SEQ ID NO: 32324 - DNA, 26 bp, Artificial sequence
  SiRNA target sequence
gtaatcccgcaatccttcccgcatct

SEQ ID NO: 32325 - DNA, 26 bp, Artificial sequence
  SiRNA target sequence
taatcccgcaatccttcccgcatctt

SEQ ID NO: 32326 - DNA, 26 bp, Artificial sequence
  SiRNA target sequence
aatcccgcaatccttcccgcatcttt

SEQ ID NO: 32327 - DNA, 26 bp, Artificial sequence
  SiRNA target sequence
atcccgcaatccttcccgcatcttta

SEQ ID NO: 32328 - DNA, 26 bp, Artificial sequence
  SiRNA target sequence
tcccgcaatccttcccgcatctttag

SEQ ID NO: 32329 - DNA, 26 bp, Artificial sequence
  SiRNA target sequence
cccgcaatccttcccgcatctttagt

SEQ ID NO: 32330 - DNA, 26 bp, Artificial sequence
  SiRNA target sequence
ccgcaatccttcccgcatctttagta

SEQ ID NO: 32331 - DNA, 26 bp, Artificial sequence
  SiRNA target sequence
cgcaatccttcccgcatctttagtag

SEQ ID NO: 32332 - DNA, 26 bp, Artificial sequence
  SiRNA target sequence
gcaatccttcccgcatctttagtagc

SEQ ID NO: 32333 - DNA, 26 bp, Artificial sequence
  SiRNA target sequence
caatccttcccgcatctttagtagct

SEQ ID NO: 32334 - DNA, 26 bp, Artificial sequence
  SiRNA target sequence
aatccttcccgcatctttagtagctt

SEQ ID NO: 32335 - DNA, 26 bp, Artificial sequence
  SiRNA target sequence
atccttcccgcatctttagtagcttg

SEQ ID NO: 32336 - DNA, 26 bp, Artificial sequence
  SiRNA target sequence
tccttcccgcatctttagtagcttgc

SEQ ID NO: 32337 - DNA, 26 bp, Artificial sequence
  SiRNA target sequence
ccttcccgcatctttagtagcttgcc

SEQ ID NO: 32338 - DNA, 26 bp, Artificial sequence
  SiRNA target sequence
cttcccgcatctttagtagcttgcct

SEQ ID NO: 32339 - DNA, 26 bp, Artificial sequence
  SiRNA target sequence
ttcccgcatctttagtagcttgcctt

SEQ ID NO: 32340 - DNA, 26 bp, Artificial sequence
  SiRNA target sequence
tcccgcatctttagtagcttgccttt

SEQ ID NO: 32341 - DNA, 26 bp, Artificial sequence
  SiRNA target sequence
cccgcatctttagtagcttgcctttg

SEQ ID NO: 32342 - DNA, 26 bp, Artificial sequence
  SiRNA target sequence
ccgcatctttagtagcttgcctttgc

SEQ ID NO: 32343 - DNA, 26 bp, Artificial sequence
  SiRNA target sequence
cgcatctttagtagcttgcctttgca

SEQ ID NO: 32344 - DNA, 26 bp, Artificial sequence
  SiRNA target sequence
gcatctttagtagcttgcctttgcat

SEQ ID NO: 32345 - DNA, 26 bp, Artificial sequence
  SiRNA target sequence
catctttagtagcttgcctttgcatg

SEQ ID NO: 32346 - DNA, 26 bp, Artificial sequence
  SiRNA target sequence
atctttagtagcttgcctttgcatgt

SEQ ID NO: 32347 - DNA, 26 bp, Artificial sequence
  SiRNA target sequence
tctttagtagcttgcctttgcatgtc

SEQ ID NO: 32348 - DNA, 26 bp, Artificial sequence
  SiRNA target sequence
ctttagtagcttgcctttgcatgtca

SEQ ID NO: 32349 - DNA, 26 bp, Artificial sequence
  SiRNA target sequence
tttagtagcttgcctttgcatgtcat

SEQ ID NO: 32350 - DNA, 26 bp, Artificial sequence
  SiRNA target sequence
ttagtagcttgcctttgcatgtcatc

SEQ ID NO: 32351 - DNA, 26 bp, Artificial sequence
  SiRNA target sequence
tagtagcttgcctttgcatgtcatca

SEQ ID NO: 32352 - DNA, 26 bp, Artificial sequence
  SiRNA target sequence
agtagcttgcctttgcatgtcatcaa

SEQ ID NO: 32353 - DNA, 26 bp, Artificial sequence
  SiRNA target sequence
gtagcttgcctttgcatgtcatcaaa

SEQ ID NO: 32354 - DNA, 26 bp, Artificial sequence
  SiRNA target sequence
tagcttgcctttgcatgtcatcaaaa

SEQ ID NO: 32355 - DNA, 26 bp, Artificial sequence
  SiRNA target sequence
agcttgcctttgcatgtcatcaaaat

SEQ ID NO: 32356 - DNA, 26 bp, Artificial sequence
  SiRNA target sequence
gcttgcctttgcatgtcatcaaaata

SEQ ID NO: 32357 - DNA, 26 bp, Artificial sequence
  SiRNA target sequence
cttgcctttgcatgtcatcaaaatat

SEQ ID NO: 32358 - DNA, 26 bp, Artificial sequence
  SiRNA target sequence
ttgcctttgcatgtcatcaaaatatg

SEQ ID NO: 32359 - DNA, 26 bp, Artificial sequence
  SiRNA target sequence
tgcctttgcatgtcatcaaaatatgc

SEQ ID NO: 32360 - DNA, 26 bp, Artificial sequence
  SiRNA target sequence
gcctttgcatgtcatcaaaatatgcg

SEQ ID NO: 32361 - DNA, 26 bp, Artificial sequence
  SiRNA target sequence
cctttgcatgtcatcaaaatatgcgg

SEQ ID NO: 32362 - DNA, 26 bp, Artificial sequence
  SiRNA target sequence
ctttgcatgtcatcaaaatatgcggg

SEQ ID NO: 32363 - DNA, 26 bp, Artificial sequence
  SiRNA target sequence
tttgcatgtcatcaaaatatgcgggc

SEQ ID NO: 32364 - DNA, 26 bp, Artificial sequence
  SiRNA target sequence
ttgcatgtcatcaaaatatgcgggca

SEQ ID NO: 32365 - DNA, 26 bp, Artificial sequence
  SiRNA target sequence
tgcatgtcatcaaaatatgcgggcac

SEQ ID NO: 32366 - DNA, 26 bp, Artificial sequence
  SiRNA target sequence
gcatgtcatcaaaatatgcgggcact

SEQ ID NO: 32367 - DNA, 26 bp, Artificial sequence
  SiRNA target sequence
catgtcatcaaaatatgcgggcactg

SEQ ID NO: 32368 - DNA, 26 bp, Artificial sequence
  SiRNA target sequence
atgtcatcaaaatatgcgggcactgt

SEQ ID NO: 32369 - DNA, 26 bp, Artificial sequence
  SiRNA target sequence
tgtcatcaaaatatgcgggcactgtt

SEQ ID NO: 32370 - DNA, 26 bp, Artificial sequence
  SiRNA target sequence
gtcatcaaaatatgcgggcactgtta

SEQ ID NO: 32371 - DNA, 26 bp, Artificial sequence
  SiRNA target sequence
tcatcaaaatatgcgggcactgttat

SEQ ID NO: 32372 - DNA, 26 bp, Artificial sequence
  SiRNA target sequence
catcaaaatatgcgggcactgttata

SEQ ID NO: 32373 - DNA, 26 bp, Artificial sequence
  SiRNA target sequence
atcaaaatatgcgggcactgttataa

SEQ ID NO: 32374 - DNA, 26 bp, Artificial sequence
  SiRNA target sequence
tcaaaatatgcgggcactgttataac

SEQ ID NO: 32375 - DNA, 26 bp, Artificial sequence
  SiRNA target sequence
caaaatatgcgggcactgttataaca

SEQ ID NO: 32376 - DNA, 26 bp, Artificial sequence
  SiRNA target sequence
aaaatatgcgggcactgttataacag

SEQ ID NO: 32377 - DNA, 26 bp, Artificial sequence
  SiRNA target sequence
aaatatgcgggcactgttataacaga

SEQ ID NO: 32378 - DNA, 26 bp, Artificial sequence
  SiRNA target sequence
aatatgcgggcactgttataacagat

SEQ ID NO: 32379 - DNA, 26 bp, Artificial sequence
  SiRNA target sequence
atatgcgggcactgttataacagatc

SEQ ID NO: 32380 - DNA, 26 bp, Artificial sequence
  SiRNA target sequence
tatgcgggcactgttataacagatct

SEQ ID NO: 32381 - DNA, 26 bp, Artificial sequence
  SiRNA target sequence
atgcgggcactgttataacagatctt

SEQ ID NO: 32382 - DNA, 26 bp, Artificial sequence
  SiRNA target sequence
tgcgggcactgttataacagatctta

SEQ ID NO: 32383 - DNA, 26 bp, Artificial sequence
  SiRNA target sequence
gcgggcactgttataacagatcttaa

SEQ ID NO: 32384 - DNA, 26 bp, Artificial sequence
  SiRNA target sequence
cgggcactgttataacagatcttaat

SEQ ID NO: 32385 - DNA, 26 bp, Artificial sequence
  SiRNA target sequence
gggcactgttataacagatcttaata

SEQ ID NO: 32386 - DNA, 26 bp, Artificial sequence
  SiRNA target sequence
ggcactgttataacagatcttaatac

SEQ ID NO: 32387 - DNA, 26 bp, Artificial sequence
  SiRNA target sequence
gcactgttataacagatcttaatact

SEQ ID NO: 32388 - DNA, 26 bp, Artificial sequence
  SiRNA target sequence
cactgttataacagatcttaatactt

SEQ ID NO: 32389 - DNA, 26 bp, Artificial sequence
  SiRNA target sequence
actgttataacagatcttaatacttt

SEQ ID NO: 32390 - DNA, 26 bp, Artificial sequence
  SiRNA target sequence
ctgttataacagatcttaatacttta

SEQ ID NO: 32391 - DNA, 26 bp, Artificial sequence
  SiRNA target sequence
tgttataacagatcttaatactttag

SEQ ID NO: 32392 - DNA, 26 bp, Artificial sequence
  SiRNA target sequence
gttataacagatcttaatactttaga

SEQ ID NO: 32393 - DNA, 26 bp, Artificial sequence
  SiRNA target sequence
ttataacagatcttaatactttagaa

SEQ ID NO: 32394 - DNA, 26 bp, Artificial sequence
  SiRNA target sequence
tataacagatcttaatactttagaat

SEQ ID NO: 32395 - DNA, 26 bp, Artificial sequence
  SiRNA target sequence
ataacagatcttaatactttagaatt

SEQ ID NO: 32396 - DNA, 26 bp, Artificial sequence
  SiRNA target sequence
taacagatcttaatactttagaattt

SEQ ID NO: 32397 - DNA, 26 bp, Artificial sequence
  SiRNA target sequence
aacagatcttaatactttagaattta

SEQ ID NO: 32398 - DNA, 26 bp, Artificial sequence
  SiRNA target sequence
acagatcttaatactttagaatttaa

SEQ ID NO: 32399 - DNA, 26 bp, Artificial sequence
  SiRNA target sequence
cagatcttaatactttagaatttaaa

SEQ ID NO: 32400 - DNA, 26 bp, Artificial sequence
  SiRNA target sequence
agatcttaatactttagaatttaaaa

SEQ ID NO: 32401 - DNA, 26 bp, Artificial sequence
  SiRNA target sequence
gatcttaatactttagaatttaaaaa

SEQ ID NO: 32402 - DNA, 26 bp, Artificial sequence
  SiRNA target sequence
atcttaatactttagaatttaaaaaa

SEQ ID NO: 32403 - DNA, 26 bp, Artificial sequence
  SiRNA target sequence
tcttaatactttagaatttaaaaaat

SEQ ID NO: 32404 - DNA, 26 bp, Artificial sequence
  SiRNA target sequence
cttaatactttagaatttaaaaaatt

SEQ ID NO: 32405 - DNA, 26 bp, Artificial sequence
  SiRNA target sequence
ttaatactttagaatttaaaaaattc

SEQ ID NO: 32406 - DNA, 26 bp, Artificial sequence
  SiRNA target sequence
taatactttagaatttaaaaaattct

SEQ ID NO: 32407 - DNA, 26 bp, Artificial sequence
  SiRNA target sequence
aatactttagaatttaaaaaattctc

SEQ ID NO: 32408 - DNA, 26 bp, Artificial sequence
  SiRNA target sequence
atactttagaatttaaaaaattctct

SEQ ID NO: 32409 - DNA, 26 bp, Artificial sequence
  SiRNA target sequence
tactttagaatttaaaaaattctctg

SEQ ID NO: 32410 - DNA, 26 bp, Artificial sequence
  SiRNA target sequence
actttagaatttaaaaaattctctgc

SEQ ID NO: 32411 - DNA, 26 bp, Artificial sequence
  SiRNA target sequence
ctttagaatttaaaaaattctctgcg

SEQ ID NO: 32412 - DNA, 26 bp, Artificial sequence
  SiRNA target sequence
tttagaatttaaaaaattctctgcgg

SEQ ID NO: 32413 - DNA, 26 bp, Artificial sequence
  SiRNA target sequence
ttagaatttaaaaaattctctgcggc

SEQ ID NO: 32414 - DNA, 26 bp, Artificial sequence
  SiRNA target sequence
tagaatttaaaaaattctctgcggca

SEQ ID NO: 32415 - DNA, 26 bp, Artificial sequence
  SiRNA target sequence
agaatttaaaaaattctctgcggcat

SEQ ID NO: 32416 - DNA, 26 bp, Artificial sequence
  SiRNA target sequence
gaatttaaaaaattctctgcggcatt

SEQ ID NO: 32417 - DNA, 26 bp, Artificial sequence
  SiRNA target sequence
aatttaaaaaattctctgcggcattt

SEQ ID NO: 32418 - DNA, 26 bp, Artificial sequence
  SiRNA target sequence
atttaaaaaattctctgcggcatttt

SEQ ID NO: 32419 - DNA, 26 bp, Artificial sequence
  SiRNA target sequence
tttaaaaaattctctgcggcattttt

SEQ ID NO: 32420 - DNA, 26 bp, Artificial sequence
  SiRNA target sequence
ttaaaaaattctctgcggcatttttc

SEQ ID NO: 32421 - DNA, 26 bp, Artificial sequence
  SiRNA target sequence
taaaaaattctctgcggcatttttca

SEQ ID NO: 32422 - DNA, 26 bp, Artificial sequence
  SiRNA target sequence
aaaaaattctctgcggcatttttcat

SEQ ID NO: 32423 - DNA, 26 bp, Artificial sequence
  SiRNA target sequence
aaaaattctctgcggcatttttcatt

SEQ ID NO: 32424 - DNA, 26 bp, Artificial sequence
  SiRNA target sequence
aaaattctctgcggcatttttcattt

SEQ ID NO: 32425 - DNA, 26 bp, Artificial sequence
  SiRNA target sequence
aaattctctgcggcatttttcatttt

SEQ ID NO: 32426 - DNA, 26 bp, Artificial sequence
  SiRNA target sequence
aattctctgcggcatttttcattttt

SEQ ID NO: 32427 - DNA, 26 bp, Artificial sequence
  SiRNA target sequence
attctctgcggcatttttcatttttg

SEQ ID NO: 32428 - DNA, 26 bp, Artificial sequence
  SiRNA target sequence
ttctctgcggcatttttcatttttga

SEQ ID NO: 32429 - DNA, 26 bp, Artificial sequence
  SiRNA target sequence
tctctgcggcatttttcatttttgac

SEQ ID NO: 32430 - DNA, 26 bp, Artificial sequence
  SiRNA target sequence
ctctgcggcatttttcatttttgaca

SEQ ID NO: 32431 - DNA, 26 bp, Artificial sequence
  SiRNA target sequence
tctgcggcatttttcatttttgacaa

SEQ ID NO: 32432 - DNA, 26 bp, Artificial sequence
  SiRNA target sequence
ctgcggcatttttcatttttgacaaa

SEQ ID NO: 32433 - DNA, 26 bp, Artificial sequence
  SiRNA target sequence
tgcggcatttttcatttttgacaaaa

SEQ ID NO: 32434 - DNA, 26 bp, Artificial sequence
  SiRNA target sequence
gcggcatttttcatttttgacaaaat

SEQ ID NO: 32435 - DNA, 26 bp, Artificial sequence
  SiRNA target sequence
cggcatttttcatttttgacaaaata

SEQ ID NO: 32436 - DNA, 26 bp, Artificial sequence
  SiRNA target sequence
ggcatttttcatttttgacaaaataa

SEQ ID NO: 32437 - DNA, 26 bp, Artificial sequence
  SiRNA target sequence
gcatttttcatttttgacaaaataaa

SEQ ID NO: 32438 - DNA, 26 bp, Artificial sequence
  SiRNA target sequence
catttttcatttttgacaaaataaat

SEQ ID NO: 32439 - DNA, 26 bp, Artificial sequence
  SiRNA target sequence
atttttcatttttgacaaaataaatg

SEQ ID NO: 32440 - DNA, 26 bp, Artificial sequence
  SiRNA target sequence
tttttcatttttgacaaaataaatgc

SEQ ID NO: 32441 - DNA, 26 bp, Artificial sequence
  SiRNA target sequence
ttttcatttttgacaaaataaatgca

SEQ ID NO: 32442 - DNA, 26 bp, Artificial sequence
  SiRNA target sequence
tttcatttttgacaaaataaatgcac

SEQ ID NO: 32443 - DNA, 26 bp, Artificial sequence
  SiRNA target sequence
ttcatttttgacaaaataaatgcacc

SEQ ID NO: 32444 - DNA, 26 bp, Artificial sequence
  SiRNA target sequence
tcatttttgacaaaataaatgcacca

SEQ ID NO: 32445 - DNA, 26 bp, Artificial sequence
  SiRNA target sequence
catttttgacaaaataaatgcaccaa

SEQ ID NO: 32446 - DNA, 26 bp, Artificial sequence
  SiRNA target sequence
atttttgacaaaataaatgcaccaat

SEQ ID NO: 32447 - DNA, 26 bp, Artificial sequence
  SiRNA target sequence
tttttgacaaaataaatgcaccaatt

SEQ ID NO: 32448 - DNA, 26 bp, Artificial sequence
  SiRNA target sequence
ttttgacaaaataaatgcaccaattt

SEQ ID NO: 32449 - DNA, 26 bp, Artificial sequence
  SiRNA target sequence
tttgacaaaataaatgcaccaatttg

SEQ ID NO: 32450 - DNA, 26 bp, Artificial sequence
  SiRNA target sequence
ttgacaaaataaatgcaccaatttgt

SEQ ID NO: 32451 - DNA, 26 bp, Artificial sequence
  SiRNA target sequence
tgacaaaataaatgcaccaatttgtg

SEQ ID NO: 32452 - DNA, 26 bp, Artificial sequence
  SiRNA target sequence
gacaaaataaatgcaccaatttgtgc

SEQ ID NO: 32453 - DNA, 26 bp, Artificial sequence
  SiRNA target sequence
acaaaataaatgcaccaatttgtgca

SEQ ID NO: 32454 - DNA, 26 bp, Artificial sequence
  SiRNA target sequence
caaaataaatgcaccaatttgtgcag

SEQ ID NO: 32455 - DNA, 26 bp, Artificial sequence
  SiRNA target sequence
aaaataaatgcaccaatttgtgcagg

SEQ ID NO: 32456 - DNA, 26 bp, Artificial sequence
  SiRNA target sequence
aaataaatgcaccaatttgtgcagga

SEQ ID NO: 32457 - DNA, 26 bp, Artificial sequence
  SiRNA target sequence
aataaatgcaccaatttgtgcaggag

SEQ ID NO: 32458 - DNA, 26 bp, Artificial sequence
  SiRNA target sequence
ataaatgcaccaatttgtgcaggaga

SEQ ID NO: 32459 - DNA, 26 bp, Artificial sequence
  SiRNA target sequence
taaatgcaccaatttgtgcaggagaa

SEQ ID NO: 32460 - DNA, 26 bp, Artificial sequence
  SiRNA target sequence
aaatgcaccaatttgtgcaggagaat

SEQ ID NO: 32461 - DNA, 26 bp, Artificial sequence
  SiRNA target sequence
aatgcaccaatttgtgcaggagaata

SEQ ID NO: 32462 - DNA, 26 bp, Artificial sequence
  SiRNA target sequence
atgcaccaatttgtgcaggagaatat

SEQ ID NO: 32463 - DNA, 26 bp, Artificial sequence
  SiRNA target sequence
tgcaccaatttgtgcaggagaatatt

SEQ ID NO: 32464 - DNA, 26 bp, Artificial sequence
  SiRNA target sequence
gcaccaatttgtgcaggagaatattt

SEQ ID NO: 32465 - DNA, 26 bp, Artificial sequence
  SiRNA target sequence
caccaatttgtgcaggagaatatttc

SEQ ID NO: 32466 - DNA, 26 bp, Artificial sequence
  SiRNA target sequence
accaatttgtgcaggagaatatttct

SEQ ID NO: 32467 - DNA, 26 bp, Artificial sequence
  SiRNA target sequence
ccaatttgtgcaggagaatatttctt

SEQ ID NO: 32468 - DNA, 26 bp, Artificial sequence
  SiRNA target sequence
caatttgtgcaggagaatatttctta

SEQ ID NO: 32469 - DNA, 26 bp, Artificial sequence
  SiRNA target sequence
aatttgtgcaggagaatatttcttat

SEQ ID NO: 32470 - DNA, 26 bp, Artificial sequence
  SiRNA target sequence
atttgtgcaggagaatatttcttatt

SEQ ID NO: 32471 - DNA, 26 bp, Artificial sequence
  SiRNA target sequence
tttgtgcaggagaatatttcttattg

SEQ ID NO: 32472 - DNA, 26 bp, Artificial sequence
  SiRNA target sequence
ttgtgcaggagaatatttcttattgt

SEQ ID NO: 32473 - DNA, 26 bp, Artificial sequence
  SiRNA target sequence
tgtgcaggagaatatttcttattgtc

SEQ ID NO: 32474 - DNA, 26 bp, Artificial sequence
  SiRNA target sequence
gtgcaggagaatatttcttattgtca

SEQ ID NO: 32475 - DNA, 26 bp, Artificial sequence
  SiRNA target sequence
tgcaggagaatatttcttattgtcaa

SEQ ID NO: 32476 - DNA, 26 bp, Artificial sequence
  SiRNA target sequence
gcaggagaatatttcttattgtcaat

SEQ ID NO: 32477 - DNA, 26 bp, Artificial sequence
  SiRNA target sequence
caggagaatatttcttattgtcaatt

SEQ ID NO: 32478 - DNA, 26 bp, Artificial sequence
  SiRNA target sequence
aggagaatatttcttattgtcaattt

SEQ ID NO: 32479 - DNA, 26 bp, Artificial sequence
  SiRNA target sequence
ggagaatatttcttattgtcaatttt

SEQ ID NO: 32480 - DNA, 26 bp, Artificial sequence
  SiRNA target sequence
gagaatatttcttattgtcaattttt

SEQ ID NO: 32481 - DNA, 26 bp, Artificial sequence
  SiRNA target sequence
agaatatttcttattgtcaattttta

SEQ ID NO: 32482 - DNA, 26 bp, Artificial sequence
  SiRNA target sequence
gaatatttcttattgtcaatttttat

SEQ ID NO: 32483 - DNA, 26 bp, Artificial sequence
  SiRNA target sequence
aatatttcttattgtcaatttttatc

SEQ ID NO: 32484 - DNA, 26 bp, Artificial sequence
  SiRNA target sequence
atatttcttattgtcaatttttatcc

SEQ ID NO: 32485 - DNA, 26 bp, Artificial sequence
  SiRNA target sequence
tatttcttattgtcaatttttatcca

SEQ ID NO: 32486 - DNA, 26 bp, Artificial sequence
  SiRNA target sequence
atttcttattgtcaatttttatccaa

SEQ ID NO: 32487 - DNA, 26 bp, Artificial sequence
  SiRNA target sequence
tttcttattgtcaatttttatccaaa

SEQ ID NO: 32488 - DNA, 26 bp, Artificial sequence
  SiRNA target sequence
ttcttattgtcaatttttatccaaat

SEQ ID NO: 32489 - DNA, 26 bp, Artificial sequence
  SiRNA target sequence
tcttattgtcaatttttatccaaata

SEQ ID NO: 32490 - DNA, 26 bp, Artificial sequence
  SiRNA target sequence
cttattgtcaatttttatccaaatat

SEQ ID NO: 32491 - DNA, 26 bp, Artificial sequence
  SiRNA target sequence
ttattgtcaatttttatccaaatatc

SEQ ID NO: 32492 - DNA, 26 bp, Artificial sequence
  SiRNA target sequence
tattgtcaatttttatccaaatatcg

SEQ ID NO: 32493 - DNA, 26 bp, Artificial sequence
  SiRNA target sequence
attgtcaatttttatccaaatatcgc

SEQ ID NO: 32494 - DNA, 26 bp, Artificial sequence
  SiRNA target sequence
ttgtcaatttttatccaaatatcgcc

SEQ ID NO: 32495 - DNA, 26 bp, Artificial sequence
  SiRNA target sequence
tgtcaatttttatccaaatatcgccg

SEQ ID NO: 32496 - DNA, 26 bp, Artificial sequence
  SiRNA target sequence
gtcaatttttatccaaatatcgccgt

SEQ ID NO: 32497 - DNA, 26 bp, Artificial sequence
  SiRNA target sequence
tcaatttttatccaaatatcgccgtt

SEQ ID NO: 32498 - DNA, 26 bp, Artificial sequence
  SiRNA target sequence
caatttttatccaaatatcgccgtta

SEQ ID NO: 32499 - DNA, 26 bp, Artificial sequence
  SiRNA target sequence
aatttttatccaaatatcgccgttac

SEQ ID NO: 32500 - DNA, 26 bp, Artificial sequence
  SiRNA target sequence
atttttatccaaatatcgccgttaca

SEQ ID NO: 32501 - DNA, 26 bp, Artificial sequence
  SiRNA target sequence
tttttatccaaatatcgccgttacaa

SEQ ID NO: 32502 - DNA, 26 bp, Artificial sequence
  SiRNA target sequence
ttttatccaaatatcgccgttacaat

SEQ ID NO: 32503 - DNA, 26 bp, Artificial sequence
  SiRNA target sequence
tttatccaaatatcgccgttacaatg

SEQ ID NO: 32504 - DNA, 26 bp, Artificial sequence
  SiRNA target sequence
ttatccaaatatcgccgttacaatgc

SEQ ID NO: 32505 - DNA, 26 bp, Artificial sequence
  SiRNA target sequence
tatccaaatatcgccgttacaatgct

SEQ ID NO: 32506 - DNA, 26 bp, Artificial sequence
  SiRNA target sequence
atccaaatatcgccgttacaatgctt

SEQ ID NO: 32507 - DNA, 26 bp, Artificial sequence
  SiRNA target sequence
tccaaatatcgccgttacaatgctta

SEQ ID NO: 32508 - DNA, 26 bp, Artificial sequence
  SiRNA target sequence
ccaaatatcgccgttacaatgcttag

SEQ ID NO: 32509 - DNA, 26 bp, Artificial sequence
  SiRNA target sequence
caaatatcgccgttacaatgcttagt

SEQ ID NO: 32510 - DNA, 26 bp, Artificial sequence
  SiRNA target sequence
aaatatcgccgttacaatgcttagta

SEQ ID NO: 32511 - DNA, 26 bp, Artificial sequence
  SiRNA target sequence
aatatcgccgttacaatgcttagtag

SEQ ID NO: 32512 - DNA, 26 bp, Artificial sequence
  SiRNA target sequence
atatcgccgttacaatgcttagtagt

SEQ ID NO: 32513 - DNA, 26 bp, Artificial sequence
  SiRNA target sequence
tatcgccgttacaatgcttagtagtg

SEQ ID NO: 32514 - DNA, 26 bp, Artificial sequence
  SiRNA target sequence
atcgccgttacaatgcttagtagtgt

SEQ ID NO: 32515 - DNA, 26 bp, Artificial sequence
  SiRNA target sequence
tcgccgttacaatgcttagtagtgtc

SEQ ID NO: 32516 - DNA, 26 bp, Artificial sequence
  SiRNA target sequence
cgccgttacaatgcttagtagtgtca

SEQ ID NO: 32517 - DNA, 26 bp, Artificial sequence
  SiRNA target sequence
gccgttacaatgcttagtagtgtcat

SEQ ID NO: 32518 - DNA, 26 bp, Artificial sequence
  SiRNA target sequence
ccgttacaatgcttagtagtgtcata

SEQ ID NO: 32519 - DNA, 26 bp, Artificial sequence
  SiRNA target sequence
cgttacaatgcttagtagtgtcatat

SEQ ID NO: 32520 - DNA, 26 bp, Artificial sequence
  SiRNA target sequence
gttacaatgcttagtagtgtcatatg

SEQ ID NO: 32521 - DNA, 26 bp, Artificial sequence
  SiRNA target sequence
ttacaatgcttagtagtgtcatatgg

SEQ ID NO: 32522 - DNA, 26 bp, Artificial sequence
  SiRNA target sequence
tacaatgcttagtagtgtcatatggt

SEQ ID NO: 32523 - DNA, 26 bp, Artificial sequence
  SiRNA target sequence
acaatgcttagtagtgtcatatggta

SEQ ID NO: 32524 - DNA, 26 bp, Artificial sequence
  SiRNA target sequence
caatgcttagtagtgtcatatggtaa

SEQ ID NO: 32525 - DNA, 26 bp, Artificial sequence
  SiRNA target sequence
aatgcttagtagtgtcatatggtaag

SEQ ID NO: 32526 - DNA, 26 bp, Artificial sequence
  SiRNA target sequence
atgcttagtagtgtcatatggtaagc

SEQ ID NO: 32527 - DNA, 26 bp, Artificial sequence
  SiRNA target sequence
tgcttagtagtgtcatatggtaagct

SEQ ID NO: 32528 - DNA, 26 bp, Artificial sequence
  SiRNA target sequence
gcttagtagtgtcatatggtaagctt

SEQ ID NO: 32529 - DNA, 26 bp, Artificial sequence
  SiRNA target sequence
cttagtagtgtcatatggtaagcttt

SEQ ID NO: 32530 - DNA, 26 bp, Artificial sequence
  SiRNA target sequence
ttagtagtgtcatatggtaagctttt

SEQ ID NO: 32531 - DNA, 26 bp, Artificial sequence
  SiRNA target sequence
tagtagtgtcatatggtaagcttttt

SEQ ID NO: 32532 - DNA, 26 bp, Artificial sequence
  SiRNA target sequence
agtagtgtcatatggtaagcttttta

SEQ ID NO: 32533 - DNA, 26 bp, Artificial sequence
  SiRNA target sequence
gtagtgtcatatggtaagctttttaa

SEQ ID NO: 32534 - DNA, 26 bp, Artificial sequence
  SiRNA target sequence
tagtgtcatatggtaagctttttaaa

SEQ ID NO: 32535 - DNA, 26 bp, Artificial sequence
  SiRNA target sequence
agtgtcatatggtaagctttttaaat

SEQ ID NO: 32536 - DNA, 26 bp, Artificial sequence
  SiRNA target sequence
gtgtcatatggtaagctttttaaata

SEQ ID NO: 32537 - DNA, 26 bp, Artificial sequence
  SiRNA target sequence
tgtcatatggtaagctttttaaataa

SEQ ID NO: 32538 - DNA, 26 bp, Artificial sequence
  SiRNA target sequence
gtcatatggtaagctttttaaataat

SEQ ID NO: 32539 - DNA, 26 bp, Artificial sequence
  SiRNA target sequence
tcatatggtaagctttttaaataatc

SEQ ID NO: 32540 - DNA, 26 bp, Artificial sequence
  SiRNA target sequence
catatggtaagctttttaaataatct

SEQ ID NO: 32541 - DNA, 26 bp, Artificial sequence
  SiRNA target sequence
atatggtaagctttttaaataatctt

SEQ ID NO: 32542 - DNA, 26 bp, Artificial sequence
  SiRNA target sequence
tatggtaagctttttaaataatcttt

SEQ ID NO: 32543 - DNA, 26 bp, Artificial sequence
  SiRNA target sequence
atggtaagctttttaaataatctttt

SEQ ID NO: 32544 - DNA, 26 bp, Artificial sequence
  SiRNA target sequence
tggtaagctttttaaataatctttta

SEQ ID NO: 32545 - DNA, 26 bp, Artificial sequence
  SiRNA target sequence
ggtaagctttttaaataatcttttaa

SEQ ID NO: 32546 - DNA, 26 bp, Artificial sequence
  SiRNA target sequence
gtaagctttttaaataatcttttaat

SEQ ID NO: 32547 - DNA, 26 bp, Artificial sequence
  SiRNA target sequence
taagctttttaaataatcttttaatt

SEQ ID NO: 32548 - DNA, 26 bp, Artificial sequence
  SiRNA target sequence
aagctttttaaataatcttttaattc

SEQ ID NO: 32549 - DNA, 26 bp, Artificial sequence
  SiRNA target sequence
agctttttaaataatcttttaattct

SEQ ID NO: 32550 - DNA, 26 bp, Artificial sequence
  SiRNA target sequence
gctttttaaataatcttttaattcta

SEQ ID NO: 32551 - DNA, 26 bp, Artificial sequence
  SiRNA target sequence
ctttttaaataatcttttaattctac

SEQ ID NO: 32552 - DNA, 26 bp, Artificial sequence
  SiRNA target sequence
tttttaaataatcttttaattctaca

SEQ ID NO: 32553 - DNA, 26 bp, Artificial sequence
  SiRNA target sequence
ttttaaataatcttttaattctacat

SEQ ID NO: 32554 - DNA, 26 bp, Artificial sequence
  SiRNA target sequence
tttaaataatcttttaattctacatc

SEQ ID NO: 32555 - DNA, 26 bp, Artificial sequence
  SiRNA target sequence
ttaaataatcttttaattctacatca

SEQ ID NO: 32556 - DNA, 26 bp, Artificial sequence
  SiRNA target sequence
taaataatcttttaattctacatcat

SEQ ID NO: 32557 - DNA, 26 bp, Artificial sequence
  SiRNA target sequence
aaataatcttttaattctacatcatc

SEQ ID NO: 32558 - DNA, 26 bp, Artificial sequence
  SiRNA target sequence
aataatcttttaattctacatcatca

SEQ ID NO: 32559 - DNA, 26 bp, Artificial sequence
  SiRNA target sequence
ataatcttttaattctacatcatcaa

SEQ ID NO: 32560 - DNA, 26 bp, Artificial sequence
  SiRNA target sequence
taatcttttaattctacatcatcaaa

SEQ ID NO: 32561 - DNA, 26 bp, Artificial sequence
  SiRNA target sequence
aatcttttaattctacatcatcaaat

SEQ ID NO: 32562 - DNA, 26 bp, Artificial sequence
  SiRNA target sequence
atcttttaattctacatcatcaaatt

SEQ ID NO: 32563 - DNA, 26 bp, Artificial sequence
  SiRNA target sequence
tcttttaattctacatcatcaaattt

SEQ ID NO: 32564 - DNA, 26 bp, Artificial sequence
  SiRNA target sequence
cttttaattctacatcatcaaatttt

SEQ ID NO: 32565 - DNA, 26 bp, Artificial sequence
  SiRNA target sequence
ttttaattctacatcatcaaattttc

SEQ ID NO: 32566 - DNA, 26 bp, Artificial sequence
  SiRNA target sequence
tttaattctacatcatcaaattttcg

SEQ ID NO: 32567 - DNA, 26 bp, Artificial sequence
  SiRNA target sequence
ttaattctacatcatcaaattttcgt

SEQ ID NO: 32568 - DNA, 26 bp, Artificial sequence
  SiRNA target sequence
taattctacatcatcaaattttcgtc

SEQ ID NO: 32569 - DNA, 26 bp, Artificial sequence
  SiRNA target sequence
aattctacatcatcaaattttcgtcc

SEQ ID NO: 32570 - DNA, 26 bp, Artificial sequence
  SiRNA target sequence
attctacatcatcaaattttcgtccc

SEQ ID NO: 32571 - DNA, 26 bp, Artificial sequence
  SiRNA target sequence
ttctacatcatcaaattttcgtccca

SEQ ID NO: 32572 - DNA, 26 bp, Artificial sequence
  SiRNA target sequence
tctacatcatcaaattttcgtcccag

SEQ ID NO: 32573 - DNA, 26 bp, Artificial sequence
  SiRNA target sequence
ctacatcatcaaattttcgtcccagc

SEQ ID NO: 32574 - DNA, 26 bp, Artificial sequence
  SiRNA target sequence
tacatcatcaaattttcgtcccagca

SEQ ID NO: 32575 - DNA, 26 bp, Artificial sequence
  SiRNA target sequence
acatcatcaaattttcgtcccagcaa

SEQ ID NO: 32576 - DNA, 26 bp, Artificial sequence
  SiRNA target sequence
catcatcaaattttcgtcccagcaat

SEQ ID NO: 32577 - DNA, 26 bp, Artificial sequence
  SiRNA target sequence
atcatcaaattttcgtcccagcaatc

SEQ ID NO: 32578 - DNA, 26 bp, Artificial sequence
  SiRNA target sequence
tcatcaaattttcgtcccagcaatct

SEQ ID NO: 32579 - DNA, 26 bp, Artificial sequence
  SiRNA target sequence
catcaaattttcgtcccagcaatctc

SEQ ID NO: 32580 - DNA, 26 bp, Artificial sequence
  SiRNA target sequence
atcaaattttcgtcccagcaatctct

SEQ ID NO: 32581 - DNA, 26 bp, Artificial sequence
  SiRNA target sequence
tcaaattttcgtcccagcaatctctt

SEQ ID NO: 32582 - DNA, 26 bp, Artificial sequence
  SiRNA target sequence
caaattttcgtcccagcaatctctta

SEQ ID NO: 32583 - DNA, 26 bp, Artificial sequence
  SiRNA target sequence
aaattttcgtcccagcaatctcttag

SEQ ID NO: 32584 - DNA, 26 bp, Artificial sequence
  SiRNA target sequence
aattttcgtcccagcaatctcttaga

SEQ ID NO: 32585 - DNA, 26 bp, Artificial sequence
  SiRNA target sequence
attttcgtcccagcaatctcttagac

SEQ ID NO: 32586 - DNA, 26 bp, Artificial sequence
  SiRNA target sequence
ttttcgtcccagcaatctcttagacg

SEQ ID NO: 32587 - DNA, 26 bp, Artificial sequence
  SiRNA target sequence
tttcgtcccagcaatctcttagacgc

SEQ ID NO: 32588 - DNA, 26 bp, Artificial sequence
  SiRNA target sequence
ttcgtcccagcaatctcttagacgca

SEQ ID NO: 32589 - DNA, 26 bp, Artificial sequence
  SiRNA target sequence
tcgtcccagcaatctcttagacgcaa

SEQ ID NO: 32590 - DNA, 26 bp, Artificial sequence
  SiRNA target sequence
cgtcccagcaatctcttagacgcaaa

SEQ ID NO: 32591 - DNA, 26 bp, Artificial sequence
  SiRNA target sequence
gtcccagcaatctcttagacgcaaaa

SEQ ID NO: 32592 - DNA, 26 bp, Artificial sequence
  SiRNA target sequence
tcccagcaatctcttagacgcaaaaa

SEQ ID NO: 32593 - DNA, 26 bp, Artificial sequence
  SiRNA target sequence
cccagcaatctcttagacgcaaaaat

SEQ ID NO: 32594 - DNA, 26 bp, Artificial sequence
  SiRNA target sequence
ccagcaatctcttagacgcaaaaatc

SEQ ID NO: 32595 - DNA, 26 bp, Artificial sequence
  SiRNA target sequence
cagcaatctcttagacgcaaaaatcg

SEQ ID NO: 32596 - DNA, 26 bp, Artificial sequence
  SiRNA target sequence
agcaatctcttagacgcaaaaatcgt

SEQ ID NO: 32597 - DNA, 26 bp, Artificial sequence
  SiRNA target sequence
gcaatctcttagacgcaaaaatcgta

SEQ ID NO: 32598 - DNA, 26 bp, Artificial sequence
  SiRNA target sequence
caatctcttagacgcaaaaatcgtat

SEQ ID NO: 32599 - DNA, 26 bp, Artificial sequence
  SiRNA target sequence
aatctcttagacgcaaaaatcgtatt

SEQ ID NO: 32600 - DNA, 26 bp, Artificial sequence
  SiRNA target sequence
atctcttagacgcaaaaatcgtattc

SEQ ID NO: 32601 - DNA, 26 bp, Artificial sequence
  SiRNA target sequence
tctcttagacgcaaaaatcgtattct

SEQ ID NO: 32602 - DNA, 26 bp, Artificial sequence
  SiRNA target sequence
ctcttagacgcaaaaatcgtattctt

SEQ ID NO: 32603 - DNA, 26 bp, Artificial sequence
  SiRNA target sequence
tcttagacgcaaaaatcgtattcttg

SEQ ID NO: 32604 - DNA, 26 bp, Artificial sequence
  SiRNA target sequence
cttagacgcaaaaatcgtattcttgg

SEQ ID NO: 32605 - DNA, 26 bp, Artificial sequence
  SiRNA target sequence
ttagacgcaaaaatcgtattcttggg

SEQ ID NO: 32606 - DNA, 26 bp, Artificial sequence
  SiRNA target sequence
tagacgcaaaaatcgtattcttggga

SEQ ID NO: 32607 - DNA, 26 bp, Artificial sequence
  SiRNA target sequence
agacgcaaaaatcgtattcttgggat

SEQ ID NO: 32608 - DNA, 26 bp, Artificial sequence
  SiRNA target sequence
gacgcaaaaatcgtattcttgggatg

SEQ ID NO: 32609 - DNA, 26 bp, Artificial sequence
  SiRNA target sequence
acgcaaaaatcgtattcttgggatgt

SEQ ID NO: 32610 - DNA, 26 bp, Artificial sequence
  SiRNA target sequence
cgcaaaaatcgtattcttgggatgta

SEQ ID NO: 32611 - DNA, 26 bp, Artificial sequence
  SiRNA target sequence
gcaaaaatcgtattcttgggatgtaa

SEQ ID NO: 32612 - DNA, 26 bp, Artificial sequence
  SiRNA target sequence
caaaaatcgtattcttgggatgtaat

SEQ ID NO: 32613 - DNA, 26 bp, Artificial sequence
  SiRNA target sequence
aaaaatcgtattcttgggatgtaata

SEQ ID NO: 32614 - DNA, 26 bp, Artificial sequence
  SiRNA target sequence
aaaatcgtattcttgggatgtaataa

SEQ ID NO: 32615 - DNA, 26 bp, Artificial sequence
  SiRNA target sequence
aaatcgtattcttgggatgtaataac

SEQ ID NO: 32616 - DNA, 26 bp, Artificial sequence
  SiRNA target sequence
aatcgtattcttgggatgtaataaca

SEQ ID NO: 32617 - DNA, 26 bp, Artificial sequence
  SiRNA target sequence
atcgtattcttgggatgtaataacaa

SEQ ID NO: 32618 - DNA, 26 bp, Artificial sequence
  SiRNA target sequence
tcgtattcttgggatgtaataacaag

SEQ ID NO: 32619 - DNA, 26 bp, Artificial sequence
  SiRNA target sequence
cgtattcttgggatgtaataacaagt

SEQ ID NO: 32620 - DNA, 26 bp, Artificial sequence
  SiRNA target sequence
gtattcttgggatgtaataacaagtt

SEQ ID NO: 32621 - DNA, 26 bp, Artificial sequence
  SiRNA target sequence
tattcttgggatgtaataacaagtta

SEQ ID NO: 32622 - DNA, 26 bp, Artificial sequence
  SiRNA target sequence
attcttgggatgtaataacaagttag

SEQ ID NO: 32623 - DNA, 26 bp, Artificial sequence
  SiRNA target sequence
ttcttgggatgtaataacaagttaga

SEQ ID NO: 32624 - DNA, 26 bp, Artificial sequence
  SiRNA target sequence
tcttgggatgtaataacaagttagac

SEQ ID NO: 32625 - DNA, 26 bp, Artificial sequence
  SiRNA target sequence
cttgggatgtaataacaagttagact

SEQ ID NO: 32626 - DNA, 26 bp, Artificial sequence
  SiRNA target sequence
ttgggatgtaataacaagttagactt

SEQ ID NO: 32627 - DNA, 26 bp, Artificial sequence
  SiRNA target sequence
tgggatgtaataacaagttagactta

SEQ ID NO: 32628 - DNA, 26 bp, Artificial sequence
  SiRNA target sequence
gggatgtaataacaagttagacttag

SEQ ID NO: 32629 - DNA, 26 bp, Artificial sequence
  SiRNA target sequence
ggatgtaataacaagttagacttagc

SEQ ID NO: 32630 - DNA, 26 bp, Artificial sequence
  SiRNA target sequence
gatgtaataacaagttagacttagct

SEQ ID NO: 32631 - DNA, 26 bp, Artificial sequence
  SiRNA target sequence
atgtaataacaagttagacttagctt

SEQ ID NO: 32632 - DNA, 26 bp, Artificial sequence
  SiRNA target sequence
tgtaataacaagttagacttagcttg

SEQ ID NO: 32633 - DNA, 26 bp, Artificial sequence
  SiRNA target sequence
gtaataacaagttagacttagcttgc

SEQ ID NO: 32634 - DNA, 26 bp, Artificial sequence
  SiRNA target sequence
taataacaagttagacttagcttgct

SEQ ID NO: 32635 - DNA, 26 bp, Artificial sequence
  SiRNA target sequence
aataacaagttagacttagcttgctc

SEQ ID NO: 32636 - DNA, 26 bp, Artificial sequence
  SiRNA target sequence
ataacaagttagacttagcttgctca

SEQ ID NO: 32637 - DNA, 26 bp, Artificial sequence
  SiRNA target sequence
taacaagttagacttagcttgctcac

SEQ ID NO: 32638 - DNA, 26 bp, Artificial sequence
  SiRNA target sequence
aacaagttagacttagcttgctcacc

SEQ ID NO: 32639 - DNA, 26 bp, Artificial sequence
  SiRNA target sequence
acaagttagacttagcttgctcacct

SEQ ID NO: 32640 - DNA, 26 bp, Artificial sequence
  SiRNA target sequence
caagttagacttagcttgctcacctg

SEQ ID NO: 32641 - DNA, 26 bp, Artificial sequence
  SiRNA target sequence
aagttagacttagcttgctcacctgt

SEQ ID NO: 32642 - DNA, 26 bp, Artificial sequence
  SiRNA target sequence
agttagacttagcttgctcacctgtt

SEQ ID NO: 32643 - DNA, 26 bp, Artificial sequence
  SiRNA target sequence
gttagacttagcttgctcacctgtta

SEQ ID NO: 32644 - DNA, 26 bp, Artificial sequence
  SiRNA target sequence
ttagacttagcttgctcacctgttaa

SEQ ID NO: 32645 - DNA, 26 bp, Artificial sequence
  SiRNA target sequence
tagacttagcttgctcacctgttaaa

SEQ ID NO: 32646 - DNA, 26 bp, Artificial sequence
  SiRNA target sequence
agacttagcttgctcacctgttaaaa

SEQ ID NO: 32647 - DNA, 26 bp, Artificial sequence
  SiRNA target sequence
gacttagcttgctcacctgttaaaat

SEQ ID NO: 32648 - DNA, 26 bp, Artificial sequence
  SiRNA target sequence
acttagcttgctcacctgttaaaatt

SEQ ID NO: 32649 - DNA, 26 bp, Artificial sequence
  SiRNA target sequence
cttagcttgctcacctgttaaaattt

SEQ ID NO: 32650 - DNA, 26 bp, Artificial sequence
  SiRNA target sequence
ttagcttgctcacctgttaaaatttt

SEQ ID NO: 32651 - DNA, 26 bp, Artificial sequence
  SiRNA target sequence
tagcttgctcacctgttaaaatttta

SEQ ID NO: 32652 - DNA, 26 bp, Artificial sequence
  SiRNA target sequence
agcttgctcacctgttaaaattttat

SEQ ID NO: 32653 - DNA, 26 bp, Artificial sequence
  SiRNA target sequence
gcttgctcacctgttaaaattttatc

SEQ ID NO: 32654 - DNA, 26 bp, Artificial sequence
  SiRNA target sequence
cttgctcacctgttaaaattttatct

SEQ ID NO: 32655 - DNA, 26 bp, Artificial sequence
  SiRNA target sequence
ttgctcacctgttaaaattttatctt

SEQ ID NO: 32656 - DNA, 26 bp, Artificial sequence
  SiRNA target sequence
tgctcacctgttaaaattttatcttt

SEQ ID NO: 32657 - DNA, 26 bp, Artificial sequence
  SiRNA target sequence
gctcacctgttaaaattttatcttta

SEQ ID NO: 32658 - DNA, 26 bp, Artificial sequence
  SiRNA target sequence
ctcacctgttaaaattttatctttaa

SEQ ID NO: 32659 - DNA, 26 bp, Artificial sequence
  SiRNA target sequence
tcacctgttaaaattttatctttaaa

SEQ ID NO: 32660 - DNA, 26 bp, Artificial sequence
  SiRNA target sequence
cacctgttaaaattttatctttaaaa

SEQ ID NO: 32661 - DNA, 26 bp, Artificial sequence
  SiRNA target sequence
acctgttaaaattttatctttaaaaa

SEQ ID NO: 32662 - DNA, 26 bp, Artificial sequence
  SiRNA target sequence
cctgttaaaattttatctttaaaaat

SEQ ID NO: 32663 - DNA, 26 bp, Artificial sequence
  SiRNA target sequence
ctgttaaaattttatctttaaaaatt

SEQ ID NO: 32664 - DNA, 26 bp, Artificial sequence
  SiRNA target sequence
tgttaaaattttatctttaaaaattg

SEQ ID NO: 32665 - DNA, 26 bp, Artificial sequence
  SiRNA target sequence
gttaaaattttatctttaaaaattga

SEQ ID NO: 32666 - DNA, 26 bp, Artificial sequence
  SiRNA target sequence
ttaaaattttatctttaaaaattgat

SEQ ID NO: 32667 - DNA, 26 bp, Artificial sequence
  SiRNA target sequence
taaaattttatctttaaaaattgata

SEQ ID NO: 32668 - DNA, 26 bp, Artificial sequence
  SiRNA target sequence
aaaattttatctttaaaaattgatac

SEQ ID NO: 32669 - DNA, 26 bp, Artificial sequence
  SiRNA target sequence
aaattttatctttaaaaattgatacc

SEQ ID NO: 32670 - DNA, 26 bp, Artificial sequence
  SiRNA target sequence
aattttatctttaaaaattgatacca

SEQ ID NO: 32671 - DNA, 26 bp, Artificial sequence
  SiRNA target sequence
attttatctttaaaaattgataccac

SEQ ID NO: 32672 - DNA, 26 bp, Artificial sequence
  SiRNA target sequence
ttttatctttaaaaattgataccacc

SEQ ID NO: 32673 - DNA, 26 bp, Artificial sequence
  SiRNA target sequence
tttatctttaaaaattgataccaccg

SEQ ID NO: 32674 - DNA, 26 bp, Artificial sequence
  SiRNA target sequence
ttatctttaaaaattgataccaccga

SEQ ID NO: 32675 - DNA, 26 bp, Artificial sequence
  SiRNA target sequence
tatctttaaaaattgataccaccgat

SEQ ID NO: 32676 - DNA, 26 bp, Artificial sequence
  SiRNA target sequence
atctttaaaaattgataccaccgatg

SEQ ID NO: 32677 - DNA, 26 bp, Artificial sequence
  SiRNA target sequence
tctttaaaaattgataccaccgatgg

SEQ ID NO: 32678 - DNA, 26 bp, Artificial sequence
  SiRNA target sequence
ctttaaaaattgataccaccgatggt

SEQ ID NO: 32679 - DNA, 26 bp, Artificial sequence
  SiRNA target sequence
tttaaaaattgataccaccgatggtg

SEQ ID NO: 32680 - DNA, 26 bp, Artificial sequence
  SiRNA target sequence
ttaaaaattgataccaccgatggtgt

SEQ ID NO: 32681 - DNA, 26 bp, Artificial sequence
  SiRNA target sequence
taaaaattgataccaccgatggtgta

SEQ ID NO: 32682 - DNA, 26 bp, Artificial sequence
  SiRNA target sequence
aaaaattgataccaccgatggtgtag

SEQ ID NO: 32683 - DNA, 26 bp, Artificial sequence
  SiRNA target sequence
aaaattgataccaccgatggtgtagt

SEQ ID NO: 32684 - DNA, 26 bp, Artificial sequence
  SiRNA target sequence
aaattgataccaccgatggtgtagtt

SEQ ID NO: 32685 - DNA, 26 bp, Artificial sequence
  SiRNA target sequence
aattgataccaccgatggtgtagttc

SEQ ID NO: 32686 - DNA, 26 bp, Artificial sequence
  SiRNA target sequence
attgataccaccgatggtgtagttct

SEQ ID NO: 32687 - DNA, 26 bp, Artificial sequence
  SiRNA target sequence
ttgataccaccgatggtgtagttcta

SEQ ID NO: 32688 - DNA, 26 bp, Artificial sequence
  SiRNA target sequence
tgataccaccgatggtgtagttctac

SEQ ID NO: 32689 - DNA, 26 bp, Artificial sequence
  SiRNA target sequence
gataccaccgatggtgtagttctacc

SEQ ID NO: 32690 - DNA, 26 bp, Artificial sequence
  SiRNA target sequence
ataccaccgatggtgtagttctacca

SEQ ID NO: 32691 - DNA, 26 bp, Artificial sequence
  SiRNA target sequence
taccaccgatggtgtagttctaccac

SEQ ID NO: 32692 - DNA, 26 bp, Artificial sequence
  SiRNA target sequence
accaccgatggtgtagttctaccacc

SEQ ID NO: 32693 - DNA, 26 bp, Artificial sequence
  SiRNA target sequence
ccaccgatggtgtagttctaccacct

SEQ ID NO: 32694 - DNA, 26 bp, Artificial sequence
  SiRNA target sequence
caccgatggtgtagttctaccacctt

SEQ ID NO: 32695 - DNA, 26 bp, Artificial sequence
  SiRNA target sequence
accgatggtgtagttctaccaccttc

SEQ ID NO: 32696 - DNA, 26 bp, Artificial sequence
  SiRNA target sequence
ccgatggtgtagttctaccaccttct

SEQ ID NO: 32697 - DNA, 26 bp, Artificial sequence
  SiRNA target sequence
cgatggtgtagttctaccaccttctt

SEQ ID NO: 32698 - DNA, 26 bp, Artificial sequence
  SiRNA target sequence
gatggtgtagttctaccaccttcttc

SEQ ID NO: 32699 - DNA, 26 bp, Artificial sequence
  SiRNA target sequence
atggtgtagttctaccaccttcttcg

SEQ ID NO: 32700 - DNA, 26 bp, Artificial sequence
  SiRNA target sequence
tggtgtagttctaccaccttcttcgt

SEQ ID NO: 32701 - DNA, 26 bp, Artificial sequence
  SiRNA target sequence
ggtgtagttctaccaccttcttcgtt

SEQ ID NO: 32702 - DNA, 26 bp, Artificial sequence
  SiRNA target sequence
gtgtagttctaccaccttcttcgttt

SEQ ID NO: 32703 - DNA, 26 bp, Artificial sequence
  SiRNA target sequence
tgtagttctaccaccttcttcgtttt

SEQ ID NO: 32704 - DNA, 26 bp, Artificial sequence
  SiRNA target sequence
gtagttctaccaccttcttcgttttc

SEQ ID NO: 32705 - DNA, 26 bp, Artificial sequence
  SiRNA target sequence
tagttctaccaccttcttcgttttca

SEQ ID NO: 32706 - DNA, 26 bp, Artificial sequence
  SiRNA target sequence
agttctaccaccttcttcgttttcaa

SEQ ID NO: 32707 - DNA, 26 bp, Artificial sequence
  SiRNA target sequence
gttctaccaccttcttcgttttcaat

SEQ ID NO: 32708 - DNA, 26 bp, Artificial sequence
  SiRNA target sequence
ttctaccaccttcttcgttttcaata

SEQ ID NO: 32709 - DNA, 26 bp, Artificial sequence
  SiRNA target sequence
tctaccaccttcttcgttttcaataa

SEQ ID NO: 32710 - DNA, 26 bp, Artificial sequence
  SiRNA target sequence
ctaccaccttcttcgttttcaataat

SEQ ID NO: 32711 - DNA, 26 bp, Artificial sequence
  SiRNA target sequence
taccaccttcttcgttttcaataatt

SEQ ID NO: 32712 - DNA, 26 bp, Artificial sequence
  SiRNA target sequence
accaccttcttcgttttcaataattt

SEQ ID NO: 32713 - DNA, 26 bp, Artificial sequence
  SiRNA target sequence
ccaccttcttcgttttcaataatttg

SEQ ID NO: 32714 - DNA, 26 bp, Artificial sequence
  SiRNA target sequence
caccttcttcgttttcaataatttgt

SEQ ID NO: 32715 - DNA, 26 bp, Artificial sequence
  SiRNA target sequence
accttcttcgttttcaataatttgtg

SEQ ID NO: 32716 - DNA, 26 bp, Artificial sequence
  SiRNA target sequence
ccttcttcgttttcaataatttgtgg

SEQ ID NO: 32717 - DNA, 26 bp, Artificial sequence
  SiRNA target sequence
cttcttcgttttcaataatttgtggg

SEQ ID NO: 32718 - DNA, 26 bp, Artificial sequence
  SiRNA target sequence
ttcttcgttttcaataatttgtggga

SEQ ID NO: 32719 - DNA, 26 bp, Artificial sequence
  SiRNA target sequence
tcttcgttttcaataatttgtgggat

SEQ ID NO: 32720 - DNA, 26 bp, Artificial sequence
  SiRNA target sequence
cttcgttttcaataatttgtgggata

SEQ ID NO: 32721 - DNA, 26 bp, Artificial sequence
  SiRNA target sequence
ttcgttttcaataatttgtgggatat

SEQ ID NO: 32722 - DNA, 26 bp, Artificial sequence
  SiRNA target sequence
tcgttttcaataatttgtgggatatt

SEQ ID NO: 32723 - DNA, 26 bp, Artificial sequence
  SiRNA target sequence
cgttttcaataatttgtgggatattg

SEQ ID NO: 32724 - DNA, 26 bp, Artificial sequence
  SiRNA target sequence
gttttcaataatttgtgggatattgt

SEQ ID NO: 32725 - DNA, 26 bp, Artificial sequence
  SiRNA target sequence
ttttcaataatttgtgggatattgtt

SEQ ID NO: 32726 - DNA, 26 bp, Artificial sequence
  SiRNA target sequence
tttcaataatttgtgggatattgtta

SEQ ID NO: 32727 - DNA, 26 bp, Artificial sequence
  SiRNA target sequence
ttcaataatttgtgggatattgttat

SEQ ID NO: 32728 - DNA, 26 bp, Artificial sequence
  SiRNA target sequence
tcaataatttgtgggatattgttatg

SEQ ID NO: 32729 - DNA, 26 bp, Artificial sequence
  SiRNA target sequence
caataatttgtgggatattgttatgt

SEQ ID NO: 32730 - DNA, 26 bp, Artificial sequence
  SiRNA target sequence
aataatttgtgggatattgttatgta

SEQ ID NO: 32731 - DNA, 26 bp, Artificial sequence
  SiRNA target sequence
ataatttgtgggatattgttatgtat

SEQ ID NO: 32732 - DNA, 26 bp, Artificial sequence
  SiRNA target sequence
taatttgtgggatattgttatgtata

SEQ ID NO: 32733 - DNA, 26 bp, Artificial sequence
  SiRNA target sequence
aatttgtgggatattgttatgtataa

SEQ ID NO: 32734 - DNA, 26 bp, Artificial sequence
  SiRNA target sequence
atttgtgggatattgttatgtataag

SEQ ID NO: 32735 - DNA, 26 bp, Artificial sequence
  SiRNA target sequence
tttgtgggatattgttatgtataaga

SEQ ID NO: 32736 - DNA, 26 bp, Artificial sequence
  SiRNA target sequence
ttgtgggatattgttatgtataagag

SEQ ID NO: 32737 - DNA, 26 bp, Artificial sequence
  SiRNA target sequence
tgtgggatattgttatgtataagaga

SEQ ID NO: 32738 - DNA, 26 bp, Artificial sequence
  SiRNA target sequence
gtgggatattgttatgtataagagac

SEQ ID NO: 32739 - DNA, 26 bp, Artificial sequence
  SiRNA target sequence
tgggatattgttatgtataagagaca

SEQ ID NO: 32740 - DNA, 26 bp, Artificial sequence
  SiRNA target sequence
gggatattgttatgtataagagacac

SEQ ID NO: 32741 - DNA, 26 bp, Artificial sequence
  SiRNA target sequence
ggatattgttatgtataagagacaca

SEQ ID NO: 32742 - DNA, 26 bp, Artificial sequence
  SiRNA target sequence
gatattgttatgtataagagacacac

SEQ ID NO: 32743 - DNA, 26 bp, Artificial sequence
  SiRNA target sequence
atattgttatgtataagagacacaca

SEQ ID NO: 32744 - DNA, 26 bp, Artificial sequence
  SiRNA target sequence
tattgttatgtataagagacacacaa

SEQ ID NO: 32745 - DNA, 26 bp, Artificial sequence
  SiRNA target sequence
attgttatgtataagagacacacaag

SEQ ID NO: 32746 - DNA, 26 bp, Artificial sequence
  SiRNA target sequence
ttgttatgtataagagacacacaaga

SEQ ID NO: 32747 - DNA, 26 bp, Artificial sequence
  SiRNA target sequence
tgttatgtataagagacacacaagaa

SEQ ID NO: 32748 - DNA, 26 bp, Artificial sequence
  SiRNA target sequence
gttatgtataagagacacacaagaat

SEQ ID NO: 32749 - DNA, 26 bp, Artificial sequence
  SiRNA target sequence
ttatgtataagagacacacaagaatt

SEQ ID NO: 32750 - DNA, 26 bp, Artificial sequence
  SiRNA target sequence
tatgtataagagacacacaagaattg

SEQ ID NO: 32751 - DNA, 26 bp, Artificial sequence
  SiRNA target sequence
atgtataagagacacacaagaattgg

SEQ ID NO: 32752 - DNA, 26 bp, Artificial sequence
  SiRNA target sequence
tgtataagagacacacaagaattggt

SEQ ID NO: 32753 - DNA, 26 bp, Artificial sequence
  SiRNA target sequence
gtataagagacacacaagaattggtt

SEQ ID NO: 32754 - DNA, 26 bp, Artificial sequence
  SiRNA target sequence
tataagagacacacaagaattggttg

SEQ ID NO: 32755 - DNA, 26 bp, Artificial sequence
  SiRNA target sequence
ataagagacacacaagaattggttgt

SEQ ID NO: 32756 - DNA, 26 bp, Artificial sequence
  SiRNA target sequence
taagagacacacaagaattggttgtt

SEQ ID NO: 32757 - DNA, 26 bp, Artificial sequence
  SiRNA target sequence
aagagacacacaagaattggttgttc

SEQ ID NO: 32758 - DNA, 26 bp, Artificial sequence
  SiRNA target sequence
agagacacacaagaattggttgttcc

SEQ ID NO: 32759 - DNA, 26 bp, Artificial sequence
  SiRNA target sequence
gagacacacaagaattggttgttcct

SEQ ID NO: 32760 - DNA, 26 bp, Artificial sequence
  SiRNA target sequence
agacacacaagaattggttgttccta

SEQ ID NO: 32761 - DNA, 26 bp, Artificial sequence
  SiRNA target sequence
gacacacaagaattggttgttcctag

SEQ ID NO: 32762 - DNA, 26 bp, Artificial sequence
  SiRNA target sequence
acacacaagaattggttgttcctaga

SEQ ID NO: 32763 - DNA, 26 bp, Artificial sequence
  SiRNA target sequence
cacacaagaattggttgttcctagat

SEQ ID NO: 32764 - DNA, 26 bp, Artificial sequence
  SiRNA target sequence
acacaagaattggttgttcctagatc

SEQ ID NO: 32765 - DNA, 26 bp, Artificial sequence
  SiRNA target sequence
cacaagaattggttgttcctagatca

SEQ ID NO: 32766 - DNA, 26 bp, Artificial sequence
  SiRNA target sequence
acaagaattggttgttcctagatcaa

SEQ ID NO: 32767 - DNA, 26 bp, Artificial sequence
  SiRNA target sequence
caagaattggttgttcctagatcaat

SEQ ID NO: 32768 - DNA, 26 bp, Artificial sequence
  SiRNA target sequence
aagaattggttgttcctagatcaatt

SEQ ID NO: 32769 - DNA, 26 bp, Artificial sequence
  SiRNA target sequence
agaattggttgttcctagatcaattc

SEQ ID NO: 32770 - DNA, 26 bp, Artificial sequence
  SiRNA target sequence
gaattggttgttcctagatcaattcc

SEQ ID NO: 32771 - DNA, 26 bp, Artificial sequence
  SiRNA target sequence
aattggttgttcctagatcaattcct

SEQ ID NO: 32772 - DNA, 26 bp, Artificial sequence
  SiRNA target sequence
attggttgttcctagatcaattccta

SEQ ID NO: 32773 - DNA, 26 bp, Artificial sequence
  SiRNA target sequence
ttggttgttcctagatcaattcctat

SEQ ID NO: 32774 - DNA, 26 bp, Artificial sequence
  SiRNA target sequence
tggttgttcctagatcaattcctatt

SEQ ID NO: 32775 - DNA, 26 bp, Artificial sequence
  SiRNA target sequence
ggttgttcctagatcaattcctatta

SEQ ID NO: 32776 - DNA, 26 bp, Artificial sequence
  SiRNA target sequence
gttgttcctagatcaattcctattat

SEQ ID NO: 32777 - DNA, 26 bp, Artificial sequence
  SiRNA target sequence
ttgttcctagatcaattcctattatt

SEQ ID NO: 32778 - DNA, 26 bp, Artificial sequence
  SiRNA target sequence
tgttcctagatcaattcctattattt

SEQ ID NO: 32779 - DNA, 26 bp, Artificial sequence
  SiRNA target sequence
gttcctagatcaattcctattatttt

SEQ ID NO: 32780 - DNA, 26 bp, Artificial sequence
  SiRNA target sequence
ttcctagatcaattcctattatttta

SEQ ID NO: 32781 - DNA, 26 bp, Artificial sequence
  SiRNA target sequence
tcctagatcaattcctattattttag

SEQ ID NO: 32782 - DNA, 26 bp, Artificial sequence
  SiRNA target sequence
cctagatcaattcctattattttaga

SEQ ID NO: 32783 - DNA, 26 bp, Artificial sequence
  SiRNA target sequence
ctagatcaattcctattattttagag

SEQ ID NO: 32784 - DNA, 26 bp, Artificial sequence
  SiRNA target sequence
tagatcaattcctattattttagagc

SEQ ID NO: 32785 - DNA, 26 bp, Artificial sequence
  SiRNA target sequence
agatcaattcctattattttagagct

SEQ ID NO: 32786 - DNA, 26 bp, Artificial sequence
  SiRNA target sequence
gatcaattcctattattttagagcta

SEQ ID NO: 32787 - DNA, 26 bp, Artificial sequence
  SiRNA target sequence
atcaattcctattattttagagctaa

SEQ ID NO: 32788 - DNA, 26 bp, Artificial sequence
  SiRNA target sequence
tcaattcctattattttagagctaat

SEQ ID NO: 32789 - DNA, 26 bp, Artificial sequence
  SiRNA target sequence
caattcctattattttagagctaatt

SEQ ID NO: 32790 - DNA, 26 bp, Artificial sequence
  SiRNA target sequence
aattcctattattttagagctaattt

SEQ ID NO: 32791 - DNA, 26 bp, Artificial sequence
  SiRNA target sequence
attcctattattttagagctaatttc

SEQ ID NO: 32792 - DNA, 26 bp, Artificial sequence
  SiRNA target sequence
ttcctattattttagagctaatttct

SEQ ID NO: 32793 - DNA, 26 bp, Artificial sequence
  SiRNA target sequence
tcctattattttagagctaatttctt

SEQ ID NO: 32794 - DNA, 26 bp, Artificial sequence
  SiRNA target sequence
cctattattttagagctaatttcttc

SEQ ID NO: 32795 - DNA, 26 bp, Artificial sequence
  SiRNA target sequence
ctattattttagagctaatttcttct

SEQ ID NO: 32796 - DNA, 26 bp, Artificial sequence
  SiRNA target sequence
tattattttagagctaatttcttctt

SEQ ID NO: 32797 - DNA, 26 bp, Artificial sequence
  SiRNA target sequence
attattttagagctaatttcttcttt

SEQ ID NO: 32798 - DNA, 26 bp, Artificial sequence
  SiRNA target sequence
ttattttagagctaatttcttcttta

SEQ ID NO: 32799 - DNA, 26 bp, Artificial sequence
  SiRNA target sequence
tattttagagctaatttcttctttag

SEQ ID NO: 32800 - DNA, 26 bp, Artificial sequence
  SiRNA target sequence
attttagagctaatttcttctttaga

SEQ ID NO: 32801 - DNA, 26 bp, Artificial sequence
  SiRNA target sequence
ttttagagctaatttcttctttagac

SEQ ID NO: 32802 - DNA, 26 bp, Artificial sequence
  SiRNA target sequence
tttagagctaatttcttctttagaca

SEQ ID NO: 32803 - DNA, 26 bp, Artificial sequence
  SiRNA target sequence
ttagagctaatttcttctttagacat

SEQ ID NO: 32804 - DNA, 27 bp, Artificial sequence
  SiRNA target sequence
ttaagaatttttcaatattttttttgc

SEQ ID NO: 32805 - DNA, 27 bp, Artificial sequence
  SiRNA target sequence
taagaatttttcaatattttttttgct

SEQ ID NO: 32806 - DNA, 27 bp, Artificial sequence
  SiRNA target sequence
aagaatttttcaatattttttttgctt

SEQ ID NO: 32807 - DNA, 27 bp, Artificial sequence
  SiRNA target sequence
agaatttttcaatattttttttgcttg

SEQ ID NO: 32808 - DNA, 27 bp, Artificial sequence
  SiRNA target sequence
gaatttttcaatattttttttgcttgt

SEQ ID NO: 32809 - DNA, 27 bp, Artificial sequence
  SiRNA target sequence
aatttttcaatattttttttgcttgtt

SEQ ID NO: 32810 - DNA, 27 bp, Artificial sequence
  SiRNA target sequence
atttttcaatattttttttgcttgttc

SEQ ID NO: 32811 - DNA, 27 bp, Artificial sequence
  SiRNA target sequence
tttttcaatattttttttgcttgttct

SEQ ID NO: 32812 - DNA, 27 bp, Artificial sequence
  SiRNA target sequence
ttttcaatattttttttgcttgttcta

SEQ ID NO: 32813 - DNA, 27 bp, Artificial sequence
  SiRNA target sequence
tttcaatattttttttgcttgttctaa

SEQ ID NO: 32814 - DNA, 27 bp, Artificial sequence
  SiRNA target sequence
ttcaatattttttttgcttgttctaag

SEQ ID NO: 32815 - DNA, 27 bp, Artificial sequence
  SiRNA target sequence
tcaatattttttttgcttgttctaagt

SEQ ID NO: 32816 - DNA, 27 bp, Artificial sequence
  SiRNA target sequence
caatattttttttgcttgttctaagtc

SEQ ID NO: 32817 - DNA, 27 bp, Artificial sequence
  SiRNA target sequence
aatattttttttgcttgttctaagtca

SEQ ID NO: 32818 - DNA, 27 bp, Artificial sequence
  SiRNA target sequence
atattttttttgcttgttctaagtcat

SEQ ID NO: 32819 - DNA, 27 bp, Artificial sequence
  SiRNA target sequence
tattttttttgcttgttctaagtcata

SEQ ID NO: 32820 - DNA, 27 bp, Artificial sequence
  SiRNA target sequence
attttttttgcttgttctaagtcataa

SEQ ID NO: 32821 - DNA, 27 bp, Artificial sequence
  SiRNA target sequence
ttttttttgcttgttctaagtcataaa

SEQ ID NO: 32822 - DNA, 27 bp, Artificial sequence
  SiRNA target sequence
tttttttgcttgttctaagtcataaat

SEQ ID NO: 32823 - DNA, 27 bp, Artificial sequence
  SiRNA target sequence
ttttttgcttgttctaagtcataaatt

SEQ ID NO: 32824 - DNA, 27 bp, Artificial sequence
  SiRNA target sequence
tttttgcttgttctaagtcataaattt

SEQ ID NO: 32825 - DNA, 27 bp, Artificial sequence
  SiRNA target sequence
ttttgcttgttctaagtcataaatttt

SEQ ID NO: 32826 - DNA, 27 bp, Artificial sequence
  SiRNA target sequence
tttgcttgttctaagtcataaattttt

SEQ ID NO: 32827 - DNA, 27 bp, Artificial sequence
  SiRNA target sequence
ttgcttgttctaagtcataaatttttt

SEQ ID NO: 32828 - DNA, 27 bp, Artificial sequence
  SiRNA target sequence
tgcttgttctaagtcataaattttttt

SEQ ID NO: 32829 - DNA, 27 bp, Artificial sequence
  SiRNA target sequence
gcttgttctaagtcataaattttttta

SEQ ID NO: 32830 - DNA, 27 bp, Artificial sequence
  SiRNA target sequence
cttgttctaagtcataaatttttttag

SEQ ID NO: 32831 - DNA, 27 bp, Artificial sequence
  SiRNA target sequence
ttgttctaagtcataaatttttttagt

SEQ ID NO: 32832 - DNA, 27 bp, Artificial sequence
  SiRNA target sequence
tgttctaagtcataaatttttttagtc

SEQ ID NO: 32833 - DNA, 27 bp, Artificial sequence
  SiRNA target sequence
gttctaagtcataaatttttttagtca

SEQ ID NO: 32834 - DNA, 27 bp, Artificial sequence
  SiRNA target sequence
ttctaagtcataaatttttttagtcaa

SEQ ID NO: 32835 - DNA, 27 bp, Artificial sequence
  SiRNA target sequence
tctaagtcataaatttttttagtcaaa

SEQ ID NO: 32836 - DNA, 27 bp, Artificial sequence
  SiRNA target sequence
ctaagtcataaatttttttagtcaaat

SEQ ID NO: 32837 - DNA, 27 bp, Artificial sequence
  SiRNA target sequence
taagtcataaatttttttagtcaaata

SEQ ID NO: 32838 - DNA, 27 bp, Artificial sequence
  SiRNA target sequence
aagtcataaatttttttagtcaaatat

SEQ ID NO: 32839 - DNA, 27 bp, Artificial sequence
  SiRNA target sequence
agtcataaatttttttagtcaaatatg

SEQ ID NO: 32840 - DNA, 27 bp, Artificial sequence
  SiRNA target sequence
gtcataaatttttttagtcaaatatga

SEQ ID NO: 32841 - DNA, 27 bp, Artificial sequence
  SiRNA target sequence
tcataaatttttttagtcaaatatgac

SEQ ID NO: 32842 - DNA, 27 bp, Artificial sequence
  SiRNA target sequence
cataaatttttttagtcaaatatgact

SEQ ID NO: 32843 - DNA, 27 bp, Artificial sequence
  SiRNA target sequence
ataaatttttttagtcaaatatgactt

SEQ ID NO: 32844 - DNA, 27 bp, Artificial sequence
  SiRNA target sequence
taaatttttttagtcaaatatgacttt

SEQ ID NO: 32845 - DNA, 27 bp, Artificial sequence
  SiRNA target sequence
aaatttttttagtcaaatatgacttta

SEQ ID NO: 32846 - DNA, 27 bp, Artificial sequence
  SiRNA target sequence
aatttttttagtcaaatatgactttaa

SEQ ID NO: 32847 - DNA, 27 bp, Artificial sequence
  SiRNA target sequence
atttttttagtcaaatatgactttaaa

SEQ ID NO: 32848 - DNA, 27 bp, Artificial sequence
  SiRNA target sequence
tttttttagtcaaatatgactttaaaa

SEQ ID NO: 32849 - DNA, 27 bp, Artificial sequence
  SiRNA target sequence
ttttttagtcaaatatgactttaaaat

SEQ ID NO: 32850 - DNA, 27 bp, Artificial sequence
  SiRNA target sequence
tttttagtcaaatatgactttaaaatc

SEQ ID NO: 32851 - DNA, 27 bp, Artificial sequence
  SiRNA target sequence
ttttagtcaaatatgactttaaaatct

SEQ ID NO: 32852 - DNA, 27 bp, Artificial sequence
  SiRNA target sequence
tttagtcaaatatgactttaaaatctc

SEQ ID NO: 32853 - DNA, 27 bp, Artificial sequence
  SiRNA target sequence
ttagtcaaatatgactttaaaatctct

SEQ ID NO: 32854 - DNA, 27 bp, Artificial sequence
  SiRNA target sequence
tagtcaaatatgactttaaaatctctt

SEQ ID NO: 32855 - DNA, 27 bp, Artificial sequence
  SiRNA target sequence
agtcaaatatgactttaaaatctcttt

SEQ ID NO: 32856 - DNA, 27 bp, Artificial sequence
  SiRNA target sequence
gtcaaatatgactttaaaatctctttt

SEQ ID NO: 32857 - DNA, 27 bp, Artificial sequence
  SiRNA target sequence
tcaaatatgactttaaaatctcttttg

SEQ ID NO: 32858 - DNA, 27 bp, Artificial sequence
  SiRNA target sequence
caaatatgactttaaaatctcttttgt

SEQ ID NO: 32859 - DNA, 27 bp, Artificial sequence
  SiRNA target sequence
aaatatgactttaaaatctcttttgtt

SEQ ID NO: 32860 - DNA, 27 bp, Artificial sequence
  SiRNA target sequence
aatatgactttaaaatctcttttgttt

SEQ ID NO: 32861 - DNA, 27 bp, Artificial sequence
  SiRNA target sequence
atatgactttaaaatctcttttgtttc

SEQ ID NO: 32862 - DNA, 27 bp, Artificial sequence
  SiRNA target sequence
tatgactttaaaatctcttttgtttca

SEQ ID NO: 32863 - DNA, 27 bp, Artificial sequence
  SiRNA target sequence
atgactttaaaatctcttttgtttcat

SEQ ID NO: 32864 - DNA, 27 bp, Artificial sequence
  SiRNA target sequence
tgactttaaaatctcttttgtttcatc

SEQ ID NO: 32865 - DNA, 27 bp, Artificial sequence
  SiRNA target sequence
gactttaaaatctcttttgtttcatct

SEQ ID NO: 32866 - DNA, 27 bp, Artificial sequence
  SiRNA target sequence
actttaaaatctcttttgtttcatctg

SEQ ID NO: 32867 - DNA, 27 bp, Artificial sequence
  SiRNA target sequence
ctttaaaatctcttttgtttcatctgt

SEQ ID NO: 32868 - DNA, 27 bp, Artificial sequence
  SiRNA target sequence
tttaaaatctcttttgtttcatctgtt

SEQ ID NO: 32869 - DNA, 27 bp, Artificial sequence
  SiRNA target sequence
ttaaaatctcttttgtttcatctgtta

SEQ ID NO: 32870 - DNA, 27 bp, Artificial sequence
  SiRNA target sequence
taaaatctcttttgtttcatctgttac

SEQ ID NO: 32871 - DNA, 27 bp, Artificial sequence
  SiRNA target sequence
aaaatctcttttgtttcatctgttact

SEQ ID NO: 32872 - DNA, 27 bp, Artificial sequence
  SiRNA target sequence
aaatctcttttgtttcatctgttactt

SEQ ID NO: 32873 - DNA, 27 bp, Artificial sequence
  SiRNA target sequence
aatctcttttgtttcatctgttacttg

SEQ ID NO: 32874 - DNA, 27 bp, Artificial sequence
  SiRNA target sequence
atctcttttgtttcatctgttacttgt

SEQ ID NO: 32875 - DNA, 27 bp, Artificial sequence
  SiRNA target sequence
tctcttttgtttcatctgttacttgtt

SEQ ID NO: 32876 - DNA, 27 bp, Artificial sequence
  SiRNA target sequence
ctcttttgtttcatctgttacttgttt

SEQ ID NO: 32877 - DNA, 27 bp, Artificial sequence
  SiRNA target sequence
tcttttgtttcatctgttacttgtttg

SEQ ID NO: 32878 - DNA, 27 bp, Artificial sequence
  SiRNA target sequence
cttttgtttcatctgttacttgtttgt

SEQ ID NO: 32879 - DNA, 27 bp, Artificial sequence
  SiRNA target sequence
ttttgtttcatctgttacttgtttgta

SEQ ID NO: 32880 - DNA, 27 bp, Artificial sequence
  SiRNA target sequence
tttgtttcatctgttacttgtttgtac

SEQ ID NO: 32881 - DNA, 27 bp, Artificial sequence
  SiRNA target sequence
ttgtttcatctgttacttgtttgtact

SEQ ID NO: 32882 - DNA, 27 bp, Artificial sequence
  SiRNA target sequence
tgtttcatctgttacttgtttgtactt

SEQ ID NO: 32883 - DNA, 27 bp, Artificial sequence
  SiRNA target sequence
gtttcatctgttacttgtttgtacttt

SEQ ID NO: 32884 - DNA, 27 bp, Artificial sequence
  SiRNA target sequence
tttcatctgttacttgtttgtacttta

SEQ ID NO: 32885 - DNA, 27 bp, Artificial sequence
  SiRNA target sequence
ttcatctgttacttgtttgtactttaa

SEQ ID NO: 32886 - DNA, 27 bp, Artificial sequence
  SiRNA target sequence
tcatctgttacttgtttgtactttaaa

SEQ ID NO: 32887 - DNA, 27 bp, Artificial sequence
  SiRNA target sequence
catctgttacttgtttgtactttaaaa

SEQ ID NO: 32888 - DNA, 27 bp, Artificial sequence
  SiRNA target sequence
atctgttacttgtttgtactttaaaaa

SEQ ID NO: 32889 - DNA, 27 bp, Artificial sequence
  SiRNA target sequence
tctgttacttgtttgtactttaaaaat

SEQ ID NO: 32890 - DNA, 27 bp, Artificial sequence
  SiRNA target sequence
ctgttacttgtttgtactttaaaaatt

SEQ ID NO: 32891 - DNA, 27 bp, Artificial sequence
  SiRNA target sequence
tgttacttgtttgtactttaaaaattg

SEQ ID NO: 32892 - DNA, 27 bp, Artificial sequence
  SiRNA target sequence
gttacttgtttgtactttaaaaattgt

SEQ ID NO: 32893 - DNA, 27 bp, Artificial sequence
  SiRNA target sequence
ttacttgtttgtactttaaaaattgtt

SEQ ID NO: 32894 - DNA, 27 bp, Artificial sequence
  SiRNA target sequence
tacttgtttgtactttaaaaattgttg

SEQ ID NO: 32895 - DNA, 27 bp, Artificial sequence
  SiRNA target sequence
acttgtttgtactttaaaaattgttga

SEQ ID NO: 32896 - DNA, 27 bp, Artificial sequence
  SiRNA target sequence
cttgtttgtactttaaaaattgttgaa

SEQ ID NO: 32897 - DNA, 27 bp, Artificial sequence
  SiRNA target sequence
ttgtttgtactttaaaaattgttgaat

SEQ ID NO: 32898 - DNA, 27 bp, Artificial sequence
  SiRNA target sequence
tgtttgtactttaaaaattgttgaatt

SEQ ID NO: 32899 - DNA, 27 bp, Artificial sequence
  SiRNA target sequence
gtttgtactttaaaaattgttgaattt

SEQ ID NO: 32900 - DNA, 27 bp, Artificial sequence
  SiRNA target sequence
tttgtactttaaaaattgttgaatttc

SEQ ID NO: 32901 - DNA, 27 bp, Artificial sequence
  SiRNA target sequence
ttgtactttaaaaattgttgaatttca

SEQ ID NO: 32902 - DNA, 27 bp, Artificial sequence
  SiRNA target sequence
tgtactttaaaaattgttgaatttcaa

SEQ ID NO: 32903 - DNA, 27 bp, Artificial sequence
  SiRNA target sequence
gtactttaaaaattgttgaatttcaat

SEQ ID NO: 32904 - DNA, 27 bp, Artificial sequence
  SiRNA target sequence
tactttaaaaattgttgaatttcaatt

SEQ ID NO: 32905 - DNA, 27 bp, Artificial sequence
  SiRNA target sequence
actttaaaaattgttgaatttcaattt

SEQ ID NO: 32906 - DNA, 27 bp, Artificial sequence
  SiRNA target sequence
ctttaaaaattgttgaatttcaatttt

SEQ ID NO: 32907 - DNA, 27 bp, Artificial sequence
  SiRNA target sequence
tttaaaaattgttgaatttcaatttta

SEQ ID NO: 32908 - DNA, 27 bp, Artificial sequence
  SiRNA target sequence
ttaaaaattgttgaatttcaattttaa

SEQ ID NO: 32909 - DNA, 27 bp, Artificial sequence
  SiRNA target sequence
taaaaattgttgaatttcaattttaaa

SEQ ID NO: 32910 - DNA, 27 bp, Artificial sequence
  SiRNA target sequence
aaaaattgttgaatttcaattttaaat

SEQ ID NO: 32911 - DNA, 27 bp, Artificial sequence
  SiRNA target sequence
aaaattgttgaatttcaattttaaatt

SEQ ID NO: 32912 - DNA, 27 bp, Artificial sequence
  SiRNA target sequence
aaattgttgaatttcaattttaaattc

SEQ ID NO: 32913 - DNA, 27 bp, Artificial sequence
  SiRNA target sequence
aattgttgaatttcaattttaaattcg

SEQ ID NO: 32914 - DNA, 27 bp, Artificial sequence
  SiRNA target sequence
attgttgaatttcaattttaaattcgg

SEQ ID NO: 32915 - DNA, 27 bp, Artificial sequence
  SiRNA target sequence
ttgttgaatttcaattttaaattcggc

SEQ ID NO: 32916 - DNA, 27 bp, Artificial sequence
  SiRNA target sequence
tgttgaatttcaattttaaattcggca

SEQ ID NO: 32917 - DNA, 27 bp, Artificial sequence
  SiRNA target sequence
gttgaatttcaattttaaattcggcac

SEQ ID NO: 32918 - DNA, 27 bp, Artificial sequence
  SiRNA target sequence
ttgaatttcaattttaaattcggcaca

SEQ ID NO: 32919 - DNA, 27 bp, Artificial sequence
  SiRNA target sequence
tgaatttcaattttaaattcggcacaa

SEQ ID NO: 32920 - DNA, 27 bp, Artificial sequence
  SiRNA target sequence
gaatttcaattttaaattcggcacaat

SEQ ID NO: 32921 - DNA, 27 bp, Artificial sequence
  SiRNA target sequence
aatttcaattttaaattcggcacaatt

SEQ ID NO: 32922 - DNA, 27 bp, Artificial sequence
  SiRNA target sequence
atttcaattttaaattcggcacaattt

SEQ ID NO: 32923 - DNA, 27 bp, Artificial sequence
  SiRNA target sequence
tttcaattttaaattcggcacaatttt

SEQ ID NO: 32924 - DNA, 27 bp, Artificial sequence
  SiRNA target sequence
ttcaattttaaattcggcacaattttt

SEQ ID NO: 32925 - DNA, 27 bp, Artificial sequence
  SiRNA target sequence
tcaattttaaattcggcacaatttttt

SEQ ID NO: 32926 - DNA, 27 bp, Artificial sequence
  SiRNA target sequence
caattttaaattcggcacaattttttt

SEQ ID NO: 32927 - DNA, 27 bp, Artificial sequence
  SiRNA target sequence
aattttaaattcggcacaatttttttc

SEQ ID NO: 32928 - DNA, 27 bp, Artificial sequence
  SiRNA target sequence
attttaaattcggcacaatttttttca

SEQ ID NO: 32929 - DNA, 27 bp, Artificial sequence
  SiRNA target sequence
ttttaaattcggcacaatttttttcaa

SEQ ID NO: 32930 - DNA, 27 bp, Artificial sequence
  SiRNA target sequence
tttaaattcggcacaatttttttcaat

SEQ ID NO: 32931 - DNA, 27 bp, Artificial sequence
  SiRNA target sequence
ttaaattcggcacaatttttttcaatt

SEQ ID NO: 32932 - DNA, 27 bp, Artificial sequence
  SiRNA target sequence
taaattcggcacaatttttttcaattt

SEQ ID NO: 32933 - DNA, 27 bp, Artificial sequence
  SiRNA target sequence
aaattcggcacaatttttttcaatttc

SEQ ID NO: 32934 - DNA, 27 bp, Artificial sequence
  SiRNA target sequence
aattcggcacaatttttttcaatttca

SEQ ID NO: 32935 - DNA, 27 bp, Artificial sequence
  SiRNA target sequence
attcggcacaatttttttcaatttcat

SEQ ID NO: 32936 - DNA, 27 bp, Artificial sequence
  SiRNA target sequence
ttcggcacaatttttttcaatttcatc

SEQ ID NO: 32937 - DNA, 27 bp, Artificial sequence
  SiRNA target sequence
tcggcacaatttttttcaatttcatct

SEQ ID NO: 32938 - DNA, 27 bp, Artificial sequence
  SiRNA target sequence
cggcacaatttttttcaatttcatctt

SEQ ID NO: 32939 - DNA, 27 bp, Artificial sequence
  SiRNA target sequence
ggcacaatttttttcaatttcatcttt

SEQ ID NO: 32940 - DNA, 27 bp, Artificial sequence
  SiRNA target sequence
gcacaatttttttcaatttcatctttt

SEQ ID NO: 32941 - DNA, 27 bp, Artificial sequence
  SiRNA target sequence
cacaatttttttcaatttcatcttttt

SEQ ID NO: 32942 - DNA, 27 bp, Artificial sequence
  SiRNA target sequence
acaatttttttcaatttcatctttttt

SEQ ID NO: 32943 - DNA, 27 bp, Artificial sequence
  SiRNA target sequence
caatttttttcaatttcatcttttttc

SEQ ID NO: 32944 - DNA, 27 bp, Artificial sequence
  SiRNA target sequence
aatttttttcaatttcatcttttttcg

SEQ ID NO: 32945 - DNA, 27 bp, Artificial sequence
  SiRNA target sequence
atttttttcaatttcatcttttttcga

SEQ ID NO: 32946 - DNA, 27 bp, Artificial sequence
  SiRNA target sequence
tttttttcaatttcatcttttttcgaa

SEQ ID NO: 32947 - DNA, 27 bp, Artificial sequence
  SiRNA target sequence
ttttttcaatttcatcttttttcgaat

SEQ ID NO: 32948 - DNA, 27 bp, Artificial sequence
  SiRNA target sequence
tttttcaatttcatcttttttcgaatt

SEQ ID NO: 32949 - DNA, 27 bp, Artificial sequence
  SiRNA target sequence
ttttcaatttcatcttttttcgaattt

SEQ ID NO: 32950 - DNA, 27 bp, Artificial sequence
  SiRNA target sequence
tttcaatttcatcttttttcgaatttt

SEQ ID NO: 32951 - DNA, 27 bp, Artificial sequence
  SiRNA target sequence
ttcaatttcatcttttttcgaattttc

SEQ ID NO: 32952 - DNA, 27 bp, Artificial sequence
  SiRNA target sequence
tcaatttcatcttttttcgaattttct

SEQ ID NO: 32953 - DNA, 27 bp, Artificial sequence
  SiRNA target sequence
caatttcatcttttttcgaattttctt

SEQ ID NO: 32954 - DNA, 27 bp, Artificial sequence
  SiRNA target sequence
aatttcatcttttttcgaattttcttc

SEQ ID NO: 32955 - DNA, 27 bp, Artificial sequence
  SiRNA target sequence
atttcatcttttttcgaattttcttcg

SEQ ID NO: 32956 - DNA, 27 bp, Artificial sequence
  SiRNA target sequence
tttcatcttttttcgaattttcttcgg

SEQ ID NO: 32957 - DNA, 27 bp, Artificial sequence
  SiRNA target sequence
ttcatcttttttcgaattttcttcggc

SEQ ID NO: 32958 - DNA, 27 bp, Artificial sequence
  SiRNA target sequence
tcatcttttttcgaattttcttcggct

SEQ ID NO: 32959 - DNA, 27 bp, Artificial sequence
  SiRNA target sequence
catcttttttcgaattttcttcggctt

SEQ ID NO: 32960 - DNA, 27 bp, Artificial sequence
  SiRNA target sequence
atcttttttcgaattttcttcggcttc

SEQ ID NO: 32961 - DNA, 27 bp, Artificial sequence
  SiRNA target sequence
tcttttttcgaattttcttcggcttct

SEQ ID NO: 32962 - DNA, 27 bp, Artificial sequence
  SiRNA target sequence
cttttttcgaattttcttcggcttctc

SEQ ID NO: 32963 - DNA, 27 bp, Artificial sequence
  SiRNA target sequence
ttttttcgaattttcttcggcttctcg

SEQ ID NO: 32964 - DNA, 27 bp, Artificial sequence
  SiRNA target sequence
tttttcgaattttcttcggcttctcgt

SEQ ID NO: 32965 - DNA, 27 bp, Artificial sequence
  SiRNA target sequence
ttttcgaattttcttcggcttctcgta

SEQ ID NO: 32966 - DNA, 27 bp, Artificial sequence
  SiRNA target sequence
tttcgaattttcttcggcttctcgtat

SEQ ID NO: 32967 - DNA, 27 bp, Artificial sequence
  SiRNA target sequence
ttcgaattttcttcggcttctcgtatc

SEQ ID NO: 32968 - DNA, 27 bp, Artificial sequence
  SiRNA target sequence
tcgaattttcttcggcttctcgtatca

SEQ ID NO: 32969 - DNA, 27 bp, Artificial sequence
  SiRNA target sequence
cgaattttcttcggcttctcgtatcat

SEQ ID NO: 32970 - DNA, 27 bp, Artificial sequence
  SiRNA target sequence
gaattttcttcggcttctcgtatcatt

SEQ ID NO: 32971 - DNA, 27 bp, Artificial sequence
  SiRNA target sequence
aattttcttcggcttctcgtatcattt

SEQ ID NO: 32972 - DNA, 27 bp, Artificial sequence
  SiRNA target sequence
attttcttcggcttctcgtatcatttg

SEQ ID NO: 32973 - DNA, 27 bp, Artificial sequence
  SiRNA target sequence
ttttcttcggcttctcgtatcatttgc

SEQ ID NO: 32974 - DNA, 27 bp, Artificial sequence
  SiRNA target sequence
tttcttcggcttctcgtatcatttgcg

SEQ ID NO: 32975 - DNA, 27 bp, Artificial sequence
  SiRNA target sequence
ttcttcggcttctcgtatcatttgcga

SEQ ID NO: 32976 - DNA, 27 bp, Artificial sequence
  SiRNA target sequence
tcttcggcttctcgtatcatttgcgaa

SEQ ID NO: 32977 - DNA, 27 bp, Artificial sequence
  SiRNA target sequence
cttcggcttctcgtatcatttgcgaaa

SEQ ID NO: 32978 - DNA, 27 bp, Artificial sequence
  SiRNA target sequence
ttcggcttctcgtatcatttgcgaaat

SEQ ID NO: 32979 - DNA, 27 bp, Artificial sequence
  SiRNA target sequence
tcggcttctcgtatcatttgcgaaatt

SEQ ID NO: 32980 - DNA, 27 bp, Artificial sequence
  SiRNA target sequence
cggcttctcgtatcatttgcgaaattt

SEQ ID NO: 32981 - DNA, 27 bp, Artificial sequence
  SiRNA target sequence
ggcttctcgtatcatttgcgaaatttc

SEQ ID NO: 32982 - DNA, 27 bp, Artificial sequence
  SiRNA target sequence
gcttctcgtatcatttgcgaaatttca

SEQ ID NO: 32983 - DNA, 27 bp, Artificial sequence
  SiRNA target sequence
cttctcgtatcatttgcgaaatttcac

SEQ ID NO: 32984 - DNA, 27 bp, Artificial sequence
  SiRNA target sequence
ttctcgtatcatttgcgaaatttcacc

SEQ ID NO: 32985 - DNA, 27 bp, Artificial sequence
  SiRNA target sequence
tctcgtatcatttgcgaaatttcacct

SEQ ID NO: 32986 - DNA, 27 bp, Artificial sequence
  SiRNA target sequence
ctcgtatcatttgcgaaatttcacctt

SEQ ID NO: 32987 - DNA, 27 bp, Artificial sequence
  SiRNA target sequence
tcgtatcatttgcgaaatttcaccttc

SEQ ID NO: 32988 - DNA, 27 bp, Artificial sequence
  SiRNA target sequence
cgtatcatttgcgaaatttcaccttca

SEQ ID NO: 32989 - DNA, 27 bp, Artificial sequence
  SiRNA target sequence
gtatcatttgcgaaatttcaccttcat

SEQ ID NO: 32990 - DNA, 27 bp, Artificial sequence
  SiRNA target sequence
tatcatttgcgaaatttcaccttcatt

SEQ ID NO: 32991 - DNA, 27 bp, Artificial sequence
  SiRNA target sequence
atcatttgcgaaatttcaccttcattt

SEQ ID NO: 32992 - DNA, 27 bp, Artificial sequence
  SiRNA target sequence
tcatttgcgaaatttcaccttcattta

SEQ ID NO: 32993 - DNA, 27 bp, Artificial sequence
  SiRNA target sequence
catttgcgaaatttcaccttcatttaa

SEQ ID NO: 32994 - DNA, 27 bp, Artificial sequence
  SiRNA target sequence
atttgcgaaatttcaccttcatttaat

SEQ ID NO: 32995 - DNA, 27 bp, Artificial sequence
  SiRNA target sequence
tttgcgaaatttcaccttcatttaatc

SEQ ID NO: 32996 - DNA, 27 bp, Artificial sequence
  SiRNA target sequence
ttgcgaaatttcaccttcatttaatcc

SEQ ID NO: 32997 - DNA, 27 bp, Artificial sequence
  SiRNA target sequence
tgcgaaatttcaccttcatttaatcca

SEQ ID NO: 32998 - DNA, 27 bp, Artificial sequence
  SiRNA target sequence
gcgaaatttcaccttcatttaatccac

SEQ ID NO: 32999 - DNA, 27 bp, Artificial sequence
  SiRNA target sequence
cgaaatttcaccttcatttaatccact

SEQ ID NO: 33000 - DNA, 27 bp, Artificial sequence
  SiRNA target sequence
gaaatttcaccttcatttaatccactt

SEQ ID NO: 33001 - DNA, 27 bp, Artificial sequence
  SiRNA target sequence
aaatttcaccttcatttaatccacttg

SEQ ID NO: 33002 - DNA, 27 bp, Artificial sequence
  SiRNA target sequence
aatttcaccttcatttaatccacttga

SEQ ID NO: 33003 - DNA, 27 bp, Artificial sequence
  SiRNA target sequence
atttcaccttcatttaatccacttgaa

SEQ ID NO: 33004 - DNA, 27 bp, Artificial sequence
  SiRNA target sequence
tttcaccttcatttaatccacttgaag

SEQ ID NO: 33005 - DNA, 27 bp, Artificial sequence
  SiRNA target sequence
ttcaccttcatttaatccacttgaagg

SEQ ID NO: 33006 - DNA, 27 bp, Artificial sequence
  SiRNA target sequence
tcaccttcatttaatccacttgaaggc

SEQ ID NO: 33007 - DNA, 27 bp, Artificial sequence
  SiRNA target sequence
caccttcatttaatccacttgaaggca

SEQ ID NO: 33008 - DNA, 27 bp, Artificial sequence
  SiRNA target sequence
accttcatttaatccacttgaaggcac

SEQ ID NO: 33009 - DNA, 27 bp, Artificial sequence
  SiRNA target sequence
ccttcatttaatccacttgaaggcaca

SEQ ID NO: 33010 - DNA, 27 bp, Artificial sequence
  SiRNA target sequence
cttcatttaatccacttgaaggcacaa

SEQ ID NO: 33011 - DNA, 27 bp, Artificial sequence
  SiRNA target sequence
ttcatttaatccacttgaaggcacaat

SEQ ID NO: 33012 - DNA, 27 bp, Artificial sequence
  SiRNA target sequence
tcatttaatccacttgaaggcacaatt

SEQ ID NO: 33013 - DNA, 27 bp, Artificial sequence
  SiRNA target sequence
catttaatccacttgaaggcacaattt

SEQ ID NO: 33014 - DNA, 27 bp, Artificial sequence
  SiRNA target sequence
atttaatccacttgaaggcacaatttc

SEQ ID NO: 33015 - DNA, 27 bp, Artificial sequence
  SiRNA target sequence
tttaatccacttgaaggcacaatttcg

SEQ ID NO: 33016 - DNA, 27 bp, Artificial sequence
  SiRNA target sequence
ttaatccacttgaaggcacaatttcga

SEQ ID NO: 33017 - DNA, 27 bp, Artificial sequence
  SiRNA target sequence
taatccacttgaaggcacaatttcgat

SEQ ID NO: 33018 - DNA, 27 bp, Artificial sequence
  SiRNA target sequence
aatccacttgaaggcacaatttcgatt

SEQ ID NO: 33019 - DNA, 27 bp, Artificial sequence
  SiRNA target sequence
atccacttgaaggcacaatttcgattt

SEQ ID NO: 33020 - DNA, 27 bp, Artificial sequence
  SiRNA target sequence
tccacttgaaggcacaatttcgatttc

SEQ ID NO: 33021 - DNA, 27 bp, Artificial sequence
  SiRNA target sequence
ccacttgaaggcacaatttcgatttct

SEQ ID NO: 33022 - DNA, 27 bp, Artificial sequence
  SiRNA target sequence
cacttgaaggcacaatttcgatttctt

SEQ ID NO: 33023 - DNA, 27 bp, Artificial sequence
  SiRNA target sequence
acttgaaggcacaatttcgatttcttg

SEQ ID NO: 33024 - DNA, 27 bp, Artificial sequence
  SiRNA target sequence
cttgaaggcacaatttcgatttcttgc

SEQ ID NO: 33025 - DNA, 27 bp, Artificial sequence
  SiRNA target sequence
ttgaaggcacaatttcgatttcttgct

SEQ ID NO: 33026 - DNA, 27 bp, Artificial sequence
  SiRNA target sequence
tgaaggcacaatttcgatttcttgctt

SEQ ID NO: 33027 - DNA, 27 bp, Artificial sequence
  SiRNA target sequence
gaaggcacaatttcgatttcttgcttt

SEQ ID NO: 33028 - DNA, 27 bp, Artificial sequence
  SiRNA target sequence
aaggcacaatttcgatttcttgctttt

SEQ ID NO: 33029 - DNA, 27 bp, Artificial sequence
  SiRNA target sequence
aggcacaatttcgatttcttgcttttt

SEQ ID NO: 33030 - DNA, 27 bp, Artificial sequence
  SiRNA target sequence
ggcacaatttcgatttcttgctttttt

SEQ ID NO: 33031 - DNA, 27 bp, Artificial sequence
  SiRNA target sequence
gcacaatttcgatttcttgcttttttt

SEQ ID NO: 33032 - DNA, 27 bp, Artificial sequence
  SiRNA target sequence
cacaatttcgatttcttgctttttttt

SEQ ID NO: 33033 - DNA, 27 bp, Artificial sequence
  SiRNA target sequence
acaatttcgatttcttgcttttttttc

SEQ ID NO: 33034 - DNA, 27 bp, Artificial sequence
  SiRNA target sequence
caatttcgatttcttgcttttttttcg

SEQ ID NO: 33035 - DNA, 27 bp, Artificial sequence
  SiRNA target sequence
aatttcgatttcttgcttttttttcgt

SEQ ID NO: 33036 - DNA, 27 bp, Artificial sequence
  SiRNA target sequence
atttcgatttcttgcttttttttcgtt

SEQ ID NO: 33037 - DNA, 27 bp, Artificial sequence
  SiRNA target sequence
tttcgatttcttgcttttttttcgtta

SEQ ID NO: 33038 - DNA, 27 bp, Artificial sequence
  SiRNA target sequence
ttcgatttcttgcttttttttcgttat

SEQ ID NO: 33039 - DNA, 27 bp, Artificial sequence
  SiRNA target sequence
tcgatttcttgcttttttttcgttatc

SEQ ID NO: 33040 - DNA, 27 bp, Artificial sequence
  SiRNA target sequence
cgatttcttgcttttttttcgttatcc

SEQ ID NO: 33041 - DNA, 27 bp, Artificial sequence
  SiRNA target sequence
gatttcttgcttttttttcgttatccc

SEQ ID NO: 33042 - DNA, 27 bp, Artificial sequence
  SiRNA target sequence
atttcttgcttttttttcgttatcccg

SEQ ID NO: 33043 - DNA, 27 bp, Artificial sequence
  SiRNA target sequence
tttcttgcttttttttcgttatcccgt

SEQ ID NO: 33044 - DNA, 27 bp, Artificial sequence
  SiRNA target sequence
ttcttgcttttttttcgttatcccgtc

SEQ ID NO: 33045 - DNA, 27 bp, Artificial sequence
  SiRNA target sequence
tcttgcttttttttcgttatcccgtct

SEQ ID NO: 33046 - DNA, 27 bp, Artificial sequence
  SiRNA target sequence
cttgcttttttttcgttatcccgtctt

SEQ ID NO: 33047 - DNA, 27 bp, Artificial sequence
  SiRNA target sequence
ttgcttttttttcgttatcccgtcttg

SEQ ID NO: 33048 - DNA, 27 bp, Artificial sequence
  SiRNA target sequence
tgcttttttttcgttatcccgtcttgc

SEQ ID NO: 33049 - DNA, 27 bp, Artificial sequence
  SiRNA target sequence
gcttttttttcgttatcccgtcttgcg

SEQ ID NO: 33050 - DNA, 27 bp, Artificial sequence
  SiRNA target sequence
cttttttttcgttatcccgtcttgcgc

SEQ ID NO: 33051 - DNA, 27 bp, Artificial sequence
  SiRNA target sequence
ttttttttcgttatcccgtcttgcgca

SEQ ID NO: 33052 - DNA, 27 bp, Artificial sequence
  SiRNA target sequence
tttttttcgttatcccgtcttgcgcag

SEQ ID NO: 33053 - DNA, 27 bp, Artificial sequence
  SiRNA target sequence
ttttttcgttatcccgtcttgcgcaga

SEQ ID NO: 33054 - DNA, 27 bp, Artificial sequence
  SiRNA target sequence
tttttcgttatcccgtcttgcgcagat

SEQ ID NO: 33055 - DNA, 27 bp, Artificial sequence
  SiRNA target sequence
ttttcgttatcccgtcttgcgcagata

SEQ ID NO: 33056 - DNA, 27 bp, Artificial sequence
  SiRNA target sequence
tttcgttatcccgtcttgcgcagatac

SEQ ID NO: 33057 - DNA, 27 bp, Artificial sequence
  SiRNA target sequence
ttcgttatcccgtcttgcgcagatact

SEQ ID NO: 33058 - DNA, 27 bp, Artificial sequence
  SiRNA target sequence
tcgttatcccgtcttgcgcagatactt

SEQ ID NO: 33059 - DNA, 27 bp, Artificial sequence
  SiRNA target sequence
cgttatcccgtcttgcgcagatacttt

SEQ ID NO: 33060 - DNA, 27 bp, Artificial sequence
  SiRNA target sequence
gttatcccgtcttgcgcagatactttg

SEQ ID NO: 33061 - DNA, 27 bp, Artificial sequence
  SiRNA target sequence
ttatcccgtcttgcgcagatactttgt

SEQ ID NO: 33062 - DNA, 27 bp, Artificial sequence
  SiRNA target sequence
tatcccgtcttgcgcagatactttgta

SEQ ID NO: 33063 - DNA, 27 bp, Artificial sequence
  SiRNA target sequence
atcccgtcttgcgcagatactttgtat

SEQ ID NO: 33064 - DNA, 27 bp, Artificial sequence
  SiRNA target sequence
tcccgtcttgcgcagatactttgtata

SEQ ID NO: 33065 - DNA, 27 bp, Artificial sequence
  SiRNA target sequence
cccgtcttgcgcagatactttgtatat

SEQ ID NO: 33066 - DNA, 27 bp, Artificial sequence
  SiRNA target sequence
ccgtcttgcgcagatactttgtatatt

SEQ ID NO: 33067 - DNA, 27 bp, Artificial sequence
  SiRNA target sequence
cgtcttgcgcagatactttgtatattc

SEQ ID NO: 33068 - DNA, 27 bp, Artificial sequence
  SiRNA target sequence
gtcttgcgcagatactttgtatattcc

SEQ ID NO: 33069 - DNA, 27 bp, Artificial sequence
  SiRNA target sequence
tcttgcgcagatactttgtatattccg

SEQ ID NO: 33070 - DNA, 27 bp, Artificial sequence
  SiRNA target sequence
cttgcgcagatactttgtatattccgt

SEQ ID NO: 33071 - DNA, 27 bp, Artificial sequence
  SiRNA target sequence
ttgcgcagatactttgtatattccgtt

SEQ ID NO: 33072 - DNA, 27 bp, Artificial sequence
  SiRNA target sequence
tgcgcagatactttgtatattccgtta

SEQ ID NO: 33073 - DNA, 27 bp, Artificial sequence
  SiRNA target sequence
gcgcagatactttgtatattccgttag

SEQ ID NO: 33074 - DNA, 27 bp, Artificial sequence
  SiRNA target sequence
cgcagatactttgtatattccgttagc

SEQ ID NO: 33075 - DNA, 27 bp, Artificial sequence
  SiRNA target sequence
gcagatactttgtatattccgttagca

SEQ ID NO: 33076 - DNA, 27 bp, Artificial sequence
  SiRNA target sequence
cagatactttgtatattccgttagcat

SEQ ID NO: 33077 - DNA, 27 bp, Artificial sequence
  SiRNA target sequence
agatactttgtatattccgttagcatc

SEQ ID NO: 33078 - DNA, 27 bp, Artificial sequence
  SiRNA target sequence
gatactttgtatattccgttagcatcg

SEQ ID NO: 33079 - DNA, 27 bp, Artificial sequence
  SiRNA target sequence
atactttgtatattccgttagcatcgg

SEQ ID NO: 33080 - DNA, 27 bp, Artificial sequence
  SiRNA target sequence
tactttgtatattccgttagcatcggc

SEQ ID NO: 33081 - DNA, 27 bp, Artificial sequence
  SiRNA target sequence
actttgtatattccgttagcatcggct

SEQ ID NO: 33082 - DNA, 27 bp, Artificial sequence
  SiRNA target sequence
ctttgtatattccgttagcatcggctt

SEQ ID NO: 33083 - DNA, 27 bp, Artificial sequence
  SiRNA target sequence
tttgtatattccgttagcatcggcttc

SEQ ID NO: 33084 - DNA, 27 bp, Artificial sequence
  SiRNA target sequence
ttgtatattccgttagcatcggcttca

SEQ ID NO: 33085 - DNA, 27 bp, Artificial sequence
  SiRNA target sequence
tgtatattccgttagcatcggcttcaa

SEQ ID NO: 33086 - DNA, 27 bp, Artificial sequence
  SiRNA target sequence
gtatattccgttagcatcggcttcaaa

SEQ ID NO: 33087 - DNA, 27 bp, Artificial sequence
  SiRNA target sequence
tatattccgttagcatcggcttcaaat

SEQ ID NO: 33088 - DNA, 27 bp, Artificial sequence
  SiRNA target sequence
atattccgttagcatcggcttcaaatg

SEQ ID NO: 33089 - DNA, 27 bp, Artificial sequence
  SiRNA target sequence
tattccgttagcatcggcttcaaatgt

SEQ ID NO: 33090 - DNA, 27 bp, Artificial sequence
  SiRNA target sequence
attccgttagcatcggcttcaaatgta

SEQ ID NO: 33091 - DNA, 27 bp, Artificial sequence
  SiRNA target sequence
ttccgttagcatcggcttcaaatgtaa

SEQ ID NO: 33092 - DNA, 27 bp, Artificial sequence
  SiRNA target sequence
tccgttagcatcggcttcaaatgtaac

SEQ ID NO: 33093 - DNA, 27 bp, Artificial sequence
  SiRNA target sequence
ccgttagcatcggcttcaaatgtaaca

SEQ ID NO: 33094 - DNA, 27 bp, Artificial sequence
  SiRNA target sequence
cgttagcatcggcttcaaatgtaacat

SEQ ID NO: 33095 - DNA, 27 bp, Artificial sequence
  SiRNA target sequence
gttagcatcggcttcaaatgtaacatc

SEQ ID NO: 33096 - DNA, 27 bp, Artificial sequence
  SiRNA target sequence
ttagcatcggcttcaaatgtaacatct

SEQ ID NO: 33097 - DNA, 27 bp, Artificial sequence
  SiRNA target sequence
tagcatcggcttcaaatgtaacatcta

SEQ ID NO: 33098 - DNA, 27 bp, Artificial sequence
  SiRNA target sequence
agcatcggcttcaaatgtaacatctat

SEQ ID NO: 33099 - DNA, 27 bp, Artificial sequence
  SiRNA target sequence
gcatcggcttcaaatgtaacatctatc

SEQ ID NO: 33100 - DNA, 27 bp, Artificial sequence
  SiRNA target sequence
catcggcttcaaatgtaacatctatct

SEQ ID NO: 33101 - DNA, 27 bp, Artificial sequence
  SiRNA target sequence
atcggcttcaaatgtaacatctatctt

SEQ ID NO: 33102 - DNA, 27 bp, Artificial sequence
  SiRNA target sequence
tcggcttcaaatgtaacatctatcttt

SEQ ID NO: 33103 - DNA, 27 bp, Artificial sequence
  SiRNA target sequence
cggcttcaaatgtaacatctatctttg

SEQ ID NO: 33104 - DNA, 27 bp, Artificial sequence
  SiRNA target sequence
ggcttcaaatgtaacatctatctttgg

SEQ ID NO: 33105 - DNA, 27 bp, Artificial sequence
  SiRNA target sequence
gcttcaaatgtaacatctatctttgga

SEQ ID NO: 33106 - DNA, 27 bp, Artificial sequence
  SiRNA target sequence
cttcaaatgtaacatctatctttggaa

SEQ ID NO: 33107 - DNA, 27 bp, Artificial sequence
  SiRNA target sequence
ttcaaatgtaacatctatctttggaat

SEQ ID NO: 33108 - DNA, 27 bp, Artificial sequence
  SiRNA target sequence
tcaaatgtaacatctatctttggaata

SEQ ID NO: 33109 - DNA, 27 bp, Artificial sequence
  SiRNA target sequence
caaatgtaacatctatctttggaatac

SEQ ID NO: 33110 - DNA, 27 bp, Artificial sequence
  SiRNA target sequence
aaatgtaacatctatctttggaatacc

SEQ ID NO: 33111 - DNA, 27 bp, Artificial sequence
  SiRNA target sequence
aatgtaacatctatctttggaatacct

SEQ ID NO: 33112 - DNA, 27 bp, Artificial sequence
  SiRNA target sequence
atgtaacatctatctttggaatacctg

SEQ ID NO: 33113 - DNA, 27 bp, Artificial sequence
  SiRNA target sequence
tgtaacatctatctttggaatacctgc

SEQ ID NO: 33114 - DNA, 27 bp, Artificial sequence
  SiRNA target sequence
gtaacatctatctttggaatacctgca

SEQ ID NO: 33115 - DNA, 27 bp, Artificial sequence
  SiRNA target sequence
taacatctatctttggaatacctgcag

SEQ ID NO: 33116 - DNA, 27 bp, Artificial sequence
  SiRNA target sequence
aacatctatctttggaatacctgcagg

SEQ ID NO: 33117 - DNA, 27 bp, Artificial sequence
  SiRNA target sequence
acatctatctttggaatacctgcaggt

SEQ ID NO: 33118 - DNA, 27 bp, Artificial sequence
  SiRNA target sequence
catctatctttggaatacctgcaggtg

SEQ ID NO: 33119 - DNA, 27 bp, Artificial sequence
  SiRNA target sequence
atctatctttggaatacctgcaggtgc

SEQ ID NO: 33120 - DNA, 27 bp, Artificial sequence
  SiRNA target sequence
tctatctttggaatacctgcaggtgct

SEQ ID NO: 33121 - DNA, 27 bp, Artificial sequence
  SiRNA target sequence
ctatctttggaatacctgcaggtgctt

SEQ ID NO: 33122 - DNA, 27 bp, Artificial sequence
  SiRNA target sequence
tatctttggaatacctgcaggtgcttt

SEQ ID NO: 33123 - DNA, 27 bp, Artificial sequence
  SiRNA target sequence
atctttggaatacctgcaggtgcttta

SEQ ID NO: 33124 - DNA, 27 bp, Artificial sequence
  SiRNA target sequence
tctttggaatacctgcaggtgctttag

SEQ ID NO: 33125 - DNA, 27 bp, Artificial sequence
  SiRNA target sequence
ctttggaatacctgcaggtgctttagg

SEQ ID NO: 33126 - DNA, 27 bp, Artificial sequence
  SiRNA target sequence
tttggaatacctgcaggtgctttagga

SEQ ID NO: 33127 - DNA, 27 bp, Artificial sequence
  SiRNA target sequence
ttggaatacctgcaggtgctttaggaa

SEQ ID NO: 33128 - DNA, 27 bp, Artificial sequence
  SiRNA target sequence
tggaatacctgcaggtgctttaggaat

SEQ ID NO: 33129 - DNA, 27 bp, Artificial sequence
  SiRNA target sequence
ggaatacctgcaggtgctttaggaatg

SEQ ID NO: 33130 - DNA, 27 bp, Artificial sequence
  SiRNA target sequence
gaatacctgcaggtgctttaggaatgt

SEQ ID NO: 33131 - DNA, 27 bp, Artificial sequence
  SiRNA target sequence
aatacctgcaggtgctttaggaatgtt

SEQ ID NO: 33132 - DNA, 27 bp, Artificial sequence
  SiRNA target sequence
atacctgcaggtgctttaggaatgttt

SEQ ID NO: 33133 - DNA, 27 bp, Artificial sequence
  SiRNA target sequence
tacctgcaggtgctttaggaatgtttt

SEQ ID NO: 33134 - DNA, 27 bp, Artificial sequence
  SiRNA target sequence
acctgcaggtgctttaggaatgttttt

SEQ ID NO: 33135 - DNA, 27 bp, Artificial sequence
  SiRNA target sequence
cctgcaggtgctttaggaatgtttttg

SEQ ID NO: 33136 - DNA, 27 bp, Artificial sequence
  SiRNA target sequence
ctgcaggtgctttaggaatgtttttga

SEQ ID NO: 33137 - DNA, 27 bp, Artificial sequence
  SiRNA target sequence
tgcaggtgctttaggaatgtttttgag

SEQ ID NO: 33138 - DNA, 27 bp, Artificial sequence
  SiRNA target sequence
gcaggtgctttaggaatgtttttgagc

SEQ ID NO: 33139 - DNA, 27 bp, Artificial sequence
  SiRNA target sequence
caggtgctttaggaatgtttttgagct

SEQ ID NO: 33140 - DNA, 27 bp, Artificial sequence
  SiRNA target sequence
aggtgctttaggaatgtttttgagctt

SEQ ID NO: 33141 - DNA, 27 bp, Artificial sequence
  SiRNA target sequence
ggtgctttaggaatgtttttgagcttt

SEQ ID NO: 33142 - DNA, 27 bp, Artificial sequence
  SiRNA target sequence
gtgctttaggaatgtttttgagcttta

SEQ ID NO: 33143 - DNA, 27 bp, Artificial sequence
  SiRNA target sequence
tgctttaggaatgtttttgagctttat

SEQ ID NO: 33144 - DNA, 27 bp, Artificial sequence
  SiRNA target sequence
gctttaggaatgtttttgagctttata

SEQ ID NO: 33145 - DNA, 27 bp, Artificial sequence
  SiRNA target sequence
ctttaggaatgtttttgagctttatag

SEQ ID NO: 33146 - DNA, 27 bp, Artificial sequence
  SiRNA target sequence
tttaggaatgtttttgagctttatagc

SEQ ID NO: 33147 - DNA, 27 bp, Artificial sequence
  SiRNA target sequence
ttaggaatgtttttgagctttatagct

SEQ ID NO: 33148 - DNA, 27 bp, Artificial sequence
  SiRNA target sequence
taggaatgtttttgagctttatagctc

SEQ ID NO: 33149 - DNA, 27 bp, Artificial sequence
  SiRNA target sequence
aggaatgtttttgagctttatagctcc

SEQ ID NO: 33150 - DNA, 27 bp, Artificial sequence
  SiRNA target sequence
ggaatgtttttgagctttatagctcct

SEQ ID NO: 33151 - DNA, 27 bp, Artificial sequence
  SiRNA target sequence
gaatgtttttgagctttatagctccta

SEQ ID NO: 33152 - DNA, 27 bp, Artificial sequence
  SiRNA target sequence
aatgtttttgagctttatagctcctaa

SEQ ID NO: 33153 - DNA, 27 bp, Artificial sequence
  SiRNA target sequence
atgtttttgagctttatagctcctaaa

SEQ ID NO: 33154 - DNA, 27 bp, Artificial sequence
  SiRNA target sequence
tgtttttgagctttatagctcctaaat

SEQ ID NO: 33155 - DNA, 27 bp, Artificial sequence
  SiRNA target sequence
gtttttgagctttatagctcctaaata

SEQ ID NO: 33156 - DNA, 27 bp, Artificial sequence
  SiRNA target sequence
tttttgagctttatagctcctaaatat

SEQ ID NO: 33157 - DNA, 27 bp, Artificial sequence
  SiRNA target sequence
ttttgagctttatagctcctaaatatt

SEQ ID NO: 33158 - DNA, 27 bp, Artificial sequence
  SiRNA target sequence
tttgagctttatagctcctaaatattt

SEQ ID NO: 33159 - DNA, 27 bp, Artificial sequence
  SiRNA target sequence
ttgagctttatagctcctaaatattta

SEQ ID NO: 33160 - DNA, 27 bp, Artificial sequence
  SiRNA target sequence
tgagctttatagctcctaaatatttat

SEQ ID NO: 33161 - DNA, 27 bp, Artificial sequence
  SiRNA target sequence
gagctttatagctcctaaatatttatt

SEQ ID NO: 33162 - DNA, 27 bp, Artificial sequence
  SiRNA target sequence
agctttatagctcctaaatatttattg

SEQ ID NO: 33163 - DNA, 27 bp, Artificial sequence
  SiRNA target sequence
gctttatagctcctaaatatttattgt

SEQ ID NO: 33164 - DNA, 27 bp, Artificial sequence
  SiRNA target sequence
ctttatagctcctaaatatttattgtc

SEQ ID NO: 33165 - DNA, 27 bp, Artificial sequence
  SiRNA target sequence
tttatagctcctaaatatttattgtct

SEQ ID NO: 33166 - DNA, 27 bp, Artificial sequence
  SiRNA target sequence
ttatagctcctaaatatttattgtctt

SEQ ID NO: 33167 - DNA, 27 bp, Artificial sequence
  SiRNA target sequence
tatagctcctaaatatttattgtcttt

SEQ ID NO: 33168 - DNA, 27 bp, Artificial sequence
  SiRNA target sequence
atagctcctaaatatttattgtctttt

SEQ ID NO: 33169 - DNA, 27 bp, Artificial sequence
  SiRNA target sequence
tagctcctaaatatttattgtctttta

SEQ ID NO: 33170 - DNA, 27 bp, Artificial sequence
  SiRNA target sequence
agctcctaaatatttattgtcttttac

SEQ ID NO: 33171 - DNA, 27 bp, Artificial sequence
  SiRNA target sequence
gctcctaaatatttattgtcttttacc

SEQ ID NO: 33172 - DNA, 27 bp, Artificial sequence
  SiRNA target sequence
ctcctaaatatttattgtcttttacca

SEQ ID NO: 33173 - DNA, 27 bp, Artificial sequence
  SiRNA target sequence
tcctaaatatttattgtcttttaccat

SEQ ID NO: 33174 - DNA, 27 bp, Artificial sequence
  SiRNA target sequence
cctaaatatttattgtcttttaccatc

SEQ ID NO: 33175 - DNA, 27 bp, Artificial sequence
  SiRNA target sequence
ctaaatatttattgtcttttaccatct

SEQ ID NO: 33176 - DNA, 27 bp, Artificial sequence
  SiRNA target sequence
taaatatttattgtcttttaccatctt

SEQ ID NO: 33177 - DNA, 27 bp, Artificial sequence
  SiRNA target sequence
aaatatttattgtcttttaccatcttt

SEQ ID NO: 33178 - DNA, 27 bp, Artificial sequence
  SiRNA target sequence
aatatttattgtcttttaccatctttc

SEQ ID NO: 33179 - DNA, 27 bp, Artificial sequence
  SiRNA target sequence
atatttattgtcttttaccatctttct

SEQ ID NO: 33180 - DNA, 27 bp, Artificial sequence
  SiRNA target sequence
tatttattgtcttttaccatctttctt

SEQ ID NO: 33181 - DNA, 27 bp, Artificial sequence
  SiRNA target sequence
atttattgtcttttaccatctttcttt

SEQ ID NO: 33182 - DNA, 27 bp, Artificial sequence
  SiRNA target sequence
tttattgtcttttaccatctttctttc

SEQ ID NO: 33183 - DNA, 27 bp, Artificial sequence
  SiRNA target sequence
ttattgtcttttaccatctttctttct

SEQ ID NO: 33184 - DNA, 27 bp, Artificial sequence
  SiRNA target sequence
tattgtcttttaccatctttctttctc

SEQ ID NO: 33185 - DNA, 27 bp, Artificial sequence
  SiRNA target sequence
attgtcttttaccatctttctttctcc

SEQ ID NO: 33186 - DNA, 27 bp, Artificial sequence
  SiRNA target sequence
ttgtcttttaccatctttctttctcct

SEQ ID NO: 33187 - DNA, 27 bp, Artificial sequence
  SiRNA target sequence
tgtcttttaccatctttctttctcctt

SEQ ID NO: 33188 - DNA, 27 bp, Artificial sequence
  SiRNA target sequence
gtcttttaccatctttctttctccttg

SEQ ID NO: 33189 - DNA, 27 bp, Artificial sequence
  SiRNA target sequence
tcttttaccatctttctttctccttga

SEQ ID NO: 33190 - DNA, 27 bp, Artificial sequence
  SiRNA target sequence
cttttaccatctttctttctccttgat

SEQ ID NO: 33191 - DNA, 27 bp, Artificial sequence
  SiRNA target sequence
ttttaccatctttctttctccttgata

SEQ ID NO: 33192 - DNA, 27 bp, Artificial sequence
  SiRNA target sequence
tttaccatctttctttctccttgatat

SEQ ID NO: 33193 - DNA, 27 bp, Artificial sequence
  SiRNA target sequence
ttaccatctttctttctccttgatata

SEQ ID NO: 33194 - DNA, 27 bp, Artificial sequence
  SiRNA target sequence
taccatctttctttctccttgatatat

SEQ ID NO: 33195 - DNA, 27 bp, Artificial sequence
  SiRNA target sequence
accatctttctttctccttgatatatt

SEQ ID NO: 33196 - DNA, 27 bp, Artificial sequence
  SiRNA target sequence
ccatctttctttctccttgatatattc

SEQ ID NO: 33197 - DNA, 27 bp, Artificial sequence
  SiRNA target sequence
catctttctttctccttgatatattct

SEQ ID NO: 33198 - DNA, 27 bp, Artificial sequence
  SiRNA target sequence
atctttctttctccttgatatattcta

SEQ ID NO: 33199 - DNA, 27 bp, Artificial sequence
  SiRNA target sequence
tctttctttctccttgatatattctaa

SEQ ID NO: 33200 - DNA, 27 bp, Artificial sequence
  SiRNA target sequence
ctttctttctccttgatatattctaat

SEQ ID NO: 33201 - DNA, 27 bp, Artificial sequence
  SiRNA target sequence
tttctttctccttgatatattctaata

SEQ ID NO: 33202 - DNA, 27 bp, Artificial sequence
  SiRNA target sequence
ttctttctccttgatatattctaatat

SEQ ID NO: 33203 - DNA, 27 bp, Artificial sequence
  SiRNA target sequence
tctttctccttgatatattctaatatc

SEQ ID NO: 33204 - DNA, 27 bp, Artificial sequence
  SiRNA target sequence
ctttctccttgatatattctaatatct

SEQ ID NO: 33205 - DNA, 27 bp, Artificial sequence
  SiRNA target sequence
tttctccttgatatattctaatatcta

SEQ ID NO: 33206 - DNA, 27 bp, Artificial sequence
  SiRNA target sequence
ttctccttgatatattctaatatctac

SEQ ID NO: 33207 - DNA, 27 bp, Artificial sequence
  SiRNA target sequence
tctccttgatatattctaatatctact

SEQ ID NO: 33208 - DNA, 27 bp, Artificial sequence
  SiRNA target sequence
ctccttgatatattctaatatctactt

SEQ ID NO: 33209 - DNA, 27 bp, Artificial sequence
  SiRNA target sequence
tccttgatatattctaatatctacttc

SEQ ID NO: 33210 - DNA, 27 bp, Artificial sequence
  SiRNA target sequence
ccttgatatattctaatatctacttcg

SEQ ID NO: 33211 - DNA, 27 bp, Artificial sequence
  SiRNA target sequence
cttgatatattctaatatctacttcgg

SEQ ID NO: 33212 - DNA, 27 bp, Artificial sequence
  SiRNA target sequence
ttgatatattctaatatctacttcgga

SEQ ID NO: 33213 - DNA, 27 bp, Artificial sequence
  SiRNA target sequence
tgatatattctaatatctacttcggat

SEQ ID NO: 33214 - DNA, 27 bp, Artificial sequence
  SiRNA target sequence
gatatattctaatatctacttcggatt

SEQ ID NO: 33215 - DNA, 27 bp, Artificial sequence
  SiRNA target sequence
atatattctaatatctacttcggattg

SEQ ID NO: 33216 - DNA, 27 bp, Artificial sequence
  SiRNA target sequence
tatattctaatatctacttcggattga

SEQ ID NO: 33217 - DNA, 27 bp, Artificial sequence
  SiRNA target sequence
atattctaatatctacttcggattgat

SEQ ID NO: 33218 - DNA, 27 bp, Artificial sequence
  SiRNA target sequence
tattctaatatctacttcggattgatt

SEQ ID NO: 33219 - DNA, 27 bp, Artificial sequence
  SiRNA target sequence
attctaatatctacttcggattgatta

SEQ ID NO: 33220 - DNA, 27 bp, Artificial sequence
  SiRNA target sequence
ttctaatatctacttcggattgattat

SEQ ID NO: 33221 - DNA, 27 bp, Artificial sequence
  SiRNA target sequence
tctaatatctacttcggattgattatc

SEQ ID NO: 33222 - DNA, 27 bp, Artificial sequence
  SiRNA target sequence
ctaatatctacttcggattgattatct

SEQ ID NO: 33223 - DNA, 27 bp, Artificial sequence
  SiRNA target sequence
taatatctacttcggattgattatctt

SEQ ID NO: 33224 - DNA, 27 bp, Artificial sequence
  SiRNA target sequence
aatatctacttcggattgattatcttc

SEQ ID NO: 33225 - DNA, 27 bp, Artificial sequence
  SiRNA target sequence
atatctacttcggattgattatcttca

SEQ ID NO: 33226 - DNA, 27 bp, Artificial sequence
  SiRNA target sequence
tatctacttcggattgattatcttcag

SEQ ID NO: 33227 - DNA, 27 bp, Artificial sequence
  SiRNA target sequence
atctacttcggattgattatcttcaga

SEQ ID NO: 33228 - DNA, 27 bp, Artificial sequence
  SiRNA target sequence
tctacttcggattgattatcttcagag

SEQ ID NO: 33229 - DNA, 27 bp, Artificial sequence
  SiRNA target sequence
ctacttcggattgattatcttcagagg

SEQ ID NO: 33230 - DNA, 27 bp, Artificial sequence
  SiRNA target sequence
tacttcggattgattatcttcagaggt

SEQ ID NO: 33231 - DNA, 27 bp, Artificial sequence
  SiRNA target sequence
acttcggattgattatcttcagaggta

SEQ ID NO: 33232 - DNA, 27 bp, Artificial sequence
  SiRNA target sequence
cttcggattgattatcttcagaggtag

SEQ ID NO: 33233 - DNA, 27 bp, Artificial sequence
  SiRNA target sequence
ttcggattgattatcttcagaggtaga

SEQ ID NO: 33234 - DNA, 27 bp, Artificial sequence
  SiRNA target sequence
tcggattgattatcttcagaggtagaa

SEQ ID NO: 33235 - DNA, 27 bp, Artificial sequence
  SiRNA target sequence
cggattgattatcttcagaggtagaaa

SEQ ID NO: 33236 - DNA, 27 bp, Artificial sequence
  SiRNA target sequence
ggattgattatcttcagaggtagaaaa

SEQ ID NO: 33237 - DNA, 27 bp, Artificial sequence
  SiRNA target sequence
gattgattatcttcagaggtagaaaaa

SEQ ID NO: 33238 - DNA, 27 bp, Artificial sequence
  SiRNA target sequence
attgattatcttcagaggtagaaaaac

SEQ ID NO: 33239 - DNA, 27 bp, Artificial sequence
  SiRNA target sequence
ttgattatcttcagaggtagaaaaact

SEQ ID NO: 33240 - DNA, 27 bp, Artificial sequence
  SiRNA target sequence
tgattatcttcagaggtagaaaaactg

SEQ ID NO: 33241 - DNA, 27 bp, Artificial sequence
  SiRNA target sequence
gattatcttcagaggtagaaaaactgt

SEQ ID NO: 33242 - DNA, 27 bp, Artificial sequence
  SiRNA target sequence
attatcttcagaggtagaaaaactgtg

SEQ ID NO: 33243 - DNA, 27 bp, Artificial sequence
  SiRNA target sequence
ttatcttcagaggtagaaaaactgtgt

SEQ ID NO: 33244 - DNA, 27 bp, Artificial sequence
  SiRNA target sequence
tatcttcagaggtagaaaaactgtgtg

SEQ ID NO: 33245 - DNA, 27 bp, Artificial sequence
  SiRNA target sequence
atcttcagaggtagaaaaactgtgtgt

SEQ ID NO: 33246 - DNA, 27 bp, Artificial sequence
  SiRNA target sequence
tcttcagaggtagaaaaactgtgtgtt

SEQ ID NO: 33247 - DNA, 27 bp, Artificial sequence
  SiRNA target sequence
cttcagaggtagaaaaactgtgtgttt

SEQ ID NO: 33248 - DNA, 27 bp, Artificial sequence
  SiRNA target sequence
ttcagaggtagaaaaactgtgtgtttc

SEQ ID NO: 33249 - DNA, 27 bp, Artificial sequence
  SiRNA target sequence
tcagaggtagaaaaactgtgtgtttcc

SEQ ID NO: 33250 - DNA, 27 bp, Artificial sequence
  SiRNA target sequence
cagaggtagaaaaactgtgtgtttcct

SEQ ID NO: 33251 - DNA, 27 bp, Artificial sequence
  SiRNA target sequence
agaggtagaaaaactgtgtgtttcctt

SEQ ID NO: 33252 - DNA, 27 bp, Artificial sequence
  SiRNA target sequence
gaggtagaaaaactgtgtgtttcctta

SEQ ID NO: 33253 - DNA, 27 bp, Artificial sequence
  SiRNA target sequence
aggtagaaaaactgtgtgtttccttaa

SEQ ID NO: 33254 - DNA, 27 bp, Artificial sequence
  SiRNA target sequence
ggtagaaaaactgtgtgtttccttaaa

SEQ ID NO: 33255 - DNA, 27 bp, Artificial sequence
  SiRNA target sequence
gtagaaaaactgtgtgtttccttaaat

SEQ ID NO: 33256 - DNA, 27 bp, Artificial sequence
  SiRNA target sequence
tagaaaaactgtgtgtttccttaaatg

SEQ ID NO: 33257 - DNA, 27 bp, Artificial sequence
  SiRNA target sequence
agaaaaactgtgtgtttccttaaatgg

SEQ ID NO: 33258 - DNA, 27 bp, Artificial sequence
  SiRNA target sequence
gaaaaactgtgtgtttccttaaatgga

SEQ ID NO: 33259 - DNA, 27 bp, Artificial sequence
  SiRNA target sequence
aaaaactgtgtgtttccttaaatggaa

SEQ ID NO: 33260 - DNA, 27 bp, Artificial sequence
  SiRNA target sequence
aaaactgtgtgtttccttaaatggaat

SEQ ID NO: 33261 - DNA, 27 bp, Artificial sequence
  SiRNA target sequence
aaactgtgtgtttccttaaatggaata

SEQ ID NO: 33262 - DNA, 27 bp, Artificial sequence
  SiRNA target sequence
aactgtgtgtttccttaaatggaatag

SEQ ID NO: 33263 - DNA, 27 bp, Artificial sequence
  SiRNA target sequence
actgtgtgtttccttaaatggaatagt

SEQ ID NO: 33264 - DNA, 27 bp, Artificial sequence
  SiRNA target sequence
ctgtgtgtttccttaaatggaatagta

SEQ ID NO: 33265 - DNA, 27 bp, Artificial sequence
  SiRNA target sequence
tgtgtgtttccttaaatggaatagtag

SEQ ID NO: 33266 - DNA, 27 bp, Artificial sequence
  SiRNA target sequence
gtgtgtttccttaaatggaatagtaga

SEQ ID NO: 33267 - DNA, 27 bp, Artificial sequence
  SiRNA target sequence
tgtgtttccttaaatggaatagtagaa

SEQ ID NO: 33268 - DNA, 27 bp, Artificial sequence
  SiRNA target sequence
gtgtttccttaaatggaatagtagaat

SEQ ID NO: 33269 - DNA, 27 bp, Artificial sequence
  SiRNA target sequence
tgtttccttaaatggaatagtagaatt

SEQ ID NO: 33270 - DNA, 27 bp, Artificial sequence
  SiRNA target sequence
gtttccttaaatggaatagtagaattt

SEQ ID NO: 33271 - DNA, 27 bp, Artificial sequence
  SiRNA target sequence
tttccttaaatggaatagtagaatttc

SEQ ID NO: 33272 - DNA, 27 bp, Artificial sequence
  SiRNA target sequence
ttccttaaatggaatagtagaatttct

SEQ ID NO: 33273 - DNA, 27 bp, Artificial sequence
  SiRNA target sequence
tccttaaatggaatagtagaatttcta

SEQ ID NO: 33274 - DNA, 27 bp, Artificial sequence
  SiRNA target sequence
ccttaaatggaatagtagaatttctat

SEQ ID NO: 33275 - DNA, 27 bp, Artificial sequence
  SiRNA target sequence
cttaaatggaatagtagaatttctatg

SEQ ID NO: 33276 - DNA, 27 bp, Artificial sequence
  SiRNA target sequence
ttaaatggaatagtagaatttctatga

SEQ ID NO: 33277 - DNA, 27 bp, Artificial sequence
  SiRNA target sequence
taaatggaatagtagaatttctatgaa

SEQ ID NO: 33278 - DNA, 27 bp, Artificial sequence
  SiRNA target sequence
aaatggaatagtagaatttctatgaat

SEQ ID NO: 33279 - DNA, 27 bp, Artificial sequence
  SiRNA target sequence
aatggaatagtagaatttctatgaatt

SEQ ID NO: 33280 - DNA, 27 bp, Artificial sequence
  SiRNA target sequence
atggaatagtagaatttctatgaatta

SEQ ID NO: 33281 - DNA, 27 bp, Artificial sequence
  SiRNA target sequence
tggaatagtagaatttctatgaattat

SEQ ID NO: 33282 - DNA, 27 bp, Artificial sequence
  SiRNA target sequence
ggaatagtagaatttctatgaattatc

SEQ ID NO: 33283 - DNA, 27 bp, Artificial sequence
  SiRNA target sequence
gaatagtagaatttctatgaattatct

SEQ ID NO: 33284 - DNA, 27 bp, Artificial sequence
  SiRNA target sequence
aatagtagaatttctatgaattatctt

SEQ ID NO: 33285 - DNA, 27 bp, Artificial sequence
  SiRNA target sequence
atagtagaatttctatgaattatctta

SEQ ID NO: 33286 - DNA, 27 bp, Artificial sequence
  SiRNA target sequence
tagtagaatttctatgaattatcttat

SEQ ID NO: 33287 - DNA, 27 bp, Artificial sequence
  SiRNA target sequence
agtagaatttctatgaattatcttatt

SEQ ID NO: 33288 - DNA, 27 bp, Artificial sequence
  SiRNA target sequence
gtagaatttctatgaattatcttatta

SEQ ID NO: 33289 - DNA, 27 bp, Artificial sequence
  SiRNA target sequence
tagaatttctatgaattatcttattaa

SEQ ID NO: 33290 - DNA, 27 bp, Artificial sequence
  SiRNA target sequence
agaatttctatgaattatcttattaaa

SEQ ID NO: 33291 - DNA, 27 bp, Artificial sequence
  SiRNA target sequence
gaatttctatgaattatcttattaaaa

SEQ ID NO: 33292 - DNA, 27 bp, Artificial sequence
  SiRNA target sequence
aatttctatgaattatcttattaaaaa

SEQ ID NO: 33293 - DNA, 27 bp, Artificial sequence
  SiRNA target sequence
atttctatgaattatcttattaaaaat

SEQ ID NO: 33294 - DNA, 27 bp, Artificial sequence
  SiRNA target sequence
tttctatgaattatcttattaaaaatc

SEQ ID NO: 33295 - DNA, 27 bp, Artificial sequence
  SiRNA target sequence
ttctatgaattatcttattaaaaatcc

SEQ ID NO: 33296 - DNA, 27 bp, Artificial sequence
  SiRNA target sequence
tctatgaattatcttattaaaaatccc

SEQ ID NO: 33297 - DNA, 27 bp, Artificial sequence
  SiRNA target sequence
ctatgaattatcttattaaaaatcccg

SEQ ID NO: 33298 - DNA, 27 bp, Artificial sequence
  SiRNA target sequence
tatgaattatcttattaaaaatcccgc

SEQ ID NO: 33299 - DNA, 27 bp, Artificial sequence
  SiRNA target sequence
atgaattatcttattaaaaatcccgcc

SEQ ID NO: 33300 - DNA, 27 bp, Artificial sequence
  SiRNA target sequence
tgaattatcttattaaaaatcccgccc

SEQ ID NO: 33301 - DNA, 27 bp, Artificial sequence
  SiRNA target sequence
gaattatcttattaaaaatcccgccca

SEQ ID NO: 33302 - DNA, 27 bp, Artificial sequence
  SiRNA target sequence
aattatcttattaaaaatcccgcccaa

SEQ ID NO: 33303 - DNA, 27 bp, Artificial sequence
  SiRNA target sequence
attatcttattaaaaatcccgcccaaa

SEQ ID NO: 33304 - DNA, 27 bp, Artificial sequence
  SiRNA target sequence
ttatcttattaaaaatcccgcccaaaa

SEQ ID NO: 33305 - DNA, 27 bp, Artificial sequence
  SiRNA target sequence
tatcttattaaaaatcccgcccaaaag

SEQ ID NO: 33306 - DNA, 27 bp, Artificial sequence
  SiRNA target sequence
atcttattaaaaatcccgcccaaaagc

SEQ ID NO: 33307 - DNA, 27 bp, Artificial sequence
  SiRNA target sequence
tcttattaaaaatcccgcccaaaagct

SEQ ID NO: 33308 - DNA, 27 bp, Artificial sequence
  SiRNA target sequence
cttattaaaaatcccgcccaaaagctc

SEQ ID NO: 33309 - DNA, 27 bp, Artificial sequence
  SiRNA target sequence
ttattaaaaatcccgcccaaaagctct

SEQ ID NO: 33310 - DNA, 27 bp, Artificial sequence
  SiRNA target sequence
tattaaaaatcccgcccaaaagctcta

SEQ ID NO: 33311 - DNA, 27 bp, Artificial sequence
  SiRNA target sequence
attaaaaatcccgcccaaaagctctat

SEQ ID NO: 33312 - DNA, 27 bp, Artificial sequence
  SiRNA target sequence
ttaaaaatcccgcccaaaagctctata

SEQ ID NO: 33313 - DNA, 27 bp, Artificial sequence
  SiRNA target sequence
taaaaatcccgcccaaaagctctatac

SEQ ID NO: 33314 - DNA, 27 bp, Artificial sequence
  SiRNA target sequence
aaaaatcccgcccaaaagctctatacc

SEQ ID NO: 33315 - DNA, 27 bp, Artificial sequence
  SiRNA target sequence
aaaatcccgcccaaaagctctatacct

SEQ ID NO: 33316 - DNA, 27 bp, Artificial sequence
  SiRNA target sequence
aaatcccgcccaaaagctctataccta

SEQ ID NO: 33317 - DNA, 27 bp, Artificial sequence
  SiRNA target sequence
aatcccgcccaaaagctctatacctaa

SEQ ID NO: 33318 - DNA, 27 bp, Artificial sequence
  SiRNA target sequence
atcccgcccaaaagctctatacctaaa

SEQ ID NO: 33319 - DNA, 27 bp, Artificial sequence
  SiRNA target sequence
tcccgcccaaaagctctatacctaaac

SEQ ID NO: 33320 - DNA, 27 bp, Artificial sequence
  SiRNA target sequence
cccgcccaaaagctctatacctaaact

SEQ ID NO: 33321 - DNA, 27 bp, Artificial sequence
  SiRNA target sequence
ccgcccaaaagctctatacctaaactc

SEQ ID NO: 33322 - DNA, 27 bp, Artificial sequence
  SiRNA target sequence
cgcccaaaagctctatacctaaactca

SEQ ID NO: 33323 - DNA, 27 bp, Artificial sequence
  SiRNA target sequence
gcccaaaagctctatacctaaactcaa

SEQ ID NO: 33324 - DNA, 27 bp, Artificial sequence
  SiRNA target sequence
cccaaaagctctatacctaaactcaat

SEQ ID NO: 33325 - DNA, 27 bp, Artificial sequence
  SiRNA target sequence
ccaaaagctctatacctaaactcaatg

SEQ ID NO: 33326 - DNA, 27 bp, Artificial sequence
  SiRNA target sequence
caaaagctctatacctaaactcaatgg

SEQ ID NO: 33327 - DNA, 27 bp, Artificial sequence
  SiRNA target sequence
aaaagctctatacctaaactcaatggt

SEQ ID NO: 33328 - DNA, 27 bp, Artificial sequence
  SiRNA target sequence
aaagctctatacctaaactcaatggta

SEQ ID NO: 33329 - DNA, 27 bp, Artificial sequence
  SiRNA target sequence
aagctctatacctaaactcaatggtac

SEQ ID NO: 33330 - DNA, 27 bp, Artificial sequence
  SiRNA target sequence
agctctatacctaaactcaatggtact

SEQ ID NO: 33331 - DNA, 27 bp, Artificial sequence
  SiRNA target sequence
gctctatacctaaactcaatggtacta

SEQ ID NO: 33332 - DNA, 27 bp, Artificial sequence
  SiRNA target sequence
ctctatacctaaactcaatggtactac

SEQ ID NO: 33333 - DNA, 27 bp, Artificial sequence
  SiRNA target sequence
tctatacctaaactcaatggtactaca

SEQ ID NO: 33334 - DNA, 27 bp, Artificial sequence
  SiRNA target sequence
ctatacctaaactcaatggtactacat

SEQ ID NO: 33335 - DNA, 27 bp, Artificial sequence
  SiRNA target sequence
tatacctaaactcaatggtactacatc

SEQ ID NO: 33336 - DNA, 27 bp, Artificial sequence
  SiRNA target sequence
atacctaaactcaatggtactacatcc

SEQ ID NO: 33337 - DNA, 27 bp, Artificial sequence
  SiRNA target sequence
tacctaaactcaatggtactacatcca

SEQ ID NO: 33338 - DNA, 27 bp, Artificial sequence
  SiRNA target sequence
acctaaactcaatggtactacatccaa

SEQ ID NO: 33339 - DNA, 27 bp, Artificial sequence
  SiRNA target sequence
cctaaactcaatggtactacatccaat

SEQ ID NO: 33340 - DNA, 27 bp, Artificial sequence
  SiRNA target sequence
ctaaactcaatggtactacatccaata

SEQ ID NO: 33341 - DNA, 27 bp, Artificial sequence
  SiRNA target sequence
taaactcaatggtactacatccaataa

SEQ ID NO: 33342 - DNA, 27 bp, Artificial sequence
  SiRNA target sequence
aaactcaatggtactacatccaataat

SEQ ID NO: 33343 - DNA, 27 bp, Artificial sequence
  SiRNA target sequence
aactcaatggtactacatccaataata

SEQ ID NO: 33344 - DNA, 27 bp, Artificial sequence
  SiRNA target sequence
actcaatggtactacatccaataatag

SEQ ID NO: 33345 - DNA, 27 bp, Artificial sequence
  SiRNA target sequence
ctcaatggtactacatccaataatagg

SEQ ID NO: 33346 - DNA, 27 bp, Artificial sequence
  SiRNA target sequence
tcaatggtactacatccaataatagga

SEQ ID NO: 33347 - DNA, 27 bp, Artificial sequence
  SiRNA target sequence
caatggtactacatccaataataggac

SEQ ID NO: 33348 - DNA, 27 bp, Artificial sequence
  SiRNA target sequence
aatggtactacatccaataataggaca

SEQ ID NO: 33349 - DNA, 27 bp, Artificial sequence
  SiRNA target sequence
atggtactacatccaataataggacat

SEQ ID NO: 33350 - DNA, 27 bp, Artificial sequence
  SiRNA target sequence
tggtactacatccaataataggacatc

SEQ ID NO: 33351 - DNA, 27 bp, Artificial sequence
  SiRNA target sequence
ggtactacatccaataataggacatct

SEQ ID NO: 33352 - DNA, 27 bp, Artificial sequence
  SiRNA target sequence
gtactacatccaataataggacatctt

SEQ ID NO: 33353 - DNA, 27 bp, Artificial sequence
  SiRNA target sequence
tactacatccaataataggacatcttt

SEQ ID NO: 33354 - DNA, 27 bp, Artificial sequence
  SiRNA target sequence
actacatccaataataggacatctttt

SEQ ID NO: 33355 - DNA, 27 bp, Artificial sequence
  SiRNA target sequence
ctacatccaataataggacatctttta

SEQ ID NO: 33356 - DNA, 27 bp, Artificial sequence
  SiRNA target sequence
tacatccaataataggacatcttttat

SEQ ID NO: 33357 - DNA, 27 bp, Artificial sequence
  SiRNA target sequence
acatccaataataggacatcttttatt

SEQ ID NO: 33358 - DNA, 27 bp, Artificial sequence
  SiRNA target sequence
catccaataataggacatcttttattt

SEQ ID NO: 33359 - DNA, 27 bp, Artificial sequence
  SiRNA target sequence
atccaataataggacatcttttatttt

SEQ ID NO: 33360 - DNA, 27 bp, Artificial sequence
  SiRNA target sequence
tccaataataggacatcttttattttt

SEQ ID NO: 33361 - DNA, 27 bp, Artificial sequence
  SiRNA target sequence
ccaataataggacatcttttatttttc

SEQ ID NO: 33362 - DNA, 27 bp, Artificial sequence
  SiRNA target sequence
caataataggacatcttttatttttcc

SEQ ID NO: 33363 - DNA, 27 bp, Artificial sequence
  SiRNA target sequence
aataataggacatcttttatttttcct

SEQ ID NO: 33364 - DNA, 27 bp, Artificial sequence
  SiRNA target sequence
ataataggacatcttttatttttcctt

SEQ ID NO: 33365 - DNA, 27 bp, Artificial sequence
  SiRNA target sequence
taataggacatcttttatttttccttc

SEQ ID NO: 33366 - DNA, 27 bp, Artificial sequence
  SiRNA target sequence
aataggacatcttttatttttccttct

SEQ ID NO: 33367 - DNA, 27 bp, Artificial sequence
  SiRNA target sequence
ataggacatcttttatttttccttcta

SEQ ID NO: 33368 - DNA, 27 bp, Artificial sequence
  SiRNA target sequence
taggacatcttttatttttccttctaa

SEQ ID NO: 33369 - DNA, 27 bp, Artificial sequence
  SiRNA target sequence
aggacatcttttatttttccttctaac

SEQ ID NO: 33370 - DNA, 27 bp, Artificial sequence
  SiRNA target sequence
ggacatcttttatttttccttctaaca

SEQ ID NO: 33371 - DNA, 27 bp, Artificial sequence
  SiRNA target sequence
gacatcttttatttttccttctaacac

SEQ ID NO: 33372 - DNA, 27 bp, Artificial sequence
  SiRNA target sequence
acatcttttatttttccttctaacacg

SEQ ID NO: 33373 - DNA, 27 bp, Artificial sequence
  SiRNA target sequence
catcttttatttttccttctaacacgc

SEQ ID NO: 33374 - DNA, 27 bp, Artificial sequence
  SiRNA target sequence
atcttttatttttccttctaacacgcc

SEQ ID NO: 33375 - DNA, 27 bp, Artificial sequence
  SiRNA target sequence
tcttttatttttccttctaacacgcct

SEQ ID NO: 33376 - DNA, 27 bp, Artificial sequence
  SiRNA target sequence
cttttatttttccttctaacacgcctg

SEQ ID NO: 33377 - DNA, 27 bp, Artificial sequence
  SiRNA target sequence
ttttatttttccttctaacacgcctgc

SEQ ID NO: 33378 - DNA, 27 bp, Artificial sequence
  SiRNA target sequence
tttatttttccttctaacacgcctgct

SEQ ID NO: 33379 - DNA, 27 bp, Artificial sequence
  SiRNA target sequence
ttatttttccttctaacacgcctgctt

SEQ ID NO: 33380 - DNA, 27 bp, Artificial sequence
  SiRNA target sequence
tatttttccttctaacacgcctgcttg

SEQ ID NO: 33381 - DNA, 27 bp, Artificial sequence
  SiRNA target sequence
atttttccttctaacacgcctgcttgt

SEQ ID NO: 33382 - DNA, 27 bp, Artificial sequence
  SiRNA target sequence
tttttccttctaacacgcctgcttgta

SEQ ID NO: 33383 - DNA, 27 bp, Artificial sequence
  SiRNA target sequence
ttttccttctaacacgcctgcttgtag

SEQ ID NO: 33384 - DNA, 27 bp, Artificial sequence
  SiRNA target sequence
tttccttctaacacgcctgcttgtaga

SEQ ID NO: 33385 - DNA, 27 bp, Artificial sequence
  SiRNA target sequence
ttccttctaacacgcctgcttgtagag

SEQ ID NO: 33386 - DNA, 27 bp, Artificial sequence
  SiRNA target sequence
tccttctaacacgcctgcttgtagagc

SEQ ID NO: 33387 - DNA, 27 bp, Artificial sequence
  SiRNA target sequence
ccttctaacacgcctgcttgtagagcg

SEQ ID NO: 33388 - DNA, 27 bp, Artificial sequence
  SiRNA target sequence
cttctaacacgcctgcttgtagagcgg

SEQ ID NO: 33389 - DNA, 27 bp, Artificial sequence
  SiRNA target sequence
ttctaacacgcctgcttgtagagcggc

SEQ ID NO: 33390 - DNA, 27 bp, Artificial sequence
  SiRNA target sequence
tctaacacgcctgcttgtagagcggcc

SEQ ID NO: 33391 - DNA, 27 bp, Artificial sequence
  SiRNA target sequence
ctaacacgcctgcttgtagagcggccc

SEQ ID NO: 33392 - DNA, 27 bp, Artificial sequence
  SiRNA target sequence
taacacgcctgcttgtagagcggcccc

SEQ ID NO: 33393 - DNA, 27 bp, Artificial sequence
  SiRNA target sequence
aacacgcctgcttgtagagcggcccct

SEQ ID NO: 33394 - DNA, 27 bp, Artificial sequence
  SiRNA target sequence
acacgcctgcttgtagagcggcccctt

SEQ ID NO: 33395 - DNA, 27 bp, Artificial sequence
  SiRNA target sequence
cacgcctgcttgtagagcggccccttt

SEQ ID NO: 33396 - DNA, 27 bp, Artificial sequence
  SiRNA target sequence
acgcctgcttgtagagcggccccttta

SEQ ID NO: 33397 - DNA, 27 bp, Artificial sequence
  SiRNA target sequence
cgcctgcttgtagagcggcccctttag

SEQ ID NO: 33398 - DNA, 27 bp, Artificial sequence
  SiRNA target sequence
gcctgcttgtagagcggcccctttagc

SEQ ID NO: 33399 - DNA, 27 bp, Artificial sequence
  SiRNA target sequence
cctgcttgtagagcggcccctttagca

SEQ ID NO: 33400 - DNA, 27 bp, Artificial sequence
  SiRNA target sequence
ctgcttgtagagcggcccctttagcaa

SEQ ID NO: 33401 - DNA, 27 bp, Artificial sequence
  SiRNA target sequence
tgcttgtagagcggcccctttagcaac

SEQ ID NO: 33402 - DNA, 27 bp, Artificial sequence
  SiRNA target sequence
gcttgtagagcggcccctttagcaaca

SEQ ID NO: 33403 - DNA, 27 bp, Artificial sequence
  SiRNA target sequence
cttgtagagcggcccctttagcaacag

SEQ ID NO: 33404 - DNA, 27 bp, Artificial sequence
  SiRNA target sequence
ttgtagagcggcccctttagcaacagc

SEQ ID NO: 33405 - DNA, 27 bp, Artificial sequence
  SiRNA target sequence
tgtagagcggcccctttagcaacagct

SEQ ID NO: 33406 - DNA, 27 bp, Artificial sequence
  SiRNA target sequence
gtagagcggcccctttagcaacagctt

SEQ ID NO: 33407 - DNA, 27 bp, Artificial sequence
  SiRNA target sequence
tagagcggcccctttagcaacagcttc

SEQ ID NO: 33408 - DNA, 27 bp, Artificial sequence
  SiRNA target sequence
agagcggcccctttagcaacagcttca

SEQ ID NO: 33409 - DNA, 27 bp, Artificial sequence
  SiRNA target sequence
gagcggcccctttagcaacagcttcat

SEQ ID NO: 33410 - DNA, 27 bp, Artificial sequence
  SiRNA target sequence
agcggcccctttagcaacagcttcatc

SEQ ID NO: 33411 - DNA, 27 bp, Artificial sequence
  SiRNA target sequence
gcggcccctttagcaacagcttcatct

SEQ ID NO: 33412 - DNA, 27 bp, Artificial sequence
  SiRNA target sequence
cggcccctttagcaacagcttcatctg

SEQ ID NO: 33413 - DNA, 27 bp, Artificial sequence
  SiRNA target sequence
ggcccctttagcaacagcttcatctgg

SEQ ID NO: 33414 - DNA, 27 bp, Artificial sequence
  SiRNA target sequence
gcccctttagcaacagcttcatctgga

SEQ ID NO: 33415 - DNA, 27 bp, Artificial sequence
  SiRNA target sequence
cccctttagcaacagcttcatctggat

SEQ ID NO: 33416 - DNA, 27 bp, Artificial sequence
  SiRNA target sequence
ccctttagcaacagcttcatctggatt

SEQ ID NO: 33417 - DNA, 27 bp, Artificial sequence
  SiRNA target sequence
cctttagcaacagcttcatctggatta

SEQ ID NO: 33418 - DNA, 27 bp, Artificial sequence
  SiRNA target sequence
ctttagcaacagcttcatctggattaa

SEQ ID NO: 33419 - DNA, 27 bp, Artificial sequence
  SiRNA target sequence
tttagcaacagcttcatctggattaat

SEQ ID NO: 33420 - DNA, 27 bp, Artificial sequence
  SiRNA target sequence
ttagcaacagcttcatctggattaata

SEQ ID NO: 33421 - DNA, 27 bp, Artificial sequence
  SiRNA target sequence
tagcaacagcttcatctggattaatat

SEQ ID NO: 33422 - DNA, 27 bp, Artificial sequence
  SiRNA target sequence
agcaacagcttcatctggattaatatt

SEQ ID NO: 33423 - DNA, 27 bp, Artificial sequence
  SiRNA target sequence
gcaacagcttcatctggattaatattt

SEQ ID NO: 33424 - DNA, 27 bp, Artificial sequence
  SiRNA target sequence
caacagcttcatctggattaatatttg

SEQ ID NO: 33425 - DNA, 27 bp, Artificial sequence
  SiRNA target sequence
aacagcttcatctggattaatatttgt

SEQ ID NO: 33426 - DNA, 27 bp, Artificial sequence
  SiRNA target sequence
acagcttcatctggattaatatttgta

SEQ ID NO: 33427 - DNA, 27 bp, Artificial sequence
  SiRNA target sequence
cagcttcatctggattaatatttgtag

SEQ ID NO: 33428 - DNA, 27 bp, Artificial sequence
  SiRNA target sequence
agcttcatctggattaatatttgtaga

SEQ ID NO: 33429 - DNA, 27 bp, Artificial sequence
  SiRNA target sequence
gcttcatctggattaatatttgtagaa

SEQ ID NO: 33430 - DNA, 27 bp, Artificial sequence
  SiRNA target sequence
cttcatctggattaatatttgtagaag

SEQ ID NO: 33431 - DNA, 27 bp, Artificial sequence
  SiRNA target sequence
ttcatctggattaatatttgtagaagg

SEQ ID NO: 33432 - DNA, 27 bp, Artificial sequence
  SiRNA target sequence
tcatctggattaatatttgtagaaggc

SEQ ID NO: 33433 - DNA, 27 bp, Artificial sequence
  SiRNA target sequence
catctggattaatatttgtagaaggct

SEQ ID NO: 33434 - DNA, 27 bp, Artificial sequence
  SiRNA target sequence
atctggattaatatttgtagaaggctc

SEQ ID NO: 33435 - DNA, 27 bp, Artificial sequence
  SiRNA target sequence
tctggattaatatttgtagaaggctcg

SEQ ID NO: 33436 - DNA, 27 bp, Artificial sequence
  SiRNA target sequence
ctggattaatatttgtagaaggctcga

SEQ ID NO: 33437 - DNA, 27 bp, Artificial sequence
  SiRNA target sequence
tggattaatatttgtagaaggctcgat

SEQ ID NO: 33438 - DNA, 27 bp, Artificial sequence
  SiRNA target sequence
ggattaatatttgtagaaggctcgata

SEQ ID NO: 33439 - DNA, 27 bp, Artificial sequence
  SiRNA target sequence
gattaatatttgtagaaggctcgatac

SEQ ID NO: 33440 - DNA, 27 bp, Artificial sequence
  SiRNA target sequence
attaatatttgtagaaggctcgatacc

SEQ ID NO: 33441 - DNA, 27 bp, Artificial sequence
  SiRNA target sequence
ttaatatttgtagaaggctcgatacca

SEQ ID NO: 33442 - DNA, 27 bp, Artificial sequence
  SiRNA target sequence
taatatttgtagaaggctcgataccaa

SEQ ID NO: 33443 - DNA, 27 bp, Artificial sequence
  SiRNA target sequence
aatatttgtagaaggctcgataccaaa

SEQ ID NO: 33444 - DNA, 27 bp, Artificial sequence
  SiRNA target sequence
atatttgtagaaggctcgataccaaaa

SEQ ID NO: 33445 - DNA, 27 bp, Artificial sequence
  SiRNA target sequence
tatttgtagaaggctcgataccaaaaa

SEQ ID NO: 33446 - DNA, 27 bp, Artificial sequence
  SiRNA target sequence
atttgtagaaggctcgataccaaaaat

SEQ ID NO: 33447 - DNA, 27 bp, Artificial sequence
  SiRNA target sequence
tttgtagaaggctcgataccaaaaatc

SEQ ID NO: 33448 - DNA, 27 bp, Artificial sequence
  SiRNA target sequence
ttgtagaaggctcgataccaaaaatct

SEQ ID NO: 33449 - DNA, 27 bp, Artificial sequence
  SiRNA target sequence
tgtagaaggctcgataccaaaaatctt

SEQ ID NO: 33450 - DNA, 27 bp, Artificial sequence
  SiRNA target sequence
gtagaaggctcgataccaaaaatcttc

SEQ ID NO: 33451 - DNA, 27 bp, Artificial sequence
  SiRNA target sequence
tagaaggctcgataccaaaaatcttct

SEQ ID NO: 33452 - DNA, 27 bp, Artificial sequence
  SiRNA target sequence
agaaggctcgataccaaaaatcttctt

SEQ ID NO: 33453 - DNA, 27 bp, Artificial sequence
  SiRNA target sequence
gaaggctcgataccaaaaatcttctta

SEQ ID NO: 33454 - DNA, 27 bp, Artificial sequence
  SiRNA target sequence
aaggctcgataccaaaaatcttcttaa

SEQ ID NO: 33455 - DNA, 27 bp, Artificial sequence
  SiRNA target sequence
aggctcgataccaaaaatcttcttaac

SEQ ID NO: 33456 - DNA, 27 bp, Artificial sequence
  SiRNA target sequence
ggctcgataccaaaaatcttcttaaca

SEQ ID NO: 33457 - DNA, 27 bp, Artificial sequence
  SiRNA target sequence
gctcgataccaaaaatcttcttaacaa

SEQ ID NO: 33458 - DNA, 27 bp, Artificial sequence
  SiRNA target sequence
ctcgataccaaaaatcttcttaacaag

SEQ ID NO: 33459 - DNA, 27 bp, Artificial sequence
  SiRNA target sequence
tcgataccaaaaatcttcttaacaagt

SEQ ID NO: 33460 - DNA, 27 bp, Artificial sequence
  SiRNA target sequence
cgataccaaaaatcttcttaacaagtt

SEQ ID NO: 33461 - DNA, 27 bp, Artificial sequence
  SiRNA target sequence
gataccaaaaatcttcttaacaagttt

SEQ ID NO: 33462 - DNA, 27 bp, Artificial sequence
  SiRNA target sequence
ataccaaaaatcttcttaacaagtttt

SEQ ID NO: 33463 - DNA, 27 bp, Artificial sequence
  SiRNA target sequence
taccaaaaatcttcttaacaagttttc

SEQ ID NO: 33464 - DNA, 27 bp, Artificial sequence
  SiRNA target sequence
accaaaaatcttcttaacaagttttct

SEQ ID NO: 33465 - DNA, 27 bp, Artificial sequence
  SiRNA target sequence
ccaaaaatcttcttaacaagttttcta

SEQ ID NO: 33466 - DNA, 27 bp, Artificial sequence
  SiRNA target sequence
caaaaatcttcttaacaagttttctaa

SEQ ID NO: 33467 - DNA, 27 bp, Artificial sequence
  SiRNA target sequence
aaaaatcttcttaacaagttttctaac

SEQ ID NO: 33468 - DNA, 27 bp, Artificial sequence
  SiRNA target sequence
aaaatcttcttaacaagttttctaaca

SEQ ID NO: 33469 - DNA, 27 bp, Artificial sequence
  SiRNA target sequence
aaatcttcttaacaagttttctaacat

SEQ ID NO: 33470 - DNA, 27 bp, Artificial sequence
  SiRNA target sequence
aatcttcttaacaagttttctaacata

SEQ ID NO: 33471 - DNA, 27 bp, Artificial sequence
  SiRNA target sequence
atcttcttaacaagttttctaacatac

SEQ ID NO: 33472 - DNA, 27 bp, Artificial sequence
  SiRNA target sequence
tcttcttaacaagttttctaacatacg

SEQ ID NO: 33473 - DNA, 27 bp, Artificial sequence
  SiRNA target sequence
cttcttaacaagttttctaacatacgg

SEQ ID NO: 33474 - DNA, 27 bp, Artificial sequence
  SiRNA target sequence
ttcttaacaagttttctaacatacggc

SEQ ID NO: 33475 - DNA, 27 bp, Artificial sequence
  SiRNA target sequence
tcttaacaagttttctaacatacggca

SEQ ID NO: 33476 - DNA, 27 bp, Artificial sequence
  SiRNA target sequence
cttaacaagttttctaacatacggcat

SEQ ID NO: 33477 - DNA, 27 bp, Artificial sequence
  SiRNA target sequence
ttaacaagttttctaacatacggcatt

SEQ ID NO: 33478 - DNA, 27 bp, Artificial sequence
  SiRNA target sequence
taacaagttttctaacatacggcattc

SEQ ID NO: 33479 - DNA, 27 bp, Artificial sequence
  SiRNA target sequence
aacaagttttctaacatacggcattcg

SEQ ID NO: 33480 - DNA, 27 bp, Artificial sequence
  SiRNA target sequence
acaagttttctaacatacggcattcgt

SEQ ID NO: 33481 - DNA, 27 bp, Artificial sequence
  SiRNA target sequence
caagttttctaacatacggcattcgtg

SEQ ID NO: 33482 - DNA, 27 bp, Artificial sequence
  SiRNA target sequence
aagttttctaacatacggcattcgtgt

SEQ ID NO: 33483 - DNA, 27 bp, Artificial sequence
  SiRNA target sequence
agttttctaacatacggcattcgtgtc

SEQ ID NO: 33484 - DNA, 27 bp, Artificial sequence
  SiRNA target sequence
gttttctaacatacggcattcgtgtca

SEQ ID NO: 33485 - DNA, 27 bp, Artificial sequence
  SiRNA target sequence
ttttctaacatacggcattcgtgtcat

SEQ ID NO: 33486 - DNA, 27 bp, Artificial sequence
  SiRNA target sequence
tttctaacatacggcattcgtgtcatt

SEQ ID NO: 33487 - DNA, 27 bp, Artificial sequence
  SiRNA target sequence
ttctaacatacggcattcgtgtcattc

SEQ ID NO: 33488 - DNA, 27 bp, Artificial sequence
  SiRNA target sequence
tctaacatacggcattcgtgtcattcc

SEQ ID NO: 33489 - DNA, 27 bp, Artificial sequence
  SiRNA target sequence
ctaacatacggcattcgtgtcattcca

SEQ ID NO: 33490 - DNA, 27 bp, Artificial sequence
  SiRNA target sequence
taacatacggcattcgtgtcattccac

SEQ ID NO: 33491 - DNA, 27 bp, Artificial sequence
  SiRNA target sequence
aacatacggcattcgtgtcattccacc

SEQ ID NO: 33492 - DNA, 27 bp, Artificial sequence
  SiRNA target sequence
acatacggcattcgtgtcattccaccc

SEQ ID NO: 33493 - DNA, 27 bp, Artificial sequence
  SiRNA target sequence
catacggcattcgtgtcattccaccca

SEQ ID NO: 33494 - DNA, 27 bp, Artificial sequence
  SiRNA target sequence
atacggcattcgtgtcattccacccac

SEQ ID NO: 33495 - DNA, 27 bp, Artificial sequence
  SiRNA target sequence
tacggcattcgtgtcattccacccaca

SEQ ID NO: 33496 - DNA, 27 bp, Artificial sequence
  SiRNA target sequence
acggcattcgtgtcattccacccacaa

SEQ ID NO: 33497 - DNA, 27 bp, Artificial sequence
  SiRNA target sequence
cggcattcgtgtcattccacccacaag

SEQ ID NO: 33498 - DNA, 27 bp, Artificial sequence
  SiRNA target sequence
ggcattcgtgtcattccacccacaagt

SEQ ID NO: 33499 - DNA, 27 bp, Artificial sequence
  SiRNA target sequence
gcattcgtgtcattccacccacaagta

SEQ ID NO: 33500 - DNA, 27 bp, Artificial sequence
  SiRNA target sequence
cattcgtgtcattccacccacaagtat

SEQ ID NO: 33501 - DNA, 27 bp, Artificial sequence
  SiRNA target sequence
attcgtgtcattccacccacaagtata

SEQ ID NO: 33502 - DNA, 27 bp, Artificial sequence
  SiRNA target sequence
ttcgtgtcattccacccacaagtataa

SEQ ID NO: 33503 - DNA, 27 bp, Artificial sequence
  SiRNA target sequence
tcgtgtcattccacccacaagtataac

SEQ ID NO: 33504 - DNA, 27 bp, Artificial sequence
  SiRNA target sequence
cgtgtcattccacccacaagtataacg

SEQ ID NO: 33505 - DNA, 27 bp, Artificial sequence
  SiRNA target sequence
gtgtcattccacccacaagtataacgt

SEQ ID NO: 33506 - DNA, 27 bp, Artificial sequence
  SiRNA target sequence
tgtcattccacccacaagtataacgtg

SEQ ID NO: 33507 - DNA, 27 bp, Artificial sequence
  SiRNA target sequence
gtcattccacccacaagtataacgtgt

SEQ ID NO: 33508 - DNA, 27 bp, Artificial sequence
  SiRNA target sequence
tcattccacccacaagtataacgtgtt

SEQ ID NO: 33509 - DNA, 27 bp, Artificial sequence
  SiRNA target sequence
cattccacccacaagtataacgtgttt

SEQ ID NO: 33510 - DNA, 27 bp, Artificial sequence
  SiRNA target sequence
attccacccacaagtataacgtgttta

SEQ ID NO: 33511 - DNA, 27 bp, Artificial sequence
  SiRNA target sequence
ttccacccacaagtataacgtgtttaa

SEQ ID NO: 33512 - DNA, 27 bp, Artificial sequence
  SiRNA target sequence
tccacccacaagtataacgtgtttaat

SEQ ID NO: 33513 - DNA, 27 bp, Artificial sequence
  SiRNA target sequence
ccacccacaagtataacgtgtttaata

SEQ ID NO: 33514 - DNA, 27 bp, Artificial sequence
  SiRNA target sequence
cacccacaagtataacgtgtttaatat

SEQ ID NO: 33515 - DNA, 27 bp, Artificial sequence
  SiRNA target sequence
acccacaagtataacgtgtttaatatc

SEQ ID NO: 33516 - DNA, 27 bp, Artificial sequence
  SiRNA target sequence
cccacaagtataacgtgtttaatatca

SEQ ID NO: 33517 - DNA, 27 bp, Artificial sequence
  SiRNA target sequence
ccacaagtataacgtgtttaatatcac

SEQ ID NO: 33518 - DNA, 27 bp, Artificial sequence
  SiRNA target sequence
cacaagtataacgtgtttaatatcact

SEQ ID NO: 33519 - DNA, 27 bp, Artificial sequence
  SiRNA target sequence
acaagtataacgtgtttaatatcactt

SEQ ID NO: 33520 - DNA, 27 bp, Artificial sequence
  SiRNA target sequence
caagtataacgtgtttaatatcacttt

SEQ ID NO: 33521 - DNA, 27 bp, Artificial sequence
  SiRNA target sequence
aagtataacgtgtttaatatcactttt

SEQ ID NO: 33522 - DNA, 27 bp, Artificial sequence
  SiRNA target sequence
agtataacgtgtttaatatcactttta

SEQ ID NO: 33523 - DNA, 27 bp, Artificial sequence
  SiRNA target sequence
gtataacgtgtttaatatcacttttag

SEQ ID NO: 33524 - DNA, 27 bp, Artificial sequence
  SiRNA target sequence
tataacgtgtttaatatcacttttagt

SEQ ID NO: 33525 - DNA, 27 bp, Artificial sequence
  SiRNA target sequence
ataacgtgtttaatatcacttttagtt

SEQ ID NO: 33526 - DNA, 27 bp, Artificial sequence
  SiRNA target sequence
taacgtgtttaatatcacttttagtta

SEQ ID NO: 33527 - DNA, 27 bp, Artificial sequence
  SiRNA target sequence
aacgtgtttaatatcacttttagttat

SEQ ID NO: 33528 - DNA, 27 bp, Artificial sequence
  SiRNA target sequence
acgtgtttaatatcacttttagttata

SEQ ID NO: 33529 - DNA, 27 bp, Artificial sequence
  SiRNA target sequence
cgtgtttaatatcacttttagttatat

SEQ ID NO: 33530 - DNA, 27 bp, Artificial sequence
  SiRNA target sequence
gtgtttaatatcacttttagttatatt

SEQ ID NO: 33531 - DNA, 27 bp, Artificial sequence
  SiRNA target sequence
tgtttaatatcacttttagttatattg

SEQ ID NO: 33532 - DNA, 27 bp, Artificial sequence
  SiRNA target sequence
gtttaatatcacttttagttatattgg

SEQ ID NO: 33533 - DNA, 27 bp, Artificial sequence
  SiRNA target sequence
tttaatatcacttttagttatattggc

SEQ ID NO: 33534 - DNA, 27 bp, Artificial sequence
  SiRNA target sequence
ttaatatcacttttagttatattggca

SEQ ID NO: 33535 - DNA, 27 bp, Artificial sequence
  SiRNA target sequence
taatatcacttttagttatattggcat

SEQ ID NO: 33536 - DNA, 27 bp, Artificial sequence
  SiRNA target sequence
aatatcacttttagttatattggcatc

SEQ ID NO: 33537 - DNA, 27 bp, Artificial sequence
  SiRNA target sequence
atatcacttttagttatattggcatct

SEQ ID NO: 33538 - DNA, 27 bp, Artificial sequence
  SiRNA target sequence
tatcacttttagttatattggcatctc

SEQ ID NO: 33539 - DNA, 27 bp, Artificial sequence
  SiRNA target sequence
atcacttttagttatattggcatctct

SEQ ID NO: 33540 - DNA, 27 bp, Artificial sequence
  SiRNA target sequence
tcacttttagttatattggcatctcta

SEQ ID NO: 33541 - DNA, 27 bp, Artificial sequence
  SiRNA target sequence
cacttttagttatattggcatctctaa

SEQ ID NO: 33542 - DNA, 27 bp, Artificial sequence
  SiRNA target sequence
acttttagttatattggcatctctaat

SEQ ID NO: 33543 - DNA, 27 bp, Artificial sequence
  SiRNA target sequence
cttttagttatattggcatctctaata

SEQ ID NO: 33544 - DNA, 27 bp, Artificial sequence
  SiRNA target sequence
ttttagttatattggcatctctaatag

SEQ ID NO: 33545 - DNA, 27 bp, Artificial sequence
  SiRNA target sequence
tttagttatattggcatctctaatagc

SEQ ID NO: 33546 - DNA, 27 bp, Artificial sequence
  SiRNA target sequence
ttagttatattggcatctctaatagct

SEQ ID NO: 33547 - DNA, 27 bp, Artificial sequence
  SiRNA target sequence
tagttatattggcatctctaatagctt

SEQ ID NO: 33548 - DNA, 27 bp, Artificial sequence
  SiRNA target sequence
agttatattggcatctctaatagcttt

SEQ ID NO: 33549 - DNA, 27 bp, Artificial sequence
  SiRNA target sequence
gttatattggcatctctaatagcttta

SEQ ID NO: 33550 - DNA, 27 bp, Artificial sequence
  SiRNA target sequence
ttatattggcatctctaatagctttaa

SEQ ID NO: 33551 - DNA, 27 bp, Artificial sequence
  SiRNA target sequence
tatattggcatctctaatagctttaag

SEQ ID NO: 33552 - DNA, 27 bp, Artificial sequence
  SiRNA target sequence
atattggcatctctaatagctttaaga

SEQ ID NO: 33553 - DNA, 27 bp, Artificial sequence
  SiRNA target sequence
tattggcatctctaatagctttaagac

SEQ ID NO: 33554 - DNA, 27 bp, Artificial sequence
  SiRNA target sequence
attggcatctctaatagctttaagaca

SEQ ID NO: 33555 - DNA, 27 bp, Artificial sequence
  SiRNA target sequence
ttggcatctctaatagctttaagacag

SEQ ID NO: 33556 - DNA, 27 bp, Artificial sequence
  SiRNA target sequence
tggcatctctaatagctttaagacagg

SEQ ID NO: 33557 - DNA, 27 bp, Artificial sequence
  SiRNA target sequence
ggcatctctaatagctttaagacaggg

SEQ ID NO: 33558 - DNA, 27 bp, Artificial sequence
  SiRNA target sequence
gcatctctaatagctttaagacagggg

SEQ ID NO: 33559 - DNA, 27 bp, Artificial sequence
  SiRNA target sequence
catctctaatagctttaagacaggggt

SEQ ID NO: 33560 - DNA, 27 bp, Artificial sequence
  SiRNA target sequence
atctctaatagctttaagacaggggtt

SEQ ID NO: 33561 - DNA, 27 bp, Artificial sequence
  SiRNA target sequence
tctctaatagctttaagacaggggttt

SEQ ID NO: 33562 - DNA, 27 bp, Artificial sequence
  SiRNA target sequence
ctctaatagctttaagacaggggttta

SEQ ID NO: 33563 - DNA, 27 bp, Artificial sequence
  SiRNA target sequence
tctaatagctttaagacaggggtttat

SEQ ID NO: 33564 - DNA, 27 bp, Artificial sequence
  SiRNA target sequence
ctaatagctttaagacaggggtttatt

SEQ ID NO: 33565 - DNA, 27 bp, Artificial sequence
  SiRNA target sequence
taatagctttaagacaggggtttattg

SEQ ID NO: 33566 - DNA, 27 bp, Artificial sequence
  SiRNA target sequence
aatagctttaagacaggggtttattgt

SEQ ID NO: 33567 - DNA, 27 bp, Artificial sequence
  SiRNA target sequence
atagctttaagacaggggtttattgtt

SEQ ID NO: 33568 - DNA, 27 bp, Artificial sequence
  SiRNA target sequence
tagctttaagacaggggtttattgttt

SEQ ID NO: 33569 - DNA, 27 bp, Artificial sequence
  SiRNA target sequence
agctttaagacaggggtttattgtttt

SEQ ID NO: 33570 - DNA, 27 bp, Artificial sequence
  SiRNA target sequence
gctttaagacaggggtttattgttttg

SEQ ID NO: 33571 - DNA, 27 bp, Artificial sequence
  SiRNA target sequence
ctttaagacaggggtttattgttttgt

SEQ ID NO: 33572 - DNA, 27 bp, Artificial sequence
  SiRNA target sequence
tttaagacaggggtttattgttttgtc

SEQ ID NO: 33573 - DNA, 27 bp, Artificial sequence
  SiRNA target sequence
ttaagacaggggtttattgttttgtct

SEQ ID NO: 33574 - DNA, 27 bp, Artificial sequence
  SiRNA target sequence
taagacaggggtttattgttttgtcta

SEQ ID NO: 33575 - DNA, 27 bp, Artificial sequence
  SiRNA target sequence
aagacaggggtttattgttttgtctat

SEQ ID NO: 33576 - DNA, 27 bp, Artificial sequence
  SiRNA target sequence
agacaggggtttattgttttgtctatt

SEQ ID NO: 33577 - DNA, 27 bp, Artificial sequence
  SiRNA target sequence
gacaggggtttattgttttgtctatta

SEQ ID NO: 33578 - DNA, 27 bp, Artificial sequence
  SiRNA target sequence
acaggggtttattgttttgtctattaa

SEQ ID NO: 33579 - DNA, 27 bp, Artificial sequence
  SiRNA target sequence
caggggtttattgttttgtctattaac

SEQ ID NO: 33580 - DNA, 27 bp, Artificial sequence
  SiRNA target sequence
aggggtttattgttttgtctattaact

SEQ ID NO: 33581 - DNA, 27 bp, Artificial sequence
  SiRNA target sequence
ggggtttattgttttgtctattaactt

SEQ ID NO: 33582 - DNA, 27 bp, Artificial sequence
  SiRNA target sequence
gggtttattgttttgtctattaacttt

SEQ ID NO: 33583 - DNA, 27 bp, Artificial sequence
  SiRNA target sequence
ggtttattgttttgtctattaactttt

SEQ ID NO: 33584 - DNA, 27 bp, Artificial sequence
  SiRNA target sequence
gtttattgttttgtctattaacttttt

SEQ ID NO: 33585 - DNA, 27 bp, Artificial sequence
  SiRNA target sequence
tttattgttttgtctattaactttttt

SEQ ID NO: 33586 - DNA, 27 bp, Artificial sequence
  SiRNA target sequence
ttattgttttgtctattaacttttttg

SEQ ID NO: 33587 - DNA, 27 bp, Artificial sequence
  SiRNA target sequence
tattgttttgtctattaacttttttgt

SEQ ID NO: 33588 - DNA, 27 bp, Artificial sequence
  SiRNA target sequence
attgttttgtctattaacttttttgta

SEQ ID NO: 33589 - DNA, 27 bp, Artificial sequence
  SiRNA target sequence
ttgttttgtctattaacttttttgtaa

SEQ ID NO: 33590 - DNA, 27 bp, Artificial sequence
  SiRNA target sequence
tgttttgtctattaacttttttgtaat

SEQ ID NO: 33591 - DNA, 27 bp, Artificial sequence
  SiRNA target sequence
gttttgtctattaacttttttgtaatt

SEQ ID NO: 33592 - DNA, 27 bp, Artificial sequence
  SiRNA target sequence
ttttgtctattaacttttttgtaattt

SEQ ID NO: 33593 - DNA, 27 bp, Artificial sequence
  SiRNA target sequence
tttgtctattaacttttttgtaatttt

SEQ ID NO: 33594 - DNA, 27 bp, Artificial sequence
  SiRNA target sequence
ttgtctattaacttttttgtaattttt

SEQ ID NO: 33595 - DNA, 27 bp, Artificial sequence
  SiRNA target sequence
tgtctattaacttttttgtaatttttt

SEQ ID NO: 33596 - DNA, 27 bp, Artificial sequence
  SiRNA target sequence
gtctattaacttttttgtaattttttc

SEQ ID NO: 33597 - DNA, 27 bp, Artificial sequence
  SiRNA target sequence
tctattaacttttttgtaattttttca

SEQ ID NO: 33598 - DNA, 27 bp, Artificial sequence
  SiRNA target sequence
ctattaacttttttgtaattttttcaa

SEQ ID NO: 33599 - DNA, 27 bp, Artificial sequence
  SiRNA target sequence
tattaacttttttgtaattttttcaaa

SEQ ID NO: 33600 - DNA, 27 bp, Artificial sequence
  SiRNA target sequence
attaacttttttgtaattttttcaaat

SEQ ID NO: 33601 - DNA, 27 bp, Artificial sequence
  SiRNA target sequence
ttaacttttttgtaattttttcaaatt

SEQ ID NO: 33602 - DNA, 27 bp, Artificial sequence
  SiRNA target sequence
taacttttttgtaattttttcaaattc

SEQ ID NO: 33603 - DNA, 27 bp, Artificial sequence
  SiRNA target sequence
aacttttttgtaattttttcaaattcg

SEQ ID NO: 33604 - DNA, 27 bp, Artificial sequence
  SiRNA target sequence
acttttttgtaattttttcaaattcgt

SEQ ID NO: 33605 - DNA, 27 bp, Artificial sequence
  SiRNA target sequence
cttttttgtaattttttcaaattcgtc

SEQ ID NO: 33606 - DNA, 27 bp, Artificial sequence
  SiRNA target sequence
ttttttgtaattttttcaaattcgtcg

SEQ ID NO: 33607 - DNA, 27 bp, Artificial sequence
  SiRNA target sequence
tttttgtaattttttcaaattcgtcgc

SEQ ID NO: 33608 - DNA, 27 bp, Artificial sequence
  SiRNA target sequence
ttttgtaattttttcaaattcgtcgcg

SEQ ID NO: 33609 - DNA, 27 bp, Artificial sequence
  SiRNA target sequence
tttgtaattttttcaaattcgtcgcgt

SEQ ID NO: 33610 - DNA, 27 bp, Artificial sequence
  SiRNA target sequence
ttgtaattttttcaaattcgtcgcgtg

SEQ ID NO: 33611 - DNA, 27 bp, Artificial sequence
  SiRNA target sequence
tgtaattttttcaaattcgtcgcgtgt

SEQ ID NO: 33612 - DNA, 27 bp, Artificial sequence
  SiRNA target sequence
gtaattttttcaaattcgtcgcgtgta

SEQ ID NO: 33613 - DNA, 27 bp, Artificial sequence
  SiRNA target sequence
taattttttcaaattcgtcgcgtgtaa

SEQ ID NO: 33614 - DNA, 27 bp, Artificial sequence
  SiRNA target sequence
aattttttcaaattcgtcgcgtgtaat

SEQ ID NO: 33615 - DNA, 27 bp, Artificial sequence
  SiRNA target sequence
attttttcaaattcgtcgcgtgtaatt

SEQ ID NO: 33616 - DNA, 27 bp, Artificial sequence
  SiRNA target sequence
ttttttcaaattcgtcgcgtgtaatta

SEQ ID NO: 33617 - DNA, 27 bp, Artificial sequence
  SiRNA target sequence
tttttcaaattcgtcgcgtgtaattac

SEQ ID NO: 33618 - DNA, 27 bp, Artificial sequence
  SiRNA target sequence
ttttcaaattcgtcgcgtgtaattacc

SEQ ID NO: 33619 - DNA, 27 bp, Artificial sequence
  SiRNA target sequence
tttcaaattcgtcgcgtgtaattacct

SEQ ID NO: 33620 - DNA, 27 bp, Artificial sequence
  SiRNA target sequence
ttcaaattcgtcgcgtgtaattacctc

SEQ ID NO: 33621 - DNA, 27 bp, Artificial sequence
  SiRNA target sequence
tcaaattcgtcgcgtgtaattacctct

SEQ ID NO: 33622 - DNA, 27 bp, Artificial sequence
  SiRNA target sequence
caaattcgtcgcgtgtaattacctctt

SEQ ID NO: 33623 - DNA, 27 bp, Artificial sequence
  SiRNA target sequence
aaattcgtcgcgtgtaattacctcttt

SEQ ID NO: 33624 - DNA, 27 bp, Artificial sequence
  SiRNA target sequence
aattcgtcgcgtgtaattacctctttt

SEQ ID NO: 33625 - DNA, 27 bp, Artificial sequence
  SiRNA target sequence
attcgtcgcgtgtaattacctctttta

SEQ ID NO: 33626 - DNA, 27 bp, Artificial sequence
  SiRNA target sequence
ttcgtcgcgtgtaattacctcttttaa

SEQ ID NO: 33627 - DNA, 27 bp, Artificial sequence
  SiRNA target sequence
tcgtcgcgtgtaattacctcttttaag

SEQ ID NO: 33628 - DNA, 27 bp, Artificial sequence
  SiRNA target sequence
cgtcgcgtgtaattacctcttttaagt

SEQ ID NO: 33629 - DNA, 27 bp, Artificial sequence
  SiRNA target sequence
gtcgcgtgtaattacctcttttaagtg

SEQ ID NO: 33630 - DNA, 27 bp, Artificial sequence
  SiRNA target sequence
tcgcgtgtaattacctcttttaagtga

SEQ ID NO: 33631 - DNA, 27 bp, Artificial sequence
  SiRNA target sequence
cgcgtgtaattacctcttttaagtgat

SEQ ID NO: 33632 - DNA, 27 bp, Artificial sequence
  SiRNA target sequence
gcgtgtaattacctcttttaagtgata

SEQ ID NO: 33633 - DNA, 27 bp, Artificial sequence
  SiRNA target sequence
cgtgtaattacctcttttaagtgataa

SEQ ID NO: 33634 - DNA, 27 bp, Artificial sequence
  SiRNA target sequence
gtgtaattacctcttttaagtgataat

SEQ ID NO: 33635 - DNA, 27 bp, Artificial sequence
  SiRNA target sequence
tgtaattacctcttttaagtgataatt

SEQ ID NO: 33636 - DNA, 27 bp, Artificial sequence
  SiRNA target sequence
gtaattacctcttttaagtgataattc

SEQ ID NO: 33637 - DNA, 27 bp, Artificial sequence
  SiRNA target sequence
taattacctcttttaagtgataattct

SEQ ID NO: 33638 - DNA, 27 bp, Artificial sequence
  SiRNA target sequence
aattacctcttttaagtgataattctt

SEQ ID NO: 33639 - DNA, 27 bp, Artificial sequence
  SiRNA target sequence
attacctcttttaagtgataattcttt

SEQ ID NO: 33640 - DNA, 27 bp, Artificial sequence
  SiRNA target sequence
ttacctcttttaagtgataattctttt

SEQ ID NO: 33641 - DNA, 27 bp, Artificial sequence
  SiRNA target sequence
tacctcttttaagtgataattcttttt

SEQ ID NO: 33642 - DNA, 27 bp, Artificial sequence
  SiRNA target sequence
acctcttttaagtgataattcttttta

SEQ ID NO: 33643 - DNA, 27 bp, Artificial sequence
  SiRNA target sequence
cctcttttaagtgataattctttttac

SEQ ID NO: 33644 - DNA, 27 bp, Artificial sequence
  SiRNA target sequence
ctcttttaagtgataattctttttact

SEQ ID NO: 33645 - DNA, 27 bp, Artificial sequence
  SiRNA target sequence
tcttttaagtgataattctttttacta

SEQ ID NO: 33646 - DNA, 27 bp, Artificial sequence
  SiRNA target sequence
cttttaagtgataattctttttactat

SEQ ID NO: 33647 - DNA, 27 bp, Artificial sequence
  SiRNA target sequence
ttttaagtgataattctttttactatc

SEQ ID NO: 33648 - DNA, 27 bp, Artificial sequence
  SiRNA target sequence
tttaagtgataattctttttactatcg

SEQ ID NO: 33649 - DNA, 27 bp, Artificial sequence
  SiRNA target sequence
ttaagtgataattctttttactatcgt

SEQ ID NO: 33650 - DNA, 27 bp, Artificial sequence
  SiRNA target sequence
taagtgataattctttttactatcgtt

SEQ ID NO: 33651 - DNA, 27 bp, Artificial sequence
  SiRNA target sequence
aagtgataattctttttactatcgtta

SEQ ID NO: 33652 - DNA, 27 bp, Artificial sequence
  SiRNA target sequence
agtgataattctttttactatcgttat

SEQ ID NO: 33653 - DNA, 27 bp, Artificial sequence
  SiRNA target sequence
gtgataattctttttactatcgttata

SEQ ID NO: 33654 - DNA, 27 bp, Artificial sequence
  SiRNA target sequence
tgataattctttttactatcgttataa

SEQ ID NO: 33655 - DNA, 27 bp, Artificial sequence
  SiRNA target sequence
gataattctttttactatcgttataaa

SEQ ID NO: 33656 - DNA, 27 bp, Artificial sequence
  SiRNA target sequence
ataattctttttactatcgttataaat

SEQ ID NO: 33657 - DNA, 27 bp, Artificial sequence
  SiRNA target sequence
taattctttttactatcgttataaata

SEQ ID NO: 33658 - DNA, 27 bp, Artificial sequence
  SiRNA target sequence
aattctttttactatcgttataaatat

SEQ ID NO: 33659 - DNA, 27 bp, Artificial sequence
  SiRNA target sequence
attctttttactatcgttataaatata

SEQ ID NO: 33660 - DNA, 27 bp, Artificial sequence
  SiRNA target sequence
ttctttttactatcgttataaatatac

SEQ ID NO: 33661 - DNA, 27 bp, Artificial sequence
  SiRNA target sequence
tctttttactatcgttataaatatacg

SEQ ID NO: 33662 - DNA, 27 bp, Artificial sequence
  SiRNA target sequence
ctttttactatcgttataaatatacgg

SEQ ID NO: 33663 - DNA, 27 bp, Artificial sequence
  SiRNA target sequence
tttttactatcgttataaatatacgga

SEQ ID NO: 33664 - DNA, 27 bp, Artificial sequence
  SiRNA target sequence
ttttactatcgttataaatatacggaa

SEQ ID NO: 33665 - DNA, 27 bp, Artificial sequence
  SiRNA target sequence
tttactatcgttataaatatacggaat

SEQ ID NO: 33666 - DNA, 27 bp, Artificial sequence
  SiRNA target sequence
ttactatcgttataaatatacggaata

SEQ ID NO: 33667 - DNA, 27 bp, Artificial sequence
  SiRNA target sequence
tactatcgttataaatatacggaatat

SEQ ID NO: 33668 - DNA, 27 bp, Artificial sequence
  SiRNA target sequence
actatcgttataaatatacggaatatt

SEQ ID NO: 33669 - DNA, 27 bp, Artificial sequence
  SiRNA target sequence
ctatcgttataaatatacggaatatta

SEQ ID NO: 33670 - DNA, 27 bp, Artificial sequence
  SiRNA target sequence
tatcgttataaatatacggaatattaa

SEQ ID NO: 33671 - DNA, 27 bp, Artificial sequence
  SiRNA target sequence
atcgttataaatatacggaatattaat

SEQ ID NO: 33672 - DNA, 27 bp, Artificial sequence
  SiRNA target sequence
tcgttataaatatacggaatattaatt

SEQ ID NO: 33673 - DNA, 27 bp, Artificial sequence
  SiRNA target sequence
cgttataaatatacggaatattaattt

SEQ ID NO: 33674 - DNA, 27 bp, Artificial sequence
  SiRNA target sequence
gttataaatatacggaatattaatttc

SEQ ID NO: 33675 - DNA, 27 bp, Artificial sequence
  SiRNA target sequence
ttataaatatacggaatattaatttca

SEQ ID NO: 33676 - DNA, 27 bp, Artificial sequence
  SiRNA target sequence
tataaatatacggaatattaatttcag

SEQ ID NO: 33677 - DNA, 27 bp, Artificial sequence
  SiRNA target sequence
ataaatatacggaatattaatttcaga

SEQ ID NO: 33678 - DNA, 27 bp, Artificial sequence
  SiRNA target sequence
taaatatacggaatattaatttcagac

SEQ ID NO: 33679 - DNA, 27 bp, Artificial sequence
  SiRNA target sequence
aaatatacggaatattaatttcagacg

SEQ ID NO: 33680 - DNA, 27 bp, Artificial sequence
  SiRNA target sequence
aatatacggaatattaatttcagacga

SEQ ID NO: 33681 - DNA, 27 bp, Artificial sequence
  SiRNA target sequence
atatacggaatattaatttcagacgaa

SEQ ID NO: 33682 - DNA, 27 bp, Artificial sequence
  SiRNA target sequence
tatacggaatattaatttcagacgaaa

SEQ ID NO: 33683 - DNA, 27 bp, Artificial sequence
  SiRNA target sequence
atacggaatattaatttcagacgaaag

SEQ ID NO: 33684 - DNA, 27 bp, Artificial sequence
  SiRNA target sequence
tacggaatattaatttcagacgaaaga

SEQ ID NO: 33685 - DNA, 27 bp, Artificial sequence
  SiRNA target sequence
acggaatattaatttcagacgaaagat

SEQ ID NO: 33686 - DNA, 27 bp, Artificial sequence
  SiRNA target sequence
cggaatattaatttcagacgaaagatt

SEQ ID NO: 33687 - DNA, 27 bp, Artificial sequence
  SiRNA target sequence
ggaatattaatttcagacgaaagatta

SEQ ID NO: 33688 - DNA, 27 bp, Artificial sequence
  SiRNA target sequence
gaatattaatttcagacgaaagattag

SEQ ID NO: 33689 - DNA, 27 bp, Artificial sequence
  SiRNA target sequence
aatattaatttcagacgaaagattaga

SEQ ID NO: 33690 - DNA, 27 bp, Artificial sequence
  SiRNA target sequence
atattaatttcagacgaaagattagac

SEQ ID NO: 33691 - DNA, 27 bp, Artificial sequence
  SiRNA target sequence
tattaatttcagacgaaagattagacg

SEQ ID NO: 33692 - DNA, 27 bp, Artificial sequence
  SiRNA target sequence
attaatttcagacgaaagattagacga

SEQ ID NO: 33693 - DNA, 27 bp, Artificial sequence
  SiRNA target sequence
ttaatttcagacgaaagattagacgac

SEQ ID NO: 33694 - DNA, 27 bp, Artificial sequence
  SiRNA target sequence
taatttcagacgaaagattagacgaca

SEQ ID NO: 33695 - DNA, 27 bp, Artificial sequence
  SiRNA target sequence
aatttcagacgaaagattagacgacag

SEQ ID NO: 33696 - DNA, 27 bp, Artificial sequence
  SiRNA target sequence
atttcagacgaaagattagacgacagt

SEQ ID NO: 33697 - DNA, 27 bp, Artificial sequence
  SiRNA target sequence
tttcagacgaaagattagacgacagtt

SEQ ID NO: 33698 - DNA, 27 bp, Artificial sequence
  SiRNA target sequence
ttcagacgaaagattagacgacagttc

SEQ ID NO: 33699 - DNA, 27 bp, Artificial sequence
  SiRNA target sequence
tcagacgaaagattagacgacagttct

SEQ ID NO: 33700 - DNA, 27 bp, Artificial sequence
  SiRNA target sequence
cagacgaaagattagacgacagttctt

SEQ ID NO: 33701 - DNA, 27 bp, Artificial sequence
  SiRNA target sequence
agacgaaagattagacgacagttcttt

SEQ ID NO: 33702 - DNA, 27 bp, Artificial sequence
  SiRNA target sequence
gacgaaagattagacgacagttctttt

SEQ ID NO: 33703 - DNA, 27 bp, Artificial sequence
  SiRNA target sequence
acgaaagattagacgacagttcttttt

SEQ ID NO: 33704 - DNA, 27 bp, Artificial sequence
  SiRNA target sequence
cgaaagattagacgacagttctttttt

SEQ ID NO: 33705 - DNA, 27 bp, Artificial sequence
  SiRNA target sequence
gaaagattagacgacagttcttttttc

SEQ ID NO: 33706 - DNA, 27 bp, Artificial sequence
  SiRNA target sequence
aaagattagacgacagttcttttttca

SEQ ID NO: 33707 - DNA, 27 bp, Artificial sequence
  SiRNA target sequence
aagattagacgacagttcttttttcat

SEQ ID NO: 33708 - DNA, 27 bp, Artificial sequence
  SiRNA target sequence
agattagacgacagttcttttttcatt

SEQ ID NO: 33709 - DNA, 27 bp, Artificial sequence
  SiRNA target sequence
gattagacgacagttcttttttcattt

SEQ ID NO: 33710 - DNA, 27 bp, Artificial sequence
  SiRNA target sequence
attagacgacagttcttttttcatttt

SEQ ID NO: 33711 - DNA, 27 bp, Artificial sequence
  SiRNA target sequence
ttagacgacagttcttttttcattttt

SEQ ID NO: 33712 - DNA, 27 bp, Artificial sequence
  SiRNA target sequence
tagacgacagttcttttttcatttttt

SEQ ID NO: 33713 - DNA, 27 bp, Artificial sequence
  SiRNA target sequence
agacgacagttcttttttcattttttc

SEQ ID NO: 33714 - DNA, 27 bp, Artificial sequence
  SiRNA target sequence
gacgacagttcttttttcattttttcc

SEQ ID NO: 33715 - DNA, 27 bp, Artificial sequence
  SiRNA target sequence
acgacagttcttttttcattttttccg

SEQ ID NO: 33716 - DNA, 27 bp, Artificial sequence
  SiRNA target sequence
cgacagttcttttttcattttttccgc

SEQ ID NO: 33717 - DNA, 27 bp, Artificial sequence
  SiRNA target sequence
gacagttcttttttcattttttccgct

SEQ ID NO: 33718 - DNA, 27 bp, Artificial sequence
  SiRNA target sequence
acagttcttttttcattttttccgctg

SEQ ID NO: 33719 - DNA, 27 bp, Artificial sequence
  SiRNA target sequence
cagttcttttttcattttttccgctgc

SEQ ID NO: 33720 - DNA, 27 bp, Artificial sequence
  SiRNA target sequence
agttcttttttcattttttccgctgct

SEQ ID NO: 33721 - DNA, 27 bp, Artificial sequence
  SiRNA target sequence
gttcttttttcattttttccgctgctt

SEQ ID NO: 33722 - DNA, 27 bp, Artificial sequence
  SiRNA target sequence
ttcttttttcattttttccgctgcttc

SEQ ID NO: 33723 - DNA, 27 bp, Artificial sequence
  SiRNA target sequence
tcttttttcattttttccgctgcttct

SEQ ID NO: 33724 - DNA, 27 bp, Artificial sequence
  SiRNA target sequence
cttttttcattttttccgctgcttctt

SEQ ID NO: 33725 - DNA, 27 bp, Artificial sequence
  SiRNA target sequence
ttttttcattttttccgctgcttcttt

SEQ ID NO: 33726 - DNA, 27 bp, Artificial sequence
  SiRNA target sequence
tttttcattttttccgctgcttcttta

SEQ ID NO: 33727 - DNA, 27 bp, Artificial sequence
  SiRNA target sequence
ttttcattttttccgctgcttctttaa

SEQ ID NO: 33728 - DNA, 27 bp, Artificial sequence
  SiRNA target sequence
tttcattttttccgctgcttctttaat

SEQ ID NO: 33729 - DNA, 27 bp, Artificial sequence
  SiRNA target sequence
ttcattttttccgctgcttctttaatt

SEQ ID NO: 33730 - DNA, 27 bp, Artificial sequence
  SiRNA target sequence
tcattttttccgctgcttctttaattc

SEQ ID NO: 33731 - DNA, 27 bp, Artificial sequence
  SiRNA target sequence
cattttttccgctgcttctttaattct

SEQ ID NO: 33732 - DNA, 27 bp, Artificial sequence
  SiRNA target sequence
attttttccgctgcttctttaattcta

SEQ ID NO: 33733 - DNA, 27 bp, Artificial sequence
  SiRNA target sequence
ttttttccgctgcttctttaattctat

SEQ ID NO: 33734 - DNA, 27 bp, Artificial sequence
  SiRNA target sequence
tttttccgctgcttctttaattctatt

SEQ ID NO: 33735 - DNA, 27 bp, Artificial sequence
  SiRNA target sequence
ttttccgctgcttctttaattctatta

SEQ ID NO: 33736 - DNA, 27 bp, Artificial sequence
  SiRNA target sequence
tttccgctgcttctttaattctattat

SEQ ID NO: 33737 - DNA, 27 bp, Artificial sequence
  SiRNA target sequence
ttccgctgcttctttaattctattata

SEQ ID NO: 33738 - DNA, 27 bp, Artificial sequence
  SiRNA target sequence
tccgctgcttctttaattctattataa

SEQ ID NO: 33739 - DNA, 27 bp, Artificial sequence
  SiRNA target sequence
ccgctgcttctttaattctattataac

SEQ ID NO: 33740 - DNA, 27 bp, Artificial sequence
  SiRNA target sequence
cgctgcttctttaattctattataaca

SEQ ID NO: 33741 - DNA, 27 bp, Artificial sequence
  SiRNA target sequence
gctgcttctttaattctattataacaa

SEQ ID NO: 33742 - DNA, 27 bp, Artificial sequence
  SiRNA target sequence
ctgcttctttaattctattataacaag

SEQ ID NO: 33743 - DNA, 27 bp, Artificial sequence
  SiRNA target sequence
tgcttctttaattctattataacaaga

SEQ ID NO: 33744 - DNA, 27 bp, Artificial sequence
  SiRNA target sequence
gcttctttaattctattataacaagaa

SEQ ID NO: 33745 - DNA, 27 bp, Artificial sequence
  SiRNA target sequence
cttctttaattctattataacaagaat

SEQ ID NO: 33746 - DNA, 27 bp, Artificial sequence
  SiRNA target sequence
ttctttaattctattataacaagaatc

SEQ ID NO: 33747 - DNA, 27 bp, Artificial sequence
  SiRNA target sequence
tctttaattctattataacaagaatcg

SEQ ID NO: 33748 - DNA, 27 bp, Artificial sequence
  SiRNA target sequence
ctttaattctattataacaagaatcgt

SEQ ID NO: 33749 - DNA, 27 bp, Artificial sequence
  SiRNA target sequence
tttaattctattataacaagaatcgtg

SEQ ID NO: 33750 - DNA, 27 bp, Artificial sequence
  SiRNA target sequence
ttaattctattataacaagaatcgtgt

SEQ ID NO: 33751 - DNA, 27 bp, Artificial sequence
  SiRNA target sequence
taattctattataacaagaatcgtgtt

SEQ ID NO: 33752 - DNA, 27 bp, Artificial sequence
  SiRNA target sequence
aattctattataacaagaatcgtgttt

SEQ ID NO: 33753 - DNA, 27 bp, Artificial sequence
  SiRNA target sequence
attctattataacaagaatcgtgttta

SEQ ID NO: 33754 - DNA, 27 bp, Artificial sequence
  SiRNA target sequence
ttctattataacaagaatcgtgtttaa

SEQ ID NO: 33755 - DNA, 27 bp, Artificial sequence
  SiRNA target sequence
tctattataacaagaatcgtgtttaag

SEQ ID NO: 33756 - DNA, 27 bp, Artificial sequence
  SiRNA target sequence
ctattataacaagaatcgtgtttaagt

SEQ ID NO: 33757 - DNA, 27 bp, Artificial sequence
  SiRNA target sequence
tattataacaagaatcgtgtttaagta

SEQ ID NO: 33758 - DNA, 27 bp, Artificial sequence
  SiRNA target sequence
attataacaagaatcgtgtttaagtaa

SEQ ID NO: 33759 - DNA, 27 bp, Artificial sequence
  SiRNA target sequence
ttataacaagaatcgtgtttaagtaaa

SEQ ID NO: 33760 - DNA, 27 bp, Artificial sequence
  SiRNA target sequence
tataacaagaatcgtgtttaagtaaat

SEQ ID NO: 33761 - DNA, 27 bp, Artificial sequence
  SiRNA target sequence
ataacaagaatcgtgtttaagtaaatc

SEQ ID NO: 33762 - DNA, 27 bp, Artificial sequence
  SiRNA target sequence
taacaagaatcgtgtttaagtaaatca

SEQ ID NO: 33763 - DNA, 27 bp, Artificial sequence
  SiRNA target sequence
aacaagaatcgtgtttaagtaaatcaa

SEQ ID NO: 33764 - DNA, 27 bp, Artificial sequence
  SiRNA target sequence
acaagaatcgtgtttaagtaaatcaat

SEQ ID NO: 33765 - DNA, 27 bp, Artificial sequence
  SiRNA target sequence
caagaatcgtgtttaagtaaatcaatt

SEQ ID NO: 33766 - DNA, 27 bp, Artificial sequence
  SiRNA target sequence
aagaatcgtgtttaagtaaatcaattc

SEQ ID NO: 33767 - DNA, 27 bp, Artificial sequence
  SiRNA target sequence
agaatcgtgtttaagtaaatcaattcc

SEQ ID NO: 33768 - DNA, 27 bp, Artificial sequence
  SiRNA target sequence
gaatcgtgtttaagtaaatcaattcct

SEQ ID NO: 33769 - DNA, 27 bp, Artificial sequence
  SiRNA target sequence
aatcgtgtttaagtaaatcaattcctg

SEQ ID NO: 33770 - DNA, 27 bp, Artificial sequence
  SiRNA target sequence
atcgtgtttaagtaaatcaattcctgt

SEQ ID NO: 33771 - DNA, 27 bp, Artificial sequence
  SiRNA target sequence
tcgtgtttaagtaaatcaattcctgtt

SEQ ID NO: 33772 - DNA, 27 bp, Artificial sequence
  SiRNA target sequence
cgtgtttaagtaaatcaattcctgttc

SEQ ID NO: 33773 - DNA, 27 bp, Artificial sequence
  SiRNA target sequence
gtgtttaagtaaatcaattcctgttct

SEQ ID NO: 33774 - DNA, 27 bp, Artificial sequence
  SiRNA target sequence
tgtttaagtaaatcaattcctgttcta

SEQ ID NO: 33775 - DNA, 27 bp, Artificial sequence
  SiRNA target sequence
gtttaagtaaatcaattcctgttctac

SEQ ID NO: 33776 - DNA, 27 bp, Artificial sequence
  SiRNA target sequence
tttaagtaaatcaattcctgttctact

SEQ ID NO: 33777 - DNA, 27 bp, Artificial sequence
  SiRNA target sequence
ttaagtaaatcaattcctgttctactt

SEQ ID NO: 33778 - DNA, 27 bp, Artificial sequence
  SiRNA target sequence
taagtaaatcaattcctgttctacttt

SEQ ID NO: 33779 - DNA, 27 bp, Artificial sequence
  SiRNA target sequence
aagtaaatcaattcctgttctactttt

SEQ ID NO: 33780 - DNA, 27 bp, Artificial sequence
  SiRNA target sequence
agtaaatcaattcctgttctactttta

SEQ ID NO: 33781 - DNA, 27 bp, Artificial sequence
  SiRNA target sequence
gtaaatcaattcctgttctacttttaa

SEQ ID NO: 33782 - DNA, 27 bp, Artificial sequence
  SiRNA target sequence
taaatcaattcctgttctacttttaaa

SEQ ID NO: 33783 - DNA, 27 bp, Artificial sequence
  SiRNA target sequence
aaatcaattcctgttctacttttaaat

SEQ ID NO: 33784 - DNA, 27 bp, Artificial sequence
  SiRNA target sequence
aatcaattcctgttctacttttaaatt

SEQ ID NO: 33785 - DNA, 27 bp, Artificial sequence
  SiRNA target sequence
atcaattcctgttctacttttaaattt

SEQ ID NO: 33786 - DNA, 27 bp, Artificial sequence
  SiRNA target sequence
tcaattcctgttctacttttaaatttt

SEQ ID NO: 33787 - DNA, 27 bp, Artificial sequence
  SiRNA target sequence
caattcctgttctacttttaaattttt

SEQ ID NO: 33788 - DNA, 27 bp, Artificial sequence
  SiRNA target sequence
aattcctgttctacttttaaatttttc

SEQ ID NO: 33789 - DNA, 27 bp, Artificial sequence
  SiRNA target sequence
attcctgttctacttttaaatttttca

SEQ ID NO: 33790 - DNA, 27 bp, Artificial sequence
  SiRNA target sequence
ttcctgttctacttttaaatttttcat

SEQ ID NO: 33791 - DNA, 27 bp, Artificial sequence
  SiRNA target sequence
tcctgttctacttttaaatttttcatt

SEQ ID NO: 33792 - DNA, 27 bp, Artificial sequence
  SiRNA target sequence
cctgttctacttttaaatttttcatta

SEQ ID NO: 33793 - DNA, 27 bp, Artificial sequence
  SiRNA target sequence
ctgttctacttttaaatttttcattaa

SEQ ID NO: 33794 - DNA, 27 bp, Artificial sequence
  SiRNA target sequence
tgttctacttttaaatttttcattaat

SEQ ID NO: 33795 - DNA, 27 bp, Artificial sequence
  SiRNA target sequence
gttctacttttaaatttttcattaata

SEQ ID NO: 33796 - DNA, 27 bp, Artificial sequence
  SiRNA target sequence
ttctacttttaaatttttcattaatat

SEQ ID NO: 33797 - DNA, 27 bp, Artificial sequence
  SiRNA target sequence
tctacttttaaatttttcattaatata

SEQ ID NO: 33798 - DNA, 27 bp, Artificial sequence
  SiRNA target sequence
ctacttttaaatttttcattaatataa

SEQ ID NO: 33799 - DNA, 27 bp, Artificial sequence
  SiRNA target sequence
tacttttaaatttttcattaatataat

SEQ ID NO: 33800 - DNA, 27 bp, Artificial sequence
  SiRNA target sequence
acttttaaatttttcattaatataatc

SEQ ID NO: 33801 - DNA, 27 bp, Artificial sequence
  SiRNA target sequence
cttttaaatttttcattaatataatct

SEQ ID NO: 33802 - DNA, 27 bp, Artificial sequence
  SiRNA target sequence
ttttaaatttttcattaatataatcta

SEQ ID NO: 33803 - DNA, 27 bp, Artificial sequence
  SiRNA target sequence
tttaaatttttcattaatataatctac

SEQ ID NO: 33804 - DNA, 27 bp, Artificial sequence
  SiRNA target sequence
ttaaatttttcattaatataatctact

SEQ ID NO: 33805 - DNA, 27 bp, Artificial sequence
  SiRNA target sequence
taaatttttcattaatataatctacta

SEQ ID NO: 33806 - DNA, 27 bp, Artificial sequence
  SiRNA target sequence
aaatttttcattaatataatctactaa

SEQ ID NO: 33807 - DNA, 27 bp, Artificial sequence
  SiRNA target sequence
aatttttcattaatataatctactaaa

SEQ ID NO: 33808 - DNA, 27 bp, Artificial sequence
  SiRNA target sequence
atttttcattaatataatctactaaag

SEQ ID NO: 33809 - DNA, 27 bp, Artificial sequence
  SiRNA target sequence
tttttcattaatataatctactaaagt

SEQ ID NO: 33810 - DNA, 27 bp, Artificial sequence
  SiRNA target sequence
ttttcattaatataatctactaaagta

SEQ ID NO: 33811 - DNA, 27 bp, Artificial sequence
  SiRNA target sequence
tttcattaatataatctactaaagtat

SEQ ID NO: 33812 - DNA, 27 bp, Artificial sequence
  SiRNA target sequence
ttcattaatataatctactaaagtatt

SEQ ID NO: 33813 - DNA, 27 bp, Artificial sequence
  SiRNA target sequence
tcattaatataatctactaaagtatta

SEQ ID NO: 33814 - DNA, 27 bp, Artificial sequence
  SiRNA target sequence
cattaatataatctactaaagtattat

SEQ ID NO: 33815 - DNA, 27 bp, Artificial sequence
  SiRNA target sequence
attaatataatctactaaagtattatc

SEQ ID NO: 33816 - DNA, 27 bp, Artificial sequence
  SiRNA target sequence
ttaatataatctactaaagtattatcc

SEQ ID NO: 33817 - DNA, 27 bp, Artificial sequence
  SiRNA target sequence
taatataatctactaaagtattatcca

SEQ ID NO: 33818 - DNA, 27 bp, Artificial sequence
  SiRNA target sequence
aatataatctactaaagtattatccaa

SEQ ID NO: 33819 - DNA, 27 bp, Artificial sequence
  SiRNA target sequence
atataatctactaaagtattatccaaa

SEQ ID NO: 33820 - DNA, 27 bp, Artificial sequence
  SiRNA target sequence
tataatctactaaagtattatccaaat

SEQ ID NO: 33821 - DNA, 27 bp, Artificial sequence
  SiRNA target sequence
ataatctactaaagtattatccaaatc

SEQ ID NO: 33822 - DNA, 27 bp, Artificial sequence
  SiRNA target sequence
taatctactaaagtattatccaaatct

SEQ ID NO: 33823 - DNA, 27 bp, Artificial sequence
  SiRNA target sequence
aatctactaaagtattatccaaatctt

SEQ ID NO: 33824 - DNA, 27 bp, Artificial sequence
  SiRNA target sequence
atctactaaagtattatccaaatcttc

SEQ ID NO: 33825 - DNA, 27 bp, Artificial sequence
  SiRNA target sequence
tctactaaagtattatccaaatcttct

SEQ ID NO: 33826 - DNA, 27 bp, Artificial sequence
  SiRNA target sequence
ctactaaagtattatccaaatcttctc

SEQ ID NO: 33827 - DNA, 27 bp, Artificial sequence
  SiRNA target sequence
tactaaagtattatccaaatcttctcc

SEQ ID NO: 33828 - DNA, 27 bp, Artificial sequence
  SiRNA target sequence
actaaagtattatccaaatcttctcct

SEQ ID NO: 33829 - DNA, 27 bp, Artificial sequence
  SiRNA target sequence
ctaaagtattatccaaatcttctcctc

SEQ ID NO: 33830 - DNA, 27 bp, Artificial sequence
  SiRNA target sequence
taaagtattatccaaatcttctcctcc

SEQ ID NO: 33831 - DNA, 27 bp, Artificial sequence
  SiRNA target sequence
aaagtattatccaaatcttctcctcct

SEQ ID NO: 33832 - DNA, 27 bp, Artificial sequence
  SiRNA target sequence
aagtattatccaaatcttctcctccta

SEQ ID NO: 33833 - DNA, 27 bp, Artificial sequence
  SiRNA target sequence
agtattatccaaatcttctcctcctaa

SEQ ID NO: 33834 - DNA, 27 bp, Artificial sequence
  SiRNA target sequence
gtattatccaaatcttctcctcctaaa

SEQ ID NO: 33835 - DNA, 27 bp, Artificial sequence
  SiRNA target sequence
tattatccaaatcttctcctcctaaaa

SEQ ID NO: 33836 - DNA, 27 bp, Artificial sequence
  SiRNA target sequence
attatccaaatcttctcctcctaaaaa

SEQ ID NO: 33837 - DNA, 27 bp, Artificial sequence
  SiRNA target sequence
ttatccaaatcttctcctcctaaaaaa

SEQ ID NO: 33838 - DNA, 27 bp, Artificial sequence
  SiRNA target sequence
tatccaaatcttctcctcctaaaaaag

SEQ ID NO: 33839 - DNA, 27 bp, Artificial sequence
  SiRNA target sequence
atccaaatcttctcctcctaaaaaagt

SEQ ID NO: 33840 - DNA, 27 bp, Artificial sequence
  SiRNA target sequence
tccaaatcttctcctcctaaaaaagta

SEQ ID NO: 33841 - DNA, 27 bp, Artificial sequence
  SiRNA target sequence
ccaaatcttctcctcctaaaaaagtat

SEQ ID NO: 33842 - DNA, 27 bp, Artificial sequence
  SiRNA target sequence
caaatcttctcctcctaaaaaagtatt

SEQ ID NO: 33843 - DNA, 27 bp, Artificial sequence
  SiRNA target sequence
aaatcttctcctcctaaaaaagtattt

SEQ ID NO: 33844 - DNA, 27 bp, Artificial sequence
  SiRNA target sequence
aatcttctcctcctaaaaaagtatttc

SEQ ID NO: 33845 - DNA, 27 bp, Artificial sequence
  SiRNA target sequence
atcttctcctcctaaaaaagtatttcc

SEQ ID NO: 33846 - DNA, 27 bp, Artificial sequence
  SiRNA target sequence
tcttctcctcctaaaaaagtatttccg

SEQ ID NO: 33847 - DNA, 27 bp, Artificial sequence
  SiRNA target sequence
cttctcctcctaaaaaagtatttccgt

SEQ ID NO: 33848 - DNA, 27 bp, Artificial sequence
  SiRNA target sequence
ttctcctcctaaaaaagtatttccgtt

SEQ ID NO: 33849 - DNA, 27 bp, Artificial sequence
  SiRNA target sequence
tctcctcctaaaaaagtatttccgtta

SEQ ID NO: 33850 - DNA, 27 bp, Artificial sequence
  SiRNA target sequence
ctcctcctaaaaaagtatttccgttag

SEQ ID NO: 33851 - DNA, 27 bp, Artificial sequence
  SiRNA target sequence
tcctcctaaaaaagtatttccgttagt

SEQ ID NO: 33852 - DNA, 27 bp, Artificial sequence
  SiRNA target sequence
cctcctaaaaaagtatttccgttagta

SEQ ID NO: 33853 - DNA, 27 bp, Artificial sequence
  SiRNA target sequence
ctcctaaaaaagtatttccgttagtag

SEQ ID NO: 33854 - DNA, 27 bp, Artificial sequence
  SiRNA target sequence
tcctaaaaaagtatttccgttagtaga

SEQ ID NO: 33855 - DNA, 27 bp, Artificial sequence
  SiRNA target sequence
cctaaaaaagtatttccgttagtagat

SEQ ID NO: 33856 - DNA, 27 bp, Artificial sequence
  SiRNA target sequence
ctaaaaaagtatttccgttagtagatt

SEQ ID NO: 33857 - DNA, 27 bp, Artificial sequence
  SiRNA target sequence
taaaaaagtatttccgttagtagattt

SEQ ID NO: 33858 - DNA, 27 bp, Artificial sequence
  SiRNA target sequence
aaaaaagtatttccgttagtagatttt

SEQ ID NO: 33859 - DNA, 27 bp, Artificial sequence
  SiRNA target sequence
aaaaagtatttccgttagtagatttta

SEQ ID NO: 33860 - DNA, 27 bp, Artificial sequence
  SiRNA target sequence
aaaagtatttccgttagtagattttac

SEQ ID NO: 33861 - DNA, 27 bp, Artificial sequence
  SiRNA target sequence
aaagtatttccgttagtagattttaca

SEQ ID NO: 33862 - DNA, 27 bp, Artificial sequence
  SiRNA target sequence
aagtatttccgttagtagattttacat

SEQ ID NO: 33863 - DNA, 27 bp, Artificial sequence
  SiRNA target sequence
agtatttccgttagtagattttacatg

SEQ ID NO: 33864 - DNA, 27 bp, Artificial sequence
  SiRNA target sequence
gtatttccgttagtagattttacatga

SEQ ID NO: 33865 - DNA, 27 bp, Artificial sequence
  SiRNA target sequence
tatttccgttagtagattttacatgaa

SEQ ID NO: 33866 - DNA, 27 bp, Artificial sequence
  SiRNA target sequence
atttccgttagtagattttacatgaaa

SEQ ID NO: 33867 - DNA, 27 bp, Artificial sequence
  SiRNA target sequence
tttccgttagtagattttacatgaaaa

SEQ ID NO: 33868 - DNA, 27 bp, Artificial sequence
  SiRNA target sequence
ttccgttagtagattttacatgaaaaa

SEQ ID NO: 33869 - DNA, 27 bp, Artificial sequence
  SiRNA target sequence
tccgttagtagattttacatgaaaaat

SEQ ID NO: 33870 - DNA, 27 bp, Artificial sequence
  SiRNA target sequence
ccgttagtagattttacatgaaaaata

SEQ ID NO: 33871 - DNA, 27 bp, Artificial sequence
  SiRNA target sequence
cgttagtagattttacatgaaaaatac

SEQ ID NO: 33872 - DNA, 27 bp, Artificial sequence
  SiRNA target sequence
gttagtagattttacatgaaaaatacc

SEQ ID NO: 33873 - DNA, 27 bp, Artificial sequence
  SiRNA target sequence
ttagtagattttacatgaaaaatacca

SEQ ID NO: 33874 - DNA, 27 bp, Artificial sequence
  SiRNA target sequence
tagtagattttacatgaaaaataccat

SEQ ID NO: 33875 - DNA, 27 bp, Artificial sequence
  SiRNA target sequence
agtagattttacatgaaaaataccatt

SEQ ID NO: 33876 - DNA, 27 bp, Artificial sequence
  SiRNA target sequence
gtagattttacatgaaaaataccatta

SEQ ID NO: 33877 - DNA, 27 bp, Artificial sequence
  SiRNA target sequence
tagattttacatgaaaaataccattat

SEQ ID NO: 33878 - DNA, 27 bp, Artificial sequence
  SiRNA target sequence
agattttacatgaaaaataccattatc

SEQ ID NO: 33879 - DNA, 27 bp, Artificial sequence
  SiRNA target sequence
gattttacatgaaaaataccattatct

SEQ ID NO: 33880 - DNA, 27 bp, Artificial sequence
  SiRNA target sequence
attttacatgaaaaataccattatcta

SEQ ID NO: 33881 - DNA, 27 bp, Artificial sequence
  SiRNA target sequence
ttttacatgaaaaataccattatctaa

SEQ ID NO: 33882 - DNA, 27 bp, Artificial sequence
  SiRNA target sequence
tttacatgaaaaataccattatctaat

SEQ ID NO: 33883 - DNA, 27 bp, Artificial sequence
  SiRNA target sequence
ttacatgaaaaataccattatctaatt

SEQ ID NO: 33884 - DNA, 27 bp, Artificial sequence
  SiRNA target sequence
tacatgaaaaataccattatctaattc

SEQ ID NO: 33885 - DNA, 27 bp, Artificial sequence
  SiRNA target sequence
acatgaaaaataccattatctaattct

SEQ ID NO: 33886 - DNA, 27 bp, Artificial sequence
  SiRNA target sequence
catgaaaaataccattatctaattcta

SEQ ID NO: 33887 - DNA, 27 bp, Artificial sequence
  SiRNA target sequence
atgaaaaataccattatctaattctaa

SEQ ID NO: 33888 - DNA, 27 bp, Artificial sequence
  SiRNA target sequence
tgaaaaataccattatctaattctaat

SEQ ID NO: 33889 - DNA, 27 bp, Artificial sequence
  SiRNA target sequence
gaaaaataccattatctaattctaata

SEQ ID NO: 33890 - DNA, 27 bp, Artificial sequence
  SiRNA target sequence
aaaaataccattatctaattctaatat

SEQ ID NO: 33891 - DNA, 27 bp, Artificial sequence
  SiRNA target sequence
aaaataccattatctaattctaatata

SEQ ID NO: 33892 - DNA, 27 bp, Artificial sequence
  SiRNA target sequence
aaataccattatctaattctaatatac

SEQ ID NO: 33893 - DNA, 27 bp, Artificial sequence
  SiRNA target sequence
aataccattatctaattctaatatact

SEQ ID NO: 33894 - DNA, 27 bp, Artificial sequence
  SiRNA target sequence
ataccattatctaattctaatatacta

SEQ ID NO: 33895 - DNA, 27 bp, Artificial sequence
  SiRNA target sequence
taccattatctaattctaatatactaa

SEQ ID NO: 33896 - DNA, 27 bp, Artificial sequence
  SiRNA target sequence
accattatctaattctaatatactaat

SEQ ID NO: 33897 - DNA, 27 bp, Artificial sequence
  SiRNA target sequence
ccattatctaattctaatatactaatg

SEQ ID NO: 33898 - DNA, 27 bp, Artificial sequence
  SiRNA target sequence
cattatctaattctaatatactaatgt

SEQ ID NO: 33899 - DNA, 27 bp, Artificial sequence
  SiRNA target sequence
attatctaattctaatatactaatgtc

SEQ ID NO: 33900 - DNA, 27 bp, Artificial sequence
  SiRNA target sequence
ttatctaattctaatatactaatgtca

SEQ ID NO: 33901 - DNA, 27 bp, Artificial sequence
  SiRNA target sequence
tatctaattctaatatactaatgtcaa

SEQ ID NO: 33902 - DNA, 27 bp, Artificial sequence
  SiRNA target sequence
atctaattctaatatactaatgtcaaa

SEQ ID NO: 33903 - DNA, 27 bp, Artificial sequence
  SiRNA target sequence
tctaattctaatatactaatgtcaaaa

SEQ ID NO: 33904 - DNA, 27 bp, Artificial sequence
  SiRNA target sequence
ctaattctaatatactaatgtcaaaag

SEQ ID NO: 33905 - DNA, 27 bp, Artificial sequence
  SiRNA target sequence
taattctaatatactaatgtcaaaagt

SEQ ID NO: 33906 - DNA, 27 bp, Artificial sequence
  SiRNA target sequence
aattctaatatactaatgtcaaaagtt

SEQ ID NO: 33907 - DNA, 27 bp, Artificial sequence
  SiRNA target sequence
attctaatatactaatgtcaaaagttc

SEQ ID NO: 33908 - DNA, 27 bp, Artificial sequence
  SiRNA target sequence
ttctaatatactaatgtcaaaagttcc

SEQ ID NO: 33909 - DNA, 27 bp, Artificial sequence
  SiRNA target sequence
tctaatatactaatgtcaaaagttcct

SEQ ID NO: 33910 - DNA, 27 bp, Artificial sequence
  SiRNA target sequence
ctaatatactaatgtcaaaagttcctc

SEQ ID NO: 33911 - DNA, 27 bp, Artificial sequence
  SiRNA target sequence
taatatactaatgtcaaaagttcctcc

SEQ ID NO: 33912 - DNA, 27 bp, Artificial sequence
  SiRNA target sequence
aatatactaatgtcaaaagttcctcct

SEQ ID NO: 33913 - DNA, 27 bp, Artificial sequence
  SiRNA target sequence
atatactaatgtcaaaagttcctcctc

SEQ ID NO: 33914 - DNA, 27 bp, Artificial sequence
  SiRNA target sequence
tatactaatgtcaaaagttcctcctcc

SEQ ID NO: 33915 - DNA, 27 bp, Artificial sequence
  SiRNA target sequence
atactaatgtcaaaagttcctcctccc

SEQ ID NO: 33916 - DNA, 27 bp, Artificial sequence
  SiRNA target sequence
tactaatgtcaaaagttcctcctccca

SEQ ID NO: 33917 - DNA, 27 bp, Artificial sequence
  SiRNA target sequence
actaatgtcaaaagttcctcctcccag

SEQ ID NO: 33918 - DNA, 27 bp, Artificial sequence
  SiRNA target sequence
ctaatgtcaaaagttcctcctcccaga

SEQ ID NO: 33919 - DNA, 27 bp, Artificial sequence
  SiRNA target sequence
taatgtcaaaagttcctcctcccagat

SEQ ID NO: 33920 - DNA, 27 bp, Artificial sequence
  SiRNA target sequence
aatgtcaaaagttcctcctcccagatc

SEQ ID NO: 33921 - DNA, 27 bp, Artificial sequence
  SiRNA target sequence
atgtcaaaagttcctcctcccagatca

SEQ ID NO: 33922 - DNA, 27 bp, Artificial sequence
  SiRNA target sequence
tgtcaaaagttcctcctcccagatcat

SEQ ID NO: 33923 - DNA, 27 bp, Artificial sequence
  SiRNA target sequence
gtcaaaagttcctcctcccagatcata

SEQ ID NO: 33924 - DNA, 27 bp, Artificial sequence
  SiRNA target sequence
tcaaaagttcctcctcccagatcataa

SEQ ID NO: 33925 - DNA, 27 bp, Artificial sequence
  SiRNA target sequence
caaaagttcctcctcccagatcataaa

SEQ ID NO: 33926 - DNA, 27 bp, Artificial sequence
  SiRNA target sequence
aaaagttcctcctcccagatcataaac

SEQ ID NO: 33927 - DNA, 27 bp, Artificial sequence
  SiRNA target sequence
aaagttcctcctcccagatcataaaca

SEQ ID NO: 33928 - DNA, 27 bp, Artificial sequence
  SiRNA target sequence
aagttcctcctcccagatcataaacag

SEQ ID NO: 33929 - DNA, 27 bp, Artificial sequence
  SiRNA target sequence
agttcctcctcccagatcataaacagc

SEQ ID NO: 33930 - DNA, 27 bp, Artificial sequence
  SiRNA target sequence
gttcctcctcccagatcataaacagct

SEQ ID NO: 33931 - DNA, 27 bp, Artificial sequence
  SiRNA target sequence
ttcctcctcccagatcataaacagcta

SEQ ID NO: 33932 - DNA, 27 bp, Artificial sequence
  SiRNA target sequence
tcctcctcccagatcataaacagctat

SEQ ID NO: 33933 - DNA, 27 bp, Artificial sequence
  SiRNA target sequence
cctcctcccagatcataaacagctata

SEQ ID NO: 33934 - DNA, 27 bp, Artificial sequence
  SiRNA target sequence
ctcctcccagatcataaacagctataa

SEQ ID NO: 33935 - DNA, 27 bp, Artificial sequence
  SiRNA target sequence
tcctcccagatcataaacagctataat

SEQ ID NO: 33936 - DNA, 27 bp, Artificial sequence
  SiRNA target sequence
cctcccagatcataaacagctataata

SEQ ID NO: 33937 - DNA, 27 bp, Artificial sequence
  SiRNA target sequence
ctcccagatcataaacagctataatac

SEQ ID NO: 33938 - DNA, 27 bp, Artificial sequence
  SiRNA target sequence
tcccagatcataaacagctataatacc

SEQ ID NO: 33939 - DNA, 27 bp, Artificial sequence
  SiRNA target sequence
cccagatcataaacagctataataccc

SEQ ID NO: 33940 - DNA, 27 bp, Artificial sequence
  SiRNA target sequence
ccagatcataaacagctataataccct

SEQ ID NO: 33941 - DNA, 27 bp, Artificial sequence
  SiRNA target sequence
cagatcataaacagctataataccctg

SEQ ID NO: 33942 - DNA, 27 bp, Artificial sequence
  SiRNA target sequence
agatcataaacagctataataccctgt

SEQ ID NO: 33943 - DNA, 27 bp, Artificial sequence
  SiRNA target sequence
gatcataaacagctataataccctgtg

SEQ ID NO: 33944 - DNA, 27 bp, Artificial sequence
  SiRNA target sequence
atcataaacagctataataccctgtgc

SEQ ID NO: 33945 - DNA, 27 bp, Artificial sequence
  SiRNA target sequence
tcataaacagctataataccctgtgca

SEQ ID NO: 33946 - DNA, 27 bp, Artificial sequence
  SiRNA target sequence
cataaacagctataataccctgtgcag

SEQ ID NO: 33947 - DNA, 27 bp, Artificial sequence
  SiRNA target sequence
ataaacagctataataccctgtgcaga

SEQ ID NO: 33948 - DNA, 27 bp, Artificial sequence
  SiRNA target sequence
taaacagctataataccctgtgcagac

SEQ ID NO: 33949 - DNA, 27 bp, Artificial sequence
  SiRNA target sequence
aaacagctataataccctgtgcagact

SEQ ID NO: 33950 - DNA, 27 bp, Artificial sequence
  SiRNA target sequence
aacagctataataccctgtgcagactt

SEQ ID NO: 33951 - DNA, 27 bp, Artificial sequence
  SiRNA target sequence
acagctataataccctgtgcagacttg

SEQ ID NO: 33952 - DNA, 27 bp, Artificial sequence
  SiRNA target sequence
cagctataataccctgtgcagacttgt

SEQ ID NO: 33953 - DNA, 27 bp, Artificial sequence
  SiRNA target sequence
agctataataccctgtgcagacttgtc

SEQ ID NO: 33954 - DNA, 27 bp, Artificial sequence
  SiRNA target sequence
gctataataccctgtgcagacttgtca

SEQ ID NO: 33955 - DNA, 27 bp, Artificial sequence
  SiRNA target sequence
ctataataccctgtgcagacttgtcaa

SEQ ID NO: 33956 - DNA, 27 bp, Artificial sequence
  SiRNA target sequence
tataataccctgtgcagacttgtcaag

SEQ ID NO: 33957 - DNA, 27 bp, Artificial sequence
  SiRNA target sequence
ataataccctgtgcagacttgtcaagc

SEQ ID NO: 33958 - DNA, 27 bp, Artificial sequence
  SiRNA target sequence
taataccctgtgcagacttgtcaagcc

SEQ ID NO: 33959 - DNA, 27 bp, Artificial sequence
  SiRNA target sequence
aataccctgtgcagacttgtcaagccc

SEQ ID NO: 33960 - DNA, 27 bp, Artificial sequence
  SiRNA target sequence
ataccctgtgcagacttgtcaagccca

SEQ ID NO: 33961 - DNA, 27 bp, Artificial sequence
  SiRNA target sequence
taccctgtgcagacttgtcaagcccat

SEQ ID NO: 33962 - DNA, 27 bp, Artificial sequence
  SiRNA target sequence
accctgtgcagacttgtcaagcccata

SEQ ID NO: 33963 - DNA, 27 bp, Artificial sequence
  SiRNA target sequence
ccctgtgcagacttgtcaagcccataa

SEQ ID NO: 33964 - DNA, 27 bp, Artificial sequence
  SiRNA target sequence
cctgtgcagacttgtcaagcccataag

SEQ ID NO: 33965 - DNA, 27 bp, Artificial sequence
  SiRNA target sequence
ctgtgcagacttgtcaagcccataagc

SEQ ID NO: 33966 - DNA, 27 bp, Artificial sequence
  SiRNA target sequence
tgtgcagacttgtcaagcccataagca

SEQ ID NO: 33967 - DNA, 27 bp, Artificial sequence
  SiRNA target sequence
gtgcagacttgtcaagcccataagcaa

SEQ ID NO: 33968 - DNA, 27 bp, Artificial sequence
  SiRNA target sequence
tgcagacttgtcaagcccataagcaag

SEQ ID NO: 33969 - DNA, 27 bp, Artificial sequence
  SiRNA target sequence
gcagacttgtcaagcccataagcaagt

SEQ ID NO: 33970 - DNA, 27 bp, Artificial sequence
  SiRNA target sequence
cagacttgtcaagcccataagcaagtg

SEQ ID NO: 33971 - DNA, 27 bp, Artificial sequence
  SiRNA target sequence
agacttgtcaagcccataagcaagtgc

SEQ ID NO: 33972 - DNA, 27 bp, Artificial sequence
  SiRNA target sequence
gacttgtcaagcccataagcaagtgct

SEQ ID NO: 33973 - DNA, 27 bp, Artificial sequence
  SiRNA target sequence
acttgtcaagcccataagcaagtgctg

SEQ ID NO: 33974 - DNA, 27 bp, Artificial sequence
  SiRNA target sequence
cttgtcaagcccataagcaagtgctgc

SEQ ID NO: 33975 - DNA, 27 bp, Artificial sequence
  SiRNA target sequence
ttgtcaagcccataagcaagtgctgcc

SEQ ID NO: 33976 - DNA, 27 bp, Artificial sequence
  SiRNA target sequence
tgtcaagcccataagcaagtgctgccg

SEQ ID NO: 33977 - DNA, 27 bp, Artificial sequence
  SiRNA target sequence
gtcaagcccataagcaagtgctgccgc

SEQ ID NO: 33978 - DNA, 27 bp, Artificial sequence
  SiRNA target sequence
tcaagcccataagcaagtgctgccgca

SEQ ID NO: 33979 - DNA, 27 bp, Artificial sequence
  SiRNA target sequence
caagcccataagcaagtgctgccgcag

SEQ ID NO: 33980 - DNA, 27 bp, Artificial sequence
  SiRNA target sequence
aagcccataagcaagtgctgccgcagt

SEQ ID NO: 33981 - DNA, 27 bp, Artificial sequence
  SiRNA target sequence
agcccataagcaagtgctgccgcagta

SEQ ID NO: 33982 - DNA, 27 bp, Artificial sequence
  SiRNA target sequence
gcccataagcaagtgctgccgcagtag

SEQ ID NO: 33983 - DNA, 27 bp, Artificial sequence
  SiRNA target sequence
cccataagcaagtgctgccgcagtagg

SEQ ID NO: 33984 - DNA, 27 bp, Artificial sequence
  SiRNA target sequence
ccataagcaagtgctgccgcagtaggc

SEQ ID NO: 33985 - DNA, 27 bp, Artificial sequence
  SiRNA target sequence
cataagcaagtgctgccgcagtaggct

SEQ ID NO: 33986 - DNA, 27 bp, Artificial sequence
  SiRNA target sequence
ataagcaagtgctgccgcagtaggctc

SEQ ID NO: 33987 - DNA, 27 bp, Artificial sequence
  SiRNA target sequence
taagcaagtgctgccgcagtaggctca

SEQ ID NO: 33988 - DNA, 27 bp, Artificial sequence
  SiRNA target sequence
aagcaagtgctgccgcagtaggctcat

SEQ ID NO: 33989 - DNA, 27 bp, Artificial sequence
  SiRNA target sequence
agcaagtgctgccgcagtaggctcatt

SEQ ID NO: 33990 - DNA, 27 bp, Artificial sequence
  SiRNA target sequence
gcaagtgctgccgcagtaggctcatta

SEQ ID NO: 33991 - DNA, 27 bp, Artificial sequence
  SiRNA target sequence
caagtgctgccgcagtaggctcattaa

SEQ ID NO: 33992 - DNA, 27 bp, Artificial sequence
  SiRNA target sequence
aagtgctgccgcagtaggctcattaat

SEQ ID NO: 33993 - DNA, 27 bp, Artificial sequence
  SiRNA target sequence
agtgctgccgcagtaggctcattaatc

SEQ ID NO: 33994 - DNA, 27 bp, Artificial sequence
  SiRNA target sequence
gtgctgccgcagtaggctcattaatca

SEQ ID NO: 33995 - DNA, 27 bp, Artificial sequence
  SiRNA target sequence
tgctgccgcagtaggctcattaatcac

SEQ ID NO: 33996 - DNA, 27 bp, Artificial sequence
  SiRNA target sequence
gctgccgcagtaggctcattaatcact

SEQ ID NO: 33997 - DNA, 27 bp, Artificial sequence
  SiRNA target sequence
ctgccgcagtaggctcattaatcactc

SEQ ID NO: 33998 - DNA, 27 bp, Artificial sequence
  SiRNA target sequence
tgccgcagtaggctcattaatcactct

SEQ ID NO: 33999 - DNA, 27 bp, Artificial sequence
  SiRNA target sequence
gccgcagtaggctcattaatcactcta

SEQ ID NO: 34000 - DNA, 27 bp, Artificial sequence
  SiRNA target sequence
ccgcagtaggctcattaatcactctaa

SEQ ID NO: 34001 - DNA, 27 bp, Artificial sequence
  SiRNA target sequence
cgcagtaggctcattaatcactctaag

SEQ ID NO: 34002 - DNA, 27 bp, Artificial sequence
  SiRNA target sequence
gcagtaggctcattaatcactctaagc

SEQ ID NO: 34003 - DNA, 27 bp, Artificial sequence
  SiRNA target sequence
cagtaggctcattaatcactctaagca

SEQ ID NO: 34004 - DNA, 27 bp, Artificial sequence
  SiRNA target sequence
agtaggctcattaatcactctaagcac

SEQ ID NO: 34005 - DNA, 27 bp, Artificial sequence
  SiRNA target sequence
gtaggctcattaatcactctaagcact

SEQ ID NO: 34006 - DNA, 27 bp, Artificial sequence
  SiRNA target sequence
taggctcattaatcactctaagcactt

SEQ ID NO: 34007 - DNA, 27 bp, Artificial sequence
  SiRNA target sequence
aggctcattaatcactctaagcacttg

SEQ ID NO: 34008 - DNA, 27 bp, Artificial sequence
  SiRNA target sequence
ggctcattaatcactctaagcacttgt

SEQ ID NO: 34009 - DNA, 27 bp, Artificial sequence
  SiRNA target sequence
gctcattaatcactctaagcacttgta

SEQ ID NO: 34010 - DNA, 27 bp, Artificial sequence
  SiRNA target sequence
ctcattaatcactctaagcacttgtaa

SEQ ID NO: 34011 - DNA, 27 bp, Artificial sequence
  SiRNA target sequence
tcattaatcactctaagcacttgtaat

SEQ ID NO: 34012 - DNA, 27 bp, Artificial sequence
  SiRNA target sequence
cattaatcactctaagcacttgtaatc

SEQ ID NO: 34013 - DNA, 27 bp, Artificial sequence
  SiRNA target sequence
attaatcactctaagcacttgtaatcc

SEQ ID NO: 34014 - DNA, 27 bp, Artificial sequence
  SiRNA target sequence
ttaatcactctaagcacttgtaatccc

SEQ ID NO: 34015 - DNA, 27 bp, Artificial sequence
  SiRNA target sequence
taatcactctaagcacttgtaatcccg

SEQ ID NO: 34016 - DNA, 27 bp, Artificial sequence
  SiRNA target sequence
aatcactctaagcacttgtaatcccgc

SEQ ID NO: 34017 - DNA, 27 bp, Artificial sequence
  SiRNA target sequence
atcactctaagcacttgtaatcccgca

SEQ ID NO: 34018 - DNA, 27 bp, Artificial sequence
  SiRNA target sequence
tcactctaagcacttgtaatcccgcaa

SEQ ID NO: 34019 - DNA, 27 bp, Artificial sequence
  SiRNA target sequence
cactctaagcacttgtaatcccgcaat

SEQ ID NO: 34020 - DNA, 27 bp, Artificial sequence
  SiRNA target sequence
actctaagcacttgtaatcccgcaatc

SEQ ID NO: 34021 - DNA, 27 bp, Artificial sequence
  SiRNA target sequence
ctctaagcacttgtaatcccgcaatcc

SEQ ID NO: 34022 - DNA, 27 bp, Artificial sequence
  SiRNA target sequence
tctaagcacttgtaatcccgcaatcct

SEQ ID NO: 34023 - DNA, 27 bp, Artificial sequence
  SiRNA target sequence
ctaagcacttgtaatcccgcaatcctt

SEQ ID NO: 34024 - DNA, 27 bp, Artificial sequence
  SiRNA target sequence
taagcacttgtaatcccgcaatccttc

SEQ ID NO: 34025 - DNA, 27 bp, Artificial sequence
  SiRNA target sequence
aagcacttgtaatcccgcaatccttcc

SEQ ID NO: 34026 - DNA, 27 bp, Artificial sequence
  SiRNA target sequence
agcacttgtaatcccgcaatccttccc

SEQ ID NO: 34027 - DNA, 27 bp, Artificial sequence
  SiRNA target sequence
gcacttgtaatcccgcaatccttcccg

SEQ ID NO: 34028 - DNA, 27 bp, Artificial sequence
  SiRNA target sequence
cacttgtaatcccgcaatccttcccgc

SEQ ID NO: 34029 - DNA, 27 bp, Artificial sequence
  SiRNA target sequence
acttgtaatcccgcaatccttcccgca

SEQ ID NO: 34030 - DNA, 27 bp, Artificial sequence
  SiRNA target sequence
cttgtaatcccgcaatccttcccgcat

SEQ ID NO: 34031 - DNA, 27 bp, Artificial sequence
  SiRNA target sequence
ttgtaatcccgcaatccttcccgcatc

SEQ ID NO: 34032 - DNA, 27 bp, Artificial sequence
  SiRNA target sequence
tgtaatcccgcaatccttcccgcatct

SEQ ID NO: 34033 - DNA, 27 bp, Artificial sequence
  SiRNA target sequence
gtaatcccgcaatccttcccgcatctt

SEQ ID NO: 34034 - DNA, 27 bp, Artificial sequence
  SiRNA target sequence
taatcccgcaatccttcccgcatcttt

SEQ ID NO: 34035 - DNA, 27 bp, Artificial sequence
  SiRNA target sequence
aatcccgcaatccttcccgcatcttta

SEQ ID NO: 34036 - DNA, 27 bp, Artificial sequence
  SiRNA target sequence
atcccgcaatccttcccgcatctttag

SEQ ID NO: 34037 - DNA, 27 bp, Artificial sequence
  SiRNA target sequence
tcccgcaatccttcccgcatctttagt

SEQ ID NO: 34038 - DNA, 27 bp, Artificial sequence
  SiRNA target sequence
cccgcaatccttcccgcatctttagta

SEQ ID NO: 34039 - DNA, 27 bp, Artificial sequence
  SiRNA target sequence
ccgcaatccttcccgcatctttagtag

SEQ ID NO: 34040 - DNA, 27 bp, Artificial sequence
  SiRNA target sequence
cgcaatccttcccgcatctttagtagc

SEQ ID NO: 34041 - DNA, 27 bp, Artificial sequence
  SiRNA target sequence
gcaatccttcccgcatctttagtagct

SEQ ID NO: 34042 - DNA, 27 bp, Artificial sequence
  SiRNA target sequence
caatccttcccgcatctttagtagctt

SEQ ID NO: 34043 - DNA, 27 bp, Artificial sequence
  SiRNA target sequence
aatccttcccgcatctttagtagcttg

SEQ ID NO: 34044 - DNA, 27 bp, Artificial sequence
  SiRNA target sequence
atccttcccgcatctttagtagcttgc

SEQ ID NO: 34045 - DNA, 27 bp, Artificial sequence
  SiRNA target sequence
tccttcccgcatctttagtagcttgcc

SEQ ID NO: 34046 - DNA, 27 bp, Artificial sequence
  SiRNA target sequence
ccttcccgcatctttagtagcttgcct

SEQ ID NO: 34047 - DNA, 27 bp, Artificial sequence
  SiRNA target sequence
cttcccgcatctttagtagcttgcctt

SEQ ID NO: 34048 - DNA, 27 bp, Artificial sequence
  SiRNA target sequence
ttcccgcatctttagtagcttgccttt

SEQ ID NO: 34049 - DNA, 27 bp, Artificial sequence
  SiRNA target sequence
tcccgcatctttagtagcttgcctttg

SEQ ID NO: 34050 - DNA, 27 bp, Artificial sequence
  SiRNA target sequence
cccgcatctttagtagcttgcctttgc

SEQ ID NO: 34051 - DNA, 27 bp, Artificial sequence
  SiRNA target sequence
ccgcatctttagtagcttgcctttgca

SEQ ID NO: 34052 - DNA, 27 bp, Artificial sequence
  SiRNA target sequence
cgcatctttagtagcttgcctttgcat

SEQ ID NO: 34053 - DNA, 27 bp, Artificial sequence
  SiRNA target sequence
gcatctttagtagcttgcctttgcatg

SEQ ID NO: 34054 - DNA, 27 bp, Artificial sequence
  SiRNA target sequence
catctttagtagcttgcctttgcatgt

SEQ ID NO: 34055 - DNA, 27 bp, Artificial sequence
  SiRNA target sequence
atctttagtagcttgcctttgcatgtc

SEQ ID NO: 34056 - DNA, 27 bp, Artificial sequence
  SiRNA target sequence
tctttagtagcttgcctttgcatgtca

SEQ ID NO: 34057 - DNA, 27 bp, Artificial sequence
  SiRNA target sequence
ctttagtagcttgcctttgcatgtcat

SEQ ID NO: 34058 - DNA, 27 bp, Artificial sequence
  SiRNA target sequence
tttagtagcttgcctttgcatgtcatc

SEQ ID NO: 34059 - DNA, 27 bp, Artificial sequence
  SiRNA target sequence
ttagtagcttgcctttgcatgtcatca

SEQ ID NO: 34060 - DNA, 27 bp, Artificial sequence
  SiRNA target sequence
tagtagcttgcctttgcatgtcatcaa

SEQ ID NO: 34061 - DNA, 27 bp, Artificial sequence
  SiRNA target sequence
agtagcttgcctttgcatgtcatcaaa

SEQ ID NO: 34062 - DNA, 27 bp, Artificial sequence
  SiRNA target sequence
gtagcttgcctttgcatgtcatcaaaa

SEQ ID NO: 34063 - DNA, 27 bp, Artificial sequence
  SiRNA target sequence
tagcttgcctttgcatgtcatcaaaat

SEQ ID NO: 34064 - DNA, 27 bp, Artificial sequence
  SiRNA target sequence
agcttgcctttgcatgtcatcaaaata

SEQ ID NO: 34065 - DNA, 27 bp, Artificial sequence
  SiRNA target sequence
gcttgcctttgcatgtcatcaaaatat

SEQ ID NO: 34066 - DNA, 27 bp, Artificial sequence
  SiRNA target sequence
cttgcctttgcatgtcatcaaaatatg

SEQ ID NO: 34067 - DNA, 27 bp, Artificial sequence
  SiRNA target sequence
ttgcctttgcatgtcatcaaaatatgc

SEQ ID NO: 34068 - DNA, 27 bp, Artificial sequence
  SiRNA target sequence
tgcctttgcatgtcatcaaaatatgcg

SEQ ID NO: 34069 - DNA, 27 bp, Artificial sequence
  SiRNA target sequence
gcctttgcatgtcatcaaaatatgcgg

SEQ ID NO: 34070 - DNA, 27 bp, Artificial sequence
  SiRNA target sequence
cctttgcatgtcatcaaaatatgcggg

SEQ ID NO: 34071 - DNA, 27 bp, Artificial sequence
  SiRNA target sequence
ctttgcatgtcatcaaaatatgcgggc

SEQ ID NO: 34072 - DNA, 27 bp, Artificial sequence
  SiRNA target sequence
tttgcatgtcatcaaaatatgcgggca

SEQ ID NO: 34073 - DNA, 27 bp, Artificial sequence
  SiRNA target sequence
ttgcatgtcatcaaaatatgcgggcac

SEQ ID NO: 34074 - DNA, 27 bp, Artificial sequence
  SiRNA target sequence
tgcatgtcatcaaaatatgcgggcact

SEQ ID NO: 34075 - DNA, 27 bp, Artificial sequence
  SiRNA target sequence
gcatgtcatcaaaatatgcgggcactg

SEQ ID NO: 34076 - DNA, 27 bp, Artificial sequence
  SiRNA target sequence
catgtcatcaaaatatgcgggcactgt

SEQ ID NO: 34077 - DNA, 27 bp, Artificial sequence
  SiRNA target sequence
atgtcatcaaaatatgcgggcactgtt

SEQ ID NO: 34078 - DNA, 27 bp, Artificial sequence
  SiRNA target sequence
tgtcatcaaaatatgcgggcactgtta

SEQ ID NO: 34079 - DNA, 27 bp, Artificial sequence
  SiRNA target sequence
gtcatcaaaatatgcgggcactgttat

SEQ ID NO: 34080 - DNA, 27 bp, Artificial sequence
  SiRNA target sequence
tcatcaaaatatgcgggcactgttata

SEQ ID NO: 34081 - DNA, 27 bp, Artificial sequence
  SiRNA target sequence
catcaaaatatgcgggcactgttataa

SEQ ID NO: 34082 - DNA, 27 bp, Artificial sequence
  SiRNA target sequence
atcaaaatatgcgggcactgttataac

SEQ ID NO: 34083 - DNA, 27 bp, Artificial sequence
  SiRNA target sequence
tcaaaatatgcgggcactgttataaca

SEQ ID NO: 34084 - DNA, 27 bp, Artificial sequence
  SiRNA target sequence
caaaatatgcgggcactgttataacag

SEQ ID NO: 34085 - DNA, 27 bp, Artificial sequence
  SiRNA target sequence
aaaatatgcgggcactgttataacaga

SEQ ID NO: 34086 - DNA, 27 bp, Artificial sequence
  SiRNA target sequence
aaatatgcgggcactgttataacagat

SEQ ID NO: 34087 - DNA, 27 bp, Artificial sequence
  SiRNA target sequence
aatatgcgggcactgttataacagatc

SEQ ID NO: 34088 - DNA, 27 bp, Artificial sequence
  SiRNA target sequence
atatgcgggcactgttataacagatct

SEQ ID NO: 34089 - DNA, 27 bp, Artificial sequence
  SiRNA target sequence
tatgcgggcactgttataacagatctt

SEQ ID NO: 34090 - DNA, 27 bp, Artificial sequence
  SiRNA target sequence
atgcgggcactgttataacagatctta

SEQ ID NO: 34091 - DNA, 27 bp, Artificial sequence
  SiRNA target sequence
tgcgggcactgttataacagatcttaa

SEQ ID NO: 34092 - DNA, 27 bp, Artificial sequence
  SiRNA target sequence
gcgggcactgttataacagatcttaat

SEQ ID NO: 34093 - DNA, 27 bp, Artificial sequence
  SiRNA target sequence
cgggcactgttataacagatcttaata

SEQ ID NO: 34094 - DNA, 27 bp, Artificial sequence
  SiRNA target sequence
gggcactgttataacagatcttaatac

SEQ ID NO: 34095 - DNA, 27 bp, Artificial sequence
  SiRNA target sequence
ggcactgttataacagatcttaatact

SEQ ID NO: 34096 - DNA, 27 bp, Artificial sequence
  SiRNA target sequence
gcactgttataacagatcttaatactt

SEQ ID NO: 34097 - DNA, 27 bp, Artificial sequence
  SiRNA target sequence
cactgttataacagatcttaatacttt

SEQ ID NO: 34098 - DNA, 27 bp, Artificial sequence
  SiRNA target sequence
actgttataacagatcttaatacttta

SEQ ID NO: 34099 - DNA, 27 bp, Artificial sequence
  SiRNA target sequence
ctgttataacagatcttaatactttag

SEQ ID NO: 34100 - DNA, 27 bp, Artificial sequence
  SiRNA target sequence
tgttataacagatcttaatactttaga

SEQ ID NO: 34101 - DNA, 27 bp, Artificial sequence
  SiRNA target sequence
gttataacagatcttaatactttagaa

SEQ ID NO: 34102 - DNA, 27 bp, Artificial sequence
  SiRNA target sequence
ttataacagatcttaatactttagaat

SEQ ID NO: 34103 - DNA, 27 bp, Artificial sequence
  SiRNA target sequence
tataacagatcttaatactttagaatt

SEQ ID NO: 34104 - DNA, 27 bp, Artificial sequence
  SiRNA target sequence
ataacagatcttaatactttagaattt

SEQ ID NO: 34105 - DNA, 27 bp, Artificial sequence
  SiRNA target sequence
taacagatcttaatactttagaattta

SEQ ID NO: 34106 - DNA, 27 bp, Artificial sequence
  SiRNA target sequence
aacagatcttaatactttagaatttaa

SEQ ID NO: 34107 - DNA, 27 bp, Artificial sequence
  SiRNA target sequence
acagatcttaatactttagaatttaaa

SEQ ID NO: 34108 - DNA, 27 bp, Artificial sequence
  SiRNA target sequence
cagatcttaatactttagaatttaaaa

SEQ ID NO: 34109 - DNA, 27 bp, Artificial sequence
  SiRNA target sequence
agatcttaatactttagaatttaaaaa

SEQ ID NO: 34110 - DNA, 27 bp, Artificial sequence
  SiRNA target sequence
gatcttaatactttagaatttaaaaaa

SEQ ID NO: 34111 - DNA, 27 bp, Artificial sequence
  SiRNA target sequence
atcttaatactttagaatttaaaaaat

SEQ ID NO: 34112 - DNA, 27 bp, Artificial sequence
  SiRNA target sequence
tcttaatactttagaatttaaaaaatt

SEQ ID NO: 34113 - DNA, 27 bp, Artificial sequence
  SiRNA target sequence
cttaatactttagaatttaaaaaattc

SEQ ID NO: 34114 - DNA, 27 bp, Artificial sequence
  SiRNA target sequence
ttaatactttagaatttaaaaaattct

SEQ ID NO: 34115 - DNA, 27 bp, Artificial sequence
  SiRNA target sequence
taatactttagaatttaaaaaattctc

SEQ ID NO: 34116 - DNA, 27 bp, Artificial sequence
  SiRNA target sequence
aatactttagaatttaaaaaattctct

SEQ ID NO: 34117 - DNA, 27 bp, Artificial sequence
  SiRNA target sequence
atactttagaatttaaaaaattctctg

SEQ ID NO: 34118 - DNA, 27 bp, Artificial sequence
  SiRNA target sequence
tactttagaatttaaaaaattctctgc

SEQ ID NO: 34119 - DNA, 27 bp, Artificial sequence
  SiRNA target sequence
actttagaatttaaaaaattctctgcg

SEQ ID NO: 34120 - DNA, 27 bp, Artificial sequence
  SiRNA target sequence
ctttagaatttaaaaaattctctgcgg

SEQ ID NO: 34121 - DNA, 27 bp, Artificial sequence
  SiRNA target sequence
tttagaatttaaaaaattctctgcggc

SEQ ID NO: 34122 - DNA, 27 bp, Artificial sequence
  SiRNA target sequence
ttagaatttaaaaaattctctgcggca

SEQ ID NO: 34123 - DNA, 27 bp, Artificial sequence
  SiRNA target sequence
tagaatttaaaaaattctctgcggcat

SEQ ID NO: 34124 - DNA, 27 bp, Artificial sequence
  SiRNA target sequence
agaatttaaaaaattctctgcggcatt

SEQ ID NO: 34125 - DNA, 27 bp, Artificial sequence
  SiRNA target sequence
gaatttaaaaaattctctgcggcattt

SEQ ID NO: 34126 - DNA, 27 bp, Artificial sequence
  SiRNA target sequence
aatttaaaaaattctctgcggcatttt

SEQ ID NO: 34127 - DNA, 27 bp, Artificial sequence
  SiRNA target sequence
atttaaaaaattctctgcggcattttt

SEQ ID NO: 34128 - DNA, 27 bp, Artificial sequence
  SiRNA target sequence
tttaaaaaattctctgcggcatttttc

SEQ ID NO: 34129 - DNA, 27 bp, Artificial sequence
  SiRNA target sequence
ttaaaaaattctctgcggcatttttca

SEQ ID NO: 34130 - DNA, 27 bp, Artificial sequence
  SiRNA target sequence
taaaaaattctctgcggcatttttcat

SEQ ID NO: 34131 - DNA, 27 bp, Artificial sequence
  SiRNA target sequence
aaaaaattctctgcggcatttttcatt

SEQ ID NO: 34132 - DNA, 27 bp, Artificial sequence
  SiRNA target sequence
aaaaattctctgcggcatttttcattt

SEQ ID NO: 34133 - DNA, 27 bp, Artificial sequence
  SiRNA target sequence
aaaattctctgcggcatttttcatttt

SEQ ID NO: 34134 - DNA, 27 bp, Artificial sequence
  SiRNA target sequence
aaattctctgcggcatttttcattttt

SEQ ID NO: 34135 - DNA, 27 bp, Artificial sequence
  SiRNA target sequence
aattctctgcggcatttttcatttttg

SEQ ID NO: 34136 - DNA, 27 bp, Artificial sequence
  SiRNA target sequence
attctctgcggcatttttcatttttga

SEQ ID NO: 34137 - DNA, 27 bp, Artificial sequence
  SiRNA target sequence
ttctctgcggcatttttcatttttgac

SEQ ID NO: 34138 - DNA, 27 bp, Artificial sequence
  SiRNA target sequence
tctctgcggcatttttcatttttgaca

SEQ ID NO: 34139 - DNA, 27 bp, Artificial sequence
  SiRNA target sequence
ctctgcggcatttttcatttttgacaa

SEQ ID NO: 34140 - DNA, 27 bp, Artificial sequence
  SiRNA target sequence
tctgcggcatttttcatttttgacaaa

SEQ ID NO: 34141 - DNA, 27 bp, Artificial sequence
  SiRNA target sequence
ctgcggcatttttcatttttgacaaaa

SEQ ID NO: 34142 - DNA, 27 bp, Artificial sequence
  SiRNA target sequence
tgcggcatttttcatttttgacaaaat

SEQ ID NO: 34143 - DNA, 27 bp, Artificial sequence
  SiRNA target sequence
gcggcatttttcatttttgacaaaata

SEQ ID NO: 34144 - DNA, 27 bp, Artificial sequence
  SiRNA target sequence
cggcatttttcatttttgacaaaataa

SEQ ID NO: 34145 - DNA, 27 bp, Artificial sequence
  SiRNA target sequence
ggcatttttcatttttgacaaaataaa

SEQ ID NO: 34146 - DNA, 27 bp, Artificial sequence
  SiRNA target sequence
gcatttttcatttttgacaaaataaat

SEQ ID NO: 34147 - DNA, 27 bp, Artificial sequence
  SiRNA target sequence
catttttcatttttgacaaaataaatg

SEQ ID NO: 34148 - DNA, 27 bp, Artificial sequence
  SiRNA target sequence
atttttcatttttgacaaaataaatgc

SEQ ID NO: 34149 - DNA, 27 bp, Artificial sequence
  SiRNA target sequence
tttttcatttttgacaaaataaatgca

SEQ ID NO: 34150 - DNA, 27 bp, Artificial sequence
  SiRNA target sequence
ttttcatttttgacaaaataaatgcac

SEQ ID NO: 34151 - DNA, 27 bp, Artificial sequence
  SiRNA target sequence
tttcatttttgacaaaataaatgcacc

SEQ ID NO: 34152 - DNA, 27 bp, Artificial sequence
  SiRNA target sequence
ttcatttttgacaaaataaatgcacca

SEQ ID NO: 34153 - DNA, 27 bp, Artificial sequence
  SiRNA target sequence
tcatttttgacaaaataaatgcaccaa

SEQ ID NO: 34154 - DNA, 27 bp, Artificial sequence
  SiRNA target sequence
catttttgacaaaataaatgcaccaat

SEQ ID NO: 34155 - DNA, 27 bp, Artificial sequence
  SiRNA target sequence
atttttgacaaaataaatgcaccaatt

SEQ ID NO: 34156 - DNA, 27 bp, Artificial sequence
  SiRNA target sequence
tttttgacaaaataaatgcaccaattt

SEQ ID NO: 34157 - DNA, 27 bp, Artificial sequence
  SiRNA target sequence
ttttgacaaaataaatgcaccaatttg

SEQ ID NO: 34158 - DNA, 27 bp, Artificial sequence
  SiRNA target sequence
tttgacaaaataaatgcaccaatttgt

SEQ ID NO: 34159 - DNA, 27 bp, Artificial sequence
  SiRNA target sequence
ttgacaaaataaatgcaccaatttgtg

SEQ ID NO: 34160 - DNA, 27 bp, Artificial sequence
  SiRNA target sequence
tgacaaaataaatgcaccaatttgtgc

SEQ ID NO: 34161 - DNA, 27 bp, Artificial sequence
  SiRNA target sequence
gacaaaataaatgcaccaatttgtgca

SEQ ID NO: 34162 - DNA, 27 bp, Artificial sequence
  SiRNA target sequence
acaaaataaatgcaccaatttgtgcag

SEQ ID NO: 34163 - DNA, 27 bp, Artificial sequence
  SiRNA target sequence
caaaataaatgcaccaatttgtgcagg

SEQ ID NO: 34164 - DNA, 27 bp, Artificial sequence
  SiRNA target sequence
aaaataaatgcaccaatttgtgcagga

SEQ ID NO: 34165 - DNA, 27 bp, Artificial sequence
  SiRNA target sequence
aaataaatgcaccaatttgtgcaggag

SEQ ID NO: 34166 - DNA, 27 bp, Artificial sequence
  SiRNA target sequence
aataaatgcaccaatttgtgcaggaga

SEQ ID NO: 34167 - DNA, 27 bp, Artificial sequence
  SiRNA target sequence
ataaatgcaccaatttgtgcaggagaa

SEQ ID NO: 34168 - DNA, 27 bp, Artificial sequence
  SiRNA target sequence
taaatgcaccaatttgtgcaggagaat

SEQ ID NO: 34169 - DNA, 27 bp, Artificial sequence
  SiRNA target sequence
aaatgcaccaatttgtgcaggagaata

SEQ ID NO: 34170 - DNA, 27 bp, Artificial sequence
  SiRNA target sequence
aatgcaccaatttgtgcaggagaatat

SEQ ID NO: 34171 - DNA, 27 bp, Artificial sequence
  SiRNA target sequence
atgcaccaatttgtgcaggagaatatt

SEQ ID NO: 34172 - DNA, 27 bp, Artificial sequence
  SiRNA target sequence
tgcaccaatttgtgcaggagaatattt

SEQ ID NO: 34173 - DNA, 27 bp, Artificial sequence
  SiRNA target sequence
gcaccaatttgtgcaggagaatatttc

SEQ ID NO: 34174 - DNA, 27 bp, Artificial sequence
  SiRNA target sequence
caccaatttgtgcaggagaatatttct

SEQ ID NO: 34175 - DNA, 27 bp, Artificial sequence
  SiRNA target sequence
accaatttgtgcaggagaatatttctt

SEQ ID NO: 34176 - DNA, 27 bp, Artificial sequence
  SiRNA target sequence
ccaatttgtgcaggagaatatttctta

SEQ ID NO: 34177 - DNA, 27 bp, Artificial sequence
  SiRNA target sequence
caatttgtgcaggagaatatttcttat

SEQ ID NO: 34178 - DNA, 27 bp, Artificial sequence
  SiRNA target sequence
aatttgtgcaggagaatatttcttatt

SEQ ID NO: 34179 - DNA, 27 bp, Artificial sequence
  SiRNA target sequence
atttgtgcaggagaatatttcttattg

SEQ ID NO: 34180 - DNA, 27 bp, Artificial sequence
  SiRNA target sequence
tttgtgcaggagaatatttcttattgt

SEQ ID NO: 34181 - DNA, 27 bp, Artificial sequence
  SiRNA target sequence
ttgtgcaggagaatatttcttattgtc

SEQ ID NO: 34182 - DNA, 27 bp, Artificial sequence
  SiRNA target sequence
tgtgcaggagaatatttcttattgtca

SEQ ID NO: 34183 - DNA, 27 bp, Artificial sequence
  SiRNA target sequence
gtgcaggagaatatttcttattgtcaa

SEQ ID NO: 34184 - DNA, 27 bp, Artificial sequence
  SiRNA target sequence
tgcaggagaatatttcttattgtcaat

SEQ ID NO: 34185 - DNA, 27 bp, Artificial sequence
  SiRNA target sequence
gcaggagaatatttcttattgtcaatt

SEQ ID NO: 34186 - DNA, 27 bp, Artificial sequence
  SiRNA target sequence
caggagaatatttcttattgtcaattt

SEQ ID NO: 34187 - DNA, 27 bp, Artificial sequence
  SiRNA target sequence
aggagaatatttcttattgtcaatttt

SEQ ID NO: 34188 - DNA, 27 bp, Artificial sequence
  SiRNA target sequence
ggagaatatttcttattgtcaattttt

SEQ ID NO: 34189 - DNA, 27 bp, Artificial sequence
  SiRNA target sequence
gagaatatttcttattgtcaattttta

SEQ ID NO: 34190 - DNA, 27 bp, Artificial sequence
  SiRNA target sequence
agaatatttcttattgtcaatttttat

SEQ ID NO: 34191 - DNA, 27 bp, Artificial sequence
  SiRNA target sequence
gaatatttcttattgtcaatttttatc

SEQ ID NO: 34192 - DNA, 27 bp, Artificial sequence
  SiRNA target sequence
aatatttcttattgtcaatttttatcc

SEQ ID NO: 34193 - DNA, 27 bp, Artificial sequence
  SiRNA target sequence
atatttcttattgtcaatttttatcca

SEQ ID NO: 34194 - DNA, 27 bp, Artificial sequence
  SiRNA target sequence
tatttcttattgtcaatttttatccaa

SEQ ID NO: 34195 - DNA, 27 bp, Artificial sequence
  SiRNA target sequence
atttcttattgtcaatttttatccaaa

SEQ ID NO: 34196 - DNA, 27 bp, Artificial sequence
  SiRNA target sequence
tttcttattgtcaatttttatccaaat

SEQ ID NO: 34197 - DNA, 27 bp, Artificial sequence
  SiRNA target sequence
ttcttattgtcaatttttatccaaata

SEQ ID NO: 34198 - DNA, 27 bp, Artificial sequence
  SiRNA target sequence
tcttattgtcaatttttatccaaatat

SEQ ID NO: 34199 - DNA, 27 bp, Artificial sequence
  SiRNA target sequence
cttattgtcaatttttatccaaatatc

SEQ ID NO: 34200 - DNA, 27 bp, Artificial sequence
  SiRNA target sequence
ttattgtcaatttttatccaaatatcg

SEQ ID NO: 34201 - DNA, 27 bp, Artificial sequence
  SiRNA target sequence
tattgtcaatttttatccaaatatcgc

SEQ ID NO: 34202 - DNA, 27 bp, Artificial sequence
  SiRNA target sequence
attgtcaatttttatccaaatatcgcc

SEQ ID NO: 34203 - DNA, 27 bp, Artificial sequence
  SiRNA target sequence
ttgtcaatttttatccaaatatcgccg

SEQ ID NO: 34204 - DNA, 27 bp, Artificial sequence
  SiRNA target sequence
tgtcaatttttatccaaatatcgccgt

SEQ ID NO: 34205 - DNA, 27 bp, Artificial sequence
  SiRNA target sequence
gtcaatttttatccaaatatcgccgtt

SEQ ID NO: 34206 - DNA, 27 bp, Artificial sequence
  SiRNA target sequence
tcaatttttatccaaatatcgccgtta

SEQ ID NO: 34207 - DNA, 27 bp, Artificial sequence
  SiRNA target sequence
caatttttatccaaatatcgccgttac

SEQ ID NO: 34208 - DNA, 27 bp, Artificial sequence
  SiRNA target sequence
aatttttatccaaatatcgccgttaca

SEQ ID NO: 34209 - DNA, 27 bp, Artificial sequence
  SiRNA target sequence
atttttatccaaatatcgccgttacaa

SEQ ID NO: 34210 - DNA, 27 bp, Artificial sequence
  SiRNA target sequence
tttttatccaaatatcgccgttacaat

SEQ ID NO: 34211 - DNA, 27 bp, Artificial sequence
  SiRNA target sequence
ttttatccaaatatcgccgttacaatg

SEQ ID NO: 34212 - DNA, 27 bp, Artificial sequence
  SiRNA target sequence
tttatccaaatatcgccgttacaatgc

SEQ ID NO: 34213 - DNA, 27 bp, Artificial sequence
  SiRNA target sequence
ttatccaaatatcgccgttacaatgct

SEQ ID NO: 34214 - DNA, 27 bp, Artificial sequence
  SiRNA target sequence
tatccaaatatcgccgttacaatgctt

SEQ ID NO: 34215 - DNA, 27 bp, Artificial sequence
  SiRNA target sequence
atccaaatatcgccgttacaatgctta

SEQ ID NO: 34216 - DNA, 27 bp, Artificial sequence
  SiRNA target sequence
tccaaatatcgccgttacaatgcttag

SEQ ID NO: 34217 - DNA, 27 bp, Artificial sequence
  SiRNA target sequence
ccaaatatcgccgttacaatgcttagt

SEQ ID NO: 34218 - DNA, 27 bp, Artificial sequence
  SiRNA target sequence
caaatatcgccgttacaatgcttagta

SEQ ID NO: 34219 - DNA, 27 bp, Artificial sequence
  SiRNA target sequence
aaatatcgccgttacaatgcttagtag

SEQ ID NO: 34220 - DNA, 27 bp, Artificial sequence
  SiRNA target sequence
aatatcgccgttacaatgcttagtagt

SEQ ID NO: 34221 - DNA, 27 bp, Artificial sequence
  SiRNA target sequence
atatcgccgttacaatgcttagtagtg

SEQ ID NO: 34222 - DNA, 27 bp, Artificial sequence
  SiRNA target sequence
tatcgccgttacaatgcttagtagtgt

SEQ ID NO: 34223 - DNA, 27 bp, Artificial sequence
  SiRNA target sequence
atcgccgttacaatgcttagtagtgtc

SEQ ID NO: 34224 - DNA, 27 bp, Artificial sequence
  SiRNA target sequence
tcgccgttacaatgcttagtagtgtca

SEQ ID NO: 34225 - DNA, 27 bp, Artificial sequence
  SiRNA target sequence
cgccgttacaatgcttagtagtgtcat

SEQ ID NO: 34226 - DNA, 27 bp, Artificial sequence
  SiRNA target sequence
gccgttacaatgcttagtagtgtcata

SEQ ID NO: 34227 - DNA, 27 bp, Artificial sequence
  SiRNA target sequence
ccgttacaatgcttagtagtgtcatat

SEQ ID NO: 34228 - DNA, 27 bp, Artificial sequence
  SiRNA target sequence
cgttacaatgcttagtagtgtcatatg

SEQ ID NO: 34229 - DNA, 27 bp, Artificial sequence
  SiRNA target sequence
gttacaatgcttagtagtgtcatatgg

SEQ ID NO: 34230 - DNA, 27 bp, Artificial sequence
  SiRNA target sequence
ttacaatgcttagtagtgtcatatggt

SEQ ID NO: 34231 - DNA, 27 bp, Artificial sequence
  SiRNA target sequence
tacaatgcttagtagtgtcatatggta

SEQ ID NO: 34232 - DNA, 27 bp, Artificial sequence
  SiRNA target sequence
acaatgcttagtagtgtcatatggtaa

SEQ ID NO: 34233 - DNA, 27 bp, Artificial sequence
  SiRNA target sequence
caatgcttagtagtgtcatatggtaag

SEQ ID NO: 34234 - DNA, 27 bp, Artificial sequence
  SiRNA target sequence
aatgcttagtagtgtcatatggtaagc

SEQ ID NO: 34235 - DNA, 27 bp, Artificial sequence
  SiRNA target sequence
atgcttagtagtgtcatatggtaagct

SEQ ID NO: 34236 - DNA, 27 bp, Artificial sequence
  SiRNA target sequence
tgcttagtagtgtcatatggtaagctt

SEQ ID NO: 34237 - DNA, 27 bp, Artificial sequence
  SiRNA target sequence
gcttagtagtgtcatatggtaagcttt

SEQ ID NO: 34238 - DNA, 27 bp, Artificial sequence
  SiRNA target sequence
cttagtagtgtcatatggtaagctttt

SEQ ID NO: 34239 - DNA, 27 bp, Artificial sequence
  SiRNA target sequence
ttagtagtgtcatatggtaagcttttt

SEQ ID NO: 34240 - DNA, 27 bp, Artificial sequence
  SiRNA target sequence
tagtagtgtcatatggtaagcttttta

SEQ ID NO: 34241 - DNA, 27 bp, Artificial sequence
  SiRNA target sequence
agtagtgtcatatggtaagctttttaa

SEQ ID NO: 34242 - DNA, 27 bp, Artificial sequence
  SiRNA target sequence
gtagtgtcatatggtaagctttttaaa

SEQ ID NO: 34243 - DNA, 27 bp, Artificial sequence
  SiRNA target sequence
tagtgtcatatggtaagctttttaaat

SEQ ID NO: 34244 - DNA, 27 bp, Artificial sequence
  SiRNA target sequence
agtgtcatatggtaagctttttaaata

SEQ ID NO: 34245 - DNA, 27 bp, Artificial sequence
  SiRNA target sequence
gtgtcatatggtaagctttttaaataa

SEQ ID NO: 34246 - DNA, 27 bp, Artificial sequence
  SiRNA target sequence
tgtcatatggtaagctttttaaataat

SEQ ID NO: 34247 - DNA, 27 bp, Artificial sequence
  SiRNA target sequence
gtcatatggtaagctttttaaataatc

SEQ ID NO: 34248 - DNA, 27 bp, Artificial sequence
  SiRNA target sequence
tcatatggtaagctttttaaataatct

SEQ ID NO: 34249 - DNA, 27 bp, Artificial sequence
  SiRNA target sequence
catatggtaagctttttaaataatctt

SEQ ID NO: 34250 - DNA, 27 bp, Artificial sequence
  SiRNA target sequence
atatggtaagctttttaaataatcttt

SEQ ID NO: 34251 - DNA, 27 bp, Artificial sequence
  SiRNA target sequence
tatggtaagctttttaaataatctttt

SEQ ID NO: 34252 - DNA, 27 bp, Artificial sequence
  SiRNA target sequence
atggtaagctttttaaataatctttta

SEQ ID NO: 34253 - DNA, 27 bp, Artificial sequence
  SiRNA target sequence
tggtaagctttttaaataatcttttaa

SEQ ID NO: 34254 - DNA, 27 bp, Artificial sequence
  SiRNA target sequence
ggtaagctttttaaataatcttttaat

SEQ ID NO: 34255 - DNA, 27 bp, Artificial sequence
  SiRNA target sequence
gtaagctttttaaataatcttttaatt

SEQ ID NO: 34256 - DNA, 27 bp, Artificial sequence
  SiRNA target sequence
taagctttttaaataatcttttaattc

SEQ ID NO: 34257 - DNA, 27 bp, Artificial sequence
  SiRNA target sequence
aagctttttaaataatcttttaattct

SEQ ID NO: 34258 - DNA, 27 bp, Artificial sequence
  SiRNA target sequence
agctttttaaataatcttttaattcta

SEQ ID NO: 34259 - DNA, 27 bp, Artificial sequence
  SiRNA target sequence
gctttttaaataatcttttaattctac

SEQ ID NO: 34260 - DNA, 27 bp, Artificial sequence
  SiRNA target sequence
ctttttaaataatcttttaattctaca

SEQ ID NO: 34261 - DNA, 27 bp, Artificial sequence
  SiRNA target sequence
tttttaaataatcttttaattctacat

SEQ ID NO: 34262 - DNA, 27 bp, Artificial sequence
  SiRNA target sequence
ttttaaataatcttttaattctacatc

SEQ ID NO: 34263 - DNA, 27 bp, Artificial sequence
  SiRNA target sequence
tttaaataatcttttaattctacatca

SEQ ID NO: 34264 - DNA, 27 bp, Artificial sequence
  SiRNA target sequence
ttaaataatcttttaattctacatcat

SEQ ID NO: 34265 - DNA, 27 bp, Artificial sequence
  SiRNA target sequence
taaataatcttttaattctacatcatc

SEQ ID NO: 34266 - DNA, 27 bp, Artificial sequence
  SiRNA target sequence
aaataatcttttaattctacatcatca

SEQ ID NO: 34267 - DNA, 27 bp, Artificial sequence
  SiRNA target sequence
aataatcttttaattctacatcatcaa

SEQ ID NO: 34268 - DNA, 27 bp, Artificial sequence
  SiRNA target sequence
ataatcttttaattctacatcatcaaa

SEQ ID NO: 34269 - DNA, 27 bp, Artificial sequence
  SiRNA target sequence
taatcttttaattctacatcatcaaat

SEQ ID NO: 34270 - DNA, 27 bp, Artificial sequence
  SiRNA target sequence
aatcttttaattctacatcatcaaatt

SEQ ID NO: 34271 - DNA, 27 bp, Artificial sequence
  SiRNA target sequence
atcttttaattctacatcatcaaattt

SEQ ID NO: 34272 - DNA, 27 bp, Artificial sequence
  SiRNA target sequence
tcttttaattctacatcatcaaatttt

SEQ ID NO: 34273 - DNA, 27 bp, Artificial sequence
  SiRNA target sequence
cttttaattctacatcatcaaattttc

SEQ ID NO: 34274 - DNA, 27 bp, Artificial sequence
  SiRNA target sequence
ttttaattctacatcatcaaattttcg

SEQ ID NO: 34275 - DNA, 27 bp, Artificial sequence
  SiRNA target sequence
tttaattctacatcatcaaattttcgt

SEQ ID NO: 34276 - DNA, 27 bp, Artificial sequence
  SiRNA target sequence
ttaattctacatcatcaaattttcgtc

SEQ ID NO: 34277 - DNA, 27 bp, Artificial sequence
  SiRNA target sequence
taattctacatcatcaaattttcgtcc

SEQ ID NO: 34278 - DNA, 27 bp, Artificial sequence
  SiRNA target sequence
aattctacatcatcaaattttcgtccc

SEQ ID NO: 34279 - DNA, 27 bp, Artificial sequence
  SiRNA target sequence
attctacatcatcaaattttcgtccca

SEQ ID NO: 34280 - DNA, 27 bp, Artificial sequence
  SiRNA target sequence
ttctacatcatcaaattttcgtcccag

SEQ ID NO: 34281 - DNA, 27 bp, Artificial sequence
  SiRNA target sequence
tctacatcatcaaattttcgtcccagc

SEQ ID NO: 34282 - DNA, 27 bp, Artificial sequence
  SiRNA target sequence
ctacatcatcaaattttcgtcccagca

SEQ ID NO: 34283 - DNA, 27 bp, Artificial sequence
  SiRNA target sequence
tacatcatcaaattttcgtcccagcaa

SEQ ID NO: 34284 - DNA, 27 bp, Artificial sequence
  SiRNA target sequence
acatcatcaaattttcgtcccagcaat

SEQ ID NO: 34285 - DNA, 27 bp, Artificial sequence
  SiRNA target sequence
catcatcaaattttcgtcccagcaatc

SEQ ID NO: 34286 - DNA, 27 bp, Artificial sequence
  SiRNA target sequence
atcatcaaattttcgtcccagcaatct

SEQ ID NO: 34287 - DNA, 27 bp, Artificial sequence
  SiRNA target sequence
tcatcaaattttcgtcccagcaatctc

SEQ ID NO: 34288 - DNA, 27 bp, Artificial sequence
  SiRNA target sequence
catcaaattttcgtcccagcaatctct

SEQ ID NO: 34289 - DNA, 27 bp, Artificial sequence
  SiRNA target sequence
atcaaattttcgtcccagcaatctctt

SEQ ID NO: 34290 - DNA, 27 bp, Artificial sequence
  SiRNA target sequence
tcaaattttcgtcccagcaatctctta

SEQ ID NO: 34291 - DNA, 27 bp, Artificial sequence
  SiRNA target sequence
caaattttcgtcccagcaatctcttag

SEQ ID NO: 34292 - DNA, 27 bp, Artificial sequence
  SiRNA target sequence
aaattttcgtcccagcaatctcttaga

SEQ ID NO: 34293 - DNA, 27 bp, Artificial sequence
  SiRNA target sequence
aattttcgtcccagcaatctcttagac

SEQ ID NO: 34294 - DNA, 27 bp, Artificial sequence
  SiRNA target sequence
attttcgtcccagcaatctcttagacg

SEQ ID NO: 34295 - DNA, 27 bp, Artificial sequence
  SiRNA target sequence
ttttcgtcccagcaatctcttagacgc

SEQ ID NO: 34296 - DNA, 27 bp, Artificial sequence
  SiRNA target sequence
tttcgtcccagcaatctcttagacgca

SEQ ID NO: 34297 - DNA, 27 bp, Artificial sequence
  SiRNA target sequence
ttcgtcccagcaatctcttagacgcaa

SEQ ID NO: 34298 - DNA, 27 bp, Artificial sequence
  SiRNA target sequence
tcgtcccagcaatctcttagacgcaaa

SEQ ID NO: 34299 - DNA, 27 bp, Artificial sequence
  SiRNA target sequence
cgtcccagcaatctcttagacgcaaaa

SEQ ID NO: 34300 - DNA, 27 bp, Artificial sequence
  SiRNA target sequence
gtcccagcaatctcttagacgcaaaaa

SEQ ID NO: 34301 - DNA, 27 bp, Artificial sequence
  SiRNA target sequence
tcccagcaatctcttagacgcaaaaat

SEQ ID NO: 34302 - DNA, 27 bp, Artificial sequence
  SiRNA target sequence
cccagcaatctcttagacgcaaaaatc

SEQ ID NO: 34303 - DNA, 27 bp, Artificial sequence
  SiRNA target sequence
ccagcaatctcttagacgcaaaaatcg

SEQ ID NO: 34304 - DNA, 27 bp, Artificial sequence
  SiRNA target sequence
cagcaatctcttagacgcaaaaatcgt

SEQ ID NO: 34305 - DNA, 27 bp, Artificial sequence
  SiRNA target sequence
agcaatctcttagacgcaaaaatcgta

SEQ ID NO: 34306 - DNA, 27 bp, Artificial sequence
  SiRNA target sequence
gcaatctcttagacgcaaaaatcgtat

SEQ ID NO: 34307 - DNA, 27 bp, Artificial sequence
  SiRNA target sequence
caatctcttagacgcaaaaatcgtatt

SEQ ID NO: 34308 - DNA, 27 bp, Artificial sequence
  SiRNA target sequence
aatctcttagacgcaaaaatcgtattc

SEQ ID NO: 34309 - DNA, 27 bp, Artificial sequence
  SiRNA target sequence
atctcttagacgcaaaaatcgtattct

SEQ ID NO: 34310 - DNA, 27 bp, Artificial sequence
  SiRNA target sequence
tctcttagacgcaaaaatcgtattctt

SEQ ID NO: 34311 - DNA, 27 bp, Artificial sequence
  SiRNA target sequence
ctcttagacgcaaaaatcgtattcttg

SEQ ID NO: 34312 - DNA, 27 bp, Artificial sequence
  SiRNA target sequence
tcttagacgcaaaaatcgtattcttgg

SEQ ID NO: 34313 - DNA, 27 bp, Artificial sequence
  SiRNA target sequence
cttagacgcaaaaatcgtattcttggg

SEQ ID NO: 34314 - DNA, 27 bp, Artificial sequence
  SiRNA target sequence
ttagacgcaaaaatcgtattcttggga

SEQ ID NO: 34315 - DNA, 27 bp, Artificial sequence
  SiRNA target sequence
tagacgcaaaaatcgtattcttgggat

SEQ ID NO: 34316 - DNA, 27 bp, Artificial sequence
  SiRNA target sequence
agacgcaaaaatcgtattcttgggatg

SEQ ID NO: 34317 - DNA, 27 bp, Artificial sequence
  SiRNA target sequence
gacgcaaaaatcgtattcttgggatgt

SEQ ID NO: 34318 - DNA, 27 bp, Artificial sequence
  SiRNA target sequence
acgcaaaaatcgtattcttgggatgta

SEQ ID NO: 34319 - DNA, 27 bp, Artificial sequence
  SiRNA target sequence
cgcaaaaatcgtattcttgggatgtaa

SEQ ID NO: 34320 - DNA, 27 bp, Artificial sequence
  SiRNA target sequence
gcaaaaatcgtattcttgggatgtaat

SEQ ID NO: 34321 - DNA, 27 bp, Artificial sequence
  SiRNA target sequence
caaaaatcgtattcttgggatgtaata

SEQ ID NO: 34322 - DNA, 27 bp, Artificial sequence
  SiRNA target sequence
aaaaatcgtattcttgggatgtaataa

SEQ ID NO: 34323 - DNA, 27 bp, Artificial sequence
  SiRNA target sequence
aaaatcgtattcttgggatgtaataac

SEQ ID NO: 34324 - DNA, 27 bp, Artificial sequence
  SiRNA target sequence
aaatcgtattcttgggatgtaataaca

SEQ ID NO: 34325 - DNA, 27 bp, Artificial sequence
  SiRNA target sequence
aatcgtattcttgggatgtaataacaa

SEQ ID NO: 34326 - DNA, 27 bp, Artificial sequence
  SiRNA target sequence
atcgtattcttgggatgtaataacaag

SEQ ID NO: 34327 - DNA, 27 bp, Artificial sequence
  SiRNA target sequence
tcgtattcttgggatgtaataacaagt

SEQ ID NO: 34328 - DNA, 27 bp, Artificial sequence
  SiRNA target sequence
cgtattcttgggatgtaataacaagtt

SEQ ID NO: 34329 - DNA, 27 bp, Artificial sequence
  SiRNA target sequence
gtattcttgggatgtaataacaagtta

SEQ ID NO: 34330 - DNA, 27 bp, Artificial sequence
  SiRNA target sequence
tattcttgggatgtaataacaagttag

SEQ ID NO: 34331 - DNA, 27 bp, Artificial sequence
  SiRNA target sequence
attcttgggatgtaataacaagttaga

SEQ ID NO: 34332 - DNA, 27 bp, Artificial sequence
  SiRNA target sequence
ttcttgggatgtaataacaagttagac

SEQ ID NO: 34333 - DNA, 27 bp, Artificial sequence
  SiRNA target sequence
tcttgggatgtaataacaagttagact

SEQ ID NO: 34334 - DNA, 27 bp, Artificial sequence
  SiRNA target sequence
cttgggatgtaataacaagttagactt

SEQ ID NO: 34335 - DNA, 27 bp, Artificial sequence
  SiRNA target sequence
ttgggatgtaataacaagttagactta

SEQ ID NO: 34336 - DNA, 27 bp, Artificial sequence
  SiRNA target sequence
tgggatgtaataacaagttagacttag

SEQ ID NO: 34337 - DNA, 27 bp, Artificial sequence
  SiRNA target sequence
gggatgtaataacaagttagacttagc

SEQ ID NO: 34338 - DNA, 27 bp, Artificial sequence
  SiRNA target sequence
ggatgtaataacaagttagacttagct

SEQ ID NO: 34339 - DNA, 27 bp, Artificial sequence
  SiRNA target sequence
gatgtaataacaagttagacttagctt

SEQ ID NO: 34340 - DNA, 27 bp, Artificial sequence
  SiRNA target sequence
atgtaataacaagttagacttagcttg

SEQ ID NO: 34341 - DNA, 27 bp, Artificial sequence
  SiRNA target sequence
tgtaataacaagttagacttagcttgc

SEQ ID NO: 34342 - DNA, 27 bp, Artificial sequence
  SiRNA target sequence
gtaataacaagttagacttagcttgct

SEQ ID NO: 34343 - DNA, 27 bp, Artificial sequence
  SiRNA target sequence
taataacaagttagacttagcttgctc

SEQ ID NO: 34344 - DNA, 27 bp, Artificial sequence
  SiRNA target sequence
aataacaagttagacttagcttgctca

SEQ ID NO: 34345 - DNA, 27 bp, Artificial sequence
  SiRNA target sequence
ataacaagttagacttagcttgctcac

SEQ ID NO: 34346 - DNA, 27 bp, Artificial sequence
  SiRNA target sequence
taacaagttagacttagcttgctcacc

SEQ ID NO: 34347 - DNA, 27 bp, Artificial sequence
  SiRNA target sequence
aacaagttagacttagcttgctcacct

SEQ ID NO: 34348 - DNA, 27 bp, Artificial sequence
  SiRNA target sequence
acaagttagacttagcttgctcacctg

SEQ ID NO: 34349 - DNA, 27 bp, Artificial sequence
  SiRNA target sequence
caagttagacttagcttgctcacctgt

SEQ ID NO: 34350 - DNA, 27 bp, Artificial sequence
  SiRNA target sequence
aagttagacttagcttgctcacctgtt

SEQ ID NO: 34351 - DNA, 27 bp, Artificial sequence
  SiRNA target sequence
agttagacttagcttgctcacctgtta

SEQ ID NO: 34352 - DNA, 27 bp, Artificial sequence
  SiRNA target sequence
gttagacttagcttgctcacctgttaa

SEQ ID NO: 34353 - DNA, 27 bp, Artificial sequence
  SiRNA target sequence
ttagacttagcttgctcacctgttaaa

SEQ ID NO: 34354 - DNA, 27 bp, Artificial sequence
  SiRNA target sequence
tagacttagcttgctcacctgttaaaa

SEQ ID NO: 34355 - DNA, 27 bp, Artificial sequence
  SiRNA target sequence
agacttagcttgctcacctgttaaaat

SEQ ID NO: 34356 - DNA, 27 bp, Artificial sequence
  SiRNA target sequence
gacttagcttgctcacctgttaaaatt

SEQ ID NO: 34357 - DNA, 27 bp, Artificial sequence
  SiRNA target sequence
acttagcttgctcacctgttaaaattt

SEQ ID NO: 34358 - DNA, 27 bp, Artificial sequence
  SiRNA target sequence
cttagcttgctcacctgttaaaatttt

SEQ ID NO: 34359 - DNA, 27 bp, Artificial sequence
  SiRNA target sequence
ttagcttgctcacctgttaaaatttta

SEQ ID NO: 34360 - DNA, 27 bp, Artificial sequence
  SiRNA target sequence
tagcttgctcacctgttaaaattttat

SEQ ID NO: 34361 - DNA, 27 bp, Artificial sequence
  SiRNA target sequence
agcttgctcacctgttaaaattttatc

SEQ ID NO: 34362 - DNA, 27 bp, Artificial sequence
  SiRNA target sequence
gcttgctcacctgttaaaattttatct

SEQ ID NO: 34363 - DNA, 27 bp, Artificial sequence
  SiRNA target sequence
cttgctcacctgttaaaattttatctt

SEQ ID NO: 34364 - DNA, 27 bp, Artificial sequence
  SiRNA target sequence
ttgctcacctgttaaaattttatcttt

SEQ ID NO: 34365 - DNA, 27 bp, Artificial sequence
  SiRNA target sequence
tgctcacctgttaaaattttatcttta

SEQ ID NO: 34366 - DNA, 27 bp, Artificial sequence
  SiRNA target sequence
gctcacctgttaaaattttatctttaa

SEQ ID NO: 34367 - DNA, 27 bp, Artificial sequence
  SiRNA target sequence
ctcacctgttaaaattttatctttaaa

SEQ ID NO: 34368 - DNA, 27 bp, Artificial sequence
  SiRNA target sequence
tcacctgttaaaattttatctttaaaa

SEQ ID NO: 34369 - DNA, 27 bp, Artificial sequence
  SiRNA target sequence
cacctgttaaaattttatctttaaaaa

SEQ ID NO: 34370 - DNA, 27 bp, Artificial sequence
  SiRNA target sequence
acctgttaaaattttatctttaaaaat

SEQ ID NO: 34371 - DNA, 27 bp, Artificial sequence
  SiRNA target sequence
cctgttaaaattttatctttaaaaatt

SEQ ID NO: 34372 - DNA, 27 bp, Artificial sequence
  SiRNA target sequence
ctgttaaaattttatctttaaaaattg

SEQ ID NO: 34373 - DNA, 27 bp, Artificial sequence
  SiRNA target sequence
tgttaaaattttatctttaaaaattga

SEQ ID NO: 34374 - DNA, 27 bp, Artificial sequence
  SiRNA target sequence
gttaaaattttatctttaaaaattgat

SEQ ID NO: 34375 - DNA, 27 bp, Artificial sequence
  SiRNA target sequence
ttaaaattttatctttaaaaattgata

SEQ ID NO: 34376 - DNA, 27 bp, Artificial sequence
  SiRNA target sequence
taaaattttatctttaaaaattgatac

SEQ ID NO: 34377 - DNA, 27 bp, Artificial sequence
  SiRNA target sequence
aaaattttatctttaaaaattgatacc

SEQ ID NO: 34378 - DNA, 27 bp, Artificial sequence
  SiRNA target sequence
aaattttatctttaaaaattgatacca

SEQ ID NO: 34379 - DNA, 27 bp, Artificial sequence
  SiRNA target sequence
aattttatctttaaaaattgataccac

SEQ ID NO: 34380 - DNA, 27 bp, Artificial sequence
  SiRNA target sequence
attttatctttaaaaattgataccacc

SEQ ID NO: 34381 - DNA, 27 bp, Artificial sequence
  SiRNA target sequence
ttttatctttaaaaattgataccaccg

SEQ ID NO: 34382 - DNA, 27 bp, Artificial sequence
  SiRNA target sequence
tttatctttaaaaattgataccaccga

SEQ ID NO: 34383 - DNA, 27 bp, Artificial sequence
  SiRNA target sequence
ttatctttaaaaattgataccaccgat

SEQ ID NO: 34384 - DNA, 27 bp, Artificial sequence
  SiRNA target sequence
tatctttaaaaattgataccaccgatg

SEQ ID NO: 34385 - DNA, 27 bp, Artificial sequence
  SiRNA target sequence
atctttaaaaattgataccaccgatgg

SEQ ID NO: 34386 - DNA, 27 bp, Artificial sequence
  SiRNA target sequence
tctttaaaaattgataccaccgatggt

SEQ ID NO: 34387 - DNA, 27 bp, Artificial sequence
  SiRNA target sequence
ctttaaaaattgataccaccgatggtg

SEQ ID NO: 34388 - DNA, 27 bp, Artificial sequence
  SiRNA target sequence
tttaaaaattgataccaccgatggtgt

SEQ ID NO: 34389 - DNA, 27 bp, Artificial sequence
  SiRNA target sequence
ttaaaaattgataccaccgatggtgta

SEQ ID NO: 34390 - DNA, 27 bp, Artificial sequence
  SiRNA target sequence
taaaaattgataccaccgatggtgtag

SEQ ID NO: 34391 - DNA, 27 bp, Artificial sequence
  SiRNA target sequence
aaaaattgataccaccgatggtgtagt

SEQ ID NO: 34392 - DNA, 27 bp, Artificial sequence
  SiRNA target sequence
aaaattgataccaccgatggtgtagtt

SEQ ID NO: 34393 - DNA, 27 bp, Artificial sequence
  SiRNA target sequence
aaattgataccaccgatggtgtagttc

SEQ ID NO: 34394 - DNA, 27 bp, Artificial sequence
  SiRNA target sequence
aattgataccaccgatggtgtagttct

SEQ ID NO: 34395 - DNA, 27 bp, Artificial sequence
  SiRNA target sequence
attgataccaccgatggtgtagttcta

SEQ ID NO: 34396 - DNA, 27 bp, Artificial sequence
  SiRNA target sequence
ttgataccaccgatggtgtagttctac

SEQ ID NO: 34397 - DNA, 27 bp, Artificial sequence
  SiRNA target sequence
tgataccaccgatggtgtagttctacc

SEQ ID NO: 34398 - DNA, 27 bp, Artificial sequence
  SiRNA target sequence
gataccaccgatggtgtagttctacca

SEQ ID NO: 34399 - DNA, 27 bp, Artificial sequence
  SiRNA target sequence
ataccaccgatggtgtagttctaccac

SEQ ID NO: 34400 - DNA, 27 bp, Artificial sequence
  SiRNA target sequence
taccaccgatggtgtagttctaccacc

SEQ ID NO: 34401 - DNA, 27 bp, Artificial sequence
  SiRNA target sequence
accaccgatggtgtagttctaccacct

SEQ ID NO: 34402 - DNA, 27 bp, Artificial sequence
  SiRNA target sequence
ccaccgatggtgtagttctaccacctt

SEQ ID NO: 34403 - DNA, 27 bp, Artificial sequence
  SiRNA target sequence
caccgatggtgtagttctaccaccttc

SEQ ID NO: 34404 - DNA, 27 bp, Artificial sequence
  SiRNA target sequence
accgatggtgtagttctaccaccttct

SEQ ID NO: 34405 - DNA, 27 bp, Artificial sequence
  SiRNA target sequence
ccgatggtgtagttctaccaccttctt

SEQ ID NO: 34406 - DNA, 27 bp, Artificial sequence
  SiRNA target sequence
cgatggtgtagttctaccaccttcttc

SEQ ID NO: 34407 - DNA, 27 bp, Artificial sequence
  SiRNA target sequence
gatggtgtagttctaccaccttcttcg

SEQ ID NO: 34408 - DNA, 27 bp, Artificial sequence
  SiRNA target sequence
atggtgtagttctaccaccttcttcgt

SEQ ID NO: 34409 - DNA, 27 bp, Artificial sequence
  SiRNA target sequence
tggtgtagttctaccaccttcttcgtt

SEQ ID NO: 34410 - DNA, 27 bp, Artificial sequence
  SiRNA target sequence
ggtgtagttctaccaccttcttcgttt

SEQ ID NO: 34411 - DNA, 27 bp, Artificial sequence
  SiRNA target sequence
gtgtagttctaccaccttcttcgtttt

SEQ ID NO: 34412 - DNA, 27 bp, Artificial sequence
  SiRNA target sequence
tgtagttctaccaccttcttcgttttc

SEQ ID NO: 34413 - DNA, 27 bp, Artificial sequence
  SiRNA target sequence
gtagttctaccaccttcttcgttttca

SEQ ID NO: 34414 - DNA, 27 bp, Artificial sequence
  SiRNA target sequence
tagttctaccaccttcttcgttttcaa

SEQ ID NO: 34415 - DNA, 27 bp, Artificial sequence
  SiRNA target sequence
agttctaccaccttcttcgttttcaat

SEQ ID NO: 34416 - DNA, 27 bp, Artificial sequence
  SiRNA target sequence
gttctaccaccttcttcgttttcaata

SEQ ID NO: 34417 - DNA, 27 bp, Artificial sequence
  SiRNA target sequence
ttctaccaccttcttcgttttcaataa

SEQ ID NO: 34418 - DNA, 27 bp, Artificial sequence
  SiRNA target sequence
tctaccaccttcttcgttttcaataat

SEQ ID NO: 34419 - DNA, 27 bp, Artificial sequence
  SiRNA target sequence
ctaccaccttcttcgttttcaataatt

SEQ ID NO: 34420 - DNA, 27 bp, Artificial sequence
  SiRNA target sequence
taccaccttcttcgttttcaataattt

SEQ ID NO: 34421 - DNA, 27 bp, Artificial sequence
  SiRNA target sequence
accaccttcttcgttttcaataatttg

SEQ ID NO: 34422 - DNA, 27 bp, Artificial sequence
  SiRNA target sequence
ccaccttcttcgttttcaataatttgt

SEQ ID NO: 34423 - DNA, 27 bp, Artificial sequence
  SiRNA target sequence
caccttcttcgttttcaataatttgtg

SEQ ID NO: 34424 - DNA, 27 bp, Artificial sequence
  SiRNA target sequence
accttcttcgttttcaataatttgtgg

SEQ ID NO: 34425 - DNA, 27 bp, Artificial sequence
  SiRNA target sequence
ccttcttcgttttcaataatttgtggg

SEQ ID NO: 34426 - DNA, 27 bp, Artificial sequence
  SiRNA target sequence
cttcttcgttttcaataatttgtggga

SEQ ID NO: 34427 - DNA, 27 bp, Artificial sequence
  SiRNA target sequence
ttcttcgttttcaataatttgtgggat

SEQ ID NO: 34428 - DNA, 27 bp, Artificial sequence
  SiRNA target sequence
tcttcgttttcaataatttgtgggata

SEQ ID NO: 34429 - DNA, 27 bp, Artificial sequence
  SiRNA target sequence
cttcgttttcaataatttgtgggatat

SEQ ID NO: 34430 - DNA, 27 bp, Artificial sequence
  SiRNA target sequence
ttcgttttcaataatttgtgggatatt

SEQ ID NO: 34431 - DNA, 27 bp, Artificial sequence
  SiRNA target sequence
tcgttttcaataatttgtgggatattg

SEQ ID NO: 34432 - DNA, 27 bp, Artificial sequence
  SiRNA target sequence
cgttttcaataatttgtgggatattgt

SEQ ID NO: 34433 - DNA, 27 bp, Artificial sequence
  SiRNA target sequence
gttttcaataatttgtgggatattgtt

SEQ ID NO: 34434 - DNA, 27 bp, Artificial sequence
  SiRNA target sequence
ttttcaataatttgtgggatattgtta

SEQ ID NO: 34435 - DNA, 27 bp, Artificial sequence
  SiRNA target sequence
tttcaataatttgtgggatattgttat

SEQ ID NO: 34436 - DNA, 27 bp, Artificial sequence
  SiRNA target sequence
ttcaataatttgtgggatattgttatg

SEQ ID NO: 34437 - DNA, 27 bp, Artificial sequence
  SiRNA target sequence
tcaataatttgtgggatattgttatgt

SEQ ID NO: 34438 - DNA, 27 bp, Artificial sequence
  SiRNA target sequence
caataatttgtgggatattgttatgta

SEQ ID NO: 34439 - DNA, 27 bp, Artificial sequence
  SiRNA target sequence
aataatttgtgggatattgttatgtat

SEQ ID NO: 34440 - DNA, 27 bp, Artificial sequence
  SiRNA target sequence
ataatttgtgggatattgttatgtata

SEQ ID NO: 34441 - DNA, 27 bp, Artificial sequence
  SiRNA target sequence
taatttgtgggatattgttatgtataa

SEQ ID NO: 34442 - DNA, 27 bp, Artificial sequence
  SiRNA target sequence
aatttgtgggatattgttatgtataag

SEQ ID NO: 34443 - DNA, 27 bp, Artificial sequence
  SiRNA target sequence
atttgtgggatattgttatgtataaga

SEQ ID NO: 34444 - DNA, 27 bp, Artificial sequence
  SiRNA target sequence
tttgtgggatattgttatgtataagag

SEQ ID NO: 34445 - DNA, 27 bp, Artificial sequence
  SiRNA target sequence
ttgtgggatattgttatgtataagaga

SEQ ID NO: 34446 - DNA, 27 bp, Artificial sequence
  SiRNA target sequence
tgtgggatattgttatgtataagagac

SEQ ID NO: 34447 - DNA, 27 bp, Artificial sequence
  SiRNA target sequence
gtgggatattgttatgtataagagaca

SEQ ID NO: 34448 - DNA, 27 bp, Artificial sequence
  SiRNA target sequence
tgggatattgttatgtataagagacac

SEQ ID NO: 34449 - DNA, 27 bp, Artificial sequence
  SiRNA target sequence
gggatattgttatgtataagagacaca

SEQ ID NO: 34450 - DNA, 27 bp, Artificial sequence
  SiRNA target sequence
ggatattgttatgtataagagacacac

SEQ ID NO: 34451 - DNA, 27 bp, Artificial sequence
  SiRNA target sequence
gatattgttatgtataagagacacaca

SEQ ID NO: 34452 - DNA, 27 bp, Artificial sequence
  SiRNA target sequence
atattgttatgtataagagacacacaa

SEQ ID NO: 34453 - DNA, 27 bp, Artificial sequence
  SiRNA target sequence
tattgttatgtataagagacacacaag

SEQ ID NO: 34454 - DNA, 27 bp, Artificial sequence
  SiRNA target sequence
attgttatgtataagagacacacaaga

SEQ ID NO: 34455 - DNA, 27 bp, Artificial sequence
  SiRNA target sequence
ttgttatgtataagagacacacaagaa

SEQ ID NO: 34456 - DNA, 27 bp, Artificial sequence
  SiRNA target sequence
tgttatgtataagagacacacaagaat

SEQ ID NO: 34457 - DNA, 27 bp, Artificial sequence
  SiRNA target sequence
gttatgtataagagacacacaagaatt

SEQ ID NO: 34458 - DNA, 27 bp, Artificial sequence
  SiRNA target sequence
ttatgtataagagacacacaagaattg

SEQ ID NO: 34459 - DNA, 27 bp, Artificial sequence
  SiRNA target sequence
tatgtataagagacacacaagaattgg

SEQ ID NO: 34460 - DNA, 27 bp, Artificial sequence
  SiRNA target sequence
atgtataagagacacacaagaattggt

SEQ ID NO: 34461 - DNA, 27 bp, Artificial sequence
  SiRNA target sequence
tgtataagagacacacaagaattggtt

SEQ ID NO: 34462 - DNA, 27 bp, Artificial sequence
  SiRNA target sequence
gtataagagacacacaagaattggttg

SEQ ID NO: 34463 - DNA, 27 bp, Artificial sequence
  SiRNA target sequence
tataagagacacacaagaattggttgt

SEQ ID NO: 34464 - DNA, 27 bp, Artificial sequence
  SiRNA target sequence
ataagagacacacaagaattggttgtt

SEQ ID NO: 34465 - DNA, 27 bp, Artificial sequence
  SiRNA target sequence
taagagacacacaagaattggttgttc

SEQ ID NO: 34466 - DNA, 27 bp, Artificial sequence
  SiRNA target sequence
aagagacacacaagaattggttgttcc

SEQ ID NO: 34467 - DNA, 27 bp, Artificial sequence
  SiRNA target sequence
agagacacacaagaattggttgttcct

SEQ ID NO: 34468 - DNA, 27 bp, Artificial sequence
  SiRNA target sequence
gagacacacaagaattggttgttccta

SEQ ID NO: 34469 - DNA, 27 bp, Artificial sequence
  SiRNA target sequence
agacacacaagaattggttgttcctag

SEQ ID NO: 34470 - DNA, 27 bp, Artificial sequence
  SiRNA target sequence
gacacacaagaattggttgttcctaga

SEQ ID NO: 34471 - DNA, 27 bp, Artificial sequence
  SiRNA target sequence
acacacaagaattggttgttcctagat

SEQ ID NO: 34472 - DNA, 27 bp, Artificial sequence
  SiRNA target sequence
cacacaagaattggttgttcctagatc

SEQ ID NO: 34473 - DNA, 27 bp, Artificial sequence
  SiRNA target sequence
acacaagaattggttgttcctagatca

SEQ ID NO: 34474 - DNA, 27 bp, Artificial sequence
  SiRNA target sequence
cacaagaattggttgttcctagatcaa

SEQ ID NO: 34475 - DNA, 27 bp, Artificial sequence
  SiRNA target sequence
acaagaattggttgttcctagatcaat

SEQ ID NO: 34476 - DNA, 27 bp, Artificial sequence
  SiRNA target sequence
caagaattggttgttcctagatcaatt

SEQ ID NO: 34477 - DNA, 27 bp, Artificial sequence
  SiRNA target sequence
aagaattggttgttcctagatcaattc

SEQ ID NO: 34478 - DNA, 27 bp, Artificial sequence
  SiRNA target sequence
agaattggttgttcctagatcaattcc

SEQ ID NO: 34479 - DNA, 27 bp, Artificial sequence
  SiRNA target sequence
gaattggttgttcctagatcaattcct

SEQ ID NO: 34480 - DNA, 27 bp, Artificial sequence
  SiRNA target sequence
aattggttgttcctagatcaattccta

SEQ ID NO: 34481 - DNA, 27 bp, Artificial sequence
  SiRNA target sequence
attggttgttcctagatcaattcctat

SEQ ID NO: 34482 - DNA, 27 bp, Artificial sequence
  SiRNA target sequence
ttggttgttcctagatcaattcctatt

SEQ ID NO: 34483 - DNA, 27 bp, Artificial sequence
  SiRNA target sequence
tggttgttcctagatcaattcctatta

SEQ ID NO: 34484 - DNA, 27 bp, Artificial sequence
  SiRNA target sequence
ggttgttcctagatcaattcctattat

SEQ ID NO: 34485 - DNA, 27 bp, Artificial sequence
  SiRNA target sequence
gttgttcctagatcaattcctattatt

SEQ ID NO: 34486 - DNA, 27 bp, Artificial sequence
  SiRNA target sequence
ttgttcctagatcaattcctattattt

SEQ ID NO: 34487 - DNA, 27 bp, Artificial sequence
  SiRNA target sequence
tgttcctagatcaattcctattatttt

SEQ ID NO: 34488 - DNA, 27 bp, Artificial sequence
  SiRNA target sequence
gttcctagatcaattcctattatttta

SEQ ID NO: 34489 - DNA, 27 bp, Artificial sequence
  SiRNA target sequence
ttcctagatcaattcctattattttag

SEQ ID NO: 34490 - DNA, 27 bp, Artificial sequence
  SiRNA target sequence
tcctagatcaattcctattattttaga

SEQ ID NO: 34491 - DNA, 27 bp, Artificial sequence
  SiRNA target sequence
cctagatcaattcctattattttagag

SEQ ID NO: 34492 - DNA, 27 bp, Artificial sequence
  SiRNA target sequence
ctagatcaattcctattattttagagc

SEQ ID NO: 34493 - DNA, 27 bp, Artificial sequence
  SiRNA target sequence
tagatcaattcctattattttagagct

SEQ ID NO: 34494 - DNA, 27 bp, Artificial sequence
  SiRNA target sequence
agatcaattcctattattttagagcta

SEQ ID NO: 34495 - DNA, 27 bp, Artificial sequence
  SiRNA target sequence
gatcaattcctattattttagagctaa

SEQ ID NO: 34496 - DNA, 27 bp, Artificial sequence
  SiRNA target sequence
atcaattcctattattttagagctaat

SEQ ID NO: 34497 - DNA, 27 bp, Artificial sequence
  SiRNA target sequence
tcaattcctattattttagagctaatt

SEQ ID NO: 34498 - DNA, 27 bp, Artificial sequence
  SiRNA target sequence
caattcctattattttagagctaattt

SEQ ID NO: 34499 - DNA, 27 bp, Artificial sequence
  SiRNA target sequence
aattcctattattttagagctaatttc

SEQ ID NO: 34500 - DNA, 27 bp, Artificial sequence
  SiRNA target sequence
attcctattattttagagctaatttct

SEQ ID NO: 34501 - DNA, 27 bp, Artificial sequence
  SiRNA target sequence
ttcctattattttagagctaatttctt

SEQ ID NO: 34502 - DNA, 27 bp, Artificial sequence
  SiRNA target sequence
tcctattattttagagctaatttcttc

SEQ ID NO: 34503 - DNA, 27 bp, Artificial sequence
  SiRNA target sequence
cctattattttagagctaatttcttct

SEQ ID NO: 34504 - DNA, 27 bp, Artificial sequence
  SiRNA target sequence
ctattattttagagctaatttcttctt

SEQ ID NO: 34505 - DNA, 27 bp, Artificial sequence
  SiRNA target sequence
tattattttagagctaatttcttcttt

SEQ ID NO: 34506 - DNA, 27 bp, Artificial sequence
  SiRNA target sequence
attattttagagctaatttcttcttta

SEQ ID NO: 34507 - DNA, 27 bp, Artificial sequence
  SiRNA target sequence
ttattttagagctaatttcttctttag

SEQ ID NO: 34508 - DNA, 27 bp, Artificial sequence
  SiRNA target sequence
tattttagagctaatttcttctttaga

SEQ ID NO: 34509 - DNA, 27 bp, Artificial sequence
  SiRNA target sequence
attttagagctaatttcttctttagac

SEQ ID NO: 34510 - DNA, 27 bp, Artificial sequence
  SiRNA target sequence
ttttagagctaatttcttctttagaca

SEQ ID NO: 34511 - DNA, 27 bp, Artificial sequence
  SiRNA target sequence
tttagagctaatttcttctttagacat

SEQ ID NO: 34512 - DNA, 19 bp, Artificial sequence
  SiRNA target sequence
ttataagtttaatgtagaa

SEQ ID NO: 34513 - DNA, 19 bp, Artificial sequence
  SiRNA target sequence
tataagtttaatgtagaaa

SEQ ID NO: 34514 - DNA, 19 bp, Artificial sequence
  SiRNA target sequence
ataagtttaatgtagaaat

SEQ ID NO: 34515 - DNA, 19 bp, Artificial sequence
  SiRNA target sequence
taagtttaatgtagaaata

SEQ ID NO: 34516 - DNA, 19 bp, Artificial sequence
  SiRNA target sequence
aagtttaatgtagaaataa

SEQ ID NO: 34517 - DNA, 19 bp, Artificial sequence
  SiRNA target sequence
agtttaatgtagaaataat

SEQ ID NO: 34518 - DNA, 19 bp, Artificial sequence
  SiRNA target sequence
gtttaatgtagaaataata

SEQ ID NO: 34519 - DNA, 19 bp, Artificial sequence
  SiRNA target sequence
tttaatgtagaaataatat

SEQ ID NO: 34520 - DNA, 19 bp, Artificial sequence
  SiRNA target sequence
ttaatgtagaaataatatt

SEQ ID NO: 34521 - DNA, 19 bp, Artificial sequence
  SiRNA target sequence
taatgtagaaataatattt

SEQ ID NO: 34522 - DNA, 19 bp, Artificial sequence
  SiRNA target sequence
aatgtagaaataatatttt

SEQ ID NO: 34523 - DNA, 19 bp, Artificial sequence
  SiRNA target sequence
atgtagaaataatattttc

SEQ ID NO: 34524 - DNA, 19 bp, Artificial sequence
  SiRNA target sequence
tgtagaaataatattttct

SEQ ID NO: 34525 - DNA, 19 bp, Artificial sequence
  SiRNA target sequence
gtagaaataatattttctt

SEQ ID NO: 34526 - DNA, 19 bp, Artificial sequence
  SiRNA target sequence
tagaaataatattttcttc

SEQ ID NO: 34527 - DNA, 19 bp, Artificial sequence
  SiRNA target sequence
agaaataatattttcttct

SEQ ID NO: 34528 - DNA, 19 bp, Artificial sequence
  SiRNA target sequence
gaaataatattttcttcta

SEQ ID NO: 34529 - DNA, 19 bp, Artificial sequence
  SiRNA target sequence
aaataatattttcttctat

SEQ ID NO: 34530 - DNA, 19 bp, Artificial sequence
  SiRNA target sequence
aataatattttcttctatc

SEQ ID NO: 34531 - DNA, 19 bp, Artificial sequence
  SiRNA target sequence
ataatattttcttctatct

SEQ ID NO: 34532 - DNA, 19 bp, Artificial sequence
  SiRNA target sequence
taatattttcttctatctt

SEQ ID NO: 34533 - DNA, 19 bp, Artificial sequence
  SiRNA target sequence
aatattttcttctatctta

SEQ ID NO: 34534 - DNA, 19 bp, Artificial sequence
  SiRNA target sequence
atattttcttctatcttat

SEQ ID NO: 34535 - DNA, 19 bp, Artificial sequence
  SiRNA target sequence
tattttcttctatcttatg

SEQ ID NO: 34536 - DNA, 19 bp, Artificial sequence
  SiRNA target sequence
attttcttctatcttatgt

SEQ ID NO: 34537 - DNA, 19 bp, Artificial sequence
  SiRNA target sequence
ttttcttctatcttatgta

SEQ ID NO: 34538 - DNA, 19 bp, Artificial sequence
  SiRNA target sequence
tttcttctatcttatgtaa

SEQ ID NO: 34539 - DNA, 19 bp, Artificial sequence
  SiRNA target sequence
ttcttctatcttatgtaat

SEQ ID NO: 34540 - DNA, 19 bp, Artificial sequence
  SiRNA target sequence
tcttctatcttatgtaatg

SEQ ID NO: 34541 - DNA, 19 bp, Artificial sequence
  SiRNA target sequence
cttctatcttatgtaatga

SEQ ID NO: 34542 - DNA, 19 bp, Artificial sequence
  SiRNA target sequence
ttctatcttatgtaatgat

SEQ ID NO: 34543 - DNA, 19 bp, Artificial sequence
  SiRNA target sequence
tctatcttatgtaatgata

SEQ ID NO: 34544 - DNA, 19 bp, Artificial sequence
  SiRNA target sequence
ctatcttatgtaatgatac

SEQ ID NO: 34545 - DNA, 19 bp, Artificial sequence
  SiRNA target sequence
tatcttatgtaatgataca

SEQ ID NO: 34546 - DNA, 19 bp, Artificial sequence
  SiRNA target sequence
atcttatgtaatgatacag

SEQ ID NO: 34547 - DNA, 19 bp, Artificial sequence
  SiRNA target sequence
tcttatgtaatgatacagt

SEQ ID NO: 34548 - DNA, 19 bp, Artificial sequence
  SiRNA target sequence
cttatgtaatgatacagtt

SEQ ID NO: 34549 - DNA, 19 bp, Artificial sequence
  SiRNA target sequence
ttatgtaatgatacagttt

SEQ ID NO: 34550 - DNA, 19 bp, Artificial sequence
  SiRNA target sequence
tatgtaatgatacagtttt

SEQ ID NO: 34551 - DNA, 19 bp, Artificial sequence
  SiRNA target sequence
atgtaatgatacagttttg

SEQ ID NO: 34552 - DNA, 19 bp, Artificial sequence
  SiRNA target sequence
tgtaatgatacagttttgt

SEQ ID NO: 34553 - DNA, 19 bp, Artificial sequence
  SiRNA target sequence
gtaatgatacagttttgtt

SEQ ID NO: 34554 - DNA, 19 bp, Artificial sequence
  SiRNA target sequence
taatgatacagttttgttt

SEQ ID NO: 34555 - DNA, 19 bp, Artificial sequence
  SiRNA target sequence
aatgatacagttttgtttt

SEQ ID NO: 34556 - DNA, 19 bp, Artificial sequence
  SiRNA target sequence
atgatacagttttgttttt

SEQ ID NO: 34557 - DNA, 19 bp, Artificial sequence
  SiRNA target sequence
tgatacagttttgttttta

SEQ ID NO: 34558 - DNA, 19 bp, Artificial sequence
  SiRNA target sequence
gatacagttttgtttttaa

SEQ ID NO: 34559 - DNA, 19 bp, Artificial sequence
  SiRNA target sequence
atacagttttgtttttaat

SEQ ID NO: 34560 - DNA, 19 bp, Artificial sequence
  SiRNA target sequence
tacagttttgtttttaata

SEQ ID NO: 34561 - DNA, 19 bp, Artificial sequence
  SiRNA target sequence
acagttttgtttttaatac

SEQ ID NO: 34562 - DNA, 19 bp, Artificial sequence
  SiRNA target sequence
cagttttgtttttaatact

SEQ ID NO: 34563 - DNA, 19 bp, Artificial sequence
  SiRNA target sequence
agttttgtttttaatactt

SEQ ID NO: 34564 - DNA, 19 bp, Artificial sequence
  SiRNA target sequence
gttttgtttttaatactta

SEQ ID NO: 34565 - DNA, 19 bp, Artificial sequence
  SiRNA target sequence
ttttgtttttaatacttag

SEQ ID NO: 34566 - DNA, 19 bp, Artificial sequence
  SiRNA target sequence
tttgtttttaatacttagc

SEQ ID NO: 34567 - DNA, 19 bp, Artificial sequence
  SiRNA target sequence
ttgtttttaatacttagca

SEQ ID NO: 34568 - DNA, 19 bp, Artificial sequence
  SiRNA target sequence
tgtttttaatacttagcac

SEQ ID NO: 34569 - DNA, 19 bp, Artificial sequence
  SiRNA target sequence
gtttttaatacttagcact

SEQ ID NO: 34570 - DNA, 19 bp, Artificial sequence
  SiRNA target sequence
tttttaatacttagcactt

SEQ ID NO: 34571 - DNA, 19 bp, Artificial sequence
  SiRNA target sequence
ttttaatacttagcacttt

SEQ ID NO: 34572 - DNA, 19 bp, Artificial sequence
  SiRNA target sequence
tttaatacttagcacttta

SEQ ID NO: 34573 - DNA, 19 bp, Artificial sequence
  SiRNA target sequence
ttaatacttagcactttat

SEQ ID NO: 34574 - DNA, 19 bp, Artificial sequence
  SiRNA target sequence
taatacttagcactttatc

SEQ ID NO: 34575 - DNA, 19 bp, Artificial sequence
  SiRNA target sequence
aatacttagcactttatca

SEQ ID NO: 34576 - DNA, 19 bp, Artificial sequence
  SiRNA target sequence
atacttagcactttatcaa

SEQ ID NO: 34577 - DNA, 19 bp, Artificial sequence
  SiRNA target sequence
tacttagcactttatcaaa

SEQ ID NO: 34578 - DNA, 19 bp, Artificial sequence
  SiRNA target sequence
acttagcactttatcaaat

SEQ ID NO: 34579 - DNA, 19 bp, Artificial sequence
  SiRNA target sequence
cttagcactttatcaaata

SEQ ID NO: 34580 - DNA, 19 bp, Artificial sequence
  SiRNA target sequence
ttagcactttatcaaataa

SEQ ID NO: 34581 - DNA, 19 bp, Artificial sequence
  SiRNA target sequence
tagcactttatcaaataag

SEQ ID NO: 34582 - DNA, 19 bp, Artificial sequence
  SiRNA target sequence
agcactttatcaaataagt

SEQ ID NO: 34583 - DNA, 19 bp, Artificial sequence
  SiRNA target sequence
gcactttatcaaataagtg

SEQ ID NO: 34584 - DNA, 19 bp, Artificial sequence
  SiRNA target sequence
cactttatcaaataagtgg

SEQ ID NO: 34585 - DNA, 19 bp, Artificial sequence
  SiRNA target sequence
actttatcaaataagtgga

SEQ ID NO: 34586 - DNA, 19 bp, Artificial sequence
  SiRNA target sequence
ctttatcaaataagtggag

SEQ ID NO: 34587 - DNA, 19 bp, Artificial sequence
  SiRNA target sequence
tttatcaaataagtggagt

SEQ ID NO: 34588 - DNA, 19 bp, Artificial sequence
  SiRNA target sequence
ttatcaaataagtggagta

SEQ ID NO: 34589 - DNA, 19 bp, Artificial sequence
  SiRNA target sequence
tatcaaataagtggagtaa

SEQ ID NO: 34590 - DNA, 19 bp, Artificial sequence
  SiRNA target sequence
atcaaataagtggagtaaa

SEQ ID NO: 34591 - DNA, 19 bp, Artificial sequence
  SiRNA target sequence
tcaaataagtggagtaaat

SEQ ID NO: 34592 - DNA, 19 bp, Artificial sequence
  SiRNA target sequence
caaataagtggagtaaatc

SEQ ID NO: 34593 - DNA, 19 bp, Artificial sequence
  SiRNA target sequence
aaataagtggagtaaatct

SEQ ID NO: 34594 - DNA, 19 bp, Artificial sequence
  SiRNA target sequence
aataagtggagtaaatcta

SEQ ID NO: 34595 - DNA, 19 bp, Artificial sequence
  SiRNA target sequence
ataagtggagtaaatctaa

SEQ ID NO: 34596 - DNA, 19 bp, Artificial sequence
  SiRNA target sequence
taagtggagtaaatctaaa

SEQ ID NO: 34597 - DNA, 19 bp, Artificial sequence
  SiRNA target sequence
aagtggagtaaatctaaat

SEQ ID NO: 34598 - DNA, 19 bp, Artificial sequence
  SiRNA target sequence
agtggagtaaatctaaatt

SEQ ID NO: 34599 - DNA, 19 bp, Artificial sequence
  SiRNA target sequence
gtggagtaaatctaaatta

SEQ ID NO: 34600 - DNA, 19 bp, Artificial sequence
  SiRNA target sequence
tggagtaaatctaaattat

SEQ ID NO: 34601 - DNA, 19 bp, Artificial sequence
  SiRNA target sequence
ggagtaaatctaaattatg

SEQ ID NO: 34602 - DNA, 19 bp, Artificial sequence
  SiRNA target sequence
gagtaaatctaaattatgt

SEQ ID NO: 34603 - DNA, 19 bp, Artificial sequence
  SiRNA target sequence
agtaaatctaaattatgta

SEQ ID NO: 34604 - DNA, 19 bp, Artificial sequence
  SiRNA target sequence
gtaaatctaaattatgtaa

SEQ ID NO: 34605 - DNA, 19 bp, Artificial sequence
  SiRNA target sequence
taaatctaaattatgtaaa

SEQ ID NO: 34606 - DNA, 19 bp, Artificial sequence
  SiRNA target sequence
aaatctaaattatgtaaaa

SEQ ID NO: 34607 - DNA, 19 bp, Artificial sequence
  SiRNA target sequence
aatctaaattatgtaaaac

SEQ ID NO: 34608 - DNA, 19 bp, Artificial sequence
  SiRNA target sequence
atctaaattatgtaaaaca

SEQ ID NO: 34609 - DNA, 19 bp, Artificial sequence
  SiRNA target sequence
tctaaattatgtaaaacaa

SEQ ID NO: 34610 - DNA, 19 bp, Artificial sequence
  SiRNA target sequence
ctaaattatgtaaaacaat

SEQ ID NO: 34611 - DNA, 19 bp, Artificial sequence
  SiRNA target sequence
taaattatgtaaaacaata

SEQ ID NO: 34612 - DNA, 19 bp, Artificial sequence
  SiRNA target sequence
aaattatgtaaaacaataa

SEQ ID NO: 34613 - DNA, 19 bp, Artificial sequence
  SiRNA target sequence
aattatgtaaaacaataat

SEQ ID NO: 34614 - DNA, 19 bp, Artificial sequence
  SiRNA target sequence
attatgtaaaacaataatt

SEQ ID NO: 34615 - DNA, 19 bp, Artificial sequence
  SiRNA target sequence
ttatgtaaaacaataatta

SEQ ID NO: 34616 - DNA, 19 bp, Artificial sequence
  SiRNA target sequence
tatgtaaaacaataattat

SEQ ID NO: 34617 - DNA, 19 bp, Artificial sequence
  SiRNA target sequence
atgtaaaacaataattatc

SEQ ID NO: 34618 - DNA, 19 bp, Artificial sequence
  SiRNA target sequence
tgtaaaacaataattatcg

SEQ ID NO: 34619 - DNA, 19 bp, Artificial sequence
  SiRNA target sequence
gtaaaacaataattatcgt

SEQ ID NO: 34620 - DNA, 19 bp, Artificial sequence
  SiRNA target sequence
taaaacaataattatcgtc

SEQ ID NO: 34621 - DNA, 19 bp, Artificial sequence
  SiRNA target sequence
aaaacaataattatcgtct

SEQ ID NO: 34622 - DNA, 19 bp, Artificial sequence
  SiRNA target sequence
aaacaataattatcgtctt

SEQ ID NO: 34623 - DNA, 19 bp, Artificial sequence
  SiRNA target sequence
aacaataattatcgtcttc

SEQ ID NO: 34624 - DNA, 19 bp, Artificial sequence
  SiRNA target sequence
acaataattatcgtcttct

SEQ ID NO: 34625 - DNA, 19 bp, Artificial sequence
  SiRNA target sequence
caataattatcgtcttctc

SEQ ID NO: 34626 - DNA, 19 bp, Artificial sequence
  SiRNA target sequence
aataattatcgtcttctct

SEQ ID NO: 34627 - DNA, 19 bp, Artificial sequence
  SiRNA target sequence
ataattatcgtcttctcta

SEQ ID NO: 34628 - DNA, 19 bp, Artificial sequence
  SiRNA target sequence
taattatcgtcttctctaa

SEQ ID NO: 34629 - DNA, 19 bp, Artificial sequence
  SiRNA target sequence
aattatcgtcttctctaag

SEQ ID NO: 34630 - DNA, 19 bp, Artificial sequence
  SiRNA target sequence
attatcgtcttctctaagt

SEQ ID NO: 34631 - DNA, 19 bp, Artificial sequence
  SiRNA target sequence
ttatcgtcttctctaagtt

SEQ ID NO: 34632 - DNA, 19 bp, Artificial sequence
  SiRNA target sequence
tatcgtcttctctaagttg

SEQ ID NO: 34633 - DNA, 19 bp, Artificial sequence
  SiRNA target sequence
atcgtcttctctaagttgt

SEQ ID NO: 34634 - DNA, 19 bp, Artificial sequence
  SiRNA target sequence
tcgtcttctctaagttgtt

SEQ ID NO: 34635 - DNA, 19 bp, Artificial sequence
  SiRNA target sequence
cgtcttctctaagttgttg

SEQ ID NO: 34636 - DNA, 19 bp, Artificial sequence
  SiRNA target sequence
gtcttctctaagttgttgg

SEQ ID NO: 34637 - DNA, 19 bp, Artificial sequence
  SiRNA target sequence
tcttctctaagttgttgga

SEQ ID NO: 34638 - DNA, 19 bp, Artificial sequence
  SiRNA target sequence
cttctctaagttgttggag

SEQ ID NO: 34639 - DNA, 19 bp, Artificial sequence
  SiRNA target sequence
ttctctaagttgttggaga

SEQ ID NO: 34640 - DNA, 19 bp, Artificial sequence
  SiRNA target sequence
tctctaagttgttggagat

SEQ ID NO: 34641 - DNA, 19 bp, Artificial sequence
  SiRNA target sequence
ctctaagttgttggagatt

SEQ ID NO: 34642 - DNA, 19 bp, Artificial sequence
  SiRNA target sequence
tctaagttgttggagatta

SEQ ID NO: 34643 - DNA, 19 bp, Artificial sequence
  SiRNA target sequence
ctaagttgttggagattag

SEQ ID NO: 34644 - DNA, 19 bp, Artificial sequence
  SiRNA target sequence
taagttgttggagattaga

SEQ ID NO: 34645 - DNA, 19 bp, Artificial sequence
  SiRNA target sequence
aagttgttggagattagac

SEQ ID NO: 34646 - DNA, 19 bp, Artificial sequence
  SiRNA target sequence
agttgttggagattagact

SEQ ID NO: 34647 - DNA, 19 bp, Artificial sequence
  SiRNA target sequence
gttgttggagattagactt

SEQ ID NO: 34648 - DNA, 19 bp, Artificial sequence
  SiRNA target sequence
ttgttggagattagacttt

SEQ ID NO: 34649 - DNA, 19 bp, Artificial sequence
  SiRNA target sequence
tgttggagattagactttt

SEQ ID NO: 34650 - DNA, 19 bp, Artificial sequence
  SiRNA target sequence
gttggagattagactttta

SEQ ID NO: 34651 - DNA, 19 bp, Artificial sequence
  SiRNA target sequence
ttggagattagacttttaa

SEQ ID NO: 34652 - DNA, 19 bp, Artificial sequence
  SiRNA target sequence
tggagattagacttttaag

SEQ ID NO: 34653 - DNA, 19 bp, Artificial sequence
  SiRNA target sequence
ggagattagacttttaaga

SEQ ID NO: 34654 - DNA, 19 bp, Artificial sequence
  SiRNA target sequence
gagattagacttttaagaa

SEQ ID NO: 34655 - DNA, 19 bp, Artificial sequence
  SiRNA target sequence
agattagacttttaagaat

SEQ ID NO: 34656 - DNA, 19 bp, Artificial sequence
  SiRNA target sequence
gattagacttttaagaatt

SEQ ID NO: 34657 - DNA, 19 bp, Artificial sequence
  SiRNA target sequence
attagacttttaagaattt

SEQ ID NO: 34658 - DNA, 19 bp, Artificial sequence
  SiRNA target sequence
ttagacttttaagaatttc

SEQ ID NO: 34659 - DNA, 19 bp, Artificial sequence
  SiRNA target sequence
tagacttttaagaatttca

SEQ ID NO: 34660 - DNA, 19 bp, Artificial sequence
  SiRNA target sequence
agacttttaagaatttcat

SEQ ID NO: 34661 - DNA, 19 bp, Artificial sequence
  SiRNA target sequence
gacttttaagaatttcata

SEQ ID NO: 34662 - DNA, 19 bp, Artificial sequence
  SiRNA target sequence
acttttaagaatttcatat

SEQ ID NO: 34663 - DNA, 19 bp, Artificial sequence
  SiRNA target sequence
cttttaagaatttcatatt

SEQ ID NO: 34664 - DNA, 19 bp, Artificial sequence
  SiRNA target sequence
ttttaagaatttcatattc

SEQ ID NO: 34665 - DNA, 19 bp, Artificial sequence
  SiRNA target sequence
tttaagaatttcatattca

SEQ ID NO: 34666 - DNA, 19 bp, Artificial sequence
  SiRNA target sequence
ttaagaatttcatattcag

SEQ ID NO: 34667 - DNA, 19 bp, Artificial sequence
  SiRNA target sequence
taagaatttcatattcagc

SEQ ID NO: 34668 - DNA, 19 bp, Artificial sequence
  SiRNA target sequence
aagaatttcatattcagct

SEQ ID NO: 34669 - DNA, 19 bp, Artificial sequence
  SiRNA target sequence
agaatttcatattcagctt

SEQ ID NO: 34670 - DNA, 19 bp, Artificial sequence
  SiRNA target sequence
gaatttcatattcagcttt

SEQ ID NO: 34671 - DNA, 19 bp, Artificial sequence
  SiRNA target sequence
aatttcatattcagctttt

SEQ ID NO: 34672 - DNA, 19 bp, Artificial sequence
  SiRNA target sequence
atttcatattcagcttttt

SEQ ID NO: 34673 - DNA, 19 bp, Artificial sequence
  SiRNA target sequence
tttcatattcagctttttt

SEQ ID NO: 34674 - DNA, 19 bp, Artificial sequence
  SiRNA target sequence
ttcatattcagcttttttg

SEQ ID NO: 34675 - DNA, 19 bp, Artificial sequence
  SiRNA target sequence
tcatattcagcttttttgt

SEQ ID NO: 34676 - DNA, 19 bp, Artificial sequence
  SiRNA target sequence
catattcagcttttttgtc

SEQ ID NO: 34677 - DNA, 19 bp, Artificial sequence
  SiRNA target sequence
atattcagcttttttgtcc

SEQ ID NO: 34678 - DNA, 19 bp, Artificial sequence
  SiRNA target sequence
tattcagcttttttgtcca

SEQ ID NO: 34679 - DNA, 19 bp, Artificial sequence
  SiRNA target sequence
attcagcttttttgtccaa

SEQ ID NO: 34680 - DNA, 19 bp, Artificial sequence
  SiRNA target sequence
ttcagcttttttgtccaat

SEQ ID NO: 34681 - DNA, 19 bp, Artificial sequence
  SiRNA target sequence
tcagcttttttgtccaatg

SEQ ID NO: 34682 - DNA, 19 bp, Artificial sequence
  SiRNA target sequence
cagcttttttgtccaatgc

SEQ ID NO: 34683 - DNA, 19 bp, Artificial sequence
  SiRNA target sequence
agcttttttgtccaatgcg

SEQ ID NO: 34684 - DNA, 19 bp, Artificial sequence
  SiRNA target sequence
gcttttttgtccaatgcgg

SEQ ID NO: 34685 - DNA, 19 bp, Artificial sequence
  SiRNA target sequence
cttttttgtccaatgcggc

SEQ ID NO: 34686 - DNA, 19 bp, Artificial sequence
  SiRNA target sequence
ttttttgtccaatgcggcc

SEQ ID NO: 34687 - DNA, 19 bp, Artificial sequence
  SiRNA target sequence
tttttgtccaatgcggccg

SEQ ID NO: 34688 - DNA, 19 bp, Artificial sequence
  SiRNA target sequence
ttttgtccaatgcggccgt

SEQ ID NO: 34689 - DNA, 19 bp, Artificial sequence
  SiRNA target sequence
tttgtccaatgcggccgtt

SEQ ID NO: 34690 - DNA, 19 bp, Artificial sequence
  SiRNA target sequence
ttgtccaatgcggccgttg

SEQ ID NO: 34691 - DNA, 19 bp, Artificial sequence
  SiRNA target sequence
tgtccaatgcggccgttgg

SEQ ID NO: 34692 - DNA, 19 bp, Artificial sequence
  SiRNA target sequence
gtccaatgcggccgttggc

SEQ ID NO: 34693 - DNA, 19 bp, Artificial sequence
  SiRNA target sequence
tccaatgcggccgttggct

SEQ ID NO: 34694 - DNA, 19 bp, Artificial sequence
  SiRNA target sequence
ccaatgcggccgttggctc

SEQ ID NO: 34695 - DNA, 19 bp, Artificial sequence
  SiRNA target sequence
caatgcggccgttggctca

SEQ ID NO: 34696 - DNA, 19 bp, Artificial sequence
  SiRNA target sequence
aatgcggccgttggctcat

SEQ ID NO: 34697 - DNA, 19 bp, Artificial sequence
  SiRNA target sequence
atgcggccgttggctcatc

SEQ ID NO: 34698 - DNA, 19 bp, Artificial sequence
  SiRNA target sequence
tgcggccgttggctcatct

SEQ ID NO: 34699 - DNA, 19 bp, Artificial sequence
  SiRNA target sequence
gcggccgttggctcatcta

SEQ ID NO: 34700 - DNA, 19 bp, Artificial sequence
  SiRNA target sequence
cggccgttggctcatctaa

SEQ ID NO: 34701 - DNA, 19 bp, Artificial sequence
  SiRNA target sequence
ggccgttggctcatctaaa

SEQ ID NO: 34702 - DNA, 19 bp, Artificial sequence
  SiRNA target sequence
gccgttggctcatctaaaa

SEQ ID NO: 34703 - DNA, 19 bp, Artificial sequence
  SiRNA target sequence
ccgttggctcatctaaaat

SEQ ID NO: 34704 - DNA, 19 bp, Artificial sequence
  SiRNA target sequence
cgttggctcatctaaaatt

SEQ ID NO: 34705 - DNA, 19 bp, Artificial sequence
  SiRNA target sequence
gttggctcatctaaaatta

SEQ ID NO: 34706 - DNA, 19 bp, Artificial sequence
  SiRNA target sequence
ttggctcatctaaaattat

SEQ ID NO: 34707 - DNA, 19 bp, Artificial sequence
  SiRNA target sequence
tggctcatctaaaattata

SEQ ID NO: 34708 - DNA, 19 bp, Artificial sequence
  SiRNA target sequence
ggctcatctaaaattataa

SEQ ID NO: 34709 - DNA, 19 bp, Artificial sequence
  SiRNA target sequence
gctcatctaaaattataat

SEQ ID NO: 34710 - DNA, 19 bp, Artificial sequence
  SiRNA target sequence
ctcatctaaaattataata

SEQ ID NO: 34711 - DNA, 19 bp, Artificial sequence
  SiRNA target sequence
tcatctaaaattataatag

SEQ ID NO: 34712 - DNA, 19 bp, Artificial sequence
  SiRNA target sequence
catctaaaattataatagg

SEQ ID NO: 34713 - DNA, 19 bp, Artificial sequence
  SiRNA target sequence
atctaaaattataatagga

SEQ ID NO: 34714 - DNA, 19 bp, Artificial sequence
  SiRNA target sequence
tctaaaattataataggag

SEQ ID NO: 34715 - DNA, 19 bp, Artificial sequence
  SiRNA target sequence
ctaaaattataataggaga

SEQ ID NO: 34716 - DNA, 19 bp, Artificial sequence
  SiRNA target sequence
taaaattataataggagaa

SEQ ID NO: 34717 - DNA, 19 bp, Artificial sequence
  SiRNA target sequence
aaaattataataggagaat

SEQ ID NO: 34718 - DNA, 19 bp, Artificial sequence
  SiRNA target sequence
aaattataataggagaatt

SEQ ID NO: 34719 - DNA, 19 bp, Artificial sequence
  SiRNA target sequence
aattataataggagaattt

SEQ ID NO: 34720 - DNA, 19 bp, Artificial sequence
  SiRNA target sequence
attataataggagaatttt

SEQ ID NO: 34721 - DNA, 19 bp, Artificial sequence
  SiRNA target sequence
ttataataggagaattttt

SEQ ID NO: 34722 - DNA, 19 bp, Artificial sequence
  SiRNA target sequence
tataataggagaatttttt

SEQ ID NO: 34723 - DNA, 19 bp, Artificial sequence
  SiRNA target sequence
ataataggagaatttttta

SEQ ID NO: 34724 - DNA, 19 bp, Artificial sequence
  SiRNA target sequence
taataggagaattttttag

SEQ ID NO: 34725 - DNA, 19 bp, Artificial sequence
  SiRNA target sequence
aataggagaattttttagt

SEQ ID NO: 34726 - DNA, 19 bp, Artificial sequence
  SiRNA target sequence
ataggagaattttttagtg

SEQ ID NO: 34727 - DNA, 19 bp, Artificial sequence
  SiRNA target sequence
taggagaattttttagtgc

SEQ ID NO: 34728 - DNA, 19 bp, Artificial sequence
  SiRNA target sequence
aggagaattttttagtgcc

SEQ ID NO: 34729 - DNA, 19 bp, Artificial sequence
  SiRNA target sequence
ggagaattttttagtgccg

SEQ ID NO: 34730 - DNA, 19 bp, Artificial sequence
  SiRNA target sequence
gagaattttttagtgccga

SEQ ID NO: 34731 - DNA, 19 bp, Artificial sequence
  SiRNA target sequence
agaattttttagtgccgac

SEQ ID NO: 34732 - DNA, 19 bp, Artificial sequence
  SiRNA target sequence
gaattttttagtgccgacc

SEQ ID NO: 34733 - DNA, 19 bp, Artificial sequence
  SiRNA target sequence
aattttttagtgccgacct

SEQ ID NO: 34734 - DNA, 19 bp, Artificial sequence
  SiRNA target sequence
attttttagtgccgacctt

SEQ ID NO: 34735 - DNA, 19 bp, Artificial sequence
  SiRNA target sequence
ttttttagtgccgacctta

SEQ ID NO: 34736 - DNA, 19 bp, Artificial sequence
  SiRNA target sequence
tttttagtgccgaccttaa

SEQ ID NO: 34737 - DNA, 19 bp, Artificial sequence
  SiRNA target sequence
ttttagtgccgaccttaac

SEQ ID NO: 34738 - DNA, 19 bp, Artificial sequence
  SiRNA target sequence
tttagtgccgaccttaaca

SEQ ID NO: 34739 - DNA, 19 bp, Artificial sequence
  SiRNA target sequence
ttagtgccgaccttaacaa

SEQ ID NO: 34740 - DNA, 19 bp, Artificial sequence
  SiRNA target sequence
tagtgccgaccttaacaaa

SEQ ID NO: 34741 - DNA, 19 bp, Artificial sequence
  SiRNA target sequence
agtgccgaccttaacaaaa

SEQ ID NO: 34742 - DNA, 19 bp, Artificial sequence
  SiRNA target sequence
gtgccgaccttaacaaaat

SEQ ID NO: 34743 - DNA, 19 bp, Artificial sequence
  SiRNA target sequence
tgccgaccttaacaaaatt

SEQ ID NO: 34744 - DNA, 19 bp, Artificial sequence
  SiRNA target sequence
gccgaccttaacaaaatta

SEQ ID NO: 34745 - DNA, 19 bp, Artificial sequence
  SiRNA target sequence
ccgaccttaacaaaattac

SEQ ID NO: 34746 - DNA, 19 bp, Artificial sequence
  SiRNA target sequence
cgaccttaacaaaattact

SEQ ID NO: 34747 - DNA, 19 bp, Artificial sequence
  SiRNA target sequence
gaccttaacaaaattactt

SEQ ID NO: 34748 - DNA, 19 bp, Artificial sequence
  SiRNA target sequence
accttaacaaaattacttt

SEQ ID NO: 34749 - DNA, 19 bp, Artificial sequence
  SiRNA target sequence
ccttaacaaaattactttt

SEQ ID NO: 34750 - DNA, 19 bp, Artificial sequence
  SiRNA target sequence
cttaacaaaattacttttt

SEQ ID NO: 34751 - DNA, 19 bp, Artificial sequence
  SiRNA target sequence
ttaacaaaattactttttg

SEQ ID NO: 34752 - DNA, 19 bp, Artificial sequence
  SiRNA target sequence
taacaaaattactttttgt

SEQ ID NO: 34753 - DNA, 19 bp, Artificial sequence
  SiRNA target sequence
aacaaaattactttttgtc

SEQ ID NO: 34754 - DNA, 19 bp, Artificial sequence
  SiRNA target sequence
acaaaattactttttgtct

SEQ ID NO: 34755 - DNA, 19 bp, Artificial sequence
  SiRNA target sequence
caaaattactttttgtctt

SEQ ID NO: 34756 - DNA, 19 bp, Artificial sequence
  SiRNA target sequence
aaaattactttttgtcttt

SEQ ID NO: 34757 - DNA, 19 bp, Artificial sequence
  SiRNA target sequence
aaattactttttgtctttc

SEQ ID NO: 34758 - DNA, 19 bp, Artificial sequence
  SiRNA target sequence
aattactttttgtctttct

SEQ ID NO: 34759 - DNA, 19 bp, Artificial sequence
  SiRNA target sequence
attactttttgtctttctc

SEQ ID NO: 34760 - DNA, 19 bp, Artificial sequence
  SiRNA target sequence
ttactttttgtctttctcc

SEQ ID NO: 34761 - DNA, 19 bp, Artificial sequence
  SiRNA target sequence
tactttttgtctttctcca

SEQ ID NO: 34762 - DNA, 19 bp, Artificial sequence
  SiRNA target sequence
actttttgtctttctccac

SEQ ID NO: 34763 - DNA, 19 bp, Artificial sequence
  SiRNA target sequence
ctttttgtctttctccacc

SEQ ID NO: 34764 - DNA, 19 bp, Artificial sequence
  SiRNA target sequence
tttttgtctttctccacca

SEQ ID NO: 34765 - DNA, 19 bp, Artificial sequence
  SiRNA target sequence
ttttgtctttctccaccac

SEQ ID NO: 34766 - DNA, 19 bp, Artificial sequence
  SiRNA target sequence
tttgtctttctccaccact

SEQ ID NO: 34767 - DNA, 19 bp, Artificial sequence
  SiRNA target sequence
ttgtctttctccaccacta

SEQ ID NO: 34768 - DNA, 19 bp, Artificial sequence
  SiRNA target sequence
tgtctttctccaccactaa

SEQ ID NO: 34769 - DNA, 19 bp, Artificial sequence
  SiRNA target sequence
gtctttctccaccactaag

SEQ ID NO: 34770 - DNA, 19 bp, Artificial sequence
  SiRNA target sequence
tctttctccaccactaagc

SEQ ID NO: 34771 - DNA, 19 bp, Artificial sequence
  SiRNA target sequence
ctttctccaccactaagct

SEQ ID NO: 34772 - DNA, 19 bp, Artificial sequence
  SiRNA target sequence
tttctccaccactaagctt

SEQ ID NO: 34773 - DNA, 19 bp, Artificial sequence
  SiRNA target sequence
ttctccaccactaagctta

SEQ ID NO: 34774 - DNA, 19 bp, Artificial sequence
  SiRNA target sequence
tctccaccactaagcttat

SEQ ID NO: 34775 - DNA, 19 bp, Artificial sequence
  SiRNA target sequence
ctccaccactaagcttatg

SEQ ID NO: 34776 - DNA, 19 bp, Artificial sequence
  SiRNA target sequence
tccaccactaagcttatgt

SEQ ID NO: 34777 - DNA, 19 bp, Artificial sequence
  SiRNA target sequence
ccaccactaagcttatgtc

SEQ ID NO: 34778 - DNA, 19 bp, Artificial sequence
  SiRNA target sequence
caccactaagcttatgtcc

SEQ ID NO: 34779 - DNA, 19 bp, Artificial sequence
  SiRNA target sequence
accactaagcttatgtccc

SEQ ID NO: 34780 - DNA, 19 bp, Artificial sequence
  SiRNA target sequence
ccactaagcttatgtccct

SEQ ID NO: 34781 - DNA, 19 bp, Artificial sequence
  SiRNA target sequence
cactaagcttatgtccctt

SEQ ID NO: 34782 - DNA, 19 bp, Artificial sequence
  SiRNA target sequence
actaagcttatgtccctta

SEQ ID NO: 34783 - DNA, 19 bp, Artificial sequence
  SiRNA target sequence
ctaagcttatgtcccttat

SEQ ID NO: 34784 - DNA, 19 bp, Artificial sequence
  SiRNA target sequence
taagcttatgtcccttatc

SEQ ID NO: 34785 - DNA, 19 bp, Artificial sequence
  SiRNA target sequence
aagcttatgtcccttatct

SEQ ID NO: 34786 - DNA, 19 bp, Artificial sequence
  SiRNA target sequence
agcttatgtcccttatctc

SEQ ID NO: 34787 - DNA, 19 bp, Artificial sequence
  SiRNA target sequence
gcttatgtcccttatctcc

SEQ ID NO: 34788 - DNA, 19 bp, Artificial sequence
  SiRNA target sequence
cttatgtcccttatctcca

SEQ ID NO: 34789 - DNA, 19 bp, Artificial sequence
  SiRNA target sequence
ttatgtcccttatctccaa

SEQ ID NO: 34790 - DNA, 19 bp, Artificial sequence
  SiRNA target sequence
tatgtcccttatctccaac

SEQ ID NO: 34791 - DNA, 19 bp, Artificial sequence
  SiRNA target sequence
atgtcccttatctccaaca

SEQ ID NO: 34792 - DNA, 19 bp, Artificial sequence
  SiRNA target sequence
tgtcccttatctccaacat

SEQ ID NO: 34793 - DNA, 19 bp, Artificial sequence
  SiRNA target sequence
gtcccttatctccaacatg

SEQ ID NO: 34794 - DNA, 19 bp, Artificial sequence
  SiRNA target sequence
tcccttatctccaacatgt

SEQ ID NO: 34795 - DNA, 19 bp, Artificial sequence
  SiRNA target sequence
cccttatctccaacatgtg

SEQ ID NO: 34796 - DNA, 19 bp, Artificial sequence
  SiRNA target sequence
ccttatctccaacatgtgt

SEQ ID NO: 34797 - DNA, 19 bp, Artificial sequence
  SiRNA target sequence
cttatctccaacatgtgtg

SEQ ID NO: 34798 - DNA, 19 bp, Artificial sequence
  SiRNA target sequence
ttatctccaacatgtgtgt

SEQ ID NO: 34799 - DNA, 19 bp, Artificial sequence
  SiRNA target sequence
tatctccaacatgtgtgtt

SEQ ID NO: 34800 - DNA, 19 bp, Artificial sequence
  SiRNA target sequence
atctccaacatgtgtgttg

SEQ ID NO: 34801 - DNA, 19 bp, Artificial sequence
  SiRNA target sequence
tctccaacatgtgtgttgt

SEQ ID NO: 34802 - DNA, 19 bp, Artificial sequence
  SiRNA target sequence
ctccaacatgtgtgttgta

SEQ ID NO: 34803 - DNA, 19 bp, Artificial sequence
  SiRNA target sequence
tccaacatgtgtgttgtat

SEQ ID NO: 34804 - DNA, 19 bp, Artificial sequence
  SiRNA target sequence
ccaacatgtgtgttgtatt

SEQ ID NO: 34805 - DNA, 19 bp, Artificial sequence
  SiRNA target sequence
caacatgtgtgttgtattc

SEQ ID NO: 34806 - DNA, 19 bp, Artificial sequence
  SiRNA target sequence
aacatgtgtgttgtattca

SEQ ID NO: 34807 - DNA, 19 bp, Artificial sequence
  SiRNA target sequence
acatgtgtgttgtattcat

SEQ ID NO: 34808 - DNA, 19 bp, Artificial sequence
  SiRNA target sequence
catgtgtgttgtattcatc

SEQ ID NO: 34809 - DNA, 19 bp, Artificial sequence
  SiRNA target sequence
atgtgtgttgtattcatcc

SEQ ID NO: 34810 - DNA, 19 bp, Artificial sequence
  SiRNA target sequence
tgtgtgttgtattcatcct

SEQ ID NO: 34811 - DNA, 19 bp, Artificial sequence
  SiRNA target sequence
gtgtgttgtattcatcctc

SEQ ID NO: 34812 - DNA, 19 bp, Artificial sequence
  SiRNA target sequence
tgtgttgtattcatcctct

SEQ ID NO: 34813 - DNA, 19 bp, Artificial sequence
  SiRNA target sequence
gtgttgtattcatcctcta

SEQ ID NO: 34814 - DNA, 19 bp, Artificial sequence
  SiRNA target sequence
tgttgtattcatcctctag

SEQ ID NO: 34815 - DNA, 19 bp, Artificial sequence
  SiRNA target sequence
gttgtattcatcctctagg

SEQ ID NO: 34816 - DNA, 19 bp, Artificial sequence
  SiRNA target sequence
ttgtattcatcctctaggt

SEQ ID NO: 34817 - DNA, 19 bp, Artificial sequence
  SiRNA target sequence
tgtattcatcctctaggtt

SEQ ID NO: 34818 - DNA, 19 bp, Artificial sequence
  SiRNA target sequence
gtattcatcctctaggttg

SEQ ID NO: 34819 - DNA, 19 bp, Artificial sequence
  SiRNA target sequence
tattcatcctctaggttgt

SEQ ID NO: 34820 - DNA, 19 bp, Artificial sequence
  SiRNA target sequence
attcatcctctaggttgtt

SEQ ID NO: 34821 - DNA, 19 bp, Artificial sequence
  SiRNA target sequence
ttcatcctctaggttgttt

SEQ ID NO: 34822 - DNA, 19 bp, Artificial sequence
  SiRNA target sequence
tcatcctctaggttgttta

SEQ ID NO: 34823 - DNA, 19 bp, Artificial sequence
  SiRNA target sequence
catcctctaggttgtttat

SEQ ID NO: 34824 - DNA, 19 bp, Artificial sequence
  SiRNA target sequence
atcctctaggttgtttata

SEQ ID NO: 34825 - DNA, 19 bp, Artificial sequence
  SiRNA target sequence
tcctctaggttgtttatag

SEQ ID NO: 34826 - DNA, 19 bp, Artificial sequence
  SiRNA target sequence
cctctaggttgtttataga

SEQ ID NO: 34827 - DNA, 19 bp, Artificial sequence
  SiRNA target sequence
ctctaggttgtttatagaa

SEQ ID NO: 34828 - DNA, 19 bp, Artificial sequence
  SiRNA target sequence
tctaggttgtttatagaat

SEQ ID NO: 34829 - DNA, 19 bp, Artificial sequence
  SiRNA target sequence
ctaggttgtttatagaatc

SEQ ID NO: 34830 - DNA, 19 bp, Artificial sequence
  SiRNA target sequence
taggttgtttatagaatcg

SEQ ID NO: 34831 - DNA, 19 bp, Artificial sequence
  SiRNA target sequence
aggttgtttatagaatcgt

SEQ ID NO: 34832 - DNA, 19 bp, Artificial sequence
  SiRNA target sequence
ggttgtttatagaatcgtg

SEQ ID NO: 34833 - DNA, 19 bp, Artificial sequence
  SiRNA target sequence
gttgtttatagaatcgtgt

SEQ ID NO: 34834 - DNA, 19 bp, Artificial sequence
  SiRNA target sequence
ttgtttatagaatcgtgta

SEQ ID NO: 34835 - DNA, 19 bp, Artificial sequence
  SiRNA target sequence
tgtttatagaatcgtgtac

SEQ ID NO: 34836 - DNA, 19 bp, Artificial sequence
  SiRNA target sequence
gtttatagaatcgtgtaca

SEQ ID NO: 34837 - DNA, 19 bp, Artificial sequence
  SiRNA target sequence
tttatagaatcgtgtacac

SEQ ID NO: 34838 - DNA, 19 bp, Artificial sequence
  SiRNA target sequence
ttatagaatcgtgtacaca

SEQ ID NO: 34839 - DNA, 19 bp, Artificial sequence
  SiRNA target sequence
tatagaatcgtgtacacaa

SEQ ID NO: 34840 - DNA, 19 bp, Artificial sequence
  SiRNA target sequence
atagaatcgtgtacacaaa

SEQ ID NO: 34841 - DNA, 19 bp, Artificial sequence
  SiRNA target sequence
tagaatcgtgtacacaaag

SEQ ID NO: 34842 - DNA, 19 bp, Artificial sequence
  SiRNA target sequence
agaatcgtgtacacaaagt

SEQ ID NO: 34843 - DNA, 19 bp, Artificial sequence
  SiRNA target sequence
gaatcgtgtacacaaagtt

SEQ ID NO: 34844 - DNA, 19 bp, Artificial sequence
  SiRNA target sequence
aatcgtgtacacaaagttt

SEQ ID NO: 34845 - DNA, 19 bp, Artificial sequence
  SiRNA target sequence
atcgtgtacacaaagtttt

SEQ ID NO: 34846 - DNA, 19 bp, Artificial sequence
  SiRNA target sequence
tcgtgtacacaaagttttt

SEQ ID NO: 34847 - DNA, 19 bp, Artificial sequence
  SiRNA target sequence
cgtgtacacaaagtttttt

SEQ ID NO: 34848 - DNA, 19 bp, Artificial sequence
  SiRNA target sequence
gtgtacacaaagtttttta

SEQ ID NO: 34849 - DNA, 19 bp, Artificial sequence
  SiRNA target sequence
tgtacacaaagttttttac

SEQ ID NO: 34850 - DNA, 19 bp, Artificial sequence
  SiRNA target sequence
gtacacaaagttttttact

SEQ ID NO: 34851 - DNA, 19 bp, Artificial sequence
  SiRNA target sequence
tacacaaagttttttactg

SEQ ID NO: 34852 - DNA, 19 bp, Artificial sequence
  SiRNA target sequence
acacaaagttttttactga

SEQ ID NO: 34853 - DNA, 19 bp, Artificial sequence
  SiRNA target sequence
cacaaagttttttactgat

SEQ ID NO: 34854 - DNA, 19 bp, Artificial sequence
  SiRNA target sequence
acaaagttttttactgatt

SEQ ID NO: 34855 - DNA, 19 bp, Artificial sequence
  SiRNA target sequence
caaagttttttactgattt

SEQ ID NO: 34856 - DNA, 19 bp, Artificial sequence
  SiRNA target sequence
aaagttttttactgatttt

SEQ ID NO: 34857 - DNA, 19 bp, Artificial sequence
  SiRNA target sequence
aagttttttactgattttt

SEQ ID NO: 34858 - DNA, 19 bp, Artificial sequence
  SiRNA target sequence
agttttttactgattttta

SEQ ID NO: 34859 - DNA, 19 bp, Artificial sequence
  SiRNA target sequence
gttttttactgatttttat

SEQ ID NO: 34860 - DNA, 19 bp, Artificial sequence
  SiRNA target sequence
ttttttactgatttttata

SEQ ID NO: 34861 - DNA, 19 bp, Artificial sequence
  SiRNA target sequence
tttttactgatttttataa

SEQ ID NO: 34862 - DNA, 19 bp, Artificial sequence
  SiRNA target sequence
ttttactgatttttataac

SEQ ID NO: 34863 - DNA, 19 bp, Artificial sequence
  SiRNA target sequence
tttactgatttttataact

SEQ ID NO: 34864 - DNA, 19 bp, Artificial sequence
  SiRNA target sequence
ttactgatttttataactt

SEQ ID NO: 34865 - DNA, 19 bp, Artificial sequence
  SiRNA target sequence
tactgatttttataacttc

SEQ ID NO: 34866 - DNA, 19 bp, Artificial sequence
  SiRNA target sequence
actgatttttataacttct

SEQ ID NO: 34867 - DNA, 19 bp, Artificial sequence
  SiRNA target sequence
ctgatttttataacttctt

SEQ ID NO: 34868 - DNA, 19 bp, Artificial sequence
  SiRNA target sequence
tgatttttataacttcttc

SEQ ID NO: 34869 - DNA, 19 bp, Artificial sequence
  SiRNA target sequence
gatttttataacttcttct

SEQ ID NO: 34870 - DNA, 19 bp, Artificial sequence
  SiRNA target sequence
atttttataacttcttctt

SEQ ID NO: 34871 - DNA, 19 bp, Artificial sequence
  SiRNA target sequence
tttttataacttcttcttt

SEQ ID NO: 34872 - DNA, 19 bp, Artificial sequence
  SiRNA target sequence
ttttataacttcttcttta

SEQ ID NO: 34873 - DNA, 19 bp, Artificial sequence
  SiRNA target sequence
tttataacttcttctttat

SEQ ID NO: 34874 - DNA, 19 bp, Artificial sequence
  SiRNA target sequence
ttataacttcttctttatc

SEQ ID NO: 34875 - DNA, 19 bp, Artificial sequence
  SiRNA target sequence
tataacttcttctttatca

SEQ ID NO: 34876 - DNA, 19 bp, Artificial sequence
  SiRNA target sequence
ataacttcttctttatcaa

SEQ ID NO: 34877 - DNA, 19 bp, Artificial sequence
  SiRNA target sequence
taacttcttctttatcaaa

SEQ ID NO: 34878 - DNA, 19 bp, Artificial sequence
  SiRNA target sequence
aacttcttctttatcaaat

SEQ ID NO: 34879 - DNA, 19 bp, Artificial sequence
  SiRNA target sequence
acttcttctttatcaaata

SEQ ID NO: 34880 - DNA, 19 bp, Artificial sequence
  SiRNA target sequence
cttcttctttatcaaatat

SEQ ID NO: 34881 - DNA, 19 bp, Artificial sequence
  SiRNA target sequence
ttcttctttatcaaatatt

SEQ ID NO: 34882 - DNA, 19 bp, Artificial sequence
  SiRNA target sequence
tcttctttatcaaatattt

SEQ ID NO: 34883 - DNA, 19 bp, Artificial sequence
  SiRNA target sequence
cttctttatcaaatatttc

SEQ ID NO: 34884 - DNA, 19 bp, Artificial sequence
  SiRNA target sequence
ttctttatcaaatatttct

SEQ ID NO: 34885 - DNA, 19 bp, Artificial sequence
  SiRNA target sequence
tctttatcaaatatttctt

SEQ ID NO: 34886 - DNA, 19 bp, Artificial sequence
  SiRNA target sequence
ctttatcaaatatttcttt

SEQ ID NO: 34887 - DNA, 19 bp, Artificial sequence
  SiRNA target sequence
tttatcaaatatttctttt

SEQ ID NO: 34888 - DNA, 19 bp, Artificial sequence
  SiRNA target sequence
ttatcaaatatttcttttc

SEQ ID NO: 34889 - DNA, 19 bp, Artificial sequence
  SiRNA target sequence
tatcaaatatttcttttcc

SEQ ID NO: 34890 - DNA, 19 bp, Artificial sequence
  SiRNA target sequence
atcaaatatttcttttcca

SEQ ID NO: 34891 - DNA, 19 bp, Artificial sequence
  SiRNA target sequence
tcaaatatttcttttccat

SEQ ID NO: 34892 - DNA, 19 bp, Artificial sequence
  SiRNA target sequence
caaatatttcttttccata

SEQ ID NO: 34893 - DNA, 19 bp, Artificial sequence
  SiRNA target sequence
aaatatttcttttccatat

SEQ ID NO: 34894 - DNA, 19 bp, Artificial sequence
  SiRNA target sequence
aatatttcttttccatatg

SEQ ID NO: 34895 - DNA, 19 bp, Artificial sequence
  SiRNA target sequence
atatttcttttccatatgt

SEQ ID NO: 34896 - DNA, 19 bp, Artificial sequence
  SiRNA target sequence
tatttcttttccatatgtt

SEQ ID NO: 34897 - DNA, 19 bp, Artificial sequence
  SiRNA target sequence
atttcttttccatatgtta

SEQ ID NO: 34898 - DNA, 19 bp, Artificial sequence
  SiRNA target sequence
tttcttttccatatgttaa

SEQ ID NO: 34899 - DNA, 19 bp, Artificial sequence
  SiRNA target sequence
ttcttttccatatgttaaa

SEQ ID NO: 34900 - DNA, 19 bp, Artificial sequence
  SiRNA target sequence
tcttttccatatgttaaat

SEQ ID NO: 34901 - DNA, 19 bp, Artificial sequence
  SiRNA target sequence
cttttccatatgttaaatt

SEQ ID NO: 34902 - DNA, 19 bp, Artificial sequence
  SiRNA target sequence
ttttccatatgttaaatta

SEQ ID NO: 34903 - DNA, 19 bp, Artificial sequence
  SiRNA target sequence
tttccatatgttaaattat

SEQ ID NO: 34904 - DNA, 19 bp, Artificial sequence
  SiRNA target sequence
ttccatatgttaaattata

SEQ ID NO: 34905 - DNA, 19 bp, Artificial sequence
  SiRNA target sequence
tccatatgttaaattataa

SEQ ID NO: 34906 - DNA, 19 bp, Artificial sequence
  SiRNA target sequence
ccatatgttaaattataat

SEQ ID NO: 34907 - DNA, 19 bp, Artificial sequence
  SiRNA target sequence
catatgttaaattataata

SEQ ID NO: 34908 - DNA, 19 bp, Artificial sequence
  SiRNA target sequence
atatgttaaattataataa

SEQ ID NO: 34909 - DNA, 19 bp, Artificial sequence
  SiRNA target sequence
tatgttaaattataataaa

SEQ ID NO: 34910 - DNA, 19 bp, Artificial sequence
  SiRNA target sequence
atgttaaattataataaac

SEQ ID NO: 34911 - DNA, 19 bp, Artificial sequence
  SiRNA target sequence
tgttaaattataataaacc

SEQ ID NO: 34912 - DNA, 19 bp, Artificial sequence
  SiRNA target sequence
gttaaattataataaaccg

SEQ ID NO: 34913 - DNA, 19 bp, Artificial sequence
  SiRNA target sequence
ttaaattataataaaccgt

SEQ ID NO: 34914 - DNA, 19 bp, Artificial sequence
  SiRNA target sequence
taaattataataaaccgtt

SEQ ID NO: 34915 - DNA, 19 bp, Artificial sequence
  SiRNA target sequence
aaattataataaaccgttt

SEQ ID NO: 34916 - DNA, 19 bp, Artificial sequence
  SiRNA target sequence
aattataataaaccgtttc

SEQ ID NO: 34917 - DNA, 19 bp, Artificial sequence
  SiRNA target sequence
attataataaaccgtttcg

SEQ ID NO: 34918 - DNA, 19 bp, Artificial sequence
  SiRNA target sequence
ttataataaaccgtttcgt

SEQ ID NO: 34919 - DNA, 19 bp, Artificial sequence
  SiRNA target sequence
tataataaaccgtttcgtt

SEQ ID NO: 34920 - DNA, 19 bp, Artificial sequence
  SiRNA target sequence
ataataaaccgtttcgtta

SEQ ID NO: 34921 - DNA, 19 bp, Artificial sequence
  SiRNA target sequence
taataaaccgtttcgttaa

SEQ ID NO: 34922 - DNA, 19 bp, Artificial sequence
  SiRNA target sequence
aataaaccgtttcgttaaa

SEQ ID NO: 34923 - DNA, 19 bp, Artificial sequence
  SiRNA target sequence
ataaaccgtttcgttaaac

SEQ ID NO: 34924 - DNA, 19 bp, Artificial sequence
  SiRNA target sequence
taaaccgtttcgttaaaca

SEQ ID NO: 34925 - DNA, 19 bp, Artificial sequence
  SiRNA target sequence
aaaccgtttcgttaaacaa

SEQ ID NO: 34926 - DNA, 19 bp, Artificial sequence
  SiRNA target sequence
aaccgtttcgttaaacaaa

SEQ ID NO: 34927 - DNA, 19 bp, Artificial sequence
  SiRNA target sequence
accgtttcgttaaacaaaa

SEQ ID NO: 34928 - DNA, 19 bp, Artificial sequence
  SiRNA target sequence
ccgtttcgttaaacaaaaa

SEQ ID NO: 34929 - DNA, 19 bp, Artificial sequence
  SiRNA target sequence
cgtttcgttaaacaaaaat

SEQ ID NO: 34930 - DNA, 19 bp, Artificial sequence
  SiRNA target sequence
gtttcgttaaacaaaaatg

SEQ ID NO: 34931 - DNA, 19 bp, Artificial sequence
  SiRNA target sequence
tttcgttaaacaaaaatga

SEQ ID NO: 34932 - DNA, 19 bp, Artificial sequence
  SiRNA target sequence
ttcgttaaacaaaaatgag

SEQ ID NO: 34933 - DNA, 19 bp, Artificial sequence
  SiRNA target sequence
tcgttaaacaaaaatgagg

SEQ ID NO: 34934 - DNA, 19 bp, Artificial sequence
  SiRNA target sequence
cgttaaacaaaaatgaggt

SEQ ID NO: 34935 - DNA, 19 bp, Artificial sequence
  SiRNA target sequence
gttaaacaaaaatgaggtt

SEQ ID NO: 34936 - DNA, 19 bp, Artificial sequence
  SiRNA target sequence
ttaaacaaaaatgaggttt

SEQ ID NO: 34937 - DNA, 19 bp, Artificial sequence
  SiRNA target sequence
taaacaaaaatgaggtttg

SEQ ID NO: 34938 - DNA, 19 bp, Artificial sequence
  SiRNA target sequence
aaacaaaaatgaggtttgt

SEQ ID NO: 34939 - DNA, 19 bp, Artificial sequence
  SiRNA target sequence
aacaaaaatgaggtttgtg

SEQ ID NO: 34940 - DNA, 19 bp, Artificial sequence
  SiRNA target sequence
acaaaaatgaggtttgtgg

SEQ ID NO: 34941 - DNA, 19 bp, Artificial sequence
  SiRNA target sequence
caaaaatgaggtttgtggt

SEQ ID NO: 34942 - DNA, 19 bp, Artificial sequence
  SiRNA target sequence
aaaaatgaggtttgtggtg

SEQ ID NO: 34943 - DNA, 19 bp, Artificial sequence
  SiRNA target sequence
aaaatgaggtttgtggtgc

SEQ ID NO: 34944 - DNA, 19 bp, Artificial sequence
  SiRNA target sequence
aaatgaggtttgtggtgca

SEQ ID NO: 34945 - DNA, 19 bp, Artificial sequence
  SiRNA target sequence
aatgaggtttgtggtgcaa

SEQ ID NO: 34946 - DNA, 19 bp, Artificial sequence
  SiRNA target sequence
atgaggtttgtggtgcaaa

SEQ ID NO: 34947 - DNA, 19 bp, Artificial sequence
  SiRNA target sequence
tgaggtttgtggtgcaaat

SEQ ID NO: 34948 - DNA, 19 bp, Artificial sequence
  SiRNA target sequence
gaggtttgtggtgcaaatg

SEQ ID NO: 34949 - DNA, 19 bp, Artificial sequence
  SiRNA target sequence
aggtttgtggtgcaaatga

SEQ ID NO: 34950 - DNA, 19 bp, Artificial sequence
  SiRNA target sequence
ggtttgtggtgcaaatgat

SEQ ID NO: 34951 - DNA, 19 bp, Artificial sequence
  SiRNA target sequence
gtttgtggtgcaaatgata

SEQ ID NO: 34952 - DNA, 19 bp, Artificial sequence
  SiRNA target sequence
tttgtggtgcaaatgatat

SEQ ID NO: 34953 - DNA, 19 bp, Artificial sequence
  SiRNA target sequence
ttgtggtgcaaatgatata

SEQ ID NO: 34954 - DNA, 19 bp, Artificial sequence
  SiRNA target sequence
tgtggtgcaaatgatataa

SEQ ID NO: 34955 - DNA, 19 bp, Artificial sequence
  SiRNA target sequence
gtggtgcaaatgatataag

SEQ ID NO: 34956 - DNA, 19 bp, Artificial sequence
  SiRNA target sequence
tggtgcaaatgatataagt

SEQ ID NO: 34957 - DNA, 19 bp, Artificial sequence
  SiRNA target sequence
ggtgcaaatgatataagtg

SEQ ID NO: 34958 - DNA, 19 bp, Artificial sequence
  SiRNA target sequence
gtgcaaatgatataagtga

SEQ ID NO: 34959 - DNA, 19 bp, Artificial sequence
  SiRNA target sequence
tgcaaatgatataagtgat

SEQ ID NO: 34960 - DNA, 19 bp, Artificial sequence
  SiRNA target sequence
gcaaatgatataagtgatc

SEQ ID NO: 34961 - DNA, 19 bp, Artificial sequence
  SiRNA target sequence
caaatgatataagtgatct

SEQ ID NO: 34962 - DNA, 19 bp, Artificial sequence
  SiRNA target sequence
aaatgatataagtgatcta

SEQ ID NO: 34963 - DNA, 19 bp, Artificial sequence
  SiRNA target sequence
aatgatataagtgatctat

SEQ ID NO: 34964 - DNA, 19 bp, Artificial sequence
  SiRNA target sequence
atgatataagtgatctata

SEQ ID NO: 34965 - DNA, 19 bp, Artificial sequence
  SiRNA target sequence
tgatataagtgatctatat

SEQ ID NO: 34966 - DNA, 19 bp, Artificial sequence
  SiRNA target sequence
gatataagtgatctatatg

SEQ ID NO: 34967 - DNA, 19 bp, Artificial sequence
  SiRNA target sequence
atataagtgatctatatga

SEQ ID NO: 34968 - DNA, 19 bp, Artificial sequence
  SiRNA target sequence
tataagtgatctatatgaa

SEQ ID NO: 34969 - DNA, 19 bp, Artificial sequence
  SiRNA target sequence
ataagtgatctatatgaac

SEQ ID NO: 34970 - DNA, 19 bp, Artificial sequence
  SiRNA target sequence
taagtgatctatatgaact

SEQ ID NO: 34971 - DNA, 19 bp, Artificial sequence
  SiRNA target sequence
aagtgatctatatgaacta

SEQ ID NO: 34972 - DNA, 19 bp, Artificial sequence
  SiRNA target sequence
agtgatctatatgaactat

SEQ ID NO: 34973 - DNA, 19 bp, Artificial sequence
  SiRNA target sequence
gtgatctatatgaactatt

SEQ ID NO: 34974 - DNA, 19 bp, Artificial sequence
  SiRNA target sequence
tgatctatatgaactatta

SEQ ID NO: 34975 - DNA, 19 bp, Artificial sequence
  SiRNA target sequence
gatctatatgaactattag

SEQ ID NO: 34976 - DNA, 19 bp, Artificial sequence
  SiRNA target sequence
atctatatgaactattaga

SEQ ID NO: 34977 - DNA, 19 bp, Artificial sequence
  SiRNA target sequence
tctatatgaactattagaa

SEQ ID NO: 34978 - DNA, 19 bp, Artificial sequence
  SiRNA target sequence
ctatatgaactattagaaa

SEQ ID NO: 34979 - DNA, 19 bp, Artificial sequence
  SiRNA target sequence
tatatgaactattagaaat

SEQ ID NO: 34980 - DNA, 19 bp, Artificial sequence
  SiRNA target sequence
atatgaactattagaaatt

SEQ ID NO: 34981 - DNA, 19 bp, Artificial sequence
  SiRNA target sequence
tatgaactattagaaattt

SEQ ID NO: 34982 - DNA, 19 bp, Artificial sequence
  SiRNA target sequence
atgaactattagaaatttc

SEQ ID NO: 34983 - DNA, 19 bp, Artificial sequence
  SiRNA target sequence
tgaactattagaaatttct

SEQ ID NO: 34984 - DNA, 19 bp, Artificial sequence
  SiRNA target sequence
gaactattagaaatttctt

SEQ ID NO: 34985 - DNA, 19 bp, Artificial sequence
  SiRNA target sequence
aactattagaaatttcttt

SEQ ID NO: 34986 - DNA, 19 bp, Artificial sequence
  SiRNA target sequence
actattagaaatttctttt

SEQ ID NO: 34987 - DNA, 19 bp, Artificial sequence
  SiRNA target sequence
ctattagaaatttctttta

SEQ ID NO: 34988 - DNA, 19 bp, Artificial sequence
  SiRNA target sequence
tattagaaatttcttttat

SEQ ID NO: 34989 - DNA, 19 bp, Artificial sequence
  SiRNA target sequence
attagaaatttcttttata

SEQ ID NO: 34990 - DNA, 19 bp, Artificial sequence
  SiRNA target sequence
ttagaaatttcttttatat

SEQ ID NO: 34991 - DNA, 19 bp, Artificial sequence
  SiRNA target sequence
tagaaatttcttttatatc

SEQ ID NO: 34992 - DNA, 19 bp, Artificial sequence
  SiRNA target sequence
agaaatttcttttatatct

SEQ ID NO: 34993 - DNA, 19 bp, Artificial sequence
  SiRNA target sequence
gaaatttcttttatatctc

SEQ ID NO: 34994 - DNA, 19 bp, Artificial sequence
  SiRNA target sequence
aaatttcttttatatctcg

SEQ ID NO: 34995 - DNA, 19 bp, Artificial sequence
  SiRNA target sequence
aatttcttttatatctcga

SEQ ID NO: 34996 - DNA, 19 bp, Artificial sequence
  SiRNA target sequence
atttcttttatatctcgat

SEQ ID NO: 34997 - DNA, 19 bp, Artificial sequence
  SiRNA target sequence
tttcttttatatctcgatt

SEQ ID NO: 34998 - DNA, 19 bp, Artificial sequence
  SiRNA target sequence
ttcttttatatctcgatta

SEQ ID NO: 34999 - DNA, 19 bp, Artificial sequence
  SiRNA target sequence
tcttttatatctcgattat

SEQ ID NO: 35000 - DNA, 19 bp, Artificial sequence
  SiRNA target sequence
cttttatatctcgattatc

SEQ ID NO: 35001 - DNA, 19 bp, Artificial sequence
  SiRNA target sequence
ttttatatctcgattatct

SEQ ID NO: 35002 - DNA, 19 bp, Artificial sequence
  SiRNA target sequence
tttatatctcgattatcta

SEQ ID NO: 35003 - DNA, 19 bp, Artificial sequence
  SiRNA target sequence
ttatatctcgattatctag

SEQ ID NO: 35004 - DNA, 19 bp, Artificial sequence
  SiRNA target sequence
tatatctcgattatctaga

SEQ ID NO: 35005 - DNA, 19 bp, Artificial sequence
  SiRNA target sequence
atatctcgattatctagat

SEQ ID NO: 35006 - DNA, 19 bp, Artificial sequence
  SiRNA target sequence
tatctcgattatctagata

SEQ ID NO: 35007 - DNA, 19 bp, Artificial sequence
  SiRNA target sequence
atctcgattatctagataa

SEQ ID NO: 35008 - DNA, 19 bp, Artificial sequence
  SiRNA target sequence
tctcgattatctagataaa

SEQ ID NO: 35009 - DNA, 19 bp, Artificial sequence
  SiRNA target sequence
ctcgattatctagataaat

SEQ ID NO: 35010 - DNA, 19 bp, Artificial sequence
  SiRNA target sequence
tcgattatctagataaata

SEQ ID NO: 35011 - DNA, 19 bp, Artificial sequence
  SiRNA target sequence
cgattatctagataaatat

SEQ ID NO: 35012 - DNA, 19 bp, Artificial sequence
  SiRNA target sequence
gattatctagataaatatt

SEQ ID NO: 35013 - DNA, 19 bp, Artificial sequence
  SiRNA target sequence
attatctagataaatattt

SEQ ID NO: 35014 - DNA, 19 bp, Artificial sequence
  SiRNA target sequence
ttatctagataaatatttc

SEQ ID NO: 35015 - DNA, 19 bp, Artificial sequence
  SiRNA target sequence
tatctagataaatatttcc

SEQ ID NO: 35016 - DNA, 19 bp, Artificial sequence
  SiRNA target sequence
atctagataaatatttccc

SEQ ID NO: 35017 - DNA, 19 bp, Artificial sequence
  SiRNA target sequence
tctagataaatatttcccc

SEQ ID NO: 35018 - DNA, 19 bp, Artificial sequence
  SiRNA target sequence
ctagataaatatttccccc

SEQ ID NO: 35019 - DNA, 19 bp, Artificial sequence
  SiRNA target sequence
tagataaatatttccccca

SEQ ID NO: 35020 - DNA, 19 bp, Artificial sequence
  SiRNA target sequence
agataaatatttcccccat

SEQ ID NO: 35021 - DNA, 19 bp, Artificial sequence
  SiRNA target sequence
gataaatatttcccccata

SEQ ID NO: 35022 - DNA, 19 bp, Artificial sequence
  SiRNA target sequence
ataaatatttcccccataa

SEQ ID NO: 35023 - DNA, 19 bp, Artificial sequence
  SiRNA target sequence
taaatatttcccccataat

SEQ ID NO: 35024 - DNA, 19 bp, Artificial sequence
  SiRNA target sequence
aaatatttcccccataatt

SEQ ID NO: 35025 - DNA, 19 bp, Artificial sequence
  SiRNA target sequence
aatatttcccccataattt

SEQ ID NO: 35026 - DNA, 19 bp, Artificial sequence
  SiRNA target sequence
atatttcccccataatttt

SEQ ID NO: 35027 - DNA, 19 bp, Artificial sequence
  SiRNA target sequence
tatttcccccataattttc

SEQ ID NO: 35028 - DNA, 19 bp, Artificial sequence
  SiRNA target sequence
atttcccccataattttca

SEQ ID NO: 35029 - DNA, 19 bp, Artificial sequence
  SiRNA target sequence
tttcccccataattttcaa

SEQ ID NO: 35030 - DNA, 19 bp, Artificial sequence
  SiRNA target sequence
ttcccccataattttcaaa

SEQ ID NO: 35031 - DNA, 19 bp, Artificial sequence
  SiRNA target sequence
tcccccataattttcaaat

SEQ ID NO: 35032 - DNA, 19 bp, Artificial sequence
  SiRNA target sequence
cccccataattttcaaatc

SEQ ID NO: 35033 - DNA, 19 bp, Artificial sequence
  SiRNA target sequence
ccccataattttcaaatct

SEQ ID NO: 35034 - DNA, 19 bp, Artificial sequence
  SiRNA target sequence
cccataattttcaaatctc

SEQ ID NO: 35035 - DNA, 19 bp, Artificial sequence
  SiRNA target sequence
ccataattttcaaatctca

SEQ ID NO: 35036 - DNA, 19 bp, Artificial sequence
  SiRNA target sequence
cataattttcaaatctcat

SEQ ID NO: 35037 - DNA, 19 bp, Artificial sequence
  SiRNA target sequence
ataattttcaaatctcata

SEQ ID NO: 35038 - DNA, 19 bp, Artificial sequence
  SiRNA target sequence
taattttcaaatctcataa

SEQ ID NO: 35039 - DNA, 19 bp, Artificial sequence
  SiRNA target sequence
aattttcaaatctcataat

SEQ ID NO: 35040 - DNA, 19 bp, Artificial sequence
  SiRNA target sequence
attttcaaatctcataatc

SEQ ID NO: 35041 - DNA, 19 bp, Artificial sequence
  SiRNA target sequence
ttttcaaatctcataatca

SEQ ID NO: 35042 - DNA, 19 bp, Artificial sequence
  SiRNA target sequence
tttcaaatctcataatcat

SEQ ID NO: 35043 - DNA, 19 bp, Artificial sequence
  SiRNA target sequence
ttcaaatctcataatcatc

SEQ ID NO: 35044 - DNA, 19 bp, Artificial sequence
  SiRNA target sequence
tcaaatctcataatcatct

SEQ ID NO: 35045 - DNA, 19 bp, Artificial sequence
  SiRNA target sequence
caaatctcataatcatctt

SEQ ID NO: 35046 - DNA, 19 bp, Artificial sequence
  SiRNA target sequence
aaatctcataatcatcttt

SEQ ID NO: 35047 - DNA, 19 bp, Artificial sequence
  SiRNA target sequence
aatctcataatcatcttta

SEQ ID NO: 35048 - DNA, 19 bp, Artificial sequence
  SiRNA target sequence
atctcataatcatctttat

SEQ ID NO: 35049 - DNA, 19 bp, Artificial sequence
  SiRNA target sequence
tctcataatcatctttata

SEQ ID NO: 35050 - DNA, 19 bp, Artificial sequence
  SiRNA target sequence
ctcataatcatctttataa

SEQ ID NO: 35051 - DNA, 19 bp, Artificial sequence
  SiRNA target sequence
tcataatcatctttataag

SEQ ID NO: 35052 - DNA, 19 bp, Artificial sequence
  SiRNA target sequence
cataatcatctttataaga

SEQ ID NO: 35053 - DNA, 19 bp, Artificial sequence
  SiRNA target sequence
ataatcatctttataagag

SEQ ID NO: 35054 - DNA, 19 bp, Artificial sequence
  SiRNA target sequence
taatcatctttataagaga

SEQ ID NO: 35055 - DNA, 19 bp, Artificial sequence
  SiRNA target sequence
aatcatctttataagagat

SEQ ID NO: 35056 - DNA, 19 bp, Artificial sequence
  SiRNA target sequence
atcatctttataagagatg

SEQ ID NO: 35057 - DNA, 19 bp, Artificial sequence
  SiRNA target sequence
tcatctttataagagatgt

SEQ ID NO: 35058 - DNA, 19 bp, Artificial sequence
  SiRNA target sequence
catctttataagagatgtt

SEQ ID NO: 35059 - DNA, 19 bp, Artificial sequence
  SiRNA target sequence
atctttataagagatgttt

SEQ ID NO: 35060 - DNA, 19 bp, Artificial sequence
  SiRNA target sequence
tctttataagagatgtttt

SEQ ID NO: 35061 - DNA, 19 bp, Artificial sequence
  SiRNA target sequence
ctttataagagatgttttt

SEQ ID NO: 35062 - DNA, 19 bp, Artificial sequence
  SiRNA target sequence
tttataagagatgtttttc

SEQ ID NO: 35063 - DNA, 19 bp, Artificial sequence
  SiRNA target sequence
ttataagagatgtttttcc

SEQ ID NO: 35064 - DNA, 19 bp, Artificial sequence
  SiRNA target sequence
tataagagatgtttttccc

SEQ ID NO: 35065 - DNA, 19 bp, Artificial sequence
  SiRNA target sequence
ataagagatgtttttcccg

SEQ ID NO: 35066 - DNA, 19 bp, Artificial sequence
  SiRNA target sequence
taagagatgtttttcccga

SEQ ID NO: 35067 - DNA, 19 bp, Artificial sequence
  SiRNA target sequence
aagagatgtttttcccgat

SEQ ID NO: 35068 - DNA, 19 bp, Artificial sequence
  SiRNA target sequence
agagatgtttttcccgatc

SEQ ID NO: 35069 - DNA, 19 bp, Artificial sequence
  SiRNA target sequence
gagatgtttttcccgatcc

SEQ ID NO: 35070 - DNA, 19 bp, Artificial sequence
  SiRNA target sequence
agatgtttttcccgatcca

SEQ ID NO: 35071 - DNA, 19 bp, Artificial sequence
  SiRNA target sequence
gatgtttttcccgatccat

SEQ ID NO: 35072 - DNA, 19 bp, Artificial sequence
  SiRNA target sequence
atgtttttcccgatccatt

SEQ ID NO: 35073 - DNA, 19 bp, Artificial sequence
  SiRNA target sequence
tgtttttcccgatccattt

SEQ ID NO: 35074 - DNA, 19 bp, Artificial sequence
  SiRNA target sequence
gtttttcccgatccatttt

SEQ ID NO: 35075 - DNA, 19 bp, Artificial sequence
  SiRNA target sequence
tttttcccgatccattttt

SEQ ID NO: 35076 - DNA, 19 bp, Artificial sequence
  SiRNA target sequence
ttttcccgatccatttttt

SEQ ID NO: 35077 - DNA, 19 bp, Artificial sequence
  SiRNA target sequence
tttcccgatccattttttc

SEQ ID NO: 35078 - DNA, 19 bp, Artificial sequence
  SiRNA target sequence
ttcccgatccattttttcc

SEQ ID NO: 35079 - DNA, 19 bp, Artificial sequence
  SiRNA target sequence
tcccgatccattttttcca

SEQ ID NO: 35080 - DNA, 19 bp, Artificial sequence
  SiRNA target sequence
cccgatccattttttccaa

SEQ ID NO: 35081 - DNA, 19 bp, Artificial sequence
  SiRNA target sequence
ccgatccattttttccaat

SEQ ID NO: 35082 - DNA, 19 bp, Artificial sequence
  SiRNA target sequence
cgatccattttttccaata

SEQ ID NO: 35083 - DNA, 19 bp, Artificial sequence
  SiRNA target sequence
gatccattttttccaataa

SEQ ID NO: 35084 - DNA, 19 bp, Artificial sequence
  SiRNA target sequence
atccattttttccaataat

SEQ ID NO: 35085 - DNA, 19 bp, Artificial sequence
  SiRNA target sequence
tccattttttccaataata

SEQ ID NO: 35086 - DNA, 19 bp, Artificial sequence
  SiRNA target sequence
ccattttttccaataatag

SEQ ID NO: 35087 - DNA, 19 bp, Artificial sequence
  SiRNA target sequence
cattttttccaataatagc

SEQ ID NO: 35088 - DNA, 19 bp, Artificial sequence
  SiRNA target sequence
attttttccaataatagct

SEQ ID NO: 35089 - DNA, 19 bp, Artificial sequence
  SiRNA target sequence
ttttttccaataatagcta

SEQ ID NO: 35090 - DNA, 19 bp, Artificial sequence
  SiRNA target sequence
tttttccaataatagctac

SEQ ID NO: 35091 - DNA, 19 bp, Artificial sequence
  SiRNA target sequence
ttttccaataatagctact

SEQ ID NO: 35092 - DNA, 19 bp, Artificial sequence
  SiRNA target sequence
tttccaataatagctactt

SEQ ID NO: 35093 - DNA, 19 bp, Artificial sequence
  SiRNA target sequence
ttccaataatagctacttt

SEQ ID NO: 35094 - DNA, 19 bp, Artificial sequence
  SiRNA target sequence
tccaataatagctactttt

SEQ ID NO: 35095 - DNA, 19 bp, Artificial sequence
  SiRNA target sequence
ccaataatagctacttttt

SEQ ID NO: 35096 - DNA, 19 bp, Artificial sequence
  SiRNA target sequence
caataatagctactttttc

SEQ ID NO: 35097 - DNA, 19 bp, Artificial sequence
  SiRNA target sequence
aataatagctactttttca

SEQ ID NO: 35098 - DNA, 19 bp, Artificial sequence
  SiRNA target sequence
ataatagctactttttcac

SEQ ID NO: 35099 - DNA, 19 bp, Artificial sequence
  SiRNA target sequence
taatagctactttttcacc

SEQ ID NO: 35100 - DNA, 19 bp, Artificial sequence
  SiRNA target sequence
aatagctactttttcacct

SEQ ID NO: 35101 - DNA, 19 bp, Artificial sequence
  SiRNA target sequence
atagctactttttcacctt

SEQ ID NO: 35102 - DNA, 19 bp, Artificial sequence
  SiRNA target sequence
tagctactttttcaccttt

SEQ ID NO: 35103 - DNA, 19 bp, Artificial sequence
  SiRNA target sequence
agctactttttcacctttt

SEQ ID NO: 35104 - DNA, 19 bp, Artificial sequence
  SiRNA target sequence
gctactttttcaccttttt

SEQ ID NO: 35105 - DNA, 19 bp, Artificial sequence
  SiRNA target sequence
ctactttttcacctttttt

SEQ ID NO: 35106 - DNA, 19 bp, Artificial sequence
  SiRNA target sequence
tactttttcacctttttta

SEQ ID NO: 35107 - DNA, 19 bp, Artificial sequence
  SiRNA target sequence
actttttcaccttttttaa

SEQ ID NO: 35108 - DNA, 19 bp, Artificial sequence
  SiRNA target sequence
ctttttcaccttttttaat

SEQ ID NO: 35109 - DNA, 19 bp, Artificial sequence
  SiRNA target sequence
tttttcaccttttttaatt

SEQ ID NO: 35110 - DNA, 19 bp, Artificial sequence
  SiRNA target sequence
ttttcaccttttttaatta

SEQ ID NO: 35111 - DNA, 19 bp, Artificial sequence
  SiRNA target sequence
tttcaccttttttaattaa

SEQ ID NO: 35112 - DNA, 19 bp, Artificial sequence
  SiRNA target sequence
ttcaccttttttaattaaa

SEQ ID NO: 35113 - DNA, 19 bp, Artificial sequence
  SiRNA target sequence
tcaccttttttaattaaaa

SEQ ID NO: 35114 - DNA, 19 bp, Artificial sequence
  SiRNA target sequence
caccttttttaattaaaat

SEQ ID NO: 35115 - DNA, 19 bp, Artificial sequence
  SiRNA target sequence
accttttttaattaaaata

SEQ ID NO: 35116 - DNA, 19 bp, Artificial sequence
  SiRNA target sequence
ccttttttaattaaaatat

SEQ ID NO: 35117 - DNA, 19 bp, Artificial sequence
  SiRNA target sequence
cttttttaattaaaatatt

SEQ ID NO: 35118 - DNA, 19 bp, Artificial sequence
  SiRNA target sequence
ttttttaattaaaatattt

SEQ ID NO: 35119 - DNA, 19 bp, Artificial sequence
  SiRNA target sequence
tttttaattaaaatattta

SEQ ID NO: 35120 - DNA, 19 bp, Artificial sequence
  SiRNA target sequence
ttttaattaaaatatttat

SEQ ID NO: 35121 - DNA, 19 bp, Artificial sequence
  SiRNA target sequence
tttaattaaaatatttatg

SEQ ID NO: 35122 - DNA, 19 bp, Artificial sequence
  SiRNA target sequence
ttaattaaaatatttatgt

SEQ ID NO: 35123 - DNA, 19 bp, Artificial sequence
  SiRNA target sequence
taattaaaatatttatgtc

SEQ ID NO: 35124 - DNA, 19 bp, Artificial sequence
  SiRNA target sequence
aattaaaatatttatgtcc

SEQ ID NO: 35125 - DNA, 19 bp, Artificial sequence
  SiRNA target sequence
attaaaatatttatgtccg

SEQ ID NO: 35126 - DNA, 19 bp, Artificial sequence
  SiRNA target sequence
ttaaaatatttatgtccgt

SEQ ID NO: 35127 - DNA, 19 bp, Artificial sequence
  SiRNA target sequence
taaaatatttatgtccgtt

SEQ ID NO: 35128 - DNA, 19 bp, Artificial sequence
  SiRNA target sequence
aaaatatttatgtccgtta

SEQ ID NO: 35129 - DNA, 19 bp, Artificial sequence
  SiRNA target sequence
aaatatttatgtccgttaa

SEQ ID NO: 35130 - DNA, 19 bp, Artificial sequence
  SiRNA target sequence
aatatttatgtccgttaaa

SEQ ID NO: 35131 - DNA, 19 bp, Artificial sequence
  SiRNA target sequence
atatttatgtccgttaaaa

SEQ ID NO: 35132 - DNA, 19 bp, Artificial sequence
  SiRNA target sequence
tatttatgtccgttaaaat

SEQ ID NO: 35133 - DNA, 19 bp, Artificial sequence
  SiRNA target sequence
atttatgtccgttaaaatt

SEQ ID NO: 35134 - DNA, 19 bp, Artificial sequence
  SiRNA target sequence
tttatgtccgttaaaattt

SEQ ID NO: 35135 - DNA, 19 bp, Artificial sequence
  SiRNA target sequence
ttatgtccgttaaaatttt

SEQ ID NO: 35136 - DNA, 19 bp, Artificial sequence
  SiRNA target sequence
tatgtccgttaaaattttt

SEQ ID NO: 35137 - DNA, 19 bp, Artificial sequence
  SiRNA target sequence
atgtccgttaaaatttttt

SEQ ID NO: 35138 - DNA, 19 bp, Artificial sequence
  SiRNA target sequence
tgtccgttaaaattttttt

SEQ ID NO: 35139 - DNA, 19 bp, Artificial sequence
  SiRNA target sequence
gtccgttaaaatttttttg

SEQ ID NO: 35140 - DNA, 19 bp, Artificial sequence
  SiRNA target sequence
tccgttaaaatttttttgg

SEQ ID NO: 35141 - DNA, 19 bp, Artificial sequence
  SiRNA target sequence
ccgttaaaatttttttgga

SEQ ID NO: 35142 - DNA, 19 bp, Artificial sequence
  SiRNA target sequence
cgttaaaatttttttggag

SEQ ID NO: 35143 - DNA, 19 bp, Artificial sequence
  SiRNA target sequence
gttaaaatttttttggagt

SEQ ID NO: 35144 - DNA, 19 bp, Artificial sequence
  SiRNA target sequence
ttaaaatttttttggagta

SEQ ID NO: 35145 - DNA, 19 bp, Artificial sequence
  SiRNA target sequence
taaaatttttttggagtaa

SEQ ID NO: 35146 - DNA, 19 bp, Artificial sequence
  SiRNA target sequence
aaaatttttttggagtaat

SEQ ID NO: 35147 - DNA, 19 bp, Artificial sequence
  SiRNA target sequence
aaatttttttggagtaata

SEQ ID NO: 35148 - DNA, 19 bp, Artificial sequence
  SiRNA target sequence
aatttttttggagtaataa

SEQ ID NO: 35149 - DNA, 19 bp, Artificial sequence
  SiRNA target sequence
atttttttggagtaataat

SEQ ID NO: 35150 - DNA, 19 bp, Artificial sequence
  SiRNA target sequence
tttttttggagtaataatt

SEQ ID NO: 35151 - DNA, 19 bp, Artificial sequence
  SiRNA target sequence
ttttttggagtaataatta

SEQ ID NO: 35152 - DNA, 19 bp, Artificial sequence
  SiRNA target sequence
tttttggagtaataattaa

SEQ ID NO: 35153 - DNA, 19 bp, Artificial sequence
  SiRNA target sequence
ttttggagtaataattaaa

SEQ ID NO: 35154 - DNA, 19 bp, Artificial sequence
  SiRNA target sequence
tttggagtaataattaaat

SEQ ID NO: 35155 - DNA, 19 bp, Artificial sequence
  SiRNA target sequence
ttggagtaataattaaatg

SEQ ID NO: 35156 - DNA, 19 bp, Artificial sequence
  SiRNA target sequence
tggagtaataattaaatga

SEQ ID NO: 35157 - DNA, 19 bp, Artificial sequence
  SiRNA target sequence
ggagtaataattaaatgat

SEQ ID NO: 35158 - DNA, 19 bp, Artificial sequence
  SiRNA target sequence
gagtaataattaaatgatg

SEQ ID NO: 35159 - DNA, 19 bp, Artificial sequence
  SiRNA target sequence
agtaataattaaatgatgc

SEQ ID NO: 35160 - DNA, 19 bp, Artificial sequence
  SiRNA target sequence
gtaataattaaatgatgca

SEQ ID NO: 35161 - DNA, 19 bp, Artificial sequence
  SiRNA target sequence
taataattaaatgatgcat

SEQ ID NO: 35162 - DNA, 19 bp, Artificial sequence
  SiRNA target sequence
aataattaaatgatgcatt

SEQ ID NO: 35163 - DNA, 19 bp, Artificial sequence
  SiRNA target sequence
ataattaaatgatgcattt

SEQ ID NO: 35164 - DNA, 19 bp, Artificial sequence
  SiRNA target sequence
taattaaatgatgcatttt

SEQ ID NO: 35165 - DNA, 19 bp, Artificial sequence
  SiRNA target sequence
aattaaatgatgcattttc

SEQ ID NO: 35166 - DNA, 19 bp, Artificial sequence
  SiRNA target sequence
attaaatgatgcattttct

SEQ ID NO: 35167 - DNA, 19 bp, Artificial sequence
  SiRNA target sequence
ttaaatgatgcattttcta

SEQ ID NO: 35168 - DNA, 19 bp, Artificial sequence
  SiRNA target sequence
taaatgatgcattttctaa

SEQ ID NO: 35169 - DNA, 19 bp, Artificial sequence
  SiRNA target sequence
aaatgatgcattttctaat

SEQ ID NO: 35170 - DNA, 19 bp, Artificial sequence
  SiRNA target sequence
aatgatgcattttctaatc

SEQ ID NO: 35171 - DNA, 19 bp, Artificial sequence
  SiRNA target sequence
atgatgcattttctaatct

SEQ ID NO: 35172 - DNA, 19 bp, Artificial sequence
  SiRNA target sequence
tgatgcattttctaatctt

SEQ ID NO: 35173 - DNA, 19 bp, Artificial sequence
  SiRNA target sequence
gatgcattttctaatctta

SEQ ID NO: 35174 - DNA, 19 bp, Artificial sequence
  SiRNA target sequence
atgcattttctaatcttat

SEQ ID NO: 35175 - DNA, 19 bp, Artificial sequence
  SiRNA target sequence
tgcattttctaatcttata

SEQ ID NO: 35176 - DNA, 19 bp, Artificial sequence
  SiRNA target sequence
gcattttctaatcttatat

SEQ ID NO: 35177 - DNA, 19 bp, Artificial sequence
  SiRNA target sequence
cattttctaatcttatatc

SEQ ID NO: 35178 - DNA, 19 bp, Artificial sequence
  SiRNA target sequence
attttctaatcttatatca

SEQ ID NO: 35179 - DNA, 19 bp, Artificial sequence
  SiRNA target sequence
ttttctaatcttatatcat

SEQ ID NO: 35180 - DNA, 19 bp, Artificial sequence
  SiRNA target sequence
tttctaatcttatatcatt

SEQ ID NO: 35181 - DNA, 19 bp, Artificial sequence
  SiRNA target sequence
ttctaatcttatatcatta

SEQ ID NO: 35182 - DNA, 19 bp, Artificial sequence
  SiRNA target sequence
tctaatcttatatcattat

SEQ ID NO: 35183 - DNA, 19 bp, Artificial sequence
  SiRNA target sequence
ctaatcttatatcattatt

SEQ ID NO: 35184 - DNA, 19 bp, Artificial sequence
  SiRNA target sequence
taatcttatatcattatta

SEQ ID NO: 35185 - DNA, 19 bp, Artificial sequence
  SiRNA target sequence
aatcttatatcattattaa

SEQ ID NO: 35186 - DNA, 19 bp, Artificial sequence
  SiRNA target sequence
atcttatatcattattaaa

SEQ ID NO: 35187 - DNA, 19 bp, Artificial sequence
  SiRNA target sequence
tcttatatcattattaaat

SEQ ID NO: 35188 - DNA, 19 bp, Artificial sequence
  SiRNA target sequence
cttatatcattattaaatt

SEQ ID NO: 35189 - DNA, 19 bp, Artificial sequence
  SiRNA target sequence
ttatatcattattaaattc

SEQ ID NO: 35190 - DNA, 19 bp, Artificial sequence
  SiRNA target sequence
tatatcattattaaattca

SEQ ID NO: 35191 - DNA, 19 bp, Artificial sequence
  SiRNA target sequence
atatcattattaaattcat

SEQ ID NO: 35192 - DNA, 19 bp, Artificial sequence
  SiRNA target sequence
tatcattattaaattcatt

SEQ ID NO: 35193 - DNA, 19 bp, Artificial sequence
  SiRNA target sequence
atcattattaaattcatta

SEQ ID NO: 35194 - DNA, 19 bp, Artificial sequence
  SiRNA target sequence
tcattattaaattcattaa

SEQ ID NO: 35195 - DNA, 19 bp, Artificial sequence
  SiRNA target sequence
cattattaaattcattaac

SEQ ID NO: 35196 - DNA, 19 bp, Artificial sequence
  SiRNA target sequence
attattaaattcattaaca

SEQ ID NO: 35197 - DNA, 19 bp, Artificial sequence
  SiRNA target sequence
ttattaaattcattaacat

SEQ ID NO: 35198 - DNA, 19 bp, Artificial sequence
  SiRNA target sequence
tattaaattcattaacatc

SEQ ID NO: 35199 - DNA, 19 bp, Artificial sequence
  SiRNA target sequence
attaaattcattaacatct

SEQ ID NO: 35200 - DNA, 19 bp, Artificial sequence
  SiRNA target sequence
ttaaattcattaacatcta

SEQ ID NO: 35201 - DNA, 19 bp, Artificial sequence
  SiRNA target sequence
taaattcattaacatctac

SEQ ID NO: 35202 - DNA, 19 bp, Artificial sequence
  SiRNA target sequence
aaattcattaacatctact

SEQ ID NO: 35203 - DNA, 19 bp, Artificial sequence
  SiRNA target sequence
aattcattaacatctacta

SEQ ID NO: 35204 - DNA, 19 bp, Artificial sequence
  SiRNA target sequence
attcattaacatctactaa

SEQ ID NO: 35205 - DNA, 19 bp, Artificial sequence
  SiRNA target sequence
ttcattaacatctactaaa

SEQ ID NO: 35206 - DNA, 19 bp, Artificial sequence
  SiRNA target sequence
tcattaacatctactaaat

SEQ ID NO: 35207 - DNA, 19 bp, Artificial sequence
  SiRNA target sequence
cattaacatctactaaatt

SEQ ID NO: 35208 - DNA, 19 bp, Artificial sequence
  SiRNA target sequence
attaacatctactaaattt

SEQ ID NO: 35209 - DNA, 19 bp, Artificial sequence
  SiRNA target sequence
ttaacatctactaaatttg

SEQ ID NO: 35210 - DNA, 19 bp, Artificial sequence
  SiRNA target sequence
taacatctactaaatttgg

SEQ ID NO: 35211 - DNA, 19 bp, Artificial sequence
  SiRNA target sequence
aacatctactaaatttggt

SEQ ID NO: 35212 - DNA, 19 bp, Artificial sequence
  SiRNA target sequence
acatctactaaatttggtt

SEQ ID NO: 35213 - DNA, 19 bp, Artificial sequence
  SiRNA target sequence
catctactaaatttggttc

SEQ ID NO: 35214 - DNA, 19 bp, Artificial sequence
  SiRNA target sequence
atctactaaatttggttct

SEQ ID NO: 35215 - DNA, 19 bp, Artificial sequence
  SiRNA target sequence
tctactaaatttggttctt

SEQ ID NO: 35216 - DNA, 19 bp, Artificial sequence
  SiRNA target sequence
ctactaaatttggttcttc

SEQ ID NO: 35217 - DNA, 19 bp, Artificial sequence
  SiRNA target sequence
tactaaatttggttcttct

SEQ ID NO: 35218 - DNA, 19 bp, Artificial sequence
  SiRNA target sequence
actaaatttggttcttctt

SEQ ID NO: 35219 - DNA, 19 bp, Artificial sequence
  SiRNA target sequence
ctaaatttggttcttcttt

SEQ ID NO: 35220 - DNA, 19 bp, Artificial sequence
  SiRNA target sequence
taaatttggttcttctttt

SEQ ID NO: 35221 - DNA, 19 bp, Artificial sequence
  SiRNA target sequence
aaatttggttcttctttta

SEQ ID NO: 35222 - DNA, 19 bp, Artificial sequence
  SiRNA target sequence
aatttggttcttcttttat

SEQ ID NO: 35223 - DNA, 19 bp, Artificial sequence
  SiRNA target sequence
atttggttcttcttttata

SEQ ID NO: 35224 - DNA, 19 bp, Artificial sequence
  SiRNA target sequence
tttggttcttcttttataa

SEQ ID NO: 35225 - DNA, 19 bp, Artificial sequence
  SiRNA target sequence
ttggttcttcttttataag

SEQ ID NO: 35226 - DNA, 19 bp, Artificial sequence
  SiRNA target sequence
tggttcttcttttataagc

SEQ ID NO: 35227 - DNA, 19 bp, Artificial sequence
  SiRNA target sequence
ggttcttcttttataagct

SEQ ID NO: 35228 - DNA, 19 bp, Artificial sequence
  SiRNA target sequence
gttcttcttttataagctc

SEQ ID NO: 35229 - DNA, 19 bp, Artificial sequence
  SiRNA target sequence
ttcttcttttataagctct

SEQ ID NO: 35230 - DNA, 19 bp, Artificial sequence
  SiRNA target sequence
tcttcttttataagctctg

SEQ ID NO: 35231 - DNA, 19 bp, Artificial sequence
  SiRNA target sequence
cttcttttataagctctgg

SEQ ID NO: 35232 - DNA, 19 bp, Artificial sequence
  SiRNA target sequence
ttcttttataagctctggt

SEQ ID NO: 35233 - DNA, 19 bp, Artificial sequence
  SiRNA target sequence
tcttttataagctctggtt

SEQ ID NO: 35234 - DNA, 19 bp, Artificial sequence
  SiRNA target sequence
cttttataagctctggttt

SEQ ID NO: 35235 - DNA, 19 bp, Artificial sequence
  SiRNA target sequence
ttttataagctctggttta

SEQ ID NO: 35236 - DNA, 19 bp, Artificial sequence
  SiRNA target sequence
tttataagctctggtttaa

SEQ ID NO: 35237 - DNA, 19 bp, Artificial sequence
  SiRNA target sequence
ttataagctctggtttaaa

SEQ ID NO: 35238 - DNA, 19 bp, Artificial sequence
  SiRNA target sequence
tataagctctggtttaaaa

SEQ ID NO: 35239 - DNA, 19 bp, Artificial sequence
  SiRNA target sequence
ataagctctggtttaaaag

SEQ ID NO: 35240 - DNA, 19 bp, Artificial sequence
  SiRNA target sequence
taagctctggtttaaaaga

SEQ ID NO: 35241 - DNA, 19 bp, Artificial sequence
  SiRNA target sequence
aagctctggtttaaaagat

SEQ ID NO: 35242 - DNA, 19 bp, Artificial sequence
  SiRNA target sequence
agctctggtttaaaagatg

SEQ ID NO: 35243 - DNA, 19 bp, Artificial sequence
  SiRNA target sequence
gctctggtttaaaagatgt

SEQ ID NO: 35244 - DNA, 19 bp, Artificial sequence
  SiRNA target sequence
ctctggtttaaaagatgtt

SEQ ID NO: 35245 - DNA, 19 bp, Artificial sequence
  SiRNA target sequence
tctggtttaaaagatgttc

SEQ ID NO: 35246 - DNA, 19 bp, Artificial sequence
  SiRNA target sequence
ctggtttaaaagatgttct

SEQ ID NO: 35247 - DNA, 19 bp, Artificial sequence
  SiRNA target sequence
tggtttaaaagatgttctt

SEQ ID NO: 35248 - DNA, 19 bp, Artificial sequence
  SiRNA target sequence
ggtttaaaagatgttctta

SEQ ID NO: 35249 - DNA, 19 bp, Artificial sequence
  SiRNA target sequence
gtttaaaagatgttcttat

SEQ ID NO: 35250 - DNA, 19 bp, Artificial sequence
  SiRNA target sequence
tttaaaagatgttcttata

SEQ ID NO: 35251 - DNA, 19 bp, Artificial sequence
  SiRNA target sequence
ttaaaagatgttcttatat

SEQ ID NO: 35252 - DNA, 19 bp, Artificial sequence
  SiRNA target sequence
taaaagatgttcttatatt

SEQ ID NO: 35253 - DNA, 19 bp, Artificial sequence
  SiRNA target sequence
aaaagatgttcttatattt

SEQ ID NO: 35254 - DNA, 19 bp, Artificial sequence
  SiRNA target sequence
aaagatgttcttatattta

SEQ ID NO: 35255 - DNA, 19 bp, Artificial sequence
  SiRNA target sequence
aagatgttcttatatttaa

SEQ ID NO: 35256 - DNA, 19 bp, Artificial sequence
  SiRNA target sequence
agatgttcttatatttaag

SEQ ID NO: 35257 - DNA, 19 bp, Artificial sequence
  SiRNA target sequence
gatgttcttatatttaaga

SEQ ID NO: 35258 - DNA, 19 bp, Artificial sequence
  SiRNA target sequence
atgttcttatatttaagat

SEQ ID NO: 35259 - DNA, 19 bp, Artificial sequence
  SiRNA target sequence
tgttcttatatttaagatt

SEQ ID NO: 35260 - DNA, 19 bp, Artificial sequence
  SiRNA target sequence
gttcttatatttaagattg

SEQ ID NO: 35261 - DNA, 19 bp, Artificial sequence
  SiRNA target sequence
ttcttatatttaagattgc

SEQ ID NO: 35262 - DNA, 19 bp, Artificial sequence
  SiRNA target sequence
tcttatatttaagattgct

SEQ ID NO: 35263 - DNA, 19 bp, Artificial sequence
  SiRNA target sequence
cttatatttaagattgctt

SEQ ID NO: 35264 - DNA, 19 bp, Artificial sequence
  SiRNA target sequence
ttatatttaagattgcttg

SEQ ID NO: 35265 - DNA, 19 bp, Artificial sequence
  SiRNA target sequence
tatatttaagattgcttgt

SEQ ID NO: 35266 - DNA, 19 bp, Artificial sequence
  SiRNA target sequence
atatttaagattgcttgtg

SEQ ID NO: 35267 - DNA, 19 bp, Artificial sequence
  SiRNA target sequence
tatttaagattgcttgtgt

SEQ ID NO: 35268 - DNA, 19 bp, Artificial sequence
  SiRNA target sequence
atttaagattgcttgtgta

SEQ ID NO: 35269 - DNA, 19 bp, Artificial sequence
  SiRNA target sequence
tttaagattgcttgtgtat

SEQ ID NO: 35270 - DNA, 19 bp, Artificial sequence
  SiRNA target sequence
ttaagattgcttgtgtata

SEQ ID NO: 35271 - DNA, 19 bp, Artificial sequence
  SiRNA target sequence
taagattgcttgtgtatat

SEQ ID NO: 35272 - DNA, 19 bp, Artificial sequence
  SiRNA target sequence
aagattgcttgtgtatatc

SEQ ID NO: 35273 - DNA, 19 bp, Artificial sequence
  SiRNA target sequence
agattgcttgtgtatatcg

SEQ ID NO: 35274 - DNA, 19 bp, Artificial sequence
  SiRNA target sequence
gattgcttgtgtatatcgt

SEQ ID NO: 35275 - DNA, 19 bp, Artificial sequence
  SiRNA target sequence
attgcttgtgtatatcgtg

SEQ ID NO: 35276 - DNA, 19 bp, Artificial sequence
  SiRNA target sequence
ttgcttgtgtatatcgtga

SEQ ID NO: 35277 - DNA, 19 bp, Artificial sequence
  SiRNA target sequence
tgcttgtgtatatcgtgag

SEQ ID NO: 35278 - DNA, 19 bp, Artificial sequence
  SiRNA target sequence
gcttgtgtatatcgtgagt

SEQ ID NO: 35279 - DNA, 19 bp, Artificial sequence
  SiRNA target sequence
cttgtgtatatcgtgagta

SEQ ID NO: 35280 - DNA, 19 bp, Artificial sequence
  SiRNA target sequence
ttgtgtatatcgtgagtaa

SEQ ID NO: 35281 - DNA, 19 bp, Artificial sequence
  SiRNA target sequence
tgtgtatatcgtgagtaaa

SEQ ID NO: 35282 - DNA, 19 bp, Artificial sequence
  SiRNA target sequence
gtgtatatcgtgagtaaaa

SEQ ID NO: 35283 - DNA, 19 bp, Artificial sequence
  SiRNA target sequence
tgtatatcgtgagtaaaag

SEQ ID NO: 35284 - DNA, 19 bp, Artificial sequence
  SiRNA target sequence
gtatatcgtgagtaaaaga

SEQ ID NO: 35285 - DNA, 19 bp, Artificial sequence
  SiRNA target sequence
tatatcgtgagtaaaagaa

SEQ ID NO: 35286 - DNA, 19 bp, Artificial sequence
  SiRNA target sequence
atatcgtgagtaaaagaac

SEQ ID NO: 35287 - DNA, 19 bp, Artificial sequence
  SiRNA target sequence
tatcgtgagtaaaagaacc

SEQ ID NO: 35288 - DNA, 19 bp, Artificial sequence
  SiRNA target sequence
atcgtgagtaaaagaaccc

SEQ ID NO: 35289 - DNA, 19 bp, Artificial sequence
  SiRNA target sequence
tcgtgagtaaaagaaccct

SEQ ID NO: 35290 - DNA, 19 bp, Artificial sequence
  SiRNA target sequence
cgtgagtaaaagaacccta

SEQ ID NO: 35291 - DNA, 19 bp, Artificial sequence
  SiRNA target sequence
gtgagtaaaagaaccctaa

SEQ ID NO: 35292 - DNA, 19 bp, Artificial sequence
  SiRNA target sequence
tgagtaaaagaaccctaat

SEQ ID NO: 35293 - DNA, 19 bp, Artificial sequence
  SiRNA target sequence
gagtaaaagaaccctaatt

SEQ ID NO: 35294 - DNA, 19 bp, Artificial sequence
  SiRNA target sequence
agtaaaagaaccctaattg

SEQ ID NO: 35295 - DNA, 19 bp, Artificial sequence
  SiRNA target sequence
gtaaaagaaccctaattgt

SEQ ID NO: 35296 - DNA, 19 bp, Artificial sequence
  SiRNA target sequence
taaaagaaccctaattgtc

SEQ ID NO: 35297 - DNA, 19 bp, Artificial sequence
  SiRNA target sequence
aaaagaaccctaattgtcc

SEQ ID NO: 35298 - DNA, 19 bp, Artificial sequence
  SiRNA target sequence
aaagaaccctaattgtcca

SEQ ID NO: 35299 - DNA, 19 bp, Artificial sequence
  SiRNA target sequence
aagaaccctaattgtccaa

SEQ ID NO: 35300 - DNA, 19 bp, Artificial sequence
  SiRNA target sequence
agaaccctaattgtccaaa

SEQ ID NO: 35301 - DNA, 19 bp, Artificial sequence
  SiRNA target sequence
gaaccctaattgtccaaaa

SEQ ID NO: 35302 - DNA, 19 bp, Artificial sequence
  SiRNA target sequence
aaccctaattgtccaaaac

SEQ ID NO: 35303 - DNA, 19 bp, Artificial sequence
  SiRNA target sequence
accctaattgtccaaaact

SEQ ID NO: 35304 - DNA, 19 bp, Artificial sequence
  SiRNA target sequence
ccctaattgtccaaaactt

SEQ ID NO: 35305 - DNA, 19 bp, Artificial sequence
  SiRNA target sequence
cctaattgtccaaaacttg

SEQ ID NO: 35306 - DNA, 19 bp, Artificial sequence
  SiRNA target sequence
ctaattgtccaaaacttga

SEQ ID NO: 35307 - DNA, 19 bp, Artificial sequence
  SiRNA target sequence
taattgtccaaaacttgaa

SEQ ID NO: 35308 - DNA, 19 bp, Artificial sequence
  SiRNA target sequence
aattgtccaaaacttgaat

SEQ ID NO: 35309 - DNA, 19 bp, Artificial sequence
  SiRNA target sequence
attgtccaaaacttgaata

SEQ ID NO: 35310 - DNA, 19 bp, Artificial sequence
  SiRNA target sequence
ttgtccaaaacttgaatac

SEQ ID NO: 35311 - DNA, 19 bp, Artificial sequence
  SiRNA target sequence
tgtccaaaacttgaataca

SEQ ID NO: 35312 - DNA, 19 bp, Artificial sequence
  SiRNA target sequence
gtccaaaacttgaatacaa

SEQ ID NO: 35313 - DNA, 19 bp, Artificial sequence
  SiRNA target sequence
tccaaaacttgaatacaat

SEQ ID NO: 35314 - DNA, 19 bp, Artificial sequence
  SiRNA target sequence
ccaaaacttgaatacaatg

SEQ ID NO: 35315 - DNA, 19 bp, Artificial sequence
  SiRNA target sequence
caaaacttgaatacaatgt

SEQ ID NO: 35316 - DNA, 19 bp, Artificial sequence
  SiRNA target sequence
aaaacttgaatacaatgtt

SEQ ID NO: 35317 - DNA, 19 bp, Artificial sequence
  SiRNA target sequence
aaacttgaatacaatgttc

SEQ ID NO: 35318 - DNA, 19 bp, Artificial sequence
  SiRNA target sequence
aacttgaatacaatgttct

SEQ ID NO: 35319 - DNA, 19 bp, Artificial sequence
  SiRNA target sequence
acttgaatacaatgttcta

SEQ ID NO: 35320 - DNA, 19 bp, Artificial sequence
  SiRNA target sequence
cttgaatacaatgttctat

SEQ ID NO: 35321 - DNA, 19 bp, Artificial sequence
  SiRNA target sequence
ttgaatacaatgttctatt

SEQ ID NO: 35322 - DNA, 19 bp, Artificial sequence
  SiRNA target sequence
tgaatacaatgttctatta

SEQ ID NO: 35323 - DNA, 19 bp, Artificial sequence
  SiRNA target sequence
gaatacaatgttctattaa

SEQ ID NO: 35324 - DNA, 19 bp, Artificial sequence
  SiRNA target sequence
aatacaatgttctattaat

SEQ ID NO: 35325 - DNA, 19 bp, Artificial sequence
  SiRNA target sequence
atacaatgttctattaatg

SEQ ID NO: 35326 - DNA, 19 bp, Artificial sequence
  SiRNA target sequence
tacaatgttctattaatgc

SEQ ID NO: 35327 - DNA, 19 bp, Artificial sequence
  SiRNA target sequence
acaatgttctattaatgcc

SEQ ID NO: 35328 - DNA, 19 bp, Artificial sequence
  SiRNA target sequence
caatgttctattaatgcca

SEQ ID NO: 35329 - DNA, 19 bp, Artificial sequence
  SiRNA target sequence
aatgttctattaatgccaa

SEQ ID NO: 35330 - DNA, 19 bp, Artificial sequence
  SiRNA target sequence
atgttctattaatgccaat

SEQ ID NO: 35331 - DNA, 19 bp, Artificial sequence
  SiRNA target sequence
tgttctattaatgccaata

SEQ ID NO: 35332 - DNA, 19 bp, Artificial sequence
  SiRNA target sequence
gttctattaatgccaatat

SEQ ID NO: 35333 - DNA, 19 bp, Artificial sequence
  SiRNA target sequence
ttctattaatgccaatata

SEQ ID NO: 35334 - DNA, 19 bp, Artificial sequence
  SiRNA target sequence
tctattaatgccaatataa

SEQ ID NO: 35335 - DNA, 19 bp, Artificial sequence
  SiRNA target sequence
ctattaatgccaatataaa

SEQ ID NO: 35336 - DNA, 19 bp, Artificial sequence
  SiRNA target sequence
tattaatgccaatataaaa

SEQ ID NO: 35337 - DNA, 19 bp, Artificial sequence
  SiRNA target sequence
attaatgccaatataaaat

SEQ ID NO: 35338 - DNA, 19 bp, Artificial sequence
  SiRNA target sequence
ttaatgccaatataaaata

SEQ ID NO: 35339 - DNA, 19 bp, Artificial sequence
  SiRNA target sequence
taatgccaatataaaatac

SEQ ID NO: 35340 - DNA, 19 bp, Artificial sequence
  SiRNA target sequence
aatgccaatataaaataca

SEQ ID NO: 35341 - DNA, 19 bp, Artificial sequence
  SiRNA target sequence
atgccaatataaaatacaa

SEQ ID NO: 35342 - DNA, 19 bp, Artificial sequence
  SiRNA target sequence
tgccaatataaaatacaac

SEQ ID NO: 35343 - DNA, 19 bp, Artificial sequence
  SiRNA target sequence
gccaatataaaatacaaca

SEQ ID NO: 35344 - DNA, 19 bp, Artificial sequence
  SiRNA target sequence
ccaatataaaatacaacat

SEQ ID NO: 35345 - DNA, 19 bp, Artificial sequence
  SiRNA target sequence
caatataaaatacaacatc

SEQ ID NO: 35346 - DNA, 19 bp, Artificial sequence
  SiRNA target sequence
aatataaaatacaacatcc

SEQ ID NO: 35347 - DNA, 19 bp, Artificial sequence
  SiRNA target sequence
atataaaatacaacatccc

SEQ ID NO: 35348 - DNA, 19 bp, Artificial sequence
  SiRNA target sequence
tataaaatacaacatccct

SEQ ID NO: 35349 - DNA, 19 bp, Artificial sequence
  SiRNA target sequence
ataaaatacaacatccctg

SEQ ID NO: 35350 - DNA, 19 bp, Artificial sequence
  SiRNA target sequence
taaaatacaacatccctgg

SEQ ID NO: 35351 - DNA, 19 bp, Artificial sequence
  SiRNA target sequence
aaaatacaacatccctggc

SEQ ID NO: 35352 - DNA, 19 bp, Artificial sequence
  SiRNA target sequence
aaatacaacatccctggca

SEQ ID NO: 35353 - DNA, 19 bp, Artificial sequence
  SiRNA target sequence
aatacaacatccctggcac

SEQ ID NO: 35354 - DNA, 19 bp, Artificial sequence
  SiRNA target sequence
atacaacatccctggcact

SEQ ID NO: 35355 - DNA, 19 bp, Artificial sequence
  SiRNA target sequence
tacaacatccctggcactt

SEQ ID NO: 35356 - DNA, 19 bp, Artificial sequence
  SiRNA target sequence
acaacatccctggcactta

SEQ ID NO: 35357 - DNA, 19 bp, Artificial sequence
  SiRNA target sequence
caacatccctggcacttag

SEQ ID NO: 35358 - DNA, 19 bp, Artificial sequence
  SiRNA target sequence
aacatccctggcacttagt

SEQ ID NO: 35359 - DNA, 19 bp, Artificial sequence
  SiRNA target sequence
acatccctggcacttagtt

SEQ ID NO: 35360 - DNA, 19 bp, Artificial sequence
  SiRNA target sequence
catccctggcacttagttt

SEQ ID NO: 35361 - DNA, 19 bp, Artificial sequence
  SiRNA target sequence
atccctggcacttagtttt

SEQ ID NO: 35362 - DNA, 19 bp, Artificial sequence
  SiRNA target sequence
tccctggcacttagttttg

SEQ ID NO: 35363 - DNA, 19 bp, Artificial sequence
  SiRNA target sequence
ccctggcacttagttttgc

SEQ ID NO: 35364 - DNA, 19 bp, Artificial sequence
  SiRNA target sequence
cctggcacttagttttgct

SEQ ID NO: 35365 - DNA, 19 bp, Artificial sequence
  SiRNA target sequence
ctggcacttagttttgctg

SEQ ID NO: 35366 - DNA, 19 bp, Artificial sequence
  SiRNA target sequence
tggcacttagttttgctgt

SEQ ID NO: 35367 - DNA, 19 bp, Artificial sequence
  SiRNA target sequence
ggcacttagttttgctgtt

SEQ ID NO: 35368 - DNA, 19 bp, Artificial sequence
  SiRNA target sequence
gcacttagttttgctgtta

SEQ ID NO: 35369 - DNA, 19 bp, Artificial sequence
  SiRNA target sequence
cacttagttttgctgttaa

SEQ ID NO: 35370 - DNA, 19 bp, Artificial sequence
  SiRNA target sequence
acttagttttgctgttaat

SEQ ID NO: 35371 - DNA, 19 bp, Artificial sequence
  SiRNA target sequence
cttagttttgctgttaata

SEQ ID NO: 35372 - DNA, 19 bp, Artificial sequence
  SiRNA target sequence
ttagttttgctgttaatat

SEQ ID NO: 35373 - DNA, 19 bp, Artificial sequence
  SiRNA target sequence
tagttttgctgttaatatt

SEQ ID NO: 35374 - DNA, 19 bp, Artificial sequence
  SiRNA target sequence
agttttgctgttaatattc

SEQ ID NO: 35375 - DNA, 19 bp, Artificial sequence
  SiRNA target sequence
gttttgctgttaatattcc

SEQ ID NO: 35376 - DNA, 19 bp, Artificial sequence
  SiRNA target sequence
ttttgctgttaatattcca

SEQ ID NO: 35377 - DNA, 19 bp, Artificial sequence
  SiRNA target sequence
tttgctgttaatattccat

SEQ ID NO: 35378 - DNA, 19 bp, Artificial sequence
  SiRNA target sequence
ttgctgttaatattccata

SEQ ID NO: 35379 - DNA, 19 bp, Artificial sequence
  SiRNA target sequence
tgctgttaatattccatag

SEQ ID NO: 35380 - DNA, 19 bp, Artificial sequence
  SiRNA target sequence
gctgttaatattccatagt

SEQ ID NO: 35381 - DNA, 19 bp, Artificial sequence
  SiRNA target sequence
ctgttaatattccatagtt

SEQ ID NO: 35382 - DNA, 19 bp, Artificial sequence
  SiRNA target sequence
tgttaatattccatagttt

SEQ ID NO: 35383 - DNA, 19 bp, Artificial sequence
  SiRNA target sequence
gttaatattccatagtttc

SEQ ID NO: 35384 - DNA, 19 bp, Artificial sequence
  SiRNA target sequence
ttaatattccatagtttcc

SEQ ID NO: 35385 - DNA, 19 bp, Artificial sequence
  SiRNA target sequence
taatattccatagtttcct

SEQ ID NO: 35386 - DNA, 19 bp, Artificial sequence
  SiRNA target sequence
aatattccatagtttccta

SEQ ID NO: 35387 - DNA, 19 bp, Artificial sequence
  SiRNA target sequence
atattccatagtttcctaa

SEQ ID NO: 35388 - DNA, 19 bp, Artificial sequence
  SiRNA target sequence
tattccatagtttcctaat

SEQ ID NO: 35389 - DNA, 19 bp, Artificial sequence
  SiRNA target sequence
attccatagtttcctaatg

SEQ ID NO: 35390 - DNA, 19 bp, Artificial sequence
  SiRNA target sequence
ttccatagtttcctaatgt

SEQ ID NO: 35391 - DNA, 19 bp, Artificial sequence
  SiRNA target sequence
tccatagtttcctaatgtt

SEQ ID NO: 35392 - DNA, 19 bp, Artificial sequence
  SiRNA target sequence
ccatagtttcctaatgtta

SEQ ID NO: 35393 - DNA, 19 bp, Artificial sequence
  SiRNA target sequence
catagtttcctaatgttat

SEQ ID NO: 35394 - DNA, 19 bp, Artificial sequence
  SiRNA target sequence
atagtttcctaatgttata

SEQ ID NO: 35395 - DNA, 19 bp, Artificial sequence
  SiRNA target sequence
tagtttcctaatgttataa

SEQ ID NO: 35396 - DNA, 19 bp, Artificial sequence
  SiRNA target sequence
agtttcctaatgttataac

SEQ ID NO: 35397 - DNA, 19 bp, Artificial sequence
  SiRNA target sequence
gtttcctaatgttataact

SEQ ID NO: 35398 - DNA, 19 bp, Artificial sequence
  SiRNA target sequence
tttcctaatgttataacta

SEQ ID NO: 35399 - DNA, 19 bp, Artificial sequence
  SiRNA target sequence
ttcctaatgttataactat

SEQ ID NO: 35400 - DNA, 19 bp, Artificial sequence
  SiRNA target sequence
tcctaatgttataactata

SEQ ID NO: 35401 - DNA, 19 bp, Artificial sequence
  SiRNA target sequence
cctaatgttataactataa

SEQ ID NO: 35402 - DNA, 19 bp, Artificial sequence
  SiRNA target sequence
ctaatgttataactataaa

SEQ ID NO: 35403 - DNA, 19 bp, Artificial sequence
  SiRNA target sequence
taatgttataactataaaa

SEQ ID NO: 35404 - DNA, 19 bp, Artificial sequence
  SiRNA target sequence
aatgttataactataaaac

SEQ ID NO: 35405 - DNA, 19 bp, Artificial sequence
  SiRNA target sequence
atgttataactataaaaca

SEQ ID NO: 35406 - DNA, 19 bp, Artificial sequence
  SiRNA target sequence
tgttataactataaaacac

SEQ ID NO: 35407 - DNA, 19 bp, Artificial sequence
  SiRNA target sequence
gttataactataaaacact

SEQ ID NO: 35408 - DNA, 19 bp, Artificial sequence
  SiRNA target sequence
ttataactataaaacactg

SEQ ID NO: 35409 - DNA, 19 bp, Artificial sequence
  SiRNA target sequence
tataactataaaacactgt

SEQ ID NO: 35410 - DNA, 19 bp, Artificial sequence
  SiRNA target sequence
ataactataaaacactgta

SEQ ID NO: 35411 - DNA, 19 bp, Artificial sequence
  SiRNA target sequence
taactataaaacactgtaa

SEQ ID NO: 35412 - DNA, 19 bp, Artificial sequence
  SiRNA target sequence
aactataaaacactgtaaa

SEQ ID NO: 35413 - DNA, 19 bp, Artificial sequence
  SiRNA target sequence
actataaaacactgtaaag

SEQ ID NO: 35414 - DNA, 19 bp, Artificial sequence
  SiRNA target sequence
ctataaaacactgtaaagc

SEQ ID NO: 35415 - DNA, 19 bp, Artificial sequence
  SiRNA target sequence
tataaaacactgtaaagca

SEQ ID NO: 35416 - DNA, 19 bp, Artificial sequence
  SiRNA target sequence
ataaaacactgtaaagcaa

SEQ ID NO: 35417 - DNA, 19 bp, Artificial sequence
  SiRNA target sequence
taaaacactgtaaagcaaa

SEQ ID NO: 35418 - DNA, 19 bp, Artificial sequence
  SiRNA target sequence
aaaacactgtaaagcaaaa

SEQ ID NO: 35419 - DNA, 19 bp, Artificial sequence
  SiRNA target sequence
aaacactgtaaagcaaaaa

SEQ ID NO: 35420 - DNA, 19 bp, Artificial sequence
  SiRNA target sequence
aacactgtaaagcaaaaat

SEQ ID NO: 35421 - DNA, 19 bp, Artificial sequence
  SiRNA target sequence
acactgtaaagcaaaaatt

SEQ ID NO: 35422 - DNA, 19 bp, Artificial sequence
  SiRNA target sequence
cactgtaaagcaaaaatta

SEQ ID NO: 35423 - DNA, 19 bp, Artificial sequence
  SiRNA target sequence
actgtaaagcaaaaattat

SEQ ID NO: 35424 - DNA, 19 bp, Artificial sequence
  SiRNA target sequence
ctgtaaagcaaaaattatc

SEQ ID NO: 35425 - DNA, 19 bp, Artificial sequence
  SiRNA target sequence
tgtaaagcaaaaattatct

SEQ ID NO: 35426 - DNA, 19 bp, Artificial sequence
  SiRNA target sequence
gtaaagcaaaaattatctt

SEQ ID NO: 35427 - DNA, 19 bp, Artificial sequence
  SiRNA target sequence
taaagcaaaaattatctta

SEQ ID NO: 35428 - DNA, 19 bp, Artificial sequence
  SiRNA target sequence
aaagcaaaaattatcttat

SEQ ID NO: 35429 - DNA, 19 bp, Artificial sequence
  SiRNA target sequence
aagcaaaaattatcttatt

SEQ ID NO: 35430 - DNA, 19 bp, Artificial sequence
  SiRNA target sequence
agcaaaaattatcttattt

SEQ ID NO: 35431 - DNA, 19 bp, Artificial sequence
  SiRNA target sequence
gcaaaaattatcttattta

SEQ ID NO: 35432 - DNA, 19 bp, Artificial sequence
  SiRNA target sequence
caaaaattatcttatttac

SEQ ID NO: 35433 - DNA, 19 bp, Artificial sequence
  SiRNA target sequence
aaaaattatcttatttaca

SEQ ID NO: 35434 - DNA, 19 bp, Artificial sequence
  SiRNA target sequence
aaaattatcttatttacaa

SEQ ID NO: 35435 - DNA, 19 bp, Artificial sequence
  SiRNA target sequence
aaattatcttatttacaag

SEQ ID NO: 35436 - DNA, 19 bp, Artificial sequence
  SiRNA target sequence
aattatcttatttacaagg

SEQ ID NO: 35437 - DNA, 19 bp, Artificial sequence
  SiRNA target sequence
attatcttatttacaaggt

SEQ ID NO: 35438 - DNA, 19 bp, Artificial sequence
  SiRNA target sequence
ttatcttatttacaaggta

SEQ ID NO: 35439 - DNA, 19 bp, Artificial sequence
  SiRNA target sequence
tatcttatttacaaggtat

SEQ ID NO: 35440 - DNA, 19 bp, Artificial sequence
  SiRNA target sequence
atcttatttacaaggtata

SEQ ID NO: 35441 - DNA, 19 bp, Artificial sequence
  SiRNA target sequence
tcttatttacaaggtataa

SEQ ID NO: 35442 - DNA, 19 bp, Artificial sequence
  SiRNA target sequence
cttatttacaaggtataaa

SEQ ID NO: 35443 - DNA, 19 bp, Artificial sequence
  SiRNA target sequence
ttatttacaaggtataaaa

SEQ ID NO: 35444 - DNA, 19 bp, Artificial sequence
  SiRNA target sequence
tatttacaaggtataaaaa

SEQ ID NO: 35445 - DNA, 19 bp, Artificial sequence
  SiRNA target sequence
atttacaaggtataaaaaa

SEQ ID NO: 35446 - DNA, 19 bp, Artificial sequence
  SiRNA target sequence
tttacaaggtataaaaaac

SEQ ID NO: 35447 - DNA, 19 bp, Artificial sequence
  SiRNA target sequence
ttacaaggtataaaaaact

SEQ ID NO: 35448 - DNA, 19 bp, Artificial sequence
  SiRNA target sequence
tacaaggtataaaaaacta

SEQ ID NO: 35449 - DNA, 19 bp, Artificial sequence
  SiRNA target sequence
acaaggtataaaaaactaa

SEQ ID NO: 35450 - DNA, 19 bp, Artificial sequence
  SiRNA target sequence
caaggtataaaaaactaag

SEQ ID NO: 35451 - DNA, 19 bp, Artificial sequence
  SiRNA target sequence
aaggtataaaaaactaaga

SEQ ID NO: 35452 - DNA, 19 bp, Artificial sequence
  SiRNA target sequence
aggtataaaaaactaagag

SEQ ID NO: 35453 - DNA, 19 bp, Artificial sequence
  SiRNA target sequence
ggtataaaaaactaagaga

SEQ ID NO: 35454 - DNA, 19 bp, Artificial sequence
  SiRNA target sequence
gtataaaaaactaagagat

SEQ ID NO: 35455 - DNA, 19 bp, Artificial sequence
  SiRNA target sequence
tataaaaaactaagagatc

SEQ ID NO: 35456 - DNA, 19 bp, Artificial sequence
  SiRNA target sequence
ataaaaaactaagagatct

SEQ ID NO: 35457 - DNA, 19 bp, Artificial sequence
  SiRNA target sequence
taaaaaactaagagatctc

SEQ ID NO: 35458 - DNA, 19 bp, Artificial sequence
  SiRNA target sequence
aaaaaactaagagatctcc

SEQ ID NO: 35459 - DNA, 19 bp, Artificial sequence
  SiRNA target sequence
aaaaactaagagatctcca

SEQ ID NO: 35460 - DNA, 19 bp, Artificial sequence
  SiRNA target sequence
aaaactaagagatctccag

SEQ ID NO: 35461 - DNA, 19 bp, Artificial sequence
  SiRNA target sequence
aaactaagagatctccaga

SEQ ID NO: 35462 - DNA, 19 bp, Artificial sequence
  SiRNA target sequence
aactaagagatctccagat

SEQ ID NO: 35463 - DNA, 19 bp, Artificial sequence
  SiRNA target sequence
actaagagatctccagatt

SEQ ID NO: 35464 - DNA, 19 bp, Artificial sequence
  SiRNA target sequence
ctaagagatctccagattc

SEQ ID NO: 35465 - DNA, 19 bp, Artificial sequence
  SiRNA target sequence
taagagatctccagattct

SEQ ID NO: 35466 - DNA, 19 bp, Artificial sequence
  SiRNA target sequence
aagagatctccagattctg

SEQ ID NO: 35467 - DNA, 19 bp, Artificial sequence
  SiRNA target sequence
agagatctccagattctgt

SEQ ID NO: 35468 - DNA, 19 bp, Artificial sequence
  SiRNA target sequence
gagatctccagattctgtt

SEQ ID NO: 35469 - DNA, 19 bp, Artificial sequence
  SiRNA target sequence
agatctccagattctgtta

SEQ ID NO: 35470 - DNA, 19 bp, Artificial sequence
  SiRNA target sequence
gatctccagattctgttac

SEQ ID NO: 35471 - DNA, 19 bp, Artificial sequence
  SiRNA target sequence
atctccagattctgttaca

SEQ ID NO: 35472 - DNA, 19 bp, Artificial sequence
  SiRNA target sequence
tctccagattctgttacat

SEQ ID NO: 35473 - DNA, 19 bp, Artificial sequence
  SiRNA target sequence
ctccagattctgttacatt

SEQ ID NO: 35474 - DNA, 19 bp, Artificial sequence
  SiRNA target sequence
tccagattctgttacattc

SEQ ID NO: 35475 - DNA, 19 bp, Artificial sequence
  SiRNA target sequence
ccagattctgttacattcc

SEQ ID NO: 35476 - DNA, 19 bp, Artificial sequence
  SiRNA target sequence
cagattctgttacattccg

SEQ ID NO: 35477 - DNA, 19 bp, Artificial sequence
  SiRNA target sequence
agattctgttacattccga

SEQ ID NO: 35478 - DNA, 19 bp, Artificial sequence
  SiRNA target sequence
gattctgttacattccgat

SEQ ID NO: 35479 - DNA, 19 bp, Artificial sequence
  SiRNA target sequence
attctgttacattccgatt

SEQ ID NO: 35480 - DNA, 19 bp, Artificial sequence
  SiRNA target sequence
ttctgttacattccgattc

SEQ ID NO: 35481 - DNA, 19 bp, Artificial sequence
  SiRNA target sequence
tctgttacattccgattct

SEQ ID NO: 35482 - DNA, 19 bp, Artificial sequence
  SiRNA target sequence
ctgttacattccgattcta

SEQ ID NO: 35483 - DNA, 19 bp, Artificial sequence
  SiRNA target sequence
tgttacattccgattctac

SEQ ID NO: 35484 - DNA, 19 bp, Artificial sequence
  SiRNA target sequence
gttacattccgattctact

SEQ ID NO: 35485 - DNA, 19 bp, Artificial sequence
  SiRNA target sequence
ttacattccgattctactt

SEQ ID NO: 35486 - DNA, 19 bp, Artificial sequence
  SiRNA target sequence
tacattccgattctacttc

SEQ ID NO: 35487 - DNA, 19 bp, Artificial sequence
  SiRNA target sequence
acattccgattctacttca

SEQ ID NO: 35488 - DNA, 19 bp, Artificial sequence
  SiRNA target sequence
cattccgattctacttcag

SEQ ID NO: 35489 - DNA, 19 bp, Artificial sequence
  SiRNA target sequence
attccgattctacttcaga

SEQ ID NO: 35490 - DNA, 19 bp, Artificial sequence
  SiRNA target sequence
ttccgattctacttcagaa

SEQ ID NO: 35491 - DNA, 19 bp, Artificial sequence
  SiRNA target sequence
tccgattctacttcagaaa

SEQ ID NO: 35492 - DNA, 19 bp, Artificial sequence
  SiRNA target sequence
ccgattctacttcagaaac

SEQ ID NO: 35493 - DNA, 19 bp, Artificial sequence
  SiRNA target sequence
cgattctacttcagaaaca

SEQ ID NO: 35494 - DNA, 19 bp, Artificial sequence
  SiRNA target sequence
gattctacttcagaaacat

SEQ ID NO: 35495 - DNA, 19 bp, Artificial sequence
  SiRNA target sequence
attctacttcagaaacata

SEQ ID NO: 35496 - DNA, 19 bp, Artificial sequence
  SiRNA target sequence
ttctacttcagaaacatat

SEQ ID NO: 35497 - DNA, 19 bp, Artificial sequence
  SiRNA target sequence
tctacttcagaaacatatt

SEQ ID NO: 35498 - DNA, 19 bp, Artificial sequence
  SiRNA target sequence
ctacttcagaaacatattt

SEQ ID NO: 35499 - DNA, 19 bp, Artificial sequence
  SiRNA target sequence
tacttcagaaacatatttt

SEQ ID NO: 35500 - DNA, 19 bp, Artificial sequence
  SiRNA target sequence
acttcagaaacatattttt

SEQ ID NO: 35501 - DNA, 19 bp, Artificial sequence
  SiRNA target sequence
cttcagaaacatatttttc

SEQ ID NO: 35502 - DNA, 19 bp, Artificial sequence
  SiRNA target sequence
ttcagaaacatatttttca

SEQ ID NO: 35503 - DNA, 19 bp, Artificial sequence
  SiRNA target sequence
tcagaaacatatttttcat

SEQ ID NO: 35504 - DNA, 19 bp, Artificial sequence
  SiRNA target sequence
cagaaacatatttttcata

SEQ ID NO: 35505 - DNA, 19 bp, Artificial sequence
  SiRNA target sequence
agaaacatatttttcatat

SEQ ID NO: 35506 - DNA, 19 bp, Artificial sequence
  SiRNA target sequence
gaaacatatttttcatatt

SEQ ID NO: 35507 - DNA, 19 bp, Artificial sequence
  SiRNA target sequence
aaacatatttttcatattt

SEQ ID NO: 35508 - DNA, 19 bp, Artificial sequence
  SiRNA target sequence
aacatatttttcatattta

SEQ ID NO: 35509 - DNA, 19 bp, Artificial sequence
  SiRNA target sequence
acatatttttcatatttaa

SEQ ID NO: 35510 - DNA, 19 bp, Artificial sequence
  SiRNA target sequence
catatttttcatatttaag

SEQ ID NO: 35511 - DNA, 19 bp, Artificial sequence
  SiRNA target sequence
atatttttcatatttaagc

SEQ ID NO: 35512 - DNA, 19 bp, Artificial sequence
  SiRNA target sequence
tatttttcatatttaagcg

SEQ ID NO: 35513 - DNA, 19 bp, Artificial sequence
  SiRNA target sequence
atttttcatatttaagcga

SEQ ID NO: 35514 - DNA, 19 bp, Artificial sequence
  SiRNA target sequence
tttttcatatttaagcgat

SEQ ID NO: 35515 - DNA, 19 bp, Artificial sequence
  SiRNA target sequence
ttttcatatttaagcgatt

SEQ ID NO: 35516 - DNA, 19 bp, Artificial sequence
  SiRNA target sequence
tttcatatttaagcgattc

SEQ ID NO: 35517 - DNA, 19 bp, Artificial sequence
  SiRNA target sequence
ttcatatttaagcgattct

SEQ ID NO: 35518 - DNA, 19 bp, Artificial sequence
  SiRNA target sequence
tcatatttaagcgattctt

SEQ ID NO: 35519 - DNA, 19 bp, Artificial sequence
  SiRNA target sequence
catatttaagcgattcttc

SEQ ID NO: 35520 - DNA, 19 bp, Artificial sequence
  SiRNA target sequence
atatttaagcgattcttct

SEQ ID NO: 35521 - DNA, 19 bp, Artificial sequence
  SiRNA target sequence
tatttaagcgattcttctt

SEQ ID NO: 35522 - DNA, 19 bp, Artificial sequence
  SiRNA target sequence
atttaagcgattcttcttc

SEQ ID NO: 35523 - DNA, 19 bp, Artificial sequence
  SiRNA target sequence
tttaagcgattcttcttct

SEQ ID NO: 35524 - DNA, 19 bp, Artificial sequence
  SiRNA target sequence
ttaagcgattcttcttctt

SEQ ID NO: 35525 - DNA, 19 bp, Artificial sequence
  SiRNA target sequence
taagcgattcttcttcttc

SEQ ID NO: 35526 - DNA, 19 bp, Artificial sequence
  SiRNA target sequence
aagcgattcttcttcttct

SEQ ID NO: 35527 - DNA, 19 bp, Artificial sequence
  SiRNA target sequence
agcgattcttcttcttctg

SEQ ID NO: 35528 - DNA, 19 bp, Artificial sequence
  SiRNA target sequence
gcgattcttcttcttctgt

SEQ ID NO: 35529 - DNA, 19 bp, Artificial sequence
  SiRNA target sequence
cgattcttcttcttctgtt

SEQ ID NO: 35530 - DNA, 19 bp, Artificial sequence
  SiRNA target sequence
gattcttcttcttctgttt

SEQ ID NO: 35531 - DNA, 19 bp, Artificial sequence
  SiRNA target sequence
attcttcttcttctgtttt

SEQ ID NO: 35532 - DNA, 19 bp, Artificial sequence
  SiRNA target sequence
ttcttcttcttctgtttta

SEQ ID NO: 35533 - DNA, 19 bp, Artificial sequence
  SiRNA target sequence
tcttcttcttctgttttat

SEQ ID NO: 35534 - DNA, 19 bp, Artificial sequence
  SiRNA target sequence
cttcttcttctgttttata

SEQ ID NO: 35535 - DNA, 19 bp, Artificial sequence
  SiRNA target sequence
ttcttcttctgttttatat

SEQ ID NO: 35536 - DNA, 19 bp, Artificial sequence
  SiRNA target sequence
tcttcttctgttttatatg

SEQ ID NO: 35537 - DNA, 19 bp, Artificial sequence
  SiRNA target sequence
cttcttctgttttatatgc

SEQ ID NO: 35538 - DNA, 19 bp, Artificial sequence
  SiRNA target sequence
ttcttctgttttatatgct

SEQ ID NO: 35539 - DNA, 19 bp, Artificial sequence
  SiRNA target sequence
tcttctgttttatatgcta

SEQ ID NO: 35540 - DNA, 19 bp, Artificial sequence
  SiRNA target sequence
cttctgttttatatgctag

SEQ ID NO: 35541 - DNA, 19 bp, Artificial sequence
  SiRNA target sequence
ttctgttttatatgctagt

SEQ ID NO: 35542 - DNA, 19 bp, Artificial sequence
  SiRNA target sequence
tctgttttatatgctagta

SEQ ID NO: 35543 - DNA, 19 bp, Artificial sequence
  SiRNA target sequence
ctgttttatatgctagtat

SEQ ID NO: 35544 - DNA, 19 bp, Artificial sequence
  SiRNA target sequence
tgttttatatgctagtata

SEQ ID NO: 35545 - DNA, 19 bp, Artificial sequence
  SiRNA target sequence
gttttatatgctagtatag

SEQ ID NO: 35546 - DNA, 19 bp, Artificial sequence
  SiRNA target sequence
ttttatatgctagtatagt

SEQ ID NO: 35547 - DNA, 19 bp, Artificial sequence
  SiRNA target sequence
tttatatgctagtatagtc

SEQ ID NO: 35548 - DNA, 19 bp, Artificial sequence
  SiRNA target sequence
ttatatgctagtatagtct

SEQ ID NO: 35549 - DNA, 19 bp, Artificial sequence
  SiRNA target sequence
tatatgctagtatagtctc

SEQ ID NO: 35550 - DNA, 19 bp, Artificial sequence
  SiRNA target sequence
atatgctagtatagtctca

SEQ ID NO: 35551 - DNA, 19 bp, Artificial sequence
  SiRNA target sequence
tatgctagtatagtctcat

SEQ ID NO: 35552 - DNA, 19 bp, Artificial sequence
  SiRNA target sequence
atgctagtatagtctcatg

SEQ ID NO: 35553 - DNA, 19 bp, Artificial sequence
  SiRNA target sequence
tgctagtatagtctcatga

SEQ ID NO: 35554 - DNA, 19 bp, Artificial sequence
  SiRNA target sequence
gctagtatagtctcatgat

SEQ ID NO: 35555 - DNA, 19 bp, Artificial sequence
  SiRNA target sequence
ctagtatagtctcatgatt

SEQ ID NO: 35556 - DNA, 19 bp, Artificial sequence
  SiRNA target sequence
tagtatagtctcatgatta

SEQ ID NO: 35557 - DNA, 19 bp, Artificial sequence
  SiRNA target sequence
agtatagtctcatgattaa

SEQ ID NO: 35558 - DNA, 19 bp, Artificial sequence
  SiRNA target sequence
gtatagtctcatgattaat

SEQ ID NO: 35559 - DNA, 19 bp, Artificial sequence
  SiRNA target sequence
tatagtctcatgattaatt

SEQ ID NO: 35560 - DNA, 19 bp, Artificial sequence
  SiRNA target sequence
atagtctcatgattaatta

SEQ ID NO: 35561 - DNA, 19 bp, Artificial sequence
  SiRNA target sequence
tagtctcatgattaattaa

SEQ ID NO: 35562 - DNA, 19 bp, Artificial sequence
  SiRNA target sequence
agtctcatgattaattaaa

SEQ ID NO: 35563 - DNA, 19 bp, Artificial sequence
  SiRNA target sequence
gtctcatgattaattaaag

SEQ ID NO: 35564 - DNA, 19 bp, Artificial sequence
  SiRNA target sequence
tctcatgattaattaaaga

SEQ ID NO: 35565 - DNA, 19 bp, Artificial sequence
  SiRNA target sequence
ctcatgattaattaaagaa

SEQ ID NO: 35566 - DNA, 19 bp, Artificial sequence
  SiRNA target sequence
tcatgattaattaaagaat

SEQ ID NO: 35567 - DNA, 19 bp, Artificial sequence
  SiRNA target sequence
catgattaattaaagaatc

SEQ ID NO: 35568 - DNA, 19 bp, Artificial sequence
  SiRNA target sequence
atgattaattaaagaatca

SEQ ID NO: 35569 - DNA, 19 bp, Artificial sequence
  SiRNA target sequence
tgattaattaaagaatcat

SEQ ID NO: 35570 - DNA, 19 bp, Artificial sequence
  SiRNA target sequence
gattaattaaagaatcatg

SEQ ID NO: 35571 - DNA, 19 bp, Artificial sequence
  SiRNA target sequence
attaattaaagaatcatgt

SEQ ID NO: 35572 - DNA, 19 bp, Artificial sequence
  SiRNA target sequence
ttaattaaagaatcatgta

SEQ ID NO: 35573 - DNA, 19 bp, Artificial sequence
  SiRNA target sequence
taattaaagaatcatgtaa

SEQ ID NO: 35574 - DNA, 19 bp, Artificial sequence
  SiRNA target sequence
aattaaagaatcatgtaag

SEQ ID NO: 35575 - DNA, 19 bp, Artificial sequence
  SiRNA target sequence
attaaagaatcatgtaagt

SEQ ID NO: 35576 - DNA, 19 bp, Artificial sequence
  SiRNA target sequence
ttaaagaatcatgtaagtg

SEQ ID NO: 35577 - DNA, 19 bp, Artificial sequence
  SiRNA target sequence
taaagaatcatgtaagtga

SEQ ID NO: 35578 - DNA, 19 bp, Artificial sequence
  SiRNA target sequence
aaagaatcatgtaagtgat

SEQ ID NO: 35579 - DNA, 19 bp, Artificial sequence
  SiRNA target sequence
aagaatcatgtaagtgatt

SEQ ID NO: 35580 - DNA, 19 bp, Artificial sequence
  SiRNA target sequence
agaatcatgtaagtgattt

SEQ ID NO: 35581 - DNA, 19 bp, Artificial sequence
  SiRNA target sequence
gaatcatgtaagtgatttg

SEQ ID NO: 35582 - DNA, 19 bp, Artificial sequence
  SiRNA target sequence
aatcatgtaagtgatttga

SEQ ID NO: 35583 - DNA, 19 bp, Artificial sequence
  SiRNA target sequence
atcatgtaagtgatttgag

SEQ ID NO: 35584 - DNA, 19 bp, Artificial sequence
  SiRNA target sequence
tcatgtaagtgatttgagc

SEQ ID NO: 35585 - DNA, 19 bp, Artificial sequence
  SiRNA target sequence
catgtaagtgatttgagca

SEQ ID NO: 35586 - DNA, 19 bp, Artificial sequence
  SiRNA target sequence
atgtaagtgatttgagcat

SEQ ID NO: 35587 - DNA, 19 bp, Artificial sequence
  SiRNA target sequence
tgtaagtgatttgagcatc

SEQ ID NO: 35588 - DNA, 19 bp, Artificial sequence
  SiRNA target sequence
gtaagtgatttgagcatct

SEQ ID NO: 35589 - DNA, 19 bp, Artificial sequence
  SiRNA target sequence
taagtgatttgagcatctt

SEQ ID NO: 35590 - DNA, 19 bp, Artificial sequence
  SiRNA target sequence
aagtgatttgagcatcttt

SEQ ID NO: 35591 - DNA, 19 bp, Artificial sequence
  SiRNA target sequence
agtgatttgagcatctttg

SEQ ID NO: 35592 - DNA, 19 bp, Artificial sequence
  SiRNA target sequence
gtgatttgagcatctttgt

SEQ ID NO: 35593 - DNA, 19 bp, Artificial sequence
  SiRNA target sequence
tgatttgagcatctttgtt

SEQ ID NO: 35594 - DNA, 19 bp, Artificial sequence
  SiRNA target sequence
gatttgagcatctttgttg

SEQ ID NO: 35595 - DNA, 19 bp, Artificial sequence
  SiRNA target sequence
atttgagcatctttgttgt

SEQ ID NO: 35596 - DNA, 19 bp, Artificial sequence
  SiRNA target sequence
tttgagcatctttgttgtg

SEQ ID NO: 35597 - DNA, 19 bp, Artificial sequence
  SiRNA target sequence
ttgagcatctttgttgtgc

SEQ ID NO: 35598 - DNA, 19 bp, Artificial sequence
  SiRNA target sequence
tgagcatctttgttgtgcg

SEQ ID NO: 35599 - DNA, 19 bp, Artificial sequence
  SiRNA target sequence
gagcatctttgttgtgcgc

SEQ ID NO: 35600 - DNA, 19 bp, Artificial sequence
  SiRNA target sequence
agcatctttgttgtgcgca

SEQ ID NO: 35601 - DNA, 19 bp, Artificial sequence
  SiRNA target sequence
gcatctttgttgtgcgcaa

SEQ ID NO: 35602 - DNA, 19 bp, Artificial sequence
  SiRNA target sequence
catctttgttgtgcgcaat

SEQ ID NO: 35603 - DNA, 19 bp, Artificial sequence
  SiRNA target sequence
atctttgttgtgcgcaatt

SEQ ID NO: 35604 - DNA, 19 bp, Artificial sequence
  SiRNA target sequence
tctttgttgtgcgcaatta

SEQ ID NO: 35605 - DNA, 19 bp, Artificial sequence
  SiRNA target sequence
ctttgttgtgcgcaattat

SEQ ID NO: 35606 - DNA, 19 bp, Artificial sequence
  SiRNA target sequence
tttgttgtgcgcaattata

SEQ ID NO: 35607 - DNA, 19 bp, Artificial sequence
  SiRNA target sequence
ttgttgtgcgcaattatat

SEQ ID NO: 35608 - DNA, 19 bp, Artificial sequence
  SiRNA target sequence
tgttgtgcgcaattatatt

SEQ ID NO: 35609 - DNA, 19 bp, Artificial sequence
  SiRNA target sequence
gttgtgcgcaattatattc

SEQ ID NO: 35610 - DNA, 19 bp, Artificial sequence
  SiRNA target sequence
ttgtgcgcaattatattct

SEQ ID NO: 35611 - DNA, 19 bp, Artificial sequence
  SiRNA target sequence
tgtgcgcaattatattctt

SEQ ID NO: 35612 - DNA, 19 bp, Artificial sequence
  SiRNA target sequence
gtgcgcaattatattcttt

SEQ ID NO: 35613 - DNA, 19 bp, Artificial sequence
  SiRNA target sequence
tgcgcaattatattctttt

SEQ ID NO: 35614 - DNA, 19 bp, Artificial sequence
  SiRNA target sequence
gcgcaattatattcttttc

SEQ ID NO: 35615 - DNA, 19 bp, Artificial sequence
  SiRNA target sequence
cgcaattatattcttttct

SEQ ID NO: 35616 - DNA, 19 bp, Artificial sequence
  SiRNA target sequence
gcaattatattcttttctt

SEQ ID NO: 35617 - DNA, 19 bp, Artificial sequence
  SiRNA target sequence
caattatattcttttctta

SEQ ID NO: 35618 - DNA, 19 bp, Artificial sequence
  SiRNA target sequence
aattatattcttttcttat

SEQ ID NO: 35619 - DNA, 19 bp, Artificial sequence
  SiRNA target sequence
attatattcttttcttatt

SEQ ID NO: 35620 - DNA, 19 bp, Artificial sequence
  SiRNA target sequence
ttatattcttttcttattc

SEQ ID NO: 35621 - DNA, 19 bp, Artificial sequence
  SiRNA target sequence
tatattcttttcttattcc

SEQ ID NO: 35622 - DNA, 19 bp, Artificial sequence
  SiRNA target sequence
atattcttttcttattcct

SEQ ID NO: 35623 - DNA, 19 bp, Artificial sequence
  SiRNA target sequence
tattcttttcttattcctg

SEQ ID NO: 35624 - DNA, 19 bp, Artificial sequence
  SiRNA target sequence
attcttttcttattcctgt

SEQ ID NO: 35625 - DNA, 19 bp, Artificial sequence
  SiRNA target sequence
ttcttttcttattcctgta

SEQ ID NO: 35626 - DNA, 19 bp, Artificial sequence
  SiRNA target sequence
tcttttcttattcctgtac

SEQ ID NO: 35627 - DNA, 19 bp, Artificial sequence
  SiRNA target sequence
cttttcttattcctgtacg

SEQ ID NO: 35628 - DNA, 19 bp, Artificial sequence
  SiRNA target sequence
ttttcttattcctgtacgc

SEQ ID NO: 35629 - DNA, 19 bp, Artificial sequence
  SiRNA target sequence
tttcttattcctgtacgcc

SEQ ID NO: 35630 - DNA, 19 bp, Artificial sequence
  SiRNA target sequence
ttcttattcctgtacgcca

SEQ ID NO: 35631 - DNA, 19 bp, Artificial sequence
  SiRNA target sequence
tcttattcctgtacgccaa

SEQ ID NO: 35632 - DNA, 19 bp, Artificial sequence
  SiRNA target sequence
cttattcctgtacgccaat

SEQ ID NO: 35633 - DNA, 19 bp, Artificial sequence
  SiRNA target sequence
ttattcctgtacgccaatg

SEQ ID NO: 35634 - DNA, 19 bp, Artificial sequence
  SiRNA target sequence
tattcctgtacgccaatga

SEQ ID NO: 35635 - DNA, 19 bp, Artificial sequence
  SiRNA target sequence
attcctgtacgccaatgaa

SEQ ID NO: 35636 - DNA, 19 bp, Artificial sequence
  SiRNA target sequence
ttcctgtacgccaatgaac

SEQ ID NO: 35637 - DNA, 19 bp, Artificial sequence
  SiRNA target sequence
tcctgtacgccaatgaact

SEQ ID NO: 35638 - DNA, 19 bp, Artificial sequence
  SiRNA target sequence
cctgtacgccaatgaacta

SEQ ID NO: 35639 - DNA, 19 bp, Artificial sequence
  SiRNA target sequence
ctgtacgccaatgaactat

SEQ ID NO: 35640 - DNA, 19 bp, Artificial sequence
  SiRNA target sequence
tgtacgccaatgaactatt

SEQ ID NO: 35641 - DNA, 19 bp, Artificial sequence
  SiRNA target sequence
gtacgccaatgaactattt

SEQ ID NO: 35642 - DNA, 19 bp, Artificial sequence
  SiRNA target sequence
tacgccaatgaactatttt

SEQ ID NO: 35643 - DNA, 19 bp, Artificial sequence
  SiRNA target sequence
acgccaatgaactattttc

SEQ ID NO: 35644 - DNA, 19 bp, Artificial sequence
  SiRNA target sequence
cgccaatgaactattttcg

SEQ ID NO: 35645 - DNA, 19 bp, Artificial sequence
  SiRNA target sequence
gccaatgaactattttcgc

SEQ ID NO: 35646 - DNA, 19 bp, Artificial sequence
  SiRNA target sequence
ccaatgaactattttcgca

SEQ ID NO: 35647 - DNA, 19 bp, Artificial sequence
  SiRNA target sequence
caatgaactattttcgcag

SEQ ID NO: 35648 - DNA, 19 bp, Artificial sequence
  SiRNA target sequence
aatgaactattttcgcagt

SEQ ID NO: 35649 - DNA, 19 bp, Artificial sequence
  SiRNA target sequence
atgaactattttcgcagtt

SEQ ID NO: 35650 - DNA, 19 bp, Artificial sequence
  SiRNA target sequence
tgaactattttcgcagttg

SEQ ID NO: 35651 - DNA, 19 bp, Artificial sequence
  SiRNA target sequence
gaactattttcgcagttgc

SEQ ID NO: 35652 - DNA, 19 bp, Artificial sequence
  SiRNA target sequence
aactattttcgcagttgca

SEQ ID NO: 35653 - DNA, 19 bp, Artificial sequence
  SiRNA target sequence
actattttcgcagttgcaa

SEQ ID NO: 35654 - DNA, 19 bp, Artificial sequence
  SiRNA target sequence
ctattttcgcagttgcaag

SEQ ID NO: 35655 - DNA, 19 bp, Artificial sequence
  SiRNA target sequence
tattttcgcagttgcaagg

SEQ ID NO: 35656 - DNA, 19 bp, Artificial sequence
  SiRNA target sequence
attttcgcagttgcaagga

SEQ ID NO: 35657 - DNA, 19 bp, Artificial sequence
  SiRNA target sequence
ttttcgcagttgcaaggat

SEQ ID NO: 35658 - DNA, 19 bp, Artificial sequence
  SiRNA target sequence
tttcgcagttgcaaggatg

SEQ ID NO: 35659 - DNA, 19 bp, Artificial sequence
  SiRNA target sequence
ttcgcagttgcaaggatgt

SEQ ID NO: 35660 - DNA, 19 bp, Artificial sequence
  SiRNA target sequence
tcgcagttgcaaggatgta

SEQ ID NO: 35661 - DNA, 19 bp, Artificial sequence
  SiRNA target sequence
cgcagttgcaaggatgtaa

SEQ ID NO: 35662 - DNA, 19 bp, Artificial sequence
  SiRNA target sequence
gcagttgcaaggatgtaaa

SEQ ID NO: 35663 - DNA, 19 bp, Artificial sequence
  SiRNA target sequence
cagttgcaaggatgtaaac

SEQ ID NO: 35664 - DNA, 19 bp, Artificial sequence
  SiRNA target sequence
agttgcaaggatgtaaact

SEQ ID NO: 35665 - DNA, 19 bp, Artificial sequence
  SiRNA target sequence
gttgcaaggatgtaaacta

SEQ ID NO: 35666 - DNA, 19 bp, Artificial sequence
  SiRNA target sequence
ttgcaaggatgtaaactaa

SEQ ID NO: 35667 - DNA, 19 bp, Artificial sequence
  SiRNA target sequence
tgcaaggatgtaaactaat

SEQ ID NO: 35668 - DNA, 19 bp, Artificial sequence
  SiRNA target sequence
gcaaggatgtaaactaata

SEQ ID NO: 35669 - DNA, 19 bp, Artificial sequence
  SiRNA target sequence
caaggatgtaaactaataa

SEQ ID NO: 35670 - DNA, 19 bp, Artificial sequence
  SiRNA target sequence
aaggatgtaaactaataat

SEQ ID NO: 35671 - DNA, 19 bp, Artificial sequence
  SiRNA target sequence
aggatgtaaactaataatg

SEQ ID NO: 35672 - DNA, 19 bp, Artificial sequence
  SiRNA target sequence
ggatgtaaactaataatgt

SEQ ID NO: 35673 - DNA, 19 bp, Artificial sequence
  SiRNA target sequence
gatgtaaactaataatgtg

SEQ ID NO: 35674 - DNA, 19 bp, Artificial sequence
  SiRNA target sequence
atgtaaactaataatgtga

SEQ ID NO: 35675 - DNA, 19 bp, Artificial sequence
  SiRNA target sequence
tgtaaactaataatgtgat

SEQ ID NO: 35676 - DNA, 19 bp, Artificial sequence
  SiRNA target sequence
gtaaactaataatgtgatt

SEQ ID NO: 35677 - DNA, 19 bp, Artificial sequence
  SiRNA target sequence
taaactaataatgtgatta

SEQ ID NO: 35678 - DNA, 19 bp, Artificial sequence
  SiRNA target sequence
aaactaataatgtgattaa

SEQ ID NO: 35679 - DNA, 19 bp, Artificial sequence
  SiRNA target sequence
aactaataatgtgattaaa

SEQ ID NO: 35680 - DNA, 19 bp, Artificial sequence
  SiRNA target sequence
actaataatgtgattaaaa

SEQ ID NO: 35681 - DNA, 19 bp, Artificial sequence
  SiRNA target sequence
ctaataatgtgattaaaat

SEQ ID NO: 35682 - DNA, 19 bp, Artificial sequence
  SiRNA target sequence
taataatgtgattaaaata

SEQ ID NO: 35683 - DNA, 19 bp, Artificial sequence
  SiRNA target sequence
aataatgtgattaaaataa

SEQ ID NO: 35684 - DNA, 19 bp, Artificial sequence
  SiRNA target sequence
ataatgtgattaaaataat

SEQ ID NO: 35685 - DNA, 19 bp, Artificial sequence
  SiRNA target sequence
taatgtgattaaaataata

SEQ ID NO: 35686 - DNA, 19 bp, Artificial sequence
  SiRNA target sequence
aatgtgattaaaataataa

SEQ ID NO: 35687 - DNA, 19 bp, Artificial sequence
  SiRNA target sequence
atgtgattaaaataataaa

SEQ ID NO: 35688 - DNA, 19 bp, Artificial sequence
  SiRNA target sequence
tgtgattaaaataataaac

SEQ ID NO: 35689 - DNA, 19 bp, Artificial sequence
  SiRNA target sequence
gtgattaaaataataaaca

SEQ ID NO: 35690 - DNA, 19 bp, Artificial sequence
  SiRNA target sequence
tgattaaaataataaacat

SEQ ID NO: 35691 - DNA, 19 bp, Artificial sequence
  SiRNA target sequence
gattaaaataataaacata

SEQ ID NO: 35692 - DNA, 19 bp, Artificial sequence
  SiRNA target sequence
attaaaataataaacatat

SEQ ID NO: 35693 - DNA, 19 bp, Artificial sequence
  SiRNA target sequence
ttaaaataataaacatatt

SEQ ID NO: 35694 - DNA, 19 bp, Artificial sequence
  SiRNA target sequence
taaaataataaacatattt

SEQ ID NO: 35695 - DNA, 19 bp, Artificial sequence
  SiRNA target sequence
aaaataataaacatatttg

SEQ ID NO: 35696 - DNA, 19 bp, Artificial sequence
  SiRNA target sequence
aaataataaacatatttgt

SEQ ID NO: 35697 - DNA, 19 bp, Artificial sequence
  SiRNA target sequence
aataataaacatatttgtc

SEQ ID NO: 35698 - DNA, 19 bp, Artificial sequence
  SiRNA target sequence
ataataaacatatttgtca

SEQ ID NO: 35699 - DNA, 19 bp, Artificial sequence
  SiRNA target sequence
taataaacatatttgtcaa

SEQ ID NO: 35700 - DNA, 19 bp, Artificial sequence
  SiRNA target sequence
aataaacatatttgtcaac

SEQ ID NO: 35701 - DNA, 19 bp, Artificial sequence
  SiRNA target sequence
ataaacatatttgtcaacc

SEQ ID NO: 35702 - DNA, 19 bp, Artificial sequence
  SiRNA target sequence
taaacatatttgtcaaccc

SEQ ID NO: 35703 - DNA, 19 bp, Artificial sequence
  SiRNA target sequence
aaacatatttgtcaaccct

SEQ ID NO: 35704 - DNA, 19 bp, Artificial sequence
  SiRNA target sequence
aacatatttgtcaacccta

SEQ ID NO: 35705 - DNA, 19 bp, Artificial sequence
  SiRNA target sequence
acatatttgtcaaccctaa

SEQ ID NO: 35706 - DNA, 19 bp, Artificial sequence
  SiRNA target sequence
catatttgtcaaccctaaa

SEQ ID NO: 35707 - DNA, 19 bp, Artificial sequence
  SiRNA target sequence
atatttgtcaaccctaaat

SEQ ID NO: 35708 - DNA, 19 bp, Artificial sequence
  SiRNA target sequence
tatttgtcaaccctaaatt

SEQ ID NO: 35709 - DNA, 19 bp, Artificial sequence
  SiRNA target sequence
atttgtcaaccctaaattt

SEQ ID NO: 35710 - DNA, 19 bp, Artificial sequence
  SiRNA target sequence
tttgtcaaccctaaatttg

SEQ ID NO: 35711 - DNA, 19 bp, Artificial sequence
  SiRNA target sequence
ttgtcaaccctaaatttgt

SEQ ID NO: 35712 - DNA, 19 bp, Artificial sequence
  SiRNA target sequence
tgtcaaccctaaatttgta

SEQ ID NO: 35713 - DNA, 19 bp, Artificial sequence
  SiRNA target sequence
gtcaaccctaaatttgtat

SEQ ID NO: 35714 - DNA, 19 bp, Artificial sequence
  SiRNA target sequence
tcaaccctaaatttgtata

SEQ ID NO: 35715 - DNA, 19 bp, Artificial sequence
  SiRNA target sequence
caaccctaaatttgtataa

SEQ ID NO: 35716 - DNA, 19 bp, Artificial sequence
  SiRNA target sequence
aaccctaaatttgtataaa

SEQ ID NO: 35717 - DNA, 19 bp, Artificial sequence
  SiRNA target sequence
accctaaatttgtataaat

SEQ ID NO: 35718 - DNA, 19 bp, Artificial sequence
  SiRNA target sequence
ccctaaatttgtataaatt

SEQ ID NO: 35719 - DNA, 19 bp, Artificial sequence
  SiRNA target sequence
cctaaatttgtataaattg

SEQ ID NO: 35720 - DNA, 19 bp, Artificial sequence
  SiRNA target sequence
ctaaatttgtataaattga

SEQ ID NO: 35721 - DNA, 19 bp, Artificial sequence
  SiRNA target sequence
taaatttgtataaattgac

SEQ ID NO: 35722 - DNA, 19 bp, Artificial sequence
  SiRNA target sequence
aaatttgtataaattgacg

SEQ ID NO: 35723 - DNA, 19 bp, Artificial sequence
  SiRNA target sequence
aatttgtataaattgacga

SEQ ID NO: 35724 - DNA, 19 bp, Artificial sequence
  SiRNA target sequence
atttgtataaattgacgaa

SEQ ID NO: 35725 - DNA, 19 bp, Artificial sequence
  SiRNA target sequence
tttgtataaattgacgaac

SEQ ID NO: 35726 - DNA, 19 bp, Artificial sequence
  SiRNA target sequence
ttgtataaattgacgaaca

SEQ ID NO: 35727 - DNA, 19 bp, Artificial sequence
  SiRNA target sequence
tgtataaattgacgaacac

SEQ ID NO: 35728 - DNA, 19 bp, Artificial sequence
  SiRNA target sequence
gtataaattgacgaacacg

SEQ ID NO: 35729 - DNA, 19 bp, Artificial sequence
  SiRNA target sequence
tataaattgacgaacacgc

SEQ ID NO: 35730 - DNA, 19 bp, Artificial sequence
  SiRNA target sequence
ataaattgacgaacacgcc

SEQ ID NO: 35731 - DNA, 19 bp, Artificial sequence
  SiRNA target sequence
taaattgacgaacacgcca

SEQ ID NO: 35732 - DNA, 19 bp, Artificial sequence
  SiRNA target sequence
aaattgacgaacacgccaa

SEQ ID NO: 35733 - DNA, 19 bp, Artificial sequence
  SiRNA target sequence
aattgacgaacacgccaat

SEQ ID NO: 35734 - DNA, 19 bp, Artificial sequence
  SiRNA target sequence
attgacgaacacgccaata

SEQ ID NO: 35735 - DNA, 19 bp, Artificial sequence
  SiRNA target sequence
ttgacgaacacgccaatat

SEQ ID NO: 35736 - DNA, 19 bp, Artificial sequence
  SiRNA target sequence
tgacgaacacgccaatata

SEQ ID NO: 35737 - DNA, 19 bp, Artificial sequence
  SiRNA target sequence
gacgaacacgccaatataa

SEQ ID NO: 35738 - DNA, 19 bp, Artificial sequence
  SiRNA target sequence
acgaacacgccaatataac

SEQ ID NO: 35739 - DNA, 19 bp, Artificial sequence
  SiRNA target sequence
cgaacacgccaatataact

SEQ ID NO: 35740 - DNA, 19 bp, Artificial sequence
  SiRNA target sequence
gaacacgccaatataactg

SEQ ID NO: 35741 - DNA, 19 bp, Artificial sequence
  SiRNA target sequence
aacacgccaatataactgt

SEQ ID NO: 35742 - DNA, 19 bp, Artificial sequence
  SiRNA target sequence
acacgccaatataactgta

SEQ ID NO: 35743 - DNA, 19 bp, Artificial sequence
  SiRNA target sequence
cacgccaatataactgtaa

SEQ ID NO: 35744 - DNA, 19 bp, Artificial sequence
  SiRNA target sequence
acgccaatataactgtaaa

SEQ ID NO: 35745 - DNA, 19 bp, Artificial sequence
  SiRNA target sequence
cgccaatataactgtaaaa

SEQ ID NO: 35746 - DNA, 19 bp, Artificial sequence
  SiRNA target sequence
gccaatataactgtaaaaa

SEQ ID NO: 35747 - DNA, 19 bp, Artificial sequence
  SiRNA target sequence
ccaatataactgtaaaaaa

SEQ ID NO: 35748 - DNA, 19 bp, Artificial sequence
  SiRNA target sequence
caatataactgtaaaaaaa

SEQ ID NO: 35749 - DNA, 19 bp, Artificial sequence
  SiRNA target sequence
aatataactgtaaaaaaaa

SEQ ID NO: 35750 - DNA, 19 bp, Artificial sequence
  SiRNA target sequence
atataactgtaaaaaaaat

SEQ ID NO: 35751 - DNA, 19 bp, Artificial sequence
  SiRNA target sequence
tataactgtaaaaaaaata

SEQ ID NO: 35752 - DNA, 19 bp, Artificial sequence
  SiRNA target sequence
ataactgtaaaaaaaatat

SEQ ID NO: 35753 - DNA, 19 bp, Artificial sequence
  SiRNA target sequence
taactgtaaaaaaaatatt

SEQ ID NO: 35754 - DNA, 19 bp, Artificial sequence
  SiRNA target sequence
aactgtaaaaaaaatattt

SEQ ID NO: 35755 - DNA, 19 bp, Artificial sequence
  SiRNA target sequence
actgtaaaaaaaatattta

SEQ ID NO: 35756 - DNA, 19 bp, Artificial sequence
  SiRNA target sequence
ctgtaaaaaaaatatttat

SEQ ID NO: 35757 - DNA, 19 bp, Artificial sequence
  SiRNA target sequence
tgtaaaaaaaatatttatg

SEQ ID NO: 35758 - DNA, 19 bp, Artificial sequence
  SiRNA target sequence
gtaaaaaaaatatttatga

SEQ ID NO: 35759 - DNA, 19 bp, Artificial sequence
  SiRNA target sequence
taaaaaaaatatttatgat

SEQ ID NO: 35760 - DNA, 19 bp, Artificial sequence
  SiRNA target sequence
aaaaaaaatatttatgata

SEQ ID NO: 35761 - DNA, 19 bp, Artificial sequence
  SiRNA target sequence
aaaaaaatatttatgatat

SEQ ID NO: 35762 - DNA, 19 bp, Artificial sequence
  SiRNA target sequence
aaaaaatatttatgatatt

SEQ ID NO: 35763 - DNA, 19 bp, Artificial sequence
  SiRNA target sequence
aaaaatatttatgatatta

SEQ ID NO: 35764 - DNA, 19 bp, Artificial sequence
  SiRNA target sequence
aaaatatttatgatattaa

SEQ ID NO: 35765 - DNA, 19 bp, Artificial sequence
  SiRNA target sequence
aaatatttatgatattaac

SEQ ID NO: 35766 - DNA, 19 bp, Artificial sequence
  SiRNA target sequence
aatatttatgatattaaca

SEQ ID NO: 35767 - DNA, 19 bp, Artificial sequence
  SiRNA target sequence
atatttatgatattaacaa

SEQ ID NO: 35768 - DNA, 19 bp, Artificial sequence
  SiRNA target sequence
tatttatgatattaacaaa

SEQ ID NO: 35769 - DNA, 19 bp, Artificial sequence
  SiRNA target sequence
atttatgatattaacaaat

SEQ ID NO: 35770 - DNA, 19 bp, Artificial sequence
  SiRNA target sequence
tttatgatattaacaaata

SEQ ID NO: 35771 - DNA, 19 bp, Artificial sequence
  SiRNA target sequence
ttatgatattaacaaataa

SEQ ID NO: 35772 - DNA, 19 bp, Artificial sequence
  SiRNA target sequence
tatgatattaacaaataaa

SEQ ID NO: 35773 - DNA, 19 bp, Artificial sequence
  SiRNA target sequence
atgatattaacaaataaaa

SEQ ID NO: 35774 - DNA, 19 bp, Artificial sequence
  SiRNA target sequence
tgatattaacaaataaaac

SEQ ID NO: 35775 - DNA, 19 bp, Artificial sequence
  SiRNA target sequence
gatattaacaaataaaact

SEQ ID NO: 35776 - DNA, 19 bp, Artificial sequence
  SiRNA target sequence
atattaacaaataaaactt

SEQ ID NO: 35777 - DNA, 19 bp, Artificial sequence
  SiRNA target sequence
tattaacaaataaaacttc

SEQ ID NO: 35778 - DNA, 19 bp, Artificial sequence
  SiRNA target sequence
attaacaaataaaacttcg

SEQ ID NO: 35779 - DNA, 19 bp, Artificial sequence
  SiRNA target sequence
ttaacaaataaaacttcga

SEQ ID NO: 35780 - DNA, 19 bp, Artificial sequence
  SiRNA target sequence
taacaaataaaacttcgat

SEQ ID NO: 35781 - DNA, 19 bp, Artificial sequence
  SiRNA target sequence
aacaaataaaacttcgatc

SEQ ID NO: 35782 - DNA, 19 bp, Artificial sequence
  SiRNA target sequence
acaaataaaacttcgatca

SEQ ID NO: 35783 - DNA, 19 bp, Artificial sequence
  SiRNA target sequence
caaataaaacttcgatcaa

SEQ ID NO: 35784 - DNA, 19 bp, Artificial sequence
  SiRNA target sequence
aaataaaacttcgatcaat

SEQ ID NO: 35785 - DNA, 19 bp, Artificial sequence
  SiRNA target sequence
aataaaacttcgatcaatt

SEQ ID NO: 35786 - DNA, 19 bp, Artificial sequence
  SiRNA target sequence
ataaaacttcgatcaattc

SEQ ID NO: 35787 - DNA, 19 bp, Artificial sequence
  SiRNA target sequence
taaaacttcgatcaattca

SEQ ID NO: 35788 - DNA, 19 bp, Artificial sequence
  SiRNA target sequence
aaaacttcgatcaattcac

SEQ ID NO: 35789 - DNA, 19 bp, Artificial sequence
  SiRNA target sequence
aaacttcgatcaattcact

SEQ ID NO: 35790 - DNA, 19 bp, Artificial sequence
  SiRNA target sequence
aacttcgatcaattcactt

SEQ ID NO: 35791 - DNA, 19 bp, Artificial sequence
  SiRNA target sequence
acttcgatcaattcactta

SEQ ID NO: 35792 - DNA, 19 bp, Artificial sequence
  SiRNA target sequence
cttcgatcaattcacttat

SEQ ID NO: 35793 - DNA, 19 bp, Artificial sequence
  SiRNA target sequence
ttcgatcaattcacttatt

SEQ ID NO: 35794 - DNA, 19 bp, Artificial sequence
  SiRNA target sequence
tcgatcaattcacttattg

SEQ ID NO: 35795 - DNA, 19 bp, Artificial sequence
  SiRNA target sequence
cgatcaattcacttattgc

SEQ ID NO: 35796 - DNA, 19 bp, Artificial sequence
  SiRNA target sequence
gatcaattcacttattgct

SEQ ID NO: 35797 - DNA, 19 bp, Artificial sequence
  SiRNA target sequence
atcaattcacttattgctt

SEQ ID NO: 35798 - DNA, 19 bp, Artificial sequence
  SiRNA target sequence
tcaattcacttattgcttt

SEQ ID NO: 35799 - DNA, 19 bp, Artificial sequence
  SiRNA target sequence
caattcacttattgcttta

SEQ ID NO: 35800 - DNA, 19 bp, Artificial sequence
  SiRNA target sequence
aattcacttattgctttac

SEQ ID NO: 35801 - DNA, 19 bp, Artificial sequence
  SiRNA target sequence
attcacttattgctttact

SEQ ID NO: 35802 - DNA, 19 bp, Artificial sequence
  SiRNA target sequence
ttcacttattgctttactt

SEQ ID NO: 35803 - DNA, 19 bp, Artificial sequence
  SiRNA target sequence
tcacttattgctttacttt

SEQ ID NO: 35804 - DNA, 19 bp, Artificial sequence
  SiRNA target sequence
cacttattgctttactttc

SEQ ID NO: 35805 - DNA, 19 bp, Artificial sequence
  SiRNA target sequence
acttattgctttactttct

SEQ ID NO: 35806 - DNA, 19 bp, Artificial sequence
  SiRNA target sequence
cttattgctttactttctc

SEQ ID NO: 35807 - DNA, 19 bp, Artificial sequence
  SiRNA target sequence
ttattgctttactttctcg

SEQ ID NO: 35808 - DNA, 19 bp, Artificial sequence
  SiRNA target sequence
tattgctttactttctcgg

SEQ ID NO: 35809 - DNA, 19 bp, Artificial sequence
  SiRNA target sequence
attgctttactttctcggt

SEQ ID NO: 35810 - DNA, 19 bp, Artificial sequence
  SiRNA target sequence
ttgctttactttctcggtc

SEQ ID NO: 35811 - DNA, 19 bp, Artificial sequence
  SiRNA target sequence
tgctttactttctcggtct

SEQ ID NO: 35812 - DNA, 19 bp, Artificial sequence
  SiRNA target sequence
gctttactttctcggtcta

SEQ ID NO: 35813 - DNA, 19 bp, Artificial sequence
  SiRNA target sequence
ctttactttctcggtctat

SEQ ID NO: 35814 - DNA, 19 bp, Artificial sequence
  SiRNA target sequence
tttactttctcggtctatt

SEQ ID NO: 35815 - DNA, 19 bp, Artificial sequence
  SiRNA target sequence
ttactttctcggtctatta

SEQ ID NO: 35816 - DNA, 19 bp, Artificial sequence
  SiRNA target sequence
tactttctcggtctattat

SEQ ID NO: 35817 - DNA, 19 bp, Artificial sequence
  SiRNA target sequence
actttctcggtctattatt

SEQ ID NO: 35818 - DNA, 19 bp, Artificial sequence
  SiRNA target sequence
ctttctcggtctattattg

SEQ ID NO: 35819 - DNA, 19 bp, Artificial sequence
  SiRNA target sequence
tttctcggtctattattgt

SEQ ID NO: 35820 - DNA, 19 bp, Artificial sequence
  SiRNA target sequence
ttctcggtctattattgtt

SEQ ID NO: 35821 - DNA, 19 bp, Artificial sequence
  SiRNA target sequence
tctcggtctattattgttt

SEQ ID NO: 35822 - DNA, 19 bp, Artificial sequence
  SiRNA target sequence
ctcggtctattattgtttg

SEQ ID NO: 35823 - DNA, 19 bp, Artificial sequence
  SiRNA target sequence
tcggtctattattgtttgt

SEQ ID NO: 35824 - DNA, 19 bp, Artificial sequence
  SiRNA target sequence
cggtctattattgtttgta

SEQ ID NO: 35825 - DNA, 19 bp, Artificial sequence
  SiRNA target sequence
ggtctattattgtttgtat

SEQ ID NO: 35826 - DNA, 19 bp, Artificial sequence
  SiRNA target sequence
gtctattattgtttgtatt

SEQ ID NO: 35827 - DNA, 19 bp, Artificial sequence
  SiRNA target sequence
tctattattgtttgtattt

SEQ ID NO: 35828 - DNA, 19 bp, Artificial sequence
  SiRNA target sequence
ctattattgtttgtatttc

SEQ ID NO: 35829 - DNA, 19 bp, Artificial sequence
  SiRNA target sequence
tattattgtttgtatttca

SEQ ID NO: 35830 - DNA, 19 bp, Artificial sequence
  SiRNA target sequence
attattgtttgtatttcac

SEQ ID NO: 35831 - DNA, 19 bp, Artificial sequence
  SiRNA target sequence
ttattgtttgtatttcacc

SEQ ID NO: 35832 - DNA, 19 bp, Artificial sequence
  SiRNA target sequence
tattgtttgtatttcaccg

SEQ ID NO: 35833 - DNA, 19 bp, Artificial sequence
  SiRNA target sequence
attgtttgtatttcaccgc

SEQ ID NO: 35834 - DNA, 19 bp, Artificial sequence
  SiRNA target sequence
ttgtttgtatttcaccgca

SEQ ID NO: 35835 - DNA, 19 bp, Artificial sequence
  SiRNA target sequence
tgtttgtatttcaccgcat

SEQ ID NO: 35836 - DNA, 19 bp, Artificial sequence
  SiRNA target sequence
gtttgtatttcaccgcatc

SEQ ID NO: 35837 - DNA, 19 bp, Artificial sequence
  SiRNA target sequence
tttgtatttcaccgcatcc

SEQ ID NO: 35838 - DNA, 19 bp, Artificial sequence
  SiRNA target sequence
ttgtatttcaccgcatcct

SEQ ID NO: 35839 - DNA, 19 bp, Artificial sequence
  SiRNA target sequence
tgtatttcaccgcatccta

SEQ ID NO: 35840 - DNA, 19 bp, Artificial sequence
  SiRNA target sequence
gtatttcaccgcatcctat

SEQ ID NO: 35841 - DNA, 19 bp, Artificial sequence
  SiRNA target sequence
tatttcaccgcatcctatt

SEQ ID NO: 35842 - DNA, 19 bp, Artificial sequence
  SiRNA target sequence
atttcaccgcatcctattt

SEQ ID NO: 35843 - DNA, 19 bp, Artificial sequence
  SiRNA target sequence
tttcaccgcatcctatttt

SEQ ID NO: 35844 - DNA, 19 bp, Artificial sequence
  SiRNA target sequence
ttcaccgcatcctatttta

SEQ ID NO: 35845 - DNA, 19 bp, Artificial sequence
  SiRNA target sequence
tcaccgcatcctattttat

SEQ ID NO: 35846 - DNA, 19 bp, Artificial sequence
  SiRNA target sequence
caccgcatcctattttatt

SEQ ID NO: 35847 - DNA, 19 bp, Artificial sequence
  SiRNA target sequence
accgcatcctattttattg

SEQ ID NO: 35848 - DNA, 19 bp, Artificial sequence
  SiRNA target sequence
ccgcatcctattttattgt

SEQ ID NO: 35849 - DNA, 19 bp, Artificial sequence
  SiRNA target sequence
cgcatcctattttattgta

SEQ ID NO: 35850 - DNA, 19 bp, Artificial sequence
  SiRNA target sequence
gcatcctattttattgtat

SEQ ID NO: 35851 - DNA, 19 bp, Artificial sequence
  SiRNA target sequence
catcctattttattgtatc

SEQ ID NO: 35852 - DNA, 19 bp, Artificial sequence
  SiRNA target sequence
atcctattttattgtatct

SEQ ID NO: 35853 - DNA, 19 bp, Artificial sequence
  SiRNA target sequence
tcctattttattgtatcta

SEQ ID NO: 35854 - DNA, 19 bp, Artificial sequence
  SiRNA target sequence
cctattttattgtatctac

SEQ ID NO: 35855 - DNA, 19 bp, Artificial sequence
  SiRNA target sequence
ctattttattgtatctact

SEQ ID NO: 35856 - DNA, 19 bp, Artificial sequence
  SiRNA target sequence
tattttattgtatctacta

SEQ ID NO: 35857 - DNA, 19 bp, Artificial sequence
  SiRNA target sequence
attttattgtatctactaa

SEQ ID NO: 35858 - DNA, 19 bp, Artificial sequence
  SiRNA target sequence
ttttattgtatctactaag

SEQ ID NO: 35859 - DNA, 19 bp, Artificial sequence
  SiRNA target sequence
tttattgtatctactaagt

SEQ ID NO: 35860 - DNA, 19 bp, Artificial sequence
  SiRNA target sequence
ttattgtatctactaagtt

SEQ ID NO: 35861 - DNA, 19 bp, Artificial sequence
  SiRNA target sequence
tattgtatctactaagttc

SEQ ID NO: 35862 - DNA, 19 bp, Artificial sequence
  SiRNA target sequence
attgtatctactaagttcc

SEQ ID NO: 35863 - DNA, 19 bp, Artificial sequence
  SiRNA target sequence
ttgtatctactaagttcca

SEQ ID NO: 35864 - DNA, 19 bp, Artificial sequence
  SiRNA target sequence
tgtatctactaagttccat

SEQ ID NO: 35865 - DNA, 19 bp, Artificial sequence
  SiRNA target sequence
gtatctactaagttccata

SEQ ID NO: 35866 - DNA, 19 bp, Artificial sequence
  SiRNA target sequence
tatctactaagttccatat

SEQ ID NO: 35867 - DNA, 19 bp, Artificial sequence
  SiRNA target sequence
atctactaagttccatatt

SEQ ID NO: 35868 - DNA, 19 bp, Artificial sequence
  SiRNA target sequence
tctactaagttccatattt

SEQ ID NO: 35869 - DNA, 19 bp, Artificial sequence
  SiRNA target sequence
ctactaagttccatattta

SEQ ID NO: 35870 - DNA, 19 bp, Artificial sequence
  SiRNA target sequence
tactaagttccatatttat

SEQ ID NO: 35871 - DNA, 19 bp, Artificial sequence
  SiRNA target sequence
actaagttccatatttata

SEQ ID NO: 35872 - DNA, 19 bp, Artificial sequence
  SiRNA target sequence
ctaagttccatatttataa

SEQ ID NO: 35873 - DNA, 19 bp, Artificial sequence
  SiRNA target sequence
taagttccatatttataaa

SEQ ID NO: 35874 - DNA, 19 bp, Artificial sequence
  SiRNA target sequence
aagttccatatttataaaa

SEQ ID NO: 35875 - DNA, 19 bp, Artificial sequence
  SiRNA target sequence
agttccatatttataaaat

SEQ ID NO: 35876 - DNA, 19 bp, Artificial sequence
  SiRNA target sequence
gttccatatttataaaatt

SEQ ID NO: 35877 - DNA, 19 bp, Artificial sequence
  SiRNA target sequence
ttccatatttataaaattt

SEQ ID NO: 35878 - DNA, 19 bp, Artificial sequence
  SiRNA target sequence
tccatatttataaaatttt

SEQ ID NO: 35879 - DNA, 19 bp, Artificial sequence
  SiRNA target sequence
ccatatttataaaattttt

SEQ ID NO: 35880 - DNA, 19 bp, Artificial sequence
  SiRNA target sequence
catatttataaaattttta

SEQ ID NO: 35881 - DNA, 19 bp, Artificial sequence
  SiRNA target sequence
atatttataaaatttttaa

SEQ ID NO: 35882 - DNA, 19 bp, Artificial sequence
  SiRNA target sequence
tatttataaaatttttaaa

SEQ ID NO: 35883 - DNA, 19 bp, Artificial sequence
  SiRNA target sequence
atttataaaatttttaaat

SEQ ID NO: 35884 - DNA, 19 bp, Artificial sequence
  SiRNA target sequence
tttataaaatttttaaatg

SEQ ID NO: 35885 - DNA, 19 bp, Artificial sequence
  SiRNA target sequence
ttataaaatttttaaatga

SEQ ID NO: 35886 - DNA, 19 bp, Artificial sequence
  SiRNA target sequence
tataaaatttttaaatgaa

SEQ ID NO: 35887 - DNA, 19 bp, Artificial sequence
  SiRNA target sequence
ataaaatttttaaatgaat

SEQ ID NO: 35888 - DNA, 19 bp, Artificial sequence
  SiRNA target sequence
taaaatttttaaatgaatt

SEQ ID NO: 35889 - DNA, 19 bp, Artificial sequence
  SiRNA target sequence
aaaatttttaaatgaattt

SEQ ID NO: 35890 - DNA, 19 bp, Artificial sequence
  SiRNA target sequence
aaatttttaaatgaatttt

SEQ ID NO: 35891 - DNA, 19 bp, Artificial sequence
  SiRNA target sequence
aatttttaaatgaattttt

SEQ ID NO: 35892 - DNA, 19 bp, Artificial sequence
  SiRNA target sequence
atttttaaatgaatttttt

SEQ ID NO: 35893 - DNA, 19 bp, Artificial sequence
  SiRNA target sequence
tttttaaatgaattttttc

SEQ ID NO: 35894 - DNA, 19 bp, Artificial sequence
  SiRNA target sequence
ttttaaatgaattttttcc

SEQ ID NO: 35895 - DNA, 19 bp, Artificial sequence
  SiRNA target sequence
tttaaatgaattttttcct

SEQ ID NO: 35896 - DNA, 19 bp, Artificial sequence
  SiRNA target sequence
ttaaatgaattttttcctg

SEQ ID NO: 35897 - DNA, 19 bp, Artificial sequence
  SiRNA target sequence
taaatgaattttttcctgt

SEQ ID NO: 35898 - DNA, 19 bp, Artificial sequence
  SiRNA target sequence
aaatgaattttttcctgtc

SEQ ID NO: 35899 - DNA, 19 bp, Artificial sequence
  SiRNA target sequence
aatgaattttttcctgtca

SEQ ID NO: 35900 - DNA, 19 bp, Artificial sequence
  SiRNA target sequence
atgaattttttcctgtcag

SEQ ID NO: 35901 - DNA, 19 bp, Artificial sequence
  SiRNA target sequence
tgaattttttcctgtcagt

SEQ ID NO: 35902 - DNA, 19 bp, Artificial sequence
  SiRNA target sequence
gaattttttcctgtcagtc

SEQ ID NO: 35903 - DNA, 19 bp, Artificial sequence
  SiRNA target sequence
aattttttcctgtcagtct

SEQ ID NO: 35904 - DNA, 19 bp, Artificial sequence
  SiRNA target sequence
attttttcctgtcagtctg

SEQ ID NO: 35905 - DNA, 19 bp, Artificial sequence
  SiRNA target sequence
ttttttcctgtcagtctga

SEQ ID NO: 35906 - DNA, 19 bp, Artificial sequence
  SiRNA target sequence
tttttcctgtcagtctgaa

SEQ ID NO: 35907 - DNA, 19 bp, Artificial sequence
  SiRNA target sequence
ttttcctgtcagtctgaat

SEQ ID NO: 35908 - DNA, 19 bp, Artificial sequence
  SiRNA target sequence
tttcctgtcagtctgaata

SEQ ID NO: 35909 - DNA, 19 bp, Artificial sequence
  SiRNA target sequence
ttcctgtcagtctgaatac

SEQ ID NO: 35910 - DNA, 19 bp, Artificial sequence
  SiRNA target sequence
tcctgtcagtctgaataca

SEQ ID NO: 35911 - DNA, 19 bp, Artificial sequence
  SiRNA target sequence
cctgtcagtctgaatacat

SEQ ID NO: 35912 - DNA, 19 bp, Artificial sequence
  SiRNA target sequence
ctgtcagtctgaatacatg

SEQ ID NO: 35913 - DNA, 19 bp, Artificial sequence
  SiRNA target sequence
tgtcagtctgaatacatgt

SEQ ID NO: 35914 - DNA, 19 bp, Artificial sequence
  SiRNA target sequence
gtcagtctgaatacatgtt

SEQ ID NO: 35915 - DNA, 19 bp, Artificial sequence
  SiRNA target sequence
tcagtctgaatacatgttg

SEQ ID NO: 35916 - DNA, 19 bp, Artificial sequence
  SiRNA target sequence
cagtctgaatacatgttga

SEQ ID NO: 35917 - DNA, 19 bp, Artificial sequence
  SiRNA target sequence
agtctgaatacatgttgaa

SEQ ID NO: 35918 - DNA, 19 bp, Artificial sequence
  SiRNA target sequence
gtctgaatacatgttgaac

SEQ ID NO: 35919 - DNA, 19 bp, Artificial sequence
  SiRNA target sequence
tctgaatacatgttgaacg

SEQ ID NO: 35920 - DNA, 19 bp, Artificial sequence
  SiRNA target sequence
ctgaatacatgttgaacgg

SEQ ID NO: 35921 - DNA, 19 bp, Artificial sequence
  SiRNA target sequence
tgaatacatgttgaacggg

SEQ ID NO: 35922 - DNA, 19 bp, Artificial sequence
  SiRNA target sequence
gaatacatgttgaacgggt

SEQ ID NO: 35923 - DNA, 19 bp, Artificial sequence
  SiRNA target sequence
aatacatgttgaacgggtg

SEQ ID NO: 35924 - DNA, 19 bp, Artificial sequence
  SiRNA target sequence
atacatgttgaacgggtgt

SEQ ID NO: 35925 - DNA, 19 bp, Artificial sequence
  SiRNA target sequence
tacatgttgaacgggtgta

SEQ ID NO: 35926 - DNA, 19 bp, Artificial sequence
  SiRNA target sequence
acatgttgaacgggtgtaa

SEQ ID NO: 35927 - DNA, 19 bp, Artificial sequence
  SiRNA target sequence
catgttgaacgggtgtaac

SEQ ID NO: 35928 - DNA, 19 bp, Artificial sequence
  SiRNA target sequence
atgttgaacgggtgtaaca

SEQ ID NO: 35929 - DNA, 19 bp, Artificial sequence
  SiRNA target sequence
tgttgaacgggtgtaacaa

SEQ ID NO: 35930 - DNA, 19 bp, Artificial sequence
  SiRNA target sequence
gttgaacgggtgtaacaaa

SEQ ID NO: 35931 - DNA, 19 bp, Artificial sequence
  SiRNA target sequence
ttgaacgggtgtaacaaat

SEQ ID NO: 35932 - DNA, 19 bp, Artificial sequence
  SiRNA target sequence
tgaacgggtgtaacaaata

SEQ ID NO: 35933 - DNA, 19 bp, Artificial sequence
  SiRNA target sequence
gaacgggtgtaacaaatat

SEQ ID NO: 35934 - DNA, 19 bp, Artificial sequence
  SiRNA target sequence
aacgggtgtaacaaatata

SEQ ID NO: 35935 - DNA, 19 bp, Artificial sequence
  SiRNA target sequence
acgggtgtaacaaatataa

SEQ ID NO: 35936 - DNA, 19 bp, Artificial sequence
  SiRNA target sequence
cgggtgtaacaaatataaa

SEQ ID NO: 35937 - DNA, 19 bp, Artificial sequence
  SiRNA target sequence
gggtgtaacaaatataaaa

SEQ ID NO: 35938 - DNA, 19 bp, Artificial sequence
  SiRNA target sequence
ggtgtaacaaatataaaat

SEQ ID NO: 35939 - DNA, 19 bp, Artificial sequence
  SiRNA target sequence
gtgtaacaaatataaaatt

SEQ ID NO: 35940 - DNA, 19 bp, Artificial sequence
  SiRNA target sequence
tgtaacaaatataaaattg

SEQ ID NO: 35941 - DNA, 19 bp, Artificial sequence
  SiRNA target sequence
gtaacaaatataaaattgt

SEQ ID NO: 35942 - DNA, 19 bp, Artificial sequence
  SiRNA target sequence
taacaaatataaaattgtt

SEQ ID NO: 35943 - DNA, 19 bp, Artificial sequence
  SiRNA target sequence
aacaaatataaaattgtta

SEQ ID NO: 35944 - DNA, 19 bp, Artificial sequence
  SiRNA target sequence
acaaatataaaattgttaa

SEQ ID NO: 35945 - DNA, 19 bp, Artificial sequence
  SiRNA target sequence
caaatataaaattgttaag

SEQ ID NO: 35946 - DNA, 19 bp, Artificial sequence
  SiRNA target sequence
aaatataaaattgttaagt

SEQ ID NO: 35947 - DNA, 19 bp, Artificial sequence
  SiRNA target sequence
aatataaaattgttaagtt

SEQ ID NO: 35948 - DNA, 19 bp, Artificial sequence
  SiRNA target sequence
atataaaattgttaagttc

SEQ ID NO: 35949 - DNA, 19 bp, Artificial sequence
  SiRNA target sequence
tataaaattgttaagttct

SEQ ID NO: 35950 - DNA, 19 bp, Artificial sequence
  SiRNA target sequence
ataaaattgttaagttctg

SEQ ID NO: 35951 - DNA, 19 bp, Artificial sequence
  SiRNA target sequence
taaaattgttaagttctga

SEQ ID NO: 35952 - DNA, 19 bp, Artificial sequence
  SiRNA target sequence
aaaattgttaagttctgac

SEQ ID NO: 35953 - DNA, 19 bp, Artificial sequence
  SiRNA target sequence
aaattgttaagttctgaca

SEQ ID NO: 35954 - DNA, 19 bp, Artificial sequence
  SiRNA target sequence
aattgttaagttctgacat

SEQ ID NO: 35955 - DNA, 19 bp, Artificial sequence
  SiRNA target sequence
attgttaagttctgacatt

SEQ ID NO: 35956 - DNA, 19 bp, Artificial sequence
  SiRNA target sequence
ttgttaagttctgacattg

SEQ ID NO: 35957 - DNA, 19 bp, Artificial sequence
  SiRNA target sequence
tgttaagttctgacattgt

SEQ ID NO: 35958 - DNA, 19 bp, Artificial sequence
  SiRNA target sequence
gttaagttctgacattgta

SEQ ID NO: 35959 - DNA, 19 bp, Artificial sequence
  SiRNA target sequence
ttaagttctgacattgtaa

SEQ ID NO: 35960 - DNA, 19 bp, Artificial sequence
  SiRNA target sequence
taagttctgacattgtaat

SEQ ID NO: 35961 - DNA, 19 bp, Artificial sequence
  SiRNA target sequence
aagttctgacattgtaatt

SEQ ID NO: 35962 - DNA, 19 bp, Artificial sequence
  SiRNA target sequence
agttctgacattgtaattg

SEQ ID NO: 35963 - DNA, 19 bp, Artificial sequence
  SiRNA target sequence
gttctgacattgtaattga

SEQ ID NO: 35964 - DNA, 19 bp, Artificial sequence
  SiRNA target sequence
ttctgacattgtaattgat

SEQ ID NO: 35965 - DNA, 19 bp, Artificial sequence
  SiRNA target sequence
tctgacattgtaattgata

SEQ ID NO: 35966 - DNA, 19 bp, Artificial sequence
  SiRNA target sequence
ctgacattgtaattgatac

SEQ ID NO: 35967 - DNA, 19 bp, Artificial sequence
  SiRNA target sequence
tgacattgtaattgataca

SEQ ID NO: 35968 - DNA, 19 bp, Artificial sequence
  SiRNA target sequence
gacattgtaattgatacaa

SEQ ID NO: 35969 - DNA, 19 bp, Artificial sequence
  SiRNA target sequence
acattgtaattgatacaat

SEQ ID NO: 35970 - DNA, 19 bp, Artificial sequence
  SiRNA target sequence
cattgtaattgatacaatt

SEQ ID NO: 35971 - DNA, 19 bp, Artificial sequence
  SiRNA target sequence
attgtaattgatacaattg

SEQ ID NO: 35972 - DNA, 19 bp, Artificial sequence
  SiRNA target sequence
ttgtaattgatacaattgt

SEQ ID NO: 35973 - DNA, 19 bp, Artificial sequence
  SiRNA target sequence
tgtaattgatacaattgtc

SEQ ID NO: 35974 - DNA, 19 bp, Artificial sequence
  SiRNA target sequence
gtaattgatacaattgtca

SEQ ID NO: 35975 - DNA, 19 bp, Artificial sequence
  SiRNA target sequence
taattgatacaattgtcaa

SEQ ID NO: 35976 - DNA, 19 bp, Artificial sequence
  SiRNA target sequence
aattgatacaattgtcaaa

SEQ ID NO: 35977 - DNA, 19 bp, Artificial sequence
  SiRNA target sequence
attgatacaattgtcaaaa

SEQ ID NO: 35978 - DNA, 19 bp, Artificial sequence
  SiRNA target sequence
ttgatacaattgtcaaaac

SEQ ID NO: 35979 - DNA, 19 bp, Artificial sequence
  SiRNA target sequence
tgatacaattgtcaaaact

SEQ ID NO: 35980 - DNA, 19 bp, Artificial sequence
  SiRNA target sequence
gatacaattgtcaaaactg

SEQ ID NO: 35981 - DNA, 19 bp, Artificial sequence
  SiRNA target sequence
atacaattgtcaaaactgc

SEQ ID NO: 35982 - DNA, 19 bp, Artificial sequence
  SiRNA target sequence
tacaattgtcaaaactgca

SEQ ID NO: 35983 - DNA, 19 bp, Artificial sequence
  SiRNA target sequence
acaattgtcaaaactgcaa

SEQ ID NO: 35984 - DNA, 19 bp, Artificial sequence
  SiRNA target sequence
caattgtcaaaactgcaaa

SEQ ID NO: 35985 - DNA, 19 bp, Artificial sequence
  SiRNA target sequence
aattgtcaaaactgcaaaa

SEQ ID NO: 35986 - DNA, 19 bp, Artificial sequence
  SiRNA target sequence
attgtcaaaactgcaaaat

SEQ ID NO: 35987 - DNA, 19 bp, Artificial sequence
  SiRNA target sequence
ttgtcaaaactgcaaaata

SEQ ID NO: 35988 - DNA, 19 bp, Artificial sequence
  SiRNA target sequence
tgtcaaaactgcaaaatac

SEQ ID NO: 35989 - DNA, 19 bp, Artificial sequence
  SiRNA target sequence
gtcaaaactgcaaaataca

SEQ ID NO: 35990 - DNA, 19 bp, Artificial sequence
  SiRNA target sequence
tcaaaactgcaaaatacaa

SEQ ID NO: 35991 - DNA, 19 bp, Artificial sequence
  SiRNA target sequence
caaaactgcaaaatacaaa

SEQ ID NO: 35992 - DNA, 19 bp, Artificial sequence
  SiRNA target sequence
aaaactgcaaaatacaaaa

SEQ ID NO: 35993 - DNA, 19 bp, Artificial sequence
  SiRNA target sequence
aaactgcaaaatacaaaag

SEQ ID NO: 35994 - DNA, 19 bp, Artificial sequence
  SiRNA target sequence
aactgcaaaatacaaaaga

SEQ ID NO: 35995 - DNA, 19 bp, Artificial sequence
  SiRNA target sequence
actgcaaaatacaaaagac

SEQ ID NO: 35996 - DNA, 19 bp, Artificial sequence
  SiRNA target sequence
ctgcaaaatacaaaagact

SEQ ID NO: 35997 - DNA, 19 bp, Artificial sequence
  SiRNA target sequence
tgcaaaatacaaaagactt

SEQ ID NO: 35998 - DNA, 19 bp, Artificial sequence
  SiRNA target sequence
gcaaaatacaaaagacttt

SEQ ID NO: 35999 - DNA, 19 bp, Artificial sequence
  SiRNA target sequence
caaaatacaaaagactttg

SEQ ID NO: 36000 - DNA, 19 bp, Artificial sequence
  SiRNA target sequence
aaaatacaaaagactttga

SEQ ID NO: 36001 - DNA, 19 bp, Artificial sequence
  SiRNA target sequence
aaatacaaaagactttgac

SEQ ID NO: 36002 - DNA, 19 bp, Artificial sequence
  SiRNA target sequence
aatacaaaagactttgact

SEQ ID NO: 36003 - DNA, 19 bp, Artificial sequence
  SiRNA target sequence
atacaaaagactttgacta

SEQ ID NO: 36004 - DNA, 19 bp, Artificial sequence
  SiRNA target sequence
tacaaaagactttgactaa

SEQ ID NO: 36005 - DNA, 19 bp, Artificial sequence
  SiRNA target sequence
acaaaagactttgactaag

SEQ ID NO: 36006 - DNA, 19 bp, Artificial sequence
  SiRNA target sequence
caaaagactttgactaaga

SEQ ID NO: 36007 - DNA, 19 bp, Artificial sequence
  SiRNA target sequence
aaaagactttgactaagat

SEQ ID NO: 36008 - DNA, 19 bp, Artificial sequence
  SiRNA target sequence
aaagactttgactaagatc

SEQ ID NO: 36009 - DNA, 19 bp, Artificial sequence
  SiRNA target sequence
aagactttgactaagatct

SEQ ID NO: 36010 - DNA, 19 bp, Artificial sequence
  SiRNA target sequence
agactttgactaagatctt

SEQ ID NO: 36011 - DNA, 19 bp, Artificial sequence
  SiRNA target sequence
gactttgactaagatcttt

SEQ ID NO: 36012 - DNA, 19 bp, Artificial sequence
  SiRNA target sequence
actttgactaagatcttta

SEQ ID NO: 36013 - DNA, 19 bp, Artificial sequence
  SiRNA target sequence
ctttgactaagatctttat

SEQ ID NO: 36014 - DNA, 19 bp, Artificial sequence
  SiRNA target sequence
tttgactaagatctttatt

SEQ ID NO: 36015 - DNA, 19 bp, Artificial sequence
  SiRNA target sequence
ttgactaagatctttatta

SEQ ID NO: 36016 - DNA, 19 bp, Artificial sequence
  SiRNA target sequence
tgactaagatctttattat

SEQ ID NO: 36017 - DNA, 19 bp, Artificial sequence
  SiRNA target sequence
gactaagatctttattatc

SEQ ID NO: 36018 - DNA, 19 bp, Artificial sequence
  SiRNA target sequence
actaagatctttattatct

SEQ ID NO: 36019 - DNA, 19 bp, Artificial sequence
  SiRNA target sequence
ctaagatctttattatctg

SEQ ID NO: 36020 - DNA, 19 bp, Artificial sequence
  SiRNA target sequence
taagatctttattatctgt

SEQ ID NO: 36021 - DNA, 19 bp, Artificial sequence
  SiRNA target sequence
aagatctttattatctgta

SEQ ID NO: 36022 - DNA, 19 bp, Artificial sequence
  SiRNA target sequence
agatctttattatctgtaa

SEQ ID NO: 36023 - DNA, 19 bp, Artificial sequence
  SiRNA target sequence
gatctttattatctgtaat

SEQ ID NO: 36024 - DNA, 19 bp, Artificial sequence
  SiRNA target sequence
atctttattatctgtaata

SEQ ID NO: 36025 - DNA, 19 bp, Artificial sequence
  SiRNA target sequence
tctttattatctgtaatat

SEQ ID NO: 36026 - DNA, 19 bp, Artificial sequence
  SiRNA target sequence
ctttattatctgtaatatc

SEQ ID NO: 36027 - DNA, 19 bp, Artificial sequence
  SiRNA target sequence
tttattatctgtaatatca

SEQ ID NO: 36028 - DNA, 19 bp, Artificial sequence
  SiRNA target sequence
ttattatctgtaatatcac

SEQ ID NO: 36029 - DNA, 19 bp, Artificial sequence
  SiRNA target sequence
tattatctgtaatatcact

SEQ ID NO: 36030 - DNA, 19 bp, Artificial sequence
  SiRNA target sequence
attatctgtaatatcacta

SEQ ID NO: 36031 - DNA, 19 bp, Artificial sequence
  SiRNA target sequence
ttatctgtaatatcactag

SEQ ID NO: 36032 - DNA, 19 bp, Artificial sequence
  SiRNA target sequence
tatctgtaatatcactagt

SEQ ID NO: 36033 - DNA, 19 bp, Artificial sequence
  SiRNA target sequence
atctgtaatatcactagtc

SEQ ID NO: 36034 - DNA, 19 bp, Artificial sequence
  SiRNA target sequence
tctgtaatatcactagtca

SEQ ID NO: 36035 - DNA, 19 bp, Artificial sequence
  SiRNA target sequence
ctgtaatatcactagtcaa

SEQ ID NO: 36036 - DNA, 19 bp, Artificial sequence
  SiRNA target sequence
tgtaatatcactagtcaat

SEQ ID NO: 36037 - DNA, 19 bp, Artificial sequence
  SiRNA target sequence
gtaatatcactagtcaatt

SEQ ID NO: 36038 - DNA, 19 bp, Artificial sequence
  SiRNA target sequence
taatatcactagtcaattt

SEQ ID NO: 36039 - DNA, 19 bp, Artificial sequence
  SiRNA target sequence
aatatcactagtcaatttc

SEQ ID NO: 36040 - DNA, 19 bp, Artificial sequence
  SiRNA target sequence
atatcactagtcaatttcc

SEQ ID NO: 36041 - DNA, 19 bp, Artificial sequence
  SiRNA target sequence
tatcactagtcaatttccg

SEQ ID NO: 36042 - DNA, 19 bp, Artificial sequence
  SiRNA target sequence
atcactagtcaatttccgg

SEQ ID NO: 36043 - DNA, 19 bp, Artificial sequence
  SiRNA target sequence
tcactagtcaatttccggg

SEQ ID NO: 36044 - DNA, 19 bp, Artificial sequence
  SiRNA target sequence
cactagtcaatttccgggt

SEQ ID NO: 36045 - DNA, 19 bp, Artificial sequence
  SiRNA target sequence
actagtcaatttccgggta

SEQ ID NO: 36046 - DNA, 19 bp, Artificial sequence
  SiRNA target sequence
ctagtcaatttccgggtag

SEQ ID NO: 36047 - DNA, 19 bp, Artificial sequence
  SiRNA target sequence
tagtcaatttccgggtagc

SEQ ID NO: 36048 - DNA, 19 bp, Artificial sequence
  SiRNA target sequence
agtcaatttccgggtagct

SEQ ID NO: 36049 - DNA, 19 bp, Artificial sequence
  SiRNA target sequence
gtcaatttccgggtagctt

SEQ ID NO: 36050 - DNA, 19 bp, Artificial sequence
  SiRNA target sequence
tcaatttccgggtagcttc

SEQ ID NO: 36051 - DNA, 19 bp, Artificial sequence
  SiRNA target sequence
caatttccgggtagcttca

SEQ ID NO: 36052 - DNA, 19 bp, Artificial sequence
  SiRNA target sequence
aatttccgggtagcttcaa

SEQ ID NO: 36053 - DNA, 19 bp, Artificial sequence
  SiRNA target sequence
atttccgggtagcttcaac

SEQ ID NO: 36054 - DNA, 19 bp, Artificial sequence
  SiRNA target sequence
tttccgggtagcttcaact

SEQ ID NO: 36055 - DNA, 19 bp, Artificial sequence
  SiRNA target sequence
ttccgggtagcttcaactg

SEQ ID NO: 36056 - DNA, 19 bp, Artificial sequence
  SiRNA target sequence
tccgggtagcttcaactgt

SEQ ID NO: 36057 - DNA, 19 bp, Artificial sequence
  SiRNA target sequence
ccgggtagcttcaactgtt

SEQ ID NO: 36058 - DNA, 19 bp, Artificial sequence
  SiRNA target sequence
cgggtagcttcaactgtta

SEQ ID NO: 36059 - DNA, 19 bp, Artificial sequence
  SiRNA target sequence
gggtagcttcaactgttaa

SEQ ID NO: 36060 - DNA, 19 bp, Artificial sequence
  SiRNA target sequence
ggtagcttcaactgttaaa

SEQ ID NO: 36061 - DNA, 19 bp, Artificial sequence
  SiRNA target sequence
gtagcttcaactgttaaaa

SEQ ID NO: 36062 - DNA, 19 bp, Artificial sequence
  SiRNA target sequence
tagcttcaactgttaaaac

SEQ ID NO: 36063 - DNA, 19 bp, Artificial sequence
  SiRNA target sequence
agcttcaactgttaaaaca

SEQ ID NO: 36064 - DNA, 19 bp, Artificial sequence
  SiRNA target sequence
gcttcaactgttaaaacat

SEQ ID NO: 36065 - DNA, 19 bp, Artificial sequence
  SiRNA target sequence
cttcaactgttaaaacatt

SEQ ID NO: 36066 - DNA, 19 bp, Artificial sequence
  SiRNA target sequence
ttcaactgttaaaacatta

SEQ ID NO: 36067 - DNA, 19 bp, Artificial sequence
  SiRNA target sequence
tcaactgttaaaacattaa

SEQ ID NO: 36068 - DNA, 19 bp, Artificial sequence
  SiRNA target sequence
caactgttaaaacattaaa

SEQ ID NO: 36069 - DNA, 19 bp, Artificial sequence
  SiRNA target sequence
aactgttaaaacattaaat

SEQ ID NO: 36070 - DNA, 19 bp, Artificial sequence
  SiRNA target sequence
actgttaaaacattaaatg

SEQ ID NO: 36071 - DNA, 19 bp, Artificial sequence
  SiRNA target sequence
ctgttaaaacattaaatgt

SEQ ID NO: 36072 - DNA, 19 bp, Artificial sequence
  SiRNA target sequence
tgttaaaacattaaatgta

SEQ ID NO: 36073 - DNA, 19 bp, Artificial sequence
  SiRNA target sequence
gttaaaacattaaatgtac

SEQ ID NO: 36074 - DNA, 19 bp, Artificial sequence
  SiRNA target sequence
ttaaaacattaaatgtaca

SEQ ID NO: 36075 - DNA, 19 bp, Artificial sequence
  SiRNA target sequence
taaaacattaaatgtacaa

SEQ ID NO: 36076 - DNA, 19 bp, Artificial sequence
  SiRNA target sequence
aaaacattaaatgtacaaa

SEQ ID NO: 36077 - DNA, 19 bp, Artificial sequence
  SiRNA target sequence
aaacattaaatgtacaaac

SEQ ID NO: 36078 - DNA, 19 bp, Artificial sequence
  SiRNA target sequence
aacattaaatgtacaaact

SEQ ID NO: 36079 - DNA, 19 bp, Artificial sequence
  SiRNA target sequence
acattaaatgtacaaactg

SEQ ID NO: 36080 - DNA, 19 bp, Artificial sequence
  SiRNA target sequence
cattaaatgtacaaactgc

SEQ ID NO: 36081 - DNA, 19 bp, Artificial sequence
  SiRNA target sequence
attaaatgtacaaactgca

SEQ ID NO: 36082 - DNA, 19 bp, Artificial sequence
  SiRNA target sequence
ttaaatgtacaaactgcaa

SEQ ID NO: 36083 - DNA, 19 bp, Artificial sequence
  SiRNA target sequence
taaatgtacaaactgcaaa

SEQ ID NO: 36084 - DNA, 19 bp, Artificial sequence
  SiRNA target sequence
aaatgtacaaactgcaaat

SEQ ID NO: 36085 - DNA, 19 bp, Artificial sequence
  SiRNA target sequence
aatgtacaaactgcaaatg

SEQ ID NO: 36086 - DNA, 19 bp, Artificial sequence
  SiRNA target sequence
atgtacaaactgcaaatgt

SEQ ID NO: 36087 - DNA, 19 bp, Artificial sequence
  SiRNA target sequence
tgtacaaactgcaaatgtc

SEQ ID NO: 36088 - DNA, 19 bp, Artificial sequence
  SiRNA target sequence
gtacaaactgcaaatgtcc

SEQ ID NO: 36089 - DNA, 19 bp, Artificial sequence
  SiRNA target sequence
tacaaactgcaaatgtccc

SEQ ID NO: 36090 - DNA, 19 bp, Artificial sequence
  SiRNA target sequence
acaaactgcaaatgtccca

SEQ ID NO: 36091 - DNA, 19 bp, Artificial sequence
  SiRNA target sequence
caaactgcaaatgtcccaa

SEQ ID NO: 36092 - DNA, 19 bp, Artificial sequence
  SiRNA target sequence
aaactgcaaatgtcccaaa

SEQ ID NO: 36093 - DNA, 19 bp, Artificial sequence
  SiRNA target sequence
aactgcaaatgtcccaaaa

SEQ ID NO: 36094 - DNA, 19 bp, Artificial sequence
  SiRNA target sequence
actgcaaatgtcccaaaaa

SEQ ID NO: 36095 - DNA, 19 bp, Artificial sequence
  SiRNA target sequence
ctgcaaatgtcccaaaaat

SEQ ID NO: 36096 - DNA, 19 bp, Artificial sequence
  SiRNA target sequence
tgcaaatgtcccaaaaatt

SEQ ID NO: 36097 - DNA, 19 bp, Artificial sequence
  SiRNA target sequence
gcaaatgtcccaaaaatta

SEQ ID NO: 36098 - DNA, 19 bp, Artificial sequence
  SiRNA target sequence
caaatgtcccaaaaattat

SEQ ID NO: 36099 - DNA, 19 bp, Artificial sequence
  SiRNA target sequence
aaatgtcccaaaaattatg

SEQ ID NO: 36100 - DNA, 19 bp, Artificial sequence
  SiRNA target sequence
aatgtcccaaaaattatgt

SEQ ID NO: 36101 - DNA, 19 bp, Artificial sequence
  SiRNA target sequence
atgtcccaaaaattatgta

SEQ ID NO: 36102 - DNA, 19 bp, Artificial sequence
  SiRNA target sequence
tgtcccaaaaattatgtaa

SEQ ID NO: 36103 - DNA, 19 bp, Artificial sequence
  SiRNA target sequence
gtcccaaaaattatgtaaa

SEQ ID NO: 36104 - DNA, 19 bp, Artificial sequence
  SiRNA target sequence
tcccaaaaattatgtaaat

SEQ ID NO: 36105 - DNA, 19 bp, Artificial sequence
  SiRNA target sequence
cccaaaaattatgtaaatg

SEQ ID NO: 36106 - DNA, 19 bp, Artificial sequence
  SiRNA target sequence
ccaaaaattatgtaaatga

SEQ ID NO: 36107 - DNA, 19 bp, Artificial sequence
  SiRNA target sequence
caaaaattatgtaaatgac

SEQ ID NO: 36108 - DNA, 19 bp, Artificial sequence
  SiRNA target sequence
aaaaattatgtaaatgaca

SEQ ID NO: 36109 - DNA, 19 bp, Artificial sequence
  SiRNA target sequence
aaaattatgtaaatgacaa

SEQ ID NO: 36110 - DNA, 19 bp, Artificial sequence
  SiRNA target sequence
aaattatgtaaatgacaaa

SEQ ID NO: 36111 - DNA, 19 bp, Artificial sequence
  SiRNA target sequence
aattatgtaaatgacaaat

SEQ ID NO: 36112 - DNA, 19 bp, Artificial sequence
  SiRNA target sequence
attatgtaaatgacaaatg

SEQ ID NO: 36113 - DNA, 19 bp, Artificial sequence
  SiRNA target sequence
ttatgtaaatgacaaatgt

SEQ ID NO: 36114 - DNA, 19 bp, Artificial sequence
  SiRNA target sequence
tatgtaaatgacaaatgtt

SEQ ID NO: 36115 - DNA, 19 bp, Artificial sequence
  SiRNA target sequence
atgtaaatgacaaatgttc

SEQ ID NO: 36116 - DNA, 19 bp, Artificial sequence
  SiRNA target sequence
tgtaaatgacaaatgttcg

SEQ ID NO: 36117 - DNA, 19 bp, Artificial sequence
  SiRNA target sequence
gtaaatgacaaatgttcga

SEQ ID NO: 36118 - DNA, 19 bp, Artificial sequence
  SiRNA target sequence
taaatgacaaatgttcgaa

SEQ ID NO: 36119 - DNA, 19 bp, Artificial sequence
  SiRNA target sequence
aaatgacaaatgttcgaat

SEQ ID NO: 36120 - DNA, 19 bp, Artificial sequence
  SiRNA target sequence
aatgacaaatgttcgaata

SEQ ID NO: 36121 - DNA, 19 bp, Artificial sequence
  SiRNA target sequence
atgacaaatgttcgaataa

SEQ ID NO: 36122 - DNA, 19 bp, Artificial sequence
  SiRNA target sequence
tgacaaatgttcgaataaa

SEQ ID NO: 36123 - DNA, 19 bp, Artificial sequence
  SiRNA target sequence
gacaaatgttcgaataaag

SEQ ID NO: 36124 - DNA, 19 bp, Artificial sequence
  SiRNA target sequence
acaaatgttcgaataaagg

SEQ ID NO: 36125 - DNA, 19 bp, Artificial sequence
  SiRNA target sequence
caaatgttcgaataaaggg

SEQ ID NO: 36126 - DNA, 19 bp, Artificial sequence
  SiRNA target sequence
aaatgttcgaataaagggc

SEQ ID NO: 36127 - DNA, 19 bp, Artificial sequence
  SiRNA target sequence
aatgttcgaataaagggct

SEQ ID NO: 36128 - DNA, 19 bp, Artificial sequence
  SiRNA target sequence
atgttcgaataaagggctt

SEQ ID NO: 36129 - DNA, 19 bp, Artificial sequence
  SiRNA target sequence
tgttcgaataaagggcttt

SEQ ID NO: 36130 - DNA, 19 bp, Artificial sequence
  SiRNA target sequence
gttcgaataaagggctttg

SEQ ID NO: 36131 - DNA, 19 bp, Artificial sequence
  SiRNA target sequence
ttcgaataaagggctttga

SEQ ID NO: 36132 - DNA, 19 bp, Artificial sequence
  SiRNA target sequence
tcgaataaagggctttgaa

SEQ ID NO: 36133 - DNA, 19 bp, Artificial sequence
  SiRNA target sequence
cgaataaagggctttgaaa

SEQ ID NO: 36134 - DNA, 19 bp, Artificial sequence
  SiRNA target sequence
gaataaagggctttgaaat

SEQ ID NO: 36135 - DNA, 19 bp, Artificial sequence
  SiRNA target sequence
aataaagggctttgaaata

SEQ ID NO: 36136 - DNA, 19 bp, Artificial sequence
  SiRNA target sequence
ataaagggctttgaaataa

SEQ ID NO: 36137 - DNA, 19 bp, Artificial sequence
  SiRNA target sequence
taaagggctttgaaataac

SEQ ID NO: 36138 - DNA, 19 bp, Artificial sequence
  SiRNA target sequence
aaagggctttgaaataaca

SEQ ID NO: 36139 - DNA, 19 bp, Artificial sequence
  SiRNA target sequence
aagggctttgaaataacat

SEQ ID NO: 36140 - DNA, 19 bp, Artificial sequence
  SiRNA target sequence
agggctttgaaataacata

SEQ ID NO: 36141 - DNA, 19 bp, Artificial sequence
  SiRNA target sequence
gggctttgaaataacatat

SEQ ID NO: 36142 - DNA, 19 bp, Artificial sequence
  SiRNA target sequence
ggctttgaaataacatatt

SEQ ID NO: 36143 - DNA, 19 bp, Artificial sequence
  SiRNA target sequence
gctttgaaataacatattc

SEQ ID NO: 36144 - DNA, 19 bp, Artificial sequence
  SiRNA target sequence
ctttgaaataacatattct

SEQ ID NO: 36145 - DNA, 19 bp, Artificial sequence
  SiRNA target sequence
tttgaaataacatattcta

SEQ ID NO: 36146 - DNA, 19 bp, Artificial sequence
  SiRNA target sequence
ttgaaataacatattctac

SEQ ID NO: 36147 - DNA, 19 bp, Artificial sequence
  SiRNA target sequence
tgaaataacatattctaca

SEQ ID NO: 36148 - DNA, 19 bp, Artificial sequence
  SiRNA target sequence
gaaataacatattctacaa

SEQ ID NO: 36149 - DNA, 19 bp, Artificial sequence
  SiRNA target sequence
aaataacatattctacaat

SEQ ID NO: 36150 - DNA, 19 bp, Artificial sequence
  SiRNA target sequence
aataacatattctacaatc

SEQ ID NO: 36151 - DNA, 19 bp, Artificial sequence
  SiRNA target sequence
ataacatattctacaatca

SEQ ID NO: 36152 - DNA, 19 bp, Artificial sequence
  SiRNA target sequence
taacatattctacaatcag

SEQ ID NO: 36153 - DNA, 19 bp, Artificial sequence
  SiRNA target sequence
aacatattctacaatcagg

SEQ ID NO: 36154 - DNA, 19 bp, Artificial sequence
  SiRNA target sequence
acatattctacaatcaggt

SEQ ID NO: 36155 - DNA, 19 bp, Artificial sequence
  SiRNA target sequence
catattctacaatcaggtc

SEQ ID NO: 36156 - DNA, 19 bp, Artificial sequence
  SiRNA target sequence
atattctacaatcaggtct

SEQ ID NO: 36157 - DNA, 19 bp, Artificial sequence
  SiRNA target sequence
tattctacaatcaggtctt

SEQ ID NO: 36158 - DNA, 19 bp, Artificial sequence
  SiRNA target sequence
attctacaatcaggtcttt

SEQ ID NO: 36159 - DNA, 19 bp, Artificial sequence
  SiRNA target sequence
ttctacaatcaggtctttc

SEQ ID NO: 36160 - DNA, 19 bp, Artificial sequence
  SiRNA target sequence
tctacaatcaggtctttca

SEQ ID NO: 36161 - DNA, 19 bp, Artificial sequence
  SiRNA target sequence
ctacaatcaggtctttcat

SEQ ID NO: 36162 - DNA, 19 bp, Artificial sequence
  SiRNA target sequence
tacaatcaggtctttcata

SEQ ID NO: 36163 - DNA, 19 bp, Artificial sequence
  SiRNA target sequence
acaatcaggtctttcataa

SEQ ID NO: 36164 - DNA, 19 bp, Artificial sequence
  SiRNA target sequence
caatcaggtctttcataat

SEQ ID NO: 36165 - DNA, 19 bp, Artificial sequence
  SiRNA target sequence
aatcaggtctttcataata

SEQ ID NO: 36166 - DNA, 19 bp, Artificial sequence
  SiRNA target sequence
atcaggtctttcataatac

SEQ ID NO: 36167 - DNA, 19 bp, Artificial sequence
  SiRNA target sequence
tcaggtctttcataatact

SEQ ID NO: 36168 - DNA, 19 bp, Artificial sequence
  SiRNA target sequence
caggtctttcataatacta

SEQ ID NO: 36169 - DNA, 19 bp, Artificial sequence
  SiRNA target sequence
aggtctttcataatactaa

SEQ ID NO: 36170 - DNA, 19 bp, Artificial sequence
  SiRNA target sequence
ggtctttcataatactaat

SEQ ID NO: 36171 - DNA, 19 bp, Artificial sequence
  SiRNA target sequence
gtctttcataatactaata

SEQ ID NO: 36172 - DNA, 19 bp, Artificial sequence
  SiRNA target sequence
tctttcataatactaatat

SEQ ID NO: 36173 - DNA, 19 bp, Artificial sequence
  SiRNA target sequence
ctttcataatactaatatc

SEQ ID NO: 36174 - DNA, 19 bp, Artificial sequence
  SiRNA target sequence
tttcataatactaatatca

SEQ ID NO: 36175 - DNA, 19 bp, Artificial sequence
  SiRNA target sequence
ttcataatactaatatcac

SEQ ID NO: 36176 - DNA, 19 bp, Artificial sequence
  SiRNA target sequence
tcataatactaatatcact

SEQ ID NO: 36177 - DNA, 19 bp, Artificial sequence
  SiRNA target sequence
cataatactaatatcacta

SEQ ID NO: 36178 - DNA, 19 bp, Artificial sequence
  SiRNA target sequence
ataatactaatatcactac

SEQ ID NO: 36179 - DNA, 19 bp, Artificial sequence
  SiRNA target sequence
taatactaatatcactacc

SEQ ID NO: 36180 - DNA, 19 bp, Artificial sequence
  SiRNA target sequence
aatactaatatcactacca

SEQ ID NO: 36181 - DNA, 19 bp, Artificial sequence
  SiRNA target sequence
atactaatatcactaccat

SEQ ID NO: 36182 - DNA, 19 bp, Artificial sequence
  SiRNA target sequence
tactaatatcactaccata

SEQ ID NO: 36183 - DNA, 19 bp, Artificial sequence
  SiRNA target sequence
actaatatcactaccataa

SEQ ID NO: 36184 - DNA, 19 bp, Artificial sequence
  SiRNA target sequence
ctaatatcactaccataaa

SEQ ID NO: 36185 - DNA, 19 bp, Artificial sequence
  SiRNA target sequence
taatatcactaccataaat

SEQ ID NO: 36186 - DNA, 19 bp, Artificial sequence
  SiRNA target sequence
aatatcactaccataaata

SEQ ID NO: 36187 - DNA, 19 bp, Artificial sequence
  SiRNA target sequence
atatcactaccataaatag

SEQ ID NO: 36188 - DNA, 19 bp, Artificial sequence
  SiRNA target sequence
tatcactaccataaataga

SEQ ID NO: 36189 - DNA, 19 bp, Artificial sequence
  SiRNA target sequence
atcactaccataaatagat

SEQ ID NO: 36190 - DNA, 19 bp, Artificial sequence
  SiRNA target sequence
tcactaccataaatagatt

SEQ ID NO: 36191 - DNA, 19 bp, Artificial sequence
  SiRNA target sequence
cactaccataaatagattt

SEQ ID NO: 36192 - DNA, 19 bp, Artificial sequence
  SiRNA target sequence
actaccataaatagatttt

SEQ ID NO: 36193 - DNA, 19 bp, Artificial sequence
  SiRNA target sequence
ctaccataaatagattttt

SEQ ID NO: 36194 - DNA, 19 bp, Artificial sequence
  SiRNA target sequence
taccataaatagatttttt

SEQ ID NO: 36195 - DNA, 19 bp, Artificial sequence
  SiRNA target sequence
accataaatagattttttt

SEQ ID NO: 36196 - DNA, 19 bp, Artificial sequence
  SiRNA target sequence
ccataaatagatttttttt

SEQ ID NO: 36197 - DNA, 19 bp, Artificial sequence
  SiRNA target sequence
cataaatagattttttttc

SEQ ID NO: 36198 - DNA, 19 bp, Artificial sequence
  SiRNA target sequence
ataaatagattttttttct

SEQ ID NO: 36199 - DNA, 19 bp, Artificial sequence
  SiRNA target sequence
taaatagattttttttcta

SEQ ID NO: 36200 - DNA, 19 bp, Artificial sequence
  SiRNA target sequence
aaatagattttttttctaa

SEQ ID NO: 36201 - DNA, 19 bp, Artificial sequence
  SiRNA target sequence
aatagattttttttctaac

SEQ ID NO: 36202 - DNA, 19 bp, Artificial sequence
  SiRNA target sequence
atagattttttttctaaca

SEQ ID NO: 36203 - DNA, 19 bp, Artificial sequence
  SiRNA target sequence
tagattttttttctaacat

SEQ ID NO: 36204 - DNA, 20 bp, Artificial sequence
  SiRNA target sequence
ttataagtttaatgtagaaa

SEQ ID NO: 36205 - DNA, 20 bp, Artificial sequence
  SiRNA target sequence
tataagtttaatgtagaaat

SEQ ID NO: 36206 - DNA, 20 bp, Artificial sequence
  SiRNA target sequence
ataagtttaatgtagaaata

SEQ ID NO: 36207 - DNA, 20 bp, Artificial sequence
  SiRNA target sequence
taagtttaatgtagaaataa

SEQ ID NO: 36208 - DNA, 20 bp, Artificial sequence
  SiRNA target sequence
aagtttaatgtagaaataat

SEQ ID NO: 36209 - DNA, 20 bp, Artificial sequence
  SiRNA target sequence
agtttaatgtagaaataata

SEQ ID NO: 36210 - DNA, 20 bp, Artificial sequence
  SiRNA target sequence
gtttaatgtagaaataatat

SEQ ID NO: 36211 - DNA, 20 bp, Artificial sequence
  SiRNA target sequence
tttaatgtagaaataatatt

SEQ ID NO: 36212 - DNA, 20 bp, Artificial sequence
  SiRNA target sequence
ttaatgtagaaataatattt

SEQ ID NO: 36213 - DNA, 20 bp, Artificial sequence
  SiRNA target sequence
taatgtagaaataatatttt

SEQ ID NO: 36214 - DNA, 20 bp, Artificial sequence
  SiRNA target sequence
aatgtagaaataatattttc

SEQ ID NO: 36215 - DNA, 20 bp, Artificial sequence
  SiRNA target sequence
atgtagaaataatattttct

SEQ ID NO: 36216 - DNA, 20 bp, Artificial sequence
  SiRNA target sequence
tgtagaaataatattttctt

SEQ ID NO: 36217 - DNA, 20 bp, Artificial sequence
  SiRNA target sequence
gtagaaataatattttcttc

SEQ ID NO: 36218 - DNA, 20 bp, Artificial sequence
  SiRNA target sequence
tagaaataatattttcttct

SEQ ID NO: 36219 - DNA, 20 bp, Artificial sequence
  SiRNA target sequence
agaaataatattttcttcta

SEQ ID NO: 36220 - DNA, 20 bp, Artificial sequence
  SiRNA target sequence
gaaataatattttcttctat

SEQ ID NO: 36221 - DNA, 20 bp, Artificial sequence
  SiRNA target sequence
aaataatattttcttctatc

SEQ ID NO: 36222 - DNA, 20 bp, Artificial sequence
  SiRNA target sequence
aataatattttcttctatct

SEQ ID NO: 36223 - DNA, 20 bp, Artificial sequence
  SiRNA target sequence
ataatattttcttctatctt

SEQ ID NO: 36224 - DNA, 20 bp, Artificial sequence
  SiRNA target sequence
taatattttcttctatctta

SEQ ID NO: 36225 - DNA, 20 bp, Artificial sequence
  SiRNA target sequence
aatattttcttctatcttat

SEQ ID NO: 36226 - DNA, 20 bp, Artificial sequence
  SiRNA target sequence
atattttcttctatcttatg

SEQ ID NO: 36227 - DNA, 20 bp, Artificial sequence
  SiRNA target sequence
tattttcttctatcttatgt

SEQ ID NO: 36228 - DNA, 20 bp, Artificial sequence
  SiRNA target sequence
attttcttctatcttatgta

SEQ ID NO: 36229 - DNA, 20 bp, Artificial sequence
  SiRNA target sequence
ttttcttctatcttatgtaa

SEQ ID NO: 36230 - DNA, 20 bp, Artificial sequence
  SiRNA target sequence
tttcttctatcttatgtaat

SEQ ID NO: 36231 - DNA, 20 bp, Artificial sequence
  SiRNA target sequence
ttcttctatcttatgtaatg

SEQ ID NO: 36232 - DNA, 20 bp, Artificial sequence
  SiRNA target sequence
tcttctatcttatgtaatga

SEQ ID NO: 36233 - DNA, 20 bp, Artificial sequence
  SiRNA target sequence
cttctatcttatgtaatgat

SEQ ID NO: 36234 - DNA, 20 bp, Artificial sequence
  SiRNA target sequence
ttctatcttatgtaatgata

SEQ ID NO: 36235 - DNA, 20 bp, Artificial sequence
  SiRNA target sequence
tctatcttatgtaatgatac

SEQ ID NO: 36236 - DNA, 20 bp, Artificial sequence
  SiRNA target sequence
ctatcttatgtaatgataca

SEQ ID NO: 36237 - DNA, 20 bp, Artificial sequence
  SiRNA target sequence
tatcttatgtaatgatacag

SEQ ID NO: 36238 - DNA, 20 bp, Artificial sequence
  SiRNA target sequence
atcttatgtaatgatacagt

SEQ ID NO: 36239 - DNA, 20 bp, Artificial sequence
  SiRNA target sequence
tcttatgtaatgatacagtt

SEQ ID NO: 36240 - DNA, 20 bp, Artificial sequence
  SiRNA target sequence
cttatgtaatgatacagttt

SEQ ID NO: 36241 - DNA, 20 bp, Artificial sequence
  SiRNA target sequence
ttatgtaatgatacagtttt

SEQ ID NO: 36242 - DNA, 20 bp, Artificial sequence
  SiRNA target sequence
tatgtaatgatacagttttg

SEQ ID NO: 36243 - DNA, 20 bp, Artificial sequence
  SiRNA target sequence
atgtaatgatacagttttgt

SEQ ID NO: 36244 - DNA, 20 bp, Artificial sequence
  SiRNA target sequence
tgtaatgatacagttttgtt

SEQ ID NO: 36245 - DNA, 20 bp, Artificial sequence
  SiRNA target sequence
gtaatgatacagttttgttt

SEQ ID NO: 36246 - DNA, 20 bp, Artificial sequence
  SiRNA target sequence
taatgatacagttttgtttt

SEQ ID NO: 36247 - DNA, 20 bp, Artificial sequence
  SiRNA target sequence
aatgatacagttttgttttt

SEQ ID NO: 36248 - DNA, 20 bp, Artificial sequence
  SiRNA target sequence
atgatacagttttgttttta

SEQ ID NO: 36249 - DNA, 20 bp, Artificial sequence
  SiRNA target sequence
tgatacagttttgtttttaa

SEQ ID NO: 36250 - DNA, 20 bp, Artificial sequence
  SiRNA target sequence
gatacagttttgtttttaat

SEQ ID NO: 36251 - DNA, 20 bp, Artificial sequence
  SiRNA target sequence
atacagttttgtttttaata

SEQ ID NO: 36252 - DNA, 20 bp, Artificial sequence
  SiRNA target sequence
tacagttttgtttttaatac

SEQ ID NO: 36253 - DNA, 20 bp, Artificial sequence
  SiRNA target sequence
acagttttgtttttaatact

SEQ ID NO: 36254 - DNA, 20 bp, Artificial sequence
  SiRNA target sequence
cagttttgtttttaatactt

SEQ ID NO: 36255 - DNA, 20 bp, Artificial sequence
  SiRNA target sequence
agttttgtttttaatactta

SEQ ID NO: 36256 - DNA, 20 bp, Artificial sequence
  SiRNA target sequence
gttttgtttttaatacttag

SEQ ID NO: 36257 - DNA, 20 bp, Artificial sequence
  SiRNA target sequence
ttttgtttttaatacttagc

SEQ ID NO: 36258 - DNA, 20 bp, Artificial sequence
  SiRNA target sequence
tttgtttttaatacttagca

SEQ ID NO: 36259 - DNA, 20 bp, Artificial sequence
  SiRNA target sequence
ttgtttttaatacttagcac

SEQ ID NO: 36260 - DNA, 20 bp, Artificial sequence
  SiRNA target sequence
tgtttttaatacttagcact

SEQ ID NO: 36261 - DNA, 20 bp, Artificial sequence
  SiRNA target sequence
gtttttaatacttagcactt

SEQ ID NO: 36262 - DNA, 20 bp, Artificial sequence
  SiRNA target sequence
tttttaatacttagcacttt

SEQ ID NO: 36263 - DNA, 20 bp, Artificial sequence
  SiRNA target sequence
ttttaatacttagcacttta

SEQ ID NO: 36264 - DNA, 20 bp, Artificial sequence
  SiRNA target sequence
tttaatacttagcactttat

SEQ ID NO: 36265 - DNA, 20 bp, Artificial sequence
  SiRNA target sequence
ttaatacttagcactttatc

SEQ ID NO: 36266 - DNA, 20 bp, Artificial sequence
  SiRNA target sequence
taatacttagcactttatca

SEQ ID NO: 36267 - DNA, 20 bp, Artificial sequence
  SiRNA target sequence
aatacttagcactttatcaa

SEQ ID NO: 36268 - DNA, 20 bp, Artificial sequence
  SiRNA target sequence
atacttagcactttatcaaa

SEQ ID NO: 36269 - DNA, 20 bp, Artificial sequence
  SiRNA target sequence
tacttagcactttatcaaat

SEQ ID NO: 36270 - DNA, 20 bp, Artificial sequence
  SiRNA target sequence
acttagcactttatcaaata

SEQ ID NO: 36271 - DNA, 20 bp, Artificial sequence
  SiRNA target sequence
cttagcactttatcaaataa

SEQ ID NO: 36272 - DNA, 20 bp, Artificial sequence
  SiRNA target sequence
ttagcactttatcaaataag

SEQ ID NO: 36273 - DNA, 20 bp, Artificial sequence
  SiRNA target sequence
tagcactttatcaaataagt

SEQ ID NO: 36274 - DNA, 20 bp, Artificial sequence
  SiRNA target sequence
agcactttatcaaataagtg

SEQ ID NO: 36275 - DNA, 20 bp, Artificial sequence
  SiRNA target sequence
gcactttatcaaataagtgg

SEQ ID NO: 36276 - DNA, 20 bp, Artificial sequence
  SiRNA target sequence
cactttatcaaataagtgga

SEQ ID NO: 36277 - DNA, 20 bp, Artificial sequence
  SiRNA target sequence
actttatcaaataagtggag

SEQ ID NO: 36278 - DNA, 20 bp, Artificial sequence
  SiRNA target sequence
ctttatcaaataagtggagt

SEQ ID NO: 36279 - DNA, 20 bp, Artificial sequence
  SiRNA target sequence
tttatcaaataagtggagta

SEQ ID NO: 36280 - DNA, 20 bp, Artificial sequence
  SiRNA target sequence
ttatcaaataagtggagtaa

SEQ ID NO: 36281 - DNA, 20 bp, Artificial sequence
  SiRNA target sequence
tatcaaataagtggagtaaa

SEQ ID NO: 36282 - DNA, 20 bp, Artificial sequence
  SiRNA target sequence
atcaaataagtggagtaaat

SEQ ID NO: 36283 - DNA, 20 bp, Artificial sequence
  SiRNA target sequence
tcaaataagtggagtaaatc

SEQ ID NO: 36284 - DNA, 20 bp, Artificial sequence
  SiRNA target sequence
caaataagtggagtaaatct

SEQ ID NO: 36285 - DNA, 20 bp, Artificial sequence
  SiRNA target sequence
aaataagtggagtaaatcta

SEQ ID NO: 36286 - DNA, 20 bp, Artificial sequence
  SiRNA target sequence
aataagtggagtaaatctaa

SEQ ID NO: 36287 - DNA, 20 bp, Artificial sequence
  SiRNA target sequence
ataagtggagtaaatctaaa

SEQ ID NO: 36288 - DNA, 20 bp, Artificial sequence
  SiRNA target sequence
taagtggagtaaatctaaat

SEQ ID NO: 36289 - DNA, 20 bp, Artificial sequence
  SiRNA target sequence
aagtggagtaaatctaaatt

SEQ ID NO: 36290 - DNA, 20 bp, Artificial sequence
  SiRNA target sequence
agtggagtaaatctaaatta

SEQ ID NO: 36291 - DNA, 20 bp, Artificial sequence
  SiRNA target sequence
gtggagtaaatctaaattat

SEQ ID NO: 36292 - DNA, 20 bp, Artificial sequence
  SiRNA target sequence
tggagtaaatctaaattatg

SEQ ID NO: 36293 - DNA, 20 bp, Artificial sequence
  SiRNA target sequence
ggagtaaatctaaattatgt

SEQ ID NO: 36294 - DNA, 20 bp, Artificial sequence
  SiRNA target sequence
gagtaaatctaaattatgta

SEQ ID NO: 36295 - DNA, 20 bp, Artificial sequence
  SiRNA target sequence
agtaaatctaaattatgtaa

SEQ ID NO: 36296 - DNA, 20 bp, Artificial sequence
  SiRNA target sequence
gtaaatctaaattatgtaaa

SEQ ID NO: 36297 - DNA, 20 bp, Artificial sequence
  SiRNA target sequence
taaatctaaattatgtaaaa

SEQ ID NO: 36298 - DNA, 20 bp, Artificial sequence
  SiRNA target sequence
aaatctaaattatgtaaaac

SEQ ID NO: 36299 - DNA, 20 bp, Artificial sequence
  SiRNA target sequence
aatctaaattatgtaaaaca

SEQ ID NO: 36300 - DNA, 20 bp, Artificial sequence
  SiRNA target sequence
atctaaattatgtaaaacaa

SEQ ID NO: 36301 - DNA, 20 bp, Artificial sequence
  SiRNA target sequence
tctaaattatgtaaaacaat

SEQ ID NO: 36302 - DNA, 20 bp, Artificial sequence
  SiRNA target sequence
ctaaattatgtaaaacaata

SEQ ID NO: 36303 - DNA, 20 bp, Artificial sequence
  SiRNA target sequence
taaattatgtaaaacaataa

SEQ ID NO: 36304 - DNA, 20 bp, Artificial sequence
  SiRNA target sequence
aaattatgtaaaacaataat

SEQ ID NO: 36305 - DNA, 20 bp, Artificial sequence
  SiRNA target sequence
aattatgtaaaacaataatt

SEQ ID NO: 36306 - DNA, 20 bp, Artificial sequence
  SiRNA target sequence
attatgtaaaacaataatta

SEQ ID NO: 36307 - DNA, 20 bp, Artificial sequence
  SiRNA target sequence
ttatgtaaaacaataattat

SEQ ID NO: 36308 - DNA, 20 bp, Artificial sequence
  SiRNA target sequence
tatgtaaaacaataattatc

SEQ ID NO: 36309 - DNA, 20 bp, Artificial sequence
  SiRNA target sequence
atgtaaaacaataattatcg

SEQ ID NO: 36310 - DNA, 20 bp, Artificial sequence
  SiRNA target sequence
tgtaaaacaataattatcgt

SEQ ID NO: 36311 - DNA, 20 bp, Artificial sequence
  SiRNA target sequence
gtaaaacaataattatcgtc

SEQ ID NO: 36312 - DNA, 20 bp, Artificial sequence
  SiRNA target sequence
taaaacaataattatcgtct

SEQ ID NO: 36313 - DNA, 20 bp, Artificial sequence
  SiRNA target sequence
aaaacaataattatcgtctt

SEQ ID NO: 36314 - DNA, 20 bp, Artificial sequence
  SiRNA target sequence
aaacaataattatcgtcttc

SEQ ID NO: 36315 - DNA, 20 bp, Artificial sequence
  SiRNA target sequence
aacaataattatcgtcttct

SEQ ID NO: 36316 - DNA, 20 bp, Artificial sequence
  SiRNA target sequence
acaataattatcgtcttctc

SEQ ID NO: 36317 - DNA, 20 bp, Artificial sequence
  SiRNA target sequence
caataattatcgtcttctct

SEQ ID NO: 36318 - DNA, 20 bp, Artificial sequence
  SiRNA target sequence
aataattatcgtcttctcta

SEQ ID NO: 36319 - DNA, 20 bp, Artificial sequence
  SiRNA target sequence
ataattatcgtcttctctaa

SEQ ID NO: 36320 - DNA, 20 bp, Artificial sequence
  SiRNA target sequence
taattatcgtcttctctaag

SEQ ID NO: 36321 - DNA, 20 bp, Artificial sequence
  SiRNA target sequence
aattatcgtcttctctaagt

SEQ ID NO: 36322 - DNA, 20 bp, Artificial sequence
  SiRNA target sequence
attatcgtcttctctaagtt

SEQ ID NO: 36323 - DNA, 20 bp, Artificial sequence
  SiRNA target sequence
ttatcgtcttctctaagttg

SEQ ID NO: 36324 - DNA, 20 bp, Artificial sequence
  SiRNA target sequence
tatcgtcttctctaagttgt

SEQ ID NO: 36325 - DNA, 20 bp, Artificial sequence
  SiRNA target sequence
atcgtcttctctaagttgtt

SEQ ID NO: 36326 - DNA, 20 bp, Artificial sequence
  SiRNA target sequence
tcgtcttctctaagttgttg

SEQ ID NO: 36327 - DNA, 20 bp, Artificial sequence
  SiRNA target sequence
cgtcttctctaagttgttgg

SEQ ID NO: 36328 - DNA, 20 bp, Artificial sequence
  SiRNA target sequence
gtcttctctaagttgttgga

SEQ ID NO: 36329 - DNA, 20 bp, Artificial sequence
  SiRNA target sequence
tcttctctaagttgttggag

SEQ ID NO: 36330 - DNA, 20 bp, Artificial sequence
  SiRNA target sequence
cttctctaagttgttggaga

SEQ ID NO: 36331 - DNA, 20 bp, Artificial sequence
  SiRNA target sequence
ttctctaagttgttggagat

SEQ ID NO: 36332 - DNA, 20 bp, Artificial sequence
  SiRNA target sequence
tctctaagttgttggagatt

SEQ ID NO: 36333 - DNA, 20 bp, Artificial sequence
  SiRNA target sequence
ctctaagttgttggagatta

SEQ ID NO: 36334 - DNA, 20 bp, Artificial sequence
  SiRNA target sequence
tctaagttgttggagattag

SEQ ID NO: 36335 - DNA, 20 bp, Artificial sequence
  SiRNA target sequence
ctaagttgttggagattaga

SEQ ID NO: 36336 - DNA, 20 bp, Artificial sequence
  SiRNA target sequence
taagttgttggagattagac

SEQ ID NO: 36337 - DNA, 20 bp, Artificial sequence
  SiRNA target sequence
aagttgttggagattagact

SEQ ID NO: 36338 - DNA, 20 bp, Artificial sequence
  SiRNA target sequence
agttgttggagattagactt

SEQ ID NO: 36339 - DNA, 20 bp, Artificial sequence
  SiRNA target sequence
gttgttggagattagacttt

SEQ ID NO: 36340 - DNA, 20 bp, Artificial sequence
  SiRNA target sequence
ttgttggagattagactttt

SEQ ID NO: 36341 - DNA, 20 bp, Artificial sequence
  SiRNA target sequence
tgttggagattagactttta

SEQ ID NO: 36342 - DNA, 20 bp, Artificial sequence
  SiRNA target sequence
gttggagattagacttttaa

SEQ ID NO: 36343 - DNA, 20 bp, Artificial sequence
  SiRNA target sequence
ttggagattagacttttaag

SEQ ID NO: 36344 - DNA, 20 bp, Artificial sequence
  SiRNA target sequence
tggagattagacttttaaga

SEQ ID NO: 36345 - DNA, 20 bp, Artificial sequence
  SiRNA target sequence
ggagattagacttttaagaa

SEQ ID NO: 36346 - DNA, 20 bp, Artificial sequence
  SiRNA target sequence
gagattagacttttaagaat

SEQ ID NO: 36347 - DNA, 20 bp, Artificial sequence
  SiRNA target sequence
agattagacttttaagaatt

SEQ ID NO: 36348 - DNA, 20 bp, Artificial sequence
  SiRNA target sequence
gattagacttttaagaattt

SEQ ID NO: 36349 - DNA, 20 bp, Artificial sequence
  SiRNA target sequence
attagacttttaagaatttc

SEQ ID NO: 36350 - DNA, 20 bp, Artificial sequence
  SiRNA target sequence
ttagacttttaagaatttca

SEQ ID NO: 36351 - DNA, 20 bp, Artificial sequence
  SiRNA target sequence
tagacttttaagaatttcat

SEQ ID NO: 36352 - DNA, 20 bp, Artificial sequence
  SiRNA target sequence
agacttttaagaatttcata

SEQ ID NO: 36353 - DNA, 20 bp, Artificial sequence
  SiRNA target sequence
gacttttaagaatttcatat

SEQ ID NO: 36354 - DNA, 20 bp, Artificial sequence
  SiRNA target sequence
acttttaagaatttcatatt

SEQ ID NO: 36355 - DNA, 20 bp, Artificial sequence
  SiRNA target sequence
cttttaagaatttcatattc

SEQ ID NO: 36356 - DNA, 20 bp, Artificial sequence
  SiRNA target sequence
ttttaagaatttcatattca

SEQ ID NO: 36357 - DNA, 20 bp, Artificial sequence
  SiRNA target sequence
tttaagaatttcatattcag

SEQ ID NO: 36358 - DNA, 20 bp, Artificial sequence
  SiRNA target sequence
ttaagaatttcatattcagc

SEQ ID NO: 36359 - DNA, 20 bp, Artificial sequence
  SiRNA target sequence
taagaatttcatattcagct

SEQ ID NO: 36360 - DNA, 20 bp, Artificial sequence
  SiRNA target sequence
aagaatttcatattcagctt

SEQ ID NO: 36361 - DNA, 20 bp, Artificial sequence
  SiRNA target sequence
agaatttcatattcagcttt

SEQ ID NO: 36362 - DNA, 20 bp, Artificial sequence
  SiRNA target sequence
gaatttcatattcagctttt

SEQ ID NO: 36363 - DNA, 20 bp, Artificial sequence
  SiRNA target sequence
aatttcatattcagcttttt

SEQ ID NO: 36364 - DNA, 20 bp, Artificial sequence
  SiRNA target sequence
atttcatattcagctttttt

SEQ ID NO: 36365 - DNA, 20 bp, Artificial sequence
  SiRNA target sequence
tttcatattcagcttttttg

SEQ ID NO: 36366 - DNA, 20 bp, Artificial sequence
  SiRNA target sequence
ttcatattcagcttttttgt

SEQ ID NO: 36367 - DNA, 20 bp, Artificial sequence
  SiRNA target sequence
tcatattcagcttttttgtc

SEQ ID NO: 36368 - DNA, 20 bp, Artificial sequence
  SiRNA target sequence
catattcagcttttttgtcc

SEQ ID NO: 36369 - DNA, 20 bp, Artificial sequence
  SiRNA target sequence
atattcagcttttttgtcca

SEQ ID NO: 36370 - DNA, 20 bp, Artificial sequence
  SiRNA target sequence
tattcagcttttttgtccaa

SEQ ID NO: 36371 - DNA, 20 bp, Artificial sequence
  SiRNA target sequence
attcagcttttttgtccaat

SEQ ID NO: 36372 - DNA, 20 bp, Artificial sequence
  SiRNA target sequence
ttcagcttttttgtccaatg

SEQ ID NO: 36373 - DNA, 20 bp, Artificial sequence
  SiRNA target sequence
tcagcttttttgtccaatgc

SEQ ID NO: 36374 - DNA, 20 bp, Artificial sequence
  SiRNA target sequence
cagcttttttgtccaatgcg

SEQ ID NO: 36375 - DNA, 20 bp, Artificial sequence
  SiRNA target sequence
agcttttttgtccaatgcgg

SEQ ID NO: 36376 - DNA, 20 bp, Artificial sequence
  SiRNA target sequence
gcttttttgtccaatgcggc

SEQ ID NO: 36377 - DNA, 20 bp, Artificial sequence
  SiRNA target sequence
cttttttgtccaatgcggcc

SEQ ID NO: 36378 - DNA, 20 bp, Artificial sequence
  SiRNA target sequence
ttttttgtccaatgcggccg

SEQ ID NO: 36379 - DNA, 20 bp, Artificial sequence
  SiRNA target sequence
tttttgtccaatgcggccgt

SEQ ID NO: 36380 - DNA, 20 bp, Artificial sequence
  SiRNA target sequence
ttttgtccaatgcggccgtt

SEQ ID NO: 36381 - DNA, 20 bp, Artificial sequence
  SiRNA target sequence
tttgtccaatgcggccgttg

SEQ ID NO: 36382 - DNA, 20 bp, Artificial sequence
  SiRNA target sequence
ttgtccaatgcggccgttgg

SEQ ID NO: 36383 - DNA, 20 bp, Artificial sequence
  SiRNA target sequence
tgtccaatgcggccgttggc

SEQ ID NO: 36384 - DNA, 20 bp, Artificial sequence
  SiRNA target sequence
gtccaatgcggccgttggct

SEQ ID NO: 36385 - DNA, 20 bp, Artificial sequence
  SiRNA target sequence
tccaatgcggccgttggctc

SEQ ID NO: 36386 - DNA, 20 bp, Artificial sequence
  SiRNA target sequence
ccaatgcggccgttggctca

SEQ ID NO: 36387 - DNA, 20 bp, Artificial sequence
  SiRNA target sequence
caatgcggccgttggctcat

SEQ ID NO: 36388 - DNA, 20 bp, Artificial sequence
  SiRNA target sequence
aatgcggccgttggctcatc

SEQ ID NO: 36389 - DNA, 20 bp, Artificial sequence
  SiRNA target sequence
atgcggccgttggctcatct

SEQ ID NO: 36390 - DNA, 20 bp, Artificial sequence
  SiRNA target sequence
tgcggccgttggctcatcta

SEQ ID NO: 36391 - DNA, 20 bp, Artificial sequence
  SiRNA target sequence
gcggccgttggctcatctaa

SEQ ID NO: 36392 - DNA, 20 bp, Artificial sequence
  SiRNA target sequence
cggccgttggctcatctaaa

SEQ ID NO: 36393 - DNA, 20 bp, Artificial sequence
  SiRNA target sequence
ggccgttggctcatctaaaa

SEQ ID NO: 36394 - DNA, 20 bp, Artificial sequence
  SiRNA target sequence
gccgttggctcatctaaaat

SEQ ID NO: 36395 - DNA, 20 bp, Artificial sequence
  SiRNA target sequence
ccgttggctcatctaaaatt

SEQ ID NO: 36396 - DNA, 20 bp, Artificial sequence
  SiRNA target sequence
cgttggctcatctaaaatta

SEQ ID NO: 36397 - DNA, 20 bp, Artificial sequence
  SiRNA target sequence
gttggctcatctaaaattat

SEQ ID NO: 36398 - DNA, 20 bp, Artificial sequence
  SiRNA target sequence
ttggctcatctaaaattata

SEQ ID NO: 36399 - DNA, 20 bp, Artificial sequence
  SiRNA target sequence
tggctcatctaaaattataa

SEQ ID NO: 36400 - DNA, 20 bp, Artificial sequence
  SiRNA target sequence
ggctcatctaaaattataat

SEQ ID NO: 36401 - DNA, 20 bp, Artificial sequence
  SiRNA target sequence
gctcatctaaaattataata

SEQ ID NO: 36402 - DNA, 20 bp, Artificial sequence
  SiRNA target sequence
ctcatctaaaattataatag

SEQ ID NO: 36403 - DNA, 20 bp, Artificial sequence
  SiRNA target sequence
tcatctaaaattataatagg

SEQ ID NO: 36404 - DNA, 20 bp, Artificial sequence
  SiRNA target sequence
catctaaaattataatagga

SEQ ID NO: 36405 - DNA, 20 bp, Artificial sequence
  SiRNA target sequence
atctaaaattataataggag

SEQ ID NO: 36406 - DNA, 20 bp, Artificial sequence
  SiRNA target sequence
tctaaaattataataggaga

SEQ ID NO: 36407 - DNA, 20 bp, Artificial sequence
  SiRNA target sequence
ctaaaattataataggagaa

SEQ ID NO: 36408 - DNA, 20 bp, Artificial sequence
  SiRNA target sequence
taaaattataataggagaat

SEQ ID NO: 36409 - DNA, 20 bp, Artificial sequence
  SiRNA target sequence
aaaattataataggagaatt

SEQ ID NO: 36410 - DNA, 20 bp, Artificial sequence
  SiRNA target sequence
aaattataataggagaattt

SEQ ID NO: 36411 - DNA, 20 bp, Artificial sequence
  SiRNA target sequence
aattataataggagaatttt

SEQ ID NO: 36412 - DNA, 20 bp, Artificial sequence
  SiRNA target sequence
attataataggagaattttt

SEQ ID NO: 36413 - DNA, 20 bp, Artificial sequence
  SiRNA target sequence
ttataataggagaatttttt

SEQ ID NO: 36414 - DNA, 20 bp, Artificial sequence
  SiRNA target sequence
tataataggagaatttttta

SEQ ID NO: 36415 - DNA, 20 bp, Artificial sequence
  SiRNA target sequence
ataataggagaattttttag

SEQ ID NO: 36416 - DNA, 20 bp, Artificial sequence
  SiRNA target sequence
taataggagaattttttagt

SEQ ID NO: 36417 - DNA, 20 bp, Artificial sequence
  SiRNA target sequence
aataggagaattttttagtg

SEQ ID NO: 36418 - DNA, 20 bp, Artificial sequence
  SiRNA target sequence
ataggagaattttttagtgc

SEQ ID NO: 36419 - DNA, 20 bp, Artificial sequence
  SiRNA target sequence
taggagaattttttagtgcc

SEQ ID NO: 36420 - DNA, 20 bp, Artificial sequence
  SiRNA target sequence
aggagaattttttagtgccg

SEQ ID NO: 36421 - DNA, 20 bp, Artificial sequence
  SiRNA target sequence
ggagaattttttagtgccga

SEQ ID NO: 36422 - DNA, 20 bp, Artificial sequence
  SiRNA target sequence
gagaattttttagtgccgac

SEQ ID NO: 36423 - DNA, 20 bp, Artificial sequence
  SiRNA target sequence
agaattttttagtgccgacc

SEQ ID NO: 36424 - DNA, 20 bp, Artificial sequence
  SiRNA target sequence
gaattttttagtgccgacct

SEQ ID NO: 36425 - DNA, 20 bp, Artificial sequence
  SiRNA target sequence
aattttttagtgccgacctt

SEQ ID NO: 36426 - DNA, 20 bp, Artificial sequence
  SiRNA target sequence
attttttagtgccgacctta

SEQ ID NO: 36427 - DNA, 20 bp, Artificial sequence
  SiRNA target sequence
ttttttagtgccgaccttaa

SEQ ID NO: 36428 - DNA, 20 bp, Artificial sequence
  SiRNA target sequence
tttttagtgccgaccttaac

SEQ ID NO: 36429 - DNA, 20 bp, Artificial sequence
  SiRNA target sequence
ttttagtgccgaccttaaca

SEQ ID NO: 36430 - DNA, 20 bp, Artificial sequence
  SiRNA target sequence
tttagtgccgaccttaacaa

SEQ ID NO: 36431 - DNA, 20 bp, Artificial sequence
  SiRNA target sequence
ttagtgccgaccttaacaaa

SEQ ID NO: 36432 - DNA, 20 bp, Artificial sequence
  SiRNA target sequence
tagtgccgaccttaacaaaa

SEQ ID NO: 36433 - DNA, 20 bp, Artificial sequence
  SiRNA target sequence
agtgccgaccttaacaaaat

SEQ ID NO: 36434 - DNA, 20 bp, Artificial sequence
  SiRNA target sequence
gtgccgaccttaacaaaatt

SEQ ID NO: 36435 - DNA, 20 bp, Artificial sequence
  SiRNA target sequence
tgccgaccttaacaaaatta

SEQ ID NO: 36436 - DNA, 20 bp, Artificial sequence
  SiRNA target sequence
gccgaccttaacaaaattac

SEQ ID NO: 36437 - DNA, 20 bp, Artificial sequence
  SiRNA target sequence
ccgaccttaacaaaattact

SEQ ID NO: 36438 - DNA, 20 bp, Artificial sequence
  SiRNA target sequence
cgaccttaacaaaattactt

SEQ ID NO: 36439 - DNA, 20 bp, Artificial sequence
  SiRNA target sequence
gaccttaacaaaattacttt

SEQ ID NO: 36440 - DNA, 20 bp, Artificial sequence
  SiRNA target sequence
accttaacaaaattactttt

SEQ ID NO: 36441 - DNA, 20 bp, Artificial sequence
  SiRNA target sequence
ccttaacaaaattacttttt

SEQ ID NO: 36442 - DNA, 20 bp, Artificial sequence
  SiRNA target sequence
cttaacaaaattactttttg

SEQ ID NO: 36443 - DNA, 20 bp, Artificial sequence
  SiRNA target sequence
ttaacaaaattactttttgt

SEQ ID NO: 36444 - DNA, 20 bp, Artificial sequence
  SiRNA target sequence
taacaaaattactttttgtc

SEQ ID NO: 36445 - DNA, 20 bp, Artificial sequence
  SiRNA target sequence
aacaaaattactttttgtct

SEQ ID NO: 36446 - DNA, 20 bp, Artificial sequence
  SiRNA target sequence
acaaaattactttttgtctt

SEQ ID NO: 36447 - DNA, 20 bp, Artificial sequence
  SiRNA target sequence
caaaattactttttgtcttt

SEQ ID NO: 36448 - DNA, 20 bp, Artificial sequence
  SiRNA target sequence
aaaattactttttgtctttc

SEQ ID NO: 36449 - DNA, 20 bp, Artificial sequence
  SiRNA target sequence
aaattactttttgtctttct

SEQ ID NO: 36450 - DNA, 20 bp, Artificial sequence
  SiRNA target sequence
aattactttttgtctttctc

SEQ ID NO: 36451 - DNA, 20 bp, Artificial sequence
  SiRNA target sequence
attactttttgtctttctcc

SEQ ID NO: 36452 - DNA, 20 bp, Artificial sequence
  SiRNA target sequence
ttactttttgtctttctcca

SEQ ID NO: 36453 - DNA, 20 bp, Artificial sequence
  SiRNA target sequence
tactttttgtctttctccac

SEQ ID NO: 36454 - DNA, 20 bp, Artificial sequence
  SiRNA target sequence
actttttgtctttctccacc

SEQ ID NO: 36455 - DNA, 20 bp, Artificial sequence
  SiRNA target sequence
ctttttgtctttctccacca

SEQ ID NO: 36456 - DNA, 20 bp, Artificial sequence
  SiRNA target sequence
tttttgtctttctccaccac

SEQ ID NO: 36457 - DNA, 20 bp, Artificial sequence
  SiRNA target sequence
ttttgtctttctccaccact

SEQ ID NO: 36458 - DNA, 20 bp, Artificial sequence
  SiRNA target sequence
tttgtctttctccaccacta

SEQ ID NO: 36459 - DNA, 20 bp, Artificial sequence
  SiRNA target sequence
ttgtctttctccaccactaa

SEQ ID NO: 36460 - DNA, 20 bp, Artificial sequence
  SiRNA target sequence
tgtctttctccaccactaag

SEQ ID NO: 36461 - DNA, 20 bp, Artificial sequence
  SiRNA target sequence
gtctttctccaccactaagc

SEQ ID NO: 36462 - DNA, 20 bp, Artificial sequence
  SiRNA target sequence
tctttctccaccactaagct

SEQ ID NO: 36463 - DNA, 20 bp, Artificial sequence
  SiRNA target sequence
ctttctccaccactaagctt

SEQ ID NO: 36464 - DNA, 20 bp, Artificial sequence
  SiRNA target sequence
tttctccaccactaagctta

SEQ ID NO: 36465 - DNA, 20 bp, Artificial sequence
  SiRNA target sequence
ttctccaccactaagcttat

SEQ ID NO: 36466 - DNA, 20 bp, Artificial sequence
  SiRNA target sequence
tctccaccactaagcttatg

SEQ ID NO: 36467 - DNA, 20 bp, Artificial sequence
  SiRNA target sequence
ctccaccactaagcttatgt

SEQ ID NO: 36468 - DNA, 20 bp, Artificial sequence
  SiRNA target sequence
tccaccactaagcttatgtc

SEQ ID NO: 36469 - DNA, 20 bp, Artificial sequence
  SiRNA target sequence
ccaccactaagcttatgtcc

SEQ ID NO: 36470 - DNA, 20 bp, Artificial sequence
  SiRNA target sequence
caccactaagcttatgtccc

SEQ ID NO: 36471 - DNA, 20 bp, Artificial sequence
  SiRNA target sequence
accactaagcttatgtccct

SEQ ID NO: 36472 - DNA, 20 bp, Artificial sequence
  SiRNA target sequence
ccactaagcttatgtccctt

SEQ ID NO: 36473 - DNA, 20 bp, Artificial sequence
  SiRNA target sequence
cactaagcttatgtccctta

SEQ ID NO: 36474 - DNA, 20 bp, Artificial sequence
  SiRNA target sequence
actaagcttatgtcccttat

SEQ ID NO: 36475 - DNA, 20 bp, Artificial sequence
  SiRNA target sequence
ctaagcttatgtcccttatc

SEQ ID NO: 36476 - DNA, 20 bp, Artificial sequence
  SiRNA target sequence
taagcttatgtcccttatct

SEQ ID NO: 36477 - DNA, 20 bp, Artificial sequence
  SiRNA target sequence
aagcttatgtcccttatctc

SEQ ID NO: 36478 - DNA, 20 bp, Artificial sequence
  SiRNA target sequence
agcttatgtcccttatctcc

SEQ ID NO: 36479 - DNA, 20 bp, Artificial sequence
  SiRNA target sequence
gcttatgtcccttatctcca

SEQ ID NO: 36480 - DNA, 20 bp, Artificial sequence
  SiRNA target sequence
cttatgtcccttatctccaa

SEQ ID NO: 36481 - DNA, 20 bp, Artificial sequence
  SiRNA target sequence
ttatgtcccttatctccaac

SEQ ID NO: 36482 - DNA, 20 bp, Artificial sequence
  SiRNA target sequence
tatgtcccttatctccaaca

SEQ ID NO: 36483 - DNA, 20 bp, Artificial sequence
  SiRNA target sequence
atgtcccttatctccaacat

SEQ ID NO: 36484 - DNA, 20 bp, Artificial sequence
  SiRNA target sequence
tgtcccttatctccaacatg

SEQ ID NO: 36485 - DNA, 20 bp, Artificial sequence
  SiRNA target sequence
gtcccttatctccaacatgt

SEQ ID NO: 36486 - DNA, 20 bp, Artificial sequence
  SiRNA target sequence
tcccttatctccaacatgtg

SEQ ID NO: 36487 - DNA, 20 bp, Artificial sequence
  SiRNA target sequence
cccttatctccaacatgtgt

SEQ ID NO: 36488 - DNA, 20 bp, Artificial sequence
  SiRNA target sequence
ccttatctccaacatgtgtg

SEQ ID NO: 36489 - DNA, 20 bp, Artificial sequence
  SiRNA target sequence
cttatctccaacatgtgtgt

SEQ ID NO: 36490 - DNA, 20 bp, Artificial sequence
  SiRNA target sequence
ttatctccaacatgtgtgtt

SEQ ID NO: 36491 - DNA, 20 bp, Artificial sequence
  SiRNA target sequence
tatctccaacatgtgtgttg

SEQ ID NO: 36492 - DNA, 20 bp, Artificial sequence
  SiRNA target sequence
atctccaacatgtgtgttgt

SEQ ID NO: 36493 - DNA, 20 bp, Artificial sequence
  SiRNA target sequence
tctccaacatgtgtgttgta

SEQ ID NO: 36494 - DNA, 20 bp, Artificial sequence
  SiRNA target sequence
ctccaacatgtgtgttgtat

SEQ ID NO: 36495 - DNA, 20 bp, Artificial sequence
  SiRNA target sequence
tccaacatgtgtgttgtatt

SEQ ID NO: 36496 - DNA, 20 bp, Artificial sequence
  SiRNA target sequence
ccaacatgtgtgttgtattc

SEQ ID NO: 36497 - DNA, 20 bp, Artificial sequence
  SiRNA target sequence
caacatgtgtgttgtattca

SEQ ID NO: 36498 - DNA, 20 bp, Artificial sequence
  SiRNA target sequence
aacatgtgtgttgtattcat

SEQ ID NO: 36499 - DNA, 20 bp, Artificial sequence
  SiRNA target sequence
acatgtgtgttgtattcatc

SEQ ID NO: 36500 - DNA, 20 bp, Artificial sequence
  SiRNA target sequence
catgtgtgttgtattcatcc

SEQ ID NO: 36501 - DNA, 20 bp, Artificial sequence
  SiRNA target sequence
atgtgtgttgtattcatcct

SEQ ID NO: 36502 - DNA, 20 bp, Artificial sequence
  SiRNA target sequence
tgtgtgttgtattcatcctc

SEQ ID NO: 36503 - DNA, 20 bp, Artificial sequence
  SiRNA target sequence
gtgtgttgtattcatcctct

SEQ ID NO: 36504 - DNA, 20 bp, Artificial sequence
  SiRNA target sequence
tgtgttgtattcatcctcta

SEQ ID NO: 36505 - DNA, 20 bp, Artificial sequence
  SiRNA target sequence
gtgttgtattcatcctctag

SEQ ID NO: 36506 - DNA, 20 bp, Artificial sequence
  SiRNA target sequence
tgttgtattcatcctctagg

SEQ ID NO: 36507 - DNA, 20 bp, Artificial sequence
  SiRNA target sequence
gttgtattcatcctctaggt

SEQ ID NO: 36508 - DNA, 20 bp, Artificial sequence
  SiRNA target sequence
ttgtattcatcctctaggtt

SEQ ID NO: 36509 - DNA, 20 bp, Artificial sequence
  SiRNA target sequence
tgtattcatcctctaggttg

SEQ ID NO: 36510 - DNA, 20 bp, Artificial sequence
  SiRNA target sequence
gtattcatcctctaggttgt

SEQ ID NO: 36511 - DNA, 20 bp, Artificial sequence
  SiRNA target sequence
tattcatcctctaggttgtt

SEQ ID NO: 36512 - DNA, 20 bp, Artificial sequence
  SiRNA target sequence
attcatcctctaggttgttt

SEQ ID NO: 36513 - DNA, 20 bp, Artificial sequence
  SiRNA target sequence
ttcatcctctaggttgttta

SEQ ID NO: 36514 - DNA, 20 bp, Artificial sequence
  SiRNA target sequence
tcatcctctaggttgtttat

SEQ ID NO: 36515 - DNA, 20 bp, Artificial sequence
  SiRNA target sequence
catcctctaggttgtttata

SEQ ID NO: 36516 - DNA, 20 bp, Artificial sequence
  SiRNA target sequence
atcctctaggttgtttatag

SEQ ID NO: 36517 - DNA, 20 bp, Artificial sequence
  SiRNA target sequence
tcctctaggttgtttataga

SEQ ID NO: 36518 - DNA, 20 bp, Artificial sequence
  SiRNA target sequence
cctctaggttgtttatagaa

SEQ ID NO: 36519 - DNA, 20 bp, Artificial sequence
  SiRNA target sequence
ctctaggttgtttatagaat

SEQ ID NO: 36520 - DNA, 20 bp, Artificial sequence
  SiRNA target sequence
tctaggttgtttatagaatc

SEQ ID NO: 36521 - DNA, 20 bp, Artificial sequence
  SiRNA target sequence
ctaggttgtttatagaatcg

SEQ ID NO: 36522 - DNA, 20 bp, Artificial sequence
  SiRNA target sequence
taggttgtttatagaatcgt

SEQ ID NO: 36523 - DNA, 20 bp, Artificial sequence
  SiRNA target sequence
aggttgtttatagaatcgtg

SEQ ID NO: 36524 - DNA, 20 bp, Artificial sequence
  SiRNA target sequence
ggttgtttatagaatcgtgt

SEQ ID NO: 36525 - DNA, 20 bp, Artificial sequence
  SiRNA target sequence
gttgtttatagaatcgtgta

SEQ ID NO: 36526 - DNA, 20 bp, Artificial sequence
  SiRNA target sequence
ttgtttatagaatcgtgtac

SEQ ID NO: 36527 - DNA, 20 bp, Artificial sequence
  SiRNA target sequence
tgtttatagaatcgtgtaca

SEQ ID NO: 36528 - DNA, 20 bp, Artificial sequence
  SiRNA target sequence
gtttatagaatcgtgtacac

SEQ ID NO: 36529 - DNA, 20 bp, Artificial sequence
  SiRNA target sequence
tttatagaatcgtgtacaca

SEQ ID NO: 36530 - DNA, 20 bp, Artificial sequence
  SiRNA target sequence
ttatagaatcgtgtacacaa

SEQ ID NO: 36531 - DNA, 20 bp, Artificial sequence
  SiRNA target sequence
tatagaatcgtgtacacaaa

SEQ ID NO: 36532 - DNA, 20 bp, Artificial sequence
  SiRNA target sequence
atagaatcgtgtacacaaag

SEQ ID NO: 36533 - DNA, 20 bp, Artificial sequence
  SiRNA target sequence
tagaatcgtgtacacaaagt

SEQ ID NO: 36534 - DNA, 20 bp, Artificial sequence
  SiRNA target sequence
agaatcgtgtacacaaagtt

SEQ ID NO: 36535 - DNA, 20 bp, Artificial sequence
  SiRNA target sequence
gaatcgtgtacacaaagttt

SEQ ID NO: 36536 - DNA, 20 bp, Artificial sequence
  SiRNA target sequence
aatcgtgtacacaaagtttt

SEQ ID NO: 36537 - DNA, 20 bp, Artificial sequence
  SiRNA target sequence
atcgtgtacacaaagttttt

SEQ ID NO: 36538 - DNA, 20 bp, Artificial sequence
  SiRNA target sequence
tcgtgtacacaaagtttttt

SEQ ID NO: 36539 - DNA, 20 bp, Artificial sequence
  SiRNA target sequence
cgtgtacacaaagtttttta

SEQ ID NO: 36540 - DNA, 20 bp, Artificial sequence
  SiRNA target sequence
gtgtacacaaagttttttac

SEQ ID NO: 36541 - DNA, 20 bp, Artificial sequence
  SiRNA target sequence
tgtacacaaagttttttact

SEQ ID NO: 36542 - DNA, 20 bp, Artificial sequence
  SiRNA target sequence
gtacacaaagttttttactg

SEQ ID NO: 36543 - DNA, 20 bp, Artificial sequence
  SiRNA target sequence
tacacaaagttttttactga

SEQ ID NO: 36544 - DNA, 20 bp, Artificial sequence
  SiRNA target sequence
acacaaagttttttactgat

SEQ ID NO: 36545 - DNA, 20 bp, Artificial sequence
  SiRNA target sequence
cacaaagttttttactgatt

SEQ ID NO: 36546 - DNA, 20 bp, Artificial sequence
  SiRNA target sequence
acaaagttttttactgattt

SEQ ID NO: 36547 - DNA, 20 bp, Artificial sequence
  SiRNA target sequence
caaagttttttactgatttt

SEQ ID NO: 36548 - DNA, 20 bp, Artificial sequence
  SiRNA target sequence
aaagttttttactgattttt

SEQ ID NO: 36549 - DNA, 20 bp, Artificial sequence
  SiRNA target sequence
aagttttttactgattttta

SEQ ID NO: 36550 - DNA, 20 bp, Artificial sequence
  SiRNA target sequence
agttttttactgatttttat

SEQ ID NO: 36551 - DNA, 20 bp, Artificial sequence
  SiRNA target sequence
gttttttactgatttttata

SEQ ID NO: 36552 - DNA, 20 bp, Artificial sequence
  SiRNA target sequence
ttttttactgatttttataa

SEQ ID NO: 36553 - DNA, 20 bp, Artificial sequence
  SiRNA target sequence
tttttactgatttttataac

SEQ ID NO: 36554 - DNA, 20 bp, Artificial sequence
  SiRNA target sequence
ttttactgatttttataact

SEQ ID NO: 36555 - DNA, 20 bp, Artificial sequence
  SiRNA target sequence
tttactgatttttataactt

SEQ ID NO: 36556 - DNA, 20 bp, Artificial sequence
  SiRNA target sequence
ttactgatttttataacttc

SEQ ID NO: 36557 - DNA, 20 bp, Artificial sequence
  SiRNA target sequence
tactgatttttataacttct

SEQ ID NO: 36558 - DNA, 20 bp, Artificial sequence
  SiRNA target sequence
actgatttttataacttctt

SEQ ID NO: 36559 - DNA, 20 bp, Artificial sequence
  SiRNA target sequence
ctgatttttataacttcttc

SEQ ID NO: 36560 - DNA, 20 bp, Artificial sequence
  SiRNA target sequence
tgatttttataacttcttct

SEQ ID NO: 36561 - DNA, 20 bp, Artificial sequence
  SiRNA target sequence
gatttttataacttcttctt

SEQ ID NO: 36562 - DNA, 20 bp, Artificial sequence
  SiRNA target sequence
atttttataacttcttcttt

SEQ ID NO: 36563 - DNA, 20 bp, Artificial sequence
  SiRNA target sequence
tttttataacttcttcttta

SEQ ID NO: 36564 - DNA, 20 bp, Artificial sequence
  SiRNA target sequence
ttttataacttcttctttat

SEQ ID NO: 36565 - DNA, 20 bp, Artificial sequence
  SiRNA target sequence
tttataacttcttctttatc

SEQ ID NO: 36566 - DNA, 20 bp, Artificial sequence
  SiRNA target sequence
ttataacttcttctttatca

SEQ ID NO: 36567 - DNA, 20 bp, Artificial sequence
  SiRNA target sequence
tataacttcttctttatcaa

SEQ ID NO: 36568 - DNA, 20 bp, Artificial sequence
  SiRNA target sequence
ataacttcttctttatcaaa

SEQ ID NO: 36569 - DNA, 20 bp, Artificial sequence
  SiRNA target sequence
taacttcttctttatcaaat

SEQ ID NO: 36570 - DNA, 20 bp, Artificial sequence
  SiRNA target sequence
aacttcttctttatcaaata

SEQ ID NO: 36571 - DNA, 20 bp, Artificial sequence
  SiRNA target sequence
acttcttctttatcaaatat

SEQ ID NO: 36572 - DNA, 20 bp, Artificial sequence
  SiRNA target sequence
cttcttctttatcaaatatt

SEQ ID NO: 36573 - DNA, 20 bp, Artificial sequence
  SiRNA target sequence
ttcttctttatcaaatattt

SEQ ID NO: 36574 - DNA, 20 bp, Artificial sequence
  SiRNA target sequence
tcttctttatcaaatatttc

SEQ ID NO: 36575 - DNA, 20 bp, Artificial sequence
  SiRNA target sequence
cttctttatcaaatatttct

SEQ ID NO: 36576 - DNA, 20 bp, Artificial sequence
  SiRNA target sequence
ttctttatcaaatatttctt

SEQ ID NO: 36577 - DNA, 20 bp, Artificial sequence
  SiRNA target sequence
tctttatcaaatatttcttt

SEQ ID NO: 36578 - DNA, 20 bp, Artificial sequence
  SiRNA target sequence
ctttatcaaatatttctttt

SEQ ID NO: 36579 - DNA, 20 bp, Artificial sequence
  SiRNA target sequence
tttatcaaatatttcttttc

SEQ ID NO: 36580 - DNA, 20 bp, Artificial sequence
  SiRNA target sequence
ttatcaaatatttcttttcc

SEQ ID NO: 36581 - DNA, 20 bp, Artificial sequence
  SiRNA target sequence
tatcaaatatttcttttcca

SEQ ID NO: 36582 - DNA, 20 bp, Artificial sequence
  SiRNA target sequence
atcaaatatttcttttccat

SEQ ID NO: 36583 - DNA, 20 bp, Artificial sequence
  SiRNA target sequence
tcaaatatttcttttccata

SEQ ID NO: 36584 - DNA, 20 bp, Artificial sequence
  SiRNA target sequence
caaatatttcttttccatat

SEQ ID NO: 36585 - DNA, 20 bp, Artificial sequence
  SiRNA target sequence
aaatatttcttttccatatg

SEQ ID NO: 36586 - DNA, 20 bp, Artificial sequence
  SiRNA target sequence
aatatttcttttccatatgt

SEQ ID NO: 36587 - DNA, 20 bp, Artificial sequence
  SiRNA target sequence
atatttcttttccatatgtt

SEQ ID NO: 36588 - DNA, 20 bp, Artificial sequence
  SiRNA target sequence
tatttcttttccatatgtta

SEQ ID NO: 36589 - DNA, 20 bp, Artificial sequence
  SiRNA target sequence
atttcttttccatatgttaa

SEQ ID NO: 36590 - DNA, 20 bp, Artificial sequence
  SiRNA target sequence
tttcttttccatatgttaaa

SEQ ID NO: 36591 - DNA, 20 bp, Artificial sequence
  SiRNA target sequence
ttcttttccatatgttaaat

SEQ ID NO: 36592 - DNA, 20 bp, Artificial sequence
  SiRNA target sequence
tcttttccatatgttaaatt

SEQ ID NO: 36593 - DNA, 20 bp, Artificial sequence
  SiRNA target sequence
cttttccatatgttaaatta

SEQ ID NO: 36594 - DNA, 20 bp, Artificial sequence
  SiRNA target sequence
ttttccatatgttaaattat

SEQ ID NO: 36595 - DNA, 20 bp, Artificial sequence
  SiRNA target sequence
tttccatatgttaaattata

SEQ ID NO: 36596 - DNA, 20 bp, Artificial sequence
  SiRNA target sequence
ttccatatgttaaattataa

SEQ ID NO: 36597 - DNA, 20 bp, Artificial sequence
  SiRNA target sequence
tccatatgttaaattataat

SEQ ID NO: 36598 - DNA, 20 bp, Artificial sequence
  SiRNA target sequence
ccatatgttaaattataata

SEQ ID NO: 36599 - DNA, 20 bp, Artificial sequence
  SiRNA target sequence
catatgttaaattataataa

SEQ ID NO: 36600 - DNA, 20 bp, Artificial sequence
  SiRNA target sequence
atatgttaaattataataaa

SEQ ID NO: 36601 - DNA, 20 bp, Artificial sequence
  SiRNA target sequence
tatgttaaattataataaac

SEQ ID NO: 36602 - DNA, 20 bp, Artificial sequence
  SiRNA target sequence
atgttaaattataataaacc

SEQ ID NO: 36603 - DNA, 20 bp, Artificial sequence
  SiRNA target sequence
tgttaaattataataaaccg

SEQ ID NO: 36604 - DNA, 20 bp, Artificial sequence
  SiRNA target sequence
gttaaattataataaaccgt

SEQ ID NO: 36605 - DNA, 20 bp, Artificial sequence
  SiRNA target sequence
ttaaattataataaaccgtt

SEQ ID NO: 36606 - DNA, 20 bp, Artificial sequence
  SiRNA target sequence
taaattataataaaccgttt

SEQ ID NO: 36607 - DNA, 20 bp, Artificial sequence
  SiRNA target sequence
aaattataataaaccgtttc

SEQ ID NO: 36608 - DNA, 20 bp, Artificial sequence
  SiRNA target sequence
aattataataaaccgtttcg

SEQ ID NO: 36609 - DNA, 20 bp, Artificial sequence
  SiRNA target sequence
attataataaaccgtttcgt

SEQ ID NO: 36610 - DNA, 20 bp, Artificial sequence
  SiRNA target sequence
ttataataaaccgtttcgtt

SEQ ID NO: 36611 - DNA, 20 bp, Artificial sequence
  SiRNA target sequence
tataataaaccgtttcgtta

SEQ ID NO: 36612 - DNA, 20 bp, Artificial sequence
  SiRNA target sequence
ataataaaccgtttcgttaa

SEQ ID NO: 36613 - DNA, 20 bp, Artificial sequence
  SiRNA target sequence
taataaaccgtttcgttaaa

SEQ ID NO: 36614 - DNA, 20 bp, Artificial sequence
  SiRNA target sequence
aataaaccgtttcgttaaac

SEQ ID NO: 36615 - DNA, 20 bp, Artificial sequence
  SiRNA target sequence
ataaaccgtttcgttaaaca

SEQ ID NO: 36616 - DNA, 20 bp, Artificial sequence
  SiRNA target sequence
taaaccgtttcgttaaacaa

SEQ ID NO: 36617 - DNA, 20 bp, Artificial sequence
  SiRNA target sequence
aaaccgtttcgttaaacaaa

SEQ ID NO: 36618 - DNA, 20 bp, Artificial sequence
  SiRNA target sequence
aaccgtttcgttaaacaaaa

SEQ ID NO: 36619 - DNA, 20 bp, Artificial sequence
  SiRNA target sequence
accgtttcgttaaacaaaaa

SEQ ID NO: 36620 - DNA, 20 bp, Artificial sequence
  SiRNA target sequence
ccgtttcgttaaacaaaaat

SEQ ID NO: 36621 - DNA, 20 bp, Artificial sequence
  SiRNA target sequence
cgtttcgttaaacaaaaatg

SEQ ID NO: 36622 - DNA, 20 bp, Artificial sequence
  SiRNA target sequence
gtttcgttaaacaaaaatga

SEQ ID NO: 36623 - DNA, 20 bp, Artificial sequence
  SiRNA target sequence
tttcgttaaacaaaaatgag

SEQ ID NO: 36624 - DNA, 20 bp, Artificial sequence
  SiRNA target sequence
ttcgttaaacaaaaatgagg

SEQ ID NO: 36625 - DNA, 20 bp, Artificial sequence
  SiRNA target sequence
tcgttaaacaaaaatgaggt

SEQ ID NO: 36626 - DNA, 20 bp, Artificial sequence
  SiRNA target sequence
cgttaaacaaaaatgaggtt

SEQ ID NO: 36627 - DNA, 20 bp, Artificial sequence
  SiRNA target sequence
gttaaacaaaaatgaggttt

SEQ ID NO: 36628 - DNA, 20 bp, Artificial sequence
  SiRNA target sequence
ttaaacaaaaatgaggtttg

SEQ ID NO: 36629 - DNA, 20 bp, Artificial sequence
  SiRNA target sequence
taaacaaaaatgaggtttgt

SEQ ID NO: 36630 - DNA, 20 bp, Artificial sequence
  SiRNA target sequence
aaacaaaaatgaggtttgtg

SEQ ID NO: 36631 - DNA, 20 bp, Artificial sequence
  SiRNA target sequence
aacaaaaatgaggtttgtgg

SEQ ID NO: 36632 - DNA, 20 bp, Artificial sequence
  SiRNA target sequence
acaaaaatgaggtttgtggt

SEQ ID NO: 36633 - DNA, 20 bp, Artificial sequence
  SiRNA target sequence
caaaaatgaggtttgtggtg

SEQ ID NO: 36634 - DNA, 20 bp, Artificial sequence
  SiRNA target sequence
aaaaatgaggtttgtggtgc

SEQ ID NO: 36635 - DNA, 20 bp, Artificial sequence
  SiRNA target sequence
aaaatgaggtttgtggtgca

SEQ ID NO: 36636 - DNA, 20 bp, Artificial sequence
  SiRNA target sequence
aaatgaggtttgtggtgcaa

SEQ ID NO: 36637 - DNA, 20 bp, Artificial sequence
  SiRNA target sequence
aatgaggtttgtggtgcaaa

SEQ ID NO: 36638 - DNA, 20 bp, Artificial sequence
  SiRNA target sequence
atgaggtttgtggtgcaaat

SEQ ID NO: 36639 - DNA, 20 bp, Artificial sequence
  SiRNA target sequence
tgaggtttgtggtgcaaatg

SEQ ID NO: 36640 - DNA, 20 bp, Artificial sequence
  SiRNA target sequence
gaggtttgtggtgcaaatga

SEQ ID NO: 36641 - DNA, 20 bp, Artificial sequence
  SiRNA target sequence
aggtttgtggtgcaaatgat

SEQ ID NO: 36642 - DNA, 20 bp, Artificial sequence
  SiRNA target sequence
ggtttgtggtgcaaatgata

SEQ ID NO: 36643 - DNA, 20 bp, Artificial sequence
  SiRNA target sequence
gtttgtggtgcaaatgatat

SEQ ID NO: 36644 - DNA, 20 bp, Artificial sequence
  SiRNA target sequence
tttgtggtgcaaatgatata

SEQ ID NO: 36645 - DNA, 20 bp, Artificial sequence
  SiRNA target sequence
ttgtggtgcaaatgatataa

SEQ ID NO: 36646 - DNA, 20 bp, Artificial sequence
  SiRNA target sequence
tgtggtgcaaatgatataag

SEQ ID NO: 36647 - DNA, 20 bp, Artificial sequence
  SiRNA target sequence
gtggtgcaaatgatataagt

SEQ ID NO: 36648 - DNA, 20 bp, Artificial sequence
  SiRNA target sequence
tggtgcaaatgatataagtg

SEQ ID NO: 36649 - DNA, 20 bp, Artificial sequence
  SiRNA target sequence
ggtgcaaatgatataagtga

SEQ ID NO: 36650 - DNA, 20 bp, Artificial sequence
  SiRNA target sequence
gtgcaaatgatataagtgat

SEQ ID NO: 36651 - DNA, 20 bp, Artificial sequence
  SiRNA target sequence
tgcaaatgatataagtgatc

SEQ ID NO: 36652 - DNA, 20 bp, Artificial sequence
  SiRNA target sequence
gcaaatgatataagtgatct

SEQ ID NO: 36653 - DNA, 20 bp, Artificial sequence
  SiRNA target sequence
caaatgatataagtgatcta

SEQ ID NO: 36654 - DNA, 20 bp, Artificial sequence
  SiRNA target sequence
aaatgatataagtgatctat

SEQ ID NO: 36655 - DNA, 20 bp, Artificial sequence
  SiRNA target sequence
aatgatataagtgatctata

SEQ ID NO: 36656 - DNA, 20 bp, Artificial sequence
  SiRNA target sequence
atgatataagtgatctatat

SEQ ID NO: 36657 - DNA, 20 bp, Artificial sequence
  SiRNA target sequence
tgatataagtgatctatatg

SEQ ID NO: 36658 - DNA, 20 bp, Artificial sequence
  SiRNA target sequence
gatataagtgatctatatga

SEQ ID NO: 36659 - DNA, 20 bp, Artificial sequence
  SiRNA target sequence
atataagtgatctatatgaa

SEQ ID NO: 36660 - DNA, 20 bp, Artificial sequence
  SiRNA target sequence
tataagtgatctatatgaac

SEQ ID NO: 36661 - DNA, 20 bp, Artificial sequence
  SiRNA target sequence
ataagtgatctatatgaact

SEQ ID NO: 36662 - DNA, 20 bp, Artificial sequence
  SiRNA target sequence
taagtgatctatatgaacta

SEQ ID NO: 36663 - DNA, 20 bp, Artificial sequence
  SiRNA target sequence
aagtgatctatatgaactat

SEQ ID NO: 36664 - DNA, 20 bp, Artificial sequence
  SiRNA target sequence
agtgatctatatgaactatt

SEQ ID NO: 36665 - DNA, 20 bp, Artificial sequence
  SiRNA target sequence
gtgatctatatgaactatta

SEQ ID NO: 36666 - DNA, 20 bp, Artificial sequence
  SiRNA target sequence
tgatctatatgaactattag

SEQ ID NO: 36667 - DNA, 20 bp, Artificial sequence
  SiRNA target sequence
gatctatatgaactattaga

SEQ ID NO: 36668 - DNA, 20 bp, Artificial sequence
  SiRNA target sequence
atctatatgaactattagaa

SEQ ID NO: 36669 - DNA, 20 bp, Artificial sequence
  SiRNA target sequence
tctatatgaactattagaaa

SEQ ID NO: 36670 - DNA, 20 bp, Artificial sequence
  SiRNA target sequence
ctatatgaactattagaaat

SEQ ID NO: 36671 - DNA, 20 bp, Artificial sequence
  SiRNA target sequence
tatatgaactattagaaatt

SEQ ID NO: 36672 - DNA, 20 bp, Artificial sequence
  SiRNA target sequence
atatgaactattagaaattt

SEQ ID NO: 36673 - DNA, 20 bp, Artificial sequence
  SiRNA target sequence
tatgaactattagaaatttc

SEQ ID NO: 36674 - DNA, 20 bp, Artificial sequence
  SiRNA target sequence
atgaactattagaaatttct

SEQ ID NO: 36675 - DNA, 20 bp, Artificial sequence
  SiRNA target sequence
tgaactattagaaatttctt

SEQ ID NO: 36676 - DNA, 20 bp, Artificial sequence
  SiRNA target sequence
gaactattagaaatttcttt

SEQ ID NO: 36677 - DNA, 20 bp, Artificial sequence
  SiRNA target sequence
aactattagaaatttctttt

SEQ ID NO: 36678 - DNA, 20 bp, Artificial sequence
  SiRNA target sequence
actattagaaatttctttta

SEQ ID NO: 36679 - DNA, 20 bp, Artificial sequence
  SiRNA target sequence
ctattagaaatttcttttat

SEQ ID NO: 36680 - DNA, 20 bp, Artificial sequence
  SiRNA target sequence
tattagaaatttcttttata

SEQ ID NO: 36681 - DNA, 20 bp, Artificial sequence
  SiRNA target sequence
attagaaatttcttttatat

SEQ ID NO: 36682 - DNA, 20 bp, Artificial sequence
  SiRNA target sequence
ttagaaatttcttttatatc

SEQ ID NO: 36683 - DNA, 20 bp, Artificial sequence
  SiRNA target sequence
tagaaatttcttttatatct

SEQ ID NO: 36684 - DNA, 20 bp, Artificial sequence
  SiRNA target sequence
agaaatttcttttatatctc

SEQ ID NO: 36685 - DNA, 20 bp, Artificial sequence
  SiRNA target sequence
gaaatttcttttatatctcg

SEQ ID NO: 36686 - DNA, 20 bp, Artificial sequence
  SiRNA target sequence
aaatttcttttatatctcga

SEQ ID NO: 36687 - DNA, 20 bp, Artificial sequence
  SiRNA target sequence
aatttcttttatatctcgat

SEQ ID NO: 36688 - DNA, 20 bp, Artificial sequence
  SiRNA target sequence
atttcttttatatctcgatt

SEQ ID NO: 36689 - DNA, 20 bp, Artificial sequence
  SiRNA target sequence
tttcttttatatctcgatta

SEQ ID NO: 36690 - DNA, 20 bp, Artificial sequence
  SiRNA target sequence
ttcttttatatctcgattat

SEQ ID NO: 36691 - DNA, 20 bp, Artificial sequence
  SiRNA target sequence
tcttttatatctcgattatc

SEQ ID NO: 36692 - DNA, 20 bp, Artificial sequence
  SiRNA target sequence
cttttatatctcgattatct

SEQ ID NO: 36693 - DNA, 20 bp, Artificial sequence
  SiRNA target sequence
ttttatatctcgattatcta

SEQ ID NO: 36694 - DNA, 20 bp, Artificial sequence
  SiRNA target sequence
tttatatctcgattatctag

SEQ ID NO: 36695 - DNA, 20 bp, Artificial sequence
  SiRNA target sequence
ttatatctcgattatctaga

SEQ ID NO: 36696 - DNA, 20 bp, Artificial sequence
  SiRNA target sequence
tatatctcgattatctagat

SEQ ID NO: 36697 - DNA, 20 bp, Artificial sequence
  SiRNA target sequence
atatctcgattatctagata

SEQ ID NO: 36698 - DNA, 20 bp, Artificial sequence
  SiRNA target sequence
tatctcgattatctagataa

SEQ ID NO: 36699 - DNA, 20 bp, Artificial sequence
  SiRNA target sequence
atctcgattatctagataaa

SEQ ID NO: 36700 - DNA, 20 bp, Artificial sequence
  SiRNA target sequence
tctcgattatctagataaat

SEQ ID NO: 36701 - DNA, 20 bp, Artificial sequence
  SiRNA target sequence
ctcgattatctagataaata

SEQ ID NO: 36702 - DNA, 20 bp, Artificial sequence
  SiRNA target sequence
tcgattatctagataaatat

SEQ ID NO: 36703 - DNA, 20 bp, Artificial sequence
  SiRNA target sequence
cgattatctagataaatatt

SEQ ID NO: 36704 - DNA, 20 bp, Artificial sequence
  SiRNA target sequence
gattatctagataaatattt

SEQ ID NO: 36705 - DNA, 20 bp, Artificial sequence
  SiRNA target sequence
attatctagataaatatttc

SEQ ID NO: 36706 - DNA, 20 bp, Artificial sequence
  SiRNA target sequence
ttatctagataaatatttcc

SEQ ID NO: 36707 - DNA, 20 bp, Artificial sequence
  SiRNA target sequence
tatctagataaatatttccc

SEQ ID NO: 36708 - DNA, 20 bp, Artificial sequence
  SiRNA target sequence
atctagataaatatttcccc

SEQ ID NO: 36709 - DNA, 20 bp, Artificial sequence
  SiRNA target sequence
tctagataaatatttccccc

SEQ ID NO: 36710 - DNA, 20 bp, Artificial sequence
  SiRNA target sequence
ctagataaatatttccccca

SEQ ID NO: 36711 - DNA, 20 bp, Artificial sequence
  SiRNA target sequence
tagataaatatttcccccat

SEQ ID NO: 36712 - DNA, 20 bp, Artificial sequence
  SiRNA target sequence
agataaatatttcccccata

SEQ ID NO: 36713 - DNA, 20 bp, Artificial sequence
  SiRNA target sequence
gataaatatttcccccataa

SEQ ID NO: 36714 - DNA, 20 bp, Artificial sequence
  SiRNA target sequence
ataaatatttcccccataat

SEQ ID NO: 36715 - DNA, 20 bp, Artificial sequence
  SiRNA target sequence
taaatatttcccccataatt

SEQ ID NO: 36716 - DNA, 20 bp, Artificial sequence
  SiRNA target sequence
aaatatttcccccataattt

SEQ ID NO: 36717 - DNA, 20 bp, Artificial sequence
  SiRNA target sequence
aatatttcccccataatttt

SEQ ID NO: 36718 - DNA, 20 bp, Artificial sequence
  SiRNA target sequence
atatttcccccataattttc

SEQ ID NO: 36719 - DNA, 20 bp, Artificial sequence
  SiRNA target sequence
tatttcccccataattttca

SEQ ID NO: 36720 - DNA, 20 bp, Artificial sequence
  SiRNA target sequence
atttcccccataattttcaa

SEQ ID NO: 36721 - DNA, 20 bp, Artificial sequence
  SiRNA target sequence
tttcccccataattttcaaa

SEQ ID NO: 36722 - DNA, 20 bp, Artificial sequence
  SiRNA target sequence
ttcccccataattttcaaat

SEQ ID NO: 36723 - DNA, 20 bp, Artificial sequence
  SiRNA target sequence
tcccccataattttcaaatc

SEQ ID NO: 36724 - DNA, 20 bp, Artificial sequence
  SiRNA target sequence
cccccataattttcaaatct

SEQ ID NO: 36725 - DNA, 20 bp, Artificial sequence
  SiRNA target sequence
ccccataattttcaaatctc

SEQ ID NO: 36726 - DNA, 20 bp, Artificial sequence
  SiRNA target sequence
cccataattttcaaatctca

SEQ ID NO: 36727 - DNA, 20 bp, Artificial sequence
  SiRNA target sequence
ccataattttcaaatctcat

SEQ ID NO: 36728 - DNA, 20 bp, Artificial sequence
  SiRNA target sequence
cataattttcaaatctcata

SEQ ID NO: 36729 - DNA, 20 bp, Artificial sequence
  SiRNA target sequence
ataattttcaaatctcataa

SEQ ID NO: 36730 - DNA, 20 bp, Artificial sequence
  SiRNA target sequence
taattttcaaatctcataat

SEQ ID NO: 36731 - DNA, 20 bp, Artificial sequence
  SiRNA target sequence
aattttcaaatctcataatc

SEQ ID NO: 36732 - DNA, 20 bp, Artificial sequence
  SiRNA target sequence
attttcaaatctcataatca

SEQ ID NO: 36733 - DNA, 20 bp, Artificial sequence
  SiRNA target sequence
ttttcaaatctcataatcat

SEQ ID NO: 36734 - DNA, 20 bp, Artificial sequence
  SiRNA target sequence
tttcaaatctcataatcatc

SEQ ID NO: 36735 - DNA, 20 bp, Artificial sequence
  SiRNA target sequence
ttcaaatctcataatcatct

SEQ ID NO: 36736 - DNA, 20 bp, Artificial sequence
  SiRNA target sequence
tcaaatctcataatcatctt

SEQ ID NO: 36737 - DNA, 20 bp, Artificial sequence
  SiRNA target sequence
caaatctcataatcatcttt

SEQ ID NO: 36738 - DNA, 20 bp, Artificial sequence
  SiRNA target sequence
aaatctcataatcatcttta

SEQ ID NO: 36739 - DNA, 20 bp, Artificial sequence
  SiRNA target sequence
aatctcataatcatctttat

SEQ ID NO: 36740 - DNA, 20 bp, Artificial sequence
  SiRNA target sequence
atctcataatcatctttata

SEQ ID NO: 36741 - DNA, 20 bp, Artificial sequence
  SiRNA target sequence
tctcataatcatctttataa

SEQ ID NO: 36742 - DNA, 20 bp, Artificial sequence
  SiRNA target sequence
ctcataatcatctttataag

SEQ ID NO: 36743 - DNA, 20 bp, Artificial sequence
  SiRNA target sequence
tcataatcatctttataaga

SEQ ID NO: 36744 - DNA, 20 bp, Artificial sequence
  SiRNA target sequence
cataatcatctttataagag

SEQ ID NO: 36745 - DNA, 20 bp, Artificial sequence
  SiRNA target sequence
ataatcatctttataagaga

SEQ ID NO: 36746 - DNA, 20 bp, Artificial sequence
  SiRNA target sequence
taatcatctttataagagat

SEQ ID NO: 36747 - DNA, 20 bp, Artificial sequence
  SiRNA target sequence
aatcatctttataagagatg

SEQ ID NO: 36748 - DNA, 20 bp, Artificial sequence
  SiRNA target sequence
atcatctttataagagatgt

SEQ ID NO: 36749 - DNA, 20 bp, Artificial sequence
  SiRNA target sequence
tcatctttataagagatgtt

SEQ ID NO: 36750 - DNA, 20 bp, Artificial sequence
  SiRNA target sequence
catctttataagagatgttt

SEQ ID NO: 36751 - DNA, 20 bp, Artificial sequence
  SiRNA target sequence
atctttataagagatgtttt

SEQ ID NO: 36752 - DNA, 20 bp, Artificial sequence
  SiRNA target sequence
tctttataagagatgttttt

SEQ ID NO: 36753 - DNA, 20 bp, Artificial sequence
  SiRNA target sequence
ctttataagagatgtttttc

SEQ ID NO: 36754 - DNA, 20 bp, Artificial sequence
  SiRNA target sequence
tttataagagatgtttttcc

SEQ ID NO: 36755 - DNA, 20 bp, Artificial sequence
  SiRNA target sequence
ttataagagatgtttttccc

SEQ ID NO: 36756 - DNA, 20 bp, Artificial sequence
  SiRNA target sequence
tataagagatgtttttcccg

SEQ ID NO: 36757 - DNA, 20 bp, Artificial sequence
  SiRNA target sequence
ataagagatgtttttcccga

SEQ ID NO: 36758 - DNA, 20 bp, Artificial sequence
  SiRNA target sequence
taagagatgtttttcccgat

SEQ ID NO: 36759 - DNA, 20 bp, Artificial sequence
  SiRNA target sequence
aagagatgtttttcccgatc

SEQ ID NO: 36760 - DNA, 20 bp, Artificial sequence
  SiRNA target sequence
agagatgtttttcccgatcc

SEQ ID NO: 36761 - DNA, 20 bp, Artificial sequence
  SiRNA target sequence
gagatgtttttcccgatcca

SEQ ID NO: 36762 - DNA, 20 bp, Artificial sequence
  SiRNA target sequence
agatgtttttcccgatccat

SEQ ID NO: 36763 - DNA, 20 bp, Artificial sequence
  SiRNA target sequence
gatgtttttcccgatccatt

SEQ ID NO: 36764 - DNA, 20 bp, Artificial sequence
  SiRNA target sequence
atgtttttcccgatccattt

SEQ ID NO: 36765 - DNA, 20 bp, Artificial sequence
  SiRNA target sequence
tgtttttcccgatccatttt

SEQ ID NO: 36766 - DNA, 20 bp, Artificial sequence
  SiRNA target sequence
gtttttcccgatccattttt

SEQ ID NO: 36767 - DNA, 20 bp, Artificial sequence
  SiRNA target sequence
tttttcccgatccatttttt

SEQ ID NO: 36768 - DNA, 20 bp, Artificial sequence
  SiRNA target sequence
ttttcccgatccattttttc

SEQ ID NO: 36769 - DNA, 20 bp, Artificial sequence
  SiRNA target sequence
tttcccgatccattttttcc

SEQ ID NO: 36770 - DNA, 20 bp, Artificial sequence
  SiRNA target sequence
ttcccgatccattttttcca

SEQ ID NO: 36771 - DNA, 20 bp, Artificial sequence
  SiRNA target sequence
tcccgatccattttttccaa

SEQ ID NO: 36772 - DNA, 20 bp, Artificial sequence
  SiRNA target sequence
cccgatccattttttccaat

SEQ ID NO: 36773 - DNA, 20 bp, Artificial sequence
  SiRNA target sequence
ccgatccattttttccaata

SEQ ID NO: 36774 - DNA, 20 bp, Artificial sequence
  SiRNA target sequence
cgatccattttttccaataa

SEQ ID NO: 36775 - DNA, 20 bp, Artificial sequence
  SiRNA target sequence
gatccattttttccaataat

SEQ ID NO: 36776 - DNA, 20 bp, Artificial sequence
  SiRNA target sequence
atccattttttccaataata

SEQ ID NO: 36777 - DNA, 20 bp, Artificial sequence
  SiRNA target sequence
tccattttttccaataatag

SEQ ID NO: 36778 - DNA, 20 bp, Artificial sequence
  SiRNA target sequence
ccattttttccaataatagc

SEQ ID NO: 36779 - DNA, 20 bp, Artificial sequence
  SiRNA target sequence
cattttttccaataatagct

SEQ ID NO: 36780 - DNA, 20 bp, Artificial sequence
  SiRNA target sequence
attttttccaataatagcta

SEQ ID NO: 36781 - DNA, 20 bp, Artificial sequence
  SiRNA target sequence
ttttttccaataatagctac

SEQ ID NO: 36782 - DNA, 20 bp, Artificial sequence
  SiRNA target sequence
tttttccaataatagctact

SEQ ID NO: 36783 - DNA, 20 bp, Artificial sequence
  SiRNA target sequence
ttttccaataatagctactt

SEQ ID NO: 36784 - DNA, 20 bp, Artificial sequence
  SiRNA target sequence
tttccaataatagctacttt

SEQ ID NO: 36785 - DNA, 20 bp, Artificial sequence
  SiRNA target sequence
ttccaataatagctactttt

SEQ ID NO: 36786 - DNA, 20 bp, Artificial sequence
  SiRNA target sequence
tccaataatagctacttttt

SEQ ID NO: 36787 - DNA, 20 bp, Artificial sequence
  SiRNA target sequence
ccaataatagctactttttc

SEQ ID NO: 36788 - DNA, 20 bp, Artificial sequence
  SiRNA target sequence
caataatagctactttttca

SEQ ID NO: 36789 - DNA, 20 bp, Artificial sequence
  SiRNA target sequence
aataatagctactttttcac

SEQ ID NO: 36790 - DNA, 20 bp, Artificial sequence
  SiRNA target sequence
ataatagctactttttcacc

SEQ ID NO: 36791 - DNA, 20 bp, Artificial sequence
  SiRNA target sequence
taatagctactttttcacct

SEQ ID NO: 36792 - DNA, 20 bp, Artificial sequence
  SiRNA target sequence
aatagctactttttcacctt

SEQ ID NO: 36793 - DNA, 20 bp, Artificial sequence
  SiRNA target sequence
atagctactttttcaccttt

SEQ ID NO: 36794 - DNA, 20 bp, Artificial sequence
  SiRNA target sequence
tagctactttttcacctttt

SEQ ID NO: 36795 - DNA, 20 bp, Artificial sequence
  SiRNA target sequence
agctactttttcaccttttt

SEQ ID NO: 36796 - DNA, 20 bp, Artificial sequence
  SiRNA target sequence
gctactttttcacctttttt

SEQ ID NO: 36797 - DNA, 20 bp, Artificial sequence
  SiRNA target sequence
ctactttttcacctttttta

SEQ ID NO: 36798 - DNA, 20 bp, Artificial sequence
  SiRNA target sequence
tactttttcaccttttttaa

SEQ ID NO: 36799 - DNA, 20 bp, Artificial sequence
  SiRNA target sequence
actttttcaccttttttaat

SEQ ID NO: 36800 - DNA, 20 bp, Artificial sequence
  SiRNA target sequence
ctttttcaccttttttaatt

SEQ ID NO: 36801 - DNA, 20 bp, Artificial sequence
  SiRNA target sequence
tttttcaccttttttaatta

SEQ ID NO: 36802 - DNA, 20 bp, Artificial sequence
  SiRNA target sequence
ttttcaccttttttaattaa

SEQ ID NO: 36803 - DNA, 20 bp, Artificial sequence
  SiRNA target sequence
tttcaccttttttaattaaa

SEQ ID NO: 36804 - DNA, 20 bp, Artificial sequence
  SiRNA target sequence
ttcaccttttttaattaaaa

SEQ ID NO: 36805 - DNA, 20 bp, Artificial sequence
  SiRNA target sequence
tcaccttttttaattaaaat

SEQ ID NO: 36806 - DNA, 20 bp, Artificial sequence
  SiRNA target sequence
caccttttttaattaaaata

SEQ ID NO: 36807 - DNA, 20 bp, Artificial sequence
  SiRNA target sequence
accttttttaattaaaatat

SEQ ID NO: 36808 - DNA, 20 bp, Artificial sequence
  SiRNA target sequence
ccttttttaattaaaatatt

SEQ ID NO: 36809 - DNA, 20 bp, Artificial sequence
  SiRNA target sequence
cttttttaattaaaatattt

SEQ ID NO: 36810 - DNA, 20 bp, Artificial sequence
  SiRNA target sequence
ttttttaattaaaatattta

SEQ ID NO: 36811 - DNA, 20 bp, Artificial sequence
  SiRNA target sequence
tttttaattaaaatatttat

SEQ ID NO: 36812 - DNA, 20 bp, Artificial sequence
  SiRNA target sequence
ttttaattaaaatatttatg

SEQ ID NO: 36813 - DNA, 20 bp, Artificial sequence
  SiRNA target sequence
tttaattaaaatatttatgt

SEQ ID NO: 36814 - DNA, 20 bp, Artificial sequence
  SiRNA target sequence
ttaattaaaatatttatgtc

SEQ ID NO: 36815 - DNA, 20 bp, Artificial sequence
  SiRNA target sequence
taattaaaatatttatgtcc

SEQ ID NO: 36816 - DNA, 20 bp, Artificial sequence
  SiRNA target sequence
aattaaaatatttatgtccg

SEQ ID NO: 36817 - DNA, 20 bp, Artificial sequence
  SiRNA target sequence
attaaaatatttatgtccgt

SEQ ID NO: 36818 - DNA, 20 bp, Artificial sequence
  SiRNA target sequence
ttaaaatatttatgtccgtt

SEQ ID NO: 36819 - DNA, 20 bp, Artificial sequence
  SiRNA target sequence
taaaatatttatgtccgtta

SEQ ID NO: 36820 - DNA, 20 bp, Artificial sequence
  SiRNA target sequence
aaaatatttatgtccgttaa

SEQ ID NO: 36821 - DNA, 20 bp, Artificial sequence
  SiRNA target sequence
aaatatttatgtccgttaaa

SEQ ID NO: 36822 - DNA, 20 bp, Artificial sequence
  SiRNA target sequence
aatatttatgtccgttaaaa

SEQ ID NO: 36823 - DNA, 20 bp, Artificial sequence
  SiRNA target sequence
atatttatgtccgttaaaat

SEQ ID NO: 36824 - DNA, 20 bp, Artificial sequence
  SiRNA target sequence
tatttatgtccgttaaaatt

SEQ ID NO: 36825 - DNA, 20 bp, Artificial sequence
  SiRNA target sequence
atttatgtccgttaaaattt

SEQ ID NO: 36826 - DNA, 20 bp, Artificial sequence
  SiRNA target sequence
tttatgtccgttaaaatttt

SEQ ID NO: 36827 - DNA, 20 bp, Artificial sequence
  SiRNA target sequence
ttatgtccgttaaaattttt

SEQ ID NO: 36828 - DNA, 20 bp, Artificial sequence
  SiRNA target sequence
tatgtccgttaaaatttttt

SEQ ID NO: 36829 - DNA, 20 bp, Artificial sequence
  SiRNA target sequence
atgtccgttaaaattttttt

SEQ ID NO: 36830 - DNA, 20 bp, Artificial sequence
  SiRNA target sequence
tgtccgttaaaatttttttg

SEQ ID NO: 36831 - DNA, 20 bp, Artificial sequence
  SiRNA target sequence
gtccgttaaaatttttttgg

SEQ ID NO: 36832 - DNA, 20 bp, Artificial sequence
  SiRNA target sequence
tccgttaaaatttttttgga

SEQ ID NO: 36833 - DNA, 20 bp, Artificial sequence
  SiRNA target sequence
ccgttaaaatttttttggag

SEQ ID NO: 36834 - DNA, 20 bp, Artificial sequence
  SiRNA target sequence
cgttaaaatttttttggagt

SEQ ID NO: 36835 - DNA, 20 bp, Artificial sequence
  SiRNA target sequence
gttaaaatttttttggagta

SEQ ID NO: 36836 - DNA, 20 bp, Artificial sequence
  SiRNA target sequence
ttaaaatttttttggagtaa

SEQ ID NO: 36837 - DNA, 20 bp, Artificial sequence
  SiRNA target sequence
taaaatttttttggagtaat

SEQ ID NO: 36838 - DNA, 20 bp, Artificial sequence
  SiRNA target sequence
aaaatttttttggagtaata

SEQ ID NO: 36839 - DNA, 20 bp, Artificial sequence
  SiRNA target sequence
aaatttttttggagtaataa

SEQ ID NO: 36840 - DNA, 20 bp, Artificial sequence
  SiRNA target sequence
aatttttttggagtaataat

SEQ ID NO: 36841 - DNA, 20 bp, Artificial sequence
  SiRNA target sequence
atttttttggagtaataatt

SEQ ID NO: 36842 - DNA, 20 bp, Artificial sequence
  SiRNA target sequence
tttttttggagtaataatta

SEQ ID NO: 36843 - DNA, 20 bp, Artificial sequence
  SiRNA target sequence
ttttttggagtaataattaa

SEQ ID NO: 36844 - DNA, 20 bp, Artificial sequence
  SiRNA target sequence
tttttggagtaataattaaa

SEQ ID NO: 36845 - DNA, 20 bp, Artificial sequence
  SiRNA target sequence
ttttggagtaataattaaat

SEQ ID NO: 36846 - DNA, 20 bp, Artificial sequence
  SiRNA target sequence
tttggagtaataattaaatg

SEQ ID NO: 36847 - DNA, 20 bp, Artificial sequence
  SiRNA target sequence
ttggagtaataattaaatga

SEQ ID NO: 36848 - DNA, 20 bp, Artificial sequence
  SiRNA target sequence
tggagtaataattaaatgat

SEQ ID NO: 36849 - DNA, 20 bp, Artificial sequence
  SiRNA target sequence
ggagtaataattaaatgatg

SEQ ID NO: 36850 - DNA, 20 bp, Artificial sequence
  SiRNA target sequence
gagtaataattaaatgatgc

SEQ ID NO: 36851 - DNA, 20 bp, Artificial sequence
  SiRNA target sequence
agtaataattaaatgatgca

SEQ ID NO: 36852 - DNA, 20 bp, Artificial sequence
  SiRNA target sequence
gtaataattaaatgatgcat

SEQ ID NO: 36853 - DNA, 20 bp, Artificial sequence
  SiRNA target sequence
taataattaaatgatgcatt

SEQ ID NO: 36854 - DNA, 20 bp, Artificial sequence
  SiRNA target sequence
aataattaaatgatgcattt

SEQ ID NO: 36855 - DNA, 20 bp, Artificial sequence
  SiRNA target sequence
ataattaaatgatgcatttt

SEQ ID NO: 36856 - DNA, 20 bp, Artificial sequence
  SiRNA target sequence
taattaaatgatgcattttc

SEQ ID NO: 36857 - DNA, 20 bp, Artificial sequence
  SiRNA target sequence
aattaaatgatgcattttct

SEQ ID NO: 36858 - DNA, 20 bp, Artificial sequence
  SiRNA target sequence
attaaatgatgcattttcta

SEQ ID NO: 36859 - DNA, 20 bp, Artificial sequence
  SiRNA target sequence
ttaaatgatgcattttctaa

SEQ ID NO: 36860 - DNA, 20 bp, Artificial sequence
  SiRNA target sequence
taaatgatgcattttctaat

SEQ ID NO: 36861 - DNA, 20 bp, Artificial sequence
  SiRNA target sequence
aaatgatgcattttctaatc

SEQ ID NO: 36862 - DNA, 20 bp, Artificial sequence
  SiRNA target sequence
aatgatgcattttctaatct

SEQ ID NO: 36863 - DNA, 20 bp, Artificial sequence
  SiRNA target sequence
atgatgcattttctaatctt

SEQ ID NO: 36864 - DNA, 20 bp, Artificial sequence
  SiRNA target sequence
tgatgcattttctaatctta

SEQ ID NO: 36865 - DNA, 20 bp, Artificial sequence
  SiRNA target sequence
gatgcattttctaatcttat

SEQ ID NO: 36866 - DNA, 20 bp, Artificial sequence
  SiRNA target sequence
atgcattttctaatcttata

SEQ ID NO: 36867 - DNA, 20 bp, Artificial sequence
  SiRNA target sequence
tgcattttctaatcttatat

SEQ ID NO: 36868 - DNA, 20 bp, Artificial sequence
  SiRNA target sequence
gcattttctaatcttatatc

SEQ ID NO: 36869 - DNA, 20 bp, Artificial sequence
  SiRNA target sequence
cattttctaatcttatatca

SEQ ID NO: 36870 - DNA, 20 bp, Artificial sequence
  SiRNA target sequence
attttctaatcttatatcat

SEQ ID NO: 36871 - DNA, 20 bp, Artificial sequence
  SiRNA target sequence
ttttctaatcttatatcatt

SEQ ID NO: 36872 - DNA, 20 bp, Artificial sequence
  SiRNA target sequence
tttctaatcttatatcatta

SEQ ID NO: 36873 - DNA, 20 bp, Artificial sequence
  SiRNA target sequence
ttctaatcttatatcattat

SEQ ID NO: 36874 - DNA, 20 bp, Artificial sequence
  SiRNA target sequence
tctaatcttatatcattatt

SEQ ID NO: 36875 - DNA, 20 bp, Artificial sequence
  SiRNA target sequence
ctaatcttatatcattatta

SEQ ID NO: 36876 - DNA, 20 bp, Artificial sequence
  SiRNA target sequence
taatcttatatcattattaa

SEQ ID NO: 36877 - DNA, 20 bp, Artificial sequence
  SiRNA target sequence
aatcttatatcattattaaa

SEQ ID NO: 36878 - DNA, 20 bp, Artificial sequence
  SiRNA target sequence
atcttatatcattattaaat

SEQ ID NO: 36879 - DNA, 20 bp, Artificial sequence
  SiRNA target sequence
tcttatatcattattaaatt

SEQ ID NO: 36880 - DNA, 20 bp, Artificial sequence
  SiRNA target sequence
cttatatcattattaaattc

SEQ ID NO: 36881 - DNA, 20 bp, Artificial sequence
  SiRNA target sequence
ttatatcattattaaattca

SEQ ID NO: 36882 - DNA, 20 bp, Artificial sequence
  SiRNA target sequence
tatatcattattaaattcat

SEQ ID NO: 36883 - DNA, 20 bp, Artificial sequence
  SiRNA target sequence
atatcattattaaattcatt

SEQ ID NO: 36884 - DNA, 20 bp, Artificial sequence
  SiRNA target sequence
tatcattattaaattcatta

SEQ ID NO: 36885 - DNA, 20 bp, Artificial sequence
  SiRNA target sequence
atcattattaaattcattaa

SEQ ID NO: 36886 - DNA, 20 bp, Artificial sequence
  SiRNA target sequence
tcattattaaattcattaac

SEQ ID NO: 36887 - DNA, 20 bp, Artificial sequence
  SiRNA target sequence
cattattaaattcattaaca

SEQ ID NO: 36888 - DNA, 20 bp, Artificial sequence
  SiRNA target sequence
attattaaattcattaacat

SEQ ID NO: 36889 - DNA, 20 bp, Artificial sequence
  SiRNA target sequence
ttattaaattcattaacatc

SEQ ID NO: 36890 - DNA, 20 bp, Artificial sequence
  SiRNA target sequence
tattaaattcattaacatct

SEQ ID NO: 36891 - DNA, 20 bp, Artificial sequence
  SiRNA target sequence
attaaattcattaacatcta

SEQ ID NO: 36892 - DNA, 20 bp, Artificial sequence
  SiRNA target sequence
ttaaattcattaacatctac

SEQ ID NO: 36893 - DNA, 20 bp, Artificial sequence
  SiRNA target sequence
taaattcattaacatctact

SEQ ID NO: 36894 - DNA, 20 bp, Artificial sequence
  SiRNA target sequence
aaattcattaacatctacta

SEQ ID NO: 36895 - DNA, 20 bp, Artificial sequence
  SiRNA target sequence
aattcattaacatctactaa

SEQ ID NO: 36896 - DNA, 20 bp, Artificial sequence
  SiRNA target sequence
attcattaacatctactaaa

SEQ ID NO: 36897 - DNA, 20 bp, Artificial sequence
  SiRNA target sequence
ttcattaacatctactaaat

SEQ ID NO: 36898 - DNA, 20 bp, Artificial sequence
  SiRNA target sequence
tcattaacatctactaaatt

SEQ ID NO: 36899 - DNA, 20 bp, Artificial sequence
  SiRNA target sequence
cattaacatctactaaattt

SEQ ID NO: 36900 - DNA, 20 bp, Artificial sequence
  SiRNA target sequence
attaacatctactaaatttg

SEQ ID NO: 36901 - DNA, 20 bp, Artificial sequence
  SiRNA target sequence
ttaacatctactaaatttgg

SEQ ID NO: 36902 - DNA, 20 bp, Artificial sequence
  SiRNA target sequence
taacatctactaaatttggt

SEQ ID NO: 36903 - DNA, 20 bp, Artificial sequence
  SiRNA target sequence
aacatctactaaatttggtt

SEQ ID NO: 36904 - DNA, 20 bp, Artificial sequence
  SiRNA target sequence
acatctactaaatttggttc

SEQ ID NO: 36905 - DNA, 20 bp, Artificial sequence
  SiRNA target sequence
catctactaaatttggttct

SEQ ID NO: 36906 - DNA, 20 bp, Artificial sequence
  SiRNA target sequence
atctactaaatttggttctt

SEQ ID NO: 36907 - DNA, 20 bp, Artificial sequence
  SiRNA target sequence
tctactaaatttggttcttc

SEQ ID NO: 36908 - DNA, 20 bp, Artificial sequence
  SiRNA target sequence
ctactaaatttggttcttct

SEQ ID NO: 36909 - DNA, 20 bp, Artificial sequence
  SiRNA target sequence
tactaaatttggttcttctt

SEQ ID NO: 36910 - DNA, 20 bp, Artificial sequence
  SiRNA target sequence
actaaatttggttcttcttt

SEQ ID NO: 36911 - DNA, 20 bp, Artificial sequence
  SiRNA target sequence
ctaaatttggttcttctttt

SEQ ID NO: 36912 - DNA, 20 bp, Artificial sequence
  SiRNA target sequence
taaatttggttcttctttta

SEQ ID NO: 36913 - DNA, 20 bp, Artificial sequence
  SiRNA target sequence
aaatttggttcttcttttat

SEQ ID NO: 36914 - DNA, 20 bp, Artificial sequence
  SiRNA target sequence
aatttggttcttcttttata

SEQ ID NO: 36915 - DNA, 20 bp, Artificial sequence
  SiRNA target sequence
atttggttcttcttttataa

SEQ ID NO: 36916 - DNA, 20 bp, Artificial sequence
  SiRNA target sequence
tttggttcttcttttataag

SEQ ID NO: 36917 - DNA, 20 bp, Artificial sequence
  SiRNA target sequence
ttggttcttcttttataagc

SEQ ID NO: 36918 - DNA, 20 bp, Artificial sequence
  SiRNA target sequence
tggttcttcttttataagct

SEQ ID NO: 36919 - DNA, 20 bp, Artificial sequence
  SiRNA target sequence
ggttcttcttttataagctc

SEQ ID NO: 36920 - DNA, 20 bp, Artificial sequence
  SiRNA target sequence
gttcttcttttataagctct

SEQ ID NO: 36921 - DNA, 20 bp, Artificial sequence
  SiRNA target sequence
ttcttcttttataagctctg

SEQ ID NO: 36922 - DNA, 20 bp, Artificial sequence
  SiRNA target sequence
tcttcttttataagctctgg

SEQ ID NO: 36923 - DNA, 20 bp, Artificial sequence
  SiRNA target sequence
cttcttttataagctctggt

SEQ ID NO: 36924 - DNA, 20 bp, Artificial sequence
  SiRNA target sequence
ttcttttataagctctggtt

SEQ ID NO: 36925 - DNA, 20 bp, Artificial sequence
  SiRNA target sequence
tcttttataagctctggttt

SEQ ID NO: 36926 - DNA, 20 bp, Artificial sequence
  SiRNA target sequence
cttttataagctctggttta

SEQ ID NO: 36927 - DNA, 20 bp, Artificial sequence
  SiRNA target sequence
ttttataagctctggtttaa

SEQ ID NO: 36928 - DNA, 20 bp, Artificial sequence
  SiRNA target sequence
tttataagctctggtttaaa

SEQ ID NO: 36929 - DNA, 20 bp, Artificial sequence
  SiRNA target sequence
ttataagctctggtttaaaa

SEQ ID NO: 36930 - DNA, 20 bp, Artificial sequence
  SiRNA target sequence
tataagctctggtttaaaag

SEQ ID NO: 36931 - DNA, 20 bp, Artificial sequence
  SiRNA target sequence
ataagctctggtttaaaaga

SEQ ID NO: 36932 - DNA, 20 bp, Artificial sequence
  SiRNA target sequence
taagctctggtttaaaagat

SEQ ID NO: 36933 - DNA, 20 bp, Artificial sequence
  SiRNA target sequence
aagctctggtttaaaagatg

SEQ ID NO: 36934 - DNA, 20 bp, Artificial sequence
  SiRNA target sequence
agctctggtttaaaagatgt

SEQ ID NO: 36935 - DNA, 20 bp, Artificial sequence
  SiRNA target sequence
gctctggtttaaaagatgtt

SEQ ID NO: 36936 - DNA, 20 bp, Artificial sequence
  SiRNA target sequence
ctctggtttaaaagatgttc

SEQ ID NO: 36937 - DNA, 20 bp, Artificial sequence
  SiRNA target sequence
tctggtttaaaagatgttct

SEQ ID NO: 36938 - DNA, 20 bp, Artificial sequence
  SiRNA target sequence
ctggtttaaaagatgttctt

SEQ ID NO: 36939 - DNA, 20 bp, Artificial sequence
  SiRNA target sequence
tggtttaaaagatgttctta

SEQ ID NO: 36940 - DNA, 20 bp, Artificial sequence
  SiRNA target sequence
ggtttaaaagatgttcttat

SEQ ID NO: 36941 - DNA, 20 bp, Artificial sequence
  SiRNA target sequence
gtttaaaagatgttcttata

SEQ ID NO: 36942 - DNA, 20 bp, Artificial sequence
  SiRNA target sequence
tttaaaagatgttcttatat

SEQ ID NO: 36943 - DNA, 20 bp, Artificial sequence
  SiRNA target sequence
ttaaaagatgttcttatatt

SEQ ID NO: 36944 - DNA, 20 bp, Artificial sequence
  SiRNA target sequence
taaaagatgttcttatattt

SEQ ID NO: 36945 - DNA, 20 bp, Artificial sequence
  SiRNA target sequence
aaaagatgttcttatattta

SEQ ID NO: 36946 - DNA, 20 bp, Artificial sequence
  SiRNA target sequence
aaagatgttcttatatttaa

SEQ ID NO: 36947 - DNA, 20 bp, Artificial sequence
  SiRNA target sequence
aagatgttcttatatttaag

SEQ ID NO: 36948 - DNA, 20 bp, Artificial sequence
  SiRNA target sequence
agatgttcttatatttaaga

SEQ ID NO: 36949 - DNA, 20 bp, Artificial sequence
  SiRNA target sequence
gatgttcttatatttaagat

SEQ ID NO: 36950 - DNA, 20 bp, Artificial sequence
  SiRNA target sequence
atgttcttatatttaagatt

SEQ ID NO: 36951 - DNA, 20 bp, Artificial sequence
  SiRNA target sequence
tgttcttatatttaagattg

SEQ ID NO: 36952 - DNA, 20 bp, Artificial sequence
  SiRNA target sequence
gttcttatatttaagattgc

SEQ ID NO: 36953 - DNA, 20 bp, Artificial sequence
  SiRNA target sequence
ttcttatatttaagattgct

SEQ ID NO: 36954 - DNA, 20 bp, Artificial sequence
  SiRNA target sequence
tcttatatttaagattgctt

SEQ ID NO: 36955 - DNA, 20 bp, Artificial sequence
  SiRNA target sequence
cttatatttaagattgcttg

SEQ ID NO: 36956 - DNA, 20 bp, Artificial sequence
  SiRNA target sequence
ttatatttaagattgcttgt

SEQ ID NO: 36957 - DNA, 20 bp, Artificial sequence
  SiRNA target sequence
tatatttaagattgcttgtg

SEQ ID NO: 36958 - DNA, 20 bp, Artificial sequence
  SiRNA target sequence
atatttaagattgcttgtgt

SEQ ID NO: 36959 - DNA, 20 bp, Artificial sequence
  SiRNA target sequence
tatttaagattgcttgtgta

SEQ ID NO: 36960 - DNA, 20 bp, Artificial sequence
  SiRNA target sequence
atttaagattgcttgtgtat

SEQ ID NO: 36961 - DNA, 20 bp, Artificial sequence
  SiRNA target sequence
tttaagattgcttgtgtata

SEQ ID NO: 36962 - DNA, 20 bp, Artificial sequence
  SiRNA target sequence
ttaagattgcttgtgtatat

SEQ ID NO: 36963 - DNA, 20 bp, Artificial sequence
  SiRNA target sequence
taagattgcttgtgtatatc

SEQ ID NO: 36964 - DNA, 20 bp, Artificial sequence
  SiRNA target sequence
aagattgcttgtgtatatcg

SEQ ID NO: 36965 - DNA, 20 bp, Artificial sequence
  SiRNA target sequence
agattgcttgtgtatatcgt

SEQ ID NO: 36966 - DNA, 20 bp, Artificial sequence
  SiRNA target sequence
gattgcttgtgtatatcgtg

SEQ ID NO: 36967 - DNA, 20 bp, Artificial sequence
  SiRNA target sequence
attgcttgtgtatatcgtga

SEQ ID NO: 36968 - DNA, 20 bp, Artificial sequence
  SiRNA target sequence
ttgcttgtgtatatcgtgag

SEQ ID NO: 36969 - DNA, 20 bp, Artificial sequence
  SiRNA target sequence
tgcttgtgtatatcgtgagt

SEQ ID NO: 36970 - DNA, 20 bp, Artificial sequence
  SiRNA target sequence
gcttgtgtatatcgtgagta

SEQ ID NO: 36971 - DNA, 20 bp, Artificial sequence
  SiRNA target sequence
cttgtgtatatcgtgagtaa

SEQ ID NO: 36972 - DNA, 20 bp, Artificial sequence
  SiRNA target sequence
ttgtgtatatcgtgagtaaa

SEQ ID NO: 36973 - DNA, 20 bp, Artificial sequence
  SiRNA target sequence
tgtgtatatcgtgagtaaaa

SEQ ID NO: 36974 - DNA, 20 bp, Artificial sequence
  SiRNA target sequence
gtgtatatcgtgagtaaaag

SEQ ID NO: 36975 - DNA, 20 bp, Artificial sequence
  SiRNA target sequence
tgtatatcgtgagtaaaaga

SEQ ID NO: 36976 - DNA, 20 bp, Artificial sequence
  SiRNA target sequence
gtatatcgtgagtaaaagaa

SEQ ID NO: 36977 - DNA, 20 bp, Artificial sequence
  SiRNA target sequence
tatatcgtgagtaaaagaac

SEQ ID NO: 36978 - DNA, 20 bp, Artificial sequence
  SiRNA target sequence
atatcgtgagtaaaagaacc

SEQ ID NO: 36979 - DNA, 20 bp, Artificial sequence
  SiRNA target sequence
tatcgtgagtaaaagaaccc

SEQ ID NO: 36980 - DNA, 20 bp, Artificial sequence
  SiRNA target sequence
atcgtgagtaaaagaaccct

SEQ ID NO: 36981 - DNA, 20 bp, Artificial sequence
  SiRNA target sequence
tcgtgagtaaaagaacccta

SEQ ID NO: 36982 - DNA, 20 bp, Artificial sequence
  SiRNA target sequence
cgtgagtaaaagaaccctaa

SEQ ID NO: 36983 - DNA, 20 bp, Artificial sequence
  SiRNA target sequence
gtgagtaaaagaaccctaat

SEQ ID NO: 36984 - DNA, 20 bp, Artificial sequence
  SiRNA target sequence
tgagtaaaagaaccctaatt

SEQ ID NO: 36985 - DNA, 20 bp, Artificial sequence
  SiRNA target sequence
gagtaaaagaaccctaattg

SEQ ID NO: 36986 - DNA, 20 bp, Artificial sequence
  SiRNA target sequence
agtaaaagaaccctaattgt

SEQ ID NO: 36987 - DNA, 20 bp, Artificial sequence
  SiRNA target sequence
gtaaaagaaccctaattgtc

SEQ ID NO: 36988 - DNA, 20 bp, Artificial sequence
  SiRNA target sequence
taaaagaaccctaattgtcc

SEQ ID NO: 36989 - DNA, 20 bp, Artificial sequence
  SiRNA target sequence
aaaagaaccctaattgtcca

SEQ ID NO: 36990 - DNA, 20 bp, Artificial sequence
  SiRNA target sequence
aaagaaccctaattgtccaa

SEQ ID NO: 36991 - DNA, 20 bp, Artificial sequence
  SiRNA target sequence
aagaaccctaattgtccaaa

SEQ ID NO: 36992 - DNA, 20 bp, Artificial sequence
  SiRNA target sequence
agaaccctaattgtccaaaa

SEQ ID NO: 36993 - DNA, 20 bp, Artificial sequence
  SiRNA target sequence
gaaccctaattgtccaaaac

SEQ ID NO: 36994 - DNA, 20 bp, Artificial sequence
  SiRNA target sequence
aaccctaattgtccaaaact

SEQ ID NO: 36995 - DNA, 20 bp, Artificial sequence
  SiRNA target sequence
accctaattgtccaaaactt

SEQ ID NO: 36996 - DNA, 20 bp, Artificial sequence
  SiRNA target sequence
ccctaattgtccaaaacttg

SEQ ID NO: 36997 - DNA, 20 bp, Artificial sequence
  SiRNA target sequence
cctaattgtccaaaacttga

SEQ ID NO: 36998 - DNA, 20 bp, Artificial sequence
  SiRNA target sequence
ctaattgtccaaaacttgaa

SEQ ID NO: 36999 - DNA, 20 bp, Artificial sequence
  SiRNA target sequence
taattgtccaaaacttgaat

SEQ ID NO: 37000 - DNA, 20 bp, Artificial sequence
  SiRNA target sequence
aattgtccaaaacttgaata

SEQ ID NO: 37001 - DNA, 20 bp, Artificial sequence
  SiRNA target sequence
attgtccaaaacttgaatac

SEQ ID NO: 37002 - DNA, 20 bp, Artificial sequence
  SiRNA target sequence
ttgtccaaaacttgaataca

SEQ ID NO: 37003 - DNA, 20 bp, Artificial sequence
  SiRNA target sequence
tgtccaaaacttgaatacaa

SEQ ID NO: 37004 - DNA, 20 bp, Artificial sequence
  SiRNA target sequence
gtccaaaacttgaatacaat

SEQ ID NO: 37005 - DNA, 20 bp, Artificial sequence
  SiRNA target sequence
tccaaaacttgaatacaatg

SEQ ID NO: 37006 - DNA, 20 bp, Artificial sequence
  SiRNA target sequence
ccaaaacttgaatacaatgt

SEQ ID NO: 37007 - DNA, 20 bp, Artificial sequence
  SiRNA target sequence
caaaacttgaatacaatgtt

SEQ ID NO: 37008 - DNA, 20 bp, Artificial sequence
  SiRNA target sequence
aaaacttgaatacaatgttc

SEQ ID NO: 37009 - DNA, 20 bp, Artificial sequence
  SiRNA target sequence
aaacttgaatacaatgttct

SEQ ID NO: 37010 - DNA, 20 bp, Artificial sequence
  SiRNA target sequence
aacttgaatacaatgttcta

SEQ ID NO: 37011 - DNA, 20 bp, Artificial sequence
  SiRNA target sequence
acttgaatacaatgttctat

SEQ ID NO: 37012 - DNA, 20 bp, Artificial sequence
  SiRNA target sequence
cttgaatacaatgttctatt

SEQ ID NO: 37013 - DNA, 20 bp, Artificial sequence
  SiRNA target sequence
ttgaatacaatgttctatta

SEQ ID NO: 37014 - DNA, 20 bp, Artificial sequence
  SiRNA target sequence
tgaatacaatgttctattaa

SEQ ID NO: 37015 - DNA, 20 bp, Artificial sequence
  SiRNA target sequence
gaatacaatgttctattaat

SEQ ID NO: 37016 - DNA, 20 bp, Artificial sequence
  SiRNA target sequence
aatacaatgttctattaatg

SEQ ID NO: 37017 - DNA, 20 bp, Artificial sequence
  SiRNA target sequence
atacaatgttctattaatgc

SEQ ID NO: 37018 - DNA, 20 bp, Artificial sequence
  SiRNA target sequence
tacaatgttctattaatgcc

SEQ ID NO: 37019 - DNA, 20 bp, Artificial sequence
  SiRNA target sequence
acaatgttctattaatgcca

SEQ ID NO: 37020 - DNA, 20 bp, Artificial sequence
  SiRNA target sequence
caatgttctattaatgccaa

SEQ ID NO: 37021 - DNA, 20 bp, Artificial sequence
  SiRNA target sequence
aatgttctattaatgccaat

SEQ ID NO: 37022 - DNA, 20 bp, Artificial sequence
  SiRNA target sequence
atgttctattaatgccaata

SEQ ID NO: 37023 - DNA, 20 bp, Artificial sequence
  SiRNA target sequence
tgttctattaatgccaatat

SEQ ID NO: 37024 - DNA, 20 bp, Artificial sequence
  SiRNA target sequence
gttctattaatgccaatata

SEQ ID NO: 37025 - DNA, 20 bp, Artificial sequence
  SiRNA target sequence
ttctattaatgccaatataa

SEQ ID NO: 37026 - DNA, 20 bp, Artificial sequence
  SiRNA target sequence
tctattaatgccaatataaa

SEQ ID NO: 37027 - DNA, 20 bp, Artificial sequence
  SiRNA target sequence
ctattaatgccaatataaaa

SEQ ID NO: 37028 - DNA, 20 bp, Artificial sequence
  SiRNA target sequence
tattaatgccaatataaaat

SEQ ID NO: 37029 - DNA, 20 bp, Artificial sequence
  SiRNA target sequence
attaatgccaatataaaata

SEQ ID NO: 37030 - DNA, 20 bp, Artificial sequence
  SiRNA target sequence
ttaatgccaatataaaatac

SEQ ID NO: 37031 - DNA, 20 bp, Artificial sequence
  SiRNA target sequence
taatgccaatataaaataca

SEQ ID NO: 37032 - DNA, 20 bp, Artificial sequence
  SiRNA target sequence
aatgccaatataaaatacaa

SEQ ID NO: 37033 - DNA, 20 bp, Artificial sequence
  SiRNA target sequence
atgccaatataaaatacaac

SEQ ID NO: 37034 - DNA, 20 bp, Artificial sequence
  SiRNA target sequence
tgccaatataaaatacaaca

SEQ ID NO: 37035 - DNA, 20 bp, Artificial sequence
  SiRNA target sequence
gccaatataaaatacaacat

SEQ ID NO: 37036 - DNA, 20 bp, Artificial sequence
  SiRNA target sequence
ccaatataaaatacaacatc

SEQ ID NO: 37037 - DNA, 20 bp, Artificial sequence
  SiRNA target sequence
caatataaaatacaacatcc

SEQ ID NO: 37038 - DNA, 20 bp, Artificial sequence
  SiRNA target sequence
aatataaaatacaacatccc

SEQ ID NO: 37039 - DNA, 20 bp, Artificial sequence
  SiRNA target sequence
atataaaatacaacatccct

SEQ ID NO: 37040 - DNA, 20 bp, Artificial sequence
  SiRNA target sequence
tataaaatacaacatccctg

SEQ ID NO: 37041 - DNA, 20 bp, Artificial sequence
  SiRNA target sequence
ataaaatacaacatccctgg

SEQ ID NO: 37042 - DNA, 20 bp, Artificial sequence
  SiRNA target sequence
taaaatacaacatccctggc

SEQ ID NO: 37043 - DNA, 20 bp, Artificial sequence
  SiRNA target sequence
aaaatacaacatccctggca

SEQ ID NO: 37044 - DNA, 20 bp, Artificial sequence
  SiRNA target sequence
aaatacaacatccctggcac

SEQ ID NO: 37045 - DNA, 20 bp, Artificial sequence
  SiRNA target sequence
aatacaacatccctggcact

SEQ ID NO: 37046 - DNA, 20 bp, Artificial sequence
  SiRNA target sequence
atacaacatccctggcactt

SEQ ID NO: 37047 - DNA, 20 bp, Artificial sequence
  SiRNA target sequence
tacaacatccctggcactta

SEQ ID NO: 37048 - DNA, 20 bp, Artificial sequence
  SiRNA target sequence
acaacatccctggcacttag

SEQ ID NO: 37049 - DNA, 20 bp, Artificial sequence
  SiRNA target sequence
caacatccctggcacttagt

SEQ ID NO: 37050 - DNA, 20 bp, Artificial sequence
  SiRNA target sequence
aacatccctggcacttagtt

SEQ ID NO: 37051 - DNA, 20 bp, Artificial sequence
  SiRNA target sequence
acatccctggcacttagttt

SEQ ID NO: 37052 - DNA, 20 bp, Artificial sequence
  SiRNA target sequence
catccctggcacttagtttt

SEQ ID NO: 37053 - DNA, 20 bp, Artificial sequence
  SiRNA target sequence
atccctggcacttagttttg

SEQ ID NO: 37054 - DNA, 20 bp, Artificial sequence
  SiRNA target sequence
tccctggcacttagttttgc

SEQ ID NO: 37055 - DNA, 20 bp, Artificial sequence
  SiRNA target sequence
ccctggcacttagttttgct

SEQ ID NO: 37056 - DNA, 20 bp, Artificial sequence
  SiRNA target sequence
cctggcacttagttttgctg

SEQ ID NO: 37057 - DNA, 20 bp, Artificial sequence
  SiRNA target sequence
ctggcacttagttttgctgt

SEQ ID NO: 37058 - DNA, 20 bp, Artificial sequence
  SiRNA target sequence
tggcacttagttttgctgtt

SEQ ID NO: 37059 - DNA, 20 bp, Artificial sequence
  SiRNA target sequence
ggcacttagttttgctgtta

SEQ ID NO: 37060 - DNA, 20 bp, Artificial sequence
  SiRNA target sequence
gcacttagttttgctgttaa

SEQ ID NO: 37061 - DNA, 20 bp, Artificial sequence
  SiRNA target sequence
cacttagttttgctgttaat

SEQ ID NO: 37062 - DNA, 20 bp, Artificial sequence
  SiRNA target sequence
acttagttttgctgttaata

SEQ ID NO: 37063 - DNA, 20 bp, Artificial sequence
  SiRNA target sequence
cttagttttgctgttaatat

SEQ ID NO: 37064 - DNA, 20 bp, Artificial sequence
  SiRNA target sequence
ttagttttgctgttaatatt

SEQ ID NO: 37065 - DNA, 20 bp, Artificial sequence
  SiRNA target sequence
tagttttgctgttaatattc

SEQ ID NO: 37066 - DNA, 20 bp, Artificial sequence
  SiRNA target sequence
agttttgctgttaatattcc

SEQ ID NO: 37067 - DNA, 20 bp, Artificial sequence
  SiRNA target sequence
gttttgctgttaatattcca

SEQ ID NO: 37068 - DNA, 20 bp, Artificial sequence
  SiRNA target sequence
ttttgctgttaatattccat

SEQ ID NO: 37069 - DNA, 20 bp, Artificial sequence
  SiRNA target sequence
tttgctgttaatattccata

SEQ ID NO: 37070 - DNA, 20 bp, Artificial sequence
  SiRNA target sequence
ttgctgttaatattccatag

SEQ ID NO: 37071 - DNA, 20 bp, Artificial sequence
  SiRNA target sequence
tgctgttaatattccatagt

SEQ ID NO: 37072 - DNA, 20 bp, Artificial sequence
  SiRNA target sequence
gctgttaatattccatagtt

SEQ ID NO: 37073 - DNA, 20 bp, Artificial sequence
  SiRNA target sequence
ctgttaatattccatagttt

SEQ ID NO: 37074 - DNA, 20 bp, Artificial sequence
  SiRNA target sequence
tgttaatattccatagtttc

SEQ ID NO: 37075 - DNA, 20 bp, Artificial sequence
  SiRNA target sequence
gttaatattccatagtttcc

SEQ ID NO: 37076 - DNA, 20 bp, Artificial sequence
  SiRNA target sequence
ttaatattccatagtttcct

SEQ ID NO: 37077 - DNA, 20 bp, Artificial sequence
  SiRNA target sequence
taatattccatagtttccta

SEQ ID NO: 37078 - DNA, 20 bp, Artificial sequence
  SiRNA target sequence
aatattccatagtttcctaa

SEQ ID NO: 37079 - DNA, 20 bp, Artificial sequence
  SiRNA target sequence
atattccatagtttcctaat

SEQ ID NO: 37080 - DNA, 20 bp, Artificial sequence
  SiRNA target sequence
tattccatagtttcctaatg

SEQ ID NO: 37081 - DNA, 20 bp, Artificial sequence
  SiRNA target sequence
attccatagtttcctaatgt

SEQ ID NO: 37082 - DNA, 20 bp, Artificial sequence
  SiRNA target sequence
ttccatagtttcctaatgtt

SEQ ID NO: 37083 - DNA, 20 bp, Artificial sequence
  SiRNA target sequence
tccatagtttcctaatgtta

SEQ ID NO: 37084 - DNA, 20 bp, Artificial sequence
  SiRNA target sequence
ccatagtttcctaatgttat

SEQ ID NO: 37085 - DNA, 20 bp, Artificial sequence
  SiRNA target sequence
catagtttcctaatgttata

SEQ ID NO: 37086 - DNA, 20 bp, Artificial sequence
  SiRNA target sequence
atagtttcctaatgttataa

SEQ ID NO: 37087 - DNA, 20 bp, Artificial sequence
  SiRNA target sequence
tagtttcctaatgttataac

SEQ ID NO: 37088 - DNA, 20 bp, Artificial sequence
  SiRNA target sequence
agtttcctaatgttataact

SEQ ID NO: 37089 - DNA, 20 bp, Artificial sequence
  SiRNA target sequence
gtttcctaatgttataacta

SEQ ID NO: 37090 - DNA, 20 bp, Artificial sequence
  SiRNA target sequence
tttcctaatgttataactat

SEQ ID NO: 37091 - DNA, 20 bp, Artificial sequence
  SiRNA target sequence
ttcctaatgttataactata

SEQ ID NO: 37092 - DNA, 20 bp, Artificial sequence
  SiRNA target sequence
tcctaatgttataactataa

SEQ ID NO: 37093 - DNA, 20 bp, Artificial sequence
  SiRNA target sequence
cctaatgttataactataaa

SEQ ID NO: 37094 - DNA, 20 bp, Artificial sequence
  SiRNA target sequence
ctaatgttataactataaaa

SEQ ID NO: 37095 - DNA, 20 bp, Artificial sequence
  SiRNA target sequence
taatgttataactataaaac

SEQ ID NO: 37096 - DNA, 20 bp, Artificial sequence
  SiRNA target sequence
aatgttataactataaaaca

SEQ ID NO: 37097 - DNA, 20 bp, Artificial sequence
  SiRNA target sequence
atgttataactataaaacac

SEQ ID NO: 37098 - DNA, 20 bp, Artificial sequence
  SiRNA target sequence
tgttataactataaaacact

SEQ ID NO: 37099 - DNA, 20 bp, Artificial sequence
  SiRNA target sequence
gttataactataaaacactg

SEQ ID NO: 37100 - DNA, 20 bp, Artificial sequence
  SiRNA target sequence
ttataactataaaacactgt

SEQ ID NO: 37101 - DNA, 20 bp, Artificial sequence
  SiRNA target sequence
tataactataaaacactgta

SEQ ID NO: 37102 - DNA, 20 bp, Artificial sequence
  SiRNA target sequence
ataactataaaacactgtaa

SEQ ID NO: 37103 - DNA, 20 bp, Artificial sequence
  SiRNA target sequence
taactataaaacactgtaaa

SEQ ID NO: 37104 - DNA, 20 bp, Artificial sequence
  SiRNA target sequence
aactataaaacactgtaaag

SEQ ID NO: 37105 - DNA, 20 bp, Artificial sequence
  SiRNA target sequence
actataaaacactgtaaagc

SEQ ID NO: 37106 - DNA, 20 bp, Artificial sequence
  SiRNA target sequence
ctataaaacactgtaaagca

SEQ ID NO: 37107 - DNA, 20 bp, Artificial sequence
  SiRNA target sequence
tataaaacactgtaaagcaa

SEQ ID NO: 37108 - DNA, 20 bp, Artificial sequence
  SiRNA target sequence
ataaaacactgtaaagcaaa

SEQ ID NO: 37109 - DNA, 20 bp, Artificial sequence
  SiRNA target sequence
taaaacactgtaaagcaaaa

SEQ ID NO: 37110 - DNA, 20 bp, Artificial sequence
  SiRNA target sequence
aaaacactgtaaagcaaaaa

SEQ ID NO: 37111 - DNA, 20 bp, Artificial sequence
  SiRNA target sequence
aaacactgtaaagcaaaaat

SEQ ID NO: 37112 - DNA, 20 bp, Artificial sequence
  SiRNA target sequence
aacactgtaaagcaaaaatt

SEQ ID NO: 37113 - DNA, 20 bp, Artificial sequence
  SiRNA target sequence
acactgtaaagcaaaaatta

SEQ ID NO: 37114 - DNA, 20 bp, Artificial sequence
  SiRNA target sequence
cactgtaaagcaaaaattat

SEQ ID NO: 37115 - DNA, 20 bp, Artificial sequence
  SiRNA target sequence
actgtaaagcaaaaattatc

SEQ ID NO: 37116 - DNA, 20 bp, Artificial sequence
  SiRNA target sequence
ctgtaaagcaaaaattatct

SEQ ID NO: 37117 - DNA, 20 bp, Artificial sequence
  SiRNA target sequence
tgtaaagcaaaaattatctt

SEQ ID NO: 37118 - DNA, 20 bp, Artificial sequence
  SiRNA target sequence
gtaaagcaaaaattatctta

SEQ ID NO: 37119 - DNA, 20 bp, Artificial sequence
  SiRNA target sequence
taaagcaaaaattatcttat

SEQ ID NO: 37120 - DNA, 20 bp, Artificial sequence
  SiRNA target sequence
aaagcaaaaattatcttatt

SEQ ID NO: 37121 - DNA, 20 bp, Artificial sequence
  SiRNA target sequence
aagcaaaaattatcttattt

SEQ ID NO: 37122 - DNA, 20 bp, Artificial sequence
  SiRNA target sequence
agcaaaaattatcttattta

SEQ ID NO: 37123 - DNA, 20 bp, Artificial sequence
  SiRNA target sequence
gcaaaaattatcttatttac

SEQ ID NO: 37124 - DNA, 20 bp, Artificial sequence
  SiRNA target sequence
caaaaattatcttatttaca

SEQ ID NO: 37125 - DNA, 20 bp, Artificial sequence
  SiRNA target sequence
aaaaattatcttatttacaa

SEQ ID NO: 37126 - DNA, 20 bp, Artificial sequence
  SiRNA target sequence
aaaattatcttatttacaag

SEQ ID NO: 37127 - DNA, 20 bp, Artificial sequence
  SiRNA target sequence
aaattatcttatttacaagg

SEQ ID NO: 37128 - DNA, 20 bp, Artificial sequence
  SiRNA target sequence
aattatcttatttacaaggt

SEQ ID NO: 37129 - DNA, 20 bp, Artificial sequence
  SiRNA target sequence
attatcttatttacaaggta

SEQ ID NO: 37130 - DNA, 20 bp, Artificial sequence
  SiRNA target sequence
ttatcttatttacaaggtat

SEQ ID NO: 37131 - DNA, 20 bp, Artificial sequence
  SiRNA target sequence
tatcttatttacaaggtata

SEQ ID NO: 37132 - DNA, 20 bp, Artificial sequence
  SiRNA target sequence
atcttatttacaaggtataa

SEQ ID NO: 37133 - DNA, 20 bp, Artificial sequence
  SiRNA target sequence
tcttatttacaaggtataaa

SEQ ID NO: 37134 - DNA, 20 bp, Artificial sequence
  SiRNA target sequence
cttatttacaaggtataaaa

SEQ ID NO: 37135 - DNA, 20 bp, Artificial sequence
  SiRNA target sequence
ttatttacaaggtataaaaa

SEQ ID NO: 37136 - DNA, 20 bp, Artificial sequence
  SiRNA target sequence
tatttacaaggtataaaaaa

SEQ ID NO: 37137 - DNA, 20 bp, Artificial sequence
  SiRNA target sequence
atttacaaggtataaaaaac

SEQ ID NO: 37138 - DNA, 20 bp, Artificial sequence
  SiRNA target sequence
tttacaaggtataaaaaact

SEQ ID NO: 37139 - DNA, 20 bp, Artificial sequence
  SiRNA target sequence
ttacaaggtataaaaaacta

SEQ ID NO: 37140 - DNA, 20 bp, Artificial sequence
  SiRNA target sequence
tacaaggtataaaaaactaa

SEQ ID NO: 37141 - DNA, 20 bp, Artificial sequence
  SiRNA target sequence
acaaggtataaaaaactaag

SEQ ID NO: 37142 - DNA, 20 bp, Artificial sequence
  SiRNA target sequence
caaggtataaaaaactaaga

SEQ ID NO: 37143 - DNA, 20 bp, Artificial sequence
  SiRNA target sequence
aaggtataaaaaactaagag

SEQ ID NO: 37144 - DNA, 20 bp, Artificial sequence
  SiRNA target sequence
aggtataaaaaactaagaga

SEQ ID NO: 37145 - DNA, 20 bp, Artificial sequence
  SiRNA target sequence
ggtataaaaaactaagagat

SEQ ID NO: 37146 - DNA, 20 bp, Artificial sequence
  SiRNA target sequence
gtataaaaaactaagagatc

SEQ ID NO: 37147 - DNA, 20 bp, Artificial sequence
  SiRNA target sequence
tataaaaaactaagagatct

SEQ ID NO: 37148 - DNA, 20 bp, Artificial sequence
  SiRNA target sequence
ataaaaaactaagagatctc

SEQ ID NO: 37149 - DNA, 20 bp, Artificial sequence
  SiRNA target sequence
taaaaaactaagagatctcc

SEQ ID NO: 37150 - DNA, 20 bp, Artificial sequence
  SiRNA target sequence
aaaaaactaagagatctcca

SEQ ID NO: 37151 - DNA, 20 bp, Artificial sequence
  SiRNA target sequence
aaaaactaagagatctccag

SEQ ID NO: 37152 - DNA, 20 bp, Artificial sequence
  SiRNA target sequence
aaaactaagagatctccaga

SEQ ID NO: 37153 - DNA, 20 bp, Artificial sequence
  SiRNA target sequence
aaactaagagatctccagat

SEQ ID NO: 37154 - DNA, 20 bp, Artificial sequence
  SiRNA target sequence
aactaagagatctccagatt

SEQ ID NO: 37155 - DNA, 20 bp, Artificial sequence
  SiRNA target sequence
actaagagatctccagattc

SEQ ID NO: 37156 - DNA, 20 bp, Artificial sequence
  SiRNA target sequence
ctaagagatctccagattct

SEQ ID NO: 37157 - DNA, 20 bp, Artificial sequence
  SiRNA target sequence
taagagatctccagattctg

SEQ ID NO: 37158 - DNA, 20 bp, Artificial sequence
  SiRNA target sequence
aagagatctccagattctgt

SEQ ID NO: 37159 - DNA, 20 bp, Artificial sequence
  SiRNA target sequence
agagatctccagattctgtt

SEQ ID NO: 37160 - DNA, 20 bp, Artificial sequence
  SiRNA target sequence
gagatctccagattctgtta

SEQ ID NO: 37161 - DNA, 20 bp, Artificial sequence
  SiRNA target sequence
agatctccagattctgttac

SEQ ID NO: 37162 - DNA, 20 bp, Artificial sequence
  SiRNA target sequence
gatctccagattctgttaca

SEQ ID NO: 37163 - DNA, 20 bp, Artificial sequence
  SiRNA target sequence
atctccagattctgttacat

SEQ ID NO: 37164 - DNA, 20 bp, Artificial sequence
  SiRNA target sequence
tctccagattctgttacatt

SEQ ID NO: 37165 - DNA, 20 bp, Artificial sequence
  SiRNA target sequence
ctccagattctgttacattc

SEQ ID NO: 37166 - DNA, 20 bp, Artificial sequence
  SiRNA target sequence
tccagattctgttacattcc

SEQ ID NO: 37167 - DNA, 20 bp, Artificial sequence
  SiRNA target sequence
ccagattctgttacattccg

SEQ ID NO: 37168 - DNA, 20 bp, Artificial sequence
  SiRNA target sequence
cagattctgttacattccga

SEQ ID NO: 37169 - DNA, 20 bp, Artificial sequence
  SiRNA target sequence
agattctgttacattccgat

SEQ ID NO: 37170 - DNA, 20 bp, Artificial sequence
  SiRNA target sequence
gattctgttacattccgatt

SEQ ID NO: 37171 - DNA, 20 bp, Artificial sequence
  SiRNA target sequence
attctgttacattccgattc

SEQ ID NO: 37172 - DNA, 20 bp, Artificial sequence
  SiRNA target sequence
ttctgttacattccgattct

SEQ ID NO: 37173 - DNA, 20 bp, Artificial sequence
  SiRNA target sequence
tctgttacattccgattcta

SEQ ID NO: 37174 - DNA, 20 bp, Artificial sequence
  SiRNA target sequence
ctgttacattccgattctac

SEQ ID NO: 37175 - DNA, 20 bp, Artificial sequence
  SiRNA target sequence
tgttacattccgattctact

SEQ ID NO: 37176 - DNA, 20 bp, Artificial sequence
  SiRNA target sequence
gttacattccgattctactt

SEQ ID NO: 37177 - DNA, 20 bp, Artificial sequence
  SiRNA target sequence
ttacattccgattctacttc

SEQ ID NO: 37178 - DNA, 20 bp, Artificial sequence
  SiRNA target sequence
tacattccgattctacttca

SEQ ID NO: 37179 - DNA, 20 bp, Artificial sequence
  SiRNA target sequence
acattccgattctacttcag

SEQ ID NO: 37180 - DNA, 20 bp, Artificial sequence
  SiRNA target sequence
cattccgattctacttcaga

SEQ ID NO: 37181 - DNA, 20 bp, Artificial sequence
  SiRNA target sequence
attccgattctacttcagaa

SEQ ID NO: 37182 - DNA, 20 bp, Artificial sequence
  SiRNA target sequence
ttccgattctacttcagaaa

SEQ ID NO: 37183 - DNA, 20 bp, Artificial sequence
  SiRNA target sequence
tccgattctacttcagaaac

SEQ ID NO: 37184 - DNA, 20 bp, Artificial sequence
  SiRNA target sequence
ccgattctacttcagaaaca

SEQ ID NO: 37185 - DNA, 20 bp, Artificial sequence
  SiRNA target sequence
cgattctacttcagaaacat

SEQ ID NO: 37186 - DNA, 20 bp, Artificial sequence
  SiRNA target sequence
gattctacttcagaaacata

SEQ ID NO: 37187 - DNA, 20 bp, Artificial sequence
  SiRNA target sequence
attctacttcagaaacatat

SEQ ID NO: 37188 - DNA, 20 bp, Artificial sequence
  SiRNA target sequence
ttctacttcagaaacatatt

SEQ ID NO: 37189 - DNA, 20 bp, Artificial sequence
  SiRNA target sequence
tctacttcagaaacatattt

SEQ ID NO: 37190 - DNA, 20 bp, Artificial sequence
  SiRNA target sequence
ctacttcagaaacatatttt

SEQ ID NO: 37191 - DNA, 20 bp, Artificial sequence
  SiRNA target sequence
tacttcagaaacatattttt

SEQ ID NO: 37192 - DNA, 20 bp, Artificial sequence
  SiRNA target sequence
acttcagaaacatatttttc

SEQ ID NO: 37193 - DNA, 20 bp, Artificial sequence
  SiRNA target sequence
cttcagaaacatatttttca

SEQ ID NO: 37194 - DNA, 20 bp, Artificial sequence
  SiRNA target sequence
ttcagaaacatatttttcat

SEQ ID NO: 37195 - DNA, 20 bp, Artificial sequence
  SiRNA target sequence
tcagaaacatatttttcata

SEQ ID NO: 37196 - DNA, 20 bp, Artificial sequence
  SiRNA target sequence
cagaaacatatttttcatat

SEQ ID NO: 37197 - DNA, 20 bp, Artificial sequence
  SiRNA target sequence
agaaacatatttttcatatt

SEQ ID NO: 37198 - DNA, 20 bp, Artificial sequence
  SiRNA target sequence
gaaacatatttttcatattt

SEQ ID NO: 37199 - DNA, 20 bp, Artificial sequence
  SiRNA target sequence
aaacatatttttcatattta

SEQ ID NO: 37200 - DNA, 20 bp, Artificial sequence
  SiRNA target sequence
aacatatttttcatatttaa

SEQ ID NO: 37201 - DNA, 20 bp, Artificial sequence
  SiRNA target sequence
acatatttttcatatttaag

SEQ ID NO: 37202 - DNA, 20 bp, Artificial sequence
  SiRNA target sequence
catatttttcatatttaagc

SEQ ID NO: 37203 - DNA, 20 bp, Artificial sequence
  SiRNA target sequence
atatttttcatatttaagcg

SEQ ID NO: 37204 - DNA, 20 bp, Artificial sequence
  SiRNA target sequence
tatttttcatatttaagcga

SEQ ID NO: 37205 - DNA, 20 bp, Artificial sequence
  SiRNA target sequence
atttttcatatttaagcgat

SEQ ID NO: 37206 - DNA, 20 bp, Artificial sequence
  SiRNA target sequence
tttttcatatttaagcgatt

SEQ ID NO: 37207 - DNA, 20 bp, Artificial sequence
  SiRNA target sequence
ttttcatatttaagcgattc

SEQ ID NO: 37208 - DNA, 20 bp, Artificial sequence
  SiRNA target sequence
tttcatatttaagcgattct

SEQ ID NO: 37209 - DNA, 20 bp, Artificial sequence
  SiRNA target sequence
ttcatatttaagcgattctt

SEQ ID NO: 37210 - DNA, 20 bp, Artificial sequence
  SiRNA target sequence
tcatatttaagcgattcttc

SEQ ID NO: 37211 - DNA, 20 bp, Artificial sequence
  SiRNA target sequence
catatttaagcgattcttct

SEQ ID NO: 37212 - DNA, 20 bp, Artificial sequence
  SiRNA target sequence
atatttaagcgattcttctt

SEQ ID NO: 37213 - DNA, 20 bp, Artificial sequence
  SiRNA target sequence
tatttaagcgattcttcttc

SEQ ID NO: 37214 - DNA, 20 bp, Artificial sequence
  SiRNA target sequence
atttaagcgattcttcttct

SEQ ID NO: 37215 - DNA, 20 bp, Artificial sequence
  SiRNA target sequence
tttaagcgattcttcttctt

SEQ ID NO: 37216 - DNA, 20 bp, Artificial sequence
  SiRNA target sequence
ttaagcgattcttcttcttc

SEQ ID NO: 37217 - DNA, 20 bp, Artificial sequence
  SiRNA target sequence
taagcgattcttcttcttct

SEQ ID NO: 37218 - DNA, 20 bp, Artificial sequence
  SiRNA target sequence
aagcgattcttcttcttctg

SEQ ID NO: 37219 - DNA, 20 bp, Artificial sequence
  SiRNA target sequence
agcgattcttcttcttctgt

SEQ ID NO: 37220 - DNA, 20 bp, Artificial sequence
  SiRNA target sequence
gcgattcttcttcttctgtt

SEQ ID NO: 37221 - DNA, 20 bp, Artificial sequence
  SiRNA target sequence
cgattcttcttcttctgttt

SEQ ID NO: 37222 - DNA, 20 bp, Artificial sequence
  SiRNA target sequence
gattcttcttcttctgtttt

SEQ ID NO: 37223 - DNA, 20 bp, Artificial sequence
  SiRNA target sequence
attcttcttcttctgtttta

SEQ ID NO: 37224 - DNA, 20 bp, Artificial sequence
  SiRNA target sequence
ttcttcttcttctgttttat

SEQ ID NO: 37225 - DNA, 20 bp, Artificial sequence
  SiRNA target sequence
tcttcttcttctgttttata

SEQ ID NO: 37226 - DNA, 20 bp, Artificial sequence
  SiRNA target sequence
cttcttcttctgttttatat

SEQ ID NO: 37227 - DNA, 20 bp, Artificial sequence
  SiRNA target sequence
ttcttcttctgttttatatg

SEQ ID NO: 37228 - DNA, 20 bp, Artificial sequence
  SiRNA target sequence
tcttcttctgttttatatgc

SEQ ID NO: 37229 - DNA, 20 bp, Artificial sequence
  SiRNA target sequence
cttcttctgttttatatgct

SEQ ID NO: 37230 - DNA, 20 bp, Artificial sequence
  SiRNA target sequence
ttcttctgttttatatgcta

SEQ ID NO: 37231 - DNA, 20 bp, Artificial sequence
  SiRNA target sequence
tcttctgttttatatgctag

SEQ ID NO: 37232 - DNA, 20 bp, Artificial sequence
  SiRNA target sequence
cttctgttttatatgctagt

SEQ ID NO: 37233 - DNA, 20 bp, Artificial sequence
  SiRNA target sequence
ttctgttttatatgctagta

SEQ ID NO: 37234 - DNA, 20 bp, Artificial sequence
  SiRNA target sequence
tctgttttatatgctagtat

SEQ ID NO: 37235 - DNA, 20 bp, Artificial sequence
  SiRNA target sequence
ctgttttatatgctagtata

SEQ ID NO: 37236 - DNA, 20 bp, Artificial sequence
  SiRNA target sequence
tgttttatatgctagtatag

SEQ ID NO: 37237 - DNA, 20 bp, Artificial sequence
  SiRNA target sequence
gttttatatgctagtatagt

SEQ ID NO: 37238 - DNA, 20 bp, Artificial sequence
  SiRNA target sequence
ttttatatgctagtatagtc

SEQ ID NO: 37239 - DNA, 20 bp, Artificial sequence
  SiRNA target sequence
tttatatgctagtatagtct

SEQ ID NO: 37240 - DNA, 20 bp, Artificial sequence
  SiRNA target sequence
ttatatgctagtatagtctc

SEQ ID NO: 37241 - DNA, 20 bp, Artificial sequence
  SiRNA target sequence
tatatgctagtatagtctca

SEQ ID NO: 37242 - DNA, 20 bp, Artificial sequence
  SiRNA target sequence
atatgctagtatagtctcat

SEQ ID NO: 37243 - DNA, 20 bp, Artificial sequence
  SiRNA target sequence
tatgctagtatagtctcatg

SEQ ID NO: 37244 - DNA, 20 bp, Artificial sequence
  SiRNA target sequence
atgctagtatagtctcatga

SEQ ID NO: 37245 - DNA, 20 bp, Artificial sequence
  SiRNA target sequence
tgctagtatagtctcatgat

SEQ ID NO: 37246 - DNA, 20 bp, Artificial sequence
  SiRNA target sequence
gctagtatagtctcatgatt

SEQ ID NO: 37247 - DNA, 20 bp, Artificial sequence
  SiRNA target sequence
ctagtatagtctcatgatta

SEQ ID NO: 37248 - DNA, 20 bp, Artificial sequence
  SiRNA target sequence
tagtatagtctcatgattaa

SEQ ID NO: 37249 - DNA, 20 bp, Artificial sequence
  SiRNA target sequence
agtatagtctcatgattaat

SEQ ID NO: 37250 - DNA, 20 bp, Artificial sequence
  SiRNA target sequence
gtatagtctcatgattaatt

SEQ ID NO: 37251 - DNA, 20 bp, Artificial sequence
  SiRNA target sequence
tatagtctcatgattaatta

SEQ ID NO: 37252 - DNA, 20 bp, Artificial sequence
  SiRNA target sequence
atagtctcatgattaattaa

SEQ ID NO: 37253 - DNA, 20 bp, Artificial sequence
  SiRNA target sequence
tagtctcatgattaattaaa

SEQ ID NO: 37254 - DNA, 20 bp, Artificial sequence
  SiRNA target sequence
agtctcatgattaattaaag

SEQ ID NO: 37255 - DNA, 20 bp, Artificial sequence
  SiRNA target sequence
gtctcatgattaattaaaga

SEQ ID NO: 37256 - DNA, 20 bp, Artificial sequence
  SiRNA target sequence
tctcatgattaattaaagaa

SEQ ID NO: 37257 - DNA, 20 bp, Artificial sequence
  SiRNA target sequence
ctcatgattaattaaagaat

SEQ ID NO: 37258 - DNA, 20 bp, Artificial sequence
  SiRNA target sequence
tcatgattaattaaagaatc

SEQ ID NO: 37259 - DNA, 20 bp, Artificial sequence
  SiRNA target sequence
catgattaattaaagaatca

SEQ ID NO: 37260 - DNA, 20 bp, Artificial sequence
  SiRNA target sequence
atgattaattaaagaatcat

SEQ ID NO: 37261 - DNA, 20 bp, Artificial sequence
  SiRNA target sequence
tgattaattaaagaatcatg

SEQ ID NO: 37262 - DNA, 20 bp, Artificial sequence
  SiRNA target sequence
gattaattaaagaatcatgt

SEQ ID NO: 37263 - DNA, 20 bp, Artificial sequence
  SiRNA target sequence
attaattaaagaatcatgta

SEQ ID NO: 37264 - DNA, 20 bp, Artificial sequence
  SiRNA target sequence
ttaattaaagaatcatgtaa

SEQ ID NO: 37265 - DNA, 20 bp, Artificial sequence
  SiRNA target sequence
taattaaagaatcatgtaag

SEQ ID NO: 37266 - DNA, 20 bp, Artificial sequence
  SiRNA target sequence
aattaaagaatcatgtaagt

SEQ ID NO: 37267 - DNA, 20 bp, Artificial sequence
  SiRNA target sequence
attaaagaatcatgtaagtg

SEQ ID NO: 37268 - DNA, 20 bp, Artificial sequence
  SiRNA target sequence
ttaaagaatcatgtaagtga

SEQ ID NO: 37269 - DNA, 20 bp, Artificial sequence
  SiRNA target sequence
taaagaatcatgtaagtgat

SEQ ID NO: 37270 - DNA, 20 bp, Artificial sequence
  SiRNA target sequence
aaagaatcatgtaagtgatt

SEQ ID NO: 37271 - DNA, 20 bp, Artificial sequence
  SiRNA target sequence
aagaatcatgtaagtgattt

SEQ ID NO: 37272 - DNA, 20 bp, Artificial sequence
  SiRNA target sequence
agaatcatgtaagtgatttg

SEQ ID NO: 37273 - DNA, 20 bp, Artificial sequence
  SiRNA target sequence
gaatcatgtaagtgatttga

SEQ ID NO: 37274 - DNA, 20 bp, Artificial sequence
  SiRNA target sequence
aatcatgtaagtgatttgag

SEQ ID NO: 37275 - DNA, 20 bp, Artificial sequence
  SiRNA target sequence
atcatgtaagtgatttgagc

SEQ ID NO: 37276 - DNA, 20 bp, Artificial sequence
  SiRNA target sequence
tcatgtaagtgatttgagca

SEQ ID NO: 37277 - DNA, 20 bp, Artificial sequence
  SiRNA target sequence
catgtaagtgatttgagcat

SEQ ID NO: 37278 - DNA, 20 bp, Artificial sequence
  SiRNA target sequence
atgtaagtgatttgagcatc

SEQ ID NO: 37279 - DNA, 20 bp, Artificial sequence
  SiRNA target sequence
tgtaagtgatttgagcatct

SEQ ID NO: 37280 - DNA, 20 bp, Artificial sequence
  SiRNA target sequence
gtaagtgatttgagcatctt

SEQ ID NO: 37281 - DNA, 20 bp, Artificial sequence
  SiRNA target sequence
taagtgatttgagcatcttt

SEQ ID NO: 37282 - DNA, 20 bp, Artificial sequence
  SiRNA target sequence
aagtgatttgagcatctttg

SEQ ID NO: 37283 - DNA, 20 bp, Artificial sequence
  SiRNA target sequence
agtgatttgagcatctttgt

SEQ ID NO: 37284 - DNA, 20 bp, Artificial sequence
  SiRNA target sequence
gtgatttgagcatctttgtt

SEQ ID NO: 37285 - DNA, 20 bp, Artificial sequence
  SiRNA target sequence
tgatttgagcatctttgttg

SEQ ID NO: 37286 - DNA, 20 bp, Artificial sequence
  SiRNA target sequence
gatttgagcatctttgttgt

SEQ ID NO: 37287 - DNA, 20 bp, Artificial sequence
  SiRNA target sequence
atttgagcatctttgttgtg

SEQ ID NO: 37288 - DNA, 20 bp, Artificial sequence
  SiRNA target sequence
tttgagcatctttgttgtgc

SEQ ID NO: 37289 - DNA, 20 bp, Artificial sequence
  SiRNA target sequence
ttgagcatctttgttgtgcg

SEQ ID NO: 37290 - DNA, 20 bp, Artificial sequence
  SiRNA target sequence
tgagcatctttgttgtgcgc

SEQ ID NO: 37291 - DNA, 20 bp, Artificial sequence
  SiRNA target sequence
gagcatctttgttgtgcgca

SEQ ID NO: 37292 - DNA, 20 bp, Artificial sequence
  SiRNA target sequence
agcatctttgttgtgcgcaa

SEQ ID NO: 37293 - DNA, 20 bp, Artificial sequence
  SiRNA target sequence
gcatctttgttgtgcgcaat

SEQ ID NO: 37294 - DNA, 20 bp, Artificial sequence
  SiRNA target sequence
catctttgttgtgcgcaatt

SEQ ID NO: 37295 - DNA, 20 bp, Artificial sequence
  SiRNA target sequence
atctttgttgtgcgcaatta

SEQ ID NO: 37296 - DNA, 20 bp, Artificial sequence
  SiRNA target sequence
tctttgttgtgcgcaattat

SEQ ID NO: 37297 - DNA, 20 bp, Artificial sequence
  SiRNA target sequence
ctttgttgtgcgcaattata

SEQ ID NO: 37298 - DNA, 20 bp, Artificial sequence
  SiRNA target sequence
tttgttgtgcgcaattatat

SEQ ID NO: 37299 - DNA, 20 bp, Artificial sequence
  SiRNA target sequence
ttgttgtgcgcaattatatt

SEQ ID NO: 37300 - DNA, 20 bp, Artificial sequence
  SiRNA target sequence
tgttgtgcgcaattatattc

SEQ ID NO: 37301 - DNA, 20 bp, Artificial sequence
  SiRNA target sequence
gttgtgcgcaattatattct

SEQ ID NO: 37302 - DNA, 20 bp, Artificial sequence
  SiRNA target sequence
ttgtgcgcaattatattctt

SEQ ID NO: 37303 - DNA, 20 bp, Artificial sequence
  SiRNA target sequence
tgtgcgcaattatattcttt

SEQ ID NO: 37304 - DNA, 20 bp, Artificial sequence
  SiRNA target sequence
gtgcgcaattatattctttt

SEQ ID NO: 37305 - DNA, 20 bp, Artificial sequence
  SiRNA target sequence
tgcgcaattatattcttttc

SEQ ID NO: 37306 - DNA, 20 bp, Artificial sequence
  SiRNA target sequence
gcgcaattatattcttttct

SEQ ID NO: 37307 - DNA, 20 bp, Artificial sequence
  SiRNA target sequence
cgcaattatattcttttctt

SEQ ID NO: 37308 - DNA, 20 bp, Artificial sequence
  SiRNA target sequence
gcaattatattcttttctta

SEQ ID NO: 37309 - DNA, 20 bp, Artificial sequence
  SiRNA target sequence
caattatattcttttcttat

SEQ ID NO: 37310 - DNA, 20 bp, Artificial sequence
  SiRNA target sequence
aattatattcttttcttatt

SEQ ID NO: 37311 - DNA, 20 bp, Artificial sequence
  SiRNA target sequence
attatattcttttcttattc

SEQ ID NO: 37312 - DNA, 20 bp, Artificial sequence
  SiRNA target sequence
ttatattcttttcttattcc

SEQ ID NO: 37313 - DNA, 20 bp, Artificial sequence
  SiRNA target sequence
tatattcttttcttattcct

SEQ ID NO: 37314 - DNA, 20 bp, Artificial sequence
  SiRNA target sequence
atattcttttcttattcctg

SEQ ID NO: 37315 - DNA, 20 bp, Artificial sequence
  SiRNA target sequence
tattcttttcttattcctgt

SEQ ID NO: 37316 - DNA, 20 bp, Artificial sequence
  SiRNA target sequence
attcttttcttattcctgta

SEQ ID NO: 37317 - DNA, 20 bp, Artificial sequence
  SiRNA target sequence
ttcttttcttattcctgtac

SEQ ID NO: 37318 - DNA, 20 bp, Artificial sequence
  SiRNA target sequence
tcttttcttattcctgtacg

SEQ ID NO: 37319 - DNA, 20 bp, Artificial sequence
  SiRNA target sequence
cttttcttattcctgtacgc

SEQ ID NO: 37320 - DNA, 20 bp, Artificial sequence
  SiRNA target sequence
ttttcttattcctgtacgcc

SEQ ID NO: 37321 - DNA, 20 bp, Artificial sequence
  SiRNA target sequence
tttcttattcctgtacgcca

SEQ ID NO: 37322 - DNA, 20 bp, Artificial sequence
  SiRNA target sequence
ttcttattcctgtacgccaa

SEQ ID NO: 37323 - DNA, 20 bp, Artificial sequence
  SiRNA target sequence
tcttattcctgtacgccaat

SEQ ID NO: 37324 - DNA, 20 bp, Artificial sequence
  SiRNA target sequence
cttattcctgtacgccaatg

SEQ ID NO: 37325 - DNA, 20 bp, Artificial sequence
  SiRNA target sequence
ttattcctgtacgccaatga

SEQ ID NO: 37326 - DNA, 20 bp, Artificial sequence
  SiRNA target sequence
tattcctgtacgccaatgaa

SEQ ID NO: 37327 - DNA, 20 bp, Artificial sequence
  SiRNA target sequence
attcctgtacgccaatgaac

SEQ ID NO: 37328 - DNA, 20 bp, Artificial sequence
  SiRNA target sequence
ttcctgtacgccaatgaact

SEQ ID NO: 37329 - DNA, 20 bp, Artificial sequence
  SiRNA target sequence
tcctgtacgccaatgaacta

SEQ ID NO: 37330 - DNA, 20 bp, Artificial sequence
  SiRNA target sequence
cctgtacgccaatgaactat

SEQ ID NO: 37331 - DNA, 20 bp, Artificial sequence
  SiRNA target sequence
ctgtacgccaatgaactatt

SEQ ID NO: 37332 - DNA, 20 bp, Artificial sequence
  SiRNA target sequence
tgtacgccaatgaactattt

SEQ ID NO: 37333 - DNA, 20 bp, Artificial sequence
  SiRNA target sequence
gtacgccaatgaactatttt

SEQ ID NO: 37334 - DNA, 20 bp, Artificial sequence
  SiRNA target sequence
tacgccaatgaactattttc

SEQ ID NO: 37335 - DNA, 20 bp, Artificial sequence
  SiRNA target sequence
acgccaatgaactattttcg

SEQ ID NO: 37336 - DNA, 20 bp, Artificial sequence
  SiRNA target sequence
cgccaatgaactattttcgc

SEQ ID NO: 37337 - DNA, 20 bp, Artificial sequence
  SiRNA target sequence
gccaatgaactattttcgca

SEQ ID NO: 37338 - DNA, 20 bp, Artificial sequence
  SiRNA target sequence
ccaatgaactattttcgcag

SEQ ID NO: 37339 - DNA, 20 bp, Artificial sequence
  SiRNA target sequence
caatgaactattttcgcagt

SEQ ID NO: 37340 - DNA, 20 bp, Artificial sequence
  SiRNA target sequence
aatgaactattttcgcagtt

SEQ ID NO: 37341 - DNA, 20 bp, Artificial sequence
  SiRNA target sequence
atgaactattttcgcagttg

SEQ ID NO: 37342 - DNA, 20 bp, Artificial sequence
  SiRNA target sequence
tgaactattttcgcagttgc

SEQ ID NO: 37343 - DNA, 20 bp, Artificial sequence
  SiRNA target sequence
gaactattttcgcagttgca

SEQ ID NO: 37344 - DNA, 20 bp, Artificial sequence
  SiRNA target sequence
aactattttcgcagttgcaa

SEQ ID NO: 37345 - DNA, 20 bp, Artificial sequence
  SiRNA target sequence
actattttcgcagttgcaag

SEQ ID NO: 37346 - DNA, 20 bp, Artificial sequence
  SiRNA target sequence
ctattttcgcagttgcaagg

SEQ ID NO: 37347 - DNA, 20 bp, Artificial sequence
  SiRNA target sequence
tattttcgcagttgcaagga

SEQ ID NO: 37348 - DNA, 20 bp, Artificial sequence
  SiRNA target sequence
attttcgcagttgcaaggat

SEQ ID NO: 37349 - DNA, 20 bp, Artificial sequence
  SiRNA target sequence
ttttcgcagttgcaaggatg

SEQ ID NO: 37350 - DNA, 20 bp, Artificial sequence
  SiRNA target sequence
tttcgcagttgcaaggatgt

SEQ ID NO: 37351 - DNA, 20 bp, Artificial sequence
  SiRNA target sequence
ttcgcagttgcaaggatgta

SEQ ID NO: 37352 - DNA, 20 bp, Artificial sequence
  SiRNA target sequence
tcgcagttgcaaggatgtaa

SEQ ID NO: 37353 - DNA, 20 bp, Artificial sequence
  SiRNA target sequence
cgcagttgcaaggatgtaaa

SEQ ID NO: 37354 - DNA, 20 bp, Artificial sequence
  SiRNA target sequence
gcagttgcaaggatgtaaac

SEQ ID NO: 37355 - DNA, 20 bp, Artificial sequence
  SiRNA target sequence
cagttgcaaggatgtaaact

SEQ ID NO: 37356 - DNA, 20 bp, Artificial sequence
  SiRNA target sequence
agttgcaaggatgtaaacta

SEQ ID NO: 37357 - DNA, 20 bp, Artificial sequence
  SiRNA target sequence
gttgcaaggatgtaaactaa

SEQ ID NO: 37358 - DNA, 20 bp, Artificial sequence
  SiRNA target sequence
ttgcaaggatgtaaactaat

SEQ ID NO: 37359 - DNA, 20 bp, Artificial sequence
  SiRNA target sequence
tgcaaggatgtaaactaata

SEQ ID NO: 37360 - DNA, 20 bp, Artificial sequence
  SiRNA target sequence
gcaaggatgtaaactaataa

SEQ ID NO: 37361 - DNA, 20 bp, Artificial sequence
  SiRNA target sequence
caaggatgtaaactaataat

SEQ ID NO: 37362 - DNA, 20 bp, Artificial sequence
  SiRNA target sequence
aaggatgtaaactaataatg

SEQ ID NO: 37363 - DNA, 20 bp, Artificial sequence
  SiRNA target sequence
aggatgtaaactaataatgt

SEQ ID NO: 37364 - DNA, 20 bp, Artificial sequence
  SiRNA target sequence
ggatgtaaactaataatgtg

SEQ ID NO: 37365 - DNA, 20 bp, Artificial sequence
  SiRNA target sequence
gatgtaaactaataatgtga

SEQ ID NO: 37366 - DNA, 20 bp, Artificial sequence
  SiRNA target sequence
atgtaaactaataatgtgat

SEQ ID NO: 37367 - DNA, 20 bp, Artificial sequence
  SiRNA target sequence
tgtaaactaataatgtgatt

SEQ ID NO: 37368 - DNA, 20 bp, Artificial sequence
  SiRNA target sequence
gtaaactaataatgtgatta

SEQ ID NO: 37369 - DNA, 20 bp, Artificial sequence
  SiRNA target sequence
taaactaataatgtgattaa

SEQ ID NO: 37370 - DNA, 20 bp, Artificial sequence
  SiRNA target sequence
aaactaataatgtgattaaa

SEQ ID NO: 37371 - DNA, 20 bp, Artificial sequence
  SiRNA target sequence
aactaataatgtgattaaaa

SEQ ID NO: 37372 - DNA, 20 bp, Artificial sequence
  SiRNA target sequence
actaataatgtgattaaaat

SEQ ID NO: 37373 - DNA, 20 bp, Artificial sequence
  SiRNA target sequence
ctaataatgtgattaaaata

SEQ ID NO: 37374 - DNA, 20 bp, Artificial sequence
  SiRNA target sequence
taataatgtgattaaaataa

SEQ ID NO: 37375 - DNA, 20 bp, Artificial sequence
  SiRNA target sequence
aataatgtgattaaaataat

SEQ ID NO: 37376 - DNA, 20 bp, Artificial sequence
  SiRNA target sequence
ataatgtgattaaaataata

SEQ ID NO: 37377 - DNA, 20 bp, Artificial sequence
  SiRNA target sequence
taatgtgattaaaataataa

SEQ ID NO: 37378 - DNA, 20 bp, Artificial sequence
  SiRNA target sequence
aatgtgattaaaataataaa

SEQ ID NO: 37379 - DNA, 20 bp, Artificial sequence
  SiRNA target sequence
atgtgattaaaataataaac

SEQ ID NO: 37380 - DNA, 20 bp, Artificial sequence
  SiRNA target sequence
tgtgattaaaataataaaca

SEQ ID NO: 37381 - DNA, 20 bp, Artificial sequence
  SiRNA target sequence
gtgattaaaataataaacat

SEQ ID NO: 37382 - DNA, 20 bp, Artificial sequence
  SiRNA target sequence
tgattaaaataataaacata

SEQ ID NO: 37383 - DNA, 20 bp, Artificial sequence
  SiRNA target sequence
gattaaaataataaacatat

SEQ ID NO: 37384 - DNA, 20 bp, Artificial sequence
  SiRNA target sequence
attaaaataataaacatatt

SEQ ID NO: 37385 - DNA, 20 bp, Artificial sequence
  SiRNA target sequence
ttaaaataataaacatattt

SEQ ID NO: 37386 - DNA, 20 bp, Artificial sequence
  SiRNA target sequence
taaaataataaacatatttg

SEQ ID NO: 37387 - DNA, 20 bp, Artificial sequence
  SiRNA target sequence
aaaataataaacatatttgt

SEQ ID NO: 37388 - DNA, 20 bp, Artificial sequence
  SiRNA target sequence
aaataataaacatatttgtc

SEQ ID NO: 37389 - DNA, 20 bp, Artificial sequence
  SiRNA target sequence
aataataaacatatttgtca

SEQ ID NO: 37390 - DNA, 20 bp, Artificial sequence
  SiRNA target sequence
ataataaacatatttgtcaa

SEQ ID NO: 37391 - DNA, 20 bp, Artificial sequence
  SiRNA target sequence
taataaacatatttgtcaac

SEQ ID NO: 37392 - DNA, 20 bp, Artificial sequence
  SiRNA target sequence
aataaacatatttgtcaacc

SEQ ID NO: 37393 - DNA, 20 bp, Artificial sequence
  SiRNA target sequence
ataaacatatttgtcaaccc

SEQ ID NO: 37394 - DNA, 20 bp, Artificial sequence
  SiRNA target sequence
taaacatatttgtcaaccct

SEQ ID NO: 37395 - DNA, 20 bp, Artificial sequence
  SiRNA target sequence
aaacatatttgtcaacccta

SEQ ID NO: 37396 - DNA, 20 bp, Artificial sequence
  SiRNA target sequence
aacatatttgtcaaccctaa

SEQ ID NO: 37397 - DNA, 20 bp, Artificial sequence
  SiRNA target sequence
acatatttgtcaaccctaaa

SEQ ID NO: 37398 - DNA, 20 bp, Artificial sequence
  SiRNA target sequence
catatttgtcaaccctaaat

SEQ ID NO: 37399 - DNA, 20 bp, Artificial sequence
  SiRNA target sequence
atatttgtcaaccctaaatt

SEQ ID NO: 37400 - DNA, 20 bp, Artificial sequence
  SiRNA target sequence
tatttgtcaaccctaaattt

SEQ ID NO: 37401 - DNA, 20 bp, Artificial sequence
  SiRNA target sequence
atttgtcaaccctaaatttg

SEQ ID NO: 37402 - DNA, 20 bp, Artificial sequence
  SiRNA target sequence
tttgtcaaccctaaatttgt

SEQ ID NO: 37403 - DNA, 20 bp, Artificial sequence
  SiRNA target sequence
ttgtcaaccctaaatttgta

SEQ ID NO: 37404 - DNA, 20 bp, Artificial sequence
  SiRNA target sequence
tgtcaaccctaaatttgtat

SEQ ID NO: 37405 - DNA, 20 bp, Artificial sequence
  SiRNA target sequence
gtcaaccctaaatttgtata

SEQ ID NO: 37406 - DNA, 20 bp, Artificial sequence
  SiRNA target sequence
tcaaccctaaatttgtataa

SEQ ID NO: 37407 - DNA, 20 bp, Artificial sequence
  SiRNA target sequence
caaccctaaatttgtataaa

SEQ ID NO: 37408 - DNA, 20 bp, Artificial sequence
  SiRNA target sequence
aaccctaaatttgtataaat

SEQ ID NO: 37409 - DNA, 20 bp, Artificial sequence
  SiRNA target sequence
accctaaatttgtataaatt

SEQ ID NO: 37410 - DNA, 20 bp, Artificial sequence
  SiRNA target sequence
ccctaaatttgtataaattg

SEQ ID NO: 37411 - DNA, 20 bp, Artificial sequence
  SiRNA target sequence
cctaaatttgtataaattga

SEQ ID NO: 37412 - DNA, 20 bp, Artificial sequence
  SiRNA target sequence
ctaaatttgtataaattgac

SEQ ID NO: 37413 - DNA, 20 bp, Artificial sequence
  SiRNA target sequence
taaatttgtataaattgacg

SEQ ID NO: 37414 - DNA, 20 bp, Artificial sequence
  SiRNA target sequence
aaatttgtataaattgacga

SEQ ID NO: 37415 - DNA, 20 bp, Artificial sequence
  SiRNA target sequence
aatttgtataaattgacgaa

SEQ ID NO: 37416 - DNA, 20 bp, Artificial sequence
  SiRNA target sequence
atttgtataaattgacgaac

SEQ ID NO: 37417 - DNA, 20 bp, Artificial sequence
  SiRNA target sequence
tttgtataaattgacgaaca

SEQ ID NO: 37418 - DNA, 20 bp, Artificial sequence
  SiRNA target sequence
ttgtataaattgacgaacac

SEQ ID NO: 37419 - DNA, 20 bp, Artificial sequence
  SiRNA target sequence
tgtataaattgacgaacacg

SEQ ID NO: 37420 - DNA, 20 bp, Artificial sequence
  SiRNA target sequence
gtataaattgacgaacacgc

SEQ ID NO: 37421 - DNA, 20 bp, Artificial sequence
  SiRNA target sequence
tataaattgacgaacacgcc

SEQ ID NO: 37422 - DNA, 20 bp, Artificial sequence
  SiRNA target sequence
ataaattgacgaacacgcca

SEQ ID NO: 37423 - DNA, 20 bp, Artificial sequence
  SiRNA target sequence
taaattgacgaacacgccaa

SEQ ID NO: 37424 - DNA, 20 bp, Artificial sequence
  SiRNA target sequence
aaattgacgaacacgccaat

SEQ ID NO: 37425 - DNA, 20 bp, Artificial sequence
  SiRNA target sequence
aattgacgaacacgccaata

SEQ ID NO: 37426 - DNA, 20 bp, Artificial sequence
  SiRNA target sequence
attgacgaacacgccaatat

SEQ ID NO: 37427 - DNA, 20 bp, Artificial sequence
  SiRNA target sequence
ttgacgaacacgccaatata

SEQ ID NO: 37428 - DNA, 20 bp, Artificial sequence
  SiRNA target sequence
tgacgaacacgccaatataa

SEQ ID NO: 37429 - DNA, 20 bp, Artificial sequence
  SiRNA target sequence
gacgaacacgccaatataac

SEQ ID NO: 37430 - DNA, 20 bp, Artificial sequence
  SiRNA target sequence
acgaacacgccaatataact

SEQ ID NO: 37431 - DNA, 20 bp, Artificial sequence
  SiRNA target sequence
cgaacacgccaatataactg

SEQ ID NO: 37432 - DNA, 20 bp, Artificial sequence
  SiRNA target sequence
gaacacgccaatataactgt

SEQ ID NO: 37433 - DNA, 20 bp, Artificial sequence
  SiRNA target sequence
aacacgccaatataactgta

SEQ ID NO: 37434 - DNA, 20 bp, Artificial sequence
  SiRNA target sequence
acacgccaatataactgtaa

SEQ ID NO: 37435 - DNA, 20 bp, Artificial sequence
  SiRNA target sequence
cacgccaatataactgtaaa

SEQ ID NO: 37436 - DNA, 20 bp, Artificial sequence
  SiRNA target sequence
acgccaatataactgtaaaa

SEQ ID NO: 37437 - DNA, 20 bp, Artificial sequence
  SiRNA target sequence
cgccaatataactgtaaaaa

SEQ ID NO: 37438 - DNA, 20 bp, Artificial sequence
  SiRNA target sequence
gccaatataactgtaaaaaa

SEQ ID NO: 37439 - DNA, 20 bp, Artificial sequence
  SiRNA target sequence
ccaatataactgtaaaaaaa

SEQ ID NO: 37440 - DNA, 20 bp, Artificial sequence
  SiRNA target sequence
caatataactgtaaaaaaaa

SEQ ID NO: 37441 - DNA, 20 bp, Artificial sequence
  SiRNA target sequence
aatataactgtaaaaaaaat

SEQ ID NO: 37442 - DNA, 20 bp, Artificial sequence
  SiRNA target sequence
atataactgtaaaaaaaata

SEQ ID NO: 37443 - DNA, 20 bp, Artificial sequence
  SiRNA target sequence
tataactgtaaaaaaaatat

SEQ ID NO: 37444 - DNA, 20 bp, Artificial sequence
  SiRNA target sequence
ataactgtaaaaaaaatatt

SEQ ID NO: 37445 - DNA, 20 bp, Artificial sequence
  SiRNA target sequence
taactgtaaaaaaaatattt

SEQ ID NO: 37446 - DNA, 20 bp, Artificial sequence
  SiRNA target sequence
aactgtaaaaaaaatattta

SEQ ID NO: 37447 - DNA, 20 bp, Artificial sequence
  SiRNA target sequence
actgtaaaaaaaatatttat

SEQ ID NO: 37448 - DNA, 20 bp, Artificial sequence
  SiRNA target sequence
ctgtaaaaaaaatatttatg

SEQ ID NO: 37449 - DNA, 20 bp, Artificial sequence
  SiRNA target sequence
tgtaaaaaaaatatttatga

SEQ ID NO: 37450 - DNA, 20 bp, Artificial sequence
  SiRNA target sequence
gtaaaaaaaatatttatgat

SEQ ID NO: 37451 - DNA, 20 bp, Artificial sequence
  SiRNA target sequence
taaaaaaaatatttatgata

SEQ ID NO: 37452 - DNA, 20 bp, Artificial sequence
  SiRNA target sequence
aaaaaaaatatttatgatat

SEQ ID NO: 37453 - DNA, 20 bp, Artificial sequence
  SiRNA target sequence
aaaaaaatatttatgatatt

SEQ ID NO: 37454 - DNA, 20 bp, Artificial sequence
  SiRNA target sequence
aaaaaatatttatgatatta

SEQ ID NO: 37455 - DNA, 20 bp, Artificial sequence
  SiRNA target sequence
aaaaatatttatgatattaa

SEQ ID NO: 37456 - DNA, 20 bp, Artificial sequence
  SiRNA target sequence
aaaatatttatgatattaac

SEQ ID NO: 37457 - DNA, 20 bp, Artificial sequence
  SiRNA target sequence
aaatatttatgatattaaca

SEQ ID NO: 37458 - DNA, 20 bp, Artificial sequence
  SiRNA target sequence
aatatttatgatattaacaa

SEQ ID NO: 37459 - DNA, 20 bp, Artificial sequence
  SiRNA target sequence
atatttatgatattaacaaa

SEQ ID NO: 37460 - DNA, 20 bp, Artificial sequence
  SiRNA target sequence
tatttatgatattaacaaat

SEQ ID NO: 37461 - DNA, 20 bp, Artificial sequence
  SiRNA target sequence
atttatgatattaacaaata

SEQ ID NO: 37462 - DNA, 20 bp, Artificial sequence
  SiRNA target sequence
tttatgatattaacaaataa

SEQ ID NO: 37463 - DNA, 20 bp, Artificial sequence
  SiRNA target sequence
ttatgatattaacaaataaa

SEQ ID NO: 37464 - DNA, 20 bp, Artificial sequence
  SiRNA target sequence
tatgatattaacaaataaaa

SEQ ID NO: 37465 - DNA, 20 bp, Artificial sequence
  SiRNA target sequence
atgatattaacaaataaaac

SEQ ID NO: 37466 - DNA, 20 bp, Artificial sequence
  SiRNA target sequence
tgatattaacaaataaaact

SEQ ID NO: 37467 - DNA, 20 bp, Artificial sequence
  SiRNA target sequence
gatattaacaaataaaactt

SEQ ID NO: 37468 - DNA, 20 bp, Artificial sequence
  SiRNA target sequence
atattaacaaataaaacttc

SEQ ID NO: 37469 - DNA, 20 bp, Artificial sequence
  SiRNA target sequence
tattaacaaataaaacttcg

SEQ ID NO: 37470 - DNA, 20 bp, Artificial sequence
  SiRNA target sequence
attaacaaataaaacttcga

SEQ ID NO: 37471 - DNA, 20 bp, Artificial sequence
  SiRNA target sequence
ttaacaaataaaacttcgat

SEQ ID NO: 37472 - DNA, 20 bp, Artificial sequence
  SiRNA target sequence
taacaaataaaacttcgatc

SEQ ID NO: 37473 - DNA, 20 bp, Artificial sequence
  SiRNA target sequence
aacaaataaaacttcgatca

SEQ ID NO: 37474 - DNA, 20 bp, Artificial sequence
  SiRNA target sequence
acaaataaaacttcgatcaa

SEQ ID NO: 37475 - DNA, 20 bp, Artificial sequence
  SiRNA target sequence
caaataaaacttcgatcaat

SEQ ID NO: 37476 - DNA, 20 bp, Artificial sequence
  SiRNA target sequence
aaataaaacttcgatcaatt

SEQ ID NO: 37477 - DNA, 20 bp, Artificial sequence
  SiRNA target sequence
aataaaacttcgatcaattc

SEQ ID NO: 37478 - DNA, 20 bp, Artificial sequence
  SiRNA target sequence
ataaaacttcgatcaattca

SEQ ID NO: 37479 - DNA, 20 bp, Artificial sequence
  SiRNA target sequence
taaaacttcgatcaattcac

SEQ ID NO: 37480 - DNA, 20 bp, Artificial sequence
  SiRNA target sequence
aaaacttcgatcaattcact

SEQ ID NO: 37481 - DNA, 20 bp, Artificial sequence
  SiRNA target sequence
aaacttcgatcaattcactt

SEQ ID NO: 37482 - DNA, 20 bp, Artificial sequence
  SiRNA target sequence
aacttcgatcaattcactta

SEQ ID NO: 37483 - DNA, 20 bp, Artificial sequence
  SiRNA target sequence
acttcgatcaattcacttat

SEQ ID NO: 37484 - DNA, 20 bp, Artificial sequence
  SiRNA target sequence
cttcgatcaattcacttatt

SEQ ID NO: 37485 - DNA, 20 bp, Artificial sequence
  SiRNA target sequence
ttcgatcaattcacttattg

SEQ ID NO: 37486 - DNA, 20 bp, Artificial sequence
  SiRNA target sequence
tcgatcaattcacttattgc

SEQ ID NO: 37487 - DNA, 20 bp, Artificial sequence
  SiRNA target sequence
cgatcaattcacttattgct

SEQ ID NO: 37488 - DNA, 20 bp, Artificial sequence
  SiRNA target sequence
gatcaattcacttattgctt

SEQ ID NO: 37489 - DNA, 20 bp, Artificial sequence
  SiRNA target sequence
atcaattcacttattgcttt

SEQ ID NO: 37490 - DNA, 20 bp, Artificial sequence
  SiRNA target sequence
tcaattcacttattgcttta

SEQ ID NO: 37491 - DNA, 20 bp, Artificial sequence
  SiRNA target sequence
caattcacttattgctttac

SEQ ID NO: 37492 - DNA, 20 bp, Artificial sequence
  SiRNA target sequence
aattcacttattgctttact

SEQ ID NO: 37493 - DNA, 20 bp, Artificial sequence
  SiRNA target sequence
attcacttattgctttactt

SEQ ID NO: 37494 - DNA, 20 bp, Artificial sequence
  SiRNA target sequence
ttcacttattgctttacttt

SEQ ID NO: 37495 - DNA, 20 bp, Artificial sequence
  SiRNA target sequence
tcacttattgctttactttc

SEQ ID NO: 37496 - DNA, 20 bp, Artificial sequence
  SiRNA target sequence
cacttattgctttactttct

SEQ ID NO: 37497 - DNA, 20 bp, Artificial sequence
  SiRNA target sequence
acttattgctttactttctc

SEQ ID NO: 37498 - DNA, 20 bp, Artificial sequence
  SiRNA target sequence
cttattgctttactttctcg

SEQ ID NO: 37499 - DNA, 20 bp, Artificial sequence
  SiRNA target sequence
ttattgctttactttctcgg

SEQ ID NO: 37500 - DNA, 20 bp, Artificial sequence
  SiRNA target sequence
tattgctttactttctcggt

SEQ ID NO: 37501 - DNA, 20 bp, Artificial sequence
  SiRNA target sequence
attgctttactttctcggtc

SEQ ID NO: 37502 - DNA, 20 bp, Artificial sequence
  SiRNA target sequence
ttgctttactttctcggtct

SEQ ID NO: 37503 - DNA, 20 bp, Artificial sequence
  SiRNA target sequence
tgctttactttctcggtcta

SEQ ID NO: 37504 - DNA, 20 bp, Artificial sequence
  SiRNA target sequence
gctttactttctcggtctat

SEQ ID NO: 37505 - DNA, 20 bp, Artificial sequence
  SiRNA target sequence
ctttactttctcggtctatt

SEQ ID NO: 37506 - DNA, 20 bp, Artificial sequence
  SiRNA target sequence
tttactttctcggtctatta

SEQ ID NO: 37507 - DNA, 20 bp, Artificial sequence
  SiRNA target sequence
ttactttctcggtctattat

SEQ ID NO: 37508 - DNA, 20 bp, Artificial sequence
  SiRNA target sequence
tactttctcggtctattatt

SEQ ID NO: 37509 - DNA, 20 bp, Artificial sequence
  SiRNA target sequence
actttctcggtctattattg

SEQ ID NO: 37510 - DNA, 20 bp, Artificial sequence
  SiRNA target sequence
ctttctcggtctattattgt

SEQ ID NO: 37511 - DNA, 20 bp, Artificial sequence
  SiRNA target sequence
tttctcggtctattattgtt

SEQ ID NO: 37512 - DNA, 20 bp, Artificial sequence
  SiRNA target sequence
ttctcggtctattattgttt

SEQ ID NO: 37513 - DNA, 20 bp, Artificial sequence
  SiRNA target sequence
tctcggtctattattgtttg

SEQ ID NO: 37514 - DNA, 20 bp, Artificial sequence
  SiRNA target sequence
ctcggtctattattgtttgt

SEQ ID NO: 37515 - DNA, 20 bp, Artificial sequence
  SiRNA target sequence
tcggtctattattgtttgta

SEQ ID NO: 37516 - DNA, 20 bp, Artificial sequence
  SiRNA target sequence
cggtctattattgtttgtat

SEQ ID NO: 37517 - DNA, 20 bp, Artificial sequence
  SiRNA target sequence
ggtctattattgtttgtatt

SEQ ID NO: 37518 - DNA, 20 bp, Artificial sequence
  SiRNA target sequence
gtctattattgtttgtattt

SEQ ID NO: 37519 - DNA, 20 bp, Artificial sequence
  SiRNA target sequence
tctattattgtttgtatttc

SEQ ID NO: 37520 - DNA, 20 bp, Artificial sequence
  SiRNA target sequence
ctattattgtttgtatttca

SEQ ID NO: 37521 - DNA, 20 bp, Artificial sequence
  SiRNA target sequence
tattattgtttgtatttcac

SEQ ID NO: 37522 - DNA, 20 bp, Artificial sequence
  SiRNA target sequence
attattgtttgtatttcacc

SEQ ID NO: 37523 - DNA, 20 bp, Artificial sequence
  SiRNA target sequence
ttattgtttgtatttcaccg

SEQ ID NO: 37524 - DNA, 20 bp, Artificial sequence
  SiRNA target sequence
tattgtttgtatttcaccgc

SEQ ID NO: 37525 - DNA, 20 bp, Artificial sequence
  SiRNA target sequence
attgtttgtatttcaccgca

SEQ ID NO: 37526 - DNA, 20 bp, Artificial sequence
  SiRNA target sequence
ttgtttgtatttcaccgcat

SEQ ID NO: 37527 - DNA, 20 bp, Artificial sequence
  SiRNA target sequence
tgtttgtatttcaccgcatc

SEQ ID NO: 37528 - DNA, 20 bp, Artificial sequence
  SiRNA target sequence
gtttgtatttcaccgcatcc

SEQ ID NO: 37529 - DNA, 20 bp, Artificial sequence
  SiRNA target sequence
tttgtatttcaccgcatcct

SEQ ID NO: 37530 - DNA, 20 bp, Artificial sequence
  SiRNA target sequence
ttgtatttcaccgcatccta

SEQ ID NO: 37531 - DNA, 20 bp, Artificial sequence
  SiRNA target sequence
tgtatttcaccgcatcctat

SEQ ID NO: 37532 - DNA, 20 bp, Artificial sequence
  SiRNA target sequence
gtatttcaccgcatcctatt

SEQ ID NO: 37533 - DNA, 20 bp, Artificial sequence
  SiRNA target sequence
tatttcaccgcatcctattt

SEQ ID NO: 37534 - DNA, 20 bp, Artificial sequence
  SiRNA target sequence
atttcaccgcatcctatttt

SEQ ID NO: 37535 - DNA, 20 bp, Artificial sequence
  SiRNA target sequence
tttcaccgcatcctatttta

SEQ ID NO: 37536 - DNA, 20 bp, Artificial sequence
  SiRNA target sequence
ttcaccgcatcctattttat

SEQ ID NO: 37537 - DNA, 20 bp, Artificial sequence
  SiRNA target sequence
tcaccgcatcctattttatt

SEQ ID NO: 37538 - DNA, 20 bp, Artificial sequence
  SiRNA target sequence
caccgcatcctattttattg

SEQ ID NO: 37539 - DNA, 20 bp, Artificial sequence
  SiRNA target sequence
accgcatcctattttattgt

SEQ ID NO: 37540 - DNA, 20 bp, Artificial sequence
  SiRNA target sequence
ccgcatcctattttattgta

SEQ ID NO: 37541 - DNA, 20 bp, Artificial sequence
  SiRNA target sequence
cgcatcctattttattgtat

SEQ ID NO: 37542 - DNA, 20 bp, Artificial sequence
  SiRNA target sequence
gcatcctattttattgtatc

SEQ ID NO: 37543 - DNA, 20 bp, Artificial sequence
  SiRNA target sequence
catcctattttattgtatct

SEQ ID NO: 37544 - DNA, 20 bp, Artificial sequence
  SiRNA target sequence
atcctattttattgtatcta

SEQ ID NO: 37545 - DNA, 20 bp, Artificial sequence
  SiRNA target sequence
tcctattttattgtatctac

SEQ ID NO: 37546 - DNA, 20 bp, Artificial sequence
  SiRNA target sequence
cctattttattgtatctact

SEQ ID NO: 37547 - DNA, 20 bp, Artificial sequence
  SiRNA target sequence
ctattttattgtatctacta

SEQ ID NO: 37548 - DNA, 20 bp, Artificial sequence
  SiRNA target sequence
tattttattgtatctactaa

SEQ ID NO: 37549 - DNA, 20 bp, Artificial sequence
  SiRNA target sequence
attttattgtatctactaag

SEQ ID NO: 37550 - DNA, 20 bp, Artificial sequence
  SiRNA target sequence
ttttattgtatctactaagt

SEQ ID NO: 37551 - DNA, 20 bp, Artificial sequence
  SiRNA target sequence
tttattgtatctactaagtt

SEQ ID NO: 37552 - DNA, 20 bp, Artificial sequence
  SiRNA target sequence
ttattgtatctactaagttc

SEQ ID NO: 37553 - DNA, 20 bp, Artificial sequence
  SiRNA target sequence
tattgtatctactaagttcc

SEQ ID NO: 37554 - DNA, 20 bp, Artificial sequence
  SiRNA target sequence
attgtatctactaagttcca

SEQ ID NO: 37555 - DNA, 20 bp, Artificial sequence
  SiRNA target sequence
ttgtatctactaagttccat

SEQ ID NO: 37556 - DNA, 20 bp, Artificial sequence
  SiRNA target sequence
tgtatctactaagttccata

SEQ ID NO: 37557 - DNA, 20 bp, Artificial sequence
  SiRNA target sequence
gtatctactaagttccatat

SEQ ID NO: 37558 - DNA, 20 bp, Artificial sequence
  SiRNA target sequence
tatctactaagttccatatt

SEQ ID NO: 37559 - DNA, 20 bp, Artificial sequence
  SiRNA target sequence
atctactaagttccatattt

SEQ ID NO: 37560 - DNA, 20 bp, Artificial sequence
  SiRNA target sequence
tctactaagttccatattta

SEQ ID NO: 37561 - DNA, 20 bp, Artificial sequence
  SiRNA target sequence
ctactaagttccatatttat

SEQ ID NO: 37562 - DNA, 20 bp, Artificial sequence
  SiRNA target sequence
tactaagttccatatttata

SEQ ID NO: 37563 - DNA, 20 bp, Artificial sequence
  SiRNA target sequence
actaagttccatatttataa

SEQ ID NO: 37564 - DNA, 20 bp, Artificial sequence
  SiRNA target sequence
ctaagttccatatttataaa

SEQ ID NO: 37565 - DNA, 20 bp, Artificial sequence
  SiRNA target sequence
taagttccatatttataaaa

SEQ ID NO: 37566 - DNA, 20 bp, Artificial sequence
  SiRNA target sequence
aagttccatatttataaaat

SEQ ID NO: 37567 - DNA, 20 bp, Artificial sequence
  SiRNA target sequence
agttccatatttataaaatt

SEQ ID NO: 37568 - DNA, 20 bp, Artificial sequence
  SiRNA target sequence
gttccatatttataaaattt

SEQ ID NO: 37569 - DNA, 20 bp, Artificial sequence
  SiRNA target sequence
ttccatatttataaaatttt

SEQ ID NO: 37570 - DNA, 20 bp, Artificial sequence
  SiRNA target sequence
tccatatttataaaattttt

SEQ ID NO: 37571 - DNA, 20 bp, Artificial sequence
  SiRNA target sequence
ccatatttataaaattttta

SEQ ID NO: 37572 - DNA, 20 bp, Artificial sequence
  SiRNA target sequence
catatttataaaatttttaa

SEQ ID NO: 37573 - DNA, 20 bp, Artificial sequence
  SiRNA target sequence
atatttataaaatttttaaa

SEQ ID NO: 37574 - DNA, 20 bp, Artificial sequence
  SiRNA target sequence
tatttataaaatttttaaat

SEQ ID NO: 37575 - DNA, 20 bp, Artificial sequence
  SiRNA target sequence
atttataaaatttttaaatg

SEQ ID NO: 37576 - DNA, 20 bp, Artificial sequence
  SiRNA target sequence
tttataaaatttttaaatga

SEQ ID NO: 37577 - DNA, 20 bp, Artificial sequence
  SiRNA target sequence
ttataaaatttttaaatgaa

SEQ ID NO: 37578 - DNA, 20 bp, Artificial sequence
  SiRNA target sequence
tataaaatttttaaatgaat

SEQ ID NO: 37579 - DNA, 20 bp, Artificial sequence
  SiRNA target sequence
ataaaatttttaaatgaatt

SEQ ID NO: 37580 - DNA, 20 bp, Artificial sequence
  SiRNA target sequence
taaaatttttaaatgaattt

SEQ ID NO: 37581 - DNA, 20 bp, Artificial sequence
  SiRNA target sequence
aaaatttttaaatgaatttt

SEQ ID NO: 37582 - DNA, 20 bp, Artificial sequence
  SiRNA target sequence
aaatttttaaatgaattttt

SEQ ID NO: 37583 - DNA, 20 bp, Artificial sequence
  SiRNA target sequence
aatttttaaatgaatttttt

SEQ ID NO: 37584 - DNA, 20 bp, Artificial sequence
  SiRNA target sequence
atttttaaatgaattttttc

SEQ ID NO: 37585 - DNA, 20 bp, Artificial sequence
  SiRNA target sequence
tttttaaatgaattttttcc

SEQ ID NO: 37586 - DNA, 20 bp, Artificial sequence
  SiRNA target sequence
ttttaaatgaattttttcct

SEQ ID NO: 37587 - DNA, 20 bp, Artificial sequence
  SiRNA target sequence
tttaaatgaattttttcctg

SEQ ID NO: 37588 - DNA, 20 bp, Artificial sequence
  SiRNA target sequence
ttaaatgaattttttcctgt

SEQ ID NO: 37589 - DNA, 20 bp, Artificial sequence
  SiRNA target sequence
taaatgaattttttcctgtc

SEQ ID NO: 37590 - DNA, 20 bp, Artificial sequence
  SiRNA target sequence
aaatgaattttttcctgtca

SEQ ID NO: 37591 - DNA, 20 bp, Artificial sequence
  SiRNA target sequence
aatgaattttttcctgtcag

SEQ ID NO: 37592 - DNA, 20 bp, Artificial sequence
  SiRNA target sequence
atgaattttttcctgtcagt

SEQ ID NO: 37593 - DNA, 20 bp, Artificial sequence
  SiRNA target sequence
tgaattttttcctgtcagtc

SEQ ID NO: 37594 - DNA, 20 bp, Artificial sequence
  SiRNA target sequence
gaattttttcctgtcagtct

SEQ ID NO: 37595 - DNA, 20 bp, Artificial sequence
  SiRNA target sequence
aattttttcctgtcagtctg

SEQ ID NO: 37596 - DNA, 20 bp, Artificial sequence
  SiRNA target sequence
attttttcctgtcagtctga

SEQ ID NO: 37597 - DNA, 20 bp, Artificial sequence
  SiRNA target sequence
ttttttcctgtcagtctgaa

SEQ ID NO: 37598 - DNA, 20 bp, Artificial sequence
  SiRNA target sequence
tttttcctgtcagtctgaat

SEQ ID NO: 37599 - DNA, 20 bp, Artificial sequence
  SiRNA target sequence
ttttcctgtcagtctgaata

SEQ ID NO: 37600 - DNA, 20 bp, Artificial sequence
  SiRNA target sequence
tttcctgtcagtctgaatac

SEQ ID NO: 37601 - DNA, 20 bp, Artificial sequence
  SiRNA target sequence
ttcctgtcagtctgaataca

SEQ ID NO: 37602 - DNA, 20 bp, Artificial sequence
  SiRNA target sequence
tcctgtcagtctgaatacat

SEQ ID NO: 37603 - DNA, 20 bp, Artificial sequence
  SiRNA target sequence
cctgtcagtctgaatacatg

SEQ ID NO: 37604 - DNA, 20 bp, Artificial sequence
  SiRNA target sequence
ctgtcagtctgaatacatgt

SEQ ID NO: 37605 - DNA, 20 bp, Artificial sequence
  SiRNA target sequence
tgtcagtctgaatacatgtt

SEQ ID NO: 37606 - DNA, 20 bp, Artificial sequence
  SiRNA target sequence
gtcagtctgaatacatgttg

SEQ ID NO: 37607 - DNA, 20 bp, Artificial sequence
  SiRNA target sequence
tcagtctgaatacatgttga

SEQ ID NO: 37608 - DNA, 20 bp, Artificial sequence
  SiRNA target sequence
cagtctgaatacatgttgaa

SEQ ID NO: 37609 - DNA, 20 bp, Artificial sequence
  SiRNA target sequence
agtctgaatacatgttgaac

SEQ ID NO: 37610 - DNA, 20 bp, Artificial sequence
  SiRNA target sequence
gtctgaatacatgttgaacg

SEQ ID NO: 37611 - DNA, 20 bp, Artificial sequence
  SiRNA target sequence
tctgaatacatgttgaacgg

SEQ ID NO: 37612 - DNA, 20 bp, Artificial sequence
  SiRNA target sequence
ctgaatacatgttgaacggg

SEQ ID NO: 37613 - DNA, 20 bp, Artificial sequence
  SiRNA target sequence
tgaatacatgttgaacgggt

SEQ ID NO: 37614 - DNA, 20 bp, Artificial sequence
  SiRNA target sequence
gaatacatgttgaacgggtg

SEQ ID NO: 37615 - DNA, 20 bp, Artificial sequence
  SiRNA target sequence
aatacatgttgaacgggtgt

SEQ ID NO: 37616 - DNA, 20 bp, Artificial sequence
  SiRNA target sequence
atacatgttgaacgggtgta

SEQ ID NO: 37617 - DNA, 20 bp, Artificial sequence
  SiRNA target sequence
tacatgttgaacgggtgtaa

SEQ ID NO: 37618 - DNA, 20 bp, Artificial sequence
  SiRNA target sequence
acatgttgaacgggtgtaac

SEQ ID NO: 37619 - DNA, 20 bp, Artificial sequence
  SiRNA target sequence
catgttgaacgggtgtaaca

SEQ ID NO: 37620 - DNA, 20 bp, Artificial sequence
  SiRNA target sequence
atgttgaacgggtgtaacaa

SEQ ID NO: 37621 - DNA, 20 bp, Artificial sequence
  SiRNA target sequence
tgttgaacgggtgtaacaaa

SEQ ID NO: 37622 - DNA, 20 bp, Artificial sequence
  SiRNA target sequence
gttgaacgggtgtaacaaat

SEQ ID NO: 37623 - DNA, 20 bp, Artificial sequence
  SiRNA target sequence
ttgaacgggtgtaacaaata

SEQ ID NO: 37624 - DNA, 20 bp, Artificial sequence
  SiRNA target sequence
tgaacgggtgtaacaaatat

SEQ ID NO: 37625 - DNA, 20 bp, Artificial sequence
  SiRNA target sequence
gaacgggtgtaacaaatata

SEQ ID NO: 37626 - DNA, 20 bp, Artificial sequence
  SiRNA target sequence
aacgggtgtaacaaatataa

SEQ ID NO: 37627 - DNA, 20 bp, Artificial sequence
  SiRNA target sequence
acgggtgtaacaaatataaa

SEQ ID NO: 37628 - DNA, 20 bp, Artificial sequence
  SiRNA target sequence
cgggtgtaacaaatataaaa

SEQ ID NO: 37629 - DNA, 20 bp, Artificial sequence
  SiRNA target sequence
gggtgtaacaaatataaaat

SEQ ID NO: 37630 - DNA, 20 bp, Artificial sequence
  SiRNA target sequence
ggtgtaacaaatataaaatt

SEQ ID NO: 37631 - DNA, 20 bp, Artificial sequence
  SiRNA target sequence
gtgtaacaaatataaaattg

SEQ ID NO: 37632 - DNA, 20 bp, Artificial sequence
  SiRNA target sequence
tgtaacaaatataaaattgt

SEQ ID NO: 37633 - DNA, 20 bp, Artificial sequence
  SiRNA target sequence
gtaacaaatataaaattgtt

SEQ ID NO: 37634 - DNA, 20 bp, Artificial sequence
  SiRNA target sequence
taacaaatataaaattgtta

SEQ ID NO: 37635 - DNA, 20 bp, Artificial sequence
  SiRNA target sequence
aacaaatataaaattgttaa

SEQ ID NO: 37636 - DNA, 20 bp, Artificial sequence
  SiRNA target sequence
acaaatataaaattgttaag

SEQ ID NO: 37637 - DNA, 20 bp, Artificial sequence
  SiRNA target sequence
caaatataaaattgttaagt

SEQ ID NO: 37638 - DNA, 20 bp, Artificial sequence
  SiRNA target sequence
aaatataaaattgttaagtt

SEQ ID NO: 37639 - DNA, 20 bp, Artificial sequence
  SiRNA target sequence
aatataaaattgttaagttc

SEQ ID NO: 37640 - DNA, 20 bp, Artificial sequence
  SiRNA target sequence
atataaaattgttaagttct

SEQ ID NO: 37641 - DNA, 20 bp, Artificial sequence
  SiRNA target sequence
tataaaattgttaagttctg

SEQ ID NO: 37642 - DNA, 20 bp, Artificial sequence
  SiRNA target sequence
ataaaattgttaagttctga

SEQ ID NO: 37643 - DNA, 20 bp, Artificial sequence
  SiRNA target sequence
taaaattgttaagttctgac

SEQ ID NO: 37644 - DNA, 20 bp, Artificial sequence
  SiRNA target sequence
aaaattgttaagttctgaca

SEQ ID NO: 37645 - DNA, 20 bp, Artificial sequence
  SiRNA target sequence
aaattgttaagttctgacat

SEQ ID NO: 37646 - DNA, 20 bp, Artificial sequence
  SiRNA target sequence
aattgttaagttctgacatt

SEQ ID NO: 37647 - DNA, 20 bp, Artificial sequence
  SiRNA target sequence
attgttaagttctgacattg

SEQ ID NO: 37648 - DNA, 20 bp, Artificial sequence
  SiRNA target sequence
ttgttaagttctgacattgt

SEQ ID NO: 37649 - DNA, 20 bp, Artificial sequence
  SiRNA target sequence
tgttaagttctgacattgta

SEQ ID NO: 37650 - DNA, 20 bp, Artificial sequence
  SiRNA target sequence
gttaagttctgacattgtaa

SEQ ID NO: 37651 - DNA, 20 bp, Artificial sequence
  SiRNA target sequence
ttaagttctgacattgtaat

SEQ ID NO: 37652 - DNA, 20 bp, Artificial sequence
  SiRNA target sequence
taagttctgacattgtaatt

SEQ ID NO: 37653 - DNA, 20 bp, Artificial sequence
  SiRNA target sequence
aagttctgacattgtaattg

SEQ ID NO: 37654 - DNA, 20 bp, Artificial sequence
  SiRNA target sequence
agttctgacattgtaattga

SEQ ID NO: 37655 - DNA, 20 bp, Artificial sequence
  SiRNA target sequence
gttctgacattgtaattgat

SEQ ID NO: 37656 - DNA, 20 bp, Artificial sequence
  SiRNA target sequence
ttctgacattgtaattgata

SEQ ID NO: 37657 - DNA, 20 bp, Artificial sequence
  SiRNA target sequence
tctgacattgtaattgatac

SEQ ID NO: 37658 - DNA, 20 bp, Artificial sequence
  SiRNA target sequence
ctgacattgtaattgataca

SEQ ID NO: 37659 - DNA, 20 bp, Artificial sequence
  SiRNA target sequence
tgacattgtaattgatacaa

SEQ ID NO: 37660 - DNA, 20 bp, Artificial sequence
  SiRNA target sequence
gacattgtaattgatacaat

SEQ ID NO: 37661 - DNA, 20 bp, Artificial sequence
  SiRNA target sequence
acattgtaattgatacaatt

SEQ ID NO: 37662 - DNA, 20 bp, Artificial sequence
  SiRNA target sequence
cattgtaattgatacaattg

SEQ ID NO: 37663 - DNA, 20 bp, Artificial sequence
  SiRNA target sequence
attgtaattgatacaattgt

SEQ ID NO: 37664 - DNA, 20 bp, Artificial sequence
  SiRNA target sequence
ttgtaattgatacaattgtc

SEQ ID NO: 37665 - DNA, 20 bp, Artificial sequence
  SiRNA target sequence
tgtaattgatacaattgtca

SEQ ID NO: 37666 - DNA, 20 bp, Artificial sequence
  SiRNA target sequence
gtaattgatacaattgtcaa

SEQ ID NO: 37667 - DNA, 20 bp, Artificial sequence
  SiRNA target sequence
taattgatacaattgtcaaa

SEQ ID NO: 37668 - DNA, 20 bp, Artificial sequence
  SiRNA target sequence
aattgatacaattgtcaaaa

SEQ ID NO: 37669 - DNA, 20 bp, Artificial sequence
  SiRNA target sequence
attgatacaattgtcaaaac

SEQ ID NO: 37670 - DNA, 20 bp, Artificial sequence
  SiRNA target sequence
ttgatacaattgtcaaaact

SEQ ID NO: 37671 - DNA, 20 bp, Artificial sequence
  SiRNA target sequence
tgatacaattgtcaaaactg

SEQ ID NO: 37672 - DNA, 20 bp, Artificial sequence
  SiRNA target sequence
gatacaattgtcaaaactgc

SEQ ID NO: 37673 - DNA, 20 bp, Artificial sequence
  SiRNA target sequence
atacaattgtcaaaactgca

SEQ ID NO: 37674 - DNA, 20 bp, Artificial sequence
  SiRNA target sequence
tacaattgtcaaaactgcaa

SEQ ID NO: 37675 - DNA, 20 bp, Artificial sequence
  SiRNA target sequence
acaattgtcaaaactgcaaa

SEQ ID NO: 37676 - DNA, 20 bp, Artificial sequence
  SiRNA target sequence
caattgtcaaaactgcaaaa

SEQ ID NO: 37677 - DNA, 20 bp, Artificial sequence
  SiRNA target sequence
aattgtcaaaactgcaaaat

SEQ ID NO: 37678 - DNA, 20 bp, Artificial sequence
  SiRNA target sequence
attgtcaaaactgcaaaata

SEQ ID NO: 37679 - DNA, 20 bp, Artificial sequence
  SiRNA target sequence
ttgtcaaaactgcaaaatac

SEQ ID NO: 37680 - DNA, 20 bp, Artificial sequence
  SiRNA target sequence
tgtcaaaactgcaaaataca

SEQ ID NO: 37681 - DNA, 20 bp, Artificial sequence
  SiRNA target sequence
gtcaaaactgcaaaatacaa

SEQ ID NO: 37682 - DNA, 20 bp, Artificial sequence
  SiRNA target sequence
tcaaaactgcaaaatacaaa

SEQ ID NO: 37683 - DNA, 20 bp, Artificial sequence
  SiRNA target sequence
caaaactgcaaaatacaaaa

SEQ ID NO: 37684 - DNA, 20 bp, Artificial sequence
  SiRNA target sequence
aaaactgcaaaatacaaaag

SEQ ID NO: 37685 - DNA, 20 bp, Artificial sequence
  SiRNA target sequence
aaactgcaaaatacaaaaga

SEQ ID NO: 37686 - DNA, 20 bp, Artificial sequence
  SiRNA target sequence
aactgcaaaatacaaaagac

SEQ ID NO: 37687 - DNA, 20 bp, Artificial sequence
  SiRNA target sequence
actgcaaaatacaaaagact

SEQ ID NO: 37688 - DNA, 20 bp, Artificial sequence
  SiRNA target sequence
ctgcaaaatacaaaagactt

SEQ ID NO: 37689 - DNA, 20 bp, Artificial sequence
  SiRNA target sequence
tgcaaaatacaaaagacttt

SEQ ID NO: 37690 - DNA, 20 bp, Artificial sequence
  SiRNA target sequence
gcaaaatacaaaagactttg

SEQ ID NO: 37691 - DNA, 20 bp, Artificial sequence
  SiRNA target sequence
caaaatacaaaagactttga

SEQ ID NO: 37692 - DNA, 20 bp, Artificial sequence
  SiRNA target sequence
aaaatacaaaagactttgac

SEQ ID NO: 37693 - DNA, 20 bp, Artificial sequence
  SiRNA target sequence
aaatacaaaagactttgact

SEQ ID NO: 37694 - DNA, 20 bp, Artificial sequence
  SiRNA target sequence
aatacaaaagactttgacta

SEQ ID NO: 37695 - DNA, 20 bp, Artificial sequence
  SiRNA target sequence
atacaaaagactttgactaa

SEQ ID NO: 37696 - DNA, 20 bp, Artificial sequence
  SiRNA target sequence
tacaaaagactttgactaag

SEQ ID NO: 37697 - DNA, 20 bp, Artificial sequence
  SiRNA target sequence
acaaaagactttgactaaga

SEQ ID NO: 37698 - DNA, 20 bp, Artificial sequence
  SiRNA target sequence
caaaagactttgactaagat

SEQ ID NO: 37699 - DNA, 20 bp, Artificial sequence
  SiRNA target sequence
aaaagactttgactaagatc

SEQ ID NO: 37700 - DNA, 20 bp, Artificial sequence
  SiRNA target sequence
aaagactttgactaagatct

SEQ ID NO: 37701 - DNA, 20 bp, Artificial sequence
  SiRNA target sequence
aagactttgactaagatctt

SEQ ID NO: 37702 - DNA, 20 bp, Artificial sequence
  SiRNA target sequence
agactttgactaagatcttt

SEQ ID NO: 37703 - DNA, 20 bp, Artificial sequence
  SiRNA target sequence
gactttgactaagatcttta

SEQ ID NO: 37704 - DNA, 20 bp, Artificial sequence
  SiRNA target sequence
actttgactaagatctttat

SEQ ID NO: 37705 - DNA, 20 bp, Artificial sequence
  SiRNA target sequence
ctttgactaagatctttatt

SEQ ID NO: 37706 - DNA, 20 bp, Artificial sequence
  SiRNA target sequence
tttgactaagatctttatta

SEQ ID NO: 37707 - DNA, 20 bp, Artificial sequence
  SiRNA target sequence
ttgactaagatctttattat

SEQ ID NO: 37708 - DNA, 20 bp, Artificial sequence
  SiRNA target sequence
tgactaagatctttattatc

SEQ ID NO: 37709 - DNA, 20 bp, Artificial sequence
  SiRNA target sequence
gactaagatctttattatct

SEQ ID NO: 37710 - DNA, 20 bp, Artificial sequence
  SiRNA target sequence
actaagatctttattatctg

SEQ ID NO: 37711 - DNA, 20 bp, Artificial sequence
  SiRNA target sequence
ctaagatctttattatctgt

SEQ ID NO: 37712 - DNA, 20 bp, Artificial sequence
  SiRNA target sequence
taagatctttattatctgta

SEQ ID NO: 37713 - DNA, 20 bp, Artificial sequence
  SiRNA target sequence
aagatctttattatctgtaa

SEQ ID NO: 37714 - DNA, 20 bp, Artificial sequence
  SiRNA target sequence
agatctttattatctgtaat

SEQ ID NO: 37715 - DNA, 20 bp, Artificial sequence
  SiRNA target sequence
gatctttattatctgtaata

SEQ ID NO: 37716 - DNA, 20 bp, Artificial sequence
  SiRNA target sequence
atctttattatctgtaatat

SEQ ID NO: 37717 - DNA, 20 bp, Artificial sequence
  SiRNA target sequence
tctttattatctgtaatatc

SEQ ID NO: 37718 - DNA, 20 bp, Artificial sequence
  SiRNA target sequence
ctttattatctgtaatatca

SEQ ID NO: 37719 - DNA, 20 bp, Artificial sequence
  SiRNA target sequence
tttattatctgtaatatcac

SEQ ID NO: 37720 - DNA, 20 bp, Artificial sequence
  SiRNA target sequence
ttattatctgtaatatcact

SEQ ID NO: 37721 - DNA, 20 bp, Artificial sequence
  SiRNA target sequence
tattatctgtaatatcacta

SEQ ID NO: 37722 - DNA, 20 bp, Artificial sequence
  SiRNA target sequence
attatctgtaatatcactag

SEQ ID NO: 37723 - DNA, 20 bp, Artificial sequence
  SiRNA target sequence
ttatctgtaatatcactagt

SEQ ID NO: 37724 - DNA, 20 bp, Artificial sequence
  SiRNA target sequence
tatctgtaatatcactagtc

SEQ ID NO: 37725 - DNA, 20 bp, Artificial sequence
  SiRNA target sequence
atctgtaatatcactagtca

SEQ ID NO: 37726 - DNA, 20 bp, Artificial sequence
  SiRNA target sequence
tctgtaatatcactagtcaa

SEQ ID NO: 37727 - DNA, 20 bp, Artificial sequence
  SiRNA target sequence
ctgtaatatcactagtcaat

SEQ ID NO: 37728 - DNA, 20 bp, Artificial sequence
  SiRNA target sequence
tgtaatatcactagtcaatt

SEQ ID NO: 37729 - DNA, 20 bp, Artificial sequence
  SiRNA target sequence
gtaatatcactagtcaattt

SEQ ID NO: 37730 - DNA, 20 bp, Artificial sequence
  SiRNA target sequence
taatatcactagtcaatttc

SEQ ID NO: 37731 - DNA, 20 bp, Artificial sequence
  SiRNA target sequence
aatatcactagtcaatttcc

SEQ ID NO: 37732 - DNA, 20 bp, Artificial sequence
  SiRNA target sequence
atatcactagtcaatttccg

SEQ ID NO: 37733 - DNA, 20 bp, Artificial sequence
  SiRNA target sequence
tatcactagtcaatttccgg

SEQ ID NO: 37734 - DNA, 20 bp, Artificial sequence
  SiRNA target sequence
atcactagtcaatttccggg

SEQ ID NO: 37735 - DNA, 20 bp, Artificial sequence
  SiRNA target sequence
tcactagtcaatttccgggt

SEQ ID NO: 37736 - DNA, 20 bp, Artificial sequence
  SiRNA target sequence
cactagtcaatttccgggta

SEQ ID NO: 37737 - DNA, 20 bp, Artificial sequence
  SiRNA target sequence
actagtcaatttccgggtag

SEQ ID NO: 37738 - DNA, 20 bp, Artificial sequence
  SiRNA target sequence
ctagtcaatttccgggtagc

SEQ ID NO: 37739 - DNA, 20 bp, Artificial sequence
  SiRNA target sequence
tagtcaatttccgggtagct

SEQ ID NO: 37740 - DNA, 20 bp, Artificial sequence
  SiRNA target sequence
agtcaatttccgggtagctt

SEQ ID NO: 37741 - DNA, 20 bp, Artificial sequence
  SiRNA target sequence
gtcaatttccgggtagcttc

SEQ ID NO: 37742 - DNA, 20 bp, Artificial sequence
  SiRNA target sequence
tcaatttccgggtagcttca

SEQ ID NO: 37743 - DNA, 20 bp, Artificial sequence
  SiRNA target sequence
caatttccgggtagcttcaa

SEQ ID NO: 37744 - DNA, 20 bp, Artificial sequence
  SiRNA target sequence
aatttccgggtagcttcaac

SEQ ID NO: 37745 - DNA, 20 bp, Artificial sequence
  SiRNA target sequence
atttccgggtagcttcaact

SEQ ID NO: 37746 - DNA, 20 bp, Artificial sequence
  SiRNA target sequence
tttccgggtagcttcaactg

SEQ ID NO: 37747 - DNA, 20 bp, Artificial sequence
  SiRNA target sequence
ttccgggtagcttcaactgt

SEQ ID NO: 37748 - DNA, 20 bp, Artificial sequence
  SiRNA target sequence
tccgggtagcttcaactgtt

SEQ ID NO: 37749 - DNA, 20 bp, Artificial sequence
  SiRNA target sequence
ccgggtagcttcaactgtta

SEQ ID NO: 37750 - DNA, 20 bp, Artificial sequence
  SiRNA target sequence
cgggtagcttcaactgttaa

SEQ ID NO: 37751 - DNA, 20 bp, Artificial sequence
  SiRNA target sequence
gggtagcttcaactgttaaa

SEQ ID NO: 37752 - DNA, 20 bp, Artificial sequence
  SiRNA target sequence
ggtagcttcaactgttaaaa

SEQ ID NO: 37753 - DNA, 20 bp, Artificial sequence
  SiRNA target sequence
gtagcttcaactgttaaaac

SEQ ID NO: 37754 - DNA, 20 bp, Artificial sequence
  SiRNA target sequence
tagcttcaactgttaaaaca

SEQ ID NO: 37755 - DNA, 20 bp, Artificial sequence
  SiRNA target sequence
agcttcaactgttaaaacat

SEQ ID NO: 37756 - DNA, 20 bp, Artificial sequence
  SiRNA target sequence
gcttcaactgttaaaacatt

SEQ ID NO: 37757 - DNA, 20 bp, Artificial sequence
  SiRNA target sequence
cttcaactgttaaaacatta

SEQ ID NO: 37758 - DNA, 20 bp, Artificial sequence
  SiRNA target sequence
ttcaactgttaaaacattaa

SEQ ID NO: 37759 - DNA, 20 bp, Artificial sequence
  SiRNA target sequence
tcaactgttaaaacattaaa

SEQ ID NO: 37760 - DNA, 20 bp, Artificial sequence
  SiRNA target sequence
caactgttaaaacattaaat

SEQ ID NO: 37761 - DNA, 20 bp, Artificial sequence
  SiRNA target sequence
aactgttaaaacattaaatg

SEQ ID NO: 37762 - DNA, 20 bp, Artificial sequence
  SiRNA target sequence
actgttaaaacattaaatgt

SEQ ID NO: 37763 - DNA, 20 bp, Artificial sequence
  SiRNA target sequence
ctgttaaaacattaaatgta

SEQ ID NO: 37764 - DNA, 20 bp, Artificial sequence
  SiRNA target sequence
tgttaaaacattaaatgtac

SEQ ID NO: 37765 - DNA, 20 bp, Artificial sequence
  SiRNA target sequence
gttaaaacattaaatgtaca

SEQ ID NO: 37766 - DNA, 20 bp, Artificial sequence
  SiRNA target sequence
ttaaaacattaaatgtacaa

SEQ ID NO: 37767 - DNA, 20 bp, Artificial sequence
  SiRNA target sequence
taaaacattaaatgtacaaa

SEQ ID NO: 37768 - DNA, 20 bp, Artificial sequence
  SiRNA target sequence
aaaacattaaatgtacaaac

SEQ ID NO: 37769 - DNA, 20 bp, Artificial sequence
  SiRNA target sequence
aaacattaaatgtacaaact

SEQ ID NO: 37770 - DNA, 20 bp, Artificial sequence
  SiRNA target sequence
aacattaaatgtacaaactg

SEQ ID NO: 37771 - DNA, 20 bp, Artificial sequence
  SiRNA target sequence
acattaaatgtacaaactgc

SEQ ID NO: 37772 - DNA, 20 bp, Artificial sequence
  SiRNA target sequence
cattaaatgtacaaactgca

SEQ ID NO: 37773 - DNA, 20 bp, Artificial sequence
  SiRNA target sequence
attaaatgtacaaactgcaa

SEQ ID NO: 37774 - DNA, 20 bp, Artificial sequence
  SiRNA target sequence
ttaaatgtacaaactgcaaa

SEQ ID NO: 37775 - DNA, 20 bp, Artificial sequence
  SiRNA target sequence
taaatgtacaaactgcaaat

SEQ ID NO: 37776 - DNA, 20 bp, Artificial sequence
  SiRNA target sequence
aaatgtacaaactgcaaatg

SEQ ID NO: 37777 - DNA, 20 bp, Artificial sequence
  SiRNA target sequence
aatgtacaaactgcaaatgt

SEQ ID NO: 37778 - DNA, 20 bp, Artificial sequence
  SiRNA target sequence
atgtacaaactgcaaatgtc

SEQ ID NO: 37779 - DNA, 20 bp, Artificial sequence
  SiRNA target sequence
tgtacaaactgcaaatgtcc

SEQ ID NO: 37780 - DNA, 20 bp, Artificial sequence
  SiRNA target sequence
gtacaaactgcaaatgtccc

SEQ ID NO: 37781 - DNA, 20 bp, Artificial sequence
  SiRNA target sequence
tacaaactgcaaatgtccca

SEQ ID NO: 37782 - DNA, 20 bp, Artificial sequence
  SiRNA target sequence
acaaactgcaaatgtcccaa

SEQ ID NO: 37783 - DNA, 20 bp, Artificial sequence
  SiRNA target sequence
caaactgcaaatgtcccaaa

SEQ ID NO: 37784 - DNA, 20 bp, Artificial sequence
  SiRNA target sequence
aaactgcaaatgtcccaaaa

SEQ ID NO: 37785 - DNA, 20 bp, Artificial sequence
  SiRNA target sequence
aactgcaaatgtcccaaaaa

SEQ ID NO: 37786 - DNA, 20 bp, Artificial sequence
  SiRNA target sequence
actgcaaatgtcccaaaaat

SEQ ID NO: 37787 - DNA, 20 bp, Artificial sequence
  SiRNA target sequence
ctgcaaatgtcccaaaaatt

SEQ ID NO: 37788 - DNA, 20 bp, Artificial sequence
  SiRNA target sequence
tgcaaatgtcccaaaaatta

SEQ ID NO: 37789 - DNA, 20 bp, Artificial sequence
  SiRNA target sequence
gcaaatgtcccaaaaattat

SEQ ID NO: 37790 - DNA, 20 bp, Artificial sequence
  SiRNA target sequence
caaatgtcccaaaaattatg

SEQ ID NO: 37791 - DNA, 20 bp, Artificial sequence
  SiRNA target sequence
aaatgtcccaaaaattatgt

SEQ ID NO: 37792 - DNA, 20 bp, Artificial sequence
  SiRNA target sequence
aatgtcccaaaaattatgta

SEQ ID NO: 37793 - DNA, 20 bp, Artificial sequence
  SiRNA target sequence
atgtcccaaaaattatgtaa

SEQ ID NO: 37794 - DNA, 20 bp, Artificial sequence
  SiRNA target sequence
tgtcccaaaaattatgtaaa

SEQ ID NO: 37795 - DNA, 20 bp, Artificial sequence
  SiRNA target sequence
gtcccaaaaattatgtaaat

SEQ ID NO: 37796 - DNA, 20 bp, Artificial sequence
  SiRNA target sequence
tcccaaaaattatgtaaatg

SEQ ID NO: 37797 - DNA, 20 bp, Artificial sequence
  SiRNA target sequence
cccaaaaattatgtaaatga

SEQ ID NO: 37798 - DNA, 20 bp, Artificial sequence
  SiRNA target sequence
ccaaaaattatgtaaatgac

SEQ ID NO: 37799 - DNA, 20 bp, Artificial sequence
  SiRNA target sequence
caaaaattatgtaaatgaca

SEQ ID NO: 37800 - DNA, 20 bp, Artificial sequence
  SiRNA target sequence
aaaaattatgtaaatgacaa

SEQ ID NO: 37801 - DNA, 20 bp, Artificial sequence
  SiRNA target sequence
aaaattatgtaaatgacaaa

SEQ ID NO: 37802 - DNA, 20 bp, Artificial sequence
  SiRNA target sequence
aaattatgtaaatgacaaat

SEQ ID NO: 37803 - DNA, 20 bp, Artificial sequence
  SiRNA target sequence
aattatgtaaatgacaaatg

SEQ ID NO: 37804 - DNA, 20 bp, Artificial sequence
  SiRNA target sequence
attatgtaaatgacaaatgt

SEQ ID NO: 37805 - DNA, 20 bp, Artificial sequence
  SiRNA target sequence
ttatgtaaatgacaaatgtt

SEQ ID NO: 37806 - DNA, 20 bp, Artificial sequence
  SiRNA target sequence
tatgtaaatgacaaatgttc

SEQ ID NO: 37807 - DNA, 20 bp, Artificial sequence
  SiRNA target sequence
atgtaaatgacaaatgttcg

SEQ ID NO: 37808 - DNA, 20 bp, Artificial sequence
  SiRNA target sequence
tgtaaatgacaaatgttcga

SEQ ID NO: 37809 - DNA, 20 bp, Artificial sequence
  SiRNA target sequence
gtaaatgacaaatgttcgaa

SEQ ID NO: 37810 - DNA, 20 bp, Artificial sequence
  SiRNA target sequence
taaatgacaaatgttcgaat

SEQ ID NO: 37811 - DNA, 20 bp, Artificial sequence
  SiRNA target sequence
aaatgacaaatgttcgaata

SEQ ID NO: 37812 - DNA, 20 bp, Artificial sequence
  SiRNA target sequence
aatgacaaatgttcgaataa

SEQ ID NO: 37813 - DNA, 20 bp, Artificial sequence
  SiRNA target sequence
atgacaaatgttcgaataaa

SEQ ID NO: 37814 - DNA, 20 bp, Artificial sequence
  SiRNA target sequence
tgacaaatgttcgaataaag

SEQ ID NO: 37815 - DNA, 20 bp, Artificial sequence
  SiRNA target sequence
gacaaatgttcgaataaagg

SEQ ID NO: 37816 - DNA, 20 bp, Artificial sequence
  SiRNA target sequence
acaaatgttcgaataaaggg

SEQ ID NO: 37817 - DNA, 20 bp, Artificial sequence
  SiRNA target sequence
caaatgttcgaataaagggc

SEQ ID NO: 37818 - DNA, 20 bp, Artificial sequence
  SiRNA target sequence
aaatgttcgaataaagggct

SEQ ID NO: 37819 - DNA, 20 bp, Artificial sequence
  SiRNA target sequence
aatgttcgaataaagggctt

SEQ ID NO: 37820 - DNA, 20 bp, Artificial sequence
  SiRNA target sequence
atgttcgaataaagggcttt

SEQ ID NO: 37821 - DNA, 20 bp, Artificial sequence
  SiRNA target sequence
tgttcgaataaagggctttg

SEQ ID NO: 37822 - DNA, 20 bp, Artificial sequence
  SiRNA target sequence
gttcgaataaagggctttga

SEQ ID NO: 37823 - DNA, 20 bp, Artificial sequence
  SiRNA target sequence
ttcgaataaagggctttgaa

SEQ ID NO: 37824 - DNA, 20 bp, Artificial sequence
  SiRNA target sequence
tcgaataaagggctttgaaa

SEQ ID NO: 37825 - DNA, 20 bp, Artificial sequence
  SiRNA target sequence
cgaataaagggctttgaaat

SEQ ID NO: 37826 - DNA, 20 bp, Artificial sequence
  SiRNA target sequence
gaataaagggctttgaaata

SEQ ID NO: 37827 - DNA, 20 bp, Artificial sequence
  SiRNA target sequence
aataaagggctttgaaataa

SEQ ID NO: 37828 - DNA, 20 bp, Artificial sequence
  SiRNA target sequence
ataaagggctttgaaataac

SEQ ID NO: 37829 - DNA, 20 bp, Artificial sequence
  SiRNA target sequence
taaagggctttgaaataaca

SEQ ID NO: 37830 - DNA, 20 bp, Artificial sequence
  SiRNA target sequence
aaagggctttgaaataacat

SEQ ID NO: 37831 - DNA, 20 bp, Artificial sequence
  SiRNA target sequence
aagggctttgaaataacata

SEQ ID NO: 37832 - DNA, 20 bp, Artificial sequence
  SiRNA target sequence
agggctttgaaataacatat

SEQ ID NO: 37833 - DNA, 20 bp, Artificial sequence
  SiRNA target sequence
gggctttgaaataacatatt

SEQ ID NO: 37834 - DNA, 20 bp, Artificial sequence
  SiRNA target sequence
ggctttgaaataacatattc

SEQ ID NO: 37835 - DNA, 20 bp, Artificial sequence
  SiRNA target sequence
gctttgaaataacatattct

SEQ ID NO: 37836 - DNA, 20 bp, Artificial sequence
  SiRNA target sequence
ctttgaaataacatattcta

SEQ ID NO: 37837 - DNA, 20 bp, Artificial sequence
  SiRNA target sequence
tttgaaataacatattctac

SEQ ID NO: 37838 - DNA, 20 bp, Artificial sequence
  SiRNA target sequence
ttgaaataacatattctaca

SEQ ID NO: 37839 - DNA, 20 bp, Artificial sequence
  SiRNA target sequence
tgaaataacatattctacaa

SEQ ID NO: 37840 - DNA, 20 bp, Artificial sequence
  SiRNA target sequence
gaaataacatattctacaat

SEQ ID NO: 37841 - DNA, 20 bp, Artificial sequence
  SiRNA target sequence
aaataacatattctacaatc

SEQ ID NO: 37842 - DNA, 20 bp, Artificial sequence
  SiRNA target sequence
aataacatattctacaatca

SEQ ID NO: 37843 - DNA, 20 bp, Artificial sequence
  SiRNA target sequence
ataacatattctacaatcag

SEQ ID NO: 37844 - DNA, 20 bp, Artificial sequence
  SiRNA target sequence
taacatattctacaatcagg

SEQ ID NO: 37845 - DNA, 20 bp, Artificial sequence
  SiRNA target sequence
aacatattctacaatcaggt

SEQ ID NO: 37846 - DNA, 20 bp, Artificial sequence
  SiRNA target sequence
acatattctacaatcaggtc

SEQ ID NO: 37847 - DNA, 20 bp, Artificial sequence
  SiRNA target sequence
catattctacaatcaggtct

SEQ ID NO: 37848 - DNA, 20 bp, Artificial sequence
  SiRNA target sequence
atattctacaatcaggtctt

SEQ ID NO: 37849 - DNA, 20 bp, Artificial sequence
  SiRNA target sequence
tattctacaatcaggtcttt

SEQ ID NO: 37850 - DNA, 20 bp, Artificial sequence
  SiRNA target sequence
attctacaatcaggtctttc

SEQ ID NO: 37851 - DNA, 20 bp, Artificial sequence
  SiRNA target sequence
ttctacaatcaggtctttca

SEQ ID NO: 37852 - DNA, 20 bp, Artificial sequence
  SiRNA target sequence
tctacaatcaggtctttcat

SEQ ID NO: 37853 - DNA, 20 bp, Artificial sequence
  SiRNA target sequence
ctacaatcaggtctttcata

SEQ ID NO: 37854 - DNA, 20 bp, Artificial sequence
  SiRNA target sequence
tacaatcaggtctttcataa

SEQ ID NO: 37855 - DNA, 20 bp, Artificial sequence
  SiRNA target sequence
acaatcaggtctttcataat

SEQ ID NO: 37856 - DNA, 20 bp, Artificial sequence
  SiRNA target sequence
caatcaggtctttcataata

SEQ ID NO: 37857 - DNA, 20 bp, Artificial sequence
  SiRNA target sequence
aatcaggtctttcataatac

SEQ ID NO: 37858 - DNA, 20 bp, Artificial sequence
  SiRNA target sequence
atcaggtctttcataatact

SEQ ID NO: 37859 - DNA, 20 bp, Artificial sequence
  SiRNA target sequence
tcaggtctttcataatacta

SEQ ID NO: 37860 - DNA, 20 bp, Artificial sequence
  SiRNA target sequence
caggtctttcataatactaa

SEQ ID NO: 37861 - DNA, 20 bp, Artificial sequence
  SiRNA target sequence
aggtctttcataatactaat

SEQ ID NO: 37862 - DNA, 20 bp, Artificial sequence
  SiRNA target sequence
ggtctttcataatactaata

SEQ ID NO: 37863 - DNA, 20 bp, Artificial sequence
  SiRNA target sequence
gtctttcataatactaatat

SEQ ID NO: 37864 - DNA, 20 bp, Artificial sequence
  SiRNA target sequence
tctttcataatactaatatc

SEQ ID NO: 37865 - DNA, 20 bp, Artificial sequence
  SiRNA target sequence
ctttcataatactaatatca

SEQ ID NO: 37866 - DNA, 20 bp, Artificial sequence
  SiRNA target sequence
tttcataatactaatatcac

SEQ ID NO: 37867 - DNA, 20 bp, Artificial sequence
  SiRNA target sequence
ttcataatactaatatcact

SEQ ID NO: 37868 - DNA, 20 bp, Artificial sequence
  SiRNA target sequence
tcataatactaatatcacta

SEQ ID NO: 37869 - DNA, 20 bp, Artificial sequence
  SiRNA target sequence
cataatactaatatcactac

SEQ ID NO: 37870 - DNA, 20 bp, Artificial sequence
  SiRNA target sequence
ataatactaatatcactacc

SEQ ID NO: 37871 - DNA, 20 bp, Artificial sequence
  SiRNA target sequence
taatactaatatcactacca

SEQ ID NO: 37872 - DNA, 20 bp, Artificial sequence
  SiRNA target sequence
aatactaatatcactaccat

SEQ ID NO: 37873 - DNA, 20 bp, Artificial sequence
  SiRNA target sequence
atactaatatcactaccata

SEQ ID NO: 37874 - DNA, 20 bp, Artificial sequence
  SiRNA target sequence
tactaatatcactaccataa

SEQ ID NO: 37875 - DNA, 20 bp, Artificial sequence
  SiRNA target sequence
actaatatcactaccataaa

SEQ ID NO: 37876 - DNA, 20 bp, Artificial sequence
  SiRNA target sequence
ctaatatcactaccataaat

SEQ ID NO: 37877 - DNA, 20 bp, Artificial sequence
  SiRNA target sequence
taatatcactaccataaata

SEQ ID NO: 37878 - DNA, 20 bp, Artificial sequence
  SiRNA target sequence
aatatcactaccataaatag

SEQ ID NO: 37879 - DNA, 20 bp, Artificial sequence
  SiRNA target sequence
atatcactaccataaataga

SEQ ID NO: 37880 - DNA, 20 bp, Artificial sequence
  SiRNA target sequence
tatcactaccataaatagat

SEQ ID NO: 37881 - DNA, 20 bp, Artificial sequence
  SiRNA target sequence
atcactaccataaatagatt

SEQ ID NO: 37882 - DNA, 20 bp, Artificial sequence
  SiRNA target sequence
tcactaccataaatagattt

SEQ ID NO: 37883 - DNA, 20 bp, Artificial sequence
  SiRNA target sequence
cactaccataaatagatttt

SEQ ID NO: 37884 - DNA, 20 bp, Artificial sequence
  SiRNA target sequence
actaccataaatagattttt

SEQ ID NO: 37885 - DNA, 20 bp, Artificial sequence
  SiRNA target sequence
ctaccataaatagatttttt

SEQ ID NO: 37886 - DNA, 20 bp, Artificial sequence
  SiRNA target sequence
taccataaatagattttttt

SEQ ID NO: 37887 - DNA, 20 bp, Artificial sequence
  SiRNA target sequence
accataaatagatttttttt

SEQ ID NO: 37888 - DNA, 20 bp, Artificial sequence
  SiRNA target sequence
ccataaatagattttttttc

SEQ ID NO: 37889 - DNA, 20 bp, Artificial sequence
  SiRNA target sequence
cataaatagattttttttct

SEQ ID NO: 37890 - DNA, 20 bp, Artificial sequence
  SiRNA target sequence
ataaatagattttttttcta

SEQ ID NO: 37891 - DNA, 20 bp, Artificial sequence
  SiRNA target sequence
taaatagattttttttctaa

SEQ ID NO: 37892 - DNA, 20 bp, Artificial sequence
  SiRNA target sequence
aaatagattttttttctaac

SEQ ID NO: 37893 - DNA, 20 bp, Artificial sequence
  SiRNA target sequence
aatagattttttttctaaca

SEQ ID NO: 37894 - DNA, 20 bp, Artificial sequence
  SiRNA target sequence
atagattttttttctaacat

SEQ ID NO: 37895 - DNA, 21 bp, Artificial sequence
  SiRNA target sequence
ttataagtttaatgtagaaat

SEQ ID NO: 37896 - DNA, 21 bp, Artificial sequence
  SiRNA target sequence
tataagtttaatgtagaaata

SEQ ID NO: 37897 - DNA, 21 bp, Artificial sequence
  SiRNA target sequence
ataagtttaatgtagaaataa

SEQ ID NO: 37898 - DNA, 21 bp, Artificial sequence
  SiRNA target sequence
taagtttaatgtagaaataat

SEQ ID NO: 37899 - DNA, 21 bp, Artificial sequence
  SiRNA target sequence
aagtttaatgtagaaataata

SEQ ID NO: 37900 - DNA, 21 bp, Artificial sequence
  SiRNA target sequence
agtttaatgtagaaataatat

SEQ ID NO: 37901 - DNA, 21 bp, Artificial sequence
  SiRNA target sequence
gtttaatgtagaaataatatt

SEQ ID NO: 37902 - DNA, 21 bp, Artificial sequence
  SiRNA target sequence
tttaatgtagaaataatattt

SEQ ID NO: 37903 - DNA, 21 bp, Artificial sequence
  SiRNA target sequence
ttaatgtagaaataatatttt

SEQ ID NO: 37904 - DNA, 21 bp, Artificial sequence
  SiRNA target sequence
taatgtagaaataatattttc

SEQ ID NO: 37905 - DNA, 21 bp, Artificial sequence
  SiRNA target sequence
aatgtagaaataatattttct

SEQ ID NO: 37906 - DNA, 21 bp, Artificial sequence
  SiRNA target sequence
atgtagaaataatattttctt

SEQ ID NO: 37907 - DNA, 21 bp, Artificial sequence
  SiRNA target sequence
tgtagaaataatattttcttc

SEQ ID NO: 37908 - DNA, 21 bp, Artificial sequence
  SiRNA target sequence
gtagaaataatattttcttct

SEQ ID NO: 37909 - DNA, 21 bp, Artificial sequence
  SiRNA target sequence
tagaaataatattttcttcta

SEQ ID NO: 37910 - DNA, 21 bp, Artificial sequence
  SiRNA target sequence
agaaataatattttcttctat

SEQ ID NO: 37911 - DNA, 21 bp, Artificial sequence
  SiRNA target sequence
gaaataatattttcttctatc

SEQ ID NO: 37912 - DNA, 21 bp, Artificial sequence
  SiRNA target sequence
aaataatattttcttctatct

SEQ ID NO: 37913 - DNA, 21 bp, Artificial sequence
  SiRNA target sequence
aataatattttcttctatctt

SEQ ID NO: 37914 - DNA, 21 bp, Artificial sequence
  SiRNA target sequence
ataatattttcttctatctta

SEQ ID NO: 37915 - DNA, 21 bp, Artificial sequence
  SiRNA target sequence
taatattttcttctatcttat

SEQ ID NO: 37916 - DNA, 21 bp, Artificial sequence
  SiRNA target sequence
aatattttcttctatcttatg

SEQ ID NO: 37917 - DNA, 21 bp, Artificial sequence
  SiRNA target sequence
atattttcttctatcttatgt

SEQ ID NO: 37918 - DNA, 21 bp, Artificial sequence
  SiRNA target sequence
tattttcttctatcttatgta

SEQ ID NO: 37919 - DNA, 21 bp, Artificial sequence
  SiRNA target sequence
attttcttctatcttatgtaa

SEQ ID NO: 37920 - DNA, 21 bp, Artificial sequence
  SiRNA target sequence
ttttcttctatcttatgtaat

SEQ ID NO: 37921 - DNA, 21 bp, Artificial sequence
  SiRNA target sequence
tttcttctatcttatgtaatg

SEQ ID NO: 37922 - DNA, 21 bp, Artificial sequence
  SiRNA target sequence
ttcttctatcttatgtaatga

SEQ ID NO: 37923 - DNA, 21 bp, Artificial sequence
  SiRNA target sequence
tcttctatcttatgtaatgat

SEQ ID NO: 37924 - DNA, 21 bp, Artificial sequence
  SiRNA target sequence
cttctatcttatgtaatgata

SEQ ID NO: 37925 - DNA, 21 bp, Artificial sequence
  SiRNA target sequence
ttctatcttatgtaatgatac

SEQ ID NO: 37926 - DNA, 21 bp, Artificial sequence
  SiRNA target sequence
tctatcttatgtaatgataca

SEQ ID NO: 37927 - DNA, 21 bp, Artificial sequence
  SiRNA target sequence
ctatcttatgtaatgatacag

SEQ ID NO: 37928 - DNA, 21 bp, Artificial sequence
  SiRNA target sequence
tatcttatgtaatgatacagt

SEQ ID NO: 37929 - DNA, 21 bp, Artificial sequence
  SiRNA target sequence
atcttatgtaatgatacagtt

SEQ ID NO: 37930 - DNA, 21 bp, Artificial sequence
  SiRNA target sequence
tcttatgtaatgatacagttt

SEQ ID NO: 37931 - DNA, 21 bp, Artificial sequence
  SiRNA target sequence
cttatgtaatgatacagtttt

SEQ ID NO: 37932 - DNA, 21 bp, Artificial sequence
  SiRNA target sequence
ttatgtaatgatacagttttg

SEQ ID NO: 37933 - DNA, 21 bp, Artificial sequence
  SiRNA target sequence
tatgtaatgatacagttttgt

SEQ ID NO: 37934 - DNA, 21 bp, Artificial sequence
  SiRNA target sequence
atgtaatgatacagttttgtt

SEQ ID NO: 37935 - DNA, 21 bp, Artificial sequence
  SiRNA target sequence
tgtaatgatacagttttgttt

SEQ ID NO: 37936 - DNA, 21 bp, Artificial sequence
  SiRNA target sequence
gtaatgatacagttttgtttt

SEQ ID NO: 37937 - DNA, 21 bp, Artificial sequence
  SiRNA target sequence
taatgatacagttttgttttt

SEQ ID NO: 37938 - DNA, 21 bp, Artificial sequence
  SiRNA target sequence
aatgatacagttttgttttta

SEQ ID NO: 37939 - DNA, 21 bp, Artificial sequence
  SiRNA target sequence
atgatacagttttgtttttaa

SEQ ID NO: 37940 - DNA, 21 bp, Artificial sequence
  SiRNA target sequence
tgatacagttttgtttttaat

SEQ ID NO: 37941 - DNA, 21 bp, Artificial sequence
  SiRNA target sequence
gatacagttttgtttttaata

SEQ ID NO: 37942 - DNA, 21 bp, Artificial sequence
  SiRNA target sequence
atacagttttgtttttaatac

SEQ ID NO: 37943 - DNA, 21 bp, Artificial sequence
  SiRNA target sequence
tacagttttgtttttaatact

SEQ ID NO: 37944 - DNA, 21 bp, Artificial sequence
  SiRNA target sequence
acagttttgtttttaatactt

SEQ ID NO: 37945 - DNA, 21 bp, Artificial sequence
  SiRNA target sequence
cagttttgtttttaatactta

SEQ ID NO: 37946 - DNA, 21 bp, Artificial sequence
  SiRNA target sequence
agttttgtttttaatacttag

SEQ ID NO: 37947 - DNA, 21 bp, Artificial sequence
  SiRNA target sequence
gttttgtttttaatacttagc

SEQ ID NO: 37948 - DNA, 21 bp, Artificial sequence
  SiRNA target sequence
ttttgtttttaatacttagca

SEQ ID NO: 37949 - DNA, 21 bp, Artificial sequence
  SiRNA target sequence
tttgtttttaatacttagcac

SEQ ID NO: 37950 - DNA, 21 bp, Artificial sequence
  SiRNA target sequence
ttgtttttaatacttagcact

SEQ ID NO: 37951 - DNA, 21 bp, Artificial sequence
  SiRNA target sequence
tgtttttaatacttagcactt

SEQ ID NO: 37952 - DNA, 21 bp, Artificial sequence
  SiRNA target sequence
gtttttaatacttagcacttt

SEQ ID NO: 37953 - DNA, 21 bp, Artificial sequence
  SiRNA target sequence
tttttaatacttagcacttta

SEQ ID NO: 37954 - DNA, 21 bp, Artificial sequence
  SiRNA target sequence
ttttaatacttagcactttat

SEQ ID NO: 37955 - DNA, 21 bp, Artificial sequence
  SiRNA target sequence
tttaatacttagcactttatc

SEQ ID NO: 37956 - DNA, 21 bp, Artificial sequence
  SiRNA target sequence
ttaatacttagcactttatca

SEQ ID NO: 37957 - DNA, 21 bp, Artificial sequence
  SiRNA target sequence
taatacttagcactttatcaa

SEQ ID NO: 37958 - DNA, 21 bp, Artificial sequence
  SiRNA target sequence
aatacttagcactttatcaaa

SEQ ID NO: 37959 - DNA, 21 bp, Artificial sequence
  SiRNA target sequence
atacttagcactttatcaaat

SEQ ID NO: 37960 - DNA, 21 bp, Artificial sequence
  SiRNA target sequence
tacttagcactttatcaaata

SEQ ID NO: 37961 - DNA, 21 bp, Artificial sequence
  SiRNA target sequence
acttagcactttatcaaataa

SEQ ID NO: 37962 - DNA, 21 bp, Artificial sequence
  SiRNA target sequence
cttagcactttatcaaataag

SEQ ID NO: 37963 - DNA, 21 bp, Artificial sequence
  SiRNA target sequence
ttagcactttatcaaataagt

SEQ ID NO: 37964 - DNA, 21 bp, Artificial sequence
  SiRNA target sequence
tagcactttatcaaataagtg

SEQ ID NO: 37965 - DNA, 21 bp, Artificial sequence
  SiRNA target sequence
agcactttatcaaataagtgg

SEQ ID NO: 37966 - DNA, 21 bp, Artificial sequence
  SiRNA target sequence
gcactttatcaaataagtgga

SEQ ID NO: 37967 - DNA, 21 bp, Artificial sequence
  SiRNA target sequence
cactttatcaaataagtggag

SEQ ID NO: 37968 - DNA, 21 bp, Artificial sequence
  SiRNA target sequence
actttatcaaataagtggagt

SEQ ID NO: 37969 - DNA, 21 bp, Artificial sequence
  SiRNA target sequence
ctttatcaaataagtggagta

SEQ ID NO: 37970 - DNA, 21 bp, Artificial sequence
  SiRNA target sequence
tttatcaaataagtggagtaa

SEQ ID NO: 37971 - DNA, 21 bp, Artificial sequence
  SiRNA target sequence
ttatcaaataagtggagtaaa

SEQ ID NO: 37972 - DNA, 21 bp, Artificial sequence
  SiRNA target sequence
tatcaaataagtggagtaaat

SEQ ID NO: 37973 - DNA, 21 bp, Artificial sequence
  SiRNA target sequence
atcaaataagtggagtaaatc

SEQ ID NO: 37974 - DNA, 21 bp, Artificial sequence
  SiRNA target sequence
tcaaataagtggagtaaatct

SEQ ID NO: 37975 - DNA, 21 bp, Artificial sequence
  SiRNA target sequence
caaataagtggagtaaatcta

SEQ ID NO: 37976 - DNA, 21 bp, Artificial sequence
  SiRNA target sequence
aaataagtggagtaaatctaa

SEQ ID NO: 37977 - DNA, 21 bp, Artificial sequence
  SiRNA target sequence
aataagtggagtaaatctaaa

SEQ ID NO: 37978 - DNA, 21 bp, Artificial sequence
  SiRNA target sequence
ataagtggagtaaatctaaat

SEQ ID NO: 37979 - DNA, 21 bp, Artificial sequence
  SiRNA target sequence
taagtggagtaaatctaaatt

SEQ ID NO: 37980 - DNA, 21 bp, Artificial sequence
  SiRNA target sequence
aagtggagtaaatctaaatta

SEQ ID NO: 37981 - DNA, 21 bp, Artificial sequence
  SiRNA target sequence
agtggagtaaatctaaattat

SEQ ID NO: 37982 - DNA, 21 bp, Artificial sequence
  SiRNA target sequence
gtggagtaaatctaaattatg

SEQ ID NO: 37983 - DNA, 21 bp, Artificial sequence
  SiRNA target sequence
tggagtaaatctaaattatgt

SEQ ID NO: 37984 - DNA, 21 bp, Artificial sequence
  SiRNA target sequence
ggagtaaatctaaattatgta

SEQ ID NO: 37985 - DNA, 21 bp, Artificial sequence
  SiRNA target sequence
gagtaaatctaaattatgtaa

SEQ ID NO: 37986 - DNA, 21 bp, Artificial sequence
  SiRNA target sequence
agtaaatctaaattatgtaaa

SEQ ID NO: 37987 - DNA, 21 bp, Artificial sequence
  SiRNA target sequence
gtaaatctaaattatgtaaaa

SEQ ID NO: 37988 - DNA, 21 bp, Artificial sequence
  SiRNA target sequence
taaatctaaattatgtaaaac

SEQ ID NO: 37989 - DNA, 21 bp, Artificial sequence
  SiRNA target sequence
aaatctaaattatgtaaaaca

SEQ ID NO: 37990 - DNA, 21 bp, Artificial sequence
  SiRNA target sequence
aatctaaattatgtaaaacaa

SEQ ID NO: 37991 - DNA, 21 bp, Artificial sequence
  SiRNA target sequence
atctaaattatgtaaaacaat

SEQ ID NO: 37992 - DNA, 21 bp, Artificial sequence
  SiRNA target sequence
tctaaattatgtaaaacaata

SEQ ID NO: 37993 - DNA, 21 bp, Artificial sequence
  SiRNA target sequence
ctaaattatgtaaaacaataa

SEQ ID NO: 37994 - DNA, 21 bp, Artificial sequence
  SiRNA target sequence
taaattatgtaaaacaataat

SEQ ID NO: 37995 - DNA, 21 bp, Artificial sequence
  SiRNA target sequence
aaattatgtaaaacaataatt

SEQ ID NO: 37996 - DNA, 21 bp, Artificial sequence
  SiRNA target sequence
aattatgtaaaacaataatta

SEQ ID NO: 37997 - DNA, 21 bp, Artificial sequence
  SiRNA target sequence
attatgtaaaacaataattat

SEQ ID NO: 37998 - DNA, 21 bp, Artificial sequence
  SiRNA target sequence
ttatgtaaaacaataattatc

SEQ ID NO: 37999 - DNA, 21 bp, Artificial sequence
  SiRNA target sequence
tatgtaaaacaataattatcg

SEQ ID NO: 38000 - DNA, 21 bp, Artificial sequence
  SiRNA target sequence
atgtaaaacaataattatcgt

SEQ ID NO: 38001 - DNA, 21 bp, Artificial sequence
  SiRNA target sequence
tgtaaaacaataattatcgtc

SEQ ID NO: 38002 - DNA, 21 bp, Artificial sequence
  SiRNA target sequence
gtaaaacaataattatcgtct

SEQ ID NO: 38003 - DNA, 21 bp, Artificial sequence
  SiRNA target sequence
taaaacaataattatcgtctt

SEQ ID NO: 38004 - DNA, 21 bp, Artificial sequence
  SiRNA target sequence
aaaacaataattatcgtcttc

SEQ ID NO: 38005 - DNA, 21 bp, Artificial sequence
  SiRNA target sequence
aaacaataattatcgtcttct

SEQ ID NO: 38006 - DNA, 21 bp, Artificial sequence
  SiRNA target sequence
aacaataattatcgtcttctc

SEQ ID NO: 38007 - DNA, 21 bp, Artificial sequence
  SiRNA target sequence
acaataattatcgtcttctct

SEQ ID NO: 38008 - DNA, 21 bp, Artificial sequence
  SiRNA target sequence
caataattatcgtcttctcta

SEQ ID NO: 38009 - DNA, 21 bp, Artificial sequence
  SiRNA target sequence
aataattatcgtcttctctaa

SEQ ID NO: 38010 - DNA, 21 bp, Artificial sequence
  SiRNA target sequence
ataattatcgtcttctctaag

SEQ ID NO: 38011 - DNA, 21 bp, Artificial sequence
  SiRNA target sequence
taattatcgtcttctctaagt

SEQ ID NO: 38012 - DNA, 21 bp, Artificial sequence
  SiRNA target sequence
aattatcgtcttctctaagtt

SEQ ID NO: 38013 - DNA, 21 bp, Artificial sequence
  SiRNA target sequence
attatcgtcttctctaagttg

SEQ ID NO: 38014 - DNA, 21 bp, Artificial sequence
  SiRNA target sequence
ttatcgtcttctctaagttgt

SEQ ID NO: 38015 - DNA, 21 bp, Artificial sequence
  SiRNA target sequence
tatcgtcttctctaagttgtt

SEQ ID NO: 38016 - DNA, 21 bp, Artificial sequence
  SiRNA target sequence
atcgtcttctctaagttgttg

SEQ ID NO: 38017 - DNA, 21 bp, Artificial sequence
  SiRNA target sequence
tcgtcttctctaagttgttgg

SEQ ID NO: 38018 - DNA, 21 bp, Artificial sequence
  SiRNA target sequence
cgtcttctctaagttgttgga

SEQ ID NO: 38019 - DNA, 21 bp, Artificial sequence
  SiRNA target sequence
gtcttctctaagttgttggag

SEQ ID NO: 38020 - DNA, 21 bp, Artificial sequence
  SiRNA target sequence
tcttctctaagttgttggaga

SEQ ID NO: 38021 - DNA, 21 bp, Artificial sequence
  SiRNA target sequence
cttctctaagttgttggagat

SEQ ID NO: 38022 - DNA, 21 bp, Artificial sequence
  SiRNA target sequence
ttctctaagttgttggagatt

SEQ ID NO: 38023 - DNA, 21 bp, Artificial sequence
  SiRNA target sequence
tctctaagttgttggagatta

SEQ ID NO: 38024 - DNA, 21 bp, Artificial sequence
  SiRNA target sequence
ctctaagttgttggagattag

SEQ ID NO: 38025 - DNA, 21 bp, Artificial sequence
  SiRNA target sequence
tctaagttgttggagattaga

SEQ ID NO: 38026 - DNA, 21 bp, Artificial sequence
  SiRNA target sequence
ctaagttgttggagattagac

SEQ ID NO: 38027 - DNA, 21 bp, Artificial sequence
  SiRNA target sequence
taagttgttggagattagact

SEQ ID NO: 38028 - DNA, 21 bp, Artificial sequence
  SiRNA target sequence
aagttgttggagattagactt

SEQ ID NO: 38029 - DNA, 21 bp, Artificial sequence
  SiRNA target sequence
agttgttggagattagacttt

SEQ ID NO: 38030 - DNA, 21 bp, Artificial sequence
  SiRNA target sequence
gttgttggagattagactttt

SEQ ID NO: 38031 - DNA, 21 bp, Artificial sequence
  SiRNA target sequence
ttgttggagattagactttta

SEQ ID NO: 38032 - DNA, 21 bp, Artificial sequence
  SiRNA target sequence
tgttggagattagacttttaa

SEQ ID NO: 38033 - DNA, 21 bp, Artificial sequence
  SiRNA target sequence
gttggagattagacttttaag

SEQ ID NO: 38034 - DNA, 21 bp, Artificial sequence
  SiRNA target sequence
ttggagattagacttttaaga

SEQ ID NO: 38035 - DNA, 21 bp, Artificial sequence
  SiRNA target sequence
tggagattagacttttaagaa

SEQ ID NO: 38036 - DNA, 21 bp, Artificial sequence
  SiRNA target sequence
ggagattagacttttaagaat

SEQ ID NO: 38037 - DNA, 21 bp, Artificial sequence
  SiRNA target sequence
gagattagacttttaagaatt

SEQ ID NO: 38038 - DNA, 21 bp, Artificial sequence
  SiRNA target sequence
agattagacttttaagaattt

SEQ ID NO: 38039 - DNA, 21 bp, Artificial sequence
  SiRNA target sequence
gattagacttttaagaatttc

SEQ ID NO: 38040 - DNA, 21 bp, Artificial sequence
  SiRNA target sequence
attagacttttaagaatttca

SEQ ID NO: 38041 - DNA, 21 bp, Artificial sequence
  SiRNA target sequence
ttagacttttaagaatttcat

SEQ ID NO: 38042 - DNA, 21 bp, Artificial sequence
  SiRNA target sequence
tagacttttaagaatttcata

SEQ ID NO: 38043 - DNA, 21 bp, Artificial sequence
  SiRNA target sequence
agacttttaagaatttcatat

SEQ ID NO: 38044 - DNA, 21 bp, Artificial sequence
  SiRNA target sequence
gacttttaagaatttcatatt

SEQ ID NO: 38045 - DNA, 21 bp, Artificial sequence
  SiRNA target sequence
acttttaagaatttcatattc

SEQ ID NO: 38046 - DNA, 21 bp, Artificial sequence
  SiRNA target sequence
cttttaagaatttcatattca

SEQ ID NO: 38047 - DNA, 21 bp, Artificial sequence
  SiRNA target sequence
ttttaagaatttcatattcag

SEQ ID NO: 38048 - DNA, 21 bp, Artificial sequence
  SiRNA target sequence
tttaagaatttcatattcagc

SEQ ID NO: 38049 - DNA, 21 bp, Artificial sequence
  SiRNA target sequence
ttaagaatttcatattcagct

SEQ ID NO: 38050 - DNA, 21 bp, Artificial sequence
  SiRNA target sequence
taagaatttcatattcagctt

SEQ ID NO: 38051 - DNA, 21 bp, Artificial sequence
  SiRNA target sequence
aagaatttcatattcagcttt

SEQ ID NO: 38052 - DNA, 21 bp, Artificial sequence
  SiRNA target sequence
agaatttcatattcagctttt

SEQ ID NO: 38053 - DNA, 21 bp, Artificial sequence
  SiRNA target sequence
gaatttcatattcagcttttt

SEQ ID NO: 38054 - DNA, 21 bp, Artificial sequence
  SiRNA target sequence
aatttcatattcagctttttt

SEQ ID NO: 38055 - DNA, 21 bp, Artificial sequence
  SiRNA target sequence
atttcatattcagcttttttg

SEQ ID NO: 38056 - DNA, 21 bp, Artificial sequence
  SiRNA target sequence
tttcatattcagcttttttgt

SEQ ID NO: 38057 - DNA, 21 bp, Artificial sequence
  SiRNA target sequence
ttcatattcagcttttttgtc

SEQ ID NO: 38058 - DNA, 21 bp, Artificial sequence
  SiRNA target sequence
tcatattcagcttttttgtcc

SEQ ID NO: 38059 - DNA, 21 bp, Artificial sequence
  SiRNA target sequence
catattcagcttttttgtcca

SEQ ID NO: 38060 - DNA, 21 bp, Artificial sequence
  SiRNA target sequence
atattcagcttttttgtccaa

SEQ ID NO: 38061 - DNA, 21 bp, Artificial sequence
  SiRNA target sequence
tattcagcttttttgtccaat

SEQ ID NO: 38062 - DNA, 21 bp, Artificial sequence
  SiRNA target sequence
attcagcttttttgtccaatg

SEQ ID NO: 38063 - DNA, 21 bp, Artificial sequence
  SiRNA target sequence
ttcagcttttttgtccaatgc

SEQ ID NO: 38064 - DNA, 21 bp, Artificial sequence
  SiRNA target sequence
tcagcttttttgtccaatgcg

SEQ ID NO: 38065 - DNA, 21 bp, Artificial sequence
  SiRNA target sequence
cagcttttttgtccaatgcgg

SEQ ID NO: 38066 - DNA, 21 bp, Artificial sequence
  SiRNA target sequence
agcttttttgtccaatgcggc

SEQ ID NO: 38067 - DNA, 21 bp, Artificial sequence
  SiRNA target sequence
gcttttttgtccaatgcggcc

SEQ ID NO: 38068 - DNA, 21 bp, Artificial sequence
  SiRNA target sequence
cttttttgtccaatgcggccg

SEQ ID NO: 38069 - DNA, 21 bp, Artificial sequence
  SiRNA target sequence
ttttttgtccaatgcggccgt

SEQ ID NO: 38070 - DNA, 21 bp, Artificial sequence
  SiRNA target sequence
tttttgtccaatgcggccgtt

SEQ ID NO: 38071 - DNA, 21 bp, Artificial sequence
  SiRNA target sequence
ttttgtccaatgcggccgttg

SEQ ID NO: 38072 - DNA, 21 bp, Artificial sequence
  SiRNA target sequence
tttgtccaatgcggccgttgg

SEQ ID NO: 38073 - DNA, 21 bp, Artificial sequence
  SiRNA target sequence
ttgtccaatgcggccgttggc

SEQ ID NO: 38074 - DNA, 21 bp, Artificial sequence
  SiRNA target sequence
tgtccaatgcggccgttggct

SEQ ID NO: 38075 - DNA, 21 bp, Artificial sequence
  SiRNA target sequence
gtccaatgcggccgttggctc

SEQ ID NO: 38076 - DNA, 21 bp, Artificial sequence
  SiRNA target sequence
tccaatgcggccgttggctca

SEQ ID NO: 38077 - DNA, 21 bp, Artificial sequence
  SiRNA target sequence
ccaatgcggccgttggctcat

SEQ ID NO: 38078 - DNA, 21 bp, Artificial sequence
  SiRNA target sequence
caatgcggccgttggctcatc

SEQ ID NO: 38079 - DNA, 21 bp, Artificial sequence
  SiRNA target sequence
aatgcggccgttggctcatct

SEQ ID NO: 38080 - DNA, 21 bp, Artificial sequence
  SiRNA target sequence
atgcggccgttggctcatcta

SEQ ID NO: 38081 - DNA, 21 bp, Artificial sequence
  SiRNA target sequence
tgcggccgttggctcatctaa

SEQ ID NO: 38082 - DNA, 21 bp, Artificial sequence
  SiRNA target sequence
gcggccgttggctcatctaaa

SEQ ID NO: 38083 - DNA, 21 bp, Artificial sequence
  SiRNA target sequence
cggccgttggctcatctaaaa

SEQ ID NO: 38084 - DNA, 21 bp, Artificial sequence
  SiRNA target sequence
ggccgttggctcatctaaaat

SEQ ID NO: 38085 - DNA, 21 bp, Artificial sequence
  SiRNA target sequence
gccgttggctcatctaaaatt

SEQ ID NO: 38086 - DNA, 21 bp, Artificial sequence
  SiRNA target sequence
ccgttggctcatctaaaatta

SEQ ID NO: 38087 - DNA, 21 bp, Artificial sequence
  SiRNA target sequence
cgttggctcatctaaaattat

SEQ ID NO: 38088 - DNA, 21 bp, Artificial sequence
  SiRNA target sequence
gttggctcatctaaaattata

SEQ ID NO: 38089 - DNA, 21 bp, Artificial sequence
  SiRNA target sequence
ttggctcatctaaaattataa

SEQ ID NO: 38090 - DNA, 21 bp, Artificial sequence
  SiRNA target sequence
tggctcatctaaaattataat

SEQ ID NO: 38091 - DNA, 21 bp, Artificial sequence
  SiRNA target sequence
ggctcatctaaaattataata

SEQ ID NO: 38092 - DNA, 21 bp, Artificial sequence
  SiRNA target sequence
gctcatctaaaattataatag

SEQ ID NO: 38093 - DNA, 21 bp, Artificial sequence
  SiRNA target sequence
ctcatctaaaattataatagg

SEQ ID NO: 38094 - DNA, 21 bp, Artificial sequence
  SiRNA target sequence
tcatctaaaattataatagga

SEQ ID NO: 38095 - DNA, 21 bp, Artificial sequence
  SiRNA target sequence
catctaaaattataataggag

SEQ ID NO: 38096 - DNA, 21 bp, Artificial sequence
  SiRNA target sequence
atctaaaattataataggaga

SEQ ID NO: 38097 - DNA, 21 bp, Artificial sequence
  SiRNA target sequence
tctaaaattataataggagaa

SEQ ID NO: 38098 - DNA, 21 bp, Artificial sequence
  SiRNA target sequence
ctaaaattataataggagaat

SEQ ID NO: 38099 - DNA, 21 bp, Artificial sequence
  SiRNA target sequence
taaaattataataggagaatt

SEQ ID NO: 38100 - DNA, 21 bp, Artificial sequence
  SiRNA target sequence
aaaattataataggagaattt

SEQ ID NO: 38101 - DNA, 21 bp, Artificial sequence
  SiRNA target sequence
aaattataataggagaatttt

SEQ ID NO: 38102 - DNA, 21 bp, Artificial sequence
  SiRNA target sequence
aattataataggagaattttt

SEQ ID NO: 38103 - DNA, 21 bp, Artificial sequence
  SiRNA target sequence
attataataggagaatttttt

SEQ ID NO: 38104 - DNA, 21 bp, Artificial sequence
  SiRNA target sequence
ttataataggagaatttttta

SEQ ID NO: 38105 - DNA, 21 bp, Artificial sequence
  SiRNA target sequence
tataataggagaattttttag

SEQ ID NO: 38106 - DNA, 21 bp, Artificial sequence
  SiRNA target sequence
ataataggagaattttttagt

SEQ ID NO: 38107 - DNA, 21 bp, Artificial sequence
  SiRNA target sequence
taataggagaattttttagtg

SEQ ID NO: 38108 - DNA, 21 bp, Artificial sequence
  SiRNA target sequence
aataggagaattttttagtgc

SEQ ID NO: 38109 - DNA, 21 bp, Artificial sequence
  SiRNA target sequence
ataggagaattttttagtgcc

SEQ ID NO: 38110 - DNA, 21 bp, Artificial sequence
  SiRNA target sequence
taggagaattttttagtgccg

SEQ ID NO: 38111 - DNA, 21 bp, Artificial sequence
  SiRNA target sequence
aggagaattttttagtgccga

SEQ ID NO: 38112 - DNA, 21 bp, Artificial sequence
  SiRNA target sequence
ggagaattttttagtgccgac

SEQ ID NO: 38113 - DNA, 21 bp, Artificial sequence
  SiRNA target sequence
gagaattttttagtgccgacc

SEQ ID NO: 38114 - DNA, 21 bp, Artificial sequence
  SiRNA target sequence
agaattttttagtgccgacct

SEQ ID NO: 38115 - DNA, 21 bp, Artificial sequence
  SiRNA target sequence
gaattttttagtgccgacctt

SEQ ID NO: 38116 - DNA, 21 bp, Artificial sequence
  SiRNA target sequence
aattttttagtgccgacctta

SEQ ID NO: 38117 - DNA, 21 bp, Artificial sequence
  SiRNA target sequence
attttttagtgccgaccttaa

SEQ ID NO: 38118 - DNA, 21 bp, Artificial sequence
  SiRNA target sequence
ttttttagtgccgaccttaac

SEQ ID NO: 38119 - DNA, 21 bp, Artificial sequence
  SiRNA target sequence
tttttagtgccgaccttaaca

SEQ ID NO: 38120 - DNA, 21 bp, Artificial sequence
  SiRNA target sequence
ttttagtgccgaccttaacaa

SEQ ID NO: 38121 - DNA, 21 bp, Artificial sequence
  SiRNA target sequence
tttagtgccgaccttaacaaa

SEQ ID NO: 38122 - DNA, 21 bp, Artificial sequence
  SiRNA target sequence
ttagtgccgaccttaacaaaa

SEQ ID NO: 38123 - DNA, 21 bp, Artificial sequence
  SiRNA target sequence
tagtgccgaccttaacaaaat

SEQ ID NO: 38124 - DNA, 21 bp, Artificial sequence
  SiRNA target sequence
agtgccgaccttaacaaaatt

SEQ ID NO: 38125 - DNA, 21 bp, Artificial sequence
  SiRNA target sequence
gtgccgaccttaacaaaatta

SEQ ID NO: 38126 - DNA, 21 bp, Artificial sequence
  SiRNA target sequence
tgccgaccttaacaaaattac

SEQ ID NO: 38127 - DNA, 21 bp, Artificial sequence
  SiRNA target sequence
gccgaccttaacaaaattact

SEQ ID NO: 38128 - DNA, 21 bp, Artificial sequence
  SiRNA target sequence
ccgaccttaacaaaattactt

SEQ ID NO: 38129 - DNA, 21 bp, Artificial sequence
  SiRNA target sequence
cgaccttaacaaaattacttt

SEQ ID NO: 38130 - DNA, 21 bp, Artificial sequence
  SiRNA target sequence
gaccttaacaaaattactttt

SEQ ID NO: 38131 - DNA, 21 bp, Artificial sequence
  SiRNA target sequence
accttaacaaaattacttttt

SEQ ID NO: 38132 - DNA, 21 bp, Artificial sequence
  SiRNA target sequence
ccttaacaaaattactttttg

SEQ ID NO: 38133 - DNA, 21 bp, Artificial sequence
  SiRNA target sequence
cttaacaaaattactttttgt

SEQ ID NO: 38134 - DNA, 21 bp, Artificial sequence
  SiRNA target sequence
ttaacaaaattactttttgtc

SEQ ID NO: 38135 - DNA, 21 bp, Artificial sequence
  SiRNA target sequence
taacaaaattactttttgtct

SEQ ID NO: 38136 - DNA, 21 bp, Artificial sequence
  SiRNA target sequence
aacaaaattactttttgtctt

SEQ ID NO: 38137 - DNA, 21 bp, Artificial sequence
  SiRNA target sequence
acaaaattactttttgtcttt

SEQ ID NO: 38138 - DNA, 21 bp, Artificial sequence
  SiRNA target sequence
caaaattactttttgtctttc

SEQ ID NO: 38139 - DNA, 21 bp, Artificial sequence
  SiRNA target sequence
aaaattactttttgtctttct

SEQ ID NO: 38140 - DNA, 21 bp, Artificial sequence
  SiRNA target sequence
aaattactttttgtctttctc

SEQ ID NO: 38141 - DNA, 21 bp, Artificial sequence
  SiRNA target sequence
aattactttttgtctttctcc

SEQ ID NO: 38142 - DNA, 21 bp, Artificial sequence
  SiRNA target sequence
attactttttgtctttctcca

SEQ ID NO: 38143 - DNA, 21 bp, Artificial sequence
  SiRNA target sequence
ttactttttgtctttctccac

SEQ ID NO: 38144 - DNA, 21 bp, Artificial sequence
  SiRNA target sequence
tactttttgtctttctccacc

SEQ ID NO: 38145 - DNA, 21 bp, Artificial sequence
  SiRNA target sequence
actttttgtctttctccacca

SEQ ID NO: 38146 - DNA, 21 bp, Artificial sequence
  SiRNA target sequence
ctttttgtctttctccaccac

SEQ ID NO: 38147 - DNA, 21 bp, Artificial sequence
  SiRNA target sequence
tttttgtctttctccaccact

SEQ ID NO: 38148 - DNA, 21 bp, Artificial sequence
  SiRNA target sequence
ttttgtctttctccaccacta

SEQ ID NO: 38149 - DNA, 21 bp, Artificial sequence
  SiRNA target sequence
tttgtctttctccaccactaa

SEQ ID NO: 38150 - DNA, 21 bp, Artificial sequence
  SiRNA target sequence
ttgtctttctccaccactaag

SEQ ID NO: 38151 - DNA, 21 bp, Artificial sequence
  SiRNA target sequence
tgtctttctccaccactaagc

SEQ ID NO: 38152 - DNA, 21 bp, Artificial sequence
  SiRNA target sequence
gtctttctccaccactaagct

SEQ ID NO: 38153 - DNA, 21 bp, Artificial sequence
  SiRNA target sequence
tctttctccaccactaagctt

SEQ ID NO: 38154 - DNA, 21 bp, Artificial sequence
  SiRNA target sequence
ctttctccaccactaagctta

SEQ ID NO: 38155 - DNA, 21 bp, Artificial sequence
  SiRNA target sequence
tttctccaccactaagcttat

SEQ ID NO: 38156 - DNA, 21 bp, Artificial sequence
  SiRNA target sequence
ttctccaccactaagcttatg

SEQ ID NO: 38157 - DNA, 21 bp, Artificial sequence
  SiRNA target sequence
tctccaccactaagcttatgt

SEQ ID NO: 38158 - DNA, 21 bp, Artificial sequence
  SiRNA target sequence
ctccaccactaagcttatgtc

SEQ ID NO: 38159 - DNA, 21 bp, Artificial sequence
  SiRNA target sequence
tccaccactaagcttatgtcc

SEQ ID NO: 38160 - DNA, 21 bp, Artificial sequence
  SiRNA target sequence
ccaccactaagcttatgtccc

SEQ ID NO: 38161 - DNA, 21 bp, Artificial sequence
  SiRNA target sequence
caccactaagcttatgtccct

SEQ ID NO: 38162 - DNA, 21 bp, Artificial sequence
  SiRNA target sequence
accactaagcttatgtccctt

SEQ ID NO: 38163 - DNA, 21 bp, Artificial sequence
  SiRNA target sequence
ccactaagcttatgtccctta

SEQ ID NO: 38164 - DNA, 21 bp, Artificial sequence
  SiRNA target sequence
cactaagcttatgtcccttat

SEQ ID NO: 38165 - DNA, 21 bp, Artificial sequence
  SiRNA target sequence
actaagcttatgtcccttatc

SEQ ID NO: 38166 - DNA, 21 bp, Artificial sequence
  SiRNA target sequence
ctaagcttatgtcccttatct

SEQ ID NO: 38167 - DNA, 21 bp, Artificial sequence
  SiRNA target sequence
taagcttatgtcccttatctc

SEQ ID NO: 38168 - DNA, 21 bp, Artificial sequence
  SiRNA target sequence
aagcttatgtcccttatctcc

SEQ ID NO: 38169 - DNA, 21 bp, Artificial sequence
  SiRNA target sequence
agcttatgtcccttatctcca

SEQ ID NO: 38170 - DNA, 21 bp, Artificial sequence
  SiRNA target sequence
gcttatgtcccttatctccaa

SEQ ID NO: 38171 - DNA, 21 bp, Artificial sequence
  SiRNA target sequence
cttatgtcccttatctccaac

SEQ ID NO: 38172 - DNA, 21 bp, Artificial sequence
  SiRNA target sequence
ttatgtcccttatctccaaca

SEQ ID NO: 38173 - DNA, 21 bp, Artificial sequence
  SiRNA target sequence
tatgtcccttatctccaacat

SEQ ID NO: 38174 - DNA, 21 bp, Artificial sequence
  SiRNA target sequence
atgtcccttatctccaacatg

SEQ ID NO: 38175 - DNA, 21 bp, Artificial sequence
  SiRNA target sequence
tgtcccttatctccaacatgt

SEQ ID NO: 38176 - DNA, 21 bp, Artificial sequence
  SiRNA target sequence
gtcccttatctccaacatgtg

SEQ ID NO: 38177 - DNA, 21 bp, Artificial sequence
  SiRNA target sequence
tcccttatctccaacatgtgt

SEQ ID NO: 38178 - DNA, 21 bp, Artificial sequence
  SiRNA target sequence
cccttatctccaacatgtgtg

SEQ ID NO: 38179 - DNA, 21 bp, Artificial sequence
  SiRNA target sequence
ccttatctccaacatgtgtgt

SEQ ID NO: 38180 - DNA, 21 bp, Artificial sequence
  SiRNA target sequence
cttatctccaacatgtgtgtt

SEQ ID NO: 38181 - DNA, 21 bp, Artificial sequence
  SiRNA target sequence
ttatctccaacatgtgtgttg

SEQ ID NO: 38182 - DNA, 21 bp, Artificial sequence
  SiRNA target sequence
tatctccaacatgtgtgttgt

SEQ ID NO: 38183 - DNA, 21 bp, Artificial sequence
  SiRNA target sequence
atctccaacatgtgtgttgta

SEQ ID NO: 38184 - DNA, 21 bp, Artificial sequence
  SiRNA target sequence
tctccaacatgtgtgttgtat

SEQ ID NO: 38185 - DNA, 21 bp, Artificial sequence
  SiRNA target sequence
ctccaacatgtgtgttgtatt

SEQ ID NO: 38186 - DNA, 21 bp, Artificial sequence
  SiRNA target sequence
tccaacatgtgtgttgtattc

SEQ ID NO: 38187 - DNA, 21 bp, Artificial sequence
  SiRNA target sequence
ccaacatgtgtgttgtattca

SEQ ID NO: 38188 - DNA, 21 bp, Artificial sequence
  SiRNA target sequence
caacatgtgtgttgtattcat

SEQ ID NO: 38189 - DNA, 21 bp, Artificial sequence
  SiRNA target sequence
aacatgtgtgttgtattcatc

SEQ ID NO: 38190 - DNA, 21 bp, Artificial sequence
  SiRNA target sequence
acatgtgtgttgtattcatcc

SEQ ID NO: 38191 - DNA, 21 bp, Artificial sequence
  SiRNA target sequence
catgtgtgttgtattcatcct

SEQ ID NO: 38192 - DNA, 21 bp, Artificial sequence
  SiRNA target sequence
atgtgtgttgtattcatcctc

SEQ ID NO: 38193 - DNA, 21 bp, Artificial sequence
  SiRNA target sequence
tgtgtgttgtattcatcctct

SEQ ID NO: 38194 - DNA, 21 bp, Artificial sequence
  SiRNA target sequence
gtgtgttgtattcatcctcta

SEQ ID NO: 38195 - DNA, 21 bp, Artificial sequence
  SiRNA target sequence
tgtgttgtattcatcctctag

SEQ ID NO: 38196 - DNA, 21 bp, Artificial sequence
  SiRNA target sequence
gtgttgtattcatcctctagg

SEQ ID NO: 38197 - DNA, 21 bp, Artificial sequence
  SiRNA target sequence
tgttgtattcatcctctaggt

SEQ ID NO: 38198 - DNA, 21 bp, Artificial sequence
  SiRNA target sequence
gttgtattcatcctctaggtt

SEQ ID NO: 38199 - DNA, 21 bp, Artificial sequence
  SiRNA target sequence
ttgtattcatcctctaggttg

SEQ ID NO: 38200 - DNA, 21 bp, Artificial sequence
  SiRNA target sequence
tgtattcatcctctaggttgt

SEQ ID NO: 38201 - DNA, 21 bp, Artificial sequence
  SiRNA target sequence
gtattcatcctctaggttgtt

SEQ ID NO: 38202 - DNA, 21 bp, Artificial sequence
  SiRNA target sequence
tattcatcctctaggttgttt

SEQ ID NO: 38203 - DNA, 21 bp, Artificial sequence
  SiRNA target sequence
attcatcctctaggttgttta

SEQ ID NO: 38204 - DNA, 21 bp, Artificial sequence
  SiRNA target sequence
ttcatcctctaggttgtttat

SEQ ID NO: 38205 - DNA, 21 bp, Artificial sequence
  SiRNA target sequence
tcatcctctaggttgtttata

SEQ ID NO: 38206 - DNA, 21 bp, Artificial sequence
  SiRNA target sequence
catcctctaggttgtttatag

SEQ ID NO: 38207 - DNA, 21 bp, Artificial sequence
  SiRNA target sequence
atcctctaggttgtttataga

SEQ ID NO: 38208 - DNA, 21 bp, Artificial sequence
  SiRNA target sequence
tcctctaggttgtttatagaa

SEQ ID NO: 38209 - DNA, 21 bp, Artificial sequence
  SiRNA target sequence
cctctaggttgtttatagaat

SEQ ID NO: 38210 - DNA, 21 bp, Artificial sequence
  SiRNA target sequence
ctctaggttgtttatagaatc

SEQ ID NO: 38211 - DNA, 21 bp, Artificial sequence
  SiRNA target sequence
tctaggttgtttatagaatcg

SEQ ID NO: 38212 - DNA, 21 bp, Artificial sequence
  SiRNA target sequence
ctaggttgtttatagaatcgt

SEQ ID NO: 38213 - DNA, 21 bp, Artificial sequence
  SiRNA target sequence
taggttgtttatagaatcgtg

SEQ ID NO: 38214 - DNA, 21 bp, Artificial sequence
  SiRNA target sequence
aggttgtttatagaatcgtgt

SEQ ID NO: 38215 - DNA, 21 bp, Artificial sequence
  SiRNA target sequence
ggttgtttatagaatcgtgta

SEQ ID NO: 38216 - DNA, 21 bp, Artificial sequence
  SiRNA target sequence
gttgtttatagaatcgtgtac

SEQ ID NO: 38217 - DNA, 21 bp, Artificial sequence
  SiRNA target sequence
ttgtttatagaatcgtgtaca

SEQ ID NO: 38218 - DNA, 21 bp, Artificial sequence
  SiRNA target sequence
tgtttatagaatcgtgtacac

SEQ ID NO: 38219 - DNA, 21 bp, Artificial sequence
  SiRNA target sequence
gtttatagaatcgtgtacaca

SEQ ID NO: 38220 - DNA, 21 bp, Artificial sequence
  SiRNA target sequence
tttatagaatcgtgtacacaa

SEQ ID NO: 38221 - DNA, 21 bp, Artificial sequence
  SiRNA target sequence
ttatagaatcgtgtacacaaa

SEQ ID NO: 38222 - DNA, 21 bp, Artificial sequence
  SiRNA target sequence
tatagaatcgtgtacacaaag

SEQ ID NO: 38223 - DNA, 21 bp, Artificial sequence
  SiRNA target sequence
atagaatcgtgtacacaaagt

SEQ ID NO: 38224 - DNA, 21 bp, Artificial sequence
  SiRNA target sequence
tagaatcgtgtacacaaagtt

SEQ ID NO: 38225 - DNA, 21 bp, Artificial sequence
  SiRNA target sequence
agaatcgtgtacacaaagttt

SEQ ID NO: 38226 - DNA, 21 bp, Artificial sequence
  SiRNA target sequence
gaatcgtgtacacaaagtttt

SEQ ID NO: 38227 - DNA, 21 bp, Artificial sequence
  SiRNA target sequence
aatcgtgtacacaaagttttt

SEQ ID NO: 38228 - DNA, 21 bp, Artificial sequence
  SiRNA target sequence
atcgtgtacacaaagtttttt

SEQ ID NO: 38229 - DNA, 21 bp, Artificial sequence
  SiRNA target sequence
tcgtgtacacaaagtttttta

SEQ ID NO: 38230 - DNA, 21 bp, Artificial sequence
  SiRNA target sequence
cgtgtacacaaagttttttac

SEQ ID NO: 38231 - DNA, 21 bp, Artificial sequence
  SiRNA target sequence
gtgtacacaaagttttttact

SEQ ID NO: 38232 - DNA, 21 bp, Artificial sequence
  SiRNA target sequence
tgtacacaaagttttttactg

SEQ ID NO: 38233 - DNA, 21 bp, Artificial sequence
  SiRNA target sequence
gtacacaaagttttttactga

SEQ ID NO: 38234 - DNA, 21 bp, Artificial sequence
  SiRNA target sequence
tacacaaagttttttactgat

SEQ ID NO: 38235 - DNA, 21 bp, Artificial sequence
  SiRNA target sequence
acacaaagttttttactgatt

SEQ ID NO: 38236 - DNA, 21 bp, Artificial sequence
  SiRNA target sequence
cacaaagttttttactgattt

SEQ ID NO: 38237 - DNA, 21 bp, Artificial sequence
  SiRNA target sequence
acaaagttttttactgatttt

SEQ ID NO: 38238 - DNA, 21 bp, Artificial sequence
  SiRNA target sequence
caaagttttttactgattttt

SEQ ID NO: 38239 - DNA, 21 bp, Artificial sequence
  SiRNA target sequence
aaagttttttactgattttta

SEQ ID NO: 38240 - DNA, 21 bp, Artificial sequence
  SiRNA target sequence
aagttttttactgatttttat

SEQ ID NO: 38241 - DNA, 21 bp, Artificial sequence
  SiRNA target sequence
agttttttactgatttttata

SEQ ID NO: 38242 - DNA, 21 bp, Artificial sequence
  SiRNA target sequence
gttttttactgatttttataa

SEQ ID NO: 38243 - DNA, 21 bp, Artificial sequence
  SiRNA target sequence
ttttttactgatttttataac

SEQ ID NO: 38244 - DNA, 21 bp, Artificial sequence
  SiRNA target sequence
tttttactgatttttataact

SEQ ID NO: 38245 - DNA, 21 bp, Artificial sequence
  SiRNA target sequence
ttttactgatttttataactt

SEQ ID NO: 38246 - DNA, 21 bp, Artificial sequence
  SiRNA target sequence
tttactgatttttataacttc

SEQ ID NO: 38247 - DNA, 21 bp, Artificial sequence
  SiRNA target sequence
ttactgatttttataacttct

SEQ ID NO: 38248 - DNA, 21 bp, Artificial sequence
  SiRNA target sequence
tactgatttttataacttctt

SEQ ID NO: 38249 - DNA, 21 bp, Artificial sequence
  SiRNA target sequence
actgatttttataacttcttc

SEQ ID NO: 38250 - DNA, 21 bp, Artificial sequence
  SiRNA target sequence
ctgatttttataacttcttct

SEQ ID NO: 38251 - DNA, 21 bp, Artificial sequence
  SiRNA target sequence
tgatttttataacttcttctt

SEQ ID NO: 38252 - DNA, 21 bp, Artificial sequence
  SiRNA target sequence
gatttttataacttcttcttt

SEQ ID NO: 38253 - DNA, 21 bp, Artificial sequence
  SiRNA target sequence
atttttataacttcttcttta

SEQ ID NO: 38254 - DNA, 21 bp, Artificial sequence
  SiRNA target sequence
tttttataacttcttctttat

SEQ ID NO: 38255 - DNA, 21 bp, Artificial sequence
  SiRNA target sequence
ttttataacttcttctttatc

SEQ ID NO: 38256 - DNA, 21 bp, Artificial sequence
  SiRNA target sequence
tttataacttcttctttatca

SEQ ID NO: 38257 - DNA, 21 bp, Artificial sequence
  SiRNA target sequence
ttataacttcttctttatcaa

SEQ ID NO: 38258 - DNA, 21 bp, Artificial sequence
  SiRNA target sequence
tataacttcttctttatcaaa

SEQ ID NO: 38259 - DNA, 21 bp, Artificial sequence
  SiRNA target sequence
ataacttcttctttatcaaat

SEQ ID NO: 38260 - DNA, 21 bp, Artificial sequence
  SiRNA target sequence
taacttcttctttatcaaata

SEQ ID NO: 38261 - DNA, 21 bp, Artificial sequence
  SiRNA target sequence
aacttcttctttatcaaatat

SEQ ID NO: 38262 - DNA, 21 bp, Artificial sequence
  SiRNA target sequence
acttcttctttatcaaatatt

SEQ ID NO: 38263 - DNA, 21 bp, Artificial sequence
  SiRNA target sequence
cttcttctttatcaaatattt

SEQ ID NO: 38264 - DNA, 21 bp, Artificial sequence
  SiRNA target sequence
ttcttctttatcaaatatttc

SEQ ID NO: 38265 - DNA, 21 bp, Artificial sequence
  SiRNA target sequence
tcttctttatcaaatatttct

SEQ ID NO: 38266 - DNA, 21 bp, Artificial sequence
  SiRNA target sequence
cttctttatcaaatatttctt

SEQ ID NO: 38267 - DNA, 21 bp, Artificial sequence
  SiRNA target sequence
ttctttatcaaatatttcttt

SEQ ID NO: 38268 - DNA, 21 bp, Artificial sequence
  SiRNA target sequence
tctttatcaaatatttctttt

SEQ ID NO: 38269 - DNA, 21 bp, Artificial sequence
  SiRNA target sequence
ctttatcaaatatttcttttc

SEQ ID NO: 38270 - DNA, 21 bp, Artificial sequence
  SiRNA target sequence
tttatcaaatatttcttttcc

SEQ ID NO: 38271 - DNA, 21 bp, Artificial sequence
  SiRNA target sequence
ttatcaaatatttcttttcca

SEQ ID NO: 38272 - DNA, 21 bp, Artificial sequence
  SiRNA target sequence
tatcaaatatttcttttccat

SEQ ID NO: 38273 - DNA, 21 bp, Artificial sequence
  SiRNA target sequence
atcaaatatttcttttccata

SEQ ID NO: 38274 - DNA, 21 bp, Artificial sequence
  SiRNA target sequence
tcaaatatttcttttccatat

SEQ ID NO: 38275 - DNA, 21 bp, Artificial sequence
  SiRNA target sequence
caaatatttcttttccatatg

SEQ ID NO: 38276 - DNA, 21 bp, Artificial sequence
  SiRNA target sequence
aaatatttcttttccatatgt

SEQ ID NO: 38277 - DNA, 21 bp, Artificial sequence
  SiRNA target sequence
aatatttcttttccatatgtt

SEQ ID NO: 38278 - DNA, 21 bp, Artificial sequence
  SiRNA target sequence
atatttcttttccatatgtta

SEQ ID NO: 38279 - DNA, 21 bp, Artificial sequence
  SiRNA target sequence
tatttcttttccatatgttaa

SEQ ID NO: 38280 - DNA, 21 bp, Artificial sequence
  SiRNA target sequence
atttcttttccatatgttaaa

SEQ ID NO: 38281 - DNA, 21 bp, Artificial sequence
  SiRNA target sequence
tttcttttccatatgttaaat

SEQ ID NO: 38282 - DNA, 21 bp, Artificial sequence
  SiRNA target sequence
ttcttttccatatgttaaatt

SEQ ID NO: 38283 - DNA, 21 bp, Artificial sequence
  SiRNA target sequence
tcttttccatatgttaaatta

SEQ ID NO: 38284 - DNA, 21 bp, Artificial sequence
  SiRNA target sequence
cttttccatatgttaaattat

SEQ ID NO: 38285 - DNA, 21 bp, Artificial sequence
  SiRNA target sequence
ttttccatatgttaaattata

SEQ ID NO: 38286 - DNA, 21 bp, Artificial sequence
  SiRNA target sequence
tttccatatgttaaattataa

SEQ ID NO: 38287 - DNA, 21 bp, Artificial sequence
  SiRNA target sequence
ttccatatgttaaattataat

SEQ ID NO: 38288 - DNA, 21 bp, Artificial sequence
  SiRNA target sequence
tccatatgttaaattataata

SEQ ID NO: 38289 - DNA, 21 bp, Artificial sequence
  SiRNA target sequence
ccatatgttaaattataataa

SEQ ID NO: 38290 - DNA, 21 bp, Artificial sequence
  SiRNA target sequence
catatgttaaattataataaa

SEQ ID NO: 38291 - DNA, 21 bp, Artificial sequence
  SiRNA target sequence
atatgttaaattataataaac

SEQ ID NO: 38292 - DNA, 21 bp, Artificial sequence
  SiRNA target sequence
tatgttaaattataataaacc

SEQ ID NO: 38293 - DNA, 21 bp, Artificial sequence
  SiRNA target sequence
atgttaaattataataaaccg

SEQ ID NO: 38294 - DNA, 21 bp, Artificial sequence
  SiRNA target sequence
tgttaaattataataaaccgt

SEQ ID NO: 38295 - DNA, 21 bp, Artificial sequence
  SiRNA target sequence
gttaaattataataaaccgtt

SEQ ID NO: 38296 - DNA, 21 bp, Artificial sequence
  SiRNA target sequence
ttaaattataataaaccgttt

SEQ ID NO: 38297 - DNA, 21 bp, Artificial sequence
  SiRNA target sequence
taaattataataaaccgtttc

SEQ ID NO: 38298 - DNA, 21 bp, Artificial sequence
  SiRNA target sequence
aaattataataaaccgtttcg

SEQ ID NO: 38299 - DNA, 21 bp, Artificial sequence
  SiRNA target sequence
aattataataaaccgtttcgt

SEQ ID NO: 38300 - DNA, 21 bp, Artificial sequence
  SiRNA target sequence
attataataaaccgtttcgtt

SEQ ID NO: 38301 - DNA, 21 bp, Artificial sequence
  SiRNA target sequence
ttataataaaccgtttcgtta

SEQ ID NO: 38302 - DNA, 21 bp, Artificial sequence
  SiRNA target sequence
tataataaaccgtttcgttaa

SEQ ID NO: 38303 - DNA, 21 bp, Artificial sequence
  SiRNA target sequence
ataataaaccgtttcgttaaa

SEQ ID NO: 38304 - DNA, 21 bp, Artificial sequence
  SiRNA target sequence
taataaaccgtttcgttaaac

SEQ ID NO: 38305 - DNA, 21 bp, Artificial sequence
  SiRNA target sequence
aataaaccgtttcgttaaaca

SEQ ID NO: 38306 - DNA, 21 bp, Artificial sequence
  SiRNA target sequence
ataaaccgtttcgttaaacaa

SEQ ID NO: 38307 - DNA, 21 bp, Artificial sequence
  SiRNA target sequence
taaaccgtttcgttaaacaaa

SEQ ID NO: 38308 - DNA, 21 bp, Artificial sequence
  SiRNA target sequence
aaaccgtttcgttaaacaaaa

SEQ ID NO: 38309 - DNA, 21 bp, Artificial sequence
  SiRNA target sequence
aaccgtttcgttaaacaaaaa

SEQ ID NO: 38310 - DNA, 21 bp, Artificial sequence
  SiRNA target sequence
accgtttcgttaaacaaaaat

SEQ ID NO: 38311 - DNA, 21 bp, Artificial sequence
  SiRNA target sequence
ccgtttcgttaaacaaaaatg

SEQ ID NO: 38312 - DNA, 21 bp, Artificial sequence
  SiRNA target sequence
cgtttcgttaaacaaaaatga

SEQ ID NO: 38313 - DNA, 21 bp, Artificial sequence
  SiRNA target sequence
gtttcgttaaacaaaaatgag

SEQ ID NO: 38314 - DNA, 21 bp, Artificial sequence
  SiRNA target sequence
tttcgttaaacaaaaatgagg

SEQ ID NO: 38315 - DNA, 21 bp, Artificial sequence
  SiRNA target sequence
ttcgttaaacaaaaatgaggt

SEQ ID NO: 38316 - DNA, 21 bp, Artificial sequence
  SiRNA target sequence
tcgttaaacaaaaatgaggtt

SEQ ID NO: 38317 - DNA, 21 bp, Artificial sequence
  SiRNA target sequence
cgttaaacaaaaatgaggttt

SEQ ID NO: 38318 - DNA, 21 bp, Artificial sequence
  SiRNA target sequence
gttaaacaaaaatgaggtttg

SEQ ID NO: 38319 - DNA, 21 bp, Artificial sequence
  SiRNA target sequence
ttaaacaaaaatgaggtttgt

SEQ ID NO: 38320 - DNA, 21 bp, Artificial sequence
  SiRNA target sequence
taaacaaaaatgaggtttgtg

SEQ ID NO: 38321 - DNA, 21 bp, Artificial sequence
  SiRNA target sequence
aaacaaaaatgaggtttgtgg

SEQ ID NO: 38322 - DNA, 21 bp, Artificial sequence
  SiRNA target sequence
aacaaaaatgaggtttgtggt

SEQ ID NO: 38323 - DNA, 21 bp, Artificial sequence
  SiRNA target sequence
acaaaaatgaggtttgtggtg

SEQ ID NO: 38324 - DNA, 21 bp, Artificial sequence
  SiRNA target sequence
caaaaatgaggtttgtggtgc

SEQ ID NO: 38325 - DNA, 21 bp, Artificial sequence
  SiRNA target sequence
aaaaatgaggtttgtggtgca

SEQ ID NO: 38326 - DNA, 21 bp, Artificial sequence
  SiRNA target sequence
aaaatgaggtttgtggtgcaa

SEQ ID NO: 38327 - DNA, 21 bp, Artificial sequence
  SiRNA target sequence
aaatgaggtttgtggtgcaaa

SEQ ID NO: 38328 - DNA, 21 bp, Artificial sequence
  SiRNA target sequence
aatgaggtttgtggtgcaaat

SEQ ID NO: 38329 - DNA, 21 bp, Artificial sequence
  SiRNA target sequence
atgaggtttgtggtgcaaatg

SEQ ID NO: 38330 - DNA, 21 bp, Artificial sequence
  SiRNA target sequence
tgaggtttgtggtgcaaatga

SEQ ID NO: 38331 - DNA, 21 bp, Artificial sequence
  SiRNA target sequence
gaggtttgtggtgcaaatgat

SEQ ID NO: 38332 - DNA, 21 bp, Artificial sequence
  SiRNA target sequence
aggtttgtggtgcaaatgata

SEQ ID NO: 38333 - DNA, 21 bp, Artificial sequence
  SiRNA target sequence
ggtttgtggtgcaaatgatat

SEQ ID NO: 38334 - DNA, 21 bp, Artificial sequence
  SiRNA target sequence
gtttgtggtgcaaatgatata

SEQ ID NO: 38335 - DNA, 21 bp, Artificial sequence
  SiRNA target sequence
tttgtggtgcaaatgatataa

SEQ ID NO: 38336 - DNA, 21 bp, Artificial sequence
  SiRNA target sequence
ttgtggtgcaaatgatataag

SEQ ID NO: 38337 - DNA, 21 bp, Artificial sequence
  SiRNA target sequence
tgtggtgcaaatgatataagt

SEQ ID NO: 38338 - DNA, 21 bp, Artificial sequence
  SiRNA target sequence
gtggtgcaaatgatataagtg

SEQ ID NO: 38339 - DNA, 21 bp, Artificial sequence
  SiRNA target sequence
tggtgcaaatgatataagtga

SEQ ID NO: 38340 - DNA, 21 bp, Artificial sequence
  SiRNA target sequence
ggtgcaaatgatataagtgat

SEQ ID NO: 38341 - DNA, 21 bp, Artificial sequence
  SiRNA target sequence
gtgcaaatgatataagtgatc

SEQ ID NO: 38342 - DNA, 21 bp, Artificial sequence
  SiRNA target sequence
tgcaaatgatataagtgatct

SEQ ID NO: 38343 - DNA, 21 bp, Artificial sequence
  SiRNA target sequence
gcaaatgatataagtgatcta

SEQ ID NO: 38344 - DNA, 21 bp, Artificial sequence
  SiRNA target sequence
caaatgatataagtgatctat

SEQ ID NO: 38345 - DNA, 21 bp, Artificial sequence
  SiRNA target sequence
aaatgatataagtgatctata

SEQ ID NO: 38346 - DNA, 21 bp, Artificial sequence
  SiRNA target sequence
aatgatataagtgatctatat

SEQ ID NO: 38347 - DNA, 21 bp, Artificial sequence
  SiRNA target sequence
atgatataagtgatctatatg

SEQ ID NO: 38348 - DNA, 21 bp, Artificial sequence
  SiRNA target sequence
tgatataagtgatctatatga

SEQ ID NO: 38349 - DNA, 21 bp, Artificial sequence
  SiRNA target sequence
gatataagtgatctatatgaa

SEQ ID NO: 38350 - DNA, 21 bp, Artificial sequence
  SiRNA target sequence
atataagtgatctatatgaac

SEQ ID NO: 38351 - DNA, 21 bp, Artificial sequence
  SiRNA target sequence
tataagtgatctatatgaact

SEQ ID NO: 38352 - DNA, 21 bp, Artificial sequence
  SiRNA target sequence
ataagtgatctatatgaacta

SEQ ID NO: 38353 - DNA, 21 bp, Artificial sequence
  SiRNA target sequence
taagtgatctatatgaactat

SEQ ID NO: 38354 - DNA, 21 bp, Artificial sequence
  SiRNA target sequence
aagtgatctatatgaactatt

SEQ ID NO: 38355 - DNA, 21 bp, Artificial sequence
  SiRNA target sequence
agtgatctatatgaactatta

SEQ ID NO: 38356 - DNA, 21 bp, Artificial sequence
  SiRNA target sequence
gtgatctatatgaactattag

SEQ ID NO: 38357 - DNA, 21 bp, Artificial sequence
  SiRNA target sequence
tgatctatatgaactattaga

SEQ ID NO: 38358 - DNA, 21 bp, Artificial sequence
  SiRNA target sequence
gatctatatgaactattagaa

SEQ ID NO: 38359 - DNA, 21 bp, Artificial sequence
  SiRNA target sequence
atctatatgaactattagaaa

SEQ ID NO: 38360 - DNA, 21 bp, Artificial sequence
  SiRNA target sequence
tctatatgaactattagaaat

SEQ ID NO: 38361 - DNA, 21 bp, Artificial sequence
  SiRNA target sequence
ctatatgaactattagaaatt

SEQ ID NO: 38362 - DNA, 21 bp, Artificial sequence
  SiRNA target sequence
tatatgaactattagaaattt

SEQ ID NO: 38363 - DNA, 21 bp, Artificial sequence
  SiRNA target sequence
atatgaactattagaaatttc

SEQ ID NO: 38364 - DNA, 21 bp, Artificial sequence
  SiRNA target sequence
tatgaactattagaaatttct

SEQ ID NO: 38365 - DNA, 21 bp, Artificial sequence
  SiRNA target sequence
atgaactattagaaatttctt

SEQ ID NO: 38366 - DNA, 21 bp, Artificial sequence
  SiRNA target sequence
tgaactattagaaatttcttt

SEQ ID NO: 38367 - DNA, 21 bp, Artificial sequence
  SiRNA target sequence
gaactattagaaatttctttt

SEQ ID NO: 38368 - DNA, 21 bp, Artificial sequence
  SiRNA target sequence
aactattagaaatttctttta

SEQ ID NO: 38369 - DNA, 21 bp, Artificial sequence
  SiRNA target sequence
actattagaaatttcttttat

SEQ ID NO: 38370 - DNA, 21 bp, Artificial sequence
  SiRNA target sequence
ctattagaaatttcttttata

SEQ ID NO: 38371 - DNA, 21 bp, Artificial sequence
  SiRNA target sequence
tattagaaatttcttttatat

SEQ ID NO: 38372 - DNA, 21 bp, Artificial sequence
  SiRNA target sequence
attagaaatttcttttatatc

SEQ ID NO: 38373 - DNA, 21 bp, Artificial sequence
  SiRNA target sequence
ttagaaatttcttttatatct

SEQ ID NO: 38374 - DNA, 21 bp, Artificial sequence
  SiRNA target sequence
tagaaatttcttttatatctc

SEQ ID NO: 38375 - DNA, 21 bp, Artificial sequence
  SiRNA target sequence
agaaatttcttttatatctcg

SEQ ID NO: 38376 - DNA, 21 bp, Artificial sequence
  SiRNA target sequence
gaaatttcttttatatctcga

SEQ ID NO: 38377 - DNA, 21 bp, Artificial sequence
  SiRNA target sequence
aaatttcttttatatctcgat

SEQ ID NO: 38378 - DNA, 21 bp, Artificial sequence
  SiRNA target sequence
aatttcttttatatctcgatt

SEQ ID NO: 38379 - DNA, 21 bp, Artificial sequence
  SiRNA target sequence
atttcttttatatctcgatta

SEQ ID NO: 38380 - DNA, 21 bp, Artificial sequence
  SiRNA target sequence
tttcttttatatctcgattat

SEQ ID NO: 38381 - DNA, 21 bp, Artificial sequence
  SiRNA target sequence
ttcttttatatctcgattatc

SEQ ID NO: 38382 - DNA, 21 bp, Artificial sequence
  SiRNA target sequence
tcttttatatctcgattatct

SEQ ID NO: 38383 - DNA, 21 bp, Artificial sequence
  SiRNA target sequence
cttttatatctcgattatcta

SEQ ID NO: 38384 - DNA, 21 bp, Artificial sequence
  SiRNA target sequence
ttttatatctcgattatctag

SEQ ID NO: 38385 - DNA, 21 bp, Artificial sequence
  SiRNA target sequence
tttatatctcgattatctaga

SEQ ID NO: 38386 - DNA, 21 bp, Artificial sequence
  SiRNA target sequence
ttatatctcgattatctagat

SEQ ID NO: 38387 - DNA, 21 bp, Artificial sequence
  SiRNA target sequence
tatatctcgattatctagata

SEQ ID NO: 38388 - DNA, 21 bp, Artificial sequence
  SiRNA target sequence
atatctcgattatctagataa

SEQ ID NO: 38389 - DNA, 21 bp, Artificial sequence
  SiRNA target sequence
tatctcgattatctagataaa

SEQ ID NO: 38390 - DNA, 21 bp, Artificial sequence
  SiRNA target sequence
atctcgattatctagataaat

SEQ ID NO: 38391 - DNA, 21 bp, Artificial sequence
  SiRNA target sequence
tctcgattatctagataaata

SEQ ID NO: 38392 - DNA, 21 bp, Artificial sequence
  SiRNA target sequence
ctcgattatctagataaatat

SEQ ID NO: 38393 - DNA, 21 bp, Artificial sequence
  SiRNA target sequence
tcgattatctagataaatatt

SEQ ID NO: 38394 - DNA, 21 bp, Artificial sequence
  SiRNA target sequence
cgattatctagataaatattt

SEQ ID NO: 38395 - DNA, 21 bp, Artificial sequence
  SiRNA target sequence
gattatctagataaatatttc

SEQ ID NO: 38396 - DNA, 21 bp, Artificial sequence
  SiRNA target sequence
attatctagataaatatttcc

SEQ ID NO: 38397 - DNA, 21 bp, Artificial sequence
  SiRNA target sequence
ttatctagataaatatttccc

SEQ ID NO: 38398 - DNA, 21 bp, Artificial sequence
  SiRNA target sequence
tatctagataaatatttcccc

SEQ ID NO: 38399 - DNA, 21 bp, Artificial sequence
  SiRNA target sequence
atctagataaatatttccccc

SEQ ID NO: 38400 - DNA, 21 bp, Artificial sequence
  SiRNA target sequence
tctagataaatatttccccca

SEQ ID NO: 38401 - DNA, 21 bp, Artificial sequence
  SiRNA target sequence
ctagataaatatttcccccat

SEQ ID NO: 38402 - DNA, 21 bp, Artificial sequence
  SiRNA target sequence
tagataaatatttcccccata

SEQ ID NO: 38403 - DNA, 21 bp, Artificial sequence
  SiRNA target sequence
agataaatatttcccccataa

SEQ ID NO: 38404 - DNA, 21 bp, Artificial sequence
  SiRNA target sequence
gataaatatttcccccataat

SEQ ID NO: 38405 - DNA, 21 bp, Artificial sequence
  SiRNA target sequence
ataaatatttcccccataatt

SEQ ID NO: 38406 - DNA, 21 bp, Artificial sequence
  SiRNA target sequence
taaatatttcccccataattt

SEQ ID NO: 38407 - DNA, 21 bp, Artificial sequence
  SiRNA target sequence
aaatatttcccccataatttt

SEQ ID NO: 38408 - DNA, 21 bp, Artificial sequence
  SiRNA target sequence
aatatttcccccataattttc

SEQ ID NO: 38409 - DNA, 21 bp, Artificial sequence
  SiRNA target sequence
atatttcccccataattttca

SEQ ID NO: 38410 - DNA, 21 bp, Artificial sequence
  SiRNA target sequence
tatttcccccataattttcaa

SEQ ID NO: 38411 - DNA, 21 bp, Artificial sequence
  SiRNA target sequence
atttcccccataattttcaaa

SEQ ID NO: 38412 - DNA, 21 bp, Artificial sequence
  SiRNA target sequence
tttcccccataattttcaaat

SEQ ID NO: 38413 - DNA, 21 bp, Artificial sequence
  SiRNA target sequence
ttcccccataattttcaaatc

SEQ ID NO: 38414 - DNA, 21 bp, Artificial sequence
  SiRNA target sequence
tcccccataattttcaaatct

SEQ ID NO: 38415 - DNA, 21 bp, Artificial sequence
  SiRNA target sequence
cccccataattttcaaatctc

SEQ ID NO: 38416 - DNA, 21 bp, Artificial sequence
  SiRNA target sequence
ccccataattttcaaatctca

SEQ ID NO: 38417 - DNA, 21 bp, Artificial sequence
  SiRNA target sequence
cccataattttcaaatctcat

SEQ ID NO: 38418 - DNA, 21 bp, Artificial sequence
  SiRNA target sequence
ccataattttcaaatctcata

SEQ ID NO: 38419 - DNA, 21 bp, Artificial sequence
  SiRNA target sequence
cataattttcaaatctcataa

SEQ ID NO: 38420 - DNA, 21 bp, Artificial sequence
  SiRNA target sequence
ataattttcaaatctcataat

SEQ ID NO: 38421 - DNA, 21 bp, Artificial sequence
  SiRNA target sequence
taattttcaaatctcataatc

SEQ ID NO: 38422 - DNA, 21 bp, Artificial sequence
  SiRNA target sequence
aattttcaaatctcataatca

SEQ ID NO: 38423 - DNA, 21 bp, Artificial sequence
  SiRNA target sequence
attttcaaatctcataatcat

SEQ ID NO: 38424 - DNA, 21 bp, Artificial sequence
  SiRNA target sequence
ttttcaaatctcataatcatc

SEQ ID NO: 38425 - DNA, 21 bp, Artificial sequence
  SiRNA target sequence
tttcaaatctcataatcatct

SEQ ID NO: 38426 - DNA, 21 bp, Artificial sequence
  SiRNA target sequence
ttcaaatctcataatcatctt

SEQ ID NO: 38427 - DNA, 21 bp, Artificial sequence
  SiRNA target sequence
tcaaatctcataatcatcttt

SEQ ID NO: 38428 - DNA, 21 bp, Artificial sequence
  SiRNA target sequence
caaatctcataatcatcttta

SEQ ID NO: 38429 - DNA, 21 bp, Artificial sequence
  SiRNA target sequence
aaatctcataatcatctttat

SEQ ID NO: 38430 - DNA, 21 bp, Artificial sequence
  SiRNA target sequence
aatctcataatcatctttata

SEQ ID NO: 38431 - DNA, 21 bp, Artificial sequence
  SiRNA target sequence
atctcataatcatctttataa

SEQ ID NO: 38432 - DNA, 21 bp, Artificial sequence
  SiRNA target sequence
tctcataatcatctttataag

SEQ ID NO: 38433 - DNA, 21 bp, Artificial sequence
  SiRNA target sequence
ctcataatcatctttataaga

SEQ ID NO: 38434 - DNA, 21 bp, Artificial sequence
  SiRNA target sequence
tcataatcatctttataagag

SEQ ID NO: 38435 - DNA, 21 bp, Artificial sequence
  SiRNA target sequence
cataatcatctttataagaga

SEQ ID NO: 38436 - DNA, 21 bp, Artificial sequence
  SiRNA target sequence
ataatcatctttataagagat

SEQ ID NO: 38437 - DNA, 21 bp, Artificial sequence
  SiRNA target sequence
taatcatctttataagagatg

SEQ ID NO: 38438 - DNA, 21 bp, Artificial sequence
  SiRNA target sequence
aatcatctttataagagatgt

SEQ ID NO: 38439 - DNA, 21 bp, Artificial sequence
  SiRNA target sequence
atcatctttataagagatgtt

SEQ ID NO: 38440 - DNA, 21 bp, Artificial sequence
  SiRNA target sequence
tcatctttataagagatgttt

SEQ ID NO: 38441 - DNA, 21 bp, Artificial sequence
  SiRNA target sequence
catctttataagagatgtttt

SEQ ID NO: 38442 - DNA, 21 bp, Artificial sequence
  SiRNA target sequence
atctttataagagatgttttt

SEQ ID NO: 38443 - DNA, 21 bp, Artificial sequence
  SiRNA target sequence
tctttataagagatgtttttc

SEQ ID NO: 38444 - DNA, 21 bp, Artificial sequence
  SiRNA target sequence
ctttataagagatgtttttcc

SEQ ID NO: 38445 - DNA, 21 bp, Artificial sequence
  SiRNA target sequence
tttataagagatgtttttccc

SEQ ID NO: 38446 - DNA, 21 bp, Artificial sequence
  SiRNA target sequence
ttataagagatgtttttcccg

SEQ ID NO: 38447 - DNA, 21 bp, Artificial sequence
  SiRNA target sequence
tataagagatgtttttcccga

SEQ ID NO: 38448 - DNA, 21 bp, Artificial sequence
  SiRNA target sequence
ataagagatgtttttcccgat

SEQ ID NO: 38449 - DNA, 21 bp, Artificial sequence
  SiRNA target sequence
taagagatgtttttcccgatc

SEQ ID NO: 38450 - DNA, 21 bp, Artificial sequence
  SiRNA target sequence
aagagatgtttttcccgatcc

SEQ ID NO: 38451 - DNA, 21 bp, Artificial sequence
  SiRNA target sequence
agagatgtttttcccgatcca

SEQ ID NO: 38452 - DNA, 21 bp, Artificial sequence
  SiRNA target sequence
gagatgtttttcccgatccat

SEQ ID NO: 38453 - DNA, 21 bp, Artificial sequence
  SiRNA target sequence
agatgtttttcccgatccatt

SEQ ID NO: 38454 - DNA, 21 bp, Artificial sequence
  SiRNA target sequence
gatgtttttcccgatccattt

SEQ ID NO: 38455 - DNA, 21 bp, Artificial sequence
  SiRNA target sequence
atgtttttcccgatccatttt

SEQ ID NO: 38456 - DNA, 21 bp, Artificial sequence
  SiRNA target sequence
tgtttttcccgatccattttt

SEQ ID NO: 38457 - DNA, 21 bp, Artificial sequence
  SiRNA target sequence
gtttttcccgatccatttttt

SEQ ID NO: 38458 - DNA, 21 bp, Artificial sequence
  SiRNA target sequence
tttttcccgatccattttttc

SEQ ID NO: 38459 - DNA, 21 bp, Artificial sequence
  SiRNA target sequence
ttttcccgatccattttttcc

SEQ ID NO: 38460 - DNA, 21 bp, Artificial sequence
  SiRNA target sequence
tttcccgatccattttttcca

SEQ ID NO: 38461 - DNA, 21 bp, Artificial sequence
  SiRNA target sequence
ttcccgatccattttttccaa

SEQ ID NO: 38462 - DNA, 21 bp, Artificial sequence
  SiRNA target sequence
tcccgatccattttttccaat

SEQ ID NO: 38463 - DNA, 21 bp, Artificial sequence
  SiRNA target sequence
cccgatccattttttccaata

SEQ ID NO: 38464 - DNA, 21 bp, Artificial sequence
  SiRNA target sequence
ccgatccattttttccaataa

SEQ ID NO: 38465 - DNA, 21 bp, Artificial sequence
  SiRNA target sequence
cgatccattttttccaataat

SEQ ID NO: 38466 - DNA, 21 bp, Artificial sequence
  SiRNA target sequence
gatccattttttccaataata

SEQ ID NO: 38467 - DNA, 21 bp, Artificial sequence
  SiRNA target sequence
atccattttttccaataatag

SEQ ID NO: 38468 - DNA, 21 bp, Artificial sequence
  SiRNA target sequence
tccattttttccaataatagc

SEQ ID NO: 38469 - DNA, 21 bp, Artificial sequence
  SiRNA target sequence
ccattttttccaataatagct

SEQ ID NO: 38470 - DNA, 21 bp, Artificial sequence
  SiRNA target sequence
cattttttccaataatagcta

SEQ ID NO: 38471 - DNA, 21 bp, Artificial sequence
  SiRNA target sequence
attttttccaataatagctac

SEQ ID NO: 38472 - DNA, 21 bp, Artificial sequence
  SiRNA target sequence
ttttttccaataatagctact

SEQ ID NO: 38473 - DNA, 21 bp, Artificial sequence
  SiRNA target sequence
tttttccaataatagctactt

SEQ ID NO: 38474 - DNA, 21 bp, Artificial sequence
  SiRNA target sequence
ttttccaataatagctacttt

SEQ ID NO: 38475 - DNA, 21 bp, Artificial sequence
  SiRNA target sequence
tttccaataatagctactttt

SEQ ID NO: 38476 - DNA, 21 bp, Artificial sequence
  SiRNA target sequence
ttccaataatagctacttttt

SEQ ID NO: 38477 - DNA, 21 bp, Artificial sequence
  SiRNA target sequence
tccaataatagctactttttc

SEQ ID NO: 38478 - DNA, 21 bp, Artificial sequence
  SiRNA target sequence
ccaataatagctactttttca

SEQ ID NO: 38479 - DNA, 21 bp, Artificial sequence
  SiRNA target sequence
caataatagctactttttcac

SEQ ID NO: 38480 - DNA, 21 bp, Artificial sequence
  SiRNA target sequence
aataatagctactttttcacc

SEQ ID NO: 38481 - DNA, 21 bp, Artificial sequence
  SiRNA target sequence
ataatagctactttttcacct

SEQ ID NO: 38482 - DNA, 21 bp, Artificial sequence
  SiRNA target sequence
taatagctactttttcacctt

SEQ ID NO: 38483 - DNA, 21 bp, Artificial sequence
  SiRNA target sequence
aatagctactttttcaccttt

SEQ ID NO: 38484 - DNA, 21 bp, Artificial sequence
  SiRNA target sequence
atagctactttttcacctttt

SEQ ID NO: 38485 - DNA, 21 bp, Artificial sequence
  SiRNA target sequence
tagctactttttcaccttttt

SEQ ID NO: 38486 - DNA, 21 bp, Artificial sequence
  SiRNA target sequence
agctactttttcacctttttt

SEQ ID NO: 38487 - DNA, 21 bp, Artificial sequence
  SiRNA target sequence
gctactttttcacctttttta

SEQ ID NO: 38488 - DNA, 21 bp, Artificial sequence
  SiRNA target sequence
ctactttttcaccttttttaa

SEQ ID NO: 38489 - DNA, 21 bp, Artificial sequence
  SiRNA target sequence
tactttttcaccttttttaat

SEQ ID NO: 38490 - DNA, 21 bp, Artificial sequence
  SiRNA target sequence
actttttcaccttttttaatt

SEQ ID NO: 38491 - DNA, 21 bp, Artificial sequence
  SiRNA target sequence
ctttttcaccttttttaatta

SEQ ID NO: 38492 - DNA, 21 bp, Artificial sequence
  SiRNA target sequence
tttttcaccttttttaattaa

SEQ ID NO: 38493 - DNA, 21 bp, Artificial sequence
  SiRNA target sequence
ttttcaccttttttaattaaa

SEQ ID NO: 38494 - DNA, 21 bp, Artificial sequence
  SiRNA target sequence
tttcaccttttttaattaaaa

SEQ ID NO: 38495 - DNA, 21 bp, Artificial sequence
  SiRNA target sequence
ttcaccttttttaattaaaat

SEQ ID NO: 38496 - DNA, 21 bp, Artificial sequence
  SiRNA target sequence
tcaccttttttaattaaaata

SEQ ID NO: 38497 - DNA, 21 bp, Artificial sequence
  SiRNA target sequence
caccttttttaattaaaatat

SEQ ID NO: 38498 - DNA, 21 bp, Artificial sequence
  SiRNA target sequence
accttttttaattaaaatatt

SEQ ID NO: 38499 - DNA, 21 bp, Artificial sequence
  SiRNA target sequence
ccttttttaattaaaatattt

SEQ ID NO: 38500 - DNA, 21 bp, Artificial sequence
  SiRNA target sequence
cttttttaattaaaatattta

SEQ ID NO: 38501 - DNA, 21 bp, Artificial sequence
  SiRNA target sequence
ttttttaattaaaatatttat

SEQ ID NO: 38502 - DNA, 21 bp, Artificial sequence
  SiRNA target sequence
tttttaattaaaatatttatg

SEQ ID NO: 38503 - DNA, 21 bp, Artificial sequence
  SiRNA target sequence
ttttaattaaaatatttatgt

SEQ ID NO: 38504 - DNA, 21 bp, Artificial sequence
  SiRNA target sequence
tttaattaaaatatttatgtc

SEQ ID NO: 38505 - DNA, 21 bp, Artificial sequence
  SiRNA target sequence
ttaattaaaatatttatgtcc

SEQ ID NO: 38506 - DNA, 21 bp, Artificial sequence
  SiRNA target sequence
taattaaaatatttatgtccg

SEQ ID NO: 38507 - DNA, 21 bp, Artificial sequence
  SiRNA target sequence
aattaaaatatttatgtccgt

SEQ ID NO: 38508 - DNA, 21 bp, Artificial sequence
  SiRNA target sequence
attaaaatatttatgtccgtt

SEQ ID NO: 38509 - DNA, 21 bp, Artificial sequence
  SiRNA target sequence
ttaaaatatttatgtccgtta

SEQ ID NO: 38510 - DNA, 21 bp, Artificial sequence
  SiRNA target sequence
taaaatatttatgtccgttaa

SEQ ID NO: 38511 - DNA, 21 bp, Artificial sequence
  SiRNA target sequence
aaaatatttatgtccgttaaa

SEQ ID NO: 38512 - DNA, 21 bp, Artificial sequence
  SiRNA target sequence
aaatatttatgtccgttaaaa

SEQ ID NO: 38513 - DNA, 21 bp, Artificial sequence
  SiRNA target sequence
aatatttatgtccgttaaaat

SEQ ID NO: 38514 - DNA, 21 bp, Artificial sequence
  SiRNA target sequence
atatttatgtccgttaaaatt

SEQ ID NO: 38515 - DNA, 21 bp, Artificial sequence
  SiRNA target sequence
tatttatgtccgttaaaattt

SEQ ID NO: 38516 - DNA, 21 bp, Artificial sequence
  SiRNA target sequence
atttatgtccgttaaaatttt

SEQ ID NO: 38517 - DNA, 21 bp, Artificial sequence
  SiRNA target sequence
tttatgtccgttaaaattttt

SEQ ID NO: 38518 - DNA, 21 bp, Artificial sequence
  SiRNA target sequence
ttatgtccgttaaaatttttt

SEQ ID NO: 38519 - DNA, 21 bp, Artificial sequence
  SiRNA target sequence
tatgtccgttaaaattttttt

SEQ ID NO: 38520 - DNA, 21 bp, Artificial sequence
  SiRNA target sequence
atgtccgttaaaatttttttg

SEQ ID NO: 38521 - DNA, 21 bp, Artificial sequence
  SiRNA target sequence
tgtccgttaaaatttttttgg

SEQ ID NO: 38522 - DNA, 21 bp, Artificial sequence
  SiRNA target sequence
gtccgttaaaatttttttgga

SEQ ID NO: 38523 - DNA, 21 bp, Artificial sequence
  SiRNA target sequence
tccgttaaaatttttttggag

SEQ ID NO: 38524 - DNA, 21 bp, Artificial sequence
  SiRNA target sequence
ccgttaaaatttttttggagt

SEQ ID NO: 38525 - DNA, 21 bp, Artificial sequence
  SiRNA target sequence
cgttaaaatttttttggagta

SEQ ID NO: 38526 - DNA, 21 bp, Artificial sequence
  SiRNA target sequence
gttaaaatttttttggagtaa

SEQ ID NO: 38527 - DNA, 21 bp, Artificial sequence
  SiRNA target sequence
ttaaaatttttttggagtaat

SEQ ID NO: 38528 - DNA, 21 bp, Artificial sequence
  SiRNA target sequence
taaaatttttttggagtaata

SEQ ID NO: 38529 - DNA, 21 bp, Artificial sequence
  SiRNA target sequence
aaaatttttttggagtaataa

SEQ ID NO: 38530 - DNA, 21 bp, Artificial sequence
  SiRNA target sequence
aaatttttttggagtaataat

SEQ ID NO: 38531 - DNA, 21 bp, Artificial sequence
  SiRNA target sequence
aatttttttggagtaataatt

SEQ ID NO: 38532 - DNA, 21 bp, Artificial sequence
  SiRNA target sequence
atttttttggagtaataatta

SEQ ID NO: 38533 - DNA, 21 bp, Artificial sequence
  SiRNA target sequence
tttttttggagtaataattaa

SEQ ID NO: 38534 - DNA, 21 bp, Artificial sequence
  SiRNA target sequence
ttttttggagtaataattaaa

SEQ ID NO: 38535 - DNA, 21 bp, Artificial sequence
  SiRNA target sequence
tttttggagtaataattaaat

SEQ ID NO: 38536 - DNA, 21 bp, Artificial sequence
  SiRNA target sequence
ttttggagtaataattaaatg

SEQ ID NO: 38537 - DNA, 21 bp, Artificial sequence
  SiRNA target sequence
tttggagtaataattaaatga

SEQ ID NO: 38538 - DNA, 21 bp, Artificial sequence
  SiRNA target sequence
ttggagtaataattaaatgat

SEQ ID NO: 38539 - DNA, 21 bp, Artificial sequence
  SiRNA target sequence
tggagtaataattaaatgatg

SEQ ID NO: 38540 - DNA, 21 bp, Artificial sequence
  SiRNA target sequence
ggagtaataattaaatgatgc

SEQ ID NO: 38541 - DNA, 21 bp, Artificial sequence
  SiRNA target sequence
gagtaataattaaatgatgca

SEQ ID NO: 38542 - DNA, 21 bp, Artificial sequence
  SiRNA target sequence
agtaataattaaatgatgcat

SEQ ID NO: 38543 - DNA, 21 bp, Artificial sequence
  SiRNA target sequence
gtaataattaaatgatgcatt

SEQ ID NO: 38544 - DNA, 21 bp, Artificial sequence
  SiRNA target sequence
taataattaaatgatgcattt

SEQ ID NO: 38545 - DNA, 21 bp, Artificial sequence
  SiRNA target sequence
aataattaaatgatgcatttt

SEQ ID NO: 38546 - DNA, 21 bp, Artificial sequence
  SiRNA target sequence
ataattaaatgatgcattttc

SEQ ID NO: 38547 - DNA, 21 bp, Artificial sequence
  SiRNA target sequence
taattaaatgatgcattttct

SEQ ID NO: 38548 - DNA, 21 bp, Artificial sequence
  SiRNA target sequence
aattaaatgatgcattttcta

SEQ ID NO: 38549 - DNA, 21 bp, Artificial sequence
  SiRNA target sequence
attaaatgatgcattttctaa

SEQ ID NO: 38550 - DNA, 21 bp, Artificial sequence
  SiRNA target sequence
ttaaatgatgcattttctaat

SEQ ID NO: 38551 - DNA, 21 bp, Artificial sequence
  SiRNA target sequence
taaatgatgcattttctaatc

SEQ ID NO: 38552 - DNA, 21 bp, Artificial sequence
  SiRNA target sequence
aaatgatgcattttctaatct

SEQ ID NO: 38553 - DNA, 21 bp, Artificial sequence
  SiRNA target sequence
aatgatgcattttctaatctt

SEQ ID NO: 38554 - DNA, 21 bp, Artificial sequence
  SiRNA target sequence
atgatgcattttctaatctta

SEQ ID NO: 38555 - DNA, 21 bp, Artificial sequence
  SiRNA target sequence
tgatgcattttctaatcttat

SEQ ID NO: 38556 - DNA, 21 bp, Artificial sequence
  SiRNA target sequence
gatgcattttctaatcttata

SEQ ID NO: 38557 - DNA, 21 bp, Artificial sequence
  SiRNA target sequence
atgcattttctaatcttatat

SEQ ID NO: 38558 - DNA, 21 bp, Artificial sequence
  SiRNA target sequence
tgcattttctaatcttatatc

SEQ ID NO: 38559 - DNA, 21 bp, Artificial sequence
  SiRNA target sequence
gcattttctaatcttatatca

SEQ ID NO: 38560 - DNA, 21 bp, Artificial sequence
  SiRNA target sequence
cattttctaatcttatatcat

SEQ ID NO: 38561 - DNA, 21 bp, Artificial sequence
  SiRNA target sequence
attttctaatcttatatcatt

SEQ ID NO: 38562 - DNA, 21 bp, Artificial sequence
  SiRNA target sequence
ttttctaatcttatatcatta

SEQ ID NO: 38563 - DNA, 21 bp, Artificial sequence
  SiRNA target sequence
tttctaatcttatatcattat

SEQ ID NO: 38564 - DNA, 21 bp, Artificial sequence
  SiRNA target sequence
ttctaatcttatatcattatt

SEQ ID NO: 38565 - DNA, 21 bp, Artificial sequence
  SiRNA target sequence
tctaatcttatatcattatta

SEQ ID NO: 38566 - DNA, 21 bp, Artificial sequence
  SiRNA target sequence
ctaatcttatatcattattaa

SEQ ID NO: 38567 - DNA, 21 bp, Artificial sequence
  SiRNA target sequence
taatcttatatcattattaaa

SEQ ID NO: 38568 - DNA, 21 bp, Artificial sequence
  SiRNA target sequence
aatcttatatcattattaaat

SEQ ID NO: 38569 - DNA, 21 bp, Artificial sequence
  SiRNA target sequence
atcttatatcattattaaatt

SEQ ID NO: 38570 - DNA, 21 bp, Artificial sequence
  SiRNA target sequence
tcttatatcattattaaattc

SEQ ID NO: 38571 - DNA, 21 bp, Artificial sequence
  SiRNA target sequence
cttatatcattattaaattca

SEQ ID NO: 38572 - DNA, 21 bp, Artificial sequence
  SiRNA target sequence
ttatatcattattaaattcat

SEQ ID NO: 38573 - DNA, 21 bp, Artificial sequence
  SiRNA target sequence
tatatcattattaaattcatt

SEQ ID NO: 38574 - DNA, 21 bp, Artificial sequence
  SiRNA target sequence
atatcattattaaattcatta

SEQ ID NO: 38575 - DNA, 21 bp, Artificial sequence
  SiRNA target sequence
tatcattattaaattcattaa

SEQ ID NO: 38576 - DNA, 21 bp, Artificial sequence
  SiRNA target sequence
atcattattaaattcattaac

SEQ ID NO: 38577 - DNA, 21 bp, Artificial sequence
  SiRNA target sequence
tcattattaaattcattaaca

SEQ ID NO: 38578 - DNA, 21 bp, Artificial sequence
  SiRNA target sequence
cattattaaattcattaacat

SEQ ID NO: 38579 - DNA, 21 bp, Artificial sequence
  SiRNA target sequence
attattaaattcattaacatc

SEQ ID NO: 38580 - DNA, 21 bp, Artificial sequence
  SiRNA target sequence
ttattaaattcattaacatct

SEQ ID NO: 38581 - DNA, 21 bp, Artificial sequence
  SiRNA target sequence
tattaaattcattaacatcta

SEQ ID NO: 38582 - DNA, 21 bp, Artificial sequence
  SiRNA target sequence
attaaattcattaacatctac

SEQ ID NO: 38583 - DNA, 21 bp, Artificial sequence
  SiRNA target sequence
ttaaattcattaacatctact

SEQ ID NO: 38584 - DNA, 21 bp, Artificial sequence
  SiRNA target sequence
taaattcattaacatctacta

SEQ ID NO: 38585 - DNA, 21 bp, Artificial sequence
  SiRNA target sequence
aaattcattaacatctactaa

SEQ ID NO: 38586 - DNA, 21 bp, Artificial sequence
  SiRNA target sequence
aattcattaacatctactaaa

SEQ ID NO: 38587 - DNA, 21 bp, Artificial sequence
  SiRNA target sequence
attcattaacatctactaaat

SEQ ID NO: 38588 - DNA, 21 bp, Artificial sequence
  SiRNA target sequence
ttcattaacatctactaaatt

SEQ ID NO: 38589 - DNA, 21 bp, Artificial sequence
  SiRNA target sequence
tcattaacatctactaaattt

SEQ ID NO: 38590 - DNA, 21 bp, Artificial sequence
  SiRNA target sequence
cattaacatctactaaatttg

SEQ ID NO: 38591 - DNA, 21 bp, Artificial sequence
  SiRNA target sequence
attaacatctactaaatttgg

SEQ ID NO: 38592 - DNA, 21 bp, Artificial sequence
  SiRNA target sequence
ttaacatctactaaatttggt

SEQ ID NO: 38593 - DNA, 21 bp, Artificial sequence
  SiRNA target sequence
taacatctactaaatttggtt

SEQ ID NO: 38594 - DNA, 21 bp, Artificial sequence
  SiRNA target sequence
aacatctactaaatttggttc

SEQ ID NO: 38595 - DNA, 21 bp, Artificial sequence
  SiRNA target sequence
acatctactaaatttggttct

SEQ ID NO: 38596 - DNA, 21 bp, Artificial sequence
  SiRNA target sequence
catctactaaatttggttctt

SEQ ID NO: 38597 - DNA, 21 bp, Artificial sequence
  SiRNA target sequence
atctactaaatttggttcttc

SEQ ID NO: 38598 - DNA, 21 bp, Artificial sequence
  SiRNA target sequence
tctactaaatttggttcttct

SEQ ID NO: 38599 - DNA, 21 bp, Artificial sequence
  SiRNA target sequence
ctactaaatttggttcttctt

SEQ ID NO: 38600 - DNA, 21 bp, Artificial sequence
  SiRNA target sequence
tactaaatttggttcttcttt

SEQ ID NO: 38601 - DNA, 21 bp, Artificial sequence
  SiRNA target sequence
actaaatttggttcttctttt

SEQ ID NO: 38602 - DNA, 21 bp, Artificial sequence
  SiRNA target sequence
ctaaatttggttcttctttta

SEQ ID NO: 38603 - DNA, 21 bp, Artificial sequence
  SiRNA target sequence
taaatttggttcttcttttat

SEQ ID NO: 38604 - DNA, 21 bp, Artificial sequence
  SiRNA target sequence
aaatttggttcttcttttata

SEQ ID NO: 38605 - DNA, 21 bp, Artificial sequence
  SiRNA target sequence
aatttggttcttcttttataa

SEQ ID NO: 38606 - DNA, 21 bp, Artificial sequence
  SiRNA target sequence
atttggttcttcttttataag

SEQ ID NO: 38607 - DNA, 21 bp, Artificial sequence
  SiRNA target sequence
tttggttcttcttttataagc

SEQ ID NO: 38608 - DNA, 21 bp, Artificial sequence
  SiRNA target sequence
ttggttcttcttttataagct

SEQ ID NO: 38609 - DNA, 21 bp, Artificial sequence
  SiRNA target sequence
tggttcttcttttataagctc

SEQ ID NO: 38610 - DNA, 21 bp, Artificial sequence
  SiRNA target sequence
ggttcttcttttataagctct

SEQ ID NO: 38611 - DNA, 21 bp, Artificial sequence
  SiRNA target sequence
gttcttcttttataagctctg

SEQ ID NO: 38612 - DNA, 21 bp, Artificial sequence
  SiRNA target sequence
ttcttcttttataagctctgg

SEQ ID NO: 38613 - DNA, 21 bp, Artificial sequence
  SiRNA target sequence
tcttcttttataagctctggt

SEQ ID NO: 38614 - DNA, 21 bp, Artificial sequence
  SiRNA target sequence
cttcttttataagctctggtt

SEQ ID NO: 38615 - DNA, 21 bp, Artificial sequence
  SiRNA target sequence
ttcttttataagctctggttt

SEQ ID NO: 38616 - DNA, 21 bp, Artificial sequence
  SiRNA target sequence
tcttttataagctctggttta

SEQ ID NO: 38617 - DNA, 21 bp, Artificial sequence
  SiRNA target sequence
cttttataagctctggtttaa

SEQ ID NO: 38618 - DNA, 21 bp, Artificial sequence
  SiRNA target sequence
ttttataagctctggtttaaa

SEQ ID NO: 38619 - DNA, 21 bp, Artificial sequence
  SiRNA target sequence
tttataagctctggtttaaaa

SEQ ID NO: 38620 - DNA, 21 bp, Artificial sequence
  SiRNA target sequence
ttataagctctggtttaaaag

SEQ ID NO: 38621 - DNA, 21 bp, Artificial sequence
  SiRNA target sequence
tataagctctggtttaaaaga

SEQ ID NO: 38622 - DNA, 21 bp, Artificial sequence
  SiRNA target sequence
ataagctctggtttaaaagat

SEQ ID NO: 38623 - DNA, 21 bp, Artificial sequence
  SiRNA target sequence
taagctctggtttaaaagatg

SEQ ID NO: 38624 - DNA, 21 bp, Artificial sequence
  SiRNA target sequence
aagctctggtttaaaagatgt

SEQ ID NO: 38625 - DNA, 21 bp, Artificial sequence
  SiRNA target sequence
agctctggtttaaaagatgtt

SEQ ID NO: 38626 - DNA, 21 bp, Artificial sequence
  SiRNA target sequence
gctctggtttaaaagatgttc

SEQ ID NO: 38627 - DNA, 21 bp, Artificial sequence
  SiRNA target sequence
ctctggtttaaaagatgttct

SEQ ID NO: 38628 - DNA, 21 bp, Artificial sequence
  SiRNA target sequence
tctggtttaaaagatgttctt

SEQ ID NO: 38629 - DNA, 21 bp, Artificial sequence
  SiRNA target sequence
ctggtttaaaagatgttctta

SEQ ID NO: 38630 - DNA, 21 bp, Artificial sequence
  SiRNA target sequence
tggtttaaaagatgttcttat

SEQ ID NO: 38631 - DNA, 21 bp, Artificial sequence
  SiRNA target sequence
ggtttaaaagatgttcttata

SEQ ID NO: 38632 - DNA, 21 bp, Artificial sequence
  SiRNA target sequence
gtttaaaagatgttcttatat

SEQ ID NO: 38633 - DNA, 21 bp, Artificial sequence
  SiRNA target sequence
tttaaaagatgttcttatatt

SEQ ID NO: 38634 - DNA, 21 bp, Artificial sequence
  SiRNA target sequence
ttaaaagatgttcttatattt

SEQ ID NO: 38635 - DNA, 21 bp, Artificial sequence
  SiRNA target sequence
taaaagatgttcttatattta

SEQ ID NO: 38636 - DNA, 21 bp, Artificial sequence
  SiRNA target sequence
aaaagatgttcttatatttaa

SEQ ID NO: 38637 - DNA, 21 bp, Artificial sequence
  SiRNA target sequence
aaagatgttcttatatttaag

SEQ ID NO: 38638 - DNA, 21 bp, Artificial sequence
  SiRNA target sequence
aagatgttcttatatttaaga

SEQ ID NO: 38639 - DNA, 21 bp, Artificial sequence
  SiRNA target sequence
agatgttcttatatttaagat

SEQ ID NO: 38640 - DNA, 21 bp, Artificial sequence
  SiRNA target sequence
gatgttcttatatttaagatt

SEQ ID NO: 38641 - DNA, 21 bp, Artificial sequence
  SiRNA target sequence
atgttcttatatttaagattg

SEQ ID NO: 38642 - DNA, 21 bp, Artificial sequence
  SiRNA target sequence
tgttcttatatttaagattgc

SEQ ID NO: 38643 - DNA, 21 bp, Artificial sequence
  SiRNA target sequence
gttcttatatttaagattgct

SEQ ID NO: 38644 - DNA, 21 bp, Artificial sequence
  SiRNA target sequence
ttcttatatttaagattgctt

SEQ ID NO: 38645 - DNA, 21 bp, Artificial sequence
  SiRNA target sequence
tcttatatttaagattgcttg

SEQ ID NO: 38646 - DNA, 21 bp, Artificial sequence
  SiRNA target sequence
cttatatttaagattgcttgt

SEQ ID NO: 38647 - DNA, 21 bp, Artificial sequence
  SiRNA target sequence
ttatatttaagattgcttgtg

SEQ ID NO: 38648 - DNA, 21 bp, Artificial sequence
  SiRNA target sequence
tatatttaagattgcttgtgt

SEQ ID NO: 38649 - DNA, 21 bp, Artificial sequence
  SiRNA target sequence
atatttaagattgcttgtgta

SEQ ID NO: 38650 - DNA, 21 bp, Artificial sequence
  SiRNA target sequence
tatttaagattgcttgtgtat

SEQ ID NO: 38651 - DNA, 21 bp, Artificial sequence
  SiRNA target sequence
atttaagattgcttgtgtata

SEQ ID NO: 38652 - DNA, 21 bp, Artificial sequence
  SiRNA target sequence
tttaagattgcttgtgtatat

SEQ ID NO: 38653 - DNA, 21 bp, Artificial sequence
  SiRNA target sequence
ttaagattgcttgtgtatatc

SEQ ID NO: 38654 - DNA, 21 bp, Artificial sequence
  SiRNA target sequence
taagattgcttgtgtatatcg

SEQ ID NO: 38655 - DNA, 21 bp, Artificial sequence
  SiRNA target sequence
aagattgcttgtgtatatcgt

SEQ ID NO: 38656 - DNA, 21 bp, Artificial sequence
  SiRNA target sequence
agattgcttgtgtatatcgtg

SEQ ID NO: 38657 - DNA, 21 bp, Artificial sequence
  SiRNA target sequence
gattgcttgtgtatatcgtga

SEQ ID NO: 38658 - DNA, 21 bp, Artificial sequence
  SiRNA target sequence
attgcttgtgtatatcgtgag

SEQ ID NO: 38659 - DNA, 21 bp, Artificial sequence
  SiRNA target sequence
ttgcttgtgtatatcgtgagt

SEQ ID NO: 38660 - DNA, 21 bp, Artificial sequence
  SiRNA target sequence
tgcttgtgtatatcgtgagta

SEQ ID NO: 38661 - DNA, 21 bp, Artificial sequence
  SiRNA target sequence
gcttgtgtatatcgtgagtaa

SEQ ID NO: 38662 - DNA, 21 bp, Artificial sequence
  SiRNA target sequence
cttgtgtatatcgtgagtaaa

SEQ ID NO: 38663 - DNA, 21 bp, Artificial sequence
  SiRNA target sequence
ttgtgtatatcgtgagtaaaa

SEQ ID NO: 38664 - DNA, 21 bp, Artificial sequence
  SiRNA target sequence
tgtgtatatcgtgagtaaaag

SEQ ID NO: 38665 - DNA, 21 bp, Artificial sequence
  SiRNA target sequence
gtgtatatcgtgagtaaaaga

SEQ ID NO: 38666 - DNA, 21 bp, Artificial sequence
  SiRNA target sequence
tgtatatcgtgagtaaaagaa

SEQ ID NO: 38667 - DNA, 21 bp, Artificial sequence
  SiRNA target sequence
gtatatcgtgagtaaaagaac

SEQ ID NO: 38668 - DNA, 21 bp, Artificial sequence
  SiRNA target sequence
tatatcgtgagtaaaagaacc

SEQ ID NO: 38669 - DNA, 21 bp, Artificial sequence
  SiRNA target sequence
atatcgtgagtaaaagaaccc

SEQ ID NO: 38670 - DNA, 21 bp, Artificial sequence
  SiRNA target sequence
tatcgtgagtaaaagaaccct

SEQ ID NO: 38671 - DNA, 21 bp, Artificial sequence
  SiRNA target sequence
atcgtgagtaaaagaacccta

SEQ ID NO: 38672 - DNA, 21 bp, Artificial sequence
  SiRNA target sequence
tcgtgagtaaaagaaccctaa

SEQ ID NO: 38673 - DNA, 21 bp, Artificial sequence
  SiRNA target sequence
cgtgagtaaaagaaccctaat

SEQ ID NO: 38674 - DNA, 21 bp, Artificial sequence
  SiRNA target sequence
gtgagtaaaagaaccctaatt

SEQ ID NO: 38675 - DNA, 21 bp, Artificial sequence
  SiRNA target sequence
tgagtaaaagaaccctaattg

SEQ ID NO: 38676 - DNA, 21 bp, Artificial sequence
  SiRNA target sequence
gagtaaaagaaccctaattgt

SEQ ID NO: 38677 - DNA, 21 bp, Artificial sequence
  SiRNA target sequence
agtaaaagaaccctaattgtc

SEQ ID NO: 38678 - DNA, 21 bp, Artificial sequence
  SiRNA target sequence
gtaaaagaaccctaattgtcc

SEQ ID NO: 38679 - DNA, 21 bp, Artificial sequence
  SiRNA target sequence
taaaagaaccctaattgtcca

SEQ ID NO: 38680 - DNA, 21 bp, Artificial sequence
  SiRNA target sequence
aaaagaaccctaattgtccaa

SEQ ID NO: 38681 - DNA, 21 bp, Artificial sequence
  SiRNA target sequence
aaagaaccctaattgtccaaa

SEQ ID NO: 38682 - DNA, 21 bp, Artificial sequence
  SiRNA target sequence
aagaaccctaattgtccaaaa

SEQ ID NO: 38683 - DNA, 21 bp, Artificial sequence
  SiRNA target sequence
agaaccctaattgtccaaaac

SEQ ID NO: 38684 - DNA, 21 bp, Artificial sequence
  SiRNA target sequence
gaaccctaattgtccaaaact

SEQ ID NO: 38685 - DNA, 21 bp, Artificial sequence
  SiRNA target sequence
aaccctaattgtccaaaactt

SEQ ID NO: 38686 - DNA, 21 bp, Artificial sequence
  SiRNA target sequence
accctaattgtccaaaacttg

SEQ ID NO: 38687 - DNA, 21 bp, Artificial sequence
  SiRNA target sequence
ccctaattgtccaaaacttga

SEQ ID NO: 38688 - DNA, 21 bp, Artificial sequence
  SiRNA target sequence
cctaattgtccaaaacttgaa

SEQ ID NO: 38689 - DNA, 21 bp, Artificial sequence
  SiRNA target sequence
ctaattgtccaaaacttgaat

SEQ ID NO: 38690 - DNA, 21 bp, Artificial sequence
  SiRNA target sequence
taattgtccaaaacttgaata

SEQ ID NO: 38691 - DNA, 21 bp, Artificial sequence
  SiRNA target sequence
aattgtccaaaacttgaatac

SEQ ID NO: 38692 - DNA, 21 bp, Artificial sequence
  SiRNA target sequence
attgtccaaaacttgaataca

SEQ ID NO: 38693 - DNA, 21 bp, Artificial sequence
  SiRNA target sequence
ttgtccaaaacttgaatacaa

SEQ ID NO: 38694 - DNA, 21 bp, Artificial sequence
  SiRNA target sequence
tgtccaaaacttgaatacaat

SEQ ID NO: 38695 - DNA, 21 bp, Artificial sequence
  SiRNA target sequence
gtccaaaacttgaatacaatg

SEQ ID NO: 38696 - DNA, 21 bp, Artificial sequence
  SiRNA target sequence
tccaaaacttgaatacaatgt

SEQ ID NO: 38697 - DNA, 21 bp, Artificial sequence
  SiRNA target sequence
ccaaaacttgaatacaatgtt

SEQ ID NO: 38698 - DNA, 21 bp, Artificial sequence
  SiRNA target sequence
caaaacttgaatacaatgttc

SEQ ID NO: 38699 - DNA, 21 bp, Artificial sequence
  SiRNA target sequence
aaaacttgaatacaatgttct

SEQ ID NO: 38700 - DNA, 21 bp, Artificial sequence
  SiRNA target sequence
aaacttgaatacaatgttcta

SEQ ID NO: 38701 - DNA, 21 bp, Artificial sequence
  SiRNA target sequence
aacttgaatacaatgttctat

SEQ ID NO: 38702 - DNA, 21 bp, Artificial sequence
  SiRNA target sequence
acttgaatacaatgttctatt

SEQ ID NO: 38703 - DNA, 21 bp, Artificial sequence
  SiRNA target sequence
cttgaatacaatgttctatta

SEQ ID NO: 38704 - DNA, 21 bp, Artificial sequence
  SiRNA target sequence
ttgaatacaatgttctattaa

SEQ ID NO: 38705 - DNA, 21 bp, Artificial sequence
  SiRNA target sequence
tgaatacaatgttctattaat

SEQ ID NO: 38706 - DNA, 21 bp, Artificial sequence
  SiRNA target sequence
gaatacaatgttctattaatg

SEQ ID NO: 38707 - DNA, 21 bp, Artificial sequence
  SiRNA target sequence
aatacaatgttctattaatgc

SEQ ID NO: 38708 - DNA, 21 bp, Artificial sequence
  SiRNA target sequence
atacaatgttctattaatgcc

SEQ ID NO: 38709 - DNA, 21 bp, Artificial sequence
  SiRNA target sequence
tacaatgttctattaatgcca

SEQ ID NO: 38710 - DNA, 21 bp, Artificial sequence
  SiRNA target sequence
acaatgttctattaatgccaa

SEQ ID NO: 38711 - DNA, 21 bp, Artificial sequence
  SiRNA target sequence
caatgttctattaatgccaat

SEQ ID NO: 38712 - DNA, 21 bp, Artificial sequence
  SiRNA target sequence
aatgttctattaatgccaata

SEQ ID NO: 38713 - DNA, 21 bp, Artificial sequence
  SiRNA target sequence
atgttctattaatgccaatat

SEQ ID NO: 38714 - DNA, 21 bp, Artificial sequence
  SiRNA target sequence
tgttctattaatgccaatata

SEQ ID NO: 38715 - DNA, 21 bp, Artificial sequence
  SiRNA target sequence
gttctattaatgccaatataa

SEQ ID NO: 38716 - DNA, 21 bp, Artificial sequence
  SiRNA target sequence
ttctattaatgccaatataaa

SEQ ID NO: 38717 - DNA, 21 bp, Artificial sequence
  SiRNA target sequence
tctattaatgccaatataaaa

SEQ ID NO: 38718 - DNA, 21 bp, Artificial sequence
  SiRNA target sequence
ctattaatgccaatataaaat

SEQ ID NO: 38719 - DNA, 21 bp, Artificial sequence
  SiRNA target sequence
tattaatgccaatataaaata

SEQ ID NO: 38720 - DNA, 21 bp, Artificial sequence
  SiRNA target sequence
attaatgccaatataaaatac

SEQ ID NO: 38721 - DNA, 21 bp, Artificial sequence
  SiRNA target sequence
ttaatgccaatataaaataca

SEQ ID NO: 38722 - DNA, 21 bp, Artificial sequence
  SiRNA target sequence
taatgccaatataaaatacaa

SEQ ID NO: 38723 - DNA, 21 bp, Artificial sequence
  SiRNA target sequence
aatgccaatataaaatacaac

SEQ ID NO: 38724 - DNA, 21 bp, Artificial sequence
  SiRNA target sequence
atgccaatataaaatacaaca

SEQ ID NO: 38725 - DNA, 21 bp, Artificial sequence
  SiRNA target sequence
tgccaatataaaatacaacat

SEQ ID NO: 38726 - DNA, 21 bp, Artificial sequence
  SiRNA target sequence
gccaatataaaatacaacatc

SEQ ID NO: 38727 - DNA, 21 bp, Artificial sequence
  SiRNA target sequence
ccaatataaaatacaacatcc

SEQ ID NO: 38728 - DNA, 21 bp, Artificial sequence
  SiRNA target sequence
caatataaaatacaacatccc

SEQ ID NO: 38729 - DNA, 21 bp, Artificial sequence
  SiRNA target sequence
aatataaaatacaacatccct

SEQ ID NO: 38730 - DNA, 21 bp, Artificial sequence
  SiRNA target sequence
atataaaatacaacatccctg

SEQ ID NO: 38731 - DNA, 21 bp, Artificial sequence
  SiRNA target sequence
tataaaatacaacatccctgg

SEQ ID NO: 38732 - DNA, 21 bp, Artificial sequence
  SiRNA target sequence
ataaaatacaacatccctggc

SEQ ID NO: 38733 - DNA, 21 bp, Artificial sequence
  SiRNA target sequence
taaaatacaacatccctggca

SEQ ID NO: 38734 - DNA, 21 bp, Artificial sequence
  SiRNA target sequence
aaaatacaacatccctggcac

SEQ ID NO: 38735 - DNA, 21 bp, Artificial sequence
  SiRNA target sequence
aaatacaacatccctggcact

SEQ ID NO: 38736 - DNA, 21 bp, Artificial sequence
  SiRNA target sequence
aatacaacatccctggcactt

SEQ ID NO: 38737 - DNA, 21 bp, Artificial sequence
  SiRNA target sequence
atacaacatccctggcactta

SEQ ID NO: 38738 - DNA, 21 bp, Artificial sequence
  SiRNA target sequence
tacaacatccctggcacttag

SEQ ID NO: 38739 - DNA, 21 bp, Artificial sequence
  SiRNA target sequence
acaacatccctggcacttagt

SEQ ID NO: 38740 - DNA, 21 bp, Artificial sequence
  SiRNA target sequence
caacatccctggcacttagtt

SEQ ID NO: 38741 - DNA, 21 bp, Artificial sequence
  SiRNA target sequence
aacatccctggcacttagttt

SEQ ID NO: 38742 - DNA, 21 bp, Artificial sequence
  SiRNA target sequence
acatccctggcacttagtttt

SEQ ID NO: 38743 - DNA, 21 bp, Artificial sequence
  SiRNA target sequence
catccctggcacttagttttg

SEQ ID NO: 38744 - DNA, 21 bp, Artificial sequence
  SiRNA target sequence
atccctggcacttagttttgc

SEQ ID NO: 38745 - DNA, 21 bp, Artificial sequence
  SiRNA target sequence
tccctggcacttagttttgct

SEQ ID NO: 38746 - DNA, 21 bp, Artificial sequence
  SiRNA target sequence
ccctggcacttagttttgctg

SEQ ID NO: 38747 - DNA, 21 bp, Artificial sequence
  SiRNA target sequence
cctggcacttagttttgctgt

SEQ ID NO: 38748 - DNA, 21 bp, Artificial sequence
  SiRNA target sequence
ctggcacttagttttgctgtt

SEQ ID NO: 38749 - DNA, 21 bp, Artificial sequence
  SiRNA target sequence
tggcacttagttttgctgtta

SEQ ID NO: 38750 - DNA, 21 bp, Artificial sequence
  SiRNA target sequence
ggcacttagttttgctgttaa

SEQ ID NO: 38751 - DNA, 21 bp, Artificial sequence
  SiRNA target sequence
gcacttagttttgctgttaat

SEQ ID NO: 38752 - DNA, 21 bp, Artificial sequence
  SiRNA target sequence
cacttagttttgctgttaata

SEQ ID NO: 38753 - DNA, 21 bp, Artificial sequence
  SiRNA target sequence
acttagttttgctgttaatat

SEQ ID NO: 38754 - DNA, 21 bp, Artificial sequence
  SiRNA target sequence
cttagttttgctgttaatatt

SEQ ID NO: 38755 - DNA, 21 bp, Artificial sequence
  SiRNA target sequence
ttagttttgctgttaatattc

SEQ ID NO: 38756 - DNA, 21 bp, Artificial sequence
  SiRNA target sequence
tagttttgctgttaatattcc

SEQ ID NO: 38757 - DNA, 21 bp, Artificial sequence
  SiRNA target sequence
agttttgctgttaatattcca

SEQ ID NO: 38758 - DNA, 21 bp, Artificial sequence
  SiRNA target sequence
gttttgctgttaatattccat

SEQ ID NO: 38759 - DNA, 21 bp, Artificial sequence
  SiRNA target sequence
ttttgctgttaatattccata

SEQ ID NO: 38760 - DNA, 21 bp, Artificial sequence
  SiRNA target sequence
tttgctgttaatattccatag

SEQ ID NO: 38761 - DNA, 21 bp, Artificial sequence
  SiRNA target sequence
ttgctgttaatattccatagt

SEQ ID NO: 38762 - DNA, 21 bp, Artificial sequence
  SiRNA target sequence
tgctgttaatattccatagtt

SEQ ID NO: 38763 - DNA, 21 bp, Artificial sequence
  SiRNA target sequence
gctgttaatattccatagttt

SEQ ID NO: 38764 - DNA, 21 bp, Artificial sequence
  SiRNA target sequence
ctgttaatattccatagtttc

SEQ ID NO: 38765 - DNA, 21 bp, Artificial sequence
  SiRNA target sequence
tgttaatattccatagtttcc

SEQ ID NO: 38766 - DNA, 21 bp, Artificial sequence
  SiRNA target sequence
gttaatattccatagtttcct

SEQ ID NO: 38767 - DNA, 21 bp, Artificial sequence
  SiRNA target sequence
ttaatattccatagtttccta

SEQ ID NO: 38768 - DNA, 21 bp, Artificial sequence
  SiRNA target sequence
taatattccatagtttcctaa

SEQ ID NO: 38769 - DNA, 21 bp, Artificial sequence
  SiRNA target sequence
aatattccatagtttcctaat

SEQ ID NO: 38770 - DNA, 21 bp, Artificial sequence
  SiRNA target sequence
atattccatagtttcctaatg

SEQ ID NO: 38771 - DNA, 21 bp, Artificial sequence
  SiRNA target sequence
tattccatagtttcctaatgt

SEQ ID NO: 38772 - DNA, 21 bp, Artificial sequence
  SiRNA target sequence
attccatagtttcctaatgtt

SEQ ID NO: 38773 - DNA, 21 bp, Artificial sequence
  SiRNA target sequence
ttccatagtttcctaatgtta

SEQ ID NO: 38774 - DNA, 21 bp, Artificial sequence
  SiRNA target sequence
tccatagtttcctaatgttat

SEQ ID NO: 38775 - DNA, 21 bp, Artificial sequence
  SiRNA target sequence
ccatagtttcctaatgttata

SEQ ID NO: 38776 - DNA, 21 bp, Artificial sequence
  SiRNA target sequence
catagtttcctaatgttataa

SEQ ID NO: 38777 - DNA, 21 bp, Artificial sequence
  SiRNA target sequence
atagtttcctaatgttataac

SEQ ID NO: 38778 - DNA, 21 bp, Artificial sequence
  SiRNA target sequence
tagtttcctaatgttataact

SEQ ID NO: 38779 - DNA, 21 bp, Artificial sequence
  SiRNA target sequence
agtttcctaatgttataacta

SEQ ID NO: 38780 - DNA, 21 bp, Artificial sequence
  SiRNA target sequence
gtttcctaatgttataactat

SEQ ID NO: 38781 - DNA, 21 bp, Artificial sequence
  SiRNA target sequence
tttcctaatgttataactata

SEQ ID NO: 38782 - DNA, 21 bp, Artificial sequence
  SiRNA target sequence
ttcctaatgttataactataa

SEQ ID NO: 38783 - DNA, 21 bp, Artificial sequence
  SiRNA target sequence
tcctaatgttataactataaa

SEQ ID NO: 38784 - DNA, 21 bp, Artificial sequence
  SiRNA target sequence
cctaatgttataactataaaa

SEQ ID NO: 38785 - DNA, 21 bp, Artificial sequence
  SiRNA target sequence
ctaatgttataactataaaac

SEQ ID NO: 38786 - DNA, 21 bp, Artificial sequence
  SiRNA target sequence
taatgttataactataaaaca

SEQ ID NO: 38787 - DNA, 21 bp, Artificial sequence
  SiRNA target sequence
aatgttataactataaaacac

SEQ ID NO: 38788 - DNA, 21 bp, Artificial sequence
  SiRNA target sequence
atgttataactataaaacact

SEQ ID NO: 38789 - DNA, 21 bp, Artificial sequence
  SiRNA target sequence
tgttataactataaaacactg

SEQ ID NO: 38790 - DNA, 21 bp, Artificial sequence
  SiRNA target sequence
gttataactataaaacactgt

SEQ ID NO: 38791 - DNA, 21 bp, Artificial sequence
  SiRNA target sequence
ttataactataaaacactgta

SEQ ID NO: 38792 - DNA, 21 bp, Artificial sequence
  SiRNA target sequence
tataactataaaacactgtaa

SEQ ID NO: 38793 - DNA, 21 bp, Artificial sequence
  SiRNA target sequence
ataactataaaacactgtaaa

SEQ ID NO: 38794 - DNA, 21 bp, Artificial sequence
  SiRNA target sequence
taactataaaacactgtaaag

SEQ ID NO: 38795 - DNA, 21 bp, Artificial sequence
  SiRNA target sequence
aactataaaacactgtaaagc

SEQ ID NO: 38796 - DNA, 21 bp, Artificial sequence
  SiRNA target sequence
actataaaacactgtaaagca

SEQ ID NO: 38797 - DNA, 21 bp, Artificial sequence
  SiRNA target sequence
ctataaaacactgtaaagcaa

SEQ ID NO: 38798 - DNA, 21 bp, Artificial sequence
  SiRNA target sequence
tataaaacactgtaaagcaaa

SEQ ID NO: 38799 - DNA, 21 bp, Artificial sequence
  SiRNA target sequence
ataaaacactgtaaagcaaaa

SEQ ID NO: 38800 - DNA, 21 bp, Artificial sequence
  SiRNA target sequence
taaaacactgtaaagcaaaaa

SEQ ID NO: 38801 - DNA, 21 bp, Artificial sequence
  SiRNA target sequence
aaaacactgtaaagcaaaaat

SEQ ID NO: 38802 - DNA, 21 bp, Artificial sequence
  SiRNA target sequence
aaacactgtaaagcaaaaatt

SEQ ID NO: 38803 - DNA, 21 bp, Artificial sequence
  SiRNA target sequence
aacactgtaaagcaaaaatta

SEQ ID NO: 38804 - DNA, 21 bp, Artificial sequence
  SiRNA target sequence
acactgtaaagcaaaaattat

SEQ ID NO: 38805 - DNA, 21 bp, Artificial sequence
  SiRNA target sequence
cactgtaaagcaaaaattatc

SEQ ID NO: 38806 - DNA, 21 bp, Artificial sequence
  SiRNA target sequence
actgtaaagcaaaaattatct

SEQ ID NO: 38807 - DNA, 21 bp, Artificial sequence
  SiRNA target sequence
ctgtaaagcaaaaattatctt

SEQ ID NO: 38808 - DNA, 21 bp, Artificial sequence
  SiRNA target sequence
tgtaaagcaaaaattatctta

SEQ ID NO: 38809 - DNA, 21 bp, Artificial sequence
  SiRNA target sequence
gtaaagcaaaaattatcttat

SEQ ID NO: 38810 - DNA, 21 bp, Artificial sequence
  SiRNA target sequence
taaagcaaaaattatcttatt

SEQ ID NO: 38811 - DNA, 21 bp, Artificial sequence
  SiRNA target sequence
aaagcaaaaattatcttattt

SEQ ID NO: 38812 - DNA, 21 bp, Artificial sequence
  SiRNA target sequence
aagcaaaaattatcttattta

SEQ ID NO: 38813 - DNA, 21 bp, Artificial sequence
  SiRNA target sequence
agcaaaaattatcttatttac

SEQ ID NO: 38814 - DNA, 21 bp, Artificial sequence
  SiRNA target sequence
gcaaaaattatcttatttaca

SEQ ID NO: 38815 - DNA, 21 bp, Artificial sequence
  SiRNA target sequence
caaaaattatcttatttacaa

SEQ ID NO: 38816 - DNA, 21 bp, Artificial sequence
  SiRNA target sequence
aaaaattatcttatttacaag

SEQ ID NO: 38817 - DNA, 21 bp, Artificial sequence
  SiRNA target sequence
aaaattatcttatttacaagg

SEQ ID NO: 38818 - DNA, 21 bp, Artificial sequence
  SiRNA target sequence
aaattatcttatttacaaggt

SEQ ID NO: 38819 - DNA, 21 bp, Artificial sequence
  SiRNA target sequence
aattatcttatttacaaggta

SEQ ID NO: 38820 - DNA, 21 bp, Artificial sequence
  SiRNA target sequence
attatcttatttacaaggtat

SEQ ID NO: 38821 - DNA, 21 bp, Artificial sequence
  SiRNA target sequence
ttatcttatttacaaggtata

SEQ ID NO: 38822 - DNA, 21 bp, Artificial sequence
  SiRNA target sequence
tatcttatttacaaggtataa

SEQ ID NO: 38823 - DNA, 21 bp, Artificial sequence
  SiRNA target sequence
atcttatttacaaggtataaa

SEQ ID NO: 38824 - DNA, 21 bp, Artificial sequence
  SiRNA target sequence
tcttatttacaaggtataaaa

SEQ ID NO: 38825 - DNA, 21 bp, Artificial sequence
  SiRNA target sequence
cttatttacaaggtataaaaa

SEQ ID NO: 38826 - DNA, 21 bp, Artificial sequence
  SiRNA target sequence
ttatttacaaggtataaaaaa

SEQ ID NO: 38827 - DNA, 21 bp, Artificial sequence
  SiRNA target sequence
tatttacaaggtataaaaaac

SEQ ID NO: 38828 - DNA, 21 bp, Artificial sequence
  SiRNA target sequence
atttacaaggtataaaaaact

SEQ ID NO: 38829 - DNA, 21 bp, Artificial sequence
  SiRNA target sequence
tttacaaggtataaaaaacta

SEQ ID NO: 38830 - DNA, 21 bp, Artificial sequence
  SiRNA target sequence
ttacaaggtataaaaaactaa

SEQ ID NO: 38831 - DNA, 21 bp, Artificial sequence
  SiRNA target sequence
tacaaggtataaaaaactaag

SEQ ID NO: 38832 - DNA, 21 bp, Artificial sequence
  SiRNA target sequence
acaaggtataaaaaactaaga

SEQ ID NO: 38833 - DNA, 21 bp, Artificial sequence
  SiRNA target sequence
caaggtataaaaaactaagag

SEQ ID NO: 38834 - DNA, 21 bp, Artificial sequence
  SiRNA target sequence
aaggtataaaaaactaagaga

SEQ ID NO: 38835 - DNA, 21 bp, Artificial sequence
  SiRNA target sequence
aggtataaaaaactaagagat

SEQ ID NO: 38836 - DNA, 21 bp, Artificial sequence
  SiRNA target sequence
ggtataaaaaactaagagatc

SEQ ID NO: 38837 - DNA, 21 bp, Artificial sequence
  SiRNA target sequence
gtataaaaaactaagagatct

SEQ ID NO: 38838 - DNA, 21 bp, Artificial sequence
  SiRNA target sequence
tataaaaaactaagagatctc

SEQ ID NO: 38839 - DNA, 21 bp, Artificial sequence
  SiRNA target sequence
ataaaaaactaagagatctcc

SEQ ID NO: 38840 - DNA, 21 bp, Artificial sequence
  SiRNA target sequence
taaaaaactaagagatctcca

SEQ ID NO: 38841 - DNA, 21 bp, Artificial sequence
  SiRNA target sequence
aaaaaactaagagatctccag

SEQ ID NO: 38842 - DNA, 21 bp, Artificial sequence
  SiRNA target sequence
aaaaactaagagatctccaga

SEQ ID NO: 38843 - DNA, 21 bp, Artificial sequence
  SiRNA target sequence
aaaactaagagatctccagat

SEQ ID NO: 38844 - DNA, 21 bp, Artificial sequence
  SiRNA target sequence
aaactaagagatctccagatt

SEQ ID NO: 38845 - DNA, 21 bp, Artificial sequence
  SiRNA target sequence
aactaagagatctccagattc

SEQ ID NO: 38846 - DNA, 21 bp, Artificial sequence
  SiRNA target sequence
actaagagatctccagattct

SEQ ID NO: 38847 - DNA, 21 bp, Artificial sequence
  SiRNA target sequence
ctaagagatctccagattctg

SEQ ID NO: 38848 - DNA, 21 bp, Artificial sequence
  SiRNA target sequence
taagagatctccagattctgt

SEQ ID NO: 38849 - DNA, 21 bp, Artificial sequence
  SiRNA target sequence
aagagatctccagattctgtt

SEQ ID NO: 38850 - DNA, 21 bp, Artificial sequence
  SiRNA target sequence
agagatctccagattctgtta

SEQ ID NO: 38851 - DNA, 21 bp, Artificial sequence
  SiRNA target sequence
gagatctccagattctgttac

SEQ ID NO: 38852 - DNA, 21 bp, Artificial sequence
  SiRNA target sequence
agatctccagattctgttaca

SEQ ID NO: 38853 - DNA, 21 bp, Artificial sequence
  SiRNA target sequence
gatctccagattctgttacat

SEQ ID NO: 38854 - DNA, 21 bp, Artificial sequence
  SiRNA target sequence
atctccagattctgttacatt

SEQ ID NO: 38855 - DNA, 21 bp, Artificial sequence
  SiRNA target sequence
tctccagattctgttacattc

SEQ ID NO: 38856 - DNA, 21 bp, Artificial sequence
  SiRNA target sequence
ctccagattctgttacattcc

SEQ ID NO: 38857 - DNA, 21 bp, Artificial sequence
  SiRNA target sequence
tccagattctgttacattccg

SEQ ID NO: 38858 - DNA, 21 bp, Artificial sequence
  SiRNA target sequence
ccagattctgttacattccga

SEQ ID NO: 38859 - DNA, 21 bp, Artificial sequence
  SiRNA target sequence
cagattctgttacattccgat

SEQ ID NO: 38860 - DNA, 21 bp, Artificial sequence
  SiRNA target sequence
agattctgttacattccgatt

SEQ ID NO: 38861 - DNA, 21 bp, Artificial sequence
  SiRNA target sequence
gattctgttacattccgattc

SEQ ID NO: 38862 - DNA, 21 bp, Artificial sequence
  SiRNA target sequence
attctgttacattccgattct

SEQ ID NO: 38863 - DNA, 21 bp, Artificial sequence
  SiRNA target sequence
ttctgttacattccgattcta

SEQ ID NO: 38864 - DNA, 21 bp, Artificial sequence
  SiRNA target sequence
tctgttacattccgattctac

SEQ ID NO: 38865 - DNA, 21 bp, Artificial sequence
  SiRNA target sequence
ctgttacattccgattctact

SEQ ID NO: 38866 - DNA, 21 bp, Artificial sequence
  SiRNA target sequence
tgttacattccgattctactt

SEQ ID NO: 38867 - DNA, 21 bp, Artificial sequence
  SiRNA target sequence
gttacattccgattctacttc

SEQ ID NO: 38868 - DNA, 21 bp, Artificial sequence
  SiRNA target sequence
ttacattccgattctacttca

SEQ ID NO: 38869 - DNA, 21 bp, Artificial sequence
  SiRNA target sequence
tacattccgattctacttcag

SEQ ID NO: 38870 - DNA, 21 bp, Artificial sequence
  SiRNA target sequence
acattccgattctacttcaga

SEQ ID NO: 38871 - DNA, 21 bp, Artificial sequence
  SiRNA target sequence
cattccgattctacttcagaa

SEQ ID NO: 38872 - DNA, 21 bp, Artificial sequence
  SiRNA target sequence
attccgattctacttcagaaa

SEQ ID NO: 38873 - DNA, 21 bp, Artificial sequence
  SiRNA target sequence
ttccgattctacttcagaaac

SEQ ID NO: 38874 - DNA, 21 bp, Artificial sequence
  SiRNA target sequence
tccgattctacttcagaaaca

SEQ ID NO: 38875 - DNA, 21 bp, Artificial sequence
  SiRNA target sequence
ccgattctacttcagaaacat

SEQ ID NO: 38876 - DNA, 21 bp, Artificial sequence
  SiRNA target sequence
cgattctacttcagaaacata

SEQ ID NO: 38877 - DNA, 21 bp, Artificial sequence
  SiRNA target sequence
gattctacttcagaaacatat

SEQ ID NO: 38878 - DNA, 21 bp, Artificial sequence
  SiRNA target sequence
attctacttcagaaacatatt

SEQ ID NO: 38879 - DNA, 21 bp, Artificial sequence
  SiRNA target sequence
ttctacttcagaaacatattt

SEQ ID NO: 38880 - DNA, 21 bp, Artificial sequence
  SiRNA target sequence
tctacttcagaaacatatttt

SEQ ID NO: 38881 - DNA, 21 bp, Artificial sequence
  SiRNA target sequence
ctacttcagaaacatattttt

SEQ ID NO: 38882 - DNA, 21 bp, Artificial sequence
  SiRNA target sequence
tacttcagaaacatatttttc

SEQ ID NO: 38883 - DNA, 21 bp, Artificial sequence
  SiRNA target sequence
acttcagaaacatatttttca

SEQ ID NO: 38884 - DNA, 21 bp, Artificial sequence
  SiRNA target sequence
cttcagaaacatatttttcat

SEQ ID NO: 38885 - DNA, 21 bp, Artificial sequence
  SiRNA target sequence
ttcagaaacatatttttcata

SEQ ID NO: 38886 - DNA, 21 bp, Artificial sequence
  SiRNA target sequence
tcagaaacatatttttcatat

SEQ ID NO: 38887 - DNA, 21 bp, Artificial sequence
  SiRNA target sequence
cagaaacatatttttcatatt

SEQ ID NO: 38888 - DNA, 21 bp, Artificial sequence
  SiRNA target sequence
agaaacatatttttcatattt

SEQ ID NO: 38889 - DNA, 21 bp, Artificial sequence
  SiRNA target sequence
gaaacatatttttcatattta

SEQ ID NO: 38890 - DNA, 21 bp, Artificial sequence
  SiRNA target sequence
aaacatatttttcatatttaa

SEQ ID NO: 38891 - DNA, 21 bp, Artificial sequence
  SiRNA target sequence
aacatatttttcatatttaag

SEQ ID NO: 38892 - DNA, 21 bp, Artificial sequence
  SiRNA target sequence
acatatttttcatatttaagc

SEQ ID NO: 38893 - DNA, 21 bp, Artificial sequence
  SiRNA target sequence
catatttttcatatttaagcg

SEQ ID NO: 38894 - DNA, 21 bp, Artificial sequence
  SiRNA target sequence
atatttttcatatttaagcga

SEQ ID NO: 38895 - DNA, 21 bp, Artificial sequence
  SiRNA target sequence
tatttttcatatttaagcgat

SEQ ID NO: 38896 - DNA, 21 bp, Artificial sequence
  SiRNA target sequence
atttttcatatttaagcgatt

SEQ ID NO: 38897 - DNA, 21 bp, Artificial sequence
  SiRNA target sequence
tttttcatatttaagcgattc

SEQ ID NO: 38898 - DNA, 21 bp, Artificial sequence
  SiRNA target sequence
ttttcatatttaagcgattct

SEQ ID NO: 38899 - DNA, 21 bp, Artificial sequence
  SiRNA target sequence
tttcatatttaagcgattctt

SEQ ID NO: 38900 - DNA, 21 bp, Artificial sequence
  SiRNA target sequence
ttcatatttaagcgattcttc

SEQ ID NO: 38901 - DNA, 21 bp, Artificial sequence
  SiRNA target sequence
tcatatttaagcgattcttct

SEQ ID NO: 38902 - DNA, 21 bp, Artificial sequence
  SiRNA target sequence
catatttaagcgattcttctt

SEQ ID NO: 38903 - DNA, 21 bp, Artificial sequence
  SiRNA target sequence
atatttaagcgattcttcttc

SEQ ID NO: 38904 - DNA, 21 bp, Artificial sequence
  SiRNA target sequence
tatttaagcgattcttcttct

SEQ ID NO: 38905 - DNA, 21 bp, Artificial sequence
  SiRNA target sequence
atttaagcgattcttcttctt

SEQ ID NO: 38906 - DNA, 21 bp, Artificial sequence
  SiRNA target sequence
tttaagcgattcttcttcttc

SEQ ID NO: 38907 - DNA, 21 bp, Artificial sequence
  SiRNA target sequence
ttaagcgattcttcttcttct

SEQ ID NO: 38908 - DNA, 21 bp, Artificial sequence
  SiRNA target sequence
taagcgattcttcttcttctg

SEQ ID NO: 38909 - DNA, 21 bp, Artificial sequence
  SiRNA target sequence
aagcgattcttcttcttctgt

SEQ ID NO: 38910 - DNA, 21 bp, Artificial sequence
  SiRNA target sequence
agcgattcttcttcttctgtt

SEQ ID NO: 38911 - DNA, 21 bp, Artificial sequence
  SiRNA target sequence
gcgattcttcttcttctgttt

SEQ ID NO: 38912 - DNA, 21 bp, Artificial sequence
  SiRNA target sequence
cgattcttcttcttctgtttt

SEQ ID NO: 38913 - DNA, 21 bp, Artificial sequence
  SiRNA target sequence
gattcttcttcttctgtttta

SEQ ID NO: 38914 - DNA, 21 bp, Artificial sequence
  SiRNA target sequence
attcttcttcttctgttttat

SEQ ID NO: 38915 - DNA, 21 bp, Artificial sequence
  SiRNA target sequence
ttcttcttcttctgttttata

SEQ ID NO: 38916 - DNA, 21 bp, Artificial sequence
  SiRNA target sequence
tcttcttcttctgttttatat

SEQ ID NO: 38917 - DNA, 21 bp, Artificial sequence
  SiRNA target sequence
cttcttcttctgttttatatg

SEQ ID NO: 38918 - DNA, 21 bp, Artificial sequence
  SiRNA target sequence
ttcttcttctgttttatatgc

SEQ ID NO: 38919 - DNA, 21 bp, Artificial sequence
  SiRNA target sequence
tcttcttctgttttatatgct

SEQ ID NO: 38920 - DNA, 21 bp, Artificial sequence
  SiRNA target sequence
cttcttctgttttatatgcta

SEQ ID NO: 38921 - DNA, 21 bp, Artificial sequence
  SiRNA target sequence
ttcttctgttttatatgctag

SEQ ID NO: 38922 - DNA, 21 bp, Artificial sequence
  SiRNA target sequence
tcttctgttttatatgctagt

SEQ ID NO: 38923 - DNA, 21 bp, Artificial sequence
  SiRNA target sequence
cttctgttttatatgctagta

SEQ ID NO: 38924 - DNA, 21 bp, Artificial sequence
  SiRNA target sequence
ttctgttttatatgctagtat

SEQ ID NO: 38925 - DNA, 21 bp, Artificial sequence
  SiRNA target sequence
tctgttttatatgctagtata

SEQ ID NO: 38926 - DNA, 21 bp, Artificial sequence
  SiRNA target sequence
ctgttttatatgctagtatag

SEQ ID NO: 38927 - DNA, 21 bp, Artificial sequence
  SiRNA target sequence
tgttttatatgctagtatagt

SEQ ID NO: 38928 - DNA, 21 bp, Artificial sequence
  SiRNA target sequence
gttttatatgctagtatagtc

SEQ ID NO: 38929 - DNA, 21 bp, Artificial sequence
  SiRNA target sequence
ttttatatgctagtatagtct

SEQ ID NO: 38930 - DNA, 21 bp, Artificial sequence
  SiRNA target sequence
tttatatgctagtatagtctc

SEQ ID NO: 38931 - DNA, 21 bp, Artificial sequence
  SiRNA target sequence
ttatatgctagtatagtctca

SEQ ID NO: 38932 - DNA, 21 bp, Artificial sequence
  SiRNA target sequence
tatatgctagtatagtctcat

SEQ ID NO: 38933 - DNA, 21 bp, Artificial sequence
  SiRNA target sequence
atatgctagtatagtctcatg

SEQ ID NO: 38934 - DNA, 21 bp, Artificial sequence
  SiRNA target sequence
tatgctagtatagtctcatga

SEQ ID NO: 38935 - DNA, 21 bp, Artificial sequence
  SiRNA target sequence
atgctagtatagtctcatgat

SEQ ID NO: 38936 - DNA, 21 bp, Artificial sequence
  SiRNA target sequence
tgctagtatagtctcatgatt

SEQ ID NO: 38937 - DNA, 21 bp, Artificial sequence
  SiRNA target sequence
gctagtatagtctcatgatta

SEQ ID NO: 38938 - DNA, 21 bp, Artificial sequence
  SiRNA target sequence
ctagtatagtctcatgattaa

SEQ ID NO: 38939 - DNA, 21 bp, Artificial sequence
  SiRNA target sequence
tagtatagtctcatgattaat

SEQ ID NO: 38940 - DNA, 21 bp, Artificial sequence
  SiRNA target sequence
agtatagtctcatgattaatt

SEQ ID NO: 38941 - DNA, 21 bp, Artificial sequence
  SiRNA target sequence
gtatagtctcatgattaatta

SEQ ID NO: 38942 - DNA, 21 bp, Artificial sequence
  SiRNA target sequence
tatagtctcatgattaattaa

SEQ ID NO: 38943 - DNA, 21 bp, Artificial sequence
  SiRNA target sequence
atagtctcatgattaattaaa

SEQ ID NO: 38944 - DNA, 21 bp, Artificial sequence
  SiRNA target sequence
tagtctcatgattaattaaag

SEQ ID NO: 38945 - DNA, 21 bp, Artificial sequence
  SiRNA target sequence
agtctcatgattaattaaaga

SEQ ID NO: 38946 - DNA, 21 bp, Artificial sequence
  SiRNA target sequence
gtctcatgattaattaaagaa

SEQ ID NO: 38947 - DNA, 21 bp, Artificial sequence
  SiRNA target sequence
tctcatgattaattaaagaat

SEQ ID NO: 38948 - DNA, 21 bp, Artificial sequence
  SiRNA target sequence
ctcatgattaattaaagaatc

SEQ ID NO: 38949 - DNA, 21 bp, Artificial sequence
  SiRNA target sequence
tcatgattaattaaagaatca

SEQ ID NO: 38950 - DNA, 21 bp, Artificial sequence
  SiRNA target sequence
catgattaattaaagaatcat

SEQ ID NO: 38951 - DNA, 21 bp, Artificial sequence
  SiRNA target sequence
atgattaattaaagaatcatg

SEQ ID NO: 38952 - DNA, 21 bp, Artificial sequence
  SiRNA target sequence
tgattaattaaagaatcatgt

SEQ ID NO: 38953 - DNA, 21 bp, Artificial sequence
  SiRNA target sequence
gattaattaaagaatcatgta

SEQ ID NO: 38954 - DNA, 21 bp, Artificial sequence
  SiRNA target sequence
attaattaaagaatcatgtaa

SEQ ID NO: 38955 - DNA, 21 bp, Artificial sequence
  SiRNA target sequence
ttaattaaagaatcatgtaag

SEQ ID NO: 38956 - DNA, 21 bp, Artificial sequence
  SiRNA target sequence
taattaaagaatcatgtaagt

SEQ ID NO: 38957 - DNA, 21 bp, Artificial sequence
  SiRNA target sequence
aattaaagaatcatgtaagtg

SEQ ID NO: 38958 - DNA, 21 bp, Artificial sequence
  SiRNA target sequence
attaaagaatcatgtaagtga

SEQ ID NO: 38959 - DNA, 21 bp, Artificial sequence
  SiRNA target sequence
ttaaagaatcatgtaagtgat

SEQ ID NO: 38960 - DNA, 21 bp, Artificial sequence
  SiRNA target sequence
taaagaatcatgtaagtgatt

SEQ ID NO: 38961 - DNA, 21 bp, Artificial sequence
  SiRNA target sequence
aaagaatcatgtaagtgattt

SEQ ID NO: 38962 - DNA, 21 bp, Artificial sequence
  SiRNA target sequence
aagaatcatgtaagtgatttg

SEQ ID NO: 38963 - DNA, 21 bp, Artificial sequence
  SiRNA target sequence
agaatcatgtaagtgatttga

SEQ ID NO: 38964 - DNA, 21 bp, Artificial sequence
  SiRNA target sequence
gaatcatgtaagtgatttgag

SEQ ID NO: 38965 - DNA, 21 bp, Artificial sequence
  SiRNA target sequence
aatcatgtaagtgatttgagc

SEQ ID NO: 38966 - DNA, 21 bp, Artificial sequence
  SiRNA target sequence
atcatgtaagtgatttgagca

SEQ ID NO: 38967 - DNA, 21 bp, Artificial sequence
  SiRNA target sequence
tcatgtaagtgatttgagcat

SEQ ID NO: 38968 - DNA, 21 bp, Artificial sequence
  SiRNA target sequence
catgtaagtgatttgagcatc

SEQ ID NO: 38969 - DNA, 21 bp, Artificial sequence
  SiRNA target sequence
atgtaagtgatttgagcatct

SEQ ID NO: 38970 - DNA, 21 bp, Artificial sequence
  SiRNA target sequence
tgtaagtgatttgagcatctt

SEQ ID NO: 38971 - DNA, 21 bp, Artificial sequence
  SiRNA target sequence
gtaagtgatttgagcatcttt

SEQ ID NO: 38972 - DNA, 21 bp, Artificial sequence
  SiRNA target sequence
taagtgatttgagcatctttg

SEQ ID NO: 38973 - DNA, 21 bp, Artificial sequence
  SiRNA target sequence
aagtgatttgagcatctttgt

SEQ ID NO: 38974 - DNA, 21 bp, Artificial sequence
  SiRNA target sequence
agtgatttgagcatctttgtt

SEQ ID NO: 38975 - DNA, 21 bp, Artificial sequence
  SiRNA target sequence
gtgatttgagcatctttgttg

SEQ ID NO: 38976 - DNA, 21 bp, Artificial sequence
  SiRNA target sequence
tgatttgagcatctttgttgt

SEQ ID NO: 38977 - DNA, 21 bp, Artificial sequence
  SiRNA target sequence
gatttgagcatctttgttgtg

SEQ ID NO: 38978 - DNA, 21 bp, Artificial sequence
  SiRNA target sequence
atttgagcatctttgttgtgc

SEQ ID NO: 38979 - DNA, 21 bp, Artificial sequence
  SiRNA target sequence
tttgagcatctttgttgtgcg

SEQ ID NO: 38980 - DNA, 21 bp, Artificial sequence
  SiRNA target sequence
ttgagcatctttgttgtgcgc

SEQ ID NO: 38981 - DNA, 21 bp, Artificial sequence
  SiRNA target sequence
tgagcatctttgttgtgcgca

SEQ ID NO: 38982 - DNA, 21 bp, Artificial sequence
  SiRNA target sequence
gagcatctttgttgtgcgcaa

SEQ ID NO: 38983 - DNA, 21 bp, Artificial sequence
  SiRNA target sequence
agcatctttgttgtgcgcaat

SEQ ID NO: 38984 - DNA, 21 bp, Artificial sequence
  SiRNA target sequence
gcatctttgttgtgcgcaatt

SEQ ID NO: 38985 - DNA, 21 bp, Artificial sequence
  SiRNA target sequence
catctttgttgtgcgcaatta

SEQ ID NO: 38986 - DNA, 21 bp, Artificial sequence
  SiRNA target sequence
atctttgttgtgcgcaattat

SEQ ID NO: 38987 - DNA, 21 bp, Artificial sequence
  SiRNA target sequence
tctttgttgtgcgcaattata

SEQ ID NO: 38988 - DNA, 21 bp, Artificial sequence
  SiRNA target sequence
ctttgttgtgcgcaattatat

SEQ ID NO: 38989 - DNA, 21 bp, Artificial sequence
  SiRNA target sequence
tttgttgtgcgcaattatatt

SEQ ID NO: 38990 - DNA, 21 bp, Artificial sequence
  SiRNA target sequence
ttgttgtgcgcaattatattc

SEQ ID NO: 38991 - DNA, 21 bp, Artificial sequence
  SiRNA target sequence
tgttgtgcgcaattatattct

SEQ ID NO: 38992 - DNA, 21 bp, Artificial sequence
  SiRNA target sequence
gttgtgcgcaattatattctt

SEQ ID NO: 38993 - DNA, 21 bp, Artificial sequence
  SiRNA target sequence
ttgtgcgcaattatattcttt

SEQ ID NO: 38994 - DNA, 21 bp, Artificial sequence
  SiRNA target sequence
tgtgcgcaattatattctttt

SEQ ID NO: 38995 - DNA, 21 bp, Artificial sequence
  SiRNA target sequence
gtgcgcaattatattcttttc

SEQ ID NO: 38996 - DNA, 21 bp, Artificial sequence
  SiRNA target sequence
tgcgcaattatattcttttct

SEQ ID NO: 38997 - DNA, 21 bp, Artificial sequence
  SiRNA target sequence
gcgcaattatattcttttctt

SEQ ID NO: 38998 - DNA, 21 bp, Artificial sequence
  SiRNA target sequence
cgcaattatattcttttctta

SEQ ID NO: 38999 - DNA, 21 bp, Artificial sequence
  SiRNA target sequence
gcaattatattcttttcttat

SEQ ID NO: 39000 - DNA, 21 bp, Artificial sequence
  SiRNA target sequence
caattatattcttttcttatt

SEQ ID NO: 39001 - DNA, 21 bp, Artificial sequence
  SiRNA target sequence
aattatattcttttcttattc

SEQ ID NO: 39002 - DNA, 21 bp, Artificial sequence
  SiRNA target sequence
attatattcttttcttattcc

SEQ ID NO: 39003 - DNA, 21 bp, Artificial sequence
  SiRNA target sequence
ttatattcttttcttattcct

SEQ ID NO: 39004 - DNA, 21 bp, Artificial sequence
  SiRNA target sequence
tatattcttttcttattcctg

SEQ ID NO: 39005 - DNA, 21 bp, Artificial sequence
  SiRNA target sequence
atattcttttcttattcctgt

SEQ ID NO: 39006 - DNA, 21 bp, Artificial sequence
  SiRNA target sequence
tattcttttcttattcctgta

SEQ ID NO: 39007 - DNA, 21 bp, Artificial sequence
  SiRNA target sequence
attcttttcttattcctgtac

SEQ ID NO: 39008 - DNA, 21 bp, Artificial sequence
  SiRNA target sequence
ttcttttcttattcctgtacg

SEQ ID NO: 39009 - DNA, 21 bp, Artificial sequence
  SiRNA target sequence
tcttttcttattcctgtacgc

SEQ ID NO: 39010 - DNA, 21 bp, Artificial sequence
  SiRNA target sequence
cttttcttattcctgtacgcc

SEQ ID NO: 39011 - DNA, 21 bp, Artificial sequence
  SiRNA target sequence
ttttcttattcctgtacgcca

SEQ ID NO: 39012 - DNA, 21 bp, Artificial sequence
  SiRNA target sequence
tttcttattcctgtacgccaa

SEQ ID NO: 39013 - DNA, 21 bp, Artificial sequence
  SiRNA target sequence
ttcttattcctgtacgccaat

SEQ ID NO: 39014 - DNA, 21 bp, Artificial sequence
  SiRNA target sequence
tcttattcctgtacgccaatg

SEQ ID NO: 39015 - DNA, 21 bp, Artificial sequence
  SiRNA target sequence
cttattcctgtacgccaatga

SEQ ID NO: 39016 - DNA, 21 bp, Artificial sequence
  SiRNA target sequence
ttattcctgtacgccaatgaa

SEQ ID NO: 39017 - DNA, 21 bp, Artificial sequence
  SiRNA target sequence
tattcctgtacgccaatgaac

SEQ ID NO: 39018 - DNA, 21 bp, Artificial sequence
  SiRNA target sequence
attcctgtacgccaatgaact

SEQ ID NO: 39019 - DNA, 21 bp, Artificial sequence
  SiRNA target sequence
ttcctgtacgccaatgaacta

SEQ ID NO: 39020 - DNA, 21 bp, Artificial sequence
  SiRNA target sequence
tcctgtacgccaatgaactat

SEQ ID NO: 39021 - DNA, 21 bp, Artificial sequence
  SiRNA target sequence
cctgtacgccaatgaactatt

SEQ ID NO: 39022 - DNA, 21 bp, Artificial sequence
  SiRNA target sequence
ctgtacgccaatgaactattt

SEQ ID NO: 39023 - DNA, 21 bp, Artificial sequence
  SiRNA target sequence
tgtacgccaatgaactatttt

SEQ ID NO: 39024 - DNA, 21 bp, Artificial sequence
  SiRNA target sequence
gtacgccaatgaactattttc

SEQ ID NO: 39025 - DNA, 21 bp, Artificial sequence
  SiRNA target sequence
tacgccaatgaactattttcg

SEQ ID NO: 39026 - DNA, 21 bp, Artificial sequence
  SiRNA target sequence
acgccaatgaactattttcgc

SEQ ID NO: 39027 - DNA, 21 bp, Artificial sequence
  SiRNA target sequence
cgccaatgaactattttcgca

SEQ ID NO: 39028 - DNA, 21 bp, Artificial sequence
  SiRNA target sequence
gccaatgaactattttcgcag

SEQ ID NO: 39029 - DNA, 21 bp, Artificial sequence
  SiRNA target sequence
ccaatgaactattttcgcagt

SEQ ID NO: 39030 - DNA, 21 bp, Artificial sequence
  SiRNA target sequence
caatgaactattttcgcagtt

SEQ ID NO: 39031 - DNA, 21 bp, Artificial sequence
  SiRNA target sequence
aatgaactattttcgcagttg

SEQ ID NO: 39032 - DNA, 21 bp, Artificial sequence
  SiRNA target sequence
atgaactattttcgcagttgc

SEQ ID NO: 39033 - DNA, 21 bp, Artificial sequence
  SiRNA target sequence
tgaactattttcgcagttgca

SEQ ID NO: 39034 - DNA, 21 bp, Artificial sequence
  SiRNA target sequence
gaactattttcgcagttgcaa

SEQ ID NO: 39035 - DNA, 21 bp, Artificial sequence
  SiRNA target sequence
aactattttcgcagttgcaag

SEQ ID NO: 39036 - DNA, 21 bp, Artificial sequence
  SiRNA target sequence
actattttcgcagttgcaagg

SEQ ID NO: 39037 - DNA, 21 bp, Artificial sequence
  SiRNA target sequence
ctattttcgcagttgcaagga

SEQ ID NO: 39038 - DNA, 21 bp, Artificial sequence
  SiRNA target sequence
tattttcgcagttgcaaggat

SEQ ID NO: 39039 - DNA, 21 bp, Artificial sequence
  SiRNA target sequence
attttcgcagttgcaaggatg

SEQ ID NO: 39040 - DNA, 21 bp, Artificial sequence
  SiRNA target sequence
ttttcgcagttgcaaggatgt

SEQ ID NO: 39041 - DNA, 21 bp, Artificial sequence
  SiRNA target sequence
tttcgcagttgcaaggatgta

SEQ ID NO: 39042 - DNA, 21 bp, Artificial sequence
  SiRNA target sequence
ttcgcagttgcaaggatgtaa

SEQ ID NO: 39043 - DNA, 21 bp, Artificial sequence
  SiRNA target sequence
tcgcagttgcaaggatgtaaa

SEQ ID NO: 39044 - DNA, 21 bp, Artificial sequence
  SiRNA target sequence
cgcagttgcaaggatgtaaac

SEQ ID NO: 39045 - DNA, 21 bp, Artificial sequence
  SiRNA target sequence
gcagttgcaaggatgtaaact

SEQ ID NO: 39046 - DNA, 21 bp, Artificial sequence
  SiRNA target sequence
cagttgcaaggatgtaaacta

SEQ ID NO: 39047 - DNA, 21 bp, Artificial sequence
  SiRNA target sequence
agttgcaaggatgtaaactaa

SEQ ID NO: 39048 - DNA, 21 bp, Artificial sequence
  SiRNA target sequence
gttgcaaggatgtaaactaat

SEQ ID NO: 39049 - DNA, 21 bp, Artificial sequence
  SiRNA target sequence
ttgcaaggatgtaaactaata

SEQ ID NO: 39050 - DNA, 21 bp, Artificial sequence
  SiRNA target sequence
tgcaaggatgtaaactaataa

SEQ ID NO: 39051 - DNA, 21 bp, Artificial sequence
  SiRNA target sequence
gcaaggatgtaaactaataat

SEQ ID NO: 39052 - DNA, 21 bp, Artificial sequence
  SiRNA target sequence
caaggatgtaaactaataatg

SEQ ID NO: 39053 - DNA, 21 bp, Artificial sequence
  SiRNA target sequence
aaggatgtaaactaataatgt

SEQ ID NO: 39054 - DNA, 21 bp, Artificial sequence
  SiRNA target sequence
aggatgtaaactaataatgtg

SEQ ID NO: 39055 - DNA, 21 bp, Artificial sequence
  SiRNA target sequence
ggatgtaaactaataatgtga

SEQ ID NO: 39056 - DNA, 21 bp, Artificial sequence
  SiRNA target sequence
gatgtaaactaataatgtgat

SEQ ID NO: 39057 - DNA, 21 bp, Artificial sequence
  SiRNA target sequence
atgtaaactaataatgtgatt

SEQ ID NO: 39058 - DNA, 21 bp, Artificial sequence
  SiRNA target sequence
tgtaaactaataatgtgatta

SEQ ID NO: 39059 - DNA, 21 bp, Artificial sequence
  SiRNA target sequence
gtaaactaataatgtgattaa

SEQ ID NO: 39060 - DNA, 21 bp, Artificial sequence
  SiRNA target sequence
taaactaataatgtgattaaa

SEQ ID NO: 39061 - DNA, 21 bp, Artificial sequence
  SiRNA target sequence
aaactaataatgtgattaaaa

SEQ ID NO: 39062 - DNA, 21 bp, Artificial sequence
  SiRNA target sequence
aactaataatgtgattaaaat

SEQ ID NO: 39063 - DNA, 21 bp, Artificial sequence
  SiRNA target sequence
actaataatgtgattaaaata

SEQ ID NO: 39064 - DNA, 21 bp, Artificial sequence
  SiRNA target sequence
ctaataatgtgattaaaataa

SEQ ID NO: 39065 - DNA, 21 bp, Artificial sequence
  SiRNA target sequence
taataatgtgattaaaataat

SEQ ID NO: 39066 - DNA, 21 bp, Artificial sequence
  SiRNA target sequence
aataatgtgattaaaataata

SEQ ID NO: 39067 - DNA, 21 bp, Artificial sequence
  SiRNA target sequence
ataatgtgattaaaataataa

SEQ ID NO: 39068 - DNA, 21 bp, Artificial sequence
  SiRNA target sequence
taatgtgattaaaataataaa

SEQ ID NO: 39069 - DNA, 21 bp, Artificial sequence
  SiRNA target sequence
aatgtgattaaaataataaac

SEQ ID NO: 39070 - DNA, 21 bp, Artificial sequence
  SiRNA target sequence
atgtgattaaaataataaaca

SEQ ID NO: 39071 - DNA, 21 bp, Artificial sequence
  SiRNA target sequence
tgtgattaaaataataaacat

SEQ ID NO: 39072 - DNA, 21 bp, Artificial sequence
  SiRNA target sequence
gtgattaaaataataaacata

SEQ ID NO: 39073 - DNA, 21 bp, Artificial sequence
  SiRNA target sequence
tgattaaaataataaacatat

SEQ ID NO: 39074 - DNA, 21 bp, Artificial sequence
  SiRNA target sequence
gattaaaataataaacatatt

SEQ ID NO: 39075 - DNA, 21 bp, Artificial sequence
  SiRNA target sequence
attaaaataataaacatattt

SEQ ID NO: 39076 - DNA, 21 bp, Artificial sequence
  SiRNA target sequence
ttaaaataataaacatatttg

SEQ ID NO: 39077 - DNA, 21 bp, Artificial sequence
  SiRNA target sequence
taaaataataaacatatttgt

SEQ ID NO: 39078 - DNA, 21 bp, Artificial sequence
  SiRNA target sequence
aaaataataaacatatttgtc

SEQ ID NO: 39079 - DNA, 21 bp, Artificial sequence
  SiRNA target sequence
aaataataaacatatttgtca

SEQ ID NO: 39080 - DNA, 21 bp, Artificial sequence
  SiRNA target sequence
aataataaacatatttgtcaa

SEQ ID NO: 39081 - DNA, 21 bp, Artificial sequence
  SiRNA target sequence
ataataaacatatttgtcaac

SEQ ID NO: 39082 - DNA, 21 bp, Artificial sequence
  SiRNA target sequence
taataaacatatttgtcaacc

SEQ ID NO: 39083 - DNA, 21 bp, Artificial sequence
  SiRNA target sequence
aataaacatatttgtcaaccc

SEQ ID NO: 39084 - DNA, 21 bp, Artificial sequence
  SiRNA target sequence
ataaacatatttgtcaaccct

SEQ ID NO: 39085 - DNA, 21 bp, Artificial sequence
  SiRNA target sequence
taaacatatttgtcaacccta

SEQ ID NO: 39086 - DNA, 21 bp, Artificial sequence
  SiRNA target sequence
aaacatatttgtcaaccctaa

SEQ ID NO: 39087 - DNA, 21 bp, Artificial sequence
  SiRNA target sequence
aacatatttgtcaaccctaaa

SEQ ID NO: 39088 - DNA, 21 bp, Artificial sequence
  SiRNA target sequence
acatatttgtcaaccctaaat

SEQ ID NO: 39089 - DNA, 21 bp, Artificial sequence
  SiRNA target sequence
catatttgtcaaccctaaatt

SEQ ID NO: 39090 - DNA, 21 bp, Artificial sequence
  SiRNA target sequence
atatttgtcaaccctaaattt

SEQ ID NO: 39091 - DNA, 21 bp, Artificial sequence
  SiRNA target sequence
tatttgtcaaccctaaatttg

SEQ ID NO: 39092 - DNA, 21 bp, Artificial sequence
  SiRNA target sequence
atttgtcaaccctaaatttgt

SEQ ID NO: 39093 - DNA, 21 bp, Artificial sequence
  SiRNA target sequence
tttgtcaaccctaaatttgta

SEQ ID NO: 39094 - DNA, 21 bp, Artificial sequence
  SiRNA target sequence
ttgtcaaccctaaatttgtat

SEQ ID NO: 39095 - DNA, 21 bp, Artificial sequence
  SiRNA target sequence
tgtcaaccctaaatttgtata

SEQ ID NO: 39096 - DNA, 21 bp, Artificial sequence
  SiRNA target sequence
gtcaaccctaaatttgtataa

SEQ ID NO: 39097 - DNA, 21 bp, Artificial sequence
  SiRNA target sequence
tcaaccctaaatttgtataaa

SEQ ID NO: 39098 - DNA, 21 bp, Artificial sequence
  SiRNA target sequence
caaccctaaatttgtataaat

SEQ ID NO: 39099 - DNA, 21 bp, Artificial sequence
  SiRNA target sequence
aaccctaaatttgtataaatt

SEQ ID NO: 39100 - DNA, 21 bp, Artificial sequence
  SiRNA target sequence
accctaaatttgtataaattg

SEQ ID NO: 39101 - DNA, 21 bp, Artificial sequence
  SiRNA target sequence
ccctaaatttgtataaattga

SEQ ID NO: 39102 - DNA, 21 bp, Artificial sequence
  SiRNA target sequence
cctaaatttgtataaattgac

SEQ ID NO: 39103 - DNA, 21 bp, Artificial sequence
  SiRNA target sequence
ctaaatttgtataaattgacg

SEQ ID NO: 39104 - DNA, 21 bp, Artificial sequence
  SiRNA target sequence
taaatttgtataaattgacga

SEQ ID NO: 39105 - DNA, 21 bp, Artificial sequence
  SiRNA target sequence
aaatttgtataaattgacgaa

SEQ ID NO: 39106 - DNA, 21 bp, Artificial sequence
  SiRNA target sequence
aatttgtataaattgacgaac

SEQ ID NO: 39107 - DNA, 21 bp, Artificial sequence
  SiRNA target sequence
atttgtataaattgacgaaca

SEQ ID NO: 39108 - DNA, 21 bp, Artificial sequence
  SiRNA target sequence
tttgtataaattgacgaacac

SEQ ID NO: 39109 - DNA, 21 bp, Artificial sequence
  SiRNA target sequence
ttgtataaattgacgaacacg

SEQ ID NO: 39110 - DNA, 21 bp, Artificial sequence
  SiRNA target sequence
tgtataaattgacgaacacgc

SEQ ID NO: 39111 - DNA, 21 bp, Artificial sequence
  SiRNA target sequence
gtataaattgacgaacacgcc

SEQ ID NO: 39112 - DNA, 21 bp, Artificial sequence
  SiRNA target sequence
tataaattgacgaacacgcca

SEQ ID NO: 39113 - DNA, 21 bp, Artificial sequence
  SiRNA target sequence
ataaattgacgaacacgccaa

SEQ ID NO: 39114 - DNA, 21 bp, Artificial sequence
  SiRNA target sequence
taaattgacgaacacgccaat

SEQ ID NO: 39115 - DNA, 21 bp, Artificial sequence
  SiRNA target sequence
aaattgacgaacacgccaata

SEQ ID NO: 39116 - DNA, 21 bp, Artificial sequence
  SiRNA target sequence
aattgacgaacacgccaatat

SEQ ID NO: 39117 - DNA, 21 bp, Artificial sequence
  SiRNA target sequence
attgacgaacacgccaatata

SEQ ID NO: 39118 - DNA, 21 bp, Artificial sequence
  SiRNA target sequence
ttgacgaacacgccaatataa

SEQ ID NO: 39119 - DNA, 21 bp, Artificial sequence
  SiRNA target sequence
tgacgaacacgccaatataac

SEQ ID NO: 39120 - DNA, 21 bp, Artificial sequence
  SiRNA target sequence
gacgaacacgccaatataact

SEQ ID NO: 39121 - DNA, 21 bp, Artificial sequence
  SiRNA target sequence
acgaacacgccaatataactg

SEQ ID NO: 39122 - DNA, 21 bp, Artificial sequence
  SiRNA target sequence
cgaacacgccaatataactgt

SEQ ID NO: 39123 - DNA, 21 bp, Artificial sequence
  SiRNA target sequence
gaacacgccaatataactgta

SEQ ID NO: 39124 - DNA, 21 bp, Artificial sequence
  SiRNA target sequence
aacacgccaatataactgtaa

SEQ ID NO: 39125 - DNA, 21 bp, Artificial sequence
  SiRNA target sequence
acacgccaatataactgtaaa

SEQ ID NO: 39126 - DNA, 21 bp, Artificial sequence
  SiRNA target sequence
cacgccaatataactgtaaaa

SEQ ID NO: 39127 - DNA, 21 bp, Artificial sequence
  SiRNA target sequence
acgccaatataactgtaaaaa

SEQ ID NO: 39128 - DNA, 21 bp, Artificial sequence
  SiRNA target sequence
cgccaatataactgtaaaaaa

SEQ ID NO: 39129 - DNA, 21 bp, Artificial sequence
  SiRNA target sequence
gccaatataactgtaaaaaaa

SEQ ID NO: 39130 - DNA, 21 bp, Artificial sequence
  SiRNA target sequence
ccaatataactgtaaaaaaaa

SEQ ID NO: 39131 - DNA, 21 bp, Artificial sequence
  SiRNA target sequence
caatataactgtaaaaaaaat

SEQ ID NO: 39132 - DNA, 21 bp, Artificial sequence
  SiRNA target sequence
aatataactgtaaaaaaaata

SEQ ID NO: 39133 - DNA, 21 bp, Artificial sequence
  SiRNA target sequence
atataactgtaaaaaaaatat

SEQ ID NO: 39134 - DNA, 21 bp, Artificial sequence
  SiRNA target sequence
tataactgtaaaaaaaatatt

SEQ ID NO: 39135 - DNA, 21 bp, Artificial sequence
  SiRNA target sequence
ataactgtaaaaaaaatattt

SEQ ID NO: 39136 - DNA, 21 bp, Artificial sequence
  SiRNA target sequence
taactgtaaaaaaaatattta

SEQ ID NO: 39137 - DNA, 21 bp, Artificial sequence
  SiRNA target sequence
aactgtaaaaaaaatatttat

SEQ ID NO: 39138 - DNA, 21 bp, Artificial sequence
  SiRNA target sequence
actgtaaaaaaaatatttatg

SEQ ID NO: 39139 - DNA, 21 bp, Artificial sequence
  SiRNA target sequence
ctgtaaaaaaaatatttatga

SEQ ID NO: 39140 - DNA, 21 bp, Artificial sequence
  SiRNA target sequence
tgtaaaaaaaatatttatgat

SEQ ID NO: 39141 - DNA, 21 bp, Artificial sequence
  SiRNA target sequence
gtaaaaaaaatatttatgata

SEQ ID NO: 39142 - DNA, 21 bp, Artificial sequence
  SiRNA target sequence
taaaaaaaatatttatgatat

SEQ ID NO: 39143 - DNA, 21 bp, Artificial sequence
  SiRNA target sequence
aaaaaaaatatttatgatatt

SEQ ID NO: 39144 - DNA, 21 bp, Artificial sequence
  SiRNA target sequence
aaaaaaatatttatgatatta

SEQ ID NO: 39145 - DNA, 21 bp, Artificial sequence
  SiRNA target sequence
aaaaaatatttatgatattaa

SEQ ID NO: 39146 - DNA, 21 bp, Artificial sequence
  SiRNA target sequence
aaaaatatttatgatattaac

SEQ ID NO: 39147 - DNA, 21 bp, Artificial sequence
  SiRNA target sequence
aaaatatttatgatattaaca

SEQ ID NO: 39148 - DNA, 21 bp, Artificial sequence
  SiRNA target sequence
aaatatttatgatattaacaa

SEQ ID NO: 39149 - DNA, 21 bp, Artificial sequence
  SiRNA target sequence
aatatttatgatattaacaaa

SEQ ID NO: 39150 - DNA, 21 bp, Artificial sequence
  SiRNA target sequence
atatttatgatattaacaaat

SEQ ID NO: 39151 - DNA, 21 bp, Artificial sequence
  SiRNA target sequence
tatttatgatattaacaaata

SEQ ID NO: 39152 - DNA, 21 bp, Artificial sequence
  SiRNA target sequence
atttatgatattaacaaataa

SEQ ID NO: 39153 - DNA, 21 bp, Artificial sequence
  SiRNA target sequence
tttatgatattaacaaataaa

SEQ ID NO: 39154 - DNA, 21 bp, Artificial sequence
  SiRNA target sequence
ttatgatattaacaaataaaa

SEQ ID NO: 39155 - DNA, 21 bp, Artificial sequence
  SiRNA target sequence
tatgatattaacaaataaaac

SEQ ID NO: 39156 - DNA, 21 bp, Artificial sequence
  SiRNA target sequence
atgatattaacaaataaaact

SEQ ID NO: 39157 - DNA, 21 bp, Artificial sequence
  SiRNA target sequence
tgatattaacaaataaaactt

SEQ ID NO: 39158 - DNA, 21 bp, Artificial sequence
  SiRNA target sequence
gatattaacaaataaaacttc

SEQ ID NO: 39159 - DNA, 21 bp, Artificial sequence
  SiRNA target sequence
atattaacaaataaaacttcg

SEQ ID NO: 39160 - DNA, 21 bp, Artificial sequence
  SiRNA target sequence
tattaacaaataaaacttcga

SEQ ID NO: 39161 - DNA, 21 bp, Artificial sequence
  SiRNA target sequence
attaacaaataaaacttcgat

SEQ ID NO: 39162 - DNA, 21 bp, Artificial sequence
  SiRNA target sequence
ttaacaaataaaacttcgatc

SEQ ID NO: 39163 - DNA, 21 bp, Artificial sequence
  SiRNA target sequence
taacaaataaaacttcgatca

SEQ ID NO: 39164 - DNA, 21 bp, Artificial sequence
  SiRNA target sequence
aacaaataaaacttcgatcaa

SEQ ID NO: 39165 - DNA, 21 bp, Artificial sequence
  SiRNA target sequence
acaaataaaacttcgatcaat

SEQ ID NO: 39166 - DNA, 21 bp, Artificial sequence
  SiRNA target sequence
caaataaaacttcgatcaatt

SEQ ID NO: 39167 - DNA, 21 bp, Artificial sequence
  SiRNA target sequence
aaataaaacttcgatcaattc

SEQ ID NO: 39168 - DNA, 21 bp, Artificial sequence
  SiRNA target sequence
aataaaacttcgatcaattca

SEQ ID NO: 39169 - DNA, 21 bp, Artificial sequence
  SiRNA target sequence
ataaaacttcgatcaattcac

SEQ ID NO: 39170 - DNA, 21 bp, Artificial sequence
  SiRNA target sequence
taaaacttcgatcaattcact

SEQ ID NO: 39171 - DNA, 21 bp, Artificial sequence
  SiRNA target sequence
aaaacttcgatcaattcactt

SEQ ID NO: 39172 - DNA, 21 bp, Artificial sequence
  SiRNA target sequence
aaacttcgatcaattcactta

SEQ ID NO: 39173 - DNA, 21 bp, Artificial sequence
  SiRNA target sequence
aacttcgatcaattcacttat

SEQ ID NO: 39174 - DNA, 21 bp, Artificial sequence
  SiRNA target sequence
acttcgatcaattcacttatt

SEQ ID NO: 39175 - DNA, 21 bp, Artificial sequence
  SiRNA target sequence
cttcgatcaattcacttattg

SEQ ID NO: 39176 - DNA, 21 bp, Artificial sequence
  SiRNA target sequence
ttcgatcaattcacttattgc

SEQ ID NO: 39177 - DNA, 21 bp, Artificial sequence
  SiRNA target sequence
tcgatcaattcacttattgct

SEQ ID NO: 39178 - DNA, 21 bp, Artificial sequence
  SiRNA target sequence
cgatcaattcacttattgctt

SEQ ID NO: 39179 - DNA, 21 bp, Artificial sequence
  SiRNA target sequence
gatcaattcacttattgcttt

SEQ ID NO: 39180 - DNA, 21 bp, Artificial sequence
  SiRNA target sequence
atcaattcacttattgcttta

SEQ ID NO: 39181 - DNA, 21 bp, Artificial sequence
  SiRNA target sequence
tcaattcacttattgctttac

SEQ ID NO: 39182 - DNA, 21 bp, Artificial sequence
  SiRNA target sequence
caattcacttattgctttact

SEQ ID NO: 39183 - DNA, 21 bp, Artificial sequence
  SiRNA target sequence
aattcacttattgctttactt

SEQ ID NO: 39184 - DNA, 21 bp, Artificial sequence
  SiRNA target sequence
attcacttattgctttacttt

SEQ ID NO: 39185 - DNA, 21 bp, Artificial sequence
  SiRNA target sequence
ttcacttattgctttactttc

SEQ ID NO: 39186 - DNA, 21 bp, Artificial sequence
  SiRNA target sequence
tcacttattgctttactttct

SEQ ID NO: 39187 - DNA, 21 bp, Artificial sequence
  SiRNA target sequence
cacttattgctttactttctc

SEQ ID NO: 39188 - DNA, 21 bp, Artificial sequence
  SiRNA target sequence
acttattgctttactttctcg

SEQ ID NO: 39189 - DNA, 21 bp, Artificial sequence
  SiRNA target sequence
cttattgctttactttctcgg

SEQ ID NO: 39190 - DNA, 21 bp, Artificial sequence
  SiRNA target sequence
ttattgctttactttctcggt

SEQ ID NO: 39191 - DNA, 21 bp, Artificial sequence
  SiRNA target sequence
tattgctttactttctcggtc

SEQ ID NO: 39192 - DNA, 21 bp, Artificial sequence
  SiRNA target sequence
attgctttactttctcggtct

SEQ ID NO: 39193 - DNA, 21 bp, Artificial sequence
  SiRNA target sequence
ttgctttactttctcggtcta

SEQ ID NO: 39194 - DNA, 21 bp, Artificial sequence
  SiRNA target sequence
tgctttactttctcggtctat

SEQ ID NO: 39195 - DNA, 21 bp, Artificial sequence
  SiRNA target sequence
gctttactttctcggtctatt

SEQ ID NO: 39196 - DNA, 21 bp, Artificial sequence
  SiRNA target sequence
ctttactttctcggtctatta

SEQ ID NO: 39197 - DNA, 21 bp, Artificial sequence
  SiRNA target sequence
tttactttctcggtctattat

SEQ ID NO: 39198 - DNA, 21 bp, Artificial sequence
  SiRNA target sequence
ttactttctcggtctattatt

SEQ ID NO: 39199 - DNA, 21 bp, Artificial sequence
  SiRNA target sequence
tactttctcggtctattattg

SEQ ID NO: 39200 - DNA, 21 bp, Artificial sequence
  SiRNA target sequence
actttctcggtctattattgt

SEQ ID NO: 39201 - DNA, 21 bp, Artificial sequence
  SiRNA target sequence
ctttctcggtctattattgtt

SEQ ID NO: 39202 - DNA, 21 bp, Artificial sequence
  SiRNA target sequence
tttctcggtctattattgttt

SEQ ID NO: 39203 - DNA, 21 bp, Artificial sequence
  SiRNA target sequence
ttctcggtctattattgtttg

SEQ ID NO: 39204 - DNA, 21 bp, Artificial sequence
  SiRNA target sequence
tctcggtctattattgtttgt

SEQ ID NO: 39205 - DNA, 21 bp, Artificial sequence
  SiRNA target sequence
ctcggtctattattgtttgta

SEQ ID NO: 39206 - DNA, 21 bp, Artificial sequence
  SiRNA target sequence
tcggtctattattgtttgtat

SEQ ID NO: 39207 - DNA, 21 bp, Artificial sequence
  SiRNA target sequence
cggtctattattgtttgtatt

SEQ ID NO: 39208 - DNA, 21 bp, Artificial sequence
  SiRNA target sequence
ggtctattattgtttgtattt

SEQ ID NO: 39209 - DNA, 21 bp, Artificial sequence
  SiRNA target sequence
gtctattattgtttgtatttc

SEQ ID NO: 39210 - DNA, 21 bp, Artificial sequence
  SiRNA target sequence
tctattattgtttgtatttca

SEQ ID NO: 39211 - DNA, 21 bp, Artificial sequence
  SiRNA target sequence
ctattattgtttgtatttcac

SEQ ID NO: 39212 - DNA, 21 bp, Artificial sequence
  SiRNA target sequence
tattattgtttgtatttcacc

SEQ ID NO: 39213 - DNA, 21 bp, Artificial sequence
  SiRNA target sequence
attattgtttgtatttcaccg

SEQ ID NO: 39214 - DNA, 21 bp, Artificial sequence
  SiRNA target sequence
ttattgtttgtatttcaccgc

SEQ ID NO: 39215 - DNA, 21 bp, Artificial sequence
  SiRNA target sequence
tattgtttgtatttcaccgca

SEQ ID NO: 39216 - DNA, 21 bp, Artificial sequence
  SiRNA target sequence
attgtttgtatttcaccgcat

SEQ ID NO: 39217 - DNA, 21 bp, Artificial sequence
  SiRNA target sequence
ttgtttgtatttcaccgcatc

SEQ ID NO: 39218 - DNA, 21 bp, Artificial sequence
  SiRNA target sequence
tgtttgtatttcaccgcatcc

SEQ ID NO: 39219 - DNA, 21 bp, Artificial sequence
  SiRNA target sequence
gtttgtatttcaccgcatcct

SEQ ID NO: 39220 - DNA, 21 bp, Artificial sequence
  SiRNA target sequence
tttgtatttcaccgcatccta

SEQ ID NO: 39221 - DNA, 21 bp, Artificial sequence
  SiRNA target sequence
ttgtatttcaccgcatcctat

SEQ ID NO: 39222 - DNA, 21 bp, Artificial sequence
  SiRNA target sequence
tgtatttcaccgcatcctatt

SEQ ID NO: 39223 - DNA, 21 bp, Artificial sequence
  SiRNA target sequence
gtatttcaccgcatcctattt

SEQ ID NO: 39224 - DNA, 21 bp, Artificial sequence
  SiRNA target sequence
tatttcaccgcatcctatttt

SEQ ID NO: 39225 - DNA, 21 bp, Artificial sequence
  SiRNA target sequence
atttcaccgcatcctatttta

SEQ ID NO: 39226 - DNA, 21 bp, Artificial sequence
  SiRNA target sequence
tttcaccgcatcctattttat

SEQ ID NO: 39227 - DNA, 21 bp, Artificial sequence
  SiRNA target sequence
ttcaccgcatcctattttatt

SEQ ID NO: 39228 - DNA, 21 bp, Artificial sequence
  SiRNA target sequence
tcaccgcatcctattttattg

SEQ ID NO: 39229 - DNA, 21 bp, Artificial sequence
  SiRNA target sequence
caccgcatcctattttattgt

SEQ ID NO: 39230 - DNA, 21 bp, Artificial sequence
  SiRNA target sequence
accgcatcctattttattgta

SEQ ID NO: 39231 - DNA, 21 bp, Artificial sequence
  SiRNA target sequence
ccgcatcctattttattgtat

SEQ ID NO: 39232 - DNA, 21 bp, Artificial sequence
  SiRNA target sequence
cgcatcctattttattgtatc

SEQ ID NO: 39233 - DNA, 21 bp, Artificial sequence
  SiRNA target sequence
gcatcctattttattgtatct

SEQ ID NO: 39234 - DNA, 21 bp, Artificial sequence
  SiRNA target sequence
catcctattttattgtatcta

SEQ ID NO: 39235 - DNA, 21 bp, Artificial sequence
  SiRNA target sequence
atcctattttattgtatctac

SEQ ID NO: 39236 - DNA, 21 bp, Artificial sequence
  SiRNA target sequence
tcctattttattgtatctact

SEQ ID NO: 39237 - DNA, 21 bp, Artificial sequence
  SiRNA target sequence
cctattttattgtatctacta

SEQ ID NO: 39238 - DNA, 21 bp, Artificial sequence
  SiRNA target sequence
ctattttattgtatctactaa

SEQ ID NO: 39239 - DNA, 21 bp, Artificial sequence
  SiRNA target sequence
tattttattgtatctactaag

SEQ ID NO: 39240 - DNA, 21 bp, Artificial sequence
  SiRNA target sequence
attttattgtatctactaagt

SEQ ID NO: 39241 - DNA, 21 bp, Artificial sequence
  SiRNA target sequence
ttttattgtatctactaagtt

SEQ ID NO: 39242 - DNA, 21 bp, Artificial sequence
  SiRNA target sequence
tttattgtatctactaagttc

SEQ ID NO: 39243 - DNA, 21 bp, Artificial sequence
  SiRNA target sequence
ttattgtatctactaagttcc

SEQ ID NO: 39244 - DNA, 21 bp, Artificial sequence
  SiRNA target sequence
tattgtatctactaagttcca

SEQ ID NO: 39245 - DNA, 21 bp, Artificial sequence
  SiRNA target sequence
attgtatctactaagttccat

SEQ ID NO: 39246 - DNA, 21 bp, Artificial sequence
  SiRNA target sequence
ttgtatctactaagttccata

SEQ ID NO: 39247 - DNA, 21 bp, Artificial sequence
  SiRNA target sequence
tgtatctactaagttccatat

SEQ ID NO: 39248 - DNA, 21 bp, Artificial sequence
  SiRNA target sequence
gtatctactaagttccatatt

SEQ ID NO: 39249 - DNA, 21 bp, Artificial sequence
  SiRNA target sequence
tatctactaagttccatattt

SEQ ID NO: 39250 - DNA, 21 bp, Artificial sequence
  SiRNA target sequence
atctactaagttccatattta

SEQ ID NO: 39251 - DNA, 21 bp, Artificial sequence
  SiRNA target sequence
tctactaagttccatatttat

SEQ ID NO: 39252 - DNA, 21 bp, Artificial sequence
  SiRNA target sequence
ctactaagttccatatttata

SEQ ID NO: 39253 - DNA, 21 bp, Artificial sequence
  SiRNA target sequence
tactaagttccatatttataa

SEQ ID NO: 39254 - DNA, 21 bp, Artificial sequence
  SiRNA target sequence
actaagttccatatttataaa

SEQ ID NO: 39255 - DNA, 21 bp, Artificial sequence
  SiRNA target sequence
ctaagttccatatttataaaa

SEQ ID NO: 39256 - DNA, 21 bp, Artificial sequence
  SiRNA target sequence
taagttccatatttataaaat

SEQ ID NO: 39257 - DNA, 21 bp, Artificial sequence
  SiRNA target sequence
aagttccatatttataaaatt

SEQ ID NO: 39258 - DNA, 21 bp, Artificial sequence
  SiRNA target sequence
agttccatatttataaaattt

SEQ ID NO: 39259 - DNA, 21 bp, Artificial sequence
  SiRNA target sequence
gttccatatttataaaatttt

SEQ ID NO: 39260 - DNA, 21 bp, Artificial sequence
  SiRNA target sequence
ttccatatttataaaattttt

SEQ ID NO: 39261 - DNA, 21 bp, Artificial sequence
  SiRNA target sequence
tccatatttataaaattttta

SEQ ID NO: 39262 - DNA, 21 bp, Artificial sequence
  SiRNA target sequence
ccatatttataaaatttttaa

SEQ ID NO: 39263 - DNA, 21 bp, Artificial sequence
  SiRNA target sequence
catatttataaaatttttaaa

SEQ ID NO: 39264 - DNA, 21 bp, Artificial sequence
  SiRNA target sequence
atatttataaaatttttaaat

SEQ ID NO: 39265 - DNA, 21 bp, Artificial sequence
  SiRNA target sequence
tatttataaaatttttaaatg

SEQ ID NO: 39266 - DNA, 21 bp, Artificial sequence
  SiRNA target sequence
atttataaaatttttaaatga

SEQ ID NO: 39267 - DNA, 21 bp, Artificial sequence
  SiRNA target sequence
tttataaaatttttaaatgaa

SEQ ID NO: 39268 - DNA, 21 bp, Artificial sequence
  SiRNA target sequence
ttataaaatttttaaatgaat

SEQ ID NO: 39269 - DNA, 21 bp, Artificial sequence
  SiRNA target sequence
tataaaatttttaaatgaatt

SEQ ID NO: 39270 - DNA, 21 bp, Artificial sequence
  SiRNA target sequence
ataaaatttttaaatgaattt

SEQ ID NO: 39271 - DNA, 21 bp, Artificial sequence
  SiRNA target sequence
taaaatttttaaatgaatttt

SEQ ID NO: 39272 - DNA, 21 bp, Artificial sequence
  SiRNA target sequence
aaaatttttaaatgaattttt

SEQ ID NO: 39273 - DNA, 21 bp, Artificial sequence
  SiRNA target sequence
aaatttttaaatgaatttttt

SEQ ID NO: 39274 - DNA, 21 bp, Artificial sequence
  SiRNA target sequence
aatttttaaatgaattttttc

SEQ ID NO: 39275 - DNA, 21 bp, Artificial sequence
  SiRNA target sequence
atttttaaatgaattttttcc

SEQ ID NO: 39276 - DNA, 21 bp, Artificial sequence
  SiRNA target sequence
tttttaaatgaattttttcct

SEQ ID NO: 39277 - DNA, 21 bp, Artificial sequence
  SiRNA target sequence
ttttaaatgaattttttcctg

SEQ ID NO: 39278 - DNA, 21 bp, Artificial sequence
  SiRNA target sequence
tttaaatgaattttttcctgt

SEQ ID NO: 39279 - DNA, 21 bp, Artificial sequence
  SiRNA target sequence
ttaaatgaattttttcctgtc

SEQ ID NO: 39280 - DNA, 21 bp, Artificial sequence
  SiRNA target sequence
taaatgaattttttcctgtca

SEQ ID NO: 39281 - DNA, 21 bp, Artificial sequence
  SiRNA target sequence
aaatgaattttttcctgtcag

SEQ ID NO: 39282 - DNA, 21 bp, Artificial sequence
  SiRNA target sequence
aatgaattttttcctgtcagt

SEQ ID NO: 39283 - DNA, 21 bp, Artificial sequence
  SiRNA target sequence
atgaattttttcctgtcagtc

SEQ ID NO: 39284 - DNA, 21 bp, Artificial sequence
  SiRNA target sequence
tgaattttttcctgtcagtct

SEQ ID NO: 39285 - DNA, 21 bp, Artificial sequence
  SiRNA target sequence
gaattttttcctgtcagtctg

SEQ ID NO: 39286 - DNA, 21 bp, Artificial sequence
  SiRNA target sequence
aattttttcctgtcagtctga

SEQ ID NO: 39287 - DNA, 21 bp, Artificial sequence
  SiRNA target sequence
attttttcctgtcagtctgaa

SEQ ID NO: 39288 - DNA, 21 bp, Artificial sequence
  SiRNA target sequence
ttttttcctgtcagtctgaat

SEQ ID NO: 39289 - DNA, 21 bp, Artificial sequence
  SiRNA target sequence
tttttcctgtcagtctgaata

SEQ ID NO: 39290 - DNA, 21 bp, Artificial sequence
  SiRNA target sequence
ttttcctgtcagtctgaatac

SEQ ID NO: 39291 - DNA, 21 bp, Artificial sequence
  SiRNA target sequence
tttcctgtcagtctgaataca

SEQ ID NO: 39292 - DNA, 21 bp, Artificial sequence
  SiRNA target sequence
ttcctgtcagtctgaatacat

SEQ ID NO: 39293 - DNA, 21 bp, Artificial sequence
  SiRNA target sequence
tcctgtcagtctgaatacatg

SEQ ID NO: 39294 - DNA, 21 bp, Artificial sequence
  SiRNA target sequence
cctgtcagtctgaatacatgt

SEQ ID NO: 39295 - DNA, 21 bp, Artificial sequence
  SiRNA target sequence
ctgtcagtctgaatacatgtt

SEQ ID NO: 39296 - DNA, 21 bp, Artificial sequence
  SiRNA target sequence
tgtcagtctgaatacatgttg

SEQ ID NO: 39297 - DNA, 21 bp, Artificial sequence
  SiRNA target sequence
gtcagtctgaatacatgttga

SEQ ID NO: 39298 - DNA, 21 bp, Artificial sequence
  SiRNA target sequence
tcagtctgaatacatgttgaa

SEQ ID NO: 39299 - DNA, 21 bp, Artificial sequence
  SiRNA target sequence
cagtctgaatacatgttgaac

SEQ ID NO: 39300 - DNA, 21 bp, Artificial sequence
  SiRNA target sequence
agtctgaatacatgttgaacg

SEQ ID NO: 39301 - DNA, 21 bp, Artificial sequence
  SiRNA target sequence
gtctgaatacatgttgaacgg

SEQ ID NO: 39302 - DNA, 21 bp, Artificial sequence
  SiRNA target sequence
tctgaatacatgttgaacggg

SEQ ID NO: 39303 - DNA, 21 bp, Artificial sequence
  SiRNA target sequence
ctgaatacatgttgaacgggt

SEQ ID NO: 39304 - DNA, 21 bp, Artificial sequence
  SiRNA target sequence
tgaatacatgttgaacgggtg

SEQ ID NO: 39305 - DNA, 21 bp, Artificial sequence
  SiRNA target sequence
gaatacatgttgaacgggtgt

SEQ ID NO: 39306 - DNA, 21 bp, Artificial sequence
  SiRNA target sequence
aatacatgttgaacgggtgta

SEQ ID NO: 39307 - DNA, 21 bp, Artificial sequence
  SiRNA target sequence
atacatgttgaacgggtgtaa

SEQ ID NO: 39308 - DNA, 21 bp, Artificial sequence
  SiRNA target sequence
tacatgttgaacgggtgtaac

SEQ ID NO: 39309 - DNA, 21 bp, Artificial sequence
  SiRNA target sequence
acatgttgaacgggtgtaaca

SEQ ID NO: 39310 - DNA, 21 bp, Artificial sequence
  SiRNA target sequence
catgttgaacgggtgtaacaa

SEQ ID NO: 39311 - DNA, 21 bp, Artificial sequence
  SiRNA target sequence
atgttgaacgggtgtaacaaa

SEQ ID NO: 39312 - DNA, 21 bp, Artificial sequence
  SiRNA target sequence
tgttgaacgggtgtaacaaat

SEQ ID NO: 39313 - DNA, 21 bp, Artificial sequence
  SiRNA target sequence
gttgaacgggtgtaacaaata

SEQ ID NO: 39314 - DNA, 21 bp, Artificial sequence
  SiRNA target sequence
ttgaacgggtgtaacaaatat

SEQ ID NO: 39315 - DNA, 21 bp, Artificial sequence
  SiRNA target sequence
tgaacgggtgtaacaaatata

SEQ ID NO: 39316 - DNA, 21 bp, Artificial sequence
  SiRNA target sequence
gaacgggtgtaacaaatataa

SEQ ID NO: 39317 - DNA, 21 bp, Artificial sequence
  SiRNA target sequence
aacgggtgtaacaaatataaa

SEQ ID NO: 39318 - DNA, 21 bp, Artificial sequence
  SiRNA target sequence
acgggtgtaacaaatataaaa

SEQ ID NO: 39319 - DNA, 21 bp, Artificial sequence
  SiRNA target sequence
cgggtgtaacaaatataaaat

SEQ ID NO: 39320 - DNA, 21 bp, Artificial sequence
  SiRNA target sequence
gggtgtaacaaatataaaatt

SEQ ID NO: 39321 - DNA, 21 bp, Artificial sequence
  SiRNA target sequence
ggtgtaacaaatataaaattg

SEQ ID NO: 39322 - DNA, 21 bp, Artificial sequence
  SiRNA target sequence
gtgtaacaaatataaaattgt

SEQ ID NO: 39323 - DNA, 21 bp, Artificial sequence
  SiRNA target sequence
tgtaacaaatataaaattgtt

SEQ ID NO: 39324 - DNA, 21 bp, Artificial sequence
  SiRNA target sequence
gtaacaaatataaaattgtta

SEQ ID NO: 39325 - DNA, 21 bp, Artificial sequence
  SiRNA target sequence
taacaaatataaaattgttaa

SEQ ID NO: 39326 - DNA, 21 bp, Artificial sequence
  SiRNA target sequence
aacaaatataaaattgttaag

SEQ ID NO: 39327 - DNA, 21 bp, Artificial sequence
  SiRNA target sequence
acaaatataaaattgttaagt

SEQ ID NO: 39328 - DNA, 21 bp, Artificial sequence
  SiRNA target sequence
caaatataaaattgttaagtt

SEQ ID NO: 39329 - DNA, 21 bp, Artificial sequence
  SiRNA target sequence
aaatataaaattgttaagttc

SEQ ID NO: 39330 - DNA, 21 bp, Artificial sequence
  SiRNA target sequence
aatataaaattgttaagttct

SEQ ID NO: 39331 - DNA, 21 bp, Artificial sequence
  SiRNA target sequence
atataaaattgttaagttctg

SEQ ID NO: 39332 - DNA, 21 bp, Artificial sequence
  SiRNA target sequence
tataaaattgttaagttctga

SEQ ID NO: 39333 - DNA, 21 bp, Artificial sequence
  SiRNA target sequence
ataaaattgttaagttctgac

SEQ ID NO: 39334 - DNA, 21 bp, Artificial sequence
  SiRNA target sequence
taaaattgttaagttctgaca

SEQ ID NO: 39335 - DNA, 21 bp, Artificial sequence
  SiRNA target sequence
aaaattgttaagttctgacat

SEQ ID NO: 39336 - DNA, 21 bp, Artificial sequence
  SiRNA target sequence
aaattgttaagttctgacatt

SEQ ID NO: 39337 - DNA, 21 bp, Artificial sequence
  SiRNA target sequence
aattgttaagttctgacattg

SEQ ID NO: 39338 - DNA, 21 bp, Artificial sequence
  SiRNA target sequence
attgttaagttctgacattgt

SEQ ID NO: 39339 - DNA, 21 bp, Artificial sequence
  SiRNA target sequence
ttgttaagttctgacattgta

SEQ ID NO: 39340 - DNA, 21 bp, Artificial sequence
  SiRNA target sequence
tgttaagttctgacattgtaa

SEQ ID NO: 39341 - DNA, 21 bp, Artificial sequence
  SiRNA target sequence
gttaagttctgacattgtaat

SEQ ID NO: 39342 - DNA, 21 bp, Artificial sequence
  SiRNA target sequence
ttaagttctgacattgtaatt

SEQ ID NO: 39343 - DNA, 21 bp, Artificial sequence
  SiRNA target sequence
taagttctgacattgtaattg

SEQ ID NO: 39344 - DNA, 21 bp, Artificial sequence
  SiRNA target sequence
aagttctgacattgtaattga

SEQ ID NO: 39345 - DNA, 21 bp, Artificial sequence
  SiRNA target sequence
agttctgacattgtaattgat

SEQ ID NO: 39346 - DNA, 21 bp, Artificial sequence
  SiRNA target sequence
gttctgacattgtaattgata

SEQ ID NO: 39347 - DNA, 21 bp, Artificial sequence
  SiRNA target sequence
ttctgacattgtaattgatac

SEQ ID NO: 39348 - DNA, 21 bp, Artificial sequence
  SiRNA target sequence
tctgacattgtaattgataca

SEQ ID NO: 39349 - DNA, 21 bp, Artificial sequence
  SiRNA target sequence
ctgacattgtaattgatacaa

SEQ ID NO: 39350 - DNA, 21 bp, Artificial sequence
  SiRNA target sequence
tgacattgtaattgatacaat

SEQ ID NO: 39351 - DNA, 21 bp, Artificial sequence
  SiRNA target sequence
gacattgtaattgatacaatt

SEQ ID NO: 39352 - DNA, 21 bp, Artificial sequence
  SiRNA target sequence
acattgtaattgatacaattg

SEQ ID NO: 39353 - DNA, 21 bp, Artificial sequence
  SiRNA target sequence
cattgtaattgatacaattgt

SEQ ID NO: 39354 - DNA, 21 bp, Artificial sequence
  SiRNA target sequence
attgtaattgatacaattgtc

SEQ ID NO: 39355 - DNA, 21 bp, Artificial sequence
  SiRNA target sequence
ttgtaattgatacaattgtca

SEQ ID NO: 39356 - DNA, 21 bp, Artificial sequence
  SiRNA target sequence
tgtaattgatacaattgtcaa

SEQ ID NO: 39357 - DNA, 21 bp, Artificial sequence
  SiRNA target sequence
gtaattgatacaattgtcaaa

SEQ ID NO: 39358 - DNA, 21 bp, Artificial sequence
  SiRNA target sequence
taattgatacaattgtcaaaa

SEQ ID NO: 39359 - DNA, 21 bp, Artificial sequence
  SiRNA target sequence
aattgatacaattgtcaaaac

SEQ ID NO: 39360 - DNA, 21 bp, Artificial sequence
  SiRNA target sequence
attgatacaattgtcaaaact

SEQ ID NO: 39361 - DNA, 21 bp, Artificial sequence
  SiRNA target sequence
ttgatacaattgtcaaaactg

SEQ ID NO: 39362 - DNA, 21 bp, Artificial sequence
  SiRNA target sequence
tgatacaattgtcaaaactgc

SEQ ID NO: 39363 - DNA, 21 bp, Artificial sequence
  SiRNA target sequence
gatacaattgtcaaaactgca

SEQ ID NO: 39364 - DNA, 21 bp, Artificial sequence
  SiRNA target sequence
atacaattgtcaaaactgcaa

SEQ ID NO: 39365 - DNA, 21 bp, Artificial sequence
  SiRNA target sequence
tacaattgtcaaaactgcaaa

SEQ ID NO: 39366 - DNA, 21 bp, Artificial sequence
  SiRNA target sequence
acaattgtcaaaactgcaaaa

SEQ ID NO: 39367 - DNA, 21 bp, Artificial sequence
  SiRNA target sequence
caattgtcaaaactgcaaaat

SEQ ID NO: 39368 - DNA, 21 bp, Artificial sequence
  SiRNA target sequence
aattgtcaaaactgcaaaata

SEQ ID NO: 39369 - DNA, 21 bp, Artificial sequence
  SiRNA target sequence
attgtcaaaactgcaaaatac

SEQ ID NO: 39370 - DNA, 21 bp, Artificial sequence
  SiRNA target sequence
ttgtcaaaactgcaaaataca

SEQ ID NO: 39371 - DNA, 21 bp, Artificial sequence
  SiRNA target sequence
tgtcaaaactgcaaaatacaa

SEQ ID NO: 39372 - DNA, 21 bp, Artificial sequence
  SiRNA target sequence
gtcaaaactgcaaaatacaaa

SEQ ID NO: 39373 - DNA, 21 bp, Artificial sequence
  SiRNA target sequence
tcaaaactgcaaaatacaaaa

SEQ ID NO: 39374 - DNA, 21 bp, Artificial sequence
  SiRNA target sequence
caaaactgcaaaatacaaaag

SEQ ID NO: 39375 - DNA, 21 bp, Artificial sequence
  SiRNA target sequence
aaaactgcaaaatacaaaaga

SEQ ID NO: 39376 - DNA, 21 bp, Artificial sequence
  SiRNA target sequence
aaactgcaaaatacaaaagac

SEQ ID NO: 39377 - DNA, 21 bp, Artificial sequence
  SiRNA target sequence
aactgcaaaatacaaaagact

SEQ ID NO: 39378 - DNA, 21 bp, Artificial sequence
  SiRNA target sequence
actgcaaaatacaaaagactt

SEQ ID NO: 39379 - DNA, 21 bp, Artificial sequence
  SiRNA target sequence
ctgcaaaatacaaaagacttt

SEQ ID NO: 39380 - DNA, 21 bp, Artificial sequence
  SiRNA target sequence
tgcaaaatacaaaagactttg

SEQ ID NO: 39381 - DNA, 21 bp, Artificial sequence
  SiRNA target sequence
gcaaaatacaaaagactttga

SEQ ID NO: 39382 - DNA, 21 bp, Artificial sequence
  SiRNA target sequence
caaaatacaaaagactttgac

SEQ ID NO: 39383 - DNA, 21 bp, Artificial sequence
  SiRNA target sequence
aaaatacaaaagactttgact

SEQ ID NO: 39384 - DNA, 21 bp, Artificial sequence
  SiRNA target sequence
aaatacaaaagactttgacta

SEQ ID NO: 39385 - DNA, 21 bp, Artificial sequence
  SiRNA target sequence
aatacaaaagactttgactaa

SEQ ID NO: 39386 - DNA, 21 bp, Artificial sequence
  SiRNA target sequence
atacaaaagactttgactaag

SEQ ID NO: 39387 - DNA, 21 bp, Artificial sequence
  SiRNA target sequence
tacaaaagactttgactaaga

SEQ ID NO: 39388 - DNA, 21 bp, Artificial sequence
  SiRNA target sequence
acaaaagactttgactaagat

SEQ ID NO: 39389 - DNA, 21 bp, Artificial sequence
  SiRNA target sequence
caaaagactttgactaagatc

SEQ ID NO: 39390 - DNA, 21 bp, Artificial sequence
  SiRNA target sequence
aaaagactttgactaagatct

SEQ ID NO: 39391 - DNA, 21 bp, Artificial sequence
  SiRNA target sequence
aaagactttgactaagatctt

SEQ ID NO: 39392 - DNA, 21 bp, Artificial sequence
  SiRNA target sequence
aagactttgactaagatcttt

SEQ ID NO: 39393 - DNA, 21 bp, Artificial sequence
  SiRNA target sequence
agactttgactaagatcttta

SEQ ID NO: 39394 - DNA, 21 bp, Artificial sequence
  SiRNA target sequence
gactttgactaagatctttat

SEQ ID NO: 39395 - DNA, 21 bp, Artificial sequence
  SiRNA target sequence
actttgactaagatctttatt

SEQ ID NO: 39396 - DNA, 21 bp, Artificial sequence
  SiRNA target sequence
ctttgactaagatctttatta

SEQ ID NO: 39397 - DNA, 21 bp, Artificial sequence
  SiRNA target sequence
tttgactaagatctttattat

SEQ ID NO: 39398 - DNA, 21 bp, Artificial sequence
  SiRNA target sequence
ttgactaagatctttattatc

SEQ ID NO: 39399 - DNA, 21 bp, Artificial sequence
  SiRNA target sequence
tgactaagatctttattatct

SEQ ID NO: 39400 - DNA, 21 bp, Artificial sequence
  SiRNA target sequence
gactaagatctttattatctg

SEQ ID NO: 39401 - DNA, 21 bp, Artificial sequence
  SiRNA target sequence
actaagatctttattatctgt

SEQ ID NO: 39402 - DNA, 21 bp, Artificial sequence
  SiRNA target sequence
ctaagatctttattatctgta

SEQ ID NO: 39403 - DNA, 21 bp, Artificial sequence
  SiRNA target sequence
taagatctttattatctgtaa

SEQ ID NO: 39404 - DNA, 21 bp, Artificial sequence
  SiRNA target sequence
aagatctttattatctgtaat

SEQ ID NO: 39405 - DNA, 21 bp, Artificial sequence
  SiRNA target sequence
agatctttattatctgtaata

SEQ ID NO: 39406 - DNA, 21 bp, Artificial sequence
  SiRNA target sequence
gatctttattatctgtaatat

SEQ ID NO: 39407 - DNA, 21 bp, Artificial sequence
  SiRNA target sequence
atctttattatctgtaatatc

SEQ ID NO: 39408 - DNA, 21 bp, Artificial sequence
  SiRNA target sequence
tctttattatctgtaatatca

SEQ ID NO: 39409 - DNA, 21 bp, Artificial sequence
  SiRNA target sequence
ctttattatctgtaatatcac

SEQ ID NO: 39410 - DNA, 21 bp, Artificial sequence
  SiRNA target sequence
tttattatctgtaatatcact

SEQ ID NO: 39411 - DNA, 21 bp, Artificial sequence
  SiRNA target sequence
ttattatctgtaatatcacta

SEQ ID NO: 39412 - DNA, 21 bp, Artificial sequence
  SiRNA target sequence
tattatctgtaatatcactag

SEQ ID NO: 39413 - DNA, 21 bp, Artificial sequence
  SiRNA target sequence
attatctgtaatatcactagt

SEQ ID NO: 39414 - DNA, 21 bp, Artificial sequence
  SiRNA target sequence
ttatctgtaatatcactagtc

SEQ ID NO: 39415 - DNA, 21 bp, Artificial sequence
  SiRNA target sequence
tatctgtaatatcactagtca

SEQ ID NO: 39416 - DNA, 21 bp, Artificial sequence
  SiRNA target sequence
atctgtaatatcactagtcaa

SEQ ID NO: 39417 - DNA, 21 bp, Artificial sequence
  SiRNA target sequence
tctgtaatatcactagtcaat

SEQ ID NO: 39418 - DNA, 21 bp, Artificial sequence
  SiRNA target sequence
ctgtaatatcactagtcaatt

SEQ ID NO: 39419 - DNA, 21 bp, Artificial sequence
  SiRNA target sequence
tgtaatatcactagtcaattt

SEQ ID NO: 39420 - DNA, 21 bp, Artificial sequence
  SiRNA target sequence
gtaatatcactagtcaatttc

SEQ ID NO: 39421 - DNA, 21 bp, Artificial sequence
  SiRNA target sequence
taatatcactagtcaatttcc

SEQ ID NO: 39422 - DNA, 21 bp, Artificial sequence
  SiRNA target sequence
aatatcactagtcaatttccg

SEQ ID NO: 39423 - DNA, 21 bp, Artificial sequence
  SiRNA target sequence
atatcactagtcaatttccgg

SEQ ID NO: 39424 - DNA, 21 bp, Artificial sequence
  SiRNA target sequence
tatcactagtcaatttccggg

SEQ ID NO: 39425 - DNA, 21 bp, Artificial sequence
  SiRNA target sequence
atcactagtcaatttccgggt

SEQ ID NO: 39426 - DNA, 21 bp, Artificial sequence
  SiRNA target sequence
tcactagtcaatttccgggta

SEQ ID NO: 39427 - DNA, 21 bp, Artificial sequence
  SiRNA target sequence
cactagtcaatttccgggtag

SEQ ID NO: 39428 - DNA, 21 bp, Artificial sequence
  SiRNA target sequence
actagtcaatttccgggtagc

SEQ ID NO: 39429 - DNA, 21 bp, Artificial sequence
  SiRNA target sequence
ctagtcaatttccgggtagct

SEQ ID NO: 39430 - DNA, 21 bp, Artificial sequence
  SiRNA target sequence
tagtcaatttccgggtagctt

SEQ ID NO: 39431 - DNA, 21 bp, Artificial sequence
  SiRNA target sequence
agtcaatttccgggtagcttc

SEQ ID NO: 39432 - DNA, 21 bp, Artificial sequence
  SiRNA target sequence
gtcaatttccgggtagcttca

SEQ ID NO: 39433 - DNA, 21 bp, Artificial sequence
  SiRNA target sequence
tcaatttccgggtagcttcaa

SEQ ID NO: 39434 - DNA, 21 bp, Artificial sequence
  SiRNA target sequence
caatttccgggtagcttcaac

SEQ ID NO: 39435 - DNA, 21 bp, Artificial sequence
  SiRNA target sequence
aatttccgggtagcttcaact

SEQ ID NO: 39436 - DNA, 21 bp, Artificial sequence
  SiRNA target sequence
atttccgggtagcttcaactg

SEQ ID NO: 39437 - DNA, 21 bp, Artificial sequence
  SiRNA target sequence
tttccgggtagcttcaactgt

SEQ ID NO: 39438 - DNA, 21 bp, Artificial sequence
  SiRNA target sequence
ttccgggtagcttcaactgtt

SEQ ID NO: 39439 - DNA, 21 bp, Artificial sequence
  SiRNA target sequence
tccgggtagcttcaactgtta

SEQ ID NO: 39440 - DNA, 21 bp, Artificial sequence
  SiRNA target sequence
ccgggtagcttcaactgttaa

SEQ ID NO: 39441 - DNA, 21 bp, Artificial sequence
  SiRNA target sequence
cgggtagcttcaactgttaaa

SEQ ID NO: 39442 - DNA, 21 bp, Artificial sequence
  SiRNA target sequence
gggtagcttcaactgttaaaa

SEQ ID NO: 39443 - DNA, 21 bp, Artificial sequence
  SiRNA target sequence
ggtagcttcaactgttaaaac

SEQ ID NO: 39444 - DNA, 21 bp, Artificial sequence
  SiRNA target sequence
gtagcttcaactgttaaaaca

SEQ ID NO: 39445 - DNA, 21 bp, Artificial sequence
  SiRNA target sequence
tagcttcaactgttaaaacat

SEQ ID NO: 39446 - DNA, 21 bp, Artificial sequence
  SiRNA target sequence
agcttcaactgttaaaacatt

SEQ ID NO: 39447 - DNA, 21 bp, Artificial sequence
  SiRNA target sequence
gcttcaactgttaaaacatta

SEQ ID NO: 39448 - DNA, 21 bp, Artificial sequence
  SiRNA target sequence
cttcaactgttaaaacattaa

SEQ ID NO: 39449 - DNA, 21 bp, Artificial sequence
  SiRNA target sequence
ttcaactgttaaaacattaaa

SEQ ID NO: 39450 - DNA, 21 bp, Artificial sequence
  SiRNA target sequence
tcaactgttaaaacattaaat

SEQ ID NO: 39451 - DNA, 21 bp, Artificial sequence
  SiRNA target sequence
caactgttaaaacattaaatg

SEQ ID NO: 39452 - DNA, 21 bp, Artificial sequence
  SiRNA target sequence
aactgttaaaacattaaatgt

SEQ ID NO: 39453 - DNA, 21 bp, Artificial sequence
  SiRNA target sequence
actgttaaaacattaaatgta

SEQ ID NO: 39454 - DNA, 21 bp, Artificial sequence
  SiRNA target sequence
ctgttaaaacattaaatgtac

SEQ ID NO: 39455 - DNA, 21 bp, Artificial sequence
  SiRNA target sequence
tgttaaaacattaaatgtaca

SEQ ID NO: 39456 - DNA, 21 bp, Artificial sequence
  SiRNA target sequence
gttaaaacattaaatgtacaa

SEQ ID NO: 39457 - DNA, 21 bp, Artificial sequence
  SiRNA target sequence
ttaaaacattaaatgtacaaa

SEQ ID NO: 39458 - DNA, 21 bp, Artificial sequence
  SiRNA target sequence
taaaacattaaatgtacaaac

SEQ ID NO: 39459 - DNA, 21 bp, Artificial sequence
  SiRNA target sequence
aaaacattaaatgtacaaact

SEQ ID NO: 39460 - DNA, 21 bp, Artificial sequence
  SiRNA target sequence
aaacattaaatgtacaaactg

SEQ ID NO: 39461 - DNA, 21 bp, Artificial sequence
  SiRNA target sequence
aacattaaatgtacaaactgc

SEQ ID NO: 39462 - DNA, 21 bp, Artificial sequence
  SiRNA target sequence
acattaaatgtacaaactgca

SEQ ID NO: 39463 - DNA, 21 bp, Artificial sequence
  SiRNA target sequence
cattaaatgtacaaactgcaa

SEQ ID NO: 39464 - DNA, 21 bp, Artificial sequence
  SiRNA target sequence
attaaatgtacaaactgcaaa

SEQ ID NO: 39465 - DNA, 21 bp, Artificial sequence
  SiRNA target sequence
ttaaatgtacaaactgcaaat

SEQ ID NO: 39466 - DNA, 21 bp, Artificial sequence
  SiRNA target sequence
taaatgtacaaactgcaaatg

SEQ ID NO: 39467 - DNA, 21 bp, Artificial sequence
  SiRNA target sequence
aaatgtacaaactgcaaatgt

SEQ ID NO: 39468 - DNA, 21 bp, Artificial sequence
  SiRNA target sequence
aatgtacaaactgcaaatgtc

SEQ ID NO: 39469 - DNA, 21 bp, Artificial sequence
  SiRNA target sequence
atgtacaaactgcaaatgtcc

SEQ ID NO: 39470 - DNA, 21 bp, Artificial sequence
  SiRNA target sequence
tgtacaaactgcaaatgtccc

SEQ ID NO: 39471 - DNA, 21 bp, Artificial sequence
  SiRNA target sequence
gtacaaactgcaaatgtccca

SEQ ID NO: 39472 - DNA, 21 bp, Artificial sequence
  SiRNA target sequence
tacaaactgcaaatgtcccaa

SEQ ID NO: 39473 - DNA, 21 bp, Artificial sequence
  SiRNA target sequence
acaaactgcaaatgtcccaaa

SEQ ID NO: 39474 - DNA, 21 bp, Artificial sequence
  SiRNA target sequence
caaactgcaaatgtcccaaaa

SEQ ID NO: 39475 - DNA, 21 bp, Artificial sequence
  SiRNA target sequence
aaactgcaaatgtcccaaaaa

SEQ ID NO: 39476 - DNA, 21 bp, Artificial sequence
  SiRNA target sequence
aactgcaaatgtcccaaaaat

SEQ ID NO: 39477 - DNA, 21 bp, Artificial sequence
  SiRNA target sequence
actgcaaatgtcccaaaaatt

SEQ ID NO: 39478 - DNA, 21 bp, Artificial sequence
  SiRNA target sequence
ctgcaaatgtcccaaaaatta

SEQ ID NO: 39479 - DNA, 21 bp, Artificial sequence
  SiRNA target sequence
tgcaaatgtcccaaaaattat

SEQ ID NO: 39480 - DNA, 21 bp, Artificial sequence
  SiRNA target sequence
gcaaatgtcccaaaaattatg

SEQ ID NO: 39481 - DNA, 21 bp, Artificial sequence
  SiRNA target sequence
caaatgtcccaaaaattatgt

SEQ ID NO: 39482 - DNA, 21 bp, Artificial sequence
  SiRNA target sequence
aaatgtcccaaaaattatgta

SEQ ID NO: 39483 - DNA, 21 bp, Artificial sequence
  SiRNA target sequence
aatgtcccaaaaattatgtaa

SEQ ID NO: 39484 - DNA, 21 bp, Artificial sequence
  SiRNA target sequence
atgtcccaaaaattatgtaaa

SEQ ID NO: 39485 - DNA, 21 bp, Artificial sequence
  SiRNA target sequence
tgtcccaaaaattatgtaaat

SEQ ID NO: 39486 - DNA, 21 bp, Artificial sequence
  SiRNA target sequence
gtcccaaaaattatgtaaatg

SEQ ID NO: 39487 - DNA, 21 bp, Artificial sequence
  SiRNA target sequence
tcccaaaaattatgtaaatga

SEQ ID NO: 39488 - DNA, 21 bp, Artificial sequence
  SiRNA target sequence
cccaaaaattatgtaaatgac

SEQ ID NO: 39489 - DNA, 21 bp, Artificial sequence
  SiRNA target sequence
ccaaaaattatgtaaatgaca

SEQ ID NO: 39490 - DNA, 21 bp, Artificial sequence
  SiRNA target sequence
caaaaattatgtaaatgacaa

SEQ ID NO: 39491 - DNA, 21 bp, Artificial sequence
  SiRNA target sequence
aaaaattatgtaaatgacaaa

SEQ ID NO: 39492 - DNA, 21 bp, Artificial sequence
  SiRNA target sequence
aaaattatgtaaatgacaaat

SEQ ID NO: 39493 - DNA, 21 bp, Artificial sequence
  SiRNA target sequence
aaattatgtaaatgacaaatg

SEQ ID NO: 39494 - DNA, 21 bp, Artificial sequence
  SiRNA target sequence
aattatgtaaatgacaaatgt

SEQ ID NO: 39495 - DNA, 21 bp, Artificial sequence
  SiRNA target sequence
attatgtaaatgacaaatgtt

SEQ ID NO: 39496 - DNA, 21 bp, Artificial sequence
  SiRNA target sequence
ttatgtaaatgacaaatgttc

SEQ ID NO: 39497 - DNA, 21 bp, Artificial sequence
  SiRNA target sequence
tatgtaaatgacaaatgttcg

SEQ ID NO: 39498 - DNA, 21 bp, Artificial sequence
  SiRNA target sequence
atgtaaatgacaaatgttcga

SEQ ID NO: 39499 - DNA, 21 bp, Artificial sequence
  SiRNA target sequence
tgtaaatgacaaatgttcgaa

SEQ ID NO: 39500 - DNA, 21 bp, Artificial sequence
  SiRNA target sequence
gtaaatgacaaatgttcgaat

SEQ ID NO: 39501 - DNA, 21 bp, Artificial sequence
  SiRNA target sequence
taaatgacaaatgttcgaata

SEQ ID NO: 39502 - DNA, 21 bp, Artificial sequence
  SiRNA target sequence
aaatgacaaatgttcgaataa

SEQ ID NO: 39503 - DNA, 21 bp, Artificial sequence
  SiRNA target sequence
aatgacaaatgttcgaataaa

SEQ ID NO: 39504 - DNA, 21 bp, Artificial sequence
  SiRNA target sequence
atgacaaatgttcgaataaag

SEQ ID NO: 39505 - DNA, 21 bp, Artificial sequence
  SiRNA target sequence
tgacaaatgttcgaataaagg

SEQ ID NO: 39506 - DNA, 21 bp, Artificial sequence
  SiRNA target sequence
gacaaatgttcgaataaaggg

SEQ ID NO: 39507 - DNA, 21 bp, Artificial sequence
  SiRNA target sequence
acaaatgttcgaataaagggc

SEQ ID NO: 39508 - DNA, 21 bp, Artificial sequence
  SiRNA target sequence
caaatgttcgaataaagggct

SEQ ID NO: 39509 - DNA, 21 bp, Artificial sequence
  SiRNA target sequence
aaatgttcgaataaagggctt

SEQ ID NO: 39510 - DNA, 21 bp, Artificial sequence
  SiRNA target sequence
aatgttcgaataaagggcttt

SEQ ID NO: 39511 - DNA, 21 bp, Artificial sequence
  SiRNA target sequence
atgttcgaataaagggctttg

SEQ ID NO: 39512 - DNA, 21 bp, Artificial sequence
  SiRNA target sequence
tgttcgaataaagggctttga

SEQ ID NO: 39513 - DNA, 21 bp, Artificial sequence
  SiRNA target sequence
gttcgaataaagggctttgaa

SEQ ID NO: 39514 - DNA, 21 bp, Artificial sequence
  SiRNA target sequence
ttcgaataaagggctttgaaa

SEQ ID NO: 39515 - DNA, 21 bp, Artificial sequence
  SiRNA target sequence
tcgaataaagggctttgaaat

SEQ ID NO: 39516 - DNA, 21 bp, Artificial sequence
  SiRNA target sequence
cgaataaagggctttgaaata

SEQ ID NO: 39517 - DNA, 21 bp, Artificial sequence
  SiRNA target sequence
gaataaagggctttgaaataa

SEQ ID NO: 39518 - DNA, 21 bp, Artificial sequence
  SiRNA target sequence
aataaagggctttgaaataac

SEQ ID NO: 39519 - DNA, 21 bp, Artificial sequence
  SiRNA target sequence
ataaagggctttgaaataaca

SEQ ID NO: 39520 - DNA, 21 bp, Artificial sequence
  SiRNA target sequence
taaagggctttgaaataacat

SEQ ID NO: 39521 - DNA, 21 bp, Artificial sequence
  SiRNA target sequence
aaagggctttgaaataacata

SEQ ID NO: 39522 - DNA, 21 bp, Artificial sequence
  SiRNA target sequence
aagggctttgaaataacatat

SEQ ID NO: 39523 - DNA, 21 bp, Artificial sequence
  SiRNA target sequence
agggctttgaaataacatatt

SEQ ID NO: 39524 - DNA, 21 bp, Artificial sequence
  SiRNA target sequence
gggctttgaaataacatattc

SEQ ID NO: 39525 - DNA, 21 bp, Artificial sequence
  SiRNA target sequence
ggctttgaaataacatattct

SEQ ID NO: 39526 - DNA, 21 bp, Artificial sequence
  SiRNA target sequence
gctttgaaataacatattcta

SEQ ID NO: 39527 - DNA, 21 bp, Artificial sequence
  SiRNA target sequence
ctttgaaataacatattctac

SEQ ID NO: 39528 - DNA, 21 bp, Artificial sequence
  SiRNA target sequence
tttgaaataacatattctaca

SEQ ID NO: 39529 - DNA, 21 bp, Artificial sequence
  SiRNA target sequence
ttgaaataacatattctacaa

SEQ ID NO: 39530 - DNA, 21 bp, Artificial sequence
  SiRNA target sequence
tgaaataacatattctacaat

SEQ ID NO: 39531 - DNA, 21 bp, Artificial sequence
  SiRNA target sequence
gaaataacatattctacaatc

SEQ ID NO: 39532 - DNA, 21 bp, Artificial sequence
  SiRNA target sequence
aaataacatattctacaatca

SEQ ID NO: 39533 - DNA, 21 bp, Artificial sequence
  SiRNA target sequence
aataacatattctacaatcag

SEQ ID NO: 39534 - DNA, 21 bp, Artificial sequence
  SiRNA target sequence
ataacatattctacaatcagg

SEQ ID NO: 39535 - DNA, 21 bp, Artificial sequence
  SiRNA target sequence
taacatattctacaatcaggt

SEQ ID NO: 39536 - DNA, 21 bp, Artificial sequence
  SiRNA target sequence
aacatattctacaatcaggtc

SEQ ID NO: 39537 - DNA, 21 bp, Artificial sequence
  SiRNA target sequence
acatattctacaatcaggtct

SEQ ID NO: 39538 - DNA, 21 bp, Artificial sequence
  SiRNA target sequence
catattctacaatcaggtctt

SEQ ID NO: 39539 - DNA, 21 bp, Artificial sequence
  SiRNA target sequence
atattctacaatcaggtcttt

SEQ ID NO: 39540 - DNA, 21 bp, Artificial sequence
  SiRNA target sequence
tattctacaatcaggtctttc

SEQ ID NO: 39541 - DNA, 21 bp, Artificial sequence
  SiRNA target sequence
attctacaatcaggtctttca

SEQ ID NO: 39542 - DNA, 21 bp, Artificial sequence
  SiRNA target sequence
ttctacaatcaggtctttcat

SEQ ID NO: 39543 - DNA, 21 bp, Artificial sequence
  SiRNA target sequence
tctacaatcaggtctttcata

SEQ ID NO: 39544 - DNA, 21 bp, Artificial sequence
  SiRNA target sequence
ctacaatcaggtctttcataa

SEQ ID NO: 39545 - DNA, 21 bp, Artificial sequence
  SiRNA target sequence
tacaatcaggtctttcataat

SEQ ID NO: 39546 - DNA, 21 bp, Artificial sequence
  SiRNA target sequence
acaatcaggtctttcataata

SEQ ID NO: 39547 - DNA, 21 bp, Artificial sequence
  SiRNA target sequence
caatcaggtctttcataatac

SEQ ID NO: 39548 - DNA, 21 bp, Artificial sequence
  SiRNA target sequence
aatcaggtctttcataatact

SEQ ID NO: 39549 - DNA, 21 bp, Artificial sequence
  SiRNA target sequence
atcaggtctttcataatacta

SEQ ID NO: 39550 - DNA, 21 bp, Artificial sequence
  SiRNA target sequence
tcaggtctttcataatactaa

SEQ ID NO: 39551 - DNA, 21 bp, Artificial sequence
  SiRNA target sequence
caggtctttcataatactaat

SEQ ID NO: 39552 - DNA, 21 bp, Artificial sequence
  SiRNA target sequence
aggtctttcataatactaata

SEQ ID NO: 39553 - DNA, 21 bp, Artificial sequence
  SiRNA target sequence
ggtctttcataatactaatat

SEQ ID NO: 39554 - DNA, 21 bp, Artificial sequence
  SiRNA target sequence
gtctttcataatactaatatc

SEQ ID NO: 39555 - DNA, 21 bp, Artificial sequence
  SiRNA target sequence
tctttcataatactaatatca

SEQ ID NO: 39556 - DNA, 21 bp, Artificial sequence
  SiRNA target sequence
ctttcataatactaatatcac

SEQ ID NO: 39557 - DNA, 21 bp, Artificial sequence
  SiRNA target sequence
tttcataatactaatatcact

SEQ ID NO: 39558 - DNA, 21 bp, Artificial sequence
  SiRNA target sequence
ttcataatactaatatcacta

SEQ ID NO: 39559 - DNA, 21 bp, Artificial sequence
  SiRNA target sequence
tcataatactaatatcactac

SEQ ID NO: 39560 - DNA, 21 bp, Artificial sequence
  SiRNA target sequence
cataatactaatatcactacc

SEQ ID NO: 39561 - DNA, 21 bp, Artificial sequence
  SiRNA target sequence
ataatactaatatcactacca

SEQ ID NO: 39562 - DNA, 21 bp, Artificial sequence
  SiRNA target sequence
taatactaatatcactaccat

SEQ ID NO: 39563 - DNA, 21 bp, Artificial sequence
  SiRNA target sequence
aatactaatatcactaccata

SEQ ID NO: 39564 - DNA, 21 bp, Artificial sequence
  SiRNA target sequence
atactaatatcactaccataa

SEQ ID NO: 39565 - DNA, 21 bp, Artificial sequence
  SiRNA target sequence
tactaatatcactaccataaa

SEQ ID NO: 39566 - DNA, 21 bp, Artificial sequence
  SiRNA target sequence
actaatatcactaccataaat

SEQ ID NO: 39567 - DNA, 21 bp, Artificial sequence
  SiRNA target sequence
ctaatatcactaccataaata

SEQ ID NO: 39568 - DNA, 21 bp, Artificial sequence
  SiRNA target sequence
taatatcactaccataaatag

SEQ ID NO: 39569 - DNA, 21 bp, Artificial sequence
  SiRNA target sequence
aatatcactaccataaataga

SEQ ID NO: 39570 - DNA, 21 bp, Artificial sequence
  SiRNA target sequence
atatcactaccataaatagat

SEQ ID NO: 39571 - DNA, 21 bp, Artificial sequence
  SiRNA target sequence
tatcactaccataaatagatt

SEQ ID NO: 39572 - DNA, 21 bp, Artificial sequence
  SiRNA target sequence
atcactaccataaatagattt

SEQ ID NO: 39573 - DNA, 21 bp, Artificial sequence
  SiRNA target sequence
tcactaccataaatagatttt

SEQ ID NO: 39574 - DNA, 21 bp, Artificial sequence
  SiRNA target sequence
cactaccataaatagattttt

SEQ ID NO: 39575 - DNA, 21 bp, Artificial sequence
  SiRNA target sequence
actaccataaatagatttttt

SEQ ID NO: 39576 - DNA, 21 bp, Artificial sequence
  SiRNA target sequence
ctaccataaatagattttttt

SEQ ID NO: 39577 - DNA, 21 bp, Artificial sequence
  SiRNA target sequence
taccataaatagatttttttt

SEQ ID NO: 39578 - DNA, 21 bp, Artificial sequence
  SiRNA target sequence
accataaatagattttttttc

SEQ ID NO: 39579 - DNA, 21 bp, Artificial sequence
  SiRNA target sequence
ccataaatagattttttttct

SEQ ID NO: 39580 - DNA, 21 bp, Artificial sequence
  SiRNA target sequence
cataaatagattttttttcta

SEQ ID NO: 39581 - DNA, 21 bp, Artificial sequence
  SiRNA target sequence
ataaatagattttttttctaa

SEQ ID NO: 39582 - DNA, 21 bp, Artificial sequence
  SiRNA target sequence
taaatagattttttttctaac

SEQ ID NO: 39583 - DNA, 21 bp, Artificial sequence
  SiRNA target sequence
aaatagattttttttctaaca

SEQ ID NO: 39584 - DNA, 21 bp, Artificial sequence
  SiRNA target sequence
aatagattttttttctaacat

SEQ ID NO: 39585 - DNA, 22 bp, Artificial sequence
  SiRNA target sequence
ttataagtttaatgtagaaata

SEQ ID NO: 39586 - DNA, 22 bp, Artificial sequence
  SiRNA target sequence
tataagtttaatgtagaaataa

SEQ ID NO: 39587 - DNA, 22 bp, Artificial sequence
  SiRNA target sequence
ataagtttaatgtagaaataat

SEQ ID NO: 39588 - DNA, 22 bp, Artificial sequence
  SiRNA target sequence
taagtttaatgtagaaataata

SEQ ID NO: 39589 - DNA, 22 bp, Artificial sequence
  SiRNA target sequence
aagtttaatgtagaaataatat

SEQ ID NO: 39590 - DNA, 22 bp, Artificial sequence
  SiRNA target sequence
agtttaatgtagaaataatatt

SEQ ID NO: 39591 - DNA, 22 bp, Artificial sequence
  SiRNA target sequence
gtttaatgtagaaataatattt

SEQ ID NO: 39592 - DNA, 22 bp, Artificial sequence
  SiRNA target sequence
tttaatgtagaaataatatttt

SEQ ID NO: 39593 - DNA, 22 bp, Artificial sequence
  SiRNA target sequence
ttaatgtagaaataatattttc

SEQ ID NO: 39594 - DNA, 22 bp, Artificial sequence
  SiRNA target sequence
taatgtagaaataatattttct

SEQ ID NO: 39595 - DNA, 22 bp, Artificial sequence
  SiRNA target sequence
aatgtagaaataatattttctt

SEQ ID NO: 39596 - DNA, 22 bp, Artificial sequence
  SiRNA target sequence
atgtagaaataatattttcttc

SEQ ID NO: 39597 - DNA, 22 bp, Artificial sequence
  SiRNA target sequence
tgtagaaataatattttcttct

SEQ ID NO: 39598 - DNA, 22 bp, Artificial sequence
  SiRNA target sequence
gtagaaataatattttcttcta

SEQ ID NO: 39599 - DNA, 22 bp, Artificial sequence
  SiRNA target sequence
tagaaataatattttcttctat

SEQ ID NO: 39600 - DNA, 22 bp, Artificial sequence
  SiRNA target sequence
agaaataatattttcttctatc

SEQ ID NO: 39601 - DNA, 22 bp, Artificial sequence
  SiRNA target sequence
gaaataatattttcttctatct

SEQ ID NO: 39602 - DNA, 22 bp, Artificial sequence
  SiRNA target sequence
aaataatattttcttctatctt

SEQ ID NO: 39603 - DNA, 22 bp, Artificial sequence
  SiRNA target sequence
aataatattttcttctatctta

SEQ ID NO: 39604 - DNA, 22 bp, Artificial sequence
  SiRNA target sequence
ataatattttcttctatcttat

SEQ ID NO: 39605 - DNA, 22 bp, Artificial sequence
  SiRNA target sequence
taatattttcttctatcttatg

SEQ ID NO: 39606 - DNA, 22 bp, Artificial sequence
  SiRNA target sequence
aatattttcttctatcttatgt

SEQ ID NO: 39607 - DNA, 22 bp, Artificial sequence
  SiRNA target sequence
atattttcttctatcttatgta

SEQ ID NO: 39608 - DNA, 22 bp, Artificial sequence
  SiRNA target sequence
tattttcttctatcttatgtaa

SEQ ID NO: 39609 - DNA, 22 bp, Artificial sequence
  SiRNA target sequence
attttcttctatcttatgtaat

SEQ ID NO: 39610 - DNA, 22 bp, Artificial sequence
  SiRNA target sequence
ttttcttctatcttatgtaatg

SEQ ID NO: 39611 - DNA, 22 bp, Artificial sequence
  SiRNA target sequence
tttcttctatcttatgtaatga

SEQ ID NO: 39612 - DNA, 22 bp, Artificial sequence
  SiRNA target sequence
ttcttctatcttatgtaatgat

SEQ ID NO: 39613 - DNA, 22 bp, Artificial sequence
  SiRNA target sequence
tcttctatcttatgtaatgata

SEQ ID NO: 39614 - DNA, 22 bp, Artificial sequence
  SiRNA target sequence
cttctatcttatgtaatgatac

SEQ ID NO: 39615 - DNA, 22 bp, Artificial sequence
  SiRNA target sequence
ttctatcttatgtaatgataca

SEQ ID NO: 39616 - DNA, 22 bp, Artificial sequence
  SiRNA target sequence
tctatcttatgtaatgatacag

SEQ ID NO: 39617 - DNA, 22 bp, Artificial sequence
  SiRNA target sequence
ctatcttatgtaatgatacagt

SEQ ID NO: 39618 - DNA, 22 bp, Artificial sequence
  SiRNA target sequence
tatcttatgtaatgatacagtt

SEQ ID NO: 39619 - DNA, 22 bp, Artificial sequence
  SiRNA target sequence
atcttatgtaatgatacagttt

SEQ ID NO: 39620 - DNA, 22 bp, Artificial sequence
  SiRNA target sequence
tcttatgtaatgatacagtttt

SEQ ID NO: 39621 - DNA, 22 bp, Artificial sequence
  SiRNA target sequence
cttatgtaatgatacagttttg

SEQ ID NO: 39622 - DNA, 22 bp, Artificial sequence
  SiRNA target sequence
ttatgtaatgatacagttttgt

SEQ ID NO: 39623 - DNA, 22 bp, Artificial sequence
  SiRNA target sequence
tatgtaatgatacagttttgtt

SEQ ID NO: 39624 - DNA, 22 bp, Artificial sequence
  SiRNA target sequence
atgtaatgatacagttttgttt

SEQ ID NO: 39625 - DNA, 22 bp, Artificial sequence
  SiRNA target sequence
tgtaatgatacagttttgtttt

SEQ ID NO: 39626 - DNA, 22 bp, Artificial sequence
  SiRNA target sequence
gtaatgatacagttttgttttt

SEQ ID NO: 39627 - DNA, 22 bp, Artificial sequence
  SiRNA target sequence
taatgatacagttttgttttta

SEQ ID NO: 39628 - DNA, 22 bp, Artificial sequence
  SiRNA target sequence
aatgatacagttttgtttttaa

SEQ ID NO: 39629 - DNA, 22 bp, Artificial sequence
  SiRNA target sequence
atgatacagttttgtttttaat

SEQ ID NO: 39630 - DNA, 22 bp, Artificial sequence
  SiRNA target sequence
tgatacagttttgtttttaata

SEQ ID NO: 39631 - DNA, 22 bp, Artificial sequence
  SiRNA target sequence
gatacagttttgtttttaatac

SEQ ID NO: 39632 - DNA, 22 bp, Artificial sequence
  SiRNA target sequence
atacagttttgtttttaatact

SEQ ID NO: 39633 - DNA, 22 bp, Artificial sequence
  SiRNA target sequence
tacagttttgtttttaatactt

SEQ ID NO: 39634 - DNA, 22 bp, Artificial sequence
  SiRNA target sequence
acagttttgtttttaatactta

SEQ ID NO: 39635 - DNA, 22 bp, Artificial sequence
  SiRNA target sequence
cagttttgtttttaatacttag

SEQ ID NO: 39636 - DNA, 22 bp, Artificial sequence
  SiRNA target sequence
agttttgtttttaatacttagc

SEQ ID NO: 39637 - DNA, 22 bp, Artificial sequence
  SiRNA target sequence
gttttgtttttaatacttagca

SEQ ID NO: 39638 - DNA, 22 bp, Artificial sequence
  SiRNA target sequence
ttttgtttttaatacttagcac

SEQ ID NO: 39639 - DNA, 22 bp, Artificial sequence
  SiRNA target sequence
tttgtttttaatacttagcact

SEQ ID NO: 39640 - DNA, 22 bp, Artificial sequence
  SiRNA target sequence
ttgtttttaatacttagcactt

SEQ ID NO: 39641 - DNA, 22 bp, Artificial sequence
  SiRNA target sequence
tgtttttaatacttagcacttt

SEQ ID NO: 39642 - DNA, 22 bp, Artificial sequence
  SiRNA target sequence
gtttttaatacttagcacttta

SEQ ID NO: 39643 - DNA, 22 bp, Artificial sequence
  SiRNA target sequence
tttttaatacttagcactttat

SEQ ID NO: 39644 - DNA, 22 bp, Artificial sequence
  SiRNA target sequence
ttttaatacttagcactttatc

SEQ ID NO: 39645 - DNA, 22 bp, Artificial sequence
  SiRNA target sequence
tttaatacttagcactttatca

SEQ ID NO: 39646 - DNA, 22 bp, Artificial sequence
  SiRNA target sequence
ttaatacttagcactttatcaa

SEQ ID NO: 39647 - DNA, 22 bp, Artificial sequence
  SiRNA target sequence
taatacttagcactttatcaaa

SEQ ID NO: 39648 - DNA, 22 bp, Artificial sequence
  SiRNA target sequence
aatacttagcactttatcaaat

SEQ ID NO: 39649 - DNA, 22 bp, Artificial sequence
  SiRNA target sequence
atacttagcactttatcaaata

SEQ ID NO: 39650 - DNA, 22 bp, Artificial sequence
  SiRNA target sequence
tacttagcactttatcaaataa

SEQ ID NO: 39651 - DNA, 22 bp, Artificial sequence
  SiRNA target sequence
acttagcactttatcaaataag

SEQ ID NO: 39652 - DNA, 22 bp, Artificial sequence
  SiRNA target sequence
cttagcactttatcaaataagt

SEQ ID NO: 39653 - DNA, 22 bp, Artificial sequence
  SiRNA target sequence
ttagcactttatcaaataagtg

SEQ ID NO: 39654 - DNA, 22 bp, Artificial sequence
  SiRNA target sequence
tagcactttatcaaataagtgg

SEQ ID NO: 39655 - DNA, 22 bp, Artificial sequence
  SiRNA target sequence
agcactttatcaaataagtgga

SEQ ID NO: 39656 - DNA, 22 bp, Artificial sequence
  SiRNA target sequence
gcactttatcaaataagtggag

SEQ ID NO: 39657 - DNA, 22 bp, Artificial sequence
  SiRNA target sequence
cactttatcaaataagtggagt

SEQ ID NO: 39658 - DNA, 22 bp, Artificial sequence
  SiRNA target sequence
actttatcaaataagtggagta

SEQ ID NO: 39659 - DNA, 22 bp, Artificial sequence
  SiRNA target sequence
ctttatcaaataagtggagtaa

SEQ ID NO: 39660 - DNA, 22 bp, Artificial sequence
  SiRNA target sequence
tttatcaaataagtggagtaaa

SEQ ID NO: 39661 - DNA, 22 bp, Artificial sequence
  SiRNA target sequence
ttatcaaataagtggagtaaat

SEQ ID NO: 39662 - DNA, 22 bp, Artificial sequence
  SiRNA target sequence
tatcaaataagtggagtaaatc

SEQ ID NO: 39663 - DNA, 22 bp, Artificial sequence
  SiRNA target sequence
atcaaataagtggagtaaatct

SEQ ID NO: 39664 - DNA, 22 bp, Artificial sequence
  SiRNA target sequence
tcaaataagtggagtaaatcta

SEQ ID NO: 39665 - DNA, 22 bp, Artificial sequence
  SiRNA target sequence
caaataagtggagtaaatctaa

SEQ ID NO: 39666 - DNA, 22 bp, Artificial sequence
  SiRNA target sequence
aaataagtggagtaaatctaaa

SEQ ID NO: 39667 - DNA, 22 bp, Artificial sequence
  SiRNA target sequence
aataagtggagtaaatctaaat

SEQ ID NO: 39668 - DNA, 22 bp, Artificial sequence
  SiRNA target sequence
ataagtggagtaaatctaaatt

SEQ ID NO: 39669 - DNA, 22 bp, Artificial sequence
  SiRNA target sequence
taagtggagtaaatctaaatta

SEQ ID NO: 39670 - DNA, 22 bp, Artificial sequence
  SiRNA target sequence
aagtggagtaaatctaaattat

SEQ ID NO: 39671 - DNA, 22 bp, Artificial sequence
  SiRNA target sequence
agtggagtaaatctaaattatg

SEQ ID NO: 39672 - DNA, 22 bp, Artificial sequence
  SiRNA target sequence
gtggagtaaatctaaattatgt

SEQ ID NO: 39673 - DNA, 22 bp, Artificial sequence
  SiRNA target sequence
tggagtaaatctaaattatgta

SEQ ID NO: 39674 - DNA, 22 bp, Artificial sequence
  SiRNA target sequence
ggagtaaatctaaattatgtaa

SEQ ID NO: 39675 - DNA, 22 bp, Artificial sequence
  SiRNA target sequence
gagtaaatctaaattatgtaaa

SEQ ID NO: 39676 - DNA, 22 bp, Artificial sequence
  SiRNA target sequence
agtaaatctaaattatgtaaaa

SEQ ID NO: 39677 - DNA, 22 bp, Artificial sequence
  SiRNA target sequence
gtaaatctaaattatgtaaaac

SEQ ID NO: 39678 - DNA, 22 bp, Artificial sequence
  SiRNA target sequence
taaatctaaattatgtaaaaca

SEQ ID NO: 39679 - DNA, 22 bp, Artificial sequence
  SiRNA target sequence
aaatctaaattatgtaaaacaa

SEQ ID NO: 39680 - DNA, 22 bp, Artificial sequence
  SiRNA target sequence
aatctaaattatgtaaaacaat

SEQ ID NO: 39681 - DNA, 22 bp, Artificial sequence
  SiRNA target sequence
atctaaattatgtaaaacaata

SEQ ID NO: 39682 - DNA, 22 bp, Artificial sequence
  SiRNA target sequence
tctaaattatgtaaaacaataa

SEQ ID NO: 39683 - DNA, 22 bp, Artificial sequence
  SiRNA target sequence
ctaaattatgtaaaacaataat

SEQ ID NO: 39684 - DNA, 22 bp, Artificial sequence
  SiRNA target sequence
taaattatgtaaaacaataatt

SEQ ID NO: 39685 - DNA, 22 bp, Artificial sequence
  SiRNA target sequence
aaattatgtaaaacaataatta

SEQ ID NO: 39686 - DNA, 22 bp, Artificial sequence
  SiRNA target sequence
aattatgtaaaacaataattat

SEQ ID NO: 39687 - DNA, 22 bp, Artificial sequence
  SiRNA target sequence
attatgtaaaacaataattatc

SEQ ID NO: 39688 - DNA, 22 bp, Artificial sequence
  SiRNA target sequence
ttatgtaaaacaataattatcg

SEQ ID NO: 39689 - DNA, 22 bp, Artificial sequence
  SiRNA target sequence
tatgtaaaacaataattatcgt

SEQ ID NO: 39690 - DNA, 22 bp, Artificial sequence
  SiRNA target sequence
atgtaaaacaataattatcgtc

SEQ ID NO: 39691 - DNA, 22 bp, Artificial sequence
  SiRNA target sequence
tgtaaaacaataattatcgtct

SEQ ID NO: 39692 - DNA, 22 bp, Artificial sequence
  SiRNA target sequence
gtaaaacaataattatcgtctt

SEQ ID NO: 39693 - DNA, 22 bp, Artificial sequence
  SiRNA target sequence
taaaacaataattatcgtcttc

SEQ ID NO: 39694 - DNA, 22 bp, Artificial sequence
  SiRNA target sequence
aaaacaataattatcgtcttct

SEQ ID NO: 39695 - DNA, 22 bp, Artificial sequence
  SiRNA target sequence
aaacaataattatcgtcttctc

SEQ ID NO: 39696 - DNA, 22 bp, Artificial sequence
  SiRNA target sequence
aacaataattatcgtcttctct

SEQ ID NO: 39697 - DNA, 22 bp, Artificial sequence
  SiRNA target sequence
acaataattatcgtcttctcta

SEQ ID NO: 39698 - DNA, 22 bp, Artificial sequence
  SiRNA target sequence
caataattatcgtcttctctaa

SEQ ID NO: 39699 - DNA, 22 bp, Artificial sequence
  SiRNA target sequence
aataattatcgtcttctctaag

SEQ ID NO: 39700 - DNA, 22 bp, Artificial sequence
  SiRNA target sequence
ataattatcgtcttctctaagt

SEQ ID NO: 39701 - DNA, 22 bp, Artificial sequence
  SiRNA target sequence
taattatcgtcttctctaagtt

SEQ ID NO: 39702 - DNA, 22 bp, Artificial sequence
  SiRNA target sequence
aattatcgtcttctctaagttg

SEQ ID NO: 39703 - DNA, 22 bp, Artificial sequence
  SiRNA target sequence
attatcgtcttctctaagttgt

SEQ ID NO: 39704 - DNA, 22 bp, Artificial sequence
  SiRNA target sequence
ttatcgtcttctctaagttgtt

SEQ ID NO: 39705 - DNA, 22 bp, Artificial sequence
  SiRNA target sequence
tatcgtcttctctaagttgttg

SEQ ID NO: 39706 - DNA, 22 bp, Artificial sequence
  SiRNA target sequence
atcgtcttctctaagttgttgg

SEQ ID NO: 39707 - DNA, 22 bp, Artificial sequence
  SiRNA target sequence
tcgtcttctctaagttgttgga

SEQ ID NO: 39708 - DNA, 22 bp, Artificial sequence
  SiRNA target sequence
cgtcttctctaagttgttggag

SEQ ID NO: 39709 - DNA, 22 bp, Artificial sequence
  SiRNA target sequence
gtcttctctaagttgttggaga

SEQ ID NO: 39710 - DNA, 22 bp, Artificial sequence
  SiRNA target sequence
tcttctctaagttgttggagat

SEQ ID NO: 39711 - DNA, 22 bp, Artificial sequence
  SiRNA target sequence
cttctctaagttgttggagatt

SEQ ID NO: 39712 - DNA, 22 bp, Artificial sequence
  SiRNA target sequence
ttctctaagttgttggagatta

SEQ ID NO: 39713 - DNA, 22 bp, Artificial sequence
  SiRNA target sequence
tctctaagttgttggagattag

SEQ ID NO: 39714 - DNA, 22 bp, Artificial sequence
  SiRNA target sequence
ctctaagttgttggagattaga

SEQ ID NO: 39715 - DNA, 22 bp, Artificial sequence
  SiRNA target sequence
tctaagttgttggagattagac

SEQ ID NO: 39716 - DNA, 22 bp, Artificial sequence
  SiRNA target sequence
ctaagttgttggagattagact

SEQ ID NO: 39717 - DNA, 22 bp, Artificial sequence
  SiRNA target sequence
taagttgttggagattagactt

SEQ ID NO: 39718 - DNA, 22 bp, Artificial sequence
  SiRNA target sequence
aagttgttggagattagacttt

SEQ ID NO: 39719 - DNA, 22 bp, Artificial sequence
  SiRNA target sequence
agttgttggagattagactttt

SEQ ID NO: 39720 - DNA, 22 bp, Artificial sequence
  SiRNA target sequence
gttgttggagattagactttta

SEQ ID NO: 39721 - DNA, 22 bp, Artificial sequence
  SiRNA target sequence
ttgttggagattagacttttaa

SEQ ID NO: 39722 - DNA, 22 bp, Artificial sequence
  SiRNA target sequence
tgttggagattagacttttaag

SEQ ID NO: 39723 - DNA, 22 bp, Artificial sequence
  SiRNA target sequence
gttggagattagacttttaaga

SEQ ID NO: 39724 - DNA, 22 bp, Artificial sequence
  SiRNA target sequence
ttggagattagacttttaagaa

SEQ ID NO: 39725 - DNA, 22 bp, Artificial sequence
  SiRNA target sequence
tggagattagacttttaagaat

SEQ ID NO: 39726 - DNA, 22 bp, Artificial sequence
  SiRNA target sequence
ggagattagacttttaagaatt

SEQ ID NO: 39727 - DNA, 22 bp, Artificial sequence
  SiRNA target sequence
gagattagacttttaagaattt

SEQ ID NO: 39728 - DNA, 22 bp, Artificial sequence
  SiRNA target sequence
agattagacttttaagaatttc

SEQ ID NO: 39729 - DNA, 22 bp, Artificial sequence
  SiRNA target sequence
gattagacttttaagaatttca

SEQ ID NO: 39730 - DNA, 22 bp, Artificial sequence
  SiRNA target sequence
attagacttttaagaatttcat

SEQ ID NO: 39731 - DNA, 22 bp, Artificial sequence
  SiRNA target sequence
ttagacttttaagaatttcata

SEQ ID NO: 39732 - DNA, 22 bp, Artificial sequence
  SiRNA target sequence
tagacttttaagaatttcatat

SEQ ID NO: 39733 - DNA, 22 bp, Artificial sequence
  SiRNA target sequence
agacttttaagaatttcatatt

SEQ ID NO: 39734 - DNA, 22 bp, Artificial sequence
  SiRNA target sequence
gacttttaagaatttcatattc

SEQ ID NO: 39735 - DNA, 22 bp, Artificial sequence
  SiRNA target sequence
acttttaagaatttcatattca

SEQ ID NO: 39736 - DNA, 22 bp, Artificial sequence
  SiRNA target sequence
cttttaagaatttcatattcag

SEQ ID NO: 39737 - DNA, 22 bp, Artificial sequence
  SiRNA target sequence
ttttaagaatttcatattcagc

SEQ ID NO: 39738 - DNA, 22 bp, Artificial sequence
  SiRNA target sequence
tttaagaatttcatattcagct

SEQ ID NO: 39739 - DNA, 22 bp, Artificial sequence
  SiRNA target sequence
ttaagaatttcatattcagctt

SEQ ID NO: 39740 - DNA, 22 bp, Artificial sequence
  SiRNA target sequence
taagaatttcatattcagcttt

SEQ ID NO: 39741 - DNA, 22 bp, Artificial sequence
  SiRNA target sequence
aagaatttcatattcagctttt

SEQ ID NO: 39742 - DNA, 22 bp, Artificial sequence
  SiRNA target sequence
agaatttcatattcagcttttt

SEQ ID NO: 39743 - DNA, 22 bp, Artificial sequence
  SiRNA target sequence
gaatttcatattcagctttttt

SEQ ID NO: 39744 - DNA, 22 bp, Artificial sequence
  SiRNA target sequence
aatttcatattcagcttttttg

SEQ ID NO: 39745 - DNA, 22 bp, Artificial sequence
  SiRNA target sequence
atttcatattcagcttttttgt

SEQ ID NO: 39746 - DNA, 22 bp, Artificial sequence
  SiRNA target sequence
tttcatattcagcttttttgtc

SEQ ID NO: 39747 - DNA, 22 bp, Artificial sequence
  SiRNA target sequence
ttcatattcagcttttttgtcc

SEQ ID NO: 39748 - DNA, 22 bp, Artificial sequence
  SiRNA target sequence
tcatattcagcttttttgtcca

SEQ ID NO: 39749 - DNA, 22 bp, Artificial sequence
  SiRNA target sequence
catattcagcttttttgtccaa

SEQ ID NO: 39750 - DNA, 22 bp, Artificial sequence
  SiRNA target sequence
atattcagcttttttgtccaat

SEQ ID NO: 39751 - DNA, 22 bp, Artificial sequence
  SiRNA target sequence
tattcagcttttttgtccaatg

SEQ ID NO: 39752 - DNA, 22 bp, Artificial sequence
  SiRNA target sequence
attcagcttttttgtccaatgc

SEQ ID NO: 39753 - DNA, 22 bp, Artificial sequence
  SiRNA target sequence
ttcagcttttttgtccaatgcg

SEQ ID NO: 39754 - DNA, 22 bp, Artificial sequence
  SiRNA target sequence
tcagcttttttgtccaatgcgg

SEQ ID NO: 39755 - DNA, 22 bp, Artificial sequence
  SiRNA target sequence
cagcttttttgtccaatgcggc

SEQ ID NO: 39756 - DNA, 22 bp, Artificial sequence
  SiRNA target sequence
agcttttttgtccaatgcggcc

SEQ ID NO: 39757 - DNA, 22 bp, Artificial sequence
  SiRNA target sequence
gcttttttgtccaatgcggccg

SEQ ID NO: 39758 - DNA, 22 bp, Artificial sequence
  SiRNA target sequence
cttttttgtccaatgcggccgt

SEQ ID NO: 39759 - DNA, 22 bp, Artificial sequence
  SiRNA target sequence
ttttttgtccaatgcggccgtt

SEQ ID NO: 39760 - DNA, 22 bp, Artificial sequence
  SiRNA target sequence
tttttgtccaatgcggccgttg

SEQ ID NO: 39761 - DNA, 22 bp, Artificial sequence
  SiRNA target sequence
ttttgtccaatgcggccgttgg

SEQ ID NO: 39762 - DNA, 22 bp, Artificial sequence
  SiRNA target sequence
tttgtccaatgcggccgttggc

SEQ ID NO: 39763 - DNA, 22 bp, Artificial sequence
  SiRNA target sequence
ttgtccaatgcggccgttggct

SEQ ID NO: 39764 - DNA, 22 bp, Artificial sequence
  SiRNA target sequence
tgtccaatgcggccgttggctc

SEQ ID NO: 39765 - DNA, 22 bp, Artificial sequence
  SiRNA target sequence
gtccaatgcggccgttggctca

SEQ ID NO: 39766 - DNA, 22 bp, Artificial sequence
  SiRNA target sequence
tccaatgcggccgttggctcat

SEQ ID NO: 39767 - DNA, 22 bp, Artificial sequence
  SiRNA target sequence
ccaatgcggccgttggctcatc

SEQ ID NO: 39768 - DNA, 22 bp, Artificial sequence
  SiRNA target sequence
caatgcggccgttggctcatct

SEQ ID NO: 39769 - DNA, 22 bp, Artificial sequence
  SiRNA target sequence
aatgcggccgttggctcatcta

SEQ ID NO: 39770 - DNA, 22 bp, Artificial sequence
  SiRNA target sequence
atgcggccgttggctcatctaa

SEQ ID NO: 39771 - DNA, 22 bp, Artificial sequence
  SiRNA target sequence
tgcggccgttggctcatctaaa

SEQ ID NO: 39772 - DNA, 22 bp, Artificial sequence
  SiRNA target sequence
gcggccgttggctcatctaaaa

SEQ ID NO: 39773 - DNA, 22 bp, Artificial sequence
  SiRNA target sequence
cggccgttggctcatctaaaat

SEQ ID NO: 39774 - DNA, 22 bp, Artificial sequence
  SiRNA target sequence
ggccgttggctcatctaaaatt

SEQ ID NO: 39775 - DNA, 22 bp, Artificial sequence
  SiRNA target sequence
gccgttggctcatctaaaatta

SEQ ID NO: 39776 - DNA, 22 bp, Artificial sequence
  SiRNA target sequence
ccgttggctcatctaaaattat

SEQ ID NO: 39777 - DNA, 22 bp, Artificial sequence
  SiRNA target sequence
cgttggctcatctaaaattata

SEQ ID NO: 39778 - DNA, 22 bp, Artificial sequence
  SiRNA target sequence
gttggctcatctaaaattataa

SEQ ID NO: 39779 - DNA, 22 bp, Artificial sequence
  SiRNA target sequence
ttggctcatctaaaattataat

SEQ ID NO: 39780 - DNA, 22 bp, Artificial sequence
  SiRNA target sequence
tggctcatctaaaattataata

SEQ ID NO: 39781 - DNA, 22 bp, Artificial sequence
  SiRNA target sequence
ggctcatctaaaattataatag

SEQ ID NO: 39782 - DNA, 22 bp, Artificial sequence
  SiRNA target sequence
gctcatctaaaattataatagg

SEQ ID NO: 39783 - DNA, 22 bp, Artificial sequence
  SiRNA target sequence
ctcatctaaaattataatagga

SEQ ID NO: 39784 - DNA, 22 bp, Artificial sequence
  SiRNA target sequence
tcatctaaaattataataggag

SEQ ID NO: 39785 - DNA, 22 bp, Artificial sequence
  SiRNA target sequence
catctaaaattataataggaga

SEQ ID NO: 39786 - DNA, 22 bp, Artificial sequence
  SiRNA target sequence
atctaaaattataataggagaa

SEQ ID NO: 39787 - DNA, 22 bp, Artificial sequence
  SiRNA target sequence
tctaaaattataataggagaat

SEQ ID NO: 39788 - DNA, 22 bp, Artificial sequence
  SiRNA target sequence
ctaaaattataataggagaatt

SEQ ID NO: 39789 - DNA, 22 bp, Artificial sequence
  SiRNA target sequence
taaaattataataggagaattt

SEQ ID NO: 39790 - DNA, 22 bp, Artificial sequence
  SiRNA target sequence
aaaattataataggagaatttt

SEQ ID NO: 39791 - DNA, 22 bp, Artificial sequence
  SiRNA target sequence
aaattataataggagaattttt

SEQ ID NO: 39792 - DNA, 22 bp, Artificial sequence
  SiRNA target sequence
aattataataggagaatttttt

SEQ ID NO: 39793 - DNA, 22 bp, Artificial sequence
  SiRNA target sequence
attataataggagaatttttta

SEQ ID NO: 39794 - DNA, 22 bp, Artificial sequence
  SiRNA target sequence
ttataataggagaattttttag

SEQ ID NO: 39795 - DNA, 22 bp, Artificial sequence
  SiRNA target sequence
tataataggagaattttttagt

SEQ ID NO: 39796 - DNA, 22 bp, Artificial sequence
  SiRNA target sequence
ataataggagaattttttagtg

SEQ ID NO: 39797 - DNA, 22 bp, Artificial sequence
  SiRNA target sequence
taataggagaattttttagtgc

SEQ ID NO: 39798 - DNA, 22 bp, Artificial sequence
  SiRNA target sequence
aataggagaattttttagtgcc

SEQ ID NO: 39799 - DNA, 22 bp, Artificial sequence
  SiRNA target sequence
ataggagaattttttagtgccg

SEQ ID NO: 39800 - DNA, 22 bp, Artificial sequence
  SiRNA target sequence
taggagaattttttagtgccga

SEQ ID NO: 39801 - DNA, 22 bp, Artificial sequence
  SiRNA target sequence
aggagaattttttagtgccgac

SEQ ID NO: 39802 - DNA, 22 bp, Artificial sequence
  SiRNA target sequence
ggagaattttttagtgccgacc

SEQ ID NO: 39803 - DNA, 22 bp, Artificial sequence
  SiRNA target sequence
gagaattttttagtgccgacct

SEQ ID NO: 39804 - DNA, 22 bp, Artificial sequence
  SiRNA target sequence
agaattttttagtgccgacctt

SEQ ID NO: 39805 - DNA, 22 bp, Artificial sequence
  SiRNA target sequence
gaattttttagtgccgacctta

SEQ ID NO: 39806 - DNA, 22 bp, Artificial sequence
  SiRNA target sequence
aattttttagtgccgaccttaa

SEQ ID NO: 39807 - DNA, 22 bp, Artificial sequence
  SiRNA target sequence
attttttagtgccgaccttaac

SEQ ID NO: 39808 - DNA, 22 bp, Artificial sequence
  SiRNA target sequence
ttttttagtgccgaccttaaca

SEQ ID NO: 39809 - DNA, 22 bp, Artificial sequence
  SiRNA target sequence
tttttagtgccgaccttaacaa

SEQ ID NO: 39810 - DNA, 22 bp, Artificial sequence
  SiRNA target sequence
ttttagtgccgaccttaacaaa

SEQ ID NO: 39811 - DNA, 22 bp, Artificial sequence
  SiRNA target sequence
tttagtgccgaccttaacaaaa

SEQ ID NO: 39812 - DNA, 22 bp, Artificial sequence
  SiRNA target sequence
ttagtgccgaccttaacaaaat

SEQ ID NO: 39813 - DNA, 22 bp, Artificial sequence
  SiRNA target sequence
tagtgccgaccttaacaaaatt

SEQ ID NO: 39814 - DNA, 22 bp, Artificial sequence
  SiRNA target sequence
agtgccgaccttaacaaaatta

SEQ ID NO: 39815 - DNA, 22 bp, Artificial sequence
  SiRNA target sequence
gtgccgaccttaacaaaattac

SEQ ID NO: 39816 - DNA, 22 bp, Artificial sequence
  SiRNA target sequence
tgccgaccttaacaaaattact

SEQ ID NO: 39817 - DNA, 22 bp, Artificial sequence
  SiRNA target sequence
gccgaccttaacaaaattactt

SEQ ID NO: 39818 - DNA, 22 bp, Artificial sequence
  SiRNA target sequence
ccgaccttaacaaaattacttt

SEQ ID NO: 39819 - DNA, 22 bp, Artificial sequence
  SiRNA target sequence
cgaccttaacaaaattactttt

SEQ ID NO: 39820 - DNA, 22 bp, Artificial sequence
  SiRNA target sequence
gaccttaacaaaattacttttt

SEQ ID NO: 39821 - DNA, 22 bp, Artificial sequence
  SiRNA target sequence
accttaacaaaattactttttg

SEQ ID NO: 39822 - DNA, 22 bp, Artificial sequence
  SiRNA target sequence
ccttaacaaaattactttttgt

SEQ ID NO: 39823 - DNA, 22 bp, Artificial sequence
  SiRNA target sequence
cttaacaaaattactttttgtc

SEQ ID NO: 39824 - DNA, 22 bp, Artificial sequence
  SiRNA target sequence
ttaacaaaattactttttgtct

SEQ ID NO: 39825 - DNA, 22 bp, Artificial sequence
  SiRNA target sequence
taacaaaattactttttgtctt

SEQ ID NO: 39826 - DNA, 22 bp, Artificial sequence
  SiRNA target sequence
aacaaaattactttttgtcttt

SEQ ID NO: 39827 - DNA, 22 bp, Artificial sequence
  SiRNA target sequence
acaaaattactttttgtctttc

SEQ ID NO: 39828 - DNA, 22 bp, Artificial sequence
  SiRNA target sequence
caaaattactttttgtctttct

SEQ ID NO: 39829 - DNA, 22 bp, Artificial sequence
  SiRNA target sequence
aaaattactttttgtctttctc

SEQ ID NO: 39830 - DNA, 22 bp, Artificial sequence
  SiRNA target sequence
aaattactttttgtctttctcc

SEQ ID NO: 39831 - DNA, 22 bp, Artificial sequence
  SiRNA target sequence
aattactttttgtctttctcca

SEQ ID NO: 39832 - DNA, 22 bp, Artificial sequence
  SiRNA target sequence
attactttttgtctttctccac

SEQ ID NO: 39833 - DNA, 22 bp, Artificial sequence
  SiRNA target sequence
ttactttttgtctttctccacc

SEQ ID NO: 39834 - DNA, 22 bp, Artificial sequence
  SiRNA target sequence
tactttttgtctttctccacca

SEQ ID NO: 39835 - DNA, 22 bp, Artificial sequence
  SiRNA target sequence
actttttgtctttctccaccac

SEQ ID NO: 39836 - DNA, 22 bp, Artificial sequence
  SiRNA target sequence
ctttttgtctttctccaccact

SEQ ID NO: 39837 - DNA, 22 bp, Artificial sequence
  SiRNA target sequence
tttttgtctttctccaccacta

SEQ ID NO: 39838 - DNA, 22 bp, Artificial sequence
  SiRNA target sequence
ttttgtctttctccaccactaa

SEQ ID NO: 39839 - DNA, 22 bp, Artificial sequence
  SiRNA target sequence
tttgtctttctccaccactaag

SEQ ID NO: 39840 - DNA, 22 bp, Artificial sequence
  SiRNA target sequence
ttgtctttctccaccactaagc

SEQ ID NO: 39841 - DNA, 22 bp, Artificial sequence
  SiRNA target sequence
tgtctttctccaccactaagct

SEQ ID NO: 39842 - DNA, 22 bp, Artificial sequence
  SiRNA target sequence
gtctttctccaccactaagctt

SEQ ID NO: 39843 - DNA, 22 bp, Artificial sequence
  SiRNA target sequence
tctttctccaccactaagctta

SEQ ID NO: 39844 - DNA, 22 bp, Artificial sequence
  SiRNA target sequence
ctttctccaccactaagcttat

SEQ ID NO: 39845 - DNA, 22 bp, Artificial sequence
  SiRNA target sequence
tttctccaccactaagcttatg

SEQ ID NO: 39846 - DNA, 22 bp, Artificial sequence
  SiRNA target sequence
ttctccaccactaagcttatgt

SEQ ID NO: 39847 - DNA, 22 bp, Artificial sequence
  SiRNA target sequence
tctccaccactaagcttatgtc

SEQ ID NO: 39848 - DNA, 22 bp, Artificial sequence
  SiRNA target sequence
ctccaccactaagcttatgtcc

SEQ ID NO: 39849 - DNA, 22 bp, Artificial sequence
  SiRNA target sequence
tccaccactaagcttatgtccc

SEQ ID NO: 39850 - DNA, 22 bp, Artificial sequence
  SiRNA target sequence
ccaccactaagcttatgtccct

SEQ ID NO: 39851 - DNA, 22 bp, Artificial sequence
  SiRNA target sequence
caccactaagcttatgtccctt

SEQ ID NO: 39852 - DNA, 22 bp, Artificial sequence
  SiRNA target sequence
accactaagcttatgtccctta

SEQ ID NO: 39853 - DNA, 22 bp, Artificial sequence
  SiRNA target sequence
ccactaagcttatgtcccttat

SEQ ID NO: 39854 - DNA, 22 bp, Artificial sequence
  SiRNA target sequence
cactaagcttatgtcccttatc

SEQ ID NO: 39855 - DNA, 22 bp, Artificial sequence
  SiRNA target sequence
actaagcttatgtcccttatct

SEQ ID NO: 39856 - DNA, 22 bp, Artificial sequence
  SiRNA target sequence
ctaagcttatgtcccttatctc

SEQ ID NO: 39857 - DNA, 22 bp, Artificial sequence
  SiRNA target sequence
taagcttatgtcccttatctcc

SEQ ID NO: 39858 - DNA, 22 bp, Artificial sequence
  SiRNA target sequence
aagcttatgtcccttatctcca

SEQ ID NO: 39859 - DNA, 22 bp, Artificial sequence
  SiRNA target sequence
agcttatgtcccttatctccaa

SEQ ID NO: 39860 - DNA, 22 bp, Artificial sequence
  SiRNA target sequence
gcttatgtcccttatctccaac

SEQ ID NO: 39861 - DNA, 22 bp, Artificial sequence
  SiRNA target sequence
cttatgtcccttatctccaaca

SEQ ID NO: 39862 - DNA, 22 bp, Artificial sequence
  SiRNA target sequence
ttatgtcccttatctccaacat

SEQ ID NO: 39863 - DNA, 22 bp, Artificial sequence
  SiRNA target sequence
tatgtcccttatctccaacatg

SEQ ID NO: 39864 - DNA, 22 bp, Artificial sequence
  SiRNA target sequence
atgtcccttatctccaacatgt

SEQ ID NO: 39865 - DNA, 22 bp, Artificial sequence
  SiRNA target sequence
tgtcccttatctccaacatgtg

SEQ ID NO: 39866 - DNA, 22 bp, Artificial sequence
  SiRNA target sequence
gtcccttatctccaacatgtgt

SEQ ID NO: 39867 - DNA, 22 bp, Artificial sequence
  SiRNA target sequence
tcccttatctccaacatgtgtg

SEQ ID NO: 39868 - DNA, 22 bp, Artificial sequence
  SiRNA target sequence
cccttatctccaacatgtgtgt

SEQ ID NO: 39869 - DNA, 22 bp, Artificial sequence
  SiRNA target sequence
ccttatctccaacatgtgtgtt

SEQ ID NO: 39870 - DNA, 22 bp, Artificial sequence
  SiRNA target sequence
cttatctccaacatgtgtgttg

SEQ ID NO: 39871 - DNA, 22 bp, Artificial sequence
  SiRNA target sequence
ttatctccaacatgtgtgttgt

SEQ ID NO: 39872 - DNA, 22 bp, Artificial sequence
  SiRNA target sequence
tatctccaacatgtgtgttgta

SEQ ID NO: 39873 - DNA, 22 bp, Artificial sequence
  SiRNA target sequence
atctccaacatgtgtgttgtat

SEQ ID NO: 39874 - DNA, 22 bp, Artificial sequence
  SiRNA target sequence
tctccaacatgtgtgttgtatt

SEQ ID NO: 39875 - DNA, 22 bp, Artificial sequence
  SiRNA target sequence
ctccaacatgtgtgttgtattc

SEQ ID NO: 39876 - DNA, 22 bp, Artificial sequence
  SiRNA target sequence
tccaacatgtgtgttgtattca

SEQ ID NO: 39877 - DNA, 22 bp, Artificial sequence
  SiRNA target sequence
ccaacatgtgtgttgtattcat

SEQ ID NO: 39878 - DNA, 22 bp, Artificial sequence
  SiRNA target sequence
caacatgtgtgttgtattcatc

SEQ ID NO: 39879 - DNA, 22 bp, Artificial sequence
  SiRNA target sequence
aacatgtgtgttgtattcatcc

SEQ ID NO: 39880 - DNA, 22 bp, Artificial sequence
  SiRNA target sequence
acatgtgtgttgtattcatcct

SEQ ID NO: 39881 - DNA, 22 bp, Artificial sequence
  SiRNA target sequence
catgtgtgttgtattcatcctc

SEQ ID NO: 39882 - DNA, 22 bp, Artificial sequence
  SiRNA target sequence
atgtgtgttgtattcatcctct

SEQ ID NO: 39883 - DNA, 22 bp, Artificial sequence
  SiRNA target sequence
tgtgtgttgtattcatcctcta

SEQ ID NO: 39884 - DNA, 22 bp, Artificial sequence
  SiRNA target sequence
gtgtgttgtattcatcctctag

SEQ ID NO: 39885 - DNA, 22 bp, Artificial sequence
  SiRNA target sequence
tgtgttgtattcatcctctagg

SEQ ID NO: 39886 - DNA, 22 bp, Artificial sequence
  SiRNA target sequence
gtgttgtattcatcctctaggt

SEQ ID NO: 39887 - DNA, 22 bp, Artificial sequence
  SiRNA target sequence
tgttgtattcatcctctaggtt

SEQ ID NO: 39888 - DNA, 22 bp, Artificial sequence
  SiRNA target sequence
gttgtattcatcctctaggttg

SEQ ID NO: 39889 - DNA, 22 bp, Artificial sequence
  SiRNA target sequence
ttgtattcatcctctaggttgt

SEQ ID NO: 39890 - DNA, 22 bp, Artificial sequence
  SiRNA target sequence
tgtattcatcctctaggttgtt

SEQ ID NO: 39891 - DNA, 22 bp, Artificial sequence
  SiRNA target sequence
gtattcatcctctaggttgttt

SEQ ID NO: 39892 - DNA, 22 bp, Artificial sequence
  SiRNA target sequence
tattcatcctctaggttgttta

SEQ ID NO: 39893 - DNA, 22 bp, Artificial sequence
  SiRNA target sequence
attcatcctctaggttgtttat

SEQ ID NO: 39894 - DNA, 22 bp, Artificial sequence
  SiRNA target sequence
ttcatcctctaggttgtttata

SEQ ID NO: 39895 - DNA, 22 bp, Artificial sequence
  SiRNA target sequence
tcatcctctaggttgtttatag

SEQ ID NO: 39896 - DNA, 22 bp, Artificial sequence
  SiRNA target sequence
catcctctaggttgtttataga

SEQ ID NO: 39897 - DNA, 22 bp, Artificial sequence
  SiRNA target sequence
atcctctaggttgtttatagaa

SEQ ID NO: 39898 - DNA, 22 bp, Artificial sequence
  SiRNA target sequence
tcctctaggttgtttatagaat

SEQ ID NO: 39899 - DNA, 22 bp, Artificial sequence
  SiRNA target sequence
cctctaggttgtttatagaatc

SEQ ID NO: 39900 - DNA, 22 bp, Artificial sequence
  SiRNA target sequence
ctctaggttgtttatagaatcg

SEQ ID NO: 39901 - DNA, 22 bp, Artificial sequence
  SiRNA target sequence
tctaggttgtttatagaatcgt

SEQ ID NO: 39902 - DNA, 22 bp, Artificial sequence
  SiRNA target sequence
ctaggttgtttatagaatcgtg

SEQ ID NO: 39903 - DNA, 22 bp, Artificial sequence
  SiRNA target sequence
taggttgtttatagaatcgtgt

SEQ ID NO: 39904 - DNA, 22 bp, Artificial sequence
  SiRNA target sequence
aggttgtttatagaatcgtgta

SEQ ID NO: 39905 - DNA, 22 bp, Artificial sequence
  SiRNA target sequence
ggttgtttatagaatcgtgtac

SEQ ID NO: 39906 - DNA, 22 bp, Artificial sequence
  SiRNA target sequence
gttgtttatagaatcgtgtaca

SEQ ID NO: 39907 - DNA, 22 bp, Artificial sequence
  SiRNA target sequence
ttgtttatagaatcgtgtacac

SEQ ID NO: 39908 - DNA, 22 bp, Artificial sequence
  SiRNA target sequence
tgtttatagaatcgtgtacaca

SEQ ID NO: 39909 - DNA, 22 bp, Artificial sequence
  SiRNA target sequence
gtttatagaatcgtgtacacaa

SEQ ID NO: 39910 - DNA, 22 bp, Artificial sequence
  SiRNA target sequence
tttatagaatcgtgtacacaaa

SEQ ID NO: 39911 - DNA, 22 bp, Artificial sequence
  SiRNA target sequence
ttatagaatcgtgtacacaaag

SEQ ID NO: 39912 - DNA, 22 bp, Artificial sequence
  SiRNA target sequence
tatagaatcgtgtacacaaagt

SEQ ID NO: 39913 - DNA, 22 bp, Artificial sequence
  SiRNA target sequence
atagaatcgtgtacacaaagtt

SEQ ID NO: 39914 - DNA, 22 bp, Artificial sequence
  SiRNA target sequence
tagaatcgtgtacacaaagttt

SEQ ID NO: 39915 - DNA, 22 bp, Artificial sequence
  SiRNA target sequence
agaatcgtgtacacaaagtttt

SEQ ID NO: 39916 - DNA, 22 bp, Artificial sequence
  SiRNA target sequence
gaatcgtgtacacaaagttttt

SEQ ID NO: 39917 - DNA, 22 bp, Artificial sequence
  SiRNA target sequence
aatcgtgtacacaaagtttttt

SEQ ID NO: 39918 - DNA, 22 bp, Artificial sequence
  SiRNA target sequence
atcgtgtacacaaagtttttta

SEQ ID NO: 39919 - DNA, 22 bp, Artificial sequence
  SiRNA target sequence
tcgtgtacacaaagttttttac

SEQ ID NO: 39920 - DNA, 22 bp, Artificial sequence
  SiRNA target sequence
cgtgtacacaaagttttttact

SEQ ID NO: 39921 - DNA, 22 bp, Artificial sequence
  SiRNA target sequence
gtgtacacaaagttttttactg

SEQ ID NO: 39922 - DNA, 22 bp, Artificial sequence
  SiRNA target sequence
tgtacacaaagttttttactga

SEQ ID NO: 39923 - DNA, 22 bp, Artificial sequence
  SiRNA target sequence
gtacacaaagttttttactgat

SEQ ID NO: 39924 - DNA, 22 bp, Artificial sequence
  SiRNA target sequence
tacacaaagttttttactgatt

SEQ ID NO: 39925 - DNA, 22 bp, Artificial sequence
  SiRNA target sequence
acacaaagttttttactgattt

SEQ ID NO: 39926 - DNA, 22 bp, Artificial sequence
  SiRNA target sequence
cacaaagttttttactgatttt

SEQ ID NO: 39927 - DNA, 22 bp, Artificial sequence
  SiRNA target sequence
acaaagttttttactgattttt

SEQ ID NO: 39928 - DNA, 22 bp, Artificial sequence
  SiRNA target sequence
caaagttttttactgattttta

SEQ ID NO: 39929 - DNA, 22 bp, Artificial sequence
  SiRNA target sequence
aaagttttttactgatttttat

SEQ ID NO: 39930 - DNA, 22 bp, Artificial sequence
  SiRNA target sequence
aagttttttactgatttttata

SEQ ID NO: 39931 - DNA, 22 bp, Artificial sequence
  SiRNA target sequence
agttttttactgatttttataa

SEQ ID NO: 39932 - DNA, 22 bp, Artificial sequence
  SiRNA target sequence
gttttttactgatttttataac

SEQ ID NO: 39933 - DNA, 22 bp, Artificial sequence
  SiRNA target sequence
ttttttactgatttttataact

SEQ ID NO: 39934 - DNA, 22 bp, Artificial sequence
  SiRNA target sequence
tttttactgatttttataactt

SEQ ID NO: 39935 - DNA, 22 bp, Artificial sequence
  SiRNA target sequence
ttttactgatttttataacttc

SEQ ID NO: 39936 - DNA, 22 bp, Artificial sequence
  SiRNA target sequence
tttactgatttttataacttct

SEQ ID NO: 39937 - DNA, 22 bp, Artificial sequence
  SiRNA target sequence
ttactgatttttataacttctt

SEQ ID NO: 39938 - DNA, 22 bp, Artificial sequence
  SiRNA target sequence
tactgatttttataacttcttc

SEQ ID NO: 39939 - DNA, 22 bp, Artificial sequence
  SiRNA target sequence
actgatttttataacttcttct

SEQ ID NO: 39940 - DNA, 22 bp, Artificial sequence
  SiRNA target sequence
ctgatttttataacttcttctt

SEQ ID NO: 39941 - DNA, 22 bp, Artificial sequence
  SiRNA target sequence
tgatttttataacttcttcttt

SEQ ID NO: 39942 - DNA, 22 bp, Artificial sequence
  SiRNA target sequence
gatttttataacttcttcttta

SEQ ID NO: 39943 - DNA, 22 bp, Artificial sequence
  SiRNA target sequence
atttttataacttcttctttat

SEQ ID NO: 39944 - DNA, 22 bp, Artificial sequence
  SiRNA target sequence
tttttataacttcttctttatc

SEQ ID NO: 39945 - DNA, 22 bp, Artificial sequence
  SiRNA target sequence
ttttataacttcttctttatca

SEQ ID NO: 39946 - DNA, 22 bp, Artificial sequence
  SiRNA target sequence
tttataacttcttctttatcaa

SEQ ID NO: 39947 - DNA, 22 bp, Artificial sequence
  SiRNA target sequence
ttataacttcttctttatcaaa

SEQ ID NO: 39948 - DNA, 22 bp, Artificial sequence
  SiRNA target sequence
tataacttcttctttatcaaat

SEQ ID NO: 39949 - DNA, 22 bp, Artificial sequence
  SiRNA target sequence
ataacttcttctttatcaaata

SEQ ID NO: 39950 - DNA, 22 bp, Artificial sequence
  SiRNA target sequence
taacttcttctttatcaaatat

SEQ ID NO: 39951 - DNA, 22 bp, Artificial sequence
  SiRNA target sequence
aacttcttctttatcaaatatt

SEQ ID NO: 39952 - DNA, 22 bp, Artificial sequence
  SiRNA target sequence
acttcttctttatcaaatattt

SEQ ID NO: 39953 - DNA, 22 bp, Artificial sequence
  SiRNA target sequence
cttcttctttatcaaatatttc

SEQ ID NO: 39954 - DNA, 22 bp, Artificial sequence
  SiRNA target sequence
ttcttctttatcaaatatttct

SEQ ID NO: 39955 - DNA, 22 bp, Artificial sequence
  SiRNA target sequence
tcttctttatcaaatatttctt

SEQ ID NO: 39956 - DNA, 22 bp, Artificial sequence
  SiRNA target sequence
cttctttatcaaatatttcttt

SEQ ID NO: 39957 - DNA, 22 bp, Artificial sequence
  SiRNA target sequence
ttctttatcaaatatttctttt

SEQ ID NO: 39958 - DNA, 22 bp, Artificial sequence
  SiRNA target sequence
tctttatcaaatatttcttttc

SEQ ID NO: 39959 - DNA, 22 bp, Artificial sequence
  SiRNA target sequence
ctttatcaaatatttcttttcc

SEQ ID NO: 39960 - DNA, 22 bp, Artificial sequence
  SiRNA target sequence
tttatcaaatatttcttttcca

SEQ ID NO: 39961 - DNA, 22 bp, Artificial sequence
  SiRNA target sequence
ttatcaaatatttcttttccat

SEQ ID NO: 39962 - DNA, 22 bp, Artificial sequence
  SiRNA target sequence
tatcaaatatttcttttccata

SEQ ID NO: 39963 - DNA, 22 bp, Artificial sequence
  SiRNA target sequence
atcaaatatttcttttccatat

SEQ ID NO: 39964 - DNA, 22 bp, Artificial sequence
  SiRNA target sequence
tcaaatatttcttttccatatg

SEQ ID NO: 39965 - DNA, 22 bp, Artificial sequence
  SiRNA target sequence
caaatatttcttttccatatgt

SEQ ID NO: 39966 - DNA, 22 bp, Artificial sequence
  SiRNA target sequence
aaatatttcttttccatatgtt

SEQ ID NO: 39967 - DNA, 22 bp, Artificial sequence
  SiRNA target sequence
aatatttcttttccatatgtta

SEQ ID NO: 39968 - DNA, 22 bp, Artificial sequence
  SiRNA target sequence
atatttcttttccatatgttaa

SEQ ID NO: 39969 - DNA, 22 bp, Artificial sequence
  SiRNA target sequence
tatttcttttccatatgttaaa

SEQ ID NO: 39970 - DNA, 22 bp, Artificial sequence
  SiRNA target sequence
atttcttttccatatgttaaat

SEQ ID NO: 39971 - DNA, 22 bp, Artificial sequence
  SiRNA target sequence
tttcttttccatatgttaaatt

SEQ ID NO: 39972 - DNA, 22 bp, Artificial sequence
  SiRNA target sequence
ttcttttccatatgttaaatta

SEQ ID NO: 39973 - DNA, 22 bp, Artificial sequence
  SiRNA target sequence
tcttttccatatgttaaattat

SEQ ID NO: 39974 - DNA, 22 bp, Artificial sequence
  SiRNA target sequence
cttttccatatgttaaattata

SEQ ID NO: 39975 - DNA, 22 bp, Artificial sequence
  SiRNA target sequence
ttttccatatgttaaattataa

SEQ ID NO: 39976 - DNA, 22 bp, Artificial sequence
  SiRNA target sequence
tttccatatgttaaattataat

SEQ ID NO: 39977 - DNA, 22 bp, Artificial sequence
  SiRNA target sequence
ttccatatgttaaattataata

SEQ ID NO: 39978 - DNA, 22 bp, Artificial sequence
  SiRNA target sequence
tccatatgttaaattataataa

SEQ ID NO: 39979 - DNA, 22 bp, Artificial sequence
  SiRNA target sequence
ccatatgttaaattataataaa

SEQ ID NO: 39980 - DNA, 22 bp, Artificial sequence
  SiRNA target sequence
catatgttaaattataataaac

SEQ ID NO: 39981 - DNA, 22 bp, Artificial sequence
  SiRNA target sequence
atatgttaaattataataaacc

SEQ ID NO: 39982 - DNA, 22 bp, Artificial sequence
  SiRNA target sequence
tatgttaaattataataaaccg

SEQ ID NO: 39983 - DNA, 22 bp, Artificial sequence
  SiRNA target sequence
atgttaaattataataaaccgt

SEQ ID NO: 39984 - DNA, 22 bp, Artificial sequence
  SiRNA target sequence
tgttaaattataataaaccgtt

SEQ ID NO: 39985 - DNA, 22 bp, Artificial sequence
  SiRNA target sequence
gttaaattataataaaccgttt

SEQ ID NO: 39986 - DNA, 22 bp, Artificial sequence
  SiRNA target sequence
ttaaattataataaaccgtttc

SEQ ID NO: 39987 - DNA, 22 bp, Artificial sequence
  SiRNA target sequence
taaattataataaaccgtttcg

SEQ ID NO: 39988 - DNA, 22 bp, Artificial sequence
  SiRNA target sequence
aaattataataaaccgtttcgt

SEQ ID NO: 39989 - DNA, 22 bp, Artificial sequence
  SiRNA target sequence
aattataataaaccgtttcgtt

SEQ ID NO: 39990 - DNA, 22 bp, Artificial sequence
  SiRNA target sequence
attataataaaccgtttcgtta

SEQ ID NO: 39991 - DNA, 22 bp, Artificial sequence
  SiRNA target sequence
ttataataaaccgtttcgttaa

SEQ ID NO: 39992 - DNA, 22 bp, Artificial sequence
  SiRNA target sequence
tataataaaccgtttcgttaaa

SEQ ID NO: 39993 - DNA, 22 bp, Artificial sequence
  SiRNA target sequence
ataataaaccgtttcgttaaac

SEQ ID NO: 39994 - DNA, 22 bp, Artificial sequence
  SiRNA target sequence
taataaaccgtttcgttaaaca

SEQ ID NO: 39995 - DNA, 22 bp, Artificial sequence
  SiRNA target sequence
aataaaccgtttcgttaaacaa

SEQ ID NO: 39996 - DNA, 22 bp, Artificial sequence
  SiRNA target sequence
ataaaccgtttcgttaaacaaa

SEQ ID NO: 39997 - DNA, 22 bp, Artificial sequence
  SiRNA target sequence
taaaccgtttcgttaaacaaaa

SEQ ID NO: 39998 - DNA, 22 bp, Artificial sequence
  SiRNA target sequence
aaaccgtttcgttaaacaaaaa

SEQ ID NO: 39999 - DNA, 22 bp, Artificial sequence
  SiRNA target sequence
aaccgtttcgttaaacaaaaat

SEQ ID NO: 40000 - DNA, 22 bp, Artificial sequence
  SiRNA target sequence
accgtttcgttaaacaaaaatg

SEQ ID NO: 40001 - DNA, 22 bp, Artificial sequence
  SiRNA target sequence
ccgtttcgttaaacaaaaatga

SEQ ID NO: 40002 - DNA, 22 bp, Artificial sequence
  SiRNA target sequence
cgtttcgttaaacaaaaatgag

SEQ ID NO: 40003 - DNA, 22 bp, Artificial sequence
  SiRNA target sequence
gtttcgttaaacaaaaatgagg

SEQ ID NO: 40004 - DNA, 22 bp, Artificial sequence
  SiRNA target sequence
tttcgttaaacaaaaatgaggt

SEQ ID NO: 40005 - DNA, 22 bp, Artificial sequence
  SiRNA target sequence
ttcgttaaacaaaaatgaggtt

SEQ ID NO: 40006 - DNA, 22 bp, Artificial sequence
  SiRNA target sequence
tcgttaaacaaaaatgaggttt

SEQ ID NO: 40007 - DNA, 22 bp, Artificial sequence
  SiRNA target sequence
cgttaaacaaaaatgaggtttg

SEQ ID NO: 40008 - DNA, 22 bp, Artificial sequence
  SiRNA target sequence
gttaaacaaaaatgaggtttgt

SEQ ID NO: 40009 - DNA, 22 bp, Artificial sequence
  SiRNA target sequence
ttaaacaaaaatgaggtttgtg

SEQ ID NO: 40010 - DNA, 22 bp, Artificial sequence
  SiRNA target sequence
taaacaaaaatgaggtttgtgg

SEQ ID NO: 40011 - DNA, 22 bp, Artificial sequence
  SiRNA target sequence
aaacaaaaatgaggtttgtggt

SEQ ID NO: 40012 - DNA, 22 bp, Artificial sequence
  SiRNA target sequence
aacaaaaatgaggtttgtggtg

SEQ ID NO: 40013 - DNA, 22 bp, Artificial sequence
  SiRNA target sequence
acaaaaatgaggtttgtggtgc

SEQ ID NO: 40014 - DNA, 22 bp, Artificial sequence
  SiRNA target sequence
caaaaatgaggtttgtggtgca

SEQ ID NO: 40015 - DNA, 22 bp, Artificial sequence
  SiRNA target sequence
aaaaatgaggtttgtggtgcaa

SEQ ID NO: 40016 - DNA, 22 bp, Artificial sequence
  SiRNA target sequence
aaaatgaggtttgtggtgcaaa

SEQ ID NO: 40017 - DNA, 22 bp, Artificial sequence
  SiRNA target sequence
aaatgaggtttgtggtgcaaat

SEQ ID NO: 40018 - DNA, 22 bp, Artificial sequence
  SiRNA target sequence
aatgaggtttgtggtgcaaatg

SEQ ID NO: 40019 - DNA, 22 bp, Artificial sequence
  SiRNA target sequence
atgaggtttgtggtgcaaatga

SEQ ID NO: 40020 - DNA, 22 bp, Artificial sequence
  SiRNA target sequence
tgaggtttgtggtgcaaatgat

SEQ ID NO: 40021 - DNA, 22 bp, Artificial sequence
  SiRNA target sequence
gaggtttgtggtgcaaatgata

SEQ ID NO: 40022 - DNA, 22 bp, Artificial sequence
  SiRNA target sequence
aggtttgtggtgcaaatgatat

SEQ ID NO: 40023 - DNA, 22 bp, Artificial sequence
  SiRNA target sequence
ggtttgtggtgcaaatgatata

SEQ ID NO: 40024 - DNA, 22 bp, Artificial sequence
  SiRNA target sequence
gtttgtggtgcaaatgatataa

SEQ ID NO: 40025 - DNA, 22 bp, Artificial sequence
  SiRNA target sequence
tttgtggtgcaaatgatataag

SEQ ID NO: 40026 - DNA, 22 bp, Artificial sequence
  SiRNA target sequence
ttgtggtgcaaatgatataagt

SEQ ID NO: 40027 - DNA, 22 bp, Artificial sequence
  SiRNA target sequence
tgtggtgcaaatgatataagtg

SEQ ID NO: 40028 - DNA, 22 bp, Artificial sequence
  SiRNA target sequence
gtggtgcaaatgatataagtga

SEQ ID NO: 40029 - DNA, 22 bp, Artificial sequence
  SiRNA target sequence
tggtgcaaatgatataagtgat

SEQ ID NO: 40030 - DNA, 22 bp, Artificial sequence
  SiRNA target sequence
ggtgcaaatgatataagtgatc

SEQ ID NO: 40031 - DNA, 22 bp, Artificial sequence
  SiRNA target sequence
gtgcaaatgatataagtgatct

SEQ ID NO: 40032 - DNA, 22 bp, Artificial sequence
  SiRNA target sequence
tgcaaatgatataagtgatcta

SEQ ID NO: 40033 - DNA, 22 bp, Artificial sequence
  SiRNA target sequence
gcaaatgatataagtgatctat

SEQ ID NO: 40034 - DNA, 22 bp, Artificial sequence
  SiRNA target sequence
caaatgatataagtgatctata

SEQ ID NO: 40035 - DNA, 22 bp, Artificial sequence
  SiRNA target sequence
aaatgatataagtgatctatat

SEQ ID NO: 40036 - DNA, 22 bp, Artificial sequence
  SiRNA target sequence
aatgatataagtgatctatatg

SEQ ID NO: 40037 - DNA, 22 bp, Artificial sequence
  SiRNA target sequence
atgatataagtgatctatatga

SEQ ID NO: 40038 - DNA, 22 bp, Artificial sequence
  SiRNA target sequence
tgatataagtgatctatatgaa

SEQ ID NO: 40039 - DNA, 22 bp, Artificial sequence
  SiRNA target sequence
gatataagtgatctatatgaac

SEQ ID NO: 40040 - DNA, 22 bp, Artificial sequence
  SiRNA target sequence
atataagtgatctatatgaact

SEQ ID NO: 40041 - DNA, 22 bp, Artificial sequence
  SiRNA target sequence
tataagtgatctatatgaacta

SEQ ID NO: 40042 - DNA, 22 bp, Artificial sequence
  SiRNA target sequence
ataagtgatctatatgaactat

SEQ ID NO: 40043 - DNA, 22 bp, Artificial sequence
  SiRNA target sequence
taagtgatctatatgaactatt

SEQ ID NO: 40044 - DNA, 22 bp, Artificial sequence
  SiRNA target sequence
aagtgatctatatgaactatta

SEQ ID NO: 40045 - DNA, 22 bp, Artificial sequence
  SiRNA target sequence
agtgatctatatgaactattag

SEQ ID NO: 40046 - DNA, 22 bp, Artificial sequence
  SiRNA target sequence
gtgatctatatgaactattaga

SEQ ID NO: 40047 - DNA, 22 bp, Artificial sequence
  SiRNA target sequence
tgatctatatgaactattagaa

SEQ ID NO: 40048 - DNA, 22 bp, Artificial sequence
  SiRNA target sequence
gatctatatgaactattagaaa

SEQ ID NO: 40049 - DNA, 22 bp, Artificial sequence
  SiRNA target sequence
atctatatgaactattagaaat

SEQ ID NO: 40050 - DNA, 22 bp, Artificial sequence
  SiRNA target sequence
tctatatgaactattagaaatt

SEQ ID NO: 40051 - DNA, 22 bp, Artificial sequence
  SiRNA target sequence
ctatatgaactattagaaattt

SEQ ID NO: 40052 - DNA, 22 bp, Artificial sequence
  SiRNA target sequence
tatatgaactattagaaatttc

SEQ ID NO: 40053 - DNA, 22 bp, Artificial sequence
  SiRNA target sequence
atatgaactattagaaatttct

SEQ ID NO: 40054 - DNA, 22 bp, Artificial sequence
  SiRNA target sequence
tatgaactattagaaatttctt

SEQ ID NO: 40055 - DNA, 22 bp, Artificial sequence
  SiRNA target sequence
atgaactattagaaatttcttt

SEQ ID NO: 40056 - DNA, 22 bp, Artificial sequence
  SiRNA target sequence
tgaactattagaaatttctttt

SEQ ID NO: 40057 - DNA, 22 bp, Artificial sequence
  SiRNA target sequence
gaactattagaaatttctttta

SEQ ID NO: 40058 - DNA, 22 bp, Artificial sequence
  SiRNA target sequence
aactattagaaatttcttttat

SEQ ID NO: 40059 - DNA, 22 bp, Artificial sequence
  SiRNA target sequence
actattagaaatttcttttata

SEQ ID NO: 40060 - DNA, 22 bp, Artificial sequence
  SiRNA target sequence
ctattagaaatttcttttatat

SEQ ID NO: 40061 - DNA, 22 bp, Artificial sequence
  SiRNA target sequence
tattagaaatttcttttatatc

SEQ ID NO: 40062 - DNA, 22 bp, Artificial sequence
  SiRNA target sequence
attagaaatttcttttatatct

SEQ ID NO: 40063 - DNA, 22 bp, Artificial sequence
  SiRNA target sequence
ttagaaatttcttttatatctc

SEQ ID NO: 40064 - DNA, 22 bp, Artificial sequence
  SiRNA target sequence
tagaaatttcttttatatctcg

SEQ ID NO: 40065 - DNA, 22 bp, Artificial sequence
  SiRNA target sequence
agaaatttcttttatatctcga

SEQ ID NO: 40066 - DNA, 22 bp, Artificial sequence
  SiRNA target sequence
gaaatttcttttatatctcgat

SEQ ID NO: 40067 - DNA, 22 bp, Artificial sequence
  SiRNA target sequence
aaatttcttttatatctcgatt

SEQ ID NO: 40068 - DNA, 22 bp, Artificial sequence
  SiRNA target sequence
aatttcttttatatctcgatta

SEQ ID NO: 40069 - DNA, 22 bp, Artificial sequence
  SiRNA target sequence
atttcttttatatctcgattat

SEQ ID NO: 40070 - DNA, 22 bp, Artificial sequence
  SiRNA target sequence
tttcttttatatctcgattatc

SEQ ID NO: 40071 - DNA, 22 bp, Artificial sequence
  SiRNA target sequence
ttcttttatatctcgattatct

SEQ ID NO: 40072 - DNA, 22 bp, Artificial sequence
  SiRNA target sequence
tcttttatatctcgattatcta

SEQ ID NO: 40073 - DNA, 22 bp, Artificial sequence
  SiRNA target sequence
cttttatatctcgattatctag

SEQ ID NO: 40074 - DNA, 22 bp, Artificial sequence
  SiRNA target sequence
ttttatatctcgattatctaga

SEQ ID NO: 40075 - DNA, 22 bp, Artificial sequence
  SiRNA target sequence
tttatatctcgattatctagat

SEQ ID NO: 40076 - DNA, 22 bp, Artificial sequence
  SiRNA target sequence
ttatatctcgattatctagata

SEQ ID NO: 40077 - DNA, 22 bp, Artificial sequence
  SiRNA target sequence
tatatctcgattatctagataa

SEQ ID NO: 40078 - DNA, 22 bp, Artificial sequence
  SiRNA target sequence
atatctcgattatctagataaa

SEQ ID NO: 40079 - DNA, 22 bp, Artificial sequence
  SiRNA target sequence
tatctcgattatctagataaat

SEQ ID NO: 40080 - DNA, 22 bp, Artificial sequence
  SiRNA target sequence
atctcgattatctagataaata

SEQ ID NO: 40081 - DNA, 22 bp, Artificial sequence
  SiRNA target sequence
tctcgattatctagataaatat

SEQ ID NO: 40082 - DNA, 22 bp, Artificial sequence
  SiRNA target sequence
ctcgattatctagataaatatt

SEQ ID NO: 40083 - DNA, 22 bp, Artificial sequence
  SiRNA target sequence
tcgattatctagataaatattt

SEQ ID NO: 40084 - DNA, 22 bp, Artificial sequence
  SiRNA target sequence
cgattatctagataaatatttc

SEQ ID NO: 40085 - DNA, 22 bp, Artificial sequence
  SiRNA target sequence
gattatctagataaatatttcc

SEQ ID NO: 40086 - DNA, 22 bp, Artificial sequence
  SiRNA target sequence
attatctagataaatatttccc

SEQ ID NO: 40087 - DNA, 22 bp, Artificial sequence
  SiRNA target sequence
ttatctagataaatatttcccc

SEQ ID NO: 40088 - DNA, 22 bp, Artificial sequence
  SiRNA target sequence
tatctagataaatatttccccc

SEQ ID NO: 40089 - DNA, 22 bp, Artificial sequence
  SiRNA target sequence
atctagataaatatttccccca

SEQ ID NO: 40090 - DNA, 22 bp, Artificial sequence
  SiRNA target sequence
tctagataaatatttcccccat

SEQ ID NO: 40091 - DNA, 22 bp, Artificial sequence
  SiRNA target sequence
ctagataaatatttcccccata

SEQ ID NO: 40092 - DNA, 22 bp, Artificial sequence
  SiRNA target sequence
tagataaatatttcccccataa

SEQ ID NO: 40093 - DNA, 22 bp, Artificial sequence
  SiRNA target sequence
agataaatatttcccccataat

SEQ ID NO: 40094 - DNA, 22 bp, Artificial sequence
  SiRNA target sequence
gataaatatttcccccataatt

SEQ ID NO: 40095 - DNA, 22 bp, Artificial sequence
  SiRNA target sequence
ataaatatttcccccataattt

SEQ ID NO: 40096 - DNA, 22 bp, Artificial sequence
  SiRNA target sequence
taaatatttcccccataatttt

SEQ ID NO: 40097 - DNA, 22 bp, Artificial sequence
  SiRNA target sequence
aaatatttcccccataattttc

SEQ ID NO: 40098 - DNA, 22 bp, Artificial sequence
  SiRNA target sequence
aatatttcccccataattttca

SEQ ID NO: 40099 - DNA, 22 bp, Artificial sequence
  SiRNA target sequence
atatttcccccataattttcaa

SEQ ID NO: 40100 - DNA, 22 bp, Artificial sequence
  SiRNA target sequence
tatttcccccataattttcaaa

SEQ ID NO: 40101 - DNA, 22 bp, Artificial sequence
  SiRNA target sequence
atttcccccataattttcaaat

SEQ ID NO: 40102 - DNA, 22 bp, Artificial sequence
  SiRNA target sequence
tttcccccataattttcaaatc

SEQ ID NO: 40103 - DNA, 22 bp, Artificial sequence
  SiRNA target sequence
ttcccccataattttcaaatct

SEQ ID NO: 40104 - DNA, 22 bp, Artificial sequence
  SiRNA target sequence
tcccccataattttcaaatctc

SEQ ID NO: 40105 - DNA, 22 bp, Artificial sequence
  SiRNA target sequence
cccccataattttcaaatctca

SEQ ID NO: 40106 - DNA, 22 bp, Artificial sequence
  SiRNA target sequence
ccccataattttcaaatctcat

SEQ ID NO: 40107 - DNA, 22 bp, Artificial sequence
  SiRNA target sequence
cccataattttcaaatctcata

SEQ ID NO: 40108 - DNA, 22 bp, Artificial sequence
  SiRNA target sequence
ccataattttcaaatctcataa

SEQ ID NO: 40109 - DNA, 22 bp, Artificial sequence
  SiRNA target sequence
cataattttcaaatctcataat

SEQ ID NO: 40110 - DNA, 22 bp, Artificial sequence
  SiRNA target sequence
ataattttcaaatctcataatc

SEQ ID NO: 40111 - DNA, 22 bp, Artificial sequence
  SiRNA target sequence
taattttcaaatctcataatca

SEQ ID NO: 40112 - DNA, 22 bp, Artificial sequence
  SiRNA target sequence
aattttcaaatctcataatcat

SEQ ID NO: 40113 - DNA, 22 bp, Artificial sequence
  SiRNA target sequence
attttcaaatctcataatcatc

SEQ ID NO: 40114 - DNA, 22 bp, Artificial sequence
  SiRNA target sequence
ttttcaaatctcataatcatct

SEQ ID NO: 40115 - DNA, 22 bp, Artificial sequence
  SiRNA target sequence
tttcaaatctcataatcatctt

SEQ ID NO: 40116 - DNA, 22 bp, Artificial sequence
  SiRNA target sequence
ttcaaatctcataatcatcttt

SEQ ID NO: 40117 - DNA, 22 bp, Artificial sequence
  SiRNA target sequence
tcaaatctcataatcatcttta

SEQ ID NO: 40118 - DNA, 22 bp, Artificial sequence
  SiRNA target sequence
caaatctcataatcatctttat

SEQ ID NO: 40119 - DNA, 22 bp, Artificial sequence
  SiRNA target sequence
aaatctcataatcatctttata

SEQ ID NO: 40120 - DNA, 22 bp, Artificial sequence
  SiRNA target sequence
aatctcataatcatctttataa

SEQ ID NO: 40121 - DNA, 22 bp, Artificial sequence
  SiRNA target sequence
atctcataatcatctttataag

SEQ ID NO: 40122 - DNA, 22 bp, Artificial sequence
  SiRNA target sequence
tctcataatcatctttataaga

SEQ ID NO: 40123 - DNA, 22 bp, Artificial sequence
  SiRNA target sequence
ctcataatcatctttataagag

SEQ ID NO: 40124 - DNA, 22 bp, Artificial sequence
  SiRNA target sequence
tcataatcatctttataagaga

SEQ ID NO: 40125 - DNA, 22 bp, Artificial sequence
  SiRNA target sequence
cataatcatctttataagagat

SEQ ID NO: 40126 - DNA, 22 bp, Artificial sequence
  SiRNA target sequence
ataatcatctttataagagatg

SEQ ID NO: 40127 - DNA, 22 bp, Artificial sequence
  SiRNA target sequence
taatcatctttataagagatgt

SEQ ID NO: 40128 - DNA, 22 bp, Artificial sequence
  SiRNA target sequence
aatcatctttataagagatgtt

SEQ ID NO: 40129 - DNA, 22 bp, Artificial sequence
  SiRNA target sequence
atcatctttataagagatgttt

SEQ ID NO: 40130 - DNA, 22 bp, Artificial sequence
  SiRNA target sequence
tcatctttataagagatgtttt

SEQ ID NO: 40131 - DNA, 22 bp, Artificial sequence
  SiRNA target sequence
catctttataagagatgttttt

SEQ ID NO: 40132 - DNA, 22 bp, Artificial sequence
  SiRNA target sequence
atctttataagagatgtttttc

SEQ ID NO: 40133 - DNA, 22 bp, Artificial sequence
  SiRNA target sequence
tctttataagagatgtttttcc

SEQ ID NO: 40134 - DNA, 22 bp, Artificial sequence
  SiRNA target sequence
ctttataagagatgtttttccc

SEQ ID NO: 40135 - DNA, 22 bp, Artificial sequence
  SiRNA target sequence
tttataagagatgtttttcccg

SEQ ID NO: 40136 - DNA, 22 bp, Artificial sequence
  SiRNA target sequence
ttataagagatgtttttcccga

SEQ ID NO: 40137 - DNA, 22 bp, Artificial sequence
  SiRNA target sequence
tataagagatgtttttcccgat

SEQ ID NO: 40138 - DNA, 22 bp, Artificial sequence
  SiRNA target sequence
ataagagatgtttttcccgatc

SEQ ID NO: 40139 - DNA, 22 bp, Artificial sequence
  SiRNA target sequence
taagagatgtttttcccgatcc

SEQ ID NO: 40140 - DNA, 22 bp, Artificial sequence
  SiRNA target sequence
aagagatgtttttcccgatcca

SEQ ID NO: 40141 - DNA, 22 bp, Artificial sequence
  SiRNA target sequence
agagatgtttttcccgatccat

SEQ ID NO: 40142 - DNA, 22 bp, Artificial sequence
  SiRNA target sequence
gagatgtttttcccgatccatt

SEQ ID NO: 40143 - DNA, 22 bp, Artificial sequence
  SiRNA target sequence
agatgtttttcccgatccattt

SEQ ID NO: 40144 - DNA, 22 bp, Artificial sequence
  SiRNA target sequence
gatgtttttcccgatccatttt

SEQ ID NO: 40145 - DNA, 22 bp, Artificial sequence
  SiRNA target sequence
atgtttttcccgatccattttt

SEQ ID NO: 40146 - DNA, 22 bp, Artificial sequence
  SiRNA target sequence
tgtttttcccgatccatttttt

SEQ ID NO: 40147 - DNA, 22 bp, Artificial sequence
  SiRNA target sequence
gtttttcccgatccattttttc

SEQ ID NO: 40148 - DNA, 22 bp, Artificial sequence
  SiRNA target sequence
tttttcccgatccattttttcc

SEQ ID NO: 40149 - DNA, 22 bp, Artificial sequence
  SiRNA target sequence
ttttcccgatccattttttcca

SEQ ID NO: 40150 - DNA, 22 bp, Artificial sequence
  SiRNA target sequence
tttcccgatccattttttccaa

SEQ ID NO: 40151 - DNA, 22 bp, Artificial sequence
  SiRNA target sequence
ttcccgatccattttttccaat

SEQ ID NO: 40152 - DNA, 22 bp, Artificial sequence
  SiRNA target sequence
tcccgatccattttttccaata

SEQ ID NO: 40153 - DNA, 22 bp, Artificial sequence
  SiRNA target sequence
cccgatccattttttccaataa

SEQ ID NO: 40154 - DNA, 22 bp, Artificial sequence
  SiRNA target sequence
ccgatccattttttccaataat

SEQ ID NO: 40155 - DNA, 22 bp, Artificial sequence
  SiRNA target sequence
cgatccattttttccaataata

SEQ ID NO: 40156 - DNA, 22 bp, Artificial sequence
  SiRNA target sequence
gatccattttttccaataatag

SEQ ID NO: 40157 - DNA, 22 bp, Artificial sequence
  SiRNA target sequence
atccattttttccaataatagc

SEQ ID NO: 40158 - DNA, 22 bp, Artificial sequence
  SiRNA target sequence
tccattttttccaataatagct

SEQ ID NO: 40159 - DNA, 22 bp, Artificial sequence
  SiRNA target sequence
ccattttttccaataatagcta

SEQ ID NO: 40160 - DNA, 22 bp, Artificial sequence
  SiRNA target sequence
cattttttccaataatagctac

SEQ ID NO: 40161 - DNA, 22 bp, Artificial sequence
  SiRNA target sequence
attttttccaataatagctact

SEQ ID NO: 40162 - DNA, 22 bp, Artificial sequence
  SiRNA target sequence
ttttttccaataatagctactt

SEQ ID NO: 40163 - DNA, 22 bp, Artificial sequence
  SiRNA target sequence
tttttccaataatagctacttt

SEQ ID NO: 40164 - DNA, 22 bp, Artificial sequence
  SiRNA target sequence
ttttccaataatagctactttt

SEQ ID NO: 40165 - DNA, 22 bp, Artificial sequence
  SiRNA target sequence
tttccaataatagctacttttt

SEQ ID NO: 40166 - DNA, 22 bp, Artificial sequence
  SiRNA target sequence
ttccaataatagctactttttc

SEQ ID NO: 40167 - DNA, 22 bp, Artificial sequence
  SiRNA target sequence
tccaataatagctactttttca

SEQ ID NO: 40168 - DNA, 22 bp, Artificial sequence
  SiRNA target sequence
ccaataatagctactttttcac

SEQ ID NO: 40169 - DNA, 22 bp, Artificial sequence
  SiRNA target sequence
caataatagctactttttcacc

SEQ ID NO: 40170 - DNA, 22 bp, Artificial sequence
  SiRNA target sequence
aataatagctactttttcacct

SEQ ID NO: 40171 - DNA, 22 bp, Artificial sequence
  SiRNA target sequence
ataatagctactttttcacctt

SEQ ID NO: 40172 - DNA, 22 bp, Artificial sequence
  SiRNA target sequence
taatagctactttttcaccttt

SEQ ID NO: 40173 - DNA, 22 bp, Artificial sequence
  SiRNA target sequence
aatagctactttttcacctttt

SEQ ID NO: 40174 - DNA, 22 bp, Artificial sequence
  SiRNA target sequence
atagctactttttcaccttttt

SEQ ID NO: 40175 - DNA, 22 bp, Artificial sequence
  SiRNA target sequence
tagctactttttcacctttttt

SEQ ID NO: 40176 - DNA, 22 bp, Artificial sequence
  SiRNA target sequence
agctactttttcacctttttta

SEQ ID NO: 40177 - DNA, 22 bp, Artificial sequence
  SiRNA target sequence
gctactttttcaccttttttaa

SEQ ID NO: 40178 - DNA, 22 bp, Artificial sequence
  SiRNA target sequence
ctactttttcaccttttttaat

SEQ ID NO: 40179 - DNA, 22 bp, Artificial sequence
  SiRNA target sequence
tactttttcaccttttttaatt

SEQ ID NO: 40180 - DNA, 22 bp, Artificial sequence
  SiRNA target sequence
actttttcaccttttttaatta

SEQ ID NO: 40181 - DNA, 22 bp, Artificial sequence
  SiRNA target sequence
ctttttcaccttttttaattaa

SEQ ID NO: 40182 - DNA, 22 bp, Artificial sequence
  SiRNA target sequence
tttttcaccttttttaattaaa

SEQ ID NO: 40183 - DNA, 22 bp, Artificial sequence
  SiRNA target sequence
ttttcaccttttttaattaaaa

SEQ ID NO: 40184 - DNA, 22 bp, Artificial sequence
  SiRNA target sequence
tttcaccttttttaattaaaat

SEQ ID NO: 40185 - DNA, 22 bp, Artificial sequence
  SiRNA target sequence
ttcaccttttttaattaaaata

SEQ ID NO: 40186 - DNA, 22 bp, Artificial sequence
  SiRNA target sequence
tcaccttttttaattaaaatat

SEQ ID NO: 40187 - DNA, 22 bp, Artificial sequence
  SiRNA target sequence
caccttttttaattaaaatatt

SEQ ID NO: 40188 - DNA, 22 bp, Artificial sequence
  SiRNA target sequence
accttttttaattaaaatattt

SEQ ID NO: 40189 - DNA, 22 bp, Artificial sequence
  SiRNA target sequence
ccttttttaattaaaatattta

SEQ ID NO: 40190 - DNA, 22 bp, Artificial sequence
  SiRNA target sequence
cttttttaattaaaatatttat

SEQ ID NO: 40191 - DNA, 22 bp, Artificial sequence
  SiRNA target sequence
ttttttaattaaaatatttatg

SEQ ID NO: 40192 - DNA, 22 bp, Artificial sequence
  SiRNA target sequence
tttttaattaaaatatttatgt

SEQ ID NO: 40193 - DNA, 22 bp, Artificial sequence
  SiRNA target sequence
ttttaattaaaatatttatgtc

SEQ ID NO: 40194 - DNA, 22 bp, Artificial sequence
  SiRNA target sequence
tttaattaaaatatttatgtcc

SEQ ID NO: 40195 - DNA, 22 bp, Artificial sequence
  SiRNA target sequence
ttaattaaaatatttatgtccg

SEQ ID NO: 40196 - DNA, 22 bp, Artificial sequence
  SiRNA target sequence
taattaaaatatttatgtccgt

SEQ ID NO: 40197 - DNA, 22 bp, Artificial sequence
  SiRNA target sequence
aattaaaatatttatgtccgtt

SEQ ID NO: 40198 - DNA, 22 bp, Artificial sequence
  SiRNA target sequence
attaaaatatttatgtccgtta

SEQ ID NO: 40199 - DNA, 22 bp, Artificial sequence
  SiRNA target sequence
ttaaaatatttatgtccgttaa

SEQ ID NO: 40200 - DNA, 22 bp, Artificial sequence
  SiRNA target sequence
taaaatatttatgtccgttaaa

SEQ ID NO: 40201 - DNA, 22 bp, Artificial sequence
  SiRNA target sequence
aaaatatttatgtccgttaaaa

SEQ ID NO: 40202 - DNA, 22 bp, Artificial sequence
  SiRNA target sequence
aaatatttatgtccgttaaaat

SEQ ID NO: 40203 - DNA, 22 bp, Artificial sequence
  SiRNA target sequence
aatatttatgtccgttaaaatt

SEQ ID NO: 40204 - DNA, 22 bp, Artificial sequence
  SiRNA target sequence
atatttatgtccgttaaaattt

SEQ ID NO: 40205 - DNA, 22 bp, Artificial sequence
  SiRNA target sequence
tatttatgtccgttaaaatttt

SEQ ID NO: 40206 - DNA, 22 bp, Artificial sequence
  SiRNA target sequence
atttatgtccgttaaaattttt

SEQ ID NO: 40207 - DNA, 22 bp, Artificial sequence
  SiRNA target sequence
tttatgtccgttaaaatttttt

SEQ ID NO: 40208 - DNA, 22 bp, Artificial sequence
  SiRNA target sequence
ttatgtccgttaaaattttttt

SEQ ID NO: 40209 - DNA, 22 bp, Artificial sequence
  SiRNA target sequence
tatgtccgttaaaatttttttg

SEQ ID NO: 40210 - DNA, 22 bp, Artificial sequence
  SiRNA target sequence
atgtccgttaaaatttttttgg

SEQ ID NO: 40211 - DNA, 22 bp, Artificial sequence
  SiRNA target sequence
tgtccgttaaaatttttttgga

SEQ ID NO: 40212 - DNA, 22 bp, Artificial sequence
  SiRNA target sequence
gtccgttaaaatttttttggag

SEQ ID NO: 40213 - DNA, 22 bp, Artificial sequence
  SiRNA target sequence
tccgttaaaatttttttggagt

SEQ ID NO: 40214 - DNA, 22 bp, Artificial sequence
  SiRNA target sequence
ccgttaaaatttttttggagta

SEQ ID NO: 40215 - DNA, 22 bp, Artificial sequence
  SiRNA target sequence
cgttaaaatttttttggagtaa

SEQ ID NO: 40216 - DNA, 22 bp, Artificial sequence
  SiRNA target sequence
gttaaaatttttttggagtaat

SEQ ID NO: 40217 - DNA, 22 bp, Artificial sequence
  SiRNA target sequence
ttaaaatttttttggagtaata

SEQ ID NO: 40218 - DNA, 22 bp, Artificial sequence
  SiRNA target sequence
taaaatttttttggagtaataa

SEQ ID NO: 40219 - DNA, 22 bp, Artificial sequence
  SiRNA target sequence
aaaatttttttggagtaataat

SEQ ID NO: 40220 - DNA, 22 bp, Artificial sequence
  SiRNA target sequence
aaatttttttggagtaataatt

SEQ ID NO: 40221 - DNA, 22 bp, Artificial sequence
  SiRNA target sequence
aatttttttggagtaataatta

SEQ ID NO: 40222 - DNA, 22 bp, Artificial sequence
  SiRNA target sequence
atttttttggagtaataattaa

SEQ ID NO: 40223 - DNA, 22 bp, Artificial sequence
  SiRNA target sequence
tttttttggagtaataattaaa

SEQ ID NO: 40224 - DNA, 22 bp, Artificial sequence
  SiRNA target sequence
ttttttggagtaataattaaat

SEQ ID NO: 40225 - DNA, 22 bp, Artificial sequence
  SiRNA target sequence
tttttggagtaataattaaatg

SEQ ID NO: 40226 - DNA, 22 bp, Artificial sequence
  SiRNA target sequence
ttttggagtaataattaaatga

SEQ ID NO: 40227 - DNA, 22 bp, Artificial sequence
  SiRNA target sequence
tttggagtaataattaaatgat

SEQ ID NO: 40228 - DNA, 22 bp, Artificial sequence
  SiRNA target sequence
ttggagtaataattaaatgatg

SEQ ID NO: 40229 - DNA, 22 bp, Artificial sequence
  SiRNA target sequence
tggagtaataattaaatgatgc

SEQ ID NO: 40230 - DNA, 22 bp, Artificial sequence
  SiRNA target sequence
ggagtaataattaaatgatgca

SEQ ID NO: 40231 - DNA, 22 bp, Artificial sequence
  SiRNA target sequence
gagtaataattaaatgatgcat

SEQ ID NO: 40232 - DNA, 22 bp, Artificial sequence
  SiRNA target sequence
agtaataattaaatgatgcatt

SEQ ID NO: 40233 - DNA, 22 bp, Artificial sequence
  SiRNA target sequence
gtaataattaaatgatgcattt

SEQ ID NO: 40234 - DNA, 22 bp, Artificial sequence
  SiRNA target sequence
taataattaaatgatgcatttt

SEQ ID NO: 40235 - DNA, 22 bp, Artificial sequence
  SiRNA target sequence
aataattaaatgatgcattttc

SEQ ID NO: 40236 - DNA, 22 bp, Artificial sequence
  SiRNA target sequence
ataattaaatgatgcattttct

SEQ ID NO: 40237 - DNA, 22 bp, Artificial sequence
  SiRNA target sequence
taattaaatgatgcattttcta

SEQ ID NO: 40238 - DNA, 22 bp, Artificial sequence
  SiRNA target sequence
aattaaatgatgcattttctaa

SEQ ID NO: 40239 - DNA, 22 bp, Artificial sequence
  SiRNA target sequence
attaaatgatgcattttctaat

SEQ ID NO: 40240 - DNA, 22 bp, Artificial sequence
  SiRNA target sequence
ttaaatgatgcattttctaatc

SEQ ID NO: 40241 - DNA, 22 bp, Artificial sequence
  SiRNA target sequence
taaatgatgcattttctaatct

SEQ ID NO: 40242 - DNA, 22 bp, Artificial sequence
  SiRNA target sequence
aaatgatgcattttctaatctt

SEQ ID NO: 40243 - DNA, 22 bp, Artificial sequence
  SiRNA target sequence
aatgatgcattttctaatctta

SEQ ID NO: 40244 - DNA, 22 bp, Artificial sequence
  SiRNA target sequence
atgatgcattttctaatcttat

SEQ ID NO: 40245 - DNA, 22 bp, Artificial sequence
  SiRNA target sequence
tgatgcattttctaatcttata

SEQ ID NO: 40246 - DNA, 22 bp, Artificial sequence
  SiRNA target sequence
gatgcattttctaatcttatat

SEQ ID NO: 40247 - DNA, 22 bp, Artificial sequence
  SiRNA target sequence
atgcattttctaatcttatatc

SEQ ID NO: 40248 - DNA, 22 bp, Artificial sequence
  SiRNA target sequence
tgcattttctaatcttatatca

SEQ ID NO: 40249 - DNA, 22 bp, Artificial sequence
  SiRNA target sequence
gcattttctaatcttatatcat

SEQ ID NO: 40250 - DNA, 22 bp, Artificial sequence
  SiRNA target sequence
cattttctaatcttatatcatt

SEQ ID NO: 40251 - DNA, 22 bp, Artificial sequence
  SiRNA target sequence
attttctaatcttatatcatta

SEQ ID NO: 40252 - DNA, 22 bp, Artificial sequence
  SiRNA target sequence
ttttctaatcttatatcattat

SEQ ID NO: 40253 - DNA, 22 bp, Artificial sequence
  SiRNA target sequence
tttctaatcttatatcattatt

SEQ ID NO: 40254 - DNA, 22 bp, Artificial sequence
  SiRNA target sequence
ttctaatcttatatcattatta

SEQ ID NO: 40255 - DNA, 22 bp, Artificial sequence
  SiRNA target sequence
tctaatcttatatcattattaa

SEQ ID NO: 40256 - DNA, 22 bp, Artificial sequence
  SiRNA target sequence
ctaatcttatatcattattaaa

SEQ ID NO: 40257 - DNA, 22 bp, Artificial sequence
  SiRNA target sequence
taatcttatatcattattaaat

SEQ ID NO: 40258 - DNA, 22 bp, Artificial sequence
  SiRNA target sequence
aatcttatatcattattaaatt

SEQ ID NO: 40259 - DNA, 22 bp, Artificial sequence
  SiRNA target sequence
atcttatatcattattaaattc

SEQ ID NO: 40260 - DNA, 22 bp, Artificial sequence
  SiRNA target sequence
tcttatatcattattaaattca

SEQ ID NO: 40261 - DNA, 22 bp, Artificial sequence
  SiRNA target sequence
cttatatcattattaaattcat

SEQ ID NO: 40262 - DNA, 22 bp, Artificial sequence
  SiRNA target sequence
ttatatcattattaaattcatt

SEQ ID NO: 40263 - DNA, 22 bp, Artificial sequence
  SiRNA target sequence
tatatcattattaaattcatta

SEQ ID NO: 40264 - DNA, 22 bp, Artificial sequence
  SiRNA target sequence
atatcattattaaattcattaa

SEQ ID NO: 40265 - DNA, 22 bp, Artificial sequence
  SiRNA target sequence
tatcattattaaattcattaac

SEQ ID NO: 40266 - DNA, 22 bp, Artificial sequence
  SiRNA target sequence
atcattattaaattcattaaca

SEQ ID NO: 40267 - DNA, 22 bp, Artificial sequence
  SiRNA target sequence
tcattattaaattcattaacat

SEQ ID NO: 40268 - DNA, 22 bp, Artificial sequence
  SiRNA target sequence
cattattaaattcattaacatc

SEQ ID NO: 40269 - DNA, 22 bp, Artificial sequence
  SiRNA target sequence
attattaaattcattaacatct

SEQ ID NO: 40270 - DNA, 22 bp, Artificial sequence
  SiRNA target sequence
ttattaaattcattaacatcta

SEQ ID NO: 40271 - DNA, 22 bp, Artificial sequence
  SiRNA target sequence
tattaaattcattaacatctac

SEQ ID NO: 40272 - DNA, 22 bp, Artificial sequence
  SiRNA target sequence
attaaattcattaacatctact

SEQ ID NO: 40273 - DNA, 22 bp, Artificial sequence
  SiRNA target sequence
ttaaattcattaacatctacta

SEQ ID NO: 40274 - DNA, 22 bp, Artificial sequence
  SiRNA target sequence
taaattcattaacatctactaa

SEQ ID NO: 40275 - DNA, 22 bp, Artificial sequence
  SiRNA target sequence
aaattcattaacatctactaaa

SEQ ID NO: 40276 - DNA, 22 bp, Artificial sequence
  SiRNA target sequence
aattcattaacatctactaaat

SEQ ID NO: 40277 - DNA, 22 bp, Artificial sequence
  SiRNA target sequence
attcattaacatctactaaatt

SEQ ID NO: 40278 - DNA, 22 bp, Artificial sequence
  SiRNA target sequence
ttcattaacatctactaaattt

SEQ ID NO: 40279 - DNA, 22 bp, Artificial sequence
  SiRNA target sequence
tcattaacatctactaaatttg

SEQ ID NO: 40280 - DNA, 22 bp, Artificial sequence
  SiRNA target sequence
cattaacatctactaaatttgg

SEQ ID NO: 40281 - DNA, 22 bp, Artificial sequence
  SiRNA target sequence
attaacatctactaaatttggt

SEQ ID NO: 40282 - DNA, 22 bp, Artificial sequence
  SiRNA target sequence
ttaacatctactaaatttggtt

SEQ ID NO: 40283 - DNA, 22 bp, Artificial sequence
  SiRNA target sequence
taacatctactaaatttggttc

SEQ ID NO: 40284 - DNA, 22 bp, Artificial sequence
  SiRNA target sequence
aacatctactaaatttggttct

SEQ ID NO: 40285 - DNA, 22 bp, Artificial sequence
  SiRNA target sequence
acatctactaaatttggttctt

SEQ ID NO: 40286 - DNA, 22 bp, Artificial sequence
  SiRNA target sequence
catctactaaatttggttcttc

SEQ ID NO: 40287 - DNA, 22 bp, Artificial sequence
  SiRNA target sequence
atctactaaatttggttcttct

SEQ ID NO: 40288 - DNA, 22 bp, Artificial sequence
  SiRNA target sequence
tctactaaatttggttcttctt

SEQ ID NO: 40289 - DNA, 22 bp, Artificial sequence
  SiRNA target sequence
ctactaaatttggttcttcttt

SEQ ID NO: 40290 - DNA, 22 bp, Artificial sequence
  SiRNA target sequence
tactaaatttggttcttctttt

SEQ ID NO: 40291 - DNA, 22 bp, Artificial sequence
  SiRNA target sequence
actaaatttggttcttctttta

SEQ ID NO: 40292 - DNA, 22 bp, Artificial sequence
  SiRNA target sequence
ctaaatttggttcttcttttat

SEQ ID NO: 40293 - DNA, 22 bp, Artificial sequence
  SiRNA target sequence
taaatttggttcttcttttata

SEQ ID NO: 40294 - DNA, 22 bp, Artificial sequence
  SiRNA target sequence
aaatttggttcttcttttataa

SEQ ID NO: 40295 - DNA, 22 bp, Artificial sequence
  SiRNA target sequence
aatttggttcttcttttataag

SEQ ID NO: 40296 - DNA, 22 bp, Artificial sequence
  SiRNA target sequence
atttggttcttcttttataagc

SEQ ID NO: 40297 - DNA, 22 bp, Artificial sequence
  SiRNA target sequence
tttggttcttcttttataagct

SEQ ID NO: 40298 - DNA, 22 bp, Artificial sequence
  SiRNA target sequence
ttggttcttcttttataagctc

SEQ ID NO: 40299 - DNA, 22 bp, Artificial sequence
  SiRNA target sequence
tggttcttcttttataagctct

SEQ ID NO: 40300 - DNA, 22 bp, Artificial sequence
  SiRNA target sequence
ggttcttcttttataagctctg

SEQ ID NO: 40301 - DNA, 22 bp, Artificial sequence
  SiRNA target sequence
gttcttcttttataagctctgg

SEQ ID NO: 40302 - DNA, 22 bp, Artificial sequence
  SiRNA target sequence
ttcttcttttataagctctggt

SEQ ID NO: 40303 - DNA, 22 bp, Artificial sequence
  SiRNA target sequence
tcttcttttataagctctggtt

SEQ ID NO: 40304 - DNA, 22 bp, Artificial sequence
  SiRNA target sequence
cttcttttataagctctggttt

SEQ ID NO: 40305 - DNA, 22 bp, Artificial sequence
  SiRNA target sequence
ttcttttataagctctggttta

SEQ ID NO: 40306 - DNA, 22 bp, Artificial sequence
  SiRNA target sequence
tcttttataagctctggtttaa

SEQ ID NO: 40307 - DNA, 22 bp, Artificial sequence
  SiRNA target sequence
cttttataagctctggtttaaa

SEQ ID NO: 40308 - DNA, 22 bp, Artificial sequence
  SiRNA target sequence
ttttataagctctggtttaaaa

SEQ ID NO: 40309 - DNA, 22 bp, Artificial sequence
  SiRNA target sequence
tttataagctctggtttaaaag

SEQ ID NO: 40310 - DNA, 22 bp, Artificial sequence
  SiRNA target sequence
ttataagctctggtttaaaaga

SEQ ID NO: 40311 - DNA, 22 bp, Artificial sequence
  SiRNA target sequence
tataagctctggtttaaaagat

SEQ ID NO: 40312 - DNA, 22 bp, Artificial sequence
  SiRNA target sequence
ataagctctggtttaaaagatg

SEQ ID NO: 40313 - DNA, 22 bp, Artificial sequence
  SiRNA target sequence
taagctctggtttaaaagatgt

SEQ ID NO: 40314 - DNA, 22 bp, Artificial sequence
  SiRNA target sequence
aagctctggtttaaaagatgtt

SEQ ID NO: 40315 - DNA, 22 bp, Artificial sequence
  SiRNA target sequence
agctctggtttaaaagatgttc

SEQ ID NO: 40316 - DNA, 22 bp, Artificial sequence
  SiRNA target sequence
gctctggtttaaaagatgttct

SEQ ID NO: 40317 - DNA, 22 bp, Artificial sequence
  SiRNA target sequence
ctctggtttaaaagatgttctt

SEQ ID NO: 40318 - DNA, 22 bp, Artificial sequence
  SiRNA target sequence
tctggtttaaaagatgttctta

SEQ ID NO: 40319 - DNA, 22 bp, Artificial sequence
  SiRNA target sequence
ctggtttaaaagatgttcttat

SEQ ID NO: 40320 - DNA, 22 bp, Artificial sequence
  SiRNA target sequence
tggtttaaaagatgttcttata

SEQ ID NO: 40321 - DNA, 22 bp, Artificial sequence
  SiRNA target sequence
ggtttaaaagatgttcttatat

SEQ ID NO: 40322 - DNA, 22 bp, Artificial sequence
  SiRNA target sequence
gtttaaaagatgttcttatatt

SEQ ID NO: 40323 - DNA, 22 bp, Artificial sequence
  SiRNA target sequence
tttaaaagatgttcttatattt

SEQ ID NO: 40324 - DNA, 22 bp, Artificial sequence
  SiRNA target sequence
ttaaaagatgttcttatattta

SEQ ID NO: 40325 - DNA, 22 bp, Artificial sequence
  SiRNA target sequence
taaaagatgttcttatatttaa

SEQ ID NO: 40326 - DNA, 22 bp, Artificial sequence
  SiRNA target sequence
aaaagatgttcttatatttaag

SEQ ID NO: 40327 - DNA, 22 bp, Artificial sequence
  SiRNA target sequence
aaagatgttcttatatttaaga

SEQ ID NO: 40328 - DNA, 22 bp, Artificial sequence
  SiRNA target sequence
aagatgttcttatatttaagat

SEQ ID NO: 40329 - DNA, 22 bp, Artificial sequence
  SiRNA target sequence
agatgttcttatatttaagatt

SEQ ID NO: 40330 - DNA, 22 bp, Artificial sequence
  SiRNA target sequence
gatgttcttatatttaagattg

SEQ ID NO: 40331 - DNA, 22 bp, Artificial sequence
  SiRNA target sequence
atgttcttatatttaagattgc

SEQ ID NO: 40332 - DNA, 22 bp, Artificial sequence
  SiRNA target sequence
tgttcttatatttaagattgct

SEQ ID NO: 40333 - DNA, 22 bp, Artificial sequence
  SiRNA target sequence
gttcttatatttaagattgctt

SEQ ID NO: 40334 - DNA, 22 bp, Artificial sequence
  SiRNA target sequence
ttcttatatttaagattgcttg

SEQ ID NO: 40335 - DNA, 22 bp, Artificial sequence
  SiRNA target sequence
tcttatatttaagattgcttgt

SEQ ID NO: 40336 - DNA, 22 bp, Artificial sequence
  SiRNA target sequence
cttatatttaagattgcttgtg

SEQ ID NO: 40337 - DNA, 22 bp, Artificial sequence
  SiRNA target sequence
ttatatttaagattgcttgtgt

SEQ ID NO: 40338 - DNA, 22 bp, Artificial sequence
  SiRNA target sequence
tatatttaagattgcttgtgta

SEQ ID NO: 40339 - DNA, 22 bp, Artificial sequence
  SiRNA target sequence
atatttaagattgcttgtgtat

SEQ ID NO: 40340 - DNA, 22 bp, Artificial sequence
  SiRNA target sequence
tatttaagattgcttgtgtata

SEQ ID NO: 40341 - DNA, 22 bp, Artificial sequence
  SiRNA target sequence
atttaagattgcttgtgtatat

SEQ ID NO: 40342 - DNA, 22 bp, Artificial sequence
  SiRNA target sequence
tttaagattgcttgtgtatatc

SEQ ID NO: 40343 - DNA, 22 bp, Artificial sequence
  SiRNA target sequence
ttaagattgcttgtgtatatcg

SEQ ID NO: 40344 - DNA, 22 bp, Artificial sequence
  SiRNA target sequence
taagattgcttgtgtatatcgt

SEQ ID NO: 40345 - DNA, 22 bp, Artificial sequence
  SiRNA target sequence
aagattgcttgtgtatatcgtg

SEQ ID NO: 40346 - DNA, 22 bp, Artificial sequence
  SiRNA target sequence
agattgcttgtgtatatcgtga

SEQ ID NO: 40347 - DNA, 22 bp, Artificial sequence
  SiRNA target sequence
gattgcttgtgtatatcgtgag

SEQ ID NO: 40348 - DNA, 22 bp, Artificial sequence
  SiRNA target sequence
attgcttgtgtatatcgtgagt

SEQ ID NO: 40349 - DNA, 22 bp, Artificial sequence
  SiRNA target sequence
ttgcttgtgtatatcgtgagta

SEQ ID NO: 40350 - DNA, 22 bp, Artificial sequence
  SiRNA target sequence
tgcttgtgtatatcgtgagtaa

SEQ ID NO: 40351 - DNA, 22 bp, Artificial sequence
  SiRNA target sequence
gcttgtgtatatcgtgagtaaa

SEQ ID NO: 40352 - DNA, 22 bp, Artificial sequence
  SiRNA target sequence
cttgtgtatatcgtgagtaaaa

SEQ ID NO: 40353 - DNA, 22 bp, Artificial sequence
  SiRNA target sequence
ttgtgtatatcgtgagtaaaag

SEQ ID NO: 40354 - DNA, 22 bp, Artificial sequence
  SiRNA target sequence
tgtgtatatcgtgagtaaaaga

SEQ ID NO: 40355 - DNA, 22 bp, Artificial sequence
  SiRNA target sequence
gtgtatatcgtgagtaaaagaa

SEQ ID NO: 40356 - DNA, 22 bp, Artificial sequence
  SiRNA target sequence
tgtatatcgtgagtaaaagaac

SEQ ID NO: 40357 - DNA, 22 bp, Artificial sequence
  SiRNA target sequence
gtatatcgtgagtaaaagaacc

SEQ ID NO: 40358 - DNA, 22 bp, Artificial sequence
  SiRNA target sequence
tatatcgtgagtaaaagaaccc

SEQ ID NO: 40359 - DNA, 22 bp, Artificial sequence
  SiRNA target sequence
atatcgtgagtaaaagaaccct

SEQ ID NO: 40360 - DNA, 22 bp, Artificial sequence
  SiRNA target sequence
tatcgtgagtaaaagaacccta

SEQ ID NO: 40361 - DNA, 22 bp, Artificial sequence
  SiRNA target sequence
atcgtgagtaaaagaaccctaa

SEQ ID NO: 40362 - DNA, 22 bp, Artificial sequence
  SiRNA target sequence
tcgtgagtaaaagaaccctaat

SEQ ID NO: 40363 - DNA, 22 bp, Artificial sequence
  SiRNA target sequence
cgtgagtaaaagaaccctaatt

SEQ ID NO: 40364 - DNA, 22 bp, Artificial sequence
  SiRNA target sequence
gtgagtaaaagaaccctaattg

SEQ ID NO: 40365 - DNA, 22 bp, Artificial sequence
  SiRNA target sequence
tgagtaaaagaaccctaattgt

SEQ ID NO: 40366 - DNA, 22 bp, Artificial sequence
  SiRNA target sequence
gagtaaaagaaccctaattgtc

SEQ ID NO: 40367 - DNA, 22 bp, Artificial sequence
  SiRNA target sequence
agtaaaagaaccctaattgtcc

SEQ ID NO: 40368 - DNA, 22 bp, Artificial sequence
  SiRNA target sequence
gtaaaagaaccctaattgtcca

SEQ ID NO: 40369 - DNA, 22 bp, Artificial sequence
  SiRNA target sequence
taaaagaaccctaattgtccaa

SEQ ID NO: 40370 - DNA, 22 bp, Artificial sequence
  SiRNA target sequence
aaaagaaccctaattgtccaaa

SEQ ID NO: 40371 - DNA, 22 bp, Artificial sequence
  SiRNA target sequence
aaagaaccctaattgtccaaaa

SEQ ID NO: 40372 - DNA, 22 bp, Artificial sequence
  SiRNA target sequence
aagaaccctaattgtccaaaac

SEQ ID NO: 40373 - DNA, 22 bp, Artificial sequence
  SiRNA target sequence
agaaccctaattgtccaaaact

SEQ ID NO: 40374 - DNA, 22 bp, Artificial sequence
  SiRNA target sequence
gaaccctaattgtccaaaactt

SEQ ID NO: 40375 - DNA, 22 bp, Artificial sequence
  SiRNA target sequence
aaccctaattgtccaaaacttg

SEQ ID NO: 40376 - DNA, 22 bp, Artificial sequence
  SiRNA target sequence
accctaattgtccaaaacttga

SEQ ID NO: 40377 - DNA, 22 bp, Artificial sequence
  SiRNA target sequence
ccctaattgtccaaaacttgaa

SEQ ID NO: 40378 - DNA, 22 bp, Artificial sequence
  SiRNA target sequence
cctaattgtccaaaacttgaat

SEQ ID NO: 40379 - DNA, 22 bp, Artificial sequence
  SiRNA target sequence
ctaattgtccaaaacttgaata

SEQ ID NO: 40380 - DNA, 22 bp, Artificial sequence
  SiRNA target sequence
taattgtccaaaacttgaatac

SEQ ID NO: 40381 - DNA, 22 bp, Artificial sequence
  SiRNA target sequence
aattgtccaaaacttgaataca

SEQ ID NO: 40382 - DNA, 22 bp, Artificial sequence
  SiRNA target sequence
attgtccaaaacttgaatacaa

SEQ ID NO: 40383 - DNA, 22 bp, Artificial sequence
  SiRNA target sequence
ttgtccaaaacttgaatacaat

SEQ ID NO: 40384 - DNA, 22 bp, Artificial sequence
  SiRNA target sequence
tgtccaaaacttgaatacaatg

SEQ ID NO: 40385 - DNA, 22 bp, Artificial sequence
  SiRNA target sequence
gtccaaaacttgaatacaatgt

SEQ ID NO: 40386 - DNA, 22 bp, Artificial sequence
  SiRNA target sequence
tccaaaacttgaatacaatgtt

SEQ ID NO: 40387 - DNA, 22 bp, Artificial sequence
  SiRNA target sequence
ccaaaacttgaatacaatgttc

SEQ ID NO: 40388 - DNA, 22 bp, Artificial sequence
  SiRNA target sequence
caaaacttgaatacaatgttct

SEQ ID NO: 40389 - DNA, 22 bp, Artificial sequence
  SiRNA target sequence
aaaacttgaatacaatgttcta

SEQ ID NO: 40390 - DNA, 22 bp, Artificial sequence
  SiRNA target sequence
aaacttgaatacaatgttctat

SEQ ID NO: 40391 - DNA, 22 bp, Artificial sequence
  SiRNA target sequence
aacttgaatacaatgttctatt

SEQ ID NO: 40392 - DNA, 22 bp, Artificial sequence
  SiRNA target sequence
acttgaatacaatgttctatta

SEQ ID NO: 40393 - DNA, 22 bp, Artificial sequence
  SiRNA target sequence
cttgaatacaatgttctattaa

SEQ ID NO: 40394 - DNA, 22 bp, Artificial sequence
  SiRNA target sequence
ttgaatacaatgttctattaat

SEQ ID NO: 40395 - DNA, 22 bp, Artificial sequence
  SiRNA target sequence
tgaatacaatgttctattaatg

SEQ ID NO: 40396 - DNA, 22 bp, Artificial sequence
  SiRNA target sequence
gaatacaatgttctattaatgc

SEQ ID NO: 40397 - DNA, 22 bp, Artificial sequence
  SiRNA target sequence
aatacaatgttctattaatgcc

SEQ ID NO: 40398 - DNA, 22 bp, Artificial sequence
  SiRNA target sequence
atacaatgttctattaatgcca

SEQ ID NO: 40399 - DNA, 22 bp, Artificial sequence
  SiRNA target sequence
tacaatgttctattaatgccaa

SEQ ID NO: 40400 - DNA, 22 bp, Artificial sequence
  SiRNA target sequence
acaatgttctattaatgccaat

SEQ ID NO: 40401 - DNA, 22 bp, Artificial sequence
  SiRNA target sequence
caatgttctattaatgccaata

SEQ ID NO: 40402 - DNA, 22 bp, Artificial sequence
  SiRNA target sequence
aatgttctattaatgccaatat

SEQ ID NO: 40403 - DNA, 22 bp, Artificial sequence
  SiRNA target sequence
atgttctattaatgccaatata

SEQ ID NO: 40404 - DNA, 22 bp, Artificial sequence
  SiRNA target sequence
tgttctattaatgccaatataa

SEQ ID NO: 40405 - DNA, 22 bp, Artificial sequence
  SiRNA target sequence
gttctattaatgccaatataaa

SEQ ID NO: 40406 - DNA, 22 bp, Artificial sequence
  SiRNA target sequence
ttctattaatgccaatataaaa

SEQ ID NO: 40407 - DNA, 22 bp, Artificial sequence
  SiRNA target sequence
tctattaatgccaatataaaat

SEQ ID NO: 40408 - DNA, 22 bp, Artificial sequence
  SiRNA target sequence
ctattaatgccaatataaaata

SEQ ID NO: 40409 - DNA, 22 bp, Artificial sequence
  SiRNA target sequence
tattaatgccaatataaaatac

SEQ ID NO: 40410 - DNA, 22 bp, Artificial sequence
  SiRNA target sequence
attaatgccaatataaaataca

SEQ ID NO: 40411 - DNA, 22 bp, Artificial sequence
  SiRNA target sequence
ttaatgccaatataaaatacaa

SEQ ID NO: 40412 - DNA, 22 bp, Artificial sequence
  SiRNA target sequence
taatgccaatataaaatacaac

SEQ ID NO: 40413 - DNA, 22 bp, Artificial sequence
  SiRNA target sequence
aatgccaatataaaatacaaca

SEQ ID NO: 40414 - DNA, 22 bp, Artificial sequence
  SiRNA target sequence
atgccaatataaaatacaacat

SEQ ID NO: 40415 - DNA, 22 bp, Artificial sequence
  SiRNA target sequence
tgccaatataaaatacaacatc

SEQ ID NO: 40416 - DNA, 22 bp, Artificial sequence
  SiRNA target sequence
gccaatataaaatacaacatcc

SEQ ID NO: 40417 - DNA, 22 bp, Artificial sequence
  SiRNA target sequence
ccaatataaaatacaacatccc

SEQ ID NO: 40418 - DNA, 22 bp, Artificial sequence
  SiRNA target sequence
caatataaaatacaacatccct

SEQ ID NO: 40419 - DNA, 22 bp, Artificial sequence
  SiRNA target sequence
aatataaaatacaacatccctg

SEQ ID NO: 40420 - DNA, 22 bp, Artificial sequence
  SiRNA target sequence
atataaaatacaacatccctgg

SEQ ID NO: 40421 - DNA, 22 bp, Artificial sequence
  SiRNA target sequence
tataaaatacaacatccctggc

SEQ ID NO: 40422 - DNA, 22 bp, Artificial sequence
  SiRNA target sequence
ataaaatacaacatccctggca

SEQ ID NO: 40423 - DNA, 22 bp, Artificial sequence
  SiRNA target sequence
taaaatacaacatccctggcac

SEQ ID NO: 40424 - DNA, 22 bp, Artificial sequence
  SiRNA target sequence
aaaatacaacatccctggcact

SEQ ID NO: 40425 - DNA, 22 bp, Artificial sequence
  SiRNA target sequence
aaatacaacatccctggcactt

SEQ ID NO: 40426 - DNA, 22 bp, Artificial sequence
  SiRNA target sequence
aatacaacatccctggcactta

SEQ ID NO: 40427 - DNA, 22 bp, Artificial sequence
  SiRNA target sequence
atacaacatccctggcacttag

SEQ ID NO: 40428 - DNA, 22 bp, Artificial sequence
  SiRNA target sequence
tacaacatccctggcacttagt

SEQ ID NO: 40429 - DNA, 22 bp, Artificial sequence
  SiRNA target sequence
acaacatccctggcacttagtt

SEQ ID NO: 40430 - DNA, 22 bp, Artificial sequence
  SiRNA target sequence
caacatccctggcacttagttt

SEQ ID NO: 40431 - DNA, 22 bp, Artificial sequence
  SiRNA target sequence
aacatccctggcacttagtttt

SEQ ID NO: 40432 - DNA, 22 bp, Artificial sequence
  SiRNA target sequence
acatccctggcacttagttttg

SEQ ID NO: 40433 - DNA, 22 bp, Artificial sequence
  SiRNA target sequence
catccctggcacttagttttgc

SEQ ID NO: 40434 - DNA, 22 bp, Artificial sequence
  SiRNA target sequence
atccctggcacttagttttgct

SEQ ID NO: 40435 - DNA, 22 bp, Artificial sequence
  SiRNA target sequence
tccctggcacttagttttgctg

SEQ ID NO: 40436 - DNA, 22 bp, Artificial sequence
  SiRNA target sequence
ccctggcacttagttttgctgt

SEQ ID NO: 40437 - DNA, 22 bp, Artificial sequence
  SiRNA target sequence
cctggcacttagttttgctgtt

SEQ ID NO: 40438 - DNA, 22 bp, Artificial sequence
  SiRNA target sequence
ctggcacttagttttgctgtta

SEQ ID NO: 40439 - DNA, 22 bp, Artificial sequence
  SiRNA target sequence
tggcacttagttttgctgttaa

SEQ ID NO: 40440 - DNA, 22 bp, Artificial sequence
  SiRNA target sequence
ggcacttagttttgctgttaat

SEQ ID NO: 40441 - DNA, 22 bp, Artificial sequence
  SiRNA target sequence
gcacttagttttgctgttaata

SEQ ID NO: 40442 - DNA, 22 bp, Artificial sequence
  SiRNA target sequence
cacttagttttgctgttaatat

SEQ ID NO: 40443 - DNA, 22 bp, Artificial sequence
  SiRNA target sequence
acttagttttgctgttaatatt

SEQ ID NO: 40444 - DNA, 22 bp, Artificial sequence
  SiRNA target sequence
cttagttttgctgttaatattc

SEQ ID NO: 40445 - DNA, 22 bp, Artificial sequence
  SiRNA target sequence
ttagttttgctgttaatattcc

SEQ ID NO: 40446 - DNA, 22 bp, Artificial sequence
  SiRNA target sequence
tagttttgctgttaatattcca

SEQ ID NO: 40447 - DNA, 22 bp, Artificial sequence
  SiRNA target sequence
agttttgctgttaatattccat

SEQ ID NO: 40448 - DNA, 22 bp, Artificial sequence
  SiRNA target sequence
gttttgctgttaatattccata

SEQ ID NO: 40449 - DNA, 22 bp, Artificial sequence
  SiRNA target sequence
ttttgctgttaatattccatag

SEQ ID NO: 40450 - DNA, 22 bp, Artificial sequence
  SiRNA target sequence
tttgctgttaatattccatagt

SEQ ID NO: 40451 - DNA, 22 bp, Artificial sequence
  SiRNA target sequence
ttgctgttaatattccatagtt

SEQ ID NO: 40452 - DNA, 22 bp, Artificial sequence
  SiRNA target sequence
tgctgttaatattccatagttt

SEQ ID NO: 40453 - DNA, 22 bp, Artificial sequence
  SiRNA target sequence
gctgttaatattccatagtttc

SEQ ID NO: 40454 - DNA, 22 bp, Artificial sequence
  SiRNA target sequence
ctgttaatattccatagtttcc

SEQ ID NO: 40455 - DNA, 22 bp, Artificial sequence
  SiRNA target sequence
tgttaatattccatagtttcct

SEQ ID NO: 40456 - DNA, 22 bp, Artificial sequence
  SiRNA target sequence
gttaatattccatagtttccta

SEQ ID NO: 40457 - DNA, 22 bp, Artificial sequence
  SiRNA target sequence
ttaatattccatagtttcctaa

SEQ ID NO: 40458 - DNA, 22 bp, Artificial sequence
  SiRNA target sequence
taatattccatagtttcctaat

SEQ ID NO: 40459 - DNA, 22 bp, Artificial sequence
  SiRNA target sequence
aatattccatagtttcctaatg

SEQ ID NO: 40460 - DNA, 22 bp, Artificial sequence
  SiRNA target sequence
atattccatagtttcctaatgt

SEQ ID NO: 40461 - DNA, 22 bp, Artificial sequence
  SiRNA target sequence
tattccatagtttcctaatgtt

SEQ ID NO: 40462 - DNA, 22 bp, Artificial sequence
  SiRNA target sequence
attccatagtttcctaatgtta

SEQ ID NO: 40463 - DNA, 22 bp, Artificial sequence
  SiRNA target sequence
ttccatagtttcctaatgttat

SEQ ID NO: 40464 - DNA, 22 bp, Artificial sequence
  SiRNA target sequence
tccatagtttcctaatgttata

SEQ ID NO: 40465 - DNA, 22 bp, Artificial sequence
  SiRNA target sequence
ccatagtttcctaatgttataa

SEQ ID NO: 40466 - DNA, 22 bp, Artificial sequence
  SiRNA target sequence
catagtttcctaatgttataac

SEQ ID NO: 40467 - DNA, 22 bp, Artificial sequence
  SiRNA target sequence
atagtttcctaatgttataact

SEQ ID NO: 40468 - DNA, 22 bp, Artificial sequence
  SiRNA target sequence
tagtttcctaatgttataacta

SEQ ID NO: 40469 - DNA, 22 bp, Artificial sequence
  SiRNA target sequence
agtttcctaatgttataactat

SEQ ID NO: 40470 - DNA, 22 bp, Artificial sequence
  SiRNA target sequence
gtttcctaatgttataactata

SEQ ID NO: 40471 - DNA, 22 bp, Artificial sequence
  SiRNA target sequence
tttcctaatgttataactataa

SEQ ID NO: 40472 - DNA, 22 bp, Artificial sequence
  SiRNA target sequence
ttcctaatgttataactataaa

SEQ ID NO: 40473 - DNA, 22 bp, Artificial sequence
  SiRNA target sequence
tcctaatgttataactataaaa

SEQ ID NO: 40474 - DNA, 22 bp, Artificial sequence
  SiRNA target sequence
cctaatgttataactataaaac

SEQ ID NO: 40475 - DNA, 22 bp, Artificial sequence
  SiRNA target sequence
ctaatgttataactataaaaca

SEQ ID NO: 40476 - DNA, 22 bp, Artificial sequence
  SiRNA target sequence
taatgttataactataaaacac

SEQ ID NO: 40477 - DNA, 22 bp, Artificial sequence
  SiRNA target sequence
aatgttataactataaaacact

SEQ ID NO: 40478 - DNA, 22 bp, Artificial sequence
  SiRNA target sequence
atgttataactataaaacactg

SEQ ID NO: 40479 - DNA, 22 bp, Artificial sequence
  SiRNA target sequence
tgttataactataaaacactgt

SEQ ID NO: 40480 - DNA, 22 bp, Artificial sequence
  SiRNA target sequence
gttataactataaaacactgta

SEQ ID NO: 40481 - DNA, 22 bp, Artificial sequence
  SiRNA target sequence
ttataactataaaacactgtaa

SEQ ID NO: 40482 - DNA, 22 bp, Artificial sequence
  SiRNA target sequence
tataactataaaacactgtaaa

SEQ ID NO: 40483 - DNA, 22 bp, Artificial sequence
  SiRNA target sequence
ataactataaaacactgtaaag

SEQ ID NO: 40484 - DNA, 22 bp, Artificial sequence
  SiRNA target sequence
taactataaaacactgtaaagc

SEQ ID NO: 40485 - DNA, 22 bp, Artificial sequence
  SiRNA target sequence
aactataaaacactgtaaagca

SEQ ID NO: 40486 - DNA, 22 bp, Artificial sequence
  SiRNA target sequence
actataaaacactgtaaagcaa

SEQ ID NO: 40487 - DNA, 22 bp, Artificial sequence
  SiRNA target sequence
ctataaaacactgtaaagcaaa

SEQ ID NO: 40488 - DNA, 22 bp, Artificial sequence
  SiRNA target sequence
tataaaacactgtaaagcaaaa

SEQ ID NO: 40489 - DNA, 22 bp, Artificial sequence
  SiRNA target sequence
ataaaacactgtaaagcaaaaa

SEQ ID NO: 40490 - DNA, 22 bp, Artificial sequence
  SiRNA target sequence
taaaacactgtaaagcaaaaat

SEQ ID NO: 40491 - DNA, 22 bp, Artificial sequence
  SiRNA target sequence
aaaacactgtaaagcaaaaatt

SEQ ID NO: 40492 - DNA, 22 bp, Artificial sequence
  SiRNA target sequence
aaacactgtaaagcaaaaatta

SEQ ID NO: 40493 - DNA, 22 bp, Artificial sequence
  SiRNA target sequence
aacactgtaaagcaaaaattat

SEQ ID NO: 40494 - DNA, 22 bp, Artificial sequence
  SiRNA target sequence
acactgtaaagcaaaaattatc

SEQ ID NO: 40495 - DNA, 22 bp, Artificial sequence
  SiRNA target sequence
cactgtaaagcaaaaattatct

SEQ ID NO: 40496 - DNA, 22 bp, Artificial sequence
  SiRNA target sequence
actgtaaagcaaaaattatctt

SEQ ID NO: 40497 - DNA, 22 bp, Artificial sequence
  SiRNA target sequence
ctgtaaagcaaaaattatctta

SEQ ID NO: 40498 - DNA, 22 bp, Artificial sequence
  SiRNA target sequence
tgtaaagcaaaaattatcttat

SEQ ID NO: 40499 - DNA, 22 bp, Artificial sequence
  SiRNA target sequence
gtaaagcaaaaattatcttatt

SEQ ID NO: 40500 - DNA, 22 bp, Artificial sequence
  SiRNA target sequence
taaagcaaaaattatcttattt

SEQ ID NO: 40501 - DNA, 22 bp, Artificial sequence
  SiRNA target sequence
aaagcaaaaattatcttattta

SEQ ID NO: 40502 - DNA, 22 bp, Artificial sequence
  SiRNA target sequence
aagcaaaaattatcttatttac

SEQ ID NO: 40503 - DNA, 22 bp, Artificial sequence
  SiRNA target sequence
agcaaaaattatcttatttaca

SEQ ID NO: 40504 - DNA, 22 bp, Artificial sequence
  SiRNA target sequence
gcaaaaattatcttatttacaa

SEQ ID NO: 40505 - DNA, 22 bp, Artificial sequence
  SiRNA target sequence
caaaaattatcttatttacaag

SEQ ID NO: 40506 - DNA, 22 bp, Artificial sequence
  SiRNA target sequence
aaaaattatcttatttacaagg

SEQ ID NO: 40507 - DNA, 22 bp, Artificial sequence
  SiRNA target sequence
aaaattatcttatttacaaggt

SEQ ID NO: 40508 - DNA, 22 bp, Artificial sequence
  SiRNA target sequence
aaattatcttatttacaaggta

SEQ ID NO: 40509 - DNA, 22 bp, Artificial sequence
  SiRNA target sequence
aattatcttatttacaaggtat

SEQ ID NO: 40510 - DNA, 22 bp, Artificial sequence
  SiRNA target sequence
attatcttatttacaaggtata

SEQ ID NO: 40511 - DNA, 22 bp, Artificial sequence
  SiRNA target sequence
ttatcttatttacaaggtataa

SEQ ID NO: 40512 - DNA, 22 bp, Artificial sequence
  SiRNA target sequence
tatcttatttacaaggtataaa

SEQ ID NO: 40513 - DNA, 22 bp, Artificial sequence
  SiRNA target sequence
atcttatttacaaggtataaaa

SEQ ID NO: 40514 - DNA, 22 bp, Artificial sequence
  SiRNA target sequence
tcttatttacaaggtataaaaa

SEQ ID NO: 40515 - DNA, 22 bp, Artificial sequence
  SiRNA target sequence
cttatttacaaggtataaaaaa

SEQ ID NO: 40516 - DNA, 22 bp, Artificial sequence
  SiRNA target sequence
ttatttacaaggtataaaaaac

SEQ ID NO: 40517 - DNA, 22 bp, Artificial sequence
  SiRNA target sequence
tatttacaaggtataaaaaact

SEQ ID NO: 40518 - DNA, 22 bp, Artificial sequence
  SiRNA target sequence
atttacaaggtataaaaaacta

SEQ ID NO: 40519 - DNA, 22 bp, Artificial sequence
  SiRNA target sequence
tttacaaggtataaaaaactaa

SEQ ID NO: 40520 - DNA, 22 bp, Artificial sequence
  SiRNA target sequence
ttacaaggtataaaaaactaag

SEQ ID NO: 40521 - DNA, 22 bp, Artificial sequence
  SiRNA target sequence
tacaaggtataaaaaactaaga

SEQ ID NO: 40522 - DNA, 22 bp, Artificial sequence
  SiRNA target sequence
acaaggtataaaaaactaagag

SEQ ID NO: 40523 - DNA, 22 bp, Artificial sequence
  SiRNA target sequence
caaggtataaaaaactaagaga

SEQ ID NO: 40524 - DNA, 22 bp, Artificial sequence
  SiRNA target sequence
aaggtataaaaaactaagagat

SEQ ID NO: 40525 - DNA, 22 bp, Artificial sequence
  SiRNA target sequence
aggtataaaaaactaagagatc

SEQ ID NO: 40526 - DNA, 22 bp, Artificial sequence
  SiRNA target sequence
ggtataaaaaactaagagatct

SEQ ID NO: 40527 - DNA, 22 bp, Artificial sequence
  SiRNA target sequence
gtataaaaaactaagagatctc

SEQ ID NO: 40528 - DNA, 22 bp, Artificial sequence
  SiRNA target sequence
tataaaaaactaagagatctcc

SEQ ID NO: 40529 - DNA, 22 bp, Artificial sequence
  SiRNA target sequence
ataaaaaactaagagatctcca

SEQ ID NO: 40530 - DNA, 22 bp, Artificial sequence
  SiRNA target sequence
taaaaaactaagagatctccag

SEQ ID NO: 40531 - DNA, 22 bp, Artificial sequence
  SiRNA target sequence
aaaaaactaagagatctccaga

SEQ ID NO: 40532 - DNA, 22 bp, Artificial sequence
  SiRNA target sequence
aaaaactaagagatctccagat

SEQ ID NO: 40533 - DNA, 22 bp, Artificial sequence
  SiRNA target sequence
aaaactaagagatctccagatt

SEQ ID NO: 40534 - DNA, 22 bp, Artificial sequence
  SiRNA target sequence
aaactaagagatctccagattc

SEQ ID NO: 40535 - DNA, 22 bp, Artificial sequence
  SiRNA target sequence
aactaagagatctccagattct

SEQ ID NO: 40536 - DNA, 22 bp, Artificial sequence
  SiRNA target sequence
actaagagatctccagattctg

SEQ ID NO: 40537 - DNA, 22 bp, Artificial sequence
  SiRNA target sequence
ctaagagatctccagattctgt

SEQ ID NO: 40538 - DNA, 22 bp, Artificial sequence
  SiRNA target sequence
taagagatctccagattctgtt

SEQ ID NO: 40539 - DNA, 22 bp, Artificial sequence
  SiRNA target sequence
aagagatctccagattctgtta

SEQ ID NO: 40540 - DNA, 22 bp, Artificial sequence
  SiRNA target sequence
agagatctccagattctgttac

SEQ ID NO: 40541 - DNA, 22 bp, Artificial sequence
  SiRNA target sequence
gagatctccagattctgttaca

SEQ ID NO: 40542 - DNA, 22 bp, Artificial sequence
  SiRNA target sequence
agatctccagattctgttacat

SEQ ID NO: 40543 - DNA, 22 bp, Artificial sequence
  SiRNA target sequence
gatctccagattctgttacatt

SEQ ID NO: 40544 - DNA, 22 bp, Artificial sequence
  SiRNA target sequence
atctccagattctgttacattc

SEQ ID NO: 40545 - DNA, 22 bp, Artificial sequence
  SiRNA target sequence
tctccagattctgttacattcc

SEQ ID NO: 40546 - DNA, 22 bp, Artificial sequence
  SiRNA target sequence
ctccagattctgttacattccg

SEQ ID NO: 40547 - DNA, 22 bp, Artificial sequence
  SiRNA target sequence
tccagattctgttacattccga

SEQ ID NO: 40548 - DNA, 22 bp, Artificial sequence
  SiRNA target sequence
ccagattctgttacattccgat

SEQ ID NO: 40549 - DNA, 22 bp, Artificial sequence
  SiRNA target sequence
cagattctgttacattccgatt

SEQ ID NO: 40550 - DNA, 22 bp, Artificial sequence
  SiRNA target sequence
agattctgttacattccgattc

SEQ ID NO: 40551 - DNA, 22 bp, Artificial sequence
  SiRNA target sequence
gattctgttacattccgattct

SEQ ID NO: 40552 - DNA, 22 bp, Artificial sequence
  SiRNA target sequence
attctgttacattccgattcta

SEQ ID NO: 40553 - DNA, 22 bp, Artificial sequence
  SiRNA target sequence
ttctgttacattccgattctac

SEQ ID NO: 40554 - DNA, 22 bp, Artificial sequence
  SiRNA target sequence
tctgttacattccgattctact

SEQ ID NO: 40555 - DNA, 22 bp, Artificial sequence
  SiRNA target sequence
ctgttacattccgattctactt

SEQ ID NO: 40556 - DNA, 22 bp, Artificial sequence
  SiRNA target sequence
tgttacattccgattctacttc

SEQ ID NO: 40557 - DNA, 22 bp, Artificial sequence
  SiRNA target sequence
gttacattccgattctacttca

SEQ ID NO: 40558 - DNA, 22 bp, Artificial sequence
  SiRNA target sequence
ttacattccgattctacttcag

SEQ ID NO: 40559 - DNA, 22 bp, Artificial sequence
  SiRNA target sequence
tacattccgattctacttcaga

SEQ ID NO: 40560 - DNA, 22 bp, Artificial sequence
  SiRNA target sequence
acattccgattctacttcagaa

SEQ ID NO: 40561 - DNA, 22 bp, Artificial sequence
  SiRNA target sequence
cattccgattctacttcagaaa

SEQ ID NO: 40562 - DNA, 22 bp, Artificial sequence
  SiRNA target sequence
attccgattctacttcagaaac

SEQ ID NO: 40563 - DNA, 22 bp, Artificial sequence
  SiRNA target sequence
ttccgattctacttcagaaaca

SEQ ID NO: 40564 - DNA, 22 bp, Artificial sequence
  SiRNA target sequence
tccgattctacttcagaaacat

SEQ ID NO: 40565 - DNA, 22 bp, Artificial sequence
  SiRNA target sequence
ccgattctacttcagaaacata

SEQ ID NO: 40566 - DNA, 22 bp, Artificial sequence
  SiRNA target sequence
cgattctacttcagaaacatat

SEQ ID NO: 40567 - DNA, 22 bp, Artificial sequence
  SiRNA target sequence
gattctacttcagaaacatatt

SEQ ID NO: 40568 - DNA, 22 bp, Artificial sequence
  SiRNA target sequence
attctacttcagaaacatattt

SEQ ID NO: 40569 - DNA, 22 bp, Artificial sequence
  SiRNA target sequence
ttctacttcagaaacatatttt

SEQ ID NO: 40570 - DNA, 22 bp, Artificial sequence
  SiRNA target sequence
tctacttcagaaacatattttt

SEQ ID NO: 40571 - DNA, 22 bp, Artificial sequence
  SiRNA target sequence
ctacttcagaaacatatttttc

SEQ ID NO: 40572 - DNA, 22 bp, Artificial sequence
  SiRNA target sequence
tacttcagaaacatatttttca

SEQ ID NO: 40573 - DNA, 22 bp, Artificial sequence
  SiRNA target sequence
acttcagaaacatatttttcat

SEQ ID NO: 40574 - DNA, 22 bp, Artificial sequence
  SiRNA target sequence
cttcagaaacatatttttcata

SEQ ID NO: 40575 - DNA, 22 bp, Artificial sequence
  SiRNA target sequence
ttcagaaacatatttttcatat

SEQ ID NO: 40576 - DNA, 22 bp, Artificial sequence
  SiRNA target sequence
tcagaaacatatttttcatatt

SEQ ID NO: 40577 - DNA, 22 bp, Artificial sequence
  SiRNA target sequence
cagaaacatatttttcatattt

SEQ ID NO: 40578 - DNA, 22 bp, Artificial sequence
  SiRNA target sequence
agaaacatatttttcatattta

SEQ ID NO: 40579 - DNA, 22 bp, Artificial sequence
  SiRNA target sequence
gaaacatatttttcatatttaa

SEQ ID NO: 40580 - DNA, 22 bp, Artificial sequence
  SiRNA target sequence
aaacatatttttcatatttaag

SEQ ID NO: 40581 - DNA, 22 bp, Artificial sequence
  SiRNA target sequence
aacatatttttcatatttaagc

SEQ ID NO: 40582 - DNA, 22 bp, Artificial sequence
  SiRNA target sequence
acatatttttcatatttaagcg

SEQ ID NO: 40583 - DNA, 22 bp, Artificial sequence
  SiRNA target sequence
catatttttcatatttaagcga

SEQ ID NO: 40584 - DNA, 22 bp, Artificial sequence
  SiRNA target sequence
atatttttcatatttaagcgat

SEQ ID NO: 40585 - DNA, 22 bp, Artificial sequence
  SiRNA target sequence
tatttttcatatttaagcgatt

SEQ ID NO: 40586 - DNA, 22 bp, Artificial sequence
  SiRNA target sequence
atttttcatatttaagcgattc

SEQ ID NO: 40587 - DNA, 22 bp, Artificial sequence
  SiRNA target sequence
tttttcatatttaagcgattct

SEQ ID NO: 40588 - DNA, 22 bp, Artificial sequence
  SiRNA target sequence
ttttcatatttaagcgattctt

SEQ ID NO: 40589 - DNA, 22 bp, Artificial sequence
  SiRNA target sequence
tttcatatttaagcgattcttc

SEQ ID NO: 40590 - DNA, 22 bp, Artificial sequence
  SiRNA target sequence
ttcatatttaagcgattcttct

SEQ ID NO: 40591 - DNA, 22 bp, Artificial sequence
  SiRNA target sequence
tcatatttaagcgattcttctt

SEQ ID NO: 40592 - DNA, 22 bp, Artificial sequence
  SiRNA target sequence
catatttaagcgattcttcttc

SEQ ID NO: 40593 - DNA, 22 bp, Artificial sequence
  SiRNA target sequence
atatttaagcgattcttcttct

SEQ ID NO: 40594 - DNA, 22 bp, Artificial sequence
  SiRNA target sequence
tatttaagcgattcttcttctt

SEQ ID NO: 40595 - DNA, 22 bp, Artificial sequence
  SiRNA target sequence
atttaagcgattcttcttcttc

SEQ ID NO: 40596 - DNA, 22 bp, Artificial sequence
  SiRNA target sequence
tttaagcgattcttcttcttct

SEQ ID NO: 40597 - DNA, 22 bp, Artificial sequence
  SiRNA target sequence
ttaagcgattcttcttcttctg

SEQ ID NO: 40598 - DNA, 22 bp, Artificial sequence
  SiRNA target sequence
taagcgattcttcttcttctgt

SEQ ID NO: 40599 - DNA, 22 bp, Artificial sequence
  SiRNA target sequence
aagcgattcttcttcttctgtt

SEQ ID NO: 40600 - DNA, 22 bp, Artificial sequence
  SiRNA target sequence
agcgattcttcttcttctgttt

SEQ ID NO: 40601 - DNA, 22 bp, Artificial sequence
  SiRNA target sequence
gcgattcttcttcttctgtttt

SEQ ID NO: 40602 - DNA, 22 bp, Artificial sequence
  SiRNA target sequence
cgattcttcttcttctgtttta

SEQ ID NO: 40603 - DNA, 22 bp, Artificial sequence
  SiRNA target sequence
gattcttcttcttctgttttat

SEQ ID NO: 40604 - DNA, 22 bp, Artificial sequence
  SiRNA target sequence
attcttcttcttctgttttata

SEQ ID NO: 40605 - DNA, 22 bp, Artificial sequence
  SiRNA target sequence
ttcttcttcttctgttttatat

SEQ ID NO: 40606 - DNA, 22 bp, Artificial sequence
  SiRNA target sequence
tcttcttcttctgttttatatg

SEQ ID NO: 40607 - DNA, 22 bp, Artificial sequence
  SiRNA target sequence
cttcttcttctgttttatatgc

SEQ ID NO: 40608 - DNA, 22 bp, Artificial sequence
  SiRNA target sequence
ttcttcttctgttttatatgct

SEQ ID NO: 40609 - DNA, 22 bp, Artificial sequence
  SiRNA target sequence
tcttcttctgttttatatgcta

SEQ ID NO: 40610 - DNA, 22 bp, Artificial sequence
  SiRNA target sequence
cttcttctgttttatatgctag

SEQ ID NO: 40611 - DNA, 22 bp, Artificial sequence
  SiRNA target sequence
ttcttctgttttatatgctagt

SEQ ID NO: 40612 - DNA, 22 bp, Artificial sequence
  SiRNA target sequence
tcttctgttttatatgctagta

SEQ ID NO: 40613 - DNA, 22 bp, Artificial sequence
  SiRNA target sequence
cttctgttttatatgctagtat

SEQ ID NO: 40614 - DNA, 22 bp, Artificial sequence
  SiRNA target sequence
ttctgttttatatgctagtata

SEQ ID NO: 40615 - DNA, 22 bp, Artificial sequence
  SiRNA target sequence
tctgttttatatgctagtatag

SEQ ID NO: 40616 - DNA, 22 bp, Artificial sequence
  SiRNA target sequence
ctgttttatatgctagtatagt

SEQ ID NO: 40617 - DNA, 22 bp, Artificial sequence
  SiRNA target sequence
tgttttatatgctagtatagtc

SEQ ID NO: 40618 - DNA, 22 bp, Artificial sequence
  SiRNA target sequence
gttttatatgctagtatagtct

SEQ ID NO: 40619 - DNA, 22 bp, Artificial sequence
  SiRNA target sequence
ttttatatgctagtatagtctc

SEQ ID NO: 40620 - DNA, 22 bp, Artificial sequence
  SiRNA target sequence
tttatatgctagtatagtctca

SEQ ID NO: 40621 - DNA, 22 bp, Artificial sequence
  SiRNA target sequence
ttatatgctagtatagtctcat

SEQ ID NO: 40622 - DNA, 22 bp, Artificial sequence
  SiRNA target sequence
tatatgctagtatagtctcatg

SEQ ID NO: 40623 - DNA, 22 bp, Artificial sequence
  SiRNA target sequence
atatgctagtatagtctcatga

SEQ ID NO: 40624 - DNA, 22 bp, Artificial sequence
  SiRNA target sequence
tatgctagtatagtctcatgat

SEQ ID NO: 40625 - DNA, 22 bp, Artificial sequence
  SiRNA target sequence
atgctagtatagtctcatgatt

SEQ ID NO: 40626 - DNA, 22 bp, Artificial sequence
  SiRNA target sequence
tgctagtatagtctcatgatta

SEQ ID NO: 40627 - DNA, 22 bp, Artificial sequence
  SiRNA target sequence
gctagtatagtctcatgattaa

SEQ ID NO: 40628 - DNA, 22 bp, Artificial sequence
  SiRNA target sequence
ctagtatagtctcatgattaat

SEQ ID NO: 40629 - DNA, 22 bp, Artificial sequence
  SiRNA target sequence
tagtatagtctcatgattaatt

SEQ ID NO: 40630 - DNA, 22 bp, Artificial sequence
  SiRNA target sequence
agtatagtctcatgattaatta

SEQ ID NO: 40631 - DNA, 22 bp, Artificial sequence
  SiRNA target sequence
gtatagtctcatgattaattaa

SEQ ID NO: 40632 - DNA, 22 bp, Artificial sequence
  SiRNA target sequence
tatagtctcatgattaattaaa

SEQ ID NO: 40633 - DNA, 22 bp, Artificial sequence
  SiRNA target sequence
atagtctcatgattaattaaag

SEQ ID NO: 40634 - DNA, 22 bp, Artificial sequence
  SiRNA target sequence
tagtctcatgattaattaaaga

SEQ ID NO: 40635 - DNA, 22 bp, Artificial sequence
  SiRNA target sequence
agtctcatgattaattaaagaa

SEQ ID NO: 40636 - DNA, 22 bp, Artificial sequence
  SiRNA target sequence
gtctcatgattaattaaagaat

SEQ ID NO: 40637 - DNA, 22 bp, Artificial sequence
  SiRNA target sequence
tctcatgattaattaaagaatc

SEQ ID NO: 40638 - DNA, 22 bp, Artificial sequence
  SiRNA target sequence
ctcatgattaattaaagaatca

SEQ ID NO: 40639 - DNA, 22 bp, Artificial sequence
  SiRNA target sequence
tcatgattaattaaagaatcat

SEQ ID NO: 40640 - DNA, 22 bp, Artificial sequence
  SiRNA target sequence
catgattaattaaagaatcatg

SEQ ID NO: 40641 - DNA, 22 bp, Artificial sequence
  SiRNA target sequence
atgattaattaaagaatcatgt

SEQ ID NO: 40642 - DNA, 22 bp, Artificial sequence
  SiRNA target sequence
tgattaattaaagaatcatgta

SEQ ID NO: 40643 - DNA, 22 bp, Artificial sequence
  SiRNA target sequence
gattaattaaagaatcatgtaa

SEQ ID NO: 40644 - DNA, 22 bp, Artificial sequence
  SiRNA target sequence
attaattaaagaatcatgtaag

SEQ ID NO: 40645 - DNA, 22 bp, Artificial sequence
  SiRNA target sequence
ttaattaaagaatcatgtaagt

SEQ ID NO: 40646 - DNA, 22 bp, Artificial sequence
  SiRNA target sequence
taattaaagaatcatgtaagtg

SEQ ID NO: 40647 - DNA, 22 bp, Artificial sequence
  SiRNA target sequence
aattaaagaatcatgtaagtga

SEQ ID NO: 40648 - DNA, 22 bp, Artificial sequence
  SiRNA target sequence
attaaagaatcatgtaagtgat

SEQ ID NO: 40649 - DNA, 22 bp, Artificial sequence
  SiRNA target sequence
ttaaagaatcatgtaagtgatt

SEQ ID NO: 40650 - DNA, 22 bp, Artificial sequence
  SiRNA target sequence
taaagaatcatgtaagtgattt

SEQ ID NO: 40651 - DNA, 22 bp, Artificial sequence
  SiRNA target sequence
aaagaatcatgtaagtgatttg

SEQ ID NO: 40652 - DNA, 22 bp, Artificial sequence
  SiRNA target sequence
aagaatcatgtaagtgatttga

SEQ ID NO: 40653 - DNA, 22 bp, Artificial sequence
  SiRNA target sequence
agaatcatgtaagtgatttgag

SEQ ID NO: 40654 - DNA, 22 bp, Artificial sequence
  SiRNA target sequence
gaatcatgtaagtgatttgagc

SEQ ID NO: 40655 - DNA, 22 bp, Artificial sequence
  SiRNA target sequence
aatcatgtaagtgatttgagca

SEQ ID NO: 40656 - DNA, 22 bp, Artificial sequence
  SiRNA target sequence
atcatgtaagtgatttgagcat

SEQ ID NO: 40657 - DNA, 22 bp, Artificial sequence
  SiRNA target sequence
tcatgtaagtgatttgagcatc

SEQ ID NO: 40658 - DNA, 22 bp, Artificial sequence
  SiRNA target sequence
catgtaagtgatttgagcatct

SEQ ID NO: 40659 - DNA, 22 bp, Artificial sequence
  SiRNA target sequence
atgtaagtgatttgagcatctt

SEQ ID NO: 40660 - DNA, 22 bp, Artificial sequence
  SiRNA target sequence
tgtaagtgatttgagcatcttt

SEQ ID NO: 40661 - DNA, 22 bp, Artificial sequence
  SiRNA target sequence
gtaagtgatttgagcatctttg

SEQ ID NO: 40662 - DNA, 22 bp, Artificial sequence
  SiRNA target sequence
taagtgatttgagcatctttgt

SEQ ID NO: 40663 - DNA, 22 bp, Artificial sequence
  SiRNA target sequence
aagtgatttgagcatctttgtt

SEQ ID NO: 40664 - DNA, 22 bp, Artificial sequence
  SiRNA target sequence
agtgatttgagcatctttgttg

SEQ ID NO: 40665 - DNA, 22 bp, Artificial sequence
  SiRNA target sequence
gtgatttgagcatctttgttgt

SEQ ID NO: 40666 - DNA, 22 bp, Artificial sequence
  SiRNA target sequence
tgatttgagcatctttgttgtg

SEQ ID NO: 40667 - DNA, 22 bp, Artificial sequence
  SiRNA target sequence
gatttgagcatctttgttgtgc

SEQ ID NO: 40668 - DNA, 22 bp, Artificial sequence
  SiRNA target sequence
atttgagcatctttgttgtgcg

SEQ ID NO: 40669 - DNA, 22 bp, Artificial sequence
  SiRNA target sequence
tttgagcatctttgttgtgcgc

SEQ ID NO: 40670 - DNA, 22 bp, Artificial sequence
  SiRNA target sequence
ttgagcatctttgttgtgcgca

SEQ ID NO: 40671 - DNA, 22 bp, Artificial sequence
  SiRNA target sequence
tgagcatctttgttgtgcgcaa

SEQ ID NO: 40672 - DNA, 22 bp, Artificial sequence
  SiRNA target sequence
gagcatctttgttgtgcgcaat

SEQ ID NO: 40673 - DNA, 22 bp, Artificial sequence
  SiRNA target sequence
agcatctttgttgtgcgcaatt

SEQ ID NO: 40674 - DNA, 22 bp, Artificial sequence
  SiRNA target sequence
gcatctttgttgtgcgcaatta

SEQ ID NO: 40675 - DNA, 22 bp, Artificial sequence
  SiRNA target sequence
catctttgttgtgcgcaattat

SEQ ID NO: 40676 - DNA, 22 bp, Artificial sequence
  SiRNA target sequence
atctttgttgtgcgcaattata

SEQ ID NO: 40677 - DNA, 22 bp, Artificial sequence
  SiRNA target sequence
tctttgttgtgcgcaattatat

SEQ ID NO: 40678 - DNA, 22 bp, Artificial sequence
  SiRNA target sequence
ctttgttgtgcgcaattatatt

SEQ ID NO: 40679 - DNA, 22 bp, Artificial sequence
  SiRNA target sequence
tttgttgtgcgcaattatattc

SEQ ID NO: 40680 - DNA, 22 bp, Artificial sequence
  SiRNA target sequence
ttgttgtgcgcaattatattct

SEQ ID NO: 40681 - DNA, 22 bp, Artificial sequence
  SiRNA target sequence
tgttgtgcgcaattatattctt

SEQ ID NO: 40682 - DNA, 22 bp, Artificial sequence
  SiRNA target sequence
gttgtgcgcaattatattcttt

SEQ ID NO: 40683 - DNA, 22 bp, Artificial sequence
  SiRNA target sequence
ttgtgcgcaattatattctttt

SEQ ID NO: 40684 - DNA, 22 bp, Artificial sequence
  SiRNA target sequence
tgtgcgcaattatattcttttc

SEQ ID NO: 40685 - DNA, 22 bp, Artificial sequence
  SiRNA target sequence
gtgcgcaattatattcttttct

SEQ ID NO: 40686 - DNA, 22 bp, Artificial sequence
  SiRNA target sequence
tgcgcaattatattcttttctt

SEQ ID NO: 40687 - DNA, 22 bp, Artificial sequence
  SiRNA target sequence
gcgcaattatattcttttctta

SEQ ID NO: 40688 - DNA, 22 bp, Artificial sequence
  SiRNA target sequence
cgcaattatattcttttcttat

SEQ ID NO: 40689 - DNA, 22 bp, Artificial sequence
  SiRNA target sequence
gcaattatattcttttcttatt

SEQ ID NO: 40690 - DNA, 22 bp, Artificial sequence
  SiRNA target sequence
caattatattcttttcttattc

SEQ ID NO: 40691 - DNA, 22 bp, Artificial sequence
  SiRNA target sequence
aattatattcttttcttattcc

SEQ ID NO: 40692 - DNA, 22 bp, Artificial sequence
  SiRNA target sequence
attatattcttttcttattcct

SEQ ID NO: 40693 - DNA, 22 bp, Artificial sequence
  SiRNA target sequence
ttatattcttttcttattcctg

SEQ ID NO: 40694 - DNA, 22 bp, Artificial sequence
  SiRNA target sequence
tatattcttttcttattcctgt

SEQ ID NO: 40695 - DNA, 22 bp, Artificial sequence
  SiRNA target sequence
atattcttttcttattcctgta

SEQ ID NO: 40696 - DNA, 22 bp, Artificial sequence
  SiRNA target sequence
tattcttttcttattcctgtac

SEQ ID NO: 40697 - DNA, 22 bp, Artificial sequence
  SiRNA target sequence
attcttttcttattcctgtacg

SEQ ID NO: 40698 - DNA, 22 bp, Artificial sequence
  SiRNA target sequence
ttcttttcttattcctgtacgc

SEQ ID NO: 40699 - DNA, 22 bp, Artificial sequence
  SiRNA target sequence
tcttttcttattcctgtacgcc

SEQ ID NO: 40700 - DNA, 22 bp, Artificial sequence
  SiRNA target sequence
cttttcttattcctgtacgcca

SEQ ID NO: 40701 - DNA, 22 bp, Artificial sequence
  SiRNA target sequence
ttttcttattcctgtacgccaa

SEQ ID NO: 40702 - DNA, 22 bp, Artificial sequence
  SiRNA target sequence
tttcttattcctgtacgccaat

SEQ ID NO: 40703 - DNA, 22 bp, Artificial sequence
  SiRNA target sequence
ttcttattcctgtacgccaatg

SEQ ID NO: 40704 - DNA, 22 bp, Artificial sequence
  SiRNA target sequence
tcttattcctgtacgccaatga

SEQ ID NO: 40705 - DNA, 22 bp, Artificial sequence
  SiRNA target sequence
cttattcctgtacgccaatgaa

SEQ ID NO: 40706 - DNA, 22 bp, Artificial sequence
  SiRNA target sequence
ttattcctgtacgccaatgaac

SEQ ID NO: 40707 - DNA, 22 bp, Artificial sequence
  SiRNA target sequence
tattcctgtacgccaatgaact

SEQ ID NO: 40708 - DNA, 22 bp, Artificial sequence
  SiRNA target sequence
attcctgtacgccaatgaacta

SEQ ID NO: 40709 - DNA, 22 bp, Artificial sequence
  SiRNA target sequence
ttcctgtacgccaatgaactat

SEQ ID NO: 40710 - DNA, 22 bp, Artificial sequence
  SiRNA target sequence
tcctgtacgccaatgaactatt

SEQ ID NO: 40711 - DNA, 22 bp, Artificial sequence
  SiRNA target sequence
cctgtacgccaatgaactattt

SEQ ID NO: 40712 - DNA, 22 bp, Artificial sequence
  SiRNA target sequence
ctgtacgccaatgaactatttt

SEQ ID NO: 40713 - DNA, 22 bp, Artificial sequence
  SiRNA target sequence
tgtacgccaatgaactattttc

SEQ ID NO: 40714 - DNA, 22 bp, Artificial sequence
  SiRNA target sequence
gtacgccaatgaactattttcg

SEQ ID NO: 40715 - DNA, 22 bp, Artificial sequence
  SiRNA target sequence
tacgccaatgaactattttcgc

SEQ ID NO: 40716 - DNA, 22 bp, Artificial sequence
  SiRNA target sequence
acgccaatgaactattttcgca

SEQ ID NO: 40717 - DNA, 22 bp, Artificial sequence
  SiRNA target sequence
cgccaatgaactattttcgcag

SEQ ID NO: 40718 - DNA, 22 bp, Artificial sequence
  SiRNA target sequence
gccaatgaactattttcgcagt

SEQ ID NO: 40719 - DNA, 22 bp, Artificial sequence
  SiRNA target sequence
ccaatgaactattttcgcagtt

SEQ ID NO: 40720 - DNA, 22 bp, Artificial sequence
  SiRNA target sequence
caatgaactattttcgcagttg

SEQ ID NO: 40721 - DNA, 22 bp, Artificial sequence
  SiRNA target sequence
aatgaactattttcgcagttgc

SEQ ID NO: 40722 - DNA, 22 bp, Artificial sequence
  SiRNA target sequence
atgaactattttcgcagttgca

SEQ ID NO: 40723 - DNA, 22 bp, Artificial sequence
  SiRNA target sequence
tgaactattttcgcagttgcaa

SEQ ID NO: 40724 - DNA, 22 bp, Artificial sequence
  SiRNA target sequence
gaactattttcgcagttgcaag

SEQ ID NO: 40725 - DNA, 22 bp, Artificial sequence
  SiRNA target sequence
aactattttcgcagttgcaagg

SEQ ID NO: 40726 - DNA, 22 bp, Artificial sequence
  SiRNA target sequence
actattttcgcagttgcaagga

SEQ ID NO: 40727 - DNA, 22 bp, Artificial sequence
  SiRNA target sequence
ctattttcgcagttgcaaggat

SEQ ID NO: 40728 - DNA, 22 bp, Artificial sequence
  SiRNA target sequence
tattttcgcagttgcaaggatg

SEQ ID NO: 40729 - DNA, 22 bp, Artificial sequence
  SiRNA target sequence
attttcgcagttgcaaggatgt

SEQ ID NO: 40730 - DNA, 22 bp, Artificial sequence
  SiRNA target sequence
ttttcgcagttgcaaggatgta

SEQ ID NO: 40731 - DNA, 22 bp, Artificial sequence
  SiRNA target sequence
tttcgcagttgcaaggatgtaa

SEQ ID NO: 40732 - DNA, 22 bp, Artificial sequence
  SiRNA target sequence
ttcgcagttgcaaggatgtaaa

SEQ ID NO: 40733 - DNA, 22 bp, Artificial sequence
  SiRNA target sequence
tcgcagttgcaaggatgtaaac

SEQ ID NO: 40734 - DNA, 22 bp, Artificial sequence
  SiRNA target sequence
cgcagttgcaaggatgtaaact

SEQ ID NO: 40735 - DNA, 22 bp, Artificial sequence
  SiRNA target sequence
gcagttgcaaggatgtaaacta

SEQ ID NO: 40736 - DNA, 22 bp, Artificial sequence
  SiRNA target sequence
cagttgcaaggatgtaaactaa

SEQ ID NO: 40737 - DNA, 22 bp, Artificial sequence
  SiRNA target sequence
agttgcaaggatgtaaactaat

SEQ ID NO: 40738 - DNA, 22 bp, Artificial sequence
  SiRNA target sequence
gttgcaaggatgtaaactaata

SEQ ID NO: 40739 - DNA, 22 bp, Artificial sequence
  SiRNA target sequence
ttgcaaggatgtaaactaataa

SEQ ID NO: 40740 - DNA, 22 bp, Artificial sequence
  SiRNA target sequence
tgcaaggatgtaaactaataat

SEQ ID NO: 40741 - DNA, 22 bp, Artificial sequence
  SiRNA target sequence
gcaaggatgtaaactaataatg

SEQ ID NO: 40742 - DNA, 22 bp, Artificial sequence
  SiRNA target sequence
caaggatgtaaactaataatgt

SEQ ID NO: 40743 - DNA, 22 bp, Artificial sequence
  SiRNA target sequence
aaggatgtaaactaataatgtg

SEQ ID NO: 40744 - DNA, 22 bp, Artificial sequence
  SiRNA target sequence
aggatgtaaactaataatgtga

SEQ ID NO: 40745 - DNA, 22 bp, Artificial sequence
  SiRNA target sequence
ggatgtaaactaataatgtgat

SEQ ID NO: 40746 - DNA, 22 bp, Artificial sequence
  SiRNA target sequence
gatgtaaactaataatgtgatt

SEQ ID NO: 40747 - DNA, 22 bp, Artificial sequence
  SiRNA target sequence
atgtaaactaataatgtgatta

SEQ ID NO: 40748 - DNA, 22 bp, Artificial sequence
  SiRNA target sequence
tgtaaactaataatgtgattaa

SEQ ID NO: 40749 - DNA, 22 bp, Artificial sequence
  SiRNA target sequence
gtaaactaataatgtgattaaa

SEQ ID NO: 40750 - DNA, 22 bp, Artificial sequence
  SiRNA target sequence
taaactaataatgtgattaaaa

SEQ ID NO: 40751 - DNA, 22 bp, Artificial sequence
  SiRNA target sequence
aaactaataatgtgattaaaat

SEQ ID NO: 40752 - DNA, 22 bp, Artificial sequence
  SiRNA target sequence
aactaataatgtgattaaaata

SEQ ID NO: 40753 - DNA, 22 bp, Artificial sequence
  SiRNA target sequence
actaataatgtgattaaaataa

SEQ ID NO: 40754 - DNA, 22 bp, Artificial sequence
  SiRNA target sequence
ctaataatgtgattaaaataat

SEQ ID NO: 40755 - DNA, 22 bp, Artificial sequence
  SiRNA target sequence
taataatgtgattaaaataata

SEQ ID NO: 40756 - DNA, 22 bp, Artificial sequence
  SiRNA target sequence
aataatgtgattaaaataataa

SEQ ID NO: 40757 - DNA, 22 bp, Artificial sequence
  SiRNA target sequence
ataatgtgattaaaataataaa

SEQ ID NO: 40758 - DNA, 22 bp, Artificial sequence
  SiRNA target sequence
taatgtgattaaaataataaac

SEQ ID NO: 40759 - DNA, 22 bp, Artificial sequence
  SiRNA target sequence
aatgtgattaaaataataaaca

SEQ ID NO: 40760 - DNA, 22 bp, Artificial sequence
  SiRNA target sequence
atgtgattaaaataataaacat

SEQ ID NO: 40761 - DNA, 22 bp, Artificial sequence
  SiRNA target sequence
tgtgattaaaataataaacata

SEQ ID NO: 40762 - DNA, 22 bp, Artificial sequence
  SiRNA target sequence
gtgattaaaataataaacatat

SEQ ID NO: 40763 - DNA, 22 bp, Artificial sequence
  SiRNA target sequence
tgattaaaataataaacatatt

SEQ ID NO: 40764 - DNA, 22 bp, Artificial sequence
  SiRNA target sequence
gattaaaataataaacatattt

SEQ ID NO: 40765 - DNA, 22 bp, Artificial sequence
  SiRNA target sequence
attaaaataataaacatatttg

SEQ ID NO: 40766 - DNA, 22 bp, Artificial sequence
  SiRNA target sequence
ttaaaataataaacatatttgt

SEQ ID NO: 40767 - DNA, 22 bp, Artificial sequence
  SiRNA target sequence
taaaataataaacatatttgtc

SEQ ID NO: 40768 - DNA, 22 bp, Artificial sequence
  SiRNA target sequence
aaaataataaacatatttgtca

SEQ ID NO: 40769 - DNA, 22 bp, Artificial sequence
  SiRNA target sequence
aaataataaacatatttgtcaa

SEQ ID NO: 40770 - DNA, 22 bp, Artificial sequence
  SiRNA target sequence
aataataaacatatttgtcaac

SEQ ID NO: 40771 - DNA, 22 bp, Artificial sequence
  SiRNA target sequence
ataataaacatatttgtcaacc

SEQ ID NO: 40772 - DNA, 22 bp, Artificial sequence
  SiRNA target sequence
taataaacatatttgtcaaccc

SEQ ID NO: 40773 - DNA, 22 bp, Artificial sequence
  SiRNA target sequence
aataaacatatttgtcaaccct

SEQ ID NO: 40774 - DNA, 22 bp, Artificial sequence
  SiRNA target sequence
ataaacatatttgtcaacccta

SEQ ID NO: 40775 - DNA, 22 bp, Artificial sequence
  SiRNA target sequence
taaacatatttgtcaaccctaa

SEQ ID NO: 40776 - DNA, 22 bp, Artificial sequence
  SiRNA target sequence
aaacatatttgtcaaccctaaa

SEQ ID NO: 40777 - DNA, 22 bp, Artificial sequence
  SiRNA target sequence
aacatatttgtcaaccctaaat

SEQ ID NO: 40778 - DNA, 22 bp, Artificial sequence
  SiRNA target sequence
acatatttgtcaaccctaaatt

SEQ ID NO: 40779 - DNA, 22 bp, Artificial sequence
  SiRNA target sequence
catatttgtcaaccctaaattt

SEQ ID NO: 40780 - DNA, 22 bp, Artificial sequence
  SiRNA target sequence
atatttgtcaaccctaaatttg

SEQ ID NO: 40781 - DNA, 22 bp, Artificial sequence
  SiRNA target sequence
tatttgtcaaccctaaatttgt

SEQ ID NO: 40782 - DNA, 22 bp, Artificial sequence
  SiRNA target sequence
atttgtcaaccctaaatttgta

SEQ ID NO: 40783 - DNA, 22 bp, Artificial sequence
  SiRNA target sequence
tttgtcaaccctaaatttgtat

SEQ ID NO: 40784 - DNA, 22 bp, Artificial sequence
  SiRNA target sequence
ttgtcaaccctaaatttgtata

SEQ ID NO: 40785 - DNA, 22 bp, Artificial sequence
  SiRNA target sequence
tgtcaaccctaaatttgtataa

SEQ ID NO: 40786 - DNA, 22 bp, Artificial sequence
  SiRNA target sequence
gtcaaccctaaatttgtataaa

SEQ ID NO: 40787 - DNA, 22 bp, Artificial sequence
  SiRNA target sequence
tcaaccctaaatttgtataaat

SEQ ID NO: 40788 - DNA, 22 bp, Artificial sequence
  SiRNA target sequence
caaccctaaatttgtataaatt

SEQ ID NO: 40789 - DNA, 22 bp, Artificial sequence
  SiRNA target sequence
aaccctaaatttgtataaattg

SEQ ID NO: 40790 - DNA, 22 bp, Artificial sequence
  SiRNA target sequence
accctaaatttgtataaattga

SEQ ID NO: 40791 - DNA, 22 bp, Artificial sequence
  SiRNA target sequence
ccctaaatttgtataaattgac

SEQ ID NO: 40792 - DNA, 22 bp, Artificial sequence
  SiRNA target sequence
cctaaatttgtataaattgacg

SEQ ID NO: 40793 - DNA, 22 bp, Artificial sequence
  SiRNA target sequence
ctaaatttgtataaattgacga

SEQ ID NO: 40794 - DNA, 22 bp, Artificial sequence
  SiRNA target sequence
taaatttgtataaattgacgaa

SEQ ID NO: 40795 - DNA, 22 bp, Artificial sequence
  SiRNA target sequence
aaatttgtataaattgacgaac

SEQ ID NO: 40796 - DNA, 22 bp, Artificial sequence
  SiRNA target sequence
aatttgtataaattgacgaaca

SEQ ID NO: 40797 - DNA, 22 bp, Artificial sequence
  SiRNA target sequence
atttgtataaattgacgaacac

SEQ ID NO: 40798 - DNA, 22 bp, Artificial sequence
  SiRNA target sequence
tttgtataaattgacgaacacg

SEQ ID NO: 40799 - DNA, 22 bp, Artificial sequence
  SiRNA target sequence
ttgtataaattgacgaacacgc

SEQ ID NO: 40800 - DNA, 22 bp, Artificial sequence
  SiRNA target sequence
tgtataaattgacgaacacgcc

SEQ ID NO: 40801 - DNA, 22 bp, Artificial sequence
  SiRNA target sequence
gtataaattgacgaacacgcca

SEQ ID NO: 40802 - DNA, 22 bp, Artificial sequence
  SiRNA target sequence
tataaattgacgaacacgccaa

SEQ ID NO: 40803 - DNA, 22 bp, Artificial sequence
  SiRNA target sequence
ataaattgacgaacacgccaat

SEQ ID NO: 40804 - DNA, 22 bp, Artificial sequence
  SiRNA target sequence
taaattgacgaacacgccaata

SEQ ID NO: 40805 - DNA, 22 bp, Artificial sequence
  SiRNA target sequence
aaattgacgaacacgccaatat

SEQ ID NO: 40806 - DNA, 22 bp, Artificial sequence
  SiRNA target sequence
aattgacgaacacgccaatata

SEQ ID NO: 40807 - DNA, 22 bp, Artificial sequence
  SiRNA target sequence
attgacgaacacgccaatataa

SEQ ID NO: 40808 - DNA, 22 bp, Artificial sequence
  SiRNA target sequence
ttgacgaacacgccaatataac

SEQ ID NO: 40809 - DNA, 22 bp, Artificial sequence
  SiRNA target sequence
tgacgaacacgccaatataact

SEQ ID NO: 40810 - DNA, 22 bp, Artificial sequence
  SiRNA target sequence
gacgaacacgccaatataactg

SEQ ID NO: 40811 - DNA, 22 bp, Artificial sequence
  SiRNA target sequence
acgaacacgccaatataactgt

SEQ ID NO: 40812 - DNA, 22 bp, Artificial sequence
  SiRNA target sequence
cgaacacgccaatataactgta

SEQ ID NO: 40813 - DNA, 22 bp, Artificial sequence
  SiRNA target sequence
gaacacgccaatataactgtaa

SEQ ID NO: 40814 - DNA, 22 bp, Artificial sequence
  SiRNA target sequence
aacacgccaatataactgtaaa

SEQ ID NO: 40815 - DNA, 22 bp, Artificial sequence
  SiRNA target sequence
acacgccaatataactgtaaaa

SEQ ID NO: 40816 - DNA, 22 bp, Artificial sequence
  SiRNA target sequence
cacgccaatataactgtaaaaa

SEQ ID NO: 40817 - DNA, 22 bp, Artificial sequence
  SiRNA target sequence
acgccaatataactgtaaaaaa

SEQ ID NO: 40818 - DNA, 22 bp, Artificial sequence
  SiRNA target sequence
cgccaatataactgtaaaaaaa

SEQ ID NO: 40819 - DNA, 22 bp, Artificial sequence
  SiRNA target sequence
gccaatataactgtaaaaaaaa

SEQ ID NO: 40820 - DNA, 22 bp, Artificial sequence
  SiRNA target sequence
ccaatataactgtaaaaaaaat

SEQ ID NO: 40821 - DNA, 22 bp, Artificial sequence
  SiRNA target sequence
caatataactgtaaaaaaaata

SEQ ID NO: 40822 - DNA, 22 bp, Artificial sequence
  SiRNA target sequence
aatataactgtaaaaaaaatat

SEQ ID NO: 40823 - DNA, 22 bp, Artificial sequence
  SiRNA target sequence
atataactgtaaaaaaaatatt

SEQ ID NO: 40824 - DNA, 22 bp, Artificial sequence
  SiRNA target sequence
tataactgtaaaaaaaatattt

SEQ ID NO: 40825 - DNA, 22 bp, Artificial sequence
  SiRNA target sequence
ataactgtaaaaaaaatattta

SEQ ID NO: 40826 - DNA, 22 bp, Artificial sequence
  SiRNA target sequence
taactgtaaaaaaaatatttat

SEQ ID NO: 40827 - DNA, 22 bp, Artificial sequence
  SiRNA target sequence
aactgtaaaaaaaatatttatg

SEQ ID NO: 40828 - DNA, 22 bp, Artificial sequence
  SiRNA target sequence
actgtaaaaaaaatatttatga

SEQ ID NO: 40829 - DNA, 22 bp, Artificial sequence
  SiRNA target sequence
ctgtaaaaaaaatatttatgat

SEQ ID NO: 40830 - DNA, 22 bp, Artificial sequence
  SiRNA target sequence
tgtaaaaaaaatatttatgata

SEQ ID NO: 40831 - DNA, 22 bp, Artificial sequence
  SiRNA target sequence
gtaaaaaaaatatttatgatat

SEQ ID NO: 40832 - DNA, 22 bp, Artificial sequence
  SiRNA target sequence
taaaaaaaatatttatgatatt

SEQ ID NO: 40833 - DNA, 22 bp, Artificial sequence
  SiRNA target sequence
aaaaaaaatatttatgatatta

SEQ ID NO: 40834 - DNA, 22 bp, Artificial sequence
  SiRNA target sequence
aaaaaaatatttatgatattaa

SEQ ID NO: 40835 - DNA, 22 bp, Artificial sequence
  SiRNA target sequence
aaaaaatatttatgatattaac

SEQ ID NO: 40836 - DNA, 22 bp, Artificial sequence
  SiRNA target sequence
aaaaatatttatgatattaaca

SEQ ID NO: 40837 - DNA, 22 bp, Artificial sequence
  SiRNA target sequence
aaaatatttatgatattaacaa

SEQ ID NO: 40838 - DNA, 22 bp, Artificial sequence
  SiRNA target sequence
aaatatttatgatattaacaaa

SEQ ID NO: 40839 - DNA, 22 bp, Artificial sequence
  SiRNA target sequence
aatatttatgatattaacaaat

SEQ ID NO: 40840 - DNA, 22 bp, Artificial sequence
  SiRNA target sequence
atatttatgatattaacaaata

SEQ ID NO: 40841 - DNA, 22 bp, Artificial sequence
  SiRNA target sequence
tatttatgatattaacaaataa

SEQ ID NO: 40842 - DNA, 22 bp, Artificial sequence
  SiRNA target sequence
atttatgatattaacaaataaa

SEQ ID NO: 40843 - DNA, 22 bp, Artificial sequence
  SiRNA target sequence
tttatgatattaacaaataaaa

SEQ ID NO: 40844 - DNA, 22 bp, Artificial sequence
  SiRNA target sequence
ttatgatattaacaaataaaac

SEQ ID NO: 40845 - DNA, 22 bp, Artificial sequence
  SiRNA target sequence
tatgatattaacaaataaaact

SEQ ID NO: 40846 - DNA, 22 bp, Artificial sequence
  SiRNA target sequence
atgatattaacaaataaaactt

SEQ ID NO: 40847 - DNA, 22 bp, Artificial sequence
  SiRNA target sequence
tgatattaacaaataaaacttc

SEQ ID NO: 40848 - DNA, 22 bp, Artificial sequence
  SiRNA target sequence
gatattaacaaataaaacttcg

SEQ ID NO: 40849 - DNA, 22 bp, Artificial sequence
  SiRNA target sequence
atattaacaaataaaacttcga

SEQ ID NO: 40850 - DNA, 22 bp, Artificial sequence
  SiRNA target sequence
tattaacaaataaaacttcgat

SEQ ID NO: 40851 - DNA, 22 bp, Artificial sequence
  SiRNA target sequence
attaacaaataaaacttcgatc

SEQ ID NO: 40852 - DNA, 22 bp, Artificial sequence
  SiRNA target sequence
ttaacaaataaaacttcgatca

SEQ ID NO: 40853 - DNA, 22 bp, Artificial sequence
  SiRNA target sequence
taacaaataaaacttcgatcaa

SEQ ID NO: 40854 - DNA, 22 bp, Artificial sequence
  SiRNA target sequence
aacaaataaaacttcgatcaat

SEQ ID NO: 40855 - DNA, 22 bp, Artificial sequence
  SiRNA target sequence
acaaataaaacttcgatcaatt

SEQ ID NO: 40856 - DNA, 22 bp, Artificial sequence
  SiRNA target sequence
caaataaaacttcgatcaattc

SEQ ID NO: 40857 - DNA, 22 bp, Artificial sequence
  SiRNA target sequence
aaataaaacttcgatcaattca

SEQ ID NO: 40858 - DNA, 22 bp, Artificial sequence
  SiRNA target sequence
aataaaacttcgatcaattcac

SEQ ID NO: 40859 - DNA, 22 bp, Artificial sequence
  SiRNA target sequence
ataaaacttcgatcaattcact

SEQ ID NO: 40860 - DNA, 22 bp, Artificial sequence
  SiRNA target sequence
taaaacttcgatcaattcactt

SEQ ID NO: 40861 - DNA, 22 bp, Artificial sequence
  SiRNA target sequence
aaaacttcgatcaattcactta

SEQ ID NO: 40862 - DNA, 22 bp, Artificial sequence
  SiRNA target sequence
aaacttcgatcaattcacttat

SEQ ID NO: 40863 - DNA, 22 bp, Artificial sequence
  SiRNA target sequence
aacttcgatcaattcacttatt

SEQ ID NO: 40864 - DNA, 22 bp, Artificial sequence
  SiRNA target sequence
acttcgatcaattcacttattg

SEQ ID NO: 40865 - DNA, 22 bp, Artificial sequence
  SiRNA target sequence
cttcgatcaattcacttattgc

SEQ ID NO: 40866 - DNA, 22 bp, Artificial sequence
  SiRNA target sequence
ttcgatcaattcacttattgct

SEQ ID NO: 40867 - DNA, 22 bp, Artificial sequence
  SiRNA target sequence
tcgatcaattcacttattgctt

SEQ ID NO: 40868 - DNA, 22 bp, Artificial sequence
  SiRNA target sequence
cgatcaattcacttattgcttt

SEQ ID NO: 40869 - DNA, 22 bp, Artificial sequence
  SiRNA target sequence
gatcaattcacttattgcttta

SEQ ID NO: 40870 - DNA, 22 bp, Artificial sequence
  SiRNA target sequence
atcaattcacttattgctttac

SEQ ID NO: 40871 - DNA, 22 bp, Artificial sequence
  SiRNA target sequence
tcaattcacttattgctttact

SEQ ID NO: 40872 - DNA, 22 bp, Artificial sequence
  SiRNA target sequence
caattcacttattgctttactt

SEQ ID NO: 40873 - DNA, 22 bp, Artificial sequence
  SiRNA target sequence
aattcacttattgctttacttt

SEQ ID NO: 40874 - DNA, 22 bp, Artificial sequence
  SiRNA target sequence
attcacttattgctttactttc

SEQ ID NO: 40875 - DNA, 22 bp, Artificial sequence
  SiRNA target sequence
ttcacttattgctttactttct

SEQ ID NO: 40876 - DNA, 22 bp, Artificial sequence
  SiRNA target sequence
tcacttattgctttactttctc

SEQ ID NO: 40877 - DNA, 22 bp, Artificial sequence
  SiRNA target sequence
cacttattgctttactttctcg

SEQ ID NO: 40878 - DNA, 22 bp, Artificial sequence
  SiRNA target sequence
acttattgctttactttctcgg

SEQ ID NO: 40879 - DNA, 22 bp, Artificial sequence
  SiRNA target sequence
cttattgctttactttctcggt

SEQ ID NO: 40880 - DNA, 22 bp, Artificial sequence
  SiRNA target sequence
ttattgctttactttctcggtc

SEQ ID NO: 40881 - DNA, 22 bp, Artificial sequence
  SiRNA target sequence
tattgctttactttctcggtct

SEQ ID NO: 40882 - DNA, 22 bp, Artificial sequence
  SiRNA target sequence
attgctttactttctcggtcta

SEQ ID NO: 40883 - DNA, 22 bp, Artificial sequence
  SiRNA target sequence
ttgctttactttctcggtctat

SEQ ID NO: 40884 - DNA, 22 bp, Artificial sequence
  SiRNA target sequence
tgctttactttctcggtctatt

SEQ ID NO: 40885 - DNA, 22 bp, Artificial sequence
  SiRNA target sequence
gctttactttctcggtctatta

SEQ ID NO: 40886 - DNA, 22 bp, Artificial sequence
  SiRNA target sequence
ctttactttctcggtctattat

SEQ ID NO: 40887 - DNA, 22 bp, Artificial sequence
  SiRNA target sequence
tttactttctcggtctattatt

SEQ ID NO: 40888 - DNA, 22 bp, Artificial sequence
  SiRNA target sequence
ttactttctcggtctattattg

SEQ ID NO: 40889 - DNA, 22 bp, Artificial sequence
  SiRNA target sequence
tactttctcggtctattattgt

SEQ ID NO: 40890 - DNA, 22 bp, Artificial sequence
  SiRNA target sequence
actttctcggtctattattgtt

SEQ ID NO: 40891 - DNA, 22 bp, Artificial sequence
  SiRNA target sequence
ctttctcggtctattattgttt

SEQ ID NO: 40892 - DNA, 22 bp, Artificial sequence
  SiRNA target sequence
tttctcggtctattattgtttg

SEQ ID NO: 40893 - DNA, 22 bp, Artificial sequence
  SiRNA target sequence
ttctcggtctattattgtttgt

SEQ ID NO: 40894 - DNA, 22 bp, Artificial sequence
  SiRNA target sequence
tctcggtctattattgtttgta

SEQ ID NO: 40895 - DNA, 22 bp, Artificial sequence
  SiRNA target sequence
ctcggtctattattgtttgtat

SEQ ID NO: 40896 - DNA, 22 bp, Artificial sequence
  SiRNA target sequence
tcggtctattattgtttgtatt

SEQ ID NO: 40897 - DNA, 22 bp, Artificial sequence
  SiRNA target sequence
cggtctattattgtttgtattt

SEQ ID NO: 40898 - DNA, 22 bp, Artificial sequence
  SiRNA target sequence
ggtctattattgtttgtatttc

SEQ ID NO: 40899 - DNA, 22 bp, Artificial sequence
  SiRNA target sequence
gtctattattgtttgtatttca

SEQ ID NO: 40900 - DNA, 22 bp, Artificial sequence
  SiRNA target sequence
tctattattgtttgtatttcac

SEQ ID NO: 40901 - DNA, 22 bp, Artificial sequence
  SiRNA target sequence
ctattattgtttgtatttcacc

SEQ ID NO: 40902 - DNA, 22 bp, Artificial sequence
  SiRNA target sequence
tattattgtttgtatttcaccg

SEQ ID NO: 40903 - DNA, 22 bp, Artificial sequence
  SiRNA target sequence
attattgtttgtatttcaccgc

SEQ ID NO: 40904 - DNA, 22 bp, Artificial sequence
  SiRNA target sequence
ttattgtttgtatttcaccgca

SEQ ID NO: 40905 - DNA, 22 bp, Artificial sequence
  SiRNA target sequence
tattgtttgtatttcaccgcat

SEQ ID NO: 40906 - DNA, 22 bp, Artificial sequence
  SiRNA target sequence
attgtttgtatttcaccgcatc

SEQ ID NO: 40907 - DNA, 22 bp, Artificial sequence
  SiRNA target sequence
ttgtttgtatttcaccgcatcc

SEQ ID NO: 40908 - DNA, 22 bp, Artificial sequence
  SiRNA target sequence
tgtttgtatttcaccgcatcct

SEQ ID NO: 40909 - DNA, 22 bp, Artificial sequence
  SiRNA target sequence
gtttgtatttcaccgcatccta

SEQ ID NO: 40910 - DNA, 22 bp, Artificial sequence
  SiRNA target sequence
tttgtatttcaccgcatcctat

SEQ ID NO: 40911 - DNA, 22 bp, Artificial sequence
  SiRNA target sequence
ttgtatttcaccgcatcctatt

SEQ ID NO: 40912 - DNA, 22 bp, Artificial sequence
  SiRNA target sequence
tgtatttcaccgcatcctattt

SEQ ID NO: 40913 - DNA, 22 bp, Artificial sequence
  SiRNA target sequence
gtatttcaccgcatcctatttt

SEQ ID NO: 40914 - DNA, 22 bp, Artificial sequence
  SiRNA target sequence
tatttcaccgcatcctatttta

SEQ ID NO: 40915 - DNA, 22 bp, Artificial sequence
  SiRNA target sequence
atttcaccgcatcctattttat

SEQ ID NO: 40916 - DNA, 22 bp, Artificial sequence
  SiRNA target sequence
tttcaccgcatcctattttatt

SEQ ID NO: 40917 - DNA, 22 bp, Artificial sequence
  SiRNA target sequence
ttcaccgcatcctattttattg

SEQ ID NO: 40918 - DNA, 22 bp, Artificial sequence
  SiRNA target sequence
tcaccgcatcctattttattgt

SEQ ID NO: 40919 - DNA, 22 bp, Artificial sequence
  SiRNA target sequence
caccgcatcctattttattgta

SEQ ID NO: 40920 - DNA, 22 bp, Artificial sequence
  SiRNA target sequence
accgcatcctattttattgtat

SEQ ID NO: 40921 - DNA, 22 bp, Artificial sequence
  SiRNA target sequence
ccgcatcctattttattgtatc

SEQ ID NO: 40922 - DNA, 22 bp, Artificial sequence
  SiRNA target sequence
cgcatcctattttattgtatct

SEQ ID NO: 40923 - DNA, 22 bp, Artificial sequence
  SiRNA target sequence
gcatcctattttattgtatcta

SEQ ID NO: 40924 - DNA, 22 bp, Artificial sequence
  SiRNA target sequence
catcctattttattgtatctac

SEQ ID NO: 40925 - DNA, 22 bp, Artificial sequence
  SiRNA target sequence
atcctattttattgtatctact

SEQ ID NO: 40926 - DNA, 22 bp, Artificial sequence
  SiRNA target sequence
tcctattttattgtatctacta

SEQ ID NO: 40927 - DNA, 22 bp, Artificial sequence
  SiRNA target sequence
cctattttattgtatctactaa

SEQ ID NO: 40928 - DNA, 22 bp, Artificial sequence
  SiRNA target sequence
ctattttattgtatctactaag

SEQ ID NO: 40929 - DNA, 22 bp, Artificial sequence
  SiRNA target sequence
tattttattgtatctactaagt

SEQ ID NO: 40930 - DNA, 22 bp, Artificial sequence
  SiRNA target sequence
attttattgtatctactaagtt

SEQ ID NO: 40931 - DNA, 22 bp, Artificial sequence
  SiRNA target sequence
ttttattgtatctactaagttc

SEQ ID NO: 40932 - DNA, 22 bp, Artificial sequence
  SiRNA target sequence
tttattgtatctactaagttcc

SEQ ID NO: 40933 - DNA, 22 bp, Artificial sequence
  SiRNA target sequence
ttattgtatctactaagttcca

SEQ ID NO: 40934 - DNA, 22 bp, Artificial sequence
  SiRNA target sequence
tattgtatctactaagttccat

SEQ ID NO: 40935 - DNA, 22 bp, Artificial sequence
  SiRNA target sequence
attgtatctactaagttccata

SEQ ID NO: 40936 - DNA, 22 bp, Artificial sequence
  SiRNA target sequence
ttgtatctactaagttccatat

SEQ ID NO: 40937 - DNA, 22 bp, Artificial sequence
  SiRNA target sequence
tgtatctactaagttccatatt

SEQ ID NO: 40938 - DNA, 22 bp, Artificial sequence
  SiRNA target sequence
gtatctactaagttccatattt

SEQ ID NO: 40939 - DNA, 22 bp, Artificial sequence
  SiRNA target sequence
tatctactaagttccatattta

SEQ ID NO: 40940 - DNA, 22 bp, Artificial sequence
  SiRNA target sequence
atctactaagttccatatttat

SEQ ID NO: 40941 - DNA, 22 bp, Artificial sequence
  SiRNA target sequence
tctactaagttccatatttata

SEQ ID NO: 40942 - DNA, 22 bp, Artificial sequence
  SiRNA target sequence
ctactaagttccatatttataa

SEQ ID NO: 40943 - DNA, 22 bp, Artificial sequence
  SiRNA target sequence
tactaagttccatatttataaa

SEQ ID NO: 40944 - DNA, 22 bp, Artificial sequence
  SiRNA target sequence
actaagttccatatttataaaa

SEQ ID NO: 40945 - DNA, 22 bp, Artificial sequence
  SiRNA target sequence
ctaagttccatatttataaaat

SEQ ID NO: 40946 - DNA, 22 bp, Artificial sequence
  SiRNA target sequence
taagttccatatttataaaatt

SEQ ID NO: 40947 - DNA, 22 bp, Artificial sequence
  SiRNA target sequence
aagttccatatttataaaattt

SEQ ID NO: 40948 - DNA, 22 bp, Artificial sequence
  SiRNA target sequence
agttccatatttataaaatttt

SEQ ID NO: 40949 - DNA, 22 bp, Artificial sequence
  SiRNA target sequence
gttccatatttataaaattttt

SEQ ID NO: 40950 - DNA, 22 bp, Artificial sequence
  SiRNA target sequence
ttccatatttataaaattttta

SEQ ID NO: 40951 - DNA, 22 bp, Artificial sequence
  SiRNA target sequence
tccatatttataaaatttttaa

SEQ ID NO: 40952 - DNA, 22 bp, Artificial sequence
  SiRNA target sequence
ccatatttataaaatttttaaa

SEQ ID NO: 40953 - DNA, 22 bp, Artificial sequence
  SiRNA target sequence
catatttataaaatttttaaat

SEQ ID NO: 40954 - DNA, 22 bp, Artificial sequence
  SiRNA target sequence
atatttataaaatttttaaatg

SEQ ID NO: 40955 - DNA, 22 bp, Artificial sequence
  SiRNA target sequence
tatttataaaatttttaaatga

SEQ ID NO: 40956 - DNA, 22 bp, Artificial sequence
  SiRNA target sequence
atttataaaatttttaaatgaa

SEQ ID NO: 40957 - DNA, 22 bp, Artificial sequence
  SiRNA target sequence
tttataaaatttttaaatgaat

SEQ ID NO: 40958 - DNA, 22 bp, Artificial sequence
  SiRNA target sequence
ttataaaatttttaaatgaatt

SEQ ID NO: 40959 - DNA, 22 bp, Artificial sequence
  SiRNA target sequence
tataaaatttttaaatgaattt

SEQ ID NO: 40960 - DNA, 22 bp, Artificial sequence
  SiRNA target sequence
ataaaatttttaaatgaatttt

SEQ ID NO: 40961 - DNA, 22 bp, Artificial sequence
  SiRNA target sequence
taaaatttttaaatgaattttt

SEQ ID NO: 40962 - DNA, 22 bp, Artificial sequence
  SiRNA target sequence
aaaatttttaaatgaatttttt

SEQ ID NO: 40963 - DNA, 22 bp, Artificial sequence
  SiRNA target sequence
aaatttttaaatgaattttttc

SEQ ID NO: 40964 - DNA, 22 bp, Artificial sequence
  SiRNA target sequence
aatttttaaatgaattttttcc

SEQ ID NO: 40965 - DNA, 22 bp, Artificial sequence
  SiRNA target sequence
atttttaaatgaattttttcct

SEQ ID NO: 40966 - DNA, 22 bp, Artificial sequence
  SiRNA target sequence
tttttaaatgaattttttcctg

SEQ ID NO: 40967 - DNA, 22 bp, Artificial sequence
  SiRNA target sequence
ttttaaatgaattttttcctgt

SEQ ID NO: 40968 - DNA, 22 bp, Artificial sequence
  SiRNA target sequence
tttaaatgaattttttcctgtc

SEQ ID NO: 40969 - DNA, 22 bp, Artificial sequence
  SiRNA target sequence
ttaaatgaattttttcctgtca

SEQ ID NO: 40970 - DNA, 22 bp, Artificial sequence
  SiRNA target sequence
taaatgaattttttcctgtcag

SEQ ID NO: 40971 - DNA, 22 bp, Artificial sequence
  SiRNA target sequence
aaatgaattttttcctgtcagt

SEQ ID NO: 40972 - DNA, 22 bp, Artificial sequence
  SiRNA target sequence
aatgaattttttcctgtcagtc

SEQ ID NO: 40973 - DNA, 22 bp, Artificial sequence
  SiRNA target sequence
atgaattttttcctgtcagtct

SEQ ID NO: 40974 - DNA, 22 bp, Artificial sequence
  SiRNA target sequence
tgaattttttcctgtcagtctg

SEQ ID NO: 40975 - DNA, 22 bp, Artificial sequence
  SiRNA target sequence
gaattttttcctgtcagtctga

SEQ ID NO: 40976 - DNA, 22 bp, Artificial sequence
  SiRNA target sequence
aattttttcctgtcagtctgaa

SEQ ID NO: 40977 - DNA, 22 bp, Artificial sequence
  SiRNA target sequence
attttttcctgtcagtctgaat

SEQ ID NO: 40978 - DNA, 22 bp, Artificial sequence
  SiRNA target sequence
ttttttcctgtcagtctgaata

SEQ ID NO: 40979 - DNA, 22 bp, Artificial sequence
  SiRNA target sequence
tttttcctgtcagtctgaatac

SEQ ID NO: 40980 - DNA, 22 bp, Artificial sequence
  SiRNA target sequence
ttttcctgtcagtctgaataca

SEQ ID NO: 40981 - DNA, 22 bp, Artificial sequence
  SiRNA target sequence
tttcctgtcagtctgaatacat

SEQ ID NO: 40982 - DNA, 22 bp, Artificial sequence
  SiRNA target sequence
ttcctgtcagtctgaatacatg

SEQ ID NO: 40983 - DNA, 22 bp, Artificial sequence
  SiRNA target sequence
tcctgtcagtctgaatacatgt

SEQ ID NO: 40984 - DNA, 22 bp, Artificial sequence
  SiRNA target sequence
cctgtcagtctgaatacatgtt

SEQ ID NO: 40985 - DNA, 22 bp, Artificial sequence
  SiRNA target sequence
ctgtcagtctgaatacatgttg

SEQ ID NO: 40986 - DNA, 22 bp, Artificial sequence
  SiRNA target sequence
tgtcagtctgaatacatgttga

SEQ ID NO: 40987 - DNA, 22 bp, Artificial sequence
  SiRNA target sequence
gtcagtctgaatacatgttgaa

SEQ ID NO: 40988 - DNA, 22 bp, Artificial sequence
  SiRNA target sequence
tcagtctgaatacatgttgaac

SEQ ID NO: 40989 - DNA, 22 bp, Artificial sequence
  SiRNA target sequence
cagtctgaatacatgttgaacg

SEQ ID NO: 40990 - DNA, 22 bp, Artificial sequence
  SiRNA target sequence
agtctgaatacatgttgaacgg

SEQ ID NO: 40991 - DNA, 22 bp, Artificial sequence
  SiRNA target sequence
gtctgaatacatgttgaacggg

SEQ ID NO: 40992 - DNA, 22 bp, Artificial sequence
  SiRNA target sequence
tctgaatacatgttgaacgggt

SEQ ID NO: 40993 - DNA, 22 bp, Artificial sequence
  SiRNA target sequence
ctgaatacatgttgaacgggtg

SEQ ID NO: 40994 - DNA, 22 bp, Artificial sequence
  SiRNA target sequence
tgaatacatgttgaacgggtgt

SEQ ID NO: 40995 - DNA, 22 bp, Artificial sequence
  SiRNA target sequence
gaatacatgttgaacgggtgta

SEQ ID NO: 40996 - DNA, 22 bp, Artificial sequence
  SiRNA target sequence
aatacatgttgaacgggtgtaa

SEQ ID NO: 40997 - DNA, 22 bp, Artificial sequence
  SiRNA target sequence
atacatgttgaacgggtgtaac

SEQ ID NO: 40998 - DNA, 22 bp, Artificial sequence
  SiRNA target sequence
tacatgttgaacgggtgtaaca

SEQ ID NO: 40999 - DNA, 22 bp, Artificial sequence
  SiRNA target sequence
acatgttgaacgggtgtaacaa

SEQ ID NO: 41000 - DNA, 22 bp, Artificial sequence
  SiRNA target sequence
catgttgaacgggtgtaacaaa

SEQ ID NO: 41001 - DNA, 22 bp, Artificial sequence
  SiRNA target sequence
atgttgaacgggtgtaacaaat

SEQ ID NO: 41002 - DNA, 22 bp, Artificial sequence
  SiRNA target sequence
tgttgaacgggtgtaacaaata

SEQ ID NO: 41003 - DNA, 22 bp, Artificial sequence
  SiRNA target sequence
gttgaacgggtgtaacaaatat

SEQ ID NO: 41004 - DNA, 22 bp, Artificial sequence
  SiRNA target sequence
ttgaacgggtgtaacaaatata

SEQ ID NO: 41005 - DNA, 22 bp, Artificial sequence
  SiRNA target sequence
tgaacgggtgtaacaaatataa

SEQ ID NO: 41006 - DNA, 22 bp, Artificial sequence
  SiRNA target sequence
gaacgggtgtaacaaatataaa

SEQ ID NO: 41007 - DNA, 22 bp, Artificial sequence
  SiRNA target sequence
aacgggtgtaacaaatataaaa

SEQ ID NO: 41008 - DNA, 22 bp, Artificial sequence
  SiRNA target sequence
acgggtgtaacaaatataaaat

SEQ ID NO: 41009 - DNA, 22 bp, Artificial sequence
  SiRNA target sequence
cgggtgtaacaaatataaaatt

SEQ ID NO: 41010 - DNA, 22 bp, Artificial sequence
  SiRNA target sequence
gggtgtaacaaatataaaattg

SEQ ID NO: 41011 - DNA, 22 bp, Artificial sequence
  SiRNA target sequence
ggtgtaacaaatataaaattgt

SEQ ID NO: 41012 - DNA, 22 bp, Artificial sequence
  SiRNA target sequence
gtgtaacaaatataaaattgtt

SEQ ID NO: 41013 - DNA, 22 bp, Artificial sequence
  SiRNA target sequence
tgtaacaaatataaaattgtta

SEQ ID NO: 41014 - DNA, 22 bp, Artificial sequence
  SiRNA target sequence
gtaacaaatataaaattgttaa

SEQ ID NO: 41015 - DNA, 22 bp, Artificial sequence
  SiRNA target sequence
taacaaatataaaattgttaag

SEQ ID NO: 41016 - DNA, 22 bp, Artificial sequence
  SiRNA target sequence
aacaaatataaaattgttaagt

SEQ ID NO: 41017 - DNA, 22 bp, Artificial sequence
  SiRNA target sequence
acaaatataaaattgttaagtt

SEQ ID NO: 41018 - DNA, 22 bp, Artificial sequence
  SiRNA target sequence
caaatataaaattgttaagttc

SEQ ID NO: 41019 - DNA, 22 bp, Artificial sequence
  SiRNA target sequence
aaatataaaattgttaagttct

SEQ ID NO: 41020 - DNA, 22 bp, Artificial sequence
  SiRNA target sequence
aatataaaattgttaagttctg

SEQ ID NO: 41021 - DNA, 22 bp, Artificial sequence
  SiRNA target sequence
atataaaattgttaagttctga

SEQ ID NO: 41022 - DNA, 22 bp, Artificial sequence
  SiRNA target sequence
tataaaattgttaagttctgac

SEQ ID NO: 41023 - DNA, 22 bp, Artificial sequence
  SiRNA target sequence
ataaaattgttaagttctgaca

SEQ ID NO: 41024 - DNA, 22 bp, Artificial sequence
  SiRNA target sequence
taaaattgttaagttctgacat

SEQ ID NO: 41025 - DNA, 22 bp, Artificial sequence
  SiRNA target sequence
aaaattgttaagttctgacatt

SEQ ID NO: 41026 - DNA, 22 bp, Artificial sequence
  SiRNA target sequence
aaattgttaagttctgacattg

SEQ ID NO: 41027 - DNA, 22 bp, Artificial sequence
  SiRNA target sequence
aattgttaagttctgacattgt

SEQ ID NO: 41028 - DNA, 22 bp, Artificial sequence
  SiRNA target sequence
attgttaagttctgacattgta

SEQ ID NO: 41029 - DNA, 22 bp, Artificial sequence
  SiRNA target sequence
ttgttaagttctgacattgtaa

SEQ ID NO: 41030 - DNA, 22 bp, Artificial sequence
  SiRNA target sequence
tgttaagttctgacattgtaat

SEQ ID NO: 41031 - DNA, 22 bp, Artificial sequence
  SiRNA target sequence
gttaagttctgacattgtaatt

SEQ ID NO: 41032 - DNA, 22 bp, Artificial sequence
  SiRNA target sequence
ttaagttctgacattgtaattg

SEQ ID NO: 41033 - DNA, 22 bp, Artificial sequence
  SiRNA target sequence
taagttctgacattgtaattga

SEQ ID NO: 41034 - DNA, 22 bp, Artificial sequence
  SiRNA target sequence
aagttctgacattgtaattgat

SEQ ID NO: 41035 - DNA, 22 bp, Artificial sequence
  SiRNA target sequence
agttctgacattgtaattgata

SEQ ID NO: 41036 - DNA, 22 bp, Artificial sequence
  SiRNA target sequence
gttctgacattgtaattgatac

SEQ ID NO: 41037 - DNA, 22 bp, Artificial sequence
  SiRNA target sequence
ttctgacattgtaattgataca

SEQ ID NO: 41038 - DNA, 22 bp, Artificial sequence
  SiRNA target sequence
tctgacattgtaattgatacaa

SEQ ID NO: 41039 - DNA, 22 bp, Artificial sequence
  SiRNA target sequence
ctgacattgtaattgatacaat

SEQ ID NO: 41040 - DNA, 22 bp, Artificial sequence
  SiRNA target sequence
tgacattgtaattgatacaatt

SEQ ID NO: 41041 - DNA, 22 bp, Artificial sequence
  SiRNA target sequence
gacattgtaattgatacaattg

SEQ ID NO: 41042 - DNA, 22 bp, Artificial sequence
  SiRNA target sequence
acattgtaattgatacaattgt

SEQ ID NO: 41043 - DNA, 22 bp, Artificial sequence
  SiRNA target sequence
cattgtaattgatacaattgtc

SEQ ID NO: 41044 - DNA, 22 bp, Artificial sequence
  SiRNA target sequence
attgtaattgatacaattgtca

SEQ ID NO: 41045 - DNA, 22 bp, Artificial sequence
  SiRNA target sequence
ttgtaattgatacaattgtcaa

SEQ ID NO: 41046 - DNA, 22 bp, Artificial sequence
  SiRNA target sequence
tgtaattgatacaattgtcaaa

SEQ ID NO: 41047 - DNA, 22 bp, Artificial sequence
  SiRNA target sequence
gtaattgatacaattgtcaaaa

SEQ ID NO: 41048 - DNA, 22 bp, Artificial sequence
  SiRNA target sequence
taattgatacaattgtcaaaac

SEQ ID NO: 41049 - DNA, 22 bp, Artificial sequence
  SiRNA target sequence
aattgatacaattgtcaaaact

SEQ ID NO: 41050 - DNA, 22 bp, Artificial sequence
  SiRNA target sequence
attgatacaattgtcaaaactg

SEQ ID NO: 41051 - DNA, 22 bp, Artificial sequence
  SiRNA target sequence
ttgatacaattgtcaaaactgc

SEQ ID NO: 41052 - DNA, 22 bp, Artificial sequence
  SiRNA target sequence
tgatacaattgtcaaaactgca

SEQ ID NO: 41053 - DNA, 22 bp, Artificial sequence
  SiRNA target sequence
gatacaattgtcaaaactgcaa

SEQ ID NO: 41054 - DNA, 22 bp, Artificial sequence
  SiRNA target sequence
atacaattgtcaaaactgcaaa

SEQ ID NO: 41055 - DNA, 22 bp, Artificial sequence
  SiRNA target sequence
tacaattgtcaaaactgcaaaa

SEQ ID NO: 41056 - DNA, 22 bp, Artificial sequence
  SiRNA target sequence
acaattgtcaaaactgcaaaat

SEQ ID NO: 41057 - DNA, 22 bp, Artificial sequence
  SiRNA target sequence
caattgtcaaaactgcaaaata

SEQ ID NO: 41058 - DNA, 22 bp, Artificial sequence
  SiRNA target sequence
aattgtcaaaactgcaaaatac

SEQ ID NO: 41059 - DNA, 22 bp, Artificial sequence
  SiRNA target sequence
attgtcaaaactgcaaaataca

SEQ ID NO: 41060 - DNA, 22 bp, Artificial sequence
  SiRNA target sequence
ttgtcaaaactgcaaaatacaa

SEQ ID NO: 41061 - DNA, 22 bp, Artificial sequence
  SiRNA target sequence
tgtcaaaactgcaaaatacaaa

SEQ ID NO: 41062 - DNA, 22 bp, Artificial sequence
  SiRNA target sequence
gtcaaaactgcaaaatacaaaa

SEQ ID NO: 41063 - DNA, 22 bp, Artificial sequence
  SiRNA target sequence
tcaaaactgcaaaatacaaaag

SEQ ID NO: 41064 - DNA, 22 bp, Artificial sequence
  SiRNA target sequence
caaaactgcaaaatacaaaaga

SEQ ID NO: 41065 - DNA, 22 bp, Artificial sequence
  SiRNA target sequence
aaaactgcaaaatacaaaagac

SEQ ID NO: 41066 - DNA, 22 bp, Artificial sequence
  SiRNA target sequence
aaactgcaaaatacaaaagact

SEQ ID NO: 41067 - DNA, 22 bp, Artificial sequence
  SiRNA target sequence
aactgcaaaatacaaaagactt

SEQ ID NO: 41068 - DNA, 22 bp, Artificial sequence
  SiRNA target sequence
actgcaaaatacaaaagacttt

SEQ ID NO: 41069 - DNA, 22 bp, Artificial sequence
  SiRNA target sequence
ctgcaaaatacaaaagactttg

SEQ ID NO: 41070 - DNA, 22 bp, Artificial sequence
  SiRNA target sequence
tgcaaaatacaaaagactttga

SEQ ID NO: 41071 - DNA, 22 bp, Artificial sequence
  SiRNA target sequence
gcaaaatacaaaagactttgac

SEQ ID NO: 41072 - DNA, 22 bp, Artificial sequence
  SiRNA target sequence
caaaatacaaaagactttgact

SEQ ID NO: 41073 - DNA, 22 bp, Artificial sequence
  SiRNA target sequence
aaaatacaaaagactttgacta

SEQ ID NO: 41074 - DNA, 22 bp, Artificial sequence
  SiRNA target sequence
aaatacaaaagactttgactaa

SEQ ID NO: 41075 - DNA, 22 bp, Artificial sequence
  SiRNA target sequence
aatacaaaagactttgactaag

SEQ ID NO: 41076 - DNA, 22 bp, Artificial sequence
  SiRNA target sequence
atacaaaagactttgactaaga

SEQ ID NO: 41077 - DNA, 22 bp, Artificial sequence
  SiRNA target sequence
tacaaaagactttgactaagat

SEQ ID NO: 41078 - DNA, 22 bp, Artificial sequence
  SiRNA target sequence
acaaaagactttgactaagatc

SEQ ID NO: 41079 - DNA, 22 bp, Artificial sequence
  SiRNA target sequence
caaaagactttgactaagatct

SEQ ID NO: 41080 - DNA, 22 bp, Artificial sequence
  SiRNA target sequence
aaaagactttgactaagatctt

SEQ ID NO: 41081 - DNA, 22 bp, Artificial sequence
  SiRNA target sequence
aaagactttgactaagatcttt

SEQ ID NO: 41082 - DNA, 22 bp, Artificial sequence
  SiRNA target sequence
aagactttgactaagatcttta

SEQ ID NO: 41083 - DNA, 22 bp, Artificial sequence
  SiRNA target sequence
agactttgactaagatctttat

SEQ ID NO: 41084 - DNA, 22 bp, Artificial sequence
  SiRNA target sequence
gactttgactaagatctttatt

SEQ ID NO: 41085 - DNA, 22 bp, Artificial sequence
  SiRNA target sequence
actttgactaagatctttatta

SEQ ID NO: 41086 - DNA, 22 bp, Artificial sequence
  SiRNA target sequence
ctttgactaagatctttattat

SEQ ID NO: 41087 - DNA, 22 bp, Artificial sequence
  SiRNA target sequence
tttgactaagatctttattatc

SEQ ID NO: 41088 - DNA, 22 bp, Artificial sequence
  SiRNA target sequence
ttgactaagatctttattatct

SEQ ID NO: 41089 - DNA, 22 bp, Artificial sequence
  SiRNA target sequence
tgactaagatctttattatctg

SEQ ID NO: 41090 - DNA, 22 bp, Artificial sequence
  SiRNA target sequence
gactaagatctttattatctgt

SEQ ID NO: 41091 - DNA, 22 bp, Artificial sequence
  SiRNA target sequence
actaagatctttattatctgta

SEQ ID NO: 41092 - DNA, 22 bp, Artificial sequence
  SiRNA target sequence
ctaagatctttattatctgtaa

SEQ ID NO: 41093 - DNA, 22 bp, Artificial sequence
  SiRNA target sequence
taagatctttattatctgtaat

SEQ ID NO: 41094 - DNA, 22 bp, Artificial sequence
  SiRNA target sequence
aagatctttattatctgtaata

SEQ ID NO: 41095 - DNA, 22 bp, Artificial sequence
  SiRNA target sequence
agatctttattatctgtaatat

SEQ ID NO: 41096 - DNA, 22 bp, Artificial sequence
  SiRNA target sequence
gatctttattatctgtaatatc

SEQ ID NO: 41097 - DNA, 22 bp, Artificial sequence
  SiRNA target sequence
atctttattatctgtaatatca

SEQ ID NO: 41098 - DNA, 22 bp, Artificial sequence
  SiRNA target sequence
tctttattatctgtaatatcac

SEQ ID NO: 41099 - DNA, 22 bp, Artificial sequence
  SiRNA target sequence
ctttattatctgtaatatcact

SEQ ID NO: 41100 - DNA, 22 bp, Artificial sequence
  SiRNA target sequence
tttattatctgtaatatcacta

SEQ ID NO: 41101 - DNA, 22 bp, Artificial sequence
  SiRNA target sequence
ttattatctgtaatatcactag

SEQ ID NO: 41102 - DNA, 22 bp, Artificial sequence
  SiRNA target sequence
tattatctgtaatatcactagt

SEQ ID NO: 41103 - DNA, 22 bp, Artificial sequence
  SiRNA target sequence
attatctgtaatatcactagtc

SEQ ID NO: 41104 - DNA, 22 bp, Artificial sequence
  SiRNA target sequence
ttatctgtaatatcactagtca

SEQ ID NO: 41105 - DNA, 22 bp, Artificial sequence
  SiRNA target sequence
tatctgtaatatcactagtcaa

SEQ ID NO: 41106 - DNA, 22 bp, Artificial sequence
  SiRNA target sequence
atctgtaatatcactagtcaat

SEQ ID NO: 41107 - DNA, 22 bp, Artificial sequence
  SiRNA target sequence
tctgtaatatcactagtcaatt

SEQ ID NO: 41108 - DNA, 22 bp, Artificial sequence
  SiRNA target sequence
ctgtaatatcactagtcaattt

SEQ ID NO: 41109 - DNA, 22 bp, Artificial sequence
  SiRNA target sequence
tgtaatatcactagtcaatttc

SEQ ID NO: 41110 - DNA, 22 bp, Artificial sequence
  SiRNA target sequence
gtaatatcactagtcaatttcc

SEQ ID NO: 41111 - DNA, 22 bp, Artificial sequence
  SiRNA target sequence
taatatcactagtcaatttccg

SEQ ID NO: 41112 - DNA, 22 bp, Artificial sequence
  SiRNA target sequence
aatatcactagtcaatttccgg

SEQ ID NO: 41113 - DNA, 22 bp, Artificial sequence
  SiRNA target sequence
atatcactagtcaatttccggg

SEQ ID NO: 41114 - DNA, 22 bp, Artificial sequence
  SiRNA target sequence
tatcactagtcaatttccgggt

SEQ ID NO: 41115 - DNA, 22 bp, Artificial sequence
  SiRNA target sequence
atcactagtcaatttccgggta

SEQ ID NO: 41116 - DNA, 22 bp, Artificial sequence
  SiRNA target sequence
tcactagtcaatttccgggtag

SEQ ID NO: 41117 - DNA, 22 bp, Artificial sequence
  SiRNA target sequence
cactagtcaatttccgggtagc

SEQ ID NO: 41118 - DNA, 22 bp, Artificial sequence
  SiRNA target sequence
actagtcaatttccgggtagct

SEQ ID NO: 41119 - DNA, 22 bp, Artificial sequence
  SiRNA target sequence
ctagtcaatttccgggtagctt

SEQ ID NO: 41120 - DNA, 22 bp, Artificial sequence
  SiRNA target sequence
tagtcaatttccgggtagcttc

SEQ ID NO: 41121 - DNA, 22 bp, Artificial sequence
  SiRNA target sequence
agtcaatttccgggtagcttca

SEQ ID NO: 41122 - DNA, 22 bp, Artificial sequence
  SiRNA target sequence
gtcaatttccgggtagcttcaa

SEQ ID NO: 41123 - DNA, 22 bp, Artificial sequence
  SiRNA target sequence
tcaatttccgggtagcttcaac

SEQ ID NO: 41124 - DNA, 22 bp, Artificial sequence
  SiRNA target sequence
caatttccgggtagcttcaact

SEQ ID NO: 41125 - DNA, 22 bp, Artificial sequence
  SiRNA target sequence
aatttccgggtagcttcaactg

SEQ ID NO: 41126 - DNA, 22 bp, Artificial sequence
  SiRNA target sequence
atttccgggtagcttcaactgt

SEQ ID NO: 41127 - DNA, 22 bp, Artificial sequence
  SiRNA target sequence
tttccgggtagcttcaactgtt

SEQ ID NO: 41128 - DNA, 22 bp, Artificial sequence
  SiRNA target sequence
ttccgggtagcttcaactgtta

SEQ ID NO: 41129 - DNA, 22 bp, Artificial sequence
  SiRNA target sequence
tccgggtagcttcaactgttaa

SEQ ID NO: 41130 - DNA, 22 bp, Artificial sequence
  SiRNA target sequence
ccgggtagcttcaactgttaaa

SEQ ID NO: 41131 - DNA, 22 bp, Artificial sequence
  SiRNA target sequence
cgggtagcttcaactgttaaaa

SEQ ID NO: 41132 - DNA, 22 bp, Artificial sequence
  SiRNA target sequence
gggtagcttcaactgttaaaac

SEQ ID NO: 41133 - DNA, 22 bp, Artificial sequence
  SiRNA target sequence
ggtagcttcaactgttaaaaca

SEQ ID NO: 41134 - DNA, 22 bp, Artificial sequence
  SiRNA target sequence
gtagcttcaactgttaaaacat

SEQ ID NO: 41135 - DNA, 22 bp, Artificial sequence
  SiRNA target sequence
tagcttcaactgttaaaacatt

SEQ ID NO: 41136 - DNA, 22 bp, Artificial sequence
  SiRNA target sequence
agcttcaactgttaaaacatta

SEQ ID NO: 41137 - DNA, 22 bp, Artificial sequence
  SiRNA target sequence
gcttcaactgttaaaacattaa

SEQ ID NO: 41138 - DNA, 22 bp, Artificial sequence
  SiRNA target sequence
cttcaactgttaaaacattaaa

SEQ ID NO: 41139 - DNA, 22 bp, Artificial sequence
  SiRNA target sequence
ttcaactgttaaaacattaaat

SEQ ID NO: 41140 - DNA, 22 bp, Artificial sequence
  SiRNA target sequence
tcaactgttaaaacattaaatg

SEQ ID NO: 41141 - DNA, 22 bp, Artificial sequence
  SiRNA target sequence
caactgttaaaacattaaatgt

SEQ ID NO: 41142 - DNA, 22 bp, Artificial sequence
  SiRNA target sequence
aactgttaaaacattaaatgta

SEQ ID NO: 41143 - DNA, 22 bp, Artificial sequence
  SiRNA target sequence
actgttaaaacattaaatgtac

SEQ ID NO: 41144 - DNA, 22 bp, Artificial sequence
  SiRNA target sequence
ctgttaaaacattaaatgtaca

SEQ ID NO: 41145 - DNA, 22 bp, Artificial sequence
  SiRNA target sequence
tgttaaaacattaaatgtacaa

SEQ ID NO: 41146 - DNA, 22 bp, Artificial sequence
  SiRNA target sequence
gttaaaacattaaatgtacaaa

SEQ ID NO: 41147 - DNA, 22 bp, Artificial sequence
  SiRNA target sequence
ttaaaacattaaatgtacaaac

SEQ ID NO: 41148 - DNA, 22 bp, Artificial sequence
  SiRNA target sequence
taaaacattaaatgtacaaact

SEQ ID NO: 41149 - DNA, 22 bp, Artificial sequence
  SiRNA target sequence
aaaacattaaatgtacaaactg

SEQ ID NO: 41150 - DNA, 22 bp, Artificial sequence
  SiRNA target sequence
aaacattaaatgtacaaactgc

SEQ ID NO: 41151 - DNA, 22 bp, Artificial sequence
  SiRNA target sequence
aacattaaatgtacaaactgca

SEQ ID NO: 41152 - DNA, 22 bp, Artificial sequence
  SiRNA target sequence
acattaaatgtacaaactgcaa

SEQ ID NO: 41153 - DNA, 22 bp, Artificial sequence
  SiRNA target sequence
cattaaatgtacaaactgcaaa

SEQ ID NO: 41154 - DNA, 22 bp, Artificial sequence
  SiRNA target sequence
attaaatgtacaaactgcaaat

SEQ ID NO: 41155 - DNA, 22 bp, Artificial sequence
  SiRNA target sequence
ttaaatgtacaaactgcaaatg

SEQ ID NO: 41156 - DNA, 22 bp, Artificial sequence
  SiRNA target sequence
taaatgtacaaactgcaaatgt

SEQ ID NO: 41157 - DNA, 22 bp, Artificial sequence
  SiRNA target sequence
aaatgtacaaactgcaaatgtc

SEQ ID NO: 41158 - DNA, 22 bp, Artificial sequence
  SiRNA target sequence
aatgtacaaactgcaaatgtcc

SEQ ID NO: 41159 - DNA, 22 bp, Artificial sequence
  SiRNA target sequence
atgtacaaactgcaaatgtccc

SEQ ID NO: 41160 - DNA, 22 bp, Artificial sequence
  SiRNA target sequence
tgtacaaactgcaaatgtccca

SEQ ID NO: 41161 - DNA, 22 bp, Artificial sequence
  SiRNA target sequence
gtacaaactgcaaatgtcccaa

SEQ ID NO: 41162 - DNA, 22 bp, Artificial sequence
  SiRNA target sequence
tacaaactgcaaatgtcccaaa

SEQ ID NO: 41163 - DNA, 22 bp, Artificial sequence
  SiRNA target sequence
acaaactgcaaatgtcccaaaa

SEQ ID NO: 41164 - DNA, 22 bp, Artificial sequence
  SiRNA target sequence
caaactgcaaatgtcccaaaaa

SEQ ID NO: 41165 - DNA, 22 bp, Artificial sequence
  SiRNA target sequence
aaactgcaaatgtcccaaaaat

SEQ ID NO: 41166 - DNA, 22 bp, Artificial sequence
  SiRNA target sequence
aactgcaaatgtcccaaaaatt

SEQ ID NO: 41167 - DNA, 22 bp, Artificial sequence
  SiRNA target sequence
actgcaaatgtcccaaaaatta

SEQ ID NO: 41168 - DNA, 22 bp, Artificial sequence
  SiRNA target sequence
ctgcaaatgtcccaaaaattat

SEQ ID NO: 41169 - DNA, 22 bp, Artificial sequence
  SiRNA target sequence
tgcaaatgtcccaaaaattatg

SEQ ID NO: 41170 - DNA, 22 bp, Artificial sequence
  SiRNA target sequence
gcaaatgtcccaaaaattatgt

SEQ ID NO: 41171 - DNA, 22 bp, Artificial sequence
  SiRNA target sequence
caaatgtcccaaaaattatgta

SEQ ID NO: 41172 - DNA, 22 bp, Artificial sequence
  SiRNA target sequence
aaatgtcccaaaaattatgtaa

SEQ ID NO: 41173 - DNA, 22 bp, Artificial sequence
  SiRNA target sequence
aatgtcccaaaaattatgtaaa

SEQ ID NO: 41174 - DNA, 22 bp, Artificial sequence
  SiRNA target sequence
atgtcccaaaaattatgtaaat

SEQ ID NO: 41175 - DNA, 22 bp, Artificial sequence
  SiRNA target sequence
tgtcccaaaaattatgtaaatg

SEQ ID NO: 41176 - DNA, 22 bp, Artificial sequence
  SiRNA target sequence
gtcccaaaaattatgtaaatga

SEQ ID NO: 41177 - DNA, 22 bp, Artificial sequence
  SiRNA target sequence
tcccaaaaattatgtaaatgac

SEQ ID NO: 41178 - DNA, 22 bp, Artificial sequence
  SiRNA target sequence
cccaaaaattatgtaaatgaca

SEQ ID NO: 41179 - DNA, 22 bp, Artificial sequence
  SiRNA target sequence
ccaaaaattatgtaaatgacaa

SEQ ID NO: 41180 - DNA, 22 bp, Artificial sequence
  SiRNA target sequence
caaaaattatgtaaatgacaaa

SEQ ID NO: 41181 - DNA, 22 bp, Artificial sequence
  SiRNA target sequence
aaaaattatgtaaatgacaaat

SEQ ID NO: 41182 - DNA, 22 bp, Artificial sequence
  SiRNA target sequence
aaaattatgtaaatgacaaatg

SEQ ID NO: 41183 - DNA, 22 bp, Artificial sequence
  SiRNA target sequence
aaattatgtaaatgacaaatgt

SEQ ID NO: 41184 - DNA, 22 bp, Artificial sequence
  SiRNA target sequence
aattatgtaaatgacaaatgtt

SEQ ID NO: 41185 - DNA, 22 bp, Artificial sequence
  SiRNA target sequence
attatgtaaatgacaaatgttc

SEQ ID NO: 41186 - DNA, 22 bp, Artificial sequence
  SiRNA target sequence
ttatgtaaatgacaaatgttcg

SEQ ID NO: 41187 - DNA, 22 bp, Artificial sequence
  SiRNA target sequence
tatgtaaatgacaaatgttcga

SEQ ID NO: 41188 - DNA, 22 bp, Artificial sequence
  SiRNA target sequence
atgtaaatgacaaatgttcgaa

SEQ ID NO: 41189 - DNA, 22 bp, Artificial sequence
  SiRNA target sequence
tgtaaatgacaaatgttcgaat

SEQ ID NO: 41190 - DNA, 22 bp, Artificial sequence
  SiRNA target sequence
gtaaatgacaaatgttcgaata

SEQ ID NO: 41191 - DNA, 22 bp, Artificial sequence
  SiRNA target sequence
taaatgacaaatgttcgaataa

SEQ ID NO: 41192 - DNA, 22 bp, Artificial sequence
  SiRNA target sequence
aaatgacaaatgttcgaataaa

SEQ ID NO: 41193 - DNA, 22 bp, Artificial sequence
  SiRNA target sequence
aatgacaaatgttcgaataaag

SEQ ID NO: 41194 - DNA, 22 bp, Artificial sequence
  SiRNA target sequence
atgacaaatgttcgaataaagg

SEQ ID NO: 41195 - DNA, 22 bp, Artificial sequence
  SiRNA target sequence
tgacaaatgttcgaataaaggg

SEQ ID NO: 41196 - DNA, 22 bp, Artificial sequence
  SiRNA target sequence
gacaaatgttcgaataaagggc

SEQ ID NO: 41197 - DNA, 22 bp, Artificial sequence
  SiRNA target sequence
acaaatgttcgaataaagggct

SEQ ID NO: 41198 - DNA, 22 bp, Artificial sequence
  SiRNA target sequence
caaatgttcgaataaagggctt

SEQ ID NO: 41199 - DNA, 22 bp, Artificial sequence
  SiRNA target sequence
aaatgttcgaataaagggcttt

SEQ ID NO: 41200 - DNA, 22 bp, Artificial sequence
  SiRNA target sequence
aatgttcgaataaagggctttg

SEQ ID NO: 41201 - DNA, 22 bp, Artificial sequence
  SiRNA target sequence
atgttcgaataaagggctttga

SEQ ID NO: 41202 - DNA, 22 bp, Artificial sequence
  SiRNA target sequence
tgttcgaataaagggctttgaa

SEQ ID NO: 41203 - DNA, 22 bp, Artificial sequence
  SiRNA target sequence
gttcgaataaagggctttgaaa

SEQ ID NO: 41204 - DNA, 22 bp, Artificial sequence
  SiRNA target sequence
ttcgaataaagggctttgaaat

SEQ ID NO: 41205 - DNA, 22 bp, Artificial sequence
  SiRNA target sequence
tcgaataaagggctttgaaata

SEQ ID NO: 41206 - DNA, 22 bp, Artificial sequence
  SiRNA target sequence
cgaataaagggctttgaaataa

SEQ ID NO: 41207 - DNA, 22 bp, Artificial sequence
  SiRNA target sequence
gaataaagggctttgaaataac

SEQ ID NO: 41208 - DNA, 22 bp, Artificial sequence
  SiRNA target sequence
aataaagggctttgaaataaca

SEQ ID NO: 41209 - DNA, 22 bp, Artificial sequence
  SiRNA target sequence
ataaagggctttgaaataacat

SEQ ID NO: 41210 - DNA, 22 bp, Artificial sequence
  SiRNA target sequence
taaagggctttgaaataacata

SEQ ID NO: 41211 - DNA, 22 bp, Artificial sequence
  SiRNA target sequence
aaagggctttgaaataacatat

SEQ ID NO: 41212 - DNA, 22 bp, Artificial sequence
  SiRNA target sequence
aagggctttgaaataacatatt

SEQ ID NO: 41213 - DNA, 22 bp, Artificial sequence
  SiRNA target sequence
agggctttgaaataacatattc

SEQ ID NO: 41214 - DNA, 22 bp, Artificial sequence
  SiRNA target sequence
gggctttgaaataacatattct

SEQ ID NO: 41215 - DNA, 22 bp, Artificial sequence
  SiRNA target sequence
ggctttgaaataacatattcta

SEQ ID NO: 41216 - DNA, 22 bp, Artificial sequence
  SiRNA target sequence
gctttgaaataacatattctac

SEQ ID NO: 41217 - DNA, 22 bp, Artificial sequence
  SiRNA target sequence
ctttgaaataacatattctaca

SEQ ID NO: 41218 - DNA, 22 bp, Artificial sequence
  SiRNA target sequence
tttgaaataacatattctacaa

SEQ ID NO: 41219 - DNA, 22 bp, Artificial sequence
  SiRNA target sequence
ttgaaataacatattctacaat

SEQ ID NO: 41220 - DNA, 22 bp, Artificial sequence
  SiRNA target sequence
tgaaataacatattctacaatc

SEQ ID NO: 41221 - DNA, 22 bp, Artificial sequence
  SiRNA target sequence
gaaataacatattctacaatca

SEQ ID NO: 41222 - DNA, 22 bp, Artificial sequence
  SiRNA target sequence
aaataacatattctacaatcag

SEQ ID NO: 41223 - DNA, 22 bp, Artificial sequence
  SiRNA target sequence
aataacatattctacaatcagg

SEQ ID NO: 41224 - DNA, 22 bp, Artificial sequence
  SiRNA target sequence
ataacatattctacaatcaggt

SEQ ID NO: 41225 - DNA, 22 bp, Artificial sequence
  SiRNA target sequence
taacatattctacaatcaggtc

SEQ ID NO: 41226 - DNA, 22 bp, Artificial sequence
  SiRNA target sequence
aacatattctacaatcaggtct

SEQ ID NO: 41227 - DNA, 22 bp, Artificial sequence
  SiRNA target sequence
acatattctacaatcaggtctt

SEQ ID NO: 41228 - DNA, 22 bp, Artificial sequence
  SiRNA target sequence
catattctacaatcaggtcttt

SEQ ID NO: 41229 - DNA, 22 bp, Artificial sequence
  SiRNA target sequence
atattctacaatcaggtctttc

SEQ ID NO: 41230 - DNA, 22 bp, Artificial sequence
  SiRNA target sequence
tattctacaatcaggtctttca

SEQ ID NO: 41231 - DNA, 22 bp, Artificial sequence
  SiRNA target sequence
attctacaatcaggtctttcat

SEQ ID NO: 41232 - DNA, 22 bp, Artificial sequence
  SiRNA target sequence
ttctacaatcaggtctttcata

SEQ ID NO: 41233 - DNA, 22 bp, Artificial sequence
  SiRNA target sequence
tctacaatcaggtctttcataa

SEQ ID NO: 41234 - DNA, 22 bp, Artificial sequence
  SiRNA target sequence
ctacaatcaggtctttcataat

SEQ ID NO: 41235 - DNA, 22 bp, Artificial sequence
  SiRNA target sequence
tacaatcaggtctttcataata

SEQ ID NO: 41236 - DNA, 22 bp, Artificial sequence
  SiRNA target sequence
acaatcaggtctttcataatac

SEQ ID NO: 41237 - DNA, 22 bp, Artificial sequence
  SiRNA target sequence
caatcaggtctttcataatact

SEQ ID NO: 41238 - DNA, 22 bp, Artificial sequence
  SiRNA target sequence
aatcaggtctttcataatacta

SEQ ID NO: 41239 - DNA, 22 bp, Artificial sequence
  SiRNA target sequence
atcaggtctttcataatactaa

SEQ ID NO: 41240 - DNA, 22 bp, Artificial sequence
  SiRNA target sequence
tcaggtctttcataatactaat

SEQ ID NO: 41241 - DNA, 22 bp, Artificial sequence
  SiRNA target sequence
caggtctttcataatactaata

SEQ ID NO: 41242 - DNA, 22 bp, Artificial sequence
  SiRNA target sequence
aggtctttcataatactaatat

SEQ ID NO: 41243 - DNA, 22 bp, Artificial sequence
  SiRNA target sequence
ggtctttcataatactaatatc

SEQ ID NO: 41244 - DNA, 22 bp, Artificial sequence
  SiRNA target sequence
gtctttcataatactaatatca

SEQ ID NO: 41245 - DNA, 22 bp, Artificial sequence
  SiRNA target sequence
tctttcataatactaatatcac

SEQ ID NO: 41246 - DNA, 22 bp, Artificial sequence
  SiRNA target sequence
ctttcataatactaatatcact

SEQ ID NO: 41247 - DNA, 22 bp, Artificial sequence
  SiRNA target sequence
tttcataatactaatatcacta

SEQ ID NO: 41248 - DNA, 22 bp, Artificial sequence
  SiRNA target sequence
ttcataatactaatatcactac

SEQ ID NO: 41249 - DNA, 22 bp, Artificial sequence
  SiRNA target sequence
tcataatactaatatcactacc

SEQ ID NO: 41250 - DNA, 22 bp, Artificial sequence
  SiRNA target sequence
cataatactaatatcactacca

SEQ ID NO: 41251 - DNA, 22 bp, Artificial sequence
  SiRNA target sequence
ataatactaatatcactaccat

SEQ ID NO: 41252 - DNA, 22 bp, Artificial sequence
  SiRNA target sequence
taatactaatatcactaccata

SEQ ID NO: 41253 - DNA, 22 bp, Artificial sequence
  SiRNA target sequence
aatactaatatcactaccataa

SEQ ID NO: 41254 - DNA, 22 bp, Artificial sequence
  SiRNA target sequence
atactaatatcactaccataaa

SEQ ID NO: 41255 - DNA, 22 bp, Artificial sequence
  SiRNA target sequence
tactaatatcactaccataaat

SEQ ID NO: 41256 - DNA, 22 bp, Artificial sequence
  SiRNA target sequence
actaatatcactaccataaata

SEQ ID NO: 41257 - DNA, 22 bp, Artificial sequence
  SiRNA target sequence
ctaatatcactaccataaatag

SEQ ID NO: 41258 - DNA, 22 bp, Artificial sequence
  SiRNA target sequence
taatatcactaccataaataga

SEQ ID NO: 41259 - DNA, 22 bp, Artificial sequence
  SiRNA target sequence
aatatcactaccataaatagat

SEQ ID NO: 41260 - DNA, 22 bp, Artificial sequence
  SiRNA target sequence
atatcactaccataaatagatt

SEQ ID NO: 41261 - DNA, 22 bp, Artificial sequence
  SiRNA target sequence
tatcactaccataaatagattt

SEQ ID NO: 41262 - DNA, 22 bp, Artificial sequence
  SiRNA target sequence
atcactaccataaatagatttt

SEQ ID NO: 41263 - DNA, 22 bp, Artificial sequence
  SiRNA target sequence
tcactaccataaatagattttt

SEQ ID NO: 41264 - DNA, 22 bp, Artificial sequence
  SiRNA target sequence
cactaccataaatagatttttt

SEQ ID NO: 41265 - DNA, 22 bp, Artificial sequence
  SiRNA target sequence
actaccataaatagattttttt

SEQ ID NO: 41266 - DNA, 22 bp, Artificial sequence
  SiRNA target sequence
ctaccataaatagatttttttt

SEQ ID NO: 41267 - DNA, 22 bp, Artificial sequence
  SiRNA target sequence
taccataaatagattttttttc

SEQ ID NO: 41268 - DNA, 22 bp, Artificial sequence
  SiRNA target sequence
accataaatagattttttttct

SEQ ID NO: 41269 - DNA, 22 bp, Artificial sequence
  SiRNA target sequence
ccataaatagattttttttcta

SEQ ID NO: 41270 - DNA, 22 bp, Artificial sequence
  SiRNA target sequence
cataaatagattttttttctaa

SEQ ID NO: 41271 - DNA, 22 bp, Artificial sequence
  SiRNA target sequence
ataaatagattttttttctaac

SEQ ID NO: 41272 - DNA, 22 bp, Artificial sequence
  SiRNA target sequence
taaatagattttttttctaaca

SEQ ID NO: 41273 - DNA, 22 bp, Artificial sequence
  SiRNA target sequence
aaatagattttttttctaacat

SEQ ID NO: 41274 - DNA, 23 bp, Artificial sequence
  SiRNA target sequence
ttataagtttaatgtagaaataa

SEQ ID NO: 41275 - DNA, 23 bp, Artificial sequence
  SiRNA target sequence
tataagtttaatgtagaaataat

SEQ ID NO: 41276 - DNA, 23 bp, Artificial sequence
  SiRNA target sequence
ataagtttaatgtagaaataata

SEQ ID NO: 41277 - DNA, 23 bp, Artificial sequence
  SiRNA target sequence
taagtttaatgtagaaataatat

SEQ ID NO: 41278 - DNA, 23 bp, Artificial sequence
  SiRNA target sequence
aagtttaatgtagaaataatatt

SEQ ID NO: 41279 - DNA, 23 bp, Artificial sequence
  SiRNA target sequence
agtttaatgtagaaataatattt

SEQ ID NO: 41280 - DNA, 23 bp, Artificial sequence
  SiRNA target sequence
gtttaatgtagaaataatatttt

SEQ ID NO: 41281 - DNA, 23 bp, Artificial sequence
  SiRNA target sequence
tttaatgtagaaataatattttc

SEQ ID NO: 41282 - DNA, 23 bp, Artificial sequence
  SiRNA target sequence
ttaatgtagaaataatattttct

SEQ ID NO: 41283 - DNA, 23 bp, Artificial sequence
  SiRNA target sequence
taatgtagaaataatattttctt

SEQ ID NO: 41284 - DNA, 23 bp, Artificial sequence
  SiRNA target sequence
aatgtagaaataatattttcttc

SEQ ID NO: 41285 - DNA, 23 bp, Artificial sequence
  SiRNA target sequence
atgtagaaataatattttcttct

SEQ ID NO: 41286 - DNA, 23 bp, Artificial sequence
  SiRNA target sequence
tgtagaaataatattttcttcta

SEQ ID NO: 41287 - DNA, 23 bp, Artificial sequence
  SiRNA target sequence
gtagaaataatattttcttctat

SEQ ID NO: 41288 - DNA, 23 bp, Artificial sequence
  SiRNA target sequence
tagaaataatattttcttctatc

SEQ ID NO: 41289 - DNA, 23 bp, Artificial sequence
  SiRNA target sequence
agaaataatattttcttctatct

SEQ ID NO: 41290 - DNA, 23 bp, Artificial sequence
  SiRNA target sequence
gaaataatattttcttctatctt

SEQ ID NO: 41291 - DNA, 23 bp, Artificial sequence
  SiRNA target sequence
aaataatattttcttctatctta

SEQ ID NO: 41292 - DNA, 23 bp, Artificial sequence
  SiRNA target sequence
aataatattttcttctatcttat

SEQ ID NO: 41293 - DNA, 23 bp, Artificial sequence
  SiRNA target sequence
ataatattttcttctatcttatg

SEQ ID NO: 41294 - DNA, 23 bp, Artificial sequence
  SiRNA target sequence
taatattttcttctatcttatgt

SEQ ID NO: 41295 - DNA, 23 bp, Artificial sequence
  SiRNA target sequence
aatattttcttctatcttatgta

SEQ ID NO: 41296 - DNA, 23 bp, Artificial sequence
  SiRNA target sequence
atattttcttctatcttatgtaa

SEQ ID NO: 41297 - DNA, 23 bp, Artificial sequence
  SiRNA target sequence
tattttcttctatcttatgtaat

SEQ ID NO: 41298 - DNA, 23 bp, Artificial sequence
  SiRNA target sequence
attttcttctatcttatgtaatg

SEQ ID NO: 41299 - DNA, 23 bp, Artificial sequence
  SiRNA target sequence
ttttcttctatcttatgtaatga

SEQ ID NO: 41300 - DNA, 23 bp, Artificial sequence
  SiRNA target sequence
tttcttctatcttatgtaatgat

SEQ ID NO: 41301 - DNA, 23 bp, Artificial sequence
  SiRNA target sequence
ttcttctatcttatgtaatgata

SEQ ID NO: 41302 - DNA, 23 bp, Artificial sequence
  SiRNA target sequence
tcttctatcttatgtaatgatac

SEQ ID NO: 41303 - DNA, 23 bp, Artificial sequence
  SiRNA target sequence
cttctatcttatgtaatgataca

SEQ ID NO: 41304 - DNA, 23 bp, Artificial sequence
  SiRNA target sequence
ttctatcttatgtaatgatacag

SEQ ID NO: 41305 - DNA, 23 bp, Artificial sequence
  SiRNA target sequence
tctatcttatgtaatgatacagt

SEQ ID NO: 41306 - DNA, 23 bp, Artificial sequence
  SiRNA target sequence
ctatcttatgtaatgatacagtt

SEQ ID NO: 41307 - DNA, 23 bp, Artificial sequence
  SiRNA target sequence
tatcttatgtaatgatacagttt

SEQ ID NO: 41308 - DNA, 23 bp, Artificial sequence
  SiRNA target sequence
atcttatgtaatgatacagtttt

SEQ ID NO: 41309 - DNA, 23 bp, Artificial sequence
  SiRNA target sequence
tcttatgtaatgatacagttttg

SEQ ID NO: 41310 - DNA, 23 bp, Artificial sequence
  SiRNA target sequence
cttatgtaatgatacagttttgt

SEQ ID NO: 41311 - DNA, 23 bp, Artificial sequence
  SiRNA target sequence
ttatgtaatgatacagttttgtt

SEQ ID NO: 41312 - DNA, 23 bp, Artificial sequence
  SiRNA target sequence
tatgtaatgatacagttttgttt

SEQ ID NO: 41313 - DNA, 23 bp, Artificial sequence
  SiRNA target sequence
atgtaatgatacagttttgtttt

SEQ ID NO: 41314 - DNA, 23 bp, Artificial sequence
  SiRNA target sequence
tgtaatgatacagttttgttttt

SEQ ID NO: 41315 - DNA, 23 bp, Artificial sequence
  SiRNA target sequence
gtaatgatacagttttgttttta

SEQ ID NO: 41316 - DNA, 23 bp, Artificial sequence
  SiRNA target sequence
taatgatacagttttgtttttaa

SEQ ID NO: 41317 - DNA, 23 bp, Artificial sequence
  SiRNA target sequence
aatgatacagttttgtttttaat

SEQ ID NO: 41318 - DNA, 23 bp, Artificial sequence
  SiRNA target sequence
atgatacagttttgtttttaata

SEQ ID NO: 41319 - DNA, 23 bp, Artificial sequence
  SiRNA target sequence
tgatacagttttgtttttaatac

SEQ ID NO: 41320 - DNA, 23 bp, Artificial sequence
  SiRNA target sequence
gatacagttttgtttttaatact

SEQ ID NO: 41321 - DNA, 23 bp, Artificial sequence
  SiRNA target sequence
atacagttttgtttttaatactt

SEQ ID NO: 41322 - DNA, 23 bp, Artificial sequence
  SiRNA target sequence
tacagttttgtttttaatactta

SEQ ID NO: 41323 - DNA, 23 bp, Artificial sequence
  SiRNA target sequence
acagttttgtttttaatacttag

SEQ ID NO: 41324 - DNA, 23 bp, Artificial sequence
  SiRNA target sequence
cagttttgtttttaatacttagc

SEQ ID NO: 41325 - DNA, 23 bp, Artificial sequence
  SiRNA target sequence
agttttgtttttaatacttagca

SEQ ID NO: 41326 - DNA, 23 bp, Artificial sequence
  SiRNA target sequence
gttttgtttttaatacttagcac

SEQ ID NO: 41327 - DNA, 23 bp, Artificial sequence
  SiRNA target sequence
ttttgtttttaatacttagcact

SEQ ID NO: 41328 - DNA, 23 bp, Artificial sequence
  SiRNA target sequence
tttgtttttaatacttagcactt

SEQ ID NO: 41329 - DNA, 23 bp, Artificial sequence
  SiRNA target sequence
ttgtttttaatacttagcacttt

SEQ ID NO: 41330 - DNA, 23 bp, Artificial sequence
  SiRNA target sequence
tgtttttaatacttagcacttta

SEQ ID NO: 41331 - DNA, 23 bp, Artificial sequence
  SiRNA target sequence
gtttttaatacttagcactttat

SEQ ID NO: 41332 - DNA, 23 bp, Artificial sequence
  SiRNA target sequence
tttttaatacttagcactttatc

SEQ ID NO: 41333 - DNA, 23 bp, Artificial sequence
  SiRNA target sequence
ttttaatacttagcactttatca

SEQ ID NO: 41334 - DNA, 23 bp, Artificial sequence
  SiRNA target sequence
tttaatacttagcactttatcaa

SEQ ID NO: 41335 - DNA, 23 bp, Artificial sequence
  SiRNA target sequence
ttaatacttagcactttatcaaa

SEQ ID NO: 41336 - DNA, 23 bp, Artificial sequence
  SiRNA target sequence
taatacttagcactttatcaaat

SEQ ID NO: 41337 - DNA, 23 bp, Artificial sequence
  SiRNA target sequence
aatacttagcactttatcaaata

SEQ ID NO: 41338 - DNA, 23 bp, Artificial sequence
  SiRNA target sequence
atacttagcactttatcaaataa

SEQ ID NO: 41339 - DNA, 23 bp, Artificial sequence
  SiRNA target sequence
tacttagcactttatcaaataag

SEQ ID NO: 41340 - DNA, 23 bp, Artificial sequence
  SiRNA target sequence
acttagcactttatcaaataagt

SEQ ID NO: 41341 - DNA, 23 bp, Artificial sequence
  SiRNA target sequence
cttagcactttatcaaataagtg

SEQ ID NO: 41342 - DNA, 23 bp, Artificial sequence
  SiRNA target sequence
ttagcactttatcaaataagtgg

SEQ ID NO: 41343 - DNA, 23 bp, Artificial sequence
  SiRNA target sequence
tagcactttatcaaataagtgga

SEQ ID NO: 41344 - DNA, 23 bp, Artificial sequence
  SiRNA target sequence
agcactttatcaaataagtggag

SEQ ID NO: 41345 - DNA, 23 bp, Artificial sequence
  SiRNA target sequence
gcactttatcaaataagtggagt

SEQ ID NO: 41346 - DNA, 23 bp, Artificial sequence
  SiRNA target sequence
cactttatcaaataagtggagta

SEQ ID NO: 41347 - DNA, 23 bp, Artificial sequence
  SiRNA target sequence
actttatcaaataagtggagtaa

SEQ ID NO: 41348 - DNA, 23 bp, Artificial sequence
  SiRNA target sequence
ctttatcaaataagtggagtaaa

SEQ ID NO: 41349 - DNA, 23 bp, Artificial sequence
  SiRNA target sequence
tttatcaaataagtggagtaaat

SEQ ID NO: 41350 - DNA, 23 bp, Artificial sequence
  SiRNA target sequence
ttatcaaataagtggagtaaatc

SEQ ID NO: 41351 - DNA, 23 bp, Artificial sequence
  SiRNA target sequence
tatcaaataagtggagtaaatct

SEQ ID NO: 41352 - DNA, 23 bp, Artificial sequence
  SiRNA target sequence
atcaaataagtggagtaaatcta

SEQ ID NO: 41353 - DNA, 23 bp, Artificial sequence
  SiRNA target sequence
tcaaataagtggagtaaatctaa

SEQ ID NO: 41354 - DNA, 23 bp, Artificial sequence
  SiRNA target sequence
caaataagtggagtaaatctaaa

SEQ ID NO: 41355 - DNA, 23 bp, Artificial sequence
  SiRNA target sequence
aaataagtggagtaaatctaaat

SEQ ID NO: 41356 - DNA, 23 bp, Artificial sequence
  SiRNA target sequence
aataagtggagtaaatctaaatt

SEQ ID NO: 41357 - DNA, 23 bp, Artificial sequence
  SiRNA target sequence
ataagtggagtaaatctaaatta

SEQ ID NO: 41358 - DNA, 23 bp, Artificial sequence
  SiRNA target sequence
taagtggagtaaatctaaattat

SEQ ID NO: 41359 - DNA, 23 bp, Artificial sequence
  SiRNA target sequence
aagtggagtaaatctaaattatg

SEQ ID NO: 41360 - DNA, 23 bp, Artificial sequence
  SiRNA target sequence
agtggagtaaatctaaattatgt

SEQ ID NO: 41361 - DNA, 23 bp, Artificial sequence
  SiRNA target sequence
gtggagtaaatctaaattatgta

SEQ ID NO: 41362 - DNA, 23 bp, Artificial sequence
  SiRNA target sequence
tggagtaaatctaaattatgtaa

SEQ ID NO: 41363 - DNA, 23 bp, Artificial sequence
  SiRNA target sequence
ggagtaaatctaaattatgtaaa

SEQ ID NO: 41364 - DNA, 23 bp, Artificial sequence
  SiRNA target sequence
gagtaaatctaaattatgtaaaa

SEQ ID NO: 41365 - DNA, 23 bp, Artificial sequence
  SiRNA target sequence
agtaaatctaaattatgtaaaac

SEQ ID NO: 41366 - DNA, 23 bp, Artificial sequence
  SiRNA target sequence
gtaaatctaaattatgtaaaaca

SEQ ID NO: 41367 - DNA, 23 bp, Artificial sequence
  SiRNA target sequence
taaatctaaattatgtaaaacaa

SEQ ID NO: 41368 - DNA, 23 bp, Artificial sequence
  SiRNA target sequence
aaatctaaattatgtaaaacaat

SEQ ID NO: 41369 - DNA, 23 bp, Artificial sequence
  SiRNA target sequence
aatctaaattatgtaaaacaata

SEQ ID NO: 41370 - DNA, 23 bp, Artificial sequence
  SiRNA target sequence
atctaaattatgtaaaacaataa

SEQ ID NO: 41371 - DNA, 23 bp, Artificial sequence
  SiRNA target sequence
tctaaattatgtaaaacaataat

SEQ ID NO: 41372 - DNA, 23 bp, Artificial sequence
  SiRNA target sequence
ctaaattatgtaaaacaataatt

SEQ ID NO: 41373 - DNA, 23 bp, Artificial sequence
  SiRNA target sequence
taaattatgtaaaacaataatta

SEQ ID NO: 41374 - DNA, 23 bp, Artificial sequence
  SiRNA target sequence
aaattatgtaaaacaataattat

SEQ ID NO: 41375 - DNA, 23 bp, Artificial sequence
  SiRNA target sequence
aattatgtaaaacaataattatc

SEQ ID NO: 41376 - DNA, 23 bp, Artificial sequence
  SiRNA target sequence
attatgtaaaacaataattatcg

SEQ ID NO: 41377 - DNA, 23 bp, Artificial sequence
  SiRNA target sequence
ttatgtaaaacaataattatcgt

SEQ ID NO: 41378 - DNA, 23 bp, Artificial sequence
  SiRNA target sequence
tatgtaaaacaataattatcgtc

SEQ ID NO: 41379 - DNA, 23 bp, Artificial sequence
  SiRNA target sequence
atgtaaaacaataattatcgtct

SEQ ID NO: 41380 - DNA, 23 bp, Artificial sequence
  SiRNA target sequence
tgtaaaacaataattatcgtctt

SEQ ID NO: 41381 - DNA, 23 bp, Artificial sequence
  SiRNA target sequence
gtaaaacaataattatcgtcttc

SEQ ID NO: 41382 - DNA, 23 bp, Artificial sequence
  SiRNA target sequence
taaaacaataattatcgtcttct

SEQ ID NO: 41383 - DNA, 23 bp, Artificial sequence
  SiRNA target sequence
aaaacaataattatcgtcttctc

SEQ ID NO: 41384 - DNA, 23 bp, Artificial sequence
  SiRNA target sequence
aaacaataattatcgtcttctct

SEQ ID NO: 41385 - DNA, 23 bp, Artificial sequence
  SiRNA target sequence
aacaataattatcgtcttctcta

SEQ ID NO: 41386 - DNA, 23 bp, Artificial sequence
  SiRNA target sequence
acaataattatcgtcttctctaa

SEQ ID NO: 41387 - DNA, 23 bp, Artificial sequence
  SiRNA target sequence
caataattatcgtcttctctaag

SEQ ID NO: 41388 - DNA, 23 bp, Artificial sequence
  SiRNA target sequence
aataattatcgtcttctctaagt

SEQ ID NO: 41389 - DNA, 23 bp, Artificial sequence
  SiRNA target sequence
ataattatcgtcttctctaagtt

SEQ ID NO: 41390 - DNA, 23 bp, Artificial sequence
  SiRNA target sequence
taattatcgtcttctctaagttg

SEQ ID NO: 41391 - DNA, 23 bp, Artificial sequence
  SiRNA target sequence
aattatcgtcttctctaagttgt

SEQ ID NO: 41392 - DNA, 23 bp, Artificial sequence
  SiRNA target sequence
attatcgtcttctctaagttgtt

SEQ ID NO: 41393 - DNA, 23 bp, Artificial sequence
  SiRNA target sequence
ttatcgtcttctctaagttgttg

SEQ ID NO: 41394 - DNA, 23 bp, Artificial sequence
  SiRNA target sequence
tatcgtcttctctaagttgttgg

SEQ ID NO: 41395 - DNA, 23 bp, Artificial sequence
  SiRNA target sequence
atcgtcttctctaagttgttgga

SEQ ID NO: 41396 - DNA, 23 bp, Artificial sequence
  SiRNA target sequence
tcgtcttctctaagttgttggag

SEQ ID NO: 41397 - DNA, 23 bp, Artificial sequence
  SiRNA target sequence
cgtcttctctaagttgttggaga

SEQ ID NO: 41398 - DNA, 23 bp, Artificial sequence
  SiRNA target sequence
gtcttctctaagttgttggagat

SEQ ID NO: 41399 - DNA, 23 bp, Artificial sequence
  SiRNA target sequence
tcttctctaagttgttggagatt

SEQ ID NO: 41400 - DNA, 23 bp, Artificial sequence
  SiRNA target sequence
cttctctaagttgttggagatta

SEQ ID NO: 41401 - DNA, 23 bp, Artificial sequence
  SiRNA target sequence
ttctctaagttgttggagattag

SEQ ID NO: 41402 - DNA, 23 bp, Artificial sequence
  SiRNA target sequence
tctctaagttgttggagattaga

SEQ ID NO: 41403 - DNA, 23 bp, Artificial sequence
  SiRNA target sequence
ctctaagttgttggagattagac

SEQ ID NO: 41404 - DNA, 23 bp, Artificial sequence
  SiRNA target sequence
tctaagttgttggagattagact

SEQ ID NO: 41405 - DNA, 23 bp, Artificial sequence
  SiRNA target sequence
ctaagttgttggagattagactt

SEQ ID NO: 41406 - DNA, 23 bp, Artificial sequence
  SiRNA target sequence
taagttgttggagattagacttt

SEQ ID NO: 41407 - DNA, 23 bp, Artificial sequence
  SiRNA target sequence
aagttgttggagattagactttt

SEQ ID NO: 41408 - DNA, 23 bp, Artificial sequence
  SiRNA target sequence
agttgttggagattagactttta

SEQ ID NO: 41409 - DNA, 23 bp, Artificial sequence
  SiRNA target sequence
gttgttggagattagacttttaa

SEQ ID NO: 41410 - DNA, 23 bp, Artificial sequence
  SiRNA target sequence
ttgttggagattagacttttaag

SEQ ID NO: 41411 - DNA, 23 bp, Artificial sequence
  SiRNA target sequence
tgttggagattagacttttaaga

SEQ ID NO: 41412 - DNA, 23 bp, Artificial sequence
  SiRNA target sequence
gttggagattagacttttaagaa

SEQ ID NO: 41413 - DNA, 23 bp, Artificial sequence
  SiRNA target sequence
ttggagattagacttttaagaat

SEQ ID NO: 41414 - DNA, 23 bp, Artificial sequence
  SiRNA target sequence
tggagattagacttttaagaatt

SEQ ID NO: 41415 - DNA, 23 bp, Artificial sequence
  SiRNA target sequence
ggagattagacttttaagaattt

SEQ ID NO: 41416 - DNA, 23 bp, Artificial sequence
  SiRNA target sequence
gagattagacttttaagaatttc

SEQ ID NO: 41417 - DNA, 23 bp, Artificial sequence
  SiRNA target sequence
agattagacttttaagaatttca

SEQ ID NO: 41418 - DNA, 23 bp, Artificial sequence
  SiRNA target sequence
gattagacttttaagaatttcat

SEQ ID NO: 41419 - DNA, 23 bp, Artificial sequence
  SiRNA target sequence
attagacttttaagaatttcata

SEQ ID NO: 41420 - DNA, 23 bp, Artificial sequence
  SiRNA target sequence
ttagacttttaagaatttcatat

SEQ ID NO: 41421 - DNA, 23 bp, Artificial sequence
  SiRNA target sequence
tagacttttaagaatttcatatt

SEQ ID NO: 41422 - DNA, 23 bp, Artificial sequence
  SiRNA target sequence
agacttttaagaatttcatattc

SEQ ID NO: 41423 - DNA, 23 bp, Artificial sequence
  SiRNA target sequence
gacttttaagaatttcatattca

SEQ ID NO: 41424 - DNA, 23 bp, Artificial sequence
  SiRNA target sequence
acttttaagaatttcatattcag

SEQ ID NO: 41425 - DNA, 23 bp, Artificial sequence
  SiRNA target sequence
cttttaagaatttcatattcagc

SEQ ID NO: 41426 - DNA, 23 bp, Artificial sequence
  SiRNA target sequence
ttttaagaatttcatattcagct

SEQ ID NO: 41427 - DNA, 23 bp, Artificial sequence
  SiRNA target sequence
tttaagaatttcatattcagctt

SEQ ID NO: 41428 - DNA, 23 bp, Artificial sequence
  SiRNA target sequence
ttaagaatttcatattcagcttt

SEQ ID NO: 41429 - DNA, 23 bp, Artificial sequence
  SiRNA target sequence
taagaatttcatattcagctttt

SEQ ID NO: 41430 - DNA, 23 bp, Artificial sequence
  SiRNA target sequence
aagaatttcatattcagcttttt

SEQ ID NO: 41431 - DNA, 23 bp, Artificial sequence
  SiRNA target sequence
agaatttcatattcagctttttt

SEQ ID NO: 41432 - DNA, 23 bp, Artificial sequence
  SiRNA target sequence
gaatttcatattcagcttttttg

SEQ ID NO: 41433 - DNA, 23 bp, Artificial sequence
  SiRNA target sequence
aatttcatattcagcttttttgt

SEQ ID NO: 41434 - DNA, 23 bp, Artificial sequence
  SiRNA target sequence
atttcatattcagcttttttgtc

SEQ ID NO: 41435 - DNA, 23 bp, Artificial sequence
  SiRNA target sequence
tttcatattcagcttttttgtcc

SEQ ID NO: 41436 - DNA, 23 bp, Artificial sequence
  SiRNA target sequence
ttcatattcagcttttttgtcca

SEQ ID NO: 41437 - DNA, 23 bp, Artificial sequence
  SiRNA target sequence
tcatattcagcttttttgtccaa

SEQ ID NO: 41438 - DNA, 23 bp, Artificial sequence
  SiRNA target sequence
catattcagcttttttgtccaat

SEQ ID NO: 41439 - DNA, 23 bp, Artificial sequence
  SiRNA target sequence
atattcagcttttttgtccaatg

SEQ ID NO: 41440 - DNA, 23 bp, Artificial sequence
  SiRNA target sequence
tattcagcttttttgtccaatgc

SEQ ID NO: 41441 - DNA, 23 bp, Artificial sequence
  SiRNA target sequence
attcagcttttttgtccaatgcg

SEQ ID NO: 41442 - DNA, 23 bp, Artificial sequence
  SiRNA target sequence
ttcagcttttttgtccaatgcgg

SEQ ID NO: 41443 - DNA, 23 bp, Artificial sequence
  SiRNA target sequence
tcagcttttttgtccaatgcggc

SEQ ID NO: 41444 - DNA, 23 bp, Artificial sequence
  SiRNA target sequence
cagcttttttgtccaatgcggcc

SEQ ID NO: 41445 - DNA, 23 bp, Artificial sequence
  SiRNA target sequence
agcttttttgtccaatgcggccg

SEQ ID NO: 41446 - DNA, 23 bp, Artificial sequence
  SiRNA target sequence
gcttttttgtccaatgcggccgt

SEQ ID NO: 41447 - DNA, 23 bp, Artificial sequence
  SiRNA target sequence
cttttttgtccaatgcggccgtt

SEQ ID NO: 41448 - DNA, 23 bp, Artificial sequence
  SiRNA target sequence
ttttttgtccaatgcggccgttg

SEQ ID NO: 41449 - DNA, 23 bp, Artificial sequence
  SiRNA target sequence
tttttgtccaatgcggccgttgg

SEQ ID NO: 41450 - DNA, 23 bp, Artificial sequence
  SiRNA target sequence
ttttgtccaatgcggccgttggc

SEQ ID NO: 41451 - DNA, 23 bp, Artificial sequence
  SiRNA target sequence
tttgtccaatgcggccgttggct

SEQ ID NO: 41452 - DNA, 23 bp, Artificial sequence
  SiRNA target sequence
ttgtccaatgcggccgttggctc

SEQ ID NO: 41453 - DNA, 23 bp, Artificial sequence
  SiRNA target sequence
tgtccaatgcggccgttggctca

SEQ ID NO: 41454 - DNA, 23 bp, Artificial sequence
  SiRNA target sequence
gtccaatgcggccgttggctcat

SEQ ID NO: 41455 - DNA, 23 bp, Artificial sequence
  SiRNA target sequence
tccaatgcggccgttggctcatc

SEQ ID NO: 41456 - DNA, 23 bp, Artificial sequence
  SiRNA target sequence
ccaatgcggccgttggctcatct

SEQ ID NO: 41457 - DNA, 23 bp, Artificial sequence
  SiRNA target sequence
caatgcggccgttggctcatcta

SEQ ID NO: 41458 - DNA, 23 bp, Artificial sequence
  SiRNA target sequence
aatgcggccgttggctcatctaa

SEQ ID NO: 41459 - DNA, 23 bp, Artificial sequence
  SiRNA target sequence
atgcggccgttggctcatctaaa

SEQ ID NO: 41460 - DNA, 23 bp, Artificial sequence
  SiRNA target sequence
tgcggccgttggctcatctaaaa

SEQ ID NO: 41461 - DNA, 23 bp, Artificial sequence
  SiRNA target sequence
gcggccgttggctcatctaaaat

SEQ ID NO: 41462 - DNA, 23 bp, Artificial sequence
  SiRNA target sequence
cggccgttggctcatctaaaatt

SEQ ID NO: 41463 - DNA, 23 bp, Artificial sequence
  SiRNA target sequence
ggccgttggctcatctaaaatta

SEQ ID NO: 41464 - DNA, 23 bp, Artificial sequence
  SiRNA target sequence
gccgttggctcatctaaaattat

SEQ ID NO: 41465 - DNA, 23 bp, Artificial sequence
  SiRNA target sequence
ccgttggctcatctaaaattata

SEQ ID NO: 41466 - DNA, 23 bp, Artificial sequence
  SiRNA target sequence
cgttggctcatctaaaattataa

SEQ ID NO: 41467 - DNA, 23 bp, Artificial sequence
  SiRNA target sequence
gttggctcatctaaaattataat

SEQ ID NO: 41468 - DNA, 23 bp, Artificial sequence
  SiRNA target sequence
ttggctcatctaaaattataata

SEQ ID NO: 41469 - DNA, 23 bp, Artificial sequence
  SiRNA target sequence
tggctcatctaaaattataatag

SEQ ID NO: 41470 - DNA, 23 bp, Artificial sequence
  SiRNA target sequence
ggctcatctaaaattataatagg

SEQ ID NO: 41471 - DNA, 23 bp, Artificial sequence
  SiRNA target sequence
gctcatctaaaattataatagga

SEQ ID NO: 41472 - DNA, 23 bp, Artificial sequence
  SiRNA target sequence
ctcatctaaaattataataggag

SEQ ID NO: 41473 - DNA, 23 bp, Artificial sequence
  SiRNA target sequence
tcatctaaaattataataggaga

SEQ ID NO: 41474 - DNA, 23 bp, Artificial sequence
  SiRNA target sequence
catctaaaattataataggagaa

SEQ ID NO: 41475 - DNA, 23 bp, Artificial sequence
  SiRNA target sequence
atctaaaattataataggagaat

SEQ ID NO: 41476 - DNA, 23 bp, Artificial sequence
  SiRNA target sequence
tctaaaattataataggagaatt

SEQ ID NO: 41477 - DNA, 23 bp, Artificial sequence
  SiRNA target sequence
ctaaaattataataggagaattt

SEQ ID NO: 41478 - DNA, 23 bp, Artificial sequence
  SiRNA target sequence
taaaattataataggagaatttt

SEQ ID NO: 41479 - DNA, 23 bp, Artificial sequence
  SiRNA target sequence
aaaattataataggagaattttt

SEQ ID NO: 41480 - DNA, 23 bp, Artificial sequence
  SiRNA target sequence
aaattataataggagaatttttt

SEQ ID NO: 41481 - DNA, 23 bp, Artificial sequence
  SiRNA target sequence
aattataataggagaatttttta

SEQ ID NO: 41482 - DNA, 23 bp, Artificial sequence
  SiRNA target sequence
attataataggagaattttttag

SEQ ID NO: 41483 - DNA, 23 bp, Artificial sequence
  SiRNA target sequence
ttataataggagaattttttagt

SEQ ID NO: 41484 - DNA, 23 bp, Artificial sequence
  SiRNA target sequence
tataataggagaattttttagtg

SEQ ID NO: 41485 - DNA, 23 bp, Artificial sequence
  SiRNA target sequence
ataataggagaattttttagtgc

SEQ ID NO: 41486 - DNA, 23 bp, Artificial sequence
  SiRNA target sequence
taataggagaattttttagtgcc

SEQ ID NO: 41487 - DNA, 23 bp, Artificial sequence
  SiRNA target sequence
aataggagaattttttagtgccg

SEQ ID NO: 41488 - DNA, 23 bp, Artificial sequence
  SiRNA target sequence
ataggagaattttttagtgccga

SEQ ID NO: 41489 - DNA, 23 bp, Artificial sequence
  SiRNA target sequence
taggagaattttttagtgccgac

SEQ ID NO: 41490 - DNA, 23 bp, Artificial sequence
  SiRNA target sequence
aggagaattttttagtgccgacc

SEQ ID NO: 41491 - DNA, 23 bp, Artificial sequence
  SiRNA target sequence
ggagaattttttagtgccgacct

SEQ ID NO: 41492 - DNA, 23 bp, Artificial sequence
  SiRNA target sequence
gagaattttttagtgccgacctt

SEQ ID NO: 41493 - DNA, 23 bp, Artificial sequence
  SiRNA target sequence
agaattttttagtgccgacctta

SEQ ID NO: 41494 - DNA, 23 bp, Artificial sequence
  SiRNA target sequence
gaattttttagtgccgaccttaa

SEQ ID NO: 41495 - DNA, 23 bp, Artificial sequence
  SiRNA target sequence
aattttttagtgccgaccttaac

SEQ ID NO: 41496 - DNA, 23 bp, Artificial sequence
  SiRNA target sequence
attttttagtgccgaccttaaca

SEQ ID NO: 41497 - DNA, 23 bp, Artificial sequence
  SiRNA target sequence
ttttttagtgccgaccttaacaa

SEQ ID NO: 41498 - DNA, 23 bp, Artificial sequence
  SiRNA target sequence
tttttagtgccgaccttaacaaa

SEQ ID NO: 41499 - DNA, 23 bp, Artificial sequence
  SiRNA target sequence
ttttagtgccgaccttaacaaaa

SEQ ID NO: 41500 - DNA, 23 bp, Artificial sequence
  SiRNA target sequence
tttagtgccgaccttaacaaaat

SEQ ID NO: 41501 - DNA, 23 bp, Artificial sequence
  SiRNA target sequence
ttagtgccgaccttaacaaaatt

SEQ ID NO: 41502 - DNA, 23 bp, Artificial sequence
  SiRNA target sequence
tagtgccgaccttaacaaaatta

SEQ ID NO: 41503 - DNA, 23 bp, Artificial sequence
  SiRNA target sequence
agtgccgaccttaacaaaattac

SEQ ID NO: 41504 - DNA, 23 bp, Artificial sequence
  SiRNA target sequence
gtgccgaccttaacaaaattact

SEQ ID NO: 41505 - DNA, 23 bp, Artificial sequence
  SiRNA target sequence
tgccgaccttaacaaaattactt

SEQ ID NO: 41506 - DNA, 23 bp, Artificial sequence
  SiRNA target sequence
gccgaccttaacaaaattacttt

SEQ ID NO: 41507 - DNA, 23 bp, Artificial sequence
  SiRNA target sequence
ccgaccttaacaaaattactttt

SEQ ID NO: 41508 - DNA, 23 bp, Artificial sequence
  SiRNA target sequence
cgaccttaacaaaattacttttt

SEQ ID NO: 41509 - DNA, 23 bp, Artificial sequence
  SiRNA target sequence
gaccttaacaaaattactttttg

SEQ ID NO: 41510 - DNA, 23 bp, Artificial sequence
  SiRNA target sequence
accttaacaaaattactttttgt

SEQ ID NO: 41511 - DNA, 23 bp, Artificial sequence
  SiRNA target sequence
ccttaacaaaattactttttgtc

SEQ ID NO: 41512 - DNA, 23 bp, Artificial sequence
  SiRNA target sequence
cttaacaaaattactttttgtct

SEQ ID NO: 41513 - DNA, 23 bp, Artificial sequence
  SiRNA target sequence
ttaacaaaattactttttgtctt

SEQ ID NO: 41514 - DNA, 23 bp, Artificial sequence
  SiRNA target sequence
taacaaaattactttttgtcttt

SEQ ID NO: 41515 - DNA, 23 bp, Artificial sequence
  SiRNA target sequence
aacaaaattactttttgtctttc

SEQ ID NO: 41516 - DNA, 23 bp, Artificial sequence
  SiRNA target sequence
acaaaattactttttgtctttct

SEQ ID NO: 41517 - DNA, 23 bp, Artificial sequence
  SiRNA target sequence
caaaattactttttgtctttctc

SEQ ID NO: 41518 - DNA, 23 bp, Artificial sequence
  SiRNA target sequence
aaaattactttttgtctttctcc

SEQ ID NO: 41519 - DNA, 23 bp, Artificial sequence
  SiRNA target sequence
aaattactttttgtctttctcca

SEQ ID NO: 41520 - DNA, 23 bp, Artificial sequence
  SiRNA target sequence
aattactttttgtctttctccac

SEQ ID NO: 41521 - DNA, 23 bp, Artificial sequence
  SiRNA target sequence
attactttttgtctttctccacc

SEQ ID NO: 41522 - DNA, 23 bp, Artificial sequence
  SiRNA target sequence
ttactttttgtctttctccacca

SEQ ID NO: 41523 - DNA, 23 bp, Artificial sequence
  SiRNA target sequence
tactttttgtctttctccaccac

SEQ ID NO: 41524 - DNA, 23 bp, Artificial sequence
  SiRNA target sequence
actttttgtctttctccaccact

SEQ ID NO: 41525 - DNA, 23 bp, Artificial sequence
  SiRNA target sequence
ctttttgtctttctccaccacta

SEQ ID NO: 41526 - DNA, 23 bp, Artificial sequence
  SiRNA target sequence
tttttgtctttctccaccactaa

SEQ ID NO: 41527 - DNA, 23 bp, Artificial sequence
  SiRNA target sequence
ttttgtctttctccaccactaag

SEQ ID NO: 41528 - DNA, 23 bp, Artificial sequence
  SiRNA target sequence
tttgtctttctccaccactaagc

SEQ ID NO: 41529 - DNA, 23 bp, Artificial sequence
  SiRNA target sequence
ttgtctttctccaccactaagct

SEQ ID NO: 41530 - DNA, 23 bp, Artificial sequence
  SiRNA target sequence
tgtctttctccaccactaagctt

SEQ ID NO: 41531 - DNA, 23 bp, Artificial sequence
  SiRNA target sequence
gtctttctccaccactaagctta

SEQ ID NO: 41532 - DNA, 23 bp, Artificial sequence
  SiRNA target sequence
tctttctccaccactaagcttat

SEQ ID NO: 41533 - DNA, 23 bp, Artificial sequence
  SiRNA target sequence
ctttctccaccactaagcttatg

SEQ ID NO: 41534 - DNA, 23 bp, Artificial sequence
  SiRNA target sequence
tttctccaccactaagcttatgt

SEQ ID NO: 41535 - DNA, 23 bp, Artificial sequence
  SiRNA target sequence
ttctccaccactaagcttatgtc

SEQ ID NO: 41536 - DNA, 23 bp, Artificial sequence
  SiRNA target sequence
tctccaccactaagcttatgtcc

SEQ ID NO: 41537 - DNA, 23 bp, Artificial sequence
  SiRNA target sequence
ctccaccactaagcttatgtccc

SEQ ID NO: 41538 - DNA, 23 bp, Artificial sequence
  SiRNA target sequence
tccaccactaagcttatgtccct

SEQ ID NO: 41539 - DNA, 23 bp, Artificial sequence
  SiRNA target sequence
ccaccactaagcttatgtccctt

SEQ ID NO: 41540 - DNA, 23 bp, Artificial sequence
  SiRNA target sequence
caccactaagcttatgtccctta

SEQ ID NO: 41541 - DNA, 23 bp, Artificial sequence
  SiRNA target sequence
accactaagcttatgtcccttat

SEQ ID NO: 41542 - DNA, 23 bp, Artificial sequence
  SiRNA target sequence
ccactaagcttatgtcccttatc

SEQ ID NO: 41543 - DNA, 23 bp, Artificial sequence
  SiRNA target sequence
cactaagcttatgtcccttatct

SEQ ID NO: 41544 - DNA, 23 bp, Artificial sequence
  SiRNA target sequence
actaagcttatgtcccttatctc

SEQ ID NO: 41545 - DNA, 23 bp, Artificial sequence
  SiRNA target sequence
ctaagcttatgtcccttatctcc

SEQ ID NO: 41546 - DNA, 23 bp, Artificial sequence
  SiRNA target sequence
taagcttatgtcccttatctcca

SEQ ID NO: 41547 - DNA, 23 bp, Artificial sequence
  SiRNA target sequence
aagcttatgtcccttatctccaa

SEQ ID NO: 41548 - DNA, 23 bp, Artificial sequence
  SiRNA target sequence
agcttatgtcccttatctccaac

SEQ ID NO: 41549 - DNA, 23 bp, Artificial sequence
  SiRNA target sequence
gcttatgtcccttatctccaaca

SEQ ID NO: 41550 - DNA, 23 bp, Artificial sequence
  SiRNA target sequence
cttatgtcccttatctccaacat

SEQ ID NO: 41551 - DNA, 23 bp, Artificial sequence
  SiRNA target sequence
ttatgtcccttatctccaacatg

SEQ ID NO: 41552 - DNA, 23 bp, Artificial sequence
  SiRNA target sequence
tatgtcccttatctccaacatgt

SEQ ID NO: 41553 - DNA, 23 bp, Artificial sequence
  SiRNA target sequence
atgtcccttatctccaacatgtg

SEQ ID NO: 41554 - DNA, 23 bp, Artificial sequence
  SiRNA target sequence
tgtcccttatctccaacatgtgt

SEQ ID NO: 41555 - DNA, 23 bp, Artificial sequence
  SiRNA target sequence
gtcccttatctccaacatgtgtg

SEQ ID NO: 41556 - DNA, 23 bp, Artificial sequence
  SiRNA target sequence
tcccttatctccaacatgtgtgt

SEQ ID NO: 41557 - DNA, 23 bp, Artificial sequence
  SiRNA target sequence
cccttatctccaacatgtgtgtt

SEQ ID NO: 41558 - DNA, 23 bp, Artificial sequence
  SiRNA target sequence
ccttatctccaacatgtgtgttg

SEQ ID NO: 41559 - DNA, 23 bp, Artificial sequence
  SiRNA target sequence
cttatctccaacatgtgtgttgt

SEQ ID NO: 41560 - DNA, 23 bp, Artificial sequence
  SiRNA target sequence
ttatctccaacatgtgtgttgta

SEQ ID NO: 41561 - DNA, 23 bp, Artificial sequence
  SiRNA target sequence
tatctccaacatgtgtgttgtat

SEQ ID NO: 41562 - DNA, 23 bp, Artificial sequence
  SiRNA target sequence
atctccaacatgtgtgttgtatt

SEQ ID NO: 41563 - DNA, 23 bp, Artificial sequence
  SiRNA target sequence
tctccaacatgtgtgttgtattc

SEQ ID NO: 41564 - DNA, 23 bp, Artificial sequence
  SiRNA target sequence
ctccaacatgtgtgttgtattca

SEQ ID NO: 41565 - DNA, 23 bp, Artificial sequence
  SiRNA target sequence
tccaacatgtgtgttgtattcat

SEQ ID NO: 41566 - DNA, 23 bp, Artificial sequence
  SiRNA target sequence
ccaacatgtgtgttgtattcatc

SEQ ID NO: 41567 - DNA, 23 bp, Artificial sequence
  SiRNA target sequence
caacatgtgtgttgtattcatcc

SEQ ID NO: 41568 - DNA, 23 bp, Artificial sequence
  SiRNA target sequence
aacatgtgtgttgtattcatcct

SEQ ID NO: 41569 - DNA, 23 bp, Artificial sequence
  SiRNA target sequence
acatgtgtgttgtattcatcctc

SEQ ID NO: 41570 - DNA, 23 bp, Artificial sequence
  SiRNA target sequence
catgtgtgttgtattcatcctct

SEQ ID NO: 41571 - DNA, 23 bp, Artificial sequence
  SiRNA target sequence
atgtgtgttgtattcatcctcta

SEQ ID NO: 41572 - DNA, 23 bp, Artificial sequence
  SiRNA target sequence
tgtgtgttgtattcatcctctag

SEQ ID NO: 41573 - DNA, 23 bp, Artificial sequence
  SiRNA target sequence
gtgtgttgtattcatcctctagg

SEQ ID NO: 41574 - DNA, 23 bp, Artificial sequence
  SiRNA target sequence
tgtgttgtattcatcctctaggt

SEQ ID NO: 41575 - DNA, 23 bp, Artificial sequence
  SiRNA target sequence
gtgttgtattcatcctctaggtt

SEQ ID NO: 41576 - DNA, 23 bp, Artificial sequence
  SiRNA target sequence
tgttgtattcatcctctaggttg

SEQ ID NO: 41577 - DNA, 23 bp, Artificial sequence
  SiRNA target sequence
gttgtattcatcctctaggttgt

SEQ ID NO: 41578 - DNA, 23 bp, Artificial sequence
  SiRNA target sequence
ttgtattcatcctctaggttgtt

SEQ ID NO: 41579 - DNA, 23 bp, Artificial sequence
  SiRNA target sequence
tgtattcatcctctaggttgttt

SEQ ID NO: 41580 - DNA, 23 bp, Artificial sequence
  SiRNA target sequence
gtattcatcctctaggttgttta

SEQ ID NO: 41581 - DNA, 23 bp, Artificial sequence
  SiRNA target sequence
tattcatcctctaggttgtttat

SEQ ID NO: 41582 - DNA, 23 bp, Artificial sequence
  SiRNA target sequence
attcatcctctaggttgtttata

SEQ ID NO: 41583 - DNA, 23 bp, Artificial sequence
  SiRNA target sequence
ttcatcctctaggttgtttatag

SEQ ID NO: 41584 - DNA, 23 bp, Artificial sequence
  SiRNA target sequence
tcatcctctaggttgtttataga

SEQ ID NO: 41585 - DNA, 23 bp, Artificial sequence
  SiRNA target sequence
catcctctaggttgtttatagaa

SEQ ID NO: 41586 - DNA, 23 bp, Artificial sequence
  SiRNA target sequence
atcctctaggttgtttatagaat

SEQ ID NO: 41587 - DNA, 23 bp, Artificial sequence
  SiRNA target sequence
tcctctaggttgtttatagaatc

SEQ ID NO: 41588 - DNA, 23 bp, Artificial sequence
  SiRNA target sequence
cctctaggttgtttatagaatcg

SEQ ID NO: 41589 - DNA, 23 bp, Artificial sequence
  SiRNA target sequence
ctctaggttgtttatagaatcgt

SEQ ID NO: 41590 - DNA, 23 bp, Artificial sequence
  SiRNA target sequence
tctaggttgtttatagaatcgtg

SEQ ID NO: 41591 - DNA, 23 bp, Artificial sequence
  SiRNA target sequence
ctaggttgtttatagaatcgtgt

SEQ ID NO: 41592 - DNA, 23 bp, Artificial sequence
  SiRNA target sequence
taggttgtttatagaatcgtgta

SEQ ID NO: 41593 - DNA, 23 bp, Artificial sequence
  SiRNA target sequence
aggttgtttatagaatcgtgtac

SEQ ID NO: 41594 - DNA, 23 bp, Artificial sequence
  SiRNA target sequence
ggttgtttatagaatcgtgtaca

SEQ ID NO: 41595 - DNA, 23 bp, Artificial sequence
  SiRNA target sequence
gttgtttatagaatcgtgtacac

SEQ ID NO: 41596 - DNA, 23 bp, Artificial sequence
  SiRNA target sequence
ttgtttatagaatcgtgtacaca

SEQ ID NO: 41597 - DNA, 23 bp, Artificial sequence
  SiRNA target sequence
tgtttatagaatcgtgtacacaa

SEQ ID NO: 41598 - DNA, 23 bp, Artificial sequence
  SiRNA target sequence
gtttatagaatcgtgtacacaaa

SEQ ID NO: 41599 - DNA, 23 bp, Artificial sequence
  SiRNA target sequence
tttatagaatcgtgtacacaaag

SEQ ID NO: 41600 - DNA, 23 bp, Artificial sequence
  SiRNA target sequence
ttatagaatcgtgtacacaaagt

SEQ ID NO: 41601 - DNA, 23 bp, Artificial sequence
  SiRNA target sequence
tatagaatcgtgtacacaaagtt

SEQ ID NO: 41602 - DNA, 23 bp, Artificial sequence
  SiRNA target sequence
atagaatcgtgtacacaaagttt

SEQ ID NO: 41603 - DNA, 23 bp, Artificial sequence
  SiRNA target sequence
tagaatcgtgtacacaaagtttt

SEQ ID NO: 41604 - DNA, 23 bp, Artificial sequence
  SiRNA target sequence
agaatcgtgtacacaaagttttt

SEQ ID NO: 41605 - DNA, 23 bp, Artificial sequence
  SiRNA target sequence
gaatcgtgtacacaaagtttttt

SEQ ID NO: 41606 - DNA, 23 bp, Artificial sequence
  SiRNA target sequence
aatcgtgtacacaaagtttttta

SEQ ID NO: 41607 - DNA, 23 bp, Artificial sequence
  SiRNA target sequence
atcgtgtacacaaagttttttac

SEQ ID NO: 41608 - DNA, 23 bp, Artificial sequence
  SiRNA target sequence
tcgtgtacacaaagttttttact

SEQ ID NO: 41609 - DNA, 23 bp, Artificial sequence
  SiRNA target sequence
cgtgtacacaaagttttttactg

SEQ ID NO: 41610 - DNA, 23 bp, Artificial sequence
  SiRNA target sequence
gtgtacacaaagttttttactga

SEQ ID NO: 41611 - DNA, 23 bp, Artificial sequence
  SiRNA target sequence
tgtacacaaagttttttactgat

SEQ ID NO: 41612 - DNA, 23 bp, Artificial sequence
  SiRNA target sequence
gtacacaaagttttttactgatt

SEQ ID NO: 41613 - DNA, 23 bp, Artificial sequence
  SiRNA target sequence
tacacaaagttttttactgattt

SEQ ID NO: 41614 - DNA, 23 bp, Artificial sequence
  SiRNA target sequence
acacaaagttttttactgatttt

SEQ ID NO: 41615 - DNA, 23 bp, Artificial sequence
  SiRNA target sequence
cacaaagttttttactgattttt

SEQ ID NO: 41616 - DNA, 23 bp, Artificial sequence
  SiRNA target sequence
acaaagttttttactgattttta

SEQ ID NO: 41617 - DNA, 23 bp, Artificial sequence
  SiRNA target sequence
caaagttttttactgatttttat

SEQ ID NO: 41618 - DNA, 23 bp, Artificial sequence
  SiRNA target sequence
aaagttttttactgatttttata

SEQ ID NO: 41619 - DNA, 23 bp, Artificial sequence
  SiRNA target sequence
aagttttttactgatttttataa

SEQ ID NO: 41620 - DNA, 23 bp, Artificial sequence
  SiRNA target sequence
agttttttactgatttttataac

SEQ ID NO: 41621 - DNA, 23 bp, Artificial sequence
  SiRNA target sequence
gttttttactgatttttataact

SEQ ID NO: 41622 - DNA, 23 bp, Artificial sequence
  SiRNA target sequence
ttttttactgatttttataactt

SEQ ID NO: 41623 - DNA, 23 bp, Artificial sequence
  SiRNA target sequence
tttttactgatttttataacttc

SEQ ID NO: 41624 - DNA, 23 bp, Artificial sequence
  SiRNA target sequence
ttttactgatttttataacttct

SEQ ID NO: 41625 - DNA, 23 bp, Artificial sequence
  SiRNA target sequence
tttactgatttttataacttctt

SEQ ID NO: 41626 - DNA, 23 bp, Artificial sequence
  SiRNA target sequence
ttactgatttttataacttcttc

SEQ ID NO: 41627 - DNA, 23 bp, Artificial sequence
  SiRNA target sequence
tactgatttttataacttcttct

SEQ ID NO: 41628 - DNA, 23 bp, Artificial sequence
  SiRNA target sequence
actgatttttataacttcttctt

SEQ ID NO: 41629 - DNA, 23 bp, Artificial sequence
  SiRNA target sequence
ctgatttttataacttcttcttt

SEQ ID NO: 41630 - DNA, 23 bp, Artificial sequence
  SiRNA target sequence
tgatttttataacttcttcttta

SEQ ID NO: 41631 - DNA, 23 bp, Artificial sequence
  SiRNA target sequence
gatttttataacttcttctttat

SEQ ID NO: 41632 - DNA, 23 bp, Artificial sequence
  SiRNA target sequence
atttttataacttcttctttatc

SEQ ID NO: 41633 - DNA, 23 bp, Artificial sequence
  SiRNA target sequence
tttttataacttcttctttatca

SEQ ID NO: 41634 - DNA, 23 bp, Artificial sequence
  SiRNA target sequence
ttttataacttcttctttatcaa

SEQ ID NO: 41635 - DNA, 23 bp, Artificial sequence
  SiRNA target sequence
tttataacttcttctttatcaaa

SEQ ID NO: 41636 - DNA, 23 bp, Artificial sequence
  SiRNA target sequence
ttataacttcttctttatcaaat

SEQ ID NO: 41637 - DNA, 23 bp, Artificial sequence
  SiRNA target sequence
tataacttcttctttatcaaata

SEQ ID NO: 41638 - DNA, 23 bp, Artificial sequence
  SiRNA target sequence
ataacttcttctttatcaaatat

SEQ ID NO: 41639 - DNA, 23 bp, Artificial sequence
  SiRNA target sequence
taacttcttctttatcaaatatt

SEQ ID NO: 41640 - DNA, 23 bp, Artificial sequence
  SiRNA target sequence
aacttcttctttatcaaatattt

SEQ ID NO: 41641 - DNA, 23 bp, Artificial sequence
  SiRNA target sequence
acttcttctttatcaaatatttc

SEQ ID NO: 41642 - DNA, 23 bp, Artificial sequence
  SiRNA target sequence
cttcttctttatcaaatatttct

SEQ ID NO: 41643 - DNA, 23 bp, Artificial sequence
  SiRNA target sequence
ttcttctttatcaaatatttctt

SEQ ID NO: 41644 - DNA, 23 bp, Artificial sequence
  SiRNA target sequence
tcttctttatcaaatatttcttt

SEQ ID NO: 41645 - DNA, 23 bp, Artificial sequence
  SiRNA target sequence
cttctttatcaaatatttctttt

SEQ ID NO: 41646 - DNA, 23 bp, Artificial sequence
  SiRNA target sequence
ttctttatcaaatatttcttttc

SEQ ID NO: 41647 - DNA, 23 bp, Artificial sequence
  SiRNA target sequence
tctttatcaaatatttcttttcc

SEQ ID NO: 41648 - DNA, 23 bp, Artificial sequence
  SiRNA target sequence
ctttatcaaatatttcttttcca

SEQ ID NO: 41649 - DNA, 23 bp, Artificial sequence
  SiRNA target sequence
tttatcaaatatttcttttccat

SEQ ID NO: 41650 - DNA, 23 bp, Artificial sequence
  SiRNA target sequence
ttatcaaatatttcttttccata

SEQ ID NO: 41651 - DNA, 23 bp, Artificial sequence
  SiRNA target sequence
tatcaaatatttcttttccatat

SEQ ID NO: 41652 - DNA, 23 bp, Artificial sequence
  SiRNA target sequence
atcaaatatttcttttccatatg

SEQ ID NO: 41653 - DNA, 23 bp, Artificial sequence
  SiRNA target sequence
tcaaatatttcttttccatatgt

SEQ ID NO: 41654 - DNA, 23 bp, Artificial sequence
  SiRNA target sequence
caaatatttcttttccatatgtt

SEQ ID NO: 41655 - DNA, 23 bp, Artificial sequence
  SiRNA target sequence
aaatatttcttttccatatgtta

SEQ ID NO: 41656 - DNA, 23 bp, Artificial sequence
  SiRNA target sequence
aatatttcttttccatatgttaa

SEQ ID NO: 41657 - DNA, 23 bp, Artificial sequence
  SiRNA target sequence
atatttcttttccatatgttaaa

SEQ ID NO: 41658 - DNA, 23 bp, Artificial sequence
  SiRNA target sequence
tatttcttttccatatgttaaat

SEQ ID NO: 41659 - DNA, 23 bp, Artificial sequence
  SiRNA target sequence
atttcttttccatatgttaaatt

SEQ ID NO: 41660 - DNA, 23 bp, Artificial sequence
  SiRNA target sequence
tttcttttccatatgttaaatta

SEQ ID NO: 41661 - DNA, 23 bp, Artificial sequence
  SiRNA target sequence
ttcttttccatatgttaaattat

SEQ ID NO: 41662 - DNA, 23 bp, Artificial sequence
  SiRNA target sequence
tcttttccatatgttaaattata

SEQ ID NO: 41663 - DNA, 23 bp, Artificial sequence
  SiRNA target sequence
cttttccatatgttaaattataa

SEQ ID NO: 41664 - DNA, 23 bp, Artificial sequence
  SiRNA target sequence
ttttccatatgttaaattataat

SEQ ID NO: 41665 - DNA, 23 bp, Artificial sequence
  SiRNA target sequence
tttccatatgttaaattataata

SEQ ID NO: 41666 - DNA, 23 bp, Artificial sequence
  SiRNA target sequence
ttccatatgttaaattataataa

SEQ ID NO: 41667 - DNA, 23 bp, Artificial sequence
  SiRNA target sequence
tccatatgttaaattataataaa

SEQ ID NO: 41668 - DNA, 23 bp, Artificial sequence
  SiRNA target sequence
ccatatgttaaattataataaac

SEQ ID NO: 41669 - DNA, 23 bp, Artificial sequence
  SiRNA target sequence
catatgttaaattataataaacc

SEQ ID NO: 41670 - DNA, 23 bp, Artificial sequence
  SiRNA target sequence
atatgttaaattataataaaccg

SEQ ID NO: 41671 - DNA, 23 bp, Artificial sequence
  SiRNA target sequence
tatgttaaattataataaaccgt

SEQ ID NO: 41672 - DNA, 23 bp, Artificial sequence
  SiRNA target sequence
atgttaaattataataaaccgtt

SEQ ID NO: 41673 - DNA, 23 bp, Artificial sequence
  SiRNA target sequence
tgttaaattataataaaccgttt

SEQ ID NO: 41674 - DNA, 23 bp, Artificial sequence
  SiRNA target sequence
gttaaattataataaaccgtttc

SEQ ID NO: 41675 - DNA, 23 bp, Artificial sequence
  SiRNA target sequence
ttaaattataataaaccgtttcg

SEQ ID NO: 41676 - DNA, 23 bp, Artificial sequence
  SiRNA target sequence
taaattataataaaccgtttcgt

SEQ ID NO: 41677 - DNA, 23 bp, Artificial sequence
  SiRNA target sequence
aaattataataaaccgtttcgtt

SEQ ID NO: 41678 - DNA, 23 bp, Artificial sequence
  SiRNA target sequence
aattataataaaccgtttcgtta

SEQ ID NO: 41679 - DNA, 23 bp, Artificial sequence
  SiRNA target sequence
attataataaaccgtttcgttaa

SEQ ID NO: 41680 - DNA, 23 bp, Artificial sequence
  SiRNA target sequence
ttataataaaccgtttcgttaaa

SEQ ID NO: 41681 - DNA, 23 bp, Artificial sequence
  SiRNA target sequence
tataataaaccgtttcgttaaac

SEQ ID NO: 41682 - DNA, 23 bp, Artificial sequence
  SiRNA target sequence
ataataaaccgtttcgttaaaca

SEQ ID NO: 41683 - DNA, 23 bp, Artificial sequence
  SiRNA target sequence
taataaaccgtttcgttaaacaa

SEQ ID NO: 41684 - DNA, 23 bp, Artificial sequence
  SiRNA target sequence
aataaaccgtttcgttaaacaaa

SEQ ID NO: 41685 - DNA, 23 bp, Artificial sequence
  SiRNA target sequence
ataaaccgtttcgttaaacaaaa

SEQ ID NO: 41686 - DNA, 23 bp, Artificial sequence
  SiRNA target sequence
taaaccgtttcgttaaacaaaaa

SEQ ID NO: 41687 - DNA, 23 bp, Artificial sequence
  SiRNA target sequence
aaaccgtttcgttaaacaaaaat

SEQ ID NO: 41688 - DNA, 23 bp, Artificial sequence
  SiRNA target sequence
aaccgtttcgttaaacaaaaatg

SEQ ID NO: 41689 - DNA, 23 bp, Artificial sequence
  SiRNA target sequence
accgtttcgttaaacaaaaatga

SEQ ID NO: 41690 - DNA, 23 bp, Artificial sequence
  SiRNA target sequence
ccgtttcgttaaacaaaaatgag

SEQ ID NO: 41691 - DNA, 23 bp, Artificial sequence
  SiRNA target sequence
cgtttcgttaaacaaaaatgagg

SEQ ID NO: 41692 - DNA, 23 bp, Artificial sequence
  SiRNA target sequence
gtttcgttaaacaaaaatgaggt

SEQ ID NO: 41693 - DNA, 23 bp, Artificial sequence
  SiRNA target sequence
tttcgttaaacaaaaatgaggtt

SEQ ID NO: 41694 - DNA, 23 bp, Artificial sequence
  SiRNA target sequence
ttcgttaaacaaaaatgaggttt

SEQ ID NO: 41695 - DNA, 23 bp, Artificial sequence
  SiRNA target sequence
tcgttaaacaaaaatgaggtttg

SEQ ID NO: 41696 - DNA, 23 bp, Artificial sequence
  SiRNA target sequence
cgttaaacaaaaatgaggtttgt

SEQ ID NO: 41697 - DNA, 23 bp, Artificial sequence
  SiRNA target sequence
gttaaacaaaaatgaggtttgtg

SEQ ID NO: 41698 - DNA, 23 bp, Artificial sequence
  SiRNA target sequence
ttaaacaaaaatgaggtttgtgg

SEQ ID NO: 41699 - DNA, 23 bp, Artificial sequence
  SiRNA target sequence
taaacaaaaatgaggtttgtggt

SEQ ID NO: 41700 - DNA, 23 bp, Artificial sequence
  SiRNA target sequence
aaacaaaaatgaggtttgtggtg

SEQ ID NO: 41701 - DNA, 23 bp, Artificial sequence
  SiRNA target sequence
aacaaaaatgaggtttgtggtgc

SEQ ID NO: 41702 - DNA, 23 bp, Artificial sequence
  SiRNA target sequence
acaaaaatgaggtttgtggtgca

SEQ ID NO: 41703 - DNA, 23 bp, Artificial sequence
  SiRNA target sequence
caaaaatgaggtttgtggtgcaa

SEQ ID NO: 41704 - DNA, 23 bp, Artificial sequence
  SiRNA target sequence
aaaaatgaggtttgtggtgcaaa

SEQ ID NO: 41705 - DNA, 23 bp, Artificial sequence
  SiRNA target sequence
aaaatgaggtttgtggtgcaaat

SEQ ID NO: 41706 - DNA, 23 bp, Artificial sequence
  SiRNA target sequence
aaatgaggtttgtggtgcaaatg

SEQ ID NO: 41707 - DNA, 23 bp, Artificial sequence
  SiRNA target sequence
aatgaggtttgtggtgcaaatga

SEQ ID NO: 41708 - DNA, 23 bp, Artificial sequence
  SiRNA target sequence
atgaggtttgtggtgcaaatgat

SEQ ID NO: 41709 - DNA, 23 bp, Artificial sequence
  SiRNA target sequence
tgaggtttgtggtgcaaatgata

SEQ ID NO: 41710 - DNA, 23 bp, Artificial sequence
  SiRNA target sequence
gaggtttgtggtgcaaatgatat

SEQ ID NO: 41711 - DNA, 23 bp, Artificial sequence
  SiRNA target sequence
aggtttgtggtgcaaatgatata

SEQ ID NO: 41712 - DNA, 23 bp, Artificial sequence
  SiRNA target sequence
ggtttgtggtgcaaatgatataa

SEQ ID NO: 41713 - DNA, 23 bp, Artificial sequence
  SiRNA target sequence
gtttgtggtgcaaatgatataag

SEQ ID NO: 41714 - DNA, 23 bp, Artificial sequence
  SiRNA target sequence
tttgtggtgcaaatgatataagt

SEQ ID NO: 41715 - DNA, 23 bp, Artificial sequence
  SiRNA target sequence
ttgtggtgcaaatgatataagtg

SEQ ID NO: 41716 - DNA, 23 bp, Artificial sequence
  SiRNA target sequence
tgtggtgcaaatgatataagtga

SEQ ID NO: 41717 - DNA, 23 bp, Artificial sequence
  SiRNA target sequence
gtggtgcaaatgatataagtgat

SEQ ID NO: 41718 - DNA, 23 bp, Artificial sequence
  SiRNA target sequence
tggtgcaaatgatataagtgatc

SEQ ID NO: 41719 - DNA, 23 bp, Artificial sequence
  SiRNA target sequence
ggtgcaaatgatataagtgatct

SEQ ID NO: 41720 - DNA, 23 bp, Artificial sequence
  SiRNA target sequence
gtgcaaatgatataagtgatcta

SEQ ID NO: 41721 - DNA, 23 bp, Artificial sequence
  SiRNA target sequence
tgcaaatgatataagtgatctat

SEQ ID NO: 41722 - DNA, 23 bp, Artificial sequence
  SiRNA target sequence
gcaaatgatataagtgatctata

SEQ ID NO: 41723 - DNA, 23 bp, Artificial sequence
  SiRNA target sequence
caaatgatataagtgatctatat

SEQ ID NO: 41724 - DNA, 23 bp, Artificial sequence
  SiRNA target sequence
aaatgatataagtgatctatatg

SEQ ID NO: 41725 - DNA, 23 bp, Artificial sequence
  SiRNA target sequence
aatgatataagtgatctatatga

SEQ ID NO: 41726 - DNA, 23 bp, Artificial sequence
  SiRNA target sequence
atgatataagtgatctatatgaa

SEQ ID NO: 41727 - DNA, 23 bp, Artificial sequence
  SiRNA target sequence
tgatataagtgatctatatgaac

SEQ ID NO: 41728 - DNA, 23 bp, Artificial sequence
  SiRNA target sequence
gatataagtgatctatatgaact

SEQ ID NO: 41729 - DNA, 23 bp, Artificial sequence
  SiRNA target sequence
atataagtgatctatatgaacta

SEQ ID NO: 41730 - DNA, 23 bp, Artificial sequence
  SiRNA target sequence
tataagtgatctatatgaactat

SEQ ID NO: 41731 - DNA, 23 bp, Artificial sequence
  SiRNA target sequence
ataagtgatctatatgaactatt

SEQ ID NO: 41732 - DNA, 23 bp, Artificial sequence
  SiRNA target sequence
taagtgatctatatgaactatta

SEQ ID NO: 41733 - DNA, 23 bp, Artificial sequence
  SiRNA target sequence
aagtgatctatatgaactattag

SEQ ID NO: 41734 - DNA, 23 bp, Artificial sequence
  SiRNA target sequence
agtgatctatatgaactattaga

SEQ ID NO: 41735 - DNA, 23 bp, Artificial sequence
  SiRNA target sequence
gtgatctatatgaactattagaa

SEQ ID NO: 41736 - DNA, 23 bp, Artificial sequence
  SiRNA target sequence
tgatctatatgaactattagaaa

SEQ ID NO: 41737 - DNA, 23 bp, Artificial sequence
  SiRNA target sequence
gatctatatgaactattagaaat

SEQ ID NO: 41738 - DNA, 23 bp, Artificial sequence
  SiRNA target sequence
atctatatgaactattagaaatt

SEQ ID NO: 41739 - DNA, 23 bp, Artificial sequence
  SiRNA target sequence
tctatatgaactattagaaattt

SEQ ID NO: 41740 - DNA, 23 bp, Artificial sequence
  SiRNA target sequence
ctatatgaactattagaaatttc

SEQ ID NO: 41741 - DNA, 23 bp, Artificial sequence
  SiRNA target sequence
tatatgaactattagaaatttct

SEQ ID NO: 41742 - DNA, 23 bp, Artificial sequence
  SiRNA target sequence
atatgaactattagaaatttctt

SEQ ID NO: 41743 - DNA, 23 bp, Artificial sequence
  SiRNA target sequence
tatgaactattagaaatttcttt

SEQ ID NO: 41744 - DNA, 23 bp, Artificial sequence
  SiRNA target sequence
atgaactattagaaatttctttt

SEQ ID NO: 41745 - DNA, 23 bp, Artificial sequence
  SiRNA target sequence
tgaactattagaaatttctttta

SEQ ID NO: 41746 - DNA, 23 bp, Artificial sequence
  SiRNA target sequence
gaactattagaaatttcttttat

SEQ ID NO: 41747 - DNA, 23 bp, Artificial sequence
  SiRNA target sequence
aactattagaaatttcttttata

SEQ ID NO: 41748 - DNA, 23 bp, Artificial sequence
  SiRNA target sequence
actattagaaatttcttttatat

SEQ ID NO: 41749 - DNA, 23 bp, Artificial sequence
  SiRNA target sequence
ctattagaaatttcttttatatc

SEQ ID NO: 41750 - DNA, 23 bp, Artificial sequence
  SiRNA target sequence
tattagaaatttcttttatatct

SEQ ID NO: 41751 - DNA, 23 bp, Artificial sequence
  SiRNA target sequence
attagaaatttcttttatatctc

SEQ ID NO: 41752 - DNA, 23 bp, Artificial sequence
  SiRNA target sequence
ttagaaatttcttttatatctcg

SEQ ID NO: 41753 - DNA, 23 bp, Artificial sequence
  SiRNA target sequence
tagaaatttcttttatatctcga

SEQ ID NO: 41754 - DNA, 23 bp, Artificial sequence
  SiRNA target sequence
agaaatttcttttatatctcgat

SEQ ID NO: 41755 - DNA, 23 bp, Artificial sequence
  SiRNA target sequence
gaaatttcttttatatctcgatt

SEQ ID NO: 41756 - DNA, 23 bp, Artificial sequence
  SiRNA target sequence
aaatttcttttatatctcgatta

SEQ ID NO: 41757 - DNA, 23 bp, Artificial sequence
  SiRNA target sequence
aatttcttttatatctcgattat

SEQ ID NO: 41758 - DNA, 23 bp, Artificial sequence
  SiRNA target sequence
atttcttttatatctcgattatc

SEQ ID NO: 41759 - DNA, 23 bp, Artificial sequence
  SiRNA target sequence
tttcttttatatctcgattatct

SEQ ID NO: 41760 - DNA, 23 bp, Artificial sequence
  SiRNA target sequence
ttcttttatatctcgattatcta

SEQ ID NO: 41761 - DNA, 23 bp, Artificial sequence
  SiRNA target sequence
tcttttatatctcgattatctag

SEQ ID NO: 41762 - DNA, 23 bp, Artificial sequence
  SiRNA target sequence
cttttatatctcgattatctaga

SEQ ID NO: 41763 - DNA, 23 bp, Artificial sequence
  SiRNA target sequence
ttttatatctcgattatctagat

SEQ ID NO: 41764 - DNA, 23 bp, Artificial sequence
  SiRNA target sequence
tttatatctcgattatctagata

SEQ ID NO: 41765 - DNA, 23 bp, Artificial sequence
  SiRNA target sequence
ttatatctcgattatctagataa

SEQ ID NO: 41766 - DNA, 23 bp, Artificial sequence
  SiRNA target sequence
tatatctcgattatctagataaa

SEQ ID NO: 41767 - DNA, 23 bp, Artificial sequence
  SiRNA target sequence
atatctcgattatctagataaat

SEQ ID NO: 41768 - DNA, 23 bp, Artificial sequence
  SiRNA target sequence
tatctcgattatctagataaata

SEQ ID NO: 41769 - DNA, 23 bp, Artificial sequence
  SiRNA target sequence
atctcgattatctagataaatat

SEQ ID NO: 41770 - DNA, 23 bp, Artificial sequence
  SiRNA target sequence
tctcgattatctagataaatatt

SEQ ID NO: 41771 - DNA, 23 bp, Artificial sequence
  SiRNA target sequence
ctcgattatctagataaatattt

SEQ ID NO: 41772 - DNA, 23 bp, Artificial sequence
  SiRNA target sequence
tcgattatctagataaatatttc

SEQ ID NO: 41773 - DNA, 23 bp, Artificial sequence
  SiRNA target sequence
cgattatctagataaatatttcc

SEQ ID NO: 41774 - DNA, 23 bp, Artificial sequence
  SiRNA target sequence
gattatctagataaatatttccc

SEQ ID NO: 41775 - DNA, 23 bp, Artificial sequence
  SiRNA target sequence
attatctagataaatatttcccc

SEQ ID NO: 41776 - DNA, 23 bp, Artificial sequence
  SiRNA target sequence
ttatctagataaatatttccccc

SEQ ID NO: 41777 - DNA, 23 bp, Artificial sequence
  SiRNA target sequence
tatctagataaatatttccccca

SEQ ID NO: 41778 - DNA, 23 bp, Artificial sequence
  SiRNA target sequence
atctagataaatatttcccccat

SEQ ID NO: 41779 - DNA, 23 bp, Artificial sequence
  SiRNA target sequence
tctagataaatatttcccccata

SEQ ID NO: 41780 - DNA, 23 bp, Artificial sequence
  SiRNA target sequence
ctagataaatatttcccccataa

SEQ ID NO: 41781 - DNA, 23 bp, Artificial sequence
  SiRNA target sequence
tagataaatatttcccccataat

SEQ ID NO: 41782 - DNA, 23 bp, Artificial sequence
  SiRNA target sequence
agataaatatttcccccataatt

SEQ ID NO: 41783 - DNA, 23 bp, Artificial sequence
  SiRNA target sequence
gataaatatttcccccataattt

SEQ ID NO: 41784 - DNA, 23 bp, Artificial sequence
  SiRNA target sequence
ataaatatttcccccataatttt

SEQ ID NO: 41785 - DNA, 23 bp, Artificial sequence
  SiRNA target sequence
taaatatttcccccataattttc

SEQ ID NO: 41786 - DNA, 23 bp, Artificial sequence
  SiRNA target sequence
aaatatttcccccataattttca

SEQ ID NO: 41787 - DNA, 23 bp, Artificial sequence
  SiRNA target sequence
aatatttcccccataattttcaa

SEQ ID NO: 41788 - DNA, 23 bp, Artificial sequence
  SiRNA target sequence
atatttcccccataattttcaaa

SEQ ID NO: 41789 - DNA, 23 bp, Artificial sequence
  SiRNA target sequence
tatttcccccataattttcaaat

SEQ ID NO: 41790 - DNA, 23 bp, Artificial sequence
  SiRNA target sequence
atttcccccataattttcaaatc

SEQ ID NO: 41791 - DNA, 23 bp, Artificial sequence
  SiRNA target sequence
tttcccccataattttcaaatct

SEQ ID NO: 41792 - DNA, 23 bp, Artificial sequence
  SiRNA target sequence
ttcccccataattttcaaatctc

SEQ ID NO: 41793 - DNA, 23 bp, Artificial sequence
  SiRNA target sequence
tcccccataattttcaaatctca

SEQ ID NO: 41794 - DNA, 23 bp, Artificial sequence
  SiRNA target sequence
cccccataattttcaaatctcat

SEQ ID NO: 41795 - DNA, 23 bp, Artificial sequence
  SiRNA target sequence
ccccataattttcaaatctcata

SEQ ID NO: 41796 - DNA, 23 bp, Artificial sequence
  SiRNA target sequence
cccataattttcaaatctcataa

SEQ ID NO: 41797 - DNA, 23 bp, Artificial sequence
  SiRNA target sequence
ccataattttcaaatctcataat

SEQ ID NO: 41798 - DNA, 23 bp, Artificial sequence
  SiRNA target sequence
cataattttcaaatctcataatc

SEQ ID NO: 41799 - DNA, 23 bp, Artificial sequence
  SiRNA target sequence
ataattttcaaatctcataatca

SEQ ID NO: 41800 - DNA, 23 bp, Artificial sequence
  SiRNA target sequence
taattttcaaatctcataatcat

SEQ ID NO: 41801 - DNA, 23 bp, Artificial sequence
  SiRNA target sequence
aattttcaaatctcataatcatc

SEQ ID NO: 41802 - DNA, 23 bp, Artificial sequence
  SiRNA target sequence
attttcaaatctcataatcatct

SEQ ID NO: 41803 - DNA, 23 bp, Artificial sequence
  SiRNA target sequence
ttttcaaatctcataatcatctt

SEQ ID NO: 41804 - DNA, 23 bp, Artificial sequence
  SiRNA target sequence
tttcaaatctcataatcatcttt

SEQ ID NO: 41805 - DNA, 23 bp, Artificial sequence
  SiRNA target sequence
ttcaaatctcataatcatcttta

SEQ ID NO: 41806 - DNA, 23 bp, Artificial sequence
  SiRNA target sequence
tcaaatctcataatcatctttat

SEQ ID NO: 41807 - DNA, 23 bp, Artificial sequence
  SiRNA target sequence
caaatctcataatcatctttata

SEQ ID NO: 41808 - DNA, 23 bp, Artificial sequence
  SiRNA target sequence
aaatctcataatcatctttataa

SEQ ID NO: 41809 - DNA, 23 bp, Artificial sequence
  SiRNA target sequence
aatctcataatcatctttataag

SEQ ID NO: 41810 - DNA, 23 bp, Artificial sequence
  SiRNA target sequence
atctcataatcatctttataaga

SEQ ID NO: 41811 - DNA, 23 bp, Artificial sequence
  SiRNA target sequence
tctcataatcatctttataagag

SEQ ID NO: 41812 - DNA, 23 bp, Artificial sequence
  SiRNA target sequence
ctcataatcatctttataagaga

SEQ ID NO: 41813 - DNA, 23 bp, Artificial sequence
  SiRNA target sequence
tcataatcatctttataagagat

SEQ ID NO: 41814 - DNA, 23 bp, Artificial sequence
  SiRNA target sequence
cataatcatctttataagagatg

SEQ ID NO: 41815 - DNA, 23 bp, Artificial sequence
  SiRNA target sequence
ataatcatctttataagagatgt

SEQ ID NO: 41816 - DNA, 23 bp, Artificial sequence
  SiRNA target sequence
taatcatctttataagagatgtt

SEQ ID NO: 41817 - DNA, 23 bp, Artificial sequence
  SiRNA target sequence
aatcatctttataagagatgttt

SEQ ID NO: 41818 - DNA, 23 bp, Artificial sequence
  SiRNA target sequence
atcatctttataagagatgtttt

SEQ ID NO: 41819 - DNA, 23 bp, Artificial sequence
  SiRNA target sequence
tcatctttataagagatgttttt

SEQ ID NO: 41820 - DNA, 23 bp, Artificial sequence
  SiRNA target sequence
catctttataagagatgtttttc

SEQ ID NO: 41821 - DNA, 23 bp, Artificial sequence
  SiRNA target sequence
atctttataagagatgtttttcc

SEQ ID NO: 41822 - DNA, 23 bp, Artificial sequence
  SiRNA target sequence
tctttataagagatgtttttccc

SEQ ID NO: 41823 - DNA, 23 bp, Artificial sequence
  SiRNA target sequence
ctttataagagatgtttttcccg

SEQ ID NO: 41824 - DNA, 23 bp, Artificial sequence
  SiRNA target sequence
tttataagagatgtttttcccga

SEQ ID NO: 41825 - DNA, 23 bp, Artificial sequence
  SiRNA target sequence
ttataagagatgtttttcccgat

SEQ ID NO: 41826 - DNA, 23 bp, Artificial sequence
  SiRNA target sequence
tataagagatgtttttcccgatc

SEQ ID NO: 41827 - DNA, 23 bp, Artificial sequence
  SiRNA target sequence
ataagagatgtttttcccgatcc

SEQ ID NO: 41828 - DNA, 23 bp, Artificial sequence
  SiRNA target sequence
taagagatgtttttcccgatcca

SEQ ID NO: 41829 - DNA, 23 bp, Artificial sequence
  SiRNA target sequence
aagagatgtttttcccgatccat

SEQ ID NO: 41830 - DNA, 23 bp, Artificial sequence
  SiRNA target sequence
agagatgtttttcccgatccatt

SEQ ID NO: 41831 - DNA, 23 bp, Artificial sequence
  SiRNA target sequence
gagatgtttttcccgatccattt

SEQ ID NO: 41832 - DNA, 23 bp, Artificial sequence
  SiRNA target sequence
agatgtttttcccgatccatttt

SEQ ID NO: 41833 - DNA, 23 bp, Artificial sequence
  SiRNA target sequence
gatgtttttcccgatccattttt

SEQ ID NO: 41834 - DNA, 23 bp, Artificial sequence
  SiRNA target sequence
atgtttttcccgatccatttttt

SEQ ID NO: 41835 - DNA, 23 bp, Artificial sequence
  SiRNA target sequence
tgtttttcccgatccattttttc

SEQ ID NO: 41836 - DNA, 23 bp, Artificial sequence
  SiRNA target sequence
gtttttcccgatccattttttcc

SEQ ID NO: 41837 - DNA, 23 bp, Artificial sequence
  SiRNA target sequence
tttttcccgatccattttttcca

SEQ ID NO: 41838 - DNA, 23 bp, Artificial sequence
  SiRNA target sequence
ttttcccgatccattttttccaa

SEQ ID NO: 41839 - DNA, 23 bp, Artificial sequence
  SiRNA target sequence
tttcccgatccattttttccaat

SEQ ID NO: 41840 - DNA, 23 bp, Artificial sequence
  SiRNA target sequence
ttcccgatccattttttccaata

SEQ ID NO: 41841 - DNA, 23 bp, Artificial sequence
  SiRNA target sequence
tcccgatccattttttccaataa

SEQ ID NO: 41842 - DNA, 23 bp, Artificial sequence
  SiRNA target sequence
cccgatccattttttccaataat

SEQ ID NO: 41843 - DNA, 23 bp, Artificial sequence
  SiRNA target sequence
ccgatccattttttccaataata

SEQ ID NO: 41844 - DNA, 23 bp, Artificial sequence
  SiRNA target sequence
cgatccattttttccaataatag

SEQ ID NO: 41845 - DNA, 23 bp, Artificial sequence
  SiRNA target sequence
gatccattttttccaataatagc

SEQ ID NO: 41846 - DNA, 23 bp, Artificial sequence
  SiRNA target sequence
atccattttttccaataatagct

SEQ ID NO: 41847 - DNA, 23 bp, Artificial sequence
  SiRNA target sequence
tccattttttccaataatagcta

SEQ ID NO: 41848 - DNA, 23 bp, Artificial sequence
  SiRNA target sequence
ccattttttccaataatagctac

SEQ ID NO: 41849 - DNA, 23 bp, Artificial sequence
  SiRNA target sequence
cattttttccaataatagctact

SEQ ID NO: 41850 - DNA, 23 bp, Artificial sequence
  SiRNA target sequence
attttttccaataatagctactt

SEQ ID NO: 41851 - DNA, 23 bp, Artificial sequence
  SiRNA target sequence
ttttttccaataatagctacttt

SEQ ID NO: 41852 - DNA, 23 bp, Artificial sequence
  SiRNA target sequence
tttttccaataatagctactttt

SEQ ID NO: 41853 - DNA, 23 bp, Artificial sequence
  SiRNA target sequence
ttttccaataatagctacttttt

SEQ ID NO: 41854 - DNA, 23 bp, Artificial sequence
  SiRNA target sequence
tttccaataatagctactttttc

SEQ ID NO: 41855 - DNA, 23 bp, Artificial sequence
  SiRNA target sequence
ttccaataatagctactttttca

SEQ ID NO: 41856 - DNA, 23 bp, Artificial sequence
  SiRNA target sequence
tccaataatagctactttttcac

SEQ ID NO: 41857 - DNA, 23 bp, Artificial sequence
  SiRNA target sequence
ccaataatagctactttttcacc

SEQ ID NO: 41858 - DNA, 23 bp, Artificial sequence
  SiRNA target sequence
caataatagctactttttcacct

SEQ ID NO: 41859 - DNA, 23 bp, Artificial sequence
  SiRNA target sequence
aataatagctactttttcacctt

SEQ ID NO: 41860 - DNA, 23 bp, Artificial sequence
  SiRNA target sequence
ataatagctactttttcaccttt

SEQ ID NO: 41861 - DNA, 23 bp, Artificial sequence
  SiRNA target sequence
taatagctactttttcacctttt

SEQ ID NO: 41862 - DNA, 23 bp, Artificial sequence
  SiRNA target sequence
aatagctactttttcaccttttt

SEQ ID NO: 41863 - DNA, 23 bp, Artificial sequence
  SiRNA target sequence
atagctactttttcacctttttt

SEQ ID NO: 41864 - DNA, 23 bp, Artificial sequence
  SiRNA target sequence
tagctactttttcacctttttta

SEQ ID NO: 41865 - DNA, 23 bp, Artificial sequence
  SiRNA target sequence
agctactttttcaccttttttaa

SEQ ID NO: 41866 - DNA, 23 bp, Artificial sequence
  SiRNA target sequence
gctactttttcaccttttttaat

SEQ ID NO: 41867 - DNA, 23 bp, Artificial sequence
  SiRNA target sequence
ctactttttcaccttttttaatt

SEQ ID NO: 41868 - DNA, 23 bp, Artificial sequence
  SiRNA target sequence
tactttttcaccttttttaatta

SEQ ID NO: 41869 - DNA, 23 bp, Artificial sequence
  SiRNA target sequence
actttttcaccttttttaattaa

SEQ ID NO: 41870 - DNA, 23 bp, Artificial sequence
  SiRNA target sequence
ctttttcaccttttttaattaaa

SEQ ID NO: 41871 - DNA, 23 bp, Artificial sequence
  SiRNA target sequence
tttttcaccttttttaattaaaa

SEQ ID NO: 41872 - DNA, 23 bp, Artificial sequence
  SiRNA target sequence
ttttcaccttttttaattaaaat

SEQ ID NO: 41873 - DNA, 23 bp, Artificial sequence
  SiRNA target sequence
tttcaccttttttaattaaaata

SEQ ID NO: 41874 - DNA, 23 bp, Artificial sequence
  SiRNA target sequence
ttcaccttttttaattaaaatat

SEQ ID NO: 41875 - DNA, 23 bp, Artificial sequence
  SiRNA target sequence
tcaccttttttaattaaaatatt

SEQ ID NO: 41876 - DNA, 23 bp, Artificial sequence
  SiRNA target sequence
caccttttttaattaaaatattt

SEQ ID NO: 41877 - DNA, 23 bp, Artificial sequence
  SiRNA target sequence
accttttttaattaaaatattta

SEQ ID NO: 41878 - DNA, 23 bp, Artificial sequence
  SiRNA target sequence
ccttttttaattaaaatatttat

SEQ ID NO: 41879 - DNA, 23 bp, Artificial sequence
  SiRNA target sequence
cttttttaattaaaatatttatg

SEQ ID NO: 41880 - DNA, 23 bp, Artificial sequence
  SiRNA target sequence
ttttttaattaaaatatttatgt

SEQ ID NO: 41881 - DNA, 23 bp, Artificial sequence
  SiRNA target sequence
tttttaattaaaatatttatgtc

SEQ ID NO: 41882 - DNA, 23 bp, Artificial sequence
  SiRNA target sequence
ttttaattaaaatatttatgtcc

SEQ ID NO: 41883 - DNA, 23 bp, Artificial sequence
  SiRNA target sequence
tttaattaaaatatttatgtccg

SEQ ID NO: 41884 - DNA, 23 bp, Artificial sequence
  SiRNA target sequence
ttaattaaaatatttatgtccgt

SEQ ID NO: 41885 - DNA, 23 bp, Artificial sequence
  SiRNA target sequence
taattaaaatatttatgtccgtt

SEQ ID NO: 41886 - DNA, 23 bp, Artificial sequence
  SiRNA target sequence
aattaaaatatttatgtccgtta

SEQ ID NO: 41887 - DNA, 23 bp, Artificial sequence
  SiRNA target sequence
attaaaatatttatgtccgttaa

SEQ ID NO: 41888 - DNA, 23 bp, Artificial sequence
  SiRNA target sequence
ttaaaatatttatgtccgttaaa

SEQ ID NO: 41889 - DNA, 23 bp, Artificial sequence
  SiRNA target sequence
taaaatatttatgtccgttaaaa

SEQ ID NO: 41890 - DNA, 23 bp, Artificial sequence
  SiRNA target sequence
aaaatatttatgtccgttaaaat

SEQ ID NO: 41891 - DNA, 23 bp, Artificial sequence
  SiRNA target sequence
aaatatttatgtccgttaaaatt

SEQ ID NO: 41892 - DNA, 23 bp, Artificial sequence
  SiRNA target sequence
aatatttatgtccgttaaaattt

SEQ ID NO: 41893 - DNA, 23 bp, Artificial sequence
  SiRNA target sequence
atatttatgtccgttaaaatttt

SEQ ID NO: 41894 - DNA, 23 bp, Artificial sequence
  SiRNA target sequence
tatttatgtccgttaaaattttt

SEQ ID NO: 41895 - DNA, 23 bp, Artificial sequence
  SiRNA target sequence
atttatgtccgttaaaatttttt

SEQ ID NO: 41896 - DNA, 23 bp, Artificial sequence
  SiRNA target sequence
tttatgtccgttaaaattttttt

SEQ ID NO: 41897 - DNA, 23 bp, Artificial sequence
  SiRNA target sequence
ttatgtccgttaaaatttttttg

SEQ ID NO: 41898 - DNA, 23 bp, Artificial sequence
  SiRNA target sequence
tatgtccgttaaaatttttttgg

SEQ ID NO: 41899 - DNA, 23 bp, Artificial sequence
  SiRNA target sequence
atgtccgttaaaatttttttgga

SEQ ID NO: 41900 - DNA, 23 bp, Artificial sequence
  SiRNA target sequence
tgtccgttaaaatttttttggag

SEQ ID NO: 41901 - DNA, 23 bp, Artificial sequence
  SiRNA target sequence
gtccgttaaaatttttttggagt

SEQ ID NO: 41902 - DNA, 23 bp, Artificial sequence
  SiRNA target sequence
tccgttaaaatttttttggagta

SEQ ID NO: 41903 - DNA, 23 bp, Artificial sequence
  SiRNA target sequence
ccgttaaaatttttttggagtaa

SEQ ID NO: 41904 - DNA, 23 bp, Artificial sequence
  SiRNA target sequence
cgttaaaatttttttggagtaat

SEQ ID NO: 41905 - DNA, 23 bp, Artificial sequence
  SiRNA target sequence
gttaaaatttttttggagtaata

SEQ ID NO: 41906 - DNA, 23 bp, Artificial sequence
  SiRNA target sequence
ttaaaatttttttggagtaataa

SEQ ID NO: 41907 - DNA, 23 bp, Artificial sequence
  SiRNA target sequence
taaaatttttttggagtaataat

SEQ ID NO: 41908 - DNA, 23 bp, Artificial sequence
  SiRNA target sequence
aaaatttttttggagtaataatt

SEQ ID NO: 41909 - DNA, 23 bp, Artificial sequence
  SiRNA target sequence
aaatttttttggagtaataatta

SEQ ID NO: 41910 - DNA, 23 bp, Artificial sequence
  SiRNA target sequence
aatttttttggagtaataattaa

SEQ ID NO: 41911 - DNA, 23 bp, Artificial sequence
  SiRNA target sequence
atttttttggagtaataattaaa

SEQ ID NO: 41912 - DNA, 23 bp, Artificial sequence
  SiRNA target sequence
tttttttggagtaataattaaat

SEQ ID NO: 41913 - DNA, 23 bp, Artificial sequence
  SiRNA target sequence
ttttttggagtaataattaaatg

SEQ ID NO: 41914 - DNA, 23 bp, Artificial sequence
  SiRNA target sequence
tttttggagtaataattaaatga

SEQ ID NO: 41915 - DNA, 23 bp, Artificial sequence
  SiRNA target sequence
ttttggagtaataattaaatgat

SEQ ID NO: 41916 - DNA, 23 bp, Artificial sequence
  SiRNA target sequence
tttggagtaataattaaatgatg

SEQ ID NO: 41917 - DNA, 23 bp, Artificial sequence
  SiRNA target sequence
ttggagtaataattaaatgatgc

SEQ ID NO: 41918 - DNA, 23 bp, Artificial sequence
  SiRNA target sequence
tggagtaataattaaatgatgca

SEQ ID NO: 41919 - DNA, 23 bp, Artificial sequence
  SiRNA target sequence
ggagtaataattaaatgatgcat

SEQ ID NO: 41920 - DNA, 23 bp, Artificial sequence
  SiRNA target sequence
gagtaataattaaatgatgcatt

SEQ ID NO: 41921 - DNA, 23 bp, Artificial sequence
  SiRNA target sequence
agtaataattaaatgatgcattt

SEQ ID NO: 41922 - DNA, 23 bp, Artificial sequence
  SiRNA target sequence
gtaataattaaatgatgcatttt

SEQ ID NO: 41923 - DNA, 23 bp, Artificial sequence
  SiRNA target sequence
taataattaaatgatgcattttc

SEQ ID NO: 41924 - DNA, 23 bp, Artificial sequence
  SiRNA target sequence
aataattaaatgatgcattttct

SEQ ID NO: 41925 - DNA, 23 bp, Artificial sequence
  SiRNA target sequence
ataattaaatgatgcattttcta

SEQ ID NO: 41926 - DNA, 23 bp, Artificial sequence
  SiRNA target sequence
taattaaatgatgcattttctaa

SEQ ID NO: 41927 - DNA, 23 bp, Artificial sequence
  SiRNA target sequence
aattaaatgatgcattttctaat

SEQ ID NO: 41928 - DNA, 23 bp, Artificial sequence
  SiRNA target sequence
attaaatgatgcattttctaatc

SEQ ID NO: 41929 - DNA, 23 bp, Artificial sequence
  SiRNA target sequence
ttaaatgatgcattttctaatct

SEQ ID NO: 41930 - DNA, 23 bp, Artificial sequence
  SiRNA target sequence
taaatgatgcattttctaatctt

SEQ ID NO: 41931 - DNA, 23 bp, Artificial sequence
  SiRNA target sequence
aaatgatgcattttctaatctta

SEQ ID NO: 41932 - DNA, 23 bp, Artificial sequence
  SiRNA target sequence
aatgatgcattttctaatcttat

SEQ ID NO: 41933 - DNA, 23 bp, Artificial sequence
  SiRNA target sequence
atgatgcattttctaatcttata

SEQ ID NO: 41934 - DNA, 23 bp, Artificial sequence
  SiRNA target sequence
tgatgcattttctaatcttatat

SEQ ID NO: 41935 - DNA, 23 bp, Artificial sequence
  SiRNA target sequence
gatgcattttctaatcttatatc

SEQ ID NO: 41936 - DNA, 23 bp, Artificial sequence
  SiRNA target sequence
atgcattttctaatcttatatca

SEQ ID NO: 41937 - DNA, 23 bp, Artificial sequence
  SiRNA target sequence
tgcattttctaatcttatatcat

SEQ ID NO: 41938 - DNA, 23 bp, Artificial sequence
  SiRNA target sequence
gcattttctaatcttatatcatt

SEQ ID NO: 41939 - DNA, 23 bp, Artificial sequence
  SiRNA target sequence
cattttctaatcttatatcatta

SEQ ID NO: 41940 - DNA, 23 bp, Artificial sequence
  SiRNA target sequence
attttctaatcttatatcattat

SEQ ID NO: 41941 - DNA, 23 bp, Artificial sequence
  SiRNA target sequence
ttttctaatcttatatcattatt

SEQ ID NO: 41942 - DNA, 23 bp, Artificial sequence
  SiRNA target sequence
tttctaatcttatatcattatta

SEQ ID NO: 41943 - DNA, 23 bp, Artificial sequence
  SiRNA target sequence
ttctaatcttatatcattattaa

SEQ ID NO: 41944 - DNA, 23 bp, Artificial sequence
  SiRNA target sequence
tctaatcttatatcattattaaa

SEQ ID NO: 41945 - DNA, 23 bp, Artificial sequence
  SiRNA target sequence
ctaatcttatatcattattaaat

SEQ ID NO: 41946 - DNA, 23 bp, Artificial sequence
  SiRNA target sequence
taatcttatatcattattaaatt

SEQ ID NO: 41947 - DNA, 23 bp, Artificial sequence
  SiRNA target sequence
aatcttatatcattattaaattc

SEQ ID NO: 41948 - DNA, 23 bp, Artificial sequence
  SiRNA target sequence
atcttatatcattattaaattca

SEQ ID NO: 41949 - DNA, 23 bp, Artificial sequence
  SiRNA target sequence
tcttatatcattattaaattcat

SEQ ID NO: 41950 - DNA, 23 bp, Artificial sequence
  SiRNA target sequence
cttatatcattattaaattcatt

SEQ ID NO: 41951 - DNA, 23 bp, Artificial sequence
  SiRNA target sequence
ttatatcattattaaattcatta

SEQ ID NO: 41952 - DNA, 23 bp, Artificial sequence
  SiRNA target sequence
tatatcattattaaattcattaa

SEQ ID NO: 41953 - DNA, 23 bp, Artificial sequence
  SiRNA target sequence
atatcattattaaattcattaac

SEQ ID NO: 41954 - DNA, 23 bp, Artificial sequence
  SiRNA target sequence
tatcattattaaattcattaaca

SEQ ID NO: 41955 - DNA, 23 bp, Artificial sequence
  SiRNA target sequence
atcattattaaattcattaacat

SEQ ID NO: 41956 - DNA, 23 bp, Artificial sequence
  SiRNA target sequence
tcattattaaattcattaacatc

SEQ ID NO: 41957 - DNA, 23 bp, Artificial sequence
  SiRNA target sequence
cattattaaattcattaacatct

SEQ ID NO: 41958 - DNA, 23 bp, Artificial sequence
  SiRNA target sequence
attattaaattcattaacatcta

SEQ ID NO: 41959 - DNA, 23 bp, Artificial sequence
  SiRNA target sequence
ttattaaattcattaacatctac

SEQ ID NO: 41960 - DNA, 23 bp, Artificial sequence
  SiRNA target sequence
tattaaattcattaacatctact

SEQ ID NO: 41961 - DNA, 23 bp, Artificial sequence
  SiRNA target sequence
attaaattcattaacatctacta

SEQ ID NO: 41962 - DNA, 23 bp, Artificial sequence
  SiRNA target sequence
ttaaattcattaacatctactaa

SEQ ID NO: 41963 - DNA, 23 bp, Artificial sequence
  SiRNA target sequence
taaattcattaacatctactaaa

SEQ ID NO: 41964 - DNA, 23 bp, Artificial sequence
  SiRNA target sequence
aaattcattaacatctactaaat

SEQ ID NO: 41965 - DNA, 23 bp, Artificial sequence
  SiRNA target sequence
aattcattaacatctactaaatt

SEQ ID NO: 41966 - DNA, 23 bp, Artificial sequence
  SiRNA target sequence
attcattaacatctactaaattt

SEQ ID NO: 41967 - DNA, 23 bp, Artificial sequence
  SiRNA target sequence
ttcattaacatctactaaatttg

SEQ ID NO: 41968 - DNA, 23 bp, Artificial sequence
  SiRNA target sequence
tcattaacatctactaaatttgg

SEQ ID NO: 41969 - DNA, 23 bp, Artificial sequence
  SiRNA target sequence
cattaacatctactaaatttggt

SEQ ID NO: 41970 - DNA, 23 bp, Artificial sequence
  SiRNA target sequence
attaacatctactaaatttggtt

SEQ ID NO: 41971 - DNA, 23 bp, Artificial sequence
  SiRNA target sequence
ttaacatctactaaatttggttc

SEQ ID NO: 41972 - DNA, 23 bp, Artificial sequence
  SiRNA target sequence
taacatctactaaatttggttct

SEQ ID NO: 41973 - DNA, 23 bp, Artificial sequence
  SiRNA target sequence
aacatctactaaatttggttctt

SEQ ID NO: 41974 - DNA, 23 bp, Artificial sequence
  SiRNA target sequence
acatctactaaatttggttcttc

SEQ ID NO: 41975 - DNA, 23 bp, Artificial sequence
  SiRNA target sequence
catctactaaatttggttcttct

SEQ ID NO: 41976 - DNA, 23 bp, Artificial sequence
  SiRNA target sequence
atctactaaatttggttcttctt

SEQ ID NO: 41977 - DNA, 23 bp, Artificial sequence
  SiRNA target sequence
tctactaaatttggttcttcttt

SEQ ID NO: 41978 - DNA, 23 bp, Artificial sequence
  SiRNA target sequence
ctactaaatttggttcttctttt

SEQ ID NO: 41979 - DNA, 23 bp, Artificial sequence
  SiRNA target sequence
tactaaatttggttcttctttta

SEQ ID NO: 41980 - DNA, 23 bp, Artificial sequence
  SiRNA target sequence
actaaatttggttcttcttttat

SEQ ID NO: 41981 - DNA, 23 bp, Artificial sequence
  SiRNA target sequence
ctaaatttggttcttcttttata

SEQ ID NO: 41982 - DNA, 23 bp, Artificial sequence
  SiRNA target sequence
taaatttggttcttcttttataa

SEQ ID NO: 41983 - DNA, 23 bp, Artificial sequence
  SiRNA target sequence
aaatttggttcttcttttataag

SEQ ID NO: 41984 - DNA, 23 bp, Artificial sequence
  SiRNA target sequence
aatttggttcttcttttataagc

SEQ ID NO: 41985 - DNA, 23 bp, Artificial sequence
  SiRNA target sequence
atttggttcttcttttataagct

SEQ ID NO: 41986 - DNA, 23 bp, Artificial sequence
  SiRNA target sequence
tttggttcttcttttataagctc

SEQ ID NO: 41987 - DNA, 23 bp, Artificial sequence
  SiRNA target sequence
ttggttcttcttttataagctct

SEQ ID NO: 41988 - DNA, 23 bp, Artificial sequence
  SiRNA target sequence
tggttcttcttttataagctctg

SEQ ID NO: 41989 - DNA, 23 bp, Artificial sequence
  SiRNA target sequence
ggttcttcttttataagctctgg

SEQ ID NO: 41990 - DNA, 23 bp, Artificial sequence
  SiRNA target sequence
gttcttcttttataagctctggt

SEQ ID NO: 41991 - DNA, 23 bp, Artificial sequence
  SiRNA target sequence
ttcttcttttataagctctggtt

SEQ ID NO: 41992 - DNA, 23 bp, Artificial sequence
  SiRNA target sequence
tcttcttttataagctctggttt

SEQ ID NO: 41993 - DNA, 23 bp, Artificial sequence
  SiRNA target sequence
cttcttttataagctctggttta

SEQ ID NO: 41994 - DNA, 23 bp, Artificial sequence
  SiRNA target sequence
ttcttttataagctctggtttaa

SEQ ID NO: 41995 - DNA, 23 bp, Artificial sequence
  SiRNA target sequence
tcttttataagctctggtttaaa

SEQ ID NO: 41996 - DNA, 23 bp, Artificial sequence
  SiRNA target sequence
cttttataagctctggtttaaaa

SEQ ID NO: 41997 - DNA, 23 bp, Artificial sequence
  SiRNA target sequence
ttttataagctctggtttaaaag

SEQ ID NO: 41998 - DNA, 23 bp, Artificial sequence
  SiRNA target sequence
tttataagctctggtttaaaaga

SEQ ID NO: 41999 - DNA, 23 bp, Artificial sequence
  SiRNA target sequence
ttataagctctggtttaaaagat

SEQ ID NO: 42000 - DNA, 23 bp, Artificial sequence
  SiRNA target sequence
tataagctctggtttaaaagatg

SEQ ID NO: 42001 - DNA, 23 bp, Artificial sequence
  SiRNA target sequence
ataagctctggtttaaaagatgt

SEQ ID NO: 42002 - DNA, 23 bp, Artificial sequence
  SiRNA target sequence
taagctctggtttaaaagatgtt

SEQ ID NO: 42003 - DNA, 23 bp, Artificial sequence
  SiRNA target sequence
aagctctggtttaaaagatgttc

SEQ ID NO: 42004 - DNA, 23 bp, Artificial sequence
  SiRNA target sequence
agctctggtttaaaagatgttct

SEQ ID NO: 42005 - DNA, 23 bp, Artificial sequence
  SiRNA target sequence
gctctggtttaaaagatgttctt

SEQ ID NO: 42006 - DNA, 23 bp, Artificial sequence
  SiRNA target sequence
ctctggtttaaaagatgttctta

SEQ ID NO: 42007 - DNA, 23 bp, Artificial sequence
  SiRNA target sequence
tctggtttaaaagatgttcttat

SEQ ID NO: 42008 - DNA, 23 bp, Artificial sequence
  SiRNA target sequence
ctggtttaaaagatgttcttata

SEQ ID NO: 42009 - DNA, 23 bp, Artificial sequence
  SiRNA target sequence
tggtttaaaagatgttcttatat

SEQ ID NO: 42010 - DNA, 23 bp, Artificial sequence
  SiRNA target sequence
ggtttaaaagatgttcttatatt

SEQ ID NO: 42011 - DNA, 23 bp, Artificial sequence
  SiRNA target sequence
gtttaaaagatgttcttatattt

SEQ ID NO: 42012 - DNA, 23 bp, Artificial sequence
  SiRNA target sequence
tttaaaagatgttcttatattta

SEQ ID NO: 42013 - DNA, 23 bp, Artificial sequence
  SiRNA target sequence
ttaaaagatgttcttatatttaa

SEQ ID NO: 42014 - DNA, 23 bp, Artificial sequence
  SiRNA target sequence
taaaagatgttcttatatttaag

SEQ ID NO: 42015 - DNA, 23 bp, Artificial sequence
  SiRNA target sequence
aaaagatgttcttatatttaaga

SEQ ID NO: 42016 - DNA, 23 bp, Artificial sequence
  SiRNA target sequence
aaagatgttcttatatttaagat

SEQ ID NO: 42017 - DNA, 23 bp, Artificial sequence
  SiRNA target sequence
aagatgttcttatatttaagatt

SEQ ID NO: 42018 - DNA, 23 bp, Artificial sequence
  SiRNA target sequence
agatgttcttatatttaagattg

SEQ ID NO: 42019 - DNA, 23 bp, Artificial sequence
  SiRNA target sequence
gatgttcttatatttaagattgc

SEQ ID NO: 42020 - DNA, 23 bp, Artificial sequence
  SiRNA target sequence
atgttcttatatttaagattgct

SEQ ID NO: 42021 - DNA, 23 bp, Artificial sequence
  SiRNA target sequence
tgttcttatatttaagattgctt

SEQ ID NO: 42022 - DNA, 23 bp, Artificial sequence
  SiRNA target sequence
gttcttatatttaagattgcttg

SEQ ID NO: 42023 - DNA, 23 bp, Artificial sequence
  SiRNA target sequence
ttcttatatttaagattgcttgt

SEQ ID NO: 42024 - DNA, 23 bp, Artificial sequence
  SiRNA target sequence
tcttatatttaagattgcttgtg

SEQ ID NO: 42025 - DNA, 23 bp, Artificial sequence
  SiRNA target sequence
cttatatttaagattgcttgtgt

SEQ ID NO: 42026 - DNA, 23 bp, Artificial sequence
  SiRNA target sequence
ttatatttaagattgcttgtgta

SEQ ID NO: 42027 - DNA, 23 bp, Artificial sequence
  SiRNA target sequence
tatatttaagattgcttgtgtat

SEQ ID NO: 42028 - DNA, 23 bp, Artificial sequence
  SiRNA target sequence
atatttaagattgcttgtgtata

SEQ ID NO: 42029 - DNA, 23 bp, Artificial sequence
  SiRNA target sequence
tatttaagattgcttgtgtatat

SEQ ID NO: 42030 - DNA, 23 bp, Artificial sequence
  SiRNA target sequence
atttaagattgcttgtgtatatc

SEQ ID NO: 42031 - DNA, 23 bp, Artificial sequence
  SiRNA target sequence
tttaagattgcttgtgtatatcg

SEQ ID NO: 42032 - DNA, 23 bp, Artificial sequence
  SiRNA target sequence
ttaagattgcttgtgtatatcgt

SEQ ID NO: 42033 - DNA, 23 bp, Artificial sequence
  SiRNA target sequence
taagattgcttgtgtatatcgtg

SEQ ID NO: 42034 - DNA, 23 bp, Artificial sequence
  SiRNA target sequence
aagattgcttgtgtatatcgtga

SEQ ID NO: 42035 - DNA, 23 bp, Artificial sequence
  SiRNA target sequence
agattgcttgtgtatatcgtgag

SEQ ID NO: 42036 - DNA, 23 bp, Artificial sequence
  SiRNA target sequence
gattgcttgtgtatatcgtgagt

SEQ ID NO: 42037 - DNA, 23 bp, Artificial sequence
  SiRNA target sequence
attgcttgtgtatatcgtgagta

SEQ ID NO: 42038 - DNA, 23 bp, Artificial sequence
  SiRNA target sequence
ttgcttgtgtatatcgtgagtaa

SEQ ID NO: 42039 - DNA, 23 bp, Artificial sequence
  SiRNA target sequence
tgcttgtgtatatcgtgagtaaa

SEQ ID NO: 42040 - DNA, 23 bp, Artificial sequence
  SiRNA target sequence
gcttgtgtatatcgtgagtaaaa

SEQ ID NO: 42041 - DNA, 23 bp, Artificial sequence
  SiRNA target sequence
cttgtgtatatcgtgagtaaaag

SEQ ID NO: 42042 - DNA, 23 bp, Artificial sequence
  SiRNA target sequence
ttgtgtatatcgtgagtaaaaga

SEQ ID NO: 42043 - DNA, 23 bp, Artificial sequence
  SiRNA target sequence
tgtgtatatcgtgagtaaaagaa

SEQ ID NO: 42044 - DNA, 23 bp, Artificial sequence
  SiRNA target sequence
gtgtatatcgtgagtaaaagaac

SEQ ID NO: 42045 - DNA, 23 bp, Artificial sequence
  SiRNA target sequence
tgtatatcgtgagtaaaagaacc

SEQ ID NO: 42046 - DNA, 23 bp, Artificial sequence
  SiRNA target sequence
gtatatcgtgagtaaaagaaccc

SEQ ID NO: 42047 - DNA, 23 bp, Artificial sequence
  SiRNA target sequence
tatatcgtgagtaaaagaaccct

SEQ ID NO: 42048 - DNA, 23 bp, Artificial sequence
  SiRNA target sequence
atatcgtgagtaaaagaacccta

SEQ ID NO: 42049 - DNA, 23 bp, Artificial sequence
  SiRNA target sequence
tatcgtgagtaaaagaaccctaa

SEQ ID NO: 42050 - DNA, 23 bp, Artificial sequence
  SiRNA target sequence
atcgtgagtaaaagaaccctaat

SEQ ID NO: 42051 - DNA, 23 bp, Artificial sequence
  SiRNA target sequence
tcgtgagtaaaagaaccctaatt

SEQ ID NO: 42052 - DNA, 23 bp, Artificial sequence
  SiRNA target sequence
cgtgagtaaaagaaccctaattg

SEQ ID NO: 42053 - DNA, 23 bp, Artificial sequence
  SiRNA target sequence
gtgagtaaaagaaccctaattgt

SEQ ID NO: 42054 - DNA, 23 bp, Artificial sequence
  SiRNA target sequence
tgagtaaaagaaccctaattgtc

SEQ ID NO: 42055 - DNA, 23 bp, Artificial sequence
  SiRNA target sequence
gagtaaaagaaccctaattgtcc

SEQ ID NO: 42056 - DNA, 23 bp, Artificial sequence
  SiRNA target sequence
agtaaaagaaccctaattgtcca

SEQ ID NO: 42057 - DNA, 23 bp, Artificial sequence
  SiRNA target sequence
gtaaaagaaccctaattgtccaa

SEQ ID NO: 42058 - DNA, 23 bp, Artificial sequence
  SiRNA target sequence
taaaagaaccctaattgtccaaa

SEQ ID NO: 42059 - DNA, 23 bp, Artificial sequence
  SiRNA target sequence
aaaagaaccctaattgtccaaaa

SEQ ID NO: 42060 - DNA, 23 bp, Artificial sequence
  SiRNA target sequence
aaagaaccctaattgtccaaaac

SEQ ID NO: 42061 - DNA, 23 bp, Artificial sequence
  SiRNA target sequence
aagaaccctaattgtccaaaact

SEQ ID NO: 42062 - DNA, 23 bp, Artificial sequence
  SiRNA target sequence
agaaccctaattgtccaaaactt

SEQ ID NO: 42063 - DNA, 23 bp, Artificial sequence
  SiRNA target sequence
gaaccctaattgtccaaaacttg

SEQ ID NO: 42064 - DNA, 23 bp, Artificial sequence
  SiRNA target sequence
aaccctaattgtccaaaacttga

SEQ ID NO: 42065 - DNA, 23 bp, Artificial sequence
  SiRNA target sequence
accctaattgtccaaaacttgaa

SEQ ID NO: 42066 - DNA, 23 bp, Artificial sequence
  SiRNA target sequence
ccctaattgtccaaaacttgaat

SEQ ID NO: 42067 - DNA, 23 bp, Artificial sequence
  SiRNA target sequence
cctaattgtccaaaacttgaata

SEQ ID NO: 42068 - DNA, 23 bp, Artificial sequence
  SiRNA target sequence
ctaattgtccaaaacttgaatac

SEQ ID NO: 42069 - DNA, 23 bp, Artificial sequence
  SiRNA target sequence
taattgtccaaaacttgaataca

SEQ ID NO: 42070 - DNA, 23 bp, Artificial sequence
  SiRNA target sequence
aattgtccaaaacttgaatacaa

SEQ ID NO: 42071 - DNA, 23 bp, Artificial sequence
  SiRNA target sequence
attgtccaaaacttgaatacaat

SEQ ID NO: 42072 - DNA, 23 bp, Artificial sequence
  SiRNA target sequence
ttgtccaaaacttgaatacaatg

SEQ ID NO: 42073 - DNA, 23 bp, Artificial sequence
  SiRNA target sequence
tgtccaaaacttgaatacaatgt

SEQ ID NO: 42074 - DNA, 23 bp, Artificial sequence
  SiRNA target sequence
gtccaaaacttgaatacaatgtt

SEQ ID NO: 42075 - DNA, 23 bp, Artificial sequence
  SiRNA target sequence
tccaaaacttgaatacaatgttc

SEQ ID NO: 42076 - DNA, 23 bp, Artificial sequence
  SiRNA target sequence
ccaaaacttgaatacaatgttct

SEQ ID NO: 42077 - DNA, 23 bp, Artificial sequence
  SiRNA target sequence
caaaacttgaatacaatgttcta

SEQ ID NO: 42078 - DNA, 23 bp, Artificial sequence
  SiRNA target sequence
aaaacttgaatacaatgttctat

SEQ ID NO: 42079 - DNA, 23 bp, Artificial sequence
  SiRNA target sequence
aaacttgaatacaatgttctatt

SEQ ID NO: 42080 - DNA, 23 bp, Artificial sequence
  SiRNA target sequence
aacttgaatacaatgttctatta

SEQ ID NO: 42081 - DNA, 23 bp, Artificial sequence
  SiRNA target sequence
acttgaatacaatgttctattaa

SEQ ID NO: 42082 - DNA, 23 bp, Artificial sequence
  SiRNA target sequence
cttgaatacaatgttctattaat

SEQ ID NO: 42083 - DNA, 23 bp, Artificial sequence
  SiRNA target sequence
ttgaatacaatgttctattaatg

SEQ ID NO: 42084 - DNA, 23 bp, Artificial sequence
  SiRNA target sequence
tgaatacaatgttctattaatgc

SEQ ID NO: 42085 - DNA, 23 bp, Artificial sequence
  SiRNA target sequence
gaatacaatgttctattaatgcc

SEQ ID NO: 42086 - DNA, 23 bp, Artificial sequence
  SiRNA target sequence
aatacaatgttctattaatgcca

SEQ ID NO: 42087 - DNA, 23 bp, Artificial sequence
  SiRNA target sequence
atacaatgttctattaatgccaa

SEQ ID NO: 42088 - DNA, 23 bp, Artificial sequence
  SiRNA target sequence
tacaatgttctattaatgccaat

SEQ ID NO: 42089 - DNA, 23 bp, Artificial sequence
  SiRNA target sequence
acaatgttctattaatgccaata

SEQ ID NO: 42090 - DNA, 23 bp, Artificial sequence
  SiRNA target sequence
caatgttctattaatgccaatat

SEQ ID NO: 42091 - DNA, 23 bp, Artificial sequence
  SiRNA target sequence
aatgttctattaatgccaatata

SEQ ID NO: 42092 - DNA, 23 bp, Artificial sequence
  SiRNA target sequence
atgttctattaatgccaatataa

SEQ ID NO: 42093 - DNA, 23 bp, Artificial sequence
  SiRNA target sequence
tgttctattaatgccaatataaa

SEQ ID NO: 42094 - DNA, 23 bp, Artificial sequence
  SiRNA target sequence
gttctattaatgccaatataaaa

SEQ ID NO: 42095 - DNA, 23 bp, Artificial sequence
  SiRNA target sequence
ttctattaatgccaatataaaat

SEQ ID NO: 42096 - DNA, 23 bp, Artificial sequence
  SiRNA target sequence
tctattaatgccaatataaaata

SEQ ID NO: 42097 - DNA, 23 bp, Artificial sequence
  SiRNA target sequence
ctattaatgccaatataaaatac

SEQ ID NO: 42098 - DNA, 23 bp, Artificial sequence
  SiRNA target sequence
tattaatgccaatataaaataca

SEQ ID NO: 42099 - DNA, 23 bp, Artificial sequence
  SiRNA target sequence
attaatgccaatataaaatacaa

SEQ ID NO: 42100 - DNA, 23 bp, Artificial sequence
  SiRNA target sequence
ttaatgccaatataaaatacaac

SEQ ID NO: 42101 - DNA, 23 bp, Artificial sequence
  SiRNA target sequence
taatgccaatataaaatacaaca

SEQ ID NO: 42102 - DNA, 23 bp, Artificial sequence
  SiRNA target sequence
aatgccaatataaaatacaacat

SEQ ID NO: 42103 - DNA, 23 bp, Artificial sequence
  SiRNA target sequence
atgccaatataaaatacaacatc

SEQ ID NO: 42104 - DNA, 23 bp, Artificial sequence
  SiRNA target sequence
tgccaatataaaatacaacatcc

SEQ ID NO: 42105 - DNA, 23 bp, Artificial sequence
  SiRNA target sequence
gccaatataaaatacaacatccc

SEQ ID NO: 42106 - DNA, 23 bp, Artificial sequence
  SiRNA target sequence
ccaatataaaatacaacatccct

SEQ ID NO: 42107 - DNA, 23 bp, Artificial sequence
  SiRNA target sequence
caatataaaatacaacatccctg

SEQ ID NO: 42108 - DNA, 23 bp, Artificial sequence
  SiRNA target sequence
aatataaaatacaacatccctgg

SEQ ID NO: 42109 - DNA, 23 bp, Artificial sequence
  SiRNA target sequence
atataaaatacaacatccctggc

SEQ ID NO: 42110 - DNA, 23 bp, Artificial sequence
  SiRNA target sequence
tataaaatacaacatccctggca

SEQ ID NO: 42111 - DNA, 23 bp, Artificial sequence
  SiRNA target sequence
ataaaatacaacatccctggcac

SEQ ID NO: 42112 - DNA, 23 bp, Artificial sequence
  SiRNA target sequence
taaaatacaacatccctggcact

SEQ ID NO: 42113 - DNA, 23 bp, Artificial sequence
  SiRNA target sequence
aaaatacaacatccctggcactt

SEQ ID NO: 42114 - DNA, 23 bp, Artificial sequence
  SiRNA target sequence
aaatacaacatccctggcactta

SEQ ID NO: 42115 - DNA, 23 bp, Artificial sequence
  SiRNA target sequence
aatacaacatccctggcacttag

SEQ ID NO: 42116 - DNA, 23 bp, Artificial sequence
  SiRNA target sequence
atacaacatccctggcacttagt

SEQ ID NO: 42117 - DNA, 23 bp, Artificial sequence
  SiRNA target sequence
tacaacatccctggcacttagtt

SEQ ID NO: 42118 - DNA, 23 bp, Artificial sequence
  SiRNA target sequence
acaacatccctggcacttagttt

SEQ ID NO: 42119 - DNA, 23 bp, Artificial sequence
  SiRNA target sequence
caacatccctggcacttagtttt

SEQ ID NO: 42120 - DNA, 23 bp, Artificial sequence
  SiRNA target sequence
aacatccctggcacttagttttg

SEQ ID NO: 42121 - DNA, 23 bp, Artificial sequence
  SiRNA target sequence
acatccctggcacttagttttgc

SEQ ID NO: 42122 - DNA, 23 bp, Artificial sequence
  SiRNA target sequence
catccctggcacttagttttgct

SEQ ID NO: 42123 - DNA, 23 bp, Artificial sequence
  SiRNA target sequence
atccctggcacttagttttgctg

SEQ ID NO: 42124 - DNA, 23 bp, Artificial sequence
  SiRNA target sequence
tccctggcacttagttttgctgt

SEQ ID NO: 42125 - DNA, 23 bp, Artificial sequence
  SiRNA target sequence
ccctggcacttagttttgctgtt

SEQ ID NO: 42126 - DNA, 23 bp, Artificial sequence
  SiRNA target sequence
cctggcacttagttttgctgtta

SEQ ID NO: 42127 - DNA, 23 bp, Artificial sequence
  SiRNA target sequence
ctggcacttagttttgctgttaa

SEQ ID NO: 42128 - DNA, 23 bp, Artificial sequence
  SiRNA target sequence
tggcacttagttttgctgttaat

SEQ ID NO: 42129 - DNA, 23 bp, Artificial sequence
  SiRNA target sequence
ggcacttagttttgctgttaata

SEQ ID NO: 42130 - DNA, 23 bp, Artificial sequence
  SiRNA target sequence
gcacttagttttgctgttaatat

SEQ ID NO: 42131 - DNA, 23 bp, Artificial sequence
  SiRNA target sequence
cacttagttttgctgttaatatt

SEQ ID NO: 42132 - DNA, 23 bp, Artificial sequence
  SiRNA target sequence
acttagttttgctgttaatattc

SEQ ID NO: 42133 - DNA, 23 bp, Artificial sequence
  SiRNA target sequence
cttagttttgctgttaatattcc

SEQ ID NO: 42134 - DNA, 23 bp, Artificial sequence
  SiRNA target sequence
ttagttttgctgttaatattcca

SEQ ID NO: 42135 - DNA, 23 bp, Artificial sequence
  SiRNA target sequence
tagttttgctgttaatattccat

SEQ ID NO: 42136 - DNA, 23 bp, Artificial sequence
  SiRNA target sequence
agttttgctgttaatattccata

SEQ ID NO: 42137 - DNA, 23 bp, Artificial sequence
  SiRNA target sequence
gttttgctgttaatattccatag

SEQ ID NO: 42138 - DNA, 23 bp, Artificial sequence
  SiRNA target sequence
ttttgctgttaatattccatagt

SEQ ID NO: 42139 - DNA, 23 bp, Artificial sequence
  SiRNA target sequence
tttgctgttaatattccatagtt

SEQ ID NO: 42140 - DNA, 23 bp, Artificial sequence
  SiRNA target sequence
ttgctgttaatattccatagttt

SEQ ID NO: 42141 - DNA, 23 bp, Artificial sequence
  SiRNA target sequence
tgctgttaatattccatagtttc

SEQ ID NO: 42142 - DNA, 23 bp, Artificial sequence
  SiRNA target sequence
gctgttaatattccatagtttcc

SEQ ID NO: 42143 - DNA, 23 bp, Artificial sequence
  SiRNA target sequence
ctgttaatattccatagtttcct

SEQ ID NO: 42144 - DNA, 23 bp, Artificial sequence
  SiRNA target sequence
tgttaatattccatagtttccta

SEQ ID NO: 42145 - DNA, 23 bp, Artificial sequence
  SiRNA target sequence
gttaatattccatagtttcctaa

SEQ ID NO: 42146 - DNA, 23 bp, Artificial sequence
  SiRNA target sequence
ttaatattccatagtttcctaat

SEQ ID NO: 42147 - DNA, 23 bp, Artificial sequence
  SiRNA target sequence
taatattccatagtttcctaatg

SEQ ID NO: 42148 - DNA, 23 bp, Artificial sequence
  SiRNA target sequence
aatattccatagtttcctaatgt

SEQ ID NO: 42149 - DNA, 23 bp, Artificial sequence
  SiRNA target sequence
atattccatagtttcctaatgtt

SEQ ID NO: 42150 - DNA, 23 bp, Artificial sequence
  SiRNA target sequence
tattccatagtttcctaatgtta

SEQ ID NO: 42151 - DNA, 23 bp, Artificial sequence
  SiRNA target sequence
attccatagtttcctaatgttat

SEQ ID NO: 42152 - DNA, 23 bp, Artificial sequence
  SiRNA target sequence
ttccatagtttcctaatgttata

SEQ ID NO: 42153 - DNA, 23 bp, Artificial sequence
  SiRNA target sequence
tccatagtttcctaatgttataa

SEQ ID NO: 42154 - DNA, 23 bp, Artificial sequence
  SiRNA target sequence
ccatagtttcctaatgttataac

SEQ ID NO: 42155 - DNA, 23 bp, Artificial sequence
  SiRNA target sequence
catagtttcctaatgttataact

SEQ ID NO: 42156 - DNA, 23 bp, Artificial sequence
  SiRNA target sequence
atagtttcctaatgttataacta

SEQ ID NO: 42157 - DNA, 23 bp, Artificial sequence
  SiRNA target sequence
tagtttcctaatgttataactat

SEQ ID NO: 42158 - DNA, 23 bp, Artificial sequence
  SiRNA target sequence
agtttcctaatgttataactata

SEQ ID NO: 42159 - DNA, 23 bp, Artificial sequence
  SiRNA target sequence
gtttcctaatgttataactataa

SEQ ID NO: 42160 - DNA, 23 bp, Artificial sequence
  SiRNA target sequence
tttcctaatgttataactataaa

SEQ ID NO: 42161 - DNA, 23 bp, Artificial sequence
  SiRNA target sequence
ttcctaatgttataactataaaa

SEQ ID NO: 42162 - DNA, 23 bp, Artificial sequence
  SiRNA target sequence
tcctaatgttataactataaaac

SEQ ID NO: 42163 - DNA, 23 bp, Artificial sequence
  SiRNA target sequence
cctaatgttataactataaaaca

SEQ ID NO: 42164 - DNA, 23 bp, Artificial sequence
  SiRNA target sequence
ctaatgttataactataaaacac

SEQ ID NO: 42165 - DNA, 23 bp, Artificial sequence
  SiRNA target sequence
taatgttataactataaaacact

SEQ ID NO: 42166 - DNA, 23 bp, Artificial sequence
  SiRNA target sequence
aatgttataactataaaacactg

SEQ ID NO: 42167 - DNA, 23 bp, Artificial sequence
  SiRNA target sequence
atgttataactataaaacactgt

SEQ ID NO: 42168 - DNA, 23 bp, Artificial sequence
  SiRNA target sequence
tgttataactataaaacactgta

SEQ ID NO: 42169 - DNA, 23 bp, Artificial sequence
  SiRNA target sequence
gttataactataaaacactgtaa

SEQ ID NO: 42170 - DNA, 23 bp, Artificial sequence
  SiRNA target sequence
ttataactataaaacactgtaaa

SEQ ID NO: 42171 - DNA, 23 bp, Artificial sequence
  SiRNA target sequence
tataactataaaacactgtaaag

SEQ ID NO: 42172 - DNA, 23 bp, Artificial sequence
  SiRNA target sequence
ataactataaaacactgtaaagc

SEQ ID NO: 42173 - DNA, 23 bp, Artificial sequence
  SiRNA target sequence
taactataaaacactgtaaagca

SEQ ID NO: 42174 - DNA, 23 bp, Artificial sequence
  SiRNA target sequence
aactataaaacactgtaaagcaa

SEQ ID NO: 42175 - DNA, 23 bp, Artificial sequence
  SiRNA target sequence
actataaaacactgtaaagcaaa

SEQ ID NO: 42176 - DNA, 23 bp, Artificial sequence
  SiRNA target sequence
ctataaaacactgtaaagcaaaa

SEQ ID NO: 42177 - DNA, 23 bp, Artificial sequence
  SiRNA target sequence
tataaaacactgtaaagcaaaaa

SEQ ID NO: 42178 - DNA, 23 bp, Artificial sequence
  SiRNA target sequence
ataaaacactgtaaagcaaaaat

SEQ ID NO: 42179 - DNA, 23 bp, Artificial sequence
  SiRNA target sequence
taaaacactgtaaagcaaaaatt

SEQ ID NO: 42180 - DNA, 23 bp, Artificial sequence
  SiRNA target sequence
aaaacactgtaaagcaaaaatta

SEQ ID NO: 42181 - DNA, 23 bp, Artificial sequence
  SiRNA target sequence
aaacactgtaaagcaaaaattat

SEQ ID NO: 42182 - DNA, 23 bp, Artificial sequence
  SiRNA target sequence
aacactgtaaagcaaaaattatc

SEQ ID NO: 42183 - DNA, 23 bp, Artificial sequence
  SiRNA target sequence
acactgtaaagcaaaaattatct

SEQ ID NO: 42184 - DNA, 23 bp, Artificial sequence
  SiRNA target sequence
cactgtaaagcaaaaattatctt

SEQ ID NO: 42185 - DNA, 23 bp, Artificial sequence
  SiRNA target sequence
actgtaaagcaaaaattatctta

SEQ ID NO: 42186 - DNA, 23 bp, Artificial sequence
  SiRNA target sequence
ctgtaaagcaaaaattatcttat

SEQ ID NO: 42187 - DNA, 23 bp, Artificial sequence
  SiRNA target sequence
tgtaaagcaaaaattatcttatt

SEQ ID NO: 42188 - DNA, 23 bp, Artificial sequence
  SiRNA target sequence
gtaaagcaaaaattatcttattt

SEQ ID NO: 42189 - DNA, 23 bp, Artificial sequence
  SiRNA target sequence
taaagcaaaaattatcttattta

SEQ ID NO: 42190 - DNA, 23 bp, Artificial sequence
  SiRNA target sequence
aaagcaaaaattatcttatttac

SEQ ID NO: 42191 - DNA, 23 bp, Artificial sequence
  SiRNA target sequence
aagcaaaaattatcttatttaca

SEQ ID NO: 42192 - DNA, 23 bp, Artificial sequence
  SiRNA target sequence
agcaaaaattatcttatttacaa

SEQ ID NO: 42193 - DNA, 23 bp, Artificial sequence
  SiRNA target sequence
gcaaaaattatcttatttacaag

SEQ ID NO: 42194 - DNA, 23 bp, Artificial sequence
  SiRNA target sequence
caaaaattatcttatttacaagg

SEQ ID NO: 42195 - DNA, 23 bp, Artificial sequence
  SiRNA target sequence
aaaaattatcttatttacaaggt

SEQ ID NO: 42196 - DNA, 23 bp, Artificial sequence
  SiRNA target sequence
aaaattatcttatttacaaggta

SEQ ID NO: 42197 - DNA, 23 bp, Artificial sequence
  SiRNA target sequence
aaattatcttatttacaaggtat

SEQ ID NO: 42198 - DNA, 23 bp, Artificial sequence
  SiRNA target sequence
aattatcttatttacaaggtata

SEQ ID NO: 42199 - DNA, 23 bp, Artificial sequence
  SiRNA target sequence
attatcttatttacaaggtataa

SEQ ID NO: 42200 - DNA, 23 bp, Artificial sequence
  SiRNA target sequence
ttatcttatttacaaggtataaa

SEQ ID NO: 42201 - DNA, 23 bp, Artificial sequence
  SiRNA target sequence
tatcttatttacaaggtataaaa

SEQ ID NO: 42202 - DNA, 23 bp, Artificial sequence
  SiRNA target sequence
atcttatttacaaggtataaaaa

SEQ ID NO: 42203 - DNA, 23 bp, Artificial sequence
  SiRNA target sequence
tcttatttacaaggtataaaaaa

SEQ ID NO: 42204 - DNA, 23 bp, Artificial sequence
  SiRNA target sequence
cttatttacaaggtataaaaaac

SEQ ID NO: 42205 - DNA, 23 bp, Artificial sequence
  SiRNA target sequence
ttatttacaaggtataaaaaact

SEQ ID NO: 42206 - DNA, 23 bp, Artificial sequence
  SiRNA target sequence
tatttacaaggtataaaaaacta

SEQ ID NO: 42207 - DNA, 23 bp, Artificial sequence
  SiRNA target sequence
atttacaaggtataaaaaactaa

SEQ ID NO: 42208 - DNA, 23 bp, Artificial sequence
  SiRNA target sequence
tttacaaggtataaaaaactaag

SEQ ID NO: 42209 - DNA, 23 bp, Artificial sequence
  SiRNA target sequence
ttacaaggtataaaaaactaaga

SEQ ID NO: 42210 - DNA, 23 bp, Artificial sequence
  SiRNA target sequence
tacaaggtataaaaaactaagag

SEQ ID NO: 42211 - DNA, 23 bp, Artificial sequence
  SiRNA target sequence
acaaggtataaaaaactaagaga

SEQ ID NO: 42212 - DNA, 23 bp, Artificial sequence
  SiRNA target sequence
caaggtataaaaaactaagagat

SEQ ID NO: 42213 - DNA, 23 bp, Artificial sequence
  SiRNA target sequence
aaggtataaaaaactaagagatc

SEQ ID NO: 42214 - DNA, 23 bp, Artificial sequence
  SiRNA target sequence
aggtataaaaaactaagagatct

SEQ ID NO: 42215 - DNA, 23 bp, Artificial sequence
  SiRNA target sequence
ggtataaaaaactaagagatctc

SEQ ID NO: 42216 - DNA, 23 bp, Artificial sequence
  SiRNA target sequence
gtataaaaaactaagagatctcc

SEQ ID NO: 42217 - DNA, 23 bp, Artificial sequence
  SiRNA target sequence
tataaaaaactaagagatctcca

SEQ ID NO: 42218 - DNA, 23 bp, Artificial sequence
  SiRNA target sequence
ataaaaaactaagagatctccag

SEQ ID NO: 42219 - DNA, 23 bp, Artificial sequence
  SiRNA target sequence
taaaaaactaagagatctccaga

SEQ ID NO: 42220 - DNA, 23 bp, Artificial sequence
  SiRNA target sequence
aaaaaactaagagatctccagat

SEQ ID NO: 42221 - DNA, 23 bp, Artificial sequence
  SiRNA target sequence
aaaaactaagagatctccagatt

SEQ ID NO: 42222 - DNA, 23 bp, Artificial sequence
  SiRNA target sequence
aaaactaagagatctccagattc

SEQ ID NO: 42223 - DNA, 23 bp, Artificial sequence
  SiRNA target sequence
aaactaagagatctccagattct

SEQ ID NO: 42224 - DNA, 23 bp, Artificial sequence
  SiRNA target sequence
aactaagagatctccagattctg

SEQ ID NO: 42225 - DNA, 23 bp, Artificial sequence
  SiRNA target sequence
actaagagatctccagattctgt

SEQ ID NO: 42226 - DNA, 23 bp, Artificial sequence
  SiRNA target sequence
ctaagagatctccagattctgtt

SEQ ID NO: 42227 - DNA, 23 bp, Artificial sequence
  SiRNA target sequence
taagagatctccagattctgtta

SEQ ID NO: 42228 - DNA, 23 bp, Artificial sequence
  SiRNA target sequence
aagagatctccagattctgttac

SEQ ID NO: 42229 - DNA, 23 bp, Artificial sequence
  SiRNA target sequence
agagatctccagattctgttaca

SEQ ID NO: 42230 - DNA, 23 bp, Artificial sequence
  SiRNA target sequence
gagatctccagattctgttacat

SEQ ID NO: 42231 - DNA, 23 bp, Artificial sequence
  SiRNA target sequence
agatctccagattctgttacatt

SEQ ID NO: 42232 - DNA, 23 bp, Artificial sequence
  SiRNA target sequence
gatctccagattctgttacattc

SEQ ID NO: 42233 - DNA, 23 bp, Artificial sequence
  SiRNA target sequence
atctccagattctgttacattcc

SEQ ID NO: 42234 - DNA, 23 bp, Artificial sequence
  SiRNA target sequence
tctccagattctgttacattccg

SEQ ID NO: 42235 - DNA, 23 bp, Artificial sequence
  SiRNA target sequence
ctccagattctgttacattccga

SEQ ID NO: 42236 - DNA, 23 bp, Artificial sequence
  SiRNA target sequence
tccagattctgttacattccgat

SEQ ID NO: 42237 - DNA, 23 bp, Artificial sequence
  SiRNA target sequence
ccagattctgttacattccgatt

SEQ ID NO: 42238 - DNA, 23 bp, Artificial sequence
  SiRNA target sequence
cagattctgttacattccgattc

SEQ ID NO: 42239 - DNA, 23 bp, Artificial sequence
  SiRNA target sequence
agattctgttacattccgattct

SEQ ID NO: 42240 - DNA, 23 bp, Artificial sequence
  SiRNA target sequence
gattctgttacattccgattcta

SEQ ID NO: 42241 - DNA, 23 bp, Artificial sequence
  SiRNA target sequence
attctgttacattccgattctac

SEQ ID NO: 42242 - DNA, 23 bp, Artificial sequence
  SiRNA target sequence
ttctgttacattccgattctact

SEQ ID NO: 42243 - DNA, 23 bp, Artificial sequence
  SiRNA target sequence
tctgttacattccgattctactt

SEQ ID NO: 42244 - DNA, 23 bp, Artificial sequence
  SiRNA target sequence
ctgttacattccgattctacttc

SEQ ID NO: 42245 - DNA, 23 bp, Artificial sequence
  SiRNA target sequence
tgttacattccgattctacttca

SEQ ID NO: 42246 - DNA, 23 bp, Artificial sequence
  SiRNA target sequence
gttacattccgattctacttcag

SEQ ID NO: 42247 - DNA, 23 bp, Artificial sequence
  SiRNA target sequence
ttacattccgattctacttcaga

SEQ ID NO: 42248 - DNA, 23 bp, Artificial sequence
  SiRNA target sequence
tacattccgattctacttcagaa

SEQ ID NO: 42249 - DNA, 23 bp, Artificial sequence
  SiRNA target sequence
acattccgattctacttcagaaa

SEQ ID NO: 42250 - DNA, 23 bp, Artificial sequence
  SiRNA target sequence
cattccgattctacttcagaaac

SEQ ID NO: 42251 - DNA, 23 bp, Artificial sequence
  SiRNA target sequence
attccgattctacttcagaaaca

SEQ ID NO: 42252 - DNA, 23 bp, Artificial sequence
  SiRNA target sequence
ttccgattctacttcagaaacat

SEQ ID NO: 42253 - DNA, 23 bp, Artificial sequence
  SiRNA target sequence
tccgattctacttcagaaacata

SEQ ID NO: 42254 - DNA, 23 bp, Artificial sequence
  SiRNA target sequence
ccgattctacttcagaaacatat

SEQ ID NO: 42255 - DNA, 23 bp, Artificial sequence
  SiRNA target sequence
cgattctacttcagaaacatatt

SEQ ID NO: 42256 - DNA, 23 bp, Artificial sequence
  SiRNA target sequence
gattctacttcagaaacatattt

SEQ ID NO: 42257 - DNA, 23 bp, Artificial sequence
  SiRNA target sequence
attctacttcagaaacatatttt

SEQ ID NO: 42258 - DNA, 23 bp, Artificial sequence
  SiRNA target sequence
ttctacttcagaaacatattttt

SEQ ID NO: 42259 - DNA, 23 bp, Artificial sequence
  SiRNA target sequence
tctacttcagaaacatatttttc

SEQ ID NO: 42260 - DNA, 23 bp, Artificial sequence
  SiRNA target sequence
ctacttcagaaacatatttttca

SEQ ID NO: 42261 - DNA, 23 bp, Artificial sequence
  SiRNA target sequence
tacttcagaaacatatttttcat

SEQ ID NO: 42262 - DNA, 23 bp, Artificial sequence
  SiRNA target sequence
acttcagaaacatatttttcata

SEQ ID NO: 42263 - DNA, 23 bp, Artificial sequence
  SiRNA target sequence
cttcagaaacatatttttcatat

SEQ ID NO: 42264 - DNA, 23 bp, Artificial sequence
  SiRNA target sequence
ttcagaaacatatttttcatatt

SEQ ID NO: 42265 - DNA, 23 bp, Artificial sequence
  SiRNA target sequence
tcagaaacatatttttcatattt

SEQ ID NO: 42266 - DNA, 23 bp, Artificial sequence
  SiRNA target sequence
cagaaacatatttttcatattta

SEQ ID NO: 42267 - DNA, 23 bp, Artificial sequence
  SiRNA target sequence
agaaacatatttttcatatttaa

SEQ ID NO: 42268 - DNA, 23 bp, Artificial sequence
  SiRNA target sequence
gaaacatatttttcatatttaag

SEQ ID NO: 42269 - DNA, 23 bp, Artificial sequence
  SiRNA target sequence
aaacatatttttcatatttaagc

SEQ ID NO: 42270 - DNA, 23 bp, Artificial sequence
  SiRNA target sequence
aacatatttttcatatttaagcg

SEQ ID NO: 42271 - DNA, 23 bp, Artificial sequence
  SiRNA target sequence
acatatttttcatatttaagcga

SEQ ID NO: 42272 - DNA, 23 bp, Artificial sequence
  SiRNA target sequence
catatttttcatatttaagcgat

SEQ ID NO: 42273 - DNA, 23 bp, Artificial sequence
  SiRNA target sequence
atatttttcatatttaagcgatt

SEQ ID NO: 42274 - DNA, 23 bp, Artificial sequence
  SiRNA target sequence
tatttttcatatttaagcgattc

SEQ ID NO: 42275 - DNA, 23 bp, Artificial sequence
  SiRNA target sequence
atttttcatatttaagcgattct

SEQ ID NO: 42276 - DNA, 23 bp, Artificial sequence
  SiRNA target sequence
tttttcatatttaagcgattctt

SEQ ID NO: 42277 - DNA, 23 bp, Artificial sequence
  SiRNA target sequence
ttttcatatttaagcgattcttc

SEQ ID NO: 42278 - DNA, 23 bp, Artificial sequence
  SiRNA target sequence
tttcatatttaagcgattcttct

SEQ ID NO: 42279 - DNA, 23 bp, Artificial sequence
  SiRNA target sequence
ttcatatttaagcgattcttctt

SEQ ID NO: 42280 - DNA, 23 bp, Artificial sequence
  SiRNA target sequence
tcatatttaagcgattcttcttc

SEQ ID NO: 42281 - DNA, 23 bp, Artificial sequence
  SiRNA target sequence
catatttaagcgattcttcttct

SEQ ID NO: 42282 - DNA, 23 bp, Artificial sequence
  SiRNA target sequence
atatttaagcgattcttcttctt

SEQ ID NO: 42283 - DNA, 23 bp, Artificial sequence
  SiRNA target sequence
tatttaagcgattcttcttcttc

SEQ ID NO: 42284 - DNA, 23 bp, Artificial sequence
  SiRNA target sequence
atttaagcgattcttcttcttct

SEQ ID NO: 42285 - DNA, 23 bp, Artificial sequence
  SiRNA target sequence
tttaagcgattcttcttcttctg

SEQ ID NO: 42286 - DNA, 23 bp, Artificial sequence
  SiRNA target sequence
ttaagcgattcttcttcttctgt

SEQ ID NO: 42287 - DNA, 23 bp, Artificial sequence
  SiRNA target sequence
taagcgattcttcttcttctgtt

SEQ ID NO: 42288 - DNA, 23 bp, Artificial sequence
  SiRNA target sequence
aagcgattcttcttcttctgttt

SEQ ID NO: 42289 - DNA, 23 bp, Artificial sequence
  SiRNA target sequence
agcgattcttcttcttctgtttt

SEQ ID NO: 42290 - DNA, 23 bp, Artificial sequence
  SiRNA target sequence
gcgattcttcttcttctgtttta

SEQ ID NO: 42291 - DNA, 23 bp, Artificial sequence
  SiRNA target sequence
cgattcttcttcttctgttttat

SEQ ID NO: 42292 - DNA, 23 bp, Artificial sequence
  SiRNA target sequence
gattcttcttcttctgttttata

SEQ ID NO: 42293 - DNA, 23 bp, Artificial sequence
  SiRNA target sequence
attcttcttcttctgttttatat

SEQ ID NO: 42294 - DNA, 23 bp, Artificial sequence
  SiRNA target sequence
ttcttcttcttctgttttatatg

SEQ ID NO: 42295 - DNA, 23 bp, Artificial sequence
  SiRNA target sequence
tcttcttcttctgttttatatgc

SEQ ID NO: 42296 - DNA, 23 bp, Artificial sequence
  SiRNA target sequence
cttcttcttctgttttatatgct

SEQ ID NO: 42297 - DNA, 23 bp, Artificial sequence
  SiRNA target sequence
ttcttcttctgttttatatgcta

SEQ ID NO: 42298 - DNA, 23 bp, Artificial sequence
  SiRNA target sequence
tcttcttctgttttatatgctag

SEQ ID NO: 42299 - DNA, 23 bp, Artificial sequence
  SiRNA target sequence
cttcttctgttttatatgctagt

SEQ ID NO: 42300 - DNA, 23 bp, Artificial sequence
  SiRNA target sequence
ttcttctgttttatatgctagta

SEQ ID NO: 42301 - DNA, 23 bp, Artificial sequence
  SiRNA target sequence
tcttctgttttatatgctagtat

SEQ ID NO: 42302 - DNA, 23 bp, Artificial sequence
  SiRNA target sequence
cttctgttttatatgctagtata

SEQ ID NO: 42303 - DNA, 23 bp, Artificial sequence
  SiRNA target sequence
ttctgttttatatgctagtatag

SEQ ID NO: 42304 - DNA, 23 bp, Artificial sequence
  SiRNA target sequence
tctgttttatatgctagtatagt

SEQ ID NO: 42305 - DNA, 23 bp, Artificial sequence
  SiRNA target sequence
ctgttttatatgctagtatagtc

SEQ ID NO: 42306 - DNA, 23 bp, Artificial sequence
  SiRNA target sequence
tgttttatatgctagtatagtct

SEQ ID NO: 42307 - DNA, 23 bp, Artificial sequence
  SiRNA target sequence
gttttatatgctagtatagtctc

SEQ ID NO: 42308 - DNA, 23 bp, Artificial sequence
  SiRNA target sequence
ttttatatgctagtatagtctca

SEQ ID NO: 42309 - DNA, 23 bp, Artificial sequence
  SiRNA target sequence
tttatatgctagtatagtctcat

SEQ ID NO: 42310 - DNA, 23 bp, Artificial sequence
  SiRNA target sequence
ttatatgctagtatagtctcatg

SEQ ID NO: 42311 - DNA, 23 bp, Artificial sequence
  SiRNA target sequence
tatatgctagtatagtctcatga

SEQ ID NO: 42312 - DNA, 23 bp, Artificial sequence
  SiRNA target sequence
atatgctagtatagtctcatgat

SEQ ID NO: 42313 - DNA, 23 bp, Artificial sequence
  SiRNA target sequence
tatgctagtatagtctcatgatt

SEQ ID NO: 42314 - DNA, 23 bp, Artificial sequence
  SiRNA target sequence
atgctagtatagtctcatgatta

SEQ ID NO: 42315 - DNA, 23 bp, Artificial sequence
  SiRNA target sequence
tgctagtatagtctcatgattaa

SEQ ID NO: 42316 - DNA, 23 bp, Artificial sequence
  SiRNA target sequence
gctagtatagtctcatgattaat

SEQ ID NO: 42317 - DNA, 23 bp, Artificial sequence
  SiRNA target sequence
ctagtatagtctcatgattaatt

SEQ ID NO: 42318 - DNA, 23 bp, Artificial sequence
  SiRNA target sequence
tagtatagtctcatgattaatta

SEQ ID NO: 42319 - DNA, 23 bp, Artificial sequence
  SiRNA target sequence
agtatagtctcatgattaattaa

SEQ ID NO: 42320 - DNA, 23 bp, Artificial sequence
  SiRNA target sequence
gtatagtctcatgattaattaaa

SEQ ID NO: 42321 - DNA, 23 bp, Artificial sequence
  SiRNA target sequence
tatagtctcatgattaattaaag

SEQ ID NO: 42322 - DNA, 23 bp, Artificial sequence
  SiRNA target sequence
atagtctcatgattaattaaaga

SEQ ID NO: 42323 - DNA, 23 bp, Artificial sequence
  SiRNA target sequence
tagtctcatgattaattaaagaa

SEQ ID NO: 42324 - DNA, 23 bp, Artificial sequence
  SiRNA target sequence
agtctcatgattaattaaagaat

SEQ ID NO: 42325 - DNA, 23 bp, Artificial sequence
  SiRNA target sequence
gtctcatgattaattaaagaatc

SEQ ID NO: 42326 - DNA, 23 bp, Artificial sequence
  SiRNA target sequence
tctcatgattaattaaagaatca

SEQ ID NO: 42327 - DNA, 23 bp, Artificial sequence
  SiRNA target sequence
ctcatgattaattaaagaatcat

SEQ ID NO: 42328 - DNA, 23 bp, Artificial sequence
  SiRNA target sequence
tcatgattaattaaagaatcatg

SEQ ID NO: 42329 - DNA, 23 bp, Artificial sequence
  SiRNA target sequence
catgattaattaaagaatcatgt

SEQ ID NO: 42330 - DNA, 23 bp, Artificial sequence
  SiRNA target sequence
atgattaattaaagaatcatgta

SEQ ID NO: 42331 - DNA, 23 bp, Artificial sequence
  SiRNA target sequence
tgattaattaaagaatcatgtaa

SEQ ID NO: 42332 - DNA, 23 bp, Artificial sequence
  SiRNA target sequence
gattaattaaagaatcatgtaag

SEQ ID NO: 42333 - DNA, 23 bp, Artificial sequence
  SiRNA target sequence
attaattaaagaatcatgtaagt

SEQ ID NO: 42334 - DNA, 23 bp, Artificial sequence
  SiRNA target sequence
ttaattaaagaatcatgtaagtg

SEQ ID NO: 42335 - DNA, 23 bp, Artificial sequence
  SiRNA target sequence
taattaaagaatcatgtaagtga

SEQ ID NO: 42336 - DNA, 23 bp, Artificial sequence
  SiRNA target sequence
aattaaagaatcatgtaagtgat

SEQ ID NO: 42337 - DNA, 23 bp, Artificial sequence
  SiRNA target sequence
attaaagaatcatgtaagtgatt

SEQ ID NO: 42338 - DNA, 23 bp, Artificial sequence
  SiRNA target sequence
ttaaagaatcatgtaagtgattt

SEQ ID NO: 42339 - DNA, 23 bp, Artificial sequence
  SiRNA target sequence
taaagaatcatgtaagtgatttg

SEQ ID NO: 42340 - DNA, 23 bp, Artificial sequence
  SiRNA target sequence
aaagaatcatgtaagtgatttga

SEQ ID NO: 42341 - DNA, 23 bp, Artificial sequence
  SiRNA target sequence
aagaatcatgtaagtgatttgag

SEQ ID NO: 42342 - DNA, 23 bp, Artificial sequence
  SiRNA target sequence
agaatcatgtaagtgatttgagc

SEQ ID NO: 42343 - DNA, 23 bp, Artificial sequence
  SiRNA target sequence
gaatcatgtaagtgatttgagca

SEQ ID NO: 42344 - DNA, 23 bp, Artificial sequence
  SiRNA target sequence
aatcatgtaagtgatttgagcat

SEQ ID NO: 42345 - DNA, 23 bp, Artificial sequence
  SiRNA target sequence
atcatgtaagtgatttgagcatc

SEQ ID NO: 42346 - DNA, 23 bp, Artificial sequence
  SiRNA target sequence
tcatgtaagtgatttgagcatct

SEQ ID NO: 42347 - DNA, 23 bp, Artificial sequence
  SiRNA target sequence
catgtaagtgatttgagcatctt

SEQ ID NO: 42348 - DNA, 23 bp, Artificial sequence
  SiRNA target sequence
atgtaagtgatttgagcatcttt

SEQ ID NO: 42349 - DNA, 23 bp, Artificial sequence
  SiRNA target sequence
tgtaagtgatttgagcatctttg

SEQ ID NO: 42350 - DNA, 23 bp, Artificial sequence
  SiRNA target sequence
gtaagtgatttgagcatctttgt

SEQ ID NO: 42351 - DNA, 23 bp, Artificial sequence
  SiRNA target sequence
taagtgatttgagcatctttgtt

SEQ ID NO: 42352 - DNA, 23 bp, Artificial sequence
  SiRNA target sequence
aagtgatttgagcatctttgttg

SEQ ID NO: 42353 - DNA, 23 bp, Artificial sequence
  SiRNA target sequence
agtgatttgagcatctttgttgt

SEQ ID NO: 42354 - DNA, 23 bp, Artificial sequence
  SiRNA target sequence
gtgatttgagcatctttgttgtg

SEQ ID NO: 42355 - DNA, 23 bp, Artificial sequence
  SiRNA target sequence
tgatttgagcatctttgttgtgc

SEQ ID NO: 42356 - DNA, 23 bp, Artificial sequence
  SiRNA target sequence
gatttgagcatctttgttgtgcg

SEQ ID NO: 42357 - DNA, 23 bp, Artificial sequence
  SiRNA target sequence
atttgagcatctttgttgtgcgc

SEQ ID NO: 42358 - DNA, 23 bp, Artificial sequence
  SiRNA target sequence
tttgagcatctttgttgtgcgca

SEQ ID NO: 42359 - DNA, 23 bp, Artificial sequence
  SiRNA target sequence
ttgagcatctttgttgtgcgcaa

SEQ ID NO: 42360 - DNA, 23 bp, Artificial sequence
  SiRNA target sequence
tgagcatctttgttgtgcgcaat

SEQ ID NO: 42361 - DNA, 23 bp, Artificial sequence
  SiRNA target sequence
gagcatctttgttgtgcgcaatt

SEQ ID NO: 42362 - DNA, 23 bp, Artificial sequence
  SiRNA target sequence
agcatctttgttgtgcgcaatta

SEQ ID NO: 42363 - DNA, 23 bp, Artificial sequence
  SiRNA target sequence
gcatctttgttgtgcgcaattat

SEQ ID NO: 42364 - DNA, 23 bp, Artificial sequence
  SiRNA target sequence
catctttgttgtgcgcaattata

SEQ ID NO: 42365 - DNA, 23 bp, Artificial sequence
  SiRNA target sequence
atctttgttgtgcgcaattatat

SEQ ID NO: 42366 - DNA, 23 bp, Artificial sequence
  SiRNA target sequence
tctttgttgtgcgcaattatatt

SEQ ID NO: 42367 - DNA, 23 bp, Artificial sequence
  SiRNA target sequence
ctttgttgtgcgcaattatattc

SEQ ID NO: 42368 - DNA, 23 bp, Artificial sequence
  SiRNA target sequence
tttgttgtgcgcaattatattct

SEQ ID NO: 42369 - DNA, 23 bp, Artificial sequence
  SiRNA target sequence
ttgttgtgcgcaattatattctt

SEQ ID NO: 42370 - DNA, 23 bp, Artificial sequence
  SiRNA target sequence
tgttgtgcgcaattatattcttt

SEQ ID NO: 42371 - DNA, 23 bp, Artificial sequence
  SiRNA target sequence
gttgtgcgcaattatattctttt

SEQ ID NO: 42372 - DNA, 23 bp, Artificial sequence
  SiRNA target sequence
ttgtgcgcaattatattcttttc

SEQ ID NO: 42373 - DNA, 23 bp, Artificial sequence
  SiRNA target sequence
tgtgcgcaattatattcttttct

SEQ ID NO: 42374 - DNA, 23 bp, Artificial sequence
  SiRNA target sequence
gtgcgcaattatattcttttctt

SEQ ID NO: 42375 - DNA, 23 bp, Artificial sequence
  SiRNA target sequence
tgcgcaattatattcttttctta

SEQ ID NO: 42376 - DNA, 23 bp, Artificial sequence
  SiRNA target sequence
gcgcaattatattcttttcttat

SEQ ID NO: 42377 - DNA, 23 bp, Artificial sequence
  SiRNA target sequence
cgcaattatattcttttcttatt

SEQ ID NO: 42378 - DNA, 23 bp, Artificial sequence
  SiRNA target sequence
gcaattatattcttttcttattc

SEQ ID NO: 42379 - DNA, 23 bp, Artificial sequence
  SiRNA target sequence
caattatattcttttcttattcc

SEQ ID NO: 42380 - DNA, 23 bp, Artificial sequence
  SiRNA target sequence
aattatattcttttcttattcct

SEQ ID NO: 42381 - DNA, 23 bp, Artificial sequence
  SiRNA target sequence
attatattcttttcttattcctg

SEQ ID NO: 42382 - DNA, 23 bp, Artificial sequence
  SiRNA target sequence
ttatattcttttcttattcctgt

SEQ ID NO: 42383 - DNA, 23 bp, Artificial sequence
  SiRNA target sequence
tatattcttttcttattcctgta

SEQ ID NO: 42384 - DNA, 23 bp, Artificial sequence
  SiRNA target sequence
atattcttttcttattcctgtac

SEQ ID NO: 42385 - DNA, 23 bp, Artificial sequence
  SiRNA target sequence
tattcttttcttattcctgtacg

SEQ ID NO: 42386 - DNA, 23 bp, Artificial sequence
  SiRNA target sequence
attcttttcttattcctgtacgc

SEQ ID NO: 42387 - DNA, 23 bp, Artificial sequence
  SiRNA target sequence
ttcttttcttattcctgtacgcc

SEQ ID NO: 42388 - DNA, 23 bp, Artificial sequence
  SiRNA target sequence
tcttttcttattcctgtacgcca

SEQ ID NO: 42389 - DNA, 23 bp, Artificial sequence
  SiRNA target sequence
cttttcttattcctgtacgccaa

SEQ ID NO: 42390 - DNA, 23 bp, Artificial sequence
  SiRNA target sequence
ttttcttattcctgtacgccaat

SEQ ID NO: 42391 - DNA, 23 bp, Artificial sequence
  SiRNA target sequence
tttcttattcctgtacgccaatg

SEQ ID NO: 42392 - DNA, 23 bp, Artificial sequence
  SiRNA target sequence
ttcttattcctgtacgccaatga

SEQ ID NO: 42393 - DNA, 23 bp, Artificial sequence
  SiRNA target sequence
tcttattcctgtacgccaatgaa

SEQ ID NO: 42394 - DNA, 23 bp, Artificial sequence
  SiRNA target sequence
cttattcctgtacgccaatgaac

SEQ ID NO: 42395 - DNA, 23 bp, Artificial sequence
  SiRNA target sequence
ttattcctgtacgccaatgaact

SEQ ID NO: 42396 - DNA, 23 bp, Artificial sequence
  SiRNA target sequence
tattcctgtacgccaatgaacta

SEQ ID NO: 42397 - DNA, 23 bp, Artificial sequence
  SiRNA target sequence
attcctgtacgccaatgaactat

SEQ ID NO: 42398 - DNA, 23 bp, Artificial sequence
  SiRNA target sequence
ttcctgtacgccaatgaactatt

SEQ ID NO: 42399 - DNA, 23 bp, Artificial sequence
  SiRNA target sequence
tcctgtacgccaatgaactattt

SEQ ID NO: 42400 - DNA, 23 bp, Artificial sequence
  SiRNA target sequence
cctgtacgccaatgaactatttt

SEQ ID NO: 42401 - DNA, 23 bp, Artificial sequence
  SiRNA target sequence
ctgtacgccaatgaactattttc

SEQ ID NO: 42402 - DNA, 23 bp, Artificial sequence
  SiRNA target sequence
tgtacgccaatgaactattttcg

SEQ ID NO: 42403 - DNA, 23 bp, Artificial sequence
  SiRNA target sequence
gtacgccaatgaactattttcgc

SEQ ID NO: 42404 - DNA, 23 bp, Artificial sequence
  SiRNA target sequence
tacgccaatgaactattttcgca

SEQ ID NO: 42405 - DNA, 23 bp, Artificial sequence
  SiRNA target sequence
acgccaatgaactattttcgcag

SEQ ID NO: 42406 - DNA, 23 bp, Artificial sequence
  SiRNA target sequence
cgccaatgaactattttcgcagt

SEQ ID NO: 42407 - DNA, 23 bp, Artificial sequence
  SiRNA target sequence
gccaatgaactattttcgcagtt

SEQ ID NO: 42408 - DNA, 23 bp, Artificial sequence
  SiRNA target sequence
ccaatgaactattttcgcagttg

SEQ ID NO: 42409 - DNA, 23 bp, Artificial sequence
  SiRNA target sequence
caatgaactattttcgcagttgc

SEQ ID NO: 42410 - DNA, 23 bp, Artificial sequence
  SiRNA target sequence
aatgaactattttcgcagttgca

SEQ ID NO: 42411 - DNA, 23 bp, Artificial sequence
  SiRNA target sequence
atgaactattttcgcagttgcaa

SEQ ID NO: 42412 - DNA, 23 bp, Artificial sequence
  SiRNA target sequence
tgaactattttcgcagttgcaag

SEQ ID NO: 42413 - DNA, 23 bp, Artificial sequence
  SiRNA target sequence
gaactattttcgcagttgcaagg

SEQ ID NO: 42414 - DNA, 23 bp, Artificial sequence
  SiRNA target sequence
aactattttcgcagttgcaagga

SEQ ID NO: 42415 - DNA, 23 bp, Artificial sequence
  SiRNA target sequence
actattttcgcagttgcaaggat

SEQ ID NO: 42416 - DNA, 23 bp, Artificial sequence
  SiRNA target sequence
ctattttcgcagttgcaaggatg

SEQ ID NO: 42417 - DNA, 23 bp, Artificial sequence
  SiRNA target sequence
tattttcgcagttgcaaggatgt

SEQ ID NO: 42418 - DNA, 23 bp, Artificial sequence
  SiRNA target sequence
attttcgcagttgcaaggatgta

SEQ ID NO: 42419 - DNA, 23 bp, Artificial sequence
  SiRNA target sequence
ttttcgcagttgcaaggatgtaa

SEQ ID NO: 42420 - DNA, 23 bp, Artificial sequence
  SiRNA target sequence
tttcgcagttgcaaggatgtaaa

SEQ ID NO: 42421 - DNA, 23 bp, Artificial sequence
  SiRNA target sequence
ttcgcagttgcaaggatgtaaac

SEQ ID NO: 42422 - DNA, 23 bp, Artificial sequence
  SiRNA target sequence
tcgcagttgcaaggatgtaaact

SEQ ID NO: 42423 - DNA, 23 bp, Artificial sequence
  SiRNA target sequence
cgcagttgcaaggatgtaaacta

SEQ ID NO: 42424 - DNA, 23 bp, Artificial sequence
  SiRNA target sequence
gcagttgcaaggatgtaaactaa

SEQ ID NO: 42425 - DNA, 23 bp, Artificial sequence
  SiRNA target sequence
cagttgcaaggatgtaaactaat

SEQ ID NO: 42426 - DNA, 23 bp, Artificial sequence
  SiRNA target sequence
agttgcaaggatgtaaactaata

SEQ ID NO: 42427 - DNA, 23 bp, Artificial sequence
  SiRNA target sequence
gttgcaaggatgtaaactaataa

SEQ ID NO: 42428 - DNA, 23 bp, Artificial sequence
  SiRNA target sequence
ttgcaaggatgtaaactaataat

SEQ ID NO: 42429 - DNA, 23 bp, Artificial sequence
  SiRNA target sequence
tgcaaggatgtaaactaataatg

SEQ ID NO: 42430 - DNA, 23 bp, Artificial sequence
  SiRNA target sequence
gcaaggatgtaaactaataatgt

SEQ ID NO: 42431 - DNA, 23 bp, Artificial sequence
  SiRNA target sequence
caaggatgtaaactaataatgtg

SEQ ID NO: 42432 - DNA, 23 bp, Artificial sequence
  SiRNA target sequence
aaggatgtaaactaataatgtga

SEQ ID NO: 42433 - DNA, 23 bp, Artificial sequence
  SiRNA target sequence
aggatgtaaactaataatgtgat

SEQ ID NO: 42434 - DNA, 23 bp, Artificial sequence
  SiRNA target sequence
ggatgtaaactaataatgtgatt

SEQ ID NO: 42435 - DNA, 23 bp, Artificial sequence
  SiRNA target sequence
gatgtaaactaataatgtgatta

SEQ ID NO: 42436 - DNA, 23 bp, Artificial sequence
  SiRNA target sequence
atgtaaactaataatgtgattaa

SEQ ID NO: 42437 - DNA, 23 bp, Artificial sequence
  SiRNA target sequence
tgtaaactaataatgtgattaaa

SEQ ID NO: 42438 - DNA, 23 bp, Artificial sequence
  SiRNA target sequence
gtaaactaataatgtgattaaaa

SEQ ID NO: 42439 - DNA, 23 bp, Artificial sequence
  SiRNA target sequence
taaactaataatgtgattaaaat

SEQ ID NO: 42440 - DNA, 23 bp, Artificial sequence
  SiRNA target sequence
aaactaataatgtgattaaaata

SEQ ID NO: 42441 - DNA, 23 bp, Artificial sequence
  SiRNA target sequence
aactaataatgtgattaaaataa

SEQ ID NO: 42442 - DNA, 23 bp, Artificial sequence
  SiRNA target sequence
actaataatgtgattaaaataat

SEQ ID NO: 42443 - DNA, 23 bp, Artificial sequence
  SiRNA target sequence
ctaataatgtgattaaaataata

SEQ ID NO: 42444 - DNA, 23 bp, Artificial sequence
  SiRNA target sequence
taataatgtgattaaaataataa

SEQ ID NO: 42445 - DNA, 23 bp, Artificial sequence
  SiRNA target sequence
aataatgtgattaaaataataaa

SEQ ID NO: 42446 - DNA, 23 bp, Artificial sequence
  SiRNA target sequence
ataatgtgattaaaataataaac

SEQ ID NO: 42447 - DNA, 23 bp, Artificial sequence
  SiRNA target sequence
taatgtgattaaaataataaaca

SEQ ID NO: 42448 - DNA, 23 bp, Artificial sequence
  SiRNA target sequence
aatgtgattaaaataataaacat

SEQ ID NO: 42449 - DNA, 23 bp, Artificial sequence
  SiRNA target sequence
atgtgattaaaataataaacata

SEQ ID NO: 42450 - DNA, 23 bp, Artificial sequence
  SiRNA target sequence
tgtgattaaaataataaacatat

SEQ ID NO: 42451 - DNA, 23 bp, Artificial sequence
  SiRNA target sequence
gtgattaaaataataaacatatt

SEQ ID NO: 42452 - DNA, 23 bp, Artificial sequence
  SiRNA target sequence
tgattaaaataataaacatattt

SEQ ID NO: 42453 - DNA, 23 bp, Artificial sequence
  SiRNA target sequence
gattaaaataataaacatatttg

SEQ ID NO: 42454 - DNA, 23 bp, Artificial sequence
  SiRNA target sequence
attaaaataataaacatatttgt

SEQ ID NO: 42455 - DNA, 23 bp, Artificial sequence
  SiRNA target sequence
ttaaaataataaacatatttgtc

SEQ ID NO: 42456 - DNA, 23 bp, Artificial sequence
  SiRNA target sequence
taaaataataaacatatttgtca

SEQ ID NO: 42457 - DNA, 23 bp, Artificial sequence
  SiRNA target sequence
aaaataataaacatatttgtcaa

SEQ ID NO: 42458 - DNA, 23 bp, Artificial sequence
  SiRNA target sequence
aaataataaacatatttgtcaac

SEQ ID NO: 42459 - DNA, 23 bp, Artificial sequence
  SiRNA target sequence
aataataaacatatttgtcaacc

SEQ ID NO: 42460 - DNA, 23 bp, Artificial sequence
  SiRNA target sequence
ataataaacatatttgtcaaccc

SEQ ID NO: 42461 - DNA, 23 bp, Artificial sequence
  SiRNA target sequence
taataaacatatttgtcaaccct

SEQ ID NO: 42462 - DNA, 23 bp, Artificial sequence
  SiRNA target sequence
aataaacatatttgtcaacccta

SEQ ID NO: 42463 - DNA, 23 bp, Artificial sequence
  SiRNA target sequence
ataaacatatttgtcaaccctaa

SEQ ID NO: 42464 - DNA, 23 bp, Artificial sequence
  SiRNA target sequence
taaacatatttgtcaaccctaaa

SEQ ID NO: 42465 - DNA, 23 bp, Artificial sequence
  SiRNA target sequence
aaacatatttgtcaaccctaaat

SEQ ID NO: 42466 - DNA, 23 bp, Artificial sequence
  SiRNA target sequence
aacatatttgtcaaccctaaatt

SEQ ID NO: 42467 - DNA, 23 bp, Artificial sequence
  SiRNA target sequence
acatatttgtcaaccctaaattt

SEQ ID NO: 42468 - DNA, 23 bp, Artificial sequence
  SiRNA target sequence
catatttgtcaaccctaaatttg

SEQ ID NO: 42469 - DNA, 23 bp, Artificial sequence
  SiRNA target sequence
atatttgtcaaccctaaatttgt

SEQ ID NO: 42470 - DNA, 23 bp, Artificial sequence
  SiRNA target sequence
tatttgtcaaccctaaatttgta

SEQ ID NO: 42471 - DNA, 23 bp, Artificial sequence
  SiRNA target sequence
atttgtcaaccctaaatttgtat

SEQ ID NO: 42472 - DNA, 23 bp, Artificial sequence
  SiRNA target sequence
tttgtcaaccctaaatttgtata

SEQ ID NO: 42473 - DNA, 23 bp, Artificial sequence
  SiRNA target sequence
ttgtcaaccctaaatttgtataa

SEQ ID NO: 42474 - DNA, 23 bp, Artificial sequence
  SiRNA target sequence
tgtcaaccctaaatttgtataaa

SEQ ID NO: 42475 - DNA, 23 bp, Artificial sequence
  SiRNA target sequence
gtcaaccctaaatttgtataaat

SEQ ID NO: 42476 - DNA, 23 bp, Artificial sequence
  SiRNA target sequence
tcaaccctaaatttgtataaatt

SEQ ID NO: 42477 - DNA, 23 bp, Artificial sequence
  SiRNA target sequence
caaccctaaatttgtataaattg

SEQ ID NO: 42478 - DNA, 23 bp, Artificial sequence
  SiRNA target sequence
aaccctaaatttgtataaattga

SEQ ID NO: 42479 - DNA, 23 bp, Artificial sequence
  SiRNA target sequence
accctaaatttgtataaattgac

SEQ ID NO: 42480 - DNA, 23 bp, Artificial sequence
  SiRNA target sequence
ccctaaatttgtataaattgacg

SEQ ID NO: 42481 - DNA, 23 bp, Artificial sequence
  SiRNA target sequence
cctaaatttgtataaattgacga

SEQ ID NO: 42482 - DNA, 23 bp, Artificial sequence
  SiRNA target sequence
ctaaatttgtataaattgacgaa

SEQ ID NO: 42483 - DNA, 23 bp, Artificial sequence
  SiRNA target sequence
taaatttgtataaattgacgaac

SEQ ID NO: 42484 - DNA, 23 bp, Artificial sequence
  SiRNA target sequence
aaatttgtataaattgacgaaca

SEQ ID NO: 42485 - DNA, 23 bp, Artificial sequence
  SiRNA target sequence
aatttgtataaattgacgaacac

SEQ ID NO: 42486 - DNA, 23 bp, Artificial sequence
  SiRNA target sequence
atttgtataaattgacgaacacg

SEQ ID NO: 42487 - DNA, 23 bp, Artificial sequence
  SiRNA target sequence
tttgtataaattgacgaacacgc

SEQ ID NO: 42488 - DNA, 23 bp, Artificial sequence
  SiRNA target sequence
ttgtataaattgacgaacacgcc

SEQ ID NO: 42489 - DNA, 23 bp, Artificial sequence
  SiRNA target sequence
tgtataaattgacgaacacgcca

SEQ ID NO: 42490 - DNA, 23 bp, Artificial sequence
  SiRNA target sequence
gtataaattgacgaacacgccaa

SEQ ID NO: 42491 - DNA, 23 bp, Artificial sequence
  SiRNA target sequence
tataaattgacgaacacgccaat

SEQ ID NO: 42492 - DNA, 23 bp, Artificial sequence
  SiRNA target sequence
ataaattgacgaacacgccaata

SEQ ID NO: 42493 - DNA, 23 bp, Artificial sequence
  SiRNA target sequence
taaattgacgaacacgccaatat

SEQ ID NO: 42494 - DNA, 23 bp, Artificial sequence
  SiRNA target sequence
aaattgacgaacacgccaatata

SEQ ID NO: 42495 - DNA, 23 bp, Artificial sequence
  SiRNA target sequence
aattgacgaacacgccaatataa

SEQ ID NO: 42496 - DNA, 23 bp, Artificial sequence
  SiRNA target sequence
attgacgaacacgccaatataac

SEQ ID NO: 42497 - DNA, 23 bp, Artificial sequence
  SiRNA target sequence
ttgacgaacacgccaatataact

SEQ ID NO: 42498 - DNA, 23 bp, Artificial sequence
  SiRNA target sequence
tgacgaacacgccaatataactg

SEQ ID NO: 42499 - DNA, 23 bp, Artificial sequence
  SiRNA target sequence
gacgaacacgccaatataactgt

SEQ ID NO: 42500 - DNA, 23 bp, Artificial sequence
  SiRNA target sequence
acgaacacgccaatataactgta

SEQ ID NO: 42501 - DNA, 23 bp, Artificial sequence
  SiRNA target sequence
cgaacacgccaatataactgtaa

SEQ ID NO: 42502 - DNA, 23 bp, Artificial sequence
  SiRNA target sequence
gaacacgccaatataactgtaaa

SEQ ID NO: 42503 - DNA, 23 bp, Artificial sequence
  SiRNA target sequence
aacacgccaatataactgtaaaa

SEQ ID NO: 42504 - DNA, 23 bp, Artificial sequence
  SiRNA target sequence
acacgccaatataactgtaaaaa

SEQ ID NO: 42505 - DNA, 23 bp, Artificial sequence
  SiRNA target sequence
cacgccaatataactgtaaaaaa

SEQ ID NO: 42506 - DNA, 23 bp, Artificial sequence
  SiRNA target sequence
acgccaatataactgtaaaaaaa

SEQ ID NO: 42507 - DNA, 23 bp, Artificial sequence
  SiRNA target sequence
cgccaatataactgtaaaaaaaa

SEQ ID NO: 42508 - DNA, 23 bp, Artificial sequence
  SiRNA target sequence
gccaatataactgtaaaaaaaat

SEQ ID NO: 42509 - DNA, 23 bp, Artificial sequence
  SiRNA target sequence
ccaatataactgtaaaaaaaata

SEQ ID NO: 42510 - DNA, 23 bp, Artificial sequence
  SiRNA target sequence
caatataactgtaaaaaaaatat

SEQ ID NO: 42511 - DNA, 23 bp, Artificial sequence
  SiRNA target sequence
aatataactgtaaaaaaaatatt

SEQ ID NO: 42512 - DNA, 23 bp, Artificial sequence
  SiRNA target sequence
atataactgtaaaaaaaatattt

SEQ ID NO: 42513 - DNA, 23 bp, Artificial sequence
  SiRNA target sequence
tataactgtaaaaaaaatattta

SEQ ID NO: 42514 - DNA, 23 bp, Artificial sequence
  SiRNA target sequence
ataactgtaaaaaaaatatttat

SEQ ID NO: 42515 - DNA, 23 bp, Artificial sequence
  SiRNA target sequence
taactgtaaaaaaaatatttatg

SEQ ID NO: 42516 - DNA, 23 bp, Artificial sequence
  SiRNA target sequence
aactgtaaaaaaaatatttatga

SEQ ID NO: 42517 - DNA, 23 bp, Artificial sequence
  SiRNA target sequence
actgtaaaaaaaatatttatgat

SEQ ID NO: 42518 - DNA, 23 bp, Artificial sequence
  SiRNA target sequence
ctgtaaaaaaaatatttatgata

SEQ ID NO: 42519 - DNA, 23 bp, Artificial sequence
  SiRNA target sequence
tgtaaaaaaaatatttatgatat

SEQ ID NO: 42520 - DNA, 23 bp, Artificial sequence
  SiRNA target sequence
gtaaaaaaaatatttatgatatt

SEQ ID NO: 42521 - DNA, 23 bp, Artificial sequence
  SiRNA target sequence
taaaaaaaatatttatgatatta

SEQ ID NO: 42522 - DNA, 23 bp, Artificial sequence
  SiRNA target sequence
aaaaaaaatatttatgatattaa

SEQ ID NO: 42523 - DNA, 23 bp, Artificial sequence
  SiRNA target sequence
aaaaaaatatttatgatattaac

SEQ ID NO: 42524 - DNA, 23 bp, Artificial sequence
  SiRNA target sequence
aaaaaatatttatgatattaaca

SEQ ID NO: 42525 - DNA, 23 bp, Artificial sequence
  SiRNA target sequence
aaaaatatttatgatattaacaa

SEQ ID NO: 42526 - DNA, 23 bp, Artificial sequence
  SiRNA target sequence
aaaatatttatgatattaacaaa

SEQ ID NO: 42527 - DNA, 23 bp, Artificial sequence
  SiRNA target sequence
aaatatttatgatattaacaaat

SEQ ID NO: 42528 - DNA, 23 bp, Artificial sequence
  SiRNA target sequence
aatatttatgatattaacaaata

SEQ ID NO: 42529 - DNA, 23 bp, Artificial sequence
  SiRNA target sequence
atatttatgatattaacaaataa

SEQ ID NO: 42530 - DNA, 23 bp, Artificial sequence
  SiRNA target sequence
tatttatgatattaacaaataaa

SEQ ID NO: 42531 - DNA, 23 bp, Artificial sequence
  SiRNA target sequence
atttatgatattaacaaataaaa

SEQ ID NO: 42532 - DNA, 23 bp, Artificial sequence
  SiRNA target sequence
tttatgatattaacaaataaaac

SEQ ID NO: 42533 - DNA, 23 bp, Artificial sequence
  SiRNA target sequence
ttatgatattaacaaataaaact

SEQ ID NO: 42534 - DNA, 23 bp, Artificial sequence
  SiRNA target sequence
tatgatattaacaaataaaactt

SEQ ID NO: 42535 - DNA, 23 bp, Artificial sequence
  SiRNA target sequence
atgatattaacaaataaaacttc

SEQ ID NO: 42536 - DNA, 23 bp, Artificial sequence
  SiRNA target sequence
tgatattaacaaataaaacttcg

SEQ ID NO: 42537 - DNA, 23 bp, Artificial sequence
  SiRNA target sequence
gatattaacaaataaaacttcga

SEQ ID NO: 42538 - DNA, 23 bp, Artificial sequence
  SiRNA target sequence
atattaacaaataaaacttcgat

SEQ ID NO: 42539 - DNA, 23 bp, Artificial sequence
  SiRNA target sequence
tattaacaaataaaacttcgatc

SEQ ID NO: 42540 - DNA, 23 bp, Artificial sequence
  SiRNA target sequence
attaacaaataaaacttcgatca

SEQ ID NO: 42541 - DNA, 23 bp, Artificial sequence
  SiRNA target sequence
ttaacaaataaaacttcgatcaa

SEQ ID NO: 42542 - DNA, 23 bp, Artificial sequence
  SiRNA target sequence
taacaaataaaacttcgatcaat

SEQ ID NO: 42543 - DNA, 23 bp, Artificial sequence
  SiRNA target sequence
aacaaataaaacttcgatcaatt

SEQ ID NO: 42544 - DNA, 23 bp, Artificial sequence
  SiRNA target sequence
acaaataaaacttcgatcaattc

SEQ ID NO: 42545 - DNA, 23 bp, Artificial sequence
  SiRNA target sequence
caaataaaacttcgatcaattca

SEQ ID NO: 42546 - DNA, 23 bp, Artificial sequence
  SiRNA target sequence
aaataaaacttcgatcaattcac

SEQ ID NO: 42547 - DNA, 23 bp, Artificial sequence
  SiRNA target sequence
aataaaacttcgatcaattcact

SEQ ID NO: 42548 - DNA, 23 bp, Artificial sequence
  SiRNA target sequence
ataaaacttcgatcaattcactt

SEQ ID NO: 42549 - DNA, 23 bp, Artificial sequence
  SiRNA target sequence
taaaacttcgatcaattcactta

SEQ ID NO: 42550 - DNA, 23 bp, Artificial sequence
  SiRNA target sequence
aaaacttcgatcaattcacttat

SEQ ID NO: 42551 - DNA, 23 bp, Artificial sequence
  SiRNA target sequence
aaacttcgatcaattcacttatt

SEQ ID NO: 42552 - DNA, 23 bp, Artificial sequence
  SiRNA target sequence
aacttcgatcaattcacttattg

SEQ ID NO: 42553 - DNA, 23 bp, Artificial sequence
  SiRNA target sequence
acttcgatcaattcacttattgc

SEQ ID NO: 42554 - DNA, 23 bp, Artificial sequence
  SiRNA target sequence
cttcgatcaattcacttattgct

SEQ ID NO: 42555 - DNA, 23 bp, Artificial sequence
  SiRNA target sequence
ttcgatcaattcacttattgctt

SEQ ID NO: 42556 - DNA, 23 bp, Artificial sequence
  SiRNA target sequence
tcgatcaattcacttattgcttt

SEQ ID NO: 42557 - DNA, 23 bp, Artificial sequence
  SiRNA target sequence
cgatcaattcacttattgcttta

SEQ ID NO: 42558 - DNA, 23 bp, Artificial sequence
  SiRNA target sequence
gatcaattcacttattgctttac

SEQ ID NO: 42559 - DNA, 23 bp, Artificial sequence
  SiRNA target sequence
atcaattcacttattgctttact

SEQ ID NO: 42560 - DNA, 23 bp, Artificial sequence
  SiRNA target sequence
tcaattcacttattgctttactt

SEQ ID NO: 42561 - DNA, 23 bp, Artificial sequence
  SiRNA target sequence
caattcacttattgctttacttt

SEQ ID NO: 42562 - DNA, 23 bp, Artificial sequence
  SiRNA target sequence
aattcacttattgctttactttc

SEQ ID NO: 42563 - DNA, 23 bp, Artificial sequence
  SiRNA target sequence
attcacttattgctttactttct

SEQ ID NO: 42564 - DNA, 23 bp, Artificial sequence
  SiRNA target sequence
ttcacttattgctttactttctc

SEQ ID NO: 42565 - DNA, 23 bp, Artificial sequence
  SiRNA target sequence
tcacttattgctttactttctcg

SEQ ID NO: 42566 - DNA, 23 bp, Artificial sequence
  SiRNA target sequence
cacttattgctttactttctcgg

SEQ ID NO: 42567 - DNA, 23 bp, Artificial sequence
  SiRNA target sequence
acttattgctttactttctcggt

SEQ ID NO: 42568 - DNA, 23 bp, Artificial sequence
  SiRNA target sequence
cttattgctttactttctcggtc

SEQ ID NO: 42569 - DNA, 23 bp, Artificial sequence
  SiRNA target sequence
ttattgctttactttctcggtct

SEQ ID NO: 42570 - DNA, 23 bp, Artificial sequence
  SiRNA target sequence
tattgctttactttctcggtcta

SEQ ID NO: 42571 - DNA, 23 bp, Artificial sequence
  SiRNA target sequence
attgctttactttctcggtctat

SEQ ID NO: 42572 - DNA, 23 bp, Artificial sequence
  SiRNA target sequence
ttgctttactttctcggtctatt

SEQ ID NO: 42573 - DNA, 23 bp, Artificial sequence
  SiRNA target sequence
tgctttactttctcggtctatta

SEQ ID NO: 42574 - DNA, 23 bp, Artificial sequence
  SiRNA target sequence
gctttactttctcggtctattat

SEQ ID NO: 42575 - DNA, 23 bp, Artificial sequence
  SiRNA target sequence
ctttactttctcggtctattatt

SEQ ID NO: 42576 - DNA, 23 bp, Artificial sequence
  SiRNA target sequence
tttactttctcggtctattattg

SEQ ID NO: 42577 - DNA, 23 bp, Artificial sequence
  SiRNA target sequence
ttactttctcggtctattattgt

SEQ ID NO: 42578 - DNA, 23 bp, Artificial sequence
  SiRNA target sequence
tactttctcggtctattattgtt

SEQ ID NO: 42579 - DNA, 23 bp, Artificial sequence
  SiRNA target sequence
actttctcggtctattattgttt

SEQ ID NO: 42580 - DNA, 23 bp, Artificial sequence
  SiRNA target sequence
ctttctcggtctattattgtttg

SEQ ID NO: 42581 - DNA, 23 bp, Artificial sequence
  SiRNA target sequence
tttctcggtctattattgtttgt

SEQ ID NO: 42582 - DNA, 23 bp, Artificial sequence
  SiRNA target sequence
ttctcggtctattattgtttgta

SEQ ID NO: 42583 - DNA, 23 bp, Artificial sequence
  SiRNA target sequence
tctcggtctattattgtttgtat

SEQ ID NO: 42584 - DNA, 23 bp, Artificial sequence
  SiRNA target sequence
ctcggtctattattgtttgtatt

SEQ ID NO: 42585 - DNA, 23 bp, Artificial sequence
  SiRNA target sequence
tcggtctattattgtttgtattt

SEQ ID NO: 42586 - DNA, 23 bp, Artificial sequence
  SiRNA target sequence
cggtctattattgtttgtatttc

SEQ ID NO: 42587 - DNA, 23 bp, Artificial sequence
  SiRNA target sequence
ggtctattattgtttgtatttca

SEQ ID NO: 42588 - DNA, 23 bp, Artificial sequence
  SiRNA target sequence
gtctattattgtttgtatttcac

SEQ ID NO: 42589 - DNA, 23 bp, Artificial sequence
  SiRNA target sequence
tctattattgtttgtatttcacc

SEQ ID NO: 42590 - DNA, 23 bp, Artificial sequence
  SiRNA target sequence
ctattattgtttgtatttcaccg

SEQ ID NO: 42591 - DNA, 23 bp, Artificial sequence
  SiRNA target sequence
tattattgtttgtatttcaccgc

SEQ ID NO: 42592 - DNA, 23 bp, Artificial sequence
  SiRNA target sequence
attattgtttgtatttcaccgca

SEQ ID NO: 42593 - DNA, 23 bp, Artificial sequence
  SiRNA target sequence
ttattgtttgtatttcaccgcat

SEQ ID NO: 42594 - DNA, 23 bp, Artificial sequence
  SiRNA target sequence
tattgtttgtatttcaccgcatc

SEQ ID NO: 42595 - DNA, 23 bp, Artificial sequence
  SiRNA target sequence
attgtttgtatttcaccgcatcc

SEQ ID NO: 42596 - DNA, 23 bp, Artificial sequence
  SiRNA target sequence
ttgtttgtatttcaccgcatcct

SEQ ID NO: 42597 - DNA, 23 bp, Artificial sequence
  SiRNA target sequence
tgtttgtatttcaccgcatccta

SEQ ID NO: 42598 - DNA, 23 bp, Artificial sequence
  SiRNA target sequence
gtttgtatttcaccgcatcctat

SEQ ID NO: 42599 - DNA, 23 bp, Artificial sequence
  SiRNA target sequence
tttgtatttcaccgcatcctatt

SEQ ID NO: 42600 - DNA, 23 bp, Artificial sequence
  SiRNA target sequence
ttgtatttcaccgcatcctattt

SEQ ID NO: 42601 - DNA, 23 bp, Artificial sequence
  SiRNA target sequence
tgtatttcaccgcatcctatttt

SEQ ID NO: 42602 - DNA, 23 bp, Artificial sequence
  SiRNA target sequence
gtatttcaccgcatcctatttta

SEQ ID NO: 42603 - DNA, 23 bp, Artificial sequence
  SiRNA target sequence
tatttcaccgcatcctattttat

SEQ ID NO: 42604 - DNA, 23 bp, Artificial sequence
  SiRNA target sequence
atttcaccgcatcctattttatt

SEQ ID NO: 42605 - DNA, 23 bp, Artificial sequence
  SiRNA target sequence
tttcaccgcatcctattttattg

SEQ ID NO: 42606 - DNA, 23 bp, Artificial sequence
  SiRNA target sequence
ttcaccgcatcctattttattgt

SEQ ID NO: 42607 - DNA, 23 bp, Artificial sequence
  SiRNA target sequence
tcaccgcatcctattttattgta

SEQ ID NO: 42608 - DNA, 23 bp, Artificial sequence
  SiRNA target sequence
caccgcatcctattttattgtat

SEQ ID NO: 42609 - DNA, 23 bp, Artificial sequence
  SiRNA target sequence
accgcatcctattttattgtatc

SEQ ID NO: 42610 - DNA, 23 bp, Artificial sequence
  SiRNA target sequence
ccgcatcctattttattgtatct

SEQ ID NO: 42611 - DNA, 23 bp, Artificial sequence
  SiRNA target sequence
cgcatcctattttattgtatcta

SEQ ID NO: 42612 - DNA, 23 bp, Artificial sequence
  SiRNA target sequence
gcatcctattttattgtatctac

SEQ ID NO: 42613 - DNA, 23 bp, Artificial sequence
  SiRNA target sequence
catcctattttattgtatctact

SEQ ID NO: 42614 - DNA, 23 bp, Artificial sequence
  SiRNA target sequence
atcctattttattgtatctacta

SEQ ID NO: 42615 - DNA, 23 bp, Artificial sequence
  SiRNA target sequence
tcctattttattgtatctactaa

SEQ ID NO: 42616 - DNA, 23 bp, Artificial sequence
  SiRNA target sequence
cctattttattgtatctactaag

SEQ ID NO: 42617 - DNA, 23 bp, Artificial sequence
  SiRNA target sequence
ctattttattgtatctactaagt

SEQ ID NO: 42618 - DNA, 23 bp, Artificial sequence
  SiRNA target sequence
tattttattgtatctactaagtt

SEQ ID NO: 42619 - DNA, 23 bp, Artificial sequence
  SiRNA target sequence
attttattgtatctactaagttc

SEQ ID NO: 42620 - DNA, 23 bp, Artificial sequence
  SiRNA target sequence
ttttattgtatctactaagttcc

SEQ ID NO: 42621 - DNA, 23 bp, Artificial sequence
  SiRNA target sequence
tttattgtatctactaagttcca

SEQ ID NO: 42622 - DNA, 23 bp, Artificial sequence
  SiRNA target sequence
ttattgtatctactaagttccat

SEQ ID NO: 42623 - DNA, 23 bp, Artificial sequence
  SiRNA target sequence
tattgtatctactaagttccata

SEQ ID NO: 42624 - DNA, 23 bp, Artificial sequence
  SiRNA target sequence
attgtatctactaagttccatat

SEQ ID NO: 42625 - DNA, 23 bp, Artificial sequence
  SiRNA target sequence
ttgtatctactaagttccatatt

SEQ ID NO: 42626 - DNA, 23 bp, Artificial sequence
  SiRNA target sequence
tgtatctactaagttccatattt

SEQ ID NO: 42627 - DNA, 23 bp, Artificial sequence
  SiRNA target sequence
gtatctactaagttccatattta

SEQ ID NO: 42628 - DNA, 23 bp, Artificial sequence
  SiRNA target sequence
tatctactaagttccatatttat

SEQ ID NO: 42629 - DNA, 23 bp, Artificial sequence
  SiRNA target sequence
atctactaagttccatatttata

SEQ ID NO: 42630 - DNA, 23 bp, Artificial sequence
  SiRNA target sequence
tctactaagttccatatttataa

SEQ ID NO: 42631 - DNA, 23 bp, Artificial sequence
  SiRNA target sequence
ctactaagttccatatttataaa

SEQ ID NO: 42632 - DNA, 23 bp, Artificial sequence
  SiRNA target sequence
tactaagttccatatttataaaa

SEQ ID NO: 42633 - DNA, 23 bp, Artificial sequence
  SiRNA target sequence
actaagttccatatttataaaat

SEQ ID NO: 42634 - DNA, 23 bp, Artificial sequence
  SiRNA target sequence
ctaagttccatatttataaaatt

SEQ ID NO: 42635 - DNA, 23 bp, Artificial sequence
  SiRNA target sequence
taagttccatatttataaaattt

SEQ ID NO: 42636 - DNA, 23 bp, Artificial sequence
  SiRNA target sequence
aagttccatatttataaaatttt

SEQ ID NO: 42637 - DNA, 23 bp, Artificial sequence
  SiRNA target sequence
agttccatatttataaaattttt

SEQ ID NO: 42638 - DNA, 23 bp, Artificial sequence
  SiRNA target sequence
gttccatatttataaaattttta

SEQ ID NO: 42639 - DNA, 23 bp, Artificial sequence
  SiRNA target sequence
ttccatatttataaaatttttaa

SEQ ID NO: 42640 - DNA, 23 bp, Artificial sequence
  SiRNA target sequence
tccatatttataaaatttttaaa

SEQ ID NO: 42641 - DNA, 23 bp, Artificial sequence
  SiRNA target sequence
ccatatttataaaatttttaaat

SEQ ID NO: 42642 - DNA, 23 bp, Artificial sequence
  SiRNA target sequence
catatttataaaatttttaaatg

SEQ ID NO: 42643 - DNA, 23 bp, Artificial sequence
  SiRNA target sequence
atatttataaaatttttaaatga

SEQ ID NO: 42644 - DNA, 23 bp, Artificial sequence
  SiRNA target sequence
tatttataaaatttttaaatgaa

SEQ ID NO: 42645 - DNA, 23 bp, Artificial sequence
  SiRNA target sequence
atttataaaatttttaaatgaat

SEQ ID NO: 42646 - DNA, 23 bp, Artificial sequence
  SiRNA target sequence
tttataaaatttttaaatgaatt

SEQ ID NO: 42647 - DNA, 23 bp, Artificial sequence
  SiRNA target sequence
ttataaaatttttaaatgaattt

SEQ ID NO: 42648 - DNA, 23 bp, Artificial sequence
  SiRNA target sequence
tataaaatttttaaatgaatttt

SEQ ID NO: 42649 - DNA, 23 bp, Artificial sequence
  SiRNA target sequence
ataaaatttttaaatgaattttt

SEQ ID NO: 42650 - DNA, 23 bp, Artificial sequence
  SiRNA target sequence
taaaatttttaaatgaatttttt

SEQ ID NO: 42651 - DNA, 23 bp, Artificial sequence
  SiRNA target sequence
aaaatttttaaatgaattttttc

SEQ ID NO: 42652 - DNA, 23 bp, Artificial sequence
  SiRNA target sequence
aaatttttaaatgaattttttcc

SEQ ID NO: 42653 - DNA, 23 bp, Artificial sequence
  SiRNA target sequence
aatttttaaatgaattttttcct

SEQ ID NO: 42654 - DNA, 23 bp, Artificial sequence
  SiRNA target sequence
atttttaaatgaattttttcctg

SEQ ID NO: 42655 - DNA, 23 bp, Artificial sequence
  SiRNA target sequence
tttttaaatgaattttttcctgt

SEQ ID NO: 42656 - DNA, 23 bp, Artificial sequence
  SiRNA target sequence
ttttaaatgaattttttcctgtc

SEQ ID NO: 42657 - DNA, 23 bp, Artificial sequence
  SiRNA target sequence
tttaaatgaattttttcctgtca

SEQ ID NO: 42658 - DNA, 23 bp, Artificial sequence
  SiRNA target sequence
ttaaatgaattttttcctgtcag

SEQ ID NO: 42659 - DNA, 23 bp, Artificial sequence
  SiRNA target sequence
taaatgaattttttcctgtcagt

SEQ ID NO: 42660 - DNA, 23 bp, Artificial sequence
  SiRNA target sequence
aaatgaattttttcctgtcagtc

SEQ ID NO: 42661 - DNA, 23 bp, Artificial sequence
  SiRNA target sequence
aatgaattttttcctgtcagtct

SEQ ID NO: 42662 - DNA, 23 bp, Artificial sequence
  SiRNA target sequence
atgaattttttcctgtcagtctg

SEQ ID NO: 42663 - DNA, 23 bp, Artificial sequence
  SiRNA target sequence
tgaattttttcctgtcagtctga

SEQ ID NO: 42664 - DNA, 23 bp, Artificial sequence
  SiRNA target sequence
gaattttttcctgtcagtctgaa

SEQ ID NO: 42665 - DNA, 23 bp, Artificial sequence
  SiRNA target sequence
aattttttcctgtcagtctgaat

SEQ ID NO: 42666 - DNA, 23 bp, Artificial sequence
  SiRNA target sequence
attttttcctgtcagtctgaata

SEQ ID NO: 42667 - DNA, 23 bp, Artificial sequence
  SiRNA target sequence
ttttttcctgtcagtctgaatac

SEQ ID NO: 42668 - DNA, 23 bp, Artificial sequence
  SiRNA target sequence
tttttcctgtcagtctgaataca

SEQ ID NO: 42669 - DNA, 23 bp, Artificial sequence
  SiRNA target sequence
ttttcctgtcagtctgaatacat

SEQ ID NO: 42670 - DNA, 23 bp, Artificial sequence
  SiRNA target sequence
tttcctgtcagtctgaatacatg

SEQ ID NO: 42671 - DNA, 23 bp, Artificial sequence
  SiRNA target sequence
ttcctgtcagtctgaatacatgt

SEQ ID NO: 42672 - DNA, 23 bp, Artificial sequence
  SiRNA target sequence
tcctgtcagtctgaatacatgtt

SEQ ID NO: 42673 - DNA, 23 bp, Artificial sequence
  SiRNA target sequence
cctgtcagtctgaatacatgttg

SEQ ID NO: 42674 - DNA, 23 bp, Artificial sequence
  SiRNA target sequence
ctgtcagtctgaatacatgttga

SEQ ID NO: 42675 - DNA, 23 bp, Artificial sequence
  SiRNA target sequence
tgtcagtctgaatacatgttgaa

SEQ ID NO: 42676 - DNA, 23 bp, Artificial sequence
  SiRNA target sequence
gtcagtctgaatacatgttgaac

SEQ ID NO: 42677 - DNA, 23 bp, Artificial sequence
  SiRNA target sequence
tcagtctgaatacatgttgaacg

SEQ ID NO: 42678 - DNA, 23 bp, Artificial sequence
  SiRNA target sequence
cagtctgaatacatgttgaacgg

SEQ ID NO: 42679 - DNA, 23 bp, Artificial sequence
  SiRNA target sequence
agtctgaatacatgttgaacggg

SEQ ID NO: 42680 - DNA, 23 bp, Artificial sequence
  SiRNA target sequence
gtctgaatacatgttgaacgggt

SEQ ID NO: 42681 - DNA, 23 bp, Artificial sequence
  SiRNA target sequence
tctgaatacatgttgaacgggtg

SEQ ID NO: 42682 - DNA, 23 bp, Artificial sequence
  SiRNA target sequence
ctgaatacatgttgaacgggtgt

SEQ ID NO: 42683 - DNA, 23 bp, Artificial sequence
  SiRNA target sequence
tgaatacatgttgaacgggtgta

SEQ ID NO: 42684 - DNA, 23 bp, Artificial sequence
  SiRNA target sequence
gaatacatgttgaacgggtgtaa

SEQ ID NO: 42685 - DNA, 23 bp, Artificial sequence
  SiRNA target sequence
aatacatgttgaacgggtgtaac

SEQ ID NO: 42686 - DNA, 23 bp, Artificial sequence
  SiRNA target sequence
atacatgttgaacgggtgtaaca

SEQ ID NO: 42687 - DNA, 23 bp, Artificial sequence
  SiRNA target sequence
tacatgttgaacgggtgtaacaa

SEQ ID NO: 42688 - DNA, 23 bp, Artificial sequence
  SiRNA target sequence
acatgttgaacgggtgtaacaaa

SEQ ID NO: 42689 - DNA, 23 bp, Artificial sequence
  SiRNA target sequence
catgttgaacgggtgtaacaaat

SEQ ID NO: 42690 - DNA, 23 bp, Artificial sequence
  SiRNA target sequence
atgttgaacgggtgtaacaaata

SEQ ID NO: 42691 - DNA, 23 bp, Artificial sequence
  SiRNA target sequence
tgttgaacgggtgtaacaaatat

SEQ ID NO: 42692 - DNA, 23 bp, Artificial sequence
  SiRNA target sequence
gttgaacgggtgtaacaaatata

SEQ ID NO: 42693 - DNA, 23 bp, Artificial sequence
  SiRNA target sequence
ttgaacgggtgtaacaaatataa

SEQ ID NO: 42694 - DNA, 23 bp, Artificial sequence
  SiRNA target sequence
tgaacgggtgtaacaaatataaa

SEQ ID NO: 42695 - DNA, 23 bp, Artificial sequence
  SiRNA target sequence
gaacgggtgtaacaaatataaaa

SEQ ID NO: 42696 - DNA, 23 bp, Artificial sequence
  SiRNA target sequence
aacgggtgtaacaaatataaaat

SEQ ID NO: 42697 - DNA, 23 bp, Artificial sequence
  SiRNA target sequence
acgggtgtaacaaatataaaatt

SEQ ID NO: 42698 - DNA, 23 bp, Artificial sequence
  SiRNA target sequence
cgggtgtaacaaatataaaattg

SEQ ID NO: 42699 - DNA, 23 bp, Artificial sequence
  SiRNA target sequence
gggtgtaacaaatataaaattgt

SEQ ID NO: 42700 - DNA, 23 bp, Artificial sequence
  SiRNA target sequence
ggtgtaacaaatataaaattgtt

SEQ ID NO: 42701 - DNA, 23 bp, Artificial sequence
  SiRNA target sequence
gtgtaacaaatataaaattgtta

SEQ ID NO: 42702 - DNA, 23 bp, Artificial sequence
  SiRNA target sequence
tgtaacaaatataaaattgttaa

SEQ ID NO: 42703 - DNA, 23 bp, Artificial sequence
  SiRNA target sequence
gtaacaaatataaaattgttaag

SEQ ID NO: 42704 - DNA, 23 bp, Artificial sequence
  SiRNA target sequence
taacaaatataaaattgttaagt

SEQ ID NO: 42705 - DNA, 23 bp, Artificial sequence
  SiRNA target sequence
aacaaatataaaattgttaagtt

SEQ ID NO: 42706 - DNA, 23 bp, Artificial sequence
  SiRNA target sequence
acaaatataaaattgttaagttc

SEQ ID NO: 42707 - DNA, 23 bp, Artificial sequence
  SiRNA target sequence
caaatataaaattgttaagttct

SEQ ID NO: 42708 - DNA, 23 bp, Artificial sequence
  SiRNA target sequence
aaatataaaattgttaagttctg

SEQ ID NO: 42709 - DNA, 23 bp, Artificial sequence
  SiRNA target sequence
aatataaaattgttaagttctga

SEQ ID NO: 42710 - DNA, 23 bp, Artificial sequence
  SiRNA target sequence
atataaaattgttaagttctgac

SEQ ID NO: 42711 - DNA, 23 bp, Artificial sequence
  SiRNA target sequence
tataaaattgttaagttctgaca

SEQ ID NO: 42712 - DNA, 23 bp, Artificial sequence
  SiRNA target sequence
ataaaattgttaagttctgacat

SEQ ID NO: 42713 - DNA, 23 bp, Artificial sequence
  SiRNA target sequence
taaaattgttaagttctgacatt

SEQ ID NO: 42714 - DNA, 23 bp, Artificial sequence
  SiRNA target sequence
aaaattgttaagttctgacattg

SEQ ID NO: 42715 - DNA, 23 bp, Artificial sequence
  SiRNA target sequence
aaattgttaagttctgacattgt

SEQ ID NO: 42716 - DNA, 23 bp, Artificial sequence
  SiRNA target sequence
aattgttaagttctgacattgta

SEQ ID NO: 42717 - DNA, 23 bp, Artificial sequence
  SiRNA target sequence
attgttaagttctgacattgtaa

SEQ ID NO: 42718 - DNA, 23 bp, Artificial sequence
  SiRNA target sequence
ttgttaagttctgacattgtaat

SEQ ID NO: 42719 - DNA, 23 bp, Artificial sequence
  SiRNA target sequence
tgttaagttctgacattgtaatt

SEQ ID NO: 42720 - DNA, 23 bp, Artificial sequence
  SiRNA target sequence
gttaagttctgacattgtaattg

SEQ ID NO: 42721 - DNA, 23 bp, Artificial sequence
  SiRNA target sequence
ttaagttctgacattgtaattga

SEQ ID NO: 42722 - DNA, 23 bp, Artificial sequence
  SiRNA target sequence
taagttctgacattgtaattgat

SEQ ID NO: 42723 - DNA, 23 bp, Artificial sequence
  SiRNA target sequence
aagttctgacattgtaattgata

SEQ ID NO: 42724 - DNA, 23 bp, Artificial sequence
  SiRNA target sequence
agttctgacattgtaattgatac

SEQ ID NO: 42725 - DNA, 23 bp, Artificial sequence
  SiRNA target sequence
gttctgacattgtaattgataca

SEQ ID NO: 42726 - DNA, 23 bp, Artificial sequence
  SiRNA target sequence
ttctgacattgtaattgatacaa

SEQ ID NO: 42727 - DNA, 23 bp, Artificial sequence
  SiRNA target sequence
tctgacattgtaattgatacaat

SEQ ID NO: 42728 - DNA, 23 bp, Artificial sequence
  SiRNA target sequence
ctgacattgtaattgatacaatt

SEQ ID NO: 42729 - DNA, 23 bp, Artificial sequence
  SiRNA target sequence
tgacattgtaattgatacaattg

SEQ ID NO: 42730 - DNA, 23 bp, Artificial sequence
  SiRNA target sequence
gacattgtaattgatacaattgt

SEQ ID NO: 42731 - DNA, 23 bp, Artificial sequence
  SiRNA target sequence
acattgtaattgatacaattgtc

SEQ ID NO: 42732 - DNA, 23 bp, Artificial sequence
  SiRNA target sequence
cattgtaattgatacaattgtca

SEQ ID NO: 42733 - DNA, 23 bp, Artificial sequence
  SiRNA target sequence
attgtaattgatacaattgtcaa

SEQ ID NO: 42734 - DNA, 23 bp, Artificial sequence
  SiRNA target sequence
ttgtaattgatacaattgtcaaa

SEQ ID NO: 42735 - DNA, 23 bp, Artificial sequence
  SiRNA target sequence
tgtaattgatacaattgtcaaaa

SEQ ID NO: 42736 - DNA, 23 bp, Artificial sequence
  SiRNA target sequence
gtaattgatacaattgtcaaaac

SEQ ID NO: 42737 - DNA, 23 bp, Artificial sequence
  SiRNA target sequence
taattgatacaattgtcaaaact

SEQ ID NO: 42738 - DNA, 23 bp, Artificial sequence
  SiRNA target sequence
aattgatacaattgtcaaaactg

SEQ ID NO: 42739 - DNA, 23 bp, Artificial sequence
  SiRNA target sequence
attgatacaattgtcaaaactgc

SEQ ID NO: 42740 - DNA, 23 bp, Artificial sequence
  SiRNA target sequence
ttgatacaattgtcaaaactgca

SEQ ID NO: 42741 - DNA, 23 bp, Artificial sequence
  SiRNA target sequence
tgatacaattgtcaaaactgcaa

SEQ ID NO: 42742 - DNA, 23 bp, Artificial sequence
  SiRNA target sequence
gatacaattgtcaaaactgcaaa

SEQ ID NO: 42743 - DNA, 23 bp, Artificial sequence
  SiRNA target sequence
atacaattgtcaaaactgcaaaa

SEQ ID NO: 42744 - DNA, 23 bp, Artificial sequence
  SiRNA target sequence
tacaattgtcaaaactgcaaaat

SEQ ID NO: 42745 - DNA, 23 bp, Artificial sequence
  SiRNA target sequence
acaattgtcaaaactgcaaaata

SEQ ID NO: 42746 - DNA, 23 bp, Artificial sequence
  SiRNA target sequence
caattgtcaaaactgcaaaatac

SEQ ID NO: 42747 - DNA, 23 bp, Artificial sequence
  SiRNA target sequence
aattgtcaaaactgcaaaataca

SEQ ID NO: 42748 - DNA, 23 bp, Artificial sequence
  SiRNA target sequence
attgtcaaaactgcaaaatacaa

SEQ ID NO: 42749 - DNA, 23 bp, Artificial sequence
  SiRNA target sequence
ttgtcaaaactgcaaaatacaaa

SEQ ID NO: 42750 - DNA, 23 bp, Artificial sequence
  SiRNA target sequence
tgtcaaaactgcaaaatacaaaa

SEQ ID NO: 42751 - DNA, 23 bp, Artificial sequence
  SiRNA target sequence
gtcaaaactgcaaaatacaaaag

SEQ ID NO: 42752 - DNA, 23 bp, Artificial sequence
  SiRNA target sequence
tcaaaactgcaaaatacaaaaga

SEQ ID NO: 42753 - DNA, 23 bp, Artificial sequence
  SiRNA target sequence
caaaactgcaaaatacaaaagac

SEQ ID NO: 42754 - DNA, 23 bp, Artificial sequence
  SiRNA target sequence
aaaactgcaaaatacaaaagact

SEQ ID NO: 42755 - DNA, 23 bp, Artificial sequence
  SiRNA target sequence
aaactgcaaaatacaaaagactt

SEQ ID NO: 42756 - DNA, 23 bp, Artificial sequence
  SiRNA target sequence
aactgcaaaatacaaaagacttt

SEQ ID NO: 42757 - DNA, 23 bp, Artificial sequence
  SiRNA target sequence
actgcaaaatacaaaagactttg

SEQ ID NO: 42758 - DNA, 23 bp, Artificial sequence
  SiRNA target sequence
ctgcaaaatacaaaagactttga

SEQ ID NO: 42759 - DNA, 23 bp, Artificial sequence
  SiRNA target sequence
tgcaaaatacaaaagactttgac

SEQ ID NO: 42760 - DNA, 23 bp, Artificial sequence
  SiRNA target sequence
gcaaaatacaaaagactttgact

SEQ ID NO: 42761 - DNA, 23 bp, Artificial sequence
  SiRNA target sequence
caaaatacaaaagactttgacta

SEQ ID NO: 42762 - DNA, 23 bp, Artificial sequence
  SiRNA target sequence
aaaatacaaaagactttgactaa

SEQ ID NO: 42763 - DNA, 23 bp, Artificial sequence
  SiRNA target sequence
aaatacaaaagactttgactaag

SEQ ID NO: 42764 - DNA, 23 bp, Artificial sequence
  SiRNA target sequence
aatacaaaagactttgactaaga

SEQ ID NO: 42765 - DNA, 23 bp, Artificial sequence
  SiRNA target sequence
atacaaaagactttgactaagat

SEQ ID NO: 42766 - DNA, 23 bp, Artificial sequence
  SiRNA target sequence
tacaaaagactttgactaagatc

SEQ ID NO: 42767 - DNA, 23 bp, Artificial sequence
  SiRNA target sequence
acaaaagactttgactaagatct

SEQ ID NO: 42768 - DNA, 23 bp, Artificial sequence
  SiRNA target sequence
caaaagactttgactaagatctt

SEQ ID NO: 42769 - DNA, 23 bp, Artificial sequence
  SiRNA target sequence
aaaagactttgactaagatcttt

SEQ ID NO: 42770 - DNA, 23 bp, Artificial sequence
  SiRNA target sequence
aaagactttgactaagatcttta

SEQ ID NO: 42771 - DNA, 23 bp, Artificial sequence
  SiRNA target sequence
aagactttgactaagatctttat

SEQ ID NO: 42772 - DNA, 23 bp, Artificial sequence
  SiRNA target sequence
agactttgactaagatctttatt

SEQ ID NO: 42773 - DNA, 23 bp, Artificial sequence
  SiRNA target sequence
gactttgactaagatctttatta

SEQ ID NO: 42774 - DNA, 23 bp, Artificial sequence
  SiRNA target sequence
actttgactaagatctttattat

SEQ ID NO: 42775 - DNA, 23 bp, Artificial sequence
  SiRNA target sequence
ctttgactaagatctttattatc

SEQ ID NO: 42776 - DNA, 23 bp, Artificial sequence
  SiRNA target sequence
tttgactaagatctttattatct

SEQ ID NO: 42777 - DNA, 23 bp, Artificial sequence
  SiRNA target sequence
ttgactaagatctttattatctg

SEQ ID NO: 42778 - DNA, 23 bp, Artificial sequence
  SiRNA target sequence
tgactaagatctttattatctgt

SEQ ID NO: 42779 - DNA, 23 bp, Artificial sequence
  SiRNA target sequence
gactaagatctttattatctgta

SEQ ID NO: 42780 - DNA, 23 bp, Artificial sequence
  SiRNA target sequence
actaagatctttattatctgtaa

SEQ ID NO: 42781 - DNA, 23 bp, Artificial sequence
  SiRNA target sequence
ctaagatctttattatctgtaat

SEQ ID NO: 42782 - DNA, 23 bp, Artificial sequence
  SiRNA target sequence
taagatctttattatctgtaata

SEQ ID NO: 42783 - DNA, 23 bp, Artificial sequence
  SiRNA target sequence
aagatctttattatctgtaatat

SEQ ID NO: 42784 - DNA, 23 bp, Artificial sequence
  SiRNA target sequence
agatctttattatctgtaatatc

SEQ ID NO: 42785 - DNA, 23 bp, Artificial sequence
  SiRNA target sequence
gatctttattatctgtaatatca

SEQ ID NO: 42786 - DNA, 23 bp, Artificial sequence
  SiRNA target sequence
atctttattatctgtaatatcac

SEQ ID NO: 42787 - DNA, 23 bp, Artificial sequence
  SiRNA target sequence
tctttattatctgtaatatcact

SEQ ID NO: 42788 - DNA, 23 bp, Artificial sequence
  SiRNA target sequence
ctttattatctgtaatatcacta

SEQ ID NO: 42789 - DNA, 23 bp, Artificial sequence
  SiRNA target sequence
tttattatctgtaatatcactag

SEQ ID NO: 42790 - DNA, 23 bp, Artificial sequence
  SiRNA target sequence
ttattatctgtaatatcactagt

SEQ ID NO: 42791 - DNA, 23 bp, Artificial sequence
  SiRNA target sequence
tattatctgtaatatcactagtc

SEQ ID NO: 42792 - DNA, 23 bp, Artificial sequence
  SiRNA target sequence
attatctgtaatatcactagtca

SEQ ID NO: 42793 - DNA, 23 bp, Artificial sequence
  SiRNA target sequence
ttatctgtaatatcactagtcaa

SEQ ID NO: 42794 - DNA, 23 bp, Artificial sequence
  SiRNA target sequence
tatctgtaatatcactagtcaat

SEQ ID NO: 42795 - DNA, 23 bp, Artificial sequence
  SiRNA target sequence
atctgtaatatcactagtcaatt

SEQ ID NO: 42796 - DNA, 23 bp, Artificial sequence
  SiRNA target sequence
tctgtaatatcactagtcaattt

SEQ ID NO: 42797 - DNA, 23 bp, Artificial sequence
  SiRNA target sequence
ctgtaatatcactagtcaatttc

SEQ ID NO: 42798 - DNA, 23 bp, Artificial sequence
  SiRNA target sequence
tgtaatatcactagtcaatttcc

SEQ ID NO: 42799 - DNA, 23 bp, Artificial sequence
  SiRNA target sequence
gtaatatcactagtcaatttccg

SEQ ID NO: 42800 - DNA, 23 bp, Artificial sequence
  SiRNA target sequence
taatatcactagtcaatttccgg

SEQ ID NO: 42801 - DNA, 23 bp, Artificial sequence
  SiRNA target sequence
aatatcactagtcaatttccggg

SEQ ID NO: 42802 - DNA, 23 bp, Artificial sequence
  SiRNA target sequence
atatcactagtcaatttccgggt

SEQ ID NO: 42803 - DNA, 23 bp, Artificial sequence
  SiRNA target sequence
tatcactagtcaatttccgggta

SEQ ID NO: 42804 - DNA, 23 bp, Artificial sequence
  SiRNA target sequence
atcactagtcaatttccgggtag

SEQ ID NO: 42805 - DNA, 23 bp, Artificial sequence
  SiRNA target sequence
tcactagtcaatttccgggtagc

SEQ ID NO: 42806 - DNA, 23 bp, Artificial sequence
  SiRNA target sequence
cactagtcaatttccgggtagct

SEQ ID NO: 42807 - DNA, 23 bp, Artificial sequence
  SiRNA target sequence
actagtcaatttccgggtagctt

SEQ ID NO: 42808 - DNA, 23 bp, Artificial sequence
  SiRNA target sequence
ctagtcaatttccgggtagcttc

SEQ ID NO: 42809 - DNA, 23 bp, Artificial sequence
  SiRNA target sequence
tagtcaatttccgggtagcttca

SEQ ID NO: 42810 - DNA, 23 bp, Artificial sequence
  SiRNA target sequence
agtcaatttccgggtagcttcaa

SEQ ID NO: 42811 - DNA, 23 bp, Artificial sequence
  SiRNA target sequence
gtcaatttccgggtagcttcaac

SEQ ID NO: 42812 - DNA, 23 bp, Artificial sequence
  SiRNA target sequence
tcaatttccgggtagcttcaact

SEQ ID NO: 42813 - DNA, 23 bp, Artificial sequence
  SiRNA target sequence
caatttccgggtagcttcaactg

SEQ ID NO: 42814 - DNA, 23 bp, Artificial sequence
  SiRNA target sequence
aatttccgggtagcttcaactgt

SEQ ID NO: 42815 - DNA, 23 bp, Artificial sequence
  SiRNA target sequence
atttccgggtagcttcaactgtt

SEQ ID NO: 42816 - DNA, 23 bp, Artificial sequence
  SiRNA target sequence
tttccgggtagcttcaactgtta

SEQ ID NO: 42817 - DNA, 23 bp, Artificial sequence
  SiRNA target sequence
ttccgggtagcttcaactgttaa

SEQ ID NO: 42818 - DNA, 23 bp, Artificial sequence
  SiRNA target sequence
tccgggtagcttcaactgttaaa

SEQ ID NO: 42819 - DNA, 23 bp, Artificial sequence
  SiRNA target sequence
ccgggtagcttcaactgttaaaa

SEQ ID NO: 42820 - DNA, 23 bp, Artificial sequence
  SiRNA target sequence
cgggtagcttcaactgttaaaac

SEQ ID NO: 42821 - DNA, 23 bp, Artificial sequence
  SiRNA target sequence
gggtagcttcaactgttaaaaca

SEQ ID NO: 42822 - DNA, 23 bp, Artificial sequence
  SiRNA target sequence
ggtagcttcaactgttaaaacat

SEQ ID NO: 42823 - DNA, 23 bp, Artificial sequence
  SiRNA target sequence
gtagcttcaactgttaaaacatt

SEQ ID NO: 42824 - DNA, 23 bp, Artificial sequence
  SiRNA target sequence
tagcttcaactgttaaaacatta

SEQ ID NO: 42825 - DNA, 23 bp, Artificial sequence
  SiRNA target sequence
agcttcaactgttaaaacattaa

SEQ ID NO: 42826 - DNA, 23 bp, Artificial sequence
  SiRNA target sequence
gcttcaactgttaaaacattaaa

SEQ ID NO: 42827 - DNA, 23 bp, Artificial sequence
  SiRNA target sequence
cttcaactgttaaaacattaaat

SEQ ID NO: 42828 - DNA, 23 bp, Artificial sequence
  SiRNA target sequence
ttcaactgttaaaacattaaatg

SEQ ID NO: 42829 - DNA, 23 bp, Artificial sequence
  SiRNA target sequence
tcaactgttaaaacattaaatgt

SEQ ID NO: 42830 - DNA, 23 bp, Artificial sequence
  SiRNA target sequence
caactgttaaaacattaaatgta

SEQ ID NO: 42831 - DNA, 23 bp, Artificial sequence
  SiRNA target sequence
aactgttaaaacattaaatgtac

SEQ ID NO: 42832 - DNA, 23 bp, Artificial sequence
  SiRNA target sequence
actgttaaaacattaaatgtaca

SEQ ID NO: 42833 - DNA, 23 bp, Artificial sequence
  SiRNA target sequence
ctgttaaaacattaaatgtacaa

SEQ ID NO: 42834 - DNA, 23 bp, Artificial sequence
  SiRNA target sequence
tgttaaaacattaaatgtacaaa

SEQ ID NO: 42835 - DNA, 23 bp, Artificial sequence
  SiRNA target sequence
gttaaaacattaaatgtacaaac

SEQ ID NO: 42836 - DNA, 23 bp, Artificial sequence
  SiRNA target sequence
ttaaaacattaaatgtacaaact

SEQ ID NO: 42837 - DNA, 23 bp, Artificial sequence
  SiRNA target sequence
taaaacattaaatgtacaaactg

SEQ ID NO: 42838 - DNA, 23 bp, Artificial sequence
  SiRNA target sequence
aaaacattaaatgtacaaactgc

SEQ ID NO: 42839 - DNA, 23 bp, Artificial sequence
  SiRNA target sequence
aaacattaaatgtacaaactgca

SEQ ID NO: 42840 - DNA, 23 bp, Artificial sequence
  SiRNA target sequence
aacattaaatgtacaaactgcaa

SEQ ID NO: 42841 - DNA, 23 bp, Artificial sequence
  SiRNA target sequence
acattaaatgtacaaactgcaaa

SEQ ID NO: 42842 - DNA, 23 bp, Artificial sequence
  SiRNA target sequence
cattaaatgtacaaactgcaaat

SEQ ID NO: 42843 - DNA, 23 bp, Artificial sequence
  SiRNA target sequence
attaaatgtacaaactgcaaatg

SEQ ID NO: 42844 - DNA, 23 bp, Artificial sequence
  SiRNA target sequence
ttaaatgtacaaactgcaaatgt

SEQ ID NO: 42845 - DNA, 23 bp, Artificial sequence
  SiRNA target sequence
taaatgtacaaactgcaaatgtc

SEQ ID NO: 42846 - DNA, 23 bp, Artificial sequence
  SiRNA target sequence
aaatgtacaaactgcaaatgtcc

SEQ ID NO: 42847 - DNA, 23 bp, Artificial sequence
  SiRNA target sequence
aatgtacaaactgcaaatgtccc

SEQ ID NO: 42848 - DNA, 23 bp, Artificial sequence
  SiRNA target sequence
atgtacaaactgcaaatgtccca

SEQ ID NO: 42849 - DNA, 23 bp, Artificial sequence
  SiRNA target sequence
tgtacaaactgcaaatgtcccaa

SEQ ID NO: 42850 - DNA, 23 bp, Artificial sequence
  SiRNA target sequence
gtacaaactgcaaatgtcccaaa

SEQ ID NO: 42851 - DNA, 23 bp, Artificial sequence
  SiRNA target sequence
tacaaactgcaaatgtcccaaaa

SEQ ID NO: 42852 - DNA, 23 bp, Artificial sequence
  SiRNA target sequence
acaaactgcaaatgtcccaaaaa

SEQ ID NO: 42853 - DNA, 23 bp, Artificial sequence
  SiRNA target sequence
caaactgcaaatgtcccaaaaat

SEQ ID NO: 42854 - DNA, 23 bp, Artificial sequence
  SiRNA target sequence
aaactgcaaatgtcccaaaaatt

SEQ ID NO: 42855 - DNA, 23 bp, Artificial sequence
  SiRNA target sequence
aactgcaaatgtcccaaaaatta

SEQ ID NO: 42856 - DNA, 23 bp, Artificial sequence
  SiRNA target sequence
actgcaaatgtcccaaaaattat

SEQ ID NO: 42857 - DNA, 23 bp, Artificial sequence
  SiRNA target sequence
ctgcaaatgtcccaaaaattatg

SEQ ID NO: 42858 - DNA, 23 bp, Artificial sequence
  SiRNA target sequence
tgcaaatgtcccaaaaattatgt

SEQ ID NO: 42859 - DNA, 23 bp, Artificial sequence
  SiRNA target sequence
gcaaatgtcccaaaaattatgta

SEQ ID NO: 42860 - DNA, 23 bp, Artificial sequence
  SiRNA target sequence
caaatgtcccaaaaattatgtaa

SEQ ID NO: 42861 - DNA, 23 bp, Artificial sequence
  SiRNA target sequence
aaatgtcccaaaaattatgtaaa

SEQ ID NO: 42862 - DNA, 23 bp, Artificial sequence
  SiRNA target sequence
aatgtcccaaaaattatgtaaat

SEQ ID NO: 42863 - DNA, 23 bp, Artificial sequence
  SiRNA target sequence
atgtcccaaaaattatgtaaatg

SEQ ID NO: 42864 - DNA, 23 bp, Artificial sequence
  SiRNA target sequence
tgtcccaaaaattatgtaaatga

SEQ ID NO: 42865 - DNA, 23 bp, Artificial sequence
  SiRNA target sequence
gtcccaaaaattatgtaaatgac

SEQ ID NO: 42866 - DNA, 23 bp, Artificial sequence
  SiRNA target sequence
tcccaaaaattatgtaaatgaca

SEQ ID NO: 42867 - DNA, 23 bp, Artificial sequence
  SiRNA target sequence
cccaaaaattatgtaaatgacaa

SEQ ID NO: 42868 - DNA, 23 bp, Artificial sequence
  SiRNA target sequence
ccaaaaattatgtaaatgacaaa

SEQ ID NO: 42869 - DNA, 23 bp, Artificial sequence
  SiRNA target sequence
caaaaattatgtaaatgacaaat

SEQ ID NO: 42870 - DNA, 23 bp, Artificial sequence
  SiRNA target sequence
aaaaattatgtaaatgacaaatg

SEQ ID NO: 42871 - DNA, 23 bp, Artificial sequence
  SiRNA target sequence
aaaattatgtaaatgacaaatgt

SEQ ID NO: 42872 - DNA, 23 bp, Artificial sequence
  SiRNA target sequence
aaattatgtaaatgacaaatgtt

SEQ ID NO: 42873 - DNA, 23 bp, Artificial sequence
  SiRNA target sequence
aattatgtaaatgacaaatgttc

SEQ ID NO: 42874 - DNA, 23 bp, Artificial sequence
  SiRNA target sequence
attatgtaaatgacaaatgttcg

SEQ ID NO: 42875 - DNA, 23 bp, Artificial sequence
  SiRNA target sequence
ttatgtaaatgacaaatgttcga

SEQ ID NO: 42876 - DNA, 23 bp, Artificial sequence
  SiRNA target sequence
tatgtaaatgacaaatgttcgaa

SEQ ID NO: 42877 - DNA, 23 bp, Artificial sequence
  SiRNA target sequence
atgtaaatgacaaatgttcgaat

SEQ ID NO: 42878 - DNA, 23 bp, Artificial sequence
  SiRNA target sequence
tgtaaatgacaaatgttcgaata

SEQ ID NO: 42879 - DNA, 23 bp, Artificial sequence
  SiRNA target sequence
gtaaatgacaaatgttcgaataa

SEQ ID NO: 42880 - DNA, 23 bp, Artificial sequence
  SiRNA target sequence
taaatgacaaatgttcgaataaa

SEQ ID NO: 42881 - DNA, 23 bp, Artificial sequence
  SiRNA target sequence
aaatgacaaatgttcgaataaag

SEQ ID NO: 42882 - DNA, 23 bp, Artificial sequence
  SiRNA target sequence
aatgacaaatgttcgaataaagg

SEQ ID NO: 42883 - DNA, 23 bp, Artificial sequence
  SiRNA target sequence
atgacaaatgttcgaataaaggg

SEQ ID NO: 42884 - DNA, 23 bp, Artificial sequence
  SiRNA target sequence
tgacaaatgttcgaataaagggc

SEQ ID NO: 42885 - DNA, 23 bp, Artificial sequence
  SiRNA target sequence
gacaaatgttcgaataaagggct

SEQ ID NO: 42886 - DNA, 23 bp, Artificial sequence
  SiRNA target sequence
acaaatgttcgaataaagggctt

SEQ ID NO: 42887 - DNA, 23 bp, Artificial sequence
  SiRNA target sequence
caaatgttcgaataaagggcttt

SEQ ID NO: 42888 - DNA, 23 bp, Artificial sequence
  SiRNA target sequence
aaatgttcgaataaagggctttg

SEQ ID NO: 42889 - DNA, 23 bp, Artificial sequence
  SiRNA target sequence
aatgttcgaataaagggctttga

SEQ ID NO: 42890 - DNA, 23 bp, Artificial sequence
  SiRNA target sequence
atgttcgaataaagggctttgaa

SEQ ID NO: 42891 - DNA, 23 bp, Artificial sequence
  SiRNA target sequence
tgttcgaataaagggctttgaaa

SEQ ID NO: 42892 - DNA, 23 bp, Artificial sequence
  SiRNA target sequence
gttcgaataaagggctttgaaat

SEQ ID NO: 42893 - DNA, 23 bp, Artificial sequence
  SiRNA target sequence
ttcgaataaagggctttgaaata

SEQ ID NO: 42894 - DNA, 23 bp, Artificial sequence
  SiRNA target sequence
tcgaataaagggctttgaaataa

SEQ ID NO: 42895 - DNA, 23 bp, Artificial sequence
  SiRNA target sequence
cgaataaagggctttgaaataac

SEQ ID NO: 42896 - DNA, 23 bp, Artificial sequence
  SiRNA target sequence
gaataaagggctttgaaataaca

SEQ ID NO: 42897 - DNA, 23 bp, Artificial sequence
  SiRNA target sequence
aataaagggctttgaaataacat

SEQ ID NO: 42898 - DNA, 23 bp, Artificial sequence
  SiRNA target sequence
ataaagggctttgaaataacata

SEQ ID NO: 42899 - DNA, 23 bp, Artificial sequence
  SiRNA target sequence
taaagggctttgaaataacatat

SEQ ID NO: 42900 - DNA, 23 bp, Artificial sequence
  SiRNA target sequence
aaagggctttgaaataacatatt

SEQ ID NO: 42901 - DNA, 23 bp, Artificial sequence
  SiRNA target sequence
aagggctttgaaataacatattc

SEQ ID NO: 42902 - DNA, 23 bp, Artificial sequence
  SiRNA target sequence
agggctttgaaataacatattct

SEQ ID NO: 42903 - DNA, 23 bp, Artificial sequence
  SiRNA target sequence
gggctttgaaataacatattcta

SEQ ID NO: 42904 - DNA, 23 bp, Artificial sequence
  SiRNA target sequence
ggctttgaaataacatattctac

SEQ ID NO: 42905 - DNA, 23 bp, Artificial sequence
  SiRNA target sequence
gctttgaaataacatattctaca

SEQ ID NO: 42906 - DNA, 23 bp, Artificial sequence
  SiRNA target sequence
ctttgaaataacatattctacaa

SEQ ID NO: 42907 - DNA, 23 bp, Artificial sequence
  SiRNA target sequence
tttgaaataacatattctacaat

SEQ ID NO: 42908 - DNA, 23 bp, Artificial sequence
  SiRNA target sequence
ttgaaataacatattctacaatc

SEQ ID NO: 42909 - DNA, 23 bp, Artificial sequence
  SiRNA target sequence
tgaaataacatattctacaatca

SEQ ID NO: 42910 - DNA, 23 bp, Artificial sequence
  SiRNA target sequence
gaaataacatattctacaatcag

SEQ ID NO: 42911 - DNA, 23 bp, Artificial sequence
  SiRNA target sequence
aaataacatattctacaatcagg

SEQ ID NO: 42912 - DNA, 23 bp, Artificial sequence
  SiRNA target sequence
aataacatattctacaatcaggt

SEQ ID NO: 42913 - DNA, 23 bp, Artificial sequence
  SiRNA target sequence
ataacatattctacaatcaggtc

SEQ ID NO: 42914 - DNA, 23 bp, Artificial sequence
  SiRNA target sequence
taacatattctacaatcaggtct

SEQ ID NO: 42915 - DNA, 23 bp, Artificial sequence
  SiRNA target sequence
aacatattctacaatcaggtctt

SEQ ID NO: 42916 - DNA, 23 bp, Artificial sequence
  SiRNA target sequence
acatattctacaatcaggtcttt

SEQ ID NO: 42917 - DNA, 23 bp, Artificial sequence
  SiRNA target sequence
catattctacaatcaggtctttc

SEQ ID NO: 42918 - DNA, 23 bp, Artificial sequence
  SiRNA target sequence
atattctacaatcaggtctttca

SEQ ID NO: 42919 - DNA, 23 bp, Artificial sequence
  SiRNA target sequence
tattctacaatcaggtctttcat

SEQ ID NO: 42920 - DNA, 23 bp, Artificial sequence
  SiRNA target sequence
attctacaatcaggtctttcata

SEQ ID NO: 42921 - DNA, 23 bp, Artificial sequence
  SiRNA target sequence
ttctacaatcaggtctttcataa

SEQ ID NO: 42922 - DNA, 23 bp, Artificial sequence
  SiRNA target sequence
tctacaatcaggtctttcataat

SEQ ID NO: 42923 - DNA, 23 bp, Artificial sequence
  SiRNA target sequence
ctacaatcaggtctttcataata

SEQ ID NO: 42924 - DNA, 23 bp, Artificial sequence
  SiRNA target sequence
tacaatcaggtctttcataatac

SEQ ID NO: 42925 - DNA, 23 bp, Artificial sequence
  SiRNA target sequence
acaatcaggtctttcataatact

SEQ ID NO: 42926 - DNA, 23 bp, Artificial sequence
  SiRNA target sequence
caatcaggtctttcataatacta

SEQ ID NO: 42927 - DNA, 23 bp, Artificial sequence
  SiRNA target sequence
aatcaggtctttcataatactaa

SEQ ID NO: 42928 - DNA, 23 bp, Artificial sequence
  SiRNA target sequence
atcaggtctttcataatactaat

SEQ ID NO: 42929 - DNA, 23 bp, Artificial sequence
  SiRNA target sequence
tcaggtctttcataatactaata

SEQ ID NO: 42930 - DNA, 23 bp, Artificial sequence
  SiRNA target sequence
caggtctttcataatactaatat

SEQ ID NO: 42931 - DNA, 23 bp, Artificial sequence
  SiRNA target sequence
aggtctttcataatactaatatc

SEQ ID NO: 42932 - DNA, 23 bp, Artificial sequence
  SiRNA target sequence
ggtctttcataatactaatatca

SEQ ID NO: 42933 - DNA, 23 bp, Artificial sequence
  SiRNA target sequence
gtctttcataatactaatatcac

SEQ ID NO: 42934 - DNA, 23 bp, Artificial sequence
  SiRNA target sequence
tctttcataatactaatatcact

SEQ ID NO: 42935 - DNA, 23 bp, Artificial sequence
  SiRNA target sequence
ctttcataatactaatatcacta

SEQ ID NO: 42936 - DNA, 23 bp, Artificial sequence
  SiRNA target sequence
tttcataatactaatatcactac

SEQ ID NO: 42937 - DNA, 23 bp, Artificial sequence
  SiRNA target sequence
ttcataatactaatatcactacc

SEQ ID NO: 42938 - DNA, 23 bp, Artificial sequence
  SiRNA target sequence
tcataatactaatatcactacca

SEQ ID NO: 42939 - DNA, 23 bp, Artificial sequence
  SiRNA target sequence
cataatactaatatcactaccat

SEQ ID NO: 42940 - DNA, 23 bp, Artificial sequence
  SiRNA target sequence
ataatactaatatcactaccata

SEQ ID NO: 42941 - DNA, 23 bp, Artificial sequence
  SiRNA target sequence
taatactaatatcactaccataa

SEQ ID NO: 42942 - DNA, 23 bp, Artificial sequence
  SiRNA target sequence
aatactaatatcactaccataaa

SEQ ID NO: 42943 - DNA, 23 bp, Artificial sequence
  SiRNA target sequence
atactaatatcactaccataaat

SEQ ID NO: 42944 - DNA, 23 bp, Artificial sequence
  SiRNA target sequence
tactaatatcactaccataaata

SEQ ID NO: 42945 - DNA, 23 bp, Artificial sequence
  SiRNA target sequence
actaatatcactaccataaatag

SEQ ID NO: 42946 - DNA, 23 bp, Artificial sequence
  SiRNA target sequence
ctaatatcactaccataaataga

SEQ ID NO: 42947 - DNA, 23 bp, Artificial sequence
  SiRNA target sequence
taatatcactaccataaatagat

SEQ ID NO: 42948 - DNA, 23 bp, Artificial sequence
  SiRNA target sequence
aatatcactaccataaatagatt

SEQ ID NO: 42949 - DNA, 23 bp, Artificial sequence
  SiRNA target sequence
atatcactaccataaatagattt

SEQ ID NO: 42950 - DNA, 23 bp, Artificial sequence
  SiRNA target sequence
tatcactaccataaatagatttt

SEQ ID NO: 42951 - DNA, 23 bp, Artificial sequence
  SiRNA target sequence
atcactaccataaatagattttt

SEQ ID NO: 42952 - DNA, 23 bp, Artificial sequence
  SiRNA target sequence
tcactaccataaatagatttttt

SEQ ID NO: 42953 - DNA, 23 bp, Artificial sequence
  SiRNA target sequence
cactaccataaatagattttttt

SEQ ID NO: 42954 - DNA, 23 bp, Artificial sequence
  SiRNA target sequence
actaccataaatagatttttttt

SEQ ID NO: 42955 - DNA, 23 bp, Artificial sequence
  SiRNA target sequence
ctaccataaatagattttttttc

SEQ ID NO: 42956 - DNA, 23 bp, Artificial sequence
  SiRNA target sequence
taccataaatagattttttttct

SEQ ID NO: 42957 - DNA, 23 bp, Artificial sequence
  SiRNA target sequence
accataaatagattttttttcta

SEQ ID NO: 42958 - DNA, 23 bp, Artificial sequence
  SiRNA target sequence
ccataaatagattttttttctaa

SEQ ID NO: 42959 - DNA, 23 bp, Artificial sequence
  SiRNA target sequence
cataaatagattttttttctaac

SEQ ID NO: 42960 - DNA, 23 bp, Artificial sequence
  SiRNA target sequence
ataaatagattttttttctaaca

SEQ ID NO: 42961 - DNA, 23 bp, Artificial sequence
  SiRNA target sequence
taaatagattttttttctaacat

SEQ ID NO: 42962 - DNA, 24 bp, Artificial sequence
  SiRNA target sequence
ttataagtttaatgtagaaataat

SEQ ID NO: 42963 - DNA, 24 bp, Artificial sequence
  SiRNA target sequence
tataagtttaatgtagaaataata

SEQ ID NO: 42964 - DNA, 24 bp, Artificial sequence
  SiRNA target sequence
ataagtttaatgtagaaataatat

SEQ ID NO: 42965 - DNA, 24 bp, Artificial sequence
  SiRNA target sequence
taagtttaatgtagaaataatatt

SEQ ID NO: 42966 - DNA, 24 bp, Artificial sequence
  SiRNA target sequence
aagtttaatgtagaaataatattt

SEQ ID NO: 42967 - DNA, 24 bp, Artificial sequence
  SiRNA target sequence
agtttaatgtagaaataatatttt

SEQ ID NO: 42968 - DNA, 24 bp, Artificial sequence
  SiRNA target sequence
gtttaatgtagaaataatattttc

SEQ ID NO: 42969 - DNA, 24 bp, Artificial sequence
  SiRNA target sequence
tttaatgtagaaataatattttct

SEQ ID NO: 42970 - DNA, 24 bp, Artificial sequence
  SiRNA target sequence
ttaatgtagaaataatattttctt

SEQ ID NO: 42971 - DNA, 24 bp, Artificial sequence
  SiRNA target sequence
taatgtagaaataatattttcttc

SEQ ID NO: 42972 - DNA, 24 bp, Artificial sequence
  SiRNA target sequence
aatgtagaaataatattttcttct

SEQ ID NO: 42973 - DNA, 24 bp, Artificial sequence
  SiRNA target sequence
atgtagaaataatattttcttcta

SEQ ID NO: 42974 - DNA, 24 bp, Artificial sequence
  SiRNA target sequence
tgtagaaataatattttcttctat

SEQ ID NO: 42975 - DNA, 24 bp, Artificial sequence
  SiRNA target sequence
gtagaaataatattttcttctatc

SEQ ID NO: 42976 - DNA, 24 bp, Artificial sequence
  SiRNA target sequence
tagaaataatattttcttctatct

SEQ ID NO: 42977 - DNA, 24 bp, Artificial sequence
  SiRNA target sequence
agaaataatattttcttctatctt

SEQ ID NO: 42978 - DNA, 24 bp, Artificial sequence
  SiRNA target sequence
gaaataatattttcttctatctta

SEQ ID NO: 42979 - DNA, 24 bp, Artificial sequence
  SiRNA target sequence
aaataatattttcttctatcttat

SEQ ID NO: 42980 - DNA, 24 bp, Artificial sequence
  SiRNA target sequence
aataatattttcttctatcttatg

SEQ ID NO: 42981 - DNA, 24 bp, Artificial sequence
  SiRNA target sequence
ataatattttcttctatcttatgt

SEQ ID NO: 42982 - DNA, 24 bp, Artificial sequence
  SiRNA target sequence
taatattttcttctatcttatgta

SEQ ID NO: 42983 - DNA, 24 bp, Artificial sequence
  SiRNA target sequence
aatattttcttctatcttatgtaa

SEQ ID NO: 42984 - DNA, 24 bp, Artificial sequence
  SiRNA target sequence
atattttcttctatcttatgtaat

SEQ ID NO: 42985 - DNA, 24 bp, Artificial sequence
  SiRNA target sequence
tattttcttctatcttatgtaatg

SEQ ID NO: 42986 - DNA, 24 bp, Artificial sequence
  SiRNA target sequence
attttcttctatcttatgtaatga

SEQ ID NO: 42987 - DNA, 24 bp, Artificial sequence
  SiRNA target sequence
ttttcttctatcttatgtaatgat

SEQ ID NO: 42988 - DNA, 24 bp, Artificial sequence
  SiRNA target sequence
tttcttctatcttatgtaatgata

SEQ ID NO: 42989 - DNA, 24 bp, Artificial sequence
  SiRNA target sequence
ttcttctatcttatgtaatgatac

SEQ ID NO: 42990 - DNA, 24 bp, Artificial sequence
  SiRNA target sequence
tcttctatcttatgtaatgataca

SEQ ID NO: 42991 - DNA, 24 bp, Artificial sequence
  SiRNA target sequence
cttctatcttatgtaatgatacag

SEQ ID NO: 42992 - DNA, 24 bp, Artificial sequence
  SiRNA target sequence
ttctatcttatgtaatgatacagt

SEQ ID NO: 42993 - DNA, 24 bp, Artificial sequence
  SiRNA target sequence
tctatcttatgtaatgatacagtt

SEQ ID NO: 42994 - DNA, 24 bp, Artificial sequence
  SiRNA target sequence
ctatcttatgtaatgatacagttt

SEQ ID NO: 42995 - DNA, 24 bp, Artificial sequence
  SiRNA target sequence
tatcttatgtaatgatacagtttt

SEQ ID NO: 42996 - DNA, 24 bp, Artificial sequence
  SiRNA target sequence
atcttatgtaatgatacagttttg

SEQ ID NO: 42997 - DNA, 24 bp, Artificial sequence
  SiRNA target sequence
tcttatgtaatgatacagttttgt

SEQ ID NO: 42998 - DNA, 24 bp, Artificial sequence
  SiRNA target sequence
cttatgtaatgatacagttttgtt

SEQ ID NO: 42999 - DNA, 24 bp, Artificial sequence
  SiRNA target sequence
ttatgtaatgatacagttttgttt

SEQ ID NO: 43000 - DNA, 24 bp, Artificial sequence
  SiRNA target sequence
tatgtaatgatacagttttgtttt

SEQ ID NO: 43001 - DNA, 24 bp, Artificial sequence
  SiRNA target sequence
atgtaatgatacagttttgttttt

SEQ ID NO: 43002 - DNA, 24 bp, Artificial sequence
  SiRNA target sequence
tgtaatgatacagttttgttttta

SEQ ID NO: 43003 - DNA, 24 bp, Artificial sequence
  SiRNA target sequence
gtaatgatacagttttgtttttaa

SEQ ID NO: 43004 - DNA, 24 bp, Artificial sequence
  SiRNA target sequence
taatgatacagttttgtttttaat

SEQ ID NO: 43005 - DNA, 24 bp, Artificial sequence
  SiRNA target sequence
aatgatacagttttgtttttaata

SEQ ID NO: 43006 - DNA, 24 bp, Artificial sequence
  SiRNA target sequence
atgatacagttttgtttttaatac

SEQ ID NO: 43007 - DNA, 24 bp, Artificial sequence
  SiRNA target sequence
tgatacagttttgtttttaatact

SEQ ID NO: 43008 - DNA, 24 bp, Artificial sequence
  SiRNA target sequence
gatacagttttgtttttaatactt

SEQ ID NO: 43009 - DNA, 24 bp, Artificial sequence
  SiRNA target sequence
atacagttttgtttttaatactta

SEQ ID NO: 43010 - DNA, 24 bp, Artificial sequence
  SiRNA target sequence
tacagttttgtttttaatacttag

SEQ ID NO: 43011 - DNA, 24 bp, Artificial sequence
  SiRNA target sequence
acagttttgtttttaatacttagc

SEQ ID NO: 43012 - DNA, 24 bp, Artificial sequence
  SiRNA target sequence
cagttttgtttttaatacttagca

SEQ ID NO: 43013 - DNA, 24 bp, Artificial sequence
  SiRNA target sequence
agttttgtttttaatacttagcac

SEQ ID NO: 43014 - DNA, 24 bp, Artificial sequence
  SiRNA target sequence
gttttgtttttaatacttagcact

SEQ ID NO: 43015 - DNA, 24 bp, Artificial sequence
  SiRNA target sequence
ttttgtttttaatacttagcactt

SEQ ID NO: 43016 - DNA, 24 bp, Artificial sequence
  SiRNA target sequence
tttgtttttaatacttagcacttt

SEQ ID NO: 43017 - DNA, 24 bp, Artificial sequence
  SiRNA target sequence
ttgtttttaatacttagcacttta

SEQ ID NO: 43018 - DNA, 24 bp, Artificial sequence
  SiRNA target sequence
tgtttttaatacttagcactttat

SEQ ID NO: 43019 - DNA, 24 bp, Artificial sequence
  SiRNA target sequence
gtttttaatacttagcactttatc

SEQ ID NO: 43020 - DNA, 24 bp, Artificial sequence
  SiRNA target sequence
tttttaatacttagcactttatca

SEQ ID NO: 43021 - DNA, 24 bp, Artificial sequence
  SiRNA target sequence
ttttaatacttagcactttatcaa

SEQ ID NO: 43022 - DNA, 24 bp, Artificial sequence
  SiRNA target sequence
tttaatacttagcactttatcaaa

SEQ ID NO: 43023 - DNA, 24 bp, Artificial sequence
  SiRNA target sequence
ttaatacttagcactttatcaaat

SEQ ID NO: 43024 - DNA, 24 bp, Artificial sequence
  SiRNA target sequence
taatacttagcactttatcaaata

SEQ ID NO: 43025 - DNA, 24 bp, Artificial sequence
  SiRNA target sequence
aatacttagcactttatcaaataa

SEQ ID NO: 43026 - DNA, 24 bp, Artificial sequence
  SiRNA target sequence
atacttagcactttatcaaataag

SEQ ID NO: 43027 - DNA, 24 bp, Artificial sequence
  SiRNA target sequence
tacttagcactttatcaaataagt

SEQ ID NO: 43028 - DNA, 24 bp, Artificial sequence
  SiRNA target sequence
acttagcactttatcaaataagtg

SEQ ID NO: 43029 - DNA, 24 bp, Artificial sequence
  SiRNA target sequence
cttagcactttatcaaataagtgg

SEQ ID NO: 43030 - DNA, 24 bp, Artificial sequence
  SiRNA target sequence
ttagcactttatcaaataagtgga

SEQ ID NO: 43031 - DNA, 24 bp, Artificial sequence
  SiRNA target sequence
tagcactttatcaaataagtggag

SEQ ID NO: 43032 - DNA, 24 bp, Artificial sequence
  SiRNA target sequence
agcactttatcaaataagtggagt

SEQ ID NO: 43033 - DNA, 24 bp, Artificial sequence
  SiRNA target sequence
gcactttatcaaataagtggagta

SEQ ID NO: 43034 - DNA, 24 bp, Artificial sequence
  SiRNA target sequence
cactttatcaaataagtggagtaa

SEQ ID NO: 43035 - DNA, 24 bp, Artificial sequence
  SiRNA target sequence
actttatcaaataagtggagtaaa

SEQ ID NO: 43036 - DNA, 24 bp, Artificial sequence
  SiRNA target sequence
ctttatcaaataagtggagtaaat

SEQ ID NO: 43037 - DNA, 24 bp, Artificial sequence
  SiRNA target sequence
tttatcaaataagtggagtaaatc

SEQ ID NO: 43038 - DNA, 24 bp, Artificial sequence
  SiRNA target sequence
ttatcaaataagtggagtaaatct

SEQ ID NO: 43039 - DNA, 24 bp, Artificial sequence
  SiRNA target sequence
tatcaaataagtggagtaaatcta

SEQ ID NO: 43040 - DNA, 24 bp, Artificial sequence
  SiRNA target sequence
atcaaataagtggagtaaatctaa

SEQ ID NO: 43041 - DNA, 24 bp, Artificial sequence
  SiRNA target sequence
tcaaataagtggagtaaatctaaa

SEQ ID NO: 43042 - DNA, 24 bp, Artificial sequence
  SiRNA target sequence
caaataagtggagtaaatctaaat

SEQ ID NO: 43043 - DNA, 24 bp, Artificial sequence
  SiRNA target sequence
aaataagtggagtaaatctaaatt

SEQ ID NO: 43044 - DNA, 24 bp, Artificial sequence
  SiRNA target sequence
aataagtggagtaaatctaaatta

SEQ ID NO: 43045 - DNA, 24 bp, Artificial sequence
  SiRNA target sequence
ataagtggagtaaatctaaattat

SEQ ID NO: 43046 - DNA, 24 bp, Artificial sequence
  SiRNA target sequence
taagtggagtaaatctaaattatg

SEQ ID NO: 43047 - DNA, 24 bp, Artificial sequence
  SiRNA target sequence
aagtggagtaaatctaaattatgt

SEQ ID NO: 43048 - DNA, 24 bp, Artificial sequence
  SiRNA target sequence
agtggagtaaatctaaattatgta

SEQ ID NO: 43049 - DNA, 24 bp, Artificial sequence
  SiRNA target sequence
gtggagtaaatctaaattatgtaa

SEQ ID NO: 43050 - DNA, 24 bp, Artificial sequence
  SiRNA target sequence
tggagtaaatctaaattatgtaaa

SEQ ID NO: 43051 - DNA, 24 bp, Artificial sequence
  SiRNA target sequence
ggagtaaatctaaattatgtaaaa

SEQ ID NO: 43052 - DNA, 24 bp, Artificial sequence
  SiRNA target sequence
gagtaaatctaaattatgtaaaac

SEQ ID NO: 43053 - DNA, 24 bp, Artificial sequence
  SiRNA target sequence
agtaaatctaaattatgtaaaaca

SEQ ID NO: 43054 - DNA, 24 bp, Artificial sequence
  SiRNA target sequence
gtaaatctaaattatgtaaaacaa

SEQ ID NO: 43055 - DNA, 24 bp, Artificial sequence
  SiRNA target sequence
taaatctaaattatgtaaaacaat

SEQ ID NO: 43056 - DNA, 24 bp, Artificial sequence
  SiRNA target sequence
aaatctaaattatgtaaaacaata

SEQ ID NO: 43057 - DNA, 24 bp, Artificial sequence
  SiRNA target sequence
aatctaaattatgtaaaacaataa

SEQ ID NO: 43058 - DNA, 24 bp, Artificial sequence
  SiRNA target sequence
atctaaattatgtaaaacaataat

SEQ ID NO: 43059 - DNA, 24 bp, Artificial sequence
  SiRNA target sequence
tctaaattatgtaaaacaataatt

SEQ ID NO: 43060 - DNA, 24 bp, Artificial sequence
  SiRNA target sequence
ctaaattatgtaaaacaataatta

SEQ ID NO: 43061 - DNA, 24 bp, Artificial sequence
  SiRNA target sequence
taaattatgtaaaacaataattat

SEQ ID NO: 43062 - DNA, 24 bp, Artificial sequence
  SiRNA target sequence
aaattatgtaaaacaataattatc

SEQ ID NO: 43063 - DNA, 24 bp, Artificial sequence
  SiRNA target sequence
aattatgtaaaacaataattatcg

SEQ ID NO: 43064 - DNA, 24 bp, Artificial sequence
  SiRNA target sequence
attatgtaaaacaataattatcgt

SEQ ID NO: 43065 - DNA, 24 bp, Artificial sequence
  SiRNA target sequence
ttatgtaaaacaataattatcgtc

SEQ ID NO: 43066 - DNA, 24 bp, Artificial sequence
  SiRNA target sequence
tatgtaaaacaataattatcgtct

SEQ ID NO: 43067 - DNA, 24 bp, Artificial sequence
  SiRNA target sequence
atgtaaaacaataattatcgtctt

SEQ ID NO: 43068 - DNA, 24 bp, Artificial sequence
  SiRNA target sequence
tgtaaaacaataattatcgtcttc

SEQ ID NO: 43069 - DNA, 24 bp, Artificial sequence
  SiRNA target sequence
gtaaaacaataattatcgtcttct

SEQ ID NO: 43070 - DNA, 24 bp, Artificial sequence
  SiRNA target sequence
taaaacaataattatcgtcttctc

SEQ ID NO: 43071 - DNA, 24 bp, Artificial sequence
  SiRNA target sequence
aaaacaataattatcgtcttctct

SEQ ID NO: 43072 - DNA, 24 bp, Artificial sequence
  SiRNA target sequence
aaacaataattatcgtcttctcta

SEQ ID NO: 43073 - DNA, 24 bp, Artificial sequence
  SiRNA target sequence
aacaataattatcgtcttctctaa

SEQ ID NO: 43074 - DNA, 24 bp, Artificial sequence
  SiRNA target sequence
acaataattatcgtcttctctaag

SEQ ID NO: 43075 - DNA, 24 bp, Artificial sequence
  SiRNA target sequence
caataattatcgtcttctctaagt

SEQ ID NO: 43076 - DNA, 24 bp, Artificial sequence
  SiRNA target sequence
aataattatcgtcttctctaagtt

SEQ ID NO: 43077 - DNA, 24 bp, Artificial sequence
  SiRNA target sequence
ataattatcgtcttctctaagttg

SEQ ID NO: 43078 - DNA, 24 bp, Artificial sequence
  SiRNA target sequence
taattatcgtcttctctaagttgt

SEQ ID NO: 43079 - DNA, 24 bp, Artificial sequence
  SiRNA target sequence
aattatcgtcttctctaagttgtt

SEQ ID NO: 43080 - DNA, 24 bp, Artificial sequence
  SiRNA target sequence
attatcgtcttctctaagttgttg

SEQ ID NO: 43081 - DNA, 24 bp, Artificial sequence
  SiRNA target sequence
ttatcgtcttctctaagttgttgg

SEQ ID NO: 43082 - DNA, 24 bp, Artificial sequence
  SiRNA target sequence
tatcgtcttctctaagttgttgga

SEQ ID NO: 43083 - DNA, 24 bp, Artificial sequence
  SiRNA target sequence
atcgtcttctctaagttgttggag

SEQ ID NO: 43084 - DNA, 24 bp, Artificial sequence
  SiRNA target sequence
tcgtcttctctaagttgttggaga

SEQ ID NO: 43085 - DNA, 24 bp, Artificial sequence
  SiRNA target sequence
cgtcttctctaagttgttggagat

SEQ ID NO: 43086 - DNA, 24 bp, Artificial sequence
  SiRNA target sequence
gtcttctctaagttgttggagatt

SEQ ID NO: 43087 - DNA, 24 bp, Artificial sequence
  SiRNA target sequence
tcttctctaagttgttggagatta

SEQ ID NO: 43088 - DNA, 24 bp, Artificial sequence
  SiRNA target sequence
cttctctaagttgttggagattag

SEQ ID NO: 43089 - DNA, 24 bp, Artificial sequence
  SiRNA target sequence
ttctctaagttgttggagattaga

SEQ ID NO: 43090 - DNA, 24 bp, Artificial sequence
  SiRNA target sequence
tctctaagttgttggagattagac

SEQ ID NO: 43091 - DNA, 24 bp, Artificial sequence
  SiRNA target sequence
ctctaagttgttggagattagact

SEQ ID NO: 43092 - DNA, 24 bp, Artificial sequence
  SiRNA target sequence
tctaagttgttggagattagactt

SEQ ID NO: 43093 - DNA, 24 bp, Artificial sequence
  SiRNA target sequence
ctaagttgttggagattagacttt

SEQ ID NO: 43094 - DNA, 24 bp, Artificial sequence
  SiRNA target sequence
taagttgttggagattagactttt

SEQ ID NO: 43095 - DNA, 24 bp, Artificial sequence
  SiRNA target sequence
aagttgttggagattagactttta

SEQ ID NO: 43096 - DNA, 24 bp, Artificial sequence
  SiRNA target sequence
agttgttggagattagacttttaa

SEQ ID NO: 43097 - DNA, 24 bp, Artificial sequence
  SiRNA target sequence
gttgttggagattagacttttaag

SEQ ID NO: 43098 - DNA, 24 bp, Artificial sequence
  SiRNA target sequence
ttgttggagattagacttttaaga

SEQ ID NO: 43099 - DNA, 24 bp, Artificial sequence
  SiRNA target sequence
tgttggagattagacttttaagaa

SEQ ID NO: 43100 - DNA, 24 bp, Artificial sequence
  SiRNA target sequence
gttggagattagacttttaagaat

SEQ ID NO: 43101 - DNA, 24 bp, Artificial sequence
  SiRNA target sequence
ttggagattagacttttaagaatt

SEQ ID NO: 43102 - DNA, 24 bp, Artificial sequence
  SiRNA target sequence
tggagattagacttttaagaattt

SEQ ID NO: 43103 - DNA, 24 bp, Artificial sequence
  SiRNA target sequence
ggagattagacttttaagaatttc

SEQ ID NO: 43104 - DNA, 24 bp, Artificial sequence
  SiRNA target sequence
gagattagacttttaagaatttca

SEQ ID NO: 43105 - DNA, 24 bp, Artificial sequence
  SiRNA target sequence
agattagacttttaagaatttcat

SEQ ID NO: 43106 - DNA, 24 bp, Artificial sequence
  SiRNA target sequence
gattagacttttaagaatttcata

SEQ ID NO: 43107 - DNA, 24 bp, Artificial sequence
  SiRNA target sequence
attagacttttaagaatttcatat

SEQ ID NO: 43108 - DNA, 24 bp, Artificial sequence
  SiRNA target sequence
ttagacttttaagaatttcatatt

SEQ ID NO: 43109 - DNA, 24 bp, Artificial sequence
  SiRNA target sequence
tagacttttaagaatttcatattc

SEQ ID NO: 43110 - DNA, 24 bp, Artificial sequence
  SiRNA target sequence
agacttttaagaatttcatattca

SEQ ID NO: 43111 - DNA, 24 bp, Artificial sequence
  SiRNA target sequence
gacttttaagaatttcatattcag

SEQ ID NO: 43112 - DNA, 24 bp, Artificial sequence
  SiRNA target sequence
acttttaagaatttcatattcagc

SEQ ID NO: 43113 - DNA, 24 bp, Artificial sequence
  SiRNA target sequence
cttttaagaatttcatattcagct

SEQ ID NO: 43114 - DNA, 24 bp, Artificial sequence
  SiRNA target sequence
ttttaagaatttcatattcagctt

SEQ ID NO: 43115 - DNA, 24 bp, Artificial sequence
  SiRNA target sequence
tttaagaatttcatattcagcttt

SEQ ID NO: 43116 - DNA, 24 bp, Artificial sequence
  SiRNA target sequence
ttaagaatttcatattcagctttt

SEQ ID NO: 43117 - DNA, 24 bp, Artificial sequence
  SiRNA target sequence
taagaatttcatattcagcttttt

SEQ ID NO: 43118 - DNA, 24 bp, Artificial sequence
  SiRNA target sequence
aagaatttcatattcagctttttt

SEQ ID NO: 43119 - DNA, 24 bp, Artificial sequence
  SiRNA target sequence
agaatttcatattcagcttttttg

SEQ ID NO: 43120 - DNA, 24 bp, Artificial sequence
  SiRNA target sequence
gaatttcatattcagcttttttgt

SEQ ID NO: 43121 - DNA, 24 bp, Artificial sequence
  SiRNA target sequence
aatttcatattcagcttttttgtc

SEQ ID NO: 43122 - DNA, 24 bp, Artificial sequence
  SiRNA target sequence
atttcatattcagcttttttgtcc

SEQ ID NO: 43123 - DNA, 24 bp, Artificial sequence
  SiRNA target sequence
tttcatattcagcttttttgtcca

SEQ ID NO: 43124 - DNA, 24 bp, Artificial sequence
  SiRNA target sequence
ttcatattcagcttttttgtccaa

SEQ ID NO: 43125 - DNA, 24 bp, Artificial sequence
  SiRNA target sequence
tcatattcagcttttttgtccaat

SEQ ID NO: 43126 - DNA, 24 bp, Artificial sequence
  SiRNA target sequence
catattcagcttttttgtccaatg

SEQ ID NO: 43127 - DNA, 24 bp, Artificial sequence
  SiRNA target sequence
atattcagcttttttgtccaatgc

SEQ ID NO: 43128 - DNA, 24 bp, Artificial sequence
  SiRNA target sequence
tattcagcttttttgtccaatgcg

SEQ ID NO: 43129 - DNA, 24 bp, Artificial sequence
  SiRNA target sequence
attcagcttttttgtccaatgcgg

SEQ ID NO: 43130 - DNA, 24 bp, Artificial sequence
  SiRNA target sequence
ttcagcttttttgtccaatgcggc

SEQ ID NO: 43131 - DNA, 24 bp, Artificial sequence
  SiRNA target sequence
tcagcttttttgtccaatgcggcc

SEQ ID NO: 43132 - DNA, 24 bp, Artificial sequence
  SiRNA target sequence
cagcttttttgtccaatgcggccg

SEQ ID NO: 43133 - DNA, 24 bp, Artificial sequence
  SiRNA target sequence
agcttttttgtccaatgcggccgt

SEQ ID NO: 43134 - DNA, 24 bp, Artificial sequence
  SiRNA target sequence
gcttttttgtccaatgcggccgtt

SEQ ID NO: 43135 - DNA, 24 bp, Artificial sequence
  SiRNA target sequence
cttttttgtccaatgcggccgttg

SEQ ID NO: 43136 - DNA, 24 bp, Artificial sequence
  SiRNA target sequence
ttttttgtccaatgcggccgttgg

SEQ ID NO: 43137 - DNA, 24 bp, Artificial sequence
  SiRNA target sequence
tttttgtccaatgcggccgttggc

SEQ ID NO: 43138 - DNA, 24 bp, Artificial sequence
  SiRNA target sequence
ttttgtccaatgcggccgttggct

SEQ ID NO: 43139 - DNA, 24 bp, Artificial sequence
  SiRNA target sequence
tttgtccaatgcggccgttggctc

SEQ ID NO: 43140 - DNA, 24 bp, Artificial sequence
  SiRNA target sequence
ttgtccaatgcggccgttggctca

SEQ ID NO: 43141 - DNA, 24 bp, Artificial sequence
  SiRNA target sequence
tgtccaatgcggccgttggctcat

SEQ ID NO: 43142 - DNA, 24 bp, Artificial sequence
  SiRNA target sequence
gtccaatgcggccgttggctcatc

SEQ ID NO: 43143 - DNA, 24 bp, Artificial sequence
  SiRNA target sequence
tccaatgcggccgttggctcatct

SEQ ID NO: 43144 - DNA, 24 bp, Artificial sequence
  SiRNA target sequence
ccaatgcggccgttggctcatcta

SEQ ID NO: 43145 - DNA, 24 bp, Artificial sequence
  SiRNA target sequence
caatgcggccgttggctcatctaa

SEQ ID NO: 43146 - DNA, 24 bp, Artificial sequence
  SiRNA target sequence
aatgcggccgttggctcatctaaa

SEQ ID NO: 43147 - DNA, 24 bp, Artificial sequence
  SiRNA target sequence
atgcggccgttggctcatctaaaa

SEQ ID NO: 43148 - DNA, 24 bp, Artificial sequence
  SiRNA target sequence
tgcggccgttggctcatctaaaat

SEQ ID NO: 43149 - DNA, 24 bp, Artificial sequence
  SiRNA target sequence
gcggccgttggctcatctaaaatt

SEQ ID NO: 43150 - DNA, 24 bp, Artificial sequence
  SiRNA target sequence
cggccgttggctcatctaaaatta

SEQ ID NO: 43151 - DNA, 24 bp, Artificial sequence
  SiRNA target sequence
ggccgttggctcatctaaaattat

SEQ ID NO: 43152 - DNA, 24 bp, Artificial sequence
  SiRNA target sequence
gccgttggctcatctaaaattata

SEQ ID NO: 43153 - DNA, 24 bp, Artificial sequence
  SiRNA target sequence
ccgttggctcatctaaaattataa

SEQ ID NO: 43154 - DNA, 24 bp, Artificial sequence
  SiRNA target sequence
cgttggctcatctaaaattataat

SEQ ID NO: 43155 - DNA, 24 bp, Artificial sequence
  SiRNA target sequence
gttggctcatctaaaattataata

SEQ ID NO: 43156 - DNA, 24 bp, Artificial sequence
  SiRNA target sequence
ttggctcatctaaaattataatag

SEQ ID NO: 43157 - DNA, 24 bp, Artificial sequence
  SiRNA target sequence
tggctcatctaaaattataatagg

SEQ ID NO: 43158 - DNA, 24 bp, Artificial sequence
  SiRNA target sequence
ggctcatctaaaattataatagga

SEQ ID NO: 43159 - DNA, 24 bp, Artificial sequence
  SiRNA target sequence
gctcatctaaaattataataggag

SEQ ID NO: 43160 - DNA, 24 bp, Artificial sequence
  SiRNA target sequence
ctcatctaaaattataataggaga

SEQ ID NO: 43161 - DNA, 24 bp, Artificial sequence
  SiRNA target sequence
tcatctaaaattataataggagaa

SEQ ID NO: 43162 - DNA, 24 bp, Artificial sequence
  SiRNA target sequence
catctaaaattataataggagaat

SEQ ID NO: 43163 - DNA, 24 bp, Artificial sequence
  SiRNA target sequence
atctaaaattataataggagaatt

SEQ ID NO: 43164 - DNA, 24 bp, Artificial sequence
  SiRNA target sequence
tctaaaattataataggagaattt

SEQ ID NO: 43165 - DNA, 24 bp, Artificial sequence
  SiRNA target sequence
ctaaaattataataggagaatttt

SEQ ID NO: 43166 - DNA, 24 bp, Artificial sequence
  SiRNA target sequence
taaaattataataggagaattttt

SEQ ID NO: 43167 - DNA, 24 bp, Artificial sequence
  SiRNA target sequence
aaaattataataggagaatttttt

SEQ ID NO: 43168 - DNA, 24 bp, Artificial sequence
  SiRNA target sequence
aaattataataggagaatttttta

SEQ ID NO: 43169 - DNA, 24 bp, Artificial sequence
  SiRNA target sequence
aattataataggagaattttttag

SEQ ID NO: 43170 - DNA, 24 bp, Artificial sequence
  SiRNA target sequence
attataataggagaattttttagt

SEQ ID NO: 43171 - DNA, 24 bp, Artificial sequence
  SiRNA target sequence
ttataataggagaattttttagtg

SEQ ID NO: 43172 - DNA, 24 bp, Artificial sequence
  SiRNA target sequence
tataataggagaattttttagtgc

SEQ ID NO: 43173 - DNA, 24 bp, Artificial sequence
  SiRNA target sequence
ataataggagaattttttagtgcc

SEQ ID NO: 43174 - DNA, 24 bp, Artificial sequence
  SiRNA target sequence
taataggagaattttttagtgccg

SEQ ID NO: 43175 - DNA, 24 bp, Artificial sequence
  SiRNA target sequence
aataggagaattttttagtgccga

SEQ ID NO: 43176 - DNA, 24 bp, Artificial sequence
  SiRNA target sequence
ataggagaattttttagtgccgac

SEQ ID NO: 43177 - DNA, 24 bp, Artificial sequence
  SiRNA target sequence
taggagaattttttagtgccgacc

SEQ ID NO: 43178 - DNA, 24 bp, Artificial sequence
  SiRNA target sequence
aggagaattttttagtgccgacct

SEQ ID NO: 43179 - DNA, 24 bp, Artificial sequence
  SiRNA target sequence
ggagaattttttagtgccgacctt

SEQ ID NO: 43180 - DNA, 24 bp, Artificial sequence
  SiRNA target sequence
gagaattttttagtgccgacctta

SEQ ID NO: 43181 - DNA, 24 bp, Artificial sequence
  SiRNA target sequence
agaattttttagtgccgaccttaa

SEQ ID NO: 43182 - DNA, 24 bp, Artificial sequence
  SiRNA target sequence
gaattttttagtgccgaccttaac

SEQ ID NO: 43183 - DNA, 24 bp, Artificial sequence
  SiRNA target sequence
aattttttagtgccgaccttaaca

SEQ ID NO: 43184 - DNA, 24 bp, Artificial sequence
  SiRNA target sequence
attttttagtgccgaccttaacaa

SEQ ID NO: 43185 - DNA, 24 bp, Artificial sequence
  SiRNA target sequence
ttttttagtgccgaccttaacaaa

SEQ ID NO: 43186 - DNA, 24 bp, Artificial sequence
  SiRNA target sequence
tttttagtgccgaccttaacaaaa

SEQ ID NO: 43187 - DNA, 24 bp, Artificial sequence
  SiRNA target sequence
ttttagtgccgaccttaacaaaat

SEQ ID NO: 43188 - DNA, 24 bp, Artificial sequence
  SiRNA target sequence
tttagtgccgaccttaacaaaatt

SEQ ID NO: 43189 - DNA, 24 bp, Artificial sequence
  SiRNA target sequence
ttagtgccgaccttaacaaaatta

SEQ ID NO: 43190 - DNA, 24 bp, Artificial sequence
  SiRNA target sequence
tagtgccgaccttaacaaaattac

SEQ ID NO: 43191 - DNA, 24 bp, Artificial sequence
  SiRNA target sequence
agtgccgaccttaacaaaattact

SEQ ID NO: 43192 - DNA, 24 bp, Artificial sequence
  SiRNA target sequence
gtgccgaccttaacaaaattactt

SEQ ID NO: 43193 - DNA, 24 bp, Artificial sequence
  SiRNA target sequence
tgccgaccttaacaaaattacttt

SEQ ID NO: 43194 - DNA, 24 bp, Artificial sequence
  SiRNA target sequence
gccgaccttaacaaaattactttt

SEQ ID NO: 43195 - DNA, 24 bp, Artificial sequence
  SiRNA target sequence
ccgaccttaacaaaattacttttt

SEQ ID NO: 43196 - DNA, 24 bp, Artificial sequence
  SiRNA target sequence
cgaccttaacaaaattactttttg

SEQ ID NO: 43197 - DNA, 24 bp, Artificial sequence
  SiRNA target sequence
gaccttaacaaaattactttttgt

SEQ ID NO: 43198 - DNA, 24 bp, Artificial sequence
  SiRNA target sequence
accttaacaaaattactttttgtc

SEQ ID NO: 43199 - DNA, 24 bp, Artificial sequence
  SiRNA target sequence
ccttaacaaaattactttttgtct

SEQ ID NO: 43200 - DNA, 24 bp, Artificial sequence
  SiRNA target sequence
cttaacaaaattactttttgtctt

SEQ ID NO: 43201 - DNA, 24 bp, Artificial sequence
  SiRNA target sequence
ttaacaaaattactttttgtcttt

SEQ ID NO: 43202 - DNA, 24 bp, Artificial sequence
  SiRNA target sequence
taacaaaattactttttgtctttc

SEQ ID NO: 43203 - DNA, 24 bp, Artificial sequence
  SiRNA target sequence
aacaaaattactttttgtctttct

SEQ ID NO: 43204 - DNA, 24 bp, Artificial sequence
  SiRNA target sequence
acaaaattactttttgtctttctc

SEQ ID NO: 43205 - DNA, 24 bp, Artificial sequence
  SiRNA target sequence
caaaattactttttgtctttctcc

SEQ ID NO: 43206 - DNA, 24 bp, Artificial sequence
  SiRNA target sequence
aaaattactttttgtctttctcca

SEQ ID NO: 43207 - DNA, 24 bp, Artificial sequence
  SiRNA target sequence
aaattactttttgtctttctccac

SEQ ID NO: 43208 - DNA, 24 bp, Artificial sequence
  SiRNA target sequence
aattactttttgtctttctccacc

SEQ ID NO: 43209 - DNA, 24 bp, Artificial sequence
  SiRNA target sequence
attactttttgtctttctccacca

SEQ ID NO: 43210 - DNA, 24 bp, Artificial sequence
  SiRNA target sequence
ttactttttgtctttctccaccac

SEQ ID NO: 43211 - DNA, 24 bp, Artificial sequence
  SiRNA target sequence
tactttttgtctttctccaccact

SEQ ID NO: 43212 - DNA, 24 bp, Artificial sequence
  SiRNA target sequence
actttttgtctttctccaccacta

SEQ ID NO: 43213 - DNA, 24 bp, Artificial sequence
  SiRNA target sequence
ctttttgtctttctccaccactaa

SEQ ID NO: 43214 - DNA, 24 bp, Artificial sequence
  SiRNA target sequence
tttttgtctttctccaccactaag

SEQ ID NO: 43215 - DNA, 24 bp, Artificial sequence
  SiRNA target sequence
ttttgtctttctccaccactaagc

SEQ ID NO: 43216 - DNA, 24 bp, Artificial sequence
  SiRNA target sequence
tttgtctttctccaccactaagct

SEQ ID NO: 43217 - DNA, 24 bp, Artificial sequence
  SiRNA target sequence
ttgtctttctccaccactaagctt

SEQ ID NO: 43218 - DNA, 24 bp, Artificial sequence
  SiRNA target sequence
tgtctttctccaccactaagctta

SEQ ID NO: 43219 - DNA, 24 bp, Artificial sequence
  SiRNA target sequence
gtctttctccaccactaagcttat

SEQ ID NO: 43220 - DNA, 24 bp, Artificial sequence
  SiRNA target sequence
tctttctccaccactaagcttatg

SEQ ID NO: 43221 - DNA, 24 bp, Artificial sequence
  SiRNA target sequence
ctttctccaccactaagcttatgt

SEQ ID NO: 43222 - DNA, 24 bp, Artificial sequence
  SiRNA target sequence
tttctccaccactaagcttatgtc

SEQ ID NO: 43223 - DNA, 24 bp, Artificial sequence
  SiRNA target sequence
ttctccaccactaagcttatgtcc

SEQ ID NO: 43224 - DNA, 24 bp, Artificial sequence
  SiRNA target sequence
tctccaccactaagcttatgtccc

SEQ ID NO: 43225 - DNA, 24 bp, Artificial sequence
  SiRNA target sequence
ctccaccactaagcttatgtccct

SEQ ID NO: 43226 - DNA, 24 bp, Artificial sequence
  SiRNA target sequence
tccaccactaagcttatgtccctt

SEQ ID NO: 43227 - DNA, 24 bp, Artificial sequence
  SiRNA target sequence
ccaccactaagcttatgtccctta

SEQ ID NO: 43228 - DNA, 24 bp, Artificial sequence
  SiRNA target sequence
caccactaagcttatgtcccttat

SEQ ID NO: 43229 - DNA, 24 bp, Artificial sequence
  SiRNA target sequence
accactaagcttatgtcccttatc

SEQ ID NO: 43230 - DNA, 24 bp, Artificial sequence
  SiRNA target sequence
ccactaagcttatgtcccttatct

SEQ ID NO: 43231 - DNA, 24 bp, Artificial sequence
  SiRNA target sequence
cactaagcttatgtcccttatctc

SEQ ID NO: 43232 - DNA, 24 bp, Artificial sequence
  SiRNA target sequence
actaagcttatgtcccttatctcc

SEQ ID NO: 43233 - DNA, 24 bp, Artificial sequence
  SiRNA target sequence
ctaagcttatgtcccttatctcca

SEQ ID NO: 43234 - DNA, 24 bp, Artificial sequence
  SiRNA target sequence
taagcttatgtcccttatctccaa

SEQ ID NO: 43235 - DNA, 24 bp, Artificial sequence
  SiRNA target sequence
aagcttatgtcccttatctccaac

SEQ ID NO: 43236 - DNA, 24 bp, Artificial sequence
  SiRNA target sequence
agcttatgtcccttatctccaaca

SEQ ID NO: 43237 - DNA, 24 bp, Artificial sequence
  SiRNA target sequence
gcttatgtcccttatctccaacat

SEQ ID NO: 43238 - DNA, 24 bp, Artificial sequence
  SiRNA target sequence
cttatgtcccttatctccaacatg

SEQ ID NO: 43239 - DNA, 24 bp, Artificial sequence
  SiRNA target sequence
ttatgtcccttatctccaacatgt

SEQ ID NO: 43240 - DNA, 24 bp, Artificial sequence
  SiRNA target sequence
tatgtcccttatctccaacatgtg

SEQ ID NO: 43241 - DNA, 24 bp, Artificial sequence
  SiRNA target sequence
atgtcccttatctccaacatgtgt

SEQ ID NO: 43242 - DNA, 24 bp, Artificial sequence
  SiRNA target sequence
tgtcccttatctccaacatgtgtg

SEQ ID NO: 43243 - DNA, 24 bp, Artificial sequence
  SiRNA target sequence
gtcccttatctccaacatgtgtgt

SEQ ID NO: 43244 - DNA, 24 bp, Artificial sequence
  SiRNA target sequence
tcccttatctccaacatgtgtgtt

SEQ ID NO: 43245 - DNA, 24 bp, Artificial sequence
  SiRNA target sequence
cccttatctccaacatgtgtgttg

SEQ ID NO: 43246 - DNA, 24 bp, Artificial sequence
  SiRNA target sequence
ccttatctccaacatgtgtgttgt

SEQ ID NO: 43247 - DNA, 24 bp, Artificial sequence
  SiRNA target sequence
cttatctccaacatgtgtgttgta

SEQ ID NO: 43248 - DNA, 24 bp, Artificial sequence
  SiRNA target sequence
ttatctccaacatgtgtgttgtat

SEQ ID NO: 43249 - DNA, 24 bp, Artificial sequence
  SiRNA target sequence
tatctccaacatgtgtgttgtatt

SEQ ID NO: 43250 - DNA, 24 bp, Artificial sequence
  SiRNA target sequence
atctccaacatgtgtgttgtattc

SEQ ID NO: 43251 - DNA, 24 bp, Artificial sequence
  SiRNA target sequence
tctccaacatgtgtgttgtattca

SEQ ID NO: 43252 - DNA, 24 bp, Artificial sequence
  SiRNA target sequence
ctccaacatgtgtgttgtattcat

SEQ ID NO: 43253 - DNA, 24 bp, Artificial sequence
  SiRNA target sequence
tccaacatgtgtgttgtattcatc

SEQ ID NO: 43254 - DNA, 24 bp, Artificial sequence
  SiRNA target sequence
ccaacatgtgtgttgtattcatcc

SEQ ID NO: 43255 - DNA, 24 bp, Artificial sequence
  SiRNA target sequence
caacatgtgtgttgtattcatcct

SEQ ID NO: 43256 - DNA, 24 bp, Artificial sequence
  SiRNA target sequence
aacatgtgtgttgtattcatcctc

SEQ ID NO: 43257 - DNA, 24 bp, Artificial sequence
  SiRNA target sequence
acatgtgtgttgtattcatcctct

SEQ ID NO: 43258 - DNA, 24 bp, Artificial sequence
  SiRNA target sequence
catgtgtgttgtattcatcctcta

SEQ ID NO: 43259 - DNA, 24 bp, Artificial sequence
  SiRNA target sequence
atgtgtgttgtattcatcctctag

SEQ ID NO: 43260 - DNA, 24 bp, Artificial sequence
  SiRNA target sequence
tgtgtgttgtattcatcctctagg

SEQ ID NO: 43261 - DNA, 24 bp, Artificial sequence
  SiRNA target sequence
gtgtgttgtattcatcctctaggt

SEQ ID NO: 43262 - DNA, 24 bp, Artificial sequence
  SiRNA target sequence
tgtgttgtattcatcctctaggtt

SEQ ID NO: 43263 - DNA, 24 bp, Artificial sequence
  SiRNA target sequence
gtgttgtattcatcctctaggttg

SEQ ID NO: 43264 - DNA, 24 bp, Artificial sequence
  SiRNA target sequence
tgttgtattcatcctctaggttgt

SEQ ID NO: 43265 - DNA, 24 bp, Artificial sequence
  SiRNA target sequence
gttgtattcatcctctaggttgtt

SEQ ID NO: 43266 - DNA, 24 bp, Artificial sequence
  SiRNA target sequence
ttgtattcatcctctaggttgttt

SEQ ID NO: 43267 - DNA, 24 bp, Artificial sequence
  SiRNA target sequence
tgtattcatcctctaggttgttta

SEQ ID NO: 43268 - DNA, 24 bp, Artificial sequence
  SiRNA target sequence
gtattcatcctctaggttgtttat

SEQ ID NO: 43269 - DNA, 24 bp, Artificial sequence
  SiRNA target sequence
tattcatcctctaggttgtttata

SEQ ID NO: 43270 - DNA, 24 bp, Artificial sequence
  SiRNA target sequence
attcatcctctaggttgtttatag

SEQ ID NO: 43271 - DNA, 24 bp, Artificial sequence
  SiRNA target sequence
ttcatcctctaggttgtttataga

SEQ ID NO: 43272 - DNA, 24 bp, Artificial sequence
  SiRNA target sequence
tcatcctctaggttgtttatagaa

SEQ ID NO: 43273 - DNA, 24 bp, Artificial sequence
  SiRNA target sequence
catcctctaggttgtttatagaat

SEQ ID NO: 43274 - DNA, 24 bp, Artificial sequence
  SiRNA target sequence
atcctctaggttgtttatagaatc

SEQ ID NO: 43275 - DNA, 24 bp, Artificial sequence
  SiRNA target sequence
tcctctaggttgtttatagaatcg

SEQ ID NO: 43276 - DNA, 24 bp, Artificial sequence
  SiRNA target sequence
cctctaggttgtttatagaatcgt

SEQ ID NO: 43277 - DNA, 24 bp, Artificial sequence
  SiRNA target sequence
ctctaggttgtttatagaatcgtg

SEQ ID NO: 43278 - DNA, 24 bp, Artificial sequence
  SiRNA target sequence
tctaggttgtttatagaatcgtgt

SEQ ID NO: 43279 - DNA, 24 bp, Artificial sequence
  SiRNA target sequence
ctaggttgtttatagaatcgtgta

SEQ ID NO: 43280 - DNA, 24 bp, Artificial sequence
  SiRNA target sequence
taggttgtttatagaatcgtgtac

SEQ ID NO: 43281 - DNA, 24 bp, Artificial sequence
  SiRNA target sequence
aggttgtttatagaatcgtgtaca

SEQ ID NO: 43282 - DNA, 24 bp, Artificial sequence
  SiRNA target sequence
ggttgtttatagaatcgtgtacac

SEQ ID NO: 43283 - DNA, 24 bp, Artificial sequence
  SiRNA target sequence
gttgtttatagaatcgtgtacaca

SEQ ID NO: 43284 - DNA, 24 bp, Artificial sequence
  SiRNA target sequence
ttgtttatagaatcgtgtacacaa

SEQ ID NO: 43285 - DNA, 24 bp, Artificial sequence
  SiRNA target sequence
tgtttatagaatcgtgtacacaaa

SEQ ID NO: 43286 - DNA, 24 bp, Artificial sequence
  SiRNA target sequence
gtttatagaatcgtgtacacaaag

SEQ ID NO: 43287 - DNA, 24 bp, Artificial sequence
  SiRNA target sequence
tttatagaatcgtgtacacaaagt

SEQ ID NO: 43288 - DNA, 24 bp, Artificial sequence
  SiRNA target sequence
ttatagaatcgtgtacacaaagtt

SEQ ID NO: 43289 - DNA, 24 bp, Artificial sequence
  SiRNA target sequence
tatagaatcgtgtacacaaagttt

SEQ ID NO: 43290 - DNA, 24 bp, Artificial sequence
  SiRNA target sequence
atagaatcgtgtacacaaagtttt

SEQ ID NO: 43291 - DNA, 24 bp, Artificial sequence
  SiRNA target sequence
tagaatcgtgtacacaaagttttt

SEQ ID NO: 43292 - DNA, 24 bp, Artificial sequence
  SiRNA target sequence
agaatcgtgtacacaaagtttttt

SEQ ID NO: 43293 - DNA, 24 bp, Artificial sequence
  SiRNA target sequence
gaatcgtgtacacaaagtttttta

SEQ ID NO: 43294 - DNA, 24 bp, Artificial sequence
  SiRNA target sequence
aatcgtgtacacaaagttttttac

SEQ ID NO: 43295 - DNA, 24 bp, Artificial sequence
  SiRNA target sequence
atcgtgtacacaaagttttttact

SEQ ID NO: 43296 - DNA, 24 bp, Artificial sequence
  SiRNA target sequence
tcgtgtacacaaagttttttactg

SEQ ID NO: 43297 - DNA, 24 bp, Artificial sequence
  SiRNA target sequence
cgtgtacacaaagttttttactga

SEQ ID NO: 43298 - DNA, 24 bp, Artificial sequence
  SiRNA target sequence
gtgtacacaaagttttttactgat

SEQ ID NO: 43299 - DNA, 24 bp, Artificial sequence
  SiRNA target sequence
tgtacacaaagttttttactgatt

SEQ ID NO: 43300 - DNA, 24 bp, Artificial sequence
  SiRNA target sequence
gtacacaaagttttttactgattt

SEQ ID NO: 43301 - DNA, 24 bp, Artificial sequence
  SiRNA target sequence
tacacaaagttttttactgatttt

SEQ ID NO: 43302 - DNA, 24 bp, Artificial sequence
  SiRNA target sequence
acacaaagttttttactgattttt

SEQ ID NO: 43303 - DNA, 24 bp, Artificial sequence
  SiRNA target sequence
cacaaagttttttactgattttta

SEQ ID NO: 43304 - DNA, 24 bp, Artificial sequence
  SiRNA target sequence
acaaagttttttactgatttttat

SEQ ID NO: 43305 - DNA, 24 bp, Artificial sequence
  SiRNA target sequence
caaagttttttactgatttttata

SEQ ID NO: 43306 - DNA, 24 bp, Artificial sequence
  SiRNA target sequence
aaagttttttactgatttttataa

SEQ ID NO: 43307 - DNA, 24 bp, Artificial sequence
  SiRNA target sequence
aagttttttactgatttttataac

SEQ ID NO: 43308 - DNA, 24 bp, Artificial sequence
  SiRNA target sequence
agttttttactgatttttataact

SEQ ID NO: 43309 - DNA, 24 bp, Artificial sequence
  SiRNA target sequence
gttttttactgatttttataactt

SEQ ID NO: 43310 - DNA, 24 bp, Artificial sequence
  SiRNA target sequence
ttttttactgatttttataacttc

SEQ ID NO: 43311 - DNA, 24 bp, Artificial sequence
  SiRNA target sequence
tttttactgatttttataacttct

SEQ ID NO: 43312 - DNA, 24 bp, Artificial sequence
  SiRNA target sequence
ttttactgatttttataacttctt

SEQ ID NO: 43313 - DNA, 24 bp, Artificial sequence
  SiRNA target sequence
tttactgatttttataacttcttc

SEQ ID NO: 43314 - DNA, 24 bp, Artificial sequence
  SiRNA target sequence
ttactgatttttataacttcttct

SEQ ID NO: 43315 - DNA, 24 bp, Artificial sequence
  SiRNA target sequence
tactgatttttataacttcttctt

SEQ ID NO: 43316 - DNA, 24 bp, Artificial sequence
  SiRNA target sequence
actgatttttataacttcttcttt

SEQ ID NO: 43317 - DNA, 24 bp, Artificial sequence
  SiRNA target sequence
ctgatttttataacttcttcttta

SEQ ID NO: 43318 - DNA, 24 bp, Artificial sequence
  SiRNA target sequence
tgatttttataacttcttctttat

SEQ ID NO: 43319 - DNA, 24 bp, Artificial sequence
  SiRNA target sequence
gatttttataacttcttctttatc

SEQ ID NO: 43320 - DNA, 24 bp, Artificial sequence
  SiRNA target sequence
atttttataacttcttctttatca

SEQ ID NO: 43321 - DNA, 24 bp, Artificial sequence
  SiRNA target sequence
tttttataacttcttctttatcaa

SEQ ID NO: 43322 - DNA, 24 bp, Artificial sequence
  SiRNA target sequence
ttttataacttcttctttatcaaa

SEQ ID NO: 43323 - DNA, 24 bp, Artificial sequence
  SiRNA target sequence
tttataacttcttctttatcaaat

SEQ ID NO: 43324 - DNA, 24 bp, Artificial sequence
  SiRNA target sequence
ttataacttcttctttatcaaata

SEQ ID NO: 43325 - DNA, 24 bp, Artificial sequence
  SiRNA target sequence
tataacttcttctttatcaaatat

SEQ ID NO: 43326 - DNA, 24 bp, Artificial sequence
  SiRNA target sequence
ataacttcttctttatcaaatatt

SEQ ID NO: 43327 - DNA, 24 bp, Artificial sequence
  SiRNA target sequence
taacttcttctttatcaaatattt

SEQ ID NO: 43328 - DNA, 24 bp, Artificial sequence
  SiRNA target sequence
aacttcttctttatcaaatatttc

SEQ ID NO: 43329 - DNA, 24 bp, Artificial sequence
  SiRNA target sequence
acttcttctttatcaaatatttct

SEQ ID NO: 43330 - DNA, 24 bp, Artificial sequence
  SiRNA target sequence
cttcttctttatcaaatatttctt

SEQ ID NO: 43331 - DNA, 24 bp, Artificial sequence
  SiRNA target sequence
ttcttctttatcaaatatttcttt

SEQ ID NO: 43332 - DNA, 24 bp, Artificial sequence
  SiRNA target sequence
tcttctttatcaaatatttctttt

SEQ ID NO: 43333 - DNA, 24 bp, Artificial sequence
  SiRNA target sequence
cttctttatcaaatatttcttttc

SEQ ID NO: 43334 - DNA, 24 bp, Artificial sequence
  SiRNA target sequence
ttctttatcaaatatttcttttcc

SEQ ID NO: 43335 - DNA, 24 bp, Artificial sequence
  SiRNA target sequence
tctttatcaaatatttcttttcca

SEQ ID NO: 43336 - DNA, 24 bp, Artificial sequence
  SiRNA target sequence
ctttatcaaatatttcttttccat

SEQ ID NO: 43337 - DNA, 24 bp, Artificial sequence
  SiRNA target sequence
tttatcaaatatttcttttccata

SEQ ID NO: 43338 - DNA, 24 bp, Artificial sequence
  SiRNA target sequence
ttatcaaatatttcttttccatat

SEQ ID NO: 43339 - DNA, 24 bp, Artificial sequence
  SiRNA target sequence
tatcaaatatttcttttccatatg

SEQ ID NO: 43340 - DNA, 24 bp, Artificial sequence
  SiRNA target sequence
atcaaatatttcttttccatatgt

SEQ ID NO: 43341 - DNA, 24 bp, Artificial sequence
  SiRNA target sequence
tcaaatatttcttttccatatgtt

SEQ ID NO: 43342 - DNA, 24 bp, Artificial sequence
  SiRNA target sequence
caaatatttcttttccatatgtta

SEQ ID NO: 43343 - DNA, 24 bp, Artificial sequence
  SiRNA target sequence
aaatatttcttttccatatgttaa

SEQ ID NO: 43344 - DNA, 24 bp, Artificial sequence
  SiRNA target sequence
aatatttcttttccatatgttaaa

SEQ ID NO: 43345 - DNA, 24 bp, Artificial sequence
  SiRNA target sequence
atatttcttttccatatgttaaat

SEQ ID NO: 43346 - DNA, 24 bp, Artificial sequence
  SiRNA target sequence
tatttcttttccatatgttaaatt

SEQ ID NO: 43347 - DNA, 24 bp, Artificial sequence
  SiRNA target sequence
atttcttttccatatgttaaatta

SEQ ID NO: 43348 - DNA, 24 bp, Artificial sequence
  SiRNA target sequence
tttcttttccatatgttaaattat

SEQ ID NO: 43349 - DNA, 24 bp, Artificial sequence
  SiRNA target sequence
ttcttttccatatgttaaattata

SEQ ID NO: 43350 - DNA, 24 bp, Artificial sequence
  SiRNA target sequence
tcttttccatatgttaaattataa

SEQ ID NO: 43351 - DNA, 24 bp, Artificial sequence
  SiRNA target sequence
cttttccatatgttaaattataat

SEQ ID NO: 43352 - DNA, 24 bp, Artificial sequence
  SiRNA target sequence
ttttccatatgttaaattataata

SEQ ID NO: 43353 - DNA, 24 bp, Artificial sequence
  SiRNA target sequence
tttccatatgttaaattataataa

SEQ ID NO: 43354 - DNA, 24 bp, Artificial sequence
  SiRNA target sequence
ttccatatgttaaattataataaa

SEQ ID NO: 43355 - DNA, 24 bp, Artificial sequence
  SiRNA target sequence
tccatatgttaaattataataaac

SEQ ID NO: 43356 - DNA, 24 bp, Artificial sequence
  SiRNA target sequence
ccatatgttaaattataataaacc

SEQ ID NO: 43357 - DNA, 24 bp, Artificial sequence
  SiRNA target sequence
catatgttaaattataataaaccg

SEQ ID NO: 43358 - DNA, 24 bp, Artificial sequence
  SiRNA target sequence
atatgttaaattataataaaccgt

SEQ ID NO: 43359 - DNA, 24 bp, Artificial sequence
  SiRNA target sequence
tatgttaaattataataaaccgtt

SEQ ID NO: 43360 - DNA, 24 bp, Artificial sequence
  SiRNA target sequence
atgttaaattataataaaccgttt

SEQ ID NO: 43361 - DNA, 24 bp, Artificial sequence
  SiRNA target sequence
tgttaaattataataaaccgtttc

SEQ ID NO: 43362 - DNA, 24 bp, Artificial sequence
  SiRNA target sequence
gttaaattataataaaccgtttcg

SEQ ID NO: 43363 - DNA, 24 bp, Artificial sequence
  SiRNA target sequence
ttaaattataataaaccgtttcgt

SEQ ID NO: 43364 - DNA, 24 bp, Artificial sequence
  SiRNA target sequence
taaattataataaaccgtttcgtt

SEQ ID NO: 43365 - DNA, 24 bp, Artificial sequence
  SiRNA target sequence
aaattataataaaccgtttcgtta

SEQ ID NO: 43366 - DNA, 24 bp, Artificial sequence
  SiRNA target sequence
aattataataaaccgtttcgttaa

SEQ ID NO: 43367 - DNA, 24 bp, Artificial sequence
  SiRNA target sequence
attataataaaccgtttcgttaaa

SEQ ID NO: 43368 - DNA, 24 bp, Artificial sequence
  SiRNA target sequence
ttataataaaccgtttcgttaaac

SEQ ID NO: 43369 - DNA, 24 bp, Artificial sequence
  SiRNA target sequence
tataataaaccgtttcgttaaaca

SEQ ID NO: 43370 - DNA, 24 bp, Artificial sequence
  SiRNA target sequence
ataataaaccgtttcgttaaacaa

SEQ ID NO: 43371 - DNA, 24 bp, Artificial sequence
  SiRNA target sequence
taataaaccgtttcgttaaacaaa

SEQ ID NO: 43372 - DNA, 24 bp, Artificial sequence
  SiRNA target sequence
aataaaccgtttcgttaaacaaaa

SEQ ID NO: 43373 - DNA, 24 bp, Artificial sequence
  SiRNA target sequence
ataaaccgtttcgttaaacaaaaa

SEQ ID NO: 43374 - DNA, 24 bp, Artificial sequence
  SiRNA target sequence
taaaccgtttcgttaaacaaaaat

SEQ ID NO: 43375 - DNA, 24 bp, Artificial sequence
  SiRNA target sequence
aaaccgtttcgttaaacaaaaatg

SEQ ID NO: 43376 - DNA, 24 bp, Artificial sequence
  SiRNA target sequence
aaccgtttcgttaaacaaaaatga

SEQ ID NO: 43377 - DNA, 24 bp, Artificial sequence
  SiRNA target sequence
accgtttcgttaaacaaaaatgag

SEQ ID NO: 43378 - DNA, 24 bp, Artificial sequence
  SiRNA target sequence
ccgtttcgttaaacaaaaatgagg

SEQ ID NO: 43379 - DNA, 24 bp, Artificial sequence
  SiRNA target sequence
cgtttcgttaaacaaaaatgaggt

SEQ ID NO: 43380 - DNA, 24 bp, Artificial sequence
  SiRNA target sequence
gtttcgttaaacaaaaatgaggtt

SEQ ID NO: 43381 - DNA, 24 bp, Artificial sequence
  SiRNA target sequence
tttcgttaaacaaaaatgaggttt

SEQ ID NO: 43382 - DNA, 24 bp, Artificial sequence
  SiRNA target sequence
ttcgttaaacaaaaatgaggtttg

SEQ ID NO: 43383 - DNA, 24 bp, Artificial sequence
  SiRNA target sequence
tcgttaaacaaaaatgaggtttgt

SEQ ID NO: 43384 - DNA, 24 bp, Artificial sequence
  SiRNA target sequence
cgttaaacaaaaatgaggtttgtg

SEQ ID NO: 43385 - DNA, 24 bp, Artificial sequence
  SiRNA target sequence
gttaaacaaaaatgaggtttgtgg

SEQ ID NO: 43386 - DNA, 24 bp, Artificial sequence
  SiRNA target sequence
ttaaacaaaaatgaggtttgtggt

SEQ ID NO: 43387 - DNA, 24 bp, Artificial sequence
  SiRNA target sequence
taaacaaaaatgaggtttgtggtg

SEQ ID NO: 43388 - DNA, 24 bp, Artificial sequence
  SiRNA target sequence
aaacaaaaatgaggtttgtggtgc

SEQ ID NO: 43389 - DNA, 24 bp, Artificial sequence
  SiRNA target sequence
aacaaaaatgaggtttgtggtgca

SEQ ID NO: 43390 - DNA, 24 bp, Artificial sequence
  SiRNA target sequence
acaaaaatgaggtttgtggtgcaa

SEQ ID NO: 43391 - DNA, 24 bp, Artificial sequence
  SiRNA target sequence
caaaaatgaggtttgtggtgcaaa

SEQ ID NO: 43392 - DNA, 24 bp, Artificial sequence
  SiRNA target sequence
aaaaatgaggtttgtggtgcaaat

SEQ ID NO: 43393 - DNA, 24 bp, Artificial sequence
  SiRNA target sequence
aaaatgaggtttgtggtgcaaatg

SEQ ID NO: 43394 - DNA, 24 bp, Artificial sequence
  SiRNA target sequence
aaatgaggtttgtggtgcaaatga

SEQ ID NO: 43395 - DNA, 24 bp, Artificial sequence
  SiRNA target sequence
aatgaggtttgtggtgcaaatgat

SEQ ID NO: 43396 - DNA, 24 bp, Artificial sequence
  SiRNA target sequence
atgaggtttgtggtgcaaatgata

SEQ ID NO: 43397 - DNA, 24 bp, Artificial sequence
  SiRNA target sequence
tgaggtttgtggtgcaaatgatat

SEQ ID NO: 43398 - DNA, 24 bp, Artificial sequence
  SiRNA target sequence
gaggtttgtggtgcaaatgatata

SEQ ID NO: 43399 - DNA, 24 bp, Artificial sequence
  SiRNA target sequence
aggtttgtggtgcaaatgatataa

SEQ ID NO: 43400 - DNA, 24 bp, Artificial sequence
  SiRNA target sequence
ggtttgtggtgcaaatgatataag

SEQ ID NO: 43401 - DNA, 24 bp, Artificial sequence
  SiRNA target sequence
gtttgtggtgcaaatgatataagt

SEQ ID NO: 43402 - DNA, 24 bp, Artificial sequence
  SiRNA target sequence
tttgtggtgcaaatgatataagtg

SEQ ID NO: 43403 - DNA, 24 bp, Artificial sequence
  SiRNA target sequence
ttgtggtgcaaatgatataagtga

SEQ ID NO: 43404 - DNA, 24 bp, Artificial sequence
  SiRNA target sequence
tgtggtgcaaatgatataagtgat

SEQ ID NO: 43405 - DNA, 24 bp, Artificial sequence
  SiRNA target sequence
gtggtgcaaatgatataagtgatc

SEQ ID NO: 43406 - DNA, 24 bp, Artificial sequence
  SiRNA target sequence
tggtgcaaatgatataagtgatct

SEQ ID NO: 43407 - DNA, 24 bp, Artificial sequence
  SiRNA target sequence
ggtgcaaatgatataagtgatcta

SEQ ID NO: 43408 - DNA, 24 bp, Artificial sequence
  SiRNA target sequence
gtgcaaatgatataagtgatctat

SEQ ID NO: 43409 - DNA, 24 bp, Artificial sequence
  SiRNA target sequence
tgcaaatgatataagtgatctata

SEQ ID NO: 43410 - DNA, 24 bp, Artificial sequence
  SiRNA target sequence
gcaaatgatataagtgatctatat

SEQ ID NO: 43411 - DNA, 24 bp, Artificial sequence
  SiRNA target sequence
caaatgatataagtgatctatatg

SEQ ID NO: 43412 - DNA, 24 bp, Artificial sequence
  SiRNA target sequence
aaatgatataagtgatctatatga

SEQ ID NO: 43413 - DNA, 24 bp, Artificial sequence
  SiRNA target sequence
aatgatataagtgatctatatgaa

SEQ ID NO: 43414 - DNA, 24 bp, Artificial sequence
  SiRNA target sequence
atgatataagtgatctatatgaac

SEQ ID NO: 43415 - DNA, 24 bp, Artificial sequence
  SiRNA target sequence
tgatataagtgatctatatgaact

SEQ ID NO: 43416 - DNA, 24 bp, Artificial sequence
  SiRNA target sequence
gatataagtgatctatatgaacta

SEQ ID NO: 43417 - DNA, 24 bp, Artificial sequence
  SiRNA target sequence
atataagtgatctatatgaactat

SEQ ID NO: 43418 - DNA, 24 bp, Artificial sequence
  SiRNA target sequence
tataagtgatctatatgaactatt

SEQ ID NO: 43419 - DNA, 24 bp, Artificial sequence
  SiRNA target sequence
ataagtgatctatatgaactatta

SEQ ID NO: 43420 - DNA, 24 bp, Artificial sequence
  SiRNA target sequence
taagtgatctatatgaactattag

SEQ ID NO: 43421 - DNA, 24 bp, Artificial sequence
  SiRNA target sequence
aagtgatctatatgaactattaga

SEQ ID NO: 43422 - DNA, 24 bp, Artificial sequence
  SiRNA target sequence
agtgatctatatgaactattagaa

SEQ ID NO: 43423 - DNA, 24 bp, Artificial sequence
  SiRNA target sequence
gtgatctatatgaactattagaaa

SEQ ID NO: 43424 - DNA, 24 bp, Artificial sequence
  SiRNA target sequence
tgatctatatgaactattagaaat

SEQ ID NO: 43425 - DNA, 24 bp, Artificial sequence
  SiRNA target sequence
gatctatatgaactattagaaatt

SEQ ID NO: 43426 - DNA, 24 bp, Artificial sequence
  SiRNA target sequence
atctatatgaactattagaaattt

SEQ ID NO: 43427 - DNA, 24 bp, Artificial sequence
  SiRNA target sequence
tctatatgaactattagaaatttc

SEQ ID NO: 43428 - DNA, 24 bp, Artificial sequence
  SiRNA target sequence
ctatatgaactattagaaatttct

SEQ ID NO: 43429 - DNA, 24 bp, Artificial sequence
  SiRNA target sequence
tatatgaactattagaaatttctt

SEQ ID NO: 43430 - DNA, 24 bp, Artificial sequence
  SiRNA target sequence
atatgaactattagaaatttcttt

SEQ ID NO: 43431 - DNA, 24 bp, Artificial sequence
  SiRNA target sequence
tatgaactattagaaatttctttt

SEQ ID NO: 43432 - DNA, 24 bp, Artificial sequence
  SiRNA target sequence
atgaactattagaaatttctttta

SEQ ID NO: 43433 - DNA, 24 bp, Artificial sequence
  SiRNA target sequence
tgaactattagaaatttcttttat

SEQ ID NO: 43434 - DNA, 24 bp, Artificial sequence
  SiRNA target sequence
gaactattagaaatttcttttata

SEQ ID NO: 43435 - DNA, 24 bp, Artificial sequence
  SiRNA target sequence
aactattagaaatttcttttatat

SEQ ID NO: 43436 - DNA, 24 bp, Artificial sequence
  SiRNA target sequence
actattagaaatttcttttatatc

SEQ ID NO: 43437 - DNA, 24 bp, Artificial sequence
  SiRNA target sequence
ctattagaaatttcttttatatct

SEQ ID NO: 43438 - DNA, 24 bp, Artificial sequence
  SiRNA target sequence
tattagaaatttcttttatatctc

SEQ ID NO: 43439 - DNA, 24 bp, Artificial sequence
  SiRNA target sequence
attagaaatttcttttatatctcg

SEQ ID NO: 43440 - DNA, 24 bp, Artificial sequence
  SiRNA target sequence
ttagaaatttcttttatatctcga

SEQ ID NO: 43441 - DNA, 24 bp, Artificial sequence
  SiRNA target sequence
tagaaatttcttttatatctcgat

SEQ ID NO: 43442 - DNA, 24 bp, Artificial sequence
  SiRNA target sequence
agaaatttcttttatatctcgatt

SEQ ID NO: 43443 - DNA, 24 bp, Artificial sequence
  SiRNA target sequence
gaaatttcttttatatctcgatta

SEQ ID NO: 43444 - DNA, 24 bp, Artificial sequence
  SiRNA target sequence
aaatttcttttatatctcgattat

SEQ ID NO: 43445 - DNA, 24 bp, Artificial sequence
  SiRNA target sequence
aatttcttttatatctcgattatc

SEQ ID NO: 43446 - DNA, 24 bp, Artificial sequence
  SiRNA target sequence
atttcttttatatctcgattatct

SEQ ID NO: 43447 - DNA, 24 bp, Artificial sequence
  SiRNA target sequence
tttcttttatatctcgattatcta

SEQ ID NO: 43448 - DNA, 24 bp, Artificial sequence
  SiRNA target sequence
ttcttttatatctcgattatctag

SEQ ID NO: 43449 - DNA, 24 bp, Artificial sequence
  SiRNA target sequence
tcttttatatctcgattatctaga

SEQ ID NO: 43450 - DNA, 24 bp, Artificial sequence
  SiRNA target sequence
cttttatatctcgattatctagat

SEQ ID NO: 43451 - DNA, 24 bp, Artificial sequence
  SiRNA target sequence
ttttatatctcgattatctagata

SEQ ID NO: 43452 - DNA, 24 bp, Artificial sequence
  SiRNA target sequence
tttatatctcgattatctagataa

SEQ ID NO: 43453 - DNA, 24 bp, Artificial sequence
  SiRNA target sequence
ttatatctcgattatctagataaa

SEQ ID NO: 43454 - DNA, 24 bp, Artificial sequence
  SiRNA target sequence
tatatctcgattatctagataaat

SEQ ID NO: 43455 - DNA, 24 bp, Artificial sequence
  SiRNA target sequence
atatctcgattatctagataaata

SEQ ID NO: 43456 - DNA, 24 bp, Artificial sequence
  SiRNA target sequence
tatctcgattatctagataaatat

SEQ ID NO: 43457 - DNA, 24 bp, Artificial sequence
  SiRNA target sequence
atctcgattatctagataaatatt

SEQ ID NO: 43458 - DNA, 24 bp, Artificial sequence
  SiRNA target sequence
tctcgattatctagataaatattt

SEQ ID NO: 43459 - DNA, 24 bp, Artificial sequence
  SiRNA target sequence
ctcgattatctagataaatatttc

SEQ ID NO: 43460 - DNA, 24 bp, Artificial sequence
  SiRNA target sequence
tcgattatctagataaatatttcc

SEQ ID NO: 43461 - DNA, 24 bp, Artificial sequence
  SiRNA target sequence
cgattatctagataaatatttccc

SEQ ID NO: 43462 - DNA, 24 bp, Artificial sequence
  SiRNA target sequence
gattatctagataaatatttcccc

SEQ ID NO: 43463 - DNA, 24 bp, Artificial sequence
  SiRNA target sequence
attatctagataaatatttccccc

SEQ ID NO: 43464 - DNA, 24 bp, Artificial sequence
  SiRNA target sequence
ttatctagataaatatttccccca

SEQ ID NO: 43465 - DNA, 24 bp, Artificial sequence
  SiRNA target sequence
tatctagataaatatttcccccat

SEQ ID NO: 43466 - DNA, 24 bp, Artificial sequence
  SiRNA target sequence
atctagataaatatttcccccata

SEQ ID NO: 43467 - DNA, 24 bp, Artificial sequence
  SiRNA target sequence
tctagataaatatttcccccataa

SEQ ID NO: 43468 - DNA, 24 bp, Artificial sequence
  SiRNA target sequence
ctagataaatatttcccccataat

SEQ ID NO: 43469 - DNA, 24 bp, Artificial sequence
  SiRNA target sequence
tagataaatatttcccccataatt

SEQ ID NO: 43470 - DNA, 24 bp, Artificial sequence
  SiRNA target sequence
agataaatatttcccccataattt

SEQ ID NO: 43471 - DNA, 24 bp, Artificial sequence
  SiRNA target sequence
gataaatatttcccccataatttt

SEQ ID NO: 43472 - DNA, 24 bp, Artificial sequence
  SiRNA target sequence
ataaatatttcccccataattttc

SEQ ID NO: 43473 - DNA, 24 bp, Artificial sequence
  SiRNA target sequence
taaatatttcccccataattttca

SEQ ID NO: 43474 - DNA, 24 bp, Artificial sequence
  SiRNA target sequence
aaatatttcccccataattttcaa

SEQ ID NO: 43475 - DNA, 24 bp, Artificial sequence
  SiRNA target sequence
aatatttcccccataattttcaaa

SEQ ID NO: 43476 - DNA, 24 bp, Artificial sequence
  SiRNA target sequence
atatttcccccataattttcaaat

SEQ ID NO: 43477 - DNA, 24 bp, Artificial sequence
  SiRNA target sequence
tatttcccccataattttcaaatc

SEQ ID NO: 43478 - DNA, 24 bp, Artificial sequence
  SiRNA target sequence
atttcccccataattttcaaatct

SEQ ID NO: 43479 - DNA, 24 bp, Artificial sequence
  SiRNA target sequence
tttcccccataattttcaaatctc

SEQ ID NO: 43480 - DNA, 24 bp, Artificial sequence
  SiRNA target sequence
ttcccccataattttcaaatctca

SEQ ID NO: 43481 - DNA, 24 bp, Artificial sequence
  SiRNA target sequence
tcccccataattttcaaatctcat

SEQ ID NO: 43482 - DNA, 24 bp, Artificial sequence
  SiRNA target sequence
cccccataattttcaaatctcata

SEQ ID NO: 43483 - DNA, 24 bp, Artificial sequence
  SiRNA target sequence
ccccataattttcaaatctcataa

SEQ ID NO: 43484 - DNA, 24 bp, Artificial sequence
  SiRNA target sequence
cccataattttcaaatctcataat

SEQ ID NO: 43485 - DNA, 24 bp, Artificial sequence
  SiRNA target sequence
ccataattttcaaatctcataatc

SEQ ID NO: 43486 - DNA, 24 bp, Artificial sequence
  SiRNA target sequence
cataattttcaaatctcataatca

SEQ ID NO: 43487 - DNA, 24 bp, Artificial sequence
  SiRNA target sequence
ataattttcaaatctcataatcat

SEQ ID NO: 43488 - DNA, 24 bp, Artificial sequence
  SiRNA target sequence
taattttcaaatctcataatcatc

SEQ ID NO: 43489 - DNA, 24 bp, Artificial sequence
  SiRNA target sequence
aattttcaaatctcataatcatct

SEQ ID NO: 43490 - DNA, 24 bp, Artificial sequence
  SiRNA target sequence
attttcaaatctcataatcatctt

SEQ ID NO: 43491 - DNA, 24 bp, Artificial sequence
  SiRNA target sequence
ttttcaaatctcataatcatcttt

SEQ ID NO: 43492 - DNA, 24 bp, Artificial sequence
  SiRNA target sequence
tttcaaatctcataatcatcttta

SEQ ID NO: 43493 - DNA, 24 bp, Artificial sequence
  SiRNA target sequence
ttcaaatctcataatcatctttat

SEQ ID NO: 43494 - DNA, 24 bp, Artificial sequence
  SiRNA target sequence
tcaaatctcataatcatctttata

SEQ ID NO: 43495 - DNA, 24 bp, Artificial sequence
  SiRNA target sequence
caaatctcataatcatctttataa

SEQ ID NO: 43496 - DNA, 24 bp, Artificial sequence
  SiRNA target sequence
aaatctcataatcatctttataag

SEQ ID NO: 43497 - DNA, 24 bp, Artificial sequence
  SiRNA target sequence
aatctcataatcatctttataaga

SEQ ID NO: 43498 - DNA, 24 bp, Artificial sequence
  SiRNA target sequence
atctcataatcatctttataagag

SEQ ID NO: 43499 - DNA, 24 bp, Artificial sequence
  SiRNA target sequence
tctcataatcatctttataagaga

SEQ ID NO: 43500 - DNA, 24 bp, Artificial sequence
  SiRNA target sequence
ctcataatcatctttataagagat

SEQ ID NO: 43501 - DNA, 24 bp, Artificial sequence
  SiRNA target sequence
tcataatcatctttataagagatg

SEQ ID NO: 43502 - DNA, 24 bp, Artificial sequence
  SiRNA target sequence
cataatcatctttataagagatgt

SEQ ID NO: 43503 - DNA, 24 bp, Artificial sequence
  SiRNA target sequence
ataatcatctttataagagatgtt

SEQ ID NO: 43504 - DNA, 24 bp, Artificial sequence
  SiRNA target sequence
taatcatctttataagagatgttt

SEQ ID NO: 43505 - DNA, 24 bp, Artificial sequence
  SiRNA target sequence
aatcatctttataagagatgtttt

SEQ ID NO: 43506 - DNA, 24 bp, Artificial sequence
  SiRNA target sequence
atcatctttataagagatgttttt

SEQ ID NO: 43507 - DNA, 24 bp, Artificial sequence
  SiRNA target sequence
tcatctttataagagatgtttttc

SEQ ID NO: 43508 - DNA, 24 bp, Artificial sequence
  SiRNA target sequence
catctttataagagatgtttttcc

SEQ ID NO: 43509 - DNA, 24 bp, Artificial sequence
  SiRNA target sequence
atctttataagagatgtttttccc

SEQ ID NO: 43510 - DNA, 24 bp, Artificial sequence
  SiRNA target sequence
tctttataagagatgtttttcccg

SEQ ID NO: 43511 - DNA, 24 bp, Artificial sequence
  SiRNA target sequence
ctttataagagatgtttttcccga

SEQ ID NO: 43512 - DNA, 24 bp, Artificial sequence
  SiRNA target sequence
tttataagagatgtttttcccgat

SEQ ID NO: 43513 - DNA, 24 bp, Artificial sequence
  SiRNA target sequence
ttataagagatgtttttcccgatc

SEQ ID NO: 43514 - DNA, 24 bp, Artificial sequence
  SiRNA target sequence
tataagagatgtttttcccgatcc

SEQ ID NO: 43515 - DNA, 24 bp, Artificial sequence
  SiRNA target sequence
ataagagatgtttttcccgatcca

SEQ ID NO: 43516 - DNA, 24 bp, Artificial sequence
  SiRNA target sequence
taagagatgtttttcccgatccat

SEQ ID NO: 43517 - DNA, 24 bp, Artificial sequence
  SiRNA target sequence
aagagatgtttttcccgatccatt

SEQ ID NO: 43518 - DNA, 24 bp, Artificial sequence
  SiRNA target sequence
agagatgtttttcccgatccattt

SEQ ID NO: 43519 - DNA, 24 bp, Artificial sequence
  SiRNA target sequence
gagatgtttttcccgatccatttt

SEQ ID NO: 43520 - DNA, 24 bp, Artificial sequence
  SiRNA target sequence
agatgtttttcccgatccattttt

SEQ ID NO: 43521 - DNA, 24 bp, Artificial sequence
  SiRNA target sequence
gatgtttttcccgatccatttttt

SEQ ID NO: 43522 - DNA, 24 bp, Artificial sequence
  SiRNA target sequence
atgtttttcccgatccattttttc

SEQ ID NO: 43523 - DNA, 24 bp, Artificial sequence
  SiRNA target sequence
tgtttttcccgatccattttttcc

SEQ ID NO: 43524 - DNA, 24 bp, Artificial sequence
  SiRNA target sequence
gtttttcccgatccattttttcca

SEQ ID NO: 43525 - DNA, 24 bp, Artificial sequence
  SiRNA target sequence
tttttcccgatccattttttccaa

SEQ ID NO: 43526 - DNA, 24 bp, Artificial sequence
  SiRNA target sequence
ttttcccgatccattttttccaat

SEQ ID NO: 43527 - DNA, 24 bp, Artificial sequence
  SiRNA target sequence
tttcccgatccattttttccaata

SEQ ID NO: 43528 - DNA, 24 bp, Artificial sequence
  SiRNA target sequence
ttcccgatccattttttccaataa

SEQ ID NO: 43529 - DNA, 24 bp, Artificial sequence
  SiRNA target sequence
tcccgatccattttttccaataat

SEQ ID NO: 43530 - DNA, 24 bp, Artificial sequence
  SiRNA target sequence
cccgatccattttttccaataata

SEQ ID NO: 43531 - DNA, 24 bp, Artificial sequence
  SiRNA target sequence
ccgatccattttttccaataatag

SEQ ID NO: 43532 - DNA, 24 bp, Artificial sequence
  SiRNA target sequence
cgatccattttttccaataatagc

SEQ ID NO: 43533 - DNA, 24 bp, Artificial sequence
  SiRNA target sequence
gatccattttttccaataatagct

SEQ ID NO: 43534 - DNA, 24 bp, Artificial sequence
  SiRNA target sequence
atccattttttccaataatagcta

SEQ ID NO: 43535 - DNA, 24 bp, Artificial sequence
  SiRNA target sequence
tccattttttccaataatagctac

SEQ ID NO: 43536 - DNA, 24 bp, Artificial sequence
  SiRNA target sequence
ccattttttccaataatagctact

SEQ ID NO: 43537 - DNA, 24 bp, Artificial sequence
  SiRNA target sequence
cattttttccaataatagctactt

SEQ ID NO: 43538 - DNA, 24 bp, Artificial sequence
  SiRNA target sequence
attttttccaataatagctacttt

SEQ ID NO: 43539 - DNA, 24 bp, Artificial sequence
  SiRNA target sequence
ttttttccaataatagctactttt

SEQ ID NO: 43540 - DNA, 24 bp, Artificial sequence
  SiRNA target sequence
tttttccaataatagctacttttt

SEQ ID NO: 43541 - DNA, 24 bp, Artificial sequence
  SiRNA target sequence
ttttccaataatagctactttttc

SEQ ID NO: 43542 - DNA, 24 bp, Artificial sequence
  SiRNA target sequence
tttccaataatagctactttttca

SEQ ID NO: 43543 - DNA, 24 bp, Artificial sequence
  SiRNA target sequence
ttccaataatagctactttttcac

SEQ ID NO: 43544 - DNA, 24 bp, Artificial sequence
  SiRNA target sequence
tccaataatagctactttttcacc

SEQ ID NO: 43545 - DNA, 24 bp, Artificial sequence
  SiRNA target sequence
ccaataatagctactttttcacct

SEQ ID NO: 43546 - DNA, 24 bp, Artificial sequence
  SiRNA target sequence
caataatagctactttttcacctt

SEQ ID NO: 43547 - DNA, 24 bp, Artificial sequence
  SiRNA target sequence
aataatagctactttttcaccttt

SEQ ID NO: 43548 - DNA, 24 bp, Artificial sequence
  SiRNA target sequence
ataatagctactttttcacctttt

SEQ ID NO: 43549 - DNA, 24 bp, Artificial sequence
  SiRNA target sequence
taatagctactttttcaccttttt

SEQ ID NO: 43550 - DNA, 24 bp, Artificial sequence
  SiRNA target sequence
aatagctactttttcacctttttt

SEQ ID NO: 43551 - DNA, 24 bp, Artificial sequence
  SiRNA target sequence
atagctactttttcacctttttta

SEQ ID NO: 43552 - DNA, 24 bp, Artificial sequence
  SiRNA target sequence
tagctactttttcaccttttttaa

SEQ ID NO: 43553 - DNA, 24 bp, Artificial sequence
  SiRNA target sequence
agctactttttcaccttttttaat

SEQ ID NO: 43554 - DNA, 24 bp, Artificial sequence
  SiRNA target sequence
gctactttttcaccttttttaatt

SEQ ID NO: 43555 - DNA, 24 bp, Artificial sequence
  SiRNA target sequence
ctactttttcaccttttttaatta

SEQ ID NO: 43556 - DNA, 24 bp, Artificial sequence
  SiRNA target sequence
tactttttcaccttttttaattaa

SEQ ID NO: 43557 - DNA, 24 bp, Artificial sequence
  SiRNA target sequence
actttttcaccttttttaattaaa

SEQ ID NO: 43558 - DNA, 24 bp, Artificial sequence
  SiRNA target sequence
ctttttcaccttttttaattaaaa

SEQ ID NO: 43559 - DNA, 24 bp, Artificial sequence
  SiRNA target sequence
tttttcaccttttttaattaaaat

SEQ ID NO: 43560 - DNA, 24 bp, Artificial sequence
  SiRNA target sequence
ttttcaccttttttaattaaaata

SEQ ID NO: 43561 - DNA, 24 bp, Artificial sequence
  SiRNA target sequence
tttcaccttttttaattaaaatat

SEQ ID NO: 43562 - DNA, 24 bp, Artificial sequence
  SiRNA target sequence
ttcaccttttttaattaaaatatt

SEQ ID NO: 43563 - DNA, 24 bp, Artificial sequence
  SiRNA target sequence
tcaccttttttaattaaaatattt

SEQ ID NO: 43564 - DNA, 24 bp, Artificial sequence
  SiRNA target sequence
caccttttttaattaaaatattta

SEQ ID NO: 43565 - DNA, 24 bp, Artificial sequence
  SiRNA target sequence
accttttttaattaaaatatttat

SEQ ID NO: 43566 - DNA, 24 bp, Artificial sequence
  SiRNA target sequence
ccttttttaattaaaatatttatg

SEQ ID NO: 43567 - DNA, 24 bp, Artificial sequence
  SiRNA target sequence
cttttttaattaaaatatttatgt

SEQ ID NO: 43568 - DNA, 24 bp, Artificial sequence
  SiRNA target sequence
ttttttaattaaaatatttatgtc

SEQ ID NO: 43569 - DNA, 24 bp, Artificial sequence
  SiRNA target sequence
tttttaattaaaatatttatgtcc

SEQ ID NO: 43570 - DNA, 24 bp, Artificial sequence
  SiRNA target sequence
ttttaattaaaatatttatgtccg

SEQ ID NO: 43571 - DNA, 24 bp, Artificial sequence
  SiRNA target sequence
tttaattaaaatatttatgtccgt

SEQ ID NO: 43572 - DNA, 24 bp, Artificial sequence
  SiRNA target sequence
ttaattaaaatatttatgtccgtt

SEQ ID NO: 43573 - DNA, 24 bp, Artificial sequence
  SiRNA target sequence
taattaaaatatttatgtccgtta

SEQ ID NO: 43574 - DNA, 24 bp, Artificial sequence
  SiRNA target sequence
aattaaaatatttatgtccgttaa

SEQ ID NO: 43575 - DNA, 24 bp, Artificial sequence
  SiRNA target sequence
attaaaatatttatgtccgttaaa

SEQ ID NO: 43576 - DNA, 24 bp, Artificial sequence
  SiRNA target sequence
ttaaaatatttatgtccgttaaaa

SEQ ID NO: 43577 - DNA, 24 bp, Artificial sequence
  SiRNA target sequence
taaaatatttatgtccgttaaaat

SEQ ID NO: 43578 - DNA, 24 bp, Artificial sequence
  SiRNA target sequence
aaaatatttatgtccgttaaaatt

SEQ ID NO: 43579 - DNA, 24 bp, Artificial sequence
  SiRNA target sequence
aaatatttatgtccgttaaaattt

SEQ ID NO: 43580 - DNA, 24 bp, Artificial sequence
  SiRNA target sequence
aatatttatgtccgttaaaatttt

SEQ ID NO: 43581 - DNA, 24 bp, Artificial sequence
  SiRNA target sequence
atatttatgtccgttaaaattttt

SEQ ID NO: 43582 - DNA, 24 bp, Artificial sequence
  SiRNA target sequence
tatttatgtccgttaaaatttttt

SEQ ID NO: 43583 - DNA, 24 bp, Artificial sequence
  SiRNA target sequence
atttatgtccgttaaaattttttt

SEQ ID NO: 43584 - DNA, 24 bp, Artificial sequence
  SiRNA target sequence
tttatgtccgttaaaatttttttg

SEQ ID NO: 43585 - DNA, 24 bp, Artificial sequence
  SiRNA target sequence
ttatgtccgttaaaatttttttgg

SEQ ID NO: 43586 - DNA, 24 bp, Artificial sequence
  SiRNA target sequence
tatgtccgttaaaatttttttgga

SEQ ID NO: 43587 - DNA, 24 bp, Artificial sequence
  SiRNA target sequence
atgtccgttaaaatttttttggag

SEQ ID NO: 43588 - DNA, 24 bp, Artificial sequence
  SiRNA target sequence
tgtccgttaaaatttttttggagt

SEQ ID NO: 43589 - DNA, 24 bp, Artificial sequence
  SiRNA target sequence
gtccgttaaaatttttttggagta

SEQ ID NO: 43590 - DNA, 24 bp, Artificial sequence
  SiRNA target sequence
tccgttaaaatttttttggagtaa

SEQ ID NO: 43591 - DNA, 24 bp, Artificial sequence
  SiRNA target sequence
ccgttaaaatttttttggagtaat

SEQ ID NO: 43592 - DNA, 24 bp, Artificial sequence
  SiRNA target sequence
cgttaaaatttttttggagtaata

SEQ ID NO: 43593 - DNA, 24 bp, Artificial sequence
  SiRNA target sequence
gttaaaatttttttggagtaataa

SEQ ID NO: 43594 - DNA, 24 bp, Artificial sequence
  SiRNA target sequence
ttaaaatttttttggagtaataat

SEQ ID NO: 43595 - DNA, 24 bp, Artificial sequence
  SiRNA target sequence
taaaatttttttggagtaataatt

SEQ ID NO: 43596 - DNA, 24 bp, Artificial sequence
  SiRNA target sequence
aaaatttttttggagtaataatta

SEQ ID NO: 43597 - DNA, 24 bp, Artificial sequence
  SiRNA target sequence
aaatttttttggagtaataattaa

SEQ ID NO: 43598 - DNA, 24 bp, Artificial sequence
  SiRNA target sequence
aatttttttggagtaataattaaa

SEQ ID NO: 43599 - DNA, 24 bp, Artificial sequence
  SiRNA target sequence
atttttttggagtaataattaaat

SEQ ID NO: 43600 - DNA, 24 bp, Artificial sequence
  SiRNA target sequence
tttttttggagtaataattaaatg

SEQ ID NO: 43601 - DNA, 24 bp, Artificial sequence
  SiRNA target sequence
ttttttggagtaataattaaatga

SEQ ID NO: 43602 - DNA, 24 bp, Artificial sequence
  SiRNA target sequence
tttttggagtaataattaaatgat

SEQ ID NO: 43603 - DNA, 24 bp, Artificial sequence
  SiRNA target sequence
ttttggagtaataattaaatgatg

SEQ ID NO: 43604 - DNA, 24 bp, Artificial sequence
  SiRNA target sequence
tttggagtaataattaaatgatgc

SEQ ID NO: 43605 - DNA, 24 bp, Artificial sequence
  SiRNA target sequence
ttggagtaataattaaatgatgca

SEQ ID NO: 43606 - DNA, 24 bp, Artificial sequence
  SiRNA target sequence
tggagtaataattaaatgatgcat

SEQ ID NO: 43607 - DNA, 24 bp, Artificial sequence
  SiRNA target sequence
ggagtaataattaaatgatgcatt

SEQ ID NO: 43608 - DNA, 24 bp, Artificial sequence
  SiRNA target sequence
gagtaataattaaatgatgcattt

SEQ ID NO: 43609 - DNA, 24 bp, Artificial sequence
  SiRNA target sequence
agtaataattaaatgatgcatttt

SEQ ID NO: 43610 - DNA, 24 bp, Artificial sequence
  SiRNA target sequence
gtaataattaaatgatgcattttc

SEQ ID NO: 43611 - DNA, 24 bp, Artificial sequence
  SiRNA target sequence
taataattaaatgatgcattttct

SEQ ID NO: 43612 - DNA, 24 bp, Artificial sequence
  SiRNA target sequence
aataattaaatgatgcattttcta

SEQ ID NO: 43613 - DNA, 24 bp, Artificial sequence
  SiRNA target sequence
ataattaaatgatgcattttctaa

SEQ ID NO: 43614 - DNA, 24 bp, Artificial sequence
  SiRNA target sequence
taattaaatgatgcattttctaat

SEQ ID NO: 43615 - DNA, 24 bp, Artificial sequence
  SiRNA target sequence
aattaaatgatgcattttctaatc

SEQ ID NO: 43616 - DNA, 24 bp, Artificial sequence
  SiRNA target sequence
attaaatgatgcattttctaatct

SEQ ID NO: 43617 - DNA, 24 bp, Artificial sequence
  SiRNA target sequence
ttaaatgatgcattttctaatctt

SEQ ID NO: 43618 - DNA, 24 bp, Artificial sequence
  SiRNA target sequence
taaatgatgcattttctaatctta

SEQ ID NO: 43619 - DNA, 24 bp, Artificial sequence
  SiRNA target sequence
aaatgatgcattttctaatcttat

SEQ ID NO: 43620 - DNA, 24 bp, Artificial sequence
  SiRNA target sequence
aatgatgcattttctaatcttata

SEQ ID NO: 43621 - DNA, 24 bp, Artificial sequence
  SiRNA target sequence
atgatgcattttctaatcttatat

SEQ ID NO: 43622 - DNA, 24 bp, Artificial sequence
  SiRNA target sequence
tgatgcattttctaatcttatatc

SEQ ID NO: 43623 - DNA, 24 bp, Artificial sequence
  SiRNA target sequence
gatgcattttctaatcttatatca

SEQ ID NO: 43624 - DNA, 24 bp, Artificial sequence
  SiRNA target sequence
atgcattttctaatcttatatcat

SEQ ID NO: 43625 - DNA, 24 bp, Artificial sequence
  SiRNA target sequence
tgcattttctaatcttatatcatt

SEQ ID NO: 43626 - DNA, 24 bp, Artificial sequence
  SiRNA target sequence
gcattttctaatcttatatcatta

SEQ ID NO: 43627 - DNA, 24 bp, Artificial sequence
  SiRNA target sequence
cattttctaatcttatatcattat

SEQ ID NO: 43628 - DNA, 24 bp, Artificial sequence
  SiRNA target sequence
attttctaatcttatatcattatt

SEQ ID NO: 43629 - DNA, 24 bp, Artificial sequence
  SiRNA target sequence
ttttctaatcttatatcattatta

SEQ ID NO: 43630 - DNA, 24 bp, Artificial sequence
  SiRNA target sequence
tttctaatcttatatcattattaa

SEQ ID NO: 43631 - DNA, 24 bp, Artificial sequence
  SiRNA target sequence
ttctaatcttatatcattattaaa

SEQ ID NO: 43632 - DNA, 24 bp, Artificial sequence
  SiRNA target sequence
tctaatcttatatcattattaaat

SEQ ID NO: 43633 - DNA, 24 bp, Artificial sequence
  SiRNA target sequence
ctaatcttatatcattattaaatt

SEQ ID NO: 43634 - DNA, 24 bp, Artificial sequence
  SiRNA target sequence
taatcttatatcattattaaattc

SEQ ID NO: 43635 - DNA, 24 bp, Artificial sequence
  SiRNA target sequence
aatcttatatcattattaaattca

SEQ ID NO: 43636 - DNA, 24 bp, Artificial sequence
  SiRNA target sequence
atcttatatcattattaaattcat

SEQ ID NO: 43637 - DNA, 24 bp, Artificial sequence
  SiRNA target sequence
tcttatatcattattaaattcatt

SEQ ID NO: 43638 - DNA, 24 bp, Artificial sequence
  SiRNA target sequence
cttatatcattattaaattcatta

SEQ ID NO: 43639 - DNA, 24 bp, Artificial sequence
  SiRNA target sequence
ttatatcattattaaattcattaa

SEQ ID NO: 43640 - DNA, 24 bp, Artificial sequence
  SiRNA target sequence
tatatcattattaaattcattaac

SEQ ID NO: 43641 - DNA, 24 bp, Artificial sequence
  SiRNA target sequence
atatcattattaaattcattaaca

SEQ ID NO: 43642 - DNA, 24 bp, Artificial sequence
  SiRNA target sequence
tatcattattaaattcattaacat

SEQ ID NO: 43643 - DNA, 24 bp, Artificial sequence
  SiRNA target sequence
atcattattaaattcattaacatc

SEQ ID NO: 43644 - DNA, 24 bp, Artificial sequence
  SiRNA target sequence
tcattattaaattcattaacatct

SEQ ID NO: 43645 - DNA, 24 bp, Artificial sequence
  SiRNA target sequence
cattattaaattcattaacatcta

SEQ ID NO: 43646 - DNA, 24 bp, Artificial sequence
  SiRNA target sequence
attattaaattcattaacatctac

SEQ ID NO: 43647 - DNA, 24 bp, Artificial sequence
  SiRNA target sequence
ttattaaattcattaacatctact

SEQ ID NO: 43648 - DNA, 24 bp, Artificial sequence
  SiRNA target sequence
tattaaattcattaacatctacta

SEQ ID NO: 43649 - DNA, 24 bp, Artificial sequence
  SiRNA target sequence
attaaattcattaacatctactaa

SEQ ID NO: 43650 - DNA, 24 bp, Artificial sequence
  SiRNA target sequence
ttaaattcattaacatctactaaa

SEQ ID NO: 43651 - DNA, 24 bp, Artificial sequence
  SiRNA target sequence
taaattcattaacatctactaaat

SEQ ID NO: 43652 - DNA, 24 bp, Artificial sequence
  SiRNA target sequence
aaattcattaacatctactaaatt

SEQ ID NO: 43653 - DNA, 24 bp, Artificial sequence
  SiRNA target sequence
aattcattaacatctactaaattt

SEQ ID NO: 43654 - DNA, 24 bp, Artificial sequence
  SiRNA target sequence
attcattaacatctactaaatttg

SEQ ID NO: 43655 - DNA, 24 bp, Artificial sequence
  SiRNA target sequence
ttcattaacatctactaaatttgg

SEQ ID NO: 43656 - DNA, 24 bp, Artificial sequence
  SiRNA target sequence
tcattaacatctactaaatttggt

SEQ ID NO: 43657 - DNA, 24 bp, Artificial sequence
  SiRNA target sequence
cattaacatctactaaatttggtt

SEQ ID NO: 43658 - DNA, 24 bp, Artificial sequence
  SiRNA target sequence
attaacatctactaaatttggttc

SEQ ID NO: 43659 - DNA, 24 bp, Artificial sequence
  SiRNA target sequence
ttaacatctactaaatttggttct

SEQ ID NO: 43660 - DNA, 24 bp, Artificial sequence
  SiRNA target sequence
taacatctactaaatttggttctt

SEQ ID NO: 43661 - DNA, 24 bp, Artificial sequence
  SiRNA target sequence
aacatctactaaatttggttcttc

SEQ ID NO: 43662 - DNA, 24 bp, Artificial sequence
  SiRNA target sequence
acatctactaaatttggttcttct

SEQ ID NO: 43663 - DNA, 24 bp, Artificial sequence
  SiRNA target sequence
catctactaaatttggttcttctt

SEQ ID NO: 43664 - DNA, 24 bp, Artificial sequence
  SiRNA target sequence
atctactaaatttggttcttcttt

SEQ ID NO: 43665 - DNA, 24 bp, Artificial sequence
  SiRNA target sequence
tctactaaatttggttcttctttt

SEQ ID NO: 43666 - DNA, 24 bp, Artificial sequence
  SiRNA target sequence
ctactaaatttggttcttctttta

SEQ ID NO: 43667 - DNA, 24 bp, Artificial sequence
  SiRNA target sequence
tactaaatttggttcttcttttat

SEQ ID NO: 43668 - DNA, 24 bp, Artificial sequence
  SiRNA target sequence
actaaatttggttcttcttttata

SEQ ID NO: 43669 - DNA, 24 bp, Artificial sequence
  SiRNA target sequence
ctaaatttggttcttcttttataa

SEQ ID NO: 43670 - DNA, 24 bp, Artificial sequence
  SiRNA target sequence
taaatttggttcttcttttataag

SEQ ID NO: 43671 - DNA, 24 bp, Artificial sequence
  SiRNA target sequence
aaatttggttcttcttttataagc

SEQ ID NO: 43672 - DNA, 24 bp, Artificial sequence
  SiRNA target sequence
aatttggttcttcttttataagct

SEQ ID NO: 43673 - DNA, 24 bp, Artificial sequence
  SiRNA target sequence
atttggttcttcttttataagctc

SEQ ID NO: 43674 - DNA, 24 bp, Artificial sequence
  SiRNA target sequence
tttggttcttcttttataagctct

SEQ ID NO: 43675 - DNA, 24 bp, Artificial sequence
  SiRNA target sequence
ttggttcttcttttataagctctg

SEQ ID NO: 43676 - DNA, 24 bp, Artificial sequence
  SiRNA target sequence
tggttcttcttttataagctctgg

SEQ ID NO: 43677 - DNA, 24 bp, Artificial sequence
  SiRNA target sequence
ggttcttcttttataagctctggt

SEQ ID NO: 43678 - DNA, 24 bp, Artificial sequence
  SiRNA target sequence
gttcttcttttataagctctggtt

SEQ ID NO: 43679 - DNA, 24 bp, Artificial sequence
  SiRNA target sequence
ttcttcttttataagctctggttt

SEQ ID NO: 43680 - DNA, 24 bp, Artificial sequence
  SiRNA target sequence
tcttcttttataagctctggttta

SEQ ID NO: 43681 - DNA, 24 bp, Artificial sequence
  SiRNA target sequence
cttcttttataagctctggtttaa

SEQ ID NO: 43682 - DNA, 24 bp, Artificial sequence
  SiRNA target sequence
ttcttttataagctctggtttaaa

SEQ ID NO: 43683 - DNA, 24 bp, Artificial sequence
  SiRNA target sequence
tcttttataagctctggtttaaaa

SEQ ID NO: 43684 - DNA, 24 bp, Artificial sequence
  SiRNA target sequence
cttttataagctctggtttaaaag

SEQ ID NO: 43685 - DNA, 24 bp, Artificial sequence
  SiRNA target sequence
ttttataagctctggtttaaaaga

SEQ ID NO: 43686 - DNA, 24 bp, Artificial sequence
  SiRNA target sequence
tttataagctctggtttaaaagat

SEQ ID NO: 43687 - DNA, 24 bp, Artificial sequence
  SiRNA target sequence
ttataagctctggtttaaaagatg

SEQ ID NO: 43688 - DNA, 24 bp, Artificial sequence
  SiRNA target sequence
tataagctctggtttaaaagatgt

SEQ ID NO: 43689 - DNA, 24 bp, Artificial sequence
  SiRNA target sequence
ataagctctggtttaaaagatgtt

SEQ ID NO: 43690 - DNA, 24 bp, Artificial sequence
  SiRNA target sequence
taagctctggtttaaaagatgttc

SEQ ID NO: 43691 - DNA, 24 bp, Artificial sequence
  SiRNA target sequence
aagctctggtttaaaagatgttct

SEQ ID NO: 43692 - DNA, 24 bp, Artificial sequence
  SiRNA target sequence
agctctggtttaaaagatgttctt

SEQ ID NO: 43693 - DNA, 24 bp, Artificial sequence
  SiRNA target sequence
gctctggtttaaaagatgttctta

SEQ ID NO: 43694 - DNA, 24 bp, Artificial sequence
  SiRNA target sequence
ctctggtttaaaagatgttcttat

SEQ ID NO: 43695 - DNA, 24 bp, Artificial sequence
  SiRNA target sequence
tctggtttaaaagatgttcttata

SEQ ID NO: 43696 - DNA, 24 bp, Artificial sequence
  SiRNA target sequence
ctggtttaaaagatgttcttatat

SEQ ID NO: 43697 - DNA, 24 bp, Artificial sequence
  SiRNA target sequence
tggtttaaaagatgttcttatatt

SEQ ID NO: 43698 - DNA, 24 bp, Artificial sequence
  SiRNA target sequence
ggtttaaaagatgttcttatattt

SEQ ID NO: 43699 - DNA, 24 bp, Artificial sequence
  SiRNA target sequence
gtttaaaagatgttcttatattta

SEQ ID NO: 43700 - DNA, 24 bp, Artificial sequence
  SiRNA target sequence
tttaaaagatgttcttatatttaa

SEQ ID NO: 43701 - DNA, 24 bp, Artificial sequence
  SiRNA target sequence
ttaaaagatgttcttatatttaag

SEQ ID NO: 43702 - DNA, 24 bp, Artificial sequence
  SiRNA target sequence
taaaagatgttcttatatttaaga

SEQ ID NO: 43703 - DNA, 24 bp, Artificial sequence
  SiRNA target sequence
aaaagatgttcttatatttaagat

SEQ ID NO: 43704 - DNA, 24 bp, Artificial sequence
  SiRNA target sequence
aaagatgttcttatatttaagatt

SEQ ID NO: 43705 - DNA, 24 bp, Artificial sequence
  SiRNA target sequence
aagatgttcttatatttaagattg

SEQ ID NO: 43706 - DNA, 24 bp, Artificial sequence
  SiRNA target sequence
agatgttcttatatttaagattgc

SEQ ID NO: 43707 - DNA, 24 bp, Artificial sequence
  SiRNA target sequence
gatgttcttatatttaagattgct

SEQ ID NO: 43708 - DNA, 24 bp, Artificial sequence
  SiRNA target sequence
atgttcttatatttaagattgctt

SEQ ID NO: 43709 - DNA, 24 bp, Artificial sequence
  SiRNA target sequence
tgttcttatatttaagattgcttg

SEQ ID NO: 43710 - DNA, 24 bp, Artificial sequence
  SiRNA target sequence
gttcttatatttaagattgcttgt

SEQ ID NO: 43711 - DNA, 24 bp, Artificial sequence
  SiRNA target sequence
ttcttatatttaagattgcttgtg

SEQ ID NO: 43712 - DNA, 24 bp, Artificial sequence
  SiRNA target sequence
tcttatatttaagattgcttgtgt

SEQ ID NO: 43713 - DNA, 24 bp, Artificial sequence
  SiRNA target sequence
cttatatttaagattgcttgtgta

SEQ ID NO: 43714 - DNA, 24 bp, Artificial sequence
  SiRNA target sequence
ttatatttaagattgcttgtgtat

SEQ ID NO: 43715 - DNA, 24 bp, Artificial sequence
  SiRNA target sequence
tatatttaagattgcttgtgtata

SEQ ID NO: 43716 - DNA, 24 bp, Artificial sequence
  SiRNA target sequence
atatttaagattgcttgtgtatat

SEQ ID NO: 43717 - DNA, 24 bp, Artificial sequence
  SiRNA target sequence
tatttaagattgcttgtgtatatc

SEQ ID NO: 43718 - DNA, 24 bp, Artificial sequence
  SiRNA target sequence
atttaagattgcttgtgtatatcg

SEQ ID NO: 43719 - DNA, 24 bp, Artificial sequence
  SiRNA target sequence
tttaagattgcttgtgtatatcgt

SEQ ID NO: 43720 - DNA, 24 bp, Artificial sequence
  SiRNA target sequence
ttaagattgcttgtgtatatcgtg

SEQ ID NO: 43721 - DNA, 24 bp, Artificial sequence
  SiRNA target sequence
taagattgcttgtgtatatcgtga

SEQ ID NO: 43722 - DNA, 24 bp, Artificial sequence
  SiRNA target sequence
aagattgcttgtgtatatcgtgag

SEQ ID NO: 43723 - DNA, 24 bp, Artificial sequence
  SiRNA target sequence
agattgcttgtgtatatcgtgagt

SEQ ID NO: 43724 - DNA, 24 bp, Artificial sequence
  SiRNA target sequence
gattgcttgtgtatatcgtgagta

SEQ ID NO: 43725 - DNA, 24 bp, Artificial sequence
  SiRNA target sequence
attgcttgtgtatatcgtgagtaa

SEQ ID NO: 43726 - DNA, 24 bp, Artificial sequence
  SiRNA target sequence
ttgcttgtgtatatcgtgagtaaa

SEQ ID NO: 43727 - DNA, 24 bp, Artificial sequence
  SiRNA target sequence
tgcttgtgtatatcgtgagtaaaa

SEQ ID NO: 43728 - DNA, 24 bp, Artificial sequence
  SiRNA target sequence
gcttgtgtatatcgtgagtaaaag

SEQ ID NO: 43729 - DNA, 24 bp, Artificial sequence
  SiRNA target sequence
cttgtgtatatcgtgagtaaaaga

SEQ ID NO: 43730 - DNA, 24 bp, Artificial sequence
  SiRNA target sequence
ttgtgtatatcgtgagtaaaagaa

SEQ ID NO: 43731 - DNA, 24 bp, Artificial sequence
  SiRNA target sequence
tgtgtatatcgtgagtaaaagaac

SEQ ID NO: 43732 - DNA, 24 bp, Artificial sequence
  SiRNA target sequence
gtgtatatcgtgagtaaaagaacc

SEQ ID NO: 43733 - DNA, 24 bp, Artificial sequence
  SiRNA target sequence
tgtatatcgtgagtaaaagaaccc

SEQ ID NO: 43734 - DNA, 24 bp, Artificial sequence
  SiRNA target sequence
gtatatcgtgagtaaaagaaccct

SEQ ID NO: 43735 - DNA, 24 bp, Artificial sequence
  SiRNA target sequence
tatatcgtgagtaaaagaacccta

SEQ ID NO: 43736 - DNA, 24 bp, Artificial sequence
  SiRNA target sequence
atatcgtgagtaaaagaaccctaa

SEQ ID NO: 43737 - DNA, 24 bp, Artificial sequence
  SiRNA target sequence
tatcgtgagtaaaagaaccctaat

SEQ ID NO: 43738 - DNA, 24 bp, Artificial sequence
  SiRNA target sequence
atcgtgagtaaaagaaccctaatt

SEQ ID NO: 43739 - DNA, 24 bp, Artificial sequence
  SiRNA target sequence
tcgtgagtaaaagaaccctaattg

SEQ ID NO: 43740 - DNA, 24 bp, Artificial sequence
  SiRNA target sequence
cgtgagtaaaagaaccctaattgt

SEQ ID NO: 43741 - DNA, 24 bp, Artificial sequence
  SiRNA target sequence
gtgagtaaaagaaccctaattgtc

SEQ ID NO: 43742 - DNA, 24 bp, Artificial sequence
  SiRNA target sequence
tgagtaaaagaaccctaattgtcc

SEQ ID NO: 43743 - DNA, 24 bp, Artificial sequence
  SiRNA target sequence
gagtaaaagaaccctaattgtcca

SEQ ID NO: 43744 - DNA, 24 bp, Artificial sequence
  SiRNA target sequence
agtaaaagaaccctaattgtccaa

SEQ ID NO: 43745 - DNA, 24 bp, Artificial sequence
  SiRNA target sequence
gtaaaagaaccctaattgtccaaa

SEQ ID NO: 43746 - DNA, 24 bp, Artificial sequence
  SiRNA target sequence
taaaagaaccctaattgtccaaaa

SEQ ID NO: 43747 - DNA, 24 bp, Artificial sequence
  SiRNA target sequence
aaaagaaccctaattgtccaaaac

SEQ ID NO: 43748 - DNA, 24 bp, Artificial sequence
  SiRNA target sequence
aaagaaccctaattgtccaaaact

SEQ ID NO: 43749 - DNA, 24 bp, Artificial sequence
  SiRNA target sequence
aagaaccctaattgtccaaaactt

SEQ ID NO: 43750 - DNA, 24 bp, Artificial sequence
  SiRNA target sequence
agaaccctaattgtccaaaacttg

SEQ ID NO: 43751 - DNA, 24 bp, Artificial sequence
  SiRNA target sequence
gaaccctaattgtccaaaacttga

SEQ ID NO: 43752 - DNA, 24 bp, Artificial sequence
  SiRNA target sequence
aaccctaattgtccaaaacttgaa

SEQ ID NO: 43753 - DNA, 24 bp, Artificial sequence
  SiRNA target sequence
accctaattgtccaaaacttgaat

SEQ ID NO: 43754 - DNA, 24 bp, Artificial sequence
  SiRNA target sequence
ccctaattgtccaaaacttgaata

SEQ ID NO: 43755 - DNA, 24 bp, Artificial sequence
  SiRNA target sequence
cctaattgtccaaaacttgaatac

SEQ ID NO: 43756 - DNA, 24 bp, Artificial sequence
  SiRNA target sequence
ctaattgtccaaaacttgaataca

SEQ ID NO: 43757 - DNA, 24 bp, Artificial sequence
  SiRNA target sequence
taattgtccaaaacttgaatacaa

SEQ ID NO: 43758 - DNA, 24 bp, Artificial sequence
  SiRNA target sequence
aattgtccaaaacttgaatacaat

SEQ ID NO: 43759 - DNA, 24 bp, Artificial sequence
  SiRNA target sequence
attgtccaaaacttgaatacaatg

SEQ ID NO: 43760 - DNA, 24 bp, Artificial sequence
  SiRNA target sequence
ttgtccaaaacttgaatacaatgt

SEQ ID NO: 43761 - DNA, 24 bp, Artificial sequence
  SiRNA target sequence
tgtccaaaacttgaatacaatgtt

SEQ ID NO: 43762 - DNA, 24 bp, Artificial sequence
  SiRNA target sequence
gtccaaaacttgaatacaatgttc

SEQ ID NO: 43763 - DNA, 24 bp, Artificial sequence
  SiRNA target sequence
tccaaaacttgaatacaatgttct

SEQ ID NO: 43764 - DNA, 24 bp, Artificial sequence
  SiRNA target sequence
ccaaaacttgaatacaatgttcta

SEQ ID NO: 43765 - DNA, 24 bp, Artificial sequence
  SiRNA target sequence
caaaacttgaatacaatgttctat

SEQ ID NO: 43766 - DNA, 24 bp, Artificial sequence
  SiRNA target sequence
aaaacttgaatacaatgttctatt

SEQ ID NO: 43767 - DNA, 24 bp, Artificial sequence
  SiRNA target sequence
aaacttgaatacaatgttctatta

SEQ ID NO: 43768 - DNA, 24 bp, Artificial sequence
  SiRNA target sequence
aacttgaatacaatgttctattaa

SEQ ID NO: 43769 - DNA, 24 bp, Artificial sequence
  SiRNA target sequence
acttgaatacaatgttctattaat

SEQ ID NO: 43770 - DNA, 24 bp, Artificial sequence
  SiRNA target sequence
cttgaatacaatgttctattaatg

SEQ ID NO: 43771 - DNA, 24 bp, Artificial sequence
  SiRNA target sequence
ttgaatacaatgttctattaatgc

SEQ ID NO: 43772 - DNA, 24 bp, Artificial sequence
  SiRNA target sequence
tgaatacaatgttctattaatgcc

SEQ ID NO: 43773 - DNA, 24 bp, Artificial sequence
  SiRNA target sequence
gaatacaatgttctattaatgcca

SEQ ID NO: 43774 - DNA, 24 bp, Artificial sequence
  SiRNA target sequence
aatacaatgttctattaatgccaa

SEQ ID NO: 43775 - DNA, 24 bp, Artificial sequence
  SiRNA target sequence
atacaatgttctattaatgccaat

SEQ ID NO: 43776 - DNA, 24 bp, Artificial sequence
  SiRNA target sequence
tacaatgttctattaatgccaata

SEQ ID NO: 43777 - DNA, 24 bp, Artificial sequence
  SiRNA target sequence
acaatgttctattaatgccaatat

SEQ ID NO: 43778 - DNA, 24 bp, Artificial sequence
  SiRNA target sequence
caatgttctattaatgccaatata

SEQ ID NO: 43779 - DNA, 24 bp, Artificial sequence
  SiRNA target sequence
aatgttctattaatgccaatataa

SEQ ID NO: 43780 - DNA, 24 bp, Artificial sequence
  SiRNA target sequence
atgttctattaatgccaatataaa

SEQ ID NO: 43781 - DNA, 24 bp, Artificial sequence
  SiRNA target sequence
tgttctattaatgccaatataaaa

SEQ ID NO: 43782 - DNA, 24 bp, Artificial sequence
  SiRNA target sequence
gttctattaatgccaatataaaat

SEQ ID NO: 43783 - DNA, 24 bp, Artificial sequence
  SiRNA target sequence
ttctattaatgccaatataaaata

SEQ ID NO: 43784 - DNA, 24 bp, Artificial sequence
  SiRNA target sequence
tctattaatgccaatataaaatac

SEQ ID NO: 43785 - DNA, 24 bp, Artificial sequence
  SiRNA target sequence
ctattaatgccaatataaaataca

SEQ ID NO: 43786 - DNA, 24 bp, Artificial sequence
  SiRNA target sequence
tattaatgccaatataaaatacaa

SEQ ID NO: 43787 - DNA, 24 bp, Artificial sequence
  SiRNA target sequence
attaatgccaatataaaatacaac

SEQ ID NO: 43788 - DNA, 24 bp, Artificial sequence
  SiRNA target sequence
ttaatgccaatataaaatacaaca

SEQ ID NO: 43789 - DNA, 24 bp, Artificial sequence
  SiRNA target sequence
taatgccaatataaaatacaacat

SEQ ID NO: 43790 - DNA, 24 bp, Artificial sequence
  SiRNA target sequence
aatgccaatataaaatacaacatc

SEQ ID NO: 43791 - DNA, 24 bp, Artificial sequence
  SiRNA target sequence
atgccaatataaaatacaacatcc

SEQ ID NO: 43792 - DNA, 24 bp, Artificial sequence
  SiRNA target sequence
tgccaatataaaatacaacatccc

SEQ ID NO: 43793 - DNA, 24 bp, Artificial sequence
  SiRNA target sequence
gccaatataaaatacaacatccct

SEQ ID NO: 43794 - DNA, 24 bp, Artificial sequence
  SiRNA target sequence
ccaatataaaatacaacatccctg

SEQ ID NO: 43795 - DNA, 24 bp, Artificial sequence
  SiRNA target sequence
caatataaaatacaacatccctgg

SEQ ID NO: 43796 - DNA, 24 bp, Artificial sequence
  SiRNA target sequence
aatataaaatacaacatccctggc

SEQ ID NO: 43797 - DNA, 24 bp, Artificial sequence
  SiRNA target sequence
atataaaatacaacatccctggca

SEQ ID NO: 43798 - DNA, 24 bp, Artificial sequence
  SiRNA target sequence
tataaaatacaacatccctggcac

SEQ ID NO: 43799 - DNA, 24 bp, Artificial sequence
  SiRNA target sequence
ataaaatacaacatccctggcact

SEQ ID NO: 43800 - DNA, 24 bp, Artificial sequence
  SiRNA target sequence
taaaatacaacatccctggcactt

SEQ ID NO: 43801 - DNA, 24 bp, Artificial sequence
  SiRNA target sequence
aaaatacaacatccctggcactta

SEQ ID NO: 43802 - DNA, 24 bp, Artificial sequence
  SiRNA target sequence
aaatacaacatccctggcacttag

SEQ ID NO: 43803 - DNA, 24 bp, Artificial sequence
  SiRNA target sequence
aatacaacatccctggcacttagt

SEQ ID NO: 43804 - DNA, 24 bp, Artificial sequence
  SiRNA target sequence
atacaacatccctggcacttagtt

SEQ ID NO: 43805 - DNA, 24 bp, Artificial sequence
  SiRNA target sequence
tacaacatccctggcacttagttt

SEQ ID NO: 43806 - DNA, 24 bp, Artificial sequence
  SiRNA target sequence
acaacatccctggcacttagtttt

SEQ ID NO: 43807 - DNA, 24 bp, Artificial sequence
  SiRNA target sequence
caacatccctggcacttagttttg

SEQ ID NO: 43808 - DNA, 24 bp, Artificial sequence
  SiRNA target sequence
aacatccctggcacttagttttgc

SEQ ID NO: 43809 - DNA, 24 bp, Artificial sequence
  SiRNA target sequence
acatccctggcacttagttttgct

SEQ ID NO: 43810 - DNA, 24 bp, Artificial sequence
  SiRNA target sequence
catccctggcacttagttttgctg

SEQ ID NO: 43811 - DNA, 24 bp, Artificial sequence
  SiRNA target sequence
atccctggcacttagttttgctgt

SEQ ID NO: 43812 - DNA, 24 bp, Artificial sequence
  SiRNA target sequence
tccctggcacttagttttgctgtt

SEQ ID NO: 43813 - DNA, 24 bp, Artificial sequence
  SiRNA target sequence
ccctggcacttagttttgctgtta

SEQ ID NO: 43814 - DNA, 24 bp, Artificial sequence
  SiRNA target sequence
cctggcacttagttttgctgttaa

SEQ ID NO: 43815 - DNA, 24 bp, Artificial sequence
  SiRNA target sequence
ctggcacttagttttgctgttaat

SEQ ID NO: 43816 - DNA, 24 bp, Artificial sequence
  SiRNA target sequence
tggcacttagttttgctgttaata

SEQ ID NO: 43817 - DNA, 24 bp, Artificial sequence
  SiRNA target sequence
ggcacttagttttgctgttaatat

SEQ ID NO: 43818 - DNA, 24 bp, Artificial sequence
  SiRNA target sequence
gcacttagttttgctgttaatatt

SEQ ID NO: 43819 - DNA, 24 bp, Artificial sequence
  SiRNA target sequence
cacttagttttgctgttaatattc

SEQ ID NO: 43820 - DNA, 24 bp, Artificial sequence
  SiRNA target sequence
acttagttttgctgttaatattcc

SEQ ID NO: 43821 - DNA, 24 bp, Artificial sequence
  SiRNA target sequence
cttagttttgctgttaatattcca

SEQ ID NO: 43822 - DNA, 24 bp, Artificial sequence
  SiRNA target sequence
ttagttttgctgttaatattccat

SEQ ID NO: 43823 - DNA, 24 bp, Artificial sequence
  SiRNA target sequence
tagttttgctgttaatattccata

SEQ ID NO: 43824 - DNA, 24 bp, Artificial sequence
  SiRNA target sequence
agttttgctgttaatattccatag

SEQ ID NO: 43825 - DNA, 24 bp, Artificial sequence
  SiRNA target sequence
gttttgctgttaatattccatagt

SEQ ID NO: 43826 - DNA, 24 bp, Artificial sequence
  SiRNA target sequence
ttttgctgttaatattccatagtt

SEQ ID NO: 43827 - DNA, 24 bp, Artificial sequence
  SiRNA target sequence
tttgctgttaatattccatagttt

SEQ ID NO: 43828 - DNA, 24 bp, Artificial sequence
  SiRNA target sequence
ttgctgttaatattccatagtttc

SEQ ID NO: 43829 - DNA, 24 bp, Artificial sequence
  SiRNA target sequence
tgctgttaatattccatagtttcc

SEQ ID NO: 43830 - DNA, 24 bp, Artificial sequence
  SiRNA target sequence
gctgttaatattccatagtttcct

SEQ ID NO: 43831 - DNA, 24 bp, Artificial sequence
  SiRNA target sequence
ctgttaatattccatagtttccta

SEQ ID NO: 43832 - DNA, 24 bp, Artificial sequence
  SiRNA target sequence
tgttaatattccatagtttcctaa

SEQ ID NO: 43833 - DNA, 24 bp, Artificial sequence
  SiRNA target sequence
gttaatattccatagtttcctaat

SEQ ID NO: 43834 - DNA, 24 bp, Artificial sequence
  SiRNA target sequence
ttaatattccatagtttcctaatg

SEQ ID NO: 43835 - DNA, 24 bp, Artificial sequence
  SiRNA target sequence
taatattccatagtttcctaatgt

SEQ ID NO: 43836 - DNA, 24 bp, Artificial sequence
  SiRNA target sequence
aatattccatagtttcctaatgtt

SEQ ID NO: 43837 - DNA, 24 bp, Artificial sequence
  SiRNA target sequence
atattccatagtttcctaatgtta

SEQ ID NO: 43838 - DNA, 24 bp, Artificial sequence
  SiRNA target sequence
tattccatagtttcctaatgttat

SEQ ID NO: 43839 - DNA, 24 bp, Artificial sequence
  SiRNA target sequence
attccatagtttcctaatgttata

SEQ ID NO: 43840 - DNA, 24 bp, Artificial sequence
  SiRNA target sequence
ttccatagtttcctaatgttataa

SEQ ID NO: 43841 - DNA, 24 bp, Artificial sequence
  SiRNA target sequence
tccatagtttcctaatgttataac

SEQ ID NO: 43842 - DNA, 24 bp, Artificial sequence
  SiRNA target sequence
ccatagtttcctaatgttataact

SEQ ID NO: 43843 - DNA, 24 bp, Artificial sequence
  SiRNA target sequence
catagtttcctaatgttataacta

SEQ ID NO: 43844 - DNA, 24 bp, Artificial sequence
  SiRNA target sequence
atagtttcctaatgttataactat

SEQ ID NO: 43845 - DNA, 24 bp, Artificial sequence
  SiRNA target sequence
tagtttcctaatgttataactata

SEQ ID NO: 43846 - DNA, 24 bp, Artificial sequence
  SiRNA target sequence
agtttcctaatgttataactataa

SEQ ID NO: 43847 - DNA, 24 bp, Artificial sequence
  SiRNA target sequence
gtttcctaatgttataactataaa

SEQ ID NO: 43848 - DNA, 24 bp, Artificial sequence
  SiRNA target sequence
tttcctaatgttataactataaaa

SEQ ID NO: 43849 - DNA, 24 bp, Artificial sequence
  SiRNA target sequence
ttcctaatgttataactataaaac

SEQ ID NO: 43850 - DNA, 24 bp, Artificial sequence
  SiRNA target sequence
tcctaatgttataactataaaaca

SEQ ID NO: 43851 - DNA, 24 bp, Artificial sequence
  SiRNA target sequence
cctaatgttataactataaaacac

SEQ ID NO: 43852 - DNA, 24 bp, Artificial sequence
  SiRNA target sequence
ctaatgttataactataaaacact

SEQ ID NO: 43853 - DNA, 24 bp, Artificial sequence
  SiRNA target sequence
taatgttataactataaaacactg

SEQ ID NO: 43854 - DNA, 24 bp, Artificial sequence
  SiRNA target sequence
aatgttataactataaaacactgt

SEQ ID NO: 43855 - DNA, 24 bp, Artificial sequence
  SiRNA target sequence
atgttataactataaaacactgta

SEQ ID NO: 43856 - DNA, 24 bp, Artificial sequence
  SiRNA target sequence
tgttataactataaaacactgtaa

SEQ ID NO: 43857 - DNA, 24 bp, Artificial sequence
  SiRNA target sequence
gttataactataaaacactgtaaa

SEQ ID NO: 43858 - DNA, 24 bp, Artificial sequence
  SiRNA target sequence
ttataactataaaacactgtaaag

SEQ ID NO: 43859 - DNA, 24 bp, Artificial sequence
  SiRNA target sequence
tataactataaaacactgtaaagc

SEQ ID NO: 43860 - DNA, 24 bp, Artificial sequence
  SiRNA target sequence
ataactataaaacactgtaaagca

SEQ ID NO: 43861 - DNA, 24 bp, Artificial sequence
  SiRNA target sequence
taactataaaacactgtaaagcaa

SEQ ID NO: 43862 - DNA, 24 bp, Artificial sequence
  SiRNA target sequence
aactataaaacactgtaaagcaaa

SEQ ID NO: 43863 - DNA, 24 bp, Artificial sequence
  SiRNA target sequence
actataaaacactgtaaagcaaaa

SEQ ID NO: 43864 - DNA, 24 bp, Artificial sequence
  SiRNA target sequence
ctataaaacactgtaaagcaaaaa

SEQ ID NO: 43865 - DNA, 24 bp, Artificial sequence
  SiRNA target sequence
tataaaacactgtaaagcaaaaat

SEQ ID NO: 43866 - DNA, 24 bp, Artificial sequence
  SiRNA target sequence
ataaaacactgtaaagcaaaaatt

SEQ ID NO: 43867 - DNA, 24 bp, Artificial sequence
  SiRNA target sequence
taaaacactgtaaagcaaaaatta

SEQ ID NO: 43868 - DNA, 24 bp, Artificial sequence
  SiRNA target sequence
aaaacactgtaaagcaaaaattat

SEQ ID NO: 43869 - DNA, 24 bp, Artificial sequence
  SiRNA target sequence
aaacactgtaaagcaaaaattatc

SEQ ID NO: 43870 - DNA, 24 bp, Artificial sequence
  SiRNA target sequence
aacactgtaaagcaaaaattatct

SEQ ID NO: 43871 - DNA, 24 bp, Artificial sequence
  SiRNA target sequence
acactgtaaagcaaaaattatctt

SEQ ID NO: 43872 - DNA, 24 bp, Artificial sequence
  SiRNA target sequence
cactgtaaagcaaaaattatctta

SEQ ID NO: 43873 - DNA, 24 bp, Artificial sequence
  SiRNA target sequence
actgtaaagcaaaaattatcttat

SEQ ID NO: 43874 - DNA, 24 bp, Artificial sequence
  SiRNA target sequence
ctgtaaagcaaaaattatcttatt

SEQ ID NO: 43875 - DNA, 24 bp, Artificial sequence
  SiRNA target sequence
tgtaaagcaaaaattatcttattt

SEQ ID NO: 43876 - DNA, 24 bp, Artificial sequence
  SiRNA target sequence
gtaaagcaaaaattatcttattta

SEQ ID NO: 43877 - DNA, 24 bp, Artificial sequence
  SiRNA target sequence
taaagcaaaaattatcttatttac

SEQ ID NO: 43878 - DNA, 24 bp, Artificial sequence
  SiRNA target sequence
aaagcaaaaattatcttatttaca

SEQ ID NO: 43879 - DNA, 24 bp, Artificial sequence
  SiRNA target sequence
aagcaaaaattatcttatttacaa

SEQ ID NO: 43880 - DNA, 24 bp, Artificial sequence
  SiRNA target sequence
agcaaaaattatcttatttacaag

SEQ ID NO: 43881 - DNA, 24 bp, Artificial sequence
  SiRNA target sequence
gcaaaaattatcttatttacaagg

SEQ ID NO: 43882 - DNA, 24 bp, Artificial sequence
  SiRNA target sequence
caaaaattatcttatttacaaggt

SEQ ID NO: 43883 - DNA, 24 bp, Artificial sequence
  SiRNA target sequence
aaaaattatcttatttacaaggta

SEQ ID NO: 43884 - DNA, 24 bp, Artificial sequence
  SiRNA target sequence
aaaattatcttatttacaaggtat

SEQ ID NO: 43885 - DNA, 24 bp, Artificial sequence
  SiRNA target sequence
aaattatcttatttacaaggtata

SEQ ID NO: 43886 - DNA, 24 bp, Artificial sequence
  SiRNA target sequence
aattatcttatttacaaggtataa

SEQ ID NO: 43887 - DNA, 24 bp, Artificial sequence
  SiRNA target sequence
attatcttatttacaaggtataaa

SEQ ID NO: 43888 - DNA, 24 bp, Artificial sequence
  SiRNA target sequence
ttatcttatttacaaggtataaaa

SEQ ID NO: 43889 - DNA, 24 bp, Artificial sequence
  SiRNA target sequence
tatcttatttacaaggtataaaaa

SEQ ID NO: 43890 - DNA, 24 bp, Artificial sequence
  SiRNA target sequence
atcttatttacaaggtataaaaaa

SEQ ID NO: 43891 - DNA, 24 bp, Artificial sequence
  SiRNA target sequence
tcttatttacaaggtataaaaaac

SEQ ID NO: 43892 - DNA, 24 bp, Artificial sequence
  SiRNA target sequence
cttatttacaaggtataaaaaact

SEQ ID NO: 43893 - DNA, 24 bp, Artificial sequence
  SiRNA target sequence
ttatttacaaggtataaaaaacta

SEQ ID NO: 43894 - DNA, 24 bp, Artificial sequence
  SiRNA target sequence
tatttacaaggtataaaaaactaa

SEQ ID NO: 43895 - DNA, 24 bp, Artificial sequence
  SiRNA target sequence
atttacaaggtataaaaaactaag

SEQ ID NO: 43896 - DNA, 24 bp, Artificial sequence
  SiRNA target sequence
tttacaaggtataaaaaactaaga

SEQ ID NO: 43897 - DNA, 24 bp, Artificial sequence
  SiRNA target sequence
ttacaaggtataaaaaactaagag

SEQ ID NO: 43898 - DNA, 24 bp, Artificial sequence
  SiRNA target sequence
tacaaggtataaaaaactaagaga

SEQ ID NO: 43899 - DNA, 24 bp, Artificial sequence
  SiRNA target sequence
acaaggtataaaaaactaagagat

SEQ ID NO: 43900 - DNA, 24 bp, Artificial sequence
  SiRNA target sequence
caaggtataaaaaactaagagatc

SEQ ID NO: 43901 - DNA, 24 bp, Artificial sequence
  SiRNA target sequence
aaggtataaaaaactaagagatct

SEQ ID NO: 43902 - DNA, 24 bp, Artificial sequence
  SiRNA target sequence
aggtataaaaaactaagagatctc

SEQ ID NO: 43903 - DNA, 24 bp, Artificial sequence
  SiRNA target sequence
ggtataaaaaactaagagatctcc

SEQ ID NO: 43904 - DNA, 24 bp, Artificial sequence
  SiRNA target sequence
gtataaaaaactaagagatctcca

SEQ ID NO: 43905 - DNA, 24 bp, Artificial sequence
  SiRNA target sequence
tataaaaaactaagagatctccag

SEQ ID NO: 43906 - DNA, 24 bp, Artificial sequence
  SiRNA target sequence
ataaaaaactaagagatctccaga

SEQ ID NO: 43907 - DNA, 24 bp, Artificial sequence
  SiRNA target sequence
taaaaaactaagagatctccagat

SEQ ID NO: 43908 - DNA, 24 bp, Artificial sequence
  SiRNA target sequence
aaaaaactaagagatctccagatt

SEQ ID NO: 43909 - DNA, 24 bp, Artificial sequence
  SiRNA target sequence
aaaaactaagagatctccagattc

SEQ ID NO: 43910 - DNA, 24 bp, Artificial sequence
  SiRNA target sequence
aaaactaagagatctccagattct

SEQ ID NO: 43911 - DNA, 24 bp, Artificial sequence
  SiRNA target sequence
aaactaagagatctccagattctg

SEQ ID NO: 43912 - DNA, 24 bp, Artificial sequence
  SiRNA target sequence
aactaagagatctccagattctgt

SEQ ID NO: 43913 - DNA, 24 bp, Artificial sequence
  SiRNA target sequence
actaagagatctccagattctgtt

SEQ ID NO: 43914 - DNA, 24 bp, Artificial sequence
  SiRNA target sequence
ctaagagatctccagattctgtta

SEQ ID NO: 43915 - DNA, 24 bp, Artificial sequence
  SiRNA target sequence
taagagatctccagattctgttac

SEQ ID NO: 43916 - DNA, 24 bp, Artificial sequence
  SiRNA target sequence
aagagatctccagattctgttaca

SEQ ID NO: 43917 - DNA, 24 bp, Artificial sequence
  SiRNA target sequence
agagatctccagattctgttacat

SEQ ID NO: 43918 - DNA, 24 bp, Artificial sequence
  SiRNA target sequence
gagatctccagattctgttacatt

SEQ ID NO: 43919 - DNA, 24 bp, Artificial sequence
  SiRNA target sequence
agatctccagattctgttacattc

SEQ ID NO: 43920 - DNA, 24 bp, Artificial sequence
  SiRNA target sequence
gatctccagattctgttacattcc

SEQ ID NO: 43921 - DNA, 24 bp, Artificial sequence
  SiRNA target sequence
atctccagattctgttacattccg

SEQ ID NO: 43922 - DNA, 24 bp, Artificial sequence
  SiRNA target sequence
tctccagattctgttacattccga

SEQ ID NO: 43923 - DNA, 24 bp, Artificial sequence
  SiRNA target sequence
ctccagattctgttacattccgat

SEQ ID NO: 43924 - DNA, 24 bp, Artificial sequence
  SiRNA target sequence
tccagattctgttacattccgatt

SEQ ID NO: 43925 - DNA, 24 bp, Artificial sequence
  SiRNA target sequence
ccagattctgttacattccgattc

SEQ ID NO: 43926 - DNA, 24 bp, Artificial sequence
  SiRNA target sequence
cagattctgttacattccgattct

SEQ ID NO: 43927 - DNA, 24 bp, Artificial sequence
  SiRNA target sequence
agattctgttacattccgattcta

SEQ ID NO: 43928 - DNA, 24 bp, Artificial sequence
  SiRNA target sequence
gattctgttacattccgattctac

SEQ ID NO: 43929 - DNA, 24 bp, Artificial sequence
  SiRNA target sequence
attctgttacattccgattctact

SEQ ID NO: 43930 - DNA, 24 bp, Artificial sequence
  SiRNA target sequence
ttctgttacattccgattctactt

SEQ ID NO: 43931 - DNA, 24 bp, Artificial sequence
  SiRNA target sequence
tctgttacattccgattctacttc

SEQ ID NO: 43932 - DNA, 24 bp, Artificial sequence
  SiRNA target sequence
ctgttacattccgattctacttca

SEQ ID NO: 43933 - DNA, 24 bp, Artificial sequence
  SiRNA target sequence
tgttacattccgattctacttcag

SEQ ID NO: 43934 - DNA, 24 bp, Artificial sequence
  SiRNA target sequence
gttacattccgattctacttcaga

SEQ ID NO: 43935 - DNA, 24 bp, Artificial sequence
  SiRNA target sequence
ttacattccgattctacttcagaa

SEQ ID NO: 43936 - DNA, 24 bp, Artificial sequence
  SiRNA target sequence
tacattccgattctacttcagaaa

SEQ ID NO: 43937 - DNA, 24 bp, Artificial sequence
  SiRNA target sequence
acattccgattctacttcagaaac

SEQ ID NO: 43938 - DNA, 24 bp, Artificial sequence
  SiRNA target sequence
cattccgattctacttcagaaaca

SEQ ID NO: 43939 - DNA, 24 bp, Artificial sequence
  SiRNA target sequence
attccgattctacttcagaaacat

SEQ ID NO: 43940 - DNA, 24 bp, Artificial sequence
  SiRNA target sequence
ttccgattctacttcagaaacata

SEQ ID NO: 43941 - DNA, 24 bp, Artificial sequence
  SiRNA target sequence
tccgattctacttcagaaacatat

SEQ ID NO: 43942 - DNA, 24 bp, Artificial sequence
  SiRNA target sequence
ccgattctacttcagaaacatatt

SEQ ID NO: 43943 - DNA, 24 bp, Artificial sequence
  SiRNA target sequence
cgattctacttcagaaacatattt

SEQ ID NO: 43944 - DNA, 24 bp, Artificial sequence
  SiRNA target sequence
gattctacttcagaaacatatttt

SEQ ID NO: 43945 - DNA, 24 bp, Artificial sequence
  SiRNA target sequence
attctacttcagaaacatattttt

SEQ ID NO: 43946 - DNA, 24 bp, Artificial sequence
  SiRNA target sequence
ttctacttcagaaacatatttttc

SEQ ID NO: 43947 - DNA, 24 bp, Artificial sequence
  SiRNA target sequence
tctacttcagaaacatatttttca

SEQ ID NO: 43948 - DNA, 24 bp, Artificial sequence
  SiRNA target sequence
ctacttcagaaacatatttttcat

SEQ ID NO: 43949 - DNA, 24 bp, Artificial sequence
  SiRNA target sequence
tacttcagaaacatatttttcata

SEQ ID NO: 43950 - DNA, 24 bp, Artificial sequence
  SiRNA target sequence
acttcagaaacatatttttcatat

SEQ ID NO: 43951 - DNA, 24 bp, Artificial sequence
  SiRNA target sequence
cttcagaaacatatttttcatatt

SEQ ID NO: 43952 - DNA, 24 bp, Artificial sequence
  SiRNA target sequence
ttcagaaacatatttttcatattt

SEQ ID NO: 43953 - DNA, 24 bp, Artificial sequence
  SiRNA target sequence
tcagaaacatatttttcatattta

SEQ ID NO: 43954 - DNA, 24 bp, Artificial sequence
  SiRNA target sequence
cagaaacatatttttcatatttaa

SEQ ID NO: 43955 - DNA, 24 bp, Artificial sequence
  SiRNA target sequence
agaaacatatttttcatatttaag

SEQ ID NO: 43956 - DNA, 24 bp, Artificial sequence
  SiRNA target sequence
gaaacatatttttcatatttaagc

SEQ ID NO: 43957 - DNA, 24 bp, Artificial sequence
  SiRNA target sequence
aaacatatttttcatatttaagcg

SEQ ID NO: 43958 - DNA, 24 bp, Artificial sequence
  SiRNA target sequence
aacatatttttcatatttaagcga

SEQ ID NO: 43959 - DNA, 24 bp, Artificial sequence
  SiRNA target sequence
acatatttttcatatttaagcgat

SEQ ID NO: 43960 - DNA, 24 bp, Artificial sequence
  SiRNA target sequence
catatttttcatatttaagcgatt

SEQ ID NO: 43961 - DNA, 24 bp, Artificial sequence
  SiRNA target sequence
atatttttcatatttaagcgattc

SEQ ID NO: 43962 - DNA, 24 bp, Artificial sequence
  SiRNA target sequence
tatttttcatatttaagcgattct

SEQ ID NO: 43963 - DNA, 24 bp, Artificial sequence
  SiRNA target sequence
atttttcatatttaagcgattctt

SEQ ID NO: 43964 - DNA, 24 bp, Artificial sequence
  SiRNA target sequence
tttttcatatttaagcgattcttc

SEQ ID NO: 43965 - DNA, 24 bp, Artificial sequence
  SiRNA target sequence
ttttcatatttaagcgattcttct

SEQ ID NO: 43966 - DNA, 24 bp, Artificial sequence
  SiRNA target sequence
tttcatatttaagcgattcttctt

SEQ ID NO: 43967 - DNA, 24 bp, Artificial sequence
  SiRNA target sequence
ttcatatttaagcgattcttcttc

SEQ ID NO: 43968 - DNA, 24 bp, Artificial sequence
  SiRNA target sequence
tcatatttaagcgattcttcttct

SEQ ID NO: 43969 - DNA, 24 bp, Artificial sequence
  SiRNA target sequence
catatttaagcgattcttcttctt

SEQ ID NO: 43970 - DNA, 24 bp, Artificial sequence
  SiRNA target sequence
atatttaagcgattcttcttcttc

SEQ ID NO: 43971 - DNA, 24 bp, Artificial sequence
  SiRNA target sequence
tatttaagcgattcttcttcttct

SEQ ID NO: 43972 - DNA, 24 bp, Artificial sequence
  SiRNA target sequence
atttaagcgattcttcttcttctg

SEQ ID NO: 43973 - DNA, 24 bp, Artificial sequence
  SiRNA target sequence
tttaagcgattcttcttcttctgt

SEQ ID NO: 43974 - DNA, 24 bp, Artificial sequence
  SiRNA target sequence
ttaagcgattcttcttcttctgtt

SEQ ID NO: 43975 - DNA, 24 bp, Artificial sequence
  SiRNA target sequence
taagcgattcttcttcttctgttt

SEQ ID NO: 43976 - DNA, 24 bp, Artificial sequence
  SiRNA target sequence
aagcgattcttcttcttctgtttt

SEQ ID NO: 43977 - DNA, 24 bp, Artificial sequence
  SiRNA target sequence
agcgattcttcttcttctgtttta

SEQ ID NO: 43978 - DNA, 24 bp, Artificial sequence
  SiRNA target sequence
gcgattcttcttcttctgttttat

SEQ ID NO: 43979 - DNA, 24 bp, Artificial sequence
  SiRNA target sequence
cgattcttcttcttctgttttata

SEQ ID NO: 43980 - DNA, 24 bp, Artificial sequence
  SiRNA target sequence
gattcttcttcttctgttttatat

SEQ ID NO: 43981 - DNA, 24 bp, Artificial sequence
  SiRNA target sequence
attcttcttcttctgttttatatg

SEQ ID NO: 43982 - DNA, 24 bp, Artificial sequence
  SiRNA target sequence
ttcttcttcttctgttttatatgc

SEQ ID NO: 43983 - DNA, 24 bp, Artificial sequence
  SiRNA target sequence
tcttcttcttctgttttatatgct

SEQ ID NO: 43984 - DNA, 24 bp, Artificial sequence
  SiRNA target sequence
cttcttcttctgttttatatgcta

SEQ ID NO: 43985 - DNA, 24 bp, Artificial sequence
  SiRNA target sequence
ttcttcttctgttttatatgctag

SEQ ID NO: 43986 - DNA, 24 bp, Artificial sequence
  SiRNA target sequence
tcttcttctgttttatatgctagt

SEQ ID NO: 43987 - DNA, 24 bp, Artificial sequence
  SiRNA target sequence
cttcttctgttttatatgctagta

SEQ ID NO: 43988 - DNA, 24 bp, Artificial sequence
  SiRNA target sequence
ttcttctgttttatatgctagtat

SEQ ID NO: 43989 - DNA, 24 bp, Artificial sequence
  SiRNA target sequence
tcttctgttttatatgctagtata

SEQ ID NO: 43990 - DNA, 24 bp, Artificial sequence
  SiRNA target sequence
cttctgttttatatgctagtatag

SEQ ID NO: 43991 - DNA, 24 bp, Artificial sequence
  SiRNA target sequence
ttctgttttatatgctagtatagt

SEQ ID NO: 43992 - DNA, 24 bp, Artificial sequence
  SiRNA target sequence
tctgttttatatgctagtatagtc

SEQ ID NO: 43993 - DNA, 24 bp, Artificial sequence
  SiRNA target sequence
ctgttttatatgctagtatagtct

SEQ ID NO: 43994 - DNA, 24 bp, Artificial sequence
  SiRNA target sequence
tgttttatatgctagtatagtctc

SEQ ID NO: 43995 - DNA, 24 bp, Artificial sequence
  SiRNA target sequence
gttttatatgctagtatagtctca

SEQ ID NO: 43996 - DNA, 24 bp, Artificial sequence
  SiRNA target sequence
ttttatatgctagtatagtctcat

SEQ ID NO: 43997 - DNA, 24 bp, Artificial sequence
  SiRNA target sequence
tttatatgctagtatagtctcatg

SEQ ID NO: 43998 - DNA, 24 bp, Artificial sequence
  SiRNA target sequence
ttatatgctagtatagtctcatga

SEQ ID NO: 43999 - DNA, 24 bp, Artificial sequence
  SiRNA target sequence
tatatgctagtatagtctcatgat

SEQ ID NO: 44000 - DNA, 24 bp, Artificial sequence
  SiRNA target sequence
atatgctagtatagtctcatgatt

SEQ ID NO: 44001 - DNA, 24 bp, Artificial sequence
  SiRNA target sequence
tatgctagtatagtctcatgatta

SEQ ID NO: 44002 - DNA, 24 bp, Artificial sequence
  SiRNA target sequence
atgctagtatagtctcatgattaa

SEQ ID NO: 44003 - DNA, 24 bp, Artificial sequence
  SiRNA target sequence
tgctagtatagtctcatgattaat

SEQ ID NO: 44004 - DNA, 24 bp, Artificial sequence
  SiRNA target sequence
gctagtatagtctcatgattaatt

SEQ ID NO: 44005 - DNA, 24 bp, Artificial sequence
  SiRNA target sequence
ctagtatagtctcatgattaatta

SEQ ID NO: 44006 - DNA, 24 bp, Artificial sequence
  SiRNA target sequence
tagtatagtctcatgattaattaa

SEQ ID NO: 44007 - DNA, 24 bp, Artificial sequence
  SiRNA target sequence
agtatagtctcatgattaattaaa

SEQ ID NO: 44008 - DNA, 24 bp, Artificial sequence
  SiRNA target sequence
gtatagtctcatgattaattaaag

SEQ ID NO: 44009 - DNA, 24 bp, Artificial sequence
  SiRNA target sequence
tatagtctcatgattaattaaaga

SEQ ID NO: 44010 - DNA, 24 bp, Artificial sequence
  SiRNA target sequence
atagtctcatgattaattaaagaa

SEQ ID NO: 44011 - DNA, 24 bp, Artificial sequence
  SiRNA target sequence
tagtctcatgattaattaaagaat

SEQ ID NO: 44012 - DNA, 24 bp, Artificial sequence
  SiRNA target sequence
agtctcatgattaattaaagaatc

SEQ ID NO: 44013 - DNA, 24 bp, Artificial sequence
  SiRNA target sequence
gtctcatgattaattaaagaatca

SEQ ID NO: 44014 - DNA, 24 bp, Artificial sequence
  SiRNA target sequence
tctcatgattaattaaagaatcat

SEQ ID NO: 44015 - DNA, 24 bp, Artificial sequence
  SiRNA target sequence
ctcatgattaattaaagaatcatg

SEQ ID NO: 44016 - DNA, 24 bp, Artificial sequence
  SiRNA target sequence
tcatgattaattaaagaatcatgt

SEQ ID NO: 44017 - DNA, 24 bp, Artificial sequence
  SiRNA target sequence
catgattaattaaagaatcatgta

SEQ ID NO: 44018 - DNA, 24 bp, Artificial sequence
  SiRNA target sequence
atgattaattaaagaatcatgtaa

SEQ ID NO: 44019 - DNA, 24 bp, Artificial sequence
  SiRNA target sequence
tgattaattaaagaatcatgtaag

SEQ ID NO: 44020 - DNA, 24 bp, Artificial sequence
  SiRNA target sequence
gattaattaaagaatcatgtaagt

SEQ ID NO: 44021 - DNA, 24 bp, Artificial sequence
  SiRNA target sequence
attaattaaagaatcatgtaagtg

SEQ ID NO: 44022 - DNA, 24 bp, Artificial sequence
  SiRNA target sequence
ttaattaaagaatcatgtaagtga

SEQ ID NO: 44023 - DNA, 24 bp, Artificial sequence
  SiRNA target sequence
taattaaagaatcatgtaagtgat

SEQ ID NO: 44024 - DNA, 24 bp, Artificial sequence
  SiRNA target sequence
aattaaagaatcatgtaagtgatt

SEQ ID NO: 44025 - DNA, 24 bp, Artificial sequence
  SiRNA target sequence
attaaagaatcatgtaagtgattt

SEQ ID NO: 44026 - DNA, 24 bp, Artificial sequence
  SiRNA target sequence
ttaaagaatcatgtaagtgatttg

SEQ ID NO: 44027 - DNA, 24 bp, Artificial sequence
  SiRNA target sequence
taaagaatcatgtaagtgatttga

SEQ ID NO: 44028 - DNA, 24 bp, Artificial sequence
  SiRNA target sequence
aaagaatcatgtaagtgatttgag

SEQ ID NO: 44029 - DNA, 24 bp, Artificial sequence
  SiRNA target sequence
aagaatcatgtaagtgatttgagc

SEQ ID NO: 44030 - DNA, 24 bp, Artificial sequence
  SiRNA target sequence
agaatcatgtaagtgatttgagca

SEQ ID NO: 44031 - DNA, 24 bp, Artificial sequence
  SiRNA target sequence
gaatcatgtaagtgatttgagcat

SEQ ID NO: 44032 - DNA, 24 bp, Artificial sequence
  SiRNA target sequence
aatcatgtaagtgatttgagcatc

SEQ ID NO: 44033 - DNA, 24 bp, Artificial sequence
  SiRNA target sequence
atcatgtaagtgatttgagcatct

SEQ ID NO: 44034 - DNA, 24 bp, Artificial sequence
  SiRNA target sequence
tcatgtaagtgatttgagcatctt

SEQ ID NO: 44035 - DNA, 24 bp, Artificial sequence
  SiRNA target sequence
catgtaagtgatttgagcatcttt

SEQ ID NO: 44036 - DNA, 24 bp, Artificial sequence
  SiRNA target sequence
atgtaagtgatttgagcatctttg

SEQ ID NO: 44037 - DNA, 24 bp, Artificial sequence
  SiRNA target sequence
tgtaagtgatttgagcatctttgt

SEQ ID NO: 44038 - DNA, 24 bp, Artificial sequence
  SiRNA target sequence
gtaagtgatttgagcatctttgtt

SEQ ID NO: 44039 - DNA, 24 bp, Artificial sequence
  SiRNA target sequence
taagtgatttgagcatctttgttg

SEQ ID NO: 44040 - DNA, 24 bp, Artificial sequence
  SiRNA target sequence
aagtgatttgagcatctttgttgt

SEQ ID NO: 44041 - DNA, 24 bp, Artificial sequence
  SiRNA target sequence
agtgatttgagcatctttgttgtg

SEQ ID NO: 44042 - DNA, 24 bp, Artificial sequence
  SiRNA target sequence
gtgatttgagcatctttgttgtgc

SEQ ID NO: 44043 - DNA, 24 bp, Artificial sequence
  SiRNA target sequence
tgatttgagcatctttgttgtgcg

SEQ ID NO: 44044 - DNA, 24 bp, Artificial sequence
  SiRNA target sequence
gatttgagcatctttgttgtgcgc

SEQ ID NO: 44045 - DNA, 24 bp, Artificial sequence
  SiRNA target sequence
atttgagcatctttgttgtgcgca

SEQ ID NO: 44046 - DNA, 24 bp, Artificial sequence
  SiRNA target sequence
tttgagcatctttgttgtgcgcaa

SEQ ID NO: 44047 - DNA, 24 bp, Artificial sequence
  SiRNA target sequence
ttgagcatctttgttgtgcgcaat

SEQ ID NO: 44048 - DNA, 24 bp, Artificial sequence
  SiRNA target sequence
tgagcatctttgttgtgcgcaatt

SEQ ID NO: 44049 - DNA, 24 bp, Artificial sequence
  SiRNA target sequence
gagcatctttgttgtgcgcaatta

SEQ ID NO: 44050 - DNA, 24 bp, Artificial sequence
  SiRNA target sequence
agcatctttgttgtgcgcaattat

SEQ ID NO: 44051 - DNA, 24 bp, Artificial sequence
  SiRNA target sequence
gcatctttgttgtgcgcaattata

SEQ ID NO: 44052 - DNA, 24 bp, Artificial sequence
  SiRNA target sequence
catctttgttgtgcgcaattatat

SEQ ID NO: 44053 - DNA, 24 bp, Artificial sequence
  SiRNA target sequence
atctttgttgtgcgcaattatatt

SEQ ID NO: 44054 - DNA, 24 bp, Artificial sequence
  SiRNA target sequence
tctttgttgtgcgcaattatattc

SEQ ID NO: 44055 - DNA, 24 bp, Artificial sequence
  SiRNA target sequence
ctttgttgtgcgcaattatattct

SEQ ID NO: 44056 - DNA, 24 bp, Artificial sequence
  SiRNA target sequence
tttgttgtgcgcaattatattctt

SEQ ID NO: 44057 - DNA, 24 bp, Artificial sequence
  SiRNA target sequence
ttgttgtgcgcaattatattcttt

SEQ ID NO: 44058 - DNA, 24 bp, Artificial sequence
  SiRNA target sequence
tgttgtgcgcaattatattctttt

SEQ ID NO: 44059 - DNA, 24 bp, Artificial sequence
  SiRNA target sequence
gttgtgcgcaattatattcttttc

SEQ ID NO: 44060 - DNA, 24 bp, Artificial sequence
  SiRNA target sequence
ttgtgcgcaattatattcttttct

SEQ ID NO: 44061 - DNA, 24 bp, Artificial sequence
  SiRNA target sequence
tgtgcgcaattatattcttttctt

SEQ ID NO: 44062 - DNA, 24 bp, Artificial sequence
  SiRNA target sequence
gtgcgcaattatattcttttctta

SEQ ID NO: 44063 - DNA, 24 bp, Artificial sequence
  SiRNA target sequence
tgcgcaattatattcttttcttat

SEQ ID NO: 44064 - DNA, 24 bp, Artificial sequence
  SiRNA target sequence
gcgcaattatattcttttcttatt

SEQ ID NO: 44065 - DNA, 24 bp, Artificial sequence
  SiRNA target sequence
cgcaattatattcttttcttattc

SEQ ID NO: 44066 - DNA, 24 bp, Artificial sequence
  SiRNA target sequence
gcaattatattcttttcttattcc

SEQ ID NO: 44067 - DNA, 24 bp, Artificial sequence
  SiRNA target sequence
caattatattcttttcttattcct

SEQ ID NO: 44068 - DNA, 24 bp, Artificial sequence
  SiRNA target sequence
aattatattcttttcttattcctg

SEQ ID NO: 44069 - DNA, 24 bp, Artificial sequence
  SiRNA target sequence
attatattcttttcttattcctgt

SEQ ID NO: 44070 - DNA, 24 bp, Artificial sequence
  SiRNA target sequence
ttatattcttttcttattcctgta

SEQ ID NO: 44071 - DNA, 24 bp, Artificial sequence
  SiRNA target sequence
tatattcttttcttattcctgtac

SEQ ID NO: 44072 - DNA, 24 bp, Artificial sequence
  SiRNA target sequence
atattcttttcttattcctgtacg

SEQ ID NO: 44073 - DNA, 24 bp, Artificial sequence
  SiRNA target sequence
tattcttttcttattcctgtacgc

SEQ ID NO: 44074 - DNA, 24 bp, Artificial sequence
  SiRNA target sequence
attcttttcttattcctgtacgcc

SEQ ID NO: 44075 - DNA, 24 bp, Artificial sequence
  SiRNA target sequence
ttcttttcttattcctgtacgcca

SEQ ID NO: 44076 - DNA, 24 bp, Artificial sequence
  SiRNA target sequence
tcttttcttattcctgtacgccaa

SEQ ID NO: 44077 - DNA, 24 bp, Artificial sequence
  SiRNA target sequence
cttttcttattcctgtacgccaat

SEQ ID NO: 44078 - DNA, 24 bp, Artificial sequence
  SiRNA target sequence
ttttcttattcctgtacgccaatg

SEQ ID NO: 44079 - DNA, 24 bp, Artificial sequence
  SiRNA target sequence
tttcttattcctgtacgccaatga

SEQ ID NO: 44080 - DNA, 24 bp, Artificial sequence
  SiRNA target sequence
ttcttattcctgtacgccaatgaa

SEQ ID NO: 44081 - DNA, 24 bp, Artificial sequence
  SiRNA target sequence
tcttattcctgtacgccaatgaac

SEQ ID NO: 44082 - DNA, 24 bp, Artificial sequence
  SiRNA target sequence
cttattcctgtacgccaatgaact

SEQ ID NO: 44083 - DNA, 24 bp, Artificial sequence
  SiRNA target sequence
ttattcctgtacgccaatgaacta

SEQ ID NO: 44084 - DNA, 24 bp, Artificial sequence
  SiRNA target sequence
tattcctgtacgccaatgaactat

SEQ ID NO: 44085 - DNA, 24 bp, Artificial sequence
  SiRNA target sequence
attcctgtacgccaatgaactatt

SEQ ID NO: 44086 - DNA, 24 bp, Artificial sequence
  SiRNA target sequence
ttcctgtacgccaatgaactattt

SEQ ID NO: 44087 - DNA, 24 bp, Artificial sequence
  SiRNA target sequence
tcctgtacgccaatgaactatttt

SEQ ID NO: 44088 - DNA, 24 bp, Artificial sequence
  SiRNA target sequence
cctgtacgccaatgaactattttc

SEQ ID NO: 44089 - DNA, 24 bp, Artificial sequence
  SiRNA target sequence
ctgtacgccaatgaactattttcg

SEQ ID NO: 44090 - DNA, 24 bp, Artificial sequence
  SiRNA target sequence
tgtacgccaatgaactattttcgc

SEQ ID NO: 44091 - DNA, 24 bp, Artificial sequence
  SiRNA target sequence
gtacgccaatgaactattttcgca

SEQ ID NO: 44092 - DNA, 24 bp, Artificial sequence
  SiRNA target sequence
tacgccaatgaactattttcgcag

SEQ ID NO: 44093 - DNA, 24 bp, Artificial sequence
  SiRNA target sequence
acgccaatgaactattttcgcagt

SEQ ID NO: 44094 - DNA, 24 bp, Artificial sequence
  SiRNA target sequence
cgccaatgaactattttcgcagtt

SEQ ID NO: 44095 - DNA, 24 bp, Artificial sequence
  SiRNA target sequence
gccaatgaactattttcgcagttg

SEQ ID NO: 44096 - DNA, 24 bp, Artificial sequence
  SiRNA target sequence
ccaatgaactattttcgcagttgc

SEQ ID NO: 44097 - DNA, 24 bp, Artificial sequence
  SiRNA target sequence
caatgaactattttcgcagttgca

SEQ ID NO: 44098 - DNA, 24 bp, Artificial sequence
  SiRNA target sequence
aatgaactattttcgcagttgcaa

SEQ ID NO: 44099 - DNA, 24 bp, Artificial sequence
  SiRNA target sequence
atgaactattttcgcagttgcaag

SEQ ID NO: 44100 - DNA, 24 bp, Artificial sequence
  SiRNA target sequence
tgaactattttcgcagttgcaagg

SEQ ID NO: 44101 - DNA, 24 bp, Artificial sequence
  SiRNA target sequence
gaactattttcgcagttgcaagga

SEQ ID NO: 44102 - DNA, 24 bp, Artificial sequence
  SiRNA target sequence
aactattttcgcagttgcaaggat

SEQ ID NO: 44103 - DNA, 24 bp, Artificial sequence
  SiRNA target sequence
actattttcgcagttgcaaggatg

SEQ ID NO: 44104 - DNA, 24 bp, Artificial sequence
  SiRNA target sequence
ctattttcgcagttgcaaggatgt

SEQ ID NO: 44105 - DNA, 24 bp, Artificial sequence
  SiRNA target sequence
tattttcgcagttgcaaggatgta

SEQ ID NO: 44106 - DNA, 24 bp, Artificial sequence
  SiRNA target sequence
attttcgcagttgcaaggatgtaa

SEQ ID NO: 44107 - DNA, 24 bp, Artificial sequence
  SiRNA target sequence
ttttcgcagttgcaaggatgtaaa

SEQ ID NO: 44108 - DNA, 24 bp, Artificial sequence
  SiRNA target sequence
tttcgcagttgcaaggatgtaaac

SEQ ID NO: 44109 - DNA, 24 bp, Artificial sequence
  SiRNA target sequence
ttcgcagttgcaaggatgtaaact

SEQ ID NO: 44110 - DNA, 24 bp, Artificial sequence
  SiRNA target sequence
tcgcagttgcaaggatgtaaacta

SEQ ID NO: 44111 - DNA, 24 bp, Artificial sequence
  SiRNA target sequence
cgcagttgcaaggatgtaaactaa

SEQ ID NO: 44112 - DNA, 24 bp, Artificial sequence
  SiRNA target sequence
gcagttgcaaggatgtaaactaat

SEQ ID NO: 44113 - DNA, 24 bp, Artificial sequence
  SiRNA target sequence
cagttgcaaggatgtaaactaata

SEQ ID NO: 44114 - DNA, 24 bp, Artificial sequence
  SiRNA target sequence
agttgcaaggatgtaaactaataa

SEQ ID NO: 44115 - DNA, 24 bp, Artificial sequence
  SiRNA target sequence
gttgcaaggatgtaaactaataat

SEQ ID NO: 44116 - DNA, 24 bp, Artificial sequence
  SiRNA target sequence
ttgcaaggatgtaaactaataatg

SEQ ID NO: 44117 - DNA, 24 bp, Artificial sequence
  SiRNA target sequence
tgcaaggatgtaaactaataatgt

SEQ ID NO: 44118 - DNA, 24 bp, Artificial sequence
  SiRNA target sequence
gcaaggatgtaaactaataatgtg

SEQ ID NO: 44119 - DNA, 24 bp, Artificial sequence
  SiRNA target sequence
caaggatgtaaactaataatgtga

SEQ ID NO: 44120 - DNA, 24 bp, Artificial sequence
  SiRNA target sequence
aaggatgtaaactaataatgtgat

SEQ ID NO: 44121 - DNA, 24 bp, Artificial sequence
  SiRNA target sequence
aggatgtaaactaataatgtgatt

SEQ ID NO: 44122 - DNA, 24 bp, Artificial sequence
  SiRNA target sequence
ggatgtaaactaataatgtgatta

SEQ ID NO: 44123 - DNA, 24 bp, Artificial sequence
  SiRNA target sequence
gatgtaaactaataatgtgattaa

SEQ ID NO: 44124 - DNA, 24 bp, Artificial sequence
  SiRNA target sequence
atgtaaactaataatgtgattaaa

SEQ ID NO: 44125 - DNA, 24 bp, Artificial sequence
  SiRNA target sequence
tgtaaactaataatgtgattaaaa

SEQ ID NO: 44126 - DNA, 24 bp, Artificial sequence
  SiRNA target sequence
gtaaactaataatgtgattaaaat

SEQ ID NO: 44127 - DNA, 24 bp, Artificial sequence
  SiRNA target sequence
taaactaataatgtgattaaaata

SEQ ID NO: 44128 - DNA, 24 bp, Artificial sequence
  SiRNA target sequence
aaactaataatgtgattaaaataa

SEQ ID NO: 44129 - DNA, 24 bp, Artificial sequence
  SiRNA target sequence
aactaataatgtgattaaaataat

SEQ ID NO: 44130 - DNA, 24 bp, Artificial sequence
  SiRNA target sequence
actaataatgtgattaaaataata

SEQ ID NO: 44131 - DNA, 24 bp, Artificial sequence
  SiRNA target sequence
ctaataatgtgattaaaataataa

SEQ ID NO: 44132 - DNA, 24 bp, Artificial sequence
  SiRNA target sequence
taataatgtgattaaaataataaa

SEQ ID NO: 44133 - DNA, 24 bp, Artificial sequence
  SiRNA target sequence
aataatgtgattaaaataataaac

SEQ ID NO: 44134 - DNA, 24 bp, Artificial sequence
  SiRNA target sequence
ataatgtgattaaaataataaaca

SEQ ID NO: 44135 - DNA, 24 bp, Artificial sequence
  SiRNA target sequence
taatgtgattaaaataataaacat

SEQ ID NO: 44136 - DNA, 24 bp, Artificial sequence
  SiRNA target sequence
aatgtgattaaaataataaacata

SEQ ID NO: 44137 - DNA, 24 bp, Artificial sequence
  SiRNA target sequence
atgtgattaaaataataaacatat

SEQ ID NO: 44138 - DNA, 24 bp, Artificial sequence
  SiRNA target sequence
tgtgattaaaataataaacatatt

SEQ ID NO: 44139 - DNA, 24 bp, Artificial sequence
  SiRNA target sequence
gtgattaaaataataaacatattt

SEQ ID NO: 44140 - DNA, 24 bp, Artificial sequence
  SiRNA target sequence
tgattaaaataataaacatatttg

SEQ ID NO: 44141 - DNA, 24 bp, Artificial sequence
  SiRNA target sequence
gattaaaataataaacatatttgt

SEQ ID NO: 44142 - DNA, 24 bp, Artificial sequence
  SiRNA target sequence
attaaaataataaacatatttgtc

SEQ ID NO: 44143 - DNA, 24 bp, Artificial sequence
  SiRNA target sequence
ttaaaataataaacatatttgtca

SEQ ID NO: 44144 - DNA, 24 bp, Artificial sequence
  SiRNA target sequence
taaaataataaacatatttgtcaa

SEQ ID NO: 44145 - DNA, 24 bp, Artificial sequence
  SiRNA target sequence
aaaataataaacatatttgtcaac

SEQ ID NO: 44146 - DNA, 24 bp, Artificial sequence
  SiRNA target sequence
aaataataaacatatttgtcaacc

SEQ ID NO: 44147 - DNA, 24 bp, Artificial sequence
  SiRNA target sequence
aataataaacatatttgtcaaccc

SEQ ID NO: 44148 - DNA, 24 bp, Artificial sequence
  SiRNA target sequence
ataataaacatatttgtcaaccct

SEQ ID NO: 44149 - DNA, 24 bp, Artificial sequence
  SiRNA target sequence
taataaacatatttgtcaacccta

SEQ ID NO: 44150 - DNA, 24 bp, Artificial sequence
  SiRNA target sequence
aataaacatatttgtcaaccctaa

SEQ ID NO: 44151 - DNA, 24 bp, Artificial sequence
  SiRNA target sequence
ataaacatatttgtcaaccctaaa

SEQ ID NO: 44152 - DNA, 24 bp, Artificial sequence
  SiRNA target sequence
taaacatatttgtcaaccctaaat

SEQ ID NO: 44153 - DNA, 24 bp, Artificial sequence
  SiRNA target sequence
aaacatatttgtcaaccctaaatt

SEQ ID NO: 44154 - DNA, 24 bp, Artificial sequence
  SiRNA target sequence
aacatatttgtcaaccctaaattt

SEQ ID NO: 44155 - DNA, 24 bp, Artificial sequence
  SiRNA target sequence
acatatttgtcaaccctaaatttg

SEQ ID NO: 44156 - DNA, 24 bp, Artificial sequence
  SiRNA target sequence
catatttgtcaaccctaaatttgt

SEQ ID NO: 44157 - DNA, 24 bp, Artificial sequence
  SiRNA target sequence
atatttgtcaaccctaaatttgta

SEQ ID NO: 44158 - DNA, 24 bp, Artificial sequence
  SiRNA target sequence
tatttgtcaaccctaaatttgtat

SEQ ID NO: 44159 - DNA, 24 bp, Artificial sequence
  SiRNA target sequence
atttgtcaaccctaaatttgtata

SEQ ID NO: 44160 - DNA, 24 bp, Artificial sequence
  SiRNA target sequence
tttgtcaaccctaaatttgtataa

SEQ ID NO: 44161 - DNA, 24 bp, Artificial sequence
  SiRNA target sequence
ttgtcaaccctaaatttgtataaa

SEQ ID NO: 44162 - DNA, 24 bp, Artificial sequence
  SiRNA target sequence
tgtcaaccctaaatttgtataaat

SEQ ID NO: 44163 - DNA, 24 bp, Artificial sequence
  SiRNA target sequence
gtcaaccctaaatttgtataaatt

SEQ ID NO: 44164 - DNA, 24 bp, Artificial sequence
  SiRNA target sequence
tcaaccctaaatttgtataaattg

SEQ ID NO: 44165 - DNA, 24 bp, Artificial sequence
  SiRNA target sequence
caaccctaaatttgtataaattga

SEQ ID NO: 44166 - DNA, 24 bp, Artificial sequence
  SiRNA target sequence
aaccctaaatttgtataaattgac

SEQ ID NO: 44167 - DNA, 24 bp, Artificial sequence
  SiRNA target sequence
accctaaatttgtataaattgacg

SEQ ID NO: 44168 - DNA, 24 bp, Artificial sequence
  SiRNA target sequence
ccctaaatttgtataaattgacga

SEQ ID NO: 44169 - DNA, 24 bp, Artificial sequence
  SiRNA target sequence
cctaaatttgtataaattgacgaa

SEQ ID NO: 44170 - DNA, 24 bp, Artificial sequence
  SiRNA target sequence
ctaaatttgtataaattgacgaac

SEQ ID NO: 44171 - DNA, 24 bp, Artificial sequence
  SiRNA target sequence
taaatttgtataaattgacgaaca

SEQ ID NO: 44172 - DNA, 24 bp, Artificial sequence
  SiRNA target sequence
aaatttgtataaattgacgaacac

SEQ ID NO: 44173 - DNA, 24 bp, Artificial sequence
  SiRNA target sequence
aatttgtataaattgacgaacacg

SEQ ID NO: 44174 - DNA, 24 bp, Artificial sequence
  SiRNA target sequence
atttgtataaattgacgaacacgc

SEQ ID NO: 44175 - DNA, 24 bp, Artificial sequence
  SiRNA target sequence
tttgtataaattgacgaacacgcc

SEQ ID NO: 44176 - DNA, 24 bp, Artificial sequence
  SiRNA target sequence
ttgtataaattgacgaacacgcca

SEQ ID NO: 44177 - DNA, 24 bp, Artificial sequence
  SiRNA target sequence
tgtataaattgacgaacacgccaa

SEQ ID NO: 44178 - DNA, 24 bp, Artificial sequence
  SiRNA target sequence
gtataaattgacgaacacgccaat

SEQ ID NO: 44179 - DNA, 24 bp, Artificial sequence
  SiRNA target sequence
tataaattgacgaacacgccaata

SEQ ID NO: 44180 - DNA, 24 bp, Artificial sequence
  SiRNA target sequence
ataaattgacgaacacgccaatat

SEQ ID NO: 44181 - DNA, 24 bp, Artificial sequence
  SiRNA target sequence
taaattgacgaacacgccaatata

SEQ ID NO: 44182 - DNA, 24 bp, Artificial sequence
  SiRNA target sequence
aaattgacgaacacgccaatataa

SEQ ID NO: 44183 - DNA, 24 bp, Artificial sequence
  SiRNA target sequence
aattgacgaacacgccaatataac

SEQ ID NO: 44184 - DNA, 24 bp, Artificial sequence
  SiRNA target sequence
attgacgaacacgccaatataact

SEQ ID NO: 44185 - DNA, 24 bp, Artificial sequence
  SiRNA target sequence
ttgacgaacacgccaatataactg

SEQ ID NO: 44186 - DNA, 24 bp, Artificial sequence
  SiRNA target sequence
tgacgaacacgccaatataactgt

SEQ ID NO: 44187 - DNA, 24 bp, Artificial sequence
  SiRNA target sequence
gacgaacacgccaatataactgta

SEQ ID NO: 44188 - DNA, 24 bp, Artificial sequence
  SiRNA target sequence
acgaacacgccaatataactgtaa

SEQ ID NO: 44189 - DNA, 24 bp, Artificial sequence
  SiRNA target sequence
cgaacacgccaatataactgtaaa

SEQ ID NO: 44190 - DNA, 24 bp, Artificial sequence
  SiRNA target sequence
gaacacgccaatataactgtaaaa

SEQ ID NO: 44191 - DNA, 24 bp, Artificial sequence
  SiRNA target sequence
aacacgccaatataactgtaaaaa

SEQ ID NO: 44192 - DNA, 24 bp, Artificial sequence
  SiRNA target sequence
acacgccaatataactgtaaaaaa

SEQ ID NO: 44193 - DNA, 24 bp, Artificial sequence
  SiRNA target sequence
cacgccaatataactgtaaaaaaa

SEQ ID NO: 44194 - DNA, 24 bp, Artificial sequence
  SiRNA target sequence
acgccaatataactgtaaaaaaaa

SEQ ID NO: 44195 - DNA, 24 bp, Artificial sequence
  SiRNA target sequence
cgccaatataactgtaaaaaaaat

SEQ ID NO: 44196 - DNA, 24 bp, Artificial sequence
  SiRNA target sequence
gccaatataactgtaaaaaaaata

SEQ ID NO: 44197 - DNA, 24 bp, Artificial sequence
  SiRNA target sequence
ccaatataactgtaaaaaaaatat

SEQ ID NO: 44198 - DNA, 24 bp, Artificial sequence
  SiRNA target sequence
caatataactgtaaaaaaaatatt

SEQ ID NO: 44199 - DNA, 24 bp, Artificial sequence
  SiRNA target sequence
aatataactgtaaaaaaaatattt

SEQ ID NO: 44200 - DNA, 24 bp, Artificial sequence
  SiRNA target sequence
atataactgtaaaaaaaatattta

SEQ ID NO: 44201 - DNA, 24 bp, Artificial sequence
  SiRNA target sequence
tataactgtaaaaaaaatatttat

SEQ ID NO: 44202 - DNA, 24 bp, Artificial sequence
  SiRNA target sequence
ataactgtaaaaaaaatatttatg

SEQ ID NO: 44203 - DNA, 24 bp, Artificial sequence
  SiRNA target sequence
taactgtaaaaaaaatatttatga

SEQ ID NO: 44204 - DNA, 24 bp, Artificial sequence
  SiRNA target sequence
aactgtaaaaaaaatatttatgat

SEQ ID NO: 44205 - DNA, 24 bp, Artificial sequence
  SiRNA target sequence
actgtaaaaaaaatatttatgata

SEQ ID NO: 44206 - DNA, 24 bp, Artificial sequence
  SiRNA target sequence
ctgtaaaaaaaatatttatgatat

SEQ ID NO: 44207 - DNA, 24 bp, Artificial sequence
  SiRNA target sequence
tgtaaaaaaaatatttatgatatt

SEQ ID NO: 44208 - DNA, 24 bp, Artificial sequence
  SiRNA target sequence
gtaaaaaaaatatttatgatatta

SEQ ID NO: 44209 - DNA, 24 bp, Artificial sequence
  SiRNA target sequence
taaaaaaaatatttatgatattaa

SEQ ID NO: 44210 - DNA, 24 bp, Artificial sequence
  SiRNA target sequence
aaaaaaaatatttatgatattaac

SEQ ID NO: 44211 - DNA, 24 bp, Artificial sequence
  SiRNA target sequence
aaaaaaatatttatgatattaaca

SEQ ID NO: 44212 - DNA, 24 bp, Artificial sequence
  SiRNA target sequence
aaaaaatatttatgatattaacaa

SEQ ID NO: 44213 - DNA, 24 bp, Artificial sequence
  SiRNA target sequence
aaaaatatttatgatattaacaaa

SEQ ID NO: 44214 - DNA, 24 bp, Artificial sequence
  SiRNA target sequence
aaaatatttatgatattaacaaat

SEQ ID NO: 44215 - DNA, 24 bp, Artificial sequence
  SiRNA target sequence
aaatatttatgatattaacaaata

SEQ ID NO: 44216 - DNA, 24 bp, Artificial sequence
  SiRNA target sequence
aatatttatgatattaacaaataa

SEQ ID NO: 44217 - DNA, 24 bp, Artificial sequence
  SiRNA target sequence
atatttatgatattaacaaataaa

SEQ ID NO: 44218 - DNA, 24 bp, Artificial sequence
  SiRNA target sequence
tatttatgatattaacaaataaaa

SEQ ID NO: 44219 - DNA, 24 bp, Artificial sequence
  SiRNA target sequence
atttatgatattaacaaataaaac

SEQ ID NO: 44220 - DNA, 24 bp, Artificial sequence
  SiRNA target sequence
tttatgatattaacaaataaaact

SEQ ID NO: 44221 - DNA, 24 bp, Artificial sequence
  SiRNA target sequence
ttatgatattaacaaataaaactt

SEQ ID NO: 44222 - DNA, 24 bp, Artificial sequence
  SiRNA target sequence
tatgatattaacaaataaaacttc

SEQ ID NO: 44223 - DNA, 24 bp, Artificial sequence
  SiRNA target sequence
atgatattaacaaataaaacttcg

SEQ ID NO: 44224 - DNA, 24 bp, Artificial sequence
  SiRNA target sequence
tgatattaacaaataaaacttcga

SEQ ID NO: 44225 - DNA, 24 bp, Artificial sequence
  SiRNA target sequence
gatattaacaaataaaacttcgat

SEQ ID NO: 44226 - DNA, 24 bp, Artificial sequence
  SiRNA target sequence
atattaacaaataaaacttcgatc

SEQ ID NO: 44227 - DNA, 24 bp, Artificial sequence
  SiRNA target sequence
tattaacaaataaaacttcgatca

SEQ ID NO: 44228 - DNA, 24 bp, Artificial sequence
  SiRNA target sequence
attaacaaataaaacttcgatcaa

SEQ ID NO: 44229 - DNA, 24 bp, Artificial sequence
  SiRNA target sequence
ttaacaaataaaacttcgatcaat

SEQ ID NO: 44230 - DNA, 24 bp, Artificial sequence
  SiRNA target sequence
taacaaataaaacttcgatcaatt

SEQ ID NO: 44231 - DNA, 24 bp, Artificial sequence
  SiRNA target sequence
aacaaataaaacttcgatcaattc

SEQ ID NO: 44232 - DNA, 24 bp, Artificial sequence
  SiRNA target sequence
acaaataaaacttcgatcaattca

SEQ ID NO: 44233 - DNA, 24 bp, Artificial sequence
  SiRNA target sequence
caaataaaacttcgatcaattcac

SEQ ID NO: 44234 - DNA, 24 bp, Artificial sequence
  SiRNA target sequence
aaataaaacttcgatcaattcact

SEQ ID NO: 44235 - DNA, 24 bp, Artificial sequence
  SiRNA target sequence
aataaaacttcgatcaattcactt

SEQ ID NO: 44236 - DNA, 24 bp, Artificial sequence
  SiRNA target sequence
ataaaacttcgatcaattcactta

SEQ ID NO: 44237 - DNA, 24 bp, Artificial sequence
  SiRNA target sequence
taaaacttcgatcaattcacttat

SEQ ID NO: 44238 - DNA, 24 bp, Artificial sequence
  SiRNA target sequence
aaaacttcgatcaattcacttatt

SEQ ID NO: 44239 - DNA, 24 bp, Artificial sequence
  SiRNA target sequence
aaacttcgatcaattcacttattg

SEQ ID NO: 44240 - DNA, 24 bp, Artificial sequence
  SiRNA target sequence
aacttcgatcaattcacttattgc

SEQ ID NO: 44241 - DNA, 24 bp, Artificial sequence
  SiRNA target sequence
acttcgatcaattcacttattgct

SEQ ID NO: 44242 - DNA, 24 bp, Artificial sequence
  SiRNA target sequence
cttcgatcaattcacttattgctt

SEQ ID NO: 44243 - DNA, 24 bp, Artificial sequence
  SiRNA target sequence
ttcgatcaattcacttattgcttt

SEQ ID NO: 44244 - DNA, 24 bp, Artificial sequence
  SiRNA target sequence
tcgatcaattcacttattgcttta

SEQ ID NO: 44245 - DNA, 24 bp, Artificial sequence
  SiRNA target sequence
cgatcaattcacttattgctttac

SEQ ID NO: 44246 - DNA, 24 bp, Artificial sequence
  SiRNA target sequence
gatcaattcacttattgctttact

SEQ ID NO: 44247 - DNA, 24 bp, Artificial sequence
  SiRNA target sequence
atcaattcacttattgctttactt

SEQ ID NO: 44248 - DNA, 24 bp, Artificial sequence
  SiRNA target sequence
tcaattcacttattgctttacttt

SEQ ID NO: 44249 - DNA, 24 bp, Artificial sequence
  SiRNA target sequence
caattcacttattgctttactttc

SEQ ID NO: 44250 - DNA, 24 bp, Artificial sequence
  SiRNA target sequence
aattcacttattgctttactttct

SEQ ID NO: 44251 - DNA, 24 bp, Artificial sequence
  SiRNA target sequence
attcacttattgctttactttctc

SEQ ID NO: 44252 - DNA, 24 bp, Artificial sequence
  SiRNA target sequence
ttcacttattgctttactttctcg

SEQ ID NO: 44253 - DNA, 24 bp, Artificial sequence
  SiRNA target sequence
tcacttattgctttactttctcgg

SEQ ID NO: 44254 - DNA, 24 bp, Artificial sequence
  SiRNA target sequence
cacttattgctttactttctcggt

SEQ ID NO: 44255 - DNA, 24 bp, Artificial sequence
  SiRNA target sequence
acttattgctttactttctcggtc

SEQ ID NO: 44256 - DNA, 24 bp, Artificial sequence
  SiRNA target sequence
cttattgctttactttctcggtct

SEQ ID NO: 44257 - DNA, 24 bp, Artificial sequence
  SiRNA target sequence
ttattgctttactttctcggtcta

SEQ ID NO: 44258 - DNA, 24 bp, Artificial sequence
  SiRNA target sequence
tattgctttactttctcggtctat

SEQ ID NO: 44259 - DNA, 24 bp, Artificial sequence
  SiRNA target sequence
attgctttactttctcggtctatt

SEQ ID NO: 44260 - DNA, 24 bp, Artificial sequence
  SiRNA target sequence
ttgctttactttctcggtctatta

SEQ ID NO: 44261 - DNA, 24 bp, Artificial sequence
  SiRNA target sequence
tgctttactttctcggtctattat

SEQ ID NO: 44262 - DNA, 24 bp, Artificial sequence
  SiRNA target sequence
gctttactttctcggtctattatt

SEQ ID NO: 44263 - DNA, 24 bp, Artificial sequence
  SiRNA target sequence
ctttactttctcggtctattattg

SEQ ID NO: 44264 - DNA, 24 bp, Artificial sequence
  SiRNA target sequence
tttactttctcggtctattattgt

SEQ ID NO: 44265 - DNA, 24 bp, Artificial sequence
  SiRNA target sequence
ttactttctcggtctattattgtt

SEQ ID NO: 44266 - DNA, 24 bp, Artificial sequence
  SiRNA target sequence
tactttctcggtctattattgttt

SEQ ID NO: 44267 - DNA, 24 bp, Artificial sequence
  SiRNA target sequence
actttctcggtctattattgtttg

SEQ ID NO: 44268 - DNA, 24 bp, Artificial sequence
  SiRNA target sequence
ctttctcggtctattattgtttgt

SEQ ID NO: 44269 - DNA, 24 bp, Artificial sequence
  SiRNA target sequence
tttctcggtctattattgtttgta

SEQ ID NO: 44270 - DNA, 24 bp, Artificial sequence
  SiRNA target sequence
ttctcggtctattattgtttgtat

SEQ ID NO: 44271 - DNA, 24 bp, Artificial sequence
  SiRNA target sequence
tctcggtctattattgtttgtatt

SEQ ID NO: 44272 - DNA, 24 bp, Artificial sequence
  SiRNA target sequence
ctcggtctattattgtttgtattt

SEQ ID NO: 44273 - DNA, 24 bp, Artificial sequence
  SiRNA target sequence
tcggtctattattgtttgtatttc

SEQ ID NO: 44274 - DNA, 24 bp, Artificial sequence
  SiRNA target sequence
cggtctattattgtttgtatttca

SEQ ID NO: 44275 - DNA, 24 bp, Artificial sequence
  SiRNA target sequence
ggtctattattgtttgtatttcac

SEQ ID NO: 44276 - DNA, 24 bp, Artificial sequence
  SiRNA target sequence
gtctattattgtttgtatttcacc

SEQ ID NO: 44277 - DNA, 24 bp, Artificial sequence
  SiRNA target sequence
tctattattgtttgtatttcaccg

SEQ ID NO: 44278 - DNA, 24 bp, Artificial sequence
  SiRNA target sequence
ctattattgtttgtatttcaccgc

SEQ ID NO: 44279 - DNA, 24 bp, Artificial sequence
  SiRNA target sequence
tattattgtttgtatttcaccgca

SEQ ID NO: 44280 - DNA, 24 bp, Artificial sequence
  SiRNA target sequence
attattgtttgtatttcaccgcat

SEQ ID NO: 44281 - DNA, 24 bp, Artificial sequence
  SiRNA target sequence
ttattgtttgtatttcaccgcatc

SEQ ID NO: 44282 - DNA, 24 bp, Artificial sequence
  SiRNA target sequence
tattgtttgtatttcaccgcatcc

SEQ ID NO: 44283 - DNA, 24 bp, Artificial sequence
  SiRNA target sequence
attgtttgtatttcaccgcatcct

SEQ ID NO: 44284 - DNA, 24 bp, Artificial sequence
  SiRNA target sequence
ttgtttgtatttcaccgcatccta

SEQ ID NO: 44285 - DNA, 24 bp, Artificial sequence
  SiRNA target sequence
tgtttgtatttcaccgcatcctat

SEQ ID NO: 44286 - DNA, 24 bp, Artificial sequence
  SiRNA target sequence
gtttgtatttcaccgcatcctatt

SEQ ID NO: 44287 - DNA, 24 bp, Artificial sequence
  SiRNA target sequence
tttgtatttcaccgcatcctattt

SEQ ID NO: 44288 - DNA, 24 bp, Artificial sequence
  SiRNA target sequence
ttgtatttcaccgcatcctatttt

SEQ ID NO: 44289 - DNA, 24 bp, Artificial sequence
  SiRNA target sequence
tgtatttcaccgcatcctatttta

SEQ ID NO: 44290 - DNA, 24 bp, Artificial sequence
  SiRNA target sequence
gtatttcaccgcatcctattttat

SEQ ID NO: 44291 - DNA, 24 bp, Artificial sequence
  SiRNA target sequence
tatttcaccgcatcctattttatt

SEQ ID NO: 44292 - DNA, 24 bp, Artificial sequence
  SiRNA target sequence
atttcaccgcatcctattttattg

SEQ ID NO: 44293 - DNA, 24 bp, Artificial sequence
  SiRNA target sequence
tttcaccgcatcctattttattgt

SEQ ID NO: 44294 - DNA, 24 bp, Artificial sequence
  SiRNA target sequence
ttcaccgcatcctattttattgta

SEQ ID NO: 44295 - DNA, 24 bp, Artificial sequence
  SiRNA target sequence
tcaccgcatcctattttattgtat

SEQ ID NO: 44296 - DNA, 24 bp, Artificial sequence
  SiRNA target sequence
caccgcatcctattttattgtatc

SEQ ID NO: 44297 - DNA, 24 bp, Artificial sequence
  SiRNA target sequence
accgcatcctattttattgtatct

SEQ ID NO: 44298 - DNA, 24 bp, Artificial sequence
  SiRNA target sequence
ccgcatcctattttattgtatcta

SEQ ID NO: 44299 - DNA, 24 bp, Artificial sequence
  SiRNA target sequence
cgcatcctattttattgtatctac

SEQ ID NO: 44300 - DNA, 24 bp, Artificial sequence
  SiRNA target sequence
gcatcctattttattgtatctact

SEQ ID NO: 44301 - DNA, 24 bp, Artificial sequence
  SiRNA target sequence
catcctattttattgtatctacta

SEQ ID NO: 44302 - DNA, 24 bp, Artificial sequence
  SiRNA target sequence
atcctattttattgtatctactaa

SEQ ID NO: 44303 - DNA, 24 bp, Artificial sequence
  SiRNA target sequence
tcctattttattgtatctactaag

SEQ ID NO: 44304 - DNA, 24 bp, Artificial sequence
  SiRNA target sequence
cctattttattgtatctactaagt

SEQ ID NO: 44305 - DNA, 24 bp, Artificial sequence
  SiRNA target sequence
ctattttattgtatctactaagtt

SEQ ID NO: 44306 - DNA, 24 bp, Artificial sequence
  SiRNA target sequence
tattttattgtatctactaagttc

SEQ ID NO: 44307 - DNA, 24 bp, Artificial sequence
  SiRNA target sequence
attttattgtatctactaagttcc

SEQ ID NO: 44308 - DNA, 24 bp, Artificial sequence
  SiRNA target sequence
ttttattgtatctactaagttcca

SEQ ID NO: 44309 - DNA, 24 bp, Artificial sequence
  SiRNA target sequence
tttattgtatctactaagttccat

SEQ ID NO: 44310 - DNA, 24 bp, Artificial sequence
  SiRNA target sequence
ttattgtatctactaagttccata

SEQ ID NO: 44311 - DNA, 24 bp, Artificial sequence
  SiRNA target sequence
tattgtatctactaagttccatat

SEQ ID NO: 44312 - DNA, 24 bp, Artificial sequence
  SiRNA target sequence
attgtatctactaagttccatatt

SEQ ID NO: 44313 - DNA, 24 bp, Artificial sequence
  SiRNA target sequence
ttgtatctactaagttccatattt

SEQ ID NO: 44314 - DNA, 24 bp, Artificial sequence
  SiRNA target sequence
tgtatctactaagttccatattta

SEQ ID NO: 44315 - DNA, 24 bp, Artificial sequence
  SiRNA target sequence
gtatctactaagttccatatttat

SEQ ID NO: 44316 - DNA, 24 bp, Artificial sequence
  SiRNA target sequence
tatctactaagttccatatttata

SEQ ID NO: 44317 - DNA, 24 bp, Artificial sequence
  SiRNA target sequence
atctactaagttccatatttataa

SEQ ID NO: 44318 - DNA, 24 bp, Artificial sequence
  SiRNA target sequence
tctactaagttccatatttataaa

SEQ ID NO: 44319 - DNA, 24 bp, Artificial sequence
  SiRNA target sequence
ctactaagttccatatttataaaa

SEQ ID NO: 44320 - DNA, 24 bp, Artificial sequence
  SiRNA target sequence
tactaagttccatatttataaaat

SEQ ID NO: 44321 - DNA, 24 bp, Artificial sequence
  SiRNA target sequence
actaagttccatatttataaaatt

SEQ ID NO: 44322 - DNA, 24 bp, Artificial sequence
  SiRNA target sequence
ctaagttccatatttataaaattt

SEQ ID NO: 44323 - DNA, 24 bp, Artificial sequence
  SiRNA target sequence
taagttccatatttataaaatttt

SEQ ID NO: 44324 - DNA, 24 bp, Artificial sequence
  SiRNA target sequence
aagttccatatttataaaattttt

SEQ ID NO: 44325 - DNA, 24 bp, Artificial sequence
  SiRNA target sequence
agttccatatttataaaattttta

SEQ ID NO: 44326 - DNA, 24 bp, Artificial sequence
  SiRNA target sequence
gttccatatttataaaatttttaa

SEQ ID NO: 44327 - DNA, 24 bp, Artificial sequence
  SiRNA target sequence
ttccatatttataaaatttttaaa

SEQ ID NO: 44328 - DNA, 24 bp, Artificial sequence
  SiRNA target sequence
tccatatttataaaatttttaaat

SEQ ID NO: 44329 - DNA, 24 bp, Artificial sequence
  SiRNA target sequence
ccatatttataaaatttttaaatg

SEQ ID NO: 44330 - DNA, 24 bp, Artificial sequence
  SiRNA target sequence
catatttataaaatttttaaatga

SEQ ID NO: 44331 - DNA, 24 bp, Artificial sequence
  SiRNA target sequence
atatttataaaatttttaaatgaa

SEQ ID NO: 44332 - DNA, 24 bp, Artificial sequence
  SiRNA target sequence
tatttataaaatttttaaatgaat

SEQ ID NO: 44333 - DNA, 24 bp, Artificial sequence
  SiRNA target sequence
atttataaaatttttaaatgaatt

SEQ ID NO: 44334 - DNA, 24 bp, Artificial sequence
  SiRNA target sequence
tttataaaatttttaaatgaattt

SEQ ID NO: 44335 - DNA, 24 bp, Artificial sequence
  SiRNA target sequence
ttataaaatttttaaatgaatttt

SEQ ID NO: 44336 - DNA, 24 bp, Artificial sequence
  SiRNA target sequence
tataaaatttttaaatgaattttt

SEQ ID NO: 44337 - DNA, 24 bp, Artificial sequence
  SiRNA target sequence
ataaaatttttaaatgaatttttt

SEQ ID NO: 44338 - DNA, 24 bp, Artificial sequence
  SiRNA target sequence
taaaatttttaaatgaattttttc

SEQ ID NO: 44339 - DNA, 24 bp, Artificial sequence
  SiRNA target sequence
aaaatttttaaatgaattttttcc

SEQ ID NO: 44340 - DNA, 24 bp, Artificial sequence
  SiRNA target sequence
aaatttttaaatgaattttttcct

SEQ ID NO: 44341 - DNA, 24 bp, Artificial sequence
  SiRNA target sequence
aatttttaaatgaattttttcctg

SEQ ID NO: 44342 - DNA, 24 bp, Artificial sequence
  SiRNA target sequence
atttttaaatgaattttttcctgt

SEQ ID NO: 44343 - DNA, 24 bp, Artificial sequence
  SiRNA target sequence
tttttaaatgaattttttcctgtc

SEQ ID NO: 44344 - DNA, 24 bp, Artificial sequence
  SiRNA target sequence
ttttaaatgaattttttcctgtca

SEQ ID NO: 44345 - DNA, 24 bp, Artificial sequence
  SiRNA target sequence
tttaaatgaattttttcctgtcag

SEQ ID NO: 44346 - DNA, 24 bp, Artificial sequence
  SiRNA target sequence
ttaaatgaattttttcctgtcagt

SEQ ID NO: 44347 - DNA, 24 bp, Artificial sequence
  SiRNA target sequence
taaatgaattttttcctgtcagtc

SEQ ID NO: 44348 - DNA, 24 bp, Artificial sequence
  SiRNA target sequence
aaatgaattttttcctgtcagtct

SEQ ID NO: 44349 - DNA, 24 bp, Artificial sequence
  SiRNA target sequence
aatgaattttttcctgtcagtctg

SEQ ID NO: 44350 - DNA, 24 bp, Artificial sequence
  SiRNA target sequence
atgaattttttcctgtcagtctga

SEQ ID NO: 44351 - DNA, 24 bp, Artificial sequence
  SiRNA target sequence
tgaattttttcctgtcagtctgaa

SEQ ID NO: 44352 - DNA, 24 bp, Artificial sequence
  SiRNA target sequence
gaattttttcctgtcagtctgaat

SEQ ID NO: 44353 - DNA, 24 bp, Artificial sequence
  SiRNA target sequence
aattttttcctgtcagtctgaata

SEQ ID NO: 44354 - DNA, 24 bp, Artificial sequence
  SiRNA target sequence
attttttcctgtcagtctgaatac

SEQ ID NO: 44355 - DNA, 24 bp, Artificial sequence
  SiRNA target sequence
ttttttcctgtcagtctgaataca

SEQ ID NO: 44356 - DNA, 24 bp, Artificial sequence
  SiRNA target sequence
tttttcctgtcagtctgaatacat

SEQ ID NO: 44357 - DNA, 24 bp, Artificial sequence
  SiRNA target sequence
ttttcctgtcagtctgaatacatg

SEQ ID NO: 44358 - DNA, 24 bp, Artificial sequence
  SiRNA target sequence
tttcctgtcagtctgaatacatgt

SEQ ID NO: 44359 - DNA, 24 bp, Artificial sequence
  SiRNA target sequence
ttcctgtcagtctgaatacatgtt

SEQ ID NO: 44360 - DNA, 24 bp, Artificial sequence
  SiRNA target sequence
tcctgtcagtctgaatacatgttg

SEQ ID NO: 44361 - DNA, 24 bp, Artificial sequence
  SiRNA target sequence
cctgtcagtctgaatacatgttga

SEQ ID NO: 44362 - DNA, 24 bp, Artificial sequence
  SiRNA target sequence
ctgtcagtctgaatacatgttgaa

SEQ ID NO: 44363 - DNA, 24 bp, Artificial sequence
  SiRNA target sequence
tgtcagtctgaatacatgttgaac

SEQ ID NO: 44364 - DNA, 24 bp, Artificial sequence
  SiRNA target sequence
gtcagtctgaatacatgttgaacg

SEQ ID NO: 44365 - DNA, 24 bp, Artificial sequence
  SiRNA target sequence
tcagtctgaatacatgttgaacgg

SEQ ID NO: 44366 - DNA, 24 bp, Artificial sequence
  SiRNA target sequence
cagtctgaatacatgttgaacggg

SEQ ID NO: 44367 - DNA, 24 bp, Artificial sequence
  SiRNA target sequence
agtctgaatacatgttgaacgggt

SEQ ID NO: 44368 - DNA, 24 bp, Artificial sequence
  SiRNA target sequence
gtctgaatacatgttgaacgggtg

SEQ ID NO: 44369 - DNA, 24 bp, Artificial sequence
  SiRNA target sequence
tctgaatacatgttgaacgggtgt

SEQ ID NO: 44370 - DNA, 24 bp, Artificial sequence
  SiRNA target sequence
ctgaatacatgttgaacgggtgta

SEQ ID NO: 44371 - DNA, 24 bp, Artificial sequence
  SiRNA target sequence
tgaatacatgttgaacgggtgtaa

SEQ ID NO: 44372 - DNA, 24 bp, Artificial sequence
  SiRNA target sequence
gaatacatgttgaacgggtgtaac

SEQ ID NO: 44373 - DNA, 24 bp, Artificial sequence
  SiRNA target sequence
aatacatgttgaacgggtgtaaca

SEQ ID NO: 44374 - DNA, 24 bp, Artificial sequence
  SiRNA target sequence
atacatgttgaacgggtgtaacaa

SEQ ID NO: 44375 - DNA, 24 bp, Artificial sequence
  SiRNA target sequence
tacatgttgaacgggtgtaacaaa

SEQ ID NO: 44376 - DNA, 24 bp, Artificial sequence
  SiRNA target sequence
acatgttgaacgggtgtaacaaat

SEQ ID NO: 44377 - DNA, 24 bp, Artificial sequence
  SiRNA target sequence
catgttgaacgggtgtaacaaata

SEQ ID NO: 44378 - DNA, 24 bp, Artificial sequence
  SiRNA target sequence
atgttgaacgggtgtaacaaatat

SEQ ID NO: 44379 - DNA, 24 bp, Artificial sequence
  SiRNA target sequence
tgttgaacgggtgtaacaaatata

SEQ ID NO: 44380 - DNA, 24 bp, Artificial sequence
  SiRNA target sequence
gttgaacgggtgtaacaaatataa

SEQ ID NO: 44381 - DNA, 24 bp, Artificial sequence
  SiRNA target sequence
ttgaacgggtgtaacaaatataaa

SEQ ID NO: 44382 - DNA, 24 bp, Artificial sequence
  SiRNA target sequence
tgaacgggtgtaacaaatataaaa

SEQ ID NO: 44383 - DNA, 24 bp, Artificial sequence
  SiRNA target sequence
gaacgggtgtaacaaatataaaat

SEQ ID NO: 44384 - DNA, 24 bp, Artificial sequence
  SiRNA target sequence
aacgggtgtaacaaatataaaatt

SEQ ID NO: 44385 - DNA, 24 bp, Artificial sequence
  SiRNA target sequence
acgggtgtaacaaatataaaattg

SEQ ID NO: 44386 - DNA, 24 bp, Artificial sequence
  SiRNA target sequence
cgggtgtaacaaatataaaattgt

SEQ ID NO: 44387 - DNA, 24 bp, Artificial sequence
  SiRNA target sequence
gggtgtaacaaatataaaattgtt

SEQ ID NO: 44388 - DNA, 24 bp, Artificial sequence
  SiRNA target sequence
ggtgtaacaaatataaaattgtta

SEQ ID NO: 44389 - DNA, 24 bp, Artificial sequence
  SiRNA target sequence
gtgtaacaaatataaaattgttaa

SEQ ID NO: 44390 - DNA, 24 bp, Artificial sequence
  SiRNA target sequence
tgtaacaaatataaaattgttaag

SEQ ID NO: 44391 - DNA, 24 bp, Artificial sequence
  SiRNA target sequence
gtaacaaatataaaattgttaagt

SEQ ID NO: 44392 - DNA, 24 bp, Artificial sequence
  SiRNA target sequence
taacaaatataaaattgttaagtt

SEQ ID NO: 44393 - DNA, 24 bp, Artificial sequence
  SiRNA target sequence
aacaaatataaaattgttaagttc

SEQ ID NO: 44394 - DNA, 24 bp, Artificial sequence
  SiRNA target sequence
acaaatataaaattgttaagttct

SEQ ID NO: 44395 - DNA, 24 bp, Artificial sequence
  SiRNA target sequence
caaatataaaattgttaagttctg

SEQ ID NO: 44396 - DNA, 24 bp, Artificial sequence
  SiRNA target sequence
aaatataaaattgttaagttctga

SEQ ID NO: 44397 - DNA, 24 bp, Artificial sequence
  SiRNA target sequence
aatataaaattgttaagttctgac

SEQ ID NO: 44398 - DNA, 24 bp, Artificial sequence
  SiRNA target sequence
atataaaattgttaagttctgaca

SEQ ID NO: 44399 - DNA, 24 bp, Artificial sequence
  SiRNA target sequence
tataaaattgttaagttctgacat

SEQ ID NO: 44400 - DNA, 24 bp, Artificial sequence
  SiRNA target sequence
ataaaattgttaagttctgacatt

SEQ ID NO: 44401 - DNA, 24 bp, Artificial sequence
  SiRNA target sequence
taaaattgttaagttctgacattg

SEQ ID NO: 44402 - DNA, 24 bp, Artificial sequence
  SiRNA target sequence
aaaattgttaagttctgacattgt

SEQ ID NO: 44403 - DNA, 24 bp, Artificial sequence
  SiRNA target sequence
aaattgttaagttctgacattgta

SEQ ID NO: 44404 - DNA, 24 bp, Artificial sequence
  SiRNA target sequence
aattgttaagttctgacattgtaa

SEQ ID NO: 44405 - DNA, 24 bp, Artificial sequence
  SiRNA target sequence
attgttaagttctgacattgtaat

SEQ ID NO: 44406 - DNA, 24 bp, Artificial sequence
  SiRNA target sequence
ttgttaagttctgacattgtaatt

SEQ ID NO: 44407 - DNA, 24 bp, Artificial sequence
  SiRNA target sequence
tgttaagttctgacattgtaattg

SEQ ID NO: 44408 - DNA, 24 bp, Artificial sequence
  SiRNA target sequence
gttaagttctgacattgtaattga

SEQ ID NO: 44409 - DNA, 24 bp, Artificial sequence
  SiRNA target sequence
ttaagttctgacattgtaattgat

SEQ ID NO: 44410 - DNA, 24 bp, Artificial sequence
  SiRNA target sequence
taagttctgacattgtaattgata

SEQ ID NO: 44411 - DNA, 24 bp, Artificial sequence
  SiRNA target sequence
aagttctgacattgtaattgatac

SEQ ID NO: 44412 - DNA, 24 bp, Artificial sequence
  SiRNA target sequence
agttctgacattgtaattgataca

SEQ ID NO: 44413 - DNA, 24 bp, Artificial sequence
  SiRNA target sequence
gttctgacattgtaattgatacaa

SEQ ID NO: 44414 - DNA, 24 bp, Artificial sequence
  SiRNA target sequence
ttctgacattgtaattgatacaat

SEQ ID NO: 44415 - DNA, 24 bp, Artificial sequence
  SiRNA target sequence
tctgacattgtaattgatacaatt

SEQ ID NO: 44416 - DNA, 24 bp, Artificial sequence
  SiRNA target sequence
ctgacattgtaattgatacaattg

SEQ ID NO: 44417 - DNA, 24 bp, Artificial sequence
  SiRNA target sequence
tgacattgtaattgatacaattgt

SEQ ID NO: 44418 - DNA, 24 bp, Artificial sequence
  SiRNA target sequence
gacattgtaattgatacaattgtc

SEQ ID NO: 44419 - DNA, 24 bp, Artificial sequence
  SiRNA target sequence
acattgtaattgatacaattgtca

SEQ ID NO: 44420 - DNA, 24 bp, Artificial sequence
  SiRNA target sequence
cattgtaattgatacaattgtcaa

SEQ ID NO: 44421 - DNA, 24 bp, Artificial sequence
  SiRNA target sequence
attgtaattgatacaattgtcaaa

SEQ ID NO: 44422 - DNA, 24 bp, Artificial sequence
  SiRNA target sequence
ttgtaattgatacaattgtcaaaa

SEQ ID NO: 44423 - DNA, 24 bp, Artificial sequence
  SiRNA target sequence
tgtaattgatacaattgtcaaaac

SEQ ID NO: 44424 - DNA, 24 bp, Artificial sequence
  SiRNA target sequence
gtaattgatacaattgtcaaaact

SEQ ID NO: 44425 - DNA, 24 bp, Artificial sequence
  SiRNA target sequence
taattgatacaattgtcaaaactg

SEQ ID NO: 44426 - DNA, 24 bp, Artificial sequence
  SiRNA target sequence
aattgatacaattgtcaaaactgc

SEQ ID NO: 44427 - DNA, 24 bp, Artificial sequence
  SiRNA target sequence
attgatacaattgtcaaaactgca

SEQ ID NO: 44428 - DNA, 24 bp, Artificial sequence
  SiRNA target sequence
ttgatacaattgtcaaaactgcaa

SEQ ID NO: 44429 - DNA, 24 bp, Artificial sequence
  SiRNA target sequence
tgatacaattgtcaaaactgcaaa

SEQ ID NO: 44430 - DNA, 24 bp, Artificial sequence
  SiRNA target sequence
gatacaattgtcaaaactgcaaaa

SEQ ID NO: 44431 - DNA, 24 bp, Artificial sequence
  SiRNA target sequence
atacaattgtcaaaactgcaaaat

SEQ ID NO: 44432 - DNA, 24 bp, Artificial sequence
  SiRNA target sequence
tacaattgtcaaaactgcaaaata

SEQ ID NO: 44433 - DNA, 24 bp, Artificial sequence
  SiRNA target sequence
acaattgtcaaaactgcaaaatac

SEQ ID NO: 44434 - DNA, 24 bp, Artificial sequence
  SiRNA target sequence
caattgtcaaaactgcaaaataca

SEQ ID NO: 44435 - DNA, 24 bp, Artificial sequence
  SiRNA target sequence
aattgtcaaaactgcaaaatacaa

SEQ ID NO: 44436 - DNA, 24 bp, Artificial sequence
  SiRNA target sequence
attgtcaaaactgcaaaatacaaa

SEQ ID NO: 44437 - DNA, 24 bp, Artificial sequence
  SiRNA target sequence
ttgtcaaaactgcaaaatacaaaa

SEQ ID NO: 44438 - DNA, 24 bp, Artificial sequence
  SiRNA target sequence
tgtcaaaactgcaaaatacaaaag

SEQ ID NO: 44439 - DNA, 24 bp, Artificial sequence
  SiRNA target sequence
gtcaaaactgcaaaatacaaaaga

SEQ ID NO: 44440 - DNA, 24 bp, Artificial sequence
  SiRNA target sequence
tcaaaactgcaaaatacaaaagac

SEQ ID NO: 44441 - DNA, 24 bp, Artificial sequence
  SiRNA target sequence
caaaactgcaaaatacaaaagact

SEQ ID NO: 44442 - DNA, 24 bp, Artificial sequence
  SiRNA target sequence
aaaactgcaaaatacaaaagactt

SEQ ID NO: 44443 - DNA, 24 bp, Artificial sequence
  SiRNA target sequence
aaactgcaaaatacaaaagacttt

SEQ ID NO: 44444 - DNA, 24 bp, Artificial sequence
  SiRNA target sequence
aactgcaaaatacaaaagactttg

SEQ ID NO: 44445 - DNA, 24 bp, Artificial sequence
  SiRNA target sequence
actgcaaaatacaaaagactttga

SEQ ID NO: 44446 - DNA, 24 bp, Artificial sequence
  SiRNA target sequence
ctgcaaaatacaaaagactttgac

SEQ ID NO: 44447 - DNA, 24 bp, Artificial sequence
  SiRNA target sequence
tgcaaaatacaaaagactttgact

SEQ ID NO: 44448 - DNA, 24 bp, Artificial sequence
  SiRNA target sequence
gcaaaatacaaaagactttgacta

SEQ ID NO: 44449 - DNA, 24 bp, Artificial sequence
  SiRNA target sequence
caaaatacaaaagactttgactaa

SEQ ID NO: 44450 - DNA, 24 bp, Artificial sequence
  SiRNA target sequence
aaaatacaaaagactttgactaag

SEQ ID NO: 44451 - DNA, 24 bp, Artificial sequence
  SiRNA target sequence
aaatacaaaagactttgactaaga

SEQ ID NO: 44452 - DNA, 24 bp, Artificial sequence
  SiRNA target sequence
aatacaaaagactttgactaagat

SEQ ID NO: 44453 - DNA, 24 bp, Artificial sequence
  SiRNA target sequence
atacaaaagactttgactaagatc

SEQ ID NO: 44454 - DNA, 24 bp, Artificial sequence
  SiRNA target sequence
tacaaaagactttgactaagatct

SEQ ID NO: 44455 - DNA, 24 bp, Artificial sequence
  SiRNA target sequence
acaaaagactttgactaagatctt

SEQ ID NO: 44456 - DNA, 24 bp, Artificial sequence
  SiRNA target sequence
caaaagactttgactaagatcttt

SEQ ID NO: 44457 - DNA, 24 bp, Artificial sequence
  SiRNA target sequence
aaaagactttgactaagatcttta

SEQ ID NO: 44458 - DNA, 24 bp, Artificial sequence
  SiRNA target sequence
aaagactttgactaagatctttat

SEQ ID NO: 44459 - DNA, 24 bp, Artificial sequence
  SiRNA target sequence
aagactttgactaagatctttatt

SEQ ID NO: 44460 - DNA, 24 bp, Artificial sequence
  SiRNA target sequence
agactttgactaagatctttatta

SEQ ID NO: 44461 - DNA, 24 bp, Artificial sequence
  SiRNA target sequence
gactttgactaagatctttattat

SEQ ID NO: 44462 - DNA, 24 bp, Artificial sequence
  SiRNA target sequence
actttgactaagatctttattatc

SEQ ID NO: 44463 - DNA, 24 bp, Artificial sequence
  SiRNA target sequence
ctttgactaagatctttattatct

SEQ ID NO: 44464 - DNA, 24 bp, Artificial sequence
  SiRNA target sequence
tttgactaagatctttattatctg

SEQ ID NO: 44465 - DNA, 24 bp, Artificial sequence
  SiRNA target sequence
ttgactaagatctttattatctgt

SEQ ID NO: 44466 - DNA, 24 bp, Artificial sequence
  SiRNA target sequence
tgactaagatctttattatctgta

SEQ ID NO: 44467 - DNA, 24 bp, Artificial sequence
  SiRNA target sequence
gactaagatctttattatctgtaa

SEQ ID NO: 44468 - DNA, 24 bp, Artificial sequence
  SiRNA target sequence
actaagatctttattatctgtaat

SEQ ID NO: 44469 - DNA, 24 bp, Artificial sequence
  SiRNA target sequence
ctaagatctttattatctgtaata

SEQ ID NO: 44470 - DNA, 24 bp, Artificial sequence
  SiRNA target sequence
taagatctttattatctgtaatat

SEQ ID NO: 44471 - DNA, 24 bp, Artificial sequence
  SiRNA target sequence
aagatctttattatctgtaatatc

SEQ ID NO: 44472 - DNA, 24 bp, Artificial sequence
  SiRNA target sequence
agatctttattatctgtaatatca

SEQ ID NO: 44473 - DNA, 24 bp, Artificial sequence
  SiRNA target sequence
gatctttattatctgtaatatcac

SEQ ID NO: 44474 - DNA, 24 bp, Artificial sequence
  SiRNA target sequence
atctttattatctgtaatatcact

SEQ ID NO: 44475 - DNA, 24 bp, Artificial sequence
  SiRNA target sequence
tctttattatctgtaatatcacta

SEQ ID NO: 44476 - DNA, 24 bp, Artificial sequence
  SiRNA target sequence
ctttattatctgtaatatcactag

SEQ ID NO: 44477 - DNA, 24 bp, Artificial sequence
  SiRNA target sequence
tttattatctgtaatatcactagt

SEQ ID NO: 44478 - DNA, 24 bp, Artificial sequence
  SiRNA target sequence
ttattatctgtaatatcactagtc

SEQ ID NO: 44479 - DNA, 24 bp, Artificial sequence
  SiRNA target sequence
tattatctgtaatatcactagtca

SEQ ID NO: 44480 - DNA, 24 bp, Artificial sequence
  SiRNA target sequence
attatctgtaatatcactagtcaa

SEQ ID NO: 44481 - DNA, 24 bp, Artificial sequence
  SiRNA target sequence
ttatctgtaatatcactagtcaat

SEQ ID NO: 44482 - DNA, 24 bp, Artificial sequence
  SiRNA target sequence
tatctgtaatatcactagtcaatt

SEQ ID NO: 44483 - DNA, 24 bp, Artificial sequence
  SiRNA target sequence
atctgtaatatcactagtcaattt

SEQ ID NO: 44484 - DNA, 24 bp, Artificial sequence
  SiRNA target sequence
tctgtaatatcactagtcaatttc

SEQ ID NO: 44485 - DNA, 24 bp, Artificial sequence
  SiRNA target sequence
ctgtaatatcactagtcaatttcc

SEQ ID NO: 44486 - DNA, 24 bp, Artificial sequence
  SiRNA target sequence
tgtaatatcactagtcaatttccg

SEQ ID NO: 44487 - DNA, 24 bp, Artificial sequence
  SiRNA target sequence
gtaatatcactagtcaatttccgg

SEQ ID NO: 44488 - DNA, 24 bp, Artificial sequence
  SiRNA target sequence
taatatcactagtcaatttccggg

SEQ ID NO: 44489 - DNA, 24 bp, Artificial sequence
  SiRNA target sequence
aatatcactagtcaatttccgggt

SEQ ID NO: 44490 - DNA, 24 bp, Artificial sequence
  SiRNA target sequence
atatcactagtcaatttccgggta

SEQ ID NO: 44491 - DNA, 24 bp, Artificial sequence
  SiRNA target sequence
tatcactagtcaatttccgggtag

SEQ ID NO: 44492 - DNA, 24 bp, Artificial sequence
  SiRNA target sequence
atcactagtcaatttccgggtagc

SEQ ID NO: 44493 - DNA, 24 bp, Artificial sequence
  SiRNA target sequence
tcactagtcaatttccgggtagct

SEQ ID NO: 44494 - DNA, 24 bp, Artificial sequence
  SiRNA target sequence
cactagtcaatttccgggtagctt

SEQ ID NO: 44495 - DNA, 24 bp, Artificial sequence
  SiRNA target sequence
actagtcaatttccgggtagcttc

SEQ ID NO: 44496 - DNA, 24 bp, Artificial sequence
  SiRNA target sequence
ctagtcaatttccgggtagcttca

SEQ ID NO: 44497 - DNA, 24 bp, Artificial sequence
  SiRNA target sequence
tagtcaatttccgggtagcttcaa

SEQ ID NO: 44498 - DNA, 24 bp, Artificial sequence
  SiRNA target sequence
agtcaatttccgggtagcttcaac

SEQ ID NO: 44499 - DNA, 24 bp, Artificial sequence
  SiRNA target sequence
gtcaatttccgggtagcttcaact

SEQ ID NO: 44500 - DNA, 24 bp, Artificial sequence
  SiRNA target sequence
tcaatttccgggtagcttcaactg

SEQ ID NO: 44501 - DNA, 24 bp, Artificial sequence
  SiRNA target sequence
caatttccgggtagcttcaactgt

SEQ ID NO: 44502 - DNA, 24 bp, Artificial sequence
  SiRNA target sequence
aatttccgggtagcttcaactgtt

SEQ ID NO: 44503 - DNA, 24 bp, Artificial sequence
  SiRNA target sequence
atttccgggtagcttcaactgtta

SEQ ID NO: 44504 - DNA, 24 bp, Artificial sequence
  SiRNA target sequence
tttccgggtagcttcaactgttaa

SEQ ID NO: 44505 - DNA, 24 bp, Artificial sequence
  SiRNA target sequence
ttccgggtagcttcaactgttaaa

SEQ ID NO: 44506 - DNA, 24 bp, Artificial sequence
  SiRNA target sequence
tccgggtagcttcaactgttaaaa

SEQ ID NO: 44507 - DNA, 24 bp, Artificial sequence
  SiRNA target sequence
ccgggtagcttcaactgttaaaac

SEQ ID NO: 44508 - DNA, 24 bp, Artificial sequence
  SiRNA target sequence
cgggtagcttcaactgttaaaaca

SEQ ID NO: 44509 - DNA, 24 bp, Artificial sequence
  SiRNA target sequence
gggtagcttcaactgttaaaacat

SEQ ID NO: 44510 - DNA, 24 bp, Artificial sequence
  SiRNA target sequence
ggtagcttcaactgttaaaacatt

SEQ ID NO: 44511 - DNA, 24 bp, Artificial sequence
  SiRNA target sequence
gtagcttcaactgttaaaacatta

SEQ ID NO: 44512 - DNA, 24 bp, Artificial sequence
  SiRNA target sequence
tagcttcaactgttaaaacattaa

SEQ ID NO: 44513 - DNA, 24 bp, Artificial sequence
  SiRNA target sequence
agcttcaactgttaaaacattaaa

SEQ ID NO: 44514 - DNA, 24 bp, Artificial sequence
  SiRNA target sequence
gcttcaactgttaaaacattaaat

SEQ ID NO: 44515 - DNA, 24 bp, Artificial sequence
  SiRNA target sequence
cttcaactgttaaaacattaaatg

SEQ ID NO: 44516 - DNA, 24 bp, Artificial sequence
  SiRNA target sequence
ttcaactgttaaaacattaaatgt

SEQ ID NO: 44517 - DNA, 24 bp, Artificial sequence
  SiRNA target sequence
tcaactgttaaaacattaaatgta

SEQ ID NO: 44518 - DNA, 24 bp, Artificial sequence
  SiRNA target sequence
caactgttaaaacattaaatgtac

SEQ ID NO: 44519 - DNA, 24 bp, Artificial sequence
  SiRNA target sequence
aactgttaaaacattaaatgtaca

SEQ ID NO: 44520 - DNA, 24 bp, Artificial sequence
  SiRNA target sequence
actgttaaaacattaaatgtacaa

SEQ ID NO: 44521 - DNA, 24 bp, Artificial sequence
  SiRNA target sequence
ctgttaaaacattaaatgtacaaa

SEQ ID NO: 44522 - DNA, 24 bp, Artificial sequence
  SiRNA target sequence
tgttaaaacattaaatgtacaaac

SEQ ID NO: 44523 - DNA, 24 bp, Artificial sequence
  SiRNA target sequence
gttaaaacattaaatgtacaaact

SEQ ID NO: 44524 - DNA, 24 bp, Artificial sequence
  SiRNA target sequence
ttaaaacattaaatgtacaaactg

SEQ ID NO: 44525 - DNA, 24 bp, Artificial sequence
  SiRNA target sequence
taaaacattaaatgtacaaactgc

SEQ ID NO: 44526 - DNA, 24 bp, Artificial sequence
  SiRNA target sequence
aaaacattaaatgtacaaactgca

SEQ ID NO: 44527 - DNA, 24 bp, Artificial sequence
  SiRNA target sequence
aaacattaaatgtacaaactgcaa

SEQ ID NO: 44528 - DNA, 24 bp, Artificial sequence
  SiRNA target sequence
aacattaaatgtacaaactgcaaa

SEQ ID NO: 44529 - DNA, 24 bp, Artificial sequence
  SiRNA target sequence
acattaaatgtacaaactgcaaat

SEQ ID NO: 44530 - DNA, 24 bp, Artificial sequence
  SiRNA target sequence
cattaaatgtacaaactgcaaatg

SEQ ID NO: 44531 - DNA, 24 bp, Artificial sequence
  SiRNA target sequence
attaaatgtacaaactgcaaatgt

SEQ ID NO: 44532 - DNA, 24 bp, Artificial sequence
  SiRNA target sequence
ttaaatgtacaaactgcaaatgtc

SEQ ID NO: 44533 - DNA, 24 bp, Artificial sequence
  SiRNA target sequence
taaatgtacaaactgcaaatgtcc

SEQ ID NO: 44534 - DNA, 24 bp, Artificial sequence
  SiRNA target sequence
aaatgtacaaactgcaaatgtccc

SEQ ID NO: 44535 - DNA, 24 bp, Artificial sequence
  SiRNA target sequence
aatgtacaaactgcaaatgtccca

SEQ ID NO: 44536 - DNA, 24 bp, Artificial sequence
  SiRNA target sequence
atgtacaaactgcaaatgtcccaa

SEQ ID NO: 44537 - DNA, 24 bp, Artificial sequence
  SiRNA target sequence
tgtacaaactgcaaatgtcccaaa

SEQ ID NO: 44538 - DNA, 24 bp, Artificial sequence
  SiRNA target sequence
gtacaaactgcaaatgtcccaaaa

SEQ ID NO: 44539 - DNA, 24 bp, Artificial sequence
  SiRNA target sequence
tacaaactgcaaatgtcccaaaaa

SEQ ID NO: 44540 - DNA, 24 bp, Artificial sequence
  SiRNA target sequence
acaaactgcaaatgtcccaaaaat

SEQ ID NO: 44541 - DNA, 24 bp, Artificial sequence
  SiRNA target sequence
caaactgcaaatgtcccaaaaatt

SEQ ID NO: 44542 - DNA, 24 bp, Artificial sequence
  SiRNA target sequence
aaactgcaaatgtcccaaaaatta

SEQ ID NO: 44543 - DNA, 24 bp, Artificial sequence
  SiRNA target sequence
aactgcaaatgtcccaaaaattat

SEQ ID NO: 44544 - DNA, 24 bp, Artificial sequence
  SiRNA target sequence
actgcaaatgtcccaaaaattatg

SEQ ID NO: 44545 - DNA, 24 bp, Artificial sequence
  SiRNA target sequence
ctgcaaatgtcccaaaaattatgt

SEQ ID NO: 44546 - DNA, 24 bp, Artificial sequence
  SiRNA target sequence
tgcaaatgtcccaaaaattatgta

SEQ ID NO: 44547 - DNA, 24 bp, Artificial sequence
  SiRNA target sequence
gcaaatgtcccaaaaattatgtaa

SEQ ID NO: 44548 - DNA, 24 bp, Artificial sequence
  SiRNA target sequence
caaatgtcccaaaaattatgtaaa

SEQ ID NO: 44549 - DNA, 24 bp, Artificial sequence
  SiRNA target sequence
aaatgtcccaaaaattatgtaaat

SEQ ID NO: 44550 - DNA, 24 bp, Artificial sequence
  SiRNA target sequence
aatgtcccaaaaattatgtaaatg

SEQ ID NO: 44551 - DNA, 24 bp, Artificial sequence
  SiRNA target sequence
atgtcccaaaaattatgtaaatga

SEQ ID NO: 44552 - DNA, 24 bp, Artificial sequence
  SiRNA target sequence
tgtcccaaaaattatgtaaatgac

SEQ ID NO: 44553 - DNA, 24 bp, Artificial sequence
  SiRNA target sequence
gtcccaaaaattatgtaaatgaca

SEQ ID NO: 44554 - DNA, 24 bp, Artificial sequence
  SiRNA target sequence
tcccaaaaattatgtaaatgacaa

SEQ ID NO: 44555 - DNA, 24 bp, Artificial sequence
  SiRNA target sequence
cccaaaaattatgtaaatgacaaa

SEQ ID NO: 44556 - DNA, 24 bp, Artificial sequence
  SiRNA target sequence
ccaaaaattatgtaaatgacaaat

SEQ ID NO: 44557 - DNA, 24 bp, Artificial sequence
  SiRNA target sequence
caaaaattatgtaaatgacaaatg

SEQ ID NO: 44558 - DNA, 24 bp, Artificial sequence
  SiRNA target sequence
aaaaattatgtaaatgacaaatgt

SEQ ID NO: 44559 - DNA, 24 bp, Artificial sequence
  SiRNA target sequence
aaaattatgtaaatgacaaatgtt

SEQ ID NO: 44560 - DNA, 24 bp, Artificial sequence
  SiRNA target sequence
aaattatgtaaatgacaaatgttc

SEQ ID NO: 44561 - DNA, 24 bp, Artificial sequence
  SiRNA target sequence
aattatgtaaatgacaaatgttcg

SEQ ID NO: 44562 - DNA, 24 bp, Artificial sequence
  SiRNA target sequence
attatgtaaatgacaaatgttcga

SEQ ID NO: 44563 - DNA, 24 bp, Artificial sequence
  SiRNA target sequence
ttatgtaaatgacaaatgttcgaa

SEQ ID NO: 44564 - DNA, 24 bp, Artificial sequence
  SiRNA target sequence
tatgtaaatgacaaatgttcgaat

SEQ ID NO: 44565 - DNA, 24 bp, Artificial sequence
  SiRNA target sequence
atgtaaatgacaaatgttcgaata

SEQ ID NO: 44566 - DNA, 24 bp, Artificial sequence
  SiRNA target sequence
tgtaaatgacaaatgttcgaataa

SEQ ID NO: 44567 - DNA, 24 bp, Artificial sequence
  SiRNA target sequence
gtaaatgacaaatgttcgaataaa

SEQ ID NO: 44568 - DNA, 24 bp, Artificial sequence
  SiRNA target sequence
taaatgacaaatgttcgaataaag

SEQ ID NO: 44569 - DNA, 24 bp, Artificial sequence
  SiRNA target sequence
aaatgacaaatgttcgaataaagg

SEQ ID NO: 44570 - DNA, 24 bp, Artificial sequence
  SiRNA target sequence
aatgacaaatgttcgaataaaggg

SEQ ID NO: 44571 - DNA, 24 bp, Artificial sequence
  SiRNA target sequence
atgacaaatgttcgaataaagggc

SEQ ID NO: 44572 - DNA, 24 bp, Artificial sequence
  SiRNA target sequence
tgacaaatgttcgaataaagggct

SEQ ID NO: 44573 - DNA, 24 bp, Artificial sequence
  SiRNA target sequence
gacaaatgttcgaataaagggctt

SEQ ID NO: 44574 - DNA, 24 bp, Artificial sequence
  SiRNA target sequence
acaaatgttcgaataaagggcttt

SEQ ID NO: 44575 - DNA, 24 bp, Artificial sequence
  SiRNA target sequence
caaatgttcgaataaagggctttg

SEQ ID NO: 44576 - DNA, 24 bp, Artificial sequence
  SiRNA target sequence
aaatgttcgaataaagggctttga

SEQ ID NO: 44577 - DNA, 24 bp, Artificial sequence
  SiRNA target sequence
aatgttcgaataaagggctttgaa

SEQ ID NO: 44578 - DNA, 24 bp, Artificial sequence
  SiRNA target sequence
atgttcgaataaagggctttgaaa

SEQ ID NO: 44579 - DNA, 24 bp, Artificial sequence
  SiRNA target sequence
tgttcgaataaagggctttgaaat

SEQ ID NO: 44580 - DNA, 24 bp, Artificial sequence
  SiRNA target sequence
gttcgaataaagggctttgaaata

SEQ ID NO: 44581 - DNA, 24 bp, Artificial sequence
  SiRNA target sequence
ttcgaataaagggctttgaaataa

SEQ ID NO: 44582 - DNA, 24 bp, Artificial sequence
  SiRNA target sequence
tcgaataaagggctttgaaataac

SEQ ID NO: 44583 - DNA, 24 bp, Artificial sequence
  SiRNA target sequence
cgaataaagggctttgaaataaca

SEQ ID NO: 44584 - DNA, 24 bp, Artificial sequence
  SiRNA target sequence
gaataaagggctttgaaataacat

SEQ ID NO: 44585 - DNA, 24 bp, Artificial sequence
  SiRNA target sequence
aataaagggctttgaaataacata

SEQ ID NO: 44586 - DNA, 24 bp, Artificial sequence
  SiRNA target sequence
ataaagggctttgaaataacatat

SEQ ID NO: 44587 - DNA, 24 bp, Artificial sequence
  SiRNA target sequence
taaagggctttgaaataacatatt

SEQ ID NO: 44588 - DNA, 24 bp, Artificial sequence
  SiRNA target sequence
aaagggctttgaaataacatattc

SEQ ID NO: 44589 - DNA, 24 bp, Artificial sequence
  SiRNA target sequence
aagggctttgaaataacatattct

SEQ ID NO: 44590 - DNA, 24 bp, Artificial sequence
  SiRNA target sequence
agggctttgaaataacatattcta

SEQ ID NO: 44591 - DNA, 24 bp, Artificial sequence
  SiRNA target sequence
gggctttgaaataacatattctac

SEQ ID NO: 44592 - DNA, 24 bp, Artificial sequence
  SiRNA target sequence
ggctttgaaataacatattctaca

SEQ ID NO: 44593 - DNA, 24 bp, Artificial sequence
  SiRNA target sequence
gctttgaaataacatattctacaa

SEQ ID NO: 44594 - DNA, 24 bp, Artificial sequence
  SiRNA target sequence
ctttgaaataacatattctacaat

SEQ ID NO: 44595 - DNA, 24 bp, Artificial sequence
  SiRNA target sequence
tttgaaataacatattctacaatc

SEQ ID NO: 44596 - DNA, 24 bp, Artificial sequence
  SiRNA target sequence
ttgaaataacatattctacaatca

SEQ ID NO: 44597 - DNA, 24 bp, Artificial sequence
  SiRNA target sequence
tgaaataacatattctacaatcag

SEQ ID NO: 44598 - DNA, 24 bp, Artificial sequence
  SiRNA target sequence
gaaataacatattctacaatcagg

SEQ ID NO: 44599 - DNA, 24 bp, Artificial sequence
  SiRNA target sequence
aaataacatattctacaatcaggt

SEQ ID NO: 44600 - DNA, 24 bp, Artificial sequence
  SiRNA target sequence
aataacatattctacaatcaggtc

SEQ ID NO: 44601 - DNA, 24 bp, Artificial sequence
  SiRNA target sequence
ataacatattctacaatcaggtct

SEQ ID NO: 44602 - DNA, 24 bp, Artificial sequence
  SiRNA target sequence
taacatattctacaatcaggtctt

SEQ ID NO: 44603 - DNA, 24 bp, Artificial sequence
  SiRNA target sequence
aacatattctacaatcaggtcttt

SEQ ID NO: 44604 - DNA, 24 bp, Artificial sequence
  SiRNA target sequence
acatattctacaatcaggtctttc

SEQ ID NO: 44605 - DNA, 24 bp, Artificial sequence
  SiRNA target sequence
catattctacaatcaggtctttca

SEQ ID NO: 44606 - DNA, 24 bp, Artificial sequence
  SiRNA target sequence
atattctacaatcaggtctttcat

SEQ ID NO: 44607 - DNA, 24 bp, Artificial sequence
  SiRNA target sequence
tattctacaatcaggtctttcata

SEQ ID NO: 44608 - DNA, 24 bp, Artificial sequence
  SiRNA target sequence
attctacaatcaggtctttcataa

SEQ ID NO: 44609 - DNA, 24 bp, Artificial sequence
  SiRNA target sequence
ttctacaatcaggtctttcataat

SEQ ID NO: 44610 - DNA, 24 bp, Artificial sequence
  SiRNA target sequence
tctacaatcaggtctttcataata

SEQ ID NO: 44611 - DNA, 24 bp, Artificial sequence
  SiRNA target sequence
ctacaatcaggtctttcataatac

SEQ ID NO: 44612 - DNA, 24 bp, Artificial sequence
  SiRNA target sequence
tacaatcaggtctttcataatact

SEQ ID NO: 44613 - DNA, 24 bp, Artificial sequence
  SiRNA target sequence
acaatcaggtctttcataatacta

SEQ ID NO: 44614 - DNA, 24 bp, Artificial sequence
  SiRNA target sequence
caatcaggtctttcataatactaa

SEQ ID NO: 44615 - DNA, 24 bp, Artificial sequence
  SiRNA target sequence
aatcaggtctttcataatactaat

SEQ ID NO: 44616 - DNA, 24 bp, Artificial sequence
  SiRNA target sequence
atcaggtctttcataatactaata

SEQ ID NO: 44617 - DNA, 24 bp, Artificial sequence
  SiRNA target sequence
tcaggtctttcataatactaatat

SEQ ID NO: 44618 - DNA, 24 bp, Artificial sequence
  SiRNA target sequence
caggtctttcataatactaatatc

SEQ ID NO: 44619 - DNA, 24 bp, Artificial sequence
  SiRNA target sequence
aggtctttcataatactaatatca

SEQ ID NO: 44620 - DNA, 24 bp, Artificial sequence
  SiRNA target sequence
ggtctttcataatactaatatcac

SEQ ID NO: 44621 - DNA, 24 bp, Artificial sequence
  SiRNA target sequence
gtctttcataatactaatatcact

SEQ ID NO: 44622 - DNA, 24 bp, Artificial sequence
  SiRNA target sequence
tctttcataatactaatatcacta

SEQ ID NO: 44623 - DNA, 24 bp, Artificial sequence
  SiRNA target sequence
ctttcataatactaatatcactac

SEQ ID NO: 44624 - DNA, 24 bp, Artificial sequence
  SiRNA target sequence
tttcataatactaatatcactacc

SEQ ID NO: 44625 - DNA, 24 bp, Artificial sequence
  SiRNA target sequence
ttcataatactaatatcactacca

SEQ ID NO: 44626 - DNA, 24 bp, Artificial sequence
  SiRNA target sequence
tcataatactaatatcactaccat

SEQ ID NO: 44627 - DNA, 24 bp, Artificial sequence
  SiRNA target sequence
cataatactaatatcactaccata

SEQ ID NO: 44628 - DNA, 24 bp, Artificial sequence
  SiRNA target sequence
ataatactaatatcactaccataa

SEQ ID NO: 44629 - DNA, 24 bp, Artificial sequence
  SiRNA target sequence
taatactaatatcactaccataaa

SEQ ID NO: 44630 - DNA, 24 bp, Artificial sequence
  SiRNA target sequence
aatactaatatcactaccataaat

SEQ ID NO: 44631 - DNA, 24 bp, Artificial sequence
  SiRNA target sequence
atactaatatcactaccataaata

SEQ ID NO: 44632 - DNA, 24 bp, Artificial sequence
  SiRNA target sequence
tactaatatcactaccataaatag

SEQ ID NO: 44633 - DNA, 24 bp, Artificial sequence
  SiRNA target sequence
actaatatcactaccataaataga

SEQ ID NO: 44634 - DNA, 24 bp, Artificial sequence
  SiRNA target sequence
ctaatatcactaccataaatagat

SEQ ID NO: 44635 - DNA, 24 bp, Artificial sequence
  SiRNA target sequence
taatatcactaccataaatagatt

SEQ ID NO: 44636 - DNA, 24 bp, Artificial sequence
  SiRNA target sequence
aatatcactaccataaatagattt

SEQ ID NO: 44637 - DNA, 24 bp, Artificial sequence
  SiRNA target sequence
atatcactaccataaatagatttt

SEQ ID NO: 44638 - DNA, 24 bp, Artificial sequence
  SiRNA target sequence
tatcactaccataaatagattttt

SEQ ID NO: 44639 - DNA, 24 bp, Artificial sequence
  SiRNA target sequence
atcactaccataaatagatttttt

SEQ ID NO: 44640 - DNA, 24 bp, Artificial sequence
  SiRNA target sequence
tcactaccataaatagattttttt

SEQ ID NO: 44641 - DNA, 24 bp, Artificial sequence
  SiRNA target sequence
cactaccataaatagatttttttt

SEQ ID NO: 44642 - DNA, 24 bp, Artificial sequence
  SiRNA target sequence
actaccataaatagattttttttc

SEQ ID NO: 44643 - DNA, 24 bp, Artificial sequence
  SiRNA target sequence
ctaccataaatagattttttttct

SEQ ID NO: 44644 - DNA, 24 bp, Artificial sequence
  SiRNA target sequence
taccataaatagattttttttcta

SEQ ID NO: 44645 - DNA, 24 bp, Artificial sequence
  SiRNA target sequence
accataaatagattttttttctaa

SEQ ID NO: 44646 - DNA, 24 bp, Artificial sequence
  SiRNA target sequence
ccataaatagattttttttctaac

SEQ ID NO: 44647 - DNA, 24 bp, Artificial sequence
  SiRNA target sequence
cataaatagattttttttctaaca

SEQ ID NO: 44648 - DNA, 24 bp, Artificial sequence
  SiRNA target sequence
ataaatagattttttttctaacat

SEQ ID NO: 44649 - DNA, 25 bp, Artificial sequence
  SiRNA target sequence
ttataagtttaatgtagaaataata

SEQ ID NO: 44650 - DNA, 25 bp, Artificial sequence
  SiRNA target sequence
tataagtttaatgtagaaataatat

SEQ ID NO: 44651 - DNA, 25 bp, Artificial sequence
  SiRNA target sequence
ataagtttaatgtagaaataatatt

SEQ ID NO: 44652 - DNA, 25 bp, Artificial sequence
  SiRNA target sequence
taagtttaatgtagaaataatattt

SEQ ID NO: 44653 - DNA, 25 bp, Artificial sequence
  SiRNA target sequence
aagtttaatgtagaaataatatttt

SEQ ID NO: 44654 - DNA, 25 bp, Artificial sequence
  SiRNA target sequence
agtttaatgtagaaataatattttc

SEQ ID NO: 44655 - DNA, 25 bp, Artificial sequence
  SiRNA target sequence
gtttaatgtagaaataatattttct

SEQ ID NO: 44656 - DNA, 25 bp, Artificial sequence
  SiRNA target sequence
tttaatgtagaaataatattttctt

SEQ ID NO: 44657 - DNA, 25 bp, Artificial sequence
  SiRNA target sequence
ttaatgtagaaataatattttcttc

SEQ ID NO: 44658 - DNA, 25 bp, Artificial sequence
  SiRNA target sequence
taatgtagaaataatattttcttct

SEQ ID NO: 44659 - DNA, 25 bp, Artificial sequence
  SiRNA target sequence
aatgtagaaataatattttcttcta

SEQ ID NO: 44660 - DNA, 25 bp, Artificial sequence
  SiRNA target sequence
atgtagaaataatattttcttctat

SEQ ID NO: 44661 - DNA, 25 bp, Artificial sequence
  SiRNA target sequence
tgtagaaataatattttcttctatc

SEQ ID NO: 44662 - DNA, 25 bp, Artificial sequence
  SiRNA target sequence
gtagaaataatattttcttctatct

SEQ ID NO: 44663 - DNA, 25 bp, Artificial sequence
  SiRNA target sequence
tagaaataatattttcttctatctt

SEQ ID NO: 44664 - DNA, 25 bp, Artificial sequence
  SiRNA target sequence
agaaataatattttcttctatctta

SEQ ID NO: 44665 - DNA, 25 bp, Artificial sequence
  SiRNA target sequence
gaaataatattttcttctatcttat

SEQ ID NO: 44666 - DNA, 25 bp, Artificial sequence
  SiRNA target sequence
aaataatattttcttctatcttatg

SEQ ID NO: 44667 - DNA, 25 bp, Artificial sequence
  SiRNA target sequence
aataatattttcttctatcttatgt

SEQ ID NO: 44668 - DNA, 25 bp, Artificial sequence
  SiRNA target sequence
ataatattttcttctatcttatgta

SEQ ID NO: 44669 - DNA, 25 bp, Artificial sequence
  SiRNA target sequence
taatattttcttctatcttatgtaa

SEQ ID NO: 44670 - DNA, 25 bp, Artificial sequence
  SiRNA target sequence
aatattttcttctatcttatgtaat

SEQ ID NO: 44671 - DNA, 25 bp, Artificial sequence
  SiRNA target sequence
atattttcttctatcttatgtaatg

SEQ ID NO: 44672 - DNA, 25 bp, Artificial sequence
  SiRNA target sequence
tattttcttctatcttatgtaatga

SEQ ID NO: 44673 - DNA, 25 bp, Artificial sequence
  SiRNA target sequence
attttcttctatcttatgtaatgat

SEQ ID NO: 44674 - DNA, 25 bp, Artificial sequence
  SiRNA target sequence
ttttcttctatcttatgtaatgata

SEQ ID NO: 44675 - DNA, 25 bp, Artificial sequence
  SiRNA target sequence
tttcttctatcttatgtaatgatac

SEQ ID NO: 44676 - DNA, 25 bp, Artificial sequence
  SiRNA target sequence
ttcttctatcttatgtaatgataca

SEQ ID NO: 44677 - DNA, 25 bp, Artificial sequence
  SiRNA target sequence
tcttctatcttatgtaatgatacag

SEQ ID NO: 44678 - DNA, 25 bp, Artificial sequence
  SiRNA target sequence
cttctatcttatgtaatgatacagt

SEQ ID NO: 44679 - DNA, 25 bp, Artificial sequence
  SiRNA target sequence
ttctatcttatgtaatgatacagtt

SEQ ID NO: 44680 - DNA, 25 bp, Artificial sequence
  SiRNA target sequence
tctatcttatgtaatgatacagttt

SEQ ID NO: 44681 - DNA, 25 bp, Artificial sequence
  SiRNA target sequence
ctatcttatgtaatgatacagtttt

SEQ ID NO: 44682 - DNA, 25 bp, Artificial sequence
  SiRNA target sequence
tatcttatgtaatgatacagttttg

SEQ ID NO: 44683 - DNA, 25 bp, Artificial sequence
  SiRNA target sequence
atcttatgtaatgatacagttttgt

SEQ ID NO: 44684 - DNA, 25 bp, Artificial sequence
  SiRNA target sequence
tcttatgtaatgatacagttttgtt

SEQ ID NO: 44685 - DNA, 25 bp, Artificial sequence
  SiRNA target sequence
cttatgtaatgatacagttttgttt

SEQ ID NO: 44686 - DNA, 25 bp, Artificial sequence
  SiRNA target sequence
ttatgtaatgatacagttttgtttt

SEQ ID NO: 44687 - DNA, 25 bp, Artificial sequence
  SiRNA target sequence
tatgtaatgatacagttttgttttt

SEQ ID NO: 44688 - DNA, 25 bp, Artificial sequence
  SiRNA target sequence
atgtaatgatacagttttgttttta

SEQ ID NO: 44689 - DNA, 25 bp, Artificial sequence
  SiRNA target sequence
tgtaatgatacagttttgtttttaa

SEQ ID NO: 44690 - DNA, 25 bp, Artificial sequence
  SiRNA target sequence
gtaatgatacagttttgtttttaat

SEQ ID NO: 44691 - DNA, 25 bp, Artificial sequence
  SiRNA target sequence
taatgatacagttttgtttttaata

SEQ ID NO: 44692 - DNA, 25 bp, Artificial sequence
  SiRNA target sequence
aatgatacagttttgtttttaatac

SEQ ID NO: 44693 - DNA, 25 bp, Artificial sequence
  SiRNA target sequence
atgatacagttttgtttttaatact

SEQ ID NO: 44694 - DNA, 25 bp, Artificial sequence
  SiRNA target sequence
tgatacagttttgtttttaatactt

SEQ ID NO: 44695 - DNA, 25 bp, Artificial sequence
  SiRNA target sequence
gatacagttttgtttttaatactta

SEQ ID NO: 44696 - DNA, 25 bp, Artificial sequence
  SiRNA target sequence
atacagttttgtttttaatacttag

SEQ ID NO: 44697 - DNA, 25 bp, Artificial sequence
  SiRNA target sequence
tacagttttgtttttaatacttagc

SEQ ID NO: 44698 - DNA, 25 bp, Artificial sequence
  SiRNA target sequence
acagttttgtttttaatacttagca

SEQ ID NO: 44699 - DNA, 25 bp, Artificial sequence
  SiRNA target sequence
cagttttgtttttaatacttagcac

SEQ ID NO: 44700 - DNA, 25 bp, Artificial sequence
  SiRNA target sequence
agttttgtttttaatacttagcact

SEQ ID NO: 44701 - DNA, 25 bp, Artificial sequence
  SiRNA target sequence
gttttgtttttaatacttagcactt

SEQ ID NO: 44702 - DNA, 25 bp, Artificial sequence
  SiRNA target sequence
ttttgtttttaatacttagcacttt

SEQ ID NO: 44703 - DNA, 25 bp, Artificial sequence
  SiRNA target sequence
tttgtttttaatacttagcacttta

SEQ ID NO: 44704 - DNA, 25 bp, Artificial sequence
  SiRNA target sequence
ttgtttttaatacttagcactttat

SEQ ID NO: 44705 - DNA, 25 bp, Artificial sequence
  SiRNA target sequence
tgtttttaatacttagcactttatc

SEQ ID NO: 44706 - DNA, 25 bp, Artificial sequence
  SiRNA target sequence
gtttttaatacttagcactttatca

SEQ ID NO: 44707 - DNA, 25 bp, Artificial sequence
  SiRNA target sequence
tttttaatacttagcactttatcaa

SEQ ID NO: 44708 - DNA, 25 bp, Artificial sequence
  SiRNA target sequence
ttttaatacttagcactttatcaaa

SEQ ID NO: 44709 - DNA, 25 bp, Artificial sequence
  SiRNA target sequence
tttaatacttagcactttatcaaat

SEQ ID NO: 44710 - DNA, 25 bp, Artificial sequence
  SiRNA target sequence
ttaatacttagcactttatcaaata

SEQ ID NO: 44711 - DNA, 25 bp, Artificial sequence
  SiRNA target sequence
taatacttagcactttatcaaataa

SEQ ID NO: 44712 - DNA, 25 bp, Artificial sequence
  SiRNA target sequence
aatacttagcactttatcaaataag

SEQ ID NO: 44713 - DNA, 25 bp, Artificial sequence
  SiRNA target sequence
atacttagcactttatcaaataagt

SEQ ID NO: 44714 - DNA, 25 bp, Artificial sequence
  SiRNA target sequence
tacttagcactttatcaaataagtg

SEQ ID NO: 44715 - DNA, 25 bp, Artificial sequence
  SiRNA target sequence
acttagcactttatcaaataagtgg

SEQ ID NO: 44716 - DNA, 25 bp, Artificial sequence
  SiRNA target sequence
cttagcactttatcaaataagtgga

SEQ ID NO: 44717 - DNA, 25 bp, Artificial sequence
  SiRNA target sequence
ttagcactttatcaaataagtggag

SEQ ID NO: 44718 - DNA, 25 bp, Artificial sequence
  SiRNA target sequence
tagcactttatcaaataagtggagt

SEQ ID NO: 44719 - DNA, 25 bp, Artificial sequence
  SiRNA target sequence
agcactttatcaaataagtggagta

SEQ ID NO: 44720 - DNA, 25 bp, Artificial sequence
  SiRNA target sequence
gcactttatcaaataagtggagtaa

SEQ ID NO: 44721 - DNA, 25 bp, Artificial sequence
  SiRNA target sequence
cactttatcaaataagtggagtaaa

SEQ ID NO: 44722 - DNA, 25 bp, Artificial sequence
  SiRNA target sequence
actttatcaaataagtggagtaaat

SEQ ID NO: 44723 - DNA, 25 bp, Artificial sequence
  SiRNA target sequence
ctttatcaaataagtggagtaaatc

SEQ ID NO: 44724 - DNA, 25 bp, Artificial sequence
  SiRNA target sequence
tttatcaaataagtggagtaaatct

SEQ ID NO: 44725 - DNA, 25 bp, Artificial sequence
  SiRNA target sequence
ttatcaaataagtggagtaaatcta

SEQ ID NO: 44726 - DNA, 25 bp, Artificial sequence
  SiRNA target sequence
tatcaaataagtggagtaaatctaa

SEQ ID NO: 44727 - DNA, 25 bp, Artificial sequence
  SiRNA target sequence
atcaaataagtggagtaaatctaaa

SEQ ID NO: 44728 - DNA, 25 bp, Artificial sequence
  SiRNA target sequence
tcaaataagtggagtaaatctaaat

SEQ ID NO: 44729 - DNA, 25 bp, Artificial sequence
  SiRNA target sequence
caaataagtggagtaaatctaaatt

SEQ ID NO: 44730 - DNA, 25 bp, Artificial sequence
  SiRNA target sequence
aaataagtggagtaaatctaaatta

SEQ ID NO: 44731 - DNA, 25 bp, Artificial sequence
  SiRNA target sequence
aataagtggagtaaatctaaattat

SEQ ID NO: 44732 - DNA, 25 bp, Artificial sequence
  SiRNA target sequence
ataagtggagtaaatctaaattatg

SEQ ID NO: 44733 - DNA, 25 bp, Artificial sequence
  SiRNA target sequence
taagtggagtaaatctaaattatgt

SEQ ID NO: 44734 - DNA, 25 bp, Artificial sequence
  SiRNA target sequence
aagtggagtaaatctaaattatgta

SEQ ID NO: 44735 - DNA, 25 bp, Artificial sequence
  SiRNA target sequence
agtggagtaaatctaaattatgtaa

SEQ ID NO: 44736 - DNA, 25 bp, Artificial sequence
  SiRNA target sequence
gtggagtaaatctaaattatgtaaa

SEQ ID NO: 44737 - DNA, 25 bp, Artificial sequence
  SiRNA target sequence
tggagtaaatctaaattatgtaaaa

SEQ ID NO: 44738 - DNA, 25 bp, Artificial sequence
  SiRNA target sequence
ggagtaaatctaaattatgtaaaac

SEQ ID NO: 44739 - DNA, 25 bp, Artificial sequence
  SiRNA target sequence
gagtaaatctaaattatgtaaaaca

SEQ ID NO: 44740 - DNA, 25 bp, Artificial sequence
  SiRNA target sequence
agtaaatctaaattatgtaaaacaa

SEQ ID NO: 44741 - DNA, 25 bp, Artificial sequence
  SiRNA target sequence
gtaaatctaaattatgtaaaacaat

SEQ ID NO: 44742 - DNA, 25 bp, Artificial sequence
  SiRNA target sequence
taaatctaaattatgtaaaacaata

SEQ ID NO: 44743 - DNA, 25 bp, Artificial sequence
  SiRNA target sequence
aaatctaaattatgtaaaacaataa

SEQ ID NO: 44744 - DNA, 25 bp, Artificial sequence
  SiRNA target sequence
aatctaaattatgtaaaacaataat

SEQ ID NO: 44745 - DNA, 25 bp, Artificial sequence
  SiRNA target sequence
atctaaattatgtaaaacaataatt

SEQ ID NO: 44746 - DNA, 25 bp, Artificial sequence
  SiRNA target sequence
tctaaattatgtaaaacaataatta

SEQ ID NO: 44747 - DNA, 25 bp, Artificial sequence
  SiRNA target sequence
ctaaattatgtaaaacaataattat

SEQ ID NO: 44748 - DNA, 25 bp, Artificial sequence
  SiRNA target sequence
taaattatgtaaaacaataattatc

SEQ ID NO: 44749 - DNA, 25 bp, Artificial sequence
  SiRNA target sequence
aaattatgtaaaacaataattatcg

SEQ ID NO: 44750 - DNA, 25 bp, Artificial sequence
  SiRNA target sequence
aattatgtaaaacaataattatcgt

SEQ ID NO: 44751 - DNA, 25 bp, Artificial sequence
  SiRNA target sequence
attatgtaaaacaataattatcgtc

SEQ ID NO: 44752 - DNA, 25 bp, Artificial sequence
  SiRNA target sequence
ttatgtaaaacaataattatcgtct

SEQ ID NO: 44753 - DNA, 25 bp, Artificial sequence
  SiRNA target sequence
tatgtaaaacaataattatcgtctt

SEQ ID NO: 44754 - DNA, 25 bp, Artificial sequence
  SiRNA target sequence
atgtaaaacaataattatcgtcttc

SEQ ID NO: 44755 - DNA, 25 bp, Artificial sequence
  SiRNA target sequence
tgtaaaacaataattatcgtcttct

SEQ ID NO: 44756 - DNA, 25 bp, Artificial sequence
  SiRNA target sequence
gtaaaacaataattatcgtcttctc

SEQ ID NO: 44757 - DNA, 25 bp, Artificial sequence
  SiRNA target sequence
taaaacaataattatcgtcttctct

SEQ ID NO: 44758 - DNA, 25 bp, Artificial sequence
  SiRNA target sequence
aaaacaataattatcgtcttctcta

SEQ ID NO: 44759 - DNA, 25 bp, Artificial sequence
  SiRNA target sequence
aaacaataattatcgtcttctctaa

SEQ ID NO: 44760 - DNA, 25 bp, Artificial sequence
  SiRNA target sequence
aacaataattatcgtcttctctaag

SEQ ID NO: 44761 - DNA, 25 bp, Artificial sequence
  SiRNA target sequence
acaataattatcgtcttctctaagt

SEQ ID NO: 44762 - DNA, 25 bp, Artificial sequence
  SiRNA target sequence
caataattatcgtcttctctaagtt

SEQ ID NO: 44763 - DNA, 25 bp, Artificial sequence
  SiRNA target sequence
aataattatcgtcttctctaagttg

SEQ ID NO: 44764 - DNA, 25 bp, Artificial sequence
  SiRNA target sequence
ataattatcgtcttctctaagttgt

SEQ ID NO: 44765 - DNA, 25 bp, Artificial sequence
  SiRNA target sequence
taattatcgtcttctctaagttgtt

SEQ ID NO: 44766 - DNA, 25 bp, Artificial sequence
  SiRNA target sequence
aattatcgtcttctctaagttgttg

SEQ ID NO: 44767 - DNA, 25 bp, Artificial sequence
  SiRNA target sequence
attatcgtcttctctaagttgttgg

SEQ ID NO: 44768 - DNA, 25 bp, Artificial sequence
  SiRNA target sequence
ttatcgtcttctctaagttgttgga

SEQ ID NO: 44769 - DNA, 25 bp, Artificial sequence
  SiRNA target sequence
tatcgtcttctctaagttgttggag

SEQ ID NO: 44770 - DNA, 25 bp, Artificial sequence
  SiRNA target sequence
atcgtcttctctaagttgttggaga

SEQ ID NO: 44771 - DNA, 25 bp, Artificial sequence
  SiRNA target sequence
tcgtcttctctaagttgttggagat

SEQ ID NO: 44772 - DNA, 25 bp, Artificial sequence
  SiRNA target sequence
cgtcttctctaagttgttggagatt

SEQ ID NO: 44773 - DNA, 25 bp, Artificial sequence
  SiRNA target sequence
gtcttctctaagttgttggagatta

SEQ ID NO: 44774 - DNA, 25 bp, Artificial sequence
  SiRNA target sequence
tcttctctaagttgttggagattag

SEQ ID NO: 44775 - DNA, 25 bp, Artificial sequence
  SiRNA target sequence
cttctctaagttgttggagattaga

SEQ ID NO: 44776 - DNA, 25 bp, Artificial sequence
  SiRNA target sequence
ttctctaagttgttggagattagac

SEQ ID NO: 44777 - DNA, 25 bp, Artificial sequence
  SiRNA target sequence
tctctaagttgttggagattagact

SEQ ID NO: 44778 - DNA, 25 bp, Artificial sequence
  SiRNA target sequence
ctctaagttgttggagattagactt

SEQ ID NO: 44779 - DNA, 25 bp, Artificial sequence
  SiRNA target sequence
tctaagttgttggagattagacttt

SEQ ID NO: 44780 - DNA, 25 bp, Artificial sequence
  SiRNA target sequence
ctaagttgttggagattagactttt

SEQ ID NO: 44781 - DNA, 25 bp, Artificial sequence
  SiRNA target sequence
taagttgttggagattagactttta

SEQ ID NO: 44782 - DNA, 25 bp, Artificial sequence
  SiRNA target sequence
aagttgttggagattagacttttaa

SEQ ID NO: 44783 - DNA, 25 bp, Artificial sequence
  SiRNA target sequence
agttgttggagattagacttttaag

SEQ ID NO: 44784 - DNA, 25 bp, Artificial sequence
  SiRNA target sequence
gttgttggagattagacttttaaga

SEQ ID NO: 44785 - DNA, 25 bp, Artificial sequence
  SiRNA target sequence
ttgttggagattagacttttaagaa

SEQ ID NO: 44786 - DNA, 25 bp, Artificial sequence
  SiRNA target sequence
tgttggagattagacttttaagaat

SEQ ID NO: 44787 - DNA, 25 bp, Artificial sequence
  SiRNA target sequence
gttggagattagacttttaagaatt

SEQ ID NO: 44788 - DNA, 25 bp, Artificial sequence
  SiRNA target sequence
ttggagattagacttttaagaattt

SEQ ID NO: 44789 - DNA, 25 bp, Artificial sequence
  SiRNA target sequence
tggagattagacttttaagaatttc

SEQ ID NO: 44790 - DNA, 25 bp, Artificial sequence
  SiRNA target sequence
ggagattagacttttaagaatttca

SEQ ID NO: 44791 - DNA, 25 bp, Artificial sequence
  SiRNA target sequence
gagattagacttttaagaatttcat

SEQ ID NO: 44792 - DNA, 25 bp, Artificial sequence
  SiRNA target sequence
agattagacttttaagaatttcata

SEQ ID NO: 44793 - DNA, 25 bp, Artificial sequence
  SiRNA target sequence
gattagacttttaagaatttcatat

SEQ ID NO: 44794 - DNA, 25 bp, Artificial sequence
  SiRNA target sequence
attagacttttaagaatttcatatt

SEQ ID NO: 44795 - DNA, 25 bp, Artificial sequence
  SiRNA target sequence
ttagacttttaagaatttcatattc

SEQ ID NO: 44796 - DNA, 25 bp, Artificial sequence
  SiRNA target sequence
tagacttttaagaatttcatattca

SEQ ID NO: 44797 - DNA, 25 bp, Artificial sequence
  SiRNA target sequence
agacttttaagaatttcatattcag

SEQ ID NO: 44798 - DNA, 25 bp, Artificial sequence
  SiRNA target sequence
gacttttaagaatttcatattcagc

SEQ ID NO: 44799 - DNA, 25 bp, Artificial sequence
  SiRNA target sequence
acttttaagaatttcatattcagct

SEQ ID NO: 44800 - DNA, 25 bp, Artificial sequence
  SiRNA target sequence
cttttaagaatttcatattcagctt

SEQ ID NO: 44801 - DNA, 25 bp, Artificial sequence
  SiRNA target sequence
ttttaagaatttcatattcagcttt

SEQ ID NO: 44802 - DNA, 25 bp, Artificial sequence
  SiRNA target sequence
tttaagaatttcatattcagctttt

SEQ ID NO: 44803 - DNA, 25 bp, Artificial sequence
  SiRNA target sequence
ttaagaatttcatattcagcttttt

SEQ ID NO: 44804 - DNA, 25 bp, Artificial sequence
  SiRNA target sequence
taagaatttcatattcagctttttt

SEQ ID NO: 44805 - DNA, 25 bp, Artificial sequence
  SiRNA target sequence
aagaatttcatattcagcttttttg

SEQ ID NO: 44806 - DNA, 25 bp, Artificial sequence
  SiRNA target sequence
agaatttcatattcagcttttttgt

SEQ ID NO: 44807 - DNA, 25 bp, Artificial sequence
  SiRNA target sequence
gaatttcatattcagcttttttgtc

SEQ ID NO: 44808 - DNA, 25 bp, Artificial sequence
  SiRNA target sequence
aatttcatattcagcttttttgtcc

SEQ ID NO: 44809 - DNA, 25 bp, Artificial sequence
  SiRNA target sequence
atttcatattcagcttttttgtcca

SEQ ID NO: 44810 - DNA, 25 bp, Artificial sequence
  SiRNA target sequence
tttcatattcagcttttttgtccaa

SEQ ID NO: 44811 - DNA, 25 bp, Artificial sequence
  SiRNA target sequence
ttcatattcagcttttttgtccaat

SEQ ID NO: 44812 - DNA, 25 bp, Artificial sequence
  SiRNA target sequence
tcatattcagcttttttgtccaatg

SEQ ID NO: 44813 - DNA, 25 bp, Artificial sequence
  SiRNA target sequence
catattcagcttttttgtccaatgc

SEQ ID NO: 44814 - DNA, 25 bp, Artificial sequence
  SiRNA target sequence
atattcagcttttttgtccaatgcg

SEQ ID NO: 44815 - DNA, 25 bp, Artificial sequence
  SiRNA target sequence
tattcagcttttttgtccaatgcgg

SEQ ID NO: 44816 - DNA, 25 bp, Artificial sequence
  SiRNA target sequence
attcagcttttttgtccaatgcggc

SEQ ID NO: 44817 - DNA, 25 bp, Artificial sequence
  SiRNA target sequence
ttcagcttttttgtccaatgcggcc

SEQ ID NO: 44818 - DNA, 25 bp, Artificial sequence
  SiRNA target sequence
tcagcttttttgtccaatgcggccg

SEQ ID NO: 44819 - DNA, 25 bp, Artificial sequence
  SiRNA target sequence
cagcttttttgtccaatgcggccgt

SEQ ID NO: 44820 - DNA, 25 bp, Artificial sequence
  SiRNA target sequence
agcttttttgtccaatgcggccgtt

SEQ ID NO: 44821 - DNA, 25 bp, Artificial sequence
  SiRNA target sequence
gcttttttgtccaatgcggccgttg

SEQ ID NO: 44822 - DNA, 25 bp, Artificial sequence
  SiRNA target sequence
cttttttgtccaatgcggccgttgg

SEQ ID NO: 44823 - DNA, 25 bp, Artificial sequence
  SiRNA target sequence
ttttttgtccaatgcggccgttggc

SEQ ID NO: 44824 - DNA, 25 bp, Artificial sequence
  SiRNA target sequence
tttttgtccaatgcggccgttggct

SEQ ID NO: 44825 - DNA, 25 bp, Artificial sequence
  SiRNA target sequence
ttttgtccaatgcggccgttggctc

SEQ ID NO: 44826 - DNA, 25 bp, Artificial sequence
  SiRNA target sequence
tttgtccaatgcggccgttggctca

SEQ ID NO: 44827 - DNA, 25 bp, Artificial sequence
  SiRNA target sequence
ttgtccaatgcggccgttggctcat

SEQ ID NO: 44828 - DNA, 25 bp, Artificial sequence
  SiRNA target sequence
tgtccaatgcggccgttggctcatc

SEQ ID NO: 44829 - DNA, 25 bp, Artificial sequence
  SiRNA target sequence
gtccaatgcggccgttggctcatct

SEQ ID NO: 44830 - DNA, 25 bp, Artificial sequence
  SiRNA target sequence
tccaatgcggccgttggctcatcta

SEQ ID NO: 44831 - DNA, 25 bp, Artificial sequence
  SiRNA target sequence
ccaatgcggccgttggctcatctaa

SEQ ID NO: 44832 - DNA, 25 bp, Artificial sequence
  SiRNA target sequence
caatgcggccgttggctcatctaaa

SEQ ID NO: 44833 - DNA, 25 bp, Artificial sequence
  SiRNA target sequence
aatgcggccgttggctcatctaaaa

SEQ ID NO: 44834 - DNA, 25 bp, Artificial sequence
  SiRNA target sequence
atgcggccgttggctcatctaaaat

SEQ ID NO: 44835 - DNA, 25 bp, Artificial sequence
  SiRNA target sequence
tgcggccgttggctcatctaaaatt

SEQ ID NO: 44836 - DNA, 25 bp, Artificial sequence
  SiRNA target sequence
gcggccgttggctcatctaaaatta

SEQ ID NO: 44837 - DNA, 25 bp, Artificial sequence
  SiRNA target sequence
cggccgttggctcatctaaaattat

SEQ ID NO: 44838 - DNA, 25 bp, Artificial sequence
  SiRNA target sequence
ggccgttggctcatctaaaattata

SEQ ID NO: 44839 - DNA, 25 bp, Artificial sequence
  SiRNA target sequence
gccgttggctcatctaaaattataa

SEQ ID NO: 44840 - DNA, 25 bp, Artificial sequence
  SiRNA target sequence
ccgttggctcatctaaaattataat

SEQ ID NO: 44841 - DNA, 25 bp, Artificial sequence
  SiRNA target sequence
cgttggctcatctaaaattataata

SEQ ID NO: 44842 - DNA, 25 bp, Artificial sequence
  SiRNA target sequence
gttggctcatctaaaattataatag

SEQ ID NO: 44843 - DNA, 25 bp, Artificial sequence
  SiRNA target sequence
ttggctcatctaaaattataatagg

SEQ ID NO: 44844 - DNA, 25 bp, Artificial sequence
  SiRNA target sequence
tggctcatctaaaattataatagga

SEQ ID NO: 44845 - DNA, 25 bp, Artificial sequence
  SiRNA target sequence
ggctcatctaaaattataataggag

SEQ ID NO: 44846 - DNA, 25 bp, Artificial sequence
  SiRNA target sequence
gctcatctaaaattataataggaga

SEQ ID NO: 44847 - DNA, 25 bp, Artificial sequence
  SiRNA target sequence
ctcatctaaaattataataggagaa

SEQ ID NO: 44848 - DNA, 25 bp, Artificial sequence
  SiRNA target sequence
tcatctaaaattataataggagaat

SEQ ID NO: 44849 - DNA, 25 bp, Artificial sequence
  SiRNA target sequence
catctaaaattataataggagaatt

SEQ ID NO: 44850 - DNA, 25 bp, Artificial sequence
  SiRNA target sequence
atctaaaattataataggagaattt

SEQ ID NO: 44851 - DNA, 25 bp, Artificial sequence
  SiRNA target sequence
tctaaaattataataggagaatttt

SEQ ID NO: 44852 - DNA, 25 bp, Artificial sequence
  SiRNA target sequence
ctaaaattataataggagaattttt

SEQ ID NO: 44853 - DNA, 25 bp, Artificial sequence
  SiRNA target sequence
taaaattataataggagaatttttt

SEQ ID NO: 44854 - DNA, 25 bp, Artificial sequence
  SiRNA target sequence
aaaattataataggagaatttttta

SEQ ID NO: 44855 - DNA, 25 bp, Artificial sequence
  SiRNA target sequence
aaattataataggagaattttttag

SEQ ID NO: 44856 - DNA, 25 bp, Artificial sequence
  SiRNA target sequence
aattataataggagaattttttagt

SEQ ID NO: 44857 - DNA, 25 bp, Artificial sequence
  SiRNA target sequence
attataataggagaattttttagtg

SEQ ID NO: 44858 - DNA, 25 bp, Artificial sequence
  SiRNA target sequence
ttataataggagaattttttagtgc

SEQ ID NO: 44859 - DNA, 25 bp, Artificial sequence
  SiRNA target sequence
tataataggagaattttttagtgcc

SEQ ID NO: 44860 - DNA, 25 bp, Artificial sequence
  SiRNA target sequence
ataataggagaattttttagtgccg

SEQ ID NO: 44861 - DNA, 25 bp, Artificial sequence
  SiRNA target sequence
taataggagaattttttagtgccga

SEQ ID NO: 44862 - DNA, 25 bp, Artificial sequence
  SiRNA target sequence
aataggagaattttttagtgccgac

SEQ ID NO: 44863 - DNA, 25 bp, Artificial sequence
  SiRNA target sequence
ataggagaattttttagtgccgacc

SEQ ID NO: 44864 - DNA, 25 bp, Artificial sequence
  SiRNA target sequence
taggagaattttttagtgccgacct

SEQ ID NO: 44865 - DNA, 25 bp, Artificial sequence
  SiRNA target sequence
aggagaattttttagtgccgacctt

SEQ ID NO: 44866 - DNA, 25 bp, Artificial sequence
  SiRNA target sequence
ggagaattttttagtgccgacctta

SEQ ID NO: 44867 - DNA, 25 bp, Artificial sequence
  SiRNA target sequence
gagaattttttagtgccgaccttaa

SEQ ID NO: 44868 - DNA, 25 bp, Artificial sequence
  SiRNA target sequence
agaattttttagtgccgaccttaac

SEQ ID NO: 44869 - DNA, 25 bp, Artificial sequence
  SiRNA target sequence
gaattttttagtgccgaccttaaca

SEQ ID NO: 44870 - DNA, 25 bp, Artificial sequence
  SiRNA target sequence
aattttttagtgccgaccttaacaa

SEQ ID NO: 44871 - DNA, 25 bp, Artificial sequence
  SiRNA target sequence
attttttagtgccgaccttaacaaa

SEQ ID NO: 44872 - DNA, 25 bp, Artificial sequence
  SiRNA target sequence
ttttttagtgccgaccttaacaaaa

SEQ ID NO: 44873 - DNA, 25 bp, Artificial sequence
  SiRNA target sequence
tttttagtgccgaccttaacaaaat

SEQ ID NO: 44874 - DNA, 25 bp, Artificial sequence
  SiRNA target sequence
ttttagtgccgaccttaacaaaatt

SEQ ID NO: 44875 - DNA, 25 bp, Artificial sequence
  SiRNA target sequence
tttagtgccgaccttaacaaaatta

SEQ ID NO: 44876 - DNA, 25 bp, Artificial sequence
  SiRNA target sequence
ttagtgccgaccttaacaaaattac

SEQ ID NO: 44877 - DNA, 25 bp, Artificial sequence
  SiRNA target sequence
tagtgccgaccttaacaaaattact

SEQ ID NO: 44878 - DNA, 25 bp, Artificial sequence
  SiRNA target sequence
agtgccgaccttaacaaaattactt

SEQ ID NO: 44879 - DNA, 25 bp, Artificial sequence
  SiRNA target sequence
gtgccgaccttaacaaaattacttt

SEQ ID NO: 44880 - DNA, 25 bp, Artificial sequence
  SiRNA target sequence
tgccgaccttaacaaaattactttt

SEQ ID NO: 44881 - DNA, 25 bp, Artificial sequence
  SiRNA target sequence
gccgaccttaacaaaattacttttt

SEQ ID NO: 44882 - DNA, 25 bp, Artificial sequence
  SiRNA target sequence
ccgaccttaacaaaattactttttg

SEQ ID NO: 44883 - DNA, 25 bp, Artificial sequence
  SiRNA target sequence
cgaccttaacaaaattactttttgt

SEQ ID NO: 44884 - DNA, 25 bp, Artificial sequence
  SiRNA target sequence
gaccttaacaaaattactttttgtc

SEQ ID NO: 44885 - DNA, 25 bp, Artificial sequence
  SiRNA target sequence
accttaacaaaattactttttgtct

SEQ ID NO: 44886 - DNA, 25 bp, Artificial sequence
  SiRNA target sequence
ccttaacaaaattactttttgtctt

SEQ ID NO: 44887 - DNA, 25 bp, Artificial sequence
  SiRNA target sequence
cttaacaaaattactttttgtcttt

SEQ ID NO: 44888 - DNA, 25 bp, Artificial sequence
  SiRNA target sequence
ttaacaaaattactttttgtctttc

SEQ ID NO: 44889 - DNA, 25 bp, Artificial sequence
  SiRNA target sequence
taacaaaattactttttgtctttct

SEQ ID NO: 44890 - DNA, 25 bp, Artificial sequence
  SiRNA target sequence
aacaaaattactttttgtctttctc

SEQ ID NO: 44891 - DNA, 25 bp, Artificial sequence
  SiRNA target sequence
acaaaattactttttgtctttctcc

SEQ ID NO: 44892 - DNA, 25 bp, Artificial sequence
  SiRNA target sequence
caaaattactttttgtctttctcca

SEQ ID NO: 44893 - DNA, 25 bp, Artificial sequence
  SiRNA target sequence
aaaattactttttgtctttctccac

SEQ ID NO: 44894 - DNA, 25 bp, Artificial sequence
  SiRNA target sequence
aaattactttttgtctttctccacc

SEQ ID NO: 44895 - DNA, 25 bp, Artificial sequence
  SiRNA target sequence
aattactttttgtctttctccacca

SEQ ID NO: 44896 - DNA, 25 bp, Artificial sequence
  SiRNA target sequence
attactttttgtctttctccaccac

SEQ ID NO: 44897 - DNA, 25 bp, Artificial sequence
  SiRNA target sequence
ttactttttgtctttctccaccact

SEQ ID NO: 44898 - DNA, 25 bp, Artificial sequence
  SiRNA target sequence
tactttttgtctttctccaccacta

SEQ ID NO: 44899 - DNA, 25 bp, Artificial sequence
  SiRNA target sequence
actttttgtctttctccaccactaa

SEQ ID NO: 44900 - DNA, 25 bp, Artificial sequence
  SiRNA target sequence
ctttttgtctttctccaccactaag

SEQ ID NO: 44901 - DNA, 25 bp, Artificial sequence
  SiRNA target sequence
tttttgtctttctccaccactaagc

SEQ ID NO: 44902 - DNA, 25 bp, Artificial sequence
  SiRNA target sequence
ttttgtctttctccaccactaagct

SEQ ID NO: 44903 - DNA, 25 bp, Artificial sequence
  SiRNA target sequence
tttgtctttctccaccactaagctt

SEQ ID NO: 44904 - DNA, 25 bp, Artificial sequence
  SiRNA target sequence
ttgtctttctccaccactaagctta

SEQ ID NO: 44905 - DNA, 25 bp, Artificial sequence
  SiRNA target sequence
tgtctttctccaccactaagcttat

SEQ ID NO: 44906 - DNA, 25 bp, Artificial sequence
  SiRNA target sequence
gtctttctccaccactaagcttatg

SEQ ID NO: 44907 - DNA, 25 bp, Artificial sequence
  SiRNA target sequence
tctttctccaccactaagcttatgt

SEQ ID NO: 44908 - DNA, 25 bp, Artificial sequence
  SiRNA target sequence
ctttctccaccactaagcttatgtc

SEQ ID NO: 44909 - DNA, 25 bp, Artificial sequence
  SiRNA target sequence
tttctccaccactaagcttatgtcc

SEQ ID NO: 44910 - DNA, 25 bp, Artificial sequence
  SiRNA target sequence
ttctccaccactaagcttatgtccc

SEQ ID NO: 44911 - DNA, 25 bp, Artificial sequence
  SiRNA target sequence
tctccaccactaagcttatgtccct

SEQ ID NO: 44912 - DNA, 25 bp, Artificial sequence
  SiRNA target sequence
ctccaccactaagcttatgtccctt

SEQ ID NO: 44913 - DNA, 25 bp, Artificial sequence
  SiRNA target sequence
tccaccactaagcttatgtccctta

SEQ ID NO: 44914 - DNA, 25 bp, Artificial sequence
  SiRNA target sequence
ccaccactaagcttatgtcccttat

SEQ ID NO: 44915 - DNA, 25 bp, Artificial sequence
  SiRNA target sequence
caccactaagcttatgtcccttatc

SEQ ID NO: 44916 - DNA, 25 bp, Artificial sequence
  SiRNA target sequence
accactaagcttatgtcccttatct

SEQ ID NO: 44917 - DNA, 25 bp, Artificial sequence
  SiRNA target sequence
ccactaagcttatgtcccttatctc

SEQ ID NO: 44918 - DNA, 25 bp, Artificial sequence
  SiRNA target sequence
cactaagcttatgtcccttatctcc

SEQ ID NO: 44919 - DNA, 25 bp, Artificial sequence
  SiRNA target sequence
actaagcttatgtcccttatctcca

SEQ ID NO: 44920 - DNA, 25 bp, Artificial sequence
  SiRNA target sequence
ctaagcttatgtcccttatctccaa

SEQ ID NO: 44921 - DNA, 25 bp, Artificial sequence
  SiRNA target sequence
taagcttatgtcccttatctccaac

SEQ ID NO: 44922 - DNA, 25 bp, Artificial sequence
  SiRNA target sequence
aagcttatgtcccttatctccaaca

SEQ ID NO: 44923 - DNA, 25 bp, Artificial sequence
  SiRNA target sequence
agcttatgtcccttatctccaacat

SEQ ID NO: 44924 - DNA, 25 bp, Artificial sequence
  SiRNA target sequence
gcttatgtcccttatctccaacatg

SEQ ID NO: 44925 - DNA, 25 bp, Artificial sequence
  SiRNA target sequence
cttatgtcccttatctccaacatgt

SEQ ID NO: 44926 - DNA, 25 bp, Artificial sequence
  SiRNA target sequence
ttatgtcccttatctccaacatgtg

SEQ ID NO: 44927 - DNA, 25 bp, Artificial sequence
  SiRNA target sequence
tatgtcccttatctccaacatgtgt

SEQ ID NO: 44928 - DNA, 25 bp, Artificial sequence
  SiRNA target sequence
atgtcccttatctccaacatgtgtg

SEQ ID NO: 44929 - DNA, 25 bp, Artificial sequence
  SiRNA target sequence
tgtcccttatctccaacatgtgtgt

SEQ ID NO: 44930 - DNA, 25 bp, Artificial sequence
  SiRNA target sequence
gtcccttatctccaacatgtgtgtt

SEQ ID NO: 44931 - DNA, 25 bp, Artificial sequence
  SiRNA target sequence
tcccttatctccaacatgtgtgttg

SEQ ID NO: 44932 - DNA, 25 bp, Artificial sequence
  SiRNA target sequence
cccttatctccaacatgtgtgttgt

SEQ ID NO: 44933 - DNA, 25 bp, Artificial sequence
  SiRNA target sequence
ccttatctccaacatgtgtgttgta

SEQ ID NO: 44934 - DNA, 25 bp, Artificial sequence
  SiRNA target sequence
cttatctccaacatgtgtgttgtat

SEQ ID NO: 44935 - DNA, 25 bp, Artificial sequence
  SiRNA target sequence
ttatctccaacatgtgtgttgtatt

SEQ ID NO: 44936 - DNA, 25 bp, Artificial sequence
  SiRNA target sequence
tatctccaacatgtgtgttgtattc

SEQ ID NO: 44937 - DNA, 25 bp, Artificial sequence
  SiRNA target sequence
atctccaacatgtgtgttgtattca

SEQ ID NO: 44938 - DNA, 25 bp, Artificial sequence
  SiRNA target sequence
tctccaacatgtgtgttgtattcat

SEQ ID NO: 44939 - DNA, 25 bp, Artificial sequence
  SiRNA target sequence
ctccaacatgtgtgttgtattcatc

SEQ ID NO: 44940 - DNA, 25 bp, Artificial sequence
  SiRNA target sequence
tccaacatgtgtgttgtattcatcc

SEQ ID NO: 44941 - DNA, 25 bp, Artificial sequence
  SiRNA target sequence
ccaacatgtgtgttgtattcatcct

SEQ ID NO: 44942 - DNA, 25 bp, Artificial sequence
  SiRNA target sequence
caacatgtgtgttgtattcatcctc

SEQ ID NO: 44943 - DNA, 25 bp, Artificial sequence
  SiRNA target sequence
aacatgtgtgttgtattcatcctct

SEQ ID NO: 44944 - DNA, 25 bp, Artificial sequence
  SiRNA target sequence
acatgtgtgttgtattcatcctcta

SEQ ID NO: 44945 - DNA, 25 bp, Artificial sequence
  SiRNA target sequence
catgtgtgttgtattcatcctctag

SEQ ID NO: 44946 - DNA, 25 bp, Artificial sequence
  SiRNA target sequence
atgtgtgttgtattcatcctctagg

SEQ ID NO: 44947 - DNA, 25 bp, Artificial sequence
  SiRNA target sequence
tgtgtgttgtattcatcctctaggt

SEQ ID NO: 44948 - DNA, 25 bp, Artificial sequence
  SiRNA target sequence
gtgtgttgtattcatcctctaggtt

SEQ ID NO: 44949 - DNA, 25 bp, Artificial sequence
  SiRNA target sequence
tgtgttgtattcatcctctaggttg

SEQ ID NO: 44950 - DNA, 25 bp, Artificial sequence
  SiRNA target sequence
gtgttgtattcatcctctaggttgt

SEQ ID NO: 44951 - DNA, 25 bp, Artificial sequence
  SiRNA target sequence
tgttgtattcatcctctaggttgtt

SEQ ID NO: 44952 - DNA, 25 bp, Artificial sequence
  SiRNA target sequence
gttgtattcatcctctaggttgttt

SEQ ID NO: 44953 - DNA, 25 bp, Artificial sequence
  SiRNA target sequence
ttgtattcatcctctaggttgttta

SEQ ID NO: 44954 - DNA, 25 bp, Artificial sequence
  SiRNA target sequence
tgtattcatcctctaggttgtttat

SEQ ID NO: 44955 - DNA, 25 bp, Artificial sequence
  SiRNA target sequence
gtattcatcctctaggttgtttata

SEQ ID NO: 44956 - DNA, 25 bp, Artificial sequence
  SiRNA target sequence
tattcatcctctaggttgtttatag

SEQ ID NO: 44957 - DNA, 25 bp, Artificial sequence
  SiRNA target sequence
attcatcctctaggttgtttataga

SEQ ID NO: 44958 - DNA, 25 bp, Artificial sequence
  SiRNA target sequence
ttcatcctctaggttgtttatagaa

SEQ ID NO: 44959 - DNA, 25 bp, Artificial sequence
  SiRNA target sequence
tcatcctctaggttgtttatagaat

SEQ ID NO: 44960 - DNA, 25 bp, Artificial sequence
  SiRNA target sequence
catcctctaggttgtttatagaatc

SEQ ID NO: 44961 - DNA, 25 bp, Artificial sequence
  SiRNA target sequence
atcctctaggttgtttatagaatcg

SEQ ID NO: 44962 - DNA, 25 bp, Artificial sequence
  SiRNA target sequence
tcctctaggttgtttatagaatcgt

SEQ ID NO: 44963 - DNA, 25 bp, Artificial sequence
  SiRNA target sequence
cctctaggttgtttatagaatcgtg

SEQ ID NO: 44964 - DNA, 25 bp, Artificial sequence
  SiRNA target sequence
ctctaggttgtttatagaatcgtgt

SEQ ID NO: 44965 - DNA, 25 bp, Artificial sequence
  SiRNA target sequence
tctaggttgtttatagaatcgtgta

SEQ ID NO: 44966 - DNA, 25 bp, Artificial sequence
  SiRNA target sequence
ctaggttgtttatagaatcgtgtac

SEQ ID NO: 44967 - DNA, 25 bp, Artificial sequence
  SiRNA target sequence
taggttgtttatagaatcgtgtaca

SEQ ID NO: 44968 - DNA, 25 bp, Artificial sequence
  SiRNA target sequence
aggttgtttatagaatcgtgtacac

SEQ ID NO: 44969 - DNA, 25 bp, Artificial sequence
  SiRNA target sequence
ggttgtttatagaatcgtgtacaca

SEQ ID NO: 44970 - DNA, 25 bp, Artificial sequence
  SiRNA target sequence
gttgtttatagaatcgtgtacacaa

SEQ ID NO: 44971 - DNA, 25 bp, Artificial sequence
  SiRNA target sequence
ttgtttatagaatcgtgtacacaaa

SEQ ID NO: 44972 - DNA, 25 bp, Artificial sequence
  SiRNA target sequence
tgtttatagaatcgtgtacacaaag

SEQ ID NO: 44973 - DNA, 25 bp, Artificial sequence
  SiRNA target sequence
gtttatagaatcgtgtacacaaagt

SEQ ID NO: 44974 - DNA, 25 bp, Artificial sequence
  SiRNA target sequence
tttatagaatcgtgtacacaaagtt

SEQ ID NO: 44975 - DNA, 25 bp, Artificial sequence
  SiRNA target sequence
ttatagaatcgtgtacacaaagttt

SEQ ID NO: 44976 - DNA, 25 bp, Artificial sequence
  SiRNA target sequence
tatagaatcgtgtacacaaagtttt

SEQ ID NO: 44977 - DNA, 25 bp, Artificial sequence
  SiRNA target sequence
atagaatcgtgtacacaaagttttt

SEQ ID NO: 44978 - DNA, 25 bp, Artificial sequence
  SiRNA target sequence
tagaatcgtgtacacaaagtttttt

SEQ ID NO: 44979 - DNA, 25 bp, Artificial sequence
  SiRNA target sequence
agaatcgtgtacacaaagtttttta

SEQ ID NO: 44980 - DNA, 25 bp, Artificial sequence
  SiRNA target sequence
gaatcgtgtacacaaagttttttac

SEQ ID NO: 44981 - DNA, 25 bp, Artificial sequence
  SiRNA target sequence
aatcgtgtacacaaagttttttact

SEQ ID NO: 44982 - DNA, 25 bp, Artificial sequence
  SiRNA target sequence
atcgtgtacacaaagttttttactg

SEQ ID NO: 44983 - DNA, 25 bp, Artificial sequence
  SiRNA target sequence
tcgtgtacacaaagttttttactga

SEQ ID NO: 44984 - DNA, 25 bp, Artificial sequence
  SiRNA target sequence
cgtgtacacaaagttttttactgat

SEQ ID NO: 44985 - DNA, 25 bp, Artificial sequence
  SiRNA target sequence
gtgtacacaaagttttttactgatt

SEQ ID NO: 44986 - DNA, 25 bp, Artificial sequence
  SiRNA target sequence
tgtacacaaagttttttactgattt

SEQ ID NO: 44987 - DNA, 25 bp, Artificial sequence
  SiRNA target sequence
gtacacaaagttttttactgatttt

SEQ ID NO: 44988 - DNA, 25 bp, Artificial sequence
  SiRNA target sequence
tacacaaagttttttactgattttt

SEQ ID NO: 44989 - DNA, 25 bp, Artificial sequence
  SiRNA target sequence
acacaaagttttttactgattttta

SEQ ID NO: 44990 - DNA, 25 bp, Artificial sequence
  SiRNA target sequence
cacaaagttttttactgatttttat

SEQ ID NO: 44991 - DNA, 25 bp, Artificial sequence
  SiRNA target sequence
acaaagttttttactgatttttata

SEQ ID NO: 44992 - DNA, 25 bp, Artificial sequence
  SiRNA target sequence
caaagttttttactgatttttataa

SEQ ID NO: 44993 - DNA, 25 bp, Artificial sequence
  SiRNA target sequence
aaagttttttactgatttttataac

SEQ ID NO: 44994 - DNA, 25 bp, Artificial sequence
  SiRNA target sequence
aagttttttactgatttttataact

SEQ ID NO: 44995 - DNA, 25 bp, Artificial sequence
  SiRNA target sequence
agttttttactgatttttataactt

SEQ ID NO: 44996 - DNA, 25 bp, Artificial sequence
  SiRNA target sequence
gttttttactgatttttataacttc

SEQ ID NO: 44997 - DNA, 25 bp, Artificial sequence
  SiRNA target sequence
ttttttactgatttttataacttct

SEQ ID NO: 44998 - DNA, 25 bp, Artificial sequence
  SiRNA target sequence
tttttactgatttttataacttctt

SEQ ID NO: 44999 - DNA, 25 bp, Artificial sequence
  SiRNA target sequence
ttttactgatttttataacttcttc

SEQ ID NO: 45000 - DNA, 25 bp, Artificial sequence
  SiRNA target sequence
tttactgatttttataacttcttct

SEQ ID NO: 45001 - DNA, 25 bp, Artificial sequence
  SiRNA target sequence
ttactgatttttataacttcttctt

SEQ ID NO: 45002 - DNA, 25 bp, Artificial sequence
  SiRNA target sequence
tactgatttttataacttcttcttt

SEQ ID NO: 45003 - DNA, 25 bp, Artificial sequence
  SiRNA target sequence
actgatttttataacttcttcttta

SEQ ID NO: 45004 - DNA, 25 bp, Artificial sequence
  SiRNA target sequence
ctgatttttataacttcttctttat

SEQ ID NO: 45005 - DNA, 25 bp, Artificial sequence
  SiRNA target sequence
tgatttttataacttcttctttatc

SEQ ID NO: 45006 - DNA, 25 bp, Artificial sequence
  SiRNA target sequence
gatttttataacttcttctttatca

SEQ ID NO: 45007 - DNA, 25 bp, Artificial sequence
  SiRNA target sequence
atttttataacttcttctttatcaa

SEQ ID NO: 45008 - DNA, 25 bp, Artificial sequence
  SiRNA target sequence
tttttataacttcttctttatcaaa

SEQ ID NO: 45009 - DNA, 25 bp, Artificial sequence
  SiRNA target sequence
ttttataacttcttctttatcaaat

SEQ ID NO: 45010 - DNA, 25 bp, Artificial sequence
  SiRNA target sequence
tttataacttcttctttatcaaata

SEQ ID NO: 45011 - DNA, 25 bp, Artificial sequence
  SiRNA target sequence
ttataacttcttctttatcaaatat

SEQ ID NO: 45012 - DNA, 25 bp, Artificial sequence
  SiRNA target sequence
tataacttcttctttatcaaatatt

SEQ ID NO: 45013 - DNA, 25 bp, Artificial sequence
  SiRNA target sequence
ataacttcttctttatcaaatattt

SEQ ID NO: 45014 - DNA, 25 bp, Artificial sequence
  SiRNA target sequence
taacttcttctttatcaaatatttc

SEQ ID NO: 45015 - DNA, 25 bp, Artificial sequence
  SiRNA target sequence
aacttcttctttatcaaatatttct

SEQ ID NO: 45016 - DNA, 25 bp, Artificial sequence
  SiRNA target sequence
acttcttctttatcaaatatttctt

SEQ ID NO: 45017 - DNA, 25 bp, Artificial sequence
  SiRNA target sequence
cttcttctttatcaaatatttcttt

SEQ ID NO: 45018 - DNA, 25 bp, Artificial sequence
  SiRNA target sequence
ttcttctttatcaaatatttctttt

SEQ ID NO: 45019 - DNA, 25 bp, Artificial sequence
  SiRNA target sequence
tcttctttatcaaatatttcttttc

SEQ ID NO: 45020 - DNA, 25 bp, Artificial sequence
  SiRNA target sequence
cttctttatcaaatatttcttttcc

SEQ ID NO: 45021 - DNA, 25 bp, Artificial sequence
  SiRNA target sequence
ttctttatcaaatatttcttttcca

SEQ ID NO: 45022 - DNA, 25 bp, Artificial sequence
  SiRNA target sequence
tctttatcaaatatttcttttccat

SEQ ID NO: 45023 - DNA, 25 bp, Artificial sequence
  SiRNA target sequence
ctttatcaaatatttcttttccata

SEQ ID NO: 45024 - DNA, 25 bp, Artificial sequence
  SiRNA target sequence
tttatcaaatatttcttttccatat

SEQ ID NO: 45025 - DNA, 25 bp, Artificial sequence
  SiRNA target sequence
ttatcaaatatttcttttccatatg

SEQ ID NO: 45026 - DNA, 25 bp, Artificial sequence
  SiRNA target sequence
tatcaaatatttcttttccatatgt

SEQ ID NO: 45027 - DNA, 25 bp, Artificial sequence
  SiRNA target sequence
atcaaatatttcttttccatatgtt

SEQ ID NO: 45028 - DNA, 25 bp, Artificial sequence
  SiRNA target sequence
tcaaatatttcttttccatatgtta

SEQ ID NO: 45029 - DNA, 25 bp, Artificial sequence
  SiRNA target sequence
caaatatttcttttccatatgttaa

SEQ ID NO: 45030 - DNA, 25 bp, Artificial sequence
  SiRNA target sequence
aaatatttcttttccatatgttaaa

SEQ ID NO: 45031 - DNA, 25 bp, Artificial sequence
  SiRNA target sequence
aatatttcttttccatatgttaaat

SEQ ID NO: 45032 - DNA, 25 bp, Artificial sequence
  SiRNA target sequence
atatttcttttccatatgttaaatt

SEQ ID NO: 45033 - DNA, 25 bp, Artificial sequence
  SiRNA target sequence
tatttcttttccatatgttaaatta

SEQ ID NO: 45034 - DNA, 25 bp, Artificial sequence
  SiRNA target sequence
atttcttttccatatgttaaattat

SEQ ID NO: 45035 - DNA, 25 bp, Artificial sequence
  SiRNA target sequence
tttcttttccatatgttaaattata

SEQ ID NO: 45036 - DNA, 25 bp, Artificial sequence
  SiRNA target sequence
ttcttttccatatgttaaattataa

SEQ ID NO: 45037 - DNA, 25 bp, Artificial sequence
  SiRNA target sequence
tcttttccatatgttaaattataat

SEQ ID NO: 45038 - DNA, 25 bp, Artificial sequence
  SiRNA target sequence
cttttccatatgttaaattataata

SEQ ID NO: 45039 - DNA, 25 bp, Artificial sequence
  SiRNA target sequence
ttttccatatgttaaattataataa

SEQ ID NO: 45040 - DNA, 25 bp, Artificial sequence
  SiRNA target sequence
tttccatatgttaaattataataaa

SEQ ID NO: 45041 - DNA, 25 bp, Artificial sequence
  SiRNA target sequence
ttccatatgttaaattataataaac

SEQ ID NO: 45042 - DNA, 25 bp, Artificial sequence
  SiRNA target sequence
tccatatgttaaattataataaacc

SEQ ID NO: 45043 - DNA, 25 bp, Artificial sequence
  SiRNA target sequence
ccatatgttaaattataataaaccg

SEQ ID NO: 45044 - DNA, 25 bp, Artificial sequence
  SiRNA target sequence
catatgttaaattataataaaccgt

SEQ ID NO: 45045 - DNA, 25 bp, Artificial sequence
  SiRNA target sequence
atatgttaaattataataaaccgtt

SEQ ID NO: 45046 - DNA, 25 bp, Artificial sequence
  SiRNA target sequence
tatgttaaattataataaaccgttt

SEQ ID NO: 45047 - DNA, 25 bp, Artificial sequence
  SiRNA target sequence
atgttaaattataataaaccgtttc

SEQ ID NO: 45048 - DNA, 25 bp, Artificial sequence
  SiRNA target sequence
tgttaaattataataaaccgtttcg

SEQ ID NO: 45049 - DNA, 25 bp, Artificial sequence
  SiRNA target sequence
gttaaattataataaaccgtttcgt

SEQ ID NO: 45050 - DNA, 25 bp, Artificial sequence
  SiRNA target sequence
ttaaattataataaaccgtttcgtt

SEQ ID NO: 45051 - DNA, 25 bp, Artificial sequence
  SiRNA target sequence
taaattataataaaccgtttcgtta

SEQ ID NO: 45052 - DNA, 25 bp, Artificial sequence
  SiRNA target sequence
aaattataataaaccgtttcgttaa

SEQ ID NO: 45053 - DNA, 25 bp, Artificial sequence
  SiRNA target sequence
aattataataaaccgtttcgttaaa

SEQ ID NO: 45054 - DNA, 25 bp, Artificial sequence
  SiRNA target sequence
attataataaaccgtttcgttaaac

SEQ ID NO: 45055 - DNA, 25 bp, Artificial sequence
  SiRNA target sequence
ttataataaaccgtttcgttaaaca

SEQ ID NO: 45056 - DNA, 25 bp, Artificial sequence
  SiRNA target sequence
tataataaaccgtttcgttaaacaa

SEQ ID NO: 45057 - DNA, 25 bp, Artificial sequence
  SiRNA target sequence
ataataaaccgtttcgttaaacaaa

SEQ ID NO: 45058 - DNA, 25 bp, Artificial sequence
  SiRNA target sequence
taataaaccgtttcgttaaacaaaa

SEQ ID NO: 45059 - DNA, 25 bp, Artificial sequence
  SiRNA target sequence
aataaaccgtttcgttaaacaaaaa

SEQ ID NO: 45060 - DNA, 25 bp, Artificial sequence
  SiRNA target sequence
ataaaccgtttcgttaaacaaaaat

SEQ ID NO: 45061 - DNA, 25 bp, Artificial sequence
  SiRNA target sequence
taaaccgtttcgttaaacaaaaatg

SEQ ID NO: 45062 - DNA, 25 bp, Artificial sequence
  SiRNA target sequence
aaaccgtttcgttaaacaaaaatga

SEQ ID NO: 45063 - DNA, 25 bp, Artificial sequence
  SiRNA target sequence
aaccgtttcgttaaacaaaaatgag

SEQ ID NO: 45064 - DNA, 25 bp, Artificial sequence
  SiRNA target sequence
accgtttcgttaaacaaaaatgagg

SEQ ID NO: 45065 - DNA, 25 bp, Artificial sequence
  SiRNA target sequence
ccgtttcgttaaacaaaaatgaggt

SEQ ID NO: 45066 - DNA, 25 bp, Artificial sequence
  SiRNA target sequence
cgtttcgttaaacaaaaatgaggtt

SEQ ID NO: 45067 - DNA, 25 bp, Artificial sequence
  SiRNA target sequence
gtttcgttaaacaaaaatgaggttt

SEQ ID NO: 45068 - DNA, 25 bp, Artificial sequence
  SiRNA target sequence
tttcgttaaacaaaaatgaggtttg

SEQ ID NO: 45069 - DNA, 25 bp, Artificial sequence
  SiRNA target sequence
ttcgttaaacaaaaatgaggtttgt

SEQ ID NO: 45070 - DNA, 25 bp, Artificial sequence
  SiRNA target sequence
tcgttaaacaaaaatgaggtttgtg

SEQ ID NO: 45071 - DNA, 25 bp, Artificial sequence
  SiRNA target sequence
cgttaaacaaaaatgaggtttgtgg

SEQ ID NO: 45072 - DNA, 25 bp, Artificial sequence
  SiRNA target sequence
gttaaacaaaaatgaggtttgtggt

SEQ ID NO: 45073 - DNA, 25 bp, Artificial sequence
  SiRNA target sequence
ttaaacaaaaatgaggtttgtggtg

SEQ ID NO: 45074 - DNA, 25 bp, Artificial sequence
  SiRNA target sequence
taaacaaaaatgaggtttgtggtgc

SEQ ID NO: 45075 - DNA, 25 bp, Artificial sequence
  SiRNA target sequence
aaacaaaaatgaggtttgtggtgca

SEQ ID NO: 45076 - DNA, 25 bp, Artificial sequence
  SiRNA target sequence
aacaaaaatgaggtttgtggtgcaa

SEQ ID NO: 45077 - DNA, 25 bp, Artificial sequence
  SiRNA target sequence
acaaaaatgaggtttgtggtgcaaa

SEQ ID NO: 45078 - DNA, 25 bp, Artificial sequence
  SiRNA target sequence
caaaaatgaggtttgtggtgcaaat

SEQ ID NO: 45079 - DNA, 25 bp, Artificial sequence
  SiRNA target sequence
aaaaatgaggtttgtggtgcaaatg

SEQ ID NO: 45080 - DNA, 25 bp, Artificial sequence
  SiRNA target sequence
aaaatgaggtttgtggtgcaaatga

SEQ ID NO: 45081 - DNA, 25 bp, Artificial sequence
  SiRNA target sequence
aaatgaggtttgtggtgcaaatgat

SEQ ID NO: 45082 - DNA, 25 bp, Artificial sequence
  SiRNA target sequence
aatgaggtttgtggtgcaaatgata

SEQ ID NO: 45083 - DNA, 25 bp, Artificial sequence
  SiRNA target sequence
atgaggtttgtggtgcaaatgatat

SEQ ID NO: 45084 - DNA, 25 bp, Artificial sequence
  SiRNA target sequence
tgaggtttgtggtgcaaatgatata

SEQ ID NO: 45085 - DNA, 25 bp, Artificial sequence
  SiRNA target sequence
gaggtttgtggtgcaaatgatataa

SEQ ID NO: 45086 - DNA, 25 bp, Artificial sequence
  SiRNA target sequence
aggtttgtggtgcaaatgatataag

SEQ ID NO: 45087 - DNA, 25 bp, Artificial sequence
  SiRNA target sequence
ggtttgtggtgcaaatgatataagt

SEQ ID NO: 45088 - DNA, 25 bp, Artificial sequence
  SiRNA target sequence
gtttgtggtgcaaatgatataagtg

SEQ ID NO: 45089 - DNA, 25 bp, Artificial sequence
  SiRNA target sequence
tttgtggtgcaaatgatataagtga

SEQ ID NO: 45090 - DNA, 25 bp, Artificial sequence
  SiRNA target sequence
ttgtggtgcaaatgatataagtgat

SEQ ID NO: 45091 - DNA, 25 bp, Artificial sequence
  SiRNA target sequence
tgtggtgcaaatgatataagtgatc

SEQ ID NO: 45092 - DNA, 25 bp, Artificial sequence
  SiRNA target sequence
gtggtgcaaatgatataagtgatct

SEQ ID NO: 45093 - DNA, 25 bp, Artificial sequence
  SiRNA target sequence
tggtgcaaatgatataagtgatcta

SEQ ID NO: 45094 - DNA, 25 bp, Artificial sequence
  SiRNA target sequence
ggtgcaaatgatataagtgatctat

SEQ ID NO: 45095 - DNA, 25 bp, Artificial sequence
  SiRNA target sequence
gtgcaaatgatataagtgatctata

SEQ ID NO: 45096 - DNA, 25 bp, Artificial sequence
  SiRNA target sequence
tgcaaatgatataagtgatctatat

SEQ ID NO: 45097 - DNA, 25 bp, Artificial sequence
  SiRNA target sequence
gcaaatgatataagtgatctatatg

SEQ ID NO: 45098 - DNA, 25 bp, Artificial sequence
  SiRNA target sequence
caaatgatataagtgatctatatga

SEQ ID NO: 45099 - DNA, 25 bp, Artificial sequence
  SiRNA target sequence
aaatgatataagtgatctatatgaa

SEQ ID NO: 45100 - DNA, 25 bp, Artificial sequence
  SiRNA target sequence
aatgatataagtgatctatatgaac

SEQ ID NO: 45101 - DNA, 25 bp, Artificial sequence
  SiRNA target sequence
atgatataagtgatctatatgaact

SEQ ID NO: 45102 - DNA, 25 bp, Artificial sequence
  SiRNA target sequence
tgatataagtgatctatatgaacta

SEQ ID NO: 45103 - DNA, 25 bp, Artificial sequence
  SiRNA target sequence
gatataagtgatctatatgaactat

SEQ ID NO: 45104 - DNA, 25 bp, Artificial sequence
  SiRNA target sequence
atataagtgatctatatgaactatt

SEQ ID NO: 45105 - DNA, 25 bp, Artificial sequence
  SiRNA target sequence
tataagtgatctatatgaactatta

SEQ ID NO: 45106 - DNA, 25 bp, Artificial sequence
  SiRNA target sequence
ataagtgatctatatgaactattag

SEQ ID NO: 45107 - DNA, 25 bp, Artificial sequence
  SiRNA target sequence
taagtgatctatatgaactattaga

SEQ ID NO: 45108 - DNA, 25 bp, Artificial sequence
  SiRNA target sequence
aagtgatctatatgaactattagaa

SEQ ID NO: 45109 - DNA, 25 bp, Artificial sequence
  SiRNA target sequence
agtgatctatatgaactattagaaa

SEQ ID NO: 45110 - DNA, 25 bp, Artificial sequence
  SiRNA target sequence
gtgatctatatgaactattagaaat

SEQ ID NO: 45111 - DNA, 25 bp, Artificial sequence
  SiRNA target sequence
tgatctatatgaactattagaaatt

SEQ ID NO: 45112 - DNA, 25 bp, Artificial sequence
  SiRNA target sequence
gatctatatgaactattagaaattt

SEQ ID NO: 45113 - DNA, 25 bp, Artificial sequence
  SiRNA target sequence
atctatatgaactattagaaatttc

SEQ ID NO: 45114 - DNA, 25 bp, Artificial sequence
  SiRNA target sequence
tctatatgaactattagaaatttct

SEQ ID NO: 45115 - DNA, 25 bp, Artificial sequence
  SiRNA target sequence
ctatatgaactattagaaatttctt

SEQ ID NO: 45116 - DNA, 25 bp, Artificial sequence
  SiRNA target sequence
tatatgaactattagaaatttcttt

SEQ ID NO: 45117 - DNA, 25 bp, Artificial sequence
  SiRNA target sequence
atatgaactattagaaatttctttt

SEQ ID NO: 45118 - DNA, 25 bp, Artificial sequence
  SiRNA target sequence
tatgaactattagaaatttctttta

SEQ ID NO: 45119 - DNA, 25 bp, Artificial sequence
  SiRNA target sequence
atgaactattagaaatttcttttat

SEQ ID NO: 45120 - DNA, 25 bp, Artificial sequence
  SiRNA target sequence
tgaactattagaaatttcttttata

SEQ ID NO: 45121 - DNA, 25 bp, Artificial sequence
  SiRNA target sequence
gaactattagaaatttcttttatat

SEQ ID NO: 45122 - DNA, 25 bp, Artificial sequence
  SiRNA target sequence
aactattagaaatttcttttatatc

SEQ ID NO: 45123 - DNA, 25 bp, Artificial sequence
  SiRNA target sequence
actattagaaatttcttttatatct

SEQ ID NO: 45124 - DNA, 25 bp, Artificial sequence
  SiRNA target sequence
ctattagaaatttcttttatatctc

SEQ ID NO: 45125 - DNA, 25 bp, Artificial sequence
  SiRNA target sequence
tattagaaatttcttttatatctcg

SEQ ID NO: 45126 - DNA, 25 bp, Artificial sequence
  SiRNA target sequence
attagaaatttcttttatatctcga

SEQ ID NO: 45127 - DNA, 25 bp, Artificial sequence
  SiRNA target sequence
ttagaaatttcttttatatctcgat

SEQ ID NO: 45128 - DNA, 25 bp, Artificial sequence
  SiRNA target sequence
tagaaatttcttttatatctcgatt

SEQ ID NO: 45129 - DNA, 25 bp, Artificial sequence
  SiRNA target sequence
agaaatttcttttatatctcgatta

SEQ ID NO: 45130 - DNA, 25 bp, Artificial sequence
  SiRNA target sequence
gaaatttcttttatatctcgattat

SEQ ID NO: 45131 - DNA, 25 bp, Artificial sequence
  SiRNA target sequence
aaatttcttttatatctcgattatc

SEQ ID NO: 45132 - DNA, 25 bp, Artificial sequence
  SiRNA target sequence
aatttcttttatatctcgattatct

SEQ ID NO: 45133 - DNA, 25 bp, Artificial sequence
  SiRNA target sequence
atttcttttatatctcgattatcta

SEQ ID NO: 45134 - DNA, 25 bp, Artificial sequence
  SiRNA target sequence
tttcttttatatctcgattatctag

SEQ ID NO: 45135 - DNA, 25 bp, Artificial sequence
  SiRNA target sequence
ttcttttatatctcgattatctaga

SEQ ID NO: 45136 - DNA, 25 bp, Artificial sequence
  SiRNA target sequence
tcttttatatctcgattatctagat

SEQ ID NO: 45137 - DNA, 25 bp, Artificial sequence
  SiRNA target sequence
cttttatatctcgattatctagata

SEQ ID NO: 45138 - DNA, 25 bp, Artificial sequence
  SiRNA target sequence
ttttatatctcgattatctagataa

SEQ ID NO: 45139 - DNA, 25 bp, Artificial sequence
  SiRNA target sequence
tttatatctcgattatctagataaa

SEQ ID NO: 45140 - DNA, 25 bp, Artificial sequence
  SiRNA target sequence
ttatatctcgattatctagataaat

SEQ ID NO: 45141 - DNA, 25 bp, Artificial sequence
  SiRNA target sequence
tatatctcgattatctagataaata

SEQ ID NO: 45142 - DNA, 25 bp, Artificial sequence
  SiRNA target sequence
atatctcgattatctagataaatat

SEQ ID NO: 45143 - DNA, 25 bp, Artificial sequence
  SiRNA target sequence
tatctcgattatctagataaatatt

SEQ ID NO: 45144 - DNA, 25 bp, Artificial sequence
  SiRNA target sequence
atctcgattatctagataaatattt

SEQ ID NO: 45145 - DNA, 25 bp, Artificial sequence
  SiRNA target sequence
tctcgattatctagataaatatttc

SEQ ID NO: 45146 - DNA, 25 bp, Artificial sequence
  SiRNA target sequence
ctcgattatctagataaatatttcc

SEQ ID NO: 45147 - DNA, 25 bp, Artificial sequence
  SiRNA target sequence
tcgattatctagataaatatttccc

SEQ ID NO: 45148 - DNA, 25 bp, Artificial sequence
  SiRNA target sequence
cgattatctagataaatatttcccc

SEQ ID NO: 45149 - DNA, 25 bp, Artificial sequence
  SiRNA target sequence
gattatctagataaatatttccccc

SEQ ID NO: 45150 - DNA, 25 bp, Artificial sequence
  SiRNA target sequence
attatctagataaatatttccccca

SEQ ID NO: 45151 - DNA, 25 bp, Artificial sequence
  SiRNA target sequence
ttatctagataaatatttcccccat

SEQ ID NO: 45152 - DNA, 25 bp, Artificial sequence
  SiRNA target sequence
tatctagataaatatttcccccata

SEQ ID NO: 45153 - DNA, 25 bp, Artificial sequence
  SiRNA target sequence
atctagataaatatttcccccataa

SEQ ID NO: 45154 - DNA, 25 bp, Artificial sequence
  SiRNA target sequence
tctagataaatatttcccccataat

SEQ ID NO: 45155 - DNA, 25 bp, Artificial sequence
  SiRNA target sequence
ctagataaatatttcccccataatt

SEQ ID NO: 45156 - DNA, 25 bp, Artificial sequence
  SiRNA target sequence
tagataaatatttcccccataattt

SEQ ID NO: 45157 - DNA, 25 bp, Artificial sequence
  SiRNA target sequence
agataaatatttcccccataatttt

SEQ ID NO: 45158 - DNA, 25 bp, Artificial sequence
  SiRNA target sequence
gataaatatttcccccataattttc

SEQ ID NO: 45159 - DNA, 25 bp, Artificial sequence
  SiRNA target sequence
ataaatatttcccccataattttca

SEQ ID NO: 45160 - DNA, 25 bp, Artificial sequence
  SiRNA target sequence
taaatatttcccccataattttcaa

SEQ ID NO: 45161 - DNA, 25 bp, Artificial sequence
  SiRNA target sequence
aaatatttcccccataattttcaaa

SEQ ID NO: 45162 - DNA, 25 bp, Artificial sequence
  SiRNA target sequence
aatatttcccccataattttcaaat

SEQ ID NO: 45163 - DNA, 25 bp, Artificial sequence
  SiRNA target sequence
atatttcccccataattttcaaatc

SEQ ID NO: 45164 - DNA, 25 bp, Artificial sequence
  SiRNA target sequence
tatttcccccataattttcaaatct

SEQ ID NO: 45165 - DNA, 25 bp, Artificial sequence
  SiRNA target sequence
atttcccccataattttcaaatctc

SEQ ID NO: 45166 - DNA, 25 bp, Artificial sequence
  SiRNA target sequence
tttcccccataattttcaaatctca

SEQ ID NO: 45167 - DNA, 25 bp, Artificial sequence
  SiRNA target sequence
ttcccccataattttcaaatctcat

SEQ ID NO: 45168 - DNA, 25 bp, Artificial sequence
  SiRNA target sequence
tcccccataattttcaaatctcata

SEQ ID NO: 45169 - DNA, 25 bp, Artificial sequence
  SiRNA target sequence
cccccataattttcaaatctcataa

SEQ ID NO: 45170 - DNA, 25 bp, Artificial sequence
  SiRNA target sequence
ccccataattttcaaatctcataat

SEQ ID NO: 45171 - DNA, 25 bp, Artificial sequence
  SiRNA target sequence
cccataattttcaaatctcataatc

SEQ ID NO: 45172 - DNA, 25 bp, Artificial sequence
  SiRNA target sequence
ccataattttcaaatctcataatca

SEQ ID NO: 45173 - DNA, 25 bp, Artificial sequence
  SiRNA target sequence
cataattttcaaatctcataatcat

SEQ ID NO: 45174 - DNA, 25 bp, Artificial sequence
  SiRNA target sequence
ataattttcaaatctcataatcatc

SEQ ID NO: 45175 - DNA, 25 bp, Artificial sequence
  SiRNA target sequence
taattttcaaatctcataatcatct

SEQ ID NO: 45176 - DNA, 25 bp, Artificial sequence
  SiRNA target sequence
aattttcaaatctcataatcatctt

SEQ ID NO: 45177 - DNA, 25 bp, Artificial sequence
  SiRNA target sequence
attttcaaatctcataatcatcttt

SEQ ID NO: 45178 - DNA, 25 bp, Artificial sequence
  SiRNA target sequence
ttttcaaatctcataatcatcttta

SEQ ID NO: 45179 - DNA, 25 bp, Artificial sequence
  SiRNA target sequence
tttcaaatctcataatcatctttat

SEQ ID NO: 45180 - DNA, 25 bp, Artificial sequence
  SiRNA target sequence
ttcaaatctcataatcatctttata

SEQ ID NO: 45181 - DNA, 25 bp, Artificial sequence
  SiRNA target sequence
tcaaatctcataatcatctttataa

SEQ ID NO: 45182 - DNA, 25 bp, Artificial sequence
  SiRNA target sequence
caaatctcataatcatctttataag

SEQ ID NO: 45183 - DNA, 25 bp, Artificial sequence
  SiRNA target sequence
aaatctcataatcatctttataaga

SEQ ID NO: 45184 - DNA, 25 bp, Artificial sequence
  SiRNA target sequence
aatctcataatcatctttataagag

SEQ ID NO: 45185 - DNA, 25 bp, Artificial sequence
  SiRNA target sequence
atctcataatcatctttataagaga

SEQ ID NO: 45186 - DNA, 25 bp, Artificial sequence
  SiRNA target sequence
tctcataatcatctttataagagat

SEQ ID NO: 45187 - DNA, 25 bp, Artificial sequence
  SiRNA target sequence
ctcataatcatctttataagagatg

SEQ ID NO: 45188 - DNA, 25 bp, Artificial sequence
  SiRNA target sequence
tcataatcatctttataagagatgt

SEQ ID NO: 45189 - DNA, 25 bp, Artificial sequence
  SiRNA target sequence
cataatcatctttataagagatgtt

SEQ ID NO: 45190 - DNA, 25 bp, Artificial sequence
  SiRNA target sequence
ataatcatctttataagagatgttt

SEQ ID NO: 45191 - DNA, 25 bp, Artificial sequence
  SiRNA target sequence
taatcatctttataagagatgtttt

SEQ ID NO: 45192 - DNA, 25 bp, Artificial sequence
  SiRNA target sequence
aatcatctttataagagatgttttt

SEQ ID NO: 45193 - DNA, 25 bp, Artificial sequence
  SiRNA target sequence
atcatctttataagagatgtttttc

SEQ ID NO: 45194 - DNA, 25 bp, Artificial sequence
  SiRNA target sequence
tcatctttataagagatgtttttcc

SEQ ID NO: 45195 - DNA, 25 bp, Artificial sequence
  SiRNA target sequence
catctttataagagatgtttttccc

SEQ ID NO: 45196 - DNA, 25 bp, Artificial sequence
  SiRNA target sequence
atctttataagagatgtttttcccg

SEQ ID NO: 45197 - DNA, 25 bp, Artificial sequence
  SiRNA target sequence
tctttataagagatgtttttcccga

SEQ ID NO: 45198 - DNA, 25 bp, Artificial sequence
  SiRNA target sequence
ctttataagagatgtttttcccgat

SEQ ID NO: 45199 - DNA, 25 bp, Artificial sequence
  SiRNA target sequence
tttataagagatgtttttcccgatc

SEQ ID NO: 45200 - DNA, 25 bp, Artificial sequence
  SiRNA target sequence
ttataagagatgtttttcccgatcc

SEQ ID NO: 45201 - DNA, 25 bp, Artificial sequence
  SiRNA target sequence
tataagagatgtttttcccgatcca

SEQ ID NO: 45202 - DNA, 25 bp, Artificial sequence
  SiRNA target sequence
ataagagatgtttttcccgatccat

SEQ ID NO: 45203 - DNA, 25 bp, Artificial sequence
  SiRNA target sequence
taagagatgtttttcccgatccatt

SEQ ID NO: 45204 - DNA, 25 bp, Artificial sequence
  SiRNA target sequence
aagagatgtttttcccgatccattt

SEQ ID NO: 45205 - DNA, 25 bp, Artificial sequence
  SiRNA target sequence
agagatgtttttcccgatccatttt

SEQ ID NO: 45206 - DNA, 25 bp, Artificial sequence
  SiRNA target sequence
gagatgtttttcccgatccattttt

SEQ ID NO: 45207 - DNA, 25 bp, Artificial sequence
  SiRNA target sequence
agatgtttttcccgatccatttttt

SEQ ID NO: 45208 - DNA, 25 bp, Artificial sequence
  SiRNA target sequence
gatgtttttcccgatccattttttc

SEQ ID NO: 45209 - DNA, 25 bp, Artificial sequence
  SiRNA target sequence
atgtttttcccgatccattttttcc

SEQ ID NO: 45210 - DNA, 25 bp, Artificial sequence
  SiRNA target sequence
tgtttttcccgatccattttttcca

SEQ ID NO: 45211 - DNA, 25 bp, Artificial sequence
  SiRNA target sequence
gtttttcccgatccattttttccaa

SEQ ID NO: 45212 - DNA, 25 bp, Artificial sequence
  SiRNA target sequence
tttttcccgatccattttttccaat

SEQ ID NO: 45213 - DNA, 25 bp, Artificial sequence
  SiRNA target sequence
ttttcccgatccattttttccaata

SEQ ID NO: 45214 - DNA, 25 bp, Artificial sequence
  SiRNA target sequence
tttcccgatccattttttccaataa

SEQ ID NO: 45215 - DNA, 25 bp, Artificial sequence
  SiRNA target sequence
ttcccgatccattttttccaataat

SEQ ID NO: 45216 - DNA, 25 bp, Artificial sequence
  SiRNA target sequence
tcccgatccattttttccaataata

SEQ ID NO: 45217 - DNA, 25 bp, Artificial sequence
  SiRNA target sequence
cccgatccattttttccaataatag

SEQ ID NO: 45218 - DNA, 25 bp, Artificial sequence
  SiRNA target sequence
ccgatccattttttccaataatagc

SEQ ID NO: 45219 - DNA, 25 bp, Artificial sequence
  SiRNA target sequence
cgatccattttttccaataatagct

SEQ ID NO: 45220 - DNA, 25 bp, Artificial sequence
  SiRNA target sequence
gatccattttttccaataatagcta

SEQ ID NO: 45221 - DNA, 25 bp, Artificial sequence
  SiRNA target sequence
atccattttttccaataatagctac

SEQ ID NO: 45222 - DNA, 25 bp, Artificial sequence
  SiRNA target sequence
tccattttttccaataatagctact

SEQ ID NO: 45223 - DNA, 25 bp, Artificial sequence
  SiRNA target sequence
ccattttttccaataatagctactt

SEQ ID NO: 45224 - DNA, 25 bp, Artificial sequence
  SiRNA target sequence
cattttttccaataatagctacttt

SEQ ID NO: 45225 - DNA, 25 bp, Artificial sequence
  SiRNA target sequence
attttttccaataatagctactttt

SEQ ID NO: 45226 - DNA, 25 bp, Artificial sequence
  SiRNA target sequence
ttttttccaataatagctacttttt

SEQ ID NO: 45227 - DNA, 25 bp, Artificial sequence
  SiRNA target sequence
tttttccaataatagctactttttc

SEQ ID NO: 45228 - DNA, 25 bp, Artificial sequence
  SiRNA target sequence
ttttccaataatagctactttttca

SEQ ID NO: 45229 - DNA, 25 bp, Artificial sequence
  SiRNA target sequence
tttccaataatagctactttttcac

SEQ ID NO: 45230 - DNA, 25 bp, Artificial sequence
  SiRNA target sequence
ttccaataatagctactttttcacc

SEQ ID NO: 45231 - DNA, 25 bp, Artificial sequence
  SiRNA target sequence
tccaataatagctactttttcacct

SEQ ID NO: 45232 - DNA, 25 bp, Artificial sequence
  SiRNA target sequence
ccaataatagctactttttcacctt

SEQ ID NO: 45233 - DNA, 25 bp, Artificial sequence
  SiRNA target sequence
caataatagctactttttcaccttt

SEQ ID NO: 45234 - DNA, 25 bp, Artificial sequence
  SiRNA target sequence
aataatagctactttttcacctttt

SEQ ID NO: 45235 - DNA, 25 bp, Artificial sequence
  SiRNA target sequence
ataatagctactttttcaccttttt

SEQ ID NO: 45236 - DNA, 25 bp, Artificial sequence
  SiRNA target sequence
taatagctactttttcacctttttt

SEQ ID NO: 45237 - DNA, 25 bp, Artificial sequence
  SiRNA target sequence
aatagctactttttcacctttttta

SEQ ID NO: 45238 - DNA, 25 bp, Artificial sequence
  SiRNA target sequence
atagctactttttcaccttttttaa

SEQ ID NO: 45239 - DNA, 25 bp, Artificial sequence
  SiRNA target sequence
tagctactttttcaccttttttaat

SEQ ID NO: 45240 - DNA, 25 bp, Artificial sequence
  SiRNA target sequence
agctactttttcaccttttttaatt

SEQ ID NO: 45241 - DNA, 25 bp, Artificial sequence
  SiRNA target sequence
gctactttttcaccttttttaatta

SEQ ID NO: 45242 - DNA, 25 bp, Artificial sequence
  SiRNA target sequence
ctactttttcaccttttttaattaa

SEQ ID NO: 45243 - DNA, 25 bp, Artificial sequence
  SiRNA target sequence
tactttttcaccttttttaattaaa

SEQ ID NO: 45244 - DNA, 25 bp, Artificial sequence
  SiRNA target sequence
actttttcaccttttttaattaaaa

SEQ ID NO: 45245 - DNA, 25 bp, Artificial sequence
  SiRNA target sequence
ctttttcaccttttttaattaaaat

SEQ ID NO: 45246 - DNA, 25 bp, Artificial sequence
  SiRNA target sequence
tttttcaccttttttaattaaaata

SEQ ID NO: 45247 - DNA, 25 bp, Artificial sequence
  SiRNA target sequence
ttttcaccttttttaattaaaatat

SEQ ID NO: 45248 - DNA, 25 bp, Artificial sequence
  SiRNA target sequence
tttcaccttttttaattaaaatatt

SEQ ID NO: 45249 - DNA, 25 bp, Artificial sequence
  SiRNA target sequence
ttcaccttttttaattaaaatattt

SEQ ID NO: 45250 - DNA, 25 bp, Artificial sequence
  SiRNA target sequence
tcaccttttttaattaaaatattta

SEQ ID NO: 45251 - DNA, 25 bp, Artificial sequence
  SiRNA target sequence
caccttttttaattaaaatatttat

SEQ ID NO: 45252 - DNA, 25 bp, Artificial sequence
  SiRNA target sequence
accttttttaattaaaatatttatg

SEQ ID NO: 45253 - DNA, 25 bp, Artificial sequence
  SiRNA target sequence
ccttttttaattaaaatatttatgt

SEQ ID NO: 45254 - DNA, 25 bp, Artificial sequence
  SiRNA target sequence
cttttttaattaaaatatttatgtc

SEQ ID NO: 45255 - DNA, 25 bp, Artificial sequence
  SiRNA target sequence
ttttttaattaaaatatttatgtcc

SEQ ID NO: 45256 - DNA, 25 bp, Artificial sequence
  SiRNA target sequence
tttttaattaaaatatttatgtccg

SEQ ID NO: 45257 - DNA, 25 bp, Artificial sequence
  SiRNA target sequence
ttttaattaaaatatttatgtccgt

SEQ ID NO: 45258 - DNA, 25 bp, Artificial sequence
  SiRNA target sequence
tttaattaaaatatttatgtccgtt

SEQ ID NO: 45259 - DNA, 25 bp, Artificial sequence
  SiRNA target sequence
ttaattaaaatatttatgtccgtta

SEQ ID NO: 45260 - DNA, 25 bp, Artificial sequence
  SiRNA target sequence
taattaaaatatttatgtccgttaa

SEQ ID NO: 45261 - DNA, 25 bp, Artificial sequence
  SiRNA target sequence
aattaaaatatttatgtccgttaaa

SEQ ID NO: 45262 - DNA, 25 bp, Artificial sequence
  SiRNA target sequence
attaaaatatttatgtccgttaaaa

SEQ ID NO: 45263 - DNA, 25 bp, Artificial sequence
  SiRNA target sequence
ttaaaatatttatgtccgttaaaat

SEQ ID NO: 45264 - DNA, 25 bp, Artificial sequence
  SiRNA target sequence
taaaatatttatgtccgttaaaatt

SEQ ID NO: 45265 - DNA, 25 bp, Artificial sequence
  SiRNA target sequence
aaaatatttatgtccgttaaaattt

SEQ ID NO: 45266 - DNA, 25 bp, Artificial sequence
  SiRNA target sequence
aaatatttatgtccgttaaaatttt

SEQ ID NO: 45267 - DNA, 25 bp, Artificial sequence
  SiRNA target sequence
aatatttatgtccgttaaaattttt

SEQ ID NO: 45268 - DNA, 25 bp, Artificial sequence
  SiRNA target sequence
atatttatgtccgttaaaatttttt

SEQ ID NO: 45269 - DNA, 25 bp, Artificial sequence
  SiRNA target sequence
tatttatgtccgttaaaattttttt

SEQ ID NO: 45270 - DNA, 25 bp, Artificial sequence
  SiRNA target sequence
atttatgtccgttaaaatttttttg

SEQ ID NO: 45271 - DNA, 25 bp, Artificial sequence
  SiRNA target sequence
tttatgtccgttaaaatttttttgg

SEQ ID NO: 45272 - DNA, 25 bp, Artificial sequence
  SiRNA target sequence
ttatgtccgttaaaatttttttgga

SEQ ID NO: 45273 - DNA, 25 bp, Artificial sequence
  SiRNA target sequence
tatgtccgttaaaatttttttggag

SEQ ID NO: 45274 - DNA, 25 bp, Artificial sequence
  SiRNA target sequence
atgtccgttaaaatttttttggagt

SEQ ID NO: 45275 - DNA, 25 bp, Artificial sequence
  SiRNA target sequence
tgtccgttaaaatttttttggagta

SEQ ID NO: 45276 - DNA, 25 bp, Artificial sequence
  SiRNA target sequence
gtccgttaaaatttttttggagtaa

SEQ ID NO: 45277 - DNA, 25 bp, Artificial sequence
  SiRNA target sequence
tccgttaaaatttttttggagtaat

SEQ ID NO: 45278 - DNA, 25 bp, Artificial sequence
  SiRNA target sequence
ccgttaaaatttttttggagtaata

SEQ ID NO: 45279 - DNA, 25 bp, Artificial sequence
  SiRNA target sequence
cgttaaaatttttttggagtaataa

SEQ ID NO: 45280 - DNA, 25 bp, Artificial sequence
  SiRNA target sequence
gttaaaatttttttggagtaataat

SEQ ID NO: 45281 - DNA, 25 bp, Artificial sequence
  SiRNA target sequence
ttaaaatttttttggagtaataatt

SEQ ID NO: 45282 - DNA, 25 bp, Artificial sequence
  SiRNA target sequence
taaaatttttttggagtaataatta

SEQ ID NO: 45283 - DNA, 25 bp, Artificial sequence
  SiRNA target sequence
aaaatttttttggagtaataattaa

SEQ ID NO: 45284 - DNA, 25 bp, Artificial sequence
  SiRNA target sequence
aaatttttttggagtaataattaaa

SEQ ID NO: 45285 - DNA, 25 bp, Artificial sequence
  SiRNA target sequence
aatttttttggagtaataattaaat

SEQ ID NO: 45286 - DNA, 25 bp, Artificial sequence
  SiRNA target sequence
atttttttggagtaataattaaatg

SEQ ID NO: 45287 - DNA, 25 bp, Artificial sequence
  SiRNA target sequence
tttttttggagtaataattaaatga

SEQ ID NO: 45288 - DNA, 25 bp, Artificial sequence
  SiRNA target sequence
ttttttggagtaataattaaatgat

SEQ ID NO: 45289 - DNA, 25 bp, Artificial sequence
  SiRNA target sequence
tttttggagtaataattaaatgatg

SEQ ID NO: 45290 - DNA, 25 bp, Artificial sequence
  SiRNA target sequence
ttttggagtaataattaaatgatgc

SEQ ID NO: 45291 - DNA, 25 bp, Artificial sequence
  SiRNA target sequence
tttggagtaataattaaatgatgca

SEQ ID NO: 45292 - DNA, 25 bp, Artificial sequence
  SiRNA target sequence
ttggagtaataattaaatgatgcat

SEQ ID NO: 45293 - DNA, 25 bp, Artificial sequence
  SiRNA target sequence
tggagtaataattaaatgatgcatt

SEQ ID NO: 45294 - DNA, 25 bp, Artificial sequence
  SiRNA target sequence
ggagtaataattaaatgatgcattt

SEQ ID NO: 45295 - DNA, 25 bp, Artificial sequence
  SiRNA target sequence
gagtaataattaaatgatgcatttt

SEQ ID NO: 45296 - DNA, 25 bp, Artificial sequence
  SiRNA target sequence
agtaataattaaatgatgcattttc

SEQ ID NO: 45297 - DNA, 25 bp, Artificial sequence
  SiRNA target sequence
gtaataattaaatgatgcattttct

SEQ ID NO: 45298 - DNA, 25 bp, Artificial sequence
  SiRNA target sequence
taataattaaatgatgcattttcta

SEQ ID NO: 45299 - DNA, 25 bp, Artificial sequence
  SiRNA target sequence
aataattaaatgatgcattttctaa

SEQ ID NO: 45300 - DNA, 25 bp, Artificial sequence
  SiRNA target sequence
ataattaaatgatgcattttctaat

SEQ ID NO: 45301 - DNA, 25 bp, Artificial sequence
  SiRNA target sequence
taattaaatgatgcattttctaatc

SEQ ID NO: 45302 - DNA, 25 bp, Artificial sequence
  SiRNA target sequence
aattaaatgatgcattttctaatct

SEQ ID NO: 45303 - DNA, 25 bp, Artificial sequence
  SiRNA target sequence
attaaatgatgcattttctaatctt

SEQ ID NO: 45304 - DNA, 25 bp, Artificial sequence
  SiRNA target sequence
ttaaatgatgcattttctaatctta

SEQ ID NO: 45305 - DNA, 25 bp, Artificial sequence
  SiRNA target sequence
taaatgatgcattttctaatcttat

SEQ ID NO: 45306 - DNA, 25 bp, Artificial sequence
  SiRNA target sequence
aaatgatgcattttctaatcttata

SEQ ID NO: 45307 - DNA, 25 bp, Artificial sequence
  SiRNA target sequence
aatgatgcattttctaatcttatat

SEQ ID NO: 45308 - DNA, 25 bp, Artificial sequence
  SiRNA target sequence
atgatgcattttctaatcttatatc

SEQ ID NO: 45309 - DNA, 25 bp, Artificial sequence
  SiRNA target sequence
tgatgcattttctaatcttatatca

SEQ ID NO: 45310 - DNA, 25 bp, Artificial sequence
  SiRNA target sequence
gatgcattttctaatcttatatcat

SEQ ID NO: 45311 - DNA, 25 bp, Artificial sequence
  SiRNA target sequence
atgcattttctaatcttatatcatt

SEQ ID NO: 45312 - DNA, 25 bp, Artificial sequence
  SiRNA target sequence
tgcattttctaatcttatatcatta

SEQ ID NO: 45313 - DNA, 25 bp, Artificial sequence
  SiRNA target sequence
gcattttctaatcttatatcattat

SEQ ID NO: 45314 - DNA, 25 bp, Artificial sequence
  SiRNA target sequence
cattttctaatcttatatcattatt

SEQ ID NO: 45315 - DNA, 25 bp, Artificial sequence
  SiRNA target sequence
attttctaatcttatatcattatta

SEQ ID NO: 45316 - DNA, 25 bp, Artificial sequence
  SiRNA target sequence
ttttctaatcttatatcattattaa

SEQ ID NO: 45317 - DNA, 25 bp, Artificial sequence
  SiRNA target sequence
tttctaatcttatatcattattaaa

SEQ ID NO: 45318 - DNA, 25 bp, Artificial sequence
  SiRNA target sequence
ttctaatcttatatcattattaaat

SEQ ID NO: 45319 - DNA, 25 bp, Artificial sequence
  SiRNA target sequence
tctaatcttatatcattattaaatt

SEQ ID NO: 45320 - DNA, 25 bp, Artificial sequence
  SiRNA target sequence
ctaatcttatatcattattaaattc

SEQ ID NO: 45321 - DNA, 25 bp, Artificial sequence
  SiRNA target sequence
taatcttatatcattattaaattca

SEQ ID NO: 45322 - DNA, 25 bp, Artificial sequence
  SiRNA target sequence
aatcttatatcattattaaattcat

SEQ ID NO: 45323 - DNA, 25 bp, Artificial sequence
  SiRNA target sequence
atcttatatcattattaaattcatt

SEQ ID NO: 45324 - DNA, 25 bp, Artificial sequence
  SiRNA target sequence
tcttatatcattattaaattcatta

SEQ ID NO: 45325 - DNA, 25 bp, Artificial sequence
  SiRNA target sequence
cttatatcattattaaattcattaa

SEQ ID NO: 45326 - DNA, 25 bp, Artificial sequence
  SiRNA target sequence
ttatatcattattaaattcattaac

SEQ ID NO: 45327 - DNA, 25 bp, Artificial sequence
  SiRNA target sequence
tatatcattattaaattcattaaca

SEQ ID NO: 45328 - DNA, 25 bp, Artificial sequence
  SiRNA target sequence
atatcattattaaattcattaacat

SEQ ID NO: 45329 - DNA, 25 bp, Artificial sequence
  SiRNA target sequence
tatcattattaaattcattaacatc

SEQ ID NO: 45330 - DNA, 25 bp, Artificial sequence
  SiRNA target sequence
atcattattaaattcattaacatct

SEQ ID NO: 45331 - DNA, 25 bp, Artificial sequence
  SiRNA target sequence
tcattattaaattcattaacatcta

SEQ ID NO: 45332 - DNA, 25 bp, Artificial sequence
  SiRNA target sequence
cattattaaattcattaacatctac

SEQ ID NO: 45333 - DNA, 25 bp, Artificial sequence
  SiRNA target sequence
attattaaattcattaacatctact

SEQ ID NO: 45334 - DNA, 25 bp, Artificial sequence
  SiRNA target sequence
ttattaaattcattaacatctacta

SEQ ID NO: 45335 - DNA, 25 bp, Artificial sequence
  SiRNA target sequence
tattaaattcattaacatctactaa

SEQ ID NO: 45336 - DNA, 25 bp, Artificial sequence
  SiRNA target sequence
attaaattcattaacatctactaaa

SEQ ID NO: 45337 - DNA, 25 bp, Artificial sequence
  SiRNA target sequence
ttaaattcattaacatctactaaat

SEQ ID NO: 45338 - DNA, 25 bp, Artificial sequence
  SiRNA target sequence
taaattcattaacatctactaaatt

SEQ ID NO: 45339 - DNA, 25 bp, Artificial sequence
  SiRNA target sequence
aaattcattaacatctactaaattt

SEQ ID NO: 45340 - DNA, 25 bp, Artificial sequence
  SiRNA target sequence
aattcattaacatctactaaatttg

SEQ ID NO: 45341 - DNA, 25 bp, Artificial sequence
  SiRNA target sequence
attcattaacatctactaaatttgg

SEQ ID NO: 45342 - DNA, 25 bp, Artificial sequence
  SiRNA target sequence
ttcattaacatctactaaatttggt

SEQ ID NO: 45343 - DNA, 25 bp, Artificial sequence
  SiRNA target sequence
tcattaacatctactaaatttggtt

SEQ ID NO: 45344 - DNA, 25 bp, Artificial sequence
  SiRNA target sequence
cattaacatctactaaatttggttc

SEQ ID NO: 45345 - DNA, 25 bp, Artificial sequence
  SiRNA target sequence
attaacatctactaaatttggttct

SEQ ID NO: 45346 - DNA, 25 bp, Artificial sequence
  SiRNA target sequence
ttaacatctactaaatttggttctt

SEQ ID NO: 45347 - DNA, 25 bp, Artificial sequence
  SiRNA target sequence
taacatctactaaatttggttcttc

SEQ ID NO: 45348 - DNA, 25 bp, Artificial sequence
  SiRNA target sequence
aacatctactaaatttggttcttct

SEQ ID NO: 45349 - DNA, 25 bp, Artificial sequence
  SiRNA target sequence
acatctactaaatttggttcttctt

SEQ ID NO: 45350 - DNA, 25 bp, Artificial sequence
  SiRNA target sequence
catctactaaatttggttcttcttt

SEQ ID NO: 45351 - DNA, 25 bp, Artificial sequence
  SiRNA target sequence
atctactaaatttggttcttctttt

SEQ ID NO: 45352 - DNA, 25 bp, Artificial sequence
  SiRNA target sequence
tctactaaatttggttcttctttta

SEQ ID NO: 45353 - DNA, 25 bp, Artificial sequence
  SiRNA target sequence
ctactaaatttggttcttcttttat

SEQ ID NO: 45354 - DNA, 25 bp, Artificial sequence
  SiRNA target sequence
tactaaatttggttcttcttttata

SEQ ID NO: 45355 - DNA, 25 bp, Artificial sequence
  SiRNA target sequence
actaaatttggttcttcttttataa

SEQ ID NO: 45356 - DNA, 25 bp, Artificial sequence
  SiRNA target sequence
ctaaatttggttcttcttttataag

SEQ ID NO: 45357 - DNA, 25 bp, Artificial sequence
  SiRNA target sequence
taaatttggttcttcttttataagc

SEQ ID NO: 45358 - DNA, 25 bp, Artificial sequence
  SiRNA target sequence
aaatttggttcttcttttataagct

SEQ ID NO: 45359 - DNA, 25 bp, Artificial sequence
  SiRNA target sequence
aatttggttcttcttttataagctc

SEQ ID NO: 45360 - DNA, 25 bp, Artificial sequence
  SiRNA target sequence
atttggttcttcttttataagctct

SEQ ID NO: 45361 - DNA, 25 bp, Artificial sequence
  SiRNA target sequence
tttggttcttcttttataagctctg

SEQ ID NO: 45362 - DNA, 25 bp, Artificial sequence
  SiRNA target sequence
ttggttcttcttttataagctctgg

SEQ ID NO: 45363 - DNA, 25 bp, Artificial sequence
  SiRNA target sequence
tggttcttcttttataagctctggt

SEQ ID NO: 45364 - DNA, 25 bp, Artificial sequence
  SiRNA target sequence
ggttcttcttttataagctctggtt

SEQ ID NO: 45365 - DNA, 25 bp, Artificial sequence
  SiRNA target sequence
gttcttcttttataagctctggttt

SEQ ID NO: 45366 - DNA, 25 bp, Artificial sequence
  SiRNA target sequence
ttcttcttttataagctctggttta

SEQ ID NO: 45367 - DNA, 25 bp, Artificial sequence
  SiRNA target sequence
tcttcttttataagctctggtttaa

SEQ ID NO: 45368 - DNA, 25 bp, Artificial sequence
  SiRNA target sequence
cttcttttataagctctggtttaaa

SEQ ID NO: 45369 - DNA, 25 bp, Artificial sequence
  SiRNA target sequence
ttcttttataagctctggtttaaaa

SEQ ID NO: 45370 - DNA, 25 bp, Artificial sequence
  SiRNA target sequence
tcttttataagctctggtttaaaag

SEQ ID NO: 45371 - DNA, 25 bp, Artificial sequence
  SiRNA target sequence
cttttataagctctggtttaaaaga

SEQ ID NO: 45372 - DNA, 25 bp, Artificial sequence
  SiRNA target sequence
ttttataagctctggtttaaaagat

SEQ ID NO: 45373 - DNA, 25 bp, Artificial sequence
  SiRNA target sequence
tttataagctctggtttaaaagatg

SEQ ID NO: 45374 - DNA, 25 bp, Artificial sequence
  SiRNA target sequence
ttataagctctggtttaaaagatgt

SEQ ID NO: 45375 - DNA, 25 bp, Artificial sequence
  SiRNA target sequence
tataagctctggtttaaaagatgtt

SEQ ID NO: 45376 - DNA, 25 bp, Artificial sequence
  SiRNA target sequence
ataagctctggtttaaaagatgttc

SEQ ID NO: 45377 - DNA, 25 bp, Artificial sequence
  SiRNA target sequence
taagctctggtttaaaagatgttct

SEQ ID NO: 45378 - DNA, 25 bp, Artificial sequence
  SiRNA target sequence
aagctctggtttaaaagatgttctt

SEQ ID NO: 45379 - DNA, 25 bp, Artificial sequence
  SiRNA target sequence
agctctggtttaaaagatgttctta

SEQ ID NO: 45380 - DNA, 25 bp, Artificial sequence
  SiRNA target sequence
gctctggtttaaaagatgttcttat

SEQ ID NO: 45381 - DNA, 25 bp, Artificial sequence
  SiRNA target sequence
ctctggtttaaaagatgttcttata

SEQ ID NO: 45382 - DNA, 25 bp, Artificial sequence
  SiRNA target sequence
tctggtttaaaagatgttcttatat

SEQ ID NO: 45383 - DNA, 25 bp, Artificial sequence
  SiRNA target sequence
ctggtttaaaagatgttcttatatt

SEQ ID NO: 45384 - DNA, 25 bp, Artificial sequence
  SiRNA target sequence
tggtttaaaagatgttcttatattt

SEQ ID NO: 45385 - DNA, 25 bp, Artificial sequence
  SiRNA target sequence
ggtttaaaagatgttcttatattta

SEQ ID NO: 45386 - DNA, 25 bp, Artificial sequence
  SiRNA target sequence
gtttaaaagatgttcttatatttaa

SEQ ID NO: 45387 - DNA, 25 bp, Artificial sequence
  SiRNA target sequence
tttaaaagatgttcttatatttaag

SEQ ID NO: 45388 - DNA, 25 bp, Artificial sequence
  SiRNA target sequence
ttaaaagatgttcttatatttaaga

SEQ ID NO: 45389 - DNA, 25 bp, Artificial sequence
  SiRNA target sequence
taaaagatgttcttatatttaagat

SEQ ID NO: 45390 - DNA, 25 bp, Artificial sequence
  SiRNA target sequence
aaaagatgttcttatatttaagatt

SEQ ID NO: 45391 - DNA, 25 bp, Artificial sequence
  SiRNA target sequence
aaagatgttcttatatttaagattg

SEQ ID NO: 45392 - DNA, 25 bp, Artificial sequence
  SiRNA target sequence
aagatgttcttatatttaagattgc

SEQ ID NO: 45393 - DNA, 25 bp, Artificial sequence
  SiRNA target sequence
agatgttcttatatttaagattgct

SEQ ID NO: 45394 - DNA, 25 bp, Artificial sequence
  SiRNA target sequence
gatgttcttatatttaagattgctt

SEQ ID NO: 45395 - DNA, 25 bp, Artificial sequence
  SiRNA target sequence
atgttcttatatttaagattgcttg

SEQ ID NO: 45396 - DNA, 25 bp, Artificial sequence
  SiRNA target sequence
tgttcttatatttaagattgcttgt

SEQ ID NO: 45397 - DNA, 25 bp, Artificial sequence
  SiRNA target sequence
gttcttatatttaagattgcttgtg

SEQ ID NO: 45398 - DNA, 25 bp, Artificial sequence
  SiRNA target sequence
ttcttatatttaagattgcttgtgt

SEQ ID NO: 45399 - DNA, 25 bp, Artificial sequence
  SiRNA target sequence
tcttatatttaagattgcttgtgta

SEQ ID NO: 45400 - DNA, 25 bp, Artificial sequence
  SiRNA target sequence
cttatatttaagattgcttgtgtat

SEQ ID NO: 45401 - DNA, 25 bp, Artificial sequence
  SiRNA target sequence
ttatatttaagattgcttgtgtata

SEQ ID NO: 45402 - DNA, 25 bp, Artificial sequence
  SiRNA target sequence
tatatttaagattgcttgtgtatat

SEQ ID NO: 45403 - DNA, 25 bp, Artificial sequence
  SiRNA target sequence
atatttaagattgcttgtgtatatc

SEQ ID NO: 45404 - DNA, 25 bp, Artificial sequence
  SiRNA target sequence
tatttaagattgcttgtgtatatcg

SEQ ID NO: 45405 - DNA, 25 bp, Artificial sequence
  SiRNA target sequence
atttaagattgcttgtgtatatcgt

SEQ ID NO: 45406 - DNA, 25 bp, Artificial sequence
  SiRNA target sequence
tttaagattgcttgtgtatatcgtg

SEQ ID NO: 45407 - DNA, 25 bp, Artificial sequence
  SiRNA target sequence
ttaagattgcttgtgtatatcgtga

SEQ ID NO: 45408 - DNA, 25 bp, Artificial sequence
  SiRNA target sequence
taagattgcttgtgtatatcgtgag

SEQ ID NO: 45409 - DNA, 25 bp, Artificial sequence
  SiRNA target sequence
aagattgcttgtgtatatcgtgagt

SEQ ID NO: 45410 - DNA, 25 bp, Artificial sequence
  SiRNA target sequence
agattgcttgtgtatatcgtgagta

SEQ ID NO: 45411 - DNA, 25 bp, Artificial sequence
  SiRNA target sequence
gattgcttgtgtatatcgtgagtaa

SEQ ID NO: 45412 - DNA, 25 bp, Artificial sequence
  SiRNA target sequence
attgcttgtgtatatcgtgagtaaa

SEQ ID NO: 45413 - DNA, 25 bp, Artificial sequence
  SiRNA target sequence
ttgcttgtgtatatcgtgagtaaaa

SEQ ID NO: 45414 - DNA, 25 bp, Artificial sequence
  SiRNA target sequence
tgcttgtgtatatcgtgagtaaaag

SEQ ID NO: 45415 - DNA, 25 bp, Artificial sequence
  SiRNA target sequence
gcttgtgtatatcgtgagtaaaaga

SEQ ID NO: 45416 - DNA, 25 bp, Artificial sequence
  SiRNA target sequence
cttgtgtatatcgtgagtaaaagaa

SEQ ID NO: 45417 - DNA, 25 bp, Artificial sequence
  SiRNA target sequence
ttgtgtatatcgtgagtaaaagaac

SEQ ID NO: 45418 - DNA, 25 bp, Artificial sequence
  SiRNA target sequence
tgtgtatatcgtgagtaaaagaacc

SEQ ID NO: 45419 - DNA, 25 bp, Artificial sequence
  SiRNA target sequence
gtgtatatcgtgagtaaaagaaccc

SEQ ID NO: 45420 - DNA, 25 bp, Artificial sequence
  SiRNA target sequence
tgtatatcgtgagtaaaagaaccct

SEQ ID NO: 45421 - DNA, 25 bp, Artificial sequence
  SiRNA target sequence
gtatatcgtgagtaaaagaacccta

SEQ ID NO: 45422 - DNA, 25 bp, Artificial sequence
  SiRNA target sequence
tatatcgtgagtaaaagaaccctaa

SEQ ID NO: 45423 - DNA, 25 bp, Artificial sequence
  SiRNA target sequence
atatcgtgagtaaaagaaccctaat

SEQ ID NO: 45424 - DNA, 25 bp, Artificial sequence
  SiRNA target sequence
tatcgtgagtaaaagaaccctaatt

SEQ ID NO: 45425 - DNA, 25 bp, Artificial sequence
  SiRNA target sequence
atcgtgagtaaaagaaccctaattg

SEQ ID NO: 45426 - DNA, 25 bp, Artificial sequence
  SiRNA target sequence
tcgtgagtaaaagaaccctaattgt

SEQ ID NO: 45427 - DNA, 25 bp, Artificial sequence
  SiRNA target sequence
cgtgagtaaaagaaccctaattgtc

SEQ ID NO: 45428 - DNA, 25 bp, Artificial sequence
  SiRNA target sequence
gtgagtaaaagaaccctaattgtcc

SEQ ID NO: 45429 - DNA, 25 bp, Artificial sequence
  SiRNA target sequence
tgagtaaaagaaccctaattgtcca

SEQ ID NO: 45430 - DNA, 25 bp, Artificial sequence
  SiRNA target sequence
gagtaaaagaaccctaattgtccaa

SEQ ID NO: 45431 - DNA, 25 bp, Artificial sequence
  SiRNA target sequence
agtaaaagaaccctaattgtccaaa

SEQ ID NO: 45432 - DNA, 25 bp, Artificial sequence
  SiRNA target sequence
gtaaaagaaccctaattgtccaaaa

SEQ ID NO: 45433 - DNA, 25 bp, Artificial sequence
  SiRNA target sequence
taaaagaaccctaattgtccaaaac

SEQ ID NO: 45434 - DNA, 25 bp, Artificial sequence
  SiRNA target sequence
aaaagaaccctaattgtccaaaact

SEQ ID NO: 45435 - DNA, 25 bp, Artificial sequence
  SiRNA target sequence
aaagaaccctaattgtccaaaactt

SEQ ID NO: 45436 - DNA, 25 bp, Artificial sequence
  SiRNA target sequence
aagaaccctaattgtccaaaacttg

SEQ ID NO: 45437 - DNA, 25 bp, Artificial sequence
  SiRNA target sequence
agaaccctaattgtccaaaacttga

SEQ ID NO: 45438 - DNA, 25 bp, Artificial sequence
  SiRNA target sequence
gaaccctaattgtccaaaacttgaa

SEQ ID NO: 45439 - DNA, 25 bp, Artificial sequence
  SiRNA target sequence
aaccctaattgtccaaaacttgaat

SEQ ID NO: 45440 - DNA, 25 bp, Artificial sequence
  SiRNA target sequence
accctaattgtccaaaacttgaata

SEQ ID NO: 45441 - DNA, 25 bp, Artificial sequence
  SiRNA target sequence
ccctaattgtccaaaacttgaatac

SEQ ID NO: 45442 - DNA, 25 bp, Artificial sequence
  SiRNA target sequence
cctaattgtccaaaacttgaataca

SEQ ID NO: 45443 - DNA, 25 bp, Artificial sequence
  SiRNA target sequence
ctaattgtccaaaacttgaatacaa

SEQ ID NO: 45444 - DNA, 25 bp, Artificial sequence
  SiRNA target sequence
taattgtccaaaacttgaatacaat

SEQ ID NO: 45445 - DNA, 25 bp, Artificial sequence
  SiRNA target sequence
aattgtccaaaacttgaatacaatg

SEQ ID NO: 45446 - DNA, 25 bp, Artificial sequence
  SiRNA target sequence
attgtccaaaacttgaatacaatgt

SEQ ID NO: 45447 - DNA, 25 bp, Artificial sequence
  SiRNA target sequence
ttgtccaaaacttgaatacaatgtt

SEQ ID NO: 45448 - DNA, 25 bp, Artificial sequence
  SiRNA target sequence
tgtccaaaacttgaatacaatgttc

SEQ ID NO: 45449 - DNA, 25 bp, Artificial sequence
  SiRNA target sequence
gtccaaaacttgaatacaatgttct

SEQ ID NO: 45450 - DNA, 25 bp, Artificial sequence
  SiRNA target sequence
tccaaaacttgaatacaatgttcta

SEQ ID NO: 45451 - DNA, 25 bp, Artificial sequence
  SiRNA target sequence
ccaaaacttgaatacaatgttctat

SEQ ID NO: 45452 - DNA, 25 bp, Artificial sequence
  SiRNA target sequence
caaaacttgaatacaatgttctatt

SEQ ID NO: 45453 - DNA, 25 bp, Artificial sequence
  SiRNA target sequence
aaaacttgaatacaatgttctatta

SEQ ID NO: 45454 - DNA, 25 bp, Artificial sequence
  SiRNA target sequence
aaacttgaatacaatgttctattaa

SEQ ID NO: 45455 - DNA, 25 bp, Artificial sequence
  SiRNA target sequence
aacttgaatacaatgttctattaat

SEQ ID NO: 45456 - DNA, 25 bp, Artificial sequence
  SiRNA target sequence
acttgaatacaatgttctattaatg

SEQ ID NO: 45457 - DNA, 25 bp, Artificial sequence
  SiRNA target sequence
cttgaatacaatgttctattaatgc

SEQ ID NO: 45458 - DNA, 25 bp, Artificial sequence
  SiRNA target sequence
ttgaatacaatgttctattaatgcc

SEQ ID NO: 45459 - DNA, 25 bp, Artificial sequence
  SiRNA target sequence
tgaatacaatgttctattaatgcca

SEQ ID NO: 45460 - DNA, 25 bp, Artificial sequence
  SiRNA target sequence
gaatacaatgttctattaatgccaa

SEQ ID NO: 45461 - DNA, 25 bp, Artificial sequence
  SiRNA target sequence
aatacaatgttctattaatgccaat

SEQ ID NO: 45462 - DNA, 25 bp, Artificial sequence
  SiRNA target sequence
atacaatgttctattaatgccaata

SEQ ID NO: 45463 - DNA, 25 bp, Artificial sequence
  SiRNA target sequence
tacaatgttctattaatgccaatat

SEQ ID NO: 45464 - DNA, 25 bp, Artificial sequence
  SiRNA target sequence
acaatgttctattaatgccaatata

SEQ ID NO: 45465 - DNA, 25 bp, Artificial sequence
  SiRNA target sequence
caatgttctattaatgccaatataa

SEQ ID NO: 45466 - DNA, 25 bp, Artificial sequence
  SiRNA target sequence
aatgttctattaatgccaatataaa

SEQ ID NO: 45467 - DNA, 25 bp, Artificial sequence
  SiRNA target sequence
atgttctattaatgccaatataaaa

SEQ ID NO: 45468 - DNA, 25 bp, Artificial sequence
  SiRNA target sequence
tgttctattaatgccaatataaaat

SEQ ID NO: 45469 - DNA, 25 bp, Artificial sequence
  SiRNA target sequence
gttctattaatgccaatataaaata

SEQ ID NO: 45470 - DNA, 25 bp, Artificial sequence
  SiRNA target sequence
ttctattaatgccaatataaaatac

SEQ ID NO: 45471 - DNA, 25 bp, Artificial sequence
  SiRNA target sequence
tctattaatgccaatataaaataca

SEQ ID NO: 45472 - DNA, 25 bp, Artificial sequence
  SiRNA target sequence
ctattaatgccaatataaaatacaa

SEQ ID NO: 45473 - DNA, 25 bp, Artificial sequence
  SiRNA target sequence
tattaatgccaatataaaatacaac

SEQ ID NO: 45474 - DNA, 25 bp, Artificial sequence
  SiRNA target sequence
attaatgccaatataaaatacaaca

SEQ ID NO: 45475 - DNA, 25 bp, Artificial sequence
  SiRNA target sequence
ttaatgccaatataaaatacaacat

SEQ ID NO: 45476 - DNA, 25 bp, Artificial sequence
  SiRNA target sequence
taatgccaatataaaatacaacatc

SEQ ID NO: 45477 - DNA, 25 bp, Artificial sequence
  SiRNA target sequence
aatgccaatataaaatacaacatcc

SEQ ID NO: 45478 - DNA, 25 bp, Artificial sequence
  SiRNA target sequence
atgccaatataaaatacaacatccc

SEQ ID NO: 45479 - DNA, 25 bp, Artificial sequence
  SiRNA target sequence
tgccaatataaaatacaacatccct

SEQ ID NO: 45480 - DNA, 25 bp, Artificial sequence
  SiRNA target sequence
gccaatataaaatacaacatccctg

SEQ ID NO: 45481 - DNA, 25 bp, Artificial sequence
  SiRNA target sequence
ccaatataaaatacaacatccctgg

SEQ ID NO: 45482 - DNA, 25 bp, Artificial sequence
  SiRNA target sequence
caatataaaatacaacatccctggc

SEQ ID NO: 45483 - DNA, 25 bp, Artificial sequence
  SiRNA target sequence
aatataaaatacaacatccctggca

SEQ ID NO: 45484 - DNA, 25 bp, Artificial sequence
  SiRNA target sequence
atataaaatacaacatccctggcac

SEQ ID NO: 45485 - DNA, 25 bp, Artificial sequence
  SiRNA target sequence
tataaaatacaacatccctggcact

SEQ ID NO: 45486 - DNA, 25 bp, Artificial sequence
  SiRNA target sequence
ataaaatacaacatccctggcactt

SEQ ID NO: 45487 - DNA, 25 bp, Artificial sequence
  SiRNA target sequence
taaaatacaacatccctggcactta

SEQ ID NO: 45488 - DNA, 25 bp, Artificial sequence
  SiRNA target sequence
aaaatacaacatccctggcacttag

SEQ ID NO: 45489 - DNA, 25 bp, Artificial sequence
  SiRNA target sequence
aaatacaacatccctggcacttagt

SEQ ID NO: 45490 - DNA, 25 bp, Artificial sequence
  SiRNA target sequence
aatacaacatccctggcacttagtt

SEQ ID NO: 45491 - DNA, 25 bp, Artificial sequence
  SiRNA target sequence
atacaacatccctggcacttagttt

SEQ ID NO: 45492 - DNA, 25 bp, Artificial sequence
  SiRNA target sequence
tacaacatccctggcacttagtttt

SEQ ID NO: 45493 - DNA, 25 bp, Artificial sequence
  SiRNA target sequence
acaacatccctggcacttagttttg

SEQ ID NO: 45494 - DNA, 25 bp, Artificial sequence
  SiRNA target sequence
caacatccctggcacttagttttgc

SEQ ID NO: 45495 - DNA, 25 bp, Artificial sequence
  SiRNA target sequence
aacatccctggcacttagttttgct

SEQ ID NO: 45496 - DNA, 25 bp, Artificial sequence
  SiRNA target sequence
acatccctggcacttagttttgctg

SEQ ID NO: 45497 - DNA, 25 bp, Artificial sequence
  SiRNA target sequence
catccctggcacttagttttgctgt

SEQ ID NO: 45498 - DNA, 25 bp, Artificial sequence
  SiRNA target sequence
atccctggcacttagttttgctgtt

SEQ ID NO: 45499 - DNA, 25 bp, Artificial sequence
  SiRNA target sequence
tccctggcacttagttttgctgtta

SEQ ID NO: 45500 - DNA, 25 bp, Artificial sequence
  SiRNA target sequence
ccctggcacttagttttgctgttaa

SEQ ID NO: 45501 - DNA, 25 bp, Artificial sequence
  SiRNA target sequence
cctggcacttagttttgctgttaat

SEQ ID NO: 45502 - DNA, 25 bp, Artificial sequence
  SiRNA target sequence
ctggcacttagttttgctgttaata

SEQ ID NO: 45503 - DNA, 25 bp, Artificial sequence
  SiRNA target sequence
tggcacttagttttgctgttaatat

SEQ ID NO: 45504 - DNA, 25 bp, Artificial sequence
  SiRNA target sequence
ggcacttagttttgctgttaatatt

SEQ ID NO: 45505 - DNA, 25 bp, Artificial sequence
  SiRNA target sequence
gcacttagttttgctgttaatattc

SEQ ID NO: 45506 - DNA, 25 bp, Artificial sequence
  SiRNA target sequence
cacttagttttgctgttaatattcc

SEQ ID NO: 45507 - DNA, 25 bp, Artificial sequence
  SiRNA target sequence
acttagttttgctgttaatattcca

SEQ ID NO: 45508 - DNA, 25 bp, Artificial sequence
  SiRNA target sequence
cttagttttgctgttaatattccat

SEQ ID NO: 45509 - DNA, 25 bp, Artificial sequence
  SiRNA target sequence
ttagttttgctgttaatattccata

SEQ ID NO: 45510 - DNA, 25 bp, Artificial sequence
  SiRNA target sequence
tagttttgctgttaatattccatag

SEQ ID NO: 45511 - DNA, 25 bp, Artificial sequence
  SiRNA target sequence
agttttgctgttaatattccatagt

SEQ ID NO: 45512 - DNA, 25 bp, Artificial sequence
  SiRNA target sequence
gttttgctgttaatattccatagtt

SEQ ID NO: 45513 - DNA, 25 bp, Artificial sequence
  SiRNA target sequence
ttttgctgttaatattccatagttt

SEQ ID NO: 45514 - DNA, 25 bp, Artificial sequence
  SiRNA target sequence
tttgctgttaatattccatagtttc

SEQ ID NO: 45515 - DNA, 25 bp, Artificial sequence
  SiRNA target sequence
ttgctgttaatattccatagtttcc

SEQ ID NO: 45516 - DNA, 25 bp, Artificial sequence
  SiRNA target sequence
tgctgttaatattccatagtttcct

SEQ ID NO: 45517 - DNA, 25 bp, Artificial sequence
  SiRNA target sequence
gctgttaatattccatagtttccta

SEQ ID NO: 45518 - DNA, 25 bp, Artificial sequence
  SiRNA target sequence
ctgttaatattccatagtttcctaa

SEQ ID NO: 45519 - DNA, 25 bp, Artificial sequence
  SiRNA target sequence
tgttaatattccatagtttcctaat

SEQ ID NO: 45520 - DNA, 25 bp, Artificial sequence
  SiRNA target sequence
gttaatattccatagtttcctaatg

SEQ ID NO: 45521 - DNA, 25 bp, Artificial sequence
  SiRNA target sequence
ttaatattccatagtttcctaatgt

SEQ ID NO: 45522 - DNA, 25 bp, Artificial sequence
  SiRNA target sequence
taatattccatagtttcctaatgtt

SEQ ID NO: 45523 - DNA, 25 bp, Artificial sequence
  SiRNA target sequence
aatattccatagtttcctaatgtta

SEQ ID NO: 45524 - DNA, 25 bp, Artificial sequence
  SiRNA target sequence
atattccatagtttcctaatgttat

SEQ ID NO: 45525 - DNA, 25 bp, Artificial sequence
  SiRNA target sequence
tattccatagtttcctaatgttata

SEQ ID NO: 45526 - DNA, 25 bp, Artificial sequence
  SiRNA target sequence
attccatagtttcctaatgttataa

SEQ ID NO: 45527 - DNA, 25 bp, Artificial sequence
  SiRNA target sequence
ttccatagtttcctaatgttataac

SEQ ID NO: 45528 - DNA, 25 bp, Artificial sequence
  SiRNA target sequence
tccatagtttcctaatgttataact

SEQ ID NO: 45529 - DNA, 25 bp, Artificial sequence
  SiRNA target sequence
ccatagtttcctaatgttataacta

SEQ ID NO: 45530 - DNA, 25 bp, Artificial sequence
  SiRNA target sequence
catagtttcctaatgttataactat

SEQ ID NO: 45531 - DNA, 25 bp, Artificial sequence
  SiRNA target sequence
atagtttcctaatgttataactata

SEQ ID NO: 45532 - DNA, 25 bp, Artificial sequence
  SiRNA target sequence
tagtttcctaatgttataactataa

SEQ ID NO: 45533 - DNA, 25 bp, Artificial sequence
  SiRNA target sequence
agtttcctaatgttataactataaa

SEQ ID NO: 45534 - DNA, 25 bp, Artificial sequence
  SiRNA target sequence
gtttcctaatgttataactataaaa

SEQ ID NO: 45535 - DNA, 25 bp, Artificial sequence
  SiRNA target sequence
tttcctaatgttataactataaaac

SEQ ID NO: 45536 - DNA, 25 bp, Artificial sequence
  SiRNA target sequence
ttcctaatgttataactataaaaca

SEQ ID NO: 45537 - DNA, 25 bp, Artificial sequence
  SiRNA target sequence
tcctaatgttataactataaaacac

SEQ ID NO: 45538 - DNA, 25 bp, Artificial sequence
  SiRNA target sequence
cctaatgttataactataaaacact

SEQ ID NO: 45539 - DNA, 25 bp, Artificial sequence
  SiRNA target sequence
ctaatgttataactataaaacactg

SEQ ID NO: 45540 - DNA, 25 bp, Artificial sequence
  SiRNA target sequence
taatgttataactataaaacactgt

SEQ ID NO: 45541 - DNA, 25 bp, Artificial sequence
  SiRNA target sequence
aatgttataactataaaacactgta

SEQ ID NO: 45542 - DNA, 25 bp, Artificial sequence
  SiRNA target sequence
atgttataactataaaacactgtaa

SEQ ID NO: 45543 - DNA, 25 bp, Artificial sequence
  SiRNA target sequence
tgttataactataaaacactgtaaa

SEQ ID NO: 45544 - DNA, 25 bp, Artificial sequence
  SiRNA target sequence
gttataactataaaacactgtaaag

SEQ ID NO: 45545 - DNA, 25 bp, Artificial sequence
  SiRNA target sequence
ttataactataaaacactgtaaagc

SEQ ID NO: 45546 - DNA, 25 bp, Artificial sequence
  SiRNA target sequence
tataactataaaacactgtaaagca

SEQ ID NO: 45547 - DNA, 25 bp, Artificial sequence
  SiRNA target sequence
ataactataaaacactgtaaagcaa

SEQ ID NO: 45548 - DNA, 25 bp, Artificial sequence
  SiRNA target sequence
taactataaaacactgtaaagcaaa

SEQ ID NO: 45549 - DNA, 25 bp, Artificial sequence
  SiRNA target sequence
aactataaaacactgtaaagcaaaa

SEQ ID NO: 45550 - DNA, 25 bp, Artificial sequence
  SiRNA target sequence
actataaaacactgtaaagcaaaaa

SEQ ID NO: 45551 - DNA, 25 bp, Artificial sequence
  SiRNA target sequence
ctataaaacactgtaaagcaaaaat

SEQ ID NO: 45552 - DNA, 25 bp, Artificial sequence
  SiRNA target sequence
tataaaacactgtaaagcaaaaatt

SEQ ID NO: 45553 - DNA, 25 bp, Artificial sequence
  SiRNA target sequence
ataaaacactgtaaagcaaaaatta

SEQ ID NO: 45554 - DNA, 25 bp, Artificial sequence
  SiRNA target sequence
taaaacactgtaaagcaaaaattat

SEQ ID NO: 45555 - DNA, 25 bp, Artificial sequence
  SiRNA target sequence
aaaacactgtaaagcaaaaattatc

SEQ ID NO: 45556 - DNA, 25 bp, Artificial sequence
  SiRNA target sequence
aaacactgtaaagcaaaaattatct

SEQ ID NO: 45557 - DNA, 25 bp, Artificial sequence
  SiRNA target sequence
aacactgtaaagcaaaaattatctt

SEQ ID NO: 45558 - DNA, 25 bp, Artificial sequence
  SiRNA target sequence
acactgtaaagcaaaaattatctta

SEQ ID NO: 45559 - DNA, 25 bp, Artificial sequence
  SiRNA target sequence
cactgtaaagcaaaaattatcttat

SEQ ID NO: 45560 - DNA, 25 bp, Artificial sequence
  SiRNA target sequence
actgtaaagcaaaaattatcttatt

SEQ ID NO: 45561 - DNA, 25 bp, Artificial sequence
  SiRNA target sequence
ctgtaaagcaaaaattatcttattt

SEQ ID NO: 45562 - DNA, 25 bp, Artificial sequence
  SiRNA target sequence
tgtaaagcaaaaattatcttattta

SEQ ID NO: 45563 - DNA, 25 bp, Artificial sequence
  SiRNA target sequence
gtaaagcaaaaattatcttatttac

SEQ ID NO: 45564 - DNA, 25 bp, Artificial sequence
  SiRNA target sequence
taaagcaaaaattatcttatttaca

SEQ ID NO: 45565 - DNA, 25 bp, Artificial sequence
  SiRNA target sequence
aaagcaaaaattatcttatttacaa

SEQ ID NO: 45566 - DNA, 25 bp, Artificial sequence
  SiRNA target sequence
aagcaaaaattatcttatttacaag

SEQ ID NO: 45567 - DNA, 25 bp, Artificial sequence
  SiRNA target sequence
agcaaaaattatcttatttacaagg

SEQ ID NO: 45568 - DNA, 25 bp, Artificial sequence
  SiRNA target sequence
gcaaaaattatcttatttacaaggt

SEQ ID NO: 45569 - DNA, 25 bp, Artificial sequence
  SiRNA target sequence
caaaaattatcttatttacaaggta

SEQ ID NO: 45570 - DNA, 25 bp, Artificial sequence
  SiRNA target sequence
aaaaattatcttatttacaaggtat

SEQ ID NO: 45571 - DNA, 25 bp, Artificial sequence
  SiRNA target sequence
aaaattatcttatttacaaggtata

SEQ ID NO: 45572 - DNA, 25 bp, Artificial sequence
  SiRNA target sequence
aaattatcttatttacaaggtataa

SEQ ID NO: 45573 - DNA, 25 bp, Artificial sequence
  SiRNA target sequence
aattatcttatttacaaggtataaa

SEQ ID NO: 45574 - DNA, 25 bp, Artificial sequence
  SiRNA target sequence
attatcttatttacaaggtataaaa

SEQ ID NO: 45575 - DNA, 25 bp, Artificial sequence
  SiRNA target sequence
ttatcttatttacaaggtataaaaa

SEQ ID NO: 45576 - DNA, 25 bp, Artificial sequence
  SiRNA target sequence
tatcttatttacaaggtataaaaaa

SEQ ID NO: 45577 - DNA, 25 bp, Artificial sequence
  SiRNA target sequence
atcttatttacaaggtataaaaaac

SEQ ID NO: 45578 - DNA, 25 bp, Artificial sequence
  SiRNA target sequence
tcttatttacaaggtataaaaaact

SEQ ID NO: 45579 - DNA, 25 bp, Artificial sequence
  SiRNA target sequence
cttatttacaaggtataaaaaacta

SEQ ID NO: 45580 - DNA, 25 bp, Artificial sequence
  SiRNA target sequence
ttatttacaaggtataaaaaactaa

SEQ ID NO: 45581 - DNA, 25 bp, Artificial sequence
  SiRNA target sequence
tatttacaaggtataaaaaactaag

SEQ ID NO: 45582 - DNA, 25 bp, Artificial sequence
  SiRNA target sequence
atttacaaggtataaaaaactaaga

SEQ ID NO: 45583 - DNA, 25 bp, Artificial sequence
  SiRNA target sequence
tttacaaggtataaaaaactaagag

SEQ ID NO: 45584 - DNA, 25 bp, Artificial sequence
  SiRNA target sequence
ttacaaggtataaaaaactaagaga

SEQ ID NO: 45585 - DNA, 25 bp, Artificial sequence
  SiRNA target sequence
tacaaggtataaaaaactaagagat

SEQ ID NO: 45586 - DNA, 25 bp, Artificial sequence
  SiRNA target sequence
acaaggtataaaaaactaagagatc

SEQ ID NO: 45587 - DNA, 25 bp, Artificial sequence
  SiRNA target sequence
caaggtataaaaaactaagagatct

SEQ ID NO: 45588 - DNA, 25 bp, Artificial sequence
  SiRNA target sequence
aaggtataaaaaactaagagatctc

SEQ ID NO: 45589 - DNA, 25 bp, Artificial sequence
  SiRNA target sequence
aggtataaaaaactaagagatctcc

SEQ ID NO: 45590 - DNA, 25 bp, Artificial sequence
  SiRNA target sequence
ggtataaaaaactaagagatctcca

SEQ ID NO: 45591 - DNA, 25 bp, Artificial sequence
  SiRNA target sequence
gtataaaaaactaagagatctccag

SEQ ID NO: 45592 - DNA, 25 bp, Artificial sequence
  SiRNA target sequence
tataaaaaactaagagatctccaga

SEQ ID NO: 45593 - DNA, 25 bp, Artificial sequence
  SiRNA target sequence
ataaaaaactaagagatctccagat

SEQ ID NO: 45594 - DNA, 25 bp, Artificial sequence
  SiRNA target sequence
taaaaaactaagagatctccagatt

SEQ ID NO: 45595 - DNA, 25 bp, Artificial sequence
  SiRNA target sequence
aaaaaactaagagatctccagattc

SEQ ID NO: 45596 - DNA, 25 bp, Artificial sequence
  SiRNA target sequence
aaaaactaagagatctccagattct

SEQ ID NO: 45597 - DNA, 25 bp, Artificial sequence
  SiRNA target sequence
aaaactaagagatctccagattctg

SEQ ID NO: 45598 - DNA, 25 bp, Artificial sequence
  SiRNA target sequence
aaactaagagatctccagattctgt

SEQ ID NO: 45599 - DNA, 25 bp, Artificial sequence
  SiRNA target sequence
aactaagagatctccagattctgtt

SEQ ID NO: 45600 - DNA, 25 bp, Artificial sequence
  SiRNA target sequence
actaagagatctccagattctgtta

SEQ ID NO: 45601 - DNA, 25 bp, Artificial sequence
  SiRNA target sequence
ctaagagatctccagattctgttac

SEQ ID NO: 45602 - DNA, 25 bp, Artificial sequence
  SiRNA target sequence
taagagatctccagattctgttaca

SEQ ID NO: 45603 - DNA, 25 bp, Artificial sequence
  SiRNA target sequence
aagagatctccagattctgttacat

SEQ ID NO: 45604 - DNA, 25 bp, Artificial sequence
  SiRNA target sequence
agagatctccagattctgttacatt

SEQ ID NO: 45605 - DNA, 25 bp, Artificial sequence
  SiRNA target sequence
gagatctccagattctgttacattc

SEQ ID NO: 45606 - DNA, 25 bp, Artificial sequence
  SiRNA target sequence
agatctccagattctgttacattcc

SEQ ID NO: 45607 - DNA, 25 bp, Artificial sequence
  SiRNA target sequence
gatctccagattctgttacattccg

SEQ ID NO: 45608 - DNA, 25 bp, Artificial sequence
  SiRNA target sequence
atctccagattctgttacattccga

SEQ ID NO: 45609 - DNA, 25 bp, Artificial sequence
  SiRNA target sequence
tctccagattctgttacattccgat

SEQ ID NO: 45610 - DNA, 25 bp, Artificial sequence
  SiRNA target sequence
ctccagattctgttacattccgatt

SEQ ID NO: 45611 - DNA, 25 bp, Artificial sequence
  SiRNA target sequence
tccagattctgttacattccgattc

SEQ ID NO: 45612 - DNA, 25 bp, Artificial sequence
  SiRNA target sequence
ccagattctgttacattccgattct

SEQ ID NO: 45613 - DNA, 25 bp, Artificial sequence
  SiRNA target sequence
cagattctgttacattccgattcta

SEQ ID NO: 45614 - DNA, 25 bp, Artificial sequence
  SiRNA target sequence
agattctgttacattccgattctac

SEQ ID NO: 45615 - DNA, 25 bp, Artificial sequence
  SiRNA target sequence
gattctgttacattccgattctact

SEQ ID NO: 45616 - DNA, 25 bp, Artificial sequence
  SiRNA target sequence
attctgttacattccgattctactt

SEQ ID NO: 45617 - DNA, 25 bp, Artificial sequence
  SiRNA target sequence
ttctgttacattccgattctacttc

SEQ ID NO: 45618 - DNA, 25 bp, Artificial sequence
  SiRNA target sequence
tctgttacattccgattctacttca

SEQ ID NO: 45619 - DNA, 25 bp, Artificial sequence
  SiRNA target sequence
ctgttacattccgattctacttcag

SEQ ID NO: 45620 - DNA, 25 bp, Artificial sequence
  SiRNA target sequence
tgttacattccgattctacttcaga

SEQ ID NO: 45621 - DNA, 25 bp, Artificial sequence
  SiRNA target sequence
gttacattccgattctacttcagaa

SEQ ID NO: 45622 - DNA, 25 bp, Artificial sequence
  SiRNA target sequence
ttacattccgattctacttcagaaa

SEQ ID NO: 45623 - DNA, 25 bp, Artificial sequence
  SiRNA target sequence
tacattccgattctacttcagaaac

SEQ ID NO: 45624 - DNA, 25 bp, Artificial sequence
  SiRNA target sequence
acattccgattctacttcagaaaca

SEQ ID NO: 45625 - DNA, 25 bp, Artificial sequence
  SiRNA target sequence
cattccgattctacttcagaaacat

SEQ ID NO: 45626 - DNA, 25 bp, Artificial sequence
  SiRNA target sequence
attccgattctacttcagaaacata

SEQ ID NO: 45627 - DNA, 25 bp, Artificial sequence
  SiRNA target sequence
ttccgattctacttcagaaacatat

SEQ ID NO: 45628 - DNA, 25 bp, Artificial sequence
  SiRNA target sequence
tccgattctacttcagaaacatatt

SEQ ID NO: 45629 - DNA, 25 bp, Artificial sequence
  SiRNA target sequence
ccgattctacttcagaaacatattt

SEQ ID NO: 45630 - DNA, 25 bp, Artificial sequence
  SiRNA target sequence
cgattctacttcagaaacatatttt

SEQ ID NO: 45631 - DNA, 25 bp, Artificial sequence
  SiRNA target sequence
gattctacttcagaaacatattttt

SEQ ID NO: 45632 - DNA, 25 bp, Artificial sequence
  SiRNA target sequence
attctacttcagaaacatatttttc

SEQ ID NO: 45633 - DNA, 25 bp, Artificial sequence
  SiRNA target sequence
ttctacttcagaaacatatttttca

SEQ ID NO: 45634 - DNA, 25 bp, Artificial sequence
  SiRNA target sequence
tctacttcagaaacatatttttcat

SEQ ID NO: 45635 - DNA, 25 bp, Artificial sequence
  SiRNA target sequence
ctacttcagaaacatatttttcata

SEQ ID NO: 45636 - DNA, 25 bp, Artificial sequence
  SiRNA target sequence
tacttcagaaacatatttttcatat

SEQ ID NO: 45637 - DNA, 25 bp, Artificial sequence
  SiRNA target sequence
acttcagaaacatatttttcatatt

SEQ ID NO: 45638 - DNA, 25 bp, Artificial sequence
  SiRNA target sequence
cttcagaaacatatttttcatattt

SEQ ID NO: 45639 - DNA, 25 bp, Artificial sequence
  SiRNA target sequence
ttcagaaacatatttttcatattta

SEQ ID NO: 45640 - DNA, 25 bp, Artificial sequence
  SiRNA target sequence
tcagaaacatatttttcatatttaa

SEQ ID NO: 45641 - DNA, 25 bp, Artificial sequence
  SiRNA target sequence
cagaaacatatttttcatatttaag

SEQ ID NO: 45642 - DNA, 25 bp, Artificial sequence
  SiRNA target sequence
agaaacatatttttcatatttaagc

SEQ ID NO: 45643 - DNA, 25 bp, Artificial sequence
  SiRNA target sequence
gaaacatatttttcatatttaagcg

SEQ ID NO: 45644 - DNA, 25 bp, Artificial sequence
  SiRNA target sequence
aaacatatttttcatatttaagcga

SEQ ID NO: 45645 - DNA, 25 bp, Artificial sequence
  SiRNA target sequence
aacatatttttcatatttaagcgat

SEQ ID NO: 45646 - DNA, 25 bp, Artificial sequence
  SiRNA target sequence
acatatttttcatatttaagcgatt

SEQ ID NO: 45647 - DNA, 25 bp, Artificial sequence
  SiRNA target sequence
catatttttcatatttaagcgattc

SEQ ID NO: 45648 - DNA, 25 bp, Artificial sequence
  SiRNA target sequence
atatttttcatatttaagcgattct

SEQ ID NO: 45649 - DNA, 25 bp, Artificial sequence
  SiRNA target sequence
tatttttcatatttaagcgattctt

SEQ ID NO: 45650 - DNA, 25 bp, Artificial sequence
  SiRNA target sequence
atttttcatatttaagcgattcttc

SEQ ID NO: 45651 - DNA, 25 bp, Artificial sequence
  SiRNA target sequence
tttttcatatttaagcgattcttct

SEQ ID NO: 45652 - DNA, 25 bp, Artificial sequence
  SiRNA target sequence
ttttcatatttaagcgattcttctt

SEQ ID NO: 45653 - DNA, 25 bp, Artificial sequence
  SiRNA target sequence
tttcatatttaagcgattcttcttc

SEQ ID NO: 45654 - DNA, 25 bp, Artificial sequence
  SiRNA target sequence
ttcatatttaagcgattcttcttct

SEQ ID NO: 45655 - DNA, 25 bp, Artificial sequence
  SiRNA target sequence
tcatatttaagcgattcttcttctt

SEQ ID NO: 45656 - DNA, 25 bp, Artificial sequence
  SiRNA target sequence
catatttaagcgattcttcttcttc

SEQ ID NO: 45657 - DNA, 25 bp, Artificial sequence
  SiRNA target sequence
atatttaagcgattcttcttcttct

SEQ ID NO: 45658 - DNA, 25 bp, Artificial sequence
  SiRNA target sequence
tatttaagcgattcttcttcttctg

SEQ ID NO: 45659 - DNA, 25 bp, Artificial sequence
  SiRNA target sequence
atttaagcgattcttcttcttctgt

SEQ ID NO: 45660 - DNA, 25 bp, Artificial sequence
  SiRNA target sequence
tttaagcgattcttcttcttctgtt

SEQ ID NO: 45661 - DNA, 25 bp, Artificial sequence
  SiRNA target sequence
ttaagcgattcttcttcttctgttt

SEQ ID NO: 45662 - DNA, 25 bp, Artificial sequence
  SiRNA target sequence
taagcgattcttcttcttctgtttt

SEQ ID NO: 45663 - DNA, 25 bp, Artificial sequence
  SiRNA target sequence
aagcgattcttcttcttctgtttta

SEQ ID NO: 45664 - DNA, 25 bp, Artificial sequence
  SiRNA target sequence
agcgattcttcttcttctgttttat

SEQ ID NO: 45665 - DNA, 25 bp, Artificial sequence
  SiRNA target sequence
gcgattcttcttcttctgttttata

SEQ ID NO: 45666 - DNA, 25 bp, Artificial sequence
  SiRNA target sequence
cgattcttcttcttctgttttatat

SEQ ID NO: 45667 - DNA, 25 bp, Artificial sequence
  SiRNA target sequence
gattcttcttcttctgttttatatg

SEQ ID NO: 45668 - DNA, 25 bp, Artificial sequence
  SiRNA target sequence
attcttcttcttctgttttatatgc

SEQ ID NO: 45669 - DNA, 25 bp, Artificial sequence
  SiRNA target sequence
ttcttcttcttctgttttatatgct

SEQ ID NO: 45670 - DNA, 25 bp, Artificial sequence
  SiRNA target sequence
tcttcttcttctgttttatatgcta

SEQ ID NO: 45671 - DNA, 25 bp, Artificial sequence
  SiRNA target sequence
cttcttcttctgttttatatgctag

SEQ ID NO: 45672 - DNA, 25 bp, Artificial sequence
  SiRNA target sequence
ttcttcttctgttttatatgctagt

SEQ ID NO: 45673 - DNA, 25 bp, Artificial sequence
  SiRNA target sequence
tcttcttctgttttatatgctagta

SEQ ID NO: 45674 - DNA, 25 bp, Artificial sequence
  SiRNA target sequence
cttcttctgttttatatgctagtat

SEQ ID NO: 45675 - DNA, 25 bp, Artificial sequence
  SiRNA target sequence
ttcttctgttttatatgctagtata

SEQ ID NO: 45676 - DNA, 25 bp, Artificial sequence
  SiRNA target sequence
tcttctgttttatatgctagtatag

SEQ ID NO: 45677 - DNA, 25 bp, Artificial sequence
  SiRNA target sequence
cttctgttttatatgctagtatagt

SEQ ID NO: 45678 - DNA, 25 bp, Artificial sequence
  SiRNA target sequence
ttctgttttatatgctagtatagtc

SEQ ID NO: 45679 - DNA, 25 bp, Artificial sequence
  SiRNA target sequence
tctgttttatatgctagtatagtct

SEQ ID NO: 45680 - DNA, 25 bp, Artificial sequence
  SiRNA target sequence
ctgttttatatgctagtatagtctc

SEQ ID NO: 45681 - DNA, 25 bp, Artificial sequence
  SiRNA target sequence
tgttttatatgctagtatagtctca

SEQ ID NO: 45682 - DNA, 25 bp, Artificial sequence
  SiRNA target sequence
gttttatatgctagtatagtctcat

SEQ ID NO: 45683 - DNA, 25 bp, Artificial sequence
  SiRNA target sequence
ttttatatgctagtatagtctcatg

SEQ ID NO: 45684 - DNA, 25 bp, Artificial sequence
  SiRNA target sequence
tttatatgctagtatagtctcatga

SEQ ID NO: 45685 - DNA, 25 bp, Artificial sequence
  SiRNA target sequence
ttatatgctagtatagtctcatgat

SEQ ID NO: 45686 - DNA, 25 bp, Artificial sequence
  SiRNA target sequence
tatatgctagtatagtctcatgatt

SEQ ID NO: 45687 - DNA, 25 bp, Artificial sequence
  SiRNA target sequence
atatgctagtatagtctcatgatta

SEQ ID NO: 45688 - DNA, 25 bp, Artificial sequence
  SiRNA target sequence
tatgctagtatagtctcatgattaa

SEQ ID NO: 45689 - DNA, 25 bp, Artificial sequence
  SiRNA target sequence
atgctagtatagtctcatgattaat

SEQ ID NO: 45690 - DNA, 25 bp, Artificial sequence
  SiRNA target sequence
tgctagtatagtctcatgattaatt

SEQ ID NO: 45691 - DNA, 25 bp, Artificial sequence
  SiRNA target sequence
gctagtatagtctcatgattaatta

SEQ ID NO: 45692 - DNA, 25 bp, Artificial sequence
  SiRNA target sequence
ctagtatagtctcatgattaattaa

SEQ ID NO: 45693 - DNA, 25 bp, Artificial sequence
  SiRNA target sequence
tagtatagtctcatgattaattaaa

SEQ ID NO: 45694 - DNA, 25 bp, Artificial sequence
  SiRNA target sequence
agtatagtctcatgattaattaaag

SEQ ID NO: 45695 - DNA, 25 bp, Artificial sequence
  SiRNA target sequence
gtatagtctcatgattaattaaaga

SEQ ID NO: 45696 - DNA, 25 bp, Artificial sequence
  SiRNA target sequence
tatagtctcatgattaattaaagaa

SEQ ID NO: 45697 - DNA, 25 bp, Artificial sequence
  SiRNA target sequence
atagtctcatgattaattaaagaat

SEQ ID NO: 45698 - DNA, 25 bp, Artificial sequence
  SiRNA target sequence
tagtctcatgattaattaaagaatc

SEQ ID NO: 45699 - DNA, 25 bp, Artificial sequence
  SiRNA target sequence
agtctcatgattaattaaagaatca

SEQ ID NO: 45700 - DNA, 25 bp, Artificial sequence
  SiRNA target sequence
gtctcatgattaattaaagaatcat

SEQ ID NO: 45701 - DNA, 25 bp, Artificial sequence
  SiRNA target sequence
tctcatgattaattaaagaatcatg

SEQ ID NO: 45702 - DNA, 25 bp, Artificial sequence
  SiRNA target sequence
ctcatgattaattaaagaatcatgt

SEQ ID NO: 45703 - DNA, 25 bp, Artificial sequence
  SiRNA target sequence
tcatgattaattaaagaatcatgta

SEQ ID NO: 45704 - DNA, 25 bp, Artificial sequence
  SiRNA target sequence
catgattaattaaagaatcatgtaa

SEQ ID NO: 45705 - DNA, 25 bp, Artificial sequence
  SiRNA target sequence
atgattaattaaagaatcatgtaag

SEQ ID NO: 45706 - DNA, 25 bp, Artificial sequence
  SiRNA target sequence
tgattaattaaagaatcatgtaagt

SEQ ID NO: 45707 - DNA, 25 bp, Artificial sequence
  SiRNA target sequence
gattaattaaagaatcatgtaagtg

SEQ ID NO: 45708 - DNA, 25 bp, Artificial sequence
  SiRNA target sequence
attaattaaagaatcatgtaagtga

SEQ ID NO: 45709 - DNA, 25 bp, Artificial sequence
  SiRNA target sequence
ttaattaaagaatcatgtaagtgat

SEQ ID NO: 45710 - DNA, 25 bp, Artificial sequence
  SiRNA target sequence
taattaaagaatcatgtaagtgatt

SEQ ID NO: 45711 - DNA, 25 bp, Artificial sequence
  SiRNA target sequence
aattaaagaatcatgtaagtgattt

SEQ ID NO: 45712 - DNA, 25 bp, Artificial sequence
  SiRNA target sequence
attaaagaatcatgtaagtgatttg

SEQ ID NO: 45713 - DNA, 25 bp, Artificial sequence
  SiRNA target sequence
ttaaagaatcatgtaagtgatttga

SEQ ID NO: 45714 - DNA, 25 bp, Artificial sequence
  SiRNA target sequence
taaagaatcatgtaagtgatttgag

SEQ ID NO: 45715 - DNA, 25 bp, Artificial sequence
  SiRNA target sequence
aaagaatcatgtaagtgatttgagc

SEQ ID NO: 45716 - DNA, 25 bp, Artificial sequence
  SiRNA target sequence
aagaatcatgtaagtgatttgagca

SEQ ID NO: 45717 - DNA, 25 bp, Artificial sequence
  SiRNA target sequence
agaatcatgtaagtgatttgagcat

SEQ ID NO: 45718 - DNA, 25 bp, Artificial sequence
  SiRNA target sequence
gaatcatgtaagtgatttgagcatc

SEQ ID NO: 45719 - DNA, 25 bp, Artificial sequence
  SiRNA target sequence
aatcatgtaagtgatttgagcatct

SEQ ID NO: 45720 - DNA, 25 bp, Artificial sequence
  SiRNA target sequence
atcatgtaagtgatttgagcatctt

SEQ ID NO: 45721 - DNA, 25 bp, Artificial sequence
  SiRNA target sequence
tcatgtaagtgatttgagcatcttt

SEQ ID NO: 45722 - DNA, 25 bp, Artificial sequence
  SiRNA target sequence
catgtaagtgatttgagcatctttg

SEQ ID NO: 45723 - DNA, 25 bp, Artificial sequence
  SiRNA target sequence
atgtaagtgatttgagcatctttgt

SEQ ID NO: 45724 - DNA, 25 bp, Artificial sequence
  SiRNA target sequence
tgtaagtgatttgagcatctttgtt

SEQ ID NO: 45725 - DNA, 25 bp, Artificial sequence
  SiRNA target sequence
gtaagtgatttgagcatctttgttg

SEQ ID NO: 45726 - DNA, 25 bp, Artificial sequence
  SiRNA target sequence
taagtgatttgagcatctttgttgt

SEQ ID NO: 45727 - DNA, 25 bp, Artificial sequence
  SiRNA target sequence
aagtgatttgagcatctttgttgtg

SEQ ID NO: 45728 - DNA, 25 bp, Artificial sequence
  SiRNA target sequence
agtgatttgagcatctttgttgtgc

SEQ ID NO: 45729 - DNA, 25 bp, Artificial sequence
  SiRNA target sequence
gtgatttgagcatctttgttgtgcg

SEQ ID NO: 45730 - DNA, 25 bp, Artificial sequence
  SiRNA target sequence
tgatttgagcatctttgttgtgcgc

SEQ ID NO: 45731 - DNA, 25 bp, Artificial sequence
  SiRNA target sequence
gatttgagcatctttgttgtgcgca

SEQ ID NO: 45732 - DNA, 25 bp, Artificial sequence
  SiRNA target sequence
atttgagcatctttgttgtgcgcaa

SEQ ID NO: 45733 - DNA, 25 bp, Artificial sequence
  SiRNA target sequence
tttgagcatctttgttgtgcgcaat

SEQ ID NO: 45734 - DNA, 25 bp, Artificial sequence
  SiRNA target sequence
ttgagcatctttgttgtgcgcaatt

SEQ ID NO: 45735 - DNA, 25 bp, Artificial sequence
  SiRNA target sequence
tgagcatctttgttgtgcgcaatta

SEQ ID NO: 45736 - DNA, 25 bp, Artificial sequence
  SiRNA target sequence
gagcatctttgttgtgcgcaattat

SEQ ID NO: 45737 - DNA, 25 bp, Artificial sequence
  SiRNA target sequence
agcatctttgttgtgcgcaattata

SEQ ID NO: 45738 - DNA, 25 bp, Artificial sequence
  SiRNA target sequence
gcatctttgttgtgcgcaattatat

SEQ ID NO: 45739 - DNA, 25 bp, Artificial sequence
  SiRNA target sequence
catctttgttgtgcgcaattatatt

SEQ ID NO: 45740 - DNA, 25 bp, Artificial sequence
  SiRNA target sequence
atctttgttgtgcgcaattatattc

SEQ ID NO: 45741 - DNA, 25 bp, Artificial sequence
  SiRNA target sequence
tctttgttgtgcgcaattatattct

SEQ ID NO: 45742 - DNA, 25 bp, Artificial sequence
  SiRNA target sequence
ctttgttgtgcgcaattatattctt

SEQ ID NO: 45743 - DNA, 25 bp, Artificial sequence
  SiRNA target sequence
tttgttgtgcgcaattatattcttt

SEQ ID NO: 45744 - DNA, 25 bp, Artificial sequence
  SiRNA target sequence
ttgttgtgcgcaattatattctttt

SEQ ID NO: 45745 - DNA, 25 bp, Artificial sequence
  SiRNA target sequence
tgttgtgcgcaattatattcttttc

SEQ ID NO: 45746 - DNA, 25 bp, Artificial sequence
  SiRNA target sequence
gttgtgcgcaattatattcttttct

SEQ ID NO: 45747 - DNA, 25 bp, Artificial sequence
  SiRNA target sequence
ttgtgcgcaattatattcttttctt

SEQ ID NO: 45748 - DNA, 25 bp, Artificial sequence
  SiRNA target sequence
tgtgcgcaattatattcttttctta

SEQ ID NO: 45749 - DNA, 25 bp, Artificial sequence
  SiRNA target sequence
gtgcgcaattatattcttttcttat

SEQ ID NO: 45750 - DNA, 25 bp, Artificial sequence
  SiRNA target sequence
tgcgcaattatattcttttcttatt

SEQ ID NO: 45751 - DNA, 25 bp, Artificial sequence
  SiRNA target sequence
gcgcaattatattcttttcttattc

SEQ ID NO: 45752 - DNA, 25 bp, Artificial sequence
  SiRNA target sequence
cgcaattatattcttttcttattcc

SEQ ID NO: 45753 - DNA, 25 bp, Artificial sequence
  SiRNA target sequence
gcaattatattcttttcttattcct

SEQ ID NO: 45754 - DNA, 25 bp, Artificial sequence
  SiRNA target sequence
caattatattcttttcttattcctg

SEQ ID NO: 45755 - DNA, 25 bp, Artificial sequence
  SiRNA target sequence
aattatattcttttcttattcctgt

SEQ ID NO: 45756 - DNA, 25 bp, Artificial sequence
  SiRNA target sequence
attatattcttttcttattcctgta

SEQ ID NO: 45757 - DNA, 25 bp, Artificial sequence
  SiRNA target sequence
ttatattcttttcttattcctgtac

SEQ ID NO: 45758 - DNA, 25 bp, Artificial sequence
  SiRNA target sequence
tatattcttttcttattcctgtacg

SEQ ID NO: 45759 - DNA, 25 bp, Artificial sequence
  SiRNA target sequence
atattcttttcttattcctgtacgc

SEQ ID NO: 45760 - DNA, 25 bp, Artificial sequence
  SiRNA target sequence
tattcttttcttattcctgtacgcc

SEQ ID NO: 45761 - DNA, 25 bp, Artificial sequence
  SiRNA target sequence
attcttttcttattcctgtacgcca

SEQ ID NO: 45762 - DNA, 25 bp, Artificial sequence
  SiRNA target sequence
ttcttttcttattcctgtacgccaa

SEQ ID NO: 45763 - DNA, 25 bp, Artificial sequence
  SiRNA target sequence
tcttttcttattcctgtacgccaat

SEQ ID NO: 45764 - DNA, 25 bp, Artificial sequence
  SiRNA target sequence
cttttcttattcctgtacgccaatg

SEQ ID NO: 45765 - DNA, 25 bp, Artificial sequence
  SiRNA target sequence
ttttcttattcctgtacgccaatga

SEQ ID NO: 45766 - DNA, 25 bp, Artificial sequence
  SiRNA target sequence
tttcttattcctgtacgccaatgaa

SEQ ID NO: 45767 - DNA, 25 bp, Artificial sequence
  SiRNA target sequence
ttcttattcctgtacgccaatgaac

SEQ ID NO: 45768 - DNA, 25 bp, Artificial sequence
  SiRNA target sequence
tcttattcctgtacgccaatgaact

SEQ ID NO: 45769 - DNA, 25 bp, Artificial sequence
  SiRNA target sequence
cttattcctgtacgccaatgaacta

SEQ ID NO: 45770 - DNA, 25 bp, Artificial sequence
  SiRNA target sequence
ttattcctgtacgccaatgaactat

SEQ ID NO: 45771 - DNA, 25 bp, Artificial sequence
  SiRNA target sequence
tattcctgtacgccaatgaactatt

SEQ ID NO: 45772 - DNA, 25 bp, Artificial sequence
  SiRNA target sequence
attcctgtacgccaatgaactattt

SEQ ID NO: 45773 - DNA, 25 bp, Artificial sequence
  SiRNA target sequence
ttcctgtacgccaatgaactatttt

SEQ ID NO: 45774 - DNA, 25 bp, Artificial sequence
  SiRNA target sequence
tcctgtacgccaatgaactattttc

SEQ ID NO: 45775 - DNA, 25 bp, Artificial sequence
  SiRNA target sequence
cctgtacgccaatgaactattttcg

SEQ ID NO: 45776 - DNA, 25 bp, Artificial sequence
  SiRNA target sequence
ctgtacgccaatgaactattttcgc

SEQ ID NO: 45777 - DNA, 25 bp, Artificial sequence
  SiRNA target sequence
tgtacgccaatgaactattttcgca

SEQ ID NO: 45778 - DNA, 25 bp, Artificial sequence
  SiRNA target sequence
gtacgccaatgaactattttcgcag

SEQ ID NO: 45779 - DNA, 25 bp, Artificial sequence
  SiRNA target sequence
tacgccaatgaactattttcgcagt

SEQ ID NO: 45780 - DNA, 25 bp, Artificial sequence
  SiRNA target sequence
acgccaatgaactattttcgcagtt

SEQ ID NO: 45781 - DNA, 25 bp, Artificial sequence
  SiRNA target sequence
cgccaatgaactattttcgcagttg

SEQ ID NO: 45782 - DNA, 25 bp, Artificial sequence
  SiRNA target sequence
gccaatgaactattttcgcagttgc

SEQ ID NO: 45783 - DNA, 25 bp, Artificial sequence
  SiRNA target sequence
ccaatgaactattttcgcagttgca

SEQ ID NO: 45784 - DNA, 25 bp, Artificial sequence
  SiRNA target sequence
caatgaactattttcgcagttgcaa

SEQ ID NO: 45785 - DNA, 25 bp, Artificial sequence
  SiRNA target sequence
aatgaactattttcgcagttgcaag

SEQ ID NO: 45786 - DNA, 25 bp, Artificial sequence
  SiRNA target sequence
atgaactattttcgcagttgcaagg

SEQ ID NO: 45787 - DNA, 25 bp, Artificial sequence
  SiRNA target sequence
tgaactattttcgcagttgcaagga

SEQ ID NO: 45788 - DNA, 25 bp, Artificial sequence
  SiRNA target sequence
gaactattttcgcagttgcaaggat

SEQ ID NO: 45789 - DNA, 25 bp, Artificial sequence
  SiRNA target sequence
aactattttcgcagttgcaaggatg

SEQ ID NO: 45790 - DNA, 25 bp, Artificial sequence
  SiRNA target sequence
actattttcgcagttgcaaggatgt

SEQ ID NO: 45791 - DNA, 25 bp, Artificial sequence
  SiRNA target sequence
ctattttcgcagttgcaaggatgta

SEQ ID NO: 45792 - DNA, 25 bp, Artificial sequence
  SiRNA target sequence
tattttcgcagttgcaaggatgtaa

SEQ ID NO: 45793 - DNA, 25 bp, Artificial sequence
  SiRNA target sequence
attttcgcagttgcaaggatgtaaa

SEQ ID NO: 45794 - DNA, 25 bp, Artificial sequence
  SiRNA target sequence
ttttcgcagttgcaaggatgtaaac

SEQ ID NO: 45795 - DNA, 25 bp, Artificial sequence
  SiRNA target sequence
tttcgcagttgcaaggatgtaaact

SEQ ID NO: 45796 - DNA, 25 bp, Artificial sequence
  SiRNA target sequence
ttcgcagttgcaaggatgtaaacta

SEQ ID NO: 45797 - DNA, 25 bp, Artificial sequence
  SiRNA target sequence
tcgcagttgcaaggatgtaaactaa

SEQ ID NO: 45798 - DNA, 25 bp, Artificial sequence
  SiRNA target sequence
cgcagttgcaaggatgtaaactaat

SEQ ID NO: 45799 - DNA, 25 bp, Artificial sequence
  SiRNA target sequence
gcagttgcaaggatgtaaactaata

SEQ ID NO: 45800 - DNA, 25 bp, Artificial sequence
  SiRNA target sequence
cagttgcaaggatgtaaactaataa

SEQ ID NO: 45801 - DNA, 25 bp, Artificial sequence
  SiRNA target sequence
agttgcaaggatgtaaactaataat

SEQ ID NO: 45802 - DNA, 25 bp, Artificial sequence
  SiRNA target sequence
gttgcaaggatgtaaactaataatg

SEQ ID NO: 45803 - DNA, 25 bp, Artificial sequence
  SiRNA target sequence
ttgcaaggatgtaaactaataatgt

SEQ ID NO: 45804 - DNA, 25 bp, Artificial sequence
  SiRNA target sequence
tgcaaggatgtaaactaataatgtg

SEQ ID NO: 45805 - DNA, 25 bp, Artificial sequence
  SiRNA target sequence
gcaaggatgtaaactaataatgtga

SEQ ID NO: 45806 - DNA, 25 bp, Artificial sequence
  SiRNA target sequence
caaggatgtaaactaataatgtgat

SEQ ID NO: 45807 - DNA, 25 bp, Artificial sequence
  SiRNA target sequence
aaggatgtaaactaataatgtgatt

SEQ ID NO: 45808 - DNA, 25 bp, Artificial sequence
  SiRNA target sequence
aggatgtaaactaataatgtgatta

SEQ ID NO: 45809 - DNA, 25 bp, Artificial sequence
  SiRNA target sequence
ggatgtaaactaataatgtgattaa

SEQ ID NO: 45810 - DNA, 25 bp, Artificial sequence
  SiRNA target sequence
gatgtaaactaataatgtgattaaa

SEQ ID NO: 45811 - DNA, 25 bp, Artificial sequence
  SiRNA target sequence
atgtaaactaataatgtgattaaaa

SEQ ID NO: 45812 - DNA, 25 bp, Artificial sequence
  SiRNA target sequence
tgtaaactaataatgtgattaaaat

SEQ ID NO: 45813 - DNA, 25 bp, Artificial sequence
  SiRNA target sequence
gtaaactaataatgtgattaaaata

SEQ ID NO: 45814 - DNA, 25 bp, Artificial sequence
  SiRNA target sequence
taaactaataatgtgattaaaataa

SEQ ID NO: 45815 - DNA, 25 bp, Artificial sequence
  SiRNA target sequence
aaactaataatgtgattaaaataat

SEQ ID NO: 45816 - DNA, 25 bp, Artificial sequence
  SiRNA target sequence
aactaataatgtgattaaaataata

SEQ ID NO: 45817 - DNA, 25 bp, Artificial sequence
  SiRNA target sequence
actaataatgtgattaaaataataa

SEQ ID NO: 45818 - DNA, 25 bp, Artificial sequence
  SiRNA target sequence
ctaataatgtgattaaaataataaa

SEQ ID NO: 45819 - DNA, 25 bp, Artificial sequence
  SiRNA target sequence
taataatgtgattaaaataataaac

SEQ ID NO: 45820 - DNA, 25 bp, Artificial sequence
  SiRNA target sequence
aataatgtgattaaaataataaaca

SEQ ID NO: 45821 - DNA, 25 bp, Artificial sequence
  SiRNA target sequence
ataatgtgattaaaataataaacat

SEQ ID NO: 45822 - DNA, 25 bp, Artificial sequence
  SiRNA target sequence
taatgtgattaaaataataaacata

SEQ ID NO: 45823 - DNA, 25 bp, Artificial sequence
  SiRNA target sequence
aatgtgattaaaataataaacatat

SEQ ID NO: 45824 - DNA, 25 bp, Artificial sequence
  SiRNA target sequence
atgtgattaaaataataaacatatt

SEQ ID NO: 45825 - DNA, 25 bp, Artificial sequence
  SiRNA target sequence
tgtgattaaaataataaacatattt

SEQ ID NO: 45826 - DNA, 25 bp, Artificial sequence
  SiRNA target sequence
gtgattaaaataataaacatatttg

SEQ ID NO: 45827 - DNA, 25 bp, Artificial sequence
  SiRNA target sequence
tgattaaaataataaacatatttgt

SEQ ID NO: 45828 - DNA, 25 bp, Artificial sequence
  SiRNA target sequence
gattaaaataataaacatatttgtc

SEQ ID NO: 45829 - DNA, 25 bp, Artificial sequence
  SiRNA target sequence
attaaaataataaacatatttgtca

SEQ ID NO: 45830 - DNA, 25 bp, Artificial sequence
  SiRNA target sequence
ttaaaataataaacatatttgtcaa

SEQ ID NO: 45831 - DNA, 25 bp, Artificial sequence
  SiRNA target sequence
taaaataataaacatatttgtcaac

SEQ ID NO: 45832 - DNA, 25 bp, Artificial sequence
  SiRNA target sequence
aaaataataaacatatttgtcaacc

SEQ ID NO: 45833 - DNA, 25 bp, Artificial sequence
  SiRNA target sequence
aaataataaacatatttgtcaaccc

SEQ ID NO: 45834 - DNA, 25 bp, Artificial sequence
  SiRNA target sequence
aataataaacatatttgtcaaccct

SEQ ID NO: 45835 - DNA, 25 bp, Artificial sequence
  SiRNA target sequence
ataataaacatatttgtcaacccta

SEQ ID NO: 45836 - DNA, 25 bp, Artificial sequence
  SiRNA target sequence
taataaacatatttgtcaaccctaa

SEQ ID NO: 45837 - DNA, 25 bp, Artificial sequence
  SiRNA target sequence
aataaacatatttgtcaaccctaaa

SEQ ID NO: 45838 - DNA, 25 bp, Artificial sequence
  SiRNA target sequence
ataaacatatttgtcaaccctaaat

SEQ ID NO: 45839 - DNA, 25 bp, Artificial sequence
  SiRNA target sequence
taaacatatttgtcaaccctaaatt

SEQ ID NO: 45840 - DNA, 25 bp, Artificial sequence
  SiRNA target sequence
aaacatatttgtcaaccctaaattt

SEQ ID NO: 45841 - DNA, 25 bp, Artificial sequence
  SiRNA target sequence
aacatatttgtcaaccctaaatttg

SEQ ID NO: 45842 - DNA, 25 bp, Artificial sequence
  SiRNA target sequence
acatatttgtcaaccctaaatttgt

SEQ ID NO: 45843 - DNA, 25 bp, Artificial sequence
  SiRNA target sequence
catatttgtcaaccctaaatttgta

SEQ ID NO: 45844 - DNA, 25 bp, Artificial sequence
  SiRNA target sequence
atatttgtcaaccctaaatttgtat

SEQ ID NO: 45845 - DNA, 25 bp, Artificial sequence
  SiRNA target sequence
tatttgtcaaccctaaatttgtata

SEQ ID NO: 45846 - DNA, 25 bp, Artificial sequence
  SiRNA target sequence
atttgtcaaccctaaatttgtataa

SEQ ID NO: 45847 - DNA, 25 bp, Artificial sequence
  SiRNA target sequence
tttgtcaaccctaaatttgtataaa

SEQ ID NO: 45848 - DNA, 25 bp, Artificial sequence
  SiRNA target sequence
ttgtcaaccctaaatttgtataaat

SEQ ID NO: 45849 - DNA, 25 bp, Artificial sequence
  SiRNA target sequence
tgtcaaccctaaatttgtataaatt

SEQ ID NO: 45850 - DNA, 25 bp, Artificial sequence
  SiRNA target sequence
gtcaaccctaaatttgtataaattg

SEQ ID NO: 45851 - DNA, 25 bp, Artificial sequence
  SiRNA target sequence
tcaaccctaaatttgtataaattga

SEQ ID NO: 45852 - DNA, 25 bp, Artificial sequence
  SiRNA target sequence
caaccctaaatttgtataaattgac

SEQ ID NO: 45853 - DNA, 25 bp, Artificial sequence
  SiRNA target sequence
aaccctaaatttgtataaattgacg

SEQ ID NO: 45854 - DNA, 25 bp, Artificial sequence
  SiRNA target sequence
accctaaatttgtataaattgacga

SEQ ID NO: 45855 - DNA, 25 bp, Artificial sequence
  SiRNA target sequence
ccctaaatttgtataaattgacgaa

SEQ ID NO: 45856 - DNA, 25 bp, Artificial sequence
  SiRNA target sequence
cctaaatttgtataaattgacgaac

SEQ ID NO: 45857 - DNA, 25 bp, Artificial sequence
  SiRNA target sequence
ctaaatttgtataaattgacgaaca

SEQ ID NO: 45858 - DNA, 25 bp, Artificial sequence
  SiRNA target sequence
taaatttgtataaattgacgaacac

SEQ ID NO: 45859 - DNA, 25 bp, Artificial sequence
  SiRNA target sequence
aaatttgtataaattgacgaacacg

SEQ ID NO: 45860 - DNA, 25 bp, Artificial sequence
  SiRNA target sequence
aatttgtataaattgacgaacacgc

SEQ ID NO: 45861 - DNA, 25 bp, Artificial sequence
  SiRNA target sequence
atttgtataaattgacgaacacgcc

SEQ ID NO: 45862 - DNA, 25 bp, Artificial sequence
  SiRNA target sequence
tttgtataaattgacgaacacgcca

SEQ ID NO: 45863 - DNA, 25 bp, Artificial sequence
  SiRNA target sequence
ttgtataaattgacgaacacgccaa

SEQ ID NO: 45864 - DNA, 25 bp, Artificial sequence
  SiRNA target sequence
tgtataaattgacgaacacgccaat

SEQ ID NO: 45865 - DNA, 25 bp, Artificial sequence
  SiRNA target sequence
gtataaattgacgaacacgccaata

SEQ ID NO: 45866 - DNA, 25 bp, Artificial sequence
  SiRNA target sequence
tataaattgacgaacacgccaatat

SEQ ID NO: 45867 - DNA, 25 bp, Artificial sequence
  SiRNA target sequence
ataaattgacgaacacgccaatata

SEQ ID NO: 45868 - DNA, 25 bp, Artificial sequence
  SiRNA target sequence
taaattgacgaacacgccaatataa

SEQ ID NO: 45869 - DNA, 25 bp, Artificial sequence
  SiRNA target sequence
aaattgacgaacacgccaatataac

SEQ ID NO: 45870 - DNA, 25 bp, Artificial sequence
  SiRNA target sequence
aattgacgaacacgccaatataact

SEQ ID NO: 45871 - DNA, 25 bp, Artificial sequence
  SiRNA target sequence
attgacgaacacgccaatataactg

SEQ ID NO: 45872 - DNA, 25 bp, Artificial sequence
  SiRNA target sequence
ttgacgaacacgccaatataactgt

SEQ ID NO: 45873 - DNA, 25 bp, Artificial sequence
  SiRNA target sequence
tgacgaacacgccaatataactgta

SEQ ID NO: 45874 - DNA, 25 bp, Artificial sequence
  SiRNA target sequence
gacgaacacgccaatataactgtaa

SEQ ID NO: 45875 - DNA, 25 bp, Artificial sequence
  SiRNA target sequence
acgaacacgccaatataactgtaaa

SEQ ID NO: 45876 - DNA, 25 bp, Artificial sequence
  SiRNA target sequence
cgaacacgccaatataactgtaaaa

SEQ ID NO: 45877 - DNA, 25 bp, Artificial sequence
  SiRNA target sequence
gaacacgccaatataactgtaaaaa

SEQ ID NO: 45878 - DNA, 25 bp, Artificial sequence
  SiRNA target sequence
aacacgccaatataactgtaaaaaa

SEQ ID NO: 45879 - DNA, 25 bp, Artificial sequence
  SiRNA target sequence
acacgccaatataactgtaaaaaaa

SEQ ID NO: 45880 - DNA, 25 bp, Artificial sequence
  SiRNA target sequence
cacgccaatataactgtaaaaaaaa

SEQ ID NO: 45881 - DNA, 25 bp, Artificial sequence
  SiRNA target sequence
acgccaatataactgtaaaaaaaat

SEQ ID NO: 45882 - DNA, 25 bp, Artificial sequence
  SiRNA target sequence
cgccaatataactgtaaaaaaaata

SEQ ID NO: 45883 - DNA, 25 bp, Artificial sequence
  SiRNA target sequence
gccaatataactgtaaaaaaaatat

SEQ ID NO: 45884 - DNA, 25 bp, Artificial sequence
  SiRNA target sequence
ccaatataactgtaaaaaaaatatt

SEQ ID NO: 45885 - DNA, 25 bp, Artificial sequence
  SiRNA target sequence
caatataactgtaaaaaaaatattt

SEQ ID NO: 45886 - DNA, 25 bp, Artificial sequence
  SiRNA target sequence
aatataactgtaaaaaaaatattta

SEQ ID NO: 45887 - DNA, 25 bp, Artificial sequence
  SiRNA target sequence
atataactgtaaaaaaaatatttat

SEQ ID NO: 45888 - DNA, 25 bp, Artificial sequence
  SiRNA target sequence
tataactgtaaaaaaaatatttatg

SEQ ID NO: 45889 - DNA, 25 bp, Artificial sequence
  SiRNA target sequence
ataactgtaaaaaaaatatttatga

SEQ ID NO: 45890 - DNA, 25 bp, Artificial sequence
  SiRNA target sequence
taactgtaaaaaaaatatttatgat

SEQ ID NO: 45891 - DNA, 25 bp, Artificial sequence
  SiRNA target sequence
aactgtaaaaaaaatatttatgata

SEQ ID NO: 45892 - DNA, 25 bp, Artificial sequence
  SiRNA target sequence
actgtaaaaaaaatatttatgatat

SEQ ID NO: 45893 - DNA, 25 bp, Artificial sequence
  SiRNA target sequence
ctgtaaaaaaaatatttatgatatt

SEQ ID NO: 45894 - DNA, 25 bp, Artificial sequence
  SiRNA target sequence
tgtaaaaaaaatatttatgatatta

SEQ ID NO: 45895 - DNA, 25 bp, Artificial sequence
  SiRNA target sequence
gtaaaaaaaatatttatgatattaa

SEQ ID NO: 45896 - DNA, 25 bp, Artificial sequence
  SiRNA target sequence
taaaaaaaatatttatgatattaac

SEQ ID NO: 45897 - DNA, 25 bp, Artificial sequence
  SiRNA target sequence
aaaaaaaatatttatgatattaaca

SEQ ID NO: 45898 - DNA, 25 bp, Artificial sequence
  SiRNA target sequence
aaaaaaatatttatgatattaacaa

SEQ ID NO: 45899 - DNA, 25 bp, Artificial sequence
  SiRNA target sequence
aaaaaatatttatgatattaacaaa

SEQ ID NO: 45900 - DNA, 25 bp, Artificial sequence
  SiRNA target sequence
aaaaatatttatgatattaacaaat

SEQ ID NO: 45901 - DNA, 25 bp, Artificial sequence
  SiRNA target sequence
aaaatatttatgatattaacaaata

SEQ ID NO: 45902 - DNA, 25 bp, Artificial sequence
  SiRNA target sequence
aaatatttatgatattaacaaataa

SEQ ID NO: 45903 - DNA, 25 bp, Artificial sequence
  SiRNA target sequence
aatatttatgatattaacaaataaa

SEQ ID NO: 45904 - DNA, 25 bp, Artificial sequence
  SiRNA target sequence
atatttatgatattaacaaataaaa

SEQ ID NO: 45905 - DNA, 25 bp, Artificial sequence
  SiRNA target sequence
tatttatgatattaacaaataaaac

SEQ ID NO: 45906 - DNA, 25 bp, Artificial sequence
  SiRNA target sequence
atttatgatattaacaaataaaact

SEQ ID NO: 45907 - DNA, 25 bp, Artificial sequence
  SiRNA target sequence
tttatgatattaacaaataaaactt

SEQ ID NO: 45908 - DNA, 25 bp, Artificial sequence
  SiRNA target sequence
ttatgatattaacaaataaaacttc

SEQ ID NO: 45909 - DNA, 25 bp, Artificial sequence
  SiRNA target sequence
tatgatattaacaaataaaacttcg

SEQ ID NO: 45910 - DNA, 25 bp, Artificial sequence
  SiRNA target sequence
atgatattaacaaataaaacttcga

SEQ ID NO: 45911 - DNA, 25 bp, Artificial sequence
  SiRNA target sequence
tgatattaacaaataaaacttcgat

SEQ ID NO: 45912 - DNA, 25 bp, Artificial sequence
  SiRNA target sequence
gatattaacaaataaaacttcgatc

SEQ ID NO: 45913 - DNA, 25 bp, Artificial sequence
  SiRNA target sequence
atattaacaaataaaacttcgatca

SEQ ID NO: 45914 - DNA, 25 bp, Artificial sequence
  SiRNA target sequence
tattaacaaataaaacttcgatcaa

SEQ ID NO: 45915 - DNA, 25 bp, Artificial sequence
  SiRNA target sequence
attaacaaataaaacttcgatcaat

SEQ ID NO: 45916 - DNA, 25 bp, Artificial sequence
  SiRNA target sequence
ttaacaaataaaacttcgatcaatt

SEQ ID NO: 45917 - DNA, 25 bp, Artificial sequence
  SiRNA target sequence
taacaaataaaacttcgatcaattc

SEQ ID NO: 45918 - DNA, 25 bp, Artificial sequence
  SiRNA target sequence
aacaaataaaacttcgatcaattca

SEQ ID NO: 45919 - DNA, 25 bp, Artificial sequence
  SiRNA target sequence
acaaataaaacttcgatcaattcac

SEQ ID NO: 45920 - DNA, 25 bp, Artificial sequence
  SiRNA target sequence
caaataaaacttcgatcaattcact

SEQ ID NO: 45921 - DNA, 25 bp, Artificial sequence
  SiRNA target sequence
aaataaaacttcgatcaattcactt

SEQ ID NO: 45922 - DNA, 25 bp, Artificial sequence
  SiRNA target sequence
aataaaacttcgatcaattcactta

SEQ ID NO: 45923 - DNA, 25 bp, Artificial sequence
  SiRNA target sequence
ataaaacttcgatcaattcacttat

SEQ ID NO: 45924 - DNA, 25 bp, Artificial sequence
  SiRNA target sequence
taaaacttcgatcaattcacttatt

SEQ ID NO: 45925 - DNA, 25 bp, Artificial sequence
  SiRNA target sequence
aaaacttcgatcaattcacttattg

SEQ ID NO: 45926 - DNA, 25 bp, Artificial sequence
  SiRNA target sequence
aaacttcgatcaattcacttattgc

SEQ ID NO: 45927 - DNA, 25 bp, Artificial sequence
  SiRNA target sequence
aacttcgatcaattcacttattgct

SEQ ID NO: 45928 - DNA, 25 bp, Artificial sequence
  SiRNA target sequence
acttcgatcaattcacttattgctt

SEQ ID NO: 45929 - DNA, 25 bp, Artificial sequence
  SiRNA target sequence
cttcgatcaattcacttattgcttt

SEQ ID NO: 45930 - DNA, 25 bp, Artificial sequence
  SiRNA target sequence
ttcgatcaattcacttattgcttta

SEQ ID NO: 45931 - DNA, 25 bp, Artificial sequence
  SiRNA target sequence
tcgatcaattcacttattgctttac

SEQ ID NO: 45932 - DNA, 25 bp, Artificial sequence
  SiRNA target sequence
cgatcaattcacttattgctttact

SEQ ID NO: 45933 - DNA, 25 bp, Artificial sequence
  SiRNA target sequence
gatcaattcacttattgctttactt

SEQ ID NO: 45934 - DNA, 25 bp, Artificial sequence
  SiRNA target sequence
atcaattcacttattgctttacttt

SEQ ID NO: 45935 - DNA, 25 bp, Artificial sequence
  SiRNA target sequence
tcaattcacttattgctttactttc

SEQ ID NO: 45936 - DNA, 25 bp, Artificial sequence
  SiRNA target sequence
caattcacttattgctttactttct

SEQ ID NO: 45937 - DNA, 25 bp, Artificial sequence
  SiRNA target sequence
aattcacttattgctttactttctc

SEQ ID NO: 45938 - DNA, 25 bp, Artificial sequence
  SiRNA target sequence
attcacttattgctttactttctcg

SEQ ID NO: 45939 - DNA, 25 bp, Artificial sequence
  SiRNA target sequence
ttcacttattgctttactttctcgg

SEQ ID NO: 45940 - DNA, 25 bp, Artificial sequence
  SiRNA target sequence
tcacttattgctttactttctcggt

SEQ ID NO: 45941 - DNA, 25 bp, Artificial sequence
  SiRNA target sequence
cacttattgctttactttctcggtc

SEQ ID NO: 45942 - DNA, 25 bp, Artificial sequence
  SiRNA target sequence
acttattgctttactttctcggtct

SEQ ID NO: 45943 - DNA, 25 bp, Artificial sequence
  SiRNA target sequence
cttattgctttactttctcggtcta

SEQ ID NO: 45944 - DNA, 25 bp, Artificial sequence
  SiRNA target sequence
ttattgctttactttctcggtctat

SEQ ID NO: 45945 - DNA, 25 bp, Artificial sequence
  SiRNA target sequence
tattgctttactttctcggtctatt

SEQ ID NO: 45946 - DNA, 25 bp, Artificial sequence
  SiRNA target sequence
attgctttactttctcggtctatta

SEQ ID NO: 45947 - DNA, 25 bp, Artificial sequence
  SiRNA target sequence
ttgctttactttctcggtctattat

SEQ ID NO: 45948 - DNA, 25 bp, Artificial sequence
  SiRNA target sequence
tgctttactttctcggtctattatt

SEQ ID NO: 45949 - DNA, 25 bp, Artificial sequence
  SiRNA target sequence
gctttactttctcggtctattattg

SEQ ID NO: 45950 - DNA, 25 bp, Artificial sequence
  SiRNA target sequence
ctttactttctcggtctattattgt

SEQ ID NO: 45951 - DNA, 25 bp, Artificial sequence
  SiRNA target sequence
tttactttctcggtctattattgtt

SEQ ID NO: 45952 - DNA, 25 bp, Artificial sequence
  SiRNA target sequence
ttactttctcggtctattattgttt

SEQ ID NO: 45953 - DNA, 25 bp, Artificial sequence
  SiRNA target sequence
tactttctcggtctattattgtttg

SEQ ID NO: 45954 - DNA, 25 bp, Artificial sequence
  SiRNA target sequence
actttctcggtctattattgtttgt

SEQ ID NO: 45955 - DNA, 25 bp, Artificial sequence
  SiRNA target sequence
ctttctcggtctattattgtttgta

SEQ ID NO: 45956 - DNA, 25 bp, Artificial sequence
  SiRNA target sequence
tttctcggtctattattgtttgtat

SEQ ID NO: 45957 - DNA, 25 bp, Artificial sequence
  SiRNA target sequence
ttctcggtctattattgtttgtatt

SEQ ID NO: 45958 - DNA, 25 bp, Artificial sequence
  SiRNA target sequence
tctcggtctattattgtttgtattt

SEQ ID NO: 45959 - DNA, 25 bp, Artificial sequence
  SiRNA target sequence
ctcggtctattattgtttgtatttc

SEQ ID NO: 45960 - DNA, 25 bp, Artificial sequence
  SiRNA target sequence
tcggtctattattgtttgtatttca

SEQ ID NO: 45961 - DNA, 25 bp, Artificial sequence
  SiRNA target sequence
cggtctattattgtttgtatttcac

SEQ ID NO: 45962 - DNA, 25 bp, Artificial sequence
  SiRNA target sequence
ggtctattattgtttgtatttcacc

SEQ ID NO: 45963 - DNA, 25 bp, Artificial sequence
  SiRNA target sequence
gtctattattgtttgtatttcaccg

SEQ ID NO: 45964 - DNA, 25 bp, Artificial sequence
  SiRNA target sequence
tctattattgtttgtatttcaccgc

SEQ ID NO: 45965 - DNA, 25 bp, Artificial sequence
  SiRNA target sequence
ctattattgtttgtatttcaccgca

SEQ ID NO: 45966 - DNA, 25 bp, Artificial sequence
  SiRNA target sequence
tattattgtttgtatttcaccgcat

SEQ ID NO: 45967 - DNA, 25 bp, Artificial sequence
  SiRNA target sequence
attattgtttgtatttcaccgcatc

SEQ ID NO: 45968 - DNA, 25 bp, Artificial sequence
  SiRNA target sequence
ttattgtttgtatttcaccgcatcc

SEQ ID NO: 45969 - DNA, 25 bp, Artificial sequence
  SiRNA target sequence
tattgtttgtatttcaccgcatcct

SEQ ID NO: 45970 - DNA, 25 bp, Artificial sequence
  SiRNA target sequence
attgtttgtatttcaccgcatccta

SEQ ID NO: 45971 - DNA, 25 bp, Artificial sequence
  SiRNA target sequence
ttgtttgtatttcaccgcatcctat

SEQ ID NO: 45972 - DNA, 25 bp, Artificial sequence
  SiRNA target sequence
tgtttgtatttcaccgcatcctatt

SEQ ID NO: 45973 - DNA, 25 bp, Artificial sequence
  SiRNA target sequence
gtttgtatttcaccgcatcctattt

SEQ ID NO: 45974 - DNA, 25 bp, Artificial sequence
  SiRNA target sequence
tttgtatttcaccgcatcctatttt

SEQ ID NO: 45975 - DNA, 25 bp, Artificial sequence
  SiRNA target sequence
ttgtatttcaccgcatcctatttta

SEQ ID NO: 45976 - DNA, 25 bp, Artificial sequence
  SiRNA target sequence
tgtatttcaccgcatcctattttat

SEQ ID NO: 45977 - DNA, 25 bp, Artificial sequence
  SiRNA target sequence
gtatttcaccgcatcctattttatt

SEQ ID NO: 45978 - DNA, 25 bp, Artificial sequence
  SiRNA target sequence
tatttcaccgcatcctattttattg

SEQ ID NO: 45979 - DNA, 25 bp, Artificial sequence
  SiRNA target sequence
atttcaccgcatcctattttattgt

SEQ ID NO: 45980 - DNA, 25 bp, Artificial sequence
  SiRNA target sequence
tttcaccgcatcctattttattgta

SEQ ID NO: 45981 - DNA, 25 bp, Artificial sequence
  SiRNA target sequence
ttcaccgcatcctattttattgtat

SEQ ID NO: 45982 - DNA, 25 bp, Artificial sequence
  SiRNA target sequence
tcaccgcatcctattttattgtatc

SEQ ID NO: 45983 - DNA, 25 bp, Artificial sequence
  SiRNA target sequence
caccgcatcctattttattgtatct

SEQ ID NO: 45984 - DNA, 25 bp, Artificial sequence
  SiRNA target sequence
accgcatcctattttattgtatcta

SEQ ID NO: 45985 - DNA, 25 bp, Artificial sequence
  SiRNA target sequence
ccgcatcctattttattgtatctac

SEQ ID NO: 45986 - DNA, 25 bp, Artificial sequence
  SiRNA target sequence
cgcatcctattttattgtatctact

SEQ ID NO: 45987 - DNA, 25 bp, Artificial sequence
  SiRNA target sequence
gcatcctattttattgtatctacta

SEQ ID NO: 45988 - DNA, 25 bp, Artificial sequence
  SiRNA target sequence
catcctattttattgtatctactaa

SEQ ID NO: 45989 - DNA, 25 bp, Artificial sequence
  SiRNA target sequence
atcctattttattgtatctactaag

SEQ ID NO: 45990 - DNA, 25 bp, Artificial sequence
  SiRNA target sequence
tcctattttattgtatctactaagt

SEQ ID NO: 45991 - DNA, 25 bp, Artificial sequence
  SiRNA target sequence
cctattttattgtatctactaagtt

SEQ ID NO: 45992 - DNA, 25 bp, Artificial sequence
  SiRNA target sequence
ctattttattgtatctactaagttc

SEQ ID NO: 45993 - DNA, 25 bp, Artificial sequence
  SiRNA target sequence
tattttattgtatctactaagttcc

SEQ ID NO: 45994 - DNA, 25 bp, Artificial sequence
  SiRNA target sequence
attttattgtatctactaagttcca

SEQ ID NO: 45995 - DNA, 25 bp, Artificial sequence
  SiRNA target sequence
ttttattgtatctactaagttccat

SEQ ID NO: 45996 - DNA, 25 bp, Artificial sequence
  SiRNA target sequence
tttattgtatctactaagttccata

SEQ ID NO: 45997 - DNA, 25 bp, Artificial sequence
  SiRNA target sequence
ttattgtatctactaagttccatat

SEQ ID NO: 45998 - DNA, 25 bp, Artificial sequence
  SiRNA target sequence
tattgtatctactaagttccatatt

SEQ ID NO: 45999 - DNA, 25 bp, Artificial sequence
  SiRNA target sequence
attgtatctactaagttccatattt

SEQ ID NO: 46000 - DNA, 25 bp, Artificial sequence
  SiRNA target sequence
ttgtatctactaagttccatattta

SEQ ID NO: 46001 - DNA, 25 bp, Artificial sequence
  SiRNA target sequence
tgtatctactaagttccatatttat

SEQ ID NO: 46002 - DNA, 25 bp, Artificial sequence
  SiRNA target sequence
gtatctactaagttccatatttata

SEQ ID NO: 46003 - DNA, 25 bp, Artificial sequence
  SiRNA target sequence
tatctactaagttccatatttataa

SEQ ID NO: 46004 - DNA, 25 bp, Artificial sequence
  SiRNA target sequence
atctactaagttccatatttataaa

SEQ ID NO: 46005 - DNA, 25 bp, Artificial sequence
  SiRNA target sequence
tctactaagttccatatttataaaa

SEQ ID NO: 46006 - DNA, 25 bp, Artificial sequence
  SiRNA target sequence
ctactaagttccatatttataaaat

SEQ ID NO: 46007 - DNA, 25 bp, Artificial sequence
  SiRNA target sequence
tactaagttccatatttataaaatt

SEQ ID NO: 46008 - DNA, 25 bp, Artificial sequence
  SiRNA target sequence
actaagttccatatttataaaattt

SEQ ID NO: 46009 - DNA, 25 bp, Artificial sequence
  SiRNA target sequence
ctaagttccatatttataaaatttt

SEQ ID NO: 46010 - DNA, 25 bp, Artificial sequence
  SiRNA target sequence
taagttccatatttataaaattttt

SEQ ID NO: 46011 - DNA, 25 bp, Artificial sequence
  SiRNA target sequence
aagttccatatttataaaattttta

SEQ ID NO: 46012 - DNA, 25 bp, Artificial sequence
  SiRNA target sequence
agttccatatttataaaatttttaa

SEQ ID NO: 46013 - DNA, 25 bp, Artificial sequence
  SiRNA target sequence
gttccatatttataaaatttttaaa

SEQ ID NO: 46014 - DNA, 25 bp, Artificial sequence
  SiRNA target sequence
ttccatatttataaaatttttaaat

SEQ ID NO: 46015 - DNA, 25 bp, Artificial sequence
  SiRNA target sequence
tccatatttataaaatttttaaatg

SEQ ID NO: 46016 - DNA, 25 bp, Artificial sequence
  SiRNA target sequence
ccatatttataaaatttttaaatga

SEQ ID NO: 46017 - DNA, 25 bp, Artificial sequence
  SiRNA target sequence
catatttataaaatttttaaatgaa

SEQ ID NO: 46018 - DNA, 25 bp, Artificial sequence
  SiRNA target sequence
atatttataaaatttttaaatgaat

SEQ ID NO: 46019 - DNA, 25 bp, Artificial sequence
  SiRNA target sequence
tatttataaaatttttaaatgaatt

SEQ ID NO: 46020 - DNA, 25 bp, Artificial sequence
  SiRNA target sequence
atttataaaatttttaaatgaattt

SEQ ID NO: 46021 - DNA, 25 bp, Artificial sequence
  SiRNA target sequence
tttataaaatttttaaatgaatttt

SEQ ID NO: 46022 - DNA, 25 bp, Artificial sequence
  SiRNA target sequence
ttataaaatttttaaatgaattttt

SEQ ID NO: 46023 - DNA, 25 bp, Artificial sequence
  SiRNA target sequence
tataaaatttttaaatgaatttttt

SEQ ID NO: 46024 - DNA, 25 bp, Artificial sequence
  SiRNA target sequence
ataaaatttttaaatgaattttttc

SEQ ID NO: 46025 - DNA, 25 bp, Artificial sequence
  SiRNA target sequence
taaaatttttaaatgaattttttcc

SEQ ID NO: 46026 - DNA, 25 bp, Artificial sequence
  SiRNA target sequence
aaaatttttaaatgaattttttcct

SEQ ID NO: 46027 - DNA, 25 bp, Artificial sequence
  SiRNA target sequence
aaatttttaaatgaattttttcctg

SEQ ID NO: 46028 - DNA, 25 bp, Artificial sequence
  SiRNA target sequence
aatttttaaatgaattttttcctgt

SEQ ID NO: 46029 - DNA, 25 bp, Artificial sequence
  SiRNA target sequence
atttttaaatgaattttttcctgtc

SEQ ID NO: 46030 - DNA, 25 bp, Artificial sequence
  SiRNA target sequence
tttttaaatgaattttttcctgtca

SEQ ID NO: 46031 - DNA, 25 bp, Artificial sequence
  SiRNA target sequence
ttttaaatgaattttttcctgtcag

SEQ ID NO: 46032 - DNA, 25 bp, Artificial sequence
  SiRNA target sequence
tttaaatgaattttttcctgtcagt

SEQ ID NO: 46033 - DNA, 25 bp, Artificial sequence
  SiRNA target sequence
ttaaatgaattttttcctgtcagtc

SEQ ID NO: 46034 - DNA, 25 bp, Artificial sequence
  SiRNA target sequence
taaatgaattttttcctgtcagtct

SEQ ID NO: 46035 - DNA, 25 bp, Artificial sequence
  SiRNA target sequence
aaatgaattttttcctgtcagtctg

SEQ ID NO: 46036 - DNA, 25 bp, Artificial sequence
  SiRNA target sequence
aatgaattttttcctgtcagtctga

SEQ ID NO: 46037 - DNA, 25 bp, Artificial sequence
  SiRNA target sequence
atgaattttttcctgtcagtctgaa

SEQ ID NO: 46038 - DNA, 25 bp, Artificial sequence
  SiRNA target sequence
tgaattttttcctgtcagtctgaat

SEQ ID NO: 46039 - DNA, 25 bp, Artificial sequence
  SiRNA target sequence
gaattttttcctgtcagtctgaata

SEQ ID NO: 46040 - DNA, 25 bp, Artificial sequence
  SiRNA target sequence
aattttttcctgtcagtctgaatac

SEQ ID NO: 46041 - DNA, 25 bp, Artificial sequence
  SiRNA target sequence
attttttcctgtcagtctgaataca

SEQ ID NO: 46042 - DNA, 25 bp, Artificial sequence
  SiRNA target sequence
ttttttcctgtcagtctgaatacat

SEQ ID NO: 46043 - DNA, 25 bp, Artificial sequence
  SiRNA target sequence
tttttcctgtcagtctgaatacatg

SEQ ID NO: 46044 - DNA, 25 bp, Artificial sequence
  SiRNA target sequence
ttttcctgtcagtctgaatacatgt

SEQ ID NO: 46045 - DNA, 25 bp, Artificial sequence
  SiRNA target sequence
tttcctgtcagtctgaatacatgtt

SEQ ID NO: 46046 - DNA, 25 bp, Artificial sequence
  SiRNA target sequence
ttcctgtcagtctgaatacatgttg

SEQ ID NO: 46047 - DNA, 25 bp, Artificial sequence
  SiRNA target sequence
tcctgtcagtctgaatacatgttga

SEQ ID NO: 46048 - DNA, 25 bp, Artificial sequence
  SiRNA target sequence
cctgtcagtctgaatacatgttgaa

SEQ ID NO: 46049 - DNA, 25 bp, Artificial sequence
  SiRNA target sequence
ctgtcagtctgaatacatgttgaac

SEQ ID NO: 46050 - DNA, 25 bp, Artificial sequence
  SiRNA target sequence
tgtcagtctgaatacatgttgaacg

SEQ ID NO: 46051 - DNA, 25 bp, Artificial sequence
  SiRNA target sequence
gtcagtctgaatacatgttgaacgg

SEQ ID NO: 46052 - DNA, 25 bp, Artificial sequence
  SiRNA target sequence
tcagtctgaatacatgttgaacggg

SEQ ID NO: 46053 - DNA, 25 bp, Artificial sequence
  SiRNA target sequence
cagtctgaatacatgttgaacgggt

SEQ ID NO: 46054 - DNA, 25 bp, Artificial sequence
  SiRNA target sequence
agtctgaatacatgttgaacgggtg

SEQ ID NO: 46055 - DNA, 25 bp, Artificial sequence
  SiRNA target sequence
gtctgaatacatgttgaacgggtgt

SEQ ID NO: 46056 - DNA, 25 bp, Artificial sequence
  SiRNA target sequence
tctgaatacatgttgaacgggtgta

SEQ ID NO: 46057 - DNA, 25 bp, Artificial sequence
  SiRNA target sequence
ctgaatacatgttgaacgggtgtaa

SEQ ID NO: 46058 - DNA, 25 bp, Artificial sequence
  SiRNA target sequence
tgaatacatgttgaacgggtgtaac

SEQ ID NO: 46059 - DNA, 25 bp, Artificial sequence
  SiRNA target sequence
gaatacatgttgaacgggtgtaaca

SEQ ID NO: 46060 - DNA, 25 bp, Artificial sequence
  SiRNA target sequence
aatacatgttgaacgggtgtaacaa

SEQ ID NO: 46061 - DNA, 25 bp, Artificial sequence
  SiRNA target sequence
atacatgttgaacgggtgtaacaaa

SEQ ID NO: 46062 - DNA, 25 bp, Artificial sequence
  SiRNA target sequence
tacatgttgaacgggtgtaacaaat

SEQ ID NO: 46063 - DNA, 25 bp, Artificial sequence
  SiRNA target sequence
acatgttgaacgggtgtaacaaata

SEQ ID NO: 46064 - DNA, 25 bp, Artificial sequence
  SiRNA target sequence
catgttgaacgggtgtaacaaatat

SEQ ID NO: 46065 - DNA, 25 bp, Artificial sequence
  SiRNA target sequence
atgttgaacgggtgtaacaaatata

SEQ ID NO: 46066 - DNA, 25 bp, Artificial sequence
  SiRNA target sequence
tgttgaacgggtgtaacaaatataa

SEQ ID NO: 46067 - DNA, 25 bp, Artificial sequence
  SiRNA target sequence
gttgaacgggtgtaacaaatataaa

SEQ ID NO: 46068 - DNA, 25 bp, Artificial sequence
  SiRNA target sequence
ttgaacgggtgtaacaaatataaaa

SEQ ID NO: 46069 - DNA, 25 bp, Artificial sequence
  SiRNA target sequence
tgaacgggtgtaacaaatataaaat

SEQ ID NO: 46070 - DNA, 25 bp, Artificial sequence
  SiRNA target sequence
gaacgggtgtaacaaatataaaatt

SEQ ID NO: 46071 - DNA, 25 bp, Artificial sequence
  SiRNA target sequence
aacgggtgtaacaaatataaaattg

SEQ ID NO: 46072 - DNA, 25 bp, Artificial sequence
  SiRNA target sequence
acgggtgtaacaaatataaaattgt

SEQ ID NO: 46073 - DNA, 25 bp, Artificial sequence
  SiRNA target sequence
cgggtgtaacaaatataaaattgtt

SEQ ID NO: 46074 - DNA, 25 bp, Artificial sequence
  SiRNA target sequence
gggtgtaacaaatataaaattgtta

SEQ ID NO: 46075 - DNA, 25 bp, Artificial sequence
  SiRNA target sequence
ggtgtaacaaatataaaattgttaa

SEQ ID NO: 46076 - DNA, 25 bp, Artificial sequence
  SiRNA target sequence
gtgtaacaaatataaaattgttaag

SEQ ID NO: 46077 - DNA, 25 bp, Artificial sequence
  SiRNA target sequence
tgtaacaaatataaaattgttaagt

SEQ ID NO: 46078 - DNA, 25 bp, Artificial sequence
  SiRNA target sequence
gtaacaaatataaaattgttaagtt

SEQ ID NO: 46079 - DNA, 25 bp, Artificial sequence
  SiRNA target sequence
taacaaatataaaattgttaagttc

SEQ ID NO: 46080 - DNA, 25 bp, Artificial sequence
  SiRNA target sequence
aacaaatataaaattgttaagttct

SEQ ID NO: 46081 - DNA, 25 bp, Artificial sequence
  SiRNA target sequence
acaaatataaaattgttaagttctg

SEQ ID NO: 46082 - DNA, 25 bp, Artificial sequence
  SiRNA target sequence
caaatataaaattgttaagttctga

SEQ ID NO: 46083 - DNA, 25 bp, Artificial sequence
  SiRNA target sequence
aaatataaaattgttaagttctgac

SEQ ID NO: 46084 - DNA, 25 bp, Artificial sequence
  SiRNA target sequence
aatataaaattgttaagttctgaca

SEQ ID NO: 46085 - DNA, 25 bp, Artificial sequence
  SiRNA target sequence
atataaaattgttaagttctgacat

SEQ ID NO: 46086 - DNA, 25 bp, Artificial sequence
  SiRNA target sequence
tataaaattgttaagttctgacatt

SEQ ID NO: 46087 - DNA, 25 bp, Artificial sequence
  SiRNA target sequence
ataaaattgttaagttctgacattg

SEQ ID NO: 46088 - DNA, 25 bp, Artificial sequence
  SiRNA target sequence
taaaattgttaagttctgacattgt

SEQ ID NO: 46089 - DNA, 25 bp, Artificial sequence
  SiRNA target sequence
aaaattgttaagttctgacattgta

SEQ ID NO: 46090 - DNA, 25 bp, Artificial sequence
  SiRNA target sequence
aaattgttaagttctgacattgtaa

SEQ ID NO: 46091 - DNA, 25 bp, Artificial sequence
  SiRNA target sequence
aattgttaagttctgacattgtaat

SEQ ID NO: 46092 - DNA, 25 bp, Artificial sequence
  SiRNA target sequence
attgttaagttctgacattgtaatt

SEQ ID NO: 46093 - DNA, 25 bp, Artificial sequence
  SiRNA target sequence
ttgttaagttctgacattgtaattg

SEQ ID NO: 46094 - DNA, 25 bp, Artificial sequence
  SiRNA target sequence
tgttaagttctgacattgtaattga

SEQ ID NO: 46095 - DNA, 25 bp, Artificial sequence
  SiRNA target sequence
gttaagttctgacattgtaattgat

SEQ ID NO: 46096 - DNA, 25 bp, Artificial sequence
  SiRNA target sequence
ttaagttctgacattgtaattgata

SEQ ID NO: 46097 - DNA, 25 bp, Artificial sequence
  SiRNA target sequence
taagttctgacattgtaattgatac

SEQ ID NO: 46098 - DNA, 25 bp, Artificial sequence
  SiRNA target sequence
aagttctgacattgtaattgataca

SEQ ID NO: 46099 - DNA, 25 bp, Artificial sequence
  SiRNA target sequence
agttctgacattgtaattgatacaa

SEQ ID NO: 46100 - DNA, 25 bp, Artificial sequence
  SiRNA target sequence
gttctgacattgtaattgatacaat

SEQ ID NO: 46101 - DNA, 25 bp, Artificial sequence
  SiRNA target sequence
ttctgacattgtaattgatacaatt

SEQ ID NO: 46102 - DNA, 25 bp, Artificial sequence
  SiRNA target sequence
tctgacattgtaattgatacaattg

SEQ ID NO: 46103 - DNA, 25 bp, Artificial sequence
  SiRNA target sequence
ctgacattgtaattgatacaattgt

SEQ ID NO: 46104 - DNA, 25 bp, Artificial sequence
  SiRNA target sequence
tgacattgtaattgatacaattgtc

SEQ ID NO: 46105 - DNA, 25 bp, Artificial sequence
  SiRNA target sequence
gacattgtaattgatacaattgtca

SEQ ID NO: 46106 - DNA, 25 bp, Artificial sequence
  SiRNA target sequence
acattgtaattgatacaattgtcaa

SEQ ID NO: 46107 - DNA, 25 bp, Artificial sequence
  SiRNA target sequence
cattgtaattgatacaattgtcaaa

SEQ ID NO: 46108 - DNA, 25 bp, Artificial sequence
  SiRNA target sequence
attgtaattgatacaattgtcaaaa

SEQ ID NO: 46109 - DNA, 25 bp, Artificial sequence
  SiRNA target sequence
ttgtaattgatacaattgtcaaaac

SEQ ID NO: 46110 - DNA, 25 bp, Artificial sequence
  SiRNA target sequence
tgtaattgatacaattgtcaaaact

SEQ ID NO: 46111 - DNA, 25 bp, Artificial sequence
  SiRNA target sequence
gtaattgatacaattgtcaaaactg

SEQ ID NO: 46112 - DNA, 25 bp, Artificial sequence
  SiRNA target sequence
taattgatacaattgtcaaaactgc

SEQ ID NO: 46113 - DNA, 25 bp, Artificial sequence
  SiRNA target sequence
aattgatacaattgtcaaaactgca

SEQ ID NO: 46114 - DNA, 25 bp, Artificial sequence
  SiRNA target sequence
attgatacaattgtcaaaactgcaa

SEQ ID NO: 46115 - DNA, 25 bp, Artificial sequence
  SiRNA target sequence
ttgatacaattgtcaaaactgcaaa

SEQ ID NO: 46116 - DNA, 25 bp, Artificial sequence
  SiRNA target sequence
tgatacaattgtcaaaactgcaaaa

SEQ ID NO: 46117 - DNA, 25 bp, Artificial sequence
  SiRNA target sequence
gatacaattgtcaaaactgcaaaat

SEQ ID NO: 46118 - DNA, 25 bp, Artificial sequence
  SiRNA target sequence
atacaattgtcaaaactgcaaaata

SEQ ID NO: 46119 - DNA, 25 bp, Artificial sequence
  SiRNA target sequence
tacaattgtcaaaactgcaaaatac

SEQ ID NO: 46120 - DNA, 25 bp, Artificial sequence
  SiRNA target sequence
acaattgtcaaaactgcaaaataca

SEQ ID NO: 46121 - DNA, 25 bp, Artificial sequence
  SiRNA target sequence
caattgtcaaaactgcaaaatacaa

SEQ ID NO: 46122 - DNA, 25 bp, Artificial sequence
  SiRNA target sequence
aattgtcaaaactgcaaaatacaaa

SEQ ID NO: 46123 - DNA, 25 bp, Artificial sequence
  SiRNA target sequence
attgtcaaaactgcaaaatacaaaa

SEQ ID NO: 46124 - DNA, 25 bp, Artificial sequence
  SiRNA target sequence
ttgtcaaaactgcaaaatacaaaag

SEQ ID NO: 46125 - DNA, 25 bp, Artificial sequence
  SiRNA target sequence
tgtcaaaactgcaaaatacaaaaga

SEQ ID NO: 46126 - DNA, 25 bp, Artificial sequence
  SiRNA target sequence
gtcaaaactgcaaaatacaaaagac

SEQ ID NO: 46127 - DNA, 25 bp, Artificial sequence
  SiRNA target sequence
tcaaaactgcaaaatacaaaagact

SEQ ID NO: 46128 - DNA, 25 bp, Artificial sequence
  SiRNA target sequence
caaaactgcaaaatacaaaagactt

SEQ ID NO: 46129 - DNA, 25 bp, Artificial sequence
  SiRNA target sequence
aaaactgcaaaatacaaaagacttt

SEQ ID NO: 46130 - DNA, 25 bp, Artificial sequence
  SiRNA target sequence
aaactgcaaaatacaaaagactttg

SEQ ID NO: 46131 - DNA, 25 bp, Artificial sequence
  SiRNA target sequence
aactgcaaaatacaaaagactttga

SEQ ID NO: 46132 - DNA, 25 bp, Artificial sequence
  SiRNA target sequence
actgcaaaatacaaaagactttgac

SEQ ID NO: 46133 - DNA, 25 bp, Artificial sequence
  SiRNA target sequence
ctgcaaaatacaaaagactttgact

SEQ ID NO: 46134 - DNA, 25 bp, Artificial sequence
  SiRNA target sequence
tgcaaaatacaaaagactttgacta

SEQ ID NO: 46135 - DNA, 25 bp, Artificial sequence
  SiRNA target sequence
gcaaaatacaaaagactttgactaa

SEQ ID NO: 46136 - DNA, 25 bp, Artificial sequence
  SiRNA target sequence
caaaatacaaaagactttgactaag

SEQ ID NO: 46137 - DNA, 25 bp, Artificial sequence
  SiRNA target sequence
aaaatacaaaagactttgactaaga

SEQ ID NO: 46138 - DNA, 25 bp, Artificial sequence
  SiRNA target sequence
aaatacaaaagactttgactaagat

SEQ ID NO: 46139 - DNA, 25 bp, Artificial sequence
  SiRNA target sequence
aatacaaaagactttgactaagatc

SEQ ID NO: 46140 - DNA, 25 bp, Artificial sequence
  SiRNA target sequence
atacaaaagactttgactaagatct

SEQ ID NO: 46141 - DNA, 25 bp, Artificial sequence
  SiRNA target sequence
tacaaaagactttgactaagatctt

SEQ ID NO: 46142 - DNA, 25 bp, Artificial sequence
  SiRNA target sequence
acaaaagactttgactaagatcttt

SEQ ID NO: 46143 - DNA, 25 bp, Artificial sequence
  SiRNA target sequence
caaaagactttgactaagatcttta

SEQ ID NO: 46144 - DNA, 25 bp, Artificial sequence
  SiRNA target sequence
aaaagactttgactaagatctttat

SEQ ID NO: 46145 - DNA, 25 bp, Artificial sequence
  SiRNA target sequence
aaagactttgactaagatctttatt

SEQ ID NO: 46146 - DNA, 25 bp, Artificial sequence
  SiRNA target sequence
aagactttgactaagatctttatta

SEQ ID NO: 46147 - DNA, 25 bp, Artificial sequence
  SiRNA target sequence
agactttgactaagatctttattat

SEQ ID NO: 46148 - DNA, 25 bp, Artificial sequence
  SiRNA target sequence
gactttgactaagatctttattatc

SEQ ID NO: 46149 - DNA, 25 bp, Artificial sequence
  SiRNA target sequence
actttgactaagatctttattatct

SEQ ID NO: 46150 - DNA, 25 bp, Artificial sequence
  SiRNA target sequence
ctttgactaagatctttattatctg

SEQ ID NO: 46151 - DNA, 25 bp, Artificial sequence
  SiRNA target sequence
tttgactaagatctttattatctgt

SEQ ID NO: 46152 - DNA, 25 bp, Artificial sequence
  SiRNA target sequence
ttgactaagatctttattatctgta

SEQ ID NO: 46153 - DNA, 25 bp, Artificial sequence
  SiRNA target sequence
tgactaagatctttattatctgtaa

SEQ ID NO: 46154 - DNA, 25 bp, Artificial sequence
  SiRNA target sequence
gactaagatctttattatctgtaat

SEQ ID NO: 46155 - DNA, 25 bp, Artificial sequence
  SiRNA target sequence
actaagatctttattatctgtaata

SEQ ID NO: 46156 - DNA, 25 bp, Artificial sequence
  SiRNA target sequence
ctaagatctttattatctgtaatat

SEQ ID NO: 46157 - DNA, 25 bp, Artificial sequence
  SiRNA target sequence
taagatctttattatctgtaatatc

SEQ ID NO: 46158 - DNA, 25 bp, Artificial sequence
  SiRNA target sequence
aagatctttattatctgtaatatca

SEQ ID NO: 46159 - DNA, 25 bp, Artificial sequence
  SiRNA target sequence
agatctttattatctgtaatatcac

SEQ ID NO: 46160 - DNA, 25 bp, Artificial sequence
  SiRNA target sequence
gatctttattatctgtaatatcact

SEQ ID NO: 46161 - DNA, 25 bp, Artificial sequence
  SiRNA target sequence
atctttattatctgtaatatcacta

SEQ ID NO: 46162 - DNA, 25 bp, Artificial sequence
  SiRNA target sequence
tctttattatctgtaatatcactag

SEQ ID NO: 46163 - DNA, 25 bp, Artificial sequence
  SiRNA target sequence
ctttattatctgtaatatcactagt

SEQ ID NO: 46164 - DNA, 25 bp, Artificial sequence
  SiRNA target sequence
tttattatctgtaatatcactagtc

SEQ ID NO: 46165 - DNA, 25 bp, Artificial sequence
  SiRNA target sequence
ttattatctgtaatatcactagtca

SEQ ID NO: 46166 - DNA, 25 bp, Artificial sequence
  SiRNA target sequence
tattatctgtaatatcactagtcaa

SEQ ID NO: 46167 - DNA, 25 bp, Artificial sequence
  SiRNA target sequence
attatctgtaatatcactagtcaat

SEQ ID NO: 46168 - DNA, 25 bp, Artificial sequence
  SiRNA target sequence
ttatctgtaatatcactagtcaatt

SEQ ID NO: 46169 - DNA, 25 bp, Artificial sequence
  SiRNA target sequence
tatctgtaatatcactagtcaattt

SEQ ID NO: 46170 - DNA, 25 bp, Artificial sequence
  SiRNA target sequence
atctgtaatatcactagtcaatttc

SEQ ID NO: 46171 - DNA, 25 bp, Artificial sequence
  SiRNA target sequence
tctgtaatatcactagtcaatttcc

SEQ ID NO: 46172 - DNA, 25 bp, Artificial sequence
  SiRNA target sequence
ctgtaatatcactagtcaatttccg

SEQ ID NO: 46173 - DNA, 25 bp, Artificial sequence
  SiRNA target sequence
tgtaatatcactagtcaatttccgg

SEQ ID NO: 46174 - DNA, 25 bp, Artificial sequence
  SiRNA target sequence
gtaatatcactagtcaatttccggg

SEQ ID NO: 46175 - DNA, 25 bp, Artificial sequence
  SiRNA target sequence
taatatcactagtcaatttccgggt

SEQ ID NO: 46176 - DNA, 25 bp, Artificial sequence
  SiRNA target sequence
aatatcactagtcaatttccgggta

SEQ ID NO: 46177 - DNA, 25 bp, Artificial sequence
  SiRNA target sequence
atatcactagtcaatttccgggtag

SEQ ID NO: 46178 - DNA, 25 bp, Artificial sequence
  SiRNA target sequence
tatcactagtcaatttccgggtagc

SEQ ID NO: 46179 - DNA, 25 bp, Artificial sequence
  SiRNA target sequence
atcactagtcaatttccgggtagct

SEQ ID NO: 46180 - DNA, 25 bp, Artificial sequence
  SiRNA target sequence
tcactagtcaatttccgggtagctt

SEQ ID NO: 46181 - DNA, 25 bp, Artificial sequence
  SiRNA target sequence
cactagtcaatttccgggtagcttc

SEQ ID NO: 46182 - DNA, 25 bp, Artificial sequence
  SiRNA target sequence
actagtcaatttccgggtagcttca

SEQ ID NO: 46183 - DNA, 25 bp, Artificial sequence
  SiRNA target sequence
ctagtcaatttccgggtagcttcaa

SEQ ID NO: 46184 - DNA, 25 bp, Artificial sequence
  SiRNA target sequence
tagtcaatttccgggtagcttcaac

SEQ ID NO: 46185 - DNA, 25 bp, Artificial sequence
  SiRNA target sequence
agtcaatttccgggtagcttcaact

SEQ ID NO: 46186 - DNA, 25 bp, Artificial sequence
  SiRNA target sequence
gtcaatttccgggtagcttcaactg

SEQ ID NO: 46187 - DNA, 25 bp, Artificial sequence
  SiRNA target sequence
tcaatttccgggtagcttcaactgt

SEQ ID NO: 46188 - DNA, 25 bp, Artificial sequence
  SiRNA target sequence
caatttccgggtagcttcaactgtt

SEQ ID NO: 46189 - DNA, 25 bp, Artificial sequence
  SiRNA target sequence
aatttccgggtagcttcaactgtta

SEQ ID NO: 46190 - DNA, 25 bp, Artificial sequence
  SiRNA target sequence
atttccgggtagcttcaactgttaa

SEQ ID NO: 46191 - DNA, 25 bp, Artificial sequence
  SiRNA target sequence
tttccgggtagcttcaactgttaaa

SEQ ID NO: 46192 - DNA, 25 bp, Artificial sequence
  SiRNA target sequence
ttccgggtagcttcaactgttaaaa

SEQ ID NO: 46193 - DNA, 25 bp, Artificial sequence
  SiRNA target sequence
tccgggtagcttcaactgttaaaac

SEQ ID NO: 46194 - DNA, 25 bp, Artificial sequence
  SiRNA target sequence
ccgggtagcttcaactgttaaaaca

SEQ ID NO: 46195 - DNA, 25 bp, Artificial sequence
  SiRNA target sequence
cgggtagcttcaactgttaaaacat

SEQ ID NO: 46196 - DNA, 25 bp, Artificial sequence
  SiRNA target sequence
gggtagcttcaactgttaaaacatt

SEQ ID NO: 46197 - DNA, 25 bp, Artificial sequence
  SiRNA target sequence
ggtagcttcaactgttaaaacatta

SEQ ID NO: 46198 - DNA, 25 bp, Artificial sequence
  SiRNA target sequence
gtagcttcaactgttaaaacattaa

SEQ ID NO: 46199 - DNA, 25 bp, Artificial sequence
  SiRNA target sequence
tagcttcaactgttaaaacattaaa

SEQ ID NO: 46200 - DNA, 25 bp, Artificial sequence
  SiRNA target sequence
agcttcaactgttaaaacattaaat

SEQ ID NO: 46201 - DNA, 25 bp, Artificial sequence
  SiRNA target sequence
gcttcaactgttaaaacattaaatg

SEQ ID NO: 46202 - DNA, 25 bp, Artificial sequence
  SiRNA target sequence
cttcaactgttaaaacattaaatgt

SEQ ID NO: 46203 - DNA, 25 bp, Artificial sequence
  SiRNA target sequence
ttcaactgttaaaacattaaatgta

SEQ ID NO: 46204 - DNA, 25 bp, Artificial sequence
  SiRNA target sequence
tcaactgttaaaacattaaatgtac

SEQ ID NO: 46205 - DNA, 25 bp, Artificial sequence
  SiRNA target sequence
caactgttaaaacattaaatgtaca

SEQ ID NO: 46206 - DNA, 25 bp, Artificial sequence
  SiRNA target sequence
aactgttaaaacattaaatgtacaa

SEQ ID NO: 46207 - DNA, 25 bp, Artificial sequence
  SiRNA target sequence
actgttaaaacattaaatgtacaaa

SEQ ID NO: 46208 - DNA, 25 bp, Artificial sequence
  SiRNA target sequence
ctgttaaaacattaaatgtacaaac

SEQ ID NO: 46209 - DNA, 25 bp, Artificial sequence
  SiRNA target sequence
tgttaaaacattaaatgtacaaact

SEQ ID NO: 46210 - DNA, 25 bp, Artificial sequence
  SiRNA target sequence
gttaaaacattaaatgtacaaactg

SEQ ID NO: 46211 - DNA, 25 bp, Artificial sequence
  SiRNA target sequence
ttaaaacattaaatgtacaaactgc

SEQ ID NO: 46212 - DNA, 25 bp, Artificial sequence
  SiRNA target sequence
taaaacattaaatgtacaaactgca

SEQ ID NO: 46213 - DNA, 25 bp, Artificial sequence
  SiRNA target sequence
aaaacattaaatgtacaaactgcaa

SEQ ID NO: 46214 - DNA, 25 bp, Artificial sequence
  SiRNA target sequence
aaacattaaatgtacaaactgcaaa

SEQ ID NO: 46215 - DNA, 25 bp, Artificial sequence
  SiRNA target sequence
aacattaaatgtacaaactgcaaat

SEQ ID NO: 46216 - DNA, 25 bp, Artificial sequence
  SiRNA target sequence
acattaaatgtacaaactgcaaatg

SEQ ID NO: 46217 - DNA, 25 bp, Artificial sequence
  SiRNA target sequence
cattaaatgtacaaactgcaaatgt

SEQ ID NO: 46218 - DNA, 25 bp, Artificial sequence
  SiRNA target sequence
attaaatgtacaaactgcaaatgtc

SEQ ID NO: 46219 - DNA, 25 bp, Artificial sequence
  SiRNA target sequence
ttaaatgtacaaactgcaaatgtcc

SEQ ID NO: 46220 - DNA, 25 bp, Artificial sequence
  SiRNA target sequence
taaatgtacaaactgcaaatgtccc

SEQ ID NO: 46221 - DNA, 25 bp, Artificial sequence
  SiRNA target sequence
aaatgtacaaactgcaaatgtccca

SEQ ID NO: 46222 - DNA, 25 bp, Artificial sequence
  SiRNA target sequence
aatgtacaaactgcaaatgtcccaa

SEQ ID NO: 46223 - DNA, 25 bp, Artificial sequence
  SiRNA target sequence
atgtacaaactgcaaatgtcccaaa

SEQ ID NO: 46224 - DNA, 25 bp, Artificial sequence
  SiRNA target sequence
tgtacaaactgcaaatgtcccaaaa

SEQ ID NO: 46225 - DNA, 25 bp, Artificial sequence
  SiRNA target sequence
gtacaaactgcaaatgtcccaaaaa

SEQ ID NO: 46226 - DNA, 25 bp, Artificial sequence
  SiRNA target sequence
tacaaactgcaaatgtcccaaaaat

SEQ ID NO: 46227 - DNA, 25 bp, Artificial sequence
  SiRNA target sequence
acaaactgcaaatgtcccaaaaatt

SEQ ID NO: 46228 - DNA, 25 bp, Artificial sequence
  SiRNA target sequence
caaactgcaaatgtcccaaaaatta

SEQ ID NO: 46229 - DNA, 25 bp, Artificial sequence
  SiRNA target sequence
aaactgcaaatgtcccaaaaattat

SEQ ID NO: 46230 - DNA, 25 bp, Artificial sequence
  SiRNA target sequence
aactgcaaatgtcccaaaaattatg

SEQ ID NO: 46231 - DNA, 25 bp, Artificial sequence
  SiRNA target sequence
actgcaaatgtcccaaaaattatgt

SEQ ID NO: 46232 - DNA, 25 bp, Artificial sequence
  SiRNA target sequence
ctgcaaatgtcccaaaaattatgta

SEQ ID NO: 46233 - DNA, 25 bp, Artificial sequence
  SiRNA target sequence
tgcaaatgtcccaaaaattatgtaa

SEQ ID NO: 46234 - DNA, 25 bp, Artificial sequence
  SiRNA target sequence
gcaaatgtcccaaaaattatgtaaa

SEQ ID NO: 46235 - DNA, 25 bp, Artificial sequence
  SiRNA target sequence
caaatgtcccaaaaattatgtaaat

SEQ ID NO: 46236 - DNA, 25 bp, Artificial sequence
  SiRNA target sequence
aaatgtcccaaaaattatgtaaatg

SEQ ID NO: 46237 - DNA, 25 bp, Artificial sequence
  SiRNA target sequence
aatgtcccaaaaattatgtaaatga

SEQ ID NO: 46238 - DNA, 25 bp, Artificial sequence
  SiRNA target sequence
atgtcccaaaaattatgtaaatgac

SEQ ID NO: 46239 - DNA, 25 bp, Artificial sequence
  SiRNA target sequence
tgtcccaaaaattatgtaaatgaca

SEQ ID NO: 46240 - DNA, 25 bp, Artificial sequence
  SiRNA target sequence
gtcccaaaaattatgtaaatgacaa

SEQ ID NO: 46241 - DNA, 25 bp, Artificial sequence
  SiRNA target sequence
tcccaaaaattatgtaaatgacaaa

SEQ ID NO: 46242 - DNA, 25 bp, Artificial sequence
  SiRNA target sequence
cccaaaaattatgtaaatgacaaat

SEQ ID NO: 46243 - DNA, 25 bp, Artificial sequence
  SiRNA target sequence
ccaaaaattatgtaaatgacaaatg

SEQ ID NO: 46244 - DNA, 25 bp, Artificial sequence
  SiRNA target sequence
caaaaattatgtaaatgacaaatgt

SEQ ID NO: 46245 - DNA, 25 bp, Artificial sequence
  SiRNA target sequence
aaaaattatgtaaatgacaaatgtt

SEQ ID NO: 46246 - DNA, 25 bp, Artificial sequence
  SiRNA target sequence
aaaattatgtaaatgacaaatgttc

SEQ ID NO: 46247 - DNA, 25 bp, Artificial sequence
  SiRNA target sequence
aaattatgtaaatgacaaatgttcg

SEQ ID NO: 46248 - DNA, 25 bp, Artificial sequence
  SiRNA target sequence
aattatgtaaatgacaaatgttcga

SEQ ID NO: 46249 - DNA, 25 bp, Artificial sequence
  SiRNA target sequence
attatgtaaatgacaaatgttcgaa

SEQ ID NO: 46250 - DNA, 25 bp, Artificial sequence
  SiRNA target sequence
ttatgtaaatgacaaatgttcgaat

SEQ ID NO: 46251 - DNA, 25 bp, Artificial sequence
  SiRNA target sequence
tatgtaaatgacaaatgttcgaata

SEQ ID NO: 46252 - DNA, 25 bp, Artificial sequence
  SiRNA target sequence
atgtaaatgacaaatgttcgaataa

SEQ ID NO: 46253 - DNA, 25 bp, Artificial sequence
  SiRNA target sequence
tgtaaatgacaaatgttcgaataaa

SEQ ID NO: 46254 - DNA, 25 bp, Artificial sequence
  SiRNA target sequence
gtaaatgacaaatgttcgaataaag

SEQ ID NO: 46255 - DNA, 25 bp, Artificial sequence
  SiRNA target sequence
taaatgacaaatgttcgaataaagg

SEQ ID NO: 46256 - DNA, 25 bp, Artificial sequence
  SiRNA target sequence
aaatgacaaatgttcgaataaaggg

SEQ ID NO: 46257 - DNA, 25 bp, Artificial sequence
  SiRNA target sequence
aatgacaaatgttcgaataaagggc

SEQ ID NO: 46258 - DNA, 25 bp, Artificial sequence
  SiRNA target sequence
atgacaaatgttcgaataaagggct

SEQ ID NO: 46259 - DNA, 25 bp, Artificial sequence
  SiRNA target sequence
tgacaaatgttcgaataaagggctt

SEQ ID NO: 46260 - DNA, 25 bp, Artificial sequence
  SiRNA target sequence
gacaaatgttcgaataaagggcttt

SEQ ID NO: 46261 - DNA, 25 bp, Artificial sequence
  SiRNA target sequence
acaaatgttcgaataaagggctttg

SEQ ID NO: 46262 - DNA, 25 bp, Artificial sequence
  SiRNA target sequence
caaatgttcgaataaagggctttga

SEQ ID NO: 46263 - DNA, 25 bp, Artificial sequence
  SiRNA target sequence
aaatgttcgaataaagggctttgaa

SEQ ID NO: 46264 - DNA, 25 bp, Artificial sequence
  SiRNA target sequence
aatgttcgaataaagggctttgaaa

SEQ ID NO: 46265 - DNA, 25 bp, Artificial sequence
  SiRNA target sequence
atgttcgaataaagggctttgaaat

SEQ ID NO: 46266 - DNA, 25 bp, Artificial sequence
  SiRNA target sequence
tgttcgaataaagggctttgaaata

SEQ ID NO: 46267 - DNA, 25 bp, Artificial sequence
  SiRNA target sequence
gttcgaataaagggctttgaaataa

SEQ ID NO: 46268 - DNA, 25 bp, Artificial sequence
  SiRNA target sequence
ttcgaataaagggctttgaaataac

SEQ ID NO: 46269 - DNA, 25 bp, Artificial sequence
  SiRNA target sequence
tcgaataaagggctttgaaataaca

SEQ ID NO: 46270 - DNA, 25 bp, Artificial sequence
  SiRNA target sequence
cgaataaagggctttgaaataacat

SEQ ID NO: 46271 - DNA, 25 bp, Artificial sequence
  SiRNA target sequence
gaataaagggctttgaaataacata

SEQ ID NO: 46272 - DNA, 25 bp, Artificial sequence
  SiRNA target sequence
aataaagggctttgaaataacatat

SEQ ID NO: 46273 - DNA, 25 bp, Artificial sequence
  SiRNA target sequence
ataaagggctttgaaataacatatt

SEQ ID NO: 46274 - DNA, 25 bp, Artificial sequence
  SiRNA target sequence
taaagggctttgaaataacatattc

SEQ ID NO: 46275 - DNA, 25 bp, Artificial sequence
  SiRNA target sequence
aaagggctttgaaataacatattct

SEQ ID NO: 46276 - DNA, 25 bp, Artificial sequence
  SiRNA target sequence
aagggctttgaaataacatattcta

SEQ ID NO: 46277 - DNA, 25 bp, Artificial sequence
  SiRNA target sequence
agggctttgaaataacatattctac

SEQ ID NO: 46278 - DNA, 25 bp, Artificial sequence
  SiRNA target sequence
gggctttgaaataacatattctaca

SEQ ID NO: 46279 - DNA, 25 bp, Artificial sequence
  SiRNA target sequence
ggctttgaaataacatattctacaa

SEQ ID NO: 46280 - DNA, 25 bp, Artificial sequence
  SiRNA target sequence
gctttgaaataacatattctacaat

SEQ ID NO: 46281 - DNA, 25 bp, Artificial sequence
  SiRNA target sequence
ctttgaaataacatattctacaatc

SEQ ID NO: 46282 - DNA, 25 bp, Artificial sequence
  SiRNA target sequence
tttgaaataacatattctacaatca

SEQ ID NO: 46283 - DNA, 25 bp, Artificial sequence
  SiRNA target sequence
ttgaaataacatattctacaatcag

SEQ ID NO: 46284 - DNA, 25 bp, Artificial sequence
  SiRNA target sequence
tgaaataacatattctacaatcagg

SEQ ID NO: 46285 - DNA, 25 bp, Artificial sequence
  SiRNA target sequence
gaaataacatattctacaatcaggt

SEQ ID NO: 46286 - DNA, 25 bp, Artificial sequence
  SiRNA target sequence
aaataacatattctacaatcaggtc

SEQ ID NO: 46287 - DNA, 25 bp, Artificial sequence
  SiRNA target sequence
aataacatattctacaatcaggtct

SEQ ID NO: 46288 - DNA, 25 bp, Artificial sequence
  SiRNA target sequence
ataacatattctacaatcaggtctt

SEQ ID NO: 46289 - DNA, 25 bp, Artificial sequence
  SiRNA target sequence
taacatattctacaatcaggtcttt

SEQ ID NO: 46290 - DNA, 25 bp, Artificial sequence
  SiRNA target sequence
aacatattctacaatcaggtctttc

SEQ ID NO: 46291 - DNA, 25 bp, Artificial sequence
  SiRNA target sequence
acatattctacaatcaggtctttca

SEQ ID NO: 46292 - DNA, 25 bp, Artificial sequence
  SiRNA target sequence
catattctacaatcaggtctttcat

SEQ ID NO: 46293 - DNA, 25 bp, Artificial sequence
  SiRNA target sequence
atattctacaatcaggtctttcata

SEQ ID NO: 46294 - DNA, 25 bp, Artificial sequence
  SiRNA target sequence
tattctacaatcaggtctttcataa

SEQ ID NO: 46295 - DNA, 25 bp, Artificial sequence
  SiRNA target sequence
attctacaatcaggtctttcataat

SEQ ID NO: 46296 - DNA, 25 bp, Artificial sequence
  SiRNA target sequence
ttctacaatcaggtctttcataata

SEQ ID NO: 46297 - DNA, 25 bp, Artificial sequence
  SiRNA target sequence
tctacaatcaggtctttcataatac

SEQ ID NO: 46298 - DNA, 25 bp, Artificial sequence
  SiRNA target sequence
ctacaatcaggtctttcataatact

SEQ ID NO: 46299 - DNA, 25 bp, Artificial sequence
  SiRNA target sequence
tacaatcaggtctttcataatacta

SEQ ID NO: 46300 - DNA, 25 bp, Artificial sequence
  SiRNA target sequence
acaatcaggtctttcataatactaa

SEQ ID NO: 46301 - DNA, 25 bp, Artificial sequence
  SiRNA target sequence
caatcaggtctttcataatactaat

SEQ ID NO: 46302 - DNA, 25 bp, Artificial sequence
  SiRNA target sequence
aatcaggtctttcataatactaata

SEQ ID NO: 46303 - DNA, 25 bp, Artificial sequence
  SiRNA target sequence
atcaggtctttcataatactaatat

SEQ ID NO: 46304 - DNA, 25 bp, Artificial sequence
  SiRNA target sequence
tcaggtctttcataatactaatatc

SEQ ID NO: 46305 - DNA, 25 bp, Artificial sequence
  SiRNA target sequence
caggtctttcataatactaatatca

SEQ ID NO: 46306 - DNA, 25 bp, Artificial sequence
  SiRNA target sequence
aggtctttcataatactaatatcac

SEQ ID NO: 46307 - DNA, 25 bp, Artificial sequence
  SiRNA target sequence
ggtctttcataatactaatatcact

SEQ ID NO: 46308 - DNA, 25 bp, Artificial sequence
  SiRNA target sequence
gtctttcataatactaatatcacta

SEQ ID NO: 46309 - DNA, 25 bp, Artificial sequence
  SiRNA target sequence
tctttcataatactaatatcactac

SEQ ID NO: 46310 - DNA, 25 bp, Artificial sequence
  SiRNA target sequence
ctttcataatactaatatcactacc

SEQ ID NO: 46311 - DNA, 25 bp, Artificial sequence
  SiRNA target sequence
tttcataatactaatatcactacca

SEQ ID NO: 46312 - DNA, 25 bp, Artificial sequence
  SiRNA target sequence
ttcataatactaatatcactaccat

SEQ ID NO: 46313 - DNA, 25 bp, Artificial sequence
  SiRNA target sequence
tcataatactaatatcactaccata

SEQ ID NO: 46314 - DNA, 25 bp, Artificial sequence
  SiRNA target sequence
cataatactaatatcactaccataa

SEQ ID NO: 46315 - DNA, 25 bp, Artificial sequence
  SiRNA target sequence
ataatactaatatcactaccataaa

SEQ ID NO: 46316 - DNA, 25 bp, Artificial sequence
  SiRNA target sequence
taatactaatatcactaccataaat

SEQ ID NO: 46317 - DNA, 25 bp, Artificial sequence
  SiRNA target sequence
aatactaatatcactaccataaata

SEQ ID NO: 46318 - DNA, 25 bp, Artificial sequence
  SiRNA target sequence
atactaatatcactaccataaatag

SEQ ID NO: 46319 - DNA, 25 bp, Artificial sequence
  SiRNA target sequence
tactaatatcactaccataaataga

SEQ ID NO: 46320 - DNA, 25 bp, Artificial sequence
  SiRNA target sequence
actaatatcactaccataaatagat

SEQ ID NO: 46321 - DNA, 25 bp, Artificial sequence
  SiRNA target sequence
ctaatatcactaccataaatagatt

SEQ ID NO: 46322 - DNA, 25 bp, Artificial sequence
  SiRNA target sequence
taatatcactaccataaatagattt

SEQ ID NO: 46323 - DNA, 25 bp, Artificial sequence
  SiRNA target sequence
aatatcactaccataaatagatttt

SEQ ID NO: 46324 - DNA, 25 bp, Artificial sequence
  SiRNA target sequence
atatcactaccataaatagattttt

SEQ ID NO: 46325 - DNA, 25 bp, Artificial sequence
  SiRNA target sequence
tatcactaccataaatagatttttt

SEQ ID NO: 46326 - DNA, 25 bp, Artificial sequence
  SiRNA target sequence
atcactaccataaatagattttttt

SEQ ID NO: 46327 - DNA, 25 bp, Artificial sequence
  SiRNA target sequence
tcactaccataaatagatttttttt

SEQ ID NO: 46328 - DNA, 25 bp, Artificial sequence
  SiRNA target sequence
cactaccataaatagattttttttc

SEQ ID NO: 46329 - DNA, 25 bp, Artificial sequence
  SiRNA target sequence
actaccataaatagattttttttct

SEQ ID NO: 46330 - DNA, 25 bp, Artificial sequence
  SiRNA target sequence
ctaccataaatagattttttttcta

SEQ ID NO: 46331 - DNA, 25 bp, Artificial sequence
  SiRNA target sequence
taccataaatagattttttttctaa

SEQ ID NO: 46332 - DNA, 25 bp, Artificial sequence
  SiRNA target sequence
accataaatagattttttttctaac

SEQ ID NO: 46333 - DNA, 25 bp, Artificial sequence
  SiRNA target sequence
ccataaatagattttttttctaaca

SEQ ID NO: 46334 - DNA, 25 bp, Artificial sequence
  SiRNA target sequence
cataaatagattttttttctaacat

SEQ ID NO: 46335 - DNA, 26 bp, Artificial sequence
  SiRNA target sequence
ttataagtttaatgtagaaataatat

SEQ ID NO: 46336 - DNA, 26 bp, Artificial sequence
  SiRNA target sequence
tataagtttaatgtagaaataatatt

SEQ ID NO: 46337 - DNA, 26 bp, Artificial sequence
  SiRNA target sequence
ataagtttaatgtagaaataatattt

SEQ ID NO: 46338 - DNA, 26 bp, Artificial sequence
  SiRNA target sequence
taagtttaatgtagaaataatatttt

SEQ ID NO: 46339 - DNA, 26 bp, Artificial sequence
  SiRNA target sequence
aagtttaatgtagaaataatattttc

SEQ ID NO: 46340 - DNA, 26 bp, Artificial sequence
  SiRNA target sequence
agtttaatgtagaaataatattttct

SEQ ID NO: 46341 - DNA, 26 bp, Artificial sequence
  SiRNA target sequence
gtttaatgtagaaataatattttctt

SEQ ID NO: 46342 - DNA, 26 bp, Artificial sequence
  SiRNA target sequence
tttaatgtagaaataatattttcttc

SEQ ID NO: 46343 - DNA, 26 bp, Artificial sequence
  SiRNA target sequence
ttaatgtagaaataatattttcttct

SEQ ID NO: 46344 - DNA, 26 bp, Artificial sequence
  SiRNA target sequence
taatgtagaaataatattttcttcta

SEQ ID NO: 46345 - DNA, 26 bp, Artificial sequence
  SiRNA target sequence
aatgtagaaataatattttcttctat

SEQ ID NO: 46346 - DNA, 26 bp, Artificial sequence
  SiRNA target sequence
atgtagaaataatattttcttctatc

SEQ ID NO: 46347 - DNA, 26 bp, Artificial sequence
  SiRNA target sequence
tgtagaaataatattttcttctatct

SEQ ID NO: 46348 - DNA, 26 bp, Artificial sequence
  SiRNA target sequence
gtagaaataatattttcttctatctt

SEQ ID NO: 46349 - DNA, 26 bp, Artificial sequence
  SiRNA target sequence
tagaaataatattttcttctatctta

SEQ ID NO: 46350 - DNA, 26 bp, Artificial sequence
  SiRNA target sequence
agaaataatattttcttctatcttat

SEQ ID NO: 46351 - DNA, 26 bp, Artificial sequence
  SiRNA target sequence
gaaataatattttcttctatcttatg

SEQ ID NO: 46352 - DNA, 26 bp, Artificial sequence
  SiRNA target sequence
aaataatattttcttctatcttatgt

SEQ ID NO: 46353 - DNA, 26 bp, Artificial sequence
  SiRNA target sequence
aataatattttcttctatcttatgta

SEQ ID NO: 46354 - DNA, 26 bp, Artificial sequence
  SiRNA target sequence
ataatattttcttctatcttatgtaa

SEQ ID NO: 46355 - DNA, 26 bp, Artificial sequence
  SiRNA target sequence
taatattttcttctatcttatgtaat

SEQ ID NO: 46356 - DNA, 26 bp, Artificial sequence
  SiRNA target sequence
aatattttcttctatcttatgtaatg

SEQ ID NO: 46357 - DNA, 26 bp, Artificial sequence
  SiRNA target sequence
atattttcttctatcttatgtaatga

SEQ ID NO: 46358 - DNA, 26 bp, Artificial sequence
  SiRNA target sequence
tattttcttctatcttatgtaatgat

SEQ ID NO: 46359 - DNA, 26 bp, Artificial sequence
  SiRNA target sequence
attttcttctatcttatgtaatgata

SEQ ID NO: 46360 - DNA, 26 bp, Artificial sequence
  SiRNA target sequence
ttttcttctatcttatgtaatgatac

SEQ ID NO: 46361 - DNA, 26 bp, Artificial sequence
  SiRNA target sequence
tttcttctatcttatgtaatgataca

SEQ ID NO: 46362 - DNA, 26 bp, Artificial sequence
  SiRNA target sequence
ttcttctatcttatgtaatgatacag

SEQ ID NO: 46363 - DNA, 26 bp, Artificial sequence
  SiRNA target sequence
tcttctatcttatgtaatgatacagt

SEQ ID NO: 46364 - DNA, 26 bp, Artificial sequence
  SiRNA target sequence
cttctatcttatgtaatgatacagtt

SEQ ID NO: 46365 - DNA, 26 bp, Artificial sequence
  SiRNA target sequence
ttctatcttatgtaatgatacagttt

SEQ ID NO: 46366 - DNA, 26 bp, Artificial sequence
  SiRNA target sequence
tctatcttatgtaatgatacagtttt

SEQ ID NO: 46367 - DNA, 26 bp, Artificial sequence
  SiRNA target sequence
ctatcttatgtaatgatacagttttg

SEQ ID NO: 46368 - DNA, 26 bp, Artificial sequence
  SiRNA target sequence
tatcttatgtaatgatacagttttgt

SEQ ID NO: 46369 - DNA, 26 bp, Artificial sequence
  SiRNA target sequence
atcttatgtaatgatacagttttgtt

SEQ ID NO: 46370 - DNA, 26 bp, Artificial sequence
  SiRNA target sequence
tcttatgtaatgatacagttttgttt

SEQ ID NO: 46371 - DNA, 26 bp, Artificial sequence
  SiRNA target sequence
cttatgtaatgatacagttttgtttt

SEQ ID NO: 46372 - DNA, 26 bp, Artificial sequence
  SiRNA target sequence
ttatgtaatgatacagttttgttttt

SEQ ID NO: 46373 - DNA, 26 bp, Artificial sequence
  SiRNA target sequence
tatgtaatgatacagttttgttttta

SEQ ID NO: 46374 - DNA, 26 bp, Artificial sequence
  SiRNA target sequence
atgtaatgatacagttttgtttttaa

SEQ ID NO: 46375 - DNA, 26 bp, Artificial sequence
  SiRNA target sequence
tgtaatgatacagttttgtttttaat

SEQ ID NO: 46376 - DNA, 26 bp, Artificial sequence
  SiRNA target sequence
gtaatgatacagttttgtttttaata

SEQ ID NO: 46377 - DNA, 26 bp, Artificial sequence
  SiRNA target sequence
taatgatacagttttgtttttaatac

SEQ ID NO: 46378 - DNA, 26 bp, Artificial sequence
  SiRNA target sequence
aatgatacagttttgtttttaatact

SEQ ID NO: 46379 - DNA, 26 bp, Artificial sequence
  SiRNA target sequence
atgatacagttttgtttttaatactt

SEQ ID NO: 46380 - DNA, 26 bp, Artificial sequence
  SiRNA target sequence
tgatacagttttgtttttaatactta

SEQ ID NO: 46381 - DNA, 26 bp, Artificial sequence
  SiRNA target sequence
gatacagttttgtttttaatacttag

SEQ ID NO: 46382 - DNA, 26 bp, Artificial sequence
  SiRNA target sequence
atacagttttgtttttaatacttagc

SEQ ID NO: 46383 - DNA, 26 bp, Artificial sequence
  SiRNA target sequence
tacagttttgtttttaatacttagca

SEQ ID NO: 46384 - DNA, 26 bp, Artificial sequence
  SiRNA target sequence
acagttttgtttttaatacttagcac

SEQ ID NO: 46385 - DNA, 26 bp, Artificial sequence
  SiRNA target sequence
cagttttgtttttaatacttagcact

SEQ ID NO: 46386 - DNA, 26 bp, Artificial sequence
  SiRNA target sequence
agttttgtttttaatacttagcactt

SEQ ID NO: 46387 - DNA, 26 bp, Artificial sequence
  SiRNA target sequence
gttttgtttttaatacttagcacttt

SEQ ID NO: 46388 - DNA, 26 bp, Artificial sequence
  SiRNA target sequence
ttttgtttttaatacttagcacttta

SEQ ID NO: 46389 - DNA, 26 bp, Artificial sequence
  SiRNA target sequence
tttgtttttaatacttagcactttat

SEQ ID NO: 46390 - DNA, 26 bp, Artificial sequence
  SiRNA target sequence
ttgtttttaatacttagcactttatc

SEQ ID NO: 46391 - DNA, 26 bp, Artificial sequence
  SiRNA target sequence
tgtttttaatacttagcactttatca

SEQ ID NO: 46392 - DNA, 26 bp, Artificial sequence
  SiRNA target sequence
gtttttaatacttagcactttatcaa

SEQ ID NO: 46393 - DNA, 26 bp, Artificial sequence
  SiRNA target sequence
tttttaatacttagcactttatcaaa

SEQ ID NO: 46394 - DNA, 26 bp, Artificial sequence
  SiRNA target sequence
ttttaatacttagcactttatcaaat

SEQ ID NO: 46395 - DNA, 26 bp, Artificial sequence
  SiRNA target sequence
tttaatacttagcactttatcaaata

SEQ ID NO: 46396 - DNA, 26 bp, Artificial sequence
  SiRNA target sequence
ttaatacttagcactttatcaaataa

SEQ ID NO: 46397 - DNA, 26 bp, Artificial sequence
  SiRNA target sequence
taatacttagcactttatcaaataag

SEQ ID NO: 46398 - DNA, 26 bp, Artificial sequence
  SiRNA target sequence
aatacttagcactttatcaaataagt

SEQ ID NO: 46399 - DNA, 26 bp, Artificial sequence
  SiRNA target sequence
atacttagcactttatcaaataagtg

SEQ ID NO: 46400 - DNA, 26 bp, Artificial sequence
  SiRNA target sequence
tacttagcactttatcaaataagtgg

SEQ ID NO: 46401 - DNA, 26 bp, Artificial sequence
  SiRNA target sequence
acttagcactttatcaaataagtgga

SEQ ID NO: 46402 - DNA, 26 bp, Artificial sequence
  SiRNA target sequence
cttagcactttatcaaataagtggag

SEQ ID NO: 46403 - DNA, 26 bp, Artificial sequence
  SiRNA target sequence
ttagcactttatcaaataagtggagt

SEQ ID NO: 46404 - DNA, 26 bp, Artificial sequence
  SiRNA target sequence
tagcactttatcaaataagtggagta

SEQ ID NO: 46405 - DNA, 26 bp, Artificial sequence
  SiRNA target sequence
agcactttatcaaataagtggagtaa

SEQ ID NO: 46406 - DNA, 26 bp, Artificial sequence
  SiRNA target sequence
gcactttatcaaataagtggagtaaa

SEQ ID NO: 46407 - DNA, 26 bp, Artificial sequence
  SiRNA target sequence
cactttatcaaataagtggagtaaat

SEQ ID NO: 46408 - DNA, 26 bp, Artificial sequence
  SiRNA target sequence
actttatcaaataagtggagtaaatc

SEQ ID NO: 46409 - DNA, 26 bp, Artificial sequence
  SiRNA target sequence
ctttatcaaataagtggagtaaatct

SEQ ID NO: 46410 - DNA, 26 bp, Artificial sequence
  SiRNA target sequence
tttatcaaataagtggagtaaatcta

SEQ ID NO: 46411 - DNA, 26 bp, Artificial sequence
  SiRNA target sequence
ttatcaaataagtggagtaaatctaa

SEQ ID NO: 46412 - DNA, 26 bp, Artificial sequence
  SiRNA target sequence
tatcaaataagtggagtaaatctaaa

SEQ ID NO: 46413 - DNA, 26 bp, Artificial sequence
  SiRNA target sequence
atcaaataagtggagtaaatctaaat

SEQ ID NO: 46414 - DNA, 26 bp, Artificial sequence
  SiRNA target sequence
tcaaataagtggagtaaatctaaatt

SEQ ID NO: 46415 - DNA, 26 bp, Artificial sequence
  SiRNA target sequence
caaataagtggagtaaatctaaatta

SEQ ID NO: 46416 - DNA, 26 bp, Artificial sequence
  SiRNA target sequence
aaataagtggagtaaatctaaattat

SEQ ID NO: 46417 - DNA, 26 bp, Artificial sequence
  SiRNA target sequence
aataagtggagtaaatctaaattatg

SEQ ID NO: 46418 - DNA, 26 bp, Artificial sequence
  SiRNA target sequence
ataagtggagtaaatctaaattatgt

SEQ ID NO: 46419 - DNA, 26 bp, Artificial sequence
  SiRNA target sequence
taagtggagtaaatctaaattatgta

SEQ ID NO: 46420 - DNA, 26 bp, Artificial sequence
  SiRNA target sequence
aagtggagtaaatctaaattatgtaa

SEQ ID NO: 46421 - DNA, 26 bp, Artificial sequence
  SiRNA target sequence
agtggagtaaatctaaattatgtaaa

SEQ ID NO: 46422 - DNA, 26 bp, Artificial sequence
  SiRNA target sequence
gtggagtaaatctaaattatgtaaaa

SEQ ID NO: 46423 - DNA, 26 bp, Artificial sequence
  SiRNA target sequence
tggagtaaatctaaattatgtaaaac

SEQ ID NO: 46424 - DNA, 26 bp, Artificial sequence
  SiRNA target sequence
ggagtaaatctaaattatgtaaaaca

SEQ ID NO: 46425 - DNA, 26 bp, Artificial sequence
  SiRNA target sequence
gagtaaatctaaattatgtaaaacaa

SEQ ID NO: 46426 - DNA, 26 bp, Artificial sequence
  SiRNA target sequence
agtaaatctaaattatgtaaaacaat

SEQ ID NO: 46427 - DNA, 26 bp, Artificial sequence
  SiRNA target sequence
gtaaatctaaattatgtaaaacaata

SEQ ID NO: 46428 - DNA, 26 bp, Artificial sequence
  SiRNA target sequence
taaatctaaattatgtaaaacaataa

SEQ ID NO: 46429 - DNA, 26 bp, Artificial sequence
  SiRNA target sequence
aaatctaaattatgtaaaacaataat

SEQ ID NO: 46430 - DNA, 26 bp, Artificial sequence
  SiRNA target sequence
aatctaaattatgtaaaacaataatt

SEQ ID NO: 46431 - DNA, 26 bp, Artificial sequence
  SiRNA target sequence
atctaaattatgtaaaacaataatta

SEQ ID NO: 46432 - DNA, 26 bp, Artificial sequence
  SiRNA target sequence
tctaaattatgtaaaacaataattat

SEQ ID NO: 46433 - DNA, 26 bp, Artificial sequence
  SiRNA target sequence
ctaaattatgtaaaacaataattatc

SEQ ID NO: 46434 - DNA, 26 bp, Artificial sequence
  SiRNA target sequence
taaattatgtaaaacaataattatcg

SEQ ID NO: 46435 - DNA, 26 bp, Artificial sequence
  SiRNA target sequence
aaattatgtaaaacaataattatcgt

SEQ ID NO: 46436 - DNA, 26 bp, Artificial sequence
  SiRNA target sequence
aattatgtaaaacaataattatcgtc

SEQ ID NO: 46437 - DNA, 26 bp, Artificial sequence
  SiRNA target sequence
attatgtaaaacaataattatcgtct

SEQ ID NO: 46438 - DNA, 26 bp, Artificial sequence
  SiRNA target sequence
ttatgtaaaacaataattatcgtctt

SEQ ID NO: 46439 - DNA, 26 bp, Artificial sequence
  SiRNA target sequence
tatgtaaaacaataattatcgtcttc

SEQ ID NO: 46440 - DNA, 26 bp, Artificial sequence
  SiRNA target sequence
atgtaaaacaataattatcgtcttct

SEQ ID NO: 46441 - DNA, 26 bp, Artificial sequence
  SiRNA target sequence
tgtaaaacaataattatcgtcttctc

SEQ ID NO: 46442 - DNA, 26 bp, Artificial sequence
  SiRNA target sequence
gtaaaacaataattatcgtcttctct

SEQ ID NO: 46443 - DNA, 26 bp, Artificial sequence
  SiRNA target sequence
taaaacaataattatcgtcttctcta

SEQ ID NO: 46444 - DNA, 26 bp, Artificial sequence
  SiRNA target sequence
aaaacaataattatcgtcttctctaa

SEQ ID NO: 46445 - DNA, 26 bp, Artificial sequence
  SiRNA target sequence
aaacaataattatcgtcttctctaag

SEQ ID NO: 46446 - DNA, 26 bp, Artificial sequence
  SiRNA target sequence
aacaataattatcgtcttctctaagt

SEQ ID NO: 46447 - DNA, 26 bp, Artificial sequence
  SiRNA target sequence
acaataattatcgtcttctctaagtt

SEQ ID NO: 46448 - DNA, 26 bp, Artificial sequence
  SiRNA target sequence
caataattatcgtcttctctaagttg

SEQ ID NO: 46449 - DNA, 26 bp, Artificial sequence
  SiRNA target sequence
aataattatcgtcttctctaagttgt

SEQ ID NO: 46450 - DNA, 26 bp, Artificial sequence
  SiRNA target sequence
ataattatcgtcttctctaagttgtt

SEQ ID NO: 46451 - DNA, 26 bp, Artificial sequence
  SiRNA target sequence
taattatcgtcttctctaagttgttg

SEQ ID NO: 46452 - DNA, 26 bp, Artificial sequence
  SiRNA target sequence
aattatcgtcttctctaagttgttgg

SEQ ID NO: 46453 - DNA, 26 bp, Artificial sequence
  SiRNA target sequence
attatcgtcttctctaagttgttgga

SEQ ID NO: 46454 - DNA, 26 bp, Artificial sequence
  SiRNA target sequence
ttatcgtcttctctaagttgttggag

SEQ ID NO: 46455 - DNA, 26 bp, Artificial sequence
  SiRNA target sequence
tatcgtcttctctaagttgttggaga

SEQ ID NO: 46456 - DNA, 26 bp, Artificial sequence
  SiRNA target sequence
atcgtcttctctaagttgttggagat

SEQ ID NO: 46457 - DNA, 26 bp, Artificial sequence
  SiRNA target sequence
tcgtcttctctaagttgttggagatt

SEQ ID NO: 46458 - DNA, 26 bp, Artificial sequence
  SiRNA target sequence
cgtcttctctaagttgttggagatta

SEQ ID NO: 46459 - DNA, 26 bp, Artificial sequence
  SiRNA target sequence
gtcttctctaagttgttggagattag

SEQ ID NO: 46460 - DNA, 26 bp, Artificial sequence
  SiRNA target sequence
tcttctctaagttgttggagattaga

SEQ ID NO: 46461 - DNA, 26 bp, Artificial sequence
  SiRNA target sequence
cttctctaagttgttggagattagac

SEQ ID NO: 46462 - DNA, 26 bp, Artificial sequence
  SiRNA target sequence
ttctctaagttgttggagattagact

SEQ ID NO: 46463 - DNA, 26 bp, Artificial sequence
  SiRNA target sequence
tctctaagttgttggagattagactt

SEQ ID NO: 46464 - DNA, 26 bp, Artificial sequence
  SiRNA target sequence
ctctaagttgttggagattagacttt

SEQ ID NO: 46465 - DNA, 26 bp, Artificial sequence
  SiRNA target sequence
tctaagttgttggagattagactttt

SEQ ID NO: 46466 - DNA, 26 bp, Artificial sequence
  SiRNA target sequence
ctaagttgttggagattagactttta

SEQ ID NO: 46467 - DNA, 26 bp, Artificial sequence
  SiRNA target sequence
taagttgttggagattagacttttaa

SEQ ID NO: 46468 - DNA, 26 bp, Artificial sequence
  SiRNA target sequence
aagttgttggagattagacttttaag

SEQ ID NO: 46469 - DNA, 26 bp, Artificial sequence
  SiRNA target sequence
agttgttggagattagacttttaaga

SEQ ID NO: 46470 - DNA, 26 bp, Artificial sequence
  SiRNA target sequence
gttgttggagattagacttttaagaa

SEQ ID NO: 46471 - DNA, 26 bp, Artificial sequence
  SiRNA target sequence
ttgttggagattagacttttaagaat

SEQ ID NO: 46472 - DNA, 26 bp, Artificial sequence
  SiRNA target sequence
tgttggagattagacttttaagaatt

SEQ ID NO: 46473 - DNA, 26 bp, Artificial sequence
  SiRNA target sequence
gttggagattagacttttaagaattt

SEQ ID NO: 46474 - DNA, 26 bp, Artificial sequence
  SiRNA target sequence
ttggagattagacttttaagaatttc

SEQ ID NO: 46475 - DNA, 26 bp, Artificial sequence
  SiRNA target sequence
tggagattagacttttaagaatttca

SEQ ID NO: 46476 - DNA, 26 bp, Artificial sequence
  SiRNA target sequence
ggagattagacttttaagaatttcat

SEQ ID NO: 46477 - DNA, 26 bp, Artificial sequence
  SiRNA target sequence
gagattagacttttaagaatttcata

SEQ ID NO: 46478 - DNA, 26 bp, Artificial sequence
  SiRNA target sequence
agattagacttttaagaatttcatat

SEQ ID NO: 46479 - DNA, 26 bp, Artificial sequence
  SiRNA target sequence
gattagacttttaagaatttcatatt

SEQ ID NO: 46480 - DNA, 26 bp, Artificial sequence
  SiRNA target sequence
attagacttttaagaatttcatattc

SEQ ID NO: 46481 - DNA, 26 bp, Artificial sequence
  SiRNA target sequence
ttagacttttaagaatttcatattca

SEQ ID NO: 46482 - DNA, 26 bp, Artificial sequence
  SiRNA target sequence
tagacttttaagaatttcatattcag

SEQ ID NO: 46483 - DNA, 26 bp, Artificial sequence
  SiRNA target sequence
agacttttaagaatttcatattcagc

SEQ ID NO: 46484 - DNA, 26 bp, Artificial sequence
  SiRNA target sequence
gacttttaagaatttcatattcagct

SEQ ID NO: 46485 - DNA, 26 bp, Artificial sequence
  SiRNA target sequence
acttttaagaatttcatattcagctt

SEQ ID NO: 46486 - DNA, 26 bp, Artificial sequence
  SiRNA target sequence
cttttaagaatttcatattcagcttt

SEQ ID NO: 46487 - DNA, 26 bp, Artificial sequence
  SiRNA target sequence
ttttaagaatttcatattcagctttt

SEQ ID NO: 46488 - DNA, 26 bp, Artificial sequence
  SiRNA target sequence
tttaagaatttcatattcagcttttt

SEQ ID NO: 46489 - DNA, 26 bp, Artificial sequence
  SiRNA target sequence
ttaagaatttcatattcagctttttt

SEQ ID NO: 46490 - DNA, 26 bp, Artificial sequence
  SiRNA target sequence
taagaatttcatattcagcttttttg

SEQ ID NO: 46491 - DNA, 26 bp, Artificial sequence
  SiRNA target sequence
aagaatttcatattcagcttttttgt

SEQ ID NO: 46492 - DNA, 26 bp, Artificial sequence
  SiRNA target sequence
agaatttcatattcagcttttttgtc

SEQ ID NO: 46493 - DNA, 26 bp, Artificial sequence
  SiRNA target sequence
gaatttcatattcagcttttttgtcc

SEQ ID NO: 46494 - DNA, 26 bp, Artificial sequence
  SiRNA target sequence
aatttcatattcagcttttttgtcca

SEQ ID NO: 46495 - DNA, 26 bp, Artificial sequence
  SiRNA target sequence
atttcatattcagcttttttgtccaa

SEQ ID NO: 46496 - DNA, 26 bp, Artificial sequence
  SiRNA target sequence
tttcatattcagcttttttgtccaat

SEQ ID NO: 46497 - DNA, 26 bp, Artificial sequence
  SiRNA target sequence
ttcatattcagcttttttgtccaatg

SEQ ID NO: 46498 - DNA, 26 bp, Artificial sequence
  SiRNA target sequence
tcatattcagcttttttgtccaatgc

SEQ ID NO: 46499 - DNA, 26 bp, Artificial sequence
  SiRNA target sequence
catattcagcttttttgtccaatgcg

SEQ ID NO: 46500 - DNA, 26 bp, Artificial sequence
  SiRNA target sequence
atattcagcttttttgtccaatgcgg

SEQ ID NO: 46501 - DNA, 26 bp, Artificial sequence
  SiRNA target sequence
tattcagcttttttgtccaatgcggc

SEQ ID NO: 46502 - DNA, 26 bp, Artificial sequence
  SiRNA target sequence
attcagcttttttgtccaatgcggcc

SEQ ID NO: 46503 - DNA, 26 bp, Artificial sequence
  SiRNA target sequence
ttcagcttttttgtccaatgcggccg

SEQ ID NO: 46504 - DNA, 26 bp, Artificial sequence
  SiRNA target sequence
tcagcttttttgtccaatgcggccgt

SEQ ID NO: 46505 - DNA, 26 bp, Artificial sequence
  SiRNA target sequence
cagcttttttgtccaatgcggccgtt

SEQ ID NO: 46506 - DNA, 26 bp, Artificial sequence
  SiRNA target sequence
agcttttttgtccaatgcggccgttg

SEQ ID NO: 46507 - DNA, 26 bp, Artificial sequence
  SiRNA target sequence
gcttttttgtccaatgcggccgttgg

SEQ ID NO: 46508 - DNA, 26 bp, Artificial sequence
  SiRNA target sequence
cttttttgtccaatgcggccgttggc

SEQ ID NO: 46509 - DNA, 26 bp, Artificial sequence
  SiRNA target sequence
ttttttgtccaatgcggccgttggct

SEQ ID NO: 46510 - DNA, 26 bp, Artificial sequence
  SiRNA target sequence
tttttgtccaatgcggccgttggctc

SEQ ID NO: 46511 - DNA, 26 bp, Artificial sequence
  SiRNA target sequence
ttttgtccaatgcggccgttggctca

SEQ ID NO: 46512 - DNA, 26 bp, Artificial sequence
  SiRNA target sequence
tttgtccaatgcggccgttggctcat

SEQ ID NO: 46513 - DNA, 26 bp, Artificial sequence
  SiRNA target sequence
ttgtccaatgcggccgttggctcatc

SEQ ID NO: 46514 - DNA, 26 bp, Artificial sequence
  SiRNA target sequence
tgtccaatgcggccgttggctcatct

SEQ ID NO: 46515 - DNA, 26 bp, Artificial sequence
  SiRNA target sequence
gtccaatgcggccgttggctcatcta

SEQ ID NO: 46516 - DNA, 26 bp, Artificial sequence
  SiRNA target sequence
tccaatgcggccgttggctcatctaa

SEQ ID NO: 46517 - DNA, 26 bp, Artificial sequence
  SiRNA target sequence
ccaatgcggccgttggctcatctaaa

SEQ ID NO: 46518 - DNA, 26 bp, Artificial sequence
  SiRNA target sequence
caatgcggccgttggctcatctaaaa

SEQ ID NO: 46519 - DNA, 26 bp, Artificial sequence
  SiRNA target sequence
aatgcggccgttggctcatctaaaat

SEQ ID NO: 46520 - DNA, 26 bp, Artificial sequence
  SiRNA target sequence
atgcggccgttggctcatctaaaatt

SEQ ID NO: 46521 - DNA, 26 bp, Artificial sequence
  SiRNA target sequence
tgcggccgttggctcatctaaaatta

SEQ ID NO: 46522 - DNA, 26 bp, Artificial sequence
  SiRNA target sequence
gcggccgttggctcatctaaaattat

SEQ ID NO: 46523 - DNA, 26 bp, Artificial sequence
  SiRNA target sequence
cggccgttggctcatctaaaattata

SEQ ID NO: 46524 - DNA, 26 bp, Artificial sequence
  SiRNA target sequence
ggccgttggctcatctaaaattataa

SEQ ID NO: 46525 - DNA, 26 bp, Artificial sequence
  SiRNA target sequence
gccgttggctcatctaaaattataat

SEQ ID NO: 46526 - DNA, 26 bp, Artificial sequence
  SiRNA target sequence
ccgttggctcatctaaaattataata

SEQ ID NO: 46527 - DNA, 26 bp, Artificial sequence
  SiRNA target sequence
cgttggctcatctaaaattataatag

SEQ ID NO: 46528 - DNA, 26 bp, Artificial sequence
  SiRNA target sequence
gttggctcatctaaaattataatagg

SEQ ID NO: 46529 - DNA, 26 bp, Artificial sequence
  SiRNA target sequence
ttggctcatctaaaattataatagga

SEQ ID NO: 46530 - DNA, 26 bp, Artificial sequence
  SiRNA target sequence
tggctcatctaaaattataataggag

SEQ ID NO: 46531 - DNA, 26 bp, Artificial sequence
  SiRNA target sequence
ggctcatctaaaattataataggaga

SEQ ID NO: 46532 - DNA, 26 bp, Artificial sequence
  SiRNA target sequence
gctcatctaaaattataataggagaa

SEQ ID NO: 46533 - DNA, 26 bp, Artificial sequence
  SiRNA target sequence
ctcatctaaaattataataggagaat

SEQ ID NO: 46534 - DNA, 26 bp, Artificial sequence
  SiRNA target sequence
tcatctaaaattataataggagaatt

SEQ ID NO: 46535 - DNA, 26 bp, Artificial sequence
  SiRNA target sequence
catctaaaattataataggagaattt

SEQ ID NO: 46536 - DNA, 26 bp, Artificial sequence
  SiRNA target sequence
atctaaaattataataggagaatttt

SEQ ID NO: 46537 - DNA, 26 bp, Artificial sequence
  SiRNA target sequence
tctaaaattataataggagaattttt

SEQ ID NO: 46538 - DNA, 26 bp, Artificial sequence
  SiRNA target sequence
ctaaaattataataggagaatttttt

SEQ ID NO: 46539 - DNA, 26 bp, Artificial sequence
  SiRNA target sequence
taaaattataataggagaatttttta

SEQ ID NO: 46540 - DNA, 26 bp, Artificial sequence
  SiRNA target sequence
aaaattataataggagaattttttag

SEQ ID NO: 46541 - DNA, 26 bp, Artificial sequence
  SiRNA target sequence
aaattataataggagaattttttagt

SEQ ID NO: 46542 - DNA, 26 bp, Artificial sequence
  SiRNA target sequence
aattataataggagaattttttagtg

SEQ ID NO: 46543 - DNA, 26 bp, Artificial sequence
  SiRNA target sequence
attataataggagaattttttagtgc

SEQ ID NO: 46544 - DNA, 26 bp, Artificial sequence
  SiRNA target sequence
ttataataggagaattttttagtgcc

SEQ ID NO: 46545 - DNA, 26 bp, Artificial sequence
  SiRNA target sequence
tataataggagaattttttagtgccg

SEQ ID NO: 46546 - DNA, 26 bp, Artificial sequence
  SiRNA target sequence
ataataggagaattttttagtgccga

SEQ ID NO: 46547 - DNA, 26 bp, Artificial sequence
  SiRNA target sequence
taataggagaattttttagtgccgac

SEQ ID NO: 46548 - DNA, 26 bp, Artificial sequence
  SiRNA target sequence
aataggagaattttttagtgccgacc

SEQ ID NO: 46549 - DNA, 26 bp, Artificial sequence
  SiRNA target sequence
ataggagaattttttagtgccgacct

SEQ ID NO: 46550 - DNA, 26 bp, Artificial sequence
  SiRNA target sequence
taggagaattttttagtgccgacctt

SEQ ID NO: 46551 - DNA, 26 bp, Artificial sequence
  SiRNA target sequence
aggagaattttttagtgccgacctta

SEQ ID NO: 46552 - DNA, 26 bp, Artificial sequence
  SiRNA target sequence
ggagaattttttagtgccgaccttaa

SEQ ID NO: 46553 - DNA, 26 bp, Artificial sequence
  SiRNA target sequence
gagaattttttagtgccgaccttaac

SEQ ID NO: 46554 - DNA, 26 bp, Artificial sequence
  SiRNA target sequence
agaattttttagtgccgaccttaaca

SEQ ID NO: 46555 - DNA, 26 bp, Artificial sequence
  SiRNA target sequence
gaattttttagtgccgaccttaacaa

SEQ ID NO: 46556 - DNA, 26 bp, Artificial sequence
  SiRNA target sequence
aattttttagtgccgaccttaacaaa

SEQ ID NO: 46557 - DNA, 26 bp, Artificial sequence
  SiRNA target sequence
attttttagtgccgaccttaacaaaa

SEQ ID NO: 46558 - DNA, 26 bp, Artificial sequence
  SiRNA target sequence
ttttttagtgccgaccttaacaaaat

SEQ ID NO: 46559 - DNA, 26 bp, Artificial sequence
  SiRNA target sequence
tttttagtgccgaccttaacaaaatt

SEQ ID NO: 46560 - DNA, 26 bp, Artificial sequence
  SiRNA target sequence
ttttagtgccgaccttaacaaaatta

SEQ ID NO: 46561 - DNA, 26 bp, Artificial sequence
  SiRNA target sequence
tttagtgccgaccttaacaaaattac

SEQ ID NO: 46562 - DNA, 26 bp, Artificial sequence
  SiRNA target sequence
ttagtgccgaccttaacaaaattact

SEQ ID NO: 46563 - DNA, 26 bp, Artificial sequence
  SiRNA target sequence
tagtgccgaccttaacaaaattactt

SEQ ID NO: 46564 - DNA, 26 bp, Artificial sequence
  SiRNA target sequence
agtgccgaccttaacaaaattacttt

SEQ ID NO: 46565 - DNA, 26 bp, Artificial sequence
  SiRNA target sequence
gtgccgaccttaacaaaattactttt

SEQ ID NO: 46566 - DNA, 26 bp, Artificial sequence
  SiRNA target sequence
tgccgaccttaacaaaattacttttt

SEQ ID NO: 46567 - DNA, 26 bp, Artificial sequence
  SiRNA target sequence
gccgaccttaacaaaattactttttg

SEQ ID NO: 46568 - DNA, 26 bp, Artificial sequence
  SiRNA target sequence
ccgaccttaacaaaattactttttgt

SEQ ID NO: 46569 - DNA, 26 bp, Artificial sequence
  SiRNA target sequence
cgaccttaacaaaattactttttgtc

SEQ ID NO: 46570 - DNA, 26 bp, Artificial sequence
  SiRNA target sequence
gaccttaacaaaattactttttgtct

SEQ ID NO: 46571 - DNA, 26 bp, Artificial sequence
  SiRNA target sequence
accttaacaaaattactttttgtctt

SEQ ID NO: 46572 - DNA, 26 bp, Artificial sequence
  SiRNA target sequence
ccttaacaaaattactttttgtcttt

SEQ ID NO: 46573 - DNA, 26 bp, Artificial sequence
  SiRNA target sequence
cttaacaaaattactttttgtctttc

SEQ ID NO: 46574 - DNA, 26 bp, Artificial sequence
  SiRNA target sequence
ttaacaaaattactttttgtctttct

SEQ ID NO: 46575 - DNA, 26 bp, Artificial sequence
  SiRNA target sequence
taacaaaattactttttgtctttctc

SEQ ID NO: 46576 - DNA, 26 bp, Artificial sequence
  SiRNA target sequence
aacaaaattactttttgtctttctcc

SEQ ID NO: 46577 - DNA, 26 bp, Artificial sequence
  SiRNA target sequence
acaaaattactttttgtctttctcca

SEQ ID NO: 46578 - DNA, 26 bp, Artificial sequence
  SiRNA target sequence
caaaattactttttgtctttctccac

SEQ ID NO: 46579 - DNA, 26 bp, Artificial sequence
  SiRNA target sequence
aaaattactttttgtctttctccacc

SEQ ID NO: 46580 - DNA, 26 bp, Artificial sequence
  SiRNA target sequence
aaattactttttgtctttctccacca

SEQ ID NO: 46581 - DNA, 26 bp, Artificial sequence
  SiRNA target sequence
aattactttttgtctttctccaccac

SEQ ID NO: 46582 - DNA, 26 bp, Artificial sequence
  SiRNA target sequence
attactttttgtctttctccaccact

SEQ ID NO: 46583 - DNA, 26 bp, Artificial sequence
  SiRNA target sequence
ttactttttgtctttctccaccacta

SEQ ID NO: 46584 - DNA, 26 bp, Artificial sequence
  SiRNA target sequence
tactttttgtctttctccaccactaa

SEQ ID NO: 46585 - DNA, 26 bp, Artificial sequence
  SiRNA target sequence
actttttgtctttctccaccactaag

SEQ ID NO: 46586 - DNA, 26 bp, Artificial sequence
  SiRNA target sequence
ctttttgtctttctccaccactaagc

SEQ ID NO: 46587 - DNA, 26 bp, Artificial sequence
  SiRNA target sequence
tttttgtctttctccaccactaagct

SEQ ID NO: 46588 - DNA, 26 bp, Artificial sequence
  SiRNA target sequence
ttttgtctttctccaccactaagctt

SEQ ID NO: 46589 - DNA, 26 bp, Artificial sequence
  SiRNA target sequence
tttgtctttctccaccactaagctta

SEQ ID NO: 46590 - DNA, 26 bp, Artificial sequence
  SiRNA target sequence
ttgtctttctccaccactaagcttat

SEQ ID NO: 46591 - DNA, 26 bp, Artificial sequence
  SiRNA target sequence
tgtctttctccaccactaagcttatg

SEQ ID NO: 46592 - DNA, 26 bp, Artificial sequence
  SiRNA target sequence
gtctttctccaccactaagcttatgt

SEQ ID NO: 46593 - DNA, 26 bp, Artificial sequence
  SiRNA target sequence
tctttctccaccactaagcttatgtc

SEQ ID NO: 46594 - DNA, 26 bp, Artificial sequence
  SiRNA target sequence
ctttctccaccactaagcttatgtcc

SEQ ID NO: 46595 - DNA, 26 bp, Artificial sequence
  SiRNA target sequence
tttctccaccactaagcttatgtccc

SEQ ID NO: 46596 - DNA, 26 bp, Artificial sequence
  SiRNA target sequence
ttctccaccactaagcttatgtccct

SEQ ID NO: 46597 - DNA, 26 bp, Artificial sequence
  SiRNA target sequence
tctccaccactaagcttatgtccctt

SEQ ID NO: 46598 - DNA, 26 bp, Artificial sequence
  SiRNA target sequence
ctccaccactaagcttatgtccctta

SEQ ID NO: 46599 - DNA, 26 bp, Artificial sequence
  SiRNA target sequence
tccaccactaagcttatgtcccttat

SEQ ID NO: 46600 - DNA, 26 bp, Artificial sequence
  SiRNA target sequence
ccaccactaagcttatgtcccttatc

SEQ ID NO: 46601 - DNA, 26 bp, Artificial sequence
  SiRNA target sequence
caccactaagcttatgtcccttatct

SEQ ID NO: 46602 - DNA, 26 bp, Artificial sequence
  SiRNA target sequence
accactaagcttatgtcccttatctc

SEQ ID NO: 46603 - DNA, 26 bp, Artificial sequence
  SiRNA target sequence
ccactaagcttatgtcccttatctcc

SEQ ID NO: 46604 - DNA, 26 bp, Artificial sequence
  SiRNA target sequence
cactaagcttatgtcccttatctcca

SEQ ID NO: 46605 - DNA, 26 bp, Artificial sequence
  SiRNA target sequence
actaagcttatgtcccttatctccaa

SEQ ID NO: 46606 - DNA, 26 bp, Artificial sequence
  SiRNA target sequence
ctaagcttatgtcccttatctccaac

SEQ ID NO: 46607 - DNA, 26 bp, Artificial sequence
  SiRNA target sequence
taagcttatgtcccttatctccaaca

SEQ ID NO: 46608 - DNA, 26 bp, Artificial sequence
  SiRNA target sequence
aagcttatgtcccttatctccaacat

SEQ ID NO: 46609 - DNA, 26 bp, Artificial sequence
  SiRNA target sequence
agcttatgtcccttatctccaacatg

SEQ ID NO: 46610 - DNA, 26 bp, Artificial sequence
  SiRNA target sequence
gcttatgtcccttatctccaacatgt

SEQ ID NO: 46611 - DNA, 26 bp, Artificial sequence
  SiRNA target sequence
cttatgtcccttatctccaacatgtg

SEQ ID NO: 46612 - DNA, 26 bp, Artificial sequence
  SiRNA target sequence
ttatgtcccttatctccaacatgtgt

SEQ ID NO: 46613 - DNA, 26 bp, Artificial sequence
  SiRNA target sequence
tatgtcccttatctccaacatgtgtg

SEQ ID NO: 46614 - DNA, 26 bp, Artificial sequence
  SiRNA target sequence
atgtcccttatctccaacatgtgtgt

SEQ ID NO: 46615 - DNA, 26 bp, Artificial sequence
  SiRNA target sequence
tgtcccttatctccaacatgtgtgtt

SEQ ID NO: 46616 - DNA, 26 bp, Artificial sequence
  SiRNA target sequence
gtcccttatctccaacatgtgtgttg

SEQ ID NO: 46617 - DNA, 26 bp, Artificial sequence
  SiRNA target sequence
tcccttatctccaacatgtgtgttgt

SEQ ID NO: 46618 - DNA, 26 bp, Artificial sequence
  SiRNA target sequence
cccttatctccaacatgtgtgttgta

SEQ ID NO: 46619 - DNA, 26 bp, Artificial sequence
  SiRNA target sequence
ccttatctccaacatgtgtgttgtat

SEQ ID NO: 46620 - DNA, 26 bp, Artificial sequence
  SiRNA target sequence
cttatctccaacatgtgtgttgtatt

SEQ ID NO: 46621 - DNA, 26 bp, Artificial sequence
  SiRNA target sequence
ttatctccaacatgtgtgttgtattc

SEQ ID NO: 46622 - DNA, 26 bp, Artificial sequence
  SiRNA target sequence
tatctccaacatgtgtgttgtattca

SEQ ID NO: 46623 - DNA, 26 bp, Artificial sequence
  SiRNA target sequence
atctccaacatgtgtgttgtattcat

SEQ ID NO: 46624 - DNA, 26 bp, Artificial sequence
  SiRNA target sequence
tctccaacatgtgtgttgtattcatc

SEQ ID NO: 46625 - DNA, 26 bp, Artificial sequence
  SiRNA target sequence
ctccaacatgtgtgttgtattcatcc

SEQ ID NO: 46626 - DNA, 26 bp, Artificial sequence
  SiRNA target sequence
tccaacatgtgtgttgtattcatcct

SEQ ID NO: 46627 - DNA, 26 bp, Artificial sequence
  SiRNA target sequence
ccaacatgtgtgttgtattcatcctc

SEQ ID NO: 46628 - DNA, 26 bp, Artificial sequence
  SiRNA target sequence
caacatgtgtgttgtattcatcctct

SEQ ID NO: 46629 - DNA, 26 bp, Artificial sequence
  SiRNA target sequence
aacatgtgtgttgtattcatcctcta

SEQ ID NO: 46630 - DNA, 26 bp, Artificial sequence
  SiRNA target sequence
acatgtgtgttgtattcatcctctag

SEQ ID NO: 46631 - DNA, 26 bp, Artificial sequence
  SiRNA target sequence
catgtgtgttgtattcatcctctagg

SEQ ID NO: 46632 - DNA, 26 bp, Artificial sequence
  SiRNA target sequence
atgtgtgttgtattcatcctctaggt

SEQ ID NO: 46633 - DNA, 26 bp, Artificial sequence
  SiRNA target sequence
tgtgtgttgtattcatcctctaggtt

SEQ ID NO: 46634 - DNA, 26 bp, Artificial sequence
  SiRNA target sequence
gtgtgttgtattcatcctctaggttg

SEQ ID NO: 46635 - DNA, 26 bp, Artificial sequence
  SiRNA target sequence
tgtgttgtattcatcctctaggttgt

SEQ ID NO: 46636 - DNA, 26 bp, Artificial sequence
  SiRNA target sequence
gtgttgtattcatcctctaggttgtt

SEQ ID NO: 46637 - DNA, 26 bp, Artificial sequence
  SiRNA target sequence
tgttgtattcatcctctaggttgttt

SEQ ID NO: 46638 - DNA, 26 bp, Artificial sequence
  SiRNA target sequence
gttgtattcatcctctaggttgttta

SEQ ID NO: 46639 - DNA, 26 bp, Artificial sequence
  SiRNA target sequence
ttgtattcatcctctaggttgtttat

SEQ ID NO: 46640 - DNA, 26 bp, Artificial sequence
  SiRNA target sequence
tgtattcatcctctaggttgtttata

SEQ ID NO: 46641 - DNA, 26 bp, Artificial sequence
  SiRNA target sequence
gtattcatcctctaggttgtttatag

SEQ ID NO: 46642 - DNA, 26 bp, Artificial sequence
  SiRNA target sequence
tattcatcctctaggttgtttataga

SEQ ID NO: 46643 - DNA, 26 bp, Artificial sequence
  SiRNA target sequence
attcatcctctaggttgtttatagaa

SEQ ID NO: 46644 - DNA, 26 bp, Artificial sequence
  SiRNA target sequence
ttcatcctctaggttgtttatagaat

SEQ ID NO: 46645 - DNA, 26 bp, Artificial sequence
  SiRNA target sequence
tcatcctctaggttgtttatagaatc

SEQ ID NO: 46646 - DNA, 26 bp, Artificial sequence
  SiRNA target sequence
catcctctaggttgtttatagaatcg

SEQ ID NO: 46647 - DNA, 26 bp, Artificial sequence
  SiRNA target sequence
atcctctaggttgtttatagaatcgt

SEQ ID NO: 46648 - DNA, 26 bp, Artificial sequence
  SiRNA target sequence
tcctctaggttgtttatagaatcgtg

SEQ ID NO: 46649 - DNA, 26 bp, Artificial sequence
  SiRNA target sequence
cctctaggttgtttatagaatcgtgt

SEQ ID NO: 46650 - DNA, 26 bp, Artificial sequence
  SiRNA target sequence
ctctaggttgtttatagaatcgtgta

SEQ ID NO: 46651 - DNA, 26 bp, Artificial sequence
  SiRNA target sequence
tctaggttgtttatagaatcgtgtac

SEQ ID NO: 46652 - DNA, 26 bp, Artificial sequence
  SiRNA target sequence
ctaggttgtttatagaatcgtgtaca

SEQ ID NO: 46653 - DNA, 26 bp, Artificial sequence
  SiRNA target sequence
taggttgtttatagaatcgtgtacac

SEQ ID NO: 46654 - DNA, 26 bp, Artificial sequence
  SiRNA target sequence
aggttgtttatagaatcgtgtacaca

SEQ ID NO: 46655 - DNA, 26 bp, Artificial sequence
  SiRNA target sequence
ggttgtttatagaatcgtgtacacaa

SEQ ID NO: 46656 - DNA, 26 bp, Artificial sequence
  SiRNA target sequence
gttgtttatagaatcgtgtacacaaa

SEQ ID NO: 46657 - DNA, 26 bp, Artificial sequence
  SiRNA target sequence
ttgtttatagaatcgtgtacacaaag

SEQ ID NO: 46658 - DNA, 26 bp, Artificial sequence
  SiRNA target sequence
tgtttatagaatcgtgtacacaaagt

SEQ ID NO: 46659 - DNA, 26 bp, Artificial sequence
  SiRNA target sequence
gtttatagaatcgtgtacacaaagtt

SEQ ID NO: 46660 - DNA, 26 bp, Artificial sequence
  SiRNA target sequence
tttatagaatcgtgtacacaaagttt

SEQ ID NO: 46661 - DNA, 26 bp, Artificial sequence
  SiRNA target sequence
ttatagaatcgtgtacacaaagtttt

SEQ ID NO: 46662 - DNA, 26 bp, Artificial sequence
  SiRNA target sequence
tatagaatcgtgtacacaaagttttt

SEQ ID NO: 46663 - DNA, 26 bp, Artificial sequence
  SiRNA target sequence
atagaatcgtgtacacaaagtttttt

SEQ ID NO: 46664 - DNA, 26 bp, Artificial sequence
  SiRNA target sequence
tagaatcgtgtacacaaagtttttta

SEQ ID NO: 46665 - DNA, 26 bp, Artificial sequence
  SiRNA target sequence
agaatcgtgtacacaaagttttttac

SEQ ID NO: 46666 - DNA, 26 bp, Artificial sequence
  SiRNA target sequence
gaatcgtgtacacaaagttttttact

SEQ ID NO: 46667 - DNA, 26 bp, Artificial sequence
  SiRNA target sequence
aatcgtgtacacaaagttttttactg

SEQ ID NO: 46668 - DNA, 26 bp, Artificial sequence
  SiRNA target sequence
atcgtgtacacaaagttttttactga

SEQ ID NO: 46669 - DNA, 26 bp, Artificial sequence
  SiRNA target sequence
tcgtgtacacaaagttttttactgat

SEQ ID NO: 46670 - DNA, 26 bp, Artificial sequence
  SiRNA target sequence
cgtgtacacaaagttttttactgatt

SEQ ID NO: 46671 - DNA, 26 bp, Artificial sequence
  SiRNA target sequence
gtgtacacaaagttttttactgattt

SEQ ID NO: 46672 - DNA, 26 bp, Artificial sequence
  SiRNA target sequence
tgtacacaaagttttttactgatttt

SEQ ID NO: 46673 - DNA, 26 bp, Artificial sequence
  SiRNA target sequence
gtacacaaagttttttactgattttt

SEQ ID NO: 46674 - DNA, 26 bp, Artificial sequence
  SiRNA target sequence
tacacaaagttttttactgattttta

SEQ ID NO: 46675 - DNA, 26 bp, Artificial sequence
  SiRNA target sequence
acacaaagttttttactgatttttat

SEQ ID NO: 46676 - DNA, 26 bp, Artificial sequence
  SiRNA target sequence
cacaaagttttttactgatttttata

SEQ ID NO: 46677 - DNA, 26 bp, Artificial sequence
  SiRNA target sequence
acaaagttttttactgatttttataa

SEQ ID NO: 46678 - DNA, 26 bp, Artificial sequence
  SiRNA target sequence
caaagttttttactgatttttataac

SEQ ID NO: 46679 - DNA, 26 bp, Artificial sequence
  SiRNA target sequence
aaagttttttactgatttttataact

SEQ ID NO: 46680 - DNA, 26 bp, Artificial sequence
  SiRNA target sequence
aagttttttactgatttttataactt

SEQ ID NO: 46681 - DNA, 26 bp, Artificial sequence
  SiRNA target sequence
agttttttactgatttttataacttc

SEQ ID NO: 46682 - DNA, 26 bp, Artificial sequence
  SiRNA target sequence
gttttttactgatttttataacttct

SEQ ID NO: 46683 - DNA, 26 bp, Artificial sequence
  SiRNA target sequence
ttttttactgatttttataacttctt

SEQ ID NO: 46684 - DNA, 26 bp, Artificial sequence
  SiRNA target sequence
tttttactgatttttataacttcttc

SEQ ID NO: 46685 - DNA, 26 bp, Artificial sequence
  SiRNA target sequence
ttttactgatttttataacttcttct

SEQ ID NO: 46686 - DNA, 26 bp, Artificial sequence
  SiRNA target sequence
tttactgatttttataacttcttctt

SEQ ID NO: 46687 - DNA, 26 bp, Artificial sequence
  SiRNA target sequence
ttactgatttttataacttcttcttt

SEQ ID NO: 46688 - DNA, 26 bp, Artificial sequence
  SiRNA target sequence
tactgatttttataacttcttcttta

SEQ ID NO: 46689 - DNA, 26 bp, Artificial sequence
  SiRNA target sequence
actgatttttataacttcttctttat

SEQ ID NO: 46690 - DNA, 26 bp, Artificial sequence
  SiRNA target sequence
ctgatttttataacttcttctttatc

SEQ ID NO: 46691 - DNA, 26 bp, Artificial sequence
  SiRNA target sequence
tgatttttataacttcttctttatca

SEQ ID NO: 46692 - DNA, 26 bp, Artificial sequence
  SiRNA target sequence
gatttttataacttcttctttatcaa

SEQ ID NO: 46693 - DNA, 26 bp, Artificial sequence
  SiRNA target sequence
atttttataacttcttctttatcaaa

SEQ ID NO: 46694 - DNA, 26 bp, Artificial sequence
  SiRNA target sequence
tttttataacttcttctttatcaaat

SEQ ID NO: 46695 - DNA, 26 bp, Artificial sequence
  SiRNA target sequence
ttttataacttcttctttatcaaata

SEQ ID NO: 46696 - DNA, 26 bp, Artificial sequence
  SiRNA target sequence
tttataacttcttctttatcaaatat

SEQ ID NO: 46697 - DNA, 26 bp, Artificial sequence
  SiRNA target sequence
ttataacttcttctttatcaaatatt

SEQ ID NO: 46698 - DNA, 26 bp, Artificial sequence
  SiRNA target sequence
tataacttcttctttatcaaatattt

SEQ ID NO: 46699 - DNA, 26 bp, Artificial sequence
  SiRNA target sequence
ataacttcttctttatcaaatatttc

SEQ ID NO: 46700 - DNA, 26 bp, Artificial sequence
  SiRNA target sequence
taacttcttctttatcaaatatttct

SEQ ID NO: 46701 - DNA, 26 bp, Artificial sequence
  SiRNA target sequence
aacttcttctttatcaaatatttctt

SEQ ID NO: 46702 - DNA, 26 bp, Artificial sequence
  SiRNA target sequence
acttcttctttatcaaatatttcttt

SEQ ID NO: 46703 - DNA, 26 bp, Artificial sequence
  SiRNA target sequence
cttcttctttatcaaatatttctttt

SEQ ID NO: 46704 - DNA, 26 bp, Artificial sequence
  SiRNA target sequence
ttcttctttatcaaatatttcttttc

SEQ ID NO: 46705 - DNA, 26 bp, Artificial sequence
  SiRNA target sequence
tcttctttatcaaatatttcttttcc

SEQ ID NO: 46706 - DNA, 26 bp, Artificial sequence
  SiRNA target sequence
cttctttatcaaatatttcttttcca

SEQ ID NO: 46707 - DNA, 26 bp, Artificial sequence
  SiRNA target sequence
ttctttatcaaatatttcttttccat

SEQ ID NO: 46708 - DNA, 26 bp, Artificial sequence
  SiRNA target sequence
tctttatcaaatatttcttttccata

SEQ ID NO: 46709 - DNA, 26 bp, Artificial sequence
  SiRNA target sequence
ctttatcaaatatttcttttccatat

SEQ ID NO: 46710 - DNA, 26 bp, Artificial sequence
  SiRNA target sequence
tttatcaaatatttcttttccatatg

SEQ ID NO: 46711 - DNA, 26 bp, Artificial sequence
  SiRNA target sequence
ttatcaaatatttcttttccatatgt

SEQ ID NO: 46712 - DNA, 26 bp, Artificial sequence
  SiRNA target sequence
tatcaaatatttcttttccatatgtt

SEQ ID NO: 46713 - DNA, 26 bp, Artificial sequence
  SiRNA target sequence
atcaaatatttcttttccatatgtta

SEQ ID NO: 46714 - DNA, 26 bp, Artificial sequence
  SiRNA target sequence
tcaaatatttcttttccatatgttaa

SEQ ID NO: 46715 - DNA, 26 bp, Artificial sequence
  SiRNA target sequence
caaatatttcttttccatatgttaaa

SEQ ID NO: 46716 - DNA, 26 bp, Artificial sequence
  SiRNA target sequence
aaatatttcttttccatatgttaaat

SEQ ID NO: 46717 - DNA, 26 bp, Artificial sequence
  SiRNA target sequence
aatatttcttttccatatgttaaatt

SEQ ID NO: 46718 - DNA, 26 bp, Artificial sequence
  SiRNA target sequence
atatttcttttccatatgttaaatta

SEQ ID NO: 46719 - DNA, 26 bp, Artificial sequence
  SiRNA target sequence
tatttcttttccatatgttaaattat

SEQ ID NO: 46720 - DNA, 26 bp, Artificial sequence
  SiRNA target sequence
atttcttttccatatgttaaattata

SEQ ID NO: 46721 - DNA, 26 bp, Artificial sequence
  SiRNA target sequence
tttcttttccatatgttaaattataa

SEQ ID NO: 46722 - DNA, 26 bp, Artificial sequence
  SiRNA target sequence
ttcttttccatatgttaaattataat

SEQ ID NO: 46723 - DNA, 26 bp, Artificial sequence
  SiRNA target sequence
tcttttccatatgttaaattataata

SEQ ID NO: 46724 - DNA, 26 bp, Artificial sequence
  SiRNA target sequence
cttttccatatgttaaattataataa

SEQ ID NO: 46725 - DNA, 26 bp, Artificial sequence
  SiRNA target sequence
ttttccatatgttaaattataataaa

SEQ ID NO: 46726 - DNA, 26 bp, Artificial sequence
  SiRNA target sequence
tttccatatgttaaattataataaac

SEQ ID NO: 46727 - DNA, 26 bp, Artificial sequence
  SiRNA target sequence
ttccatatgttaaattataataaacc

SEQ ID NO: 46728 - DNA, 26 bp, Artificial sequence
  SiRNA target sequence
tccatatgttaaattataataaaccg

SEQ ID NO: 46729 - DNA, 26 bp, Artificial sequence
  SiRNA target sequence
ccatatgttaaattataataaaccgt

SEQ ID NO: 46730 - DNA, 26 bp, Artificial sequence
  SiRNA target sequence
catatgttaaattataataaaccgtt

SEQ ID NO: 46731 - DNA, 26 bp, Artificial sequence
  SiRNA target sequence
atatgttaaattataataaaccgttt

SEQ ID NO: 46732 - DNA, 26 bp, Artificial sequence
  SiRNA target sequence
tatgttaaattataataaaccgtttc

SEQ ID NO: 46733 - DNA, 26 bp, Artificial sequence
  SiRNA target sequence
atgttaaattataataaaccgtttcg

SEQ ID NO: 46734 - DNA, 26 bp, Artificial sequence
  SiRNA target sequence
tgttaaattataataaaccgtttcgt

SEQ ID NO: 46735 - DNA, 26 bp, Artificial sequence
  SiRNA target sequence
gttaaattataataaaccgtttcgtt

SEQ ID NO: 46736 - DNA, 26 bp, Artificial sequence
  SiRNA target sequence
ttaaattataataaaccgtttcgtta

SEQ ID NO: 46737 - DNA, 26 bp, Artificial sequence
  SiRNA target sequence
taaattataataaaccgtttcgttaa

SEQ ID NO: 46738 - DNA, 26 bp, Artificial sequence
  SiRNA target sequence
aaattataataaaccgtttcgttaaa

SEQ ID NO: 46739 - DNA, 26 bp, Artificial sequence
  SiRNA target sequence
aattataataaaccgtttcgttaaac

SEQ ID NO: 46740 - DNA, 26 bp, Artificial sequence
  SiRNA target sequence
attataataaaccgtttcgttaaaca

SEQ ID NO: 46741 - DNA, 26 bp, Artificial sequence
  SiRNA target sequence
ttataataaaccgtttcgttaaacaa

SEQ ID NO: 46742 - DNA, 26 bp, Artificial sequence
  SiRNA target sequence
tataataaaccgtttcgttaaacaaa

SEQ ID NO: 46743 - DNA, 26 bp, Artificial sequence
  SiRNA target sequence
ataataaaccgtttcgttaaacaaaa

SEQ ID NO: 46744 - DNA, 26 bp, Artificial sequence
  SiRNA target sequence
taataaaccgtttcgttaaacaaaaa

SEQ ID NO: 46745 - DNA, 26 bp, Artificial sequence
  SiRNA target sequence
aataaaccgtttcgttaaacaaaaat

SEQ ID NO: 46746 - DNA, 26 bp, Artificial sequence
  SiRNA target sequence
ataaaccgtttcgttaaacaaaaatg

SEQ ID NO: 46747 - DNA, 26 bp, Artificial sequence
  SiRNA target sequence
taaaccgtttcgttaaacaaaaatga

SEQ ID NO: 46748 - DNA, 26 bp, Artificial sequence
  SiRNA target sequence
aaaccgtttcgttaaacaaaaatgag

SEQ ID NO: 46749 - DNA, 26 bp, Artificial sequence
  SiRNA target sequence
aaccgtttcgttaaacaaaaatgagg

SEQ ID NO: 46750 - DNA, 26 bp, Artificial sequence
  SiRNA target sequence
accgtttcgttaaacaaaaatgaggt

SEQ ID NO: 46751 - DNA, 26 bp, Artificial sequence
  SiRNA target sequence
ccgtttcgttaaacaaaaatgaggtt

SEQ ID NO: 46752 - DNA, 26 bp, Artificial sequence
  SiRNA target sequence
cgtttcgttaaacaaaaatgaggttt

SEQ ID NO: 46753 - DNA, 26 bp, Artificial sequence
  SiRNA target sequence
gtttcgttaaacaaaaatgaggtttg

SEQ ID NO: 46754 - DNA, 26 bp, Artificial sequence
  SiRNA target sequence
tttcgttaaacaaaaatgaggtttgt

SEQ ID NO: 46755 - DNA, 26 bp, Artificial sequence
  SiRNA target sequence
ttcgttaaacaaaaatgaggtttgtg

SEQ ID NO: 46756 - DNA, 26 bp, Artificial sequence
  SiRNA target sequence
tcgttaaacaaaaatgaggtttgtgg

SEQ ID NO: 46757 - DNA, 26 bp, Artificial sequence
  SiRNA target sequence
cgttaaacaaaaatgaggtttgtggt

SEQ ID NO: 46758 - DNA, 26 bp, Artificial sequence
  SiRNA target sequence
gttaaacaaaaatgaggtttgtggtg

SEQ ID NO: 46759 - DNA, 26 bp, Artificial sequence
  SiRNA target sequence
ttaaacaaaaatgaggtttgtggtgc

SEQ ID NO: 46760 - DNA, 26 bp, Artificial sequence
  SiRNA target sequence
taaacaaaaatgaggtttgtggtgca

SEQ ID NO: 46761 - DNA, 26 bp, Artificial sequence
  SiRNA target sequence
aaacaaaaatgaggtttgtggtgcaa

SEQ ID NO: 46762 - DNA, 26 bp, Artificial sequence
  SiRNA target sequence
aacaaaaatgaggtttgtggtgcaaa

SEQ ID NO: 46763 - DNA, 26 bp, Artificial sequence
  SiRNA target sequence
acaaaaatgaggtttgtggtgcaaat

SEQ ID NO: 46764 - DNA, 26 bp, Artificial sequence
  SiRNA target sequence
caaaaatgaggtttgtggtgcaaatg

SEQ ID NO: 46765 - DNA, 26 bp, Artificial sequence
  SiRNA target sequence
aaaaatgaggtttgtggtgcaaatga

SEQ ID NO: 46766 - DNA, 26 bp, Artificial sequence
  SiRNA target sequence
aaaatgaggtttgtggtgcaaatgat

SEQ ID NO: 46767 - DNA, 26 bp, Artificial sequence
  SiRNA target sequence
aaatgaggtttgtggtgcaaatgata

SEQ ID NO: 46768 - DNA, 26 bp, Artificial sequence
  SiRNA target sequence
aatgaggtttgtggtgcaaatgatat

SEQ ID NO: 46769 - DNA, 26 bp, Artificial sequence
  SiRNA target sequence
atgaggtttgtggtgcaaatgatata

SEQ ID NO: 46770 - DNA, 26 bp, Artificial sequence
  SiRNA target sequence
tgaggtttgtggtgcaaatgatataa

SEQ ID NO: 46771 - DNA, 26 bp, Artificial sequence
  SiRNA target sequence
gaggtttgtggtgcaaatgatataag

SEQ ID NO: 46772 - DNA, 26 bp, Artificial sequence
  SiRNA target sequence
aggtttgtggtgcaaatgatataagt

SEQ ID NO: 46773 - DNA, 26 bp, Artificial sequence
  SiRNA target sequence
ggtttgtggtgcaaatgatataagtg

SEQ ID NO: 46774 - DNA, 26 bp, Artificial sequence
  SiRNA target sequence
gtttgtggtgcaaatgatataagtga

SEQ ID NO: 46775 - DNA, 26 bp, Artificial sequence
  SiRNA target sequence
tttgtggtgcaaatgatataagtgat

SEQ ID NO: 46776 - DNA, 26 bp, Artificial sequence
  SiRNA target sequence
ttgtggtgcaaatgatataagtgatc

SEQ ID NO: 46777 - DNA, 26 bp, Artificial sequence
  SiRNA target sequence
tgtggtgcaaatgatataagtgatct

SEQ ID NO: 46778 - DNA, 26 bp, Artificial sequence
  SiRNA target sequence
gtggtgcaaatgatataagtgatcta

SEQ ID NO: 46779 - DNA, 26 bp, Artificial sequence
  SiRNA target sequence
tggtgcaaatgatataagtgatctat

SEQ ID NO: 46780 - DNA, 26 bp, Artificial sequence
  SiRNA target sequence
ggtgcaaatgatataagtgatctata

SEQ ID NO: 46781 - DNA, 26 bp, Artificial sequence
  SiRNA target sequence
gtgcaaatgatataagtgatctatat

SEQ ID NO: 46782 - DNA, 26 bp, Artificial sequence
  SiRNA target sequence
tgcaaatgatataagtgatctatatg

SEQ ID NO: 46783 - DNA, 26 bp, Artificial sequence
  SiRNA target sequence
gcaaatgatataagtgatctatatga

SEQ ID NO: 46784 - DNA, 26 bp, Artificial sequence
  SiRNA target sequence
caaatgatataagtgatctatatgaa

SEQ ID NO: 46785 - DNA, 26 bp, Artificial sequence
  SiRNA target sequence
aaatgatataagtgatctatatgaac

SEQ ID NO: 46786 - DNA, 26 bp, Artificial sequence
  SiRNA target sequence
aatgatataagtgatctatatgaact

SEQ ID NO: 46787 - DNA, 26 bp, Artificial sequence
  SiRNA target sequence
atgatataagtgatctatatgaacta

SEQ ID NO: 46788 - DNA, 26 bp, Artificial sequence
  SiRNA target sequence
tgatataagtgatctatatgaactat

SEQ ID NO: 46789 - DNA, 26 bp, Artificial sequence
  SiRNA target sequence
gatataagtgatctatatgaactatt

SEQ ID NO: 46790 - DNA, 26 bp, Artificial sequence
  SiRNA target sequence
atataagtgatctatatgaactatta

SEQ ID NO: 46791 - DNA, 26 bp, Artificial sequence
  SiRNA target sequence
tataagtgatctatatgaactattag

SEQ ID NO: 46792 - DNA, 26 bp, Artificial sequence
  SiRNA target sequence
ataagtgatctatatgaactattaga

SEQ ID NO: 46793 - DNA, 26 bp, Artificial sequence
  SiRNA target sequence
taagtgatctatatgaactattagaa

SEQ ID NO: 46794 - DNA, 26 bp, Artificial sequence
  SiRNA target sequence
aagtgatctatatgaactattagaaa

SEQ ID NO: 46795 - DNA, 26 bp, Artificial sequence
  SiRNA target sequence
agtgatctatatgaactattagaaat

SEQ ID NO: 46796 - DNA, 26 bp, Artificial sequence
  SiRNA target sequence
gtgatctatatgaactattagaaatt

SEQ ID NO: 46797 - DNA, 26 bp, Artificial sequence
  SiRNA target sequence
tgatctatatgaactattagaaattt

SEQ ID NO: 46798 - DNA, 26 bp, Artificial sequence
  SiRNA target sequence
gatctatatgaactattagaaatttc

SEQ ID NO: 46799 - DNA, 26 bp, Artificial sequence
  SiRNA target sequence
atctatatgaactattagaaatttct

SEQ ID NO: 46800 - DNA, 26 bp, Artificial sequence
  SiRNA target sequence
tctatatgaactattagaaatttctt

SEQ ID NO: 46801 - DNA, 26 bp, Artificial sequence
  SiRNA target sequence
ctatatgaactattagaaatttcttt

SEQ ID NO: 46802 - DNA, 26 bp, Artificial sequence
  SiRNA target sequence
tatatgaactattagaaatttctttt

SEQ ID NO: 46803 - DNA, 26 bp, Artificial sequence
  SiRNA target sequence
atatgaactattagaaatttctttta

SEQ ID NO: 46804 - DNA, 26 bp, Artificial sequence
  SiRNA target sequence
tatgaactattagaaatttcttttat

SEQ ID NO: 46805 - DNA, 26 bp, Artificial sequence
  SiRNA target sequence
atgaactattagaaatttcttttata

SEQ ID NO: 46806 - DNA, 26 bp, Artificial sequence
  SiRNA target sequence
tgaactattagaaatttcttttatat

SEQ ID NO: 46807 - DNA, 26 bp, Artificial sequence
  SiRNA target sequence
gaactattagaaatttcttttatatc

SEQ ID NO: 46808 - DNA, 26 bp, Artificial sequence
  SiRNA target sequence
aactattagaaatttcttttatatct

SEQ ID NO: 46809 - DNA, 26 bp, Artificial sequence
  SiRNA target sequence
actattagaaatttcttttatatctc

SEQ ID NO: 46810 - DNA, 26 bp, Artificial sequence
  SiRNA target sequence
ctattagaaatttcttttatatctcg

SEQ ID NO: 46811 - DNA, 26 bp, Artificial sequence
  SiRNA target sequence
tattagaaatttcttttatatctcga

SEQ ID NO: 46812 - DNA, 26 bp, Artificial sequence
  SiRNA target sequence
attagaaatttcttttatatctcgat

SEQ ID NO: 46813 - DNA, 26 bp, Artificial sequence
  SiRNA target sequence
ttagaaatttcttttatatctcgatt

SEQ ID NO: 46814 - DNA, 26 bp, Artificial sequence
  SiRNA target sequence
tagaaatttcttttatatctcgatta

SEQ ID NO: 46815 - DNA, 26 bp, Artificial sequence
  SiRNA target sequence
agaaatttcttttatatctcgattat

SEQ ID NO: 46816 - DNA, 26 bp, Artificial sequence
  SiRNA target sequence
gaaatttcttttatatctcgattatc

SEQ ID NO: 46817 - DNA, 26 bp, Artificial sequence
  SiRNA target sequence
aaatttcttttatatctcgattatct

SEQ ID NO: 46818 - DNA, 26 bp, Artificial sequence
  SiRNA target sequence
aatttcttttatatctcgattatcta

SEQ ID NO: 46819 - DNA, 26 bp, Artificial sequence
  SiRNA target sequence
atttcttttatatctcgattatctag

SEQ ID NO: 46820 - DNA, 26 bp, Artificial sequence
  SiRNA target sequence
tttcttttatatctcgattatctaga

SEQ ID NO: 46821 - DNA, 26 bp, Artificial sequence
  SiRNA target sequence
ttcttttatatctcgattatctagat

SEQ ID NO: 46822 - DNA, 26 bp, Artificial sequence
  SiRNA target sequence
tcttttatatctcgattatctagata

SEQ ID NO: 46823 - DNA, 26 bp, Artificial sequence
  SiRNA target sequence
cttttatatctcgattatctagataa

SEQ ID NO: 46824 - DNA, 26 bp, Artificial sequence
  SiRNA target sequence
ttttatatctcgattatctagataaa

SEQ ID NO: 46825 - DNA, 26 bp, Artificial sequence
  SiRNA target sequence
tttatatctcgattatctagataaat

SEQ ID NO: 46826 - DNA, 26 bp, Artificial sequence
  SiRNA target sequence
ttatatctcgattatctagataaata

SEQ ID NO: 46827 - DNA, 26 bp, Artificial sequence
  SiRNA target sequence
tatatctcgattatctagataaatat

SEQ ID NO: 46828 - DNA, 26 bp, Artificial sequence
  SiRNA target sequence
atatctcgattatctagataaatatt

SEQ ID NO: 46829 - DNA, 26 bp, Artificial sequence
  SiRNA target sequence
tatctcgattatctagataaatattt

SEQ ID NO: 46830 - DNA, 26 bp, Artificial sequence
  SiRNA target sequence
atctcgattatctagataaatatttc

SEQ ID NO: 46831 - DNA, 26 bp, Artificial sequence
  SiRNA target sequence
tctcgattatctagataaatatttcc

SEQ ID NO: 46832 - DNA, 26 bp, Artificial sequence
  SiRNA target sequence
ctcgattatctagataaatatttccc

SEQ ID NO: 46833 - DNA, 26 bp, Artificial sequence
  SiRNA target sequence
tcgattatctagataaatatttcccc

SEQ ID NO: 46834 - DNA, 26 bp, Artificial sequence
  SiRNA target sequence
cgattatctagataaatatttccccc

SEQ ID NO: 46835 - DNA, 26 bp, Artificial sequence
  SiRNA target sequence
gattatctagataaatatttccccca

SEQ ID NO: 46836 - DNA, 26 bp, Artificial sequence
  SiRNA target sequence
attatctagataaatatttcccccat

SEQ ID NO: 46837 - DNA, 26 bp, Artificial sequence
  SiRNA target sequence
ttatctagataaatatttcccccata

SEQ ID NO: 46838 - DNA, 26 bp, Artificial sequence
  SiRNA target sequence
tatctagataaatatttcccccataa

SEQ ID NO: 46839 - DNA, 26 bp, Artificial sequence
  SiRNA target sequence
atctagataaatatttcccccataat

SEQ ID NO: 46840 - DNA, 26 bp, Artificial sequence
  SiRNA target sequence
tctagataaatatttcccccataatt

SEQ ID NO: 46841 - DNA, 26 bp, Artificial sequence
  SiRNA target sequence
ctagataaatatttcccccataattt

SEQ ID NO: 46842 - DNA, 26 bp, Artificial sequence
  SiRNA target sequence
tagataaatatttcccccataatttt

SEQ ID NO: 46843 - DNA, 26 bp, Artificial sequence
  SiRNA target sequence
agataaatatttcccccataattttc

SEQ ID NO: 46844 - DNA, 26 bp, Artificial sequence
  SiRNA target sequence
gataaatatttcccccataattttca

SEQ ID NO: 46845 - DNA, 26 bp, Artificial sequence
  SiRNA target sequence
ataaatatttcccccataattttcaa

SEQ ID NO: 46846 - DNA, 26 bp, Artificial sequence
  SiRNA target sequence
taaatatttcccccataattttcaaa

SEQ ID NO: 46847 - DNA, 26 bp, Artificial sequence
  SiRNA target sequence
aaatatttcccccataattttcaaat

SEQ ID NO: 46848 - DNA, 26 bp, Artificial sequence
  SiRNA target sequence
aatatttcccccataattttcaaatc

SEQ ID NO: 46849 - DNA, 26 bp, Artificial sequence
  SiRNA target sequence
atatttcccccataattttcaaatct

SEQ ID NO: 46850 - DNA, 26 bp, Artificial sequence
  SiRNA target sequence
tatttcccccataattttcaaatctc

SEQ ID NO: 46851 - DNA, 26 bp, Artificial sequence
  SiRNA target sequence
atttcccccataattttcaaatctca

SEQ ID NO: 46852 - DNA, 26 bp, Artificial sequence
  SiRNA target sequence
tttcccccataattttcaaatctcat

SEQ ID NO: 46853 - DNA, 26 bp, Artificial sequence
  SiRNA target sequence
ttcccccataattttcaaatctcata

SEQ ID NO: 46854 - DNA, 26 bp, Artificial sequence
  SiRNA target sequence
tcccccataattttcaaatctcataa

SEQ ID NO: 46855 - DNA, 26 bp, Artificial sequence
  SiRNA target sequence
cccccataattttcaaatctcataat

SEQ ID NO: 46856 - DNA, 26 bp, Artificial sequence
  SiRNA target sequence
ccccataattttcaaatctcataatc

SEQ ID NO: 46857 - DNA, 26 bp, Artificial sequence
  SiRNA target sequence
cccataattttcaaatctcataatca

SEQ ID NO: 46858 - DNA, 26 bp, Artificial sequence
  SiRNA target sequence
ccataattttcaaatctcataatcat

SEQ ID NO: 46859 - DNA, 26 bp, Artificial sequence
  SiRNA target sequence
cataattttcaaatctcataatcatc

SEQ ID NO: 46860 - DNA, 26 bp, Artificial sequence
  SiRNA target sequence
ataattttcaaatctcataatcatct

SEQ ID NO: 46861 - DNA, 26 bp, Artificial sequence
  SiRNA target sequence
taattttcaaatctcataatcatctt

SEQ ID NO: 46862 - DNA, 26 bp, Artificial sequence
  SiRNA target sequence
aattttcaaatctcataatcatcttt

SEQ ID NO: 46863 - DNA, 26 bp, Artificial sequence
  SiRNA target sequence
attttcaaatctcataatcatcttta

SEQ ID NO: 46864 - DNA, 26 bp, Artificial sequence
  SiRNA target sequence
ttttcaaatctcataatcatctttat

SEQ ID NO: 46865 - DNA, 26 bp, Artificial sequence
  SiRNA target sequence
tttcaaatctcataatcatctttata

SEQ ID NO: 46866 - DNA, 26 bp, Artificial sequence
  SiRNA target sequence
ttcaaatctcataatcatctttataa

SEQ ID NO: 46867 - DNA, 26 bp, Artificial sequence
  SiRNA target sequence
tcaaatctcataatcatctttataag

SEQ ID NO: 46868 - DNA, 26 bp, Artificial sequence
  SiRNA target sequence
caaatctcataatcatctttataaga

SEQ ID NO: 46869 - DNA, 26 bp, Artificial sequence
  SiRNA target sequence
aaatctcataatcatctttataagag

SEQ ID NO: 46870 - DNA, 26 bp, Artificial sequence
  SiRNA target sequence
aatctcataatcatctttataagaga

SEQ ID NO: 46871 - DNA, 26 bp, Artificial sequence
  SiRNA target sequence
atctcataatcatctttataagagat

SEQ ID NO: 46872 - DNA, 26 bp, Artificial sequence
  SiRNA target sequence
tctcataatcatctttataagagatg

SEQ ID NO: 46873 - DNA, 26 bp, Artificial sequence
  SiRNA target sequence
ctcataatcatctttataagagatgt

SEQ ID NO: 46874 - DNA, 26 bp, Artificial sequence
  SiRNA target sequence
tcataatcatctttataagagatgtt

SEQ ID NO: 46875 - DNA, 26 bp, Artificial sequence
  SiRNA target sequence
cataatcatctttataagagatgttt

SEQ ID NO: 46876 - DNA, 26 bp, Artificial sequence
  SiRNA target sequence
ataatcatctttataagagatgtttt

SEQ ID NO: 46877 - DNA, 26 bp, Artificial sequence
  SiRNA target sequence
taatcatctttataagagatgttttt

SEQ ID NO: 46878 - DNA, 26 bp, Artificial sequence
  SiRNA target sequence
aatcatctttataagagatgtttttc

SEQ ID NO: 46879 - DNA, 26 bp, Artificial sequence
  SiRNA target sequence
atcatctttataagagatgtttttcc

SEQ ID NO: 46880 - DNA, 26 bp, Artificial sequence
  SiRNA target sequence
tcatctttataagagatgtttttccc

SEQ ID NO: 46881 - DNA, 26 bp, Artificial sequence
  SiRNA target sequence
catctttataagagatgtttttcccg

SEQ ID NO: 46882 - DNA, 26 bp, Artificial sequence
  SiRNA target sequence
atctttataagagatgtttttcccga

SEQ ID NO: 46883 - DNA, 26 bp, Artificial sequence
  SiRNA target sequence
tctttataagagatgtttttcccgat

SEQ ID NO: 46884 - DNA, 26 bp, Artificial sequence
  SiRNA target sequence
ctttataagagatgtttttcccgatc

SEQ ID NO: 46885 - DNA, 26 bp, Artificial sequence
  SiRNA target sequence
tttataagagatgtttttcccgatcc

SEQ ID NO: 46886 - DNA, 26 bp, Artificial sequence
  SiRNA target sequence
ttataagagatgtttttcccgatcca

SEQ ID NO: 46887 - DNA, 26 bp, Artificial sequence
  SiRNA target sequence
tataagagatgtttttcccgatccat

SEQ ID NO: 46888 - DNA, 26 bp, Artificial sequence
  SiRNA target sequence
ataagagatgtttttcccgatccatt

SEQ ID NO: 46889 - DNA, 26 bp, Artificial sequence
  SiRNA target sequence
taagagatgtttttcccgatccattt

SEQ ID NO: 46890 - DNA, 26 bp, Artificial sequence
  SiRNA target sequence
aagagatgtttttcccgatccatttt

SEQ ID NO: 46891 - DNA, 26 bp, Artificial sequence
  SiRNA target sequence
agagatgtttttcccgatccattttt

SEQ ID NO: 46892 - DNA, 26 bp, Artificial sequence
  SiRNA target sequence
gagatgtttttcccgatccatttttt

SEQ ID NO: 46893 - DNA, 26 bp, Artificial sequence
  SiRNA target sequence
agatgtttttcccgatccattttttc

SEQ ID NO: 46894 - DNA, 26 bp, Artificial sequence
  SiRNA target sequence
gatgtttttcccgatccattttttcc

SEQ ID NO: 46895 - DNA, 26 bp, Artificial sequence
  SiRNA target sequence
atgtttttcccgatccattttttcca

SEQ ID NO: 46896 - DNA, 26 bp, Artificial sequence
  SiRNA target sequence
tgtttttcccgatccattttttccaa

SEQ ID NO: 46897 - DNA, 26 bp, Artificial sequence
  SiRNA target sequence
gtttttcccgatccattttttccaat

SEQ ID NO: 46898 - DNA, 26 bp, Artificial sequence
  SiRNA target sequence
tttttcccgatccattttttccaata

SEQ ID NO: 46899 - DNA, 26 bp, Artificial sequence
  SiRNA target sequence
ttttcccgatccattttttccaataa

SEQ ID NO: 46900 - DNA, 26 bp, Artificial sequence
  SiRNA target sequence
tttcccgatccattttttccaataat

SEQ ID NO: 46901 - DNA, 26 bp, Artificial sequence
  SiRNA target sequence
ttcccgatccattttttccaataata

SEQ ID NO: 46902 - DNA, 26 bp, Artificial sequence
  SiRNA target sequence
tcccgatccattttttccaataatag

SEQ ID NO: 46903 - DNA, 26 bp, Artificial sequence
  SiRNA target sequence
cccgatccattttttccaataatagc

SEQ ID NO: 46904 - DNA, 26 bp, Artificial sequence
  SiRNA target sequence
ccgatccattttttccaataatagct

SEQ ID NO: 46905 - DNA, 26 bp, Artificial sequence
  SiRNA target sequence
cgatccattttttccaataatagcta

SEQ ID NO: 46906 - DNA, 26 bp, Artificial sequence
  SiRNA target sequence
gatccattttttccaataatagctac

SEQ ID NO: 46907 - DNA, 26 bp, Artificial sequence
  SiRNA target sequence
atccattttttccaataatagctact

SEQ ID NO: 46908 - DNA, 26 bp, Artificial sequence
  SiRNA target sequence
tccattttttccaataatagctactt

SEQ ID NO: 46909 - DNA, 26 bp, Artificial sequence
  SiRNA target sequence
ccattttttccaataatagctacttt

SEQ ID NO: 46910 - DNA, 26 bp, Artificial sequence
  SiRNA target sequence
cattttttccaataatagctactttt

SEQ ID NO: 46911 - DNA, 26 bp, Artificial sequence
  SiRNA target sequence
attttttccaataatagctacttttt

SEQ ID NO: 46912 - DNA, 26 bp, Artificial sequence
  SiRNA target sequence
ttttttccaataatagctactttttc

SEQ ID NO: 46913 - DNA, 26 bp, Artificial sequence
  SiRNA target sequence
tttttccaataatagctactttttca

SEQ ID NO: 46914 - DNA, 26 bp, Artificial sequence
  SiRNA target sequence
ttttccaataatagctactttttcac

SEQ ID NO: 46915 - DNA, 26 bp, Artificial sequence
  SiRNA target sequence
tttccaataatagctactttttcacc

SEQ ID NO: 46916 - DNA, 26 bp, Artificial sequence
  SiRNA target sequence
ttccaataatagctactttttcacct

SEQ ID NO: 46917 - DNA, 26 bp, Artificial sequence
  SiRNA target sequence
tccaataatagctactttttcacctt

SEQ ID NO: 46918 - DNA, 26 bp, Artificial sequence
  SiRNA target sequence
ccaataatagctactttttcaccttt

SEQ ID NO: 46919 - DNA, 26 bp, Artificial sequence
  SiRNA target sequence
caataatagctactttttcacctttt

SEQ ID NO: 46920 - DNA, 26 bp, Artificial sequence
  SiRNA target sequence
aataatagctactttttcaccttttt

SEQ ID NO: 46921 - DNA, 26 bp, Artificial sequence
  SiRNA target sequence
ataatagctactttttcacctttttt

SEQ ID NO: 46922 - DNA, 26 bp, Artificial sequence
  SiRNA target sequence
taatagctactttttcacctttttta

SEQ ID NO: 46923 - DNA, 26 bp, Artificial sequence
  SiRNA target sequence
aatagctactttttcaccttttttaa

SEQ ID NO: 46924 - DNA, 26 bp, Artificial sequence
  SiRNA target sequence
atagctactttttcaccttttttaat

SEQ ID NO: 46925 - DNA, 26 bp, Artificial sequence
  SiRNA target sequence
tagctactttttcaccttttttaatt

SEQ ID NO: 46926 - DNA, 26 bp, Artificial sequence
  SiRNA target sequence
agctactttttcaccttttttaatta

SEQ ID NO: 46927 - DNA, 26 bp, Artificial sequence
  SiRNA target sequence
gctactttttcaccttttttaattaa

SEQ ID NO: 46928 - DNA, 26 bp, Artificial sequence
  SiRNA target sequence
ctactttttcaccttttttaattaaa

SEQ ID NO: 46929 - DNA, 26 bp, Artificial sequence
  SiRNA target sequence
tactttttcaccttttttaattaaaa

SEQ ID NO: 46930 - DNA, 26 bp, Artificial sequence
  SiRNA target sequence
actttttcaccttttttaattaaaat

SEQ ID NO: 46931 - DNA, 26 bp, Artificial sequence
  SiRNA target sequence
ctttttcaccttttttaattaaaata

SEQ ID NO: 46932 - DNA, 26 bp, Artificial sequence
  SiRNA target sequence
tttttcaccttttttaattaaaatat

SEQ ID NO: 46933 - DNA, 26 bp, Artificial sequence
  SiRNA target sequence
ttttcaccttttttaattaaaatatt

SEQ ID NO: 46934 - DNA, 26 bp, Artificial sequence
  SiRNA target sequence
tttcaccttttttaattaaaatattt

SEQ ID NO: 46935 - DNA, 26 bp, Artificial sequence
  SiRNA target sequence
ttcaccttttttaattaaaatattta

SEQ ID NO: 46936 - DNA, 26 bp, Artificial sequence
  SiRNA target sequence
tcaccttttttaattaaaatatttat

SEQ ID NO: 46937 - DNA, 26 bp, Artificial sequence
  SiRNA target sequence
caccttttttaattaaaatatttatg

SEQ ID NO: 46938 - DNA, 26 bp, Artificial sequence
  SiRNA target sequence
accttttttaattaaaatatttatgt

SEQ ID NO: 46939 - DNA, 26 bp, Artificial sequence
  SiRNA target sequence
ccttttttaattaaaatatttatgtc

SEQ ID NO: 46940 - DNA, 26 bp, Artificial sequence
  SiRNA target sequence
cttttttaattaaaatatttatgtcc

SEQ ID NO: 46941 - DNA, 26 bp, Artificial sequence
  SiRNA target sequence
ttttttaattaaaatatttatgtccg

SEQ ID NO: 46942 - DNA, 26 bp, Artificial sequence
  SiRNA target sequence
tttttaattaaaatatttatgtccgt

SEQ ID NO: 46943 - DNA, 26 bp, Artificial sequence
  SiRNA target sequence
ttttaattaaaatatttatgtccgtt

SEQ ID NO: 46944 - DNA, 26 bp, Artificial sequence
  SiRNA target sequence
tttaattaaaatatttatgtccgtta

SEQ ID NO: 46945 - DNA, 26 bp, Artificial sequence
  SiRNA target sequence
ttaattaaaatatttatgtccgttaa

SEQ ID NO: 46946 - DNA, 26 bp, Artificial sequence
  SiRNA target sequence
taattaaaatatttatgtccgttaaa

SEQ ID NO: 46947 - DNA, 26 bp, Artificial sequence
  SiRNA target sequence
aattaaaatatttatgtccgttaaaa

SEQ ID NO: 46948 - DNA, 26 bp, Artificial sequence
  SiRNA target sequence
attaaaatatttatgtccgttaaaat

SEQ ID NO: 46949 - DNA, 26 bp, Artificial sequence
  SiRNA target sequence
ttaaaatatttatgtccgttaaaatt

SEQ ID NO: 46950 - DNA, 26 bp, Artificial sequence
  SiRNA target sequence
taaaatatttatgtccgttaaaattt

SEQ ID NO: 46951 - DNA, 26 bp, Artificial sequence
  SiRNA target sequence
aaaatatttatgtccgttaaaatttt

SEQ ID NO: 46952 - DNA, 26 bp, Artificial sequence
  SiRNA target sequence
aaatatttatgtccgttaaaattttt

SEQ ID NO: 46953 - DNA, 26 bp, Artificial sequence
  SiRNA target sequence
aatatttatgtccgttaaaatttttt

SEQ ID NO: 46954 - DNA, 26 bp, Artificial sequence
  SiRNA target sequence
atatttatgtccgttaaaattttttt

SEQ ID NO: 46955 - DNA, 26 bp, Artificial sequence
  SiRNA target sequence
tatttatgtccgttaaaatttttttg

SEQ ID NO: 46956 - DNA, 26 bp, Artificial sequence
  SiRNA target sequence
atttatgtccgttaaaatttttttgg

SEQ ID NO: 46957 - DNA, 26 bp, Artificial sequence
  SiRNA target sequence
tttatgtccgttaaaatttttttgga

SEQ ID NO: 46958 - DNA, 26 bp, Artificial sequence
  SiRNA target sequence
ttatgtccgttaaaatttttttggag

SEQ ID NO: 46959 - DNA, 26 bp, Artificial sequence
  SiRNA target sequence
tatgtccgttaaaatttttttggagt

SEQ ID NO: 46960 - DNA, 26 bp, Artificial sequence
  SiRNA target sequence
atgtccgttaaaatttttttggagta

SEQ ID NO: 46961 - DNA, 26 bp, Artificial sequence
  SiRNA target sequence
tgtccgttaaaatttttttggagtaa

SEQ ID NO: 46962 - DNA, 26 bp, Artificial sequence
  SiRNA target sequence
gtccgttaaaatttttttggagtaat

SEQ ID NO: 46963 - DNA, 26 bp, Artificial sequence
  SiRNA target sequence
tccgttaaaatttttttggagtaata

SEQ ID NO: 46964 - DNA, 26 bp, Artificial sequence
  SiRNA target sequence
ccgttaaaatttttttggagtaataa

SEQ ID NO: 46965 - DNA, 26 bp, Artificial sequence
  SiRNA target sequence
cgttaaaatttttttggagtaataat

SEQ ID NO: 46966 - DNA, 26 bp, Artificial sequence
  SiRNA target sequence
gttaaaatttttttggagtaataatt

SEQ ID NO: 46967 - DNA, 26 bp, Artificial sequence
  SiRNA target sequence
ttaaaatttttttggagtaataatta

SEQ ID NO: 46968 - DNA, 26 bp, Artificial sequence
  SiRNA target sequence
taaaatttttttggagtaataattaa

SEQ ID NO: 46969 - DNA, 26 bp, Artificial sequence
  SiRNA target sequence
aaaatttttttggagtaataattaaa

SEQ ID NO: 46970 - DNA, 26 bp, Artificial sequence
  SiRNA target sequence
aaatttttttggagtaataattaaat

SEQ ID NO: 46971 - DNA, 26 bp, Artificial sequence
  SiRNA target sequence
aatttttttggagtaataattaaatg

SEQ ID NO: 46972 - DNA, 26 bp, Artificial sequence
  SiRNA target sequence
atttttttggagtaataattaaatga

SEQ ID NO: 46973 - DNA, 26 bp, Artificial sequence
  SiRNA target sequence
tttttttggagtaataattaaatgat

SEQ ID NO: 46974 - DNA, 26 bp, Artificial sequence
  SiRNA target sequence
ttttttggagtaataattaaatgatg

SEQ ID NO: 46975 - DNA, 26 bp, Artificial sequence
  SiRNA target sequence
tttttggagtaataattaaatgatgc

SEQ ID NO: 46976 - DNA, 26 bp, Artificial sequence
  SiRNA target sequence
ttttggagtaataattaaatgatgca

SEQ ID NO: 46977 - DNA, 26 bp, Artificial sequence
  SiRNA target sequence
tttggagtaataattaaatgatgcat

SEQ ID NO: 46978 - DNA, 26 bp, Artificial sequence
  SiRNA target sequence
ttggagtaataattaaatgatgcatt

SEQ ID NO: 46979 - DNA, 26 bp, Artificial sequence
  SiRNA target sequence
tggagtaataattaaatgatgcattt

SEQ ID NO: 46980 - DNA, 26 bp, Artificial sequence
  SiRNA target sequence
ggagtaataattaaatgatgcatttt

SEQ ID NO: 46981 - DNA, 26 bp, Artificial sequence
  SiRNA target sequence
gagtaataattaaatgatgcattttc

SEQ ID NO: 46982 - DNA, 26 bp, Artificial sequence
  SiRNA target sequence
agtaataattaaatgatgcattttct

SEQ ID NO: 46983 - DNA, 26 bp, Artificial sequence
  SiRNA target sequence
gtaataattaaatgatgcattttcta

SEQ ID NO: 46984 - DNA, 26 bp, Artificial sequence
  SiRNA target sequence
taataattaaatgatgcattttctaa

SEQ ID NO: 46985 - DNA, 26 bp, Artificial sequence
  SiRNA target sequence
aataattaaatgatgcattttctaat

SEQ ID NO: 46986 - DNA, 26 bp, Artificial sequence
  SiRNA target sequence
ataattaaatgatgcattttctaatc

SEQ ID NO: 46987 - DNA, 26 bp, Artificial sequence
  SiRNA target sequence
taattaaatgatgcattttctaatct

SEQ ID NO: 46988 - DNA, 26 bp, Artificial sequence
  SiRNA target sequence
aattaaatgatgcattttctaatctt

SEQ ID NO: 46989 - DNA, 26 bp, Artificial sequence
  SiRNA target sequence
attaaatgatgcattttctaatctta

SEQ ID NO: 46990 - DNA, 26 bp, Artificial sequence
  SiRNA target sequence
ttaaatgatgcattttctaatcttat

SEQ ID NO: 46991 - DNA, 26 bp, Artificial sequence
  SiRNA target sequence
taaatgatgcattttctaatcttata

SEQ ID NO: 46992 - DNA, 26 bp, Artificial sequence
  SiRNA target sequence
aaatgatgcattttctaatcttatat

SEQ ID NO: 46993 - DNA, 26 bp, Artificial sequence
  SiRNA target sequence
aatgatgcattttctaatcttatatc

SEQ ID NO: 46994 - DNA, 26 bp, Artificial sequence
  SiRNA target sequence
atgatgcattttctaatcttatatca

SEQ ID NO: 46995 - DNA, 26 bp, Artificial sequence
  SiRNA target sequence
tgatgcattttctaatcttatatcat

SEQ ID NO: 46996 - DNA, 26 bp, Artificial sequence
  SiRNA target sequence
gatgcattttctaatcttatatcatt

SEQ ID NO: 46997 - DNA, 26 bp, Artificial sequence
  SiRNA target sequence
atgcattttctaatcttatatcatta

SEQ ID NO: 46998 - DNA, 26 bp, Artificial sequence
  SiRNA target sequence
tgcattttctaatcttatatcattat

SEQ ID NO: 46999 - DNA, 26 bp, Artificial sequence
  SiRNA target sequence
gcattttctaatcttatatcattatt

SEQ ID NO: 47000 - DNA, 26 bp, Artificial sequence
  SiRNA target sequence
cattttctaatcttatatcattatta

SEQ ID NO: 47001 - DNA, 26 bp, Artificial sequence
  SiRNA target sequence
attttctaatcttatatcattattaa

SEQ ID NO: 47002 - DNA, 26 bp, Artificial sequence
  SiRNA target sequence
ttttctaatcttatatcattattaaa

SEQ ID NO: 47003 - DNA, 26 bp, Artificial sequence
  SiRNA target sequence
tttctaatcttatatcattattaaat

SEQ ID NO: 47004 - DNA, 26 bp, Artificial sequence
  SiRNA target sequence
ttctaatcttatatcattattaaatt

SEQ ID NO: 47005 - DNA, 26 bp, Artificial sequence
  SiRNA target sequence
tctaatcttatatcattattaaattc

SEQ ID NO: 47006 - DNA, 26 bp, Artificial sequence
  SiRNA target sequence
ctaatcttatatcattattaaattca

SEQ ID NO: 47007 - DNA, 26 bp, Artificial sequence
  SiRNA target sequence
taatcttatatcattattaaattcat

SEQ ID NO: 47008 - DNA, 26 bp, Artificial sequence
  SiRNA target sequence
aatcttatatcattattaaattcatt

SEQ ID NO: 47009 - DNA, 26 bp, Artificial sequence
  SiRNA target sequence
atcttatatcattattaaattcatta

SEQ ID NO: 47010 - DNA, 26 bp, Artificial sequence
  SiRNA target sequence
tcttatatcattattaaattcattaa

SEQ ID NO: 47011 - DNA, 26 bp, Artificial sequence
  SiRNA target sequence
cttatatcattattaaattcattaac

SEQ ID NO: 47012 - DNA, 26 bp, Artificial sequence
  SiRNA target sequence
ttatatcattattaaattcattaaca

SEQ ID NO: 47013 - DNA, 26 bp, Artificial sequence
  SiRNA target sequence
tatatcattattaaattcattaacat

SEQ ID NO: 47014 - DNA, 26 bp, Artificial sequence
  SiRNA target sequence
atatcattattaaattcattaacatc

SEQ ID NO: 47015 - DNA, 26 bp, Artificial sequence
  SiRNA target sequence
tatcattattaaattcattaacatct

SEQ ID NO: 47016 - DNA, 26 bp, Artificial sequence
  SiRNA target sequence
atcattattaaattcattaacatcta

SEQ ID NO: 47017 - DNA, 26 bp, Artificial sequence
  SiRNA target sequence
tcattattaaattcattaacatctac

SEQ ID NO: 47018 - DNA, 26 bp, Artificial sequence
  SiRNA target sequence
cattattaaattcattaacatctact

SEQ ID NO: 47019 - DNA, 26 bp, Artificial sequence
  SiRNA target sequence
attattaaattcattaacatctacta

SEQ ID NO: 47020 - DNA, 26 bp, Artificial sequence
  SiRNA target sequence
ttattaaattcattaacatctactaa

SEQ ID NO: 47021 - DNA, 26 bp, Artificial sequence
  SiRNA target sequence
tattaaattcattaacatctactaaa

SEQ ID NO: 47022 - DNA, 26 bp, Artificial sequence
  SiRNA target sequence
attaaattcattaacatctactaaat

SEQ ID NO: 47023 - DNA, 26 bp, Artificial sequence
  SiRNA target sequence
ttaaattcattaacatctactaaatt

SEQ ID NO: 47024 - DNA, 26 bp, Artificial sequence
  SiRNA target sequence
taaattcattaacatctactaaattt

SEQ ID NO: 47025 - DNA, 26 bp, Artificial sequence
  SiRNA target sequence
aaattcattaacatctactaaatttg

SEQ ID NO: 47026 - DNA, 26 bp, Artificial sequence
  SiRNA target sequence
aattcattaacatctactaaatttgg

SEQ ID NO: 47027 - DNA, 26 bp, Artificial sequence
  SiRNA target sequence
attcattaacatctactaaatttggt

SEQ ID NO: 47028 - DNA, 26 bp, Artificial sequence
  SiRNA target sequence
ttcattaacatctactaaatttggtt

SEQ ID NO: 47029 - DNA, 26 bp, Artificial sequence
  SiRNA target sequence
tcattaacatctactaaatttggttc

SEQ ID NO: 47030 - DNA, 26 bp, Artificial sequence
  SiRNA target sequence
cattaacatctactaaatttggttct

SEQ ID NO: 47031 - DNA, 26 bp, Artificial sequence
  SiRNA target sequence
attaacatctactaaatttggttctt

SEQ ID NO: 47032 - DNA, 26 bp, Artificial sequence
  SiRNA target sequence
ttaacatctactaaatttggttcttc

SEQ ID NO: 47033 - DNA, 26 bp, Artificial sequence
  SiRNA target sequence
taacatctactaaatttggttcttct

SEQ ID NO: 47034 - DNA, 26 bp, Artificial sequence
  SiRNA target sequence
aacatctactaaatttggttcttctt

SEQ ID NO: 47035 - DNA, 26 bp, Artificial sequence
  SiRNA target sequence
acatctactaaatttggttcttcttt

SEQ ID NO: 47036 - DNA, 26 bp, Artificial sequence
  SiRNA target sequence
catctactaaatttggttcttctttt

SEQ ID NO: 47037 - DNA, 26 bp, Artificial sequence
  SiRNA target sequence
atctactaaatttggttcttctttta

SEQ ID NO: 47038 - DNA, 26 bp, Artificial sequence
  SiRNA target sequence
tctactaaatttggttcttcttttat

SEQ ID NO: 47039 - DNA, 26 bp, Artificial sequence
  SiRNA target sequence
ctactaaatttggttcttcttttata

SEQ ID NO: 47040 - DNA, 26 bp, Artificial sequence
  SiRNA target sequence
tactaaatttggttcttcttttataa

SEQ ID NO: 47041 - DNA, 26 bp, Artificial sequence
  SiRNA target sequence
actaaatttggttcttcttttataag

SEQ ID NO: 47042 - DNA, 26 bp, Artificial sequence
  SiRNA target sequence
ctaaatttggttcttcttttataagc

SEQ ID NO: 47043 - DNA, 26 bp, Artificial sequence
  SiRNA target sequence
taaatttggttcttcttttataagct

SEQ ID NO: 47044 - DNA, 26 bp, Artificial sequence
  SiRNA target sequence
aaatttggttcttcttttataagctc

SEQ ID NO: 47045 - DNA, 26 bp, Artificial sequence
  SiRNA target sequence
aatttggttcttcttttataagctct

SEQ ID NO: 47046 - DNA, 26 bp, Artificial sequence
  SiRNA target sequence
atttggttcttcttttataagctctg

SEQ ID NO: 47047 - DNA, 26 bp, Artificial sequence
  SiRNA target sequence
tttggttcttcttttataagctctgg

SEQ ID NO: 47048 - DNA, 26 bp, Artificial sequence
  SiRNA target sequence
ttggttcttcttttataagctctggt

SEQ ID NO: 47049 - DNA, 26 bp, Artificial sequence
  SiRNA target sequence
tggttcttcttttataagctctggtt

SEQ ID NO: 47050 - DNA, 26 bp, Artificial sequence
  SiRNA target sequence
ggttcttcttttataagctctggttt

SEQ ID NO: 47051 - DNA, 26 bp, Artificial sequence
  SiRNA target sequence
gttcttcttttataagctctggttta

SEQ ID NO: 47052 - DNA, 26 bp, Artificial sequence
  SiRNA target sequence
ttcttcttttataagctctggtttaa

SEQ ID NO: 47053 - DNA, 26 bp, Artificial sequence
  SiRNA target sequence
tcttcttttataagctctggtttaaa

SEQ ID NO: 47054 - DNA, 26 bp, Artificial sequence
  SiRNA target sequence
cttcttttataagctctggtttaaaa

SEQ ID NO: 47055 - DNA, 26 bp, Artificial sequence
  SiRNA target sequence
ttcttttataagctctggtttaaaag

SEQ ID NO: 47056 - DNA, 26 bp, Artificial sequence
  SiRNA target sequence
tcttttataagctctggtttaaaaga

SEQ ID NO: 47057 - DNA, 26 bp, Artificial sequence
  SiRNA target sequence
cttttataagctctggtttaaaagat

SEQ ID NO: 47058 - DNA, 26 bp, Artificial sequence
  SiRNA target sequence
ttttataagctctggtttaaaagatg

SEQ ID NO: 47059 - DNA, 26 bp, Artificial sequence
  SiRNA target sequence
tttataagctctggtttaaaagatgt

SEQ ID NO: 47060 - DNA, 26 bp, Artificial sequence
  SiRNA target sequence
ttataagctctggtttaaaagatgtt

SEQ ID NO: 47061 - DNA, 26 bp, Artificial sequence
  SiRNA target sequence
tataagctctggtttaaaagatgttc

SEQ ID NO: 47062 - DNA, 26 bp, Artificial sequence
  SiRNA target sequence
ataagctctggtttaaaagatgttct

SEQ ID NO: 47063 - DNA, 26 bp, Artificial sequence
  SiRNA target sequence
taagctctggtttaaaagatgttctt

SEQ ID NO: 47064 - DNA, 26 bp, Artificial sequence
  SiRNA target sequence
aagctctggtttaaaagatgttctta

SEQ ID NO: 47065 - DNA, 26 bp, Artificial sequence
  SiRNA target sequence
agctctggtttaaaagatgttcttat

SEQ ID NO: 47066 - DNA, 26 bp, Artificial sequence
  SiRNA target sequence
gctctggtttaaaagatgttcttata

SEQ ID NO: 47067 - DNA, 26 bp, Artificial sequence
  SiRNA target sequence
ctctggtttaaaagatgttcttatat

SEQ ID NO: 47068 - DNA, 26 bp, Artificial sequence
  SiRNA target sequence
tctggtttaaaagatgttcttatatt

SEQ ID NO: 47069 - DNA, 26 bp, Artificial sequence
  SiRNA target sequence
ctggtttaaaagatgttcttatattt

SEQ ID NO: 47070 - DNA, 26 bp, Artificial sequence
  SiRNA target sequence
tggtttaaaagatgttcttatattta

SEQ ID NO: 47071 - DNA, 26 bp, Artificial sequence
  SiRNA target sequence
ggtttaaaagatgttcttatatttaa

SEQ ID NO: 47072 - DNA, 26 bp, Artificial sequence
  SiRNA target sequence
gtttaaaagatgttcttatatttaag

SEQ ID NO: 47073 - DNA, 26 bp, Artificial sequence
  SiRNA target sequence
tttaaaagatgttcttatatttaaga

SEQ ID NO: 47074 - DNA, 26 bp, Artificial sequence
  SiRNA target sequence
ttaaaagatgttcttatatttaagat

SEQ ID NO: 47075 - DNA, 26 bp, Artificial sequence
  SiRNA target sequence
taaaagatgttcttatatttaagatt

SEQ ID NO: 47076 - DNA, 26 bp, Artificial sequence
  SiRNA target sequence
aaaagatgttcttatatttaagattg

SEQ ID NO: 47077 - DNA, 26 bp, Artificial sequence
  SiRNA target sequence
aaagatgttcttatatttaagattgc

SEQ ID NO: 47078 - DNA, 26 bp, Artificial sequence
  SiRNA target sequence
aagatgttcttatatttaagattgct

SEQ ID NO: 47079 - DNA, 26 bp, Artificial sequence
  SiRNA target sequence
agatgttcttatatttaagattgctt

SEQ ID NO: 47080 - DNA, 26 bp, Artificial sequence
  SiRNA target sequence
gatgttcttatatttaagattgcttg

SEQ ID NO: 47081 - DNA, 26 bp, Artificial sequence
  SiRNA target sequence
atgttcttatatttaagattgcttgt

SEQ ID NO: 47082 - DNA, 26 bp, Artificial sequence
  SiRNA target sequence
tgttcttatatttaagattgcttgtg

SEQ ID NO: 47083 - DNA, 26 bp, Artificial sequence
  SiRNA target sequence
gttcttatatttaagattgcttgtgt

SEQ ID NO: 47084 - DNA, 26 bp, Artificial sequence
  SiRNA target sequence
ttcttatatttaagattgcttgtgta

SEQ ID NO: 47085 - DNA, 26 bp, Artificial sequence
  SiRNA target sequence
tcttatatttaagattgcttgtgtat

SEQ ID NO: 47086 - DNA, 26 bp, Artificial sequence
  SiRNA target sequence
cttatatttaagattgcttgtgtata

SEQ ID NO: 47087 - DNA, 26 bp, Artificial sequence
  SiRNA target sequence
ttatatttaagattgcttgtgtatat

SEQ ID NO: 47088 - DNA, 26 bp, Artificial sequence
  SiRNA target sequence
tatatttaagattgcttgtgtatatc

SEQ ID NO: 47089 - DNA, 26 bp, Artificial sequence
  SiRNA target sequence
atatttaagattgcttgtgtatatcg

SEQ ID NO: 47090 - DNA, 26 bp, Artificial sequence
  SiRNA target sequence
tatttaagattgcttgtgtatatcgt

SEQ ID NO: 47091 - DNA, 26 bp, Artificial sequence
  SiRNA target sequence
atttaagattgcttgtgtatatcgtg

SEQ ID NO: 47092 - DNA, 26 bp, Artificial sequence
  SiRNA target sequence
tttaagattgcttgtgtatatcgtga

SEQ ID NO: 47093 - DNA, 26 bp, Artificial sequence
  SiRNA target sequence
ttaagattgcttgtgtatatcgtgag

SEQ ID NO: 47094 - DNA, 26 bp, Artificial sequence
  SiRNA target sequence
taagattgcttgtgtatatcgtgagt

SEQ ID NO: 47095 - DNA, 26 bp, Artificial sequence
  SiRNA target sequence
aagattgcttgtgtatatcgtgagta

SEQ ID NO: 47096 - DNA, 26 bp, Artificial sequence
  SiRNA target sequence
agattgcttgtgtatatcgtgagtaa

SEQ ID NO: 47097 - DNA, 26 bp, Artificial sequence
  SiRNA target sequence
gattgcttgtgtatatcgtgagtaaa

SEQ ID NO: 47098 - DNA, 26 bp, Artificial sequence
  SiRNA target sequence
attgcttgtgtatatcgtgagtaaaa

SEQ ID NO: 47099 - DNA, 26 bp, Artificial sequence
  SiRNA target sequence
ttgcttgtgtatatcgtgagtaaaag

SEQ ID NO: 47100 - DNA, 26 bp, Artificial sequence
  SiRNA target sequence
tgcttgtgtatatcgtgagtaaaaga

SEQ ID NO: 47101 - DNA, 26 bp, Artificial sequence
  SiRNA target sequence
gcttgtgtatatcgtgagtaaaagaa

SEQ ID NO: 47102 - DNA, 26 bp, Artificial sequence
  SiRNA target sequence
cttgtgtatatcgtgagtaaaagaac

SEQ ID NO: 47103 - DNA, 26 bp, Artificial sequence
  SiRNA target sequence
ttgtgtatatcgtgagtaaaagaacc

SEQ ID NO: 47104 - DNA, 26 bp, Artificial sequence
  SiRNA target sequence
tgtgtatatcgtgagtaaaagaaccc

SEQ ID NO: 47105 - DNA, 26 bp, Artificial sequence
  SiRNA target sequence
gtgtatatcgtgagtaaaagaaccct

SEQ ID NO: 47106 - DNA, 26 bp, Artificial sequence
  SiRNA target sequence
tgtatatcgtgagtaaaagaacccta

SEQ ID NO: 47107 - DNA, 26 bp, Artificial sequence
  SiRNA target sequence
gtatatcgtgagtaaaagaaccctaa

SEQ ID NO: 47108 - DNA, 26 bp, Artificial sequence
  SiRNA target sequence
tatatcgtgagtaaaagaaccctaat

SEQ ID NO: 47109 - DNA, 26 bp, Artificial sequence
  SiRNA target sequence
atatcgtgagtaaaagaaccctaatt

SEQ ID NO: 47110 - DNA, 26 bp, Artificial sequence
  SiRNA target sequence
tatcgtgagtaaaagaaccctaattg

SEQ ID NO: 47111 - DNA, 26 bp, Artificial sequence
  SiRNA target sequence
atcgtgagtaaaagaaccctaattgt

SEQ ID NO: 47112 - DNA, 26 bp, Artificial sequence
  SiRNA target sequence
tcgtgagtaaaagaaccctaattgtc

SEQ ID NO: 47113 - DNA, 26 bp, Artificial sequence
  SiRNA target sequence
cgtgagtaaaagaaccctaattgtcc

SEQ ID NO: 47114 - DNA, 26 bp, Artificial sequence
  SiRNA target sequence
gtgagtaaaagaaccctaattgtcca

SEQ ID NO: 47115 - DNA, 26 bp, Artificial sequence
  SiRNA target sequence
tgagtaaaagaaccctaattgtccaa

SEQ ID NO: 47116 - DNA, 26 bp, Artificial sequence
  SiRNA target sequence
gagtaaaagaaccctaattgtccaaa

SEQ ID NO: 47117 - DNA, 26 bp, Artificial sequence
  SiRNA target sequence
agtaaaagaaccctaattgtccaaaa

SEQ ID NO: 47118 - DNA, 26 bp, Artificial sequence
  SiRNA target sequence
gtaaaagaaccctaattgtccaaaac

SEQ ID NO: 47119 - DNA, 26 bp, Artificial sequence
  SiRNA target sequence
taaaagaaccctaattgtccaaaact

SEQ ID NO: 47120 - DNA, 26 bp, Artificial sequence
  SiRNA target sequence
aaaagaaccctaattgtccaaaactt

SEQ ID NO: 47121 - DNA, 26 bp, Artificial sequence
  SiRNA target sequence
aaagaaccctaattgtccaaaacttg

SEQ ID NO: 47122 - DNA, 26 bp, Artificial sequence
  SiRNA target sequence
aagaaccctaattgtccaaaacttga

SEQ ID NO: 47123 - DNA, 26 bp, Artificial sequence
  SiRNA target sequence
agaaccctaattgtccaaaacttgaa

SEQ ID NO: 47124 - DNA, 26 bp, Artificial sequence
  SiRNA target sequence
gaaccctaattgtccaaaacttgaat

SEQ ID NO: 47125 - DNA, 26 bp, Artificial sequence
  SiRNA target sequence
aaccctaattgtccaaaacttgaata

SEQ ID NO: 47126 - DNA, 26 bp, Artificial sequence
  SiRNA target sequence
accctaattgtccaaaacttgaatac

SEQ ID NO: 47127 - DNA, 26 bp, Artificial sequence
  SiRNA target sequence
ccctaattgtccaaaacttgaataca

SEQ ID NO: 47128 - DNA, 26 bp, Artificial sequence
  SiRNA target sequence
cctaattgtccaaaacttgaatacaa

SEQ ID NO: 47129 - DNA, 26 bp, Artificial sequence
  SiRNA target sequence
ctaattgtccaaaacttgaatacaat

SEQ ID NO: 47130 - DNA, 26 bp, Artificial sequence
  SiRNA target sequence
taattgtccaaaacttgaatacaatg

SEQ ID NO: 47131 - DNA, 26 bp, Artificial sequence
  SiRNA target sequence
aattgtccaaaacttgaatacaatgt

SEQ ID NO: 47132 - DNA, 26 bp, Artificial sequence
  SiRNA target sequence
attgtccaaaacttgaatacaatgtt

SEQ ID NO: 47133 - DNA, 26 bp, Artificial sequence
  SiRNA target sequence
ttgtccaaaacttgaatacaatgttc

SEQ ID NO: 47134 - DNA, 26 bp, Artificial sequence
  SiRNA target sequence
tgtccaaaacttgaatacaatgttct

SEQ ID NO: 47135 - DNA, 26 bp, Artificial sequence
  SiRNA target sequence
gtccaaaacttgaatacaatgttcta

SEQ ID NO: 47136 - DNA, 26 bp, Artificial sequence
  SiRNA target sequence
tccaaaacttgaatacaatgttctat

SEQ ID NO: 47137 - DNA, 26 bp, Artificial sequence
  SiRNA target sequence
ccaaaacttgaatacaatgttctatt

SEQ ID NO: 47138 - DNA, 26 bp, Artificial sequence
  SiRNA target sequence
caaaacttgaatacaatgttctatta

SEQ ID NO: 47139 - DNA, 26 bp, Artificial sequence
  SiRNA target sequence
aaaacttgaatacaatgttctattaa

SEQ ID NO: 47140 - DNA, 26 bp, Artificial sequence
  SiRNA target sequence
aaacttgaatacaatgttctattaat

SEQ ID NO: 47141 - DNA, 26 bp, Artificial sequence
  SiRNA target sequence
aacttgaatacaatgttctattaatg

SEQ ID NO: 47142 - DNA, 26 bp, Artificial sequence
  SiRNA target sequence
acttgaatacaatgttctattaatgc

SEQ ID NO: 47143 - DNA, 26 bp, Artificial sequence
  SiRNA target sequence
cttgaatacaatgttctattaatgcc

SEQ ID NO: 47144 - DNA, 26 bp, Artificial sequence
  SiRNA target sequence
ttgaatacaatgttctattaatgcca

SEQ ID NO: 47145 - DNA, 26 bp, Artificial sequence
  SiRNA target sequence
tgaatacaatgttctattaatgccaa

SEQ ID NO: 47146 - DNA, 26 bp, Artificial sequence
  SiRNA target sequence
gaatacaatgttctattaatgccaat

SEQ ID NO: 47147 - DNA, 26 bp, Artificial sequence
  SiRNA target sequence
aatacaatgttctattaatgccaata

SEQ ID NO: 47148 - DNA, 26 bp, Artificial sequence
  SiRNA target sequence
atacaatgttctattaatgccaatat

SEQ ID NO: 47149 - DNA, 26 bp, Artificial sequence
  SiRNA target sequence
tacaatgttctattaatgccaatata

SEQ ID NO: 47150 - DNA, 26 bp, Artificial sequence
  SiRNA target sequence
acaatgttctattaatgccaatataa

SEQ ID NO: 47151 - DNA, 26 bp, Artificial sequence
  SiRNA target sequence
caatgttctattaatgccaatataaa

SEQ ID NO: 47152 - DNA, 26 bp, Artificial sequence
  SiRNA target sequence
aatgttctattaatgccaatataaaa

SEQ ID NO: 47153 - DNA, 26 bp, Artificial sequence
  SiRNA target sequence
atgttctattaatgccaatataaaat

SEQ ID NO: 47154 - DNA, 26 bp, Artificial sequence
  SiRNA target sequence
tgttctattaatgccaatataaaata

SEQ ID NO: 47155 - DNA, 26 bp, Artificial sequence
  SiRNA target sequence
gttctattaatgccaatataaaatac

SEQ ID NO: 47156 - DNA, 26 bp, Artificial sequence
  SiRNA target sequence
ttctattaatgccaatataaaataca

SEQ ID NO: 47157 - DNA, 26 bp, Artificial sequence
  SiRNA target sequence
tctattaatgccaatataaaatacaa

SEQ ID NO: 47158 - DNA, 26 bp, Artificial sequence
  SiRNA target sequence
ctattaatgccaatataaaatacaac

SEQ ID NO: 47159 - DNA, 26 bp, Artificial sequence
  SiRNA target sequence
tattaatgccaatataaaatacaaca

SEQ ID NO: 47160 - DNA, 26 bp, Artificial sequence
  SiRNA target sequence
attaatgccaatataaaatacaacat

SEQ ID NO: 47161 - DNA, 26 bp, Artificial sequence
  SiRNA target sequence
ttaatgccaatataaaatacaacatc

SEQ ID NO: 47162 - DNA, 26 bp, Artificial sequence
  SiRNA target sequence
taatgccaatataaaatacaacatcc

SEQ ID NO: 47163 - DNA, 26 bp, Artificial sequence
  SiRNA target sequence
aatgccaatataaaatacaacatccc

SEQ ID NO: 47164 - DNA, 26 bp, Artificial sequence
  SiRNA target sequence
atgccaatataaaatacaacatccct

SEQ ID NO: 47165 - DNA, 26 bp, Artificial sequence
  SiRNA target sequence
tgccaatataaaatacaacatccctg

SEQ ID NO: 47166 - DNA, 26 bp, Artificial sequence
  SiRNA target sequence
gccaatataaaatacaacatccctgg

SEQ ID NO: 47167 - DNA, 26 bp, Artificial sequence
  SiRNA target sequence
ccaatataaaatacaacatccctggc

SEQ ID NO: 47168 - DNA, 26 bp, Artificial sequence
  SiRNA target sequence
caatataaaatacaacatccctggca

SEQ ID NO: 47169 - DNA, 26 bp, Artificial sequence
  SiRNA target sequence
aatataaaatacaacatccctggcac

SEQ ID NO: 47170 - DNA, 26 bp, Artificial sequence
  SiRNA target sequence
atataaaatacaacatccctggcact

SEQ ID NO: 47171 - DNA, 26 bp, Artificial sequence
  SiRNA target sequence
tataaaatacaacatccctggcactt

SEQ ID NO: 47172 - DNA, 26 bp, Artificial sequence
  SiRNA target sequence
ataaaatacaacatccctggcactta

SEQ ID NO: 47173 - DNA, 26 bp, Artificial sequence
  SiRNA target sequence
taaaatacaacatccctggcacttag

SEQ ID NO: 47174 - DNA, 26 bp, Artificial sequence
  SiRNA target sequence
aaaatacaacatccctggcacttagt

SEQ ID NO: 47175 - DNA, 26 bp, Artificial sequence
  SiRNA target sequence
aaatacaacatccctggcacttagtt

SEQ ID NO: 47176 - DNA, 26 bp, Artificial sequence
  SiRNA target sequence
aatacaacatccctggcacttagttt

SEQ ID NO: 47177 - DNA, 26 bp, Artificial sequence
  SiRNA target sequence
atacaacatccctggcacttagtttt

SEQ ID NO: 47178 - DNA, 26 bp, Artificial sequence
  SiRNA target sequence
tacaacatccctggcacttagttttg

SEQ ID NO: 47179 - DNA, 26 bp, Artificial sequence
  SiRNA target sequence
acaacatccctggcacttagttttgc

SEQ ID NO: 47180 - DNA, 26 bp, Artificial sequence
  SiRNA target sequence
caacatccctggcacttagttttgct

SEQ ID NO: 47181 - DNA, 26 bp, Artificial sequence
  SiRNA target sequence
aacatccctggcacttagttttgctg

SEQ ID NO: 47182 - DNA, 26 bp, Artificial sequence
  SiRNA target sequence
acatccctggcacttagttttgctgt

SEQ ID NO: 47183 - DNA, 26 bp, Artificial sequence
  SiRNA target sequence
catccctggcacttagttttgctgtt

SEQ ID NO: 47184 - DNA, 26 bp, Artificial sequence
  SiRNA target sequence
atccctggcacttagttttgctgtta

SEQ ID NO: 47185 - DNA, 26 bp, Artificial sequence
  SiRNA target sequence
tccctggcacttagttttgctgttaa

SEQ ID NO: 47186 - DNA, 26 bp, Artificial sequence
  SiRNA target sequence
ccctggcacttagttttgctgttaat

SEQ ID NO: 47187 - DNA, 26 bp, Artificial sequence
  SiRNA target sequence
cctggcacttagttttgctgttaata

SEQ ID NO: 47188 - DNA, 26 bp, Artificial sequence
  SiRNA target sequence
ctggcacttagttttgctgttaatat

SEQ ID NO: 47189 - DNA, 26 bp, Artificial sequence
  SiRNA target sequence
tggcacttagttttgctgttaatatt

SEQ ID NO: 47190 - DNA, 26 bp, Artificial sequence
  SiRNA target sequence
ggcacttagttttgctgttaatattc

SEQ ID NO: 47191 - DNA, 26 bp, Artificial sequence
  SiRNA target sequence
gcacttagttttgctgttaatattcc

SEQ ID NO: 47192 - DNA, 26 bp, Artificial sequence
  SiRNA target sequence
cacttagttttgctgttaatattcca

SEQ ID NO: 47193 - DNA, 26 bp, Artificial sequence
  SiRNA target sequence
acttagttttgctgttaatattccat

SEQ ID NO: 47194 - DNA, 26 bp, Artificial sequence
  SiRNA target sequence
cttagttttgctgttaatattccata

SEQ ID NO: 47195 - DNA, 26 bp, Artificial sequence
  SiRNA target sequence
ttagttttgctgttaatattccatag

SEQ ID NO: 47196 - DNA, 26 bp, Artificial sequence
  SiRNA target sequence
tagttttgctgttaatattccatagt

SEQ ID NO: 47197 - DNA, 26 bp, Artificial sequence
  SiRNA target sequence
agttttgctgttaatattccatagtt

SEQ ID NO: 47198 - DNA, 26 bp, Artificial sequence
  SiRNA target sequence
gttttgctgttaatattccatagttt

SEQ ID NO: 47199 - DNA, 26 bp, Artificial sequence
  SiRNA target sequence
ttttgctgttaatattccatagtttc

SEQ ID NO: 47200 - DNA, 26 bp, Artificial sequence
  SiRNA target sequence
tttgctgttaatattccatagtttcc

SEQ ID NO: 47201 - DNA, 26 bp, Artificial sequence
  SiRNA target sequence
ttgctgttaatattccatagtttcct

SEQ ID NO: 47202 - DNA, 26 bp, Artificial sequence
  SiRNA target sequence
tgctgttaatattccatagtttccta

SEQ ID NO: 47203 - DNA, 26 bp, Artificial sequence
  SiRNA target sequence
gctgttaatattccatagtttcctaa

SEQ ID NO: 47204 - DNA, 26 bp, Artificial sequence
  SiRNA target sequence
ctgttaatattccatagtttcctaat

SEQ ID NO: 47205 - DNA, 26 bp, Artificial sequence
  SiRNA target sequence
tgttaatattccatagtttcctaatg

SEQ ID NO: 47206 - DNA, 26 bp, Artificial sequence
  SiRNA target sequence
gttaatattccatagtttcctaatgt

SEQ ID NO: 47207 - DNA, 26 bp, Artificial sequence
  SiRNA target sequence
ttaatattccatagtttcctaatgtt

SEQ ID NO: 47208 - DNA, 26 bp, Artificial sequence
  SiRNA target sequence
taatattccatagtttcctaatgtta

SEQ ID NO: 47209 - DNA, 26 bp, Artificial sequence
  SiRNA target sequence
aatattccatagtttcctaatgttat

SEQ ID NO: 47210 - DNA, 26 bp, Artificial sequence
  SiRNA target sequence
atattccatagtttcctaatgttata

SEQ ID NO: 47211 - DNA, 26 bp, Artificial sequence
  SiRNA target sequence
tattccatagtttcctaatgttataa

SEQ ID NO: 47212 - DNA, 26 bp, Artificial sequence
  SiRNA target sequence
attccatagtttcctaatgttataac

SEQ ID NO: 47213 - DNA, 26 bp, Artificial sequence
  SiRNA target sequence
ttccatagtttcctaatgttataact

SEQ ID NO: 47214 - DNA, 26 bp, Artificial sequence
  SiRNA target sequence
tccatagtttcctaatgttataacta

SEQ ID NO: 47215 - DNA, 26 bp, Artificial sequence
  SiRNA target sequence
ccatagtttcctaatgttataactat

SEQ ID NO: 47216 - DNA, 26 bp, Artificial sequence
  SiRNA target sequence
catagtttcctaatgttataactata

SEQ ID NO: 47217 - DNA, 26 bp, Artificial sequence
  SiRNA target sequence
atagtttcctaatgttataactataa

SEQ ID NO: 47218 - DNA, 26 bp, Artificial sequence
  SiRNA target sequence
tagtttcctaatgttataactataaa

SEQ ID NO: 47219 - DNA, 26 bp, Artificial sequence
  SiRNA target sequence
agtttcctaatgttataactataaaa

SEQ ID NO: 47220 - DNA, 26 bp, Artificial sequence
  SiRNA target sequence
gtttcctaatgttataactataaaac

SEQ ID NO: 47221 - DNA, 26 bp, Artificial sequence
  SiRNA target sequence
tttcctaatgttataactataaaaca

SEQ ID NO: 47222 - DNA, 26 bp, Artificial sequence
  SiRNA target sequence
ttcctaatgttataactataaaacac

SEQ ID NO: 47223 - DNA, 26 bp, Artificial sequence
  SiRNA target sequence
tcctaatgttataactataaaacact

SEQ ID NO: 47224 - DNA, 26 bp, Artificial sequence
  SiRNA target sequence
cctaatgttataactataaaacactg

SEQ ID NO: 47225 - DNA, 26 bp, Artificial sequence
  SiRNA target sequence
ctaatgttataactataaaacactgt

SEQ ID NO: 47226 - DNA, 26 bp, Artificial sequence
  SiRNA target sequence
taatgttataactataaaacactgta

SEQ ID NO: 47227 - DNA, 26 bp, Artificial sequence
  SiRNA target sequence
aatgttataactataaaacactgtaa

SEQ ID NO: 47228 - DNA, 26 bp, Artificial sequence
  SiRNA target sequence
atgttataactataaaacactgtaaa

SEQ ID NO: 47229 - DNA, 26 bp, Artificial sequence
  SiRNA target sequence
tgttataactataaaacactgtaaag

SEQ ID NO: 47230 - DNA, 26 bp, Artificial sequence
  SiRNA target sequence
gttataactataaaacactgtaaagc

SEQ ID NO: 47231 - DNA, 26 bp, Artificial sequence
  SiRNA target sequence
ttataactataaaacactgtaaagca

SEQ ID NO: 47232 - DNA, 26 bp, Artificial sequence
  SiRNA target sequence
tataactataaaacactgtaaagcaa

SEQ ID NO: 47233 - DNA, 26 bp, Artificial sequence
  SiRNA target sequence
ataactataaaacactgtaaagcaaa

SEQ ID NO: 47234 - DNA, 26 bp, Artificial sequence
  SiRNA target sequence
taactataaaacactgtaaagcaaaa

SEQ ID NO: 47235 - DNA, 26 bp, Artificial sequence
  SiRNA target sequence
aactataaaacactgtaaagcaaaaa

SEQ ID NO: 47236 - DNA, 26 bp, Artificial sequence
  SiRNA target sequence
actataaaacactgtaaagcaaaaat

SEQ ID NO: 47237 - DNA, 26 bp, Artificial sequence
  SiRNA target sequence
ctataaaacactgtaaagcaaaaatt

SEQ ID NO: 47238 - DNA, 26 bp, Artificial sequence
  SiRNA target sequence
tataaaacactgtaaagcaaaaatta

SEQ ID NO: 47239 - DNA, 26 bp, Artificial sequence
  SiRNA target sequence
ataaaacactgtaaagcaaaaattat

SEQ ID NO: 47240 - DNA, 26 bp, Artificial sequence
  SiRNA target sequence
taaaacactgtaaagcaaaaattatc

SEQ ID NO: 47241 - DNA, 26 bp, Artificial sequence
  SiRNA target sequence
aaaacactgtaaagcaaaaattatct

SEQ ID NO: 47242 - DNA, 26 bp, Artificial sequence
  SiRNA target sequence
aaacactgtaaagcaaaaattatctt

SEQ ID NO: 47243 - DNA, 26 bp, Artificial sequence
  SiRNA target sequence
aacactgtaaagcaaaaattatctta

SEQ ID NO: 47244 - DNA, 26 bp, Artificial sequence
  SiRNA target sequence
acactgtaaagcaaaaattatcttat

SEQ ID NO: 47245 - DNA, 26 bp, Artificial sequence
  SiRNA target sequence
cactgtaaagcaaaaattatcttatt

SEQ ID NO: 47246 - DNA, 26 bp, Artificial sequence
  SiRNA target sequence
actgtaaagcaaaaattatcttattt

SEQ ID NO: 47247 - DNA, 26 bp, Artificial sequence
  SiRNA target sequence
ctgtaaagcaaaaattatcttattta

SEQ ID NO: 47248 - DNA, 26 bp, Artificial sequence
  SiRNA target sequence
tgtaaagcaaaaattatcttatttac

SEQ ID NO: 47249 - DNA, 26 bp, Artificial sequence
  SiRNA target sequence
gtaaagcaaaaattatcttatttaca

SEQ ID NO: 47250 - DNA, 26 bp, Artificial sequence
  SiRNA target sequence
taaagcaaaaattatcttatttacaa

SEQ ID NO: 47251 - DNA, 26 bp, Artificial sequence
  SiRNA target sequence
aaagcaaaaattatcttatttacaag

SEQ ID NO: 47252 - DNA, 26 bp, Artificial sequence
  SiRNA target sequence
aagcaaaaattatcttatttacaagg

SEQ ID NO: 47253 - DNA, 26 bp, Artificial sequence
  SiRNA target sequence
agcaaaaattatcttatttacaaggt

SEQ ID NO: 47254 - DNA, 26 bp, Artificial sequence
  SiRNA target sequence
gcaaaaattatcttatttacaaggta

SEQ ID NO: 47255 - DNA, 26 bp, Artificial sequence
  SiRNA target sequence
caaaaattatcttatttacaaggtat

SEQ ID NO: 47256 - DNA, 26 bp, Artificial sequence
  SiRNA target sequence
aaaaattatcttatttacaaggtata

SEQ ID NO: 47257 - DNA, 26 bp, Artificial sequence
  SiRNA target sequence
aaaattatcttatttacaaggtataa

SEQ ID NO: 47258 - DNA, 26 bp, Artificial sequence
  SiRNA target sequence
aaattatcttatttacaaggtataaa

SEQ ID NO: 47259 - DNA, 26 bp, Artificial sequence
  SiRNA target sequence
aattatcttatttacaaggtataaaa

SEQ ID NO: 47260 - DNA, 26 bp, Artificial sequence
  SiRNA target sequence
attatcttatttacaaggtataaaaa

SEQ ID NO: 47261 - DNA, 26 bp, Artificial sequence
  SiRNA target sequence
ttatcttatttacaaggtataaaaaa

SEQ ID NO: 47262 - DNA, 26 bp, Artificial sequence
  SiRNA target sequence
tatcttatttacaaggtataaaaaac

SEQ ID NO: 47263 - DNA, 26 bp, Artificial sequence
  SiRNA target sequence
atcttatttacaaggtataaaaaact

SEQ ID NO: 47264 - DNA, 26 bp, Artificial sequence
  SiRNA target sequence
tcttatttacaaggtataaaaaacta

SEQ ID NO: 47265 - DNA, 26 bp, Artificial sequence
  SiRNA target sequence
cttatttacaaggtataaaaaactaa

SEQ ID NO: 47266 - DNA, 26 bp, Artificial sequence
  SiRNA target sequence
ttatttacaaggtataaaaaactaag

SEQ ID NO: 47267 - DNA, 26 bp, Artificial sequence
  SiRNA target sequence
tatttacaaggtataaaaaactaaga

SEQ ID NO: 47268 - DNA, 26 bp, Artificial sequence
  SiRNA target sequence
atttacaaggtataaaaaactaagag

SEQ ID NO: 47269 - DNA, 26 bp, Artificial sequence
  SiRNA target sequence
tttacaaggtataaaaaactaagaga

SEQ ID NO: 47270 - DNA, 26 bp, Artificial sequence
  SiRNA target sequence
ttacaaggtataaaaaactaagagat

SEQ ID NO: 47271 - DNA, 26 bp, Artificial sequence
  SiRNA target sequence
tacaaggtataaaaaactaagagatc

SEQ ID NO: 47272 - DNA, 26 bp, Artificial sequence
  SiRNA target sequence
acaaggtataaaaaactaagagatct

SEQ ID NO: 47273 - DNA, 26 bp, Artificial sequence
  SiRNA target sequence
caaggtataaaaaactaagagatctc

SEQ ID NO: 47274 - DNA, 26 bp, Artificial sequence
  SiRNA target sequence
aaggtataaaaaactaagagatctcc

SEQ ID NO: 47275 - DNA, 26 bp, Artificial sequence
  SiRNA target sequence
aggtataaaaaactaagagatctcca

SEQ ID NO: 47276 - DNA, 26 bp, Artificial sequence
  SiRNA target sequence
ggtataaaaaactaagagatctccag

SEQ ID NO: 47277 - DNA, 26 bp, Artificial sequence
  SiRNA target sequence
gtataaaaaactaagagatctccaga

SEQ ID NO: 47278 - DNA, 26 bp, Artificial sequence
  SiRNA target sequence
tataaaaaactaagagatctccagat

SEQ ID NO: 47279 - DNA, 26 bp, Artificial sequence
  SiRNA target sequence
ataaaaaactaagagatctccagatt

SEQ ID NO: 47280 - DNA, 26 bp, Artificial sequence
  SiRNA target sequence
taaaaaactaagagatctccagattc

SEQ ID NO: 47281 - DNA, 26 bp, Artificial sequence
  SiRNA target sequence
aaaaaactaagagatctccagattct

SEQ ID NO: 47282 - DNA, 26 bp, Artificial sequence
  SiRNA target sequence
aaaaactaagagatctccagattctg

SEQ ID NO: 47283 - DNA, 26 bp, Artificial sequence
  SiRNA target sequence
aaaactaagagatctccagattctgt

SEQ ID NO: 47284 - DNA, 26 bp, Artificial sequence
  SiRNA target sequence
aaactaagagatctccagattctgtt

SEQ ID NO: 47285 - DNA, 26 bp, Artificial sequence
  SiRNA target sequence
aactaagagatctccagattctgtta

SEQ ID NO: 47286 - DNA, 26 bp, Artificial sequence
  SiRNA target sequence
actaagagatctccagattctgttac

SEQ ID NO: 47287 - DNA, 26 bp, Artificial sequence
  SiRNA target sequence
ctaagagatctccagattctgttaca

SEQ ID NO: 47288 - DNA, 26 bp, Artificial sequence
  SiRNA target sequence
taagagatctccagattctgttacat

SEQ ID NO: 47289 - DNA, 26 bp, Artificial sequence
  SiRNA target sequence
aagagatctccagattctgttacatt

SEQ ID NO: 47290 - DNA, 26 bp, Artificial sequence
  SiRNA target sequence
agagatctccagattctgttacattc

SEQ ID NO: 47291 - DNA, 26 bp, Artificial sequence
  SiRNA target sequence
gagatctccagattctgttacattcc

SEQ ID NO: 47292 - DNA, 26 bp, Artificial sequence
  SiRNA target sequence
agatctccagattctgttacattccg

SEQ ID NO: 47293 - DNA, 26 bp, Artificial sequence
  SiRNA target sequence
gatctccagattctgttacattccga

SEQ ID NO: 47294 - DNA, 26 bp, Artificial sequence
  SiRNA target sequence
atctccagattctgttacattccgat

SEQ ID NO: 47295 - DNA, 26 bp, Artificial sequence
  SiRNA target sequence
tctccagattctgttacattccgatt

SEQ ID NO: 47296 - DNA, 26 bp, Artificial sequence
  SiRNA target sequence
ctccagattctgttacattccgattc

SEQ ID NO: 47297 - DNA, 26 bp, Artificial sequence
  SiRNA target sequence
tccagattctgttacattccgattct

SEQ ID NO: 47298 - DNA, 26 bp, Artificial sequence
  SiRNA target sequence
ccagattctgttacattccgattcta

SEQ ID NO: 47299 - DNA, 26 bp, Artificial sequence
  SiRNA target sequence
cagattctgttacattccgattctac

SEQ ID NO: 47300 - DNA, 26 bp, Artificial sequence
  SiRNA target sequence
agattctgttacattccgattctact

SEQ ID NO: 47301 - DNA, 26 bp, Artificial sequence
  SiRNA target sequence
gattctgttacattccgattctactt

SEQ ID NO: 47302 - DNA, 26 bp, Artificial sequence
  SiRNA target sequence
attctgttacattccgattctacttc

SEQ ID NO: 47303 - DNA, 26 bp, Artificial sequence
  SiRNA target sequence
ttctgttacattccgattctacttca

SEQ ID NO: 47304 - DNA, 26 bp, Artificial sequence
  SiRNA target sequence
tctgttacattccgattctacttcag

SEQ ID NO: 47305 - DNA, 26 bp, Artificial sequence
  SiRNA target sequence
ctgttacattccgattctacttcaga

SEQ ID NO: 47306 - DNA, 26 bp, Artificial sequence
  SiRNA target sequence
tgttacattccgattctacttcagaa

SEQ ID NO: 47307 - DNA, 26 bp, Artificial sequence
  SiRNA target sequence
gttacattccgattctacttcagaaa

SEQ ID NO: 47308 - DNA, 26 bp, Artificial sequence
  SiRNA target sequence
ttacattccgattctacttcagaaac

SEQ ID NO: 47309 - DNA, 26 bp, Artificial sequence
  SiRNA target sequence
tacattccgattctacttcagaaaca

SEQ ID NO: 47310 - DNA, 26 bp, Artificial sequence
  SiRNA target sequence
acattccgattctacttcagaaacat

SEQ ID NO: 47311 - DNA, 26 bp, Artificial sequence
  SiRNA target sequence
cattccgattctacttcagaaacata

SEQ ID NO: 47312 - DNA, 26 bp, Artificial sequence
  SiRNA target sequence
attccgattctacttcagaaacatat

SEQ ID NO: 47313 - DNA, 26 bp, Artificial sequence
  SiRNA target sequence
ttccgattctacttcagaaacatatt

SEQ ID NO: 47314 - DNA, 26 bp, Artificial sequence
  SiRNA target sequence
tccgattctacttcagaaacatattt

SEQ ID NO: 47315 - DNA, 26 bp, Artificial sequence
  SiRNA target sequence
ccgattctacttcagaaacatatttt

SEQ ID NO: 47316 - DNA, 26 bp, Artificial sequence
  SiRNA target sequence
cgattctacttcagaaacatattttt

SEQ ID NO: 47317 - DNA, 26 bp, Artificial sequence
  SiRNA target sequence
gattctacttcagaaacatatttttc

SEQ ID NO: 47318 - DNA, 26 bp, Artificial sequence
  SiRNA target sequence
attctacttcagaaacatatttttca

SEQ ID NO: 47319 - DNA, 26 bp, Artificial sequence
  SiRNA target sequence
ttctacttcagaaacatatttttcat

SEQ ID NO: 47320 - DNA, 26 bp, Artificial sequence
  SiRNA target sequence
tctacttcagaaacatatttttcata

SEQ ID NO: 47321 - DNA, 26 bp, Artificial sequence
  SiRNA target sequence
ctacttcagaaacatatttttcatat

SEQ ID NO: 47322 - DNA, 26 bp, Artificial sequence
  SiRNA target sequence
tacttcagaaacatatttttcatatt

SEQ ID NO: 47323 - DNA, 26 bp, Artificial sequence
  SiRNA target sequence
acttcagaaacatatttttcatattt

SEQ ID NO: 47324 - DNA, 26 bp, Artificial sequence
  SiRNA target sequence
cttcagaaacatatttttcatattta

SEQ ID NO: 47325 - DNA, 26 bp, Artificial sequence
  SiRNA target sequence
ttcagaaacatatttttcatatttaa

SEQ ID NO: 47326 - DNA, 26 bp, Artificial sequence
  SiRNA target sequence
tcagaaacatatttttcatatttaag

SEQ ID NO: 47327 - DNA, 26 bp, Artificial sequence
  SiRNA target sequence
cagaaacatatttttcatatttaagc

SEQ ID NO: 47328 - DNA, 26 bp, Artificial sequence
  SiRNA target sequence
agaaacatatttttcatatttaagcg

SEQ ID NO: 47329 - DNA, 26 bp, Artificial sequence
  SiRNA target sequence
gaaacatatttttcatatttaagcga

SEQ ID NO: 47330 - DNA, 26 bp, Artificial sequence
  SiRNA target sequence
aaacatatttttcatatttaagcgat

SEQ ID NO: 47331 - DNA, 26 bp, Artificial sequence
  SiRNA target sequence
aacatatttttcatatttaagcgatt

SEQ ID NO: 47332 - DNA, 26 bp, Artificial sequence
  SiRNA target sequence
acatatttttcatatttaagcgattc

SEQ ID NO: 47333 - DNA, 26 bp, Artificial sequence
  SiRNA target sequence
catatttttcatatttaagcgattct

SEQ ID NO: 47334 - DNA, 26 bp, Artificial sequence
  SiRNA target sequence
atatttttcatatttaagcgattctt

SEQ ID NO: 47335 - DNA, 26 bp, Artificial sequence
  SiRNA target sequence
tatttttcatatttaagcgattcttc

SEQ ID NO: 47336 - DNA, 26 bp, Artificial sequence
  SiRNA target sequence
atttttcatatttaagcgattcttct

SEQ ID NO: 47337 - DNA, 26 bp, Artificial sequence
  SiRNA target sequence
tttttcatatttaagcgattcttctt

SEQ ID NO: 47338 - DNA, 26 bp, Artificial sequence
  SiRNA target sequence
ttttcatatttaagcgattcttcttc

SEQ ID NO: 47339 - DNA, 26 bp, Artificial sequence
  SiRNA target sequence
tttcatatttaagcgattcttcttct

SEQ ID NO: 47340 - DNA, 26 bp, Artificial sequence
  SiRNA target sequence
ttcatatttaagcgattcttcttctt

SEQ ID NO: 47341 - DNA, 26 bp, Artificial sequence
  SiRNA target sequence
tcatatttaagcgattcttcttcttc

SEQ ID NO: 47342 - DNA, 26 bp, Artificial sequence
  SiRNA target sequence
catatttaagcgattcttcttcttct

SEQ ID NO: 47343 - DNA, 26 bp, Artificial sequence
  SiRNA target sequence
atatttaagcgattcttcttcttctg

SEQ ID NO: 47344 - DNA, 26 bp, Artificial sequence
  SiRNA target sequence
tatttaagcgattcttcttcttctgt

SEQ ID NO: 47345 - DNA, 26 bp, Artificial sequence
  SiRNA target sequence
atttaagcgattcttcttcttctgtt

SEQ ID NO: 47346 - DNA, 26 bp, Artificial sequence
  SiRNA target sequence
tttaagcgattcttcttcttctgttt

SEQ ID NO: 47347 - DNA, 26 bp, Artificial sequence
  SiRNA target sequence
ttaagcgattcttcttcttctgtttt

SEQ ID NO: 47348 - DNA, 26 bp, Artificial sequence
  SiRNA target sequence
taagcgattcttcttcttctgtttta

SEQ ID NO: 47349 - DNA, 26 bp, Artificial sequence
  SiRNA target sequence
aagcgattcttcttcttctgttttat

SEQ ID NO: 47350 - DNA, 26 bp, Artificial sequence
  SiRNA target sequence
agcgattcttcttcttctgttttata

SEQ ID NO: 47351 - DNA, 26 bp, Artificial sequence
  SiRNA target sequence
gcgattcttcttcttctgttttatat

SEQ ID NO: 47352 - DNA, 26 bp, Artificial sequence
  SiRNA target sequence
cgattcttcttcttctgttttatatg

SEQ ID NO: 47353 - DNA, 26 bp, Artificial sequence
  SiRNA target sequence
gattcttcttcttctgttttatatgc

SEQ ID NO: 47354 - DNA, 26 bp, Artificial sequence
  SiRNA target sequence
attcttcttcttctgttttatatgct

SEQ ID NO: 47355 - DNA, 26 bp, Artificial sequence
  SiRNA target sequence
ttcttcttcttctgttttatatgcta

SEQ ID NO: 47356 - DNA, 26 bp, Artificial sequence
  SiRNA target sequence
tcttcttcttctgttttatatgctag

SEQ ID NO: 47357 - DNA, 26 bp, Artificial sequence
  SiRNA target sequence
cttcttcttctgttttatatgctagt

SEQ ID NO: 47358 - DNA, 26 bp, Artificial sequence
  SiRNA target sequence
ttcttcttctgttttatatgctagta

SEQ ID NO: 47359 - DNA, 26 bp, Artificial sequence
  SiRNA target sequence
tcttcttctgttttatatgctagtat

SEQ ID NO: 47360 - DNA, 26 bp, Artificial sequence
  SiRNA target sequence
cttcttctgttttatatgctagtata

SEQ ID NO: 47361 - DNA, 26 bp, Artificial sequence
  SiRNA target sequence
ttcttctgttttatatgctagtatag

SEQ ID NO: 47362 - DNA, 26 bp, Artificial sequence
  SiRNA target sequence
tcttctgttttatatgctagtatagt

SEQ ID NO: 47363 - DNA, 26 bp, Artificial sequence
  SiRNA target sequence
cttctgttttatatgctagtatagtc

SEQ ID NO: 47364 - DNA, 26 bp, Artificial sequence
  SiRNA target sequence
ttctgttttatatgctagtatagtct

SEQ ID NO: 47365 - DNA, 26 bp, Artificial sequence
  SiRNA target sequence
tctgttttatatgctagtatagtctc

SEQ ID NO: 47366 - DNA, 26 bp, Artificial sequence
  SiRNA target sequence
ctgttttatatgctagtatagtctca

SEQ ID NO: 47367 - DNA, 26 bp, Artificial sequence
  SiRNA target sequence
tgttttatatgctagtatagtctcat

SEQ ID NO: 47368 - DNA, 26 bp, Artificial sequence
  SiRNA target sequence
gttttatatgctagtatagtctcatg

SEQ ID NO: 47369 - DNA, 26 bp, Artificial sequence
  SiRNA target sequence
ttttatatgctagtatagtctcatga

SEQ ID NO: 47370 - DNA, 26 bp, Artificial sequence
  SiRNA target sequence
tttatatgctagtatagtctcatgat

SEQ ID NO: 47371 - DNA, 26 bp, Artificial sequence
  SiRNA target sequence
ttatatgctagtatagtctcatgatt

SEQ ID NO: 47372 - DNA, 26 bp, Artificial sequence
  SiRNA target sequence
tatatgctagtatagtctcatgatta

SEQ ID NO: 47373 - DNA, 26 bp, Artificial sequence
  SiRNA target sequence
atatgctagtatagtctcatgattaa

SEQ ID NO: 47374 - DNA, 26 bp, Artificial sequence
  SiRNA target sequence
tatgctagtatagtctcatgattaat

SEQ ID NO: 47375 - DNA, 26 bp, Artificial sequence
  SiRNA target sequence
atgctagtatagtctcatgattaatt

SEQ ID NO: 47376 - DNA, 26 bp, Artificial sequence
  SiRNA target sequence
tgctagtatagtctcatgattaatta

SEQ ID NO: 47377 - DNA, 26 bp, Artificial sequence
  SiRNA target sequence
gctagtatagtctcatgattaattaa

SEQ ID NO: 47378 - DNA, 26 bp, Artificial sequence
  SiRNA target sequence
ctagtatagtctcatgattaattaaa

SEQ ID NO: 47379 - DNA, 26 bp, Artificial sequence
  SiRNA target sequence
tagtatagtctcatgattaattaaag

SEQ ID NO: 47380 - DNA, 26 bp, Artificial sequence
  SiRNA target sequence
agtatagtctcatgattaattaaaga

SEQ ID NO: 47381 - DNA, 26 bp, Artificial sequence
  SiRNA target sequence
gtatagtctcatgattaattaaagaa

SEQ ID NO: 47382 - DNA, 26 bp, Artificial sequence
  SiRNA target sequence
tatagtctcatgattaattaaagaat

SEQ ID NO: 47383 - DNA, 26 bp, Artificial sequence
  SiRNA target sequence
atagtctcatgattaattaaagaatc

SEQ ID NO: 47384 - DNA, 26 bp, Artificial sequence
  SiRNA target sequence
tagtctcatgattaattaaagaatca

SEQ ID NO: 47385 - DNA, 26 bp, Artificial sequence
  SiRNA target sequence
agtctcatgattaattaaagaatcat

SEQ ID NO: 47386 - DNA, 26 bp, Artificial sequence
  SiRNA target sequence
gtctcatgattaattaaagaatcatg

SEQ ID NO: 47387 - DNA, 26 bp, Artificial sequence
  SiRNA target sequence
tctcatgattaattaaagaatcatgt

SEQ ID NO: 47388 - DNA, 26 bp, Artificial sequence
  SiRNA target sequence
ctcatgattaattaaagaatcatgta

SEQ ID NO: 47389 - DNA, 26 bp, Artificial sequence
  SiRNA target sequence
tcatgattaattaaagaatcatgtaa

SEQ ID NO: 47390 - DNA, 26 bp, Artificial sequence
  SiRNA target sequence
catgattaattaaagaatcatgtaag

SEQ ID NO: 47391 - DNA, 26 bp, Artificial sequence
  SiRNA target sequence
atgattaattaaagaatcatgtaagt

SEQ ID NO: 47392 - DNA, 26 bp, Artificial sequence
  SiRNA target sequence
tgattaattaaagaatcatgtaagtg

SEQ ID NO: 47393 - DNA, 26 bp, Artificial sequence
  SiRNA target sequence
gattaattaaagaatcatgtaagtga

SEQ ID NO: 47394 - DNA, 26 bp, Artificial sequence
  SiRNA target sequence
attaattaaagaatcatgtaagtgat

SEQ ID NO: 47395 - DNA, 26 bp, Artificial sequence
  SiRNA target sequence
ttaattaaagaatcatgtaagtgatt

SEQ ID NO: 47396 - DNA, 26 bp, Artificial sequence
  SiRNA target sequence
taattaaagaatcatgtaagtgattt

SEQ ID NO: 47397 - DNA, 26 bp, Artificial sequence
  SiRNA target sequence
aattaaagaatcatgtaagtgatttg

SEQ ID NO: 47398 - DNA, 26 bp, Artificial sequence
  SiRNA target sequence
attaaagaatcatgtaagtgatttga

SEQ ID NO: 47399 - DNA, 26 bp, Artificial sequence
  SiRNA target sequence
ttaaagaatcatgtaagtgatttgag

SEQ ID NO: 47400 - DNA, 26 bp, Artificial sequence
  SiRNA target sequence
taaagaatcatgtaagtgatttgagc

SEQ ID NO: 47401 - DNA, 26 bp, Artificial sequence
  SiRNA target sequence
aaagaatcatgtaagtgatttgagca

SEQ ID NO: 47402 - DNA, 26 bp, Artificial sequence
  SiRNA target sequence
aagaatcatgtaagtgatttgagcat

SEQ ID NO: 47403 - DNA, 26 bp, Artificial sequence
  SiRNA target sequence
agaatcatgtaagtgatttgagcatc

SEQ ID NO: 47404 - DNA, 26 bp, Artificial sequence
  SiRNA target sequence
gaatcatgtaagtgatttgagcatct

SEQ ID NO: 47405 - DNA, 26 bp, Artificial sequence
  SiRNA target sequence
aatcatgtaagtgatttgagcatctt

SEQ ID NO: 47406 - DNA, 26 bp, Artificial sequence
  SiRNA target sequence
atcatgtaagtgatttgagcatcttt

SEQ ID NO: 47407 - DNA, 26 bp, Artificial sequence
  SiRNA target sequence
tcatgtaagtgatttgagcatctttg

SEQ ID NO: 47408 - DNA, 26 bp, Artificial sequence
  SiRNA target sequence
catgtaagtgatttgagcatctttgt

SEQ ID NO: 47409 - DNA, 26 bp, Artificial sequence
  SiRNA target sequence
atgtaagtgatttgagcatctttgtt

SEQ ID NO: 47410 - DNA, 26 bp, Artificial sequence
  SiRNA target sequence
tgtaagtgatttgagcatctttgttg

SEQ ID NO: 47411 - DNA, 26 bp, Artificial sequence
  SiRNA target sequence
gtaagtgatttgagcatctttgttgt

SEQ ID NO: 47412 - DNA, 26 bp, Artificial sequence
  SiRNA target sequence
taagtgatttgagcatctttgttgtg

SEQ ID NO: 47413 - DNA, 26 bp, Artificial sequence
  SiRNA target sequence
aagtgatttgagcatctttgttgtgc

SEQ ID NO: 47414 - DNA, 26 bp, Artificial sequence
  SiRNA target sequence
agtgatttgagcatctttgttgtgcg

SEQ ID NO: 47415 - DNA, 26 bp, Artificial sequence
  SiRNA target sequence
gtgatttgagcatctttgttgtgcgc

SEQ ID NO: 47416 - DNA, 26 bp, Artificial sequence
  SiRNA target sequence
tgatttgagcatctttgttgtgcgca

SEQ ID NO: 47417 - DNA, 26 bp, Artificial sequence
  SiRNA target sequence
gatttgagcatctttgttgtgcgcaa

SEQ ID NO: 47418 - DNA, 26 bp, Artificial sequence
  SiRNA target sequence
atttgagcatctttgttgtgcgcaat

SEQ ID NO: 47419 - DNA, 26 bp, Artificial sequence
  SiRNA target sequence
tttgagcatctttgttgtgcgcaatt

SEQ ID NO: 47420 - DNA, 26 bp, Artificial sequence
  SiRNA target sequence
ttgagcatctttgttgtgcgcaatta

SEQ ID NO: 47421 - DNA, 26 bp, Artificial sequence
  SiRNA target sequence
tgagcatctttgttgtgcgcaattat

SEQ ID NO: 47422 - DNA, 26 bp, Artificial sequence
  SiRNA target sequence
gagcatctttgttgtgcgcaattata

SEQ ID NO: 47423 - DNA, 26 bp, Artificial sequence
  SiRNA target sequence
agcatctttgttgtgcgcaattatat

SEQ ID NO: 47424 - DNA, 26 bp, Artificial sequence
  SiRNA target sequence
gcatctttgttgtgcgcaattatatt

SEQ ID NO: 47425 - DNA, 26 bp, Artificial sequence
  SiRNA target sequence
catctttgttgtgcgcaattatattc

SEQ ID NO: 47426 - DNA, 26 bp, Artificial sequence
  SiRNA target sequence
atctttgttgtgcgcaattatattct

SEQ ID NO: 47427 - DNA, 26 bp, Artificial sequence
  SiRNA target sequence
tctttgttgtgcgcaattatattctt

SEQ ID NO: 47428 - DNA, 26 bp, Artificial sequence
  SiRNA target sequence
ctttgttgtgcgcaattatattcttt

SEQ ID NO: 47429 - DNA, 26 bp, Artificial sequence
  SiRNA target sequence
tttgttgtgcgcaattatattctttt

SEQ ID NO: 47430 - DNA, 26 bp, Artificial sequence
  SiRNA target sequence
ttgttgtgcgcaattatattcttttc

SEQ ID NO: 47431 - DNA, 26 bp, Artificial sequence
  SiRNA target sequence
tgttgtgcgcaattatattcttttct

SEQ ID NO: 47432 - DNA, 26 bp, Artificial sequence
  SiRNA target sequence
gttgtgcgcaattatattcttttctt

SEQ ID NO: 47433 - DNA, 26 bp, Artificial sequence
  SiRNA target sequence
ttgtgcgcaattatattcttttctta

SEQ ID NO: 47434 - DNA, 26 bp, Artificial sequence
  SiRNA target sequence
tgtgcgcaattatattcttttcttat

SEQ ID NO: 47435 - DNA, 26 bp, Artificial sequence
  SiRNA target sequence
gtgcgcaattatattcttttcttatt

SEQ ID NO: 47436 - DNA, 26 bp, Artificial sequence
  SiRNA target sequence
tgcgcaattatattcttttcttattc

SEQ ID NO: 47437 - DNA, 26 bp, Artificial sequence
  SiRNA target sequence
gcgcaattatattcttttcttattcc

SEQ ID NO: 47438 - DNA, 26 bp, Artificial sequence
  SiRNA target sequence
cgcaattatattcttttcttattcct

SEQ ID NO: 47439 - DNA, 26 bp, Artificial sequence
  SiRNA target sequence
gcaattatattcttttcttattcctg

SEQ ID NO: 47440 - DNA, 26 bp, Artificial sequence
  SiRNA target sequence
caattatattcttttcttattcctgt

SEQ ID NO: 47441 - DNA, 26 bp, Artificial sequence
  SiRNA target sequence
aattatattcttttcttattcctgta

SEQ ID NO: 47442 - DNA, 26 bp, Artificial sequence
  SiRNA target sequence
attatattcttttcttattcctgtac

SEQ ID NO: 47443 - DNA, 26 bp, Artificial sequence
  SiRNA target sequence
ttatattcttttcttattcctgtacg

SEQ ID NO: 47444 - DNA, 26 bp, Artificial sequence
  SiRNA target sequence
tatattcttttcttattcctgtacgc

SEQ ID NO: 47445 - DNA, 26 bp, Artificial sequence
  SiRNA target sequence
atattcttttcttattcctgtacgcc

SEQ ID NO: 47446 - DNA, 26 bp, Artificial sequence
  SiRNA target sequence
tattcttttcttattcctgtacgcca

SEQ ID NO: 47447 - DNA, 26 bp, Artificial sequence
  SiRNA target sequence
attcttttcttattcctgtacgccaa

SEQ ID NO: 47448 - DNA, 26 bp, Artificial sequence
  SiRNA target sequence
ttcttttcttattcctgtacgccaat

SEQ ID NO: 47449 - DNA, 26 bp, Artificial sequence
  SiRNA target sequence
tcttttcttattcctgtacgccaatg

SEQ ID NO: 47450 - DNA, 26 bp, Artificial sequence
  SiRNA target sequence
cttttcttattcctgtacgccaatga

SEQ ID NO: 47451 - DNA, 26 bp, Artificial sequence
  SiRNA target sequence
ttttcttattcctgtacgccaatgaa

SEQ ID NO: 47452 - DNA, 26 bp, Artificial sequence
  SiRNA target sequence
tttcttattcctgtacgccaatgaac

SEQ ID NO: 47453 - DNA, 26 bp, Artificial sequence
  SiRNA target sequence
ttcttattcctgtacgccaatgaact

SEQ ID NO: 47454 - DNA, 26 bp, Artificial sequence
  SiRNA target sequence
tcttattcctgtacgccaatgaacta

SEQ ID NO: 47455 - DNA, 26 bp, Artificial sequence
  SiRNA target sequence
cttattcctgtacgccaatgaactat

SEQ ID NO: 47456 - DNA, 26 bp, Artificial sequence
  SiRNA target sequence
ttattcctgtacgccaatgaactatt

SEQ ID NO: 47457 - DNA, 26 bp, Artificial sequence
  SiRNA target sequence
tattcctgtacgccaatgaactattt

SEQ ID NO: 47458 - DNA, 26 bp, Artificial sequence
  SiRNA target sequence
attcctgtacgccaatgaactatttt

SEQ ID NO: 47459 - DNA, 26 bp, Artificial sequence
  SiRNA target sequence
ttcctgtacgccaatgaactattttc

SEQ ID NO: 47460 - DNA, 26 bp, Artificial sequence
  SiRNA target sequence
tcctgtacgccaatgaactattttcg

SEQ ID NO: 47461 - DNA, 26 bp, Artificial sequence
  SiRNA target sequence
cctgtacgccaatgaactattttcgc

SEQ ID NO: 47462 - DNA, 26 bp, Artificial sequence
  SiRNA target sequence
ctgtacgccaatgaactattttcgca

SEQ ID NO: 47463 - DNA, 26 bp, Artificial sequence
  SiRNA target sequence
tgtacgccaatgaactattttcgcag

SEQ ID NO: 47464 - DNA, 26 bp, Artificial sequence
  SiRNA target sequence
gtacgccaatgaactattttcgcagt

SEQ ID NO: 47465 - DNA, 26 bp, Artificial sequence
  SiRNA target sequence
tacgccaatgaactattttcgcagtt

SEQ ID NO: 47466 - DNA, 26 bp, Artificial sequence
  SiRNA target sequence
acgccaatgaactattttcgcagttg

SEQ ID NO: 47467 - DNA, 26 bp, Artificial sequence
  SiRNA target sequence
cgccaatgaactattttcgcagttgc

SEQ ID NO: 47468 - DNA, 26 bp, Artificial sequence
  SiRNA target sequence
gccaatgaactattttcgcagttgca

SEQ ID NO: 47469 - DNA, 26 bp, Artificial sequence
  SiRNA target sequence
ccaatgaactattttcgcagttgcaa

SEQ ID NO: 47470 - DNA, 26 bp, Artificial sequence
  SiRNA target sequence
caatgaactattttcgcagttgcaag

SEQ ID NO: 47471 - DNA, 26 bp, Artificial sequence
  SiRNA target sequence
aatgaactattttcgcagttgcaagg

SEQ ID NO: 47472 - DNA, 26 bp, Artificial sequence
  SiRNA target sequence
atgaactattttcgcagttgcaagga

SEQ ID NO: 47473 - DNA, 26 bp, Artificial sequence
  SiRNA target sequence
tgaactattttcgcagttgcaaggat

SEQ ID NO: 47474 - DNA, 26 bp, Artificial sequence
  SiRNA target sequence
gaactattttcgcagttgcaaggatg

SEQ ID NO: 47475 - DNA, 26 bp, Artificial sequence
  SiRNA target sequence
aactattttcgcagttgcaaggatgt

SEQ ID NO: 47476 - DNA, 26 bp, Artificial sequence
  SiRNA target sequence
actattttcgcagttgcaaggatgta

SEQ ID NO: 47477 - DNA, 26 bp, Artificial sequence
  SiRNA target sequence
ctattttcgcagttgcaaggatgtaa

SEQ ID NO: 47478 - DNA, 26 bp, Artificial sequence
  SiRNA target sequence
tattttcgcagttgcaaggatgtaaa

SEQ ID NO: 47479 - DNA, 26 bp, Artificial sequence
  SiRNA target sequence
attttcgcagttgcaaggatgtaaac

SEQ ID NO: 47480 - DNA, 26 bp, Artificial sequence
  SiRNA target sequence
ttttcgcagttgcaaggatgtaaact

SEQ ID NO: 47481 - DNA, 26 bp, Artificial sequence
  SiRNA target sequence
tttcgcagttgcaaggatgtaaacta

SEQ ID NO: 47482 - DNA, 26 bp, Artificial sequence
  SiRNA target sequence
ttcgcagttgcaaggatgtaaactaa

SEQ ID NO: 47483 - DNA, 26 bp, Artificial sequence
  SiRNA target sequence
tcgcagttgcaaggatgtaaactaat

SEQ ID NO: 47484 - DNA, 26 bp, Artificial sequence
  SiRNA target sequence
cgcagttgcaaggatgtaaactaata

SEQ ID NO: 47485 - DNA, 26 bp, Artificial sequence
  SiRNA target sequence
gcagttgcaaggatgtaaactaataa

SEQ ID NO: 47486 - DNA, 26 bp, Artificial sequence
  SiRNA target sequence
cagttgcaaggatgtaaactaataat

SEQ ID NO: 47487 - DNA, 26 bp, Artificial sequence
  SiRNA target sequence
agttgcaaggatgtaaactaataatg

SEQ ID NO: 47488 - DNA, 26 bp, Artificial sequence
  SiRNA target sequence
gttgcaaggatgtaaactaataatgt

SEQ ID NO: 47489 - DNA, 26 bp, Artificial sequence
  SiRNA target sequence
ttgcaaggatgtaaactaataatgtg

SEQ ID NO: 47490 - DNA, 26 bp, Artificial sequence
  SiRNA target sequence
tgcaaggatgtaaactaataatgtga

SEQ ID NO: 47491 - DNA, 26 bp, Artificial sequence
  SiRNA target sequence
gcaaggatgtaaactaataatgtgat

SEQ ID NO: 47492 - DNA, 26 bp, Artificial sequence
  SiRNA target sequence
caaggatgtaaactaataatgtgatt

SEQ ID NO: 47493 - DNA, 26 bp, Artificial sequence
  SiRNA target sequence
aaggatgtaaactaataatgtgatta

SEQ ID NO: 47494 - DNA, 26 bp, Artificial sequence
  SiRNA target sequence
aggatgtaaactaataatgtgattaa

SEQ ID NO: 47495 - DNA, 26 bp, Artificial sequence
  SiRNA target sequence
ggatgtaaactaataatgtgattaaa

SEQ ID NO: 47496 - DNA, 26 bp, Artificial sequence
  SiRNA target sequence
gatgtaaactaataatgtgattaaaa

SEQ ID NO: 47497 - DNA, 26 bp, Artificial sequence
  SiRNA target sequence
atgtaaactaataatgtgattaaaat

SEQ ID NO: 47498 - DNA, 26 bp, Artificial sequence
  SiRNA target sequence
tgtaaactaataatgtgattaaaata

SEQ ID NO: 47499 - DNA, 26 bp, Artificial sequence
  SiRNA target sequence
gtaaactaataatgtgattaaaataa

SEQ ID NO: 47500 - DNA, 26 bp, Artificial sequence
  SiRNA target sequence
taaactaataatgtgattaaaataat

SEQ ID NO: 47501 - DNA, 26 bp, Artificial sequence
  SiRNA target sequence
aaactaataatgtgattaaaataata

SEQ ID NO: 47502 - DNA, 26 bp, Artificial sequence
  SiRNA target sequence
aactaataatgtgattaaaataataa

SEQ ID NO: 47503 - DNA, 26 bp, Artificial sequence
  SiRNA target sequence
actaataatgtgattaaaataataaa

SEQ ID NO: 47504 - DNA, 26 bp, Artificial sequence
  SiRNA target sequence
ctaataatgtgattaaaataataaac

SEQ ID NO: 47505 - DNA, 26 bp, Artificial sequence
  SiRNA target sequence
taataatgtgattaaaataataaaca

SEQ ID NO: 47506 - DNA, 26 bp, Artificial sequence
  SiRNA target sequence
aataatgtgattaaaataataaacat

SEQ ID NO: 47507 - DNA, 26 bp, Artificial sequence
  SiRNA target sequence
ataatgtgattaaaataataaacata

SEQ ID NO: 47508 - DNA, 26 bp, Artificial sequence
  SiRNA target sequence
taatgtgattaaaataataaacatat

SEQ ID NO: 47509 - DNA, 26 bp, Artificial sequence
  SiRNA target sequence
aatgtgattaaaataataaacatatt

SEQ ID NO: 47510 - DNA, 26 bp, Artificial sequence
  SiRNA target sequence
atgtgattaaaataataaacatattt

SEQ ID NO: 47511 - DNA, 26 bp, Artificial sequence
  SiRNA target sequence
tgtgattaaaataataaacatatttg

SEQ ID NO: 47512 - DNA, 26 bp, Artificial sequence
  SiRNA target sequence
gtgattaaaataataaacatatttgt

SEQ ID NO: 47513 - DNA, 26 bp, Artificial sequence
  SiRNA target sequence
tgattaaaataataaacatatttgtc

SEQ ID NO: 47514 - DNA, 26 bp, Artificial sequence
  SiRNA target sequence
gattaaaataataaacatatttgtca

SEQ ID NO: 47515 - DNA, 26 bp, Artificial sequence
  SiRNA target sequence
attaaaataataaacatatttgtcaa

SEQ ID NO: 47516 - DNA, 26 bp, Artificial sequence
  SiRNA target sequence
ttaaaataataaacatatttgtcaac

SEQ ID NO: 47517 - DNA, 26 bp, Artificial sequence
  SiRNA target sequence
taaaataataaacatatttgtcaacc

SEQ ID NO: 47518 - DNA, 26 bp, Artificial sequence
  SiRNA target sequence
aaaataataaacatatttgtcaaccc

SEQ ID NO: 47519 - DNA, 26 bp, Artificial sequence
  SiRNA target sequence
aaataataaacatatttgtcaaccct

SEQ ID NO: 47520 - DNA, 26 bp, Artificial sequence
  SiRNA target sequence
aataataaacatatttgtcaacccta

SEQ ID NO: 47521 - DNA, 26 bp, Artificial sequence
  SiRNA target sequence
ataataaacatatttgtcaaccctaa

SEQ ID NO: 47522 - DNA, 26 bp, Artificial sequence
  SiRNA target sequence
taataaacatatttgtcaaccctaaa

SEQ ID NO: 47523 - DNA, 26 bp, Artificial sequence
  SiRNA target sequence
aataaacatatttgtcaaccctaaat

SEQ ID NO: 47524 - DNA, 26 bp, Artificial sequence
  SiRNA target sequence
ataaacatatttgtcaaccctaaatt

SEQ ID NO: 47525 - DNA, 26 bp, Artificial sequence
  SiRNA target sequence
taaacatatttgtcaaccctaaattt

SEQ ID NO: 47526 - DNA, 26 bp, Artificial sequence
  SiRNA target sequence
aaacatatttgtcaaccctaaatttg

SEQ ID NO: 47527 - DNA, 26 bp, Artificial sequence
  SiRNA target sequence
aacatatttgtcaaccctaaatttgt

SEQ ID NO: 47528 - DNA, 26 bp, Artificial sequence
  SiRNA target sequence
acatatttgtcaaccctaaatttgta

SEQ ID NO: 47529 - DNA, 26 bp, Artificial sequence
  SiRNA target sequence
catatttgtcaaccctaaatttgtat

SEQ ID NO: 47530 - DNA, 26 bp, Artificial sequence
  SiRNA target sequence
atatttgtcaaccctaaatttgtata

SEQ ID NO: 47531 - DNA, 26 bp, Artificial sequence
  SiRNA target sequence
tatttgtcaaccctaaatttgtataa

SEQ ID NO: 47532 - DNA, 26 bp, Artificial sequence
  SiRNA target sequence
atttgtcaaccctaaatttgtataaa

SEQ ID NO: 47533 - DNA, 26 bp, Artificial sequence
  SiRNA target sequence
tttgtcaaccctaaatttgtataaat

SEQ ID NO: 47534 - DNA, 26 bp, Artificial sequence
  SiRNA target sequence
ttgtcaaccctaaatttgtataaatt

SEQ ID NO: 47535 - DNA, 26 bp, Artificial sequence
  SiRNA target sequence
tgtcaaccctaaatttgtataaattg

SEQ ID NO: 47536 - DNA, 26 bp, Artificial sequence
  SiRNA target sequence
gtcaaccctaaatttgtataaattga

SEQ ID NO: 47537 - DNA, 26 bp, Artificial sequence
  SiRNA target sequence
tcaaccctaaatttgtataaattgac

SEQ ID NO: 47538 - DNA, 26 bp, Artificial sequence
  SiRNA target sequence
caaccctaaatttgtataaattgacg

SEQ ID NO: 47539 - DNA, 26 bp, Artificial sequence
  SiRNA target sequence
aaccctaaatttgtataaattgacga

SEQ ID NO: 47540 - DNA, 26 bp, Artificial sequence
  SiRNA target sequence
accctaaatttgtataaattgacgaa

SEQ ID NO: 47541 - DNA, 26 bp, Artificial sequence
  SiRNA target sequence
ccctaaatttgtataaattgacgaac

SEQ ID NO: 47542 - DNA, 26 bp, Artificial sequence
  SiRNA target sequence
cctaaatttgtataaattgacgaaca

SEQ ID NO: 47543 - DNA, 26 bp, Artificial sequence
  SiRNA target sequence
ctaaatttgtataaattgacgaacac

SEQ ID NO: 47544 - DNA, 26 bp, Artificial sequence
  SiRNA target sequence
taaatttgtataaattgacgaacacg

SEQ ID NO: 47545 - DNA, 26 bp, Artificial sequence
  SiRNA target sequence
aaatttgtataaattgacgaacacgc

SEQ ID NO: 47546 - DNA, 26 bp, Artificial sequence
  SiRNA target sequence
aatttgtataaattgacgaacacgcc

SEQ ID NO: 47547 - DNA, 26 bp, Artificial sequence
  SiRNA target sequence
atttgtataaattgacgaacacgcca

SEQ ID NO: 47548 - DNA, 26 bp, Artificial sequence
  SiRNA target sequence
tttgtataaattgacgaacacgccaa

SEQ ID NO: 47549 - DNA, 26 bp, Artificial sequence
  SiRNA target sequence
ttgtataaattgacgaacacgccaat

SEQ ID NO: 47550 - DNA, 26 bp, Artificial sequence
  SiRNA target sequence
tgtataaattgacgaacacgccaata

SEQ ID NO: 47551 - DNA, 26 bp, Artificial sequence
  SiRNA target sequence
gtataaattgacgaacacgccaatat

SEQ ID NO: 47552 - DNA, 26 bp, Artificial sequence
  SiRNA target sequence
tataaattgacgaacacgccaatata

SEQ ID NO: 47553 - DNA, 26 bp, Artificial sequence
  SiRNA target sequence
ataaattgacgaacacgccaatataa

SEQ ID NO: 47554 - DNA, 26 bp, Artificial sequence
  SiRNA target sequence
taaattgacgaacacgccaatataac

SEQ ID NO: 47555 - DNA, 26 bp, Artificial sequence
  SiRNA target sequence
aaattgacgaacacgccaatataact

SEQ ID NO: 47556 - DNA, 26 bp, Artificial sequence
  SiRNA target sequence
aattgacgaacacgccaatataactg

SEQ ID NO: 47557 - DNA, 26 bp, Artificial sequence
  SiRNA target sequence
attgacgaacacgccaatataactgt

SEQ ID NO: 47558 - DNA, 26 bp, Artificial sequence
  SiRNA target sequence
ttgacgaacacgccaatataactgta

SEQ ID NO: 47559 - DNA, 26 bp, Artificial sequence
  SiRNA target sequence
tgacgaacacgccaatataactgtaa

SEQ ID NO: 47560 - DNA, 26 bp, Artificial sequence
  SiRNA target sequence
gacgaacacgccaatataactgtaaa

SEQ ID NO: 47561 - DNA, 26 bp, Artificial sequence
  SiRNA target sequence
acgaacacgccaatataactgtaaaa

SEQ ID NO: 47562 - DNA, 26 bp, Artificial sequence
  SiRNA target sequence
cgaacacgccaatataactgtaaaaa

SEQ ID NO: 47563 - DNA, 26 bp, Artificial sequence
  SiRNA target sequence
gaacacgccaatataactgtaaaaaa

SEQ ID NO: 47564 - DNA, 26 bp, Artificial sequence
  SiRNA target sequence
aacacgccaatataactgtaaaaaaa

SEQ ID NO: 47565 - DNA, 26 bp, Artificial sequence
  SiRNA target sequence
acacgccaatataactgtaaaaaaaa

SEQ ID NO: 47566 - DNA, 26 bp, Artificial sequence
  SiRNA target sequence
cacgccaatataactgtaaaaaaaat

SEQ ID NO: 47567 - DNA, 26 bp, Artificial sequence
  SiRNA target sequence
acgccaatataactgtaaaaaaaata

SEQ ID NO: 47568 - DNA, 26 bp, Artificial sequence
  SiRNA target sequence
cgccaatataactgtaaaaaaaatat

SEQ ID NO: 47569 - DNA, 26 bp, Artificial sequence
  SiRNA target sequence
gccaatataactgtaaaaaaaatatt

SEQ ID NO: 47570 - DNA, 26 bp, Artificial sequence
  SiRNA target sequence
ccaatataactgtaaaaaaaatattt

SEQ ID NO: 47571 - DNA, 26 bp, Artificial sequence
  SiRNA target sequence
caatataactgtaaaaaaaatattta

SEQ ID NO: 47572 - DNA, 26 bp, Artificial sequence
  SiRNA target sequence
aatataactgtaaaaaaaatatttat

SEQ ID NO: 47573 - DNA, 26 bp, Artificial sequence
  SiRNA target sequence
atataactgtaaaaaaaatatttatg

SEQ ID NO: 47574 - DNA, 26 bp, Artificial sequence
  SiRNA target sequence
tataactgtaaaaaaaatatttatga

SEQ ID NO: 47575 - DNA, 26 bp, Artificial sequence
  SiRNA target sequence
ataactgtaaaaaaaatatttatgat

SEQ ID NO: 47576 - DNA, 26 bp, Artificial sequence
  SiRNA target sequence
taactgtaaaaaaaatatttatgata

SEQ ID NO: 47577 - DNA, 26 bp, Artificial sequence
  SiRNA target sequence
aactgtaaaaaaaatatttatgatat

SEQ ID NO: 47578 - DNA, 26 bp, Artificial sequence
  SiRNA target sequence
actgtaaaaaaaatatttatgatatt

SEQ ID NO: 47579 - DNA, 26 bp, Artificial sequence
  SiRNA target sequence
ctgtaaaaaaaatatttatgatatta

SEQ ID NO: 47580 - DNA, 26 bp, Artificial sequence
  SiRNA target sequence
tgtaaaaaaaatatttatgatattaa

SEQ ID NO: 47581 - DNA, 26 bp, Artificial sequence
  SiRNA target sequence
gtaaaaaaaatatttatgatattaac

SEQ ID NO: 47582 - DNA, 26 bp, Artificial sequence
  SiRNA target sequence
taaaaaaaatatttatgatattaaca

SEQ ID NO: 47583 - DNA, 26 bp, Artificial sequence
  SiRNA target sequence
aaaaaaaatatttatgatattaacaa

SEQ ID NO: 47584 - DNA, 26 bp, Artificial sequence
  SiRNA target sequence
aaaaaaatatttatgatattaacaaa

SEQ ID NO: 47585 - DNA, 26 bp, Artificial sequence
  SiRNA target sequence
aaaaaatatttatgatattaacaaat

SEQ ID NO: 47586 - DNA, 26 bp, Artificial sequence
  SiRNA target sequence
aaaaatatttatgatattaacaaata

SEQ ID NO: 47587 - DNA, 26 bp, Artificial sequence
  SiRNA target sequence
aaaatatttatgatattaacaaataa

SEQ ID NO: 47588 - DNA, 26 bp, Artificial sequence
  SiRNA target sequence
aaatatttatgatattaacaaataaa

SEQ ID NO: 47589 - DNA, 26 bp, Artificial sequence
  SiRNA target sequence
aatatttatgatattaacaaataaaa

SEQ ID NO: 47590 - DNA, 26 bp, Artificial sequence
  SiRNA target sequence
atatttatgatattaacaaataaaac

SEQ ID NO: 47591 - DNA, 26 bp, Artificial sequence
  SiRNA target sequence
tatttatgatattaacaaataaaact

SEQ ID NO: 47592 - DNA, 26 bp, Artificial sequence
  SiRNA target sequence
atttatgatattaacaaataaaactt

SEQ ID NO: 47593 - DNA, 26 bp, Artificial sequence
  SiRNA target sequence
tttatgatattaacaaataaaacttc

SEQ ID NO: 47594 - DNA, 26 bp, Artificial sequence
  SiRNA target sequence
ttatgatattaacaaataaaacttcg

SEQ ID NO: 47595 - DNA, 26 bp, Artificial sequence
  SiRNA target sequence
tatgatattaacaaataaaacttcga

SEQ ID NO: 47596 - DNA, 26 bp, Artificial sequence
  SiRNA target sequence
atgatattaacaaataaaacttcgat

SEQ ID NO: 47597 - DNA, 26 bp, Artificial sequence
  SiRNA target sequence
tgatattaacaaataaaacttcgatc

SEQ ID NO: 47598 - DNA, 26 bp, Artificial sequence
  SiRNA target sequence
gatattaacaaataaaacttcgatca

SEQ ID NO: 47599 - DNA, 26 bp, Artificial sequence
  SiRNA target sequence
atattaacaaataaaacttcgatcaa

SEQ ID NO: 47600 - DNA, 26 bp, Artificial sequence
  SiRNA target sequence
tattaacaaataaaacttcgatcaat

SEQ ID NO: 47601 - DNA, 26 bp, Artificial sequence
  SiRNA target sequence
attaacaaataaaacttcgatcaatt

SEQ ID NO: 47602 - DNA, 26 bp, Artificial sequence
  SiRNA target sequence
ttaacaaataaaacttcgatcaattc

SEQ ID NO: 47603 - DNA, 26 bp, Artificial sequence
  SiRNA target sequence
taacaaataaaacttcgatcaattca

SEQ ID NO: 47604 - DNA, 26 bp, Artificial sequence
  SiRNA target sequence
aacaaataaaacttcgatcaattcac

SEQ ID NO: 47605 - DNA, 26 bp, Artificial sequence
  SiRNA target sequence
acaaataaaacttcgatcaattcact

SEQ ID NO: 47606 - DNA, 26 bp, Artificial sequence
  SiRNA target sequence
caaataaaacttcgatcaattcactt

SEQ ID NO: 47607 - DNA, 26 bp, Artificial sequence
  SiRNA target sequence
aaataaaacttcgatcaattcactta

SEQ ID NO: 47608 - DNA, 26 bp, Artificial sequence
  SiRNA target sequence
aataaaacttcgatcaattcacttat

SEQ ID NO: 47609 - DNA, 26 bp, Artificial sequence
  SiRNA target sequence
ataaaacttcgatcaattcacttatt

SEQ ID NO: 47610 - DNA, 26 bp, Artificial sequence
  SiRNA target sequence
taaaacttcgatcaattcacttattg

SEQ ID NO: 47611 - DNA, 26 bp, Artificial sequence
  SiRNA target sequence
aaaacttcgatcaattcacttattgc

SEQ ID NO: 47612 - DNA, 26 bp, Artificial sequence
  SiRNA target sequence
aaacttcgatcaattcacttattgct

SEQ ID NO: 47613 - DNA, 26 bp, Artificial sequence
  SiRNA target sequence
aacttcgatcaattcacttattgctt

SEQ ID NO: 47614 - DNA, 26 bp, Artificial sequence
  SiRNA target sequence
acttcgatcaattcacttattgcttt

SEQ ID NO: 47615 - DNA, 26 bp, Artificial sequence
  SiRNA target sequence
cttcgatcaattcacttattgcttta

SEQ ID NO: 47616 - DNA, 26 bp, Artificial sequence
  SiRNA target sequence
ttcgatcaattcacttattgctttac

SEQ ID NO: 47617 - DNA, 26 bp, Artificial sequence
  SiRNA target sequence
tcgatcaattcacttattgctttact

SEQ ID NO: 47618 - DNA, 26 bp, Artificial sequence
  SiRNA target sequence
cgatcaattcacttattgctttactt

SEQ ID NO: 47619 - DNA, 26 bp, Artificial sequence
  SiRNA target sequence
gatcaattcacttattgctttacttt

SEQ ID NO: 47620 - DNA, 26 bp, Artificial sequence
  SiRNA target sequence
atcaattcacttattgctttactttc

SEQ ID NO: 47621 - DNA, 26 bp, Artificial sequence
  SiRNA target sequence
tcaattcacttattgctttactttct

SEQ ID NO: 47622 - DNA, 26 bp, Artificial sequence
  SiRNA target sequence
caattcacttattgctttactttctc

SEQ ID NO: 47623 - DNA, 26 bp, Artificial sequence
  SiRNA target sequence
aattcacttattgctttactttctcg

SEQ ID NO: 47624 - DNA, 26 bp, Artificial sequence
  SiRNA target sequence
attcacttattgctttactttctcgg

SEQ ID NO: 47625 - DNA, 26 bp, Artificial sequence
  SiRNA target sequence
ttcacttattgctttactttctcggt

SEQ ID NO: 47626 - DNA, 26 bp, Artificial sequence
  SiRNA target sequence
tcacttattgctttactttctcggtc

SEQ ID NO: 47627 - DNA, 26 bp, Artificial sequence
  SiRNA target sequence
cacttattgctttactttctcggtct

SEQ ID NO: 47628 - DNA, 26 bp, Artificial sequence
  SiRNA target sequence
acttattgctttactttctcggtcta

SEQ ID NO: 47629 - DNA, 26 bp, Artificial sequence
  SiRNA target sequence
cttattgctttactttctcggtctat

SEQ ID NO: 47630 - DNA, 26 bp, Artificial sequence
  SiRNA target sequence
ttattgctttactttctcggtctatt

SEQ ID NO: 47631 - DNA, 26 bp, Artificial sequence
  SiRNA target sequence
tattgctttactttctcggtctatta

SEQ ID NO: 47632 - DNA, 26 bp, Artificial sequence
  SiRNA target sequence
attgctttactttctcggtctattat

SEQ ID NO: 47633 - DNA, 26 bp, Artificial sequence
  SiRNA target sequence
ttgctttactttctcggtctattatt

SEQ ID NO: 47634 - DNA, 26 bp, Artificial sequence
  SiRNA target sequence
tgctttactttctcggtctattattg

SEQ ID NO: 47635 - DNA, 26 bp, Artificial sequence
  SiRNA target sequence
gctttactttctcggtctattattgt

SEQ ID NO: 47636 - DNA, 26 bp, Artificial sequence
  SiRNA target sequence
ctttactttctcggtctattattgtt

SEQ ID NO: 47637 - DNA, 26 bp, Artificial sequence
  SiRNA target sequence
tttactttctcggtctattattgttt

SEQ ID NO: 47638 - DNA, 26 bp, Artificial sequence
  SiRNA target sequence
ttactttctcggtctattattgtttg

SEQ ID NO: 47639 - DNA, 26 bp, Artificial sequence
  SiRNA target sequence
tactttctcggtctattattgtttgt

SEQ ID NO: 47640 - DNA, 26 bp, Artificial sequence
  SiRNA target sequence
actttctcggtctattattgtttgta

SEQ ID NO: 47641 - DNA, 26 bp, Artificial sequence
  SiRNA target sequence
ctttctcggtctattattgtttgtat

SEQ ID NO: 47642 - DNA, 26 bp, Artificial sequence
  SiRNA target sequence
tttctcggtctattattgtttgtatt

SEQ ID NO: 47643 - DNA, 26 bp, Artificial sequence
  SiRNA target sequence
ttctcggtctattattgtttgtattt

SEQ ID NO: 47644 - DNA, 26 bp, Artificial sequence
  SiRNA target sequence
tctcggtctattattgtttgtatttc

SEQ ID NO: 47645 - DNA, 26 bp, Artificial sequence
  SiRNA target sequence
ctcggtctattattgtttgtatttca

SEQ ID NO: 47646 - DNA, 26 bp, Artificial sequence
  SiRNA target sequence
tcggtctattattgtttgtatttcac

SEQ ID NO: 47647 - DNA, 26 bp, Artificial sequence
  SiRNA target sequence
cggtctattattgtttgtatttcacc

SEQ ID NO: 47648 - DNA, 26 bp, Artificial sequence
  SiRNA target sequence
ggtctattattgtttgtatttcaccg

SEQ ID NO: 47649 - DNA, 26 bp, Artificial sequence
  SiRNA target sequence
gtctattattgtttgtatttcaccgc

SEQ ID NO: 47650 - DNA, 26 bp, Artificial sequence
  SiRNA target sequence
tctattattgtttgtatttcaccgca

SEQ ID NO: 47651 - DNA, 26 bp, Artificial sequence
  SiRNA target sequence
ctattattgtttgtatttcaccgcat

SEQ ID NO: 47652 - DNA, 26 bp, Artificial sequence
  SiRNA target sequence
tattattgtttgtatttcaccgcatc

SEQ ID NO: 47653 - DNA, 26 bp, Artificial sequence
  SiRNA target sequence
attattgtttgtatttcaccgcatcc

SEQ ID NO: 47654 - DNA, 26 bp, Artificial sequence
  SiRNA target sequence
ttattgtttgtatttcaccgcatcct

SEQ ID NO: 47655 - DNA, 26 bp, Artificial sequence
  SiRNA target sequence
tattgtttgtatttcaccgcatccta

SEQ ID NO: 47656 - DNA, 26 bp, Artificial sequence
  SiRNA target sequence
attgtttgtatttcaccgcatcctat

SEQ ID NO: 47657 - DNA, 26 bp, Artificial sequence
  SiRNA target sequence
ttgtttgtatttcaccgcatcctatt

SEQ ID NO: 47658 - DNA, 26 bp, Artificial sequence
  SiRNA target sequence
tgtttgtatttcaccgcatcctattt

SEQ ID NO: 47659 - DNA, 26 bp, Artificial sequence
  SiRNA target sequence
gtttgtatttcaccgcatcctatttt

SEQ ID NO: 47660 - DNA, 26 bp, Artificial sequence
  SiRNA target sequence
tttgtatttcaccgcatcctatttta

SEQ ID NO: 47661 - DNA, 26 bp, Artificial sequence
  SiRNA target sequence
ttgtatttcaccgcatcctattttat

SEQ ID NO: 47662 - DNA, 26 bp, Artificial sequence
  SiRNA target sequence
tgtatttcaccgcatcctattttatt

SEQ ID NO: 47663 - DNA, 26 bp, Artificial sequence
  SiRNA target sequence
gtatttcaccgcatcctattttattg

SEQ ID NO: 47664 - DNA, 26 bp, Artificial sequence
  SiRNA target sequence
tatttcaccgcatcctattttattgt

SEQ ID NO: 47665 - DNA, 26 bp, Artificial sequence
  SiRNA target sequence
atttcaccgcatcctattttattgta

SEQ ID NO: 47666 - DNA, 26 bp, Artificial sequence
  SiRNA target sequence
tttcaccgcatcctattttattgtat

SEQ ID NO: 47667 - DNA, 26 bp, Artificial sequence
  SiRNA target sequence
ttcaccgcatcctattttattgtatc

SEQ ID NO: 47668 - DNA, 26 bp, Artificial sequence
  SiRNA target sequence
tcaccgcatcctattttattgtatct

SEQ ID NO: 47669 - DNA, 26 bp, Artificial sequence
  SiRNA target sequence
caccgcatcctattttattgtatcta

SEQ ID NO: 47670 - DNA, 26 bp, Artificial sequence
  SiRNA target sequence
accgcatcctattttattgtatctac

SEQ ID NO: 47671 - DNA, 26 bp, Artificial sequence
  SiRNA target sequence
ccgcatcctattttattgtatctact

SEQ ID NO: 47672 - DNA, 26 bp, Artificial sequence
  SiRNA target sequence
cgcatcctattttattgtatctacta

SEQ ID NO: 47673 - DNA, 26 bp, Artificial sequence
  SiRNA target sequence
gcatcctattttattgtatctactaa

SEQ ID NO: 47674 - DNA, 26 bp, Artificial sequence
  SiRNA target sequence
catcctattttattgtatctactaag

SEQ ID NO: 47675 - DNA, 26 bp, Artificial sequence
  SiRNA target sequence
atcctattttattgtatctactaagt

SEQ ID NO: 47676 - DNA, 26 bp, Artificial sequence
  SiRNA target sequence
tcctattttattgtatctactaagtt

SEQ ID NO: 47677 - DNA, 26 bp, Artificial sequence
  SiRNA target sequence
cctattttattgtatctactaagttc

SEQ ID NO: 47678 - DNA, 26 bp, Artificial sequence
  SiRNA target sequence
ctattttattgtatctactaagttcc

SEQ ID NO: 47679 - DNA, 26 bp, Artificial sequence
  SiRNA target sequence
tattttattgtatctactaagttcca

SEQ ID NO: 47680 - DNA, 26 bp, Artificial sequence
  SiRNA target sequence
attttattgtatctactaagttccat

SEQ ID NO: 47681 - DNA, 26 bp, Artificial sequence
  SiRNA target sequence
ttttattgtatctactaagttccata

SEQ ID NO: 47682 - DNA, 26 bp, Artificial sequence
  SiRNA target sequence
tttattgtatctactaagttccatat

SEQ ID NO: 47683 - DNA, 26 bp, Artificial sequence
  SiRNA target sequence
ttattgtatctactaagttccatatt

SEQ ID NO: 47684 - DNA, 26 bp, Artificial sequence
  SiRNA target sequence
tattgtatctactaagttccatattt

SEQ ID NO: 47685 - DNA, 26 bp, Artificial sequence
  SiRNA target sequence
attgtatctactaagttccatattta

SEQ ID NO: 47686 - DNA, 26 bp, Artificial sequence
  SiRNA target sequence
ttgtatctactaagttccatatttat

SEQ ID NO: 47687 - DNA, 26 bp, Artificial sequence
  SiRNA target sequence
tgtatctactaagttccatatttata

SEQ ID NO: 47688 - DNA, 26 bp, Artificial sequence
  SiRNA target sequence
gtatctactaagttccatatttataa

SEQ ID NO: 47689 - DNA, 26 bp, Artificial sequence
  SiRNA target sequence
tatctactaagttccatatttataaa

SEQ ID NO: 47690 - DNA, 26 bp, Artificial sequence
  SiRNA target sequence
atctactaagttccatatttataaaa

SEQ ID NO: 47691 - DNA, 26 bp, Artificial sequence
  SiRNA target sequence
tctactaagttccatatttataaaat

SEQ ID NO: 47692 - DNA, 26 bp, Artificial sequence
  SiRNA target sequence
ctactaagttccatatttataaaatt

SEQ ID NO: 47693 - DNA, 26 bp, Artificial sequence
  SiRNA target sequence
tactaagttccatatttataaaattt

SEQ ID NO: 47694 - DNA, 26 bp, Artificial sequence
  SiRNA target sequence
actaagttccatatttataaaatttt

SEQ ID NO: 47695 - DNA, 26 bp, Artificial sequence
  SiRNA target sequence
ctaagttccatatttataaaattttt

SEQ ID NO: 47696 - DNA, 26 bp, Artificial sequence
  SiRNA target sequence
taagttccatatttataaaattttta

SEQ ID NO: 47697 - DNA, 26 bp, Artificial sequence
  SiRNA target sequence
aagttccatatttataaaatttttaa

SEQ ID NO: 47698 - DNA, 26 bp, Artificial sequence
  SiRNA target sequence
agttccatatttataaaatttttaaa

SEQ ID NO: 47699 - DNA, 26 bp, Artificial sequence
  SiRNA target sequence
gttccatatttataaaatttttaaat

SEQ ID NO: 47700 - DNA, 26 bp, Artificial sequence
  SiRNA target sequence
ttccatatttataaaatttttaaatg

SEQ ID NO: 47701 - DNA, 26 bp, Artificial sequence
  SiRNA target sequence
tccatatttataaaatttttaaatga

SEQ ID NO: 47702 - DNA, 26 bp, Artificial sequence
  SiRNA target sequence
ccatatttataaaatttttaaatgaa

SEQ ID NO: 47703 - DNA, 26 bp, Artificial sequence
  SiRNA target sequence
catatttataaaatttttaaatgaat

SEQ ID NO: 47704 - DNA, 26 bp, Artificial sequence
  SiRNA target sequence
atatttataaaatttttaaatgaatt

SEQ ID NO: 47705 - DNA, 26 bp, Artificial sequence
  SiRNA target sequence
tatttataaaatttttaaatgaattt

SEQ ID NO: 47706 - DNA, 26 bp, Artificial sequence
  SiRNA target sequence
atttataaaatttttaaatgaatttt

SEQ ID NO: 47707 - DNA, 26 bp, Artificial sequence
  SiRNA target sequence
tttataaaatttttaaatgaattttt

SEQ ID NO: 47708 - DNA, 26 bp, Artificial sequence
  SiRNA target sequence
ttataaaatttttaaatgaatttttt

SEQ ID NO: 47709 - DNA, 26 bp, Artificial sequence
  SiRNA target sequence
tataaaatttttaaatgaattttttc

SEQ ID NO: 47710 - DNA, 26 bp, Artificial sequence
  SiRNA target sequence
ataaaatttttaaatgaattttttcc

SEQ ID NO: 47711 - DNA, 26 bp, Artificial sequence
  SiRNA target sequence
taaaatttttaaatgaattttttcct

SEQ ID NO: 47712 - DNA, 26 bp, Artificial sequence
  SiRNA target sequence
aaaatttttaaatgaattttttcctg

SEQ ID NO: 47713 - DNA, 26 bp, Artificial sequence
  SiRNA target sequence
aaatttttaaatgaattttttcctgt

SEQ ID NO: 47714 - DNA, 26 bp, Artificial sequence
  SiRNA target sequence
aatttttaaatgaattttttcctgtc

SEQ ID NO: 47715 - DNA, 26 bp, Artificial sequence
  SiRNA target sequence
atttttaaatgaattttttcctgtca

SEQ ID NO: 47716 - DNA, 26 bp, Artificial sequence
  SiRNA target sequence
tttttaaatgaattttttcctgtcag

SEQ ID NO: 47717 - DNA, 26 bp, Artificial sequence
  SiRNA target sequence
ttttaaatgaattttttcctgtcagt

SEQ ID NO: 47718 - DNA, 26 bp, Artificial sequence
  SiRNA target sequence
tttaaatgaattttttcctgtcagtc

SEQ ID NO: 47719 - DNA, 26 bp, Artificial sequence
  SiRNA target sequence
ttaaatgaattttttcctgtcagtct

SEQ ID NO: 47720 - DNA, 26 bp, Artificial sequence
  SiRNA target sequence
taaatgaattttttcctgtcagtctg

SEQ ID NO: 47721 - DNA, 26 bp, Artificial sequence
  SiRNA target sequence
aaatgaattttttcctgtcagtctga

SEQ ID NO: 47722 - DNA, 26 bp, Artificial sequence
  SiRNA target sequence
aatgaattttttcctgtcagtctgaa

SEQ ID NO: 47723 - DNA, 26 bp, Artificial sequence
  SiRNA target sequence
atgaattttttcctgtcagtctgaat

SEQ ID NO: 47724 - DNA, 26 bp, Artificial sequence
  SiRNA target sequence
tgaattttttcctgtcagtctgaata

SEQ ID NO: 47725 - DNA, 26 bp, Artificial sequence
  SiRNA target sequence
gaattttttcctgtcagtctgaatac

SEQ ID NO: 47726 - DNA, 26 bp, Artificial sequence
  SiRNA target sequence
aattttttcctgtcagtctgaataca

SEQ ID NO: 47727 - DNA, 26 bp, Artificial sequence
  SiRNA target sequence
attttttcctgtcagtctgaatacat

SEQ ID NO: 47728 - DNA, 26 bp, Artificial sequence
  SiRNA target sequence
ttttttcctgtcagtctgaatacatg

SEQ ID NO: 47729 - DNA, 26 bp, Artificial sequence
  SiRNA target sequence
tttttcctgtcagtctgaatacatgt

SEQ ID NO: 47730 - DNA, 26 bp, Artificial sequence
  SiRNA target sequence
ttttcctgtcagtctgaatacatgtt

SEQ ID NO: 47731 - DNA, 26 bp, Artificial sequence
  SiRNA target sequence
tttcctgtcagtctgaatacatgttg

SEQ ID NO: 47732 - DNA, 26 bp, Artificial sequence
  SiRNA target sequence
ttcctgtcagtctgaatacatgttga

SEQ ID NO: 47733 - DNA, 26 bp, Artificial sequence
  SiRNA target sequence
tcctgtcagtctgaatacatgttgaa

SEQ ID NO: 47734 - DNA, 26 bp, Artificial sequence
  SiRNA target sequence
cctgtcagtctgaatacatgttgaac

SEQ ID NO: 47735 - DNA, 26 bp, Artificial sequence
  SiRNA target sequence
ctgtcagtctgaatacatgttgaacg

SEQ ID NO: 47736 - DNA, 26 bp, Artificial sequence
  SiRNA target sequence
tgtcagtctgaatacatgttgaacgg

SEQ ID NO: 47737 - DNA, 26 bp, Artificial sequence
  SiRNA target sequence
gtcagtctgaatacatgttgaacggg

SEQ ID NO: 47738 - DNA, 26 bp, Artificial sequence
  SiRNA target sequence
tcagtctgaatacatgttgaacgggt

SEQ ID NO: 47739 - DNA, 26 bp, Artificial sequence
  SiRNA target sequence
cagtctgaatacatgttgaacgggtg

SEQ ID NO: 47740 - DNA, 26 bp, Artificial sequence
  SiRNA target sequence
agtctgaatacatgttgaacgggtgt

SEQ ID NO: 47741 - DNA, 26 bp, Artificial sequence
  SiRNA target sequence
gtctgaatacatgttgaacgggtgta

SEQ ID NO: 47742 - DNA, 26 bp, Artificial sequence
  SiRNA target sequence
tctgaatacatgttgaacgggtgtaa

SEQ ID NO: 47743 - DNA, 26 bp, Artificial sequence
  SiRNA target sequence
ctgaatacatgttgaacgggtgtaac

SEQ ID NO: 47744 - DNA, 26 bp, Artificial sequence
  SiRNA target sequence
tgaatacatgttgaacgggtgtaaca

SEQ ID NO: 47745 - DNA, 26 bp, Artificial sequence
  SiRNA target sequence
gaatacatgttgaacgggtgtaacaa

SEQ ID NO: 47746 - DNA, 26 bp, Artificial sequence
  SiRNA target sequence
aatacatgttgaacgggtgtaacaaa

SEQ ID NO: 47747 - DNA, 26 bp, Artificial sequence
  SiRNA target sequence
atacatgttgaacgggtgtaacaaat

SEQ ID NO: 47748 - DNA, 26 bp, Artificial sequence
  SiRNA target sequence
tacatgttgaacgggtgtaacaaata

SEQ ID NO: 47749 - DNA, 26 bp, Artificial sequence
  SiRNA target sequence
acatgttgaacgggtgtaacaaatat

SEQ ID NO: 47750 - DNA, 26 bp, Artificial sequence
  SiRNA target sequence
catgttgaacgggtgtaacaaatata

SEQ ID NO: 47751 - DNA, 26 bp, Artificial sequence
  SiRNA target sequence
atgttgaacgggtgtaacaaatataa

SEQ ID NO: 47752 - DNA, 26 bp, Artificial sequence
  SiRNA target sequence
tgttgaacgggtgtaacaaatataaa

SEQ ID NO: 47753 - DNA, 26 bp, Artificial sequence
  SiRNA target sequence
gttgaacgggtgtaacaaatataaaa

SEQ ID NO: 47754 - DNA, 26 bp, Artificial sequence
  SiRNA target sequence
ttgaacgggtgtaacaaatataaaat

SEQ ID NO: 47755 - DNA, 26 bp, Artificial sequence
  SiRNA target sequence
tgaacgggtgtaacaaatataaaatt

SEQ ID NO: 47756 - DNA, 26 bp, Artificial sequence
  SiRNA target sequence
gaacgggtgtaacaaatataaaattg

SEQ ID NO: 47757 - DNA, 26 bp, Artificial sequence
  SiRNA target sequence
aacgggtgtaacaaatataaaattgt

SEQ ID NO: 47758 - DNA, 26 bp, Artificial sequence
  SiRNA target sequence
acgggtgtaacaaatataaaattgtt

SEQ ID NO: 47759 - DNA, 26 bp, Artificial sequence
  SiRNA target sequence
cgggtgtaacaaatataaaattgtta

SEQ ID NO: 47760 - DNA, 26 bp, Artificial sequence
  SiRNA target sequence
gggtgtaacaaatataaaattgttaa

SEQ ID NO: 47761 - DNA, 26 bp, Artificial sequence
  SiRNA target sequence
ggtgtaacaaatataaaattgttaag

SEQ ID NO: 47762 - DNA, 26 bp, Artificial sequence
  SiRNA target sequence
gtgtaacaaatataaaattgttaagt

SEQ ID NO: 47763 - DNA, 26 bp, Artificial sequence
  SiRNA target sequence
tgtaacaaatataaaattgttaagtt

SEQ ID NO: 47764 - DNA, 26 bp, Artificial sequence
  SiRNA target sequence
gtaacaaatataaaattgttaagttc

SEQ ID NO: 47765 - DNA, 26 bp, Artificial sequence
  SiRNA target sequence
taacaaatataaaattgttaagttct

SEQ ID NO: 47766 - DNA, 26 bp, Artificial sequence
  SiRNA target sequence
aacaaatataaaattgttaagttctg

SEQ ID NO: 47767 - DNA, 26 bp, Artificial sequence
  SiRNA target sequence
acaaatataaaattgttaagttctga

SEQ ID NO: 47768 - DNA, 26 bp, Artificial sequence
  SiRNA target sequence
caaatataaaattgttaagttctgac

SEQ ID NO: 47769 - DNA, 26 bp, Artificial sequence
  SiRNA target sequence
aaatataaaattgttaagttctgaca

SEQ ID NO: 47770 - DNA, 26 bp, Artificial sequence
  SiRNA target sequence
aatataaaattgttaagttctgacat

SEQ ID NO: 47771 - DNA, 26 bp, Artificial sequence
  SiRNA target sequence
atataaaattgttaagttctgacatt

SEQ ID NO: 47772 - DNA, 26 bp, Artificial sequence
  SiRNA target sequence
tataaaattgttaagttctgacattg

SEQ ID NO: 47773 - DNA, 26 bp, Artificial sequence
  SiRNA target sequence
ataaaattgttaagttctgacattgt

SEQ ID NO: 47774 - DNA, 26 bp, Artificial sequence
  SiRNA target sequence
taaaattgttaagttctgacattgta

SEQ ID NO: 47775 - DNA, 26 bp, Artificial sequence
  SiRNA target sequence
aaaattgttaagttctgacattgtaa

SEQ ID NO: 47776 - DNA, 26 bp, Artificial sequence
  SiRNA target sequence
aaattgttaagttctgacattgtaat

SEQ ID NO: 47777 - DNA, 26 bp, Artificial sequence
  SiRNA target sequence
aattgttaagttctgacattgtaatt

SEQ ID NO: 47778 - DNA, 26 bp, Artificial sequence
  SiRNA target sequence
attgttaagttctgacattgtaattg

SEQ ID NO: 47779 - DNA, 26 bp, Artificial sequence
  SiRNA target sequence
ttgttaagttctgacattgtaattga

SEQ ID NO: 47780 - DNA, 26 bp, Artificial sequence
  SiRNA target sequence
tgttaagttctgacattgtaattgat

SEQ ID NO: 47781 - DNA, 26 bp, Artificial sequence
  SiRNA target sequence
gttaagttctgacattgtaattgata

SEQ ID NO: 47782 - DNA, 26 bp, Artificial sequence
  SiRNA target sequence
ttaagttctgacattgtaattgatac

SEQ ID NO: 47783 - DNA, 26 bp, Artificial sequence
  SiRNA target sequence
taagttctgacattgtaattgataca

SEQ ID NO: 47784 - DNA, 26 bp, Artificial sequence
  SiRNA target sequence
aagttctgacattgtaattgatacaa

SEQ ID NO: 47785 - DNA, 26 bp, Artificial sequence
  SiRNA target sequence
agttctgacattgtaattgatacaat

SEQ ID NO: 47786 - DNA, 26 bp, Artificial sequence
  SiRNA target sequence
gttctgacattgtaattgatacaatt

SEQ ID NO: 47787 - DNA, 26 bp, Artificial sequence
  SiRNA target sequence
ttctgacattgtaattgatacaattg

SEQ ID NO: 47788 - DNA, 26 bp, Artificial sequence
  SiRNA target sequence
tctgacattgtaattgatacaattgt

SEQ ID NO: 47789 - DNA, 26 bp, Artificial sequence
  SiRNA target sequence
ctgacattgtaattgatacaattgtc

SEQ ID NO: 47790 - DNA, 26 bp, Artificial sequence
  SiRNA target sequence
tgacattgtaattgatacaattgtca

SEQ ID NO: 47791 - DNA, 26 bp, Artificial sequence
  SiRNA target sequence
gacattgtaattgatacaattgtcaa

SEQ ID NO: 47792 - DNA, 26 bp, Artificial sequence
  SiRNA target sequence
acattgtaattgatacaattgtcaaa

SEQ ID NO: 47793 - DNA, 26 bp, Artificial sequence
  SiRNA target sequence
cattgtaattgatacaattgtcaaaa

SEQ ID NO: 47794 - DNA, 26 bp, Artificial sequence
  SiRNA target sequence
attgtaattgatacaattgtcaaaac

SEQ ID NO: 47795 - DNA, 26 bp, Artificial sequence
  SiRNA target sequence
ttgtaattgatacaattgtcaaaact

SEQ ID NO: 47796 - DNA, 26 bp, Artificial sequence
  SiRNA target sequence
tgtaattgatacaattgtcaaaactg

SEQ ID NO: 47797 - DNA, 26 bp, Artificial sequence
  SiRNA target sequence
gtaattgatacaattgtcaaaactgc

SEQ ID NO: 47798 - DNA, 26 bp, Artificial sequence
  SiRNA target sequence
taattgatacaattgtcaaaactgca

SEQ ID NO: 47799 - DNA, 26 bp, Artificial sequence
  SiRNA target sequence
aattgatacaattgtcaaaactgcaa

SEQ ID NO: 47800 - DNA, 26 bp, Artificial sequence
  SiRNA target sequence
attgatacaattgtcaaaactgcaaa

SEQ ID NO: 47801 - DNA, 26 bp, Artificial sequence
  SiRNA target sequence
ttgatacaattgtcaaaactgcaaaa

SEQ ID NO: 47802 - DNA, 26 bp, Artificial sequence
  SiRNA target sequence
tgatacaattgtcaaaactgcaaaat

SEQ ID NO: 47803 - DNA, 26 bp, Artificial sequence
  SiRNA target sequence
gatacaattgtcaaaactgcaaaata

SEQ ID NO: 47804 - DNA, 26 bp, Artificial sequence
  SiRNA target sequence
atacaattgtcaaaactgcaaaatac

SEQ ID NO: 47805 - DNA, 26 bp, Artificial sequence
  SiRNA target sequence
tacaattgtcaaaactgcaaaataca

SEQ ID NO: 47806 - DNA, 26 bp, Artificial sequence
  SiRNA target sequence
acaattgtcaaaactgcaaaatacaa

SEQ ID NO: 47807 - DNA, 26 bp, Artificial sequence
  SiRNA target sequence
caattgtcaaaactgcaaaatacaaa

SEQ ID NO: 47808 - DNA, 26 bp, Artificial sequence
  SiRNA target sequence
aattgtcaaaactgcaaaatacaaaa

SEQ ID NO: 47809 - DNA, 26 bp, Artificial sequence
  SiRNA target sequence
attgtcaaaactgcaaaatacaaaag

SEQ ID NO: 47810 - DNA, 26 bp, Artificial sequence
  SiRNA target sequence
ttgtcaaaactgcaaaatacaaaaga

SEQ ID NO: 47811 - DNA, 26 bp, Artificial sequence
  SiRNA target sequence
tgtcaaaactgcaaaatacaaaagac

SEQ ID NO: 47812 - DNA, 26 bp, Artificial sequence
  SiRNA target sequence
gtcaaaactgcaaaatacaaaagact

SEQ ID NO: 47813 - DNA, 26 bp, Artificial sequence
  SiRNA target sequence
tcaaaactgcaaaatacaaaagactt

SEQ ID NO: 47814 - DNA, 26 bp, Artificial sequence
  SiRNA target sequence
caaaactgcaaaatacaaaagacttt

SEQ ID NO: 47815 - DNA, 26 bp, Artificial sequence
  SiRNA target sequence
aaaactgcaaaatacaaaagactttg

SEQ ID NO: 47816 - DNA, 26 bp, Artificial sequence
  SiRNA target sequence
aaactgcaaaatacaaaagactttga

SEQ ID NO: 47817 - DNA, 26 bp, Artificial sequence
  SiRNA target sequence
aactgcaaaatacaaaagactttgac

SEQ ID NO: 47818 - DNA, 26 bp, Artificial sequence
  SiRNA target sequence
actgcaaaatacaaaagactttgact

SEQ ID NO: 47819 - DNA, 26 bp, Artificial sequence
  SiRNA target sequence
ctgcaaaatacaaaagactttgacta

SEQ ID NO: 47820 - DNA, 26 bp, Artificial sequence
  SiRNA target sequence
tgcaaaatacaaaagactttgactaa

SEQ ID NO: 47821 - DNA, 26 bp, Artificial sequence
  SiRNA target sequence
gcaaaatacaaaagactttgactaag

SEQ ID NO: 47822 - DNA, 26 bp, Artificial sequence
  SiRNA target sequence
caaaatacaaaagactttgactaaga

SEQ ID NO: 47823 - DNA, 26 bp, Artificial sequence
  SiRNA target sequence
aaaatacaaaagactttgactaagat

SEQ ID NO: 47824 - DNA, 26 bp, Artificial sequence
  SiRNA target sequence
aaatacaaaagactttgactaagatc

SEQ ID NO: 47825 - DNA, 26 bp, Artificial sequence
  SiRNA target sequence
aatacaaaagactttgactaagatct

SEQ ID NO: 47826 - DNA, 26 bp, Artificial sequence
  SiRNA target sequence
atacaaaagactttgactaagatctt

SEQ ID NO: 47827 - DNA, 26 bp, Artificial sequence
  SiRNA target sequence
tacaaaagactttgactaagatcttt

SEQ ID NO: 47828 - DNA, 26 bp, Artificial sequence
  SiRNA target sequence
acaaaagactttgactaagatcttta

SEQ ID NO: 47829 - DNA, 26 bp, Artificial sequence
  SiRNA target sequence
caaaagactttgactaagatctttat

SEQ ID NO: 47830 - DNA, 26 bp, Artificial sequence
  SiRNA target sequence
aaaagactttgactaagatctttatt

SEQ ID NO: 47831 - DNA, 26 bp, Artificial sequence
  SiRNA target sequence
aaagactttgactaagatctttatta

SEQ ID NO: 47832 - DNA, 26 bp, Artificial sequence
  SiRNA target sequence
aagactttgactaagatctttattat

SEQ ID NO: 47833 - DNA, 26 bp, Artificial sequence
  SiRNA target sequence
agactttgactaagatctttattatc

SEQ ID NO: 47834 - DNA, 26 bp, Artificial sequence
  SiRNA target sequence
gactttgactaagatctttattatct

SEQ ID NO: 47835 - DNA, 26 bp, Artificial sequence
  SiRNA target sequence
actttgactaagatctttattatctg

SEQ ID NO: 47836 - DNA, 26 bp, Artificial sequence
  SiRNA target sequence
ctttgactaagatctttattatctgt

SEQ ID NO: 47837 - DNA, 26 bp, Artificial sequence
  SiRNA target sequence
tttgactaagatctttattatctgta

SEQ ID NO: 47838 - DNA, 26 bp, Artificial sequence
  SiRNA target sequence
ttgactaagatctttattatctgtaa

SEQ ID NO: 47839 - DNA, 26 bp, Artificial sequence
  SiRNA target sequence
tgactaagatctttattatctgtaat

SEQ ID NO: 47840 - DNA, 26 bp, Artificial sequence
  SiRNA target sequence
gactaagatctttattatctgtaata

SEQ ID NO: 47841 - DNA, 26 bp, Artificial sequence
  SiRNA target sequence
actaagatctttattatctgtaatat

SEQ ID NO: 47842 - DNA, 26 bp, Artificial sequence
  SiRNA target sequence
ctaagatctttattatctgtaatatc

SEQ ID NO: 47843 - DNA, 26 bp, Artificial sequence
  SiRNA target sequence
taagatctttattatctgtaatatca

SEQ ID NO: 47844 - DNA, 26 bp, Artificial sequence
  SiRNA target sequence
aagatctttattatctgtaatatcac

SEQ ID NO: 47845 - DNA, 26 bp, Artificial sequence
  SiRNA target sequence
agatctttattatctgtaatatcact

SEQ ID NO: 47846 - DNA, 26 bp, Artificial sequence
  SiRNA target sequence
gatctttattatctgtaatatcacta

SEQ ID NO: 47847 - DNA, 26 bp, Artificial sequence
  SiRNA target sequence
atctttattatctgtaatatcactag

SEQ ID NO: 47848 - DNA, 26 bp, Artificial sequence
  SiRNA target sequence
tctttattatctgtaatatcactagt

SEQ ID NO: 47849 - DNA, 26 bp, Artificial sequence
  SiRNA target sequence
ctttattatctgtaatatcactagtc

SEQ ID NO: 47850 - DNA, 26 bp, Artificial sequence
  SiRNA target sequence
tttattatctgtaatatcactagtca

SEQ ID NO: 47851 - DNA, 26 bp, Artificial sequence
  SiRNA target sequence
ttattatctgtaatatcactagtcaa

SEQ ID NO: 47852 - DNA, 26 bp, Artificial sequence
  SiRNA target sequence
tattatctgtaatatcactagtcaat

SEQ ID NO: 47853 - DNA, 26 bp, Artificial sequence
  SiRNA target sequence
attatctgtaatatcactagtcaatt

SEQ ID NO: 47854 - DNA, 26 bp, Artificial sequence
  SiRNA target sequence
ttatctgtaatatcactagtcaattt

SEQ ID NO: 47855 - DNA, 26 bp, Artificial sequence
  SiRNA target sequence
tatctgtaatatcactagtcaatttc

SEQ ID NO: 47856 - DNA, 26 bp, Artificial sequence
  SiRNA target sequence
atctgtaatatcactagtcaatttcc

SEQ ID NO: 47857 - DNA, 26 bp, Artificial sequence
  SiRNA target sequence
tctgtaatatcactagtcaatttccg

SEQ ID NO: 47858 - DNA, 26 bp, Artificial sequence
  SiRNA target sequence
ctgtaatatcactagtcaatttccgg

SEQ ID NO: 47859 - DNA, 26 bp, Artificial sequence
  SiRNA target sequence
tgtaatatcactagtcaatttccggg

SEQ ID NO: 47860 - DNA, 26 bp, Artificial sequence
  SiRNA target sequence
gtaatatcactagtcaatttccgggt

SEQ ID NO: 47861 - DNA, 26 bp, Artificial sequence
  SiRNA target sequence
taatatcactagtcaatttccgggta

SEQ ID NO: 47862 - DNA, 26 bp, Artificial sequence
  SiRNA target sequence
aatatcactagtcaatttccgggtag

SEQ ID NO: 47863 - DNA, 26 bp, Artificial sequence
  SiRNA target sequence
atatcactagtcaatttccgggtagc

SEQ ID NO: 47864 - DNA, 26 bp, Artificial sequence
  SiRNA target sequence
tatcactagtcaatttccgggtagct

SEQ ID NO: 47865 - DNA, 26 bp, Artificial sequence
  SiRNA target sequence
atcactagtcaatttccgggtagctt

SEQ ID NO: 47866 - DNA, 26 bp, Artificial sequence
  SiRNA target sequence
tcactagtcaatttccgggtagcttc

SEQ ID NO: 47867 - DNA, 26 bp, Artificial sequence
  SiRNA target sequence
cactagtcaatttccgggtagcttca

SEQ ID NO: 47868 - DNA, 26 bp, Artificial sequence
  SiRNA target sequence
actagtcaatttccgggtagcttcaa

SEQ ID NO: 47869 - DNA, 26 bp, Artificial sequence
  SiRNA target sequence
ctagtcaatttccgggtagcttcaac

SEQ ID NO: 47870 - DNA, 26 bp, Artificial sequence
  SiRNA target sequence
tagtcaatttccgggtagcttcaact

SEQ ID NO: 47871 - DNA, 26 bp, Artificial sequence
  SiRNA target sequence
agtcaatttccgggtagcttcaactg

SEQ ID NO: 47872 - DNA, 26 bp, Artificial sequence
  SiRNA target sequence
gtcaatttccgggtagcttcaactgt

SEQ ID NO: 47873 - DNA, 26 bp, Artificial sequence
  SiRNA target sequence
tcaatttccgggtagcttcaactgtt

SEQ ID NO: 47874 - DNA, 26 bp, Artificial sequence
  SiRNA target sequence
caatttccgggtagcttcaactgtta

SEQ ID NO: 47875 - DNA, 26 bp, Artificial sequence
  SiRNA target sequence
aatttccgggtagcttcaactgttaa

SEQ ID NO: 47876 - DNA, 26 bp, Artificial sequence
  SiRNA target sequence
atttccgggtagcttcaactgttaaa

SEQ ID NO: 47877 - DNA, 26 bp, Artificial sequence
  SiRNA target sequence
tttccgggtagcttcaactgttaaaa

SEQ ID NO: 47878 - DNA, 26 bp, Artificial sequence
  SiRNA target sequence
ttccgggtagcttcaactgttaaaac

SEQ ID NO: 47879 - DNA, 26 bp, Artificial sequence
  SiRNA target sequence
tccgggtagcttcaactgttaaaaca

SEQ ID NO: 47880 - DNA, 26 bp, Artificial sequence
  SiRNA target sequence
ccgggtagcttcaactgttaaaacat

SEQ ID NO: 47881 - DNA, 26 bp, Artificial sequence
  SiRNA target sequence
cgggtagcttcaactgttaaaacatt

SEQ ID NO: 47882 - DNA, 26 bp, Artificial sequence
  SiRNA target sequence
gggtagcttcaactgttaaaacatta

SEQ ID NO: 47883 - DNA, 26 bp, Artificial sequence
  SiRNA target sequence
ggtagcttcaactgttaaaacattaa

SEQ ID NO: 47884 - DNA, 26 bp, Artificial sequence
  SiRNA target sequence
gtagcttcaactgttaaaacattaaa

SEQ ID NO: 47885 - DNA, 26 bp, Artificial sequence
  SiRNA target sequence
tagcttcaactgttaaaacattaaat

SEQ ID NO: 47886 - DNA, 26 bp, Artificial sequence
  SiRNA target sequence
agcttcaactgttaaaacattaaatg

SEQ ID NO: 47887 - DNA, 26 bp, Artificial sequence
  SiRNA target sequence
gcttcaactgttaaaacattaaatgt

SEQ ID NO: 47888 - DNA, 26 bp, Artificial sequence
  SiRNA target sequence
cttcaactgttaaaacattaaatgta

SEQ ID NO: 47889 - DNA, 26 bp, Artificial sequence
  SiRNA target sequence
ttcaactgttaaaacattaaatgtac

SEQ ID NO: 47890 - DNA, 26 bp, Artificial sequence
  SiRNA target sequence
tcaactgttaaaacattaaatgtaca

SEQ ID NO: 47891 - DNA, 26 bp, Artificial sequence
  SiRNA target sequence
caactgttaaaacattaaatgtacaa

SEQ ID NO: 47892 - DNA, 26 bp, Artificial sequence
  SiRNA target sequence
aactgttaaaacattaaatgtacaaa

SEQ ID NO: 47893 - DNA, 26 bp, Artificial sequence
  SiRNA target sequence
actgttaaaacattaaatgtacaaac

SEQ ID NO: 47894 - DNA, 26 bp, Artificial sequence
  SiRNA target sequence
ctgttaaaacattaaatgtacaaact

SEQ ID NO: 47895 - DNA, 26 bp, Artificial sequence
  SiRNA target sequence
tgttaaaacattaaatgtacaaactg

SEQ ID NO: 47896 - DNA, 26 bp, Artificial sequence
  SiRNA target sequence
gttaaaacattaaatgtacaaactgc

SEQ ID NO: 47897 - DNA, 26 bp, Artificial sequence
  SiRNA target sequence
ttaaaacattaaatgtacaaactgca

SEQ ID NO: 47898 - DNA, 26 bp, Artificial sequence
  SiRNA target sequence
taaaacattaaatgtacaaactgcaa

SEQ ID NO: 47899 - DNA, 26 bp, Artificial sequence
  SiRNA target sequence
aaaacattaaatgtacaaactgcaaa

SEQ ID NO: 47900 - DNA, 26 bp, Artificial sequence
  SiRNA target sequence
aaacattaaatgtacaaactgcaaat

SEQ ID NO: 47901 - DNA, 26 bp, Artificial sequence
  SiRNA target sequence
aacattaaatgtacaaactgcaaatg

SEQ ID NO: 47902 - DNA, 26 bp, Artificial sequence
  SiRNA target sequence
acattaaatgtacaaactgcaaatgt

SEQ ID NO: 47903 - DNA, 26 bp, Artificial sequence
  SiRNA target sequence
cattaaatgtacaaactgcaaatgtc

SEQ ID NO: 47904 - DNA, 26 bp, Artificial sequence
  SiRNA target sequence
attaaatgtacaaactgcaaatgtcc

SEQ ID NO: 47905 - DNA, 26 bp, Artificial sequence
  SiRNA target sequence
ttaaatgtacaaactgcaaatgtccc

SEQ ID NO: 47906 - DNA, 26 bp, Artificial sequence
  SiRNA target sequence
taaatgtacaaactgcaaatgtccca

SEQ ID NO: 47907 - DNA, 26 bp, Artificial sequence
  SiRNA target sequence
aaatgtacaaactgcaaatgtcccaa

SEQ ID NO: 47908 - DNA, 26 bp, Artificial sequence
  SiRNA target sequence
aatgtacaaactgcaaatgtcccaaa

SEQ ID NO: 47909 - DNA, 26 bp, Artificial sequence
  SiRNA target sequence
atgtacaaactgcaaatgtcccaaaa

SEQ ID NO: 47910 - DNA, 26 bp, Artificial sequence
  SiRNA target sequence
tgtacaaactgcaaatgtcccaaaaa

SEQ ID NO: 47911 - DNA, 26 bp, Artificial sequence
  SiRNA target sequence
gtacaaactgcaaatgtcccaaaaat

SEQ ID NO: 47912 - DNA, 26 bp, Artificial sequence
  SiRNA target sequence
tacaaactgcaaatgtcccaaaaatt

SEQ ID NO: 47913 - DNA, 26 bp, Artificial sequence
  SiRNA target sequence
acaaactgcaaatgtcccaaaaatta

SEQ ID NO: 47914 - DNA, 26 bp, Artificial sequence
  SiRNA target sequence
caaactgcaaatgtcccaaaaattat

SEQ ID NO: 47915 - DNA, 26 bp, Artificial sequence
  SiRNA target sequence
aaactgcaaatgtcccaaaaattatg

SEQ ID NO: 47916 - DNA, 26 bp, Artificial sequence
  SiRNA target sequence
aactgcaaatgtcccaaaaattatgt

SEQ ID NO: 47917 - DNA, 26 bp, Artificial sequence
  SiRNA target sequence
actgcaaatgtcccaaaaattatgta

SEQ ID NO: 47918 - DNA, 26 bp, Artificial sequence
  SiRNA target sequence
ctgcaaatgtcccaaaaattatgtaa

SEQ ID NO: 47919 - DNA, 26 bp, Artificial sequence
  SiRNA target sequence
tgcaaatgtcccaaaaattatgtaaa

SEQ ID NO: 47920 - DNA, 26 bp, Artificial sequence
  SiRNA target sequence
gcaaatgtcccaaaaattatgtaaat

SEQ ID NO: 47921 - DNA, 26 bp, Artificial sequence
  SiRNA target sequence
caaatgtcccaaaaattatgtaaatg

SEQ ID NO: 47922 - DNA, 26 bp, Artificial sequence
  SiRNA target sequence
aaatgtcccaaaaattatgtaaatga

SEQ ID NO: 47923 - DNA, 26 bp, Artificial sequence
  SiRNA target sequence
aatgtcccaaaaattatgtaaatgac

SEQ ID NO: 47924 - DNA, 26 bp, Artificial sequence
  SiRNA target sequence
atgtcccaaaaattatgtaaatgaca

SEQ ID NO: 47925 - DNA, 26 bp, Artificial sequence
  SiRNA target sequence
tgtcccaaaaattatgtaaatgacaa

SEQ ID NO: 47926 - DNA, 26 bp, Artificial sequence
  SiRNA target sequence
gtcccaaaaattatgtaaatgacaaa

SEQ ID NO: 47927 - DNA, 26 bp, Artificial sequence
  SiRNA target sequence
tcccaaaaattatgtaaatgacaaat

SEQ ID NO: 47928 - DNA, 26 bp, Artificial sequence
  SiRNA target sequence
cccaaaaattatgtaaatgacaaatg

SEQ ID NO: 47929 - DNA, 26 bp, Artificial sequence
  SiRNA target sequence
ccaaaaattatgtaaatgacaaatgt

SEQ ID NO: 47930 - DNA, 26 bp, Artificial sequence
  SiRNA target sequence
caaaaattatgtaaatgacaaatgtt

SEQ ID NO: 47931 - DNA, 26 bp, Artificial sequence
  SiRNA target sequence
aaaaattatgtaaatgacaaatgttc

SEQ ID NO: 47932 - DNA, 26 bp, Artificial sequence
  SiRNA target sequence
aaaattatgtaaatgacaaatgttcg

SEQ ID NO: 47933 - DNA, 26 bp, Artificial sequence
  SiRNA target sequence
aaattatgtaaatgacaaatgttcga

SEQ ID NO: 47934 - DNA, 26 bp, Artificial sequence
  SiRNA target sequence
aattatgtaaatgacaaatgttcgaa

SEQ ID NO: 47935 - DNA, 26 bp, Artificial sequence
  SiRNA target sequence
attatgtaaatgacaaatgttcgaat

SEQ ID NO: 47936 - DNA, 26 bp, Artificial sequence
  SiRNA target sequence
ttatgtaaatgacaaatgttcgaata

SEQ ID NO: 47937 - DNA, 26 bp, Artificial sequence
  SiRNA target sequence
tatgtaaatgacaaatgttcgaataa

SEQ ID NO: 47938 - DNA, 26 bp, Artificial sequence
  SiRNA target sequence
atgtaaatgacaaatgttcgaataaa

SEQ ID NO: 47939 - DNA, 26 bp, Artificial sequence
  SiRNA target sequence
tgtaaatgacaaatgttcgaataaag

SEQ ID NO: 47940 - DNA, 26 bp, Artificial sequence
  SiRNA target sequence
gtaaatgacaaatgttcgaataaagg

SEQ ID NO: 47941 - DNA, 26 bp, Artificial sequence
  SiRNA target sequence
taaatgacaaatgttcgaataaaggg

SEQ ID NO: 47942 - DNA, 26 bp, Artificial sequence
  SiRNA target sequence
aaatgacaaatgttcgaataaagggc

SEQ ID NO: 47943 - DNA, 26 bp, Artificial sequence
  SiRNA target sequence
aatgacaaatgttcgaataaagggct

SEQ ID NO: 47944 - DNA, 26 bp, Artificial sequence
  SiRNA target sequence
atgacaaatgttcgaataaagggctt

SEQ ID NO: 47945 - DNA, 26 bp, Artificial sequence
  SiRNA target sequence
tgacaaatgttcgaataaagggcttt

SEQ ID NO: 47946 - DNA, 26 bp, Artificial sequence
  SiRNA target sequence
gacaaatgttcgaataaagggctttg

SEQ ID NO: 47947 - DNA, 26 bp, Artificial sequence
  SiRNA target sequence
acaaatgttcgaataaagggctttga

SEQ ID NO: 47948 - DNA, 26 bp, Artificial sequence
  SiRNA target sequence
caaatgttcgaataaagggctttgaa

SEQ ID NO: 47949 - DNA, 26 bp, Artificial sequence
  SiRNA target sequence
aaatgttcgaataaagggctttgaaa

SEQ ID NO: 47950 - DNA, 26 bp, Artificial sequence
  SiRNA target sequence
aatgttcgaataaagggctttgaaat

SEQ ID NO: 47951 - DNA, 26 bp, Artificial sequence
  SiRNA target sequence
atgttcgaataaagggctttgaaata

SEQ ID NO: 47952 - DNA, 26 bp, Artificial sequence
  SiRNA target sequence
tgttcgaataaagggctttgaaataa

SEQ ID NO: 47953 - DNA, 26 bp, Artificial sequence
  SiRNA target sequence
gttcgaataaagggctttgaaataac

SEQ ID NO: 47954 - DNA, 26 bp, Artificial sequence
  SiRNA target sequence
ttcgaataaagggctttgaaataaca

SEQ ID NO: 47955 - DNA, 26 bp, Artificial sequence
  SiRNA target sequence
tcgaataaagggctttgaaataacat

SEQ ID NO: 47956 - DNA, 26 bp, Artificial sequence
  SiRNA target sequence
cgaataaagggctttgaaataacata

SEQ ID NO: 47957 - DNA, 26 bp, Artificial sequence
  SiRNA target sequence
gaataaagggctttgaaataacatat

SEQ ID NO: 47958 - DNA, 26 bp, Artificial sequence
  SiRNA target sequence
aataaagggctttgaaataacatatt

SEQ ID NO: 47959 - DNA, 26 bp, Artificial sequence
  SiRNA target sequence
ataaagggctttgaaataacatattc

SEQ ID NO: 47960 - DNA, 26 bp, Artificial sequence
  SiRNA target sequence
taaagggctttgaaataacatattct

SEQ ID NO: 47961 - DNA, 26 bp, Artificial sequence
  SiRNA target sequence
aaagggctttgaaataacatattcta

SEQ ID NO: 47962 - DNA, 26 bp, Artificial sequence
  SiRNA target sequence
aagggctttgaaataacatattctac

SEQ ID NO: 47963 - DNA, 26 bp, Artificial sequence
  SiRNA target sequence
agggctttgaaataacatattctaca

SEQ ID NO: 47964 - DNA, 26 bp, Artificial sequence
  SiRNA target sequence
gggctttgaaataacatattctacaa

SEQ ID NO: 47965 - DNA, 26 bp, Artificial sequence
  SiRNA target sequence
ggctttgaaataacatattctacaat

SEQ ID NO: 47966 - DNA, 26 bp, Artificial sequence
  SiRNA target sequence
gctttgaaataacatattctacaatc

SEQ ID NO: 47967 - DNA, 26 bp, Artificial sequence
  SiRNA target sequence
ctttgaaataacatattctacaatca

SEQ ID NO: 47968 - DNA, 26 bp, Artificial sequence
  SiRNA target sequence
tttgaaataacatattctacaatcag

SEQ ID NO: 47969 - DNA, 26 bp, Artificial sequence
  SiRNA target sequence
ttgaaataacatattctacaatcagg

SEQ ID NO: 47970 - DNA, 26 bp, Artificial sequence
  SiRNA target sequence
tgaaataacatattctacaatcaggt

SEQ ID NO: 47971 - DNA, 26 bp, Artificial sequence
  SiRNA target sequence
gaaataacatattctacaatcaggtc

SEQ ID NO: 47972 - DNA, 26 bp, Artificial sequence
  SiRNA target sequence
aaataacatattctacaatcaggtct

SEQ ID NO: 47973 - DNA, 26 bp, Artificial sequence
  SiRNA target sequence
aataacatattctacaatcaggtctt

SEQ ID NO: 47974 - DNA, 26 bp, Artificial sequence
  SiRNA target sequence
ataacatattctacaatcaggtcttt

SEQ ID NO: 47975 - DNA, 26 bp, Artificial sequence
  SiRNA target sequence
taacatattctacaatcaggtctttc

SEQ ID NO: 47976 - DNA, 26 bp, Artificial sequence
  SiRNA target sequence
aacatattctacaatcaggtctttca

SEQ ID NO: 47977 - DNA, 26 bp, Artificial sequence
  SiRNA target sequence
acatattctacaatcaggtctttcat

SEQ ID NO: 47978 - DNA, 26 bp, Artificial sequence
  SiRNA target sequence
catattctacaatcaggtctttcata

SEQ ID NO: 47979 - DNA, 26 bp, Artificial sequence
  SiRNA target sequence
atattctacaatcaggtctttcataa

SEQ ID NO: 47980 - DNA, 26 bp, Artificial sequence
  SiRNA target sequence
tattctacaatcaggtctttcataat

SEQ ID NO: 47981 - DNA, 26 bp, Artificial sequence
  SiRNA target sequence
attctacaatcaggtctttcataata

SEQ ID NO: 47982 - DNA, 26 bp, Artificial sequence
  SiRNA target sequence
ttctacaatcaggtctttcataatac

SEQ ID NO: 47983 - DNA, 26 bp, Artificial sequence
  SiRNA target sequence
tctacaatcaggtctttcataatact

SEQ ID NO: 47984 - DNA, 26 bp, Artificial sequence
  SiRNA target sequence
ctacaatcaggtctttcataatacta

SEQ ID NO: 47985 - DNA, 26 bp, Artificial sequence
  SiRNA target sequence
tacaatcaggtctttcataatactaa

SEQ ID NO: 47986 - DNA, 26 bp, Artificial sequence
  SiRNA target sequence
acaatcaggtctttcataatactaat

SEQ ID NO: 47987 - DNA, 26 bp, Artificial sequence
  SiRNA target sequence
caatcaggtctttcataatactaata

SEQ ID NO: 47988 - DNA, 26 bp, Artificial sequence
  SiRNA target sequence
aatcaggtctttcataatactaatat

SEQ ID NO: 47989 - DNA, 26 bp, Artificial sequence
  SiRNA target sequence
atcaggtctttcataatactaatatc

SEQ ID NO: 47990 - DNA, 26 bp, Artificial sequence
  SiRNA target sequence
tcaggtctttcataatactaatatca

SEQ ID NO: 47991 - DNA, 26 bp, Artificial sequence
  SiRNA target sequence
caggtctttcataatactaatatcac

SEQ ID NO: 47992 - DNA, 26 bp, Artificial sequence
  SiRNA target sequence
aggtctttcataatactaatatcact

SEQ ID NO: 47993 - DNA, 26 bp, Artificial sequence
  SiRNA target sequence
ggtctttcataatactaatatcacta

SEQ ID NO: 47994 - DNA, 26 bp, Artificial sequence
  SiRNA target sequence
gtctttcataatactaatatcactac

SEQ ID NO: 47995 - DNA, 26 bp, Artificial sequence
  SiRNA target sequence
tctttcataatactaatatcactacc

SEQ ID NO: 47996 - DNA, 26 bp, Artificial sequence
  SiRNA target sequence
ctttcataatactaatatcactacca

SEQ ID NO: 47997 - DNA, 26 bp, Artificial sequence
  SiRNA target sequence
tttcataatactaatatcactaccat

SEQ ID NO: 47998 - DNA, 26 bp, Artificial sequence
  SiRNA target sequence
ttcataatactaatatcactaccata

SEQ ID NO: 47999 - DNA, 26 bp, Artificial sequence
  SiRNA target sequence
tcataatactaatatcactaccataa

SEQ ID NO: 48000 - DNA, 26 bp, Artificial sequence
  SiRNA target sequence
cataatactaatatcactaccataaa

SEQ ID NO: 48001 - DNA, 26 bp, Artificial sequence
  SiRNA target sequence
ataatactaatatcactaccataaat

SEQ ID NO: 48002 - DNA, 26 bp, Artificial sequence
  SiRNA target sequence
taatactaatatcactaccataaata

SEQ ID NO: 48003 - DNA, 26 bp, Artificial sequence
  SiRNA target sequence
aatactaatatcactaccataaatag

SEQ ID NO: 48004 - DNA, 26 bp, Artificial sequence
  SiRNA target sequence
atactaatatcactaccataaataga

SEQ ID NO: 48005 - DNA, 26 bp, Artificial sequence
  SiRNA target sequence
tactaatatcactaccataaatagat

SEQ ID NO: 48006 - DNA, 26 bp, Artificial sequence
  SiRNA target sequence
actaatatcactaccataaatagatt

SEQ ID NO: 48007 - DNA, 26 bp, Artificial sequence
  SiRNA target sequence
ctaatatcactaccataaatagattt

SEQ ID NO: 48008 - DNA, 26 bp, Artificial sequence
  SiRNA target sequence
taatatcactaccataaatagatttt

SEQ ID NO: 48009 - DNA, 26 bp, Artificial sequence
  SiRNA target sequence
aatatcactaccataaatagattttt

SEQ ID NO: 48010 - DNA, 26 bp, Artificial sequence
  SiRNA target sequence
atatcactaccataaatagatttttt

SEQ ID NO: 48011 - DNA, 26 bp, Artificial sequence
  SiRNA target sequence
tatcactaccataaatagattttttt

SEQ ID NO: 48012 - DNA, 26 bp, Artificial sequence
  SiRNA target sequence
atcactaccataaatagatttttttt

SEQ ID NO: 48013 - DNA, 26 bp, Artificial sequence
  SiRNA target sequence
tcactaccataaatagattttttttc

SEQ ID NO: 48014 - DNA, 26 bp, Artificial sequence
  SiRNA target sequence
cactaccataaatagattttttttct

SEQ ID NO: 48015 - DNA, 26 bp, Artificial sequence
  SiRNA target sequence
actaccataaatagattttttttcta

SEQ ID NO: 48016 - DNA, 26 bp, Artificial sequence
  SiRNA target sequence
ctaccataaatagattttttttctaa

SEQ ID NO: 48017 - DNA, 26 bp, Artificial sequence
  SiRNA target sequence
taccataaatagattttttttctaac

SEQ ID NO: 48018 - DNA, 26 bp, Artificial sequence
  SiRNA target sequence
accataaatagattttttttctaaca

SEQ ID NO: 48019 - DNA, 26 bp, Artificial sequence
  SiRNA target sequence
ccataaatagattttttttctaacat

SEQ ID NO: 48020 - DNA, 27 bp, Artificial sequence
  SiRNA target sequence
ttataagtttaatgtagaaataatatt

SEQ ID NO: 48021 - DNA, 27 bp, Artificial sequence
  SiRNA target sequence
tataagtttaatgtagaaataatattt

SEQ ID NO: 48022 - DNA, 27 bp, Artificial sequence
  SiRNA target sequence
ataagtttaatgtagaaataatatttt

SEQ ID NO: 48023 - DNA, 27 bp, Artificial sequence
  SiRNA target sequence
taagtttaatgtagaaataatattttc

SEQ ID NO: 48024 - DNA, 27 bp, Artificial sequence
  SiRNA target sequence
aagtttaatgtagaaataatattttct

SEQ ID NO: 48025 - DNA, 27 bp, Artificial sequence
  SiRNA target sequence
agtttaatgtagaaataatattttctt

SEQ ID NO: 48026 - DNA, 27 bp, Artificial sequence
  SiRNA target sequence
gtttaatgtagaaataatattttcttc

SEQ ID NO: 48027 - DNA, 27 bp, Artificial sequence
  SiRNA target sequence
tttaatgtagaaataatattttcttct

SEQ ID NO: 48028 - DNA, 27 bp, Artificial sequence
  SiRNA target sequence
ttaatgtagaaataatattttcttcta

SEQ ID NO: 48029 - DNA, 27 bp, Artificial sequence
  SiRNA target sequence
taatgtagaaataatattttcttctat

SEQ ID NO: 48030 - DNA, 27 bp, Artificial sequence
  SiRNA target sequence
aatgtagaaataatattttcttctatc

SEQ ID NO: 48031 - DNA, 27 bp, Artificial sequence
  SiRNA target sequence
atgtagaaataatattttcttctatct

SEQ ID NO: 48032 - DNA, 27 bp, Artificial sequence
  SiRNA target sequence
tgtagaaataatattttcttctatctt

SEQ ID NO: 48033 - DNA, 27 bp, Artificial sequence
  SiRNA target sequence
gtagaaataatattttcttctatctta

SEQ ID NO: 48034 - DNA, 27 bp, Artificial sequence
  SiRNA target sequence
tagaaataatattttcttctatcttat

SEQ ID NO: 48035 - DNA, 27 bp, Artificial sequence
  SiRNA target sequence
agaaataatattttcttctatcttatg

SEQ ID NO: 48036 - DNA, 27 bp, Artificial sequence
  SiRNA target sequence
gaaataatattttcttctatcttatgt

SEQ ID NO: 48037 - DNA, 27 bp, Artificial sequence
  SiRNA target sequence
aaataatattttcttctatcttatgta

SEQ ID NO: 48038 - DNA, 27 bp, Artificial sequence
  SiRNA target sequence
aataatattttcttctatcttatgtaa

SEQ ID NO: 48039 - DNA, 27 bp, Artificial sequence
  SiRNA target sequence
ataatattttcttctatcttatgtaat

SEQ ID NO: 48040 - DNA, 27 bp, Artificial sequence
  SiRNA target sequence
taatattttcttctatcttatgtaatg

SEQ ID NO: 48041 - DNA, 27 bp, Artificial sequence
  SiRNA target sequence
aatattttcttctatcttatgtaatga

SEQ ID NO: 48042 - DNA, 27 bp, Artificial sequence
  SiRNA target sequence
atattttcttctatcttatgtaatgat

SEQ ID NO: 48043 - DNA, 27 bp, Artificial sequence
  SiRNA target sequence
tattttcttctatcttatgtaatgata

SEQ ID NO: 48044 - DNA, 27 bp, Artificial sequence
  SiRNA target sequence
attttcttctatcttatgtaatgatac

SEQ ID NO: 48045 - DNA, 27 bp, Artificial sequence
  SiRNA target sequence
ttttcttctatcttatgtaatgataca

SEQ ID NO: 48046 - DNA, 27 bp, Artificial sequence
  SiRNA target sequence
tttcttctatcttatgtaatgatacag

SEQ ID NO: 48047 - DNA, 27 bp, Artificial sequence
  SiRNA target sequence
ttcttctatcttatgtaatgatacagt

SEQ ID NO: 48048 - DNA, 27 bp, Artificial sequence
  SiRNA target sequence
tcttctatcttatgtaatgatacagtt

SEQ ID NO: 48049 - DNA, 27 bp, Artificial sequence
  SiRNA target sequence
cttctatcttatgtaatgatacagttt

SEQ ID NO: 48050 - DNA, 27 bp, Artificial sequence
  SiRNA target sequence
ttctatcttatgtaatgatacagtttt

SEQ ID NO: 48051 - DNA, 27 bp, Artificial sequence
  SiRNA target sequence
tctatcttatgtaatgatacagttttg

SEQ ID NO: 48052 - DNA, 27 bp, Artificial sequence
  SiRNA target sequence
ctatcttatgtaatgatacagttttgt

SEQ ID NO: 48053 - DNA, 27 bp, Artificial sequence
  SiRNA target sequence
tatcttatgtaatgatacagttttgtt

SEQ ID NO: 48054 - DNA, 27 bp, Artificial sequence
  SiRNA target sequence
atcttatgtaatgatacagttttgttt

SEQ ID NO: 48055 - DNA, 27 bp, Artificial sequence
  SiRNA target sequence
tcttatgtaatgatacagttttgtttt

SEQ ID NO: 48056 - DNA, 27 bp, Artificial sequence
  SiRNA target sequence
cttatgtaatgatacagttttgttttt

SEQ ID NO: 48057 - DNA, 27 bp, Artificial sequence
  SiRNA target sequence
ttatgtaatgatacagttttgttttta

SEQ ID NO: 48058 - DNA, 27 bp, Artificial sequence
  SiRNA target sequence
tatgtaatgatacagttttgtttttaa

SEQ ID NO: 48059 - DNA, 27 bp, Artificial sequence
  SiRNA target sequence
atgtaatgatacagttttgtttttaat

SEQ ID NO: 48060 - DNA, 27 bp, Artificial sequence
  SiRNA target sequence
tgtaatgatacagttttgtttttaata

SEQ ID NO: 48061 - DNA, 27 bp, Artificial sequence
  SiRNA target sequence
gtaatgatacagttttgtttttaatac

SEQ ID NO: 48062 - DNA, 27 bp, Artificial sequence
  SiRNA target sequence
taatgatacagttttgtttttaatact

SEQ ID NO: 48063 - DNA, 27 bp, Artificial sequence
  SiRNA target sequence
aatgatacagttttgtttttaatactt

SEQ ID NO: 48064 - DNA, 27 bp, Artificial sequence
  SiRNA target sequence
atgatacagttttgtttttaatactta

SEQ ID NO: 48065 - DNA, 27 bp, Artificial sequence
  SiRNA target sequence
tgatacagttttgtttttaatacttag

SEQ ID NO: 48066 - DNA, 27 bp, Artificial sequence
  SiRNA target sequence
gatacagttttgtttttaatacttagc

SEQ ID NO: 48067 - DNA, 27 bp, Artificial sequence
  SiRNA target sequence
atacagttttgtttttaatacttagca

SEQ ID NO: 48068 - DNA, 27 bp, Artificial sequence
  SiRNA target sequence
tacagttttgtttttaatacttagcac

SEQ ID NO: 48069 - DNA, 27 bp, Artificial sequence
  SiRNA target sequence
acagttttgtttttaatacttagcact

SEQ ID NO: 48070 - DNA, 27 bp, Artificial sequence
  SiRNA target sequence
cagttttgtttttaatacttagcactt

SEQ ID NO: 48071 - DNA, 27 bp, Artificial sequence
  SiRNA target sequence
agttttgtttttaatacttagcacttt

SEQ ID NO: 48072 - DNA, 27 bp, Artificial sequence
  SiRNA target sequence
gttttgtttttaatacttagcacttta

SEQ ID NO: 48073 - DNA, 27 bp, Artificial sequence
  SiRNA target sequence
ttttgtttttaatacttagcactttat

SEQ ID NO: 48074 - DNA, 27 bp, Artificial sequence
  SiRNA target sequence
tttgtttttaatacttagcactttatc

SEQ ID NO: 48075 - DNA, 27 bp, Artificial sequence
  SiRNA target sequence
ttgtttttaatacttagcactttatca

SEQ ID NO: 48076 - DNA, 27 bp, Artificial sequence
  SiRNA target sequence
tgtttttaatacttagcactttatcaa

SEQ ID NO: 48077 - DNA, 27 bp, Artificial sequence
  SiRNA target sequence
gtttttaatacttagcactttatcaaa

SEQ ID NO: 48078 - DNA, 27 bp, Artificial sequence
  SiRNA target sequence
tttttaatacttagcactttatcaaat

SEQ ID NO: 48079 - DNA, 27 bp, Artificial sequence
  SiRNA target sequence
ttttaatacttagcactttatcaaata

SEQ ID NO: 48080 - DNA, 27 bp, Artificial sequence
  SiRNA target sequence
tttaatacttagcactttatcaaataa

SEQ ID NO: 48081 - DNA, 27 bp, Artificial sequence
  SiRNA target sequence
ttaatacttagcactttatcaaataag

SEQ ID NO: 48082 - DNA, 27 bp, Artificial sequence
  SiRNA target sequence
taatacttagcactttatcaaataagt

SEQ ID NO: 48083 - DNA, 27 bp, Artificial sequence
  SiRNA target sequence
aatacttagcactttatcaaataagtg

SEQ ID NO: 48084 - DNA, 27 bp, Artificial sequence
  SiRNA target sequence
atacttagcactttatcaaataagtgg

SEQ ID NO: 48085 - DNA, 27 bp, Artificial sequence
  SiRNA target sequence
tacttagcactttatcaaataagtgga

SEQ ID NO: 48086 - DNA, 27 bp, Artificial sequence
  SiRNA target sequence
acttagcactttatcaaataagtggag

SEQ ID NO: 48087 - DNA, 27 bp, Artificial sequence
  SiRNA target sequence
cttagcactttatcaaataagtggagt

SEQ ID NO: 48088 - DNA, 27 bp, Artificial sequence
  SiRNA target sequence
ttagcactttatcaaataagtggagta

SEQ ID NO: 48089 - DNA, 27 bp, Artificial sequence
  SiRNA target sequence
tagcactttatcaaataagtggagtaa

SEQ ID NO: 48090 - DNA, 27 bp, Artificial sequence
  SiRNA target sequence
agcactttatcaaataagtggagtaaa

SEQ ID NO: 48091 - DNA, 27 bp, Artificial sequence
  SiRNA target sequence
gcactttatcaaataagtggagtaaat

SEQ ID NO: 48092 - DNA, 27 bp, Artificial sequence
  SiRNA target sequence
cactttatcaaataagtggagtaaatc

SEQ ID NO: 48093 - DNA, 27 bp, Artificial sequence
  SiRNA target sequence
actttatcaaataagtggagtaaatct

SEQ ID NO: 48094 - DNA, 27 bp, Artificial sequence
  SiRNA target sequence
ctttatcaaataagtggagtaaatcta

SEQ ID NO: 48095 - DNA, 27 bp, Artificial sequence
  SiRNA target sequence
tttatcaaataagtggagtaaatctaa

SEQ ID NO: 48096 - DNA, 27 bp, Artificial sequence
  SiRNA target sequence
ttatcaaataagtggagtaaatctaaa

SEQ ID NO: 48097 - DNA, 27 bp, Artificial sequence
  SiRNA target sequence
tatcaaataagtggagtaaatctaaat

SEQ ID NO: 48098 - DNA, 27 bp, Artificial sequence
  SiRNA target sequence
atcaaataagtggagtaaatctaaatt

SEQ ID NO: 48099 - DNA, 27 bp, Artificial sequence
  SiRNA target sequence
tcaaataagtggagtaaatctaaatta

SEQ ID NO: 48100 - DNA, 27 bp, Artificial sequence
  SiRNA target sequence
caaataagtggagtaaatctaaattat

SEQ ID NO: 48101 - DNA, 27 bp, Artificial sequence
  SiRNA target sequence
aaataagtggagtaaatctaaattatg

SEQ ID NO: 48102 - DNA, 27 bp, Artificial sequence
  SiRNA target sequence
aataagtggagtaaatctaaattatgt

SEQ ID NO: 48103 - DNA, 27 bp, Artificial sequence
  SiRNA target sequence
ataagtggagtaaatctaaattatgta

SEQ ID NO: 48104 - DNA, 27 bp, Artificial sequence
  SiRNA target sequence
taagtggagtaaatctaaattatgtaa

SEQ ID NO: 48105 - DNA, 27 bp, Artificial sequence
  SiRNA target sequence
aagtggagtaaatctaaattatgtaaa

SEQ ID NO: 48106 - DNA, 27 bp, Artificial sequence
  SiRNA target sequence
agtggagtaaatctaaattatgtaaaa

SEQ ID NO: 48107 - DNA, 27 bp, Artificial sequence
  SiRNA target sequence
gtggagtaaatctaaattatgtaaaac

SEQ ID NO: 48108 - DNA, 27 bp, Artificial sequence
  SiRNA target sequence
tggagtaaatctaaattatgtaaaaca

SEQ ID NO: 48109 - DNA, 27 bp, Artificial sequence
  SiRNA target sequence
ggagtaaatctaaattatgtaaaacaa

SEQ ID NO: 48110 - DNA, 27 bp, Artificial sequence
  SiRNA target sequence
gagtaaatctaaattatgtaaaacaat

SEQ ID NO: 48111 - DNA, 27 bp, Artificial sequence
  SiRNA target sequence
agtaaatctaaattatgtaaaacaata

SEQ ID NO: 48112 - DNA, 27 bp, Artificial sequence
  SiRNA target sequence
gtaaatctaaattatgtaaaacaataa

SEQ ID NO: 48113 - DNA, 27 bp, Artificial sequence
  SiRNA target sequence
taaatctaaattatgtaaaacaataat

SEQ ID NO: 48114 - DNA, 27 bp, Artificial sequence
  SiRNA target sequence
aaatctaaattatgtaaaacaataatt

SEQ ID NO: 48115 - DNA, 27 bp, Artificial sequence
  SiRNA target sequence
aatctaaattatgtaaaacaataatta

SEQ ID NO: 48116 - DNA, 27 bp, Artificial sequence
  SiRNA target sequence
atctaaattatgtaaaacaataattat

SEQ ID NO: 48117 - DNA, 27 bp, Artificial sequence
  SiRNA target sequence
tctaaattatgtaaaacaataattatc

SEQ ID NO: 48118 - DNA, 27 bp, Artificial sequence
  SiRNA target sequence
ctaaattatgtaaaacaataattatcg

SEQ ID NO: 48119 - DNA, 27 bp, Artificial sequence
  SiRNA target sequence
taaattatgtaaaacaataattatcgt

SEQ ID NO: 48120 - DNA, 27 bp, Artificial sequence
  SiRNA target sequence
aaattatgtaaaacaataattatcgtc

SEQ ID NO: 48121 - DNA, 27 bp, Artificial sequence
  SiRNA target sequence
aattatgtaaaacaataattatcgtct

SEQ ID NO: 48122 - DNA, 27 bp, Artificial sequence
  SiRNA target sequence
attatgtaaaacaataattatcgtctt

SEQ ID NO: 48123 - DNA, 27 bp, Artificial sequence
  SiRNA target sequence
ttatgtaaaacaataattatcgtcttc

SEQ ID NO: 48124 - DNA, 27 bp, Artificial sequence
  SiRNA target sequence
tatgtaaaacaataattatcgtcttct

SEQ ID NO: 48125 - DNA, 27 bp, Artificial sequence
  SiRNA target sequence
atgtaaaacaataattatcgtcttctc

SEQ ID NO: 48126 - DNA, 27 bp, Artificial sequence
  SiRNA target sequence
tgtaaaacaataattatcgtcttctct

SEQ ID NO: 48127 - DNA, 27 bp, Artificial sequence
  SiRNA target sequence
gtaaaacaataattatcgtcttctcta

SEQ ID NO: 48128 - DNA, 27 bp, Artificial sequence
  SiRNA target sequence
taaaacaataattatcgtcttctctaa

SEQ ID NO: 48129 - DNA, 27 bp, Artificial sequence
  SiRNA target sequence
aaaacaataattatcgtcttctctaag

SEQ ID NO: 48130 - DNA, 27 bp, Artificial sequence
  SiRNA target sequence
aaacaataattatcgtcttctctaagt

SEQ ID NO: 48131 - DNA, 27 bp, Artificial sequence
  SiRNA target sequence
aacaataattatcgtcttctctaagtt

SEQ ID NO: 48132 - DNA, 27 bp, Artificial sequence
  SiRNA target sequence
acaataattatcgtcttctctaagttg

SEQ ID NO: 48133 - DNA, 27 bp, Artificial sequence
  SiRNA target sequence
caataattatcgtcttctctaagttgt

SEQ ID NO: 48134 - DNA, 27 bp, Artificial sequence
  SiRNA target sequence
aataattatcgtcttctctaagttgtt

SEQ ID NO: 48135 - DNA, 27 bp, Artificial sequence
  SiRNA target sequence
ataattatcgtcttctctaagttgttg

SEQ ID NO: 48136 - DNA, 27 bp, Artificial sequence
  SiRNA target sequence
taattatcgtcttctctaagttgttgg

SEQ ID NO: 48137 - DNA, 27 bp, Artificial sequence
  SiRNA target sequence
aattatcgtcttctctaagttgttgga

SEQ ID NO: 48138 - DNA, 27 bp, Artificial sequence
  SiRNA target sequence
attatcgtcttctctaagttgttggag

SEQ ID NO: 48139 - DNA, 27 bp, Artificial sequence
  SiRNA target sequence
ttatcgtcttctctaagttgttggaga

SEQ ID NO: 48140 - DNA, 27 bp, Artificial sequence
  SiRNA target sequence
tatcgtcttctctaagttgttggagat

SEQ ID NO: 48141 - DNA, 27 bp, Artificial sequence
  SiRNA target sequence
atcgtcttctctaagttgttggagatt

SEQ ID NO: 48142 - DNA, 27 bp, Artificial sequence
  SiRNA target sequence
tcgtcttctctaagttgttggagatta

SEQ ID NO: 48143 - DNA, 27 bp, Artificial sequence
  SiRNA target sequence
cgtcttctctaagttgttggagattag

SEQ ID NO: 48144 - DNA, 27 bp, Artificial sequence
  SiRNA target sequence
gtcttctctaagttgttggagattaga

SEQ ID NO: 48145 - DNA, 27 bp, Artificial sequence
  SiRNA target sequence
tcttctctaagttgttggagattagac

SEQ ID NO: 48146 - DNA, 27 bp, Artificial sequence
  SiRNA target sequence
cttctctaagttgttggagattagact

SEQ ID NO: 48147 - DNA, 27 bp, Artificial sequence
  SiRNA target sequence
ttctctaagttgttggagattagactt

SEQ ID NO: 48148 - DNA, 27 bp, Artificial sequence
  SiRNA target sequence
tctctaagttgttggagattagacttt

SEQ ID NO: 48149 - DNA, 27 bp, Artificial sequence
  SiRNA target sequence
ctctaagttgttggagattagactttt

SEQ ID NO: 48150 - DNA, 27 bp, Artificial sequence
  SiRNA target sequence
tctaagttgttggagattagactttta

SEQ ID NO: 48151 - DNA, 27 bp, Artificial sequence
  SiRNA target sequence
ctaagttgttggagattagacttttaa

SEQ ID NO: 48152 - DNA, 27 bp, Artificial sequence
  SiRNA target sequence
taagttgttggagattagacttttaag

SEQ ID NO: 48153 - DNA, 27 bp, Artificial sequence
  SiRNA target sequence
aagttgttggagattagacttttaaga

SEQ ID NO: 48154 - DNA, 27 bp, Artificial sequence
  SiRNA target sequence
agttgttggagattagacttttaagaa

SEQ ID NO: 48155 - DNA, 27 bp, Artificial sequence
  SiRNA target sequence
gttgttggagattagacttttaagaat

SEQ ID NO: 48156 - DNA, 27 bp, Artificial sequence
  SiRNA target sequence
ttgttggagattagacttttaagaatt

SEQ ID NO: 48157 - DNA, 27 bp, Artificial sequence
  SiRNA target sequence
tgttggagattagacttttaagaattt

SEQ ID NO: 48158 - DNA, 27 bp, Artificial sequence
  SiRNA target sequence
gttggagattagacttttaagaatttc

SEQ ID NO: 48159 - DNA, 27 bp, Artificial sequence
  SiRNA target sequence
ttggagattagacttttaagaatttca

SEQ ID NO: 48160 - DNA, 27 bp, Artificial sequence
  SiRNA target sequence
tggagattagacttttaagaatttcat

SEQ ID NO: 48161 - DNA, 27 bp, Artificial sequence
  SiRNA target sequence
ggagattagacttttaagaatttcata

SEQ ID NO: 48162 - DNA, 27 bp, Artificial sequence
  SiRNA target sequence
gagattagacttttaagaatttcatat

SEQ ID NO: 48163 - DNA, 27 bp, Artificial sequence
  SiRNA target sequence
agattagacttttaagaatttcatatt

SEQ ID NO: 48164 - DNA, 27 bp, Artificial sequence
  SiRNA target sequence
gattagacttttaagaatttcatattc

SEQ ID NO: 48165 - DNA, 27 bp, Artificial sequence
  SiRNA target sequence
attagacttttaagaatttcatattca

SEQ ID NO: 48166 - DNA, 27 bp, Artificial sequence
  SiRNA target sequence
ttagacttttaagaatttcatattcag

SEQ ID NO: 48167 - DNA, 27 bp, Artificial sequence
  SiRNA target sequence
tagacttttaagaatttcatattcagc

SEQ ID NO: 48168 - DNA, 27 bp, Artificial sequence
  SiRNA target sequence
agacttttaagaatttcatattcagct

SEQ ID NO: 48169 - DNA, 27 bp, Artificial sequence
  SiRNA target sequence
gacttttaagaatttcatattcagctt

SEQ ID NO: 48170 - DNA, 27 bp, Artificial sequence
  SiRNA target sequence
acttttaagaatttcatattcagcttt

SEQ ID NO: 48171 - DNA, 27 bp, Artificial sequence
  SiRNA target sequence
cttttaagaatttcatattcagctttt

SEQ ID NO: 48172 - DNA, 27 bp, Artificial sequence
  SiRNA target sequence
ttttaagaatttcatattcagcttttt

SEQ ID NO: 48173 - DNA, 27 bp, Artificial sequence
  SiRNA target sequence
tttaagaatttcatattcagctttttt

SEQ ID NO: 48174 - DNA, 27 bp, Artificial sequence
  SiRNA target sequence
ttaagaatttcatattcagcttttttg

SEQ ID NO: 48175 - DNA, 27 bp, Artificial sequence
  SiRNA target sequence
taagaatttcatattcagcttttttgt

SEQ ID NO: 48176 - DNA, 27 bp, Artificial sequence
  SiRNA target sequence
aagaatttcatattcagcttttttgtc

SEQ ID NO: 48177 - DNA, 27 bp, Artificial sequence
  SiRNA target sequence
agaatttcatattcagcttttttgtcc

SEQ ID NO: 48178 - DNA, 27 bp, Artificial sequence
  SiRNA target sequence
gaatttcatattcagcttttttgtcca

SEQ ID NO: 48179 - DNA, 27 bp, Artificial sequence
  SiRNA target sequence
aatttcatattcagcttttttgtccaa

SEQ ID NO: 48180 - DNA, 27 bp, Artificial sequence
  SiRNA target sequence
atttcatattcagcttttttgtccaat

SEQ ID NO: 48181 - DNA, 27 bp, Artificial sequence
  SiRNA target sequence
tttcatattcagcttttttgtccaatg

SEQ ID NO: 48182 - DNA, 27 bp, Artificial sequence
  SiRNA target sequence
ttcatattcagcttttttgtccaatgc

SEQ ID NO: 48183 - DNA, 27 bp, Artificial sequence
  SiRNA target sequence
tcatattcagcttttttgtccaatgcg

SEQ ID NO: 48184 - DNA, 27 bp, Artificial sequence
  SiRNA target sequence
catattcagcttttttgtccaatgcgg

SEQ ID NO: 48185 - DNA, 27 bp, Artificial sequence
  SiRNA target sequence
atattcagcttttttgtccaatgcggc

SEQ ID NO: 48186 - DNA, 27 bp, Artificial sequence
  SiRNA target sequence
tattcagcttttttgtccaatgcggcc

SEQ ID NO: 48187 - DNA, 27 bp, Artificial sequence
  SiRNA target sequence
attcagcttttttgtccaatgcggccg

SEQ ID NO: 48188 - DNA, 27 bp, Artificial sequence
  SiRNA target sequence
ttcagcttttttgtccaatgcggccgt

SEQ ID NO: 48189 - DNA, 27 bp, Artificial sequence
  SiRNA target sequence
tcagcttttttgtccaatgcggccgtt

SEQ ID NO: 48190 - DNA, 27 bp, Artificial sequence
  SiRNA target sequence
cagcttttttgtccaatgcggccgttg

SEQ ID NO: 48191 - DNA, 27 bp, Artificial sequence
  SiRNA target sequence
agcttttttgtccaatgcggccgttgg

SEQ ID NO: 48192 - DNA, 27 bp, Artificial sequence
  SiRNA target sequence
gcttttttgtccaatgcggccgttggc

SEQ ID NO: 48193 - DNA, 27 bp, Artificial sequence
  SiRNA target sequence
cttttttgtccaatgcggccgttggct

SEQ ID NO: 48194 - DNA, 27 bp, Artificial sequence
  SiRNA target sequence
ttttttgtccaatgcggccgttggctc

SEQ ID NO: 48195 - DNA, 27 bp, Artificial sequence
  SiRNA target sequence
tttttgtccaatgcggccgttggctca

SEQ ID NO: 48196 - DNA, 27 bp, Artificial sequence
  SiRNA target sequence
ttttgtccaatgcggccgttggctcat

SEQ ID NO: 48197 - DNA, 27 bp, Artificial sequence
  SiRNA target sequence
tttgtccaatgcggccgttggctcatc

SEQ ID NO: 48198 - DNA, 27 bp, Artificial sequence
  SiRNA target sequence
ttgtccaatgcggccgttggctcatct

SEQ ID NO: 48199 - DNA, 27 bp, Artificial sequence
  SiRNA target sequence
tgtccaatgcggccgttggctcatcta

SEQ ID NO: 48200 - DNA, 27 bp, Artificial sequence
  SiRNA target sequence
gtccaatgcggccgttggctcatctaa

SEQ ID NO: 48201 - DNA, 27 bp, Artificial sequence
  SiRNA target sequence
tccaatgcggccgttggctcatctaaa

SEQ ID NO: 48202 - DNA, 27 bp, Artificial sequence
  SiRNA target sequence
ccaatgcggccgttggctcatctaaaa

SEQ ID NO: 48203 - DNA, 27 bp, Artificial sequence
  SiRNA target sequence
caatgcggccgttggctcatctaaaat

SEQ ID NO: 48204 - DNA, 27 bp, Artificial sequence
  SiRNA target sequence
aatgcggccgttggctcatctaaaatt

SEQ ID NO: 48205 - DNA, 27 bp, Artificial sequence
  SiRNA target sequence
atgcggccgttggctcatctaaaatta

SEQ ID NO: 48206 - DNA, 27 bp, Artificial sequence
  SiRNA target sequence
tgcggccgttggctcatctaaaattat

SEQ ID NO: 48207 - DNA, 27 bp, Artificial sequence
  SiRNA target sequence
gcggccgttggctcatctaaaattata

SEQ ID NO: 48208 - DNA, 27 bp, Artificial sequence
  SiRNA target sequence
cggccgttggctcatctaaaattataa

SEQ ID NO: 48209 - DNA, 27 bp, Artificial sequence
  SiRNA target sequence
ggccgttggctcatctaaaattataat

SEQ ID NO: 48210 - DNA, 27 bp, Artificial sequence
  SiRNA target sequence
gccgttggctcatctaaaattataata

SEQ ID NO: 48211 - DNA, 27 bp, Artificial sequence
  SiRNA target sequence
ccgttggctcatctaaaattataatag

SEQ ID NO: 48212 - DNA, 27 bp, Artificial sequence
  SiRNA target sequence
cgttggctcatctaaaattataatagg

SEQ ID NO: 48213 - DNA, 27 bp, Artificial sequence
  SiRNA target sequence
gttggctcatctaaaattataatagga

SEQ ID NO: 48214 - DNA, 27 bp, Artificial sequence
  SiRNA target sequence
ttggctcatctaaaattataataggag

SEQ ID NO: 48215 - DNA, 27 bp, Artificial sequence
  SiRNA target sequence
tggctcatctaaaattataataggaga

SEQ ID NO: 48216 - DNA, 27 bp, Artificial sequence
  SiRNA target sequence
ggctcatctaaaattataataggagaa

SEQ ID NO: 48217 - DNA, 27 bp, Artificial sequence
  SiRNA target sequence
gctcatctaaaattataataggagaat

SEQ ID NO: 48218 - DNA, 27 bp, Artificial sequence
  SiRNA target sequence
ctcatctaaaattataataggagaatt

SEQ ID NO: 48219 - DNA, 27 bp, Artificial sequence
  SiRNA target sequence
tcatctaaaattataataggagaattt

SEQ ID NO: 48220 - DNA, 27 bp, Artificial sequence
  SiRNA target sequence
catctaaaattataataggagaatttt

SEQ ID NO: 48221 - DNA, 27 bp, Artificial sequence
  SiRNA target sequence
atctaaaattataataggagaattttt

SEQ ID NO: 48222 - DNA, 27 bp, Artificial sequence
  SiRNA target sequence
tctaaaattataataggagaatttttt

SEQ ID NO: 48223 - DNA, 27 bp, Artificial sequence
  SiRNA target sequence
ctaaaattataataggagaatttttta

SEQ ID NO: 48224 - DNA, 27 bp, Artificial sequence
  SiRNA target sequence
taaaattataataggagaattttttag

SEQ ID NO: 48225 - DNA, 27 bp, Artificial sequence
  SiRNA target sequence
aaaattataataggagaattttttagt

SEQ ID NO: 48226 - DNA, 27 bp, Artificial sequence
  SiRNA target sequence
aaattataataggagaattttttagtg

SEQ ID NO: 48227 - DNA, 27 bp, Artificial sequence
  SiRNA target sequence
aattataataggagaattttttagtgc

SEQ ID NO: 48228 - DNA, 27 bp, Artificial sequence
  SiRNA target sequence
attataataggagaattttttagtgcc

SEQ ID NO: 48229 - DNA, 27 bp, Artificial sequence
  SiRNA target sequence
ttataataggagaattttttagtgccg

SEQ ID NO: 48230 - DNA, 27 bp, Artificial sequence
  SiRNA target sequence
tataataggagaattttttagtgccga

SEQ ID NO: 48231 - DNA, 27 bp, Artificial sequence
  SiRNA target sequence
ataataggagaattttttagtgccgac

SEQ ID NO: 48232 - DNA, 27 bp, Artificial sequence
  SiRNA target sequence
taataggagaattttttagtgccgacc

SEQ ID NO: 48233 - DNA, 27 bp, Artificial sequence
  SiRNA target sequence
aataggagaattttttagtgccgacct

SEQ ID NO: 48234 - DNA, 27 bp, Artificial sequence
  SiRNA target sequence
ataggagaattttttagtgccgacctt

SEQ ID NO: 48235 - DNA, 27 bp, Artificial sequence
  SiRNA target sequence
taggagaattttttagtgccgacctta

SEQ ID NO: 48236 - DNA, 27 bp, Artificial sequence
  SiRNA target sequence
aggagaattttttagtgccgaccttaa

SEQ ID NO: 48237 - DNA, 27 bp, Artificial sequence
  SiRNA target sequence
ggagaattttttagtgccgaccttaac

SEQ ID NO: 48238 - DNA, 27 bp, Artificial sequence
  SiRNA target sequence
gagaattttttagtgccgaccttaaca

SEQ ID NO: 48239 - DNA, 27 bp, Artificial sequence
  SiRNA target sequence
agaattttttagtgccgaccttaacaa

SEQ ID NO: 48240 - DNA, 27 bp, Artificial sequence
  SiRNA target sequence
gaattttttagtgccgaccttaacaaa

SEQ ID NO: 48241 - DNA, 27 bp, Artificial sequence
  SiRNA target sequence
aattttttagtgccgaccttaacaaaa

SEQ ID NO: 48242 - DNA, 27 bp, Artificial sequence
  SiRNA target sequence
attttttagtgccgaccttaacaaaat

SEQ ID NO: 48243 - DNA, 27 bp, Artificial sequence
  SiRNA target sequence
ttttttagtgccgaccttaacaaaatt

SEQ ID NO: 48244 - DNA, 27 bp, Artificial sequence
  SiRNA target sequence
tttttagtgccgaccttaacaaaatta

SEQ ID NO: 48245 - DNA, 27 bp, Artificial sequence
  SiRNA target sequence
ttttagtgccgaccttaacaaaattac

SEQ ID NO: 48246 - DNA, 27 bp, Artificial sequence
  SiRNA target sequence
tttagtgccgaccttaacaaaattact

SEQ ID NO: 48247 - DNA, 27 bp, Artificial sequence
  SiRNA target sequence
ttagtgccgaccttaacaaaattactt

SEQ ID NO: 48248 - DNA, 27 bp, Artificial sequence
  SiRNA target sequence
tagtgccgaccttaacaaaattacttt

SEQ ID NO: 48249 - DNA, 27 bp, Artificial sequence
  SiRNA target sequence
agtgccgaccttaacaaaattactttt

SEQ ID NO: 48250 - DNA, 27 bp, Artificial sequence
  SiRNA target sequence
gtgccgaccttaacaaaattacttttt

SEQ ID NO: 48251 - DNA, 27 bp, Artificial sequence
  SiRNA target sequence
tgccgaccttaacaaaattactttttg

SEQ ID NO: 48252 - DNA, 27 bp, Artificial sequence
  SiRNA target sequence
gccgaccttaacaaaattactttttgt

SEQ ID NO: 48253 - DNA, 27 bp, Artificial sequence
  SiRNA target sequence
ccgaccttaacaaaattactttttgtc

SEQ ID NO: 48254 - DNA, 27 bp, Artificial sequence
  SiRNA target sequence
cgaccttaacaaaattactttttgtct

SEQ ID NO: 48255 - DNA, 27 bp, Artificial sequence
  SiRNA target sequence
gaccttaacaaaattactttttgtctt

SEQ ID NO: 48256 - DNA, 27 bp, Artificial sequence
  SiRNA target sequence
accttaacaaaattactttttgtcttt

SEQ ID NO: 48257 - DNA, 27 bp, Artificial sequence
  SiRNA target sequence
ccttaacaaaattactttttgtctttc

SEQ ID NO: 48258 - DNA, 27 bp, Artificial sequence
  SiRNA target sequence
cttaacaaaattactttttgtctttct

SEQ ID NO: 48259 - DNA, 27 bp, Artificial sequence
  SiRNA target sequence
ttaacaaaattactttttgtctttctc

SEQ ID NO: 48260 - DNA, 27 bp, Artificial sequence
  SiRNA target sequence
taacaaaattactttttgtctttctcc

SEQ ID NO: 48261 - DNA, 27 bp, Artificial sequence
  SiRNA target sequence
aacaaaattactttttgtctttctcca

SEQ ID NO: 48262 - DNA, 27 bp, Artificial sequence
  SiRNA target sequence
acaaaattactttttgtctttctccac

SEQ ID NO: 48263 - DNA, 27 bp, Artificial sequence
  SiRNA target sequence
caaaattactttttgtctttctccacc

SEQ ID NO: 48264 - DNA, 27 bp, Artificial sequence
  SiRNA target sequence
aaaattactttttgtctttctccacca

SEQ ID NO: 48265 - DNA, 27 bp, Artificial sequence
  SiRNA target sequence
aaattactttttgtctttctccaccac

SEQ ID NO: 48266 - DNA, 27 bp, Artificial sequence
  SiRNA target sequence
aattactttttgtctttctccaccact

SEQ ID NO: 48267 - DNA, 27 bp, Artificial sequence
  SiRNA target sequence
attactttttgtctttctccaccacta

SEQ ID NO: 48268 - DNA, 27 bp, Artificial sequence
  SiRNA target sequence
ttactttttgtctttctccaccactaa

SEQ ID NO: 48269 - DNA, 27 bp, Artificial sequence
  SiRNA target sequence
tactttttgtctttctccaccactaag

SEQ ID NO: 48270 - DNA, 27 bp, Artificial sequence
  SiRNA target sequence
actttttgtctttctccaccactaagc

SEQ ID NO: 48271 - DNA, 27 bp, Artificial sequence
  SiRNA target sequence
ctttttgtctttctccaccactaagct

SEQ ID NO: 48272 - DNA, 27 bp, Artificial sequence
  SiRNA target sequence
tttttgtctttctccaccactaagctt

SEQ ID NO: 48273 - DNA, 27 bp, Artificial sequence
  SiRNA target sequence
ttttgtctttctccaccactaagctta

SEQ ID NO: 48274 - DNA, 27 bp, Artificial sequence
  SiRNA target sequence
tttgtctttctccaccactaagcttat

SEQ ID NO: 48275 - DNA, 27 bp, Artificial sequence
  SiRNA target sequence
ttgtctttctccaccactaagcttatg

SEQ ID NO: 48276 - DNA, 27 bp, Artificial sequence
  SiRNA target sequence
tgtctttctccaccactaagcttatgt

SEQ ID NO: 48277 - DNA, 27 bp, Artificial sequence
  SiRNA target sequence
gtctttctccaccactaagcttatgtc

SEQ ID NO: 48278 - DNA, 27 bp, Artificial sequence
  SiRNA target sequence
tctttctccaccactaagcttatgtcc

SEQ ID NO: 48279 - DNA, 27 bp, Artificial sequence
  SiRNA target sequence
ctttctccaccactaagcttatgtccc

SEQ ID NO: 48280 - DNA, 27 bp, Artificial sequence
  SiRNA target sequence
tttctccaccactaagcttatgtccct

SEQ ID NO: 48281 - DNA, 27 bp, Artificial sequence
  SiRNA target sequence
ttctccaccactaagcttatgtccctt

SEQ ID NO: 48282 - DNA, 27 bp, Artificial sequence
  SiRNA target sequence
tctccaccactaagcttatgtccctta

SEQ ID NO: 48283 - DNA, 27 bp, Artificial sequence
  SiRNA target sequence
ctccaccactaagcttatgtcccttat

SEQ ID NO: 48284 - DNA, 27 bp, Artificial sequence
  SiRNA target sequence
tccaccactaagcttatgtcccttatc

SEQ ID NO: 48285 - DNA, 27 bp, Artificial sequence
  SiRNA target sequence
ccaccactaagcttatgtcccttatct

SEQ ID NO: 48286 - DNA, 27 bp, Artificial sequence
  SiRNA target sequence
caccactaagcttatgtcccttatctc

SEQ ID NO: 48287 - DNA, 27 bp, Artificial sequence
  SiRNA target sequence
accactaagcttatgtcccttatctcc

SEQ ID NO: 48288 - DNA, 27 bp, Artificial sequence
  SiRNA target sequence
ccactaagcttatgtcccttatctcca

SEQ ID NO: 48289 - DNA, 27 bp, Artificial sequence
  SiRNA target sequence
cactaagcttatgtcccttatctccaa

SEQ ID NO: 48290 - DNA, 27 bp, Artificial sequence
  SiRNA target sequence
actaagcttatgtcccttatctccaac

SEQ ID NO: 48291 - DNA, 27 bp, Artificial sequence
  SiRNA target sequence
ctaagcttatgtcccttatctccaaca

SEQ ID NO: 48292 - DNA, 27 bp, Artificial sequence
  SiRNA target sequence
taagcttatgtcccttatctccaacat

SEQ ID NO: 48293 - DNA, 27 bp, Artificial sequence
  SiRNA target sequence
aagcttatgtcccttatctccaacatg

SEQ ID NO: 48294 - DNA, 27 bp, Artificial sequence
  SiRNA target sequence
agcttatgtcccttatctccaacatgt

SEQ ID NO: 48295 - DNA, 27 bp, Artificial sequence
  SiRNA target sequence
gcttatgtcccttatctccaacatgtg

SEQ ID NO: 48296 - DNA, 27 bp, Artificial sequence
  SiRNA target sequence
cttatgtcccttatctccaacatgtgt

SEQ ID NO: 48297 - DNA, 27 bp, Artificial sequence
  SiRNA target sequence
ttatgtcccttatctccaacatgtgtg

SEQ ID NO: 48298 - DNA, 27 bp, Artificial sequence
  SiRNA target sequence
tatgtcccttatctccaacatgtgtgt

SEQ ID NO: 48299 - DNA, 27 bp, Artificial sequence
  SiRNA target sequence
atgtcccttatctccaacatgtgtgtt

SEQ ID NO: 48300 - DNA, 27 bp, Artificial sequence
  SiRNA target sequence
tgtcccttatctccaacatgtgtgttg

SEQ ID NO: 48301 - DNA, 27 bp, Artificial sequence
  SiRNA target sequence
gtcccttatctccaacatgtgtgttgt

SEQ ID NO: 48302 - DNA, 27 bp, Artificial sequence
  SiRNA target sequence
tcccttatctccaacatgtgtgttgta

SEQ ID NO: 48303 - DNA, 27 bp, Artificial sequence
  SiRNA target sequence
cccttatctccaacatgtgtgttgtat

SEQ ID NO: 48304 - DNA, 27 bp, Artificial sequence
  SiRNA target sequence
ccttatctccaacatgtgtgttgtatt

SEQ ID NO: 48305 - DNA, 27 bp, Artificial sequence
  SiRNA target sequence
cttatctccaacatgtgtgttgtattc

SEQ ID NO: 48306 - DNA, 27 bp, Artificial sequence
  SiRNA target sequence
ttatctccaacatgtgtgttgtattca

SEQ ID NO: 48307 - DNA, 27 bp, Artificial sequence
  SiRNA target sequence
tatctccaacatgtgtgttgtattcat

SEQ ID NO: 48308 - DNA, 27 bp, Artificial sequence
  SiRNA target sequence
atctccaacatgtgtgttgtattcatc

SEQ ID NO: 48309 - DNA, 27 bp, Artificial sequence
  SiRNA target sequence
tctccaacatgtgtgttgtattcatcc

SEQ ID NO: 48310 - DNA, 27 bp, Artificial sequence
  SiRNA target sequence
ctccaacatgtgtgttgtattcatcct

SEQ ID NO: 48311 - DNA, 27 bp, Artificial sequence
  SiRNA target sequence
tccaacatgtgtgttgtattcatcctc

SEQ ID NO: 48312 - DNA, 27 bp, Artificial sequence
  SiRNA target sequence
ccaacatgtgtgttgtattcatcctct

SEQ ID NO: 48313 - DNA, 27 bp, Artificial sequence
  SiRNA target sequence
caacatgtgtgttgtattcatcctcta

SEQ ID NO: 48314 - DNA, 27 bp, Artificial sequence
  SiRNA target sequence
aacatgtgtgttgtattcatcctctag

SEQ ID NO: 48315 - DNA, 27 bp, Artificial sequence
  SiRNA target sequence
acatgtgtgttgtattcatcctctagg

SEQ ID NO: 48316 - DNA, 27 bp, Artificial sequence
  SiRNA target sequence
catgtgtgttgtattcatcctctaggt

SEQ ID NO: 48317 - DNA, 27 bp, Artificial sequence
  SiRNA target sequence
atgtgtgttgtattcatcctctaggtt

SEQ ID NO: 48318 - DNA, 27 bp, Artificial sequence
  SiRNA target sequence
tgtgtgttgtattcatcctctaggttg

SEQ ID NO: 48319 - DNA, 27 bp, Artificial sequence
  SiRNA target sequence
gtgtgttgtattcatcctctaggttgt

SEQ ID NO: 48320 - DNA, 27 bp, Artificial sequence
  SiRNA target sequence
tgtgttgtattcatcctctaggttgtt

SEQ ID NO: 48321 - DNA, 27 bp, Artificial sequence
  SiRNA target sequence
gtgttgtattcatcctctaggttgttt

SEQ ID NO: 48322 - DNA, 27 bp, Artificial sequence
  SiRNA target sequence
tgttgtattcatcctctaggttgttta

SEQ ID NO: 48323 - DNA, 27 bp, Artificial sequence
  SiRNA target sequence
gttgtattcatcctctaggttgtttat

SEQ ID NO: 48324 - DNA, 27 bp, Artificial sequence
  SiRNA target sequence
ttgtattcatcctctaggttgtttata

SEQ ID NO: 48325 - DNA, 27 bp, Artificial sequence
  SiRNA target sequence
tgtattcatcctctaggttgtttatag

SEQ ID NO: 48326 - DNA, 27 bp, Artificial sequence
  SiRNA target sequence
gtattcatcctctaggttgtttataga

SEQ ID NO: 48327 - DNA, 27 bp, Artificial sequence
  SiRNA target sequence
tattcatcctctaggttgtttatagaa

SEQ ID NO: 48328 - DNA, 27 bp, Artificial sequence
  SiRNA target sequence
attcatcctctaggttgtttatagaat

SEQ ID NO: 48329 - DNA, 27 bp, Artificial sequence
  SiRNA target sequence
ttcatcctctaggttgtttatagaatc

SEQ ID NO: 48330 - DNA, 27 bp, Artificial sequence
  SiRNA target sequence
tcatcctctaggttgtttatagaatcg

SEQ ID NO: 48331 - DNA, 27 bp, Artificial sequence
  SiRNA target sequence
catcctctaggttgtttatagaatcgt

SEQ ID NO: 48332 - DNA, 27 bp, Artificial sequence
  SiRNA target sequence
atcctctaggttgtttatagaatcgtg

SEQ ID NO: 48333 - DNA, 27 bp, Artificial sequence
  SiRNA target sequence
tcctctaggttgtttatagaatcgtgt

SEQ ID NO: 48334 - DNA, 27 bp, Artificial sequence
  SiRNA target sequence
cctctaggttgtttatagaatcgtgta

SEQ ID NO: 48335 - DNA, 27 bp, Artificial sequence
  SiRNA target sequence
ctctaggttgtttatagaatcgtgtac

SEQ ID NO: 48336 - DNA, 27 bp, Artificial sequence
  SiRNA target sequence
tctaggttgtttatagaatcgtgtaca

SEQ ID NO: 48337 - DNA, 27 bp, Artificial sequence
  SiRNA target sequence
ctaggttgtttatagaatcgtgtacac

SEQ ID NO: 48338 - DNA, 27 bp, Artificial sequence
  SiRNA target sequence
taggttgtttatagaatcgtgtacaca

SEQ ID NO: 48339 - DNA, 27 bp, Artificial sequence
  SiRNA target sequence
aggttgtttatagaatcgtgtacacaa

SEQ ID NO: 48340 - DNA, 27 bp, Artificial sequence
  SiRNA target sequence
ggttgtttatagaatcgtgtacacaaa

SEQ ID NO: 48341 - DNA, 27 bp, Artificial sequence
  SiRNA target sequence
gttgtttatagaatcgtgtacacaaag

SEQ ID NO: 48342 - DNA, 27 bp, Artificial sequence
  SiRNA target sequence
ttgtttatagaatcgtgtacacaaagt

SEQ ID NO: 48343 - DNA, 27 bp, Artificial sequence
  SiRNA target sequence
tgtttatagaatcgtgtacacaaagtt

SEQ ID NO: 48344 - DNA, 27 bp, Artificial sequence
  SiRNA target sequence
gtttatagaatcgtgtacacaaagttt

SEQ ID NO: 48345 - DNA, 27 bp, Artificial sequence
  SiRNA target sequence
tttatagaatcgtgtacacaaagtttt

SEQ ID NO: 48346 - DNA, 27 bp, Artificial sequence
  SiRNA target sequence
ttatagaatcgtgtacacaaagttttt

SEQ ID NO: 48347 - DNA, 27 bp, Artificial sequence
  SiRNA target sequence
tatagaatcgtgtacacaaagtttttt

SEQ ID NO: 48348 - DNA, 27 bp, Artificial sequence
  SiRNA target sequence
atagaatcgtgtacacaaagtttttta

SEQ ID NO: 48349 - DNA, 27 bp, Artificial sequence
  SiRNA target sequence
tagaatcgtgtacacaaagttttttac

SEQ ID NO: 48350 - DNA, 27 bp, Artificial sequence
  SiRNA target sequence
agaatcgtgtacacaaagttttttact

SEQ ID NO: 48351 - DNA, 27 bp, Artificial sequence
  SiRNA target sequence
gaatcgtgtacacaaagttttttactg

SEQ ID NO: 48352 - DNA, 27 bp, Artificial sequence
  SiRNA target sequence
aatcgtgtacacaaagttttttactga

SEQ ID NO: 48353 - DNA, 27 bp, Artificial sequence
  SiRNA target sequence
atcgtgtacacaaagttttttactgat

SEQ ID NO: 48354 - DNA, 27 bp, Artificial sequence
  SiRNA target sequence
tcgtgtacacaaagttttttactgatt

SEQ ID NO: 48355 - DNA, 27 bp, Artificial sequence
  SiRNA target sequence
cgtgtacacaaagttttttactgattt

SEQ ID NO: 48356 - DNA, 27 bp, Artificial sequence
  SiRNA target sequence
gtgtacacaaagttttttactgatttt

SEQ ID NO: 48357 - DNA, 27 bp, Artificial sequence
  SiRNA target sequence
tgtacacaaagttttttactgattttt

SEQ ID NO: 48358 - DNA, 27 bp, Artificial sequence
  SiRNA target sequence
gtacacaaagttttttactgattttta

SEQ ID NO: 48359 - DNA, 27 bp, Artificial sequence
  SiRNA target sequence
tacacaaagttttttactgatttttat

SEQ ID NO: 48360 - DNA, 27 bp, Artificial sequence
  SiRNA target sequence
acacaaagttttttactgatttttata

SEQ ID NO: 48361 - DNA, 27 bp, Artificial sequence
  SiRNA target sequence
cacaaagttttttactgatttttataa

SEQ ID NO: 48362 - DNA, 27 bp, Artificial sequence
  SiRNA target sequence
acaaagttttttactgatttttataac

SEQ ID NO: 48363 - DNA, 27 bp, Artificial sequence
  SiRNA target sequence
caaagttttttactgatttttataact

SEQ ID NO: 48364 - DNA, 27 bp, Artificial sequence
  SiRNA target sequence
aaagttttttactgatttttataactt

SEQ ID NO: 48365 - DNA, 27 bp, Artificial sequence
  SiRNA target sequence
aagttttttactgatttttataacttc

SEQ ID NO: 48366 - DNA, 27 bp, Artificial sequence
  SiRNA target sequence
agttttttactgatttttataacttct

SEQ ID NO: 48367 - DNA, 27 bp, Artificial sequence
  SiRNA target sequence
gttttttactgatttttataacttctt

SEQ ID NO: 48368 - DNA, 27 bp, Artificial sequence
  SiRNA target sequence
ttttttactgatttttataacttcttc

SEQ ID NO: 48369 - DNA, 27 bp, Artificial sequence
  SiRNA target sequence
tttttactgatttttataacttcttct

SEQ ID NO: 48370 - DNA, 27 bp, Artificial sequence
  SiRNA target sequence
ttttactgatttttataacttcttctt

SEQ ID NO: 48371 - DNA, 27 bp, Artificial sequence
  SiRNA target sequence
tttactgatttttataacttcttcttt

SEQ ID NO: 48372 - DNA, 27 bp, Artificial sequence
  SiRNA target sequence
ttactgatttttataacttcttcttta

SEQ ID NO: 48373 - DNA, 27 bp, Artificial sequence
  SiRNA target sequence
tactgatttttataacttcttctttat

SEQ ID NO: 48374 - DNA, 27 bp, Artificial sequence
  SiRNA target sequence
actgatttttataacttcttctttatc

SEQ ID NO: 48375 - DNA, 27 bp, Artificial sequence
  SiRNA target sequence
ctgatttttataacttcttctttatca

SEQ ID NO: 48376 - DNA, 27 bp, Artificial sequence
  SiRNA target sequence
tgatttttataacttcttctttatcaa

SEQ ID NO: 48377 - DNA, 27 bp, Artificial sequence
  SiRNA target sequence
gatttttataacttcttctttatcaaa

SEQ ID NO: 48378 - DNA, 27 bp, Artificial sequence
  SiRNA target sequence
atttttataacttcttctttatcaaat

SEQ ID NO: 48379 - DNA, 27 bp, Artificial sequence
  SiRNA target sequence
tttttataacttcttctttatcaaata

SEQ ID NO: 48380 - DNA, 27 bp, Artificial sequence
  SiRNA target sequence
ttttataacttcttctttatcaaatat

SEQ ID NO: 48381 - DNA, 27 bp, Artificial sequence
  SiRNA target sequence
tttataacttcttctttatcaaatatt

SEQ ID NO: 48382 - DNA, 27 bp, Artificial sequence
  SiRNA target sequence
ttataacttcttctttatcaaatattt

SEQ ID NO: 48383 - DNA, 27 bp, Artificial sequence
  SiRNA target sequence
tataacttcttctttatcaaatatttc

SEQ ID NO: 48384 - DNA, 27 bp, Artificial sequence
  SiRNA target sequence
ataacttcttctttatcaaatatttct

SEQ ID NO: 48385 - DNA, 27 bp, Artificial sequence
  SiRNA target sequence
taacttcttctttatcaaatatttctt

SEQ ID NO: 48386 - DNA, 27 bp, Artificial sequence
  SiRNA target sequence
aacttcttctttatcaaatatttcttt

SEQ ID NO: 48387 - DNA, 27 bp, Artificial sequence
  SiRNA target sequence
acttcttctttatcaaatatttctttt

SEQ ID NO: 48388 - DNA, 27 bp, Artificial sequence
  SiRNA target sequence
cttcttctttatcaaatatttcttttc

SEQ ID NO: 48389 - DNA, 27 bp, Artificial sequence
  SiRNA target sequence
ttcttctttatcaaatatttcttttcc

SEQ ID NO: 48390 - DNA, 27 bp, Artificial sequence
  SiRNA target sequence
tcttctttatcaaatatttcttttcca

SEQ ID NO: 48391 - DNA, 27 bp, Artificial sequence
  SiRNA target sequence
cttctttatcaaatatttcttttccat

SEQ ID NO: 48392 - DNA, 27 bp, Artificial sequence
  SiRNA target sequence
ttctttatcaaatatttcttttccata

SEQ ID NO: 48393 - DNA, 27 bp, Artificial sequence
  SiRNA target sequence
tctttatcaaatatttcttttccatat

SEQ ID NO: 48394 - DNA, 27 bp, Artificial sequence
  SiRNA target sequence
ctttatcaaatatttcttttccatatg

SEQ ID NO: 48395 - DNA, 27 bp, Artificial sequence
  SiRNA target sequence
tttatcaaatatttcttttccatatgt

SEQ ID NO: 48396 - DNA, 27 bp, Artificial sequence
  SiRNA target sequence
ttatcaaatatttcttttccatatgtt

SEQ ID NO: 48397 - DNA, 27 bp, Artificial sequence
  SiRNA target sequence
tatcaaatatttcttttccatatgtta

SEQ ID NO: 48398 - DNA, 27 bp, Artificial sequence
  SiRNA target sequence
atcaaatatttcttttccatatgttaa

SEQ ID NO: 48399 - DNA, 27 bp, Artificial sequence
  SiRNA target sequence
tcaaatatttcttttccatatgttaaa

SEQ ID NO: 48400 - DNA, 27 bp, Artificial sequence
  SiRNA target sequence
caaatatttcttttccatatgttaaat

SEQ ID NO: 48401 - DNA, 27 bp, Artificial sequence
  SiRNA target sequence
aaatatttcttttccatatgttaaatt

SEQ ID NO: 48402 - DNA, 27 bp, Artificial sequence
  SiRNA target sequence
aatatttcttttccatatgttaaatta

SEQ ID NO: 48403 - DNA, 27 bp, Artificial sequence
  SiRNA target sequence
atatttcttttccatatgttaaattat

SEQ ID NO: 48404 - DNA, 27 bp, Artificial sequence
  SiRNA target sequence
tatttcttttccatatgttaaattata

SEQ ID NO: 48405 - DNA, 27 bp, Artificial sequence
  SiRNA target sequence
atttcttttccatatgttaaattataa

SEQ ID NO: 48406 - DNA, 27 bp, Artificial sequence
  SiRNA target sequence
tttcttttccatatgttaaattataat

SEQ ID NO: 48407 - DNA, 27 bp, Artificial sequence
  SiRNA target sequence
ttcttttccatatgttaaattataata

SEQ ID NO: 48408 - DNA, 27 bp, Artificial sequence
  SiRNA target sequence
tcttttccatatgttaaattataataa

SEQ ID NO: 48409 - DNA, 27 bp, Artificial sequence
  SiRNA target sequence
cttttccatatgttaaattataataaa

SEQ ID NO: 48410 - DNA, 27 bp, Artificial sequence
  SiRNA target sequence
ttttccatatgttaaattataataaac

SEQ ID NO: 48411 - DNA, 27 bp, Artificial sequence
  SiRNA target sequence
tttccatatgttaaattataataaacc

SEQ ID NO: 48412 - DNA, 27 bp, Artificial sequence
  SiRNA target sequence
ttccatatgttaaattataataaaccg

SEQ ID NO: 48413 - DNA, 27 bp, Artificial sequence
  SiRNA target sequence
tccatatgttaaattataataaaccgt

SEQ ID NO: 48414 - DNA, 27 bp, Artificial sequence
  SiRNA target sequence
ccatatgttaaattataataaaccgtt

SEQ ID NO: 48415 - DNA, 27 bp, Artificial sequence
  SiRNA target sequence
catatgttaaattataataaaccgttt

SEQ ID NO: 48416 - DNA, 27 bp, Artificial sequence
  SiRNA target sequence
atatgttaaattataataaaccgtttc

SEQ ID NO: 48417 - DNA, 27 bp, Artificial sequence
  SiRNA target sequence
tatgttaaattataataaaccgtttcg

SEQ ID NO: 48418 - DNA, 27 bp, Artificial sequence
  SiRNA target sequence
atgttaaattataataaaccgtttcgt

SEQ ID NO: 48419 - DNA, 27 bp, Artificial sequence
  SiRNA target sequence
tgttaaattataataaaccgtttcgtt

SEQ ID NO: 48420 - DNA, 27 bp, Artificial sequence
  SiRNA target sequence
gttaaattataataaaccgtttcgtta

SEQ ID NO: 48421 - DNA, 27 bp, Artificial sequence
  SiRNA target sequence
ttaaattataataaaccgtttcgttaa

SEQ ID NO: 48422 - DNA, 27 bp, Artificial sequence
  SiRNA target sequence
taaattataataaaccgtttcgttaaa

SEQ ID NO: 48423 - DNA, 27 bp, Artificial sequence
  SiRNA target sequence
aaattataataaaccgtttcgttaaac

SEQ ID NO: 48424 - DNA, 27 bp, Artificial sequence
  SiRNA target sequence
aattataataaaccgtttcgttaaaca

SEQ ID NO: 48425 - DNA, 27 bp, Artificial sequence
  SiRNA target sequence
attataataaaccgtttcgttaaacaa

SEQ ID NO: 48426 - DNA, 27 bp, Artificial sequence
  SiRNA target sequence
ttataataaaccgtttcgttaaacaaa

SEQ ID NO: 48427 - DNA, 27 bp, Artificial sequence
  SiRNA target sequence
tataataaaccgtttcgttaaacaaaa

SEQ ID NO: 48428 - DNA, 27 bp, Artificial sequence
  SiRNA target sequence
ataataaaccgtttcgttaaacaaaaa

SEQ ID NO: 48429 - DNA, 27 bp, Artificial sequence
  SiRNA target sequence
taataaaccgtttcgttaaacaaaaat

SEQ ID NO: 48430 - DNA, 27 bp, Artificial sequence
  SiRNA target sequence
aataaaccgtttcgttaaacaaaaatg

SEQ ID NO: 48431 - DNA, 27 bp, Artificial sequence
  SiRNA target sequence
ataaaccgtttcgttaaacaaaaatga

SEQ ID NO: 48432 - DNA, 27 bp, Artificial sequence
  SiRNA target sequence
taaaccgtttcgttaaacaaaaatgag

SEQ ID NO: 48433 - DNA, 27 bp, Artificial sequence
  SiRNA target sequence
aaaccgtttcgttaaacaaaaatgagg

SEQ ID NO: 48434 - DNA, 27 bp, Artificial sequence
  SiRNA target sequence
aaccgtttcgttaaacaaaaatgaggt

SEQ ID NO: 48435 - DNA, 27 bp, Artificial sequence
  SiRNA target sequence
accgtttcgttaaacaaaaatgaggtt

SEQ ID NO: 48436 - DNA, 27 bp, Artificial sequence
  SiRNA target sequence
ccgtttcgttaaacaaaaatgaggttt

SEQ ID NO: 48437 - DNA, 27 bp, Artificial sequence
  SiRNA target sequence
cgtttcgttaaacaaaaatgaggtttg

SEQ ID NO: 48438 - DNA, 27 bp, Artificial sequence
  SiRNA target sequence
gtttcgttaaacaaaaatgaggtttgt

SEQ ID NO: 48439 - DNA, 27 bp, Artificial sequence
  SiRNA target sequence
tttcgttaaacaaaaatgaggtttgtg

SEQ ID NO: 48440 - DNA, 27 bp, Artificial sequence
  SiRNA target sequence
ttcgttaaacaaaaatgaggtttgtgg

SEQ ID NO: 48441 - DNA, 27 bp, Artificial sequence
  SiRNA target sequence
tcgttaaacaaaaatgaggtttgtggt

SEQ ID NO: 48442 - DNA, 27 bp, Artificial sequence
  SiRNA target sequence
cgttaaacaaaaatgaggtttgtggtg

SEQ ID NO: 48443 - DNA, 27 bp, Artificial sequence
  SiRNA target sequence
gttaaacaaaaatgaggtttgtggtgc

SEQ ID NO: 48444 - DNA, 27 bp, Artificial sequence
  SiRNA target sequence
ttaaacaaaaatgaggtttgtggtgca

SEQ ID NO: 48445 - DNA, 27 bp, Artificial sequence
  SiRNA target sequence
taaacaaaaatgaggtttgtggtgcaa

SEQ ID NO: 48446 - DNA, 27 bp, Artificial sequence
  SiRNA target sequence
aaacaaaaatgaggtttgtggtgcaaa

SEQ ID NO: 48447 - DNA, 27 bp, Artificial sequence
  SiRNA target sequence
aacaaaaatgaggtttgtggtgcaaat

SEQ ID NO: 48448 - DNA, 27 bp, Artificial sequence
  SiRNA target sequence
acaaaaatgaggtttgtggtgcaaatg

SEQ ID NO: 48449 - DNA, 27 bp, Artificial sequence
  SiRNA target sequence
caaaaatgaggtttgtggtgcaaatga

SEQ ID NO: 48450 - DNA, 27 bp, Artificial sequence
  SiRNA target sequence
aaaaatgaggtttgtggtgcaaatgat

SEQ ID NO: 48451 - DNA, 27 bp, Artificial sequence
  SiRNA target sequence
aaaatgaggtttgtggtgcaaatgata

SEQ ID NO: 48452 - DNA, 27 bp, Artificial sequence
  SiRNA target sequence
aaatgaggtttgtggtgcaaatgatat

SEQ ID NO: 48453 - DNA, 27 bp, Artificial sequence
  SiRNA target sequence
aatgaggtttgtggtgcaaatgatata

SEQ ID NO: 48454 - DNA, 27 bp, Artificial sequence
  SiRNA target sequence
atgaggtttgtggtgcaaatgatataa

SEQ ID NO: 48455 - DNA, 27 bp, Artificial sequence
  SiRNA target sequence
tgaggtttgtggtgcaaatgatataag

SEQ ID NO: 48456 - DNA, 27 bp, Artificial sequence
  SiRNA target sequence
gaggtttgtggtgcaaatgatataagt

SEQ ID NO: 48457 - DNA, 27 bp, Artificial sequence
  SiRNA target sequence
aggtttgtggtgcaaatgatataagtg

SEQ ID NO: 48458 - DNA, 27 bp, Artificial sequence
  SiRNA target sequence
ggtttgtggtgcaaatgatataagtga

SEQ ID NO: 48459 - DNA, 27 bp, Artificial sequence
  SiRNA target sequence
gtttgtggtgcaaatgatataagtgat

SEQ ID NO: 48460 - DNA, 27 bp, Artificial sequence
  SiRNA target sequence
tttgtggtgcaaatgatataagtgatc

SEQ ID NO: 48461 - DNA, 27 bp, Artificial sequence
  SiRNA target sequence
ttgtggtgcaaatgatataagtgatct

SEQ ID NO: 48462 - DNA, 27 bp, Artificial sequence
  SiRNA target sequence
tgtggtgcaaatgatataagtgatcta

SEQ ID NO: 48463 - DNA, 27 bp, Artificial sequence
  SiRNA target sequence
gtggtgcaaatgatataagtgatctat

SEQ ID NO: 48464 - DNA, 27 bp, Artificial sequence
  SiRNA target sequence
tggtgcaaatgatataagtgatctata

SEQ ID NO: 48465 - DNA, 27 bp, Artificial sequence
  SiRNA target sequence
ggtgcaaatgatataagtgatctatat

SEQ ID NO: 48466 - DNA, 27 bp, Artificial sequence
  SiRNA target sequence
gtgcaaatgatataagtgatctatatg

SEQ ID NO: 48467 - DNA, 27 bp, Artificial sequence
  SiRNA target sequence
tgcaaatgatataagtgatctatatga

SEQ ID NO: 48468 - DNA, 27 bp, Artificial sequence
  SiRNA target sequence
gcaaatgatataagtgatctatatgaa

SEQ ID NO: 48469 - DNA, 27 bp, Artificial sequence
  SiRNA target sequence
caaatgatataagtgatctatatgaac

SEQ ID NO: 48470 - DNA, 27 bp, Artificial sequence
  SiRNA target sequence
aaatgatataagtgatctatatgaact

SEQ ID NO: 48471 - DNA, 27 bp, Artificial sequence
  SiRNA target sequence
aatgatataagtgatctatatgaacta

SEQ ID NO: 48472 - DNA, 27 bp, Artificial sequence
  SiRNA target sequence
atgatataagtgatctatatgaactat

SEQ ID NO: 48473 - DNA, 27 bp, Artificial sequence
  SiRNA target sequence
tgatataagtgatctatatgaactatt

SEQ ID NO: 48474 - DNA, 27 bp, Artificial sequence
  SiRNA target sequence
gatataagtgatctatatgaactatta

SEQ ID NO: 48475 - DNA, 27 bp, Artificial sequence
  SiRNA target sequence
atataagtgatctatatgaactattag

SEQ ID NO: 48476 - DNA, 27 bp, Artificial sequence
  SiRNA target sequence
tataagtgatctatatgaactattaga

SEQ ID NO: 48477 - DNA, 27 bp, Artificial sequence
  SiRNA target sequence
ataagtgatctatatgaactattagaa

SEQ ID NO: 48478 - DNA, 27 bp, Artificial sequence
  SiRNA target sequence
taagtgatctatatgaactattagaaa

SEQ ID NO: 48479 - DNA, 27 bp, Artificial sequence
  SiRNA target sequence
aagtgatctatatgaactattagaaat

SEQ ID NO: 48480 - DNA, 27 bp, Artificial sequence
  SiRNA target sequence
agtgatctatatgaactattagaaatt

SEQ ID NO: 48481 - DNA, 27 bp, Artificial sequence
  SiRNA target sequence
gtgatctatatgaactattagaaattt

SEQ ID NO: 48482 - DNA, 27 bp, Artificial sequence
  SiRNA target sequence
tgatctatatgaactattagaaatttc

SEQ ID NO: 48483 - DNA, 27 bp, Artificial sequence
  SiRNA target sequence
gatctatatgaactattagaaatttct

SEQ ID NO: 48484 - DNA, 27 bp, Artificial sequence
  SiRNA target sequence
atctatatgaactattagaaatttctt

SEQ ID NO: 48485 - DNA, 27 bp, Artificial sequence
  SiRNA target sequence
tctatatgaactattagaaatttcttt

SEQ ID NO: 48486 - DNA, 27 bp, Artificial sequence
  SiRNA target sequence
ctatatgaactattagaaatttctttt

SEQ ID NO: 48487 - DNA, 27 bp, Artificial sequence
  SiRNA target sequence
tatatgaactattagaaatttctttta

SEQ ID NO: 48488 - DNA, 27 bp, Artificial sequence
  SiRNA target sequence
atatgaactattagaaatttcttttat

SEQ ID NO: 48489 - DNA, 27 bp, Artificial sequence
  SiRNA target sequence
tatgaactattagaaatttcttttata

SEQ ID NO: 48490 - DNA, 27 bp, Artificial sequence
  SiRNA target sequence
atgaactattagaaatttcttttatat

SEQ ID NO: 48491 - DNA, 27 bp, Artificial sequence
  SiRNA target sequence
tgaactattagaaatttcttttatatc

SEQ ID NO: 48492 - DNA, 27 bp, Artificial sequence
  SiRNA target sequence
gaactattagaaatttcttttatatct

SEQ ID NO: 48493 - DNA, 27 bp, Artificial sequence
  SiRNA target sequence
aactattagaaatttcttttatatctc

SEQ ID NO: 48494 - DNA, 27 bp, Artificial sequence
  SiRNA target sequence
actattagaaatttcttttatatctcg

SEQ ID NO: 48495 - DNA, 27 bp, Artificial sequence
  SiRNA target sequence
ctattagaaatttcttttatatctcga

SEQ ID NO: 48496 - DNA, 27 bp, Artificial sequence
  SiRNA target sequence
tattagaaatttcttttatatctcgat

SEQ ID NO: 48497 - DNA, 27 bp, Artificial sequence
  SiRNA target sequence
attagaaatttcttttatatctcgatt

SEQ ID NO: 48498 - DNA, 27 bp, Artificial sequence
  SiRNA target sequence
ttagaaatttcttttatatctcgatta

SEQ ID NO: 48499 - DNA, 27 bp, Artificial sequence
  SiRNA target sequence
tagaaatttcttttatatctcgattat

SEQ ID NO: 48500 - DNA, 27 bp, Artificial sequence
  SiRNA target sequence
agaaatttcttttatatctcgattatc

SEQ ID NO: 48501 - DNA, 27 bp, Artificial sequence
  SiRNA target sequence
gaaatttcttttatatctcgattatct

SEQ ID NO: 48502 - DNA, 27 bp, Artificial sequence
  SiRNA target sequence
aaatttcttttatatctcgattatcta

SEQ ID NO: 48503 - DNA, 27 bp, Artificial sequence
  SiRNA target sequence
aatttcttttatatctcgattatctag

SEQ ID NO: 48504 - DNA, 27 bp, Artificial sequence
  SiRNA target sequence
atttcttttatatctcgattatctaga

SEQ ID NO: 48505 - DNA, 27 bp, Artificial sequence
  SiRNA target sequence
tttcttttatatctcgattatctagat

SEQ ID NO: 48506 - DNA, 27 bp, Artificial sequence
  SiRNA target sequence
ttcttttatatctcgattatctagata

SEQ ID NO: 48507 - DNA, 27 bp, Artificial sequence
  SiRNA target sequence
tcttttatatctcgattatctagataa

SEQ ID NO: 48508 - DNA, 27 bp, Artificial sequence
  SiRNA target sequence
cttttatatctcgattatctagataaa

SEQ ID NO: 48509 - DNA, 27 bp, Artificial sequence
  SiRNA target sequence
ttttatatctcgattatctagataaat

SEQ ID NO: 48510 - DNA, 27 bp, Artificial sequence
  SiRNA target sequence
tttatatctcgattatctagataaata

SEQ ID NO: 48511 - DNA, 27 bp, Artificial sequence
  SiRNA target sequence
ttatatctcgattatctagataaatat

SEQ ID NO: 48512 - DNA, 27 bp, Artificial sequence
  SiRNA target sequence
tatatctcgattatctagataaatatt

SEQ ID NO: 48513 - DNA, 27 bp, Artificial sequence
  SiRNA target sequence
atatctcgattatctagataaatattt

SEQ ID NO: 48514 - DNA, 27 bp, Artificial sequence
  SiRNA target sequence
tatctcgattatctagataaatatttc

SEQ ID NO: 48515 - DNA, 27 bp, Artificial sequence
  SiRNA target sequence
atctcgattatctagataaatatttcc

SEQ ID NO: 48516 - DNA, 27 bp, Artificial sequence
  SiRNA target sequence
tctcgattatctagataaatatttccc

SEQ ID NO: 48517 - DNA, 27 bp, Artificial sequence
  SiRNA target sequence
ctcgattatctagataaatatttcccc

SEQ ID NO: 48518 - DNA, 27 bp, Artificial sequence
  SiRNA target sequence
tcgattatctagataaatatttccccc

SEQ ID NO: 48519 - DNA, 27 bp, Artificial sequence
  SiRNA target sequence
cgattatctagataaatatttccccca

SEQ ID NO: 48520 - DNA, 27 bp, Artificial sequence
  SiRNA target sequence
gattatctagataaatatttcccccat

SEQ ID NO: 48521 - DNA, 27 bp, Artificial sequence
  SiRNA target sequence
attatctagataaatatttcccccata

SEQ ID NO: 48522 - DNA, 27 bp, Artificial sequence
  SiRNA target sequence
ttatctagataaatatttcccccataa

SEQ ID NO: 48523 - DNA, 27 bp, Artificial sequence
  SiRNA target sequence
tatctagataaatatttcccccataat

SEQ ID NO: 48524 - DNA, 27 bp, Artificial sequence
  SiRNA target sequence
atctagataaatatttcccccataatt

SEQ ID NO: 48525 - DNA, 27 bp, Artificial sequence
  SiRNA target sequence
tctagataaatatttcccccataattt

SEQ ID NO: 48526 - DNA, 27 bp, Artificial sequence
  SiRNA target sequence
ctagataaatatttcccccataatttt

SEQ ID NO: 48527 - DNA, 27 bp, Artificial sequence
  SiRNA target sequence
tagataaatatttcccccataattttc

SEQ ID NO: 48528 - DNA, 27 bp, Artificial sequence
  SiRNA target sequence
agataaatatttcccccataattttca

SEQ ID NO: 48529 - DNA, 27 bp, Artificial sequence
  SiRNA target sequence
gataaatatttcccccataattttcaa

SEQ ID NO: 48530 - DNA, 27 bp, Artificial sequence
  SiRNA target sequence
ataaatatttcccccataattttcaaa

SEQ ID NO: 48531 - DNA, 27 bp, Artificial sequence
  SiRNA target sequence
taaatatttcccccataattttcaaat

SEQ ID NO: 48532 - DNA, 27 bp, Artificial sequence
  SiRNA target sequence
aaatatttcccccataattttcaaatc

SEQ ID NO: 48533 - DNA, 27 bp, Artificial sequence
  SiRNA target sequence
aatatttcccccataattttcaaatct

SEQ ID NO: 48534 - DNA, 27 bp, Artificial sequence
  SiRNA target sequence
atatttcccccataattttcaaatctc

SEQ ID NO: 48535 - DNA, 27 bp, Artificial sequence
  SiRNA target sequence
tatttcccccataattttcaaatctca

SEQ ID NO: 48536 - DNA, 27 bp, Artificial sequence
  SiRNA target sequence
atttcccccataattttcaaatctcat

SEQ ID NO: 48537 - DNA, 27 bp, Artificial sequence
  SiRNA target sequence
tttcccccataattttcaaatctcata

SEQ ID NO: 48538 - DNA, 27 bp, Artificial sequence
  SiRNA target sequence
ttcccccataattttcaaatctcataa

SEQ ID NO: 48539 - DNA, 27 bp, Artificial sequence
  SiRNA target sequence
tcccccataattttcaaatctcataat

SEQ ID NO: 48540 - DNA, 27 bp, Artificial sequence
  SiRNA target sequence
cccccataattttcaaatctcataatc

SEQ ID NO: 48541 - DNA, 27 bp, Artificial sequence
  SiRNA target sequence
ccccataattttcaaatctcataatca

SEQ ID NO: 48542 - DNA, 27 bp, Artificial sequence
  SiRNA target sequence
cccataattttcaaatctcataatcat

SEQ ID NO: 48543 - DNA, 27 bp, Artificial sequence
  SiRNA target sequence
ccataattttcaaatctcataatcatc

SEQ ID NO: 48544 - DNA, 27 bp, Artificial sequence
  SiRNA target sequence
cataattttcaaatctcataatcatct

SEQ ID NO: 48545 - DNA, 27 bp, Artificial sequence
  SiRNA target sequence
ataattttcaaatctcataatcatctt

SEQ ID NO: 48546 - DNA, 27 bp, Artificial sequence
  SiRNA target sequence
taattttcaaatctcataatcatcttt

SEQ ID NO: 48547 - DNA, 27 bp, Artificial sequence
  SiRNA target sequence
aattttcaaatctcataatcatcttta

SEQ ID NO: 48548 - DNA, 27 bp, Artificial sequence
  SiRNA target sequence
attttcaaatctcataatcatctttat

SEQ ID NO: 48549 - DNA, 27 bp, Artificial sequence
  SiRNA target sequence
ttttcaaatctcataatcatctttata

SEQ ID NO: 48550 - DNA, 27 bp, Artificial sequence
  SiRNA target sequence
tttcaaatctcataatcatctttataa

SEQ ID NO: 48551 - DNA, 27 bp, Artificial sequence
  SiRNA target sequence
ttcaaatctcataatcatctttataag

SEQ ID NO: 48552 - DNA, 27 bp, Artificial sequence
  SiRNA target sequence
tcaaatctcataatcatctttataaga

SEQ ID NO: 48553 - DNA, 27 bp, Artificial sequence
  SiRNA target sequence
caaatctcataatcatctttataagag

SEQ ID NO: 48554 - DNA, 27 bp, Artificial sequence
  SiRNA target sequence
aaatctcataatcatctttataagaga

SEQ ID NO: 48555 - DNA, 27 bp, Artificial sequence
  SiRNA target sequence
aatctcataatcatctttataagagat

SEQ ID NO: 48556 - DNA, 27 bp, Artificial sequence
  SiRNA target sequence
atctcataatcatctttataagagatg

SEQ ID NO: 48557 - DNA, 27 bp, Artificial sequence
  SiRNA target sequence
tctcataatcatctttataagagatgt

SEQ ID NO: 48558 - DNA, 27 bp, Artificial sequence
  SiRNA target sequence
ctcataatcatctttataagagatgtt

SEQ ID NO: 48559 - DNA, 27 bp, Artificial sequence
  SiRNA target sequence
tcataatcatctttataagagatgttt

SEQ ID NO: 48560 - DNA, 27 bp, Artificial sequence
  SiRNA target sequence
cataatcatctttataagagatgtttt

SEQ ID NO: 48561 - DNA, 27 bp, Artificial sequence
  SiRNA target sequence
ataatcatctttataagagatgttttt

SEQ ID NO: 48562 - DNA, 27 bp, Artificial sequence
  SiRNA target sequence
taatcatctttataagagatgtttttc

SEQ ID NO: 48563 - DNA, 27 bp, Artificial sequence
  SiRNA target sequence
aatcatctttataagagatgtttttcc

SEQ ID NO: 48564 - DNA, 27 bp, Artificial sequence
  SiRNA target sequence
atcatctttataagagatgtttttccc

SEQ ID NO: 48565 - DNA, 27 bp, Artificial sequence
  SiRNA target sequence
tcatctttataagagatgtttttcccg

SEQ ID NO: 48566 - DNA, 27 bp, Artificial sequence
  SiRNA target sequence
catctttataagagatgtttttcccga

SEQ ID NO: 48567 - DNA, 27 bp, Artificial sequence
  SiRNA target sequence
atctttataagagatgtttttcccgat

SEQ ID NO: 48568 - DNA, 27 bp, Artificial sequence
  SiRNA target sequence
tctttataagagatgtttttcccgatc

SEQ ID NO: 48569 - DNA, 27 bp, Artificial sequence
  SiRNA target sequence
ctttataagagatgtttttcccgatcc

SEQ ID NO: 48570 - DNA, 27 bp, Artificial sequence
  SiRNA target sequence
tttataagagatgtttttcccgatcca

SEQ ID NO: 48571 - DNA, 27 bp, Artificial sequence
  SiRNA target sequence
ttataagagatgtttttcccgatccat

SEQ ID NO: 48572 - DNA, 27 bp, Artificial sequence
  SiRNA target sequence
tataagagatgtttttcccgatccatt

SEQ ID NO: 48573 - DNA, 27 bp, Artificial sequence
  SiRNA target sequence
ataagagatgtttttcccgatccattt

SEQ ID NO: 48574 - DNA, 27 bp, Artificial sequence
  SiRNA target sequence
taagagatgtttttcccgatccatttt

SEQ ID NO: 48575 - DNA, 27 bp, Artificial sequence
  SiRNA target sequence
aagagatgtttttcccgatccattttt

SEQ ID NO: 48576 - DNA, 27 bp, Artificial sequence
  SiRNA target sequence
agagatgtttttcccgatccatttttt

SEQ ID NO: 48577 - DNA, 27 bp, Artificial sequence
  SiRNA target sequence
gagatgtttttcccgatccattttttc

SEQ ID NO: 48578 - DNA, 27 bp, Artificial sequence
  SiRNA target sequence
agatgtttttcccgatccattttttcc

SEQ ID NO: 48579 - DNA, 27 bp, Artificial sequence
  SiRNA target sequence
gatgtttttcccgatccattttttcca

SEQ ID NO: 48580 - DNA, 27 bp, Artificial sequence
  SiRNA target sequence
atgtttttcccgatccattttttccaa

SEQ ID NO: 48581 - DNA, 27 bp, Artificial sequence
  SiRNA target sequence
tgtttttcccgatccattttttccaat

SEQ ID NO: 48582 - DNA, 27 bp, Artificial sequence
  SiRNA target sequence
gtttttcccgatccattttttccaata

SEQ ID NO: 48583 - DNA, 27 bp, Artificial sequence
  SiRNA target sequence
tttttcccgatccattttttccaataa

SEQ ID NO: 48584 - DNA, 27 bp, Artificial sequence
  SiRNA target sequence
ttttcccgatccattttttccaataat

SEQ ID NO: 48585 - DNA, 27 bp, Artificial sequence
  SiRNA target sequence
tttcccgatccattttttccaataata

SEQ ID NO: 48586 - DNA, 27 bp, Artificial sequence
  SiRNA target sequence
ttcccgatccattttttccaataatag

SEQ ID NO: 48587 - DNA, 27 bp, Artificial sequence
  SiRNA target sequence
tcccgatccattttttccaataatagc

SEQ ID NO: 48588 - DNA, 27 bp, Artificial sequence
  SiRNA target sequence
cccgatccattttttccaataatagct

SEQ ID NO: 48589 - DNA, 27 bp, Artificial sequence
  SiRNA target sequence
ccgatccattttttccaataatagcta

SEQ ID NO: 48590 - DNA, 27 bp, Artificial sequence
  SiRNA target sequence
cgatccattttttccaataatagctac

SEQ ID NO: 48591 - DNA, 27 bp, Artificial sequence
  SiRNA target sequence
gatccattttttccaataatagctact

SEQ ID NO: 48592 - DNA, 27 bp, Artificial sequence
  SiRNA target sequence
atccattttttccaataatagctactt

SEQ ID NO: 48593 - DNA, 27 bp, Artificial sequence
  SiRNA target sequence
tccattttttccaataatagctacttt

SEQ ID NO: 48594 - DNA, 27 bp, Artificial sequence
  SiRNA target sequence
ccattttttccaataatagctactttt

SEQ ID NO: 48595 - DNA, 27 bp, Artificial sequence
  SiRNA target sequence
cattttttccaataatagctacttttt

SEQ ID NO: 48596 - DNA, 27 bp, Artificial sequence
  SiRNA target sequence
attttttccaataatagctactttttc

SEQ ID NO: 48597 - DNA, 27 bp, Artificial sequence
  SiRNA target sequence
ttttttccaataatagctactttttca

SEQ ID NO: 48598 - DNA, 27 bp, Artificial sequence
  SiRNA target sequence
tttttccaataatagctactttttcac

SEQ ID NO: 48599 - DNA, 27 bp, Artificial sequence
  SiRNA target sequence
ttttccaataatagctactttttcacc

SEQ ID NO: 48600 - DNA, 27 bp, Artificial sequence
  SiRNA target sequence
tttccaataatagctactttttcacct

SEQ ID NO: 48601 - DNA, 27 bp, Artificial sequence
  SiRNA target sequence
ttccaataatagctactttttcacctt

SEQ ID NO: 48602 - DNA, 27 bp, Artificial sequence
  SiRNA target sequence
tccaataatagctactttttcaccttt

SEQ ID NO: 48603 - DNA, 27 bp, Artificial sequence
  SiRNA target sequence
ccaataatagctactttttcacctttt

SEQ ID NO: 48604 - DNA, 27 bp, Artificial sequence
  SiRNA target sequence
caataatagctactttttcaccttttt

SEQ ID NO: 48605 - DNA, 27 bp, Artificial sequence
  SiRNA target sequence
aataatagctactttttcacctttttt

SEQ ID NO: 48606 - DNA, 27 bp, Artificial sequence
  SiRNA target sequence
ataatagctactttttcacctttttta

SEQ ID NO: 48607 - DNA, 27 bp, Artificial sequence
  SiRNA target sequence
taatagctactttttcaccttttttaa

SEQ ID NO: 48608 - DNA, 27 bp, Artificial sequence
  SiRNA target sequence
aatagctactttttcaccttttttaat

SEQ ID NO: 48609 - DNA, 27 bp, Artificial sequence
  SiRNA target sequence
atagctactttttcaccttttttaatt

SEQ ID NO: 48610 - DNA, 27 bp, Artificial sequence
  SiRNA target sequence
tagctactttttcaccttttttaatta

SEQ ID NO: 48611 - DNA, 27 bp, Artificial sequence
  SiRNA target sequence
agctactttttcaccttttttaattaa

SEQ ID NO: 48612 - DNA, 27 bp, Artificial sequence
  SiRNA target sequence
gctactttttcaccttttttaattaaa

SEQ ID NO: 48613 - DNA, 27 bp, Artificial sequence
  SiRNA target sequence
ctactttttcaccttttttaattaaaa

SEQ ID NO: 48614 - DNA, 27 bp, Artificial sequence
  SiRNA target sequence
tactttttcaccttttttaattaaaat

SEQ ID NO: 48615 - DNA, 27 bp, Artificial sequence
  SiRNA target sequence
actttttcaccttttttaattaaaata

SEQ ID NO: 48616 - DNA, 27 bp, Artificial sequence
  SiRNA target sequence
ctttttcaccttttttaattaaaatat

SEQ ID NO: 48617 - DNA, 27 bp, Artificial sequence
  SiRNA target sequence
tttttcaccttttttaattaaaatatt

SEQ ID NO: 48618 - DNA, 27 bp, Artificial sequence
  SiRNA target sequence
ttttcaccttttttaattaaaatattt

SEQ ID NO: 48619 - DNA, 27 bp, Artificial sequence
  SiRNA target sequence
tttcaccttttttaattaaaatattta

SEQ ID NO: 48620 - DNA, 27 bp, Artificial sequence
  SiRNA target sequence
ttcaccttttttaattaaaatatttat

SEQ ID NO: 48621 - DNA, 27 bp, Artificial sequence
  SiRNA target sequence
tcaccttttttaattaaaatatttatg

SEQ ID NO: 48622 - DNA, 27 bp, Artificial sequence
  SiRNA target sequence
caccttttttaattaaaatatttatgt

SEQ ID NO: 48623 - DNA, 27 bp, Artificial sequence
  SiRNA target sequence
accttttttaattaaaatatttatgtc

SEQ ID NO: 48624 - DNA, 27 bp, Artificial sequence
  SiRNA target sequence
ccttttttaattaaaatatttatgtcc

SEQ ID NO: 48625 - DNA, 27 bp, Artificial sequence
  SiRNA target sequence
cttttttaattaaaatatttatgtccg

SEQ ID NO: 48626 - DNA, 27 bp, Artificial sequence
  SiRNA target sequence
ttttttaattaaaatatttatgtccgt

SEQ ID NO: 48627 - DNA, 27 bp, Artificial sequence
  SiRNA target sequence
tttttaattaaaatatttatgtccgtt

SEQ ID NO: 48628 - DNA, 27 bp, Artificial sequence
  SiRNA target sequence
ttttaattaaaatatttatgtccgtta

SEQ ID NO: 48629 - DNA, 27 bp, Artificial sequence
  SiRNA target sequence
tttaattaaaatatttatgtccgttaa

SEQ ID NO: 48630 - DNA, 27 bp, Artificial sequence
  SiRNA target sequence
ttaattaaaatatttatgtccgttaaa

SEQ ID NO: 48631 - DNA, 27 bp, Artificial sequence
  SiRNA target sequence
taattaaaatatttatgtccgttaaaa

SEQ ID NO: 48632 - DNA, 27 bp, Artificial sequence
  SiRNA target sequence
aattaaaatatttatgtccgttaaaat

SEQ ID NO: 48633 - DNA, 27 bp, Artificial sequence
  SiRNA target sequence
attaaaatatttatgtccgttaaaatt

SEQ ID NO: 48634 - DNA, 27 bp, Artificial sequence
  SiRNA target sequence
ttaaaatatttatgtccgttaaaattt

SEQ ID NO: 48635 - DNA, 27 bp, Artificial sequence
  SiRNA target sequence
taaaatatttatgtccgttaaaatttt

SEQ ID NO: 48636 - DNA, 27 bp, Artificial sequence
  SiRNA target sequence
aaaatatttatgtccgttaaaattttt

SEQ ID NO: 48637 - DNA, 27 bp, Artificial sequence
  SiRNA target sequence
aaatatttatgtccgttaaaatttttt

SEQ ID NO: 48638 - DNA, 27 bp, Artificial sequence
  SiRNA target sequence
aatatttatgtccgttaaaattttttt

SEQ ID NO: 48639 - DNA, 27 bp, Artificial sequence
  SiRNA target sequence
atatttatgtccgttaaaatttttttg

SEQ ID NO: 48640 - DNA, 27 bp, Artificial sequence
  SiRNA target sequence
tatttatgtccgttaaaatttttttgg

SEQ ID NO: 48641 - DNA, 27 bp, Artificial sequence
  SiRNA target sequence
atttatgtccgttaaaatttttttgga

SEQ ID NO: 48642 - DNA, 27 bp, Artificial sequence
  SiRNA target sequence
tttatgtccgttaaaatttttttggag

SEQ ID NO: 48643 - DNA, 27 bp, Artificial sequence
  SiRNA target sequence
ttatgtccgttaaaatttttttggagt

SEQ ID NO: 48644 - DNA, 27 bp, Artificial sequence
  SiRNA target sequence
tatgtccgttaaaatttttttggagta

SEQ ID NO: 48645 - DNA, 27 bp, Artificial sequence
  SiRNA target sequence
atgtccgttaaaatttttttggagtaa

SEQ ID NO: 48646 - DNA, 27 bp, Artificial sequence
  SiRNA target sequence
tgtccgttaaaatttttttggagtaat

SEQ ID NO: 48647 - DNA, 27 bp, Artificial sequence
  SiRNA target sequence
gtccgttaaaatttttttggagtaata

SEQ ID NO: 48648 - DNA, 27 bp, Artificial sequence
  SiRNA target sequence
tccgttaaaatttttttggagtaataa

SEQ ID NO: 48649 - DNA, 27 bp, Artificial sequence
  SiRNA target sequence
ccgttaaaatttttttggagtaataat

SEQ ID NO: 48650 - DNA, 27 bp, Artificial sequence
  SiRNA target sequence
cgttaaaatttttttggagtaataatt

SEQ ID NO: 48651 - DNA, 27 bp, Artificial sequence
  SiRNA target sequence
gttaaaatttttttggagtaataatta

SEQ ID NO: 48652 - DNA, 27 bp, Artificial sequence
  SiRNA target sequence
ttaaaatttttttggagtaataattaa

SEQ ID NO: 48653 - DNA, 27 bp, Artificial sequence
  SiRNA target sequence
taaaatttttttggagtaataattaaa

SEQ ID NO: 48654 - DNA, 27 bp, Artificial sequence
  SiRNA target sequence
aaaatttttttggagtaataattaaat

SEQ ID NO: 48655 - DNA, 27 bp, Artificial sequence
  SiRNA target sequence
aaatttttttggagtaataattaaatg

SEQ ID NO: 48656 - DNA, 27 bp, Artificial sequence
  SiRNA target sequence
aatttttttggagtaataattaaatga

SEQ ID NO: 48657 - DNA, 27 bp, Artificial sequence
  SiRNA target sequence
atttttttggagtaataattaaatgat

SEQ ID NO: 48658 - DNA, 27 bp, Artificial sequence
  SiRNA target sequence
tttttttggagtaataattaaatgatg

SEQ ID NO: 48659 - DNA, 27 bp, Artificial sequence
  SiRNA target sequence
ttttttggagtaataattaaatgatgc

SEQ ID NO: 48660 - DNA, 27 bp, Artificial sequence
  SiRNA target sequence
tttttggagtaataattaaatgatgca

SEQ ID NO: 48661 - DNA, 27 bp, Artificial sequence
  SiRNA target sequence
ttttggagtaataattaaatgatgcat

SEQ ID NO: 48662 - DNA, 27 bp, Artificial sequence
  SiRNA target sequence
tttggagtaataattaaatgatgcatt

SEQ ID NO: 48663 - DNA, 27 bp, Artificial sequence
  SiRNA target sequence
ttggagtaataattaaatgatgcattt

SEQ ID NO: 48664 - DNA, 27 bp, Artificial sequence
  SiRNA target sequence
tggagtaataattaaatgatgcatttt

SEQ ID NO: 48665 - DNA, 27 bp, Artificial sequence
  SiRNA target sequence
ggagtaataattaaatgatgcattttc

SEQ ID NO: 48666 - DNA, 27 bp, Artificial sequence
  SiRNA target sequence
gagtaataattaaatgatgcattttct

SEQ ID NO: 48667 - DNA, 27 bp, Artificial sequence
  SiRNA target sequence
agtaataattaaatgatgcattttcta

SEQ ID NO: 48668 - DNA, 27 bp, Artificial sequence
  SiRNA target sequence
gtaataattaaatgatgcattttctaa

SEQ ID NO: 48669 - DNA, 27 bp, Artificial sequence
  SiRNA target sequence
taataattaaatgatgcattttctaat

SEQ ID NO: 48670 - DNA, 27 bp, Artificial sequence
  SiRNA target sequence
aataattaaatgatgcattttctaatc

SEQ ID NO: 48671 - DNA, 27 bp, Artificial sequence
  SiRNA target sequence
ataattaaatgatgcattttctaatct

SEQ ID NO: 48672 - DNA, 27 bp, Artificial sequence
  SiRNA target sequence
taattaaatgatgcattttctaatctt

SEQ ID NO: 48673 - DNA, 27 bp, Artificial sequence
  SiRNA target sequence
aattaaatgatgcattttctaatctta

SEQ ID NO: 48674 - DNA, 27 bp, Artificial sequence
  SiRNA target sequence
attaaatgatgcattttctaatcttat

SEQ ID NO: 48675 - DNA, 27 bp, Artificial sequence
  SiRNA target sequence
ttaaatgatgcattttctaatcttata

SEQ ID NO: 48676 - DNA, 27 bp, Artificial sequence
  SiRNA target sequence
taaatgatgcattttctaatcttatat

SEQ ID NO: 48677 - DNA, 27 bp, Artificial sequence
  SiRNA target sequence
aaatgatgcattttctaatcttatatc

SEQ ID NO: 48678 - DNA, 27 bp, Artificial sequence
  SiRNA target sequence
aatgatgcattttctaatcttatatca

SEQ ID NO: 48679 - DNA, 27 bp, Artificial sequence
  SiRNA target sequence
atgatgcattttctaatcttatatcat

SEQ ID NO: 48680 - DNA, 27 bp, Artificial sequence
  SiRNA target sequence
tgatgcattttctaatcttatatcatt

SEQ ID NO: 48681 - DNA, 27 bp, Artificial sequence
  SiRNA target sequence
gatgcattttctaatcttatatcatta

SEQ ID NO: 48682 - DNA, 27 bp, Artificial sequence
  SiRNA target sequence
atgcattttctaatcttatatcattat

SEQ ID NO: 48683 - DNA, 27 bp, Artificial sequence
  SiRNA target sequence
tgcattttctaatcttatatcattatt

SEQ ID NO: 48684 - DNA, 27 bp, Artificial sequence
  SiRNA target sequence
gcattttctaatcttatatcattatta

SEQ ID NO: 48685 - DNA, 27 bp, Artificial sequence
  SiRNA target sequence
cattttctaatcttatatcattattaa

SEQ ID NO: 48686 - DNA, 27 bp, Artificial sequence
  SiRNA target sequence
attttctaatcttatatcattattaaa

SEQ ID NO: 48687 - DNA, 27 bp, Artificial sequence
  SiRNA target sequence
ttttctaatcttatatcattattaaat

SEQ ID NO: 48688 - DNA, 27 bp, Artificial sequence
  SiRNA target sequence
tttctaatcttatatcattattaaatt

SEQ ID NO: 48689 - DNA, 27 bp, Artificial sequence
  SiRNA target sequence
ttctaatcttatatcattattaaattc

SEQ ID NO: 48690 - DNA, 27 bp, Artificial sequence
  SiRNA target sequence
tctaatcttatatcattattaaattca

SEQ ID NO: 48691 - DNA, 27 bp, Artificial sequence
  SiRNA target sequence
ctaatcttatatcattattaaattcat

SEQ ID NO: 48692 - DNA, 27 bp, Artificial sequence
  SiRNA target sequence
taatcttatatcattattaaattcatt

SEQ ID NO: 48693 - DNA, 27 bp, Artificial sequence
  SiRNA target sequence
aatcttatatcattattaaattcatta

SEQ ID NO: 48694 - DNA, 27 bp, Artificial sequence
  SiRNA target sequence
atcttatatcattattaaattcattaa

SEQ ID NO: 48695 - DNA, 27 bp, Artificial sequence
  SiRNA target sequence
tcttatatcattattaaattcattaac

SEQ ID NO: 48696 - DNA, 27 bp, Artificial sequence
  SiRNA target sequence
cttatatcattattaaattcattaaca

SEQ ID NO: 48697 - DNA, 27 bp, Artificial sequence
  SiRNA target sequence
ttatatcattattaaattcattaacat

SEQ ID NO: 48698 - DNA, 27 bp, Artificial sequence
  SiRNA target sequence
tatatcattattaaattcattaacatc

SEQ ID NO: 48699 - DNA, 27 bp, Artificial sequence
  SiRNA target sequence
atatcattattaaattcattaacatct

SEQ ID NO: 48700 - DNA, 27 bp, Artificial sequence
  SiRNA target sequence
tatcattattaaattcattaacatcta

SEQ ID NO: 48701 - DNA, 27 bp, Artificial sequence
  SiRNA target sequence
atcattattaaattcattaacatctac

SEQ ID NO: 48702 - DNA, 27 bp, Artificial sequence
  SiRNA target sequence
tcattattaaattcattaacatctact

SEQ ID NO: 48703 - DNA, 27 bp, Artificial sequence
  SiRNA target sequence
cattattaaattcattaacatctacta

SEQ ID NO: 48704 - DNA, 27 bp, Artificial sequence
  SiRNA target sequence
attattaaattcattaacatctactaa

SEQ ID NO: 48705 - DNA, 27 bp, Artificial sequence
  SiRNA target sequence
ttattaaattcattaacatctactaaa

SEQ ID NO: 48706 - DNA, 27 bp, Artificial sequence
  SiRNA target sequence
tattaaattcattaacatctactaaat

SEQ ID NO: 48707 - DNA, 27 bp, Artificial sequence
  SiRNA target sequence
attaaattcattaacatctactaaatt

SEQ ID NO: 48708 - DNA, 27 bp, Artificial sequence
  SiRNA target sequence
ttaaattcattaacatctactaaattt

SEQ ID NO: 48709 - DNA, 27 bp, Artificial sequence
  SiRNA target sequence
taaattcattaacatctactaaatttg

SEQ ID NO: 48710 - DNA, 27 bp, Artificial sequence
  SiRNA target sequence
aaattcattaacatctactaaatttgg

SEQ ID NO: 48711 - DNA, 27 bp, Artificial sequence
  SiRNA target sequence
aattcattaacatctactaaatttggt

SEQ ID NO: 48712 - DNA, 27 bp, Artificial sequence
  SiRNA target sequence
attcattaacatctactaaatttggtt

SEQ ID NO: 48713 - DNA, 27 bp, Artificial sequence
  SiRNA target sequence
ttcattaacatctactaaatttggttc

SEQ ID NO: 48714 - DNA, 27 bp, Artificial sequence
  SiRNA target sequence
tcattaacatctactaaatttggttct

SEQ ID NO: 48715 - DNA, 27 bp, Artificial sequence
  SiRNA target sequence
cattaacatctactaaatttggttctt

SEQ ID NO: 48716 - DNA, 27 bp, Artificial sequence
  SiRNA target sequence
attaacatctactaaatttggttcttc

SEQ ID NO: 48717 - DNA, 27 bp, Artificial sequence
  SiRNA target sequence
ttaacatctactaaatttggttcttct

SEQ ID NO: 48718 - DNA, 27 bp, Artificial sequence
  SiRNA target sequence
taacatctactaaatttggttcttctt

SEQ ID NO: 48719 - DNA, 27 bp, Artificial sequence
  SiRNA target sequence
aacatctactaaatttggttcttcttt

SEQ ID NO: 48720 - DNA, 27 bp, Artificial sequence
  SiRNA target sequence
acatctactaaatttggttcttctttt

SEQ ID NO: 48721 - DNA, 27 bp, Artificial sequence
  SiRNA target sequence
catctactaaatttggttcttctttta

SEQ ID NO: 48722 - DNA, 27 bp, Artificial sequence
  SiRNA target sequence
atctactaaatttggttcttcttttat

SEQ ID NO: 48723 - DNA, 27 bp, Artificial sequence
  SiRNA target sequence
tctactaaatttggttcttcttttata

SEQ ID NO: 48724 - DNA, 27 bp, Artificial sequence
  SiRNA target sequence
ctactaaatttggttcttcttttataa

SEQ ID NO: 48725 - DNA, 27 bp, Artificial sequence
  SiRNA target sequence
tactaaatttggttcttcttttataag

SEQ ID NO: 48726 - DNA, 27 bp, Artificial sequence
  SiRNA target sequence
actaaatttggttcttcttttataagc

SEQ ID NO: 48727 - DNA, 27 bp, Artificial sequence
  SiRNA target sequence
ctaaatttggttcttcttttataagct

SEQ ID NO: 48728 - DNA, 27 bp, Artificial sequence
  SiRNA target sequence
taaatttggttcttcttttataagctc

SEQ ID NO: 48729 - DNA, 27 bp, Artificial sequence
  SiRNA target sequence
aaatttggttcttcttttataagctct

SEQ ID NO: 48730 - DNA, 27 bp, Artificial sequence
  SiRNA target sequence
aatttggttcttcttttataagctctg

SEQ ID NO: 48731 - DNA, 27 bp, Artificial sequence
  SiRNA target sequence
atttggttcttcttttataagctctgg

SEQ ID NO: 48732 - DNA, 27 bp, Artificial sequence
  SiRNA target sequence
tttggttcttcttttataagctctggt

SEQ ID NO: 48733 - DNA, 27 bp, Artificial sequence
  SiRNA target sequence
ttggttcttcttttataagctctggtt

SEQ ID NO: 48734 - DNA, 27 bp, Artificial sequence
  SiRNA target sequence
tggttcttcttttataagctctggttt

SEQ ID NO: 48735 - DNA, 27 bp, Artificial sequence
  SiRNA target sequence
ggttcttcttttataagctctggttta

SEQ ID NO: 48736 - DNA, 27 bp, Artificial sequence
  SiRNA target sequence
gttcttcttttataagctctggtttaa

SEQ ID NO: 48737 - DNA, 27 bp, Artificial sequence
  SiRNA target sequence
ttcttcttttataagctctggtttaaa

SEQ ID NO: 48738 - DNA, 27 bp, Artificial sequence
  SiRNA target sequence
tcttcttttataagctctggtttaaaa

SEQ ID NO: 48739 - DNA, 27 bp, Artificial sequence
  SiRNA target sequence
cttcttttataagctctggtttaaaag

SEQ ID NO: 48740 - DNA, 27 bp, Artificial sequence
  SiRNA target sequence
ttcttttataagctctggtttaaaaga

SEQ ID NO: 48741 - DNA, 27 bp, Artificial sequence
  SiRNA target sequence
tcttttataagctctggtttaaaagat

SEQ ID NO: 48742 - DNA, 27 bp, Artificial sequence
  SiRNA target sequence
cttttataagctctggtttaaaagatg

SEQ ID NO: 48743 - DNA, 27 bp, Artificial sequence
  SiRNA target sequence
ttttataagctctggtttaaaagatgt

SEQ ID NO: 48744 - DNA, 27 bp, Artificial sequence
  SiRNA target sequence
tttataagctctggtttaaaagatgtt

SEQ ID NO: 48745 - DNA, 27 bp, Artificial sequence
  SiRNA target sequence
ttataagctctggtttaaaagatgttc

SEQ ID NO: 48746 - DNA, 27 bp, Artificial sequence
  SiRNA target sequence
tataagctctggtttaaaagatgttct

SEQ ID NO: 48747 - DNA, 27 bp, Artificial sequence
  SiRNA target sequence
ataagctctggtttaaaagatgttctt

SEQ ID NO: 48748 - DNA, 27 bp, Artificial sequence
  SiRNA target sequence
taagctctggtttaaaagatgttctta

SEQ ID NO: 48749 - DNA, 27 bp, Artificial sequence
  SiRNA target sequence
aagctctggtttaaaagatgttcttat

SEQ ID NO: 48750 - DNA, 27 bp, Artificial sequence
  SiRNA target sequence
agctctggtttaaaagatgttcttata

SEQ ID NO: 48751 - DNA, 27 bp, Artificial sequence
  SiRNA target sequence
gctctggtttaaaagatgttcttatat

SEQ ID NO: 48752 - DNA, 27 bp, Artificial sequence
  SiRNA target sequence
ctctggtttaaaagatgttcttatatt

SEQ ID NO: 48753 - DNA, 27 bp, Artificial sequence
  SiRNA target sequence
tctggtttaaaagatgttcttatattt

SEQ ID NO: 48754 - DNA, 27 bp, Artificial sequence
  SiRNA target sequence
ctggtttaaaagatgttcttatattta

SEQ ID NO: 48755 - DNA, 27 bp, Artificial sequence
  SiRNA target sequence
tggtttaaaagatgttcttatatttaa

SEQ ID NO: 48756 - DNA, 27 bp, Artificial sequence
  SiRNA target sequence
ggtttaaaagatgttcttatatttaag

SEQ ID NO: 48757 - DNA, 27 bp, Artificial sequence
  SiRNA target sequence
gtttaaaagatgttcttatatttaaga

SEQ ID NO: 48758 - DNA, 27 bp, Artificial sequence
  SiRNA target sequence
tttaaaagatgttcttatatttaagat

SEQ ID NO: 48759 - DNA, 27 bp, Artificial sequence
  SiRNA target sequence
ttaaaagatgttcttatatttaagatt

SEQ ID NO: 48760 - DNA, 27 bp, Artificial sequence
  SiRNA target sequence
taaaagatgttcttatatttaagattg

SEQ ID NO: 48761 - DNA, 27 bp, Artificial sequence
  SiRNA target sequence
aaaagatgttcttatatttaagattgc

SEQ ID NO: 48762 - DNA, 27 bp, Artificial sequence
  SiRNA target sequence
aaagatgttcttatatttaagattgct

SEQ ID NO: 48763 - DNA, 27 bp, Artificial sequence
  SiRNA target sequence
aagatgttcttatatttaagattgctt

SEQ ID NO: 48764 - DNA, 27 bp, Artificial sequence
  SiRNA target sequence
agatgttcttatatttaagattgcttg

SEQ ID NO: 48765 - DNA, 27 bp, Artificial sequence
  SiRNA target sequence
gatgttcttatatttaagattgcttgt

SEQ ID NO: 48766 - DNA, 27 bp, Artificial sequence
  SiRNA target sequence
atgttcttatatttaagattgcttgtg

SEQ ID NO: 48767 - DNA, 27 bp, Artificial sequence
  SiRNA target sequence
tgttcttatatttaagattgcttgtgt

SEQ ID NO: 48768 - DNA, 27 bp, Artificial sequence
  SiRNA target sequence
gttcttatatttaagattgcttgtgta

SEQ ID NO: 48769 - DNA, 27 bp, Artificial sequence
  SiRNA target sequence
ttcttatatttaagattgcttgtgtat

SEQ ID NO: 48770 - DNA, 27 bp, Artificial sequence
  SiRNA target sequence
tcttatatttaagattgcttgtgtata

SEQ ID NO: 48771 - DNA, 27 bp, Artificial sequence
  SiRNA target sequence
cttatatttaagattgcttgtgtatat

SEQ ID NO: 48772 - DNA, 27 bp, Artificial sequence
  SiRNA target sequence
ttatatttaagattgcttgtgtatatc

SEQ ID NO: 48773 - DNA, 27 bp, Artificial sequence
  SiRNA target sequence
tatatttaagattgcttgtgtatatcg

SEQ ID NO: 48774 - DNA, 27 bp, Artificial sequence
  SiRNA target sequence
atatttaagattgcttgtgtatatcgt

SEQ ID NO: 48775 - DNA, 27 bp, Artificial sequence
  SiRNA target sequence
tatttaagattgcttgtgtatatcgtg

SEQ ID NO: 48776 - DNA, 27 bp, Artificial sequence
  SiRNA target sequence
atttaagattgcttgtgtatatcgtga

SEQ ID NO: 48777 - DNA, 27 bp, Artificial sequence
  SiRNA target sequence
tttaagattgcttgtgtatatcgtgag

SEQ ID NO: 48778 - DNA, 27 bp, Artificial sequence
  SiRNA target sequence
ttaagattgcttgtgtatatcgtgagt

SEQ ID NO: 48779 - DNA, 27 bp, Artificial sequence
  SiRNA target sequence
taagattgcttgtgtatatcgtgagta

SEQ ID NO: 48780 - DNA, 27 bp, Artificial sequence
  SiRNA target sequence
aagattgcttgtgtatatcgtgagtaa

SEQ ID NO: 48781 - DNA, 27 bp, Artificial sequence
  SiRNA target sequence
agattgcttgtgtatatcgtgagtaaa

SEQ ID NO: 48782 - DNA, 27 bp, Artificial sequence
  SiRNA target sequence
gattgcttgtgtatatcgtgagtaaaa

SEQ ID NO: 48783 - DNA, 27 bp, Artificial sequence
  SiRNA target sequence
attgcttgtgtatatcgtgagtaaaag

SEQ ID NO: 48784 - DNA, 27 bp, Artificial sequence
  SiRNA target sequence
ttgcttgtgtatatcgtgagtaaaaga

SEQ ID NO: 48785 - DNA, 27 bp, Artificial sequence
  SiRNA target sequence
tgcttgtgtatatcgtgagtaaaagaa

SEQ ID NO: 48786 - DNA, 27 bp, Artificial sequence
  SiRNA target sequence
gcttgtgtatatcgtgagtaaaagaac

SEQ ID NO: 48787 - DNA, 27 bp, Artificial sequence
  SiRNA target sequence
cttgtgtatatcgtgagtaaaagaacc

SEQ ID NO: 48788 - DNA, 27 bp, Artificial sequence
  SiRNA target sequence
ttgtgtatatcgtgagtaaaagaaccc

SEQ ID NO: 48789 - DNA, 27 bp, Artificial sequence
  SiRNA target sequence
tgtgtatatcgtgagtaaaagaaccct

SEQ ID NO: 48790 - DNA, 27 bp, Artificial sequence
  SiRNA target sequence
gtgtatatcgtgagtaaaagaacccta

SEQ ID NO: 48791 - DNA, 27 bp, Artificial sequence
  SiRNA target sequence
tgtatatcgtgagtaaaagaaccctaa

SEQ ID NO: 48792 - DNA, 27 bp, Artificial sequence
  SiRNA target sequence
gtatatcgtgagtaaaagaaccctaat

SEQ ID NO: 48793 - DNA, 27 bp, Artificial sequence
  SiRNA target sequence
tatatcgtgagtaaaagaaccctaatt

SEQ ID NO: 48794 - DNA, 27 bp, Artificial sequence
  SiRNA target sequence
atatcgtgagtaaaagaaccctaattg

SEQ ID NO: 48795 - DNA, 27 bp, Artificial sequence
  SiRNA target sequence
tatcgtgagtaaaagaaccctaattgt

SEQ ID NO: 48796 - DNA, 27 bp, Artificial sequence
  SiRNA target sequence
atcgtgagtaaaagaaccctaattgtc

SEQ ID NO: 48797 - DNA, 27 bp, Artificial sequence
  SiRNA target sequence
tcgtgagtaaaagaaccctaattgtcc

SEQ ID NO: 48798 - DNA, 27 bp, Artificial sequence
  SiRNA target sequence
cgtgagtaaaagaaccctaattgtcca

SEQ ID NO: 48799 - DNA, 27 bp, Artificial sequence
  SiRNA target sequence
gtgagtaaaagaaccctaattgtccaa

SEQ ID NO: 48800 - DNA, 27 bp, Artificial sequence
  SiRNA target sequence
tgagtaaaagaaccctaattgtccaaa

SEQ ID NO: 48801 - DNA, 27 bp, Artificial sequence
  SiRNA target sequence
gagtaaaagaaccctaattgtccaaaa

SEQ ID NO: 48802 - DNA, 27 bp, Artificial sequence
  SiRNA target sequence
agtaaaagaaccctaattgtccaaaac

SEQ ID NO: 48803 - DNA, 27 bp, Artificial sequence
  SiRNA target sequence
gtaaaagaaccctaattgtccaaaact

SEQ ID NO: 48804 - DNA, 27 bp, Artificial sequence
  SiRNA target sequence
taaaagaaccctaattgtccaaaactt

SEQ ID NO: 48805 - DNA, 27 bp, Artificial sequence
  SiRNA target sequence
aaaagaaccctaattgtccaaaacttg

SEQ ID NO: 48806 - DNA, 27 bp, Artificial sequence
  SiRNA target sequence
aaagaaccctaattgtccaaaacttga

SEQ ID NO: 48807 - DNA, 27 bp, Artificial sequence
  SiRNA target sequence
aagaaccctaattgtccaaaacttgaa

SEQ ID NO: 48808 - DNA, 27 bp, Artificial sequence
  SiRNA target sequence
agaaccctaattgtccaaaacttgaat

SEQ ID NO: 48809 - DNA, 27 bp, Artificial sequence
  SiRNA target sequence
gaaccctaattgtccaaaacttgaata

SEQ ID NO: 48810 - DNA, 27 bp, Artificial sequence
  SiRNA target sequence
aaccctaattgtccaaaacttgaatac

SEQ ID NO: 48811 - DNA, 27 bp, Artificial sequence
  SiRNA target sequence
accctaattgtccaaaacttgaataca

SEQ ID NO: 48812 - DNA, 27 bp, Artificial sequence
  SiRNA target sequence
ccctaattgtccaaaacttgaatacaa

SEQ ID NO: 48813 - DNA, 27 bp, Artificial sequence
  SiRNA target sequence
cctaattgtccaaaacttgaatacaat

SEQ ID NO: 48814 - DNA, 27 bp, Artificial sequence
  SiRNA target sequence
ctaattgtccaaaacttgaatacaatg

SEQ ID NO: 48815 - DNA, 27 bp, Artificial sequence
  SiRNA target sequence
taattgtccaaaacttgaatacaatgt

SEQ ID NO: 48816 - DNA, 27 bp, Artificial sequence
  SiRNA target sequence
aattgtccaaaacttgaatacaatgtt

SEQ ID NO: 48817 - DNA, 27 bp, Artificial sequence
  SiRNA target sequence
attgtccaaaacttgaatacaatgttc

SEQ ID NO: 48818 - DNA, 27 bp, Artificial sequence
  SiRNA target sequence
ttgtccaaaacttgaatacaatgttct

SEQ ID NO: 48819 - DNA, 27 bp, Artificial sequence
  SiRNA target sequence
tgtccaaaacttgaatacaatgttcta

SEQ ID NO: 48820 - DNA, 27 bp, Artificial sequence
  SiRNA target sequence
gtccaaaacttgaatacaatgttctat

SEQ ID NO: 48821 - DNA, 27 bp, Artificial sequence
  SiRNA target sequence
tccaaaacttgaatacaatgttctatt

SEQ ID NO: 48822 - DNA, 27 bp, Artificial sequence
  SiRNA target sequence
ccaaaacttgaatacaatgttctatta

SEQ ID NO: 48823 - DNA, 27 bp, Artificial sequence
  SiRNA target sequence
caaaacttgaatacaatgttctattaa

SEQ ID NO: 48824 - DNA, 27 bp, Artificial sequence
  SiRNA target sequence
aaaacttgaatacaatgttctattaat

SEQ ID NO: 48825 - DNA, 27 bp, Artificial sequence
  SiRNA target sequence
aaacttgaatacaatgttctattaatg

SEQ ID NO: 48826 - DNA, 27 bp, Artificial sequence
  SiRNA target sequence
aacttgaatacaatgttctattaatgc

SEQ ID NO: 48827 - DNA, 27 bp, Artificial sequence
  SiRNA target sequence
acttgaatacaatgttctattaatgcc

SEQ ID NO: 48828 - DNA, 27 bp, Artificial sequence
  SiRNA target sequence
cttgaatacaatgttctattaatgcca

SEQ ID NO: 48829 - DNA, 27 bp, Artificial sequence
  SiRNA target sequence
ttgaatacaatgttctattaatgccaa

SEQ ID NO: 48830 - DNA, 27 bp, Artificial sequence
  SiRNA target sequence
tgaatacaatgttctattaatgccaat

SEQ ID NO: 48831 - DNA, 27 bp, Artificial sequence
  SiRNA target sequence
gaatacaatgttctattaatgccaata

SEQ ID NO: 48832 - DNA, 27 bp, Artificial sequence
  SiRNA target sequence
aatacaatgttctattaatgccaatat

SEQ ID NO: 48833 - DNA, 27 bp, Artificial sequence
  SiRNA target sequence
atacaatgttctattaatgccaatata

SEQ ID NO: 48834 - DNA, 27 bp, Artificial sequence
  SiRNA target sequence
tacaatgttctattaatgccaatataa

SEQ ID NO: 48835 - DNA, 27 bp, Artificial sequence
  SiRNA target sequence
acaatgttctattaatgccaatataaa

SEQ ID NO: 48836 - DNA, 27 bp, Artificial sequence
  SiRNA target sequence
caatgttctattaatgccaatataaaa

SEQ ID NO: 48837 - DNA, 27 bp, Artificial sequence
  SiRNA target sequence
aatgttctattaatgccaatataaaat

SEQ ID NO: 48838 - DNA, 27 bp, Artificial sequence
  SiRNA target sequence
atgttctattaatgccaatataaaata

SEQ ID NO: 48839 - DNA, 27 bp, Artificial sequence
  SiRNA target sequence
tgttctattaatgccaatataaaatac

SEQ ID NO: 48840 - DNA, 27 bp, Artificial sequence
  SiRNA target sequence
gttctattaatgccaatataaaataca

SEQ ID NO: 48841 - DNA, 27 bp, Artificial sequence
  SiRNA target sequence
ttctattaatgccaatataaaatacaa

SEQ ID NO: 48842 - DNA, 27 bp, Artificial sequence
  SiRNA target sequence
tctattaatgccaatataaaatacaac

SEQ ID NO: 48843 - DNA, 27 bp, Artificial sequence
  SiRNA target sequence
ctattaatgccaatataaaatacaaca

SEQ ID NO: 48844 - DNA, 27 bp, Artificial sequence
  SiRNA target sequence
tattaatgccaatataaaatacaacat

SEQ ID NO: 48845 - DNA, 27 bp, Artificial sequence
  SiRNA target sequence
attaatgccaatataaaatacaacatc

SEQ ID NO: 48846 - DNA, 27 bp, Artificial sequence
  SiRNA target sequence
ttaatgccaatataaaatacaacatcc

SEQ ID NO: 48847 - DNA, 27 bp, Artificial sequence
  SiRNA target sequence
taatgccaatataaaatacaacatccc

SEQ ID NO: 48848 - DNA, 27 bp, Artificial sequence
  SiRNA target sequence
aatgccaatataaaatacaacatccct

SEQ ID NO: 48849 - DNA, 27 bp, Artificial sequence
  SiRNA target sequence
atgccaatataaaatacaacatccctg

SEQ ID NO: 48850 - DNA, 27 bp, Artificial sequence
  SiRNA target sequence
tgccaatataaaatacaacatccctgg

SEQ ID NO: 48851 - DNA, 27 bp, Artificial sequence
  SiRNA target sequence
gccaatataaaatacaacatccctggc

SEQ ID NO: 48852 - DNA, 27 bp, Artificial sequence
  SiRNA target sequence
ccaatataaaatacaacatccctggca

SEQ ID NO: 48853 - DNA, 27 bp, Artificial sequence
  SiRNA target sequence
caatataaaatacaacatccctggcac

SEQ ID NO: 48854 - DNA, 27 bp, Artificial sequence
  SiRNA target sequence
aatataaaatacaacatccctggcact

SEQ ID NO: 48855 - DNA, 27 bp, Artificial sequence
  SiRNA target sequence
atataaaatacaacatccctggcactt

SEQ ID NO: 48856 - DNA, 27 bp, Artificial sequence
  SiRNA target sequence
tataaaatacaacatccctggcactta

SEQ ID NO: 48857 - DNA, 27 bp, Artificial sequence
  SiRNA target sequence
ataaaatacaacatccctggcacttag

SEQ ID NO: 48858 - DNA, 27 bp, Artificial sequence
  SiRNA target sequence
taaaatacaacatccctggcacttagt

SEQ ID NO: 48859 - DNA, 27 bp, Artificial sequence
  SiRNA target sequence
aaaatacaacatccctggcacttagtt

SEQ ID NO: 48860 - DNA, 27 bp, Artificial sequence
  SiRNA target sequence
aaatacaacatccctggcacttagttt

SEQ ID NO: 48861 - DNA, 27 bp, Artificial sequence
  SiRNA target sequence
aatacaacatccctggcacttagtttt

SEQ ID NO: 48862 - DNA, 27 bp, Artificial sequence
  SiRNA target sequence
atacaacatccctggcacttagttttg

SEQ ID NO: 48863 - DNA, 27 bp, Artificial sequence
  SiRNA target sequence
tacaacatccctggcacttagttttgc

SEQ ID NO: 48864 - DNA, 27 bp, Artificial sequence
  SiRNA target sequence
acaacatccctggcacttagttttgct

SEQ ID NO: 48865 - DNA, 27 bp, Artificial sequence
  SiRNA target sequence
caacatccctggcacttagttttgctg

SEQ ID NO: 48866 - DNA, 27 bp, Artificial sequence
  SiRNA target sequence
aacatccctggcacttagttttgctgt

SEQ ID NO: 48867 - DNA, 27 bp, Artificial sequence
  SiRNA target sequence
acatccctggcacttagttttgctgtt

SEQ ID NO: 48868 - DNA, 27 bp, Artificial sequence
  SiRNA target sequence
catccctggcacttagttttgctgtta

SEQ ID NO: 48869 - DNA, 27 bp, Artificial sequence
  SiRNA target sequence
atccctggcacttagttttgctgttaa

SEQ ID NO: 48870 - DNA, 27 bp, Artificial sequence
  SiRNA target sequence
tccctggcacttagttttgctgttaat

SEQ ID NO: 48871 - DNA, 27 bp, Artificial sequence
  SiRNA target sequence
ccctggcacttagttttgctgttaata

SEQ ID NO: 48872 - DNA, 27 bp, Artificial sequence
  SiRNA target sequence
cctggcacttagttttgctgttaatat

SEQ ID NO: 48873 - DNA, 27 bp, Artificial sequence
  SiRNA target sequence
ctggcacttagttttgctgttaatatt

SEQ ID NO: 48874 - DNA, 27 bp, Artificial sequence
  SiRNA target sequence
tggcacttagttttgctgttaatattc

SEQ ID NO: 48875 - DNA, 27 bp, Artificial sequence
  SiRNA target sequence
ggcacttagttttgctgttaatattcc

SEQ ID NO: 48876 - DNA, 27 bp, Artificial sequence
  SiRNA target sequence
gcacttagttttgctgttaatattcca

SEQ ID NO: 48877 - DNA, 27 bp, Artificial sequence
  SiRNA target sequence
cacttagttttgctgttaatattccat

SEQ ID NO: 48878 - DNA, 27 bp, Artificial sequence
  SiRNA target sequence
acttagttttgctgttaatattccata

SEQ ID NO: 48879 - DNA, 27 bp, Artificial sequence
  SiRNA target sequence
cttagttttgctgttaatattccatag

SEQ ID NO: 48880 - DNA, 27 bp, Artificial sequence
  SiRNA target sequence
ttagttttgctgttaatattccatagt

SEQ ID NO: 48881 - DNA, 27 bp, Artificial sequence
  SiRNA target sequence
tagttttgctgttaatattccatagtt

SEQ ID NO: 48882 - DNA, 27 bp, Artificial sequence
  SiRNA target sequence
agttttgctgttaatattccatagttt

SEQ ID NO: 48883 - DNA, 27 bp, Artificial sequence
  SiRNA target sequence
gttttgctgttaatattccatagtttc

SEQ ID NO: 48884 - DNA, 27 bp, Artificial sequence
  SiRNA target sequence
ttttgctgttaatattccatagtttcc

SEQ ID NO: 48885 - DNA, 27 bp, Artificial sequence
  SiRNA target sequence
tttgctgttaatattccatagtttcct

SEQ ID NO: 48886 - DNA, 27 bp, Artificial sequence
  SiRNA target sequence
ttgctgttaatattccatagtttccta

SEQ ID NO: 48887 - DNA, 27 bp, Artificial sequence
  SiRNA target sequence
tgctgttaatattccatagtttcctaa

SEQ ID NO: 48888 - DNA, 27 bp, Artificial sequence
  SiRNA target sequence
gctgttaatattccatagtttcctaat

SEQ ID NO: 48889 - DNA, 27 bp, Artificial sequence
  SiRNA target sequence
ctgttaatattccatagtttcctaatg

SEQ ID NO: 48890 - DNA, 27 bp, Artificial sequence
  SiRNA target sequence
tgttaatattccatagtttcctaatgt

SEQ ID NO: 48891 - DNA, 27 bp, Artificial sequence
  SiRNA target sequence
gttaatattccatagtttcctaatgtt

SEQ ID NO: 48892 - DNA, 27 bp, Artificial sequence
  SiRNA target sequence
ttaatattccatagtttcctaatgtta

SEQ ID NO: 48893 - DNA, 27 bp, Artificial sequence
  SiRNA target sequence
taatattccatagtttcctaatgttat

SEQ ID NO: 48894 - DNA, 27 bp, Artificial sequence
  SiRNA target sequence
aatattccatagtttcctaatgttata

SEQ ID NO: 48895 - DNA, 27 bp, Artificial sequence
  SiRNA target sequence
atattccatagtttcctaatgttataa

SEQ ID NO: 48896 - DNA, 27 bp, Artificial sequence
  SiRNA target sequence
tattccatagtttcctaatgttataac

SEQ ID NO: 48897 - DNA, 27 bp, Artificial sequence
  SiRNA target sequence
attccatagtttcctaatgttataact

SEQ ID NO: 48898 - DNA, 27 bp, Artificial sequence
  SiRNA target sequence
ttccatagtttcctaatgttataacta

SEQ ID NO: 48899 - DNA, 27 bp, Artificial sequence
  SiRNA target sequence
tccatagtttcctaatgttataactat

SEQ ID NO: 48900 - DNA, 27 bp, Artificial sequence
  SiRNA target sequence
ccatagtttcctaatgttataactata

SEQ ID NO: 48901 - DNA, 27 bp, Artificial sequence
  SiRNA target sequence
catagtttcctaatgttataactataa

SEQ ID NO: 48902 - DNA, 27 bp, Artificial sequence
  SiRNA target sequence
atagtttcctaatgttataactataaa

SEQ ID NO: 48903 - DNA, 27 bp, Artificial sequence
  SiRNA target sequence
tagtttcctaatgttataactataaaa

SEQ ID NO: 48904 - DNA, 27 bp, Artificial sequence
  SiRNA target sequence
agtttcctaatgttataactataaaac

SEQ ID NO: 48905 - DNA, 27 bp, Artificial sequence
  SiRNA target sequence
gtttcctaatgttataactataaaaca

SEQ ID NO: 48906 - DNA, 27 bp, Artificial sequence
  SiRNA target sequence
tttcctaatgttataactataaaacac

SEQ ID NO: 48907 - DNA, 27 bp, Artificial sequence
  SiRNA target sequence
ttcctaatgttataactataaaacact

SEQ ID NO: 48908 - DNA, 27 bp, Artificial sequence
  SiRNA target sequence
tcctaatgttataactataaaacactg

SEQ ID NO: 48909 - DNA, 27 bp, Artificial sequence
  SiRNA target sequence
cctaatgttataactataaaacactgt

SEQ ID NO: 48910 - DNA, 27 bp, Artificial sequence
  SiRNA target sequence
ctaatgttataactataaaacactgta

SEQ ID NO: 48911 - DNA, 27 bp, Artificial sequence
  SiRNA target sequence
taatgttataactataaaacactgtaa

SEQ ID NO: 48912 - DNA, 27 bp, Artificial sequence
  SiRNA target sequence
aatgttataactataaaacactgtaaa

SEQ ID NO: 48913 - DNA, 27 bp, Artificial sequence
  SiRNA target sequence
atgttataactataaaacactgtaaag

SEQ ID NO: 48914 - DNA, 27 bp, Artificial sequence
  SiRNA target sequence
tgttataactataaaacactgtaaagc

SEQ ID NO: 48915 - DNA, 27 bp, Artificial sequence
  SiRNA target sequence
gttataactataaaacactgtaaagca

SEQ ID NO: 48916 - DNA, 27 bp, Artificial sequence
  SiRNA target sequence
ttataactataaaacactgtaaagcaa

SEQ ID NO: 48917 - DNA, 27 bp, Artificial sequence
  SiRNA target sequence
tataactataaaacactgtaaagcaaa

SEQ ID NO: 48918 - DNA, 27 bp, Artificial sequence
  SiRNA target sequence
ataactataaaacactgtaaagcaaaa

SEQ ID NO: 48919 - DNA, 27 bp, Artificial sequence
  SiRNA target sequence
taactataaaacactgtaaagcaaaaa

SEQ ID NO: 48920 - DNA, 27 bp, Artificial sequence
  SiRNA target sequence
aactataaaacactgtaaagcaaaaat

SEQ ID NO: 48921 - DNA, 27 bp, Artificial sequence
  SiRNA target sequence
actataaaacactgtaaagcaaaaatt

SEQ ID NO: 48922 - DNA, 27 bp, Artificial sequence
  SiRNA target sequence
ctataaaacactgtaaagcaaaaatta

SEQ ID NO: 48923 - DNA, 27 bp, Artificial sequence
  SiRNA target sequence
tataaaacactgtaaagcaaaaattat

SEQ ID NO: 48924 - DNA, 27 bp, Artificial sequence
  SiRNA target sequence
ataaaacactgtaaagcaaaaattatc

SEQ ID NO: 48925 - DNA, 27 bp, Artificial sequence
  SiRNA target sequence
taaaacactgtaaagcaaaaattatct

SEQ ID NO: 48926 - DNA, 27 bp, Artificial sequence
  SiRNA target sequence
aaaacactgtaaagcaaaaattatctt

SEQ ID NO: 48927 - DNA, 27 bp, Artificial sequence
  SiRNA target sequence
aaacactgtaaagcaaaaattatctta

SEQ ID NO: 48928 - DNA, 27 bp, Artificial sequence
  SiRNA target sequence
aacactgtaaagcaaaaattatcttat

SEQ ID NO: 48929 - DNA, 27 bp, Artificial sequence
  SiRNA target sequence
acactgtaaagcaaaaattatcttatt

SEQ ID NO: 48930 - DNA, 27 bp, Artificial sequence
  SiRNA target sequence
cactgtaaagcaaaaattatcttattt

SEQ ID NO: 48931 - DNA, 27 bp, Artificial sequence
  SiRNA target sequence
actgtaaagcaaaaattatcttattta

SEQ ID NO: 48932 - DNA, 27 bp, Artificial sequence
  SiRNA target sequence
ctgtaaagcaaaaattatcttatttac

SEQ ID NO: 48933 - DNA, 27 bp, Artificial sequence
  SiRNA target sequence
tgtaaagcaaaaattatcttatttaca

SEQ ID NO: 48934 - DNA, 27 bp, Artificial sequence
  SiRNA target sequence
gtaaagcaaaaattatcttatttacaa

SEQ ID NO: 48935 - DNA, 27 bp, Artificial sequence
  SiRNA target sequence
taaagcaaaaattatcttatttacaag

SEQ ID NO: 48936 - DNA, 27 bp, Artificial sequence
  SiRNA target sequence
aaagcaaaaattatcttatttacaagg

SEQ ID NO: 48937 - DNA, 27 bp, Artificial sequence
  SiRNA target sequence
aagcaaaaattatcttatttacaaggt

SEQ ID NO: 48938 - DNA, 27 bp, Artificial sequence
  SiRNA target sequence
agcaaaaattatcttatttacaaggta

SEQ ID NO: 48939 - DNA, 27 bp, Artificial sequence
  SiRNA target sequence
gcaaaaattatcttatttacaaggtat

SEQ ID NO: 48940 - DNA, 27 bp, Artificial sequence
  SiRNA target sequence
caaaaattatcttatttacaaggtata

SEQ ID NO: 48941 - DNA, 27 bp, Artificial sequence
  SiRNA target sequence
aaaaattatcttatttacaaggtataa

SEQ ID NO: 48942 - DNA, 27 bp, Artificial sequence
  SiRNA target sequence
aaaattatcttatttacaaggtataaa

SEQ ID NO: 48943 - DNA, 27 bp, Artificial sequence
  SiRNA target sequence
aaattatcttatttacaaggtataaaa

SEQ ID NO: 48944 - DNA, 27 bp, Artificial sequence
  SiRNA target sequence
aattatcttatttacaaggtataaaaa

SEQ ID NO: 48945 - DNA, 27 bp, Artificial sequence
  SiRNA target sequence
attatcttatttacaaggtataaaaaa

SEQ ID NO: 48946 - DNA, 27 bp, Artificial sequence
  SiRNA target sequence
ttatcttatttacaaggtataaaaaac

SEQ ID NO: 48947 - DNA, 27 bp, Artificial sequence
  SiRNA target sequence
tatcttatttacaaggtataaaaaact

SEQ ID NO: 48948 - DNA, 27 bp, Artificial sequence
  SiRNA target sequence
atcttatttacaaggtataaaaaacta

SEQ ID NO: 48949 - DNA, 27 bp, Artificial sequence
  SiRNA target sequence
tcttatttacaaggtataaaaaactaa

SEQ ID NO: 48950 - DNA, 27 bp, Artificial sequence
  SiRNA target sequence
cttatttacaaggtataaaaaactaag

SEQ ID NO: 48951 - DNA, 27 bp, Artificial sequence
  SiRNA target sequence
ttatttacaaggtataaaaaactaaga

SEQ ID NO: 48952 - DNA, 27 bp, Artificial sequence
  SiRNA target sequence
tatttacaaggtataaaaaactaagag

SEQ ID NO: 48953 - DNA, 27 bp, Artificial sequence
  SiRNA target sequence
atttacaaggtataaaaaactaagaga

SEQ ID NO: 48954 - DNA, 27 bp, Artificial sequence
  SiRNA target sequence
tttacaaggtataaaaaactaagagat

SEQ ID NO: 48955 - DNA, 27 bp, Artificial sequence
  SiRNA target sequence
ttacaaggtataaaaaactaagagatc

SEQ ID NO: 48956 - DNA, 27 bp, Artificial sequence
  SiRNA target sequence
tacaaggtataaaaaactaagagatct

SEQ ID NO: 48957 - DNA, 27 bp, Artificial sequence
  SiRNA target sequence
acaaggtataaaaaactaagagatctc

SEQ ID NO: 48958 - DNA, 27 bp, Artificial sequence
  SiRNA target sequence
caaggtataaaaaactaagagatctcc

SEQ ID NO: 48959 - DNA, 27 bp, Artificial sequence
  SiRNA target sequence
aaggtataaaaaactaagagatctcca

SEQ ID NO: 48960 - DNA, 27 bp, Artificial sequence
  SiRNA target sequence
aggtataaaaaactaagagatctccag

SEQ ID NO: 48961 - DNA, 27 bp, Artificial sequence
  SiRNA target sequence
ggtataaaaaactaagagatctccaga

SEQ ID NO: 48962 - DNA, 27 bp, Artificial sequence
  SiRNA target sequence
gtataaaaaactaagagatctccagat

SEQ ID NO: 48963 - DNA, 27 bp, Artificial sequence
  SiRNA target sequence
tataaaaaactaagagatctccagatt

SEQ ID NO: 48964 - DNA, 27 bp, Artificial sequence
  SiRNA target sequence
ataaaaaactaagagatctccagattc

SEQ ID NO: 48965 - DNA, 27 bp, Artificial sequence
  SiRNA target sequence
taaaaaactaagagatctccagattct

SEQ ID NO: 48966 - DNA, 27 bp, Artificial sequence
  SiRNA target sequence
aaaaaactaagagatctccagattctg

SEQ ID NO: 48967 - DNA, 27 bp, Artificial sequence
  SiRNA target sequence
aaaaactaagagatctccagattctgt

SEQ ID NO: 48968 - DNA, 27 bp, Artificial sequence
  SiRNA target sequence
aaaactaagagatctccagattctgtt

SEQ ID NO: 48969 - DNA, 27 bp, Artificial sequence
  SiRNA target sequence
aaactaagagatctccagattctgtta

SEQ ID NO: 48970 - DNA, 27 bp, Artificial sequence
  SiRNA target sequence
aactaagagatctccagattctgttac

SEQ ID NO: 48971 - DNA, 27 bp, Artificial sequence
  SiRNA target sequence
actaagagatctccagattctgttaca

SEQ ID NO: 48972 - DNA, 27 bp, Artificial sequence
  SiRNA target sequence
ctaagagatctccagattctgttacat

SEQ ID NO: 48973 - DNA, 27 bp, Artificial sequence
  SiRNA target sequence
taagagatctccagattctgttacatt

SEQ ID NO: 48974 - DNA, 27 bp, Artificial sequence
  SiRNA target sequence
aagagatctccagattctgttacattc

SEQ ID NO: 48975 - DNA, 27 bp, Artificial sequence
  SiRNA target sequence
agagatctccagattctgttacattcc

SEQ ID NO: 48976 - DNA, 27 bp, Artificial sequence
  SiRNA target sequence
gagatctccagattctgttacattccg

SEQ ID NO: 48977 - DNA, 27 bp, Artificial sequence
  SiRNA target sequence
agatctccagattctgttacattccga

SEQ ID NO: 48978 - DNA, 27 bp, Artificial sequence
  SiRNA target sequence
gatctccagattctgttacattccgat

SEQ ID NO: 48979 - DNA, 27 bp, Artificial sequence
  SiRNA target sequence
atctccagattctgttacattccgatt

SEQ ID NO: 48980 - DNA, 27 bp, Artificial sequence
  SiRNA target sequence
tctccagattctgttacattccgattc

SEQ ID NO: 48981 - DNA, 27 bp, Artificial sequence
  SiRNA target sequence
ctccagattctgttacattccgattct

SEQ ID NO: 48982 - DNA, 27 bp, Artificial sequence
  SiRNA target sequence
tccagattctgttacattccgattcta

SEQ ID NO: 48983 - DNA, 27 bp, Artificial sequence
  SiRNA target sequence
ccagattctgttacattccgattctac

SEQ ID NO: 48984 - DNA, 27 bp, Artificial sequence
  SiRNA target sequence
cagattctgttacattccgattctact

SEQ ID NO: 48985 - DNA, 27 bp, Artificial sequence
  SiRNA target sequence
agattctgttacattccgattctactt

SEQ ID NO: 48986 - DNA, 27 bp, Artificial sequence
  SiRNA target sequence
gattctgttacattccgattctacttc

SEQ ID NO: 48987 - DNA, 27 bp, Artificial sequence
  SiRNA target sequence
attctgttacattccgattctacttca

SEQ ID NO: 48988 - DNA, 27 bp, Artificial sequence
  SiRNA target sequence
ttctgttacattccgattctacttcag

SEQ ID NO: 48989 - DNA, 27 bp, Artificial sequence
  SiRNA target sequence
tctgttacattccgattctacttcaga

SEQ ID NO: 48990 - DNA, 27 bp, Artificial sequence
  SiRNA target sequence
ctgttacattccgattctacttcagaa

SEQ ID NO: 48991 - DNA, 27 bp, Artificial sequence
  SiRNA target sequence
tgttacattccgattctacttcagaaa

SEQ ID NO: 48992 - DNA, 27 bp, Artificial sequence
  SiRNA target sequence
gttacattccgattctacttcagaaac

SEQ ID NO: 48993 - DNA, 27 bp, Artificial sequence
  SiRNA target sequence
ttacattccgattctacttcagaaaca

SEQ ID NO: 48994 - DNA, 27 bp, Artificial sequence
  SiRNA target sequence
tacattccgattctacttcagaaacat

SEQ ID NO: 48995 - DNA, 27 bp, Artificial sequence
  SiRNA target sequence
acattccgattctacttcagaaacata

SEQ ID NO: 48996 - DNA, 27 bp, Artificial sequence
  SiRNA target sequence
cattccgattctacttcagaaacatat

SEQ ID NO: 48997 - DNA, 27 bp, Artificial sequence
  SiRNA target sequence
attccgattctacttcagaaacatatt

SEQ ID NO: 48998 - DNA, 27 bp, Artificial sequence
  SiRNA target sequence
ttccgattctacttcagaaacatattt

SEQ ID NO: 48999 - DNA, 27 bp, Artificial sequence
  SiRNA target sequence
tccgattctacttcagaaacatatttt

SEQ ID NO: 49000 - DNA, 27 bp, Artificial sequence
  SiRNA target sequence
ccgattctacttcagaaacatattttt

SEQ ID NO: 49001 - DNA, 27 bp, Artificial sequence
  SiRNA target sequence
cgattctacttcagaaacatatttttc

SEQ ID NO: 49002 - DNA, 27 bp, Artificial sequence
  SiRNA target sequence
gattctacttcagaaacatatttttca

SEQ ID NO: 49003 - DNA, 27 bp, Artificial sequence
  SiRNA target sequence
attctacttcagaaacatatttttcat

SEQ ID NO: 49004 - DNA, 27 bp, Artificial sequence
  SiRNA target sequence
ttctacttcagaaacatatttttcata

SEQ ID NO: 49005 - DNA, 27 bp, Artificial sequence
  SiRNA target sequence
tctacttcagaaacatatttttcatat

SEQ ID NO: 49006 - DNA, 27 bp, Artificial sequence
  SiRNA target sequence
ctacttcagaaacatatttttcatatt

SEQ ID NO: 49007 - DNA, 27 bp, Artificial sequence
  SiRNA target sequence
tacttcagaaacatatttttcatattt

SEQ ID NO: 49008 - DNA, 27 bp, Artificial sequence
  SiRNA target sequence
acttcagaaacatatttttcatattta

SEQ ID NO: 49009 - DNA, 27 bp, Artificial sequence
  SiRNA target sequence
cttcagaaacatatttttcatatttaa

SEQ ID NO: 49010 - DNA, 27 bp, Artificial sequence
  SiRNA target sequence
ttcagaaacatatttttcatatttaag

SEQ ID NO: 49011 - DNA, 27 bp, Artificial sequence
  SiRNA target sequence
tcagaaacatatttttcatatttaagc

SEQ ID NO: 49012 - DNA, 27 bp, Artificial sequence
  SiRNA target sequence
cagaaacatatttttcatatttaagcg

SEQ ID NO: 49013 - DNA, 27 bp, Artificial sequence
  SiRNA target sequence
agaaacatatttttcatatttaagcga

SEQ ID NO: 49014 - DNA, 27 bp, Artificial sequence
  SiRNA target sequence
gaaacatatttttcatatttaagcgat

SEQ ID NO: 49015 - DNA, 27 bp, Artificial sequence
  SiRNA target sequence
aaacatatttttcatatttaagcgatt

SEQ ID NO: 49016 - DNA, 27 bp, Artificial sequence
  SiRNA target sequence
aacatatttttcatatttaagcgattc

SEQ ID NO: 49017 - DNA, 27 bp, Artificial sequence
  SiRNA target sequence
acatatttttcatatttaagcgattct

SEQ ID NO: 49018 - DNA, 27 bp, Artificial sequence
  SiRNA target sequence
catatttttcatatttaagcgattctt

SEQ ID NO: 49019 - DNA, 27 bp, Artificial sequence
  SiRNA target sequence
atatttttcatatttaagcgattcttc

SEQ ID NO: 49020 - DNA, 27 bp, Artificial sequence
  SiRNA target sequence
tatttttcatatttaagcgattcttct

SEQ ID NO: 49021 - DNA, 27 bp, Artificial sequence
  SiRNA target sequence
atttttcatatttaagcgattcttctt

SEQ ID NO: 49022 - DNA, 27 bp, Artificial sequence
  SiRNA target sequence
tttttcatatttaagcgattcttcttc

SEQ ID NO: 49023 - DNA, 27 bp, Artificial sequence
  SiRNA target sequence
ttttcatatttaagcgattcttcttct

SEQ ID NO: 49024 - DNA, 27 bp, Artificial sequence
  SiRNA target sequence
tttcatatttaagcgattcttcttctt

SEQ ID NO: 49025 - DNA, 27 bp, Artificial sequence
  SiRNA target sequence
ttcatatttaagcgattcttcttcttc

SEQ ID NO: 49026 - DNA, 27 bp, Artificial sequence
  SiRNA target sequence
tcatatttaagcgattcttcttcttct

SEQ ID NO: 49027 - DNA, 27 bp, Artificial sequence
  SiRNA target sequence
catatttaagcgattcttcttcttctg

SEQ ID NO: 49028 - DNA, 27 bp, Artificial sequence
  SiRNA target sequence
atatttaagcgattcttcttcttctgt

SEQ ID NO: 49029 - DNA, 27 bp, Artificial sequence
  SiRNA target sequence
tatttaagcgattcttcttcttctgtt

SEQ ID NO: 49030 - DNA, 27 bp, Artificial sequence
  SiRNA target sequence
atttaagcgattcttcttcttctgttt

SEQ ID NO: 49031 - DNA, 27 bp, Artificial sequence
  SiRNA target sequence
tttaagcgattcttcttcttctgtttt

SEQ ID NO: 49032 - DNA, 27 bp, Artificial sequence
  SiRNA target sequence
ttaagcgattcttcttcttctgtttta

SEQ ID NO: 49033 - DNA, 27 bp, Artificial sequence
  SiRNA target sequence
taagcgattcttcttcttctgttttat

SEQ ID NO: 49034 - DNA, 27 bp, Artificial sequence
  SiRNA target sequence
aagcgattcttcttcttctgttttata

SEQ ID NO: 49035 - DNA, 27 bp, Artificial sequence
  SiRNA target sequence
agcgattcttcttcttctgttttatat

SEQ ID NO: 49036 - DNA, 27 bp, Artificial sequence
  SiRNA target sequence
gcgattcttcttcttctgttttatatg

SEQ ID NO: 49037 - DNA, 27 bp, Artificial sequence
  SiRNA target sequence
cgattcttcttcttctgttttatatgc

SEQ ID NO: 49038 - DNA, 27 bp, Artificial sequence
  SiRNA target sequence
gattcttcttcttctgttttatatgct

SEQ ID NO: 49039 - DNA, 27 bp, Artificial sequence
  SiRNA target sequence
attcttcttcttctgttttatatgcta

SEQ ID NO: 49040 - DNA, 27 bp, Artificial sequence
  SiRNA target sequence
ttcttcttcttctgttttatatgctag

SEQ ID NO: 49041 - DNA, 27 bp, Artificial sequence
  SiRNA target sequence
tcttcttcttctgttttatatgctagt

SEQ ID NO: 49042 - DNA, 27 bp, Artificial sequence
  SiRNA target sequence
cttcttcttctgttttatatgctagta

SEQ ID NO: 49043 - DNA, 27 bp, Artificial sequence
  SiRNA target sequence
ttcttcttctgttttatatgctagtat

SEQ ID NO: 49044 - DNA, 27 bp, Artificial sequence
  SiRNA target sequence
tcttcttctgttttatatgctagtata

SEQ ID NO: 49045 - DNA, 27 bp, Artificial sequence
  SiRNA target sequence
cttcttctgttttatatgctagtatag

SEQ ID NO: 49046 - DNA, 27 bp, Artificial sequence
  SiRNA target sequence
ttcttctgttttatatgctagtatagt

SEQ ID NO: 49047 - DNA, 27 bp, Artificial sequence
  SiRNA target sequence
tcttctgttttatatgctagtatagtc

SEQ ID NO: 49048 - DNA, 27 bp, Artificial sequence
  SiRNA target sequence
cttctgttttatatgctagtatagtct

SEQ ID NO: 49049 - DNA, 27 bp, Artificial sequence
  SiRNA target sequence
ttctgttttatatgctagtatagtctc

SEQ ID NO: 49050 - DNA, 27 bp, Artificial sequence
  SiRNA target sequence
tctgttttatatgctagtatagtctca

SEQ ID NO: 49051 - DNA, 27 bp, Artificial sequence
  SiRNA target sequence
ctgttttatatgctagtatagtctcat

SEQ ID NO: 49052 - DNA, 27 bp, Artificial sequence
  SiRNA target sequence
tgttttatatgctagtatagtctcatg

SEQ ID NO: 49053 - DNA, 27 bp, Artificial sequence
  SiRNA target sequence
gttttatatgctagtatagtctcatga

SEQ ID NO: 49054 - DNA, 27 bp, Artificial sequence
  SiRNA target sequence
ttttatatgctagtatagtctcatgat

SEQ ID NO: 49055 - DNA, 27 bp, Artificial sequence
  SiRNA target sequence
tttatatgctagtatagtctcatgatt

SEQ ID NO: 49056 - DNA, 27 bp, Artificial sequence
  SiRNA target sequence
ttatatgctagtatagtctcatgatta

SEQ ID NO: 49057 - DNA, 27 bp, Artificial sequence
  SiRNA target sequence
tatatgctagtatagtctcatgattaa

SEQ ID NO: 49058 - DNA, 27 bp, Artificial sequence
  SiRNA target sequence
atatgctagtatagtctcatgattaat

SEQ ID NO: 49059 - DNA, 27 bp, Artificial sequence
  SiRNA target sequence
tatgctagtatagtctcatgattaatt

SEQ ID NO: 49060 - DNA, 27 bp, Artificial sequence
  SiRNA target sequence
atgctagtatagtctcatgattaatta

SEQ ID NO: 49061 - DNA, 27 bp, Artificial sequence
  SiRNA target sequence
tgctagtatagtctcatgattaattaa

SEQ ID NO: 49062 - DNA, 27 bp, Artificial sequence
  SiRNA target sequence
gctagtatagtctcatgattaattaaa

SEQ ID NO: 49063 - DNA, 27 bp, Artificial sequence
  SiRNA target sequence
ctagtatagtctcatgattaattaaag

SEQ ID NO: 49064 - DNA, 27 bp, Artificial sequence
  SiRNA target sequence
tagtatagtctcatgattaattaaaga

SEQ ID NO: 49065 - DNA, 27 bp, Artificial sequence
  SiRNA target sequence
agtatagtctcatgattaattaaagaa

SEQ ID NO: 49066 - DNA, 27 bp, Artificial sequence
  SiRNA target sequence
gtatagtctcatgattaattaaagaat

SEQ ID NO: 49067 - DNA, 27 bp, Artificial sequence
  SiRNA target sequence
tatagtctcatgattaattaaagaatc

SEQ ID NO: 49068 - DNA, 27 bp, Artificial sequence
  SiRNA target sequence
atagtctcatgattaattaaagaatca

SEQ ID NO: 49069 - DNA, 27 bp, Artificial sequence
  SiRNA target sequence
tagtctcatgattaattaaagaatcat

SEQ ID NO: 49070 - DNA, 27 bp, Artificial sequence
  SiRNA target sequence
agtctcatgattaattaaagaatcatg

SEQ ID NO: 49071 - DNA, 27 bp, Artificial sequence
  SiRNA target sequence
gtctcatgattaattaaagaatcatgt

SEQ ID NO: 49072 - DNA, 27 bp, Artificial sequence
  SiRNA target sequence
tctcatgattaattaaagaatcatgta

SEQ ID NO: 49073 - DNA, 27 bp, Artificial sequence
  SiRNA target sequence
ctcatgattaattaaagaatcatgtaa

SEQ ID NO: 49074 - DNA, 27 bp, Artificial sequence
  SiRNA target sequence
tcatgattaattaaagaatcatgtaag

SEQ ID NO: 49075 - DNA, 27 bp, Artificial sequence
  SiRNA target sequence
catgattaattaaagaatcatgtaagt

SEQ ID NO: 49076 - DNA, 27 bp, Artificial sequence
  SiRNA target sequence
atgattaattaaagaatcatgtaagtg

SEQ ID NO: 49077 - DNA, 27 bp, Artificial sequence
  SiRNA target sequence
tgattaattaaagaatcatgtaagtga

SEQ ID NO: 49078 - DNA, 27 bp, Artificial sequence
  SiRNA target sequence
gattaattaaagaatcatgtaagtgat

SEQ ID NO: 49079 - DNA, 27 bp, Artificial sequence
  SiRNA target sequence
attaattaaagaatcatgtaagtgatt

SEQ ID NO: 49080 - DNA, 27 bp, Artificial sequence
  SiRNA target sequence
ttaattaaagaatcatgtaagtgattt

SEQ ID NO: 49081 - DNA, 27 bp, Artificial sequence
  SiRNA target sequence
taattaaagaatcatgtaagtgatttg

SEQ ID NO: 49082 - DNA, 27 bp, Artificial sequence
  SiRNA target sequence
aattaaagaatcatgtaagtgatttga

SEQ ID NO: 49083 - DNA, 27 bp, Artificial sequence
  SiRNA target sequence
attaaagaatcatgtaagtgatttgag

SEQ ID NO: 49084 - DNA, 27 bp, Artificial sequence
  SiRNA target sequence
ttaaagaatcatgtaagtgatttgagc

SEQ ID NO: 49085 - DNA, 27 bp, Artificial sequence
  SiRNA target sequence
taaagaatcatgtaagtgatttgagca

SEQ ID NO: 49086 - DNA, 27 bp, Artificial sequence
  SiRNA target sequence
aaagaatcatgtaagtgatttgagcat

SEQ ID NO: 49087 - DNA, 27 bp, Artificial sequence
  SiRNA target sequence
aagaatcatgtaagtgatttgagcatc

SEQ ID NO: 49088 - DNA, 27 bp, Artificial sequence
  SiRNA target sequence
agaatcatgtaagtgatttgagcatct

SEQ ID NO: 49089 - DNA, 27 bp, Artificial sequence
  SiRNA target sequence
gaatcatgtaagtgatttgagcatctt

SEQ ID NO: 49090 - DNA, 27 bp, Artificial sequence
  SiRNA target sequence
aatcatgtaagtgatttgagcatcttt

SEQ ID NO: 49091 - DNA, 27 bp, Artificial sequence
  SiRNA target sequence
atcatgtaagtgatttgagcatctttg

SEQ ID NO: 49092 - DNA, 27 bp, Artificial sequence
  SiRNA target sequence
tcatgtaagtgatttgagcatctttgt

SEQ ID NO: 49093 - DNA, 27 bp, Artificial sequence
  SiRNA target sequence
catgtaagtgatttgagcatctttgtt

SEQ ID NO: 49094 - DNA, 27 bp, Artificial sequence
  SiRNA target sequence
atgtaagtgatttgagcatctttgttg

SEQ ID NO: 49095 - DNA, 27 bp, Artificial sequence
  SiRNA target sequence
tgtaagtgatttgagcatctttgttgt

SEQ ID NO: 49096 - DNA, 27 bp, Artificial sequence
  SiRNA target sequence
gtaagtgatttgagcatctttgttgtg

SEQ ID NO: 49097 - DNA, 27 bp, Artificial sequence
  SiRNA target sequence
taagtgatttgagcatctttgttgtgc

SEQ ID NO: 49098 - DNA, 27 bp, Artificial sequence
  SiRNA target sequence
aagtgatttgagcatctttgttgtgcg

SEQ ID NO: 49099 - DNA, 27 bp, Artificial sequence
  SiRNA target sequence
agtgatttgagcatctttgttgtgcgc

SEQ ID NO: 49100 - DNA, 27 bp, Artificial sequence
  SiRNA target sequence
gtgatttgagcatctttgttgtgcgca

SEQ ID NO: 49101 - DNA, 27 bp, Artificial sequence
  SiRNA target sequence
tgatttgagcatctttgttgtgcgcaa

SEQ ID NO: 49102 - DNA, 27 bp, Artificial sequence
  SiRNA target sequence
gatttgagcatctttgttgtgcgcaat

SEQ ID NO: 49103 - DNA, 27 bp, Artificial sequence
  SiRNA target sequence
atttgagcatctttgttgtgcgcaatt

SEQ ID NO: 49104 - DNA, 27 bp, Artificial sequence
  SiRNA target sequence
tttgagcatctttgttgtgcgcaatta

SEQ ID NO: 49105 - DNA, 27 bp, Artificial sequence
  SiRNA target sequence
ttgagcatctttgttgtgcgcaattat

SEQ ID NO: 49106 - DNA, 27 bp, Artificial sequence
  SiRNA target sequence
tgagcatctttgttgtgcgcaattata

SEQ ID NO: 49107 - DNA, 27 bp, Artificial sequence
  SiRNA target sequence
gagcatctttgttgtgcgcaattatat

SEQ ID NO: 49108 - DNA, 27 bp, Artificial sequence
  SiRNA target sequence
agcatctttgttgtgcgcaattatatt

SEQ ID NO: 49109 - DNA, 27 bp, Artificial sequence
  SiRNA target sequence
gcatctttgttgtgcgcaattatattc

SEQ ID NO: 49110 - DNA, 27 bp, Artificial sequence
  SiRNA target sequence
catctttgttgtgcgcaattatattct

SEQ ID NO: 49111 - DNA, 27 bp, Artificial sequence
  SiRNA target sequence
atctttgttgtgcgcaattatattctt

SEQ ID NO: 49112 - DNA, 27 bp, Artificial sequence
  SiRNA target sequence
tctttgttgtgcgcaattatattcttt

SEQ ID NO: 49113 - DNA, 27 bp, Artificial sequence
  SiRNA target sequence
ctttgttgtgcgcaattatattctttt

SEQ ID NO: 49114 - DNA, 27 bp, Artificial sequence
  SiRNA target sequence
tttgttgtgcgcaattatattcttttc

SEQ ID NO: 49115 - DNA, 27 bp, Artificial sequence
  SiRNA target sequence
ttgttgtgcgcaattatattcttttct

SEQ ID NO: 49116 - DNA, 27 bp, Artificial sequence
  SiRNA target sequence
tgttgtgcgcaattatattcttttctt

SEQ ID NO: 49117 - DNA, 27 bp, Artificial sequence
  SiRNA target sequence
gttgtgcgcaattatattcttttctta

SEQ ID NO: 49118 - DNA, 27 bp, Artificial sequence
  SiRNA target sequence
ttgtgcgcaattatattcttttcttat

SEQ ID NO: 49119 - DNA, 27 bp, Artificial sequence
  SiRNA target sequence
tgtgcgcaattatattcttttcttatt

SEQ ID NO: 49120 - DNA, 27 bp, Artificial sequence
  SiRNA target sequence
gtgcgcaattatattcttttcttattc

SEQ ID NO: 49121 - DNA, 27 bp, Artificial sequence
  SiRNA target sequence
tgcgcaattatattcttttcttattcc

SEQ ID NO: 49122 - DNA, 27 bp, Artificial sequence
  SiRNA target sequence
gcgcaattatattcttttcttattcct

SEQ ID NO: 49123 - DNA, 27 bp, Artificial sequence
  SiRNA target sequence
cgcaattatattcttttcttattcctg

SEQ ID NO: 49124 - DNA, 27 bp, Artificial sequence
  SiRNA target sequence
gcaattatattcttttcttattcctgt

SEQ ID NO: 49125 - DNA, 27 bp, Artificial sequence
  SiRNA target sequence
caattatattcttttcttattcctgta

SEQ ID NO: 49126 - DNA, 27 bp, Artificial sequence
  SiRNA target sequence
aattatattcttttcttattcctgtac

SEQ ID NO: 49127 - DNA, 27 bp, Artificial sequence
  SiRNA target sequence
attatattcttttcttattcctgtacg

SEQ ID NO: 49128 - DNA, 27 bp, Artificial sequence
  SiRNA target sequence
ttatattcttttcttattcctgtacgc

SEQ ID NO: 49129 - DNA, 27 bp, Artificial sequence
  SiRNA target sequence
tatattcttttcttattcctgtacgcc

SEQ ID NO: 49130 - DNA, 27 bp, Artificial sequence
  SiRNA target sequence
atattcttttcttattcctgtacgcca

SEQ ID NO: 49131 - DNA, 27 bp, Artificial sequence
  SiRNA target sequence
tattcttttcttattcctgtacgccaa

SEQ ID NO: 49132 - DNA, 27 bp, Artificial sequence
  SiRNA target sequence
attcttttcttattcctgtacgccaat

SEQ ID NO: 49133 - DNA, 27 bp, Artificial sequence
  SiRNA target sequence
ttcttttcttattcctgtacgccaatg

SEQ ID NO: 49134 - DNA, 27 bp, Artificial sequence
  SiRNA target sequence
tcttttcttattcctgtacgccaatga

SEQ ID NO: 49135 - DNA, 27 bp, Artificial sequence
  SiRNA target sequence
cttttcttattcctgtacgccaatgaa

SEQ ID NO: 49136 - DNA, 27 bp, Artificial sequence
  SiRNA target sequence
ttttcttattcctgtacgccaatgaac

SEQ ID NO: 49137 - DNA, 27 bp, Artificial sequence
  SiRNA target sequence
tttcttattcctgtacgccaatgaact

SEQ ID NO: 49138 - DNA, 27 bp, Artificial sequence
  SiRNA target sequence
ttcttattcctgtacgccaatgaacta

SEQ ID NO: 49139 - DNA, 27 bp, Artificial sequence
  SiRNA target sequence
tcttattcctgtacgccaatgaactat

SEQ ID NO: 49140 - DNA, 27 bp, Artificial sequence
  SiRNA target sequence
cttattcctgtacgccaatgaactatt

SEQ ID NO: 49141 - DNA, 27 bp, Artificial sequence
  SiRNA target sequence
ttattcctgtacgccaatgaactattt

SEQ ID NO: 49142 - DNA, 27 bp, Artificial sequence
  SiRNA target sequence
tattcctgtacgccaatgaactatttt

SEQ ID NO: 49143 - DNA, 27 bp, Artificial sequence
  SiRNA target sequence
attcctgtacgccaatgaactattttc

SEQ ID NO: 49144 - DNA, 27 bp, Artificial sequence
  SiRNA target sequence
ttcctgtacgccaatgaactattttcg

SEQ ID NO: 49145 - DNA, 27 bp, Artificial sequence
  SiRNA target sequence
tcctgtacgccaatgaactattttcgc

SEQ ID NO: 49146 - DNA, 27 bp, Artificial sequence
  SiRNA target sequence
cctgtacgccaatgaactattttcgca

SEQ ID NO: 49147 - DNA, 27 bp, Artificial sequence
  SiRNA target sequence
ctgtacgccaatgaactattttcgcag

SEQ ID NO: 49148 - DNA, 27 bp, Artificial sequence
  SiRNA target sequence
tgtacgccaatgaactattttcgcagt

SEQ ID NO: 49149 - DNA, 27 bp, Artificial sequence
  SiRNA target sequence
gtacgccaatgaactattttcgcagtt

SEQ ID NO: 49150 - DNA, 27 bp, Artificial sequence
  SiRNA target sequence
tacgccaatgaactattttcgcagttg

SEQ ID NO: 49151 - DNA, 27 bp, Artificial sequence
  SiRNA target sequence
acgccaatgaactattttcgcagttgc

SEQ ID NO: 49152 - DNA, 27 bp, Artificial sequence
  SiRNA target sequence
cgccaatgaactattttcgcagttgca

SEQ ID NO: 49153 - DNA, 27 bp, Artificial sequence
  SiRNA target sequence
gccaatgaactattttcgcagttgcaa

SEQ ID NO: 49154 - DNA, 27 bp, Artificial sequence
  SiRNA target sequence
ccaatgaactattttcgcagttgcaag

SEQ ID NO: 49155 - DNA, 27 bp, Artificial sequence
  SiRNA target sequence
caatgaactattttcgcagttgcaagg

SEQ ID NO: 49156 - DNA, 27 bp, Artificial sequence
  SiRNA target sequence
aatgaactattttcgcagttgcaagga

SEQ ID NO: 49157 - DNA, 27 bp, Artificial sequence
  SiRNA target sequence
atgaactattttcgcagttgcaaggat

SEQ ID NO: 49158 - DNA, 27 bp, Artificial sequence
  SiRNA target sequence
tgaactattttcgcagttgcaaggatg

SEQ ID NO: 49159 - DNA, 27 bp, Artificial sequence
  SiRNA target sequence
gaactattttcgcagttgcaaggatgt

SEQ ID NO: 49160 - DNA, 27 bp, Artificial sequence
  SiRNA target sequence
aactattttcgcagttgcaaggatgta

SEQ ID NO: 49161 - DNA, 27 bp, Artificial sequence
  SiRNA target sequence
actattttcgcagttgcaaggatgtaa

SEQ ID NO: 49162 - DNA, 27 bp, Artificial sequence
  SiRNA target sequence
ctattttcgcagttgcaaggatgtaaa

SEQ ID NO: 49163 - DNA, 27 bp, Artificial sequence
  SiRNA target sequence
tattttcgcagttgcaaggatgtaaac

SEQ ID NO: 49164 - DNA, 27 bp, Artificial sequence
  SiRNA target sequence
attttcgcagttgcaaggatgtaaact

SEQ ID NO: 49165 - DNA, 27 bp, Artificial sequence
  SiRNA target sequence
ttttcgcagttgcaaggatgtaaacta

SEQ ID NO: 49166 - DNA, 27 bp, Artificial sequence
  SiRNA target sequence
tttcgcagttgcaaggatgtaaactaa

SEQ ID NO: 49167 - DNA, 27 bp, Artificial sequence
  SiRNA target sequence
ttcgcagttgcaaggatgtaaactaat

SEQ ID NO: 49168 - DNA, 27 bp, Artificial sequence
  SiRNA target sequence
tcgcagttgcaaggatgtaaactaata

SEQ ID NO: 49169 - DNA, 27 bp, Artificial sequence
  SiRNA target sequence
cgcagttgcaaggatgtaaactaataa

SEQ ID NO: 49170 - DNA, 27 bp, Artificial sequence
  SiRNA target sequence
gcagttgcaaggatgtaaactaataat

SEQ ID NO: 49171 - DNA, 27 bp, Artificial sequence
  SiRNA target sequence
cagttgcaaggatgtaaactaataatg

SEQ ID NO: 49172 - DNA, 27 bp, Artificial sequence
  SiRNA target sequence
agttgcaaggatgtaaactaataatgt

SEQ ID NO: 49173 - DNA, 27 bp, Artificial sequence
  SiRNA target sequence
gttgcaaggatgtaaactaataatgtg

SEQ ID NO: 49174 - DNA, 27 bp, Artificial sequence
  SiRNA target sequence
ttgcaaggatgtaaactaataatgtga

SEQ ID NO: 49175 - DNA, 27 bp, Artificial sequence
  SiRNA target sequence
tgcaaggatgtaaactaataatgtgat

SEQ ID NO: 49176 - DNA, 27 bp, Artificial sequence
  SiRNA target sequence
gcaaggatgtaaactaataatgtgatt

SEQ ID NO: 49177 - DNA, 27 bp, Artificial sequence
  SiRNA target sequence
caaggatgtaaactaataatgtgatta

SEQ ID NO: 49178 - DNA, 27 bp, Artificial sequence
  SiRNA target sequence
aaggatgtaaactaataatgtgattaa

SEQ ID NO: 49179 - DNA, 27 bp, Artificial sequence
  SiRNA target sequence
aggatgtaaactaataatgtgattaaa

SEQ ID NO: 49180 - DNA, 27 bp, Artificial sequence
  SiRNA target sequence
ggatgtaaactaataatgtgattaaaa

SEQ ID NO: 49181 - DNA, 27 bp, Artificial sequence
  SiRNA target sequence
gatgtaaactaataatgtgattaaaat

SEQ ID NO: 49182 - DNA, 27 bp, Artificial sequence
  SiRNA target sequence
atgtaaactaataatgtgattaaaata

SEQ ID NO: 49183 - DNA, 27 bp, Artificial sequence
  SiRNA target sequence
tgtaaactaataatgtgattaaaataa

SEQ ID NO: 49184 - DNA, 27 bp, Artificial sequence
  SiRNA target sequence
gtaaactaataatgtgattaaaataat

SEQ ID NO: 49185 - DNA, 27 bp, Artificial sequence
  SiRNA target sequence
taaactaataatgtgattaaaataata

SEQ ID NO: 49186 - DNA, 27 bp, Artificial sequence
  SiRNA target sequence
aaactaataatgtgattaaaataataa

SEQ ID NO: 49187 - DNA, 27 bp, Artificial sequence
  SiRNA target sequence
aactaataatgtgattaaaataataaa

SEQ ID NO: 49188 - DNA, 27 bp, Artificial sequence
  SiRNA target sequence
actaataatgtgattaaaataataaac

SEQ ID NO: 49189 - DNA, 27 bp, Artificial sequence
  SiRNA target sequence
ctaataatgtgattaaaataataaaca

SEQ ID NO: 49190 - DNA, 27 bp, Artificial sequence
  SiRNA target sequence
taataatgtgattaaaataataaacat

SEQ ID NO: 49191 - DNA, 27 bp, Artificial sequence
  SiRNA target sequence
aataatgtgattaaaataataaacata

SEQ ID NO: 49192 - DNA, 27 bp, Artificial sequence
  SiRNA target sequence
ataatgtgattaaaataataaacatat

SEQ ID NO: 49193 - DNA, 27 bp, Artificial sequence
  SiRNA target sequence
taatgtgattaaaataataaacatatt

SEQ ID NO: 49194 - DNA, 27 bp, Artificial sequence
  SiRNA target sequence
aatgtgattaaaataataaacatattt

SEQ ID NO: 49195 - DNA, 27 bp, Artificial sequence
  SiRNA target sequence
atgtgattaaaataataaacatatttg

SEQ ID NO: 49196 - DNA, 27 bp, Artificial sequence
  SiRNA target sequence
tgtgattaaaataataaacatatttgt

SEQ ID NO: 49197 - DNA, 27 bp, Artificial sequence
  SiRNA target sequence
gtgattaaaataataaacatatttgtc

SEQ ID NO: 49198 - DNA, 27 bp, Artificial sequence
  SiRNA target sequence
tgattaaaataataaacatatttgtca

SEQ ID NO: 49199 - DNA, 27 bp, Artificial sequence
  SiRNA target sequence
gattaaaataataaacatatttgtcaa

SEQ ID NO: 49200 - DNA, 27 bp, Artificial sequence
  SiRNA target sequence
attaaaataataaacatatttgtcaac

SEQ ID NO: 49201 - DNA, 27 bp, Artificial sequence
  SiRNA target sequence
ttaaaataataaacatatttgtcaacc

SEQ ID NO: 49202 - DNA, 27 bp, Artificial sequence
  SiRNA target sequence
taaaataataaacatatttgtcaaccc

SEQ ID NO: 49203 - DNA, 27 bp, Artificial sequence
  SiRNA target sequence
aaaataataaacatatttgtcaaccct

SEQ ID NO: 49204 - DNA, 27 bp, Artificial sequence
  SiRNA target sequence
aaataataaacatatttgtcaacccta

SEQ ID NO: 49205 - DNA, 27 bp, Artificial sequence
  SiRNA target sequence
aataataaacatatttgtcaaccctaa

SEQ ID NO: 49206 - DNA, 27 bp, Artificial sequence
  SiRNA target sequence
ataataaacatatttgtcaaccctaaa

SEQ ID NO: 49207 - DNA, 27 bp, Artificial sequence
  SiRNA target sequence
taataaacatatttgtcaaccctaaat

SEQ ID NO: 49208 - DNA, 27 bp, Artificial sequence
  SiRNA target sequence
aataaacatatttgtcaaccctaaatt

SEQ ID NO: 49209 - DNA, 27 bp, Artificial sequence
  SiRNA target sequence
ataaacatatttgtcaaccctaaattt

SEQ ID NO: 49210 - DNA, 27 bp, Artificial sequence
  SiRNA target sequence
taaacatatttgtcaaccctaaatttg

SEQ ID NO: 49211 - DNA, 27 bp, Artificial sequence
  SiRNA target sequence
aaacatatttgtcaaccctaaatttgt

SEQ ID NO: 49212 - DNA, 27 bp, Artificial sequence
  SiRNA target sequence
aacatatttgtcaaccctaaatttgta

SEQ ID NO: 49213 - DNA, 27 bp, Artificial sequence
  SiRNA target sequence
acatatttgtcaaccctaaatttgtat

SEQ ID NO: 49214 - DNA, 27 bp, Artificial sequence
  SiRNA target sequence
catatttgtcaaccctaaatttgtata

SEQ ID NO: 49215 - DNA, 27 bp, Artificial sequence
  SiRNA target sequence
atatttgtcaaccctaaatttgtataa

SEQ ID NO: 49216 - DNA, 27 bp, Artificial sequence
  SiRNA target sequence
tatttgtcaaccctaaatttgtataaa

SEQ ID NO: 49217 - DNA, 27 bp, Artificial sequence
  SiRNA target sequence
atttgtcaaccctaaatttgtataaat

SEQ ID NO: 49218 - DNA, 27 bp, Artificial sequence
  SiRNA target sequence
tttgtcaaccctaaatttgtataaatt

SEQ ID NO: 49219 - DNA, 27 bp, Artificial sequence
  SiRNA target sequence
ttgtcaaccctaaatttgtataaattg

SEQ ID NO: 49220 - DNA, 27 bp, Artificial sequence
  SiRNA target sequence
tgtcaaccctaaatttgtataaattga

SEQ ID NO: 49221 - DNA, 27 bp, Artificial sequence
  SiRNA target sequence
gtcaaccctaaatttgtataaattgac

SEQ ID NO: 49222 - DNA, 27 bp, Artificial sequence
  SiRNA target sequence
tcaaccctaaatttgtataaattgacg

SEQ ID NO: 49223 - DNA, 27 bp, Artificial sequence
  SiRNA target sequence
caaccctaaatttgtataaattgacga

SEQ ID NO: 49224 - DNA, 27 bp, Artificial sequence
  SiRNA target sequence
aaccctaaatttgtataaattgacgaa

SEQ ID NO: 49225 - DNA, 27 bp, Artificial sequence
  SiRNA target sequence
accctaaatttgtataaattgacgaac

SEQ ID NO: 49226 - DNA, 27 bp, Artificial sequence
  SiRNA target sequence
ccctaaatttgtataaattgacgaaca

SEQ ID NO: 49227 - DNA, 27 bp, Artificial sequence
  SiRNA target sequence
cctaaatttgtataaattgacgaacac

SEQ ID NO: 49228 - DNA, 27 bp, Artificial sequence
  SiRNA target sequence
ctaaatttgtataaattgacgaacacg

SEQ ID NO: 49229 - DNA, 27 bp, Artificial sequence
  SiRNA target sequence
taaatttgtataaattgacgaacacgc

SEQ ID NO: 49230 - DNA, 27 bp, Artificial sequence
  SiRNA target sequence
aaatttgtataaattgacgaacacgcc

SEQ ID NO: 49231 - DNA, 27 bp, Artificial sequence
  SiRNA target sequence
aatttgtataaattgacgaacacgcca

SEQ ID NO: 49232 - DNA, 27 bp, Artificial sequence
  SiRNA target sequence
atttgtataaattgacgaacacgccaa

SEQ ID NO: 49233 - DNA, 27 bp, Artificial sequence
  SiRNA target sequence
tttgtataaattgacgaacacgccaat

SEQ ID NO: 49234 - DNA, 27 bp, Artificial sequence
  SiRNA target sequence
ttgtataaattgacgaacacgccaata

SEQ ID NO: 49235 - DNA, 27 bp, Artificial sequence
  SiRNA target sequence
tgtataaattgacgaacacgccaatat

SEQ ID NO: 49236 - DNA, 27 bp, Artificial sequence
  SiRNA target sequence
gtataaattgacgaacacgccaatata

SEQ ID NO: 49237 - DNA, 27 bp, Artificial sequence
  SiRNA target sequence
tataaattgacgaacacgccaatataa

SEQ ID NO: 49238 - DNA, 27 bp, Artificial sequence
  SiRNA target sequence
ataaattgacgaacacgccaatataac

SEQ ID NO: 49239 - DNA, 27 bp, Artificial sequence
  SiRNA target sequence
taaattgacgaacacgccaatataact

SEQ ID NO: 49240 - DNA, 27 bp, Artificial sequence
  SiRNA target sequence
aaattgacgaacacgccaatataactg

SEQ ID NO: 49241 - DNA, 27 bp, Artificial sequence
  SiRNA target sequence
aattgacgaacacgccaatataactgt

SEQ ID NO: 49242 - DNA, 27 bp, Artificial sequence
  SiRNA target sequence
attgacgaacacgccaatataactgta

SEQ ID NO: 49243 - DNA, 27 bp, Artificial sequence
  SiRNA target sequence
ttgacgaacacgccaatataactgtaa

SEQ ID NO: 49244 - DNA, 27 bp, Artificial sequence
  SiRNA target sequence
tgacgaacacgccaatataactgtaaa

SEQ ID NO: 49245 - DNA, 27 bp, Artificial sequence
  SiRNA target sequence
gacgaacacgccaatataactgtaaaa

SEQ ID NO: 49246 - DNA, 27 bp, Artificial sequence
  SiRNA target sequence
acgaacacgccaatataactgtaaaaa

SEQ ID NO: 49247 - DNA, 27 bp, Artificial sequence
  SiRNA target sequence
cgaacacgccaatataactgtaaaaaa

SEQ ID NO: 49248 - DNA, 27 bp, Artificial sequence
  SiRNA target sequence
gaacacgccaatataactgtaaaaaaa

SEQ ID NO: 49249 - DNA, 27 bp, Artificial sequence
  SiRNA target sequence
aacacgccaatataactgtaaaaaaaa

SEQ ID NO: 49250 - DNA, 27 bp, Artificial sequence
  SiRNA target sequence
acacgccaatataactgtaaaaaaaat

SEQ ID NO: 49251 - DNA, 27 bp, Artificial sequence
  SiRNA target sequence
cacgccaatataactgtaaaaaaaata

SEQ ID NO: 49252 - DNA, 27 bp, Artificial sequence
  SiRNA target sequence
acgccaatataactgtaaaaaaaatat

SEQ ID NO: 49253 - DNA, 27 bp, Artificial sequence
  SiRNA target sequence
cgccaatataactgtaaaaaaaatatt

SEQ ID NO: 49254 - DNA, 27 bp, Artificial sequence
  SiRNA target sequence
gccaatataactgtaaaaaaaatattt

SEQ ID NO: 49255 - DNA, 27 bp, Artificial sequence
  SiRNA target sequence
ccaatataactgtaaaaaaaatattta

SEQ ID NO: 49256 - DNA, 27 bp, Artificial sequence
  SiRNA target sequence
caatataactgtaaaaaaaatatttat

SEQ ID NO: 49257 - DNA, 27 bp, Artificial sequence
  SiRNA target sequence
aatataactgtaaaaaaaatatttatg

SEQ ID NO: 49258 - DNA, 27 bp, Artificial sequence
  SiRNA target sequence
atataactgtaaaaaaaatatttatga

SEQ ID NO: 49259 - DNA, 27 bp, Artificial sequence
  SiRNA target sequence
tataactgtaaaaaaaatatttatgat

SEQ ID NO: 49260 - DNA, 27 bp, Artificial sequence
  SiRNA target sequence
ataactgtaaaaaaaatatttatgata

SEQ ID NO: 49261 - DNA, 27 bp, Artificial sequence
  SiRNA target sequence
taactgtaaaaaaaatatttatgatat

SEQ ID NO: 49262 - DNA, 27 bp, Artificial sequence
  SiRNA target sequence
aactgtaaaaaaaatatttatgatatt

SEQ ID NO: 49263 - DNA, 27 bp, Artificial sequence
  SiRNA target sequence
actgtaaaaaaaatatttatgatatta

SEQ ID NO: 49264 - DNA, 27 bp, Artificial sequence
  SiRNA target sequence
ctgtaaaaaaaatatttatgatattaa

SEQ ID NO: 49265 - DNA, 27 bp, Artificial sequence
  SiRNA target sequence
tgtaaaaaaaatatttatgatattaac

SEQ ID NO: 49266 - DNA, 27 bp, Artificial sequence
  SiRNA target sequence
gtaaaaaaaatatttatgatattaaca

SEQ ID NO: 49267 - DNA, 27 bp, Artificial sequence
  SiRNA target sequence
taaaaaaaatatttatgatattaacaa

SEQ ID NO: 49268 - DNA, 27 bp, Artificial sequence
  SiRNA target sequence
aaaaaaaatatttatgatattaacaaa

SEQ ID NO: 49269 - DNA, 27 bp, Artificial sequence
  SiRNA target sequence
aaaaaaatatttatgatattaacaaat

SEQ ID NO: 49270 - DNA, 27 bp, Artificial sequence
  SiRNA target sequence
aaaaaatatttatgatattaacaaata

SEQ ID NO: 49271 - DNA, 27 bp, Artificial sequence
  SiRNA target sequence
aaaaatatttatgatattaacaaataa

SEQ ID NO: 49272 - DNA, 27 bp, Artificial sequence
  SiRNA target sequence
aaaatatttatgatattaacaaataaa

SEQ ID NO: 49273 - DNA, 27 bp, Artificial sequence
  SiRNA target sequence
aaatatttatgatattaacaaataaaa

SEQ ID NO: 49274 - DNA, 27 bp, Artificial sequence
  SiRNA target sequence
aatatttatgatattaacaaataaaac

SEQ ID NO: 49275 - DNA, 27 bp, Artificial sequence
  SiRNA target sequence
atatttatgatattaacaaataaaact

SEQ ID NO: 49276 - DNA, 27 bp, Artificial sequence
  SiRNA target sequence
tatttatgatattaacaaataaaactt

SEQ ID NO: 49277 - DNA, 27 bp, Artificial sequence
  SiRNA target sequence
atttatgatattaacaaataaaacttc

SEQ ID NO: 49278 - DNA, 27 bp, Artificial sequence
  SiRNA target sequence
tttatgatattaacaaataaaacttcg

SEQ ID NO: 49279 - DNA, 27 bp, Artificial sequence
  SiRNA target sequence
ttatgatattaacaaataaaacttcga

SEQ ID NO: 49280 - DNA, 27 bp, Artificial sequence
  SiRNA target sequence
tatgatattaacaaataaaacttcgat

SEQ ID NO: 49281 - DNA, 27 bp, Artificial sequence
  SiRNA target sequence
atgatattaacaaataaaacttcgatc

SEQ ID NO: 49282 - DNA, 27 bp, Artificial sequence
  SiRNA target sequence
tgatattaacaaataaaacttcgatca

SEQ ID NO: 49283 - DNA, 27 bp, Artificial sequence
  SiRNA target sequence
gatattaacaaataaaacttcgatcaa

SEQ ID NO: 49284 - DNA, 27 bp, Artificial sequence
  SiRNA target sequence
atattaacaaataaaacttcgatcaat

SEQ ID NO: 49285 - DNA, 27 bp, Artificial sequence
  SiRNA target sequence
tattaacaaataaaacttcgatcaatt

SEQ ID NO: 49286 - DNA, 27 bp, Artificial sequence
  SiRNA target sequence
attaacaaataaaacttcgatcaattc

SEQ ID NO: 49287 - DNA, 27 bp, Artificial sequence
  SiRNA target sequence
ttaacaaataaaacttcgatcaattca

SEQ ID NO: 49288 - DNA, 27 bp, Artificial sequence
  SiRNA target sequence
taacaaataaaacttcgatcaattcac

SEQ ID NO: 49289 - DNA, 27 bp, Artificial sequence
  SiRNA target sequence
aacaaataaaacttcgatcaattcact

SEQ ID NO: 49290 - DNA, 27 bp, Artificial sequence
  SiRNA target sequence
acaaataaaacttcgatcaattcactt

SEQ ID NO: 49291 - DNA, 27 bp, Artificial sequence
  SiRNA target sequence
caaataaaacttcgatcaattcactta

SEQ ID NO: 49292 - DNA, 27 bp, Artificial sequence
  SiRNA target sequence
aaataaaacttcgatcaattcacttat

SEQ ID NO: 49293 - DNA, 27 bp, Artificial sequence
  SiRNA target sequence
aataaaacttcgatcaattcacttatt

SEQ ID NO: 49294 - DNA, 27 bp, Artificial sequence
  SiRNA target sequence
ataaaacttcgatcaattcacttattg

SEQ ID NO: 49295 - DNA, 27 bp, Artificial sequence
  SiRNA target sequence
taaaacttcgatcaattcacttattgc

SEQ ID NO: 49296 - DNA, 27 bp, Artificial sequence
  SiRNA target sequence
aaaacttcgatcaattcacttattgct

SEQ ID NO: 49297 - DNA, 27 bp, Artificial sequence
  SiRNA target sequence
aaacttcgatcaattcacttattgctt

SEQ ID NO: 49298 - DNA, 27 bp, Artificial sequence
  SiRNA target sequence
aacttcgatcaattcacttattgcttt

SEQ ID NO: 49299 - DNA, 27 bp, Artificial sequence
  SiRNA target sequence
acttcgatcaattcacttattgcttta

SEQ ID NO: 49300 - DNA, 27 bp, Artificial sequence
  SiRNA target sequence
cttcgatcaattcacttattgctttac

SEQ ID NO: 49301 - DNA, 27 bp, Artificial sequence
  SiRNA target sequence
ttcgatcaattcacttattgctttact

SEQ ID NO: 49302 - DNA, 27 bp, Artificial sequence
  SiRNA target sequence
tcgatcaattcacttattgctttactt

SEQ ID NO: 49303 - DNA, 27 bp, Artificial sequence
  SiRNA target sequence
cgatcaattcacttattgctttacttt

SEQ ID NO: 49304 - DNA, 27 bp, Artificial sequence
  SiRNA target sequence
gatcaattcacttattgctttactttc

SEQ ID NO: 49305 - DNA, 27 bp, Artificial sequence
  SiRNA target sequence
atcaattcacttattgctttactttct

SEQ ID NO: 49306 - DNA, 27 bp, Artificial sequence
  SiRNA target sequence
tcaattcacttattgctttactttctc

SEQ ID NO: 49307 - DNA, 27 bp, Artificial sequence
  SiRNA target sequence
caattcacttattgctttactttctcg

SEQ ID NO: 49308 - DNA, 27 bp, Artificial sequence
  SiRNA target sequence
aattcacttattgctttactttctcgg

SEQ ID NO: 49309 - DNA, 27 bp, Artificial sequence
  SiRNA target sequence
attcacttattgctttactttctcggt

SEQ ID NO: 49310 - DNA, 27 bp, Artificial sequence
  SiRNA target sequence
ttcacttattgctttactttctcggtc

SEQ ID NO: 49311 - DNA, 27 bp, Artificial sequence
  SiRNA target sequence
tcacttattgctttactttctcggtct

SEQ ID NO: 49312 - DNA, 27 bp, Artificial sequence
  SiRNA target sequence
cacttattgctttactttctcggtcta

SEQ ID NO: 49313 - DNA, 27 bp, Artificial sequence
  SiRNA target sequence
acttattgctttactttctcggtctat

SEQ ID NO: 49314 - DNA, 27 bp, Artificial sequence
  SiRNA target sequence
cttattgctttactttctcggtctatt

SEQ ID NO: 49315 - DNA, 27 bp, Artificial sequence
  SiRNA target sequence
ttattgctttactttctcggtctatta

SEQ ID NO: 49316 - DNA, 27 bp, Artificial sequence
  SiRNA target sequence
tattgctttactttctcggtctattat

SEQ ID NO: 49317 - DNA, 27 bp, Artificial sequence
  SiRNA target sequence
attgctttactttctcggtctattatt

SEQ ID NO: 49318 - DNA, 27 bp, Artificial sequence
  SiRNA target sequence
ttgctttactttctcggtctattattg

SEQ ID NO: 49319 - DNA, 27 bp, Artificial sequence
  SiRNA target sequence
tgctttactttctcggtctattattgt

SEQ ID NO: 49320 - DNA, 27 bp, Artificial sequence
  SiRNA target sequence
gctttactttctcggtctattattgtt

SEQ ID NO: 49321 - DNA, 27 bp, Artificial sequence
  SiRNA target sequence
ctttactttctcggtctattattgttt

SEQ ID NO: 49322 - DNA, 27 bp, Artificial sequence
  SiRNA target sequence
tttactttctcggtctattattgtttg

SEQ ID NO: 49323 - DNA, 27 bp, Artificial sequence
  SiRNA target sequence
ttactttctcggtctattattgtttgt

SEQ ID NO: 49324 - DNA, 27 bp, Artificial sequence
  SiRNA target sequence
tactttctcggtctattattgtttgta

SEQ ID NO: 49325 - DNA, 27 bp, Artificial sequence
  SiRNA target sequence
actttctcggtctattattgtttgtat

SEQ ID NO: 49326 - DNA, 27 bp, Artificial sequence
  SiRNA target sequence
ctttctcggtctattattgtttgtatt

SEQ ID NO: 49327 - DNA, 27 bp, Artificial sequence
  SiRNA target sequence
tttctcggtctattattgtttgtattt

SEQ ID NO: 49328 - DNA, 27 bp, Artificial sequence
  SiRNA target sequence
ttctcggtctattattgtttgtatttc

SEQ ID NO: 49329 - DNA, 27 bp, Artificial sequence
  SiRNA target sequence
tctcggtctattattgtttgtatttca

SEQ ID NO: 49330 - DNA, 27 bp, Artificial sequence
  SiRNA target sequence
ctcggtctattattgtttgtatttcac

SEQ ID NO: 49331 - DNA, 27 bp, Artificial sequence
  SiRNA target sequence
tcggtctattattgtttgtatttcacc

SEQ ID NO: 49332 - DNA, 27 bp, Artificial sequence
  SiRNA target sequence
cggtctattattgtttgtatttcaccg

SEQ ID NO: 49333 - DNA, 27 bp, Artificial sequence
  SiRNA target sequence
ggtctattattgtttgtatttcaccgc

SEQ ID NO: 49334 - DNA, 27 bp, Artificial sequence
  SiRNA target sequence
gtctattattgtttgtatttcaccgca

SEQ ID NO: 49335 - DNA, 27 bp, Artificial sequence
  SiRNA target sequence
tctattattgtttgtatttcaccgcat

SEQ ID NO: 49336 - DNA, 27 bp, Artificial sequence
  SiRNA target sequence
ctattattgtttgtatttcaccgcatc

SEQ ID NO: 49337 - DNA, 27 bp, Artificial sequence
  SiRNA target sequence
tattattgtttgtatttcaccgcatcc

SEQ ID NO: 49338 - DNA, 27 bp, Artificial sequence
  SiRNA target sequence
attattgtttgtatttcaccgcatcct

SEQ ID NO: 49339 - DNA, 27 bp, Artificial sequence
  SiRNA target sequence
ttattgtttgtatttcaccgcatccta

SEQ ID NO: 49340 - DNA, 27 bp, Artificial sequence
  SiRNA target sequence
tattgtttgtatttcaccgcatcctat

SEQ ID NO: 49341 - DNA, 27 bp, Artificial sequence
  SiRNA target sequence
attgtttgtatttcaccgcatcctatt

SEQ ID NO: 49342 - DNA, 27 bp, Artificial sequence
  SiRNA target sequence
ttgtttgtatttcaccgcatcctattt

SEQ ID NO: 49343 - DNA, 27 bp, Artificial sequence
  SiRNA target sequence
tgtttgtatttcaccgcatcctatttt

SEQ ID NO: 49344 - DNA, 27 bp, Artificial sequence
  SiRNA target sequence
gtttgtatttcaccgcatcctatttta

SEQ ID NO: 49345 - DNA, 27 bp, Artificial sequence
  SiRNA target sequence
tttgtatttcaccgcatcctattttat

SEQ ID NO: 49346 - DNA, 27 bp, Artificial sequence
  SiRNA target sequence
ttgtatttcaccgcatcctattttatt

SEQ ID NO: 49347 - DNA, 27 bp, Artificial sequence
  SiRNA target sequence
tgtatttcaccgcatcctattttattg

SEQ ID NO: 49348 - DNA, 27 bp, Artificial sequence
  SiRNA target sequence
gtatttcaccgcatcctattttattgt

SEQ ID NO: 49349 - DNA, 27 bp, Artificial sequence
  SiRNA target sequence
tatttcaccgcatcctattttattgta

SEQ ID NO: 49350 - DNA, 27 bp, Artificial sequence
  SiRNA target sequence
atttcaccgcatcctattttattgtat

SEQ ID NO: 49351 - DNA, 27 bp, Artificial sequence
  SiRNA target sequence
tttcaccgcatcctattttattgtatc

SEQ ID NO: 49352 - DNA, 27 bp, Artificial sequence
  SiRNA target sequence
ttcaccgcatcctattttattgtatct

SEQ ID NO: 49353 - DNA, 27 bp, Artificial sequence
  SiRNA target sequence
tcaccgcatcctattttattgtatcta

SEQ ID NO: 49354 - DNA, 27 bp, Artificial sequence
  SiRNA target sequence
caccgcatcctattttattgtatctac

SEQ ID NO: 49355 - DNA, 27 bp, Artificial sequence
  SiRNA target sequence
accgcatcctattttattgtatctact

SEQ ID NO: 49356 - DNA, 27 bp, Artificial sequence
  SiRNA target sequence
ccgcatcctattttattgtatctacta

SEQ ID NO: 49357 - DNA, 27 bp, Artificial sequence
  SiRNA target sequence
cgcatcctattttattgtatctactaa

SEQ ID NO: 49358 - DNA, 27 bp, Artificial sequence
  SiRNA target sequence
gcatcctattttattgtatctactaag

SEQ ID NO: 49359 - DNA, 27 bp, Artificial sequence
  SiRNA target sequence
catcctattttattgtatctactaagt

SEQ ID NO: 49360 - DNA, 27 bp, Artificial sequence
  SiRNA target sequence
atcctattttattgtatctactaagtt

SEQ ID NO: 49361 - DNA, 27 bp, Artificial sequence
  SiRNA target sequence
tcctattttattgtatctactaagttc

SEQ ID NO: 49362 - DNA, 27 bp, Artificial sequence
  SiRNA target sequence
cctattttattgtatctactaagttcc

SEQ ID NO: 49363 - DNA, 27 bp, Artificial sequence
  SiRNA target sequence
ctattttattgtatctactaagttcca

SEQ ID NO: 49364 - DNA, 27 bp, Artificial sequence
  SiRNA target sequence
tattttattgtatctactaagttccat

SEQ ID NO: 49365 - DNA, 27 bp, Artificial sequence
  SiRNA target sequence
attttattgtatctactaagttccata

SEQ ID NO: 49366 - DNA, 27 bp, Artificial sequence
  SiRNA target sequence
ttttattgtatctactaagttccatat

SEQ ID NO: 49367 - DNA, 27 bp, Artificial sequence
  SiRNA target sequence
tttattgtatctactaagttccatatt

SEQ ID NO: 49368 - DNA, 27 bp, Artificial sequence
  SiRNA target sequence
ttattgtatctactaagttccatattt

SEQ ID NO: 49369 - DNA, 27 bp, Artificial sequence
  SiRNA target sequence
tattgtatctactaagttccatattta

SEQ ID NO: 49370 - DNA, 27 bp, Artificial sequence
  SiRNA target sequence
attgtatctactaagttccatatttat

SEQ ID NO: 49371 - DNA, 27 bp, Artificial sequence
  SiRNA target sequence
ttgtatctactaagttccatatttata

SEQ ID NO: 49372 - DNA, 27 bp, Artificial sequence
  SiRNA target sequence
tgtatctactaagttccatatttataa

SEQ ID NO: 49373 - DNA, 27 bp, Artificial sequence
  SiRNA target sequence
gtatctactaagttccatatttataaa

SEQ ID NO: 49374 - DNA, 27 bp, Artificial sequence
  SiRNA target sequence
tatctactaagttccatatttataaaa

SEQ ID NO: 49375 - DNA, 27 bp, Artificial sequence
  SiRNA target sequence
atctactaagttccatatttataaaat

SEQ ID NO: 49376 - DNA, 27 bp, Artificial sequence
  SiRNA target sequence
tctactaagttccatatttataaaatt

SEQ ID NO: 49377 - DNA, 27 bp, Artificial sequence
  SiRNA target sequence
ctactaagttccatatttataaaattt

SEQ ID NO: 49378 - DNA, 27 bp, Artificial sequence
  SiRNA target sequence
tactaagttccatatttataaaatttt

SEQ ID NO: 49379 - DNA, 27 bp, Artificial sequence
  SiRNA target sequence
actaagttccatatttataaaattttt

SEQ ID NO: 49380 - DNA, 27 bp, Artificial sequence
  SiRNA target sequence
ctaagttccatatttataaaattttta

SEQ ID NO: 49381 - DNA, 27 bp, Artificial sequence
  SiRNA target sequence
taagttccatatttataaaatttttaa

SEQ ID NO: 49382 - DNA, 27 bp, Artificial sequence
  SiRNA target sequence
aagttccatatttataaaatttttaaa

SEQ ID NO: 49383 - DNA, 27 bp, Artificial sequence
  SiRNA target sequence
agttccatatttataaaatttttaaat

SEQ ID NO: 49384 - DNA, 27 bp, Artificial sequence
  SiRNA target sequence
gttccatatttataaaatttttaaatg

SEQ ID NO: 49385 - DNA, 27 bp, Artificial sequence
  SiRNA target sequence
ttccatatttataaaatttttaaatga

SEQ ID NO: 49386 - DNA, 27 bp, Artificial sequence
  SiRNA target sequence
tccatatttataaaatttttaaatgaa

SEQ ID NO: 49387 - DNA, 27 bp, Artificial sequence
  SiRNA target sequence
ccatatttataaaatttttaaatgaat

SEQ ID NO: 49388 - DNA, 27 bp, Artificial sequence
  SiRNA target sequence
catatttataaaatttttaaatgaatt

SEQ ID NO: 49389 - DNA, 27 bp, Artificial sequence
  SiRNA target sequence
atatttataaaatttttaaatgaattt

SEQ ID NO: 49390 - DNA, 27 bp, Artificial sequence
  SiRNA target sequence
tatttataaaatttttaaatgaatttt

SEQ ID NO: 49391 - DNA, 27 bp, Artificial sequence
  SiRNA target sequence
atttataaaatttttaaatgaattttt

SEQ ID NO: 49392 - DNA, 27 bp, Artificial sequence
  SiRNA target sequence
tttataaaatttttaaatgaatttttt

SEQ ID NO: 49393 - DNA, 27 bp, Artificial sequence
  SiRNA target sequence
ttataaaatttttaaatgaattttttc

SEQ ID NO: 49394 - DNA, 27 bp, Artificial sequence
  SiRNA target sequence
tataaaatttttaaatgaattttttcc

SEQ ID NO: 49395 - DNA, 27 bp, Artificial sequence
  SiRNA target sequence
ataaaatttttaaatgaattttttcct

SEQ ID NO: 49396 - DNA, 27 bp, Artificial sequence
  SiRNA target sequence
taaaatttttaaatgaattttttcctg

SEQ ID NO: 49397 - DNA, 27 bp, Artificial sequence
  SiRNA target sequence
aaaatttttaaatgaattttttcctgt

SEQ ID NO: 49398 - DNA, 27 bp, Artificial sequence
  SiRNA target sequence
aaatttttaaatgaattttttcctgtc

SEQ ID NO: 49399 - DNA, 27 bp, Artificial sequence
  SiRNA target sequence
aatttttaaatgaattttttcctgtca

SEQ ID NO: 49400 - DNA, 27 bp, Artificial sequence
  SiRNA target sequence
atttttaaatgaattttttcctgtcag

SEQ ID NO: 49401 - DNA, 27 bp, Artificial sequence
  SiRNA target sequence
tttttaaatgaattttttcctgtcagt

SEQ ID NO: 49402 - DNA, 27 bp, Artificial sequence
  SiRNA target sequence
ttttaaatgaattttttcctgtcagtc

SEQ ID NO: 49403 - DNA, 27 bp, Artificial sequence
  SiRNA target sequence
tttaaatgaattttttcctgtcagtct

SEQ ID NO: 49404 - DNA, 27 bp, Artificial sequence
  SiRNA target sequence
ttaaatgaattttttcctgtcagtctg

SEQ ID NO: 49405 - DNA, 27 bp, Artificial sequence
  SiRNA target sequence
taaatgaattttttcctgtcagtctga

SEQ ID NO: 49406 - DNA, 27 bp, Artificial sequence
  SiRNA target sequence
aaatgaattttttcctgtcagtctgaa

SEQ ID NO: 49407 - DNA, 27 bp, Artificial sequence
  SiRNA target sequence
aatgaattttttcctgtcagtctgaat

SEQ ID NO: 49408 - DNA, 27 bp, Artificial sequence
  SiRNA target sequence
atgaattttttcctgtcagtctgaata

SEQ ID NO: 49409 - DNA, 27 bp, Artificial sequence
  SiRNA target sequence
tgaattttttcctgtcagtctgaatac

SEQ ID NO: 49410 - DNA, 27 bp, Artificial sequence
  SiRNA target sequence
gaattttttcctgtcagtctgaataca

SEQ ID NO: 49411 - DNA, 27 bp, Artificial sequence
  SiRNA target sequence
aattttttcctgtcagtctgaatacat

SEQ ID NO: 49412 - DNA, 27 bp, Artificial sequence
  SiRNA target sequence
attttttcctgtcagtctgaatacatg

SEQ ID NO: 49413 - DNA, 27 bp, Artificial sequence
  SiRNA target sequence
ttttttcctgtcagtctgaatacatgt

SEQ ID NO: 49414 - DNA, 27 bp, Artificial sequence
  SiRNA target sequence
tttttcctgtcagtctgaatacatgtt

SEQ ID NO: 49415 - DNA, 27 bp, Artificial sequence
  SiRNA target sequence
ttttcctgtcagtctgaatacatgttg

SEQ ID NO: 49416 - DNA, 27 bp, Artificial sequence
  SiRNA target sequence
tttcctgtcagtctgaatacatgttga

SEQ ID NO: 49417 - DNA, 27 bp, Artificial sequence
  SiRNA target sequence
ttcctgtcagtctgaatacatgttgaa

SEQ ID NO: 49418 - DNA, 27 bp, Artificial sequence
  SiRNA target sequence
tcctgtcagtctgaatacatgttgaac

SEQ ID NO: 49419 - DNA, 27 bp, Artificial sequence
  SiRNA target sequence
cctgtcagtctgaatacatgttgaacg

SEQ ID NO: 49420 - DNA, 27 bp, Artificial sequence
  SiRNA target sequence
ctgtcagtctgaatacatgttgaacgg

SEQ ID NO: 49421 - DNA, 27 bp, Artificial sequence
  SiRNA target sequence
tgtcagtctgaatacatgttgaacggg

SEQ ID NO: 49422 - DNA, 27 bp, Artificial sequence
  SiRNA target sequence
gtcagtctgaatacatgttgaacgggt

SEQ ID NO: 49423 - DNA, 27 bp, Artificial sequence
  SiRNA target sequence
tcagtctgaatacatgttgaacgggtg

SEQ ID NO: 49424 - DNA, 27 bp, Artificial sequence
  SiRNA target sequence
cagtctgaatacatgttgaacgggtgt

SEQ ID NO: 49425 - DNA, 27 bp, Artificial sequence
  SiRNA target sequence
agtctgaatacatgttgaacgggtgta

SEQ ID NO: 49426 - DNA, 27 bp, Artificial sequence
  SiRNA target sequence
gtctgaatacatgttgaacgggtgtaa

SEQ ID NO: 49427 - DNA, 27 bp, Artificial sequence
  SiRNA target sequence
tctgaatacatgttgaacgggtgtaac

SEQ ID NO: 49428 - DNA, 27 bp, Artificial sequence
  SiRNA target sequence
ctgaatacatgttgaacgggtgtaaca

SEQ ID NO: 49429 - DNA, 27 bp, Artificial sequence
  SiRNA target sequence
tgaatacatgttgaacgggtgtaacaa

SEQ ID NO: 49430 - DNA, 27 bp, Artificial sequence
  SiRNA target sequence
gaatacatgttgaacgggtgtaacaaa

SEQ ID NO: 49431 - DNA, 27 bp, Artificial sequence
  SiRNA target sequence
aatacatgttgaacgggtgtaacaaat

SEQ ID NO: 49432 - DNA, 27 bp, Artificial sequence
  SiRNA target sequence
atacatgttgaacgggtgtaacaaata

SEQ ID NO: 49433 - DNA, 27 bp, Artificial sequence
  SiRNA target sequence
tacatgttgaacgggtgtaacaaatat

SEQ ID NO: 49434 - DNA, 27 bp, Artificial sequence
  SiRNA target sequence
acatgttgaacgggtgtaacaaatata

SEQ ID NO: 49435 - DNA, 27 bp, Artificial sequence
  SiRNA target sequence
catgttgaacgggtgtaacaaatataa

SEQ ID NO: 49436 - DNA, 27 bp, Artificial sequence
  SiRNA target sequence
atgttgaacgggtgtaacaaatataaa

SEQ ID NO: 49437 - DNA, 27 bp, Artificial sequence
  SiRNA target sequence
tgttgaacgggtgtaacaaatataaaa

SEQ ID NO: 49438 - DNA, 27 bp, Artificial sequence
  SiRNA target sequence
gttgaacgggtgtaacaaatataaaat

SEQ ID NO: 49439 - DNA, 27 bp, Artificial sequence
  SiRNA target sequence
ttgaacgggtgtaacaaatataaaatt

SEQ ID NO: 49440 - DNA, 27 bp, Artificial sequence
  SiRNA target sequence
tgaacgggtgtaacaaatataaaattg

SEQ ID NO: 49441 - DNA, 27 bp, Artificial sequence
  SiRNA target sequence
gaacgggtgtaacaaatataaaattgt

SEQ ID NO: 49442 - DNA, 27 bp, Artificial sequence
  SiRNA target sequence
aacgggtgtaacaaatataaaattgtt

SEQ ID NO: 49443 - DNA, 27 bp, Artificial sequence
  SiRNA target sequence
acgggtgtaacaaatataaaattgtta

SEQ ID NO: 49444 - DNA, 27 bp, Artificial sequence
  SiRNA target sequence
cgggtgtaacaaatataaaattgttaa

SEQ ID NO: 49445 - DNA, 27 bp, Artificial sequence
  SiRNA target sequence
gggtgtaacaaatataaaattgttaag

SEQ ID NO: 49446 - DNA, 27 bp, Artificial sequence
  SiRNA target sequence
ggtgtaacaaatataaaattgttaagt

SEQ ID NO: 49447 - DNA, 27 bp, Artificial sequence
  SiRNA target sequence
gtgtaacaaatataaaattgttaagtt

SEQ ID NO: 49448 - DNA, 27 bp, Artificial sequence
  SiRNA target sequence
tgtaacaaatataaaattgttaagttc

SEQ ID NO: 49449 - DNA, 27 bp, Artificial sequence
  SiRNA target sequence
gtaacaaatataaaattgttaagttct

SEQ ID NO: 49450 - DNA, 27 bp, Artificial sequence
  SiRNA target sequence
taacaaatataaaattgttaagttctg

SEQ ID NO: 49451 - DNA, 27 bp, Artificial sequence
  SiRNA target sequence
aacaaatataaaattgttaagttctga

SEQ ID NO: 49452 - DNA, 27 bp, Artificial sequence
  SiRNA target sequence
acaaatataaaattgttaagttctgac

SEQ ID NO: 49453 - DNA, 27 bp, Artificial sequence
  SiRNA target sequence
caaatataaaattgttaagttctgaca

SEQ ID NO: 49454 - DNA, 27 bp, Artificial sequence
  SiRNA target sequence
aaatataaaattgttaagttctgacat

SEQ ID NO: 49455 - DNA, 27 bp, Artificial sequence
  SiRNA target sequence
aatataaaattgttaagttctgacatt

SEQ ID NO: 49456 - DNA, 27 bp, Artificial sequence
  SiRNA target sequence
atataaaattgttaagttctgacattg

SEQ ID NO: 49457 - DNA, 27 bp, Artificial sequence
  SiRNA target sequence
tataaaattgttaagttctgacattgt

SEQ ID NO: 49458 - DNA, 27 bp, Artificial sequence
  SiRNA target sequence
ataaaattgttaagttctgacattgta

SEQ ID NO: 49459 - DNA, 27 bp, Artificial sequence
  SiRNA target sequence
taaaattgttaagttctgacattgtaa

SEQ ID NO: 49460 - DNA, 27 bp, Artificial sequence
  SiRNA target sequence
aaaattgttaagttctgacattgtaat

SEQ ID NO: 49461 - DNA, 27 bp, Artificial sequence
  SiRNA target sequence
aaattgttaagttctgacattgtaatt

SEQ ID NO: 49462 - DNA, 27 bp, Artificial sequence
  SiRNA target sequence
aattgttaagttctgacattgtaattg

SEQ ID NO: 49463 - DNA, 27 bp, Artificial sequence
  SiRNA target sequence
attgttaagttctgacattgtaattga

SEQ ID NO: 49464 - DNA, 27 bp, Artificial sequence
  SiRNA target sequence
ttgttaagttctgacattgtaattgat

SEQ ID NO: 49465 - DNA, 27 bp, Artificial sequence
  SiRNA target sequence
tgttaagttctgacattgtaattgata

SEQ ID NO: 49466 - DNA, 27 bp, Artificial sequence
  SiRNA target sequence
gttaagttctgacattgtaattgatac

SEQ ID NO: 49467 - DNA, 27 bp, Artificial sequence
  SiRNA target sequence
ttaagttctgacattgtaattgataca

SEQ ID NO: 49468 - DNA, 27 bp, Artificial sequence
  SiRNA target sequence
taagttctgacattgtaattgatacaa

SEQ ID NO: 49469 - DNA, 27 bp, Artificial sequence
  SiRNA target sequence
aagttctgacattgtaattgatacaat

SEQ ID NO: 49470 - DNA, 27 bp, Artificial sequence
  SiRNA target sequence
agttctgacattgtaattgatacaatt

SEQ ID NO: 49471 - DNA, 27 bp, Artificial sequence
  SiRNA target sequence
gttctgacattgtaattgatacaattg

SEQ ID NO: 49472 - DNA, 27 bp, Artificial sequence
  SiRNA target sequence
ttctgacattgtaattgatacaattgt

SEQ ID NO: 49473 - DNA, 27 bp, Artificial sequence
  SiRNA target sequence
tctgacattgtaattgatacaattgtc

SEQ ID NO: 49474 - DNA, 27 bp, Artificial sequence
  SiRNA target sequence
ctgacattgtaattgatacaattgtca

SEQ ID NO: 49475 - DNA, 27 bp, Artificial sequence
  SiRNA target sequence
tgacattgtaattgatacaattgtcaa

SEQ ID NO: 49476 - DNA, 27 bp, Artificial sequence
  SiRNA target sequence
gacattgtaattgatacaattgtcaaa

SEQ ID NO: 49477 - DNA, 27 bp, Artificial sequence
  SiRNA target sequence
acattgtaattgatacaattgtcaaaa

SEQ ID NO: 49478 - DNA, 27 bp, Artificial sequence
  SiRNA target sequence
cattgtaattgatacaattgtcaaaac

SEQ ID NO: 49479 - DNA, 27 bp, Artificial sequence
  SiRNA target sequence
attgtaattgatacaattgtcaaaact

SEQ ID NO: 49480 - DNA, 27 bp, Artificial sequence
  SiRNA target sequence
ttgtaattgatacaattgtcaaaactg

SEQ ID NO: 49481 - DNA, 27 bp, Artificial sequence
  SiRNA target sequence
tgtaattgatacaattgtcaaaactgc

SEQ ID NO: 49482 - DNA, 27 bp, Artificial sequence
  SiRNA target sequence
gtaattgatacaattgtcaaaactgca

SEQ ID NO: 49483 - DNA, 27 bp, Artificial sequence
  SiRNA target sequence
taattgatacaattgtcaaaactgcaa

SEQ ID NO: 49484 - DNA, 27 bp, Artificial sequence
  SiRNA target sequence
aattgatacaattgtcaaaactgcaaa

SEQ ID NO: 49485 - DNA, 27 bp, Artificial sequence
  SiRNA target sequence
attgatacaattgtcaaaactgcaaaa

SEQ ID NO: 49486 - DNA, 27 bp, Artificial sequence
  SiRNA target sequence
ttgatacaattgtcaaaactgcaaaat

SEQ ID NO: 49487 - DNA, 27 bp, Artificial sequence
  SiRNA target sequence
tgatacaattgtcaaaactgcaaaata

SEQ ID NO: 49488 - DNA, 27 bp, Artificial sequence
  SiRNA target sequence
gatacaattgtcaaaactgcaaaatac

SEQ ID NO: 49489 - DNA, 27 bp, Artificial sequence
  SiRNA target sequence
atacaattgtcaaaactgcaaaataca

SEQ ID NO: 49490 - DNA, 27 bp, Artificial sequence
  SiRNA target sequence
tacaattgtcaaaactgcaaaatacaa

SEQ ID NO: 49491 - DNA, 27 bp, Artificial sequence
  SiRNA target sequence
acaattgtcaaaactgcaaaatacaaa

SEQ ID NO: 49492 - DNA, 27 bp, Artificial sequence
  SiRNA target sequence
caattgtcaaaactgcaaaatacaaaa

SEQ ID NO: 49493 - DNA, 27 bp, Artificial sequence
  SiRNA target sequence
aattgtcaaaactgcaaaatacaaaag

SEQ ID NO: 49494 - DNA, 27 bp, Artificial sequence
  SiRNA target sequence
attgtcaaaactgcaaaatacaaaaga

SEQ ID NO: 49495 - DNA, 27 bp, Artificial sequence
  SiRNA target sequence
ttgtcaaaactgcaaaatacaaaagac

SEQ ID NO: 49496 - DNA, 27 bp, Artificial sequence
  SiRNA target sequence
tgtcaaaactgcaaaatacaaaagact

SEQ ID NO: 49497 - DNA, 27 bp, Artificial sequence
  SiRNA target sequence
gtcaaaactgcaaaatacaaaagactt

SEQ ID NO: 49498 - DNA, 27 bp, Artificial sequence
  SiRNA target sequence
tcaaaactgcaaaatacaaaagacttt

SEQ ID NO: 49499 - DNA, 27 bp, Artificial sequence
  SiRNA target sequence
caaaactgcaaaatacaaaagactttg

SEQ ID NO: 49500 - DNA, 27 bp, Artificial sequence
  SiRNA target sequence
aaaactgcaaaatacaaaagactttga

SEQ ID NO: 49501 - DNA, 27 bp, Artificial sequence
  SiRNA target sequence
aaactgcaaaatacaaaagactttgac

SEQ ID NO: 49502 - DNA, 27 bp, Artificial sequence
  SiRNA target sequence
aactgcaaaatacaaaagactttgact

SEQ ID NO: 49503 - DNA, 27 bp, Artificial sequence
  SiRNA target sequence
actgcaaaatacaaaagactttgacta

SEQ ID NO: 49504 - DNA, 27 bp, Artificial sequence
  SiRNA target sequence
ctgcaaaatacaaaagactttgactaa

SEQ ID NO: 49505 - DNA, 27 bp, Artificial sequence
  SiRNA target sequence
tgcaaaatacaaaagactttgactaag

SEQ ID NO: 49506 - DNA, 27 bp, Artificial sequence
  SiRNA target sequence
gcaaaatacaaaagactttgactaaga

SEQ ID NO: 49507 - DNA, 27 bp, Artificial sequence
  SiRNA target sequence
caaaatacaaaagactttgactaagat

SEQ ID NO: 49508 - DNA, 27 bp, Artificial sequence
  SiRNA target sequence
aaaatacaaaagactttgactaagatc

SEQ ID NO: 49509 - DNA, 27 bp, Artificial sequence
  SiRNA target sequence
aaatacaaaagactttgactaagatct

SEQ ID NO: 49510 - DNA, 27 bp, Artificial sequence
  SiRNA target sequence
aatacaaaagactttgactaagatctt

SEQ ID NO: 49511 - DNA, 27 bp, Artificial sequence
  SiRNA target sequence
atacaaaagactttgactaagatcttt

SEQ ID NO: 49512 - DNA, 27 bp, Artificial sequence
  SiRNA target sequence
tacaaaagactttgactaagatcttta

SEQ ID NO: 49513 - DNA, 27 bp, Artificial sequence
  SiRNA target sequence
acaaaagactttgactaagatctttat

SEQ ID NO: 49514 - DNA, 27 bp, Artificial sequence
  SiRNA target sequence
caaaagactttgactaagatctttatt

SEQ ID NO: 49515 - DNA, 27 bp, Artificial sequence
  SiRNA target sequence
aaaagactttgactaagatctttatta

SEQ ID NO: 49516 - DNA, 27 bp, Artificial sequence
  SiRNA target sequence
aaagactttgactaagatctttattat

SEQ ID NO: 49517 - DNA, 27 bp, Artificial sequence
  SiRNA target sequence
aagactttgactaagatctttattatc

SEQ ID NO: 49518 - DNA, 27 bp, Artificial sequence
  SiRNA target sequence
agactttgactaagatctttattatct

SEQ ID NO: 49519 - DNA, 27 bp, Artificial sequence
  SiRNA target sequence
gactttgactaagatctttattatctg

SEQ ID NO: 49520 - DNA, 27 bp, Artificial sequence
  SiRNA target sequence
actttgactaagatctttattatctgt

SEQ ID NO: 49521 - DNA, 27 bp, Artificial sequence
  SiRNA target sequence
ctttgactaagatctttattatctgta

SEQ ID NO: 49522 - DNA, 27 bp, Artificial sequence
  SiRNA target sequence
tttgactaagatctttattatctgtaa

SEQ ID NO: 49523 - DNA, 27 bp, Artificial sequence
  SiRNA target sequence
ttgactaagatctttattatctgtaat

SEQ ID NO: 49524 - DNA, 27 bp, Artificial sequence
  SiRNA target sequence
tgactaagatctttattatctgtaata

SEQ ID NO: 49525 - DNA, 27 bp, Artificial sequence
  SiRNA target sequence
gactaagatctttattatctgtaatat

SEQ ID NO: 49526 - DNA, 27 bp, Artificial sequence
  SiRNA target sequence
actaagatctttattatctgtaatatc

SEQ ID NO: 49527 - DNA, 27 bp, Artificial sequence
  SiRNA target sequence
ctaagatctttattatctgtaatatca

SEQ ID NO: 49528 - DNA, 27 bp, Artificial sequence
  SiRNA target sequence
taagatctttattatctgtaatatcac

SEQ ID NO: 49529 - DNA, 27 bp, Artificial sequence
  SiRNA target sequence
aagatctttattatctgtaatatcact

SEQ ID NO: 49530 - DNA, 27 bp, Artificial sequence
  SiRNA target sequence
agatctttattatctgtaatatcacta

SEQ ID NO: 49531 - DNA, 27 bp, Artificial sequence
  SiRNA target sequence
gatctttattatctgtaatatcactag

SEQ ID NO: 49532 - DNA, 27 bp, Artificial sequence
  SiRNA target sequence
atctttattatctgtaatatcactagt

SEQ ID NO: 49533 - DNA, 27 bp, Artificial sequence
  SiRNA target sequence
tctttattatctgtaatatcactagtc

SEQ ID NO: 49534 - DNA, 27 bp, Artificial sequence
  SiRNA target sequence
ctttattatctgtaatatcactagtca

SEQ ID NO: 49535 - DNA, 27 bp, Artificial sequence
  SiRNA target sequence
tttattatctgtaatatcactagtcaa

SEQ ID NO: 49536 - DNA, 27 bp, Artificial sequence
  SiRNA target sequence
ttattatctgtaatatcactagtcaat

SEQ ID NO: 49537 - DNA, 27 bp, Artificial sequence
  SiRNA target sequence
tattatctgtaatatcactagtcaatt

SEQ ID NO: 49538 - DNA, 27 bp, Artificial sequence
  SiRNA target sequence
attatctgtaatatcactagtcaattt

SEQ ID NO: 49539 - DNA, 27 bp, Artificial sequence
  SiRNA target sequence
ttatctgtaatatcactagtcaatttc

SEQ ID NO: 49540 - DNA, 27 bp, Artificial sequence
  SiRNA target sequence
tatctgtaatatcactagtcaatttcc

SEQ ID NO: 49541 - DNA, 27 bp, Artificial sequence
  SiRNA target sequence
atctgtaatatcactagtcaatttccg

SEQ ID NO: 49542 - DNA, 27 bp, Artificial sequence
  SiRNA target sequence
tctgtaatatcactagtcaatttccgg

SEQ ID NO: 49543 - DNA, 27 bp, Artificial sequence
  SiRNA target sequence
ctgtaatatcactagtcaatttccggg

SEQ ID NO: 49544 - DNA, 27 bp, Artificial sequence
  SiRNA target sequence
tgtaatatcactagtcaatttccgggt

SEQ ID NO: 49545 - DNA, 27 bp, Artificial sequence
  SiRNA target sequence
gtaatatcactagtcaatttccgggta

SEQ ID NO: 49546 - DNA, 27 bp, Artificial sequence
  SiRNA target sequence
taatatcactagtcaatttccgggtag

SEQ ID NO: 49547 - DNA, 27 bp, Artificial sequence
  SiRNA target sequence
aatatcactagtcaatttccgggtagc

SEQ ID NO: 49548 - DNA, 27 bp, Artificial sequence
  SiRNA target sequence
atatcactagtcaatttccgggtagct

SEQ ID NO: 49549 - DNA, 27 bp, Artificial sequence
  SiRNA target sequence
tatcactagtcaatttccgggtagctt

SEQ ID NO: 49550 - DNA, 27 bp, Artificial sequence
  SiRNA target sequence
atcactagtcaatttccgggtagcttc

SEQ ID NO: 49551 - DNA, 27 bp, Artificial sequence
  SiRNA target sequence
tcactagtcaatttccgggtagcttca

SEQ ID NO: 49552 - DNA, 27 bp, Artificial sequence
  SiRNA target sequence
cactagtcaatttccgggtagcttcaa

SEQ ID NO: 49553 - DNA, 27 bp, Artificial sequence
  SiRNA target sequence
actagtcaatttccgggtagcttcaac

SEQ ID NO: 49554 - DNA, 27 bp, Artificial sequence
  SiRNA target sequence
ctagtcaatttccgggtagcttcaact

SEQ ID NO: 49555 - DNA, 27 bp, Artificial sequence
  SiRNA target sequence
tagtcaatttccgggtagcttcaactg

SEQ ID NO: 49556 - DNA, 27 bp, Artificial sequence
  SiRNA target sequence
agtcaatttccgggtagcttcaactgt

SEQ ID NO: 49557 - DNA, 27 bp, Artificial sequence
  SiRNA target sequence
gtcaatttccgggtagcttcaactgtt

SEQ ID NO: 49558 - DNA, 27 bp, Artificial sequence
  SiRNA target sequence
tcaatttccgggtagcttcaactgtta

SEQ ID NO: 49559 - DNA, 27 bp, Artificial sequence
  SiRNA target sequence
caatttccgggtagcttcaactgttaa

SEQ ID NO: 49560 - DNA, 27 bp, Artificial sequence
  SiRNA target sequence
aatttccgggtagcttcaactgttaaa

SEQ ID NO: 49561 - DNA, 27 bp, Artificial sequence
  SiRNA target sequence
atttccgggtagcttcaactgttaaaa

SEQ ID NO: 49562 - DNA, 27 bp, Artificial sequence
  SiRNA target sequence
tttccgggtagcttcaactgttaaaac

SEQ ID NO: 49563 - DNA, 27 bp, Artificial sequence
  SiRNA target sequence
ttccgggtagcttcaactgttaaaaca

SEQ ID NO: 49564 - DNA, 27 bp, Artificial sequence
  SiRNA target sequence
tccgggtagcttcaactgttaaaacat

SEQ ID NO: 49565 - DNA, 27 bp, Artificial sequence
  SiRNA target sequence
ccgggtagcttcaactgttaaaacatt

SEQ ID NO: 49566 - DNA, 27 bp, Artificial sequence
  SiRNA target sequence
cgggtagcttcaactgttaaaacatta

SEQ ID NO: 49567 - DNA, 27 bp, Artificial sequence
  SiRNA target sequence
gggtagcttcaactgttaaaacattaa

SEQ ID NO: 49568 - DNA, 27 bp, Artificial sequence
  SiRNA target sequence
ggtagcttcaactgttaaaacattaaa

SEQ ID NO: 49569 - DNA, 27 bp, Artificial sequence
  SiRNA target sequence
gtagcttcaactgttaaaacattaaat

SEQ ID NO: 49570 - DNA, 27 bp, Artificial sequence
  SiRNA target sequence
tagcttcaactgttaaaacattaaatg

SEQ ID NO: 49571 - DNA, 27 bp, Artificial sequence
  SiRNA target sequence
agcttcaactgttaaaacattaaatgt

SEQ ID NO: 49572 - DNA, 27 bp, Artificial sequence
  SiRNA target sequence
gcttcaactgttaaaacattaaatgta

SEQ ID NO: 49573 - DNA, 27 bp, Artificial sequence
  SiRNA target sequence
cttcaactgttaaaacattaaatgtac

SEQ ID NO: 49574 - DNA, 27 bp, Artificial sequence
  SiRNA target sequence
ttcaactgttaaaacattaaatgtaca

SEQ ID NO: 49575 - DNA, 27 bp, Artificial sequence
  SiRNA target sequence
tcaactgttaaaacattaaatgtacaa

SEQ ID NO: 49576 - DNA, 27 bp, Artificial sequence
  SiRNA target sequence
caactgttaaaacattaaatgtacaaa

SEQ ID NO: 49577 - DNA, 27 bp, Artificial sequence
  SiRNA target sequence
aactgttaaaacattaaatgtacaaac

SEQ ID NO: 49578 - DNA, 27 bp, Artificial sequence
  SiRNA target sequence
actgttaaaacattaaatgtacaaact

SEQ ID NO: 49579 - DNA, 27 bp, Artificial sequence
  SiRNA target sequence
ctgttaaaacattaaatgtacaaactg

SEQ ID NO: 49580 - DNA, 27 bp, Artificial sequence
  SiRNA target sequence
tgttaaaacattaaatgtacaaactgc

SEQ ID NO: 49581 - DNA, 27 bp, Artificial sequence
  SiRNA target sequence
gttaaaacattaaatgtacaaactgca

SEQ ID NO: 49582 - DNA, 27 bp, Artificial sequence
  SiRNA target sequence
ttaaaacattaaatgtacaaactgcaa

SEQ ID NO: 49583 - DNA, 27 bp, Artificial sequence
  SiRNA target sequence
taaaacattaaatgtacaaactgcaaa

SEQ ID NO: 49584 - DNA, 27 bp, Artificial sequence
  SiRNA target sequence
aaaacattaaatgtacaaactgcaaat

SEQ ID NO: 49585 - DNA, 27 bp, Artificial sequence
  SiRNA target sequence
aaacattaaatgtacaaactgcaaatg

SEQ ID NO: 49586 - DNA, 27 bp, Artificial sequence
  SiRNA target sequence
aacattaaatgtacaaactgcaaatgt

SEQ ID NO: 49587 - DNA, 27 bp, Artificial sequence
  SiRNA target sequence
acattaaatgtacaaactgcaaatgtc

SEQ ID NO: 49588 - DNA, 27 bp, Artificial sequence
  SiRNA target sequence
cattaaatgtacaaactgcaaatgtcc

SEQ ID NO: 49589 - DNA, 27 bp, Artificial sequence
  SiRNA target sequence
attaaatgtacaaactgcaaatgtccc

SEQ ID NO: 49590 - DNA, 27 bp, Artificial sequence
  SiRNA target sequence
ttaaatgtacaaactgcaaatgtccca

SEQ ID NO: 49591 - DNA, 27 bp, Artificial sequence
  SiRNA target sequence
taaatgtacaaactgcaaatgtcccaa

SEQ ID NO: 49592 - DNA, 27 bp, Artificial sequence
  SiRNA target sequence
aaatgtacaaactgcaaatgtcccaaa

SEQ ID NO: 49593 - DNA, 27 bp, Artificial sequence
  SiRNA target sequence
aatgtacaaactgcaaatgtcccaaaa

SEQ ID NO: 49594 - DNA, 27 bp, Artificial sequence
  SiRNA target sequence
atgtacaaactgcaaatgtcccaaaaa

SEQ ID NO: 49595 - DNA, 27 bp, Artificial sequence
  SiRNA target sequence
tgtacaaactgcaaatgtcccaaaaat

SEQ ID NO: 49596 - DNA, 27 bp, Artificial sequence
  SiRNA target sequence
gtacaaactgcaaatgtcccaaaaatt

SEQ ID NO: 49597 - DNA, 27 bp, Artificial sequence
  SiRNA target sequence
tacaaactgcaaatgtcccaaaaatta

SEQ ID NO: 49598 - DNA, 27 bp, Artificial sequence
  SiRNA target sequence
acaaactgcaaatgtcccaaaaattat

SEQ ID NO: 49599 - DNA, 27 bp, Artificial sequence
  SiRNA target sequence
caaactgcaaatgtcccaaaaattatg

SEQ ID NO: 49600 - DNA, 27 bp, Artificial sequence
  SiRNA target sequence
aaactgcaaatgtcccaaaaattatgt

SEQ ID NO: 49601 - DNA, 27 bp, Artificial sequence
  SiRNA target sequence
aactgcaaatgtcccaaaaattatgta

SEQ ID NO: 49602 - DNA, 27 bp, Artificial sequence
  SiRNA target sequence
actgcaaatgtcccaaaaattatgtaa

SEQ ID NO: 49603 - DNA, 27 bp, Artificial sequence
  SiRNA target sequence
ctgcaaatgtcccaaaaattatgtaaa

SEQ ID NO: 49604 - DNA, 27 bp, Artificial sequence
  SiRNA target sequence
tgcaaatgtcccaaaaattatgtaaat

SEQ ID NO: 49605 - DNA, 27 bp, Artificial sequence
  SiRNA target sequence
gcaaatgtcccaaaaattatgtaaatg

SEQ ID NO: 49606 - DNA, 27 bp, Artificial sequence
  SiRNA target sequence
caaatgtcccaaaaattatgtaaatga

SEQ ID NO: 49607 - DNA, 27 bp, Artificial sequence
  SiRNA target sequence
aaatgtcccaaaaattatgtaaatgac

SEQ ID NO: 49608 - DNA, 27 bp, Artificial sequence
  SiRNA target sequence
aatgtcccaaaaattatgtaaatgaca

SEQ ID NO: 49609 - DNA, 27 bp, Artificial sequence
  SiRNA target sequence
atgtcccaaaaattatgtaaatgacaa

SEQ ID NO: 49610 - DNA, 27 bp, Artificial sequence
  SiRNA target sequence
tgtcccaaaaattatgtaaatgacaaa

SEQ ID NO: 49611 - DNA, 27 bp, Artificial sequence
  SiRNA target sequence
gtcccaaaaattatgtaaatgacaaat

SEQ ID NO: 49612 - DNA, 27 bp, Artificial sequence
  SiRNA target sequence
tcccaaaaattatgtaaatgacaaatg

SEQ ID NO: 49613 - DNA, 27 bp, Artificial sequence
  SiRNA target sequence
cccaaaaattatgtaaatgacaaatgt

SEQ ID NO: 49614 - DNA, 27 bp, Artificial sequence
  SiRNA target sequence
ccaaaaattatgtaaatgacaaatgtt

SEQ ID NO: 49615 - DNA, 27 bp, Artificial sequence
  SiRNA target sequence
caaaaattatgtaaatgacaaatgttc

SEQ ID NO: 49616 - DNA, 27 bp, Artificial sequence
  SiRNA target sequence
aaaaattatgtaaatgacaaatgttcg

SEQ ID NO: 49617 - DNA, 27 bp, Artificial sequence
  SiRNA target sequence
aaaattatgtaaatgacaaatgttcga

SEQ ID NO: 49618 - DNA, 27 bp, Artificial sequence
  SiRNA target sequence
aaattatgtaaatgacaaatgttcgaa

SEQ ID NO: 49619 - DNA, 27 bp, Artificial sequence
  SiRNA target sequence
aattatgtaaatgacaaatgttcgaat

SEQ ID NO: 49620 - DNA, 27 bp, Artificial sequence
  SiRNA target sequence
attatgtaaatgacaaatgttcgaata

SEQ ID NO: 49621 - DNA, 27 bp, Artificial sequence
  SiRNA target sequence
ttatgtaaatgacaaatgttcgaataa

SEQ ID NO: 49622 - DNA, 27 bp, Artificial sequence
  SiRNA target sequence
tatgtaaatgacaaatgttcgaataaa

SEQ ID NO: 49623 - DNA, 27 bp, Artificial sequence
  SiRNA target sequence
atgtaaatgacaaatgttcgaataaag

SEQ ID NO: 49624 - DNA, 27 bp, Artificial sequence
  SiRNA target sequence
tgtaaatgacaaatgttcgaataaagg

SEQ ID NO: 49625 - DNA, 27 bp, Artificial sequence
  SiRNA target sequence
gtaaatgacaaatgttcgaataaaggg

SEQ ID NO: 49626 - DNA, 27 bp, Artificial sequence
  SiRNA target sequence
taaatgacaaatgttcgaataaagggc

SEQ ID NO: 49627 - DNA, 27 bp, Artificial sequence
  SiRNA target sequence
aaatgacaaatgttcgaataaagggct

SEQ ID NO: 49628 - DNA, 27 bp, Artificial sequence
  SiRNA target sequence
aatgacaaatgttcgaataaagggctt

SEQ ID NO: 49629 - DNA, 27 bp, Artificial sequence
  SiRNA target sequence
atgacaaatgttcgaataaagggcttt

SEQ ID NO: 49630 - DNA, 27 bp, Artificial sequence
  SiRNA target sequence
tgacaaatgttcgaataaagggctttg

SEQ ID NO: 49631 - DNA, 27 bp, Artificial sequence
  SiRNA target sequence
gacaaatgttcgaataaagggctttga

SEQ ID NO: 49632 - DNA, 27 bp, Artificial sequence
  SiRNA target sequence
acaaatgttcgaataaagggctttgaa

SEQ ID NO: 49633 - DNA, 27 bp, Artificial sequence
  SiRNA target sequence
caaatgttcgaataaagggctttgaaa

SEQ ID NO: 49634 - DNA, 27 bp, Artificial sequence
  SiRNA target sequence
aaatgttcgaataaagggctttgaaat

SEQ ID NO: 49635 - DNA, 27 bp, Artificial sequence
  SiRNA target sequence
aatgttcgaataaagggctttgaaata

SEQ ID NO: 49636 - DNA, 27 bp, Artificial sequence
  SiRNA target sequence
atgttcgaataaagggctttgaaataa

SEQ ID NO: 49637 - DNA, 27 bp, Artificial sequence
  SiRNA target sequence
tgttcgaataaagggctttgaaataac

SEQ ID NO: 49638 - DNA, 27 bp, Artificial sequence
  SiRNA target sequence
gttcgaataaagggctttgaaataaca

SEQ ID NO: 49639 - DNA, 27 bp, Artificial sequence
  SiRNA target sequence
ttcgaataaagggctttgaaataacat

SEQ ID NO: 49640 - DNA, 27 bp, Artificial sequence
  SiRNA target sequence
tcgaataaagggctttgaaataacata

SEQ ID NO: 49641 - DNA, 27 bp, Artificial sequence
  SiRNA target sequence
cgaataaagggctttgaaataacatat

SEQ ID NO: 49642 - DNA, 27 bp, Artificial sequence
  SiRNA target sequence
gaataaagggctttgaaataacatatt

SEQ ID NO: 49643 - DNA, 27 bp, Artificial sequence
  SiRNA target sequence
aataaagggctttgaaataacatattc

SEQ ID NO: 49644 - DNA, 27 bp, Artificial sequence
  SiRNA target sequence
ataaagggctttgaaataacatattct

SEQ ID NO: 49645 - DNA, 27 bp, Artificial sequence
  SiRNA target sequence
taaagggctttgaaataacatattcta

SEQ ID NO: 49646 - DNA, 27 bp, Artificial sequence
  SiRNA target sequence
aaagggctttgaaataacatattctac

SEQ ID NO: 49647 - DNA, 27 bp, Artificial sequence
  SiRNA target sequence
aagggctttgaaataacatattctaca

SEQ ID NO: 49648 - DNA, 27 bp, Artificial sequence
  SiRNA target sequence
agggctttgaaataacatattctacaa

SEQ ID NO: 49649 - DNA, 27 bp, Artificial sequence
  SiRNA target sequence
gggctttgaaataacatattctacaat

SEQ ID NO: 49650 - DNA, 27 bp, Artificial sequence
  SiRNA target sequence
ggctttgaaataacatattctacaatc

SEQ ID NO: 49651 - DNA, 27 bp, Artificial sequence
  SiRNA target sequence
gctttgaaataacatattctacaatca

SEQ ID NO: 49652 - DNA, 27 bp, Artificial sequence
  SiRNA target sequence
ctttgaaataacatattctacaatcag

SEQ ID NO: 49653 - DNA, 27 bp, Artificial sequence
  SiRNA target sequence
tttgaaataacatattctacaatcagg

SEQ ID NO: 49654 - DNA, 27 bp, Artificial sequence
  SiRNA target sequence
ttgaaataacatattctacaatcaggt

SEQ ID NO: 49655 - DNA, 27 bp, Artificial sequence
  SiRNA target sequence
tgaaataacatattctacaatcaggtc

SEQ ID NO: 49656 - DNA, 27 bp, Artificial sequence
  SiRNA target sequence
gaaataacatattctacaatcaggtct

SEQ ID NO: 49657 - DNA, 27 bp, Artificial sequence
  SiRNA target sequence
aaataacatattctacaatcaggtctt

SEQ ID NO: 49658 - DNA, 27 bp, Artificial sequence
  SiRNA target sequence
aataacatattctacaatcaggtcttt

SEQ ID NO: 49659 - DNA, 27 bp, Artificial sequence
  SiRNA target sequence
ataacatattctacaatcaggtctttc

SEQ ID NO: 49660 - DNA, 27 bp, Artificial sequence
  SiRNA target sequence
taacatattctacaatcaggtctttca

SEQ ID NO: 49661 - DNA, 27 bp, Artificial sequence
  SiRNA target sequence
aacatattctacaatcaggtctttcat

SEQ ID NO: 49662 - DNA, 27 bp, Artificial sequence
  SiRNA target sequence
acatattctacaatcaggtctttcata

SEQ ID NO: 49663 - DNA, 27 bp, Artificial sequence
  SiRNA target sequence
catattctacaatcaggtctttcataa

SEQ ID NO: 49664 - DNA, 27 bp, Artificial sequence
  SiRNA target sequence
atattctacaatcaggtctttcataat

SEQ ID NO: 49665 - DNA, 27 bp, Artificial sequence
  SiRNA target sequence
tattctacaatcaggtctttcataata

SEQ ID NO: 49666 - DNA, 27 bp, Artificial sequence
  SiRNA target sequence
attctacaatcaggtctttcataatac

SEQ ID NO: 49667 - DNA, 27 bp, Artificial sequence
  SiRNA target sequence
ttctacaatcaggtctttcataatact

SEQ ID NO: 49668 - DNA, 27 bp, Artificial sequence
  SiRNA target sequence
tctacaatcaggtctttcataatacta

SEQ ID NO: 49669 - DNA, 27 bp, Artificial sequence
  SiRNA target sequence
ctacaatcaggtctttcataatactaa

SEQ ID NO: 49670 - DNA, 27 bp, Artificial sequence
  SiRNA target sequence
tacaatcaggtctttcataatactaat

SEQ ID NO: 49671 - DNA, 27 bp, Artificial sequence
  SiRNA target sequence
acaatcaggtctttcataatactaata

SEQ ID NO: 49672 - DNA, 27 bp, Artificial sequence
  SiRNA target sequence
caatcaggtctttcataatactaatat

SEQ ID NO: 49673 - DNA, 27 bp, Artificial sequence
  SiRNA target sequence
aatcaggtctttcataatactaatatc

SEQ ID NO: 49674 - DNA, 27 bp, Artificial sequence
  SiRNA target sequence
atcaggtctttcataatactaatatca

SEQ ID NO: 49675 - DNA, 27 bp, Artificial sequence
  SiRNA target sequence
tcaggtctttcataatactaatatcac

SEQ ID NO: 49676 - DNA, 27 bp, Artificial sequence
  SiRNA target sequence
caggtctttcataatactaatatcact

SEQ ID NO: 49677 - DNA, 27 bp, Artificial sequence
  SiRNA target sequence
aggtctttcataatactaatatcacta

SEQ ID NO: 49678 - DNA, 27 bp, Artificial sequence
  SiRNA target sequence
ggtctttcataatactaatatcactac

SEQ ID NO: 49679 - DNA, 27 bp, Artificial sequence
  SiRNA target sequence
gtctttcataatactaatatcactacc

SEQ ID NO: 49680 - DNA, 27 bp, Artificial sequence
  SiRNA target sequence
tctttcataatactaatatcactacca

SEQ ID NO: 49681 - DNA, 27 bp, Artificial sequence
  SiRNA target sequence
ctttcataatactaatatcactaccat

SEQ ID NO: 49682 - DNA, 27 bp, Artificial sequence
  SiRNA target sequence
tttcataatactaatatcactaccata

SEQ ID NO: 49683 - DNA, 27 bp, Artificial sequence
  SiRNA target sequence
ttcataatactaatatcactaccataa

SEQ ID NO: 49684 - DNA, 27 bp, Artificial sequence
  SiRNA target sequence
tcataatactaatatcactaccataaa

SEQ ID NO: 49685 - DNA, 27 bp, Artificial sequence
  SiRNA target sequence
cataatactaatatcactaccataaat

SEQ ID NO: 49686 - DNA, 27 bp, Artificial sequence
  SiRNA target sequence
ataatactaatatcactaccataaata

SEQ ID NO: 49687 - DNA, 27 bp, Artificial sequence
  SiRNA target sequence
taatactaatatcactaccataaatag

SEQ ID NO: 49688 - DNA, 27 bp, Artificial sequence
  SiRNA target sequence
aatactaatatcactaccataaataga

SEQ ID NO: 49689 - DNA, 27 bp, Artificial sequence
  SiRNA target sequence
atactaatatcactaccataaatagat

SEQ ID NO: 49690 - DNA, 27 bp, Artificial sequence
  SiRNA target sequence
tactaatatcactaccataaatagatt

SEQ ID NO: 49691 - DNA, 27 bp, Artificial sequence
  SiRNA target sequence
actaatatcactaccataaatagattt

SEQ ID NO: 49692 - DNA, 27 bp, Artificial sequence
  SiRNA target sequence
ctaatatcactaccataaatagatttt

SEQ ID NO: 49693 - DNA, 27 bp, Artificial sequence
  SiRNA target sequence
taatatcactaccataaatagattttt

SEQ ID NO: 49694 - DNA, 27 bp, Artificial sequence
  SiRNA target sequence
aatatcactaccataaatagatttttt

SEQ ID NO: 49695 - DNA, 27 bp, Artificial sequence
  SiRNA target sequence
atatcactaccataaatagattttttt

SEQ ID NO: 49696 - DNA, 27 bp, Artificial sequence
  SiRNA target sequence
tatcactaccataaatagatttttttt

SEQ ID NO: 49697 - DNA, 27 bp, Artificial sequence
  SiRNA target sequence
atcactaccataaatagattttttttc

SEQ ID NO: 49698 - DNA, 27 bp, Artificial sequence
  SiRNA target sequence
tcactaccataaatagattttttttct

SEQ ID NO: 49699 - DNA, 27 bp, Artificial sequence
  SiRNA target sequence
cactaccataaatagattttttttcta

SEQ ID NO: 49700 - DNA, 27 bp, Artificial sequence
  SiRNA target sequence
actaccataaatagattttttttctaa

SEQ ID NO: 49701 - DNA, 27 bp, Artificial sequence
  SiRNA target sequence
ctaccataaatagattttttttctaac

SEQ ID NO: 49702 - DNA, 27 bp, Artificial sequence
  SiRNA target sequence
taccataaatagattttttttctaaca

SEQ ID NO: 49703 - DNA, 27 bp, Artificial sequence
  SiRNA target sequence
accataaatagattttttttctaacat

SEQ ID NO: 49704 - DNA, 19 bp, Artificial sequence
  SiRNA target sequence
atgaaggaaaaaaccaatt

SEQ ID NO: 49705 - DNA, 19 bp, Artificial sequence
  SiRNA target sequence
tgaaggaaaaaaccaatta

SEQ ID NO: 49706 - DNA, 19 bp, Artificial sequence
  SiRNA target sequence
gaaggaaaaaaccaattat

SEQ ID NO: 49707 - DNA, 19 bp, Artificial sequence
  SiRNA target sequence
aaggaaaaaaccaattatg

SEQ ID NO: 49708 - DNA, 19 bp, Artificial sequence
  SiRNA target sequence
aggaaaaaaccaattatga

SEQ ID NO: 49709 - DNA, 19 bp, Artificial sequence
  SiRNA target sequence
ggaaaaaaccaattatgaa

SEQ ID NO: 49710 - DNA, 19 bp, Artificial sequence
  SiRNA target sequence
gaaaaaaccaattatgaaa

SEQ ID NO: 49711 - DNA, 19 bp, Artificial sequence
  SiRNA target sequence
aaaaaaccaattatgaaat

SEQ ID NO: 49712 - DNA, 19 bp, Artificial sequence
  SiRNA target sequence
aaaaaccaattatgaaatt

SEQ ID NO: 49713 - DNA, 19 bp, Artificial sequence
  SiRNA target sequence
aaaaccaattatgaaattt

SEQ ID NO: 49714 - DNA, 19 bp, Artificial sequence
  SiRNA target sequence
aaaccaattatgaaatttt

SEQ ID NO: 49715 - DNA, 19 bp, Artificial sequence
  SiRNA target sequence
aaccaattatgaaatttta

SEQ ID NO: 49716 - DNA, 19 bp, Artificial sequence
  SiRNA target sequence
accaattatgaaattttat

SEQ ID NO: 49717 - DNA, 19 bp, Artificial sequence
  SiRNA target sequence
ccaattatgaaattttata

SEQ ID NO: 49718 - DNA, 19 bp, Artificial sequence
  SiRNA target sequence
caattatgaaattttatat

SEQ ID NO: 49719 - DNA, 19 bp, Artificial sequence
  SiRNA target sequence
aattatgaaattttatatg

SEQ ID NO: 49720 - DNA, 19 bp, Artificial sequence
  SiRNA target sequence
attatgaaattttatatga

SEQ ID NO: 49721 - DNA, 19 bp, Artificial sequence
  SiRNA target sequence
ttatgaaattttatatgat

SEQ ID NO: 49722 - DNA, 19 bp, Artificial sequence
  SiRNA target sequence
tatgaaattttatatgata

SEQ ID NO: 49723 - DNA, 19 bp, Artificial sequence
  SiRNA target sequence
atgaaattttatatgatac

SEQ ID NO: 49724 - DNA, 19 bp, Artificial sequence
  SiRNA target sequence
tgaaattttatatgataca

SEQ ID NO: 49725 - DNA, 19 bp, Artificial sequence
  SiRNA target sequence
gaaattttatatgatacat

SEQ ID NO: 49726 - DNA, 19 bp, Artificial sequence
  SiRNA target sequence
aaattttatatgatacatt

SEQ ID NO: 49727 - DNA, 19 bp, Artificial sequence
  SiRNA target sequence
aattttatatgatacattt

SEQ ID NO: 49728 - DNA, 19 bp, Artificial sequence
  SiRNA target sequence
attttatatgatacatttg

SEQ ID NO: 49729 - DNA, 19 bp, Artificial sequence
  SiRNA target sequence
ttttatatgatacatttgt

SEQ ID NO: 49730 - DNA, 19 bp, Artificial sequence
  SiRNA target sequence
tttatatgatacatttgta

SEQ ID NO: 49731 - DNA, 19 bp, Artificial sequence
  SiRNA target sequence
ttatatgatacatttgtaa

SEQ ID NO: 49732 - DNA, 19 bp, Artificial sequence
  SiRNA target sequence
tatatgatacatttgtaaa

SEQ ID NO: 49733 - DNA, 19 bp, Artificial sequence
  SiRNA target sequence
atatgatacatttgtaaaa

SEQ ID NO: 49734 - DNA, 19 bp, Artificial sequence
  SiRNA target sequence
tatgatacatttgtaaaat

SEQ ID NO: 49735 - DNA, 19 bp, Artificial sequence
  SiRNA target sequence
atgatacatttgtaaaata

SEQ ID NO: 49736 - DNA, 19 bp, Artificial sequence
  SiRNA target sequence
tgatacatttgtaaaatat

SEQ ID NO: 49737 - DNA, 19 bp, Artificial sequence
  SiRNA target sequence
gatacatttgtaaaatatt

SEQ ID NO: 49738 - DNA, 19 bp, Artificial sequence
  SiRNA target sequence
atacatttgtaaaatattg

SEQ ID NO: 49739 - DNA, 19 bp, Artificial sequence
  SiRNA target sequence
tacatttgtaaaatattgt

SEQ ID NO: 49740 - DNA, 19 bp, Artificial sequence
  SiRNA target sequence
acatttgtaaaatattgtt

SEQ ID NO: 49741 - DNA, 19 bp, Artificial sequence
  SiRNA target sequence
catttgtaaaatattgtta

SEQ ID NO: 49742 - DNA, 19 bp, Artificial sequence
  SiRNA target sequence
atttgtaaaatattgttac

SEQ ID NO: 49743 - DNA, 19 bp, Artificial sequence
  SiRNA target sequence
tttgtaaaatattgttaca

SEQ ID NO: 49744 - DNA, 19 bp, Artificial sequence
  SiRNA target sequence
ttgtaaaatattgttacaa

SEQ ID NO: 49745 - DNA, 19 bp, Artificial sequence
  SiRNA target sequence
tgtaaaatattgttacaat

SEQ ID NO: 49746 - DNA, 19 bp, Artificial sequence
  SiRNA target sequence
gtaaaatattgttacaata

SEQ ID NO: 49747 - DNA, 19 bp, Artificial sequence
  SiRNA target sequence
taaaatattgttacaatat

SEQ ID NO: 49748 - DNA, 19 bp, Artificial sequence
  SiRNA target sequence
aaaatattgttacaatatt

SEQ ID NO: 49749 - DNA, 19 bp, Artificial sequence
  SiRNA target sequence
aaatattgttacaatattt

SEQ ID NO: 49750 - DNA, 19 bp, Artificial sequence
  SiRNA target sequence
aatattgttacaatatttc

SEQ ID NO: 49751 - DNA, 19 bp, Artificial sequence
  SiRNA target sequence
atattgttacaatatttcc

SEQ ID NO: 49752 - DNA, 19 bp, Artificial sequence
  SiRNA target sequence
tattgttacaatatttcct

SEQ ID NO: 49753 - DNA, 19 bp, Artificial sequence
  SiRNA target sequence
attgttacaatatttccta

SEQ ID NO: 49754 - DNA, 19 bp, Artificial sequence
  SiRNA target sequence
ttgttacaatatttcctat

SEQ ID NO: 49755 - DNA, 19 bp, Artificial sequence
  SiRNA target sequence
tgttacaatatttcctata

SEQ ID NO: 49756 - DNA, 19 bp, Artificial sequence
  SiRNA target sequence
gttacaatatttcctatat

SEQ ID NO: 49757 - DNA, 19 bp, Artificial sequence
  SiRNA target sequence
ttacaatatttcctatata

SEQ ID NO: 49758 - DNA, 19 bp, Artificial sequence
  SiRNA target sequence
tacaatatttcctatataa

SEQ ID NO: 49759 - DNA, 19 bp, Artificial sequence
  SiRNA target sequence
acaatatttcctatataag

SEQ ID NO: 49760 - DNA, 19 bp, Artificial sequence
  SiRNA target sequence
caatatttcctatataagg

SEQ ID NO: 49761 - DNA, 19 bp, Artificial sequence
  SiRNA target sequence
aatatttcctatataaggt

SEQ ID NO: 49762 - DNA, 19 bp, Artificial sequence
  SiRNA target sequence
atatttcctatataaggta

SEQ ID NO: 49763 - DNA, 19 bp, Artificial sequence
  SiRNA target sequence
tatttcctatataaggtac

SEQ ID NO: 49764 - DNA, 19 bp, Artificial sequence
  SiRNA target sequence
atttcctatataaggtacg

SEQ ID NO: 49765 - DNA, 19 bp, Artificial sequence
  SiRNA target sequence
tttcctatataaggtacgt

SEQ ID NO: 49766 - DNA, 19 bp, Artificial sequence
  SiRNA target sequence
ttcctatataaggtacgta

SEQ ID NO: 49767 - DNA, 19 bp, Artificial sequence
  SiRNA target sequence
tcctatataaggtacgtaa

SEQ ID NO: 49768 - DNA, 19 bp, Artificial sequence
  SiRNA target sequence
cctatataaggtacgtaat

SEQ ID NO: 49769 - DNA, 19 bp, Artificial sequence
  SiRNA target sequence
ctatataaggtacgtaatg

SEQ ID NO: 49770 - DNA, 19 bp, Artificial sequence
  SiRNA target sequence
tatataaggtacgtaatgt

SEQ ID NO: 49771 - DNA, 19 bp, Artificial sequence
  SiRNA target sequence
atataaggtacgtaatgtt

SEQ ID NO: 49772 - DNA, 19 bp, Artificial sequence
  SiRNA target sequence
tataaggtacgtaatgttt

SEQ ID NO: 49773 - DNA, 19 bp, Artificial sequence
  SiRNA target sequence
ataaggtacgtaatgtttc

SEQ ID NO: 49774 - DNA, 19 bp, Artificial sequence
  SiRNA target sequence
taaggtacgtaatgtttcc

SEQ ID NO: 49775 - DNA, 19 bp, Artificial sequence
  SiRNA target sequence
aaggtacgtaatgtttccc

SEQ ID NO: 49776 - DNA, 19 bp, Artificial sequence
  SiRNA target sequence
aggtacgtaatgtttccca

SEQ ID NO: 49777 - DNA, 19 bp, Artificial sequence
  SiRNA target sequence
ggtacgtaatgtttcccat

SEQ ID NO: 49778 - DNA, 19 bp, Artificial sequence
  SiRNA target sequence
gtacgtaatgtttcccata

SEQ ID NO: 49779 - DNA, 19 bp, Artificial sequence
  SiRNA target sequence
tacgtaatgtttcccatat

SEQ ID NO: 49780 - DNA, 19 bp, Artificial sequence
  SiRNA target sequence
acgtaatgtttcccatatt

SEQ ID NO: 49781 - DNA, 19 bp, Artificial sequence
  SiRNA target sequence
cgtaatgtttcccatatta

SEQ ID NO: 49782 - DNA, 19 bp, Artificial sequence
  SiRNA target sequence
gtaatgtttcccatattac

SEQ ID NO: 49783 - DNA, 19 bp, Artificial sequence
  SiRNA target sequence
taatgtttcccatattact

SEQ ID NO: 49784 - DNA, 19 bp, Artificial sequence
  SiRNA target sequence
aatgtttcccatattactg

SEQ ID NO: 49785 - DNA, 19 bp, Artificial sequence
  SiRNA target sequence
atgtttcccatattactgt

SEQ ID NO: 49786 - DNA, 19 bp, Artificial sequence
  SiRNA target sequence
tgtttcccatattactgtc

SEQ ID NO: 49787 - DNA, 19 bp, Artificial sequence
  SiRNA target sequence
gtttcccatattactgtct

SEQ ID NO: 49788 - DNA, 19 bp, Artificial sequence
  SiRNA target sequence
tttcccatattactgtcta

SEQ ID NO: 49789 - DNA, 19 bp, Artificial sequence
  SiRNA target sequence
ttcccatattactgtctac

SEQ ID NO: 49790 - DNA, 19 bp, Artificial sequence
  SiRNA target sequence
tcccatattactgtctaca

SEQ ID NO: 49791 - DNA, 19 bp, Artificial sequence
  SiRNA target sequence
cccatattactgtctacaa

SEQ ID NO: 49792 - DNA, 19 bp, Artificial sequence
  SiRNA target sequence
ccatattactgtctacaat

SEQ ID NO: 49793 - DNA, 19 bp, Artificial sequence
  SiRNA target sequence
catattactgtctacaatt

SEQ ID NO: 49794 - DNA, 19 bp, Artificial sequence
  SiRNA target sequence
atattactgtctacaatta

SEQ ID NO: 49795 - DNA, 19 bp, Artificial sequence
  SiRNA target sequence
tattactgtctacaattat

SEQ ID NO: 49796 - DNA, 19 bp, Artificial sequence
  SiRNA target sequence
attactgtctacaattata

SEQ ID NO: 49797 - DNA, 19 bp, Artificial sequence
  SiRNA target sequence
ttactgtctacaattatag

SEQ ID NO: 49798 - DNA, 19 bp, Artificial sequence
  SiRNA target sequence
tactgtctacaattatagc

SEQ ID NO: 49799 - DNA, 19 bp, Artificial sequence
  SiRNA target sequence
actgtctacaattatagct

SEQ ID NO: 49800 - DNA, 19 bp, Artificial sequence
  SiRNA target sequence
ctgtctacaattatagctt

SEQ ID NO: 49801 - DNA, 19 bp, Artificial sequence
  SiRNA target sequence
tgtctacaattatagcttg

SEQ ID NO: 49802 - DNA, 19 bp, Artificial sequence
  SiRNA target sequence
gtctacaattatagcttgt

SEQ ID NO: 49803 - DNA, 19 bp, Artificial sequence
  SiRNA target sequence
tctacaattatagcttgtt

SEQ ID NO: 49804 - DNA, 19 bp, Artificial sequence
  SiRNA target sequence
ctacaattatagcttgtta

SEQ ID NO: 49805 - DNA, 19 bp, Artificial sequence
  SiRNA target sequence
tacaattatagcttgttat

SEQ ID NO: 49806 - DNA, 19 bp, Artificial sequence
  SiRNA target sequence
acaattatagcttgttatc

SEQ ID NO: 49807 - DNA, 19 bp, Artificial sequence
  SiRNA target sequence
caattatagcttgttatct

SEQ ID NO: 49808 - DNA, 19 bp, Artificial sequence
  SiRNA target sequence
aattatagcttgttatctc

SEQ ID NO: 49809 - DNA, 19 bp, Artificial sequence
  SiRNA target sequence
attatagcttgttatctcg

SEQ ID NO: 49810 - DNA, 19 bp, Artificial sequence
  SiRNA target sequence
ttatagcttgttatctcga

SEQ ID NO: 49811 - DNA, 19 bp, Artificial sequence
  SiRNA target sequence
tatagcttgttatctcgaa

SEQ ID NO: 49812 - DNA, 19 bp, Artificial sequence
  SiRNA target sequence
atagcttgttatctcgaag

SEQ ID NO: 49813 - DNA, 19 bp, Artificial sequence
  SiRNA target sequence
tagcttgttatctcgaagt

SEQ ID NO: 49814 - DNA, 19 bp, Artificial sequence
  SiRNA target sequence
agcttgttatctcgaagtt

SEQ ID NO: 49815 - DNA, 19 bp, Artificial sequence
  SiRNA target sequence
gcttgttatctcgaagttc

SEQ ID NO: 49816 - DNA, 19 bp, Artificial sequence
  SiRNA target sequence
cttgttatctcgaagttca

SEQ ID NO: 49817 - DNA, 19 bp, Artificial sequence
  SiRNA target sequence
ttgttatctcgaagttcag

SEQ ID NO: 49818 - DNA, 19 bp, Artificial sequence
  SiRNA target sequence
tgttatctcgaagttcagg

SEQ ID NO: 49819 - DNA, 19 bp, Artificial sequence
  SiRNA target sequence
gttatctcgaagttcaggc

SEQ ID NO: 49820 - DNA, 19 bp, Artificial sequence
  SiRNA target sequence
ttatctcgaagttcaggca

SEQ ID NO: 49821 - DNA, 19 bp, Artificial sequence
  SiRNA target sequence
tatctcgaagttcaggcaa

SEQ ID NO: 49822 - DNA, 19 bp, Artificial sequence
  SiRNA target sequence
atctcgaagttcaggcaag

SEQ ID NO: 49823 - DNA, 19 bp, Artificial sequence
  SiRNA target sequence
tctcgaagttcaggcaagt

SEQ ID NO: 49824 - DNA, 19 bp, Artificial sequence
  SiRNA target sequence
ctcgaagttcaggcaagta

SEQ ID NO: 49825 - DNA, 19 bp, Artificial sequence
  SiRNA target sequence
tcgaagttcaggcaagtaa

SEQ ID NO: 49826 - DNA, 19 bp, Artificial sequence
  SiRNA target sequence
cgaagttcaggcaagtaac

SEQ ID NO: 49827 - DNA, 19 bp, Artificial sequence
  SiRNA target sequence
gaagttcaggcaagtaaca

SEQ ID NO: 49828 - DNA, 19 bp, Artificial sequence
  SiRNA target sequence
aagttcaggcaagtaacat

SEQ ID NO: 49829 - DNA, 19 bp, Artificial sequence
  SiRNA target sequence
agttcaggcaagtaacata

SEQ ID NO: 49830 - DNA, 19 bp, Artificial sequence
  SiRNA target sequence
gttcaggcaagtaacatat

SEQ ID NO: 49831 - DNA, 19 bp, Artificial sequence
  SiRNA target sequence
ttcaggcaagtaacatatc

SEQ ID NO: 49832 - DNA, 19 bp, Artificial sequence
  SiRNA target sequence
tcaggcaagtaacatatca

SEQ ID NO: 49833 - DNA, 19 bp, Artificial sequence
  SiRNA target sequence
caggcaagtaacatatcaa

SEQ ID NO: 49834 - DNA, 19 bp, Artificial sequence
  SiRNA target sequence
aggcaagtaacatatcaaa

SEQ ID NO: 49835 - DNA, 19 bp, Artificial sequence
  SiRNA target sequence
ggcaagtaacatatcaaaa

SEQ ID NO: 49836 - DNA, 19 bp, Artificial sequence
  SiRNA target sequence
gcaagtaacatatcaaaaa

SEQ ID NO: 49837 - DNA, 19 bp, Artificial sequence
  SiRNA target sequence
caagtaacatatcaaaaag

SEQ ID NO: 49838 - DNA, 19 bp, Artificial sequence
  SiRNA target sequence
aagtaacatatcaaaaaga

SEQ ID NO: 49839 - DNA, 19 bp, Artificial sequence
  SiRNA target sequence
agtaacatatcaaaaagaa

SEQ ID NO: 49840 - DNA, 19 bp, Artificial sequence
  SiRNA target sequence
gtaacatatcaaaaagaat

SEQ ID NO: 49841 - DNA, 19 bp, Artificial sequence
  SiRNA target sequence
taacatatcaaaaagaatt

SEQ ID NO: 49842 - DNA, 19 bp, Artificial sequence
  SiRNA target sequence
aacatatcaaaaagaattg

SEQ ID NO: 49843 - DNA, 19 bp, Artificial sequence
  SiRNA target sequence
acatatcaaaaagaattgc

SEQ ID NO: 49844 - DNA, 19 bp, Artificial sequence
  SiRNA target sequence
catatcaaaaagaattgca

SEQ ID NO: 49845 - DNA, 19 bp, Artificial sequence
  SiRNA target sequence
atatcaaaaagaattgcag

SEQ ID NO: 49846 - DNA, 19 bp, Artificial sequence
  SiRNA target sequence
tatcaaaaagaattgcaga

SEQ ID NO: 49847 - DNA, 19 bp, Artificial sequence
  SiRNA target sequence
atcaaaaagaattgcagaa

SEQ ID NO: 49848 - DNA, 19 bp, Artificial sequence
  SiRNA target sequence
tcaaaaagaattgcagaag

SEQ ID NO: 49849 - DNA, 19 bp, Artificial sequence
  SiRNA target sequence
caaaaagaattgcagaaga

SEQ ID NO: 49850 - DNA, 19 bp, Artificial sequence
  SiRNA target sequence
aaaaagaattgcagaagat

SEQ ID NO: 49851 - DNA, 19 bp, Artificial sequence
  SiRNA target sequence
aaaagaattgcagaagatt

SEQ ID NO: 49852 - DNA, 19 bp, Artificial sequence
  SiRNA target sequence
aaagaattgcagaagattt

SEQ ID NO: 49853 - DNA, 19 bp, Artificial sequence
  SiRNA target sequence
aagaattgcagaagatttt

SEQ ID NO: 49854 - DNA, 19 bp, Artificial sequence
  SiRNA target sequence
agaattgcagaagattttg

SEQ ID NO: 49855 - DNA, 19 bp, Artificial sequence
  SiRNA target sequence
gaattgcagaagattttga

SEQ ID NO: 49856 - DNA, 19 bp, Artificial sequence
  SiRNA target sequence
aattgcagaagattttgaa

SEQ ID NO: 49857 - DNA, 19 bp, Artificial sequence
  SiRNA target sequence
attgcagaagattttgaaa

SEQ ID NO: 49858 - DNA, 19 bp, Artificial sequence
  SiRNA target sequence
ttgcagaagattttgaaaa

SEQ ID NO: 49859 - DNA, 19 bp, Artificial sequence
  SiRNA target sequence
tgcagaagattttgaaaat

SEQ ID NO: 49860 - DNA, 19 bp, Artificial sequence
  SiRNA target sequence
gcagaagattttgaaaata

SEQ ID NO: 49861 - DNA, 19 bp, Artificial sequence
  SiRNA target sequence
cagaagattttgaaaataa

SEQ ID NO: 49862 - DNA, 19 bp, Artificial sequence
  SiRNA target sequence
agaagattttgaaaataaa

SEQ ID NO: 49863 - DNA, 19 bp, Artificial sequence
  SiRNA target sequence
gaagattttgaaaataaaa

SEQ ID NO: 49864 - DNA, 19 bp, Artificial sequence
  SiRNA target sequence
aagattttgaaaataaaat

SEQ ID NO: 49865 - DNA, 19 bp, Artificial sequence
  SiRNA target sequence
agattttgaaaataaaata

SEQ ID NO: 49866 - DNA, 19 bp, Artificial sequence
  SiRNA target sequence
gattttgaaaataaaataa

SEQ ID NO: 49867 - DNA, 19 bp, Artificial sequence
  SiRNA target sequence
attttgaaaataaaataaa

SEQ ID NO: 49868 - DNA, 19 bp, Artificial sequence
  SiRNA target sequence
ttttgaaaataaaataaat

SEQ ID NO: 49869 - DNA, 19 bp, Artificial sequence
  SiRNA target sequence
tttgaaaataaaataaatg

SEQ ID NO: 49870 - DNA, 19 bp, Artificial sequence
  SiRNA target sequence
ttgaaaataaaataaatgc

SEQ ID NO: 49871 - DNA, 19 bp, Artificial sequence
  SiRNA target sequence
tgaaaataaaataaatgca

SEQ ID NO: 49872 - DNA, 19 bp, Artificial sequence
  SiRNA target sequence
gaaaataaaataaatgcag

SEQ ID NO: 49873 - DNA, 19 bp, Artificial sequence
  SiRNA target sequence
aaaataaaataaatgcagg

SEQ ID NO: 49874 - DNA, 19 bp, Artificial sequence
  SiRNA target sequence
aaataaaataaatgcagga

SEQ ID NO: 49875 - DNA, 19 bp, Artificial sequence
  SiRNA target sequence
aataaaataaatgcaggaa

SEQ ID NO: 49876 - DNA, 19 bp, Artificial sequence
  SiRNA target sequence
ataaaataaatgcaggaaa

SEQ ID NO: 49877 - DNA, 19 bp, Artificial sequence
  SiRNA target sequence
taaaataaatgcaggaaaa

SEQ ID NO: 49878 - DNA, 19 bp, Artificial sequence
  SiRNA target sequence
aaaataaatgcaggaaaaa

SEQ ID NO: 49879 - DNA, 19 bp, Artificial sequence
  SiRNA target sequence
aaataaatgcaggaaaaag

SEQ ID NO: 49880 - DNA, 19 bp, Artificial sequence
  SiRNA target sequence
aataaatgcaggaaaaagt

SEQ ID NO: 49881 - DNA, 19 bp, Artificial sequence
  SiRNA target sequence
ataaatgcaggaaaaagta

SEQ ID NO: 49882 - DNA, 19 bp, Artificial sequence
  SiRNA target sequence
taaatgcaggaaaaagtat

SEQ ID NO: 49883 - DNA, 19 bp, Artificial sequence
  SiRNA target sequence
aaatgcaggaaaaagtata

SEQ ID NO: 49884 - DNA, 19 bp, Artificial sequence
  SiRNA target sequence
aatgcaggaaaaagtatat

SEQ ID NO: 49885 - DNA, 19 bp, Artificial sequence
  SiRNA target sequence
atgcaggaaaaagtatatt

SEQ ID NO: 49886 - DNA, 19 bp, Artificial sequence
  SiRNA target sequence
tgcaggaaaaagtatattt

SEQ ID NO: 49887 - DNA, 19 bp, Artificial sequence
  SiRNA target sequence
gcaggaaaaagtatattta

SEQ ID NO: 49888 - DNA, 19 bp, Artificial sequence
  SiRNA target sequence
caggaaaaagtatatttaa

SEQ ID NO: 49889 - DNA, 19 bp, Artificial sequence
  SiRNA target sequence
aggaaaaagtatatttaaa

SEQ ID NO: 49890 - DNA, 19 bp, Artificial sequence
  SiRNA target sequence
ggaaaaagtatatttaaat

SEQ ID NO: 49891 - DNA, 19 bp, Artificial sequence
  SiRNA target sequence
gaaaaagtatatttaaata

SEQ ID NO: 49892 - DNA, 19 bp, Artificial sequence
  SiRNA target sequence
aaaaagtatatttaaatat

SEQ ID NO: 49893 - DNA, 19 bp, Artificial sequence
  SiRNA target sequence
aaaagtatatttaaatata

SEQ ID NO: 49894 - DNA, 19 bp, Artificial sequence
  SiRNA target sequence
aaagtatatttaaatatat

SEQ ID NO: 49895 - DNA, 19 bp, Artificial sequence
  SiRNA target sequence
aagtatatttaaatatatt

SEQ ID NO: 49896 - DNA, 19 bp, Artificial sequence
  SiRNA target sequence
agtatatttaaatatattt

SEQ ID NO: 49897 - DNA, 19 bp, Artificial sequence
  SiRNA target sequence
gtatatttaaatatatttt

SEQ ID NO: 49898 - DNA, 19 bp, Artificial sequence
  SiRNA target sequence
tatatttaaatatatttta

SEQ ID NO: 49899 - DNA, 19 bp, Artificial sequence
  SiRNA target sequence
atatttaaatatattttat

SEQ ID NO: 49900 - DNA, 19 bp, Artificial sequence
  SiRNA target sequence
tatttaaatatattttatt

SEQ ID NO: 49901 - DNA, 19 bp, Artificial sequence
  SiRNA target sequence
atttaaatatattttattt

SEQ ID NO: 49902 - DNA, 19 bp, Artificial sequence
  SiRNA target sequence
tttaaatatattttatttt

SEQ ID NO: 49903 - DNA, 19 bp, Artificial sequence
  SiRNA target sequence
ttaaatatattttattttt

SEQ ID NO: 49904 - DNA, 19 bp, Artificial sequence
  SiRNA target sequence
taaatatattttattttta

SEQ ID NO: 49905 - DNA, 19 bp, Artificial sequence
  SiRNA target sequence
aaatatattttatttttaa

SEQ ID NO: 49906 - DNA, 19 bp, Artificial sequence
  SiRNA target sequence
aatatattttatttttaac

SEQ ID NO: 49907 - DNA, 19 bp, Artificial sequence
  SiRNA target sequence
atatattttatttttaact

SEQ ID NO: 49908 - DNA, 19 bp, Artificial sequence
  SiRNA target sequence
tatattttatttttaactt

SEQ ID NO: 49909 - DNA, 19 bp, Artificial sequence
  SiRNA target sequence
atattttatttttaacttc

SEQ ID NO: 49910 - DNA, 19 bp, Artificial sequence
  SiRNA target sequence
tattttatttttaacttca

SEQ ID NO: 49911 - DNA, 19 bp, Artificial sequence
  SiRNA target sequence
attttatttttaacttcat

SEQ ID NO: 49912 - DNA, 19 bp, Artificial sequence
  SiRNA target sequence
ttttatttttaacttcatc

SEQ ID NO: 49913 - DNA, 19 bp, Artificial sequence
  SiRNA target sequence
tttatttttaacttcatca

SEQ ID NO: 49914 - DNA, 19 bp, Artificial sequence
  SiRNA target sequence
ttatttttaacttcatcaa

SEQ ID NO: 49915 - DNA, 19 bp, Artificial sequence
  SiRNA target sequence
tatttttaacttcatcaat

SEQ ID NO: 49916 - DNA, 19 bp, Artificial sequence
  SiRNA target sequence
atttttaacttcatcaata

SEQ ID NO: 49917 - DNA, 19 bp, Artificial sequence
  SiRNA target sequence
tttttaacttcatcaatag

SEQ ID NO: 49918 - DNA, 19 bp, Artificial sequence
  SiRNA target sequence
ttttaacttcatcaatagt

SEQ ID NO: 49919 - DNA, 19 bp, Artificial sequence
  SiRNA target sequence
tttaacttcatcaatagta

SEQ ID NO: 49920 - DNA, 19 bp, Artificial sequence
  SiRNA target sequence
ttaacttcatcaatagtat

SEQ ID NO: 49921 - DNA, 19 bp, Artificial sequence
  SiRNA target sequence
taacttcatcaatagtatt

SEQ ID NO: 49922 - DNA, 19 bp, Artificial sequence
  SiRNA target sequence
aacttcatcaatagtatta

SEQ ID NO: 49923 - DNA, 19 bp, Artificial sequence
  SiRNA target sequence
acttcatcaatagtattaa

SEQ ID NO: 49924 - DNA, 19 bp, Artificial sequence
  SiRNA target sequence
cttcatcaatagtattaag

SEQ ID NO: 49925 - DNA, 19 bp, Artificial sequence
  SiRNA target sequence
ttcatcaatagtattaaga

SEQ ID NO: 49926 - DNA, 19 bp, Artificial sequence
  SiRNA target sequence
tcatcaatagtattaagac

SEQ ID NO: 49927 - DNA, 19 bp, Artificial sequence
  SiRNA target sequence
catcaatagtattaagaca

SEQ ID NO: 49928 - DNA, 19 bp, Artificial sequence
  SiRNA target sequence
atcaatagtattaagacaa

SEQ ID NO: 49929 - DNA, 19 bp, Artificial sequence
  SiRNA target sequence
tcaatagtattaagacaaa

SEQ ID NO: 49930 - DNA, 19 bp, Artificial sequence
  SiRNA target sequence
caatagtattaagacaaat

SEQ ID NO: 49931 - DNA, 19 bp, Artificial sequence
  SiRNA target sequence
aatagtattaagacaaatt

SEQ ID NO: 49932 - DNA, 19 bp, Artificial sequence
  SiRNA target sequence
atagtattaagacaaatta

SEQ ID NO: 49933 - DNA, 19 bp, Artificial sequence
  SiRNA target sequence
tagtattaagacaaattaa

SEQ ID NO: 49934 - DNA, 19 bp, Artificial sequence
  SiRNA target sequence
agtattaagacaaattaat

SEQ ID NO: 49935 - DNA, 19 bp, Artificial sequence
  SiRNA target sequence
gtattaagacaaattaatg

SEQ ID NO: 49936 - DNA, 19 bp, Artificial sequence
  SiRNA target sequence
tattaagacaaattaatga

SEQ ID NO: 49937 - DNA, 19 bp, Artificial sequence
  SiRNA target sequence
attaagacaaattaatgat

SEQ ID NO: 49938 - DNA, 19 bp, Artificial sequence
  SiRNA target sequence
ttaagacaaattaatgata

SEQ ID NO: 49939 - DNA, 19 bp, Artificial sequence
  SiRNA target sequence
taagacaaattaatgatat

SEQ ID NO: 49940 - DNA, 19 bp, Artificial sequence
  SiRNA target sequence
aagacaaattaatgatatt

SEQ ID NO: 49941 - DNA, 19 bp, Artificial sequence
  SiRNA target sequence
agacaaattaatgatattg

SEQ ID NO: 49942 - DNA, 19 bp, Artificial sequence
  SiRNA target sequence
gacaaattaatgatattgt

SEQ ID NO: 49943 - DNA, 19 bp, Artificial sequence
  SiRNA target sequence
acaaattaatgatattgtg

SEQ ID NO: 49944 - DNA, 19 bp, Artificial sequence
  SiRNA target sequence
caaattaatgatattgtgt

SEQ ID NO: 49945 - DNA, 19 bp, Artificial sequence
  SiRNA target sequence
aaattaatgatattgtgtt

SEQ ID NO: 49946 - DNA, 19 bp, Artificial sequence
  SiRNA target sequence
aattaatgatattgtgttt

SEQ ID NO: 49947 - DNA, 19 bp, Artificial sequence
  SiRNA target sequence
attaatgatattgtgttta

SEQ ID NO: 49948 - DNA, 19 bp, Artificial sequence
  SiRNA target sequence
ttaatgatattgtgtttag

SEQ ID NO: 49949 - DNA, 19 bp, Artificial sequence
  SiRNA target sequence
taatgatattgtgtttagc

SEQ ID NO: 49950 - DNA, 19 bp, Artificial sequence
  SiRNA target sequence
aatgatattgtgtttagcg

SEQ ID NO: 49951 - DNA, 19 bp, Artificial sequence
  SiRNA target sequence
atgatattgtgtttagcgg

SEQ ID NO: 49952 - DNA, 19 bp, Artificial sequence
  SiRNA target sequence
tgatattgtgtttagcggg

SEQ ID NO: 49953 - DNA, 19 bp, Artificial sequence
  SiRNA target sequence
gatattgtgtttagcgggc

SEQ ID NO: 49954 - DNA, 19 bp, Artificial sequence
  SiRNA target sequence
atattgtgtttagcgggcc

SEQ ID NO: 49955 - DNA, 19 bp, Artificial sequence
  SiRNA target sequence
tattgtgtttagcgggcca

SEQ ID NO: 49956 - DNA, 19 bp, Artificial sequence
  SiRNA target sequence
attgtgtttagcgggccaa

SEQ ID NO: 49957 - DNA, 19 bp, Artificial sequence
  SiRNA target sequence
ttgtgtttagcgggccaat

SEQ ID NO: 49958 - DNA, 19 bp, Artificial sequence
  SiRNA target sequence
tgtgtttagcgggccaata

SEQ ID NO: 49959 - DNA, 19 bp, Artificial sequence
  SiRNA target sequence
gtgtttagcgggccaatac

SEQ ID NO: 49960 - DNA, 19 bp, Artificial sequence
  SiRNA target sequence
tgtttagcgggccaataca

SEQ ID NO: 49961 - DNA, 19 bp, Artificial sequence
  SiRNA target sequence
gtttagcgggccaatacaa

SEQ ID NO: 49962 - DNA, 19 bp, Artificial sequence
  SiRNA target sequence
tttagcgggccaatacaat

SEQ ID NO: 49963 - DNA, 19 bp, Artificial sequence
  SiRNA target sequence
ttagcgggccaatacaatt

SEQ ID NO: 49964 - DNA, 19 bp, Artificial sequence
  SiRNA target sequence
tagcgggccaatacaattt

SEQ ID NO: 49965 - DNA, 19 bp, Artificial sequence
  SiRNA target sequence
agcgggccaatacaatttt

SEQ ID NO: 49966 - DNA, 19 bp, Artificial sequence
  SiRNA target sequence
gcgggccaatacaattttt

SEQ ID NO: 49967 - DNA, 19 bp, Artificial sequence
  SiRNA target sequence
cgggccaatacaattttta

SEQ ID NO: 49968 - DNA, 19 bp, Artificial sequence
  SiRNA target sequence
gggccaatacaatttttat

SEQ ID NO: 49969 - DNA, 19 bp, Artificial sequence
  SiRNA target sequence
ggccaatacaatttttata

SEQ ID NO: 49970 - DNA, 19 bp, Artificial sequence
  SiRNA target sequence
gccaatacaatttttatat

SEQ ID NO: 49971 - DNA, 19 bp, Artificial sequence
  SiRNA target sequence
ccaatacaatttttatata

SEQ ID NO: 49972 - DNA, 19 bp, Artificial sequence
  SiRNA target sequence
caatacaatttttatataa

SEQ ID NO: 49973 - DNA, 19 bp, Artificial sequence
  SiRNA target sequence
aatacaatttttatataaa

SEQ ID NO: 49974 - DNA, 19 bp, Artificial sequence
  SiRNA target sequence
atacaatttttatataaaa

SEQ ID NO: 49975 - DNA, 19 bp, Artificial sequence
  SiRNA target sequence
tacaatttttatataaaat

SEQ ID NO: 49976 - DNA, 19 bp, Artificial sequence
  SiRNA target sequence
acaatttttatataaaatt

SEQ ID NO: 49977 - DNA, 19 bp, Artificial sequence
  SiRNA target sequence
caatttttatataaaattg

SEQ ID NO: 49978 - DNA, 19 bp, Artificial sequence
  SiRNA target sequence
aatttttatataaaattgt

SEQ ID NO: 49979 - DNA, 19 bp, Artificial sequence
  SiRNA target sequence
atttttatataaaattgtt

SEQ ID NO: 49980 - DNA, 19 bp, Artificial sequence
  SiRNA target sequence
tttttatataaaattgttg

SEQ ID NO: 49981 - DNA, 19 bp, Artificial sequence
  SiRNA target sequence
ttttatataaaattgttgg

SEQ ID NO: 49982 - DNA, 19 bp, Artificial sequence
  SiRNA target sequence
tttatataaaattgttgga

SEQ ID NO: 49983 - DNA, 19 bp, Artificial sequence
  SiRNA target sequence
ttatataaaattgttggag

SEQ ID NO: 49984 - DNA, 19 bp, Artificial sequence
  SiRNA target sequence
tatataaaattgttggagt

SEQ ID NO: 49985 - DNA, 19 bp, Artificial sequence
  SiRNA target sequence
atataaaattgttggagtt

SEQ ID NO: 49986 - DNA, 19 bp, Artificial sequence
  SiRNA target sequence
tataaaattgttggagttg

SEQ ID NO: 49987 - DNA, 19 bp, Artificial sequence
  SiRNA target sequence
ataaaattgttggagttga

SEQ ID NO: 49988 - DNA, 19 bp, Artificial sequence
  SiRNA target sequence
taaaattgttggagttgaa

SEQ ID NO: 49989 - DNA, 19 bp, Artificial sequence
  SiRNA target sequence
aaaattgttggagttgaag

SEQ ID NO: 49990 - DNA, 19 bp, Artificial sequence
  SiRNA target sequence
aaattgttggagttgaagc

SEQ ID NO: 49991 - DNA, 19 bp, Artificial sequence
  SiRNA target sequence
aattgttggagttgaagca

SEQ ID NO: 49992 - DNA, 19 bp, Artificial sequence
  SiRNA target sequence
attgttggagttgaagcat

SEQ ID NO: 49993 - DNA, 19 bp, Artificial sequence
  SiRNA target sequence
ttgttggagttgaagcatt

SEQ ID NO: 49994 - DNA, 19 bp, Artificial sequence
  SiRNA target sequence
tgttggagttgaagcattt

SEQ ID NO: 49995 - DNA, 19 bp, Artificial sequence
  SiRNA target sequence
gttggagttgaagcatttt

SEQ ID NO: 49996 - DNA, 19 bp, Artificial sequence
  SiRNA target sequence
ttggagttgaagcatttta

SEQ ID NO: 49997 - DNA, 19 bp, Artificial sequence
  SiRNA target sequence
tggagttgaagcattttat

SEQ ID NO: 49998 - DNA, 19 bp, Artificial sequence
  SiRNA target sequence
ggagttgaagcattttatc

SEQ ID NO: 49999 - DNA, 19 bp, Artificial sequence
  SiRNA target sequence
gagttgaagcattttatca

SEQ ID NO: 50000 - DNA, 19 bp, Artificial sequence
  SiRNA target sequence
agttgaagcattttatcat

SEQ ID NO: 50001 - DNA, 19 bp, Artificial sequence
  SiRNA target sequence
gttgaagcattttatcatt

SEQ ID NO: 50002 - DNA, 19 bp, Artificial sequence
  SiRNA target sequence
ttgaagcattttatcatta

SEQ ID NO: 50003 - DNA, 19 bp, Artificial sequence
  SiRNA target sequence
tgaagcattttatcattac

SEQ ID NO: 50004 - DNA, 19 bp, Artificial sequence
  SiRNA target sequence
gaagcattttatcattaca

SEQ ID NO: 50005 - DNA, 19 bp, Artificial sequence
  SiRNA target sequence
aagcattttatcattacat

SEQ ID NO: 50006 - DNA, 19 bp, Artificial sequence
  SiRNA target sequence
agcattttatcattacatt

SEQ ID NO: 50007 - DNA, 19 bp, Artificial sequence
  SiRNA target sequence
gcattttatcattacattt

SEQ ID NO: 50008 - DNA, 19 bp, Artificial sequence
  SiRNA target sequence
cattttatcattacatttc

SEQ ID NO: 50009 - DNA, 19 bp, Artificial sequence
  SiRNA target sequence
attttatcattacatttca

SEQ ID NO: 50010 - DNA, 19 bp, Artificial sequence
  SiRNA target sequence
ttttatcattacatttcat

SEQ ID NO: 50011 - DNA, 19 bp, Artificial sequence
  SiRNA target sequence
tttatcattacatttcatt

SEQ ID NO: 50012 - DNA, 19 bp, Artificial sequence
  SiRNA target sequence
ttatcattacatttcatta

SEQ ID NO: 50013 - DNA, 19 bp, Artificial sequence
  SiRNA target sequence
tatcattacatttcattaa

SEQ ID NO: 50014 - DNA, 19 bp, Artificial sequence
  SiRNA target sequence
atcattacatttcattaaa

SEQ ID NO: 50015 - DNA, 19 bp, Artificial sequence
  SiRNA target sequence
tcattacatttcattaaac

SEQ ID NO: 50016 - DNA, 19 bp, Artificial sequence
  SiRNA target sequence
cattacatttcattaaact

SEQ ID NO: 50017 - DNA, 19 bp, Artificial sequence
  SiRNA target sequence
attacatttcattaaactt

SEQ ID NO: 50018 - DNA, 19 bp, Artificial sequence
  SiRNA target sequence
ttacatttcattaaactta

SEQ ID NO: 50019 - DNA, 19 bp, Artificial sequence
  SiRNA target sequence
tacatttcattaaacttag

SEQ ID NO: 50020 - DNA, 19 bp, Artificial sequence
  SiRNA target sequence
acatttcattaaacttaga

SEQ ID NO: 50021 - DNA, 19 bp, Artificial sequence
  SiRNA target sequence
catttcattaaacttagaa

SEQ ID NO: 50022 - DNA, 19 bp, Artificial sequence
  SiRNA target sequence
atttcattaaacttagaaa

SEQ ID NO: 50023 - DNA, 19 bp, Artificial sequence
  SiRNA target sequence
tttcattaaacttagaaaa

SEQ ID NO: 50024 - DNA, 19 bp, Artificial sequence
  SiRNA target sequence
ttcattaaacttagaaaat

SEQ ID NO: 50025 - DNA, 19 bp, Artificial sequence
  SiRNA target sequence
tcattaaacttagaaaatt

SEQ ID NO: 50026 - DNA, 19 bp, Artificial sequence
  SiRNA target sequence
cattaaacttagaaaattt

SEQ ID NO: 50027 - DNA, 19 bp, Artificial sequence
  SiRNA target sequence
attaaacttagaaaatttt

SEQ ID NO: 50028 - DNA, 19 bp, Artificial sequence
  SiRNA target sequence
ttaaacttagaaaatttta

SEQ ID NO: 50029 - DNA, 19 bp, Artificial sequence
  SiRNA target sequence
taaacttagaaaattttaa

SEQ ID NO: 50030 - DNA, 19 bp, Artificial sequence
  SiRNA target sequence
aaacttagaaaattttaac

SEQ ID NO: 50031 - DNA, 19 bp, Artificial sequence
  SiRNA target sequence
aacttagaaaattttaaca

SEQ ID NO: 50032 - DNA, 19 bp, Artificial sequence
  SiRNA target sequence
acttagaaaattttaacaa

SEQ ID NO: 50033 - DNA, 19 bp, Artificial sequence
  SiRNA target sequence
cttagaaaattttaacaaa

SEQ ID NO: 50034 - DNA, 19 bp, Artificial sequence
  SiRNA target sequence
ttagaaaattttaacaaaa

SEQ ID NO: 50035 - DNA, 19 bp, Artificial sequence
  SiRNA target sequence
tagaaaattttaacaaaat

SEQ ID NO: 50036 - DNA, 19 bp, Artificial sequence
  SiRNA target sequence
agaaaattttaacaaaata

SEQ ID NO: 50037 - DNA, 19 bp, Artificial sequence
  SiRNA target sequence
gaaaattttaacaaaatag

SEQ ID NO: 50038 - DNA, 19 bp, Artificial sequence
  SiRNA target sequence
aaaattttaacaaaatagg

SEQ ID NO: 50039 - DNA, 19 bp, Artificial sequence
  SiRNA target sequence
aaattttaacaaaatagga

SEQ ID NO: 50040 - DNA, 19 bp, Artificial sequence
  SiRNA target sequence
aattttaacaaaataggaa

SEQ ID NO: 50041 - DNA, 19 bp, Artificial sequence
  SiRNA target sequence
attttaacaaaataggaag

SEQ ID NO: 50042 - DNA, 19 bp, Artificial sequence
  SiRNA target sequence
ttttaacaaaataggaagt

SEQ ID NO: 50043 - DNA, 19 bp, Artificial sequence
  SiRNA target sequence
tttaacaaaataggaagtg

SEQ ID NO: 50044 - DNA, 19 bp, Artificial sequence
  SiRNA target sequence
ttaacaaaataggaagtgg

SEQ ID NO: 50045 - DNA, 19 bp, Artificial sequence
  SiRNA target sequence
taacaaaataggaagtgga

SEQ ID NO: 50046 - DNA, 19 bp, Artificial sequence
  SiRNA target sequence
aacaaaataggaagtggag

SEQ ID NO: 50047 - DNA, 19 bp, Artificial sequence
  SiRNA target sequence
acaaaataggaagtggaga

SEQ ID NO: 50048 - DNA, 19 bp, Artificial sequence
  SiRNA target sequence
caaaataggaagtggagag

SEQ ID NO: 50049 - DNA, 19 bp, Artificial sequence
  SiRNA target sequence
aaaataggaagtggagaga

SEQ ID NO: 50050 - DNA, 19 bp, Artificial sequence
  SiRNA target sequence
aaataggaagtggagagat

SEQ ID NO: 50051 - DNA, 19 bp, Artificial sequence
  SiRNA target sequence
aataggaagtggagagata

SEQ ID NO: 50052 - DNA, 19 bp, Artificial sequence
  SiRNA target sequence
ataggaagtggagagatac

SEQ ID NO: 50053 - DNA, 19 bp, Artificial sequence
  SiRNA target sequence
taggaagtggagagataca

SEQ ID NO: 50054 - DNA, 19 bp, Artificial sequence
  SiRNA target sequence
aggaagtggagagatacaa

SEQ ID NO: 50055 - DNA, 19 bp, Artificial sequence
  SiRNA target sequence
ggaagtggagagatacaaa

SEQ ID NO: 50056 - DNA, 19 bp, Artificial sequence
  SiRNA target sequence
gaagtggagagatacaaat

SEQ ID NO: 50057 - DNA, 19 bp, Artificial sequence
  SiRNA target sequence
aagtggagagatacaaatg

SEQ ID NO: 50058 - DNA, 19 bp, Artificial sequence
  SiRNA target sequence
agtggagagatacaaatga

SEQ ID NO: 50059 - DNA, 19 bp, Artificial sequence
  SiRNA target sequence
gtggagagatacaaatgat

SEQ ID NO: 50060 - DNA, 19 bp, Artificial sequence
  SiRNA target sequence
tggagagatacaaatgatt

SEQ ID NO: 50061 - DNA, 19 bp, Artificial sequence
  SiRNA target sequence
ggagagatacaaatgatta

SEQ ID NO: 50062 - DNA, 19 bp, Artificial sequence
  SiRNA target sequence
gagagatacaaatgattat

SEQ ID NO: 50063 - DNA, 19 bp, Artificial sequence
  SiRNA target sequence
agagatacaaatgattatt

SEQ ID NO: 50064 - DNA, 19 bp, Artificial sequence
  SiRNA target sequence
gagatacaaatgattattg

SEQ ID NO: 50065 - DNA, 19 bp, Artificial sequence
  SiRNA target sequence
agatacaaatgattattga

SEQ ID NO: 50066 - DNA, 19 bp, Artificial sequence
  SiRNA target sequence
gatacaaatgattattgag

SEQ ID NO: 50067 - DNA, 19 bp, Artificial sequence
  SiRNA target sequence
atacaaatgattattgagc

SEQ ID NO: 50068 - DNA, 19 bp, Artificial sequence
  SiRNA target sequence
tacaaatgattattgagcg

SEQ ID NO: 50069 - DNA, 19 bp, Artificial sequence
  SiRNA target sequence
acaaatgattattgagcgg

SEQ ID NO: 50070 - DNA, 19 bp, Artificial sequence
  SiRNA target sequence
caaatgattattgagcgga

SEQ ID NO: 50071 - DNA, 19 bp, Artificial sequence
  SiRNA target sequence
aaatgattattgagcggaa

SEQ ID NO: 50072 - DNA, 19 bp, Artificial sequence
  SiRNA target sequence
aatgattattgagcggaaa

SEQ ID NO: 50073 - DNA, 19 bp, Artificial sequence
  SiRNA target sequence
atgattattgagcggaaaa

SEQ ID NO: 50074 - DNA, 19 bp, Artificial sequence
  SiRNA target sequence
tgattattgagcggaaaag

SEQ ID NO: 50075 - DNA, 19 bp, Artificial sequence
  SiRNA target sequence
gattattgagcggaaaagt

SEQ ID NO: 50076 - DNA, 19 bp, Artificial sequence
  SiRNA target sequence
attattgagcggaaaagta

SEQ ID NO: 50077 - DNA, 19 bp, Artificial sequence
  SiRNA target sequence
ttattgagcggaaaagtag

SEQ ID NO: 50078 - DNA, 19 bp, Artificial sequence
  SiRNA target sequence
tattgagcggaaaagtaga

SEQ ID NO: 50079 - DNA, 19 bp, Artificial sequence
  SiRNA target sequence
attgagcggaaaagtagag

SEQ ID NO: 50080 - DNA, 19 bp, Artificial sequence
  SiRNA target sequence
ttgagcggaaaagtagagc

SEQ ID NO: 50081 - DNA, 19 bp, Artificial sequence
  SiRNA target sequence
tgagcggaaaagtagagca

SEQ ID NO: 50082 - DNA, 19 bp, Artificial sequence
  SiRNA target sequence
gagcggaaaagtagagcat

SEQ ID NO: 50083 - DNA, 19 bp, Artificial sequence
  SiRNA target sequence
agcggaaaagtagagcata

SEQ ID NO: 50084 - DNA, 19 bp, Artificial sequence
  SiRNA target sequence
gcggaaaagtagagcatat

SEQ ID NO: 50085 - DNA, 19 bp, Artificial sequence
  SiRNA target sequence
cggaaaagtagagcatatg

SEQ ID NO: 50086 - DNA, 19 bp, Artificial sequence
  SiRNA target sequence
ggaaaagtagagcatatgg

SEQ ID NO: 50087 - DNA, 19 bp, Artificial sequence
  SiRNA target sequence
gaaaagtagagcatatggt

SEQ ID NO: 50088 - DNA, 19 bp, Artificial sequence
  SiRNA target sequence
aaaagtagagcatatggtg

SEQ ID NO: 50089 - DNA, 19 bp, Artificial sequence
  SiRNA target sequence
aaagtagagcatatggtga

SEQ ID NO: 50090 - DNA, 19 bp, Artificial sequence
  SiRNA target sequence
aagtagagcatatggtgac

SEQ ID NO: 50091 - DNA, 19 bp, Artificial sequence
  SiRNA target sequence
agtagagcatatggtgaca

SEQ ID NO: 50092 - DNA, 19 bp, Artificial sequence
  SiRNA target sequence
gtagagcatatggtgacat

SEQ ID NO: 50093 - DNA, 19 bp, Artificial sequence
  SiRNA target sequence
tagagcatatggtgacata

SEQ ID NO: 50094 - DNA, 19 bp, Artificial sequence
  SiRNA target sequence
agagcatatggtgacatac

SEQ ID NO: 50095 - DNA, 19 bp, Artificial sequence
  SiRNA target sequence
gagcatatggtgacatact

SEQ ID NO: 50096 - DNA, 19 bp, Artificial sequence
  SiRNA target sequence
agcatatggtgacatacta

SEQ ID NO: 50097 - DNA, 19 bp, Artificial sequence
  SiRNA target sequence
gcatatggtgacatactag

SEQ ID NO: 50098 - DNA, 19 bp, Artificial sequence
  SiRNA target sequence
catatggtgacatactaga

SEQ ID NO: 50099 - DNA, 19 bp, Artificial sequence
  SiRNA target sequence
atatggtgacatactagaa

SEQ ID NO: 50100 - DNA, 19 bp, Artificial sequence
  SiRNA target sequence
tatggtgacatactagaac

SEQ ID NO: 50101 - DNA, 19 bp, Artificial sequence
  SiRNA target sequence
atggtgacatactagaact

SEQ ID NO: 50102 - DNA, 19 bp, Artificial sequence
  SiRNA target sequence
tggtgacatactagaacta

SEQ ID NO: 50103 - DNA, 19 bp, Artificial sequence
  SiRNA target sequence
ggtgacatactagaactaa

SEQ ID NO: 50104 - DNA, 19 bp, Artificial sequence
  SiRNA target sequence
gtgacatactagaactaac

SEQ ID NO: 50105 - DNA, 19 bp, Artificial sequence
  SiRNA target sequence
tgacatactagaactaact

SEQ ID NO: 50106 - DNA, 19 bp, Artificial sequence
  SiRNA target sequence
gacatactagaactaacta

SEQ ID NO: 50107 - DNA, 19 bp, Artificial sequence
  SiRNA target sequence
acatactagaactaactac

SEQ ID NO: 50108 - DNA, 19 bp, Artificial sequence
  SiRNA target sequence
catactagaactaactact

SEQ ID NO: 50109 - DNA, 19 bp, Artificial sequence
  SiRNA target sequence
atactagaactaactactc

SEQ ID NO: 50110 - DNA, 19 bp, Artificial sequence
  SiRNA target sequence
tactagaactaactactct

SEQ ID NO: 50111 - DNA, 19 bp, Artificial sequence
  SiRNA target sequence
actagaactaactactctc

SEQ ID NO: 50112 - DNA, 19 bp, Artificial sequence
  SiRNA target sequence
ctagaactaactactctct

SEQ ID NO: 50113 - DNA, 19 bp, Artificial sequence
  SiRNA target sequence
tagaactaactactctctc

SEQ ID NO: 50114 - DNA, 19 bp, Artificial sequence
  SiRNA target sequence
agaactaactactctctcg

SEQ ID NO: 50115 - DNA, 19 bp, Artificial sequence
  SiRNA target sequence
gaactaactactctctcgg

SEQ ID NO: 50116 - DNA, 19 bp, Artificial sequence
  SiRNA target sequence
aactaactactctctcggc

SEQ ID NO: 50117 - DNA, 19 bp, Artificial sequence
  SiRNA target sequence
actaactactctctcggcc

SEQ ID NO: 50118 - DNA, 19 bp, Artificial sequence
  SiRNA target sequence
ctaactactctctcggccg

SEQ ID NO: 50119 - DNA, 19 bp, Artificial sequence
  SiRNA target sequence
taactactctctcggccgt

SEQ ID NO: 50120 - DNA, 19 bp, Artificial sequence
  SiRNA target sequence
aactactctctcggccgta

SEQ ID NO: 50121 - DNA, 19 bp, Artificial sequence
  SiRNA target sequence
actactctctcggccgtac

SEQ ID NO: 50122 - DNA, 19 bp, Artificial sequence
  SiRNA target sequence
ctactctctcggccgtacc

SEQ ID NO: 50123 - DNA, 19 bp, Artificial sequence
  SiRNA target sequence
tactctctcggccgtacca

SEQ ID NO: 50124 - DNA, 19 bp, Artificial sequence
  SiRNA target sequence
actctctcggccgtaccaa

SEQ ID NO: 50125 - DNA, 19 bp, Artificial sequence
  SiRNA target sequence
ctctctcggccgtaccaac

SEQ ID NO: 50126 - DNA, 19 bp, Artificial sequence
  SiRNA target sequence
tctctcggccgtaccaacc

SEQ ID NO: 50127 - DNA, 19 bp, Artificial sequence
  SiRNA target sequence
ctctcggccgtaccaacct

SEQ ID NO: 50128 - DNA, 19 bp, Artificial sequence
  SiRNA target sequence
tctcggccgtaccaacctg

SEQ ID NO: 50129 - DNA, 19 bp, Artificial sequence
  SiRNA target sequence
ctcggccgtaccaacctgt

SEQ ID NO: 50130 - DNA, 19 bp, Artificial sequence
  SiRNA target sequence
tcggccgtaccaacctgta

SEQ ID NO: 50131 - DNA, 19 bp, Artificial sequence
  SiRNA target sequence
cggccgtaccaacctgtat

SEQ ID NO: 50132 - DNA, 19 bp, Artificial sequence
  SiRNA target sequence
ggccgtaccaacctgtatt

SEQ ID NO: 50133 - DNA, 19 bp, Artificial sequence
  SiRNA target sequence
gccgtaccaacctgtattg

SEQ ID NO: 50134 - DNA, 19 bp, Artificial sequence
  SiRNA target sequence
ccgtaccaacctgtattgt

SEQ ID NO: 50135 - DNA, 19 bp, Artificial sequence
  SiRNA target sequence
cgtaccaacctgtattgta

SEQ ID NO: 50136 - DNA, 19 bp, Artificial sequence
  SiRNA target sequence
gtaccaacctgtattgtag

SEQ ID NO: 50137 - DNA, 19 bp, Artificial sequence
  SiRNA target sequence
taccaacctgtattgtagt

SEQ ID NO: 50138 - DNA, 19 bp, Artificial sequence
  SiRNA target sequence
accaacctgtattgtagtt

SEQ ID NO: 50139 - DNA, 19 bp, Artificial sequence
  SiRNA target sequence
ccaacctgtattgtagtta

SEQ ID NO: 50140 - DNA, 19 bp, Artificial sequence
  SiRNA target sequence
caacctgtattgtagttat

SEQ ID NO: 50141 - DNA, 19 bp, Artificial sequence
  SiRNA target sequence
aacctgtattgtagttatt

SEQ ID NO: 50142 - DNA, 19 bp, Artificial sequence
  SiRNA target sequence
acctgtattgtagttatta

SEQ ID NO: 50143 - DNA, 19 bp, Artificial sequence
  SiRNA target sequence
cctgtattgtagttattat

SEQ ID NO: 50144 - DNA, 19 bp, Artificial sequence
  SiRNA target sequence
ctgtattgtagttattatg

SEQ ID NO: 50145 - DNA, 19 bp, Artificial sequence
  SiRNA target sequence
tgtattgtagttattatgt

SEQ ID NO: 50146 - DNA, 19 bp, Artificial sequence
  SiRNA target sequence
gtattgtagttattatgtc

SEQ ID NO: 50147 - DNA, 19 bp, Artificial sequence
  SiRNA target sequence
tattgtagttattatgtcg

SEQ ID NO: 50148 - DNA, 19 bp, Artificial sequence
  SiRNA target sequence
attgtagttattatgtcgt

SEQ ID NO: 50149 - DNA, 19 bp, Artificial sequence
  SiRNA target sequence
ttgtagttattatgtcgtt

SEQ ID NO: 50150 - DNA, 19 bp, Artificial sequence
  SiRNA target sequence
tgtagttattatgtcgttt

SEQ ID NO: 50151 - DNA, 19 bp, Artificial sequence
  SiRNA target sequence
gtagttattatgtcgtttt

SEQ ID NO: 50152 - DNA, 19 bp, Artificial sequence
  SiRNA target sequence
tagttattatgtcgttttt

SEQ ID NO: 50153 - DNA, 19 bp, Artificial sequence
  SiRNA target sequence
agttattatgtcgtttttc

SEQ ID NO: 50154 - DNA, 19 bp, Artificial sequence
  SiRNA target sequence
gttattatgtcgtttttct

SEQ ID NO: 50155 - DNA, 19 bp, Artificial sequence
  SiRNA target sequence
ttattatgtcgtttttctc

SEQ ID NO: 50156 - DNA, 19 bp, Artificial sequence
  SiRNA target sequence
tattatgtcgtttttctca

SEQ ID NO: 50157 - DNA, 19 bp, Artificial sequence
  SiRNA target sequence
attatgtcgtttttctcag

SEQ ID NO: 50158 - DNA, 19 bp, Artificial sequence
  SiRNA target sequence
ttatgtcgtttttctcagt

SEQ ID NO: 50159 - DNA, 19 bp, Artificial sequence
  SiRNA target sequence
tatgtcgtttttctcagta

SEQ ID NO: 50160 - DNA, 19 bp, Artificial sequence
  SiRNA target sequence
atgtcgtttttctcagtat

SEQ ID NO: 50161 - DNA, 19 bp, Artificial sequence
  SiRNA target sequence
tgtcgtttttctcagtata

SEQ ID NO: 50162 - DNA, 19 bp, Artificial sequence
  SiRNA target sequence
gtcgtttttctcagtatat

SEQ ID NO: 50163 - DNA, 19 bp, Artificial sequence
  SiRNA target sequence
tcgtttttctcagtatata

SEQ ID NO: 50164 - DNA, 19 bp, Artificial sequence
  SiRNA target sequence
cgtttttctcagtatataa

SEQ ID NO: 50165 - DNA, 19 bp, Artificial sequence
  SiRNA target sequence
gtttttctcagtatataaa

SEQ ID NO: 50166 - DNA, 19 bp, Artificial sequence
  SiRNA target sequence
tttttctcagtatataaaa

SEQ ID NO: 50167 - DNA, 19 bp, Artificial sequence
  SiRNA target sequence
ttttctcagtatataaaaa

SEQ ID NO: 50168 - DNA, 19 bp, Artificial sequence
  SiRNA target sequence
tttctcagtatataaaaat

SEQ ID NO: 50169 - DNA, 19 bp, Artificial sequence
  SiRNA target sequence
ttctcagtatataaaaatt

SEQ ID NO: 50170 - DNA, 19 bp, Artificial sequence
  SiRNA target sequence
tctcagtatataaaaattt

SEQ ID NO: 50171 - DNA, 19 bp, Artificial sequence
  SiRNA target sequence
ctcagtatataaaaatttg

SEQ ID NO: 50172 - DNA, 19 bp, Artificial sequence
  SiRNA target sequence
tcagtatataaaaatttgg

SEQ ID NO: 50173 - DNA, 19 bp, Artificial sequence
  SiRNA target sequence
cagtatataaaaatttggg

SEQ ID NO: 50174 - DNA, 19 bp, Artificial sequence
  SiRNA target sequence
agtatataaaaatttggga

SEQ ID NO: 50175 - DNA, 19 bp, Artificial sequence
  SiRNA target sequence
gtatataaaaatttgggaa

SEQ ID NO: 50176 - DNA, 19 bp, Artificial sequence
  SiRNA target sequence
tatataaaaatttgggaag

SEQ ID NO: 50177 - DNA, 19 bp, Artificial sequence
  SiRNA target sequence
atataaaaatttgggaaga

SEQ ID NO: 50178 - DNA, 19 bp, Artificial sequence
  SiRNA target sequence
tataaaaatttgggaagag

SEQ ID NO: 50179 - DNA, 19 bp, Artificial sequence
  SiRNA target sequence
ataaaaatttgggaagaga

SEQ ID NO: 50180 - DNA, 19 bp, Artificial sequence
  SiRNA target sequence
taaaaatttgggaagagat

SEQ ID NO: 50181 - DNA, 19 bp, Artificial sequence
  SiRNA target sequence
aaaaatttgggaagagatg

SEQ ID NO: 50182 - DNA, 19 bp, Artificial sequence
  SiRNA target sequence
aaaatttgggaagagatgc

SEQ ID NO: 50183 - DNA, 19 bp, Artificial sequence
  SiRNA target sequence
aaatttgggaagagatgca

SEQ ID NO: 50184 - DNA, 19 bp, Artificial sequence
  SiRNA target sequence
aatttgggaagagatgcac

SEQ ID NO: 50185 - DNA, 19 bp, Artificial sequence
  SiRNA target sequence
atttgggaagagatgcact

SEQ ID NO: 50186 - DNA, 19 bp, Artificial sequence
  SiRNA target sequence
tttgggaagagatgcactc

SEQ ID NO: 50187 - DNA, 19 bp, Artificial sequence
  SiRNA target sequence
ttgggaagagatgcactct

SEQ ID NO: 50188 - DNA, 19 bp, Artificial sequence
  SiRNA target sequence
tgggaagagatgcactcta

SEQ ID NO: 50189 - DNA, 19 bp, Artificial sequence
  SiRNA target sequence
gggaagagatgcactctac

SEQ ID NO: 50190 - DNA, 19 bp, Artificial sequence
  SiRNA target sequence
ggaagagatgcactctacg

SEQ ID NO: 50191 - DNA, 19 bp, Artificial sequence
  SiRNA target sequence
gaagagatgcactctacgt

SEQ ID NO: 50192 - DNA, 19 bp, Artificial sequence
  SiRNA target sequence
aagagatgcactctacgta

SEQ ID NO: 50193 - DNA, 19 bp, Artificial sequence
  SiRNA target sequence
agagatgcactctacgtaa

SEQ ID NO: 50194 - DNA, 19 bp, Artificial sequence
  SiRNA target sequence
gagatgcactctacgtaat

SEQ ID NO: 50195 - DNA, 19 bp, Artificial sequence
  SiRNA target sequence
agatgcactctacgtaatg

SEQ ID NO: 50196 - DNA, 19 bp, Artificial sequence
  SiRNA target sequence
gatgcactctacgtaatgt

SEQ ID NO: 50197 - DNA, 19 bp, Artificial sequence
  SiRNA target sequence
atgcactctacgtaatgtt

SEQ ID NO: 50198 - DNA, 19 bp, Artificial sequence
  SiRNA target sequence
tgcactctacgtaatgttg

SEQ ID NO: 50199 - DNA, 19 bp, Artificial sequence
  SiRNA target sequence
gcactctacgtaatgttgg

SEQ ID NO: 50200 - DNA, 19 bp, Artificial sequence
  SiRNA target sequence
cactctacgtaatgttggc

SEQ ID NO: 50201 - DNA, 19 bp, Artificial sequence
  SiRNA target sequence
actctacgtaatgttggct

SEQ ID NO: 50202 - DNA, 19 bp, Artificial sequence
  SiRNA target sequence
ctctacgtaatgttggcta

SEQ ID NO: 50203 - DNA, 19 bp, Artificial sequence
  SiRNA target sequence
tctacgtaatgttggctac

SEQ ID NO: 50204 - DNA, 19 bp, Artificial sequence
  SiRNA target sequence
ctacgtaatgttggctaca

SEQ ID NO: 50205 - DNA, 19 bp, Artificial sequence
  SiRNA target sequence
tacgtaatgttggctacaa

SEQ ID NO: 50206 - DNA, 19 bp, Artificial sequence
  SiRNA target sequence
acgtaatgttggctacaag

SEQ ID NO: 50207 - DNA, 19 bp, Artificial sequence
  SiRNA target sequence
cgtaatgttggctacaagt

SEQ ID NO: 50208 - DNA, 19 bp, Artificial sequence
  SiRNA target sequence
gtaatgttggctacaagtg

SEQ ID NO: 50209 - DNA, 19 bp, Artificial sequence
  SiRNA target sequence
taatgttggctacaagtgc

SEQ ID NO: 50210 - DNA, 19 bp, Artificial sequence
  SiRNA target sequence
aatgttggctacaagtgcc

SEQ ID NO: 50211 - DNA, 19 bp, Artificial sequence
  SiRNA target sequence
atgttggctacaagtgcct

SEQ ID NO: 50212 - DNA, 19 bp, Artificial sequence
  SiRNA target sequence
tgttggctacaagtgcctt

SEQ ID NO: 50213 - DNA, 19 bp, Artificial sequence
  SiRNA target sequence
gttggctacaagtgccttg

SEQ ID NO: 50214 - DNA, 19 bp, Artificial sequence
  SiRNA target sequence
ttggctacaagtgccttgt

SEQ ID NO: 50215 - DNA, 19 bp, Artificial sequence
  SiRNA target sequence
tggctacaagtgccttgta

SEQ ID NO: 50216 - DNA, 19 bp, Artificial sequence
  SiRNA target sequence
ggctacaagtgccttgtat

SEQ ID NO: 50217 - DNA, 19 bp, Artificial sequence
  SiRNA target sequence
gctacaagtgccttgtatg

SEQ ID NO: 50218 - DNA, 19 bp, Artificial sequence
  SiRNA target sequence
ctacaagtgccttgtatgt

SEQ ID NO: 50219 - DNA, 19 bp, Artificial sequence
  SiRNA target sequence
tacaagtgccttgtatgtg

SEQ ID NO: 50220 - DNA, 19 bp, Artificial sequence
  SiRNA target sequence
acaagtgccttgtatgtgt

SEQ ID NO: 50221 - DNA, 19 bp, Artificial sequence
  SiRNA target sequence
caagtgccttgtatgtgta

SEQ ID NO: 50222 - DNA, 19 bp, Artificial sequence
  SiRNA target sequence
aagtgccttgtatgtgtat

SEQ ID NO: 50223 - DNA, 19 bp, Artificial sequence
  SiRNA target sequence
agtgccttgtatgtgtatt

SEQ ID NO: 50224 - DNA, 19 bp, Artificial sequence
  SiRNA target sequence
gtgccttgtatgtgtattt

SEQ ID NO: 50225 - DNA, 19 bp, Artificial sequence
  SiRNA target sequence
tgccttgtatgtgtatttt

SEQ ID NO: 50226 - DNA, 19 bp, Artificial sequence
  SiRNA target sequence
gccttgtatgtgtatttta

SEQ ID NO: 50227 - DNA, 19 bp, Artificial sequence
  SiRNA target sequence
ccttgtatgtgtattttac

SEQ ID NO: 50228 - DNA, 19 bp, Artificial sequence
  SiRNA target sequence
cttgtatgtgtattttaca

SEQ ID NO: 50229 - DNA, 19 bp, Artificial sequence
  SiRNA target sequence
ttgtatgtgtattttacat

SEQ ID NO: 50230 - DNA, 19 bp, Artificial sequence
  SiRNA target sequence
tgtatgtgtattttacatt

SEQ ID NO: 50231 - DNA, 19 bp, Artificial sequence
  SiRNA target sequence
gtatgtgtattttacattt

SEQ ID NO: 50232 - DNA, 19 bp, Artificial sequence
  SiRNA target sequence
tatgtgtattttacatttg

SEQ ID NO: 50233 - DNA, 19 bp, Artificial sequence
  SiRNA target sequence
atgtgtattttacatttgt

SEQ ID NO: 50234 - DNA, 19 bp, Artificial sequence
  SiRNA target sequence
tgtgtattttacatttgta

SEQ ID NO: 50235 - DNA, 19 bp, Artificial sequence
  SiRNA target sequence
gtgtattttacatttgtat

SEQ ID NO: 50236 - DNA, 19 bp, Artificial sequence
  SiRNA target sequence
tgtattttacatttgtatt

SEQ ID NO: 50237 - DNA, 19 bp, Artificial sequence
  SiRNA target sequence
gtattttacatttgtattt

SEQ ID NO: 50238 - DNA, 19 bp, Artificial sequence
  SiRNA target sequence
tattttacatttgtatttt

SEQ ID NO: 50239 - DNA, 19 bp, Artificial sequence
  SiRNA target sequence
attttacatttgtattttc

SEQ ID NO: 50240 - DNA, 19 bp, Artificial sequence
  SiRNA target sequence
ttttacatttgtattttca

SEQ ID NO: 50241 - DNA, 19 bp, Artificial sequence
  SiRNA target sequence
tttacatttgtattttcaa

SEQ ID NO: 50242 - DNA, 19 bp, Artificial sequence
  SiRNA target sequence
ttacatttgtattttcaat

SEQ ID NO: 50243 - DNA, 19 bp, Artificial sequence
  SiRNA target sequence
tacatttgtattttcaata

SEQ ID NO: 50244 - DNA, 19 bp, Artificial sequence
  SiRNA target sequence
acatttgtattttcaatat

SEQ ID NO: 50245 - DNA, 19 bp, Artificial sequence
  SiRNA target sequence
catttgtattttcaatatg

SEQ ID NO: 50246 - DNA, 19 bp, Artificial sequence
  SiRNA target sequence
atttgtattttcaatatgg

SEQ ID NO: 50247 - DNA, 19 bp, Artificial sequence
  SiRNA target sequence
tttgtattttcaatatgga

SEQ ID NO: 50248 - DNA, 19 bp, Artificial sequence
  SiRNA target sequence
ttgtattttcaatatggag

SEQ ID NO: 50249 - DNA, 19 bp, Artificial sequence
  SiRNA target sequence
tgtattttcaatatggaga

SEQ ID NO: 50250 - DNA, 19 bp, Artificial sequence
  SiRNA target sequence
gtattttcaatatggagaa

SEQ ID NO: 50251 - DNA, 19 bp, Artificial sequence
  SiRNA target sequence
tattttcaatatggagaaa

SEQ ID NO: 50252 - DNA, 19 bp, Artificial sequence
  SiRNA target sequence
attttcaatatggagaaac

SEQ ID NO: 50253 - DNA, 19 bp, Artificial sequence
  SiRNA target sequence
ttttcaatatggagaaaca

SEQ ID NO: 50254 - DNA, 19 bp, Artificial sequence
  SiRNA target sequence
tttcaatatggagaaacaa

SEQ ID NO: 50255 - DNA, 19 bp, Artificial sequence
  SiRNA target sequence
ttcaatatggagaaacaat

SEQ ID NO: 50256 - DNA, 19 bp, Artificial sequence
  SiRNA target sequence
tcaatatggagaaacaata

SEQ ID NO: 50257 - DNA, 19 bp, Artificial sequence
  SiRNA target sequence
caatatggagaaacaatat

SEQ ID NO: 50258 - DNA, 19 bp, Artificial sequence
  SiRNA target sequence
aatatggagaaacaatatt

SEQ ID NO: 50259 - DNA, 19 bp, Artificial sequence
  SiRNA target sequence
atatggagaaacaatatta

SEQ ID NO: 50260 - DNA, 19 bp, Artificial sequence
  SiRNA target sequence
tatggagaaacaatattag

SEQ ID NO: 50261 - DNA, 19 bp, Artificial sequence
  SiRNA target sequence
atggagaaacaatattaga

SEQ ID NO: 50262 - DNA, 19 bp, Artificial sequence
  SiRNA target sequence
tggagaaacaatattagaa

SEQ ID NO: 50263 - DNA, 19 bp, Artificial sequence
  SiRNA target sequence
ggagaaacaatattagaag

SEQ ID NO: 50264 - DNA, 19 bp, Artificial sequence
  SiRNA target sequence
gagaaacaatattagaaga

SEQ ID NO: 50265 - DNA, 19 bp, Artificial sequence
  SiRNA target sequence
agaaacaatattagaagac

SEQ ID NO: 50266 - DNA, 19 bp, Artificial sequence
  SiRNA target sequence
gaaacaatattagaagaca

SEQ ID NO: 50267 - DNA, 19 bp, Artificial sequence
  SiRNA target sequence
aaacaatattagaagacaa

SEQ ID NO: 50268 - DNA, 19 bp, Artificial sequence
  SiRNA target sequence
aacaatattagaagacaat

SEQ ID NO: 50269 - DNA, 19 bp, Artificial sequence
  SiRNA target sequence
acaatattagaagacaata

SEQ ID NO: 50270 - DNA, 19 bp, Artificial sequence
  SiRNA target sequence
caatattagaagacaatat

SEQ ID NO: 50271 - DNA, 19 bp, Artificial sequence
  SiRNA target sequence
aatattagaagacaatata

SEQ ID NO: 50272 - DNA, 19 bp, Artificial sequence
  SiRNA target sequence
atattagaagacaatataa

SEQ ID NO: 50273 - DNA, 19 bp, Artificial sequence
  SiRNA target sequence
tattagaagacaatataat

SEQ ID NO: 50274 - DNA, 19 bp, Artificial sequence
  SiRNA target sequence
attagaagacaatataata

SEQ ID NO: 50275 - DNA, 19 bp, Artificial sequence
  SiRNA target sequence
ttagaagacaatataataa

SEQ ID NO: 50276 - DNA, 19 bp, Artificial sequence
  SiRNA target sequence
tagaagacaatataataag

SEQ ID NO: 50277 - DNA, 19 bp, Artificial sequence
  SiRNA target sequence
agaagacaatataataagt

SEQ ID NO: 50278 - DNA, 19 bp, Artificial sequence
  SiRNA target sequence
gaagacaatataataagtc

SEQ ID NO: 50279 - DNA, 19 bp, Artificial sequence
  SiRNA target sequence
aagacaatataataagtca

SEQ ID NO: 50280 - DNA, 19 bp, Artificial sequence
  SiRNA target sequence
agacaatataataagtcac

SEQ ID NO: 50281 - DNA, 19 bp, Artificial sequence
  SiRNA target sequence
gacaatataataagtcaca

SEQ ID NO: 50282 - DNA, 19 bp, Artificial sequence
  SiRNA target sequence
acaatataataagtcacag

SEQ ID NO: 50283 - DNA, 19 bp, Artificial sequence
  SiRNA target sequence
caatataataagtcacagg

SEQ ID NO: 50284 - DNA, 19 bp, Artificial sequence
  SiRNA target sequence
aatataataagtcacagga

SEQ ID NO: 50285 - DNA, 19 bp, Artificial sequence
  SiRNA target sequence
atataataagtcacaggat

SEQ ID NO: 50286 - DNA, 19 bp, Artificial sequence
  SiRNA target sequence
tataataagtcacaggata

SEQ ID NO: 50287 - DNA, 19 bp, Artificial sequence
  SiRNA target sequence
ataataagtcacaggataa

SEQ ID NO: 50288 - DNA, 19 bp, Artificial sequence
  SiRNA target sequence
taataagtcacaggataaa

SEQ ID NO: 50289 - DNA, 19 bp, Artificial sequence
  SiRNA target sequence
aataagtcacaggataaat

SEQ ID NO: 50290 - DNA, 19 bp, Artificial sequence
  SiRNA target sequence
ataagtcacaggataaatt

SEQ ID NO: 50291 - DNA, 19 bp, Artificial sequence
  SiRNA target sequence
taagtcacaggataaatta

SEQ ID NO: 50292 - DNA, 19 bp, Artificial sequence
  SiRNA target sequence
aagtcacaggataaattat

SEQ ID NO: 50293 - DNA, 19 bp, Artificial sequence
  SiRNA target sequence
agtcacaggataaattatc

SEQ ID NO: 50294 - DNA, 19 bp, Artificial sequence
  SiRNA target sequence
gtcacaggataaattatcg

SEQ ID NO: 50295 - DNA, 19 bp, Artificial sequence
  SiRNA target sequence
tcacaggataaattatcga

SEQ ID NO: 50296 - DNA, 19 bp, Artificial sequence
  SiRNA target sequence
cacaggataaattatcgaa

SEQ ID NO: 50297 - DNA, 19 bp, Artificial sequence
  SiRNA target sequence
acaggataaattatcgaat

SEQ ID NO: 50298 - DNA, 19 bp, Artificial sequence
  SiRNA target sequence
caggataaattatcgaata

SEQ ID NO: 50299 - DNA, 19 bp, Artificial sequence
  SiRNA target sequence
aggataaattatcgaataa

SEQ ID NO: 50300 - DNA, 19 bp, Artificial sequence
  SiRNA target sequence
ggataaattatcgaataaa

SEQ ID NO: 50301 - DNA, 19 bp, Artificial sequence
  SiRNA target sequence
gataaattatcgaataaat

SEQ ID NO: 50302 - DNA, 19 bp, Artificial sequence
  SiRNA target sequence
ataaattatcgaataaatt

SEQ ID NO: 50303 - DNA, 19 bp, Artificial sequence
  SiRNA target sequence
taaattatcgaataaatta

SEQ ID NO: 50304 - DNA, 19 bp, Artificial sequence
  SiRNA target sequence
aaattatcgaataaattac

SEQ ID NO: 50305 - DNA, 19 bp, Artificial sequence
  SiRNA target sequence
aattatcgaataaattaca

SEQ ID NO: 50306 - DNA, 19 bp, Artificial sequence
  SiRNA target sequence
attatcgaataaattacaa

SEQ ID NO: 50307 - DNA, 19 bp, Artificial sequence
  SiRNA target sequence
ttatcgaataaattacaag

SEQ ID NO: 50308 - DNA, 19 bp, Artificial sequence
  SiRNA target sequence
tatcgaataaattacaaga

SEQ ID NO: 50309 - DNA, 19 bp, Artificial sequence
  SiRNA target sequence
atcgaataaattacaagat

SEQ ID NO: 50310 - DNA, 19 bp, Artificial sequence
  SiRNA target sequence
tcgaataaattacaagatt

SEQ ID NO: 50311 - DNA, 19 bp, Artificial sequence
  SiRNA target sequence
cgaataaattacaagattt

SEQ ID NO: 50312 - DNA, 19 bp, Artificial sequence
  SiRNA target sequence
gaataaattacaagatttt

SEQ ID NO: 50313 - DNA, 19 bp, Artificial sequence
  SiRNA target sequence
aataaattacaagattttt

SEQ ID NO: 50314 - DNA, 19 bp, Artificial sequence
  SiRNA target sequence
ataaattacaagatttttt

SEQ ID NO: 50315 - DNA, 19 bp, Artificial sequence
  SiRNA target sequence
taaattacaagatttttta

SEQ ID NO: 50316 - DNA, 19 bp, Artificial sequence
  SiRNA target sequence
aaattacaagattttttag

SEQ ID NO: 50317 - DNA, 19 bp, Artificial sequence
  SiRNA target sequence
aattacaagattttttagc

SEQ ID NO: 50318 - DNA, 19 bp, Artificial sequence
  SiRNA target sequence
attacaagattttttagct

SEQ ID NO: 50319 - DNA, 19 bp, Artificial sequence
  SiRNA target sequence
ttacaagattttttagcta

SEQ ID NO: 50320 - DNA, 19 bp, Artificial sequence
  SiRNA target sequence
tacaagattttttagctaa

SEQ ID NO: 50321 - DNA, 19 bp, Artificial sequence
  SiRNA target sequence
acaagattttttagctaat

SEQ ID NO: 50322 - DNA, 19 bp, Artificial sequence
  SiRNA target sequence
caagattttttagctaatc

SEQ ID NO: 50323 - DNA, 19 bp, Artificial sequence
  SiRNA target sequence
aagattttttagctaatca

SEQ ID NO: 50324 - DNA, 19 bp, Artificial sequence
  SiRNA target sequence
agattttttagctaatcat

SEQ ID NO: 50325 - DNA, 19 bp, Artificial sequence
  SiRNA target sequence
gattttttagctaatcatg

SEQ ID NO: 50326 - DNA, 19 bp, Artificial sequence
  SiRNA target sequence
attttttagctaatcatga

SEQ ID NO: 50327 - DNA, 19 bp, Artificial sequence
  SiRNA target sequence
ttttttagctaatcatgaa

SEQ ID NO: 50328 - DNA, 19 bp, Artificial sequence
  SiRNA target sequence
tttttagctaatcatgaaa

SEQ ID NO: 50329 - DNA, 19 bp, Artificial sequence
  SiRNA target sequence
ttttagctaatcatgaaac

SEQ ID NO: 50330 - DNA, 19 bp, Artificial sequence
  SiRNA target sequence
tttagctaatcatgaaaca

SEQ ID NO: 50331 - DNA, 19 bp, Artificial sequence
  SiRNA target sequence
ttagctaatcatgaaacaa

SEQ ID NO: 50332 - DNA, 19 bp, Artificial sequence
  SiRNA target sequence
tagctaatcatgaaacaat

SEQ ID NO: 50333 - DNA, 19 bp, Artificial sequence
  SiRNA target sequence
agctaatcatgaaacaatt

SEQ ID NO: 50334 - DNA, 19 bp, Artificial sequence
  SiRNA target sequence
gctaatcatgaaacaatta

SEQ ID NO: 50335 - DNA, 19 bp, Artificial sequence
  SiRNA target sequence
ctaatcatgaaacaattaa

SEQ ID NO: 50336 - DNA, 19 bp, Artificial sequence
  SiRNA target sequence
taatcatgaaacaattaaa

SEQ ID NO: 50337 - DNA, 19 bp, Artificial sequence
  SiRNA target sequence
aatcatgaaacaattaaag

SEQ ID NO: 50338 - DNA, 19 bp, Artificial sequence
  SiRNA target sequence
atcatgaaacaattaaagc

SEQ ID NO: 50339 - DNA, 19 bp, Artificial sequence
  SiRNA target sequence
tcatgaaacaattaaagcc

SEQ ID NO: 50340 - DNA, 19 bp, Artificial sequence
  SiRNA target sequence
catgaaacaattaaagcct

SEQ ID NO: 50341 - DNA, 19 bp, Artificial sequence
  SiRNA target sequence
atgaaacaattaaagccta

SEQ ID NO: 50342 - DNA, 19 bp, Artificial sequence
  SiRNA target sequence
tgaaacaattaaagcctat

SEQ ID NO: 50343 - DNA, 19 bp, Artificial sequence
  SiRNA target sequence
gaaacaattaaagcctata

SEQ ID NO: 50344 - DNA, 19 bp, Artificial sequence
  SiRNA target sequence
aaacaattaaagcctataa

SEQ ID NO: 50345 - DNA, 19 bp, Artificial sequence
  SiRNA target sequence
aacaattaaagcctataat

SEQ ID NO: 50346 - DNA, 19 bp, Artificial sequence
  SiRNA target sequence
acaattaaagcctataata

SEQ ID NO: 50347 - DNA, 19 bp, Artificial sequence
  SiRNA target sequence
caattaaagcctataatat

SEQ ID NO: 50348 - DNA, 19 bp, Artificial sequence
  SiRNA target sequence
aattaaagcctataatatg

SEQ ID NO: 50349 - DNA, 19 bp, Artificial sequence
  SiRNA target sequence
attaaagcctataatatgg

SEQ ID NO: 50350 - DNA, 19 bp, Artificial sequence
  SiRNA target sequence
ttaaagcctataatatgga

SEQ ID NO: 50351 - DNA, 19 bp, Artificial sequence
  SiRNA target sequence
taaagcctataatatggaa

SEQ ID NO: 50352 - DNA, 19 bp, Artificial sequence
  SiRNA target sequence
aaagcctataatatggaag

SEQ ID NO: 50353 - DNA, 19 bp, Artificial sequence
  SiRNA target sequence
aagcctataatatggaaga

SEQ ID NO: 50354 - DNA, 19 bp, Artificial sequence
  SiRNA target sequence
agcctataatatggaagaa

SEQ ID NO: 50355 - DNA, 19 bp, Artificial sequence
  SiRNA target sequence
gcctataatatggaagaag

SEQ ID NO: 50356 - DNA, 19 bp, Artificial sequence
  SiRNA target sequence
cctataatatggaagaaga

SEQ ID NO: 50357 - DNA, 19 bp, Artificial sequence
  SiRNA target sequence
ctataatatggaagaagaa

SEQ ID NO: 50358 - DNA, 19 bp, Artificial sequence
  SiRNA target sequence
tataatatggaagaagaaa

SEQ ID NO: 50359 - DNA, 19 bp, Artificial sequence
  SiRNA target sequence
ataatatggaagaagaaac

SEQ ID NO: 50360 - DNA, 19 bp, Artificial sequence
  SiRNA target sequence
taatatggaagaagaaact

SEQ ID NO: 50361 - DNA, 19 bp, Artificial sequence
  SiRNA target sequence
aatatggaagaagaaacta

SEQ ID NO: 50362 - DNA, 19 bp, Artificial sequence
  SiRNA target sequence
atatggaagaagaaactat

SEQ ID NO: 50363 - DNA, 19 bp, Artificial sequence
  SiRNA target sequence
tatggaagaagaaactatt

SEQ ID NO: 50364 - DNA, 19 bp, Artificial sequence
  SiRNA target sequence
atggaagaagaaactatta

SEQ ID NO: 50365 - DNA, 19 bp, Artificial sequence
  SiRNA target sequence
tggaagaagaaactattac

SEQ ID NO: 50366 - DNA, 19 bp, Artificial sequence
  SiRNA target sequence
ggaagaagaaactattaca

SEQ ID NO: 50367 - DNA, 19 bp, Artificial sequence
  SiRNA target sequence
gaagaagaaactattacat

SEQ ID NO: 50368 - DNA, 19 bp, Artificial sequence
  SiRNA target sequence
aagaagaaactattacata

SEQ ID NO: 50369 - DNA, 19 bp, Artificial sequence
  SiRNA target sequence
agaagaaactattacatat

SEQ ID NO: 50370 - DNA, 19 bp, Artificial sequence
  SiRNA target sequence
gaagaaactattacatatt

SEQ ID NO: 50371 - DNA, 19 bp, Artificial sequence
  SiRNA target sequence
aagaaactattacatattt

SEQ ID NO: 50372 - DNA, 19 bp, Artificial sequence
  SiRNA target sequence
agaaactattacatatttt

SEQ ID NO: 50373 - DNA, 19 bp, Artificial sequence
  SiRNA target sequence
gaaactattacatattttg

SEQ ID NO: 50374 - DNA, 19 bp, Artificial sequence
  SiRNA target sequence
aaactattacatattttga

SEQ ID NO: 50375 - DNA, 19 bp, Artificial sequence
  SiRNA target sequence
aactattacatattttgat

SEQ ID NO: 50376 - DNA, 19 bp, Artificial sequence
  SiRNA target sequence
actattacatattttgatg

SEQ ID NO: 50377 - DNA, 19 bp, Artificial sequence
  SiRNA target sequence
ctattacatattttgatga

SEQ ID NO: 50378 - DNA, 19 bp, Artificial sequence
  SiRNA target sequence
tattacatattttgatgaa

SEQ ID NO: 50379 - DNA, 19 bp, Artificial sequence
  SiRNA target sequence
attacatattttgatgaaa

SEQ ID NO: 50380 - DNA, 19 bp, Artificial sequence
  SiRNA target sequence
ttacatattttgatgaaaa

SEQ ID NO: 50381 - DNA, 19 bp, Artificial sequence
  SiRNA target sequence
tacatattttgatgaaaat

SEQ ID NO: 50382 - DNA, 19 bp, Artificial sequence
  SiRNA target sequence
acatattttgatgaaaatc

SEQ ID NO: 50383 - DNA, 19 bp, Artificial sequence
  SiRNA target sequence
catattttgatgaaaatca

SEQ ID NO: 50384 - DNA, 19 bp, Artificial sequence
  SiRNA target sequence
atattttgatgaaaatcaa

SEQ ID NO: 50385 - DNA, 19 bp, Artificial sequence
  SiRNA target sequence
tattttgatgaaaatcaaa

SEQ ID NO: 50386 - DNA, 19 bp, Artificial sequence
  SiRNA target sequence
attttgatgaaaatcaaaa

SEQ ID NO: 50387 - DNA, 19 bp, Artificial sequence
  SiRNA target sequence
ttttgatgaaaatcaaaaa

SEQ ID NO: 50388 - DNA, 19 bp, Artificial sequence
  SiRNA target sequence
tttgatgaaaatcaaaaac

SEQ ID NO: 50389 - DNA, 19 bp, Artificial sequence
  SiRNA target sequence
ttgatgaaaatcaaaaacc

SEQ ID NO: 50390 - DNA, 19 bp, Artificial sequence
  SiRNA target sequence
tgatgaaaatcaaaaaccg

SEQ ID NO: 50391 - DNA, 19 bp, Artificial sequence
  SiRNA target sequence
gatgaaaatcaaaaaccgg

SEQ ID NO: 50392 - DNA, 19 bp, Artificial sequence
  SiRNA target sequence
atgaaaatcaaaaaccggt

SEQ ID NO: 50393 - DNA, 19 bp, Artificial sequence
  SiRNA target sequence
tgaaaatcaaaaaccggta

SEQ ID NO: 50394 - DNA, 19 bp, Artificial sequence
  SiRNA target sequence
gaaaatcaaaaaccggtag

SEQ ID NO: 50395 - DNA, 19 bp, Artificial sequence
  SiRNA target sequence
aaaatcaaaaaccggtaga

SEQ ID NO: 50396 - DNA, 19 bp, Artificial sequence
  SiRNA target sequence
aaatcaaaaaccggtagaa

SEQ ID NO: 50397 - DNA, 19 bp, Artificial sequence
  SiRNA target sequence
aatcaaaaaccggtagaat

SEQ ID NO: 50398 - DNA, 19 bp, Artificial sequence
  SiRNA target sequence
atcaaaaaccggtagaata

SEQ ID NO: 50399 - DNA, 19 bp, Artificial sequence
  SiRNA target sequence
tcaaaaaccggtagaatat

SEQ ID NO: 50400 - DNA, 19 bp, Artificial sequence
  SiRNA target sequence
caaaaaccggtagaatatt

SEQ ID NO: 50401 - DNA, 19 bp, Artificial sequence
  SiRNA target sequence
aaaaaccggtagaatattt

SEQ ID NO: 50402 - DNA, 19 bp, Artificial sequence
  SiRNA target sequence
aaaaccggtagaatatttt

SEQ ID NO: 50403 - DNA, 19 bp, Artificial sequence
  SiRNA target sequence
aaaccggtagaatattttg

SEQ ID NO: 50404 - DNA, 19 bp, Artificial sequence
  SiRNA target sequence
aaccggtagaatattttgg

SEQ ID NO: 50405 - DNA, 19 bp, Artificial sequence
  SiRNA target sequence
accggtagaatattttggg

SEQ ID NO: 50406 - DNA, 19 bp, Artificial sequence
  SiRNA target sequence
ccggtagaatattttgggg

SEQ ID NO: 50407 - DNA, 19 bp, Artificial sequence
  SiRNA target sequence
cggtagaatattttggggt

SEQ ID NO: 50408 - DNA, 19 bp, Artificial sequence
  SiRNA target sequence
ggtagaatattttggggta

SEQ ID NO: 50409 - DNA, 19 bp, Artificial sequence
  SiRNA target sequence
gtagaatattttggggtaa

SEQ ID NO: 50410 - DNA, 19 bp, Artificial sequence
  SiRNA target sequence
tagaatattttggggtaaa

SEQ ID NO: 50411 - DNA, 19 bp, Artificial sequence
  SiRNA target sequence
agaatattttggggtaaag

SEQ ID NO: 50412 - DNA, 19 bp, Artificial sequence
  SiRNA target sequence
gaatattttggggtaaagt

SEQ ID NO: 50413 - DNA, 19 bp, Artificial sequence
  SiRNA target sequence
aatattttggggtaaagtc

SEQ ID NO: 50414 - DNA, 19 bp, Artificial sequence
  SiRNA target sequence
atattttggggtaaagtct

SEQ ID NO: 50415 - DNA, 19 bp, Artificial sequence
  SiRNA target sequence
tattttggggtaaagtctc

SEQ ID NO: 50416 - DNA, 19 bp, Artificial sequence
  SiRNA target sequence
attttggggtaaagtctca

SEQ ID NO: 50417 - DNA, 19 bp, Artificial sequence
  SiRNA target sequence
ttttggggtaaagtctcac

SEQ ID NO: 50418 - DNA, 19 bp, Artificial sequence
  SiRNA target sequence
tttggggtaaagtctcaca

SEQ ID NO: 50419 - DNA, 19 bp, Artificial sequence
  SiRNA target sequence
ttggggtaaagtctcacag

SEQ ID NO: 50420 - DNA, 19 bp, Artificial sequence
  SiRNA target sequence
tggggtaaagtctcacaga

SEQ ID NO: 50421 - DNA, 19 bp, Artificial sequence
  SiRNA target sequence
ggggtaaagtctcacagaa

SEQ ID NO: 50422 - DNA, 19 bp, Artificial sequence
  SiRNA target sequence
gggtaaagtctcacagaat

SEQ ID NO: 50423 - DNA, 19 bp, Artificial sequence
  SiRNA target sequence
ggtaaagtctcacagaatt

SEQ ID NO: 50424 - DNA, 19 bp, Artificial sequence
  SiRNA target sequence
gtaaagtctcacagaattt

SEQ ID NO: 50425 - DNA, 19 bp, Artificial sequence
  SiRNA target sequence
taaagtctcacagaatttt

SEQ ID NO: 50426 - DNA, 19 bp, Artificial sequence
  SiRNA target sequence
aaagtctcacagaattttg

SEQ ID NO: 50427 - DNA, 19 bp, Artificial sequence
  SiRNA target sequence
aagtctcacagaattttgt

SEQ ID NO: 50428 - DNA, 19 bp, Artificial sequence
  SiRNA target sequence
agtctcacagaattttgtt

SEQ ID NO: 50429 - DNA, 19 bp, Artificial sequence
  SiRNA target sequence
gtctcacagaattttgttc

SEQ ID NO: 50430 - DNA, 19 bp, Artificial sequence
  SiRNA target sequence
tctcacagaattttgttct

SEQ ID NO: 50431 - DNA, 19 bp, Artificial sequence
  SiRNA target sequence
ctcacagaattttgttctc

SEQ ID NO: 50432 - DNA, 19 bp, Artificial sequence
  SiRNA target sequence
tcacagaattttgttctct

SEQ ID NO: 50433 - DNA, 19 bp, Artificial sequence
  SiRNA target sequence
cacagaattttgttctctc

SEQ ID NO: 50434 - DNA, 19 bp, Artificial sequence
  SiRNA target sequence
acagaattttgttctctct

SEQ ID NO: 50435 - DNA, 19 bp, Artificial sequence
  SiRNA target sequence
cagaattttgttctctctt

SEQ ID NO: 50436 - DNA, 19 bp, Artificial sequence
  SiRNA target sequence
agaattttgttctctcttt

SEQ ID NO: 50437 - DNA, 19 bp, Artificial sequence
  SiRNA target sequence
gaattttgttctctctttt

SEQ ID NO: 50438 - DNA, 19 bp, Artificial sequence
  SiRNA target sequence
aattttgttctctctttta

SEQ ID NO: 50439 - DNA, 19 bp, Artificial sequence
  SiRNA target sequence
attttgttctctcttttat

SEQ ID NO: 50440 - DNA, 19 bp, Artificial sequence
  SiRNA target sequence
ttttgttctctcttttata

SEQ ID NO: 50441 - DNA, 19 bp, Artificial sequence
  SiRNA target sequence
tttgttctctcttttatat

SEQ ID NO: 50442 - DNA, 19 bp, Artificial sequence
  SiRNA target sequence
ttgttctctcttttatata

SEQ ID NO: 50443 - DNA, 19 bp, Artificial sequence
  SiRNA target sequence
tgttctctcttttatatat

SEQ ID NO: 50444 - DNA, 19 bp, Artificial sequence
  SiRNA target sequence
gttctctcttttatatata

SEQ ID NO: 50445 - DNA, 19 bp, Artificial sequence
  SiRNA target sequence
ttctctcttttatatatac

SEQ ID NO: 50446 - DNA, 19 bp, Artificial sequence
  SiRNA target sequence
tctctcttttatatataca

SEQ ID NO: 50447 - DNA, 19 bp, Artificial sequence
  SiRNA target sequence
ctctcttttatatatacaa

SEQ ID NO: 50448 - DNA, 19 bp, Artificial sequence
  SiRNA target sequence
tctcttttatatatacaaa

SEQ ID NO: 50449 - DNA, 19 bp, Artificial sequence
  SiRNA target sequence
ctcttttatatatacaaaa

SEQ ID NO: 50450 - DNA, 19 bp, Artificial sequence
  SiRNA target sequence
tcttttatatatacaaaaa

SEQ ID NO: 50451 - DNA, 19 bp, Artificial sequence
  SiRNA target sequence
cttttatatatacaaaaaa

SEQ ID NO: 50452 - DNA, 19 bp, Artificial sequence
  SiRNA target sequence
ttttatatatacaaaaaat

SEQ ID NO: 50453 - DNA, 19 bp, Artificial sequence
  SiRNA target sequence
tttatatatacaaaaaatg

SEQ ID NO: 50454 - DNA, 19 bp, Artificial sequence
  SiRNA target sequence
ttatatatacaaaaaatga

SEQ ID NO: 50455 - DNA, 19 bp, Artificial sequence
  SiRNA target sequence
tatatatacaaaaaatgac

SEQ ID NO: 50456 - DNA, 19 bp, Artificial sequence
  SiRNA target sequence
atatatacaaaaaatgaca

SEQ ID NO: 50457 - DNA, 19 bp, Artificial sequence
  SiRNA target sequence
tatatacaaaaaatgacat

SEQ ID NO: 50458 - DNA, 19 bp, Artificial sequence
  SiRNA target sequence
atatacaaaaaatgacatt

SEQ ID NO: 50459 - DNA, 19 bp, Artificial sequence
  SiRNA target sequence
tatacaaaaaatgacattt

SEQ ID NO: 50460 - DNA, 19 bp, Artificial sequence
  SiRNA target sequence
atacaaaaaatgacatttg

SEQ ID NO: 50461 - DNA, 19 bp, Artificial sequence
  SiRNA target sequence
tacaaaaaatgacatttgc

SEQ ID NO: 50462 - DNA, 19 bp, Artificial sequence
  SiRNA target sequence
acaaaaaatgacatttgcg

SEQ ID NO: 50463 - DNA, 19 bp, Artificial sequence
  SiRNA target sequence
caaaaaatgacatttgcga

SEQ ID NO: 50464 - DNA, 19 bp, Artificial sequence
  SiRNA target sequence
aaaaaatgacatttgcgat

SEQ ID NO: 50465 - DNA, 19 bp, Artificial sequence
  SiRNA target sequence
aaaaatgacatttgcgata

SEQ ID NO: 50466 - DNA, 19 bp, Artificial sequence
  SiRNA target sequence
aaaatgacatttgcgatac

SEQ ID NO: 50467 - DNA, 19 bp, Artificial sequence
  SiRNA target sequence
aaatgacatttgcgataca

SEQ ID NO: 50468 - DNA, 19 bp, Artificial sequence
  SiRNA target sequence
aatgacatttgcgatacag

SEQ ID NO: 50469 - DNA, 19 bp, Artificial sequence
  SiRNA target sequence
atgacatttgcgatacagg

SEQ ID NO: 50470 - DNA, 19 bp, Artificial sequence
  SiRNA target sequence
tgacatttgcgatacaggc

SEQ ID NO: 50471 - DNA, 19 bp, Artificial sequence
  SiRNA target sequence
gacatttgcgatacaggca

SEQ ID NO: 50472 - DNA, 19 bp, Artificial sequence
  SiRNA target sequence
acatttgcgatacaggcaa

SEQ ID NO: 50473 - DNA, 19 bp, Artificial sequence
  SiRNA target sequence
catttgcgatacaggcaat

SEQ ID NO: 50474 - DNA, 19 bp, Artificial sequence
  SiRNA target sequence
atttgcgatacaggcaatt

SEQ ID NO: 50475 - DNA, 19 bp, Artificial sequence
  SiRNA target sequence
tttgcgatacaggcaatta

SEQ ID NO: 50476 - DNA, 19 bp, Artificial sequence
  SiRNA target sequence
ttgcgatacaggcaattat

SEQ ID NO: 50477 - DNA, 19 bp, Artificial sequence
  SiRNA target sequence
tgcgatacaggcaattatt

SEQ ID NO: 50478 - DNA, 19 bp, Artificial sequence
  SiRNA target sequence
gcgatacaggcaattatta

SEQ ID NO: 50479 - DNA, 19 bp, Artificial sequence
  SiRNA target sequence
cgatacaggcaattattat

SEQ ID NO: 50480 - DNA, 19 bp, Artificial sequence
  SiRNA target sequence
gatacaggcaattattatt

SEQ ID NO: 50481 - DNA, 19 bp, Artificial sequence
  SiRNA target sequence
atacaggcaattattatta

SEQ ID NO: 50482 - DNA, 19 bp, Artificial sequence
  SiRNA target sequence
tacaggcaattattattat

SEQ ID NO: 50483 - DNA, 19 bp, Artificial sequence
  SiRNA target sequence
acaggcaattattattatc

SEQ ID NO: 50484 - DNA, 19 bp, Artificial sequence
  SiRNA target sequence
caggcaattattattatca

SEQ ID NO: 50485 - DNA, 19 bp, Artificial sequence
  SiRNA target sequence
aggcaattattattatcac

SEQ ID NO: 50486 - DNA, 19 bp, Artificial sequence
  SiRNA target sequence
ggcaattattattatcaca

SEQ ID NO: 50487 - DNA, 19 bp, Artificial sequence
  SiRNA target sequence
gcaattattattatcacat

SEQ ID NO: 50488 - DNA, 19 bp, Artificial sequence
  SiRNA target sequence
caattattattatcacatt

SEQ ID NO: 50489 - DNA, 19 bp, Artificial sequence
  SiRNA target sequence
aattattattatcacatta

SEQ ID NO: 50490 - DNA, 19 bp, Artificial sequence
  SiRNA target sequence
attattattatcacattag

SEQ ID NO: 50491 - DNA, 19 bp, Artificial sequence
  SiRNA target sequence
ttattattatcacattagg

SEQ ID NO: 50492 - DNA, 19 bp, Artificial sequence
  SiRNA target sequence
tattattatcacattagga

SEQ ID NO: 50493 - DNA, 19 bp, Artificial sequence
  SiRNA target sequence
attattatcacattaggat

SEQ ID NO: 50494 - DNA, 19 bp, Artificial sequence
  SiRNA target sequence
ttattatcacattaggatc

SEQ ID NO: 50495 - DNA, 19 bp, Artificial sequence
  SiRNA target sequence
tattatcacattaggatct

SEQ ID NO: 50496 - DNA, 19 bp, Artificial sequence
  SiRNA target sequence
attatcacattaggatctt

SEQ ID NO: 50497 - DNA, 19 bp, Artificial sequence
  SiRNA target sequence
ttatcacattaggatcttt

SEQ ID NO: 50498 - DNA, 19 bp, Artificial sequence
  SiRNA target sequence
tatcacattaggatctttt

SEQ ID NO: 50499 - DNA, 19 bp, Artificial sequence
  SiRNA target sequence
atcacattaggatcttttg

SEQ ID NO: 50500 - DNA, 19 bp, Artificial sequence
  SiRNA target sequence
tcacattaggatcttttgg

SEQ ID NO: 50501 - DNA, 19 bp, Artificial sequence
  SiRNA target sequence
cacattaggatcttttgga

SEQ ID NO: 50502 - DNA, 19 bp, Artificial sequence
  SiRNA target sequence
acattaggatcttttggat

SEQ ID NO: 50503 - DNA, 19 bp, Artificial sequence
  SiRNA target sequence
cattaggatcttttggata

SEQ ID NO: 50504 - DNA, 19 bp, Artificial sequence
  SiRNA target sequence
attaggatcttttggatat

SEQ ID NO: 50505 - DNA, 19 bp, Artificial sequence
  SiRNA target sequence
ttaggatcttttggatatt

SEQ ID NO: 50506 - DNA, 19 bp, Artificial sequence
  SiRNA target sequence
taggatcttttggatattt

SEQ ID NO: 50507 - DNA, 19 bp, Artificial sequence
  SiRNA target sequence
aggatcttttggatatttt

SEQ ID NO: 50508 - DNA, 19 bp, Artificial sequence
  SiRNA target sequence
ggatcttttggatattttc

SEQ ID NO: 50509 - DNA, 19 bp, Artificial sequence
  SiRNA target sequence
gatcttttggatattttcc

SEQ ID NO: 50510 - DNA, 19 bp, Artificial sequence
  SiRNA target sequence
atcttttggatattttccg

SEQ ID NO: 50511 - DNA, 19 bp, Artificial sequence
  SiRNA target sequence
tcttttggatattttccga

SEQ ID NO: 50512 - DNA, 19 bp, Artificial sequence
  SiRNA target sequence
cttttggatattttccgat

SEQ ID NO: 50513 - DNA, 19 bp, Artificial sequence
  SiRNA target sequence
ttttggatattttccgatt

SEQ ID NO: 50514 - DNA, 19 bp, Artificial sequence
  SiRNA target sequence
tttggatattttccgatta

SEQ ID NO: 50515 - DNA, 19 bp, Artificial sequence
  SiRNA target sequence
ttggatattttccgattaa

SEQ ID NO: 50516 - DNA, 19 bp, Artificial sequence
  SiRNA target sequence
tggatattttccgattaaa

SEQ ID NO: 50517 - DNA, 19 bp, Artificial sequence
  SiRNA target sequence
ggatattttccgattaaat

SEQ ID NO: 50518 - DNA, 19 bp, Artificial sequence
  SiRNA target sequence
gatattttccgattaaatt

SEQ ID NO: 50519 - DNA, 19 bp, Artificial sequence
  SiRNA target sequence
atattttccgattaaatta

SEQ ID NO: 50520 - DNA, 19 bp, Artificial sequence
  SiRNA target sequence
tattttccgattaaattat

SEQ ID NO: 50521 - DNA, 19 bp, Artificial sequence
  SiRNA target sequence
attttccgattaaattatc

SEQ ID NO: 50522 - DNA, 19 bp, Artificial sequence
  SiRNA target sequence
ttttccgattaaattatcc

SEQ ID NO: 50523 - DNA, 19 bp, Artificial sequence
  SiRNA target sequence
tttccgattaaattatcct

SEQ ID NO: 50524 - DNA, 19 bp, Artificial sequence
  SiRNA target sequence
ttccgattaaattatcctc

SEQ ID NO: 50525 - DNA, 19 bp, Artificial sequence
  SiRNA target sequence
tccgattaaattatcctct

SEQ ID NO: 50526 - DNA, 19 bp, Artificial sequence
  SiRNA target sequence
ccgattaaattatcctctc

SEQ ID NO: 50527 - DNA, 19 bp, Artificial sequence
  SiRNA target sequence
cgattaaattatcctctca

SEQ ID NO: 50528 - DNA, 19 bp, Artificial sequence
  SiRNA target sequence
gattaaattatcctctcaa

SEQ ID NO: 50529 - DNA, 19 bp, Artificial sequence
  SiRNA target sequence
attaaattatcctctcaac

SEQ ID NO: 50530 - DNA, 19 bp, Artificial sequence
  SiRNA target sequence
ttaaattatcctctcaaca

SEQ ID NO: 50531 - DNA, 19 bp, Artificial sequence
  SiRNA target sequence
taaattatcctctcaacag

SEQ ID NO: 50532 - DNA, 19 bp, Artificial sequence
  SiRNA target sequence
aaattatcctctcaacagt

SEQ ID NO: 50533 - DNA, 19 bp, Artificial sequence
  SiRNA target sequence
aattatcctctcaacagtt

SEQ ID NO: 50534 - DNA, 19 bp, Artificial sequence
  SiRNA target sequence
attatcctctcaacagtta

SEQ ID NO: 50535 - DNA, 19 bp, Artificial sequence
  SiRNA target sequence
ttatcctctcaacagttag

SEQ ID NO: 50536 - DNA, 19 bp, Artificial sequence
  SiRNA target sequence
tatcctctcaacagttagt

SEQ ID NO: 50537 - DNA, 19 bp, Artificial sequence
  SiRNA target sequence
atcctctcaacagttagtc

SEQ ID NO: 50538 - DNA, 19 bp, Artificial sequence
  SiRNA target sequence
tcctctcaacagttagtct

SEQ ID NO: 50539 - DNA, 19 bp, Artificial sequence
  SiRNA target sequence
cctctcaacagttagtctt

SEQ ID NO: 50540 - DNA, 19 bp, Artificial sequence
  SiRNA target sequence
ctctcaacagttagtcttt

SEQ ID NO: 50541 - DNA, 19 bp, Artificial sequence
  SiRNA target sequence
tctcaacagttagtctttt

SEQ ID NO: 50542 - DNA, 19 bp, Artificial sequence
  SiRNA target sequence
ctcaacagttagtctttta

SEQ ID NO: 50543 - DNA, 19 bp, Artificial sequence
  SiRNA target sequence
tcaacagttagtcttttat

SEQ ID NO: 50544 - DNA, 19 bp, Artificial sequence
  SiRNA target sequence
caacagttagtcttttata

SEQ ID NO: 50545 - DNA, 19 bp, Artificial sequence
  SiRNA target sequence
aacagttagtcttttatat

SEQ ID NO: 50546 - DNA, 19 bp, Artificial sequence
  SiRNA target sequence
acagttagtcttttatatt

SEQ ID NO: 50547 - DNA, 19 bp, Artificial sequence
  SiRNA target sequence
cagttagtcttttatattt

SEQ ID NO: 50548 - DNA, 19 bp, Artificial sequence
  SiRNA target sequence
agttagtcttttatatttc

SEQ ID NO: 50549 - DNA, 19 bp, Artificial sequence
  SiRNA target sequence
gttagtcttttatatttcg

SEQ ID NO: 50550 - DNA, 19 bp, Artificial sequence
  SiRNA target sequence
ttagtcttttatatttcga

SEQ ID NO: 50551 - DNA, 19 bp, Artificial sequence
  SiRNA target sequence
tagtcttttatatttcgat

SEQ ID NO: 50552 - DNA, 19 bp, Artificial sequence
  SiRNA target sequence
agtcttttatatttcgatt

SEQ ID NO: 50553 - DNA, 19 bp, Artificial sequence
  SiRNA target sequence
gtcttttatatttcgatta

SEQ ID NO: 50554 - DNA, 19 bp, Artificial sequence
  SiRNA target sequence
tcttttatatttcgattag

SEQ ID NO: 50555 - DNA, 19 bp, Artificial sequence
  SiRNA target sequence
cttttatatttcgattagt

SEQ ID NO: 50556 - DNA, 19 bp, Artificial sequence
  SiRNA target sequence
ttttatatttcgattagta

SEQ ID NO: 50557 - DNA, 19 bp, Artificial sequence
  SiRNA target sequence
tttatatttcgattagtaa

SEQ ID NO: 50558 - DNA, 19 bp, Artificial sequence
  SiRNA target sequence
ttatatttcgattagtaaa

SEQ ID NO: 50559 - DNA, 19 bp, Artificial sequence
  SiRNA target sequence
tatatttcgattagtaaaa

SEQ ID NO: 50560 - DNA, 19 bp, Artificial sequence
  SiRNA target sequence
atatttcgattagtaaaac

SEQ ID NO: 50561 - DNA, 19 bp, Artificial sequence
  SiRNA target sequence
tatttcgattagtaaaacg

SEQ ID NO: 50562 - DNA, 19 bp, Artificial sequence
  SiRNA target sequence
atttcgattagtaaaacgt

SEQ ID NO: 50563 - DNA, 19 bp, Artificial sequence
  SiRNA target sequence
tttcgattagtaaaacgtt

SEQ ID NO: 50564 - DNA, 19 bp, Artificial sequence
  SiRNA target sequence
ttcgattagtaaaacgttg

SEQ ID NO: 50565 - DNA, 19 bp, Artificial sequence
  SiRNA target sequence
tcgattagtaaaacgttga

SEQ ID NO: 50566 - DNA, 19 bp, Artificial sequence
  SiRNA target sequence
cgattagtaaaacgttgac

SEQ ID NO: 50567 - DNA, 19 bp, Artificial sequence
  SiRNA target sequence
gattagtaaaacgttgaca

SEQ ID NO: 50568 - DNA, 19 bp, Artificial sequence
  SiRNA target sequence
attagtaaaacgttgacaa

SEQ ID NO: 50569 - DNA, 19 bp, Artificial sequence
  SiRNA target sequence
ttagtaaaacgttgacaaa

SEQ ID NO: 50570 - DNA, 19 bp, Artificial sequence
  SiRNA target sequence
tagtaaaacgttgacaaat

SEQ ID NO: 50571 - DNA, 19 bp, Artificial sequence
  SiRNA target sequence
agtaaaacgttgacaaatt

SEQ ID NO: 50572 - DNA, 19 bp, Artificial sequence
  SiRNA target sequence
gtaaaacgttgacaaattc

SEQ ID NO: 50573 - DNA, 19 bp, Artificial sequence
  SiRNA target sequence
taaaacgttgacaaattcg

SEQ ID NO: 50574 - DNA, 19 bp, Artificial sequence
  SiRNA target sequence
aaaacgttgacaaattcgt

SEQ ID NO: 50575 - DNA, 19 bp, Artificial sequence
  SiRNA target sequence
aaacgttgacaaattcgtt

SEQ ID NO: 50576 - DNA, 19 bp, Artificial sequence
  SiRNA target sequence
aacgttgacaaattcgttg

SEQ ID NO: 50577 - DNA, 19 bp, Artificial sequence
  SiRNA target sequence
acgttgacaaattcgttga

SEQ ID NO: 50578 - DNA, 19 bp, Artificial sequence
  SiRNA target sequence
cgttgacaaattcgttgag

SEQ ID NO: 50579 - DNA, 19 bp, Artificial sequence
  SiRNA target sequence
gttgacaaattcgttgagc

SEQ ID NO: 50580 - DNA, 19 bp, Artificial sequence
  SiRNA target sequence
ttgacaaattcgttgagcg

SEQ ID NO: 50581 - DNA, 19 bp, Artificial sequence
  SiRNA target sequence
tgacaaattcgttgagcga

SEQ ID NO: 50582 - DNA, 19 bp, Artificial sequence
  SiRNA target sequence
gacaaattcgttgagcgaa

SEQ ID NO: 50583 - DNA, 19 bp, Artificial sequence
  SiRNA target sequence
acaaattcgttgagcgaaa

SEQ ID NO: 50584 - DNA, 19 bp, Artificial sequence
  SiRNA target sequence
caaattcgttgagcgaaat

SEQ ID NO: 50585 - DNA, 19 bp, Artificial sequence
  SiRNA target sequence
aaattcgttgagcgaaatg

SEQ ID NO: 50586 - DNA, 19 bp, Artificial sequence
  SiRNA target sequence
aattcgttgagcgaaatgg

SEQ ID NO: 50587 - DNA, 19 bp, Artificial sequence
  SiRNA target sequence
attcgttgagcgaaatggg

SEQ ID NO: 50588 - DNA, 19 bp, Artificial sequence
  SiRNA target sequence
ttcgttgagcgaaatggga

SEQ ID NO: 50589 - DNA, 19 bp, Artificial sequence
  SiRNA target sequence
tcgttgagcgaaatgggaa

SEQ ID NO: 50590 - DNA, 19 bp, Artificial sequence
  SiRNA target sequence
cgttgagcgaaatgggaat

SEQ ID NO: 50591 - DNA, 19 bp, Artificial sequence
  SiRNA target sequence
gttgagcgaaatgggaatg

SEQ ID NO: 50592 - DNA, 19 bp, Artificial sequence
  SiRNA target sequence
ttgagcgaaatgggaatgc

SEQ ID NO: 50593 - DNA, 19 bp, Artificial sequence
  SiRNA target sequence
tgagcgaaatgggaatgct

SEQ ID NO: 50594 - DNA, 19 bp, Artificial sequence
  SiRNA target sequence
gagcgaaatgggaatgcta

SEQ ID NO: 50595 - DNA, 19 bp, Artificial sequence
  SiRNA target sequence
agcgaaatgggaatgctat

SEQ ID NO: 50596 - DNA, 19 bp, Artificial sequence
  SiRNA target sequence
gcgaaatgggaatgctata

SEQ ID NO: 50597 - DNA, 19 bp, Artificial sequence
  SiRNA target sequence
cgaaatgggaatgctatac

SEQ ID NO: 50598 - DNA, 19 bp, Artificial sequence
  SiRNA target sequence
gaaatgggaatgctataca

SEQ ID NO: 50599 - DNA, 19 bp, Artificial sequence
  SiRNA target sequence
aaatgggaatgctatacac

SEQ ID NO: 50600 - DNA, 19 bp, Artificial sequence
  SiRNA target sequence
aatgggaatgctatacaca

SEQ ID NO: 50601 - DNA, 19 bp, Artificial sequence
  SiRNA target sequence
atgggaatgctatacacaa

SEQ ID NO: 50602 - DNA, 19 bp, Artificial sequence
  SiRNA target sequence
tgggaatgctatacacaag

SEQ ID NO: 50603 - DNA, 19 bp, Artificial sequence
  SiRNA target sequence
gggaatgctatacacaaga

SEQ ID NO: 50604 - DNA, 19 bp, Artificial sequence
  SiRNA target sequence
ggaatgctatacacaagat

SEQ ID NO: 50605 - DNA, 19 bp, Artificial sequence
  SiRNA target sequence
gaatgctatacacaagata

SEQ ID NO: 50606 - DNA, 19 bp, Artificial sequence
  SiRNA target sequence
aatgctatacacaagatat

SEQ ID NO: 50607 - DNA, 19 bp, Artificial sequence
  SiRNA target sequence
atgctatacacaagatatg

SEQ ID NO: 50608 - DNA, 19 bp, Artificial sequence
  SiRNA target sequence
tgctatacacaagatatgt

SEQ ID NO: 50609 - DNA, 19 bp, Artificial sequence
  SiRNA target sequence
gctatacacaagatatgta

SEQ ID NO: 50610 - DNA, 19 bp, Artificial sequence
  SiRNA target sequence
ctatacacaagatatgtac

SEQ ID NO: 50611 - DNA, 19 bp, Artificial sequence
  SiRNA target sequence
tatacacaagatatgtaca

SEQ ID NO: 50612 - DNA, 19 bp, Artificial sequence
  SiRNA target sequence
atacacaagatatgtacaa

SEQ ID NO: 50613 - DNA, 19 bp, Artificial sequence
  SiRNA target sequence
tacacaagatatgtacaag

SEQ ID NO: 50614 - DNA, 19 bp, Artificial sequence
  SiRNA target sequence
acacaagatatgtacaagg

SEQ ID NO: 50615 - DNA, 19 bp, Artificial sequence
  SiRNA target sequence
cacaagatatgtacaagga

SEQ ID NO: 50616 - DNA, 19 bp, Artificial sequence
  SiRNA target sequence
acaagatatgtacaaggat

SEQ ID NO: 50617 - DNA, 19 bp, Artificial sequence
  SiRNA target sequence
caagatatgtacaaggatt

SEQ ID NO: 50618 - DNA, 19 bp, Artificial sequence
  SiRNA target sequence
aagatatgtacaaggattt

SEQ ID NO: 50619 - DNA, 19 bp, Artificial sequence
  SiRNA target sequence
agatatgtacaaggatttt

SEQ ID NO: 50620 - DNA, 19 bp, Artificial sequence
  SiRNA target sequence
gatatgtacaaggattttt

SEQ ID NO: 50621 - DNA, 19 bp, Artificial sequence
  SiRNA target sequence
atatgtacaaggattttta

SEQ ID NO: 50622 - DNA, 19 bp, Artificial sequence
  SiRNA target sequence
tatgtacaaggatttttaa

SEQ ID NO: 50623 - DNA, 19 bp, Artificial sequence
  SiRNA target sequence
atgtacaaggatttttaaa

SEQ ID NO: 50624 - DNA, 19 bp, Artificial sequence
  SiRNA target sequence
tgtacaaggatttttaaat

SEQ ID NO: 50625 - DNA, 19 bp, Artificial sequence
  SiRNA target sequence
gtacaaggatttttaaatg

SEQ ID NO: 50626 - DNA, 19 bp, Artificial sequence
  SiRNA target sequence
tacaaggatttttaaatgc

SEQ ID NO: 50627 - DNA, 19 bp, Artificial sequence
  SiRNA target sequence
acaaggatttttaaatgca

SEQ ID NO: 50628 - DNA, 19 bp, Artificial sequence
  SiRNA target sequence
caaggatttttaaatgcaa

SEQ ID NO: 50629 - DNA, 19 bp, Artificial sequence
  SiRNA target sequence
aaggatttttaaatgcaaa

SEQ ID NO: 50630 - DNA, 19 bp, Artificial sequence
  SiRNA target sequence
aggatttttaaatgcaaag

SEQ ID NO: 50631 - DNA, 19 bp, Artificial sequence
  SiRNA target sequence
ggatttttaaatgcaaagt

SEQ ID NO: 50632 - DNA, 19 bp, Artificial sequence
  SiRNA target sequence
gatttttaaatgcaaagtc

SEQ ID NO: 50633 - DNA, 19 bp, Artificial sequence
  SiRNA target sequence
atttttaaatgcaaagtct

SEQ ID NO: 50634 - DNA, 19 bp, Artificial sequence
  SiRNA target sequence
tttttaaatgcaaagtctg

SEQ ID NO: 50635 - DNA, 19 bp, Artificial sequence
  SiRNA target sequence
ttttaaatgcaaagtctgg

SEQ ID NO: 50636 - DNA, 19 bp, Artificial sequence
  SiRNA target sequence
tttaaatgcaaagtctgga

SEQ ID NO: 50637 - DNA, 19 bp, Artificial sequence
  SiRNA target sequence
ttaaatgcaaagtctggat

SEQ ID NO: 50638 - DNA, 19 bp, Artificial sequence
  SiRNA target sequence
taaatgcaaagtctggata

SEQ ID NO: 50639 - DNA, 19 bp, Artificial sequence
  SiRNA target sequence
aaatgcaaagtctggatat

SEQ ID NO: 50640 - DNA, 19 bp, Artificial sequence
  SiRNA target sequence
aatgcaaagtctggatatt

SEQ ID NO: 50641 - DNA, 19 bp, Artificial sequence
  SiRNA target sequence
atgcaaagtctggatatta

SEQ ID NO: 50642 - DNA, 19 bp, Artificial sequence
  SiRNA target sequence
tgcaaagtctggatattac

SEQ ID NO: 50643 - DNA, 19 bp, Artificial sequence
  SiRNA target sequence
gcaaagtctggatattacg

SEQ ID NO: 50644 - DNA, 19 bp, Artificial sequence
  SiRNA target sequence
caaagtctggatattacga

SEQ ID NO: 50645 - DNA, 19 bp, Artificial sequence
  SiRNA target sequence
aaagtctggatattacgag

SEQ ID NO: 50646 - DNA, 19 bp, Artificial sequence
  SiRNA target sequence
aagtctggatattacgagt

SEQ ID NO: 50647 - DNA, 19 bp, Artificial sequence
  SiRNA target sequence
agtctggatattacgagtt

SEQ ID NO: 50648 - DNA, 19 bp, Artificial sequence
  SiRNA target sequence
gtctggatattacgagttt

SEQ ID NO: 50649 - DNA, 19 bp, Artificial sequence
  SiRNA target sequence
tctggatattacgagttta

SEQ ID NO: 50650 - DNA, 19 bp, Artificial sequence
  SiRNA target sequence
ctggatattacgagtttaa

SEQ ID NO: 50651 - DNA, 19 bp, Artificial sequence
  SiRNA target sequence
tggatattacgagtttaaa

SEQ ID NO: 50652 - DNA, 19 bp, Artificial sequence
  SiRNA target sequence
ggatattacgagtttaaag

SEQ ID NO: 50653 - DNA, 19 bp, Artificial sequence
  SiRNA target sequence
gatattacgagtttaaaga

SEQ ID NO: 50654 - DNA, 19 bp, Artificial sequence
  SiRNA target sequence
atattacgagtttaaagag

SEQ ID NO: 50655 - DNA, 19 bp, Artificial sequence
  SiRNA target sequence
tattacgagtttaaagagg

SEQ ID NO: 50656 - DNA, 19 bp, Artificial sequence
  SiRNA target sequence
attacgagtttaaagagga

SEQ ID NO: 50657 - DNA, 19 bp, Artificial sequence
  SiRNA target sequence
ttacgagtttaaagaggat

SEQ ID NO: 50658 - DNA, 19 bp, Artificial sequence
  SiRNA target sequence
tacgagtttaaagaggata

SEQ ID NO: 50659 - DNA, 19 bp, Artificial sequence
  SiRNA target sequence
acgagtttaaagaggatac

SEQ ID NO: 50660 - DNA, 19 bp, Artificial sequence
  SiRNA target sequence
cgagtttaaagaggataca

SEQ ID NO: 50661 - DNA, 19 bp, Artificial sequence
  SiRNA target sequence
gagtttaaagaggatacac

SEQ ID NO: 50662 - DNA, 19 bp, Artificial sequence
  SiRNA target sequence
agtttaaagaggatacaca

SEQ ID NO: 50663 - DNA, 19 bp, Artificial sequence
  SiRNA target sequence
gtttaaagaggatacacaa

SEQ ID NO: 50664 - DNA, 19 bp, Artificial sequence
  SiRNA target sequence
tttaaagaggatacacaaa

SEQ ID NO: 50665 - DNA, 19 bp, Artificial sequence
  SiRNA target sequence
ttaaagaggatacacaaac

SEQ ID NO: 50666 - DNA, 19 bp, Artificial sequence
  SiRNA target sequence
taaagaggatacacaaact

SEQ ID NO: 50667 - DNA, 19 bp, Artificial sequence
  SiRNA target sequence
aaagaggatacacaaactg

SEQ ID NO: 50668 - DNA, 19 bp, Artificial sequence
  SiRNA target sequence
aagaggatacacaaactga

SEQ ID NO: 50669 - DNA, 19 bp, Artificial sequence
  SiRNA target sequence
agaggatacacaaactgat

SEQ ID NO: 50670 - DNA, 19 bp, Artificial sequence
  SiRNA target sequence
gaggatacacaaactgata

SEQ ID NO: 50671 - DNA, 19 bp, Artificial sequence
  SiRNA target sequence
aggatacacaaactgataa

SEQ ID NO: 50672 - DNA, 19 bp, Artificial sequence
  SiRNA target sequence
ggatacacaaactgataaa

SEQ ID NO: 50673 - DNA, 19 bp, Artificial sequence
  SiRNA target sequence
gatacacaaactgataaaa

SEQ ID NO: 50674 - DNA, 19 bp, Artificial sequence
  SiRNA target sequence
atacacaaactgataaaat

SEQ ID NO: 50675 - DNA, 19 bp, Artificial sequence
  SiRNA target sequence
tacacaaactgataaaata

SEQ ID NO: 50676 - DNA, 19 bp, Artificial sequence
  SiRNA target sequence
acacaaactgataaaataa

SEQ ID NO: 50677 - DNA, 19 bp, Artificial sequence
  SiRNA target sequence
cacaaactgataaaataag

SEQ ID NO: 50678 - DNA, 19 bp, Artificial sequence
  SiRNA target sequence
acaaactgataaaataaga

SEQ ID NO: 50679 - DNA, 19 bp, Artificial sequence
  SiRNA target sequence
caaactgataaaataagac

SEQ ID NO: 50680 - DNA, 19 bp, Artificial sequence
  SiRNA target sequence
aaactgataaaataagact

SEQ ID NO: 50681 - DNA, 19 bp, Artificial sequence
  SiRNA target sequence
aactgataaaataagactg

SEQ ID NO: 50682 - DNA, 19 bp, Artificial sequence
  SiRNA target sequence
actgataaaataagactga

SEQ ID NO: 50683 - DNA, 19 bp, Artificial sequence
  SiRNA target sequence
ctgataaaataagactgat

SEQ ID NO: 50684 - DNA, 19 bp, Artificial sequence
  SiRNA target sequence
tgataaaataagactgata

SEQ ID NO: 50685 - DNA, 19 bp, Artificial sequence
  SiRNA target sequence
gataaaataagactgatag

SEQ ID NO: 50686 - DNA, 19 bp, Artificial sequence
  SiRNA target sequence
ataaaataagactgataga

SEQ ID NO: 50687 - DNA, 19 bp, Artificial sequence
  SiRNA target sequence
taaaataagactgatagat

SEQ ID NO: 50688 - DNA, 19 bp, Artificial sequence
  SiRNA target sequence
aaaataagactgatagatt

SEQ ID NO: 50689 - DNA, 19 bp, Artificial sequence
  SiRNA target sequence
aaataagactgatagattt

SEQ ID NO: 50690 - DNA, 19 bp, Artificial sequence
  SiRNA target sequence
aataagactgatagatttt

SEQ ID NO: 50691 - DNA, 19 bp, Artificial sequence
  SiRNA target sequence
ataagactgatagatttta

SEQ ID NO: 50692 - DNA, 19 bp, Artificial sequence
  SiRNA target sequence
taagactgatagattttaa

SEQ ID NO: 50693 - DNA, 19 bp, Artificial sequence
  SiRNA target sequence
aagactgatagattttaat

SEQ ID NO: 50694 - DNA, 19 bp, Artificial sequence
  SiRNA target sequence
agactgatagattttaatg

SEQ ID NO: 50695 - DNA, 19 bp, Artificial sequence
  SiRNA target sequence
gactgatagattttaatga

SEQ ID NO: 50696 - DNA, 19 bp, Artificial sequence
  SiRNA target sequence
actgatagattttaatgaa

SEQ ID NO: 50697 - DNA, 19 bp, Artificial sequence
  SiRNA target sequence
ctgatagattttaatgaaa

SEQ ID NO: 50698 - DNA, 19 bp, Artificial sequence
  SiRNA target sequence
tgatagattttaatgaaaa

SEQ ID NO: 50699 - DNA, 19 bp, Artificial sequence
  SiRNA target sequence
gatagattttaatgaaaag

SEQ ID NO: 50700 - DNA, 19 bp, Artificial sequence
  SiRNA target sequence
atagattttaatgaaaagc

SEQ ID NO: 50701 - DNA, 19 bp, Artificial sequence
  SiRNA target sequence
tagattttaatgaaaagct

SEQ ID NO: 50702 - DNA, 19 bp, Artificial sequence
  SiRNA target sequence
agattttaatgaaaagcta

SEQ ID NO: 50703 - DNA, 19 bp, Artificial sequence
  SiRNA target sequence
gattttaatgaaaagctag

SEQ ID NO: 50704 - DNA, 19 bp, Artificial sequence
  SiRNA target sequence
attttaatgaaaagctaga

SEQ ID NO: 50705 - DNA, 19 bp, Artificial sequence
  SiRNA target sequence
ttttaatgaaaagctagaa

SEQ ID NO: 50706 - DNA, 19 bp, Artificial sequence
  SiRNA target sequence
tttaatgaaaagctagaat

SEQ ID NO: 50707 - DNA, 19 bp, Artificial sequence
  SiRNA target sequence
ttaatgaaaagctagaatt

SEQ ID NO: 50708 - DNA, 19 bp, Artificial sequence
  SiRNA target sequence
taatgaaaagctagaattt

SEQ ID NO: 50709 - DNA, 19 bp, Artificial sequence
  SiRNA target sequence
aatgaaaagctagaattta

SEQ ID NO: 50710 - DNA, 19 bp, Artificial sequence
  SiRNA target sequence
atgaaaagctagaatttag

SEQ ID NO: 50711 - DNA, 19 bp, Artificial sequence
  SiRNA target sequence
tgaaaagctagaatttaga

SEQ ID NO: 50712 - DNA, 19 bp, Artificial sequence
  SiRNA target sequence
gaaaagctagaatttagaa

SEQ ID NO: 50713 - DNA, 19 bp, Artificial sequence
  SiRNA target sequence
aaaagctagaatttagaaa

SEQ ID NO: 50714 - DNA, 19 bp, Artificial sequence
  SiRNA target sequence
aaagctagaatttagaaat

SEQ ID NO: 50715 - DNA, 19 bp, Artificial sequence
  SiRNA target sequence
aagctagaatttagaaatg

SEQ ID NO: 50716 - DNA, 19 bp, Artificial sequence
  SiRNA target sequence
agctagaatttagaaatgt

SEQ ID NO: 50717 - DNA, 19 bp, Artificial sequence
  SiRNA target sequence
gctagaatttagaaatgta

SEQ ID NO: 50718 - DNA, 19 bp, Artificial sequence
  SiRNA target sequence
ctagaatttagaaatgtat

SEQ ID NO: 50719 - DNA, 19 bp, Artificial sequence
  SiRNA target sequence
tagaatttagaaatgtatc

SEQ ID NO: 50720 - DNA, 19 bp, Artificial sequence
  SiRNA target sequence
agaatttagaaatgtatct

SEQ ID NO: 50721 - DNA, 19 bp, Artificial sequence
  SiRNA target sequence
gaatttagaaatgtatctt

SEQ ID NO: 50722 - DNA, 19 bp, Artificial sequence
  SiRNA target sequence
aatttagaaatgtatcttt

SEQ ID NO: 50723 - DNA, 19 bp, Artificial sequence
  SiRNA target sequence
atttagaaatgtatctttt

SEQ ID NO: 50724 - DNA, 19 bp, Artificial sequence
  SiRNA target sequence
tttagaaatgtatctttta

SEQ ID NO: 50725 - DNA, 19 bp, Artificial sequence
  SiRNA target sequence
ttagaaatgtatcttttag

SEQ ID NO: 50726 - DNA, 19 bp, Artificial sequence
  SiRNA target sequence
tagaaatgtatcttttagt

SEQ ID NO: 50727 - DNA, 19 bp, Artificial sequence
  SiRNA target sequence
agaaatgtatcttttagtt

SEQ ID NO: 50728 - DNA, 19 bp, Artificial sequence
  SiRNA target sequence
gaaatgtatcttttagtta

SEQ ID NO: 50729 - DNA, 19 bp, Artificial sequence
  SiRNA target sequence
aaatgtatcttttagttat

SEQ ID NO: 50730 - DNA, 19 bp, Artificial sequence
  SiRNA target sequence
aatgtatcttttagttatt

SEQ ID NO: 50731 - DNA, 19 bp, Artificial sequence
  SiRNA target sequence
atgtatcttttagttattt

SEQ ID NO: 50732 - DNA, 19 bp, Artificial sequence
  SiRNA target sequence
tgtatcttttagttattta

SEQ ID NO: 50733 - DNA, 19 bp, Artificial sequence
  SiRNA target sequence
gtatcttttagttatttaa

SEQ ID NO: 50734 - DNA, 19 bp, Artificial sequence
  SiRNA target sequence
tatcttttagttatttaaa

SEQ ID NO: 50735 - DNA, 19 bp, Artificial sequence
  SiRNA target sequence
atcttttagttatttaaat

SEQ ID NO: 50736 - DNA, 19 bp, Artificial sequence
  SiRNA target sequence
tcttttagttatttaaata

SEQ ID NO: 50737 - DNA, 19 bp, Artificial sequence
  SiRNA target sequence
cttttagttatttaaataa

SEQ ID NO: 50738 - DNA, 19 bp, Artificial sequence
  SiRNA target sequence
ttttagttatttaaataag

SEQ ID NO: 50739 - DNA, 19 bp, Artificial sequence
  SiRNA target sequence
tttagttatttaaataagc

SEQ ID NO: 50740 - DNA, 19 bp, Artificial sequence
  SiRNA target sequence
ttagttatttaaataagcc

SEQ ID NO: 50741 - DNA, 19 bp, Artificial sequence
  SiRNA target sequence
tagttatttaaataagcct

SEQ ID NO: 50742 - DNA, 19 bp, Artificial sequence
  SiRNA target sequence
agttatttaaataagccta

SEQ ID NO: 50743 - DNA, 19 bp, Artificial sequence
  SiRNA target sequence
gttatttaaataagcctat

SEQ ID NO: 50744 - DNA, 19 bp, Artificial sequence
  SiRNA target sequence
ttatttaaataagcctatt

SEQ ID NO: 50745 - DNA, 19 bp, Artificial sequence
  SiRNA target sequence
tatttaaataagcctattt

SEQ ID NO: 50746 - DNA, 19 bp, Artificial sequence
  SiRNA target sequence
atttaaataagcctatttt

SEQ ID NO: 50747 - DNA, 19 bp, Artificial sequence
  SiRNA target sequence
tttaaataagcctatttta

SEQ ID NO: 50748 - DNA, 19 bp, Artificial sequence
  SiRNA target sequence
ttaaataagcctattttag

SEQ ID NO: 50749 - DNA, 19 bp, Artificial sequence
  SiRNA target sequence
taaataagcctattttagt

SEQ ID NO: 50750 - DNA, 19 bp, Artificial sequence
  SiRNA target sequence
aaataagcctattttagtg

SEQ ID NO: 50751 - DNA, 19 bp, Artificial sequence
  SiRNA target sequence
aataagcctattttagtga

SEQ ID NO: 50752 - DNA, 19 bp, Artificial sequence
  SiRNA target sequence
ataagcctattttagtgaa

SEQ ID NO: 50753 - DNA, 19 bp, Artificial sequence
  SiRNA target sequence
taagcctattttagtgaat

SEQ ID NO: 50754 - DNA, 19 bp, Artificial sequence
  SiRNA target sequence
aagcctattttagtgaatg

SEQ ID NO: 50755 - DNA, 19 bp, Artificial sequence
  SiRNA target sequence
agcctattttagtgaatgc

SEQ ID NO: 50756 - DNA, 19 bp, Artificial sequence
  SiRNA target sequence
gcctattttagtgaatgct

SEQ ID NO: 50757 - DNA, 19 bp, Artificial sequence
  SiRNA target sequence
cctattttagtgaatgcta

SEQ ID NO: 50758 - DNA, 19 bp, Artificial sequence
  SiRNA target sequence
ctattttagtgaatgctaa

SEQ ID NO: 50759 - DNA, 19 bp, Artificial sequence
  SiRNA target sequence
tattttagtgaatgctaat

SEQ ID NO: 50760 - DNA, 19 bp, Artificial sequence
  SiRNA target sequence
attttagtgaatgctaatt

SEQ ID NO: 50761 - DNA, 19 bp, Artificial sequence
  SiRNA target sequence
ttttagtgaatgctaattt

SEQ ID NO: 50762 - DNA, 19 bp, Artificial sequence
  SiRNA target sequence
tttagtgaatgctaatttc

SEQ ID NO: 50763 - DNA, 19 bp, Artificial sequence
  SiRNA target sequence
ttagtgaatgctaatttcg

SEQ ID NO: 50764 - DNA, 19 bp, Artificial sequence
  SiRNA target sequence
tagtgaatgctaatttcgt

SEQ ID NO: 50765 - DNA, 19 bp, Artificial sequence
  SiRNA target sequence
agtgaatgctaatttcgtt

SEQ ID NO: 50766 - DNA, 19 bp, Artificial sequence
  SiRNA target sequence
gtgaatgctaatttcgtta

SEQ ID NO: 50767 - DNA, 19 bp, Artificial sequence
  SiRNA target sequence
tgaatgctaatttcgttat

SEQ ID NO: 50768 - DNA, 19 bp, Artificial sequence
  SiRNA target sequence
gaatgctaatttcgttatt

SEQ ID NO: 50769 - DNA, 19 bp, Artificial sequence
  SiRNA target sequence
aatgctaatttcgttatta

SEQ ID NO: 50770 - DNA, 19 bp, Artificial sequence
  SiRNA target sequence
atgctaatttcgttattaa

SEQ ID NO: 50771 - DNA, 19 bp, Artificial sequence
  SiRNA target sequence
tgctaatttcgttattaat

SEQ ID NO: 50772 - DNA, 19 bp, Artificial sequence
  SiRNA target sequence
gctaatttcgttattaata

SEQ ID NO: 50773 - DNA, 19 bp, Artificial sequence
  SiRNA target sequence
ctaatttcgttattaataa

SEQ ID NO: 50774 - DNA, 19 bp, Artificial sequence
  SiRNA target sequence
taatttcgttattaataaa

SEQ ID NO: 50775 - DNA, 19 bp, Artificial sequence
  SiRNA target sequence
aatttcgttattaataaag

SEQ ID NO: 50776 - DNA, 19 bp, Artificial sequence
  SiRNA target sequence
atttcgttattaataaagg

SEQ ID NO: 50777 - DNA, 19 bp, Artificial sequence
  SiRNA target sequence
tttcgttattaataaaggg

SEQ ID NO: 50778 - DNA, 19 bp, Artificial sequence
  SiRNA target sequence
ttcgttattaataaagggg

SEQ ID NO: 50779 - DNA, 19 bp, Artificial sequence
  SiRNA target sequence
tcgttattaataaagggga

SEQ ID NO: 50780 - DNA, 19 bp, Artificial sequence
  SiRNA target sequence
cgttattaataaaggggag

SEQ ID NO: 50781 - DNA, 19 bp, Artificial sequence
  SiRNA target sequence
gttattaataaaggggagc

SEQ ID NO: 50782 - DNA, 19 bp, Artificial sequence
  SiRNA target sequence
ttattaataaaggggagcg

SEQ ID NO: 50783 - DNA, 19 bp, Artificial sequence
  SiRNA target sequence
tattaataaaggggagcgt

SEQ ID NO: 50784 - DNA, 19 bp, Artificial sequence
  SiRNA target sequence
attaataaaggggagcgtg

SEQ ID NO: 50785 - DNA, 19 bp, Artificial sequence
  SiRNA target sequence
ttaataaaggggagcgtgt

SEQ ID NO: 50786 - DNA, 19 bp, Artificial sequence
  SiRNA target sequence
taataaaggggagcgtgtt

SEQ ID NO: 50787 - DNA, 19 bp, Artificial sequence
  SiRNA target sequence
aataaaggggagcgtgttg

SEQ ID NO: 50788 - DNA, 19 bp, Artificial sequence
  SiRNA target sequence
ataaaggggagcgtgttgc

SEQ ID NO: 50789 - DNA, 19 bp, Artificial sequence
  SiRNA target sequence
taaaggggagcgtgttgct

SEQ ID NO: 50790 - DNA, 19 bp, Artificial sequence
  SiRNA target sequence
aaaggggagcgtgttgcta

SEQ ID NO: 50791 - DNA, 19 bp, Artificial sequence
  SiRNA target sequence
aaggggagcgtgttgctat

SEQ ID NO: 50792 - DNA, 19 bp, Artificial sequence
  SiRNA target sequence
aggggagcgtgttgctatt

SEQ ID NO: 50793 - DNA, 19 bp, Artificial sequence
  SiRNA target sequence
ggggagcgtgttgctatta

SEQ ID NO: 50794 - DNA, 19 bp, Artificial sequence
  SiRNA target sequence
gggagcgtgttgctattat

SEQ ID NO: 50795 - DNA, 19 bp, Artificial sequence
  SiRNA target sequence
ggagcgtgttgctattata

SEQ ID NO: 50796 - DNA, 19 bp, Artificial sequence
  SiRNA target sequence
gagcgtgttgctattatag

SEQ ID NO: 50797 - DNA, 19 bp, Artificial sequence
  SiRNA target sequence
agcgtgttgctattatagg

SEQ ID NO: 50798 - DNA, 19 bp, Artificial sequence
  SiRNA target sequence
gcgtgttgctattatagga

SEQ ID NO: 50799 - DNA, 19 bp, Artificial sequence
  SiRNA target sequence
cgtgttgctattataggaa

SEQ ID NO: 50800 - DNA, 19 bp, Artificial sequence
  SiRNA target sequence
gtgttgctattataggaaa

SEQ ID NO: 50801 - DNA, 19 bp, Artificial sequence
  SiRNA target sequence
tgttgctattataggaaaa

SEQ ID NO: 50802 - DNA, 19 bp, Artificial sequence
  SiRNA target sequence
gttgctattataggaaaaa

SEQ ID NO: 50803 - DNA, 19 bp, Artificial sequence
  SiRNA target sequence
ttgctattataggaaaaaa

SEQ ID NO: 50804 - DNA, 19 bp, Artificial sequence
  SiRNA target sequence
tgctattataggaaaaaat

SEQ ID NO: 50805 - DNA, 19 bp, Artificial sequence
  SiRNA target sequence
gctattataggaaaaaatg

SEQ ID NO: 50806 - DNA, 19 bp, Artificial sequence
  SiRNA target sequence
ctattataggaaaaaatgg

SEQ ID NO: 50807 - DNA, 19 bp, Artificial sequence
  SiRNA target sequence
tattataggaaaaaatgga

SEQ ID NO: 50808 - DNA, 19 bp, Artificial sequence
  SiRNA target sequence
attataggaaaaaatggaa

SEQ ID NO: 50809 - DNA, 19 bp, Artificial sequence
  SiRNA target sequence
ttataggaaaaaatggaac

SEQ ID NO: 50810 - DNA, 19 bp, Artificial sequence
  SiRNA target sequence
tataggaaaaaatggaaca

SEQ ID NO: 50811 - DNA, 19 bp, Artificial sequence
  SiRNA target sequence
ataggaaaaaatggaacag

SEQ ID NO: 50812 - DNA, 19 bp, Artificial sequence
  SiRNA target sequence
taggaaaaaatggaacagg

SEQ ID NO: 50813 - DNA, 19 bp, Artificial sequence
  SiRNA target sequence
aggaaaaaatggaacaggt

SEQ ID NO: 50814 - DNA, 19 bp, Artificial sequence
  SiRNA target sequence
ggaaaaaatggaacaggta

SEQ ID NO: 50815 - DNA, 19 bp, Artificial sequence
  SiRNA target sequence
gaaaaaatggaacaggtaa

SEQ ID NO: 50816 - DNA, 19 bp, Artificial sequence
  SiRNA target sequence
aaaaaatggaacaggtaaa

SEQ ID NO: 50817 - DNA, 19 bp, Artificial sequence
  SiRNA target sequence
aaaaatggaacaggtaaaa

SEQ ID NO: 50818 - DNA, 19 bp, Artificial sequence
  SiRNA target sequence
aaaatggaacaggtaaaag

SEQ ID NO: 50819 - DNA, 19 bp, Artificial sequence
  SiRNA target sequence
aaatggaacaggtaaaagt

SEQ ID NO: 50820 - DNA, 19 bp, Artificial sequence
  SiRNA target sequence
aatggaacaggtaaaagta

SEQ ID NO: 50821 - DNA, 19 bp, Artificial sequence
  SiRNA target sequence
atggaacaggtaaaagtac

SEQ ID NO: 50822 - DNA, 19 bp, Artificial sequence
  SiRNA target sequence
tggaacaggtaaaagtaca

SEQ ID NO: 50823 - DNA, 19 bp, Artificial sequence
  SiRNA target sequence
ggaacaggtaaaagtacaa

SEQ ID NO: 50824 - DNA, 19 bp, Artificial sequence
  SiRNA target sequence
gaacaggtaaaagtacaat

SEQ ID NO: 50825 - DNA, 19 bp, Artificial sequence
  SiRNA target sequence
aacaggtaaaagtacaata

SEQ ID NO: 50826 - DNA, 19 bp, Artificial sequence
  SiRNA target sequence
acaggtaaaagtacaataa

SEQ ID NO: 50827 - DNA, 19 bp, Artificial sequence
  SiRNA target sequence
caggtaaaagtacaataat

SEQ ID NO: 50828 - DNA, 19 bp, Artificial sequence
  SiRNA target sequence
aggtaaaagtacaataata

SEQ ID NO: 50829 - DNA, 19 bp, Artificial sequence
  SiRNA target sequence
ggtaaaagtacaataataa

SEQ ID NO: 50830 - DNA, 19 bp, Artificial sequence
  SiRNA target sequence
gtaaaagtacaataataaa

SEQ ID NO: 50831 - DNA, 19 bp, Artificial sequence
  SiRNA target sequence
taaaagtacaataataaaa

SEQ ID NO: 50832 - DNA, 19 bp, Artificial sequence
  SiRNA target sequence
aaaagtacaataataaaat

SEQ ID NO: 50833 - DNA, 19 bp, Artificial sequence
  SiRNA target sequence
aaagtacaataataaaatt

SEQ ID NO: 50834 - DNA, 19 bp, Artificial sequence
  SiRNA target sequence
aagtacaataataaaattg

SEQ ID NO: 50835 - DNA, 19 bp, Artificial sequence
  SiRNA target sequence
agtacaataataaaattgt

SEQ ID NO: 50836 - DNA, 19 bp, Artificial sequence
  SiRNA target sequence
gtacaataataaaattgtt

SEQ ID NO: 50837 - DNA, 19 bp, Artificial sequence
  SiRNA target sequence
tacaataataaaattgtta

SEQ ID NO: 50838 - DNA, 19 bp, Artificial sequence
  SiRNA target sequence
acaataataaaattgttaa

SEQ ID NO: 50839 - DNA, 19 bp, Artificial sequence
  SiRNA target sequence
caataataaaattgttaat

SEQ ID NO: 50840 - DNA, 19 bp, Artificial sequence
  SiRNA target sequence
aataataaaattgttaatg

SEQ ID NO: 50841 - DNA, 19 bp, Artificial sequence
  SiRNA target sequence
ataataaaattgttaatga

SEQ ID NO: 50842 - DNA, 19 bp, Artificial sequence
  SiRNA target sequence
taataaaattgttaatgaa

SEQ ID NO: 50843 - DNA, 19 bp, Artificial sequence
  SiRNA target sequence
aataaaattgttaatgaaa

SEQ ID NO: 50844 - DNA, 19 bp, Artificial sequence
  SiRNA target sequence
ataaaattgttaatgaaat

SEQ ID NO: 50845 - DNA, 19 bp, Artificial sequence
  SiRNA target sequence
taaaattgttaatgaaatt

SEQ ID NO: 50846 - DNA, 19 bp, Artificial sequence
  SiRNA target sequence
aaaattgttaatgaaattt

SEQ ID NO: 50847 - DNA, 19 bp, Artificial sequence
  SiRNA target sequence
aaattgttaatgaaatttt

SEQ ID NO: 50848 - DNA, 19 bp, Artificial sequence
  SiRNA target sequence
aattgttaatgaaatttta

SEQ ID NO: 50849 - DNA, 19 bp, Artificial sequence
  SiRNA target sequence
attgttaatgaaattttat

SEQ ID NO: 50850 - DNA, 19 bp, Artificial sequence
  SiRNA target sequence
ttgttaatgaaattttata

SEQ ID NO: 50851 - DNA, 19 bp, Artificial sequence
  SiRNA target sequence
tgttaatgaaattttataa

SEQ ID NO: 50852 - DNA, 19 bp, Artificial sequence
  SiRNA target sequence
gttaatgaaattttataaa

SEQ ID NO: 50853 - DNA, 19 bp, Artificial sequence
  SiRNA target sequence
ttaatgaaattttataaat

SEQ ID NO: 50854 - DNA, 19 bp, Artificial sequence
  SiRNA target sequence
taatgaaattttataaata

SEQ ID NO: 50855 - DNA, 19 bp, Artificial sequence
  SiRNA target sequence
aatgaaattttataaatat

SEQ ID NO: 50856 - DNA, 19 bp, Artificial sequence
  SiRNA target sequence
atgaaattttataaatatg

SEQ ID NO: 50857 - DNA, 19 bp, Artificial sequence
  SiRNA target sequence
tgaaattttataaatatga

SEQ ID NO: 50858 - DNA, 19 bp, Artificial sequence
  SiRNA target sequence
gaaattttataaatatgat

SEQ ID NO: 50859 - DNA, 19 bp, Artificial sequence
  SiRNA target sequence
aaattttataaatatgatg

SEQ ID NO: 50860 - DNA, 19 bp, Artificial sequence
  SiRNA target sequence
aattttataaatatgatgg

SEQ ID NO: 50861 - DNA, 19 bp, Artificial sequence
  SiRNA target sequence
attttataaatatgatgga

SEQ ID NO: 50862 - DNA, 19 bp, Artificial sequence
  SiRNA target sequence
ttttataaatatgatggag

SEQ ID NO: 50863 - DNA, 19 bp, Artificial sequence
  SiRNA target sequence
tttataaatatgatggaga

SEQ ID NO: 50864 - DNA, 19 bp, Artificial sequence
  SiRNA target sequence
ttataaatatgatggagat

SEQ ID NO: 50865 - DNA, 19 bp, Artificial sequence
  SiRNA target sequence
tataaatatgatggagata

SEQ ID NO: 50866 - DNA, 19 bp, Artificial sequence
  SiRNA target sequence
ataaatatgatggagatat

SEQ ID NO: 50867 - DNA, 19 bp, Artificial sequence
  SiRNA target sequence
taaatatgatggagatata

SEQ ID NO: 50868 - DNA, 19 bp, Artificial sequence
  SiRNA target sequence
aaatatgatggagatatat

SEQ ID NO: 50869 - DNA, 19 bp, Artificial sequence
  SiRNA target sequence
aatatgatggagatatatt

SEQ ID NO: 50870 - DNA, 19 bp, Artificial sequence
  SiRNA target sequence
atatgatggagatatatta

SEQ ID NO: 50871 - DNA, 19 bp, Artificial sequence
  SiRNA target sequence
tatgatggagatatattaa

SEQ ID NO: 50872 - DNA, 19 bp, Artificial sequence
  SiRNA target sequence
atgatggagatatattaat

SEQ ID NO: 50873 - DNA, 19 bp, Artificial sequence
  SiRNA target sequence
tgatggagatatattaatt

SEQ ID NO: 50874 - DNA, 19 bp, Artificial sequence
  SiRNA target sequence
gatggagatatattaattg

SEQ ID NO: 50875 - DNA, 19 bp, Artificial sequence
  SiRNA target sequence
atggagatatattaattga

SEQ ID NO: 50876 - DNA, 19 bp, Artificial sequence
  SiRNA target sequence
tggagatatattaattgat

SEQ ID NO: 50877 - DNA, 19 bp, Artificial sequence
  SiRNA target sequence
ggagatatattaattgatg

SEQ ID NO: 50878 - DNA, 19 bp, Artificial sequence
  SiRNA target sequence
gagatatattaattgatga

SEQ ID NO: 50879 - DNA, 19 bp, Artificial sequence
  SiRNA target sequence
agatatattaattgatgat

SEQ ID NO: 50880 - DNA, 19 bp, Artificial sequence
  SiRNA target sequence
gatatattaattgatgata

SEQ ID NO: 50881 - DNA, 19 bp, Artificial sequence
  SiRNA target sequence
atatattaattgatgatac

SEQ ID NO: 50882 - DNA, 19 bp, Artificial sequence
  SiRNA target sequence
tatattaattgatgataca

SEQ ID NO: 50883 - DNA, 19 bp, Artificial sequence
  SiRNA target sequence
atattaattgatgatacag

SEQ ID NO: 50884 - DNA, 19 bp, Artificial sequence
  SiRNA target sequence
tattaattgatgatacaga

SEQ ID NO: 50885 - DNA, 19 bp, Artificial sequence
  SiRNA target sequence
attaattgatgatacagaa

SEQ ID NO: 50886 - DNA, 19 bp, Artificial sequence
  SiRNA target sequence
ttaattgatgatacagaaa

SEQ ID NO: 50887 - DNA, 19 bp, Artificial sequence
  SiRNA target sequence
taattgatgatacagaaat

SEQ ID NO: 50888 - DNA, 19 bp, Artificial sequence
  SiRNA target sequence
aattgatgatacagaaata

SEQ ID NO: 50889 - DNA, 19 bp, Artificial sequence
  SiRNA target sequence
attgatgatacagaaatag

SEQ ID NO: 50890 - DNA, 19 bp, Artificial sequence
  SiRNA target sequence
ttgatgatacagaaataga

SEQ ID NO: 50891 - DNA, 19 bp, Artificial sequence
  SiRNA target sequence
tgatgatacagaaatagat

SEQ ID NO: 50892 - DNA, 19 bp, Artificial sequence
  SiRNA target sequence
gatgatacagaaatagata

SEQ ID NO: 50893 - DNA, 19 bp, Artificial sequence
  SiRNA target sequence
atgatacagaaatagataa

SEQ ID NO: 50894 - DNA, 19 bp, Artificial sequence
  SiRNA target sequence
tgatacagaaatagataat

SEQ ID NO: 50895 - DNA, 19 bp, Artificial sequence
  SiRNA target sequence
gatacagaaatagataata

SEQ ID NO: 50896 - DNA, 19 bp, Artificial sequence
  SiRNA target sequence
atacagaaatagataatat

SEQ ID NO: 50897 - DNA, 19 bp, Artificial sequence
  SiRNA target sequence
tacagaaatagataatatt

SEQ ID NO: 50898 - DNA, 19 bp, Artificial sequence
  SiRNA target sequence
acagaaatagataatattt

SEQ ID NO: 50899 - DNA, 19 bp, Artificial sequence
  SiRNA target sequence
cagaaatagataatatttc

SEQ ID NO: 50900 - DNA, 19 bp, Artificial sequence
  SiRNA target sequence
agaaatagataatatttcg

SEQ ID NO: 50901 - DNA, 19 bp, Artificial sequence
  SiRNA target sequence
gaaatagataatatttcgg

SEQ ID NO: 50902 - DNA, 19 bp, Artificial sequence
  SiRNA target sequence
aaatagataatatttcgga

SEQ ID NO: 50903 - DNA, 19 bp, Artificial sequence
  SiRNA target sequence
aatagataatatttcggat

SEQ ID NO: 50904 - DNA, 19 bp, Artificial sequence
  SiRNA target sequence
atagataatatttcggata

SEQ ID NO: 50905 - DNA, 19 bp, Artificial sequence
  SiRNA target sequence
tagataatatttcggatag

SEQ ID NO: 50906 - DNA, 19 bp, Artificial sequence
  SiRNA target sequence
agataatatttcggataga

SEQ ID NO: 50907 - DNA, 19 bp, Artificial sequence
  SiRNA target sequence
gataatatttcggatagaa

SEQ ID NO: 50908 - DNA, 19 bp, Artificial sequence
  SiRNA target sequence
ataatatttcggatagaag

SEQ ID NO: 50909 - DNA, 19 bp, Artificial sequence
  SiRNA target sequence
taatatttcggatagaagt

SEQ ID NO: 50910 - DNA, 19 bp, Artificial sequence
  SiRNA target sequence
aatatttcggatagaagtt

SEQ ID NO: 50911 - DNA, 19 bp, Artificial sequence
  SiRNA target sequence
atatttcggatagaagtta

SEQ ID NO: 50912 - DNA, 19 bp, Artificial sequence
  SiRNA target sequence
tatttcggatagaagttac

SEQ ID NO: 50913 - DNA, 19 bp, Artificial sequence
  SiRNA target sequence
atttcggatagaagttaca

SEQ ID NO: 50914 - DNA, 19 bp, Artificial sequence
  SiRNA target sequence
tttcggatagaagttacag

SEQ ID NO: 50915 - DNA, 19 bp, Artificial sequence
  SiRNA target sequence
ttcggatagaagttacaga

SEQ ID NO: 50916 - DNA, 19 bp, Artificial sequence
  SiRNA target sequence
tcggatagaagttacagaa

SEQ ID NO: 50917 - DNA, 19 bp, Artificial sequence
  SiRNA target sequence
cggatagaagttacagaag

SEQ ID NO: 50918 - DNA, 19 bp, Artificial sequence
  SiRNA target sequence
ggatagaagttacagaagt

SEQ ID NO: 50919 - DNA, 19 bp, Artificial sequence
  SiRNA target sequence
gatagaagttacagaagtt

SEQ ID NO: 50920 - DNA, 19 bp, Artificial sequence
  SiRNA target sequence
atagaagttacagaagttt

SEQ ID NO: 50921 - DNA, 19 bp, Artificial sequence
  SiRNA target sequence
tagaagttacagaagttta

SEQ ID NO: 50922 - DNA, 19 bp, Artificial sequence
  SiRNA target sequence
agaagttacagaagtttaa

SEQ ID NO: 50923 - DNA, 19 bp, Artificial sequence
  SiRNA target sequence
gaagttacagaagtttaat

SEQ ID NO: 50924 - DNA, 19 bp, Artificial sequence
  SiRNA target sequence
aagttacagaagtttaata

SEQ ID NO: 50925 - DNA, 19 bp, Artificial sequence
  SiRNA target sequence
agttacagaagtttaatat

SEQ ID NO: 50926 - DNA, 19 bp, Artificial sequence
  SiRNA target sequence
gttacagaagtttaatatc

SEQ ID NO: 50927 - DNA, 19 bp, Artificial sequence
  SiRNA target sequence
ttacagaagtttaatatca

SEQ ID NO: 50928 - DNA, 19 bp, Artificial sequence
  SiRNA target sequence
tacagaagtttaatatcat

SEQ ID NO: 50929 - DNA, 19 bp, Artificial sequence
  SiRNA target sequence
acagaagtttaatatcata

SEQ ID NO: 50930 - DNA, 19 bp, Artificial sequence
  SiRNA target sequence
cagaagtttaatatcatat

SEQ ID NO: 50931 - DNA, 19 bp, Artificial sequence
  SiRNA target sequence
agaagtttaatatcatatg

SEQ ID NO: 50932 - DNA, 19 bp, Artificial sequence
  SiRNA target sequence
gaagtttaatatcatatgc

SEQ ID NO: 50933 - DNA, 19 bp, Artificial sequence
  SiRNA target sequence
aagtttaatatcatatgca

SEQ ID NO: 50934 - DNA, 19 bp, Artificial sequence
  SiRNA target sequence
agtttaatatcatatgcaa

SEQ ID NO: 50935 - DNA, 19 bp, Artificial sequence
  SiRNA target sequence
gtttaatatcatatgcaac

SEQ ID NO: 50936 - DNA, 19 bp, Artificial sequence
  SiRNA target sequence
tttaatatcatatgcaaca

SEQ ID NO: 50937 - DNA, 19 bp, Artificial sequence
  SiRNA target sequence
ttaatatcatatgcaacac

SEQ ID NO: 50938 - DNA, 19 bp, Artificial sequence
  SiRNA target sequence
taatatcatatgcaacaca

SEQ ID NO: 50939 - DNA, 19 bp, Artificial sequence
  SiRNA target sequence
aatatcatatgcaacacaa

SEQ ID NO: 50940 - DNA, 19 bp, Artificial sequence
  SiRNA target sequence
atatcatatgcaacacaaa

SEQ ID NO: 50941 - DNA, 19 bp, Artificial sequence
  SiRNA target sequence
tatcatatgcaacacaaaa

SEQ ID NO: 50942 - DNA, 19 bp, Artificial sequence
  SiRNA target sequence
atcatatgcaacacaaaac

SEQ ID NO: 50943 - DNA, 19 bp, Artificial sequence
  SiRNA target sequence
tcatatgcaacacaaaaca

SEQ ID NO: 50944 - DNA, 19 bp, Artificial sequence
  SiRNA target sequence
catatgcaacacaaaacac

SEQ ID NO: 50945 - DNA, 19 bp, Artificial sequence
  SiRNA target sequence
atatgcaacacaaaacacg

SEQ ID NO: 50946 - DNA, 19 bp, Artificial sequence
  SiRNA target sequence
tatgcaacacaaaacacgt

SEQ ID NO: 50947 - DNA, 19 bp, Artificial sequence
  SiRNA target sequence
atgcaacacaaaacacgtt

SEQ ID NO: 50948 - DNA, 19 bp, Artificial sequence
  SiRNA target sequence
tgcaacacaaaacacgttc

SEQ ID NO: 50949 - DNA, 19 bp, Artificial sequence
  SiRNA target sequence
gcaacacaaaacacgttct

SEQ ID NO: 50950 - DNA, 19 bp, Artificial sequence
  SiRNA target sequence
caacacaaaacacgttctt

SEQ ID NO: 50951 - DNA, 19 bp, Artificial sequence
  SiRNA target sequence
aacacaaaacacgttctta

SEQ ID NO: 50952 - DNA, 19 bp, Artificial sequence
  SiRNA target sequence
acacaaaacacgttcttat

SEQ ID NO: 50953 - DNA, 19 bp, Artificial sequence
  SiRNA target sequence
cacaaaacacgttcttatt

SEQ ID NO: 50954 - DNA, 19 bp, Artificial sequence
  SiRNA target sequence
acaaaacacgttcttattc

SEQ ID NO: 50955 - DNA, 19 bp, Artificial sequence
  SiRNA target sequence
caaaacacgttcttattcg

SEQ ID NO: 50956 - DNA, 19 bp, Artificial sequence
  SiRNA target sequence
aaaacacgttcttattcga

SEQ ID NO: 50957 - DNA, 19 bp, Artificial sequence
  SiRNA target sequence
aaacacgttcttattcgat

SEQ ID NO: 50958 - DNA, 19 bp, Artificial sequence
  SiRNA target sequence
aacacgttcttattcgata

SEQ ID NO: 50959 - DNA, 19 bp, Artificial sequence
  SiRNA target sequence
acacgttcttattcgataa

SEQ ID NO: 50960 - DNA, 19 bp, Artificial sequence
  SiRNA target sequence
cacgttcttattcgataat

SEQ ID NO: 50961 - DNA, 19 bp, Artificial sequence
  SiRNA target sequence
acgttcttattcgataata

SEQ ID NO: 50962 - DNA, 19 bp, Artificial sequence
  SiRNA target sequence
cgttcttattcgataatac

SEQ ID NO: 50963 - DNA, 19 bp, Artificial sequence
  SiRNA target sequence
gttcttattcgataatact

SEQ ID NO: 50964 - DNA, 19 bp, Artificial sequence
  SiRNA target sequence
ttcttattcgataatactg

SEQ ID NO: 50965 - DNA, 19 bp, Artificial sequence
  SiRNA target sequence
tcttattcgataatactgt

SEQ ID NO: 50966 - DNA, 19 bp, Artificial sequence
  SiRNA target sequence
cttattcgataatactgtg

SEQ ID NO: 50967 - DNA, 19 bp, Artificial sequence
  SiRNA target sequence
ttattcgataatactgtga

SEQ ID NO: 50968 - DNA, 19 bp, Artificial sequence
  SiRNA target sequence
tattcgataatactgtgac

SEQ ID NO: 50969 - DNA, 19 bp, Artificial sequence
  SiRNA target sequence
attcgataatactgtgaca

SEQ ID NO: 50970 - DNA, 19 bp, Artificial sequence
  SiRNA target sequence
ttcgataatactgtgacat

SEQ ID NO: 50971 - DNA, 19 bp, Artificial sequence
  SiRNA target sequence
tcgataatactgtgacata

SEQ ID NO: 50972 - DNA, 19 bp, Artificial sequence
  SiRNA target sequence
cgataatactgtgacatac

SEQ ID NO: 50973 - DNA, 19 bp, Artificial sequence
  SiRNA target sequence
gataatactgtgacataca

SEQ ID NO: 50974 - DNA, 19 bp, Artificial sequence
  SiRNA target sequence
ataatactgtgacatacaa

SEQ ID NO: 50975 - DNA, 19 bp, Artificial sequence
  SiRNA target sequence
taatactgtgacatacaat

SEQ ID NO: 50976 - DNA, 19 bp, Artificial sequence
  SiRNA target sequence
aatactgtgacatacaata

SEQ ID NO: 50977 - DNA, 19 bp, Artificial sequence
  SiRNA target sequence
atactgtgacatacaatat

SEQ ID NO: 50978 - DNA, 19 bp, Artificial sequence
  SiRNA target sequence
tactgtgacatacaatata

SEQ ID NO: 50979 - DNA, 19 bp, Artificial sequence
  SiRNA target sequence
actgtgacatacaatatat

SEQ ID NO: 50980 - DNA, 19 bp, Artificial sequence
  SiRNA target sequence
ctgtgacatacaatatatt

SEQ ID NO: 50981 - DNA, 19 bp, Artificial sequence
  SiRNA target sequence
tgtgacatacaatatattt

SEQ ID NO: 50982 - DNA, 19 bp, Artificial sequence
  SiRNA target sequence
gtgacatacaatatatttt

SEQ ID NO: 50983 - DNA, 19 bp, Artificial sequence
  SiRNA target sequence
tgacatacaatatatttta

SEQ ID NO: 50984 - DNA, 19 bp, Artificial sequence
  SiRNA target sequence
gacatacaatatattttac

SEQ ID NO: 50985 - DNA, 19 bp, Artificial sequence
  SiRNA target sequence
acatacaatatattttacg

SEQ ID NO: 50986 - DNA, 19 bp, Artificial sequence
  SiRNA target sequence
catacaatatattttacgg

SEQ ID NO: 50987 - DNA, 19 bp, Artificial sequence
  SiRNA target sequence
atacaatatattttacggg

SEQ ID NO: 50988 - DNA, 19 bp, Artificial sequence
  SiRNA target sequence
tacaatatattttacggga

SEQ ID NO: 50989 - DNA, 19 bp, Artificial sequence
  SiRNA target sequence
acaatatattttacgggac

SEQ ID NO: 50990 - DNA, 19 bp, Artificial sequence
  SiRNA target sequence
caatatattttacgggact

SEQ ID NO: 50991 - DNA, 19 bp, Artificial sequence
  SiRNA target sequence
aatatattttacgggacta

SEQ ID NO: 50992 - DNA, 19 bp, Artificial sequence
  SiRNA target sequence
atatattttacgggactaa

SEQ ID NO: 50993 - DNA, 19 bp, Artificial sequence
  SiRNA target sequence
tatattttacgggactaaa

SEQ ID NO: 50994 - DNA, 19 bp, Artificial sequence
  SiRNA target sequence
atattttacgggactaaaa

SEQ ID NO: 50995 - DNA, 19 bp, Artificial sequence
  SiRNA target sequence
tattttacgggactaaaaa

SEQ ID NO: 50996 - DNA, 19 bp, Artificial sequence
  SiRNA target sequence
attttacgggactaaaaac

SEQ ID NO: 50997 - DNA, 19 bp, Artificial sequence
  SiRNA target sequence
ttttacgggactaaaaacg

SEQ ID NO: 50998 - DNA, 19 bp, Artificial sequence
  SiRNA target sequence
tttacgggactaaaaacgt

SEQ ID NO: 50999 - DNA, 19 bp, Artificial sequence
  SiRNA target sequence
ttacgggactaaaaacgta

SEQ ID NO: 51000 - DNA, 19 bp, Artificial sequence
  SiRNA target sequence
tacgggactaaaaacgtaa

SEQ ID NO: 51001 - DNA, 19 bp, Artificial sequence
  SiRNA target sequence
acgggactaaaaacgtaac

SEQ ID NO: 51002 - DNA, 19 bp, Artificial sequence
  SiRNA target sequence
cgggactaaaaacgtaaca

SEQ ID NO: 51003 - DNA, 19 bp, Artificial sequence
  SiRNA target sequence
gggactaaaaacgtaacag

SEQ ID NO: 51004 - DNA, 19 bp, Artificial sequence
  SiRNA target sequence
ggactaaaaacgtaacaga

SEQ ID NO: 51005 - DNA, 19 bp, Artificial sequence
  SiRNA target sequence
gactaaaaacgtaacagaa

SEQ ID NO: 51006 - DNA, 19 bp, Artificial sequence
  SiRNA target sequence
actaaaaacgtaacagaaa

SEQ ID NO: 51007 - DNA, 19 bp, Artificial sequence
  SiRNA target sequence
ctaaaaacgtaacagaaaa

SEQ ID NO: 51008 - DNA, 19 bp, Artificial sequence
  SiRNA target sequence
taaaaacgtaacagaaaaa

SEQ ID NO: 51009 - DNA, 19 bp, Artificial sequence
  SiRNA target sequence
aaaaacgtaacagaaaaag

SEQ ID NO: 51010 - DNA, 19 bp, Artificial sequence
  SiRNA target sequence
aaaacgtaacagaaaaaga

SEQ ID NO: 51011 - DNA, 19 bp, Artificial sequence
  SiRNA target sequence
aaacgtaacagaaaaagaa

SEQ ID NO: 51012 - DNA, 19 bp, Artificial sequence
  SiRNA target sequence
aacgtaacagaaaaagaag

SEQ ID NO: 51013 - DNA, 19 bp, Artificial sequence
  SiRNA target sequence
acgtaacagaaaaagaagt

SEQ ID NO: 51014 - DNA, 19 bp, Artificial sequence
  SiRNA target sequence
cgtaacagaaaaagaagtt

SEQ ID NO: 51015 - DNA, 19 bp, Artificial sequence
  SiRNA target sequence
gtaacagaaaaagaagttt

SEQ ID NO: 51016 - DNA, 19 bp, Artificial sequence
  SiRNA target sequence
taacagaaaaagaagtttt

SEQ ID NO: 51017 - DNA, 19 bp, Artificial sequence
  SiRNA target sequence
aacagaaaaagaagtttta

SEQ ID NO: 51018 - DNA, 19 bp, Artificial sequence
  SiRNA target sequence
acagaaaaagaagttttag

SEQ ID NO: 51019 - DNA, 19 bp, Artificial sequence
  SiRNA target sequence
cagaaaaagaagttttaga

SEQ ID NO: 51020 - DNA, 19 bp, Artificial sequence
  SiRNA target sequence
agaaaaagaagttttagaa

SEQ ID NO: 51021 - DNA, 19 bp, Artificial sequence
  SiRNA target sequence
gaaaaagaagttttagaat

SEQ ID NO: 51022 - DNA, 19 bp, Artificial sequence
  SiRNA target sequence
aaaaagaagttttagaatt

SEQ ID NO: 51023 - DNA, 19 bp, Artificial sequence
  SiRNA target sequence
aaaagaagttttagaatta

SEQ ID NO: 51024 - DNA, 19 bp, Artificial sequence
  SiRNA target sequence
aaagaagttttagaattag

SEQ ID NO: 51025 - DNA, 19 bp, Artificial sequence
  SiRNA target sequence
aagaagttttagaattagc

SEQ ID NO: 51026 - DNA, 19 bp, Artificial sequence
  SiRNA target sequence
agaagttttagaattagcc

SEQ ID NO: 51027 - DNA, 19 bp, Artificial sequence
  SiRNA target sequence
gaagttttagaattagcca

SEQ ID NO: 51028 - DNA, 19 bp, Artificial sequence
  SiRNA target sequence
aagttttagaattagccaa

SEQ ID NO: 51029 - DNA, 19 bp, Artificial sequence
  SiRNA target sequence
agttttagaattagccaaa

SEQ ID NO: 51030 - DNA, 19 bp, Artificial sequence
  SiRNA target sequence
gttttagaattagccaaaa

SEQ ID NO: 51031 - DNA, 19 bp, Artificial sequence
  SiRNA target sequence
ttttagaattagccaaaaa

SEQ ID NO: 51032 - DNA, 19 bp, Artificial sequence
  SiRNA target sequence
tttagaattagccaaaaaa

SEQ ID NO: 51033 - DNA, 19 bp, Artificial sequence
  SiRNA target sequence
ttagaattagccaaaaaaa

SEQ ID NO: 51034 - DNA, 19 bp, Artificial sequence
  SiRNA target sequence
tagaattagccaaaaaaat

SEQ ID NO: 51035 - DNA, 19 bp, Artificial sequence
  SiRNA target sequence
agaattagccaaaaaaata

SEQ ID NO: 51036 - DNA, 19 bp, Artificial sequence
  SiRNA target sequence
gaattagccaaaaaaatag

SEQ ID NO: 51037 - DNA, 19 bp, Artificial sequence
  SiRNA target sequence
aattagccaaaaaaatagg

SEQ ID NO: 51038 - DNA, 19 bp, Artificial sequence
  SiRNA target sequence
attagccaaaaaaataggt

SEQ ID NO: 51039 - DNA, 19 bp, Artificial sequence
  SiRNA target sequence
ttagccaaaaaaataggtg

SEQ ID NO: 51040 - DNA, 19 bp, Artificial sequence
  SiRNA target sequence
tagccaaaaaaataggtgt

SEQ ID NO: 51041 - DNA, 19 bp, Artificial sequence
  SiRNA target sequence
agccaaaaaaataggtgta

SEQ ID NO: 51042 - DNA, 19 bp, Artificial sequence
  SiRNA target sequence
gccaaaaaaataggtgtat

SEQ ID NO: 51043 - DNA, 19 bp, Artificial sequence
  SiRNA target sequence
ccaaaaaaataggtgtatt

SEQ ID NO: 51044 - DNA, 19 bp, Artificial sequence
  SiRNA target sequence
caaaaaaataggtgtatta

SEQ ID NO: 51045 - DNA, 19 bp, Artificial sequence
  SiRNA target sequence
aaaaaaataggtgtattag

SEQ ID NO: 51046 - DNA, 19 bp, Artificial sequence
  SiRNA target sequence
aaaaaataggtgtattaga

SEQ ID NO: 51047 - DNA, 19 bp, Artificial sequence
  SiRNA target sequence
aaaaataggtgtattagag

SEQ ID NO: 51048 - DNA, 19 bp, Artificial sequence
  SiRNA target sequence
aaaataggtgtattagagt

SEQ ID NO: 51049 - DNA, 19 bp, Artificial sequence
  SiRNA target sequence
aaataggtgtattagagtc

SEQ ID NO: 51050 - DNA, 19 bp, Artificial sequence
  SiRNA target sequence
aataggtgtattagagtct

SEQ ID NO: 51051 - DNA, 19 bp, Artificial sequence
  SiRNA target sequence
ataggtgtattagagtcta

SEQ ID NO: 51052 - DNA, 19 bp, Artificial sequence
  SiRNA target sequence
taggtgtattagagtctat

SEQ ID NO: 51053 - DNA, 19 bp, Artificial sequence
  SiRNA target sequence
aggtgtattagagtctata

SEQ ID NO: 51054 - DNA, 19 bp, Artificial sequence
  SiRNA target sequence
ggtgtattagagtctatac

SEQ ID NO: 51055 - DNA, 19 bp, Artificial sequence
  SiRNA target sequence
gtgtattagagtctataca

SEQ ID NO: 51056 - DNA, 19 bp, Artificial sequence
  SiRNA target sequence
tgtattagagtctatacag

SEQ ID NO: 51057 - DNA, 19 bp, Artificial sequence
  SiRNA target sequence
gtattagagtctatacagg

SEQ ID NO: 51058 - DNA, 19 bp, Artificial sequence
  SiRNA target sequence
tattagagtctatacagga

SEQ ID NO: 51059 - DNA, 19 bp, Artificial sequence
  SiRNA target sequence
attagagtctatacaggaa

SEQ ID NO: 51060 - DNA, 19 bp, Artificial sequence
  SiRNA target sequence
ttagagtctatacaggaat

SEQ ID NO: 51061 - DNA, 19 bp, Artificial sequence
  SiRNA target sequence
tagagtctatacaggaatt

SEQ ID NO: 51062 - DNA, 19 bp, Artificial sequence
  SiRNA target sequence
agagtctatacaggaattt

SEQ ID NO: 51063 - DNA, 19 bp, Artificial sequence
  SiRNA target sequence
gagtctatacaggaattta

SEQ ID NO: 51064 - DNA, 19 bp, Artificial sequence
  SiRNA target sequence
agtctatacaggaatttaa

SEQ ID NO: 51065 - DNA, 19 bp, Artificial sequence
  SiRNA target sequence
gtctatacaggaatttaaa

SEQ ID NO: 51066 - DNA, 19 bp, Artificial sequence
  SiRNA target sequence
tctatacaggaatttaaag

SEQ ID NO: 51067 - DNA, 19 bp, Artificial sequence
  SiRNA target sequence
ctatacaggaatttaaaga

SEQ ID NO: 51068 - DNA, 19 bp, Artificial sequence
  SiRNA target sequence
tatacaggaatttaaagat

SEQ ID NO: 51069 - DNA, 19 bp, Artificial sequence
  SiRNA target sequence
atacaggaatttaaagatg

SEQ ID NO: 51070 - DNA, 19 bp, Artificial sequence
  SiRNA target sequence
tacaggaatttaaagatgg

SEQ ID NO: 51071 - DNA, 19 bp, Artificial sequence
  SiRNA target sequence
acaggaatttaaagatggg

SEQ ID NO: 51072 - DNA, 19 bp, Artificial sequence
  SiRNA target sequence
caggaatttaaagatgggt

SEQ ID NO: 51073 - DNA, 19 bp, Artificial sequence
  SiRNA target sequence
aggaatttaaagatgggtt

SEQ ID NO: 51074 - DNA, 19 bp, Artificial sequence
  SiRNA target sequence
ggaatttaaagatgggttt

SEQ ID NO: 51075 - DNA, 19 bp, Artificial sequence
  SiRNA target sequence
gaatttaaagatgggttta

SEQ ID NO: 51076 - DNA, 19 bp, Artificial sequence
  SiRNA target sequence
aatttaaagatgggtttag

SEQ ID NO: 51077 - DNA, 19 bp, Artificial sequence
  SiRNA target sequence
atttaaagatgggtttagc

SEQ ID NO: 51078 - DNA, 19 bp, Artificial sequence
  SiRNA target sequence
tttaaagatgggtttagca

SEQ ID NO: 51079 - DNA, 19 bp, Artificial sequence
  SiRNA target sequence
ttaaagatgggtttagcac

SEQ ID NO: 51080 - DNA, 19 bp, Artificial sequence
  SiRNA target sequence
taaagatgggtttagcaca

SEQ ID NO: 51081 - DNA, 19 bp, Artificial sequence
  SiRNA target sequence
aaagatgggtttagcacat

SEQ ID NO: 51082 - DNA, 19 bp, Artificial sequence
  SiRNA target sequence
aagatgggtttagcacatc

SEQ ID NO: 51083 - DNA, 19 bp, Artificial sequence
  SiRNA target sequence
agatgggtttagcacatcg

SEQ ID NO: 51084 - DNA, 19 bp, Artificial sequence
  SiRNA target sequence
gatgggtttagcacatcgg

SEQ ID NO: 51085 - DNA, 19 bp, Artificial sequence
  SiRNA target sequence
atgggtttagcacatcggt

SEQ ID NO: 51086 - DNA, 19 bp, Artificial sequence
  SiRNA target sequence
tgggtttagcacatcggtc

SEQ ID NO: 51087 - DNA, 19 bp, Artificial sequence
  SiRNA target sequence
gggtttagcacatcggtcg

SEQ ID NO: 51088 - DNA, 19 bp, Artificial sequence
  SiRNA target sequence
ggtttagcacatcggtcgg

SEQ ID NO: 51089 - DNA, 19 bp, Artificial sequence
  SiRNA target sequence
gtttagcacatcggtcggt

SEQ ID NO: 51090 - DNA, 19 bp, Artificial sequence
  SiRNA target sequence
tttagcacatcggtcggtg

SEQ ID NO: 51091 - DNA, 19 bp, Artificial sequence
  SiRNA target sequence
ttagcacatcggtcggtga

SEQ ID NO: 51092 - DNA, 19 bp, Artificial sequence
  SiRNA target sequence
tagcacatcggtcggtgaa

SEQ ID NO: 51093 - DNA, 19 bp, Artificial sequence
  SiRNA target sequence
agcacatcggtcggtgaac

SEQ ID NO: 51094 - DNA, 19 bp, Artificial sequence
  SiRNA target sequence
gcacatcggtcggtgaacg

SEQ ID NO: 51095 - DNA, 19 bp, Artificial sequence
  SiRNA target sequence
cacatcggtcggtgaacgc

SEQ ID NO: 51096 - DNA, 19 bp, Artificial sequence
  SiRNA target sequence
acatcggtcggtgaacgcg

SEQ ID NO: 51097 - DNA, 19 bp, Artificial sequence
  SiRNA target sequence
catcggtcggtgaacgcgg

SEQ ID NO: 51098 - DNA, 19 bp, Artificial sequence
  SiRNA target sequence
atcggtcggtgaacgcgga

SEQ ID NO: 51099 - DNA, 19 bp, Artificial sequence
  SiRNA target sequence
tcggtcggtgaacgcggaa

SEQ ID NO: 51100 - DNA, 19 bp, Artificial sequence
  SiRNA target sequence
cggtcggtgaacgcggaag

SEQ ID NO: 51101 - DNA, 19 bp, Artificial sequence
  SiRNA target sequence
ggtcggtgaacgcggaaga

SEQ ID NO: 51102 - DNA, 19 bp, Artificial sequence
  SiRNA target sequence
gtcggtgaacgcggaagat

SEQ ID NO: 51103 - DNA, 19 bp, Artificial sequence
  SiRNA target sequence
tcggtgaacgcggaagatt

SEQ ID NO: 51104 - DNA, 19 bp, Artificial sequence
  SiRNA target sequence
cggtgaacgcggaagattt

SEQ ID NO: 51105 - DNA, 19 bp, Artificial sequence
  SiRNA target sequence
ggtgaacgcggaagatttt

SEQ ID NO: 51106 - DNA, 19 bp, Artificial sequence
  SiRNA target sequence
gtgaacgcggaagattttt

SEQ ID NO: 51107 - DNA, 19 bp, Artificial sequence
  SiRNA target sequence
tgaacgcggaagattttta

SEQ ID NO: 51108 - DNA, 19 bp, Artificial sequence
  SiRNA target sequence
gaacgcggaagatttttat

SEQ ID NO: 51109 - DNA, 19 bp, Artificial sequence
  SiRNA target sequence
aacgcggaagatttttatc

SEQ ID NO: 51110 - DNA, 19 bp, Artificial sequence
  SiRNA target sequence
acgcggaagatttttatct

SEQ ID NO: 51111 - DNA, 19 bp, Artificial sequence
  SiRNA target sequence
cgcggaagatttttatctg

SEQ ID NO: 51112 - DNA, 19 bp, Artificial sequence
  SiRNA target sequence
gcggaagatttttatctgg

SEQ ID NO: 51113 - DNA, 19 bp, Artificial sequence
  SiRNA target sequence
cggaagatttttatctggt

SEQ ID NO: 51114 - DNA, 19 bp, Artificial sequence
  SiRNA target sequence
ggaagatttttatctggtg

SEQ ID NO: 51115 - DNA, 19 bp, Artificial sequence
  SiRNA target sequence
gaagatttttatctggtgg

SEQ ID NO: 51116 - DNA, 19 bp, Artificial sequence
  SiRNA target sequence
aagatttttatctggtggt

SEQ ID NO: 51117 - DNA, 19 bp, Artificial sequence
  SiRNA target sequence
agatttttatctggtggtg

SEQ ID NO: 51118 - DNA, 19 bp, Artificial sequence
  SiRNA target sequence
gatttttatctggtggtga

SEQ ID NO: 51119 - DNA, 19 bp, Artificial sequence
  SiRNA target sequence
atttttatctggtggtgaa

SEQ ID NO: 51120 - DNA, 19 bp, Artificial sequence
  SiRNA target sequence
tttttatctggtggtgaaa

SEQ ID NO: 51121 - DNA, 19 bp, Artificial sequence
  SiRNA target sequence
ttttatctggtggtgaaag

SEQ ID NO: 51122 - DNA, 19 bp, Artificial sequence
  SiRNA target sequence
tttatctggtggtgaaagg

SEQ ID NO: 51123 - DNA, 19 bp, Artificial sequence
  SiRNA target sequence
ttatctggtggtgaaaggc

SEQ ID NO: 51124 - DNA, 19 bp, Artificial sequence
  SiRNA target sequence
tatctggtggtgaaaggca

SEQ ID NO: 51125 - DNA, 19 bp, Artificial sequence
  SiRNA target sequence
atctggtggtgaaaggcaa

SEQ ID NO: 51126 - DNA, 19 bp, Artificial sequence
  SiRNA target sequence
tctggtggtgaaaggcaaa

SEQ ID NO: 51127 - DNA, 19 bp, Artificial sequence
  SiRNA target sequence
ctggtggtgaaaggcaaaa

SEQ ID NO: 51128 - DNA, 19 bp, Artificial sequence
  SiRNA target sequence
tggtggtgaaaggcaaaaa

SEQ ID NO: 51129 - DNA, 19 bp, Artificial sequence
  SiRNA target sequence
ggtggtgaaaggcaaaaaa

SEQ ID NO: 51130 - DNA, 19 bp, Artificial sequence
  SiRNA target sequence
gtggtgaaaggcaaaaaat

SEQ ID NO: 51131 - DNA, 19 bp, Artificial sequence
  SiRNA target sequence
tggtgaaaggcaaaaaatt

SEQ ID NO: 51132 - DNA, 19 bp, Artificial sequence
  SiRNA target sequence
ggtgaaaggcaaaaaatta

SEQ ID NO: 51133 - DNA, 19 bp, Artificial sequence
  SiRNA target sequence
gtgaaaggcaaaaaattat

SEQ ID NO: 51134 - DNA, 19 bp, Artificial sequence
  SiRNA target sequence
tgaaaggcaaaaaattatg

SEQ ID NO: 51135 - DNA, 19 bp, Artificial sequence
  SiRNA target sequence
gaaaggcaaaaaattatgc

SEQ ID NO: 51136 - DNA, 19 bp, Artificial sequence
  SiRNA target sequence
aaaggcaaaaaattatgct

SEQ ID NO: 51137 - DNA, 19 bp, Artificial sequence
  SiRNA target sequence
aaggcaaaaaattatgctg

SEQ ID NO: 51138 - DNA, 19 bp, Artificial sequence
  SiRNA target sequence
aggcaaaaaattatgctga

SEQ ID NO: 51139 - DNA, 19 bp, Artificial sequence
  SiRNA target sequence
ggcaaaaaattatgctgat

SEQ ID NO: 51140 - DNA, 19 bp, Artificial sequence
  SiRNA target sequence
gcaaaaaattatgctgatg

SEQ ID NO: 51141 - DNA, 19 bp, Artificial sequence
  SiRNA target sequence
caaaaaattatgctgatgc

SEQ ID NO: 51142 - DNA, 19 bp, Artificial sequence
  SiRNA target sequence
aaaaaattatgctgatgcg

SEQ ID NO: 51143 - DNA, 19 bp, Artificial sequence
  SiRNA target sequence
aaaaattatgctgatgcgt

SEQ ID NO: 51144 - DNA, 19 bp, Artificial sequence
  SiRNA target sequence
aaaattatgctgatgcgtg

SEQ ID NO: 51145 - DNA, 19 bp, Artificial sequence
  SiRNA target sequence
aaattatgctgatgcgtgc

SEQ ID NO: 51146 - DNA, 19 bp, Artificial sequence
  SiRNA target sequence
aattatgctgatgcgtgca

SEQ ID NO: 51147 - DNA, 19 bp, Artificial sequence
  SiRNA target sequence
attatgctgatgcgtgcat

SEQ ID NO: 51148 - DNA, 19 bp, Artificial sequence
  SiRNA target sequence
ttatgctgatgcgtgcatt

SEQ ID NO: 51149 - DNA, 19 bp, Artificial sequence
  SiRNA target sequence
tatgctgatgcgtgcattg

SEQ ID NO: 51150 - DNA, 19 bp, Artificial sequence
  SiRNA target sequence
atgctgatgcgtgcattgc

SEQ ID NO: 51151 - DNA, 19 bp, Artificial sequence
  SiRNA target sequence
tgctgatgcgtgcattgct

SEQ ID NO: 51152 - DNA, 19 bp, Artificial sequence
  SiRNA target sequence
gctgatgcgtgcattgctt

SEQ ID NO: 51153 - DNA, 19 bp, Artificial sequence
  SiRNA target sequence
ctgatgcgtgcattgctta

SEQ ID NO: 51154 - DNA, 19 bp, Artificial sequence
  SiRNA target sequence
tgatgcgtgcattgcttaa

SEQ ID NO: 51155 - DNA, 19 bp, Artificial sequence
  SiRNA target sequence
gatgcgtgcattgcttaaa

SEQ ID NO: 51156 - DNA, 19 bp, Artificial sequence
  SiRNA target sequence
atgcgtgcattgcttaaaa

SEQ ID NO: 51157 - DNA, 19 bp, Artificial sequence
  SiRNA target sequence
tgcgtgcattgcttaaaaa

SEQ ID NO: 51158 - DNA, 19 bp, Artificial sequence
  SiRNA target sequence
gcgtgcattgcttaaaaat

SEQ ID NO: 51159 - DNA, 19 bp, Artificial sequence
  SiRNA target sequence
cgtgcattgcttaaaaatt

SEQ ID NO: 51160 - DNA, 19 bp, Artificial sequence
  SiRNA target sequence
gtgcattgcttaaaaattc

SEQ ID NO: 51161 - DNA, 19 bp, Artificial sequence
  SiRNA target sequence
tgcattgcttaaaaattca

SEQ ID NO: 51162 - DNA, 19 bp, Artificial sequence
  SiRNA target sequence
gcattgcttaaaaattcag

SEQ ID NO: 51163 - DNA, 19 bp, Artificial sequence
  SiRNA target sequence
cattgcttaaaaattcaga

SEQ ID NO: 51164 - DNA, 19 bp, Artificial sequence
  SiRNA target sequence
attgcttaaaaattcagag

SEQ ID NO: 51165 - DNA, 19 bp, Artificial sequence
  SiRNA target sequence
ttgcttaaaaattcagaga

SEQ ID NO: 51166 - DNA, 19 bp, Artificial sequence
  SiRNA target sequence
tgcttaaaaattcagagat

SEQ ID NO: 51167 - DNA, 19 bp, Artificial sequence
  SiRNA target sequence
gcttaaaaattcagagatc

SEQ ID NO: 51168 - DNA, 19 bp, Artificial sequence
  SiRNA target sequence
cttaaaaattcagagatcg

SEQ ID NO: 51169 - DNA, 19 bp, Artificial sequence
  SiRNA target sequence
ttaaaaattcagagatcgt

SEQ ID NO: 51170 - DNA, 19 bp, Artificial sequence
  SiRNA target sequence
taaaaattcagagatcgtt

SEQ ID NO: 51171 - DNA, 19 bp, Artificial sequence
  SiRNA target sequence
aaaaattcagagatcgttt

SEQ ID NO: 51172 - DNA, 19 bp, Artificial sequence
  SiRNA target sequence
aaaattcagagatcgtttt

SEQ ID NO: 51173 - DNA, 19 bp, Artificial sequence
  SiRNA target sequence
aaattcagagatcgtttta

SEQ ID NO: 51174 - DNA, 19 bp, Artificial sequence
  SiRNA target sequence
aattcagagatcgttttat

SEQ ID NO: 51175 - DNA, 19 bp, Artificial sequence
  SiRNA target sequence
attcagagatcgttttatt

SEQ ID NO: 51176 - DNA, 19 bp, Artificial sequence
  SiRNA target sequence
ttcagagatcgttttatta

SEQ ID NO: 51177 - DNA, 19 bp, Artificial sequence
  SiRNA target sequence
tcagagatcgttttattag

SEQ ID NO: 51178 - DNA, 19 bp, Artificial sequence
  SiRNA target sequence
cagagatcgttttattaga

SEQ ID NO: 51179 - DNA, 19 bp, Artificial sequence
  SiRNA target sequence
agagatcgttttattagac

SEQ ID NO: 51180 - DNA, 19 bp, Artificial sequence
  SiRNA target sequence
gagatcgttttattagacg

SEQ ID NO: 51181 - DNA, 19 bp, Artificial sequence
  SiRNA target sequence
agatcgttttattagacga

SEQ ID NO: 51182 - DNA, 19 bp, Artificial sequence
  SiRNA target sequence
gatcgttttattagacgag

SEQ ID NO: 51183 - DNA, 19 bp, Artificial sequence
  SiRNA target sequence
atcgttttattagacgagc

SEQ ID NO: 51184 - DNA, 19 bp, Artificial sequence
  SiRNA target sequence
tcgttttattagacgagcc

SEQ ID NO: 51185 - DNA, 19 bp, Artificial sequence
  SiRNA target sequence
cgttttattagacgagcca

SEQ ID NO: 51186 - DNA, 19 bp, Artificial sequence
  SiRNA target sequence
gttttattagacgagccaa

SEQ ID NO: 51187 - DNA, 19 bp, Artificial sequence
  SiRNA target sequence
ttttattagacgagccaac

SEQ ID NO: 51188 - DNA, 19 bp, Artificial sequence
  SiRNA target sequence
tttattagacgagccaacc

SEQ ID NO: 51189 - DNA, 19 bp, Artificial sequence
  SiRNA target sequence
ttattagacgagccaacct

SEQ ID NO: 51190 - DNA, 19 bp, Artificial sequence
  SiRNA target sequence
tattagacgagccaacctc

SEQ ID NO: 51191 - DNA, 19 bp, Artificial sequence
  SiRNA target sequence
attagacgagccaacctca

SEQ ID NO: 51192 - DNA, 19 bp, Artificial sequence
  SiRNA target sequence
ttagacgagccaacctcag

SEQ ID NO: 51193 - DNA, 19 bp, Artificial sequence
  SiRNA target sequence
tagacgagccaacctcagc

SEQ ID NO: 51194 - DNA, 19 bp, Artificial sequence
  SiRNA target sequence
agacgagccaacctcagca

SEQ ID NO: 51195 - DNA, 19 bp, Artificial sequence
  SiRNA target sequence
gacgagccaacctcagcac

SEQ ID NO: 51196 - DNA, 19 bp, Artificial sequence
  SiRNA target sequence
acgagccaacctcagcact

SEQ ID NO: 51197 - DNA, 19 bp, Artificial sequence
  SiRNA target sequence
cgagccaacctcagcacta

SEQ ID NO: 51198 - DNA, 19 bp, Artificial sequence
  SiRNA target sequence
gagccaacctcagcactag

SEQ ID NO: 51199 - DNA, 19 bp, Artificial sequence
  SiRNA target sequence
agccaacctcagcactaga

SEQ ID NO: 51200 - DNA, 19 bp, Artificial sequence
  SiRNA target sequence
gccaacctcagcactagat

SEQ ID NO: 51201 - DNA, 19 bp, Artificial sequence
  SiRNA target sequence
ccaacctcagcactagata

SEQ ID NO: 51202 - DNA, 19 bp, Artificial sequence
  SiRNA target sequence
caacctcagcactagataa

SEQ ID NO: 51203 - DNA, 19 bp, Artificial sequence
  SiRNA target sequence
aacctcagcactagataaa

SEQ ID NO: 51204 - DNA, 19 bp, Artificial sequence
  SiRNA target sequence
acctcagcactagataaaa

SEQ ID NO: 51205 - DNA, 19 bp, Artificial sequence
  SiRNA target sequence
cctcagcactagataaaaa

SEQ ID NO: 51206 - DNA, 19 bp, Artificial sequence
  SiRNA target sequence
ctcagcactagataaaaag

SEQ ID NO: 51207 - DNA, 19 bp, Artificial sequence
  SiRNA target sequence
tcagcactagataaaaaga

SEQ ID NO: 51208 - DNA, 19 bp, Artificial sequence
  SiRNA target sequence
cagcactagataaaaagag

SEQ ID NO: 51209 - DNA, 19 bp, Artificial sequence
  SiRNA target sequence
agcactagataaaaagagt

SEQ ID NO: 51210 - DNA, 19 bp, Artificial sequence
  SiRNA target sequence
gcactagataaaaagagtg

SEQ ID NO: 51211 - DNA, 19 bp, Artificial sequence
  SiRNA target sequence
cactagataaaaagagtga

SEQ ID NO: 51212 - DNA, 19 bp, Artificial sequence
  SiRNA target sequence
actagataaaaagagtgaa

SEQ ID NO: 51213 - DNA, 19 bp, Artificial sequence
  SiRNA target sequence
ctagataaaaagagtgaac

SEQ ID NO: 51214 - DNA, 19 bp, Artificial sequence
  SiRNA target sequence
tagataaaaagagtgaact

SEQ ID NO: 51215 - DNA, 19 bp, Artificial sequence
  SiRNA target sequence
agataaaaagagtgaacta

SEQ ID NO: 51216 - DNA, 19 bp, Artificial sequence
  SiRNA target sequence
gataaaaagagtgaactag

SEQ ID NO: 51217 - DNA, 19 bp, Artificial sequence
  SiRNA target sequence
ataaaaagagtgaactaga

SEQ ID NO: 51218 - DNA, 19 bp, Artificial sequence
  SiRNA target sequence
taaaaagagtgaactagaa

SEQ ID NO: 51219 - DNA, 19 bp, Artificial sequence
  SiRNA target sequence
aaaaagagtgaactagaaa

SEQ ID NO: 51220 - DNA, 19 bp, Artificial sequence
  SiRNA target sequence
aaaagagtgaactagaaac

SEQ ID NO: 51221 - DNA, 19 bp, Artificial sequence
  SiRNA target sequence
aaagagtgaactagaaact

SEQ ID NO: 51222 - DNA, 19 bp, Artificial sequence
  SiRNA target sequence
aagagtgaactagaaacta

SEQ ID NO: 51223 - DNA, 19 bp, Artificial sequence
  SiRNA target sequence
agagtgaactagaaactat

SEQ ID NO: 51224 - DNA, 19 bp, Artificial sequence
  SiRNA target sequence
gagtgaactagaaactatg

SEQ ID NO: 51225 - DNA, 19 bp, Artificial sequence
  SiRNA target sequence
agtgaactagaaactatga

SEQ ID NO: 51226 - DNA, 19 bp, Artificial sequence
  SiRNA target sequence
gtgaactagaaactatgac

SEQ ID NO: 51227 - DNA, 19 bp, Artificial sequence
  SiRNA target sequence
tgaactagaaactatgaca

SEQ ID NO: 51228 - DNA, 19 bp, Artificial sequence
  SiRNA target sequence
gaactagaaactatgacat

SEQ ID NO: 51229 - DNA, 19 bp, Artificial sequence
  SiRNA target sequence
aactagaaactatgacata

SEQ ID NO: 51230 - DNA, 19 bp, Artificial sequence
  SiRNA target sequence
actagaaactatgacatat

SEQ ID NO: 51231 - DNA, 19 bp, Artificial sequence
  SiRNA target sequence
ctagaaactatgacatata

SEQ ID NO: 51232 - DNA, 19 bp, Artificial sequence
  SiRNA target sequence
tagaaactatgacatatat

SEQ ID NO: 51233 - DNA, 19 bp, Artificial sequence
  SiRNA target sequence
agaaactatgacatatatt

SEQ ID NO: 51234 - DNA, 19 bp, Artificial sequence
  SiRNA target sequence
gaaactatgacatatattt

SEQ ID NO: 51235 - DNA, 19 bp, Artificial sequence
  SiRNA target sequence
aaactatgacatatatttt

SEQ ID NO: 51236 - DNA, 19 bp, Artificial sequence
  SiRNA target sequence
aactatgacatatattttt

SEQ ID NO: 51237 - DNA, 19 bp, Artificial sequence
  SiRNA target sequence
actatgacatatattttta

SEQ ID NO: 51238 - DNA, 19 bp, Artificial sequence
  SiRNA target sequence
ctatgacatatatttttaa

SEQ ID NO: 51239 - DNA, 19 bp, Artificial sequence
  SiRNA target sequence
tatgacatatatttttaat

SEQ ID NO: 51240 - DNA, 19 bp, Artificial sequence
  SiRNA target sequence
atgacatatatttttaatg

SEQ ID NO: 51241 - DNA, 19 bp, Artificial sequence
  SiRNA target sequence
tgacatatatttttaatga

SEQ ID NO: 51242 - DNA, 19 bp, Artificial sequence
  SiRNA target sequence
gacatatatttttaatgaa

SEQ ID NO: 51243 - DNA, 19 bp, Artificial sequence
  SiRNA target sequence
acatatatttttaatgaat

SEQ ID NO: 51244 - DNA, 19 bp, Artificial sequence
  SiRNA target sequence
catatatttttaatgaatt

SEQ ID NO: 51245 - DNA, 19 bp, Artificial sequence
  SiRNA target sequence
atatatttttaatgaattt

SEQ ID NO: 51246 - DNA, 19 bp, Artificial sequence
  SiRNA target sequence
tatatttttaatgaattta

SEQ ID NO: 51247 - DNA, 19 bp, Artificial sequence
  SiRNA target sequence
atatttttaatgaatttaa

SEQ ID NO: 51248 - DNA, 19 bp, Artificial sequence
  SiRNA target sequence
tatttttaatgaatttaag

SEQ ID NO: 51249 - DNA, 19 bp, Artificial sequence
  SiRNA target sequence
atttttaatgaatttaagt

SEQ ID NO: 51250 - DNA, 19 bp, Artificial sequence
  SiRNA target sequence
tttttaatgaatttaagta

SEQ ID NO: 51251 - DNA, 19 bp, Artificial sequence
  SiRNA target sequence
ttttaatgaatttaagtac

SEQ ID NO: 51252 - DNA, 19 bp, Artificial sequence
  SiRNA target sequence
tttaatgaatttaagtacc

SEQ ID NO: 51253 - DNA, 19 bp, Artificial sequence
  SiRNA target sequence
ttaatgaatttaagtacca

SEQ ID NO: 51254 - DNA, 19 bp, Artificial sequence
  SiRNA target sequence
taatgaatttaagtaccat

SEQ ID NO: 51255 - DNA, 19 bp, Artificial sequence
  SiRNA target sequence
aatgaatttaagtaccata

SEQ ID NO: 51256 - DNA, 19 bp, Artificial sequence
  SiRNA target sequence
atgaatttaagtaccatac

SEQ ID NO: 51257 - DNA, 19 bp, Artificial sequence
  SiRNA target sequence
tgaatttaagtaccatact

SEQ ID NO: 51258 - DNA, 19 bp, Artificial sequence
  SiRNA target sequence
gaatttaagtaccatactt

SEQ ID NO: 51259 - DNA, 19 bp, Artificial sequence
  SiRNA target sequence
aatttaagtaccatacttt

SEQ ID NO: 51260 - DNA, 19 bp, Artificial sequence
  SiRNA target sequence
atttaagtaccatactttt

SEQ ID NO: 51261 - DNA, 19 bp, Artificial sequence
  SiRNA target sequence
tttaagtaccatacttttg

SEQ ID NO: 51262 - DNA, 19 bp, Artificial sequence
  SiRNA target sequence
ttaagtaccatacttttgt

SEQ ID NO: 51263 - DNA, 19 bp, Artificial sequence
  SiRNA target sequence
taagtaccatacttttgta

SEQ ID NO: 51264 - DNA, 19 bp, Artificial sequence
  SiRNA target sequence
aagtaccatacttttgtaa

SEQ ID NO: 51265 - DNA, 19 bp, Artificial sequence
  SiRNA target sequence
agtaccatacttttgtaat

SEQ ID NO: 51266 - DNA, 19 bp, Artificial sequence
  SiRNA target sequence
gtaccatacttttgtaata

SEQ ID NO: 51267 - DNA, 19 bp, Artificial sequence
  SiRNA target sequence
taccatacttttgtaataa

SEQ ID NO: 51268 - DNA, 19 bp, Artificial sequence
  SiRNA target sequence
accatacttttgtaataat

SEQ ID NO: 51269 - DNA, 19 bp, Artificial sequence
  SiRNA target sequence
ccatacttttgtaataatt

SEQ ID NO: 51270 - DNA, 19 bp, Artificial sequence
  SiRNA target sequence
catacttttgtaataattg

SEQ ID NO: 51271 - DNA, 19 bp, Artificial sequence
  SiRNA target sequence
atacttttgtaataattgt

SEQ ID NO: 51272 - DNA, 19 bp, Artificial sequence
  SiRNA target sequence
tacttttgtaataattgta

SEQ ID NO: 51273 - DNA, 19 bp, Artificial sequence
  SiRNA target sequence
acttttgtaataattgtac

SEQ ID NO: 51274 - DNA, 19 bp, Artificial sequence
  SiRNA target sequence
cttttgtaataattgtaca

SEQ ID NO: 51275 - DNA, 19 bp, Artificial sequence
  SiRNA target sequence
ttttgtaataattgtacac

SEQ ID NO: 51276 - DNA, 19 bp, Artificial sequence
  SiRNA target sequence
tttgtaataattgtacaca

SEQ ID NO: 51277 - DNA, 19 bp, Artificial sequence
  SiRNA target sequence
ttgtaataattgtacacaa

SEQ ID NO: 51278 - DNA, 19 bp, Artificial sequence
  SiRNA target sequence
tgtaataattgtacacaat

SEQ ID NO: 51279 - DNA, 19 bp, Artificial sequence
  SiRNA target sequence
gtaataattgtacacaatc

SEQ ID NO: 51280 - DNA, 19 bp, Artificial sequence
  SiRNA target sequence
taataattgtacacaatct

SEQ ID NO: 51281 - DNA, 19 bp, Artificial sequence
  SiRNA target sequence
aataattgtacacaatcta

SEQ ID NO: 51282 - DNA, 19 bp, Artificial sequence
  SiRNA target sequence
ataattgtacacaatctag

SEQ ID NO: 51283 - DNA, 19 bp, Artificial sequence
  SiRNA target sequence
taattgtacacaatctaga

SEQ ID NO: 51284 - DNA, 19 bp, Artificial sequence
  SiRNA target sequence
aattgtacacaatctagaa

SEQ ID NO: 51285 - DNA, 19 bp, Artificial sequence
  SiRNA target sequence
attgtacacaatctagaat

SEQ ID NO: 51286 - DNA, 19 bp, Artificial sequence
  SiRNA target sequence
ttgtacacaatctagaatt

SEQ ID NO: 51287 - DNA, 19 bp, Artificial sequence
  SiRNA target sequence
tgtacacaatctagaatta

SEQ ID NO: 51288 - DNA, 19 bp, Artificial sequence
  SiRNA target sequence
gtacacaatctagaattat

SEQ ID NO: 51289 - DNA, 19 bp, Artificial sequence
  SiRNA target sequence
tacacaatctagaattatt

SEQ ID NO: 51290 - DNA, 19 bp, Artificial sequence
  SiRNA target sequence
acacaatctagaattattg

SEQ ID NO: 51291 - DNA, 19 bp, Artificial sequence
  SiRNA target sequence
cacaatctagaattattgg

SEQ ID NO: 51292 - DNA, 19 bp, Artificial sequence
  SiRNA target sequence
acaatctagaattattggc

SEQ ID NO: 51293 - DNA, 19 bp, Artificial sequence
  SiRNA target sequence
caatctagaattattggct

SEQ ID NO: 51294 - DNA, 19 bp, Artificial sequence
  SiRNA target sequence
aatctagaattattggctt

SEQ ID NO: 51295 - DNA, 19 bp, Artificial sequence
  SiRNA target sequence
atctagaattattggcttt

SEQ ID NO: 51296 - DNA, 19 bp, Artificial sequence
  SiRNA target sequence
tctagaattattggctttg

SEQ ID NO: 51297 - DNA, 19 bp, Artificial sequence
  SiRNA target sequence
ctagaattattggctttgt

SEQ ID NO: 51298 - DNA, 19 bp, Artificial sequence
  SiRNA target sequence
tagaattattggctttgtt

SEQ ID NO: 51299 - DNA, 19 bp, Artificial sequence
  SiRNA target sequence
agaattattggctttgttt

SEQ ID NO: 51300 - DNA, 19 bp, Artificial sequence
  SiRNA target sequence
gaattattggctttgtttg

SEQ ID NO: 51301 - DNA, 19 bp, Artificial sequence
  SiRNA target sequence
aattattggctttgtttga

SEQ ID NO: 51302 - DNA, 19 bp, Artificial sequence
  SiRNA target sequence
attattggctttgtttgat

SEQ ID NO: 51303 - DNA, 19 bp, Artificial sequence
  SiRNA target sequence
ttattggctttgtttgata

SEQ ID NO: 51304 - DNA, 19 bp, Artificial sequence
  SiRNA target sequence
tattggctttgtttgataa

SEQ ID NO: 51305 - DNA, 19 bp, Artificial sequence
  SiRNA target sequence
attggctttgtttgataaa

SEQ ID NO: 51306 - DNA, 19 bp, Artificial sequence
  SiRNA target sequence
ttggctttgtttgataaaa

SEQ ID NO: 51307 - DNA, 19 bp, Artificial sequence
  SiRNA target sequence
tggctttgtttgataaaat

SEQ ID NO: 51308 - DNA, 19 bp, Artificial sequence
  SiRNA target sequence
ggctttgtttgataaaatt

SEQ ID NO: 51309 - DNA, 19 bp, Artificial sequence
  SiRNA target sequence
gctttgtttgataaaattt

SEQ ID NO: 51310 - DNA, 19 bp, Artificial sequence
  SiRNA target sequence
ctttgtttgataaaatttt

SEQ ID NO: 51311 - DNA, 19 bp, Artificial sequence
  SiRNA target sequence
tttgtttgataaaatttta

SEQ ID NO: 51312 - DNA, 19 bp, Artificial sequence
  SiRNA target sequence
ttgtttgataaaattttat

SEQ ID NO: 51313 - DNA, 19 bp, Artificial sequence
  SiRNA target sequence
tgtttgataaaattttatt

SEQ ID NO: 51314 - DNA, 19 bp, Artificial sequence
  SiRNA target sequence
gtttgataaaattttattt

SEQ ID NO: 51315 - DNA, 19 bp, Artificial sequence
  SiRNA target sequence
tttgataaaattttatttg

SEQ ID NO: 51316 - DNA, 19 bp, Artificial sequence
  SiRNA target sequence
ttgataaaattttatttgt

SEQ ID NO: 51317 - DNA, 19 bp, Artificial sequence
  SiRNA target sequence
tgataaaattttatttgta

SEQ ID NO: 51318 - DNA, 19 bp, Artificial sequence
  SiRNA target sequence
gataaaattttatttgtaa

SEQ ID NO: 51319 - DNA, 19 bp, Artificial sequence
  SiRNA target sequence
ataaaattttatttgtaaa

SEQ ID NO: 51320 - DNA, 19 bp, Artificial sequence
  SiRNA target sequence
taaaattttatttgtaaat

SEQ ID NO: 51321 - DNA, 19 bp, Artificial sequence
  SiRNA target sequence
aaaattttatttgtaaatg

SEQ ID NO: 51322 - DNA, 19 bp, Artificial sequence
  SiRNA target sequence
aaattttatttgtaaatgg

SEQ ID NO: 51323 - DNA, 19 bp, Artificial sequence
  SiRNA target sequence
aattttatttgtaaatggt

SEQ ID NO: 51324 - DNA, 19 bp, Artificial sequence
  SiRNA target sequence
attttatttgtaaatggta

SEQ ID NO: 51325 - DNA, 19 bp, Artificial sequence
  SiRNA target sequence
ttttatttgtaaatggtaa

SEQ ID NO: 51326 - DNA, 19 bp, Artificial sequence
  SiRNA target sequence
tttatttgtaaatggtaat

SEQ ID NO: 51327 - DNA, 19 bp, Artificial sequence
  SiRNA target sequence
ttatttgtaaatggtaatg

SEQ ID NO: 51328 - DNA, 19 bp, Artificial sequence
  SiRNA target sequence
tatttgtaaatggtaatga

SEQ ID NO: 51329 - DNA, 19 bp, Artificial sequence
  SiRNA target sequence
atttgtaaatggtaatgag

SEQ ID NO: 51330 - DNA, 19 bp, Artificial sequence
  SiRNA target sequence
tttgtaaatggtaatgagg

SEQ ID NO: 51331 - DNA, 19 bp, Artificial sequence
  SiRNA target sequence
ttgtaaatggtaatgaggt

SEQ ID NO: 51332 - DNA, 19 bp, Artificial sequence
  SiRNA target sequence
tgtaaatggtaatgaggta

SEQ ID NO: 51333 - DNA, 19 bp, Artificial sequence
  SiRNA target sequence
gtaaatggtaatgaggtaa

SEQ ID NO: 51334 - DNA, 19 bp, Artificial sequence
  SiRNA target sequence
taaatggtaatgaggtaac

SEQ ID NO: 51335 - DNA, 19 bp, Artificial sequence
  SiRNA target sequence
aaatggtaatgaggtaaca

SEQ ID NO: 51336 - DNA, 19 bp, Artificial sequence
  SiRNA target sequence
aatggtaatgaggtaacaa

SEQ ID NO: 51337 - DNA, 19 bp, Artificial sequence
  SiRNA target sequence
atggtaatgaggtaacaat

SEQ ID NO: 51338 - DNA, 19 bp, Artificial sequence
  SiRNA target sequence
tggtaatgaggtaacaatg

SEQ ID NO: 51339 - DNA, 19 bp, Artificial sequence
  SiRNA target sequence
ggtaatgaggtaacaatga

SEQ ID NO: 51340 - DNA, 19 bp, Artificial sequence
  SiRNA target sequence
gtaatgaggtaacaatgat

SEQ ID NO: 51341 - DNA, 19 bp, Artificial sequence
  SiRNA target sequence
taatgaggtaacaatgata

SEQ ID NO: 51342 - DNA, 19 bp, Artificial sequence
  SiRNA target sequence
aatgaggtaacaatgatag

SEQ ID NO: 51343 - DNA, 19 bp, Artificial sequence
  SiRNA target sequence
atgaggtaacaatgataga

SEQ ID NO: 51344 - DNA, 19 bp, Artificial sequence
  SiRNA target sequence
tgaggtaacaatgatagaa

SEQ ID NO: 51345 - DNA, 19 bp, Artificial sequence
  SiRNA target sequence
gaggtaacaatgatagaag

SEQ ID NO: 51346 - DNA, 19 bp, Artificial sequence
  SiRNA target sequence
aggtaacaatgatagaaga

SEQ ID NO: 51347 - DNA, 19 bp, Artificial sequence
  SiRNA target sequence
ggtaacaatgatagaagac

SEQ ID NO: 51348 - DNA, 19 bp, Artificial sequence
  SiRNA target sequence
gtaacaatgatagaagaca

SEQ ID NO: 51349 - DNA, 19 bp, Artificial sequence
  SiRNA target sequence
taacaatgatagaagacat

SEQ ID NO: 51350 - DNA, 19 bp, Artificial sequence
  SiRNA target sequence
aacaatgatagaagacatt

SEQ ID NO: 51351 - DNA, 19 bp, Artificial sequence
  SiRNA target sequence
acaatgatagaagacatta

SEQ ID NO: 51352 - DNA, 19 bp, Artificial sequence
  SiRNA target sequence
caatgatagaagacattaa

SEQ ID NO: 51353 - DNA, 19 bp, Artificial sequence
  SiRNA target sequence
aatgatagaagacattaac

SEQ ID NO: 51354 - DNA, 19 bp, Artificial sequence
  SiRNA target sequence
atgatagaagacattaaca

SEQ ID NO: 51355 - DNA, 19 bp, Artificial sequence
  SiRNA target sequence
tgatagaagacattaacaa

SEQ ID NO: 51356 - DNA, 19 bp, Artificial sequence
  SiRNA target sequence
gatagaagacattaacaaa

SEQ ID NO: 51357 - DNA, 19 bp, Artificial sequence
  SiRNA target sequence
atagaagacattaacaaaa

SEQ ID NO: 51358 - DNA, 19 bp, Artificial sequence
  SiRNA target sequence
tagaagacattaacaaaaa

SEQ ID NO: 51359 - DNA, 19 bp, Artificial sequence
  SiRNA target sequence
agaagacattaacaaaaaa

SEQ ID NO: 51360 - DNA, 19 bp, Artificial sequence
  SiRNA target sequence
gaagacattaacaaaaaac

SEQ ID NO: 51361 - DNA, 19 bp, Artificial sequence
  SiRNA target sequence
aagacattaacaaaaaact

SEQ ID NO: 51362 - DNA, 19 bp, Artificial sequence
  SiRNA target sequence
agacattaacaaaaaactt

SEQ ID NO: 51363 - DNA, 19 bp, Artificial sequence
  SiRNA target sequence
gacattaacaaaaaacttg

SEQ ID NO: 51364 - DNA, 19 bp, Artificial sequence
  SiRNA target sequence
acattaacaaaaaacttga

SEQ ID NO: 51365 - DNA, 19 bp, Artificial sequence
  SiRNA target sequence
cattaacaaaaaacttgaa

SEQ ID NO: 51366 - DNA, 19 bp, Artificial sequence
  SiRNA target sequence
attaacaaaaaacttgaag

SEQ ID NO: 51367 - DNA, 19 bp, Artificial sequence
  SiRNA target sequence
ttaacaaaaaacttgaaga

SEQ ID NO: 51368 - DNA, 19 bp, Artificial sequence
  SiRNA target sequence
taacaaaaaacttgaagaa

SEQ ID NO: 51369 - DNA, 19 bp, Artificial sequence
  SiRNA target sequence
aacaaaaaacttgaagaaa

SEQ ID NO: 51370 - DNA, 19 bp, Artificial sequence
  SiRNA target sequence
acaaaaaacttgaagaaaa

SEQ ID NO: 51371 - DNA, 19 bp, Artificial sequence
  SiRNA target sequence
caaaaaacttgaagaaaat

SEQ ID NO: 51372 - DNA, 19 bp, Artificial sequence
  SiRNA target sequence
aaaaaacttgaagaaaatt

SEQ ID NO: 51373 - DNA, 19 bp, Artificial sequence
  SiRNA target sequence
aaaaacttgaagaaaattc

SEQ ID NO: 51374 - DNA, 19 bp, Artificial sequence
  SiRNA target sequence
aaaacttgaagaaaattca

SEQ ID NO: 51375 - DNA, 19 bp, Artificial sequence
  SiRNA target sequence
aaacttgaagaaaattcaa

SEQ ID NO: 51376 - DNA, 19 bp, Artificial sequence
  SiRNA target sequence
aacttgaagaaaattcaaa

SEQ ID NO: 51377 - DNA, 19 bp, Artificial sequence
  SiRNA target sequence
acttgaagaaaattcaaag

SEQ ID NO: 51378 - DNA, 19 bp, Artificial sequence
  SiRNA target sequence
cttgaagaaaattcaaagt

SEQ ID NO: 51379 - DNA, 19 bp, Artificial sequence
  SiRNA target sequence
ttgaagaaaattcaaagta

SEQ ID NO: 51380 - DNA, 19 bp, Artificial sequence
  SiRNA target sequence
tgaagaaaattcaaagtat

SEQ ID NO: 51381 - DNA, 19 bp, Artificial sequence
  SiRNA target sequence
gaagaaaattcaaagtatt

SEQ ID NO: 51382 - DNA, 19 bp, Artificial sequence
  SiRNA target sequence
aagaaaattcaaagtattt

SEQ ID NO: 51383 - DNA, 19 bp, Artificial sequence
  SiRNA target sequence
agaaaattcaaagtatttt

SEQ ID NO: 51384 - DNA, 19 bp, Artificial sequence
  SiRNA target sequence
gaaaattcaaagtattttg

SEQ ID NO: 51385 - DNA, 19 bp, Artificial sequence
  SiRNA target sequence
aaaattcaaagtattttgc

SEQ ID NO: 51386 - DNA, 19 bp, Artificial sequence
  SiRNA target sequence
aaattcaaagtattttgca

SEQ ID NO: 51387 - DNA, 19 bp, Artificial sequence
  SiRNA target sequence
aattcaaagtattttgcag

SEQ ID NO: 51388 - DNA, 19 bp, Artificial sequence
  SiRNA target sequence
attcaaagtattttgcaga

SEQ ID NO: 51389 - DNA, 19 bp, Artificial sequence
  SiRNA target sequence
ttcaaagtattttgcagat

SEQ ID NO: 51390 - DNA, 19 bp, Artificial sequence
  SiRNA target sequence
tcaaagtattttgcagata

SEQ ID NO: 51391 - DNA, 19 bp, Artificial sequence
  SiRNA target sequence
caaagtattttgcagatat

SEQ ID NO: 51392 - DNA, 19 bp, Artificial sequence
  SiRNA target sequence
aaagtattttgcagatatt

SEQ ID NO: 51393 - DNA, 19 bp, Artificial sequence
  SiRNA target sequence
aagtattttgcagatattt

SEQ ID NO: 51394 - DNA, 19 bp, Artificial sequence
  SiRNA target sequence
agtattttgcagatatttt

SEQ ID NO: 51395 - DNA, 19 bp, Artificial sequence
  SiRNA target sequence
gtattttgcagatatttta

SEQ ID NO: 51396 - DNA, 19 bp, Artificial sequence
  SiRNA target sequence
tattttgcagatattttaa

SEQ ID NO: 51397 - DNA, 19 bp, Artificial sequence
  SiRNA target sequence
attttgcagatattttaaa

SEQ ID NO: 51398 - DNA, 19 bp, Artificial sequence
  SiRNA target sequence
ttttgcagatattttaaac

SEQ ID NO: 51399 - DNA, 19 bp, Artificial sequence
  SiRNA target sequence
tttgcagatattttaaaca

SEQ ID NO: 51400 - DNA, 19 bp, Artificial sequence
  SiRNA target sequence
ttgcagatattttaaacaa

SEQ ID NO: 51401 - DNA, 19 bp, Artificial sequence
  SiRNA target sequence
tgcagatattttaaacaac

SEQ ID NO: 51402 - DNA, 19 bp, Artificial sequence
  SiRNA target sequence
gcagatattttaaacaacg

SEQ ID NO: 51403 - DNA, 19 bp, Artificial sequence
  SiRNA target sequence
cagatattttaaacaacga

SEQ ID NO: 51404 - DNA, 19 bp, Artificial sequence
  SiRNA target sequence
agatattttaaacaacgaa

SEQ ID NO: 51405 - DNA, 19 bp, Artificial sequence
  SiRNA target sequence
gatattttaaacaacgaat

SEQ ID NO: 51406 - DNA, 19 bp, Artificial sequence
  SiRNA target sequence
atattttaaacaacgaata

SEQ ID NO: 51407 - DNA, 19 bp, Artificial sequence
  SiRNA target sequence
tattttaaacaacgaataa

SEQ ID NO: 51408 - DNA, 20 bp, Artificial sequence
  SiRNA target sequence
atgaaggaaaaaaccaatta

SEQ ID NO: 51409 - DNA, 20 bp, Artificial sequence
  SiRNA target sequence
tgaaggaaaaaaccaattat

SEQ ID NO: 51410 - DNA, 20 bp, Artificial sequence
  SiRNA target sequence
gaaggaaaaaaccaattatg

SEQ ID NO: 51411 - DNA, 20 bp, Artificial sequence
  SiRNA target sequence
aaggaaaaaaccaattatga

SEQ ID NO: 51412 - DNA, 20 bp, Artificial sequence
  SiRNA target sequence
aggaaaaaaccaattatgaa

SEQ ID NO: 51413 - DNA, 20 bp, Artificial sequence
  SiRNA target sequence
ggaaaaaaccaattatgaaa

SEQ ID NO: 51414 - DNA, 20 bp, Artificial sequence
  SiRNA target sequence
gaaaaaaccaattatgaaat

SEQ ID NO: 51415 - DNA, 20 bp, Artificial sequence
  SiRNA target sequence
aaaaaaccaattatgaaatt

SEQ ID NO: 51416 - DNA, 20 bp, Artificial sequence
  SiRNA target sequence
aaaaaccaattatgaaattt

SEQ ID NO: 51417 - DNA, 20 bp, Artificial sequence
  SiRNA target sequence
aaaaccaattatgaaatttt

SEQ ID NO: 51418 - DNA, 20 bp, Artificial sequence
  SiRNA target sequence
aaaccaattatgaaatttta

SEQ ID NO: 51419 - DNA, 20 bp, Artificial sequence
  SiRNA target sequence
aaccaattatgaaattttat

SEQ ID NO: 51420 - DNA, 20 bp, Artificial sequence
  SiRNA target sequence
accaattatgaaattttata

SEQ ID NO: 51421 - DNA, 20 bp, Artificial sequence
  SiRNA target sequence
ccaattatgaaattttatat

SEQ ID NO: 51422 - DNA, 20 bp, Artificial sequence
  SiRNA target sequence
caattatgaaattttatatg

SEQ ID NO: 51423 - DNA, 20 bp, Artificial sequence
  SiRNA target sequence
aattatgaaattttatatga

SEQ ID NO: 51424 - DNA, 20 bp, Artificial sequence
  SiRNA target sequence
attatgaaattttatatgat

SEQ ID NO: 51425 - DNA, 20 bp, Artificial sequence
  SiRNA target sequence
ttatgaaattttatatgata

SEQ ID NO: 51426 - DNA, 20 bp, Artificial sequence
  SiRNA target sequence
tatgaaattttatatgatac

SEQ ID NO: 51427 - DNA, 20 bp, Artificial sequence
  SiRNA target sequence
atgaaattttatatgataca

SEQ ID NO: 51428 - DNA, 20 bp, Artificial sequence
  SiRNA target sequence
tgaaattttatatgatacat

SEQ ID NO: 51429 - DNA, 20 bp, Artificial sequence
  SiRNA target sequence
gaaattttatatgatacatt

SEQ ID NO: 51430 - DNA, 20 bp, Artificial sequence
  SiRNA target sequence
aaattttatatgatacattt

SEQ ID NO: 51431 - DNA, 20 bp, Artificial sequence
  SiRNA target sequence
aattttatatgatacatttg

SEQ ID NO: 51432 - DNA, 20 bp, Artificial sequence
  SiRNA target sequence
attttatatgatacatttgt

SEQ ID NO: 51433 - DNA, 20 bp, Artificial sequence
  SiRNA target sequence
ttttatatgatacatttgta

SEQ ID NO: 51434 - DNA, 20 bp, Artificial sequence
  SiRNA target sequence
tttatatgatacatttgtaa

SEQ ID NO: 51435 - DNA, 20 bp, Artificial sequence
  SiRNA target sequence
ttatatgatacatttgtaaa

SEQ ID NO: 51436 - DNA, 20 bp, Artificial sequence
  SiRNA target sequence
tatatgatacatttgtaaaa

SEQ ID NO: 51437 - DNA, 20 bp, Artificial sequence
  SiRNA target sequence
atatgatacatttgtaaaat

SEQ ID NO: 51438 - DNA, 20 bp, Artificial sequence
  SiRNA target sequence
tatgatacatttgtaaaata

SEQ ID NO: 51439 - DNA, 20 bp, Artificial sequence
  SiRNA target sequence
atgatacatttgtaaaatat

SEQ ID NO: 51440 - DNA, 20 bp, Artificial sequence
  SiRNA target sequence
tgatacatttgtaaaatatt

SEQ ID NO: 51441 - DNA, 20 bp, Artificial sequence
  SiRNA target sequence
gatacatttgtaaaatattg

SEQ ID NO: 51442 - DNA, 20 bp, Artificial sequence
  SiRNA target sequence
atacatttgtaaaatattgt

SEQ ID NO: 51443 - DNA, 20 bp, Artificial sequence
  SiRNA target sequence
tacatttgtaaaatattgtt

SEQ ID NO: 51444 - DNA, 20 bp, Artificial sequence
  SiRNA target sequence
acatttgtaaaatattgtta

SEQ ID NO: 51445 - DNA, 20 bp, Artificial sequence
  SiRNA target sequence
catttgtaaaatattgttac

SEQ ID NO: 51446 - DNA, 20 bp, Artificial sequence
  SiRNA target sequence
atttgtaaaatattgttaca

SEQ ID NO: 51447 - DNA, 20 bp, Artificial sequence
  SiRNA target sequence
tttgtaaaatattgttacaa

SEQ ID NO: 51448 - DNA, 20 bp, Artificial sequence
  SiRNA target sequence
ttgtaaaatattgttacaat

SEQ ID NO: 51449 - DNA, 20 bp, Artificial sequence
  SiRNA target sequence
tgtaaaatattgttacaata

SEQ ID NO: 51450 - DNA, 20 bp, Artificial sequence
  SiRNA target sequence
gtaaaatattgttacaatat

SEQ ID NO: 51451 - DNA, 20 bp, Artificial sequence
  SiRNA target sequence
taaaatattgttacaatatt

SEQ ID NO: 51452 - DNA, 20 bp, Artificial sequence
  SiRNA target sequence
aaaatattgttacaatattt

SEQ ID NO: 51453 - DNA, 20 bp, Artificial sequence
  SiRNA target sequence
aaatattgttacaatatttc

SEQ ID NO: 51454 - DNA, 20 bp, Artificial sequence
  SiRNA target sequence
aatattgttacaatatttcc

SEQ ID NO: 51455 - DNA, 20 bp, Artificial sequence
  SiRNA target sequence
atattgttacaatatttcct

SEQ ID NO: 51456 - DNA, 20 bp, Artificial sequence
  SiRNA target sequence
tattgttacaatatttccta

SEQ ID NO: 51457 - DNA, 20 bp, Artificial sequence
  SiRNA target sequence
attgttacaatatttcctat

SEQ ID NO: 51458 - DNA, 20 bp, Artificial sequence
  SiRNA target sequence
ttgttacaatatttcctata

SEQ ID NO: 51459 - DNA, 20 bp, Artificial sequence
  SiRNA target sequence
tgttacaatatttcctatat

SEQ ID NO: 51460 - DNA, 20 bp, Artificial sequence
  SiRNA target sequence
gttacaatatttcctatata

SEQ ID NO: 51461 - DNA, 20 bp, Artificial sequence
  SiRNA target sequence
ttacaatatttcctatataa

SEQ ID NO: 51462 - DNA, 20 bp, Artificial sequence
  SiRNA target sequence
tacaatatttcctatataag

SEQ ID NO: 51463 - DNA, 20 bp, Artificial sequence
  SiRNA target sequence
acaatatttcctatataagg

SEQ ID NO: 51464 - DNA, 20 bp, Artificial sequence
  SiRNA target sequence
caatatttcctatataaggt

SEQ ID NO: 51465 - DNA, 20 bp, Artificial sequence
  SiRNA target sequence
aatatttcctatataaggta

SEQ ID NO: 51466 - DNA, 20 bp, Artificial sequence
  SiRNA target sequence
atatttcctatataaggtac

SEQ ID NO: 51467 - DNA, 20 bp, Artificial sequence
  SiRNA target sequence
tatttcctatataaggtacg

SEQ ID NO: 51468 - DNA, 20 bp, Artificial sequence
  SiRNA target sequence
atttcctatataaggtacgt

SEQ ID NO: 51469 - DNA, 20 bp, Artificial sequence
  SiRNA target sequence
tttcctatataaggtacgta

SEQ ID NO: 51470 - DNA, 20 bp, Artificial sequence
  SiRNA target sequence
ttcctatataaggtacgtaa

SEQ ID NO: 51471 - DNA, 20 bp, Artificial sequence
  SiRNA target sequence
tcctatataaggtacgtaat

SEQ ID NO: 51472 - DNA, 20 bp, Artificial sequence
  SiRNA target sequence
cctatataaggtacgtaatg

SEQ ID NO: 51473 - DNA, 20 bp, Artificial sequence
  SiRNA target sequence
ctatataaggtacgtaatgt

SEQ ID NO: 51474 - DNA, 20 bp, Artificial sequence
  SiRNA target sequence
tatataaggtacgtaatgtt

SEQ ID NO: 51475 - DNA, 20 bp, Artificial sequence
  SiRNA target sequence
atataaggtacgtaatgttt

SEQ ID NO: 51476 - DNA, 20 bp, Artificial sequence
  SiRNA target sequence
tataaggtacgtaatgtttc

SEQ ID NO: 51477 - DNA, 20 bp, Artificial sequence
  SiRNA target sequence
ataaggtacgtaatgtttcc

SEQ ID NO: 51478 - DNA, 20 bp, Artificial sequence
  SiRNA target sequence
taaggtacgtaatgtttccc

SEQ ID NO: 51479 - DNA, 20 bp, Artificial sequence
  SiRNA target sequence
aaggtacgtaatgtttccca

SEQ ID NO: 51480 - DNA, 20 bp, Artificial sequence
  SiRNA target sequence
aggtacgtaatgtttcccat

SEQ ID NO: 51481 - DNA, 20 bp, Artificial sequence
  SiRNA target sequence
ggtacgtaatgtttcccata

SEQ ID NO: 51482 - DNA, 20 bp, Artificial sequence
  SiRNA target sequence
gtacgtaatgtttcccatat

SEQ ID NO: 51483 - DNA, 20 bp, Artificial sequence
  SiRNA target sequence
tacgtaatgtttcccatatt

SEQ ID NO: 51484 - DNA, 20 bp, Artificial sequence
  SiRNA target sequence
acgtaatgtttcccatatta

SEQ ID NO: 51485 - DNA, 20 bp, Artificial sequence
  SiRNA target sequence
cgtaatgtttcccatattac

SEQ ID NO: 51486 - DNA, 20 bp, Artificial sequence
  SiRNA target sequence
gtaatgtttcccatattact

SEQ ID NO: 51487 - DNA, 20 bp, Artificial sequence
  SiRNA target sequence
taatgtttcccatattactg

SEQ ID NO: 51488 - DNA, 20 bp, Artificial sequence
  SiRNA target sequence
aatgtttcccatattactgt

SEQ ID NO: 51489 - DNA, 20 bp, Artificial sequence
  SiRNA target sequence
atgtttcccatattactgtc

SEQ ID NO: 51490 - DNA, 20 bp, Artificial sequence
  SiRNA target sequence
tgtttcccatattactgtct

SEQ ID NO: 51491 - DNA, 20 bp, Artificial sequence
  SiRNA target sequence
gtttcccatattactgtcta

SEQ ID NO: 51492 - DNA, 20 bp, Artificial sequence
  SiRNA target sequence
tttcccatattactgtctac

SEQ ID NO: 51493 - DNA, 20 bp, Artificial sequence
  SiRNA target sequence
ttcccatattactgtctaca

SEQ ID NO: 51494 - DNA, 20 bp, Artificial sequence
  SiRNA target sequence
tcccatattactgtctacaa

SEQ ID NO: 51495 - DNA, 20 bp, Artificial sequence
  SiRNA target sequence
cccatattactgtctacaat

SEQ ID NO: 51496 - DNA, 20 bp, Artificial sequence
  SiRNA target sequence
ccatattactgtctacaatt

SEQ ID NO: 51497 - DNA, 20 bp, Artificial sequence
  SiRNA target sequence
catattactgtctacaatta

SEQ ID NO: 51498 - DNA, 20 bp, Artificial sequence
  SiRNA target sequence
atattactgtctacaattat

SEQ ID NO: 51499 - DNA, 20 bp, Artificial sequence
  SiRNA target sequence
tattactgtctacaattata

SEQ ID NO: 51500 - DNA, 20 bp, Artificial sequence
  SiRNA target sequence
attactgtctacaattatag

SEQ ID NO: 51501 - DNA, 20 bp, Artificial sequence
  SiRNA target sequence
ttactgtctacaattatagc

SEQ ID NO: 51502 - DNA, 20 bp, Artificial sequence
  SiRNA target sequence
tactgtctacaattatagct

SEQ ID NO: 51503 - DNA, 20 bp, Artificial sequence
  SiRNA target sequence
actgtctacaattatagctt

SEQ ID NO: 51504 - DNA, 20 bp, Artificial sequence
  SiRNA target sequence
ctgtctacaattatagcttg

SEQ ID NO: 51505 - DNA, 20 bp, Artificial sequence
  SiRNA target sequence
tgtctacaattatagcttgt

SEQ ID NO: 51506 - DNA, 20 bp, Artificial sequence
  SiRNA target sequence
gtctacaattatagcttgtt

SEQ ID NO: 51507 - DNA, 20 bp, Artificial sequence
  SiRNA target sequence
tctacaattatagcttgtta

SEQ ID NO: 51508 - DNA, 20 bp, Artificial sequence
  SiRNA target sequence
ctacaattatagcttgttat

SEQ ID NO: 51509 - DNA, 20 bp, Artificial sequence
  SiRNA target sequence
tacaattatagcttgttatc

SEQ ID NO: 51510 - DNA, 20 bp, Artificial sequence
  SiRNA target sequence
acaattatagcttgttatct

SEQ ID NO: 51511 - DNA, 20 bp, Artificial sequence
  SiRNA target sequence
caattatagcttgttatctc

SEQ ID NO: 51512 - DNA, 20 bp, Artificial sequence
  SiRNA target sequence
aattatagcttgttatctcg

SEQ ID NO: 51513 - DNA, 20 bp, Artificial sequence
  SiRNA target sequence
attatagcttgttatctcga

SEQ ID NO: 51514 - DNA, 20 bp, Artificial sequence
  SiRNA target sequence
ttatagcttgttatctcgaa

SEQ ID NO: 51515 - DNA, 20 bp, Artificial sequence
  SiRNA target sequence
tatagcttgttatctcgaag

SEQ ID NO: 51516 - DNA, 20 bp, Artificial sequence
  SiRNA target sequence
atagcttgttatctcgaagt

SEQ ID NO: 51517 - DNA, 20 bp, Artificial sequence
  SiRNA target sequence
tagcttgttatctcgaagtt

SEQ ID NO: 51518 - DNA, 20 bp, Artificial sequence
  SiRNA target sequence
agcttgttatctcgaagttc

SEQ ID NO: 51519 - DNA, 20 bp, Artificial sequence
  SiRNA target sequence
gcttgttatctcgaagttca

SEQ ID NO: 51520 - DNA, 20 bp, Artificial sequence
  SiRNA target sequence
cttgttatctcgaagttcag

SEQ ID NO: 51521 - DNA, 20 bp, Artificial sequence
  SiRNA target sequence
ttgttatctcgaagttcagg

SEQ ID NO: 51522 - DNA, 20 bp, Artificial sequence
  SiRNA target sequence
tgttatctcgaagttcaggc

SEQ ID NO: 51523 - DNA, 20 bp, Artificial sequence
  SiRNA target sequence
gttatctcgaagttcaggca

SEQ ID NO: 51524 - DNA, 20 bp, Artificial sequence
  SiRNA target sequence
ttatctcgaagttcaggcaa

SEQ ID NO: 51525 - DNA, 20 bp, Artificial sequence
  SiRNA target sequence
tatctcgaagttcaggcaag

SEQ ID NO: 51526 - DNA, 20 bp, Artificial sequence
  SiRNA target sequence
atctcgaagttcaggcaagt

SEQ ID NO: 51527 - DNA, 20 bp, Artificial sequence
  SiRNA target sequence
tctcgaagttcaggcaagta

SEQ ID NO: 51528 - DNA, 20 bp, Artificial sequence
  SiRNA target sequence
ctcgaagttcaggcaagtaa

SEQ ID NO: 51529 - DNA, 20 bp, Artificial sequence
  SiRNA target sequence
tcgaagttcaggcaagtaac

SEQ ID NO: 51530 - DNA, 20 bp, Artificial sequence
  SiRNA target sequence
cgaagttcaggcaagtaaca

SEQ ID NO: 51531 - DNA, 20 bp, Artificial sequence
  SiRNA target sequence
gaagttcaggcaagtaacat

SEQ ID NO: 51532 - DNA, 20 bp, Artificial sequence
  SiRNA target sequence
aagttcaggcaagtaacata

SEQ ID NO: 51533 - DNA, 20 bp, Artificial sequence
  SiRNA target sequence
agttcaggcaagtaacatat

SEQ ID NO: 51534 - DNA, 20 bp, Artificial sequence
  SiRNA target sequence
gttcaggcaagtaacatatc

SEQ ID NO: 51535 - DNA, 20 bp, Artificial sequence
  SiRNA target sequence
ttcaggcaagtaacatatca

SEQ ID NO: 51536 - DNA, 20 bp, Artificial sequence
  SiRNA target sequence
tcaggcaagtaacatatcaa

SEQ ID NO: 51537 - DNA, 20 bp, Artificial sequence
  SiRNA target sequence
caggcaagtaacatatcaaa

SEQ ID NO: 51538 - DNA, 20 bp, Artificial sequence
  SiRNA target sequence
aggcaagtaacatatcaaaa

SEQ ID NO: 51539 - DNA, 20 bp, Artificial sequence
  SiRNA target sequence
ggcaagtaacatatcaaaaa

SEQ ID NO: 51540 - DNA, 20 bp, Artificial sequence
  SiRNA target sequence
gcaagtaacatatcaaaaag

SEQ ID NO: 51541 - DNA, 20 bp, Artificial sequence
  SiRNA target sequence
caagtaacatatcaaaaaga

SEQ ID NO: 51542 - DNA, 20 bp, Artificial sequence
  SiRNA target sequence
aagtaacatatcaaaaagaa

SEQ ID NO: 51543 - DNA, 20 bp, Artificial sequence
  SiRNA target sequence
agtaacatatcaaaaagaat

SEQ ID NO: 51544 - DNA, 20 bp, Artificial sequence
  SiRNA target sequence
gtaacatatcaaaaagaatt

SEQ ID NO: 51545 - DNA, 20 bp, Artificial sequence
  SiRNA target sequence
taacatatcaaaaagaattg

SEQ ID NO: 51546 - DNA, 20 bp, Artificial sequence
  SiRNA target sequence
aacatatcaaaaagaattgc

SEQ ID NO: 51547 - DNA, 20 bp, Artificial sequence
  SiRNA target sequence
acatatcaaaaagaattgca

SEQ ID NO: 51548 - DNA, 20 bp, Artificial sequence
  SiRNA target sequence
catatcaaaaagaattgcag

SEQ ID NO: 51549 - DNA, 20 bp, Artificial sequence
  SiRNA target sequence
atatcaaaaagaattgcaga

SEQ ID NO: 51550 - DNA, 20 bp, Artificial sequence
  SiRNA target sequence
tatcaaaaagaattgcagaa

SEQ ID NO: 51551 - DNA, 20 bp, Artificial sequence
  SiRNA target sequence
atcaaaaagaattgcagaag

SEQ ID NO: 51552 - DNA, 20 bp, Artificial sequence
  SiRNA target sequence
tcaaaaagaattgcagaaga

SEQ ID NO: 51553 - DNA, 20 bp, Artificial sequence
  SiRNA target sequence
caaaaagaattgcagaagat

SEQ ID NO: 51554 - DNA, 20 bp, Artificial sequence
  SiRNA target sequence
aaaaagaattgcagaagatt

SEQ ID NO: 51555 - DNA, 20 bp, Artificial sequence
  SiRNA target sequence
aaaagaattgcagaagattt

SEQ ID NO: 51556 - DNA, 20 bp, Artificial sequence
  SiRNA target sequence
aaagaattgcagaagatttt

SEQ ID NO: 51557 - DNA, 20 bp, Artificial sequence
  SiRNA target sequence
aagaattgcagaagattttg

SEQ ID NO: 51558 - DNA, 20 bp, Artificial sequence
  SiRNA target sequence
agaattgcagaagattttga

SEQ ID NO: 51559 - DNA, 20 bp, Artificial sequence
  SiRNA target sequence
gaattgcagaagattttgaa

SEQ ID NO: 51560 - DNA, 20 bp, Artificial sequence
  SiRNA target sequence
aattgcagaagattttgaaa

SEQ ID NO: 51561 - DNA, 20 bp, Artificial sequence
  SiRNA target sequence
attgcagaagattttgaaaa

SEQ ID NO: 51562 - DNA, 20 bp, Artificial sequence
  SiRNA target sequence
ttgcagaagattttgaaaat

SEQ ID NO: 51563 - DNA, 20 bp, Artificial sequence
  SiRNA target sequence
tgcagaagattttgaaaata

SEQ ID NO: 51564 - DNA, 20 bp, Artificial sequence
  SiRNA target sequence
gcagaagattttgaaaataa

SEQ ID NO: 51565 - DNA, 20 bp, Artificial sequence
  SiRNA target sequence
cagaagattttgaaaataaa

SEQ ID NO: 51566 - DNA, 20 bp, Artificial sequence
  SiRNA target sequence
agaagattttgaaaataaaa

SEQ ID NO: 51567 - DNA, 20 bp, Artificial sequence
  SiRNA target sequence
gaagattttgaaaataaaat

SEQ ID NO: 51568 - DNA, 20 bp, Artificial sequence
  SiRNA target sequence
aagattttgaaaataaaata

SEQ ID NO: 51569 - DNA, 20 bp, Artificial sequence
  SiRNA target sequence
agattttgaaaataaaataa

SEQ ID NO: 51570 - DNA, 20 bp, Artificial sequence
  SiRNA target sequence
gattttgaaaataaaataaa

SEQ ID NO: 51571 - DNA, 20 bp, Artificial sequence
  SiRNA target sequence
attttgaaaataaaataaat

SEQ ID NO: 51572 - DNA, 20 bp, Artificial sequence
  SiRNA target sequence
ttttgaaaataaaataaatg

SEQ ID NO: 51573 - DNA, 20 bp, Artificial sequence
  SiRNA target sequence
tttgaaaataaaataaatgc

SEQ ID NO: 51574 - DNA, 20 bp, Artificial sequence
  SiRNA target sequence
ttgaaaataaaataaatgca

SEQ ID NO: 51575 - DNA, 20 bp, Artificial sequence
  SiRNA target sequence
tgaaaataaaataaatgcag

SEQ ID NO: 51576 - DNA, 20 bp, Artificial sequence
  SiRNA target sequence
gaaaataaaataaatgcagg

SEQ ID NO: 51577 - DNA, 20 bp, Artificial sequence
  SiRNA target sequence
aaaataaaataaatgcagga

SEQ ID NO: 51578 - DNA, 20 bp, Artificial sequence
  SiRNA target sequence
aaataaaataaatgcaggaa

SEQ ID NO: 51579 - DNA, 20 bp, Artificial sequence
  SiRNA target sequence
aataaaataaatgcaggaaa

SEQ ID NO: 51580 - DNA, 20 bp, Artificial sequence
  SiRNA target sequence
ataaaataaatgcaggaaaa

SEQ ID NO: 51581 - DNA, 20 bp, Artificial sequence
  SiRNA target sequence
taaaataaatgcaggaaaaa

SEQ ID NO: 51582 - DNA, 20 bp, Artificial sequence
  SiRNA target sequence
aaaataaatgcaggaaaaag

SEQ ID NO: 51583 - DNA, 20 bp, Artificial sequence
  SiRNA target sequence
aaataaatgcaggaaaaagt

SEQ ID NO: 51584 - DNA, 20 bp, Artificial sequence
  SiRNA target sequence
aataaatgcaggaaaaagta

SEQ ID NO: 51585 - DNA, 20 bp, Artificial sequence
  SiRNA target sequence
ataaatgcaggaaaaagtat

SEQ ID NO: 51586 - DNA, 20 bp, Artificial sequence
  SiRNA target sequence
taaatgcaggaaaaagtata

SEQ ID NO: 51587 - DNA, 20 bp, Artificial sequence
  SiRNA target sequence
aaatgcaggaaaaagtatat

SEQ ID NO: 51588 - DNA, 20 bp, Artificial sequence
  SiRNA target sequence
aatgcaggaaaaagtatatt

SEQ ID NO: 51589 - DNA, 20 bp, Artificial sequence
  SiRNA target sequence
atgcaggaaaaagtatattt

SEQ ID NO: 51590 - DNA, 20 bp, Artificial sequence
  SiRNA target sequence
tgcaggaaaaagtatattta

SEQ ID NO: 51591 - DNA, 20 bp, Artificial sequence
  SiRNA target sequence
gcaggaaaaagtatatttaa

SEQ ID NO: 51592 - DNA, 20 bp, Artificial sequence
  SiRNA target sequence
caggaaaaagtatatttaaa

SEQ ID NO: 51593 - DNA, 20 bp, Artificial sequence
  SiRNA target sequence
aggaaaaagtatatttaaat

SEQ ID NO: 51594 - DNA, 20 bp, Artificial sequence
  SiRNA target sequence
ggaaaaagtatatttaaata

SEQ ID NO: 51595 - DNA, 20 bp, Artificial sequence
  SiRNA target sequence
gaaaaagtatatttaaatat

SEQ ID NO: 51596 - DNA, 20 bp, Artificial sequence
  SiRNA target sequence
aaaaagtatatttaaatata

SEQ ID NO: 51597 - DNA, 20 bp, Artificial sequence
  SiRNA target sequence
aaaagtatatttaaatatat

SEQ ID NO: 51598 - DNA, 20 bp, Artificial sequence
  SiRNA target sequence
aaagtatatttaaatatatt

SEQ ID NO: 51599 - DNA, 20 bp, Artificial sequence
  SiRNA target sequence
aagtatatttaaatatattt

SEQ ID NO: 51600 - DNA, 20 bp, Artificial sequence
  SiRNA target sequence
agtatatttaaatatatttt

SEQ ID NO: 51601 - DNA, 20 bp, Artificial sequence
  SiRNA target sequence
gtatatttaaatatatttta

SEQ ID NO: 51602 - DNA, 20 bp, Artificial sequence
  SiRNA target sequence
tatatttaaatatattttat

SEQ ID NO: 51603 - DNA, 20 bp, Artificial sequence
  SiRNA target sequence
atatttaaatatattttatt

SEQ ID NO: 51604 - DNA, 20 bp, Artificial sequence
  SiRNA target sequence
tatttaaatatattttattt

SEQ ID NO: 51605 - DNA, 20 bp, Artificial sequence
  SiRNA target sequence
atttaaatatattttatttt

SEQ ID NO: 51606 - DNA, 20 bp, Artificial sequence
  SiRNA target sequence
tttaaatatattttattttt

SEQ ID NO: 51607 - DNA, 20 bp, Artificial sequence
  SiRNA target sequence
ttaaatatattttattttta

SEQ ID NO: 51608 - DNA, 20 bp, Artificial sequence
  SiRNA target sequence
taaatatattttatttttaa

SEQ ID NO: 51609 - DNA, 20 bp, Artificial sequence
  SiRNA target sequence
aaatatattttatttttaac

SEQ ID NO: 51610 - DNA, 20 bp, Artificial sequence
  SiRNA target sequence
aatatattttatttttaact

SEQ ID NO: 51611 - DNA, 20 bp, Artificial sequence
  SiRNA target sequence
atatattttatttttaactt

SEQ ID NO: 51612 - DNA, 20 bp, Artificial sequence
  SiRNA target sequence
tatattttatttttaacttc

SEQ ID NO: 51613 - DNA, 20 bp, Artificial sequence
  SiRNA target sequence
atattttatttttaacttca

SEQ ID NO: 51614 - DNA, 20 bp, Artificial sequence
  SiRNA target sequence
tattttatttttaacttcat

SEQ ID NO: 51615 - DNA, 20 bp, Artificial sequence
  SiRNA target sequence
attttatttttaacttcatc

SEQ ID NO: 51616 - DNA, 20 bp, Artificial sequence
  SiRNA target sequence
ttttatttttaacttcatca

SEQ ID NO: 51617 - DNA, 20 bp, Artificial sequence
  SiRNA target sequence
tttatttttaacttcatcaa

SEQ ID NO: 51618 - DNA, 20 bp, Artificial sequence
  SiRNA target sequence
ttatttttaacttcatcaat

SEQ ID NO: 51619 - DNA, 20 bp, Artificial sequence
  SiRNA target sequence
tatttttaacttcatcaata

SEQ ID NO: 51620 - DNA, 20 bp, Artificial sequence
  SiRNA target sequence
atttttaacttcatcaatag

SEQ ID NO: 51621 - DNA, 20 bp, Artificial sequence
  SiRNA target sequence
tttttaacttcatcaatagt

SEQ ID NO: 51622 - DNA, 20 bp, Artificial sequence
  SiRNA target sequence
ttttaacttcatcaatagta

SEQ ID NO: 51623 - DNA, 20 bp, Artificial sequence
  SiRNA target sequence
tttaacttcatcaatagtat

SEQ ID NO: 51624 - DNA, 20 bp, Artificial sequence
  SiRNA target sequence
ttaacttcatcaatagtatt

SEQ ID NO: 51625 - DNA, 20 bp, Artificial sequence
  SiRNA target sequence
taacttcatcaatagtatta

SEQ ID NO: 51626 - DNA, 20 bp, Artificial sequence
  SiRNA target sequence
aacttcatcaatagtattaa

SEQ ID NO: 51627 - DNA, 20 bp, Artificial sequence
  SiRNA target sequence
acttcatcaatagtattaag

SEQ ID NO: 51628 - DNA, 20 bp, Artificial sequence
  SiRNA target sequence
cttcatcaatagtattaaga

SEQ ID NO: 51629 - DNA, 20 bp, Artificial sequence
  SiRNA target sequence
ttcatcaatagtattaagac

SEQ ID NO: 51630 - DNA, 20 bp, Artificial sequence
  SiRNA target sequence
tcatcaatagtattaagaca

SEQ ID NO: 51631 - DNA, 20 bp, Artificial sequence
  SiRNA target sequence
catcaatagtattaagacaa

SEQ ID NO: 51632 - DNA, 20 bp, Artificial sequence
  SiRNA target sequence
atcaatagtattaagacaaa

SEQ ID NO: 51633 - DNA, 20 bp, Artificial sequence
  SiRNA target sequence
tcaatagtattaagacaaat

SEQ ID NO: 51634 - DNA, 20 bp, Artificial sequence
  SiRNA target sequence
caatagtattaagacaaatt

SEQ ID NO: 51635 - DNA, 20 bp, Artificial sequence
  SiRNA target sequence
aatagtattaagacaaatta

SEQ ID NO: 51636 - DNA, 20 bp, Artificial sequence
  SiRNA target sequence
atagtattaagacaaattaa

SEQ ID NO: 51637 - DNA, 20 bp, Artificial sequence
  SiRNA target sequence
tagtattaagacaaattaat

SEQ ID NO: 51638 - DNA, 20 bp, Artificial sequence
  SiRNA target sequence
agtattaagacaaattaatg

SEQ ID NO: 51639 - DNA, 20 bp, Artificial sequence
  SiRNA target sequence
gtattaagacaaattaatga

SEQ ID NO: 51640 - DNA, 20 bp, Artificial sequence
  SiRNA target sequence
tattaagacaaattaatgat

SEQ ID NO: 51641 - DNA, 20 bp, Artificial sequence
  SiRNA target sequence
attaagacaaattaatgata

SEQ ID NO: 51642 - DNA, 20 bp, Artificial sequence
  SiRNA target sequence
ttaagacaaattaatgatat

SEQ ID NO: 51643 - DNA, 20 bp, Artificial sequence
  SiRNA target sequence
taagacaaattaatgatatt

SEQ ID NO: 51644 - DNA, 20 bp, Artificial sequence
  SiRNA target sequence
aagacaaattaatgatattg

SEQ ID NO: 51645 - DNA, 20 bp, Artificial sequence
  SiRNA target sequence
agacaaattaatgatattgt

SEQ ID NO: 51646 - DNA, 20 bp, Artificial sequence
  SiRNA target sequence
gacaaattaatgatattgtg

SEQ ID NO: 51647 - DNA, 20 bp, Artificial sequence
  SiRNA target sequence
acaaattaatgatattgtgt

SEQ ID NO: 51648 - DNA, 20 bp, Artificial sequence
  SiRNA target sequence
caaattaatgatattgtgtt

SEQ ID NO: 51649 - DNA, 20 bp, Artificial sequence
  SiRNA target sequence
aaattaatgatattgtgttt

SEQ ID NO: 51650 - DNA, 20 bp, Artificial sequence
  SiRNA target sequence
aattaatgatattgtgttta

SEQ ID NO: 51651 - DNA, 20 bp, Artificial sequence
  SiRNA target sequence
attaatgatattgtgtttag

SEQ ID NO: 51652 - DNA, 20 bp, Artificial sequence
  SiRNA target sequence
ttaatgatattgtgtttagc

SEQ ID NO: 51653 - DNA, 20 bp, Artificial sequence
  SiRNA target sequence
taatgatattgtgtttagcg

SEQ ID NO: 51654 - DNA, 20 bp, Artificial sequence
  SiRNA target sequence
aatgatattgtgtttagcgg

SEQ ID NO: 51655 - DNA, 20 bp, Artificial sequence
  SiRNA target sequence
atgatattgtgtttagcggg

SEQ ID NO: 51656 - DNA, 20 bp, Artificial sequence
  SiRNA target sequence
tgatattgtgtttagcgggc

SEQ ID NO: 51657 - DNA, 20 bp, Artificial sequence
  SiRNA target sequence
gatattgtgtttagcgggcc

SEQ ID NO: 51658 - DNA, 20 bp, Artificial sequence
  SiRNA target sequence
atattgtgtttagcgggcca

SEQ ID NO: 51659 - DNA, 20 bp, Artificial sequence
  SiRNA target sequence
tattgtgtttagcgggccaa

SEQ ID NO: 51660 - DNA, 20 bp, Artificial sequence
  SiRNA target sequence
attgtgtttagcgggccaat

SEQ ID NO: 51661 - DNA, 20 bp, Artificial sequence
  SiRNA target sequence
ttgtgtttagcgggccaata

SEQ ID NO: 51662 - DNA, 20 bp, Artificial sequence
  SiRNA target sequence
tgtgtttagcgggccaatac

SEQ ID NO: 51663 - DNA, 20 bp, Artificial sequence
  SiRNA target sequence
gtgtttagcgggccaataca

SEQ ID NO: 51664 - DNA, 20 bp, Artificial sequence
  SiRNA target sequence
tgtttagcgggccaatacaa

SEQ ID NO: 51665 - DNA, 20 bp, Artificial sequence
  SiRNA target sequence
gtttagcgggccaatacaat

SEQ ID NO: 51666 - DNA, 20 bp, Artificial sequence
  SiRNA target sequence
tttagcgggccaatacaatt

SEQ ID NO: 51667 - DNA, 20 bp, Artificial sequence
  SiRNA target sequence
ttagcgggccaatacaattt

SEQ ID NO: 51668 - DNA, 20 bp, Artificial sequence
  SiRNA target sequence
tagcgggccaatacaatttt

SEQ ID NO: 51669 - DNA, 20 bp, Artificial sequence
  SiRNA target sequence
agcgggccaatacaattttt

SEQ ID NO: 51670 - DNA, 20 bp, Artificial sequence
  SiRNA target sequence
gcgggccaatacaattttta

SEQ ID NO: 51671 - DNA, 20 bp, Artificial sequence
  SiRNA target sequence
cgggccaatacaatttttat

SEQ ID NO: 51672 - DNA, 20 bp, Artificial sequence
  SiRNA target sequence
gggccaatacaatttttata

SEQ ID NO: 51673 - DNA, 20 bp, Artificial sequence
  SiRNA target sequence
ggccaatacaatttttatat

SEQ ID NO: 51674 - DNA, 20 bp, Artificial sequence
  SiRNA target sequence
gccaatacaatttttatata

SEQ ID NO: 51675 - DNA, 20 bp, Artificial sequence
  SiRNA target sequence
ccaatacaatttttatataa

SEQ ID NO: 51676 - DNA, 20 bp, Artificial sequence
  SiRNA target sequence
caatacaatttttatataaa

SEQ ID NO: 51677 - DNA, 20 bp, Artificial sequence
  SiRNA target sequence
aatacaatttttatataaaa

SEQ ID NO: 51678 - DNA, 20 bp, Artificial sequence
  SiRNA target sequence
atacaatttttatataaaat

SEQ ID NO: 51679 - DNA, 20 bp, Artificial sequence
  SiRNA target sequence
tacaatttttatataaaatt

SEQ ID NO: 51680 - DNA, 20 bp, Artificial sequence
  SiRNA target sequence
acaatttttatataaaattg

SEQ ID NO: 51681 - DNA, 20 bp, Artificial sequence
  SiRNA target sequence
caatttttatataaaattgt

SEQ ID NO: 51682 - DNA, 20 bp, Artificial sequence
  SiRNA target sequence
aatttttatataaaattgtt

SEQ ID NO: 51683 - DNA, 20 bp, Artificial sequence
  SiRNA target sequence
atttttatataaaattgttg

SEQ ID NO: 51684 - DNA, 20 bp, Artificial sequence
  SiRNA target sequence
tttttatataaaattgttgg

SEQ ID NO: 51685 - DNA, 20 bp, Artificial sequence
  SiRNA target sequence
ttttatataaaattgttgga

SEQ ID NO: 51686 - DNA, 20 bp, Artificial sequence
  SiRNA target sequence
tttatataaaattgttggag

SEQ ID NO: 51687 - DNA, 20 bp, Artificial sequence
  SiRNA target sequence
ttatataaaattgttggagt

SEQ ID NO: 51688 - DNA, 20 bp, Artificial sequence
  SiRNA target sequence
tatataaaattgttggagtt

SEQ ID NO: 51689 - DNA, 20 bp, Artificial sequence
  SiRNA target sequence
atataaaattgttggagttg

SEQ ID NO: 51690 - DNA, 20 bp, Artificial sequence
  SiRNA target sequence
tataaaattgttggagttga

SEQ ID NO: 51691 - DNA, 20 bp, Artificial sequence
  SiRNA target sequence
ataaaattgttggagttgaa

SEQ ID NO: 51692 - DNA, 20 bp, Artificial sequence
  SiRNA target sequence
taaaattgttggagttgaag

SEQ ID NO: 51693 - DNA, 20 bp, Artificial sequence
  SiRNA target sequence
aaaattgttggagttgaagc

SEQ ID NO: 51694 - DNA, 20 bp, Artificial sequence
  SiRNA target sequence
aaattgttggagttgaagca

SEQ ID NO: 51695 - DNA, 20 bp, Artificial sequence
  SiRNA target sequence
aattgttggagttgaagcat

SEQ ID NO: 51696 - DNA, 20 bp, Artificial sequence
  SiRNA target sequence
attgttggagttgaagcatt

SEQ ID NO: 51697 - DNA, 20 bp, Artificial sequence
  SiRNA target sequence
ttgttggagttgaagcattt

SEQ ID NO: 51698 - DNA, 20 bp, Artificial sequence
  SiRNA target sequence
tgttggagttgaagcatttt

SEQ ID NO: 51699 - DNA, 20 bp, Artificial sequence
  SiRNA target sequence
gttggagttgaagcatttta

SEQ ID NO: 51700 - DNA, 20 bp, Artificial sequence
  SiRNA target sequence
ttggagttgaagcattttat

SEQ ID NO: 51701 - DNA, 20 bp, Artificial sequence
  SiRNA target sequence
tggagttgaagcattttatc

SEQ ID NO: 51702 - DNA, 20 bp, Artificial sequence
  SiRNA target sequence
ggagttgaagcattttatca

SEQ ID NO: 51703 - DNA, 20 bp, Artificial sequence
  SiRNA target sequence
gagttgaagcattttatcat

SEQ ID NO: 51704 - DNA, 20 bp, Artificial sequence
  SiRNA target sequence
agttgaagcattttatcatt

SEQ ID NO: 51705 - DNA, 20 bp, Artificial sequence
  SiRNA target sequence
gttgaagcattttatcatta

SEQ ID NO: 51706 - DNA, 20 bp, Artificial sequence
  SiRNA target sequence
ttgaagcattttatcattac

SEQ ID NO: 51707 - DNA, 20 bp, Artificial sequence
  SiRNA target sequence
tgaagcattttatcattaca

SEQ ID NO: 51708 - DNA, 20 bp, Artificial sequence
  SiRNA target sequence
gaagcattttatcattacat

SEQ ID NO: 51709 - DNA, 20 bp, Artificial sequence
  SiRNA target sequence
aagcattttatcattacatt

SEQ ID NO: 51710 - DNA, 20 bp, Artificial sequence
  SiRNA target sequence
agcattttatcattacattt

SEQ ID NO: 51711 - DNA, 20 bp, Artificial sequence
  SiRNA target sequence
gcattttatcattacatttc

SEQ ID NO: 51712 - DNA, 20 bp, Artificial sequence
  SiRNA target sequence
cattttatcattacatttca

SEQ ID NO: 51713 - DNA, 20 bp, Artificial sequence
  SiRNA target sequence
attttatcattacatttcat

SEQ ID NO: 51714 - DNA, 20 bp, Artificial sequence
  SiRNA target sequence
ttttatcattacatttcatt

SEQ ID NO: 51715 - DNA, 20 bp, Artificial sequence
  SiRNA target sequence
tttatcattacatttcatta

SEQ ID NO: 51716 - DNA, 20 bp, Artificial sequence
  SiRNA target sequence
ttatcattacatttcattaa

SEQ ID NO: 51717 - DNA, 20 bp, Artificial sequence
  SiRNA target sequence
tatcattacatttcattaaa

SEQ ID NO: 51718 - DNA, 20 bp, Artificial sequence
  SiRNA target sequence
atcattacatttcattaaac

SEQ ID NO: 51719 - DNA, 20 bp, Artificial sequence
  SiRNA target sequence
tcattacatttcattaaact

SEQ ID NO: 51720 - DNA, 20 bp, Artificial sequence
  SiRNA target sequence
cattacatttcattaaactt

SEQ ID NO: 51721 - DNA, 20 bp, Artificial sequence
  SiRNA target sequence
attacatttcattaaactta

SEQ ID NO: 51722 - DNA, 20 bp, Artificial sequence
  SiRNA target sequence
ttacatttcattaaacttag

SEQ ID NO: 51723 - DNA, 20 bp, Artificial sequence
  SiRNA target sequence
tacatttcattaaacttaga

SEQ ID NO: 51724 - DNA, 20 bp, Artificial sequence
  SiRNA target sequence
acatttcattaaacttagaa

SEQ ID NO: 51725 - DNA, 20 bp, Artificial sequence
  SiRNA target sequence
catttcattaaacttagaaa

SEQ ID NO: 51726 - DNA, 20 bp, Artificial sequence
  SiRNA target sequence
atttcattaaacttagaaaa

SEQ ID NO: 51727 - DNA, 20 bp, Artificial sequence
  SiRNA target sequence
tttcattaaacttagaaaat

SEQ ID NO: 51728 - DNA, 20 bp, Artificial sequence
  SiRNA target sequence
ttcattaaacttagaaaatt

SEQ ID NO: 51729 - DNA, 20 bp, Artificial sequence
  SiRNA target sequence
tcattaaacttagaaaattt

SEQ ID NO: 51730 - DNA, 20 bp, Artificial sequence
  SiRNA target sequence
cattaaacttagaaaatttt

SEQ ID NO: 51731 - DNA, 20 bp, Artificial sequence
  SiRNA target sequence
attaaacttagaaaatttta

SEQ ID NO: 51732 - DNA, 20 bp, Artificial sequence
  SiRNA target sequence
ttaaacttagaaaattttaa

SEQ ID NO: 51733 - DNA, 20 bp, Artificial sequence
  SiRNA target sequence
taaacttagaaaattttaac

SEQ ID NO: 51734 - DNA, 20 bp, Artificial sequence
  SiRNA target sequence
aaacttagaaaattttaaca

SEQ ID NO: 51735 - DNA, 20 bp, Artificial sequence
  SiRNA target sequence
aacttagaaaattttaacaa

SEQ ID NO: 51736 - DNA, 20 bp, Artificial sequence
  SiRNA target sequence
acttagaaaattttaacaaa

SEQ ID NO: 51737 - DNA, 20 bp, Artificial sequence
  SiRNA target sequence
cttagaaaattttaacaaaa

SEQ ID NO: 51738 - DNA, 20 bp, Artificial sequence
  SiRNA target sequence
ttagaaaattttaacaaaat

SEQ ID NO: 51739 - DNA, 20 bp, Artificial sequence
  SiRNA target sequence
tagaaaattttaacaaaata

SEQ ID NO: 51740 - DNA, 20 bp, Artificial sequence
  SiRNA target sequence
agaaaattttaacaaaatag

SEQ ID NO: 51741 - DNA, 20 bp, Artificial sequence
  SiRNA target sequence
gaaaattttaacaaaatagg

SEQ ID NO: 51742 - DNA, 20 bp, Artificial sequence
  SiRNA target sequence
aaaattttaacaaaatagga

SEQ ID NO: 51743 - DNA, 20 bp, Artificial sequence
  SiRNA target sequence
aaattttaacaaaataggaa

SEQ ID NO: 51744 - DNA, 20 bp, Artificial sequence
  SiRNA target sequence
aattttaacaaaataggaag

SEQ ID NO: 51745 - DNA, 20 bp, Artificial sequence
  SiRNA target sequence
attttaacaaaataggaagt

SEQ ID NO: 51746 - DNA, 20 bp, Artificial sequence
  SiRNA target sequence
ttttaacaaaataggaagtg

SEQ ID NO: 51747 - DNA, 20 bp, Artificial sequence
  SiRNA target sequence
tttaacaaaataggaagtgg

SEQ ID NO: 51748 - DNA, 20 bp, Artificial sequence
  SiRNA target sequence
ttaacaaaataggaagtgga

SEQ ID NO: 51749 - DNA, 20 bp, Artificial sequence
  SiRNA target sequence
taacaaaataggaagtggag

SEQ ID NO: 51750 - DNA, 20 bp, Artificial sequence
  SiRNA target sequence
aacaaaataggaagtggaga

SEQ ID NO: 51751 - DNA, 20 bp, Artificial sequence
  SiRNA target sequence
acaaaataggaagtggagag

SEQ ID NO: 51752 - DNA, 20 bp, Artificial sequence
  SiRNA target sequence
caaaataggaagtggagaga

SEQ ID NO: 51753 - DNA, 20 bp, Artificial sequence
  SiRNA target sequence
aaaataggaagtggagagat

SEQ ID NO: 51754 - DNA, 20 bp, Artificial sequence
  SiRNA target sequence
aaataggaagtggagagata

SEQ ID NO: 51755 - DNA, 20 bp, Artificial sequence
  SiRNA target sequence
aataggaagtggagagatac

SEQ ID NO: 51756 - DNA, 20 bp, Artificial sequence
  SiRNA target sequence
ataggaagtggagagataca

SEQ ID NO: 51757 - DNA, 20 bp, Artificial sequence
  SiRNA target sequence
taggaagtggagagatacaa

SEQ ID NO: 51758 - DNA, 20 bp, Artificial sequence
  SiRNA target sequence
aggaagtggagagatacaaa

SEQ ID NO: 51759 - DNA, 20 bp, Artificial sequence
  SiRNA target sequence
ggaagtggagagatacaaat

SEQ ID NO: 51760 - DNA, 20 bp, Artificial sequence
  SiRNA target sequence
gaagtggagagatacaaatg

SEQ ID NO: 51761 - DNA, 20 bp, Artificial sequence
  SiRNA target sequence
aagtggagagatacaaatga

SEQ ID NO: 51762 - DNA, 20 bp, Artificial sequence
  SiRNA target sequence
agtggagagatacaaatgat

SEQ ID NO: 51763 - DNA, 20 bp, Artificial sequence
  SiRNA target sequence
gtggagagatacaaatgatt

SEQ ID NO: 51764 - DNA, 20 bp, Artificial sequence
  SiRNA target sequence
tggagagatacaaatgatta

SEQ ID NO: 51765 - DNA, 20 bp, Artificial sequence
  SiRNA target sequence
ggagagatacaaatgattat

SEQ ID NO: 51766 - DNA, 20 bp, Artificial sequence
  SiRNA target sequence
gagagatacaaatgattatt

SEQ ID NO: 51767 - DNA, 20 bp, Artificial sequence
  SiRNA target sequence
agagatacaaatgattattg

SEQ ID NO: 51768 - DNA, 20 bp, Artificial sequence
  SiRNA target sequence
gagatacaaatgattattga

SEQ ID NO: 51769 - DNA, 20 bp, Artificial sequence
  SiRNA target sequence
agatacaaatgattattgag

SEQ ID NO: 51770 - DNA, 20 bp, Artificial sequence
  SiRNA target sequence
gatacaaatgattattgagc

SEQ ID NO: 51771 - DNA, 20 bp, Artificial sequence
  SiRNA target sequence
atacaaatgattattgagcg

SEQ ID NO: 51772 - DNA, 20 bp, Artificial sequence
  SiRNA target sequence
tacaaatgattattgagcgg

SEQ ID NO: 51773 - DNA, 20 bp, Artificial sequence
  SiRNA target sequence
acaaatgattattgagcgga

SEQ ID NO: 51774 - DNA, 20 bp, Artificial sequence
  SiRNA target sequence
caaatgattattgagcggaa

SEQ ID NO: 51775 - DNA, 20 bp, Artificial sequence
  SiRNA target sequence
aaatgattattgagcggaaa

SEQ ID NO: 51776 - DNA, 20 bp, Artificial sequence
  SiRNA target sequence
aatgattattgagcggaaaa

SEQ ID NO: 51777 - DNA, 20 bp, Artificial sequence
  SiRNA target sequence
atgattattgagcggaaaag

SEQ ID NO: 51778 - DNA, 20 bp, Artificial sequence
  SiRNA target sequence
tgattattgagcggaaaagt

SEQ ID NO: 51779 - DNA, 20 bp, Artificial sequence
  SiRNA target sequence
gattattgagcggaaaagta

SEQ ID NO: 51780 - DNA, 20 bp, Artificial sequence
  SiRNA target sequence
attattgagcggaaaagtag

SEQ ID NO: 51781 - DNA, 20 bp, Artificial sequence
  SiRNA target sequence
ttattgagcggaaaagtaga

SEQ ID NO: 51782 - DNA, 20 bp, Artificial sequence
  SiRNA target sequence
tattgagcggaaaagtagag

SEQ ID NO: 51783 - DNA, 20 bp, Artificial sequence
  SiRNA target sequence
attgagcggaaaagtagagc

SEQ ID NO: 51784 - DNA, 20 bp, Artificial sequence
  SiRNA target sequence
ttgagcggaaaagtagagca

SEQ ID NO: 51785 - DNA, 20 bp, Artificial sequence
  SiRNA target sequence
tgagcggaaaagtagagcat

SEQ ID NO: 51786 - DNA, 20 bp, Artificial sequence
  SiRNA target sequence
gagcggaaaagtagagcata

SEQ ID NO: 51787 - DNA, 20 bp, Artificial sequence
  SiRNA target sequence
agcggaaaagtagagcatat

SEQ ID NO: 51788 - DNA, 20 bp, Artificial sequence
  SiRNA target sequence
gcggaaaagtagagcatatg

SEQ ID NO: 51789 - DNA, 20 bp, Artificial sequence
  SiRNA target sequence
cggaaaagtagagcatatgg

SEQ ID NO: 51790 - DNA, 20 bp, Artificial sequence
  SiRNA target sequence
ggaaaagtagagcatatggt

SEQ ID NO: 51791 - DNA, 20 bp, Artificial sequence
  SiRNA target sequence
gaaaagtagagcatatggtg

SEQ ID NO: 51792 - DNA, 20 bp, Artificial sequence
  SiRNA target sequence
aaaagtagagcatatggtga

SEQ ID NO: 51793 - DNA, 20 bp, Artificial sequence
  SiRNA target sequence
aaagtagagcatatggtgac

SEQ ID NO: 51794 - DNA, 20 bp, Artificial sequence
  SiRNA target sequence
aagtagagcatatggtgaca

SEQ ID NO: 51795 - DNA, 20 bp, Artificial sequence
  SiRNA target sequence
agtagagcatatggtgacat

SEQ ID NO: 51796 - DNA, 20 bp, Artificial sequence
  SiRNA target sequence
gtagagcatatggtgacata

SEQ ID NO: 51797 - DNA, 20 bp, Artificial sequence
  SiRNA target sequence
tagagcatatggtgacatac

SEQ ID NO: 51798 - DNA, 20 bp, Artificial sequence
  SiRNA target sequence
agagcatatggtgacatact

SEQ ID NO: 51799 - DNA, 20 bp, Artificial sequence
  SiRNA target sequence
gagcatatggtgacatacta

SEQ ID NO: 51800 - DNA, 20 bp, Artificial sequence
  SiRNA target sequence
agcatatggtgacatactag

SEQ ID NO: 51801 - DNA, 20 bp, Artificial sequence
  SiRNA target sequence
gcatatggtgacatactaga

SEQ ID NO: 51802 - DNA, 20 bp, Artificial sequence
  SiRNA target sequence
catatggtgacatactagaa

SEQ ID NO: 51803 - DNA, 20 bp, Artificial sequence
  SiRNA target sequence
atatggtgacatactagaac

SEQ ID NO: 51804 - DNA, 20 bp, Artificial sequence
  SiRNA target sequence
tatggtgacatactagaact

SEQ ID NO: 51805 - DNA, 20 bp, Artificial sequence
  SiRNA target sequence
atggtgacatactagaacta

SEQ ID NO: 51806 - DNA, 20 bp, Artificial sequence
  SiRNA target sequence
tggtgacatactagaactaa

SEQ ID NO: 51807 - DNA, 20 bp, Artificial sequence
  SiRNA target sequence
ggtgacatactagaactaac

SEQ ID NO: 51808 - DNA, 20 bp, Artificial sequence
  SiRNA target sequence
gtgacatactagaactaact

SEQ ID NO: 51809 - DNA, 20 bp, Artificial sequence
  SiRNA target sequence
tgacatactagaactaacta

SEQ ID NO: 51810 - DNA, 20 bp, Artificial sequence
  SiRNA target sequence
gacatactagaactaactac

SEQ ID NO: 51811 - DNA, 20 bp, Artificial sequence
  SiRNA target sequence
acatactagaactaactact

SEQ ID NO: 51812 - DNA, 20 bp, Artificial sequence
  SiRNA target sequence
catactagaactaactactc

SEQ ID NO: 51813 - DNA, 20 bp, Artificial sequence
  SiRNA target sequence
atactagaactaactactct

SEQ ID NO: 51814 - DNA, 20 bp, Artificial sequence
  SiRNA target sequence
tactagaactaactactctc

SEQ ID NO: 51815 - DNA, 20 bp, Artificial sequence
  SiRNA target sequence
actagaactaactactctct

SEQ ID NO: 51816 - DNA, 20 bp, Artificial sequence
  SiRNA target sequence
ctagaactaactactctctc

SEQ ID NO: 51817 - DNA, 20 bp, Artificial sequence
  SiRNA target sequence
tagaactaactactctctcg

SEQ ID NO: 51818 - DNA, 20 bp, Artificial sequence
  SiRNA target sequence
agaactaactactctctcgg

SEQ ID NO: 51819 - DNA, 20 bp, Artificial sequence
  SiRNA target sequence
gaactaactactctctcggc

SEQ ID NO: 51820 - DNA, 20 bp, Artificial sequence
  SiRNA target sequence
aactaactactctctcggcc

SEQ ID NO: 51821 - DNA, 20 bp, Artificial sequence
  SiRNA target sequence
actaactactctctcggccg

SEQ ID NO: 51822 - DNA, 20 bp, Artificial sequence
  SiRNA target sequence
ctaactactctctcggccgt

SEQ ID NO: 51823 - DNA, 20 bp, Artificial sequence
  SiRNA target sequence
taactactctctcggccgta

SEQ ID NO: 51824 - DNA, 20 bp, Artificial sequence
  SiRNA target sequence
aactactctctcggccgtac

SEQ ID NO: 51825 - DNA, 20 bp, Artificial sequence
  SiRNA target sequence
actactctctcggccgtacc

SEQ ID NO: 51826 - DNA, 20 bp, Artificial sequence
  SiRNA target sequence
ctactctctcggccgtacca

SEQ ID NO: 51827 - DNA, 20 bp, Artificial sequence
  SiRNA target sequence
tactctctcggccgtaccaa

SEQ ID NO: 51828 - DNA, 20 bp, Artificial sequence
  SiRNA target sequence
actctctcggccgtaccaac

SEQ ID NO: 51829 - DNA, 20 bp, Artificial sequence
  SiRNA target sequence
ctctctcggccgtaccaacc

SEQ ID NO: 51830 - DNA, 20 bp, Artificial sequence
  SiRNA target sequence
tctctcggccgtaccaacct

SEQ ID NO: 51831 - DNA, 20 bp, Artificial sequence
  SiRNA target sequence
ctctcggccgtaccaacctg

SEQ ID NO: 51832 - DNA, 20 bp, Artificial sequence
  SiRNA target sequence
tctcggccgtaccaacctgt

SEQ ID NO: 51833 - DNA, 20 bp, Artificial sequence
  SiRNA target sequence
ctcggccgtaccaacctgta

SEQ ID NO: 51834 - DNA, 20 bp, Artificial sequence
  SiRNA target sequence
tcggccgtaccaacctgtat

SEQ ID NO: 51835 - DNA, 20 bp, Artificial sequence
  SiRNA target sequence
cggccgtaccaacctgtatt

SEQ ID NO: 51836 - DNA, 20 bp, Artificial sequence
  SiRNA target sequence
ggccgtaccaacctgtattg

SEQ ID NO: 51837 - DNA, 20 bp, Artificial sequence
  SiRNA target sequence
gccgtaccaacctgtattgt

SEQ ID NO: 51838 - DNA, 20 bp, Artificial sequence
  SiRNA target sequence
ccgtaccaacctgtattgta

SEQ ID NO: 51839 - DNA, 20 bp, Artificial sequence
  SiRNA target sequence
cgtaccaacctgtattgtag

SEQ ID NO: 51840 - DNA, 20 bp, Artificial sequence
  SiRNA target sequence
gtaccaacctgtattgtagt

SEQ ID NO: 51841 - DNA, 20 bp, Artificial sequence
  SiRNA target sequence
taccaacctgtattgtagtt

SEQ ID NO: 51842 - DNA, 20 bp, Artificial sequence
  SiRNA target sequence
accaacctgtattgtagtta

SEQ ID NO: 51843 - DNA, 20 bp, Artificial sequence
  SiRNA target sequence
ccaacctgtattgtagttat

SEQ ID NO: 51844 - DNA, 20 bp, Artificial sequence
  SiRNA target sequence
caacctgtattgtagttatt

SEQ ID NO: 51845 - DNA, 20 bp, Artificial sequence
  SiRNA target sequence
aacctgtattgtagttatta

SEQ ID NO: 51846 - DNA, 20 bp, Artificial sequence
  SiRNA target sequence
acctgtattgtagttattat

SEQ ID NO: 51847 - DNA, 20 bp, Artificial sequence
  SiRNA target sequence
cctgtattgtagttattatg

SEQ ID NO: 51848 - DNA, 20 bp, Artificial sequence
  SiRNA target sequence
ctgtattgtagttattatgt

SEQ ID NO: 51849 - DNA, 20 bp, Artificial sequence
  SiRNA target sequence
tgtattgtagttattatgtc

SEQ ID NO: 51850 - DNA, 20 bp, Artificial sequence
  SiRNA target sequence
gtattgtagttattatgtcg

SEQ ID NO: 51851 - DNA, 20 bp, Artificial sequence
  SiRNA target sequence
tattgtagttattatgtcgt

SEQ ID NO: 51852 - DNA, 20 bp, Artificial sequence
  SiRNA target sequence
attgtagttattatgtcgtt

SEQ ID NO: 51853 - DNA, 20 bp, Artificial sequence
  SiRNA target sequence
ttgtagttattatgtcgttt

SEQ ID NO: 51854 - DNA, 20 bp, Artificial sequence
  SiRNA target sequence
tgtagttattatgtcgtttt

SEQ ID NO: 51855 - DNA, 20 bp, Artificial sequence
  SiRNA target sequence
gtagttattatgtcgttttt

SEQ ID NO: 51856 - DNA, 20 bp, Artificial sequence
  SiRNA target sequence
tagttattatgtcgtttttc

SEQ ID NO: 51857 - DNA, 20 bp, Artificial sequence
  SiRNA target sequence
agttattatgtcgtttttct

SEQ ID NO: 51858 - DNA, 20 bp, Artificial sequence
  SiRNA target sequence
gttattatgtcgtttttctc

SEQ ID NO: 51859 - DNA, 20 bp, Artificial sequence
  SiRNA target sequence
ttattatgtcgtttttctca

SEQ ID NO: 51860 - DNA, 20 bp, Artificial sequence
  SiRNA target sequence
tattatgtcgtttttctcag

SEQ ID NO: 51861 - DNA, 20 bp, Artificial sequence
  SiRNA target sequence
attatgtcgtttttctcagt

SEQ ID NO: 51862 - DNA, 20 bp, Artificial sequence
  SiRNA target sequence
ttatgtcgtttttctcagta

SEQ ID NO: 51863 - DNA, 20 bp, Artificial sequence
  SiRNA target sequence
tatgtcgtttttctcagtat

SEQ ID NO: 51864 - DNA, 20 bp, Artificial sequence
  SiRNA target sequence
atgtcgtttttctcagtata

SEQ ID NO: 51865 - DNA, 20 bp, Artificial sequence
  SiRNA target sequence
tgtcgtttttctcagtatat

SEQ ID NO: 51866 - DNA, 20 bp, Artificial sequence
  SiRNA target sequence
gtcgtttttctcagtatata

SEQ ID NO: 51867 - DNA, 20 bp, Artificial sequence
  SiRNA target sequence
tcgtttttctcagtatataa

SEQ ID NO: 51868 - DNA, 20 bp, Artificial sequence
  SiRNA target sequence
cgtttttctcagtatataaa

SEQ ID NO: 51869 - DNA, 20 bp, Artificial sequence
  SiRNA target sequence
gtttttctcagtatataaaa

SEQ ID NO: 51870 - DNA, 20 bp, Artificial sequence
  SiRNA target sequence
tttttctcagtatataaaaa

SEQ ID NO: 51871 - DNA, 20 bp, Artificial sequence
  SiRNA target sequence
ttttctcagtatataaaaat

SEQ ID NO: 51872 - DNA, 20 bp, Artificial sequence
  SiRNA target sequence
tttctcagtatataaaaatt

SEQ ID NO: 51873 - DNA, 20 bp, Artificial sequence
  SiRNA target sequence
ttctcagtatataaaaattt

SEQ ID NO: 51874 - DNA, 20 bp, Artificial sequence
  SiRNA target sequence
tctcagtatataaaaatttg

SEQ ID NO: 51875 - DNA, 20 bp, Artificial sequence
  SiRNA target sequence
ctcagtatataaaaatttgg

SEQ ID NO: 51876 - DNA, 20 bp, Artificial sequence
  SiRNA target sequence
tcagtatataaaaatttggg

SEQ ID NO: 51877 - DNA, 20 bp, Artificial sequence
  SiRNA target sequence
cagtatataaaaatttggga

SEQ ID NO: 51878 - DNA, 20 bp, Artificial sequence
  SiRNA target sequence
agtatataaaaatttgggaa

SEQ ID NO: 51879 - DNA, 20 bp, Artificial sequence
  SiRNA target sequence
gtatataaaaatttgggaag

SEQ ID NO: 51880 - DNA, 20 bp, Artificial sequence
  SiRNA target sequence
tatataaaaatttgggaaga

SEQ ID NO: 51881 - DNA, 20 bp, Artificial sequence
  SiRNA target sequence
atataaaaatttgggaagag

SEQ ID NO: 51882 - DNA, 20 bp, Artificial sequence
  SiRNA target sequence
tataaaaatttgggaagaga

SEQ ID NO: 51883 - DNA, 20 bp, Artificial sequence
  SiRNA target sequence
ataaaaatttgggaagagat

SEQ ID NO: 51884 - DNA, 20 bp, Artificial sequence
  SiRNA target sequence
taaaaatttgggaagagatg

SEQ ID NO: 51885 - DNA, 20 bp, Artificial sequence
  SiRNA target sequence
aaaaatttgggaagagatgc

SEQ ID NO: 51886 - DNA, 20 bp, Artificial sequence
  SiRNA target sequence
aaaatttgggaagagatgca

SEQ ID NO: 51887 - DNA, 20 bp, Artificial sequence
  SiRNA target sequence
aaatttgggaagagatgcac

SEQ ID NO: 51888 - DNA, 20 bp, Artificial sequence
  SiRNA target sequence
aatttgggaagagatgcact

SEQ ID NO: 51889 - DNA, 20 bp, Artificial sequence
  SiRNA target sequence
atttgggaagagatgcactc

SEQ ID NO: 51890 - DNA, 20 bp, Artificial sequence
  SiRNA target sequence
tttgggaagagatgcactct

SEQ ID NO: 51891 - DNA, 20 bp, Artificial sequence
  SiRNA target sequence
ttgggaagagatgcactcta

SEQ ID NO: 51892 - DNA, 20 bp, Artificial sequence
  SiRNA target sequence
tgggaagagatgcactctac

SEQ ID NO: 51893 - DNA, 20 bp, Artificial sequence
  SiRNA target sequence
gggaagagatgcactctacg

SEQ ID NO: 51894 - DNA, 20 bp, Artificial sequence
  SiRNA target sequence
ggaagagatgcactctacgt

SEQ ID NO: 51895 - DNA, 20 bp, Artificial sequence
  SiRNA target sequence
gaagagatgcactctacgta

SEQ ID NO: 51896 - DNA, 20 bp, Artificial sequence
  SiRNA target sequence
aagagatgcactctacgtaa

SEQ ID NO: 51897 - DNA, 20 bp, Artificial sequence
  SiRNA target sequence
agagatgcactctacgtaat

SEQ ID NO: 51898 - DNA, 20 bp, Artificial sequence
  SiRNA target sequence
gagatgcactctacgtaatg

SEQ ID NO: 51899 - DNA, 20 bp, Artificial sequence
  SiRNA target sequence
agatgcactctacgtaatgt

SEQ ID NO: 51900 - DNA, 20 bp, Artificial sequence
  SiRNA target sequence
gatgcactctacgtaatgtt

SEQ ID NO: 51901 - DNA, 20 bp, Artificial sequence
  SiRNA target sequence
atgcactctacgtaatgttg

SEQ ID NO: 51902 - DNA, 20 bp, Artificial sequence
  SiRNA target sequence
tgcactctacgtaatgttgg

SEQ ID NO: 51903 - DNA, 20 bp, Artificial sequence
  SiRNA target sequence
gcactctacgtaatgttggc

SEQ ID NO: 51904 - DNA, 20 bp, Artificial sequence
  SiRNA target sequence
cactctacgtaatgttggct

SEQ ID NO: 51905 - DNA, 20 bp, Artificial sequence
  SiRNA target sequence
actctacgtaatgttggcta

SEQ ID NO: 51906 - DNA, 20 bp, Artificial sequence
  SiRNA target sequence
ctctacgtaatgttggctac

SEQ ID NO: 51907 - DNA, 20 bp, Artificial sequence
  SiRNA target sequence
tctacgtaatgttggctaca

SEQ ID NO: 51908 - DNA, 20 bp, Artificial sequence
  SiRNA target sequence
ctacgtaatgttggctacaa

SEQ ID NO: 51909 - DNA, 20 bp, Artificial sequence
  SiRNA target sequence
tacgtaatgttggctacaag

SEQ ID NO: 51910 - DNA, 20 bp, Artificial sequence
  SiRNA target sequence
acgtaatgttggctacaagt

SEQ ID NO: 51911 - DNA, 20 bp, Artificial sequence
  SiRNA target sequence
cgtaatgttggctacaagtg

SEQ ID NO: 51912 - DNA, 20 bp, Artificial sequence
  SiRNA target sequence
gtaatgttggctacaagtgc

SEQ ID NO: 51913 - DNA, 20 bp, Artificial sequence
  SiRNA target sequence
taatgttggctacaagtgcc

SEQ ID NO: 51914 - DNA, 20 bp, Artificial sequence
  SiRNA target sequence
aatgttggctacaagtgcct

SEQ ID NO: 51915 - DNA, 20 bp, Artificial sequence
  SiRNA target sequence
atgttggctacaagtgcctt

SEQ ID NO: 51916 - DNA, 20 bp, Artificial sequence
  SiRNA target sequence
tgttggctacaagtgccttg

SEQ ID NO: 51917 - DNA, 20 bp, Artificial sequence
  SiRNA target sequence
gttggctacaagtgccttgt

SEQ ID NO: 51918 - DNA, 20 bp, Artificial sequence
  SiRNA target sequence
ttggctacaagtgccttgta

SEQ ID NO: 51919 - DNA, 20 bp, Artificial sequence
  SiRNA target sequence
tggctacaagtgccttgtat

SEQ ID NO: 51920 - DNA, 20 bp, Artificial sequence
  SiRNA target sequence
ggctacaagtgccttgtatg

SEQ ID NO: 51921 - DNA, 20 bp, Artificial sequence
  SiRNA target sequence
gctacaagtgccttgtatgt

SEQ ID NO: 51922 - DNA, 20 bp, Artificial sequence
  SiRNA target sequence
ctacaagtgccttgtatgtg

SEQ ID NO: 51923 - DNA, 20 bp, Artificial sequence
  SiRNA target sequence
tacaagtgccttgtatgtgt

SEQ ID NO: 51924 - DNA, 20 bp, Artificial sequence
  SiRNA target sequence
acaagtgccttgtatgtgta

SEQ ID NO: 51925 - DNA, 20 bp, Artificial sequence
  SiRNA target sequence
caagtgccttgtatgtgtat

SEQ ID NO: 51926 - DNA, 20 bp, Artificial sequence
  SiRNA target sequence
aagtgccttgtatgtgtatt

SEQ ID NO: 51927 - DNA, 20 bp, Artificial sequence
  SiRNA target sequence
agtgccttgtatgtgtattt

SEQ ID NO: 51928 - DNA, 20 bp, Artificial sequence
  SiRNA target sequence
gtgccttgtatgtgtatttt

SEQ ID NO: 51929 - DNA, 20 bp, Artificial sequence
  SiRNA target sequence
tgccttgtatgtgtatttta

SEQ ID NO: 51930 - DNA, 20 bp, Artificial sequence
  SiRNA target sequence
gccttgtatgtgtattttac

SEQ ID NO: 51931 - DNA, 20 bp, Artificial sequence
  SiRNA target sequence
ccttgtatgtgtattttaca

SEQ ID NO: 51932 - DNA, 20 bp, Artificial sequence
  SiRNA target sequence
cttgtatgtgtattttacat

SEQ ID NO: 51933 - DNA, 20 bp, Artificial sequence
  SiRNA target sequence
ttgtatgtgtattttacatt

SEQ ID NO: 51934 - DNA, 20 bp, Artificial sequence
  SiRNA target sequence
tgtatgtgtattttacattt

SEQ ID NO: 51935 - DNA, 20 bp, Artificial sequence
  SiRNA target sequence
gtatgtgtattttacatttg

SEQ ID NO: 51936 - DNA, 20 bp, Artificial sequence
  SiRNA target sequence
tatgtgtattttacatttgt

SEQ ID NO: 51937 - DNA, 20 bp, Artificial sequence
  SiRNA target sequence
atgtgtattttacatttgta

SEQ ID NO: 51938 - DNA, 20 bp, Artificial sequence
  SiRNA target sequence
tgtgtattttacatttgtat

SEQ ID NO: 51939 - DNA, 20 bp, Artificial sequence
  SiRNA target sequence
gtgtattttacatttgtatt

SEQ ID NO: 51940 - DNA, 20 bp, Artificial sequence
  SiRNA target sequence
tgtattttacatttgtattt

SEQ ID NO: 51941 - DNA, 20 bp, Artificial sequence
  SiRNA target sequence
gtattttacatttgtatttt

SEQ ID NO: 51942 - DNA, 20 bp, Artificial sequence
  SiRNA target sequence
tattttacatttgtattttc

SEQ ID NO: 51943 - DNA, 20 bp, Artificial sequence
  SiRNA target sequence
attttacatttgtattttca

SEQ ID NO: 51944 - DNA, 20 bp, Artificial sequence
  SiRNA target sequence
ttttacatttgtattttcaa

SEQ ID NO: 51945 - DNA, 20 bp, Artificial sequence
  SiRNA target sequence
tttacatttgtattttcaat

SEQ ID NO: 51946 - DNA, 20 bp, Artificial sequence
  SiRNA target sequence
ttacatttgtattttcaata

SEQ ID NO: 51947 - DNA, 20 bp, Artificial sequence
  SiRNA target sequence
tacatttgtattttcaatat

SEQ ID NO: 51948 - DNA, 20 bp, Artificial sequence
  SiRNA target sequence
acatttgtattttcaatatg

SEQ ID NO: 51949 - DNA, 20 bp, Artificial sequence
  SiRNA target sequence
catttgtattttcaatatgg

SEQ ID NO: 51950 - DNA, 20 bp, Artificial sequence
  SiRNA target sequence
atttgtattttcaatatgga

SEQ ID NO: 51951 - DNA, 20 bp, Artificial sequence
  SiRNA target sequence
tttgtattttcaatatggag

SEQ ID NO: 51952 - DNA, 20 bp, Artificial sequence
  SiRNA target sequence
ttgtattttcaatatggaga

SEQ ID NO: 51953 - DNA, 20 bp, Artificial sequence
  SiRNA target sequence
tgtattttcaatatggagaa

SEQ ID NO: 51954 - DNA, 20 bp, Artificial sequence
  SiRNA target sequence
gtattttcaatatggagaaa

SEQ ID NO: 51955 - DNA, 20 bp, Artificial sequence
  SiRNA target sequence
tattttcaatatggagaaac

SEQ ID NO: 51956 - DNA, 20 bp, Artificial sequence
  SiRNA target sequence
attttcaatatggagaaaca

SEQ ID NO: 51957 - DNA, 20 bp, Artificial sequence
  SiRNA target sequence
ttttcaatatggagaaacaa

SEQ ID NO: 51958 - DNA, 20 bp, Artificial sequence
  SiRNA target sequence
tttcaatatggagaaacaat

SEQ ID NO: 51959 - DNA, 20 bp, Artificial sequence
  SiRNA target sequence
ttcaatatggagaaacaata

SEQ ID NO: 51960 - DNA, 20 bp, Artificial sequence
  SiRNA target sequence
tcaatatggagaaacaatat

SEQ ID NO: 51961 - DNA, 20 bp, Artificial sequence
  SiRNA target sequence
caatatggagaaacaatatt

SEQ ID NO: 51962 - DNA, 20 bp, Artificial sequence
  SiRNA target sequence
aatatggagaaacaatatta

SEQ ID NO: 51963 - DNA, 20 bp, Artificial sequence
  SiRNA target sequence
atatggagaaacaatattag

SEQ ID NO: 51964 - DNA, 20 bp, Artificial sequence
  SiRNA target sequence
tatggagaaacaatattaga

SEQ ID NO: 51965 - DNA, 20 bp, Artificial sequence
  SiRNA target sequence
atggagaaacaatattagaa

SEQ ID NO: 51966 - DNA, 20 bp, Artificial sequence
  SiRNA target sequence
tggagaaacaatattagaag

SEQ ID NO: 51967 - DNA, 20 bp, Artificial sequence
  SiRNA target sequence
ggagaaacaatattagaaga

SEQ ID NO: 51968 - DNA, 20 bp, Artificial sequence
  SiRNA target sequence
gagaaacaatattagaagac

SEQ ID NO: 51969 - DNA, 20 bp, Artificial sequence
  SiRNA target sequence
agaaacaatattagaagaca

SEQ ID NO: 51970 - DNA, 20 bp, Artificial sequence
  SiRNA target sequence
gaaacaatattagaagacaa

SEQ ID NO: 51971 - DNA, 20 bp, Artificial sequence
  SiRNA target sequence
aaacaatattagaagacaat

SEQ ID NO: 51972 - DNA, 20 bp, Artificial sequence
  SiRNA target sequence
aacaatattagaagacaata

SEQ ID NO: 51973 - DNA, 20 bp, Artificial sequence
  SiRNA target sequence
acaatattagaagacaatat

SEQ ID NO: 51974 - DNA, 20 bp, Artificial sequence
  SiRNA target sequence
caatattagaagacaatata

SEQ ID NO: 51975 - DNA, 20 bp, Artificial sequence
  SiRNA target sequence
aatattagaagacaatataa

SEQ ID NO: 51976 - DNA, 20 bp, Artificial sequence
  SiRNA target sequence
atattagaagacaatataat

SEQ ID NO: 51977 - DNA, 20 bp, Artificial sequence
  SiRNA target sequence
tattagaagacaatataata

SEQ ID NO: 51978 - DNA, 20 bp, Artificial sequence
  SiRNA target sequence
attagaagacaatataataa

SEQ ID NO: 51979 - DNA, 20 bp, Artificial sequence
  SiRNA target sequence
ttagaagacaatataataag

SEQ ID NO: 51980 - DNA, 20 bp, Artificial sequence
  SiRNA target sequence
tagaagacaatataataagt

SEQ ID NO: 51981 - DNA, 20 bp, Artificial sequence
  SiRNA target sequence
agaagacaatataataagtc

SEQ ID NO: 51982 - DNA, 20 bp, Artificial sequence
  SiRNA target sequence
gaagacaatataataagtca

SEQ ID NO: 51983 - DNA, 20 bp, Artificial sequence
  SiRNA target sequence
aagacaatataataagtcac

SEQ ID NO: 51984 - DNA, 20 bp, Artificial sequence
  SiRNA target sequence
agacaatataataagtcaca

SEQ ID NO: 51985 - DNA, 20 bp, Artificial sequence
  SiRNA target sequence
gacaatataataagtcacag

SEQ ID NO: 51986 - DNA, 20 bp, Artificial sequence
  SiRNA target sequence
acaatataataagtcacagg

SEQ ID NO: 51987 - DNA, 20 bp, Artificial sequence
  SiRNA target sequence
caatataataagtcacagga

SEQ ID NO: 51988 - DNA, 20 bp, Artificial sequence
  SiRNA target sequence
aatataataagtcacaggat

SEQ ID NO: 51989 - DNA, 20 bp, Artificial sequence
  SiRNA target sequence
atataataagtcacaggata

SEQ ID NO: 51990 - DNA, 20 bp, Artificial sequence
  SiRNA target sequence
tataataagtcacaggataa

SEQ ID NO: 51991 - DNA, 20 bp, Artificial sequence
  SiRNA target sequence
ataataagtcacaggataaa

SEQ ID NO: 51992 - DNA, 20 bp, Artificial sequence
  SiRNA target sequence
taataagtcacaggataaat

SEQ ID NO: 51993 - DNA, 20 bp, Artificial sequence
  SiRNA target sequence
aataagtcacaggataaatt

SEQ ID NO: 51994 - DNA, 20 bp, Artificial sequence
  SiRNA target sequence
ataagtcacaggataaatta

SEQ ID NO: 51995 - DNA, 20 bp, Artificial sequence
  SiRNA target sequence
taagtcacaggataaattat

SEQ ID NO: 51996 - DNA, 20 bp, Artificial sequence
  SiRNA target sequence
aagtcacaggataaattatc

SEQ ID NO: 51997 - DNA, 20 bp, Artificial sequence
  SiRNA target sequence
agtcacaggataaattatcg

SEQ ID NO: 51998 - DNA, 20 bp, Artificial sequence
  SiRNA target sequence
gtcacaggataaattatcga

SEQ ID NO: 51999 - DNA, 20 bp, Artificial sequence
  SiRNA target sequence
tcacaggataaattatcgaa

SEQ ID NO: 52000 - DNA, 20 bp, Artificial sequence
  SiRNA target sequence
cacaggataaattatcgaat

SEQ ID NO: 52001 - DNA, 20 bp, Artificial sequence
  SiRNA target sequence
acaggataaattatcgaata

SEQ ID NO: 52002 - DNA, 20 bp, Artificial sequence
  SiRNA target sequence
caggataaattatcgaataa

SEQ ID NO: 52003 - DNA, 20 bp, Artificial sequence
  SiRNA target sequence
aggataaattatcgaataaa

SEQ ID NO: 52004 - DNA, 20 bp, Artificial sequence
  SiRNA target sequence
ggataaattatcgaataaat

SEQ ID NO: 52005 - DNA, 20 bp, Artificial sequence
  SiRNA target sequence
gataaattatcgaataaatt

SEQ ID NO: 52006 - DNA, 20 bp, Artificial sequence
  SiRNA target sequence
ataaattatcgaataaatta

SEQ ID NO: 52007 - DNA, 20 bp, Artificial sequence
  SiRNA target sequence
taaattatcgaataaattac

SEQ ID NO: 52008 - DNA, 20 bp, Artificial sequence
  SiRNA target sequence
aaattatcgaataaattaca

SEQ ID NO: 52009 - DNA, 20 bp, Artificial sequence
  SiRNA target sequence
aattatcgaataaattacaa

SEQ ID NO: 52010 - DNA, 20 bp, Artificial sequence
  SiRNA target sequence
attatcgaataaattacaag

SEQ ID NO: 52011 - DNA, 20 bp, Artificial sequence
  SiRNA target sequence
ttatcgaataaattacaaga

SEQ ID NO: 52012 - DNA, 20 bp, Artificial sequence
  SiRNA target sequence
tatcgaataaattacaagat

SEQ ID NO: 52013 - DNA, 20 bp, Artificial sequence
  SiRNA target sequence
atcgaataaattacaagatt

SEQ ID NO: 52014 - DNA, 20 bp, Artificial sequence
  SiRNA target sequence
tcgaataaattacaagattt

SEQ ID NO: 52015 - DNA, 20 bp, Artificial sequence
  SiRNA target sequence
cgaataaattacaagatttt

SEQ ID NO: 52016 - DNA, 20 bp, Artificial sequence
  SiRNA target sequence
gaataaattacaagattttt

SEQ ID NO: 52017 - DNA, 20 bp, Artificial sequence
  SiRNA target sequence
aataaattacaagatttttt

SEQ ID NO: 52018 - DNA, 20 bp, Artificial sequence
  SiRNA target sequence
ataaattacaagatttttta

SEQ ID NO: 52019 - DNA, 20 bp, Artificial sequence
  SiRNA target sequence
taaattacaagattttttag

SEQ ID NO: 52020 - DNA, 20 bp, Artificial sequence
  SiRNA target sequence
aaattacaagattttttagc

SEQ ID NO: 52021 - DNA, 20 bp, Artificial sequence
  SiRNA target sequence
aattacaagattttttagct

SEQ ID NO: 52022 - DNA, 20 bp, Artificial sequence
  SiRNA target sequence
attacaagattttttagcta

SEQ ID NO: 52023 - DNA, 20 bp, Artificial sequence
  SiRNA target sequence
ttacaagattttttagctaa

SEQ ID NO: 52024 - DNA, 20 bp, Artificial sequence
  SiRNA target sequence
tacaagattttttagctaat

SEQ ID NO: 52025 - DNA, 20 bp, Artificial sequence
  SiRNA target sequence
acaagattttttagctaatc

SEQ ID NO: 52026 - DNA, 20 bp, Artificial sequence
  SiRNA target sequence
caagattttttagctaatca

SEQ ID NO: 52027 - DNA, 20 bp, Artificial sequence
  SiRNA target sequence
aagattttttagctaatcat

SEQ ID NO: 52028 - DNA, 20 bp, Artificial sequence
  SiRNA target sequence
agattttttagctaatcatg

SEQ ID NO: 52029 - DNA, 20 bp, Artificial sequence
  SiRNA target sequence
gattttttagctaatcatga

SEQ ID NO: 52030 - DNA, 20 bp, Artificial sequence
  SiRNA target sequence
attttttagctaatcatgaa

SEQ ID NO: 52031 - DNA, 20 bp, Artificial sequence
  SiRNA target sequence
ttttttagctaatcatgaaa

SEQ ID NO: 52032 - DNA, 20 bp, Artificial sequence
  SiRNA target sequence
tttttagctaatcatgaaac

SEQ ID NO: 52033 - DNA, 20 bp, Artificial sequence
  SiRNA target sequence
ttttagctaatcatgaaaca

SEQ ID NO: 52034 - DNA, 20 bp, Artificial sequence
  SiRNA target sequence
tttagctaatcatgaaacaa

SEQ ID NO: 52035 - DNA, 20 bp, Artificial sequence
  SiRNA target sequence
ttagctaatcatgaaacaat

SEQ ID NO: 52036 - DNA, 20 bp, Artificial sequence
  SiRNA target sequence
tagctaatcatgaaacaatt

SEQ ID NO: 52037 - DNA, 20 bp, Artificial sequence
  SiRNA target sequence
agctaatcatgaaacaatta

SEQ ID NO: 52038 - DNA, 20 bp, Artificial sequence
  SiRNA target sequence
gctaatcatgaaacaattaa

SEQ ID NO: 52039 - DNA, 20 bp, Artificial sequence
  SiRNA target sequence
ctaatcatgaaacaattaaa

SEQ ID NO: 52040 - DNA, 20 bp, Artificial sequence
  SiRNA target sequence
taatcatgaaacaattaaag

SEQ ID NO: 52041 - DNA, 20 bp, Artificial sequence
  SiRNA target sequence
aatcatgaaacaattaaagc

SEQ ID NO: 52042 - DNA, 20 bp, Artificial sequence
  SiRNA target sequence
atcatgaaacaattaaagcc

SEQ ID NO: 52043 - DNA, 20 bp, Artificial sequence
  SiRNA target sequence
tcatgaaacaattaaagcct

SEQ ID NO: 52044 - DNA, 20 bp, Artificial sequence
  SiRNA target sequence
catgaaacaattaaagccta

SEQ ID NO: 52045 - DNA, 20 bp, Artificial sequence
  SiRNA target sequence
atgaaacaattaaagcctat

SEQ ID NO: 52046 - DNA, 20 bp, Artificial sequence
  SiRNA target sequence
tgaaacaattaaagcctata

SEQ ID NO: 52047 - DNA, 20 bp, Artificial sequence
  SiRNA target sequence
gaaacaattaaagcctataa

SEQ ID NO: 52048 - DNA, 20 bp, Artificial sequence
  SiRNA target sequence
aaacaattaaagcctataat

SEQ ID NO: 52049 - DNA, 20 bp, Artificial sequence
  SiRNA target sequence
aacaattaaagcctataata

SEQ ID NO: 52050 - DNA, 20 bp, Artificial sequence
  SiRNA target sequence
acaattaaagcctataatat

SEQ ID NO: 52051 - DNA, 20 bp, Artificial sequence
  SiRNA target sequence
caattaaagcctataatatg

SEQ ID NO: 52052 - DNA, 20 bp, Artificial sequence
  SiRNA target sequence
aattaaagcctataatatgg

SEQ ID NO: 52053 - DNA, 20 bp, Artificial sequence
  SiRNA target sequence
attaaagcctataatatgga

SEQ ID NO: 52054 - DNA, 20 bp, Artificial sequence
  SiRNA target sequence
ttaaagcctataatatggaa

SEQ ID NO: 52055 - DNA, 20 bp, Artificial sequence
  SiRNA target sequence
taaagcctataatatggaag

SEQ ID NO: 52056 - DNA, 20 bp, Artificial sequence
  SiRNA target sequence
aaagcctataatatggaaga

SEQ ID NO: 52057 - DNA, 20 bp, Artificial sequence
  SiRNA target sequence
aagcctataatatggaagaa

SEQ ID NO: 52058 - DNA, 20 bp, Artificial sequence
  SiRNA target sequence
agcctataatatggaagaag

SEQ ID NO: 52059 - DNA, 20 bp, Artificial sequence
  SiRNA target sequence
gcctataatatggaagaaga

SEQ ID NO: 52060 - DNA, 20 bp, Artificial sequence
  SiRNA target sequence
cctataatatggaagaagaa

SEQ ID NO: 52061 - DNA, 20 bp, Artificial sequence
  SiRNA target sequence
ctataatatggaagaagaaa

SEQ ID NO: 52062 - DNA, 20 bp, Artificial sequence
  SiRNA target sequence
tataatatggaagaagaaac

SEQ ID NO: 52063 - DNA, 20 bp, Artificial sequence
  SiRNA target sequence
ataatatggaagaagaaact

SEQ ID NO: 52064 - DNA, 20 bp, Artificial sequence
  SiRNA target sequence
taatatggaagaagaaacta

SEQ ID NO: 52065 - DNA, 20 bp, Artificial sequence
  SiRNA target sequence
aatatggaagaagaaactat

SEQ ID NO: 52066 - DNA, 20 bp, Artificial sequence
  SiRNA target sequence
atatggaagaagaaactatt

SEQ ID NO: 52067 - DNA, 20 bp, Artificial sequence
  SiRNA target sequence
tatggaagaagaaactatta

SEQ ID NO: 52068 - DNA, 20 bp, Artificial sequence
  SiRNA target sequence
atggaagaagaaactattac

SEQ ID NO: 52069 - DNA, 20 bp, Artificial sequence
  SiRNA target sequence
tggaagaagaaactattaca

SEQ ID NO: 52070 - DNA, 20 bp, Artificial sequence
  SiRNA target sequence
ggaagaagaaactattacat

SEQ ID NO: 52071 - DNA, 20 bp, Artificial sequence
  SiRNA target sequence
gaagaagaaactattacata

SEQ ID NO: 52072 - DNA, 20 bp, Artificial sequence
  SiRNA target sequence
aagaagaaactattacatat

SEQ ID NO: 52073 - DNA, 20 bp, Artificial sequence
  SiRNA target sequence
agaagaaactattacatatt

SEQ ID NO: 52074 - DNA, 20 bp, Artificial sequence
  SiRNA target sequence
gaagaaactattacatattt

SEQ ID NO: 52075 - DNA, 20 bp, Artificial sequence
  SiRNA target sequence
aagaaactattacatatttt

SEQ ID NO: 52076 - DNA, 20 bp, Artificial sequence
  SiRNA target sequence
agaaactattacatattttg

SEQ ID NO: 52077 - DNA, 20 bp, Artificial sequence
  SiRNA target sequence
gaaactattacatattttga

SEQ ID NO: 52078 - DNA, 20 bp, Artificial sequence
  SiRNA target sequence
aaactattacatattttgat

SEQ ID NO: 52079 - DNA, 20 bp, Artificial sequence
  SiRNA target sequence
aactattacatattttgatg

SEQ ID NO: 52080 - DNA, 20 bp, Artificial sequence
  SiRNA target sequence
actattacatattttgatga

SEQ ID NO: 52081 - DNA, 20 bp, Artificial sequence
  SiRNA target sequence
ctattacatattttgatgaa

SEQ ID NO: 52082 - DNA, 20 bp, Artificial sequence
  SiRNA target sequence
tattacatattttgatgaaa

SEQ ID NO: 52083 - DNA, 20 bp, Artificial sequence
  SiRNA target sequence
attacatattttgatgaaaa

SEQ ID NO: 52084 - DNA, 20 bp, Artificial sequence
  SiRNA target sequence
ttacatattttgatgaaaat

SEQ ID NO: 52085 - DNA, 20 bp, Artificial sequence
  SiRNA target sequence
tacatattttgatgaaaatc

SEQ ID NO: 52086 - DNA, 20 bp, Artificial sequence
  SiRNA target sequence
acatattttgatgaaaatca

SEQ ID NO: 52087 - DNA, 20 bp, Artificial sequence
  SiRNA target sequence
catattttgatgaaaatcaa

SEQ ID NO: 52088 - DNA, 20 bp, Artificial sequence
  SiRNA target sequence
atattttgatgaaaatcaaa

SEQ ID NO: 52089 - DNA, 20 bp, Artificial sequence
  SiRNA target sequence
tattttgatgaaaatcaaaa

SEQ ID NO: 52090 - DNA, 20 bp, Artificial sequence
  SiRNA target sequence
attttgatgaaaatcaaaaa

SEQ ID NO: 52091 - DNA, 20 bp, Artificial sequence
  SiRNA target sequence
ttttgatgaaaatcaaaaac

SEQ ID NO: 52092 - DNA, 20 bp, Artificial sequence
  SiRNA target sequence
tttgatgaaaatcaaaaacc

SEQ ID NO: 52093 - DNA, 20 bp, Artificial sequence
  SiRNA target sequence
ttgatgaaaatcaaaaaccg

SEQ ID NO: 52094 - DNA, 20 bp, Artificial sequence
  SiRNA target sequence
tgatgaaaatcaaaaaccgg

SEQ ID NO: 52095 - DNA, 20 bp, Artificial sequence
  SiRNA target sequence
gatgaaaatcaaaaaccggt

SEQ ID NO: 52096 - DNA, 20 bp, Artificial sequence
  SiRNA target sequence
atgaaaatcaaaaaccggta

SEQ ID NO: 52097 - DNA, 20 bp, Artificial sequence
  SiRNA target sequence
tgaaaatcaaaaaccggtag

SEQ ID NO: 52098 - DNA, 20 bp, Artificial sequence
  SiRNA target sequence
gaaaatcaaaaaccggtaga

SEQ ID NO: 52099 - DNA, 20 bp, Artificial sequence
  SiRNA target sequence
aaaatcaaaaaccggtagaa

SEQ ID NO: 52100 - DNA, 20 bp, Artificial sequence
  SiRNA target sequence
aaatcaaaaaccggtagaat

SEQ ID NO: 52101 - DNA, 20 bp, Artificial sequence
  SiRNA target sequence
aatcaaaaaccggtagaata

SEQ ID NO: 52102 - DNA, 20 bp, Artificial sequence
  SiRNA target sequence
atcaaaaaccggtagaatat

SEQ ID NO: 52103 - DNA, 20 bp, Artificial sequence
  SiRNA target sequence
tcaaaaaccggtagaatatt

SEQ ID NO: 52104 - DNA, 20 bp, Artificial sequence
  SiRNA target sequence
caaaaaccggtagaatattt

SEQ ID NO: 52105 - DNA, 20 bp, Artificial sequence
  SiRNA target sequence
aaaaaccggtagaatatttt

SEQ ID NO: 52106 - DNA, 20 bp, Artificial sequence
  SiRNA target sequence
aaaaccggtagaatattttg

SEQ ID NO: 52107 - DNA, 20 bp, Artificial sequence
  SiRNA target sequence
aaaccggtagaatattttgg

SEQ ID NO: 52108 - DNA, 20 bp, Artificial sequence
  SiRNA target sequence
aaccggtagaatattttggg

SEQ ID NO: 52109 - DNA, 20 bp, Artificial sequence
  SiRNA target sequence
accggtagaatattttgggg

SEQ ID NO: 52110 - DNA, 20 bp, Artificial sequence
  SiRNA target sequence
ccggtagaatattttggggt

SEQ ID NO: 52111 - DNA, 20 bp, Artificial sequence
  SiRNA target sequence
cggtagaatattttggggta

SEQ ID NO: 52112 - DNA, 20 bp, Artificial sequence
  SiRNA target sequence
ggtagaatattttggggtaa

SEQ ID NO: 52113 - DNA, 20 bp, Artificial sequence
  SiRNA target sequence
gtagaatattttggggtaaa

SEQ ID NO: 52114 - DNA, 20 bp, Artificial sequence
  SiRNA target sequence
tagaatattttggggtaaag

SEQ ID NO: 52115 - DNA, 20 bp, Artificial sequence
  SiRNA target sequence
agaatattttggggtaaagt

SEQ ID NO: 52116 - DNA, 20 bp, Artificial sequence
  SiRNA target sequence
gaatattttggggtaaagtc

SEQ ID NO: 52117 - DNA, 20 bp, Artificial sequence
  SiRNA target sequence
aatattttggggtaaagtct

SEQ ID NO: 52118 - DNA, 20 bp, Artificial sequence
  SiRNA target sequence
atattttggggtaaagtctc

SEQ ID NO: 52119 - DNA, 20 bp, Artificial sequence
  SiRNA target sequence
tattttggggtaaagtctca

SEQ ID NO: 52120 - DNA, 20 bp, Artificial sequence
  SiRNA target sequence
attttggggtaaagtctcac

SEQ ID NO: 52121 - DNA, 20 bp, Artificial sequence
  SiRNA target sequence
ttttggggtaaagtctcaca

SEQ ID NO: 52122 - DNA, 20 bp, Artificial sequence
  SiRNA target sequence
tttggggtaaagtctcacag

SEQ ID NO: 52123 - DNA, 20 bp, Artificial sequence
  SiRNA target sequence
ttggggtaaagtctcacaga

SEQ ID NO: 52124 - DNA, 20 bp, Artificial sequence
  SiRNA target sequence
tggggtaaagtctcacagaa

SEQ ID NO: 52125 - DNA, 20 bp, Artificial sequence
  SiRNA target sequence
ggggtaaagtctcacagaat

SEQ ID NO: 52126 - DNA, 20 bp, Artificial sequence
  SiRNA target sequence
gggtaaagtctcacagaatt

SEQ ID NO: 52127 - DNA, 20 bp, Artificial sequence
  SiRNA target sequence
ggtaaagtctcacagaattt

SEQ ID NO: 52128 - DNA, 20 bp, Artificial sequence
  SiRNA target sequence
gtaaagtctcacagaatttt

SEQ ID NO: 52129 - DNA, 20 bp, Artificial sequence
  SiRNA target sequence
taaagtctcacagaattttg

SEQ ID NO: 52130 - DNA, 20 bp, Artificial sequence
  SiRNA target sequence
aaagtctcacagaattttgt

SEQ ID NO: 52131 - DNA, 20 bp, Artificial sequence
  SiRNA target sequence
aagtctcacagaattttgtt

SEQ ID NO: 52132 - DNA, 20 bp, Artificial sequence
  SiRNA target sequence
agtctcacagaattttgttc

SEQ ID NO: 52133 - DNA, 20 bp, Artificial sequence
  SiRNA target sequence
gtctcacagaattttgttct

SEQ ID NO: 52134 - DNA, 20 bp, Artificial sequence
  SiRNA target sequence
tctcacagaattttgttctc

SEQ ID NO: 52135 - DNA, 20 bp, Artificial sequence
  SiRNA target sequence
ctcacagaattttgttctct

SEQ ID NO: 52136 - DNA, 20 bp, Artificial sequence
  SiRNA target sequence
tcacagaattttgttctctc

SEQ ID NO: 52137 - DNA, 20 bp, Artificial sequence
  SiRNA target sequence
cacagaattttgttctctct

SEQ ID NO: 52138 - DNA, 20 bp, Artificial sequence
  SiRNA target sequence
acagaattttgttctctctt

SEQ ID NO: 52139 - DNA, 20 bp, Artificial sequence
  SiRNA target sequence
cagaattttgttctctcttt

SEQ ID NO: 52140 - DNA, 20 bp, Artificial sequence
  SiRNA target sequence
agaattttgttctctctttt

SEQ ID NO: 52141 - DNA, 20 bp, Artificial sequence
  SiRNA target sequence
gaattttgttctctctttta

SEQ ID NO: 52142 - DNA, 20 bp, Artificial sequence
  SiRNA target sequence
aattttgttctctcttttat

SEQ ID NO: 52143 - DNA, 20 bp, Artificial sequence
  SiRNA target sequence
attttgttctctcttttata

SEQ ID NO: 52144 - DNA, 20 bp, Artificial sequence
  SiRNA target sequence
ttttgttctctcttttatat

SEQ ID NO: 52145 - DNA, 20 bp, Artificial sequence
  SiRNA target sequence
tttgttctctcttttatata

SEQ ID NO: 52146 - DNA, 20 bp, Artificial sequence
  SiRNA target sequence
ttgttctctcttttatatat

SEQ ID NO: 52147 - DNA, 20 bp, Artificial sequence
  SiRNA target sequence
tgttctctcttttatatata

SEQ ID NO: 52148 - DNA, 20 bp, Artificial sequence
  SiRNA target sequence
gttctctcttttatatatac

SEQ ID NO: 52149 - DNA, 20 bp, Artificial sequence
  SiRNA target sequence
ttctctcttttatatataca

SEQ ID NO: 52150 - DNA, 20 bp, Artificial sequence
  SiRNA target sequence
tctctcttttatatatacaa

SEQ ID NO: 52151 - DNA, 20 bp, Artificial sequence
  SiRNA target sequence
ctctcttttatatatacaaa

SEQ ID NO: 52152 - DNA, 20 bp, Artificial sequence
  SiRNA target sequence
tctcttttatatatacaaaa

SEQ ID NO: 52153 - DNA, 20 bp, Artificial sequence
  SiRNA target sequence
ctcttttatatatacaaaaa

SEQ ID NO: 52154 - DNA, 20 bp, Artificial sequence
  SiRNA target sequence
tcttttatatatacaaaaaa

SEQ ID NO: 52155 - DNA, 20 bp, Artificial sequence
  SiRNA target sequence
cttttatatatacaaaaaat

SEQ ID NO: 52156 - DNA, 20 bp, Artificial sequence
  SiRNA target sequence
ttttatatatacaaaaaatg

SEQ ID NO: 52157 - DNA, 20 bp, Artificial sequence
  SiRNA target sequence
tttatatatacaaaaaatga

SEQ ID NO: 52158 - DNA, 20 bp, Artificial sequence
  SiRNA target sequence
ttatatatacaaaaaatgac

SEQ ID NO: 52159 - DNA, 20 bp, Artificial sequence
  SiRNA target sequence
tatatatacaaaaaatgaca

SEQ ID NO: 52160 - DNA, 20 bp, Artificial sequence
  SiRNA target sequence
atatatacaaaaaatgacat

SEQ ID NO: 52161 - DNA, 20 bp, Artificial sequence
  SiRNA target sequence
tatatacaaaaaatgacatt

SEQ ID NO: 52162 - DNA, 20 bp, Artificial sequence
  SiRNA target sequence
atatacaaaaaatgacattt

SEQ ID NO: 52163 - DNA, 20 bp, Artificial sequence
  SiRNA target sequence
tatacaaaaaatgacatttg

SEQ ID NO: 52164 - DNA, 20 bp, Artificial sequence
  SiRNA target sequence
atacaaaaaatgacatttgc

SEQ ID NO: 52165 - DNA, 20 bp, Artificial sequence
  SiRNA target sequence
tacaaaaaatgacatttgcg

SEQ ID NO: 52166 - DNA, 20 bp, Artificial sequence
  SiRNA target sequence
acaaaaaatgacatttgcga

SEQ ID NO: 52167 - DNA, 20 bp, Artificial sequence
  SiRNA target sequence
caaaaaatgacatttgcgat

SEQ ID NO: 52168 - DNA, 20 bp, Artificial sequence
  SiRNA target sequence
aaaaaatgacatttgcgata

SEQ ID NO: 52169 - DNA, 20 bp, Artificial sequence
  SiRNA target sequence
aaaaatgacatttgcgatac

SEQ ID NO: 52170 - DNA, 20 bp, Artificial sequence
  SiRNA target sequence
aaaatgacatttgcgataca

SEQ ID NO: 52171 - DNA, 20 bp, Artificial sequence
  SiRNA target sequence
aaatgacatttgcgatacag

SEQ ID NO: 52172 - DNA, 20 bp, Artificial sequence
  SiRNA target sequence
aatgacatttgcgatacagg

SEQ ID NO: 52173 - DNA, 20 bp, Artificial sequence
  SiRNA target sequence
atgacatttgcgatacaggc

SEQ ID NO: 52174 - DNA, 20 bp, Artificial sequence
  SiRNA target sequence
tgacatttgcgatacaggca

SEQ ID NO: 52175 - DNA, 20 bp, Artificial sequence
  SiRNA target sequence
gacatttgcgatacaggcaa

SEQ ID NO: 52176 - DNA, 20 bp, Artificial sequence
  SiRNA target sequence
acatttgcgatacaggcaat

SEQ ID NO: 52177 - DNA, 20 bp, Artificial sequence
  SiRNA target sequence
catttgcgatacaggcaatt

SEQ ID NO: 52178 - DNA, 20 bp, Artificial sequence
  SiRNA target sequence
atttgcgatacaggcaatta

SEQ ID NO: 52179 - DNA, 20 bp, Artificial sequence
  SiRNA target sequence
tttgcgatacaggcaattat

SEQ ID NO: 52180 - DNA, 20 bp, Artificial sequence
  SiRNA target sequence
ttgcgatacaggcaattatt

SEQ ID NO: 52181 - DNA, 20 bp, Artificial sequence
  SiRNA target sequence
tgcgatacaggcaattatta

SEQ ID NO: 52182 - DNA, 20 bp, Artificial sequence
  SiRNA target sequence
gcgatacaggcaattattat

SEQ ID NO: 52183 - DNA, 20 bp, Artificial sequence
  SiRNA target sequence
cgatacaggcaattattatt

SEQ ID NO: 52184 - DNA, 20 bp, Artificial sequence
  SiRNA target sequence
gatacaggcaattattatta

SEQ ID NO: 52185 - DNA, 20 bp, Artificial sequence
  SiRNA target sequence
atacaggcaattattattat

SEQ ID NO: 52186 - DNA, 20 bp, Artificial sequence
  SiRNA target sequence
tacaggcaattattattatc

SEQ ID NO: 52187 - DNA, 20 bp, Artificial sequence
  SiRNA target sequence
acaggcaattattattatca

SEQ ID NO: 52188 - DNA, 20 bp, Artificial sequence
  SiRNA target sequence
caggcaattattattatcac

SEQ ID NO: 52189 - DNA, 20 bp, Artificial sequence
  SiRNA target sequence
aggcaattattattatcaca

SEQ ID NO: 52190 - DNA, 20 bp, Artificial sequence
  SiRNA target sequence
ggcaattattattatcacat

SEQ ID NO: 52191 - DNA, 20 bp, Artificial sequence
  SiRNA target sequence
gcaattattattatcacatt

SEQ ID NO: 52192 - DNA, 20 bp, Artificial sequence
  SiRNA target sequence
caattattattatcacatta

SEQ ID NO: 52193 - DNA, 20 bp, Artificial sequence
  SiRNA target sequence
aattattattatcacattag

SEQ ID NO: 52194 - DNA, 20 bp, Artificial sequence
  SiRNA target sequence
attattattatcacattagg

SEQ ID NO: 52195 - DNA, 20 bp, Artificial sequence
  SiRNA target sequence
ttattattatcacattagga

SEQ ID NO: 52196 - DNA, 20 bp, Artificial sequence
  SiRNA target sequence
tattattatcacattaggat

SEQ ID NO: 52197 - DNA, 20 bp, Artificial sequence
  SiRNA target sequence
attattatcacattaggatc

SEQ ID NO: 52198 - DNA, 20 bp, Artificial sequence
  SiRNA target sequence
ttattatcacattaggatct

SEQ ID NO: 52199 - DNA, 20 bp, Artificial sequence
  SiRNA target sequence
tattatcacattaggatctt

SEQ ID NO: 52200 - DNA, 20 bp, Artificial sequence
  SiRNA target sequence
attatcacattaggatcttt

SEQ ID NO: 52201 - DNA, 20 bp, Artificial sequence
  SiRNA target sequence
ttatcacattaggatctttt

SEQ ID NO: 52202 - DNA, 20 bp, Artificial sequence
  SiRNA target sequence
tatcacattaggatcttttg

SEQ ID NO: 52203 - DNA, 20 bp, Artificial sequence
  SiRNA target sequence
atcacattaggatcttttgg

SEQ ID NO: 52204 - DNA, 20 bp, Artificial sequence
  SiRNA target sequence
tcacattaggatcttttgga

SEQ ID NO: 52205 - DNA, 20 bp, Artificial sequence
  SiRNA target sequence
cacattaggatcttttggat

SEQ ID NO: 52206 - DNA, 20 bp, Artificial sequence
  SiRNA target sequence
acattaggatcttttggata

SEQ ID NO: 52207 - DNA, 20 bp, Artificial sequence
  SiRNA target sequence
cattaggatcttttggatat

SEQ ID NO: 52208 - DNA, 20 bp, Artificial sequence
  SiRNA target sequence
attaggatcttttggatatt

SEQ ID NO: 52209 - DNA, 20 bp, Artificial sequence
  SiRNA target sequence
ttaggatcttttggatattt

SEQ ID NO: 52210 - DNA, 20 bp, Artificial sequence
  SiRNA target sequence
taggatcttttggatatttt

SEQ ID NO: 52211 - DNA, 20 bp, Artificial sequence
  SiRNA target sequence
aggatcttttggatattttc

SEQ ID NO: 52212 - DNA, 20 bp, Artificial sequence
  SiRNA target sequence
ggatcttttggatattttcc

SEQ ID NO: 52213 - DNA, 20 bp, Artificial sequence
  SiRNA target sequence
gatcttttggatattttccg

SEQ ID NO: 52214 - DNA, 20 bp, Artificial sequence
  SiRNA target sequence
atcttttggatattttccga

SEQ ID NO: 52215 - DNA, 20 bp, Artificial sequence
  SiRNA target sequence
tcttttggatattttccgat

SEQ ID NO: 52216 - DNA, 20 bp, Artificial sequence
  SiRNA target sequence
cttttggatattttccgatt

SEQ ID NO: 52217 - DNA, 20 bp, Artificial sequence
  SiRNA target sequence
ttttggatattttccgatta

SEQ ID NO: 52218 - DNA, 20 bp, Artificial sequence
  SiRNA target sequence
tttggatattttccgattaa

SEQ ID NO: 52219 - DNA, 20 bp, Artificial sequence
  SiRNA target sequence
ttggatattttccgattaaa

SEQ ID NO: 52220 - DNA, 20 bp, Artificial sequence
  SiRNA target sequence
tggatattttccgattaaat

SEQ ID NO: 52221 - DNA, 20 bp, Artificial sequence
  SiRNA target sequence
ggatattttccgattaaatt

SEQ ID NO: 52222 - DNA, 20 bp, Artificial sequence
  SiRNA target sequence
gatattttccgattaaatta

SEQ ID NO: 52223 - DNA, 20 bp, Artificial sequence
  SiRNA target sequence
atattttccgattaaattat

SEQ ID NO: 52224 - DNA, 20 bp, Artificial sequence
  SiRNA target sequence
tattttccgattaaattatc

SEQ ID NO: 52225 - DNA, 20 bp, Artificial sequence
  SiRNA target sequence
attttccgattaaattatcc

SEQ ID NO: 52226 - DNA, 20 bp, Artificial sequence
  SiRNA target sequence
ttttccgattaaattatcct

SEQ ID NO: 52227 - DNA, 20 bp, Artificial sequence
  SiRNA target sequence
tttccgattaaattatcctc

SEQ ID NO: 52228 - DNA, 20 bp, Artificial sequence
  SiRNA target sequence
ttccgattaaattatcctct

SEQ ID NO: 52229 - DNA, 20 bp, Artificial sequence
  SiRNA target sequence
tccgattaaattatcctctc

SEQ ID NO: 52230 - DNA, 20 bp, Artificial sequence
  SiRNA target sequence
ccgattaaattatcctctca

SEQ ID NO: 52231 - DNA, 20 bp, Artificial sequence
  SiRNA target sequence
cgattaaattatcctctcaa

SEQ ID NO: 52232 - DNA, 20 bp, Artificial sequence
  SiRNA target sequence
gattaaattatcctctcaac

SEQ ID NO: 52233 - DNA, 20 bp, Artificial sequence
  SiRNA target sequence
attaaattatcctctcaaca

SEQ ID NO: 52234 - DNA, 20 bp, Artificial sequence
  SiRNA target sequence
ttaaattatcctctcaacag

SEQ ID NO: 52235 - DNA, 20 bp, Artificial sequence
  SiRNA target sequence
taaattatcctctcaacagt

SEQ ID NO: 52236 - DNA, 20 bp, Artificial sequence
  SiRNA target sequence
aaattatcctctcaacagtt

SEQ ID NO: 52237 - DNA, 20 bp, Artificial sequence
  SiRNA target sequence
aattatcctctcaacagtta

SEQ ID NO: 52238 - DNA, 20 bp, Artificial sequence
  SiRNA target sequence
attatcctctcaacagttag

SEQ ID NO: 52239 - DNA, 20 bp, Artificial sequence
  SiRNA target sequence
ttatcctctcaacagttagt

SEQ ID NO: 52240 - DNA, 20 bp, Artificial sequence
  SiRNA target sequence
tatcctctcaacagttagtc

SEQ ID NO: 52241 - DNA, 20 bp, Artificial sequence
  SiRNA target sequence
atcctctcaacagttagtct

SEQ ID NO: 52242 - DNA, 20 bp, Artificial sequence
  SiRNA target sequence
tcctctcaacagttagtctt

SEQ ID NO: 52243 - DNA, 20 bp, Artificial sequence
  SiRNA target sequence
cctctcaacagttagtcttt

SEQ ID NO: 52244 - DNA, 20 bp, Artificial sequence
  SiRNA target sequence
ctctcaacagttagtctttt

SEQ ID NO: 52245 - DNA, 20 bp, Artificial sequence
  SiRNA target sequence
tctcaacagttagtctttta

SEQ ID NO: 52246 - DNA, 20 bp, Artificial sequence
  SiRNA target sequence
ctcaacagttagtcttttat

SEQ ID NO: 52247 - DNA, 20 bp, Artificial sequence
  SiRNA target sequence
tcaacagttagtcttttata

SEQ ID NO: 52248 - DNA, 20 bp, Artificial sequence
  SiRNA target sequence
caacagttagtcttttatat

SEQ ID NO: 52249 - DNA, 20 bp, Artificial sequence
  SiRNA target sequence
aacagttagtcttttatatt

SEQ ID NO: 52250 - DNA, 20 bp, Artificial sequence
  SiRNA target sequence
acagttagtcttttatattt

SEQ ID NO: 52251 - DNA, 20 bp, Artificial sequence
  SiRNA target sequence
cagttagtcttttatatttc

SEQ ID NO: 52252 - DNA, 20 bp, Artificial sequence
  SiRNA target sequence
agttagtcttttatatttcg

SEQ ID NO: 52253 - DNA, 20 bp, Artificial sequence
  SiRNA target sequence
gttagtcttttatatttcga

SEQ ID NO: 52254 - DNA, 20 bp, Artificial sequence
  SiRNA target sequence
ttagtcttttatatttcgat

SEQ ID NO: 52255 - DNA, 20 bp, Artificial sequence
  SiRNA target sequence
tagtcttttatatttcgatt

SEQ ID NO: 52256 - DNA, 20 bp, Artificial sequence
  SiRNA target sequence
agtcttttatatttcgatta

SEQ ID NO: 52257 - DNA, 20 bp, Artificial sequence
  SiRNA target sequence
gtcttttatatttcgattag

SEQ ID NO: 52258 - DNA, 20 bp, Artificial sequence
  SiRNA target sequence
tcttttatatttcgattagt

SEQ ID NO: 52259 - DNA, 20 bp, Artificial sequence
  SiRNA target sequence
cttttatatttcgattagta

SEQ ID NO: 52260 - DNA, 20 bp, Artificial sequence
  SiRNA target sequence
ttttatatttcgattagtaa

SEQ ID NO: 52261 - DNA, 20 bp, Artificial sequence
  SiRNA target sequence
tttatatttcgattagtaaa

SEQ ID NO: 52262 - DNA, 20 bp, Artificial sequence
  SiRNA target sequence
ttatatttcgattagtaaaa

SEQ ID NO: 52263 - DNA, 20 bp, Artificial sequence
  SiRNA target sequence
tatatttcgattagtaaaac

SEQ ID NO: 52264 - DNA, 20 bp, Artificial sequence
  SiRNA target sequence
atatttcgattagtaaaacg

SEQ ID NO: 52265 - DNA, 20 bp, Artificial sequence
  SiRNA target sequence
tatttcgattagtaaaacgt

SEQ ID NO: 52266 - DNA, 20 bp, Artificial sequence
  SiRNA target sequence
atttcgattagtaaaacgtt

SEQ ID NO: 52267 - DNA, 20 bp, Artificial sequence
  SiRNA target sequence
tttcgattagtaaaacgttg

SEQ ID NO: 52268 - DNA, 20 bp, Artificial sequence
  SiRNA target sequence
ttcgattagtaaaacgttga

SEQ ID NO: 52269 - DNA, 20 bp, Artificial sequence
  SiRNA target sequence
tcgattagtaaaacgttgac

SEQ ID NO: 52270 - DNA, 20 bp, Artificial sequence
  SiRNA target sequence
cgattagtaaaacgttgaca

SEQ ID NO: 52271 - DNA, 20 bp, Artificial sequence
  SiRNA target sequence
gattagtaaaacgttgacaa

SEQ ID NO: 52272 - DNA, 20 bp, Artificial sequence
  SiRNA target sequence
attagtaaaacgttgacaaa

SEQ ID NO: 52273 - DNA, 20 bp, Artificial sequence
  SiRNA target sequence
ttagtaaaacgttgacaaat

SEQ ID NO: 52274 - DNA, 20 bp, Artificial sequence
  SiRNA target sequence
tagtaaaacgttgacaaatt

SEQ ID NO: 52275 - DNA, 20 bp, Artificial sequence
  SiRNA target sequence
agtaaaacgttgacaaattc

SEQ ID NO: 52276 - DNA, 20 bp, Artificial sequence
  SiRNA target sequence
gtaaaacgttgacaaattcg

SEQ ID NO: 52277 - DNA, 20 bp, Artificial sequence
  SiRNA target sequence
taaaacgttgacaaattcgt

SEQ ID NO: 52278 - DNA, 20 bp, Artificial sequence
  SiRNA target sequence
aaaacgttgacaaattcgtt

SEQ ID NO: 52279 - DNA, 20 bp, Artificial sequence
  SiRNA target sequence
aaacgttgacaaattcgttg

SEQ ID NO: 52280 - DNA, 20 bp, Artificial sequence
  SiRNA target sequence
aacgttgacaaattcgttga

SEQ ID NO: 52281 - DNA, 20 bp, Artificial sequence
  SiRNA target sequence
acgttgacaaattcgttgag

SEQ ID NO: 52282 - DNA, 20 bp, Artificial sequence
  SiRNA target sequence
cgttgacaaattcgttgagc

SEQ ID NO: 52283 - DNA, 20 bp, Artificial sequence
  SiRNA target sequence
gttgacaaattcgttgagcg

SEQ ID NO: 52284 - DNA, 20 bp, Artificial sequence
  SiRNA target sequence
ttgacaaattcgttgagcga

SEQ ID NO: 52285 - DNA, 20 bp, Artificial sequence
  SiRNA target sequence
tgacaaattcgttgagcgaa

SEQ ID NO: 52286 - DNA, 20 bp, Artificial sequence
  SiRNA target sequence
gacaaattcgttgagcgaaa

SEQ ID NO: 52287 - DNA, 20 bp, Artificial sequence
  SiRNA target sequence
acaaattcgttgagcgaaat

SEQ ID NO: 52288 - DNA, 20 bp, Artificial sequence
  SiRNA target sequence
caaattcgttgagcgaaatg

SEQ ID NO: 52289 - DNA, 20 bp, Artificial sequence
  SiRNA target sequence
aaattcgttgagcgaaatgg

SEQ ID NO: 52290 - DNA, 20 bp, Artificial sequence
  SiRNA target sequence
aattcgttgagcgaaatggg

SEQ ID NO: 52291 - DNA, 20 bp, Artificial sequence
  SiRNA target sequence
attcgttgagcgaaatggga

SEQ ID NO: 52292 - DNA, 20 bp, Artificial sequence
  SiRNA target sequence
ttcgttgagcgaaatgggaa

SEQ ID NO: 52293 - DNA, 20 bp, Artificial sequence
  SiRNA target sequence
tcgttgagcgaaatgggaat

SEQ ID NO: 52294 - DNA, 20 bp, Artificial sequence
  SiRNA target sequence
cgttgagcgaaatgggaatg

SEQ ID NO: 52295 - DNA, 20 bp, Artificial sequence
  SiRNA target sequence
gttgagcgaaatgggaatgc

SEQ ID NO: 52296 - DNA, 20 bp, Artificial sequence
  SiRNA target sequence
ttgagcgaaatgggaatgct

SEQ ID NO: 52297 - DNA, 20 bp, Artificial sequence
  SiRNA target sequence
tgagcgaaatgggaatgcta

SEQ ID NO: 52298 - DNA, 20 bp, Artificial sequence
  SiRNA target sequence
gagcgaaatgggaatgctat

SEQ ID NO: 52299 - DNA, 20 bp, Artificial sequence
  SiRNA target sequence
agcgaaatgggaatgctata

SEQ ID NO: 52300 - DNA, 20 bp, Artificial sequence
  SiRNA target sequence
gcgaaatgggaatgctatac

SEQ ID NO: 52301 - DNA, 20 bp, Artificial sequence
  SiRNA target sequence
cgaaatgggaatgctataca

SEQ ID NO: 52302 - DNA, 20 bp, Artificial sequence
  SiRNA target sequence
gaaatgggaatgctatacac

SEQ ID NO: 52303 - DNA, 20 bp, Artificial sequence
  SiRNA target sequence
aaatgggaatgctatacaca

SEQ ID NO: 52304 - DNA, 20 bp, Artificial sequence
  SiRNA target sequence
aatgggaatgctatacacaa

SEQ ID NO: 52305 - DNA, 20 bp, Artificial sequence
  SiRNA target sequence
atgggaatgctatacacaag

SEQ ID NO: 52306 - DNA, 20 bp, Artificial sequence
  SiRNA target sequence
tgggaatgctatacacaaga

SEQ ID NO: 52307 - DNA, 20 bp, Artificial sequence
  SiRNA target sequence
gggaatgctatacacaagat

SEQ ID NO: 52308 - DNA, 20 bp, Artificial sequence
  SiRNA target sequence
ggaatgctatacacaagata

SEQ ID NO: 52309 - DNA, 20 bp, Artificial sequence
  SiRNA target sequence
gaatgctatacacaagatat

SEQ ID NO: 52310 - DNA, 20 bp, Artificial sequence
  SiRNA target sequence
aatgctatacacaagatatg

SEQ ID NO: 52311 - DNA, 20 bp, Artificial sequence
  SiRNA target sequence
atgctatacacaagatatgt

SEQ ID NO: 52312 - DNA, 20 bp, Artificial sequence
  SiRNA target sequence
tgctatacacaagatatgta

SEQ ID NO: 52313 - DNA, 20 bp, Artificial sequence
  SiRNA target sequence
gctatacacaagatatgtac

SEQ ID NO: 52314 - DNA, 20 bp, Artificial sequence
  SiRNA target sequence
ctatacacaagatatgtaca

SEQ ID NO: 52315 - DNA, 20 bp, Artificial sequence
  SiRNA target sequence
tatacacaagatatgtacaa

SEQ ID NO: 52316 - DNA, 20 bp, Artificial sequence
  SiRNA target sequence
atacacaagatatgtacaag

SEQ ID NO: 52317 - DNA, 20 bp, Artificial sequence
  SiRNA target sequence
tacacaagatatgtacaagg

SEQ ID NO: 52318 - DNA, 20 bp, Artificial sequence
  SiRNA target sequence
acacaagatatgtacaagga

SEQ ID NO: 52319 - DNA, 20 bp, Artificial sequence
  SiRNA target sequence
cacaagatatgtacaaggat

SEQ ID NO: 52320 - DNA, 20 bp, Artificial sequence
  SiRNA target sequence
acaagatatgtacaaggatt

SEQ ID NO: 52321 - DNA, 20 bp, Artificial sequence
  SiRNA target sequence
caagatatgtacaaggattt

SEQ ID NO: 52322 - DNA, 20 bp, Artificial sequence
  SiRNA target sequence
aagatatgtacaaggatttt

SEQ ID NO: 52323 - DNA, 20 bp, Artificial sequence
  SiRNA target sequence
agatatgtacaaggattttt

SEQ ID NO: 52324 - DNA, 20 bp, Artificial sequence
  SiRNA target sequence
gatatgtacaaggattttta

SEQ ID NO: 52325 - DNA, 20 bp, Artificial sequence
  SiRNA target sequence
atatgtacaaggatttttaa

SEQ ID NO: 52326 - DNA, 20 bp, Artificial sequence
  SiRNA target sequence
tatgtacaaggatttttaaa

SEQ ID NO: 52327 - DNA, 20 bp, Artificial sequence
  SiRNA target sequence
atgtacaaggatttttaaat

SEQ ID NO: 52328 - DNA, 20 bp, Artificial sequence
  SiRNA target sequence
tgtacaaggatttttaaatg

SEQ ID NO: 52329 - DNA, 20 bp, Artificial sequence
  SiRNA target sequence
gtacaaggatttttaaatgc

SEQ ID NO: 52330 - DNA, 20 bp, Artificial sequence
  SiRNA target sequence
tacaaggatttttaaatgca

SEQ ID NO: 52331 - DNA, 20 bp, Artificial sequence
  SiRNA target sequence
acaaggatttttaaatgcaa

SEQ ID NO: 52332 - DNA, 20 bp, Artificial sequence
  SiRNA target sequence
caaggatttttaaatgcaaa

SEQ ID NO: 52333 - DNA, 20 bp, Artificial sequence
  SiRNA target sequence
aaggatttttaaatgcaaag

SEQ ID NO: 52334 - DNA, 20 bp, Artificial sequence
  SiRNA target sequence
aggatttttaaatgcaaagt

SEQ ID NO: 52335 - DNA, 20 bp, Artificial sequence
  SiRNA target sequence
ggatttttaaatgcaaagtc

SEQ ID NO: 52336 - DNA, 20 bp, Artificial sequence
  SiRNA target sequence
gatttttaaatgcaaagtct

SEQ ID NO: 52337 - DNA, 20 bp, Artificial sequence
  SiRNA target sequence
atttttaaatgcaaagtctg

SEQ ID NO: 52338 - DNA, 20 bp, Artificial sequence
  SiRNA target sequence
tttttaaatgcaaagtctgg

SEQ ID NO: 52339 - DNA, 20 bp, Artificial sequence
  SiRNA target sequence
ttttaaatgcaaagtctgga

SEQ ID NO: 52340 - DNA, 20 bp, Artificial sequence
  SiRNA target sequence
tttaaatgcaaagtctggat

SEQ ID NO: 52341 - DNA, 20 bp, Artificial sequence
  SiRNA target sequence
ttaaatgcaaagtctggata

SEQ ID NO: 52342 - DNA, 20 bp, Artificial sequence
  SiRNA target sequence
taaatgcaaagtctggatat

SEQ ID NO: 52343 - DNA, 20 bp, Artificial sequence
  SiRNA target sequence
aaatgcaaagtctggatatt

SEQ ID NO: 52344 - DNA, 20 bp, Artificial sequence
  SiRNA target sequence
aatgcaaagtctggatatta

SEQ ID NO: 52345 - DNA, 20 bp, Artificial sequence
  SiRNA target sequence
atgcaaagtctggatattac

SEQ ID NO: 52346 - DNA, 20 bp, Artificial sequence
  SiRNA target sequence
tgcaaagtctggatattacg

SEQ ID NO: 52347 - DNA, 20 bp, Artificial sequence
  SiRNA target sequence
gcaaagtctggatattacga

SEQ ID NO: 52348 - DNA, 20 bp, Artificial sequence
  SiRNA target sequence
caaagtctggatattacgag

SEQ ID NO: 52349 - DNA, 20 bp, Artificial sequence
  SiRNA target sequence
aaagtctggatattacgagt

SEQ ID NO: 52350 - DNA, 20 bp, Artificial sequence
  SiRNA target sequence
aagtctggatattacgagtt

SEQ ID NO: 52351 - DNA, 20 bp, Artificial sequence
  SiRNA target sequence
agtctggatattacgagttt

SEQ ID NO: 52352 - DNA, 20 bp, Artificial sequence
  SiRNA target sequence
gtctggatattacgagttta

SEQ ID NO: 52353 - DNA, 20 bp, Artificial sequence
  SiRNA target sequence
tctggatattacgagtttaa

SEQ ID NO: 52354 - DNA, 20 bp, Artificial sequence
  SiRNA target sequence
ctggatattacgagtttaaa

SEQ ID NO: 52355 - DNA, 20 bp, Artificial sequence
  SiRNA target sequence
tggatattacgagtttaaag

SEQ ID NO: 52356 - DNA, 20 bp, Artificial sequence
  SiRNA target sequence
ggatattacgagtttaaaga

SEQ ID NO: 52357 - DNA, 20 bp, Artificial sequence
  SiRNA target sequence
gatattacgagtttaaagag

SEQ ID NO: 52358 - DNA, 20 bp, Artificial sequence
  SiRNA target sequence
atattacgagtttaaagagg

SEQ ID NO: 52359 - DNA, 20 bp, Artificial sequence
  SiRNA target sequence
tattacgagtttaaagagga

SEQ ID NO: 52360 - DNA, 20 bp, Artificial sequence
  SiRNA target sequence
attacgagtttaaagaggat

SEQ ID NO: 52361 - DNA, 20 bp, Artificial sequence
  SiRNA target sequence
ttacgagtttaaagaggata

SEQ ID NO: 52362 - DNA, 20 bp, Artificial sequence
  SiRNA target sequence
tacgagtttaaagaggatac

SEQ ID NO: 52363 - DNA, 20 bp, Artificial sequence
  SiRNA target sequence
acgagtttaaagaggataca

SEQ ID NO: 52364 - DNA, 20 bp, Artificial sequence
  SiRNA target sequence
cgagtttaaagaggatacac

SEQ ID NO: 52365 - DNA, 20 bp, Artificial sequence
  SiRNA target sequence
gagtttaaagaggatacaca

SEQ ID NO: 52366 - DNA, 20 bp, Artificial sequence
  SiRNA target sequence
agtttaaagaggatacacaa

SEQ ID NO: 52367 - DNA, 20 bp, Artificial sequence
  SiRNA target sequence
gtttaaagaggatacacaaa

SEQ ID NO: 52368 - DNA, 20 bp, Artificial sequence
  SiRNA target sequence
tttaaagaggatacacaaac

SEQ ID NO: 52369 - DNA, 20 bp, Artificial sequence
  SiRNA target sequence
ttaaagaggatacacaaact

SEQ ID NO: 52370 - DNA, 20 bp, Artificial sequence
  SiRNA target sequence
taaagaggatacacaaactg

SEQ ID NO: 52371 - DNA, 20 bp, Artificial sequence
  SiRNA target sequence
aaagaggatacacaaactga

SEQ ID NO: 52372 - DNA, 20 bp, Artificial sequence
  SiRNA target sequence
aagaggatacacaaactgat

SEQ ID NO: 52373 - DNA, 20 bp, Artificial sequence
  SiRNA target sequence
agaggatacacaaactgata

SEQ ID NO: 52374 - DNA, 20 bp, Artificial sequence
  SiRNA target sequence
gaggatacacaaactgataa

SEQ ID NO: 52375 - DNA, 20 bp, Artificial sequence
  SiRNA target sequence
aggatacacaaactgataaa

SEQ ID NO: 52376 - DNA, 20 bp, Artificial sequence
  SiRNA target sequence
ggatacacaaactgataaaa

SEQ ID NO: 52377 - DNA, 20 bp, Artificial sequence
  SiRNA target sequence
gatacacaaactgataaaat

SEQ ID NO: 52378 - DNA, 20 bp, Artificial sequence
  SiRNA target sequence
atacacaaactgataaaata

SEQ ID NO: 52379 - DNA, 20 bp, Artificial sequence
  SiRNA target sequence
tacacaaactgataaaataa

SEQ ID NO: 52380 - DNA, 20 bp, Artificial sequence
  SiRNA target sequence
acacaaactgataaaataag

SEQ ID NO: 52381 - DNA, 20 bp, Artificial sequence
  SiRNA target sequence
cacaaactgataaaataaga

SEQ ID NO: 52382 - DNA, 20 bp, Artificial sequence
  SiRNA target sequence
acaaactgataaaataagac

SEQ ID NO: 52383 - DNA, 20 bp, Artificial sequence
  SiRNA target sequence
caaactgataaaataagact

SEQ ID NO: 52384 - DNA, 20 bp, Artificial sequence
  SiRNA target sequence
aaactgataaaataagactg

SEQ ID NO: 52385 - DNA, 20 bp, Artificial sequence
  SiRNA target sequence
aactgataaaataagactga

SEQ ID NO: 52386 - DNA, 20 bp, Artificial sequence
  SiRNA target sequence
actgataaaataagactgat

SEQ ID NO: 52387 - DNA, 20 bp, Artificial sequence
  SiRNA target sequence
ctgataaaataagactgata

SEQ ID NO: 52388 - DNA, 20 bp, Artificial sequence
  SiRNA target sequence
tgataaaataagactgatag

SEQ ID NO: 52389 - DNA, 20 bp, Artificial sequence
  SiRNA target sequence
gataaaataagactgataga

SEQ ID NO: 52390 - DNA, 20 bp, Artificial sequence
  SiRNA target sequence
ataaaataagactgatagat

SEQ ID NO: 52391 - DNA, 20 bp, Artificial sequence
  SiRNA target sequence
taaaataagactgatagatt

SEQ ID NO: 52392 - DNA, 20 bp, Artificial sequence
  SiRNA target sequence
aaaataagactgatagattt

SEQ ID NO: 52393 - DNA, 20 bp, Artificial sequence
  SiRNA target sequence
aaataagactgatagatttt

SEQ ID NO: 52394 - DNA, 20 bp, Artificial sequence
  SiRNA target sequence
aataagactgatagatttta

SEQ ID NO: 52395 - DNA, 20 bp, Artificial sequence
  SiRNA target sequence
ataagactgatagattttaa

SEQ ID NO: 52396 - DNA, 20 bp, Artificial sequence
  SiRNA target sequence
taagactgatagattttaat

SEQ ID NO: 52397 - DNA, 20 bp, Artificial sequence
  SiRNA target sequence
aagactgatagattttaatg

SEQ ID NO: 52398 - DNA, 20 bp, Artificial sequence
  SiRNA target sequence
agactgatagattttaatga

SEQ ID NO: 52399 - DNA, 20 bp, Artificial sequence
  SiRNA target sequence
gactgatagattttaatgaa

SEQ ID NO: 52400 - DNA, 20 bp, Artificial sequence
  SiRNA target sequence
actgatagattttaatgaaa

SEQ ID NO: 52401 - DNA, 20 bp, Artificial sequence
  SiRNA target sequence
ctgatagattttaatgaaaa

SEQ ID NO: 52402 - DNA, 20 bp, Artificial sequence
  SiRNA target sequence
tgatagattttaatgaaaag

SEQ ID NO: 52403 - DNA, 20 bp, Artificial sequence
  SiRNA target sequence
gatagattttaatgaaaagc

SEQ ID NO: 52404 - DNA, 20 bp, Artificial sequence
  SiRNA target sequence
atagattttaatgaaaagct

SEQ ID NO: 52405 - DNA, 20 bp, Artificial sequence
  SiRNA target sequence
tagattttaatgaaaagcta

SEQ ID NO: 52406 - DNA, 20 bp, Artificial sequence
  SiRNA target sequence
agattttaatgaaaagctag

SEQ ID NO: 52407 - DNA, 20 bp, Artificial sequence
  SiRNA target sequence
gattttaatgaaaagctaga

SEQ ID NO: 52408 - DNA, 20 bp, Artificial sequence
  SiRNA target sequence
attttaatgaaaagctagaa

SEQ ID NO: 52409 - DNA, 20 bp, Artificial sequence
  SiRNA target sequence
ttttaatgaaaagctagaat

SEQ ID NO: 52410 - DNA, 20 bp, Artificial sequence
  SiRNA target sequence
tttaatgaaaagctagaatt

SEQ ID NO: 52411 - DNA, 20 bp, Artificial sequence
  SiRNA target sequence
ttaatgaaaagctagaattt

SEQ ID NO: 52412 - DNA, 20 bp, Artificial sequence
  SiRNA target sequence
taatgaaaagctagaattta

SEQ ID NO: 52413 - DNA, 20 bp, Artificial sequence
  SiRNA target sequence
aatgaaaagctagaatttag

SEQ ID NO: 52414 - DNA, 20 bp, Artificial sequence
  SiRNA target sequence
atgaaaagctagaatttaga

SEQ ID NO: 52415 - DNA, 20 bp, Artificial sequence
  SiRNA target sequence
tgaaaagctagaatttagaa

SEQ ID NO: 52416 - DNA, 20 bp, Artificial sequence
  SiRNA target sequence
gaaaagctagaatttagaaa

SEQ ID NO: 52417 - DNA, 20 bp, Artificial sequence
  SiRNA target sequence
aaaagctagaatttagaaat

SEQ ID NO: 52418 - DNA, 20 bp, Artificial sequence
  SiRNA target sequence
aaagctagaatttagaaatg

SEQ ID NO: 52419 - DNA, 20 bp, Artificial sequence
  SiRNA target sequence
aagctagaatttagaaatgt

SEQ ID NO: 52420 - DNA, 20 bp, Artificial sequence
  SiRNA target sequence
agctagaatttagaaatgta

SEQ ID NO: 52421 - DNA, 20 bp, Artificial sequence
  SiRNA target sequence
gctagaatttagaaatgtat

SEQ ID NO: 52422 - DNA, 20 bp, Artificial sequence
  SiRNA target sequence
ctagaatttagaaatgtatc

SEQ ID NO: 52423 - DNA, 20 bp, Artificial sequence
  SiRNA target sequence
tagaatttagaaatgtatct

SEQ ID NO: 52424 - DNA, 20 bp, Artificial sequence
  SiRNA target sequence
agaatttagaaatgtatctt

SEQ ID NO: 52425 - DNA, 20 bp, Artificial sequence
  SiRNA target sequence
gaatttagaaatgtatcttt

SEQ ID NO: 52426 - DNA, 20 bp, Artificial sequence
  SiRNA target sequence
aatttagaaatgtatctttt

SEQ ID NO: 52427 - DNA, 20 bp, Artificial sequence
  SiRNA target sequence
atttagaaatgtatctttta

SEQ ID NO: 52428 - DNA, 20 bp, Artificial sequence
  SiRNA target sequence
tttagaaatgtatcttttag

SEQ ID NO: 52429 - DNA, 20 bp, Artificial sequence
  SiRNA target sequence
ttagaaatgtatcttttagt

SEQ ID NO: 52430 - DNA, 20 bp, Artificial sequence
  SiRNA target sequence
tagaaatgtatcttttagtt

SEQ ID NO: 52431 - DNA, 20 bp, Artificial sequence
  SiRNA target sequence
agaaatgtatcttttagtta

SEQ ID NO: 52432 - DNA, 20 bp, Artificial sequence
  SiRNA target sequence
gaaatgtatcttttagttat

SEQ ID NO: 52433 - DNA, 20 bp, Artificial sequence
  SiRNA target sequence
aaatgtatcttttagttatt

SEQ ID NO: 52434 - DNA, 20 bp, Artificial sequence
  SiRNA target sequence
aatgtatcttttagttattt

SEQ ID NO: 52435 - DNA, 20 bp, Artificial sequence
  SiRNA target sequence
atgtatcttttagttattta

SEQ ID NO: 52436 - DNA, 20 bp, Artificial sequence
  SiRNA target sequence
tgtatcttttagttatttaa

SEQ ID NO: 52437 - DNA, 20 bp, Artificial sequence
  SiRNA target sequence
gtatcttttagttatttaaa

SEQ ID NO: 52438 - DNA, 20 bp, Artificial sequence
  SiRNA target sequence
tatcttttagttatttaaat

SEQ ID NO: 52439 - DNA, 20 bp, Artificial sequence
  SiRNA target sequence
atcttttagttatttaaata

SEQ ID NO: 52440 - DNA, 20 bp, Artificial sequence
  SiRNA target sequence
tcttttagttatttaaataa

SEQ ID NO: 52441 - DNA, 20 bp, Artificial sequence
  SiRNA target sequence
cttttagttatttaaataag

SEQ ID NO: 52442 - DNA, 20 bp, Artificial sequence
  SiRNA target sequence
ttttagttatttaaataagc

SEQ ID NO: 52443 - DNA, 20 bp, Artificial sequence
  SiRNA target sequence
tttagttatttaaataagcc

SEQ ID NO: 52444 - DNA, 20 bp, Artificial sequence
  SiRNA target sequence
ttagttatttaaataagcct

SEQ ID NO: 52445 - DNA, 20 bp, Artificial sequence
  SiRNA target sequence
tagttatttaaataagccta

SEQ ID NO: 52446 - DNA, 20 bp, Artificial sequence
  SiRNA target sequence
agttatttaaataagcctat

SEQ ID NO: 52447 - DNA, 20 bp, Artificial sequence
  SiRNA target sequence
gttatttaaataagcctatt

SEQ ID NO: 52448 - DNA, 20 bp, Artificial sequence
  SiRNA target sequence
ttatttaaataagcctattt

SEQ ID NO: 52449 - DNA, 20 bp, Artificial sequence
  SiRNA target sequence
tatttaaataagcctatttt

SEQ ID NO: 52450 - DNA, 20 bp, Artificial sequence
  SiRNA target sequence
atttaaataagcctatttta

SEQ ID NO: 52451 - DNA, 20 bp, Artificial sequence
  SiRNA target sequence
tttaaataagcctattttag

SEQ ID NO: 52452 - DNA, 20 bp, Artificial sequence
  SiRNA target sequence
ttaaataagcctattttagt

SEQ ID NO: 52453 - DNA, 20 bp, Artificial sequence
  SiRNA target sequence
taaataagcctattttagtg

SEQ ID NO: 52454 - DNA, 20 bp, Artificial sequence
  SiRNA target sequence
aaataagcctattttagtga

SEQ ID NO: 52455 - DNA, 20 bp, Artificial sequence
  SiRNA target sequence
aataagcctattttagtgaa

SEQ ID NO: 52456 - DNA, 20 bp, Artificial sequence
  SiRNA target sequence
ataagcctattttagtgaat

SEQ ID NO: 52457 - DNA, 20 bp, Artificial sequence
  SiRNA target sequence
taagcctattttagtgaatg

SEQ ID NO: 52458 - DNA, 20 bp, Artificial sequence
  SiRNA target sequence
aagcctattttagtgaatgc

SEQ ID NO: 52459 - DNA, 20 bp, Artificial sequence
  SiRNA target sequence
agcctattttagtgaatgct

SEQ ID NO: 52460 - DNA, 20 bp, Artificial sequence
  SiRNA target sequence
gcctattttagtgaatgcta

SEQ ID NO: 52461 - DNA, 20 bp, Artificial sequence
  SiRNA target sequence
cctattttagtgaatgctaa

SEQ ID NO: 52462 - DNA, 20 bp, Artificial sequence
  SiRNA target sequence
ctattttagtgaatgctaat

SEQ ID NO: 52463 - DNA, 20 bp, Artificial sequence
  SiRNA target sequence
tattttagtgaatgctaatt

SEQ ID NO: 52464 - DNA, 20 bp, Artificial sequence
  SiRNA target sequence
attttagtgaatgctaattt

SEQ ID NO: 52465 - DNA, 20 bp, Artificial sequence
  SiRNA target sequence
ttttagtgaatgctaatttc

SEQ ID NO: 52466 - DNA, 20 bp, Artificial sequence
  SiRNA target sequence
tttagtgaatgctaatttcg

SEQ ID NO: 52467 - DNA, 20 bp, Artificial sequence
  SiRNA target sequence
ttagtgaatgctaatttcgt

SEQ ID NO: 52468 - DNA, 20 bp, Artificial sequence
  SiRNA target sequence
tagtgaatgctaatttcgtt

SEQ ID NO: 52469 - DNA, 20 bp, Artificial sequence
  SiRNA target sequence
agtgaatgctaatttcgtta

SEQ ID NO: 52470 - DNA, 20 bp, Artificial sequence
  SiRNA target sequence
gtgaatgctaatttcgttat

SEQ ID NO: 52471 - DNA, 20 bp, Artificial sequence
  SiRNA target sequence
tgaatgctaatttcgttatt

SEQ ID NO: 52472 - DNA, 20 bp, Artificial sequence
  SiRNA target sequence
gaatgctaatttcgttatta

SEQ ID NO: 52473 - DNA, 20 bp, Artificial sequence
  SiRNA target sequence
aatgctaatttcgttattaa

SEQ ID NO: 52474 - DNA, 20 bp, Artificial sequence
  SiRNA target sequence
atgctaatttcgttattaat

SEQ ID NO: 52475 - DNA, 20 bp, Artificial sequence
  SiRNA target sequence
tgctaatttcgttattaata

SEQ ID NO: 52476 - DNA, 20 bp, Artificial sequence
  SiRNA target sequence
gctaatttcgttattaataa

SEQ ID NO: 52477 - DNA, 20 bp, Artificial sequence
  SiRNA target sequence
ctaatttcgttattaataaa

SEQ ID NO: 52478 - DNA, 20 bp, Artificial sequence
  SiRNA target sequence
taatttcgttattaataaag

SEQ ID NO: 52479 - DNA, 20 bp, Artificial sequence
  SiRNA target sequence
aatttcgttattaataaagg

SEQ ID NO: 52480 - DNA, 20 bp, Artificial sequence
  SiRNA target sequence
atttcgttattaataaaggg

SEQ ID NO: 52481 - DNA, 20 bp, Artificial sequence
  SiRNA target sequence
tttcgttattaataaagggg

SEQ ID NO: 52482 - DNA, 20 bp, Artificial sequence
  SiRNA target sequence
ttcgttattaataaagggga

SEQ ID NO: 52483 - DNA, 20 bp, Artificial sequence
  SiRNA target sequence
tcgttattaataaaggggag

SEQ ID NO: 52484 - DNA, 20 bp, Artificial sequence
  SiRNA target sequence
cgttattaataaaggggagc

SEQ ID NO: 52485 - DNA, 20 bp, Artificial sequence
  SiRNA target sequence
gttattaataaaggggagcg

SEQ ID NO: 52486 - DNA, 20 bp, Artificial sequence
  SiRNA target sequence
ttattaataaaggggagcgt

SEQ ID NO: 52487 - DNA, 20 bp, Artificial sequence
  SiRNA target sequence
tattaataaaggggagcgtg

SEQ ID NO: 52488 - DNA, 20 bp, Artificial sequence
  SiRNA target sequence
attaataaaggggagcgtgt

SEQ ID NO: 52489 - DNA, 20 bp, Artificial sequence
  SiRNA target sequence
ttaataaaggggagcgtgtt

SEQ ID NO: 52490 - DNA, 20 bp, Artificial sequence
  SiRNA target sequence
taataaaggggagcgtgttg

SEQ ID NO: 52491 - DNA, 20 bp, Artificial sequence
  SiRNA target sequence
aataaaggggagcgtgttgc

SEQ ID NO: 52492 - DNA, 20 bp, Artificial sequence
  SiRNA target sequence
ataaaggggagcgtgttgct

SEQ ID NO: 52493 - DNA, 20 bp, Artificial sequence
  SiRNA target sequence
taaaggggagcgtgttgcta

SEQ ID NO: 52494 - DNA, 20 bp, Artificial sequence
  SiRNA target sequence
aaaggggagcgtgttgctat

SEQ ID NO: 52495 - DNA, 20 bp, Artificial sequence
  SiRNA target sequence
aaggggagcgtgttgctatt

SEQ ID NO: 52496 - DNA, 20 bp, Artificial sequence
  SiRNA target sequence
aggggagcgtgttgctatta

SEQ ID NO: 52497 - DNA, 20 bp, Artificial sequence
  SiRNA target sequence
ggggagcgtgttgctattat

SEQ ID NO: 52498 - DNA, 20 bp, Artificial sequence
  SiRNA target sequence
gggagcgtgttgctattata

SEQ ID NO: 52499 - DNA, 20 bp, Artificial sequence
  SiRNA target sequence
ggagcgtgttgctattatag

SEQ ID NO: 52500 - DNA, 20 bp, Artificial sequence
  SiRNA target sequence
gagcgtgttgctattatagg

SEQ ID NO: 52501 - DNA, 20 bp, Artificial sequence
  SiRNA target sequence
agcgtgttgctattatagga

SEQ ID NO: 52502 - DNA, 20 bp, Artificial sequence
  SiRNA target sequence
gcgtgttgctattataggaa

SEQ ID NO: 52503 - DNA, 20 bp, Artificial sequence
  SiRNA target sequence
cgtgttgctattataggaaa

SEQ ID NO: 52504 - DNA, 20 bp, Artificial sequence
  SiRNA target sequence
gtgttgctattataggaaaa

SEQ ID NO: 52505 - DNA, 20 bp, Artificial sequence
  SiRNA target sequence
tgttgctattataggaaaaa

SEQ ID NO: 52506 - DNA, 20 bp, Artificial sequence
  SiRNA target sequence
gttgctattataggaaaaaa

SEQ ID NO: 52507 - DNA, 20 bp, Artificial sequence
  SiRNA target sequence
ttgctattataggaaaaaat

SEQ ID NO: 52508 - DNA, 20 bp, Artificial sequence
  SiRNA target sequence
tgctattataggaaaaaatg

SEQ ID NO: 52509 - DNA, 20 bp, Artificial sequence
  SiRNA target sequence
gctattataggaaaaaatgg

SEQ ID NO: 52510 - DNA, 20 bp, Artificial sequence
  SiRNA target sequence
ctattataggaaaaaatgga

SEQ ID NO: 52511 - DNA, 20 bp, Artificial sequence
  SiRNA target sequence
tattataggaaaaaatggaa

SEQ ID NO: 52512 - DNA, 20 bp, Artificial sequence
  SiRNA target sequence
attataggaaaaaatggaac

SEQ ID NO: 52513 - DNA, 20 bp, Artificial sequence
  SiRNA target sequence
ttataggaaaaaatggaaca

SEQ ID NO: 52514 - DNA, 20 bp, Artificial sequence
  SiRNA target sequence
tataggaaaaaatggaacag

SEQ ID NO: 52515 - DNA, 20 bp, Artificial sequence
  SiRNA target sequence
ataggaaaaaatggaacagg

SEQ ID NO: 52516 - DNA, 20 bp, Artificial sequence
  SiRNA target sequence
taggaaaaaatggaacaggt

SEQ ID NO: 52517 - DNA, 20 bp, Artificial sequence
  SiRNA target sequence
aggaaaaaatggaacaggta

SEQ ID NO: 52518 - DNA, 20 bp, Artificial sequence
  SiRNA target sequence
ggaaaaaatggaacaggtaa

SEQ ID NO: 52519 - DNA, 20 bp, Artificial sequence
  SiRNA target sequence
gaaaaaatggaacaggtaaa

SEQ ID NO: 52520 - DNA, 20 bp, Artificial sequence
  SiRNA target sequence
aaaaaatggaacaggtaaaa

SEQ ID NO: 52521 - DNA, 20 bp, Artificial sequence
  SiRNA target sequence
aaaaatggaacaggtaaaag

SEQ ID NO: 52522 - DNA, 20 bp, Artificial sequence
  SiRNA target sequence
aaaatggaacaggtaaaagt

SEQ ID NO: 52523 - DNA, 20 bp, Artificial sequence
  SiRNA target sequence
aaatggaacaggtaaaagta

SEQ ID NO: 52524 - DNA, 20 bp, Artificial sequence
  SiRNA target sequence
aatggaacaggtaaaagtac

SEQ ID NO: 52525 - DNA, 20 bp, Artificial sequence
  SiRNA target sequence
atggaacaggtaaaagtaca

SEQ ID NO: 52526 - DNA, 20 bp, Artificial sequence
  SiRNA target sequence
tggaacaggtaaaagtacaa

SEQ ID NO: 52527 - DNA, 20 bp, Artificial sequence
  SiRNA target sequence
ggaacaggtaaaagtacaat

SEQ ID NO: 52528 - DNA, 20 bp, Artificial sequence
  SiRNA target sequence
gaacaggtaaaagtacaata

SEQ ID NO: 52529 - DNA, 20 bp, Artificial sequence
  SiRNA target sequence
aacaggtaaaagtacaataa

SEQ ID NO: 52530 - DNA, 20 bp, Artificial sequence
  SiRNA target sequence
acaggtaaaagtacaataat

SEQ ID NO: 52531 - DNA, 20 bp, Artificial sequence
  SiRNA target sequence
caggtaaaagtacaataata

SEQ ID NO: 52532 - DNA, 20 bp, Artificial sequence
  SiRNA target sequence
aggtaaaagtacaataataa

SEQ ID NO: 52533 - DNA, 20 bp, Artificial sequence
  SiRNA target sequence
ggtaaaagtacaataataaa

SEQ ID NO: 52534 - DNA, 20 bp, Artificial sequence
  SiRNA target sequence
gtaaaagtacaataataaaa

SEQ ID NO: 52535 - DNA, 20 bp, Artificial sequence
  SiRNA target sequence
taaaagtacaataataaaat

SEQ ID NO: 52536 - DNA, 20 bp, Artificial sequence
  SiRNA target sequence
aaaagtacaataataaaatt

SEQ ID NO: 52537 - DNA, 20 bp, Artificial sequence
  SiRNA target sequence
aaagtacaataataaaattg

SEQ ID NO: 52538 - DNA, 20 bp, Artificial sequence
  SiRNA target sequence
aagtacaataataaaattgt

SEQ ID NO: 52539 - DNA, 20 bp, Artificial sequence
  SiRNA target sequence
agtacaataataaaattgtt

SEQ ID NO: 52540 - DNA, 20 bp, Artificial sequence
  SiRNA target sequence
gtacaataataaaattgtta

SEQ ID NO: 52541 - DNA, 20 bp, Artificial sequence
  SiRNA target sequence
tacaataataaaattgttaa

SEQ ID NO: 52542 - DNA, 20 bp, Artificial sequence
  SiRNA target sequence
acaataataaaattgttaat

SEQ ID NO: 52543 - DNA, 20 bp, Artificial sequence
  SiRNA target sequence
caataataaaattgttaatg

SEQ ID NO: 52544 - DNA, 20 bp, Artificial sequence
  SiRNA target sequence
aataataaaattgttaatga

SEQ ID NO: 52545 - DNA, 20 bp, Artificial sequence
  SiRNA target sequence
ataataaaattgttaatgaa

SEQ ID NO: 52546 - DNA, 20 bp, Artificial sequence
  SiRNA target sequence
taataaaattgttaatgaaa

SEQ ID NO: 52547 - DNA, 20 bp, Artificial sequence
  SiRNA target sequence
aataaaattgttaatgaaat

SEQ ID NO: 52548 - DNA, 20 bp, Artificial sequence
  SiRNA target sequence
ataaaattgttaatgaaatt

SEQ ID NO: 52549 - DNA, 20 bp, Artificial sequence
  SiRNA target sequence
taaaattgttaatgaaattt

SEQ ID NO: 52550 - DNA, 20 bp, Artificial sequence
  SiRNA target sequence
aaaattgttaatgaaatttt

SEQ ID NO: 52551 - DNA, 20 bp, Artificial sequence
  SiRNA target sequence
aaattgttaatgaaatttta

SEQ ID NO: 52552 - DNA, 20 bp, Artificial sequence
  SiRNA target sequence
aattgttaatgaaattttat

SEQ ID NO: 52553 - DNA, 20 bp, Artificial sequence
  SiRNA target sequence
attgttaatgaaattttata

SEQ ID NO: 52554 - DNA, 20 bp, Artificial sequence
  SiRNA target sequence
ttgttaatgaaattttataa

SEQ ID NO: 52555 - DNA, 20 bp, Artificial sequence
  SiRNA target sequence
tgttaatgaaattttataaa

SEQ ID NO: 52556 - DNA, 20 bp, Artificial sequence
  SiRNA target sequence
gttaatgaaattttataaat

SEQ ID NO: 52557 - DNA, 20 bp, Artificial sequence
  SiRNA target sequence
ttaatgaaattttataaata

SEQ ID NO: 52558 - DNA, 20 bp, Artificial sequence
  SiRNA target sequence
taatgaaattttataaatat

SEQ ID NO: 52559 - DNA, 20 bp, Artificial sequence
  SiRNA target sequence
aatgaaattttataaatatg

SEQ ID NO: 52560 - DNA, 20 bp, Artificial sequence
  SiRNA target sequence
atgaaattttataaatatga

SEQ ID NO: 52561 - DNA, 20 bp, Artificial sequence
  SiRNA target sequence
tgaaattttataaatatgat

SEQ ID NO: 52562 - DNA, 20 bp, Artificial sequence
  SiRNA target sequence
gaaattttataaatatgatg

SEQ ID NO: 52563 - DNA, 20 bp, Artificial sequence
  SiRNA target sequence
aaattttataaatatgatgg

SEQ ID NO: 52564 - DNA, 20 bp, Artificial sequence
  SiRNA target sequence
aattttataaatatgatgga

SEQ ID NO: 52565 - DNA, 20 bp, Artificial sequence
  SiRNA target sequence
attttataaatatgatggag

SEQ ID NO: 52566 - DNA, 20 bp, Artificial sequence
  SiRNA target sequence
ttttataaatatgatggaga

SEQ ID NO: 52567 - DNA, 20 bp, Artificial sequence
  SiRNA target sequence
tttataaatatgatggagat

SEQ ID NO: 52568 - DNA, 20 bp, Artificial sequence
  SiRNA target sequence
ttataaatatgatggagata

SEQ ID NO: 52569 - DNA, 20 bp, Artificial sequence
  SiRNA target sequence
tataaatatgatggagatat

SEQ ID NO: 52570 - DNA, 20 bp, Artificial sequence
  SiRNA target sequence
ataaatatgatggagatata

SEQ ID NO: 52571 - DNA, 20 bp, Artificial sequence
  SiRNA target sequence
taaatatgatggagatatat

SEQ ID NO: 52572 - DNA, 20 bp, Artificial sequence
  SiRNA target sequence
aaatatgatggagatatatt

SEQ ID NO: 52573 - DNA, 20 bp, Artificial sequence
  SiRNA target sequence
aatatgatggagatatatta

SEQ ID NO: 52574 - DNA, 20 bp, Artificial sequence
  SiRNA target sequence
atatgatggagatatattaa

SEQ ID NO: 52575 - DNA, 20 bp, Artificial sequence
  SiRNA target sequence
tatgatggagatatattaat

SEQ ID NO: 52576 - DNA, 20 bp, Artificial sequence
  SiRNA target sequence
atgatggagatatattaatt

SEQ ID NO: 52577 - DNA, 20 bp, Artificial sequence
  SiRNA target sequence
tgatggagatatattaattg

SEQ ID NO: 52578 - DNA, 20 bp, Artificial sequence
  SiRNA target sequence
gatggagatatattaattga

SEQ ID NO: 52579 - DNA, 20 bp, Artificial sequence
  SiRNA target sequence
atggagatatattaattgat

SEQ ID NO: 52580 - DNA, 20 bp, Artificial sequence
  SiRNA target sequence
tggagatatattaattgatg

SEQ ID NO: 52581 - DNA, 20 bp, Artificial sequence
  SiRNA target sequence
ggagatatattaattgatga

SEQ ID NO: 52582 - DNA, 20 bp, Artificial sequence
  SiRNA target sequence
gagatatattaattgatgat

SEQ ID NO: 52583 - DNA, 20 bp, Artificial sequence
  SiRNA target sequence
agatatattaattgatgata

SEQ ID NO: 52584 - DNA, 20 bp, Artificial sequence
  SiRNA target sequence
gatatattaattgatgatac

SEQ ID NO: 52585 - DNA, 20 bp, Artificial sequence
  SiRNA target sequence
atatattaattgatgataca

SEQ ID NO: 52586 - DNA, 20 bp, Artificial sequence
  SiRNA target sequence
tatattaattgatgatacag

SEQ ID NO: 52587 - DNA, 20 bp, Artificial sequence
  SiRNA target sequence
atattaattgatgatacaga

SEQ ID NO: 52588 - DNA, 20 bp, Artificial sequence
  SiRNA target sequence
tattaattgatgatacagaa

SEQ ID NO: 52589 - DNA, 20 bp, Artificial sequence
  SiRNA target sequence
attaattgatgatacagaaa

SEQ ID NO: 52590 - DNA, 20 bp, Artificial sequence
  SiRNA target sequence
ttaattgatgatacagaaat

SEQ ID NO: 52591 - DNA, 20 bp, Artificial sequence
  SiRNA target sequence
taattgatgatacagaaata

SEQ ID NO: 52592 - DNA, 20 bp, Artificial sequence
  SiRNA target sequence
aattgatgatacagaaatag

SEQ ID NO: 52593 - DNA, 20 bp, Artificial sequence
  SiRNA target sequence
attgatgatacagaaataga

SEQ ID NO: 52594 - DNA, 20 bp, Artificial sequence
  SiRNA target sequence
ttgatgatacagaaatagat

SEQ ID NO: 52595 - DNA, 20 bp, Artificial sequence
  SiRNA target sequence
tgatgatacagaaatagata

SEQ ID NO: 52596 - DNA, 20 bp, Artificial sequence
  SiRNA target sequence
gatgatacagaaatagataa

SEQ ID NO: 52597 - DNA, 20 bp, Artificial sequence
  SiRNA target sequence
atgatacagaaatagataat

SEQ ID NO: 52598 - DNA, 20 bp, Artificial sequence
  SiRNA target sequence
tgatacagaaatagataata

SEQ ID NO: 52599 - DNA, 20 bp, Artificial sequence
  SiRNA target sequence
gatacagaaatagataatat

SEQ ID NO: 52600 - DNA, 20 bp, Artificial sequence
  SiRNA target sequence
atacagaaatagataatatt

SEQ ID NO: 52601 - DNA, 20 bp, Artificial sequence
  SiRNA target sequence
tacagaaatagataatattt

SEQ ID NO: 52602 - DNA, 20 bp, Artificial sequence
  SiRNA target sequence
acagaaatagataatatttc

SEQ ID NO: 52603 - DNA, 20 bp, Artificial sequence
  SiRNA target sequence
cagaaatagataatatttcg

SEQ ID NO: 52604 - DNA, 20 bp, Artificial sequence
  SiRNA target sequence
agaaatagataatatttcgg

SEQ ID NO: 52605 - DNA, 20 bp, Artificial sequence
  SiRNA target sequence
gaaatagataatatttcgga

SEQ ID NO: 52606 - DNA, 20 bp, Artificial sequence
  SiRNA target sequence
aaatagataatatttcggat

SEQ ID NO: 52607 - DNA, 20 bp, Artificial sequence
  SiRNA target sequence
aatagataatatttcggata

SEQ ID NO: 52608 - DNA, 20 bp, Artificial sequence
  SiRNA target sequence
atagataatatttcggatag

SEQ ID NO: 52609 - DNA, 20 bp, Artificial sequence
  SiRNA target sequence
tagataatatttcggataga

SEQ ID NO: 52610 - DNA, 20 bp, Artificial sequence
  SiRNA target sequence
agataatatttcggatagaa

SEQ ID NO: 52611 - DNA, 20 bp, Artificial sequence
  SiRNA target sequence
gataatatttcggatagaag

SEQ ID NO: 52612 - DNA, 20 bp, Artificial sequence
  SiRNA target sequence
ataatatttcggatagaagt

SEQ ID NO: 52613 - DNA, 20 bp, Artificial sequence
  SiRNA target sequence
taatatttcggatagaagtt

SEQ ID NO: 52614 - DNA, 20 bp, Artificial sequence
  SiRNA target sequence
aatatttcggatagaagtta

SEQ ID NO: 52615 - DNA, 20 bp, Artificial sequence
  SiRNA target sequence
atatttcggatagaagttac

SEQ ID NO: 52616 - DNA, 20 bp, Artificial sequence
  SiRNA target sequence
tatttcggatagaagttaca

SEQ ID NO: 52617 - DNA, 20 bp, Artificial sequence
  SiRNA target sequence
atttcggatagaagttacag

SEQ ID NO: 52618 - DNA, 20 bp, Artificial sequence
  SiRNA target sequence
tttcggatagaagttacaga

SEQ ID NO: 52619 - DNA, 20 bp, Artificial sequence
  SiRNA target sequence
ttcggatagaagttacagaa

SEQ ID NO: 52620 - DNA, 20 bp, Artificial sequence
  SiRNA target sequence
tcggatagaagttacagaag

SEQ ID NO: 52621 - DNA, 20 bp, Artificial sequence
  SiRNA target sequence
cggatagaagttacagaagt

SEQ ID NO: 52622 - DNA, 20 bp, Artificial sequence
  SiRNA target sequence
ggatagaagttacagaagtt

SEQ ID NO: 52623 - DNA, 20 bp, Artificial sequence
  SiRNA target sequence
gatagaagttacagaagttt

SEQ ID NO: 52624 - DNA, 20 bp, Artificial sequence
  SiRNA target sequence
atagaagttacagaagttta

SEQ ID NO: 52625 - DNA, 20 bp, Artificial sequence
  SiRNA target sequence
tagaagttacagaagtttaa

SEQ ID NO: 52626 - DNA, 20 bp, Artificial sequence
  SiRNA target sequence
agaagttacagaagtttaat

SEQ ID NO: 52627 - DNA, 20 bp, Artificial sequence
  SiRNA target sequence
gaagttacagaagtttaata

SEQ ID NO: 52628 - DNA, 20 bp, Artificial sequence
  SiRNA target sequence
aagttacagaagtttaatat

SEQ ID NO: 52629 - DNA, 20 bp, Artificial sequence
  SiRNA target sequence
agttacagaagtttaatatc

SEQ ID NO: 52630 - DNA, 20 bp, Artificial sequence
  SiRNA target sequence
gttacagaagtttaatatca

SEQ ID NO: 52631 - DNA, 20 bp, Artificial sequence
  SiRNA target sequence
ttacagaagtttaatatcat

SEQ ID NO: 52632 - DNA, 20 bp, Artificial sequence
  SiRNA target sequence
tacagaagtttaatatcata

SEQ ID NO: 52633 - DNA, 20 bp, Artificial sequence
  SiRNA target sequence
acagaagtttaatatcatat

SEQ ID NO: 52634 - DNA, 20 bp, Artificial sequence
  SiRNA target sequence
cagaagtttaatatcatatg

SEQ ID NO: 52635 - DNA, 20 bp, Artificial sequence
  SiRNA target sequence
agaagtttaatatcatatgc

SEQ ID NO: 52636 - DNA, 20 bp, Artificial sequence
  SiRNA target sequence
gaagtttaatatcatatgca

SEQ ID NO: 52637 - DNA, 20 bp, Artificial sequence
  SiRNA target sequence
aagtttaatatcatatgcaa

SEQ ID NO: 52638 - DNA, 20 bp, Artificial sequence
  SiRNA target sequence
agtttaatatcatatgcaac

SEQ ID NO: 52639 - DNA, 20 bp, Artificial sequence
  SiRNA target sequence
gtttaatatcatatgcaaca

SEQ ID NO: 52640 - DNA, 20 bp, Artificial sequence
  SiRNA target sequence
tttaatatcatatgcaacac

SEQ ID NO: 52641 - DNA, 20 bp, Artificial sequence
  SiRNA target sequence
ttaatatcatatgcaacaca

SEQ ID NO: 52642 - DNA, 20 bp, Artificial sequence
  SiRNA target sequence
taatatcatatgcaacacaa

SEQ ID NO: 52643 - DNA, 20 bp, Artificial sequence
  SiRNA target sequence
aatatcatatgcaacacaaa

SEQ ID NO: 52644 - DNA, 20 bp, Artificial sequence
  SiRNA target sequence
atatcatatgcaacacaaaa

SEQ ID NO: 52645 - DNA, 20 bp, Artificial sequence
  SiRNA target sequence
tatcatatgcaacacaaaac

SEQ ID NO: 52646 - DNA, 20 bp, Artificial sequence
  SiRNA target sequence
atcatatgcaacacaaaaca

SEQ ID NO: 52647 - DNA, 20 bp, Artificial sequence
  SiRNA target sequence
tcatatgcaacacaaaacac

SEQ ID NO: 52648 - DNA, 20 bp, Artificial sequence
  SiRNA target sequence
catatgcaacacaaaacacg

SEQ ID NO: 52649 - DNA, 20 bp, Artificial sequence
  SiRNA target sequence
atatgcaacacaaaacacgt

SEQ ID NO: 52650 - DNA, 20 bp, Artificial sequence
  SiRNA target sequence
tatgcaacacaaaacacgtt

SEQ ID NO: 52651 - DNA, 20 bp, Artificial sequence
  SiRNA target sequence
atgcaacacaaaacacgttc

SEQ ID NO: 52652 - DNA, 20 bp, Artificial sequence
  SiRNA target sequence
tgcaacacaaaacacgttct

SEQ ID NO: 52653 - DNA, 20 bp, Artificial sequence
  SiRNA target sequence
gcaacacaaaacacgttctt

SEQ ID NO: 52654 - DNA, 20 bp, Artificial sequence
  SiRNA target sequence
caacacaaaacacgttctta

SEQ ID NO: 52655 - DNA, 20 bp, Artificial sequence
  SiRNA target sequence
aacacaaaacacgttcttat

SEQ ID NO: 52656 - DNA, 20 bp, Artificial sequence
  SiRNA target sequence
acacaaaacacgttcttatt

SEQ ID NO: 52657 - DNA, 20 bp, Artificial sequence
  SiRNA target sequence
cacaaaacacgttcttattc

SEQ ID NO: 52658 - DNA, 20 bp, Artificial sequence
  SiRNA target sequence
acaaaacacgttcttattcg

SEQ ID NO: 52659 - DNA, 20 bp, Artificial sequence
  SiRNA target sequence
caaaacacgttcttattcga

SEQ ID NO: 52660 - DNA, 20 bp, Artificial sequence
  SiRNA target sequence
aaaacacgttcttattcgat

SEQ ID NO: 52661 - DNA, 20 bp, Artificial sequence
  SiRNA target sequence
aaacacgttcttattcgata

SEQ ID NO: 52662 - DNA, 20 bp, Artificial sequence
  SiRNA target sequence
aacacgttcttattcgataa

SEQ ID NO: 52663 - DNA, 20 bp, Artificial sequence
  SiRNA target sequence
acacgttcttattcgataat

SEQ ID NO: 52664 - DNA, 20 bp, Artificial sequence
  SiRNA target sequence
cacgttcttattcgataata

SEQ ID NO: 52665 - DNA, 20 bp, Artificial sequence
  SiRNA target sequence
acgttcttattcgataatac

SEQ ID NO: 52666 - DNA, 20 bp, Artificial sequence
  SiRNA target sequence
cgttcttattcgataatact

SEQ ID NO: 52667 - DNA, 20 bp, Artificial sequence
  SiRNA target sequence
gttcttattcgataatactg

SEQ ID NO: 52668 - DNA, 20 bp, Artificial sequence
  SiRNA target sequence
ttcttattcgataatactgt

SEQ ID NO: 52669 - DNA, 20 bp, Artificial sequence
  SiRNA target sequence
tcttattcgataatactgtg

SEQ ID NO: 52670 - DNA, 20 bp, Artificial sequence
  SiRNA target sequence
cttattcgataatactgtga

SEQ ID NO: 52671 - DNA, 20 bp, Artificial sequence
  SiRNA target sequence
ttattcgataatactgtgac

SEQ ID NO: 52672 - DNA, 20 bp, Artificial sequence
  SiRNA target sequence
tattcgataatactgtgaca

SEQ ID NO: 52673 - DNA, 20 bp, Artificial sequence
  SiRNA target sequence
attcgataatactgtgacat

SEQ ID NO: 52674 - DNA, 20 bp, Artificial sequence
  SiRNA target sequence
ttcgataatactgtgacata

SEQ ID NO: 52675 - DNA, 20 bp, Artificial sequence
  SiRNA target sequence
tcgataatactgtgacatac

SEQ ID NO: 52676 - DNA, 20 bp, Artificial sequence
  SiRNA target sequence
cgataatactgtgacataca

SEQ ID NO: 52677 - DNA, 20 bp, Artificial sequence
  SiRNA target sequence
gataatactgtgacatacaa

SEQ ID NO: 52678 - DNA, 20 bp, Artificial sequence
  SiRNA target sequence
ataatactgtgacatacaat

SEQ ID NO: 52679 - DNA, 20 bp, Artificial sequence
  SiRNA target sequence
taatactgtgacatacaata

SEQ ID NO: 52680 - DNA, 20 bp, Artificial sequence
  SiRNA target sequence
aatactgtgacatacaatat

SEQ ID NO: 52681 - DNA, 20 bp, Artificial sequence
  SiRNA target sequence
atactgtgacatacaatata

SEQ ID NO: 52682 - DNA, 20 bp, Artificial sequence
  SiRNA target sequence
tactgtgacatacaatatat

SEQ ID NO: 52683 - DNA, 20 bp, Artificial sequence
  SiRNA target sequence
actgtgacatacaatatatt

SEQ ID NO: 52684 - DNA, 20 bp, Artificial sequence
  SiRNA target sequence
ctgtgacatacaatatattt

SEQ ID NO: 52685 - DNA, 20 bp, Artificial sequence
  SiRNA target sequence
tgtgacatacaatatatttt

SEQ ID NO: 52686 - DNA, 20 bp, Artificial sequence
  SiRNA target sequence
gtgacatacaatatatttta

SEQ ID NO: 52687 - DNA, 20 bp, Artificial sequence
  SiRNA target sequence
tgacatacaatatattttac

SEQ ID NO: 52688 - DNA, 20 bp, Artificial sequence
  SiRNA target sequence
gacatacaatatattttacg

SEQ ID NO: 52689 - DNA, 20 bp, Artificial sequence
  SiRNA target sequence
acatacaatatattttacgg

SEQ ID NO: 52690 - DNA, 20 bp, Artificial sequence
  SiRNA target sequence
catacaatatattttacggg

SEQ ID NO: 52691 - DNA, 20 bp, Artificial sequence
  SiRNA target sequence
atacaatatattttacggga

SEQ ID NO: 52692 - DNA, 20 bp, Artificial sequence
  SiRNA target sequence
tacaatatattttacgggac

SEQ ID NO: 52693 - DNA, 20 bp, Artificial sequence
  SiRNA target sequence
acaatatattttacgggact

SEQ ID NO: 52694 - DNA, 20 bp, Artificial sequence
  SiRNA target sequence
caatatattttacgggacta

SEQ ID NO: 52695 - DNA, 20 bp, Artificial sequence
  SiRNA target sequence
aatatattttacgggactaa

SEQ ID NO: 52696 - DNA, 20 bp, Artificial sequence
  SiRNA target sequence
atatattttacgggactaaa

SEQ ID NO: 52697 - DNA, 20 bp, Artificial sequence
  SiRNA target sequence
tatattttacgggactaaaa

SEQ ID NO: 52698 - DNA, 20 bp, Artificial sequence
  SiRNA target sequence
atattttacgggactaaaaa

SEQ ID NO: 52699 - DNA, 20 bp, Artificial sequence
  SiRNA target sequence
tattttacgggactaaaaac

SEQ ID NO: 52700 - DNA, 20 bp, Artificial sequence
  SiRNA target sequence
attttacgggactaaaaacg

SEQ ID NO: 52701 - DNA, 20 bp, Artificial sequence
  SiRNA target sequence
ttttacgggactaaaaacgt

SEQ ID NO: 52702 - DNA, 20 bp, Artificial sequence
  SiRNA target sequence
tttacgggactaaaaacgta

SEQ ID NO: 52703 - DNA, 20 bp, Artificial sequence
  SiRNA target sequence
ttacgggactaaaaacgtaa

SEQ ID NO: 52704 - DNA, 20 bp, Artificial sequence
  SiRNA target sequence
tacgggactaaaaacgtaac

SEQ ID NO: 52705 - DNA, 20 bp, Artificial sequence
  SiRNA target sequence
acgggactaaaaacgtaaca

SEQ ID NO: 52706 - DNA, 20 bp, Artificial sequence
  SiRNA target sequence
cgggactaaaaacgtaacag

SEQ ID NO: 52707 - DNA, 20 bp, Artificial sequence
  SiRNA target sequence
gggactaaaaacgtaacaga

SEQ ID NO: 52708 - DNA, 20 bp, Artificial sequence
  SiRNA target sequence
ggactaaaaacgtaacagaa

SEQ ID NO: 52709 - DNA, 20 bp, Artificial sequence
  SiRNA target sequence
gactaaaaacgtaacagaaa

SEQ ID NO: 52710 - DNA, 20 bp, Artificial sequence
  SiRNA target sequence
actaaaaacgtaacagaaaa

SEQ ID NO: 52711 - DNA, 20 bp, Artificial sequence
  SiRNA target sequence
ctaaaaacgtaacagaaaaa

SEQ ID NO: 52712 - DNA, 20 bp, Artificial sequence
  SiRNA target sequence
taaaaacgtaacagaaaaag

SEQ ID NO: 52713 - DNA, 20 bp, Artificial sequence
  SiRNA target sequence
aaaaacgtaacagaaaaaga

SEQ ID NO: 52714 - DNA, 20 bp, Artificial sequence
  SiRNA target sequence
aaaacgtaacagaaaaagaa

SEQ ID NO: 52715 - DNA, 20 bp, Artificial sequence
  SiRNA target sequence
aaacgtaacagaaaaagaag

SEQ ID NO: 52716 - DNA, 20 bp, Artificial sequence
  SiRNA target sequence
aacgtaacagaaaaagaagt

SEQ ID NO: 52717 - DNA, 20 bp, Artificial sequence
  SiRNA target sequence
acgtaacagaaaaagaagtt

SEQ ID NO: 52718 - DNA, 20 bp, Artificial sequence
  SiRNA target sequence
cgtaacagaaaaagaagttt

SEQ ID NO: 52719 - DNA, 20 bp, Artificial sequence
  SiRNA target sequence
gtaacagaaaaagaagtttt

SEQ ID NO: 52720 - DNA, 20 bp, Artificial sequence
  SiRNA target sequence
taacagaaaaagaagtttta

SEQ ID NO: 52721 - DNA, 20 bp, Artificial sequence
  SiRNA target sequence
aacagaaaaagaagttttag

SEQ ID NO: 52722 - DNA, 20 bp, Artificial sequence
  SiRNA target sequence
acagaaaaagaagttttaga

SEQ ID NO: 52723 - DNA, 20 bp, Artificial sequence
  SiRNA target sequence
cagaaaaagaagttttagaa

SEQ ID NO: 52724 - DNA, 20 bp, Artificial sequence
  SiRNA target sequence
agaaaaagaagttttagaat

SEQ ID NO: 52725 - DNA, 20 bp, Artificial sequence
  SiRNA target sequence
gaaaaagaagttttagaatt

SEQ ID NO: 52726 - DNA, 20 bp, Artificial sequence
  SiRNA target sequence
aaaaagaagttttagaatta

SEQ ID NO: 52727 - DNA, 20 bp, Artificial sequence
  SiRNA target sequence
aaaagaagttttagaattag

SEQ ID NO: 52728 - DNA, 20 bp, Artificial sequence
  SiRNA target sequence
aaagaagttttagaattagc

SEQ ID NO: 52729 - DNA, 20 bp, Artificial sequence
  SiRNA target sequence
aagaagttttagaattagcc

SEQ ID NO: 52730 - DNA, 20 bp, Artificial sequence
  SiRNA target sequence
agaagttttagaattagcca

SEQ ID NO: 52731 - DNA, 20 bp, Artificial sequence
  SiRNA target sequence
gaagttttagaattagccaa

SEQ ID NO: 52732 - DNA, 20 bp, Artificial sequence
  SiRNA target sequence
aagttttagaattagccaaa

SEQ ID NO: 52733 - DNA, 20 bp, Artificial sequence
  SiRNA target sequence
agttttagaattagccaaaa

SEQ ID NO: 52734 - DNA, 20 bp, Artificial sequence
  SiRNA target sequence
gttttagaattagccaaaaa

SEQ ID NO: 52735 - DNA, 20 bp, Artificial sequence
  SiRNA target sequence
ttttagaattagccaaaaaa

SEQ ID NO: 52736 - DNA, 20 bp, Artificial sequence
  SiRNA target sequence
tttagaattagccaaaaaaa

SEQ ID NO: 52737 - DNA, 20 bp, Artificial sequence
  SiRNA target sequence
ttagaattagccaaaaaaat

SEQ ID NO: 52738 - DNA, 20 bp, Artificial sequence
  SiRNA target sequence
tagaattagccaaaaaaata

SEQ ID NO: 52739 - DNA, 20 bp, Artificial sequence
  SiRNA target sequence
agaattagccaaaaaaatag

SEQ ID NO: 52740 - DNA, 20 bp, Artificial sequence
  SiRNA target sequence
gaattagccaaaaaaatagg

SEQ ID NO: 52741 - DNA, 20 bp, Artificial sequence
  SiRNA target sequence
aattagccaaaaaaataggt

SEQ ID NO: 52742 - DNA, 20 bp, Artificial sequence
  SiRNA target sequence
attagccaaaaaaataggtg

SEQ ID NO: 52743 - DNA, 20 bp, Artificial sequence
  SiRNA target sequence
ttagccaaaaaaataggtgt

SEQ ID NO: 52744 - DNA, 20 bp, Artificial sequence
  SiRNA target sequence
tagccaaaaaaataggtgta

SEQ ID NO: 52745 - DNA, 20 bp, Artificial sequence
  SiRNA target sequence
agccaaaaaaataggtgtat

SEQ ID NO: 52746 - DNA, 20 bp, Artificial sequence
  SiRNA target sequence
gccaaaaaaataggtgtatt

SEQ ID NO: 52747 - DNA, 20 bp, Artificial sequence
  SiRNA target sequence
ccaaaaaaataggtgtatta

SEQ ID NO: 52748 - DNA, 20 bp, Artificial sequence
  SiRNA target sequence
caaaaaaataggtgtattag

SEQ ID NO: 52749 - DNA, 20 bp, Artificial sequence
  SiRNA target sequence
aaaaaaataggtgtattaga

SEQ ID NO: 52750 - DNA, 20 bp, Artificial sequence
  SiRNA target sequence
aaaaaataggtgtattagag

SEQ ID NO: 52751 - DNA, 20 bp, Artificial sequence
  SiRNA target sequence
aaaaataggtgtattagagt

SEQ ID NO: 52752 - DNA, 20 bp, Artificial sequence
  SiRNA target sequence
aaaataggtgtattagagtc

SEQ ID NO: 52753 - DNA, 20 bp, Artificial sequence
  SiRNA target sequence
aaataggtgtattagagtct

SEQ ID NO: 52754 - DNA, 20 bp, Artificial sequence
  SiRNA target sequence
aataggtgtattagagtcta

SEQ ID NO: 52755 - DNA, 20 bp, Artificial sequence
  SiRNA target sequence
ataggtgtattagagtctat

SEQ ID NO: 52756 - DNA, 20 bp, Artificial sequence
  SiRNA target sequence
taggtgtattagagtctata

SEQ ID NO: 52757 - DNA, 20 bp, Artificial sequence
  SiRNA target sequence
aggtgtattagagtctatac

SEQ ID NO: 52758 - DNA, 20 bp, Artificial sequence
  SiRNA target sequence
ggtgtattagagtctataca

SEQ ID NO: 52759 - DNA, 20 bp, Artificial sequence
  SiRNA target sequence
gtgtattagagtctatacag

SEQ ID NO: 52760 - DNA, 20 bp, Artificial sequence
  SiRNA target sequence
tgtattagagtctatacagg

SEQ ID NO: 52761 - DNA, 20 bp, Artificial sequence
  SiRNA target sequence
gtattagagtctatacagga

SEQ ID NO: 52762 - DNA, 20 bp, Artificial sequence
  SiRNA target sequence
tattagagtctatacaggaa

SEQ ID NO: 52763 - DNA, 20 bp, Artificial sequence
  SiRNA target sequence
attagagtctatacaggaat

SEQ ID NO: 52764 - DNA, 20 bp, Artificial sequence
  SiRNA target sequence
ttagagtctatacaggaatt

SEQ ID NO: 52765 - DNA, 20 bp, Artificial sequence
  SiRNA target sequence
tagagtctatacaggaattt

SEQ ID NO: 52766 - DNA, 20 bp, Artificial sequence
  SiRNA target sequence
agagtctatacaggaattta

SEQ ID NO: 52767 - DNA, 20 bp, Artificial sequence
  SiRNA target sequence
gagtctatacaggaatttaa

SEQ ID NO: 52768 - DNA, 20 bp, Artificial sequence
  SiRNA target sequence
agtctatacaggaatttaaa

SEQ ID NO: 52769 - DNA, 20 bp, Artificial sequence
  SiRNA target sequence
gtctatacaggaatttaaag

SEQ ID NO: 52770 - DNA, 20 bp, Artificial sequence
  SiRNA target sequence
tctatacaggaatttaaaga

SEQ ID NO: 52771 - DNA, 20 bp, Artificial sequence
  SiRNA target sequence
ctatacaggaatttaaagat

SEQ ID NO: 52772 - DNA, 20 bp, Artificial sequence
  SiRNA target sequence
tatacaggaatttaaagatg

SEQ ID NO: 52773 - DNA, 20 bp, Artificial sequence
  SiRNA target sequence
atacaggaatttaaagatgg

SEQ ID NO: 52774 - DNA, 20 bp, Artificial sequence
  SiRNA target sequence
tacaggaatttaaagatggg

SEQ ID NO: 52775 - DNA, 20 bp, Artificial sequence
  SiRNA target sequence
acaggaatttaaagatgggt

SEQ ID NO: 52776 - DNA, 20 bp, Artificial sequence
  SiRNA target sequence
caggaatttaaagatgggtt

SEQ ID NO: 52777 - DNA, 20 bp, Artificial sequence
  SiRNA target sequence
aggaatttaaagatgggttt

SEQ ID NO: 52778 - DNA, 20 bp, Artificial sequence
  SiRNA target sequence
ggaatttaaagatgggttta

SEQ ID NO: 52779 - DNA, 20 bp, Artificial sequence
  SiRNA target sequence
gaatttaaagatgggtttag

SEQ ID NO: 52780 - DNA, 20 bp, Artificial sequence
  SiRNA target sequence
aatttaaagatgggtttagc

SEQ ID NO: 52781 - DNA, 20 bp, Artificial sequence
  SiRNA target sequence
atttaaagatgggtttagca

SEQ ID NO: 52782 - DNA, 20 bp, Artificial sequence
  SiRNA target sequence
tttaaagatgggtttagcac

SEQ ID NO: 52783 - DNA, 20 bp, Artificial sequence
  SiRNA target sequence
ttaaagatgggtttagcaca

SEQ ID NO: 52784 - DNA, 20 bp, Artificial sequence
  SiRNA target sequence
taaagatgggtttagcacat

SEQ ID NO: 52785 - DNA, 20 bp, Artificial sequence
  SiRNA target sequence
aaagatgggtttagcacatc

SEQ ID NO: 52786 - DNA, 20 bp, Artificial sequence
  SiRNA target sequence
aagatgggtttagcacatcg

SEQ ID NO: 52787 - DNA, 20 bp, Artificial sequence
  SiRNA target sequence
agatgggtttagcacatcgg

SEQ ID NO: 52788 - DNA, 20 bp, Artificial sequence
  SiRNA target sequence
gatgggtttagcacatcggt

SEQ ID NO: 52789 - DNA, 20 bp, Artificial sequence
  SiRNA target sequence
atgggtttagcacatcggtc

SEQ ID NO: 52790 - DNA, 20 bp, Artificial sequence
  SiRNA target sequence
tgggtttagcacatcggtcg

SEQ ID NO: 52791 - DNA, 20 bp, Artificial sequence
  SiRNA target sequence
gggtttagcacatcggtcgg

SEQ ID NO: 52792 - DNA, 20 bp, Artificial sequence
  SiRNA target sequence
ggtttagcacatcggtcggt

SEQ ID NO: 52793 - DNA, 20 bp, Artificial sequence
  SiRNA target sequence
gtttagcacatcggtcggtg

SEQ ID NO: 52794 - DNA, 20 bp, Artificial sequence
  SiRNA target sequence
tttagcacatcggtcggtga

SEQ ID NO: 52795 - DNA, 20 bp, Artificial sequence
  SiRNA target sequence
ttagcacatcggtcggtgaa

SEQ ID NO: 52796 - DNA, 20 bp, Artificial sequence
  SiRNA target sequence
tagcacatcggtcggtgaac

SEQ ID NO: 52797 - DNA, 20 bp, Artificial sequence
  SiRNA target sequence
agcacatcggtcggtgaacg

SEQ ID NO: 52798 - DNA, 20 bp, Artificial sequence
  SiRNA target sequence
gcacatcggtcggtgaacgc

SEQ ID NO: 52799 - DNA, 20 bp, Artificial sequence
  SiRNA target sequence
cacatcggtcggtgaacgcg

SEQ ID NO: 52800 - DNA, 20 bp, Artificial sequence
  SiRNA target sequence
acatcggtcggtgaacgcgg

SEQ ID NO: 52801 - DNA, 20 bp, Artificial sequence
  SiRNA target sequence
catcggtcggtgaacgcgga

SEQ ID NO: 52802 - DNA, 20 bp, Artificial sequence
  SiRNA target sequence
atcggtcggtgaacgcggaa

SEQ ID NO: 52803 - DNA, 20 bp, Artificial sequence
  SiRNA target sequence
tcggtcggtgaacgcggaag

SEQ ID NO: 52804 - DNA, 20 bp, Artificial sequence
  SiRNA target sequence
cggtcggtgaacgcggaaga

SEQ ID NO: 52805 - DNA, 20 bp, Artificial sequence
  SiRNA target sequence
ggtcggtgaacgcggaagat

SEQ ID NO: 52806 - DNA, 20 bp, Artificial sequence
  SiRNA target sequence
gtcggtgaacgcggaagatt

SEQ ID NO: 52807 - DNA, 20 bp, Artificial sequence
  SiRNA target sequence
tcggtgaacgcggaagattt

SEQ ID NO: 52808 - DNA, 20 bp, Artificial sequence
  SiRNA target sequence
cggtgaacgcggaagatttt

SEQ ID NO: 52809 - DNA, 20 bp, Artificial sequence
  SiRNA target sequence
ggtgaacgcggaagattttt

SEQ ID NO: 52810 - DNA, 20 bp, Artificial sequence
  SiRNA target sequence
gtgaacgcggaagattttta

SEQ ID NO: 52811 - DNA, 20 bp, Artificial sequence
  SiRNA target sequence
tgaacgcggaagatttttat

SEQ ID NO: 52812 - DNA, 20 bp, Artificial sequence
  SiRNA target sequence
gaacgcggaagatttttatc

SEQ ID NO: 52813 - DNA, 20 bp, Artificial sequence
  SiRNA target sequence
aacgcggaagatttttatct

SEQ ID NO: 52814 - DNA, 20 bp, Artificial sequence
  SiRNA target sequence
acgcggaagatttttatctg

SEQ ID NO: 52815 - DNA, 20 bp, Artificial sequence
  SiRNA target sequence
cgcggaagatttttatctgg

SEQ ID NO: 52816 - DNA, 20 bp, Artificial sequence
  SiRNA target sequence
gcggaagatttttatctggt

SEQ ID NO: 52817 - DNA, 20 bp, Artificial sequence
  SiRNA target sequence
cggaagatttttatctggtg

SEQ ID NO: 52818 - DNA, 20 bp, Artificial sequence
  SiRNA target sequence
ggaagatttttatctggtgg

SEQ ID NO: 52819 - DNA, 20 bp, Artificial sequence
  SiRNA target sequence
gaagatttttatctggtggt

SEQ ID NO: 52820 - DNA, 20 bp, Artificial sequence
  SiRNA target sequence
aagatttttatctggtggtg

SEQ ID NO: 52821 - DNA, 20 bp, Artificial sequence
  SiRNA target sequence
agatttttatctggtggtga

SEQ ID NO: 52822 - DNA, 20 bp, Artificial sequence
  SiRNA target sequence
gatttttatctggtggtgaa

SEQ ID NO: 52823 - DNA, 20 bp, Artificial sequence
  SiRNA target sequence
atttttatctggtggtgaaa

SEQ ID NO: 52824 - DNA, 20 bp, Artificial sequence
  SiRNA target sequence
tttttatctggtggtgaaag

SEQ ID NO: 52825 - DNA, 20 bp, Artificial sequence
  SiRNA target sequence
ttttatctggtggtgaaagg

SEQ ID NO: 52826 - DNA, 20 bp, Artificial sequence
  SiRNA target sequence
tttatctggtggtgaaaggc

SEQ ID NO: 52827 - DNA, 20 bp, Artificial sequence
  SiRNA target sequence
ttatctggtggtgaaaggca

SEQ ID NO: 52828 - DNA, 20 bp, Artificial sequence
  SiRNA target sequence
tatctggtggtgaaaggcaa

SEQ ID NO: 52829 - DNA, 20 bp, Artificial sequence
  SiRNA target sequence
atctggtggtgaaaggcaaa

SEQ ID NO: 52830 - DNA, 20 bp, Artificial sequence
  SiRNA target sequence
tctggtggtgaaaggcaaaa

SEQ ID NO: 52831 - DNA, 20 bp, Artificial sequence
  SiRNA target sequence
ctggtggtgaaaggcaaaaa

SEQ ID NO: 52832 - DNA, 20 bp, Artificial sequence
  SiRNA target sequence
tggtggtgaaaggcaaaaaa

SEQ ID NO: 52833 - DNA, 20 bp, Artificial sequence
  SiRNA target sequence
ggtggtgaaaggcaaaaaat

SEQ ID NO: 52834 - DNA, 20 bp, Artificial sequence
  SiRNA target sequence
gtggtgaaaggcaaaaaatt

SEQ ID NO: 52835 - DNA, 20 bp, Artificial sequence
  SiRNA target sequence
tggtgaaaggcaaaaaatta

SEQ ID NO: 52836 - DNA, 20 bp, Artificial sequence
  SiRNA target sequence
ggtgaaaggcaaaaaattat

SEQ ID NO: 52837 - DNA, 20 bp, Artificial sequence
  SiRNA target sequence
gtgaaaggcaaaaaattatg

SEQ ID NO: 52838 - DNA, 20 bp, Artificial sequence
  SiRNA target sequence
tgaaaggcaaaaaattatgc

SEQ ID NO: 52839 - DNA, 20 bp, Artificial sequence
  SiRNA target sequence
gaaaggcaaaaaattatgct

SEQ ID NO: 52840 - DNA, 20 bp, Artificial sequence
  SiRNA target sequence
aaaggcaaaaaattatgctg

SEQ ID NO: 52841 - DNA, 20 bp, Artificial sequence
  SiRNA target sequence
aaggcaaaaaattatgctga

SEQ ID NO: 52842 - DNA, 20 bp, Artificial sequence
  SiRNA target sequence
aggcaaaaaattatgctgat

SEQ ID NO: 52843 - DNA, 20 bp, Artificial sequence
  SiRNA target sequence
ggcaaaaaattatgctgatg

SEQ ID NO: 52844 - DNA, 20 bp, Artificial sequence
  SiRNA target sequence
gcaaaaaattatgctgatgc

SEQ ID NO: 52845 - DNA, 20 bp, Artificial sequence
  SiRNA target sequence
caaaaaattatgctgatgcg

SEQ ID NO: 52846 - DNA, 20 bp, Artificial sequence
  SiRNA target sequence
aaaaaattatgctgatgcgt

SEQ ID NO: 52847 - DNA, 20 bp, Artificial sequence
  SiRNA target sequence
aaaaattatgctgatgcgtg

SEQ ID NO: 52848 - DNA, 20 bp, Artificial sequence
  SiRNA target sequence
aaaattatgctgatgcgtgc

SEQ ID NO: 52849 - DNA, 20 bp, Artificial sequence
  SiRNA target sequence
aaattatgctgatgcgtgca

SEQ ID NO: 52850 - DNA, 20 bp, Artificial sequence
  SiRNA target sequence
aattatgctgatgcgtgcat

SEQ ID NO: 52851 - DNA, 20 bp, Artificial sequence
  SiRNA target sequence
attatgctgatgcgtgcatt

SEQ ID NO: 52852 - DNA, 20 bp, Artificial sequence
  SiRNA target sequence
ttatgctgatgcgtgcattg

SEQ ID NO: 52853 - DNA, 20 bp, Artificial sequence
  SiRNA target sequence
tatgctgatgcgtgcattgc

SEQ ID NO: 52854 - DNA, 20 bp, Artificial sequence
  SiRNA target sequence
atgctgatgcgtgcattgct

SEQ ID NO: 52855 - DNA, 20 bp, Artificial sequence
  SiRNA target sequence
tgctgatgcgtgcattgctt

SEQ ID NO: 52856 - DNA, 20 bp, Artificial sequence
  SiRNA target sequence
gctgatgcgtgcattgctta

SEQ ID NO: 52857 - DNA, 20 bp, Artificial sequence
  SiRNA target sequence
ctgatgcgtgcattgcttaa

SEQ ID NO: 52858 - DNA, 20 bp, Artificial sequence
  SiRNA target sequence
tgatgcgtgcattgcttaaa

SEQ ID NO: 52859 - DNA, 20 bp, Artificial sequence
  SiRNA target sequence
gatgcgtgcattgcttaaaa

SEQ ID NO: 52860 - DNA, 20 bp, Artificial sequence
  SiRNA target sequence
atgcgtgcattgcttaaaaa

SEQ ID NO: 52861 - DNA, 20 bp, Artificial sequence
  SiRNA target sequence
tgcgtgcattgcttaaaaat

SEQ ID NO: 52862 - DNA, 20 bp, Artificial sequence
  SiRNA target sequence
gcgtgcattgcttaaaaatt

SEQ ID NO: 52863 - DNA, 20 bp, Artificial sequence
  SiRNA target sequence
cgtgcattgcttaaaaattc

SEQ ID NO: 52864 - DNA, 20 bp, Artificial sequence
  SiRNA target sequence
gtgcattgcttaaaaattca

SEQ ID NO: 52865 - DNA, 20 bp, Artificial sequence
  SiRNA target sequence
tgcattgcttaaaaattcag

SEQ ID NO: 52866 - DNA, 20 bp, Artificial sequence
  SiRNA target sequence
gcattgcttaaaaattcaga

SEQ ID NO: 52867 - DNA, 20 bp, Artificial sequence
  SiRNA target sequence
cattgcttaaaaattcagag

SEQ ID NO: 52868 - DNA, 20 bp, Artificial sequence
  SiRNA target sequence
attgcttaaaaattcagaga

SEQ ID NO: 52869 - DNA, 20 bp, Artificial sequence
  SiRNA target sequence
ttgcttaaaaattcagagat

SEQ ID NO: 52870 - DNA, 20 bp, Artificial sequence
  SiRNA target sequence
tgcttaaaaattcagagatc

SEQ ID NO: 52871 - DNA, 20 bp, Artificial sequence
  SiRNA target sequence
gcttaaaaattcagagatcg

SEQ ID NO: 52872 - DNA, 20 bp, Artificial sequence
  SiRNA target sequence
cttaaaaattcagagatcgt

SEQ ID NO: 52873 - DNA, 20 bp, Artificial sequence
  SiRNA target sequence
ttaaaaattcagagatcgtt

SEQ ID NO: 52874 - DNA, 20 bp, Artificial sequence
  SiRNA target sequence
taaaaattcagagatcgttt

SEQ ID NO: 52875 - DNA, 20 bp, Artificial sequence
  SiRNA target sequence
aaaaattcagagatcgtttt

SEQ ID NO: 52876 - DNA, 20 bp, Artificial sequence
  SiRNA target sequence
aaaattcagagatcgtttta

SEQ ID NO: 52877 - DNA, 20 bp, Artificial sequence
  SiRNA target sequence
aaattcagagatcgttttat

SEQ ID NO: 52878 - DNA, 20 bp, Artificial sequence
  SiRNA target sequence
aattcagagatcgttttatt

SEQ ID NO: 52879 - DNA, 20 bp, Artificial sequence
  SiRNA target sequence
attcagagatcgttttatta

SEQ ID NO: 52880 - DNA, 20 bp, Artificial sequence
  SiRNA target sequence
ttcagagatcgttttattag

SEQ ID NO: 52881 - DNA, 20 bp, Artificial sequence
  SiRNA target sequence
tcagagatcgttttattaga

SEQ ID NO: 52882 - DNA, 20 bp, Artificial sequence
  SiRNA target sequence
cagagatcgttttattagac

SEQ ID NO: 52883 - DNA, 20 bp, Artificial sequence
  SiRNA target sequence
agagatcgttttattagacg

SEQ ID NO: 52884 - DNA, 20 bp, Artificial sequence
  SiRNA target sequence
gagatcgttttattagacga

SEQ ID NO: 52885 - DNA, 20 bp, Artificial sequence
  SiRNA target sequence
agatcgttttattagacgag

SEQ ID NO: 52886 - DNA, 20 bp, Artificial sequence
  SiRNA target sequence
gatcgttttattagacgagc

SEQ ID NO: 52887 - DNA, 20 bp, Artificial sequence
  SiRNA target sequence
atcgttttattagacgagcc

SEQ ID NO: 52888 - DNA, 20 bp, Artificial sequence
  SiRNA target sequence
tcgttttattagacgagcca

SEQ ID NO: 52889 - DNA, 20 bp, Artificial sequence
  SiRNA target sequence
cgttttattagacgagccaa

SEQ ID NO: 52890 - DNA, 20 bp, Artificial sequence
  SiRNA target sequence
gttttattagacgagccaac

SEQ ID NO: 52891 - DNA, 20 bp, Artificial sequence
  SiRNA target sequence
ttttattagacgagccaacc

SEQ ID NO: 52892 - DNA, 20 bp, Artificial sequence
  SiRNA target sequence
tttattagacgagccaacct

SEQ ID NO: 52893 - DNA, 20 bp, Artificial sequence
  SiRNA target sequence
ttattagacgagccaacctc

SEQ ID NO: 52894 - DNA, 20 bp, Artificial sequence
  SiRNA target sequence
tattagacgagccaacctca

SEQ ID NO: 52895 - DNA, 20 bp, Artificial sequence
  SiRNA target sequence
attagacgagccaacctcag

SEQ ID NO: 52896 - DNA, 20 bp, Artificial sequence
  SiRNA target sequence
ttagacgagccaacctcagc

SEQ ID NO: 52897 - DNA, 20 bp, Artificial sequence
  SiRNA target sequence
tagacgagccaacctcagca

SEQ ID NO: 52898 - DNA, 20 bp, Artificial sequence
  SiRNA target sequence
agacgagccaacctcagcac

SEQ ID NO: 52899 - DNA, 20 bp, Artificial sequence
  SiRNA target sequence
gacgagccaacctcagcact

SEQ ID NO: 52900 - DNA, 20 bp, Artificial sequence
  SiRNA target sequence
acgagccaacctcagcacta

SEQ ID NO: 52901 - DNA, 20 bp, Artificial sequence
  SiRNA target sequence
cgagccaacctcagcactag

SEQ ID NO: 52902 - DNA, 20 bp, Artificial sequence
  SiRNA target sequence
gagccaacctcagcactaga

SEQ ID NO: 52903 - DNA, 20 bp, Artificial sequence
  SiRNA target sequence
agccaacctcagcactagat

SEQ ID NO: 52904 - DNA, 20 bp, Artificial sequence
  SiRNA target sequence
gccaacctcagcactagata

SEQ ID NO: 52905 - DNA, 20 bp, Artificial sequence
  SiRNA target sequence
ccaacctcagcactagataa

SEQ ID NO: 52906 - DNA, 20 bp, Artificial sequence
  SiRNA target sequence
caacctcagcactagataaa

SEQ ID NO: 52907 - DNA, 20 bp, Artificial sequence
  SiRNA target sequence
aacctcagcactagataaaa

SEQ ID NO: 52908 - DNA, 20 bp, Artificial sequence
  SiRNA target sequence
acctcagcactagataaaaa

SEQ ID NO: 52909 - DNA, 20 bp, Artificial sequence
  SiRNA target sequence
cctcagcactagataaaaag

SEQ ID NO: 52910 - DNA, 20 bp, Artificial sequence
  SiRNA target sequence
ctcagcactagataaaaaga

SEQ ID NO: 52911 - DNA, 20 bp, Artificial sequence
  SiRNA target sequence
tcagcactagataaaaagag

SEQ ID NO: 52912 - DNA, 20 bp, Artificial sequence
  SiRNA target sequence
cagcactagataaaaagagt

SEQ ID NO: 52913 - DNA, 20 bp, Artificial sequence
  SiRNA target sequence
agcactagataaaaagagtg

SEQ ID NO: 52914 - DNA, 20 bp, Artificial sequence
  SiRNA target sequence
gcactagataaaaagagtga

SEQ ID NO: 52915 - DNA, 20 bp, Artificial sequence
  SiRNA target sequence
cactagataaaaagagtgaa

SEQ ID NO: 52916 - DNA, 20 bp, Artificial sequence
  SiRNA target sequence
actagataaaaagagtgaac

SEQ ID NO: 52917 - DNA, 20 bp, Artificial sequence
  SiRNA target sequence
ctagataaaaagagtgaact

SEQ ID NO: 52918 - DNA, 20 bp, Artificial sequence
  SiRNA target sequence
tagataaaaagagtgaacta

SEQ ID NO: 52919 - DNA, 20 bp, Artificial sequence
  SiRNA target sequence
agataaaaagagtgaactag

SEQ ID NO: 52920 - DNA, 20 bp, Artificial sequence
  SiRNA target sequence
gataaaaagagtgaactaga

SEQ ID NO: 52921 - DNA, 20 bp, Artificial sequence
  SiRNA target sequence
ataaaaagagtgaactagaa

SEQ ID NO: 52922 - DNA, 20 bp, Artificial sequence
  SiRNA target sequence
taaaaagagtgaactagaaa

SEQ ID NO: 52923 - DNA, 20 bp, Artificial sequence
  SiRNA target sequence
aaaaagagtgaactagaaac

SEQ ID NO: 52924 - DNA, 20 bp, Artificial sequence
  SiRNA target sequence
aaaagagtgaactagaaact

SEQ ID NO: 52925 - DNA, 20 bp, Artificial sequence
  SiRNA target sequence
aaagagtgaactagaaacta

SEQ ID NO: 52926 - DNA, 20 bp, Artificial sequence
  SiRNA target sequence
aagagtgaactagaaactat

SEQ ID NO: 52927 - DNA, 20 bp, Artificial sequence
  SiRNA target sequence
agagtgaactagaaactatg

SEQ ID NO: 52928 - DNA, 20 bp, Artificial sequence
  SiRNA target sequence
gagtgaactagaaactatga

SEQ ID NO: 52929 - DNA, 20 bp, Artificial sequence
  SiRNA target sequence
agtgaactagaaactatgac

SEQ ID NO: 52930 - DNA, 20 bp, Artificial sequence
  SiRNA target sequence
gtgaactagaaactatgaca

SEQ ID NO: 52931 - DNA, 20 bp, Artificial sequence
  SiRNA target sequence
tgaactagaaactatgacat

SEQ ID NO: 52932 - DNA, 20 bp, Artificial sequence
  SiRNA target sequence
gaactagaaactatgacata

SEQ ID NO: 52933 - DNA, 20 bp, Artificial sequence
  SiRNA target sequence
aactagaaactatgacatat

SEQ ID NO: 52934 - DNA, 20 bp, Artificial sequence
  SiRNA target sequence
actagaaactatgacatata

SEQ ID NO: 52935 - DNA, 20 bp, Artificial sequence
  SiRNA target sequence
ctagaaactatgacatatat

SEQ ID NO: 52936 - DNA, 20 bp, Artificial sequence
  SiRNA target sequence
tagaaactatgacatatatt

SEQ ID NO: 52937 - DNA, 20 bp, Artificial sequence
  SiRNA target sequence
agaaactatgacatatattt

SEQ ID NO: 52938 - DNA, 20 bp, Artificial sequence
  SiRNA target sequence
gaaactatgacatatatttt

SEQ ID NO: 52939 - DNA, 20 bp, Artificial sequence
  SiRNA target sequence
aaactatgacatatattttt

SEQ ID NO: 52940 - DNA, 20 bp, Artificial sequence
  SiRNA target sequence
aactatgacatatattttta

SEQ ID NO: 52941 - DNA, 20 bp, Artificial sequence
  SiRNA target sequence
actatgacatatatttttaa

SEQ ID NO: 52942 - DNA, 20 bp, Artificial sequence
  SiRNA target sequence
ctatgacatatatttttaat

SEQ ID NO: 52943 - DNA, 20 bp, Artificial sequence
  SiRNA target sequence
tatgacatatatttttaatg

SEQ ID NO: 52944 - DNA, 20 bp, Artificial sequence
  SiRNA target sequence
atgacatatatttttaatga

SEQ ID NO: 52945 - DNA, 20 bp, Artificial sequence
  SiRNA target sequence
tgacatatatttttaatgaa

SEQ ID NO: 52946 - DNA, 20 bp, Artificial sequence
  SiRNA target sequence
gacatatatttttaatgaat

SEQ ID NO: 52947 - DNA, 20 bp, Artificial sequence
  SiRNA target sequence
acatatatttttaatgaatt

SEQ ID NO: 52948 - DNA, 20 bp, Artificial sequence
  SiRNA target sequence
catatatttttaatgaattt

SEQ ID NO: 52949 - DNA, 20 bp, Artificial sequence
  SiRNA target sequence
atatatttttaatgaattta

SEQ ID NO: 52950 - DNA, 20 bp, Artificial sequence
  SiRNA target sequence
tatatttttaatgaatttaa

SEQ ID NO: 52951 - DNA, 20 bp, Artificial sequence
  SiRNA target sequence
atatttttaatgaatttaag

SEQ ID NO: 52952 - DNA, 20 bp, Artificial sequence
  SiRNA target sequence
tatttttaatgaatttaagt

SEQ ID NO: 52953 - DNA, 20 bp, Artificial sequence
  SiRNA target sequence
atttttaatgaatttaagta

SEQ ID NO: 52954 - DNA, 20 bp, Artificial sequence
  SiRNA target sequence
tttttaatgaatttaagtac

SEQ ID NO: 52955 - DNA, 20 bp, Artificial sequence
  SiRNA target sequence
ttttaatgaatttaagtacc

SEQ ID NO: 52956 - DNA, 20 bp, Artificial sequence
  SiRNA target sequence
tttaatgaatttaagtacca

SEQ ID NO: 52957 - DNA, 20 bp, Artificial sequence
  SiRNA target sequence
ttaatgaatttaagtaccat

SEQ ID NO: 52958 - DNA, 20 bp, Artificial sequence
  SiRNA target sequence
taatgaatttaagtaccata

SEQ ID NO: 52959 - DNA, 20 bp, Artificial sequence
  SiRNA target sequence
aatgaatttaagtaccatac

SEQ ID NO: 52960 - DNA, 20 bp, Artificial sequence
  SiRNA target sequence
atgaatttaagtaccatact

SEQ ID NO: 52961 - DNA, 20 bp, Artificial sequence
  SiRNA target sequence
tgaatttaagtaccatactt

SEQ ID NO: 52962 - DNA, 20 bp, Artificial sequence
  SiRNA target sequence
gaatttaagtaccatacttt

SEQ ID NO: 52963 - DNA, 20 bp, Artificial sequence
  SiRNA target sequence
aatttaagtaccatactttt

SEQ ID NO: 52964 - DNA, 20 bp, Artificial sequence
  SiRNA target sequence
atttaagtaccatacttttg

SEQ ID NO: 52965 - DNA, 20 bp, Artificial sequence
  SiRNA target sequence
tttaagtaccatacttttgt

SEQ ID NO: 52966 - DNA, 20 bp, Artificial sequence
  SiRNA target sequence
ttaagtaccatacttttgta

SEQ ID NO: 52967 - DNA, 20 bp, Artificial sequence
  SiRNA target sequence
taagtaccatacttttgtaa

SEQ ID NO: 52968 - DNA, 20 bp, Artificial sequence
  SiRNA target sequence
aagtaccatacttttgtaat

SEQ ID NO: 52969 - DNA, 20 bp, Artificial sequence
  SiRNA target sequence
agtaccatacttttgtaata

SEQ ID NO: 52970 - DNA, 20 bp, Artificial sequence
  SiRNA target sequence
gtaccatacttttgtaataa

SEQ ID NO: 52971 - DNA, 20 bp, Artificial sequence
  SiRNA target sequence
taccatacttttgtaataat

SEQ ID NO: 52972 - DNA, 20 bp, Artificial sequence
  SiRNA target sequence
accatacttttgtaataatt

SEQ ID NO: 52973 - DNA, 20 bp, Artificial sequence
  SiRNA target sequence
ccatacttttgtaataattg

SEQ ID NO: 52974 - DNA, 20 bp, Artificial sequence
  SiRNA target sequence
catacttttgtaataattgt

SEQ ID NO: 52975 - DNA, 20 bp, Artificial sequence
  SiRNA target sequence
atacttttgtaataattgta

SEQ ID NO: 52976 - DNA, 20 bp, Artificial sequence
  SiRNA target sequence
tacttttgtaataattgtac

SEQ ID NO: 52977 - DNA, 20 bp, Artificial sequence
  SiRNA target sequence
acttttgtaataattgtaca

SEQ ID NO: 52978 - DNA, 20 bp, Artificial sequence
  SiRNA target sequence
cttttgtaataattgtacac

SEQ ID NO: 52979 - DNA, 20 bp, Artificial sequence
  SiRNA target sequence
ttttgtaataattgtacaca

SEQ ID NO: 52980 - DNA, 20 bp, Artificial sequence
  SiRNA target sequence
tttgtaataattgtacacaa

SEQ ID NO: 52981 - DNA, 20 bp, Artificial sequence
  SiRNA target sequence
ttgtaataattgtacacaat

SEQ ID NO: 52982 - DNA, 20 bp, Artificial sequence
  SiRNA target sequence
tgtaataattgtacacaatc

SEQ ID NO: 52983 - DNA, 20 bp, Artificial sequence
  SiRNA target sequence
gtaataattgtacacaatct

SEQ ID NO: 52984 - DNA, 20 bp, Artificial sequence
  SiRNA target sequence
taataattgtacacaatcta

SEQ ID NO: 52985 - DNA, 20 bp, Artificial sequence
  SiRNA target sequence
aataattgtacacaatctag

SEQ ID NO: 52986 - DNA, 20 bp, Artificial sequence
  SiRNA target sequence
ataattgtacacaatctaga

SEQ ID NO: 52987 - DNA, 20 bp, Artificial sequence
  SiRNA target sequence
taattgtacacaatctagaa

SEQ ID NO: 52988 - DNA, 20 bp, Artificial sequence
  SiRNA target sequence
aattgtacacaatctagaat

SEQ ID NO: 52989 - DNA, 20 bp, Artificial sequence
  SiRNA target sequence
attgtacacaatctagaatt

SEQ ID NO: 52990 - DNA, 20 bp, Artificial sequence
  SiRNA target sequence
ttgtacacaatctagaatta

SEQ ID NO: 52991 - DNA, 20 bp, Artificial sequence
  SiRNA target sequence
tgtacacaatctagaattat

SEQ ID NO: 52992 - DNA, 20 bp, Artificial sequence
  SiRNA target sequence
gtacacaatctagaattatt

SEQ ID NO: 52993 - DNA, 20 bp, Artificial sequence
  SiRNA target sequence
tacacaatctagaattattg

SEQ ID NO: 52994 - DNA, 20 bp, Artificial sequence
  SiRNA target sequence
acacaatctagaattattgg

SEQ ID NO: 52995 - DNA, 20 bp, Artificial sequence
  SiRNA target sequence
cacaatctagaattattggc

SEQ ID NO: 52996 - DNA, 20 bp, Artificial sequence
  SiRNA target sequence
acaatctagaattattggct

SEQ ID NO: 52997 - DNA, 20 bp, Artificial sequence
  SiRNA target sequence
caatctagaattattggctt

SEQ ID NO: 52998 - DNA, 20 bp, Artificial sequence
  SiRNA target sequence
aatctagaattattggcttt

SEQ ID NO: 52999 - DNA, 20 bp, Artificial sequence
  SiRNA target sequence
atctagaattattggctttg

SEQ ID NO: 53000 - DNA, 20 bp, Artificial sequence
  SiRNA target sequence
tctagaattattggctttgt

SEQ ID NO: 53001 - DNA, 20 bp, Artificial sequence
  SiRNA target sequence
ctagaattattggctttgtt

SEQ ID NO: 53002 - DNA, 20 bp, Artificial sequence
  SiRNA target sequence
tagaattattggctttgttt

SEQ ID NO: 53003 - DNA, 20 bp, Artificial sequence
  SiRNA target sequence
agaattattggctttgtttg

SEQ ID NO: 53004 - DNA, 20 bp, Artificial sequence
  SiRNA target sequence
gaattattggctttgtttga

SEQ ID NO: 53005 - DNA, 20 bp, Artificial sequence
  SiRNA target sequence
aattattggctttgtttgat

SEQ ID NO: 53006 - DNA, 20 bp, Artificial sequence
  SiRNA target sequence
attattggctttgtttgata

SEQ ID NO: 53007 - DNA, 20 bp, Artificial sequence
  SiRNA target sequence
ttattggctttgtttgataa

SEQ ID NO: 53008 - DNA, 20 bp, Artificial sequence
  SiRNA target sequence
tattggctttgtttgataaa

SEQ ID NO: 53009 - DNA, 20 bp, Artificial sequence
  SiRNA target sequence
attggctttgtttgataaaa

SEQ ID NO: 53010 - DNA, 20 bp, Artificial sequence
  SiRNA target sequence
ttggctttgtttgataaaat

SEQ ID NO: 53011 - DNA, 20 bp, Artificial sequence
  SiRNA target sequence
tggctttgtttgataaaatt

SEQ ID NO: 53012 - DNA, 20 bp, Artificial sequence
  SiRNA target sequence
ggctttgtttgataaaattt

SEQ ID NO: 53013 - DNA, 20 bp, Artificial sequence
  SiRNA target sequence
gctttgtttgataaaatttt

SEQ ID NO: 53014 - DNA, 20 bp, Artificial sequence
  SiRNA target sequence
ctttgtttgataaaatttta

SEQ ID NO: 53015 - DNA, 20 bp, Artificial sequence
  SiRNA target sequence
tttgtttgataaaattttat

SEQ ID NO: 53016 - DNA, 20 bp, Artificial sequence
  SiRNA target sequence
ttgtttgataaaattttatt

SEQ ID NO: 53017 - DNA, 20 bp, Artificial sequence
  SiRNA target sequence
tgtttgataaaattttattt

SEQ ID NO: 53018 - DNA, 20 bp, Artificial sequence
  SiRNA target sequence
gtttgataaaattttatttg

SEQ ID NO: 53019 - DNA, 20 bp, Artificial sequence
  SiRNA target sequence
tttgataaaattttatttgt

SEQ ID NO: 53020 - DNA, 20 bp, Artificial sequence
  SiRNA target sequence
ttgataaaattttatttgta

SEQ ID NO: 53021 - DNA, 20 bp, Artificial sequence
  SiRNA target sequence
tgataaaattttatttgtaa

SEQ ID NO: 53022 - DNA, 20 bp, Artificial sequence
  SiRNA target sequence
gataaaattttatttgtaaa

SEQ ID NO: 53023 - DNA, 20 bp, Artificial sequence
  SiRNA target sequence
ataaaattttatttgtaaat

SEQ ID NO: 53024 - DNA, 20 bp, Artificial sequence
  SiRNA target sequence
taaaattttatttgtaaatg

SEQ ID NO: 53025 - DNA, 20 bp, Artificial sequence
  SiRNA target sequence
aaaattttatttgtaaatgg

SEQ ID NO: 53026 - DNA, 20 bp, Artificial sequence
  SiRNA target sequence
aaattttatttgtaaatggt

SEQ ID NO: 53027 - DNA, 20 bp, Artificial sequence
  SiRNA target sequence
aattttatttgtaaatggta

SEQ ID NO: 53028 - DNA, 20 bp, Artificial sequence
  SiRNA target sequence
attttatttgtaaatggtaa

SEQ ID NO: 53029 - DNA, 20 bp, Artificial sequence
  SiRNA target sequence
ttttatttgtaaatggtaat

SEQ ID NO: 53030 - DNA, 20 bp, Artificial sequence
  SiRNA target sequence
tttatttgtaaatggtaatg

SEQ ID NO: 53031 - DNA, 20 bp, Artificial sequence
  SiRNA target sequence
ttatttgtaaatggtaatga

SEQ ID NO: 53032 - DNA, 20 bp, Artificial sequence
  SiRNA target sequence
tatttgtaaatggtaatgag

SEQ ID NO: 53033 - DNA, 20 bp, Artificial sequence
  SiRNA target sequence
atttgtaaatggtaatgagg

SEQ ID NO: 53034 - DNA, 20 bp, Artificial sequence
  SiRNA target sequence
tttgtaaatggtaatgaggt

SEQ ID NO: 53035 - DNA, 20 bp, Artificial sequence
  SiRNA target sequence
ttgtaaatggtaatgaggta

SEQ ID NO: 53036 - DNA, 20 bp, Artificial sequence
  SiRNA target sequence
tgtaaatggtaatgaggtaa

SEQ ID NO: 53037 - DNA, 20 bp, Artificial sequence
  SiRNA target sequence
gtaaatggtaatgaggtaac

SEQ ID NO: 53038 - DNA, 20 bp, Artificial sequence
  SiRNA target sequence
taaatggtaatgaggtaaca

SEQ ID NO: 53039 - DNA, 20 bp, Artificial sequence
  SiRNA target sequence
aaatggtaatgaggtaacaa

SEQ ID NO: 53040 - DNA, 20 bp, Artificial sequence
  SiRNA target sequence
aatggtaatgaggtaacaat

SEQ ID NO: 53041 - DNA, 20 bp, Artificial sequence
  SiRNA target sequence
atggtaatgaggtaacaatg

SEQ ID NO: 53042 - DNA, 20 bp, Artificial sequence
  SiRNA target sequence
tggtaatgaggtaacaatga

SEQ ID NO: 53043 - DNA, 20 bp, Artificial sequence
  SiRNA target sequence
ggtaatgaggtaacaatgat

SEQ ID NO: 53044 - DNA, 20 bp, Artificial sequence
  SiRNA target sequence
gtaatgaggtaacaatgata

SEQ ID NO: 53045 - DNA, 20 bp, Artificial sequence
  SiRNA target sequence
taatgaggtaacaatgatag

SEQ ID NO: 53046 - DNA, 20 bp, Artificial sequence
  SiRNA target sequence
aatgaggtaacaatgataga

SEQ ID NO: 53047 - DNA, 20 bp, Artificial sequence
  SiRNA target sequence
atgaggtaacaatgatagaa

SEQ ID NO: 53048 - DNA, 20 bp, Artificial sequence
  SiRNA target sequence
tgaggtaacaatgatagaag

SEQ ID NO: 53049 - DNA, 20 bp, Artificial sequence
  SiRNA target sequence
gaggtaacaatgatagaaga

SEQ ID NO: 53050 - DNA, 20 bp, Artificial sequence
  SiRNA target sequence
aggtaacaatgatagaagac

SEQ ID NO: 53051 - DNA, 20 bp, Artificial sequence
  SiRNA target sequence
ggtaacaatgatagaagaca

SEQ ID NO: 53052 - DNA, 20 bp, Artificial sequence
  SiRNA target sequence
gtaacaatgatagaagacat

SEQ ID NO: 53053 - DNA, 20 bp, Artificial sequence
  SiRNA target sequence
taacaatgatagaagacatt

SEQ ID NO: 53054 - DNA, 20 bp, Artificial sequence
  SiRNA target sequence
aacaatgatagaagacatta

SEQ ID NO: 53055 - DNA, 20 bp, Artificial sequence
  SiRNA target sequence
acaatgatagaagacattaa

SEQ ID NO: 53056 - DNA, 20 bp, Artificial sequence
  SiRNA target sequence
caatgatagaagacattaac

SEQ ID NO: 53057 - DNA, 20 bp, Artificial sequence
  SiRNA target sequence
aatgatagaagacattaaca

SEQ ID NO: 53058 - DNA, 20 bp, Artificial sequence
  SiRNA target sequence
atgatagaagacattaacaa

SEQ ID NO: 53059 - DNA, 20 bp, Artificial sequence
  SiRNA target sequence
tgatagaagacattaacaaa

SEQ ID NO: 53060 - DNA, 20 bp, Artificial sequence
  SiRNA target sequence
gatagaagacattaacaaaa

SEQ ID NO: 53061 - DNA, 20 bp, Artificial sequence
  SiRNA target sequence
atagaagacattaacaaaaa

SEQ ID NO: 53062 - DNA, 20 bp, Artificial sequence
  SiRNA target sequence
tagaagacattaacaaaaaa

SEQ ID NO: 53063 - DNA, 20 bp, Artificial sequence
  SiRNA target sequence
agaagacattaacaaaaaac

SEQ ID NO: 53064 - DNA, 20 bp, Artificial sequence
  SiRNA target sequence
gaagacattaacaaaaaact

SEQ ID NO: 53065 - DNA, 20 bp, Artificial sequence
  SiRNA target sequence
aagacattaacaaaaaactt

SEQ ID NO: 53066 - DNA, 20 bp, Artificial sequence
  SiRNA target sequence
agacattaacaaaaaacttg

SEQ ID NO: 53067 - DNA, 20 bp, Artificial sequence
  SiRNA target sequence
gacattaacaaaaaacttga

SEQ ID NO: 53068 - DNA, 20 bp, Artificial sequence
  SiRNA target sequence
acattaacaaaaaacttgaa

SEQ ID NO: 53069 - DNA, 20 bp, Artificial sequence
  SiRNA target sequence
cattaacaaaaaacttgaag

SEQ ID NO: 53070 - DNA, 20 bp, Artificial sequence
  SiRNA target sequence
attaacaaaaaacttgaaga

SEQ ID NO: 53071 - DNA, 20 bp, Artificial sequence
  SiRNA target sequence
ttaacaaaaaacttgaagaa

SEQ ID NO: 53072 - DNA, 20 bp, Artificial sequence
  SiRNA target sequence
taacaaaaaacttgaagaaa

SEQ ID NO: 53073 - DNA, 20 bp, Artificial sequence
  SiRNA target sequence
aacaaaaaacttgaagaaaa

SEQ ID NO: 53074 - DNA, 20 bp, Artificial sequence
  SiRNA target sequence
acaaaaaacttgaagaaaat

SEQ ID NO: 53075 - DNA, 20 bp, Artificial sequence
  SiRNA target sequence
caaaaaacttgaagaaaatt

SEQ ID NO: 53076 - DNA, 20 bp, Artificial sequence
  SiRNA target sequence
aaaaaacttgaagaaaattc

SEQ ID NO: 53077 - DNA, 20 bp, Artificial sequence
  SiRNA target sequence
aaaaacttgaagaaaattca

SEQ ID NO: 53078 - DNA, 20 bp, Artificial sequence
  SiRNA target sequence
aaaacttgaagaaaattcaa

SEQ ID NO: 53079 - DNA, 20 bp, Artificial sequence
  SiRNA target sequence
aaacttgaagaaaattcaaa

SEQ ID NO: 53080 - DNA, 20 bp, Artificial sequence
  SiRNA target sequence
aacttgaagaaaattcaaag

SEQ ID NO: 53081 - DNA, 20 bp, Artificial sequence
  SiRNA target sequence
acttgaagaaaattcaaagt

SEQ ID NO: 53082 - DNA, 20 bp, Artificial sequence
  SiRNA target sequence
cttgaagaaaattcaaagta

SEQ ID NO: 53083 - DNA, 20 bp, Artificial sequence
  SiRNA target sequence
ttgaagaaaattcaaagtat

SEQ ID NO: 53084 - DNA, 20 bp, Artificial sequence
  SiRNA target sequence
tgaagaaaattcaaagtatt

SEQ ID NO: 53085 - DNA, 20 bp, Artificial sequence
  SiRNA target sequence
gaagaaaattcaaagtattt

SEQ ID NO: 53086 - DNA, 20 bp, Artificial sequence
  SiRNA target sequence
aagaaaattcaaagtatttt

SEQ ID NO: 53087 - DNA, 20 bp, Artificial sequence
  SiRNA target sequence
agaaaattcaaagtattttg

SEQ ID NO: 53088 - DNA, 20 bp, Artificial sequence
  SiRNA target sequence
gaaaattcaaagtattttgc

SEQ ID NO: 53089 - DNA, 20 bp, Artificial sequence
  SiRNA target sequence
aaaattcaaagtattttgca

SEQ ID NO: 53090 - DNA, 20 bp, Artificial sequence
  SiRNA target sequence
aaattcaaagtattttgcag

SEQ ID NO: 53091 - DNA, 20 bp, Artificial sequence
  SiRNA target sequence
aattcaaagtattttgcaga

SEQ ID NO: 53092 - DNA, 20 bp, Artificial sequence
  SiRNA target sequence
attcaaagtattttgcagat

SEQ ID NO: 53093 - DNA, 20 bp, Artificial sequence
  SiRNA target sequence
ttcaaagtattttgcagata

SEQ ID NO: 53094 - DNA, 20 bp, Artificial sequence
  SiRNA target sequence
tcaaagtattttgcagatat

SEQ ID NO: 53095 - DNA, 20 bp, Artificial sequence
  SiRNA target sequence
caaagtattttgcagatatt

SEQ ID NO: 53096 - DNA, 20 bp, Artificial sequence
  SiRNA target sequence
aaagtattttgcagatattt

SEQ ID NO: 53097 - DNA, 20 bp, Artificial sequence
  SiRNA target sequence
aagtattttgcagatatttt

SEQ ID NO: 53098 - DNA, 20 bp, Artificial sequence
  SiRNA target sequence
agtattttgcagatatttta

SEQ ID NO: 53099 - DNA, 20 bp, Artificial sequence
  SiRNA target sequence
gtattttgcagatattttaa

SEQ ID NO: 53100 - DNA, 20 bp, Artificial sequence
  SiRNA target sequence
tattttgcagatattttaaa

SEQ ID NO: 53101 - DNA, 20 bp, Artificial sequence
  SiRNA target sequence
attttgcagatattttaaac

SEQ ID NO: 53102 - DNA, 20 bp, Artificial sequence
  SiRNA target sequence
ttttgcagatattttaaaca

SEQ ID NO: 53103 - DNA, 20 bp, Artificial sequence
  SiRNA target sequence
tttgcagatattttaaacaa

SEQ ID NO: 53104 - DNA, 20 bp, Artificial sequence
  SiRNA target sequence
ttgcagatattttaaacaac

SEQ ID NO: 53105 - DNA, 20 bp, Artificial sequence
  SiRNA target sequence
tgcagatattttaaacaacg

SEQ ID NO: 53106 - DNA, 20 bp, Artificial sequence
  SiRNA target sequence
gcagatattttaaacaacga

SEQ ID NO: 53107 - DNA, 20 bp, Artificial sequence
  SiRNA target sequence
cagatattttaaacaacgaa

SEQ ID NO: 53108 - DNA, 20 bp, Artificial sequence
  SiRNA target sequence
agatattttaaacaacgaat

SEQ ID NO: 53109 - DNA, 20 bp, Artificial sequence
  SiRNA target sequence
gatattttaaacaacgaata

SEQ ID NO: 53110 - DNA, 20 bp, Artificial sequence
  SiRNA target sequence
atattttaaacaacgaataa

SEQ ID NO: 53111 - DNA, 21 bp, Artificial sequence
  SiRNA target sequence
atgaaggaaaaaaccaattat

SEQ ID NO: 53112 - DNA, 21 bp, Artificial sequence
  SiRNA target sequence
tgaaggaaaaaaccaattatg

SEQ ID NO: 53113 - DNA, 21 bp, Artificial sequence
  SiRNA target sequence
gaaggaaaaaaccaattatga

SEQ ID NO: 53114 - DNA, 21 bp, Artificial sequence
  SiRNA target sequence
aaggaaaaaaccaattatgaa

SEQ ID NO: 53115 - DNA, 21 bp, Artificial sequence
  SiRNA target sequence
aggaaaaaaccaattatgaaa

SEQ ID NO: 53116 - DNA, 21 bp, Artificial sequence
  SiRNA target sequence
ggaaaaaaccaattatgaaat

SEQ ID NO: 53117 - DNA, 21 bp, Artificial sequence
  SiRNA target sequence
gaaaaaaccaattatgaaatt

SEQ ID NO: 53118 - DNA, 21 bp, Artificial sequence
  SiRNA target sequence
aaaaaaccaattatgaaattt

SEQ ID NO: 53119 - DNA, 21 bp, Artificial sequence
  SiRNA target sequence
aaaaaccaattatgaaatttt

SEQ ID NO: 53120 - DNA, 21 bp, Artificial sequence
  SiRNA target sequence
aaaaccaattatgaaatttta

SEQ ID NO: 53121 - DNA, 21 bp, Artificial sequence
  SiRNA target sequence
aaaccaattatgaaattttat

SEQ ID NO: 53122 - DNA, 21 bp, Artificial sequence
  SiRNA target sequence
aaccaattatgaaattttata

SEQ ID NO: 53123 - DNA, 21 bp, Artificial sequence
  SiRNA target sequence
accaattatgaaattttatat

SEQ ID NO: 53124 - DNA, 21 bp, Artificial sequence
  SiRNA target sequence
ccaattatgaaattttatatg

SEQ ID NO: 53125 - DNA, 21 bp, Artificial sequence
  SiRNA target sequence
caattatgaaattttatatga

SEQ ID NO: 53126 - DNA, 21 bp, Artificial sequence
  SiRNA target sequence
aattatgaaattttatatgat

SEQ ID NO: 53127 - DNA, 21 bp, Artificial sequence
  SiRNA target sequence
attatgaaattttatatgata

SEQ ID NO: 53128 - DNA, 21 bp, Artificial sequence
  SiRNA target sequence
ttatgaaattttatatgatac

SEQ ID NO: 53129 - DNA, 21 bp, Artificial sequence
  SiRNA target sequence
tatgaaattttatatgataca

SEQ ID NO: 53130 - DNA, 21 bp, Artificial sequence
  SiRNA target sequence
atgaaattttatatgatacat

SEQ ID NO: 53131 - DNA, 21 bp, Artificial sequence
  SiRNA target sequence
tgaaattttatatgatacatt

SEQ ID NO: 53132 - DNA, 21 bp, Artificial sequence
  SiRNA target sequence
gaaattttatatgatacattt

SEQ ID NO: 53133 - DNA, 21 bp, Artificial sequence
  SiRNA target sequence
aaattttatatgatacatttg

SEQ ID NO: 53134 - DNA, 21 bp, Artificial sequence
  SiRNA target sequence
aattttatatgatacatttgt

SEQ ID NO: 53135 - DNA, 21 bp, Artificial sequence
  SiRNA target sequence
attttatatgatacatttgta

SEQ ID NO: 53136 - DNA, 21 bp, Artificial sequence
  SiRNA target sequence
ttttatatgatacatttgtaa

SEQ ID NO: 53137 - DNA, 21 bp, Artificial sequence
  SiRNA target sequence
tttatatgatacatttgtaaa

SEQ ID NO: 53138 - DNA, 21 bp, Artificial sequence
  SiRNA target sequence
ttatatgatacatttgtaaaa

SEQ ID NO: 53139 - DNA, 21 bp, Artificial sequence
  SiRNA target sequence
tatatgatacatttgtaaaat

SEQ ID NO: 53140 - DNA, 21 bp, Artificial sequence
  SiRNA target sequence
atatgatacatttgtaaaata

SEQ ID NO: 53141 - DNA, 21 bp, Artificial sequence
  SiRNA target sequence
tatgatacatttgtaaaatat

SEQ ID NO: 53142 - DNA, 21 bp, Artificial sequence
  SiRNA target sequence
atgatacatttgtaaaatatt

SEQ ID NO: 53143 - DNA, 21 bp, Artificial sequence
  SiRNA target sequence
tgatacatttgtaaaatattg

SEQ ID NO: 53144 - DNA, 21 bp, Artificial sequence
  SiRNA target sequence
gatacatttgtaaaatattgt

SEQ ID NO: 53145 - DNA, 21 bp, Artificial sequence
  SiRNA target sequence
atacatttgtaaaatattgtt

SEQ ID NO: 53146 - DNA, 21 bp, Artificial sequence
  SiRNA target sequence
tacatttgtaaaatattgtta

SEQ ID NO: 53147 - DNA, 21 bp, Artificial sequence
  SiRNA target sequence
acatttgtaaaatattgttac

SEQ ID NO: 53148 - DNA, 21 bp, Artificial sequence
  SiRNA target sequence
catttgtaaaatattgttaca

SEQ ID NO: 53149 - DNA, 21 bp, Artificial sequence
  SiRNA target sequence
atttgtaaaatattgttacaa

SEQ ID NO: 53150 - DNA, 21 bp, Artificial sequence
  SiRNA target sequence
tttgtaaaatattgttacaat

SEQ ID NO: 53151 - DNA, 21 bp, Artificial sequence
  SiRNA target sequence
ttgtaaaatattgttacaata

SEQ ID NO: 53152 - DNA, 21 bp, Artificial sequence
  SiRNA target sequence
tgtaaaatattgttacaatat

SEQ ID NO: 53153 - DNA, 21 bp, Artificial sequence
  SiRNA target sequence
gtaaaatattgttacaatatt

SEQ ID NO: 53154 - DNA, 21 bp, Artificial sequence
  SiRNA target sequence
taaaatattgttacaatattt

SEQ ID NO: 53155 - DNA, 21 bp, Artificial sequence
  SiRNA target sequence
aaaatattgttacaatatttc

SEQ ID NO: 53156 - DNA, 21 bp, Artificial sequence
  SiRNA target sequence
aaatattgttacaatatttcc

SEQ ID NO: 53157 - DNA, 21 bp, Artificial sequence
  SiRNA target sequence
aatattgttacaatatttcct

SEQ ID NO: 53158 - DNA, 21 bp, Artificial sequence
  SiRNA target sequence
atattgttacaatatttccta

SEQ ID NO: 53159 - DNA, 21 bp, Artificial sequence
  SiRNA target sequence
tattgttacaatatttcctat

SEQ ID NO: 53160 - DNA, 21 bp, Artificial sequence
  SiRNA target sequence
attgttacaatatttcctata

SEQ ID NO: 53161 - DNA, 21 bp, Artificial sequence
  SiRNA target sequence
ttgttacaatatttcctatat

SEQ ID NO: 53162 - DNA, 21 bp, Artificial sequence
  SiRNA target sequence
tgttacaatatttcctatata

SEQ ID NO: 53163 - DNA, 21 bp, Artificial sequence
  SiRNA target sequence
gttacaatatttcctatataa

SEQ ID NO: 53164 - DNA, 21 bp, Artificial sequence
  SiRNA target sequence
ttacaatatttcctatataag

SEQ ID NO: 53165 - DNA, 21 bp, Artificial sequence
  SiRNA target sequence
tacaatatttcctatataagg

SEQ ID NO: 53166 - DNA, 21 bp, Artificial sequence
  SiRNA target sequence
acaatatttcctatataaggt

SEQ ID NO: 53167 - DNA, 21 bp, Artificial sequence
  SiRNA target sequence
caatatttcctatataaggta

SEQ ID NO: 53168 - DNA, 21 bp, Artificial sequence
  SiRNA target sequence
aatatttcctatataaggtac

SEQ ID NO: 53169 - DNA, 21 bp, Artificial sequence
  SiRNA target sequence
atatttcctatataaggtacg

SEQ ID NO: 53170 - DNA, 21 bp, Artificial sequence
  SiRNA target sequence
tatttcctatataaggtacgt

SEQ ID NO: 53171 - DNA, 21 bp, Artificial sequence
  SiRNA target sequence
atttcctatataaggtacgta

SEQ ID NO: 53172 - DNA, 21 bp, Artificial sequence
  SiRNA target sequence
tttcctatataaggtacgtaa

SEQ ID NO: 53173 - DNA, 21 bp, Artificial sequence
  SiRNA target sequence
ttcctatataaggtacgtaat

SEQ ID NO: 53174 - DNA, 21 bp, Artificial sequence
  SiRNA target sequence
tcctatataaggtacgtaatg

SEQ ID NO: 53175 - DNA, 21 bp, Artificial sequence
  SiRNA target sequence
cctatataaggtacgtaatgt

SEQ ID NO: 53176 - DNA, 21 bp, Artificial sequence
  SiRNA target sequence
ctatataaggtacgtaatgtt

SEQ ID NO: 53177 - DNA, 21 bp, Artificial sequence
  SiRNA target sequence
tatataaggtacgtaatgttt

SEQ ID NO: 53178 - DNA, 21 bp, Artificial sequence
  SiRNA target sequence
atataaggtacgtaatgtttc

SEQ ID NO: 53179 - DNA, 21 bp, Artificial sequence
  SiRNA target sequence
tataaggtacgtaatgtttcc

SEQ ID NO: 53180 - DNA, 21 bp, Artificial sequence
  SiRNA target sequence
ataaggtacgtaatgtttccc

SEQ ID NO: 53181 - DNA, 21 bp, Artificial sequence
  SiRNA target sequence
taaggtacgtaatgtttccca

SEQ ID NO: 53182 - DNA, 21 bp, Artificial sequence
  SiRNA target sequence
aaggtacgtaatgtttcccat

SEQ ID NO: 53183 - DNA, 21 bp, Artificial sequence
  SiRNA target sequence
aggtacgtaatgtttcccata

SEQ ID NO: 53184 - DNA, 21 bp, Artificial sequence
  SiRNA target sequence
ggtacgtaatgtttcccatat

SEQ ID NO: 53185 - DNA, 21 bp, Artificial sequence
  SiRNA target sequence
gtacgtaatgtttcccatatt

SEQ ID NO: 53186 - DNA, 21 bp, Artificial sequence
  SiRNA target sequence
tacgtaatgtttcccatatta

SEQ ID NO: 53187 - DNA, 21 bp, Artificial sequence
  SiRNA target sequence
acgtaatgtttcccatattac

SEQ ID NO: 53188 - DNA, 21 bp, Artificial sequence
  SiRNA target sequence
cgtaatgtttcccatattact

SEQ ID NO: 53189 - DNA, 21 bp, Artificial sequence
  SiRNA target sequence
gtaatgtttcccatattactg

SEQ ID NO: 53190 - DNA, 21 bp, Artificial sequence
  SiRNA target sequence
taatgtttcccatattactgt

SEQ ID NO: 53191 - DNA, 21 bp, Artificial sequence
  SiRNA target sequence
aatgtttcccatattactgtc

SEQ ID NO: 53192 - DNA, 21 bp, Artificial sequence
  SiRNA target sequence
atgtttcccatattactgtct

SEQ ID NO: 53193 - DNA, 21 bp, Artificial sequence
  SiRNA target sequence
tgtttcccatattactgtcta

SEQ ID NO: 53194 - DNA, 21 bp, Artificial sequence
  SiRNA target sequence
gtttcccatattactgtctac

SEQ ID NO: 53195 - DNA, 21 bp, Artificial sequence
  SiRNA target sequence
tttcccatattactgtctaca

SEQ ID NO: 53196 - DNA, 21 bp, Artificial sequence
  SiRNA target sequence
ttcccatattactgtctacaa

SEQ ID NO: 53197 - DNA, 21 bp, Artificial sequence
  SiRNA target sequence
tcccatattactgtctacaat

SEQ ID NO: 53198 - DNA, 21 bp, Artificial sequence
  SiRNA target sequence
cccatattactgtctacaatt

SEQ ID NO: 53199 - DNA, 21 bp, Artificial sequence
  SiRNA target sequence
ccatattactgtctacaatta

SEQ ID NO: 53200 - DNA, 21 bp, Artificial sequence
  SiRNA target sequence
catattactgtctacaattat

SEQ ID NO: 53201 - DNA, 21 bp, Artificial sequence
  SiRNA target sequence
atattactgtctacaattata

SEQ ID NO: 53202 - DNA, 21 bp, Artificial sequence
  SiRNA target sequence
tattactgtctacaattatag

SEQ ID NO: 53203 - DNA, 21 bp, Artificial sequence
  SiRNA target sequence
attactgtctacaattatagc

SEQ ID NO: 53204 - DNA, 21 bp, Artificial sequence
  SiRNA target sequence
ttactgtctacaattatagct

SEQ ID NO: 53205 - DNA, 21 bp, Artificial sequence
  SiRNA target sequence
tactgtctacaattatagctt

SEQ ID NO: 53206 - DNA, 21 bp, Artificial sequence
  SiRNA target sequence
actgtctacaattatagcttg

SEQ ID NO: 53207 - DNA, 21 bp, Artificial sequence
  SiRNA target sequence
ctgtctacaattatagcttgt

SEQ ID NO: 53208 - DNA, 21 bp, Artificial sequence
  SiRNA target sequence
tgtctacaattatagcttgtt

SEQ ID NO: 53209 - DNA, 21 bp, Artificial sequence
  SiRNA target sequence
gtctacaattatagcttgtta

SEQ ID NO: 53210 - DNA, 21 bp, Artificial sequence
  SiRNA target sequence
tctacaattatagcttgttat

SEQ ID NO: 53211 - DNA, 21 bp, Artificial sequence
  SiRNA target sequence
ctacaattatagcttgttatc

SEQ ID NO: 53212 - DNA, 21 bp, Artificial sequence
  SiRNA target sequence
tacaattatagcttgttatct

SEQ ID NO: 53213 - DNA, 21 bp, Artificial sequence
  SiRNA target sequence
acaattatagcttgttatctc

SEQ ID NO: 53214 - DNA, 21 bp, Artificial sequence
  SiRNA target sequence
caattatagcttgttatctcg

SEQ ID NO: 53215 - DNA, 21 bp, Artificial sequence
  SiRNA target sequence
aattatagcttgttatctcga

SEQ ID NO: 53216 - DNA, 21 bp, Artificial sequence
  SiRNA target sequence
attatagcttgttatctcgaa

SEQ ID NO: 53217 - DNA, 21 bp, Artificial sequence
  SiRNA target sequence
ttatagcttgttatctcgaag

SEQ ID NO: 53218 - DNA, 21 bp, Artificial sequence
  SiRNA target sequence
tatagcttgttatctcgaagt

SEQ ID NO: 53219 - DNA, 21 bp, Artificial sequence
  SiRNA target sequence
atagcttgttatctcgaagtt

SEQ ID NO: 53220 - DNA, 21 bp, Artificial sequence
  SiRNA target sequence
tagcttgttatctcgaagttc

SEQ ID NO: 53221 - DNA, 21 bp, Artificial sequence
  SiRNA target sequence
agcttgttatctcgaagttca

SEQ ID NO: 53222 - DNA, 21 bp, Artificial sequence
  SiRNA target sequence
gcttgttatctcgaagttcag

SEQ ID NO: 53223 - DNA, 21 bp, Artificial sequence
  SiRNA target sequence
cttgttatctcgaagttcagg

SEQ ID NO: 53224 - DNA, 21 bp, Artificial sequence
  SiRNA target sequence
ttgttatctcgaagttcaggc

SEQ ID NO: 53225 - DNA, 21 bp, Artificial sequence
  SiRNA target sequence
tgttatctcgaagttcaggca

SEQ ID NO: 53226 - DNA, 21 bp, Artificial sequence
  SiRNA target sequence
gttatctcgaagttcaggcaa

SEQ ID NO: 53227 - DNA, 21 bp, Artificial sequence
  SiRNA target sequence
ttatctcgaagttcaggcaag

SEQ ID NO: 53228 - DNA, 21 bp, Artificial sequence
  SiRNA target sequence
tatctcgaagttcaggcaagt

SEQ ID NO: 53229 - DNA, 21 bp, Artificial sequence
  SiRNA target sequence
atctcgaagttcaggcaagta

SEQ ID NO: 53230 - DNA, 21 bp, Artificial sequence
  SiRNA target sequence
tctcgaagttcaggcaagtaa

SEQ ID NO: 53231 - DNA, 21 bp, Artificial sequence
  SiRNA target sequence
ctcgaagttcaggcaagtaac

SEQ ID NO: 53232 - DNA, 21 bp, Artificial sequence
  SiRNA target sequence
tcgaagttcaggcaagtaaca

SEQ ID NO: 53233 - DNA, 21 bp, Artificial sequence
  SiRNA target sequence
cgaagttcaggcaagtaacat

SEQ ID NO: 53234 - DNA, 21 bp, Artificial sequence
  SiRNA target sequence
gaagttcaggcaagtaacata

SEQ ID NO: 53235 - DNA, 21 bp, Artificial sequence
  SiRNA target sequence
aagttcaggcaagtaacatat

SEQ ID NO: 53236 - DNA, 21 bp, Artificial sequence
  SiRNA target sequence
agttcaggcaagtaacatatc

SEQ ID NO: 53237 - DNA, 21 bp, Artificial sequence
  SiRNA target sequence
gttcaggcaagtaacatatca

SEQ ID NO: 53238 - DNA, 21 bp, Artificial sequence
  SiRNA target sequence
ttcaggcaagtaacatatcaa

SEQ ID NO: 53239 - DNA, 21 bp, Artificial sequence
  SiRNA target sequence
tcaggcaagtaacatatcaaa

SEQ ID NO: 53240 - DNA, 21 bp, Artificial sequence
  SiRNA target sequence
caggcaagtaacatatcaaaa

SEQ ID NO: 53241 - DNA, 21 bp, Artificial sequence
  SiRNA target sequence
aggcaagtaacatatcaaaaa

SEQ ID NO: 53242 - DNA, 21 bp, Artificial sequence
  SiRNA target sequence
ggcaagtaacatatcaaaaag

SEQ ID NO: 53243 - DNA, 21 bp, Artificial sequence
  SiRNA target sequence
gcaagtaacatatcaaaaaga

SEQ ID NO: 53244 - DNA, 21 bp, Artificial sequence
  SiRNA target sequence
caagtaacatatcaaaaagaa

SEQ ID NO: 53245 - DNA, 21 bp, Artificial sequence
  SiRNA target sequence
aagtaacatatcaaaaagaat

SEQ ID NO: 53246 - DNA, 21 bp, Artificial sequence
  SiRNA target sequence
agtaacatatcaaaaagaatt

SEQ ID NO: 53247 - DNA, 21 bp, Artificial sequence
  SiRNA target sequence
gtaacatatcaaaaagaattg

SEQ ID NO: 53248 - DNA, 21 bp, Artificial sequence
  SiRNA target sequence
taacatatcaaaaagaattgc

SEQ ID NO: 53249 - DNA, 21 bp, Artificial sequence
  SiRNA target sequence
aacatatcaaaaagaattgca

SEQ ID NO: 53250 - DNA, 21 bp, Artificial sequence
  SiRNA target sequence
acatatcaaaaagaattgcag

SEQ ID NO: 53251 - DNA, 21 bp, Artificial sequence
  SiRNA target sequence
catatcaaaaagaattgcaga

SEQ ID NO: 53252 - DNA, 21 bp, Artificial sequence
  SiRNA target sequence
atatcaaaaagaattgcagaa

SEQ ID NO: 53253 - DNA, 21 bp, Artificial sequence
  SiRNA target sequence
tatcaaaaagaattgcagaag

SEQ ID NO: 53254 - DNA, 21 bp, Artificial sequence
  SiRNA target sequence
atcaaaaagaattgcagaaga

SEQ ID NO: 53255 - DNA, 21 bp, Artificial sequence
  SiRNA target sequence
tcaaaaagaattgcagaagat

SEQ ID NO: 53256 - DNA, 21 bp, Artificial sequence
  SiRNA target sequence
caaaaagaattgcagaagatt

SEQ ID NO: 53257 - DNA, 21 bp, Artificial sequence
  SiRNA target sequence
aaaaagaattgcagaagattt

SEQ ID NO: 53258 - DNA, 21 bp, Artificial sequence
  SiRNA target sequence
aaaagaattgcagaagatttt

SEQ ID NO: 53259 - DNA, 21 bp, Artificial sequence
  SiRNA target sequence
aaagaattgcagaagattttg

SEQ ID NO: 53260 - DNA, 21 bp, Artificial sequence
  SiRNA target sequence
aagaattgcagaagattttga

SEQ ID NO: 53261 - DNA, 21 bp, Artificial sequence
  SiRNA target sequence
agaattgcagaagattttgaa

SEQ ID NO: 53262 - DNA, 21 bp, Artificial sequence
  SiRNA target sequence
gaattgcagaagattttgaaa

SEQ ID NO: 53263 - DNA, 21 bp, Artificial sequence
  SiRNA target sequence
aattgcagaagattttgaaaa

SEQ ID NO: 53264 - DNA, 21 bp, Artificial sequence
  SiRNA target sequence
attgcagaagattttgaaaat

SEQ ID NO: 53265 - DNA, 21 bp, Artificial sequence
  SiRNA target sequence
ttgcagaagattttgaaaata

SEQ ID NO: 53266 - DNA, 21 bp, Artificial sequence
  SiRNA target sequence
tgcagaagattttgaaaataa

SEQ ID NO: 53267 - DNA, 21 bp, Artificial sequence
  SiRNA target sequence
gcagaagattttgaaaataaa

SEQ ID NO: 53268 - DNA, 21 bp, Artificial sequence
  SiRNA target sequence
cagaagattttgaaaataaaa

SEQ ID NO: 53269 - DNA, 21 bp, Artificial sequence
  SiRNA target sequence
agaagattttgaaaataaaat

SEQ ID NO: 53270 - DNA, 21 bp, Artificial sequence
  SiRNA target sequence
gaagattttgaaaataaaata

SEQ ID NO: 53271 - DNA, 21 bp, Artificial sequence
  SiRNA target sequence
aagattttgaaaataaaataa

SEQ ID NO: 53272 - DNA, 21 bp, Artificial sequence
  SiRNA target sequence
agattttgaaaataaaataaa

SEQ ID NO: 53273 - DNA, 21 bp, Artificial sequence
  SiRNA target sequence
gattttgaaaataaaataaat

SEQ ID NO: 53274 - DNA, 21 bp, Artificial sequence
  SiRNA target sequence
attttgaaaataaaataaatg

SEQ ID NO: 53275 - DNA, 21 bp, Artificial sequence
  SiRNA target sequence
ttttgaaaataaaataaatgc

SEQ ID NO: 53276 - DNA, 21 bp, Artificial sequence
  SiRNA target sequence
tttgaaaataaaataaatgca

SEQ ID NO: 53277 - DNA, 21 bp, Artificial sequence
  SiRNA target sequence
ttgaaaataaaataaatgcag

SEQ ID NO: 53278 - DNA, 21 bp, Artificial sequence
  SiRNA target sequence
tgaaaataaaataaatgcagg

SEQ ID NO: 53279 - DNA, 21 bp, Artificial sequence
  SiRNA target sequence
gaaaataaaataaatgcagga

SEQ ID NO: 53280 - DNA, 21 bp, Artificial sequence
  SiRNA target sequence
aaaataaaataaatgcaggaa

SEQ ID NO: 53281 - DNA, 21 bp, Artificial sequence
  SiRNA target sequence
aaataaaataaatgcaggaaa

SEQ ID NO: 53282 - DNA, 21 bp, Artificial sequence
  SiRNA target sequence
aataaaataaatgcaggaaaa

SEQ ID NO: 53283 - DNA, 21 bp, Artificial sequence
  SiRNA target sequence
ataaaataaatgcaggaaaaa

SEQ ID NO: 53284 - DNA, 21 bp, Artificial sequence
  SiRNA target sequence
taaaataaatgcaggaaaaag

SEQ ID NO: 53285 - DNA, 21 bp, Artificial sequence
  SiRNA target sequence
aaaataaatgcaggaaaaagt

SEQ ID NO: 53286 - DNA, 21 bp, Artificial sequence
  SiRNA target sequence
aaataaatgcaggaaaaagta

SEQ ID NO: 53287 - DNA, 21 bp, Artificial sequence
  SiRNA target sequence
aataaatgcaggaaaaagtat

SEQ ID NO: 53288 - DNA, 21 bp, Artificial sequence
  SiRNA target sequence
ataaatgcaggaaaaagtata

SEQ ID NO: 53289 - DNA, 21 bp, Artificial sequence
  SiRNA target sequence
taaatgcaggaaaaagtatat

SEQ ID NO: 53290 - DNA, 21 bp, Artificial sequence
  SiRNA target sequence
aaatgcaggaaaaagtatatt

SEQ ID NO: 53291 - DNA, 21 bp, Artificial sequence
  SiRNA target sequence
aatgcaggaaaaagtatattt

SEQ ID NO: 53292 - DNA, 21 bp, Artificial sequence
  SiRNA target sequence
atgcaggaaaaagtatattta

SEQ ID NO: 53293 - DNA, 21 bp, Artificial sequence
  SiRNA target sequence
tgcaggaaaaagtatatttaa

SEQ ID NO: 53294 - DNA, 21 bp, Artificial sequence
  SiRNA target sequence
gcaggaaaaagtatatttaaa

SEQ ID NO: 53295 - DNA, 21 bp, Artificial sequence
  SiRNA target sequence
caggaaaaagtatatttaaat

SEQ ID NO: 53296 - DNA, 21 bp, Artificial sequence
  SiRNA target sequence
aggaaaaagtatatttaaata

SEQ ID NO: 53297 - DNA, 21 bp, Artificial sequence
  SiRNA target sequence
ggaaaaagtatatttaaatat

SEQ ID NO: 53298 - DNA, 21 bp, Artificial sequence
  SiRNA target sequence
gaaaaagtatatttaaatata

SEQ ID NO: 53299 - DNA, 21 bp, Artificial sequence
  SiRNA target sequence
aaaaagtatatttaaatatat

SEQ ID NO: 53300 - DNA, 21 bp, Artificial sequence
  SiRNA target sequence
aaaagtatatttaaatatatt

SEQ ID NO: 53301 - DNA, 21 bp, Artificial sequence
  SiRNA target sequence
aaagtatatttaaatatattt

SEQ ID NO: 53302 - DNA, 21 bp, Artificial sequence
  SiRNA target sequence
aagtatatttaaatatatttt

SEQ ID NO: 53303 - DNA, 21 bp, Artificial sequence
  SiRNA target sequence
agtatatttaaatatatttta

SEQ ID NO: 53304 - DNA, 21 bp, Artificial sequence
  SiRNA target sequence
gtatatttaaatatattttat

SEQ ID NO: 53305 - DNA, 21 bp, Artificial sequence
  SiRNA target sequence
tatatttaaatatattttatt

SEQ ID NO: 53306 - DNA, 21 bp, Artificial sequence
  SiRNA target sequence
atatttaaatatattttattt

SEQ ID NO: 53307 - DNA, 21 bp, Artificial sequence
  SiRNA target sequence
tatttaaatatattttatttt

SEQ ID NO: 53308 - DNA, 21 bp, Artificial sequence
  SiRNA target sequence
atttaaatatattttattttt

SEQ ID NO: 53309 - DNA, 21 bp, Artificial sequence
  SiRNA target sequence
tttaaatatattttattttta

SEQ ID NO: 53310 - DNA, 21 bp, Artificial sequence
  SiRNA target sequence
ttaaatatattttatttttaa

SEQ ID NO: 53311 - DNA, 21 bp, Artificial sequence
  SiRNA target sequence
taaatatattttatttttaac

SEQ ID NO: 53312 - DNA, 21 bp, Artificial sequence
  SiRNA target sequence
aaatatattttatttttaact

SEQ ID NO: 53313 - DNA, 21 bp, Artificial sequence
  SiRNA target sequence
aatatattttatttttaactt

SEQ ID NO: 53314 - DNA, 21 bp, Artificial sequence
  SiRNA target sequence
atatattttatttttaacttc

SEQ ID NO: 53315 - DNA, 21 bp, Artificial sequence
  SiRNA target sequence
tatattttatttttaacttca

SEQ ID NO: 53316 - DNA, 21 bp, Artificial sequence
  SiRNA target sequence
atattttatttttaacttcat

SEQ ID NO: 53317 - DNA, 21 bp, Artificial sequence
  SiRNA target sequence
tattttatttttaacttcatc

SEQ ID NO: 53318 - DNA, 21 bp, Artificial sequence
  SiRNA target sequence
attttatttttaacttcatca

SEQ ID NO: 53319 - DNA, 21 bp, Artificial sequence
  SiRNA target sequence
ttttatttttaacttcatcaa

SEQ ID NO: 53320 - DNA, 21 bp, Artificial sequence
  SiRNA target sequence
tttatttttaacttcatcaat

SEQ ID NO: 53321 - DNA, 21 bp, Artificial sequence
  SiRNA target sequence
ttatttttaacttcatcaata

SEQ ID NO: 53322 - DNA, 21 bp, Artificial sequence
  SiRNA target sequence
tatttttaacttcatcaatag

SEQ ID NO: 53323 - DNA, 21 bp, Artificial sequence
  SiRNA target sequence
atttttaacttcatcaatagt

SEQ ID NO: 53324 - DNA, 21 bp, Artificial sequence
  SiRNA target sequence
tttttaacttcatcaatagta

SEQ ID NO: 53325 - DNA, 21 bp, Artificial sequence
  SiRNA target sequence
ttttaacttcatcaatagtat

SEQ ID NO: 53326 - DNA, 21 bp, Artificial sequence
  SiRNA target sequence
tttaacttcatcaatagtatt

SEQ ID NO: 53327 - DNA, 21 bp, Artificial sequence
  SiRNA target sequence
ttaacttcatcaatagtatta

SEQ ID NO: 53328 - DNA, 21 bp, Artificial sequence
  SiRNA target sequence
taacttcatcaatagtattaa

SEQ ID NO: 53329 - DNA, 21 bp, Artificial sequence
  SiRNA target sequence
aacttcatcaatagtattaag

SEQ ID NO: 53330 - DNA, 21 bp, Artificial sequence
  SiRNA target sequence
acttcatcaatagtattaaga

SEQ ID NO: 53331 - DNA, 21 bp, Artificial sequence
  SiRNA target sequence
cttcatcaatagtattaagac

SEQ ID NO: 53332 - DNA, 21 bp, Artificial sequence
  SiRNA target sequence
ttcatcaatagtattaagaca

SEQ ID NO: 53333 - DNA, 21 bp, Artificial sequence
  SiRNA target sequence
tcatcaatagtattaagacaa

SEQ ID NO: 53334 - DNA, 21 bp, Artificial sequence
  SiRNA target sequence
catcaatagtattaagacaaa

SEQ ID NO: 53335 - DNA, 21 bp, Artificial sequence
  SiRNA target sequence
atcaatagtattaagacaaat

SEQ ID NO: 53336 - DNA, 21 bp, Artificial sequence
  SiRNA target sequence
tcaatagtattaagacaaatt

SEQ ID NO: 53337 - DNA, 21 bp, Artificial sequence
  SiRNA target sequence
caatagtattaagacaaatta

SEQ ID NO: 53338 - DNA, 21 bp, Artificial sequence
  SiRNA target sequence
aatagtattaagacaaattaa

SEQ ID NO: 53339 - DNA, 21 bp, Artificial sequence
  SiRNA target sequence
atagtattaagacaaattaat

SEQ ID NO: 53340 - DNA, 21 bp, Artificial sequence
  SiRNA target sequence
tagtattaagacaaattaatg

SEQ ID NO: 53341 - DNA, 21 bp, Artificial sequence
  SiRNA target sequence
agtattaagacaaattaatga

SEQ ID NO: 53342 - DNA, 21 bp, Artificial sequence
  SiRNA target sequence
gtattaagacaaattaatgat

SEQ ID NO: 53343 - DNA, 21 bp, Artificial sequence
  SiRNA target sequence
tattaagacaaattaatgata

SEQ ID NO: 53344 - DNA, 21 bp, Artificial sequence
  SiRNA target sequence
attaagacaaattaatgatat

SEQ ID NO: 53345 - DNA, 21 bp, Artificial sequence
  SiRNA target sequence
ttaagacaaattaatgatatt

SEQ ID NO: 53346 - DNA, 21 bp, Artificial sequence
  SiRNA target sequence
taagacaaattaatgatattg

SEQ ID NO: 53347 - DNA, 21 bp, Artificial sequence
  SiRNA target sequence
aagacaaattaatgatattgt

SEQ ID NO: 53348 - DNA, 21 bp, Artificial sequence
  SiRNA target sequence
agacaaattaatgatattgtg

SEQ ID NO: 53349 - DNA, 21 bp, Artificial sequence
  SiRNA target sequence
gacaaattaatgatattgtgt

SEQ ID NO: 53350 - DNA, 21 bp, Artificial sequence
  SiRNA target sequence
acaaattaatgatattgtgtt

SEQ ID NO: 53351 - DNA, 21 bp, Artificial sequence
  SiRNA target sequence
caaattaatgatattgtgttt

SEQ ID NO: 53352 - DNA, 21 bp, Artificial sequence
  SiRNA target sequence
aaattaatgatattgtgttta

SEQ ID NO: 53353 - DNA, 21 bp, Artificial sequence
  SiRNA target sequence
aattaatgatattgtgtttag

SEQ ID NO: 53354 - DNA, 21 bp, Artificial sequence
  SiRNA target sequence
attaatgatattgtgtttagc

SEQ ID NO: 53355 - DNA, 21 bp, Artificial sequence
  SiRNA target sequence
ttaatgatattgtgtttagcg

SEQ ID NO: 53356 - DNA, 21 bp, Artificial sequence
  SiRNA target sequence
taatgatattgtgtttagcgg

SEQ ID NO: 53357 - DNA, 21 bp, Artificial sequence
  SiRNA target sequence
aatgatattgtgtttagcggg

SEQ ID NO: 53358 - DNA, 21 bp, Artificial sequence
  SiRNA target sequence
atgatattgtgtttagcgggc

SEQ ID NO: 53359 - DNA, 21 bp, Artificial sequence
  SiRNA target sequence
tgatattgtgtttagcgggcc

SEQ ID NO: 53360 - DNA, 21 bp, Artificial sequence
  SiRNA target sequence
gatattgtgtttagcgggcca

SEQ ID NO: 53361 - DNA, 21 bp, Artificial sequence
  SiRNA target sequence
atattgtgtttagcgggccaa

SEQ ID NO: 53362 - DNA, 21 bp, Artificial sequence
  SiRNA target sequence
tattgtgtttagcgggccaat

SEQ ID NO: 53363 - DNA, 21 bp, Artificial sequence
  SiRNA target sequence
attgtgtttagcgggccaata

SEQ ID NO: 53364 - DNA, 21 bp, Artificial sequence
  SiRNA target sequence
ttgtgtttagcgggccaatac

SEQ ID NO: 53365 - DNA, 21 bp, Artificial sequence
  SiRNA target sequence
tgtgtttagcgggccaataca

SEQ ID NO: 53366 - DNA, 21 bp, Artificial sequence
  SiRNA target sequence
gtgtttagcgggccaatacaa

SEQ ID NO: 53367 - DNA, 21 bp, Artificial sequence
  SiRNA target sequence
tgtttagcgggccaatacaat

SEQ ID NO: 53368 - DNA, 21 bp, Artificial sequence
  SiRNA target sequence
gtttagcgggccaatacaatt

SEQ ID NO: 53369 - DNA, 21 bp, Artificial sequence
  SiRNA target sequence
tttagcgggccaatacaattt

SEQ ID NO: 53370 - DNA, 21 bp, Artificial sequence
  SiRNA target sequence
ttagcgggccaatacaatttt

SEQ ID NO: 53371 - DNA, 21 bp, Artificial sequence
  SiRNA target sequence
tagcgggccaatacaattttt

SEQ ID NO: 53372 - DNA, 21 bp, Artificial sequence
  SiRNA target sequence
agcgggccaatacaattttta

SEQ ID NO: 53373 - DNA, 21 bp, Artificial sequence
  SiRNA target sequence
gcgggccaatacaatttttat

SEQ ID NO: 53374 - DNA, 21 bp, Artificial sequence
  SiRNA target sequence
cgggccaatacaatttttata

SEQ ID NO: 53375 - DNA, 21 bp, Artificial sequence
  SiRNA target sequence
gggccaatacaatttttatat

SEQ ID NO: 53376 - DNA, 21 bp, Artificial sequence
  SiRNA target sequence
ggccaatacaatttttatata

SEQ ID NO: 53377 - DNA, 21 bp, Artificial sequence
  SiRNA target sequence
gccaatacaatttttatataa

SEQ ID NO: 53378 - DNA, 21 bp, Artificial sequence
  SiRNA target sequence
ccaatacaatttttatataaa

SEQ ID NO: 53379 - DNA, 21 bp, Artificial sequence
  SiRNA target sequence
caatacaatttttatataaaa

SEQ ID NO: 53380 - DNA, 21 bp, Artificial sequence
  SiRNA target sequence
aatacaatttttatataaaat

SEQ ID NO: 53381 - DNA, 21 bp, Artificial sequence
  SiRNA target sequence
atacaatttttatataaaatt

SEQ ID NO: 53382 - DNA, 21 bp, Artificial sequence
  SiRNA target sequence
tacaatttttatataaaattg

SEQ ID NO: 53383 - DNA, 21 bp, Artificial sequence
  SiRNA target sequence
acaatttttatataaaattgt

SEQ ID NO: 53384 - DNA, 21 bp, Artificial sequence
  SiRNA target sequence
caatttttatataaaattgtt

SEQ ID NO: 53385 - DNA, 21 bp, Artificial sequence
  SiRNA target sequence
aatttttatataaaattgttg

SEQ ID NO: 53386 - DNA, 21 bp, Artificial sequence
  SiRNA target sequence
atttttatataaaattgttgg

SEQ ID NO: 53387 - DNA, 21 bp, Artificial sequence
  SiRNA target sequence
tttttatataaaattgttgga

SEQ ID NO: 53388 - DNA, 21 bp, Artificial sequence
  SiRNA target sequence
ttttatataaaattgttggag

SEQ ID NO: 53389 - DNA, 21 bp, Artificial sequence
  SiRNA target sequence
tttatataaaattgttggagt

SEQ ID NO: 53390 - DNA, 21 bp, Artificial sequence
  SiRNA target sequence
ttatataaaattgttggagtt

SEQ ID NO: 53391 - DNA, 21 bp, Artificial sequence
  SiRNA target sequence
tatataaaattgttggagttg

SEQ ID NO: 53392 - DNA, 21 bp, Artificial sequence
  SiRNA target sequence
atataaaattgttggagttga

SEQ ID NO: 53393 - DNA, 21 bp, Artificial sequence
  SiRNA target sequence
tataaaattgttggagttgaa

SEQ ID NO: 53394 - DNA, 21 bp, Artificial sequence
  SiRNA target sequence
ataaaattgttggagttgaag

SEQ ID NO: 53395 - DNA, 21 bp, Artificial sequence
  SiRNA target sequence
taaaattgttggagttgaagc

SEQ ID NO: 53396 - DNA, 21 bp, Artificial sequence
  SiRNA target sequence
aaaattgttggagttgaagca

SEQ ID NO: 53397 - DNA, 21 bp, Artificial sequence
  SiRNA target sequence
aaattgttggagttgaagcat

SEQ ID NO: 53398 - DNA, 21 bp, Artificial sequence
  SiRNA target sequence
aattgttggagttgaagcatt

SEQ ID NO: 53399 - DNA, 21 bp, Artificial sequence
  SiRNA target sequence
attgttggagttgaagcattt

SEQ ID NO: 53400 - DNA, 21 bp, Artificial sequence
  SiRNA target sequence
ttgttggagttgaagcatttt

SEQ ID NO: 53401 - DNA, 21 bp, Artificial sequence
  SiRNA target sequence
tgttggagttgaagcatttta

SEQ ID NO: 53402 - DNA, 21 bp, Artificial sequence
  SiRNA target sequence
gttggagttgaagcattttat

SEQ ID NO: 53403 - DNA, 21 bp, Artificial sequence
  SiRNA target sequence
ttggagttgaagcattttatc

SEQ ID NO: 53404 - DNA, 21 bp, Artificial sequence
  SiRNA target sequence
tggagttgaagcattttatca

SEQ ID NO: 53405 - DNA, 21 bp, Artificial sequence
  SiRNA target sequence
ggagttgaagcattttatcat

SEQ ID NO: 53406 - DNA, 21 bp, Artificial sequence
  SiRNA target sequence
gagttgaagcattttatcatt

SEQ ID NO: 53407 - DNA, 21 bp, Artificial sequence
  SiRNA target sequence
agttgaagcattttatcatta

SEQ ID NO: 53408 - DNA, 21 bp, Artificial sequence
  SiRNA target sequence
gttgaagcattttatcattac

SEQ ID NO: 53409 - DNA, 21 bp, Artificial sequence
  SiRNA target sequence
ttgaagcattttatcattaca

SEQ ID NO: 53410 - DNA, 21 bp, Artificial sequence
  SiRNA target sequence
tgaagcattttatcattacat

SEQ ID NO: 53411 - DNA, 21 bp, Artificial sequence
  SiRNA target sequence
gaagcattttatcattacatt

SEQ ID NO: 53412 - DNA, 21 bp, Artificial sequence
  SiRNA target sequence
aagcattttatcattacattt

SEQ ID NO: 53413 - DNA, 21 bp, Artificial sequence
  SiRNA target sequence
agcattttatcattacatttc

SEQ ID NO: 53414 - DNA, 21 bp, Artificial sequence
  SiRNA target sequence
gcattttatcattacatttca

SEQ ID NO: 53415 - DNA, 21 bp, Artificial sequence
  SiRNA target sequence
cattttatcattacatttcat

SEQ ID NO: 53416 - DNA, 21 bp, Artificial sequence
  SiRNA target sequence
attttatcattacatttcatt

SEQ ID NO: 53417 - DNA, 21 bp, Artificial sequence
  SiRNA target sequence
ttttatcattacatttcatta

SEQ ID NO: 53418 - DNA, 21 bp, Artificial sequence
  SiRNA target sequence
tttatcattacatttcattaa

SEQ ID NO: 53419 - DNA, 21 bp, Artificial sequence
  SiRNA target sequence
ttatcattacatttcattaaa

SEQ ID NO: 53420 - DNA, 21 bp, Artificial sequence
  SiRNA target sequence
tatcattacatttcattaaac

SEQ ID NO: 53421 - DNA, 21 bp, Artificial sequence
  SiRNA target sequence
atcattacatttcattaaact

SEQ ID NO: 53422 - DNA, 21 bp, Artificial sequence
  SiRNA target sequence
tcattacatttcattaaactt

SEQ ID NO: 53423 - DNA, 21 bp, Artificial sequence
  SiRNA target sequence
cattacatttcattaaactta

SEQ ID NO: 53424 - DNA, 21 bp, Artificial sequence
  SiRNA target sequence
attacatttcattaaacttag

SEQ ID NO: 53425 - DNA, 21 bp, Artificial sequence
  SiRNA target sequence
ttacatttcattaaacttaga

SEQ ID NO: 53426 - DNA, 21 bp, Artificial sequence
  SiRNA target sequence
tacatttcattaaacttagaa

SEQ ID NO: 53427 - DNA, 21 bp, Artificial sequence
  SiRNA target sequence
acatttcattaaacttagaaa

SEQ ID NO: 53428 - DNA, 21 bp, Artificial sequence
  SiRNA target sequence
catttcattaaacttagaaaa

SEQ ID NO: 53429 - DNA, 21 bp, Artificial sequence
  SiRNA target sequence
atttcattaaacttagaaaat

SEQ ID NO: 53430 - DNA, 21 bp, Artificial sequence
  SiRNA target sequence
tttcattaaacttagaaaatt

SEQ ID NO: 53431 - DNA, 21 bp, Artificial sequence
  SiRNA target sequence
ttcattaaacttagaaaattt

SEQ ID NO: 53432 - DNA, 21 bp, Artificial sequence
  SiRNA target sequence
tcattaaacttagaaaatttt

SEQ ID NO: 53433 - DNA, 21 bp, Artificial sequence
  SiRNA target sequence
cattaaacttagaaaatttta

SEQ ID NO: 53434 - DNA, 21 bp, Artificial sequence
  SiRNA target sequence
attaaacttagaaaattttaa

SEQ ID NO: 53435 - DNA, 21 bp, Artificial sequence
  SiRNA target sequence
ttaaacttagaaaattttaac

SEQ ID NO: 53436 - DNA, 21 bp, Artificial sequence
  SiRNA target sequence
taaacttagaaaattttaaca

SEQ ID NO: 53437 - DNA, 21 bp, Artificial sequence
  SiRNA target sequence
aaacttagaaaattttaacaa

SEQ ID NO: 53438 - DNA, 21 bp, Artificial sequence
  SiRNA target sequence
aacttagaaaattttaacaaa

SEQ ID NO: 53439 - DNA, 21 bp, Artificial sequence
  SiRNA target sequence
acttagaaaattttaacaaaa

SEQ ID NO: 53440 - DNA, 21 bp, Artificial sequence
  SiRNA target sequence
cttagaaaattttaacaaaat

SEQ ID NO: 53441 - DNA, 21 bp, Artificial sequence
  SiRNA target sequence
ttagaaaattttaacaaaata

SEQ ID NO: 53442 - DNA, 21 bp, Artificial sequence
  SiRNA target sequence
tagaaaattttaacaaaatag

SEQ ID NO: 53443 - DNA, 21 bp, Artificial sequence
  SiRNA target sequence
agaaaattttaacaaaatagg

SEQ ID NO: 53444 - DNA, 21 bp, Artificial sequence
  SiRNA target sequence
gaaaattttaacaaaatagga

SEQ ID NO: 53445 - DNA, 21 bp, Artificial sequence
  SiRNA target sequence
aaaattttaacaaaataggaa

SEQ ID NO: 53446 - DNA, 21 bp, Artificial sequence
  SiRNA target sequence
aaattttaacaaaataggaag

SEQ ID NO: 53447 - DNA, 21 bp, Artificial sequence
  SiRNA target sequence
aattttaacaaaataggaagt

SEQ ID NO: 53448 - DNA, 21 bp, Artificial sequence
  SiRNA target sequence
attttaacaaaataggaagtg

SEQ ID NO: 53449 - DNA, 21 bp, Artificial sequence
  SiRNA target sequence
ttttaacaaaataggaagtgg

SEQ ID NO: 53450 - DNA, 21 bp, Artificial sequence
  SiRNA target sequence
tttaacaaaataggaagtgga

SEQ ID NO: 53451 - DNA, 21 bp, Artificial sequence
  SiRNA target sequence
ttaacaaaataggaagtggag

SEQ ID NO: 53452 - DNA, 21 bp, Artificial sequence
  SiRNA target sequence
taacaaaataggaagtggaga

SEQ ID NO: 53453 - DNA, 21 bp, Artificial sequence
  SiRNA target sequence
aacaaaataggaagtggagag

SEQ ID NO: 53454 - DNA, 21 bp, Artificial sequence
  SiRNA target sequence
acaaaataggaagtggagaga

SEQ ID NO: 53455 - DNA, 21 bp, Artificial sequence
  SiRNA target sequence
caaaataggaagtggagagat

SEQ ID NO: 53456 - DNA, 21 bp, Artificial sequence
  SiRNA target sequence
aaaataggaagtggagagata

SEQ ID NO: 53457 - DNA, 21 bp, Artificial sequence
  SiRNA target sequence
aaataggaagtggagagatac

SEQ ID NO: 53458 - DNA, 21 bp, Artificial sequence
  SiRNA target sequence
aataggaagtggagagataca

SEQ ID NO: 53459 - DNA, 21 bp, Artificial sequence
  SiRNA target sequence
ataggaagtggagagatacaa

SEQ ID NO: 53460 - DNA, 21 bp, Artificial sequence
  SiRNA target sequence
taggaagtggagagatacaaa

SEQ ID NO: 53461 - DNA, 21 bp, Artificial sequence
  SiRNA target sequence
aggaagtggagagatacaaat

SEQ ID NO: 53462 - DNA, 21 bp, Artificial sequence
  SiRNA target sequence
ggaagtggagagatacaaatg

SEQ ID NO: 53463 - DNA, 21 bp, Artificial sequence
  SiRNA target sequence
gaagtggagagatacaaatga

SEQ ID NO: 53464 - DNA, 21 bp, Artificial sequence
  SiRNA target sequence
aagtggagagatacaaatgat

SEQ ID NO: 53465 - DNA, 21 bp, Artificial sequence
  SiRNA target sequence
agtggagagatacaaatgatt

SEQ ID NO: 53466 - DNA, 21 bp, Artificial sequence
  SiRNA target sequence
gtggagagatacaaatgatta

SEQ ID NO: 53467 - DNA, 21 bp, Artificial sequence
  SiRNA target sequence
tggagagatacaaatgattat

SEQ ID NO: 53468 - DNA, 21 bp, Artificial sequence
  SiRNA target sequence
ggagagatacaaatgattatt

SEQ ID NO: 53469 - DNA, 21 bp, Artificial sequence
  SiRNA target sequence
gagagatacaaatgattattg

SEQ ID NO: 53470 - DNA, 21 bp, Artificial sequence
  SiRNA target sequence
agagatacaaatgattattga

SEQ ID NO: 53471 - DNA, 21 bp, Artificial sequence
  SiRNA target sequence
gagatacaaatgattattgag

SEQ ID NO: 53472 - DNA, 21 bp, Artificial sequence
  SiRNA target sequence
agatacaaatgattattgagc

SEQ ID NO: 53473 - DNA, 21 bp, Artificial sequence
  SiRNA target sequence
gatacaaatgattattgagcg

SEQ ID NO: 53474 - DNA, 21 bp, Artificial sequence
  SiRNA target sequence
atacaaatgattattgagcgg

SEQ ID NO: 53475 - DNA, 21 bp, Artificial sequence
  SiRNA target sequence
tacaaatgattattgagcgga

SEQ ID NO: 53476 - DNA, 21 bp, Artificial sequence
  SiRNA target sequence
acaaatgattattgagcggaa

SEQ ID NO: 53477 - DNA, 21 bp, Artificial sequence
  SiRNA target sequence
caaatgattattgagcggaaa

SEQ ID NO: 53478 - DNA, 21 bp, Artificial sequence
  SiRNA target sequence
aaatgattattgagcggaaaa

SEQ ID NO: 53479 - DNA, 21 bp, Artificial sequence
  SiRNA target sequence
aatgattattgagcggaaaag

SEQ ID NO: 53480 - DNA, 21 bp, Artificial sequence
  SiRNA target sequence
atgattattgagcggaaaagt

SEQ ID NO: 53481 - DNA, 21 bp, Artificial sequence
  SiRNA target sequence
tgattattgagcggaaaagta

SEQ ID NO: 53482 - DNA, 21 bp, Artificial sequence
  SiRNA target sequence
gattattgagcggaaaagtag

SEQ ID NO: 53483 - DNA, 21 bp, Artificial sequence
  SiRNA target sequence
attattgagcggaaaagtaga

SEQ ID NO: 53484 - DNA, 21 bp, Artificial sequence
  SiRNA target sequence
ttattgagcggaaaagtagag

SEQ ID NO: 53485 - DNA, 21 bp, Artificial sequence
  SiRNA target sequence
tattgagcggaaaagtagagc

SEQ ID NO: 53486 - DNA, 21 bp, Artificial sequence
  SiRNA target sequence
attgagcggaaaagtagagca

SEQ ID NO: 53487 - DNA, 21 bp, Artificial sequence
  SiRNA target sequence
ttgagcggaaaagtagagcat

SEQ ID NO: 53488 - DNA, 21 bp, Artificial sequence
  SiRNA target sequence
tgagcggaaaagtagagcata

SEQ ID NO: 53489 - DNA, 21 bp, Artificial sequence
  SiRNA target sequence
gagcggaaaagtagagcatat

SEQ ID NO: 53490 - DNA, 21 bp, Artificial sequence
  SiRNA target sequence
agcggaaaagtagagcatatg

SEQ ID NO: 53491 - DNA, 21 bp, Artificial sequence
  SiRNA target sequence
gcggaaaagtagagcatatgg

SEQ ID NO: 53492 - DNA, 21 bp, Artificial sequence
  SiRNA target sequence
cggaaaagtagagcatatggt

SEQ ID NO: 53493 - DNA, 21 bp, Artificial sequence
  SiRNA target sequence
ggaaaagtagagcatatggtg

SEQ ID NO: 53494 - DNA, 21 bp, Artificial sequence
  SiRNA target sequence
gaaaagtagagcatatggtga

SEQ ID NO: 53495 - DNA, 21 bp, Artificial sequence
  SiRNA target sequence
aaaagtagagcatatggtgac

SEQ ID NO: 53496 - DNA, 21 bp, Artificial sequence
  SiRNA target sequence
aaagtagagcatatggtgaca

SEQ ID NO: 53497 - DNA, 21 bp, Artificial sequence
  SiRNA target sequence
aagtagagcatatggtgacat

SEQ ID NO: 53498 - DNA, 21 bp, Artificial sequence
  SiRNA target sequence
agtagagcatatggtgacata

SEQ ID NO: 53499 - DNA, 21 bp, Artificial sequence
  SiRNA target sequence
gtagagcatatggtgacatac

SEQ ID NO: 53500 - DNA, 21 bp, Artificial sequence
  SiRNA target sequence
tagagcatatggtgacatact

SEQ ID NO: 53501 - DNA, 21 bp, Artificial sequence
  SiRNA target sequence
agagcatatggtgacatacta

SEQ ID NO: 53502 - DNA, 21 bp, Artificial sequence
  SiRNA target sequence
gagcatatggtgacatactag

SEQ ID NO: 53503 - DNA, 21 bp, Artificial sequence
  SiRNA target sequence
agcatatggtgacatactaga

SEQ ID NO: 53504 - DNA, 21 bp, Artificial sequence
  SiRNA target sequence
gcatatggtgacatactagaa

SEQ ID NO: 53505 - DNA, 21 bp, Artificial sequence
  SiRNA target sequence
catatggtgacatactagaac

SEQ ID NO: 53506 - DNA, 21 bp, Artificial sequence
  SiRNA target sequence
atatggtgacatactagaact

SEQ ID NO: 53507 - DNA, 21 bp, Artificial sequence
  SiRNA target sequence
tatggtgacatactagaacta

SEQ ID NO: 53508 - DNA, 21 bp, Artificial sequence
  SiRNA target sequence
atggtgacatactagaactaa

SEQ ID NO: 53509 - DNA, 21 bp, Artificial sequence
  SiRNA target sequence
tggtgacatactagaactaac

SEQ ID NO: 53510 - DNA, 21 bp, Artificial sequence
  SiRNA target sequence
ggtgacatactagaactaact

SEQ ID NO: 53511 - DNA, 21 bp, Artificial sequence
  SiRNA target sequence
gtgacatactagaactaacta

SEQ ID NO: 53512 - DNA, 21 bp, Artificial sequence
  SiRNA target sequence
tgacatactagaactaactac

SEQ ID NO: 53513 - DNA, 21 bp, Artificial sequence
  SiRNA target sequence
gacatactagaactaactact

SEQ ID NO: 53514 - DNA, 21 bp, Artificial sequence
  SiRNA target sequence
acatactagaactaactactc

SEQ ID NO: 53515 - DNA, 21 bp, Artificial sequence
  SiRNA target sequence
catactagaactaactactct

SEQ ID NO: 53516 - DNA, 21 bp, Artificial sequence
  SiRNA target sequence
atactagaactaactactctc

SEQ ID NO: 53517 - DNA, 21 bp, Artificial sequence
  SiRNA target sequence
tactagaactaactactctct

SEQ ID NO: 53518 - DNA, 21 bp, Artificial sequence
  SiRNA target sequence
actagaactaactactctctc

SEQ ID NO: 53519 - DNA, 21 bp, Artificial sequence
  SiRNA target sequence
ctagaactaactactctctcg

SEQ ID NO: 53520 - DNA, 21 bp, Artificial sequence
  SiRNA target sequence
tagaactaactactctctcgg

SEQ ID NO: 53521 - DNA, 21 bp, Artificial sequence
  SiRNA target sequence
agaactaactactctctcggc

SEQ ID NO: 53522 - DNA, 21 bp, Artificial sequence
  SiRNA target sequence
gaactaactactctctcggcc

SEQ ID NO: 53523 - DNA, 21 bp, Artificial sequence
  SiRNA target sequence
aactaactactctctcggccg

SEQ ID NO: 53524 - DNA, 21 bp, Artificial sequence
  SiRNA target sequence
actaactactctctcggccgt

SEQ ID NO: 53525 - DNA, 21 bp, Artificial sequence
  SiRNA target sequence
ctaactactctctcggccgta

SEQ ID NO: 53526 - DNA, 21 bp, Artificial sequence
  SiRNA target sequence
taactactctctcggccgtac

SEQ ID NO: 53527 - DNA, 21 bp, Artificial sequence
  SiRNA target sequence
aactactctctcggccgtacc

SEQ ID NO: 53528 - DNA, 21 bp, Artificial sequence
  SiRNA target sequence
actactctctcggccgtacca

SEQ ID NO: 53529 - DNA, 21 bp, Artificial sequence
  SiRNA target sequence
ctactctctcggccgtaccaa

SEQ ID NO: 53530 - DNA, 21 bp, Artificial sequence
  SiRNA target sequence
tactctctcggccgtaccaac

SEQ ID NO: 53531 - DNA, 21 bp, Artificial sequence
  SiRNA target sequence
actctctcggccgtaccaacc

SEQ ID NO: 53532 - DNA, 21 bp, Artificial sequence
  SiRNA target sequence
ctctctcggccgtaccaacct

SEQ ID NO: 53533 - DNA, 21 bp, Artificial sequence
  SiRNA target sequence
tctctcggccgtaccaacctg

SEQ ID NO: 53534 - DNA, 21 bp, Artificial sequence
  SiRNA target sequence
ctctcggccgtaccaacctgt

SEQ ID NO: 53535 - DNA, 21 bp, Artificial sequence
  SiRNA target sequence
tctcggccgtaccaacctgta

SEQ ID NO: 53536 - DNA, 21 bp, Artificial sequence
  SiRNA target sequence
ctcggccgtaccaacctgtat

SEQ ID NO: 53537 - DNA, 21 bp, Artificial sequence
  SiRNA target sequence
tcggccgtaccaacctgtatt

SEQ ID NO: 53538 - DNA, 21 bp, Artificial sequence
  SiRNA target sequence
cggccgtaccaacctgtattg

SEQ ID NO: 53539 - DNA, 21 bp, Artificial sequence
  SiRNA target sequence
ggccgtaccaacctgtattgt

SEQ ID NO: 53540 - DNA, 21 bp, Artificial sequence
  SiRNA target sequence
gccgtaccaacctgtattgta

SEQ ID NO: 53541 - DNA, 21 bp, Artificial sequence
  SiRNA target sequence
ccgtaccaacctgtattgtag

SEQ ID NO: 53542 - DNA, 21 bp, Artificial sequence
  SiRNA target sequence
cgtaccaacctgtattgtagt

SEQ ID NO: 53543 - DNA, 21 bp, Artificial sequence
  SiRNA target sequence
gtaccaacctgtattgtagtt

SEQ ID NO: 53544 - DNA, 21 bp, Artificial sequence
  SiRNA target sequence
taccaacctgtattgtagtta

SEQ ID NO: 53545 - DNA, 21 bp, Artificial sequence
  SiRNA target sequence
accaacctgtattgtagttat

SEQ ID NO: 53546 - DNA, 21 bp, Artificial sequence
  SiRNA target sequence
ccaacctgtattgtagttatt

SEQ ID NO: 53547 - DNA, 21 bp, Artificial sequence
  SiRNA target sequence
caacctgtattgtagttatta

SEQ ID NO: 53548 - DNA, 21 bp, Artificial sequence
  SiRNA target sequence
aacctgtattgtagttattat

SEQ ID NO: 53549 - DNA, 21 bp, Artificial sequence
  SiRNA target sequence
acctgtattgtagttattatg

SEQ ID NO: 53550 - DNA, 21 bp, Artificial sequence
  SiRNA target sequence
cctgtattgtagttattatgt

SEQ ID NO: 53551 - DNA, 21 bp, Artificial sequence
  SiRNA target sequence
ctgtattgtagttattatgtc

SEQ ID NO: 53552 - DNA, 21 bp, Artificial sequence
  SiRNA target sequence
tgtattgtagttattatgtcg

SEQ ID NO: 53553 - DNA, 21 bp, Artificial sequence
  SiRNA target sequence
gtattgtagttattatgtcgt

SEQ ID NO: 53554 - DNA, 21 bp, Artificial sequence
  SiRNA target sequence
tattgtagttattatgtcgtt

SEQ ID NO: 53555 - DNA, 21 bp, Artificial sequence
  SiRNA target sequence
attgtagttattatgtcgttt

SEQ ID NO: 53556 - DNA, 21 bp, Artificial sequence
  SiRNA target sequence
ttgtagttattatgtcgtttt

SEQ ID NO: 53557 - DNA, 21 bp, Artificial sequence
  SiRNA target sequence
tgtagttattatgtcgttttt

SEQ ID NO: 53558 - DNA, 21 bp, Artificial sequence
  SiRNA target sequence
gtagttattatgtcgtttttc

SEQ ID NO: 53559 - DNA, 21 bp, Artificial sequence
  SiRNA target sequence
tagttattatgtcgtttttct

SEQ ID NO: 53560 - DNA, 21 bp, Artificial sequence
  SiRNA target sequence
agttattatgtcgtttttctc

SEQ ID NO: 53561 - DNA, 21 bp, Artificial sequence
  SiRNA target sequence
gttattatgtcgtttttctca

SEQ ID NO: 53562 - DNA, 21 bp, Artificial sequence
  SiRNA target sequence
ttattatgtcgtttttctcag

SEQ ID NO: 53563 - DNA, 21 bp, Artificial sequence
  SiRNA target sequence
tattatgtcgtttttctcagt

SEQ ID NO: 53564 - DNA, 21 bp, Artificial sequence
  SiRNA target sequence
attatgtcgtttttctcagta

SEQ ID NO: 53565 - DNA, 21 bp, Artificial sequence
  SiRNA target sequence
ttatgtcgtttttctcagtat

SEQ ID NO: 53566 - DNA, 21 bp, Artificial sequence
  SiRNA target sequence
tatgtcgtttttctcagtata

SEQ ID NO: 53567 - DNA, 21 bp, Artificial sequence
  SiRNA target sequence
atgtcgtttttctcagtatat

SEQ ID NO: 53568 - DNA, 21 bp, Artificial sequence
  SiRNA target sequence
tgtcgtttttctcagtatata

SEQ ID NO: 53569 - DNA, 21 bp, Artificial sequence
  SiRNA target sequence
gtcgtttttctcagtatataa

SEQ ID NO: 53570 - DNA, 21 bp, Artificial sequence
  SiRNA target sequence
tcgtttttctcagtatataaa

SEQ ID NO: 53571 - DNA, 21 bp, Artificial sequence
  SiRNA target sequence
cgtttttctcagtatataaaa

SEQ ID NO: 53572 - DNA, 21 bp, Artificial sequence
  SiRNA target sequence
gtttttctcagtatataaaaa

SEQ ID NO: 53573 - DNA, 21 bp, Artificial sequence
  SiRNA target sequence
tttttctcagtatataaaaat

SEQ ID NO: 53574 - DNA, 21 bp, Artificial sequence
  SiRNA target sequence
ttttctcagtatataaaaatt

SEQ ID NO: 53575 - DNA, 21 bp, Artificial sequence
  SiRNA target sequence
tttctcagtatataaaaattt

SEQ ID NO: 53576 - DNA, 21 bp, Artificial sequence
  SiRNA target sequence
ttctcagtatataaaaatttg

SEQ ID NO: 53577 - DNA, 21 bp, Artificial sequence
  SiRNA target sequence
tctcagtatataaaaatttgg

SEQ ID NO: 53578 - DNA, 21 bp, Artificial sequence
  SiRNA target sequence
ctcagtatataaaaatttggg

SEQ ID NO: 53579 - DNA, 21 bp, Artificial sequence
  SiRNA target sequence
tcagtatataaaaatttggga

SEQ ID NO: 53580 - DNA, 21 bp, Artificial sequence
  SiRNA target sequence
cagtatataaaaatttgggaa

SEQ ID NO: 53581 - DNA, 21 bp, Artificial sequence
  SiRNA target sequence
agtatataaaaatttgggaag

SEQ ID NO: 53582 - DNA, 21 bp, Artificial sequence
  SiRNA target sequence
gtatataaaaatttgggaaga

SEQ ID NO: 53583 - DNA, 21 bp, Artificial sequence
  SiRNA target sequence
tatataaaaatttgggaagag

SEQ ID NO: 53584 - DNA, 21 bp, Artificial sequence
  SiRNA target sequence
atataaaaatttgggaagaga

SEQ ID NO: 53585 - DNA, 21 bp, Artificial sequence
  SiRNA target sequence
tataaaaatttgggaagagat

SEQ ID NO: 53586 - DNA, 21 bp, Artificial sequence
  SiRNA target sequence
ataaaaatttgggaagagatg

SEQ ID NO: 53587 - DNA, 21 bp, Artificial sequence
  SiRNA target sequence
taaaaatttgggaagagatgc

SEQ ID NO: 53588 - DNA, 21 bp, Artificial sequence
  SiRNA target sequence
aaaaatttgggaagagatgca

SEQ ID NO: 53589 - DNA, 21 bp, Artificial sequence
  SiRNA target sequence
aaaatttgggaagagatgcac

SEQ ID NO: 53590 - DNA, 21 bp, Artificial sequence
  SiRNA target sequence
aaatttgggaagagatgcact

SEQ ID NO: 53591 - DNA, 21 bp, Artificial sequence
  SiRNA target sequence
aatttgggaagagatgcactc

SEQ ID NO: 53592 - DNA, 21 bp, Artificial sequence
  SiRNA target sequence
atttgggaagagatgcactct

SEQ ID NO: 53593 - DNA, 21 bp, Artificial sequence
  SiRNA target sequence
tttgggaagagatgcactcta

SEQ ID NO: 53594 - DNA, 21 bp, Artificial sequence
  SiRNA target sequence
ttgggaagagatgcactctac

SEQ ID NO: 53595 - DNA, 21 bp, Artificial sequence
  SiRNA target sequence
tgggaagagatgcactctacg

SEQ ID NO: 53596 - DNA, 21 bp, Artificial sequence
  SiRNA target sequence
gggaagagatgcactctacgt

SEQ ID NO: 53597 - DNA, 21 bp, Artificial sequence
  SiRNA target sequence
ggaagagatgcactctacgta

SEQ ID NO: 53598 - DNA, 21 bp, Artificial sequence
  SiRNA target sequence
gaagagatgcactctacgtaa

SEQ ID NO: 53599 - DNA, 21 bp, Artificial sequence
  SiRNA target sequence
aagagatgcactctacgtaat

SEQ ID NO: 53600 - DNA, 21 bp, Artificial sequence
  SiRNA target sequence
agagatgcactctacgtaatg

SEQ ID NO: 53601 - DNA, 21 bp, Artificial sequence
  SiRNA target sequence
gagatgcactctacgtaatgt

SEQ ID NO: 53602 - DNA, 21 bp, Artificial sequence
  SiRNA target sequence
agatgcactctacgtaatgtt

SEQ ID NO: 53603 - DNA, 21 bp, Artificial sequence
  SiRNA target sequence
gatgcactctacgtaatgttg

SEQ ID NO: 53604 - DNA, 21 bp, Artificial sequence
  SiRNA target sequence
atgcactctacgtaatgttgg

SEQ ID NO: 53605 - DNA, 21 bp, Artificial sequence
  SiRNA target sequence
tgcactctacgtaatgttggc

SEQ ID NO: 53606 - DNA, 21 bp, Artificial sequence
  SiRNA target sequence
gcactctacgtaatgttggct

SEQ ID NO: 53607 - DNA, 21 bp, Artificial sequence
  SiRNA target sequence
cactctacgtaatgttggcta

SEQ ID NO: 53608 - DNA, 21 bp, Artificial sequence
  SiRNA target sequence
actctacgtaatgttggctac

SEQ ID NO: 53609 - DNA, 21 bp, Artificial sequence
  SiRNA target sequence
ctctacgtaatgttggctaca

SEQ ID NO: 53610 - DNA, 21 bp, Artificial sequence
  SiRNA target sequence
tctacgtaatgttggctacaa

SEQ ID NO: 53611 - DNA, 21 bp, Artificial sequence
  SiRNA target sequence
ctacgtaatgttggctacaag

SEQ ID NO: 53612 - DNA, 21 bp, Artificial sequence
  SiRNA target sequence
tacgtaatgttggctacaagt

SEQ ID NO: 53613 - DNA, 21 bp, Artificial sequence
  SiRNA target sequence
acgtaatgttggctacaagtg

SEQ ID NO: 53614 - DNA, 21 bp, Artificial sequence
  SiRNA target sequence
cgtaatgttggctacaagtgc

SEQ ID NO: 53615 - DNA, 21 bp, Artificial sequence
  SiRNA target sequence
gtaatgttggctacaagtgcc

SEQ ID NO: 53616 - DNA, 21 bp, Artificial sequence
  SiRNA target sequence
taatgttggctacaagtgcct

SEQ ID NO: 53617 - DNA, 21 bp, Artificial sequence
  SiRNA target sequence
aatgttggctacaagtgcctt

SEQ ID NO: 53618 - DNA, 21 bp, Artificial sequence
  SiRNA target sequence
atgttggctacaagtgccttg

SEQ ID NO: 53619 - DNA, 21 bp, Artificial sequence
  SiRNA target sequence
tgttggctacaagtgccttgt

SEQ ID NO: 53620 - DNA, 21 bp, Artificial sequence
  SiRNA target sequence
gttggctacaagtgccttgta

SEQ ID NO: 53621 - DNA, 21 bp, Artificial sequence
  SiRNA target sequence
ttggctacaagtgccttgtat

SEQ ID NO: 53622 - DNA, 21 bp, Artificial sequence
  SiRNA target sequence
tggctacaagtgccttgtatg

SEQ ID NO: 53623 - DNA, 21 bp, Artificial sequence
  SiRNA target sequence
ggctacaagtgccttgtatgt

SEQ ID NO: 53624 - DNA, 21 bp, Artificial sequence
  SiRNA target sequence
gctacaagtgccttgtatgtg

SEQ ID NO: 53625 - DNA, 21 bp, Artificial sequence
  SiRNA target sequence
ctacaagtgccttgtatgtgt

SEQ ID NO: 53626 - DNA, 21 bp, Artificial sequence
  SiRNA target sequence
tacaagtgccttgtatgtgta

SEQ ID NO: 53627 - DNA, 21 bp, Artificial sequence
  SiRNA target sequence
acaagtgccttgtatgtgtat

SEQ ID NO: 53628 - DNA, 21 bp, Artificial sequence
  SiRNA target sequence
caagtgccttgtatgtgtatt

SEQ ID NO: 53629 - DNA, 21 bp, Artificial sequence
  SiRNA target sequence
aagtgccttgtatgtgtattt

SEQ ID NO: 53630 - DNA, 21 bp, Artificial sequence
  SiRNA target sequence
agtgccttgtatgtgtatttt

SEQ ID NO: 53631 - DNA, 21 bp, Artificial sequence
  SiRNA target sequence
gtgccttgtatgtgtatttta

SEQ ID NO: 53632 - DNA, 21 bp, Artificial sequence
  SiRNA target sequence
tgccttgtatgtgtattttac

SEQ ID NO: 53633 - DNA, 21 bp, Artificial sequence
  SiRNA target sequence
gccttgtatgtgtattttaca

SEQ ID NO: 53634 - DNA, 21 bp, Artificial sequence
  SiRNA target sequence
ccttgtatgtgtattttacat

SEQ ID NO: 53635 - DNA, 21 bp, Artificial sequence
  SiRNA target sequence
cttgtatgtgtattttacatt

SEQ ID NO: 53636 - DNA, 21 bp, Artificial sequence
  SiRNA target sequence
ttgtatgtgtattttacattt

SEQ ID NO: 53637 - DNA, 21 bp, Artificial sequence
  SiRNA target sequence
tgtatgtgtattttacatttg

SEQ ID NO: 53638 - DNA, 21 bp, Artificial sequence
  SiRNA target sequence
gtatgtgtattttacatttgt

SEQ ID NO: 53639 - DNA, 21 bp, Artificial sequence
  SiRNA target sequence
tatgtgtattttacatttgta

SEQ ID NO: 53640 - DNA, 21 bp, Artificial sequence
  SiRNA target sequence
atgtgtattttacatttgtat

SEQ ID NO: 53641 - DNA, 21 bp, Artificial sequence
  SiRNA target sequence
tgtgtattttacatttgtatt

SEQ ID NO: 53642 - DNA, 21 bp, Artificial sequence
  SiRNA target sequence
gtgtattttacatttgtattt

SEQ ID NO: 53643 - DNA, 21 bp, Artificial sequence
  SiRNA target sequence
tgtattttacatttgtatttt

SEQ ID NO: 53644 - DNA, 21 bp, Artificial sequence
  SiRNA target sequence
gtattttacatttgtattttc

SEQ ID NO: 53645 - DNA, 21 bp, Artificial sequence
  SiRNA target sequence
tattttacatttgtattttca

SEQ ID NO: 53646 - DNA, 21 bp, Artificial sequence
  SiRNA target sequence
attttacatttgtattttcaa

SEQ ID NO: 53647 - DNA, 21 bp, Artificial sequence
  SiRNA target sequence
ttttacatttgtattttcaat

SEQ ID NO: 53648 - DNA, 21 bp, Artificial sequence
  SiRNA target sequence
tttacatttgtattttcaata

SEQ ID NO: 53649 - DNA, 21 bp, Artificial sequence
  SiRNA target sequence
ttacatttgtattttcaatat

SEQ ID NO: 53650 - DNA, 21 bp, Artificial sequence
  SiRNA target sequence
tacatttgtattttcaatatg

SEQ ID NO: 53651 - DNA, 21 bp, Artificial sequence
  SiRNA target sequence
acatttgtattttcaatatgg

SEQ ID NO: 53652 - DNA, 21 bp, Artificial sequence
  SiRNA target sequence
catttgtattttcaatatgga

SEQ ID NO: 53653 - DNA, 21 bp, Artificial sequence
  SiRNA target sequence
atttgtattttcaatatggag

SEQ ID NO: 53654 - DNA, 21 bp, Artificial sequence
  SiRNA target sequence
tttgtattttcaatatggaga

SEQ ID NO: 53655 - DNA, 21 bp, Artificial sequence
  SiRNA target sequence
ttgtattttcaatatggagaa

SEQ ID NO: 53656 - DNA, 21 bp, Artificial sequence
  SiRNA target sequence
tgtattttcaatatggagaaa

SEQ ID NO: 53657 - DNA, 21 bp, Artificial sequence
  SiRNA target sequence
gtattttcaatatggagaaac

SEQ ID NO: 53658 - DNA, 21 bp, Artificial sequence
  SiRNA target sequence
tattttcaatatggagaaaca

SEQ ID NO: 53659 - DNA, 21 bp, Artificial sequence
  SiRNA target sequence
attttcaatatggagaaacaa

SEQ ID NO: 53660 - DNA, 21 bp, Artificial sequence
  SiRNA target sequence
ttttcaatatggagaaacaat

SEQ ID NO: 53661 - DNA, 21 bp, Artificial sequence
  SiRNA target sequence
tttcaatatggagaaacaata

SEQ ID NO: 53662 - DNA, 21 bp, Artificial sequence
  SiRNA target sequence
ttcaatatggagaaacaatat

SEQ ID NO: 53663 - DNA, 21 bp, Artificial sequence
  SiRNA target sequence
tcaatatggagaaacaatatt

SEQ ID NO: 53664 - DNA, 21 bp, Artificial sequence
  SiRNA target sequence
caatatggagaaacaatatta

SEQ ID NO: 53665 - DNA, 21 bp, Artificial sequence
  SiRNA target sequence
aatatggagaaacaatattag

SEQ ID NO: 53666 - DNA, 21 bp, Artificial sequence
  SiRNA target sequence
atatggagaaacaatattaga

SEQ ID NO: 53667 - DNA, 21 bp, Artificial sequence
  SiRNA target sequence
tatggagaaacaatattagaa

SEQ ID NO: 53668 - DNA, 21 bp, Artificial sequence
  SiRNA target sequence
atggagaaacaatattagaag

SEQ ID NO: 53669 - DNA, 21 bp, Artificial sequence
  SiRNA target sequence
tggagaaacaatattagaaga

SEQ ID NO: 53670 - DNA, 21 bp, Artificial sequence
  SiRNA target sequence
ggagaaacaatattagaagac

SEQ ID NO: 53671 - DNA, 21 bp, Artificial sequence
  SiRNA target sequence
gagaaacaatattagaagaca

SEQ ID NO: 53672 - DNA, 21 bp, Artificial sequence
  SiRNA target sequence
agaaacaatattagaagacaa

SEQ ID NO: 53673 - DNA, 21 bp, Artificial sequence
  SiRNA target sequence
gaaacaatattagaagacaat

SEQ ID NO: 53674 - DNA, 21 bp, Artificial sequence
  SiRNA target sequence
aaacaatattagaagacaata

SEQ ID NO: 53675 - DNA, 21 bp, Artificial sequence
  SiRNA target sequence
aacaatattagaagacaatat

SEQ ID NO: 53676 - DNA, 21 bp, Artificial sequence
  SiRNA target sequence
acaatattagaagacaatata

SEQ ID NO: 53677 - DNA, 21 bp, Artificial sequence
  SiRNA target sequence
caatattagaagacaatataa

SEQ ID NO: 53678 - DNA, 21 bp, Artificial sequence
  SiRNA target sequence
aatattagaagacaatataat

SEQ ID NO: 53679 - DNA, 21 bp, Artificial sequence
  SiRNA target sequence
atattagaagacaatataata

SEQ ID NO: 53680 - DNA, 21 bp, Artificial sequence
  SiRNA target sequence
tattagaagacaatataataa

SEQ ID NO: 53681 - DNA, 21 bp, Artificial sequence
  SiRNA target sequence
attagaagacaatataataag

SEQ ID NO: 53682 - DNA, 21 bp, Artificial sequence
  SiRNA target sequence
ttagaagacaatataataagt

SEQ ID NO: 53683 - DNA, 21 bp, Artificial sequence
  SiRNA target sequence
tagaagacaatataataagtc

SEQ ID NO: 53684 - DNA, 21 bp, Artificial sequence
  SiRNA target sequence
agaagacaatataataagtca

SEQ ID NO: 53685 - DNA, 21 bp, Artificial sequence
  SiRNA target sequence
gaagacaatataataagtcac

SEQ ID NO: 53686 - DNA, 21 bp, Artificial sequence
  SiRNA target sequence
aagacaatataataagtcaca

SEQ ID NO: 53687 - DNA, 21 bp, Artificial sequence
  SiRNA target sequence
agacaatataataagtcacag

SEQ ID NO: 53688 - DNA, 21 bp, Artificial sequence
  SiRNA target sequence
gacaatataataagtcacagg

SEQ ID NO: 53689 - DNA, 21 bp, Artificial sequence
  SiRNA target sequence
acaatataataagtcacagga

SEQ ID NO: 53690 - DNA, 21 bp, Artificial sequence
  SiRNA target sequence
caatataataagtcacaggat

SEQ ID NO: 53691 - DNA, 21 bp, Artificial sequence
  SiRNA target sequence
aatataataagtcacaggata

SEQ ID NO: 53692 - DNA, 21 bp, Artificial sequence
  SiRNA target sequence
atataataagtcacaggataa

SEQ ID NO: 53693 - DNA, 21 bp, Artificial sequence
  SiRNA target sequence
tataataagtcacaggataaa

SEQ ID NO: 53694 - DNA, 21 bp, Artificial sequence
  SiRNA target sequence
ataataagtcacaggataaat

SEQ ID NO: 53695 - DNA, 21 bp, Artificial sequence
  SiRNA target sequence
taataagtcacaggataaatt

SEQ ID NO: 53696 - DNA, 21 bp, Artificial sequence
  SiRNA target sequence
aataagtcacaggataaatta

SEQ ID NO: 53697 - DNA, 21 bp, Artificial sequence
  SiRNA target sequence
ataagtcacaggataaattat

SEQ ID NO: 53698 - DNA, 21 bp, Artificial sequence
  SiRNA target sequence
taagtcacaggataaattatc

SEQ ID NO: 53699 - DNA, 21 bp, Artificial sequence
  SiRNA target sequence
aagtcacaggataaattatcg

SEQ ID NO: 53700 - DNA, 21 bp, Artificial sequence
  SiRNA target sequence
agtcacaggataaattatcga

SEQ ID NO: 53701 - DNA, 21 bp, Artificial sequence
  SiRNA target sequence
gtcacaggataaattatcgaa

SEQ ID NO: 53702 - DNA, 21 bp, Artificial sequence
  SiRNA target sequence
tcacaggataaattatcgaat

SEQ ID NO: 53703 - DNA, 21 bp, Artificial sequence
  SiRNA target sequence
cacaggataaattatcgaata

SEQ ID NO: 53704 - DNA, 21 bp, Artificial sequence
  SiRNA target sequence
acaggataaattatcgaataa

SEQ ID NO: 53705 - DNA, 21 bp, Artificial sequence
  SiRNA target sequence
caggataaattatcgaataaa

SEQ ID NO: 53706 - DNA, 21 bp, Artificial sequence
  SiRNA target sequence
aggataaattatcgaataaat

SEQ ID NO: 53707 - DNA, 21 bp, Artificial sequence
  SiRNA target sequence
ggataaattatcgaataaatt

SEQ ID NO: 53708 - DNA, 21 bp, Artificial sequence
  SiRNA target sequence
gataaattatcgaataaatta

SEQ ID NO: 53709 - DNA, 21 bp, Artificial sequence
  SiRNA target sequence
ataaattatcgaataaattac

SEQ ID NO: 53710 - DNA, 21 bp, Artificial sequence
  SiRNA target sequence
taaattatcgaataaattaca

SEQ ID NO: 53711 - DNA, 21 bp, Artificial sequence
  SiRNA target sequence
aaattatcgaataaattacaa

SEQ ID NO: 53712 - DNA, 21 bp, Artificial sequence
  SiRNA target sequence
aattatcgaataaattacaag

SEQ ID NO: 53713 - DNA, 21 bp, Artificial sequence
  SiRNA target sequence
attatcgaataaattacaaga

SEQ ID NO: 53714 - DNA, 21 bp, Artificial sequence
  SiRNA target sequence
ttatcgaataaattacaagat

SEQ ID NO: 53715 - DNA, 21 bp, Artificial sequence
  SiRNA target sequence
tatcgaataaattacaagatt

SEQ ID NO: 53716 - DNA, 21 bp, Artificial sequence
  SiRNA target sequence
atcgaataaattacaagattt

SEQ ID NO: 53717 - DNA, 21 bp, Artificial sequence
  SiRNA target sequence
tcgaataaattacaagatttt

SEQ ID NO: 53718 - DNA, 21 bp, Artificial sequence
  SiRNA target sequence
cgaataaattacaagattttt

SEQ ID NO: 53719 - DNA, 21 bp, Artificial sequence
  SiRNA target sequence
gaataaattacaagatttttt

SEQ ID NO: 53720 - DNA, 21 bp, Artificial sequence
  SiRNA target sequence
aataaattacaagatttttta

SEQ ID NO: 53721 - DNA, 21 bp, Artificial sequence
  SiRNA target sequence
ataaattacaagattttttag

SEQ ID NO: 53722 - DNA, 21 bp, Artificial sequence
  SiRNA target sequence
taaattacaagattttttagc

SEQ ID NO: 53723 - DNA, 21 bp, Artificial sequence
  SiRNA target sequence
aaattacaagattttttagct

SEQ ID NO: 53724 - DNA, 21 bp, Artificial sequence
  SiRNA target sequence
aattacaagattttttagcta

SEQ ID NO: 53725 - DNA, 21 bp, Artificial sequence
  SiRNA target sequence
attacaagattttttagctaa

SEQ ID NO: 53726 - DNA, 21 bp, Artificial sequence
  SiRNA target sequence
ttacaagattttttagctaat

SEQ ID NO: 53727 - DNA, 21 bp, Artificial sequence
  SiRNA target sequence
tacaagattttttagctaatc

SEQ ID NO: 53728 - DNA, 21 bp, Artificial sequence
  SiRNA target sequence
acaagattttttagctaatca

SEQ ID NO: 53729 - DNA, 21 bp, Artificial sequence
  SiRNA target sequence
caagattttttagctaatcat

SEQ ID NO: 53730 - DNA, 21 bp, Artificial sequence
  SiRNA target sequence
aagattttttagctaatcatg

SEQ ID NO: 53731 - DNA, 21 bp, Artificial sequence
  SiRNA target sequence
agattttttagctaatcatga

SEQ ID NO: 53732 - DNA, 21 bp, Artificial sequence
  SiRNA target sequence
gattttttagctaatcatgaa

SEQ ID NO: 53733 - DNA, 21 bp, Artificial sequence
  SiRNA target sequence
attttttagctaatcatgaaa

SEQ ID NO: 53734 - DNA, 21 bp, Artificial sequence
  SiRNA target sequence
ttttttagctaatcatgaaac

SEQ ID NO: 53735 - DNA, 21 bp, Artificial sequence
  SiRNA target sequence
tttttagctaatcatgaaaca

SEQ ID NO: 53736 - DNA, 21 bp, Artificial sequence
  SiRNA target sequence
ttttagctaatcatgaaacaa

SEQ ID NO: 53737 - DNA, 21 bp, Artificial sequence
  SiRNA target sequence
tttagctaatcatgaaacaat

SEQ ID NO: 53738 - DNA, 21 bp, Artificial sequence
  SiRNA target sequence
ttagctaatcatgaaacaatt

SEQ ID NO: 53739 - DNA, 21 bp, Artificial sequence
  SiRNA target sequence
tagctaatcatgaaacaatta

SEQ ID NO: 53740 - DNA, 21 bp, Artificial sequence
  SiRNA target sequence
agctaatcatgaaacaattaa

SEQ ID NO: 53741 - DNA, 21 bp, Artificial sequence
  SiRNA target sequence
gctaatcatgaaacaattaaa

SEQ ID NO: 53742 - DNA, 21 bp, Artificial sequence
  SiRNA target sequence
ctaatcatgaaacaattaaag

SEQ ID NO: 53743 - DNA, 21 bp, Artificial sequence
  SiRNA target sequence
taatcatgaaacaattaaagc

SEQ ID NO: 53744 - DNA, 21 bp, Artificial sequence
  SiRNA target sequence
aatcatgaaacaattaaagcc

SEQ ID NO: 53745 - DNA, 21 bp, Artificial sequence
  SiRNA target sequence
atcatgaaacaattaaagcct

SEQ ID NO: 53746 - DNA, 21 bp, Artificial sequence
  SiRNA target sequence
tcatgaaacaattaaagccta

SEQ ID NO: 53747 - DNA, 21 bp, Artificial sequence
  SiRNA target sequence
catgaaacaattaaagcctat

SEQ ID NO: 53748 - DNA, 21 bp, Artificial sequence
  SiRNA target sequence
atgaaacaattaaagcctata

SEQ ID NO: 53749 - DNA, 21 bp, Artificial sequence
  SiRNA target sequence
tgaaacaattaaagcctataa

SEQ ID NO: 53750 - DNA, 21 bp, Artificial sequence
  SiRNA target sequence
gaaacaattaaagcctataat

SEQ ID NO: 53751 - DNA, 21 bp, Artificial sequence
  SiRNA target sequence
aaacaattaaagcctataata

SEQ ID NO: 53752 - DNA, 21 bp, Artificial sequence
  SiRNA target sequence
aacaattaaagcctataatat

SEQ ID NO: 53753 - DNA, 21 bp, Artificial sequence
  SiRNA target sequence
acaattaaagcctataatatg

SEQ ID NO: 53754 - DNA, 21 bp, Artificial sequence
  SiRNA target sequence
caattaaagcctataatatgg

SEQ ID NO: 53755 - DNA, 21 bp, Artificial sequence
  SiRNA target sequence
aattaaagcctataatatgga

SEQ ID NO: 53756 - DNA, 21 bp, Artificial sequence
  SiRNA target sequence
attaaagcctataatatggaa

SEQ ID NO: 53757 - DNA, 21 bp, Artificial sequence
  SiRNA target sequence
ttaaagcctataatatggaag

SEQ ID NO: 53758 - DNA, 21 bp, Artificial sequence
  SiRNA target sequence
taaagcctataatatggaaga

SEQ ID NO: 53759 - DNA, 21 bp, Artificial sequence
  SiRNA target sequence
aaagcctataatatggaagaa

SEQ ID NO: 53760 - DNA, 21 bp, Artificial sequence
  SiRNA target sequence
aagcctataatatggaagaag

SEQ ID NO: 53761 - DNA, 21 bp, Artificial sequence
  SiRNA target sequence
agcctataatatggaagaaga

SEQ ID NO: 53762 - DNA, 21 bp, Artificial sequence
  SiRNA target sequence
gcctataatatggaagaagaa

SEQ ID NO: 53763 - DNA, 21 bp, Artificial sequence
  SiRNA target sequence
cctataatatggaagaagaaa

SEQ ID NO: 53764 - DNA, 21 bp, Artificial sequence
  SiRNA target sequence
ctataatatggaagaagaaac

SEQ ID NO: 53765 - DNA, 21 bp, Artificial sequence
  SiRNA target sequence
tataatatggaagaagaaact

SEQ ID NO: 53766 - DNA, 21 bp, Artificial sequence
  SiRNA target sequence
ataatatggaagaagaaacta

SEQ ID NO: 53767 - DNA, 21 bp, Artificial sequence
  SiRNA target sequence
taatatggaagaagaaactat

SEQ ID NO: 53768 - DNA, 21 bp, Artificial sequence
  SiRNA target sequence
aatatggaagaagaaactatt

SEQ ID NO: 53769 - DNA, 21 bp, Artificial sequence
  SiRNA target sequence
atatggaagaagaaactatta

SEQ ID NO: 53770 - DNA, 21 bp, Artificial sequence
  SiRNA target sequence
tatggaagaagaaactattac

SEQ ID NO: 53771 - DNA, 21 bp, Artificial sequence
  SiRNA target sequence
atggaagaagaaactattaca

SEQ ID NO: 53772 - DNA, 21 bp, Artificial sequence
  SiRNA target sequence
tggaagaagaaactattacat

SEQ ID NO: 53773 - DNA, 21 bp, Artificial sequence
  SiRNA target sequence
ggaagaagaaactattacata

SEQ ID NO: 53774 - DNA, 21 bp, Artificial sequence
  SiRNA target sequence
gaagaagaaactattacatat

SEQ ID NO: 53775 - DNA, 21 bp, Artificial sequence
  SiRNA target sequence
aagaagaaactattacatatt

SEQ ID NO: 53776 - DNA, 21 bp, Artificial sequence
  SiRNA target sequence
agaagaaactattacatattt

SEQ ID NO: 53777 - DNA, 21 bp, Artificial sequence
  SiRNA target sequence
gaagaaactattacatatttt

SEQ ID NO: 53778 - DNA, 21 bp, Artificial sequence
  SiRNA target sequence
aagaaactattacatattttg

SEQ ID NO: 53779 - DNA, 21 bp, Artificial sequence
  SiRNA target sequence
agaaactattacatattttga

SEQ ID NO: 53780 - DNA, 21 bp, Artificial sequence
  SiRNA target sequence
gaaactattacatattttgat

SEQ ID NO: 53781 - DNA, 21 bp, Artificial sequence
  SiRNA target sequence
aaactattacatattttgatg

SEQ ID NO: 53782 - DNA, 21 bp, Artificial sequence
  SiRNA target sequence
aactattacatattttgatga

SEQ ID NO: 53783 - DNA, 21 bp, Artificial sequence
  SiRNA target sequence
actattacatattttgatgaa

SEQ ID NO: 53784 - DNA, 21 bp, Artificial sequence
  SiRNA target sequence
ctattacatattttgatgaaa

SEQ ID NO: 53785 - DNA, 21 bp, Artificial sequence
  SiRNA target sequence
tattacatattttgatgaaaa

SEQ ID NO: 53786 - DNA, 21 bp, Artificial sequence
  SiRNA target sequence
attacatattttgatgaaaat

SEQ ID NO: 53787 - DNA, 21 bp, Artificial sequence
  SiRNA target sequence
ttacatattttgatgaaaatc

SEQ ID NO: 53788 - DNA, 21 bp, Artificial sequence
  SiRNA target sequence
tacatattttgatgaaaatca

SEQ ID NO: 53789 - DNA, 21 bp, Artificial sequence
  SiRNA target sequence
acatattttgatgaaaatcaa

SEQ ID NO: 53790 - DNA, 21 bp, Artificial sequence
  SiRNA target sequence
catattttgatgaaaatcaaa

SEQ ID NO: 53791 - DNA, 21 bp, Artificial sequence
  SiRNA target sequence
atattttgatgaaaatcaaaa

SEQ ID NO: 53792 - DNA, 21 bp, Artificial sequence
  SiRNA target sequence
tattttgatgaaaatcaaaaa

SEQ ID NO: 53793 - DNA, 21 bp, Artificial sequence
  SiRNA target sequence
attttgatgaaaatcaaaaac

SEQ ID NO: 53794 - DNA, 21 bp, Artificial sequence
  SiRNA target sequence
ttttgatgaaaatcaaaaacc

SEQ ID NO: 53795 - DNA, 21 bp, Artificial sequence
  SiRNA target sequence
tttgatgaaaatcaaaaaccg

SEQ ID NO: 53796 - DNA, 21 bp, Artificial sequence
  SiRNA target sequence
ttgatgaaaatcaaaaaccgg

SEQ ID NO: 53797 - DNA, 21 bp, Artificial sequence
  SiRNA target sequence
tgatgaaaatcaaaaaccggt

SEQ ID NO: 53798 - DNA, 21 bp, Artificial sequence
  SiRNA target sequence
gatgaaaatcaaaaaccggta

SEQ ID NO: 53799 - DNA, 21 bp, Artificial sequence
  SiRNA target sequence
atgaaaatcaaaaaccggtag

SEQ ID NO: 53800 - DNA, 21 bp, Artificial sequence
  SiRNA target sequence
tgaaaatcaaaaaccggtaga

SEQ ID NO: 53801 - DNA, 21 bp, Artificial sequence
  SiRNA target sequence
gaaaatcaaaaaccggtagaa

SEQ ID NO: 53802 - DNA, 21 bp, Artificial sequence
  SiRNA target sequence
aaaatcaaaaaccggtagaat

SEQ ID NO: 53803 - DNA, 21 bp, Artificial sequence
  SiRNA target sequence
aaatcaaaaaccggtagaata

SEQ ID NO: 53804 - DNA, 21 bp, Artificial sequence
  SiRNA target sequence
aatcaaaaaccggtagaatat

SEQ ID NO: 53805 - DNA, 21 bp, Artificial sequence
  SiRNA target sequence
atcaaaaaccggtagaatatt

SEQ ID NO: 53806 - DNA, 21 bp, Artificial sequence
  SiRNA target sequence
tcaaaaaccggtagaatattt

SEQ ID NO: 53807 - DNA, 21 bp, Artificial sequence
  SiRNA target sequence
caaaaaccggtagaatatttt

SEQ ID NO: 53808 - DNA, 21 bp, Artificial sequence
  SiRNA target sequence
aaaaaccggtagaatattttg

SEQ ID NO: 53809 - DNA, 21 bp, Artificial sequence
  SiRNA target sequence
aaaaccggtagaatattttgg

SEQ ID NO: 53810 - DNA, 21 bp, Artificial sequence
  SiRNA target sequence
aaaccggtagaatattttggg

SEQ ID NO: 53811 - DNA, 21 bp, Artificial sequence
  SiRNA target sequence
aaccggtagaatattttgggg

SEQ ID NO: 53812 - DNA, 21 bp, Artificial sequence
  SiRNA target sequence
accggtagaatattttggggt

SEQ ID NO: 53813 - DNA, 21 bp, Artificial sequence
  SiRNA target sequence
ccggtagaatattttggggta

SEQ ID NO: 53814 - DNA, 21 bp, Artificial sequence
  SiRNA target sequence
cggtagaatattttggggtaa

SEQ ID NO: 53815 - DNA, 21 bp, Artificial sequence
  SiRNA target sequence
ggtagaatattttggggtaaa

SEQ ID NO: 53816 - DNA, 21 bp, Artificial sequence
  SiRNA target sequence
gtagaatattttggggtaaag

SEQ ID NO: 53817 - DNA, 21 bp, Artificial sequence
  SiRNA target sequence
tagaatattttggggtaaagt

SEQ ID NO: 53818 - DNA, 21 bp, Artificial sequence
  SiRNA target sequence
agaatattttggggtaaagtc

SEQ ID NO: 53819 - DNA, 21 bp, Artificial sequence
  SiRNA target sequence
gaatattttggggtaaagtct

SEQ ID NO: 53820 - DNA, 21 bp, Artificial sequence
  SiRNA target sequence
aatattttggggtaaagtctc

SEQ ID NO: 53821 - DNA, 21 bp, Artificial sequence
  SiRNA target sequence
atattttggggtaaagtctca

SEQ ID NO: 53822 - DNA, 21 bp, Artificial sequence
  SiRNA target sequence
tattttggggtaaagtctcac

SEQ ID NO: 53823 - DNA, 21 bp, Artificial sequence
  SiRNA target sequence
attttggggtaaagtctcaca

SEQ ID NO: 53824 - DNA, 21 bp, Artificial sequence
  SiRNA target sequence
ttttggggtaaagtctcacag

SEQ ID NO: 53825 - DNA, 21 bp, Artificial sequence
  SiRNA target sequence
tttggggtaaagtctcacaga

SEQ ID NO: 53826 - DNA, 21 bp, Artificial sequence
  SiRNA target sequence
ttggggtaaagtctcacagaa

SEQ ID NO: 53827 - DNA, 21 bp, Artificial sequence
  SiRNA target sequence
tggggtaaagtctcacagaat

SEQ ID NO: 53828 - DNA, 21 bp, Artificial sequence
  SiRNA target sequence
ggggtaaagtctcacagaatt

SEQ ID NO: 53829 - DNA, 21 bp, Artificial sequence
  SiRNA target sequence
gggtaaagtctcacagaattt

SEQ ID NO: 53830 - DNA, 21 bp, Artificial sequence
  SiRNA target sequence
ggtaaagtctcacagaatttt

SEQ ID NO: 53831 - DNA, 21 bp, Artificial sequence
  SiRNA target sequence
gtaaagtctcacagaattttg

SEQ ID NO: 53832 - DNA, 21 bp, Artificial sequence
  SiRNA target sequence
taaagtctcacagaattttgt

SEQ ID NO: 53833 - DNA, 21 bp, Artificial sequence
  SiRNA target sequence
aaagtctcacagaattttgtt

SEQ ID NO: 53834 - DNA, 21 bp, Artificial sequence
  SiRNA target sequence
aagtctcacagaattttgttc

SEQ ID NO: 53835 - DNA, 21 bp, Artificial sequence
  SiRNA target sequence
agtctcacagaattttgttct

SEQ ID NO: 53836 - DNA, 21 bp, Artificial sequence
  SiRNA target sequence
gtctcacagaattttgttctc

SEQ ID NO: 53837 - DNA, 21 bp, Artificial sequence
  SiRNA target sequence
tctcacagaattttgttctct

SEQ ID NO: 53838 - DNA, 21 bp, Artificial sequence
  SiRNA target sequence
ctcacagaattttgttctctc

SEQ ID NO: 53839 - DNA, 21 bp, Artificial sequence
  SiRNA target sequence
tcacagaattttgttctctct

SEQ ID NO: 53840 - DNA, 21 bp, Artificial sequence
  SiRNA target sequence
cacagaattttgttctctctt

SEQ ID NO: 53841 - DNA, 21 bp, Artificial sequence
  SiRNA target sequence
acagaattttgttctctcttt

SEQ ID NO: 53842 - DNA, 21 bp, Artificial sequence
  SiRNA target sequence
cagaattttgttctctctttt

SEQ ID NO: 53843 - DNA, 21 bp, Artificial sequence
  SiRNA target sequence
agaattttgttctctctttta

SEQ ID NO: 53844 - DNA, 21 bp, Artificial sequence
  SiRNA target sequence
gaattttgttctctcttttat

SEQ ID NO: 53845 - DNA, 21 bp, Artificial sequence
  SiRNA target sequence
aattttgttctctcttttata

SEQ ID NO: 53846 - DNA, 21 bp, Artificial sequence
  SiRNA target sequence
attttgttctctcttttatat

SEQ ID NO: 53847 - DNA, 21 bp, Artificial sequence
  SiRNA target sequence
ttttgttctctcttttatata

SEQ ID NO: 53848 - DNA, 21 bp, Artificial sequence
  SiRNA target sequence
tttgttctctcttttatatat

SEQ ID NO: 53849 - DNA, 21 bp, Artificial sequence
  SiRNA target sequence
ttgttctctcttttatatata

SEQ ID NO: 53850 - DNA, 21 bp, Artificial sequence
  SiRNA target sequence
tgttctctcttttatatatac

SEQ ID NO: 53851 - DNA, 21 bp, Artificial sequence
  SiRNA target sequence
gttctctcttttatatataca

SEQ ID NO: 53852 - DNA, 21 bp, Artificial sequence
  SiRNA target sequence
ttctctcttttatatatacaa

SEQ ID NO: 53853 - DNA, 21 bp, Artificial sequence
  SiRNA target sequence
tctctcttttatatatacaaa

SEQ ID NO: 53854 - DNA, 21 bp, Artificial sequence
  SiRNA target sequence
ctctcttttatatatacaaaa

SEQ ID NO: 53855 - DNA, 21 bp, Artificial sequence
  SiRNA target sequence
tctcttttatatatacaaaaa

SEQ ID NO: 53856 - DNA, 21 bp, Artificial sequence
  SiRNA target sequence
ctcttttatatatacaaaaaa

SEQ ID NO: 53857 - DNA, 21 bp, Artificial sequence
  SiRNA target sequence
tcttttatatatacaaaaaat

SEQ ID NO: 53858 - DNA, 21 bp, Artificial sequence
  SiRNA target sequence
cttttatatatacaaaaaatg

SEQ ID NO: 53859 - DNA, 21 bp, Artificial sequence
  SiRNA target sequence
ttttatatatacaaaaaatga

SEQ ID NO: 53860 - DNA, 21 bp, Artificial sequence
  SiRNA target sequence
tttatatatacaaaaaatgac

SEQ ID NO: 53861 - DNA, 21 bp, Artificial sequence
  SiRNA target sequence
ttatatatacaaaaaatgaca

SEQ ID NO: 53862 - DNA, 21 bp, Artificial sequence
  SiRNA target sequence
tatatatacaaaaaatgacat

SEQ ID NO: 53863 - DNA, 21 bp, Artificial sequence
  SiRNA target sequence
atatatacaaaaaatgacatt

SEQ ID NO: 53864 - DNA, 21 bp, Artificial sequence
  SiRNA target sequence
tatatacaaaaaatgacattt

SEQ ID NO: 53865 - DNA, 21 bp, Artificial sequence
  SiRNA target sequence
atatacaaaaaatgacatttg

SEQ ID NO: 53866 - DNA, 21 bp, Artificial sequence
  SiRNA target sequence
tatacaaaaaatgacatttgc

SEQ ID NO: 53867 - DNA, 21 bp, Artificial sequence
  SiRNA target sequence
atacaaaaaatgacatttgcg

SEQ ID NO: 53868 - DNA, 21 bp, Artificial sequence
  SiRNA target sequence
tacaaaaaatgacatttgcga

SEQ ID NO: 53869 - DNA, 21 bp, Artificial sequence
  SiRNA target sequence
acaaaaaatgacatttgcgat

SEQ ID NO: 53870 - DNA, 21 bp, Artificial sequence
  SiRNA target sequence
caaaaaatgacatttgcgata

SEQ ID NO: 53871 - DNA, 21 bp, Artificial sequence
  SiRNA target sequence
aaaaaatgacatttgcgatac

SEQ ID NO: 53872 - DNA, 21 bp, Artificial sequence
  SiRNA target sequence
aaaaatgacatttgcgataca

SEQ ID NO: 53873 - DNA, 21 bp, Artificial sequence
  SiRNA target sequence
aaaatgacatttgcgatacag

SEQ ID NO: 53874 - DNA, 21 bp, Artificial sequence
  SiRNA target sequence
aaatgacatttgcgatacagg

SEQ ID NO: 53875 - DNA, 21 bp, Artificial sequence
  SiRNA target sequence
aatgacatttgcgatacaggc

SEQ ID NO: 53876 - DNA, 21 bp, Artificial sequence
  SiRNA target sequence
atgacatttgcgatacaggca

SEQ ID NO: 53877 - DNA, 21 bp, Artificial sequence
  SiRNA target sequence
tgacatttgcgatacaggcaa

SEQ ID NO: 53878 - DNA, 21 bp, Artificial sequence
  SiRNA target sequence
gacatttgcgatacaggcaat

SEQ ID NO: 53879 - DNA, 21 bp, Artificial sequence
  SiRNA target sequence
acatttgcgatacaggcaatt

SEQ ID NO: 53880 - DNA, 21 bp, Artificial sequence
  SiRNA target sequence
catttgcgatacaggcaatta

SEQ ID NO: 53881 - DNA, 21 bp, Artificial sequence
  SiRNA target sequence
atttgcgatacaggcaattat

SEQ ID NO: 53882 - DNA, 21 bp, Artificial sequence
  SiRNA target sequence
tttgcgatacaggcaattatt

SEQ ID NO: 53883 - DNA, 21 bp, Artificial sequence
  SiRNA target sequence
ttgcgatacaggcaattatta

SEQ ID NO: 53884 - DNA, 21 bp, Artificial sequence
  SiRNA target sequence
tgcgatacaggcaattattat

SEQ ID NO: 53885 - DNA, 21 bp, Artificial sequence
  SiRNA target sequence
gcgatacaggcaattattatt

SEQ ID NO: 53886 - DNA, 21 bp, Artificial sequence
  SiRNA target sequence
cgatacaggcaattattatta

SEQ ID NO: 53887 - DNA, 21 bp, Artificial sequence
  SiRNA target sequence
gatacaggcaattattattat

SEQ ID NO: 53888 - DNA, 21 bp, Artificial sequence
  SiRNA target sequence
atacaggcaattattattatc

SEQ ID NO: 53889 - DNA, 21 bp, Artificial sequence
  SiRNA target sequence
tacaggcaattattattatca

SEQ ID NO: 53890 - DNA, 21 bp, Artificial sequence
  SiRNA target sequence
acaggcaattattattatcac

SEQ ID NO: 53891 - DNA, 21 bp, Artificial sequence
  SiRNA target sequence
caggcaattattattatcaca

SEQ ID NO: 53892 - DNA, 21 bp, Artificial sequence
  SiRNA target sequence
aggcaattattattatcacat

SEQ ID NO: 53893 - DNA, 21 bp, Artificial sequence
  SiRNA target sequence
ggcaattattattatcacatt

SEQ ID NO: 53894 - DNA, 21 bp, Artificial sequence
  SiRNA target sequence
gcaattattattatcacatta

SEQ ID NO: 53895 - DNA, 21 bp, Artificial sequence
  SiRNA target sequence
caattattattatcacattag

SEQ ID NO: 53896 - DNA, 21 bp, Artificial sequence
  SiRNA target sequence
aattattattatcacattagg

SEQ ID NO: 53897 - DNA, 21 bp, Artificial sequence
  SiRNA target sequence
attattattatcacattagga

SEQ ID NO: 53898 - DNA, 21 bp, Artificial sequence
  SiRNA target sequence
ttattattatcacattaggat

SEQ ID NO: 53899 - DNA, 21 bp, Artificial sequence
  SiRNA target sequence
tattattatcacattaggatc

SEQ ID NO: 53900 - DNA, 21 bp, Artificial sequence
  SiRNA target sequence
attattatcacattaggatct

SEQ ID NO: 53901 - DNA, 21 bp, Artificial sequence
  SiRNA target sequence
ttattatcacattaggatctt

SEQ ID NO: 53902 - DNA, 21 bp, Artificial sequence
  SiRNA target sequence
tattatcacattaggatcttt

SEQ ID NO: 53903 - DNA, 21 bp, Artificial sequence
  SiRNA target sequence
attatcacattaggatctttt

SEQ ID NO: 53904 - DNA, 21 bp, Artificial sequence
  SiRNA target sequence
ttatcacattaggatcttttg

SEQ ID NO: 53905 - DNA, 21 bp, Artificial sequence
  SiRNA target sequence
tatcacattaggatcttttgg

SEQ ID NO: 53906 - DNA, 21 bp, Artificial sequence
  SiRNA target sequence
atcacattaggatcttttgga

SEQ ID NO: 53907 - DNA, 21 bp, Artificial sequence
  SiRNA target sequence
tcacattaggatcttttggat

SEQ ID NO: 53908 - DNA, 21 bp, Artificial sequence
  SiRNA target sequence
cacattaggatcttttggata

SEQ ID NO: 53909 - DNA, 21 bp, Artificial sequence
  SiRNA target sequence
acattaggatcttttggatat

SEQ ID NO: 53910 - DNA, 21 bp, Artificial sequence
  SiRNA target sequence
cattaggatcttttggatatt

SEQ ID NO: 53911 - DNA, 21 bp, Artificial sequence
  SiRNA target sequence
attaggatcttttggatattt

SEQ ID NO: 53912 - DNA, 21 bp, Artificial sequence
  SiRNA target sequence
ttaggatcttttggatatttt

SEQ ID NO: 53913 - DNA, 21 bp, Artificial sequence
  SiRNA target sequence
taggatcttttggatattttc

SEQ ID NO: 53914 - DNA, 21 bp, Artificial sequence
  SiRNA target sequence
aggatcttttggatattttcc

SEQ ID NO: 53915 - DNA, 21 bp, Artificial sequence
  SiRNA target sequence
ggatcttttggatattttccg

SEQ ID NO: 53916 - DNA, 21 bp, Artificial sequence
  SiRNA target sequence
gatcttttggatattttccga

SEQ ID NO: 53917 - DNA, 21 bp, Artificial sequence
  SiRNA target sequence
atcttttggatattttccgat

SEQ ID NO: 53918 - DNA, 21 bp, Artificial sequence
  SiRNA target sequence
tcttttggatattttccgatt

SEQ ID NO: 53919 - DNA, 21 bp, Artificial sequence
  SiRNA target sequence
cttttggatattttccgatta

SEQ ID NO: 53920 - DNA, 21 bp, Artificial sequence
  SiRNA target sequence
ttttggatattttccgattaa

SEQ ID NO: 53921 - DNA, 21 bp, Artificial sequence
  SiRNA target sequence
tttggatattttccgattaaa

SEQ ID NO: 53922 - DNA, 21 bp, Artificial sequence
  SiRNA target sequence
ttggatattttccgattaaat

SEQ ID NO: 53923 - DNA, 21 bp, Artificial sequence
  SiRNA target sequence
tggatattttccgattaaatt

SEQ ID NO: 53924 - DNA, 21 bp, Artificial sequence
  SiRNA target sequence
ggatattttccgattaaatta

SEQ ID NO: 53925 - DNA, 21 bp, Artificial sequence
  SiRNA target sequence
gatattttccgattaaattat

SEQ ID NO: 53926 - DNA, 21 bp, Artificial sequence
  SiRNA target sequence
atattttccgattaaattatc

SEQ ID NO: 53927 - DNA, 21 bp, Artificial sequence
  SiRNA target sequence
tattttccgattaaattatcc

SEQ ID NO: 53928 - DNA, 21 bp, Artificial sequence
  SiRNA target sequence
attttccgattaaattatcct

SEQ ID NO: 53929 - DNA, 21 bp, Artificial sequence
  SiRNA target sequence
ttttccgattaaattatcctc

SEQ ID NO: 53930 - DNA, 21 bp, Artificial sequence
  SiRNA target sequence
tttccgattaaattatcctct

SEQ ID NO: 53931 - DNA, 21 bp, Artificial sequence
  SiRNA target sequence
ttccgattaaattatcctctc

SEQ ID NO: 53932 - DNA, 21 bp, Artificial sequence
  SiRNA target sequence
tccgattaaattatcctctca

SEQ ID NO: 53933 - DNA, 21 bp, Artificial sequence
  SiRNA target sequence
ccgattaaattatcctctcaa

SEQ ID NO: 53934 - DNA, 21 bp, Artificial sequence
  SiRNA target sequence
cgattaaattatcctctcaac

SEQ ID NO: 53935 - DNA, 21 bp, Artificial sequence
  SiRNA target sequence
gattaaattatcctctcaaca

SEQ ID NO: 53936 - DNA, 21 bp, Artificial sequence
  SiRNA target sequence
attaaattatcctctcaacag

SEQ ID NO: 53937 - DNA, 21 bp, Artificial sequence
  SiRNA target sequence
ttaaattatcctctcaacagt

SEQ ID NO: 53938 - DNA, 21 bp, Artificial sequence
  SiRNA target sequence
taaattatcctctcaacagtt

SEQ ID NO: 53939 - DNA, 21 bp, Artificial sequence
  SiRNA target sequence
aaattatcctctcaacagtta

SEQ ID NO: 53940 - DNA, 21 bp, Artificial sequence
  SiRNA target sequence
aattatcctctcaacagttag

SEQ ID NO: 53941 - DNA, 21 bp, Artificial sequence
  SiRNA target sequence
attatcctctcaacagttagt

SEQ ID NO: 53942 - DNA, 21 bp, Artificial sequence
  SiRNA target sequence
ttatcctctcaacagttagtc

SEQ ID NO: 53943 - DNA, 21 bp, Artificial sequence
  SiRNA target sequence
tatcctctcaacagttagtct

SEQ ID NO: 53944 - DNA, 21 bp, Artificial sequence
  SiRNA target sequence
atcctctcaacagttagtctt

SEQ ID NO: 53945 - DNA, 21 bp, Artificial sequence
  SiRNA target sequence
tcctctcaacagttagtcttt

SEQ ID NO: 53946 - DNA, 21 bp, Artificial sequence
  SiRNA target sequence
cctctcaacagttagtctttt

SEQ ID NO: 53947 - DNA, 21 bp, Artificial sequence
  SiRNA target sequence
ctctcaacagttagtctttta

SEQ ID NO: 53948 - DNA, 21 bp, Artificial sequence
  SiRNA target sequence
tctcaacagttagtcttttat

SEQ ID NO: 53949 - DNA, 21 bp, Artificial sequence
  SiRNA target sequence
ctcaacagttagtcttttata

SEQ ID NO: 53950 - DNA, 21 bp, Artificial sequence
  SiRNA target sequence
tcaacagttagtcttttatat

SEQ ID NO: 53951 - DNA, 21 bp, Artificial sequence
  SiRNA target sequence
caacagttagtcttttatatt

SEQ ID NO: 53952 - DNA, 21 bp, Artificial sequence
  SiRNA target sequence
aacagttagtcttttatattt

SEQ ID NO: 53953 - DNA, 21 bp, Artificial sequence
  SiRNA target sequence
acagttagtcttttatatttc

SEQ ID NO: 53954 - DNA, 21 bp, Artificial sequence
  SiRNA target sequence
cagttagtcttttatatttcg

SEQ ID NO: 53955 - DNA, 21 bp, Artificial sequence
  SiRNA target sequence
agttagtcttttatatttcga

SEQ ID NO: 53956 - DNA, 21 bp, Artificial sequence
  SiRNA target sequence
gttagtcttttatatttcgat

SEQ ID NO: 53957 - DNA, 21 bp, Artificial sequence
  SiRNA target sequence
ttagtcttttatatttcgatt

SEQ ID NO: 53958 - DNA, 21 bp, Artificial sequence
  SiRNA target sequence
tagtcttttatatttcgatta

SEQ ID NO: 53959 - DNA, 21 bp, Artificial sequence
  SiRNA target sequence
agtcttttatatttcgattag

SEQ ID NO: 53960 - DNA, 21 bp, Artificial sequence
  SiRNA target sequence
gtcttttatatttcgattagt

SEQ ID NO: 53961 - DNA, 21 bp, Artificial sequence
  SiRNA target sequence
tcttttatatttcgattagta

SEQ ID NO: 53962 - DNA, 21 bp, Artificial sequence
  SiRNA target sequence
cttttatatttcgattagtaa

SEQ ID NO: 53963 - DNA, 21 bp, Artificial sequence
  SiRNA target sequence
ttttatatttcgattagtaaa

SEQ ID NO: 53964 - DNA, 21 bp, Artificial sequence
  SiRNA target sequence
tttatatttcgattagtaaaa

SEQ ID NO: 53965 - DNA, 21 bp, Artificial sequence
  SiRNA target sequence
ttatatttcgattagtaaaac

SEQ ID NO: 53966 - DNA, 21 bp, Artificial sequence
  SiRNA target sequence
tatatttcgattagtaaaacg

SEQ ID NO: 53967 - DNA, 21 bp, Artificial sequence
  SiRNA target sequence
atatttcgattagtaaaacgt

SEQ ID NO: 53968 - DNA, 21 bp, Artificial sequence
  SiRNA target sequence
tatttcgattagtaaaacgtt

SEQ ID NO: 53969 - DNA, 21 bp, Artificial sequence
  SiRNA target sequence
atttcgattagtaaaacgttg

SEQ ID NO: 53970 - DNA, 21 bp, Artificial sequence
  SiRNA target sequence
tttcgattagtaaaacgttga

SEQ ID NO: 53971 - DNA, 21 bp, Artificial sequence
  SiRNA target sequence
ttcgattagtaaaacgttgac

SEQ ID NO: 53972 - DNA, 21 bp, Artificial sequence
  SiRNA target sequence
tcgattagtaaaacgttgaca

SEQ ID NO: 53973 - DNA, 21 bp, Artificial sequence
  SiRNA target sequence
cgattagtaaaacgttgacaa

SEQ ID NO: 53974 - DNA, 21 bp, Artificial sequence
  SiRNA target sequence
gattagtaaaacgttgacaaa

SEQ ID NO: 53975 - DNA, 21 bp, Artificial sequence
  SiRNA target sequence
attagtaaaacgttgacaaat

SEQ ID NO: 53976 - DNA, 21 bp, Artificial sequence
  SiRNA target sequence
ttagtaaaacgttgacaaatt

SEQ ID NO: 53977 - DNA, 21 bp, Artificial sequence
  SiRNA target sequence
tagtaaaacgttgacaaattc

SEQ ID NO: 53978 - DNA, 21 bp, Artificial sequence
  SiRNA target sequence
agtaaaacgttgacaaattcg

SEQ ID NO: 53979 - DNA, 21 bp, Artificial sequence
  SiRNA target sequence
gtaaaacgttgacaaattcgt

SEQ ID NO: 53980 - DNA, 21 bp, Artificial sequence
  SiRNA target sequence
taaaacgttgacaaattcgtt

SEQ ID NO: 53981 - DNA, 21 bp, Artificial sequence
  SiRNA target sequence
aaaacgttgacaaattcgttg

SEQ ID NO: 53982 - DNA, 21 bp, Artificial sequence
  SiRNA target sequence
aaacgttgacaaattcgttga

SEQ ID NO: 53983 - DNA, 21 bp, Artificial sequence
  SiRNA target sequence
aacgttgacaaattcgttgag

SEQ ID NO: 53984 - DNA, 21 bp, Artificial sequence
  SiRNA target sequence
acgttgacaaattcgttgagc

SEQ ID NO: 53985 - DNA, 21 bp, Artificial sequence
  SiRNA target sequence
cgttgacaaattcgttgagcg

SEQ ID NO: 53986 - DNA, 21 bp, Artificial sequence
  SiRNA target sequence
gttgacaaattcgttgagcga

SEQ ID NO: 53987 - DNA, 21 bp, Artificial sequence
  SiRNA target sequence
ttgacaaattcgttgagcgaa

SEQ ID NO: 53988 - DNA, 21 bp, Artificial sequence
  SiRNA target sequence
tgacaaattcgttgagcgaaa

SEQ ID NO: 53989 - DNA, 21 bp, Artificial sequence
  SiRNA target sequence
gacaaattcgttgagcgaaat

SEQ ID NO: 53990 - DNA, 21 bp, Artificial sequence
  SiRNA target sequence
acaaattcgttgagcgaaatg

SEQ ID NO: 53991 - DNA, 21 bp, Artificial sequence
  SiRNA target sequence
caaattcgttgagcgaaatgg

SEQ ID NO: 53992 - DNA, 21 bp, Artificial sequence
  SiRNA target sequence
aaattcgttgagcgaaatggg

SEQ ID NO: 53993 - DNA, 21 bp, Artificial sequence
  SiRNA target sequence
aattcgttgagcgaaatggga

SEQ ID NO: 53994 - DNA, 21 bp, Artificial sequence
  SiRNA target sequence
attcgttgagcgaaatgggaa

SEQ ID NO: 53995 - DNA, 21 bp, Artificial sequence
  SiRNA target sequence
ttcgttgagcgaaatgggaat

SEQ ID NO: 53996 - DNA, 21 bp, Artificial sequence
  SiRNA target sequence
tcgttgagcgaaatgggaatg

SEQ ID NO: 53997 - DNA, 21 bp, Artificial sequence
  SiRNA target sequence
cgttgagcgaaatgggaatgc

SEQ ID NO: 53998 - DNA, 21 bp, Artificial sequence
  SiRNA target sequence
gttgagcgaaatgggaatgct

SEQ ID NO: 53999 - DNA, 21 bp, Artificial sequence
  SiRNA target sequence
ttgagcgaaatgggaatgcta

SEQ ID NO: 54000 - DNA, 21 bp, Artificial sequence
  SiRNA target sequence
tgagcgaaatgggaatgctat

SEQ ID NO: 54001 - DNA, 21 bp, Artificial sequence
  SiRNA target sequence
gagcgaaatgggaatgctata

SEQ ID NO: 54002 - DNA, 21 bp, Artificial sequence
  SiRNA target sequence
agcgaaatgggaatgctatac

SEQ ID NO: 54003 - DNA, 21 bp, Artificial sequence
  SiRNA target sequence
gcgaaatgggaatgctataca

SEQ ID NO: 54004 - DNA, 21 bp, Artificial sequence
  SiRNA target sequence
cgaaatgggaatgctatacac

SEQ ID NO: 54005 - DNA, 21 bp, Artificial sequence
  SiRNA target sequence
gaaatgggaatgctatacaca

SEQ ID NO: 54006 - DNA, 21 bp, Artificial sequence
  SiRNA target sequence
aaatgggaatgctatacacaa

SEQ ID NO: 54007 - DNA, 21 bp, Artificial sequence
  SiRNA target sequence
aatgggaatgctatacacaag

SEQ ID NO: 54008 - DNA, 21 bp, Artificial sequence
  SiRNA target sequence
atgggaatgctatacacaaga

SEQ ID NO: 54009 - DNA, 21 bp, Artificial sequence
  SiRNA target sequence
tgggaatgctatacacaagat

SEQ ID NO: 54010 - DNA, 21 bp, Artificial sequence
  SiRNA target sequence
gggaatgctatacacaagata

SEQ ID NO: 54011 - DNA, 21 bp, Artificial sequence
  SiRNA target sequence
ggaatgctatacacaagatat

SEQ ID NO: 54012 - DNA, 21 bp, Artificial sequence
  SiRNA target sequence
gaatgctatacacaagatatg

SEQ ID NO: 54013 - DNA, 21 bp, Artificial sequence
  SiRNA target sequence
aatgctatacacaagatatgt

SEQ ID NO: 54014 - DNA, 21 bp, Artificial sequence
  SiRNA target sequence
atgctatacacaagatatgta

SEQ ID NO: 54015 - DNA, 21 bp, Artificial sequence
  SiRNA target sequence
tgctatacacaagatatgtac

SEQ ID NO: 54016 - DNA, 21 bp, Artificial sequence
  SiRNA target sequence
gctatacacaagatatgtaca

SEQ ID NO: 54017 - DNA, 21 bp, Artificial sequence
  SiRNA target sequence
ctatacacaagatatgtacaa

SEQ ID NO: 54018 - DNA, 21 bp, Artificial sequence
  SiRNA target sequence
tatacacaagatatgtacaag

SEQ ID NO: 54019 - DNA, 21 bp, Artificial sequence
  SiRNA target sequence
atacacaagatatgtacaagg

SEQ ID NO: 54020 - DNA, 21 bp, Artificial sequence
  SiRNA target sequence
tacacaagatatgtacaagga

SEQ ID NO: 54021 - DNA, 21 bp, Artificial sequence
  SiRNA target sequence
acacaagatatgtacaaggat

SEQ ID NO: 54022 - DNA, 21 bp, Artificial sequence
  SiRNA target sequence
cacaagatatgtacaaggatt

SEQ ID NO: 54023 - DNA, 21 bp, Artificial sequence
  SiRNA target sequence
acaagatatgtacaaggattt

SEQ ID NO: 54024 - DNA, 21 bp, Artificial sequence
  SiRNA target sequence
caagatatgtacaaggatttt

SEQ ID NO: 54025 - DNA, 21 bp, Artificial sequence
  SiRNA target sequence
aagatatgtacaaggattttt

SEQ ID NO: 54026 - DNA, 21 bp, Artificial sequence
  SiRNA target sequence
agatatgtacaaggattttta

SEQ ID NO: 54027 - DNA, 21 bp, Artificial sequence
  SiRNA target sequence
gatatgtacaaggatttttaa

SEQ ID NO: 54028 - DNA, 21 bp, Artificial sequence
  SiRNA target sequence
atatgtacaaggatttttaaa

SEQ ID NO: 54029 - DNA, 21 bp, Artificial sequence
  SiRNA target sequence
tatgtacaaggatttttaaat

SEQ ID NO: 54030 - DNA, 21 bp, Artificial sequence
  SiRNA target sequence
atgtacaaggatttttaaatg

SEQ ID NO: 54031 - DNA, 21 bp, Artificial sequence
  SiRNA target sequence
tgtacaaggatttttaaatgc

SEQ ID NO: 54032 - DNA, 21 bp, Artificial sequence
  SiRNA target sequence
gtacaaggatttttaaatgca

SEQ ID NO: 54033 - DNA, 21 bp, Artificial sequence
  SiRNA target sequence
tacaaggatttttaaatgcaa

SEQ ID NO: 54034 - DNA, 21 bp, Artificial sequence
  SiRNA target sequence
acaaggatttttaaatgcaaa

SEQ ID NO: 54035 - DNA, 21 bp, Artificial sequence
  SiRNA target sequence
caaggatttttaaatgcaaag

SEQ ID NO: 54036 - DNA, 21 bp, Artificial sequence
  SiRNA target sequence
aaggatttttaaatgcaaagt

SEQ ID NO: 54037 - DNA, 21 bp, Artificial sequence
  SiRNA target sequence
aggatttttaaatgcaaagtc

SEQ ID NO: 54038 - DNA, 21 bp, Artificial sequence
  SiRNA target sequence
ggatttttaaatgcaaagtct

SEQ ID NO: 54039 - DNA, 21 bp, Artificial sequence
  SiRNA target sequence
gatttttaaatgcaaagtctg

SEQ ID NO: 54040 - DNA, 21 bp, Artificial sequence
  SiRNA target sequence
atttttaaatgcaaagtctgg

SEQ ID NO: 54041 - DNA, 21 bp, Artificial sequence
  SiRNA target sequence
tttttaaatgcaaagtctgga

SEQ ID NO: 54042 - DNA, 21 bp, Artificial sequence
  SiRNA target sequence
ttttaaatgcaaagtctggat

SEQ ID NO: 54043 - DNA, 21 bp, Artificial sequence
  SiRNA target sequence
tttaaatgcaaagtctggata

SEQ ID NO: 54044 - DNA, 21 bp, Artificial sequence
  SiRNA target sequence
ttaaatgcaaagtctggatat

SEQ ID NO: 54045 - DNA, 21 bp, Artificial sequence
  SiRNA target sequence
taaatgcaaagtctggatatt

SEQ ID NO: 54046 - DNA, 21 bp, Artificial sequence
  SiRNA target sequence
aaatgcaaagtctggatatta

SEQ ID NO: 54047 - DNA, 21 bp, Artificial sequence
  SiRNA target sequence
aatgcaaagtctggatattac

SEQ ID NO: 54048 - DNA, 21 bp, Artificial sequence
  SiRNA target sequence
atgcaaagtctggatattacg

SEQ ID NO: 54049 - DNA, 21 bp, Artificial sequence
  SiRNA target sequence
tgcaaagtctggatattacga

SEQ ID NO: 54050 - DNA, 21 bp, Artificial sequence
  SiRNA target sequence
gcaaagtctggatattacgag

SEQ ID NO: 54051 - DNA, 21 bp, Artificial sequence
  SiRNA target sequence
caaagtctggatattacgagt

SEQ ID NO: 54052 - DNA, 21 bp, Artificial sequence
  SiRNA target sequence
aaagtctggatattacgagtt

SEQ ID NO: 54053 - DNA, 21 bp, Artificial sequence
  SiRNA target sequence
aagtctggatattacgagttt

SEQ ID NO: 54054 - DNA, 21 bp, Artificial sequence
  SiRNA target sequence
agtctggatattacgagttta

SEQ ID NO: 54055 - DNA, 21 bp, Artificial sequence
  SiRNA target sequence
gtctggatattacgagtttaa

SEQ ID NO: 54056 - DNA, 21 bp, Artificial sequence
  SiRNA target sequence
tctggatattacgagtttaaa

SEQ ID NO: 54057 - DNA, 21 bp, Artificial sequence
  SiRNA target sequence
ctggatattacgagtttaaag

SEQ ID NO: 54058 - DNA, 21 bp, Artificial sequence
  SiRNA target sequence
tggatattacgagtttaaaga

SEQ ID NO: 54059 - DNA, 21 bp, Artificial sequence
  SiRNA target sequence
ggatattacgagtttaaagag

SEQ ID NO: 54060 - DNA, 21 bp, Artificial sequence
  SiRNA target sequence
gatattacgagtttaaagagg

SEQ ID NO: 54061 - DNA, 21 bp, Artificial sequence
  SiRNA target sequence
atattacgagtttaaagagga

SEQ ID NO: 54062 - DNA, 21 bp, Artificial sequence
  SiRNA target sequence
tattacgagtttaaagaggat

SEQ ID NO: 54063 - DNA, 21 bp, Artificial sequence
  SiRNA target sequence
attacgagtttaaagaggata

SEQ ID NO: 54064 - DNA, 21 bp, Artificial sequence
  SiRNA target sequence
ttacgagtttaaagaggatac

SEQ ID NO: 54065 - DNA, 21 bp, Artificial sequence
  SiRNA target sequence
tacgagtttaaagaggataca

SEQ ID NO: 54066 - DNA, 21 bp, Artificial sequence
  SiRNA target sequence
acgagtttaaagaggatacac

SEQ ID NO: 54067 - DNA, 21 bp, Artificial sequence
  SiRNA target sequence
cgagtttaaagaggatacaca

SEQ ID NO: 54068 - DNA, 21 bp, Artificial sequence
  SiRNA target sequence
gagtttaaagaggatacacaa

SEQ ID NO: 54069 - DNA, 21 bp, Artificial sequence
  SiRNA target sequence
agtttaaagaggatacacaaa

SEQ ID NO: 54070 - DNA, 21 bp, Artificial sequence
  SiRNA target sequence
gtttaaagaggatacacaaac

SEQ ID NO: 54071 - DNA, 21 bp, Artificial sequence
  SiRNA target sequence
tttaaagaggatacacaaact

SEQ ID NO: 54072 - DNA, 21 bp, Artificial sequence
  SiRNA target sequence
ttaaagaggatacacaaactg

SEQ ID NO: 54073 - DNA, 21 bp, Artificial sequence
  SiRNA target sequence
taaagaggatacacaaactga

SEQ ID NO: 54074 - DNA, 21 bp, Artificial sequence
  SiRNA target sequence
aaagaggatacacaaactgat

SEQ ID NO: 54075 - DNA, 21 bp, Artificial sequence
  SiRNA target sequence
aagaggatacacaaactgata

SEQ ID NO: 54076 - DNA, 21 bp, Artificial sequence
  SiRNA target sequence
agaggatacacaaactgataa

SEQ ID NO: 54077 - DNA, 21 bp, Artificial sequence
  SiRNA target sequence
gaggatacacaaactgataaa

SEQ ID NO: 54078 - DNA, 21 bp, Artificial sequence
  SiRNA target sequence
aggatacacaaactgataaaa

SEQ ID NO: 54079 - DNA, 21 bp, Artificial sequence
  SiRNA target sequence
ggatacacaaactgataaaat

SEQ ID NO: 54080 - DNA, 21 bp, Artificial sequence
  SiRNA target sequence
gatacacaaactgataaaata

SEQ ID NO: 54081 - DNA, 21 bp, Artificial sequence
  SiRNA target sequence
atacacaaactgataaaataa

SEQ ID NO: 54082 - DNA, 21 bp, Artificial sequence
  SiRNA target sequence
tacacaaactgataaaataag

SEQ ID NO: 54083 - DNA, 21 bp, Artificial sequence
  SiRNA target sequence
acacaaactgataaaataaga

SEQ ID NO: 54084 - DNA, 21 bp, Artificial sequence
  SiRNA target sequence
cacaaactgataaaataagac

SEQ ID NO: 54085 - DNA, 21 bp, Artificial sequence
  SiRNA target sequence
acaaactgataaaataagact

SEQ ID NO: 54086 - DNA, 21 bp, Artificial sequence
  SiRNA target sequence
caaactgataaaataagactg

SEQ ID NO: 54087 - DNA, 21 bp, Artificial sequence
  SiRNA target sequence
aaactgataaaataagactga

SEQ ID NO: 54088 - DNA, 21 bp, Artificial sequence
  SiRNA target sequence
aactgataaaataagactgat

SEQ ID NO: 54089 - DNA, 21 bp, Artificial sequence
  SiRNA target sequence
actgataaaataagactgata

SEQ ID NO: 54090 - DNA, 21 bp, Artificial sequence
  SiRNA target sequence
ctgataaaataagactgatag

SEQ ID NO: 54091 - DNA, 21 bp, Artificial sequence
  SiRNA target sequence
tgataaaataagactgataga

SEQ ID NO: 54092 - DNA, 21 bp, Artificial sequence
  SiRNA target sequence
gataaaataagactgatagat

SEQ ID NO: 54093 - DNA, 21 bp, Artificial sequence
  SiRNA target sequence
ataaaataagactgatagatt

SEQ ID NO: 54094 - DNA, 21 bp, Artificial sequence
  SiRNA target sequence
taaaataagactgatagattt

SEQ ID NO: 54095 - DNA, 21 bp, Artificial sequence
  SiRNA target sequence
aaaataagactgatagatttt

SEQ ID NO: 54096 - DNA, 21 bp, Artificial sequence
  SiRNA target sequence
aaataagactgatagatttta

SEQ ID NO: 54097 - DNA, 21 bp, Artificial sequence
  SiRNA target sequence
aataagactgatagattttaa

SEQ ID NO: 54098 - DNA, 21 bp, Artificial sequence
  SiRNA target sequence
ataagactgatagattttaat

SEQ ID NO: 54099 - DNA, 21 bp, Artificial sequence
  SiRNA target sequence
taagactgatagattttaatg

SEQ ID NO: 54100 - DNA, 21 bp, Artificial sequence
  SiRNA target sequence
aagactgatagattttaatga

SEQ ID NO: 54101 - DNA, 21 bp, Artificial sequence
  SiRNA target sequence
agactgatagattttaatgaa

SEQ ID NO: 54102 - DNA, 21 bp, Artificial sequence
  SiRNA target sequence
gactgatagattttaatgaaa

SEQ ID NO: 54103 - DNA, 21 bp, Artificial sequence
  SiRNA target sequence
actgatagattttaatgaaaa

SEQ ID NO: 54104 - DNA, 21 bp, Artificial sequence
  SiRNA target sequence
ctgatagattttaatgaaaag

SEQ ID NO: 54105 - DNA, 21 bp, Artificial sequence
  SiRNA target sequence
tgatagattttaatgaaaagc

SEQ ID NO: 54106 - DNA, 21 bp, Artificial sequence
  SiRNA target sequence
gatagattttaatgaaaagct

SEQ ID NO: 54107 - DNA, 21 bp, Artificial sequence
  SiRNA target sequence
atagattttaatgaaaagcta

SEQ ID NO: 54108 - DNA, 21 bp, Artificial sequence
  SiRNA target sequence
tagattttaatgaaaagctag

SEQ ID NO: 54109 - DNA, 21 bp, Artificial sequence
  SiRNA target sequence
agattttaatgaaaagctaga

SEQ ID NO: 54110 - DNA, 21 bp, Artificial sequence
  SiRNA target sequence
gattttaatgaaaagctagaa

SEQ ID NO: 54111 - DNA, 21 bp, Artificial sequence
  SiRNA target sequence
attttaatgaaaagctagaat

SEQ ID NO: 54112 - DNA, 21 bp, Artificial sequence
  SiRNA target sequence
ttttaatgaaaagctagaatt

SEQ ID NO: 54113 - DNA, 21 bp, Artificial sequence
  SiRNA target sequence
tttaatgaaaagctagaattt

SEQ ID NO: 54114 - DNA, 21 bp, Artificial sequence
  SiRNA target sequence
ttaatgaaaagctagaattta

SEQ ID NO: 54115 - DNA, 21 bp, Artificial sequence
  SiRNA target sequence
taatgaaaagctagaatttag

SEQ ID NO: 54116 - DNA, 21 bp, Artificial sequence
  SiRNA target sequence
aatgaaaagctagaatttaga

SEQ ID NO: 54117 - DNA, 21 bp, Artificial sequence
  SiRNA target sequence
atgaaaagctagaatttagaa

SEQ ID NO: 54118 - DNA, 21 bp, Artificial sequence
  SiRNA target sequence
tgaaaagctagaatttagaaa

SEQ ID NO: 54119 - DNA, 21 bp, Artificial sequence
  SiRNA target sequence
gaaaagctagaatttagaaat

SEQ ID NO: 54120 - DNA, 21 bp, Artificial sequence
  SiRNA target sequence
aaaagctagaatttagaaatg

SEQ ID NO: 54121 - DNA, 21 bp, Artificial sequence
  SiRNA target sequence
aaagctagaatttagaaatgt

SEQ ID NO: 54122 - DNA, 21 bp, Artificial sequence
  SiRNA target sequence
aagctagaatttagaaatgta

SEQ ID NO: 54123 - DNA, 21 bp, Artificial sequence
  SiRNA target sequence
agctagaatttagaaatgtat

SEQ ID NO: 54124 - DNA, 21 bp, Artificial sequence
  SiRNA target sequence
gctagaatttagaaatgtatc

SEQ ID NO: 54125 - DNA, 21 bp, Artificial sequence
  SiRNA target sequence
ctagaatttagaaatgtatct

SEQ ID NO: 54126 - DNA, 21 bp, Artificial sequence
  SiRNA target sequence
tagaatttagaaatgtatctt

SEQ ID NO: 54127 - DNA, 21 bp, Artificial sequence
  SiRNA target sequence
agaatttagaaatgtatcttt

SEQ ID NO: 54128 - DNA, 21 bp, Artificial sequence
  SiRNA target sequence
gaatttagaaatgtatctttt

SEQ ID NO: 54129 - DNA, 21 bp, Artificial sequence
  SiRNA target sequence
aatttagaaatgtatctttta

SEQ ID NO: 54130 - DNA, 21 bp, Artificial sequence
  SiRNA target sequence
atttagaaatgtatcttttag

SEQ ID NO: 54131 - DNA, 21 bp, Artificial sequence
  SiRNA target sequence
tttagaaatgtatcttttagt

SEQ ID NO: 54132 - DNA, 21 bp, Artificial sequence
  SiRNA target sequence
ttagaaatgtatcttttagtt

SEQ ID NO: 54133 - DNA, 21 bp, Artificial sequence
  SiRNA target sequence
tagaaatgtatcttttagtta

SEQ ID NO: 54134 - DNA, 21 bp, Artificial sequence
  SiRNA target sequence
agaaatgtatcttttagttat

SEQ ID NO: 54135 - DNA, 21 bp, Artificial sequence
  SiRNA target sequence
gaaatgtatcttttagttatt

SEQ ID NO: 54136 - DNA, 21 bp, Artificial sequence
  SiRNA target sequence
aaatgtatcttttagttattt

SEQ ID NO: 54137 - DNA, 21 bp, Artificial sequence
  SiRNA target sequence
aatgtatcttttagttattta

SEQ ID NO: 54138 - DNA, 21 bp, Artificial sequence
  SiRNA target sequence
atgtatcttttagttatttaa

SEQ ID NO: 54139 - DNA, 21 bp, Artificial sequence
  SiRNA target sequence
tgtatcttttagttatttaaa

SEQ ID NO: 54140 - DNA, 21 bp, Artificial sequence
  SiRNA target sequence
gtatcttttagttatttaaat

SEQ ID NO: 54141 - DNA, 21 bp, Artificial sequence
  SiRNA target sequence
tatcttttagttatttaaata

SEQ ID NO: 54142 - DNA, 21 bp, Artificial sequence
  SiRNA target sequence
atcttttagttatttaaataa

SEQ ID NO: 54143 - DNA, 21 bp, Artificial sequence
  SiRNA target sequence
tcttttagttatttaaataag

SEQ ID NO: 54144 - DNA, 21 bp, Artificial sequence
  SiRNA target sequence
cttttagttatttaaataagc

SEQ ID NO: 54145 - DNA, 21 bp, Artificial sequence
  SiRNA target sequence
ttttagttatttaaataagcc

SEQ ID NO: 54146 - DNA, 21 bp, Artificial sequence
  SiRNA target sequence
tttagttatttaaataagcct

SEQ ID NO: 54147 - DNA, 21 bp, Artificial sequence
  SiRNA target sequence
ttagttatttaaataagccta

SEQ ID NO: 54148 - DNA, 21 bp, Artificial sequence
  SiRNA target sequence
tagttatttaaataagcctat

SEQ ID NO: 54149 - DNA, 21 bp, Artificial sequence
  SiRNA target sequence
agttatttaaataagcctatt

SEQ ID NO: 54150 - DNA, 21 bp, Artificial sequence
  SiRNA target sequence
gttatttaaataagcctattt

SEQ ID NO: 54151 - DNA, 21 bp, Artificial sequence
  SiRNA target sequence
ttatttaaataagcctatttt

SEQ ID NO: 54152 - DNA, 21 bp, Artificial sequence
  SiRNA target sequence
tatttaaataagcctatttta

SEQ ID NO: 54153 - DNA, 21 bp, Artificial sequence
  SiRNA target sequence
atttaaataagcctattttag

SEQ ID NO: 54154 - DNA, 21 bp, Artificial sequence
  SiRNA target sequence
tttaaataagcctattttagt

SEQ ID NO: 54155 - DNA, 21 bp, Artificial sequence
  SiRNA target sequence
ttaaataagcctattttagtg

SEQ ID NO: 54156 - DNA, 21 bp, Artificial sequence
  SiRNA target sequence
taaataagcctattttagtga

SEQ ID NO: 54157 - DNA, 21 bp, Artificial sequence
  SiRNA target sequence
aaataagcctattttagtgaa

SEQ ID NO: 54158 - DNA, 21 bp, Artificial sequence
  SiRNA target sequence
aataagcctattttagtgaat

SEQ ID NO: 54159 - DNA, 21 bp, Artificial sequence
  SiRNA target sequence
ataagcctattttagtgaatg

SEQ ID NO: 54160 - DNA, 21 bp, Artificial sequence
  SiRNA target sequence
taagcctattttagtgaatgc

SEQ ID NO: 54161 - DNA, 21 bp, Artificial sequence
  SiRNA target sequence
aagcctattttagtgaatgct

SEQ ID NO: 54162 - DNA, 21 bp, Artificial sequence
  SiRNA target sequence
agcctattttagtgaatgcta

SEQ ID NO: 54163 - DNA, 21 bp, Artificial sequence
  SiRNA target sequence
gcctattttagtgaatgctaa

SEQ ID NO: 54164 - DNA, 21 bp, Artificial sequence
  SiRNA target sequence
cctattttagtgaatgctaat

SEQ ID NO: 54165 - DNA, 21 bp, Artificial sequence
  SiRNA target sequence
ctattttagtgaatgctaatt

SEQ ID NO: 54166 - DNA, 21 bp, Artificial sequence
  SiRNA target sequence
tattttagtgaatgctaattt

SEQ ID NO: 54167 - DNA, 21 bp, Artificial sequence
  SiRNA target sequence
attttagtgaatgctaatttc

SEQ ID NO: 54168 - DNA, 21 bp, Artificial sequence
  SiRNA target sequence
ttttagtgaatgctaatttcg

SEQ ID NO: 54169 - DNA, 21 bp, Artificial sequence
  SiRNA target sequence
tttagtgaatgctaatttcgt

SEQ ID NO: 54170 - DNA, 21 bp, Artificial sequence
  SiRNA target sequence
ttagtgaatgctaatttcgtt

SEQ ID NO: 54171 - DNA, 21 bp, Artificial sequence
  SiRNA target sequence
tagtgaatgctaatttcgtta

SEQ ID NO: 54172 - DNA, 21 bp, Artificial sequence
  SiRNA target sequence
agtgaatgctaatttcgttat

SEQ ID NO: 54173 - DNA, 21 bp, Artificial sequence
  SiRNA target sequence
gtgaatgctaatttcgttatt

SEQ ID NO: 54174 - DNA, 21 bp, Artificial sequence
  SiRNA target sequence
tgaatgctaatttcgttatta

SEQ ID NO: 54175 - DNA, 21 bp, Artificial sequence
  SiRNA target sequence
gaatgctaatttcgttattaa

SEQ ID NO: 54176 - DNA, 21 bp, Artificial sequence
  SiRNA target sequence
aatgctaatttcgttattaat

SEQ ID NO: 54177 - DNA, 21 bp, Artificial sequence
  SiRNA target sequence
atgctaatttcgttattaata

SEQ ID NO: 54178 - DNA, 21 bp, Artificial sequence
  SiRNA target sequence
tgctaatttcgttattaataa

SEQ ID NO: 54179 - DNA, 21 bp, Artificial sequence
  SiRNA target sequence
gctaatttcgttattaataaa

SEQ ID NO: 54180 - DNA, 21 bp, Artificial sequence
  SiRNA target sequence
ctaatttcgttattaataaag

SEQ ID NO: 54181 - DNA, 21 bp, Artificial sequence
  SiRNA target sequence
taatttcgttattaataaagg

SEQ ID NO: 54182 - DNA, 21 bp, Artificial sequence
  SiRNA target sequence
aatttcgttattaataaaggg

SEQ ID NO: 54183 - DNA, 21 bp, Artificial sequence
  SiRNA target sequence
atttcgttattaataaagggg

SEQ ID NO: 54184 - DNA, 21 bp, Artificial sequence
  SiRNA target sequence
tttcgttattaataaagggga

SEQ ID NO: 54185 - DNA, 21 bp, Artificial sequence
  SiRNA target sequence
ttcgttattaataaaggggag

SEQ ID NO: 54186 - DNA, 21 bp, Artificial sequence
  SiRNA target sequence
tcgttattaataaaggggagc

SEQ ID NO: 54187 - DNA, 21 bp, Artificial sequence
  SiRNA target sequence
cgttattaataaaggggagcg

SEQ ID NO: 54188 - DNA, 21 bp, Artificial sequence
  SiRNA target sequence
gttattaataaaggggagcgt

SEQ ID NO: 54189 - DNA, 21 bp, Artificial sequence
  SiRNA target sequence
ttattaataaaggggagcgtg

SEQ ID NO: 54190 - DNA, 21 bp, Artificial sequence
  SiRNA target sequence
tattaataaaggggagcgtgt

SEQ ID NO: 54191 - DNA, 21 bp, Artificial sequence
  SiRNA target sequence
attaataaaggggagcgtgtt

SEQ ID NO: 54192 - DNA, 21 bp, Artificial sequence
  SiRNA target sequence
ttaataaaggggagcgtgttg

SEQ ID NO: 54193 - DNA, 21 bp, Artificial sequence
  SiRNA target sequence
taataaaggggagcgtgttgc

SEQ ID NO: 54194 - DNA, 21 bp, Artificial sequence
  SiRNA target sequence
aataaaggggagcgtgttgct

SEQ ID NO: 54195 - DNA, 21 bp, Artificial sequence
  SiRNA target sequence
ataaaggggagcgtgttgcta

SEQ ID NO: 54196 - DNA, 21 bp, Artificial sequence
  SiRNA target sequence
taaaggggagcgtgttgctat

SEQ ID NO: 54197 - DNA, 21 bp, Artificial sequence
  SiRNA target sequence
aaaggggagcgtgttgctatt

SEQ ID NO: 54198 - DNA, 21 bp, Artificial sequence
  SiRNA target sequence
aaggggagcgtgttgctatta

SEQ ID NO: 54199 - DNA, 21 bp, Artificial sequence
  SiRNA target sequence
aggggagcgtgttgctattat

SEQ ID NO: 54200 - DNA, 21 bp, Artificial sequence
  SiRNA target sequence
ggggagcgtgttgctattata

SEQ ID NO: 54201 - DNA, 21 bp, Artificial sequence
  SiRNA target sequence
gggagcgtgttgctattatag

SEQ ID NO: 54202 - DNA, 21 bp, Artificial sequence
  SiRNA target sequence
ggagcgtgttgctattatagg

SEQ ID NO: 54203 - DNA, 21 bp, Artificial sequence
  SiRNA target sequence
gagcgtgttgctattatagga

SEQ ID NO: 54204 - DNA, 21 bp, Artificial sequence
  SiRNA target sequence
agcgtgttgctattataggaa

SEQ ID NO: 54205 - DNA, 21 bp, Artificial sequence
  SiRNA target sequence
gcgtgttgctattataggaaa

SEQ ID NO: 54206 - DNA, 21 bp, Artificial sequence
  SiRNA target sequence
cgtgttgctattataggaaaa

SEQ ID NO: 54207 - DNA, 21 bp, Artificial sequence
  SiRNA target sequence
gtgttgctattataggaaaaa

SEQ ID NO: 54208 - DNA, 21 bp, Artificial sequence
  SiRNA target sequence
tgttgctattataggaaaaaa

SEQ ID NO: 54209 - DNA, 21 bp, Artificial sequence
  SiRNA target sequence
gttgctattataggaaaaaat

SEQ ID NO: 54210 - DNA, 21 bp, Artificial sequence
  SiRNA target sequence
ttgctattataggaaaaaatg

SEQ ID NO: 54211 - DNA, 21 bp, Artificial sequence
  SiRNA target sequence
tgctattataggaaaaaatgg

SEQ ID NO: 54212 - DNA, 21 bp, Artificial sequence
  SiRNA target sequence
gctattataggaaaaaatgga

SEQ ID NO: 54213 - DNA, 21 bp, Artificial sequence
  SiRNA target sequence
ctattataggaaaaaatggaa

SEQ ID NO: 54214 - DNA, 21 bp, Artificial sequence
  SiRNA target sequence
tattataggaaaaaatggaac

SEQ ID NO: 54215 - DNA, 21 bp, Artificial sequence
  SiRNA target sequence
attataggaaaaaatggaaca

SEQ ID NO: 54216 - DNA, 21 bp, Artificial sequence
  SiRNA target sequence
ttataggaaaaaatggaacag

SEQ ID NO: 54217 - DNA, 21 bp, Artificial sequence
  SiRNA target sequence
tataggaaaaaatggaacagg

SEQ ID NO: 54218 - DNA, 21 bp, Artificial sequence
  SiRNA target sequence
ataggaaaaaatggaacaggt

SEQ ID NO: 54219 - DNA, 21 bp, Artificial sequence
  SiRNA target sequence
taggaaaaaatggaacaggta

SEQ ID NO: 54220 - DNA, 21 bp, Artificial sequence
  SiRNA target sequence
aggaaaaaatggaacaggtaa

SEQ ID NO: 54221 - DNA, 21 bp, Artificial sequence
  SiRNA target sequence
ggaaaaaatggaacaggtaaa

SEQ ID NO: 54222 - DNA, 21 bp, Artificial sequence
  SiRNA target sequence
gaaaaaatggaacaggtaaaa

SEQ ID NO: 54223 - DNA, 21 bp, Artificial sequence
  SiRNA target sequence
aaaaaatggaacaggtaaaag

SEQ ID NO: 54224 - DNA, 21 bp, Artificial sequence
  SiRNA target sequence
aaaaatggaacaggtaaaagt

SEQ ID NO: 54225 - DNA, 21 bp, Artificial sequence
  SiRNA target sequence
aaaatggaacaggtaaaagta

SEQ ID NO: 54226 - DNA, 21 bp, Artificial sequence
  SiRNA target sequence
aaatggaacaggtaaaagtac

SEQ ID NO: 54227 - DNA, 21 bp, Artificial sequence
  SiRNA target sequence
aatggaacaggtaaaagtaca

SEQ ID NO: 54228 - DNA, 21 bp, Artificial sequence
  SiRNA target sequence
atggaacaggtaaaagtacaa

SEQ ID NO: 54229 - DNA, 21 bp, Artificial sequence
  SiRNA target sequence
tggaacaggtaaaagtacaat

SEQ ID NO: 54230 - DNA, 21 bp, Artificial sequence
  SiRNA target sequence
ggaacaggtaaaagtacaata

SEQ ID NO: 54231 - DNA, 21 bp, Artificial sequence
  SiRNA target sequence
gaacaggtaaaagtacaataa

SEQ ID NO: 54232 - DNA, 21 bp, Artificial sequence
  SiRNA target sequence
aacaggtaaaagtacaataat

SEQ ID NO: 54233 - DNA, 21 bp, Artificial sequence
  SiRNA target sequence
acaggtaaaagtacaataata

SEQ ID NO: 54234 - DNA, 21 bp, Artificial sequence
  SiRNA target sequence
caggtaaaagtacaataataa

SEQ ID NO: 54235 - DNA, 21 bp, Artificial sequence
  SiRNA target sequence
aggtaaaagtacaataataaa

SEQ ID NO: 54236 - DNA, 21 bp, Artificial sequence
  SiRNA target sequence
ggtaaaagtacaataataaaa

SEQ ID NO: 54237 - DNA, 21 bp, Artificial sequence
  SiRNA target sequence
gtaaaagtacaataataaaat

SEQ ID NO: 54238 - DNA, 21 bp, Artificial sequence
  SiRNA target sequence
taaaagtacaataataaaatt

SEQ ID NO: 54239 - DNA, 21 bp, Artificial sequence
  SiRNA target sequence
aaaagtacaataataaaattg

SEQ ID NO: 54240 - DNA, 21 bp, Artificial sequence
  SiRNA target sequence
aaagtacaataataaaattgt

SEQ ID NO: 54241 - DNA, 21 bp, Artificial sequence
  SiRNA target sequence
aagtacaataataaaattgtt

SEQ ID NO: 54242 - DNA, 21 bp, Artificial sequence
  SiRNA target sequence
agtacaataataaaattgtta

SEQ ID NO: 54243 - DNA, 21 bp, Artificial sequence
  SiRNA target sequence
gtacaataataaaattgttaa

SEQ ID NO: 54244 - DNA, 21 bp, Artificial sequence
  SiRNA target sequence
tacaataataaaattgttaat

SEQ ID NO: 54245 - DNA, 21 bp, Artificial sequence
  SiRNA target sequence
acaataataaaattgttaatg

SEQ ID NO: 54246 - DNA, 21 bp, Artificial sequence
  SiRNA target sequence
caataataaaattgttaatga

SEQ ID NO: 54247 - DNA, 21 bp, Artificial sequence
  SiRNA target sequence
aataataaaattgttaatgaa

SEQ ID NO: 54248 - DNA, 21 bp, Artificial sequence
  SiRNA target sequence
ataataaaattgttaatgaaa

SEQ ID NO: 54249 - DNA, 21 bp, Artificial sequence
  SiRNA target sequence
taataaaattgttaatgaaat

SEQ ID NO: 54250 - DNA, 21 bp, Artificial sequence
  SiRNA target sequence
aataaaattgttaatgaaatt

SEQ ID NO: 54251 - DNA, 21 bp, Artificial sequence
  SiRNA target sequence
ataaaattgttaatgaaattt

SEQ ID NO: 54252 - DNA, 21 bp, Artificial sequence
  SiRNA target sequence
taaaattgttaatgaaatttt

SEQ ID NO: 54253 - DNA, 21 bp, Artificial sequence
  SiRNA target sequence
aaaattgttaatgaaatttta

SEQ ID NO: 54254 - DNA, 21 bp, Artificial sequence
  SiRNA target sequence
aaattgttaatgaaattttat

SEQ ID NO: 54255 - DNA, 21 bp, Artificial sequence
  SiRNA target sequence
aattgttaatgaaattttata

SEQ ID NO: 54256 - DNA, 21 bp, Artificial sequence
  SiRNA target sequence
attgttaatgaaattttataa

SEQ ID NO: 54257 - DNA, 21 bp, Artificial sequence
  SiRNA target sequence
ttgttaatgaaattttataaa

SEQ ID NO: 54258 - DNA, 21 bp, Artificial sequence
  SiRNA target sequence
tgttaatgaaattttataaat

SEQ ID NO: 54259 - DNA, 21 bp, Artificial sequence
  SiRNA target sequence
gttaatgaaattttataaata

SEQ ID NO: 54260 - DNA, 21 bp, Artificial sequence
  SiRNA target sequence
ttaatgaaattttataaatat

SEQ ID NO: 54261 - DNA, 21 bp, Artificial sequence
  SiRNA target sequence
taatgaaattttataaatatg

SEQ ID NO: 54262 - DNA, 21 bp, Artificial sequence
  SiRNA target sequence
aatgaaattttataaatatga

SEQ ID NO: 54263 - DNA, 21 bp, Artificial sequence
  SiRNA target sequence
atgaaattttataaatatgat

SEQ ID NO: 54264 - DNA, 21 bp, Artificial sequence
  SiRNA target sequence
tgaaattttataaatatgatg

SEQ ID NO: 54265 - DNA, 21 bp, Artificial sequence
  SiRNA target sequence
gaaattttataaatatgatgg

SEQ ID NO: 54266 - DNA, 21 bp, Artificial sequence
  SiRNA target sequence
aaattttataaatatgatgga

SEQ ID NO: 54267 - DNA, 21 bp, Artificial sequence
  SiRNA target sequence
aattttataaatatgatggag

SEQ ID NO: 54268 - DNA, 21 bp, Artificial sequence
  SiRNA target sequence
attttataaatatgatggaga

SEQ ID NO: 54269 - DNA, 21 bp, Artificial sequence
  SiRNA target sequence
ttttataaatatgatggagat

SEQ ID NO: 54270 - DNA, 21 bp, Artificial sequence
  SiRNA target sequence
tttataaatatgatggagata

SEQ ID NO: 54271 - DNA, 21 bp, Artificial sequence
  SiRNA target sequence
ttataaatatgatggagatat

SEQ ID NO: 54272 - DNA, 21 bp, Artificial sequence
  SiRNA target sequence
tataaatatgatggagatata

SEQ ID NO: 54273 - DNA, 21 bp, Artificial sequence
  SiRNA target sequence
ataaatatgatggagatatat

SEQ ID NO: 54274 - DNA, 21 bp, Artificial sequence
  SiRNA target sequence
taaatatgatggagatatatt

SEQ ID NO: 54275 - DNA, 21 bp, Artificial sequence
  SiRNA target sequence
aaatatgatggagatatatta

SEQ ID NO: 54276 - DNA, 21 bp, Artificial sequence
  SiRNA target sequence
aatatgatggagatatattaa

SEQ ID NO: 54277 - DNA, 21 bp, Artificial sequence
  SiRNA target sequence
atatgatggagatatattaat

SEQ ID NO: 54278 - DNA, 21 bp, Artificial sequence
  SiRNA target sequence
tatgatggagatatattaatt

SEQ ID NO: 54279 - DNA, 21 bp, Artificial sequence
  SiRNA target sequence
atgatggagatatattaattg

SEQ ID NO: 54280 - DNA, 21 bp, Artificial sequence
  SiRNA target sequence
tgatggagatatattaattga

SEQ ID NO: 54281 - DNA, 21 bp, Artificial sequence
  SiRNA target sequence
gatggagatatattaattgat

SEQ ID NO: 54282 - DNA, 21 bp, Artificial sequence
  SiRNA target sequence
atggagatatattaattgatg

SEQ ID NO: 54283 - DNA, 21 bp, Artificial sequence
  SiRNA target sequence
tggagatatattaattgatga

SEQ ID NO: 54284 - DNA, 21 bp, Artificial sequence
  SiRNA target sequence
ggagatatattaattgatgat

SEQ ID NO: 54285 - DNA, 21 bp, Artificial sequence
  SiRNA target sequence
gagatatattaattgatgata

SEQ ID NO: 54286 - DNA, 21 bp, Artificial sequence
  SiRNA target sequence
agatatattaattgatgatac

SEQ ID NO: 54287 - DNA, 21 bp, Artificial sequence
  SiRNA target sequence
gatatattaattgatgataca

SEQ ID NO: 54288 - DNA, 21 bp, Artificial sequence
  SiRNA target sequence
atatattaattgatgatacag

SEQ ID NO: 54289 - DNA, 21 bp, Artificial sequence
  SiRNA target sequence
tatattaattgatgatacaga

SEQ ID NO: 54290 - DNA, 21 bp, Artificial sequence
  SiRNA target sequence
atattaattgatgatacagaa

SEQ ID NO: 54291 - DNA, 21 bp, Artificial sequence
  SiRNA target sequence
tattaattgatgatacagaaa

SEQ ID NO: 54292 - DNA, 21 bp, Artificial sequence
  SiRNA target sequence
attaattgatgatacagaaat

SEQ ID NO: 54293 - DNA, 21 bp, Artificial sequence
  SiRNA target sequence
ttaattgatgatacagaaata

SEQ ID NO: 54294 - DNA, 21 bp, Artificial sequence
  SiRNA target sequence
taattgatgatacagaaatag

SEQ ID NO: 54295 - DNA, 21 bp, Artificial sequence
  SiRNA target sequence
aattgatgatacagaaataga

SEQ ID NO: 54296 - DNA, 21 bp, Artificial sequence
  SiRNA target sequence
attgatgatacagaaatagat

SEQ ID NO: 54297 - DNA, 21 bp, Artificial sequence
  SiRNA target sequence
ttgatgatacagaaatagata

SEQ ID NO: 54298 - DNA, 21 bp, Artificial sequence
  SiRNA target sequence
tgatgatacagaaatagataa

SEQ ID NO: 54299 - DNA, 21 bp, Artificial sequence
  SiRNA target sequence
gatgatacagaaatagataat

SEQ ID NO: 54300 - DNA, 21 bp, Artificial sequence
  SiRNA target sequence
atgatacagaaatagataata

SEQ ID NO: 54301 - DNA, 21 bp, Artificial sequence
  SiRNA target sequence
tgatacagaaatagataatat

SEQ ID NO: 54302 - DNA, 21 bp, Artificial sequence
  SiRNA target sequence
gatacagaaatagataatatt

SEQ ID NO: 54303 - DNA, 21 bp, Artificial sequence
  SiRNA target sequence
atacagaaatagataatattt

SEQ ID NO: 54304 - DNA, 21 bp, Artificial sequence
  SiRNA target sequence
tacagaaatagataatatttc

SEQ ID NO: 54305 - DNA, 21 bp, Artificial sequence
  SiRNA target sequence
acagaaatagataatatttcg

SEQ ID NO: 54306 - DNA, 21 bp, Artificial sequence
  SiRNA target sequence
cagaaatagataatatttcgg

SEQ ID NO: 54307 - DNA, 21 bp, Artificial sequence
  SiRNA target sequence
agaaatagataatatttcgga

SEQ ID NO: 54308 - DNA, 21 bp, Artificial sequence
  SiRNA target sequence
gaaatagataatatttcggat

SEQ ID NO: 54309 - DNA, 21 bp, Artificial sequence
  SiRNA target sequence
aaatagataatatttcggata

SEQ ID NO: 54310 - DNA, 21 bp, Artificial sequence
  SiRNA target sequence
aatagataatatttcggatag

SEQ ID NO: 54311 - DNA, 21 bp, Artificial sequence
  SiRNA target sequence
atagataatatttcggataga

SEQ ID NO: 54312 - DNA, 21 bp, Artificial sequence
  SiRNA target sequence
tagataatatttcggatagaa

SEQ ID NO: 54313 - DNA, 21 bp, Artificial sequence
  SiRNA target sequence
agataatatttcggatagaag

SEQ ID NO: 54314 - DNA, 21 bp, Artificial sequence
  SiRNA target sequence
gataatatttcggatagaagt

SEQ ID NO: 54315 - DNA, 21 bp, Artificial sequence
  SiRNA target sequence
ataatatttcggatagaagtt

SEQ ID NO: 54316 - DNA, 21 bp, Artificial sequence
  SiRNA target sequence
taatatttcggatagaagtta

SEQ ID NO: 54317 - DNA, 21 bp, Artificial sequence
  SiRNA target sequence
aatatttcggatagaagttac

SEQ ID NO: 54318 - DNA, 21 bp, Artificial sequence
  SiRNA target sequence
atatttcggatagaagttaca

SEQ ID NO: 54319 - DNA, 21 bp, Artificial sequence
  SiRNA target sequence
tatttcggatagaagttacag

SEQ ID NO: 54320 - DNA, 21 bp, Artificial sequence
  SiRNA target sequence
atttcggatagaagttacaga

SEQ ID NO: 54321 - DNA, 21 bp, Artificial sequence
  SiRNA target sequence
tttcggatagaagttacagaa

SEQ ID NO: 54322 - DNA, 21 bp, Artificial sequence
  SiRNA target sequence
ttcggatagaagttacagaag

SEQ ID NO: 54323 - DNA, 21 bp, Artificial sequence
  SiRNA target sequence
tcggatagaagttacagaagt

SEQ ID NO: 54324 - DNA, 21 bp, Artificial sequence
  SiRNA target sequence
cggatagaagttacagaagtt

SEQ ID NO: 54325 - DNA, 21 bp, Artificial sequence
  SiRNA target sequence
ggatagaagttacagaagttt

SEQ ID NO: 54326 - DNA, 21 bp, Artificial sequence
  SiRNA target sequence
gatagaagttacagaagttta

SEQ ID NO: 54327 - DNA, 21 bp, Artificial sequence
  SiRNA target sequence
atagaagttacagaagtttaa

SEQ ID NO: 54328 - DNA, 21 bp, Artificial sequence
  SiRNA target sequence
tagaagttacagaagtttaat

SEQ ID NO: 54329 - DNA, 21 bp, Artificial sequence
  SiRNA target sequence
agaagttacagaagtttaata

SEQ ID NO: 54330 - DNA, 21 bp, Artificial sequence
  SiRNA target sequence
gaagttacagaagtttaatat

SEQ ID NO: 54331 - DNA, 21 bp, Artificial sequence
  SiRNA target sequence
aagttacagaagtttaatatc

SEQ ID NO: 54332 - DNA, 21 bp, Artificial sequence
  SiRNA target sequence
agttacagaagtttaatatca

SEQ ID NO: 54333 - DNA, 21 bp, Artificial sequence
  SiRNA target sequence
gttacagaagtttaatatcat

SEQ ID NO: 54334 - DNA, 21 bp, Artificial sequence
  SiRNA target sequence
ttacagaagtttaatatcata

SEQ ID NO: 54335 - DNA, 21 bp, Artificial sequence
  SiRNA target sequence
tacagaagtttaatatcatat

SEQ ID NO: 54336 - DNA, 21 bp, Artificial sequence
  SiRNA target sequence
acagaagtttaatatcatatg

SEQ ID NO: 54337 - DNA, 21 bp, Artificial sequence
  SiRNA target sequence
cagaagtttaatatcatatgc

SEQ ID NO: 54338 - DNA, 21 bp, Artificial sequence
  SiRNA target sequence
agaagtttaatatcatatgca

SEQ ID NO: 54339 - DNA, 21 bp, Artificial sequence
  SiRNA target sequence
gaagtttaatatcatatgcaa

SEQ ID NO: 54340 - DNA, 21 bp, Artificial sequence
  SiRNA target sequence
aagtttaatatcatatgcaac

SEQ ID NO: 54341 - DNA, 21 bp, Artificial sequence
  SiRNA target sequence
agtttaatatcatatgcaaca

SEQ ID NO: 54342 - DNA, 21 bp, Artificial sequence
  SiRNA target sequence
gtttaatatcatatgcaacac

SEQ ID NO: 54343 - DNA, 21 bp, Artificial sequence
  SiRNA target sequence
tttaatatcatatgcaacaca

SEQ ID NO: 54344 - DNA, 21 bp, Artificial sequence
  SiRNA target sequence
ttaatatcatatgcaacacaa

SEQ ID NO: 54345 - DNA, 21 bp, Artificial sequence
  SiRNA target sequence
taatatcatatgcaacacaaa

SEQ ID NO: 54346 - DNA, 21 bp, Artificial sequence
  SiRNA target sequence
aatatcatatgcaacacaaaa

SEQ ID NO: 54347 - DNA, 21 bp, Artificial sequence
  SiRNA target sequence
atatcatatgcaacacaaaac

SEQ ID NO: 54348 - DNA, 21 bp, Artificial sequence
  SiRNA target sequence
tatcatatgcaacacaaaaca

SEQ ID NO: 54349 - DNA, 21 bp, Artificial sequence
  SiRNA target sequence
atcatatgcaacacaaaacac

SEQ ID NO: 54350 - DNA, 21 bp, Artificial sequence
  SiRNA target sequence
tcatatgcaacacaaaacacg

SEQ ID NO: 54351 - DNA, 21 bp, Artificial sequence
  SiRNA target sequence
catatgcaacacaaaacacgt

SEQ ID NO: 54352 - DNA, 21 bp, Artificial sequence
  SiRNA target sequence
atatgcaacacaaaacacgtt

SEQ ID NO: 54353 - DNA, 21 bp, Artificial sequence
  SiRNA target sequence
tatgcaacacaaaacacgttc

SEQ ID NO: 54354 - DNA, 21 bp, Artificial sequence
  SiRNA target sequence
atgcaacacaaaacacgttct

SEQ ID NO: 54355 - DNA, 21 bp, Artificial sequence
  SiRNA target sequence
tgcaacacaaaacacgttctt

SEQ ID NO: 54356 - DNA, 21 bp, Artificial sequence
  SiRNA target sequence
gcaacacaaaacacgttctta

SEQ ID NO: 54357 - DNA, 21 bp, Artificial sequence
  SiRNA target sequence
caacacaaaacacgttcttat

SEQ ID NO: 54358 - DNA, 21 bp, Artificial sequence
  SiRNA target sequence
aacacaaaacacgttcttatt

SEQ ID NO: 54359 - DNA, 21 bp, Artificial sequence
  SiRNA target sequence
acacaaaacacgttcttattc

SEQ ID NO: 54360 - DNA, 21 bp, Artificial sequence
  SiRNA target sequence
cacaaaacacgttcttattcg

SEQ ID NO: 54361 - DNA, 21 bp, Artificial sequence
  SiRNA target sequence
acaaaacacgttcttattcga

SEQ ID NO: 54362 - DNA, 21 bp, Artificial sequence
  SiRNA target sequence
caaaacacgttcttattcgat

SEQ ID NO: 54363 - DNA, 21 bp, Artificial sequence
  SiRNA target sequence
aaaacacgttcttattcgata

SEQ ID NO: 54364 - DNA, 21 bp, Artificial sequence
  SiRNA target sequence
aaacacgttcttattcgataa

SEQ ID NO: 54365 - DNA, 21 bp, Artificial sequence
  SiRNA target sequence
aacacgttcttattcgataat

SEQ ID NO: 54366 - DNA, 21 bp, Artificial sequence
  SiRNA target sequence
acacgttcttattcgataata

SEQ ID NO: 54367 - DNA, 21 bp, Artificial sequence
  SiRNA target sequence
cacgttcttattcgataatac

SEQ ID NO: 54368 - DNA, 21 bp, Artificial sequence
  SiRNA target sequence
acgttcttattcgataatact

SEQ ID NO: 54369 - DNA, 21 bp, Artificial sequence
  SiRNA target sequence
cgttcttattcgataatactg

SEQ ID NO: 54370 - DNA, 21 bp, Artificial sequence
  SiRNA target sequence
gttcttattcgataatactgt

SEQ ID NO: 54371 - DNA, 21 bp, Artificial sequence
  SiRNA target sequence
ttcttattcgataatactgtg

SEQ ID NO: 54372 - DNA, 21 bp, Artificial sequence
  SiRNA target sequence
tcttattcgataatactgtga

SEQ ID NO: 54373 - DNA, 21 bp, Artificial sequence
  SiRNA target sequence
cttattcgataatactgtgac

SEQ ID NO: 54374 - DNA, 21 bp, Artificial sequence
  SiRNA target sequence
ttattcgataatactgtgaca

SEQ ID NO: 54375 - DNA, 21 bp, Artificial sequence
  SiRNA target sequence
tattcgataatactgtgacat

SEQ ID NO: 54376 - DNA, 21 bp, Artificial sequence
  SiRNA target sequence
attcgataatactgtgacata

SEQ ID NO: 54377 - DNA, 21 bp, Artificial sequence
  SiRNA target sequence
ttcgataatactgtgacatac

SEQ ID NO: 54378 - DNA, 21 bp, Artificial sequence
  SiRNA target sequence
tcgataatactgtgacataca

SEQ ID NO: 54379 - DNA, 21 bp, Artificial sequence
  SiRNA target sequence
cgataatactgtgacatacaa

SEQ ID NO: 54380 - DNA, 21 bp, Artificial sequence
  SiRNA target sequence
gataatactgtgacatacaat

SEQ ID NO: 54381 - DNA, 21 bp, Artificial sequence
  SiRNA target sequence
ataatactgtgacatacaata

SEQ ID NO: 54382 - DNA, 21 bp, Artificial sequence
  SiRNA target sequence
taatactgtgacatacaatat

SEQ ID NO: 54383 - DNA, 21 bp, Artificial sequence
  SiRNA target sequence
aatactgtgacatacaatata

SEQ ID NO: 54384 - DNA, 21 bp, Artificial sequence
  SiRNA target sequence
atactgtgacatacaatatat

SEQ ID NO: 54385 - DNA, 21 bp, Artificial sequence
  SiRNA target sequence
tactgtgacatacaatatatt

SEQ ID NO: 54386 - DNA, 21 bp, Artificial sequence
  SiRNA target sequence
actgtgacatacaatatattt

SEQ ID NO: 54387 - DNA, 21 bp, Artificial sequence
  SiRNA target sequence
ctgtgacatacaatatatttt

SEQ ID NO: 54388 - DNA, 21 bp, Artificial sequence
  SiRNA target sequence
tgtgacatacaatatatttta

SEQ ID NO: 54389 - DNA, 21 bp, Artificial sequence
  SiRNA target sequence
gtgacatacaatatattttac

SEQ ID NO: 54390 - DNA, 21 bp, Artificial sequence
  SiRNA target sequence
tgacatacaatatattttacg

SEQ ID NO: 54391 - DNA, 21 bp, Artificial sequence
  SiRNA target sequence
gacatacaatatattttacgg

SEQ ID NO: 54392 - DNA, 21 bp, Artificial sequence
  SiRNA target sequence
acatacaatatattttacggg

SEQ ID NO: 54393 - DNA, 21 bp, Artificial sequence
  SiRNA target sequence
catacaatatattttacggga

SEQ ID NO: 54394 - DNA, 21 bp, Artificial sequence
  SiRNA target sequence
atacaatatattttacgggac

SEQ ID NO: 54395 - DNA, 21 bp, Artificial sequence
  SiRNA target sequence
tacaatatattttacgggact

SEQ ID NO: 54396 - DNA, 21 bp, Artificial sequence
  SiRNA target sequence
acaatatattttacgggacta

SEQ ID NO: 54397 - DNA, 21 bp, Artificial sequence
  SiRNA target sequence
caatatattttacgggactaa

SEQ ID NO: 54398 - DNA, 21 bp, Artificial sequence
  SiRNA target sequence
aatatattttacgggactaaa

SEQ ID NO: 54399 - DNA, 21 bp, Artificial sequence
  SiRNA target sequence
atatattttacgggactaaaa

SEQ ID NO: 54400 - DNA, 21 bp, Artificial sequence
  SiRNA target sequence
tatattttacgggactaaaaa

SEQ ID NO: 54401 - DNA, 21 bp, Artificial sequence
  SiRNA target sequence
atattttacgggactaaaaac

SEQ ID NO: 54402 - DNA, 21 bp, Artificial sequence
  SiRNA target sequence
tattttacgggactaaaaacg

SEQ ID NO: 54403 - DNA, 21 bp, Artificial sequence
  SiRNA target sequence
attttacgggactaaaaacgt

SEQ ID NO: 54404 - DNA, 21 bp, Artificial sequence
  SiRNA target sequence
ttttacgggactaaaaacgta

SEQ ID NO: 54405 - DNA, 21 bp, Artificial sequence
  SiRNA target sequence
tttacgggactaaaaacgtaa

SEQ ID NO: 54406 - DNA, 21 bp, Artificial sequence
  SiRNA target sequence
ttacgggactaaaaacgtaac

SEQ ID NO: 54407 - DNA, 21 bp, Artificial sequence
  SiRNA target sequence
tacgggactaaaaacgtaaca

SEQ ID NO: 54408 - DNA, 21 bp, Artificial sequence
  SiRNA target sequence
acgggactaaaaacgtaacag

SEQ ID NO: 54409 - DNA, 21 bp, Artificial sequence
  SiRNA target sequence
cgggactaaaaacgtaacaga

SEQ ID NO: 54410 - DNA, 21 bp, Artificial sequence
  SiRNA target sequence
gggactaaaaacgtaacagaa

SEQ ID NO: 54411 - DNA, 21 bp, Artificial sequence
  SiRNA target sequence
ggactaaaaacgtaacagaaa

SEQ ID NO: 54412 - DNA, 21 bp, Artificial sequence
  SiRNA target sequence
gactaaaaacgtaacagaaaa

SEQ ID NO: 54413 - DNA, 21 bp, Artificial sequence
  SiRNA target sequence
actaaaaacgtaacagaaaaa

SEQ ID NO: 54414 - DNA, 21 bp, Artificial sequence
  SiRNA target sequence
ctaaaaacgtaacagaaaaag

SEQ ID NO: 54415 - DNA, 21 bp, Artificial sequence
  SiRNA target sequence
taaaaacgtaacagaaaaaga

SEQ ID NO: 54416 - DNA, 21 bp, Artificial sequence
  SiRNA target sequence
aaaaacgtaacagaaaaagaa

SEQ ID NO: 54417 - DNA, 21 bp, Artificial sequence
  SiRNA target sequence
aaaacgtaacagaaaaagaag

SEQ ID NO: 54418 - DNA, 21 bp, Artificial sequence
  SiRNA target sequence
aaacgtaacagaaaaagaagt

SEQ ID NO: 54419 - DNA, 21 bp, Artificial sequence
  SiRNA target sequence
aacgtaacagaaaaagaagtt

SEQ ID NO: 54420 - DNA, 21 bp, Artificial sequence
  SiRNA target sequence
acgtaacagaaaaagaagttt

SEQ ID NO: 54421 - DNA, 21 bp, Artificial sequence
  SiRNA target sequence
cgtaacagaaaaagaagtttt

SEQ ID NO: 54422 - DNA, 21 bp, Artificial sequence
  SiRNA target sequence
gtaacagaaaaagaagtttta

SEQ ID NO: 54423 - DNA, 21 bp, Artificial sequence
  SiRNA target sequence
taacagaaaaagaagttttag

SEQ ID NO: 54424 - DNA, 21 bp, Artificial sequence
  SiRNA target sequence
aacagaaaaagaagttttaga

SEQ ID NO: 54425 - DNA, 21 bp, Artificial sequence
  SiRNA target sequence
acagaaaaagaagttttagaa

SEQ ID NO: 54426 - DNA, 21 bp, Artificial sequence
  SiRNA target sequence
cagaaaaagaagttttagaat

SEQ ID NO: 54427 - DNA, 21 bp, Artificial sequence
  SiRNA target sequence
agaaaaagaagttttagaatt

SEQ ID NO: 54428 - DNA, 21 bp, Artificial sequence
  SiRNA target sequence
gaaaaagaagttttagaatta

SEQ ID NO: 54429 - DNA, 21 bp, Artificial sequence
  SiRNA target sequence
aaaaagaagttttagaattag

SEQ ID NO: 54430 - DNA, 21 bp, Artificial sequence
  SiRNA target sequence
aaaagaagttttagaattagc

SEQ ID NO: 54431 - DNA, 21 bp, Artificial sequence
  SiRNA target sequence
aaagaagttttagaattagcc

SEQ ID NO: 54432 - DNA, 21 bp, Artificial sequence
  SiRNA target sequence
aagaagttttagaattagcca

SEQ ID NO: 54433 - DNA, 21 bp, Artificial sequence
  SiRNA target sequence
agaagttttagaattagccaa

SEQ ID NO: 54434 - DNA, 21 bp, Artificial sequence
  SiRNA target sequence
gaagttttagaattagccaaa

SEQ ID NO: 54435 - DNA, 21 bp, Artificial sequence
  SiRNA target sequence
aagttttagaattagccaaaa

SEQ ID NO: 54436 - DNA, 21 bp, Artificial sequence
  SiRNA target sequence
agttttagaattagccaaaaa

SEQ ID NO: 54437 - DNA, 21 bp, Artificial sequence
  SiRNA target sequence
gttttagaattagccaaaaaa

SEQ ID NO: 54438 - DNA, 21 bp, Artificial sequence
  SiRNA target sequence
ttttagaattagccaaaaaaa

SEQ ID NO: 54439 - DNA, 21 bp, Artificial sequence
  SiRNA target sequence
tttagaattagccaaaaaaat

SEQ ID NO: 54440 - DNA, 21 bp, Artificial sequence
  SiRNA target sequence
ttagaattagccaaaaaaata

SEQ ID NO: 54441 - DNA, 21 bp, Artificial sequence
  SiRNA target sequence
tagaattagccaaaaaaatag

SEQ ID NO: 54442 - DNA, 21 bp, Artificial sequence
  SiRNA target sequence
agaattagccaaaaaaatagg

SEQ ID NO: 54443 - DNA, 21 bp, Artificial sequence
  SiRNA target sequence
gaattagccaaaaaaataggt

SEQ ID NO: 54444 - DNA, 21 bp, Artificial sequence
  SiRNA target sequence
aattagccaaaaaaataggtg

SEQ ID NO: 54445 - DNA, 21 bp, Artificial sequence
  SiRNA target sequence
attagccaaaaaaataggtgt

SEQ ID NO: 54446 - DNA, 21 bp, Artificial sequence
  SiRNA target sequence
ttagccaaaaaaataggtgta

SEQ ID NO: 54447 - DNA, 21 bp, Artificial sequence
  SiRNA target sequence
tagccaaaaaaataggtgtat

SEQ ID NO: 54448 - DNA, 21 bp, Artificial sequence
  SiRNA target sequence
agccaaaaaaataggtgtatt

SEQ ID NO: 54449 - DNA, 21 bp, Artificial sequence
  SiRNA target sequence
gccaaaaaaataggtgtatta

SEQ ID NO: 54450 - DNA, 21 bp, Artificial sequence
  SiRNA target sequence
ccaaaaaaataggtgtattag

SEQ ID NO: 54451 - DNA, 21 bp, Artificial sequence
  SiRNA target sequence
caaaaaaataggtgtattaga

SEQ ID NO: 54452 - DNA, 21 bp, Artificial sequence
  SiRNA target sequence
aaaaaaataggtgtattagag

SEQ ID NO: 54453 - DNA, 21 bp, Artificial sequence
  SiRNA target sequence
aaaaaataggtgtattagagt

SEQ ID NO: 54454 - DNA, 21 bp, Artificial sequence
  SiRNA target sequence
aaaaataggtgtattagagtc

SEQ ID NO: 54455 - DNA, 21 bp, Artificial sequence
  SiRNA target sequence
aaaataggtgtattagagtct

SEQ ID NO: 54456 - DNA, 21 bp, Artificial sequence
  SiRNA target sequence
aaataggtgtattagagtcta

SEQ ID NO: 54457 - DNA, 21 bp, Artificial sequence
  SiRNA target sequence
aataggtgtattagagtctat

SEQ ID NO: 54458 - DNA, 21 bp, Artificial sequence
  SiRNA target sequence
ataggtgtattagagtctata

SEQ ID NO: 54459 - DNA, 21 bp, Artificial sequence
  SiRNA target sequence
taggtgtattagagtctatac

SEQ ID NO: 54460 - DNA, 21 bp, Artificial sequence
  SiRNA target sequence
aggtgtattagagtctataca

SEQ ID NO: 54461 - DNA, 21 bp, Artificial sequence
  SiRNA target sequence
ggtgtattagagtctatacag

SEQ ID NO: 54462 - DNA, 21 bp, Artificial sequence
  SiRNA target sequence
gtgtattagagtctatacagg

SEQ ID NO: 54463 - DNA, 21 bp, Artificial sequence
  SiRNA target sequence
tgtattagagtctatacagga

SEQ ID NO: 54464 - DNA, 21 bp, Artificial sequence
  SiRNA target sequence
gtattagagtctatacaggaa

SEQ ID NO: 54465 - DNA, 21 bp, Artificial sequence
  SiRNA target sequence
tattagagtctatacaggaat

SEQ ID NO: 54466 - DNA, 21 bp, Artificial sequence
  SiRNA target sequence
attagagtctatacaggaatt

SEQ ID NO: 54467 - DNA, 21 bp, Artificial sequence
  SiRNA target sequence
ttagagtctatacaggaattt

SEQ ID NO: 54468 - DNA, 21 bp, Artificial sequence
  SiRNA target sequence
tagagtctatacaggaattta

SEQ ID NO: 54469 - DNA, 21 bp, Artificial sequence
  SiRNA target sequence
agagtctatacaggaatttaa

SEQ ID NO: 54470 - DNA, 21 bp, Artificial sequence
  SiRNA target sequence
gagtctatacaggaatttaaa

SEQ ID NO: 54471 - DNA, 21 bp, Artificial sequence
  SiRNA target sequence
agtctatacaggaatttaaag

SEQ ID NO: 54472 - DNA, 21 bp, Artificial sequence
  SiRNA target sequence
gtctatacaggaatttaaaga

SEQ ID NO: 54473 - DNA, 21 bp, Artificial sequence
  SiRNA target sequence
tctatacaggaatttaaagat

SEQ ID NO: 54474 - DNA, 21 bp, Artificial sequence
  SiRNA target sequence
ctatacaggaatttaaagatg

SEQ ID NO: 54475 - DNA, 21 bp, Artificial sequence
  SiRNA target sequence
tatacaggaatttaaagatgg

SEQ ID NO: 54476 - DNA, 21 bp, Artificial sequence
  SiRNA target sequence
atacaggaatttaaagatggg

SEQ ID NO: 54477 - DNA, 21 bp, Artificial sequence
  SiRNA target sequence
tacaggaatttaaagatgggt

SEQ ID NO: 54478 - DNA, 21 bp, Artificial sequence
  SiRNA target sequence
acaggaatttaaagatgggtt

SEQ ID NO: 54479 - DNA, 21 bp, Artificial sequence
  SiRNA target sequence
caggaatttaaagatgggttt

SEQ ID NO: 54480 - DNA, 21 bp, Artificial sequence
  SiRNA target sequence
aggaatttaaagatgggttta

SEQ ID NO: 54481 - DNA, 21 bp, Artificial sequence
  SiRNA target sequence
ggaatttaaagatgggtttag

SEQ ID NO: 54482 - DNA, 21 bp, Artificial sequence
  SiRNA target sequence
gaatttaaagatgggtttagc

SEQ ID NO: 54483 - DNA, 21 bp, Artificial sequence
  SiRNA target sequence
aatttaaagatgggtttagca

SEQ ID NO: 54484 - DNA, 21 bp, Artificial sequence
  SiRNA target sequence
atttaaagatgggtttagcac

SEQ ID NO: 54485 - DNA, 21 bp, Artificial sequence
  SiRNA target sequence
tttaaagatgggtttagcaca

SEQ ID NO: 54486 - DNA, 21 bp, Artificial sequence
  SiRNA target sequence
ttaaagatgggtttagcacat

SEQ ID NO: 54487 - DNA, 21 bp, Artificial sequence
  SiRNA target sequence
taaagatgggtttagcacatc

SEQ ID NO: 54488 - DNA, 21 bp, Artificial sequence
  SiRNA target sequence
aaagatgggtttagcacatcg

SEQ ID NO: 54489 - DNA, 21 bp, Artificial sequence
  SiRNA target sequence
aagatgggtttagcacatcgg

SEQ ID NO: 54490 - DNA, 21 bp, Artificial sequence
  SiRNA target sequence
agatgggtttagcacatcggt

SEQ ID NO: 54491 - DNA, 21 bp, Artificial sequence
  SiRNA target sequence
gatgggtttagcacatcggtc

SEQ ID NO: 54492 - DNA, 21 bp, Artificial sequence
  SiRNA target sequence
atgggtttagcacatcggtcg

SEQ ID NO: 54493 - DNA, 21 bp, Artificial sequence
  SiRNA target sequence
tgggtttagcacatcggtcgg

SEQ ID NO: 54494 - DNA, 21 bp, Artificial sequence
  SiRNA target sequence
gggtttagcacatcggtcggt

SEQ ID NO: 54495 - DNA, 21 bp, Artificial sequence
  SiRNA target sequence
ggtttagcacatcggtcggtg

SEQ ID NO: 54496 - DNA, 21 bp, Artificial sequence
  SiRNA target sequence
gtttagcacatcggtcggtga

SEQ ID NO: 54497 - DNA, 21 bp, Artificial sequence
  SiRNA target sequence
tttagcacatcggtcggtgaa

SEQ ID NO: 54498 - DNA, 21 bp, Artificial sequence
  SiRNA target sequence
ttagcacatcggtcggtgaac

SEQ ID NO: 54499 - DNA, 21 bp, Artificial sequence
  SiRNA target sequence
tagcacatcggtcggtgaacg

SEQ ID NO: 54500 - DNA, 21 bp, Artificial sequence
  SiRNA target sequence
agcacatcggtcggtgaacgc

SEQ ID NO: 54501 - DNA, 21 bp, Artificial sequence
  SiRNA target sequence
gcacatcggtcggtgaacgcg

SEQ ID NO: 54502 - DNA, 21 bp, Artificial sequence
  SiRNA target sequence
cacatcggtcggtgaacgcgg

SEQ ID NO: 54503 - DNA, 21 bp, Artificial sequence
  SiRNA target sequence
acatcggtcggtgaacgcgga

SEQ ID NO: 54504 - DNA, 21 bp, Artificial sequence
  SiRNA target sequence
catcggtcggtgaacgcggaa

SEQ ID NO: 54505 - DNA, 21 bp, Artificial sequence
  SiRNA target sequence
atcggtcggtgaacgcggaag

SEQ ID NO: 54506 - DNA, 21 bp, Artificial sequence
  SiRNA target sequence
tcggtcggtgaacgcggaaga

SEQ ID NO: 54507 - DNA, 21 bp, Artificial sequence
  SiRNA target sequence
cggtcggtgaacgcggaagat

SEQ ID NO: 54508 - DNA, 21 bp, Artificial sequence
  SiRNA target sequence
ggtcggtgaacgcggaagatt

SEQ ID NO: 54509 - DNA, 21 bp, Artificial sequence
  SiRNA target sequence
gtcggtgaacgcggaagattt

SEQ ID NO: 54510 - DNA, 21 bp, Artificial sequence
  SiRNA target sequence
tcggtgaacgcggaagatttt

SEQ ID NO: 54511 - DNA, 21 bp, Artificial sequence
  SiRNA target sequence
cggtgaacgcggaagattttt

SEQ ID NO: 54512 - DNA, 21 bp, Artificial sequence
  SiRNA target sequence
ggtgaacgcggaagattttta

SEQ ID NO: 54513 - DNA, 21 bp, Artificial sequence
  SiRNA target sequence
gtgaacgcggaagatttttat

SEQ ID NO: 54514 - DNA, 21 bp, Artificial sequence
  SiRNA target sequence
tgaacgcggaagatttttatc

SEQ ID NO: 54515 - DNA, 21 bp, Artificial sequence
  SiRNA target sequence
gaacgcggaagatttttatct

SEQ ID NO: 54516 - DNA, 21 bp, Artificial sequence
  SiRNA target sequence
aacgcggaagatttttatctg

SEQ ID NO: 54517 - DNA, 21 bp, Artificial sequence
  SiRNA target sequence
acgcggaagatttttatctgg

SEQ ID NO: 54518 - DNA, 21 bp, Artificial sequence
  SiRNA target sequence
cgcggaagatttttatctggt

SEQ ID NO: 54519 - DNA, 21 bp, Artificial sequence
  SiRNA target sequence
gcggaagatttttatctggtg

SEQ ID NO: 54520 - DNA, 21 bp, Artificial sequence
  SiRNA target sequence
cggaagatttttatctggtgg

SEQ ID NO: 54521 - DNA, 21 bp, Artificial sequence
  SiRNA target sequence
ggaagatttttatctggtggt

SEQ ID NO: 54522 - DNA, 21 bp, Artificial sequence
  SiRNA target sequence
gaagatttttatctggtggtg

SEQ ID NO: 54523 - DNA, 21 bp, Artificial sequence
  SiRNA target sequence
aagatttttatctggtggtga

SEQ ID NO: 54524 - DNA, 21 bp, Artificial sequence
  SiRNA target sequence
agatttttatctggtggtgaa

SEQ ID NO: 54525 - DNA, 21 bp, Artificial sequence
  SiRNA target sequence
gatttttatctggtggtgaaa

SEQ ID NO: 54526 - DNA, 21 bp, Artificial sequence
  SiRNA target sequence
atttttatctggtggtgaaag

SEQ ID NO: 54527 - DNA, 21 bp, Artificial sequence
  SiRNA target sequence
tttttatctggtggtgaaagg

SEQ ID NO: 54528 - DNA, 21 bp, Artificial sequence
  SiRNA target sequence
ttttatctggtggtgaaaggc

SEQ ID NO: 54529 - DNA, 21 bp, Artificial sequence
  SiRNA target sequence
tttatctggtggtgaaaggca

SEQ ID NO: 54530 - DNA, 21 bp, Artificial sequence
  SiRNA target sequence
ttatctggtggtgaaaggcaa

SEQ ID NO: 54531 - DNA, 21 bp, Artificial sequence
  SiRNA target sequence
tatctggtggtgaaaggcaaa

SEQ ID NO: 54532 - DNA, 21 bp, Artificial sequence
  SiRNA target sequence
atctggtggtgaaaggcaaaa

SEQ ID NO: 54533 - DNA, 21 bp, Artificial sequence
  SiRNA target sequence
tctggtggtgaaaggcaaaaa

SEQ ID NO: 54534 - DNA, 21 bp, Artificial sequence
  SiRNA target sequence
ctggtggtgaaaggcaaaaaa

SEQ ID NO: 54535 - DNA, 21 bp, Artificial sequence
  SiRNA target sequence
tggtggtgaaaggcaaaaaat

SEQ ID NO: 54536 - DNA, 21 bp, Artificial sequence
  SiRNA target sequence
ggtggtgaaaggcaaaaaatt

SEQ ID NO: 54537 - DNA, 21 bp, Artificial sequence
  SiRNA target sequence
gtggtgaaaggcaaaaaatta

SEQ ID NO: 54538 - DNA, 21 bp, Artificial sequence
  SiRNA target sequence
tggtgaaaggcaaaaaattat

SEQ ID NO: 54539 - DNA, 21 bp, Artificial sequence
  SiRNA target sequence
ggtgaaaggcaaaaaattatg

SEQ ID NO: 54540 - DNA, 21 bp, Artificial sequence
  SiRNA target sequence
gtgaaaggcaaaaaattatgc

SEQ ID NO: 54541 - DNA, 21 bp, Artificial sequence
  SiRNA target sequence
tgaaaggcaaaaaattatgct

SEQ ID NO: 54542 - DNA, 21 bp, Artificial sequence
  SiRNA target sequence
gaaaggcaaaaaattatgctg

SEQ ID NO: 54543 - DNA, 21 bp, Artificial sequence
  SiRNA target sequence
aaaggcaaaaaattatgctga

SEQ ID NO: 54544 - DNA, 21 bp, Artificial sequence
  SiRNA target sequence
aaggcaaaaaattatgctgat

SEQ ID NO: 54545 - DNA, 21 bp, Artificial sequence
  SiRNA target sequence
aggcaaaaaattatgctgatg

SEQ ID NO: 54546 - DNA, 21 bp, Artificial sequence
  SiRNA target sequence
ggcaaaaaattatgctgatgc

SEQ ID NO: 54547 - DNA, 21 bp, Artificial sequence
  SiRNA target sequence
gcaaaaaattatgctgatgcg

SEQ ID NO: 54548 - DNA, 21 bp, Artificial sequence
  SiRNA target sequence
caaaaaattatgctgatgcgt

SEQ ID NO: 54549 - DNA, 21 bp, Artificial sequence
  SiRNA target sequence
aaaaaattatgctgatgcgtg

SEQ ID NO: 54550 - DNA, 21 bp, Artificial sequence
  SiRNA target sequence
aaaaattatgctgatgcgtgc

SEQ ID NO: 54551 - DNA, 21 bp, Artificial sequence
  SiRNA target sequence
aaaattatgctgatgcgtgca

SEQ ID NO: 54552 - DNA, 21 bp, Artificial sequence
  SiRNA target sequence
aaattatgctgatgcgtgcat

SEQ ID NO: 54553 - DNA, 21 bp, Artificial sequence
  SiRNA target sequence
aattatgctgatgcgtgcatt

SEQ ID NO: 54554 - DNA, 21 bp, Artificial sequence
  SiRNA target sequence
attatgctgatgcgtgcattg

SEQ ID NO: 54555 - DNA, 21 bp, Artificial sequence
  SiRNA target sequence
ttatgctgatgcgtgcattgc

SEQ ID NO: 54556 - DNA, 21 bp, Artificial sequence
  SiRNA target sequence
tatgctgatgcgtgcattgct

SEQ ID NO: 54557 - DNA, 21 bp, Artificial sequence
  SiRNA target sequence
atgctgatgcgtgcattgctt

SEQ ID NO: 54558 - DNA, 21 bp, Artificial sequence
  SiRNA target sequence
tgctgatgcgtgcattgctta

SEQ ID NO: 54559 - DNA, 21 bp, Artificial sequence
  SiRNA target sequence
gctgatgcgtgcattgcttaa

SEQ ID NO: 54560 - DNA, 21 bp, Artificial sequence
  SiRNA target sequence
ctgatgcgtgcattgcttaaa

SEQ ID NO: 54561 - DNA, 21 bp, Artificial sequence
  SiRNA target sequence
tgatgcgtgcattgcttaaaa

SEQ ID NO: 54562 - DNA, 21 bp, Artificial sequence
  SiRNA target sequence
gatgcgtgcattgcttaaaaa

SEQ ID NO: 54563 - DNA, 21 bp, Artificial sequence
  SiRNA target sequence
atgcgtgcattgcttaaaaat

SEQ ID NO: 54564 - DNA, 21 bp, Artificial sequence
  SiRNA target sequence
tgcgtgcattgcttaaaaatt

SEQ ID NO: 54565 - DNA, 21 bp, Artificial sequence
  SiRNA target sequence
gcgtgcattgcttaaaaattc

SEQ ID NO: 54566 - DNA, 21 bp, Artificial sequence
  SiRNA target sequence
cgtgcattgcttaaaaattca

SEQ ID NO: 54567 - DNA, 21 bp, Artificial sequence
  SiRNA target sequence
gtgcattgcttaaaaattcag

SEQ ID NO: 54568 - DNA, 21 bp, Artificial sequence
  SiRNA target sequence
tgcattgcttaaaaattcaga

SEQ ID NO: 54569 - DNA, 21 bp, Artificial sequence
  SiRNA target sequence
gcattgcttaaaaattcagag

SEQ ID NO: 54570 - DNA, 21 bp, Artificial sequence
  SiRNA target sequence
cattgcttaaaaattcagaga

SEQ ID NO: 54571 - DNA, 21 bp, Artificial sequence
  SiRNA target sequence
attgcttaaaaattcagagat

SEQ ID NO: 54572 - DNA, 21 bp, Artificial sequence
  SiRNA target sequence
ttgcttaaaaattcagagatc

SEQ ID NO: 54573 - DNA, 21 bp, Artificial sequence
  SiRNA target sequence
tgcttaaaaattcagagatcg

SEQ ID NO: 54574 - DNA, 21 bp, Artificial sequence
  SiRNA target sequence
gcttaaaaattcagagatcgt

SEQ ID NO: 54575 - DNA, 21 bp, Artificial sequence
  SiRNA target sequence
cttaaaaattcagagatcgtt

SEQ ID NO: 54576 - DNA, 21 bp, Artificial sequence
  SiRNA target sequence
ttaaaaattcagagatcgttt

SEQ ID NO: 54577 - DNA, 21 bp, Artificial sequence
  SiRNA target sequence
taaaaattcagagatcgtttt

SEQ ID NO: 54578 - DNA, 21 bp, Artificial sequence
  SiRNA target sequence
aaaaattcagagatcgtttta

SEQ ID NO: 54579 - DNA, 21 bp, Artificial sequence
  SiRNA target sequence
aaaattcagagatcgttttat

SEQ ID NO: 54580 - DNA, 21 bp, Artificial sequence
  SiRNA target sequence
aaattcagagatcgttttatt

SEQ ID NO: 54581 - DNA, 21 bp, Artificial sequence
  SiRNA target sequence
aattcagagatcgttttatta

SEQ ID NO: 54582 - DNA, 21 bp, Artificial sequence
  SiRNA target sequence
attcagagatcgttttattag

SEQ ID NO: 54583 - DNA, 21 bp, Artificial sequence
  SiRNA target sequence
ttcagagatcgttttattaga

SEQ ID NO: 54584 - DNA, 21 bp, Artificial sequence
  SiRNA target sequence
tcagagatcgttttattagac

SEQ ID NO: 54585 - DNA, 21 bp, Artificial sequence
  SiRNA target sequence
cagagatcgttttattagacg

SEQ ID NO: 54586 - DNA, 21 bp, Artificial sequence
  SiRNA target sequence
agagatcgttttattagacga

SEQ ID NO: 54587 - DNA, 21 bp, Artificial sequence
  SiRNA target sequence
gagatcgttttattagacgag

SEQ ID NO: 54588 - DNA, 21 bp, Artificial sequence
  SiRNA target sequence
agatcgttttattagacgagc

SEQ ID NO: 54589 - DNA, 21 bp, Artificial sequence
  SiRNA target sequence
gatcgttttattagacgagcc

SEQ ID NO: 54590 - DNA, 21 bp, Artificial sequence
  SiRNA target sequence
atcgttttattagacgagcca

SEQ ID NO: 54591 - DNA, 21 bp, Artificial sequence
  SiRNA target sequence
tcgttttattagacgagccaa

SEQ ID NO: 54592 - DNA, 21 bp, Artificial sequence
  SiRNA target sequence
cgttttattagacgagccaac

SEQ ID NO: 54593 - DNA, 21 bp, Artificial sequence
  SiRNA target sequence
gttttattagacgagccaacc

SEQ ID NO: 54594 - DNA, 21 bp, Artificial sequence
  SiRNA target sequence
ttttattagacgagccaacct

SEQ ID NO: 54595 - DNA, 21 bp, Artificial sequence
  SiRNA target sequence
tttattagacgagccaacctc

SEQ ID NO: 54596 - DNA, 21 bp, Artificial sequence
  SiRNA target sequence
ttattagacgagccaacctca

SEQ ID NO: 54597 - DNA, 21 bp, Artificial sequence
  SiRNA target sequence
tattagacgagccaacctcag

SEQ ID NO: 54598 - DNA, 21 bp, Artificial sequence
  SiRNA target sequence
attagacgagccaacctcagc

SEQ ID NO: 54599 - DNA, 21 bp, Artificial sequence
  SiRNA target sequence
ttagacgagccaacctcagca

SEQ ID NO: 54600 - DNA, 21 bp, Artificial sequence
  SiRNA target sequence
tagacgagccaacctcagcac

SEQ ID NO: 54601 - DNA, 21 bp, Artificial sequence
  SiRNA target sequence
agacgagccaacctcagcact

SEQ ID NO: 54602 - DNA, 21 bp, Artificial sequence
  SiRNA target sequence
gacgagccaacctcagcacta

SEQ ID NO: 54603 - DNA, 21 bp, Artificial sequence
  SiRNA target sequence
acgagccaacctcagcactag

SEQ ID NO: 54604 - DNA, 21 bp, Artificial sequence
  SiRNA target sequence
cgagccaacctcagcactaga

SEQ ID NO: 54605 - DNA, 21 bp, Artificial sequence
  SiRNA target sequence
gagccaacctcagcactagat

SEQ ID NO: 54606 - DNA, 21 bp, Artificial sequence
  SiRNA target sequence
agccaacctcagcactagata

SEQ ID NO: 54607 - DNA, 21 bp, Artificial sequence
  SiRNA target sequence
gccaacctcagcactagataa

SEQ ID NO: 54608 - DNA, 21 bp, Artificial sequence
  SiRNA target sequence
ccaacctcagcactagataaa

SEQ ID NO: 54609 - DNA, 21 bp, Artificial sequence
  SiRNA target sequence
caacctcagcactagataaaa

SEQ ID NO: 54610 - DNA, 21 bp, Artificial sequence
  SiRNA target sequence
aacctcagcactagataaaaa

SEQ ID NO: 54611 - DNA, 21 bp, Artificial sequence
  SiRNA target sequence
acctcagcactagataaaaag

SEQ ID NO: 54612 - DNA, 21 bp, Artificial sequence
  SiRNA target sequence
cctcagcactagataaaaaga

SEQ ID NO: 54613 - DNA, 21 bp, Artificial sequence
  SiRNA target sequence
ctcagcactagataaaaagag

SEQ ID NO: 54614 - DNA, 21 bp, Artificial sequence
  SiRNA target sequence
tcagcactagataaaaagagt

SEQ ID NO: 54615 - DNA, 21 bp, Artificial sequence
  SiRNA target sequence
cagcactagataaaaagagtg

SEQ ID NO: 54616 - DNA, 21 bp, Artificial sequence
  SiRNA target sequence
agcactagataaaaagagtga

SEQ ID NO: 54617 - DNA, 21 bp, Artificial sequence
  SiRNA target sequence
gcactagataaaaagagtgaa

SEQ ID NO: 54618 - DNA, 21 bp, Artificial sequence
  SiRNA target sequence
cactagataaaaagagtgaac

SEQ ID NO: 54619 - DNA, 21 bp, Artificial sequence
  SiRNA target sequence
actagataaaaagagtgaact

SEQ ID NO: 54620 - DNA, 21 bp, Artificial sequence
  SiRNA target sequence
ctagataaaaagagtgaacta

SEQ ID NO: 54621 - DNA, 21 bp, Artificial sequence
  SiRNA target sequence
tagataaaaagagtgaactag

SEQ ID NO: 54622 - DNA, 21 bp, Artificial sequence
  SiRNA target sequence
agataaaaagagtgaactaga

SEQ ID NO: 54623 - DNA, 21 bp, Artificial sequence
  SiRNA target sequence
gataaaaagagtgaactagaa

SEQ ID NO: 54624 - DNA, 21 bp, Artificial sequence
  SiRNA target sequence
ataaaaagagtgaactagaaa

SEQ ID NO: 54625 - DNA, 21 bp, Artificial sequence
  SiRNA target sequence
taaaaagagtgaactagaaac

SEQ ID NO: 54626 - DNA, 21 bp, Artificial sequence
  SiRNA target sequence
aaaaagagtgaactagaaact

SEQ ID NO: 54627 - DNA, 21 bp, Artificial sequence
  SiRNA target sequence
aaaagagtgaactagaaacta

SEQ ID NO: 54628 - DNA, 21 bp, Artificial sequence
  SiRNA target sequence
aaagagtgaactagaaactat

SEQ ID NO: 54629 - DNA, 21 bp, Artificial sequence
  SiRNA target sequence
aagagtgaactagaaactatg

SEQ ID NO: 54630 - DNA, 21 bp, Artificial sequence
  SiRNA target sequence
agagtgaactagaaactatga

SEQ ID NO: 54631 - DNA, 21 bp, Artificial sequence
  SiRNA target sequence
gagtgaactagaaactatgac

SEQ ID NO: 54632 - DNA, 21 bp, Artificial sequence
  SiRNA target sequence
agtgaactagaaactatgaca

SEQ ID NO: 54633 - DNA, 21 bp, Artificial sequence
  SiRNA target sequence
gtgaactagaaactatgacat

SEQ ID NO: 54634 - DNA, 21 bp, Artificial sequence
  SiRNA target sequence
tgaactagaaactatgacata

SEQ ID NO: 54635 - DNA, 21 bp, Artificial sequence
  SiRNA target sequence
gaactagaaactatgacatat

SEQ ID NO: 54636 - DNA, 21 bp, Artificial sequence
  SiRNA target sequence
aactagaaactatgacatata

SEQ ID NO: 54637 - DNA, 21 bp, Artificial sequence
  SiRNA target sequence
actagaaactatgacatatat

SEQ ID NO: 54638 - DNA, 21 bp, Artificial sequence
  SiRNA target sequence
ctagaaactatgacatatatt

SEQ ID NO: 54639 - DNA, 21 bp, Artificial sequence
  SiRNA target sequence
tagaaactatgacatatattt

SEQ ID NO: 54640 - DNA, 21 bp, Artificial sequence
  SiRNA target sequence
agaaactatgacatatatttt

SEQ ID NO: 54641 - DNA, 21 bp, Artificial sequence
  SiRNA target sequence
gaaactatgacatatattttt

SEQ ID NO: 54642 - DNA, 21 bp, Artificial sequence
  SiRNA target sequence
aaactatgacatatattttta

SEQ ID NO: 54643 - DNA, 21 bp, Artificial sequence
  SiRNA target sequence
aactatgacatatatttttaa

SEQ ID NO: 54644 - DNA, 21 bp, Artificial sequence
  SiRNA target sequence
actatgacatatatttttaat

SEQ ID NO: 54645 - DNA, 21 bp, Artificial sequence
  SiRNA target sequence
ctatgacatatatttttaatg

SEQ ID NO: 54646 - DNA, 21 bp, Artificial sequence
  SiRNA target sequence
tatgacatatatttttaatga

SEQ ID NO: 54647 - DNA, 21 bp, Artificial sequence
  SiRNA target sequence
atgacatatatttttaatgaa

SEQ ID NO: 54648 - DNA, 21 bp, Artificial sequence
  SiRNA target sequence
tgacatatatttttaatgaat

SEQ ID NO: 54649 - DNA, 21 bp, Artificial sequence
  SiRNA target sequence
gacatatatttttaatgaatt

SEQ ID NO: 54650 - DNA, 21 bp, Artificial sequence
  SiRNA target sequence
acatatatttttaatgaattt

SEQ ID NO: 54651 - DNA, 21 bp, Artificial sequence
  SiRNA target sequence
catatatttttaatgaattta

SEQ ID NO: 54652 - DNA, 21 bp, Artificial sequence
  SiRNA target sequence
atatatttttaatgaatttaa

SEQ ID NO: 54653 - DNA, 21 bp, Artificial sequence
  SiRNA target sequence
tatatttttaatgaatttaag

SEQ ID NO: 54654 - DNA, 21 bp, Artificial sequence
  SiRNA target sequence
atatttttaatgaatttaagt

SEQ ID NO: 54655 - DNA, 21 bp, Artificial sequence
  SiRNA target sequence
tatttttaatgaatttaagta

SEQ ID NO: 54656 - DNA, 21 bp, Artificial sequence
  SiRNA target sequence
atttttaatgaatttaagtac

SEQ ID NO: 54657 - DNA, 21 bp, Artificial sequence
  SiRNA target sequence
tttttaatgaatttaagtacc

SEQ ID NO: 54658 - DNA, 21 bp, Artificial sequence
  SiRNA target sequence
ttttaatgaatttaagtacca

SEQ ID NO: 54659 - DNA, 21 bp, Artificial sequence
  SiRNA target sequence
tttaatgaatttaagtaccat

SEQ ID NO: 54660 - DNA, 21 bp, Artificial sequence
  SiRNA target sequence
ttaatgaatttaagtaccata

SEQ ID NO: 54661 - DNA, 21 bp, Artificial sequence
  SiRNA target sequence
taatgaatttaagtaccatac

SEQ ID NO: 54662 - DNA, 21 bp, Artificial sequence
  SiRNA target sequence
aatgaatttaagtaccatact

SEQ ID NO: 54663 - DNA, 21 bp, Artificial sequence
  SiRNA target sequence
atgaatttaagtaccatactt

SEQ ID NO: 54664 - DNA, 21 bp, Artificial sequence
  SiRNA target sequence
tgaatttaagtaccatacttt

SEQ ID NO: 54665 - DNA, 21 bp, Artificial sequence
  SiRNA target sequence
gaatttaagtaccatactttt

SEQ ID NO: 54666 - DNA, 21 bp, Artificial sequence
  SiRNA target sequence
aatttaagtaccatacttttg

SEQ ID NO: 54667 - DNA, 21 bp, Artificial sequence
  SiRNA target sequence
atttaagtaccatacttttgt

SEQ ID NO: 54668 - DNA, 21 bp, Artificial sequence
  SiRNA target sequence
tttaagtaccatacttttgta

SEQ ID NO: 54669 - DNA, 21 bp, Artificial sequence
  SiRNA target sequence
ttaagtaccatacttttgtaa

SEQ ID NO: 54670 - DNA, 21 bp, Artificial sequence
  SiRNA target sequence
taagtaccatacttttgtaat

SEQ ID NO: 54671 - DNA, 21 bp, Artificial sequence
  SiRNA target sequence
aagtaccatacttttgtaata

SEQ ID NO: 54672 - DNA, 21 bp, Artificial sequence
  SiRNA target sequence
agtaccatacttttgtaataa

SEQ ID NO: 54673 - DNA, 21 bp, Artificial sequence
  SiRNA target sequence
gtaccatacttttgtaataat

SEQ ID NO: 54674 - DNA, 21 bp, Artificial sequence
  SiRNA target sequence
taccatacttttgtaataatt

SEQ ID NO: 54675 - DNA, 21 bp, Artificial sequence
  SiRNA target sequence
accatacttttgtaataattg

SEQ ID NO: 54676 - DNA, 21 bp, Artificial sequence
  SiRNA target sequence
ccatacttttgtaataattgt

SEQ ID NO: 54677 - DNA, 21 bp, Artificial sequence
  SiRNA target sequence
catacttttgtaataattgta

SEQ ID NO: 54678 - DNA, 21 bp, Artificial sequence
  SiRNA target sequence
atacttttgtaataattgtac

SEQ ID NO: 54679 - DNA, 21 bp, Artificial sequence
  SiRNA target sequence
tacttttgtaataattgtaca

SEQ ID NO: 54680 - DNA, 21 bp, Artificial sequence
  SiRNA target sequence
acttttgtaataattgtacac

SEQ ID NO: 54681 - DNA, 21 bp, Artificial sequence
  SiRNA target sequence
cttttgtaataattgtacaca

SEQ ID NO: 54682 - DNA, 21 bp, Artificial sequence
  SiRNA target sequence
ttttgtaataattgtacacaa

SEQ ID NO: 54683 - DNA, 21 bp, Artificial sequence
  SiRNA target sequence
tttgtaataattgtacacaat

SEQ ID NO: 54684 - DNA, 21 bp, Artificial sequence
  SiRNA target sequence
ttgtaataattgtacacaatc

SEQ ID NO: 54685 - DNA, 21 bp, Artificial sequence
  SiRNA target sequence
tgtaataattgtacacaatct

SEQ ID NO: 54686 - DNA, 21 bp, Artificial sequence
  SiRNA target sequence
gtaataattgtacacaatcta

SEQ ID NO: 54687 - DNA, 21 bp, Artificial sequence
  SiRNA target sequence
taataattgtacacaatctag

SEQ ID NO: 54688 - DNA, 21 bp, Artificial sequence
  SiRNA target sequence
aataattgtacacaatctaga

SEQ ID NO: 54689 - DNA, 21 bp, Artificial sequence
  SiRNA target sequence
ataattgtacacaatctagaa

SEQ ID NO: 54690 - DNA, 21 bp, Artificial sequence
  SiRNA target sequence
taattgtacacaatctagaat

SEQ ID NO: 54691 - DNA, 21 bp, Artificial sequence
  SiRNA target sequence
aattgtacacaatctagaatt

SEQ ID NO: 54692 - DNA, 21 bp, Artificial sequence
  SiRNA target sequence
attgtacacaatctagaatta

SEQ ID NO: 54693 - DNA, 21 bp, Artificial sequence
  SiRNA target sequence
ttgtacacaatctagaattat

SEQ ID NO: 54694 - DNA, 21 bp, Artificial sequence
  SiRNA target sequence
tgtacacaatctagaattatt

SEQ ID NO: 54695 - DNA, 21 bp, Artificial sequence
  SiRNA target sequence
gtacacaatctagaattattg

SEQ ID NO: 54696 - DNA, 21 bp, Artificial sequence
  SiRNA target sequence
tacacaatctagaattattgg

SEQ ID NO: 54697 - DNA, 21 bp, Artificial sequence
  SiRNA target sequence
acacaatctagaattattggc

SEQ ID NO: 54698 - DNA, 21 bp, Artificial sequence
  SiRNA target sequence
cacaatctagaattattggct

SEQ ID NO: 54699 - DNA, 21 bp, Artificial sequence
  SiRNA target sequence
acaatctagaattattggctt

SEQ ID NO: 54700 - DNA, 21 bp, Artificial sequence
  SiRNA target sequence
caatctagaattattggcttt

SEQ ID NO: 54701 - DNA, 21 bp, Artificial sequence
  SiRNA target sequence
aatctagaattattggctttg

SEQ ID NO: 54702 - DNA, 21 bp, Artificial sequence
  SiRNA target sequence
atctagaattattggctttgt

SEQ ID NO: 54703 - DNA, 21 bp, Artificial sequence
  SiRNA target sequence
tctagaattattggctttgtt

SEQ ID NO: 54704 - DNA, 21 bp, Artificial sequence
  SiRNA target sequence
ctagaattattggctttgttt

SEQ ID NO: 54705 - DNA, 21 bp, Artificial sequence
  SiRNA target sequence
tagaattattggctttgtttg

SEQ ID NO: 54706 - DNA, 21 bp, Artificial sequence
  SiRNA target sequence
agaattattggctttgtttga

SEQ ID NO: 54707 - DNA, 21 bp, Artificial sequence
  SiRNA target sequence
gaattattggctttgtttgat

SEQ ID NO: 54708 - DNA, 21 bp, Artificial sequence
  SiRNA target sequence
aattattggctttgtttgata

SEQ ID NO: 54709 - DNA, 21 bp, Artificial sequence
  SiRNA target sequence
attattggctttgtttgataa

SEQ ID NO: 54710 - DNA, 21 bp, Artificial sequence
  SiRNA target sequence
ttattggctttgtttgataaa

SEQ ID NO: 54711 - DNA, 21 bp, Artificial sequence
  SiRNA target sequence
tattggctttgtttgataaaa

SEQ ID NO: 54712 - DNA, 21 bp, Artificial sequence
  SiRNA target sequence
attggctttgtttgataaaat

SEQ ID NO: 54713 - DNA, 21 bp, Artificial sequence
  SiRNA target sequence
ttggctttgtttgataaaatt

SEQ ID NO: 54714 - DNA, 21 bp, Artificial sequence
  SiRNA target sequence
tggctttgtttgataaaattt

SEQ ID NO: 54715 - DNA, 21 bp, Artificial sequence
  SiRNA target sequence
ggctttgtttgataaaatttt

SEQ ID NO: 54716 - DNA, 21 bp, Artificial sequence
  SiRNA target sequence
gctttgtttgataaaatttta

SEQ ID NO: 54717 - DNA, 21 bp, Artificial sequence
  SiRNA target sequence
ctttgtttgataaaattttat

SEQ ID NO: 54718 - DNA, 21 bp, Artificial sequence
  SiRNA target sequence
tttgtttgataaaattttatt

SEQ ID NO: 54719 - DNA, 21 bp, Artificial sequence
  SiRNA target sequence
ttgtttgataaaattttattt

SEQ ID NO: 54720 - DNA, 21 bp, Artificial sequence
  SiRNA target sequence
tgtttgataaaattttatttg

SEQ ID NO: 54721 - DNA, 21 bp, Artificial sequence
  SiRNA target sequence
gtttgataaaattttatttgt

SEQ ID NO: 54722 - DNA, 21 bp, Artificial sequence
  SiRNA target sequence
tttgataaaattttatttgta

SEQ ID NO: 54723 - DNA, 21 bp, Artificial sequence
  SiRNA target sequence
ttgataaaattttatttgtaa

SEQ ID NO: 54724 - DNA, 21 bp, Artificial sequence
  SiRNA target sequence
tgataaaattttatttgtaaa

SEQ ID NO: 54725 - DNA, 21 bp, Artificial sequence
  SiRNA target sequence
gataaaattttatttgtaaat

SEQ ID NO: 54726 - DNA, 21 bp, Artificial sequence
  SiRNA target sequence
ataaaattttatttgtaaatg

SEQ ID NO: 54727 - DNA, 21 bp, Artificial sequence
  SiRNA target sequence
taaaattttatttgtaaatgg

SEQ ID NO: 54728 - DNA, 21 bp, Artificial sequence
  SiRNA target sequence
aaaattttatttgtaaatggt

SEQ ID NO: 54729 - DNA, 21 bp, Artificial sequence
  SiRNA target sequence
aaattttatttgtaaatggta

SEQ ID NO: 54730 - DNA, 21 bp, Artificial sequence
  SiRNA target sequence
aattttatttgtaaatggtaa

SEQ ID NO: 54731 - DNA, 21 bp, Artificial sequence
  SiRNA target sequence
attttatttgtaaatggtaat

SEQ ID NO: 54732 - DNA, 21 bp, Artificial sequence
  SiRNA target sequence
ttttatttgtaaatggtaatg

SEQ ID NO: 54733 - DNA, 21 bp, Artificial sequence
  SiRNA target sequence
tttatttgtaaatggtaatga

SEQ ID NO: 54734 - DNA, 21 bp, Artificial sequence
  SiRNA target sequence
ttatttgtaaatggtaatgag

SEQ ID NO: 54735 - DNA, 21 bp, Artificial sequence
  SiRNA target sequence
tatttgtaaatggtaatgagg

SEQ ID NO: 54736 - DNA, 21 bp, Artificial sequence
  SiRNA target sequence
atttgtaaatggtaatgaggt

SEQ ID NO: 54737 - DNA, 21 bp, Artificial sequence
  SiRNA target sequence
tttgtaaatggtaatgaggta

SEQ ID NO: 54738 - DNA, 21 bp, Artificial sequence
  SiRNA target sequence
ttgtaaatggtaatgaggtaa

SEQ ID NO: 54739 - DNA, 21 bp, Artificial sequence
  SiRNA target sequence
tgtaaatggtaatgaggtaac

SEQ ID NO: 54740 - DNA, 21 bp, Artificial sequence
  SiRNA target sequence
gtaaatggtaatgaggtaaca

SEQ ID NO: 54741 - DNA, 21 bp, Artificial sequence
  SiRNA target sequence
taaatggtaatgaggtaacaa

SEQ ID NO: 54742 - DNA, 21 bp, Artificial sequence
  SiRNA target sequence
aaatggtaatgaggtaacaat

SEQ ID NO: 54743 - DNA, 21 bp, Artificial sequence
  SiRNA target sequence
aatggtaatgaggtaacaatg

SEQ ID NO: 54744 - DNA, 21 bp, Artificial sequence
  SiRNA target sequence
atggtaatgaggtaacaatga

SEQ ID NO: 54745 - DNA, 21 bp, Artificial sequence
  SiRNA target sequence
tggtaatgaggtaacaatgat

SEQ ID NO: 54746 - DNA, 21 bp, Artificial sequence
  SiRNA target sequence
ggtaatgaggtaacaatgata

SEQ ID NO: 54747 - DNA, 21 bp, Artificial sequence
  SiRNA target sequence
gtaatgaggtaacaatgatag

SEQ ID NO: 54748 - DNA, 21 bp, Artificial sequence
  SiRNA target sequence
taatgaggtaacaatgataga

SEQ ID NO: 54749 - DNA, 21 bp, Artificial sequence
  SiRNA target sequence
aatgaggtaacaatgatagaa

SEQ ID NO: 54750 - DNA, 21 bp, Artificial sequence
  SiRNA target sequence
atgaggtaacaatgatagaag

SEQ ID NO: 54751 - DNA, 21 bp, Artificial sequence
  SiRNA target sequence
tgaggtaacaatgatagaaga

SEQ ID NO: 54752 - DNA, 21 bp, Artificial sequence
  SiRNA target sequence
gaggtaacaatgatagaagac

SEQ ID NO: 54753 - DNA, 21 bp, Artificial sequence
  SiRNA target sequence
aggtaacaatgatagaagaca

SEQ ID NO: 54754 - DNA, 21 bp, Artificial sequence
  SiRNA target sequence
ggtaacaatgatagaagacat

SEQ ID NO: 54755 - DNA, 21 bp, Artificial sequence
  SiRNA target sequence
gtaacaatgatagaagacatt

SEQ ID NO: 54756 - DNA, 21 bp, Artificial sequence
  SiRNA target sequence
taacaatgatagaagacatta

SEQ ID NO: 54757 - DNA, 21 bp, Artificial sequence
  SiRNA target sequence
aacaatgatagaagacattaa

SEQ ID NO: 54758 - DNA, 21 bp, Artificial sequence
  SiRNA target sequence
acaatgatagaagacattaac

SEQ ID NO: 54759 - DNA, 21 bp, Artificial sequence
  SiRNA target sequence
caatgatagaagacattaaca

SEQ ID NO: 54760 - DNA, 21 bp, Artificial sequence
  SiRNA target sequence
aatgatagaagacattaacaa

SEQ ID NO: 54761 - DNA, 21 bp, Artificial sequence
  SiRNA target sequence
atgatagaagacattaacaaa

SEQ ID NO: 54762 - DNA, 21 bp, Artificial sequence
  SiRNA target sequence
tgatagaagacattaacaaaa

SEQ ID NO: 54763 - DNA, 21 bp, Artificial sequence
  SiRNA target sequence
gatagaagacattaacaaaaa

SEQ ID NO: 54764 - DNA, 21 bp, Artificial sequence
  SiRNA target sequence
atagaagacattaacaaaaaa

SEQ ID NO: 54765 - DNA, 21 bp, Artificial sequence
  SiRNA target sequence
tagaagacattaacaaaaaac

SEQ ID NO: 54766 - DNA, 21 bp, Artificial sequence
  SiRNA target sequence
agaagacattaacaaaaaact

SEQ ID NO: 54767 - DNA, 21 bp, Artificial sequence
  SiRNA target sequence
gaagacattaacaaaaaactt

SEQ ID NO: 54768 - DNA, 21 bp, Artificial sequence
  SiRNA target sequence
aagacattaacaaaaaacttg

SEQ ID NO: 54769 - DNA, 21 bp, Artificial sequence
  SiRNA target sequence
agacattaacaaaaaacttga

SEQ ID NO: 54770 - DNA, 21 bp, Artificial sequence
  SiRNA target sequence
gacattaacaaaaaacttgaa

SEQ ID NO: 54771 - DNA, 21 bp, Artificial sequence
  SiRNA target sequence
acattaacaaaaaacttgaag

SEQ ID NO: 54772 - DNA, 21 bp, Artificial sequence
  SiRNA target sequence
cattaacaaaaaacttgaaga

SEQ ID NO: 54773 - DNA, 21 bp, Artificial sequence
  SiRNA target sequence
attaacaaaaaacttgaagaa

SEQ ID NO: 54774 - DNA, 21 bp, Artificial sequence
  SiRNA target sequence
ttaacaaaaaacttgaagaaa

SEQ ID NO: 54775 - DNA, 21 bp, Artificial sequence
  SiRNA target sequence
taacaaaaaacttgaagaaaa

SEQ ID NO: 54776 - DNA, 21 bp, Artificial sequence
  SiRNA target sequence
aacaaaaaacttgaagaaaat

SEQ ID NO: 54777 - DNA, 21 bp, Artificial sequence
  SiRNA target sequence
acaaaaaacttgaagaaaatt

SEQ ID NO: 54778 - DNA, 21 bp, Artificial sequence
  SiRNA target sequence
caaaaaacttgaagaaaattc

SEQ ID NO: 54779 - DNA, 21 bp, Artificial sequence
  SiRNA target sequence
aaaaaacttgaagaaaattca

SEQ ID NO: 54780 - DNA, 21 bp, Artificial sequence
  SiRNA target sequence
aaaaacttgaagaaaattcaa

SEQ ID NO: 54781 - DNA, 21 bp, Artificial sequence
  SiRNA target sequence
aaaacttgaagaaaattcaaa

SEQ ID NO: 54782 - DNA, 21 bp, Artificial sequence
  SiRNA target sequence
aaacttgaagaaaattcaaag

SEQ ID NO: 54783 - DNA, 21 bp, Artificial sequence
  SiRNA target sequence
aacttgaagaaaattcaaagt

SEQ ID NO: 54784 - DNA, 21 bp, Artificial sequence
  SiRNA target sequence
acttgaagaaaattcaaagta

SEQ ID NO: 54785 - DNA, 21 bp, Artificial sequence
  SiRNA target sequence
cttgaagaaaattcaaagtat

SEQ ID NO: 54786 - DNA, 21 bp, Artificial sequence
  SiRNA target sequence
ttgaagaaaattcaaagtatt

SEQ ID NO: 54787 - DNA, 21 bp, Artificial sequence
  SiRNA target sequence
tgaagaaaattcaaagtattt

SEQ ID NO: 54788 - DNA, 21 bp, Artificial sequence
  SiRNA target sequence
gaagaaaattcaaagtatttt

SEQ ID NO: 54789 - DNA, 21 bp, Artificial sequence
  SiRNA target sequence
aagaaaattcaaagtattttg

SEQ ID NO: 54790 - DNA, 21 bp, Artificial sequence
  SiRNA target sequence
agaaaattcaaagtattttgc

SEQ ID NO: 54791 - DNA, 21 bp, Artificial sequence
  SiRNA target sequence
gaaaattcaaagtattttgca

SEQ ID NO: 54792 - DNA, 21 bp, Artificial sequence
  SiRNA target sequence
aaaattcaaagtattttgcag

SEQ ID NO: 54793 - DNA, 21 bp, Artificial sequence
  SiRNA target sequence
aaattcaaagtattttgcaga

SEQ ID NO: 54794 - DNA, 21 bp, Artificial sequence
  SiRNA target sequence
aattcaaagtattttgcagat

SEQ ID NO: 54795 - DNA, 21 bp, Artificial sequence
  SiRNA target sequence
attcaaagtattttgcagata

SEQ ID NO: 54796 - DNA, 21 bp, Artificial sequence
  SiRNA target sequence
ttcaaagtattttgcagatat

SEQ ID NO: 54797 - DNA, 21 bp, Artificial sequence
  SiRNA target sequence
tcaaagtattttgcagatatt

SEQ ID NO: 54798 - DNA, 21 bp, Artificial sequence
  SiRNA target sequence
caaagtattttgcagatattt

SEQ ID NO: 54799 - DNA, 21 bp, Artificial sequence
  SiRNA target sequence
aaagtattttgcagatatttt

SEQ ID NO: 54800 - DNA, 21 bp, Artificial sequence
  SiRNA target sequence
aagtattttgcagatatttta

SEQ ID NO: 54801 - DNA, 21 bp, Artificial sequence
  SiRNA target sequence
agtattttgcagatattttaa

SEQ ID NO: 54802 - DNA, 21 bp, Artificial sequence
  SiRNA target sequence
gtattttgcagatattttaaa

SEQ ID NO: 54803 - DNA, 21 bp, Artificial sequence
  SiRNA target sequence
tattttgcagatattttaaac

SEQ ID NO: 54804 - DNA, 21 bp, Artificial sequence
  SiRNA target sequence
attttgcagatattttaaaca

SEQ ID NO: 54805 - DNA, 21 bp, Artificial sequence
  SiRNA target sequence
ttttgcagatattttaaacaa

SEQ ID NO: 54806 - DNA, 21 bp, Artificial sequence
  SiRNA target sequence
tttgcagatattttaaacaac

SEQ ID NO: 54807 - DNA, 21 bp, Artificial sequence
  SiRNA target sequence
ttgcagatattttaaacaacg

SEQ ID NO: 54808 - DNA, 21 bp, Artificial sequence
  SiRNA target sequence
tgcagatattttaaacaacga

SEQ ID NO: 54809 - DNA, 21 bp, Artificial sequence
  SiRNA target sequence
gcagatattttaaacaacgaa

SEQ ID NO: 54810 - DNA, 21 bp, Artificial sequence
  SiRNA target sequence
cagatattttaaacaacgaat

SEQ ID NO: 54811 - DNA, 21 bp, Artificial sequence
  SiRNA target sequence
agatattttaaacaacgaata

SEQ ID NO: 54812 - DNA, 21 bp, Artificial sequence
  SiRNA target sequence
gatattttaaacaacgaataa

SEQ ID NO: 54813 - DNA, 22 bp, Artificial sequence
  SiRNA target sequence
atgaaggaaaaaaccaattatg

SEQ ID NO: 54814 - DNA, 22 bp, Artificial sequence
  SiRNA target sequence
tgaaggaaaaaaccaattatga

SEQ ID NO: 54815 - DNA, 22 bp, Artificial sequence
  SiRNA target sequence
gaaggaaaaaaccaattatgaa

SEQ ID NO: 54816 - DNA, 22 bp, Artificial sequence
  SiRNA target sequence
aaggaaaaaaccaattatgaaa

SEQ ID NO: 54817 - DNA, 22 bp, Artificial sequence
  SiRNA target sequence
aggaaaaaaccaattatgaaat

SEQ ID NO: 54818 - DNA, 22 bp, Artificial sequence
  SiRNA target sequence
ggaaaaaaccaattatgaaatt

SEQ ID NO: 54819 - DNA, 22 bp, Artificial sequence
  SiRNA target sequence
gaaaaaaccaattatgaaattt

SEQ ID NO: 54820 - DNA, 22 bp, Artificial sequence
  SiRNA target sequence
aaaaaaccaattatgaaatttt

SEQ ID NO: 54821 - DNA, 22 bp, Artificial sequence
  SiRNA target sequence
aaaaaccaattatgaaatttta

SEQ ID NO: 54822 - DNA, 22 bp, Artificial sequence
  SiRNA target sequence
aaaaccaattatgaaattttat

SEQ ID NO: 54823 - DNA, 22 bp, Artificial sequence
  SiRNA target sequence
aaaccaattatgaaattttata

SEQ ID NO: 54824 - DNA, 22 bp, Artificial sequence
  SiRNA target sequence
aaccaattatgaaattttatat

SEQ ID NO: 54825 - DNA, 22 bp, Artificial sequence
  SiRNA target sequence
accaattatgaaattttatatg

SEQ ID NO: 54826 - DNA, 22 bp, Artificial sequence
  SiRNA target sequence
ccaattatgaaattttatatga

SEQ ID NO: 54827 - DNA, 22 bp, Artificial sequence
  SiRNA target sequence
caattatgaaattttatatgat

SEQ ID NO: 54828 - DNA, 22 bp, Artificial sequence
  SiRNA target sequence
aattatgaaattttatatgata

SEQ ID NO: 54829 - DNA, 22 bp, Artificial sequence
  SiRNA target sequence
attatgaaattttatatgatac

SEQ ID NO: 54830 - DNA, 22 bp, Artificial sequence
  SiRNA target sequence
ttatgaaattttatatgataca

SEQ ID NO: 54831 - DNA, 22 bp, Artificial sequence
  SiRNA target sequence
tatgaaattttatatgatacat

SEQ ID NO: 54832 - DNA, 22 bp, Artificial sequence
  SiRNA target sequence
atgaaattttatatgatacatt

SEQ ID NO: 54833 - DNA, 22 bp, Artificial sequence
  SiRNA target sequence
tgaaattttatatgatacattt

SEQ ID NO: 54834 - DNA, 22 bp, Artificial sequence
  SiRNA target sequence
gaaattttatatgatacatttg

SEQ ID NO: 54835 - DNA, 22 bp, Artificial sequence
  SiRNA target sequence
aaattttatatgatacatttgt

SEQ ID NO: 54836 - DNA, 22 bp, Artificial sequence
  SiRNA target sequence
aattttatatgatacatttgta

SEQ ID NO: 54837 - DNA, 22 bp, Artificial sequence
  SiRNA target sequence
attttatatgatacatttgtaa

SEQ ID NO: 54838 - DNA, 22 bp, Artificial sequence
  SiRNA target sequence
ttttatatgatacatttgtaaa

SEQ ID NO: 54839 - DNA, 22 bp, Artificial sequence
  SiRNA target sequence
tttatatgatacatttgtaaaa

SEQ ID NO: 54840 - DNA, 22 bp, Artificial sequence
  SiRNA target sequence
ttatatgatacatttgtaaaat

SEQ ID NO: 54841 - DNA, 22 bp, Artificial sequence
  SiRNA target sequence
tatatgatacatttgtaaaata

SEQ ID NO: 54842 - DNA, 22 bp, Artificial sequence
  SiRNA target sequence
atatgatacatttgtaaaatat

SEQ ID NO: 54843 - DNA, 22 bp, Artificial sequence
  SiRNA target sequence
tatgatacatttgtaaaatatt

SEQ ID NO: 54844 - DNA, 22 bp, Artificial sequence
  SiRNA target sequence
atgatacatttgtaaaatattg

SEQ ID NO: 54845 - DNA, 22 bp, Artificial sequence
  SiRNA target sequence
tgatacatttgtaaaatattgt

SEQ ID NO: 54846 - DNA, 22 bp, Artificial sequence
  SiRNA target sequence
gatacatttgtaaaatattgtt

SEQ ID NO: 54847 - DNA, 22 bp, Artificial sequence
  SiRNA target sequence
atacatttgtaaaatattgtta

SEQ ID NO: 54848 - DNA, 22 bp, Artificial sequence
  SiRNA target sequence
tacatttgtaaaatattgttac

SEQ ID NO: 54849 - DNA, 22 bp, Artificial sequence
  SiRNA target sequence
acatttgtaaaatattgttaca

SEQ ID NO: 54850 - DNA, 22 bp, Artificial sequence
  SiRNA target sequence
catttgtaaaatattgttacaa

SEQ ID NO: 54851 - DNA, 22 bp, Artificial sequence
  SiRNA target sequence
atttgtaaaatattgttacaat

SEQ ID NO: 54852 - DNA, 22 bp, Artificial sequence
  SiRNA target sequence
tttgtaaaatattgttacaata

SEQ ID NO: 54853 - DNA, 22 bp, Artificial sequence
  SiRNA target sequence
ttgtaaaatattgttacaatat

SEQ ID NO: 54854 - DNA, 22 bp, Artificial sequence
  SiRNA target sequence
tgtaaaatattgttacaatatt

SEQ ID NO: 54855 - DNA, 22 bp, Artificial sequence
  SiRNA target sequence
gtaaaatattgttacaatattt

SEQ ID NO: 54856 - DNA, 22 bp, Artificial sequence
  SiRNA target sequence
taaaatattgttacaatatttc

SEQ ID NO: 54857 - DNA, 22 bp, Artificial sequence
  SiRNA target sequence
aaaatattgttacaatatttcc

SEQ ID NO: 54858 - DNA, 22 bp, Artificial sequence
  SiRNA target sequence
aaatattgttacaatatttcct

SEQ ID NO: 54859 - DNA, 22 bp, Artificial sequence
  SiRNA target sequence
aatattgttacaatatttccta

SEQ ID NO: 54860 - DNA, 22 bp, Artificial sequence
  SiRNA target sequence
atattgttacaatatttcctat

SEQ ID NO: 54861 - DNA, 22 bp, Artificial sequence
  SiRNA target sequence
tattgttacaatatttcctata

SEQ ID NO: 54862 - DNA, 22 bp, Artificial sequence
  SiRNA target sequence
attgttacaatatttcctatat

SEQ ID NO: 54863 - DNA, 22 bp, Artificial sequence
  SiRNA target sequence
ttgttacaatatttcctatata

SEQ ID NO: 54864 - DNA, 22 bp, Artificial sequence
  SiRNA target sequence
tgttacaatatttcctatataa

SEQ ID NO: 54865 - DNA, 22 bp, Artificial sequence
  SiRNA target sequence
gttacaatatttcctatataag

SEQ ID NO: 54866 - DNA, 22 bp, Artificial sequence
  SiRNA target sequence
ttacaatatttcctatataagg

SEQ ID NO: 54867 - DNA, 22 bp, Artificial sequence
  SiRNA target sequence
tacaatatttcctatataaggt

SEQ ID NO: 54868 - DNA, 22 bp, Artificial sequence
  SiRNA target sequence
acaatatttcctatataaggta

SEQ ID NO: 54869 - DNA, 22 bp, Artificial sequence
  SiRNA target sequence
caatatttcctatataaggtac

SEQ ID NO: 54870 - DNA, 22 bp, Artificial sequence
  SiRNA target sequence
aatatttcctatataaggtacg

SEQ ID NO: 54871 - DNA, 22 bp, Artificial sequence
  SiRNA target sequence
atatttcctatataaggtacgt

SEQ ID NO: 54872 - DNA, 22 bp, Artificial sequence
  SiRNA target sequence
tatttcctatataaggtacgta

SEQ ID NO: 54873 - DNA, 22 bp, Artificial sequence
  SiRNA target sequence
atttcctatataaggtacgtaa

SEQ ID NO: 54874 - DNA, 22 bp, Artificial sequence
  SiRNA target sequence
tttcctatataaggtacgtaat

SEQ ID NO: 54875 - DNA, 22 bp, Artificial sequence
  SiRNA target sequence
ttcctatataaggtacgtaatg

SEQ ID NO: 54876 - DNA, 22 bp, Artificial sequence
  SiRNA target sequence
tcctatataaggtacgtaatgt

SEQ ID NO: 54877 - DNA, 22 bp, Artificial sequence
  SiRNA target sequence
cctatataaggtacgtaatgtt

SEQ ID NO: 54878 - DNA, 22 bp, Artificial sequence
  SiRNA target sequence
ctatataaggtacgtaatgttt

SEQ ID NO: 54879 - DNA, 22 bp, Artificial sequence
  SiRNA target sequence
tatataaggtacgtaatgtttc

SEQ ID NO: 54880 - DNA, 22 bp, Artificial sequence
  SiRNA target sequence
atataaggtacgtaatgtttcc

SEQ ID NO: 54881 - DNA, 22 bp, Artificial sequence
  SiRNA target sequence
tataaggtacgtaatgtttccc

SEQ ID NO: 54882 - DNA, 22 bp, Artificial sequence
  SiRNA target sequence
ataaggtacgtaatgtttccca

SEQ ID NO: 54883 - DNA, 22 bp, Artificial sequence
  SiRNA target sequence
taaggtacgtaatgtttcccat

SEQ ID NO: 54884 - DNA, 22 bp, Artificial sequence
  SiRNA target sequence
aaggtacgtaatgtttcccata

SEQ ID NO: 54885 - DNA, 22 bp, Artificial sequence
  SiRNA target sequence
aggtacgtaatgtttcccatat

SEQ ID NO: 54886 - DNA, 22 bp, Artificial sequence
  SiRNA target sequence
ggtacgtaatgtttcccatatt

SEQ ID NO: 54887 - DNA, 22 bp, Artificial sequence
  SiRNA target sequence
gtacgtaatgtttcccatatta

SEQ ID NO: 54888 - DNA, 22 bp, Artificial sequence
  SiRNA target sequence
tacgtaatgtttcccatattac

SEQ ID NO: 54889 - DNA, 22 bp, Artificial sequence
  SiRNA target sequence
acgtaatgtttcccatattact

SEQ ID NO: 54890 - DNA, 22 bp, Artificial sequence
  SiRNA target sequence
cgtaatgtttcccatattactg

SEQ ID NO: 54891 - DNA, 22 bp, Artificial sequence
  SiRNA target sequence
gtaatgtttcccatattactgt

SEQ ID NO: 54892 - DNA, 22 bp, Artificial sequence
  SiRNA target sequence
taatgtttcccatattactgtc

SEQ ID NO: 54893 - DNA, 22 bp, Artificial sequence
  SiRNA target sequence
aatgtttcccatattactgtct

SEQ ID NO: 54894 - DNA, 22 bp, Artificial sequence
  SiRNA target sequence
atgtttcccatattactgtcta

SEQ ID NO: 54895 - DNA, 22 bp, Artificial sequence
  SiRNA target sequence
tgtttcccatattactgtctac

SEQ ID NO: 54896 - DNA, 22 bp, Artificial sequence
  SiRNA target sequence
gtttcccatattactgtctaca

SEQ ID NO: 54897 - DNA, 22 bp, Artificial sequence
  SiRNA target sequence
tttcccatattactgtctacaa

SEQ ID NO: 54898 - DNA, 22 bp, Artificial sequence
  SiRNA target sequence
ttcccatattactgtctacaat

SEQ ID NO: 54899 - DNA, 22 bp, Artificial sequence
  SiRNA target sequence
tcccatattactgtctacaatt

SEQ ID NO: 54900 - DNA, 22 bp, Artificial sequence
  SiRNA target sequence
cccatattactgtctacaatta

SEQ ID NO: 54901 - DNA, 22 bp, Artificial sequence
  SiRNA target sequence
ccatattactgtctacaattat

SEQ ID NO: 54902 - DNA, 22 bp, Artificial sequence
  SiRNA target sequence
catattactgtctacaattata

SEQ ID NO: 54903 - DNA, 22 bp, Artificial sequence
  SiRNA target sequence
atattactgtctacaattatag

SEQ ID NO: 54904 - DNA, 22 bp, Artificial sequence
  SiRNA target sequence
tattactgtctacaattatagc

SEQ ID NO: 54905 - DNA, 22 bp, Artificial sequence
  SiRNA target sequence
attactgtctacaattatagct

SEQ ID NO: 54906 - DNA, 22 bp, Artificial sequence
  SiRNA target sequence
ttactgtctacaattatagctt

SEQ ID NO: 54907 - DNA, 22 bp, Artificial sequence
  SiRNA target sequence
tactgtctacaattatagcttg

SEQ ID NO: 54908 - DNA, 22 bp, Artificial sequence
  SiRNA target sequence
actgtctacaattatagcttgt

SEQ ID NO: 54909 - DNA, 22 bp, Artificial sequence
  SiRNA target sequence
ctgtctacaattatagcttgtt

SEQ ID NO: 54910 - DNA, 22 bp, Artificial sequence
  SiRNA target sequence
tgtctacaattatagcttgtta

SEQ ID NO: 54911 - DNA, 22 bp, Artificial sequence
  SiRNA target sequence
gtctacaattatagcttgttat

SEQ ID NO: 54912 - DNA, 22 bp, Artificial sequence
  SiRNA target sequence
tctacaattatagcttgttatc

SEQ ID NO: 54913 - DNA, 22 bp, Artificial sequence
  SiRNA target sequence
ctacaattatagcttgttatct

SEQ ID NO: 54914 - DNA, 22 bp, Artificial sequence
  SiRNA target sequence
tacaattatagcttgttatctc

SEQ ID NO: 54915 - DNA, 22 bp, Artificial sequence
  SiRNA target sequence
acaattatagcttgttatctcg

SEQ ID NO: 54916 - DNA, 22 bp, Artificial sequence
  SiRNA target sequence
caattatagcttgttatctcga

SEQ ID NO: 54917 - DNA, 22 bp, Artificial sequence
  SiRNA target sequence
aattatagcttgttatctcgaa

SEQ ID NO: 54918 - DNA, 22 bp, Artificial sequence
  SiRNA target sequence
attatagcttgttatctcgaag

SEQ ID NO: 54919 - DNA, 22 bp, Artificial sequence
  SiRNA target sequence
ttatagcttgttatctcgaagt

SEQ ID NO: 54920 - DNA, 22 bp, Artificial sequence
  SiRNA target sequence
tatagcttgttatctcgaagtt

SEQ ID NO: 54921 - DNA, 22 bp, Artificial sequence
  SiRNA target sequence
atagcttgttatctcgaagttc

SEQ ID NO: 54922 - DNA, 22 bp, Artificial sequence
  SiRNA target sequence
tagcttgttatctcgaagttca

SEQ ID NO: 54923 - DNA, 22 bp, Artificial sequence
  SiRNA target sequence
agcttgttatctcgaagttcag

SEQ ID NO: 54924 - DNA, 22 bp, Artificial sequence
  SiRNA target sequence
gcttgttatctcgaagttcagg

SEQ ID NO: 54925 - DNA, 22 bp, Artificial sequence
  SiRNA target sequence
cttgttatctcgaagttcaggc

SEQ ID NO: 54926 - DNA, 22 bp, Artificial sequence
  SiRNA target sequence
ttgttatctcgaagttcaggca

SEQ ID NO: 54927 - DNA, 22 bp, Artificial sequence
  SiRNA target sequence
tgttatctcgaagttcaggcaa

SEQ ID NO: 54928 - DNA, 22 bp, Artificial sequence
  SiRNA target sequence
gttatctcgaagttcaggcaag

SEQ ID NO: 54929 - DNA, 22 bp, Artificial sequence
  SiRNA target sequence
ttatctcgaagttcaggcaagt

SEQ ID NO: 54930 - DNA, 22 bp, Artificial sequence
  SiRNA target sequence
tatctcgaagttcaggcaagta

SEQ ID NO: 54931 - DNA, 22 bp, Artificial sequence
  SiRNA target sequence
atctcgaagttcaggcaagtaa

SEQ ID NO: 54932 - DNA, 22 bp, Artificial sequence
  SiRNA target sequence
tctcgaagttcaggcaagtaac

SEQ ID NO: 54933 - DNA, 22 bp, Artificial sequence
  SiRNA target sequence
ctcgaagttcaggcaagtaaca

SEQ ID NO: 54934 - DNA, 22 bp, Artificial sequence
  SiRNA target sequence
tcgaagttcaggcaagtaacat

SEQ ID NO: 54935 - DNA, 22 bp, Artificial sequence
  SiRNA target sequence
cgaagttcaggcaagtaacata

SEQ ID NO: 54936 - DNA, 22 bp, Artificial sequence
  SiRNA target sequence
gaagttcaggcaagtaacatat

SEQ ID NO: 54937 - DNA, 22 bp, Artificial sequence
  SiRNA target sequence
aagttcaggcaagtaacatatc

SEQ ID NO: 54938 - DNA, 22 bp, Artificial sequence
  SiRNA target sequence
agttcaggcaagtaacatatca

SEQ ID NO: 54939 - DNA, 22 bp, Artificial sequence
  SiRNA target sequence
gttcaggcaagtaacatatcaa

SEQ ID NO: 54940 - DNA, 22 bp, Artificial sequence
  SiRNA target sequence
ttcaggcaagtaacatatcaaa

SEQ ID NO: 54941 - DNA, 22 bp, Artificial sequence
  SiRNA target sequence
tcaggcaagtaacatatcaaaa

SEQ ID NO: 54942 - DNA, 22 bp, Artificial sequence
  SiRNA target sequence
caggcaagtaacatatcaaaaa

SEQ ID NO: 54943 - DNA, 22 bp, Artificial sequence
  SiRNA target sequence
aggcaagtaacatatcaaaaag

SEQ ID NO: 54944 - DNA, 22 bp, Artificial sequence
  SiRNA target sequence
ggcaagtaacatatcaaaaaga

SEQ ID NO: 54945 - DNA, 22 bp, Artificial sequence
  SiRNA target sequence
gcaagtaacatatcaaaaagaa

SEQ ID NO: 54946 - DNA, 22 bp, Artificial sequence
  SiRNA target sequence
caagtaacatatcaaaaagaat

SEQ ID NO: 54947 - DNA, 22 bp, Artificial sequence
  SiRNA target sequence
aagtaacatatcaaaaagaatt

SEQ ID NO: 54948 - DNA, 22 bp, Artificial sequence
  SiRNA target sequence
agtaacatatcaaaaagaattg

SEQ ID NO: 54949 - DNA, 22 bp, Artificial sequence
  SiRNA target sequence
gtaacatatcaaaaagaattgc

SEQ ID NO: 54950 - DNA, 22 bp, Artificial sequence
  SiRNA target sequence
taacatatcaaaaagaattgca

SEQ ID NO: 54951 - DNA, 22 bp, Artificial sequence
  SiRNA target sequence
aacatatcaaaaagaattgcag

SEQ ID NO: 54952 - DNA, 22 bp, Artificial sequence
  SiRNA target sequence
acatatcaaaaagaattgcaga

SEQ ID NO: 54953 - DNA, 22 bp, Artificial sequence
  SiRNA target sequence
catatcaaaaagaattgcagaa

SEQ ID NO: 54954 - DNA, 22 bp, Artificial sequence
  SiRNA target sequence
atatcaaaaagaattgcagaag

SEQ ID NO: 54955 - DNA, 22 bp, Artificial sequence
  SiRNA target sequence
tatcaaaaagaattgcagaaga

SEQ ID NO: 54956 - DNA, 22 bp, Artificial sequence
  SiRNA target sequence
atcaaaaagaattgcagaagat

SEQ ID NO: 54957 - DNA, 22 bp, Artificial sequence
  SiRNA target sequence
tcaaaaagaattgcagaagatt

SEQ ID NO: 54958 - DNA, 22 bp, Artificial sequence
  SiRNA target sequence
caaaaagaattgcagaagattt

SEQ ID NO: 54959 - DNA, 22 bp, Artificial sequence
  SiRNA target sequence
aaaaagaattgcagaagatttt

SEQ ID NO: 54960 - DNA, 22 bp, Artificial sequence
  SiRNA target sequence
aaaagaattgcagaagattttg

SEQ ID NO: 54961 - DNA, 22 bp, Artificial sequence
  SiRNA target sequence
aaagaattgcagaagattttga

SEQ ID NO: 54962 - DNA, 22 bp, Artificial sequence
  SiRNA target sequence
aagaattgcagaagattttgaa

SEQ ID NO: 54963 - DNA, 22 bp, Artificial sequence
  SiRNA target sequence
agaattgcagaagattttgaaa

SEQ ID NO: 54964 - DNA, 22 bp, Artificial sequence
  SiRNA target sequence
gaattgcagaagattttgaaaa

SEQ ID NO: 54965 - DNA, 22 bp, Artificial sequence
  SiRNA target sequence
aattgcagaagattttgaaaat

SEQ ID NO: 54966 - DNA, 22 bp, Artificial sequence
  SiRNA target sequence
attgcagaagattttgaaaata

SEQ ID NO: 54967 - DNA, 22 bp, Artificial sequence
  SiRNA target sequence
ttgcagaagattttgaaaataa

SEQ ID NO: 54968 - DNA, 22 bp, Artificial sequence
  SiRNA target sequence
tgcagaagattttgaaaataaa

SEQ ID NO: 54969 - DNA, 22 bp, Artificial sequence
  SiRNA target sequence
gcagaagattttgaaaataaaa

SEQ ID NO: 54970 - DNA, 22 bp, Artificial sequence
  SiRNA target sequence
cagaagattttgaaaataaaat

SEQ ID NO: 54971 - DNA, 22 bp, Artificial sequence
  SiRNA target sequence
agaagattttgaaaataaaata

SEQ ID NO: 54972 - DNA, 22 bp, Artificial sequence
  SiRNA target sequence
gaagattttgaaaataaaataa

SEQ ID NO: 54973 - DNA, 22 bp, Artificial sequence
  SiRNA target sequence
aagattttgaaaataaaataaa

SEQ ID NO: 54974 - DNA, 22 bp, Artificial sequence
  SiRNA target sequence
agattttgaaaataaaataaat

SEQ ID NO: 54975 - DNA, 22 bp, Artificial sequence
  SiRNA target sequence
gattttgaaaataaaataaatg

SEQ ID NO: 54976 - DNA, 22 bp, Artificial sequence
  SiRNA target sequence
attttgaaaataaaataaatgc

SEQ ID NO: 54977 - DNA, 22 bp, Artificial sequence
  SiRNA target sequence
ttttgaaaataaaataaatgca

SEQ ID NO: 54978 - DNA, 22 bp, Artificial sequence
  SiRNA target sequence
tttgaaaataaaataaatgcag

SEQ ID NO: 54979 - DNA, 22 bp, Artificial sequence
  SiRNA target sequence
ttgaaaataaaataaatgcagg

SEQ ID NO: 54980 - DNA, 22 bp, Artificial sequence
  SiRNA target sequence
tgaaaataaaataaatgcagga

SEQ ID NO: 54981 - DNA, 22 bp, Artificial sequence
  SiRNA target sequence
gaaaataaaataaatgcaggaa

SEQ ID NO: 54982 - DNA, 22 bp, Artificial sequence
  SiRNA target sequence
aaaataaaataaatgcaggaaa

SEQ ID NO: 54983 - DNA, 22 bp, Artificial sequence
  SiRNA target sequence
aaataaaataaatgcaggaaaa

SEQ ID NO: 54984 - DNA, 22 bp, Artificial sequence
  SiRNA target sequence
aataaaataaatgcaggaaaaa

SEQ ID NO: 54985 - DNA, 22 bp, Artificial sequence
  SiRNA target sequence
ataaaataaatgcaggaaaaag

SEQ ID NO: 54986 - DNA, 22 bp, Artificial sequence
  SiRNA target sequence
taaaataaatgcaggaaaaagt

SEQ ID NO: 54987 - DNA, 22 bp, Artificial sequence
  SiRNA target sequence
aaaataaatgcaggaaaaagta

SEQ ID NO: 54988 - DNA, 22 bp, Artificial sequence
  SiRNA target sequence
aaataaatgcaggaaaaagtat

SEQ ID NO: 54989 - DNA, 22 bp, Artificial sequence
  SiRNA target sequence
aataaatgcaggaaaaagtata

SEQ ID NO: 54990 - DNA, 22 bp, Artificial sequence
  SiRNA target sequence
ataaatgcaggaaaaagtatat

SEQ ID NO: 54991 - DNA, 22 bp, Artificial sequence
  SiRNA target sequence
taaatgcaggaaaaagtatatt

SEQ ID NO: 54992 - DNA, 22 bp, Artificial sequence
  SiRNA target sequence
aaatgcaggaaaaagtatattt

SEQ ID NO: 54993 - DNA, 22 bp, Artificial sequence
  SiRNA target sequence
aatgcaggaaaaagtatattta

SEQ ID NO: 54994 - DNA, 22 bp, Artificial sequence
  SiRNA target sequence
atgcaggaaaaagtatatttaa

SEQ ID NO: 54995 - DNA, 22 bp, Artificial sequence
  SiRNA target sequence
tgcaggaaaaagtatatttaaa

SEQ ID NO: 54996 - DNA, 22 bp, Artificial sequence
  SiRNA target sequence
gcaggaaaaagtatatttaaat

SEQ ID NO: 54997 - DNA, 22 bp, Artificial sequence
  SiRNA target sequence
caggaaaaagtatatttaaata

SEQ ID NO: 54998 - DNA, 22 bp, Artificial sequence
  SiRNA target sequence
aggaaaaagtatatttaaatat

SEQ ID NO: 54999 - DNA, 22 bp, Artificial sequence
  SiRNA target sequence
ggaaaaagtatatttaaatata

SEQ ID NO: 55000 - DNA, 22 bp, Artificial sequence
  SiRNA target sequence
gaaaaagtatatttaaatatat

SEQ ID NO: 55001 - DNA, 22 bp, Artificial sequence
  SiRNA target sequence
aaaaagtatatttaaatatatt

SEQ ID NO: 55002 - DNA, 22 bp, Artificial sequence
  SiRNA target sequence
aaaagtatatttaaatatattt

SEQ ID NO: 55003 - DNA, 22 bp, Artificial sequence
  SiRNA target sequence
aaagtatatttaaatatatttt

SEQ ID NO: 55004 - DNA, 22 bp, Artificial sequence
  SiRNA target sequence
aagtatatttaaatatatttta

SEQ ID NO: 55005 - DNA, 22 bp, Artificial sequence
  SiRNA target sequence
agtatatttaaatatattttat

SEQ ID NO: 55006 - DNA, 22 bp, Artificial sequence
  SiRNA target sequence
gtatatttaaatatattttatt

SEQ ID NO: 55007 - DNA, 22 bp, Artificial sequence
  SiRNA target sequence
tatatttaaatatattttattt

SEQ ID NO: 55008 - DNA, 22 bp, Artificial sequence
  SiRNA target sequence
atatttaaatatattttatttt

SEQ ID NO: 55009 - DNA, 22 bp, Artificial sequence
  SiRNA target sequence
tatttaaatatattttattttt

SEQ ID NO: 55010 - DNA, 22 bp, Artificial sequence
  SiRNA target sequence
atttaaatatattttattttta

SEQ ID NO: 55011 - DNA, 22 bp, Artificial sequence
  SiRNA target sequence
tttaaatatattttatttttaa

SEQ ID NO: 55012 - DNA, 22 bp, Artificial sequence
  SiRNA target sequence
ttaaatatattttatttttaac

SEQ ID NO: 55013 - DNA, 22 bp, Artificial sequence
  SiRNA target sequence
taaatatattttatttttaact

SEQ ID NO: 55014 - DNA, 22 bp, Artificial sequence
  SiRNA target sequence
aaatatattttatttttaactt

SEQ ID NO: 55015 - DNA, 22 bp, Artificial sequence
  SiRNA target sequence
aatatattttatttttaacttc

SEQ ID NO: 55016 - DNA, 22 bp, Artificial sequence
  SiRNA target sequence
atatattttatttttaacttca

SEQ ID NO: 55017 - DNA, 22 bp, Artificial sequence
  SiRNA target sequence
tatattttatttttaacttcat

SEQ ID NO: 55018 - DNA, 22 bp, Artificial sequence
  SiRNA target sequence
atattttatttttaacttcatc

SEQ ID NO: 55019 - DNA, 22 bp, Artificial sequence
  SiRNA target sequence
tattttatttttaacttcatca

SEQ ID NO: 55020 - DNA, 22 bp, Artificial sequence
  SiRNA target sequence
attttatttttaacttcatcaa

SEQ ID NO: 55021 - DNA, 22 bp, Artificial sequence
  SiRNA target sequence
ttttatttttaacttcatcaat

SEQ ID NO: 55022 - DNA, 22 bp, Artificial sequence
  SiRNA target sequence
tttatttttaacttcatcaata

SEQ ID NO: 55023 - DNA, 22 bp, Artificial sequence
  SiRNA target sequence
ttatttttaacttcatcaatag

SEQ ID NO: 55024 - DNA, 22 bp, Artificial sequence
  SiRNA target sequence
tatttttaacttcatcaatagt

SEQ ID NO: 55025 - DNA, 22 bp, Artificial sequence
  SiRNA target sequence
atttttaacttcatcaatagta

SEQ ID NO: 55026 - DNA, 22 bp, Artificial sequence
  SiRNA target sequence
tttttaacttcatcaatagtat

SEQ ID NO: 55027 - DNA, 22 bp, Artificial sequence
  SiRNA target sequence
ttttaacttcatcaatagtatt

SEQ ID NO: 55028 - DNA, 22 bp, Artificial sequence
  SiRNA target sequence
tttaacttcatcaatagtatta

SEQ ID NO: 55029 - DNA, 22 bp, Artificial sequence
  SiRNA target sequence
ttaacttcatcaatagtattaa

SEQ ID NO: 55030 - DNA, 22 bp, Artificial sequence
  SiRNA target sequence
taacttcatcaatagtattaag

SEQ ID NO: 55031 - DNA, 22 bp, Artificial sequence
  SiRNA target sequence
aacttcatcaatagtattaaga

SEQ ID NO: 55032 - DNA, 22 bp, Artificial sequence
  SiRNA target sequence
acttcatcaatagtattaagac

SEQ ID NO: 55033 - DNA, 22 bp, Artificial sequence
  SiRNA target sequence
cttcatcaatagtattaagaca

SEQ ID NO: 55034 - DNA, 22 bp, Artificial sequence
  SiRNA target sequence
ttcatcaatagtattaagacaa

SEQ ID NO: 55035 - DNA, 22 bp, Artificial sequence
  SiRNA target sequence
tcatcaatagtattaagacaaa

SEQ ID NO: 55036 - DNA, 22 bp, Artificial sequence
  SiRNA target sequence
catcaatagtattaagacaaat

SEQ ID NO: 55037 - DNA, 22 bp, Artificial sequence
  SiRNA target sequence
atcaatagtattaagacaaatt

SEQ ID NO: 55038 - DNA, 22 bp, Artificial sequence
  SiRNA target sequence
tcaatagtattaagacaaatta

SEQ ID NO: 55039 - DNA, 22 bp, Artificial sequence
  SiRNA target sequence
caatagtattaagacaaattaa

SEQ ID NO: 55040 - DNA, 22 bp, Artificial sequence
  SiRNA target sequence
aatagtattaagacaaattaat

SEQ ID NO: 55041 - DNA, 22 bp, Artificial sequence
  SiRNA target sequence
atagtattaagacaaattaatg

SEQ ID NO: 55042 - DNA, 22 bp, Artificial sequence
  SiRNA target sequence
tagtattaagacaaattaatga

SEQ ID NO: 55043 - DNA, 22 bp, Artificial sequence
  SiRNA target sequence
agtattaagacaaattaatgat

SEQ ID NO: 55044 - DNA, 22 bp, Artificial sequence
  SiRNA target sequence
gtattaagacaaattaatgata

SEQ ID NO: 55045 - DNA, 22 bp, Artificial sequence
  SiRNA target sequence
tattaagacaaattaatgatat

SEQ ID NO: 55046 - DNA, 22 bp, Artificial sequence
  SiRNA target sequence
attaagacaaattaatgatatt

SEQ ID NO: 55047 - DNA, 22 bp, Artificial sequence
  SiRNA target sequence
ttaagacaaattaatgatattg

SEQ ID NO: 55048 - DNA, 22 bp, Artificial sequence
  SiRNA target sequence
taagacaaattaatgatattgt

SEQ ID NO: 55049 - DNA, 22 bp, Artificial sequence
  SiRNA target sequence
aagacaaattaatgatattgtg

SEQ ID NO: 55050 - DNA, 22 bp, Artificial sequence
  SiRNA target sequence
agacaaattaatgatattgtgt

SEQ ID NO: 55051 - DNA, 22 bp, Artificial sequence
  SiRNA target sequence
gacaaattaatgatattgtgtt

SEQ ID NO: 55052 - DNA, 22 bp, Artificial sequence
  SiRNA target sequence
acaaattaatgatattgtgttt

SEQ ID NO: 55053 - DNA, 22 bp, Artificial sequence
  SiRNA target sequence
caaattaatgatattgtgttta

SEQ ID NO: 55054 - DNA, 22 bp, Artificial sequence
  SiRNA target sequence
aaattaatgatattgtgtttag

SEQ ID NO: 55055 - DNA, 22 bp, Artificial sequence
  SiRNA target sequence
aattaatgatattgtgtttagc

SEQ ID NO: 55056 - DNA, 22 bp, Artificial sequence
  SiRNA target sequence
attaatgatattgtgtttagcg

SEQ ID NO: 55057 - DNA, 22 bp, Artificial sequence
  SiRNA target sequence
ttaatgatattgtgtttagcgg

SEQ ID NO: 55058 - DNA, 22 bp, Artificial sequence
  SiRNA target sequence
taatgatattgtgtttagcggg

SEQ ID NO: 55059 - DNA, 22 bp, Artificial sequence
  SiRNA target sequence
aatgatattgtgtttagcgggc

SEQ ID NO: 55060 - DNA, 22 bp, Artificial sequence
  SiRNA target sequence
atgatattgtgtttagcgggcc

SEQ ID NO: 55061 - DNA, 22 bp, Artificial sequence
  SiRNA target sequence
tgatattgtgtttagcgggcca

SEQ ID NO: 55062 - DNA, 22 bp, Artificial sequence
  SiRNA target sequence
gatattgtgtttagcgggccaa

SEQ ID NO: 55063 - DNA, 22 bp, Artificial sequence
  SiRNA target sequence
atattgtgtttagcgggccaat

SEQ ID NO: 55064 - DNA, 22 bp, Artificial sequence
  SiRNA target sequence
tattgtgtttagcgggccaata

SEQ ID NO: 55065 - DNA, 22 bp, Artificial sequence
  SiRNA target sequence
attgtgtttagcgggccaatac

SEQ ID NO: 55066 - DNA, 22 bp, Artificial sequence
  SiRNA target sequence
ttgtgtttagcgggccaataca

SEQ ID NO: 55067 - DNA, 22 bp, Artificial sequence
  SiRNA target sequence
tgtgtttagcgggccaatacaa

SEQ ID NO: 55068 - DNA, 22 bp, Artificial sequence
  SiRNA target sequence
gtgtttagcgggccaatacaat

SEQ ID NO: 55069 - DNA, 22 bp, Artificial sequence
  SiRNA target sequence
tgtttagcgggccaatacaatt

SEQ ID NO: 55070 - DNA, 22 bp, Artificial sequence
  SiRNA target sequence
gtttagcgggccaatacaattt

SEQ ID NO: 55071 - DNA, 22 bp, Artificial sequence
  SiRNA target sequence
tttagcgggccaatacaatttt

SEQ ID NO: 55072 - DNA, 22 bp, Artificial sequence
  SiRNA target sequence
ttagcgggccaatacaattttt

SEQ ID NO: 55073 - DNA, 22 bp, Artificial sequence
  SiRNA target sequence
tagcgggccaatacaattttta

SEQ ID NO: 55074 - DNA, 22 bp, Artificial sequence
  SiRNA target sequence
agcgggccaatacaatttttat

SEQ ID NO: 55075 - DNA, 22 bp, Artificial sequence
  SiRNA target sequence
gcgggccaatacaatttttata

SEQ ID NO: 55076 - DNA, 22 bp, Artificial sequence
  SiRNA target sequence
cgggccaatacaatttttatat

SEQ ID NO: 55077 - DNA, 22 bp, Artificial sequence
  SiRNA target sequence
gggccaatacaatttttatata

SEQ ID NO: 55078 - DNA, 22 bp, Artificial sequence
  SiRNA target sequence
ggccaatacaatttttatataa

SEQ ID NO: 55079 - DNA, 22 bp, Artificial sequence
  SiRNA target sequence
gccaatacaatttttatataaa

SEQ ID NO: 55080 - DNA, 22 bp, Artificial sequence
  SiRNA target sequence
ccaatacaatttttatataaaa

SEQ ID NO: 55081 - DNA, 22 bp, Artificial sequence
  SiRNA target sequence
caatacaatttttatataaaat

SEQ ID NO: 55082 - DNA, 22 bp, Artificial sequence
  SiRNA target sequence
aatacaatttttatataaaatt

SEQ ID NO: 55083 - DNA, 22 bp, Artificial sequence
  SiRNA target sequence
atacaatttttatataaaattg

SEQ ID NO: 55084 - DNA, 22 bp, Artificial sequence
  SiRNA target sequence
tacaatttttatataaaattgt

SEQ ID NO: 55085 - DNA, 22 bp, Artificial sequence
  SiRNA target sequence
acaatttttatataaaattgtt

SEQ ID NO: 55086 - DNA, 22 bp, Artificial sequence
  SiRNA target sequence
caatttttatataaaattgttg

SEQ ID NO: 55087 - DNA, 22 bp, Artificial sequence
  SiRNA target sequence
aatttttatataaaattgttgg

SEQ ID NO: 55088 - DNA, 22 bp, Artificial sequence
  SiRNA target sequence
atttttatataaaattgttgga

SEQ ID NO: 55089 - DNA, 22 bp, Artificial sequence
  SiRNA target sequence
tttttatataaaattgttggag

SEQ ID NO: 55090 - DNA, 22 bp, Artificial sequence
  SiRNA target sequence
ttttatataaaattgttggagt

SEQ ID NO: 55091 - DNA, 22 bp, Artificial sequence
  SiRNA target sequence
tttatataaaattgttggagtt

SEQ ID NO: 55092 - DNA, 22 bp, Artificial sequence
  SiRNA target sequence
ttatataaaattgttggagttg

SEQ ID NO: 55093 - DNA, 22 bp, Artificial sequence
  SiRNA target sequence
tatataaaattgttggagttga

SEQ ID NO: 55094 - DNA, 22 bp, Artificial sequence
  SiRNA target sequence
atataaaattgttggagttgaa

SEQ ID NO: 55095 - DNA, 22 bp, Artificial sequence
  SiRNA target sequence
tataaaattgttggagttgaag

SEQ ID NO: 55096 - DNA, 22 bp, Artificial sequence
  SiRNA target sequence
ataaaattgttggagttgaagc

SEQ ID NO: 55097 - DNA, 22 bp, Artificial sequence
  SiRNA target sequence
taaaattgttggagttgaagca

SEQ ID NO: 55098 - DNA, 22 bp, Artificial sequence
  SiRNA target sequence
aaaattgttggagttgaagcat

SEQ ID NO: 55099 - DNA, 22 bp, Artificial sequence
  SiRNA target sequence
aaattgttggagttgaagcatt

SEQ ID NO: 55100 - DNA, 22 bp, Artificial sequence
  SiRNA target sequence
aattgttggagttgaagcattt

SEQ ID NO: 55101 - DNA, 22 bp, Artificial sequence
  SiRNA target sequence
attgttggagttgaagcatttt

SEQ ID NO: 55102 - DNA, 22 bp, Artificial sequence
  SiRNA target sequence
ttgttggagttgaagcatttta

SEQ ID NO: 55103 - DNA, 22 bp, Artificial sequence
  SiRNA target sequence
tgttggagttgaagcattttat

SEQ ID NO: 55104 - DNA, 22 bp, Artificial sequence
  SiRNA target sequence
gttggagttgaagcattttatc

SEQ ID NO: 55105 - DNA, 22 bp, Artificial sequence
  SiRNA target sequence
ttggagttgaagcattttatca

SEQ ID NO: 55106 - DNA, 22 bp, Artificial sequence
  SiRNA target sequence
tggagttgaagcattttatcat

SEQ ID NO: 55107 - DNA, 22 bp, Artificial sequence
  SiRNA target sequence
ggagttgaagcattttatcatt

SEQ ID NO: 55108 - DNA, 22 bp, Artificial sequence
  SiRNA target sequence
gagttgaagcattttatcatta

SEQ ID NO: 55109 - DNA, 22 bp, Artificial sequence
  SiRNA target sequence
agttgaagcattttatcattac

SEQ ID NO: 55110 - DNA, 22 bp, Artificial sequence
  SiRNA target sequence
gttgaagcattttatcattaca

SEQ ID NO: 55111 - DNA, 22 bp, Artificial sequence
  SiRNA target sequence
ttgaagcattttatcattacat

SEQ ID NO: 55112 - DNA, 22 bp, Artificial sequence
  SiRNA target sequence
tgaagcattttatcattacatt

SEQ ID NO: 55113 - DNA, 22 bp, Artificial sequence
  SiRNA target sequence
gaagcattttatcattacattt

SEQ ID NO: 55114 - DNA, 22 bp, Artificial sequence
  SiRNA target sequence
aagcattttatcattacatttc

SEQ ID NO: 55115 - DNA, 22 bp, Artificial sequence
  SiRNA target sequence
agcattttatcattacatttca

SEQ ID NO: 55116 - DNA, 22 bp, Artificial sequence
  SiRNA target sequence
gcattttatcattacatttcat

SEQ ID NO: 55117 - DNA, 22 bp, Artificial sequence
  SiRNA target sequence
cattttatcattacatttcatt

SEQ ID NO: 55118 - DNA, 22 bp, Artificial sequence
  SiRNA target sequence
attttatcattacatttcatta

SEQ ID NO: 55119 - DNA, 22 bp, Artificial sequence
  SiRNA target sequence
ttttatcattacatttcattaa

SEQ ID NO: 55120 - DNA, 22 bp, Artificial sequence
  SiRNA target sequence
tttatcattacatttcattaaa

SEQ ID NO: 55121 - DNA, 22 bp, Artificial sequence
  SiRNA target sequence
ttatcattacatttcattaaac

SEQ ID NO: 55122 - DNA, 22 bp, Artificial sequence
  SiRNA target sequence
tatcattacatttcattaaact

SEQ ID NO: 55123 - DNA, 22 bp, Artificial sequence
  SiRNA target sequence
atcattacatttcattaaactt

SEQ ID NO: 55124 - DNA, 22 bp, Artificial sequence
  SiRNA target sequence
tcattacatttcattaaactta

SEQ ID NO: 55125 - DNA, 22 bp, Artificial sequence
  SiRNA target sequence
cattacatttcattaaacttag

SEQ ID NO: 55126 - DNA, 22 bp, Artificial sequence
  SiRNA target sequence
attacatttcattaaacttaga

SEQ ID NO: 55127 - DNA, 22 bp, Artificial sequence
  SiRNA target sequence
ttacatttcattaaacttagaa

SEQ ID NO: 55128 - DNA, 22 bp, Artificial sequence
  SiRNA target sequence
tacatttcattaaacttagaaa

SEQ ID NO: 55129 - DNA, 22 bp, Artificial sequence
  SiRNA target sequence
acatttcattaaacttagaaaa

SEQ ID NO: 55130 - DNA, 22 bp, Artificial sequence
  SiRNA target sequence
catttcattaaacttagaaaat

SEQ ID NO: 55131 - DNA, 22 bp, Artificial sequence
  SiRNA target sequence
atttcattaaacttagaaaatt

SEQ ID NO: 55132 - DNA, 22 bp, Artificial sequence
  SiRNA target sequence
tttcattaaacttagaaaattt

SEQ ID NO: 55133 - DNA, 22 bp, Artificial sequence
  SiRNA target sequence
ttcattaaacttagaaaatttt

SEQ ID NO: 55134 - DNA, 22 bp, Artificial sequence
  SiRNA target sequence
tcattaaacttagaaaatttta

SEQ ID NO: 55135 - DNA, 22 bp, Artificial sequence
  SiRNA target sequence
cattaaacttagaaaattttaa

SEQ ID NO: 55136 - DNA, 22 bp, Artificial sequence
  SiRNA target sequence
attaaacttagaaaattttaac

SEQ ID NO: 55137 - DNA, 22 bp, Artificial sequence
  SiRNA target sequence
ttaaacttagaaaattttaaca

SEQ ID NO: 55138 - DNA, 22 bp, Artificial sequence
  SiRNA target sequence
taaacttagaaaattttaacaa

SEQ ID NO: 55139 - DNA, 22 bp, Artificial sequence
  SiRNA target sequence
aaacttagaaaattttaacaaa

SEQ ID NO: 55140 - DNA, 22 bp, Artificial sequence
  SiRNA target sequence
aacttagaaaattttaacaaaa

SEQ ID NO: 55141 - DNA, 22 bp, Artificial sequence
  SiRNA target sequence
acttagaaaattttaacaaaat

SEQ ID NO: 55142 - DNA, 22 bp, Artificial sequence
  SiRNA target sequence
cttagaaaattttaacaaaata

SEQ ID NO: 55143 - DNA, 22 bp, Artificial sequence
  SiRNA target sequence
ttagaaaattttaacaaaatag

SEQ ID NO: 55144 - DNA, 22 bp, Artificial sequence
  SiRNA target sequence
tagaaaattttaacaaaatagg

SEQ ID NO: 55145 - DNA, 22 bp, Artificial sequence
  SiRNA target sequence
agaaaattttaacaaaatagga

SEQ ID NO: 55146 - DNA, 22 bp, Artificial sequence
  SiRNA target sequence
gaaaattttaacaaaataggaa

SEQ ID NO: 55147 - DNA, 22 bp, Artificial sequence
  SiRNA target sequence
aaaattttaacaaaataggaag

SEQ ID NO: 55148 - DNA, 22 bp, Artificial sequence
  SiRNA target sequence
aaattttaacaaaataggaagt

SEQ ID NO: 55149 - DNA, 22 bp, Artificial sequence
  SiRNA target sequence
aattttaacaaaataggaagtg

SEQ ID NO: 55150 - DNA, 22 bp, Artificial sequence
  SiRNA target sequence
attttaacaaaataggaagtgg

SEQ ID NO: 55151 - DNA, 22 bp, Artificial sequence
  SiRNA target sequence
ttttaacaaaataggaagtgga

SEQ ID NO: 55152 - DNA, 22 bp, Artificial sequence
  SiRNA target sequence
tttaacaaaataggaagtggag

SEQ ID NO: 55153 - DNA, 22 bp, Artificial sequence
  SiRNA target sequence
ttaacaaaataggaagtggaga

SEQ ID NO: 55154 - DNA, 22 bp, Artificial sequence
  SiRNA target sequence
taacaaaataggaagtggagag

SEQ ID NO: 55155 - DNA, 22 bp, Artificial sequence
  SiRNA target sequence
aacaaaataggaagtggagaga

SEQ ID NO: 55156 - DNA, 22 bp, Artificial sequence
  SiRNA target sequence
acaaaataggaagtggagagat

SEQ ID NO: 55157 - DNA, 22 bp, Artificial sequence
  SiRNA target sequence
caaaataggaagtggagagata

SEQ ID NO: 55158 - DNA, 22 bp, Artificial sequence
  SiRNA target sequence
aaaataggaagtggagagatac

SEQ ID NO: 55159 - DNA, 22 bp, Artificial sequence
  SiRNA target sequence
aaataggaagtggagagataca

SEQ ID NO: 55160 - DNA, 22 bp, Artificial sequence
  SiRNA target sequence
aataggaagtggagagatacaa

SEQ ID NO: 55161 - DNA, 22 bp, Artificial sequence
  SiRNA target sequence
ataggaagtggagagatacaaa

SEQ ID NO: 55162 - DNA, 22 bp, Artificial sequence
  SiRNA target sequence
taggaagtggagagatacaaat

SEQ ID NO: 55163 - DNA, 22 bp, Artificial sequence
  SiRNA target sequence
aggaagtggagagatacaaatg

SEQ ID NO: 55164 - DNA, 22 bp, Artificial sequence
  SiRNA target sequence
ggaagtggagagatacaaatga

SEQ ID NO: 55165 - DNA, 22 bp, Artificial sequence
  SiRNA target sequence
gaagtggagagatacaaatgat

SEQ ID NO: 55166 - DNA, 22 bp, Artificial sequence
  SiRNA target sequence
aagtggagagatacaaatgatt

SEQ ID NO: 55167 - DNA, 22 bp, Artificial sequence
  SiRNA target sequence
agtggagagatacaaatgatta

SEQ ID NO: 55168 - DNA, 22 bp, Artificial sequence
  SiRNA target sequence
gtggagagatacaaatgattat

SEQ ID NO: 55169 - DNA, 22 bp, Artificial sequence
  SiRNA target sequence
tggagagatacaaatgattatt

SEQ ID NO: 55170 - DNA, 22 bp, Artificial sequence
  SiRNA target sequence
ggagagatacaaatgattattg

SEQ ID NO: 55171 - DNA, 22 bp, Artificial sequence
  SiRNA target sequence
gagagatacaaatgattattga

SEQ ID NO: 55172 - DNA, 22 bp, Artificial sequence
  SiRNA target sequence
agagatacaaatgattattgag

SEQ ID NO: 55173 - DNA, 22 bp, Artificial sequence
  SiRNA target sequence
gagatacaaatgattattgagc

SEQ ID NO: 55174 - DNA, 22 bp, Artificial sequence
  SiRNA target sequence
agatacaaatgattattgagcg

SEQ ID NO: 55175 - DNA, 22 bp, Artificial sequence
  SiRNA target sequence
gatacaaatgattattgagcgg

SEQ ID NO: 55176 - DNA, 22 bp, Artificial sequence
  SiRNA target sequence
atacaaatgattattgagcgga

SEQ ID NO: 55177 - DNA, 22 bp, Artificial sequence
  SiRNA target sequence
tacaaatgattattgagcggaa

SEQ ID NO: 55178 - DNA, 22 bp, Artificial sequence
  SiRNA target sequence
acaaatgattattgagcggaaa

SEQ ID NO: 55179 - DNA, 22 bp, Artificial sequence
  SiRNA target sequence
caaatgattattgagcggaaaa

SEQ ID NO: 55180 - DNA, 22 bp, Artificial sequence
  SiRNA target sequence
aaatgattattgagcggaaaag

SEQ ID NO: 55181 - DNA, 22 bp, Artificial sequence
  SiRNA target sequence
aatgattattgagcggaaaagt

SEQ ID NO: 55182 - DNA, 22 bp, Artificial sequence
  SiRNA target sequence
atgattattgagcggaaaagta

SEQ ID NO: 55183 - DNA, 22 bp, Artificial sequence
  SiRNA target sequence
tgattattgagcggaaaagtag

SEQ ID NO: 55184 - DNA, 22 bp, Artificial sequence
  SiRNA target sequence
gattattgagcggaaaagtaga

SEQ ID NO: 55185 - DNA, 22 bp, Artificial sequence
  SiRNA target sequence
attattgagcggaaaagtagag

SEQ ID NO: 55186 - DNA, 22 bp, Artificial sequence
  SiRNA target sequence
ttattgagcggaaaagtagagc

SEQ ID NO: 55187 - DNA, 22 bp, Artificial sequence
  SiRNA target sequence
tattgagcggaaaagtagagca

SEQ ID NO: 55188 - DNA, 22 bp, Artificial sequence
  SiRNA target sequence
attgagcggaaaagtagagcat

SEQ ID NO: 55189 - DNA, 22 bp, Artificial sequence
  SiRNA target sequence
ttgagcggaaaagtagagcata

SEQ ID NO: 55190 - DNA, 22 bp, Artificial sequence
  SiRNA target sequence
tgagcggaaaagtagagcatat

SEQ ID NO: 55191 - DNA, 22 bp, Artificial sequence
  SiRNA target sequence
gagcggaaaagtagagcatatg

SEQ ID NO: 55192 - DNA, 22 bp, Artificial sequence
  SiRNA target sequence
agcggaaaagtagagcatatgg

SEQ ID NO: 55193 - DNA, 22 bp, Artificial sequence
  SiRNA target sequence
gcggaaaagtagagcatatggt

SEQ ID NO: 55194 - DNA, 22 bp, Artificial sequence
  SiRNA target sequence
cggaaaagtagagcatatggtg

SEQ ID NO: 55195 - DNA, 22 bp, Artificial sequence
  SiRNA target sequence
ggaaaagtagagcatatggtga

SEQ ID NO: 55196 - DNA, 22 bp, Artificial sequence
  SiRNA target sequence
gaaaagtagagcatatggtgac

SEQ ID NO: 55197 - DNA, 22 bp, Artificial sequence
  SiRNA target sequence
aaaagtagagcatatggtgaca

SEQ ID NO: 55198 - DNA, 22 bp, Artificial sequence
  SiRNA target sequence
aaagtagagcatatggtgacat

SEQ ID NO: 55199 - DNA, 22 bp, Artificial sequence
  SiRNA target sequence
aagtagagcatatggtgacata

SEQ ID NO: 55200 - DNA, 22 bp, Artificial sequence
  SiRNA target sequence
agtagagcatatggtgacatac

SEQ ID NO: 55201 - DNA, 22 bp, Artificial sequence
  SiRNA target sequence
gtagagcatatggtgacatact

SEQ ID NO: 55202 - DNA, 22 bp, Artificial sequence
  SiRNA target sequence
tagagcatatggtgacatacta

SEQ ID NO: 55203 - DNA, 22 bp, Artificial sequence
  SiRNA target sequence
agagcatatggtgacatactag

SEQ ID NO: 55204 - DNA, 22 bp, Artificial sequence
  SiRNA target sequence
gagcatatggtgacatactaga

SEQ ID NO: 55205 - DNA, 22 bp, Artificial sequence
  SiRNA target sequence
agcatatggtgacatactagaa

SEQ ID NO: 55206 - DNA, 22 bp, Artificial sequence
  SiRNA target sequence
gcatatggtgacatactagaac

SEQ ID NO: 55207 - DNA, 22 bp, Artificial sequence
  SiRNA target sequence
catatggtgacatactagaact

SEQ ID NO: 55208 - DNA, 22 bp, Artificial sequence
  SiRNA target sequence
atatggtgacatactagaacta

SEQ ID NO: 55209 - DNA, 22 bp, Artificial sequence
  SiRNA target sequence
tatggtgacatactagaactaa

SEQ ID NO: 55210 - DNA, 22 bp, Artificial sequence
  SiRNA target sequence
atggtgacatactagaactaac

SEQ ID NO: 55211 - DNA, 22 bp, Artificial sequence
  SiRNA target sequence
tggtgacatactagaactaact

SEQ ID NO: 55212 - DNA, 22 bp, Artificial sequence
  SiRNA target sequence
ggtgacatactagaactaacta

SEQ ID NO: 55213 - DNA, 22 bp, Artificial sequence
  SiRNA target sequence
gtgacatactagaactaactac

SEQ ID NO: 55214 - DNA, 22 bp, Artificial sequence
  SiRNA target sequence
tgacatactagaactaactact

SEQ ID NO: 55215 - DNA, 22 bp, Artificial sequence
  SiRNA target sequence
gacatactagaactaactactc

SEQ ID NO: 55216 - DNA, 22 bp, Artificial sequence
  SiRNA target sequence
acatactagaactaactactct

SEQ ID NO: 55217 - DNA, 22 bp, Artificial sequence
  SiRNA target sequence
catactagaactaactactctc

SEQ ID NO: 55218 - DNA, 22 bp, Artificial sequence
  SiRNA target sequence
atactagaactaactactctct

SEQ ID NO: 55219 - DNA, 22 bp, Artificial sequence
  SiRNA target sequence
tactagaactaactactctctc

SEQ ID NO: 55220 - DNA, 22 bp, Artificial sequence
  SiRNA target sequence
actagaactaactactctctcg

SEQ ID NO: 55221 - DNA, 22 bp, Artificial sequence
  SiRNA target sequence
ctagaactaactactctctcgg

SEQ ID NO: 55222 - DNA, 22 bp, Artificial sequence
  SiRNA target sequence
tagaactaactactctctcggc

SEQ ID NO: 55223 - DNA, 22 bp, Artificial sequence
  SiRNA target sequence
agaactaactactctctcggcc

SEQ ID NO: 55224 - DNA, 22 bp, Artificial sequence
  SiRNA target sequence
gaactaactactctctcggccg

SEQ ID NO: 55225 - DNA, 22 bp, Artificial sequence
  SiRNA target sequence
aactaactactctctcggccgt

SEQ ID NO: 55226 - DNA, 22 bp, Artificial sequence
  SiRNA target sequence
actaactactctctcggccgta

SEQ ID NO: 55227 - DNA, 22 bp, Artificial sequence
  SiRNA target sequence
ctaactactctctcggccgtac

SEQ ID NO: 55228 - DNA, 22 bp, Artificial sequence
  SiRNA target sequence
taactactctctcggccgtacc

SEQ ID NO: 55229 - DNA, 22 bp, Artificial sequence
  SiRNA target sequence
aactactctctcggccgtacca

SEQ ID NO: 55230 - DNA, 22 bp, Artificial sequence
  SiRNA target sequence
actactctctcggccgtaccaa

SEQ ID NO: 55231 - DNA, 22 bp, Artificial sequence
  SiRNA target sequence
ctactctctcggccgtaccaac

SEQ ID NO: 55232 - DNA, 22 bp, Artificial sequence
  SiRNA target sequence
tactctctcggccgtaccaacc

SEQ ID NO: 55233 - DNA, 22 bp, Artificial sequence
  SiRNA target sequence
actctctcggccgtaccaacct

SEQ ID NO: 55234 - DNA, 22 bp, Artificial sequence
  SiRNA target sequence
ctctctcggccgtaccaacctg

SEQ ID NO: 55235 - DNA, 22 bp, Artificial sequence
  SiRNA target sequence
tctctcggccgtaccaacctgt

SEQ ID NO: 55236 - DNA, 22 bp, Artificial sequence
  SiRNA target sequence
ctctcggccgtaccaacctgta

SEQ ID NO: 55237 - DNA, 22 bp, Artificial sequence
  SiRNA target sequence
tctcggccgtaccaacctgtat

SEQ ID NO: 55238 - DNA, 22 bp, Artificial sequence
  SiRNA target sequence
ctcggccgtaccaacctgtatt

SEQ ID NO: 55239 - DNA, 22 bp, Artificial sequence
  SiRNA target sequence
tcggccgtaccaacctgtattg

SEQ ID NO: 55240 - DNA, 22 bp, Artificial sequence
  SiRNA target sequence
cggccgtaccaacctgtattgt

SEQ ID NO: 55241 - DNA, 22 bp, Artificial sequence
  SiRNA target sequence
ggccgtaccaacctgtattgta

SEQ ID NO: 55242 - DNA, 22 bp, Artificial sequence
  SiRNA target sequence
gccgtaccaacctgtattgtag

SEQ ID NO: 55243 - DNA, 22 bp, Artificial sequence
  SiRNA target sequence
ccgtaccaacctgtattgtagt

SEQ ID NO: 55244 - DNA, 22 bp, Artificial sequence
  SiRNA target sequence
cgtaccaacctgtattgtagtt

SEQ ID NO: 55245 - DNA, 22 bp, Artificial sequence
  SiRNA target sequence
gtaccaacctgtattgtagtta

SEQ ID NO: 55246 - DNA, 22 bp, Artificial sequence
  SiRNA target sequence
taccaacctgtattgtagttat

SEQ ID NO: 55247 - DNA, 22 bp, Artificial sequence
  SiRNA target sequence
accaacctgtattgtagttatt

SEQ ID NO: 55248 - DNA, 22 bp, Artificial sequence
  SiRNA target sequence
ccaacctgtattgtagttatta

SEQ ID NO: 55249 - DNA, 22 bp, Artificial sequence
  SiRNA target sequence
caacctgtattgtagttattat

SEQ ID NO: 55250 - DNA, 22 bp, Artificial sequence
  SiRNA target sequence
aacctgtattgtagttattatg

SEQ ID NO: 55251 - DNA, 22 bp, Artificial sequence
  SiRNA target sequence
acctgtattgtagttattatgt

SEQ ID NO: 55252 - DNA, 22 bp, Artificial sequence
  SiRNA target sequence
cctgtattgtagttattatgtc

SEQ ID NO: 55253 - DNA, 22 bp, Artificial sequence
  SiRNA target sequence
ctgtattgtagttattatgtcg

SEQ ID NO: 55254 - DNA, 22 bp, Artificial sequence
  SiRNA target sequence
tgtattgtagttattatgtcgt

SEQ ID NO: 55255 - DNA, 22 bp, Artificial sequence
  SiRNA target sequence
gtattgtagttattatgtcgtt

SEQ ID NO: 55256 - DNA, 22 bp, Artificial sequence
  SiRNA target sequence
tattgtagttattatgtcgttt

SEQ ID NO: 55257 - DNA, 22 bp, Artificial sequence
  SiRNA target sequence
attgtagttattatgtcgtttt

SEQ ID NO: 55258 - DNA, 22 bp, Artificial sequence
  SiRNA target sequence
ttgtagttattatgtcgttttt

SEQ ID NO: 55259 - DNA, 22 bp, Artificial sequence
  SiRNA target sequence
tgtagttattatgtcgtttttc

SEQ ID NO: 55260 - DNA, 22 bp, Artificial sequence
  SiRNA target sequence
gtagttattatgtcgtttttct

SEQ ID NO: 55261 - DNA, 22 bp, Artificial sequence
  SiRNA target sequence
tagttattatgtcgtttttctc

SEQ ID NO: 55262 - DNA, 22 bp, Artificial sequence
  SiRNA target sequence
agttattatgtcgtttttctca

SEQ ID NO: 55263 - DNA, 22 bp, Artificial sequence
  SiRNA target sequence
gttattatgtcgtttttctcag

SEQ ID NO: 55264 - DNA, 22 bp, Artificial sequence
  SiRNA target sequence
ttattatgtcgtttttctcagt

SEQ ID NO: 55265 - DNA, 22 bp, Artificial sequence
  SiRNA target sequence
tattatgtcgtttttctcagta

SEQ ID NO: 55266 - DNA, 22 bp, Artificial sequence
  SiRNA target sequence
attatgtcgtttttctcagtat

SEQ ID NO: 55267 - DNA, 22 bp, Artificial sequence
  SiRNA target sequence
ttatgtcgtttttctcagtata

SEQ ID NO: 55268 - DNA, 22 bp, Artificial sequence
  SiRNA target sequence
tatgtcgtttttctcagtatat

SEQ ID NO: 55269 - DNA, 22 bp, Artificial sequence
  SiRNA target sequence
atgtcgtttttctcagtatata

SEQ ID NO: 55270 - DNA, 22 bp, Artificial sequence
  SiRNA target sequence
tgtcgtttttctcagtatataa

SEQ ID NO: 55271 - DNA, 22 bp, Artificial sequence
  SiRNA target sequence
gtcgtttttctcagtatataaa

SEQ ID NO: 55272 - DNA, 22 bp, Artificial sequence
  SiRNA target sequence
tcgtttttctcagtatataaaa

SEQ ID NO: 55273 - DNA, 22 bp, Artificial sequence
  SiRNA target sequence
cgtttttctcagtatataaaaa

SEQ ID NO: 55274 - DNA, 22 bp, Artificial sequence
  SiRNA target sequence
gtttttctcagtatataaaaat

SEQ ID NO: 55275 - DNA, 22 bp, Artificial sequence
  SiRNA target sequence
tttttctcagtatataaaaatt

SEQ ID NO: 55276 - DNA, 22 bp, Artificial sequence
  SiRNA target sequence
ttttctcagtatataaaaattt

SEQ ID NO: 55277 - DNA, 22 bp, Artificial sequence
  SiRNA target sequence
tttctcagtatataaaaatttg

SEQ ID NO: 55278 - DNA, 22 bp, Artificial sequence
  SiRNA target sequence
ttctcagtatataaaaatttgg

SEQ ID NO: 55279 - DNA, 22 bp, Artificial sequence
  SiRNA target sequence
tctcagtatataaaaatttggg

SEQ ID NO: 55280 - DNA, 22 bp, Artificial sequence
  SiRNA target sequence
ctcagtatataaaaatttggga

SEQ ID NO: 55281 - DNA, 22 bp, Artificial sequence
  SiRNA target sequence
tcagtatataaaaatttgggaa

SEQ ID NO: 55282 - DNA, 22 bp, Artificial sequence
  SiRNA target sequence
cagtatataaaaatttgggaag

SEQ ID NO: 55283 - DNA, 22 bp, Artificial sequence
  SiRNA target sequence
agtatataaaaatttgggaaga

SEQ ID NO: 55284 - DNA, 22 bp, Artificial sequence
  SiRNA target sequence
gtatataaaaatttgggaagag

SEQ ID NO: 55285 - DNA, 22 bp, Artificial sequence
  SiRNA target sequence
tatataaaaatttgggaagaga

SEQ ID NO: 55286 - DNA, 22 bp, Artificial sequence
  SiRNA target sequence
atataaaaatttgggaagagat

SEQ ID NO: 55287 - DNA, 22 bp, Artificial sequence
  SiRNA target sequence
tataaaaatttgggaagagatg

SEQ ID NO: 55288 - DNA, 22 bp, Artificial sequence
  SiRNA target sequence
ataaaaatttgggaagagatgc

SEQ ID NO: 55289 - DNA, 22 bp, Artificial sequence
  SiRNA target sequence
taaaaatttgggaagagatgca

SEQ ID NO: 55290 - DNA, 22 bp, Artificial sequence
  SiRNA target sequence
aaaaatttgggaagagatgcac

SEQ ID NO: 55291 - DNA, 22 bp, Artificial sequence
  SiRNA target sequence
aaaatttgggaagagatgcact

SEQ ID NO: 55292 - DNA, 22 bp, Artificial sequence
  SiRNA target sequence
aaatttgggaagagatgcactc

SEQ ID NO: 55293 - DNA, 22 bp, Artificial sequence
  SiRNA target sequence
aatttgggaagagatgcactct

SEQ ID NO: 55294 - DNA, 22 bp, Artificial sequence
  SiRNA target sequence
atttgggaagagatgcactcta

SEQ ID NO: 55295 - DNA, 22 bp, Artificial sequence
  SiRNA target sequence
tttgggaagagatgcactctac

SEQ ID NO: 55296 - DNA, 22 bp, Artificial sequence
  SiRNA target sequence
ttgggaagagatgcactctacg

SEQ ID NO: 55297 - DNA, 22 bp, Artificial sequence
  SiRNA target sequence
tgggaagagatgcactctacgt

SEQ ID NO: 55298 - DNA, 22 bp, Artificial sequence
  SiRNA target sequence
gggaagagatgcactctacgta

SEQ ID NO: 55299 - DNA, 22 bp, Artificial sequence
  SiRNA target sequence
ggaagagatgcactctacgtaa

SEQ ID NO: 55300 - DNA, 22 bp, Artificial sequence
  SiRNA target sequence
gaagagatgcactctacgtaat

SEQ ID NO: 55301 - DNA, 22 bp, Artificial sequence
  SiRNA target sequence
aagagatgcactctacgtaatg

SEQ ID NO: 55302 - DNA, 22 bp, Artificial sequence
  SiRNA target sequence
agagatgcactctacgtaatgt

SEQ ID NO: 55303 - DNA, 22 bp, Artificial sequence
  SiRNA target sequence
gagatgcactctacgtaatgtt

SEQ ID NO: 55304 - DNA, 22 bp, Artificial sequence
  SiRNA target sequence
agatgcactctacgtaatgttg

SEQ ID NO: 55305 - DNA, 22 bp, Artificial sequence
  SiRNA target sequence
gatgcactctacgtaatgttgg

SEQ ID NO: 55306 - DNA, 22 bp, Artificial sequence
  SiRNA target sequence
atgcactctacgtaatgttggc

SEQ ID NO: 55307 - DNA, 22 bp, Artificial sequence
  SiRNA target sequence
tgcactctacgtaatgttggct

SEQ ID NO: 55308 - DNA, 22 bp, Artificial sequence
  SiRNA target sequence
gcactctacgtaatgttggcta

SEQ ID NO: 55309 - DNA, 22 bp, Artificial sequence
  SiRNA target sequence
cactctacgtaatgttggctac

SEQ ID NO: 55310 - DNA, 22 bp, Artificial sequence
  SiRNA target sequence
actctacgtaatgttggctaca

SEQ ID NO: 55311 - DNA, 22 bp, Artificial sequence
  SiRNA target sequence
ctctacgtaatgttggctacaa

SEQ ID NO: 55312 - DNA, 22 bp, Artificial sequence
  SiRNA target sequence
tctacgtaatgttggctacaag

SEQ ID NO: 55313 - DNA, 22 bp, Artificial sequence
  SiRNA target sequence
ctacgtaatgttggctacaagt

SEQ ID NO: 55314 - DNA, 22 bp, Artificial sequence
  SiRNA target sequence
tacgtaatgttggctacaagtg

SEQ ID NO: 55315 - DNA, 22 bp, Artificial sequence
  SiRNA target sequence
acgtaatgttggctacaagtgc

SEQ ID NO: 55316 - DNA, 22 bp, Artificial sequence
  SiRNA target sequence
cgtaatgttggctacaagtgcc

SEQ ID NO: 55317 - DNA, 22 bp, Artificial sequence
  SiRNA target sequence
gtaatgttggctacaagtgcct

SEQ ID NO: 55318 - DNA, 22 bp, Artificial sequence
  SiRNA target sequence
taatgttggctacaagtgcctt

SEQ ID NO: 55319 - DNA, 22 bp, Artificial sequence
  SiRNA target sequence
aatgttggctacaagtgccttg

SEQ ID NO: 55320 - DNA, 22 bp, Artificial sequence
  SiRNA target sequence
atgttggctacaagtgccttgt

SEQ ID NO: 55321 - DNA, 22 bp, Artificial sequence
  SiRNA target sequence
tgttggctacaagtgccttgta

SEQ ID NO: 55322 - DNA, 22 bp, Artificial sequence
  SiRNA target sequence
gttggctacaagtgccttgtat

SEQ ID NO: 55323 - DNA, 22 bp, Artificial sequence
  SiRNA target sequence
ttggctacaagtgccttgtatg

SEQ ID NO: 55324 - DNA, 22 bp, Artificial sequence
  SiRNA target sequence
tggctacaagtgccttgtatgt

SEQ ID NO: 55325 - DNA, 22 bp, Artificial sequence
  SiRNA target sequence
ggctacaagtgccttgtatgtg

SEQ ID NO: 55326 - DNA, 22 bp, Artificial sequence
  SiRNA target sequence
gctacaagtgccttgtatgtgt

SEQ ID NO: 55327 - DNA, 22 bp, Artificial sequence
  SiRNA target sequence
ctacaagtgccttgtatgtgta

SEQ ID NO: 55328 - DNA, 22 bp, Artificial sequence
  SiRNA target sequence
tacaagtgccttgtatgtgtat

SEQ ID NO: 55329 - DNA, 22 bp, Artificial sequence
  SiRNA target sequence
acaagtgccttgtatgtgtatt

SEQ ID NO: 55330 - DNA, 22 bp, Artificial sequence
  SiRNA target sequence
caagtgccttgtatgtgtattt

SEQ ID NO: 55331 - DNA, 22 bp, Artificial sequence
  SiRNA target sequence
aagtgccttgtatgtgtatttt

SEQ ID NO: 55332 - DNA, 22 bp, Artificial sequence
  SiRNA target sequence
agtgccttgtatgtgtatttta

SEQ ID NO: 55333 - DNA, 22 bp, Artificial sequence
  SiRNA target sequence
gtgccttgtatgtgtattttac

SEQ ID NO: 55334 - DNA, 22 bp, Artificial sequence
  SiRNA target sequence
tgccttgtatgtgtattttaca

SEQ ID NO: 55335 - DNA, 22 bp, Artificial sequence
  SiRNA target sequence
gccttgtatgtgtattttacat

SEQ ID NO: 55336 - DNA, 22 bp, Artificial sequence
  SiRNA target sequence
ccttgtatgtgtattttacatt

SEQ ID NO: 55337 - DNA, 22 bp, Artificial sequence
  SiRNA target sequence
cttgtatgtgtattttacattt

SEQ ID NO: 55338 - DNA, 22 bp, Artificial sequence
  SiRNA target sequence
ttgtatgtgtattttacatttg

SEQ ID NO: 55339 - DNA, 22 bp, Artificial sequence
  SiRNA target sequence
tgtatgtgtattttacatttgt

SEQ ID NO: 55340 - DNA, 22 bp, Artificial sequence
  SiRNA target sequence
gtatgtgtattttacatttgta

SEQ ID NO: 55341 - DNA, 22 bp, Artificial sequence
  SiRNA target sequence
tatgtgtattttacatttgtat

SEQ ID NO: 55342 - DNA, 22 bp, Artificial sequence
  SiRNA target sequence
atgtgtattttacatttgtatt

SEQ ID NO: 55343 - DNA, 22 bp, Artificial sequence
  SiRNA target sequence
tgtgtattttacatttgtattt

SEQ ID NO: 55344 - DNA, 22 bp, Artificial sequence
  SiRNA target sequence
gtgtattttacatttgtatttt

SEQ ID NO: 55345 - DNA, 22 bp, Artificial sequence
  SiRNA target sequence
tgtattttacatttgtattttc

SEQ ID NO: 55346 - DNA, 22 bp, Artificial sequence
  SiRNA target sequence
gtattttacatttgtattttca

SEQ ID NO: 55347 - DNA, 22 bp, Artificial sequence
  SiRNA target sequence
tattttacatttgtattttcaa

SEQ ID NO: 55348 - DNA, 22 bp, Artificial sequence
  SiRNA target sequence
attttacatttgtattttcaat

SEQ ID NO: 55349 - DNA, 22 bp, Artificial sequence
  SiRNA target sequence
ttttacatttgtattttcaata

SEQ ID NO: 55350 - DNA, 22 bp, Artificial sequence
  SiRNA target sequence
tttacatttgtattttcaatat

SEQ ID NO: 55351 - DNA, 22 bp, Artificial sequence
  SiRNA target sequence
ttacatttgtattttcaatatg

SEQ ID NO: 55352 - DNA, 22 bp, Artificial sequence
  SiRNA target sequence
tacatttgtattttcaatatgg

SEQ ID NO: 55353 - DNA, 22 bp, Artificial sequence
  SiRNA target sequence
acatttgtattttcaatatgga

SEQ ID NO: 55354 - DNA, 22 bp, Artificial sequence
  SiRNA target sequence
catttgtattttcaatatggag

SEQ ID NO: 55355 - DNA, 22 bp, Artificial sequence
  SiRNA target sequence
atttgtattttcaatatggaga

SEQ ID NO: 55356 - DNA, 22 bp, Artificial sequence
  SiRNA target sequence
tttgtattttcaatatggagaa

SEQ ID NO: 55357 - DNA, 22 bp, Artificial sequence
  SiRNA target sequence
ttgtattttcaatatggagaaa

SEQ ID NO: 55358 - DNA, 22 bp, Artificial sequence
  SiRNA target sequence
tgtattttcaatatggagaaac

SEQ ID NO: 55359 - DNA, 22 bp, Artificial sequence
  SiRNA target sequence
gtattttcaatatggagaaaca

SEQ ID NO: 55360 - DNA, 22 bp, Artificial sequence
  SiRNA target sequence
tattttcaatatggagaaacaa

SEQ ID NO: 55361 - DNA, 22 bp, Artificial sequence
  SiRNA target sequence
attttcaatatggagaaacaat

SEQ ID NO: 55362 - DNA, 22 bp, Artificial sequence
  SiRNA target sequence
ttttcaatatggagaaacaata

SEQ ID NO: 55363 - DNA, 22 bp, Artificial sequence
  SiRNA target sequence
tttcaatatggagaaacaatat

SEQ ID NO: 55364 - DNA, 22 bp, Artificial sequence
  SiRNA target sequence
ttcaatatggagaaacaatatt

SEQ ID NO: 55365 - DNA, 22 bp, Artificial sequence
  SiRNA target sequence
tcaatatggagaaacaatatta

SEQ ID NO: 55366 - DNA, 22 bp, Artificial sequence
  SiRNA target sequence
caatatggagaaacaatattag

SEQ ID NO: 55367 - DNA, 22 bp, Artificial sequence
  SiRNA target sequence
aatatggagaaacaatattaga

SEQ ID NO: 55368 - DNA, 22 bp, Artificial sequence
  SiRNA target sequence
atatggagaaacaatattagaa

SEQ ID NO: 55369 - DNA, 22 bp, Artificial sequence
  SiRNA target sequence
tatggagaaacaatattagaag

SEQ ID NO: 55370 - DNA, 22 bp, Artificial sequence
  SiRNA target sequence
atggagaaacaatattagaaga

SEQ ID NO: 55371 - DNA, 22 bp, Artificial sequence
  SiRNA target sequence
tggagaaacaatattagaagac

SEQ ID NO: 55372 - DNA, 22 bp, Artificial sequence
  SiRNA target sequence
ggagaaacaatattagaagaca

SEQ ID NO: 55373 - DNA, 22 bp, Artificial sequence
  SiRNA target sequence
gagaaacaatattagaagacaa

SEQ ID NO: 55374 - DNA, 22 bp, Artificial sequence
  SiRNA target sequence
agaaacaatattagaagacaat

SEQ ID NO: 55375 - DNA, 22 bp, Artificial sequence
  SiRNA target sequence
gaaacaatattagaagacaata

SEQ ID NO: 55376 - DNA, 22 bp, Artificial sequence
  SiRNA target sequence
aaacaatattagaagacaatat

SEQ ID NO: 55377 - DNA, 22 bp, Artificial sequence
  SiRNA target sequence
aacaatattagaagacaatata

SEQ ID NO: 55378 - DNA, 22 bp, Artificial sequence
  SiRNA target sequence
acaatattagaagacaatataa

SEQ ID NO: 55379 - DNA, 22 bp, Artificial sequence
  SiRNA target sequence
caatattagaagacaatataat

SEQ ID NO: 55380 - DNA, 22 bp, Artificial sequence
  SiRNA target sequence
aatattagaagacaatataata

SEQ ID NO: 55381 - DNA, 22 bp, Artificial sequence
  SiRNA target sequence
atattagaagacaatataataa

SEQ ID NO: 55382 - DNA, 22 bp, Artificial sequence
  SiRNA target sequence
tattagaagacaatataataag

SEQ ID NO: 55383 - DNA, 22 bp, Artificial sequence
  SiRNA target sequence
attagaagacaatataataagt

SEQ ID NO: 55384 - DNA, 22 bp, Artificial sequence
  SiRNA target sequence
ttagaagacaatataataagtc

SEQ ID NO: 55385 - DNA, 22 bp, Artificial sequence
  SiRNA target sequence
tagaagacaatataataagtca

SEQ ID NO: 55386 - DNA, 22 bp, Artificial sequence
  SiRNA target sequence
agaagacaatataataagtcac

SEQ ID NO: 55387 - DNA, 22 bp, Artificial sequence
  SiRNA target sequence
gaagacaatataataagtcaca

SEQ ID NO: 55388 - DNA, 22 bp, Artificial sequence
  SiRNA target sequence
aagacaatataataagtcacag

SEQ ID NO: 55389 - DNA, 22 bp, Artificial sequence
  SiRNA target sequence
agacaatataataagtcacagg

SEQ ID NO: 55390 - DNA, 22 bp, Artificial sequence
  SiRNA target sequence
gacaatataataagtcacagga

SEQ ID NO: 55391 - DNA, 22 bp, Artificial sequence
  SiRNA target sequence
acaatataataagtcacaggat

SEQ ID NO: 55392 - DNA, 22 bp, Artificial sequence
  SiRNA target sequence
caatataataagtcacaggata

SEQ ID NO: 55393 - DNA, 22 bp, Artificial sequence
  SiRNA target sequence
aatataataagtcacaggataa

SEQ ID NO: 55394 - DNA, 22 bp, Artificial sequence
  SiRNA target sequence
atataataagtcacaggataaa

SEQ ID NO: 55395 - DNA, 22 bp, Artificial sequence
  SiRNA target sequence
tataataagtcacaggataaat

SEQ ID NO: 55396 - DNA, 22 bp, Artificial sequence
  SiRNA target sequence
ataataagtcacaggataaatt

SEQ ID NO: 55397 - DNA, 22 bp, Artificial sequence
  SiRNA target sequence
taataagtcacaggataaatta

SEQ ID NO: 55398 - DNA, 22 bp, Artificial sequence
  SiRNA target sequence
aataagtcacaggataaattat

SEQ ID NO: 55399 - DNA, 22 bp, Artificial sequence
  SiRNA target sequence
ataagtcacaggataaattatc

SEQ ID NO: 55400 - DNA, 22 bp, Artificial sequence
  SiRNA target sequence
taagtcacaggataaattatcg

SEQ ID NO: 55401 - DNA, 22 bp, Artificial sequence
  SiRNA target sequence
aagtcacaggataaattatcga

SEQ ID NO: 55402 - DNA, 22 bp, Artificial sequence
  SiRNA target sequence
agtcacaggataaattatcgaa

SEQ ID NO: 55403 - DNA, 22 bp, Artificial sequence
  SiRNA target sequence
gtcacaggataaattatcgaat

SEQ ID NO: 55404 - DNA, 22 bp, Artificial sequence
  SiRNA target sequence
tcacaggataaattatcgaata

SEQ ID NO: 55405 - DNA, 22 bp, Artificial sequence
  SiRNA target sequence
cacaggataaattatcgaataa

SEQ ID NO: 55406 - DNA, 22 bp, Artificial sequence
  SiRNA target sequence
acaggataaattatcgaataaa

SEQ ID NO: 55407 - DNA, 22 bp, Artificial sequence
  SiRNA target sequence
caggataaattatcgaataaat

SEQ ID NO: 55408 - DNA, 22 bp, Artificial sequence
  SiRNA target sequence
aggataaattatcgaataaatt

SEQ ID NO: 55409 - DNA, 22 bp, Artificial sequence
  SiRNA target sequence
ggataaattatcgaataaatta

SEQ ID NO: 55410 - DNA, 22 bp, Artificial sequence
  SiRNA target sequence
gataaattatcgaataaattac

SEQ ID NO: 55411 - DNA, 22 bp, Artificial sequence
  SiRNA target sequence
ataaattatcgaataaattaca

SEQ ID NO: 55412 - DNA, 22 bp, Artificial sequence
  SiRNA target sequence
taaattatcgaataaattacaa

SEQ ID NO: 55413 - DNA, 22 bp, Artificial sequence
  SiRNA target sequence
aaattatcgaataaattacaag

SEQ ID NO: 55414 - DNA, 22 bp, Artificial sequence
  SiRNA target sequence
aattatcgaataaattacaaga

SEQ ID NO: 55415 - DNA, 22 bp, Artificial sequence
  SiRNA target sequence
attatcgaataaattacaagat

SEQ ID NO: 55416 - DNA, 22 bp, Artificial sequence
  SiRNA target sequence
ttatcgaataaattacaagatt

SEQ ID NO: 55417 - DNA, 22 bp, Artificial sequence
  SiRNA target sequence
tatcgaataaattacaagattt

SEQ ID NO: 55418 - DNA, 22 bp, Artificial sequence
  SiRNA target sequence
atcgaataaattacaagatttt

SEQ ID NO: 55419 - DNA, 22 bp, Artificial sequence
  SiRNA target sequence
tcgaataaattacaagattttt

SEQ ID NO: 55420 - DNA, 22 bp, Artificial sequence
  SiRNA target sequence
cgaataaattacaagatttttt

SEQ ID NO: 55421 - DNA, 22 bp, Artificial sequence
  SiRNA target sequence
gaataaattacaagatttttta

SEQ ID NO: 55422 - DNA, 22 bp, Artificial sequence
  SiRNA target sequence
aataaattacaagattttttag

SEQ ID NO: 55423 - DNA, 22 bp, Artificial sequence
  SiRNA target sequence
ataaattacaagattttttagc

SEQ ID NO: 55424 - DNA, 22 bp, Artificial sequence
  SiRNA target sequence
taaattacaagattttttagct

SEQ ID NO: 55425 - DNA, 22 bp, Artificial sequence
  SiRNA target sequence
aaattacaagattttttagcta

SEQ ID NO: 55426 - DNA, 22 bp, Artificial sequence
  SiRNA target sequence
aattacaagattttttagctaa

SEQ ID NO: 55427 - DNA, 22 bp, Artificial sequence
  SiRNA target sequence
attacaagattttttagctaat

SEQ ID NO: 55428 - DNA, 22 bp, Artificial sequence
  SiRNA target sequence
ttacaagattttttagctaatc

SEQ ID NO: 55429 - DNA, 22 bp, Artificial sequence
  SiRNA target sequence
tacaagattttttagctaatca

SEQ ID NO: 55430 - DNA, 22 bp, Artificial sequence
  SiRNA target sequence
acaagattttttagctaatcat

SEQ ID NO: 55431 - DNA, 22 bp, Artificial sequence
  SiRNA target sequence
caagattttttagctaatcatg

SEQ ID NO: 55432 - DNA, 22 bp, Artificial sequence
  SiRNA target sequence
aagattttttagctaatcatga

SEQ ID NO: 55433 - DNA, 22 bp, Artificial sequence
  SiRNA target sequence
agattttttagctaatcatgaa

SEQ ID NO: 55434 - DNA, 22 bp, Artificial sequence
  SiRNA target sequence
gattttttagctaatcatgaaa

SEQ ID NO: 55435 - DNA, 22 bp, Artificial sequence
  SiRNA target sequence
attttttagctaatcatgaaac

SEQ ID NO: 55436 - DNA, 22 bp, Artificial sequence
  SiRNA target sequence
ttttttagctaatcatgaaaca

SEQ ID NO: 55437 - DNA, 22 bp, Artificial sequence
  SiRNA target sequence
tttttagctaatcatgaaacaa

SEQ ID NO: 55438 - DNA, 22 bp, Artificial sequence
  SiRNA target sequence
ttttagctaatcatgaaacaat

SEQ ID NO: 55439 - DNA, 22 bp, Artificial sequence
  SiRNA target sequence
tttagctaatcatgaaacaatt

SEQ ID NO: 55440 - DNA, 22 bp, Artificial sequence
  SiRNA target sequence
ttagctaatcatgaaacaatta

SEQ ID NO: 55441 - DNA, 22 bp, Artificial sequence
  SiRNA target sequence
tagctaatcatgaaacaattaa

SEQ ID NO: 55442 - DNA, 22 bp, Artificial sequence
  SiRNA target sequence
agctaatcatgaaacaattaaa

SEQ ID NO: 55443 - DNA, 22 bp, Artificial sequence
  SiRNA target sequence
gctaatcatgaaacaattaaag

SEQ ID NO: 55444 - DNA, 22 bp, Artificial sequence
  SiRNA target sequence
ctaatcatgaaacaattaaagc

SEQ ID NO: 55445 - DNA, 22 bp, Artificial sequence
  SiRNA target sequence
taatcatgaaacaattaaagcc

SEQ ID NO: 55446 - DNA, 22 bp, Artificial sequence
  SiRNA target sequence
aatcatgaaacaattaaagcct

SEQ ID NO: 55447 - DNA, 22 bp, Artificial sequence
  SiRNA target sequence
atcatgaaacaattaaagccta

SEQ ID NO: 55448 - DNA, 22 bp, Artificial sequence
  SiRNA target sequence
tcatgaaacaattaaagcctat

SEQ ID NO: 55449 - DNA, 22 bp, Artificial sequence
  SiRNA target sequence
catgaaacaattaaagcctata

SEQ ID NO: 55450 - DNA, 22 bp, Artificial sequence
  SiRNA target sequence
atgaaacaattaaagcctataa

SEQ ID NO: 55451 - DNA, 22 bp, Artificial sequence
  SiRNA target sequence
tgaaacaattaaagcctataat

SEQ ID NO: 55452 - DNA, 22 bp, Artificial sequence
  SiRNA target sequence
gaaacaattaaagcctataata

SEQ ID NO: 55453 - DNA, 22 bp, Artificial sequence
  SiRNA target sequence
aaacaattaaagcctataatat

SEQ ID NO: 55454 - DNA, 22 bp, Artificial sequence
  SiRNA target sequence
aacaattaaagcctataatatg

SEQ ID NO: 55455 - DNA, 22 bp, Artificial sequence
  SiRNA target sequence
acaattaaagcctataatatgg

SEQ ID NO: 55456 - DNA, 22 bp, Artificial sequence
  SiRNA target sequence
caattaaagcctataatatgga

SEQ ID NO: 55457 - DNA, 22 bp, Artificial sequence
  SiRNA target sequence
aattaaagcctataatatggaa

SEQ ID NO: 55458 - DNA, 22 bp, Artificial sequence
  SiRNA target sequence
attaaagcctataatatggaag

SEQ ID NO: 55459 - DNA, 22 bp, Artificial sequence
  SiRNA target sequence
ttaaagcctataatatggaaga

SEQ ID NO: 55460 - DNA, 22 bp, Artificial sequence
  SiRNA target sequence
taaagcctataatatggaagaa

SEQ ID NO: 55461 - DNA, 22 bp, Artificial sequence
  SiRNA target sequence
aaagcctataatatggaagaag

SEQ ID NO: 55462 - DNA, 22 bp, Artificial sequence
  SiRNA target sequence
aagcctataatatggaagaaga

SEQ ID NO: 55463 - DNA, 22 bp, Artificial sequence
  SiRNA target sequence
agcctataatatggaagaagaa

SEQ ID NO: 55464 - DNA, 22 bp, Artificial sequence
  SiRNA target sequence
gcctataatatggaagaagaaa

SEQ ID NO: 55465 - DNA, 22 bp, Artificial sequence
  SiRNA target sequence
cctataatatggaagaagaaac

SEQ ID NO: 55466 - DNA, 22 bp, Artificial sequence
  SiRNA target sequence
ctataatatggaagaagaaact

SEQ ID NO: 55467 - DNA, 22 bp, Artificial sequence
  SiRNA target sequence
tataatatggaagaagaaacta

SEQ ID NO: 55468 - DNA, 22 bp, Artificial sequence
  SiRNA target sequence
ataatatggaagaagaaactat

SEQ ID NO: 55469 - DNA, 22 bp, Artificial sequence
  SiRNA target sequence
taatatggaagaagaaactatt

SEQ ID NO: 55470 - DNA, 22 bp, Artificial sequence
  SiRNA target sequence
aatatggaagaagaaactatta

SEQ ID NO: 55471 - DNA, 22 bp, Artificial sequence
  SiRNA target sequence
atatggaagaagaaactattac

SEQ ID NO: 55472 - DNA, 22 bp, Artificial sequence
  SiRNA target sequence
tatggaagaagaaactattaca

SEQ ID NO: 55473 - DNA, 22 bp, Artificial sequence
  SiRNA target sequence
atggaagaagaaactattacat

SEQ ID NO: 55474 - DNA, 22 bp, Artificial sequence
  SiRNA target sequence
tggaagaagaaactattacata

SEQ ID NO: 55475 - DNA, 22 bp, Artificial sequence
  SiRNA target sequence
ggaagaagaaactattacatat

SEQ ID NO: 55476 - DNA, 22 bp, Artificial sequence
  SiRNA target sequence
gaagaagaaactattacatatt

SEQ ID NO: 55477 - DNA, 22 bp, Artificial sequence
  SiRNA target sequence
aagaagaaactattacatattt

SEQ ID NO: 55478 - DNA, 22 bp, Artificial sequence
  SiRNA target sequence
agaagaaactattacatatttt

SEQ ID NO: 55479 - DNA, 22 bp, Artificial sequence
  SiRNA target sequence
gaagaaactattacatattttg

SEQ ID NO: 55480 - DNA, 22 bp, Artificial sequence
  SiRNA target sequence
aagaaactattacatattttga

SEQ ID NO: 55481 - DNA, 22 bp, Artificial sequence
  SiRNA target sequence
agaaactattacatattttgat

SEQ ID NO: 55482 - DNA, 22 bp, Artificial sequence
  SiRNA target sequence
gaaactattacatattttgatg

SEQ ID NO: 55483 - DNA, 22 bp, Artificial sequence
  SiRNA target sequence
aaactattacatattttgatga

SEQ ID NO: 55484 - DNA, 22 bp, Artificial sequence
  SiRNA target sequence
aactattacatattttgatgaa

SEQ ID NO: 55485 - DNA, 22 bp, Artificial sequence
  SiRNA target sequence
actattacatattttgatgaaa

SEQ ID NO: 55486 - DNA, 22 bp, Artificial sequence
  SiRNA target sequence
ctattacatattttgatgaaaa

SEQ ID NO: 55487 - DNA, 22 bp, Artificial sequence
  SiRNA target sequence
tattacatattttgatgaaaat

SEQ ID NO: 55488 - DNA, 22 bp, Artificial sequence
  SiRNA target sequence
attacatattttgatgaaaatc

SEQ ID NO: 55489 - DNA, 22 bp, Artificial sequence
  SiRNA target sequence
ttacatattttgatgaaaatca

SEQ ID NO: 55490 - DNA, 22 bp, Artificial sequence
  SiRNA target sequence
tacatattttgatgaaaatcaa

SEQ ID NO: 55491 - DNA, 22 bp, Artificial sequence
  SiRNA target sequence
acatattttgatgaaaatcaaa

SEQ ID NO: 55492 - DNA, 22 bp, Artificial sequence
  SiRNA target sequence
catattttgatgaaaatcaaaa

SEQ ID NO: 55493 - DNA, 22 bp, Artificial sequence
  SiRNA target sequence
atattttgatgaaaatcaaaaa

SEQ ID NO: 55494 - DNA, 22 bp, Artificial sequence
  SiRNA target sequence
tattttgatgaaaatcaaaaac

SEQ ID NO: 55495 - DNA, 22 bp, Artificial sequence
  SiRNA target sequence
attttgatgaaaatcaaaaacc

SEQ ID NO: 55496 - DNA, 22 bp, Artificial sequence
  SiRNA target sequence
ttttgatgaaaatcaaaaaccg

SEQ ID NO: 55497 - DNA, 22 bp, Artificial sequence
  SiRNA target sequence
tttgatgaaaatcaaaaaccgg

SEQ ID NO: 55498 - DNA, 22 bp, Artificial sequence
  SiRNA target sequence
ttgatgaaaatcaaaaaccggt

SEQ ID NO: 55499 - DNA, 22 bp, Artificial sequence
  SiRNA target sequence
tgatgaaaatcaaaaaccggta

SEQ ID NO: 55500 - DNA, 22 bp, Artificial sequence
  SiRNA target sequence
gatgaaaatcaaaaaccggtag

SEQ ID NO: 55501 - DNA, 22 bp, Artificial sequence
  SiRNA target sequence
atgaaaatcaaaaaccggtaga

SEQ ID NO: 55502 - DNA, 22 bp, Artificial sequence
  SiRNA target sequence
tgaaaatcaaaaaccggtagaa

SEQ ID NO: 55503 - DNA, 22 bp, Artificial sequence
  SiRNA target sequence
gaaaatcaaaaaccggtagaat

SEQ ID NO: 55504 - DNA, 22 bp, Artificial sequence
  SiRNA target sequence
aaaatcaaaaaccggtagaata

SEQ ID NO: 55505 - DNA, 22 bp, Artificial sequence
  SiRNA target sequence
aaatcaaaaaccggtagaatat

SEQ ID NO: 55506 - DNA, 22 bp, Artificial sequence
  SiRNA target sequence
aatcaaaaaccggtagaatatt

SEQ ID NO: 55507 - DNA, 22 bp, Artificial sequence
  SiRNA target sequence
atcaaaaaccggtagaatattt

SEQ ID NO: 55508 - DNA, 22 bp, Artificial sequence
  SiRNA target sequence
tcaaaaaccggtagaatatttt

SEQ ID NO: 55509 - DNA, 22 bp, Artificial sequence
  SiRNA target sequence
caaaaaccggtagaatattttg

SEQ ID NO: 55510 - DNA, 22 bp, Artificial sequence
  SiRNA target sequence
aaaaaccggtagaatattttgg

SEQ ID NO: 55511 - DNA, 22 bp, Artificial sequence
  SiRNA target sequence
aaaaccggtagaatattttggg

SEQ ID NO: 55512 - DNA, 22 bp, Artificial sequence
  SiRNA target sequence
aaaccggtagaatattttgggg

SEQ ID NO: 55513 - DNA, 22 bp, Artificial sequence
  SiRNA target sequence
aaccggtagaatattttggggt

SEQ ID NO: 55514 - DNA, 22 bp, Artificial sequence
  SiRNA target sequence
accggtagaatattttggggta

SEQ ID NO: 55515 - DNA, 22 bp, Artificial sequence
  SiRNA target sequence
ccggtagaatattttggggtaa

SEQ ID NO: 55516 - DNA, 22 bp, Artificial sequence
  SiRNA target sequence
cggtagaatattttggggtaaa

SEQ ID NO: 55517 - DNA, 22 bp, Artificial sequence
  SiRNA target sequence
ggtagaatattttggggtaaag

SEQ ID NO: 55518 - DNA, 22 bp, Artificial sequence
  SiRNA target sequence
gtagaatattttggggtaaagt

SEQ ID NO: 55519 - DNA, 22 bp, Artificial sequence
  SiRNA target sequence
tagaatattttggggtaaagtc

SEQ ID NO: 55520 - DNA, 22 bp, Artificial sequence
  SiRNA target sequence
agaatattttggggtaaagtct

SEQ ID NO: 55521 - DNA, 22 bp, Artificial sequence
  SiRNA target sequence
gaatattttggggtaaagtctc

SEQ ID NO: 55522 - DNA, 22 bp, Artificial sequence
  SiRNA target sequence
aatattttggggtaaagtctca

SEQ ID NO: 55523 - DNA, 22 bp, Artificial sequence
  SiRNA target sequence
atattttggggtaaagtctcac

SEQ ID NO: 55524 - DNA, 22 bp, Artificial sequence
  SiRNA target sequence
tattttggggtaaagtctcaca

SEQ ID NO: 55525 - DNA, 22 bp, Artificial sequence
  SiRNA target sequence
attttggggtaaagtctcacag

SEQ ID NO: 55526 - DNA, 22 bp, Artificial sequence
  SiRNA target sequence
ttttggggtaaagtctcacaga

SEQ ID NO: 55527 - DNA, 22 bp, Artificial sequence
  SiRNA target sequence
tttggggtaaagtctcacagaa

SEQ ID NO: 55528 - DNA, 22 bp, Artificial sequence
  SiRNA target sequence
ttggggtaaagtctcacagaat

SEQ ID NO: 55529 - DNA, 22 bp, Artificial sequence
  SiRNA target sequence
tggggtaaagtctcacagaatt

SEQ ID NO: 55530 - DNA, 22 bp, Artificial sequence
  SiRNA target sequence
ggggtaaagtctcacagaattt

SEQ ID NO: 55531 - DNA, 22 bp, Artificial sequence
  SiRNA target sequence
gggtaaagtctcacagaatttt

SEQ ID NO: 55532 - DNA, 22 bp, Artificial sequence
  SiRNA target sequence
ggtaaagtctcacagaattttg

SEQ ID NO: 55533 - DNA, 22 bp, Artificial sequence
  SiRNA target sequence
gtaaagtctcacagaattttgt

SEQ ID NO: 55534 - DNA, 22 bp, Artificial sequence
  SiRNA target sequence
taaagtctcacagaattttgtt

SEQ ID NO: 55535 - DNA, 22 bp, Artificial sequence
  SiRNA target sequence
aaagtctcacagaattttgttc

SEQ ID NO: 55536 - DNA, 22 bp, Artificial sequence
  SiRNA target sequence
aagtctcacagaattttgttct

SEQ ID NO: 55537 - DNA, 22 bp, Artificial sequence
  SiRNA target sequence
agtctcacagaattttgttctc

SEQ ID NO: 55538 - DNA, 22 bp, Artificial sequence
  SiRNA target sequence
gtctcacagaattttgttctct

SEQ ID NO: 55539 - DNA, 22 bp, Artificial sequence
  SiRNA target sequence
tctcacagaattttgttctctc

SEQ ID NO: 55540 - DNA, 22 bp, Artificial sequence
  SiRNA target sequence
ctcacagaattttgttctctct

SEQ ID NO: 55541 - DNA, 22 bp, Artificial sequence
  SiRNA target sequence
tcacagaattttgttctctctt

SEQ ID NO: 55542 - DNA, 22 bp, Artificial sequence
  SiRNA target sequence
cacagaattttgttctctcttt

SEQ ID NO: 55543 - DNA, 22 bp, Artificial sequence
  SiRNA target sequence
acagaattttgttctctctttt

SEQ ID NO: 55544 - DNA, 22 bp, Artificial sequence
  SiRNA target sequence
cagaattttgttctctctttta

SEQ ID NO: 55545 - DNA, 22 bp, Artificial sequence
  SiRNA target sequence
agaattttgttctctcttttat

SEQ ID NO: 55546 - DNA, 22 bp, Artificial sequence
  SiRNA target sequence
gaattttgttctctcttttata

SEQ ID NO: 55547 - DNA, 22 bp, Artificial sequence
  SiRNA target sequence
aattttgttctctcttttatat

SEQ ID NO: 55548 - DNA, 22 bp, Artificial sequence
  SiRNA target sequence
attttgttctctcttttatata

SEQ ID NO: 55549 - DNA, 22 bp, Artificial sequence
  SiRNA target sequence
ttttgttctctcttttatatat

SEQ ID NO: 55550 - DNA, 22 bp, Artificial sequence
  SiRNA target sequence
tttgttctctcttttatatata

SEQ ID NO: 55551 - DNA, 22 bp, Artificial sequence
  SiRNA target sequence
ttgttctctcttttatatatac

SEQ ID NO: 55552 - DNA, 22 bp, Artificial sequence
  SiRNA target sequence
tgttctctcttttatatataca

SEQ ID NO: 55553 - DNA, 22 bp, Artificial sequence
  SiRNA target sequence
gttctctcttttatatatacaa

SEQ ID NO: 55554 - DNA, 22 bp, Artificial sequence
  SiRNA target sequence
ttctctcttttatatatacaaa

SEQ ID NO: 55555 - DNA, 22 bp, Artificial sequence
  SiRNA target sequence
tctctcttttatatatacaaaa

SEQ ID NO: 55556 - DNA, 22 bp, Artificial sequence
  SiRNA target sequence
ctctcttttatatatacaaaaa

SEQ ID NO: 55557 - DNA, 22 bp, Artificial sequence
  SiRNA target sequence
tctcttttatatatacaaaaaa

SEQ ID NO: 55558 - DNA, 22 bp, Artificial sequence
  SiRNA target sequence
ctcttttatatatacaaaaaat

SEQ ID NO: 55559 - DNA, 22 bp, Artificial sequence
  SiRNA target sequence
tcttttatatatacaaaaaatg

SEQ ID NO: 55560 - DNA, 22 bp, Artificial sequence
  SiRNA target sequence
cttttatatatacaaaaaatga

SEQ ID NO: 55561 - DNA, 22 bp, Artificial sequence
  SiRNA target sequence
ttttatatatacaaaaaatgac

SEQ ID NO: 55562 - DNA, 22 bp, Artificial sequence
  SiRNA target sequence
tttatatatacaaaaaatgaca

SEQ ID NO: 55563 - DNA, 22 bp, Artificial sequence
  SiRNA target sequence
ttatatatacaaaaaatgacat

SEQ ID NO: 55564 - DNA, 22 bp, Artificial sequence
  SiRNA target sequence
tatatatacaaaaaatgacatt

SEQ ID NO: 55565 - DNA, 22 bp, Artificial sequence
  SiRNA target sequence
atatatacaaaaaatgacattt

SEQ ID NO: 55566 - DNA, 22 bp, Artificial sequence
  SiRNA target sequence
tatatacaaaaaatgacatttg

SEQ ID NO: 55567 - DNA, 22 bp, Artificial sequence
  SiRNA target sequence
atatacaaaaaatgacatttgc

SEQ ID NO: 55568 - DNA, 22 bp, Artificial sequence
  SiRNA target sequence
tatacaaaaaatgacatttgcg

SEQ ID NO: 55569 - DNA, 22 bp, Artificial sequence
  SiRNA target sequence
atacaaaaaatgacatttgcga

SEQ ID NO: 55570 - DNA, 22 bp, Artificial sequence
  SiRNA target sequence
tacaaaaaatgacatttgcgat

SEQ ID NO: 55571 - DNA, 22 bp, Artificial sequence
  SiRNA target sequence
acaaaaaatgacatttgcgata

SEQ ID NO: 55572 - DNA, 22 bp, Artificial sequence
  SiRNA target sequence
caaaaaatgacatttgcgatac

SEQ ID NO: 55573 - DNA, 22 bp, Artificial sequence
  SiRNA target sequence
aaaaaatgacatttgcgataca

SEQ ID NO: 55574 - DNA, 22 bp, Artificial sequence
  SiRNA target sequence
aaaaatgacatttgcgatacag

SEQ ID NO: 55575 - DNA, 22 bp, Artificial sequence
  SiRNA target sequence
aaaatgacatttgcgatacagg

SEQ ID NO: 55576 - DNA, 22 bp, Artificial sequence
  SiRNA target sequence
aaatgacatttgcgatacaggc

SEQ ID NO: 55577 - DNA, 22 bp, Artificial sequence
  SiRNA target sequence
aatgacatttgcgatacaggca

SEQ ID NO: 55578 - DNA, 22 bp, Artificial sequence
  SiRNA target sequence
atgacatttgcgatacaggcaa

SEQ ID NO: 55579 - DNA, 22 bp, Artificial sequence
  SiRNA target sequence
tgacatttgcgatacaggcaat

SEQ ID NO: 55580 - DNA, 22 bp, Artificial sequence
  SiRNA target sequence
gacatttgcgatacaggcaatt

SEQ ID NO: 55581 - DNA, 22 bp, Artificial sequence
  SiRNA target sequence
acatttgcgatacaggcaatta

SEQ ID NO: 55582 - DNA, 22 bp, Artificial sequence
  SiRNA target sequence
catttgcgatacaggcaattat

SEQ ID NO: 55583 - DNA, 22 bp, Artificial sequence
  SiRNA target sequence
atttgcgatacaggcaattatt

SEQ ID NO: 55584 - DNA, 22 bp, Artificial sequence
  SiRNA target sequence
tttgcgatacaggcaattatta

SEQ ID NO: 55585 - DNA, 22 bp, Artificial sequence
  SiRNA target sequence
ttgcgatacaggcaattattat

SEQ ID NO: 55586 - DNA, 22 bp, Artificial sequence
  SiRNA target sequence
tgcgatacaggcaattattatt

SEQ ID NO: 55587 - DNA, 22 bp, Artificial sequence
  SiRNA target sequence
gcgatacaggcaattattatta

SEQ ID NO: 55588 - DNA, 22 bp, Artificial sequence
  SiRNA target sequence
cgatacaggcaattattattat

SEQ ID NO: 55589 - DNA, 22 bp, Artificial sequence
  SiRNA target sequence
gatacaggcaattattattatc

SEQ ID NO: 55590 - DNA, 22 bp, Artificial sequence
  SiRNA target sequence
atacaggcaattattattatca

SEQ ID NO: 55591 - DNA, 22 bp, Artificial sequence
  SiRNA target sequence
tacaggcaattattattatcac

SEQ ID NO: 55592 - DNA, 22 bp, Artificial sequence
  SiRNA target sequence
acaggcaattattattatcaca

SEQ ID NO: 55593 - DNA, 22 bp, Artificial sequence
  SiRNA target sequence
caggcaattattattatcacat

SEQ ID NO: 55594 - DNA, 22 bp, Artificial sequence
  SiRNA target sequence
aggcaattattattatcacatt

SEQ ID NO: 55595 - DNA, 22 bp, Artificial sequence
  SiRNA target sequence
ggcaattattattatcacatta

SEQ ID NO: 55596 - DNA, 22 bp, Artificial sequence
  SiRNA target sequence
gcaattattattatcacattag

SEQ ID NO: 55597 - DNA, 22 bp, Artificial sequence
  SiRNA target sequence
caattattattatcacattagg

SEQ ID NO: 55598 - DNA, 22 bp, Artificial sequence
  SiRNA target sequence
aattattattatcacattagga

SEQ ID NO: 55599 - DNA, 22 bp, Artificial sequence
  SiRNA target sequence
attattattatcacattaggat

SEQ ID NO: 55600 - DNA, 22 bp, Artificial sequence
  SiRNA target sequence
ttattattatcacattaggatc

SEQ ID NO: 55601 - DNA, 22 bp, Artificial sequence
  SiRNA target sequence
tattattatcacattaggatct

SEQ ID NO: 55602 - DNA, 22 bp, Artificial sequence
  SiRNA target sequence
attattatcacattaggatctt

SEQ ID NO: 55603 - DNA, 22 bp, Artificial sequence
  SiRNA target sequence
ttattatcacattaggatcttt

SEQ ID NO: 55604 - DNA, 22 bp, Artificial sequence
  SiRNA target sequence
tattatcacattaggatctttt

SEQ ID NO: 55605 - DNA, 22 bp, Artificial sequence
  SiRNA target sequence
attatcacattaggatcttttg

SEQ ID NO: 55606 - DNA, 22 bp, Artificial sequence
  SiRNA target sequence
ttatcacattaggatcttttgg

SEQ ID NO: 55607 - DNA, 22 bp, Artificial sequence
  SiRNA target sequence
tatcacattaggatcttttgga

SEQ ID NO: 55608 - DNA, 22 bp, Artificial sequence
  SiRNA target sequence
atcacattaggatcttttggat

SEQ ID NO: 55609 - DNA, 22 bp, Artificial sequence
  SiRNA target sequence
tcacattaggatcttttggata

SEQ ID NO: 55610 - DNA, 22 bp, Artificial sequence
  SiRNA target sequence
cacattaggatcttttggatat

SEQ ID NO: 55611 - DNA, 22 bp, Artificial sequence
  SiRNA target sequence
acattaggatcttttggatatt

SEQ ID NO: 55612 - DNA, 22 bp, Artificial sequence
  SiRNA target sequence
cattaggatcttttggatattt

SEQ ID NO: 55613 - DNA, 22 bp, Artificial sequence
  SiRNA target sequence
attaggatcttttggatatttt

SEQ ID NO: 55614 - DNA, 22 bp, Artificial sequence
  SiRNA target sequence
ttaggatcttttggatattttc

SEQ ID NO: 55615 - DNA, 22 bp, Artificial sequence
  SiRNA target sequence
taggatcttttggatattttcc

SEQ ID NO: 55616 - DNA, 22 bp, Artificial sequence
  SiRNA target sequence
aggatcttttggatattttccg

SEQ ID NO: 55617 - DNA, 22 bp, Artificial sequence
  SiRNA target sequence
ggatcttttggatattttccga

SEQ ID NO: 55618 - DNA, 22 bp, Artificial sequence
  SiRNA target sequence
gatcttttggatattttccgat

SEQ ID NO: 55619 - DNA, 22 bp, Artificial sequence
  SiRNA target sequence
atcttttggatattttccgatt

SEQ ID NO: 55620 - DNA, 22 bp, Artificial sequence
  SiRNA target sequence
tcttttggatattttccgatta

SEQ ID NO: 55621 - DNA, 22 bp, Artificial sequence
  SiRNA target sequence
cttttggatattttccgattaa

SEQ ID NO: 55622 - DNA, 22 bp, Artificial sequence
  SiRNA target sequence
ttttggatattttccgattaaa

SEQ ID NO: 55623 - DNA, 22 bp, Artificial sequence
  SiRNA target sequence
tttggatattttccgattaaat

SEQ ID NO: 55624 - DNA, 22 bp, Artificial sequence
  SiRNA target sequence
ttggatattttccgattaaatt

SEQ ID NO: 55625 - DNA, 22 bp, Artificial sequence
  SiRNA target sequence
tggatattttccgattaaatta

SEQ ID NO: 55626 - DNA, 22 bp, Artificial sequence
  SiRNA target sequence
ggatattttccgattaaattat

SEQ ID NO: 55627 - DNA, 22 bp, Artificial sequence
  SiRNA target sequence
gatattttccgattaaattatc

SEQ ID NO: 55628 - DNA, 22 bp, Artificial sequence
  SiRNA target sequence
atattttccgattaaattatcc

SEQ ID NO: 55629 - DNA, 22 bp, Artificial sequence
  SiRNA target sequence
tattttccgattaaattatcct

SEQ ID NO: 55630 - DNA, 22 bp, Artificial sequence
  SiRNA target sequence
attttccgattaaattatcctc

SEQ ID NO: 55631 - DNA, 22 bp, Artificial sequence
  SiRNA target sequence
ttttccgattaaattatcctct

SEQ ID NO: 55632 - DNA, 22 bp, Artificial sequence
  SiRNA target sequence
tttccgattaaattatcctctc

SEQ ID NO: 55633 - DNA, 22 bp, Artificial sequence
  SiRNA target sequence
ttccgattaaattatcctctca

SEQ ID NO: 55634 - DNA, 22 bp, Artificial sequence
  SiRNA target sequence
tccgattaaattatcctctcaa

SEQ ID NO: 55635 - DNA, 22 bp, Artificial sequence
  SiRNA target sequence
ccgattaaattatcctctcaac

SEQ ID NO: 55636 - DNA, 22 bp, Artificial sequence
  SiRNA target sequence
cgattaaattatcctctcaaca

SEQ ID NO: 55637 - DNA, 22 bp, Artificial sequence
  SiRNA target sequence
gattaaattatcctctcaacag

SEQ ID NO: 55638 - DNA, 22 bp, Artificial sequence
  SiRNA target sequence
attaaattatcctctcaacagt

SEQ ID NO: 55639 - DNA, 22 bp, Artificial sequence
  SiRNA target sequence
ttaaattatcctctcaacagtt

SEQ ID NO: 55640 - DNA, 22 bp, Artificial sequence
  SiRNA target sequence
taaattatcctctcaacagtta

SEQ ID NO: 55641 - DNA, 22 bp, Artificial sequence
  SiRNA target sequence
aaattatcctctcaacagttag

SEQ ID NO: 55642 - DNA, 22 bp, Artificial sequence
  SiRNA target sequence
aattatcctctcaacagttagt

SEQ ID NO: 55643 - DNA, 22 bp, Artificial sequence
  SiRNA target sequence
attatcctctcaacagttagtc

SEQ ID NO: 55644 - DNA, 22 bp, Artificial sequence
  SiRNA target sequence
ttatcctctcaacagttagtct

SEQ ID NO: 55645 - DNA, 22 bp, Artificial sequence
  SiRNA target sequence
tatcctctcaacagttagtctt

SEQ ID NO: 55646 - DNA, 22 bp, Artificial sequence
  SiRNA target sequence
atcctctcaacagttagtcttt

SEQ ID NO: 55647 - DNA, 22 bp, Artificial sequence
  SiRNA target sequence
tcctctcaacagttagtctttt

SEQ ID NO: 55648 - DNA, 22 bp, Artificial sequence
  SiRNA target sequence
cctctcaacagttagtctttta

SEQ ID NO: 55649 - DNA, 22 bp, Artificial sequence
  SiRNA target sequence
ctctcaacagttagtcttttat

SEQ ID NO: 55650 - DNA, 22 bp, Artificial sequence
  SiRNA target sequence
tctcaacagttagtcttttata

SEQ ID NO: 55651 - DNA, 22 bp, Artificial sequence
  SiRNA target sequence
ctcaacagttagtcttttatat

SEQ ID NO: 55652 - DNA, 22 bp, Artificial sequence
  SiRNA target sequence
tcaacagttagtcttttatatt

SEQ ID NO: 55653 - DNA, 22 bp, Artificial sequence
  SiRNA target sequence
caacagttagtcttttatattt

SEQ ID NO: 55654 - DNA, 22 bp, Artificial sequence
  SiRNA target sequence
aacagttagtcttttatatttc

SEQ ID NO: 55655 - DNA, 22 bp, Artificial sequence
  SiRNA target sequence
acagttagtcttttatatttcg

SEQ ID NO: 55656 - DNA, 22 bp, Artificial sequence
  SiRNA target sequence
cagttagtcttttatatttcga

SEQ ID NO: 55657 - DNA, 22 bp, Artificial sequence
  SiRNA target sequence
agttagtcttttatatttcgat

SEQ ID NO: 55658 - DNA, 22 bp, Artificial sequence
  SiRNA target sequence
gttagtcttttatatttcgatt

SEQ ID NO: 55659 - DNA, 22 bp, Artificial sequence
  SiRNA target sequence
ttagtcttttatatttcgatta

SEQ ID NO: 55660 - DNA, 22 bp, Artificial sequence
  SiRNA target sequence
tagtcttttatatttcgattag

SEQ ID NO: 55661 - DNA, 22 bp, Artificial sequence
  SiRNA target sequence
agtcttttatatttcgattagt

SEQ ID NO: 55662 - DNA, 22 bp, Artificial sequence
  SiRNA target sequence
gtcttttatatttcgattagta

SEQ ID NO: 55663 - DNA, 22 bp, Artificial sequence
  SiRNA target sequence
tcttttatatttcgattagtaa

SEQ ID NO: 55664 - DNA, 22 bp, Artificial sequence
  SiRNA target sequence
cttttatatttcgattagtaaa

SEQ ID NO: 55665 - DNA, 22 bp, Artificial sequence
  SiRNA target sequence
ttttatatttcgattagtaaaa

SEQ ID NO: 55666 - DNA, 22 bp, Artificial sequence
  SiRNA target sequence
tttatatttcgattagtaaaac

SEQ ID NO: 55667 - DNA, 22 bp, Artificial sequence
  SiRNA target sequence
ttatatttcgattagtaaaacg

SEQ ID NO: 55668 - DNA, 22 bp, Artificial sequence
  SiRNA target sequence
tatatttcgattagtaaaacgt

SEQ ID NO: 55669 - DNA, 22 bp, Artificial sequence
  SiRNA target sequence
atatttcgattagtaaaacgtt

SEQ ID NO: 55670 - DNA, 22 bp, Artificial sequence
  SiRNA target sequence
tatttcgattagtaaaacgttg

SEQ ID NO: 55671 - DNA, 22 bp, Artificial sequence
  SiRNA target sequence
atttcgattagtaaaacgttga

SEQ ID NO: 55672 - DNA, 22 bp, Artificial sequence
  SiRNA target sequence
tttcgattagtaaaacgttgac

SEQ ID NO: 55673 - DNA, 22 bp, Artificial sequence
  SiRNA target sequence
ttcgattagtaaaacgttgaca

SEQ ID NO: 55674 - DNA, 22 bp, Artificial sequence
  SiRNA target sequence
tcgattagtaaaacgttgacaa

SEQ ID NO: 55675 - DNA, 22 bp, Artificial sequence
  SiRNA target sequence
cgattagtaaaacgttgacaaa

SEQ ID NO: 55676 - DNA, 22 bp, Artificial sequence
  SiRNA target sequence
gattagtaaaacgttgacaaat

SEQ ID NO: 55677 - DNA, 22 bp, Artificial sequence
  SiRNA target sequence
attagtaaaacgttgacaaatt

SEQ ID NO: 55678 - DNA, 22 bp, Artificial sequence
  SiRNA target sequence
ttagtaaaacgttgacaaattc

SEQ ID NO: 55679 - DNA, 22 bp, Artificial sequence
  SiRNA target sequence
tagtaaaacgttgacaaattcg

SEQ ID NO: 55680 - DNA, 22 bp, Artificial sequence
  SiRNA target sequence
agtaaaacgttgacaaattcgt

SEQ ID NO: 55681 - DNA, 22 bp, Artificial sequence
  SiRNA target sequence
gtaaaacgttgacaaattcgtt

SEQ ID NO: 55682 - DNA, 22 bp, Artificial sequence
  SiRNA target sequence
taaaacgttgacaaattcgttg

SEQ ID NO: 55683 - DNA, 22 bp, Artificial sequence
  SiRNA target sequence
aaaacgttgacaaattcgttga

SEQ ID NO: 55684 - DNA, 22 bp, Artificial sequence
  SiRNA target sequence
aaacgttgacaaattcgttgag

SEQ ID NO: 55685 - DNA, 22 bp, Artificial sequence
  SiRNA target sequence
aacgttgacaaattcgttgagc

SEQ ID NO: 55686 - DNA, 22 bp, Artificial sequence
  SiRNA target sequence
acgttgacaaattcgttgagcg

SEQ ID NO: 55687 - DNA, 22 bp, Artificial sequence
  SiRNA target sequence
cgttgacaaattcgttgagcga

SEQ ID NO: 55688 - DNA, 22 bp, Artificial sequence
  SiRNA target sequence
gttgacaaattcgttgagcgaa

SEQ ID NO: 55689 - DNA, 22 bp, Artificial sequence
  SiRNA target sequence
ttgacaaattcgttgagcgaaa

SEQ ID NO: 55690 - DNA, 22 bp, Artificial sequence
  SiRNA target sequence
tgacaaattcgttgagcgaaat

SEQ ID NO: 55691 - DNA, 22 bp, Artificial sequence
  SiRNA target sequence
gacaaattcgttgagcgaaatg

SEQ ID NO: 55692 - DNA, 22 bp, Artificial sequence
  SiRNA target sequence
acaaattcgttgagcgaaatgg

SEQ ID NO: 55693 - DNA, 22 bp, Artificial sequence
  SiRNA target sequence
caaattcgttgagcgaaatggg

SEQ ID NO: 55694 - DNA, 22 bp, Artificial sequence
  SiRNA target sequence
aaattcgttgagcgaaatggga

SEQ ID NO: 55695 - DNA, 22 bp, Artificial sequence
  SiRNA target sequence
aattcgttgagcgaaatgggaa

SEQ ID NO: 55696 - DNA, 22 bp, Artificial sequence
  SiRNA target sequence
attcgttgagcgaaatgggaat

SEQ ID NO: 55697 - DNA, 22 bp, Artificial sequence
  SiRNA target sequence
ttcgttgagcgaaatgggaatg

SEQ ID NO: 55698 - DNA, 22 bp, Artificial sequence
  SiRNA target sequence
tcgttgagcgaaatgggaatgc

SEQ ID NO: 55699 - DNA, 22 bp, Artificial sequence
  SiRNA target sequence
cgttgagcgaaatgggaatgct

SEQ ID NO: 55700 - DNA, 22 bp, Artificial sequence
  SiRNA target sequence
gttgagcgaaatgggaatgcta

SEQ ID NO: 55701 - DNA, 22 bp, Artificial sequence
  SiRNA target sequence
ttgagcgaaatgggaatgctat

SEQ ID NO: 55702 - DNA, 22 bp, Artificial sequence
  SiRNA target sequence
tgagcgaaatgggaatgctata

SEQ ID NO: 55703 - DNA, 22 bp, Artificial sequence
  SiRNA target sequence
gagcgaaatgggaatgctatac

SEQ ID NO: 55704 - DNA, 22 bp, Artificial sequence
  SiRNA target sequence
agcgaaatgggaatgctataca

SEQ ID NO: 55705 - DNA, 22 bp, Artificial sequence
  SiRNA target sequence
gcgaaatgggaatgctatacac

SEQ ID NO: 55706 - DNA, 22 bp, Artificial sequence
  SiRNA target sequence
cgaaatgggaatgctatacaca

SEQ ID NO: 55707 - DNA, 22 bp, Artificial sequence
  SiRNA target sequence
gaaatgggaatgctatacacaa

SEQ ID NO: 55708 - DNA, 22 bp, Artificial sequence
  SiRNA target sequence
aaatgggaatgctatacacaag

SEQ ID NO: 55709 - DNA, 22 bp, Artificial sequence
  SiRNA target sequence
aatgggaatgctatacacaaga

SEQ ID NO: 55710 - DNA, 22 bp, Artificial sequence
  SiRNA target sequence
atgggaatgctatacacaagat

SEQ ID NO: 55711 - DNA, 22 bp, Artificial sequence
  SiRNA target sequence
tgggaatgctatacacaagata

SEQ ID NO: 55712 - DNA, 22 bp, Artificial sequence
  SiRNA target sequence
gggaatgctatacacaagatat

SEQ ID NO: 55713 - DNA, 22 bp, Artificial sequence
  SiRNA target sequence
ggaatgctatacacaagatatg

SEQ ID NO: 55714 - DNA, 22 bp, Artificial sequence
  SiRNA target sequence
gaatgctatacacaagatatgt

SEQ ID NO: 55715 - DNA, 22 bp, Artificial sequence
  SiRNA target sequence
aatgctatacacaagatatgta

SEQ ID NO: 55716 - DNA, 22 bp, Artificial sequence
  SiRNA target sequence
atgctatacacaagatatgtac

SEQ ID NO: 55717 - DNA, 22 bp, Artificial sequence
  SiRNA target sequence
tgctatacacaagatatgtaca

SEQ ID NO: 55718 - DNA, 22 bp, Artificial sequence
  SiRNA target sequence
gctatacacaagatatgtacaa

SEQ ID NO: 55719 - DNA, 22 bp, Artificial sequence
  SiRNA target sequence
ctatacacaagatatgtacaag

SEQ ID NO: 55720 - DNA, 22 bp, Artificial sequence
  SiRNA target sequence
tatacacaagatatgtacaagg

SEQ ID NO: 55721 - DNA, 22 bp, Artificial sequence
  SiRNA target sequence
atacacaagatatgtacaagga

SEQ ID NO: 55722 - DNA, 22 bp, Artificial sequence
  SiRNA target sequence
tacacaagatatgtacaaggat

SEQ ID NO: 55723 - DNA, 22 bp, Artificial sequence
  SiRNA target sequence
acacaagatatgtacaaggatt

SEQ ID NO: 55724 - DNA, 22 bp, Artificial sequence
  SiRNA target sequence
cacaagatatgtacaaggattt

SEQ ID NO: 55725 - DNA, 22 bp, Artificial sequence
  SiRNA target sequence
acaagatatgtacaaggatttt

SEQ ID NO: 55726 - DNA, 22 bp, Artificial sequence
  SiRNA target sequence
caagatatgtacaaggattttt

SEQ ID NO: 55727 - DNA, 22 bp, Artificial sequence
  SiRNA target sequence
aagatatgtacaaggattttta

SEQ ID NO: 55728 - DNA, 22 bp, Artificial sequence
  SiRNA target sequence
agatatgtacaaggatttttaa

SEQ ID NO: 55729 - DNA, 22 bp, Artificial sequence
  SiRNA target sequence
gatatgtacaaggatttttaaa

SEQ ID NO: 55730 - DNA, 22 bp, Artificial sequence
  SiRNA target sequence
atatgtacaaggatttttaaat

SEQ ID NO: 55731 - DNA, 22 bp, Artificial sequence
  SiRNA target sequence
tatgtacaaggatttttaaatg

SEQ ID NO: 55732 - DNA, 22 bp, Artificial sequence
  SiRNA target sequence
atgtacaaggatttttaaatgc

SEQ ID NO: 55733 - DNA, 22 bp, Artificial sequence
  SiRNA target sequence
tgtacaaggatttttaaatgca

SEQ ID NO: 55734 - DNA, 22 bp, Artificial sequence
  SiRNA target sequence
gtacaaggatttttaaatgcaa

SEQ ID NO: 55735 - DNA, 22 bp, Artificial sequence
  SiRNA target sequence
tacaaggatttttaaatgcaaa

SEQ ID NO: 55736 - DNA, 22 bp, Artificial sequence
  SiRNA target sequence
acaaggatttttaaatgcaaag

SEQ ID NO: 55737 - DNA, 22 bp, Artificial sequence
  SiRNA target sequence
caaggatttttaaatgcaaagt

SEQ ID NO: 55738 - DNA, 22 bp, Artificial sequence
  SiRNA target sequence
aaggatttttaaatgcaaagtc

SEQ ID NO: 55739 - DNA, 22 bp, Artificial sequence
  SiRNA target sequence
aggatttttaaatgcaaagtct

SEQ ID NO: 55740 - DNA, 22 bp, Artificial sequence
  SiRNA target sequence
ggatttttaaatgcaaagtctg

SEQ ID NO: 55741 - DNA, 22 bp, Artificial sequence
  SiRNA target sequence
gatttttaaatgcaaagtctgg

SEQ ID NO: 55742 - DNA, 22 bp, Artificial sequence
  SiRNA target sequence
atttttaaatgcaaagtctgga

SEQ ID NO: 55743 - DNA, 22 bp, Artificial sequence
  SiRNA target sequence
tttttaaatgcaaagtctggat

SEQ ID NO: 55744 - DNA, 22 bp, Artificial sequence
  SiRNA target sequence
ttttaaatgcaaagtctggata

SEQ ID NO: 55745 - DNA, 22 bp, Artificial sequence
  SiRNA target sequence
tttaaatgcaaagtctggatat

SEQ ID NO: 55746 - DNA, 22 bp, Artificial sequence
  SiRNA target sequence
ttaaatgcaaagtctggatatt

SEQ ID NO: 55747 - DNA, 22 bp, Artificial sequence
  SiRNA target sequence
taaatgcaaagtctggatatta

SEQ ID NO: 55748 - DNA, 22 bp, Artificial sequence
  SiRNA target sequence
aaatgcaaagtctggatattac

SEQ ID NO: 55749 - DNA, 22 bp, Artificial sequence
  SiRNA target sequence
aatgcaaagtctggatattacg

SEQ ID NO: 55750 - DNA, 22 bp, Artificial sequence
  SiRNA target sequence
atgcaaagtctggatattacga

SEQ ID NO: 55751 - DNA, 22 bp, Artificial sequence
  SiRNA target sequence
tgcaaagtctggatattacgag

SEQ ID NO: 55752 - DNA, 22 bp, Artificial sequence
  SiRNA target sequence
gcaaagtctggatattacgagt

SEQ ID NO: 55753 - DNA, 22 bp, Artificial sequence
  SiRNA target sequence
caaagtctggatattacgagtt

SEQ ID NO: 55754 - DNA, 22 bp, Artificial sequence
  SiRNA target sequence
aaagtctggatattacgagttt

SEQ ID NO: 55755 - DNA, 22 bp, Artificial sequence
  SiRNA target sequence
aagtctggatattacgagttta

SEQ ID NO: 55756 - DNA, 22 bp, Artificial sequence
  SiRNA target sequence
agtctggatattacgagtttaa

SEQ ID NO: 55757 - DNA, 22 bp, Artificial sequence
  SiRNA target sequence
gtctggatattacgagtttaaa

SEQ ID NO: 55758 - DNA, 22 bp, Artificial sequence
  SiRNA target sequence
tctggatattacgagtttaaag

SEQ ID NO: 55759 - DNA, 22 bp, Artificial sequence
  SiRNA target sequence
ctggatattacgagtttaaaga

SEQ ID NO: 55760 - DNA, 22 bp, Artificial sequence
  SiRNA target sequence
tggatattacgagtttaaagag

SEQ ID NO: 55761 - DNA, 22 bp, Artificial sequence
  SiRNA target sequence
ggatattacgagtttaaagagg

SEQ ID NO: 55762 - DNA, 22 bp, Artificial sequence
  SiRNA target sequence
gatattacgagtttaaagagga

SEQ ID NO: 55763 - DNA, 22 bp, Artificial sequence
  SiRNA target sequence
atattacgagtttaaagaggat

SEQ ID NO: 55764 - DNA, 22 bp, Artificial sequence
  SiRNA target sequence
tattacgagtttaaagaggata

SEQ ID NO: 55765 - DNA, 22 bp, Artificial sequence
  SiRNA target sequence
attacgagtttaaagaggatac

SEQ ID NO: 55766 - DNA, 22 bp, Artificial sequence
  SiRNA target sequence
ttacgagtttaaagaggataca

SEQ ID NO: 55767 - DNA, 22 bp, Artificial sequence
  SiRNA target sequence
tacgagtttaaagaggatacac

SEQ ID NO: 55768 - DNA, 22 bp, Artificial sequence
  SiRNA target sequence
acgagtttaaagaggatacaca

SEQ ID NO: 55769 - DNA, 22 bp, Artificial sequence
  SiRNA target sequence
cgagtttaaagaggatacacaa

SEQ ID NO: 55770 - DNA, 22 bp, Artificial sequence
  SiRNA target sequence
gagtttaaagaggatacacaaa

SEQ ID NO: 55771 - DNA, 22 bp, Artificial sequence
  SiRNA target sequence
agtttaaagaggatacacaaac

SEQ ID NO: 55772 - DNA, 22 bp, Artificial sequence
  SiRNA target sequence
gtttaaagaggatacacaaact

SEQ ID NO: 55773 - DNA, 22 bp, Artificial sequence
  SiRNA target sequence
tttaaagaggatacacaaactg

SEQ ID NO: 55774 - DNA, 22 bp, Artificial sequence
  SiRNA target sequence
ttaaagaggatacacaaactga

SEQ ID NO: 55775 - DNA, 22 bp, Artificial sequence
  SiRNA target sequence
taaagaggatacacaaactgat

SEQ ID NO: 55776 - DNA, 22 bp, Artificial sequence
  SiRNA target sequence
aaagaggatacacaaactgata

SEQ ID NO: 55777 - DNA, 22 bp, Artificial sequence
  SiRNA target sequence
aagaggatacacaaactgataa

SEQ ID NO: 55778 - DNA, 22 bp, Artificial sequence
  SiRNA target sequence
agaggatacacaaactgataaa

SEQ ID NO: 55779 - DNA, 22 bp, Artificial sequence
  SiRNA target sequence
gaggatacacaaactgataaaa

SEQ ID NO: 55780 - DNA, 22 bp, Artificial sequence
  SiRNA target sequence
aggatacacaaactgataaaat

SEQ ID NO: 55781 - DNA, 22 bp, Artificial sequence
  SiRNA target sequence
ggatacacaaactgataaaata

SEQ ID NO: 55782 - DNA, 22 bp, Artificial sequence
  SiRNA target sequence
gatacacaaactgataaaataa

SEQ ID NO: 55783 - DNA, 22 bp, Artificial sequence
  SiRNA target sequence
atacacaaactgataaaataag

SEQ ID NO: 55784 - DNA, 22 bp, Artificial sequence
  SiRNA target sequence
tacacaaactgataaaataaga

SEQ ID NO: 55785 - DNA, 22 bp, Artificial sequence
  SiRNA target sequence
acacaaactgataaaataagac

SEQ ID NO: 55786 - DNA, 22 bp, Artificial sequence
  SiRNA target sequence
cacaaactgataaaataagact

SEQ ID NO: 55787 - DNA, 22 bp, Artificial sequence
  SiRNA target sequence
acaaactgataaaataagactg

SEQ ID NO: 55788 - DNA, 22 bp, Artificial sequence
  SiRNA target sequence
caaactgataaaataagactga

SEQ ID NO: 55789 - DNA, 22 bp, Artificial sequence
  SiRNA target sequence
aaactgataaaataagactgat

SEQ ID NO: 55790 - DNA, 22 bp, Artificial sequence
  SiRNA target sequence
aactgataaaataagactgata

SEQ ID NO: 55791 - DNA, 22 bp, Artificial sequence
  SiRNA target sequence
actgataaaataagactgatag

SEQ ID NO: 55792 - DNA, 22 bp, Artificial sequence
  SiRNA target sequence
ctgataaaataagactgataga

SEQ ID NO: 55793 - DNA, 22 bp, Artificial sequence
  SiRNA target sequence
tgataaaataagactgatagat

SEQ ID NO: 55794 - DNA, 22 bp, Artificial sequence
  SiRNA target sequence
gataaaataagactgatagatt

SEQ ID NO: 55795 - DNA, 22 bp, Artificial sequence
  SiRNA target sequence
ataaaataagactgatagattt

SEQ ID NO: 55796 - DNA, 22 bp, Artificial sequence
  SiRNA target sequence
taaaataagactgatagatttt

SEQ ID NO: 55797 - DNA, 22 bp, Artificial sequence
  SiRNA target sequence
aaaataagactgatagatttta

SEQ ID NO: 55798 - DNA, 22 bp, Artificial sequence
  SiRNA target sequence
aaataagactgatagattttaa

SEQ ID NO: 55799 - DNA, 22 bp, Artificial sequence
  SiRNA target sequence
aataagactgatagattttaat

SEQ ID NO: 55800 - DNA, 22 bp, Artificial sequence
  SiRNA target sequence
ataagactgatagattttaatg

SEQ ID NO: 55801 - DNA, 22 bp, Artificial sequence
  SiRNA target sequence
taagactgatagattttaatga

SEQ ID NO: 55802 - DNA, 22 bp, Artificial sequence
  SiRNA target sequence
aagactgatagattttaatgaa

SEQ ID NO: 55803 - DNA, 22 bp, Artificial sequence
  SiRNA target sequence
agactgatagattttaatgaaa

SEQ ID NO: 55804 - DNA, 22 bp, Artificial sequence
  SiRNA target sequence
gactgatagattttaatgaaaa

SEQ ID NO: 55805 - DNA, 22 bp, Artificial sequence
  SiRNA target sequence
actgatagattttaatgaaaag

SEQ ID NO: 55806 - DNA, 22 bp, Artificial sequence
  SiRNA target sequence
ctgatagattttaatgaaaagc

SEQ ID NO: 55807 - DNA, 22 bp, Artificial sequence
  SiRNA target sequence
tgatagattttaatgaaaagct

SEQ ID NO: 55808 - DNA, 22 bp, Artificial sequence
  SiRNA target sequence
gatagattttaatgaaaagcta

SEQ ID NO: 55809 - DNA, 22 bp, Artificial sequence
  SiRNA target sequence
atagattttaatgaaaagctag

SEQ ID NO: 55810 - DNA, 22 bp, Artificial sequence
  SiRNA target sequence
tagattttaatgaaaagctaga

SEQ ID NO: 55811 - DNA, 22 bp, Artificial sequence
  SiRNA target sequence
agattttaatgaaaagctagaa

SEQ ID NO: 55812 - DNA, 22 bp, Artificial sequence
  SiRNA target sequence
gattttaatgaaaagctagaat

SEQ ID NO: 55813 - DNA, 22 bp, Artificial sequence
  SiRNA target sequence
attttaatgaaaagctagaatt

SEQ ID NO: 55814 - DNA, 22 bp, Artificial sequence
  SiRNA target sequence
ttttaatgaaaagctagaattt

SEQ ID NO: 55815 - DNA, 22 bp, Artificial sequence
  SiRNA target sequence
tttaatgaaaagctagaattta

SEQ ID NO: 55816 - DNA, 22 bp, Artificial sequence
  SiRNA target sequence
ttaatgaaaagctagaatttag

SEQ ID NO: 55817 - DNA, 22 bp, Artificial sequence
  SiRNA target sequence
taatgaaaagctagaatttaga

SEQ ID NO: 55818 - DNA, 22 bp, Artificial sequence
  SiRNA target sequence
aatgaaaagctagaatttagaa

SEQ ID NO: 55819 - DNA, 22 bp, Artificial sequence
  SiRNA target sequence
atgaaaagctagaatttagaaa

SEQ ID NO: 55820 - DNA, 22 bp, Artificial sequence
  SiRNA target sequence
tgaaaagctagaatttagaaat

SEQ ID NO: 55821 - DNA, 22 bp, Artificial sequence
  SiRNA target sequence
gaaaagctagaatttagaaatg

SEQ ID NO: 55822 - DNA, 22 bp, Artificial sequence
  SiRNA target sequence
aaaagctagaatttagaaatgt

SEQ ID NO: 55823 - DNA, 22 bp, Artificial sequence
  SiRNA target sequence
aaagctagaatttagaaatgta

SEQ ID NO: 55824 - DNA, 22 bp, Artificial sequence
  SiRNA target sequence
aagctagaatttagaaatgtat

SEQ ID NO: 55825 - DNA, 22 bp, Artificial sequence
  SiRNA target sequence
agctagaatttagaaatgtatc

SEQ ID NO: 55826 - DNA, 22 bp, Artificial sequence
  SiRNA target sequence
gctagaatttagaaatgtatct

SEQ ID NO: 55827 - DNA, 22 bp, Artificial sequence
  SiRNA target sequence
ctagaatttagaaatgtatctt

SEQ ID NO: 55828 - DNA, 22 bp, Artificial sequence
  SiRNA target sequence
tagaatttagaaatgtatcttt

SEQ ID NO: 55829 - DNA, 22 bp, Artificial sequence
  SiRNA target sequence
agaatttagaaatgtatctttt

SEQ ID NO: 55830 - DNA, 22 bp, Artificial sequence
  SiRNA target sequence
gaatttagaaatgtatctttta

SEQ ID NO: 55831 - DNA, 22 bp, Artificial sequence
  SiRNA target sequence
aatttagaaatgtatcttttag

SEQ ID NO: 55832 - DNA, 22 bp, Artificial sequence
  SiRNA target sequence
atttagaaatgtatcttttagt

SEQ ID NO: 55833 - DNA, 22 bp, Artificial sequence
  SiRNA target sequence
tttagaaatgtatcttttagtt

SEQ ID NO: 55834 - DNA, 22 bp, Artificial sequence
  SiRNA target sequence
ttagaaatgtatcttttagtta

SEQ ID NO: 55835 - DNA, 22 bp, Artificial sequence
  SiRNA target sequence
tagaaatgtatcttttagttat

SEQ ID NO: 55836 - DNA, 22 bp, Artificial sequence
  SiRNA target sequence
agaaatgtatcttttagttatt

SEQ ID NO: 55837 - DNA, 22 bp, Artificial sequence
  SiRNA target sequence
gaaatgtatcttttagttattt

SEQ ID NO: 55838 - DNA, 22 bp, Artificial sequence
  SiRNA target sequence
aaatgtatcttttagttattta

SEQ ID NO: 55839 - DNA, 22 bp, Artificial sequence
  SiRNA target sequence
aatgtatcttttagttatttaa

SEQ ID NO: 55840 - DNA, 22 bp, Artificial sequence
  SiRNA target sequence
atgtatcttttagttatttaaa

SEQ ID NO: 55841 - DNA, 22 bp, Artificial sequence
  SiRNA target sequence
tgtatcttttagttatttaaat

SEQ ID NO: 55842 - DNA, 22 bp, Artificial sequence
  SiRNA target sequence
gtatcttttagttatttaaata

SEQ ID NO: 55843 - DNA, 22 bp, Artificial sequence
  SiRNA target sequence
tatcttttagttatttaaataa

SEQ ID NO: 55844 - DNA, 22 bp, Artificial sequence
  SiRNA target sequence
atcttttagttatttaaataag

SEQ ID NO: 55845 - DNA, 22 bp, Artificial sequence
  SiRNA target sequence
tcttttagttatttaaataagc

SEQ ID NO: 55846 - DNA, 22 bp, Artificial sequence
  SiRNA target sequence
cttttagttatttaaataagcc

SEQ ID NO: 55847 - DNA, 22 bp, Artificial sequence
  SiRNA target sequence
ttttagttatttaaataagcct

SEQ ID NO: 55848 - DNA, 22 bp, Artificial sequence
  SiRNA target sequence
tttagttatttaaataagccta

SEQ ID NO: 55849 - DNA, 22 bp, Artificial sequence
  SiRNA target sequence
ttagttatttaaataagcctat

SEQ ID NO: 55850 - DNA, 22 bp, Artificial sequence
  SiRNA target sequence
tagttatttaaataagcctatt

SEQ ID NO: 55851 - DNA, 22 bp, Artificial sequence
  SiRNA target sequence
agttatttaaataagcctattt

SEQ ID NO: 55852 - DNA, 22 bp, Artificial sequence
  SiRNA target sequence
gttatttaaataagcctatttt

SEQ ID NO: 55853 - DNA, 22 bp, Artificial sequence
  SiRNA target sequence
ttatttaaataagcctatttta

SEQ ID NO: 55854 - DNA, 22 bp, Artificial sequence
  SiRNA target sequence
tatttaaataagcctattttag

SEQ ID NO: 55855 - DNA, 22 bp, Artificial sequence
  SiRNA target sequence
atttaaataagcctattttagt

SEQ ID NO: 55856 - DNA, 22 bp, Artificial sequence
  SiRNA target sequence
tttaaataagcctattttagtg

SEQ ID NO: 55857 - DNA, 22 bp, Artificial sequence
  SiRNA target sequence
ttaaataagcctattttagtga

SEQ ID NO: 55858 - DNA, 22 bp, Artificial sequence
  SiRNA target sequence
taaataagcctattttagtgaa

SEQ ID NO: 55859 - DNA, 22 bp, Artificial sequence
  SiRNA target sequence
aaataagcctattttagtgaat

SEQ ID NO: 55860 - DNA, 22 bp, Artificial sequence
  SiRNA target sequence
aataagcctattttagtgaatg

SEQ ID NO: 55861 - DNA, 22 bp, Artificial sequence
  SiRNA target sequence
ataagcctattttagtgaatgc

SEQ ID NO: 55862 - DNA, 22 bp, Artificial sequence
  SiRNA target sequence
taagcctattttagtgaatgct

SEQ ID NO: 55863 - DNA, 22 bp, Artificial sequence
  SiRNA target sequence
aagcctattttagtgaatgcta

SEQ ID NO: 55864 - DNA, 22 bp, Artificial sequence
  SiRNA target sequence
agcctattttagtgaatgctaa

SEQ ID NO: 55865 - DNA, 22 bp, Artificial sequence
  SiRNA target sequence
gcctattttagtgaatgctaat

SEQ ID NO: 55866 - DNA, 22 bp, Artificial sequence
  SiRNA target sequence
cctattttagtgaatgctaatt

SEQ ID NO: 55867 - DNA, 22 bp, Artificial sequence
  SiRNA target sequence
ctattttagtgaatgctaattt

SEQ ID NO: 55868 - DNA, 22 bp, Artificial sequence
  SiRNA target sequence
tattttagtgaatgctaatttc

SEQ ID NO: 55869 - DNA, 22 bp, Artificial sequence
  SiRNA target sequence
attttagtgaatgctaatttcg

SEQ ID NO: 55870 - DNA, 22 bp, Artificial sequence
  SiRNA target sequence
ttttagtgaatgctaatttcgt

SEQ ID NO: 55871 - DNA, 22 bp, Artificial sequence
  SiRNA target sequence
tttagtgaatgctaatttcgtt

SEQ ID NO: 55872 - DNA, 22 bp, Artificial sequence
  SiRNA target sequence
ttagtgaatgctaatttcgtta

SEQ ID NO: 55873 - DNA, 22 bp, Artificial sequence
  SiRNA target sequence
tagtgaatgctaatttcgttat

SEQ ID NO: 55874 - DNA, 22 bp, Artificial sequence
  SiRNA target sequence
agtgaatgctaatttcgttatt

SEQ ID NO: 55875 - DNA, 22 bp, Artificial sequence
  SiRNA target sequence
gtgaatgctaatttcgttatta

SEQ ID NO: 55876 - DNA, 22 bp, Artificial sequence
  SiRNA target sequence
tgaatgctaatttcgttattaa

SEQ ID NO: 55877 - DNA, 22 bp, Artificial sequence
  SiRNA target sequence
gaatgctaatttcgttattaat

SEQ ID NO: 55878 - DNA, 22 bp, Artificial sequence
  SiRNA target sequence
aatgctaatttcgttattaata

SEQ ID NO: 55879 - DNA, 22 bp, Artificial sequence
  SiRNA target sequence
atgctaatttcgttattaataa

SEQ ID NO: 55880 - DNA, 22 bp, Artificial sequence
  SiRNA target sequence
tgctaatttcgttattaataaa

SEQ ID NO: 55881 - DNA, 22 bp, Artificial sequence
  SiRNA target sequence
gctaatttcgttattaataaag

SEQ ID NO: 55882 - DNA, 22 bp, Artificial sequence
  SiRNA target sequence
ctaatttcgttattaataaagg

SEQ ID NO: 55883 - DNA, 22 bp, Artificial sequence
  SiRNA target sequence
taatttcgttattaataaaggg

SEQ ID NO: 55884 - DNA, 22 bp, Artificial sequence
  SiRNA target sequence
aatttcgttattaataaagggg

SEQ ID NO: 55885 - DNA, 22 bp, Artificial sequence
  SiRNA target sequence
atttcgttattaataaagggga

SEQ ID NO: 55886 - DNA, 22 bp, Artificial sequence
  SiRNA target sequence
tttcgttattaataaaggggag

SEQ ID NO: 55887 - DNA, 22 bp, Artificial sequence
  SiRNA target sequence
ttcgttattaataaaggggagc

SEQ ID NO: 55888 - DNA, 22 bp, Artificial sequence
  SiRNA target sequence
tcgttattaataaaggggagcg

SEQ ID NO: 55889 - DNA, 22 bp, Artificial sequence
  SiRNA target sequence
cgttattaataaaggggagcgt

SEQ ID NO: 55890 - DNA, 22 bp, Artificial sequence
  SiRNA target sequence
gttattaataaaggggagcgtg

SEQ ID NO: 55891 - DNA, 22 bp, Artificial sequence
  SiRNA target sequence
ttattaataaaggggagcgtgt

SEQ ID NO: 55892 - DNA, 22 bp, Artificial sequence
  SiRNA target sequence
tattaataaaggggagcgtgtt

SEQ ID NO: 55893 - DNA, 22 bp, Artificial sequence
  SiRNA target sequence
attaataaaggggagcgtgttg

SEQ ID NO: 55894 - DNA, 22 bp, Artificial sequence
  SiRNA target sequence
ttaataaaggggagcgtgttgc

SEQ ID NO: 55895 - DNA, 22 bp, Artificial sequence
  SiRNA target sequence
taataaaggggagcgtgttgct

SEQ ID NO: 55896 - DNA, 22 bp, Artificial sequence
  SiRNA target sequence
aataaaggggagcgtgttgcta

SEQ ID NO: 55897 - DNA, 22 bp, Artificial sequence
  SiRNA target sequence
ataaaggggagcgtgttgctat

SEQ ID NO: 55898 - DNA, 22 bp, Artificial sequence
  SiRNA target sequence
taaaggggagcgtgttgctatt

SEQ ID NO: 55899 - DNA, 22 bp, Artificial sequence
  SiRNA target sequence
aaaggggagcgtgttgctatta

SEQ ID NO: 55900 - DNA, 22 bp, Artificial sequence
  SiRNA target sequence
aaggggagcgtgttgctattat

SEQ ID NO: 55901 - DNA, 22 bp, Artificial sequence
  SiRNA target sequence
aggggagcgtgttgctattata

SEQ ID NO: 55902 - DNA, 22 bp, Artificial sequence
  SiRNA target sequence
ggggagcgtgttgctattatag

SEQ ID NO: 55903 - DNA, 22 bp, Artificial sequence
  SiRNA target sequence
gggagcgtgttgctattatagg

SEQ ID NO: 55904 - DNA, 22 bp, Artificial sequence
  SiRNA target sequence
ggagcgtgttgctattatagga

SEQ ID NO: 55905 - DNA, 22 bp, Artificial sequence
  SiRNA target sequence
gagcgtgttgctattataggaa

SEQ ID NO: 55906 - DNA, 22 bp, Artificial sequence
  SiRNA target sequence
agcgtgttgctattataggaaa

SEQ ID NO: 55907 - DNA, 22 bp, Artificial sequence
  SiRNA target sequence
gcgtgttgctattataggaaaa

SEQ ID NO: 55908 - DNA, 22 bp, Artificial sequence
  SiRNA target sequence
cgtgttgctattataggaaaaa

SEQ ID NO: 55909 - DNA, 22 bp, Artificial sequence
  SiRNA target sequence
gtgttgctattataggaaaaaa

SEQ ID NO: 55910 - DNA, 22 bp, Artificial sequence
  SiRNA target sequence
tgttgctattataggaaaaaat

SEQ ID NO: 55911 - DNA, 22 bp, Artificial sequence
  SiRNA target sequence
gttgctattataggaaaaaatg

SEQ ID NO: 55912 - DNA, 22 bp, Artificial sequence
  SiRNA target sequence
ttgctattataggaaaaaatgg

SEQ ID NO: 55913 - DNA, 22 bp, Artificial sequence
  SiRNA target sequence
tgctattataggaaaaaatgga

SEQ ID NO: 55914 - DNA, 22 bp, Artificial sequence
  SiRNA target sequence
gctattataggaaaaaatggaa

SEQ ID NO: 55915 - DNA, 22 bp, Artificial sequence
  SiRNA target sequence
ctattataggaaaaaatggaac

SEQ ID NO: 55916 - DNA, 22 bp, Artificial sequence
  SiRNA target sequence
tattataggaaaaaatggaaca

SEQ ID NO: 55917 - DNA, 22 bp, Artificial sequence
  SiRNA target sequence
attataggaaaaaatggaacag

SEQ ID NO: 55918 - DNA, 22 bp, Artificial sequence
  SiRNA target sequence
ttataggaaaaaatggaacagg

SEQ ID NO: 55919 - DNA, 22 bp, Artificial sequence
  SiRNA target sequence
tataggaaaaaatggaacaggt

SEQ ID NO: 55920 - DNA, 22 bp, Artificial sequence
  SiRNA target sequence
ataggaaaaaatggaacaggta

SEQ ID NO: 55921 - DNA, 22 bp, Artificial sequence
  SiRNA target sequence
taggaaaaaatggaacaggtaa

SEQ ID NO: 55922 - DNA, 22 bp, Artificial sequence
  SiRNA target sequence
aggaaaaaatggaacaggtaaa

SEQ ID NO: 55923 - DNA, 22 bp, Artificial sequence
  SiRNA target sequence
ggaaaaaatggaacaggtaaaa

SEQ ID NO: 55924 - DNA, 22 bp, Artificial sequence
  SiRNA target sequence
gaaaaaatggaacaggtaaaag

SEQ ID NO: 55925 - DNA, 22 bp, Artificial sequence
  SiRNA target sequence
aaaaaatggaacaggtaaaagt

SEQ ID NO: 55926 - DNA, 22 bp, Artificial sequence
  SiRNA target sequence
aaaaatggaacaggtaaaagta

SEQ ID NO: 55927 - DNA, 22 bp, Artificial sequence
  SiRNA target sequence
aaaatggaacaggtaaaagtac

SEQ ID NO: 55928 - DNA, 22 bp, Artificial sequence
  SiRNA target sequence
aaatggaacaggtaaaagtaca

SEQ ID NO: 55929 - DNA, 22 bp, Artificial sequence
  SiRNA target sequence
aatggaacaggtaaaagtacaa

SEQ ID NO: 55930 - DNA, 22 bp, Artificial sequence
  SiRNA target sequence
atggaacaggtaaaagtacaat

SEQ ID NO: 55931 - DNA, 22 bp, Artificial sequence
  SiRNA target sequence
tggaacaggtaaaagtacaata

SEQ ID NO: 55932 - DNA, 22 bp, Artificial sequence
  SiRNA target sequence
ggaacaggtaaaagtacaataa

SEQ ID NO: 55933 - DNA, 22 bp, Artificial sequence
  SiRNA target sequence
gaacaggtaaaagtacaataat

SEQ ID NO: 55934 - DNA, 22 bp, Artificial sequence
  SiRNA target sequence
aacaggtaaaagtacaataata

SEQ ID NO: 55935 - DNA, 22 bp, Artificial sequence
  SiRNA target sequence
acaggtaaaagtacaataataa

SEQ ID NO: 55936 - DNA, 22 bp, Artificial sequence
  SiRNA target sequence
caggtaaaagtacaataataaa

SEQ ID NO: 55937 - DNA, 22 bp, Artificial sequence
  SiRNA target sequence
aggtaaaagtacaataataaaa

SEQ ID NO: 55938 - DNA, 22 bp, Artificial sequence
  SiRNA target sequence
ggtaaaagtacaataataaaat

SEQ ID NO: 55939 - DNA, 22 bp, Artificial sequence
  SiRNA target sequence
gtaaaagtacaataataaaatt

SEQ ID NO: 55940 - DNA, 22 bp, Artificial sequence
  SiRNA target sequence
taaaagtacaataataaaattg

SEQ ID NO: 55941 - DNA, 22 bp, Artificial sequence
  SiRNA target sequence
aaaagtacaataataaaattgt

SEQ ID NO: 55942 - DNA, 22 bp, Artificial sequence
  SiRNA target sequence
aaagtacaataataaaattgtt

SEQ ID NO: 55943 - DNA, 22 bp, Artificial sequence
  SiRNA target sequence
aagtacaataataaaattgtta

SEQ ID NO: 55944 - DNA, 22 bp, Artificial sequence
  SiRNA target sequence
agtacaataataaaattgttaa

SEQ ID NO: 55945 - DNA, 22 bp, Artificial sequence
  SiRNA target sequence
gtacaataataaaattgttaat

SEQ ID NO: 55946 - DNA, 22 bp, Artificial sequence
  SiRNA target sequence
tacaataataaaattgttaatg

SEQ ID NO: 55947 - DNA, 22 bp, Artificial sequence
  SiRNA target sequence
acaataataaaattgttaatga

SEQ ID NO: 55948 - DNA, 22 bp, Artificial sequence
  SiRNA target sequence
caataataaaattgttaatgaa

SEQ ID NO: 55949 - DNA, 22 bp, Artificial sequence
  SiRNA target sequence
aataataaaattgttaatgaaa

SEQ ID NO: 55950 - DNA, 22 bp, Artificial sequence
  SiRNA target sequence
ataataaaattgttaatgaaat

SEQ ID NO: 55951 - DNA, 22 bp, Artificial sequence
  SiRNA target sequence
taataaaattgttaatgaaatt

SEQ ID NO: 55952 - DNA, 22 bp, Artificial sequence
  SiRNA target sequence
aataaaattgttaatgaaattt

SEQ ID NO: 55953 - DNA, 22 bp, Artificial sequence
  SiRNA target sequence
ataaaattgttaatgaaatttt

SEQ ID NO: 55954 - DNA, 22 bp, Artificial sequence
  SiRNA target sequence
taaaattgttaatgaaatttta

SEQ ID NO: 55955 - DNA, 22 bp, Artificial sequence
  SiRNA target sequence
aaaattgttaatgaaattttat

SEQ ID NO: 55956 - DNA, 22 bp, Artificial sequence
  SiRNA target sequence
aaattgttaatgaaattttata

SEQ ID NO: 55957 - DNA, 22 bp, Artificial sequence
  SiRNA target sequence
aattgttaatgaaattttataa

SEQ ID NO: 55958 - DNA, 22 bp, Artificial sequence
  SiRNA target sequence
attgttaatgaaattttataaa

SEQ ID NO: 55959 - DNA, 22 bp, Artificial sequence
  SiRNA target sequence
ttgttaatgaaattttataaat

SEQ ID NO: 55960 - DNA, 22 bp, Artificial sequence
  SiRNA target sequence
tgttaatgaaattttataaata

SEQ ID NO: 55961 - DNA, 22 bp, Artificial sequence
  SiRNA target sequence
gttaatgaaattttataaatat

SEQ ID NO: 55962 - DNA, 22 bp, Artificial sequence
  SiRNA target sequence
ttaatgaaattttataaatatg

SEQ ID NO: 55963 - DNA, 22 bp, Artificial sequence
  SiRNA target sequence
taatgaaattttataaatatga

SEQ ID NO: 55964 - DNA, 22 bp, Artificial sequence
  SiRNA target sequence
aatgaaattttataaatatgat

SEQ ID NO: 55965 - DNA, 22 bp, Artificial sequence
  SiRNA target sequence
atgaaattttataaatatgatg

SEQ ID NO: 55966 - DNA, 22 bp, Artificial sequence
  SiRNA target sequence
tgaaattttataaatatgatgg

SEQ ID NO: 55967 - DNA, 22 bp, Artificial sequence
  SiRNA target sequence
gaaattttataaatatgatgga

SEQ ID NO: 55968 - DNA, 22 bp, Artificial sequence
  SiRNA target sequence
aaattttataaatatgatggag

SEQ ID NO: 55969 - DNA, 22 bp, Artificial sequence
  SiRNA target sequence
aattttataaatatgatggaga

SEQ ID NO: 55970 - DNA, 22 bp, Artificial sequence
  SiRNA target sequence
attttataaatatgatggagat

SEQ ID NO: 55971 - DNA, 22 bp, Artificial sequence
  SiRNA target sequence
ttttataaatatgatggagata

SEQ ID NO: 55972 - DNA, 22 bp, Artificial sequence
  SiRNA target sequence
tttataaatatgatggagatat

SEQ ID NO: 55973 - DNA, 22 bp, Artificial sequence
  SiRNA target sequence
ttataaatatgatggagatata

SEQ ID NO: 55974 - DNA, 22 bp, Artificial sequence
  SiRNA target sequence
tataaatatgatggagatatat

SEQ ID NO: 55975 - DNA, 22 bp, Artificial sequence
  SiRNA target sequence
ataaatatgatggagatatatt

SEQ ID NO: 55976 - DNA, 22 bp, Artificial sequence
  SiRNA target sequence
taaatatgatggagatatatta

SEQ ID NO: 55977 - DNA, 22 bp, Artificial sequence
  SiRNA target sequence
aaatatgatggagatatattaa

SEQ ID NO: 55978 - DNA, 22 bp, Artificial sequence
  SiRNA target sequence
aatatgatggagatatattaat

SEQ ID NO: 55979 - DNA, 22 bp, Artificial sequence
  SiRNA target sequence
atatgatggagatatattaatt

SEQ ID NO: 55980 - DNA, 22 bp, Artificial sequence
  SiRNA target sequence
tatgatggagatatattaattg

SEQ ID NO: 55981 - DNA, 22 bp, Artificial sequence
  SiRNA target sequence
atgatggagatatattaattga

SEQ ID NO: 55982 - DNA, 22 bp, Artificial sequence
  SiRNA target sequence
tgatggagatatattaattgat

SEQ ID NO: 55983 - DNA, 22 bp, Artificial sequence
  SiRNA target sequence
gatggagatatattaattgatg

SEQ ID NO: 55984 - DNA, 22 bp, Artificial sequence
  SiRNA target sequence
atggagatatattaattgatga

SEQ ID NO: 55985 - DNA, 22 bp, Artificial sequence
  SiRNA target sequence
tggagatatattaattgatgat

SEQ ID NO: 55986 - DNA, 22 bp, Artificial sequence
  SiRNA target sequence
ggagatatattaattgatgata

SEQ ID NO: 55987 - DNA, 22 bp, Artificial sequence
  SiRNA target sequence
gagatatattaattgatgatac

SEQ ID NO: 55988 - DNA, 22 bp, Artificial sequence
  SiRNA target sequence
agatatattaattgatgataca

SEQ ID NO: 55989 - DNA, 22 bp, Artificial sequence
  SiRNA target sequence
gatatattaattgatgatacag

SEQ ID NO: 55990 - DNA, 22 bp, Artificial sequence
  SiRNA target sequence
atatattaattgatgatacaga

SEQ ID NO: 55991 - DNA, 22 bp, Artificial sequence
  SiRNA target sequence
tatattaattgatgatacagaa

SEQ ID NO: 55992 - DNA, 22 bp, Artificial sequence
  SiRNA target sequence
atattaattgatgatacagaaa

SEQ ID NO: 55993 - DNA, 22 bp, Artificial sequence
  SiRNA target sequence
tattaattgatgatacagaaat

SEQ ID NO: 55994 - DNA, 22 bp, Artificial sequence
  SiRNA target sequence
attaattgatgatacagaaata

SEQ ID NO: 55995 - DNA, 22 bp, Artificial sequence
  SiRNA target sequence
ttaattgatgatacagaaatag

SEQ ID NO: 55996 - DNA, 22 bp, Artificial sequence
  SiRNA target sequence
taattgatgatacagaaataga

SEQ ID NO: 55997 - DNA, 22 bp, Artificial sequence
  SiRNA target sequence
aattgatgatacagaaatagat

SEQ ID NO: 55998 - DNA, 22 bp, Artificial sequence
  SiRNA target sequence
attgatgatacagaaatagata

SEQ ID NO: 55999 - DNA, 22 bp, Artificial sequence
  SiRNA target sequence
ttgatgatacagaaatagataa

SEQ ID NO: 56000 - DNA, 22 bp, Artificial sequence
  SiRNA target sequence
tgatgatacagaaatagataat

SEQ ID NO: 56001 - DNA, 22 bp, Artificial sequence
  SiRNA target sequence
gatgatacagaaatagataata

SEQ ID NO: 56002 - DNA, 22 bp, Artificial sequence
  SiRNA target sequence
atgatacagaaatagataatat

SEQ ID NO: 56003 - DNA, 22 bp, Artificial sequence
  SiRNA target sequence
tgatacagaaatagataatatt

SEQ ID NO: 56004 - DNA, 22 bp, Artificial sequence
  SiRNA target sequence
gatacagaaatagataatattt

SEQ ID NO: 56005 - DNA, 22 bp, Artificial sequence
  SiRNA target sequence
atacagaaatagataatatttc

SEQ ID NO: 56006 - DNA, 22 bp, Artificial sequence
  SiRNA target sequence
tacagaaatagataatatttcg

SEQ ID NO: 56007 - DNA, 22 bp, Artificial sequence
  SiRNA target sequence
acagaaatagataatatttcgg

SEQ ID NO: 56008 - DNA, 22 bp, Artificial sequence
  SiRNA target sequence
cagaaatagataatatttcgga

SEQ ID NO: 56009 - DNA, 22 bp, Artificial sequence
  SiRNA target sequence
agaaatagataatatttcggat

SEQ ID NO: 56010 - DNA, 22 bp, Artificial sequence
  SiRNA target sequence
gaaatagataatatttcggata

SEQ ID NO: 56011 - DNA, 22 bp, Artificial sequence
  SiRNA target sequence
aaatagataatatttcggatag

SEQ ID NO: 56012 - DNA, 22 bp, Artificial sequence
  SiRNA target sequence
aatagataatatttcggataga

SEQ ID NO: 56013 - DNA, 22 bp, Artificial sequence
  SiRNA target sequence
atagataatatttcggatagaa

SEQ ID NO: 56014 - DNA, 22 bp, Artificial sequence
  SiRNA target sequence
tagataatatttcggatagaag

SEQ ID NO: 56015 - DNA, 22 bp, Artificial sequence
  SiRNA target sequence
agataatatttcggatagaagt

SEQ ID NO: 56016 - DNA, 22 bp, Artificial sequence
  SiRNA target sequence
gataatatttcggatagaagtt

SEQ ID NO: 56017 - DNA, 22 bp, Artificial sequence
  SiRNA target sequence
ataatatttcggatagaagtta

SEQ ID NO: 56018 - DNA, 22 bp, Artificial sequence
  SiRNA target sequence
taatatttcggatagaagttac

SEQ ID NO: 56019 - DNA, 22 bp, Artificial sequence
  SiRNA target sequence
aatatttcggatagaagttaca

SEQ ID NO: 56020 - DNA, 22 bp, Artificial sequence
  SiRNA target sequence
atatttcggatagaagttacag

SEQ ID NO: 56021 - DNA, 22 bp, Artificial sequence
  SiRNA target sequence
tatttcggatagaagttacaga

SEQ ID NO: 56022 - DNA, 22 bp, Artificial sequence
  SiRNA target sequence
atttcggatagaagttacagaa

SEQ ID NO: 56023 - DNA, 22 bp, Artificial sequence
  SiRNA target sequence
tttcggatagaagttacagaag

SEQ ID NO: 56024 - DNA, 22 bp, Artificial sequence
  SiRNA target sequence
ttcggatagaagttacagaagt

SEQ ID NO: 56025 - DNA, 22 bp, Artificial sequence
  SiRNA target sequence
tcggatagaagttacagaagtt

SEQ ID NO: 56026 - DNA, 22 bp, Artificial sequence
  SiRNA target sequence
cggatagaagttacagaagttt

SEQ ID NO: 56027 - DNA, 22 bp, Artificial sequence
  SiRNA target sequence
ggatagaagttacagaagttta

SEQ ID NO: 56028 - DNA, 22 bp, Artificial sequence
  SiRNA target sequence
gatagaagttacagaagtttaa

SEQ ID NO: 56029 - DNA, 22 bp, Artificial sequence
  SiRNA target sequence
atagaagttacagaagtttaat

SEQ ID NO: 56030 - DNA, 22 bp, Artificial sequence
  SiRNA target sequence
tagaagttacagaagtttaata

SEQ ID NO: 56031 - DNA, 22 bp, Artificial sequence
  SiRNA target sequence
agaagttacagaagtttaatat

SEQ ID NO: 56032 - DNA, 22 bp, Artificial sequence
  SiRNA target sequence
gaagttacagaagtttaatatc

SEQ ID NO: 56033 - DNA, 22 bp, Artificial sequence
  SiRNA target sequence
aagttacagaagtttaatatca

SEQ ID NO: 56034 - DNA, 22 bp, Artificial sequence
  SiRNA target sequence
agttacagaagtttaatatcat

SEQ ID NO: 56035 - DNA, 22 bp, Artificial sequence
  SiRNA target sequence
gttacagaagtttaatatcata

SEQ ID NO: 56036 - DNA, 22 bp, Artificial sequence
  SiRNA target sequence
ttacagaagtttaatatcatat

SEQ ID NO: 56037 - DNA, 22 bp, Artificial sequence
  SiRNA target sequence
tacagaagtttaatatcatatg

SEQ ID NO: 56038 - DNA, 22 bp, Artificial sequence
  SiRNA target sequence
acagaagtttaatatcatatgc

SEQ ID NO: 56039 - DNA, 22 bp, Artificial sequence
  SiRNA target sequence
cagaagtttaatatcatatgca

SEQ ID NO: 56040 - DNA, 22 bp, Artificial sequence
  SiRNA target sequence
agaagtttaatatcatatgcaa

SEQ ID NO: 56041 - DNA, 22 bp, Artificial sequence
  SiRNA target sequence
gaagtttaatatcatatgcaac

SEQ ID NO: 56042 - DNA, 22 bp, Artificial sequence
  SiRNA target sequence
aagtttaatatcatatgcaaca

SEQ ID NO: 56043 - DNA, 22 bp, Artificial sequence
  SiRNA target sequence
agtttaatatcatatgcaacac

SEQ ID NO: 56044 - DNA, 22 bp, Artificial sequence
  SiRNA target sequence
gtttaatatcatatgcaacaca

SEQ ID NO: 56045 - DNA, 22 bp, Artificial sequence
  SiRNA target sequence
tttaatatcatatgcaacacaa

SEQ ID NO: 56046 - DNA, 22 bp, Artificial sequence
  SiRNA target sequence
ttaatatcatatgcaacacaaa

SEQ ID NO: 56047 - DNA, 22 bp, Artificial sequence
  SiRNA target sequence
taatatcatatgcaacacaaaa

SEQ ID NO: 56048 - DNA, 22 bp, Artificial sequence
  SiRNA target sequence
aatatcatatgcaacacaaaac

SEQ ID NO: 56049 - DNA, 22 bp, Artificial sequence
  SiRNA target sequence
atatcatatgcaacacaaaaca

SEQ ID NO: 56050 - DNA, 22 bp, Artificial sequence
  SiRNA target sequence
tatcatatgcaacacaaaacac

SEQ ID NO: 56051 - DNA, 22 bp, Artificial sequence
  SiRNA target sequence
atcatatgcaacacaaaacacg

SEQ ID NO: 56052 - DNA, 22 bp, Artificial sequence
  SiRNA target sequence
tcatatgcaacacaaaacacgt

SEQ ID NO: 56053 - DNA, 22 bp, Artificial sequence
  SiRNA target sequence
catatgcaacacaaaacacgtt

SEQ ID NO: 56054 - DNA, 22 bp, Artificial sequence
  SiRNA target sequence
atatgcaacacaaaacacgttc

SEQ ID NO: 56055 - DNA, 22 bp, Artificial sequence
  SiRNA target sequence
tatgcaacacaaaacacgttct

SEQ ID NO: 56056 - DNA, 22 bp, Artificial sequence
  SiRNA target sequence
atgcaacacaaaacacgttctt

SEQ ID NO: 56057 - DNA, 22 bp, Artificial sequence
  SiRNA target sequence
tgcaacacaaaacacgttctta

SEQ ID NO: 56058 - DNA, 22 bp, Artificial sequence
  SiRNA target sequence
gcaacacaaaacacgttcttat

SEQ ID NO: 56059 - DNA, 22 bp, Artificial sequence
  SiRNA target sequence
caacacaaaacacgttcttatt

SEQ ID NO: 56060 - DNA, 22 bp, Artificial sequence
  SiRNA target sequence
aacacaaaacacgttcttattc

SEQ ID NO: 56061 - DNA, 22 bp, Artificial sequence
  SiRNA target sequence
acacaaaacacgttcttattcg

SEQ ID NO: 56062 - DNA, 22 bp, Artificial sequence
  SiRNA target sequence
cacaaaacacgttcttattcga

SEQ ID NO: 56063 - DNA, 22 bp, Artificial sequence
  SiRNA target sequence
acaaaacacgttcttattcgat

SEQ ID NO: 56064 - DNA, 22 bp, Artificial sequence
  SiRNA target sequence
caaaacacgttcttattcgata

SEQ ID NO: 56065 - DNA, 22 bp, Artificial sequence
  SiRNA target sequence
aaaacacgttcttattcgataa

SEQ ID NO: 56066 - DNA, 22 bp, Artificial sequence
  SiRNA target sequence
aaacacgttcttattcgataat

SEQ ID NO: 56067 - DNA, 22 bp, Artificial sequence
  SiRNA target sequence
aacacgttcttattcgataata

SEQ ID NO: 56068 - DNA, 22 bp, Artificial sequence
  SiRNA target sequence
acacgttcttattcgataatac

SEQ ID NO: 56069 - DNA, 22 bp, Artificial sequence
  SiRNA target sequence
cacgttcttattcgataatact

SEQ ID NO: 56070 - DNA, 22 bp, Artificial sequence
  SiRNA target sequence
acgttcttattcgataatactg

SEQ ID NO: 56071 - DNA, 22 bp, Artificial sequence
  SiRNA target sequence
cgttcttattcgataatactgt

SEQ ID NO: 56072 - DNA, 22 bp, Artificial sequence
  SiRNA target sequence
gttcttattcgataatactgtg

SEQ ID NO: 56073 - DNA, 22 bp, Artificial sequence
  SiRNA target sequence
ttcttattcgataatactgtga

SEQ ID NO: 56074 - DNA, 22 bp, Artificial sequence
  SiRNA target sequence
tcttattcgataatactgtgac

SEQ ID NO: 56075 - DNA, 22 bp, Artificial sequence
  SiRNA target sequence
cttattcgataatactgtgaca

SEQ ID NO: 56076 - DNA, 22 bp, Artificial sequence
  SiRNA target sequence
ttattcgataatactgtgacat

SEQ ID NO: 56077 - DNA, 22 bp, Artificial sequence
  SiRNA target sequence
tattcgataatactgtgacata

SEQ ID NO: 56078 - DNA, 22 bp, Artificial sequence
  SiRNA target sequence
attcgataatactgtgacatac

SEQ ID NO: 56079 - DNA, 22 bp, Artificial sequence
  SiRNA target sequence
ttcgataatactgtgacataca

SEQ ID NO: 56080 - DNA, 22 bp, Artificial sequence
  SiRNA target sequence
tcgataatactgtgacatacaa

SEQ ID NO: 56081 - DNA, 22 bp, Artificial sequence
  SiRNA target sequence
cgataatactgtgacatacaat

SEQ ID NO: 56082 - DNA, 22 bp, Artificial sequence
  SiRNA target sequence
gataatactgtgacatacaata

SEQ ID NO: 56083 - DNA, 22 bp, Artificial sequence
  SiRNA target sequence
ataatactgtgacatacaatat

SEQ ID NO: 56084 - DNA, 22 bp, Artificial sequence
  SiRNA target sequence
taatactgtgacatacaatata

SEQ ID NO: 56085 - DNA, 22 bp, Artificial sequence
  SiRNA target sequence
aatactgtgacatacaatatat

SEQ ID NO: 56086 - DNA, 22 bp, Artificial sequence
  SiRNA target sequence
atactgtgacatacaatatatt

SEQ ID NO: 56087 - DNA, 22 bp, Artificial sequence
  SiRNA target sequence
tactgtgacatacaatatattt

SEQ ID NO: 56088 - DNA, 22 bp, Artificial sequence
  SiRNA target sequence
actgtgacatacaatatatttt

SEQ ID NO: 56089 - DNA, 22 bp, Artificial sequence
  SiRNA target sequence
ctgtgacatacaatatatttta

SEQ ID NO: 56090 - DNA, 22 bp, Artificial sequence
  SiRNA target sequence
tgtgacatacaatatattttac

SEQ ID NO: 56091 - DNA, 22 bp, Artificial sequence
  SiRNA target sequence
gtgacatacaatatattttacg

SEQ ID NO: 56092 - DNA, 22 bp, Artificial sequence
  SiRNA target sequence
tgacatacaatatattttacgg

SEQ ID NO: 56093 - DNA, 22 bp, Artificial sequence
  SiRNA target sequence
gacatacaatatattttacggg

SEQ ID NO: 56094 - DNA, 22 bp, Artificial sequence
  SiRNA target sequence
acatacaatatattttacggga

SEQ ID NO: 56095 - DNA, 22 bp, Artificial sequence
  SiRNA target sequence
catacaatatattttacgggac

SEQ ID NO: 56096 - DNA, 22 bp, Artificial sequence
  SiRNA target sequence
atacaatatattttacgggact

SEQ ID NO: 56097 - DNA, 22 bp, Artificial sequence
  SiRNA target sequence
tacaatatattttacgggacta

SEQ ID NO: 56098 - DNA, 22 bp, Artificial sequence
  SiRNA target sequence
acaatatattttacgggactaa

SEQ ID NO: 56099 - DNA, 22 bp, Artificial sequence
  SiRNA target sequence
caatatattttacgggactaaa

SEQ ID NO: 56100 - DNA, 22 bp, Artificial sequence
  SiRNA target sequence
aatatattttacgggactaaaa

SEQ ID NO: 56101 - DNA, 22 bp, Artificial sequence
  SiRNA target sequence
atatattttacgggactaaaaa

SEQ ID NO: 56102 - DNA, 22 bp, Artificial sequence
  SiRNA target sequence
tatattttacgggactaaaaac

SEQ ID NO: 56103 - DNA, 22 bp, Artificial sequence
  SiRNA target sequence
atattttacgggactaaaaacg

SEQ ID NO: 56104 - DNA, 22 bp, Artificial sequence
  SiRNA target sequence
tattttacgggactaaaaacgt

SEQ ID NO: 56105 - DNA, 22 bp, Artificial sequence
  SiRNA target sequence
attttacgggactaaaaacgta

SEQ ID NO: 56106 - DNA, 22 bp, Artificial sequence
  SiRNA target sequence
ttttacgggactaaaaacgtaa

SEQ ID NO: 56107 - DNA, 22 bp, Artificial sequence
  SiRNA target sequence
tttacgggactaaaaacgtaac

SEQ ID NO: 56108 - DNA, 22 bp, Artificial sequence
  SiRNA target sequence
ttacgggactaaaaacgtaaca

SEQ ID NO: 56109 - DNA, 22 bp, Artificial sequence
  SiRNA target sequence
tacgggactaaaaacgtaacag

SEQ ID NO: 56110 - DNA, 22 bp, Artificial sequence
  SiRNA target sequence
acgggactaaaaacgtaacaga

SEQ ID NO: 56111 - DNA, 22 bp, Artificial sequence
  SiRNA target sequence
cgggactaaaaacgtaacagaa

SEQ ID NO: 56112 - DNA, 22 bp, Artificial sequence
  SiRNA target sequence
gggactaaaaacgtaacagaaa

SEQ ID NO: 56113 - DNA, 22 bp, Artificial sequence
  SiRNA target sequence
ggactaaaaacgtaacagaaaa

SEQ ID NO: 56114 - DNA, 22 bp, Artificial sequence
  SiRNA target sequence
gactaaaaacgtaacagaaaaa

SEQ ID NO: 56115 - DNA, 22 bp, Artificial sequence
  SiRNA target sequence
actaaaaacgtaacagaaaaag

SEQ ID NO: 56116 - DNA, 22 bp, Artificial sequence
  SiRNA target sequence
ctaaaaacgtaacagaaaaaga

SEQ ID NO: 56117 - DNA, 22 bp, Artificial sequence
  SiRNA target sequence
taaaaacgtaacagaaaaagaa

SEQ ID NO: 56118 - DNA, 22 bp, Artificial sequence
  SiRNA target sequence
aaaaacgtaacagaaaaagaag

SEQ ID NO: 56119 - DNA, 22 bp, Artificial sequence
  SiRNA target sequence
aaaacgtaacagaaaaagaagt

SEQ ID NO: 56120 - DNA, 22 bp, Artificial sequence
  SiRNA target sequence
aaacgtaacagaaaaagaagtt

SEQ ID NO: 56121 - DNA, 22 bp, Artificial sequence
  SiRNA target sequence
aacgtaacagaaaaagaagttt

SEQ ID NO: 56122 - DNA, 22 bp, Artificial sequence
  SiRNA target sequence
acgtaacagaaaaagaagtttt

SEQ ID NO: 56123 - DNA, 22 bp, Artificial sequence
  SiRNA target sequence
cgtaacagaaaaagaagtttta

SEQ ID NO: 56124 - DNA, 22 bp, Artificial sequence
  SiRNA target sequence
gtaacagaaaaagaagttttag

SEQ ID NO: 56125 - DNA, 22 bp, Artificial sequence
  SiRNA target sequence
taacagaaaaagaagttttaga

SEQ ID NO: 56126 - DNA, 22 bp, Artificial sequence
  SiRNA target sequence
aacagaaaaagaagttttagaa

SEQ ID NO: 56127 - DNA, 22 bp, Artificial sequence
  SiRNA target sequence
acagaaaaagaagttttagaat

SEQ ID NO: 56128 - DNA, 22 bp, Artificial sequence
  SiRNA target sequence
cagaaaaagaagttttagaatt

SEQ ID NO: 56129 - DNA, 22 bp, Artificial sequence
  SiRNA target sequence
agaaaaagaagttttagaatta

SEQ ID NO: 56130 - DNA, 22 bp, Artificial sequence
  SiRNA target sequence
gaaaaagaagttttagaattag

SEQ ID NO: 56131 - DNA, 22 bp, Artificial sequence
  SiRNA target sequence
aaaaagaagttttagaattagc

SEQ ID NO: 56132 - DNA, 22 bp, Artificial sequence
  SiRNA target sequence
aaaagaagttttagaattagcc

SEQ ID NO: 56133 - DNA, 22 bp, Artificial sequence
  SiRNA target sequence
aaagaagttttagaattagcca

SEQ ID NO: 56134 - DNA, 22 bp, Artificial sequence
  SiRNA target sequence
aagaagttttagaattagccaa

SEQ ID NO: 56135 - DNA, 22 bp, Artificial sequence
  SiRNA target sequence
agaagttttagaattagccaaa

SEQ ID NO: 56136 - DNA, 22 bp, Artificial sequence
  SiRNA target sequence
gaagttttagaattagccaaaa

SEQ ID NO: 56137 - DNA, 22 bp, Artificial sequence
  SiRNA target sequence
aagttttagaattagccaaaaa

SEQ ID NO: 56138 - DNA, 22 bp, Artificial sequence
  SiRNA target sequence
agttttagaattagccaaaaaa

SEQ ID NO: 56139 - DNA, 22 bp, Artificial sequence
  SiRNA target sequence
gttttagaattagccaaaaaaa

SEQ ID NO: 56140 - DNA, 22 bp, Artificial sequence
  SiRNA target sequence
ttttagaattagccaaaaaaat

SEQ ID NO: 56141 - DNA, 22 bp, Artificial sequence
  SiRNA target sequence
tttagaattagccaaaaaaata

SEQ ID NO: 56142 - DNA, 22 bp, Artificial sequence
  SiRNA target sequence
ttagaattagccaaaaaaatag

SEQ ID NO: 56143 - DNA, 22 bp, Artificial sequence
  SiRNA target sequence
tagaattagccaaaaaaatagg

SEQ ID NO: 56144 - DNA, 22 bp, Artificial sequence
  SiRNA target sequence
agaattagccaaaaaaataggt

SEQ ID NO: 56145 - DNA, 22 bp, Artificial sequence
  SiRNA target sequence
gaattagccaaaaaaataggtg

SEQ ID NO: 56146 - DNA, 22 bp, Artificial sequence
  SiRNA target sequence
aattagccaaaaaaataggtgt

SEQ ID NO: 56147 - DNA, 22 bp, Artificial sequence
  SiRNA target sequence
attagccaaaaaaataggtgta

SEQ ID NO: 56148 - DNA, 22 bp, Artificial sequence
  SiRNA target sequence
ttagccaaaaaaataggtgtat

SEQ ID NO: 56149 - DNA, 22 bp, Artificial sequence
  SiRNA target sequence
tagccaaaaaaataggtgtatt

SEQ ID NO: 56150 - DNA, 22 bp, Artificial sequence
  SiRNA target sequence
agccaaaaaaataggtgtatta

SEQ ID NO: 56151 - DNA, 22 bp, Artificial sequence
  SiRNA target sequence
gccaaaaaaataggtgtattag

SEQ ID NO: 56152 - DNA, 22 bp, Artificial sequence
  SiRNA target sequence
ccaaaaaaataggtgtattaga

SEQ ID NO: 56153 - DNA, 22 bp, Artificial sequence
  SiRNA target sequence
caaaaaaataggtgtattagag

SEQ ID NO: 56154 - DNA, 22 bp, Artificial sequence
  SiRNA target sequence
aaaaaaataggtgtattagagt

SEQ ID NO: 56155 - DNA, 22 bp, Artificial sequence
  SiRNA target sequence
aaaaaataggtgtattagagtc

SEQ ID NO: 56156 - DNA, 22 bp, Artificial sequence
  SiRNA target sequence
aaaaataggtgtattagagtct

SEQ ID NO: 56157 - DNA, 22 bp, Artificial sequence
  SiRNA target sequence
aaaataggtgtattagagtcta

SEQ ID NO: 56158 - DNA, 22 bp, Artificial sequence
  SiRNA target sequence
aaataggtgtattagagtctat

SEQ ID NO: 56159 - DNA, 22 bp, Artificial sequence
  SiRNA target sequence
aataggtgtattagagtctata

SEQ ID NO: 56160 - DNA, 22 bp, Artificial sequence
  SiRNA target sequence
ataggtgtattagagtctatac

SEQ ID NO: 56161 - DNA, 22 bp, Artificial sequence
  SiRNA target sequence
taggtgtattagagtctataca

SEQ ID NO: 56162 - DNA, 22 bp, Artificial sequence
  SiRNA target sequence
aggtgtattagagtctatacag

SEQ ID NO: 56163 - DNA, 22 bp, Artificial sequence
  SiRNA target sequence
ggtgtattagagtctatacagg

SEQ ID NO: 56164 - DNA, 22 bp, Artificial sequence
  SiRNA target sequence
gtgtattagagtctatacagga

SEQ ID NO: 56165 - DNA, 22 bp, Artificial sequence
  SiRNA target sequence
tgtattagagtctatacaggaa

SEQ ID NO: 56166 - DNA, 22 bp, Artificial sequence
  SiRNA target sequence
gtattagagtctatacaggaat

SEQ ID NO: 56167 - DNA, 22 bp, Artificial sequence
  SiRNA target sequence
tattagagtctatacaggaatt

SEQ ID NO: 56168 - DNA, 22 bp, Artificial sequence
  SiRNA target sequence
attagagtctatacaggaattt

SEQ ID NO: 56169 - DNA, 22 bp, Artificial sequence
  SiRNA target sequence
ttagagtctatacaggaattta

SEQ ID NO: 56170 - DNA, 22 bp, Artificial sequence
  SiRNA target sequence
tagagtctatacaggaatttaa

SEQ ID NO: 56171 - DNA, 22 bp, Artificial sequence
  SiRNA target sequence
agagtctatacaggaatttaaa

SEQ ID NO: 56172 - DNA, 22 bp, Artificial sequence
  SiRNA target sequence
gagtctatacaggaatttaaag

SEQ ID NO: 56173 - DNA, 22 bp, Artificial sequence
  SiRNA target sequence
agtctatacaggaatttaaaga

SEQ ID NO: 56174 - DNA, 22 bp, Artificial sequence
  SiRNA target sequence
gtctatacaggaatttaaagat

SEQ ID NO: 56175 - DNA, 22 bp, Artificial sequence
  SiRNA target sequence
tctatacaggaatttaaagatg

SEQ ID NO: 56176 - DNA, 22 bp, Artificial sequence
  SiRNA target sequence
ctatacaggaatttaaagatgg

SEQ ID NO: 56177 - DNA, 22 bp, Artificial sequence
  SiRNA target sequence
tatacaggaatttaaagatggg

SEQ ID NO: 56178 - DNA, 22 bp, Artificial sequence
  SiRNA target sequence
atacaggaatttaaagatgggt

SEQ ID NO: 56179 - DNA, 22 bp, Artificial sequence
  SiRNA target sequence
tacaggaatttaaagatgggtt

SEQ ID NO: 56180 - DNA, 22 bp, Artificial sequence
  SiRNA target sequence
acaggaatttaaagatgggttt

SEQ ID NO: 56181 - DNA, 22 bp, Artificial sequence
  SiRNA target sequence
caggaatttaaagatgggttta

SEQ ID NO: 56182 - DNA, 22 bp, Artificial sequence
  SiRNA target sequence
aggaatttaaagatgggtttag

SEQ ID NO: 56183 - DNA, 22 bp, Artificial sequence
  SiRNA target sequence
ggaatttaaagatgggtttagc

SEQ ID NO: 56184 - DNA, 22 bp, Artificial sequence
  SiRNA target sequence
gaatttaaagatgggtttagca

SEQ ID NO: 56185 - DNA, 22 bp, Artificial sequence
  SiRNA target sequence
aatttaaagatgggtttagcac

SEQ ID NO: 56186 - DNA, 22 bp, Artificial sequence
  SiRNA target sequence
atttaaagatgggtttagcaca

SEQ ID NO: 56187 - DNA, 22 bp, Artificial sequence
  SiRNA target sequence
tttaaagatgggtttagcacat

SEQ ID NO: 56188 - DNA, 22 bp, Artificial sequence
  SiRNA target sequence
ttaaagatgggtttagcacatc

SEQ ID NO: 56189 - DNA, 22 bp, Artificial sequence
  SiRNA target sequence
taaagatgggtttagcacatcg

SEQ ID NO: 56190 - DNA, 22 bp, Artificial sequence
  SiRNA target sequence
aaagatgggtttagcacatcgg

SEQ ID NO: 56191 - DNA, 22 bp, Artificial sequence
  SiRNA target sequence
aagatgggtttagcacatcggt

SEQ ID NO: 56192 - DNA, 22 bp, Artificial sequence
  SiRNA target sequence
agatgggtttagcacatcggtc

SEQ ID NO: 56193 - DNA, 22 bp, Artificial sequence
  SiRNA target sequence
gatgggtttagcacatcggtcg

SEQ ID NO: 56194 - DNA, 22 bp, Artificial sequence
  SiRNA target sequence
atgggtttagcacatcggtcgg

SEQ ID NO: 56195 - DNA, 22 bp, Artificial sequence
  SiRNA target sequence
tgggtttagcacatcggtcggt

SEQ ID NO: 56196 - DNA, 22 bp, Artificial sequence
  SiRNA target sequence
gggtttagcacatcggtcggtg

SEQ ID NO: 56197 - DNA, 22 bp, Artificial sequence
  SiRNA target sequence
ggtttagcacatcggtcggtga

SEQ ID NO: 56198 - DNA, 22 bp, Artificial sequence
  SiRNA target sequence
gtttagcacatcggtcggtgaa

SEQ ID NO: 56199 - DNA, 22 bp, Artificial sequence
  SiRNA target sequence
tttagcacatcggtcggtgaac

SEQ ID NO: 56200 - DNA, 22 bp, Artificial sequence
  SiRNA target sequence
ttagcacatcggtcggtgaacg

SEQ ID NO: 56201 - DNA, 22 bp, Artificial sequence
  SiRNA target sequence
tagcacatcggtcggtgaacgc

SEQ ID NO: 56202 - DNA, 22 bp, Artificial sequence
  SiRNA target sequence
agcacatcggtcggtgaacgcg

SEQ ID NO: 56203 - DNA, 22 bp, Artificial sequence
  SiRNA target sequence
gcacatcggtcggtgaacgcgg

SEQ ID NO: 56204 - DNA, 22 bp, Artificial sequence
  SiRNA target sequence
cacatcggtcggtgaacgcgga

SEQ ID NO: 56205 - DNA, 22 bp, Artificial sequence
  SiRNA target sequence
acatcggtcggtgaacgcggaa

SEQ ID NO: 56206 - DNA, 22 bp, Artificial sequence
  SiRNA target sequence
catcggtcggtgaacgcggaag

SEQ ID NO: 56207 - DNA, 22 bp, Artificial sequence
  SiRNA target sequence
atcggtcggtgaacgcggaaga

SEQ ID NO: 56208 - DNA, 22 bp, Artificial sequence
  SiRNA target sequence
tcggtcggtgaacgcggaagat

SEQ ID NO: 56209 - DNA, 22 bp, Artificial sequence
  SiRNA target sequence
cggtcggtgaacgcggaagatt

SEQ ID NO: 56210 - DNA, 22 bp, Artificial sequence
  SiRNA target sequence
ggtcggtgaacgcggaagattt

SEQ ID NO: 56211 - DNA, 22 bp, Artificial sequence
  SiRNA target sequence
gtcggtgaacgcggaagatttt

SEQ ID NO: 56212 - DNA, 22 bp, Artificial sequence
  SiRNA target sequence
tcggtgaacgcggaagattttt

SEQ ID NO: 56213 - DNA, 22 bp, Artificial sequence
  SiRNA target sequence
cggtgaacgcggaagattttta

SEQ ID NO: 56214 - DNA, 22 bp, Artificial sequence
  SiRNA target sequence
ggtgaacgcggaagatttttat

SEQ ID NO: 56215 - DNA, 22 bp, Artificial sequence
  SiRNA target sequence
gtgaacgcggaagatttttatc

SEQ ID NO: 56216 - DNA, 22 bp, Artificial sequence
  SiRNA target sequence
tgaacgcggaagatttttatct

SEQ ID NO: 56217 - DNA, 22 bp, Artificial sequence
  SiRNA target sequence
gaacgcggaagatttttatctg

SEQ ID NO: 56218 - DNA, 22 bp, Artificial sequence
  SiRNA target sequence
aacgcggaagatttttatctgg

SEQ ID NO: 56219 - DNA, 22 bp, Artificial sequence
  SiRNA target sequence
acgcggaagatttttatctggt

SEQ ID NO: 56220 - DNA, 22 bp, Artificial sequence
  SiRNA target sequence
cgcggaagatttttatctggtg

SEQ ID NO: 56221 - DNA, 22 bp, Artificial sequence
  SiRNA target sequence
gcggaagatttttatctggtgg

SEQ ID NO: 56222 - DNA, 22 bp, Artificial sequence
  SiRNA target sequence
cggaagatttttatctggtggt

SEQ ID NO: 56223 - DNA, 22 bp, Artificial sequence
  SiRNA target sequence
ggaagatttttatctggtggtg

SEQ ID NO: 56224 - DNA, 22 bp, Artificial sequence
  SiRNA target sequence
gaagatttttatctggtggtga

SEQ ID NO: 56225 - DNA, 22 bp, Artificial sequence
  SiRNA target sequence
aagatttttatctggtggtgaa

SEQ ID NO: 56226 - DNA, 22 bp, Artificial sequence
  SiRNA target sequence
agatttttatctggtggtgaaa

SEQ ID NO: 56227 - DNA, 22 bp, Artificial sequence
  SiRNA target sequence
gatttttatctggtggtgaaag

SEQ ID NO: 56228 - DNA, 22 bp, Artificial sequence
  SiRNA target sequence
atttttatctggtggtgaaagg

SEQ ID NO: 56229 - DNA, 22 bp, Artificial sequence
  SiRNA target sequence
tttttatctggtggtgaaaggc

SEQ ID NO: 56230 - DNA, 22 bp, Artificial sequence
  SiRNA target sequence
ttttatctggtggtgaaaggca

SEQ ID NO: 56231 - DNA, 22 bp, Artificial sequence
  SiRNA target sequence
tttatctggtggtgaaaggcaa

SEQ ID NO: 56232 - DNA, 22 bp, Artificial sequence
  SiRNA target sequence
ttatctggtggtgaaaggcaaa

SEQ ID NO: 56233 - DNA, 22 bp, Artificial sequence
  SiRNA target sequence
tatctggtggtgaaaggcaaaa

SEQ ID NO: 56234 - DNA, 22 bp, Artificial sequence
  SiRNA target sequence
atctggtggtgaaaggcaaaaa

SEQ ID NO: 56235 - DNA, 22 bp, Artificial sequence
  SiRNA target sequence
tctggtggtgaaaggcaaaaaa

SEQ ID NO: 56236 - DNA, 22 bp, Artificial sequence
  SiRNA target sequence
ctggtggtgaaaggcaaaaaat

SEQ ID NO: 56237 - DNA, 22 bp, Artificial sequence
  SiRNA target sequence
tggtggtgaaaggcaaaaaatt

SEQ ID NO: 56238 - DNA, 22 bp, Artificial sequence
  SiRNA target sequence
ggtggtgaaaggcaaaaaatta

SEQ ID NO: 56239 - DNA, 22 bp, Artificial sequence
  SiRNA target sequence
gtggtgaaaggcaaaaaattat

SEQ ID NO: 56240 - DNA, 22 bp, Artificial sequence
  SiRNA target sequence
tggtgaaaggcaaaaaattatg

SEQ ID NO: 56241 - DNA, 22 bp, Artificial sequence
  SiRNA target sequence
ggtgaaaggcaaaaaattatgc

SEQ ID NO: 56242 - DNA, 22 bp, Artificial sequence
  SiRNA target sequence
gtgaaaggcaaaaaattatgct

SEQ ID NO: 56243 - DNA, 22 bp, Artificial sequence
  SiRNA target sequence
tgaaaggcaaaaaattatgctg

SEQ ID NO: 56244 - DNA, 22 bp, Artificial sequence
  SiRNA target sequence
gaaaggcaaaaaattatgctga

SEQ ID NO: 56245 - DNA, 22 bp, Artificial sequence
  SiRNA target sequence
aaaggcaaaaaattatgctgat

SEQ ID NO: 56246 - DNA, 22 bp, Artificial sequence
  SiRNA target sequence
aaggcaaaaaattatgctgatg

SEQ ID NO: 56247 - DNA, 22 bp, Artificial sequence
  SiRNA target sequence
aggcaaaaaattatgctgatgc

SEQ ID NO: 56248 - DNA, 22 bp, Artificial sequence
  SiRNA target sequence
ggcaaaaaattatgctgatgcg

SEQ ID NO: 56249 - DNA, 22 bp, Artificial sequence
  SiRNA target sequence
gcaaaaaattatgctgatgcgt

SEQ ID NO: 56250 - DNA, 22 bp, Artificial sequence
  SiRNA target sequence
caaaaaattatgctgatgcgtg

SEQ ID NO: 56251 - DNA, 22 bp, Artificial sequence
  SiRNA target sequence
aaaaaattatgctgatgcgtgc

SEQ ID NO: 56252 - DNA, 22 bp, Artificial sequence
  SiRNA target sequence
aaaaattatgctgatgcgtgca

SEQ ID NO: 56253 - DNA, 22 bp, Artificial sequence
  SiRNA target sequence
aaaattatgctgatgcgtgcat

SEQ ID NO: 56254 - DNA, 22 bp, Artificial sequence
  SiRNA target sequence
aaattatgctgatgcgtgcatt

SEQ ID NO: 56255 - DNA, 22 bp, Artificial sequence
  SiRNA target sequence
aattatgctgatgcgtgcattg

SEQ ID NO: 56256 - DNA, 22 bp, Artificial sequence
  SiRNA target sequence
attatgctgatgcgtgcattgc

SEQ ID NO: 56257 - DNA, 22 bp, Artificial sequence
  SiRNA target sequence
ttatgctgatgcgtgcattgct

SEQ ID NO: 56258 - DNA, 22 bp, Artificial sequence
  SiRNA target sequence
tatgctgatgcgtgcattgctt

SEQ ID NO: 56259 - DNA, 22 bp, Artificial sequence
  SiRNA target sequence
atgctgatgcgtgcattgctta

SEQ ID NO: 56260 - DNA, 22 bp, Artificial sequence
  SiRNA target sequence
tgctgatgcgtgcattgcttaa

SEQ ID NO: 56261 - DNA, 22 bp, Artificial sequence
  SiRNA target sequence
gctgatgcgtgcattgcttaaa

SEQ ID NO: 56262 - DNA, 22 bp, Artificial sequence
  SiRNA target sequence
ctgatgcgtgcattgcttaaaa

SEQ ID NO: 56263 - DNA, 22 bp, Artificial sequence
  SiRNA target sequence
tgatgcgtgcattgcttaaaaa

SEQ ID NO: 56264 - DNA, 22 bp, Artificial sequence
  SiRNA target sequence
gatgcgtgcattgcttaaaaat

SEQ ID NO: 56265 - DNA, 22 bp, Artificial sequence
  SiRNA target sequence
atgcgtgcattgcttaaaaatt

SEQ ID NO: 56266 - DNA, 22 bp, Artificial sequence
  SiRNA target sequence
tgcgtgcattgcttaaaaattc

SEQ ID NO: 56267 - DNA, 22 bp, Artificial sequence
  SiRNA target sequence
gcgtgcattgcttaaaaattca

SEQ ID NO: 56268 - DNA, 22 bp, Artificial sequence
  SiRNA target sequence
cgtgcattgcttaaaaattcag

SEQ ID NO: 56269 - DNA, 22 bp, Artificial sequence
  SiRNA target sequence
gtgcattgcttaaaaattcaga

SEQ ID NO: 56270 - DNA, 22 bp, Artificial sequence
  SiRNA target sequence
tgcattgcttaaaaattcagag

SEQ ID NO: 56271 - DNA, 22 bp, Artificial sequence
  SiRNA target sequence
gcattgcttaaaaattcagaga

SEQ ID NO: 56272 - DNA, 22 bp, Artificial sequence
  SiRNA target sequence
cattgcttaaaaattcagagat

SEQ ID NO: 56273 - DNA, 22 bp, Artificial sequence
  SiRNA target sequence
attgcttaaaaattcagagatc

SEQ ID NO: 56274 - DNA, 22 bp, Artificial sequence
  SiRNA target sequence
ttgcttaaaaattcagagatcg

SEQ ID NO: 56275 - DNA, 22 bp, Artificial sequence
  SiRNA target sequence
tgcttaaaaattcagagatcgt

SEQ ID NO: 56276 - DNA, 22 bp, Artificial sequence
  SiRNA target sequence
gcttaaaaattcagagatcgtt

SEQ ID NO: 56277 - DNA, 22 bp, Artificial sequence
  SiRNA target sequence
cttaaaaattcagagatcgttt

SEQ ID NO: 56278 - DNA, 22 bp, Artificial sequence
  SiRNA target sequence
ttaaaaattcagagatcgtttt

SEQ ID NO: 56279 - DNA, 22 bp, Artificial sequence
  SiRNA target sequence
taaaaattcagagatcgtttta

SEQ ID NO: 56280 - DNA, 22 bp, Artificial sequence
  SiRNA target sequence
aaaaattcagagatcgttttat

SEQ ID NO: 56281 - DNA, 22 bp, Artificial sequence
  SiRNA target sequence
aaaattcagagatcgttttatt

SEQ ID NO: 56282 - DNA, 22 bp, Artificial sequence
  SiRNA target sequence
aaattcagagatcgttttatta

SEQ ID NO: 56283 - DNA, 22 bp, Artificial sequence
  SiRNA target sequence
aattcagagatcgttttattag

SEQ ID NO: 56284 - DNA, 22 bp, Artificial sequence
  SiRNA target sequence
attcagagatcgttttattaga

SEQ ID NO: 56285 - DNA, 22 bp, Artificial sequence
  SiRNA target sequence
ttcagagatcgttttattagac

SEQ ID NO: 56286 - DNA, 22 bp, Artificial sequence
  SiRNA target sequence
tcagagatcgttttattagacg

SEQ ID NO: 56287 - DNA, 22 bp, Artificial sequence
  SiRNA target sequence
cagagatcgttttattagacga

SEQ ID NO: 56288 - DNA, 22 bp, Artificial sequence
  SiRNA target sequence
agagatcgttttattagacgag

SEQ ID NO: 56289 - DNA, 22 bp, Artificial sequence
  SiRNA target sequence
gagatcgttttattagacgagc

SEQ ID NO: 56290 - DNA, 22 bp, Artificial sequence
  SiRNA target sequence
agatcgttttattagacgagcc

SEQ ID NO: 56291 - DNA, 22 bp, Artificial sequence
  SiRNA target sequence
gatcgttttattagacgagcca

SEQ ID NO: 56292 - DNA, 22 bp, Artificial sequence
  SiRNA target sequence
atcgttttattagacgagccaa

SEQ ID NO: 56293 - DNA, 22 bp, Artificial sequence
  SiRNA target sequence
tcgttttattagacgagccaac

SEQ ID NO: 56294 - DNA, 22 bp, Artificial sequence
  SiRNA target sequence
cgttttattagacgagccaacc

SEQ ID NO: 56295 - DNA, 22 bp, Artificial sequence
  SiRNA target sequence
gttttattagacgagccaacct

SEQ ID NO: 56296 - DNA, 22 bp, Artificial sequence
  SiRNA target sequence
ttttattagacgagccaacctc

SEQ ID NO: 56297 - DNA, 22 bp, Artificial sequence
  SiRNA target sequence
tttattagacgagccaacctca

SEQ ID NO: 56298 - DNA, 22 bp, Artificial sequence
  SiRNA target sequence
ttattagacgagccaacctcag

SEQ ID NO: 56299 - DNA, 22 bp, Artificial sequence
  SiRNA target sequence
tattagacgagccaacctcagc

SEQ ID NO: 56300 - DNA, 22 bp, Artificial sequence
  SiRNA target sequence
attagacgagccaacctcagca

SEQ ID NO: 56301 - DNA, 22 bp, Artificial sequence
  SiRNA target sequence
ttagacgagccaacctcagcac

SEQ ID NO: 56302 - DNA, 22 bp, Artificial sequence
  SiRNA target sequence
tagacgagccaacctcagcact

SEQ ID NO: 56303 - DNA, 22 bp, Artificial sequence
  SiRNA target sequence
agacgagccaacctcagcacta

SEQ ID NO: 56304 - DNA, 22 bp, Artificial sequence
  SiRNA target sequence
gacgagccaacctcagcactag

SEQ ID NO: 56305 - DNA, 22 bp, Artificial sequence
  SiRNA target sequence
acgagccaacctcagcactaga

SEQ ID NO: 56306 - DNA, 22 bp, Artificial sequence
  SiRNA target sequence
cgagccaacctcagcactagat

SEQ ID NO: 56307 - DNA, 22 bp, Artificial sequence
  SiRNA target sequence
gagccaacctcagcactagata

SEQ ID NO: 56308 - DNA, 22 bp, Artificial sequence
  SiRNA target sequence
agccaacctcagcactagataa

SEQ ID NO: 56309 - DNA, 22 bp, Artificial sequence
  SiRNA target sequence
gccaacctcagcactagataaa

SEQ ID NO: 56310 - DNA, 22 bp, Artificial sequence
  SiRNA target sequence
ccaacctcagcactagataaaa

SEQ ID NO: 56311 - DNA, 22 bp, Artificial sequence
  SiRNA target sequence
caacctcagcactagataaaaa

SEQ ID NO: 56312 - DNA, 22 bp, Artificial sequence
  SiRNA target sequence
aacctcagcactagataaaaag

SEQ ID NO: 56313 - DNA, 22 bp, Artificial sequence
  SiRNA target sequence
acctcagcactagataaaaaga

SEQ ID NO: 56314 - DNA, 22 bp, Artificial sequence
  SiRNA target sequence
cctcagcactagataaaaagag

SEQ ID NO: 56315 - DNA, 22 bp, Artificial sequence
  SiRNA target sequence
ctcagcactagataaaaagagt

SEQ ID NO: 56316 - DNA, 22 bp, Artificial sequence
  SiRNA target sequence
tcagcactagataaaaagagtg

SEQ ID NO: 56317 - DNA, 22 bp, Artificial sequence
  SiRNA target sequence
cagcactagataaaaagagtga

SEQ ID NO: 56318 - DNA, 22 bp, Artificial sequence
  SiRNA target sequence
agcactagataaaaagagtgaa

SEQ ID NO: 56319 - DNA, 22 bp, Artificial sequence
  SiRNA target sequence
gcactagataaaaagagtgaac

SEQ ID NO: 56320 - DNA, 22 bp, Artificial sequence
  SiRNA target sequence
cactagataaaaagagtgaact

SEQ ID NO: 56321 - DNA, 22 bp, Artificial sequence
  SiRNA target sequence
actagataaaaagagtgaacta

SEQ ID NO: 56322 - DNA, 22 bp, Artificial sequence
  SiRNA target sequence
ctagataaaaagagtgaactag

SEQ ID NO: 56323 - DNA, 22 bp, Artificial sequence
  SiRNA target sequence
tagataaaaagagtgaactaga

SEQ ID NO: 56324 - DNA, 22 bp, Artificial sequence
  SiRNA target sequence
agataaaaagagtgaactagaa

SEQ ID NO: 56325 - DNA, 22 bp, Artificial sequence
  SiRNA target sequence
gataaaaagagtgaactagaaa

SEQ ID NO: 56326 - DNA, 22 bp, Artificial sequence
  SiRNA target sequence
ataaaaagagtgaactagaaac

SEQ ID NO: 56327 - DNA, 22 bp, Artificial sequence
  SiRNA target sequence
taaaaagagtgaactagaaact

SEQ ID NO: 56328 - DNA, 22 bp, Artificial sequence
  SiRNA target sequence
aaaaagagtgaactagaaacta

SEQ ID NO: 56329 - DNA, 22 bp, Artificial sequence
  SiRNA target sequence
aaaagagtgaactagaaactat

SEQ ID NO: 56330 - DNA, 22 bp, Artificial sequence
  SiRNA target sequence
aaagagtgaactagaaactatg

SEQ ID NO: 56331 - DNA, 22 bp, Artificial sequence
  SiRNA target sequence
aagagtgaactagaaactatga

SEQ ID NO: 56332 - DNA, 22 bp, Artificial sequence
  SiRNA target sequence
agagtgaactagaaactatgac

SEQ ID NO: 56333 - DNA, 22 bp, Artificial sequence
  SiRNA target sequence
gagtgaactagaaactatgaca

SEQ ID NO: 56334 - DNA, 22 bp, Artificial sequence
  SiRNA target sequence
agtgaactagaaactatgacat

SEQ ID NO: 56335 - DNA, 22 bp, Artificial sequence
  SiRNA target sequence
gtgaactagaaactatgacata

SEQ ID NO: 56336 - DNA, 22 bp, Artificial sequence
  SiRNA target sequence
tgaactagaaactatgacatat

SEQ ID NO: 56337 - DNA, 22 bp, Artificial sequence
  SiRNA target sequence
gaactagaaactatgacatata

SEQ ID NO: 56338 - DNA, 22 bp, Artificial sequence
  SiRNA target sequence
aactagaaactatgacatatat

SEQ ID NO: 56339 - DNA, 22 bp, Artificial sequence
  SiRNA target sequence
actagaaactatgacatatatt

SEQ ID NO: 56340 - DNA, 22 bp, Artificial sequence
  SiRNA target sequence
ctagaaactatgacatatattt

SEQ ID NO: 56341 - DNA, 22 bp, Artificial sequence
  SiRNA target sequence
tagaaactatgacatatatttt

SEQ ID NO: 56342 - DNA, 22 bp, Artificial sequence
  SiRNA target sequence
agaaactatgacatatattttt

SEQ ID NO: 56343 - DNA, 22 bp, Artificial sequence
  SiRNA target sequence
gaaactatgacatatattttta

SEQ ID NO: 56344 - DNA, 22 bp, Artificial sequence
  SiRNA target sequence
aaactatgacatatatttttaa

SEQ ID NO: 56345 - DNA, 22 bp, Artificial sequence
  SiRNA target sequence
aactatgacatatatttttaat

SEQ ID NO: 56346 - DNA, 22 bp, Artificial sequence
  SiRNA target sequence
actatgacatatatttttaatg

SEQ ID NO: 56347 - DNA, 22 bp, Artificial sequence
  SiRNA target sequence
ctatgacatatatttttaatga

SEQ ID NO: 56348 - DNA, 22 bp, Artificial sequence
  SiRNA target sequence
tatgacatatatttttaatgaa

SEQ ID NO: 56349 - DNA, 22 bp, Artificial sequence
  SiRNA target sequence
atgacatatatttttaatgaat

SEQ ID NO: 56350 - DNA, 22 bp, Artificial sequence
  SiRNA target sequence
tgacatatatttttaatgaatt

SEQ ID NO: 56351 - DNA, 22 bp, Artificial sequence
  SiRNA target sequence
gacatatatttttaatgaattt

SEQ ID NO: 56352 - DNA, 22 bp, Artificial sequence
  SiRNA target sequence
acatatatttttaatgaattta

SEQ ID NO: 56353 - DNA, 22 bp, Artificial sequence
  SiRNA target sequence
catatatttttaatgaatttaa

SEQ ID NO: 56354 - DNA, 22 bp, Artificial sequence
  SiRNA target sequence
atatatttttaatgaatttaag

SEQ ID NO: 56355 - DNA, 22 bp, Artificial sequence
  SiRNA target sequence
tatatttttaatgaatttaagt

SEQ ID NO: 56356 - DNA, 22 bp, Artificial sequence
  SiRNA target sequence
atatttttaatgaatttaagta

SEQ ID NO: 56357 - DNA, 22 bp, Artificial sequence
  SiRNA target sequence
tatttttaatgaatttaagtac

SEQ ID NO: 56358 - DNA, 22 bp, Artificial sequence
  SiRNA target sequence
atttttaatgaatttaagtacc

SEQ ID NO: 56359 - DNA, 22 bp, Artificial sequence
  SiRNA target sequence
tttttaatgaatttaagtacca

SEQ ID NO: 56360 - DNA, 22 bp, Artificial sequence
  SiRNA target sequence
ttttaatgaatttaagtaccat

SEQ ID NO: 56361 - DNA, 22 bp, Artificial sequence
  SiRNA target sequence
tttaatgaatttaagtaccata

SEQ ID NO: 56362 - DNA, 22 bp, Artificial sequence
  SiRNA target sequence
ttaatgaatttaagtaccatac

SEQ ID NO: 56363 - DNA, 22 bp, Artificial sequence
  SiRNA target sequence
taatgaatttaagtaccatact

SEQ ID NO: 56364 - DNA, 22 bp, Artificial sequence
  SiRNA target sequence
aatgaatttaagtaccatactt

SEQ ID NO: 56365 - DNA, 22 bp, Artificial sequence
  SiRNA target sequence
atgaatttaagtaccatacttt

SEQ ID NO: 56366 - DNA, 22 bp, Artificial sequence
  SiRNA target sequence
tgaatttaagtaccatactttt

SEQ ID NO: 56367 - DNA, 22 bp, Artificial sequence
  SiRNA target sequence
gaatttaagtaccatacttttg

SEQ ID NO: 56368 - DNA, 22 bp, Artificial sequence
  SiRNA target sequence
aatttaagtaccatacttttgt

SEQ ID NO: 56369 - DNA, 22 bp, Artificial sequence
  SiRNA target sequence
atttaagtaccatacttttgta

SEQ ID NO: 56370 - DNA, 22 bp, Artificial sequence
  SiRNA target sequence
tttaagtaccatacttttgtaa

SEQ ID NO: 56371 - DNA, 22 bp, Artificial sequence
  SiRNA target sequence
ttaagtaccatacttttgtaat

SEQ ID NO: 56372 - DNA, 22 bp, Artificial sequence
  SiRNA target sequence
taagtaccatacttttgtaata

SEQ ID NO: 56373 - DNA, 22 bp, Artificial sequence
  SiRNA target sequence
aagtaccatacttttgtaataa

SEQ ID NO: 56374 - DNA, 22 bp, Artificial sequence
  SiRNA target sequence
agtaccatacttttgtaataat

SEQ ID NO: 56375 - DNA, 22 bp, Artificial sequence
  SiRNA target sequence
gtaccatacttttgtaataatt

SEQ ID NO: 56376 - DNA, 22 bp, Artificial sequence
  SiRNA target sequence
taccatacttttgtaataattg

SEQ ID NO: 56377 - DNA, 22 bp, Artificial sequence
  SiRNA target sequence
accatacttttgtaataattgt

SEQ ID NO: 56378 - DNA, 22 bp, Artificial sequence
  SiRNA target sequence
ccatacttttgtaataattgta

SEQ ID NO: 56379 - DNA, 22 bp, Artificial sequence
  SiRNA target sequence
catacttttgtaataattgtac

SEQ ID NO: 56380 - DNA, 22 bp, Artificial sequence
  SiRNA target sequence
atacttttgtaataattgtaca

SEQ ID NO: 56381 - DNA, 22 bp, Artificial sequence
  SiRNA target sequence
tacttttgtaataattgtacac

SEQ ID NO: 56382 - DNA, 22 bp, Artificial sequence
  SiRNA target sequence
acttttgtaataattgtacaca

SEQ ID NO: 56383 - DNA, 22 bp, Artificial sequence
  SiRNA target sequence
cttttgtaataattgtacacaa

SEQ ID NO: 56384 - DNA, 22 bp, Artificial sequence
  SiRNA target sequence
ttttgtaataattgtacacaat

SEQ ID NO: 56385 - DNA, 22 bp, Artificial sequence
  SiRNA target sequence
tttgtaataattgtacacaatc

SEQ ID NO: 56386 - DNA, 22 bp, Artificial sequence
  SiRNA target sequence
ttgtaataattgtacacaatct

SEQ ID NO: 56387 - DNA, 22 bp, Artificial sequence
  SiRNA target sequence
tgtaataattgtacacaatcta

SEQ ID NO: 56388 - DNA, 22 bp, Artificial sequence
  SiRNA target sequence
gtaataattgtacacaatctag

SEQ ID NO: 56389 - DNA, 22 bp, Artificial sequence
  SiRNA target sequence
taataattgtacacaatctaga

SEQ ID NO: 56390 - DNA, 22 bp, Artificial sequence
  SiRNA target sequence
aataattgtacacaatctagaa

SEQ ID NO: 56391 - DNA, 22 bp, Artificial sequence
  SiRNA target sequence
ataattgtacacaatctagaat

SEQ ID NO: 56392 - DNA, 22 bp, Artificial sequence
  SiRNA target sequence
taattgtacacaatctagaatt

SEQ ID NO: 56393 - DNA, 22 bp, Artificial sequence
  SiRNA target sequence
aattgtacacaatctagaatta

SEQ ID NO: 56394 - DNA, 22 bp, Artificial sequence
  SiRNA target sequence
attgtacacaatctagaattat

SEQ ID NO: 56395 - DNA, 22 bp, Artificial sequence
  SiRNA target sequence
ttgtacacaatctagaattatt

SEQ ID NO: 56396 - DNA, 22 bp, Artificial sequence
  SiRNA target sequence
tgtacacaatctagaattattg

SEQ ID NO: 56397 - DNA, 22 bp, Artificial sequence
  SiRNA target sequence
gtacacaatctagaattattgg

SEQ ID NO: 56398 - DNA, 22 bp, Artificial sequence
  SiRNA target sequence
tacacaatctagaattattggc

SEQ ID NO: 56399 - DNA, 22 bp, Artificial sequence
  SiRNA target sequence
acacaatctagaattattggct

SEQ ID NO: 56400 - DNA, 22 bp, Artificial sequence
  SiRNA target sequence
cacaatctagaattattggctt

SEQ ID NO: 56401 - DNA, 22 bp, Artificial sequence
  SiRNA target sequence
acaatctagaattattggcttt

SEQ ID NO: 56402 - DNA, 22 bp, Artificial sequence
  SiRNA target sequence
caatctagaattattggctttg

SEQ ID NO: 56403 - DNA, 22 bp, Artificial sequence
  SiRNA target sequence
aatctagaattattggctttgt

SEQ ID NO: 56404 - DNA, 22 bp, Artificial sequence
  SiRNA target sequence
atctagaattattggctttgtt

SEQ ID NO: 56405 - DNA, 22 bp, Artificial sequence
  SiRNA target sequence
tctagaattattggctttgttt

SEQ ID NO: 56406 - DNA, 22 bp, Artificial sequence
  SiRNA target sequence
ctagaattattggctttgtttg

SEQ ID NO: 56407 - DNA, 22 bp, Artificial sequence
  SiRNA target sequence
tagaattattggctttgtttga

SEQ ID NO: 56408 - DNA, 22 bp, Artificial sequence
  SiRNA target sequence
agaattattggctttgtttgat

SEQ ID NO: 56409 - DNA, 22 bp, Artificial sequence
  SiRNA target sequence
gaattattggctttgtttgata

SEQ ID NO: 56410 - DNA, 22 bp, Artificial sequence
  SiRNA target sequence
aattattggctttgtttgataa

SEQ ID NO: 56411 - DNA, 22 bp, Artificial sequence
  SiRNA target sequence
attattggctttgtttgataaa

SEQ ID NO: 56412 - DNA, 22 bp, Artificial sequence
  SiRNA target sequence
ttattggctttgtttgataaaa

SEQ ID NO: 56413 - DNA, 22 bp, Artificial sequence
  SiRNA target sequence
tattggctttgtttgataaaat

SEQ ID NO: 56414 - DNA, 22 bp, Artificial sequence
  SiRNA target sequence
attggctttgtttgataaaatt

SEQ ID NO: 56415 - DNA, 22 bp, Artificial sequence
  SiRNA target sequence
ttggctttgtttgataaaattt

SEQ ID NO: 56416 - DNA, 22 bp, Artificial sequence
  SiRNA target sequence
tggctttgtttgataaaatttt

SEQ ID NO: 56417 - DNA, 22 bp, Artificial sequence
  SiRNA target sequence
ggctttgtttgataaaatttta

SEQ ID NO: 56418 - DNA, 22 bp, Artificial sequence
  SiRNA target sequence
gctttgtttgataaaattttat

SEQ ID NO: 56419 - DNA, 22 bp, Artificial sequence
  SiRNA target sequence
ctttgtttgataaaattttatt

SEQ ID NO: 56420 - DNA, 22 bp, Artificial sequence
  SiRNA target sequence
tttgtttgataaaattttattt

SEQ ID NO: 56421 - DNA, 22 bp, Artificial sequence
  SiRNA target sequence
ttgtttgataaaattttatttg

SEQ ID NO: 56422 - DNA, 22 bp, Artificial sequence
  SiRNA target sequence
tgtttgataaaattttatttgt

SEQ ID NO: 56423 - DNA, 22 bp, Artificial sequence
  SiRNA target sequence
gtttgataaaattttatttgta

SEQ ID NO: 56424 - DNA, 22 bp, Artificial sequence
  SiRNA target sequence
tttgataaaattttatttgtaa

SEQ ID NO: 56425 - DNA, 22 bp, Artificial sequence
  SiRNA target sequence
ttgataaaattttatttgtaaa

SEQ ID NO: 56426 - DNA, 22 bp, Artificial sequence
  SiRNA target sequence
tgataaaattttatttgtaaat

SEQ ID NO: 56427 - DNA, 22 bp, Artificial sequence
  SiRNA target sequence
gataaaattttatttgtaaatg

SEQ ID NO: 56428 - DNA, 22 bp, Artificial sequence
  SiRNA target sequence
ataaaattttatttgtaaatgg

SEQ ID NO: 56429 - DNA, 22 bp, Artificial sequence
  SiRNA target sequence
taaaattttatttgtaaatggt

SEQ ID NO: 56430 - DNA, 22 bp, Artificial sequence
  SiRNA target sequence
aaaattttatttgtaaatggta

SEQ ID NO: 56431 - DNA, 22 bp, Artificial sequence
  SiRNA target sequence
aaattttatttgtaaatggtaa

SEQ ID NO: 56432 - DNA, 22 bp, Artificial sequence
  SiRNA target sequence
aattttatttgtaaatggtaat

SEQ ID NO: 56433 - DNA, 22 bp, Artificial sequence
  SiRNA target sequence
attttatttgtaaatggtaatg

SEQ ID NO: 56434 - DNA, 22 bp, Artificial sequence
  SiRNA target sequence
ttttatttgtaaatggtaatga

SEQ ID NO: 56435 - DNA, 22 bp, Artificial sequence
  SiRNA target sequence
tttatttgtaaatggtaatgag

SEQ ID NO: 56436 - DNA, 22 bp, Artificial sequence
  SiRNA target sequence
ttatttgtaaatggtaatgagg

SEQ ID NO: 56437 - DNA, 22 bp, Artificial sequence
  SiRNA target sequence
tatttgtaaatggtaatgaggt

SEQ ID NO: 56438 - DNA, 22 bp, Artificial sequence
  SiRNA target sequence
atttgtaaatggtaatgaggta

SEQ ID NO: 56439 - DNA, 22 bp, Artificial sequence
  SiRNA target sequence
tttgtaaatggtaatgaggtaa

SEQ ID NO: 56440 - DNA, 22 bp, Artificial sequence
  SiRNA target sequence
ttgtaaatggtaatgaggtaac

SEQ ID NO: 56441 - DNA, 22 bp, Artificial sequence
  SiRNA target sequence
tgtaaatggtaatgaggtaaca

SEQ ID NO: 56442 - DNA, 22 bp, Artificial sequence
  SiRNA target sequence
gtaaatggtaatgaggtaacaa

SEQ ID NO: 56443 - DNA, 22 bp, Artificial sequence
  SiRNA target sequence
taaatggtaatgaggtaacaat

SEQ ID NO: 56444 - DNA, 22 bp, Artificial sequence
  SiRNA target sequence
aaatggtaatgaggtaacaatg

SEQ ID NO: 56445 - DNA, 22 bp, Artificial sequence
  SiRNA target sequence
aatggtaatgaggtaacaatga

SEQ ID NO: 56446 - DNA, 22 bp, Artificial sequence
  SiRNA target sequence
atggtaatgaggtaacaatgat

SEQ ID NO: 56447 - DNA, 22 bp, Artificial sequence
  SiRNA target sequence
tggtaatgaggtaacaatgata

SEQ ID NO: 56448 - DNA, 22 bp, Artificial sequence
  SiRNA target sequence
ggtaatgaggtaacaatgatag

SEQ ID NO: 56449 - DNA, 22 bp, Artificial sequence
  SiRNA target sequence
gtaatgaggtaacaatgataga

SEQ ID NO: 56450 - DNA, 22 bp, Artificial sequence
  SiRNA target sequence
taatgaggtaacaatgatagaa

SEQ ID NO: 56451 - DNA, 22 bp, Artificial sequence
  SiRNA target sequence
aatgaggtaacaatgatagaag

SEQ ID NO: 56452 - DNA, 22 bp, Artificial sequence
  SiRNA target sequence
atgaggtaacaatgatagaaga

SEQ ID NO: 56453 - DNA, 22 bp, Artificial sequence
  SiRNA target sequence
tgaggtaacaatgatagaagac

SEQ ID NO: 56454 - DNA, 22 bp, Artificial sequence
  SiRNA target sequence
gaggtaacaatgatagaagaca

SEQ ID NO: 56455 - DNA, 22 bp, Artificial sequence
  SiRNA target sequence
aggtaacaatgatagaagacat

SEQ ID NO: 56456 - DNA, 22 bp, Artificial sequence
  SiRNA target sequence
ggtaacaatgatagaagacatt

SEQ ID NO: 56457 - DNA, 22 bp, Artificial sequence
  SiRNA target sequence
gtaacaatgatagaagacatta

SEQ ID NO: 56458 - DNA, 22 bp, Artificial sequence
  SiRNA target sequence
taacaatgatagaagacattaa

SEQ ID NO: 56459 - DNA, 22 bp, Artificial sequence
  SiRNA target sequence
aacaatgatagaagacattaac

SEQ ID NO: 56460 - DNA, 22 bp, Artificial sequence
  SiRNA target sequence
acaatgatagaagacattaaca

SEQ ID NO: 56461 - DNA, 22 bp, Artificial sequence
  SiRNA target sequence
caatgatagaagacattaacaa

SEQ ID NO: 56462 - DNA, 22 bp, Artificial sequence
  SiRNA target sequence
aatgatagaagacattaacaaa

SEQ ID NO: 56463 - DNA, 22 bp, Artificial sequence
  SiRNA target sequence
atgatagaagacattaacaaaa

SEQ ID NO: 56464 - DNA, 22 bp, Artificial sequence
  SiRNA target sequence
tgatagaagacattaacaaaaa

SEQ ID NO: 56465 - DNA, 22 bp, Artificial sequence
  SiRNA target sequence
gatagaagacattaacaaaaaa

SEQ ID NO: 56466 - DNA, 22 bp, Artificial sequence
  SiRNA target sequence
atagaagacattaacaaaaaac

SEQ ID NO: 56467 - DNA, 22 bp, Artificial sequence
  SiRNA target sequence
tagaagacattaacaaaaaact

SEQ ID NO: 56468 - DNA, 22 bp, Artificial sequence
  SiRNA target sequence
agaagacattaacaaaaaactt

SEQ ID NO: 56469 - DNA, 22 bp, Artificial sequence
  SiRNA target sequence
gaagacattaacaaaaaacttg

SEQ ID NO: 56470 - DNA, 22 bp, Artificial sequence
  SiRNA target sequence
aagacattaacaaaaaacttga

SEQ ID NO: 56471 - DNA, 22 bp, Artificial sequence
  SiRNA target sequence
agacattaacaaaaaacttgaa

SEQ ID NO: 56472 - DNA, 22 bp, Artificial sequence
  SiRNA target sequence
gacattaacaaaaaacttgaag

SEQ ID NO: 56473 - DNA, 22 bp, Artificial sequence
  SiRNA target sequence
acattaacaaaaaacttgaaga

SEQ ID NO: 56474 - DNA, 22 bp, Artificial sequence
  SiRNA target sequence
cattaacaaaaaacttgaagaa

SEQ ID NO: 56475 - DNA, 22 bp, Artificial sequence
  SiRNA target sequence
attaacaaaaaacttgaagaaa

SEQ ID NO: 56476 - DNA, 22 bp, Artificial sequence
  SiRNA target sequence
ttaacaaaaaacttgaagaaaa

SEQ ID NO: 56477 - DNA, 22 bp, Artificial sequence
  SiRNA target sequence
taacaaaaaacttgaagaaaat

SEQ ID NO: 56478 - DNA, 22 bp, Artificial sequence
  SiRNA target sequence
aacaaaaaacttgaagaaaatt

SEQ ID NO: 56479 - DNA, 22 bp, Artificial sequence
  SiRNA target sequence
acaaaaaacttgaagaaaattc

SEQ ID NO: 56480 - DNA, 22 bp, Artificial sequence
  SiRNA target sequence
caaaaaacttgaagaaaattca

SEQ ID NO: 56481 - DNA, 22 bp, Artificial sequence
  SiRNA target sequence
aaaaaacttgaagaaaattcaa

SEQ ID NO: 56482 - DNA, 22 bp, Artificial sequence
  SiRNA target sequence
aaaaacttgaagaaaattcaaa

SEQ ID NO: 56483 - DNA, 22 bp, Artificial sequence
  SiRNA target sequence
aaaacttgaagaaaattcaaag

SEQ ID NO: 56484 - DNA, 22 bp, Artificial sequence
  SiRNA target sequence
aaacttgaagaaaattcaaagt

SEQ ID NO: 56485 - DNA, 22 bp, Artificial sequence
  SiRNA target sequence
aacttgaagaaaattcaaagta

SEQ ID NO: 56486 - DNA, 22 bp, Artificial sequence
  SiRNA target sequence
acttgaagaaaattcaaagtat

SEQ ID NO: 56487 - DNA, 22 bp, Artificial sequence
  SiRNA target sequence
cttgaagaaaattcaaagtatt

SEQ ID NO: 56488 - DNA, 22 bp, Artificial sequence
  SiRNA target sequence
ttgaagaaaattcaaagtattt

SEQ ID NO: 56489 - DNA, 22 bp, Artificial sequence
  SiRNA target sequence
tgaagaaaattcaaagtatttt

SEQ ID NO: 56490 - DNA, 22 bp, Artificial sequence
  SiRNA target sequence
gaagaaaattcaaagtattttg

SEQ ID NO: 56491 - DNA, 22 bp, Artificial sequence
  SiRNA target sequence
aagaaaattcaaagtattttgc

SEQ ID NO: 56492 - DNA, 22 bp, Artificial sequence
  SiRNA target sequence
agaaaattcaaagtattttgca

SEQ ID NO: 56493 - DNA, 22 bp, Artificial sequence
  SiRNA target sequence
gaaaattcaaagtattttgcag

SEQ ID NO: 56494 - DNA, 22 bp, Artificial sequence
  SiRNA target sequence
aaaattcaaagtattttgcaga

SEQ ID NO: 56495 - DNA, 22 bp, Artificial sequence
  SiRNA target sequence
aaattcaaagtattttgcagat

SEQ ID NO: 56496 - DNA, 22 bp, Artificial sequence
  SiRNA target sequence
aattcaaagtattttgcagata

SEQ ID NO: 56497 - DNA, 22 bp, Artificial sequence
  SiRNA target sequence
attcaaagtattttgcagatat

SEQ ID NO: 56498 - DNA, 22 bp, Artificial sequence
  SiRNA target sequence
ttcaaagtattttgcagatatt

SEQ ID NO: 56499 - DNA, 22 bp, Artificial sequence
  SiRNA target sequence
tcaaagtattttgcagatattt

SEQ ID NO: 56500 - DNA, 22 bp, Artificial sequence
  SiRNA target sequence
caaagtattttgcagatatttt

SEQ ID NO: 56501 - DNA, 22 bp, Artificial sequence
  SiRNA target sequence
aaagtattttgcagatatttta

SEQ ID NO: 56502 - DNA, 22 bp, Artificial sequence
  SiRNA target sequence
aagtattttgcagatattttaa

SEQ ID NO: 56503 - DNA, 22 bp, Artificial sequence
  SiRNA target sequence
agtattttgcagatattttaaa

SEQ ID NO: 56504 - DNA, 22 bp, Artificial sequence
  SiRNA target sequence
gtattttgcagatattttaaac

SEQ ID NO: 56505 - DNA, 22 bp, Artificial sequence
  SiRNA target sequence
tattttgcagatattttaaaca

SEQ ID NO: 56506 - DNA, 22 bp, Artificial sequence
  SiRNA target sequence
attttgcagatattttaaacaa

SEQ ID NO: 56507 - DNA, 22 bp, Artificial sequence
  SiRNA target sequence
ttttgcagatattttaaacaac

SEQ ID NO: 56508 - DNA, 22 bp, Artificial sequence
  SiRNA target sequence
tttgcagatattttaaacaacg

SEQ ID NO: 56509 - DNA, 22 bp, Artificial sequence
  SiRNA target sequence
ttgcagatattttaaacaacga

SEQ ID NO: 56510 - DNA, 22 bp, Artificial sequence
  SiRNA target sequence
tgcagatattttaaacaacgaa

SEQ ID NO: 56511 - DNA, 22 bp, Artificial sequence
  SiRNA target sequence
gcagatattttaaacaacgaat

SEQ ID NO: 56512 - DNA, 22 bp, Artificial sequence
  SiRNA target sequence
cagatattttaaacaacgaata

SEQ ID NO: 56513 - DNA, 22 bp, Artificial sequence
  SiRNA target sequence
agatattttaaacaacgaataa

SEQ ID NO: 56514 - DNA, 23 bp, Artificial sequence
  SiRNA target sequence
atgaaggaaaaaaccaattatga

SEQ ID NO: 56515 - DNA, 23 bp, Artificial sequence
  SiRNA target sequence
tgaaggaaaaaaccaattatgaa

SEQ ID NO: 56516 - DNA, 23 bp, Artificial sequence
  SiRNA target sequence
gaaggaaaaaaccaattatgaaa

SEQ ID NO: 56517 - DNA, 23 bp, Artificial sequence
  SiRNA target sequence
aaggaaaaaaccaattatgaaat

SEQ ID NO: 56518 - DNA, 23 bp, Artificial sequence
  SiRNA target sequence
aggaaaaaaccaattatgaaatt

SEQ ID NO: 56519 - DNA, 23 bp, Artificial sequence
  SiRNA target sequence
ggaaaaaaccaattatgaaattt

SEQ ID NO: 56520 - DNA, 23 bp, Artificial sequence
  SiRNA target sequence
gaaaaaaccaattatgaaatttt

SEQ ID NO: 56521 - DNA, 23 bp, Artificial sequence
  SiRNA target sequence
aaaaaaccaattatgaaatttta

SEQ ID NO: 56522 - DNA, 23 bp, Artificial sequence
  SiRNA target sequence
aaaaaccaattatgaaattttat

SEQ ID NO: 56523 - DNA, 23 bp, Artificial sequence
  SiRNA target sequence
aaaaccaattatgaaattttata

SEQ ID NO: 56524 - DNA, 23 bp, Artificial sequence
  SiRNA target sequence
aaaccaattatgaaattttatat

SEQ ID NO: 56525 - DNA, 23 bp, Artificial sequence
  SiRNA target sequence
aaccaattatgaaattttatatg

SEQ ID NO: 56526 - DNA, 23 bp, Artificial sequence
  SiRNA target sequence
accaattatgaaattttatatga

SEQ ID NO: 56527 - DNA, 23 bp, Artificial sequence
  SiRNA target sequence
ccaattatgaaattttatatgat

SEQ ID NO: 56528 - DNA, 23 bp, Artificial sequence
  SiRNA target sequence
caattatgaaattttatatgata

SEQ ID NO: 56529 - DNA, 23 bp, Artificial sequence
  SiRNA target sequence
aattatgaaattttatatgatac

SEQ ID NO: 56530 - DNA, 23 bp, Artificial sequence
  SiRNA target sequence
attatgaaattttatatgataca

SEQ ID NO: 56531 - DNA, 23 bp, Artificial sequence
  SiRNA target sequence
ttatgaaattttatatgatacat

SEQ ID NO: 56532 - DNA, 23 bp, Artificial sequence
  SiRNA target sequence
tatgaaattttatatgatacatt

SEQ ID NO: 56533 - DNA, 23 bp, Artificial sequence
  SiRNA target sequence
atgaaattttatatgatacattt

SEQ ID NO: 56534 - DNA, 23 bp, Artificial sequence
  SiRNA target sequence
tgaaattttatatgatacatttg

SEQ ID NO: 56535 - DNA, 23 bp, Artificial sequence
  SiRNA target sequence
gaaattttatatgatacatttgt

SEQ ID NO: 56536 - DNA, 23 bp, Artificial sequence
  SiRNA target sequence
aaattttatatgatacatttgta

SEQ ID NO: 56537 - DNA, 23 bp, Artificial sequence
  SiRNA target sequence
aattttatatgatacatttgtaa

SEQ ID NO: 56538 - DNA, 23 bp, Artificial sequence
  SiRNA target sequence
attttatatgatacatttgtaaa

SEQ ID NO: 56539 - DNA, 23 bp, Artificial sequence
  SiRNA target sequence
ttttatatgatacatttgtaaaa

SEQ ID NO: 56540 - DNA, 23 bp, Artificial sequence
  SiRNA target sequence
tttatatgatacatttgtaaaat

SEQ ID NO: 56541 - DNA, 23 bp, Artificial sequence
  SiRNA target sequence
ttatatgatacatttgtaaaata

SEQ ID NO: 56542 - DNA, 23 bp, Artificial sequence
  SiRNA target sequence
tatatgatacatttgtaaaatat

SEQ ID NO: 56543 - DNA, 23 bp, Artificial sequence
  SiRNA target sequence
atatgatacatttgtaaaatatt

SEQ ID NO: 56544 - DNA, 23 bp, Artificial sequence
  SiRNA target sequence
tatgatacatttgtaaaatattg

SEQ ID NO: 56545 - DNA, 23 bp, Artificial sequence
  SiRNA target sequence
atgatacatttgtaaaatattgt

SEQ ID NO: 56546 - DNA, 23 bp, Artificial sequence
  SiRNA target sequence
tgatacatttgtaaaatattgtt

SEQ ID NO: 56547 - DNA, 23 bp, Artificial sequence
  SiRNA target sequence
gatacatttgtaaaatattgtta

SEQ ID NO: 56548 - DNA, 23 bp, Artificial sequence
  SiRNA target sequence
atacatttgtaaaatattgttac

SEQ ID NO: 56549 - DNA, 23 bp, Artificial sequence
  SiRNA target sequence
tacatttgtaaaatattgttaca

SEQ ID NO: 56550 - DNA, 23 bp, Artificial sequence
  SiRNA target sequence
acatttgtaaaatattgttacaa

SEQ ID NO: 56551 - DNA, 23 bp, Artificial sequence
  SiRNA target sequence
catttgtaaaatattgttacaat

SEQ ID NO: 56552 - DNA, 23 bp, Artificial sequence
  SiRNA target sequence
atttgtaaaatattgttacaata

SEQ ID NO: 56553 - DNA, 23 bp, Artificial sequence
  SiRNA target sequence
tttgtaaaatattgttacaatat

SEQ ID NO: 56554 - DNA, 23 bp, Artificial sequence
  SiRNA target sequence
ttgtaaaatattgttacaatatt

SEQ ID NO: 56555 - DNA, 23 bp, Artificial sequence
  SiRNA target sequence
tgtaaaatattgttacaatattt

SEQ ID NO: 56556 - DNA, 23 bp, Artificial sequence
  SiRNA target sequence
gtaaaatattgttacaatatttc

SEQ ID NO: 56557 - DNA, 23 bp, Artificial sequence
  SiRNA target sequence
taaaatattgttacaatatttcc

SEQ ID NO: 56558 - DNA, 23 bp, Artificial sequence
  SiRNA target sequence
aaaatattgttacaatatttcct

SEQ ID NO: 56559 - DNA, 23 bp, Artificial sequence
  SiRNA target sequence
aaatattgttacaatatttccta

SEQ ID NO: 56560 - DNA, 23 bp, Artificial sequence
  SiRNA target sequence
aatattgttacaatatttcctat

SEQ ID NO: 56561 - DNA, 23 bp, Artificial sequence
  SiRNA target sequence
atattgttacaatatttcctata

SEQ ID NO: 56562 - DNA, 23 bp, Artificial sequence
  SiRNA target sequence
tattgttacaatatttcctatat

SEQ ID NO: 56563 - DNA, 23 bp, Artificial sequence
  SiRNA target sequence
attgttacaatatttcctatata

SEQ ID NO: 56564 - DNA, 23 bp, Artificial sequence
  SiRNA target sequence
ttgttacaatatttcctatataa

SEQ ID NO: 56565 - DNA, 23 bp, Artificial sequence
  SiRNA target sequence
tgttacaatatttcctatataag

SEQ ID NO: 56566 - DNA, 23 bp, Artificial sequence
  SiRNA target sequence
gttacaatatttcctatataagg

SEQ ID NO: 56567 - DNA, 23 bp, Artificial sequence
  SiRNA target sequence
ttacaatatttcctatataaggt

SEQ ID NO: 56568 - DNA, 23 bp, Artificial sequence
  SiRNA target sequence
tacaatatttcctatataaggta

SEQ ID NO: 56569 - DNA, 23 bp, Artificial sequence
  SiRNA target sequence
acaatatttcctatataaggtac

SEQ ID NO: 56570 - DNA, 23 bp, Artificial sequence
  SiRNA target sequence
caatatttcctatataaggtacg

SEQ ID NO: 56571 - DNA, 23 bp, Artificial sequence
  SiRNA target sequence
aatatttcctatataaggtacgt

SEQ ID NO: 56572 - DNA, 23 bp, Artificial sequence
  SiRNA target sequence
atatttcctatataaggtacgta

SEQ ID NO: 56573 - DNA, 23 bp, Artificial sequence
  SiRNA target sequence
tatttcctatataaggtacgtaa

SEQ ID NO: 56574 - DNA, 23 bp, Artificial sequence
  SiRNA target sequence
atttcctatataaggtacgtaat

SEQ ID NO: 56575 - DNA, 23 bp, Artificial sequence
  SiRNA target sequence
tttcctatataaggtacgtaatg

SEQ ID NO: 56576 - DNA, 23 bp, Artificial sequence
  SiRNA target sequence
ttcctatataaggtacgtaatgt

SEQ ID NO: 56577 - DNA, 23 bp, Artificial sequence
  SiRNA target sequence
tcctatataaggtacgtaatgtt

SEQ ID NO: 56578 - DNA, 23 bp, Artificial sequence
  SiRNA target sequence
cctatataaggtacgtaatgttt

SEQ ID NO: 56579 - DNA, 23 bp, Artificial sequence
  SiRNA target sequence
ctatataaggtacgtaatgtttc

SEQ ID NO: 56580 - DNA, 23 bp, Artificial sequence
  SiRNA target sequence
tatataaggtacgtaatgtttcc

SEQ ID NO: 56581 - DNA, 23 bp, Artificial sequence
  SiRNA target sequence
atataaggtacgtaatgtttccc

SEQ ID NO: 56582 - DNA, 23 bp, Artificial sequence
  SiRNA target sequence
tataaggtacgtaatgtttccca

SEQ ID NO: 56583 - DNA, 23 bp, Artificial sequence
  SiRNA target sequence
ataaggtacgtaatgtttcccat

SEQ ID NO: 56584 - DNA, 23 bp, Artificial sequence
  SiRNA target sequence
taaggtacgtaatgtttcccata

SEQ ID NO: 56585 - DNA, 23 bp, Artificial sequence
  SiRNA target sequence
aaggtacgtaatgtttcccatat

SEQ ID NO: 56586 - DNA, 23 bp, Artificial sequence
  SiRNA target sequence
aggtacgtaatgtttcccatatt

SEQ ID NO: 56587 - DNA, 23 bp, Artificial sequence
  SiRNA target sequence
ggtacgtaatgtttcccatatta

SEQ ID NO: 56588 - DNA, 23 bp, Artificial sequence
  SiRNA target sequence
gtacgtaatgtttcccatattac

SEQ ID NO: 56589 - DNA, 23 bp, Artificial sequence
  SiRNA target sequence
tacgtaatgtttcccatattact

SEQ ID NO: 56590 - DNA, 23 bp, Artificial sequence
  SiRNA target sequence
acgtaatgtttcccatattactg

SEQ ID NO: 56591 - DNA, 23 bp, Artificial sequence
  SiRNA target sequence
cgtaatgtttcccatattactgt

SEQ ID NO: 56592 - DNA, 23 bp, Artificial sequence
  SiRNA target sequence
gtaatgtttcccatattactgtc

SEQ ID NO: 56593 - DNA, 23 bp, Artificial sequence
  SiRNA target sequence
taatgtttcccatattactgtct

SEQ ID NO: 56594 - DNA, 23 bp, Artificial sequence
  SiRNA target sequence
aatgtttcccatattactgtcta

SEQ ID NO: 56595 - DNA, 23 bp, Artificial sequence
  SiRNA target sequence
atgtttcccatattactgtctac

SEQ ID NO: 56596 - DNA, 23 bp, Artificial sequence
  SiRNA target sequence
tgtttcccatattactgtctaca

SEQ ID NO: 56597 - DNA, 23 bp, Artificial sequence
  SiRNA target sequence
gtttcccatattactgtctacaa

SEQ ID NO: 56598 - DNA, 23 bp, Artificial sequence
  SiRNA target sequence
tttcccatattactgtctacaat

SEQ ID NO: 56599 - DNA, 23 bp, Artificial sequence
  SiRNA target sequence
ttcccatattactgtctacaatt

SEQ ID NO: 56600 - DNA, 23 bp, Artificial sequence
  SiRNA target sequence
tcccatattactgtctacaatta

SEQ ID NO: 56601 - DNA, 23 bp, Artificial sequence
  SiRNA target sequence
cccatattactgtctacaattat

SEQ ID NO: 56602 - DNA, 23 bp, Artificial sequence
  SiRNA target sequence
ccatattactgtctacaattata

SEQ ID NO: 56603 - DNA, 23 bp, Artificial sequence
  SiRNA target sequence
catattactgtctacaattatag

SEQ ID NO: 56604 - DNA, 23 bp, Artificial sequence
  SiRNA target sequence
atattactgtctacaattatagc

SEQ ID NO: 56605 - DNA, 23 bp, Artificial sequence
  SiRNA target sequence
tattactgtctacaattatagct

SEQ ID NO: 56606 - DNA, 23 bp, Artificial sequence
  SiRNA target sequence
attactgtctacaattatagctt

SEQ ID NO: 56607 - DNA, 23 bp, Artificial sequence
  SiRNA target sequence
ttactgtctacaattatagcttg

SEQ ID NO: 56608 - DNA, 23 bp, Artificial sequence
  SiRNA target sequence
tactgtctacaattatagcttgt

SEQ ID NO: 56609 - DNA, 23 bp, Artificial sequence
  SiRNA target sequence
actgtctacaattatagcttgtt

SEQ ID NO: 56610 - DNA, 23 bp, Artificial sequence
  SiRNA target sequence
ctgtctacaattatagcttgtta

SEQ ID NO: 56611 - DNA, 23 bp, Artificial sequence
  SiRNA target sequence
tgtctacaattatagcttgttat

SEQ ID NO: 56612 - DNA, 23 bp, Artificial sequence
  SiRNA target sequence
gtctacaattatagcttgttatc

SEQ ID NO: 56613 - DNA, 23 bp, Artificial sequence
  SiRNA target sequence
tctacaattatagcttgttatct

SEQ ID NO: 56614 - DNA, 23 bp, Artificial sequence
  SiRNA target sequence
ctacaattatagcttgttatctc

SEQ ID NO: 56615 - DNA, 23 bp, Artificial sequence
  SiRNA target sequence
tacaattatagcttgttatctcg

SEQ ID NO: 56616 - DNA, 23 bp, Artificial sequence
  SiRNA target sequence
acaattatagcttgttatctcga

SEQ ID NO: 56617 - DNA, 23 bp, Artificial sequence
  SiRNA target sequence
caattatagcttgttatctcgaa

SEQ ID NO: 56618 - DNA, 23 bp, Artificial sequence
  SiRNA target sequence
aattatagcttgttatctcgaag

SEQ ID NO: 56619 - DNA, 23 bp, Artificial sequence
  SiRNA target sequence
attatagcttgttatctcgaagt

SEQ ID NO: 56620 - DNA, 23 bp, Artificial sequence
  SiRNA target sequence
ttatagcttgttatctcgaagtt

SEQ ID NO: 56621 - DNA, 23 bp, Artificial sequence
  SiRNA target sequence
tatagcttgttatctcgaagttc

SEQ ID NO: 56622 - DNA, 23 bp, Artificial sequence
  SiRNA target sequence
atagcttgttatctcgaagttca

SEQ ID NO: 56623 - DNA, 23 bp, Artificial sequence
  SiRNA target sequence
tagcttgttatctcgaagttcag

SEQ ID NO: 56624 - DNA, 23 bp, Artificial sequence
  SiRNA target sequence
agcttgttatctcgaagttcagg

SEQ ID NO: 56625 - DNA, 23 bp, Artificial sequence
  SiRNA target sequence
gcttgttatctcgaagttcaggc

SEQ ID NO: 56626 - DNA, 23 bp, Artificial sequence
  SiRNA target sequence
cttgttatctcgaagttcaggca

SEQ ID NO: 56627 - DNA, 23 bp, Artificial sequence
  SiRNA target sequence
ttgttatctcgaagttcaggcaa

SEQ ID NO: 56628 - DNA, 23 bp, Artificial sequence
  SiRNA target sequence
tgttatctcgaagttcaggcaag

SEQ ID NO: 56629 - DNA, 23 bp, Artificial sequence
  SiRNA target sequence
gttatctcgaagttcaggcaagt

SEQ ID NO: 56630 - DNA, 23 bp, Artificial sequence
  SiRNA target sequence
ttatctcgaagttcaggcaagta

SEQ ID NO: 56631 - DNA, 23 bp, Artificial sequence
  SiRNA target sequence
tatctcgaagttcaggcaagtaa

SEQ ID NO: 56632 - DNA, 23 bp, Artificial sequence
  SiRNA target sequence
atctcgaagttcaggcaagtaac

SEQ ID NO: 56633 - DNA, 23 bp, Artificial sequence
  SiRNA target sequence
tctcgaagttcaggcaagtaaca

SEQ ID NO: 56634 - DNA, 23 bp, Artificial sequence
  SiRNA target sequence
ctcgaagttcaggcaagtaacat

SEQ ID NO: 56635 - DNA, 23 bp, Artificial sequence
  SiRNA target sequence
tcgaagttcaggcaagtaacata

SEQ ID NO: 56636 - DNA, 23 bp, Artificial sequence
  SiRNA target sequence
cgaagttcaggcaagtaacatat

SEQ ID NO: 56637 - DNA, 23 bp, Artificial sequence
  SiRNA target sequence
gaagttcaggcaagtaacatatc

SEQ ID NO: 56638 - DNA, 23 bp, Artificial sequence
  SiRNA target sequence
aagttcaggcaagtaacatatca

SEQ ID NO: 56639 - DNA, 23 bp, Artificial sequence
  SiRNA target sequence
agttcaggcaagtaacatatcaa

SEQ ID NO: 56640 - DNA, 23 bp, Artificial sequence
  SiRNA target sequence
gttcaggcaagtaacatatcaaa

SEQ ID NO: 56641 - DNA, 23 bp, Artificial sequence
  SiRNA target sequence
ttcaggcaagtaacatatcaaaa

SEQ ID NO: 56642 - DNA, 23 bp, Artificial sequence
  SiRNA target sequence
tcaggcaagtaacatatcaaaaa

SEQ ID NO: 56643 - DNA, 23 bp, Artificial sequence
  SiRNA target sequence
caggcaagtaacatatcaaaaag

SEQ ID NO: 56644 - DNA, 23 bp, Artificial sequence
  SiRNA target sequence
aggcaagtaacatatcaaaaaga

SEQ ID NO: 56645 - DNA, 23 bp, Artificial sequence
  SiRNA target sequence
ggcaagtaacatatcaaaaagaa

SEQ ID NO: 56646 - DNA, 23 bp, Artificial sequence
  SiRNA target sequence
gcaagtaacatatcaaaaagaat

SEQ ID NO: 56647 - DNA, 23 bp, Artificial sequence
  SiRNA target sequence
caagtaacatatcaaaaagaatt

SEQ ID NO: 56648 - DNA, 23 bp, Artificial sequence
  SiRNA target sequence
aagtaacatatcaaaaagaattg

SEQ ID NO: 56649 - DNA, 23 bp, Artificial sequence
  SiRNA target sequence
agtaacatatcaaaaagaattgc

SEQ ID NO: 56650 - DNA, 23 bp, Artificial sequence
  SiRNA target sequence
gtaacatatcaaaaagaattgca

SEQ ID NO: 56651 - DNA, 23 bp, Artificial sequence
  SiRNA target sequence
taacatatcaaaaagaattgcag

SEQ ID NO: 56652 - DNA, 23 bp, Artificial sequence
  SiRNA target sequence
aacatatcaaaaagaattgcaga

SEQ ID NO: 56653 - DNA, 23 bp, Artificial sequence
  SiRNA target sequence
acatatcaaaaagaattgcagaa

SEQ ID NO: 56654 - DNA, 23 bp, Artificial sequence
  SiRNA target sequence
catatcaaaaagaattgcagaag

SEQ ID NO: 56655 - DNA, 23 bp, Artificial sequence
  SiRNA target sequence
atatcaaaaagaattgcagaaga

SEQ ID NO: 56656 - DNA, 23 bp, Artificial sequence
  SiRNA target sequence
tatcaaaaagaattgcagaagat

SEQ ID NO: 56657 - DNA, 23 bp, Artificial sequence
  SiRNA target sequence
atcaaaaagaattgcagaagatt

SEQ ID NO: 56658 - DNA, 23 bp, Artificial sequence
  SiRNA target sequence
tcaaaaagaattgcagaagattt

SEQ ID NO: 56659 - DNA, 23 bp, Artificial sequence
  SiRNA target sequence
caaaaagaattgcagaagatttt

SEQ ID NO: 56660 - DNA, 23 bp, Artificial sequence
  SiRNA target sequence
aaaaagaattgcagaagattttg

SEQ ID NO: 56661 - DNA, 23 bp, Artificial sequence
  SiRNA target sequence
aaaagaattgcagaagattttga

SEQ ID NO: 56662 - DNA, 23 bp, Artificial sequence
  SiRNA target sequence
aaagaattgcagaagattttgaa

SEQ ID NO: 56663 - DNA, 23 bp, Artificial sequence
  SiRNA target sequence
aagaattgcagaagattttgaaa

SEQ ID NO: 56664 - DNA, 23 bp, Artificial sequence
  SiRNA target sequence
agaattgcagaagattttgaaaa

SEQ ID NO: 56665 - DNA, 23 bp, Artificial sequence
  SiRNA target sequence
gaattgcagaagattttgaaaat

SEQ ID NO: 56666 - DNA, 23 bp, Artificial sequence
  SiRNA target sequence
aattgcagaagattttgaaaata

SEQ ID NO: 56667 - DNA, 23 bp, Artificial sequence
  SiRNA target sequence
attgcagaagattttgaaaataa

SEQ ID NO: 56668 - DNA, 23 bp, Artificial sequence
  SiRNA target sequence
ttgcagaagattttgaaaataaa

SEQ ID NO: 56669 - DNA, 23 bp, Artificial sequence
  SiRNA target sequence
tgcagaagattttgaaaataaaa

SEQ ID NO: 56670 - DNA, 23 bp, Artificial sequence
  SiRNA target sequence
gcagaagattttgaaaataaaat

SEQ ID NO: 56671 - DNA, 23 bp, Artificial sequence
  SiRNA target sequence
cagaagattttgaaaataaaata

SEQ ID NO: 56672 - DNA, 23 bp, Artificial sequence
  SiRNA target sequence
agaagattttgaaaataaaataa

SEQ ID NO: 56673 - DNA, 23 bp, Artificial sequence
  SiRNA target sequence
gaagattttgaaaataaaataaa

SEQ ID NO: 56674 - DNA, 23 bp, Artificial sequence
  SiRNA target sequence
aagattttgaaaataaaataaat

SEQ ID NO: 56675 - DNA, 23 bp, Artificial sequence
  SiRNA target sequence
agattttgaaaataaaataaatg

SEQ ID NO: 56676 - DNA, 23 bp, Artificial sequence
  SiRNA target sequence
gattttgaaaataaaataaatgc

SEQ ID NO: 56677 - DNA, 23 bp, Artificial sequence
  SiRNA target sequence
attttgaaaataaaataaatgca

SEQ ID NO: 56678 - DNA, 23 bp, Artificial sequence
  SiRNA target sequence
ttttgaaaataaaataaatgcag

SEQ ID NO: 56679 - DNA, 23 bp, Artificial sequence
  SiRNA target sequence
tttgaaaataaaataaatgcagg

SEQ ID NO: 56680 - DNA, 23 bp, Artificial sequence
  SiRNA target sequence
ttgaaaataaaataaatgcagga

SEQ ID NO: 56681 - DNA, 23 bp, Artificial sequence
  SiRNA target sequence
tgaaaataaaataaatgcaggaa

SEQ ID NO: 56682 - DNA, 23 bp, Artificial sequence
  SiRNA target sequence
gaaaataaaataaatgcaggaaa

SEQ ID NO: 56683 - DNA, 23 bp, Artificial sequence
  SiRNA target sequence
aaaataaaataaatgcaggaaaa

SEQ ID NO: 56684 - DNA, 23 bp, Artificial sequence
  SiRNA target sequence
aaataaaataaatgcaggaaaaa

SEQ ID NO: 56685 - DNA, 23 bp, Artificial sequence
  SiRNA target sequence
aataaaataaatgcaggaaaaag

SEQ ID NO: 56686 - DNA, 23 bp, Artificial sequence
  SiRNA target sequence
ataaaataaatgcaggaaaaagt

SEQ ID NO: 56687 - DNA, 23 bp, Artificial sequence
  SiRNA target sequence
taaaataaatgcaggaaaaagta

SEQ ID NO: 56688 - DNA, 23 bp, Artificial sequence
  SiRNA target sequence
aaaataaatgcaggaaaaagtat

SEQ ID NO: 56689 - DNA, 23 bp, Artificial sequence
  SiRNA target sequence
aaataaatgcaggaaaaagtata

SEQ ID NO: 56690 - DNA, 23 bp, Artificial sequence
  SiRNA target sequence
aataaatgcaggaaaaagtatat

SEQ ID NO: 56691 - DNA, 23 bp, Artificial sequence
  SiRNA target sequence
ataaatgcaggaaaaagtatatt

SEQ ID NO: 56692 - DNA, 23 bp, Artificial sequence
  SiRNA target sequence
taaatgcaggaaaaagtatattt

SEQ ID NO: 56693 - DNA, 23 bp, Artificial sequence
  SiRNA target sequence
aaatgcaggaaaaagtatattta

SEQ ID NO: 56694 - DNA, 23 bp, Artificial sequence
  SiRNA target sequence
aatgcaggaaaaagtatatttaa

SEQ ID NO: 56695 - DNA, 23 bp, Artificial sequence
  SiRNA target sequence
atgcaggaaaaagtatatttaaa

SEQ ID NO: 56696 - DNA, 23 bp, Artificial sequence
  SiRNA target sequence
tgcaggaaaaagtatatttaaat

SEQ ID NO: 56697 - DNA, 23 bp, Artificial sequence
  SiRNA target sequence
gcaggaaaaagtatatttaaata

SEQ ID NO: 56698 - DNA, 23 bp, Artificial sequence
  SiRNA target sequence
caggaaaaagtatatttaaatat

SEQ ID NO: 56699 - DNA, 23 bp, Artificial sequence
  SiRNA target sequence
aggaaaaagtatatttaaatata

SEQ ID NO: 56700 - DNA, 23 bp, Artificial sequence
  SiRNA target sequence
ggaaaaagtatatttaaatatat

SEQ ID NO: 56701 - DNA, 23 bp, Artificial sequence
  SiRNA target sequence
gaaaaagtatatttaaatatatt

SEQ ID NO: 56702 - DNA, 23 bp, Artificial sequence
  SiRNA target sequence
aaaaagtatatttaaatatattt

SEQ ID NO: 56703 - DNA, 23 bp, Artificial sequence
  SiRNA target sequence
aaaagtatatttaaatatatttt

SEQ ID NO: 56704 - DNA, 23 bp, Artificial sequence
  SiRNA target sequence
aaagtatatttaaatatatttta

SEQ ID NO: 56705 - DNA, 23 bp, Artificial sequence
  SiRNA target sequence
aagtatatttaaatatattttat

SEQ ID NO: 56706 - DNA, 23 bp, Artificial sequence
  SiRNA target sequence
agtatatttaaatatattttatt

SEQ ID NO: 56707 - DNA, 23 bp, Artificial sequence
  SiRNA target sequence
gtatatttaaatatattttattt

SEQ ID NO: 56708 - DNA, 23 bp, Artificial sequence
  SiRNA target sequence
tatatttaaatatattttatttt

SEQ ID NO: 56709 - DNA, 23 bp, Artificial sequence
  SiRNA target sequence
atatttaaatatattttattttt

SEQ ID NO: 56710 - DNA, 23 bp, Artificial sequence
  SiRNA target sequence
tatttaaatatattttattttta

SEQ ID NO: 56711 - DNA, 23 bp, Artificial sequence
  SiRNA target sequence
atttaaatatattttatttttaa

SEQ ID NO: 56712 - DNA, 23 bp, Artificial sequence
  SiRNA target sequence
tttaaatatattttatttttaac

SEQ ID NO: 56713 - DNA, 23 bp, Artificial sequence
  SiRNA target sequence
ttaaatatattttatttttaact

SEQ ID NO: 56714 - DNA, 23 bp, Artificial sequence
  SiRNA target sequence
taaatatattttatttttaactt

SEQ ID NO: 56715 - DNA, 23 bp, Artificial sequence
  SiRNA target sequence
aaatatattttatttttaacttc

SEQ ID NO: 56716 - DNA, 23 bp, Artificial sequence
  SiRNA target sequence
aatatattttatttttaacttca

SEQ ID NO: 56717 - DNA, 23 bp, Artificial sequence
  SiRNA target sequence
atatattttatttttaacttcat

SEQ ID NO: 56718 - DNA, 23 bp, Artificial sequence
  SiRNA target sequence
tatattttatttttaacttcatc

SEQ ID NO: 56719 - DNA, 23 bp, Artificial sequence
  SiRNA target sequence
atattttatttttaacttcatca

SEQ ID NO: 56720 - DNA, 23 bp, Artificial sequence
  SiRNA target sequence
tattttatttttaacttcatcaa

SEQ ID NO: 56721 - DNA, 23 bp, Artificial sequence
  SiRNA target sequence
attttatttttaacttcatcaat

SEQ ID NO: 56722 - DNA, 23 bp, Artificial sequence
  SiRNA target sequence
ttttatttttaacttcatcaata

SEQ ID NO: 56723 - DNA, 23 bp, Artificial sequence
  SiRNA target sequence
tttatttttaacttcatcaatag

SEQ ID NO: 56724 - DNA, 23 bp, Artificial sequence
  SiRNA target sequence
ttatttttaacttcatcaatagt

SEQ ID NO: 56725 - DNA, 23 bp, Artificial sequence
  SiRNA target sequence
tatttttaacttcatcaatagta

SEQ ID NO: 56726 - DNA, 23 bp, Artificial sequence
  SiRNA target sequence
atttttaacttcatcaatagtat

SEQ ID NO: 56727 - DNA, 23 bp, Artificial sequence
  SiRNA target sequence
tttttaacttcatcaatagtatt

SEQ ID NO: 56728 - DNA, 23 bp, Artificial sequence
  SiRNA target sequence
ttttaacttcatcaatagtatta

SEQ ID NO: 56729 - DNA, 23 bp, Artificial sequence
  SiRNA target sequence
tttaacttcatcaatagtattaa

SEQ ID NO: 56730 - DNA, 23 bp, Artificial sequence
  SiRNA target sequence
ttaacttcatcaatagtattaag

SEQ ID NO: 56731 - DNA, 23 bp, Artificial sequence
  SiRNA target sequence
taacttcatcaatagtattaaga

SEQ ID NO: 56732 - DNA, 23 bp, Artificial sequence
  SiRNA target sequence
aacttcatcaatagtattaagac

SEQ ID NO: 56733 - DNA, 23 bp, Artificial sequence
  SiRNA target sequence
acttcatcaatagtattaagaca

SEQ ID NO: 56734 - DNA, 23 bp, Artificial sequence
  SiRNA target sequence
cttcatcaatagtattaagacaa

SEQ ID NO: 56735 - DNA, 23 bp, Artificial sequence
  SiRNA target sequence
ttcatcaatagtattaagacaaa

SEQ ID NO: 56736 - DNA, 23 bp, Artificial sequence
  SiRNA target sequence
tcatcaatagtattaagacaaat

SEQ ID NO: 56737 - DNA, 23 bp, Artificial sequence
  SiRNA target sequence
catcaatagtattaagacaaatt

SEQ ID NO: 56738 - DNA, 23 bp, Artificial sequence
  SiRNA target sequence
atcaatagtattaagacaaatta

SEQ ID NO: 56739 - DNA, 23 bp, Artificial sequence
  SiRNA target sequence
tcaatagtattaagacaaattaa

SEQ ID NO: 56740 - DNA, 23 bp, Artificial sequence
  SiRNA target sequence
caatagtattaagacaaattaat

SEQ ID NO: 56741 - DNA, 23 bp, Artificial sequence
  SiRNA target sequence
aatagtattaagacaaattaatg

SEQ ID NO: 56742 - DNA, 23 bp, Artificial sequence
  SiRNA target sequence
atagtattaagacaaattaatga

SEQ ID NO: 56743 - DNA, 23 bp, Artificial sequence
  SiRNA target sequence
tagtattaagacaaattaatgat

SEQ ID NO: 56744 - DNA, 23 bp, Artificial sequence
  SiRNA target sequence
agtattaagacaaattaatgata

SEQ ID NO: 56745 - DNA, 23 bp, Artificial sequence
  SiRNA target sequence
gtattaagacaaattaatgatat

SEQ ID NO: 56746 - DNA, 23 bp, Artificial sequence
  SiRNA target sequence
tattaagacaaattaatgatatt

SEQ ID NO: 56747 - DNA, 23 bp, Artificial sequence
  SiRNA target sequence
attaagacaaattaatgatattg

SEQ ID NO: 56748 - DNA, 23 bp, Artificial sequence
  SiRNA target sequence
ttaagacaaattaatgatattgt

SEQ ID NO: 56749 - DNA, 23 bp, Artificial sequence
  SiRNA target sequence
taagacaaattaatgatattgtg

SEQ ID NO: 56750 - DNA, 23 bp, Artificial sequence
  SiRNA target sequence
aagacaaattaatgatattgtgt

SEQ ID NO: 56751 - DNA, 23 bp, Artificial sequence
  SiRNA target sequence
agacaaattaatgatattgtgtt

SEQ ID NO: 56752 - DNA, 23 bp, Artificial sequence
  SiRNA target sequence
gacaaattaatgatattgtgttt

SEQ ID NO: 56753 - DNA, 23 bp, Artificial sequence
  SiRNA target sequence
acaaattaatgatattgtgttta

SEQ ID NO: 56754 - DNA, 23 bp, Artificial sequence
  SiRNA target sequence
caaattaatgatattgtgtttag

SEQ ID NO: 56755 - DNA, 23 bp, Artificial sequence
  SiRNA target sequence
aaattaatgatattgtgtttagc

SEQ ID NO: 56756 - DNA, 23 bp, Artificial sequence
  SiRNA target sequence
aattaatgatattgtgtttagcg

SEQ ID NO: 56757 - DNA, 23 bp, Artificial sequence
  SiRNA target sequence
attaatgatattgtgtttagcgg

SEQ ID NO: 56758 - DNA, 23 bp, Artificial sequence
  SiRNA target sequence
ttaatgatattgtgtttagcggg

SEQ ID NO: 56759 - DNA, 23 bp, Artificial sequence
  SiRNA target sequence
taatgatattgtgtttagcgggc

SEQ ID NO: 56760 - DNA, 23 bp, Artificial sequence
  SiRNA target sequence
aatgatattgtgtttagcgggcc

SEQ ID NO: 56761 - DNA, 23 bp, Artificial sequence
  SiRNA target sequence
atgatattgtgtttagcgggcca

SEQ ID NO: 56762 - DNA, 23 bp, Artificial sequence
  SiRNA target sequence
tgatattgtgtttagcgggccaa

SEQ ID NO: 56763 - DNA, 23 bp, Artificial sequence
  SiRNA target sequence
gatattgtgtttagcgggccaat

SEQ ID NO: 56764 - DNA, 23 bp, Artificial sequence
  SiRNA target sequence
atattgtgtttagcgggccaata

SEQ ID NO: 56765 - DNA, 23 bp, Artificial sequence
  SiRNA target sequence
tattgtgtttagcgggccaatac

SEQ ID NO: 56766 - DNA, 23 bp, Artificial sequence
  SiRNA target sequence
attgtgtttagcgggccaataca

SEQ ID NO: 56767 - DNA, 23 bp, Artificial sequence
  SiRNA target sequence
ttgtgtttagcgggccaatacaa

SEQ ID NO: 56768 - DNA, 23 bp, Artificial sequence
  SiRNA target sequence
tgtgtttagcgggccaatacaat

SEQ ID NO: 56769 - DNA, 23 bp, Artificial sequence
  SiRNA target sequence
gtgtttagcgggccaatacaatt

SEQ ID NO: 56770 - DNA, 23 bp, Artificial sequence
  SiRNA target sequence
tgtttagcgggccaatacaattt

SEQ ID NO: 56771 - DNA, 23 bp, Artificial sequence
  SiRNA target sequence
gtttagcgggccaatacaatttt

SEQ ID NO: 56772 - DNA, 23 bp, Artificial sequence
  SiRNA target sequence
tttagcgggccaatacaattttt

SEQ ID NO: 56773 - DNA, 23 bp, Artificial sequence
  SiRNA target sequence
ttagcgggccaatacaattttta

SEQ ID NO: 56774 - DNA, 23 bp, Artificial sequence
  SiRNA target sequence
tagcgggccaatacaatttttat

SEQ ID NO: 56775 - DNA, 23 bp, Artificial sequence
  SiRNA target sequence
agcgggccaatacaatttttata

SEQ ID NO: 56776 - DNA, 23 bp, Artificial sequence
  SiRNA target sequence
gcgggccaatacaatttttatat

SEQ ID NO: 56777 - DNA, 23 bp, Artificial sequence
  SiRNA target sequence
cgggccaatacaatttttatata

SEQ ID NO: 56778 - DNA, 23 bp, Artificial sequence
  SiRNA target sequence
gggccaatacaatttttatataa

SEQ ID NO: 56779 - DNA, 23 bp, Artificial sequence
  SiRNA target sequence
ggccaatacaatttttatataaa

SEQ ID NO: 56780 - DNA, 23 bp, Artificial sequence
  SiRNA target sequence
gccaatacaatttttatataaaa

SEQ ID NO: 56781 - DNA, 23 bp, Artificial sequence
  SiRNA target sequence
ccaatacaatttttatataaaat

SEQ ID NO: 56782 - DNA, 23 bp, Artificial sequence
  SiRNA target sequence
caatacaatttttatataaaatt

SEQ ID NO: 56783 - DNA, 23 bp, Artificial sequence
  SiRNA target sequence
aatacaatttttatataaaattg

SEQ ID NO: 56784 - DNA, 23 bp, Artificial sequence
  SiRNA target sequence
atacaatttttatataaaattgt

SEQ ID NO: 56785 - DNA, 23 bp, Artificial sequence
  SiRNA target sequence
tacaatttttatataaaattgtt

SEQ ID NO: 56786 - DNA, 23 bp, Artificial sequence
  SiRNA target sequence
acaatttttatataaaattgttg

SEQ ID NO: 56787 - DNA, 23 bp, Artificial sequence
  SiRNA target sequence
caatttttatataaaattgttgg

SEQ ID NO: 56788 - DNA, 23 bp, Artificial sequence
  SiRNA target sequence
aatttttatataaaattgttgga

SEQ ID NO: 56789 - DNA, 23 bp, Artificial sequence
  SiRNA target sequence
atttttatataaaattgttggag

SEQ ID NO: 56790 - DNA, 23 bp, Artificial sequence
  SiRNA target sequence
tttttatataaaattgttggagt

SEQ ID NO: 56791 - DNA, 23 bp, Artificial sequence
  SiRNA target sequence
ttttatataaaattgttggagtt

SEQ ID NO: 56792 - DNA, 23 bp, Artificial sequence
  SiRNA target sequence
tttatataaaattgttggagttg

SEQ ID NO: 56793 - DNA, 23 bp, Artificial sequence
  SiRNA target sequence
ttatataaaattgttggagttga

SEQ ID NO: 56794 - DNA, 23 bp, Artificial sequence
  SiRNA target sequence
tatataaaattgttggagttgaa

SEQ ID NO: 56795 - DNA, 23 bp, Artificial sequence
  SiRNA target sequence
atataaaattgttggagttgaag

SEQ ID NO: 56796 - DNA, 23 bp, Artificial sequence
  SiRNA target sequence
tataaaattgttggagttgaagc

SEQ ID NO: 56797 - DNA, 23 bp, Artificial sequence
  SiRNA target sequence
ataaaattgttggagttgaagca

SEQ ID NO: 56798 - DNA, 23 bp, Artificial sequence
  SiRNA target sequence
taaaattgttggagttgaagcat

SEQ ID NO: 56799 - DNA, 23 bp, Artificial sequence
  SiRNA target sequence
aaaattgttggagttgaagcatt

SEQ ID NO: 56800 - DNA, 23 bp, Artificial sequence
  SiRNA target sequence
aaattgttggagttgaagcattt

SEQ ID NO: 56801 - DNA, 23 bp, Artificial sequence
  SiRNA target sequence
aattgttggagttgaagcatttt

SEQ ID NO: 56802 - DNA, 23 bp, Artificial sequence
  SiRNA target sequence
attgttggagttgaagcatttta

SEQ ID NO: 56803 - DNA, 23 bp, Artificial sequence
  SiRNA target sequence
ttgttggagttgaagcattttat

SEQ ID NO: 56804 - DNA, 23 bp, Artificial sequence
  SiRNA target sequence
tgttggagttgaagcattttatc

SEQ ID NO: 56805 - DNA, 23 bp, Artificial sequence
  SiRNA target sequence
gttggagttgaagcattttatca

SEQ ID NO: 56806 - DNA, 23 bp, Artificial sequence
  SiRNA target sequence
ttggagttgaagcattttatcat

SEQ ID NO: 56807 - DNA, 23 bp, Artificial sequence
  SiRNA target sequence
tggagttgaagcattttatcatt

SEQ ID NO: 56808 - DNA, 23 bp, Artificial sequence
  SiRNA target sequence
ggagttgaagcattttatcatta

SEQ ID NO: 56809 - DNA, 23 bp, Artificial sequence
  SiRNA target sequence
gagttgaagcattttatcattac

SEQ ID NO: 56810 - DNA, 23 bp, Artificial sequence
  SiRNA target sequence
agttgaagcattttatcattaca

SEQ ID NO: 56811 - DNA, 23 bp, Artificial sequence
  SiRNA target sequence
gttgaagcattttatcattacat

SEQ ID NO: 56812 - DNA, 23 bp, Artificial sequence
  SiRNA target sequence
ttgaagcattttatcattacatt

SEQ ID NO: 56813 - DNA, 23 bp, Artificial sequence
  SiRNA target sequence
tgaagcattttatcattacattt

SEQ ID NO: 56814 - DNA, 23 bp, Artificial sequence
  SiRNA target sequence
gaagcattttatcattacatttc

SEQ ID NO: 56815 - DNA, 23 bp, Artificial sequence
  SiRNA target sequence
aagcattttatcattacatttca

SEQ ID NO: 56816 - DNA, 23 bp, Artificial sequence
  SiRNA target sequence
agcattttatcattacatttcat

SEQ ID NO: 56817 - DNA, 23 bp, Artificial sequence
  SiRNA target sequence
gcattttatcattacatttcatt

SEQ ID NO: 56818 - DNA, 23 bp, Artificial sequence
  SiRNA target sequence
cattttatcattacatttcatta

SEQ ID NO: 56819 - DNA, 23 bp, Artificial sequence
  SiRNA target sequence
attttatcattacatttcattaa

SEQ ID NO: 56820 - DNA, 23 bp, Artificial sequence
  SiRNA target sequence
ttttatcattacatttcattaaa

SEQ ID NO: 56821 - DNA, 23 bp, Artificial sequence
  SiRNA target sequence
tttatcattacatttcattaaac

SEQ ID NO: 56822 - DNA, 23 bp, Artificial sequence
  SiRNA target sequence
ttatcattacatttcattaaact

SEQ ID NO: 56823 - DNA, 23 bp, Artificial sequence
  SiRNA target sequence
tatcattacatttcattaaactt

SEQ ID NO: 56824 - DNA, 23 bp, Artificial sequence
  SiRNA target sequence
atcattacatttcattaaactta

SEQ ID NO: 56825 - DNA, 23 bp, Artificial sequence
  SiRNA target sequence
tcattacatttcattaaacttag

SEQ ID NO: 56826 - DNA, 23 bp, Artificial sequence
  SiRNA target sequence
cattacatttcattaaacttaga

SEQ ID NO: 56827 - DNA, 23 bp, Artificial sequence
  SiRNA target sequence
attacatttcattaaacttagaa

SEQ ID NO: 56828 - DNA, 23 bp, Artificial sequence
  SiRNA target sequence
ttacatttcattaaacttagaaa

SEQ ID NO: 56829 - DNA, 23 bp, Artificial sequence
  SiRNA target sequence
tacatttcattaaacttagaaaa

SEQ ID NO: 56830 - DNA, 23 bp, Artificial sequence
  SiRNA target sequence
acatttcattaaacttagaaaat

SEQ ID NO: 56831 - DNA, 23 bp, Artificial sequence
  SiRNA target sequence
catttcattaaacttagaaaatt

SEQ ID NO: 56832 - DNA, 23 bp, Artificial sequence
  SiRNA target sequence
atttcattaaacttagaaaattt

SEQ ID NO: 56833 - DNA, 23 bp, Artificial sequence
  SiRNA target sequence
tttcattaaacttagaaaatttt

SEQ ID NO: 56834 - DNA, 23 bp, Artificial sequence
  SiRNA target sequence
ttcattaaacttagaaaatttta

SEQ ID NO: 56835 - DNA, 23 bp, Artificial sequence
  SiRNA target sequence
tcattaaacttagaaaattttaa

SEQ ID NO: 56836 - DNA, 23 bp, Artificial sequence
  SiRNA target sequence
cattaaacttagaaaattttaac

SEQ ID NO: 56837 - DNA, 23 bp, Artificial sequence
  SiRNA target sequence
attaaacttagaaaattttaaca

SEQ ID NO: 56838 - DNA, 23 bp, Artificial sequence
  SiRNA target sequence
ttaaacttagaaaattttaacaa

SEQ ID NO: 56839 - DNA, 23 bp, Artificial sequence
  SiRNA target sequence
taaacttagaaaattttaacaaa

SEQ ID NO: 56840 - DNA, 23 bp, Artificial sequence
  SiRNA target sequence
aaacttagaaaattttaacaaaa

SEQ ID NO: 56841 - DNA, 23 bp, Artificial sequence
  SiRNA target sequence
aacttagaaaattttaacaaaat

SEQ ID NO: 56842 - DNA, 23 bp, Artificial sequence
  SiRNA target sequence
acttagaaaattttaacaaaata

SEQ ID NO: 56843 - DNA, 23 bp, Artificial sequence
  SiRNA target sequence
cttagaaaattttaacaaaatag

SEQ ID NO: 56844 - DNA, 23 bp, Artificial sequence
  SiRNA target sequence
ttagaaaattttaacaaaatagg

SEQ ID NO: 56845 - DNA, 23 bp, Artificial sequence
  SiRNA target sequence
tagaaaattttaacaaaatagga

SEQ ID NO: 56846 - DNA, 23 bp, Artificial sequence
  SiRNA target sequence
agaaaattttaacaaaataggaa

SEQ ID NO: 56847 - DNA, 23 bp, Artificial sequence
  SiRNA target sequence
gaaaattttaacaaaataggaag

SEQ ID NO: 56848 - DNA, 23 bp, Artificial sequence
  SiRNA target sequence
aaaattttaacaaaataggaagt

SEQ ID NO: 56849 - DNA, 23 bp, Artificial sequence
  SiRNA target sequence
aaattttaacaaaataggaagtg

SEQ ID NO: 56850 - DNA, 23 bp, Artificial sequence
  SiRNA target sequence
aattttaacaaaataggaagtgg

SEQ ID NO: 56851 - DNA, 23 bp, Artificial sequence
  SiRNA target sequence
attttaacaaaataggaagtgga

SEQ ID NO: 56852 - DNA, 23 bp, Artificial sequence
  SiRNA target sequence
ttttaacaaaataggaagtggag

SEQ ID NO: 56853 - DNA, 23 bp, Artificial sequence
  SiRNA target sequence
tttaacaaaataggaagtggaga

SEQ ID NO: 56854 - DNA, 23 bp, Artificial sequence
  SiRNA target sequence
ttaacaaaataggaagtggagag

SEQ ID NO: 56855 - DNA, 23 bp, Artificial sequence
  SiRNA target sequence
taacaaaataggaagtggagaga

SEQ ID NO: 56856 - DNA, 23 bp, Artificial sequence
  SiRNA target sequence
aacaaaataggaagtggagagat

SEQ ID NO: 56857 - DNA, 23 bp, Artificial sequence
  SiRNA target sequence
acaaaataggaagtggagagata

SEQ ID NO: 56858 - DNA, 23 bp, Artificial sequence
  SiRNA target sequence
caaaataggaagtggagagatac

SEQ ID NO: 56859 - DNA, 23 bp, Artificial sequence
  SiRNA target sequence
aaaataggaagtggagagataca

SEQ ID NO: 56860 - DNA, 23 bp, Artificial sequence
  SiRNA target sequence
aaataggaagtggagagatacaa

SEQ ID NO: 56861 - DNA, 23 bp, Artificial sequence
  SiRNA target sequence
aataggaagtggagagatacaaa

SEQ ID NO: 56862 - DNA, 23 bp, Artificial sequence
  SiRNA target sequence
ataggaagtggagagatacaaat

SEQ ID NO: 56863 - DNA, 23 bp, Artificial sequence
  SiRNA target sequence
taggaagtggagagatacaaatg

SEQ ID NO: 56864 - DNA, 23 bp, Artificial sequence
  SiRNA target sequence
aggaagtggagagatacaaatga

SEQ ID NO: 56865 - DNA, 23 bp, Artificial sequence
  SiRNA target sequence
ggaagtggagagatacaaatgat

SEQ ID NO: 56866 - DNA, 23 bp, Artificial sequence
  SiRNA target sequence
gaagtggagagatacaaatgatt

SEQ ID NO: 56867 - DNA, 23 bp, Artificial sequence
  SiRNA target sequence
aagtggagagatacaaatgatta

SEQ ID NO: 56868 - DNA, 23 bp, Artificial sequence
  SiRNA target sequence
agtggagagatacaaatgattat

SEQ ID NO: 56869 - DNA, 23 bp, Artificial sequence
  SiRNA target sequence
gtggagagatacaaatgattatt

SEQ ID NO: 56870 - DNA, 23 bp, Artificial sequence
  SiRNA target sequence
tggagagatacaaatgattattg

SEQ ID NO: 56871 - DNA, 23 bp, Artificial sequence
  SiRNA target sequence
ggagagatacaaatgattattga

SEQ ID NO: 56872 - DNA, 23 bp, Artificial sequence
  SiRNA target sequence
gagagatacaaatgattattgag

SEQ ID NO: 56873 - DNA, 23 bp, Artificial sequence
  SiRNA target sequence
agagatacaaatgattattgagc

SEQ ID NO: 56874 - DNA, 23 bp, Artificial sequence
  SiRNA target sequence
gagatacaaatgattattgagcg

SEQ ID NO: 56875 - DNA, 23 bp, Artificial sequence
  SiRNA target sequence
agatacaaatgattattgagcgg

SEQ ID NO: 56876 - DNA, 23 bp, Artificial sequence
  SiRNA target sequence
gatacaaatgattattgagcgga

SEQ ID NO: 56877 - DNA, 23 bp, Artificial sequence
  SiRNA target sequence
atacaaatgattattgagcggaa

SEQ ID NO: 56878 - DNA, 23 bp, Artificial sequence
  SiRNA target sequence
tacaaatgattattgagcggaaa

SEQ ID NO: 56879 - DNA, 23 bp, Artificial sequence
  SiRNA target sequence
acaaatgattattgagcggaaaa

SEQ ID NO: 56880 - DNA, 23 bp, Artificial sequence
  SiRNA target sequence
caaatgattattgagcggaaaag

SEQ ID NO: 56881 - DNA, 23 bp, Artificial sequence
  SiRNA target sequence
aaatgattattgagcggaaaagt

SEQ ID NO: 56882 - DNA, 23 bp, Artificial sequence
  SiRNA target sequence
aatgattattgagcggaaaagta

SEQ ID NO: 56883 - DNA, 23 bp, Artificial sequence
  SiRNA target sequence
atgattattgagcggaaaagtag

SEQ ID NO: 56884 - DNA, 23 bp, Artificial sequence
  SiRNA target sequence
tgattattgagcggaaaagtaga

SEQ ID NO: 56885 - DNA, 23 bp, Artificial sequence
  SiRNA target sequence
gattattgagcggaaaagtagag

SEQ ID NO: 56886 - DNA, 23 bp, Artificial sequence
  SiRNA target sequence
attattgagcggaaaagtagagc

SEQ ID NO: 56887 - DNA, 23 bp, Artificial sequence
  SiRNA target sequence
ttattgagcggaaaagtagagca

SEQ ID NO: 56888 - DNA, 23 bp, Artificial sequence
  SiRNA target sequence
tattgagcggaaaagtagagcat

SEQ ID NO: 56889 - DNA, 23 bp, Artificial sequence
  SiRNA target sequence
attgagcggaaaagtagagcata

SEQ ID NO: 56890 - DNA, 23 bp, Artificial sequence
  SiRNA target sequence
ttgagcggaaaagtagagcatat

SEQ ID NO: 56891 - DNA, 23 bp, Artificial sequence
  SiRNA target sequence
tgagcggaaaagtagagcatatg

SEQ ID NO: 56892 - DNA, 23 bp, Artificial sequence
  SiRNA target sequence
gagcggaaaagtagagcatatgg

SEQ ID NO: 56893 - DNA, 23 bp, Artificial sequence
  SiRNA target sequence
agcggaaaagtagagcatatggt

SEQ ID NO: 56894 - DNA, 23 bp, Artificial sequence
  SiRNA target sequence
gcggaaaagtagagcatatggtg

SEQ ID NO: 56895 - DNA, 23 bp, Artificial sequence
  SiRNA target sequence
cggaaaagtagagcatatggtga

SEQ ID NO: 56896 - DNA, 23 bp, Artificial sequence
  SiRNA target sequence
ggaaaagtagagcatatggtgac

SEQ ID NO: 56897 - DNA, 23 bp, Artificial sequence
  SiRNA target sequence
gaaaagtagagcatatggtgaca

SEQ ID NO: 56898 - DNA, 23 bp, Artificial sequence
  SiRNA target sequence
aaaagtagagcatatggtgacat

SEQ ID NO: 56899 - DNA, 23 bp, Artificial sequence
  SiRNA target sequence
aaagtagagcatatggtgacata

SEQ ID NO: 56900 - DNA, 23 bp, Artificial sequence
  SiRNA target sequence
aagtagagcatatggtgacatac

SEQ ID NO: 56901 - DNA, 23 bp, Artificial sequence
  SiRNA target sequence
agtagagcatatggtgacatact

SEQ ID NO: 56902 - DNA, 23 bp, Artificial sequence
  SiRNA target sequence
gtagagcatatggtgacatacta

SEQ ID NO: 56903 - DNA, 23 bp, Artificial sequence
  SiRNA target sequence
tagagcatatggtgacatactag

SEQ ID NO: 56904 - DNA, 23 bp, Artificial sequence
  SiRNA target sequence
agagcatatggtgacatactaga

SEQ ID NO: 56905 - DNA, 23 bp, Artificial sequence
  SiRNA target sequence
gagcatatggtgacatactagaa

SEQ ID NO: 56906 - DNA, 23 bp, Artificial sequence
  SiRNA target sequence
agcatatggtgacatactagaac

SEQ ID NO: 56907 - DNA, 23 bp, Artificial sequence
  SiRNA target sequence
gcatatggtgacatactagaact

SEQ ID NO: 56908 - DNA, 23 bp, Artificial sequence
  SiRNA target sequence
catatggtgacatactagaacta

SEQ ID NO: 56909 - DNA, 23 bp, Artificial sequence
  SiRNA target sequence
atatggtgacatactagaactaa

SEQ ID NO: 56910 - DNA, 23 bp, Artificial sequence
  SiRNA target sequence
tatggtgacatactagaactaac

SEQ ID NO: 56911 - DNA, 23 bp, Artificial sequence
  SiRNA target sequence
atggtgacatactagaactaact

SEQ ID NO: 56912 - DNA, 23 bp, Artificial sequence
  SiRNA target sequence
tggtgacatactagaactaacta

SEQ ID NO: 56913 - DNA, 23 bp, Artificial sequence
  SiRNA target sequence
ggtgacatactagaactaactac

SEQ ID NO: 56914 - DNA, 23 bp, Artificial sequence
  SiRNA target sequence
gtgacatactagaactaactact

SEQ ID NO: 56915 - DNA, 23 bp, Artificial sequence
  SiRNA target sequence
tgacatactagaactaactactc

SEQ ID NO: 56916 - DNA, 23 bp, Artificial sequence
  SiRNA target sequence
gacatactagaactaactactct

SEQ ID NO: 56917 - DNA, 23 bp, Artificial sequence
  SiRNA target sequence
acatactagaactaactactctc

SEQ ID NO: 56918 - DNA, 23 bp, Artificial sequence
  SiRNA target sequence
catactagaactaactactctct

SEQ ID NO: 56919 - DNA, 23 bp, Artificial sequence
  SiRNA target sequence
atactagaactaactactctctc

SEQ ID NO: 56920 - DNA, 23 bp, Artificial sequence
  SiRNA target sequence
tactagaactaactactctctcg

SEQ ID NO: 56921 - DNA, 23 bp, Artificial sequence
  SiRNA target sequence
actagaactaactactctctcgg

SEQ ID NO: 56922 - DNA, 23 bp, Artificial sequence
  SiRNA target sequence
ctagaactaactactctctcggc

SEQ ID NO: 56923 - DNA, 23 bp, Artificial sequence
  SiRNA target sequence
tagaactaactactctctcggcc

SEQ ID NO: 56924 - DNA, 23 bp, Artificial sequence
  SiRNA target sequence
agaactaactactctctcggccg

SEQ ID NO: 56925 - DNA, 23 bp, Artificial sequence
  SiRNA target sequence
gaactaactactctctcggccgt

SEQ ID NO: 56926 - DNA, 23 bp, Artificial sequence
  SiRNA target sequence
aactaactactctctcggccgta

SEQ ID NO: 56927 - DNA, 23 bp, Artificial sequence
  SiRNA target sequence
actaactactctctcggccgtac

SEQ ID NO: 56928 - DNA, 23 bp, Artificial sequence
  SiRNA target sequence
ctaactactctctcggccgtacc

SEQ ID NO: 56929 - DNA, 23 bp, Artificial sequence
  SiRNA target sequence
taactactctctcggccgtacca

SEQ ID NO: 56930 - DNA, 23 bp, Artificial sequence
  SiRNA target sequence
aactactctctcggccgtaccaa

SEQ ID NO: 56931 - DNA, 23 bp, Artificial sequence
  SiRNA target sequence
actactctctcggccgtaccaac

SEQ ID NO: 56932 - DNA, 23 bp, Artificial sequence
  SiRNA target sequence
ctactctctcggccgtaccaacc

SEQ ID NO: 56933 - DNA, 23 bp, Artificial sequence
  SiRNA target sequence
tactctctcggccgtaccaacct

SEQ ID NO: 56934 - DNA, 23 bp, Artificial sequence
  SiRNA target sequence
actctctcggccgtaccaacctg

SEQ ID NO: 56935 - DNA, 23 bp, Artificial sequence
  SiRNA target sequence
ctctctcggccgtaccaacctgt

SEQ ID NO: 56936 - DNA, 23 bp, Artificial sequence
  SiRNA target sequence
tctctcggccgtaccaacctgta

SEQ ID NO: 56937 - DNA, 23 bp, Artificial sequence
  SiRNA target sequence
ctctcggccgtaccaacctgtat

SEQ ID NO: 56938 - DNA, 23 bp, Artificial sequence
  SiRNA target sequence
tctcggccgtaccaacctgtatt

SEQ ID NO: 56939 - DNA, 23 bp, Artificial sequence
  SiRNA target sequence
ctcggccgtaccaacctgtattg

SEQ ID NO: 56940 - DNA, 23 bp, Artificial sequence
  SiRNA target sequence
tcggccgtaccaacctgtattgt

SEQ ID NO: 56941 - DNA, 23 bp, Artificial sequence
  SiRNA target sequence
cggccgtaccaacctgtattgta

SEQ ID NO: 56942 - DNA, 23 bp, Artificial sequence
  SiRNA target sequence
ggccgtaccaacctgtattgtag

SEQ ID NO: 56943 - DNA, 23 bp, Artificial sequence
  SiRNA target sequence
gccgtaccaacctgtattgtagt

SEQ ID NO: 56944 - DNA, 23 bp, Artificial sequence
  SiRNA target sequence
ccgtaccaacctgtattgtagtt

SEQ ID NO: 56945 - DNA, 23 bp, Artificial sequence
  SiRNA target sequence
cgtaccaacctgtattgtagtta

SEQ ID NO: 56946 - DNA, 23 bp, Artificial sequence
  SiRNA target sequence
gtaccaacctgtattgtagttat

SEQ ID NO: 56947 - DNA, 23 bp, Artificial sequence
  SiRNA target sequence
taccaacctgtattgtagttatt

SEQ ID NO: 56948 - DNA, 23 bp, Artificial sequence
  SiRNA target sequence
accaacctgtattgtagttatta

SEQ ID NO: 56949 - DNA, 23 bp, Artificial sequence
  SiRNA target sequence
ccaacctgtattgtagttattat

SEQ ID NO: 56950 - DNA, 23 bp, Artificial sequence
  SiRNA target sequence
caacctgtattgtagttattatg

SEQ ID NO: 56951 - DNA, 23 bp, Artificial sequence
  SiRNA target sequence
aacctgtattgtagttattatgt

SEQ ID NO: 56952 - DNA, 23 bp, Artificial sequence
  SiRNA target sequence
acctgtattgtagttattatgtc

SEQ ID NO: 56953 - DNA, 23 bp, Artificial sequence
  SiRNA target sequence
cctgtattgtagttattatgtcg

SEQ ID NO: 56954 - DNA, 23 bp, Artificial sequence
  SiRNA target sequence
ctgtattgtagttattatgtcgt

SEQ ID NO: 56955 - DNA, 23 bp, Artificial sequence
  SiRNA target sequence
tgtattgtagttattatgtcgtt

SEQ ID NO: 56956 - DNA, 23 bp, Artificial sequence
  SiRNA target sequence
gtattgtagttattatgtcgttt

SEQ ID NO: 56957 - DNA, 23 bp, Artificial sequence
  SiRNA target sequence
tattgtagttattatgtcgtttt

SEQ ID NO: 56958 - DNA, 23 bp, Artificial sequence
  SiRNA target sequence
attgtagttattatgtcgttttt

SEQ ID NO: 56959 - DNA, 23 bp, Artificial sequence
  SiRNA target sequence
ttgtagttattatgtcgtttttc

SEQ ID NO: 56960 - DNA, 23 bp, Artificial sequence
  SiRNA target sequence
tgtagttattatgtcgtttttct

SEQ ID NO: 56961 - DNA, 23 bp, Artificial sequence
  SiRNA target sequence
gtagttattatgtcgtttttctc

SEQ ID NO: 56962 - DNA, 23 bp, Artificial sequence
  SiRNA target sequence
tagttattatgtcgtttttctca

SEQ ID NO: 56963 - DNA, 23 bp, Artificial sequence
  SiRNA target sequence
agttattatgtcgtttttctcag

SEQ ID NO: 56964 - DNA, 23 bp, Artificial sequence
  SiRNA target sequence
gttattatgtcgtttttctcagt

SEQ ID NO: 56965 - DNA, 23 bp, Artificial sequence
  SiRNA target sequence
ttattatgtcgtttttctcagta

SEQ ID NO: 56966 - DNA, 23 bp, Artificial sequence
  SiRNA target sequence
tattatgtcgtttttctcagtat

SEQ ID NO: 56967 - DNA, 23 bp, Artificial sequence
  SiRNA target sequence
attatgtcgtttttctcagtata

SEQ ID NO: 56968 - DNA, 23 bp, Artificial sequence
  SiRNA target sequence
ttatgtcgtttttctcagtatat

SEQ ID NO: 56969 - DNA, 23 bp, Artificial sequence
  SiRNA target sequence
tatgtcgtttttctcagtatata

SEQ ID NO: 56970 - DNA, 23 bp, Artificial sequence
  SiRNA target sequence
atgtcgtttttctcagtatataa

SEQ ID NO: 56971 - DNA, 23 bp, Artificial sequence
  SiRNA target sequence
tgtcgtttttctcagtatataaa

SEQ ID NO: 56972 - DNA, 23 bp, Artificial sequence
  SiRNA target sequence
gtcgtttttctcagtatataaaa

SEQ ID NO: 56973 - DNA, 23 bp, Artificial sequence
  SiRNA target sequence
tcgtttttctcagtatataaaaa

SEQ ID NO: 56974 - DNA, 23 bp, Artificial sequence
  SiRNA target sequence
cgtttttctcagtatataaaaat

SEQ ID NO: 56975 - DNA, 23 bp, Artificial sequence
  SiRNA target sequence
gtttttctcagtatataaaaatt

SEQ ID NO: 56976 - DNA, 23 bp, Artificial sequence
  SiRNA target sequence
tttttctcagtatataaaaattt

SEQ ID NO: 56977 - DNA, 23 bp, Artificial sequence
  SiRNA target sequence
ttttctcagtatataaaaatttg

SEQ ID NO: 56978 - DNA, 23 bp, Artificial sequence
  SiRNA target sequence
tttctcagtatataaaaatttgg

SEQ ID NO: 56979 - DNA, 23 bp, Artificial sequence
  SiRNA target sequence
ttctcagtatataaaaatttggg

SEQ ID NO: 56980 - DNA, 23 bp, Artificial sequence
  SiRNA target sequence
tctcagtatataaaaatttggga

SEQ ID NO: 56981 - DNA, 23 bp, Artificial sequence
  SiRNA target sequence
ctcagtatataaaaatttgggaa

SEQ ID NO: 56982 - DNA, 23 bp, Artificial sequence
  SiRNA target sequence
tcagtatataaaaatttgggaag

SEQ ID NO: 56983 - DNA, 23 bp, Artificial sequence
  SiRNA target sequence
cagtatataaaaatttgggaaga

SEQ ID NO: 56984 - DNA, 23 bp, Artificial sequence
  SiRNA target sequence
agtatataaaaatttgggaagag

SEQ ID NO: 56985 - DNA, 23 bp, Artificial sequence
  SiRNA target sequence
gtatataaaaatttgggaagaga

SEQ ID NO: 56986 - DNA, 23 bp, Artificial sequence
  SiRNA target sequence
tatataaaaatttgggaagagat

SEQ ID NO: 56987 - DNA, 23 bp, Artificial sequence
  SiRNA target sequence
atataaaaatttgggaagagatg

SEQ ID NO: 56988 - DNA, 23 bp, Artificial sequence
  SiRNA target sequence
tataaaaatttgggaagagatgc

SEQ ID NO: 56989 - DNA, 23 bp, Artificial sequence
  SiRNA target sequence
ataaaaatttgggaagagatgca

SEQ ID NO: 56990 - DNA, 23 bp, Artificial sequence
  SiRNA target sequence
taaaaatttgggaagagatgcac

SEQ ID NO: 56991 - DNA, 23 bp, Artificial sequence
  SiRNA target sequence
aaaaatttgggaagagatgcact

SEQ ID NO: 56992 - DNA, 23 bp, Artificial sequence
  SiRNA target sequence
aaaatttgggaagagatgcactc

SEQ ID NO: 56993 - DNA, 23 bp, Artificial sequence
  SiRNA target sequence
aaatttgggaagagatgcactct

SEQ ID NO: 56994 - DNA, 23 bp, Artificial sequence
  SiRNA target sequence
aatttgggaagagatgcactcta

SEQ ID NO: 56995 - DNA, 23 bp, Artificial sequence
  SiRNA target sequence
atttgggaagagatgcactctac

SEQ ID NO: 56996 - DNA, 23 bp, Artificial sequence
  SiRNA target sequence
tttgggaagagatgcactctacg

SEQ ID NO: 56997 - DNA, 23 bp, Artificial sequence
  SiRNA target sequence
ttgggaagagatgcactctacgt

SEQ ID NO: 56998 - DNA, 23 bp, Artificial sequence
  SiRNA target sequence
tgggaagagatgcactctacgta

SEQ ID NO: 56999 - DNA, 23 bp, Artificial sequence
  SiRNA target sequence
gggaagagatgcactctacgtaa

SEQ ID NO: 57000 - DNA, 23 bp, Artificial sequence
  SiRNA target sequence
ggaagagatgcactctacgtaat

SEQ ID NO: 57001 - DNA, 23 bp, Artificial sequence
  SiRNA target sequence
gaagagatgcactctacgtaatg

SEQ ID NO: 57002 - DNA, 23 bp, Artificial sequence
  SiRNA target sequence
aagagatgcactctacgtaatgt

SEQ ID NO: 57003 - DNA, 23 bp, Artificial sequence
  SiRNA target sequence
agagatgcactctacgtaatgtt

SEQ ID NO: 57004 - DNA, 23 bp, Artificial sequence
  SiRNA target sequence
gagatgcactctacgtaatgttg

SEQ ID NO: 57005 - DNA, 23 bp, Artificial sequence
  SiRNA target sequence
agatgcactctacgtaatgttgg

SEQ ID NO: 57006 - DNA, 23 bp, Artificial sequence
  SiRNA target sequence
gatgcactctacgtaatgttggc

SEQ ID NO: 57007 - DNA, 23 bp, Artificial sequence
  SiRNA target sequence
atgcactctacgtaatgttggct

SEQ ID NO: 57008 - DNA, 23 bp, Artificial sequence
  SiRNA target sequence
tgcactctacgtaatgttggcta

SEQ ID NO: 57009 - DNA, 23 bp, Artificial sequence
  SiRNA target sequence
gcactctacgtaatgttggctac

SEQ ID NO: 57010 - DNA, 23 bp, Artificial sequence
  SiRNA target sequence
cactctacgtaatgttggctaca

SEQ ID NO: 57011 - DNA, 23 bp, Artificial sequence
  SiRNA target sequence
actctacgtaatgttggctacaa

SEQ ID NO: 57012 - DNA, 23 bp, Artificial sequence
  SiRNA target sequence
ctctacgtaatgttggctacaag

SEQ ID NO: 57013 - DNA, 23 bp, Artificial sequence
  SiRNA target sequence
tctacgtaatgttggctacaagt

SEQ ID NO: 57014 - DNA, 23 bp, Artificial sequence
  SiRNA target sequence
ctacgtaatgttggctacaagtg

SEQ ID NO: 57015 - DNA, 23 bp, Artificial sequence
  SiRNA target sequence
tacgtaatgttggctacaagtgc

SEQ ID NO: 57016 - DNA, 23 bp, Artificial sequence
  SiRNA target sequence
acgtaatgttggctacaagtgcc

SEQ ID NO: 57017 - DNA, 23 bp, Artificial sequence
  SiRNA target sequence
cgtaatgttggctacaagtgcct

SEQ ID NO: 57018 - DNA, 23 bp, Artificial sequence
  SiRNA target sequence
gtaatgttggctacaagtgcctt

SEQ ID NO: 57019 - DNA, 23 bp, Artificial sequence
  SiRNA target sequence
taatgttggctacaagtgccttg

SEQ ID NO: 57020 - DNA, 23 bp, Artificial sequence
  SiRNA target sequence
aatgttggctacaagtgccttgt

SEQ ID NO: 57021 - DNA, 23 bp, Artificial sequence
  SiRNA target sequence
atgttggctacaagtgccttgta

SEQ ID NO: 57022 - DNA, 23 bp, Artificial sequence
  SiRNA target sequence
tgttggctacaagtgccttgtat

SEQ ID NO: 57023 - DNA, 23 bp, Artificial sequence
  SiRNA target sequence
gttggctacaagtgccttgtatg

SEQ ID NO: 57024 - DNA, 23 bp, Artificial sequence
  SiRNA target sequence
ttggctacaagtgccttgtatgt

SEQ ID NO: 57025 - DNA, 23 bp, Artificial sequence
  SiRNA target sequence
tggctacaagtgccttgtatgtg

SEQ ID NO: 57026 - DNA, 23 bp, Artificial sequence
  SiRNA target sequence
ggctacaagtgccttgtatgtgt

SEQ ID NO: 57027 - DNA, 23 bp, Artificial sequence
  SiRNA target sequence
gctacaagtgccttgtatgtgta

SEQ ID NO: 57028 - DNA, 23 bp, Artificial sequence
  SiRNA target sequence
ctacaagtgccttgtatgtgtat

SEQ ID NO: 57029 - DNA, 23 bp, Artificial sequence
  SiRNA target sequence
tacaagtgccttgtatgtgtatt

SEQ ID NO: 57030 - DNA, 23 bp, Artificial sequence
  SiRNA target sequence
acaagtgccttgtatgtgtattt

SEQ ID NO: 57031 - DNA, 23 bp, Artificial sequence
  SiRNA target sequence
caagtgccttgtatgtgtatttt

SEQ ID NO: 57032 - DNA, 23 bp, Artificial sequence
  SiRNA target sequence
aagtgccttgtatgtgtatttta

SEQ ID NO: 57033 - DNA, 23 bp, Artificial sequence
  SiRNA target sequence
agtgccttgtatgtgtattttac

SEQ ID NO: 57034 - DNA, 23 bp, Artificial sequence
  SiRNA target sequence
gtgccttgtatgtgtattttaca

SEQ ID NO: 57035 - DNA, 23 bp, Artificial sequence
  SiRNA target sequence
tgccttgtatgtgtattttacat

SEQ ID NO: 57036 - DNA, 23 bp, Artificial sequence
  SiRNA target sequence
gccttgtatgtgtattttacatt

SEQ ID NO: 57037 - DNA, 23 bp, Artificial sequence
  SiRNA target sequence
ccttgtatgtgtattttacattt

SEQ ID NO: 57038 - DNA, 23 bp, Artificial sequence
  SiRNA target sequence
cttgtatgtgtattttacatttg

SEQ ID NO: 57039 - DNA, 23 bp, Artificial sequence
  SiRNA target sequence
ttgtatgtgtattttacatttgt

SEQ ID NO: 57040 - DNA, 23 bp, Artificial sequence
  SiRNA target sequence
tgtatgtgtattttacatttgta

SEQ ID NO: 57041 - DNA, 23 bp, Artificial sequence
  SiRNA target sequence
gtatgtgtattttacatttgtat

SEQ ID NO: 57042 - DNA, 23 bp, Artificial sequence
  SiRNA target sequence
tatgtgtattttacatttgtatt

SEQ ID NO: 57043 - DNA, 23 bp, Artificial sequence
  SiRNA target sequence
atgtgtattttacatttgtattt

SEQ ID NO: 57044 - DNA, 23 bp, Artificial sequence
  SiRNA target sequence
tgtgtattttacatttgtatttt

SEQ ID NO: 57045 - DNA, 23 bp, Artificial sequence
  SiRNA target sequence
gtgtattttacatttgtattttc

SEQ ID NO: 57046 - DNA, 23 bp, Artificial sequence
  SiRNA target sequence
tgtattttacatttgtattttca

SEQ ID NO: 57047 - DNA, 23 bp, Artificial sequence
  SiRNA target sequence
gtattttacatttgtattttcaa

SEQ ID NO: 57048 - DNA, 23 bp, Artificial sequence
  SiRNA target sequence
tattttacatttgtattttcaat

SEQ ID NO: 57049 - DNA, 23 bp, Artificial sequence
  SiRNA target sequence
attttacatttgtattttcaata

SEQ ID NO: 57050 - DNA, 23 bp, Artificial sequence
  SiRNA target sequence
ttttacatttgtattttcaatat

SEQ ID NO: 57051 - DNA, 23 bp, Artificial sequence
  SiRNA target sequence
tttacatttgtattttcaatatg

SEQ ID NO: 57052 - DNA, 23 bp, Artificial sequence
  SiRNA target sequence
ttacatttgtattttcaatatgg

SEQ ID NO: 57053 - DNA, 23 bp, Artificial sequence
  SiRNA target sequence
tacatttgtattttcaatatgga

SEQ ID NO: 57054 - DNA, 23 bp, Artificial sequence
  SiRNA target sequence
acatttgtattttcaatatggag

SEQ ID NO: 57055 - DNA, 23 bp, Artificial sequence
  SiRNA target sequence
catttgtattttcaatatggaga

SEQ ID NO: 57056 - DNA, 23 bp, Artificial sequence
  SiRNA target sequence
atttgtattttcaatatggagaa

SEQ ID NO: 57057 - DNA, 23 bp, Artificial sequence
  SiRNA target sequence
tttgtattttcaatatggagaaa

SEQ ID NO: 57058 - DNA, 23 bp, Artificial sequence
  SiRNA target sequence
ttgtattttcaatatggagaaac

SEQ ID NO: 57059 - DNA, 23 bp, Artificial sequence
  SiRNA target sequence
tgtattttcaatatggagaaaca

SEQ ID NO: 57060 - DNA, 23 bp, Artificial sequence
  SiRNA target sequence
gtattttcaatatggagaaacaa

SEQ ID NO: 57061 - DNA, 23 bp, Artificial sequence
  SiRNA target sequence
tattttcaatatggagaaacaat

SEQ ID NO: 57062 - DNA, 23 bp, Artificial sequence
  SiRNA target sequence
attttcaatatggagaaacaata

SEQ ID NO: 57063 - DNA, 23 bp, Artificial sequence
  SiRNA target sequence
ttttcaatatggagaaacaatat

SEQ ID NO: 57064 - DNA, 23 bp, Artificial sequence
  SiRNA target sequence
tttcaatatggagaaacaatatt

SEQ ID NO: 57065 - DNA, 23 bp, Artificial sequence
  SiRNA target sequence
ttcaatatggagaaacaatatta

SEQ ID NO: 57066 - DNA, 23 bp, Artificial sequence
  SiRNA target sequence
tcaatatggagaaacaatattag

SEQ ID NO: 57067 - DNA, 23 bp, Artificial sequence
  SiRNA target sequence
caatatggagaaacaatattaga

SEQ ID NO: 57068 - DNA, 23 bp, Artificial sequence
  SiRNA target sequence
aatatggagaaacaatattagaa

SEQ ID NO: 57069 - DNA, 23 bp, Artificial sequence
  SiRNA target sequence
atatggagaaacaatattagaag

SEQ ID NO: 57070 - DNA, 23 bp, Artificial sequence
  SiRNA target sequence
tatggagaaacaatattagaaga

SEQ ID NO: 57071 - DNA, 23 bp, Artificial sequence
  SiRNA target sequence
atggagaaacaatattagaagac

SEQ ID NO: 57072 - DNA, 23 bp, Artificial sequence
  SiRNA target sequence
tggagaaacaatattagaagaca

SEQ ID NO: 57073 - DNA, 23 bp, Artificial sequence
  SiRNA target sequence
ggagaaacaatattagaagacaa

SEQ ID NO: 57074 - DNA, 23 bp, Artificial sequence
  SiRNA target sequence
gagaaacaatattagaagacaat

SEQ ID NO: 57075 - DNA, 23 bp, Artificial sequence
  SiRNA target sequence
agaaacaatattagaagacaata

SEQ ID NO: 57076 - DNA, 23 bp, Artificial sequence
  SiRNA target sequence
gaaacaatattagaagacaatat

SEQ ID NO: 57077 - DNA, 23 bp, Artificial sequence
  SiRNA target sequence
aaacaatattagaagacaatata

SEQ ID NO: 57078 - DNA, 23 bp, Artificial sequence
  SiRNA target sequence
aacaatattagaagacaatataa

SEQ ID NO: 57079 - DNA, 23 bp, Artificial sequence
  SiRNA target sequence
acaatattagaagacaatataat

SEQ ID NO: 57080 - DNA, 23 bp, Artificial sequence
  SiRNA target sequence
caatattagaagacaatataata

SEQ ID NO: 57081 - DNA, 23 bp, Artificial sequence
  SiRNA target sequence
aatattagaagacaatataataa

SEQ ID NO: 57082 - DNA, 23 bp, Artificial sequence
  SiRNA target sequence
atattagaagacaatataataag

SEQ ID NO: 57083 - DNA, 23 bp, Artificial sequence
  SiRNA target sequence
tattagaagacaatataataagt

SEQ ID NO: 57084 - DNA, 23 bp, Artificial sequence
  SiRNA target sequence
attagaagacaatataataagtc

SEQ ID NO: 57085 - DNA, 23 bp, Artificial sequence
  SiRNA target sequence
ttagaagacaatataataagtca

SEQ ID NO: 57086 - DNA, 23 bp, Artificial sequence
  SiRNA target sequence
tagaagacaatataataagtcac

SEQ ID NO: 57087 - DNA, 23 bp, Artificial sequence
  SiRNA target sequence
agaagacaatataataagtcaca

SEQ ID NO: 57088 - DNA, 23 bp, Artificial sequence
  SiRNA target sequence
gaagacaatataataagtcacag

SEQ ID NO: 57089 - DNA, 23 bp, Artificial sequence
  SiRNA target sequence
aagacaatataataagtcacagg

SEQ ID NO: 57090 - DNA, 23 bp, Artificial sequence
  SiRNA target sequence
agacaatataataagtcacagga

SEQ ID NO: 57091 - DNA, 23 bp, Artificial sequence
  SiRNA target sequence
gacaatataataagtcacaggat

SEQ ID NO: 57092 - DNA, 23 bp, Artificial sequence
  SiRNA target sequence
acaatataataagtcacaggata

SEQ ID NO: 57093 - DNA, 23 bp, Artificial sequence
  SiRNA target sequence
caatataataagtcacaggataa

SEQ ID NO: 57094 - DNA, 23 bp, Artificial sequence
  SiRNA target sequence
aatataataagtcacaggataaa

SEQ ID NO: 57095 - DNA, 23 bp, Artificial sequence
  SiRNA target sequence
atataataagtcacaggataaat

SEQ ID NO: 57096 - DNA, 23 bp, Artificial sequence
  SiRNA target sequence
tataataagtcacaggataaatt

SEQ ID NO: 57097 - DNA, 23 bp, Artificial sequence
  SiRNA target sequence
ataataagtcacaggataaatta

SEQ ID NO: 57098 - DNA, 23 bp, Artificial sequence
  SiRNA target sequence
taataagtcacaggataaattat

SEQ ID NO: 57099 - DNA, 23 bp, Artificial sequence
  SiRNA target sequence
aataagtcacaggataaattatc

SEQ ID NO: 57100 - DNA, 23 bp, Artificial sequence
  SiRNA target sequence
ataagtcacaggataaattatcg

SEQ ID NO: 57101 - DNA, 23 bp, Artificial sequence
  SiRNA target sequence
taagtcacaggataaattatcga

SEQ ID NO: 57102 - DNA, 23 bp, Artificial sequence
  SiRNA target sequence
aagtcacaggataaattatcgaa

SEQ ID NO: 57103 - DNA, 23 bp, Artificial sequence
  SiRNA target sequence
agtcacaggataaattatcgaat

SEQ ID NO: 57104 - DNA, 23 bp, Artificial sequence
  SiRNA target sequence
gtcacaggataaattatcgaata

SEQ ID NO: 57105 - DNA, 23 bp, Artificial sequence
  SiRNA target sequence
tcacaggataaattatcgaataa

SEQ ID NO: 57106 - DNA, 23 bp, Artificial sequence
  SiRNA target sequence
cacaggataaattatcgaataaa

SEQ ID NO: 57107 - DNA, 23 bp, Artificial sequence
  SiRNA target sequence
acaggataaattatcgaataaat

SEQ ID NO: 57108 - DNA, 23 bp, Artificial sequence
  SiRNA target sequence
caggataaattatcgaataaatt

SEQ ID NO: 57109 - DNA, 23 bp, Artificial sequence
  SiRNA target sequence
aggataaattatcgaataaatta

SEQ ID NO: 57110 - DNA, 23 bp, Artificial sequence
  SiRNA target sequence
ggataaattatcgaataaattac

SEQ ID NO: 57111 - DNA, 23 bp, Artificial sequence
  SiRNA target sequence
gataaattatcgaataaattaca

SEQ ID NO: 57112 - DNA, 23 bp, Artificial sequence
  SiRNA target sequence
ataaattatcgaataaattacaa

SEQ ID NO: 57113 - DNA, 23 bp, Artificial sequence
  SiRNA target sequence
taaattatcgaataaattacaag

SEQ ID NO: 57114 - DNA, 23 bp, Artificial sequence
  SiRNA target sequence
aaattatcgaataaattacaaga

SEQ ID NO: 57115 - DNA, 23 bp, Artificial sequence
  SiRNA target sequence
aattatcgaataaattacaagat

SEQ ID NO: 57116 - DNA, 23 bp, Artificial sequence
  SiRNA target sequence
attatcgaataaattacaagatt

SEQ ID NO: 57117 - DNA, 23 bp, Artificial sequence
  SiRNA target sequence
ttatcgaataaattacaagattt

SEQ ID NO: 57118 - DNA, 23 bp, Artificial sequence
  SiRNA target sequence
tatcgaataaattacaagatttt

SEQ ID NO: 57119 - DNA, 23 bp, Artificial sequence
  SiRNA target sequence
atcgaataaattacaagattttt

SEQ ID NO: 57120 - DNA, 23 bp, Artificial sequence
  SiRNA target sequence
tcgaataaattacaagatttttt

SEQ ID NO: 57121 - DNA, 23 bp, Artificial sequence
  SiRNA target sequence
cgaataaattacaagatttttta

SEQ ID NO: 57122 - DNA, 23 bp, Artificial sequence
  SiRNA target sequence
gaataaattacaagattttttag

SEQ ID NO: 57123 - DNA, 23 bp, Artificial sequence
  SiRNA target sequence
aataaattacaagattttttagc

SEQ ID NO: 57124 - DNA, 23 bp, Artificial sequence
  SiRNA target sequence
ataaattacaagattttttagct

SEQ ID NO: 57125 - DNA, 23 bp, Artificial sequence
  SiRNA target sequence
taaattacaagattttttagcta

SEQ ID NO: 57126 - DNA, 23 bp, Artificial sequence
  SiRNA target sequence
aaattacaagattttttagctaa

SEQ ID NO: 57127 - DNA, 23 bp, Artificial sequence
  SiRNA target sequence
aattacaagattttttagctaat

SEQ ID NO: 57128 - DNA, 23 bp, Artificial sequence
  SiRNA target sequence
attacaagattttttagctaatc

SEQ ID NO: 57129 - DNA, 23 bp, Artificial sequence
  SiRNA target sequence
ttacaagattttttagctaatca

SEQ ID NO: 57130 - DNA, 23 bp, Artificial sequence
  SiRNA target sequence
tacaagattttttagctaatcat

SEQ ID NO: 57131 - DNA, 23 bp, Artificial sequence
  SiRNA target sequence
acaagattttttagctaatcatg

SEQ ID NO: 57132 - DNA, 23 bp, Artificial sequence
  SiRNA target sequence
caagattttttagctaatcatga

SEQ ID NO: 57133 - DNA, 23 bp, Artificial sequence
  SiRNA target sequence
aagattttttagctaatcatgaa

SEQ ID NO: 57134 - DNA, 23 bp, Artificial sequence
  SiRNA target sequence
agattttttagctaatcatgaaa

SEQ ID NO: 57135 - DNA, 23 bp, Artificial sequence
  SiRNA target sequence
gattttttagctaatcatgaaac

SEQ ID NO: 57136 - DNA, 23 bp, Artificial sequence
  SiRNA target sequence
attttttagctaatcatgaaaca

SEQ ID NO: 57137 - DNA, 23 bp, Artificial sequence
  SiRNA target sequence
ttttttagctaatcatgaaacaa

SEQ ID NO: 57138 - DNA, 23 bp, Artificial sequence
  SiRNA target sequence
tttttagctaatcatgaaacaat

SEQ ID NO: 57139 - DNA, 23 bp, Artificial sequence
  SiRNA target sequence
ttttagctaatcatgaaacaatt

SEQ ID NO: 57140 - DNA, 23 bp, Artificial sequence
  SiRNA target sequence
tttagctaatcatgaaacaatta

SEQ ID NO: 57141 - DNA, 23 bp, Artificial sequence
  SiRNA target sequence
ttagctaatcatgaaacaattaa

SEQ ID NO: 57142 - DNA, 23 bp, Artificial sequence
  SiRNA target sequence
tagctaatcatgaaacaattaaa

SEQ ID NO: 57143 - DNA, 23 bp, Artificial sequence
  SiRNA target sequence
agctaatcatgaaacaattaaag

SEQ ID NO: 57144 - DNA, 23 bp, Artificial sequence
  SiRNA target sequence
gctaatcatgaaacaattaaagc

SEQ ID NO: 57145 - DNA, 23 bp, Artificial sequence
  SiRNA target sequence
ctaatcatgaaacaattaaagcc

SEQ ID NO: 57146 - DNA, 23 bp, Artificial sequence
  SiRNA target sequence
taatcatgaaacaattaaagcct

SEQ ID NO: 57147 - DNA, 23 bp, Artificial sequence
  SiRNA target sequence
aatcatgaaacaattaaagccta

SEQ ID NO: 57148 - DNA, 23 bp, Artificial sequence
  SiRNA target sequence
atcatgaaacaattaaagcctat

SEQ ID NO: 57149 - DNA, 23 bp, Artificial sequence
  SiRNA target sequence
tcatgaaacaattaaagcctata

SEQ ID NO: 57150 - DNA, 23 bp, Artificial sequence
  SiRNA target sequence
catgaaacaattaaagcctataa

SEQ ID NO: 57151 - DNA, 23 bp, Artificial sequence
  SiRNA target sequence
atgaaacaattaaagcctataat

SEQ ID NO: 57152 - DNA, 23 bp, Artificial sequence
  SiRNA target sequence
tgaaacaattaaagcctataata

SEQ ID NO: 57153 - DNA, 23 bp, Artificial sequence
  SiRNA target sequence
gaaacaattaaagcctataatat

SEQ ID NO: 57154 - DNA, 23 bp, Artificial sequence
  SiRNA target sequence
aaacaattaaagcctataatatg

SEQ ID NO: 57155 - DNA, 23 bp, Artificial sequence
  SiRNA target sequence
aacaattaaagcctataatatgg

SEQ ID NO: 57156 - DNA, 23 bp, Artificial sequence
  SiRNA target sequence
acaattaaagcctataatatgga

SEQ ID NO: 57157 - DNA, 23 bp, Artificial sequence
  SiRNA target sequence
caattaaagcctataatatggaa

SEQ ID NO: 57158 - DNA, 23 bp, Artificial sequence
  SiRNA target sequence
aattaaagcctataatatggaag

SEQ ID NO: 57159 - DNA, 23 bp, Artificial sequence
  SiRNA target sequence
attaaagcctataatatggaaga

SEQ ID NO: 57160 - DNA, 23 bp, Artificial sequence
  SiRNA target sequence
ttaaagcctataatatggaagaa

SEQ ID NO: 57161 - DNA, 23 bp, Artificial sequence
  SiRNA target sequence
taaagcctataatatggaagaag

SEQ ID NO: 57162 - DNA, 23 bp, Artificial sequence
  SiRNA target sequence
aaagcctataatatggaagaaga

SEQ ID NO: 57163 - DNA, 23 bp, Artificial sequence
  SiRNA target sequence
aagcctataatatggaagaagaa

SEQ ID NO: 57164 - DNA, 23 bp, Artificial sequence
  SiRNA target sequence
agcctataatatggaagaagaaa

SEQ ID NO: 57165 - DNA, 23 bp, Artificial sequence
  SiRNA target sequence
gcctataatatggaagaagaaac

SEQ ID NO: 57166 - DNA, 23 bp, Artificial sequence
  SiRNA target sequence
cctataatatggaagaagaaact

SEQ ID NO: 57167 - DNA, 23 bp, Artificial sequence
  SiRNA target sequence
ctataatatggaagaagaaacta

SEQ ID NO: 57168 - DNA, 23 bp, Artificial sequence
  SiRNA target sequence
tataatatggaagaagaaactat

SEQ ID NO: 57169 - DNA, 23 bp, Artificial sequence
  SiRNA target sequence
ataatatggaagaagaaactatt

SEQ ID NO: 57170 - DNA, 23 bp, Artificial sequence
  SiRNA target sequence
taatatggaagaagaaactatta

SEQ ID NO: 57171 - DNA, 23 bp, Artificial sequence
  SiRNA target sequence
aatatggaagaagaaactattac

SEQ ID NO: 57172 - DNA, 23 bp, Artificial sequence
  SiRNA target sequence
atatggaagaagaaactattaca

SEQ ID NO: 57173 - DNA, 23 bp, Artificial sequence
  SiRNA target sequence
tatggaagaagaaactattacat

SEQ ID NO: 57174 - DNA, 23 bp, Artificial sequence
  SiRNA target sequence
atggaagaagaaactattacata

SEQ ID NO: 57175 - DNA, 23 bp, Artificial sequence
  SiRNA target sequence
tggaagaagaaactattacatat

SEQ ID NO: 57176 - DNA, 23 bp, Artificial sequence
  SiRNA target sequence
ggaagaagaaactattacatatt

SEQ ID NO: 57177 - DNA, 23 bp, Artificial sequence
  SiRNA target sequence
gaagaagaaactattacatattt

SEQ ID NO: 57178 - DNA, 23 bp, Artificial sequence
  SiRNA target sequence
aagaagaaactattacatatttt

SEQ ID NO: 57179 - DNA, 23 bp, Artificial sequence
  SiRNA target sequence
agaagaaactattacatattttg

SEQ ID NO: 57180 - DNA, 23 bp, Artificial sequence
  SiRNA target sequence
gaagaaactattacatattttga

SEQ ID NO: 57181 - DNA, 23 bp, Artificial sequence
  SiRNA target sequence
aagaaactattacatattttgat

SEQ ID NO: 57182 - DNA, 23 bp, Artificial sequence
  SiRNA target sequence
agaaactattacatattttgatg

SEQ ID NO: 57183 - DNA, 23 bp, Artificial sequence
  SiRNA target sequence
gaaactattacatattttgatga

SEQ ID NO: 57184 - DNA, 23 bp, Artificial sequence
  SiRNA target sequence
aaactattacatattttgatgaa

SEQ ID NO: 57185 - DNA, 23 bp, Artificial sequence
  SiRNA target sequence
aactattacatattttgatgaaa

SEQ ID NO: 57186 - DNA, 23 bp, Artificial sequence
  SiRNA target sequence
actattacatattttgatgaaaa

SEQ ID NO: 57187 - DNA, 23 bp, Artificial sequence
  SiRNA target sequence
ctattacatattttgatgaaaat

SEQ ID NO: 57188 - DNA, 23 bp, Artificial sequence
  SiRNA target sequence
tattacatattttgatgaaaatc

SEQ ID NO: 57189 - DNA, 23 bp, Artificial sequence
  SiRNA target sequence
attacatattttgatgaaaatca

SEQ ID NO: 57190 - DNA, 23 bp, Artificial sequence
  SiRNA target sequence
ttacatattttgatgaaaatcaa

SEQ ID NO: 57191 - DNA, 23 bp, Artificial sequence
  SiRNA target sequence
tacatattttgatgaaaatcaaa

SEQ ID NO: 57192 - DNA, 23 bp, Artificial sequence
  SiRNA target sequence
acatattttgatgaaaatcaaaa

SEQ ID NO: 57193 - DNA, 23 bp, Artificial sequence
  SiRNA target sequence
catattttgatgaaaatcaaaaa

SEQ ID NO: 57194 - DNA, 23 bp, Artificial sequence
  SiRNA target sequence
atattttgatgaaaatcaaaaac

SEQ ID NO: 57195 - DNA, 23 bp, Artificial sequence
  SiRNA target sequence
tattttgatgaaaatcaaaaacc

SEQ ID NO: 57196 - DNA, 23 bp, Artificial sequence
  SiRNA target sequence
attttgatgaaaatcaaaaaccg

SEQ ID NO: 57197 - DNA, 23 bp, Artificial sequence
  SiRNA target sequence
ttttgatgaaaatcaaaaaccgg

SEQ ID NO: 57198 - DNA, 23 bp, Artificial sequence
  SiRNA target sequence
tttgatgaaaatcaaaaaccggt

SEQ ID NO: 57199 - DNA, 23 bp, Artificial sequence
  SiRNA target sequence
ttgatgaaaatcaaaaaccggta

SEQ ID NO: 57200 - DNA, 23 bp, Artificial sequence
  SiRNA target sequence
tgatgaaaatcaaaaaccggtag

SEQ ID NO: 57201 - DNA, 23 bp, Artificial sequence
  SiRNA target sequence
gatgaaaatcaaaaaccggtaga

SEQ ID NO: 57202 - DNA, 23 bp, Artificial sequence
  SiRNA target sequence
atgaaaatcaaaaaccggtagaa

SEQ ID NO: 57203 - DNA, 23 bp, Artificial sequence
  SiRNA target sequence
tgaaaatcaaaaaccggtagaat

SEQ ID NO: 57204 - DNA, 23 bp, Artificial sequence
  SiRNA target sequence
gaaaatcaaaaaccggtagaata

SEQ ID NO: 57205 - DNA, 23 bp, Artificial sequence
  SiRNA target sequence
aaaatcaaaaaccggtagaatat

SEQ ID NO: 57206 - DNA, 23 bp, Artificial sequence
  SiRNA target sequence
aaatcaaaaaccggtagaatatt

SEQ ID NO: 57207 - DNA, 23 bp, Artificial sequence
  SiRNA target sequence
aatcaaaaaccggtagaatattt

SEQ ID NO: 57208 - DNA, 23 bp, Artificial sequence
  SiRNA target sequence
atcaaaaaccggtagaatatttt

SEQ ID NO: 57209 - DNA, 23 bp, Artificial sequence
  SiRNA target sequence
tcaaaaaccggtagaatattttg

SEQ ID NO: 57210 - DNA, 23 bp, Artificial sequence
  SiRNA target sequence
caaaaaccggtagaatattttgg

SEQ ID NO: 57211 - DNA, 23 bp, Artificial sequence
  SiRNA target sequence
aaaaaccggtagaatattttggg

SEQ ID NO: 57212 - DNA, 23 bp, Artificial sequence
  SiRNA target sequence
aaaaccggtagaatattttgggg

SEQ ID NO: 57213 - DNA, 23 bp, Artificial sequence
  SiRNA target sequence
aaaccggtagaatattttggggt

SEQ ID NO: 57214 - DNA, 23 bp, Artificial sequence
  SiRNA target sequence
aaccggtagaatattttggggta

SEQ ID NO: 57215 - DNA, 23 bp, Artificial sequence
  SiRNA target sequence
accggtagaatattttggggtaa

SEQ ID NO: 57216 - DNA, 23 bp, Artificial sequence
  SiRNA target sequence
ccggtagaatattttggggtaaa

SEQ ID NO: 57217 - DNA, 23 bp, Artificial sequence
  SiRNA target sequence
cggtagaatattttggggtaaag

SEQ ID NO: 57218 - DNA, 23 bp, Artificial sequence
  SiRNA target sequence
ggtagaatattttggggtaaagt

SEQ ID NO: 57219 - DNA, 23 bp, Artificial sequence
  SiRNA target sequence
gtagaatattttggggtaaagtc

SEQ ID NO: 57220 - DNA, 23 bp, Artificial sequence
  SiRNA target sequence
tagaatattttggggtaaagtct

SEQ ID NO: 57221 - DNA, 23 bp, Artificial sequence
  SiRNA target sequence
agaatattttggggtaaagtctc

SEQ ID NO: 57222 - DNA, 23 bp, Artificial sequence
  SiRNA target sequence
gaatattttggggtaaagtctca

SEQ ID NO: 57223 - DNA, 23 bp, Artificial sequence
  SiRNA target sequence
aatattttggggtaaagtctcac

SEQ ID NO: 57224 - DNA, 23 bp, Artificial sequence
  SiRNA target sequence
atattttggggtaaagtctcaca

SEQ ID NO: 57225 - DNA, 23 bp, Artificial sequence
  SiRNA target sequence
tattttggggtaaagtctcacag

SEQ ID NO: 57226 - DNA, 23 bp, Artificial sequence
  SiRNA target sequence
attttggggtaaagtctcacaga

SEQ ID NO: 57227 - DNA, 23 bp, Artificial sequence
  SiRNA target sequence
ttttggggtaaagtctcacagaa

SEQ ID NO: 57228 - DNA, 23 bp, Artificial sequence
  SiRNA target sequence
tttggggtaaagtctcacagaat

SEQ ID NO: 57229 - DNA, 23 bp, Artificial sequence
  SiRNA target sequence
ttggggtaaagtctcacagaatt

SEQ ID NO: 57230 - DNA, 23 bp, Artificial sequence
  SiRNA target sequence
tggggtaaagtctcacagaattt

SEQ ID NO: 57231 - DNA, 23 bp, Artificial sequence
  SiRNA target sequence
ggggtaaagtctcacagaatttt

SEQ ID NO: 57232 - DNA, 23 bp, Artificial sequence
  SiRNA target sequence
gggtaaagtctcacagaattttg

SEQ ID NO: 57233 - DNA, 23 bp, Artificial sequence
  SiRNA target sequence
ggtaaagtctcacagaattttgt

SEQ ID NO: 57234 - DNA, 23 bp, Artificial sequence
  SiRNA target sequence
gtaaagtctcacagaattttgtt

SEQ ID NO: 57235 - DNA, 23 bp, Artificial sequence
  SiRNA target sequence
taaagtctcacagaattttgttc

SEQ ID NO: 57236 - DNA, 23 bp, Artificial sequence
  SiRNA target sequence
aaagtctcacagaattttgttct

SEQ ID NO: 57237 - DNA, 23 bp, Artificial sequence
  SiRNA target sequence
aagtctcacagaattttgttctc

SEQ ID NO: 57238 - DNA, 23 bp, Artificial sequence
  SiRNA target sequence
agtctcacagaattttgttctct

SEQ ID NO: 57239 - DNA, 23 bp, Artificial sequence
  SiRNA target sequence
gtctcacagaattttgttctctc

SEQ ID NO: 57240 - DNA, 23 bp, Artificial sequence
  SiRNA target sequence
tctcacagaattttgttctctct

SEQ ID NO: 57241 - DNA, 23 bp, Artificial sequence
  SiRNA target sequence
ctcacagaattttgttctctctt

SEQ ID NO: 57242 - DNA, 23 bp, Artificial sequence
  SiRNA target sequence
tcacagaattttgttctctcttt

SEQ ID NO: 57243 - DNA, 23 bp, Artificial sequence
  SiRNA target sequence
cacagaattttgttctctctttt

SEQ ID NO: 57244 - DNA, 23 bp, Artificial sequence
  SiRNA target sequence
acagaattttgttctctctttta

SEQ ID NO: 57245 - DNA, 23 bp, Artificial sequence
  SiRNA target sequence
cagaattttgttctctcttttat

SEQ ID NO: 57246 - DNA, 23 bp, Artificial sequence
  SiRNA target sequence
agaattttgttctctcttttata

SEQ ID NO: 57247 - DNA, 23 bp, Artificial sequence
  SiRNA target sequence
gaattttgttctctcttttatat

SEQ ID NO: 57248 - DNA, 23 bp, Artificial sequence
  SiRNA target sequence
aattttgttctctcttttatata

SEQ ID NO: 57249 - DNA, 23 bp, Artificial sequence
  SiRNA target sequence
attttgttctctcttttatatat

SEQ ID NO: 57250 - DNA, 23 bp, Artificial sequence
  SiRNA target sequence
ttttgttctctcttttatatata

SEQ ID NO: 57251 - DNA, 23 bp, Artificial sequence
  SiRNA target sequence
tttgttctctcttttatatatac

SEQ ID NO: 57252 - DNA, 23 bp, Artificial sequence
  SiRNA target sequence
ttgttctctcttttatatataca

SEQ ID NO: 57253 - DNA, 23 bp, Artificial sequence
  SiRNA target sequence
tgttctctcttttatatatacaa

SEQ ID NO: 57254 - DNA, 23 bp, Artificial sequence
  SiRNA target sequence
gttctctcttttatatatacaaa

SEQ ID NO: 57255 - DNA, 23 bp, Artificial sequence
  SiRNA target sequence
ttctctcttttatatatacaaaa

SEQ ID NO: 57256 - DNA, 23 bp, Artificial sequence
  SiRNA target sequence
tctctcttttatatatacaaaaa

SEQ ID NO: 57257 - DNA, 23 bp, Artificial sequence
  SiRNA target sequence
ctctcttttatatatacaaaaaa

SEQ ID NO: 57258 - DNA, 23 bp, Artificial sequence
  SiRNA target sequence
tctcttttatatatacaaaaaat

SEQ ID NO: 57259 - DNA, 23 bp, Artificial sequence
  SiRNA target sequence
ctcttttatatatacaaaaaatg

SEQ ID NO: 57260 - DNA, 23 bp, Artificial sequence
  SiRNA target sequence
tcttttatatatacaaaaaatga

SEQ ID NO: 57261 - DNA, 23 bp, Artificial sequence
  SiRNA target sequence
cttttatatatacaaaaaatgac

SEQ ID NO: 57262 - DNA, 23 bp, Artificial sequence
  SiRNA target sequence
ttttatatatacaaaaaatgaca

SEQ ID NO: 57263 - DNA, 23 bp, Artificial sequence
  SiRNA target sequence
tttatatatacaaaaaatgacat

SEQ ID NO: 57264 - DNA, 23 bp, Artificial sequence
  SiRNA target sequence
ttatatatacaaaaaatgacatt

SEQ ID NO: 57265 - DNA, 23 bp, Artificial sequence
  SiRNA target sequence
tatatatacaaaaaatgacattt

SEQ ID NO: 57266 - DNA, 23 bp, Artificial sequence
  SiRNA target sequence
atatatacaaaaaatgacatttg

SEQ ID NO: 57267 - DNA, 23 bp, Artificial sequence
  SiRNA target sequence
tatatacaaaaaatgacatttgc

SEQ ID NO: 57268 - DNA, 23 bp, Artificial sequence
  SiRNA target sequence
atatacaaaaaatgacatttgcg

SEQ ID NO: 57269 - DNA, 23 bp, Artificial sequence
  SiRNA target sequence
tatacaaaaaatgacatttgcga

SEQ ID NO: 57270 - DNA, 23 bp, Artificial sequence
  SiRNA target sequence
atacaaaaaatgacatttgcgat

SEQ ID NO: 57271 - DNA, 23 bp, Artificial sequence
  SiRNA target sequence
tacaaaaaatgacatttgcgata

SEQ ID NO: 57272 - DNA, 23 bp, Artificial sequence
  SiRNA target sequence
acaaaaaatgacatttgcgatac

SEQ ID NO: 57273 - DNA, 23 bp, Artificial sequence
  SiRNA target sequence
caaaaaatgacatttgcgataca

SEQ ID NO: 57274 - DNA, 23 bp, Artificial sequence
  SiRNA target sequence
aaaaaatgacatttgcgatacag

SEQ ID NO: 57275 - DNA, 23 bp, Artificial sequence
  SiRNA target sequence
aaaaatgacatttgcgatacagg

SEQ ID NO: 57276 - DNA, 23 bp, Artificial sequence
  SiRNA target sequence
aaaatgacatttgcgatacaggc

SEQ ID NO: 57277 - DNA, 23 bp, Artificial sequence
  SiRNA target sequence
aaatgacatttgcgatacaggca

SEQ ID NO: 57278 - DNA, 23 bp, Artificial sequence
  SiRNA target sequence
aatgacatttgcgatacaggcaa

SEQ ID NO: 57279 - DNA, 23 bp, Artificial sequence
  SiRNA target sequence
atgacatttgcgatacaggcaat

SEQ ID NO: 57280 - DNA, 23 bp, Artificial sequence
  SiRNA target sequence
tgacatttgcgatacaggcaatt

SEQ ID NO: 57281 - DNA, 23 bp, Artificial sequence
  SiRNA target sequence
gacatttgcgatacaggcaatta

SEQ ID NO: 57282 - DNA, 23 bp, Artificial sequence
  SiRNA target sequence
acatttgcgatacaggcaattat

SEQ ID NO: 57283 - DNA, 23 bp, Artificial sequence
  SiRNA target sequence
catttgcgatacaggcaattatt

SEQ ID NO: 57284 - DNA, 23 bp, Artificial sequence
  SiRNA target sequence
atttgcgatacaggcaattatta

SEQ ID NO: 57285 - DNA, 23 bp, Artificial sequence
  SiRNA target sequence
tttgcgatacaggcaattattat

SEQ ID NO: 57286 - DNA, 23 bp, Artificial sequence
  SiRNA target sequence
ttgcgatacaggcaattattatt

SEQ ID NO: 57287 - DNA, 23 bp, Artificial sequence
  SiRNA target sequence
tgcgatacaggcaattattatta

SEQ ID NO: 57288 - DNA, 23 bp, Artificial sequence
  SiRNA target sequence
gcgatacaggcaattattattat

SEQ ID NO: 57289 - DNA, 23 bp, Artificial sequence
  SiRNA target sequence
cgatacaggcaattattattatc

SEQ ID NO: 57290 - DNA, 23 bp, Artificial sequence
  SiRNA target sequence
gatacaggcaattattattatca

SEQ ID NO: 57291 - DNA, 23 bp, Artificial sequence
  SiRNA target sequence
atacaggcaattattattatcac

SEQ ID NO: 57292 - DNA, 23 bp, Artificial sequence
  SiRNA target sequence
tacaggcaattattattatcaca

SEQ ID NO: 57293 - DNA, 23 bp, Artificial sequence
  SiRNA target sequence
acaggcaattattattatcacat

SEQ ID NO: 57294 - DNA, 23 bp, Artificial sequence
  SiRNA target sequence
caggcaattattattatcacatt

SEQ ID NO: 57295 - DNA, 23 bp, Artificial sequence
  SiRNA target sequence
aggcaattattattatcacatta

SEQ ID NO: 57296 - DNA, 23 bp, Artificial sequence
  SiRNA target sequence
ggcaattattattatcacattag

SEQ ID NO: 57297 - DNA, 23 bp, Artificial sequence
  SiRNA target sequence
gcaattattattatcacattagg

SEQ ID NO: 57298 - DNA, 23 bp, Artificial sequence
  SiRNA target sequence
caattattattatcacattagga

SEQ ID NO: 57299 - DNA, 23 bp, Artificial sequence
  SiRNA target sequence
aattattattatcacattaggat

SEQ ID NO: 57300 - DNA, 23 bp, Artificial sequence
  SiRNA target sequence
attattattatcacattaggatc

SEQ ID NO: 57301 - DNA, 23 bp, Artificial sequence
  SiRNA target sequence
ttattattatcacattaggatct

SEQ ID NO: 57302 - DNA, 23 bp, Artificial sequence
  SiRNA target sequence
tattattatcacattaggatctt

SEQ ID NO: 57303 - DNA, 23 bp, Artificial sequence
  SiRNA target sequence
attattatcacattaggatcttt

SEQ ID NO: 57304 - DNA, 23 bp, Artificial sequence
  SiRNA target sequence
ttattatcacattaggatctttt

SEQ ID NO: 57305 - DNA, 23 bp, Artificial sequence
  SiRNA target sequence
tattatcacattaggatcttttg

SEQ ID NO: 57306 - DNA, 23 bp, Artificial sequence
  SiRNA target sequence
attatcacattaggatcttttgg

SEQ ID NO: 57307 - DNA, 23 bp, Artificial sequence
  SiRNA target sequence
ttatcacattaggatcttttgga

SEQ ID NO: 57308 - DNA, 23 bp, Artificial sequence
  SiRNA target sequence
tatcacattaggatcttttggat

SEQ ID NO: 57309 - DNA, 23 bp, Artificial sequence
  SiRNA target sequence
atcacattaggatcttttggata

SEQ ID NO: 57310 - DNA, 23 bp, Artificial sequence
  SiRNA target sequence
tcacattaggatcttttggatat

SEQ ID NO: 57311 - DNA, 23 bp, Artificial sequence
  SiRNA target sequence
cacattaggatcttttggatatt

SEQ ID NO: 57312 - DNA, 23 bp, Artificial sequence
  SiRNA target sequence
acattaggatcttttggatattt

SEQ ID NO: 57313 - DNA, 23 bp, Artificial sequence
  SiRNA target sequence
cattaggatcttttggatatttt

SEQ ID NO: 57314 - DNA, 23 bp, Artificial sequence
  SiRNA target sequence
attaggatcttttggatattttc

SEQ ID NO: 57315 - DNA, 23 bp, Artificial sequence
  SiRNA target sequence
ttaggatcttttggatattttcc

SEQ ID NO: 57316 - DNA, 23 bp, Artificial sequence
  SiRNA target sequence
taggatcttttggatattttccg

SEQ ID NO: 57317 - DNA, 23 bp, Artificial sequence
  SiRNA target sequence
aggatcttttggatattttccga

SEQ ID NO: 57318 - DNA, 23 bp, Artificial sequence
  SiRNA target sequence
ggatcttttggatattttccgat

SEQ ID NO: 57319 - DNA, 23 bp, Artificial sequence
  SiRNA target sequence
gatcttttggatattttccgatt

SEQ ID NO: 57320 - DNA, 23 bp, Artificial sequence
  SiRNA target sequence
atcttttggatattttccgatta

SEQ ID NO: 57321 - DNA, 23 bp, Artificial sequence
  SiRNA target sequence
tcttttggatattttccgattaa

SEQ ID NO: 57322 - DNA, 23 bp, Artificial sequence
  SiRNA target sequence
cttttggatattttccgattaaa

SEQ ID NO: 57323 - DNA, 23 bp, Artificial sequence
  SiRNA target sequence
ttttggatattttccgattaaat

SEQ ID NO: 57324 - DNA, 23 bp, Artificial sequence
  SiRNA target sequence
tttggatattttccgattaaatt

SEQ ID NO: 57325 - DNA, 23 bp, Artificial sequence
  SiRNA target sequence
ttggatattttccgattaaatta

SEQ ID NO: 57326 - DNA, 23 bp, Artificial sequence
  SiRNA target sequence
tggatattttccgattaaattat

SEQ ID NO: 57327 - DNA, 23 bp, Artificial sequence
  SiRNA target sequence
ggatattttccgattaaattatc

SEQ ID NO: 57328 - DNA, 23 bp, Artificial sequence
  SiRNA target sequence
gatattttccgattaaattatcc

SEQ ID NO: 57329 - DNA, 23 bp, Artificial sequence
  SiRNA target sequence
atattttccgattaaattatcct

SEQ ID NO: 57330 - DNA, 23 bp, Artificial sequence
  SiRNA target sequence
tattttccgattaaattatcctc

SEQ ID NO: 57331 - DNA, 23 bp, Artificial sequence
  SiRNA target sequence
attttccgattaaattatcctct

SEQ ID NO: 57332 - DNA, 23 bp, Artificial sequence
  SiRNA target sequence
ttttccgattaaattatcctctc

SEQ ID NO: 57333 - DNA, 23 bp, Artificial sequence
  SiRNA target sequence
tttccgattaaattatcctctca

SEQ ID NO: 57334 - DNA, 23 bp, Artificial sequence
  SiRNA target sequence
ttccgattaaattatcctctcaa

SEQ ID NO: 57335 - DNA, 23 bp, Artificial sequence
  SiRNA target sequence
tccgattaaattatcctctcaac

SEQ ID NO: 57336 - DNA, 23 bp, Artificial sequence
  SiRNA target sequence
ccgattaaattatcctctcaaca

SEQ ID NO: 57337 - DNA, 23 bp, Artificial sequence
  SiRNA target sequence
cgattaaattatcctctcaacag

SEQ ID NO: 57338 - DNA, 23 bp, Artificial sequence
  SiRNA target sequence
gattaaattatcctctcaacagt

SEQ ID NO: 57339 - DNA, 23 bp, Artificial sequence
  SiRNA target sequence
attaaattatcctctcaacagtt

SEQ ID NO: 57340 - DNA, 23 bp, Artificial sequence
  SiRNA target sequence
ttaaattatcctctcaacagtta

SEQ ID NO: 57341 - DNA, 23 bp, Artificial sequence
  SiRNA target sequence
taaattatcctctcaacagttag

SEQ ID NO: 57342 - DNA, 23 bp, Artificial sequence
  SiRNA target sequence
aaattatcctctcaacagttagt

SEQ ID NO: 57343 - DNA, 23 bp, Artificial sequence
  SiRNA target sequence
aattatcctctcaacagttagtc

SEQ ID NO: 57344 - DNA, 23 bp, Artificial sequence
  SiRNA target sequence
attatcctctcaacagttagtct

SEQ ID NO: 57345 - DNA, 23 bp, Artificial sequence
  SiRNA target sequence
ttatcctctcaacagttagtctt

SEQ ID NO: 57346 - DNA, 23 bp, Artificial sequence
  SiRNA target sequence
tatcctctcaacagttagtcttt

SEQ ID NO: 57347 - DNA, 23 bp, Artificial sequence
  SiRNA target sequence
atcctctcaacagttagtctttt

SEQ ID NO: 57348 - DNA, 23 bp, Artificial sequence
  SiRNA target sequence
tcctctcaacagttagtctttta

SEQ ID NO: 57349 - DNA, 23 bp, Artificial sequence
  SiRNA target sequence
cctctcaacagttagtcttttat

SEQ ID NO: 57350 - DNA, 23 bp, Artificial sequence
  SiRNA target sequence
ctctcaacagttagtcttttata

SEQ ID NO: 57351 - DNA, 23 bp, Artificial sequence
  SiRNA target sequence
tctcaacagttagtcttttatat

SEQ ID NO: 57352 - DNA, 23 bp, Artificial sequence
  SiRNA target sequence
ctcaacagttagtcttttatatt

SEQ ID NO: 57353 - DNA, 23 bp, Artificial sequence
  SiRNA target sequence
tcaacagttagtcttttatattt

SEQ ID NO: 57354 - DNA, 23 bp, Artificial sequence
  SiRNA target sequence
caacagttagtcttttatatttc

SEQ ID NO: 57355 - DNA, 23 bp, Artificial sequence
  SiRNA target sequence
aacagttagtcttttatatttcg

SEQ ID NO: 57356 - DNA, 23 bp, Artificial sequence
  SiRNA target sequence
acagttagtcttttatatttcga

SEQ ID NO: 57357 - DNA, 23 bp, Artificial sequence
  SiRNA target sequence
cagttagtcttttatatttcgat

SEQ ID NO: 57358 - DNA, 23 bp, Artificial sequence
  SiRNA target sequence
agttagtcttttatatttcgatt

SEQ ID NO: 57359 - DNA, 23 bp, Artificial sequence
  SiRNA target sequence
gttagtcttttatatttcgatta

SEQ ID NO: 57360 - DNA, 23 bp, Artificial sequence
  SiRNA target sequence
ttagtcttttatatttcgattag

SEQ ID NO: 57361 - DNA, 23 bp, Artificial sequence
  SiRNA target sequence
tagtcttttatatttcgattagt

SEQ ID NO: 57362 - DNA, 23 bp, Artificial sequence
  SiRNA target sequence
agtcttttatatttcgattagta

SEQ ID NO: 57363 - DNA, 23 bp, Artificial sequence
  SiRNA target sequence
gtcttttatatttcgattagtaa

SEQ ID NO: 57364 - DNA, 23 bp, Artificial sequence
  SiRNA target sequence
tcttttatatttcgattagtaaa

SEQ ID NO: 57365 - DNA, 23 bp, Artificial sequence
  SiRNA target sequence
cttttatatttcgattagtaaaa

SEQ ID NO: 57366 - DNA, 23 bp, Artificial sequence
  SiRNA target sequence
ttttatatttcgattagtaaaac

SEQ ID NO: 57367 - DNA, 23 bp, Artificial sequence
  SiRNA target sequence
tttatatttcgattagtaaaacg

SEQ ID NO: 57368 - DNA, 23 bp, Artificial sequence
  SiRNA target sequence
ttatatttcgattagtaaaacgt

SEQ ID NO: 57369 - DNA, 23 bp, Artificial sequence
  SiRNA target sequence
tatatttcgattagtaaaacgtt

SEQ ID NO: 57370 - DNA, 23 bp, Artificial sequence
  SiRNA target sequence
atatttcgattagtaaaacgttg

SEQ ID NO: 57371 - DNA, 23 bp, Artificial sequence
  SiRNA target sequence
tatttcgattagtaaaacgttga

SEQ ID NO: 57372 - DNA, 23 bp, Artificial sequence
  SiRNA target sequence
atttcgattagtaaaacgttgac

SEQ ID NO: 57373 - DNA, 23 bp, Artificial sequence
  SiRNA target sequence
tttcgattagtaaaacgttgaca

SEQ ID NO: 57374 - DNA, 23 bp, Artificial sequence
  SiRNA target sequence
ttcgattagtaaaacgttgacaa

SEQ ID NO: 57375 - DNA, 23 bp, Artificial sequence
  SiRNA target sequence
tcgattagtaaaacgttgacaaa

SEQ ID NO: 57376 - DNA, 23 bp, Artificial sequence
  SiRNA target sequence
cgattagtaaaacgttgacaaat

SEQ ID NO: 57377 - DNA, 23 bp, Artificial sequence
  SiRNA target sequence
gattagtaaaacgttgacaaatt

SEQ ID NO: 57378 - DNA, 23 bp, Artificial sequence
  SiRNA target sequence
attagtaaaacgttgacaaattc

SEQ ID NO: 57379 - DNA, 23 bp, Artificial sequence
  SiRNA target sequence
ttagtaaaacgttgacaaattcg

SEQ ID NO: 57380 - DNA, 23 bp, Artificial sequence
  SiRNA target sequence
tagtaaaacgttgacaaattcgt

SEQ ID NO: 57381 - DNA, 23 bp, Artificial sequence
  SiRNA target sequence
agtaaaacgttgacaaattcgtt

SEQ ID NO: 57382 - DNA, 23 bp, Artificial sequence
  SiRNA target sequence
gtaaaacgttgacaaattcgttg

SEQ ID NO: 57383 - DNA, 23 bp, Artificial sequence
  SiRNA target sequence
taaaacgttgacaaattcgttga

SEQ ID NO: 57384 - DNA, 23 bp, Artificial sequence
  SiRNA target sequence
aaaacgttgacaaattcgttgag

SEQ ID NO: 57385 - DNA, 23 bp, Artificial sequence
  SiRNA target sequence
aaacgttgacaaattcgttgagc

SEQ ID NO: 57386 - DNA, 23 bp, Artificial sequence
  SiRNA target sequence
aacgttgacaaattcgttgagcg

SEQ ID NO: 57387 - DNA, 23 bp, Artificial sequence
  SiRNA target sequence
acgttgacaaattcgttgagcga

SEQ ID NO: 57388 - DNA, 23 bp, Artificial sequence
  SiRNA target sequence
cgttgacaaattcgttgagcgaa

SEQ ID NO: 57389 - DNA, 23 bp, Artificial sequence
  SiRNA target sequence
gttgacaaattcgttgagcgaaa

SEQ ID NO: 57390 - DNA, 23 bp, Artificial sequence
  SiRNA target sequence
ttgacaaattcgttgagcgaaat

SEQ ID NO: 57391 - DNA, 23 bp, Artificial sequence
  SiRNA target sequence
tgacaaattcgttgagcgaaatg

SEQ ID NO: 57392 - DNA, 23 bp, Artificial sequence
  SiRNA target sequence
gacaaattcgttgagcgaaatgg

SEQ ID NO: 57393 - DNA, 23 bp, Artificial sequence
  SiRNA target sequence
acaaattcgttgagcgaaatggg

SEQ ID NO: 57394 - DNA, 23 bp, Artificial sequence
  SiRNA target sequence
caaattcgttgagcgaaatggga

SEQ ID NO: 57395 - DNA, 23 bp, Artificial sequence
  SiRNA target sequence
aaattcgttgagcgaaatgggaa

SEQ ID NO: 57396 - DNA, 23 bp, Artificial sequence
  SiRNA target sequence
aattcgttgagcgaaatgggaat

SEQ ID NO: 57397 - DNA, 23 bp, Artificial sequence
  SiRNA target sequence
attcgttgagcgaaatgggaatg

SEQ ID NO: 57398 - DNA, 23 bp, Artificial sequence
  SiRNA target sequence
ttcgttgagcgaaatgggaatgc

SEQ ID NO: 57399 - DNA, 23 bp, Artificial sequence
  SiRNA target sequence
tcgttgagcgaaatgggaatgct

SEQ ID NO: 57400 - DNA, 23 bp, Artificial sequence
  SiRNA target sequence
cgttgagcgaaatgggaatgcta

SEQ ID NO: 57401 - DNA, 23 bp, Artificial sequence
  SiRNA target sequence
gttgagcgaaatgggaatgctat

SEQ ID NO: 57402 - DNA, 23 bp, Artificial sequence
  SiRNA target sequence
ttgagcgaaatgggaatgctata

SEQ ID NO: 57403 - DNA, 23 bp, Artificial sequence
  SiRNA target sequence
tgagcgaaatgggaatgctatac

SEQ ID NO: 57404 - DNA, 23 bp, Artificial sequence
  SiRNA target sequence
gagcgaaatgggaatgctataca

SEQ ID NO: 57405 - DNA, 23 bp, Artificial sequence
  SiRNA target sequence
agcgaaatgggaatgctatacac

SEQ ID NO: 57406 - DNA, 23 bp, Artificial sequence
  SiRNA target sequence
gcgaaatgggaatgctatacaca

SEQ ID NO: 57407 - DNA, 23 bp, Artificial sequence
  SiRNA target sequence
cgaaatgggaatgctatacacaa

SEQ ID NO: 57408 - DNA, 23 bp, Artificial sequence
  SiRNA target sequence
gaaatgggaatgctatacacaag

SEQ ID NO: 57409 - DNA, 23 bp, Artificial sequence
  SiRNA target sequence
aaatgggaatgctatacacaaga

SEQ ID NO: 57410 - DNA, 23 bp, Artificial sequence
  SiRNA target sequence
aatgggaatgctatacacaagat

SEQ ID NO: 57411 - DNA, 23 bp, Artificial sequence
  SiRNA target sequence
atgggaatgctatacacaagata

SEQ ID NO: 57412 - DNA, 23 bp, Artificial sequence
  SiRNA target sequence
tgggaatgctatacacaagatat

SEQ ID NO: 57413 - DNA, 23 bp, Artificial sequence
  SiRNA target sequence
gggaatgctatacacaagatatg

SEQ ID NO: 57414 - DNA, 23 bp, Artificial sequence
  SiRNA target sequence
ggaatgctatacacaagatatgt

SEQ ID NO: 57415 - DNA, 23 bp, Artificial sequence
  SiRNA target sequence
gaatgctatacacaagatatgta

SEQ ID NO: 57416 - DNA, 23 bp, Artificial sequence
  SiRNA target sequence
aatgctatacacaagatatgtac

SEQ ID NO: 57417 - DNA, 23 bp, Artificial sequence
  SiRNA target sequence
atgctatacacaagatatgtaca

SEQ ID NO: 57418 - DNA, 23 bp, Artificial sequence
  SiRNA target sequence
tgctatacacaagatatgtacaa

SEQ ID NO: 57419 - DNA, 23 bp, Artificial sequence
  SiRNA target sequence
gctatacacaagatatgtacaag

SEQ ID NO: 57420 - DNA, 23 bp, Artificial sequence
  SiRNA target sequence
ctatacacaagatatgtacaagg

SEQ ID NO: 57421 - DNA, 23 bp, Artificial sequence
  SiRNA target sequence
tatacacaagatatgtacaagga

SEQ ID NO: 57422 - DNA, 23 bp, Artificial sequence
  SiRNA target sequence
atacacaagatatgtacaaggat

SEQ ID NO: 57423 - DNA, 23 bp, Artificial sequence
  SiRNA target sequence
tacacaagatatgtacaaggatt

SEQ ID NO: 57424 - DNA, 23 bp, Artificial sequence
  SiRNA target sequence
acacaagatatgtacaaggattt

SEQ ID NO: 57425 - DNA, 23 bp, Artificial sequence
  SiRNA target sequence
cacaagatatgtacaaggatttt

SEQ ID NO: 57426 - DNA, 23 bp, Artificial sequence
  SiRNA target sequence
acaagatatgtacaaggattttt

SEQ ID NO: 57427 - DNA, 23 bp, Artificial sequence
  SiRNA target sequence
caagatatgtacaaggattttta

SEQ ID NO: 57428 - DNA, 23 bp, Artificial sequence
  SiRNA target sequence
aagatatgtacaaggatttttaa

SEQ ID NO: 57429 - DNA, 23 bp, Artificial sequence
  SiRNA target sequence
agatatgtacaaggatttttaaa

SEQ ID NO: 57430 - DNA, 23 bp, Artificial sequence
  SiRNA target sequence
gatatgtacaaggatttttaaat

SEQ ID NO: 57431 - DNA, 23 bp, Artificial sequence
  SiRNA target sequence
atatgtacaaggatttttaaatg

SEQ ID NO: 57432 - DNA, 23 bp, Artificial sequence
  SiRNA target sequence
tatgtacaaggatttttaaatgc

SEQ ID NO: 57433 - DNA, 23 bp, Artificial sequence
  SiRNA target sequence
atgtacaaggatttttaaatgca

SEQ ID NO: 57434 - DNA, 23 bp, Artificial sequence
  SiRNA target sequence
tgtacaaggatttttaaatgcaa

SEQ ID NO: 57435 - DNA, 23 bp, Artificial sequence
  SiRNA target sequence
gtacaaggatttttaaatgcaaa

SEQ ID NO: 57436 - DNA, 23 bp, Artificial sequence
  SiRNA target sequence
tacaaggatttttaaatgcaaag

SEQ ID NO: 57437 - DNA, 23 bp, Artificial sequence
  SiRNA target sequence
acaaggatttttaaatgcaaagt

SEQ ID NO: 57438 - DNA, 23 bp, Artificial sequence
  SiRNA target sequence
caaggatttttaaatgcaaagtc

SEQ ID NO: 57439 - DNA, 23 bp, Artificial sequence
  SiRNA target sequence
aaggatttttaaatgcaaagtct

SEQ ID NO: 57440 - DNA, 23 bp, Artificial sequence
  SiRNA target sequence
aggatttttaaatgcaaagtctg

SEQ ID NO: 57441 - DNA, 23 bp, Artificial sequence
  SiRNA target sequence
ggatttttaaatgcaaagtctgg

SEQ ID NO: 57442 - DNA, 23 bp, Artificial sequence
  SiRNA target sequence
gatttttaaatgcaaagtctgga

SEQ ID NO: 57443 - DNA, 23 bp, Artificial sequence
  SiRNA target sequence
atttttaaatgcaaagtctggat

SEQ ID NO: 57444 - DNA, 23 bp, Artificial sequence
  SiRNA target sequence
tttttaaatgcaaagtctggata

SEQ ID NO: 57445 - DNA, 23 bp, Artificial sequence
  SiRNA target sequence
ttttaaatgcaaagtctggatat

SEQ ID NO: 57446 - DNA, 23 bp, Artificial sequence
  SiRNA target sequence
tttaaatgcaaagtctggatatt

SEQ ID NO: 57447 - DNA, 23 bp, Artificial sequence
  SiRNA target sequence
ttaaatgcaaagtctggatatta

SEQ ID NO: 57448 - DNA, 23 bp, Artificial sequence
  SiRNA target sequence
taaatgcaaagtctggatattac

SEQ ID NO: 57449 - DNA, 23 bp, Artificial sequence
  SiRNA target sequence
aaatgcaaagtctggatattacg

SEQ ID NO: 57450 - DNA, 23 bp, Artificial sequence
  SiRNA target sequence
aatgcaaagtctggatattacga

SEQ ID NO: 57451 - DNA, 23 bp, Artificial sequence
  SiRNA target sequence
atgcaaagtctggatattacgag

SEQ ID NO: 57452 - DNA, 23 bp, Artificial sequence
  SiRNA target sequence
tgcaaagtctggatattacgagt

SEQ ID NO: 57453 - DNA, 23 bp, Artificial sequence
  SiRNA target sequence
gcaaagtctggatattacgagtt

SEQ ID NO: 57454 - DNA, 23 bp, Artificial sequence
  SiRNA target sequence
caaagtctggatattacgagttt

SEQ ID NO: 57455 - DNA, 23 bp, Artificial sequence
  SiRNA target sequence
aaagtctggatattacgagttta

SEQ ID NO: 57456 - DNA, 23 bp, Artificial sequence
  SiRNA target sequence
aagtctggatattacgagtttaa

SEQ ID NO: 57457 - DNA, 23 bp, Artificial sequence
  SiRNA target sequence
agtctggatattacgagtttaaa

SEQ ID NO: 57458 - DNA, 23 bp, Artificial sequence
  SiRNA target sequence
gtctggatattacgagtttaaag

SEQ ID NO: 57459 - DNA, 23 bp, Artificial sequence
  SiRNA target sequence
tctggatattacgagtttaaaga

SEQ ID NO: 57460 - DNA, 23 bp, Artificial sequence
  SiRNA target sequence
ctggatattacgagtttaaagag

SEQ ID NO: 57461 - DNA, 23 bp, Artificial sequence
  SiRNA target sequence
tggatattacgagtttaaagagg

SEQ ID NO: 57462 - DNA, 23 bp, Artificial sequence
  SiRNA target sequence
ggatattacgagtttaaagagga

SEQ ID NO: 57463 - DNA, 23 bp, Artificial sequence
  SiRNA target sequence
gatattacgagtttaaagaggat

SEQ ID NO: 57464 - DNA, 23 bp, Artificial sequence
  SiRNA target sequence
atattacgagtttaaagaggata

SEQ ID NO: 57465 - DNA, 23 bp, Artificial sequence
  SiRNA target sequence
tattacgagtttaaagaggatac

SEQ ID NO: 57466 - DNA, 23 bp, Artificial sequence
  SiRNA target sequence
attacgagtttaaagaggataca

SEQ ID NO: 57467 - DNA, 23 bp, Artificial sequence
  SiRNA target sequence
ttacgagtttaaagaggatacac

SEQ ID NO: 57468 - DNA, 23 bp, Artificial sequence
  SiRNA target sequence
tacgagtttaaagaggatacaca

SEQ ID NO: 57469 - DNA, 23 bp, Artificial sequence
  SiRNA target sequence
acgagtttaaagaggatacacaa

SEQ ID NO: 57470 - DNA, 23 bp, Artificial sequence
  SiRNA target sequence
cgagtttaaagaggatacacaaa

SEQ ID NO: 57471 - DNA, 23 bp, Artificial sequence
  SiRNA target sequence
gagtttaaagaggatacacaaac

SEQ ID NO: 57472 - DNA, 23 bp, Artificial sequence
  SiRNA target sequence
agtttaaagaggatacacaaact

SEQ ID NO: 57473 - DNA, 23 bp, Artificial sequence
  SiRNA target sequence
gtttaaagaggatacacaaactg

SEQ ID NO: 57474 - DNA, 23 bp, Artificial sequence
  SiRNA target sequence
tttaaagaggatacacaaactga

SEQ ID NO: 57475 - DNA, 23 bp, Artificial sequence
  SiRNA target sequence
ttaaagaggatacacaaactgat

SEQ ID NO: 57476 - DNA, 23 bp, Artificial sequence
  SiRNA target sequence
taaagaggatacacaaactgata

SEQ ID NO: 57477 - DNA, 23 bp, Artificial sequence
  SiRNA target sequence
aaagaggatacacaaactgataa

SEQ ID NO: 57478 - DNA, 23 bp, Artificial sequence
  SiRNA target sequence
aagaggatacacaaactgataaa

SEQ ID NO: 57479 - DNA, 23 bp, Artificial sequence
  SiRNA target sequence
agaggatacacaaactgataaaa

SEQ ID NO: 57480 - DNA, 23 bp, Artificial sequence
  SiRNA target sequence
gaggatacacaaactgataaaat

SEQ ID NO: 57481 - DNA, 23 bp, Artificial sequence
  SiRNA target sequence
aggatacacaaactgataaaata

SEQ ID NO: 57482 - DNA, 23 bp, Artificial sequence
  SiRNA target sequence
ggatacacaaactgataaaataa

SEQ ID NO: 57483 - DNA, 23 bp, Artificial sequence
  SiRNA target sequence
gatacacaaactgataaaataag

SEQ ID NO: 57484 - DNA, 23 bp, Artificial sequence
  SiRNA target sequence
atacacaaactgataaaataaga

SEQ ID NO: 57485 - DNA, 23 bp, Artificial sequence
  SiRNA target sequence
tacacaaactgataaaataagac

SEQ ID NO: 57486 - DNA, 23 bp, Artificial sequence
  SiRNA target sequence
acacaaactgataaaataagact

SEQ ID NO: 57487 - DNA, 23 bp, Artificial sequence
  SiRNA target sequence
cacaaactgataaaataagactg

SEQ ID NO: 57488 - DNA, 23 bp, Artificial sequence
  SiRNA target sequence
acaaactgataaaataagactga

SEQ ID NO: 57489 - DNA, 23 bp, Artificial sequence
  SiRNA target sequence
caaactgataaaataagactgat

SEQ ID NO: 57490 - DNA, 23 bp, Artificial sequence
  SiRNA target sequence
aaactgataaaataagactgata

SEQ ID NO: 57491 - DNA, 23 bp, Artificial sequence
  SiRNA target sequence
aactgataaaataagactgatag

SEQ ID NO: 57492 - DNA, 23 bp, Artificial sequence
  SiRNA target sequence
actgataaaataagactgataga

SEQ ID NO: 57493 - DNA, 23 bp, Artificial sequence
  SiRNA target sequence
ctgataaaataagactgatagat

SEQ ID NO: 57494 - DNA, 23 bp, Artificial sequence
  SiRNA target sequence
tgataaaataagactgatagatt

SEQ ID NO: 57495 - DNA, 23 bp, Artificial sequence
  SiRNA target sequence
gataaaataagactgatagattt

SEQ ID NO: 57496 - DNA, 23 bp, Artificial sequence
  SiRNA target sequence
ataaaataagactgatagatttt

SEQ ID NO: 57497 - DNA, 23 bp, Artificial sequence
  SiRNA target sequence
taaaataagactgatagatttta

SEQ ID NO: 57498 - DNA, 23 bp, Artificial sequence
  SiRNA target sequence
aaaataagactgatagattttaa

SEQ ID NO: 57499 - DNA, 23 bp, Artificial sequence
  SiRNA target sequence
aaataagactgatagattttaat

SEQ ID NO: 57500 - DNA, 23 bp, Artificial sequence
  SiRNA target sequence
aataagactgatagattttaatg

SEQ ID NO: 57501 - DNA, 23 bp, Artificial sequence
  SiRNA target sequence
ataagactgatagattttaatga

SEQ ID NO: 57502 - DNA, 23 bp, Artificial sequence
  SiRNA target sequence
taagactgatagattttaatgaa

SEQ ID NO: 57503 - DNA, 23 bp, Artificial sequence
  SiRNA target sequence
aagactgatagattttaatgaaa

SEQ ID NO: 57504 - DNA, 23 bp, Artificial sequence
  SiRNA target sequence
agactgatagattttaatgaaaa

SEQ ID NO: 57505 - DNA, 23 bp, Artificial sequence
  SiRNA target sequence
gactgatagattttaatgaaaag

SEQ ID NO: 57506 - DNA, 23 bp, Artificial sequence
  SiRNA target sequence
actgatagattttaatgaaaagc

SEQ ID NO: 57507 - DNA, 23 bp, Artificial sequence
  SiRNA target sequence
ctgatagattttaatgaaaagct

SEQ ID NO: 57508 - DNA, 23 bp, Artificial sequence
  SiRNA target sequence
tgatagattttaatgaaaagcta

SEQ ID NO: 57509 - DNA, 23 bp, Artificial sequence
  SiRNA target sequence
gatagattttaatgaaaagctag

SEQ ID NO: 57510 - DNA, 23 bp, Artificial sequence
  SiRNA target sequence
atagattttaatgaaaagctaga

SEQ ID NO: 57511 - DNA, 23 bp, Artificial sequence
  SiRNA target sequence
tagattttaatgaaaagctagaa

SEQ ID NO: 57512 - DNA, 23 bp, Artificial sequence
  SiRNA target sequence
agattttaatgaaaagctagaat

SEQ ID NO: 57513 - DNA, 23 bp, Artificial sequence
  SiRNA target sequence
gattttaatgaaaagctagaatt

SEQ ID NO: 57514 - DNA, 23 bp, Artificial sequence
  SiRNA target sequence
attttaatgaaaagctagaattt

SEQ ID NO: 57515 - DNA, 23 bp, Artificial sequence
  SiRNA target sequence
ttttaatgaaaagctagaattta

SEQ ID NO: 57516 - DNA, 23 bp, Artificial sequence
  SiRNA target sequence
tttaatgaaaagctagaatttag

SEQ ID NO: 57517 - DNA, 23 bp, Artificial sequence
  SiRNA target sequence
ttaatgaaaagctagaatttaga

SEQ ID NO: 57518 - DNA, 23 bp, Artificial sequence
  SiRNA target sequence
taatgaaaagctagaatttagaa

SEQ ID NO: 57519 - DNA, 23 bp, Artificial sequence
  SiRNA target sequence
aatgaaaagctagaatttagaaa

SEQ ID NO: 57520 - DNA, 23 bp, Artificial sequence
  SiRNA target sequence
atgaaaagctagaatttagaaat

SEQ ID NO: 57521 - DNA, 23 bp, Artificial sequence
  SiRNA target sequence
tgaaaagctagaatttagaaatg

SEQ ID NO: 57522 - DNA, 23 bp, Artificial sequence
  SiRNA target sequence
gaaaagctagaatttagaaatgt

SEQ ID NO: 57523 - DNA, 23 bp, Artificial sequence
  SiRNA target sequence
aaaagctagaatttagaaatgta

SEQ ID NO: 57524 - DNA, 23 bp, Artificial sequence
  SiRNA target sequence
aaagctagaatttagaaatgtat

SEQ ID NO: 57525 - DNA, 23 bp, Artificial sequence
  SiRNA target sequence
aagctagaatttagaaatgtatc

SEQ ID NO: 57526 - DNA, 23 bp, Artificial sequence
  SiRNA target sequence
agctagaatttagaaatgtatct

SEQ ID NO: 57527 - DNA, 23 bp, Artificial sequence
  SiRNA target sequence
gctagaatttagaaatgtatctt

SEQ ID NO: 57528 - DNA, 23 bp, Artificial sequence
  SiRNA target sequence
ctagaatttagaaatgtatcttt

SEQ ID NO: 57529 - DNA, 23 bp, Artificial sequence
  SiRNA target sequence
tagaatttagaaatgtatctttt

SEQ ID NO: 57530 - DNA, 23 bp, Artificial sequence
  SiRNA target sequence
agaatttagaaatgtatctttta

SEQ ID NO: 57531 - DNA, 23 bp, Artificial sequence
  SiRNA target sequence
gaatttagaaatgtatcttttag

SEQ ID NO: 57532 - DNA, 23 bp, Artificial sequence
  SiRNA target sequence
aatttagaaatgtatcttttagt

SEQ ID NO: 57533 - DNA, 23 bp, Artificial sequence
  SiRNA target sequence
atttagaaatgtatcttttagtt

SEQ ID NO: 57534 - DNA, 23 bp, Artificial sequence
  SiRNA target sequence
tttagaaatgtatcttttagtta

SEQ ID NO: 57535 - DNA, 23 bp, Artificial sequence
  SiRNA target sequence
ttagaaatgtatcttttagttat

SEQ ID NO: 57536 - DNA, 23 bp, Artificial sequence
  SiRNA target sequence
tagaaatgtatcttttagttatt

SEQ ID NO: 57537 - DNA, 23 bp, Artificial sequence
  SiRNA target sequence
agaaatgtatcttttagttattt

SEQ ID NO: 57538 - DNA, 23 bp, Artificial sequence
  SiRNA target sequence
gaaatgtatcttttagttattta

SEQ ID NO: 57539 - DNA, 23 bp, Artificial sequence
  SiRNA target sequence
aaatgtatcttttagttatttaa

SEQ ID NO: 57540 - DNA, 23 bp, Artificial sequence
  SiRNA target sequence
aatgtatcttttagttatttaaa

SEQ ID NO: 57541 - DNA, 23 bp, Artificial sequence
  SiRNA target sequence
atgtatcttttagttatttaaat

SEQ ID NO: 57542 - DNA, 23 bp, Artificial sequence
  SiRNA target sequence
tgtatcttttagttatttaaata

SEQ ID NO: 57543 - DNA, 23 bp, Artificial sequence
  SiRNA target sequence
gtatcttttagttatttaaataa

SEQ ID NO: 57544 - DNA, 23 bp, Artificial sequence
  SiRNA target sequence
tatcttttagttatttaaataag

SEQ ID NO: 57545 - DNA, 23 bp, Artificial sequence
  SiRNA target sequence
atcttttagttatttaaataagc

SEQ ID NO: 57546 - DNA, 23 bp, Artificial sequence
  SiRNA target sequence
tcttttagttatttaaataagcc

SEQ ID NO: 57547 - DNA, 23 bp, Artificial sequence
  SiRNA target sequence
cttttagttatttaaataagcct

SEQ ID NO: 57548 - DNA, 23 bp, Artificial sequence
  SiRNA target sequence
ttttagttatttaaataagccta

SEQ ID NO: 57549 - DNA, 23 bp, Artificial sequence
  SiRNA target sequence
tttagttatttaaataagcctat

SEQ ID NO: 57550 - DNA, 23 bp, Artificial sequence
  SiRNA target sequence
ttagttatttaaataagcctatt

SEQ ID NO: 57551 - DNA, 23 bp, Artificial sequence
  SiRNA target sequence
tagttatttaaataagcctattt

SEQ ID NO: 57552 - DNA, 23 bp, Artificial sequence
  SiRNA target sequence
agttatttaaataagcctatttt

SEQ ID NO: 57553 - DNA, 23 bp, Artificial sequence
  SiRNA target sequence
gttatttaaataagcctatttta

SEQ ID NO: 57554 - DNA, 23 bp, Artificial sequence
  SiRNA target sequence
ttatttaaataagcctattttag

SEQ ID NO: 57555 - DNA, 23 bp, Artificial sequence
  SiRNA target sequence
tatttaaataagcctattttagt

SEQ ID NO: 57556 - DNA, 23 bp, Artificial sequence
  SiRNA target sequence
atttaaataagcctattttagtg

SEQ ID NO: 57557 - DNA, 23 bp, Artificial sequence
  SiRNA target sequence
tttaaataagcctattttagtga

SEQ ID NO: 57558 - DNA, 23 bp, Artificial sequence
  SiRNA target sequence
ttaaataagcctattttagtgaa

SEQ ID NO: 57559 - DNA, 23 bp, Artificial sequence
  SiRNA target sequence
taaataagcctattttagtgaat

SEQ ID NO: 57560 - DNA, 23 bp, Artificial sequence
  SiRNA target sequence
aaataagcctattttagtgaatg

SEQ ID NO: 57561 - DNA, 23 bp, Artificial sequence
  SiRNA target sequence
aataagcctattttagtgaatgc

SEQ ID NO: 57562 - DNA, 23 bp, Artificial sequence
  SiRNA target sequence
ataagcctattttagtgaatgct

SEQ ID NO: 57563 - DNA, 23 bp, Artificial sequence
  SiRNA target sequence
taagcctattttagtgaatgcta

SEQ ID NO: 57564 - DNA, 23 bp, Artificial sequence
  SiRNA target sequence
aagcctattttagtgaatgctaa

SEQ ID NO: 57565 - DNA, 23 bp, Artificial sequence
  SiRNA target sequence
agcctattttagtgaatgctaat

SEQ ID NO: 57566 - DNA, 23 bp, Artificial sequence
  SiRNA target sequence
gcctattttagtgaatgctaatt

SEQ ID NO: 57567 - DNA, 23 bp, Artificial sequence
  SiRNA target sequence
cctattttagtgaatgctaattt

SEQ ID NO: 57568 - DNA, 23 bp, Artificial sequence
  SiRNA target sequence
ctattttagtgaatgctaatttc

SEQ ID NO: 57569 - DNA, 23 bp, Artificial sequence
  SiRNA target sequence
tattttagtgaatgctaatttcg

SEQ ID NO: 57570 - DNA, 23 bp, Artificial sequence
  SiRNA target sequence
attttagtgaatgctaatttcgt

SEQ ID NO: 57571 - DNA, 23 bp, Artificial sequence
  SiRNA target sequence
ttttagtgaatgctaatttcgtt

SEQ ID NO: 57572 - DNA, 23 bp, Artificial sequence
  SiRNA target sequence
tttagtgaatgctaatttcgtta

SEQ ID NO: 57573 - DNA, 23 bp, Artificial sequence
  SiRNA target sequence
ttagtgaatgctaatttcgttat

SEQ ID NO: 57574 - DNA, 23 bp, Artificial sequence
  SiRNA target sequence
tagtgaatgctaatttcgttatt

SEQ ID NO: 57575 - DNA, 23 bp, Artificial sequence
  SiRNA target sequence
agtgaatgctaatttcgttatta

SEQ ID NO: 57576 - DNA, 23 bp, Artificial sequence
  SiRNA target sequence
gtgaatgctaatttcgttattaa

SEQ ID NO: 57577 - DNA, 23 bp, Artificial sequence
  SiRNA target sequence
tgaatgctaatttcgttattaat

SEQ ID NO: 57578 - DNA, 23 bp, Artificial sequence
  SiRNA target sequence
gaatgctaatttcgttattaata

SEQ ID NO: 57579 - DNA, 23 bp, Artificial sequence
  SiRNA target sequence
aatgctaatttcgttattaataa

SEQ ID NO: 57580 - DNA, 23 bp, Artificial sequence
  SiRNA target sequence
atgctaatttcgttattaataaa

SEQ ID NO: 57581 - DNA, 23 bp, Artificial sequence
  SiRNA target sequence
tgctaatttcgttattaataaag

SEQ ID NO: 57582 - DNA, 23 bp, Artificial sequence
  SiRNA target sequence
gctaatttcgttattaataaagg

SEQ ID NO: 57583 - DNA, 23 bp, Artificial sequence
  SiRNA target sequence
ctaatttcgttattaataaaggg

SEQ ID NO: 57584 - DNA, 23 bp, Artificial sequence
  SiRNA target sequence
taatttcgttattaataaagggg

SEQ ID NO: 57585 - DNA, 23 bp, Artificial sequence
  SiRNA target sequence
aatttcgttattaataaagggga

SEQ ID NO: 57586 - DNA, 23 bp, Artificial sequence
  SiRNA target sequence
atttcgttattaataaaggggag

SEQ ID NO: 57587 - DNA, 23 bp, Artificial sequence
  SiRNA target sequence
tttcgttattaataaaggggagc

SEQ ID NO: 57588 - DNA, 23 bp, Artificial sequence
  SiRNA target sequence
ttcgttattaataaaggggagcg

SEQ ID NO: 57589 - DNA, 23 bp, Artificial sequence
  SiRNA target sequence
tcgttattaataaaggggagcgt

SEQ ID NO: 57590 - DNA, 23 bp, Artificial sequence
  SiRNA target sequence
cgttattaataaaggggagcgtg

SEQ ID NO: 57591 - DNA, 23 bp, Artificial sequence
  SiRNA target sequence
gttattaataaaggggagcgtgt

SEQ ID NO: 57592 - DNA, 23 bp, Artificial sequence
  SiRNA target sequence
ttattaataaaggggagcgtgtt

SEQ ID NO: 57593 - DNA, 23 bp, Artificial sequence
  SiRNA target sequence
tattaataaaggggagcgtgttg

SEQ ID NO: 57594 - DNA, 23 bp, Artificial sequence
  SiRNA target sequence
attaataaaggggagcgtgttgc

SEQ ID NO: 57595 - DNA, 23 bp, Artificial sequence
  SiRNA target sequence
ttaataaaggggagcgtgttgct

SEQ ID NO: 57596 - DNA, 23 bp, Artificial sequence
  SiRNA target sequence
taataaaggggagcgtgttgcta

SEQ ID NO: 57597 - DNA, 23 bp, Artificial sequence
  SiRNA target sequence
aataaaggggagcgtgttgctat

SEQ ID NO: 57598 - DNA, 23 bp, Artificial sequence
  SiRNA target sequence
ataaaggggagcgtgttgctatt

SEQ ID NO: 57599 - DNA, 23 bp, Artificial sequence
  SiRNA target sequence
taaaggggagcgtgttgctatta

SEQ ID NO: 57600 - DNA, 23 bp, Artificial sequence
  SiRNA target sequence
aaaggggagcgtgttgctattat

SEQ ID NO: 57601 - DNA, 23 bp, Artificial sequence
  SiRNA target sequence
aaggggagcgtgttgctattata

SEQ ID NO: 57602 - DNA, 23 bp, Artificial sequence
  SiRNA target sequence
aggggagcgtgttgctattatag

SEQ ID NO: 57603 - DNA, 23 bp, Artificial sequence
  SiRNA target sequence
ggggagcgtgttgctattatagg

SEQ ID NO: 57604 - DNA, 23 bp, Artificial sequence
  SiRNA target sequence
gggagcgtgttgctattatagga

SEQ ID NO: 57605 - DNA, 23 bp, Artificial sequence
  SiRNA target sequence
ggagcgtgttgctattataggaa

SEQ ID NO: 57606 - DNA, 23 bp, Artificial sequence
  SiRNA target sequence
gagcgtgttgctattataggaaa

SEQ ID NO: 57607 - DNA, 23 bp, Artificial sequence
  SiRNA target sequence
agcgtgttgctattataggaaaa

SEQ ID NO: 57608 - DNA, 23 bp, Artificial sequence
  SiRNA target sequence
gcgtgttgctattataggaaaaa

SEQ ID NO: 57609 - DNA, 23 bp, Artificial sequence
  SiRNA target sequence
cgtgttgctattataggaaaaaa

SEQ ID NO: 57610 - DNA, 23 bp, Artificial sequence
  SiRNA target sequence
gtgttgctattataggaaaaaat

SEQ ID NO: 57611 - DNA, 23 bp, Artificial sequence
  SiRNA target sequence
tgttgctattataggaaaaaatg

SEQ ID NO: 57612 - DNA, 23 bp, Artificial sequence
  SiRNA target sequence
gttgctattataggaaaaaatgg

SEQ ID NO: 57613 - DNA, 23 bp, Artificial sequence
  SiRNA target sequence
ttgctattataggaaaaaatgga

SEQ ID NO: 57614 - DNA, 23 bp, Artificial sequence
  SiRNA target sequence
tgctattataggaaaaaatggaa

SEQ ID NO: 57615 - DNA, 23 bp, Artificial sequence
  SiRNA target sequence
gctattataggaaaaaatggaac

SEQ ID NO: 57616 - DNA, 23 bp, Artificial sequence
  SiRNA target sequence
ctattataggaaaaaatggaaca

SEQ ID NO: 57617 - DNA, 23 bp, Artificial sequence
  SiRNA target sequence
tattataggaaaaaatggaacag

SEQ ID NO: 57618 - DNA, 23 bp, Artificial sequence
  SiRNA target sequence
attataggaaaaaatggaacagg

SEQ ID NO: 57619 - DNA, 23 bp, Artificial sequence
  SiRNA target sequence
ttataggaaaaaatggaacaggt

SEQ ID NO: 57620 - DNA, 23 bp, Artificial sequence
  SiRNA target sequence
tataggaaaaaatggaacaggta

SEQ ID NO: 57621 - DNA, 23 bp, Artificial sequence
  SiRNA target sequence
ataggaaaaaatggaacaggtaa

SEQ ID NO: 57622 - DNA, 23 bp, Artificial sequence
  SiRNA target sequence
taggaaaaaatggaacaggtaaa

SEQ ID NO: 57623 - DNA, 23 bp, Artificial sequence
  SiRNA target sequence
aggaaaaaatggaacaggtaaaa

SEQ ID NO: 57624 - DNA, 23 bp, Artificial sequence
  SiRNA target sequence
ggaaaaaatggaacaggtaaaag

SEQ ID NO: 57625 - DNA, 23 bp, Artificial sequence
  SiRNA target sequence
gaaaaaatggaacaggtaaaagt

SEQ ID NO: 57626 - DNA, 23 bp, Artificial sequence
  SiRNA target sequence
aaaaaatggaacaggtaaaagta

SEQ ID NO: 57627 - DNA, 23 bp, Artificial sequence
  SiRNA target sequence
aaaaatggaacaggtaaaagtac

SEQ ID NO: 57628 - DNA, 23 bp, Artificial sequence
  SiRNA target sequence
aaaatggaacaggtaaaagtaca

SEQ ID NO: 57629 - DNA, 23 bp, Artificial sequence
  SiRNA target sequence
aaatggaacaggtaaaagtacaa

SEQ ID NO: 57630 - DNA, 23 bp, Artificial sequence
  SiRNA target sequence
aatggaacaggtaaaagtacaat

SEQ ID NO: 57631 - DNA, 23 bp, Artificial sequence
  SiRNA target sequence
atggaacaggtaaaagtacaata

SEQ ID NO: 57632 - DNA, 23 bp, Artificial sequence
  SiRNA target sequence
tggaacaggtaaaagtacaataa

SEQ ID NO: 57633 - DNA, 23 bp, Artificial sequence
  SiRNA target sequence
ggaacaggtaaaagtacaataat

SEQ ID NO: 57634 - DNA, 23 bp, Artificial sequence
  SiRNA target sequence
gaacaggtaaaagtacaataata

SEQ ID NO: 57635 - DNA, 23 bp, Artificial sequence
  SiRNA target sequence
aacaggtaaaagtacaataataa

SEQ ID NO: 57636 - DNA, 23 bp, Artificial sequence
  SiRNA target sequence
acaggtaaaagtacaataataaa

SEQ ID NO: 57637 - DNA, 23 bp, Artificial sequence
  SiRNA target sequence
caggtaaaagtacaataataaaa

SEQ ID NO: 57638 - DNA, 23 bp, Artificial sequence
  SiRNA target sequence
aggtaaaagtacaataataaaat

SEQ ID NO: 57639 - DNA, 23 bp, Artificial sequence
  SiRNA target sequence
ggtaaaagtacaataataaaatt

SEQ ID NO: 57640 - DNA, 23 bp, Artificial sequence
  SiRNA target sequence
gtaaaagtacaataataaaattg

SEQ ID NO: 57641 - DNA, 23 bp, Artificial sequence
  SiRNA target sequence
taaaagtacaataataaaattgt

SEQ ID NO: 57642 - DNA, 23 bp, Artificial sequence
  SiRNA target sequence
aaaagtacaataataaaattgtt

SEQ ID NO: 57643 - DNA, 23 bp, Artificial sequence
  SiRNA target sequence
aaagtacaataataaaattgtta

SEQ ID NO: 57644 - DNA, 23 bp, Artificial sequence
  SiRNA target sequence
aagtacaataataaaattgttaa

SEQ ID NO: 57645 - DNA, 23 bp, Artificial sequence
  SiRNA target sequence
agtacaataataaaattgttaat

SEQ ID NO: 57646 - DNA, 23 bp, Artificial sequence
  SiRNA target sequence
gtacaataataaaattgttaatg

SEQ ID NO: 57647 - DNA, 23 bp, Artificial sequence
  SiRNA target sequence
tacaataataaaattgttaatga

SEQ ID NO: 57648 - DNA, 23 bp, Artificial sequence
  SiRNA target sequence
acaataataaaattgttaatgaa

SEQ ID NO: 57649 - DNA, 23 bp, Artificial sequence
  SiRNA target sequence
caataataaaattgttaatgaaa

SEQ ID NO: 57650 - DNA, 23 bp, Artificial sequence
  SiRNA target sequence
aataataaaattgttaatgaaat

SEQ ID NO: 57651 - DNA, 23 bp, Artificial sequence
  SiRNA target sequence
ataataaaattgttaatgaaatt

SEQ ID NO: 57652 - DNA, 23 bp, Artificial sequence
  SiRNA target sequence
taataaaattgttaatgaaattt

SEQ ID NO: 57653 - DNA, 23 bp, Artificial sequence
  SiRNA target sequence
aataaaattgttaatgaaatttt

SEQ ID NO: 57654 - DNA, 23 bp, Artificial sequence
  SiRNA target sequence
ataaaattgttaatgaaatttta

SEQ ID NO: 57655 - DNA, 23 bp, Artificial sequence
  SiRNA target sequence
taaaattgttaatgaaattttat

SEQ ID NO: 57656 - DNA, 23 bp, Artificial sequence
  SiRNA target sequence
aaaattgttaatgaaattttata

SEQ ID NO: 57657 - DNA, 23 bp, Artificial sequence
  SiRNA target sequence
aaattgttaatgaaattttataa

SEQ ID NO: 57658 - DNA, 23 bp, Artificial sequence
  SiRNA target sequence
aattgttaatgaaattttataaa

SEQ ID NO: 57659 - DNA, 23 bp, Artificial sequence
  SiRNA target sequence
attgttaatgaaattttataaat

SEQ ID NO: 57660 - DNA, 23 bp, Artificial sequence
  SiRNA target sequence
ttgttaatgaaattttataaata

SEQ ID NO: 57661 - DNA, 23 bp, Artificial sequence
  SiRNA target sequence
tgttaatgaaattttataaatat

SEQ ID NO: 57662 - DNA, 23 bp, Artificial sequence
  SiRNA target sequence
gttaatgaaattttataaatatg

SEQ ID NO: 57663 - DNA, 23 bp, Artificial sequence
  SiRNA target sequence
ttaatgaaattttataaatatga

SEQ ID NO: 57664 - DNA, 23 bp, Artificial sequence
  SiRNA target sequence
taatgaaattttataaatatgat

SEQ ID NO: 57665 - DNA, 23 bp, Artificial sequence
  SiRNA target sequence
aatgaaattttataaatatgatg

SEQ ID NO: 57666 - DNA, 23 bp, Artificial sequence
  SiRNA target sequence
atgaaattttataaatatgatgg

SEQ ID NO: 57667 - DNA, 23 bp, Artificial sequence
  SiRNA target sequence
tgaaattttataaatatgatgga

SEQ ID NO: 57668 - DNA, 23 bp, Artificial sequence
  SiRNA target sequence
gaaattttataaatatgatggag

SEQ ID NO: 57669 - DNA, 23 bp, Artificial sequence
  SiRNA target sequence
aaattttataaatatgatggaga

SEQ ID NO: 57670 - DNA, 23 bp, Artificial sequence
  SiRNA target sequence
aattttataaatatgatggagat

SEQ ID NO: 57671 - DNA, 23 bp, Artificial sequence
  SiRNA target sequence
attttataaatatgatggagata

SEQ ID NO: 57672 - DNA, 23 bp, Artificial sequence
  SiRNA target sequence
ttttataaatatgatggagatat

SEQ ID NO: 57673 - DNA, 23 bp, Artificial sequence
  SiRNA target sequence
tttataaatatgatggagatata

SEQ ID NO: 57674 - DNA, 23 bp, Artificial sequence
  SiRNA target sequence
ttataaatatgatggagatatat

SEQ ID NO: 57675 - DNA, 23 bp, Artificial sequence
  SiRNA target sequence
tataaatatgatggagatatatt

SEQ ID NO: 57676 - DNA, 23 bp, Artificial sequence
  SiRNA target sequence
ataaatatgatggagatatatta

SEQ ID NO: 57677 - DNA, 23 bp, Artificial sequence
  SiRNA target sequence
taaatatgatggagatatattaa

SEQ ID NO: 57678 - DNA, 23 bp, Artificial sequence
  SiRNA target sequence
aaatatgatggagatatattaat

SEQ ID NO: 57679 - DNA, 23 bp, Artificial sequence
  SiRNA target sequence
aatatgatggagatatattaatt

SEQ ID NO: 57680 - DNA, 23 bp, Artificial sequence
  SiRNA target sequence
atatgatggagatatattaattg

SEQ ID NO: 57681 - DNA, 23 bp, Artificial sequence
  SiRNA target sequence
tatgatggagatatattaattga

SEQ ID NO: 57682 - DNA, 23 bp, Artificial sequence
  SiRNA target sequence
atgatggagatatattaattgat

SEQ ID NO: 57683 - DNA, 23 bp, Artificial sequence
  SiRNA target sequence
tgatggagatatattaattgatg

SEQ ID NO: 57684 - DNA, 23 bp, Artificial sequence
  SiRNA target sequence
gatggagatatattaattgatga

SEQ ID NO: 57685 - DNA, 23 bp, Artificial sequence
  SiRNA target sequence
atggagatatattaattgatgat

SEQ ID NO: 57686 - DNA, 23 bp, Artificial sequence
  SiRNA target sequence
tggagatatattaattgatgata

SEQ ID NO: 57687 - DNA, 23 bp, Artificial sequence
  SiRNA target sequence
ggagatatattaattgatgatac

SEQ ID NO: 57688 - DNA, 23 bp, Artificial sequence
  SiRNA target sequence
gagatatattaattgatgataca

SEQ ID NO: 57689 - DNA, 23 bp, Artificial sequence
  SiRNA target sequence
agatatattaattgatgatacag

SEQ ID NO: 57690 - DNA, 23 bp, Artificial sequence
  SiRNA target sequence
gatatattaattgatgatacaga

SEQ ID NO: 57691 - DNA, 23 bp, Artificial sequence
  SiRNA target sequence
atatattaattgatgatacagaa

SEQ ID NO: 57692 - DNA, 23 bp, Artificial sequence
  SiRNA target sequence
tatattaattgatgatacagaaa

SEQ ID NO: 57693 - DNA, 23 bp, Artificial sequence
  SiRNA target sequence
atattaattgatgatacagaaat

SEQ ID NO: 57694 - DNA, 23 bp, Artificial sequence
  SiRNA target sequence
tattaattgatgatacagaaata

SEQ ID NO: 57695 - DNA, 23 bp, Artificial sequence
  SiRNA target sequence
attaattgatgatacagaaatag

SEQ ID NO: 57696 - DNA, 23 bp, Artificial sequence
  SiRNA target sequence
ttaattgatgatacagaaataga

SEQ ID NO: 57697 - DNA, 23 bp, Artificial sequence
  SiRNA target sequence
taattgatgatacagaaatagat

SEQ ID NO: 57698 - DNA, 23 bp, Artificial sequence
  SiRNA target sequence
aattgatgatacagaaatagata

SEQ ID NO: 57699 - DNA, 23 bp, Artificial sequence
  SiRNA target sequence
attgatgatacagaaatagataa

SEQ ID NO: 57700 - DNA, 23 bp, Artificial sequence
  SiRNA target sequence
ttgatgatacagaaatagataat

SEQ ID NO: 57701 - DNA, 23 bp, Artificial sequence
  SiRNA target sequence
tgatgatacagaaatagataata

SEQ ID NO: 57702 - DNA, 23 bp, Artificial sequence
  SiRNA target sequence
gatgatacagaaatagataatat

SEQ ID NO: 57703 - DNA, 23 bp, Artificial sequence
  SiRNA target sequence
atgatacagaaatagataatatt

SEQ ID NO: 57704 - DNA, 23 bp, Artificial sequence
  SiRNA target sequence
tgatacagaaatagataatattt

SEQ ID NO: 57705 - DNA, 23 bp, Artificial sequence
  SiRNA target sequence
gatacagaaatagataatatttc

SEQ ID NO: 57706 - DNA, 23 bp, Artificial sequence
  SiRNA target sequence
atacagaaatagataatatttcg

SEQ ID NO: 57707 - DNA, 23 bp, Artificial sequence
  SiRNA target sequence
tacagaaatagataatatttcgg

SEQ ID NO: 57708 - DNA, 23 bp, Artificial sequence
  SiRNA target sequence
acagaaatagataatatttcgga

SEQ ID NO: 57709 - DNA, 23 bp, Artificial sequence
  SiRNA target sequence
cagaaatagataatatttcggat

SEQ ID NO: 57710 - DNA, 23 bp, Artificial sequence
  SiRNA target sequence
agaaatagataatatttcggata

SEQ ID NO: 57711 - DNA, 23 bp, Artificial sequence
  SiRNA target sequence
gaaatagataatatttcggatag

SEQ ID NO: 57712 - DNA, 23 bp, Artificial sequence
  SiRNA target sequence
aaatagataatatttcggataga

SEQ ID NO: 57713 - DNA, 23 bp, Artificial sequence
  SiRNA target sequence
aatagataatatttcggatagaa

SEQ ID NO: 57714 - DNA, 23 bp, Artificial sequence
  SiRNA target sequence
atagataatatttcggatagaag

SEQ ID NO: 57715 - DNA, 23 bp, Artificial sequence
  SiRNA target sequence
tagataatatttcggatagaagt

SEQ ID NO: 57716 - DNA, 23 bp, Artificial sequence
  SiRNA target sequence
agataatatttcggatagaagtt

SEQ ID NO: 57717 - DNA, 23 bp, Artificial sequence
  SiRNA target sequence
gataatatttcggatagaagtta

SEQ ID NO: 57718 - DNA, 23 bp, Artificial sequence
  SiRNA target sequence
ataatatttcggatagaagttac

SEQ ID NO: 57719 - DNA, 23 bp, Artificial sequence
  SiRNA target sequence
taatatttcggatagaagttaca

SEQ ID NO: 57720 - DNA, 23 bp, Artificial sequence
  SiRNA target sequence
aatatttcggatagaagttacag

SEQ ID NO: 57721 - DNA, 23 bp, Artificial sequence
  SiRNA target sequence
atatttcggatagaagttacaga

SEQ ID NO: 57722 - DNA, 23 bp, Artificial sequence
  SiRNA target sequence
tatttcggatagaagttacagaa

SEQ ID NO: 57723 - DNA, 23 bp, Artificial sequence
  SiRNA target sequence
atttcggatagaagttacagaag

SEQ ID NO: 57724 - DNA, 23 bp, Artificial sequence
  SiRNA target sequence
tttcggatagaagttacagaagt

SEQ ID NO: 57725 - DNA, 23 bp, Artificial sequence
  SiRNA target sequence
ttcggatagaagttacagaagtt

SEQ ID NO: 57726 - DNA, 23 bp, Artificial sequence
  SiRNA target sequence
tcggatagaagttacagaagttt

SEQ ID NO: 57727 - DNA, 23 bp, Artificial sequence
  SiRNA target sequence
cggatagaagttacagaagttta

SEQ ID NO: 57728 - DNA, 23 bp, Artificial sequence
  SiRNA target sequence
ggatagaagttacagaagtttaa

SEQ ID NO: 57729 - DNA, 23 bp, Artificial sequence
  SiRNA target sequence
gatagaagttacagaagtttaat

SEQ ID NO: 57730 - DNA, 23 bp, Artificial sequence
  SiRNA target sequence
atagaagttacagaagtttaata

SEQ ID NO: 57731 - DNA, 23 bp, Artificial sequence
  SiRNA target sequence
tagaagttacagaagtttaatat

SEQ ID NO: 57732 - DNA, 23 bp, Artificial sequence
  SiRNA target sequence
agaagttacagaagtttaatatc

SEQ ID NO: 57733 - DNA, 23 bp, Artificial sequence
  SiRNA target sequence
gaagttacagaagtttaatatca

SEQ ID NO: 57734 - DNA, 23 bp, Artificial sequence
  SiRNA target sequence
aagttacagaagtttaatatcat

SEQ ID NO: 57735 - DNA, 23 bp, Artificial sequence
  SiRNA target sequence
agttacagaagtttaatatcata

SEQ ID NO: 57736 - DNA, 23 bp, Artificial sequence
  SiRNA target sequence
gttacagaagtttaatatcatat

SEQ ID NO: 57737 - DNA, 23 bp, Artificial sequence
  SiRNA target sequence
ttacagaagtttaatatcatatg

SEQ ID NO: 57738 - DNA, 23 bp, Artificial sequence
  SiRNA target sequence
tacagaagtttaatatcatatgc

SEQ ID NO: 57739 - DNA, 23 bp, Artificial sequence
  SiRNA target sequence
acagaagtttaatatcatatgca

SEQ ID NO: 57740 - DNA, 23 bp, Artificial sequence
  SiRNA target sequence
cagaagtttaatatcatatgcaa

SEQ ID NO: 57741 - DNA, 23 bp, Artificial sequence
  SiRNA target sequence
agaagtttaatatcatatgcaac

SEQ ID NO: 57742 - DNA, 23 bp, Artificial sequence
  SiRNA target sequence
gaagtttaatatcatatgcaaca

SEQ ID NO: 57743 - DNA, 23 bp, Artificial sequence
  SiRNA target sequence
aagtttaatatcatatgcaacac

SEQ ID NO: 57744 - DNA, 23 bp, Artificial sequence
  SiRNA target sequence
agtttaatatcatatgcaacaca

SEQ ID NO: 57745 - DNA, 23 bp, Artificial sequence
  SiRNA target sequence
gtttaatatcatatgcaacacaa

SEQ ID NO: 57746 - DNA, 23 bp, Artificial sequence
  SiRNA target sequence
tttaatatcatatgcaacacaaa

SEQ ID NO: 57747 - DNA, 23 bp, Artificial sequence
  SiRNA target sequence
ttaatatcatatgcaacacaaaa

SEQ ID NO: 57748 - DNA, 23 bp, Artificial sequence
  SiRNA target sequence
taatatcatatgcaacacaaaac

SEQ ID NO: 57749 - DNA, 23 bp, Artificial sequence
  SiRNA target sequence
aatatcatatgcaacacaaaaca

SEQ ID NO: 57750 - DNA, 23 bp, Artificial sequence
  SiRNA target sequence
atatcatatgcaacacaaaacac

SEQ ID NO: 57751 - DNA, 23 bp, Artificial sequence
  SiRNA target sequence
tatcatatgcaacacaaaacacg

SEQ ID NO: 57752 - DNA, 23 bp, Artificial sequence
  SiRNA target sequence
atcatatgcaacacaaaacacgt

SEQ ID NO: 57753 - DNA, 23 bp, Artificial sequence
  SiRNA target sequence
tcatatgcaacacaaaacacgtt

SEQ ID NO: 57754 - DNA, 23 bp, Artificial sequence
  SiRNA target sequence
catatgcaacacaaaacacgttc

SEQ ID NO: 57755 - DNA, 23 bp, Artificial sequence
  SiRNA target sequence
atatgcaacacaaaacacgttct

SEQ ID NO: 57756 - DNA, 23 bp, Artificial sequence
  SiRNA target sequence
tatgcaacacaaaacacgttctt

SEQ ID NO: 57757 - DNA, 23 bp, Artificial sequence
  SiRNA target sequence
atgcaacacaaaacacgttctta

SEQ ID NO: 57758 - DNA, 23 bp, Artificial sequence
  SiRNA target sequence
tgcaacacaaaacacgttcttat

SEQ ID NO: 57759 - DNA, 23 bp, Artificial sequence
  SiRNA target sequence
gcaacacaaaacacgttcttatt

SEQ ID NO: 57760 - DNA, 23 bp, Artificial sequence
  SiRNA target sequence
caacacaaaacacgttcttattc

SEQ ID NO: 57761 - DNA, 23 bp, Artificial sequence
  SiRNA target sequence
aacacaaaacacgttcttattcg

SEQ ID NO: 57762 - DNA, 23 bp, Artificial sequence
  SiRNA target sequence
acacaaaacacgttcttattcga

SEQ ID NO: 57763 - DNA, 23 bp, Artificial sequence
  SiRNA target sequence
cacaaaacacgttcttattcgat

SEQ ID NO: 57764 - DNA, 23 bp, Artificial sequence
  SiRNA target sequence
acaaaacacgttcttattcgata

SEQ ID NO: 57765 - DNA, 23 bp, Artificial sequence
  SiRNA target sequence
caaaacacgttcttattcgataa

SEQ ID NO: 57766 - DNA, 23 bp, Artificial sequence
  SiRNA target sequence
aaaacacgttcttattcgataat

SEQ ID NO: 57767 - DNA, 23 bp, Artificial sequence
  SiRNA target sequence
aaacacgttcttattcgataata

SEQ ID NO: 57768 - DNA, 23 bp, Artificial sequence
  SiRNA target sequence
aacacgttcttattcgataatac

SEQ ID NO: 57769 - DNA, 23 bp, Artificial sequence
  SiRNA target sequence
acacgttcttattcgataatact

SEQ ID NO: 57770 - DNA, 23 bp, Artificial sequence
  SiRNA target sequence
cacgttcttattcgataatactg

SEQ ID NO: 57771 - DNA, 23 bp, Artificial sequence
  SiRNA target sequence
acgttcttattcgataatactgt

SEQ ID NO: 57772 - DNA, 23 bp, Artificial sequence
  SiRNA target sequence
cgttcttattcgataatactgtg

SEQ ID NO: 57773 - DNA, 23 bp, Artificial sequence
  SiRNA target sequence
gttcttattcgataatactgtga

SEQ ID NO: 57774 - DNA, 23 bp, Artificial sequence
  SiRNA target sequence
ttcttattcgataatactgtgac

SEQ ID NO: 57775 - DNA, 23 bp, Artificial sequence
  SiRNA target sequence
tcttattcgataatactgtgaca

SEQ ID NO: 57776 - DNA, 23 bp, Artificial sequence
  SiRNA target sequence
cttattcgataatactgtgacat

SEQ ID NO: 57777 - DNA, 23 bp, Artificial sequence
  SiRNA target sequence
ttattcgataatactgtgacata

SEQ ID NO: 57778 - DNA, 23 bp, Artificial sequence
  SiRNA target sequence
tattcgataatactgtgacatac

SEQ ID NO: 57779 - DNA, 23 bp, Artificial sequence
  SiRNA target sequence
attcgataatactgtgacataca

SEQ ID NO: 57780 - DNA, 23 bp, Artificial sequence
  SiRNA target sequence
ttcgataatactgtgacatacaa

SEQ ID NO: 57781 - DNA, 23 bp, Artificial sequence
  SiRNA target sequence
tcgataatactgtgacatacaat

SEQ ID NO: 57782 - DNA, 23 bp, Artificial sequence
  SiRNA target sequence
cgataatactgtgacatacaata

SEQ ID NO: 57783 - DNA, 23 bp, Artificial sequence
  SiRNA target sequence
gataatactgtgacatacaatat

SEQ ID NO: 57784 - DNA, 23 bp, Artificial sequence
  SiRNA target sequence
ataatactgtgacatacaatata

SEQ ID NO: 57785 - DNA, 23 bp, Artificial sequence
  SiRNA target sequence
taatactgtgacatacaatatat

SEQ ID NO: 57786 - DNA, 23 bp, Artificial sequence
  SiRNA target sequence
aatactgtgacatacaatatatt

SEQ ID NO: 57787 - DNA, 23 bp, Artificial sequence
  SiRNA target sequence
atactgtgacatacaatatattt

SEQ ID NO: 57788 - DNA, 23 bp, Artificial sequence
  SiRNA target sequence
tactgtgacatacaatatatttt

SEQ ID NO: 57789 - DNA, 23 bp, Artificial sequence
  SiRNA target sequence
actgtgacatacaatatatttta

SEQ ID NO: 57790 - DNA, 23 bp, Artificial sequence
  SiRNA target sequence
ctgtgacatacaatatattttac

SEQ ID NO: 57791 - DNA, 23 bp, Artificial sequence
  SiRNA target sequence
tgtgacatacaatatattttacg

SEQ ID NO: 57792 - DNA, 23 bp, Artificial sequence
  SiRNA target sequence
gtgacatacaatatattttacgg

SEQ ID NO: 57793 - DNA, 23 bp, Artificial sequence
  SiRNA target sequence
tgacatacaatatattttacggg

SEQ ID NO: 57794 - DNA, 23 bp, Artificial sequence
  SiRNA target sequence
gacatacaatatattttacggga

SEQ ID NO: 57795 - DNA, 23 bp, Artificial sequence
  SiRNA target sequence
acatacaatatattttacgggac

SEQ ID NO: 57796 - DNA, 23 bp, Artificial sequence
  SiRNA target sequence
catacaatatattttacgggact

SEQ ID NO: 57797 - DNA, 23 bp, Artificial sequence
  SiRNA target sequence
atacaatatattttacgggacta

SEQ ID NO: 57798 - DNA, 23 bp, Artificial sequence
  SiRNA target sequence
tacaatatattttacgggactaa

SEQ ID NO: 57799 - DNA, 23 bp, Artificial sequence
  SiRNA target sequence
acaatatattttacgggactaaa

SEQ ID NO: 57800 - DNA, 23 bp, Artificial sequence
  SiRNA target sequence
caatatattttacgggactaaaa

SEQ ID NO: 57801 - DNA, 23 bp, Artificial sequence
  SiRNA target sequence
aatatattttacgggactaaaaa

SEQ ID NO: 57802 - DNA, 23 bp, Artificial sequence
  SiRNA target sequence
atatattttacgggactaaaaac

SEQ ID NO: 57803 - DNA, 23 bp, Artificial sequence
  SiRNA target sequence
tatattttacgggactaaaaacg

SEQ ID NO: 57804 - DNA, 23 bp, Artificial sequence
  SiRNA target sequence
atattttacgggactaaaaacgt

SEQ ID NO: 57805 - DNA, 23 bp, Artificial sequence
  SiRNA target sequence
tattttacgggactaaaaacgta

SEQ ID NO: 57806 - DNA, 23 bp, Artificial sequence
  SiRNA target sequence
attttacgggactaaaaacgtaa

SEQ ID NO: 57807 - DNA, 23 bp, Artificial sequence
  SiRNA target sequence
ttttacgggactaaaaacgtaac

SEQ ID NO: 57808 - DNA, 23 bp, Artificial sequence
  SiRNA target sequence
tttacgggactaaaaacgtaaca

SEQ ID NO: 57809 - DNA, 23 bp, Artificial sequence
  SiRNA target sequence
ttacgggactaaaaacgtaacag

SEQ ID NO: 57810 - DNA, 23 bp, Artificial sequence
  SiRNA target sequence
tacgggactaaaaacgtaacaga

SEQ ID NO: 57811 - DNA, 23 bp, Artificial sequence
  SiRNA target sequence
acgggactaaaaacgtaacagaa

SEQ ID NO: 57812 - DNA, 23 bp, Artificial sequence
  SiRNA target sequence
cgggactaaaaacgtaacagaaa

SEQ ID NO: 57813 - DNA, 23 bp, Artificial sequence
  SiRNA target sequence
gggactaaaaacgtaacagaaaa

SEQ ID NO: 57814 - DNA, 23 bp, Artificial sequence
  SiRNA target sequence
ggactaaaaacgtaacagaaaaa

SEQ ID NO: 57815 - DNA, 23 bp, Artificial sequence
  SiRNA target sequence
gactaaaaacgtaacagaaaaag

SEQ ID NO: 57816 - DNA, 23 bp, Artificial sequence
  SiRNA target sequence
actaaaaacgtaacagaaaaaga

SEQ ID NO: 57817 - DNA, 23 bp, Artificial sequence
  SiRNA target sequence
ctaaaaacgtaacagaaaaagaa

SEQ ID NO: 57818 - DNA, 23 bp, Artificial sequence
  SiRNA target sequence
taaaaacgtaacagaaaaagaag

SEQ ID NO: 57819 - DNA, 23 bp, Artificial sequence
  SiRNA target sequence
aaaaacgtaacagaaaaagaagt

SEQ ID NO: 57820 - DNA, 23 bp, Artificial sequence
  SiRNA target sequence
aaaacgtaacagaaaaagaagtt

SEQ ID NO: 57821 - DNA, 23 bp, Artificial sequence
  SiRNA target sequence
aaacgtaacagaaaaagaagttt

SEQ ID NO: 57822 - DNA, 23 bp, Artificial sequence
  SiRNA target sequence
aacgtaacagaaaaagaagtttt

SEQ ID NO: 57823 - DNA, 23 bp, Artificial sequence
  SiRNA target sequence
acgtaacagaaaaagaagtttta

SEQ ID NO: 57824 - DNA, 23 bp, Artificial sequence
  SiRNA target sequence
cgtaacagaaaaagaagttttag

SEQ ID NO: 57825 - DNA, 23 bp, Artificial sequence
  SiRNA target sequence
gtaacagaaaaagaagttttaga

SEQ ID NO: 57826 - DNA, 23 bp, Artificial sequence
  SiRNA target sequence
taacagaaaaagaagttttagaa

SEQ ID NO: 57827 - DNA, 23 bp, Artificial sequence
  SiRNA target sequence
aacagaaaaagaagttttagaat

SEQ ID NO: 57828 - DNA, 23 bp, Artificial sequence
  SiRNA target sequence
acagaaaaagaagttttagaatt

SEQ ID NO: 57829 - DNA, 23 bp, Artificial sequence
  SiRNA target sequence
cagaaaaagaagttttagaatta

SEQ ID NO: 57830 - DNA, 23 bp, Artificial sequence
  SiRNA target sequence
agaaaaagaagttttagaattag

SEQ ID NO: 57831 - DNA, 23 bp, Artificial sequence
  SiRNA target sequence
gaaaaagaagttttagaattagc

SEQ ID NO: 57832 - DNA, 23 bp, Artificial sequence
  SiRNA target sequence
aaaaagaagttttagaattagcc

SEQ ID NO: 57833 - DNA, 23 bp, Artificial sequence
  SiRNA target sequence
aaaagaagttttagaattagcca

SEQ ID NO: 57834 - DNA, 23 bp, Artificial sequence
  SiRNA target sequence
aaagaagttttagaattagccaa

SEQ ID NO: 57835 - DNA, 23 bp, Artificial sequence
  SiRNA target sequence
aagaagttttagaattagccaaa

SEQ ID NO: 57836 - DNA, 23 bp, Artificial sequence
  SiRNA target sequence
agaagttttagaattagccaaaa

SEQ ID NO: 57837 - DNA, 23 bp, Artificial sequence
  SiRNA target sequence
gaagttttagaattagccaaaaa

SEQ ID NO: 57838 - DNA, 23 bp, Artificial sequence
  SiRNA target sequence
aagttttagaattagccaaaaaa

SEQ ID NO: 57839 - DNA, 23 bp, Artificial sequence
  SiRNA target sequence
agttttagaattagccaaaaaaa

SEQ ID NO: 57840 - DNA, 23 bp, Artificial sequence
  SiRNA target sequence
gttttagaattagccaaaaaaat

SEQ ID NO: 57841 - DNA, 23 bp, Artificial sequence
  SiRNA target sequence
ttttagaattagccaaaaaaata

SEQ ID NO: 57842 - DNA, 23 bp, Artificial sequence
  SiRNA target sequence
tttagaattagccaaaaaaatag

SEQ ID NO: 57843 - DNA, 23 bp, Artificial sequence
  SiRNA target sequence
ttagaattagccaaaaaaatagg

SEQ ID NO: 57844 - DNA, 23 bp, Artificial sequence
  SiRNA target sequence
tagaattagccaaaaaaataggt

SEQ ID NO: 57845 - DNA, 23 bp, Artificial sequence
  SiRNA target sequence
agaattagccaaaaaaataggtg

SEQ ID NO: 57846 - DNA, 23 bp, Artificial sequence
  SiRNA target sequence
gaattagccaaaaaaataggtgt

SEQ ID NO: 57847 - DNA, 23 bp, Artificial sequence
  SiRNA target sequence
aattagccaaaaaaataggtgta

SEQ ID NO: 57848 - DNA, 23 bp, Artificial sequence
  SiRNA target sequence
attagccaaaaaaataggtgtat

SEQ ID NO: 57849 - DNA, 23 bp, Artificial sequence
  SiRNA target sequence
ttagccaaaaaaataggtgtatt

SEQ ID NO: 57850 - DNA, 23 bp, Artificial sequence
  SiRNA target sequence
tagccaaaaaaataggtgtatta

SEQ ID NO: 57851 - DNA, 23 bp, Artificial sequence
  SiRNA target sequence
agccaaaaaaataggtgtattag

SEQ ID NO: 57852 - DNA, 23 bp, Artificial sequence
  SiRNA target sequence
gccaaaaaaataggtgtattaga

SEQ ID NO: 57853 - DNA, 23 bp, Artificial sequence
  SiRNA target sequence
ccaaaaaaataggtgtattagag

SEQ ID NO: 57854 - DNA, 23 bp, Artificial sequence
  SiRNA target sequence
caaaaaaataggtgtattagagt

SEQ ID NO: 57855 - DNA, 23 bp, Artificial sequence
  SiRNA target sequence
aaaaaaataggtgtattagagtc

SEQ ID NO: 57856 - DNA, 23 bp, Artificial sequence
  SiRNA target sequence
aaaaaataggtgtattagagtct

SEQ ID NO: 57857 - DNA, 23 bp, Artificial sequence
  SiRNA target sequence
aaaaataggtgtattagagtcta

SEQ ID NO: 57858 - DNA, 23 bp, Artificial sequence
  SiRNA target sequence
aaaataggtgtattagagtctat

SEQ ID NO: 57859 - DNA, 23 bp, Artificial sequence
  SiRNA target sequence
aaataggtgtattagagtctata

SEQ ID NO: 57860 - DNA, 23 bp, Artificial sequence
  SiRNA target sequence
aataggtgtattagagtctatac

SEQ ID NO: 57861 - DNA, 23 bp, Artificial sequence
  SiRNA target sequence
ataggtgtattagagtctataca

SEQ ID NO: 57862 - DNA, 23 bp, Artificial sequence
  SiRNA target sequence
taggtgtattagagtctatacag

SEQ ID NO: 57863 - DNA, 23 bp, Artificial sequence
  SiRNA target sequence
aggtgtattagagtctatacagg

SEQ ID NO: 57864 - DNA, 23 bp, Artificial sequence
  SiRNA target sequence
ggtgtattagagtctatacagga

SEQ ID NO: 57865 - DNA, 23 bp, Artificial sequence
  SiRNA target sequence
gtgtattagagtctatacaggaa

SEQ ID NO: 57866 - DNA, 23 bp, Artificial sequence
  SiRNA target sequence
tgtattagagtctatacaggaat

SEQ ID NO: 57867 - DNA, 23 bp, Artificial sequence
  SiRNA target sequence
gtattagagtctatacaggaatt

SEQ ID NO: 57868 - DNA, 23 bp, Artificial sequence
  SiRNA target sequence
tattagagtctatacaggaattt

SEQ ID NO: 57869 - DNA, 23 bp, Artificial sequence
  SiRNA target sequence
attagagtctatacaggaattta

SEQ ID NO: 57870 - DNA, 23 bp, Artificial sequence
  SiRNA target sequence
ttagagtctatacaggaatttaa

SEQ ID NO: 57871 - DNA, 23 bp, Artificial sequence
  SiRNA target sequence
tagagtctatacaggaatttaaa

SEQ ID NO: 57872 - DNA, 23 bp, Artificial sequence
  SiRNA target sequence
agagtctatacaggaatttaaag

SEQ ID NO: 57873 - DNA, 23 bp, Artificial sequence
  SiRNA target sequence
gagtctatacaggaatttaaaga

SEQ ID NO: 57874 - DNA, 23 bp, Artificial sequence
  SiRNA target sequence
agtctatacaggaatttaaagat

SEQ ID NO: 57875 - DNA, 23 bp, Artificial sequence
  SiRNA target sequence
gtctatacaggaatttaaagatg

SEQ ID NO: 57876 - DNA, 23 bp, Artificial sequence
  SiRNA target sequence
tctatacaggaatttaaagatgg

SEQ ID NO: 57877 - DNA, 23 bp, Artificial sequence
  SiRNA target sequence
ctatacaggaatttaaagatggg

SEQ ID NO: 57878 - DNA, 23 bp, Artificial sequence
  SiRNA target sequence
tatacaggaatttaaagatgggt

SEQ ID NO: 57879 - DNA, 23 bp, Artificial sequence
  SiRNA target sequence
atacaggaatttaaagatgggtt

SEQ ID NO: 57880 - DNA, 23 bp, Artificial sequence
  SiRNA target sequence
tacaggaatttaaagatgggttt

SEQ ID NO: 57881 - DNA, 23 bp, Artificial sequence
  SiRNA target sequence
acaggaatttaaagatgggttta

SEQ ID NO: 57882 - DNA, 23 bp, Artificial sequence
  SiRNA target sequence
caggaatttaaagatgggtttag

SEQ ID NO: 57883 - DNA, 23 bp, Artificial sequence
  SiRNA target sequence
aggaatttaaagatgggtttagc

SEQ ID NO: 57884 - DNA, 23 bp, Artificial sequence
  SiRNA target sequence
ggaatttaaagatgggtttagca

SEQ ID NO: 57885 - DNA, 23 bp, Artificial sequence
  SiRNA target sequence
gaatttaaagatgggtttagcac

SEQ ID NO: 57886 - DNA, 23 bp, Artificial sequence
  SiRNA target sequence
aatttaaagatgggtttagcaca

SEQ ID NO: 57887 - DNA, 23 bp, Artificial sequence
  SiRNA target sequence
atttaaagatgggtttagcacat

SEQ ID NO: 57888 - DNA, 23 bp, Artificial sequence
  SiRNA target sequence
tttaaagatgggtttagcacatc

SEQ ID NO: 57889 - DNA, 23 bp, Artificial sequence
  SiRNA target sequence
ttaaagatgggtttagcacatcg

SEQ ID NO: 57890 - DNA, 23 bp, Artificial sequence
  SiRNA target sequence
taaagatgggtttagcacatcgg

SEQ ID NO: 57891 - DNA, 23 bp, Artificial sequence
  SiRNA target sequence
aaagatgggtttagcacatcggt

SEQ ID NO: 57892 - DNA, 23 bp, Artificial sequence
  SiRNA target sequence
aagatgggtttagcacatcggtc

SEQ ID NO: 57893 - DNA, 23 bp, Artificial sequence
  SiRNA target sequence
agatgggtttagcacatcggtcg

SEQ ID NO: 57894 - DNA, 23 bp, Artificial sequence
  SiRNA target sequence
gatgggtttagcacatcggtcgg

SEQ ID NO: 57895 - DNA, 23 bp, Artificial sequence
  SiRNA target sequence
atgggtttagcacatcggtcggt

SEQ ID NO: 57896 - DNA, 23 bp, Artificial sequence
  SiRNA target sequence
tgggtttagcacatcggtcggtg

SEQ ID NO: 57897 - DNA, 23 bp, Artificial sequence
  SiRNA target sequence
gggtttagcacatcggtcggtga

SEQ ID NO: 57898 - DNA, 23 bp, Artificial sequence
  SiRNA target sequence
ggtttagcacatcggtcggtgaa

SEQ ID NO: 57899 - DNA, 23 bp, Artificial sequence
  SiRNA target sequence
gtttagcacatcggtcggtgaac

SEQ ID NO: 57900 - DNA, 23 bp, Artificial sequence
  SiRNA target sequence
tttagcacatcggtcggtgaacg

SEQ ID NO: 57901 - DNA, 23 bp, Artificial sequence
  SiRNA target sequence
ttagcacatcggtcggtgaacgc

SEQ ID NO: 57902 - DNA, 23 bp, Artificial sequence
  SiRNA target sequence
tagcacatcggtcggtgaacgcg

SEQ ID NO: 57903 - DNA, 23 bp, Artificial sequence
  SiRNA target sequence
agcacatcggtcggtgaacgcgg

SEQ ID NO: 57904 - DNA, 23 bp, Artificial sequence
  SiRNA target sequence
gcacatcggtcggtgaacgcgga

SEQ ID NO: 57905 - DNA, 23 bp, Artificial sequence
  SiRNA target sequence
cacatcggtcggtgaacgcggaa

SEQ ID NO: 57906 - DNA, 23 bp, Artificial sequence
  SiRNA target sequence
acatcggtcggtgaacgcggaag

SEQ ID NO: 57907 - DNA, 23 bp, Artificial sequence
  SiRNA target sequence
catcggtcggtgaacgcggaaga

SEQ ID NO: 57908 - DNA, 23 bp, Artificial sequence
  SiRNA target sequence
atcggtcggtgaacgcggaagat

SEQ ID NO: 57909 - DNA, 23 bp, Artificial sequence
  SiRNA target sequence
tcggtcggtgaacgcggaagatt

SEQ ID NO: 57910 - DNA, 23 bp, Artificial sequence
  SiRNA target sequence
cggtcggtgaacgcggaagattt

SEQ ID NO: 57911 - DNA, 23 bp, Artificial sequence
  SiRNA target sequence
ggtcggtgaacgcggaagatttt

SEQ ID NO: 57912 - DNA, 23 bp, Artificial sequence
  SiRNA target sequence
gtcggtgaacgcggaagattttt

SEQ ID NO: 57913 - DNA, 23 bp, Artificial sequence
  SiRNA target sequence
tcggtgaacgcggaagattttta

SEQ ID NO: 57914 - DNA, 23 bp, Artificial sequence
  SiRNA target sequence
cggtgaacgcggaagatttttat

SEQ ID NO: 57915 - DNA, 23 bp, Artificial sequence
  SiRNA target sequence
ggtgaacgcggaagatttttatc

SEQ ID NO: 57916 - DNA, 23 bp, Artificial sequence
  SiRNA target sequence
gtgaacgcggaagatttttatct

SEQ ID NO: 57917 - DNA, 23 bp, Artificial sequence
  SiRNA target sequence
tgaacgcggaagatttttatctg

SEQ ID NO: 57918 - DNA, 23 bp, Artificial sequence
  SiRNA target sequence
gaacgcggaagatttttatctgg

SEQ ID NO: 57919 - DNA, 23 bp, Artificial sequence
  SiRNA target sequence
aacgcggaagatttttatctggt

SEQ ID NO: 57920 - DNA, 23 bp, Artificial sequence
  SiRNA target sequence
acgcggaagatttttatctggtg

SEQ ID NO: 57921 - DNA, 23 bp, Artificial sequence
  SiRNA target sequence
cgcggaagatttttatctggtgg

SEQ ID NO: 57922 - DNA, 23 bp, Artificial sequence
  SiRNA target sequence
gcggaagatttttatctggtggt

SEQ ID NO: 57923 - DNA, 23 bp, Artificial sequence
  SiRNA target sequence
cggaagatttttatctggtggtg

SEQ ID NO: 57924 - DNA, 23 bp, Artificial sequence
  SiRNA target sequence
ggaagatttttatctggtggtga

SEQ ID NO: 57925 - DNA, 23 bp, Artificial sequence
  SiRNA target sequence
gaagatttttatctggtggtgaa

SEQ ID NO: 57926 - DNA, 23 bp, Artificial sequence
  SiRNA target sequence
aagatttttatctggtggtgaaa

SEQ ID NO: 57927 - DNA, 23 bp, Artificial sequence
  SiRNA target sequence
agatttttatctggtggtgaaag

SEQ ID NO: 57928 - DNA, 23 bp, Artificial sequence
  SiRNA target sequence
gatttttatctggtggtgaaagg

SEQ ID NO: 57929 - DNA, 23 bp, Artificial sequence
  SiRNA target sequence
atttttatctggtggtgaaaggc

SEQ ID NO: 57930 - DNA, 23 bp, Artificial sequence
  SiRNA target sequence
tttttatctggtggtgaaaggca

SEQ ID NO: 57931 - DNA, 23 bp, Artificial sequence
  SiRNA target sequence
ttttatctggtggtgaaaggcaa

SEQ ID NO: 57932 - DNA, 23 bp, Artificial sequence
  SiRNA target sequence
tttatctggtggtgaaaggcaaa

SEQ ID NO: 57933 - DNA, 23 bp, Artificial sequence
  SiRNA target sequence
ttatctggtggtgaaaggcaaaa

SEQ ID NO: 57934 - DNA, 23 bp, Artificial sequence
  SiRNA target sequence
tatctggtggtgaaaggcaaaaa

SEQ ID NO: 57935 - DNA, 23 bp, Artificial sequence
  SiRNA target sequence
atctggtggtgaaaggcaaaaaa

SEQ ID NO: 57936 - DNA, 23 bp, Artificial sequence
  SiRNA target sequence
tctggtggtgaaaggcaaaaaat

SEQ ID NO: 57937 - DNA, 23 bp, Artificial sequence
  SiRNA target sequence
ctggtggtgaaaggcaaaaaatt

SEQ ID NO: 57938 - DNA, 23 bp, Artificial sequence
  SiRNA target sequence
tggtggtgaaaggcaaaaaatta

SEQ ID NO: 57939 - DNA, 23 bp, Artificial sequence
  SiRNA target sequence
ggtggtgaaaggcaaaaaattat

SEQ ID NO: 57940 - DNA, 23 bp, Artificial sequence
  SiRNA target sequence
gtggtgaaaggcaaaaaattatg

SEQ ID NO: 57941 - DNA, 23 bp, Artificial sequence
  SiRNA target sequence
tggtgaaaggcaaaaaattatgc

SEQ ID NO: 57942 - DNA, 23 bp, Artificial sequence
  SiRNA target sequence
ggtgaaaggcaaaaaattatgct

SEQ ID NO: 57943 - DNA, 23 bp, Artificial sequence
  SiRNA target sequence
gtgaaaggcaaaaaattatgctg

SEQ ID NO: 57944 - DNA, 23 bp, Artificial sequence
  SiRNA target sequence
tgaaaggcaaaaaattatgctga

SEQ ID NO: 57945 - DNA, 23 bp, Artificial sequence
  SiRNA target sequence
gaaaggcaaaaaattatgctgat

SEQ ID NO: 57946 - DNA, 23 bp, Artificial sequence
  SiRNA target sequence
aaaggcaaaaaattatgctgatg

SEQ ID NO: 57947 - DNA, 23 bp, Artificial sequence
  SiRNA target sequence
aaggcaaaaaattatgctgatgc

SEQ ID NO: 57948 - DNA, 23 bp, Artificial sequence
  SiRNA target sequence
aggcaaaaaattatgctgatgcg

SEQ ID NO: 57949 - DNA, 23 bp, Artificial sequence
  SiRNA target sequence
ggcaaaaaattatgctgatgcgt

SEQ ID NO: 57950 - DNA, 23 bp, Artificial sequence
  SiRNA target sequence
gcaaaaaattatgctgatgcgtg

SEQ ID NO: 57951 - DNA, 23 bp, Artificial sequence
  SiRNA target sequence
caaaaaattatgctgatgcgtgc

SEQ ID NO: 57952 - DNA, 23 bp, Artificial sequence
  SiRNA target sequence
aaaaaattatgctgatgcgtgca

SEQ ID NO: 57953 - DNA, 23 bp, Artificial sequence
  SiRNA target sequence
aaaaattatgctgatgcgtgcat

SEQ ID NO: 57954 - DNA, 23 bp, Artificial sequence
  SiRNA target sequence
aaaattatgctgatgcgtgcatt

SEQ ID NO: 57955 - DNA, 23 bp, Artificial sequence
  SiRNA target sequence
aaattatgctgatgcgtgcattg

SEQ ID NO: 57956 - DNA, 23 bp, Artificial sequence
  SiRNA target sequence
aattatgctgatgcgtgcattgc

SEQ ID NO: 57957 - DNA, 23 bp, Artificial sequence
  SiRNA target sequence
attatgctgatgcgtgcattgct

SEQ ID NO: 57958 - DNA, 23 bp, Artificial sequence
  SiRNA target sequence
ttatgctgatgcgtgcattgctt

SEQ ID NO: 57959 - DNA, 23 bp, Artificial sequence
  SiRNA target sequence
tatgctgatgcgtgcattgctta

SEQ ID NO: 57960 - DNA, 23 bp, Artificial sequence
  SiRNA target sequence
atgctgatgcgtgcattgcttaa

SEQ ID NO: 57961 - DNA, 23 bp, Artificial sequence
  SiRNA target sequence
tgctgatgcgtgcattgcttaaa

SEQ ID NO: 57962 - DNA, 23 bp, Artificial sequence
  SiRNA target sequence
gctgatgcgtgcattgcttaaaa

SEQ ID NO: 57963 - DNA, 23 bp, Artificial sequence
  SiRNA target sequence
ctgatgcgtgcattgcttaaaaa

SEQ ID NO: 57964 - DNA, 23 bp, Artificial sequence
  SiRNA target sequence
tgatgcgtgcattgcttaaaaat

SEQ ID NO: 57965 - DNA, 23 bp, Artificial sequence
  SiRNA target sequence
gatgcgtgcattgcttaaaaatt

SEQ ID NO: 57966 - DNA, 23 bp, Artificial sequence
  SiRNA target sequence
atgcgtgcattgcttaaaaattc

SEQ ID NO: 57967 - DNA, 23 bp, Artificial sequence
  SiRNA target sequence
tgcgtgcattgcttaaaaattca

SEQ ID NO: 57968 - DNA, 23 bp, Artificial sequence
  SiRNA target sequence
gcgtgcattgcttaaaaattcag

SEQ ID NO: 57969 - DNA, 23 bp, Artificial sequence
  SiRNA target sequence
cgtgcattgcttaaaaattcaga

SEQ ID NO: 57970 - DNA, 23 bp, Artificial sequence
  SiRNA target sequence
gtgcattgcttaaaaattcagag

SEQ ID NO: 57971 - DNA, 23 bp, Artificial sequence
  SiRNA target sequence
tgcattgcttaaaaattcagaga

SEQ ID NO: 57972 - DNA, 23 bp, Artificial sequence
  SiRNA target sequence
gcattgcttaaaaattcagagat

SEQ ID NO: 57973 - DNA, 23 bp, Artificial sequence
  SiRNA target sequence
cattgcttaaaaattcagagatc

SEQ ID NO: 57974 - DNA, 23 bp, Artificial sequence
  SiRNA target sequence
attgcttaaaaattcagagatcg

SEQ ID NO: 57975 - DNA, 23 bp, Artificial sequence
  SiRNA target sequence
ttgcttaaaaattcagagatcgt

SEQ ID NO: 57976 - DNA, 23 bp, Artificial sequence
  SiRNA target sequence
tgcttaaaaattcagagatcgtt

SEQ ID NO: 57977 - DNA, 23 bp, Artificial sequence
  SiRNA target sequence
gcttaaaaattcagagatcgttt

SEQ ID NO: 57978 - DNA, 23 bp, Artificial sequence
  SiRNA target sequence
cttaaaaattcagagatcgtttt

SEQ ID NO: 57979 - DNA, 23 bp, Artificial sequence
  SiRNA target sequence
ttaaaaattcagagatcgtttta

SEQ ID NO: 57980 - DNA, 23 bp, Artificial sequence
  SiRNA target sequence
taaaaattcagagatcgttttat

SEQ ID NO: 57981 - DNA, 23 bp, Artificial sequence
  SiRNA target sequence
aaaaattcagagatcgttttatt

SEQ ID NO: 57982 - DNA, 23 bp, Artificial sequence
  SiRNA target sequence
aaaattcagagatcgttttatta

SEQ ID NO: 57983 - DNA, 23 bp, Artificial sequence
  SiRNA target sequence
aaattcagagatcgttttattag

SEQ ID NO: 57984 - DNA, 23 bp, Artificial sequence
  SiRNA target sequence
aattcagagatcgttttattaga

SEQ ID NO: 57985 - DNA, 23 bp, Artificial sequence
  SiRNA target sequence
attcagagatcgttttattagac

SEQ ID NO: 57986 - DNA, 23 bp, Artificial sequence
  SiRNA target sequence
ttcagagatcgttttattagacg

SEQ ID NO: 57987 - DNA, 23 bp, Artificial sequence
  SiRNA target sequence
tcagagatcgttttattagacga

SEQ ID NO: 57988 - DNA, 23 bp, Artificial sequence
  SiRNA target sequence
cagagatcgttttattagacgag

SEQ ID NO: 57989 - DNA, 23 bp, Artificial sequence
  SiRNA target sequence
agagatcgttttattagacgagc

SEQ ID NO: 57990 - DNA, 23 bp, Artificial sequence
  SiRNA target sequence
gagatcgttttattagacgagcc

SEQ ID NO: 57991 - DNA, 23 bp, Artificial sequence
  SiRNA target sequence
agatcgttttattagacgagcca

SEQ ID NO: 57992 - DNA, 23 bp, Artificial sequence
  SiRNA target sequence
gatcgttttattagacgagccaa

SEQ ID NO: 57993 - DNA, 23 bp, Artificial sequence
  SiRNA target sequence
atcgttttattagacgagccaac

SEQ ID NO: 57994 - DNA, 23 bp, Artificial sequence
  SiRNA target sequence
tcgttttattagacgagccaacc

SEQ ID NO: 57995 - DNA, 23 bp, Artificial sequence
  SiRNA target sequence
cgttttattagacgagccaacct

SEQ ID NO: 57996 - DNA, 23 bp, Artificial sequence
  SiRNA target sequence
gttttattagacgagccaacctc

SEQ ID NO: 57997 - DNA, 23 bp, Artificial sequence
  SiRNA target sequence
ttttattagacgagccaacctca

SEQ ID NO: 57998 - DNA, 23 bp, Artificial sequence
  SiRNA target sequence
tttattagacgagccaacctcag

SEQ ID NO: 57999 - DNA, 23 bp, Artificial sequence
  SiRNA target sequence
ttattagacgagccaacctcagc

SEQ ID NO: 58000 - DNA, 23 bp, Artificial sequence
  SiRNA target sequence
tattagacgagccaacctcagca

SEQ ID NO: 58001 - DNA, 23 bp, Artificial sequence
  SiRNA target sequence
attagacgagccaacctcagcac

SEQ ID NO: 58002 - DNA, 23 bp, Artificial sequence
  SiRNA target sequence
ttagacgagccaacctcagcact

SEQ ID NO: 58003 - DNA, 23 bp, Artificial sequence
  SiRNA target sequence
tagacgagccaacctcagcacta

SEQ ID NO: 58004 - DNA, 23 bp, Artificial sequence
  SiRNA target sequence
agacgagccaacctcagcactag

SEQ ID NO: 58005 - DNA, 23 bp, Artificial sequence
  SiRNA target sequence
gacgagccaacctcagcactaga

SEQ ID NO: 58006 - DNA, 23 bp, Artificial sequence
  SiRNA target sequence
acgagccaacctcagcactagat

SEQ ID NO: 58007 - DNA, 23 bp, Artificial sequence
  SiRNA target sequence
cgagccaacctcagcactagata

SEQ ID NO: 58008 - DNA, 23 bp, Artificial sequence
  SiRNA target sequence
gagccaacctcagcactagataa

SEQ ID NO: 58009 - DNA, 23 bp, Artificial sequence
  SiRNA target sequence
agccaacctcagcactagataaa

SEQ ID NO: 58010 - DNA, 23 bp, Artificial sequence
  SiRNA target sequence
gccaacctcagcactagataaaa

SEQ ID NO: 58011 - DNA, 23 bp, Artificial sequence
  SiRNA target sequence
ccaacctcagcactagataaaaa

SEQ ID NO: 58012 - DNA, 23 bp, Artificial sequence
  SiRNA target sequence
caacctcagcactagataaaaag

SEQ ID NO: 58013 - DNA, 23 bp, Artificial sequence
  SiRNA target sequence
aacctcagcactagataaaaaga

SEQ ID NO: 58014 - DNA, 23 bp, Artificial sequence
  SiRNA target sequence
acctcagcactagataaaaagag

SEQ ID NO: 58015 - DNA, 23 bp, Artificial sequence
  SiRNA target sequence
cctcagcactagataaaaagagt

SEQ ID NO: 58016 - DNA, 23 bp, Artificial sequence
  SiRNA target sequence
ctcagcactagataaaaagagtg

SEQ ID NO: 58017 - DNA, 23 bp, Artificial sequence
  SiRNA target sequence
tcagcactagataaaaagagtga

SEQ ID NO: 58018 - DNA, 23 bp, Artificial sequence
  SiRNA target sequence
cagcactagataaaaagagtgaa

SEQ ID NO: 58019 - DNA, 23 bp, Artificial sequence
  SiRNA target sequence
agcactagataaaaagagtgaac

SEQ ID NO: 58020 - DNA, 23 bp, Artificial sequence
  SiRNA target sequence
gcactagataaaaagagtgaact

SEQ ID NO: 58021 - DNA, 23 bp, Artificial sequence
  SiRNA target sequence
cactagataaaaagagtgaacta

SEQ ID NO: 58022 - DNA, 23 bp, Artificial sequence
  SiRNA target sequence
actagataaaaagagtgaactag

SEQ ID NO: 58023 - DNA, 23 bp, Artificial sequence
  SiRNA target sequence
ctagataaaaagagtgaactaga

SEQ ID NO: 58024 - DNA, 23 bp, Artificial sequence
  SiRNA target sequence
tagataaaaagagtgaactagaa

SEQ ID NO: 58025 - DNA, 23 bp, Artificial sequence
  SiRNA target sequence
agataaaaagagtgaactagaaa

SEQ ID NO: 58026 - DNA, 23 bp, Artificial sequence
  SiRNA target sequence
gataaaaagagtgaactagaaac

SEQ ID NO: 58027 - DNA, 23 bp, Artificial sequence
  SiRNA target sequence
ataaaaagagtgaactagaaact

SEQ ID NO: 58028 - DNA, 23 bp, Artificial sequence
  SiRNA target sequence
taaaaagagtgaactagaaacta

SEQ ID NO: 58029 - DNA, 23 bp, Artificial sequence
  SiRNA target sequence
aaaaagagtgaactagaaactat

SEQ ID NO: 58030 - DNA, 23 bp, Artificial sequence
  SiRNA target sequence
aaaagagtgaactagaaactatg

SEQ ID NO: 58031 - DNA, 23 bp, Artificial sequence
  SiRNA target sequence
aaagagtgaactagaaactatga

SEQ ID NO: 58032 - DNA, 23 bp, Artificial sequence
  SiRNA target sequence
aagagtgaactagaaactatgac

SEQ ID NO: 58033 - DNA, 23 bp, Artificial sequence
  SiRNA target sequence
agagtgaactagaaactatgaca

SEQ ID NO: 58034 - DNA, 23 bp, Artificial sequence
  SiRNA target sequence
gagtgaactagaaactatgacat

SEQ ID NO: 58035 - DNA, 23 bp, Artificial sequence
  SiRNA target sequence
agtgaactagaaactatgacata

SEQ ID NO: 58036 - DNA, 23 bp, Artificial sequence
  SiRNA target sequence
gtgaactagaaactatgacatat

SEQ ID NO: 58037 - DNA, 23 bp, Artificial sequence
  SiRNA target sequence
tgaactagaaactatgacatata

SEQ ID NO: 58038 - DNA, 23 bp, Artificial sequence
  SiRNA target sequence
gaactagaaactatgacatatat

SEQ ID NO: 58039 - DNA, 23 bp, Artificial sequence
  SiRNA target sequence
aactagaaactatgacatatatt

SEQ ID NO: 58040 - DNA, 23 bp, Artificial sequence
  SiRNA target sequence
actagaaactatgacatatattt

SEQ ID NO: 58041 - DNA, 23 bp, Artificial sequence
  SiRNA target sequence
ctagaaactatgacatatatttt

SEQ ID NO: 58042 - DNA, 23 bp, Artificial sequence
  SiRNA target sequence
tagaaactatgacatatattttt

SEQ ID NO: 58043 - DNA, 23 bp, Artificial sequence
  SiRNA target sequence
agaaactatgacatatattttta

SEQ ID NO: 58044 - DNA, 23 bp, Artificial sequence
  SiRNA target sequence
gaaactatgacatatatttttaa

SEQ ID NO: 58045 - DNA, 23 bp, Artificial sequence
  SiRNA target sequence
aaactatgacatatatttttaat

SEQ ID NO: 58046 - DNA, 23 bp, Artificial sequence
  SiRNA target sequence
aactatgacatatatttttaatg

SEQ ID NO: 58047 - DNA, 23 bp, Artificial sequence
  SiRNA target sequence
actatgacatatatttttaatga

SEQ ID NO: 58048 - DNA, 23 bp, Artificial sequence
  SiRNA target sequence
ctatgacatatatttttaatgaa

SEQ ID NO: 58049 - DNA, 23 bp, Artificial sequence
  SiRNA target sequence
tatgacatatatttttaatgaat

SEQ ID NO: 58050 - DNA, 23 bp, Artificial sequence
  SiRNA target sequence
atgacatatatttttaatgaatt

SEQ ID NO: 58051 - DNA, 23 bp, Artificial sequence
  SiRNA target sequence
tgacatatatttttaatgaattt

SEQ ID NO: 58052 - DNA, 23 bp, Artificial sequence
  SiRNA target sequence
gacatatatttttaatgaattta

SEQ ID NO: 58053 - DNA, 23 bp, Artificial sequence
  SiRNA target sequence
acatatatttttaatgaatttaa

SEQ ID NO: 58054 - DNA, 23 bp, Artificial sequence
  SiRNA target sequence
catatatttttaatgaatttaag

SEQ ID NO: 58055 - DNA, 23 bp, Artificial sequence
  SiRNA target sequence
atatatttttaatgaatttaagt

SEQ ID NO: 58056 - DNA, 23 bp, Artificial sequence
  SiRNA target sequence
tatatttttaatgaatttaagta

SEQ ID NO: 58057 - DNA, 23 bp, Artificial sequence
  SiRNA target sequence
atatttttaatgaatttaagtac

SEQ ID NO: 58058 - DNA, 23 bp, Artificial sequence
  SiRNA target sequence
tatttttaatgaatttaagtacc

SEQ ID NO: 58059 - DNA, 23 bp, Artificial sequence
  SiRNA target sequence
atttttaatgaatttaagtacca

SEQ ID NO: 58060 - DNA, 23 bp, Artificial sequence
  SiRNA target sequence
tttttaatgaatttaagtaccat

SEQ ID NO: 58061 - DNA, 23 bp, Artificial sequence
  SiRNA target sequence
ttttaatgaatttaagtaccata

SEQ ID NO: 58062 - DNA, 23 bp, Artificial sequence
  SiRNA target sequence
tttaatgaatttaagtaccatac

SEQ ID NO: 58063 - DNA, 23 bp, Artificial sequence
  SiRNA target sequence
ttaatgaatttaagtaccatact

SEQ ID NO: 58064 - DNA, 23 bp, Artificial sequence
  SiRNA target sequence
taatgaatttaagtaccatactt

SEQ ID NO: 58065 - DNA, 23 bp, Artificial sequence
  SiRNA target sequence
aatgaatttaagtaccatacttt

SEQ ID NO: 58066 - DNA, 23 bp, Artificial sequence
  SiRNA target sequence
atgaatttaagtaccatactttt

SEQ ID NO: 58067 - DNA, 23 bp, Artificial sequence
  SiRNA target sequence
tgaatttaagtaccatacttttg

SEQ ID NO: 58068 - DNA, 23 bp, Artificial sequence
  SiRNA target sequence
gaatttaagtaccatacttttgt

SEQ ID NO: 58069 - DNA, 23 bp, Artificial sequence
  SiRNA target sequence
aatttaagtaccatacttttgta

SEQ ID NO: 58070 - DNA, 23 bp, Artificial sequence
  SiRNA target sequence
atttaagtaccatacttttgtaa

SEQ ID NO: 58071 - DNA, 23 bp, Artificial sequence
  SiRNA target sequence
tttaagtaccatacttttgtaat

SEQ ID NO: 58072 - DNA, 23 bp, Artificial sequence
  SiRNA target sequence
ttaagtaccatacttttgtaata

SEQ ID NO: 58073 - DNA, 23 bp, Artificial sequence
  SiRNA target sequence
taagtaccatacttttgtaataa

SEQ ID NO: 58074 - DNA, 23 bp, Artificial sequence
  SiRNA target sequence
aagtaccatacttttgtaataat

SEQ ID NO: 58075 - DNA, 23 bp, Artificial sequence
  SiRNA target sequence
agtaccatacttttgtaataatt

SEQ ID NO: 58076 - DNA, 23 bp, Artificial sequence
  SiRNA target sequence
gtaccatacttttgtaataattg

SEQ ID NO: 58077 - DNA, 23 bp, Artificial sequence
  SiRNA target sequence
taccatacttttgtaataattgt

SEQ ID NO: 58078 - DNA, 23 bp, Artificial sequence
  SiRNA target sequence
accatacttttgtaataattgta

SEQ ID NO: 58079 - DNA, 23 bp, Artificial sequence
  SiRNA target sequence
ccatacttttgtaataattgtac

SEQ ID NO: 58080 - DNA, 23 bp, Artificial sequence
  SiRNA target sequence
catacttttgtaataattgtaca

SEQ ID NO: 58081 - DNA, 23 bp, Artificial sequence
  SiRNA target sequence
atacttttgtaataattgtacac

SEQ ID NO: 58082 - DNA, 23 bp, Artificial sequence
  SiRNA target sequence
tacttttgtaataattgtacaca

SEQ ID NO: 58083 - DNA, 23 bp, Artificial sequence
  SiRNA target sequence
acttttgtaataattgtacacaa

SEQ ID NO: 58084 - DNA, 23 bp, Artificial sequence
  SiRNA target sequence
cttttgtaataattgtacacaat

SEQ ID NO: 58085 - DNA, 23 bp, Artificial sequence
  SiRNA target sequence
ttttgtaataattgtacacaatc

SEQ ID NO: 58086 - DNA, 23 bp, Artificial sequence
  SiRNA target sequence
tttgtaataattgtacacaatct

SEQ ID NO: 58087 - DNA, 23 bp, Artificial sequence
  SiRNA target sequence
ttgtaataattgtacacaatcta

SEQ ID NO: 58088 - DNA, 23 bp, Artificial sequence
  SiRNA target sequence
tgtaataattgtacacaatctag

SEQ ID NO: 58089 - DNA, 23 bp, Artificial sequence
  SiRNA target sequence
gtaataattgtacacaatctaga

SEQ ID NO: 58090 - DNA, 23 bp, Artificial sequence
  SiRNA target sequence
taataattgtacacaatctagaa

SEQ ID NO: 58091 - DNA, 23 bp, Artificial sequence
  SiRNA target sequence
aataattgtacacaatctagaat

SEQ ID NO: 58092 - DNA, 23 bp, Artificial sequence
  SiRNA target sequence
ataattgtacacaatctagaatt

SEQ ID NO: 58093 - DNA, 23 bp, Artificial sequence
  SiRNA target sequence
taattgtacacaatctagaatta

SEQ ID NO: 58094 - DNA, 23 bp, Artificial sequence
  SiRNA target sequence
aattgtacacaatctagaattat

SEQ ID NO: 58095 - DNA, 23 bp, Artificial sequence
  SiRNA target sequence
attgtacacaatctagaattatt

SEQ ID NO: 58096 - DNA, 23 bp, Artificial sequence
  SiRNA target sequence
ttgtacacaatctagaattattg

SEQ ID NO: 58097 - DNA, 23 bp, Artificial sequence
  SiRNA target sequence
tgtacacaatctagaattattgg

SEQ ID NO: 58098 - DNA, 23 bp, Artificial sequence
  SiRNA target sequence
gtacacaatctagaattattggc

SEQ ID NO: 58099 - DNA, 23 bp, Artificial sequence
  SiRNA target sequence
tacacaatctagaattattggct

SEQ ID NO: 58100 - DNA, 23 bp, Artificial sequence
  SiRNA target sequence
acacaatctagaattattggctt

SEQ ID NO: 58101 - DNA, 23 bp, Artificial sequence
  SiRNA target sequence
cacaatctagaattattggcttt

SEQ ID NO: 58102 - DNA, 23 bp, Artificial sequence
  SiRNA target sequence
acaatctagaattattggctttg

SEQ ID NO: 58103 - DNA, 23 bp, Artificial sequence
  SiRNA target sequence
caatctagaattattggctttgt

SEQ ID NO: 58104 - DNA, 23 bp, Artificial sequence
  SiRNA target sequence
aatctagaattattggctttgtt

SEQ ID NO: 58105 - DNA, 23 bp, Artificial sequence
  SiRNA target sequence
atctagaattattggctttgttt

SEQ ID NO: 58106 - DNA, 23 bp, Artificial sequence
  SiRNA target sequence
tctagaattattggctttgtttg

SEQ ID NO: 58107 - DNA, 23 bp, Artificial sequence
  SiRNA target sequence
ctagaattattggctttgtttga

SEQ ID NO: 58108 - DNA, 23 bp, Artificial sequence
  SiRNA target sequence
tagaattattggctttgtttgat

SEQ ID NO: 58109 - DNA, 23 bp, Artificial sequence
  SiRNA target sequence
agaattattggctttgtttgata

SEQ ID NO: 58110 - DNA, 23 bp, Artificial sequence
  SiRNA target sequence
gaattattggctttgtttgataa

SEQ ID NO: 58111 - DNA, 23 bp, Artificial sequence
  SiRNA target sequence
aattattggctttgtttgataaa

SEQ ID NO: 58112 - DNA, 23 bp, Artificial sequence
  SiRNA target sequence
attattggctttgtttgataaaa

SEQ ID NO: 58113 - DNA, 23 bp, Artificial sequence
  SiRNA target sequence
ttattggctttgtttgataaaat

SEQ ID NO: 58114 - DNA, 23 bp, Artificial sequence
  SiRNA target sequence
tattggctttgtttgataaaatt

SEQ ID NO: 58115 - DNA, 23 bp, Artificial sequence
  SiRNA target sequence
attggctttgtttgataaaattt

SEQ ID NO: 58116 - DNA, 23 bp, Artificial sequence
  SiRNA target sequence
ttggctttgtttgataaaatttt

SEQ ID NO: 58117 - DNA, 23 bp, Artificial sequence
  SiRNA target sequence
tggctttgtttgataaaatttta

SEQ ID NO: 58118 - DNA, 23 bp, Artificial sequence
  SiRNA target sequence
ggctttgtttgataaaattttat

SEQ ID NO: 58119 - DNA, 23 bp, Artificial sequence
  SiRNA target sequence
gctttgtttgataaaattttatt

SEQ ID NO: 58120 - DNA, 23 bp, Artificial sequence
  SiRNA target sequence
ctttgtttgataaaattttattt

SEQ ID NO: 58121 - DNA, 23 bp, Artificial sequence
  SiRNA target sequence
tttgtttgataaaattttatttg

SEQ ID NO: 58122 - DNA, 23 bp, Artificial sequence
  SiRNA target sequence
ttgtttgataaaattttatttgt

SEQ ID NO: 58123 - DNA, 23 bp, Artificial sequence
  SiRNA target sequence
tgtttgataaaattttatttgta

SEQ ID NO: 58124 - DNA, 23 bp, Artificial sequence
  SiRNA target sequence
gtttgataaaattttatttgtaa

SEQ ID NO: 58125 - DNA, 23 bp, Artificial sequence
  SiRNA target sequence
tttgataaaattttatttgtaaa

SEQ ID NO: 58126 - DNA, 23 bp, Artificial sequence
  SiRNA target sequence
ttgataaaattttatttgtaaat

SEQ ID NO: 58127 - DNA, 23 bp, Artificial sequence
  SiRNA target sequence
tgataaaattttatttgtaaatg

SEQ ID NO: 58128 - DNA, 23 bp, Artificial sequence
  SiRNA target sequence
gataaaattttatttgtaaatgg

SEQ ID NO: 58129 - DNA, 23 bp, Artificial sequence
  SiRNA target sequence
ataaaattttatttgtaaatggt

SEQ ID NO: 58130 - DNA, 23 bp, Artificial sequence
  SiRNA target sequence
taaaattttatttgtaaatggta

SEQ ID NO: 58131 - DNA, 23 bp, Artificial sequence
  SiRNA target sequence
aaaattttatttgtaaatggtaa

SEQ ID NO: 58132 - DNA, 23 bp, Artificial sequence
  SiRNA target sequence
aaattttatttgtaaatggtaat

SEQ ID NO: 58133 - DNA, 23 bp, Artificial sequence
  SiRNA target sequence
aattttatttgtaaatggtaatg

SEQ ID NO: 58134 - DNA, 23 bp, Artificial sequence
  SiRNA target sequence
attttatttgtaaatggtaatga

SEQ ID NO: 58135 - DNA, 23 bp, Artificial sequence
  SiRNA target sequence
ttttatttgtaaatggtaatgag

SEQ ID NO: 58136 - DNA, 23 bp, Artificial sequence
  SiRNA target sequence
tttatttgtaaatggtaatgagg

SEQ ID NO: 58137 - DNA, 23 bp, Artificial sequence
  SiRNA target sequence
ttatttgtaaatggtaatgaggt

SEQ ID NO: 58138 - DNA, 23 bp, Artificial sequence
  SiRNA target sequence
tatttgtaaatggtaatgaggta

SEQ ID NO: 58139 - DNA, 23 bp, Artificial sequence
  SiRNA target sequence
atttgtaaatggtaatgaggtaa

SEQ ID NO: 58140 - DNA, 23 bp, Artificial sequence
  SiRNA target sequence
tttgtaaatggtaatgaggtaac

SEQ ID NO: 58141 - DNA, 23 bp, Artificial sequence
  SiRNA target sequence
ttgtaaatggtaatgaggtaaca

SEQ ID NO: 58142 - DNA, 23 bp, Artificial sequence
  SiRNA target sequence
tgtaaatggtaatgaggtaacaa

SEQ ID NO: 58143 - DNA, 23 bp, Artificial sequence
  SiRNA target sequence
gtaaatggtaatgaggtaacaat

SEQ ID NO: 58144 - DNA, 23 bp, Artificial sequence
  SiRNA target sequence
taaatggtaatgaggtaacaatg

SEQ ID NO: 58145 - DNA, 23 bp, Artificial sequence
  SiRNA target sequence
aaatggtaatgaggtaacaatga

SEQ ID NO: 58146 - DNA, 23 bp, Artificial sequence
  SiRNA target sequence
aatggtaatgaggtaacaatgat

SEQ ID NO: 58147 - DNA, 23 bp, Artificial sequence
  SiRNA target sequence
atggtaatgaggtaacaatgata

SEQ ID NO: 58148 - DNA, 23 bp, Artificial sequence
  SiRNA target sequence
tggtaatgaggtaacaatgatag

SEQ ID NO: 58149 - DNA, 23 bp, Artificial sequence
  SiRNA target sequence
ggtaatgaggtaacaatgataga

SEQ ID NO: 58150 - DNA, 23 bp, Artificial sequence
  SiRNA target sequence
gtaatgaggtaacaatgatagaa

SEQ ID NO: 58151 - DNA, 23 bp, Artificial sequence
  SiRNA target sequence
taatgaggtaacaatgatagaag

SEQ ID NO: 58152 - DNA, 23 bp, Artificial sequence
  SiRNA target sequence
aatgaggtaacaatgatagaaga

SEQ ID NO: 58153 - DNA, 23 bp, Artificial sequence
  SiRNA target sequence
atgaggtaacaatgatagaagac

SEQ ID NO: 58154 - DNA, 23 bp, Artificial sequence
  SiRNA target sequence
tgaggtaacaatgatagaagaca

SEQ ID NO: 58155 - DNA, 23 bp, Artificial sequence
  SiRNA target sequence
gaggtaacaatgatagaagacat

SEQ ID NO: 58156 - DNA, 23 bp, Artificial sequence
  SiRNA target sequence
aggtaacaatgatagaagacatt

SEQ ID NO: 58157 - DNA, 23 bp, Artificial sequence
  SiRNA target sequence
ggtaacaatgatagaagacatta

SEQ ID NO: 58158 - DNA, 23 bp, Artificial sequence
  SiRNA target sequence
gtaacaatgatagaagacattaa

SEQ ID NO: 58159 - DNA, 23 bp, Artificial sequence
  SiRNA target sequence
taacaatgatagaagacattaac

SEQ ID NO: 58160 - DNA, 23 bp, Artificial sequence
  SiRNA target sequence
aacaatgatagaagacattaaca

SEQ ID NO: 58161 - DNA, 23 bp, Artificial sequence
  SiRNA target sequence
acaatgatagaagacattaacaa

SEQ ID NO: 58162 - DNA, 23 bp, Artificial sequence
  SiRNA target sequence
caatgatagaagacattaacaaa

SEQ ID NO: 58163 - DNA, 23 bp, Artificial sequence
  SiRNA target sequence
aatgatagaagacattaacaaaa

SEQ ID NO: 58164 - DNA, 23 bp, Artificial sequence
  SiRNA target sequence
atgatagaagacattaacaaaaa

SEQ ID NO: 58165 - DNA, 23 bp, Artificial sequence
  SiRNA target sequence
tgatagaagacattaacaaaaaa

SEQ ID NO: 58166 - DNA, 23 bp, Artificial sequence
  SiRNA target sequence
gatagaagacattaacaaaaaac

SEQ ID NO: 58167 - DNA, 23 bp, Artificial sequence
  SiRNA target sequence
atagaagacattaacaaaaaact

SEQ ID NO: 58168 - DNA, 23 bp, Artificial sequence
  SiRNA target sequence
tagaagacattaacaaaaaactt

SEQ ID NO: 58169 - DNA, 23 bp, Artificial sequence
  SiRNA target sequence
agaagacattaacaaaaaacttg

SEQ ID NO: 58170 - DNA, 23 bp, Artificial sequence
  SiRNA target sequence
gaagacattaacaaaaaacttga

SEQ ID NO: 58171 - DNA, 23 bp, Artificial sequence
  SiRNA target sequence
aagacattaacaaaaaacttgaa

SEQ ID NO: 58172 - DNA, 23 bp, Artificial sequence
  SiRNA target sequence
agacattaacaaaaaacttgaag

SEQ ID NO: 58173 - DNA, 23 bp, Artificial sequence
  SiRNA target sequence
gacattaacaaaaaacttgaaga

SEQ ID NO: 58174 - DNA, 23 bp, Artificial sequence
  SiRNA target sequence
acattaacaaaaaacttgaagaa

SEQ ID NO: 58175 - DNA, 23 bp, Artificial sequence
  SiRNA target sequence
cattaacaaaaaacttgaagaaa

SEQ ID NO: 58176 - DNA, 23 bp, Artificial sequence
  SiRNA target sequence
attaacaaaaaacttgaagaaaa

SEQ ID NO: 58177 - DNA, 23 bp, Artificial sequence
  SiRNA target sequence
ttaacaaaaaacttgaagaaaat

SEQ ID NO: 58178 - DNA, 23 bp, Artificial sequence
  SiRNA target sequence
taacaaaaaacttgaagaaaatt

SEQ ID NO: 58179 - DNA, 23 bp, Artificial sequence
  SiRNA target sequence
aacaaaaaacttgaagaaaattc

SEQ ID NO: 58180 - DNA, 23 bp, Artificial sequence
  SiRNA target sequence
acaaaaaacttgaagaaaattca

SEQ ID NO: 58181 - DNA, 23 bp, Artificial sequence
  SiRNA target sequence
caaaaaacttgaagaaaattcaa

SEQ ID NO: 58182 - DNA, 23 bp, Artificial sequence
  SiRNA target sequence
aaaaaacttgaagaaaattcaaa

SEQ ID NO: 58183 - DNA, 23 bp, Artificial sequence
  SiRNA target sequence
aaaaacttgaagaaaattcaaag

SEQ ID NO: 58184 - DNA, 23 bp, Artificial sequence
  SiRNA target sequence
aaaacttgaagaaaattcaaagt

SEQ ID NO: 58185 - DNA, 23 bp, Artificial sequence
  SiRNA target sequence
aaacttgaagaaaattcaaagta

SEQ ID NO: 58186 - DNA, 23 bp, Artificial sequence
  SiRNA target sequence
aacttgaagaaaattcaaagtat

SEQ ID NO: 58187 - DNA, 23 bp, Artificial sequence
  SiRNA target sequence
acttgaagaaaattcaaagtatt

SEQ ID NO: 58188 - DNA, 23 bp, Artificial sequence
  SiRNA target sequence
cttgaagaaaattcaaagtattt

SEQ ID NO: 58189 - DNA, 23 bp, Artificial sequence
  SiRNA target sequence
ttgaagaaaattcaaagtatttt

SEQ ID NO: 58190 - DNA, 23 bp, Artificial sequence
  SiRNA target sequence
tgaagaaaattcaaagtattttg

SEQ ID NO: 58191 - DNA, 23 bp, Artificial sequence
  SiRNA target sequence
gaagaaaattcaaagtattttgc

SEQ ID NO: 58192 - DNA, 23 bp, Artificial sequence
  SiRNA target sequence
aagaaaattcaaagtattttgca

SEQ ID NO: 58193 - DNA, 23 bp, Artificial sequence
  SiRNA target sequence
agaaaattcaaagtattttgcag

SEQ ID NO: 58194 - DNA, 23 bp, Artificial sequence
  SiRNA target sequence
gaaaattcaaagtattttgcaga

SEQ ID NO: 58195 - DNA, 23 bp, Artificial sequence
  SiRNA target sequence
aaaattcaaagtattttgcagat

SEQ ID NO: 58196 - DNA, 23 bp, Artificial sequence
  SiRNA target sequence
aaattcaaagtattttgcagata

SEQ ID NO: 58197 - DNA, 23 bp, Artificial sequence
  SiRNA target sequence
aattcaaagtattttgcagatat

SEQ ID NO: 58198 - DNA, 23 bp, Artificial sequence
  SiRNA target sequence
attcaaagtattttgcagatatt

SEQ ID NO: 58199 - DNA, 23 bp, Artificial sequence
  SiRNA target sequence
ttcaaagtattttgcagatattt

SEQ ID NO: 58200 - DNA, 23 bp, Artificial sequence
  SiRNA target sequence
tcaaagtattttgcagatatttt

SEQ ID NO: 58201 - DNA, 23 bp, Artificial sequence
  SiRNA target sequence
caaagtattttgcagatatttta

SEQ ID NO: 58202 - DNA, 23 bp, Artificial sequence
  SiRNA target sequence
aaagtattttgcagatattttaa

SEQ ID NO: 58203 - DNA, 23 bp, Artificial sequence
  SiRNA target sequence
aagtattttgcagatattttaaa

SEQ ID NO: 58204 - DNA, 23 bp, Artificial sequence
  SiRNA target sequence
agtattttgcagatattttaaac

SEQ ID NO: 58205 - DNA, 23 bp, Artificial sequence
  SiRNA target sequence
gtattttgcagatattttaaaca

SEQ ID NO: 58206 - DNA, 23 bp, Artificial sequence
  SiRNA target sequence
tattttgcagatattttaaacaa

SEQ ID NO: 58207 - DNA, 23 bp, Artificial sequence
  SiRNA target sequence
attttgcagatattttaaacaac

SEQ ID NO: 58208 - DNA, 23 bp, Artificial sequence
  SiRNA target sequence
ttttgcagatattttaaacaacg

SEQ ID NO: 58209 - DNA, 23 bp, Artificial sequence
  SiRNA target sequence
tttgcagatattttaaacaacga

SEQ ID NO: 58210 - DNA, 23 bp, Artificial sequence
  SiRNA target sequence
ttgcagatattttaaacaacgaa

SEQ ID NO: 58211 - DNA, 23 bp, Artificial sequence
  SiRNA target sequence
tgcagatattttaaacaacgaat

SEQ ID NO: 58212 - DNA, 23 bp, Artificial sequence
  SiRNA target sequence
gcagatattttaaacaacgaata

SEQ ID NO: 58213 - DNA, 23 bp, Artificial sequence
  SiRNA target sequence
cagatattttaaacaacgaataa

SEQ ID NO: 58214 - DNA, 24 bp, Artificial sequence
  SiRNA target sequence
atgaaggaaaaaaccaattatgaa

SEQ ID NO: 58215 - DNA, 24 bp, Artificial sequence
  SiRNA target sequence
tgaaggaaaaaaccaattatgaaa

SEQ ID NO: 58216 - DNA, 24 bp, Artificial sequence
  SiRNA target sequence
gaaggaaaaaaccaattatgaaat

SEQ ID NO: 58217 - DNA, 24 bp, Artificial sequence
  SiRNA target sequence
aaggaaaaaaccaattatgaaatt

SEQ ID NO: 58218 - DNA, 24 bp, Artificial sequence
  SiRNA target sequence
aggaaaaaaccaattatgaaattt

SEQ ID NO: 58219 - DNA, 24 bp, Artificial sequence
  SiRNA target sequence
ggaaaaaaccaattatgaaatttt

SEQ ID NO: 58220 - DNA, 24 bp, Artificial sequence
  SiRNA target sequence
gaaaaaaccaattatgaaatttta

SEQ ID NO: 58221 - DNA, 24 bp, Artificial sequence
  SiRNA target sequence
aaaaaaccaattatgaaattttat

SEQ ID NO: 58222 - DNA, 24 bp, Artificial sequence
  SiRNA target sequence
aaaaaccaattatgaaattttata

SEQ ID NO: 58223 - DNA, 24 bp, Artificial sequence
  SiRNA target sequence
aaaaccaattatgaaattttatat

SEQ ID NO: 58224 - DNA, 24 bp, Artificial sequence
  SiRNA target sequence
aaaccaattatgaaattttatatg

SEQ ID NO: 58225 - DNA, 24 bp, Artificial sequence
  SiRNA target sequence
aaccaattatgaaattttatatga

SEQ ID NO: 58226 - DNA, 24 bp, Artificial sequence
  SiRNA target sequence
accaattatgaaattttatatgat

SEQ ID NO: 58227 - DNA, 24 bp, Artificial sequence
  SiRNA target sequence
ccaattatgaaattttatatgata

SEQ ID NO: 58228 - DNA, 24 bp, Artificial sequence
  SiRNA target sequence
caattatgaaattttatatgatac

SEQ ID NO: 58229 - DNA, 24 bp, Artificial sequence
  SiRNA target sequence
aattatgaaattttatatgataca

SEQ ID NO: 58230 - DNA, 24 bp, Artificial sequence
  SiRNA target sequence
attatgaaattttatatgatacat

SEQ ID NO: 58231 - DNA, 24 bp, Artificial sequence
  SiRNA target sequence
ttatgaaattttatatgatacatt

SEQ ID NO: 58232 - DNA, 24 bp, Artificial sequence
  SiRNA target sequence
tatgaaattttatatgatacattt

SEQ ID NO: 58233 - DNA, 24 bp, Artificial sequence
  SiRNA target sequence
atgaaattttatatgatacatttg

SEQ ID NO: 58234 - DNA, 24 bp, Artificial sequence
  SiRNA target sequence
tgaaattttatatgatacatttgt

SEQ ID NO: 58235 - DNA, 24 bp, Artificial sequence
  SiRNA target sequence
gaaattttatatgatacatttgta

SEQ ID NO: 58236 - DNA, 24 bp, Artificial sequence
  SiRNA target sequence
aaattttatatgatacatttgtaa

SEQ ID NO: 58237 - DNA, 24 bp, Artificial sequence
  SiRNA target sequence
aattttatatgatacatttgtaaa

SEQ ID NO: 58238 - DNA, 24 bp, Artificial sequence
  SiRNA target sequence
attttatatgatacatttgtaaaa

SEQ ID NO: 58239 - DNA, 24 bp, Artificial sequence
  SiRNA target sequence
ttttatatgatacatttgtaaaat

SEQ ID NO: 58240 - DNA, 24 bp, Artificial sequence
  SiRNA target sequence
tttatatgatacatttgtaaaata

SEQ ID NO: 58241 - DNA, 24 bp, Artificial sequence
  SiRNA target sequence
ttatatgatacatttgtaaaatat

SEQ ID NO: 58242 - DNA, 24 bp, Artificial sequence
  SiRNA target sequence
tatatgatacatttgtaaaatatt

SEQ ID NO: 58243 - DNA, 24 bp, Artificial sequence
  SiRNA target sequence
atatgatacatttgtaaaatattg

SEQ ID NO: 58244 - DNA, 24 bp, Artificial sequence
  SiRNA target sequence
tatgatacatttgtaaaatattgt

SEQ ID NO: 58245 - DNA, 24 bp, Artificial sequence
  SiRNA target sequence
atgatacatttgtaaaatattgtt

SEQ ID NO: 58246 - DNA, 24 bp, Artificial sequence
  SiRNA target sequence
tgatacatttgtaaaatattgtta

SEQ ID NO: 58247 - DNA, 24 bp, Artificial sequence
  SiRNA target sequence
gatacatttgtaaaatattgttac

SEQ ID NO: 58248 - DNA, 24 bp, Artificial sequence
  SiRNA target sequence
atacatttgtaaaatattgttaca

SEQ ID NO: 58249 - DNA, 24 bp, Artificial sequence
  SiRNA target sequence
tacatttgtaaaatattgttacaa

SEQ ID NO: 58250 - DNA, 24 bp, Artificial sequence
  SiRNA target sequence
acatttgtaaaatattgttacaat

SEQ ID NO: 58251 - DNA, 24 bp, Artificial sequence
  SiRNA target sequence
catttgtaaaatattgttacaata

SEQ ID NO: 58252 - DNA, 24 bp, Artificial sequence
  SiRNA target sequence
atttgtaaaatattgttacaatat

SEQ ID NO: 58253 - DNA, 24 bp, Artificial sequence
  SiRNA target sequence
tttgtaaaatattgttacaatatt

SEQ ID NO: 58254 - DNA, 24 bp, Artificial sequence
  SiRNA target sequence
ttgtaaaatattgttacaatattt

SEQ ID NO: 58255 - DNA, 24 bp, Artificial sequence
  SiRNA target sequence
tgtaaaatattgttacaatatttc

SEQ ID NO: 58256 - DNA, 24 bp, Artificial sequence
  SiRNA target sequence
gtaaaatattgttacaatatttcc

SEQ ID NO: 58257 - DNA, 24 bp, Artificial sequence
  SiRNA target sequence
taaaatattgttacaatatttcct

SEQ ID NO: 58258 - DNA, 24 bp, Artificial sequence
  SiRNA target sequence
aaaatattgttacaatatttccta

SEQ ID NO: 58259 - DNA, 24 bp, Artificial sequence
  SiRNA target sequence
aaatattgttacaatatttcctat

SEQ ID NO: 58260 - DNA, 24 bp, Artificial sequence
  SiRNA target sequence
aatattgttacaatatttcctata

SEQ ID NO: 58261 - DNA, 24 bp, Artificial sequence
  SiRNA target sequence
atattgttacaatatttcctatat

SEQ ID NO: 58262 - DNA, 24 bp, Artificial sequence
  SiRNA target sequence
tattgttacaatatttcctatata

SEQ ID NO: 58263 - DNA, 24 bp, Artificial sequence
  SiRNA target sequence
attgttacaatatttcctatataa

SEQ ID NO: 58264 - DNA, 24 bp, Artificial sequence
  SiRNA target sequence
ttgttacaatatttcctatataag

SEQ ID NO: 58265 - DNA, 24 bp, Artificial sequence
  SiRNA target sequence
tgttacaatatttcctatataagg

SEQ ID NO: 58266 - DNA, 24 bp, Artificial sequence
  SiRNA target sequence
gttacaatatttcctatataaggt

SEQ ID NO: 58267 - DNA, 24 bp, Artificial sequence
  SiRNA target sequence
ttacaatatttcctatataaggta

SEQ ID NO: 58268 - DNA, 24 bp, Artificial sequence
  SiRNA target sequence
tacaatatttcctatataaggtac

SEQ ID NO: 58269 - DNA, 24 bp, Artificial sequence
  SiRNA target sequence
acaatatttcctatataaggtacg

SEQ ID NO: 58270 - DNA, 24 bp, Artificial sequence
  SiRNA target sequence
caatatttcctatataaggtacgt

SEQ ID NO: 58271 - DNA, 24 bp, Artificial sequence
  SiRNA target sequence
aatatttcctatataaggtacgta

SEQ ID NO: 58272 - DNA, 24 bp, Artificial sequence
  SiRNA target sequence
atatttcctatataaggtacgtaa

SEQ ID NO: 58273 - DNA, 24 bp, Artificial sequence
  SiRNA target sequence
tatttcctatataaggtacgtaat

SEQ ID NO: 58274 - DNA, 24 bp, Artificial sequence
  SiRNA target sequence
atttcctatataaggtacgtaatg

SEQ ID NO: 58275 - DNA, 24 bp, Artificial sequence
  SiRNA target sequence
tttcctatataaggtacgtaatgt

SEQ ID NO: 58276 - DNA, 24 bp, Artificial sequence
  SiRNA target sequence
ttcctatataaggtacgtaatgtt

SEQ ID NO: 58277 - DNA, 24 bp, Artificial sequence
  SiRNA target sequence
tcctatataaggtacgtaatgttt

SEQ ID NO: 58278 - DNA, 24 bp, Artificial sequence
  SiRNA target sequence
cctatataaggtacgtaatgtttc

SEQ ID NO: 58279 - DNA, 24 bp, Artificial sequence
  SiRNA target sequence
ctatataaggtacgtaatgtttcc

SEQ ID NO: 58280 - DNA, 24 bp, Artificial sequence
  SiRNA target sequence
tatataaggtacgtaatgtttccc

SEQ ID NO: 58281 - DNA, 24 bp, Artificial sequence
  SiRNA target sequence
atataaggtacgtaatgtttccca

SEQ ID NO: 58282 - DNA, 24 bp, Artificial sequence
  SiRNA target sequence
tataaggtacgtaatgtttcccat

SEQ ID NO: 58283 - DNA, 24 bp, Artificial sequence
  SiRNA target sequence
ataaggtacgtaatgtttcccata

SEQ ID NO: 58284 - DNA, 24 bp, Artificial sequence
  SiRNA target sequence
taaggtacgtaatgtttcccatat

SEQ ID NO: 58285 - DNA, 24 bp, Artificial sequence
  SiRNA target sequence
aaggtacgtaatgtttcccatatt

SEQ ID NO: 58286 - DNA, 24 bp, Artificial sequence
  SiRNA target sequence
aggtacgtaatgtttcccatatta

SEQ ID NO: 58287 - DNA, 24 bp, Artificial sequence
  SiRNA target sequence
ggtacgtaatgtttcccatattac

SEQ ID NO: 58288 - DNA, 24 bp, Artificial sequence
  SiRNA target sequence
gtacgtaatgtttcccatattact

SEQ ID NO: 58289 - DNA, 24 bp, Artificial sequence
  SiRNA target sequence
tacgtaatgtttcccatattactg

SEQ ID NO: 58290 - DNA, 24 bp, Artificial sequence
  SiRNA target sequence
acgtaatgtttcccatattactgt

SEQ ID NO: 58291 - DNA, 24 bp, Artificial sequence
  SiRNA target sequence
cgtaatgtttcccatattactgtc

SEQ ID NO: 58292 - DNA, 24 bp, Artificial sequence
  SiRNA target sequence
gtaatgtttcccatattactgtct

SEQ ID NO: 58293 - DNA, 24 bp, Artificial sequence
  SiRNA target sequence
taatgtttcccatattactgtcta

SEQ ID NO: 58294 - DNA, 24 bp, Artificial sequence
  SiRNA target sequence
aatgtttcccatattactgtctac

SEQ ID NO: 58295 - DNA, 24 bp, Artificial sequence
  SiRNA target sequence
atgtttcccatattactgtctaca

SEQ ID NO: 58296 - DNA, 24 bp, Artificial sequence
  SiRNA target sequence
tgtttcccatattactgtctacaa

SEQ ID NO: 58297 - DNA, 24 bp, Artificial sequence
  SiRNA target sequence
gtttcccatattactgtctacaat

SEQ ID NO: 58298 - DNA, 24 bp, Artificial sequence
  SiRNA target sequence
tttcccatattactgtctacaatt

SEQ ID NO: 58299 - DNA, 24 bp, Artificial sequence
  SiRNA target sequence
ttcccatattactgtctacaatta

SEQ ID NO: 58300 - DNA, 24 bp, Artificial sequence
  SiRNA target sequence
tcccatattactgtctacaattat

SEQ ID NO: 58301 - DNA, 24 bp, Artificial sequence
  SiRNA target sequence
cccatattactgtctacaattata

SEQ ID NO: 58302 - DNA, 24 bp, Artificial sequence
  SiRNA target sequence
ccatattactgtctacaattatag

SEQ ID NO: 58303 - DNA, 24 bp, Artificial sequence
  SiRNA target sequence
catattactgtctacaattatagc

SEQ ID NO: 58304 - DNA, 24 bp, Artificial sequence
  SiRNA target sequence
atattactgtctacaattatagct

SEQ ID NO: 58305 - DNA, 24 bp, Artificial sequence
  SiRNA target sequence
tattactgtctacaattatagctt

SEQ ID NO: 58306 - DNA, 24 bp, Artificial sequence
  SiRNA target sequence
attactgtctacaattatagcttg

SEQ ID NO: 58307 - DNA, 24 bp, Artificial sequence
  SiRNA target sequence
ttactgtctacaattatagcttgt

SEQ ID NO: 58308 - DNA, 24 bp, Artificial sequence
  SiRNA target sequence
tactgtctacaattatagcttgtt

SEQ ID NO: 58309 - DNA, 24 bp, Artificial sequence
  SiRNA target sequence
actgtctacaattatagcttgtta

SEQ ID NO: 58310 - DNA, 24 bp, Artificial sequence
  SiRNA target sequence
ctgtctacaattatagcttgttat

SEQ ID NO: 58311 - DNA, 24 bp, Artificial sequence
  SiRNA target sequence
tgtctacaattatagcttgttatc

SEQ ID NO: 58312 - DNA, 24 bp, Artificial sequence
  SiRNA target sequence
gtctacaattatagcttgttatct

SEQ ID NO: 58313 - DNA, 24 bp, Artificial sequence
  SiRNA target sequence
tctacaattatagcttgttatctc

SEQ ID NO: 58314 - DNA, 24 bp, Artificial sequence
  SiRNA target sequence
ctacaattatagcttgttatctcg

SEQ ID NO: 58315 - DNA, 24 bp, Artificial sequence
  SiRNA target sequence
tacaattatagcttgttatctcga

SEQ ID NO: 58316 - DNA, 24 bp, Artificial sequence
  SiRNA target sequence
acaattatagcttgttatctcgaa

SEQ ID NO: 58317 - DNA, 24 bp, Artificial sequence
  SiRNA target sequence
caattatagcttgttatctcgaag

SEQ ID NO: 58318 - DNA, 24 bp, Artificial sequence
  SiRNA target sequence
aattatagcttgttatctcgaagt

SEQ ID NO: 58319 - DNA, 24 bp, Artificial sequence
  SiRNA target sequence
attatagcttgttatctcgaagtt

SEQ ID NO: 58320 - DNA, 24 bp, Artificial sequence
  SiRNA target sequence
ttatagcttgttatctcgaagttc

SEQ ID NO: 58321 - DNA, 24 bp, Artificial sequence
  SiRNA target sequence
tatagcttgttatctcgaagttca

SEQ ID NO: 58322 - DNA, 24 bp, Artificial sequence
  SiRNA target sequence
atagcttgttatctcgaagttcag

SEQ ID NO: 58323 - DNA, 24 bp, Artificial sequence
  SiRNA target sequence
tagcttgttatctcgaagttcagg

SEQ ID NO: 58324 - DNA, 24 bp, Artificial sequence
  SiRNA target sequence
agcttgttatctcgaagttcaggc

SEQ ID NO: 58325 - DNA, 24 bp, Artificial sequence
  SiRNA target sequence
gcttgttatctcgaagttcaggca

SEQ ID NO: 58326 - DNA, 24 bp, Artificial sequence
  SiRNA target sequence
cttgttatctcgaagttcaggcaa

SEQ ID NO: 58327 - DNA, 24 bp, Artificial sequence
  SiRNA target sequence
ttgttatctcgaagttcaggcaag

SEQ ID NO: 58328 - DNA, 24 bp, Artificial sequence
  SiRNA target sequence
tgttatctcgaagttcaggcaagt

SEQ ID NO: 58329 - DNA, 24 bp, Artificial sequence
  SiRNA target sequence
gttatctcgaagttcaggcaagta

SEQ ID NO: 58330 - DNA, 24 bp, Artificial sequence
  SiRNA target sequence
ttatctcgaagttcaggcaagtaa

SEQ ID NO: 58331 - DNA, 24 bp, Artificial sequence
  SiRNA target sequence
tatctcgaagttcaggcaagtaac

SEQ ID NO: 58332 - DNA, 24 bp, Artificial sequence
  SiRNA target sequence
atctcgaagttcaggcaagtaaca

SEQ ID NO: 58333 - DNA, 24 bp, Artificial sequence
  SiRNA target sequence
tctcgaagttcaggcaagtaacat

SEQ ID NO: 58334 - DNA, 24 bp, Artificial sequence
  SiRNA target sequence
ctcgaagttcaggcaagtaacata

SEQ ID NO: 58335 - DNA, 24 bp, Artificial sequence
  SiRNA target sequence
tcgaagttcaggcaagtaacatat

SEQ ID NO: 58336 - DNA, 24 bp, Artificial sequence
  SiRNA target sequence
cgaagttcaggcaagtaacatatc

SEQ ID NO: 58337 - DNA, 24 bp, Artificial sequence
  SiRNA target sequence
gaagttcaggcaagtaacatatca

SEQ ID NO: 58338 - DNA, 24 bp, Artificial sequence
  SiRNA target sequence
aagttcaggcaagtaacatatcaa

SEQ ID NO: 58339 - DNA, 24 bp, Artificial sequence
  SiRNA target sequence
agttcaggcaagtaacatatcaaa

SEQ ID NO: 58340 - DNA, 24 bp, Artificial sequence
  SiRNA target sequence
gttcaggcaagtaacatatcaaaa

SEQ ID NO: 58341 - DNA, 24 bp, Artificial sequence
  SiRNA target sequence
ttcaggcaagtaacatatcaaaaa

SEQ ID NO: 58342 - DNA, 24 bp, Artificial sequence
  SiRNA target sequence
tcaggcaagtaacatatcaaaaag

SEQ ID NO: 58343 - DNA, 24 bp, Artificial sequence
  SiRNA target sequence
caggcaagtaacatatcaaaaaga

SEQ ID NO: 58344 - DNA, 24 bp, Artificial sequence
  SiRNA target sequence
aggcaagtaacatatcaaaaagaa

SEQ ID NO: 58345 - DNA, 24 bp, Artificial sequence
  SiRNA target sequence
ggcaagtaacatatcaaaaagaat

SEQ ID NO: 58346 - DNA, 24 bp, Artificial sequence
  SiRNA target sequence
gcaagtaacatatcaaaaagaatt

SEQ ID NO: 58347 - DNA, 24 bp, Artificial sequence
  SiRNA target sequence
caagtaacatatcaaaaagaattg

SEQ ID NO: 58348 - DNA, 24 bp, Artificial sequence
  SiRNA target sequence
aagtaacatatcaaaaagaattgc

SEQ ID NO: 58349 - DNA, 24 bp, Artificial sequence
  SiRNA target sequence
agtaacatatcaaaaagaattgca

SEQ ID NO: 58350 - DNA, 24 bp, Artificial sequence
  SiRNA target sequence
gtaacatatcaaaaagaattgcag

SEQ ID NO: 58351 - DNA, 24 bp, Artificial sequence
  SiRNA target sequence
taacatatcaaaaagaattgcaga

SEQ ID NO: 58352 - DNA, 24 bp, Artificial sequence
  SiRNA target sequence
aacatatcaaaaagaattgcagaa

SEQ ID NO: 58353 - DNA, 24 bp, Artificial sequence
  SiRNA target sequence
acatatcaaaaagaattgcagaag

SEQ ID NO: 58354 - DNA, 24 bp, Artificial sequence
  SiRNA target sequence
catatcaaaaagaattgcagaaga

SEQ ID NO: 58355 - DNA, 24 bp, Artificial sequence
  SiRNA target sequence
atatcaaaaagaattgcagaagat

SEQ ID NO: 58356 - DNA, 24 bp, Artificial sequence
  SiRNA target sequence
tatcaaaaagaattgcagaagatt

SEQ ID NO: 58357 - DNA, 24 bp, Artificial sequence
  SiRNA target sequence
atcaaaaagaattgcagaagattt

SEQ ID NO: 58358 - DNA, 24 bp, Artificial sequence
  SiRNA target sequence
tcaaaaagaattgcagaagatttt

SEQ ID NO: 58359 - DNA, 24 bp, Artificial sequence
  SiRNA target sequence
caaaaagaattgcagaagattttg

SEQ ID NO: 58360 - DNA, 24 bp, Artificial sequence
  SiRNA target sequence
aaaaagaattgcagaagattttga

SEQ ID NO: 58361 - DNA, 24 bp, Artificial sequence
  SiRNA target sequence
aaaagaattgcagaagattttgaa

SEQ ID NO: 58362 - DNA, 24 bp, Artificial sequence
  SiRNA target sequence
aaagaattgcagaagattttgaaa

SEQ ID NO: 58363 - DNA, 24 bp, Artificial sequence
  SiRNA target sequence
aagaattgcagaagattttgaaaa

SEQ ID NO: 58364 - DNA, 24 bp, Artificial sequence
  SiRNA target sequence
agaattgcagaagattttgaaaat

SEQ ID NO: 58365 - DNA, 24 bp, Artificial sequence
  SiRNA target sequence
gaattgcagaagattttgaaaata

SEQ ID NO: 58366 - DNA, 24 bp, Artificial sequence
  SiRNA target sequence
aattgcagaagattttgaaaataa

SEQ ID NO: 58367 - DNA, 24 bp, Artificial sequence
  SiRNA target sequence
attgcagaagattttgaaaataaa

SEQ ID NO: 58368 - DNA, 24 bp, Artificial sequence
  SiRNA target sequence
ttgcagaagattttgaaaataaaa

SEQ ID NO: 58369 - DNA, 24 bp, Artificial sequence
  SiRNA target sequence
tgcagaagattttgaaaataaaat

SEQ ID NO: 58370 - DNA, 24 bp, Artificial sequence
  SiRNA target sequence
gcagaagattttgaaaataaaata

SEQ ID NO: 58371 - DNA, 24 bp, Artificial sequence
  SiRNA target sequence
cagaagattttgaaaataaaataa

SEQ ID NO: 58372 - DNA, 24 bp, Artificial sequence
  SiRNA target sequence
agaagattttgaaaataaaataaa

SEQ ID NO: 58373 - DNA, 24 bp, Artificial sequence
  SiRNA target sequence
gaagattttgaaaataaaataaat

SEQ ID NO: 58374 - DNA, 24 bp, Artificial sequence
  SiRNA target sequence
aagattttgaaaataaaataaatg

SEQ ID NO: 58375 - DNA, 24 bp, Artificial sequence
  SiRNA target sequence
agattttgaaaataaaataaatgc

SEQ ID NO: 58376 - DNA, 24 bp, Artificial sequence
  SiRNA target sequence
gattttgaaaataaaataaatgca

SEQ ID NO: 58377 - DNA, 24 bp, Artificial sequence
  SiRNA target sequence
attttgaaaataaaataaatgcag

SEQ ID NO: 58378 - DNA, 24 bp, Artificial sequence
  SiRNA target sequence
ttttgaaaataaaataaatgcagg

SEQ ID NO: 58379 - DNA, 24 bp, Artificial sequence
  SiRNA target sequence
tttgaaaataaaataaatgcagga

SEQ ID NO: 58380 - DNA, 24 bp, Artificial sequence
  SiRNA target sequence
ttgaaaataaaataaatgcaggaa

SEQ ID NO: 58381 - DNA, 24 bp, Artificial sequence
  SiRNA target sequence
tgaaaataaaataaatgcaggaaa

SEQ ID NO: 58382 - DNA, 24 bp, Artificial sequence
  SiRNA target sequence
gaaaataaaataaatgcaggaaaa

SEQ ID NO: 58383 - DNA, 24 bp, Artificial sequence
  SiRNA target sequence
aaaataaaataaatgcaggaaaaa

SEQ ID NO: 58384 - DNA, 24 bp, Artificial sequence
  SiRNA target sequence
aaataaaataaatgcaggaaaaag

SEQ ID NO: 58385 - DNA, 24 bp, Artificial sequence
  SiRNA target sequence
aataaaataaatgcaggaaaaagt

SEQ ID NO: 58386 - DNA, 24 bp, Artificial sequence
  SiRNA target sequence
ataaaataaatgcaggaaaaagta

SEQ ID NO: 58387 - DNA, 24 bp, Artificial sequence
  SiRNA target sequence
taaaataaatgcaggaaaaagtat

SEQ ID NO: 58388 - DNA, 24 bp, Artificial sequence
  SiRNA target sequence
aaaataaatgcaggaaaaagtata

SEQ ID NO: 58389 - DNA, 24 bp, Artificial sequence
  SiRNA target sequence
aaataaatgcaggaaaaagtatat

SEQ ID NO: 58390 - DNA, 24 bp, Artificial sequence
  SiRNA target sequence
aataaatgcaggaaaaagtatatt

SEQ ID NO: 58391 - DNA, 24 bp, Artificial sequence
  SiRNA target sequence
ataaatgcaggaaaaagtatattt

SEQ ID NO: 58392 - DNA, 24 bp, Artificial sequence
  SiRNA target sequence
taaatgcaggaaaaagtatattta

SEQ ID NO: 58393 - DNA, 24 bp, Artificial sequence
  SiRNA target sequence
aaatgcaggaaaaagtatatttaa

SEQ ID NO: 58394 - DNA, 24 bp, Artificial sequence
  SiRNA target sequence
aatgcaggaaaaagtatatttaaa

SEQ ID NO: 58395 - DNA, 24 bp, Artificial sequence
  SiRNA target sequence
atgcaggaaaaagtatatttaaat

SEQ ID NO: 58396 - DNA, 24 bp, Artificial sequence
  SiRNA target sequence
tgcaggaaaaagtatatttaaata

SEQ ID NO: 58397 - DNA, 24 bp, Artificial sequence
  SiRNA target sequence
gcaggaaaaagtatatttaaatat

SEQ ID NO: 58398 - DNA, 24 bp, Artificial sequence
  SiRNA target sequence
caggaaaaagtatatttaaatata

SEQ ID NO: 58399 - DNA, 24 bp, Artificial sequence
  SiRNA target sequence
aggaaaaagtatatttaaatatat

SEQ ID NO: 58400 - DNA, 24 bp, Artificial sequence
  SiRNA target sequence
ggaaaaagtatatttaaatatatt

SEQ ID NO: 58401 - DNA, 24 bp, Artificial sequence
  SiRNA target sequence
gaaaaagtatatttaaatatattt

SEQ ID NO: 58402 - DNA, 24 bp, Artificial sequence
  SiRNA target sequence
aaaaagtatatttaaatatatttt

SEQ ID NO: 58403 - DNA, 24 bp, Artificial sequence
  SiRNA target sequence
aaaagtatatttaaatatatttta

SEQ ID NO: 58404 - DNA, 24 bp, Artificial sequence
  SiRNA target sequence
aaagtatatttaaatatattttat

SEQ ID NO: 58405 - DNA, 24 bp, Artificial sequence
  SiRNA target sequence
aagtatatttaaatatattttatt

SEQ ID NO: 58406 - DNA, 24 bp, Artificial sequence
  SiRNA target sequence
agtatatttaaatatattttattt

SEQ ID NO: 58407 - DNA, 24 bp, Artificial sequence
  SiRNA target sequence
gtatatttaaatatattttatttt

SEQ ID NO: 58408 - DNA, 24 bp, Artificial sequence
  SiRNA target sequence
tatatttaaatatattttattttt

SEQ ID NO: 58409 - DNA, 24 bp, Artificial sequence
  SiRNA target sequence
atatttaaatatattttattttta

SEQ ID NO: 58410 - DNA, 24 bp, Artificial sequence
  SiRNA target sequence
tatttaaatatattttatttttaa

SEQ ID NO: 58411 - DNA, 24 bp, Artificial sequence
  SiRNA target sequence
atttaaatatattttatttttaac

SEQ ID NO: 58412 - DNA, 24 bp, Artificial sequence
  SiRNA target sequence
tttaaatatattttatttttaact

SEQ ID NO: 58413 - DNA, 24 bp, Artificial sequence
  SiRNA target sequence
ttaaatatattttatttttaactt

SEQ ID NO: 58414 - DNA, 24 bp, Artificial sequence
  SiRNA target sequence
taaatatattttatttttaacttc

SEQ ID NO: 58415 - DNA, 24 bp, Artificial sequence
  SiRNA target sequence
aaatatattttatttttaacttca

SEQ ID NO: 58416 - DNA, 24 bp, Artificial sequence
  SiRNA target sequence
aatatattttatttttaacttcat

SEQ ID NO: 58417 - DNA, 24 bp, Artificial sequence
  SiRNA target sequence
atatattttatttttaacttcatc

SEQ ID NO: 58418 - DNA, 24 bp, Artificial sequence
  SiRNA target sequence
tatattttatttttaacttcatca

SEQ ID NO: 58419 - DNA, 24 bp, Artificial sequence
  SiRNA target sequence
atattttatttttaacttcatcaa

SEQ ID NO: 58420 - DNA, 24 bp, Artificial sequence
  SiRNA target sequence
tattttatttttaacttcatcaat

SEQ ID NO: 58421 - DNA, 24 bp, Artificial sequence
  SiRNA target sequence
attttatttttaacttcatcaata

SEQ ID NO: 58422 - DNA, 24 bp, Artificial sequence
  SiRNA target sequence
ttttatttttaacttcatcaatag

SEQ ID NO: 58423 - DNA, 24 bp, Artificial sequence
  SiRNA target sequence
tttatttttaacttcatcaatagt

SEQ ID NO: 58424 - DNA, 24 bp, Artificial sequence
  SiRNA target sequence
ttatttttaacttcatcaatagta

SEQ ID NO: 58425 - DNA, 24 bp, Artificial sequence
  SiRNA target sequence
tatttttaacttcatcaatagtat

SEQ ID NO: 58426 - DNA, 24 bp, Artificial sequence
  SiRNA target sequence
atttttaacttcatcaatagtatt

SEQ ID NO: 58427 - DNA, 24 bp, Artificial sequence
  SiRNA target sequence
tttttaacttcatcaatagtatta

SEQ ID NO: 58428 - DNA, 24 bp, Artificial sequence
  SiRNA target sequence
ttttaacttcatcaatagtattaa

SEQ ID NO: 58429 - DNA, 24 bp, Artificial sequence
  SiRNA target sequence
tttaacttcatcaatagtattaag

SEQ ID NO: 58430 - DNA, 24 bp, Artificial sequence
  SiRNA target sequence
ttaacttcatcaatagtattaaga

SEQ ID NO: 58431 - DNA, 24 bp, Artificial sequence
  SiRNA target sequence
taacttcatcaatagtattaagac

SEQ ID NO: 58432 - DNA, 24 bp, Artificial sequence
  SiRNA target sequence
aacttcatcaatagtattaagaca

SEQ ID NO: 58433 - DNA, 24 bp, Artificial sequence
  SiRNA target sequence
acttcatcaatagtattaagacaa

SEQ ID NO: 58434 - DNA, 24 bp, Artificial sequence
  SiRNA target sequence
cttcatcaatagtattaagacaaa

SEQ ID NO: 58435 - DNA, 24 bp, Artificial sequence
  SiRNA target sequence
ttcatcaatagtattaagacaaat

SEQ ID NO: 58436 - DNA, 24 bp, Artificial sequence
  SiRNA target sequence
tcatcaatagtattaagacaaatt

SEQ ID NO: 58437 - DNA, 24 bp, Artificial sequence
  SiRNA target sequence
catcaatagtattaagacaaatta

SEQ ID NO: 58438 - DNA, 24 bp, Artificial sequence
  SiRNA target sequence
atcaatagtattaagacaaattaa

SEQ ID NO: 58439 - DNA, 24 bp, Artificial sequence
  SiRNA target sequence
tcaatagtattaagacaaattaat

SEQ ID NO: 58440 - DNA, 24 bp, Artificial sequence
  SiRNA target sequence
caatagtattaagacaaattaatg

SEQ ID NO: 58441 - DNA, 24 bp, Artificial sequence
  SiRNA target sequence
aatagtattaagacaaattaatga

SEQ ID NO: 58442 - DNA, 24 bp, Artificial sequence
  SiRNA target sequence
atagtattaagacaaattaatgat

SEQ ID NO: 58443 - DNA, 24 bp, Artificial sequence
  SiRNA target sequence
tagtattaagacaaattaatgata

SEQ ID NO: 58444 - DNA, 24 bp, Artificial sequence
  SiRNA target sequence
agtattaagacaaattaatgatat

SEQ ID NO: 58445 - DNA, 24 bp, Artificial sequence
  SiRNA target sequence
gtattaagacaaattaatgatatt

SEQ ID NO: 58446 - DNA, 24 bp, Artificial sequence
  SiRNA target sequence
tattaagacaaattaatgatattg

SEQ ID NO: 58447 - DNA, 24 bp, Artificial sequence
  SiRNA target sequence
attaagacaaattaatgatattgt

SEQ ID NO: 58448 - DNA, 24 bp, Artificial sequence
  SiRNA target sequence
ttaagacaaattaatgatattgtg

SEQ ID NO: 58449 - DNA, 24 bp, Artificial sequence
  SiRNA target sequence
taagacaaattaatgatattgtgt

SEQ ID NO: 58450 - DNA, 24 bp, Artificial sequence
  SiRNA target sequence
aagacaaattaatgatattgtgtt

SEQ ID NO: 58451 - DNA, 24 bp, Artificial sequence
  SiRNA target sequence
agacaaattaatgatattgtgttt

SEQ ID NO: 58452 - DNA, 24 bp, Artificial sequence
  SiRNA target sequence
gacaaattaatgatattgtgttta

SEQ ID NO: 58453 - DNA, 24 bp, Artificial sequence
  SiRNA target sequence
acaaattaatgatattgtgtttag

SEQ ID NO: 58454 - DNA, 24 bp, Artificial sequence
  SiRNA target sequence
caaattaatgatattgtgtttagc

SEQ ID NO: 58455 - DNA, 24 bp, Artificial sequence
  SiRNA target sequence
aaattaatgatattgtgtttagcg

SEQ ID NO: 58456 - DNA, 24 bp, Artificial sequence
  SiRNA target sequence
aattaatgatattgtgtttagcgg

SEQ ID NO: 58457 - DNA, 24 bp, Artificial sequence
  SiRNA target sequence
attaatgatattgtgtttagcggg

SEQ ID NO: 58458 - DNA, 24 bp, Artificial sequence
  SiRNA target sequence
ttaatgatattgtgtttagcgggc

SEQ ID NO: 58459 - DNA, 24 bp, Artificial sequence
  SiRNA target sequence
taatgatattgtgtttagcgggcc

SEQ ID NO: 58460 - DNA, 24 bp, Artificial sequence
  SiRNA target sequence
aatgatattgtgtttagcgggcca

SEQ ID NO: 58461 - DNA, 24 bp, Artificial sequence
  SiRNA target sequence
atgatattgtgtttagcgggccaa

SEQ ID NO: 58462 - DNA, 24 bp, Artificial sequence
  SiRNA target sequence
tgatattgtgtttagcgggccaat

SEQ ID NO: 58463 - DNA, 24 bp, Artificial sequence
  SiRNA target sequence
gatattgtgtttagcgggccaata

SEQ ID NO: 58464 - DNA, 24 bp, Artificial sequence
  SiRNA target sequence
atattgtgtttagcgggccaatac

SEQ ID NO: 58465 - DNA, 24 bp, Artificial sequence
  SiRNA target sequence
tattgtgtttagcgggccaataca

SEQ ID NO: 58466 - DNA, 24 bp, Artificial sequence
  SiRNA target sequence
attgtgtttagcgggccaatacaa

SEQ ID NO: 58467 - DNA, 24 bp, Artificial sequence
  SiRNA target sequence
ttgtgtttagcgggccaatacaat

SEQ ID NO: 58468 - DNA, 24 bp, Artificial sequence
  SiRNA target sequence
tgtgtttagcgggccaatacaatt

SEQ ID NO: 58469 - DNA, 24 bp, Artificial sequence
  SiRNA target sequence
gtgtttagcgggccaatacaattt

SEQ ID NO: 58470 - DNA, 24 bp, Artificial sequence
  SiRNA target sequence
tgtttagcgggccaatacaatttt

SEQ ID NO: 58471 - DNA, 24 bp, Artificial sequence
  SiRNA target sequence
gtttagcgggccaatacaattttt

SEQ ID NO: 58472 - DNA, 24 bp, Artificial sequence
  SiRNA target sequence
tttagcgggccaatacaattttta

SEQ ID NO: 58473 - DNA, 24 bp, Artificial sequence
  SiRNA target sequence
ttagcgggccaatacaatttttat

SEQ ID NO: 58474 - DNA, 24 bp, Artificial sequence
  SiRNA target sequence
tagcgggccaatacaatttttata

SEQ ID NO: 58475 - DNA, 24 bp, Artificial sequence
  SiRNA target sequence
agcgggccaatacaatttttatat

SEQ ID NO: 58476 - DNA, 24 bp, Artificial sequence
  SiRNA target sequence
gcgggccaatacaatttttatata

SEQ ID NO: 58477 - DNA, 24 bp, Artificial sequence
  SiRNA target sequence
cgggccaatacaatttttatataa

SEQ ID NO: 58478 - DNA, 24 bp, Artificial sequence
  SiRNA target sequence
gggccaatacaatttttatataaa

SEQ ID NO: 58479 - DNA, 24 bp, Artificial sequence
  SiRNA target sequence
ggccaatacaatttttatataaaa

SEQ ID NO: 58480 - DNA, 24 bp, Artificial sequence
  SiRNA target sequence
gccaatacaatttttatataaaat

SEQ ID NO: 58481 - DNA, 24 bp, Artificial sequence
  SiRNA target sequence
ccaatacaatttttatataaaatt

SEQ ID NO: 58482 - DNA, 24 bp, Artificial sequence
  SiRNA target sequence
caatacaatttttatataaaattg

SEQ ID NO: 58483 - DNA, 24 bp, Artificial sequence
  SiRNA target sequence
aatacaatttttatataaaattgt

SEQ ID NO: 58484 - DNA, 24 bp, Artificial sequence
  SiRNA target sequence
atacaatttttatataaaattgtt

SEQ ID NO: 58485 - DNA, 24 bp, Artificial sequence
  SiRNA target sequence
tacaatttttatataaaattgttg

SEQ ID NO: 58486 - DNA, 24 bp, Artificial sequence
  SiRNA target sequence
acaatttttatataaaattgttgg

SEQ ID NO: 58487 - DNA, 24 bp, Artificial sequence
  SiRNA target sequence
caatttttatataaaattgttgga

SEQ ID NO: 58488 - DNA, 24 bp, Artificial sequence
  SiRNA target sequence
aatttttatataaaattgttggag

SEQ ID NO: 58489 - DNA, 24 bp, Artificial sequence
  SiRNA target sequence
atttttatataaaattgttggagt

SEQ ID NO: 58490 - DNA, 24 bp, Artificial sequence
  SiRNA target sequence
tttttatataaaattgttggagtt

SEQ ID NO: 58491 - DNA, 24 bp, Artificial sequence
  SiRNA target sequence
ttttatataaaattgttggagttg

SEQ ID NO: 58492 - DNA, 24 bp, Artificial sequence
  SiRNA target sequence
tttatataaaattgttggagttga

SEQ ID NO: 58493 - DNA, 24 bp, Artificial sequence
  SiRNA target sequence
ttatataaaattgttggagttgaa

SEQ ID NO: 58494 - DNA, 24 bp, Artificial sequence
  SiRNA target sequence
tatataaaattgttggagttgaag

SEQ ID NO: 58495 - DNA, 24 bp, Artificial sequence
  SiRNA target sequence
atataaaattgttggagttgaagc

SEQ ID NO: 58496 - DNA, 24 bp, Artificial sequence
  SiRNA target sequence
tataaaattgttggagttgaagca

SEQ ID NO: 58497 - DNA, 24 bp, Artificial sequence
  SiRNA target sequence
ataaaattgttggagttgaagcat

SEQ ID NO: 58498 - DNA, 24 bp, Artificial sequence
  SiRNA target sequence
taaaattgttggagttgaagcatt

SEQ ID NO: 58499 - DNA, 24 bp, Artificial sequence
  SiRNA target sequence
aaaattgttggagttgaagcattt

SEQ ID NO: 58500 - DNA, 24 bp, Artificial sequence
  SiRNA target sequence
aaattgttggagttgaagcatttt

SEQ ID NO: 58501 - DNA, 24 bp, Artificial sequence
  SiRNA target sequence
aattgttggagttgaagcatttta

SEQ ID NO: 58502 - DNA, 24 bp, Artificial sequence
  SiRNA target sequence
attgttggagttgaagcattttat

SEQ ID NO: 58503 - DNA, 24 bp, Artificial sequence
  SiRNA target sequence
ttgttggagttgaagcattttatc

SEQ ID NO: 58504 - DNA, 24 bp, Artificial sequence
  SiRNA target sequence
tgttggagttgaagcattttatca

SEQ ID NO: 58505 - DNA, 24 bp, Artificial sequence
  SiRNA target sequence
gttggagttgaagcattttatcat

SEQ ID NO: 58506 - DNA, 24 bp, Artificial sequence
  SiRNA target sequence
ttggagttgaagcattttatcatt

SEQ ID NO: 58507 - DNA, 24 bp, Artificial sequence
  SiRNA target sequence
tggagttgaagcattttatcatta

SEQ ID NO: 58508 - DNA, 24 bp, Artificial sequence
  SiRNA target sequence
ggagttgaagcattttatcattac

SEQ ID NO: 58509 - DNA, 24 bp, Artificial sequence
  SiRNA target sequence
gagttgaagcattttatcattaca

SEQ ID NO: 58510 - DNA, 24 bp, Artificial sequence
  SiRNA target sequence
agttgaagcattttatcattacat

SEQ ID NO: 58511 - DNA, 24 bp, Artificial sequence
  SiRNA target sequence
gttgaagcattttatcattacatt

SEQ ID NO: 58512 - DNA, 24 bp, Artificial sequence
  SiRNA target sequence
ttgaagcattttatcattacattt

SEQ ID NO: 58513 - DNA, 24 bp, Artificial sequence
  SiRNA target sequence
tgaagcattttatcattacatttc

SEQ ID NO: 58514 - DNA, 24 bp, Artificial sequence
  SiRNA target sequence
gaagcattttatcattacatttca

SEQ ID NO: 58515 - DNA, 24 bp, Artificial sequence
  SiRNA target sequence
aagcattttatcattacatttcat

SEQ ID NO: 58516 - DNA, 24 bp, Artificial sequence
  SiRNA target sequence
agcattttatcattacatttcatt

SEQ ID NO: 58517 - DNA, 24 bp, Artificial sequence
  SiRNA target sequence
gcattttatcattacatttcatta

SEQ ID NO: 58518 - DNA, 24 bp, Artificial sequence
  SiRNA target sequence
cattttatcattacatttcattaa

SEQ ID NO: 58519 - DNA, 24 bp, Artificial sequence
  SiRNA target sequence
attttatcattacatttcattaaa

SEQ ID NO: 58520 - DNA, 24 bp, Artificial sequence
  SiRNA target sequence
ttttatcattacatttcattaaac

SEQ ID NO: 58521 - DNA, 24 bp, Artificial sequence
  SiRNA target sequence
tttatcattacatttcattaaact

SEQ ID NO: 58522 - DNA, 24 bp, Artificial sequence
  SiRNA target sequence
ttatcattacatttcattaaactt

SEQ ID NO: 58523 - DNA, 24 bp, Artificial sequence
  SiRNA target sequence
tatcattacatttcattaaactta

SEQ ID NO: 58524 - DNA, 24 bp, Artificial sequence
  SiRNA target sequence
atcattacatttcattaaacttag

SEQ ID NO: 58525 - DNA, 24 bp, Artificial sequence
  SiRNA target sequence
tcattacatttcattaaacttaga

SEQ ID NO: 58526 - DNA, 24 bp, Artificial sequence
  SiRNA target sequence
cattacatttcattaaacttagaa

SEQ ID NO: 58527 - DNA, 24 bp, Artificial sequence
  SiRNA target sequence
attacatttcattaaacttagaaa

SEQ ID NO: 58528 - DNA, 24 bp, Artificial sequence
  SiRNA target sequence
ttacatttcattaaacttagaaaa

SEQ ID NO: 58529 - DNA, 24 bp, Artificial sequence
  SiRNA target sequence
tacatttcattaaacttagaaaat

SEQ ID NO: 58530 - DNA, 24 bp, Artificial sequence
  SiRNA target sequence
acatttcattaaacttagaaaatt

SEQ ID NO: 58531 - DNA, 24 bp, Artificial sequence
  SiRNA target sequence
catttcattaaacttagaaaattt

SEQ ID NO: 58532 - DNA, 24 bp, Artificial sequence
  SiRNA target sequence
atttcattaaacttagaaaatttt

SEQ ID NO: 58533 - DNA, 24 bp, Artificial sequence
  SiRNA target sequence
tttcattaaacttagaaaatttta

SEQ ID NO: 58534 - DNA, 24 bp, Artificial sequence
  SiRNA target sequence
ttcattaaacttagaaaattttaa

SEQ ID NO: 58535 - DNA, 24 bp, Artificial sequence
  SiRNA target sequence
tcattaaacttagaaaattttaac

SEQ ID NO: 58536 - DNA, 24 bp, Artificial sequence
  SiRNA target sequence
cattaaacttagaaaattttaaca

SEQ ID NO: 58537 - DNA, 24 bp, Artificial sequence
  SiRNA target sequence
attaaacttagaaaattttaacaa

SEQ ID NO: 58538 - DNA, 24 bp, Artificial sequence
  SiRNA target sequence
ttaaacttagaaaattttaacaaa

SEQ ID NO: 58539 - DNA, 24 bp, Artificial sequence
  SiRNA target sequence
taaacttagaaaattttaacaaaa

SEQ ID NO: 58540 - DNA, 24 bp, Artificial sequence
  SiRNA target sequence
aaacttagaaaattttaacaaaat

SEQ ID NO: 58541 - DNA, 24 bp, Artificial sequence
  SiRNA target sequence
aacttagaaaattttaacaaaata

SEQ ID NO: 58542 - DNA, 24 bp, Artificial sequence
  SiRNA target sequence
acttagaaaattttaacaaaatag

SEQ ID NO: 58543 - DNA, 24 bp, Artificial sequence
  SiRNA target sequence
cttagaaaattttaacaaaatagg

SEQ ID NO: 58544 - DNA, 24 bp, Artificial sequence
  SiRNA target sequence
ttagaaaattttaacaaaatagga

SEQ ID NO: 58545 - DNA, 24 bp, Artificial sequence
  SiRNA target sequence
tagaaaattttaacaaaataggaa

SEQ ID NO: 58546 - DNA, 24 bp, Artificial sequence
  SiRNA target sequence
agaaaattttaacaaaataggaag

SEQ ID NO: 58547 - DNA, 24 bp, Artificial sequence
  SiRNA target sequence
gaaaattttaacaaaataggaagt

SEQ ID NO: 58548 - DNA, 24 bp, Artificial sequence
  SiRNA target sequence
aaaattttaacaaaataggaagtg

SEQ ID NO: 58549 - DNA, 24 bp, Artificial sequence
  SiRNA target sequence
aaattttaacaaaataggaagtgg

SEQ ID NO: 58550 - DNA, 24 bp, Artificial sequence
  SiRNA target sequence
aattttaacaaaataggaagtgga

SEQ ID NO: 58551 - DNA, 24 bp, Artificial sequence
  SiRNA target sequence
attttaacaaaataggaagtggag

SEQ ID NO: 58552 - DNA, 24 bp, Artificial sequence
  SiRNA target sequence
ttttaacaaaataggaagtggaga

SEQ ID NO: 58553 - DNA, 24 bp, Artificial sequence
  SiRNA target sequence
tttaacaaaataggaagtggagag

SEQ ID NO: 58554 - DNA, 24 bp, Artificial sequence
  SiRNA target sequence
ttaacaaaataggaagtggagaga

SEQ ID NO: 58555 - DNA, 24 bp, Artificial sequence
  SiRNA target sequence
taacaaaataggaagtggagagat

SEQ ID NO: 58556 - DNA, 24 bp, Artificial sequence
  SiRNA target sequence
aacaaaataggaagtggagagata

SEQ ID NO: 58557 - DNA, 24 bp, Artificial sequence
  SiRNA target sequence
acaaaataggaagtggagagatac

SEQ ID NO: 58558 - DNA, 24 bp, Artificial sequence
  SiRNA target sequence
caaaataggaagtggagagataca

SEQ ID NO: 58559 - DNA, 24 bp, Artificial sequence
  SiRNA target sequence
aaaataggaagtggagagatacaa

SEQ ID NO: 58560 - DNA, 24 bp, Artificial sequence
  SiRNA target sequence
aaataggaagtggagagatacaaa

SEQ ID NO: 58561 - DNA, 24 bp, Artificial sequence
  SiRNA target sequence
aataggaagtggagagatacaaat

SEQ ID NO: 58562 - DNA, 24 bp, Artificial sequence
  SiRNA target sequence
ataggaagtggagagatacaaatg

SEQ ID NO: 58563 - DNA, 24 bp, Artificial sequence
  SiRNA target sequence
taggaagtggagagatacaaatga

SEQ ID NO: 58564 - DNA, 24 bp, Artificial sequence
  SiRNA target sequence
aggaagtggagagatacaaatgat

SEQ ID NO: 58565 - DNA, 24 bp, Artificial sequence
  SiRNA target sequence
ggaagtggagagatacaaatgatt

SEQ ID NO: 58566 - DNA, 24 bp, Artificial sequence
  SiRNA target sequence
gaagtggagagatacaaatgatta

SEQ ID NO: 58567 - DNA, 24 bp, Artificial sequence
  SiRNA target sequence
aagtggagagatacaaatgattat

SEQ ID NO: 58568 - DNA, 24 bp, Artificial sequence
  SiRNA target sequence
agtggagagatacaaatgattatt

SEQ ID NO: 58569 - DNA, 24 bp, Artificial sequence
  SiRNA target sequence
gtggagagatacaaatgattattg

SEQ ID NO: 58570 - DNA, 24 bp, Artificial sequence
  SiRNA target sequence
tggagagatacaaatgattattga

SEQ ID NO: 58571 - DNA, 24 bp, Artificial sequence
  SiRNA target sequence
ggagagatacaaatgattattgag

SEQ ID NO: 58572 - DNA, 24 bp, Artificial sequence
  SiRNA target sequence
gagagatacaaatgattattgagc

SEQ ID NO: 58573 - DNA, 24 bp, Artificial sequence
  SiRNA target sequence
agagatacaaatgattattgagcg

SEQ ID NO: 58574 - DNA, 24 bp, Artificial sequence
  SiRNA target sequence
gagatacaaatgattattgagcgg

SEQ ID NO: 58575 - DNA, 24 bp, Artificial sequence
  SiRNA target sequence
agatacaaatgattattgagcgga

SEQ ID NO: 58576 - DNA, 24 bp, Artificial sequence
  SiRNA target sequence
gatacaaatgattattgagcggaa

SEQ ID NO: 58577 - DNA, 24 bp, Artificial sequence
  SiRNA target sequence
atacaaatgattattgagcggaaa

SEQ ID NO: 58578 - DNA, 24 bp, Artificial sequence
  SiRNA target sequence
tacaaatgattattgagcggaaaa

SEQ ID NO: 58579 - DNA, 24 bp, Artificial sequence
  SiRNA target sequence
acaaatgattattgagcggaaaag

SEQ ID NO: 58580 - DNA, 24 bp, Artificial sequence
  SiRNA target sequence
caaatgattattgagcggaaaagt

SEQ ID NO: 58581 - DNA, 24 bp, Artificial sequence
  SiRNA target sequence
aaatgattattgagcggaaaagta

SEQ ID NO: 58582 - DNA, 24 bp, Artificial sequence
  SiRNA target sequence
aatgattattgagcggaaaagtag

SEQ ID NO: 58583 - DNA, 24 bp, Artificial sequence
  SiRNA target sequence
atgattattgagcggaaaagtaga

SEQ ID NO: 58584 - DNA, 24 bp, Artificial sequence
  SiRNA target sequence
tgattattgagcggaaaagtagag

SEQ ID NO: 58585 - DNA, 24 bp, Artificial sequence
  SiRNA target sequence
gattattgagcggaaaagtagagc

SEQ ID NO: 58586 - DNA, 24 bp, Artificial sequence
  SiRNA target sequence
attattgagcggaaaagtagagca

SEQ ID NO: 58587 - DNA, 24 bp, Artificial sequence
  SiRNA target sequence
ttattgagcggaaaagtagagcat

SEQ ID NO: 58588 - DNA, 24 bp, Artificial sequence
  SiRNA target sequence
tattgagcggaaaagtagagcata

SEQ ID NO: 58589 - DNA, 24 bp, Artificial sequence
  SiRNA target sequence
attgagcggaaaagtagagcatat

SEQ ID NO: 58590 - DNA, 24 bp, Artificial sequence
  SiRNA target sequence
ttgagcggaaaagtagagcatatg

SEQ ID NO: 58591 - DNA, 24 bp, Artificial sequence
  SiRNA target sequence
tgagcggaaaagtagagcatatgg

SEQ ID NO: 58592 - DNA, 24 bp, Artificial sequence
  SiRNA target sequence
gagcggaaaagtagagcatatggt

SEQ ID NO: 58593 - DNA, 24 bp, Artificial sequence
  SiRNA target sequence
agcggaaaagtagagcatatggtg

SEQ ID NO: 58594 - DNA, 24 bp, Artificial sequence
  SiRNA target sequence
gcggaaaagtagagcatatggtga

SEQ ID NO: 58595 - DNA, 24 bp, Artificial sequence
  SiRNA target sequence
cggaaaagtagagcatatggtgac

SEQ ID NO: 58596 - DNA, 24 bp, Artificial sequence
  SiRNA target sequence
ggaaaagtagagcatatggtgaca

SEQ ID NO: 58597 - DNA, 24 bp, Artificial sequence
  SiRNA target sequence
gaaaagtagagcatatggtgacat

SEQ ID NO: 58598 - DNA, 24 bp, Artificial sequence
  SiRNA target sequence
aaaagtagagcatatggtgacata

SEQ ID NO: 58599 - DNA, 24 bp, Artificial sequence
  SiRNA target sequence
aaagtagagcatatggtgacatac

SEQ ID NO: 58600 - DNA, 24 bp, Artificial sequence
  SiRNA target sequence
aagtagagcatatggtgacatact

SEQ ID NO: 58601 - DNA, 24 bp, Artificial sequence
  SiRNA target sequence
agtagagcatatggtgacatacta

SEQ ID NO: 58602 - DNA, 24 bp, Artificial sequence
  SiRNA target sequence
gtagagcatatggtgacatactag

SEQ ID NO: 58603 - DNA, 24 bp, Artificial sequence
  SiRNA target sequence
tagagcatatggtgacatactaga

SEQ ID NO: 58604 - DNA, 24 bp, Artificial sequence
  SiRNA target sequence
agagcatatggtgacatactagaa

SEQ ID NO: 58605 - DNA, 24 bp, Artificial sequence
  SiRNA target sequence
gagcatatggtgacatactagaac

SEQ ID NO: 58606 - DNA, 24 bp, Artificial sequence
  SiRNA target sequence
agcatatggtgacatactagaact

SEQ ID NO: 58607 - DNA, 24 bp, Artificial sequence
  SiRNA target sequence
gcatatggtgacatactagaacta

SEQ ID NO: 58608 - DNA, 24 bp, Artificial sequence
  SiRNA target sequence
catatggtgacatactagaactaa

SEQ ID NO: 58609 - DNA, 24 bp, Artificial sequence
  SiRNA target sequence
atatggtgacatactagaactaac

SEQ ID NO: 58610 - DNA, 24 bp, Artificial sequence
  SiRNA target sequence
tatggtgacatactagaactaact

SEQ ID NO: 58611 - DNA, 24 bp, Artificial sequence
  SiRNA target sequence
atggtgacatactagaactaacta

SEQ ID NO: 58612 - DNA, 24 bp, Artificial sequence
  SiRNA target sequence
tggtgacatactagaactaactac

SEQ ID NO: 58613 - DNA, 24 bp, Artificial sequence
  SiRNA target sequence
ggtgacatactagaactaactact

SEQ ID NO: 58614 - DNA, 24 bp, Artificial sequence
  SiRNA target sequence
gtgacatactagaactaactactc

SEQ ID NO: 58615 - DNA, 24 bp, Artificial sequence
  SiRNA target sequence
tgacatactagaactaactactct

SEQ ID NO: 58616 - DNA, 24 bp, Artificial sequence
  SiRNA target sequence
gacatactagaactaactactctc

SEQ ID NO: 58617 - DNA, 24 bp, Artificial sequence
  SiRNA target sequence
acatactagaactaactactctct

SEQ ID NO: 58618 - DNA, 24 bp, Artificial sequence
  SiRNA target sequence
catactagaactaactactctctc

SEQ ID NO: 58619 - DNA, 24 bp, Artificial sequence
  SiRNA target sequence
atactagaactaactactctctcg

SEQ ID NO: 58620 - DNA, 24 bp, Artificial sequence
  SiRNA target sequence
tactagaactaactactctctcgg

SEQ ID NO: 58621 - DNA, 24 bp, Artificial sequence
  SiRNA target sequence
actagaactaactactctctcggc

SEQ ID NO: 58622 - DNA, 24 bp, Artificial sequence
  SiRNA target sequence
ctagaactaactactctctcggcc

SEQ ID NO: 58623 - DNA, 24 bp, Artificial sequence
  SiRNA target sequence
tagaactaactactctctcggccg

SEQ ID NO: 58624 - DNA, 24 bp, Artificial sequence
  SiRNA target sequence
agaactaactactctctcggccgt

SEQ ID NO: 58625 - DNA, 24 bp, Artificial sequence
  SiRNA target sequence
gaactaactactctctcggccgta

SEQ ID NO: 58626 - DNA, 24 bp, Artificial sequence
  SiRNA target sequence
aactaactactctctcggccgtac

SEQ ID NO: 58627 - DNA, 24 bp, Artificial sequence
  SiRNA target sequence
actaactactctctcggccgtacc

SEQ ID NO: 58628 - DNA, 24 bp, Artificial sequence
  SiRNA target sequence
ctaactactctctcggccgtacca

SEQ ID NO: 58629 - DNA, 24 bp, Artificial sequence
  SiRNA target sequence
taactactctctcggccgtaccaa

SEQ ID NO: 58630 - DNA, 24 bp, Artificial sequence
  SiRNA target sequence
aactactctctcggccgtaccaac

SEQ ID NO: 58631 - DNA, 24 bp, Artificial sequence
  SiRNA target sequence
actactctctcggccgtaccaacc

SEQ ID NO: 58632 - DNA, 24 bp, Artificial sequence
  SiRNA target sequence
ctactctctcggccgtaccaacct

SEQ ID NO: 58633 - DNA, 24 bp, Artificial sequence
  SiRNA target sequence
tactctctcggccgtaccaacctg

SEQ ID NO: 58634 - DNA, 24 bp, Artificial sequence
  SiRNA target sequence
actctctcggccgtaccaacctgt

SEQ ID NO: 58635 - DNA, 24 bp, Artificial sequence
  SiRNA target sequence
ctctctcggccgtaccaacctgta

SEQ ID NO: 58636 - DNA, 24 bp, Artificial sequence
  SiRNA target sequence
tctctcggccgtaccaacctgtat

SEQ ID NO: 58637 - DNA, 24 bp, Artificial sequence
  SiRNA target sequence
ctctcggccgtaccaacctgtatt

SEQ ID NO: 58638 - DNA, 24 bp, Artificial sequence
  SiRNA target sequence
tctcggccgtaccaacctgtattg

SEQ ID NO: 58639 - DNA, 24 bp, Artificial sequence
  SiRNA target sequence
ctcggccgtaccaacctgtattgt

SEQ ID NO: 58640 - DNA, 24 bp, Artificial sequence
  SiRNA target sequence
tcggccgtaccaacctgtattgta

SEQ ID NO: 58641 - DNA, 24 bp, Artificial sequence
  SiRNA target sequence
cggccgtaccaacctgtattgtag

SEQ ID NO: 58642 - DNA, 24 bp, Artificial sequence
  SiRNA target sequence
ggccgtaccaacctgtattgtagt

SEQ ID NO: 58643 - DNA, 24 bp, Artificial sequence
  SiRNA target sequence
gccgtaccaacctgtattgtagtt

SEQ ID NO: 58644 - DNA, 24 bp, Artificial sequence
  SiRNA target sequence
ccgtaccaacctgtattgtagtta

SEQ ID NO: 58645 - DNA, 24 bp, Artificial sequence
  SiRNA target sequence
cgtaccaacctgtattgtagttat

SEQ ID NO: 58646 - DNA, 24 bp, Artificial sequence
  SiRNA target sequence
gtaccaacctgtattgtagttatt

SEQ ID NO: 58647 - DNA, 24 bp, Artificial sequence
  SiRNA target sequence
taccaacctgtattgtagttatta

SEQ ID NO: 58648 - DNA, 24 bp, Artificial sequence
  SiRNA target sequence
accaacctgtattgtagttattat

SEQ ID NO: 58649 - DNA, 24 bp, Artificial sequence
  SiRNA target sequence
ccaacctgtattgtagttattatg

SEQ ID NO: 58650 - DNA, 24 bp, Artificial sequence
  SiRNA target sequence
caacctgtattgtagttattatgt

SEQ ID NO: 58651 - DNA, 24 bp, Artificial sequence
  SiRNA target sequence
aacctgtattgtagttattatgtc

SEQ ID NO: 58652 - DNA, 24 bp, Artificial sequence
  SiRNA target sequence
acctgtattgtagttattatgtcg

SEQ ID NO: 58653 - DNA, 24 bp, Artificial sequence
  SiRNA target sequence
cctgtattgtagttattatgtcgt

SEQ ID NO: 58654 - DNA, 24 bp, Artificial sequence
  SiRNA target sequence
ctgtattgtagttattatgtcgtt

SEQ ID NO: 58655 - DNA, 24 bp, Artificial sequence
  SiRNA target sequence
tgtattgtagttattatgtcgttt

SEQ ID NO: 58656 - DNA, 24 bp, Artificial sequence
  SiRNA target sequence
gtattgtagttattatgtcgtttt

SEQ ID NO: 58657 - DNA, 24 bp, Artificial sequence
  SiRNA target sequence
tattgtagttattatgtcgttttt

SEQ ID NO: 58658 - DNA, 24 bp, Artificial sequence
  SiRNA target sequence
attgtagttattatgtcgtttttc

SEQ ID NO: 58659 - DNA, 24 bp, Artificial sequence
  SiRNA target sequence
ttgtagttattatgtcgtttttct

SEQ ID NO: 58660 - DNA, 24 bp, Artificial sequence
  SiRNA target sequence
tgtagttattatgtcgtttttctc

SEQ ID NO: 58661 - DNA, 24 bp, Artificial sequence
  SiRNA target sequence
gtagttattatgtcgtttttctca

SEQ ID NO: 58662 - DNA, 24 bp, Artificial sequence
  SiRNA target sequence
tagttattatgtcgtttttctcag

SEQ ID NO: 58663 - DNA, 24 bp, Artificial sequence
  SiRNA target sequence
agttattatgtcgtttttctcagt

SEQ ID NO: 58664 - DNA, 24 bp, Artificial sequence
  SiRNA target sequence
gttattatgtcgtttttctcagta

SEQ ID NO: 58665 - DNA, 24 bp, Artificial sequence
  SiRNA target sequence
ttattatgtcgtttttctcagtat

SEQ ID NO: 58666 - DNA, 24 bp, Artificial sequence
  SiRNA target sequence
tattatgtcgtttttctcagtata

SEQ ID NO: 58667 - DNA, 24 bp, Artificial sequence
  SiRNA target sequence
attatgtcgtttttctcagtatat

SEQ ID NO: 58668 - DNA, 24 bp, Artificial sequence
  SiRNA target sequence
ttatgtcgtttttctcagtatata

SEQ ID NO: 58669 - DNA, 24 bp, Artificial sequence
  SiRNA target sequence
tatgtcgtttttctcagtatataa

SEQ ID NO: 58670 - DNA, 24 bp, Artificial sequence
  SiRNA target sequence
atgtcgtttttctcagtatataaa

SEQ ID NO: 58671 - DNA, 24 bp, Artificial sequence
  SiRNA target sequence
tgtcgtttttctcagtatataaaa

SEQ ID NO: 58672 - DNA, 24 bp, Artificial sequence
  SiRNA target sequence
gtcgtttttctcagtatataaaaa

SEQ ID NO: 58673 - DNA, 24 bp, Artificial sequence
  SiRNA target sequence
tcgtttttctcagtatataaaaat

SEQ ID NO: 58674 - DNA, 24 bp, Artificial sequence
  SiRNA target sequence
cgtttttctcagtatataaaaatt

SEQ ID NO: 58675 - DNA, 24 bp, Artificial sequence
  SiRNA target sequence
gtttttctcagtatataaaaattt

SEQ ID NO: 58676 - DNA, 24 bp, Artificial sequence
  SiRNA target sequence
tttttctcagtatataaaaatttg

SEQ ID NO: 58677 - DNA, 24 bp, Artificial sequence
  SiRNA target sequence
ttttctcagtatataaaaatttgg

SEQ ID NO: 58678 - DNA, 24 bp, Artificial sequence
  SiRNA target sequence
tttctcagtatataaaaatttggg

SEQ ID NO: 58679 - DNA, 24 bp, Artificial sequence
  SiRNA target sequence
ttctcagtatataaaaatttggga

SEQ ID NO: 58680 - DNA, 24 bp, Artificial sequence
  SiRNA target sequence
tctcagtatataaaaatttgggaa

SEQ ID NO: 58681 - DNA, 24 bp, Artificial sequence
  SiRNA target sequence
ctcagtatataaaaatttgggaag

SEQ ID NO: 58682 - DNA, 24 bp, Artificial sequence
  SiRNA target sequence
tcagtatataaaaatttgggaaga

SEQ ID NO: 58683 - DNA, 24 bp, Artificial sequence
  SiRNA target sequence
cagtatataaaaatttgggaagag

SEQ ID NO: 58684 - DNA, 24 bp, Artificial sequence
  SiRNA target sequence
agtatataaaaatttgggaagaga

SEQ ID NO: 58685 - DNA, 24 bp, Artificial sequence
  SiRNA target sequence
gtatataaaaatttgggaagagat

SEQ ID NO: 58686 - DNA, 24 bp, Artificial sequence
  SiRNA target sequence
tatataaaaatttgggaagagatg

SEQ ID NO: 58687 - DNA, 24 bp, Artificial sequence
  SiRNA target sequence
atataaaaatttgggaagagatgc

SEQ ID NO: 58688 - DNA, 24 bp, Artificial sequence
  SiRNA target sequence
tataaaaatttgggaagagatgca

SEQ ID NO: 58689 - DNA, 24 bp, Artificial sequence
  SiRNA target sequence
ataaaaatttgggaagagatgcac

SEQ ID NO: 58690 - DNA, 24 bp, Artificial sequence
  SiRNA target sequence
taaaaatttgggaagagatgcact

SEQ ID NO: 58691 - DNA, 24 bp, Artificial sequence
  SiRNA target sequence
aaaaatttgggaagagatgcactc

SEQ ID NO: 58692 - DNA, 24 bp, Artificial sequence
  SiRNA target sequence
aaaatttgggaagagatgcactct

SEQ ID NO: 58693 - DNA, 24 bp, Artificial sequence
  SiRNA target sequence
aaatttgggaagagatgcactcta

SEQ ID NO: 58694 - DNA, 24 bp, Artificial sequence
  SiRNA target sequence
aatttgggaagagatgcactctac

SEQ ID NO: 58695 - DNA, 24 bp, Artificial sequence
  SiRNA target sequence
atttgggaagagatgcactctacg

SEQ ID NO: 58696 - DNA, 24 bp, Artificial sequence
  SiRNA target sequence
tttgggaagagatgcactctacgt

SEQ ID NO: 58697 - DNA, 24 bp, Artificial sequence
  SiRNA target sequence
ttgggaagagatgcactctacgta

SEQ ID NO: 58698 - DNA, 24 bp, Artificial sequence
  SiRNA target sequence
tgggaagagatgcactctacgtaa

SEQ ID NO: 58699 - DNA, 24 bp, Artificial sequence
  SiRNA target sequence
gggaagagatgcactctacgtaat

SEQ ID NO: 58700 - DNA, 24 bp, Artificial sequence
  SiRNA target sequence
ggaagagatgcactctacgtaatg

SEQ ID NO: 58701 - DNA, 24 bp, Artificial sequence
  SiRNA target sequence
gaagagatgcactctacgtaatgt

SEQ ID NO: 58702 - DNA, 24 bp, Artificial sequence
  SiRNA target sequence
aagagatgcactctacgtaatgtt

SEQ ID NO: 58703 - DNA, 24 bp, Artificial sequence
  SiRNA target sequence
agagatgcactctacgtaatgttg

SEQ ID NO: 58704 - DNA, 24 bp, Artificial sequence
  SiRNA target sequence
gagatgcactctacgtaatgttgg

SEQ ID NO: 58705 - DNA, 24 bp, Artificial sequence
  SiRNA target sequence
agatgcactctacgtaatgttggc

SEQ ID NO: 58706 - DNA, 24 bp, Artificial sequence
  SiRNA target sequence
gatgcactctacgtaatgttggct

SEQ ID NO: 58707 - DNA, 24 bp, Artificial sequence
  SiRNA target sequence
atgcactctacgtaatgttggcta

SEQ ID NO: 58708 - DNA, 24 bp, Artificial sequence
  SiRNA target sequence
tgcactctacgtaatgttggctac

SEQ ID NO: 58709 - DNA, 24 bp, Artificial sequence
  SiRNA target sequence
gcactctacgtaatgttggctaca

SEQ ID NO: 58710 - DNA, 24 bp, Artificial sequence
  SiRNA target sequence
cactctacgtaatgttggctacaa

SEQ ID NO: 58711 - DNA, 24 bp, Artificial sequence
  SiRNA target sequence
actctacgtaatgttggctacaag

SEQ ID NO: 58712 - DNA, 24 bp, Artificial sequence
  SiRNA target sequence
ctctacgtaatgttggctacaagt

SEQ ID NO: 58713 - DNA, 24 bp, Artificial sequence
  SiRNA target sequence
tctacgtaatgttggctacaagtg

SEQ ID NO: 58714 - DNA, 24 bp, Artificial sequence
  SiRNA target sequence
ctacgtaatgttggctacaagtgc

SEQ ID NO: 58715 - DNA, 24 bp, Artificial sequence
  SiRNA target sequence
tacgtaatgttggctacaagtgcc

SEQ ID NO: 58716 - DNA, 24 bp, Artificial sequence
  SiRNA target sequence
acgtaatgttggctacaagtgcct

SEQ ID NO: 58717 - DNA, 24 bp, Artificial sequence
  SiRNA target sequence
cgtaatgttggctacaagtgcctt

SEQ ID NO: 58718 - DNA, 24 bp, Artificial sequence
  SiRNA target sequence
gtaatgttggctacaagtgccttg

SEQ ID NO: 58719 - DNA, 24 bp, Artificial sequence
  SiRNA target sequence
taatgttggctacaagtgccttgt

SEQ ID NO: 58720 - DNA, 24 bp, Artificial sequence
  SiRNA target sequence
aatgttggctacaagtgccttgta

SEQ ID NO: 58721 - DNA, 24 bp, Artificial sequence
  SiRNA target sequence
atgttggctacaagtgccttgtat

SEQ ID NO: 58722 - DNA, 24 bp, Artificial sequence
  SiRNA target sequence
tgttggctacaagtgccttgtatg

SEQ ID NO: 58723 - DNA, 24 bp, Artificial sequence
  SiRNA target sequence
gttggctacaagtgccttgtatgt

SEQ ID NO: 58724 - DNA, 24 bp, Artificial sequence
  SiRNA target sequence
ttggctacaagtgccttgtatgtg

SEQ ID NO: 58725 - DNA, 24 bp, Artificial sequence
  SiRNA target sequence
tggctacaagtgccttgtatgtgt

SEQ ID NO: 58726 - DNA, 24 bp, Artificial sequence
  SiRNA target sequence
ggctacaagtgccttgtatgtgta

SEQ ID NO: 58727 - DNA, 24 bp, Artificial sequence
  SiRNA target sequence
gctacaagtgccttgtatgtgtat

SEQ ID NO: 58728 - DNA, 24 bp, Artificial sequence
  SiRNA target sequence
ctacaagtgccttgtatgtgtatt

SEQ ID NO: 58729 - DNA, 24 bp, Artificial sequence
  SiRNA target sequence
tacaagtgccttgtatgtgtattt

SEQ ID NO: 58730 - DNA, 24 bp, Artificial sequence
  SiRNA target sequence
acaagtgccttgtatgtgtatttt

SEQ ID NO: 58731 - DNA, 24 bp, Artificial sequence
  SiRNA target sequence
caagtgccttgtatgtgtatttta

SEQ ID NO: 58732 - DNA, 24 bp, Artificial sequence
  SiRNA target sequence
aagtgccttgtatgtgtattttac

SEQ ID NO: 58733 - DNA, 24 bp, Artificial sequence
  SiRNA target sequence
agtgccttgtatgtgtattttaca

SEQ ID NO: 58734 - DNA, 24 bp, Artificial sequence
  SiRNA target sequence
gtgccttgtatgtgtattttacat

SEQ ID NO: 58735 - DNA, 24 bp, Artificial sequence
  SiRNA target sequence
tgccttgtatgtgtattttacatt

SEQ ID NO: 58736 - DNA, 24 bp, Artificial sequence
  SiRNA target sequence
gccttgtatgtgtattttacattt

SEQ ID NO: 58737 - DNA, 24 bp, Artificial sequence
  SiRNA target sequence
ccttgtatgtgtattttacatttg

SEQ ID NO: 58738 - DNA, 24 bp, Artificial sequence
  SiRNA target sequence
cttgtatgtgtattttacatttgt

SEQ ID NO: 58739 - DNA, 24 bp, Artificial sequence
  SiRNA target sequence
ttgtatgtgtattttacatttgta

SEQ ID NO: 58740 - DNA, 24 bp, Artificial sequence
  SiRNA target sequence
tgtatgtgtattttacatttgtat

SEQ ID NO: 58741 - DNA, 24 bp, Artificial sequence
  SiRNA target sequence
gtatgtgtattttacatttgtatt

SEQ ID NO: 58742 - DNA, 24 bp, Artificial sequence
  SiRNA target sequence
tatgtgtattttacatttgtattt

SEQ ID NO: 58743 - DNA, 24 bp, Artificial sequence
  SiRNA target sequence
atgtgtattttacatttgtatttt

SEQ ID NO: 58744 - DNA, 24 bp, Artificial sequence
  SiRNA target sequence
tgtgtattttacatttgtattttc

SEQ ID NO: 58745 - DNA, 24 bp, Artificial sequence
  SiRNA target sequence
gtgtattttacatttgtattttca

SEQ ID NO: 58746 - DNA, 24 bp, Artificial sequence
  SiRNA target sequence
tgtattttacatttgtattttcaa

SEQ ID NO: 58747 - DNA, 24 bp, Artificial sequence
  SiRNA target sequence
gtattttacatttgtattttcaat

SEQ ID NO: 58748 - DNA, 24 bp, Artificial sequence
  SiRNA target sequence
tattttacatttgtattttcaata

SEQ ID NO: 58749 - DNA, 24 bp, Artificial sequence
  SiRNA target sequence
attttacatttgtattttcaatat

SEQ ID NO: 58750 - DNA, 24 bp, Artificial sequence
  SiRNA target sequence
ttttacatttgtattttcaatatg

SEQ ID NO: 58751 - DNA, 24 bp, Artificial sequence
  SiRNA target sequence
tttacatttgtattttcaatatgg

SEQ ID NO: 58752 - DNA, 24 bp, Artificial sequence
  SiRNA target sequence
ttacatttgtattttcaatatgga

SEQ ID NO: 58753 - DNA, 24 bp, Artificial sequence
  SiRNA target sequence
tacatttgtattttcaatatggag

SEQ ID NO: 58754 - DNA, 24 bp, Artificial sequence
  SiRNA target sequence
acatttgtattttcaatatggaga

SEQ ID NO: 58755 - DNA, 24 bp, Artificial sequence
  SiRNA target sequence
catttgtattttcaatatggagaa

SEQ ID NO: 58756 - DNA, 24 bp, Artificial sequence
  SiRNA target sequence
atttgtattttcaatatggagaaa

SEQ ID NO: 58757 - DNA, 24 bp, Artificial sequence
  SiRNA target sequence
tttgtattttcaatatggagaaac

SEQ ID NO: 58758 - DNA, 24 bp, Artificial sequence
  SiRNA target sequence
ttgtattttcaatatggagaaaca

SEQ ID NO: 58759 - DNA, 24 bp, Artificial sequence
  SiRNA target sequence
tgtattttcaatatggagaaacaa

SEQ ID NO: 58760 - DNA, 24 bp, Artificial sequence
  SiRNA target sequence
gtattttcaatatggagaaacaat

SEQ ID NO: 58761 - DNA, 24 bp, Artificial sequence
  SiRNA target sequence
tattttcaatatggagaaacaata

SEQ ID NO: 58762 - DNA, 24 bp, Artificial sequence
  SiRNA target sequence
attttcaatatggagaaacaatat

SEQ ID NO: 58763 - DNA, 24 bp, Artificial sequence
  SiRNA target sequence
ttttcaatatggagaaacaatatt

SEQ ID NO: 58764 - DNA, 24 bp, Artificial sequence
  SiRNA target sequence
tttcaatatggagaaacaatatta

SEQ ID NO: 58765 - DNA, 24 bp, Artificial sequence
  SiRNA target sequence
ttcaatatggagaaacaatattag

SEQ ID NO: 58766 - DNA, 24 bp, Artificial sequence
  SiRNA target sequence
tcaatatggagaaacaatattaga

SEQ ID NO: 58767 - DNA, 24 bp, Artificial sequence
  SiRNA target sequence
caatatggagaaacaatattagaa

SEQ ID NO: 58768 - DNA, 24 bp, Artificial sequence
  SiRNA target sequence
aatatggagaaacaatattagaag

SEQ ID NO: 58769 - DNA, 24 bp, Artificial sequence
  SiRNA target sequence
atatggagaaacaatattagaaga

SEQ ID NO: 58770 - DNA, 24 bp, Artificial sequence
  SiRNA target sequence
tatggagaaacaatattagaagac

SEQ ID NO: 58771 - DNA, 24 bp, Artificial sequence
  SiRNA target sequence
atggagaaacaatattagaagaca

SEQ ID NO: 58772 - DNA, 24 bp, Artificial sequence
  SiRNA target sequence
tggagaaacaatattagaagacaa

SEQ ID NO: 58773 - DNA, 24 bp, Artificial sequence
  SiRNA target sequence
ggagaaacaatattagaagacaat

SEQ ID NO: 58774 - DNA, 24 bp, Artificial sequence
  SiRNA target sequence
gagaaacaatattagaagacaata

SEQ ID NO: 58775 - DNA, 24 bp, Artificial sequence
  SiRNA target sequence
agaaacaatattagaagacaatat

SEQ ID NO: 58776 - DNA, 24 bp, Artificial sequence
  SiRNA target sequence
gaaacaatattagaagacaatata

SEQ ID NO: 58777 - DNA, 24 bp, Artificial sequence
  SiRNA target sequence
aaacaatattagaagacaatataa

SEQ ID NO: 58778 - DNA, 24 bp, Artificial sequence
  SiRNA target sequence
aacaatattagaagacaatataat

SEQ ID NO: 58779 - DNA, 24 bp, Artificial sequence
  SiRNA target sequence
acaatattagaagacaatataata

SEQ ID NO: 58780 - DNA, 24 bp, Artificial sequence
  SiRNA target sequence
caatattagaagacaatataataa

SEQ ID NO: 58781 - DNA, 24 bp, Artificial sequence
  SiRNA target sequence
aatattagaagacaatataataag

SEQ ID NO: 58782 - DNA, 24 bp, Artificial sequence
  SiRNA target sequence
atattagaagacaatataataagt

SEQ ID NO: 58783 - DNA, 24 bp, Artificial sequence
  SiRNA target sequence
tattagaagacaatataataagtc

SEQ ID NO: 58784 - DNA, 24 bp, Artificial sequence
  SiRNA target sequence
attagaagacaatataataagtca

SEQ ID NO: 58785 - DNA, 24 bp, Artificial sequence
  SiRNA target sequence
ttagaagacaatataataagtcac

SEQ ID NO: 58786 - DNA, 24 bp, Artificial sequence
  SiRNA target sequence
tagaagacaatataataagtcaca

SEQ ID NO: 58787 - DNA, 24 bp, Artificial sequence
  SiRNA target sequence
agaagacaatataataagtcacag

SEQ ID NO: 58788 - DNA, 24 bp, Artificial sequence
  SiRNA target sequence
gaagacaatataataagtcacagg

SEQ ID NO: 58789 - DNA, 24 bp, Artificial sequence
  SiRNA target sequence
aagacaatataataagtcacagga

SEQ ID NO: 58790 - DNA, 24 bp, Artificial sequence
  SiRNA target sequence
agacaatataataagtcacaggat

SEQ ID NO: 58791 - DNA, 24 bp, Artificial sequence
  SiRNA target sequence
gacaatataataagtcacaggata

SEQ ID NO: 58792 - DNA, 24 bp, Artificial sequence
  SiRNA target sequence
acaatataataagtcacaggataa

SEQ ID NO: 58793 - DNA, 24 bp, Artificial sequence
  SiRNA target sequence
caatataataagtcacaggataaa

SEQ ID NO: 58794 - DNA, 24 bp, Artificial sequence
  SiRNA target sequence
aatataataagtcacaggataaat

SEQ ID NO: 58795 - DNA, 24 bp, Artificial sequence
  SiRNA target sequence
atataataagtcacaggataaatt

SEQ ID NO: 58796 - DNA, 24 bp, Artificial sequence
  SiRNA target sequence
tataataagtcacaggataaatta

SEQ ID NO: 58797 - DNA, 24 bp, Artificial sequence
  SiRNA target sequence
ataataagtcacaggataaattat

SEQ ID NO: 58798 - DNA, 24 bp, Artificial sequence
  SiRNA target sequence
taataagtcacaggataaattatc

SEQ ID NO: 58799 - DNA, 24 bp, Artificial sequence
  SiRNA target sequence
aataagtcacaggataaattatcg

SEQ ID NO: 58800 - DNA, 24 bp, Artificial sequence
  SiRNA target sequence
ataagtcacaggataaattatcga

SEQ ID NO: 58801 - DNA, 24 bp, Artificial sequence
  SiRNA target sequence
taagtcacaggataaattatcgaa

SEQ ID NO: 58802 - DNA, 24 bp, Artificial sequence
  SiRNA target sequence
aagtcacaggataaattatcgaat

SEQ ID NO: 58803 - DNA, 24 bp, Artificial sequence
  SiRNA target sequence
agtcacaggataaattatcgaata

SEQ ID NO: 58804 - DNA, 24 bp, Artificial sequence
  SiRNA target sequence
gtcacaggataaattatcgaataa

SEQ ID NO: 58805 - DNA, 24 bp, Artificial sequence
  SiRNA target sequence
tcacaggataaattatcgaataaa

SEQ ID NO: 58806 - DNA, 24 bp, Artificial sequence
  SiRNA target sequence
cacaggataaattatcgaataaat

SEQ ID NO: 58807 - DNA, 24 bp, Artificial sequence
  SiRNA target sequence
acaggataaattatcgaataaatt

SEQ ID NO: 58808 - DNA, 24 bp, Artificial sequence
  SiRNA target sequence
caggataaattatcgaataaatta

SEQ ID NO: 58809 - DNA, 24 bp, Artificial sequence
  SiRNA target sequence
aggataaattatcgaataaattac

SEQ ID NO: 58810 - DNA, 24 bp, Artificial sequence
  SiRNA target sequence
ggataaattatcgaataaattaca

SEQ ID NO: 58811 - DNA, 24 bp, Artificial sequence
  SiRNA target sequence
gataaattatcgaataaattacaa

SEQ ID NO: 58812 - DNA, 24 bp, Artificial sequence
  SiRNA target sequence
ataaattatcgaataaattacaag

SEQ ID NO: 58813 - DNA, 24 bp, Artificial sequence
  SiRNA target sequence
taaattatcgaataaattacaaga

SEQ ID NO: 58814 - DNA, 24 bp, Artificial sequence
  SiRNA target sequence
aaattatcgaataaattacaagat

SEQ ID NO: 58815 - DNA, 24 bp, Artificial sequence
  SiRNA target sequence
aattatcgaataaattacaagatt

SEQ ID NO: 58816 - DNA, 24 bp, Artificial sequence
  SiRNA target sequence
attatcgaataaattacaagattt

SEQ ID NO: 58817 - DNA, 24 bp, Artificial sequence
  SiRNA target sequence
ttatcgaataaattacaagatttt

SEQ ID NO: 58818 - DNA, 24 bp, Artificial sequence
  SiRNA target sequence
tatcgaataaattacaagattttt

SEQ ID NO: 58819 - DNA, 24 bp, Artificial sequence
  SiRNA target sequence
atcgaataaattacaagatttttt

SEQ ID NO: 58820 - DNA, 24 bp, Artificial sequence
  SiRNA target sequence
tcgaataaattacaagatttttta

SEQ ID NO: 58821 - DNA, 24 bp, Artificial sequence
  SiRNA target sequence
cgaataaattacaagattttttag

SEQ ID NO: 58822 - DNA, 24 bp, Artificial sequence
  SiRNA target sequence
gaataaattacaagattttttagc

SEQ ID NO: 58823 - DNA, 24 bp, Artificial sequence
  SiRNA target sequence
aataaattacaagattttttagct

SEQ ID NO: 58824 - DNA, 24 bp, Artificial sequence
  SiRNA target sequence
ataaattacaagattttttagcta

SEQ ID NO: 58825 - DNA, 24 bp, Artificial sequence
  SiRNA target sequence
taaattacaagattttttagctaa

SEQ ID NO: 58826 - DNA, 24 bp, Artificial sequence
  SiRNA target sequence
aaattacaagattttttagctaat

SEQ ID NO: 58827 - DNA, 24 bp, Artificial sequence
  SiRNA target sequence
aattacaagattttttagctaatc

SEQ ID NO: 58828 - DNA, 24 bp, Artificial sequence
  SiRNA target sequence
attacaagattttttagctaatca

SEQ ID NO: 58829 - DNA, 24 bp, Artificial sequence
  SiRNA target sequence
ttacaagattttttagctaatcat

SEQ ID NO: 58830 - DNA, 24 bp, Artificial sequence
  SiRNA target sequence
tacaagattttttagctaatcatg

SEQ ID NO: 58831 - DNA, 24 bp, Artificial sequence
  SiRNA target sequence
acaagattttttagctaatcatga

SEQ ID NO: 58832 - DNA, 24 bp, Artificial sequence
  SiRNA target sequence
caagattttttagctaatcatgaa

SEQ ID NO: 58833 - DNA, 24 bp, Artificial sequence
  SiRNA target sequence
aagattttttagctaatcatgaaa

SEQ ID NO: 58834 - DNA, 24 bp, Artificial sequence
  SiRNA target sequence
agattttttagctaatcatgaaac

SEQ ID NO: 58835 - DNA, 24 bp, Artificial sequence
  SiRNA target sequence
gattttttagctaatcatgaaaca

SEQ ID NO: 58836 - DNA, 24 bp, Artificial sequence
  SiRNA target sequence
attttttagctaatcatgaaacaa

SEQ ID NO: 58837 - DNA, 24 bp, Artificial sequence
  SiRNA target sequence
ttttttagctaatcatgaaacaat

SEQ ID NO: 58838 - DNA, 24 bp, Artificial sequence
  SiRNA target sequence
tttttagctaatcatgaaacaatt

SEQ ID NO: 58839 - DNA, 24 bp, Artificial sequence
  SiRNA target sequence
ttttagctaatcatgaaacaatta

SEQ ID NO: 58840 - DNA, 24 bp, Artificial sequence
  SiRNA target sequence
tttagctaatcatgaaacaattaa

SEQ ID NO: 58841 - DNA, 24 bp, Artificial sequence
  SiRNA target sequence
ttagctaatcatgaaacaattaaa

SEQ ID NO: 58842 - DNA, 24 bp, Artificial sequence
  SiRNA target sequence
tagctaatcatgaaacaattaaag

SEQ ID NO: 58843 - DNA, 24 bp, Artificial sequence
  SiRNA target sequence
agctaatcatgaaacaattaaagc

SEQ ID NO: 58844 - DNA, 24 bp, Artificial sequence
  SiRNA target sequence
gctaatcatgaaacaattaaagcc

SEQ ID NO: 58845 - DNA, 24 bp, Artificial sequence
  SiRNA target sequence
ctaatcatgaaacaattaaagcct

SEQ ID NO: 58846 - DNA, 24 bp, Artificial sequence
  SiRNA target sequence
taatcatgaaacaattaaagccta

SEQ ID NO: 58847 - DNA, 24 bp, Artificial sequence
  SiRNA target sequence
aatcatgaaacaattaaagcctat

SEQ ID NO: 58848 - DNA, 24 bp, Artificial sequence
  SiRNA target sequence
atcatgaaacaattaaagcctata

SEQ ID NO: 58849 - DNA, 24 bp, Artificial sequence
  SiRNA target sequence
tcatgaaacaattaaagcctataa

SEQ ID NO: 58850 - DNA, 24 bp, Artificial sequence
  SiRNA target sequence
catgaaacaattaaagcctataat

SEQ ID NO: 58851 - DNA, 24 bp, Artificial sequence
  SiRNA target sequence
atgaaacaattaaagcctataata

SEQ ID NO: 58852 - DNA, 24 bp, Artificial sequence
  SiRNA target sequence
tgaaacaattaaagcctataatat

SEQ ID NO: 58853 - DNA, 24 bp, Artificial sequence
  SiRNA target sequence
gaaacaattaaagcctataatatg

SEQ ID NO: 58854 - DNA, 24 bp, Artificial sequence
  SiRNA target sequence
aaacaattaaagcctataatatgg

SEQ ID NO: 58855 - DNA, 24 bp, Artificial sequence
  SiRNA target sequence
aacaattaaagcctataatatgga

SEQ ID NO: 58856 - DNA, 24 bp, Artificial sequence
  SiRNA target sequence
acaattaaagcctataatatggaa

SEQ ID NO: 58857 - DNA, 24 bp, Artificial sequence
  SiRNA target sequence
caattaaagcctataatatggaag

SEQ ID NO: 58858 - DNA, 24 bp, Artificial sequence
  SiRNA target sequence
aattaaagcctataatatggaaga

SEQ ID NO: 58859 - DNA, 24 bp, Artificial sequence
  SiRNA target sequence
attaaagcctataatatggaagaa

SEQ ID NO: 58860 - DNA, 24 bp, Artificial sequence
  SiRNA target sequence
ttaaagcctataatatggaagaag

SEQ ID NO: 58861 - DNA, 24 bp, Artificial sequence
  SiRNA target sequence
taaagcctataatatggaagaaga

SEQ ID NO: 58862 - DNA, 24 bp, Artificial sequence
  SiRNA target sequence
aaagcctataatatggaagaagaa

SEQ ID NO: 58863 - DNA, 24 bp, Artificial sequence
  SiRNA target sequence
aagcctataatatggaagaagaaa

SEQ ID NO: 58864 - DNA, 24 bp, Artificial sequence
  SiRNA target sequence
agcctataatatggaagaagaaac

SEQ ID NO: 58865 - DNA, 24 bp, Artificial sequence
  SiRNA target sequence
gcctataatatggaagaagaaact

SEQ ID NO: 58866 - DNA, 24 bp, Artificial sequence
  SiRNA target sequence
cctataatatggaagaagaaacta

SEQ ID NO: 58867 - DNA, 24 bp, Artificial sequence
  SiRNA target sequence
ctataatatggaagaagaaactat

SEQ ID NO: 58868 - DNA, 24 bp, Artificial sequence
  SiRNA target sequence
tataatatggaagaagaaactatt

SEQ ID NO: 58869 - DNA, 24 bp, Artificial sequence
  SiRNA target sequence
ataatatggaagaagaaactatta

SEQ ID NO: 58870 - DNA, 24 bp, Artificial sequence
  SiRNA target sequence
taatatggaagaagaaactattac

SEQ ID NO: 58871 - DNA, 24 bp, Artificial sequence
  SiRNA target sequence
aatatggaagaagaaactattaca

SEQ ID NO: 58872 - DNA, 24 bp, Artificial sequence
  SiRNA target sequence
atatggaagaagaaactattacat

SEQ ID NO: 58873 - DNA, 24 bp, Artificial sequence
  SiRNA target sequence
tatggaagaagaaactattacata

SEQ ID NO: 58874 - DNA, 24 bp, Artificial sequence
  SiRNA target sequence
atggaagaagaaactattacatat

SEQ ID NO: 58875 - DNA, 24 bp, Artificial sequence
  SiRNA target sequence
tggaagaagaaactattacatatt

SEQ ID NO: 58876 - DNA, 24 bp, Artificial sequence
  SiRNA target sequence
ggaagaagaaactattacatattt

SEQ ID NO: 58877 - DNA, 24 bp, Artificial sequence
  SiRNA target sequence
gaagaagaaactattacatatttt

SEQ ID NO: 58878 - DNA, 24 bp, Artificial sequence
  SiRNA target sequence
aagaagaaactattacatattttg

SEQ ID NO: 58879 - DNA, 24 bp, Artificial sequence
  SiRNA target sequence
agaagaaactattacatattttga

SEQ ID NO: 58880 - DNA, 24 bp, Artificial sequence
  SiRNA target sequence
gaagaaactattacatattttgat

SEQ ID NO: 58881 - DNA, 24 bp, Artificial sequence
  SiRNA target sequence
aagaaactattacatattttgatg

SEQ ID NO: 58882 - DNA, 24 bp, Artificial sequence
  SiRNA target sequence
agaaactattacatattttgatga

SEQ ID NO: 58883 - DNA, 24 bp, Artificial sequence
  SiRNA target sequence
gaaactattacatattttgatgaa

SEQ ID NO: 58884 - DNA, 24 bp, Artificial sequence
  SiRNA target sequence
aaactattacatattttgatgaaa

SEQ ID NO: 58885 - DNA, 24 bp, Artificial sequence
  SiRNA target sequence
aactattacatattttgatgaaaa

SEQ ID NO: 58886 - DNA, 24 bp, Artificial sequence
  SiRNA target sequence
actattacatattttgatgaaaat

SEQ ID NO: 58887 - DNA, 24 bp, Artificial sequence
  SiRNA target sequence
ctattacatattttgatgaaaatc

SEQ ID NO: 58888 - DNA, 24 bp, Artificial sequence
  SiRNA target sequence
tattacatattttgatgaaaatca

SEQ ID NO: 58889 - DNA, 24 bp, Artificial sequence
  SiRNA target sequence
attacatattttgatgaaaatcaa

SEQ ID NO: 58890 - DNA, 24 bp, Artificial sequence
  SiRNA target sequence
ttacatattttgatgaaaatcaaa

SEQ ID NO: 58891 - DNA, 24 bp, Artificial sequence
  SiRNA target sequence
tacatattttgatgaaaatcaaaa

SEQ ID NO: 58892 - DNA, 24 bp, Artificial sequence
  SiRNA target sequence
acatattttgatgaaaatcaaaaa

SEQ ID NO: 58893 - DNA, 24 bp, Artificial sequence
  SiRNA target sequence
catattttgatgaaaatcaaaaac

SEQ ID NO: 58894 - DNA, 24 bp, Artificial sequence
  SiRNA target sequence
atattttgatgaaaatcaaaaacc

SEQ ID NO: 58895 - DNA, 24 bp, Artificial sequence
  SiRNA target sequence
tattttgatgaaaatcaaaaaccg

SEQ ID NO: 58896 - DNA, 24 bp, Artificial sequence
  SiRNA target sequence
attttgatgaaaatcaaaaaccgg

SEQ ID NO: 58897 - DNA, 24 bp, Artificial sequence
  SiRNA target sequence
ttttgatgaaaatcaaaaaccggt

SEQ ID NO: 58898 - DNA, 24 bp, Artificial sequence
  SiRNA target sequence
tttgatgaaaatcaaaaaccggta

SEQ ID NO: 58899 - DNA, 24 bp, Artificial sequence
  SiRNA target sequence
ttgatgaaaatcaaaaaccggtag

SEQ ID NO: 58900 - DNA, 24 bp, Artificial sequence
  SiRNA target sequence
tgatgaaaatcaaaaaccggtaga

SEQ ID NO: 58901 - DNA, 24 bp, Artificial sequence
  SiRNA target sequence
gatgaaaatcaaaaaccggtagaa

SEQ ID NO: 58902 - DNA, 24 bp, Artificial sequence
  SiRNA target sequence
atgaaaatcaaaaaccggtagaat

SEQ ID NO: 58903 - DNA, 24 bp, Artificial sequence
  SiRNA target sequence
tgaaaatcaaaaaccggtagaata

SEQ ID NO: 58904 - DNA, 24 bp, Artificial sequence
  SiRNA target sequence
gaaaatcaaaaaccggtagaatat

SEQ ID NO: 58905 - DNA, 24 bp, Artificial sequence
  SiRNA target sequence
aaaatcaaaaaccggtagaatatt

SEQ ID NO: 58906 - DNA, 24 bp, Artificial sequence
  SiRNA target sequence
aaatcaaaaaccggtagaatattt

SEQ ID NO: 58907 - DNA, 24 bp, Artificial sequence
  SiRNA target sequence
aatcaaaaaccggtagaatatttt

SEQ ID NO: 58908 - DNA, 24 bp, Artificial sequence
  SiRNA target sequence
atcaaaaaccggtagaatattttg

SEQ ID NO: 58909 - DNA, 24 bp, Artificial sequence
  SiRNA target sequence
tcaaaaaccggtagaatattttgg

SEQ ID NO: 58910 - DNA, 24 bp, Artificial sequence
  SiRNA target sequence
caaaaaccggtagaatattttggg

SEQ ID NO: 58911 - DNA, 24 bp, Artificial sequence
  SiRNA target sequence
aaaaaccggtagaatattttgggg

SEQ ID NO: 58912 - DNA, 24 bp, Artificial sequence
  SiRNA target sequence
aaaaccggtagaatattttggggt

SEQ ID NO: 58913 - DNA, 24 bp, Artificial sequence
  SiRNA target sequence
aaaccggtagaatattttggggta

SEQ ID NO: 58914 - DNA, 24 bp, Artificial sequence
  SiRNA target sequence
aaccggtagaatattttggggtaa

SEQ ID NO: 58915 - DNA, 24 bp, Artificial sequence
  SiRNA target sequence
accggtagaatattttggggtaaa

SEQ ID NO: 58916 - DNA, 24 bp, Artificial sequence
  SiRNA target sequence
ccggtagaatattttggggtaaag

SEQ ID NO: 58917 - DNA, 24 bp, Artificial sequence
  SiRNA target sequence
cggtagaatattttggggtaaagt

SEQ ID NO: 58918 - DNA, 24 bp, Artificial sequence
  SiRNA target sequence
ggtagaatattttggggtaaagtc

SEQ ID NO: 58919 - DNA, 24 bp, Artificial sequence
  SiRNA target sequence
gtagaatattttggggtaaagtct

SEQ ID NO: 58920 - DNA, 24 bp, Artificial sequence
  SiRNA target sequence
tagaatattttggggtaaagtctc

SEQ ID NO: 58921 - DNA, 24 bp, Artificial sequence
  SiRNA target sequence
agaatattttggggtaaagtctca

SEQ ID NO: 58922 - DNA, 24 bp, Artificial sequence
  SiRNA target sequence
gaatattttggggtaaagtctcac

SEQ ID NO: 58923 - DNA, 24 bp, Artificial sequence
  SiRNA target sequence
aatattttggggtaaagtctcaca

SEQ ID NO: 58924 - DNA, 24 bp, Artificial sequence
  SiRNA target sequence
atattttggggtaaagtctcacag

SEQ ID NO: 58925 - DNA, 24 bp, Artificial sequence
  SiRNA target sequence
tattttggggtaaagtctcacaga

SEQ ID NO: 58926 - DNA, 24 bp, Artificial sequence
  SiRNA target sequence
attttggggtaaagtctcacagaa

SEQ ID NO: 58927 - DNA, 24 bp, Artificial sequence
  SiRNA target sequence
ttttggggtaaagtctcacagaat

SEQ ID NO: 58928 - DNA, 24 bp, Artificial sequence
  SiRNA target sequence
tttggggtaaagtctcacagaatt

SEQ ID NO: 58929 - DNA, 24 bp, Artificial sequence
  SiRNA target sequence
ttggggtaaagtctcacagaattt

SEQ ID NO: 58930 - DNA, 24 bp, Artificial sequence
  SiRNA target sequence
tggggtaaagtctcacagaatttt

SEQ ID NO: 58931 - DNA, 24 bp, Artificial sequence
  SiRNA target sequence
ggggtaaagtctcacagaattttg

SEQ ID NO: 58932 - DNA, 24 bp, Artificial sequence
  SiRNA target sequence
gggtaaagtctcacagaattttgt

SEQ ID NO: 58933 - DNA, 24 bp, Artificial sequence
  SiRNA target sequence
ggtaaagtctcacagaattttgtt

SEQ ID NO: 58934 - DNA, 24 bp, Artificial sequence
  SiRNA target sequence
gtaaagtctcacagaattttgttc

SEQ ID NO: 58935 - DNA, 24 bp, Artificial sequence
  SiRNA target sequence
taaagtctcacagaattttgttct

SEQ ID NO: 58936 - DNA, 24 bp, Artificial sequence
  SiRNA target sequence
aaagtctcacagaattttgttctc

SEQ ID NO: 58937 - DNA, 24 bp, Artificial sequence
  SiRNA target sequence
aagtctcacagaattttgttctct

SEQ ID NO: 58938 - DNA, 24 bp, Artificial sequence
  SiRNA target sequence
agtctcacagaattttgttctctc

SEQ ID NO: 58939 - DNA, 24 bp, Artificial sequence
  SiRNA target sequence
gtctcacagaattttgttctctct

SEQ ID NO: 58940 - DNA, 24 bp, Artificial sequence
  SiRNA target sequence
tctcacagaattttgttctctctt

SEQ ID NO: 58941 - DNA, 24 bp, Artificial sequence
  SiRNA target sequence
ctcacagaattttgttctctcttt

SEQ ID NO: 58942 - DNA, 24 bp, Artificial sequence
  SiRNA target sequence
tcacagaattttgttctctctttt

SEQ ID NO: 58943 - DNA, 24 bp, Artificial sequence
  SiRNA target sequence
cacagaattttgttctctctttta

SEQ ID NO: 58944 - DNA, 24 bp, Artificial sequence
  SiRNA target sequence
acagaattttgttctctcttttat

SEQ ID NO: 58945 - DNA, 24 bp, Artificial sequence
  SiRNA target sequence
cagaattttgttctctcttttata

SEQ ID NO: 58946 - DNA, 24 bp, Artificial sequence
  SiRNA target sequence
agaattttgttctctcttttatat

SEQ ID NO: 58947 - DNA, 24 bp, Artificial sequence
  SiRNA target sequence
gaattttgttctctcttttatata

SEQ ID NO: 58948 - DNA, 24 bp, Artificial sequence
  SiRNA target sequence
aattttgttctctcttttatatat

SEQ ID NO: 58949 - DNA, 24 bp, Artificial sequence
  SiRNA target sequence
attttgttctctcttttatatata

SEQ ID NO: 58950 - DNA, 24 bp, Artificial sequence
  SiRNA target sequence
ttttgttctctcttttatatatac

SEQ ID NO: 58951 - DNA, 24 bp, Artificial sequence
  SiRNA target sequence
tttgttctctcttttatatataca

SEQ ID NO: 58952 - DNA, 24 bp, Artificial sequence
  SiRNA target sequence
ttgttctctcttttatatatacaa

SEQ ID NO: 58953 - DNA, 24 bp, Artificial sequence
  SiRNA target sequence
tgttctctcttttatatatacaaa

SEQ ID NO: 58954 - DNA, 24 bp, Artificial sequence
  SiRNA target sequence
gttctctcttttatatatacaaaa

SEQ ID NO: 58955 - DNA, 24 bp, Artificial sequence
  SiRNA target sequence
ttctctcttttatatatacaaaaa

SEQ ID NO: 58956 - DNA, 24 bp, Artificial sequence
  SiRNA target sequence
tctctcttttatatatacaaaaaa

SEQ ID NO: 58957 - DNA, 24 bp, Artificial sequence
  SiRNA target sequence
ctctcttttatatatacaaaaaat

SEQ ID NO: 58958 - DNA, 24 bp, Artificial sequence
  SiRNA target sequence
tctcttttatatatacaaaaaatg

SEQ ID NO: 58959 - DNA, 24 bp, Artificial sequence
  SiRNA target sequence
ctcttttatatatacaaaaaatga

SEQ ID NO: 58960 - DNA, 24 bp, Artificial sequence
  SiRNA target sequence
tcttttatatatacaaaaaatgac

SEQ ID NO: 58961 - DNA, 24 bp, Artificial sequence
  SiRNA target sequence
cttttatatatacaaaaaatgaca

SEQ ID NO: 58962 - DNA, 24 bp, Artificial sequence
  SiRNA target sequence
ttttatatatacaaaaaatgacat

SEQ ID NO: 58963 - DNA, 24 bp, Artificial sequence
  SiRNA target sequence
tttatatatacaaaaaatgacatt

SEQ ID NO: 58964 - DNA, 24 bp, Artificial sequence
  SiRNA target sequence
ttatatatacaaaaaatgacattt

SEQ ID NO: 58965 - DNA, 24 bp, Artificial sequence
  SiRNA target sequence
tatatatacaaaaaatgacatttg

SEQ ID NO: 58966 - DNA, 24 bp, Artificial sequence
  SiRNA target sequence
atatatacaaaaaatgacatttgc

SEQ ID NO: 58967 - DNA, 24 bp, Artificial sequence
  SiRNA target sequence
tatatacaaaaaatgacatttgcg

SEQ ID NO: 58968 - DNA, 24 bp, Artificial sequence
  SiRNA target sequence
atatacaaaaaatgacatttgcga

SEQ ID NO: 58969 - DNA, 24 bp, Artificial sequence
  SiRNA target sequence
tatacaaaaaatgacatttgcgat

SEQ ID NO: 58970 - DNA, 24 bp, Artificial sequence
  SiRNA target sequence
atacaaaaaatgacatttgcgata

SEQ ID NO: 58971 - DNA, 24 bp, Artificial sequence
  SiRNA target sequence
tacaaaaaatgacatttgcgatac

SEQ ID NO: 58972 - DNA, 24 bp, Artificial sequence
  SiRNA target sequence
acaaaaaatgacatttgcgataca

SEQ ID NO: 58973 - DNA, 24 bp, Artificial sequence
  SiRNA target sequence
caaaaaatgacatttgcgatacag

SEQ ID NO: 58974 - DNA, 24 bp, Artificial sequence
  SiRNA target sequence
aaaaaatgacatttgcgatacagg

SEQ ID NO: 58975 - DNA, 24 bp, Artificial sequence
  SiRNA target sequence
aaaaatgacatttgcgatacaggc

SEQ ID NO: 58976 - DNA, 24 bp, Artificial sequence
  SiRNA target sequence
aaaatgacatttgcgatacaggca

SEQ ID NO: 58977 - DNA, 24 bp, Artificial sequence
  SiRNA target sequence
aaatgacatttgcgatacaggcaa

SEQ ID NO: 58978 - DNA, 24 bp, Artificial sequence
  SiRNA target sequence
aatgacatttgcgatacaggcaat

SEQ ID NO: 58979 - DNA, 24 bp, Artificial sequence
  SiRNA target sequence
atgacatttgcgatacaggcaatt

SEQ ID NO: 58980 - DNA, 24 bp, Artificial sequence
  SiRNA target sequence
tgacatttgcgatacaggcaatta

SEQ ID NO: 58981 - DNA, 24 bp, Artificial sequence
  SiRNA target sequence
gacatttgcgatacaggcaattat

SEQ ID NO: 58982 - DNA, 24 bp, Artificial sequence
  SiRNA target sequence
acatttgcgatacaggcaattatt

SEQ ID NO: 58983 - DNA, 24 bp, Artificial sequence
  SiRNA target sequence
catttgcgatacaggcaattatta

SEQ ID NO: 58984 - DNA, 24 bp, Artificial sequence
  SiRNA target sequence
atttgcgatacaggcaattattat

SEQ ID NO: 58985 - DNA, 24 bp, Artificial sequence
  SiRNA target sequence
tttgcgatacaggcaattattatt

SEQ ID NO: 58986 - DNA, 24 bp, Artificial sequence
  SiRNA target sequence
ttgcgatacaggcaattattatta

SEQ ID NO: 58987 - DNA, 24 bp, Artificial sequence
  SiRNA target sequence
tgcgatacaggcaattattattat

SEQ ID NO: 58988 - DNA, 24 bp, Artificial sequence
  SiRNA target sequence
gcgatacaggcaattattattatc

SEQ ID NO: 58989 - DNA, 24 bp, Artificial sequence
  SiRNA target sequence
cgatacaggcaattattattatca

SEQ ID NO: 58990 - DNA, 24 bp, Artificial sequence
  SiRNA target sequence
gatacaggcaattattattatcac

SEQ ID NO: 58991 - DNA, 24 bp, Artificial sequence
  SiRNA target sequence
atacaggcaattattattatcaca

SEQ ID NO: 58992 - DNA, 24 bp, Artificial sequence
  SiRNA target sequence
tacaggcaattattattatcacat

SEQ ID NO: 58993 - DNA, 24 bp, Artificial sequence
  SiRNA target sequence
acaggcaattattattatcacatt

SEQ ID NO: 58994 - DNA, 24 bp, Artificial sequence
  SiRNA target sequence
caggcaattattattatcacatta

SEQ ID NO: 58995 - DNA, 24 bp, Artificial sequence
  SiRNA target sequence
aggcaattattattatcacattag

SEQ ID NO: 58996 - DNA, 24 bp, Artificial sequence
  SiRNA target sequence
ggcaattattattatcacattagg

SEQ ID NO: 58997 - DNA, 24 bp, Artificial sequence
  SiRNA target sequence
gcaattattattatcacattagga

SEQ ID NO: 58998 - DNA, 24 bp, Artificial sequence
  SiRNA target sequence
caattattattatcacattaggat

SEQ ID NO: 58999 - DNA, 24 bp, Artificial sequence
  SiRNA target sequence
aattattattatcacattaggatc

SEQ ID NO: 59000 - DNA, 24 bp, Artificial sequence
  SiRNA target sequence
attattattatcacattaggatct

SEQ ID NO: 59001 - DNA, 24 bp, Artificial sequence
  SiRNA target sequence
ttattattatcacattaggatctt

SEQ ID NO: 59002 - DNA, 24 bp, Artificial sequence
  SiRNA target sequence
tattattatcacattaggatcttt

SEQ ID NO: 59003 - DNA, 24 bp, Artificial sequence
  SiRNA target sequence
attattatcacattaggatctttt

SEQ ID NO: 59004 - DNA, 24 bp, Artificial sequence
  SiRNA target sequence
ttattatcacattaggatcttttg

SEQ ID NO: 59005 - DNA, 24 bp, Artificial sequence
  SiRNA target sequence
tattatcacattaggatcttttgg

SEQ ID NO: 59006 - DNA, 24 bp, Artificial sequence
  SiRNA target sequence
attatcacattaggatcttttgga

SEQ ID NO: 59007 - DNA, 24 bp, Artificial sequence
  SiRNA target sequence
ttatcacattaggatcttttggat

SEQ ID NO: 59008 - DNA, 24 bp, Artificial sequence
  SiRNA target sequence
tatcacattaggatcttttggata

SEQ ID NO: 59009 - DNA, 24 bp, Artificial sequence
  SiRNA target sequence
atcacattaggatcttttggatat

SEQ ID NO: 59010 - DNA, 24 bp, Artificial sequence
  SiRNA target sequence
tcacattaggatcttttggatatt

SEQ ID NO: 59011 - DNA, 24 bp, Artificial sequence
  SiRNA target sequence
cacattaggatcttttggatattt

SEQ ID NO: 59012 - DNA, 24 bp, Artificial sequence
  SiRNA target sequence
acattaggatcttttggatatttt

SEQ ID NO: 59013 - DNA, 24 bp, Artificial sequence
  SiRNA target sequence
cattaggatcttttggatattttc

SEQ ID NO: 59014 - DNA, 24 bp, Artificial sequence
  SiRNA target sequence
attaggatcttttggatattttcc

SEQ ID NO: 59015 - DNA, 24 bp, Artificial sequence
  SiRNA target sequence
ttaggatcttttggatattttccg

SEQ ID NO: 59016 - DNA, 24 bp, Artificial sequence
  SiRNA target sequence
taggatcttttggatattttccga

SEQ ID NO: 59017 - DNA, 24 bp, Artificial sequence
  SiRNA target sequence
aggatcttttggatattttccgat

SEQ ID NO: 59018 - DNA, 24 bp, Artificial sequence
  SiRNA target sequence
ggatcttttggatattttccgatt

SEQ ID NO: 59019 - DNA, 24 bp, Artificial sequence
  SiRNA target sequence
gatcttttggatattttccgatta

SEQ ID NO: 59020 - DNA, 24 bp, Artificial sequence
  SiRNA target sequence
atcttttggatattttccgattaa

SEQ ID NO: 59021 - DNA, 24 bp, Artificial sequence
  SiRNA target sequence
tcttttggatattttccgattaaa

SEQ ID NO: 59022 - DNA, 24 bp, Artificial sequence
  SiRNA target sequence
cttttggatattttccgattaaat

SEQ ID NO: 59023 - DNA, 24 bp, Artificial sequence
  SiRNA target sequence
ttttggatattttccgattaaatt

SEQ ID NO: 59024 - DNA, 24 bp, Artificial sequence
  SiRNA target sequence
tttggatattttccgattaaatta

SEQ ID NO: 59025 - DNA, 24 bp, Artificial sequence
  SiRNA target sequence
ttggatattttccgattaaattat

SEQ ID NO: 59026 - DNA, 24 bp, Artificial sequence
  SiRNA target sequence
tggatattttccgattaaattatc

SEQ ID NO: 59027 - DNA, 24 bp, Artificial sequence
  SiRNA target sequence
ggatattttccgattaaattatcc

SEQ ID NO: 59028 - DNA, 24 bp, Artificial sequence
  SiRNA target sequence
gatattttccgattaaattatcct

SEQ ID NO: 59029 - DNA, 24 bp, Artificial sequence
  SiRNA target sequence
atattttccgattaaattatcctc

SEQ ID NO: 59030 - DNA, 24 bp, Artificial sequence
  SiRNA target sequence
tattttccgattaaattatcctct

SEQ ID NO: 59031 - DNA, 24 bp, Artificial sequence
  SiRNA target sequence
attttccgattaaattatcctctc

SEQ ID NO: 59032 - DNA, 24 bp, Artificial sequence
  SiRNA target sequence
ttttccgattaaattatcctctca

SEQ ID NO: 59033 - DNA, 24 bp, Artificial sequence
  SiRNA target sequence
tttccgattaaattatcctctcaa

SEQ ID NO: 59034 - DNA, 24 bp, Artificial sequence
  SiRNA target sequence
ttccgattaaattatcctctcaac

SEQ ID NO: 59035 - DNA, 24 bp, Artificial sequence
  SiRNA target sequence
tccgattaaattatcctctcaaca

SEQ ID NO: 59036 - DNA, 24 bp, Artificial sequence
  SiRNA target sequence
ccgattaaattatcctctcaacag

SEQ ID NO: 59037 - DNA, 24 bp, Artificial sequence
  SiRNA target sequence
cgattaaattatcctctcaacagt

SEQ ID NO: 59038 - DNA, 24 bp, Artificial sequence
  SiRNA target sequence
gattaaattatcctctcaacagtt

SEQ ID NO: 59039 - DNA, 24 bp, Artificial sequence
  SiRNA target sequence
attaaattatcctctcaacagtta

SEQ ID NO: 59040 - DNA, 24 bp, Artificial sequence
  SiRNA target sequence
ttaaattatcctctcaacagttag

SEQ ID NO: 59041 - DNA, 24 bp, Artificial sequence
  SiRNA target sequence
taaattatcctctcaacagttagt

SEQ ID NO: 59042 - DNA, 24 bp, Artificial sequence
  SiRNA target sequence
aaattatcctctcaacagttagtc

SEQ ID NO: 59043 - DNA, 24 bp, Artificial sequence
  SiRNA target sequence
aattatcctctcaacagttagtct

SEQ ID NO: 59044 - DNA, 24 bp, Artificial sequence
  SiRNA target sequence
attatcctctcaacagttagtctt

SEQ ID NO: 59045 - DNA, 24 bp, Artificial sequence
  SiRNA target sequence
ttatcctctcaacagttagtcttt

SEQ ID NO: 59046 - DNA, 24 bp, Artificial sequence
  SiRNA target sequence
tatcctctcaacagttagtctttt

SEQ ID NO: 59047 - DNA, 24 bp, Artificial sequence
  SiRNA target sequence
atcctctcaacagttagtctttta

SEQ ID NO: 59048 - DNA, 24 bp, Artificial sequence
  SiRNA target sequence
tcctctcaacagttagtcttttat

SEQ ID NO: 59049 - DNA, 24 bp, Artificial sequence
  SiRNA target sequence
cctctcaacagttagtcttttata

SEQ ID NO: 59050 - DNA, 24 bp, Artificial sequence
  SiRNA target sequence
ctctcaacagttagtcttttatat

SEQ ID NO: 59051 - DNA, 24 bp, Artificial sequence
  SiRNA target sequence
tctcaacagttagtcttttatatt

SEQ ID NO: 59052 - DNA, 24 bp, Artificial sequence
  SiRNA target sequence
ctcaacagttagtcttttatattt

SEQ ID NO: 59053 - DNA, 24 bp, Artificial sequence
  SiRNA target sequence
tcaacagttagtcttttatatttc

SEQ ID NO: 59054 - DNA, 24 bp, Artificial sequence
  SiRNA target sequence
caacagttagtcttttatatttcg

SEQ ID NO: 59055 - DNA, 24 bp, Artificial sequence
  SiRNA target sequence
aacagttagtcttttatatttcga

SEQ ID NO: 59056 - DNA, 24 bp, Artificial sequence
  SiRNA target sequence
acagttagtcttttatatttcgat

SEQ ID NO: 59057 - DNA, 24 bp, Artificial sequence
  SiRNA target sequence
cagttagtcttttatatttcgatt

SEQ ID NO: 59058 - DNA, 24 bp, Artificial sequence
  SiRNA target sequence
agttagtcttttatatttcgatta

SEQ ID NO: 59059 - DNA, 24 bp, Artificial sequence
  SiRNA target sequence
gttagtcttttatatttcgattag

SEQ ID NO: 59060 - DNA, 24 bp, Artificial sequence
  SiRNA target sequence
ttagtcttttatatttcgattagt

SEQ ID NO: 59061 - DNA, 24 bp, Artificial sequence
  SiRNA target sequence
tagtcttttatatttcgattagta

SEQ ID NO: 59062 - DNA, 24 bp, Artificial sequence
  SiRNA target sequence
agtcttttatatttcgattagtaa

SEQ ID NO: 59063 - DNA, 24 bp, Artificial sequence
  SiRNA target sequence
gtcttttatatttcgattagtaaa

SEQ ID NO: 59064 - DNA, 24 bp, Artificial sequence
  SiRNA target sequence
tcttttatatttcgattagtaaaa

SEQ ID NO: 59065 - DNA, 24 bp, Artificial sequence
  SiRNA target sequence
cttttatatttcgattagtaaaac

SEQ ID NO: 59066 - DNA, 24 bp, Artificial sequence
  SiRNA target sequence
ttttatatttcgattagtaaaacg

SEQ ID NO: 59067 - DNA, 24 bp, Artificial sequence
  SiRNA target sequence
tttatatttcgattagtaaaacgt

SEQ ID NO: 59068 - DNA, 24 bp, Artificial sequence
  SiRNA target sequence
ttatatttcgattagtaaaacgtt

SEQ ID NO: 59069 - DNA, 24 bp, Artificial sequence
  SiRNA target sequence
tatatttcgattagtaaaacgttg

SEQ ID NO: 59070 - DNA, 24 bp, Artificial sequence
  SiRNA target sequence
atatttcgattagtaaaacgttga

SEQ ID NO: 59071 - DNA, 24 bp, Artificial sequence
  SiRNA target sequence
tatttcgattagtaaaacgttgac

SEQ ID NO: 59072 - DNA, 24 bp, Artificial sequence
  SiRNA target sequence
atttcgattagtaaaacgttgaca

SEQ ID NO: 59073 - DNA, 24 bp, Artificial sequence
  SiRNA target sequence
tttcgattagtaaaacgttgacaa

SEQ ID NO: 59074 - DNA, 24 bp, Artificial sequence
  SiRNA target sequence
ttcgattagtaaaacgttgacaaa

SEQ ID NO: 59075 - DNA, 24 bp, Artificial sequence
  SiRNA target sequence
tcgattagtaaaacgttgacaaat

SEQ ID NO: 59076 - DNA, 24 bp, Artificial sequence
  SiRNA target sequence
cgattagtaaaacgttgacaaatt

SEQ ID NO: 59077 - DNA, 24 bp, Artificial sequence
  SiRNA target sequence
gattagtaaaacgttgacaaattc

SEQ ID NO: 59078 - DNA, 24 bp, Artificial sequence
  SiRNA target sequence
attagtaaaacgttgacaaattcg

SEQ ID NO: 59079 - DNA, 24 bp, Artificial sequence
  SiRNA target sequence
ttagtaaaacgttgacaaattcgt

SEQ ID NO: 59080 - DNA, 24 bp, Artificial sequence
  SiRNA target sequence
tagtaaaacgttgacaaattcgtt

SEQ ID NO: 59081 - DNA, 24 bp, Artificial sequence
  SiRNA target sequence
agtaaaacgttgacaaattcgttg

SEQ ID NO: 59082 - DNA, 24 bp, Artificial sequence
  SiRNA target sequence
gtaaaacgttgacaaattcgttga

SEQ ID NO: 59083 - DNA, 24 bp, Artificial sequence
  SiRNA target sequence
taaaacgttgacaaattcgttgag

SEQ ID NO: 59084 - DNA, 24 bp, Artificial sequence
  SiRNA target sequence
aaaacgttgacaaattcgttgagc

SEQ ID NO: 59085 - DNA, 24 bp, Artificial sequence
  SiRNA target sequence
aaacgttgacaaattcgttgagcg

SEQ ID NO: 59086 - DNA, 24 bp, Artificial sequence
  SiRNA target sequence
aacgttgacaaattcgttgagcga

SEQ ID NO: 59087 - DNA, 24 bp, Artificial sequence
  SiRNA target sequence
acgttgacaaattcgttgagcgaa

SEQ ID NO: 59088 - DNA, 24 bp, Artificial sequence
  SiRNA target sequence
cgttgacaaattcgttgagcgaaa

SEQ ID NO: 59089 - DNA, 24 bp, Artificial sequence
  SiRNA target sequence
gttgacaaattcgttgagcgaaat

SEQ ID NO: 59090 - DNA, 24 bp, Artificial sequence
  SiRNA target sequence
ttgacaaattcgttgagcgaaatg

SEQ ID NO: 59091 - DNA, 24 bp, Artificial sequence
  SiRNA target sequence
tgacaaattcgttgagcgaaatgg

SEQ ID NO: 59092 - DNA, 24 bp, Artificial sequence
  SiRNA target sequence
gacaaattcgttgagcgaaatggg

SEQ ID NO: 59093 - DNA, 24 bp, Artificial sequence
  SiRNA target sequence
acaaattcgttgagcgaaatggga

SEQ ID NO: 59094 - DNA, 24 bp, Artificial sequence
  SiRNA target sequence
caaattcgttgagcgaaatgggaa

SEQ ID NO: 59095 - DNA, 24 bp, Artificial sequence
  SiRNA target sequence
aaattcgttgagcgaaatgggaat

SEQ ID NO: 59096 - DNA, 24 bp, Artificial sequence
  SiRNA target sequence
aattcgttgagcgaaatgggaatg

SEQ ID NO: 59097 - DNA, 24 bp, Artificial sequence
  SiRNA target sequence
attcgttgagcgaaatgggaatgc

SEQ ID NO: 59098 - DNA, 24 bp, Artificial sequence
  SiRNA target sequence
ttcgttgagcgaaatgggaatgct

SEQ ID NO: 59099 - DNA, 24 bp, Artificial sequence
  SiRNA target sequence
tcgttgagcgaaatgggaatgcta

SEQ ID NO: 59100 - DNA, 24 bp, Artificial sequence
  SiRNA target sequence
cgttgagcgaaatgggaatgctat

SEQ ID NO: 59101 - DNA, 24 bp, Artificial sequence
  SiRNA target sequence
gttgagcgaaatgggaatgctata

SEQ ID NO: 59102 - DNA, 24 bp, Artificial sequence
  SiRNA target sequence
ttgagcgaaatgggaatgctatac

SEQ ID NO: 59103 - DNA, 24 bp, Artificial sequence
  SiRNA target sequence
tgagcgaaatgggaatgctataca

SEQ ID NO: 59104 - DNA, 24 bp, Artificial sequence
  SiRNA target sequence
gagcgaaatgggaatgctatacac

SEQ ID NO: 59105 - DNA, 24 bp, Artificial sequence
  SiRNA target sequence
agcgaaatgggaatgctatacaca

SEQ ID NO: 59106 - DNA, 24 bp, Artificial sequence
  SiRNA target sequence
gcgaaatgggaatgctatacacaa

SEQ ID NO: 59107 - DNA, 24 bp, Artificial sequence
  SiRNA target sequence
cgaaatgggaatgctatacacaag

SEQ ID NO: 59108 - DNA, 24 bp, Artificial sequence
  SiRNA target sequence
gaaatgggaatgctatacacaaga

SEQ ID NO: 59109 - DNA, 24 bp, Artificial sequence
  SiRNA target sequence
aaatgggaatgctatacacaagat

SEQ ID NO: 59110 - DNA, 24 bp, Artificial sequence
  SiRNA target sequence
aatgggaatgctatacacaagata

SEQ ID NO: 59111 - DNA, 24 bp, Artificial sequence
  SiRNA target sequence
atgggaatgctatacacaagatat

SEQ ID NO: 59112 - DNA, 24 bp, Artificial sequence
  SiRNA target sequence
tgggaatgctatacacaagatatg

SEQ ID NO: 59113 - DNA, 24 bp, Artificial sequence
  SiRNA target sequence
gggaatgctatacacaagatatgt

SEQ ID NO: 59114 - DNA, 24 bp, Artificial sequence
  SiRNA target sequence
ggaatgctatacacaagatatgta

SEQ ID NO: 59115 - DNA, 24 bp, Artificial sequence
  SiRNA target sequence
gaatgctatacacaagatatgtac

SEQ ID NO: 59116 - DNA, 24 bp, Artificial sequence
  SiRNA target sequence
aatgctatacacaagatatgtaca

SEQ ID NO: 59117 - DNA, 24 bp, Artificial sequence
  SiRNA target sequence
atgctatacacaagatatgtacaa

SEQ ID NO: 59118 - DNA, 24 bp, Artificial sequence
  SiRNA target sequence
tgctatacacaagatatgtacaag

SEQ ID NO: 59119 - DNA, 24 bp, Artificial sequence
  SiRNA target sequence
gctatacacaagatatgtacaagg

SEQ ID NO: 59120 - DNA, 24 bp, Artificial sequence
  SiRNA target sequence
ctatacacaagatatgtacaagga

SEQ ID NO: 59121 - DNA, 24 bp, Artificial sequence
  SiRNA target sequence
tatacacaagatatgtacaaggat

SEQ ID NO: 59122 - DNA, 24 bp, Artificial sequence
  SiRNA target sequence
atacacaagatatgtacaaggatt

SEQ ID NO: 59123 - DNA, 24 bp, Artificial sequence
  SiRNA target sequence
tacacaagatatgtacaaggattt

SEQ ID NO: 59124 - DNA, 24 bp, Artificial sequence
  SiRNA target sequence
acacaagatatgtacaaggatttt

SEQ ID NO: 59125 - DNA, 24 bp, Artificial sequence
  SiRNA target sequence
cacaagatatgtacaaggattttt

SEQ ID NO: 59126 - DNA, 24 bp, Artificial sequence
  SiRNA target sequence
acaagatatgtacaaggattttta

SEQ ID NO: 59127 - DNA, 24 bp, Artificial sequence
  SiRNA target sequence
caagatatgtacaaggatttttaa

SEQ ID NO: 59128 - DNA, 24 bp, Artificial sequence
  SiRNA target sequence
aagatatgtacaaggatttttaaa

SEQ ID NO: 59129 - DNA, 24 bp, Artificial sequence
  SiRNA target sequence
agatatgtacaaggatttttaaat

SEQ ID NO: 59130 - DNA, 24 bp, Artificial sequence
  SiRNA target sequence
gatatgtacaaggatttttaaatg

SEQ ID NO: 59131 - DNA, 24 bp, Artificial sequence
  SiRNA target sequence
atatgtacaaggatttttaaatgc

SEQ ID NO: 59132 - DNA, 24 bp, Artificial sequence
  SiRNA target sequence
tatgtacaaggatttttaaatgca

SEQ ID NO: 59133 - DNA, 24 bp, Artificial sequence
  SiRNA target sequence
atgtacaaggatttttaaatgcaa

SEQ ID NO: 59134 - DNA, 24 bp, Artificial sequence
  SiRNA target sequence
tgtacaaggatttttaaatgcaaa

SEQ ID NO: 59135 - DNA, 24 bp, Artificial sequence
  SiRNA target sequence
gtacaaggatttttaaatgcaaag

SEQ ID NO: 59136 - DNA, 24 bp, Artificial sequence
  SiRNA target sequence
tacaaggatttttaaatgcaaagt

SEQ ID NO: 59137 - DNA, 24 bp, Artificial sequence
  SiRNA target sequence
acaaggatttttaaatgcaaagtc

SEQ ID NO: 59138 - DNA, 24 bp, Artificial sequence
  SiRNA target sequence
caaggatttttaaatgcaaagtct

SEQ ID NO: 59139 - DNA, 24 bp, Artificial sequence
  SiRNA target sequence
aaggatttttaaatgcaaagtctg

SEQ ID NO: 59140 - DNA, 24 bp, Artificial sequence
  SiRNA target sequence
aggatttttaaatgcaaagtctgg

SEQ ID NO: 59141 - DNA, 24 bp, Artificial sequence
  SiRNA target sequence
ggatttttaaatgcaaagtctgga

SEQ ID NO: 59142 - DNA, 24 bp, Artificial sequence
  SiRNA target sequence
gatttttaaatgcaaagtctggat

SEQ ID NO: 59143 - DNA, 24 bp, Artificial sequence
  SiRNA target sequence
atttttaaatgcaaagtctggata

SEQ ID NO: 59144 - DNA, 24 bp, Artificial sequence
  SiRNA target sequence
tttttaaatgcaaagtctggatat

SEQ ID NO: 59145 - DNA, 24 bp, Artificial sequence
  SiRNA target sequence
ttttaaatgcaaagtctggatatt

SEQ ID NO: 59146 - DNA, 24 bp, Artificial sequence
  SiRNA target sequence
tttaaatgcaaagtctggatatta

SEQ ID NO: 59147 - DNA, 24 bp, Artificial sequence
  SiRNA target sequence
ttaaatgcaaagtctggatattac

SEQ ID NO: 59148 - DNA, 24 bp, Artificial sequence
  SiRNA target sequence
taaatgcaaagtctggatattacg

SEQ ID NO: 59149 - DNA, 24 bp, Artificial sequence
  SiRNA target sequence
aaatgcaaagtctggatattacga

SEQ ID NO: 59150 - DNA, 24 bp, Artificial sequence
  SiRNA target sequence
aatgcaaagtctggatattacgag

SEQ ID NO: 59151 - DNA, 24 bp, Artificial sequence
  SiRNA target sequence
atgcaaagtctggatattacgagt

SEQ ID NO: 59152 - DNA, 24 bp, Artificial sequence
  SiRNA target sequence
tgcaaagtctggatattacgagtt

SEQ ID NO: 59153 - DNA, 24 bp, Artificial sequence
  SiRNA target sequence
gcaaagtctggatattacgagttt

SEQ ID NO: 59154 - DNA, 24 bp, Artificial sequence
  SiRNA target sequence
caaagtctggatattacgagttta

SEQ ID NO: 59155 - DNA, 24 bp, Artificial sequence
  SiRNA target sequence
aaagtctggatattacgagtttaa

SEQ ID NO: 59156 - DNA, 24 bp, Artificial sequence
  SiRNA target sequence
aagtctggatattacgagtttaaa

SEQ ID NO: 59157 - DNA, 24 bp, Artificial sequence
  SiRNA target sequence
agtctggatattacgagtttaaag

SEQ ID NO: 59158 - DNA, 24 bp, Artificial sequence
  SiRNA target sequence
gtctggatattacgagtttaaaga

SEQ ID NO: 59159 - DNA, 24 bp, Artificial sequence
  SiRNA target sequence
tctggatattacgagtttaaagag

SEQ ID NO: 59160 - DNA, 24 bp, Artificial sequence
  SiRNA target sequence
ctggatattacgagtttaaagagg

SEQ ID NO: 59161 - DNA, 24 bp, Artificial sequence
  SiRNA target sequence
tggatattacgagtttaaagagga

SEQ ID NO: 59162 - DNA, 24 bp, Artificial sequence
  SiRNA target sequence
ggatattacgagtttaaagaggat

SEQ ID NO: 59163 - DNA, 24 bp, Artificial sequence
  SiRNA target sequence
gatattacgagtttaaagaggata

SEQ ID NO: 59164 - DNA, 24 bp, Artificial sequence
  SiRNA target sequence
atattacgagtttaaagaggatac

SEQ ID NO: 59165 - DNA, 24 bp, Artificial sequence
  SiRNA target sequence
tattacgagtttaaagaggataca

SEQ ID NO: 59166 - DNA, 24 bp, Artificial sequence
  SiRNA target sequence
attacgagtttaaagaggatacac

SEQ ID NO: 59167 - DNA, 24 bp, Artificial sequence
  SiRNA target sequence
ttacgagtttaaagaggatacaca

SEQ ID NO: 59168 - DNA, 24 bp, Artificial sequence
  SiRNA target sequence
tacgagtttaaagaggatacacaa

SEQ ID NO: 59169 - DNA, 24 bp, Artificial sequence
  SiRNA target sequence
acgagtttaaagaggatacacaaa

SEQ ID NO: 59170 - DNA, 24 bp, Artificial sequence
  SiRNA target sequence
cgagtttaaagaggatacacaaac

SEQ ID NO: 59171 - DNA, 24 bp, Artificial sequence
  SiRNA target sequence
gagtttaaagaggatacacaaact

SEQ ID NO: 59172 - DNA, 24 bp, Artificial sequence
  SiRNA target sequence
agtttaaagaggatacacaaactg

SEQ ID NO: 59173 - DNA, 24 bp, Artificial sequence
  SiRNA target sequence
gtttaaagaggatacacaaactga

SEQ ID NO: 59174 - DNA, 24 bp, Artificial sequence
  SiRNA target sequence
tttaaagaggatacacaaactgat

SEQ ID NO: 59175 - DNA, 24 bp, Artificial sequence
  SiRNA target sequence
ttaaagaggatacacaaactgata

SEQ ID NO: 59176 - DNA, 24 bp, Artificial sequence
  SiRNA target sequence
taaagaggatacacaaactgataa

SEQ ID NO: 59177 - DNA, 24 bp, Artificial sequence
  SiRNA target sequence
aaagaggatacacaaactgataaa

SEQ ID NO: 59178 - DNA, 24 bp, Artificial sequence
  SiRNA target sequence
aagaggatacacaaactgataaaa

SEQ ID NO: 59179 - DNA, 24 bp, Artificial sequence
  SiRNA target sequence
agaggatacacaaactgataaaat

SEQ ID NO: 59180 - DNA, 24 bp, Artificial sequence
  SiRNA target sequence
gaggatacacaaactgataaaata

SEQ ID NO: 59181 - DNA, 24 bp, Artificial sequence
  SiRNA target sequence
aggatacacaaactgataaaataa

SEQ ID NO: 59182 - DNA, 24 bp, Artificial sequence
  SiRNA target sequence
ggatacacaaactgataaaataag

SEQ ID NO: 59183 - DNA, 24 bp, Artificial sequence
  SiRNA target sequence
gatacacaaactgataaaataaga

SEQ ID NO: 59184 - DNA, 24 bp, Artificial sequence
  SiRNA target sequence
atacacaaactgataaaataagac

SEQ ID NO: 59185 - DNA, 24 bp, Artificial sequence
  SiRNA target sequence
tacacaaactgataaaataagact

SEQ ID NO: 59186 - DNA, 24 bp, Artificial sequence
  SiRNA target sequence
acacaaactgataaaataagactg

SEQ ID NO: 59187 - DNA, 24 bp, Artificial sequence
  SiRNA target sequence
cacaaactgataaaataagactga

SEQ ID NO: 59188 - DNA, 24 bp, Artificial sequence
  SiRNA target sequence
acaaactgataaaataagactgat

SEQ ID NO: 59189 - DNA, 24 bp, Artificial sequence
  SiRNA target sequence
caaactgataaaataagactgata

SEQ ID NO: 59190 - DNA, 24 bp, Artificial sequence
  SiRNA target sequence
aaactgataaaataagactgatag

SEQ ID NO: 59191 - DNA, 24 bp, Artificial sequence
  SiRNA target sequence
aactgataaaataagactgataga

SEQ ID NO: 59192 - DNA, 24 bp, Artificial sequence
  SiRNA target sequence
actgataaaataagactgatagat

SEQ ID NO: 59193 - DNA, 24 bp, Artificial sequence
  SiRNA target sequence
ctgataaaataagactgatagatt

SEQ ID NO: 59194 - DNA, 24 bp, Artificial sequence
  SiRNA target sequence
tgataaaataagactgatagattt

SEQ ID NO: 59195 - DNA, 24 bp, Artificial sequence
  SiRNA target sequence
gataaaataagactgatagatttt

SEQ ID NO: 59196 - DNA, 24 bp, Artificial sequence
  SiRNA target sequence
ataaaataagactgatagatttta

SEQ ID NO: 59197 - DNA, 24 bp, Artificial sequence
  SiRNA target sequence
taaaataagactgatagattttaa

SEQ ID NO: 59198 - DNA, 24 bp, Artificial sequence
  SiRNA target sequence
aaaataagactgatagattttaat

SEQ ID NO: 59199 - DNA, 24 bp, Artificial sequence
  SiRNA target sequence
aaataagactgatagattttaatg

SEQ ID NO: 59200 - DNA, 24 bp, Artificial sequence
  SiRNA target sequence
aataagactgatagattttaatga

SEQ ID NO: 59201 - DNA, 24 bp, Artificial sequence
  SiRNA target sequence
ataagactgatagattttaatgaa

SEQ ID NO: 59202 - DNA, 24 bp, Artificial sequence
  SiRNA target sequence
taagactgatagattttaatgaaa

SEQ ID NO: 59203 - DNA, 24 bp, Artificial sequence
  SiRNA target sequence
aagactgatagattttaatgaaaa

SEQ ID NO: 59204 - DNA, 24 bp, Artificial sequence
  SiRNA target sequence
agactgatagattttaatgaaaag

SEQ ID NO: 59205 - DNA, 24 bp, Artificial sequence
  SiRNA target sequence
gactgatagattttaatgaaaagc

SEQ ID NO: 59206 - DNA, 24 bp, Artificial sequence
  SiRNA target sequence
actgatagattttaatgaaaagct

SEQ ID NO: 59207 - DNA, 24 bp, Artificial sequence
  SiRNA target sequence
ctgatagattttaatgaaaagcta

SEQ ID NO: 59208 - DNA, 24 bp, Artificial sequence
  SiRNA target sequence
tgatagattttaatgaaaagctag

SEQ ID NO: 59209 - DNA, 24 bp, Artificial sequence
  SiRNA target sequence
gatagattttaatgaaaagctaga

SEQ ID NO: 59210 - DNA, 24 bp, Artificial sequence
  SiRNA target sequence
atagattttaatgaaaagctagaa

SEQ ID NO: 59211 - DNA, 24 bp, Artificial sequence
  SiRNA target sequence
tagattttaatgaaaagctagaat

SEQ ID NO: 59212 - DNA, 24 bp, Artificial sequence
  SiRNA target sequence
agattttaatgaaaagctagaatt

SEQ ID NO: 59213 - DNA, 24 bp, Artificial sequence
  SiRNA target sequence
gattttaatgaaaagctagaattt

SEQ ID NO: 59214 - DNA, 24 bp, Artificial sequence
  SiRNA target sequence
attttaatgaaaagctagaattta

SEQ ID NO: 59215 - DNA, 24 bp, Artificial sequence
  SiRNA target sequence
ttttaatgaaaagctagaatttag

SEQ ID NO: 59216 - DNA, 24 bp, Artificial sequence
  SiRNA target sequence
tttaatgaaaagctagaatttaga

SEQ ID NO: 59217 - DNA, 24 bp, Artificial sequence
  SiRNA target sequence
ttaatgaaaagctagaatttagaa

SEQ ID NO: 59218 - DNA, 24 bp, Artificial sequence
  SiRNA target sequence
taatgaaaagctagaatttagaaa

SEQ ID NO: 59219 - DNA, 24 bp, Artificial sequence
  SiRNA target sequence
aatgaaaagctagaatttagaaat

SEQ ID NO: 59220 - DNA, 24 bp, Artificial sequence
  SiRNA target sequence
atgaaaagctagaatttagaaatg

SEQ ID NO: 59221 - DNA, 24 bp, Artificial sequence
  SiRNA target sequence
tgaaaagctagaatttagaaatgt

SEQ ID NO: 59222 - DNA, 24 bp, Artificial sequence
  SiRNA target sequence
gaaaagctagaatttagaaatgta

SEQ ID NO: 59223 - DNA, 24 bp, Artificial sequence
  SiRNA target sequence
aaaagctagaatttagaaatgtat

SEQ ID NO: 59224 - DNA, 24 bp, Artificial sequence
  SiRNA target sequence
aaagctagaatttagaaatgtatc

SEQ ID NO: 59225 - DNA, 24 bp, Artificial sequence
  SiRNA target sequence
aagctagaatttagaaatgtatct

SEQ ID NO: 59226 - DNA, 24 bp, Artificial sequence
  SiRNA target sequence
agctagaatttagaaatgtatctt

SEQ ID NO: 59227 - DNA, 24 bp, Artificial sequence
  SiRNA target sequence
gctagaatttagaaatgtatcttt

SEQ ID NO: 59228 - DNA, 24 bp, Artificial sequence
  SiRNA target sequence
ctagaatttagaaatgtatctttt

SEQ ID NO: 59229 - DNA, 24 bp, Artificial sequence
  SiRNA target sequence
tagaatttagaaatgtatctttta

SEQ ID NO: 59230 - DNA, 24 bp, Artificial sequence
  SiRNA target sequence
agaatttagaaatgtatcttttag

SEQ ID NO: 59231 - DNA, 24 bp, Artificial sequence
  SiRNA target sequence
gaatttagaaatgtatcttttagt

SEQ ID NO: 59232 - DNA, 24 bp, Artificial sequence
  SiRNA target sequence
aatttagaaatgtatcttttagtt

SEQ ID NO: 59233 - DNA, 24 bp, Artificial sequence
  SiRNA target sequence
atttagaaatgtatcttttagtta

SEQ ID NO: 59234 - DNA, 24 bp, Artificial sequence
  SiRNA target sequence
tttagaaatgtatcttttagttat

SEQ ID NO: 59235 - DNA, 24 bp, Artificial sequence
  SiRNA target sequence
ttagaaatgtatcttttagttatt

SEQ ID NO: 59236 - DNA, 24 bp, Artificial sequence
  SiRNA target sequence
tagaaatgtatcttttagttattt

SEQ ID NO: 59237 - DNA, 24 bp, Artificial sequence
  SiRNA target sequence
agaaatgtatcttttagttattta

SEQ ID NO: 59238 - DNA, 24 bp, Artificial sequence
  SiRNA target sequence
gaaatgtatcttttagttatttaa

SEQ ID NO: 59239 - DNA, 24 bp, Artificial sequence
  SiRNA target sequence
aaatgtatcttttagttatttaaa

SEQ ID NO: 59240 - DNA, 24 bp, Artificial sequence
  SiRNA target sequence
aatgtatcttttagttatttaaat

SEQ ID NO: 59241 - DNA, 24 bp, Artificial sequence
  SiRNA target sequence
atgtatcttttagttatttaaata

SEQ ID NO: 59242 - DNA, 24 bp, Artificial sequence
  SiRNA target sequence
tgtatcttttagttatttaaataa

SEQ ID NO: 59243 - DNA, 24 bp, Artificial sequence
  SiRNA target sequence
gtatcttttagttatttaaataag

SEQ ID NO: 59244 - DNA, 24 bp, Artificial sequence
  SiRNA target sequence
tatcttttagttatttaaataagc

SEQ ID NO: 59245 - DNA, 24 bp, Artificial sequence
  SiRNA target sequence
atcttttagttatttaaataagcc

SEQ ID NO: 59246 - DNA, 24 bp, Artificial sequence
  SiRNA target sequence
tcttttagttatttaaataagcct

SEQ ID NO: 59247 - DNA, 24 bp, Artificial sequence
  SiRNA target sequence
cttttagttatttaaataagccta

SEQ ID NO: 59248 - DNA, 24 bp, Artificial sequence
  SiRNA target sequence
ttttagttatttaaataagcctat

SEQ ID NO: 59249 - DNA, 24 bp, Artificial sequence
  SiRNA target sequence
tttagttatttaaataagcctatt

SEQ ID NO: 59250 - DNA, 24 bp, Artificial sequence
  SiRNA target sequence
ttagttatttaaataagcctattt

SEQ ID NO: 59251 - DNA, 24 bp, Artificial sequence
  SiRNA target sequence
tagttatttaaataagcctatttt

SEQ ID NO: 59252 - DNA, 24 bp, Artificial sequence
  SiRNA target sequence
agttatttaaataagcctatttta

SEQ ID NO: 59253 - DNA, 24 bp, Artificial sequence
  SiRNA target sequence
gttatttaaataagcctattttag

SEQ ID NO: 59254 - DNA, 24 bp, Artificial sequence
  SiRNA target sequence
ttatttaaataagcctattttagt

SEQ ID NO: 59255 - DNA, 24 bp, Artificial sequence
  SiRNA target sequence
tatttaaataagcctattttagtg

SEQ ID NO: 59256 - DNA, 24 bp, Artificial sequence
  SiRNA target sequence
atttaaataagcctattttagtga

SEQ ID NO: 59257 - DNA, 24 bp, Artificial sequence
  SiRNA target sequence
tttaaataagcctattttagtgaa

SEQ ID NO: 59258 - DNA, 24 bp, Artificial sequence
  SiRNA target sequence
ttaaataagcctattttagtgaat

SEQ ID NO: 59259 - DNA, 24 bp, Artificial sequence
  SiRNA target sequence
taaataagcctattttagtgaatg

SEQ ID NO: 59260 - DNA, 24 bp, Artificial sequence
  SiRNA target sequence
aaataagcctattttagtgaatgc

SEQ ID NO: 59261 - DNA, 24 bp, Artificial sequence
  SiRNA target sequence
aataagcctattttagtgaatgct

SEQ ID NO: 59262 - DNA, 24 bp, Artificial sequence
  SiRNA target sequence
ataagcctattttagtgaatgcta

SEQ ID NO: 59263 - DNA, 24 bp, Artificial sequence
  SiRNA target sequence
taagcctattttagtgaatgctaa

SEQ ID NO: 59264 - DNA, 24 bp, Artificial sequence
  SiRNA target sequence
aagcctattttagtgaatgctaat

SEQ ID NO: 59265 - DNA, 24 bp, Artificial sequence
  SiRNA target sequence
agcctattttagtgaatgctaatt

SEQ ID NO: 59266 - DNA, 24 bp, Artificial sequence
  SiRNA target sequence
gcctattttagtgaatgctaattt

SEQ ID NO: 59267 - DNA, 24 bp, Artificial sequence
  SiRNA target sequence
cctattttagtgaatgctaatttc

SEQ ID NO: 59268 - DNA, 24 bp, Artificial sequence
  SiRNA target sequence
ctattttagtgaatgctaatttcg

SEQ ID NO: 59269 - DNA, 24 bp, Artificial sequence
  SiRNA target sequence
tattttagtgaatgctaatttcgt

SEQ ID NO: 59270 - DNA, 24 bp, Artificial sequence
  SiRNA target sequence
attttagtgaatgctaatttcgtt

SEQ ID NO: 59271 - DNA, 24 bp, Artificial sequence
  SiRNA target sequence
ttttagtgaatgctaatttcgtta

SEQ ID NO: 59272 - DNA, 24 bp, Artificial sequence
  SiRNA target sequence
tttagtgaatgctaatttcgttat

SEQ ID NO: 59273 - DNA, 24 bp, Artificial sequence
  SiRNA target sequence
ttagtgaatgctaatttcgttatt

SEQ ID NO: 59274 - DNA, 24 bp, Artificial sequence
  SiRNA target sequence
tagtgaatgctaatttcgttatta

SEQ ID NO: 59275 - DNA, 24 bp, Artificial sequence
  SiRNA target sequence
agtgaatgctaatttcgttattaa

SEQ ID NO: 59276 - DNA, 24 bp, Artificial sequence
  SiRNA target sequence
gtgaatgctaatttcgttattaat

SEQ ID NO: 59277 - DNA, 24 bp, Artificial sequence
  SiRNA target sequence
tgaatgctaatttcgttattaata

SEQ ID NO: 59278 - DNA, 24 bp, Artificial sequence
  SiRNA target sequence
gaatgctaatttcgttattaataa

SEQ ID NO: 59279 - DNA, 24 bp, Artificial sequence
  SiRNA target sequence
aatgctaatttcgttattaataaa

SEQ ID NO: 59280 - DNA, 24 bp, Artificial sequence
  SiRNA target sequence
atgctaatttcgttattaataaag

SEQ ID NO: 59281 - DNA, 24 bp, Artificial sequence
  SiRNA target sequence
tgctaatttcgttattaataaagg

SEQ ID NO: 59282 - DNA, 24 bp, Artificial sequence
  SiRNA target sequence
gctaatttcgttattaataaaggg

SEQ ID NO: 59283 - DNA, 24 bp, Artificial sequence
  SiRNA target sequence
ctaatttcgttattaataaagggg

SEQ ID NO: 59284 - DNA, 24 bp, Artificial sequence
  SiRNA target sequence
taatttcgttattaataaagggga

SEQ ID NO: 59285 - DNA, 24 bp, Artificial sequence
  SiRNA target sequence
aatttcgttattaataaaggggag

SEQ ID NO: 59286 - DNA, 24 bp, Artificial sequence
  SiRNA target sequence
atttcgttattaataaaggggagc

SEQ ID NO: 59287 - DNA, 24 bp, Artificial sequence
  SiRNA target sequence
tttcgttattaataaaggggagcg

SEQ ID NO: 59288 - DNA, 24 bp, Artificial sequence
  SiRNA target sequence
ttcgttattaataaaggggagcgt

SEQ ID NO: 59289 - DNA, 24 bp, Artificial sequence
  SiRNA target sequence
tcgttattaataaaggggagcgtg

SEQ ID NO: 59290 - DNA, 24 bp, Artificial sequence
  SiRNA target sequence
cgttattaataaaggggagcgtgt

SEQ ID NO: 59291 - DNA, 24 bp, Artificial sequence
  SiRNA target sequence
gttattaataaaggggagcgtgtt

SEQ ID NO: 59292 - DNA, 24 bp, Artificial sequence
  SiRNA target sequence
ttattaataaaggggagcgtgttg

SEQ ID NO: 59293 - DNA, 24 bp, Artificial sequence
  SiRNA target sequence
tattaataaaggggagcgtgttgc

SEQ ID NO: 59294 - DNA, 24 bp, Artificial sequence
  SiRNA target sequence
attaataaaggggagcgtgttgct

SEQ ID NO: 59295 - DNA, 24 bp, Artificial sequence
  SiRNA target sequence
ttaataaaggggagcgtgttgcta

SEQ ID NO: 59296 - DNA, 24 bp, Artificial sequence
  SiRNA target sequence
taataaaggggagcgtgttgctat

SEQ ID NO: 59297 - DNA, 24 bp, Artificial sequence
  SiRNA target sequence
aataaaggggagcgtgttgctatt

SEQ ID NO: 59298 - DNA, 24 bp, Artificial sequence
  SiRNA target sequence
ataaaggggagcgtgttgctatta

SEQ ID NO: 59299 - DNA, 24 bp, Artificial sequence
  SiRNA target sequence
taaaggggagcgtgttgctattat

SEQ ID NO: 59300 - DNA, 24 bp, Artificial sequence
  SiRNA target sequence
aaaggggagcgtgttgctattata

SEQ ID NO: 59301 - DNA, 24 bp, Artificial sequence
  SiRNA target sequence
aaggggagcgtgttgctattatag

SEQ ID NO: 59302 - DNA, 24 bp, Artificial sequence
  SiRNA target sequence
aggggagcgtgttgctattatagg

SEQ ID NO: 59303 - DNA, 24 bp, Artificial sequence
  SiRNA target sequence
ggggagcgtgttgctattatagga

SEQ ID NO: 59304 - DNA, 24 bp, Artificial sequence
  SiRNA target sequence
gggagcgtgttgctattataggaa

SEQ ID NO: 59305 - DNA, 24 bp, Artificial sequence
  SiRNA target sequence
ggagcgtgttgctattataggaaa

SEQ ID NO: 59306 - DNA, 24 bp, Artificial sequence
  SiRNA target sequence
gagcgtgttgctattataggaaaa

SEQ ID NO: 59307 - DNA, 24 bp, Artificial sequence
  SiRNA target sequence
agcgtgttgctattataggaaaaa

SEQ ID NO: 59308 - DNA, 24 bp, Artificial sequence
  SiRNA target sequence
gcgtgttgctattataggaaaaaa

SEQ ID NO: 59309 - DNA, 24 bp, Artificial sequence
  SiRNA target sequence
cgtgttgctattataggaaaaaat

SEQ ID NO: 59310 - DNA, 24 bp, Artificial sequence
  SiRNA target sequence
gtgttgctattataggaaaaaatg

SEQ ID NO: 59311 - DNA, 24 bp, Artificial sequence
  SiRNA target sequence
tgttgctattataggaaaaaatgg

SEQ ID NO: 59312 - DNA, 24 bp, Artificial sequence
  SiRNA target sequence
gttgctattataggaaaaaatgga

SEQ ID NO: 59313 - DNA, 24 bp, Artificial sequence
  SiRNA target sequence
ttgctattataggaaaaaatggaa

SEQ ID NO: 59314 - DNA, 24 bp, Artificial sequence
  SiRNA target sequence
tgctattataggaaaaaatggaac

SEQ ID NO: 59315 - DNA, 24 bp, Artificial sequence
  SiRNA target sequence
gctattataggaaaaaatggaaca

SEQ ID NO: 59316 - DNA, 24 bp, Artificial sequence
  SiRNA target sequence
ctattataggaaaaaatggaacag

SEQ ID NO: 59317 - DNA, 24 bp, Artificial sequence
  SiRNA target sequence
tattataggaaaaaatggaacagg

SEQ ID NO: 59318 - DNA, 24 bp, Artificial sequence
  SiRNA target sequence
attataggaaaaaatggaacaggt

SEQ ID NO: 59319 - DNA, 24 bp, Artificial sequence
  SiRNA target sequence
ttataggaaaaaatggaacaggta

SEQ ID NO: 59320 - DNA, 24 bp, Artificial sequence
  SiRNA target sequence
tataggaaaaaatggaacaggtaa

SEQ ID NO: 59321 - DNA, 24 bp, Artificial sequence
  SiRNA target sequence
ataggaaaaaatggaacaggtaaa

SEQ ID NO: 59322 - DNA, 24 bp, Artificial sequence
  SiRNA target sequence
taggaaaaaatggaacaggtaaaa

SEQ ID NO: 59323 - DNA, 24 bp, Artificial sequence
  SiRNA target sequence
aggaaaaaatggaacaggtaaaag

SEQ ID NO: 59324 - DNA, 24 bp, Artificial sequence
  SiRNA target sequence
ggaaaaaatggaacaggtaaaagt

SEQ ID NO: 59325 - DNA, 24 bp, Artificial sequence
  SiRNA target sequence
gaaaaaatggaacaggtaaaagta

SEQ ID NO: 59326 - DNA, 24 bp, Artificial sequence
  SiRNA target sequence
aaaaaatggaacaggtaaaagtac

SEQ ID NO: 59327 - DNA, 24 bp, Artificial sequence
  SiRNA target sequence
aaaaatggaacaggtaaaagtaca

SEQ ID NO: 59328 - DNA, 24 bp, Artificial sequence
  SiRNA target sequence
aaaatggaacaggtaaaagtacaa

SEQ ID NO: 59329 - DNA, 24 bp, Artificial sequence
  SiRNA target sequence
aaatggaacaggtaaaagtacaat

SEQ ID NO: 59330 - DNA, 24 bp, Artificial sequence
  SiRNA target sequence
aatggaacaggtaaaagtacaata

SEQ ID NO: 59331 - DNA, 24 bp, Artificial sequence
  SiRNA target sequence
atggaacaggtaaaagtacaataa

SEQ ID NO: 59332 - DNA, 24 bp, Artificial sequence
  SiRNA target sequence
tggaacaggtaaaagtacaataat

SEQ ID NO: 59333 - DNA, 24 bp, Artificial sequence
  SiRNA target sequence
ggaacaggtaaaagtacaataata

SEQ ID NO: 59334 - DNA, 24 bp, Artificial sequence
  SiRNA target sequence
gaacaggtaaaagtacaataataa

SEQ ID NO: 59335 - DNA, 24 bp, Artificial sequence
  SiRNA target sequence
aacaggtaaaagtacaataataaa

SEQ ID NO: 59336 - DNA, 24 bp, Artificial sequence
  SiRNA target sequence
acaggtaaaagtacaataataaaa

SEQ ID NO: 59337 - DNA, 24 bp, Artificial sequence
  SiRNA target sequence
caggtaaaagtacaataataaaat

SEQ ID NO: 59338 - DNA, 24 bp, Artificial sequence
  SiRNA target sequence
aggtaaaagtacaataataaaatt

SEQ ID NO: 59339 - DNA, 24 bp, Artificial sequence
  SiRNA target sequence
ggtaaaagtacaataataaaattg

SEQ ID NO: 59340 - DNA, 24 bp, Artificial sequence
  SiRNA target sequence
gtaaaagtacaataataaaattgt

SEQ ID NO: 59341 - DNA, 24 bp, Artificial sequence
  SiRNA target sequence
taaaagtacaataataaaattgtt

SEQ ID NO: 59342 - DNA, 24 bp, Artificial sequence
  SiRNA target sequence
aaaagtacaataataaaattgtta

SEQ ID NO: 59343 - DNA, 24 bp, Artificial sequence
  SiRNA target sequence
aaagtacaataataaaattgttaa

SEQ ID NO: 59344 - DNA, 24 bp, Artificial sequence
  SiRNA target sequence
aagtacaataataaaattgttaat

SEQ ID NO: 59345 - DNA, 24 bp, Artificial sequence
  SiRNA target sequence
agtacaataataaaattgttaatg

SEQ ID NO: 59346 - DNA, 24 bp, Artificial sequence
  SiRNA target sequence
gtacaataataaaattgttaatga

SEQ ID NO: 59347 - DNA, 24 bp, Artificial sequence
  SiRNA target sequence
tacaataataaaattgttaatgaa

SEQ ID NO: 59348 - DNA, 24 bp, Artificial sequence
  SiRNA target sequence
acaataataaaattgttaatgaaa

SEQ ID NO: 59349 - DNA, 24 bp, Artificial sequence
  SiRNA target sequence
caataataaaattgttaatgaaat

SEQ ID NO: 59350 - DNA, 24 bp, Artificial sequence
  SiRNA target sequence
aataataaaattgttaatgaaatt

SEQ ID NO: 59351 - DNA, 24 bp, Artificial sequence
  SiRNA target sequence
ataataaaattgttaatgaaattt

SEQ ID NO: 59352 - DNA, 24 bp, Artificial sequence
  SiRNA target sequence
taataaaattgttaatgaaatttt

SEQ ID NO: 59353 - DNA, 24 bp, Artificial sequence
  SiRNA target sequence
aataaaattgttaatgaaatttta

SEQ ID NO: 59354 - DNA, 24 bp, Artificial sequence
  SiRNA target sequence
ataaaattgttaatgaaattttat

SEQ ID NO: 59355 - DNA, 24 bp, Artificial sequence
  SiRNA target sequence
taaaattgttaatgaaattttata

SEQ ID NO: 59356 - DNA, 24 bp, Artificial sequence
  SiRNA target sequence
aaaattgttaatgaaattttataa

SEQ ID NO: 59357 - DNA, 24 bp, Artificial sequence
  SiRNA target sequence
aaattgttaatgaaattttataaa

SEQ ID NO: 59358 - DNA, 24 bp, Artificial sequence
  SiRNA target sequence
aattgttaatgaaattttataaat

SEQ ID NO: 59359 - DNA, 24 bp, Artificial sequence
  SiRNA target sequence
attgttaatgaaattttataaata

SEQ ID NO: 59360 - DNA, 24 bp, Artificial sequence
  SiRNA target sequence
ttgttaatgaaattttataaatat

SEQ ID NO: 59361 - DNA, 24 bp, Artificial sequence
  SiRNA target sequence
tgttaatgaaattttataaatatg

SEQ ID NO: 59362 - DNA, 24 bp, Artificial sequence
  SiRNA target sequence
gttaatgaaattttataaatatga

SEQ ID NO: 59363 - DNA, 24 bp, Artificial sequence
  SiRNA target sequence
ttaatgaaattttataaatatgat

SEQ ID NO: 59364 - DNA, 24 bp, Artificial sequence
  SiRNA target sequence
taatgaaattttataaatatgatg

SEQ ID NO: 59365 - DNA, 24 bp, Artificial sequence
  SiRNA target sequence
aatgaaattttataaatatgatgg

SEQ ID NO: 59366 - DNA, 24 bp, Artificial sequence
  SiRNA target sequence
atgaaattttataaatatgatgga

SEQ ID NO: 59367 - DNA, 24 bp, Artificial sequence
  SiRNA target sequence
tgaaattttataaatatgatggag

SEQ ID NO: 59368 - DNA, 24 bp, Artificial sequence
  SiRNA target sequence
gaaattttataaatatgatggaga

SEQ ID NO: 59369 - DNA, 24 bp, Artificial sequence
  SiRNA target sequence
aaattttataaatatgatggagat

SEQ ID NO: 59370 - DNA, 24 bp, Artificial sequence
  SiRNA target sequence
aattttataaatatgatggagata

SEQ ID NO: 59371 - DNA, 24 bp, Artificial sequence
  SiRNA target sequence
attttataaatatgatggagatat

SEQ ID NO: 59372 - DNA, 24 bp, Artificial sequence
  SiRNA target sequence
ttttataaatatgatggagatata

SEQ ID NO: 59373 - DNA, 24 bp, Artificial sequence
  SiRNA target sequence
tttataaatatgatggagatatat

SEQ ID NO: 59374 - DNA, 24 bp, Artificial sequence
  SiRNA target sequence
ttataaatatgatggagatatatt

SEQ ID NO: 59375 - DNA, 24 bp, Artificial sequence
  SiRNA target sequence
tataaatatgatggagatatatta

SEQ ID NO: 59376 - DNA, 24 bp, Artificial sequence
  SiRNA target sequence
ataaatatgatggagatatattaa

SEQ ID NO: 59377 - DNA, 24 bp, Artificial sequence
  SiRNA target sequence
taaatatgatggagatatattaat

SEQ ID NO: 59378 - DNA, 24 bp, Artificial sequence
  SiRNA target sequence
aaatatgatggagatatattaatt

SEQ ID NO: 59379 - DNA, 24 bp, Artificial sequence
  SiRNA target sequence
aatatgatggagatatattaattg

SEQ ID NO: 59380 - DNA, 24 bp, Artificial sequence
  SiRNA target sequence
atatgatggagatatattaattga

SEQ ID NO: 59381 - DNA, 24 bp, Artificial sequence
  SiRNA target sequence
tatgatggagatatattaattgat

SEQ ID NO: 59382 - DNA, 24 bp, Artificial sequence
  SiRNA target sequence
atgatggagatatattaattgatg

SEQ ID NO: 59383 - DNA, 24 bp, Artificial sequence
  SiRNA target sequence
tgatggagatatattaattgatga

SEQ ID NO: 59384 - DNA, 24 bp, Artificial sequence
  SiRNA target sequence
gatggagatatattaattgatgat

SEQ ID NO: 59385 - DNA, 24 bp, Artificial sequence
  SiRNA target sequence
atggagatatattaattgatgata

SEQ ID NO: 59386 - DNA, 24 bp, Artificial sequence
  SiRNA target sequence
tggagatatattaattgatgatac

SEQ ID NO: 59387 - DNA, 24 bp, Artificial sequence
  SiRNA target sequence
ggagatatattaattgatgataca

SEQ ID NO: 59388 - DNA, 24 bp, Artificial sequence
  SiRNA target sequence
gagatatattaattgatgatacag

SEQ ID NO: 59389 - DNA, 24 bp, Artificial sequence
  SiRNA target sequence
agatatattaattgatgatacaga

SEQ ID NO: 59390 - DNA, 24 bp, Artificial sequence
  SiRNA target sequence
gatatattaattgatgatacagaa

SEQ ID NO: 59391 - DNA, 24 bp, Artificial sequence
  SiRNA target sequence
atatattaattgatgatacagaaa

SEQ ID NO: 59392 - DNA, 24 bp, Artificial sequence
  SiRNA target sequence
tatattaattgatgatacagaaat

SEQ ID NO: 59393 - DNA, 24 bp, Artificial sequence
  SiRNA target sequence
atattaattgatgatacagaaata

SEQ ID NO: 59394 - DNA, 24 bp, Artificial sequence
  SiRNA target sequence
tattaattgatgatacagaaatag

SEQ ID NO: 59395 - DNA, 24 bp, Artificial sequence
  SiRNA target sequence
attaattgatgatacagaaataga

SEQ ID NO: 59396 - DNA, 24 bp, Artificial sequence
  SiRNA target sequence
ttaattgatgatacagaaatagat

SEQ ID NO: 59397 - DNA, 24 bp, Artificial sequence
  SiRNA target sequence
taattgatgatacagaaatagata

SEQ ID NO: 59398 - DNA, 24 bp, Artificial sequence
  SiRNA target sequence
aattgatgatacagaaatagataa

SEQ ID NO: 59399 - DNA, 24 bp, Artificial sequence
  SiRNA target sequence
attgatgatacagaaatagataat

SEQ ID NO: 59400 - DNA, 24 bp, Artificial sequence
  SiRNA target sequence
ttgatgatacagaaatagataata

SEQ ID NO: 59401 - DNA, 24 bp, Artificial sequence
  SiRNA target sequence
tgatgatacagaaatagataatat

SEQ ID NO: 59402 - DNA, 24 bp, Artificial sequence
  SiRNA target sequence
gatgatacagaaatagataatatt

SEQ ID NO: 59403 - DNA, 24 bp, Artificial sequence
  SiRNA target sequence
atgatacagaaatagataatattt

SEQ ID NO: 59404 - DNA, 24 bp, Artificial sequence
  SiRNA target sequence
tgatacagaaatagataatatttc

SEQ ID NO: 59405 - DNA, 24 bp, Artificial sequence
  SiRNA target sequence
gatacagaaatagataatatttcg

SEQ ID NO: 59406 - DNA, 24 bp, Artificial sequence
  SiRNA target sequence
atacagaaatagataatatttcgg

SEQ ID NO: 59407 - DNA, 24 bp, Artificial sequence
  SiRNA target sequence
tacagaaatagataatatttcgga

SEQ ID NO: 59408 - DNA, 24 bp, Artificial sequence
  SiRNA target sequence
acagaaatagataatatttcggat

SEQ ID NO: 59409 - DNA, 24 bp, Artificial sequence
  SiRNA target sequence
cagaaatagataatatttcggata

SEQ ID NO: 59410 - DNA, 24 bp, Artificial sequence
  SiRNA target sequence
agaaatagataatatttcggatag

SEQ ID NO: 59411 - DNA, 24 bp, Artificial sequence
  SiRNA target sequence
gaaatagataatatttcggataga

SEQ ID NO: 59412 - DNA, 24 bp, Artificial sequence
  SiRNA target sequence
aaatagataatatttcggatagaa

SEQ ID NO: 59413 - DNA, 24 bp, Artificial sequence
  SiRNA target sequence
aatagataatatttcggatagaag

SEQ ID NO: 59414 - DNA, 24 bp, Artificial sequence
  SiRNA target sequence
atagataatatttcggatagaagt

SEQ ID NO: 59415 - DNA, 24 bp, Artificial sequence
  SiRNA target sequence
tagataatatttcggatagaagtt

SEQ ID NO: 59416 - DNA, 24 bp, Artificial sequence
  SiRNA target sequence
agataatatttcggatagaagtta

SEQ ID NO: 59417 - DNA, 24 bp, Artificial sequence
  SiRNA target sequence
gataatatttcggatagaagttac

SEQ ID NO: 59418 - DNA, 24 bp, Artificial sequence
  SiRNA target sequence
ataatatttcggatagaagttaca

SEQ ID NO: 59419 - DNA, 24 bp, Artificial sequence
  SiRNA target sequence
taatatttcggatagaagttacag

SEQ ID NO: 59420 - DNA, 24 bp, Artificial sequence
  SiRNA target sequence
aatatttcggatagaagttacaga

SEQ ID NO: 59421 - DNA, 24 bp, Artificial sequence
  SiRNA target sequence
atatttcggatagaagttacagaa

SEQ ID NO: 59422 - DNA, 24 bp, Artificial sequence
  SiRNA target sequence
tatttcggatagaagttacagaag

SEQ ID NO: 59423 - DNA, 24 bp, Artificial sequence
  SiRNA target sequence
atttcggatagaagttacagaagt

SEQ ID NO: 59424 - DNA, 24 bp, Artificial sequence
  SiRNA target sequence
tttcggatagaagttacagaagtt

SEQ ID NO: 59425 - DNA, 24 bp, Artificial sequence
  SiRNA target sequence
ttcggatagaagttacagaagttt

SEQ ID NO: 59426 - DNA, 24 bp, Artificial sequence
  SiRNA target sequence
tcggatagaagttacagaagttta

SEQ ID NO: 59427 - DNA, 24 bp, Artificial sequence
  SiRNA target sequence
cggatagaagttacagaagtttaa

SEQ ID NO: 59428 - DNA, 24 bp, Artificial sequence
  SiRNA target sequence
ggatagaagttacagaagtttaat

SEQ ID NO: 59429 - DNA, 24 bp, Artificial sequence
  SiRNA target sequence
gatagaagttacagaagtttaata

SEQ ID NO: 59430 - DNA, 24 bp, Artificial sequence
  SiRNA target sequence
atagaagttacagaagtttaatat

SEQ ID NO: 59431 - DNA, 24 bp, Artificial sequence
  SiRNA target sequence
tagaagttacagaagtttaatatc

SEQ ID NO: 59432 - DNA, 24 bp, Artificial sequence
  SiRNA target sequence
agaagttacagaagtttaatatca

SEQ ID NO: 59433 - DNA, 24 bp, Artificial sequence
  SiRNA target sequence
gaagttacagaagtttaatatcat

SEQ ID NO: 59434 - DNA, 24 bp, Artificial sequence
  SiRNA target sequence
aagttacagaagtttaatatcata

SEQ ID NO: 59435 - DNA, 24 bp, Artificial sequence
  SiRNA target sequence
agttacagaagtttaatatcatat

SEQ ID NO: 59436 - DNA, 24 bp, Artificial sequence
  SiRNA target sequence
gttacagaagtttaatatcatatg

SEQ ID NO: 59437 - DNA, 24 bp, Artificial sequence
  SiRNA target sequence
ttacagaagtttaatatcatatgc

SEQ ID NO: 59438 - DNA, 24 bp, Artificial sequence
  SiRNA target sequence
tacagaagtttaatatcatatgca

SEQ ID NO: 59439 - DNA, 24 bp, Artificial sequence
  SiRNA target sequence
acagaagtttaatatcatatgcaa

SEQ ID NO: 59440 - DNA, 24 bp, Artificial sequence
  SiRNA target sequence
cagaagtttaatatcatatgcaac

SEQ ID NO: 59441 - DNA, 24 bp, Artificial sequence
  SiRNA target sequence
agaagtttaatatcatatgcaaca

SEQ ID NO: 59442 - DNA, 24 bp, Artificial sequence
  SiRNA target sequence
gaagtttaatatcatatgcaacac

SEQ ID NO: 59443 - DNA, 24 bp, Artificial sequence
  SiRNA target sequence
aagtttaatatcatatgcaacaca

SEQ ID NO: 59444 - DNA, 24 bp, Artificial sequence
  SiRNA target sequence
agtttaatatcatatgcaacacaa

SEQ ID NO: 59445 - DNA, 24 bp, Artificial sequence
  SiRNA target sequence
gtttaatatcatatgcaacacaaa

SEQ ID NO: 59446 - DNA, 24 bp, Artificial sequence
  SiRNA target sequence
tttaatatcatatgcaacacaaaa

SEQ ID NO: 59447 - DNA, 24 bp, Artificial sequence
  SiRNA target sequence
ttaatatcatatgcaacacaaaac

SEQ ID NO: 59448 - DNA, 24 bp, Artificial sequence
  SiRNA target sequence
taatatcatatgcaacacaaaaca

SEQ ID NO: 59449 - DNA, 24 bp, Artificial sequence
  SiRNA target sequence
aatatcatatgcaacacaaaacac

SEQ ID NO: 59450 - DNA, 24 bp, Artificial sequence
  SiRNA target sequence
atatcatatgcaacacaaaacacg

SEQ ID NO: 59451 - DNA, 24 bp, Artificial sequence
  SiRNA target sequence
tatcatatgcaacacaaaacacgt

SEQ ID NO: 59452 - DNA, 24 bp, Artificial sequence
  SiRNA target sequence
atcatatgcaacacaaaacacgtt

SEQ ID NO: 59453 - DNA, 24 bp, Artificial sequence
  SiRNA target sequence
tcatatgcaacacaaaacacgttc

SEQ ID NO: 59454 - DNA, 24 bp, Artificial sequence
  SiRNA target sequence
catatgcaacacaaaacacgttct

SEQ ID NO: 59455 - DNA, 24 bp, Artificial sequence
  SiRNA target sequence
atatgcaacacaaaacacgttctt

SEQ ID NO: 59456 - DNA, 24 bp, Artificial sequence
  SiRNA target sequence
tatgcaacacaaaacacgttctta

SEQ ID NO: 59457 - DNA, 24 bp, Artificial sequence
  SiRNA target sequence
atgcaacacaaaacacgttcttat

SEQ ID NO: 59458 - DNA, 24 bp, Artificial sequence
  SiRNA target sequence
tgcaacacaaaacacgttcttatt

SEQ ID NO: 59459 - DNA, 24 bp, Artificial sequence
  SiRNA target sequence
gcaacacaaaacacgttcttattc

SEQ ID NO: 59460 - DNA, 24 bp, Artificial sequence
  SiRNA target sequence
caacacaaaacacgttcttattcg

SEQ ID NO: 59461 - DNA, 24 bp, Artificial sequence
  SiRNA target sequence
aacacaaaacacgttcttattcga

SEQ ID NO: 59462 - DNA, 24 bp, Artificial sequence
  SiRNA target sequence
acacaaaacacgttcttattcgat

SEQ ID NO: 59463 - DNA, 24 bp, Artificial sequence
  SiRNA target sequence
cacaaaacacgttcttattcgata

SEQ ID NO: 59464 - DNA, 24 bp, Artificial sequence
  SiRNA target sequence
acaaaacacgttcttattcgataa

SEQ ID NO: 59465 - DNA, 24 bp, Artificial sequence
  SiRNA target sequence
caaaacacgttcttattcgataat

SEQ ID NO: 59466 - DNA, 24 bp, Artificial sequence
  SiRNA target sequence
aaaacacgttcttattcgataata

SEQ ID NO: 59467 - DNA, 24 bp, Artificial sequence
  SiRNA target sequence
aaacacgttcttattcgataatac

SEQ ID NO: 59468 - DNA, 24 bp, Artificial sequence
  SiRNA target sequence
aacacgttcttattcgataatact

SEQ ID NO: 59469 - DNA, 24 bp, Artificial sequence
  SiRNA target sequence
acacgttcttattcgataatactg

SEQ ID NO: 59470 - DNA, 24 bp, Artificial sequence
  SiRNA target sequence
cacgttcttattcgataatactgt

SEQ ID NO: 59471 - DNA, 24 bp, Artificial sequence
  SiRNA target sequence
acgttcttattcgataatactgtg

SEQ ID NO: 59472 - DNA, 24 bp, Artificial sequence
  SiRNA target sequence
cgttcttattcgataatactgtga

SEQ ID NO: 59473 - DNA, 24 bp, Artificial sequence
  SiRNA target sequence
gttcttattcgataatactgtgac

SEQ ID NO: 59474 - DNA, 24 bp, Artificial sequence
  SiRNA target sequence
ttcttattcgataatactgtgaca

SEQ ID NO: 59475 - DNA, 24 bp, Artificial sequence
  SiRNA target sequence
tcttattcgataatactgtgacat

SEQ ID NO: 59476 - DNA, 24 bp, Artificial sequence
  SiRNA target sequence
cttattcgataatactgtgacata

SEQ ID NO: 59477 - DNA, 24 bp, Artificial sequence
  SiRNA target sequence
ttattcgataatactgtgacatac

SEQ ID NO: 59478 - DNA, 24 bp, Artificial sequence
  SiRNA target sequence
tattcgataatactgtgacataca

SEQ ID NO: 59479 - DNA, 24 bp, Artificial sequence
  SiRNA target sequence
attcgataatactgtgacatacaa

SEQ ID NO: 59480 - DNA, 24 bp, Artificial sequence
  SiRNA target sequence
ttcgataatactgtgacatacaat

SEQ ID NO: 59481 - DNA, 24 bp, Artificial sequence
  SiRNA target sequence
tcgataatactgtgacatacaata

SEQ ID NO: 59482 - DNA, 24 bp, Artificial sequence
  SiRNA target sequence
cgataatactgtgacatacaatat

SEQ ID NO: 59483 - DNA, 24 bp, Artificial sequence
  SiRNA target sequence
gataatactgtgacatacaatata

SEQ ID NO: 59484 - DNA, 24 bp, Artificial sequence
  SiRNA target sequence
ataatactgtgacatacaatatat

SEQ ID NO: 59485 - DNA, 24 bp, Artificial sequence
  SiRNA target sequence
taatactgtgacatacaatatatt

SEQ ID NO: 59486 - DNA, 24 bp, Artificial sequence
  SiRNA target sequence
aatactgtgacatacaatatattt

SEQ ID NO: 59487 - DNA, 24 bp, Artificial sequence
  SiRNA target sequence
atactgtgacatacaatatatttt

SEQ ID NO: 59488 - DNA, 24 bp, Artificial sequence
  SiRNA target sequence
tactgtgacatacaatatatttta

SEQ ID NO: 59489 - DNA, 24 bp, Artificial sequence
  SiRNA target sequence
actgtgacatacaatatattttac

SEQ ID NO: 59490 - DNA, 24 bp, Artificial sequence
  SiRNA target sequence
ctgtgacatacaatatattttacg

SEQ ID NO: 59491 - DNA, 24 bp, Artificial sequence
  SiRNA target sequence
tgtgacatacaatatattttacgg

SEQ ID NO: 59492 - DNA, 24 bp, Artificial sequence
  SiRNA target sequence
gtgacatacaatatattttacggg

SEQ ID NO: 59493 - DNA, 24 bp, Artificial sequence
  SiRNA target sequence
tgacatacaatatattttacggga

SEQ ID NO: 59494 - DNA, 24 bp, Artificial sequence
  SiRNA target sequence
gacatacaatatattttacgggac

SEQ ID NO: 59495 - DNA, 24 bp, Artificial sequence
  SiRNA target sequence
acatacaatatattttacgggact

SEQ ID NO: 59496 - DNA, 24 bp, Artificial sequence
  SiRNA target sequence
catacaatatattttacgggacta

SEQ ID NO: 59497 - DNA, 24 bp, Artificial sequence
  SiRNA target sequence
atacaatatattttacgggactaa

SEQ ID NO: 59498 - DNA, 24 bp, Artificial sequence
  SiRNA target sequence
tacaatatattttacgggactaaa

SEQ ID NO: 59499 - DNA, 24 bp, Artificial sequence
  SiRNA target sequence
acaatatattttacgggactaaaa

SEQ ID NO: 59500 - DNA, 24 bp, Artificial sequence
  SiRNA target sequence
caatatattttacgggactaaaaa

SEQ ID NO: 59501 - DNA, 24 bp, Artificial sequence
  SiRNA target sequence
aatatattttacgggactaaaaac

SEQ ID NO: 59502 - DNA, 24 bp, Artificial sequence
  SiRNA target sequence
atatattttacgggactaaaaacg

SEQ ID NO: 59503 - DNA, 24 bp, Artificial sequence
  SiRNA target sequence
tatattttacgggactaaaaacgt

SEQ ID NO: 59504 - DNA, 24 bp, Artificial sequence
  SiRNA target sequence
atattttacgggactaaaaacgta

SEQ ID NO: 59505 - DNA, 24 bp, Artificial sequence
  SiRNA target sequence
tattttacgggactaaaaacgtaa

SEQ ID NO: 59506 - DNA, 24 bp, Artificial sequence
  SiRNA target sequence
attttacgggactaaaaacgtaac

SEQ ID NO: 59507 - DNA, 24 bp, Artificial sequence
  SiRNA target sequence
ttttacgggactaaaaacgtaaca

SEQ ID NO: 59508 - DNA, 24 bp, Artificial sequence
  SiRNA target sequence
tttacgggactaaaaacgtaacag

SEQ ID NO: 59509 - DNA, 24 bp, Artificial sequence
  SiRNA target sequence
ttacgggactaaaaacgtaacaga

SEQ ID NO: 59510 - DNA, 24 bp, Artificial sequence
  SiRNA target sequence
tacgggactaaaaacgtaacagaa

SEQ ID NO: 59511 - DNA, 24 bp, Artificial sequence
  SiRNA target sequence
acgggactaaaaacgtaacagaaa

SEQ ID NO: 59512 - DNA, 24 bp, Artificial sequence
  SiRNA target sequence
cgggactaaaaacgtaacagaaaa

SEQ ID NO: 59513 - DNA, 24 bp, Artificial sequence
  SiRNA target sequence
gggactaaaaacgtaacagaaaaa

SEQ ID NO: 59514 - DNA, 24 bp, Artificial sequence
  SiRNA target sequence
ggactaaaaacgtaacagaaaaag

SEQ ID NO: 59515 - DNA, 24 bp, Artificial sequence
  SiRNA target sequence
gactaaaaacgtaacagaaaaaga

SEQ ID NO: 59516 - DNA, 24 bp, Artificial sequence
  SiRNA target sequence
actaaaaacgtaacagaaaaagaa

SEQ ID NO: 59517 - DNA, 24 bp, Artificial sequence
  SiRNA target sequence
ctaaaaacgtaacagaaaaagaag

SEQ ID NO: 59518 - DNA, 24 bp, Artificial sequence
  SiRNA target sequence
taaaaacgtaacagaaaaagaagt

SEQ ID NO: 59519 - DNA, 24 bp, Artificial sequence
  SiRNA target sequence
aaaaacgtaacagaaaaagaagtt

SEQ ID NO: 59520 - DNA, 24 bp, Artificial sequence
  SiRNA target sequence
aaaacgtaacagaaaaagaagttt

SEQ ID NO: 59521 - DNA, 24 bp, Artificial sequence
  SiRNA target sequence
aaacgtaacagaaaaagaagtttt

SEQ ID NO: 59522 - DNA, 24 bp, Artificial sequence
  SiRNA target sequence
aacgtaacagaaaaagaagtttta

SEQ ID NO: 59523 - DNA, 24 bp, Artificial sequence
  SiRNA target sequence
acgtaacagaaaaagaagttttag

SEQ ID NO: 59524 - DNA, 24 bp, Artificial sequence
  SiRNA target sequence
cgtaacagaaaaagaagttttaga

SEQ ID NO: 59525 - DNA, 24 bp, Artificial sequence
  SiRNA target sequence
gtaacagaaaaagaagttttagaa

SEQ ID NO: 59526 - DNA, 24 bp, Artificial sequence
  SiRNA target sequence
taacagaaaaagaagttttagaat

SEQ ID NO: 59527 - DNA, 24 bp, Artificial sequence
  SiRNA target sequence
aacagaaaaagaagttttagaatt

SEQ ID NO: 59528 - DNA, 24 bp, Artificial sequence
  SiRNA target sequence
acagaaaaagaagttttagaatta

SEQ ID NO: 59529 - DNA, 24 bp, Artificial sequence
  SiRNA target sequence
cagaaaaagaagttttagaattag

SEQ ID NO: 59530 - DNA, 24 bp, Artificial sequence
  SiRNA target sequence
agaaaaagaagttttagaattagc

SEQ ID NO: 59531 - DNA, 24 bp, Artificial sequence
  SiRNA target sequence
gaaaaagaagttttagaattagcc

SEQ ID NO: 59532 - DNA, 24 bp, Artificial sequence
  SiRNA target sequence
aaaaagaagttttagaattagcca

SEQ ID NO: 59533 - DNA, 24 bp, Artificial sequence
  SiRNA target sequence
aaaagaagttttagaattagccaa

SEQ ID NO: 59534 - DNA, 24 bp, Artificial sequence
  SiRNA target sequence
aaagaagttttagaattagccaaa

SEQ ID NO: 59535 - DNA, 24 bp, Artificial sequence
  SiRNA target sequence
aagaagttttagaattagccaaaa

SEQ ID NO: 59536 - DNA, 24 bp, Artificial sequence
  SiRNA target sequence
agaagttttagaattagccaaaaa

SEQ ID NO: 59537 - DNA, 24 bp, Artificial sequence
  SiRNA target sequence
gaagttttagaattagccaaaaaa

SEQ ID NO: 59538 - DNA, 24 bp, Artificial sequence
  SiRNA target sequence
aagttttagaattagccaaaaaaa

SEQ ID NO: 59539 - DNA, 24 bp, Artificial sequence
  SiRNA target sequence
agttttagaattagccaaaaaaat

SEQ ID NO: 59540 - DNA, 24 bp, Artificial sequence
  SiRNA target sequence
gttttagaattagccaaaaaaata

SEQ ID NO: 59541 - DNA, 24 bp, Artificial sequence
  SiRNA target sequence
ttttagaattagccaaaaaaatag

SEQ ID NO: 59542 - DNA, 24 bp, Artificial sequence
  SiRNA target sequence
tttagaattagccaaaaaaatagg

SEQ ID NO: 59543 - DNA, 24 bp, Artificial sequence
  SiRNA target sequence
ttagaattagccaaaaaaataggt

SEQ ID NO: 59544 - DNA, 24 bp, Artificial sequence
  SiRNA target sequence
tagaattagccaaaaaaataggtg

SEQ ID NO: 59545 - DNA, 24 bp, Artificial sequence
  SiRNA target sequence
agaattagccaaaaaaataggtgt

SEQ ID NO: 59546 - DNA, 24 bp, Artificial sequence
  SiRNA target sequence
gaattagccaaaaaaataggtgta

SEQ ID NO: 59547 - DNA, 24 bp, Artificial sequence
  SiRNA target sequence
aattagccaaaaaaataggtgtat

SEQ ID NO: 59548 - DNA, 24 bp, Artificial sequence
  SiRNA target sequence
attagccaaaaaaataggtgtatt

SEQ ID NO: 59549 - DNA, 24 bp, Artificial sequence
  SiRNA target sequence
ttagccaaaaaaataggtgtatta

SEQ ID NO: 59550 - DNA, 24 bp, Artificial sequence
  SiRNA target sequence
tagccaaaaaaataggtgtattag

SEQ ID NO: 59551 - DNA, 24 bp, Artificial sequence
  SiRNA target sequence
agccaaaaaaataggtgtattaga

SEQ ID NO: 59552 - DNA, 24 bp, Artificial sequence
  SiRNA target sequence
gccaaaaaaataggtgtattagag

SEQ ID NO: 59553 - DNA, 24 bp, Artificial sequence
  SiRNA target sequence
ccaaaaaaataggtgtattagagt

SEQ ID NO: 59554 - DNA, 24 bp, Artificial sequence
  SiRNA target sequence
caaaaaaataggtgtattagagtc

SEQ ID NO: 59555 - DNA, 24 bp, Artificial sequence
  SiRNA target sequence
aaaaaaataggtgtattagagtct

SEQ ID NO: 59556 - DNA, 24 bp, Artificial sequence
  SiRNA target sequence
aaaaaataggtgtattagagtcta

SEQ ID NO: 59557 - DNA, 24 bp, Artificial sequence
  SiRNA target sequence
aaaaataggtgtattagagtctat

SEQ ID NO: 59558 - DNA, 24 bp, Artificial sequence
  SiRNA target sequence
aaaataggtgtattagagtctata

SEQ ID NO: 59559 - DNA, 24 bp, Artificial sequence
  SiRNA target sequence
aaataggtgtattagagtctatac

SEQ ID NO: 59560 - DNA, 24 bp, Artificial sequence
  SiRNA target sequence
aataggtgtattagagtctataca

SEQ ID NO: 59561 - DNA, 24 bp, Artificial sequence
  SiRNA target sequence
ataggtgtattagagtctatacag

SEQ ID NO: 59562 - DNA, 24 bp, Artificial sequence
  SiRNA target sequence
taggtgtattagagtctatacagg

SEQ ID NO: 59563 - DNA, 24 bp, Artificial sequence
  SiRNA target sequence
aggtgtattagagtctatacagga

SEQ ID NO: 59564 - DNA, 24 bp, Artificial sequence
  SiRNA target sequence
ggtgtattagagtctatacaggaa

SEQ ID NO: 59565 - DNA, 24 bp, Artificial sequence
  SiRNA target sequence
gtgtattagagtctatacaggaat

SEQ ID NO: 59566 - DNA, 24 bp, Artificial sequence
  SiRNA target sequence
tgtattagagtctatacaggaatt

SEQ ID NO: 59567 - DNA, 24 bp, Artificial sequence
  SiRNA target sequence
gtattagagtctatacaggaattt

SEQ ID NO: 59568 - DNA, 24 bp, Artificial sequence
  SiRNA target sequence
tattagagtctatacaggaattta

SEQ ID NO: 59569 - DNA, 24 bp, Artificial sequence
  SiRNA target sequence
attagagtctatacaggaatttaa

SEQ ID NO: 59570 - DNA, 24 bp, Artificial sequence
  SiRNA target sequence
ttagagtctatacaggaatttaaa

SEQ ID NO: 59571 - DNA, 24 bp, Artificial sequence
  SiRNA target sequence
tagagtctatacaggaatttaaag

SEQ ID NO: 59572 - DNA, 24 bp, Artificial sequence
  SiRNA target sequence
agagtctatacaggaatttaaaga

SEQ ID NO: 59573 - DNA, 24 bp, Artificial sequence
  SiRNA target sequence
gagtctatacaggaatttaaagat

SEQ ID NO: 59574 - DNA, 24 bp, Artificial sequence
  SiRNA target sequence
agtctatacaggaatttaaagatg

SEQ ID NO: 59575 - DNA, 24 bp, Artificial sequence
  SiRNA target sequence
gtctatacaggaatttaaagatgg

SEQ ID NO: 59576 - DNA, 24 bp, Artificial sequence
  SiRNA target sequence
tctatacaggaatttaaagatggg

SEQ ID NO: 59577 - DNA, 24 bp, Artificial sequence
  SiRNA target sequence
ctatacaggaatttaaagatgggt

SEQ ID NO: 59578 - DNA, 24 bp, Artificial sequence
  SiRNA target sequence
tatacaggaatttaaagatgggtt

SEQ ID NO: 59579 - DNA, 24 bp, Artificial sequence
  SiRNA target sequence
atacaggaatttaaagatgggttt

SEQ ID NO: 59580 - DNA, 24 bp, Artificial sequence
  SiRNA target sequence
tacaggaatttaaagatgggttta

SEQ ID NO: 59581 - DNA, 24 bp, Artificial sequence
  SiRNA target sequence
acaggaatttaaagatgggtttag

SEQ ID NO: 59582 - DNA, 24 bp, Artificial sequence
  SiRNA target sequence
caggaatttaaagatgggtttagc

SEQ ID NO: 59583 - DNA, 24 bp, Artificial sequence
  SiRNA target sequence
aggaatttaaagatgggtttagca

SEQ ID NO: 59584 - DNA, 24 bp, Artificial sequence
  SiRNA target sequence
ggaatttaaagatgggtttagcac

SEQ ID NO: 59585 - DNA, 24 bp, Artificial sequence
  SiRNA target sequence
gaatttaaagatgggtttagcaca

SEQ ID NO: 59586 - DNA, 24 bp, Artificial sequence
  SiRNA target sequence
aatttaaagatgggtttagcacat

SEQ ID NO: 59587 - DNA, 24 bp, Artificial sequence
  SiRNA target sequence
atttaaagatgggtttagcacatc

SEQ ID NO: 59588 - DNA, 24 bp, Artificial sequence
  SiRNA target sequence
tttaaagatgggtttagcacatcg

SEQ ID NO: 59589 - DNA, 24 bp, Artificial sequence
  SiRNA target sequence
ttaaagatgggtttagcacatcgg

SEQ ID NO: 59590 - DNA, 24 bp, Artificial sequence
  SiRNA target sequence
taaagatgggtttagcacatcggt

SEQ ID NO: 59591 - DNA, 24 bp, Artificial sequence
  SiRNA target sequence
aaagatgggtttagcacatcggtc

SEQ ID NO: 59592 - DNA, 24 bp, Artificial sequence
  SiRNA target sequence
aagatgggtttagcacatcggtcg

SEQ ID NO: 59593 - DNA, 24 bp, Artificial sequence
  SiRNA target sequence
agatgggtttagcacatcggtcgg

SEQ ID NO: 59594 - DNA, 24 bp, Artificial sequence
  SiRNA target sequence
gatgggtttagcacatcggtcggt

SEQ ID NO: 59595 - DNA, 24 bp, Artificial sequence
  SiRNA target sequence
atgggtttagcacatcggtcggtg

SEQ ID NO: 59596 - DNA, 24 bp, Artificial sequence
  SiRNA target sequence
tgggtttagcacatcggtcggtga

SEQ ID NO: 59597 - DNA, 24 bp, Artificial sequence
  SiRNA target sequence
gggtttagcacatcggtcggtgaa

SEQ ID NO: 59598 - DNA, 24 bp, Artificial sequence
  SiRNA target sequence
ggtttagcacatcggtcggtgaac

SEQ ID NO: 59599 - DNA, 24 bp, Artificial sequence
  SiRNA target sequence
gtttagcacatcggtcggtgaacg

SEQ ID NO: 59600 - DNA, 24 bp, Artificial sequence
  SiRNA target sequence
tttagcacatcggtcggtgaacgc

SEQ ID NO: 59601 - DNA, 24 bp, Artificial sequence
  SiRNA target sequence
ttagcacatcggtcggtgaacgcg

SEQ ID NO: 59602 - DNA, 24 bp, Artificial sequence
  SiRNA target sequence
tagcacatcggtcggtgaacgcgg

SEQ ID NO: 59603 - DNA, 24 bp, Artificial sequence
  SiRNA target sequence
agcacatcggtcggtgaacgcgga

SEQ ID NO: 59604 - DNA, 24 bp, Artificial sequence
  SiRNA target sequence
gcacatcggtcggtgaacgcggaa

SEQ ID NO: 59605 - DNA, 24 bp, Artificial sequence
  SiRNA target sequence
cacatcggtcggtgaacgcggaag

SEQ ID NO: 59606 - DNA, 24 bp, Artificial sequence
  SiRNA target sequence
acatcggtcggtgaacgcggaaga

SEQ ID NO: 59607 - DNA, 24 bp, Artificial sequence
  SiRNA target sequence
catcggtcggtgaacgcggaagat

SEQ ID NO: 59608 - DNA, 24 bp, Artificial sequence
  SiRNA target sequence
atcggtcggtgaacgcggaagatt

SEQ ID NO: 59609 - DNA, 24 bp, Artificial sequence
  SiRNA target sequence
tcggtcggtgaacgcggaagattt

SEQ ID NO: 59610 - DNA, 24 bp, Artificial sequence
  SiRNA target sequence
cggtcggtgaacgcggaagatttt

SEQ ID NO: 59611 - DNA, 24 bp, Artificial sequence
  SiRNA target sequence
ggtcggtgaacgcggaagattttt

SEQ ID NO: 59612 - DNA, 24 bp, Artificial sequence
  SiRNA target sequence
gtcggtgaacgcggaagattttta

SEQ ID NO: 59613 - DNA, 24 bp, Artificial sequence
  SiRNA target sequence
tcggtgaacgcggaagatttttat

SEQ ID NO: 59614 - DNA, 24 bp, Artificial sequence
  SiRNA target sequence
cggtgaacgcggaagatttttatc

SEQ ID NO: 59615 - DNA, 24 bp, Artificial sequence
  SiRNA target sequence
ggtgaacgcggaagatttttatct

SEQ ID NO: 59616 - DNA, 24 bp, Artificial sequence
  SiRNA target sequence
gtgaacgcggaagatttttatctg

SEQ ID NO: 59617 - DNA, 24 bp, Artificial sequence
  SiRNA target sequence
tgaacgcggaagatttttatctgg

SEQ ID NO: 59618 - DNA, 24 bp, Artificial sequence
  SiRNA target sequence
gaacgcggaagatttttatctggt

SEQ ID NO: 59619 - DNA, 24 bp, Artificial sequence
  SiRNA target sequence
aacgcggaagatttttatctggtg

SEQ ID NO: 59620 - DNA, 24 bp, Artificial sequence
  SiRNA target sequence
acgcggaagatttttatctggtgg

SEQ ID NO: 59621 - DNA, 24 bp, Artificial sequence
  SiRNA target sequence
cgcggaagatttttatctggtggt

SEQ ID NO: 59622 - DNA, 24 bp, Artificial sequence
  SiRNA target sequence
gcggaagatttttatctggtggtg

SEQ ID NO: 59623 - DNA, 24 bp, Artificial sequence
  SiRNA target sequence
cggaagatttttatctggtggtga

SEQ ID NO: 59624 - DNA, 24 bp, Artificial sequence
  SiRNA target sequence
ggaagatttttatctggtggtgaa

SEQ ID NO: 59625 - DNA, 24 bp, Artificial sequence
  SiRNA target sequence
gaagatttttatctggtggtgaaa

SEQ ID NO: 59626 - DNA, 24 bp, Artificial sequence
  SiRNA target sequence
aagatttttatctggtggtgaaag

SEQ ID NO: 59627 - DNA, 24 bp, Artificial sequence
  SiRNA target sequence
agatttttatctggtggtgaaagg

SEQ ID NO: 59628 - DNA, 24 bp, Artificial sequence
  SiRNA target sequence
gatttttatctggtggtgaaaggc

SEQ ID NO: 59629 - DNA, 24 bp, Artificial sequence
  SiRNA target sequence
atttttatctggtggtgaaaggca

SEQ ID NO: 59630 - DNA, 24 bp, Artificial sequence
  SiRNA target sequence
tttttatctggtggtgaaaggcaa

SEQ ID NO: 59631 - DNA, 24 bp, Artificial sequence
  SiRNA target sequence
ttttatctggtggtgaaaggcaaa

SEQ ID NO: 59632 - DNA, 24 bp, Artificial sequence
  SiRNA target sequence
tttatctggtggtgaaaggcaaaa

SEQ ID NO: 59633 - DNA, 24 bp, Artificial sequence
  SiRNA target sequence
ttatctggtggtgaaaggcaaaaa

SEQ ID NO: 59634 - DNA, 24 bp, Artificial sequence
  SiRNA target sequence
tatctggtggtgaaaggcaaaaaa

SEQ ID NO: 59635 - DNA, 24 bp, Artificial sequence
  SiRNA target sequence
atctggtggtgaaaggcaaaaaat

SEQ ID NO: 59636 - DNA, 24 bp, Artificial sequence
  SiRNA target sequence
tctggtggtgaaaggcaaaaaatt

SEQ ID NO: 59637 - DNA, 24 bp, Artificial sequence
  SiRNA target sequence
ctggtggtgaaaggcaaaaaatta

SEQ ID NO: 59638 - DNA, 24 bp, Artificial sequence
  SiRNA target sequence
tggtggtgaaaggcaaaaaattat

SEQ ID NO: 59639 - DNA, 24 bp, Artificial sequence
  SiRNA target sequence
ggtggtgaaaggcaaaaaattatg

SEQ ID NO: 59640 - DNA, 24 bp, Artificial sequence
  SiRNA target sequence
gtggtgaaaggcaaaaaattatgc

SEQ ID NO: 59641 - DNA, 24 bp, Artificial sequence
  SiRNA target sequence
tggtgaaaggcaaaaaattatgct

SEQ ID NO: 59642 - DNA, 24 bp, Artificial sequence
  SiRNA target sequence
ggtgaaaggcaaaaaattatgctg

SEQ ID NO: 59643 - DNA, 24 bp, Artificial sequence
  SiRNA target sequence
gtgaaaggcaaaaaattatgctga

SEQ ID NO: 59644 - DNA, 24 bp, Artificial sequence
  SiRNA target sequence
tgaaaggcaaaaaattatgctgat

SEQ ID NO: 59645 - DNA, 24 bp, Artificial sequence
  SiRNA target sequence
gaaaggcaaaaaattatgctgatg

SEQ ID NO: 59646 - DNA, 24 bp, Artificial sequence
  SiRNA target sequence
aaaggcaaaaaattatgctgatgc

SEQ ID NO: 59647 - DNA, 24 bp, Artificial sequence
  SiRNA target sequence
aaggcaaaaaattatgctgatgcg

SEQ ID NO: 59648 - DNA, 24 bp, Artificial sequence
  SiRNA target sequence
aggcaaaaaattatgctgatgcgt

SEQ ID NO: 59649 - DNA, 24 bp, Artificial sequence
  SiRNA target sequence
ggcaaaaaattatgctgatgcgtg

SEQ ID NO: 59650 - DNA, 24 bp, Artificial sequence
  SiRNA target sequence
gcaaaaaattatgctgatgcgtgc

SEQ ID NO: 59651 - DNA, 24 bp, Artificial sequence
  SiRNA target sequence
caaaaaattatgctgatgcgtgca

SEQ ID NO: 59652 - DNA, 24 bp, Artificial sequence
  SiRNA target sequence
aaaaaattatgctgatgcgtgcat

SEQ ID NO: 59653 - DNA, 24 bp, Artificial sequence
  SiRNA target sequence
aaaaattatgctgatgcgtgcatt

SEQ ID NO: 59654 - DNA, 24 bp, Artificial sequence
  SiRNA target sequence
aaaattatgctgatgcgtgcattg

SEQ ID NO: 59655 - DNA, 24 bp, Artificial sequence
  SiRNA target sequence
aaattatgctgatgcgtgcattgc

SEQ ID NO: 59656 - DNA, 24 bp, Artificial sequence
  SiRNA target sequence
aattatgctgatgcgtgcattgct

SEQ ID NO: 59657 - DNA, 24 bp, Artificial sequence
  SiRNA target sequence
attatgctgatgcgtgcattgctt

SEQ ID NO: 59658 - DNA, 24 bp, Artificial sequence
  SiRNA target sequence
ttatgctgatgcgtgcattgctta

SEQ ID NO: 59659 - DNA, 24 bp, Artificial sequence
  SiRNA target sequence
tatgctgatgcgtgcattgcttaa

SEQ ID NO: 59660 - DNA, 24 bp, Artificial sequence
  SiRNA target sequence
atgctgatgcgtgcattgcttaaa

SEQ ID NO: 59661 - DNA, 24 bp, Artificial sequence
  SiRNA target sequence
tgctgatgcgtgcattgcttaaaa

SEQ ID NO: 59662 - DNA, 24 bp, Artificial sequence
  SiRNA target sequence
gctgatgcgtgcattgcttaaaaa

SEQ ID NO: 59663 - DNA, 24 bp, Artificial sequence
  SiRNA target sequence
ctgatgcgtgcattgcttaaaaat

SEQ ID NO: 59664 - DNA, 24 bp, Artificial sequence
  SiRNA target sequence
tgatgcgtgcattgcttaaaaatt

SEQ ID NO: 59665 - DNA, 24 bp, Artificial sequence
  SiRNA target sequence
gatgcgtgcattgcttaaaaattc

SEQ ID NO: 59666 - DNA, 24 bp, Artificial sequence
  SiRNA target sequence
atgcgtgcattgcttaaaaattca

SEQ ID NO: 59667 - DNA, 24 bp, Artificial sequence
  SiRNA target sequence
tgcgtgcattgcttaaaaattcag

SEQ ID NO: 59668 - DNA, 24 bp, Artificial sequence
  SiRNA target sequence
gcgtgcattgcttaaaaattcaga

SEQ ID NO: 59669 - DNA, 24 bp, Artificial sequence
  SiRNA target sequence
cgtgcattgcttaaaaattcagag

SEQ ID NO: 59670 - DNA, 24 bp, Artificial sequence
  SiRNA target sequence
gtgcattgcttaaaaattcagaga

SEQ ID NO: 59671 - DNA, 24 bp, Artificial sequence
  SiRNA target sequence
tgcattgcttaaaaattcagagat

SEQ ID NO: 59672 - DNA, 24 bp, Artificial sequence
  SiRNA target sequence
gcattgcttaaaaattcagagatc

SEQ ID NO: 59673 - DNA, 24 bp, Artificial sequence
  SiRNA target sequence
cattgcttaaaaattcagagatcg

SEQ ID NO: 59674 - DNA, 24 bp, Artificial sequence
  SiRNA target sequence
attgcttaaaaattcagagatcgt

SEQ ID NO: 59675 - DNA, 24 bp, Artificial sequence
  SiRNA target sequence
ttgcttaaaaattcagagatcgtt

SEQ ID NO: 59676 - DNA, 24 bp, Artificial sequence
  SiRNA target sequence
tgcttaaaaattcagagatcgttt

SEQ ID NO: 59677 - DNA, 24 bp, Artificial sequence
  SiRNA target sequence
gcttaaaaattcagagatcgtttt

SEQ ID NO: 59678 - DNA, 24 bp, Artificial sequence
  SiRNA target sequence
cttaaaaattcagagatcgtttta

SEQ ID NO: 59679 - DNA, 24 bp, Artificial sequence
  SiRNA target sequence
ttaaaaattcagagatcgttttat

SEQ ID NO: 59680 - DNA, 24 bp, Artificial sequence
  SiRNA target sequence
taaaaattcagagatcgttttatt

SEQ ID NO: 59681 - DNA, 24 bp, Artificial sequence
  SiRNA target sequence
aaaaattcagagatcgttttatta

SEQ ID NO: 59682 - DNA, 24 bp, Artificial sequence
  SiRNA target sequence
aaaattcagagatcgttttattag

SEQ ID NO: 59683 - DNA, 24 bp, Artificial sequence
  SiRNA target sequence
aaattcagagatcgttttattaga

SEQ ID NO: 59684 - DNA, 24 bp, Artificial sequence
  SiRNA target sequence
aattcagagatcgttttattagac

SEQ ID NO: 59685 - DNA, 24 bp, Artificial sequence
  SiRNA target sequence
attcagagatcgttttattagacg

SEQ ID NO: 59686 - DNA, 24 bp, Artificial sequence
  SiRNA target sequence
ttcagagatcgttttattagacga

SEQ ID NO: 59687 - DNA, 24 bp, Artificial sequence
  SiRNA target sequence
tcagagatcgttttattagacgag

SEQ ID NO: 59688 - DNA, 24 bp, Artificial sequence
  SiRNA target sequence
cagagatcgttttattagacgagc

SEQ ID NO: 59689 - DNA, 24 bp, Artificial sequence
  SiRNA target sequence
agagatcgttttattagacgagcc

SEQ ID NO: 59690 - DNA, 24 bp, Artificial sequence
  SiRNA target sequence
gagatcgttttattagacgagcca

SEQ ID NO: 59691 - DNA, 24 bp, Artificial sequence
  SiRNA target sequence
agatcgttttattagacgagccaa

SEQ ID NO: 59692 - DNA, 24 bp, Artificial sequence
  SiRNA target sequence
gatcgttttattagacgagccaac

SEQ ID NO: 59693 - DNA, 24 bp, Artificial sequence
  SiRNA target sequence
atcgttttattagacgagccaacc

SEQ ID NO: 59694 - DNA, 24 bp, Artificial sequence
  SiRNA target sequence
tcgttttattagacgagccaacct

SEQ ID NO: 59695 - DNA, 24 bp, Artificial sequence
  SiRNA target sequence
cgttttattagacgagccaacctc

SEQ ID NO: 59696 - DNA, 24 bp, Artificial sequence
  SiRNA target sequence
gttttattagacgagccaacctca

SEQ ID NO: 59697 - DNA, 24 bp, Artificial sequence
  SiRNA target sequence
ttttattagacgagccaacctcag

SEQ ID NO: 59698 - DNA, 24 bp, Artificial sequence
  SiRNA target sequence
tttattagacgagccaacctcagc

SEQ ID NO: 59699 - DNA, 24 bp, Artificial sequence
  SiRNA target sequence
ttattagacgagccaacctcagca

SEQ ID NO: 59700 - DNA, 24 bp, Artificial sequence
  SiRNA target sequence
tattagacgagccaacctcagcac

SEQ ID NO: 59701 - DNA, 24 bp, Artificial sequence
  SiRNA target sequence
attagacgagccaacctcagcact

SEQ ID NO: 59702 - DNA, 24 bp, Artificial sequence
  SiRNA target sequence
ttagacgagccaacctcagcacta

SEQ ID NO: 59703 - DNA, 24 bp, Artificial sequence
  SiRNA target sequence
tagacgagccaacctcagcactag

SEQ ID NO: 59704 - DNA, 24 bp, Artificial sequence
  SiRNA target sequence
agacgagccaacctcagcactaga

SEQ ID NO: 59705 - DNA, 24 bp, Artificial sequence
  SiRNA target sequence
gacgagccaacctcagcactagat

SEQ ID NO: 59706 - DNA, 24 bp, Artificial sequence
  SiRNA target sequence
acgagccaacctcagcactagata

SEQ ID NO: 59707 - DNA, 24 bp, Artificial sequence
  SiRNA target sequence
cgagccaacctcagcactagataa

SEQ ID NO: 59708 - DNA, 24 bp, Artificial sequence
  SiRNA target sequence
gagccaacctcagcactagataaa

SEQ ID NO: 59709 - DNA, 24 bp, Artificial sequence
  SiRNA target sequence
agccaacctcagcactagataaaa

SEQ ID NO: 59710 - DNA, 24 bp, Artificial sequence
  SiRNA target sequence
gccaacctcagcactagataaaaa

SEQ ID NO: 59711 - DNA, 24 bp, Artificial sequence
  SiRNA target sequence
ccaacctcagcactagataaaaag

SEQ ID NO: 59712 - DNA, 24 bp, Artificial sequence
  SiRNA target sequence
caacctcagcactagataaaaaga

SEQ ID NO: 59713 - DNA, 24 bp, Artificial sequence
  SiRNA target sequence
aacctcagcactagataaaaagag

SEQ ID NO: 59714 - DNA, 24 bp, Artificial sequence
  SiRNA target sequence
acctcagcactagataaaaagagt

SEQ ID NO: 59715 - DNA, 24 bp, Artificial sequence
  SiRNA target sequence
cctcagcactagataaaaagagtg

SEQ ID NO: 59716 - DNA, 24 bp, Artificial sequence
  SiRNA target sequence
ctcagcactagataaaaagagtga

SEQ ID NO: 59717 - DNA, 24 bp, Artificial sequence
  SiRNA target sequence
tcagcactagataaaaagagtgaa

SEQ ID NO: 59718 - DNA, 24 bp, Artificial sequence
  SiRNA target sequence
cagcactagataaaaagagtgaac

SEQ ID NO: 59719 - DNA, 24 bp, Artificial sequence
  SiRNA target sequence
agcactagataaaaagagtgaact

SEQ ID NO: 59720 - DNA, 24 bp, Artificial sequence
  SiRNA target sequence
gcactagataaaaagagtgaacta

SEQ ID NO: 59721 - DNA, 24 bp, Artificial sequence
  SiRNA target sequence
cactagataaaaagagtgaactag

SEQ ID NO: 59722 - DNA, 24 bp, Artificial sequence
  SiRNA target sequence
actagataaaaagagtgaactaga

SEQ ID NO: 59723 - DNA, 24 bp, Artificial sequence
  SiRNA target sequence
ctagataaaaagagtgaactagaa

SEQ ID NO: 59724 - DNA, 24 bp, Artificial sequence
  SiRNA target sequence
tagataaaaagagtgaactagaaa

SEQ ID NO: 59725 - DNA, 24 bp, Artificial sequence
  SiRNA target sequence
agataaaaagagtgaactagaaac

SEQ ID NO: 59726 - DNA, 24 bp, Artificial sequence
  SiRNA target sequence
gataaaaagagtgaactagaaact

SEQ ID NO: 59727 - DNA, 24 bp, Artificial sequence
  SiRNA target sequence
ataaaaagagtgaactagaaacta

SEQ ID NO: 59728 - DNA, 24 bp, Artificial sequence
  SiRNA target sequence
taaaaagagtgaactagaaactat

SEQ ID NO: 59729 - DNA, 24 bp, Artificial sequence
  SiRNA target sequence
aaaaagagtgaactagaaactatg

SEQ ID NO: 59730 - DNA, 24 bp, Artificial sequence
  SiRNA target sequence
aaaagagtgaactagaaactatga

SEQ ID NO: 59731 - DNA, 24 bp, Artificial sequence
  SiRNA target sequence
aaagagtgaactagaaactatgac

SEQ ID NO: 59732 - DNA, 24 bp, Artificial sequence
  SiRNA target sequence
aagagtgaactagaaactatgaca

SEQ ID NO: 59733 - DNA, 24 bp, Artificial sequence
  SiRNA target sequence
agagtgaactagaaactatgacat

SEQ ID NO: 59734 - DNA, 24 bp, Artificial sequence
  SiRNA target sequence
gagtgaactagaaactatgacata

SEQ ID NO: 59735 - DNA, 24 bp, Artificial sequence
  SiRNA target sequence
agtgaactagaaactatgacatat

SEQ ID NO: 59736 - DNA, 24 bp, Artificial sequence
  SiRNA target sequence
gtgaactagaaactatgacatata

SEQ ID NO: 59737 - DNA, 24 bp, Artificial sequence
  SiRNA target sequence
tgaactagaaactatgacatatat

SEQ ID NO: 59738 - DNA, 24 bp, Artificial sequence
  SiRNA target sequence
gaactagaaactatgacatatatt

SEQ ID NO: 59739 - DNA, 24 bp, Artificial sequence
  SiRNA target sequence
aactagaaactatgacatatattt

SEQ ID NO: 59740 - DNA, 24 bp, Artificial sequence
  SiRNA target sequence
actagaaactatgacatatatttt

SEQ ID NO: 59741 - DNA, 24 bp, Artificial sequence
  SiRNA target sequence
ctagaaactatgacatatattttt

SEQ ID NO: 59742 - DNA, 24 bp, Artificial sequence
  SiRNA target sequence
tagaaactatgacatatattttta

SEQ ID NO: 59743 - DNA, 24 bp, Artificial sequence
  SiRNA target sequence
agaaactatgacatatatttttaa

SEQ ID NO: 59744 - DNA, 24 bp, Artificial sequence
  SiRNA target sequence
gaaactatgacatatatttttaat

SEQ ID NO: 59745 - DNA, 24 bp, Artificial sequence
  SiRNA target sequence
aaactatgacatatatttttaatg

SEQ ID NO: 59746 - DNA, 24 bp, Artificial sequence
  SiRNA target sequence
aactatgacatatatttttaatga

SEQ ID NO: 59747 - DNA, 24 bp, Artificial sequence
  SiRNA target sequence
actatgacatatatttttaatgaa

SEQ ID NO: 59748 - DNA, 24 bp, Artificial sequence
  SiRNA target sequence
ctatgacatatatttttaatgaat

SEQ ID NO: 59749 - DNA, 24 bp, Artificial sequence
  SiRNA target sequence
tatgacatatatttttaatgaatt

SEQ ID NO: 59750 - DNA, 24 bp, Artificial sequence
  SiRNA target sequence
atgacatatatttttaatgaattt

SEQ ID NO: 59751 - DNA, 24 bp, Artificial sequence
  SiRNA target sequence
tgacatatatttttaatgaattta

SEQ ID NO: 59752 - DNA, 24 bp, Artificial sequence
  SiRNA target sequence
gacatatatttttaatgaatttaa

SEQ ID NO: 59753 - DNA, 24 bp, Artificial sequence
  SiRNA target sequence
acatatatttttaatgaatttaag

SEQ ID NO: 59754 - DNA, 24 bp, Artificial sequence
  SiRNA target sequence
catatatttttaatgaatttaagt

SEQ ID NO: 59755 - DNA, 24 bp, Artificial sequence
  SiRNA target sequence
atatatttttaatgaatttaagta

SEQ ID NO: 59756 - DNA, 24 bp, Artificial sequence
  SiRNA target sequence
tatatttttaatgaatttaagtac

SEQ ID NO: 59757 - DNA, 24 bp, Artificial sequence
  SiRNA target sequence
atatttttaatgaatttaagtacc

SEQ ID NO: 59758 - DNA, 24 bp, Artificial sequence
  SiRNA target sequence
tatttttaatgaatttaagtacca

SEQ ID NO: 59759 - DNA, 24 bp, Artificial sequence
  SiRNA target sequence
atttttaatgaatttaagtaccat

SEQ ID NO: 59760 - DNA, 24 bp, Artificial sequence
  SiRNA target sequence
tttttaatgaatttaagtaccata

SEQ ID NO: 59761 - DNA, 24 bp, Artificial sequence
  SiRNA target sequence
ttttaatgaatttaagtaccatac

SEQ ID NO: 59762 - DNA, 24 bp, Artificial sequence
  SiRNA target sequence
tttaatgaatttaagtaccatact

SEQ ID NO: 59763 - DNA, 24 bp, Artificial sequence
  SiRNA target sequence
ttaatgaatttaagtaccatactt

SEQ ID NO: 59764 - DNA, 24 bp, Artificial sequence
  SiRNA target sequence
taatgaatttaagtaccatacttt

SEQ ID NO: 59765 - DNA, 24 bp, Artificial sequence
  SiRNA target sequence
aatgaatttaagtaccatactttt

SEQ ID NO: 59766 - DNA, 24 bp, Artificial sequence
  SiRNA target sequence
atgaatttaagtaccatacttttg

SEQ ID NO: 59767 - DNA, 24 bp, Artificial sequence
  SiRNA target sequence
tgaatttaagtaccatacttttgt

SEQ ID NO: 59768 - DNA, 24 bp, Artificial sequence
  SiRNA target sequence
gaatttaagtaccatacttttgta

SEQ ID NO: 59769 - DNA, 24 bp, Artificial sequence
  SiRNA target sequence
aatttaagtaccatacttttgtaa

SEQ ID NO: 59770 - DNA, 24 bp, Artificial sequence
  SiRNA target sequence
atttaagtaccatacttttgtaat

SEQ ID NO: 59771 - DNA, 24 bp, Artificial sequence
  SiRNA target sequence
tttaagtaccatacttttgtaata

SEQ ID NO: 59772 - DNA, 24 bp, Artificial sequence
  SiRNA target sequence
ttaagtaccatacttttgtaataa

SEQ ID NO: 59773 - DNA, 24 bp, Artificial sequence
  SiRNA target sequence
taagtaccatacttttgtaataat

SEQ ID NO: 59774 - DNA, 24 bp, Artificial sequence
  SiRNA target sequence
aagtaccatacttttgtaataatt

SEQ ID NO: 59775 - DNA, 24 bp, Artificial sequence
  SiRNA target sequence
agtaccatacttttgtaataattg

SEQ ID NO: 59776 - DNA, 24 bp, Artificial sequence
  SiRNA target sequence
gtaccatacttttgtaataattgt

SEQ ID NO: 59777 - DNA, 24 bp, Artificial sequence
  SiRNA target sequence
taccatacttttgtaataattgta

SEQ ID NO: 59778 - DNA, 24 bp, Artificial sequence
  SiRNA target sequence
accatacttttgtaataattgtac

SEQ ID NO: 59779 - DNA, 24 bp, Artificial sequence
  SiRNA target sequence
ccatacttttgtaataattgtaca

SEQ ID NO: 59780 - DNA, 24 bp, Artificial sequence
  SiRNA target sequence
catacttttgtaataattgtacac

SEQ ID NO: 59781 - DNA, 24 bp, Artificial sequence
  SiRNA target sequence
atacttttgtaataattgtacaca

SEQ ID NO: 59782 - DNA, 24 bp, Artificial sequence
  SiRNA target sequence
tacttttgtaataattgtacacaa

SEQ ID NO: 59783 - DNA, 24 bp, Artificial sequence
  SiRNA target sequence
acttttgtaataattgtacacaat

SEQ ID NO: 59784 - DNA, 24 bp, Artificial sequence
  SiRNA target sequence
cttttgtaataattgtacacaatc

SEQ ID NO: 59785 - DNA, 24 bp, Artificial sequence
  SiRNA target sequence
ttttgtaataattgtacacaatct

SEQ ID NO: 59786 - DNA, 24 bp, Artificial sequence
  SiRNA target sequence
tttgtaataattgtacacaatcta

SEQ ID NO: 59787 - DNA, 24 bp, Artificial sequence
  SiRNA target sequence
ttgtaataattgtacacaatctag

SEQ ID NO: 59788 - DNA, 24 bp, Artificial sequence
  SiRNA target sequence
tgtaataattgtacacaatctaga

SEQ ID NO: 59789 - DNA, 24 bp, Artificial sequence
  SiRNA target sequence
gtaataattgtacacaatctagaa

SEQ ID NO: 59790 - DNA, 24 bp, Artificial sequence
  SiRNA target sequence
taataattgtacacaatctagaat

SEQ ID NO: 59791 - DNA, 24 bp, Artificial sequence
  SiRNA target sequence
aataattgtacacaatctagaatt

SEQ ID NO: 59792 - DNA, 24 bp, Artificial sequence
  SiRNA target sequence
ataattgtacacaatctagaatta

SEQ ID NO: 59793 - DNA, 24 bp, Artificial sequence
  SiRNA target sequence
taattgtacacaatctagaattat

SEQ ID NO: 59794 - DNA, 24 bp, Artificial sequence
  SiRNA target sequence
aattgtacacaatctagaattatt

SEQ ID NO: 59795 - DNA, 24 bp, Artificial sequence
  SiRNA target sequence
attgtacacaatctagaattattg

SEQ ID NO: 59796 - DNA, 24 bp, Artificial sequence
  SiRNA target sequence
ttgtacacaatctagaattattgg

SEQ ID NO: 59797 - DNA, 24 bp, Artificial sequence
  SiRNA target sequence
tgtacacaatctagaattattggc

SEQ ID NO: 59798 - DNA, 24 bp, Artificial sequence
  SiRNA target sequence
gtacacaatctagaattattggct

SEQ ID NO: 59799 - DNA, 24 bp, Artificial sequence
  SiRNA target sequence
tacacaatctagaattattggctt

SEQ ID NO: 59800 - DNA, 24 bp, Artificial sequence
  SiRNA target sequence
acacaatctagaattattggcttt

SEQ ID NO: 59801 - DNA, 24 bp, Artificial sequence
  SiRNA target sequence
cacaatctagaattattggctttg

SEQ ID NO: 59802 - DNA, 24 bp, Artificial sequence
  SiRNA target sequence
acaatctagaattattggctttgt

SEQ ID NO: 59803 - DNA, 24 bp, Artificial sequence
  SiRNA target sequence
caatctagaattattggctttgtt

SEQ ID NO: 59804 - DNA, 24 bp, Artificial sequence
  SiRNA target sequence
aatctagaattattggctttgttt

SEQ ID NO: 59805 - DNA, 24 bp, Artificial sequence
  SiRNA target sequence
atctagaattattggctttgtttg

SEQ ID NO: 59806 - DNA, 24 bp, Artificial sequence
  SiRNA target sequence
tctagaattattggctttgtttga

SEQ ID NO: 59807 - DNA, 24 bp, Artificial sequence
  SiRNA target sequence
ctagaattattggctttgtttgat

SEQ ID NO: 59808 - DNA, 24 bp, Artificial sequence
  SiRNA target sequence
tagaattattggctttgtttgata

SEQ ID NO: 59809 - DNA, 24 bp, Artificial sequence
  SiRNA target sequence
agaattattggctttgtttgataa

SEQ ID NO: 59810 - DNA, 24 bp, Artificial sequence
  SiRNA target sequence
gaattattggctttgtttgataaa

SEQ ID NO: 59811 - DNA, 24 bp, Artificial sequence
  SiRNA target sequence
aattattggctttgtttgataaaa

SEQ ID NO: 59812 - DNA, 24 bp, Artificial sequence
  SiRNA target sequence
attattggctttgtttgataaaat

SEQ ID NO: 59813 - DNA, 24 bp, Artificial sequence
  SiRNA target sequence
ttattggctttgtttgataaaatt

SEQ ID NO: 59814 - DNA, 24 bp, Artificial sequence
  SiRNA target sequence
tattggctttgtttgataaaattt

SEQ ID NO: 59815 - DNA, 24 bp, Artificial sequence
  SiRNA target sequence
attggctttgtttgataaaatttt

SEQ ID NO: 59816 - DNA, 24 bp, Artificial sequence
  SiRNA target sequence
ttggctttgtttgataaaatttta

SEQ ID NO: 59817 - DNA, 24 bp, Artificial sequence
  SiRNA target sequence
tggctttgtttgataaaattttat

SEQ ID NO: 59818 - DNA, 24 bp, Artificial sequence
  SiRNA target sequence
ggctttgtttgataaaattttatt

SEQ ID NO: 59819 - DNA, 24 bp, Artificial sequence
  SiRNA target sequence
gctttgtttgataaaattttattt

SEQ ID NO: 59820 - DNA, 24 bp, Artificial sequence
  SiRNA target sequence
ctttgtttgataaaattttatttg

SEQ ID NO: 59821 - DNA, 24 bp, Artificial sequence
  SiRNA target sequence
tttgtttgataaaattttatttgt

SEQ ID NO: 59822 - DNA, 24 bp, Artificial sequence
  SiRNA target sequence
ttgtttgataaaattttatttgta

SEQ ID NO: 59823 - DNA, 24 bp, Artificial sequence
  SiRNA target sequence
tgtttgataaaattttatttgtaa

SEQ ID NO: 59824 - DNA, 24 bp, Artificial sequence
  SiRNA target sequence
gtttgataaaattttatttgtaaa

SEQ ID NO: 59825 - DNA, 24 bp, Artificial sequence
  SiRNA target sequence
tttgataaaattttatttgtaaat

SEQ ID NO: 59826 - DNA, 24 bp, Artificial sequence
  SiRNA target sequence
ttgataaaattttatttgtaaatg

SEQ ID NO: 59827 - DNA, 24 bp, Artificial sequence
  SiRNA target sequence
tgataaaattttatttgtaaatgg

SEQ ID NO: 59828 - DNA, 24 bp, Artificial sequence
  SiRNA target sequence
gataaaattttatttgtaaatggt

SEQ ID NO: 59829 - DNA, 24 bp, Artificial sequence
  SiRNA target sequence
ataaaattttatttgtaaatggta

SEQ ID NO: 59830 - DNA, 24 bp, Artificial sequence
  SiRNA target sequence
taaaattttatttgtaaatggtaa

SEQ ID NO: 59831 - DNA, 24 bp, Artificial sequence
  SiRNA target sequence
aaaattttatttgtaaatggtaat

SEQ ID NO: 59832 - DNA, 24 bp, Artificial sequence
  SiRNA target sequence
aaattttatttgtaaatggtaatg

SEQ ID NO: 59833 - DNA, 24 bp, Artificial sequence
  SiRNA target sequence
aattttatttgtaaatggtaatga

SEQ ID NO: 59834 - DNA, 24 bp, Artificial sequence
  SiRNA target sequence
attttatttgtaaatggtaatgag

SEQ ID NO: 59835 - DNA, 24 bp, Artificial sequence
  SiRNA target sequence
ttttatttgtaaatggtaatgagg

SEQ ID NO: 59836 - DNA, 24 bp, Artificial sequence
  SiRNA target sequence
tttatttgtaaatggtaatgaggt

SEQ ID NO: 59837 - DNA, 24 bp, Artificial sequence
  SiRNA target sequence
ttatttgtaaatggtaatgaggta

SEQ ID NO: 59838 - DNA, 24 bp, Artificial sequence
  SiRNA target sequence
tatttgtaaatggtaatgaggtaa

SEQ ID NO: 59839 - DNA, 24 bp, Artificial sequence
  SiRNA target sequence
atttgtaaatggtaatgaggtaac

SEQ ID NO: 59840 - DNA, 24 bp, Artificial sequence
  SiRNA target sequence
tttgtaaatggtaatgaggtaaca

SEQ ID NO: 59841 - DNA, 24 bp, Artificial sequence
  SiRNA target sequence
ttgtaaatggtaatgaggtaacaa

SEQ ID NO: 59842 - DNA, 24 bp, Artificial sequence
  SiRNA target sequence
tgtaaatggtaatgaggtaacaat

SEQ ID NO: 59843 - DNA, 24 bp, Artificial sequence
  SiRNA target sequence
gtaaatggtaatgaggtaacaatg

SEQ ID NO: 59844 - DNA, 24 bp, Artificial sequence
  SiRNA target sequence
taaatggtaatgaggtaacaatga

SEQ ID NO: 59845 - DNA, 24 bp, Artificial sequence
  SiRNA target sequence
aaatggtaatgaggtaacaatgat

SEQ ID NO: 59846 - DNA, 24 bp, Artificial sequence
  SiRNA target sequence
aatggtaatgaggtaacaatgata

SEQ ID NO: 59847 - DNA, 24 bp, Artificial sequence
  SiRNA target sequence
atggtaatgaggtaacaatgatag

SEQ ID NO: 59848 - DNA, 24 bp, Artificial sequence
  SiRNA target sequence
tggtaatgaggtaacaatgataga

SEQ ID NO: 59849 - DNA, 24 bp, Artificial sequence
  SiRNA target sequence
ggtaatgaggtaacaatgatagaa

SEQ ID NO: 59850 - DNA, 24 bp, Artificial sequence
  SiRNA target sequence
gtaatgaggtaacaatgatagaag

SEQ ID NO: 59851 - DNA, 24 bp, Artificial sequence
  SiRNA target sequence
taatgaggtaacaatgatagaaga

SEQ ID NO: 59852 - DNA, 24 bp, Artificial sequence
  SiRNA target sequence
aatgaggtaacaatgatagaagac

SEQ ID NO: 59853 - DNA, 24 bp, Artificial sequence
  SiRNA target sequence
atgaggtaacaatgatagaagaca

SEQ ID NO: 59854 - DNA, 24 bp, Artificial sequence
  SiRNA target sequence
tgaggtaacaatgatagaagacat

SEQ ID NO: 59855 - DNA, 24 bp, Artificial sequence
  SiRNA target sequence
gaggtaacaatgatagaagacatt

SEQ ID NO: 59856 - DNA, 24 bp, Artificial sequence
  SiRNA target sequence
aggtaacaatgatagaagacatta

SEQ ID NO: 59857 - DNA, 24 bp, Artificial sequence
  SiRNA target sequence
ggtaacaatgatagaagacattaa

SEQ ID NO: 59858 - DNA, 24 bp, Artificial sequence
  SiRNA target sequence
gtaacaatgatagaagacattaac

SEQ ID NO: 59859 - DNA, 24 bp, Artificial sequence
  SiRNA target sequence
taacaatgatagaagacattaaca

SEQ ID NO: 59860 - DNA, 24 bp, Artificial sequence
  SiRNA target sequence
aacaatgatagaagacattaacaa

SEQ ID NO: 59861 - DNA, 24 bp, Artificial sequence
  SiRNA target sequence
acaatgatagaagacattaacaaa

SEQ ID NO: 59862 - DNA, 24 bp, Artificial sequence
  SiRNA target sequence
caatgatagaagacattaacaaaa

SEQ ID NO: 59863 - DNA, 24 bp, Artificial sequence
  SiRNA target sequence
aatgatagaagacattaacaaaaa

SEQ ID NO: 59864 - DNA, 24 bp, Artificial sequence
  SiRNA target sequence
atgatagaagacattaacaaaaaa

SEQ ID NO: 59865 - DNA, 24 bp, Artificial sequence
  SiRNA target sequence
tgatagaagacattaacaaaaaac

SEQ ID NO: 59866 - DNA, 24 bp, Artificial sequence
  SiRNA target sequence
gatagaagacattaacaaaaaact

SEQ ID NO: 59867 - DNA, 24 bp, Artificial sequence
  SiRNA target sequence
atagaagacattaacaaaaaactt

SEQ ID NO: 59868 - DNA, 24 bp, Artificial sequence
  SiRNA target sequence
tagaagacattaacaaaaaacttg

SEQ ID NO: 59869 - DNA, 24 bp, Artificial sequence
  SiRNA target sequence
agaagacattaacaaaaaacttga

SEQ ID NO: 59870 - DNA, 24 bp, Artificial sequence
  SiRNA target sequence
gaagacattaacaaaaaacttgaa

SEQ ID NO: 59871 - DNA, 24 bp, Artificial sequence
  SiRNA target sequence
aagacattaacaaaaaacttgaag

SEQ ID NO: 59872 - DNA, 24 bp, Artificial sequence
  SiRNA target sequence
agacattaacaaaaaacttgaaga

SEQ ID NO: 59873 - DNA, 24 bp, Artificial sequence
  SiRNA target sequence
gacattaacaaaaaacttgaagaa

SEQ ID NO: 59874 - DNA, 24 bp, Artificial sequence
  SiRNA target sequence
acattaacaaaaaacttgaagaaa

SEQ ID NO: 59875 - DNA, 24 bp, Artificial sequence
  SiRNA target sequence
cattaacaaaaaacttgaagaaaa

SEQ ID NO: 59876 - DNA, 24 bp, Artificial sequence
  SiRNA target sequence
attaacaaaaaacttgaagaaaat

SEQ ID NO: 59877 - DNA, 24 bp, Artificial sequence
  SiRNA target sequence
ttaacaaaaaacttgaagaaaatt

SEQ ID NO: 59878 - DNA, 24 bp, Artificial sequence
  SiRNA target sequence
taacaaaaaacttgaagaaaattc

SEQ ID NO: 59879 - DNA, 24 bp, Artificial sequence
  SiRNA target sequence
aacaaaaaacttgaagaaaattca

SEQ ID NO: 59880 - DNA, 24 bp, Artificial sequence
  SiRNA target sequence
acaaaaaacttgaagaaaattcaa

SEQ ID NO: 59881 - DNA, 24 bp, Artificial sequence
  SiRNA target sequence
caaaaaacttgaagaaaattcaaa

SEQ ID NO: 59882 - DNA, 24 bp, Artificial sequence
  SiRNA target sequence
aaaaaacttgaagaaaattcaaag

SEQ ID NO: 59883 - DNA, 24 bp, Artificial sequence
  SiRNA target sequence
aaaaacttgaagaaaattcaaagt

SEQ ID NO: 59884 - DNA, 24 bp, Artificial sequence
  SiRNA target sequence
aaaacttgaagaaaattcaaagta

SEQ ID NO: 59885 - DNA, 24 bp, Artificial sequence
  SiRNA target sequence
aaacttgaagaaaattcaaagtat

SEQ ID NO: 59886 - DNA, 24 bp, Artificial sequence
  SiRNA target sequence
aacttgaagaaaattcaaagtatt

SEQ ID NO: 59887 - DNA, 24 bp, Artificial sequence
  SiRNA target sequence
acttgaagaaaattcaaagtattt

SEQ ID NO: 59888 - DNA, 24 bp, Artificial sequence
  SiRNA target sequence
cttgaagaaaattcaaagtatttt

SEQ ID NO: 59889 - DNA, 24 bp, Artificial sequence
  SiRNA target sequence
ttgaagaaaattcaaagtattttg

SEQ ID NO: 59890 - DNA, 24 bp, Artificial sequence
  SiRNA target sequence
tgaagaaaattcaaagtattttgc

SEQ ID NO: 59891 - DNA, 24 bp, Artificial sequence
  SiRNA target sequence
gaagaaaattcaaagtattttgca

SEQ ID NO: 59892 - DNA, 24 bp, Artificial sequence
  SiRNA target sequence
aagaaaattcaaagtattttgcag

SEQ ID NO: 59893 - DNA, 24 bp, Artificial sequence
  SiRNA target sequence
agaaaattcaaagtattttgcaga

SEQ ID NO: 59894 - DNA, 24 bp, Artificial sequence
  SiRNA target sequence
gaaaattcaaagtattttgcagat

SEQ ID NO: 59895 - DNA, 24 bp, Artificial sequence
  SiRNA target sequence
aaaattcaaagtattttgcagata

SEQ ID NO: 59896 - DNA, 24 bp, Artificial sequence
  SiRNA target sequence
aaattcaaagtattttgcagatat

SEQ ID NO: 59897 - DNA, 24 bp, Artificial sequence
  SiRNA target sequence
aattcaaagtattttgcagatatt

SEQ ID NO: 59898 - DNA, 24 bp, Artificial sequence
  SiRNA target sequence
attcaaagtattttgcagatattt

SEQ ID NO: 59899 - DNA, 24 bp, Artificial sequence
  SiRNA target sequence
ttcaaagtattttgcagatatttt

SEQ ID NO: 59900 - DNA, 24 bp, Artificial sequence
  SiRNA target sequence
tcaaagtattttgcagatatttta

SEQ ID NO: 59901 - DNA, 24 bp, Artificial sequence
  SiRNA target sequence
caaagtattttgcagatattttaa

SEQ ID NO: 59902 - DNA, 24 bp, Artificial sequence
  SiRNA target sequence
aaagtattttgcagatattttaaa

SEQ ID NO: 59903 - DNA, 24 bp, Artificial sequence
  SiRNA target sequence
aagtattttgcagatattttaaac

SEQ ID NO: 59904 - DNA, 24 bp, Artificial sequence
  SiRNA target sequence
agtattttgcagatattttaaaca

SEQ ID NO: 59905 - DNA, 24 bp, Artificial sequence
  SiRNA target sequence
gtattttgcagatattttaaacaa

SEQ ID NO: 59906 - DNA, 24 bp, Artificial sequence
  SiRNA target sequence
tattttgcagatattttaaacaac

SEQ ID NO: 59907 - DNA, 24 bp, Artificial sequence
  SiRNA target sequence
attttgcagatattttaaacaacg

SEQ ID NO: 59908 - DNA, 24 bp, Artificial sequence
  SiRNA target sequence
ttttgcagatattttaaacaacga

SEQ ID NO: 59909 - DNA, 24 bp, Artificial sequence
  SiRNA target sequence
tttgcagatattttaaacaacgaa

SEQ ID NO: 59910 - DNA, 24 bp, Artificial sequence
  SiRNA target sequence
ttgcagatattttaaacaacgaat

SEQ ID NO: 59911 - DNA, 24 bp, Artificial sequence
  SiRNA target sequence
tgcagatattttaaacaacgaata

SEQ ID NO: 59912 - DNA, 24 bp, Artificial sequence
  SiRNA target sequence
gcagatattttaaacaacgaataa

SEQ ID NO: 59913 - DNA, 25 bp, Artificial sequence
  SiRNA target sequence
atgaaggaaaaaaccaattatgaaa

SEQ ID NO: 59914 - DNA, 25 bp, Artificial sequence
  SiRNA target sequence
tgaaggaaaaaaccaattatgaaat

SEQ ID NO: 59915 - DNA, 25 bp, Artificial sequence
  SiRNA target sequence
gaaggaaaaaaccaattatgaaatt

SEQ ID NO: 59916 - DNA, 25 bp, Artificial sequence
  SiRNA target sequence
aaggaaaaaaccaattatgaaattt

SEQ ID NO: 59917 - DNA, 25 bp, Artificial sequence
  SiRNA target sequence
aggaaaaaaccaattatgaaatttt

SEQ ID NO: 59918 - DNA, 25 bp, Artificial sequence
  SiRNA target sequence
ggaaaaaaccaattatgaaatttta

SEQ ID NO: 59919 - DNA, 25 bp, Artificial sequence
  SiRNA target sequence
gaaaaaaccaattatgaaattttat

SEQ ID NO: 59920 - DNA, 25 bp, Artificial sequence
  SiRNA target sequence
aaaaaaccaattatgaaattttata

SEQ ID NO: 59921 - DNA, 25 bp, Artificial sequence
  SiRNA target sequence
aaaaaccaattatgaaattttatat

SEQ ID NO: 59922 - DNA, 25 bp, Artificial sequence
  SiRNA target sequence
aaaaccaattatgaaattttatatg

SEQ ID NO: 59923 - DNA, 25 bp, Artificial sequence
  SiRNA target sequence
aaaccaattatgaaattttatatga

SEQ ID NO: 59924 - DNA, 25 bp, Artificial sequence
  SiRNA target sequence
aaccaattatgaaattttatatgat

SEQ ID NO: 59925 - DNA, 25 bp, Artificial sequence
  SiRNA target sequence
accaattatgaaattttatatgata

SEQ ID NO: 59926 - DNA, 25 bp, Artificial sequence
  SiRNA target sequence
ccaattatgaaattttatatgatac

SEQ ID NO: 59927 - DNA, 25 bp, Artificial sequence
  SiRNA target sequence
caattatgaaattttatatgataca

SEQ ID NO: 59928 - DNA, 25 bp, Artificial sequence
  SiRNA target sequence
aattatgaaattttatatgatacat

SEQ ID NO: 59929 - DNA, 25 bp, Artificial sequence
  SiRNA target sequence
attatgaaattttatatgatacatt

SEQ ID NO: 59930 - DNA, 25 bp, Artificial sequence
  SiRNA target sequence
ttatgaaattttatatgatacattt

SEQ ID NO: 59931 - DNA, 25 bp, Artificial sequence
  SiRNA target sequence
tatgaaattttatatgatacatttg

SEQ ID NO: 59932 - DNA, 25 bp, Artificial sequence
  SiRNA target sequence
atgaaattttatatgatacatttgt

SEQ ID NO: 59933 - DNA, 25 bp, Artificial sequence
  SiRNA target sequence
tgaaattttatatgatacatttgta

SEQ ID NO: 59934 - DNA, 25 bp, Artificial sequence
  SiRNA target sequence
gaaattttatatgatacatttgtaa

SEQ ID NO: 59935 - DNA, 25 bp, Artificial sequence
  SiRNA target sequence
aaattttatatgatacatttgtaaa

SEQ ID NO: 59936 - DNA, 25 bp, Artificial sequence
  SiRNA target sequence
aattttatatgatacatttgtaaaa

SEQ ID NO: 59937 - DNA, 25 bp, Artificial sequence
  SiRNA target sequence
attttatatgatacatttgtaaaat

SEQ ID NO: 59938 - DNA, 25 bp, Artificial sequence
  SiRNA target sequence
ttttatatgatacatttgtaaaata

SEQ ID NO: 59939 - DNA, 25 bp, Artificial sequence
  SiRNA target sequence
tttatatgatacatttgtaaaatat

SEQ ID NO: 59940 - DNA, 25 bp, Artificial sequence
  SiRNA target sequence
ttatatgatacatttgtaaaatatt

SEQ ID NO: 59941 - DNA, 25 bp, Artificial sequence
  SiRNA target sequence
tatatgatacatttgtaaaatattg

SEQ ID NO: 59942 - DNA, 25 bp, Artificial sequence
  SiRNA target sequence
atatgatacatttgtaaaatattgt

SEQ ID NO: 59943 - DNA, 25 bp, Artificial sequence
  SiRNA target sequence
tatgatacatttgtaaaatattgtt

SEQ ID NO: 59944 - DNA, 25 bp, Artificial sequence
  SiRNA target sequence
atgatacatttgtaaaatattgtta

SEQ ID NO: 59945 - DNA, 25 bp, Artificial sequence
  SiRNA target sequence
tgatacatttgtaaaatattgttac

SEQ ID NO: 59946 - DNA, 25 bp, Artificial sequence
  SiRNA target sequence
gatacatttgtaaaatattgttaca

SEQ ID NO: 59947 - DNA, 25 bp, Artificial sequence
  SiRNA target sequence
atacatttgtaaaatattgttacaa

SEQ ID NO: 59948 - DNA, 25 bp, Artificial sequence
  SiRNA target sequence
tacatttgtaaaatattgttacaat

SEQ ID NO: 59949 - DNA, 25 bp, Artificial sequence
  SiRNA target sequence
acatttgtaaaatattgttacaata

SEQ ID NO: 59950 - DNA, 25 bp, Artificial sequence
  SiRNA target sequence
catttgtaaaatattgttacaatat

SEQ ID NO: 59951 - DNA, 25 bp, Artificial sequence
  SiRNA target sequence
atttgtaaaatattgttacaatatt

SEQ ID NO: 59952 - DNA, 25 bp, Artificial sequence
  SiRNA target sequence
tttgtaaaatattgttacaatattt

SEQ ID NO: 59953 - DNA, 25 bp, Artificial sequence
  SiRNA target sequence
ttgtaaaatattgttacaatatttc

SEQ ID NO: 59954 - DNA, 25 bp, Artificial sequence
  SiRNA target sequence
tgtaaaatattgttacaatatttcc

SEQ ID NO: 59955 - DNA, 25 bp, Artificial sequence
  SiRNA target sequence
gtaaaatattgttacaatatttcct

SEQ ID NO: 59956 - DNA, 25 bp, Artificial sequence
  SiRNA target sequence
taaaatattgttacaatatttccta

SEQ ID NO: 59957 - DNA, 25 bp, Artificial sequence
  SiRNA target sequence
aaaatattgttacaatatttcctat

SEQ ID NO: 59958 - DNA, 25 bp, Artificial sequence
  SiRNA target sequence
aaatattgttacaatatttcctata

SEQ ID NO: 59959 - DNA, 25 bp, Artificial sequence
  SiRNA target sequence
aatattgttacaatatttcctatat

SEQ ID NO: 59960 - DNA, 25 bp, Artificial sequence
  SiRNA target sequence
atattgttacaatatttcctatata

SEQ ID NO: 59961 - DNA, 25 bp, Artificial sequence
  SiRNA target sequence
tattgttacaatatttcctatataa

SEQ ID NO: 59962 - DNA, 25 bp, Artificial sequence
  SiRNA target sequence
attgttacaatatttcctatataag

SEQ ID NO: 59963 - DNA, 25 bp, Artificial sequence
  SiRNA target sequence
ttgttacaatatttcctatataagg

SEQ ID NO: 59964 - DNA, 25 bp, Artificial sequence
  SiRNA target sequence
tgttacaatatttcctatataaggt

SEQ ID NO: 59965 - DNA, 25 bp, Artificial sequence
  SiRNA target sequence
gttacaatatttcctatataaggta

SEQ ID NO: 59966 - DNA, 25 bp, Artificial sequence
  SiRNA target sequence
ttacaatatttcctatataaggtac

SEQ ID NO: 59967 - DNA, 25 bp, Artificial sequence
  SiRNA target sequence
tacaatatttcctatataaggtacg

SEQ ID NO: 59968 - DNA, 25 bp, Artificial sequence
  SiRNA target sequence
acaatatttcctatataaggtacgt

SEQ ID NO: 59969 - DNA, 25 bp, Artificial sequence
  SiRNA target sequence
caatatttcctatataaggtacgta

SEQ ID NO: 59970 - DNA, 25 bp, Artificial sequence
  SiRNA target sequence
aatatttcctatataaggtacgtaa

SEQ ID NO: 59971 - DNA, 25 bp, Artificial sequence
  SiRNA target sequence
atatttcctatataaggtacgtaat

SEQ ID NO: 59972 - DNA, 25 bp, Artificial sequence
  SiRNA target sequence
tatttcctatataaggtacgtaatg

SEQ ID NO: 59973 - DNA, 25 bp, Artificial sequence
  SiRNA target sequence
atttcctatataaggtacgtaatgt

SEQ ID NO: 59974 - DNA, 25 bp, Artificial sequence
  SiRNA target sequence
tttcctatataaggtacgtaatgtt

SEQ ID NO: 59975 - DNA, 25 bp, Artificial sequence
  SiRNA target sequence
ttcctatataaggtacgtaatgttt

SEQ ID NO: 59976 - DNA, 25 bp, Artificial sequence
  SiRNA target sequence
tcctatataaggtacgtaatgtttc

SEQ ID NO: 59977 - DNA, 25 bp, Artificial sequence
  SiRNA target sequence
cctatataaggtacgtaatgtttcc

SEQ ID NO: 59978 - DNA, 25 bp, Artificial sequence
  SiRNA target sequence
ctatataaggtacgtaatgtttccc

SEQ ID NO: 59979 - DNA, 25 bp, Artificial sequence
  SiRNA target sequence
tatataaggtacgtaatgtttccca

SEQ ID NO: 59980 - DNA, 25 bp, Artificial sequence
  SiRNA target sequence
atataaggtacgtaatgtttcccat

SEQ ID NO: 59981 - DNA, 25 bp, Artificial sequence
  SiRNA target sequence
tataaggtacgtaatgtttcccata

SEQ ID NO: 59982 - DNA, 25 bp, Artificial sequence
  SiRNA target sequence
ataaggtacgtaatgtttcccatat

SEQ ID NO: 59983 - DNA, 25 bp, Artificial sequence
  SiRNA target sequence
taaggtacgtaatgtttcccatatt

SEQ ID NO: 59984 - DNA, 25 bp, Artificial sequence
  SiRNA target sequence
aaggtacgtaatgtttcccatatta

SEQ ID NO: 59985 - DNA, 25 bp, Artificial sequence
  SiRNA target sequence
aggtacgtaatgtttcccatattac

SEQ ID NO: 59986 - DNA, 25 bp, Artificial sequence
  SiRNA target sequence
ggtacgtaatgtttcccatattact

SEQ ID NO: 59987 - DNA, 25 bp, Artificial sequence
  SiRNA target sequence
gtacgtaatgtttcccatattactg

SEQ ID NO: 59988 - DNA, 25 bp, Artificial sequence
  SiRNA target sequence
tacgtaatgtttcccatattactgt

SEQ ID NO: 59989 - DNA, 25 bp, Artificial sequence
  SiRNA target sequence
acgtaatgtttcccatattactgtc

SEQ ID NO: 59990 - DNA, 25 bp, Artificial sequence
  SiRNA target sequence
cgtaatgtttcccatattactgtct

SEQ ID NO: 59991 - DNA, 25 bp, Artificial sequence
  SiRNA target sequence
gtaatgtttcccatattactgtcta

SEQ ID NO: 59992 - DNA, 25 bp, Artificial sequence
  SiRNA target sequence
taatgtttcccatattactgtctac

SEQ ID NO: 59993 - DNA, 25 bp, Artificial sequence
  SiRNA target sequence
aatgtttcccatattactgtctaca

SEQ ID NO: 59994 - DNA, 25 bp, Artificial sequence
  SiRNA target sequence
atgtttcccatattactgtctacaa

SEQ ID NO: 59995 - DNA, 25 bp, Artificial sequence
  SiRNA target sequence
tgtttcccatattactgtctacaat

SEQ ID NO: 59996 - DNA, 25 bp, Artificial sequence
  SiRNA target sequence
gtttcccatattactgtctacaatt

SEQ ID NO: 59997 - DNA, 25 bp, Artificial sequence
  SiRNA target sequence
tttcccatattactgtctacaatta

SEQ ID NO: 59998 - DNA, 25 bp, Artificial sequence
  SiRNA target sequence
ttcccatattactgtctacaattat

SEQ ID NO: 59999 - DNA, 25 bp, Artificial sequence
  SiRNA target sequence
tcccatattactgtctacaattata

SEQ ID NO: 60000 - DNA, 25 bp, Artificial sequence
  SiRNA target sequence
cccatattactgtctacaattatag

SEQ ID NO: 60001 - DNA, 25 bp, Artificial sequence
  SiRNA target sequence
ccatattactgtctacaattatagc

SEQ ID NO: 60002 - DNA, 25 bp, Artificial sequence
  SiRNA target sequence
catattactgtctacaattatagct

SEQ ID NO: 60003 - DNA, 25 bp, Artificial sequence
  SiRNA target sequence
atattactgtctacaattatagctt

SEQ ID NO: 60004 - DNA, 25 bp, Artificial sequence
  SiRNA target sequence
tattactgtctacaattatagcttg

SEQ ID NO: 60005 - DNA, 25 bp, Artificial sequence
  SiRNA target sequence
attactgtctacaattatagcttgt

SEQ ID NO: 60006 - DNA, 25 bp, Artificial sequence
  SiRNA target sequence
ttactgtctacaattatagcttgtt

SEQ ID NO: 60007 - DNA, 25 bp, Artificial sequence
  SiRNA target sequence
tactgtctacaattatagcttgtta

SEQ ID NO: 60008 - DNA, 25 bp, Artificial sequence
  SiRNA target sequence
actgtctacaattatagcttgttat

SEQ ID NO: 60009 - DNA, 25 bp, Artificial sequence
  SiRNA target sequence
ctgtctacaattatagcttgttatc

SEQ ID NO: 60010 - DNA, 25 bp, Artificial sequence
  SiRNA target sequence
tgtctacaattatagcttgttatct

SEQ ID NO: 60011 - DNA, 25 bp, Artificial sequence
  SiRNA target sequence
gtctacaattatagcttgttatctc

SEQ ID NO: 60012 - DNA, 25 bp, Artificial sequence
  SiRNA target sequence
tctacaattatagcttgttatctcg

SEQ ID NO: 60013 - DNA, 25 bp, Artificial sequence
  SiRNA target sequence
ctacaattatagcttgttatctcga

SEQ ID NO: 60014 - DNA, 25 bp, Artificial sequence
  SiRNA target sequence
tacaattatagcttgttatctcgaa

SEQ ID NO: 60015 - DNA, 25 bp, Artificial sequence
  SiRNA target sequence
acaattatagcttgttatctcgaag

SEQ ID NO: 60016 - DNA, 25 bp, Artificial sequence
  SiRNA target sequence
caattatagcttgttatctcgaagt

SEQ ID NO: 60017 - DNA, 25 bp, Artificial sequence
  SiRNA target sequence
aattatagcttgttatctcgaagtt

SEQ ID NO: 60018 - DNA, 25 bp, Artificial sequence
  SiRNA target sequence
attatagcttgttatctcgaagttc

SEQ ID NO: 60019 - DNA, 25 bp, Artificial sequence
  SiRNA target sequence
ttatagcttgttatctcgaagttca

SEQ ID NO: 60020 - DNA, 25 bp, Artificial sequence
  SiRNA target sequence
tatagcttgttatctcgaagttcag

SEQ ID NO: 60021 - DNA, 25 bp, Artificial sequence
  SiRNA target sequence
atagcttgttatctcgaagttcagg

SEQ ID NO: 60022 - DNA, 25 bp, Artificial sequence
  SiRNA target sequence
tagcttgttatctcgaagttcaggc

SEQ ID NO: 60023 - DNA, 25 bp, Artificial sequence
  SiRNA target sequence
agcttgttatctcgaagttcaggca

SEQ ID NO: 60024 - DNA, 25 bp, Artificial sequence
  SiRNA target sequence
gcttgttatctcgaagttcaggcaa

SEQ ID NO: 60025 - DNA, 25 bp, Artificial sequence
  SiRNA target sequence
cttgttatctcgaagttcaggcaag

SEQ ID NO: 60026 - DNA, 25 bp, Artificial sequence
  SiRNA target sequence
ttgttatctcgaagttcaggcaagt

SEQ ID NO: 60027 - DNA, 25 bp, Artificial sequence
  SiRNA target sequence
tgttatctcgaagttcaggcaagta

SEQ ID NO: 60028 - DNA, 25 bp, Artificial sequence
  SiRNA target sequence
gttatctcgaagttcaggcaagtaa

SEQ ID NO: 60029 - DNA, 25 bp, Artificial sequence
  SiRNA target sequence
ttatctcgaagttcaggcaagtaac

SEQ ID NO: 60030 - DNA, 25 bp, Artificial sequence
  SiRNA target sequence
tatctcgaagttcaggcaagtaaca

SEQ ID NO: 60031 - DNA, 25 bp, Artificial sequence
  SiRNA target sequence
atctcgaagttcaggcaagtaacat

SEQ ID NO: 60032 - DNA, 25 bp, Artificial sequence
  SiRNA target sequence
tctcgaagttcaggcaagtaacata

SEQ ID NO: 60033 - DNA, 25 bp, Artificial sequence
  SiRNA target sequence
ctcgaagttcaggcaagtaacatat

SEQ ID NO: 60034 - DNA, 25 bp, Artificial sequence
  SiRNA target sequence
tcgaagttcaggcaagtaacatatc

SEQ ID NO: 60035 - DNA, 25 bp, Artificial sequence
  SiRNA target sequence
cgaagttcaggcaagtaacatatca

SEQ ID NO: 60036 - DNA, 25 bp, Artificial sequence
  SiRNA target sequence
gaagttcaggcaagtaacatatcaa

SEQ ID NO: 60037 - DNA, 25 bp, Artificial sequence
  SiRNA target sequence
aagttcaggcaagtaacatatcaaa

SEQ ID NO: 60038 - DNA, 25 bp, Artificial sequence
  SiRNA target sequence
agttcaggcaagtaacatatcaaaa

SEQ ID NO: 60039 - DNA, 25 bp, Artificial sequence
  SiRNA target sequence
gttcaggcaagtaacatatcaaaaa

SEQ ID NO: 60040 - DNA, 25 bp, Artificial sequence
  SiRNA target sequence
ttcaggcaagtaacatatcaaaaag

SEQ ID NO: 60041 - DNA, 25 bp, Artificial sequence
  SiRNA target sequence
tcaggcaagtaacatatcaaaaaga

SEQ ID NO: 60042 - DNA, 25 bp, Artificial sequence
  SiRNA target sequence
caggcaagtaacatatcaaaaagaa

SEQ ID NO: 60043 - DNA, 25 bp, Artificial sequence
  SiRNA target sequence
aggcaagtaacatatcaaaaagaat

SEQ ID NO: 60044 - DNA, 25 bp, Artificial sequence
  SiRNA target sequence
ggcaagtaacatatcaaaaagaatt

SEQ ID NO: 60045 - DNA, 25 bp, Artificial sequence
  SiRNA target sequence
gcaagtaacatatcaaaaagaattg

SEQ ID NO: 60046 - DNA, 25 bp, Artificial sequence
  SiRNA target sequence
caagtaacatatcaaaaagaattgc

SEQ ID NO: 60047 - DNA, 25 bp, Artificial sequence
  SiRNA target sequence
aagtaacatatcaaaaagaattgca

SEQ ID NO: 60048 - DNA, 25 bp, Artificial sequence
  SiRNA target sequence
agtaacatatcaaaaagaattgcag

SEQ ID NO: 60049 - DNA, 25 bp, Artificial sequence
  SiRNA target sequence
gtaacatatcaaaaagaattgcaga

SEQ ID NO: 60050 - DNA, 25 bp, Artificial sequence
  SiRNA target sequence
taacatatcaaaaagaattgcagaa

SEQ ID NO: 60051 - DNA, 25 bp, Artificial sequence
  SiRNA target sequence
aacatatcaaaaagaattgcagaag

SEQ ID NO: 60052 - DNA, 25 bp, Artificial sequence
  SiRNA target sequence
acatatcaaaaagaattgcagaaga

SEQ ID NO: 60053 - DNA, 25 bp, Artificial sequence
  SiRNA target sequence
catatcaaaaagaattgcagaagat

SEQ ID NO: 60054 - DNA, 25 bp, Artificial sequence
  SiRNA target sequence
atatcaaaaagaattgcagaagatt

SEQ ID NO: 60055 - DNA, 25 bp, Artificial sequence
  SiRNA target sequence
tatcaaaaagaattgcagaagattt

SEQ ID NO: 60056 - DNA, 25 bp, Artificial sequence
  SiRNA target sequence
atcaaaaagaattgcagaagatttt

SEQ ID NO: 60057 - DNA, 25 bp, Artificial sequence
  SiRNA target sequence
tcaaaaagaattgcagaagattttg

SEQ ID NO: 60058 - DNA, 25 bp, Artificial sequence
  SiRNA target sequence
caaaaagaattgcagaagattttga

SEQ ID NO: 60059 - DNA, 25 bp, Artificial sequence
  SiRNA target sequence
aaaaagaattgcagaagattttgaa

SEQ ID NO: 60060 - DNA, 25 bp, Artificial sequence
  SiRNA target sequence
aaaagaattgcagaagattttgaaa

SEQ ID NO: 60061 - DNA, 25 bp, Artificial sequence
  SiRNA target sequence
aaagaattgcagaagattttgaaaa

SEQ ID NO: 60062 - DNA, 25 bp, Artificial sequence
  SiRNA target sequence
aagaattgcagaagattttgaaaat

SEQ ID NO: 60063 - DNA, 25 bp, Artificial sequence
  SiRNA target sequence
agaattgcagaagattttgaaaata

SEQ ID NO: 60064 - DNA, 25 bp, Artificial sequence
  SiRNA target sequence
gaattgcagaagattttgaaaataa

SEQ ID NO: 60065 - DNA, 25 bp, Artificial sequence
  SiRNA target sequence
aattgcagaagattttgaaaataaa

SEQ ID NO: 60066 - DNA, 25 bp, Artificial sequence
  SiRNA target sequence
attgcagaagattttgaaaataaaa

SEQ ID NO: 60067 - DNA, 25 bp, Artificial sequence
  SiRNA target sequence
ttgcagaagattttgaaaataaaat

SEQ ID NO: 60068 - DNA, 25 bp, Artificial sequence
  SiRNA target sequence
tgcagaagattttgaaaataaaata

SEQ ID NO: 60069 - DNA, 25 bp, Artificial sequence
  SiRNA target sequence
gcagaagattttgaaaataaaataa

SEQ ID NO: 60070 - DNA, 25 bp, Artificial sequence
  SiRNA target sequence
cagaagattttgaaaataaaataaa

SEQ ID NO: 60071 - DNA, 25 bp, Artificial sequence
  SiRNA target sequence
agaagattttgaaaataaaataaat

SEQ ID NO: 60072 - DNA, 25 bp, Artificial sequence
  SiRNA target sequence
gaagattttgaaaataaaataaatg

SEQ ID NO: 60073 - DNA, 25 bp, Artificial sequence
  SiRNA target sequence
aagattttgaaaataaaataaatgc

SEQ ID NO: 60074 - DNA, 25 bp, Artificial sequence
  SiRNA target sequence
agattttgaaaataaaataaatgca

SEQ ID NO: 60075 - DNA, 25 bp, Artificial sequence
  SiRNA target sequence
gattttgaaaataaaataaatgcag

SEQ ID NO: 60076 - DNA, 25 bp, Artificial sequence
  SiRNA target sequence
attttgaaaataaaataaatgcagg

SEQ ID NO: 60077 - DNA, 25 bp, Artificial sequence
  SiRNA target sequence
ttttgaaaataaaataaatgcagga

SEQ ID NO: 60078 - DNA, 25 bp, Artificial sequence
  SiRNA target sequence
tttgaaaataaaataaatgcaggaa

SEQ ID NO: 60079 - DNA, 25 bp, Artificial sequence
  SiRNA target sequence
ttgaaaataaaataaatgcaggaaa

SEQ ID NO: 60080 - DNA, 25 bp, Artificial sequence
  SiRNA target sequence
tgaaaataaaataaatgcaggaaaa

SEQ ID NO: 60081 - DNA, 25 bp, Artificial sequence
  SiRNA target sequence
gaaaataaaataaatgcaggaaaaa

SEQ ID NO: 60082 - DNA, 25 bp, Artificial sequence
  SiRNA target sequence
aaaataaaataaatgcaggaaaaag

SEQ ID NO: 60083 - DNA, 25 bp, Artificial sequence
  SiRNA target sequence
aaataaaataaatgcaggaaaaagt

SEQ ID NO: 60084 - DNA, 25 bp, Artificial sequence
  SiRNA target sequence
aataaaataaatgcaggaaaaagta

SEQ ID NO: 60085 - DNA, 25 bp, Artificial sequence
  SiRNA target sequence
ataaaataaatgcaggaaaaagtat

SEQ ID NO: 60086 - DNA, 25 bp, Artificial sequence
  SiRNA target sequence
taaaataaatgcaggaaaaagtata

SEQ ID NO: 60087 - DNA, 25 bp, Artificial sequence
  SiRNA target sequence
aaaataaatgcaggaaaaagtatat

SEQ ID NO: 60088 - DNA, 25 bp, Artificial sequence
  SiRNA target sequence
aaataaatgcaggaaaaagtatatt

SEQ ID NO: 60089 - DNA, 25 bp, Artificial sequence
  SiRNA target sequence
aataaatgcaggaaaaagtatattt

SEQ ID NO: 60090 - DNA, 25 bp, Artificial sequence
  SiRNA target sequence
ataaatgcaggaaaaagtatattta

SEQ ID NO: 60091 - DNA, 25 bp, Artificial sequence
  SiRNA target sequence
taaatgcaggaaaaagtatatttaa

SEQ ID NO: 60092 - DNA, 25 bp, Artificial sequence
  SiRNA target sequence
aaatgcaggaaaaagtatatttaaa

SEQ ID NO: 60093 - DNA, 25 bp, Artificial sequence
  SiRNA target sequence
aatgcaggaaaaagtatatttaaat

SEQ ID NO: 60094 - DNA, 25 bp, Artificial sequence
  SiRNA target sequence
atgcaggaaaaagtatatttaaata

SEQ ID NO: 60095 - DNA, 25 bp, Artificial sequence
  SiRNA target sequence
tgcaggaaaaagtatatttaaatat

SEQ ID NO: 60096 - DNA, 25 bp, Artificial sequence
  SiRNA target sequence
gcaggaaaaagtatatttaaatata

SEQ ID NO: 60097 - DNA, 25 bp, Artificial sequence
  SiRNA target sequence
caggaaaaagtatatttaaatatat

SEQ ID NO: 60098 - DNA, 25 bp, Artificial sequence
  SiRNA target sequence
aggaaaaagtatatttaaatatatt

SEQ ID NO: 60099 - DNA, 25 bp, Artificial sequence
  SiRNA target sequence
ggaaaaagtatatttaaatatattt

SEQ ID NO: 60100 - DNA, 25 bp, Artificial sequence
  SiRNA target sequence
gaaaaagtatatttaaatatatttt

SEQ ID NO: 60101 - DNA, 25 bp, Artificial sequence
  SiRNA target sequence
aaaaagtatatttaaatatatttta

SEQ ID NO: 60102 - DNA, 25 bp, Artificial sequence
  SiRNA target sequence
aaaagtatatttaaatatattttat

SEQ ID NO: 60103 - DNA, 25 bp, Artificial sequence
  SiRNA target sequence
aaagtatatttaaatatattttatt

SEQ ID NO: 60104 - DNA, 25 bp, Artificial sequence
  SiRNA target sequence
aagtatatttaaatatattttattt

SEQ ID NO: 60105 - DNA, 25 bp, Artificial sequence
  SiRNA target sequence
agtatatttaaatatattttatttt

SEQ ID NO: 60106 - DNA, 25 bp, Artificial sequence
  SiRNA target sequence
gtatatttaaatatattttattttt

SEQ ID NO: 60107 - DNA, 25 bp, Artificial sequence
  SiRNA target sequence
tatatttaaatatattttattttta

SEQ ID NO: 60108 - DNA, 25 bp, Artificial sequence
  SiRNA target sequence
atatttaaatatattttatttttaa

SEQ ID NO: 60109 - DNA, 25 bp, Artificial sequence
  SiRNA target sequence
tatttaaatatattttatttttaac

SEQ ID NO: 60110 - DNA, 25 bp, Artificial sequence
  SiRNA target sequence
atttaaatatattttatttttaact

SEQ ID NO: 60111 - DNA, 25 bp, Artificial sequence
  SiRNA target sequence
tttaaatatattttatttttaactt

SEQ ID NO: 60112 - DNA, 25 bp, Artificial sequence
  SiRNA target sequence
ttaaatatattttatttttaacttc

SEQ ID NO: 60113 - DNA, 25 bp, Artificial sequence
  SiRNA target sequence
taaatatattttatttttaacttca

SEQ ID NO: 60114 - DNA, 25 bp, Artificial sequence
  SiRNA target sequence
aaatatattttatttttaacttcat

SEQ ID NO: 60115 - DNA, 25 bp, Artificial sequence
  SiRNA target sequence
aatatattttatttttaacttcatc

SEQ ID NO: 60116 - DNA, 25 bp, Artificial sequence
  SiRNA target sequence
atatattttatttttaacttcatca

SEQ ID NO: 60117 - DNA, 25 bp, Artificial sequence
  SiRNA target sequence
tatattttatttttaacttcatcaa

SEQ ID NO: 60118 - DNA, 25 bp, Artificial sequence
  SiRNA target sequence
atattttatttttaacttcatcaat

SEQ ID NO: 60119 - DNA, 25 bp, Artificial sequence
  SiRNA target sequence
tattttatttttaacttcatcaata

SEQ ID NO: 60120 - DNA, 25 bp, Artificial sequence
  SiRNA target sequence
attttatttttaacttcatcaatag

SEQ ID NO: 60121 - DNA, 25 bp, Artificial sequence
  SiRNA target sequence
ttttatttttaacttcatcaatagt

SEQ ID NO: 60122 - DNA, 25 bp, Artificial sequence
  SiRNA target sequence
tttatttttaacttcatcaatagta

SEQ ID NO: 60123 - DNA, 25 bp, Artificial sequence
  SiRNA target sequence
ttatttttaacttcatcaatagtat

SEQ ID NO: 60124 - DNA, 25 bp, Artificial sequence
  SiRNA target sequence
tatttttaacttcatcaatagtatt

SEQ ID NO: 60125 - DNA, 25 bp, Artificial sequence
  SiRNA target sequence
atttttaacttcatcaatagtatta

SEQ ID NO: 60126 - DNA, 25 bp, Artificial sequence
  SiRNA target sequence
tttttaacttcatcaatagtattaa

SEQ ID NO: 60127 - DNA, 25 bp, Artificial sequence
  SiRNA target sequence
ttttaacttcatcaatagtattaag

SEQ ID NO: 60128 - DNA, 25 bp, Artificial sequence
  SiRNA target sequence
tttaacttcatcaatagtattaaga

SEQ ID NO: 60129 - DNA, 25 bp, Artificial sequence
  SiRNA target sequence
ttaacttcatcaatagtattaagac

SEQ ID NO: 60130 - DNA, 25 bp, Artificial sequence
  SiRNA target sequence
taacttcatcaatagtattaagaca

SEQ ID NO: 60131 - DNA, 25 bp, Artificial sequence
  SiRNA target sequence
aacttcatcaatagtattaagacaa

SEQ ID NO: 60132 - DNA, 25 bp, Artificial sequence
  SiRNA target sequence
acttcatcaatagtattaagacaaa

SEQ ID NO: 60133 - DNA, 25 bp, Artificial sequence
  SiRNA target sequence
cttcatcaatagtattaagacaaat

SEQ ID NO: 60134 - DNA, 25 bp, Artificial sequence
  SiRNA target sequence
ttcatcaatagtattaagacaaatt

SEQ ID NO: 60135 - DNA, 25 bp, Artificial sequence
  SiRNA target sequence
tcatcaatagtattaagacaaatta

SEQ ID NO: 60136 - DNA, 25 bp, Artificial sequence
  SiRNA target sequence
catcaatagtattaagacaaattaa

SEQ ID NO: 60137 - DNA, 25 bp, Artificial sequence
  SiRNA target sequence
atcaatagtattaagacaaattaat

SEQ ID NO: 60138 - DNA, 25 bp, Artificial sequence
  SiRNA target sequence
tcaatagtattaagacaaattaatg

SEQ ID NO: 60139 - DNA, 25 bp, Artificial sequence
  SiRNA target sequence
caatagtattaagacaaattaatga

SEQ ID NO: 60140 - DNA, 25 bp, Artificial sequence
  SiRNA target sequence
aatagtattaagacaaattaatgat

SEQ ID NO: 60141 - DNA, 25 bp, Artificial sequence
  SiRNA target sequence
atagtattaagacaaattaatgata

SEQ ID NO: 60142 - DNA, 25 bp, Artificial sequence
  SiRNA target sequence
tagtattaagacaaattaatgatat

SEQ ID NO: 60143 - DNA, 25 bp, Artificial sequence
  SiRNA target sequence
agtattaagacaaattaatgatatt

SEQ ID NO: 60144 - DNA, 25 bp, Artificial sequence
  SiRNA target sequence
gtattaagacaaattaatgatattg

SEQ ID NO: 60145 - DNA, 25 bp, Artificial sequence
  SiRNA target sequence
tattaagacaaattaatgatattgt

SEQ ID NO: 60146 - DNA, 25 bp, Artificial sequence
  SiRNA target sequence
attaagacaaattaatgatattgtg

SEQ ID NO: 60147 - DNA, 25 bp, Artificial sequence
  SiRNA target sequence
ttaagacaaattaatgatattgtgt

SEQ ID NO: 60148 - DNA, 25 bp, Artificial sequence
  SiRNA target sequence
taagacaaattaatgatattgtgtt

SEQ ID NO: 60149 - DNA, 25 bp, Artificial sequence
  SiRNA target sequence
aagacaaattaatgatattgtgttt

SEQ ID NO: 60150 - DNA, 25 bp, Artificial sequence
  SiRNA target sequence
agacaaattaatgatattgtgttta

SEQ ID NO: 60151 - DNA, 25 bp, Artificial sequence
  SiRNA target sequence
gacaaattaatgatattgtgtttag

SEQ ID NO: 60152 - DNA, 25 bp, Artificial sequence
  SiRNA target sequence
acaaattaatgatattgtgtttagc

SEQ ID NO: 60153 - DNA, 25 bp, Artificial sequence
  SiRNA target sequence
caaattaatgatattgtgtttagcg

SEQ ID NO: 60154 - DNA, 25 bp, Artificial sequence
  SiRNA target sequence
aaattaatgatattgtgtttagcgg

SEQ ID NO: 60155 - DNA, 25 bp, Artificial sequence
  SiRNA target sequence
aattaatgatattgtgtttagcggg

SEQ ID NO: 60156 - DNA, 25 bp, Artificial sequence
  SiRNA target sequence
attaatgatattgtgtttagcgggc

SEQ ID NO: 60157 - DNA, 25 bp, Artificial sequence
  SiRNA target sequence
ttaatgatattgtgtttagcgggcc

SEQ ID NO: 60158 - DNA, 25 bp, Artificial sequence
  SiRNA target sequence
taatgatattgtgtttagcgggcca

SEQ ID NO: 60159 - DNA, 25 bp, Artificial sequence
  SiRNA target sequence
aatgatattgtgtttagcgggccaa

SEQ ID NO: 60160 - DNA, 25 bp, Artificial sequence
  SiRNA target sequence
atgatattgtgtttagcgggccaat

SEQ ID NO: 60161 - DNA, 25 bp, Artificial sequence
  SiRNA target sequence
tgatattgtgtttagcgggccaata

SEQ ID NO: 60162 - DNA, 25 bp, Artificial sequence
  SiRNA target sequence
gatattgtgtttagcgggccaatac

SEQ ID NO: 60163 - DNA, 25 bp, Artificial sequence
  SiRNA target sequence
atattgtgtttagcgggccaataca

SEQ ID NO: 60164 - DNA, 25 bp, Artificial sequence
  SiRNA target sequence
tattgtgtttagcgggccaatacaa

SEQ ID NO: 60165 - DNA, 25 bp, Artificial sequence
  SiRNA target sequence
attgtgtttagcgggccaatacaat

SEQ ID NO: 60166 - DNA, 25 bp, Artificial sequence
  SiRNA target sequence
ttgtgtttagcgggccaatacaatt

SEQ ID NO: 60167 - DNA, 25 bp, Artificial sequence
  SiRNA target sequence
tgtgtttagcgggccaatacaattt

SEQ ID NO: 60168 - DNA, 25 bp, Artificial sequence
  SiRNA target sequence
gtgtttagcgggccaatacaatttt

SEQ ID NO: 60169 - DNA, 25 bp, Artificial sequence
  SiRNA target sequence
tgtttagcgggccaatacaattttt

SEQ ID NO: 60170 - DNA, 25 bp, Artificial sequence
  SiRNA target sequence
gtttagcgggccaatacaattttta

SEQ ID NO: 60171 - DNA, 25 bp, Artificial sequence
  SiRNA target sequence
tttagcgggccaatacaatttttat

SEQ ID NO: 60172 - DNA, 25 bp, Artificial sequence
  SiRNA target sequence
ttagcgggccaatacaatttttata

SEQ ID NO: 60173 - DNA, 25 bp, Artificial sequence
  SiRNA target sequence
tagcgggccaatacaatttttatat

SEQ ID NO: 60174 - DNA, 25 bp, Artificial sequence
  SiRNA target sequence
agcgggccaatacaatttttatata

SEQ ID NO: 60175 - DNA, 25 bp, Artificial sequence
  SiRNA target sequence
gcgggccaatacaatttttatataa

SEQ ID NO: 60176 - DNA, 25 bp, Artificial sequence
  SiRNA target sequence
cgggccaatacaatttttatataaa

SEQ ID NO: 60177 - DNA, 25 bp, Artificial sequence
  SiRNA target sequence
gggccaatacaatttttatataaaa

SEQ ID NO: 60178 - DNA, 25 bp, Artificial sequence
  SiRNA target sequence
ggccaatacaatttttatataaaat

SEQ ID NO: 60179 - DNA, 25 bp, Artificial sequence
  SiRNA target sequence
gccaatacaatttttatataaaatt

SEQ ID NO: 60180 - DNA, 25 bp, Artificial sequence
  SiRNA target sequence
ccaatacaatttttatataaaattg

SEQ ID NO: 60181 - DNA, 25 bp, Artificial sequence
  SiRNA target sequence
caatacaatttttatataaaattgt

SEQ ID NO: 60182 - DNA, 25 bp, Artificial sequence
  SiRNA target sequence
aatacaatttttatataaaattgtt

SEQ ID NO: 60183 - DNA, 25 bp, Artificial sequence
  SiRNA target sequence
atacaatttttatataaaattgttg

SEQ ID NO: 60184 - DNA, 25 bp, Artificial sequence
  SiRNA target sequence
tacaatttttatataaaattgttgg

SEQ ID NO: 60185 - DNA, 25 bp, Artificial sequence
  SiRNA target sequence
acaatttttatataaaattgttgga

SEQ ID NO: 60186 - DNA, 25 bp, Artificial sequence
  SiRNA target sequence
caatttttatataaaattgttggag

SEQ ID NO: 60187 - DNA, 25 bp, Artificial sequence
  SiRNA target sequence
aatttttatataaaattgttggagt

SEQ ID NO: 60188 - DNA, 25 bp, Artificial sequence
  SiRNA target sequence
atttttatataaaattgttggagtt

SEQ ID NO: 60189 - DNA, 25 bp, Artificial sequence
  SiRNA target sequence
tttttatataaaattgttggagttg

SEQ ID NO: 60190 - DNA, 25 bp, Artificial sequence
  SiRNA target sequence
ttttatataaaattgttggagttga

SEQ ID NO: 60191 - DNA, 25 bp, Artificial sequence
  SiRNA target sequence
tttatataaaattgttggagttgaa

SEQ ID NO: 60192 - DNA, 25 bp, Artificial sequence
  SiRNA target sequence
ttatataaaattgttggagttgaag

SEQ ID NO: 60193 - DNA, 25 bp, Artificial sequence
  SiRNA target sequence
tatataaaattgttggagttgaagc

SEQ ID NO: 60194 - DNA, 25 bp, Artificial sequence
  SiRNA target sequence
atataaaattgttggagttgaagca

SEQ ID NO: 60195 - DNA, 25 bp, Artificial sequence
  SiRNA target sequence
tataaaattgttggagttgaagcat

SEQ ID NO: 60196 - DNA, 25 bp, Artificial sequence
  SiRNA target sequence
ataaaattgttggagttgaagcatt

SEQ ID NO: 60197 - DNA, 25 bp, Artificial sequence
  SiRNA target sequence
taaaattgttggagttgaagcattt

SEQ ID NO: 60198 - DNA, 25 bp, Artificial sequence
  SiRNA target sequence
aaaattgttggagttgaagcatttt

SEQ ID NO: 60199 - DNA, 25 bp, Artificial sequence
  SiRNA target sequence
aaattgttggagttgaagcatttta

SEQ ID NO: 60200 - DNA, 25 bp, Artificial sequence
  SiRNA target sequence
aattgttggagttgaagcattttat

SEQ ID NO: 60201 - DNA, 25 bp, Artificial sequence
  SiRNA target sequence
attgttggagttgaagcattttatc

SEQ ID NO: 60202 - DNA, 25 bp, Artificial sequence
  SiRNA target sequence
ttgttggagttgaagcattttatca

SEQ ID NO: 60203 - DNA, 25 bp, Artificial sequence
  SiRNA target sequence
tgttggagttgaagcattttatcat

SEQ ID NO: 60204 - DNA, 25 bp, Artificial sequence
  SiRNA target sequence
gttggagttgaagcattttatcatt

SEQ ID NO: 60205 - DNA, 25 bp, Artificial sequence
  SiRNA target sequence
ttggagttgaagcattttatcatta

SEQ ID NO: 60206 - DNA, 25 bp, Artificial sequence
  SiRNA target sequence
tggagttgaagcattttatcattac

SEQ ID NO: 60207 - DNA, 25 bp, Artificial sequence
  SiRNA target sequence
ggagttgaagcattttatcattaca

SEQ ID NO: 60208 - DNA, 25 bp, Artificial sequence
  SiRNA target sequence
gagttgaagcattttatcattacat

SEQ ID NO: 60209 - DNA, 25 bp, Artificial sequence
  SiRNA target sequence
agttgaagcattttatcattacatt

SEQ ID NO: 60210 - DNA, 25 bp, Artificial sequence
  SiRNA target sequence
gttgaagcattttatcattacattt

SEQ ID NO: 60211 - DNA, 25 bp, Artificial sequence
  SiRNA target sequence
ttgaagcattttatcattacatttc

SEQ ID NO: 60212 - DNA, 25 bp, Artificial sequence
  SiRNA target sequence
tgaagcattttatcattacatttca

SEQ ID NO: 60213 - DNA, 25 bp, Artificial sequence
  SiRNA target sequence
gaagcattttatcattacatttcat

SEQ ID NO: 60214 - DNA, 25 bp, Artificial sequence
  SiRNA target sequence
aagcattttatcattacatttcatt

SEQ ID NO: 60215 - DNA, 25 bp, Artificial sequence
  SiRNA target sequence
agcattttatcattacatttcatta

SEQ ID NO: 60216 - DNA, 25 bp, Artificial sequence
  SiRNA target sequence
gcattttatcattacatttcattaa

SEQ ID NO: 60217 - DNA, 25 bp, Artificial sequence
  SiRNA target sequence
cattttatcattacatttcattaaa

SEQ ID NO: 60218 - DNA, 25 bp, Artificial sequence
  SiRNA target sequence
attttatcattacatttcattaaac

SEQ ID NO: 60219 - DNA, 25 bp, Artificial sequence
  SiRNA target sequence
ttttatcattacatttcattaaact

SEQ ID NO: 60220 - DNA, 25 bp, Artificial sequence
  SiRNA target sequence
tttatcattacatttcattaaactt

SEQ ID NO: 60221 - DNA, 25 bp, Artificial sequence
  SiRNA target sequence
ttatcattacatttcattaaactta

SEQ ID NO: 60222 - DNA, 25 bp, Artificial sequence
  SiRNA target sequence
tatcattacatttcattaaacttag

SEQ ID NO: 60223 - DNA, 25 bp, Artificial sequence
  SiRNA target sequence
atcattacatttcattaaacttaga

SEQ ID NO: 60224 - DNA, 25 bp, Artificial sequence
  SiRNA target sequence
tcattacatttcattaaacttagaa

SEQ ID NO: 60225 - DNA, 25 bp, Artificial sequence
  SiRNA target sequence
cattacatttcattaaacttagaaa

SEQ ID NO: 60226 - DNA, 25 bp, Artificial sequence
  SiRNA target sequence
attacatttcattaaacttagaaaa

SEQ ID NO: 60227 - DNA, 25 bp, Artificial sequence
  SiRNA target sequence
ttacatttcattaaacttagaaaat

SEQ ID NO: 60228 - DNA, 25 bp, Artificial sequence
  SiRNA target sequence
tacatttcattaaacttagaaaatt

SEQ ID NO: 60229 - DNA, 25 bp, Artificial sequence
  SiRNA target sequence
acatttcattaaacttagaaaattt

SEQ ID NO: 60230 - DNA, 25 bp, Artificial sequence
  SiRNA target sequence
catttcattaaacttagaaaatttt

SEQ ID NO: 60231 - DNA, 25 bp, Artificial sequence
  SiRNA target sequence
atttcattaaacttagaaaatttta

SEQ ID NO: 60232 - DNA, 25 bp, Artificial sequence
  SiRNA target sequence
tttcattaaacttagaaaattttaa

SEQ ID NO: 60233 - DNA, 25 bp, Artificial sequence
  SiRNA target sequence
ttcattaaacttagaaaattttaac

SEQ ID NO: 60234 - DNA, 25 bp, Artificial sequence
  SiRNA target sequence
tcattaaacttagaaaattttaaca

SEQ ID NO: 60235 - DNA, 25 bp, Artificial sequence
  SiRNA target sequence
cattaaacttagaaaattttaacaa

SEQ ID NO: 60236 - DNA, 25 bp, Artificial sequence
  SiRNA target sequence
attaaacttagaaaattttaacaaa

SEQ ID NO: 60237 - DNA, 25 bp, Artificial sequence
  SiRNA target sequence
ttaaacttagaaaattttaacaaaa

SEQ ID NO: 60238 - DNA, 25 bp, Artificial sequence
  SiRNA target sequence
taaacttagaaaattttaacaaaat

SEQ ID NO: 60239 - DNA, 25 bp, Artificial sequence
  SiRNA target sequence
aaacttagaaaattttaacaaaata

SEQ ID NO: 60240 - DNA, 25 bp, Artificial sequence
  SiRNA target sequence
aacttagaaaattttaacaaaatag

SEQ ID NO: 60241 - DNA, 25 bp, Artificial sequence
  SiRNA target sequence
acttagaaaattttaacaaaatagg

SEQ ID NO: 60242 - DNA, 25 bp, Artificial sequence
  SiRNA target sequence
cttagaaaattttaacaaaatagga

SEQ ID NO: 60243 - DNA, 25 bp, Artificial sequence
  SiRNA target sequence
ttagaaaattttaacaaaataggaa

SEQ ID NO: 60244 - DNA, 25 bp, Artificial sequence
  SiRNA target sequence
tagaaaattttaacaaaataggaag

SEQ ID NO: 60245 - DNA, 25 bp, Artificial sequence
  SiRNA target sequence
agaaaattttaacaaaataggaagt

SEQ ID NO: 60246 - DNA, 25 bp, Artificial sequence
  SiRNA target sequence
gaaaattttaacaaaataggaagtg

SEQ ID NO: 60247 - DNA, 25 bp, Artificial sequence
  SiRNA target sequence
aaaattttaacaaaataggaagtgg

SEQ ID NO: 60248 - DNA, 25 bp, Artificial sequence
  SiRNA target sequence
aaattttaacaaaataggaagtgga

SEQ ID NO: 60249 - DNA, 25 bp, Artificial sequence
  SiRNA target sequence
aattttaacaaaataggaagtggag

SEQ ID NO: 60250 - DNA, 25 bp, Artificial sequence
  SiRNA target sequence
attttaacaaaataggaagtggaga

SEQ ID NO: 60251 - DNA, 25 bp, Artificial sequence
  SiRNA target sequence
ttttaacaaaataggaagtggagag

SEQ ID NO: 60252 - DNA, 25 bp, Artificial sequence
  SiRNA target sequence
tttaacaaaataggaagtggagaga

SEQ ID NO: 60253 - DNA, 25 bp, Artificial sequence
  SiRNA target sequence
ttaacaaaataggaagtggagagat

SEQ ID NO: 60254 - DNA, 25 bp, Artificial sequence
  SiRNA target sequence
taacaaaataggaagtggagagata

SEQ ID NO: 60255 - DNA, 25 bp, Artificial sequence
  SiRNA target sequence
aacaaaataggaagtggagagatac

SEQ ID NO: 60256 - DNA, 25 bp, Artificial sequence
  SiRNA target sequence
acaaaataggaagtggagagataca

SEQ ID NO: 60257 - DNA, 25 bp, Artificial sequence
  SiRNA target sequence
caaaataggaagtggagagatacaa

SEQ ID NO: 60258 - DNA, 25 bp, Artificial sequence
  SiRNA target sequence
aaaataggaagtggagagatacaaa

SEQ ID NO: 60259 - DNA, 25 bp, Artificial sequence
  SiRNA target sequence
aaataggaagtggagagatacaaat

SEQ ID NO: 60260 - DNA, 25 bp, Artificial sequence
  SiRNA target sequence
aataggaagtggagagatacaaatg

SEQ ID NO: 60261 - DNA, 25 bp, Artificial sequence
  SiRNA target sequence
ataggaagtggagagatacaaatga

SEQ ID NO: 60262 - DNA, 25 bp, Artificial sequence
  SiRNA target sequence
taggaagtggagagatacaaatgat

SEQ ID NO: 60263 - DNA, 25 bp, Artificial sequence
  SiRNA target sequence
aggaagtggagagatacaaatgatt

SEQ ID NO: 60264 - DNA, 25 bp, Artificial sequence
  SiRNA target sequence
ggaagtggagagatacaaatgatta

SEQ ID NO: 60265 - DNA, 25 bp, Artificial sequence
  SiRNA target sequence
gaagtggagagatacaaatgattat

SEQ ID NO: 60266 - DNA, 25 bp, Artificial sequence
  SiRNA target sequence
aagtggagagatacaaatgattatt

SEQ ID NO: 60267 - DNA, 25 bp, Artificial sequence
  SiRNA target sequence
agtggagagatacaaatgattattg

SEQ ID NO: 60268 - DNA, 25 bp, Artificial sequence
  SiRNA target sequence
gtggagagatacaaatgattattga

SEQ ID NO: 60269 - DNA, 25 bp, Artificial sequence
  SiRNA target sequence
tggagagatacaaatgattattgag

SEQ ID NO: 60270 - DNA, 25 bp, Artificial sequence
  SiRNA target sequence
ggagagatacaaatgattattgagc

SEQ ID NO: 60271 - DNA, 25 bp, Artificial sequence
  SiRNA target sequence
gagagatacaaatgattattgagcg

SEQ ID NO: 60272 - DNA, 25 bp, Artificial sequence
  SiRNA target sequence
agagatacaaatgattattgagcgg

SEQ ID NO: 60273 - DNA, 25 bp, Artificial sequence
  SiRNA target sequence
gagatacaaatgattattgagcgga

SEQ ID NO: 60274 - DNA, 25 bp, Artificial sequence
  SiRNA target sequence
agatacaaatgattattgagcggaa

SEQ ID NO: 60275 - DNA, 25 bp, Artificial sequence
  SiRNA target sequence
gatacaaatgattattgagcggaaa

SEQ ID NO: 60276 - DNA, 25 bp, Artificial sequence
  SiRNA target sequence
atacaaatgattattgagcggaaaa

SEQ ID NO: 60277 - DNA, 25 bp, Artificial sequence
  SiRNA target sequence
tacaaatgattattgagcggaaaag

SEQ ID NO: 60278 - DNA, 25 bp, Artificial sequence
  SiRNA target sequence
acaaatgattattgagcggaaaagt

SEQ ID NO: 60279 - DNA, 25 bp, Artificial sequence
  SiRNA target sequence
caaatgattattgagcggaaaagta

SEQ ID NO: 60280 - DNA, 25 bp, Artificial sequence
  SiRNA target sequence
aaatgattattgagcggaaaagtag

SEQ ID NO: 60281 - DNA, 25 bp, Artificial sequence
  SiRNA target sequence
aatgattattgagcggaaaagtaga

SEQ ID NO: 60282 - DNA, 25 bp, Artificial sequence
  SiRNA target sequence
atgattattgagcggaaaagtagag

SEQ ID NO: 60283 - DNA, 25 bp, Artificial sequence
  SiRNA target sequence
tgattattgagcggaaaagtagagc

SEQ ID NO: 60284 - DNA, 25 bp, Artificial sequence
  SiRNA target sequence
gattattgagcggaaaagtagagca

SEQ ID NO: 60285 - DNA, 25 bp, Artificial sequence
  SiRNA target sequence
attattgagcggaaaagtagagcat

SEQ ID NO: 60286 - DNA, 25 bp, Artificial sequence
  SiRNA target sequence
ttattgagcggaaaagtagagcata

SEQ ID NO: 60287 - DNA, 25 bp, Artificial sequence
  SiRNA target sequence
tattgagcggaaaagtagagcatat

SEQ ID NO: 60288 - DNA, 25 bp, Artificial sequence
  SiRNA target sequence
attgagcggaaaagtagagcatatg

SEQ ID NO: 60289 - DNA, 25 bp, Artificial sequence
  SiRNA target sequence
ttgagcggaaaagtagagcatatgg

SEQ ID NO: 60290 - DNA, 25 bp, Artificial sequence
  SiRNA target sequence
tgagcggaaaagtagagcatatggt

SEQ ID NO: 60291 - DNA, 25 bp, Artificial sequence
  SiRNA target sequence
gagcggaaaagtagagcatatggtg

SEQ ID NO: 60292 - DNA, 25 bp, Artificial sequence
  SiRNA target sequence
agcggaaaagtagagcatatggtga

SEQ ID NO: 60293 - DNA, 25 bp, Artificial sequence
  SiRNA target sequence
gcggaaaagtagagcatatggtgac

SEQ ID NO: 60294 - DNA, 25 bp, Artificial sequence
  SiRNA target sequence
cggaaaagtagagcatatggtgaca

SEQ ID NO: 60295 - DNA, 25 bp, Artificial sequence
  SiRNA target sequence
ggaaaagtagagcatatggtgacat

SEQ ID NO: 60296 - DNA, 25 bp, Artificial sequence
  SiRNA target sequence
gaaaagtagagcatatggtgacata

SEQ ID NO: 60297 - DNA, 25 bp, Artificial sequence
  SiRNA target sequence
aaaagtagagcatatggtgacatac

SEQ ID NO: 60298 - DNA, 25 bp, Artificial sequence
  SiRNA target sequence
aaagtagagcatatggtgacatact

SEQ ID NO: 60299 - DNA, 25 bp, Artificial sequence
  SiRNA target sequence
aagtagagcatatggtgacatacta

SEQ ID NO: 60300 - DNA, 25 bp, Artificial sequence
  SiRNA target sequence
agtagagcatatggtgacatactag

SEQ ID NO: 60301 - DNA, 25 bp, Artificial sequence
  SiRNA target sequence
gtagagcatatggtgacatactaga

SEQ ID NO: 60302 - DNA, 25 bp, Artificial sequence
  SiRNA target sequence
tagagcatatggtgacatactagaa

SEQ ID NO: 60303 - DNA, 25 bp, Artificial sequence
  SiRNA target sequence
agagcatatggtgacatactagaac

SEQ ID NO: 60304 - DNA, 25 bp, Artificial sequence
  SiRNA target sequence
gagcatatggtgacatactagaact

SEQ ID NO: 60305 - DNA, 25 bp, Artificial sequence
  SiRNA target sequence
agcatatggtgacatactagaacta

SEQ ID NO: 60306 - DNA, 25 bp, Artificial sequence
  SiRNA target sequence
gcatatggtgacatactagaactaa

SEQ ID NO: 60307 - DNA, 25 bp, Artificial sequence
  SiRNA target sequence
catatggtgacatactagaactaac

SEQ ID NO: 60308 - DNA, 25 bp, Artificial sequence
  SiRNA target sequence
atatggtgacatactagaactaact

SEQ ID NO: 60309 - DNA, 25 bp, Artificial sequence
  SiRNA target sequence
tatggtgacatactagaactaacta

SEQ ID NO: 60310 - DNA, 25 bp, Artificial sequence
  SiRNA target sequence
atggtgacatactagaactaactac

SEQ ID NO: 60311 - DNA, 25 bp, Artificial sequence
  SiRNA target sequence
tggtgacatactagaactaactact

SEQ ID NO: 60312 - DNA, 25 bp, Artificial sequence
  SiRNA target sequence
ggtgacatactagaactaactactc

SEQ ID NO: 60313 - DNA, 25 bp, Artificial sequence
  SiRNA target sequence
gtgacatactagaactaactactct

SEQ ID NO: 60314 - DNA, 25 bp, Artificial sequence
  SiRNA target sequence
tgacatactagaactaactactctc

SEQ ID NO: 60315 - DNA, 25 bp, Artificial sequence
  SiRNA target sequence
gacatactagaactaactactctct

SEQ ID NO: 60316 - DNA, 25 bp, Artificial sequence
  SiRNA target sequence
acatactagaactaactactctctc

SEQ ID NO: 60317 - DNA, 25 bp, Artificial sequence
  SiRNA target sequence
catactagaactaactactctctcg

SEQ ID NO: 60318 - DNA, 25 bp, Artificial sequence
  SiRNA target sequence
atactagaactaactactctctcgg

SEQ ID NO: 60319 - DNA, 25 bp, Artificial sequence
  SiRNA target sequence
tactagaactaactactctctcggc

SEQ ID NO: 60320 - DNA, 25 bp, Artificial sequence
  SiRNA target sequence
actagaactaactactctctcggcc

SEQ ID NO: 60321 - DNA, 25 bp, Artificial sequence
  SiRNA target sequence
ctagaactaactactctctcggccg

SEQ ID NO: 60322 - DNA, 25 bp, Artificial sequence
  SiRNA target sequence
tagaactaactactctctcggccgt

SEQ ID NO: 60323 - DNA, 25 bp, Artificial sequence
  SiRNA target sequence
agaactaactactctctcggccgta

SEQ ID NO: 60324 - DNA, 25 bp, Artificial sequence
  SiRNA target sequence
gaactaactactctctcggccgtac

SEQ ID NO: 60325 - DNA, 25 bp, Artificial sequence
  SiRNA target sequence
aactaactactctctcggccgtacc

SEQ ID NO: 60326 - DNA, 25 bp, Artificial sequence
  SiRNA target sequence
actaactactctctcggccgtacca

SEQ ID NO: 60327 - DNA, 25 bp, Artificial sequence
  SiRNA target sequence
ctaactactctctcggccgtaccaa

SEQ ID NO: 60328 - DNA, 25 bp, Artificial sequence
  SiRNA target sequence
taactactctctcggccgtaccaac

SEQ ID NO: 60329 - DNA, 25 bp, Artificial sequence
  SiRNA target sequence
aactactctctcggccgtaccaacc

SEQ ID NO: 60330 - DNA, 25 bp, Artificial sequence
  SiRNA target sequence
actactctctcggccgtaccaacct

SEQ ID NO: 60331 - DNA, 25 bp, Artificial sequence
  SiRNA target sequence
ctactctctcggccgtaccaacctg

SEQ ID NO: 60332 - DNA, 25 bp, Artificial sequence
  SiRNA target sequence
tactctctcggccgtaccaacctgt

SEQ ID NO: 60333 - DNA, 25 bp, Artificial sequence
  SiRNA target sequence
actctctcggccgtaccaacctgta

SEQ ID NO: 60334 - DNA, 25 bp, Artificial sequence
  SiRNA target sequence
ctctctcggccgtaccaacctgtat

SEQ ID NO: 60335 - DNA, 25 bp, Artificial sequence
  SiRNA target sequence
tctctcggccgtaccaacctgtatt

SEQ ID NO: 60336 - DNA, 25 bp, Artificial sequence
  SiRNA target sequence
ctctcggccgtaccaacctgtattg

SEQ ID NO: 60337 - DNA, 25 bp, Artificial sequence
  SiRNA target sequence
tctcggccgtaccaacctgtattgt

SEQ ID NO: 60338 - DNA, 25 bp, Artificial sequence
  SiRNA target sequence
ctcggccgtaccaacctgtattgta

SEQ ID NO: 60339 - DNA, 25 bp, Artificial sequence
  SiRNA target sequence
tcggccgtaccaacctgtattgtag

SEQ ID NO: 60340 - DNA, 25 bp, Artificial sequence
  SiRNA target sequence
cggccgtaccaacctgtattgtagt

SEQ ID NO: 60341 - DNA, 25 bp, Artificial sequence
  SiRNA target sequence
ggccgtaccaacctgtattgtagtt

SEQ ID NO: 60342 - DNA, 25 bp, Artificial sequence
  SiRNA target sequence
gccgtaccaacctgtattgtagtta

SEQ ID NO: 60343 - DNA, 25 bp, Artificial sequence
  SiRNA target sequence
ccgtaccaacctgtattgtagttat

SEQ ID NO: 60344 - DNA, 25 bp, Artificial sequence
  SiRNA target sequence
cgtaccaacctgtattgtagttatt

SEQ ID NO: 60345 - DNA, 25 bp, Artificial sequence
  SiRNA target sequence
gtaccaacctgtattgtagttatta

SEQ ID NO: 60346 - DNA, 25 bp, Artificial sequence
  SiRNA target sequence
taccaacctgtattgtagttattat

SEQ ID NO: 60347 - DNA, 25 bp, Artificial sequence
  SiRNA target sequence
accaacctgtattgtagttattatg

SEQ ID NO: 60348 - DNA, 25 bp, Artificial sequence
  SiRNA target sequence
ccaacctgtattgtagttattatgt

SEQ ID NO: 60349 - DNA, 25 bp, Artificial sequence
  SiRNA target sequence
caacctgtattgtagttattatgtc

SEQ ID NO: 60350 - DNA, 25 bp, Artificial sequence
  SiRNA target sequence
aacctgtattgtagttattatgtcg

SEQ ID NO: 60351 - DNA, 25 bp, Artificial sequence
  SiRNA target sequence
acctgtattgtagttattatgtcgt

SEQ ID NO: 60352 - DNA, 25 bp, Artificial sequence
  SiRNA target sequence
cctgtattgtagttattatgtcgtt

SEQ ID NO: 60353 - DNA, 25 bp, Artificial sequence
  SiRNA target sequence
ctgtattgtagttattatgtcgttt

SEQ ID NO: 60354 - DNA, 25 bp, Artificial sequence
  SiRNA target sequence
tgtattgtagttattatgtcgtttt

SEQ ID NO: 60355 - DNA, 25 bp, Artificial sequence
  SiRNA target sequence
gtattgtagttattatgtcgttttt

SEQ ID NO: 60356 - DNA, 25 bp, Artificial sequence
  SiRNA target sequence
tattgtagttattatgtcgtttttc

SEQ ID NO: 60357 - DNA, 25 bp, Artificial sequence
  SiRNA target sequence
attgtagttattatgtcgtttttct

SEQ ID NO: 60358 - DNA, 25 bp, Artificial sequence
  SiRNA target sequence
ttgtagttattatgtcgtttttctc

SEQ ID NO: 60359 - DNA, 25 bp, Artificial sequence
  SiRNA target sequence
tgtagttattatgtcgtttttctca

SEQ ID NO: 60360 - DNA, 25 bp, Artificial sequence
  SiRNA target sequence
gtagttattatgtcgtttttctcag

SEQ ID NO: 60361 - DNA, 25 bp, Artificial sequence
  SiRNA target sequence
tagttattatgtcgtttttctcagt

SEQ ID NO: 60362 - DNA, 25 bp, Artificial sequence
  SiRNA target sequence
agttattatgtcgtttttctcagta

SEQ ID NO: 60363 - DNA, 25 bp, Artificial sequence
  SiRNA target sequence
gttattatgtcgtttttctcagtat

SEQ ID NO: 60364 - DNA, 25 bp, Artificial sequence
  SiRNA target sequence
ttattatgtcgtttttctcagtata

SEQ ID NO: 60365 - DNA, 25 bp, Artificial sequence
  SiRNA target sequence
tattatgtcgtttttctcagtatat

SEQ ID NO: 60366 - DNA, 25 bp, Artificial sequence
  SiRNA target sequence
attatgtcgtttttctcagtatata

SEQ ID NO: 60367 - DNA, 25 bp, Artificial sequence
  SiRNA target sequence
ttatgtcgtttttctcagtatataa

SEQ ID NO: 60368 - DNA, 25 bp, Artificial sequence
  SiRNA target sequence
tatgtcgtttttctcagtatataaa

SEQ ID NO: 60369 - DNA, 25 bp, Artificial sequence
  SiRNA target sequence
atgtcgtttttctcagtatataaaa

SEQ ID NO: 60370 - DNA, 25 bp, Artificial sequence
  SiRNA target sequence
tgtcgtttttctcagtatataaaaa

SEQ ID NO: 60371 - DNA, 25 bp, Artificial sequence
  SiRNA target sequence
gtcgtttttctcagtatataaaaat

SEQ ID NO: 60372 - DNA, 25 bp, Artificial sequence
  SiRNA target sequence
tcgtttttctcagtatataaaaatt

SEQ ID NO: 60373 - DNA, 25 bp, Artificial sequence
  SiRNA target sequence
cgtttttctcagtatataaaaattt

SEQ ID NO: 60374 - DNA, 25 bp, Artificial sequence
  SiRNA target sequence
gtttttctcagtatataaaaatttg

SEQ ID NO: 60375 - DNA, 25 bp, Artificial sequence
  SiRNA target sequence
tttttctcagtatataaaaatttgg

SEQ ID NO: 60376 - DNA, 25 bp, Artificial sequence
  SiRNA target sequence
ttttctcagtatataaaaatttggg

SEQ ID NO: 60377 - DNA, 25 bp, Artificial sequence
  SiRNA target sequence
tttctcagtatataaaaatttggga

SEQ ID NO: 60378 - DNA, 25 bp, Artificial sequence
  SiRNA target sequence
ttctcagtatataaaaatttgggaa

SEQ ID NO: 60379 - DNA, 25 bp, Artificial sequence
  SiRNA target sequence
tctcagtatataaaaatttgggaag

SEQ ID NO: 60380 - DNA, 25 bp, Artificial sequence
  SiRNA target sequence
ctcagtatataaaaatttgggaaga

SEQ ID NO: 60381 - DNA, 25 bp, Artificial sequence
  SiRNA target sequence
tcagtatataaaaatttgggaagag

SEQ ID NO: 60382 - DNA, 25 bp, Artificial sequence
  SiRNA target sequence
cagtatataaaaatttgggaagaga

SEQ ID NO: 60383 - DNA, 25 bp, Artificial sequence
  SiRNA target sequence
agtatataaaaatttgggaagagat

SEQ ID NO: 60384 - DNA, 25 bp, Artificial sequence
  SiRNA target sequence
gtatataaaaatttgggaagagatg

SEQ ID NO: 60385 - DNA, 25 bp, Artificial sequence
  SiRNA target sequence
tatataaaaatttgggaagagatgc

SEQ ID NO: 60386 - DNA, 25 bp, Artificial sequence
  SiRNA target sequence
atataaaaatttgggaagagatgca

SEQ ID NO: 60387 - DNA, 25 bp, Artificial sequence
  SiRNA target sequence
tataaaaatttgggaagagatgcac

SEQ ID NO: 60388 - DNA, 25 bp, Artificial sequence
  SiRNA target sequence
ataaaaatttgggaagagatgcact

SEQ ID NO: 60389 - DNA, 25 bp, Artificial sequence
  SiRNA target sequence
taaaaatttgggaagagatgcactc

SEQ ID NO: 60390 - DNA, 25 bp, Artificial sequence
  SiRNA target sequence
aaaaatttgggaagagatgcactct

SEQ ID NO: 60391 - DNA, 25 bp, Artificial sequence
  SiRNA target sequence
aaaatttgggaagagatgcactcta

SEQ ID NO: 60392 - DNA, 25 bp, Artificial sequence
  SiRNA target sequence
aaatttgggaagagatgcactctac

SEQ ID NO: 60393 - DNA, 25 bp, Artificial sequence
  SiRNA target sequence
aatttgggaagagatgcactctacg

SEQ ID NO: 60394 - DNA, 25 bp, Artificial sequence
  SiRNA target sequence
atttgggaagagatgcactctacgt

SEQ ID NO: 60395 - DNA, 25 bp, Artificial sequence
  SiRNA target sequence
tttgggaagagatgcactctacgta

SEQ ID NO: 60396 - DNA, 25 bp, Artificial sequence
  SiRNA target sequence
ttgggaagagatgcactctacgtaa

SEQ ID NO: 60397 - DNA, 25 bp, Artificial sequence
  SiRNA target sequence
tgggaagagatgcactctacgtaat

SEQ ID NO: 60398 - DNA, 25 bp, Artificial sequence
  SiRNA target sequence
gggaagagatgcactctacgtaatg

SEQ ID NO: 60399 - DNA, 25 bp, Artificial sequence
  SiRNA target sequence
ggaagagatgcactctacgtaatgt

SEQ ID NO: 60400 - DNA, 25 bp, Artificial sequence
  SiRNA target sequence
gaagagatgcactctacgtaatgtt

SEQ ID NO: 60401 - DNA, 25 bp, Artificial sequence
  SiRNA target sequence
aagagatgcactctacgtaatgttg

SEQ ID NO: 60402 - DNA, 25 bp, Artificial sequence
  SiRNA target sequence
agagatgcactctacgtaatgttgg

SEQ ID NO: 60403 - DNA, 25 bp, Artificial sequence
  SiRNA target sequence
gagatgcactctacgtaatgttggc

SEQ ID NO: 60404 - DNA, 25 bp, Artificial sequence
  SiRNA target sequence
agatgcactctacgtaatgttggct

SEQ ID NO: 60405 - DNA, 25 bp, Artificial sequence
  SiRNA target sequence
gatgcactctacgtaatgttggcta

SEQ ID NO: 60406 - DNA, 25 bp, Artificial sequence
  SiRNA target sequence
atgcactctacgtaatgttggctac

SEQ ID NO: 60407 - DNA, 25 bp, Artificial sequence
  SiRNA target sequence
tgcactctacgtaatgttggctaca

SEQ ID NO: 60408 - DNA, 25 bp, Artificial sequence
  SiRNA target sequence
gcactctacgtaatgttggctacaa

SEQ ID NO: 60409 - DNA, 25 bp, Artificial sequence
  SiRNA target sequence
cactctacgtaatgttggctacaag

SEQ ID NO: 60410 - DNA, 25 bp, Artificial sequence
  SiRNA target sequence
actctacgtaatgttggctacaagt

SEQ ID NO: 60411 - DNA, 25 bp, Artificial sequence
  SiRNA target sequence
ctctacgtaatgttggctacaagtg

SEQ ID NO: 60412 - DNA, 25 bp, Artificial sequence
  SiRNA target sequence
tctacgtaatgttggctacaagtgc

SEQ ID NO: 60413 - DNA, 25 bp, Artificial sequence
  SiRNA target sequence
ctacgtaatgttggctacaagtgcc

SEQ ID NO: 60414 - DNA, 25 bp, Artificial sequence
  SiRNA target sequence
tacgtaatgttggctacaagtgcct

SEQ ID NO: 60415 - DNA, 25 bp, Artificial sequence
  SiRNA target sequence
acgtaatgttggctacaagtgcctt

SEQ ID NO: 60416 - DNA, 25 bp, Artificial sequence
  SiRNA target sequence
cgtaatgttggctacaagtgccttg

SEQ ID NO: 60417 - DNA, 25 bp, Artificial sequence
  SiRNA target sequence
gtaatgttggctacaagtgccttgt

SEQ ID NO: 60418 - DNA, 25 bp, Artificial sequence
  SiRNA target sequence
taatgttggctacaagtgccttgta

SEQ ID NO: 60419 - DNA, 25 bp, Artificial sequence
  SiRNA target sequence
aatgttggctacaagtgccttgtat

SEQ ID NO: 60420 - DNA, 25 bp, Artificial sequence
  SiRNA target sequence
atgttggctacaagtgccttgtatg

SEQ ID NO: 60421 - DNA, 25 bp, Artificial sequence
  SiRNA target sequence
tgttggctacaagtgccttgtatgt

SEQ ID NO: 60422 - DNA, 25 bp, Artificial sequence
  SiRNA target sequence
gttggctacaagtgccttgtatgtg

SEQ ID NO: 60423 - DNA, 25 bp, Artificial sequence
  SiRNA target sequence
ttggctacaagtgccttgtatgtgt

SEQ ID NO: 60424 - DNA, 25 bp, Artificial sequence
  SiRNA target sequence
tggctacaagtgccttgtatgtgta

SEQ ID NO: 60425 - DNA, 25 bp, Artificial sequence
  SiRNA target sequence
ggctacaagtgccttgtatgtgtat

SEQ ID NO: 60426 - DNA, 25 bp, Artificial sequence
  SiRNA target sequence
gctacaagtgccttgtatgtgtatt

SEQ ID NO: 60427 - DNA, 25 bp, Artificial sequence
  SiRNA target sequence
ctacaagtgccttgtatgtgtattt

SEQ ID NO: 60428 - DNA, 25 bp, Artificial sequence
  SiRNA target sequence
tacaagtgccttgtatgtgtatttt

SEQ ID NO: 60429 - DNA, 25 bp, Artificial sequence
  SiRNA target sequence
acaagtgccttgtatgtgtatttta

SEQ ID NO: 60430 - DNA, 25 bp, Artificial sequence
  SiRNA target sequence
caagtgccttgtatgtgtattttac

SEQ ID NO: 60431 - DNA, 25 bp, Artificial sequence
  SiRNA target sequence
aagtgccttgtatgtgtattttaca

SEQ ID NO: 60432 - DNA, 25 bp, Artificial sequence
  SiRNA target sequence
agtgccttgtatgtgtattttacat

SEQ ID NO: 60433 - DNA, 25 bp, Artificial sequence
  SiRNA target sequence
gtgccttgtatgtgtattttacatt

SEQ ID NO: 60434 - DNA, 25 bp, Artificial sequence
  SiRNA target sequence
tgccttgtatgtgtattttacattt

SEQ ID NO: 60435 - DNA, 25 bp, Artificial sequence
  SiRNA target sequence
gccttgtatgtgtattttacatttg

SEQ ID NO: 60436 - DNA, 25 bp, Artificial sequence
  SiRNA target sequence
ccttgtatgtgtattttacatttgt

SEQ ID NO: 60437 - DNA, 25 bp, Artificial sequence
  SiRNA target sequence
cttgtatgtgtattttacatttgta

SEQ ID NO: 60438 - DNA, 25 bp, Artificial sequence
  SiRNA target sequence
ttgtatgtgtattttacatttgtat

SEQ ID NO: 60439 - DNA, 25 bp, Artificial sequence
  SiRNA target sequence
tgtatgtgtattttacatttgtatt

SEQ ID NO: 60440 - DNA, 25 bp, Artificial sequence
  SiRNA target sequence
gtatgtgtattttacatttgtattt

SEQ ID NO: 60441 - DNA, 25 bp, Artificial sequence
  SiRNA target sequence
tatgtgtattttacatttgtatttt

SEQ ID NO: 60442 - DNA, 25 bp, Artificial sequence
  SiRNA target sequence
atgtgtattttacatttgtattttc

SEQ ID NO: 60443 - DNA, 25 bp, Artificial sequence
  SiRNA target sequence
tgtgtattttacatttgtattttca

SEQ ID NO: 60444 - DNA, 25 bp, Artificial sequence
  SiRNA target sequence
gtgtattttacatttgtattttcaa

SEQ ID NO: 60445 - DNA, 25 bp, Artificial sequence
  SiRNA target sequence
tgtattttacatttgtattttcaat

SEQ ID NO: 60446 - DNA, 25 bp, Artificial sequence
  SiRNA target sequence
gtattttacatttgtattttcaata

SEQ ID NO: 60447 - DNA, 25 bp, Artificial sequence
  SiRNA target sequence
tattttacatttgtattttcaatat

SEQ ID NO: 60448 - DNA, 25 bp, Artificial sequence
  SiRNA target sequence
attttacatttgtattttcaatatg

SEQ ID NO: 60449 - DNA, 25 bp, Artificial sequence
  SiRNA target sequence
ttttacatttgtattttcaatatgg

SEQ ID NO: 60450 - DNA, 25 bp, Artificial sequence
  SiRNA target sequence
tttacatttgtattttcaatatgga

SEQ ID NO: 60451 - DNA, 25 bp, Artificial sequence
  SiRNA target sequence
ttacatttgtattttcaatatggag

SEQ ID NO: 60452 - DNA, 25 bp, Artificial sequence
  SiRNA target sequence
tacatttgtattttcaatatggaga

SEQ ID NO: 60453 - DNA, 25 bp, Artificial sequence
  SiRNA target sequence
acatttgtattttcaatatggagaa

SEQ ID NO: 60454 - DNA, 25 bp, Artificial sequence
  SiRNA target sequence
catttgtattttcaatatggagaaa

SEQ ID NO: 60455 - DNA, 25 bp, Artificial sequence
  SiRNA target sequence
atttgtattttcaatatggagaaac

SEQ ID NO: 60456 - DNA, 25 bp, Artificial sequence
  SiRNA target sequence
tttgtattttcaatatggagaaaca

SEQ ID NO: 60457 - DNA, 25 bp, Artificial sequence
  SiRNA target sequence
ttgtattttcaatatggagaaacaa

SEQ ID NO: 60458 - DNA, 25 bp, Artificial sequence
  SiRNA target sequence
tgtattttcaatatggagaaacaat

SEQ ID NO: 60459 - DNA, 25 bp, Artificial sequence
  SiRNA target sequence
gtattttcaatatggagaaacaata

SEQ ID NO: 60460 - DNA, 25 bp, Artificial sequence
  SiRNA target sequence
tattttcaatatggagaaacaatat

SEQ ID NO: 60461 - DNA, 25 bp, Artificial sequence
  SiRNA target sequence
attttcaatatggagaaacaatatt

SEQ ID NO: 60462 - DNA, 25 bp, Artificial sequence
  SiRNA target sequence
ttttcaatatggagaaacaatatta

SEQ ID NO: 60463 - DNA, 25 bp, Artificial sequence
  SiRNA target sequence
tttcaatatggagaaacaatattag

SEQ ID NO: 60464 - DNA, 25 bp, Artificial sequence
  SiRNA target sequence
ttcaatatggagaaacaatattaga

SEQ ID NO: 60465 - DNA, 25 bp, Artificial sequence
  SiRNA target sequence
tcaatatggagaaacaatattagaa

SEQ ID NO: 60466 - DNA, 25 bp, Artificial sequence
  SiRNA target sequence
caatatggagaaacaatattagaag

SEQ ID NO: 60467 - DNA, 25 bp, Artificial sequence
  SiRNA target sequence
aatatggagaaacaatattagaaga

SEQ ID NO: 60468 - DNA, 25 bp, Artificial sequence
  SiRNA target sequence
atatggagaaacaatattagaagac

SEQ ID NO: 60469 - DNA, 25 bp, Artificial sequence
  SiRNA target sequence
tatggagaaacaatattagaagaca

SEQ ID NO: 60470 - DNA, 25 bp, Artificial sequence
  SiRNA target sequence
atggagaaacaatattagaagacaa

SEQ ID NO: 60471 - DNA, 25 bp, Artificial sequence
  SiRNA target sequence
tggagaaacaatattagaagacaat

SEQ ID NO: 60472 - DNA, 25 bp, Artificial sequence
  SiRNA target sequence
ggagaaacaatattagaagacaata

SEQ ID NO: 60473 - DNA, 25 bp, Artificial sequence
  SiRNA target sequence
gagaaacaatattagaagacaatat

SEQ ID NO: 60474 - DNA, 25 bp, Artificial sequence
  SiRNA target sequence
agaaacaatattagaagacaatata

SEQ ID NO: 60475 - DNA, 25 bp, Artificial sequence
  SiRNA target sequence
gaaacaatattagaagacaatataa

SEQ ID NO: 60476 - DNA, 25 bp, Artificial sequence
  SiRNA target sequence
aaacaatattagaagacaatataat

SEQ ID NO: 60477 - DNA, 25 bp, Artificial sequence
  SiRNA target sequence
aacaatattagaagacaatataata

SEQ ID NO: 60478 - DNA, 25 bp, Artificial sequence
  SiRNA target sequence
acaatattagaagacaatataataa

SEQ ID NO: 60479 - DNA, 25 bp, Artificial sequence
  SiRNA target sequence
caatattagaagacaatataataag

SEQ ID NO: 60480 - DNA, 25 bp, Artificial sequence
  SiRNA target sequence
aatattagaagacaatataataagt

SEQ ID NO: 60481 - DNA, 25 bp, Artificial sequence
  SiRNA target sequence
atattagaagacaatataataagtc

SEQ ID NO: 60482 - DNA, 25 bp, Artificial sequence
  SiRNA target sequence
tattagaagacaatataataagtca

SEQ ID NO: 60483 - DNA, 25 bp, Artificial sequence
  SiRNA target sequence
attagaagacaatataataagtcac

SEQ ID NO: 60484 - DNA, 25 bp, Artificial sequence
  SiRNA target sequence
ttagaagacaatataataagtcaca

SEQ ID NO: 60485 - DNA, 25 bp, Artificial sequence
  SiRNA target sequence
tagaagacaatataataagtcacag

SEQ ID NO: 60486 - DNA, 25 bp, Artificial sequence
  SiRNA target sequence
agaagacaatataataagtcacagg

SEQ ID NO: 60487 - DNA, 25 bp, Artificial sequence
  SiRNA target sequence
gaagacaatataataagtcacagga

SEQ ID NO: 60488 - DNA, 25 bp, Artificial sequence
  SiRNA target sequence
aagacaatataataagtcacaggat

SEQ ID NO: 60489 - DNA, 25 bp, Artificial sequence
  SiRNA target sequence
agacaatataataagtcacaggata

SEQ ID NO: 60490 - DNA, 25 bp, Artificial sequence
  SiRNA target sequence
gacaatataataagtcacaggataa

SEQ ID NO: 60491 - DNA, 25 bp, Artificial sequence
  SiRNA target sequence
acaatataataagtcacaggataaa

SEQ ID NO: 60492 - DNA, 25 bp, Artificial sequence
  SiRNA target sequence
caatataataagtcacaggataaat

SEQ ID NO: 60493 - DNA, 25 bp, Artificial sequence
  SiRNA target sequence
aatataataagtcacaggataaatt

SEQ ID NO: 60494 - DNA, 25 bp, Artificial sequence
  SiRNA target sequence
atataataagtcacaggataaatta

SEQ ID NO: 60495 - DNA, 25 bp, Artificial sequence
  SiRNA target sequence
tataataagtcacaggataaattat

SEQ ID NO: 60496 - DNA, 25 bp, Artificial sequence
  SiRNA target sequence
ataataagtcacaggataaattatc

SEQ ID NO: 60497 - DNA, 25 bp, Artificial sequence
  SiRNA target sequence
taataagtcacaggataaattatcg

SEQ ID NO: 60498 - DNA, 25 bp, Artificial sequence
  SiRNA target sequence
aataagtcacaggataaattatcga

SEQ ID NO: 60499 - DNA, 25 bp, Artificial sequence
  SiRNA target sequence
ataagtcacaggataaattatcgaa

SEQ ID NO: 60500 - DNA, 25 bp, Artificial sequence
  SiRNA target sequence
taagtcacaggataaattatcgaat

SEQ ID NO: 60501 - DNA, 25 bp, Artificial sequence
  SiRNA target sequence
aagtcacaggataaattatcgaata

SEQ ID NO: 60502 - DNA, 25 bp, Artificial sequence
  SiRNA target sequence
agtcacaggataaattatcgaataa

SEQ ID NO: 60503 - DNA, 25 bp, Artificial sequence
  SiRNA target sequence
gtcacaggataaattatcgaataaa

SEQ ID NO: 60504 - DNA, 25 bp, Artificial sequence
  SiRNA target sequence
tcacaggataaattatcgaataaat

SEQ ID NO: 60505 - DNA, 25 bp, Artificial sequence
  SiRNA target sequence
cacaggataaattatcgaataaatt

SEQ ID NO: 60506 - DNA, 25 bp, Artificial sequence
  SiRNA target sequence
acaggataaattatcgaataaatta

SEQ ID NO: 60507 - DNA, 25 bp, Artificial sequence
  SiRNA target sequence
caggataaattatcgaataaattac

SEQ ID NO: 60508 - DNA, 25 bp, Artificial sequence
  SiRNA target sequence
aggataaattatcgaataaattaca

SEQ ID NO: 60509 - DNA, 25 bp, Artificial sequence
  SiRNA target sequence
ggataaattatcgaataaattacaa

SEQ ID NO: 60510 - DNA, 25 bp, Artificial sequence
  SiRNA target sequence
gataaattatcgaataaattacaag

SEQ ID NO: 60511 - DNA, 25 bp, Artificial sequence
  SiRNA target sequence
ataaattatcgaataaattacaaga

SEQ ID NO: 60512 - DNA, 25 bp, Artificial sequence
  SiRNA target sequence
taaattatcgaataaattacaagat

SEQ ID NO: 60513 - DNA, 25 bp, Artificial sequence
  SiRNA target sequence
aaattatcgaataaattacaagatt

SEQ ID NO: 60514 - DNA, 25 bp, Artificial sequence
  SiRNA target sequence
aattatcgaataaattacaagattt

SEQ ID NO: 60515 - DNA, 25 bp, Artificial sequence
  SiRNA target sequence
attatcgaataaattacaagatttt

SEQ ID NO: 60516 - DNA, 25 bp, Artificial sequence
  SiRNA target sequence
ttatcgaataaattacaagattttt

SEQ ID NO: 60517 - DNA, 25 bp, Artificial sequence
  SiRNA target sequence
tatcgaataaattacaagatttttt

SEQ ID NO: 60518 - DNA, 25 bp, Artificial sequence
  SiRNA target sequence
atcgaataaattacaagatttttta

SEQ ID NO: 60519 - DNA, 25 bp, Artificial sequence
  SiRNA target sequence
tcgaataaattacaagattttttag

SEQ ID NO: 60520 - DNA, 25 bp, Artificial sequence
  SiRNA target sequence
cgaataaattacaagattttttagc

SEQ ID NO: 60521 - DNA, 25 bp, Artificial sequence
  SiRNA target sequence
gaataaattacaagattttttagct

SEQ ID NO: 60522 - DNA, 25 bp, Artificial sequence
  SiRNA target sequence
aataaattacaagattttttagcta

SEQ ID NO: 60523 - DNA, 25 bp, Artificial sequence
  SiRNA target sequence
ataaattacaagattttttagctaa

SEQ ID NO: 60524 - DNA, 25 bp, Artificial sequence
  SiRNA target sequence
taaattacaagattttttagctaat

SEQ ID NO: 60525 - DNA, 25 bp, Artificial sequence
  SiRNA target sequence
aaattacaagattttttagctaatc

SEQ ID NO: 60526 - DNA, 25 bp, Artificial sequence
  SiRNA target sequence
aattacaagattttttagctaatca

SEQ ID NO: 60527 - DNA, 25 bp, Artificial sequence
  SiRNA target sequence
attacaagattttttagctaatcat

SEQ ID NO: 60528 - DNA, 25 bp, Artificial sequence
  SiRNA target sequence
ttacaagattttttagctaatcatg

SEQ ID NO: 60529 - DNA, 25 bp, Artificial sequence
  SiRNA target sequence
tacaagattttttagctaatcatga

SEQ ID NO: 60530 - DNA, 25 bp, Artificial sequence
  SiRNA target sequence
acaagattttttagctaatcatgaa

SEQ ID NO: 60531 - DNA, 25 bp, Artificial sequence
  SiRNA target sequence
caagattttttagctaatcatgaaa

SEQ ID NO: 60532 - DNA, 25 bp, Artificial sequence
  SiRNA target sequence
aagattttttagctaatcatgaaac

SEQ ID NO: 60533 - DNA, 25 bp, Artificial sequence
  SiRNA target sequence
agattttttagctaatcatgaaaca

SEQ ID NO: 60534 - DNA, 25 bp, Artificial sequence
  SiRNA target sequence
gattttttagctaatcatgaaacaa

SEQ ID NO: 60535 - DNA, 25 bp, Artificial sequence
  SiRNA target sequence
attttttagctaatcatgaaacaat

SEQ ID NO: 60536 - DNA, 25 bp, Artificial sequence
  SiRNA target sequence
ttttttagctaatcatgaaacaatt

SEQ ID NO: 60537 - DNA, 25 bp, Artificial sequence
  SiRNA target sequence
tttttagctaatcatgaaacaatta

SEQ ID NO: 60538 - DNA, 25 bp, Artificial sequence
  SiRNA target sequence
ttttagctaatcatgaaacaattaa

SEQ ID NO: 60539 - DNA, 25 bp, Artificial sequence
  SiRNA target sequence
tttagctaatcatgaaacaattaaa

SEQ ID NO: 60540 - DNA, 25 bp, Artificial sequence
  SiRNA target sequence
ttagctaatcatgaaacaattaaag

SEQ ID NO: 60541 - DNA, 25 bp, Artificial sequence
  SiRNA target sequence
tagctaatcatgaaacaattaaagc

SEQ ID NO: 60542 - DNA, 25 bp, Artificial sequence
  SiRNA target sequence
agctaatcatgaaacaattaaagcc

SEQ ID NO: 60543 - DNA, 25 bp, Artificial sequence
  SiRNA target sequence
gctaatcatgaaacaattaaagcct

SEQ ID NO: 60544 - DNA, 25 bp, Artificial sequence
  SiRNA target sequence
ctaatcatgaaacaattaaagccta

SEQ ID NO: 60545 - DNA, 25 bp, Artificial sequence
  SiRNA target sequence
taatcatgaaacaattaaagcctat

SEQ ID NO: 60546 - DNA, 25 bp, Artificial sequence
  SiRNA target sequence
aatcatgaaacaattaaagcctata

SEQ ID NO: 60547 - DNA, 25 bp, Artificial sequence
  SiRNA target sequence
atcatgaaacaattaaagcctataa

SEQ ID NO: 60548 - DNA, 25 bp, Artificial sequence
  SiRNA target sequence
tcatgaaacaattaaagcctataat

SEQ ID NO: 60549 - DNA, 25 bp, Artificial sequence
  SiRNA target sequence
catgaaacaattaaagcctataata

SEQ ID NO: 60550 - DNA, 25 bp, Artificial sequence
  SiRNA target sequence
atgaaacaattaaagcctataatat

SEQ ID NO: 60551 - DNA, 25 bp, Artificial sequence
  SiRNA target sequence
tgaaacaattaaagcctataatatg

SEQ ID NO: 60552 - DNA, 25 bp, Artificial sequence
  SiRNA target sequence
gaaacaattaaagcctataatatgg

SEQ ID NO: 60553 - DNA, 25 bp, Artificial sequence
  SiRNA target sequence
aaacaattaaagcctataatatgga

SEQ ID NO: 60554 - DNA, 25 bp, Artificial sequence
  SiRNA target sequence
aacaattaaagcctataatatggaa

SEQ ID NO: 60555 - DNA, 25 bp, Artificial sequence
  SiRNA target sequence
acaattaaagcctataatatggaag

SEQ ID NO: 60556 - DNA, 25 bp, Artificial sequence
  SiRNA target sequence
caattaaagcctataatatggaaga

SEQ ID NO: 60557 - DNA, 25 bp, Artificial sequence
  SiRNA target sequence
aattaaagcctataatatggaagaa

SEQ ID NO: 60558 - DNA, 25 bp, Artificial sequence
  SiRNA target sequence
attaaagcctataatatggaagaag

SEQ ID NO: 60559 - DNA, 25 bp, Artificial sequence
  SiRNA target sequence
ttaaagcctataatatggaagaaga

SEQ ID NO: 60560 - DNA, 25 bp, Artificial sequence
  SiRNA target sequence
taaagcctataatatggaagaagaa

SEQ ID NO: 60561 - DNA, 25 bp, Artificial sequence
  SiRNA target sequence
aaagcctataatatggaagaagaaa

SEQ ID NO: 60562 - DNA, 25 bp, Artificial sequence
  SiRNA target sequence
aagcctataatatggaagaagaaac

SEQ ID NO: 60563 - DNA, 25 bp, Artificial sequence
  SiRNA target sequence
agcctataatatggaagaagaaact

SEQ ID NO: 60564 - DNA, 25 bp, Artificial sequence
  SiRNA target sequence
gcctataatatggaagaagaaacta

SEQ ID NO: 60565 - DNA, 25 bp, Artificial sequence
  SiRNA target sequence
cctataatatggaagaagaaactat

SEQ ID NO: 60566 - DNA, 25 bp, Artificial sequence
  SiRNA target sequence
ctataatatggaagaagaaactatt

SEQ ID NO: 60567 - DNA, 25 bp, Artificial sequence
  SiRNA target sequence
tataatatggaagaagaaactatta

SEQ ID NO: 60568 - DNA, 25 bp, Artificial sequence
  SiRNA target sequence
ataatatggaagaagaaactattac

SEQ ID NO: 60569 - DNA, 25 bp, Artificial sequence
  SiRNA target sequence
taatatggaagaagaaactattaca

SEQ ID NO: 60570 - DNA, 25 bp, Artificial sequence
  SiRNA target sequence
aatatggaagaagaaactattacat

SEQ ID NO: 60571 - DNA, 25 bp, Artificial sequence
  SiRNA target sequence
atatggaagaagaaactattacata

SEQ ID NO: 60572 - DNA, 25 bp, Artificial sequence
  SiRNA target sequence
tatggaagaagaaactattacatat

SEQ ID NO: 60573 - DNA, 25 bp, Artificial sequence
  SiRNA target sequence
atggaagaagaaactattacatatt

SEQ ID NO: 60574 - DNA, 25 bp, Artificial sequence
  SiRNA target sequence
tggaagaagaaactattacatattt

SEQ ID NO: 60575 - DNA, 25 bp, Artificial sequence
  SiRNA target sequence
ggaagaagaaactattacatatttt

SEQ ID NO: 60576 - DNA, 25 bp, Artificial sequence
  SiRNA target sequence
gaagaagaaactattacatattttg

SEQ ID NO: 60577 - DNA, 25 bp, Artificial sequence
  SiRNA target sequence
aagaagaaactattacatattttga

SEQ ID NO: 60578 - DNA, 25 bp, Artificial sequence
  SiRNA target sequence
agaagaaactattacatattttgat

SEQ ID NO: 60579 - DNA, 25 bp, Artificial sequence
  SiRNA target sequence
gaagaaactattacatattttgatg

SEQ ID NO: 60580 - DNA, 25 bp, Artificial sequence
  SiRNA target sequence
aagaaactattacatattttgatga

SEQ ID NO: 60581 - DNA, 25 bp, Artificial sequence
  SiRNA target sequence
agaaactattacatattttgatgaa

SEQ ID NO: 60582 - DNA, 25 bp, Artificial sequence
  SiRNA target sequence
gaaactattacatattttgatgaaa

SEQ ID NO: 60583 - DNA, 25 bp, Artificial sequence
  SiRNA target sequence
aaactattacatattttgatgaaaa

SEQ ID NO: 60584 - DNA, 25 bp, Artificial sequence
  SiRNA target sequence
aactattacatattttgatgaaaat

SEQ ID NO: 60585 - DNA, 25 bp, Artificial sequence
  SiRNA target sequence
actattacatattttgatgaaaatc

SEQ ID NO: 60586 - DNA, 25 bp, Artificial sequence
  SiRNA target sequence
ctattacatattttgatgaaaatca

SEQ ID NO: 60587 - DNA, 25 bp, Artificial sequence
  SiRNA target sequence
tattacatattttgatgaaaatcaa

SEQ ID NO: 60588 - DNA, 25 bp, Artificial sequence
  SiRNA target sequence
attacatattttgatgaaaatcaaa

SEQ ID NO: 60589 - DNA, 25 bp, Artificial sequence
  SiRNA target sequence
ttacatattttgatgaaaatcaaaa

SEQ ID NO: 60590 - DNA, 25 bp, Artificial sequence
  SiRNA target sequence
tacatattttgatgaaaatcaaaaa

SEQ ID NO: 60591 - DNA, 25 bp, Artificial sequence
  SiRNA target sequence
acatattttgatgaaaatcaaaaac

SEQ ID NO: 60592 - DNA, 25 bp, Artificial sequence
  SiRNA target sequence
catattttgatgaaaatcaaaaacc

SEQ ID NO: 60593 - DNA, 25 bp, Artificial sequence
  SiRNA target sequence
atattttgatgaaaatcaaaaaccg

SEQ ID NO: 60594 - DNA, 25 bp, Artificial sequence
  SiRNA target sequence
tattttgatgaaaatcaaaaaccgg

SEQ ID NO: 60595 - DNA, 25 bp, Artificial sequence
  SiRNA target sequence
attttgatgaaaatcaaaaaccggt

SEQ ID NO: 60596 - DNA, 25 bp, Artificial sequence
  SiRNA target sequence
ttttgatgaaaatcaaaaaccggta

SEQ ID NO: 60597 - DNA, 25 bp, Artificial sequence
  SiRNA target sequence
tttgatgaaaatcaaaaaccggtag

SEQ ID NO: 60598 - DNA, 25 bp, Artificial sequence
  SiRNA target sequence
ttgatgaaaatcaaaaaccggtaga

SEQ ID NO: 60599 - DNA, 25 bp, Artificial sequence
  SiRNA target sequence
tgatgaaaatcaaaaaccggtagaa

SEQ ID NO: 60600 - DNA, 25 bp, Artificial sequence
  SiRNA target sequence
gatgaaaatcaaaaaccggtagaat

SEQ ID NO: 60601 - DNA, 25 bp, Artificial sequence
  SiRNA target sequence
atgaaaatcaaaaaccggtagaata

SEQ ID NO: 60602 - DNA, 25 bp, Artificial sequence
  SiRNA target sequence
tgaaaatcaaaaaccggtagaatat

SEQ ID NO: 60603 - DNA, 25 bp, Artificial sequence
  SiRNA target sequence
gaaaatcaaaaaccggtagaatatt

SEQ ID NO: 60604 - DNA, 25 bp, Artificial sequence
  SiRNA target sequence
aaaatcaaaaaccggtagaatattt

SEQ ID NO: 60605 - DNA, 25 bp, Artificial sequence
  SiRNA target sequence
aaatcaaaaaccggtagaatatttt

SEQ ID NO: 60606 - DNA, 25 bp, Artificial sequence
  SiRNA target sequence
aatcaaaaaccggtagaatattttg

SEQ ID NO: 60607 - DNA, 25 bp, Artificial sequence
  SiRNA target sequence
atcaaaaaccggtagaatattttgg

SEQ ID NO: 60608 - DNA, 25 bp, Artificial sequence
  SiRNA target sequence
tcaaaaaccggtagaatattttggg

SEQ ID NO: 60609 - DNA, 25 bp, Artificial sequence
  SiRNA target sequence
caaaaaccggtagaatattttgggg

SEQ ID NO: 60610 - DNA, 25 bp, Artificial sequence
  SiRNA target sequence
aaaaaccggtagaatattttggggt

SEQ ID NO: 60611 - DNA, 25 bp, Artificial sequence
  SiRNA target sequence
aaaaccggtagaatattttggggta

SEQ ID NO: 60612 - DNA, 25 bp, Artificial sequence
  SiRNA target sequence
aaaccggtagaatattttggggtaa

SEQ ID NO: 60613 - DNA, 25 bp, Artificial sequence
  SiRNA target sequence
aaccggtagaatattttggggtaaa

SEQ ID NO: 60614 - DNA, 25 bp, Artificial sequence
  SiRNA target sequence
accggtagaatattttggggtaaag

SEQ ID NO: 60615 - DNA, 25 bp, Artificial sequence
  SiRNA target sequence
ccggtagaatattttggggtaaagt

SEQ ID NO: 60616 - DNA, 25 bp, Artificial sequence
  SiRNA target sequence
cggtagaatattttggggtaaagtc

SEQ ID NO: 60617 - DNA, 25 bp, Artificial sequence
  SiRNA target sequence
ggtagaatattttggggtaaagtct

SEQ ID NO: 60618 - DNA, 25 bp, Artificial sequence
  SiRNA target sequence
gtagaatattttggggtaaagtctc

SEQ ID NO: 60619 - DNA, 25 bp, Artificial sequence
  SiRNA target sequence
tagaatattttggggtaaagtctca

SEQ ID NO: 60620 - DNA, 25 bp, Artificial sequence
  SiRNA target sequence
agaatattttggggtaaagtctcac

SEQ ID NO: 60621 - DNA, 25 bp, Artificial sequence
  SiRNA target sequence
gaatattttggggtaaagtctcaca

SEQ ID NO: 60622 - DNA, 25 bp, Artificial sequence
  SiRNA target sequence
aatattttggggtaaagtctcacag

SEQ ID NO: 60623 - DNA, 25 bp, Artificial sequence
  SiRNA target sequence
atattttggggtaaagtctcacaga

SEQ ID NO: 60624 - DNA, 25 bp, Artificial sequence
  SiRNA target sequence
tattttggggtaaagtctcacagaa

SEQ ID NO: 60625 - DNA, 25 bp, Artificial sequence
  SiRNA target sequence
attttggggtaaagtctcacagaat

SEQ ID NO: 60626 - DNA, 25 bp, Artificial sequence
  SiRNA target sequence
ttttggggtaaagtctcacagaatt

SEQ ID NO: 60627 - DNA, 25 bp, Artificial sequence
  SiRNA target sequence
tttggggtaaagtctcacagaattt

SEQ ID NO: 60628 - DNA, 25 bp, Artificial sequence
  SiRNA target sequence
ttggggtaaagtctcacagaatttt

SEQ ID NO: 60629 - DNA, 25 bp, Artificial sequence
  SiRNA target sequence
tggggtaaagtctcacagaattttg

SEQ ID NO: 60630 - DNA, 25 bp, Artificial sequence
  SiRNA target sequence
ggggtaaagtctcacagaattttgt

SEQ ID NO: 60631 - DNA, 25 bp, Artificial sequence
  SiRNA target sequence
gggtaaagtctcacagaattttgtt

SEQ ID NO: 60632 - DNA, 25 bp, Artificial sequence
  SiRNA target sequence
ggtaaagtctcacagaattttgttc

SEQ ID NO: 60633 - DNA, 25 bp, Artificial sequence
  SiRNA target sequence
gtaaagtctcacagaattttgttct

SEQ ID NO: 60634 - DNA, 25 bp, Artificial sequence
  SiRNA target sequence
taaagtctcacagaattttgttctc

SEQ ID NO: 60635 - DNA, 25 bp, Artificial sequence
  SiRNA target sequence
aaagtctcacagaattttgttctct

SEQ ID NO: 60636 - DNA, 25 bp, Artificial sequence
  SiRNA target sequence
aagtctcacagaattttgttctctc

SEQ ID NO: 60637 - DNA, 25 bp, Artificial sequence
  SiRNA target sequence
agtctcacagaattttgttctctct

SEQ ID NO: 60638 - DNA, 25 bp, Artificial sequence
  SiRNA target sequence
gtctcacagaattttgttctctctt

SEQ ID NO: 60639 - DNA, 25 bp, Artificial sequence
  SiRNA target sequence
tctcacagaattttgttctctcttt

SEQ ID NO: 60640 - DNA, 25 bp, Artificial sequence
  SiRNA target sequence
ctcacagaattttgttctctctttt

SEQ ID NO: 60641 - DNA, 25 bp, Artificial sequence
  SiRNA target sequence
tcacagaattttgttctctctttta

SEQ ID NO: 60642 - DNA, 25 bp, Artificial sequence
  SiRNA target sequence
cacagaattttgttctctcttttat

SEQ ID NO: 60643 - DNA, 25 bp, Artificial sequence
  SiRNA target sequence
acagaattttgttctctcttttata

SEQ ID NO: 60644 - DNA, 25 bp, Artificial sequence
  SiRNA target sequence
cagaattttgttctctcttttatat

SEQ ID NO: 60645 - DNA, 25 bp, Artificial sequence
  SiRNA target sequence
agaattttgttctctcttttatata

SEQ ID NO: 60646 - DNA, 25 bp, Artificial sequence
  SiRNA target sequence
gaattttgttctctcttttatatat

SEQ ID NO: 60647 - DNA, 25 bp, Artificial sequence
  SiRNA target sequence
aattttgttctctcttttatatata

SEQ ID NO: 60648 - DNA, 25 bp, Artificial sequence
  SiRNA target sequence
attttgttctctcttttatatatac

SEQ ID NO: 60649 - DNA, 25 bp, Artificial sequence
  SiRNA target sequence
ttttgttctctcttttatatataca

SEQ ID NO: 60650 - DNA, 25 bp, Artificial sequence
  SiRNA target sequence
tttgttctctcttttatatatacaa

SEQ ID NO: 60651 - DNA, 25 bp, Artificial sequence
  SiRNA target sequence
ttgttctctcttttatatatacaaa

SEQ ID NO: 60652 - DNA, 25 bp, Artificial sequence
  SiRNA target sequence
tgttctctcttttatatatacaaaa

SEQ ID NO: 60653 - DNA, 25 bp, Artificial sequence
  SiRNA target sequence
gttctctcttttatatatacaaaaa

SEQ ID NO: 60654 - DNA, 25 bp, Artificial sequence
  SiRNA target sequence
ttctctcttttatatatacaaaaaa

SEQ ID NO: 60655 - DNA, 25 bp, Artificial sequence
  SiRNA target sequence
tctctcttttatatatacaaaaaat

SEQ ID NO: 60656 - DNA, 25 bp, Artificial sequence
  SiRNA target sequence
ctctcttttatatatacaaaaaatg

SEQ ID NO: 60657 - DNA, 25 bp, Artificial sequence
  SiRNA target sequence
tctcttttatatatacaaaaaatga

SEQ ID NO: 60658 - DNA, 25 bp, Artificial sequence
  SiRNA target sequence
ctcttttatatatacaaaaaatgac

SEQ ID NO: 60659 - DNA, 25 bp, Artificial sequence
  SiRNA target sequence
tcttttatatatacaaaaaatgaca

SEQ ID NO: 60660 - DNA, 25 bp, Artificial sequence
  SiRNA target sequence
cttttatatatacaaaaaatgacat

SEQ ID NO: 60661 - DNA, 25 bp, Artificial sequence
  SiRNA target sequence
ttttatatatacaaaaaatgacatt

SEQ ID NO: 60662 - DNA, 25 bp, Artificial sequence
  SiRNA target sequence
tttatatatacaaaaaatgacattt

SEQ ID NO: 60663 - DNA, 25 bp, Artificial sequence
  SiRNA target sequence
ttatatatacaaaaaatgacatttg

SEQ ID NO: 60664 - DNA, 25 bp, Artificial sequence
  SiRNA target sequence
tatatatacaaaaaatgacatttgc

SEQ ID NO: 60665 - DNA, 25 bp, Artificial sequence
  SiRNA target sequence
atatatacaaaaaatgacatttgcg

SEQ ID NO: 60666 - DNA, 25 bp, Artificial sequence
  SiRNA target sequence
tatatacaaaaaatgacatttgcga

SEQ ID NO: 60667 - DNA, 25 bp, Artificial sequence
  SiRNA target sequence
atatacaaaaaatgacatttgcgat

SEQ ID NO: 60668 - DNA, 25 bp, Artificial sequence
  SiRNA target sequence
tatacaaaaaatgacatttgcgata

SEQ ID NO: 60669 - DNA, 25 bp, Artificial sequence
  SiRNA target sequence
atacaaaaaatgacatttgcgatac

SEQ ID NO: 60670 - DNA, 25 bp, Artificial sequence
  SiRNA target sequence
tacaaaaaatgacatttgcgataca

SEQ ID NO: 60671 - DNA, 25 bp, Artificial sequence
  SiRNA target sequence
acaaaaaatgacatttgcgatacag

SEQ ID NO: 60672 - DNA, 25 bp, Artificial sequence
  SiRNA target sequence
caaaaaatgacatttgcgatacagg

SEQ ID NO: 60673 - DNA, 25 bp, Artificial sequence
  SiRNA target sequence
aaaaaatgacatttgcgatacaggc

SEQ ID NO: 60674 - DNA, 25 bp, Artificial sequence
  SiRNA target sequence
aaaaatgacatttgcgatacaggca

SEQ ID NO: 60675 - DNA, 25 bp, Artificial sequence
  SiRNA target sequence
aaaatgacatttgcgatacaggcaa

SEQ ID NO: 60676 - DNA, 25 bp, Artificial sequence
  SiRNA target sequence
aaatgacatttgcgatacaggcaat

SEQ ID NO: 60677 - DNA, 25 bp, Artificial sequence
  SiRNA target sequence
aatgacatttgcgatacaggcaatt

SEQ ID NO: 60678 - DNA, 25 bp, Artificial sequence
  SiRNA target sequence
atgacatttgcgatacaggcaatta

SEQ ID NO: 60679 - DNA, 25 bp, Artificial sequence
  SiRNA target sequence
tgacatttgcgatacaggcaattat

SEQ ID NO: 60680 - DNA, 25 bp, Artificial sequence
  SiRNA target sequence
gacatttgcgatacaggcaattatt

SEQ ID NO: 60681 - DNA, 25 bp, Artificial sequence
  SiRNA target sequence
acatttgcgatacaggcaattatta

SEQ ID NO: 60682 - DNA, 25 bp, Artificial sequence
  SiRNA target sequence
catttgcgatacaggcaattattat

SEQ ID NO: 60683 - DNA, 25 bp, Artificial sequence
  SiRNA target sequence
atttgcgatacaggcaattattatt

SEQ ID NO: 60684 - DNA, 25 bp, Artificial sequence
  SiRNA target sequence
tttgcgatacaggcaattattatta

SEQ ID NO: 60685 - DNA, 25 bp, Artificial sequence
  SiRNA target sequence
ttgcgatacaggcaattattattat

SEQ ID NO: 60686 - DNA, 25 bp, Artificial sequence
  SiRNA target sequence
tgcgatacaggcaattattattatc

SEQ ID NO: 60687 - DNA, 25 bp, Artificial sequence
  SiRNA target sequence
gcgatacaggcaattattattatca

SEQ ID NO: 60688 - DNA, 25 bp, Artificial sequence
  SiRNA target sequence
cgatacaggcaattattattatcac

SEQ ID NO: 60689 - DNA, 25 bp, Artificial sequence
  SiRNA target sequence
gatacaggcaattattattatcaca

SEQ ID NO: 60690 - DNA, 25 bp, Artificial sequence
  SiRNA target sequence
atacaggcaattattattatcacat

SEQ ID NO: 60691 - DNA, 25 bp, Artificial sequence
  SiRNA target sequence
tacaggcaattattattatcacatt

SEQ ID NO: 60692 - DNA, 25 bp, Artificial sequence
  SiRNA target sequence
acaggcaattattattatcacatta

SEQ ID NO: 60693 - DNA, 25 bp, Artificial sequence
  SiRNA target sequence
caggcaattattattatcacattag

SEQ ID NO: 60694 - DNA, 25 bp, Artificial sequence
  SiRNA target sequence
aggcaattattattatcacattagg

SEQ ID NO: 60695 - DNA, 25 bp, Artificial sequence
  SiRNA target sequence
ggcaattattattatcacattagga

SEQ ID NO: 60696 - DNA, 25 bp, Artificial sequence
  SiRNA target sequence
gcaattattattatcacattaggat

SEQ ID NO: 60697 - DNA, 25 bp, Artificial sequence
  SiRNA target sequence
caattattattatcacattaggatc

SEQ ID NO: 60698 - DNA, 25 bp, Artificial sequence
  SiRNA target sequence
aattattattatcacattaggatct

SEQ ID NO: 60699 - DNA, 25 bp, Artificial sequence
  SiRNA target sequence
attattattatcacattaggatctt

SEQ ID NO: 60700 - DNA, 25 bp, Artificial sequence
  SiRNA target sequence
ttattattatcacattaggatcttt

SEQ ID NO: 60701 - DNA, 25 bp, Artificial sequence
  SiRNA target sequence
tattattatcacattaggatctttt

SEQ ID NO: 60702 - DNA, 25 bp, Artificial sequence
  SiRNA target sequence
attattatcacattaggatcttttg

SEQ ID NO: 60703 - DNA, 25 bp, Artificial sequence
  SiRNA target sequence
ttattatcacattaggatcttttgg

SEQ ID NO: 60704 - DNA, 25 bp, Artificial sequence
  SiRNA target sequence
tattatcacattaggatcttttgga

SEQ ID NO: 60705 - DNA, 25 bp, Artificial sequence
  SiRNA target sequence
attatcacattaggatcttttggat

SEQ ID NO: 60706 - DNA, 25 bp, Artificial sequence
  SiRNA target sequence
ttatcacattaggatcttttggata

SEQ ID NO: 60707 - DNA, 25 bp, Artificial sequence
  SiRNA target sequence
tatcacattaggatcttttggatat

SEQ ID NO: 60708 - DNA, 25 bp, Artificial sequence
  SiRNA target sequence
atcacattaggatcttttggatatt

SEQ ID NO: 60709 - DNA, 25 bp, Artificial sequence
  SiRNA target sequence
tcacattaggatcttttggatattt

SEQ ID NO: 60710 - DNA, 25 bp, Artificial sequence
  SiRNA target sequence
cacattaggatcttttggatatttt

SEQ ID NO: 60711 - DNA, 25 bp, Artificial sequence
  SiRNA target sequence
acattaggatcttttggatattttc

SEQ ID NO: 60712 - DNA, 25 bp, Artificial sequence
  SiRNA target sequence
cattaggatcttttggatattttcc

SEQ ID NO: 60713 - DNA, 25 bp, Artificial sequence
  SiRNA target sequence
attaggatcttttggatattttccg

SEQ ID NO: 60714 - DNA, 25 bp, Artificial sequence
  SiRNA target sequence
ttaggatcttttggatattttccga

SEQ ID NO: 60715 - DNA, 25 bp, Artificial sequence
  SiRNA target sequence
taggatcttttggatattttccgat

SEQ ID NO: 60716 - DNA, 25 bp, Artificial sequence
  SiRNA target sequence
aggatcttttggatattttccgatt

SEQ ID NO: 60717 - DNA, 25 bp, Artificial sequence
  SiRNA target sequence
ggatcttttggatattttccgatta

SEQ ID NO: 60718 - DNA, 25 bp, Artificial sequence
  SiRNA target sequence
gatcttttggatattttccgattaa

SEQ ID NO: 60719 - DNA, 25 bp, Artificial sequence
  SiRNA target sequence
atcttttggatattttccgattaaa

SEQ ID NO: 60720 - DNA, 25 bp, Artificial sequence
  SiRNA target sequence
tcttttggatattttccgattaaat

SEQ ID NO: 60721 - DNA, 25 bp, Artificial sequence
  SiRNA target sequence
cttttggatattttccgattaaatt

SEQ ID NO: 60722 - DNA, 25 bp, Artificial sequence
  SiRNA target sequence
ttttggatattttccgattaaatta

SEQ ID NO: 60723 - DNA, 25 bp, Artificial sequence
  SiRNA target sequence
tttggatattttccgattaaattat

SEQ ID NO: 60724 - DNA, 25 bp, Artificial sequence
  SiRNA target sequence
ttggatattttccgattaaattatc

SEQ ID NO: 60725 - DNA, 25 bp, Artificial sequence
  SiRNA target sequence
tggatattttccgattaaattatcc

SEQ ID NO: 60726 - DNA, 25 bp, Artificial sequence
  SiRNA target sequence
ggatattttccgattaaattatcct

SEQ ID NO: 60727 - DNA, 25 bp, Artificial sequence
  SiRNA target sequence
gatattttccgattaaattatcctc

SEQ ID NO: 60728 - DNA, 25 bp, Artificial sequence
  SiRNA target sequence
atattttccgattaaattatcctct

SEQ ID NO: 60729 - DNA, 25 bp, Artificial sequence
  SiRNA target sequence
tattttccgattaaattatcctctc

SEQ ID NO: 60730 - DNA, 25 bp, Artificial sequence
  SiRNA target sequence
attttccgattaaattatcctctca

SEQ ID NO: 60731 - DNA, 25 bp, Artificial sequence
  SiRNA target sequence
ttttccgattaaattatcctctcaa

SEQ ID NO: 60732 - DNA, 25 bp, Artificial sequence
  SiRNA target sequence
tttccgattaaattatcctctcaac

SEQ ID NO: 60733 - DNA, 25 bp, Artificial sequence
  SiRNA target sequence
ttccgattaaattatcctctcaaca

SEQ ID NO: 60734 - DNA, 25 bp, Artificial sequence
  SiRNA target sequence
tccgattaaattatcctctcaacag

SEQ ID NO: 60735 - DNA, 25 bp, Artificial sequence
  SiRNA target sequence
ccgattaaattatcctctcaacagt

SEQ ID NO: 60736 - DNA, 25 bp, Artificial sequence
  SiRNA target sequence
cgattaaattatcctctcaacagtt

SEQ ID NO: 60737 - DNA, 25 bp, Artificial sequence
  SiRNA target sequence
gattaaattatcctctcaacagtta

SEQ ID NO: 60738 - DNA, 25 bp, Artificial sequence
  SiRNA target sequence
attaaattatcctctcaacagttag

SEQ ID NO: 60739 - DNA, 25 bp, Artificial sequence
  SiRNA target sequence
ttaaattatcctctcaacagttagt

SEQ ID NO: 60740 - DNA, 25 bp, Artificial sequence
  SiRNA target sequence
taaattatcctctcaacagttagtc

SEQ ID NO: 60741 - DNA, 25 bp, Artificial sequence
  SiRNA target sequence
aaattatcctctcaacagttagtct

SEQ ID NO: 60742 - DNA, 25 bp, Artificial sequence
  SiRNA target sequence
aattatcctctcaacagttagtctt

SEQ ID NO: 60743 - DNA, 25 bp, Artificial sequence
  SiRNA target sequence
attatcctctcaacagttagtcttt

SEQ ID NO: 60744 - DNA, 25 bp, Artificial sequence
  SiRNA target sequence
ttatcctctcaacagttagtctttt

SEQ ID NO: 60745 - DNA, 25 bp, Artificial sequence
  SiRNA target sequence
tatcctctcaacagttagtctttta

SEQ ID NO: 60746 - DNA, 25 bp, Artificial sequence
  SiRNA target sequence
atcctctcaacagttagtcttttat

SEQ ID NO: 60747 - DNA, 25 bp, Artificial sequence
  SiRNA target sequence
tcctctcaacagttagtcttttata

SEQ ID NO: 60748 - DNA, 25 bp, Artificial sequence
  SiRNA target sequence
cctctcaacagttagtcttttatat

SEQ ID NO: 60749 - DNA, 25 bp, Artificial sequence
  SiRNA target sequence
ctctcaacagttagtcttttatatt

SEQ ID NO: 60750 - DNA, 25 bp, Artificial sequence
  SiRNA target sequence
tctcaacagttagtcttttatattt

SEQ ID NO: 60751 - DNA, 25 bp, Artificial sequence
  SiRNA target sequence
ctcaacagttagtcttttatatttc

SEQ ID NO: 60752 - DNA, 25 bp, Artificial sequence
  SiRNA target sequence
tcaacagttagtcttttatatttcg

SEQ ID NO: 60753 - DNA, 25 bp, Artificial sequence
  SiRNA target sequence
caacagttagtcttttatatttcga

SEQ ID NO: 60754 - DNA, 25 bp, Artificial sequence
  SiRNA target sequence
aacagttagtcttttatatttcgat

SEQ ID NO: 60755 - DNA, 25 bp, Artificial sequence
  SiRNA target sequence
acagttagtcttttatatttcgatt

SEQ ID NO: 60756 - DNA, 25 bp, Artificial sequence
  SiRNA target sequence
cagttagtcttttatatttcgatta

SEQ ID NO: 60757 - DNA, 25 bp, Artificial sequence
  SiRNA target sequence
agttagtcttttatatttcgattag

SEQ ID NO: 60758 - DNA, 25 bp, Artificial sequence
  SiRNA target sequence
gttagtcttttatatttcgattagt

SEQ ID NO: 60759 - DNA, 25 bp, Artificial sequence
  SiRNA target sequence
ttagtcttttatatttcgattagta

SEQ ID NO: 60760 - DNA, 25 bp, Artificial sequence
  SiRNA target sequence
tagtcttttatatttcgattagtaa

SEQ ID NO: 60761 - DNA, 25 bp, Artificial sequence
  SiRNA target sequence
agtcttttatatttcgattagtaaa

SEQ ID NO: 60762 - DNA, 25 bp, Artificial sequence
  SiRNA target sequence
gtcttttatatttcgattagtaaaa

SEQ ID NO: 60763 - DNA, 25 bp, Artificial sequence
  SiRNA target sequence
tcttttatatttcgattagtaaaac

SEQ ID NO: 60764 - DNA, 25 bp, Artificial sequence
  SiRNA target sequence
cttttatatttcgattagtaaaacg

SEQ ID NO: 60765 - DNA, 25 bp, Artificial sequence
  SiRNA target sequence
ttttatatttcgattagtaaaacgt

SEQ ID NO: 60766 - DNA, 25 bp, Artificial sequence
  SiRNA target sequence
tttatatttcgattagtaaaacgtt

SEQ ID NO: 60767 - DNA, 25 bp, Artificial sequence
  SiRNA target sequence
ttatatttcgattagtaaaacgttg

SEQ ID NO: 60768 - DNA, 25 bp, Artificial sequence
  SiRNA target sequence
tatatttcgattagtaaaacgttga

SEQ ID NO: 60769 - DNA, 25 bp, Artificial sequence
  SiRNA target sequence
atatttcgattagtaaaacgttgac

SEQ ID NO: 60770 - DNA, 25 bp, Artificial sequence
  SiRNA target sequence
tatttcgattagtaaaacgttgaca

SEQ ID NO: 60771 - DNA, 25 bp, Artificial sequence
  SiRNA target sequence
atttcgattagtaaaacgttgacaa

SEQ ID NO: 60772 - DNA, 25 bp, Artificial sequence
  SiRNA target sequence
tttcgattagtaaaacgttgacaaa

SEQ ID NO: 60773 - DNA, 25 bp, Artificial sequence
  SiRNA target sequence
ttcgattagtaaaacgttgacaaat

SEQ ID NO: 60774 - DNA, 25 bp, Artificial sequence
  SiRNA target sequence
tcgattagtaaaacgttgacaaatt

SEQ ID NO: 60775 - DNA, 25 bp, Artificial sequence
  SiRNA target sequence
cgattagtaaaacgttgacaaattc

SEQ ID NO: 60776 - DNA, 25 bp, Artificial sequence
  SiRNA target sequence
gattagtaaaacgttgacaaattcg

SEQ ID NO: 60777 - DNA, 25 bp, Artificial sequence
  SiRNA target sequence
attagtaaaacgttgacaaattcgt

SEQ ID NO: 60778 - DNA, 25 bp, Artificial sequence
  SiRNA target sequence
ttagtaaaacgttgacaaattcgtt

SEQ ID NO: 60779 - DNA, 25 bp, Artificial sequence
  SiRNA target sequence
tagtaaaacgttgacaaattcgttg

SEQ ID NO: 60780 - DNA, 25 bp, Artificial sequence
  SiRNA target sequence
agtaaaacgttgacaaattcgttga

SEQ ID NO: 60781 - DNA, 25 bp, Artificial sequence
  SiRNA target sequence
gtaaaacgttgacaaattcgttgag

SEQ ID NO: 60782 - DNA, 25 bp, Artificial sequence
  SiRNA target sequence
taaaacgttgacaaattcgttgagc

SEQ ID NO: 60783 - DNA, 25 bp, Artificial sequence
  SiRNA target sequence
aaaacgttgacaaattcgttgagcg

SEQ ID NO: 60784 - DNA, 25 bp, Artificial sequence
  SiRNA target sequence
aaacgttgacaaattcgttgagcga

SEQ ID NO: 60785 - DNA, 25 bp, Artificial sequence
  SiRNA target sequence
aacgttgacaaattcgttgagcgaa

SEQ ID NO: 60786 - DNA, 25 bp, Artificial sequence
  SiRNA target sequence
acgttgacaaattcgttgagcgaaa

SEQ ID NO: 60787 - DNA, 25 bp, Artificial sequence
  SiRNA target sequence
cgttgacaaattcgttgagcgaaat

SEQ ID NO: 60788 - DNA, 25 bp, Artificial sequence
  SiRNA target sequence
gttgacaaattcgttgagcgaaatg

SEQ ID NO: 60789 - DNA, 25 bp, Artificial sequence
  SiRNA target sequence
ttgacaaattcgttgagcgaaatgg

SEQ ID NO: 60790 - DNA, 25 bp, Artificial sequence
  SiRNA target sequence
tgacaaattcgttgagcgaaatggg

SEQ ID NO: 60791 - DNA, 25 bp, Artificial sequence
  SiRNA target sequence
gacaaattcgttgagcgaaatggga

SEQ ID NO: 60792 - DNA, 25 bp, Artificial sequence
  SiRNA target sequence
acaaattcgttgagcgaaatgggaa

SEQ ID NO: 60793 - DNA, 25 bp, Artificial sequence
  SiRNA target sequence
caaattcgttgagcgaaatgggaat

SEQ ID NO: 60794 - DNA, 25 bp, Artificial sequence
  SiRNA target sequence
aaattcgttgagcgaaatgggaatg

SEQ ID NO: 60795 - DNA, 25 bp, Artificial sequence
  SiRNA target sequence
aattcgttgagcgaaatgggaatgc

SEQ ID NO: 60796 - DNA, 25 bp, Artificial sequence
  SiRNA target sequence
attcgttgagcgaaatgggaatgct

SEQ ID NO: 60797 - DNA, 25 bp, Artificial sequence
  SiRNA target sequence
ttcgttgagcgaaatgggaatgcta

SEQ ID NO: 60798 - DNA, 25 bp, Artificial sequence
  SiRNA target sequence
tcgttgagcgaaatgggaatgctat

SEQ ID NO: 60799 - DNA, 25 bp, Artificial sequence
  SiRNA target sequence
cgttgagcgaaatgggaatgctata

SEQ ID NO: 60800 - DNA, 25 bp, Artificial sequence
  SiRNA target sequence
gttgagcgaaatgggaatgctatac

SEQ ID NO: 60801 - DNA, 25 bp, Artificial sequence
  SiRNA target sequence
ttgagcgaaatgggaatgctataca

SEQ ID NO: 60802 - DNA, 25 bp, Artificial sequence
  SiRNA target sequence
tgagcgaaatgggaatgctatacac

SEQ ID NO: 60803 - DNA, 25 bp, Artificial sequence
  SiRNA target sequence
gagcgaaatgggaatgctatacaca

SEQ ID NO: 60804 - DNA, 25 bp, Artificial sequence
  SiRNA target sequence
agcgaaatgggaatgctatacacaa

SEQ ID NO: 60805 - DNA, 25 bp, Artificial sequence
  SiRNA target sequence
gcgaaatgggaatgctatacacaag

SEQ ID NO: 60806 - DNA, 25 bp, Artificial sequence
  SiRNA target sequence
cgaaatgggaatgctatacacaaga

SEQ ID NO: 60807 - DNA, 25 bp, Artificial sequence
  SiRNA target sequence
gaaatgggaatgctatacacaagat

SEQ ID NO: 60808 - DNA, 25 bp, Artificial sequence
  SiRNA target sequence
aaatgggaatgctatacacaagata

SEQ ID NO: 60809 - DNA, 25 bp, Artificial sequence
  SiRNA target sequence
aatgggaatgctatacacaagatat

SEQ ID NO: 60810 - DNA, 25 bp, Artificial sequence
  SiRNA target sequence
atgggaatgctatacacaagatatg

SEQ ID NO: 60811 - DNA, 25 bp, Artificial sequence
  SiRNA target sequence
tgggaatgctatacacaagatatgt

SEQ ID NO: 60812 - DNA, 25 bp, Artificial sequence
  SiRNA target sequence
gggaatgctatacacaagatatgta

SEQ ID NO: 60813 - DNA, 25 bp, Artificial sequence
  SiRNA target sequence
ggaatgctatacacaagatatgtac

SEQ ID NO: 60814 - DNA, 25 bp, Artificial sequence
  SiRNA target sequence
gaatgctatacacaagatatgtaca

SEQ ID NO: 60815 - DNA, 25 bp, Artificial sequence
  SiRNA target sequence
aatgctatacacaagatatgtacaa

SEQ ID NO: 60816 - DNA, 25 bp, Artificial sequence
  SiRNA target sequence
atgctatacacaagatatgtacaag

SEQ ID NO: 60817 - DNA, 25 bp, Artificial sequence
  SiRNA target sequence
tgctatacacaagatatgtacaagg

SEQ ID NO: 60818 - DNA, 25 bp, Artificial sequence
  SiRNA target sequence
gctatacacaagatatgtacaagga

SEQ ID NO: 60819 - DNA, 25 bp, Artificial sequence
  SiRNA target sequence
ctatacacaagatatgtacaaggat

SEQ ID NO: 60820 - DNA, 25 bp, Artificial sequence
  SiRNA target sequence
tatacacaagatatgtacaaggatt

SEQ ID NO: 60821 - DNA, 25 bp, Artificial sequence
  SiRNA target sequence
atacacaagatatgtacaaggattt

SEQ ID NO: 60822 - DNA, 25 bp, Artificial sequence
  SiRNA target sequence
tacacaagatatgtacaaggatttt

SEQ ID NO: 60823 - DNA, 25 bp, Artificial sequence
  SiRNA target sequence
acacaagatatgtacaaggattttt

SEQ ID NO: 60824 - DNA, 25 bp, Artificial sequence
  SiRNA target sequence
cacaagatatgtacaaggattttta

SEQ ID NO: 60825 - DNA, 25 bp, Artificial sequence
  SiRNA target sequence
acaagatatgtacaaggatttttaa

SEQ ID NO: 60826 - DNA, 25 bp, Artificial sequence
  SiRNA target sequence
caagatatgtacaaggatttttaaa

SEQ ID NO: 60827 - DNA, 25 bp, Artificial sequence
  SiRNA target sequence
aagatatgtacaaggatttttaaat

SEQ ID NO: 60828 - DNA, 25 bp, Artificial sequence
  SiRNA target sequence
agatatgtacaaggatttttaaatg

SEQ ID NO: 60829 - DNA, 25 bp, Artificial sequence
  SiRNA target sequence
gatatgtacaaggatttttaaatgc

SEQ ID NO: 60830 - DNA, 25 bp, Artificial sequence
  SiRNA target sequence
atatgtacaaggatttttaaatgca

SEQ ID NO: 60831 - DNA, 25 bp, Artificial sequence
  SiRNA target sequence
tatgtacaaggatttttaaatgcaa

SEQ ID NO: 60832 - DNA, 25 bp, Artificial sequence
  SiRNA target sequence
atgtacaaggatttttaaatgcaaa

SEQ ID NO: 60833 - DNA, 25 bp, Artificial sequence
  SiRNA target sequence
tgtacaaggatttttaaatgcaaag

SEQ ID NO: 60834 - DNA, 25 bp, Artificial sequence
  SiRNA target sequence
gtacaaggatttttaaatgcaaagt

SEQ ID NO: 60835 - DNA, 25 bp, Artificial sequence
  SiRNA target sequence
tacaaggatttttaaatgcaaagtc

SEQ ID NO: 60836 - DNA, 25 bp, Artificial sequence
  SiRNA target sequence
acaaggatttttaaatgcaaagtct

SEQ ID NO: 60837 - DNA, 25 bp, Artificial sequence
  SiRNA target sequence
caaggatttttaaatgcaaagtctg

SEQ ID NO: 60838 - DNA, 25 bp, Artificial sequence
  SiRNA target sequence
aaggatttttaaatgcaaagtctgg

SEQ ID NO: 60839 - DNA, 25 bp, Artificial sequence
  SiRNA target sequence
aggatttttaaatgcaaagtctgga

SEQ ID NO: 60840 - DNA, 25 bp, Artificial sequence
  SiRNA target sequence
ggatttttaaatgcaaagtctggat

SEQ ID NO: 60841 - DNA, 25 bp, Artificial sequence
  SiRNA target sequence
gatttttaaatgcaaagtctggata

SEQ ID NO: 60842 - DNA, 25 bp, Artificial sequence
  SiRNA target sequence
atttttaaatgcaaagtctggatat

SEQ ID NO: 60843 - DNA, 25 bp, Artificial sequence
  SiRNA target sequence
tttttaaatgcaaagtctggatatt

SEQ ID NO: 60844 - DNA, 25 bp, Artificial sequence
  SiRNA target sequence
ttttaaatgcaaagtctggatatta

SEQ ID NO: 60845 - DNA, 25 bp, Artificial sequence
  SiRNA target sequence
tttaaatgcaaagtctggatattac

SEQ ID NO: 60846 - DNA, 25 bp, Artificial sequence
  SiRNA target sequence
ttaaatgcaaagtctggatattacg

SEQ ID NO: 60847 - DNA, 25 bp, Artificial sequence
  SiRNA target sequence
taaatgcaaagtctggatattacga

SEQ ID NO: 60848 - DNA, 25 bp, Artificial sequence
  SiRNA target sequence
aaatgcaaagtctggatattacgag

SEQ ID NO: 60849 - DNA, 25 bp, Artificial sequence
  SiRNA target sequence
aatgcaaagtctggatattacgagt

SEQ ID NO: 60850 - DNA, 25 bp, Artificial sequence
  SiRNA target sequence
atgcaaagtctggatattacgagtt

SEQ ID NO: 60851 - DNA, 25 bp, Artificial sequence
  SiRNA target sequence
tgcaaagtctggatattacgagttt

SEQ ID NO: 60852 - DNA, 25 bp, Artificial sequence
  SiRNA target sequence
gcaaagtctggatattacgagttta

SEQ ID NO: 60853 - DNA, 25 bp, Artificial sequence
  SiRNA target sequence
caaagtctggatattacgagtttaa

SEQ ID NO: 60854 - DNA, 25 bp, Artificial sequence
  SiRNA target sequence
aaagtctggatattacgagtttaaa

SEQ ID NO: 60855 - DNA, 25 bp, Artificial sequence
  SiRNA target sequence
aagtctggatattacgagtttaaag

SEQ ID NO: 60856 - DNA, 25 bp, Artificial sequence
  SiRNA target sequence
agtctggatattacgagtttaaaga

SEQ ID NO: 60857 - DNA, 25 bp, Artificial sequence
  SiRNA target sequence
gtctggatattacgagtttaaagag

SEQ ID NO: 60858 - DNA, 25 bp, Artificial sequence
  SiRNA target sequence
tctggatattacgagtttaaagagg

SEQ ID NO: 60859 - DNA, 25 bp, Artificial sequence
  SiRNA target sequence
ctggatattacgagtttaaagagga

SEQ ID NO: 60860 - DNA, 25 bp, Artificial sequence
  SiRNA target sequence
tggatattacgagtttaaagaggat

SEQ ID NO: 60861 - DNA, 25 bp, Artificial sequence
  SiRNA target sequence
ggatattacgagtttaaagaggata

SEQ ID NO: 60862 - DNA, 25 bp, Artificial sequence
  SiRNA target sequence
gatattacgagtttaaagaggatac

SEQ ID NO: 60863 - DNA, 25 bp, Artificial sequence
  SiRNA target sequence
atattacgagtttaaagaggataca

SEQ ID NO: 60864 - DNA, 25 bp, Artificial sequence
  SiRNA target sequence
tattacgagtttaaagaggatacac

SEQ ID NO: 60865 - DNA, 25 bp, Artificial sequence
  SiRNA target sequence
attacgagtttaaagaggatacaca

SEQ ID NO: 60866 - DNA, 25 bp, Artificial sequence
  SiRNA target sequence
ttacgagtttaaagaggatacacaa

SEQ ID NO: 60867 - DNA, 25 bp, Artificial sequence
  SiRNA target sequence
tacgagtttaaagaggatacacaaa

SEQ ID NO: 60868 - DNA, 25 bp, Artificial sequence
  SiRNA target sequence
acgagtttaaagaggatacacaaac

SEQ ID NO: 60869 - DNA, 25 bp, Artificial sequence
  SiRNA target sequence
cgagtttaaagaggatacacaaact

SEQ ID NO: 60870 - DNA, 25 bp, Artificial sequence
  SiRNA target sequence
gagtttaaagaggatacacaaactg

SEQ ID NO: 60871 - DNA, 25 bp, Artificial sequence
  SiRNA target sequence
agtttaaagaggatacacaaactga

SEQ ID NO: 60872 - DNA, 25 bp, Artificial sequence
  SiRNA target sequence
gtttaaagaggatacacaaactgat

SEQ ID NO: 60873 - DNA, 25 bp, Artificial sequence
  SiRNA target sequence
tttaaagaggatacacaaactgata

SEQ ID NO: 60874 - DNA, 25 bp, Artificial sequence
  SiRNA target sequence
ttaaagaggatacacaaactgataa

SEQ ID NO: 60875 - DNA, 25 bp, Artificial sequence
  SiRNA target sequence
taaagaggatacacaaactgataaa

SEQ ID NO: 60876 - DNA, 25 bp, Artificial sequence
  SiRNA target sequence
aaagaggatacacaaactgataaaa

SEQ ID NO: 60877 - DNA, 25 bp, Artificial sequence
  SiRNA target sequence
aagaggatacacaaactgataaaat

SEQ ID NO: 60878 - DNA, 25 bp, Artificial sequence
  SiRNA target sequence
agaggatacacaaactgataaaata

SEQ ID NO: 60879 - DNA, 25 bp, Artificial sequence
  SiRNA target sequence
gaggatacacaaactgataaaataa

SEQ ID NO: 60880 - DNA, 25 bp, Artificial sequence
  SiRNA target sequence
aggatacacaaactgataaaataag

SEQ ID NO: 60881 - DNA, 25 bp, Artificial sequence
  SiRNA target sequence
ggatacacaaactgataaaataaga

SEQ ID NO: 60882 - DNA, 25 bp, Artificial sequence
  SiRNA target sequence
gatacacaaactgataaaataagac

SEQ ID NO: 60883 - DNA, 25 bp, Artificial sequence
  SiRNA target sequence
atacacaaactgataaaataagact

SEQ ID NO: 60884 - DNA, 25 bp, Artificial sequence
  SiRNA target sequence
tacacaaactgataaaataagactg

SEQ ID NO: 60885 - DNA, 25 bp, Artificial sequence
  SiRNA target sequence
acacaaactgataaaataagactga

SEQ ID NO: 60886 - DNA, 25 bp, Artificial sequence
  SiRNA target sequence
cacaaactgataaaataagactgat

SEQ ID NO: 60887 - DNA, 25 bp, Artificial sequence
  SiRNA target sequence
acaaactgataaaataagactgata

SEQ ID NO: 60888 - DNA, 25 bp, Artificial sequence
  SiRNA target sequence
caaactgataaaataagactgatag

SEQ ID NO: 60889 - DNA, 25 bp, Artificial sequence
  SiRNA target sequence
aaactgataaaataagactgataga

SEQ ID NO: 60890 - DNA, 25 bp, Artificial sequence
  SiRNA target sequence
aactgataaaataagactgatagat

SEQ ID NO: 60891 - DNA, 25 bp, Artificial sequence
  SiRNA target sequence
actgataaaataagactgatagatt

SEQ ID NO: 60892 - DNA, 25 bp, Artificial sequence
  SiRNA target sequence
ctgataaaataagactgatagattt

SEQ ID NO: 60893 - DNA, 25 bp, Artificial sequence
  SiRNA target sequence
tgataaaataagactgatagatttt

SEQ ID NO: 60894 - DNA, 25 bp, Artificial sequence
  SiRNA target sequence
gataaaataagactgatagatttta

SEQ ID NO: 60895 - DNA, 25 bp, Artificial sequence
  SiRNA target sequence
ataaaataagactgatagattttaa

SEQ ID NO: 60896 - DNA, 25 bp, Artificial sequence
  SiRNA target sequence
taaaataagactgatagattttaat

SEQ ID NO: 60897 - DNA, 25 bp, Artificial sequence
  SiRNA target sequence
aaaataagactgatagattttaatg

SEQ ID NO: 60898 - DNA, 25 bp, Artificial sequence
  SiRNA target sequence
aaataagactgatagattttaatga

SEQ ID NO: 60899 - DNA, 25 bp, Artificial sequence
  SiRNA target sequence
aataagactgatagattttaatgaa

SEQ ID NO: 60900 - DNA, 25 bp, Artificial sequence
  SiRNA target sequence
ataagactgatagattttaatgaaa

SEQ ID NO: 60901 - DNA, 25 bp, Artificial sequence
  SiRNA target sequence
taagactgatagattttaatgaaaa

SEQ ID NO: 60902 - DNA, 25 bp, Artificial sequence
  SiRNA target sequence
aagactgatagattttaatgaaaag

SEQ ID NO: 60903 - DNA, 25 bp, Artificial sequence
  SiRNA target sequence
agactgatagattttaatgaaaagc

SEQ ID NO: 60904 - DNA, 25 bp, Artificial sequence
  SiRNA target sequence
gactgatagattttaatgaaaagct

SEQ ID NO: 60905 - DNA, 25 bp, Artificial sequence
  SiRNA target sequence
actgatagattttaatgaaaagcta

SEQ ID NO: 60906 - DNA, 25 bp, Artificial sequence
  SiRNA target sequence
ctgatagattttaatgaaaagctag

SEQ ID NO: 60907 - DNA, 25 bp, Artificial sequence
  SiRNA target sequence
tgatagattttaatgaaaagctaga

SEQ ID NO: 60908 - DNA, 25 bp, Artificial sequence
  SiRNA target sequence
gatagattttaatgaaaagctagaa

SEQ ID NO: 60909 - DNA, 25 bp, Artificial sequence
  SiRNA target sequence
atagattttaatgaaaagctagaat

SEQ ID NO: 60910 - DNA, 25 bp, Artificial sequence
  SiRNA target sequence
tagattttaatgaaaagctagaatt

SEQ ID NO: 60911 - DNA, 25 bp, Artificial sequence
  SiRNA target sequence
agattttaatgaaaagctagaattt

SEQ ID NO: 60912 - DNA, 25 bp, Artificial sequence
  SiRNA target sequence
gattttaatgaaaagctagaattta

SEQ ID NO: 60913 - DNA, 25 bp, Artificial sequence
  SiRNA target sequence
attttaatgaaaagctagaatttag

SEQ ID NO: 60914 - DNA, 25 bp, Artificial sequence
  SiRNA target sequence
ttttaatgaaaagctagaatttaga

SEQ ID NO: 60915 - DNA, 25 bp, Artificial sequence
  SiRNA target sequence
tttaatgaaaagctagaatttagaa

SEQ ID NO: 60916 - DNA, 25 bp, Artificial sequence
  SiRNA target sequence
ttaatgaaaagctagaatttagaaa

SEQ ID NO: 60917 - DNA, 25 bp, Artificial sequence
  SiRNA target sequence
taatgaaaagctagaatttagaaat

SEQ ID NO: 60918 - DNA, 25 bp, Artificial sequence
  SiRNA target sequence
aatgaaaagctagaatttagaaatg

SEQ ID NO: 60919 - DNA, 25 bp, Artificial sequence
  SiRNA target sequence
atgaaaagctagaatttagaaatgt

SEQ ID NO: 60920 - DNA, 25 bp, Artificial sequence
  SiRNA target sequence
tgaaaagctagaatttagaaatgta

SEQ ID NO: 60921 - DNA, 25 bp, Artificial sequence
  SiRNA target sequence
gaaaagctagaatttagaaatgtat

SEQ ID NO: 60922 - DNA, 25 bp, Artificial sequence
  SiRNA target sequence
aaaagctagaatttagaaatgtatc

SEQ ID NO: 60923 - DNA, 25 bp, Artificial sequence
  SiRNA target sequence
aaagctagaatttagaaatgtatct

SEQ ID NO: 60924 - DNA, 25 bp, Artificial sequence
  SiRNA target sequence
aagctagaatttagaaatgtatctt

SEQ ID NO: 60925 - DNA, 25 bp, Artificial sequence
  SiRNA target sequence
agctagaatttagaaatgtatcttt

SEQ ID NO: 60926 - DNA, 25 bp, Artificial sequence
  SiRNA target sequence
gctagaatttagaaatgtatctttt

SEQ ID NO: 60927 - DNA, 25 bp, Artificial sequence
  SiRNA target sequence
ctagaatttagaaatgtatctttta

SEQ ID NO: 60928 - DNA, 25 bp, Artificial sequence
  SiRNA target sequence
tagaatttagaaatgtatcttttag

SEQ ID NO: 60929 - DNA, 25 bp, Artificial sequence
  SiRNA target sequence
agaatttagaaatgtatcttttagt

SEQ ID NO: 60930 - DNA, 25 bp, Artificial sequence
  SiRNA target sequence
gaatttagaaatgtatcttttagtt

SEQ ID NO: 60931 - DNA, 25 bp, Artificial sequence
  SiRNA target sequence
aatttagaaatgtatcttttagtta

SEQ ID NO: 60932 - DNA, 25 bp, Artificial sequence
  SiRNA target sequence
atttagaaatgtatcttttagttat

SEQ ID NO: 60933 - DNA, 25 bp, Artificial sequence
  SiRNA target sequence
tttagaaatgtatcttttagttatt

SEQ ID NO: 60934 - DNA, 25 bp, Artificial sequence
  SiRNA target sequence
ttagaaatgtatcttttagttattt

SEQ ID NO: 60935 - DNA, 25 bp, Artificial sequence
  SiRNA target sequence
tagaaatgtatcttttagttattta

SEQ ID NO: 60936 - DNA, 25 bp, Artificial sequence
  SiRNA target sequence
agaaatgtatcttttagttatttaa

SEQ ID NO: 60937 - DNA, 25 bp, Artificial sequence
  SiRNA target sequence
gaaatgtatcttttagttatttaaa

SEQ ID NO: 60938 - DNA, 25 bp, Artificial sequence
  SiRNA target sequence
aaatgtatcttttagttatttaaat

SEQ ID NO: 60939 - DNA, 25 bp, Artificial sequence
  SiRNA target sequence
aatgtatcttttagttatttaaata

SEQ ID NO: 60940 - DNA, 25 bp, Artificial sequence
  SiRNA target sequence
atgtatcttttagttatttaaataa

SEQ ID NO: 60941 - DNA, 25 bp, Artificial sequence
  SiRNA target sequence
tgtatcttttagttatttaaataag

SEQ ID NO: 60942 - DNA, 25 bp, Artificial sequence
  SiRNA target sequence
gtatcttttagttatttaaataagc

SEQ ID NO: 60943 - DNA, 25 bp, Artificial sequence
  SiRNA target sequence
tatcttttagttatttaaataagcc

SEQ ID NO: 60944 - DNA, 25 bp, Artificial sequence
  SiRNA target sequence
atcttttagttatttaaataagcct

SEQ ID NO: 60945 - DNA, 25 bp, Artificial sequence
  SiRNA target sequence
tcttttagttatttaaataagccta

SEQ ID NO: 60946 - DNA, 25 bp, Artificial sequence
  SiRNA target sequence
cttttagttatttaaataagcctat

SEQ ID NO: 60947 - DNA, 25 bp, Artificial sequence
  SiRNA target sequence
ttttagttatttaaataagcctatt

SEQ ID NO: 60948 - DNA, 25 bp, Artificial sequence
  SiRNA target sequence
tttagttatttaaataagcctattt

SEQ ID NO: 60949 - DNA, 25 bp, Artificial sequence
  SiRNA target sequence
ttagttatttaaataagcctatttt

SEQ ID NO: 60950 - DNA, 25 bp, Artificial sequence
  SiRNA target sequence
tagttatttaaataagcctatttta

SEQ ID NO: 60951 - DNA, 25 bp, Artificial sequence
  SiRNA target sequence
agttatttaaataagcctattttag

SEQ ID NO: 60952 - DNA, 25 bp, Artificial sequence
  SiRNA target sequence
gttatttaaataagcctattttagt

SEQ ID NO: 60953 - DNA, 25 bp, Artificial sequence
  SiRNA target sequence
ttatttaaataagcctattttagtg

SEQ ID NO: 60954 - DNA, 25 bp, Artificial sequence
  SiRNA target sequence
tatttaaataagcctattttagtga

SEQ ID NO: 60955 - DNA, 25 bp, Artificial sequence
  SiRNA target sequence
atttaaataagcctattttagtgaa

SEQ ID NO: 60956 - DNA, 25 bp, Artificial sequence
  SiRNA target sequence
tttaaataagcctattttagtgaat

SEQ ID NO: 60957 - DNA, 25 bp, Artificial sequence
  SiRNA target sequence
ttaaataagcctattttagtgaatg

SEQ ID NO: 60958 - DNA, 25 bp, Artificial sequence
  SiRNA target sequence
taaataagcctattttagtgaatgc

SEQ ID NO: 60959 - DNA, 25 bp, Artificial sequence
  SiRNA target sequence
aaataagcctattttagtgaatgct

SEQ ID NO: 60960 - DNA, 25 bp, Artificial sequence
  SiRNA target sequence
aataagcctattttagtgaatgcta

SEQ ID NO: 60961 - DNA, 25 bp, Artificial sequence
  SiRNA target sequence
ataagcctattttagtgaatgctaa

SEQ ID NO: 60962 - DNA, 25 bp, Artificial sequence
  SiRNA target sequence
taagcctattttagtgaatgctaat

SEQ ID NO: 60963 - DNA, 25 bp, Artificial sequence
  SiRNA target sequence
aagcctattttagtgaatgctaatt

SEQ ID NO: 60964 - DNA, 25 bp, Artificial sequence
  SiRNA target sequence
agcctattttagtgaatgctaattt

SEQ ID NO: 60965 - DNA, 25 bp, Artificial sequence
  SiRNA target sequence
gcctattttagtgaatgctaatttc

SEQ ID NO: 60966 - DNA, 25 bp, Artificial sequence
  SiRNA target sequence
cctattttagtgaatgctaatttcg

SEQ ID NO: 60967 - DNA, 25 bp, Artificial sequence
  SiRNA target sequence
ctattttagtgaatgctaatttcgt

SEQ ID NO: 60968 - DNA, 25 bp, Artificial sequence
  SiRNA target sequence
tattttagtgaatgctaatttcgtt

SEQ ID NO: 60969 - DNA, 25 bp, Artificial sequence
  SiRNA target sequence
attttagtgaatgctaatttcgtta

SEQ ID NO: 60970 - DNA, 25 bp, Artificial sequence
  SiRNA target sequence
ttttagtgaatgctaatttcgttat

SEQ ID NO: 60971 - DNA, 25 bp, Artificial sequence
  SiRNA target sequence
tttagtgaatgctaatttcgttatt

SEQ ID NO: 60972 - DNA, 25 bp, Artificial sequence
  SiRNA target sequence
ttagtgaatgctaatttcgttatta

SEQ ID NO: 60973 - DNA, 25 bp, Artificial sequence
  SiRNA target sequence
tagtgaatgctaatttcgttattaa

SEQ ID NO: 60974 - DNA, 25 bp, Artificial sequence
  SiRNA target sequence
agtgaatgctaatttcgttattaat

SEQ ID NO: 60975 - DNA, 25 bp, Artificial sequence
  SiRNA target sequence
gtgaatgctaatttcgttattaata

SEQ ID NO: 60976 - DNA, 25 bp, Artificial sequence
  SiRNA target sequence
tgaatgctaatttcgttattaataa

SEQ ID NO: 60977 - DNA, 25 bp, Artificial sequence
  SiRNA target sequence
gaatgctaatttcgttattaataaa

SEQ ID NO: 60978 - DNA, 25 bp, Artificial sequence
  SiRNA target sequence
aatgctaatttcgttattaataaag

SEQ ID NO: 60979 - DNA, 25 bp, Artificial sequence
  SiRNA target sequence
atgctaatttcgttattaataaagg

SEQ ID NO: 60980 - DNA, 25 bp, Artificial sequence
  SiRNA target sequence
tgctaatttcgttattaataaaggg

SEQ ID NO: 60981 - DNA, 25 bp, Artificial sequence
  SiRNA target sequence
gctaatttcgttattaataaagggg

SEQ ID NO: 60982 - DNA, 25 bp, Artificial sequence
  SiRNA target sequence
ctaatttcgttattaataaagggga

SEQ ID NO: 60983 - DNA, 25 bp, Artificial sequence
  SiRNA target sequence
taatttcgttattaataaaggggag

SEQ ID NO: 60984 - DNA, 25 bp, Artificial sequence
  SiRNA target sequence
aatttcgttattaataaaggggagc

SEQ ID NO: 60985 - DNA, 25 bp, Artificial sequence
  SiRNA target sequence
atttcgttattaataaaggggagcg

SEQ ID NO: 60986 - DNA, 25 bp, Artificial sequence
  SiRNA target sequence
tttcgttattaataaaggggagcgt

SEQ ID NO: 60987 - DNA, 25 bp, Artificial sequence
  SiRNA target sequence
ttcgttattaataaaggggagcgtg

SEQ ID NO: 60988 - DNA, 25 bp, Artificial sequence
  SiRNA target sequence
tcgttattaataaaggggagcgtgt

SEQ ID NO: 60989 - DNA, 25 bp, Artificial sequence
  SiRNA target sequence
cgttattaataaaggggagcgtgtt

SEQ ID NO: 60990 - DNA, 25 bp, Artificial sequence
  SiRNA target sequence
gttattaataaaggggagcgtgttg

SEQ ID NO: 60991 - DNA, 25 bp, Artificial sequence
  SiRNA target sequence
ttattaataaaggggagcgtgttgc

SEQ ID NO: 60992 - DNA, 25 bp, Artificial sequence
  SiRNA target sequence
tattaataaaggggagcgtgttgct

SEQ ID NO: 60993 - DNA, 25 bp, Artificial sequence
  SiRNA target sequence
attaataaaggggagcgtgttgcta

SEQ ID NO: 60994 - DNA, 25 bp, Artificial sequence
  SiRNA target sequence
ttaataaaggggagcgtgttgctat

SEQ ID NO: 60995 - DNA, 25 bp, Artificial sequence
  SiRNA target sequence
taataaaggggagcgtgttgctatt

SEQ ID NO: 60996 - DNA, 25 bp, Artificial sequence
  SiRNA target sequence
aataaaggggagcgtgttgctatta

SEQ ID NO: 60997 - DNA, 25 bp, Artificial sequence
  SiRNA target sequence
ataaaggggagcgtgttgctattat

SEQ ID NO: 60998 - DNA, 25 bp, Artificial sequence
  SiRNA target sequence
taaaggggagcgtgttgctattata

SEQ ID NO: 60999 - DNA, 25 bp, Artificial sequence
  SiRNA target sequence
aaaggggagcgtgttgctattatag

SEQ ID NO: 61000 - DNA, 25 bp, Artificial sequence
  SiRNA target sequence
aaggggagcgtgttgctattatagg

SEQ ID NO: 61001 - DNA, 25 bp, Artificial sequence
  SiRNA target sequence
aggggagcgtgttgctattatagga

SEQ ID NO: 61002 - DNA, 25 bp, Artificial sequence
  SiRNA target sequence
ggggagcgtgttgctattataggaa

SEQ ID NO: 61003 - DNA, 25 bp, Artificial sequence
  SiRNA target sequence
gggagcgtgttgctattataggaaa

SEQ ID NO: 61004 - DNA, 25 bp, Artificial sequence
  SiRNA target sequence
ggagcgtgttgctattataggaaaa

SEQ ID NO: 61005 - DNA, 25 bp, Artificial sequence
  SiRNA target sequence
gagcgtgttgctattataggaaaaa

SEQ ID NO: 61006 - DNA, 25 bp, Artificial sequence
  SiRNA target sequence
agcgtgttgctattataggaaaaaa

SEQ ID NO: 61007 - DNA, 25 bp, Artificial sequence
  SiRNA target sequence
gcgtgttgctattataggaaaaaat

SEQ ID NO: 61008 - DNA, 25 bp, Artificial sequence
  SiRNA target sequence
cgtgttgctattataggaaaaaatg

SEQ ID NO: 61009 - DNA, 25 bp, Artificial sequence
  SiRNA target sequence
gtgttgctattataggaaaaaatgg

SEQ ID NO: 61010 - DNA, 25 bp, Artificial sequence
  SiRNA target sequence
tgttgctattataggaaaaaatgga

SEQ ID NO: 61011 - DNA, 25 bp, Artificial sequence
  SiRNA target sequence
gttgctattataggaaaaaatggaa

SEQ ID NO: 61012 - DNA, 25 bp, Artificial sequence
  SiRNA target sequence
ttgctattataggaaaaaatggaac

SEQ ID NO: 61013 - DNA, 25 bp, Artificial sequence
  SiRNA target sequence
tgctattataggaaaaaatggaaca

SEQ ID NO: 61014 - DNA, 25 bp, Artificial sequence
  SiRNA target sequence
gctattataggaaaaaatggaacag

SEQ ID NO: 61015 - DNA, 25 bp, Artificial sequence
  SiRNA target sequence
ctattataggaaaaaatggaacagg

SEQ ID NO: 61016 - DNA, 25 bp, Artificial sequence
  SiRNA target sequence
tattataggaaaaaatggaacaggt

SEQ ID NO: 61017 - DNA, 25 bp, Artificial sequence
  SiRNA target sequence
attataggaaaaaatggaacaggta

SEQ ID NO: 61018 - DNA, 25 bp, Artificial sequence
  SiRNA target sequence
ttataggaaaaaatggaacaggtaa

SEQ ID NO: 61019 - DNA, 25 bp, Artificial sequence
  SiRNA target sequence
tataggaaaaaatggaacaggtaaa

SEQ ID NO: 61020 - DNA, 25 bp, Artificial sequence
  SiRNA target sequence
ataggaaaaaatggaacaggtaaaa

SEQ ID NO: 61021 - DNA, 25 bp, Artificial sequence
  SiRNA target sequence
taggaaaaaatggaacaggtaaaag

SEQ ID NO: 61022 - DNA, 25 bp, Artificial sequence
  SiRNA target sequence
aggaaaaaatggaacaggtaaaagt

SEQ ID NO: 61023 - DNA, 25 bp, Artificial sequence
  SiRNA target sequence
ggaaaaaatggaacaggtaaaagta

SEQ ID NO: 61024 - DNA, 25 bp, Artificial sequence
  SiRNA target sequence
gaaaaaatggaacaggtaaaagtac

SEQ ID NO: 61025 - DNA, 25 bp, Artificial sequence
  SiRNA target sequence
aaaaaatggaacaggtaaaagtaca

SEQ ID NO: 61026 - DNA, 25 bp, Artificial sequence
  SiRNA target sequence
aaaaatggaacaggtaaaagtacaa

SEQ ID NO: 61027 - DNA, 25 bp, Artificial sequence
  SiRNA target sequence
aaaatggaacaggtaaaagtacaat

SEQ ID NO: 61028 - DNA, 25 bp, Artificial sequence
  SiRNA target sequence
aaatggaacaggtaaaagtacaata

SEQ ID NO: 61029 - DNA, 25 bp, Artificial sequence
  SiRNA target sequence
aatggaacaggtaaaagtacaataa

SEQ ID NO: 61030 - DNA, 25 bp, Artificial sequence
  SiRNA target sequence
atggaacaggtaaaagtacaataat

SEQ ID NO: 61031 - DNA, 25 bp, Artificial sequence
  SiRNA target sequence
tggaacaggtaaaagtacaataata

SEQ ID NO: 61032 - DNA, 25 bp, Artificial sequence
  SiRNA target sequence
ggaacaggtaaaagtacaataataa

SEQ ID NO: 61033 - DNA, 25 bp, Artificial sequence
  SiRNA target sequence
gaacaggtaaaagtacaataataaa

SEQ ID NO: 61034 - DNA, 25 bp, Artificial sequence
  SiRNA target sequence
aacaggtaaaagtacaataataaaa

SEQ ID NO: 61035 - DNA, 25 bp, Artificial sequence
  SiRNA target sequence
acaggtaaaagtacaataataaaat

SEQ ID NO: 61036 - DNA, 25 bp, Artificial sequence
  SiRNA target sequence
caggtaaaagtacaataataaaatt

SEQ ID NO: 61037 - DNA, 25 bp, Artificial sequence
  SiRNA target sequence
aggtaaaagtacaataataaaattg

SEQ ID NO: 61038 - DNA, 25 bp, Artificial sequence
  SiRNA target sequence
ggtaaaagtacaataataaaattgt

SEQ ID NO: 61039 - DNA, 25 bp, Artificial sequence
  SiRNA target sequence
gtaaaagtacaataataaaattgtt

SEQ ID NO: 61040 - DNA, 25 bp, Artificial sequence
  SiRNA target sequence
taaaagtacaataataaaattgtta

SEQ ID NO: 61041 - DNA, 25 bp, Artificial sequence
  SiRNA target sequence
aaaagtacaataataaaattgttaa

SEQ ID NO: 61042 - DNA, 25 bp, Artificial sequence
  SiRNA target sequence
aaagtacaataataaaattgttaat

SEQ ID NO: 61043 - DNA, 25 bp, Artificial sequence
  SiRNA target sequence
aagtacaataataaaattgttaatg

SEQ ID NO: 61044 - DNA, 25 bp, Artificial sequence
  SiRNA target sequence
agtacaataataaaattgttaatga

SEQ ID NO: 61045 - DNA, 25 bp, Artificial sequence
  SiRNA target sequence
gtacaataataaaattgttaatgaa

SEQ ID NO: 61046 - DNA, 25 bp, Artificial sequence
  SiRNA target sequence
tacaataataaaattgttaatgaaa

SEQ ID NO: 61047 - DNA, 25 bp, Artificial sequence
  SiRNA target sequence
acaataataaaattgttaatgaaat

SEQ ID NO: 61048 - DNA, 25 bp, Artificial sequence
  SiRNA target sequence
caataataaaattgttaatgaaatt

SEQ ID NO: 61049 - DNA, 25 bp, Artificial sequence
  SiRNA target sequence
aataataaaattgttaatgaaattt

SEQ ID NO: 61050 - DNA, 25 bp, Artificial sequence
  SiRNA target sequence
ataataaaattgttaatgaaatttt

SEQ ID NO: 61051 - DNA, 25 bp, Artificial sequence
  SiRNA target sequence
taataaaattgttaatgaaatttta

SEQ ID NO: 61052 - DNA, 25 bp, Artificial sequence
  SiRNA target sequence
aataaaattgttaatgaaattttat

SEQ ID NO: 61053 - DNA, 25 bp, Artificial sequence
  SiRNA target sequence
ataaaattgttaatgaaattttata

SEQ ID NO: 61054 - DNA, 25 bp, Artificial sequence
  SiRNA target sequence
taaaattgttaatgaaattttataa

SEQ ID NO: 61055 - DNA, 25 bp, Artificial sequence
  SiRNA target sequence
aaaattgttaatgaaattttataaa

SEQ ID NO: 61056 - DNA, 25 bp, Artificial sequence
  SiRNA target sequence
aaattgttaatgaaattttataaat

SEQ ID NO: 61057 - DNA, 25 bp, Artificial sequence
  SiRNA target sequence
aattgttaatgaaattttataaata

SEQ ID NO: 61058 - DNA, 25 bp, Artificial sequence
  SiRNA target sequence
attgttaatgaaattttataaatat

SEQ ID NO: 61059 - DNA, 25 bp, Artificial sequence
  SiRNA target sequence
ttgttaatgaaattttataaatatg

SEQ ID NO: 61060 - DNA, 25 bp, Artificial sequence
  SiRNA target sequence
tgttaatgaaattttataaatatga

SEQ ID NO: 61061 - DNA, 25 bp, Artificial sequence
  SiRNA target sequence
gttaatgaaattttataaatatgat

SEQ ID NO: 61062 - DNA, 25 bp, Artificial sequence
  SiRNA target sequence
ttaatgaaattttataaatatgatg

SEQ ID NO: 61063 - DNA, 25 bp, Artificial sequence
  SiRNA target sequence
taatgaaattttataaatatgatgg

SEQ ID NO: 61064 - DNA, 25 bp, Artificial sequence
  SiRNA target sequence
aatgaaattttataaatatgatgga

SEQ ID NO: 61065 - DNA, 25 bp, Artificial sequence
  SiRNA target sequence
atgaaattttataaatatgatggag

SEQ ID NO: 61066 - DNA, 25 bp, Artificial sequence
  SiRNA target sequence
tgaaattttataaatatgatggaga

SEQ ID NO: 61067 - DNA, 25 bp, Artificial sequence
  SiRNA target sequence
gaaattttataaatatgatggagat

SEQ ID NO: 61068 - DNA, 25 bp, Artificial sequence
  SiRNA target sequence
aaattttataaatatgatggagata

SEQ ID NO: 61069 - DNA, 25 bp, Artificial sequence
  SiRNA target sequence
aattttataaatatgatggagatat

SEQ ID NO: 61070 - DNA, 25 bp, Artificial sequence
  SiRNA target sequence
attttataaatatgatggagatata

SEQ ID NO: 61071 - DNA, 25 bp, Artificial sequence
  SiRNA target sequence
ttttataaatatgatggagatatat

SEQ ID NO: 61072 - DNA, 25 bp, Artificial sequence
  SiRNA target sequence
tttataaatatgatggagatatatt

SEQ ID NO: 61073 - DNA, 25 bp, Artificial sequence
  SiRNA target sequence
ttataaatatgatggagatatatta

SEQ ID NO: 61074 - DNA, 25 bp, Artificial sequence
  SiRNA target sequence
tataaatatgatggagatatattaa

SEQ ID NO: 61075 - DNA, 25 bp, Artificial sequence
  SiRNA target sequence
ataaatatgatggagatatattaat

SEQ ID NO: 61076 - DNA, 25 bp, Artificial sequence
  SiRNA target sequence
taaatatgatggagatatattaatt

SEQ ID NO: 61077 - DNA, 25 bp, Artificial sequence
  SiRNA target sequence
aaatatgatggagatatattaattg

SEQ ID NO: 61078 - DNA, 25 bp, Artificial sequence
  SiRNA target sequence
aatatgatggagatatattaattga

SEQ ID NO: 61079 - DNA, 25 bp, Artificial sequence
  SiRNA target sequence
atatgatggagatatattaattgat

SEQ ID NO: 61080 - DNA, 25 bp, Artificial sequence
  SiRNA target sequence
tatgatggagatatattaattgatg

SEQ ID NO: 61081 - DNA, 25 bp, Artificial sequence
  SiRNA target sequence
atgatggagatatattaattgatga

SEQ ID NO: 61082 - DNA, 25 bp, Artificial sequence
  SiRNA target sequence
tgatggagatatattaattgatgat

SEQ ID NO: 61083 - DNA, 25 bp, Artificial sequence
  SiRNA target sequence
gatggagatatattaattgatgata

SEQ ID NO: 61084 - DNA, 25 bp, Artificial sequence
  SiRNA target sequence
atggagatatattaattgatgatac

SEQ ID NO: 61085 - DNA, 25 bp, Artificial sequence
  SiRNA target sequence
tggagatatattaattgatgataca

SEQ ID NO: 61086 - DNA, 25 bp, Artificial sequence
  SiRNA target sequence
ggagatatattaattgatgatacag

SEQ ID NO: 61087 - DNA, 25 bp, Artificial sequence
  SiRNA target sequence
gagatatattaattgatgatacaga

SEQ ID NO: 61088 - DNA, 25 bp, Artificial sequence
  SiRNA target sequence
agatatattaattgatgatacagaa

SEQ ID NO: 61089 - DNA, 25 bp, Artificial sequence
  SiRNA target sequence
gatatattaattgatgatacagaaa

SEQ ID NO: 61090 - DNA, 25 bp, Artificial sequence
  SiRNA target sequence
atatattaattgatgatacagaaat

SEQ ID NO: 61091 - DNA, 25 bp, Artificial sequence
  SiRNA target sequence
tatattaattgatgatacagaaata

SEQ ID NO: 61092 - DNA, 25 bp, Artificial sequence
  SiRNA target sequence
atattaattgatgatacagaaatag

SEQ ID NO: 61093 - DNA, 25 bp, Artificial sequence
  SiRNA target sequence
tattaattgatgatacagaaataga

SEQ ID NO: 61094 - DNA, 25 bp, Artificial sequence
  SiRNA target sequence
attaattgatgatacagaaatagat

SEQ ID NO: 61095 - DNA, 25 bp, Artificial sequence
  SiRNA target sequence
ttaattgatgatacagaaatagata

SEQ ID NO: 61096 - DNA, 25 bp, Artificial sequence
  SiRNA target sequence
taattgatgatacagaaatagataa

SEQ ID NO: 61097 - DNA, 25 bp, Artificial sequence
  SiRNA target sequence
aattgatgatacagaaatagataat

SEQ ID NO: 61098 - DNA, 25 bp, Artificial sequence
  SiRNA target sequence
attgatgatacagaaatagataata

SEQ ID NO: 61099 - DNA, 25 bp, Artificial sequence
  SiRNA target sequence
ttgatgatacagaaatagataatat

SEQ ID NO: 61100 - DNA, 25 bp, Artificial sequence
  SiRNA target sequence
tgatgatacagaaatagataatatt

SEQ ID NO: 61101 - DNA, 25 bp, Artificial sequence
  SiRNA target sequence
gatgatacagaaatagataatattt

SEQ ID NO: 61102 - DNA, 25 bp, Artificial sequence
  SiRNA target sequence
atgatacagaaatagataatatttc

SEQ ID NO: 61103 - DNA, 25 bp, Artificial sequence
  SiRNA target sequence
tgatacagaaatagataatatttcg

SEQ ID NO: 61104 - DNA, 25 bp, Artificial sequence
  SiRNA target sequence
gatacagaaatagataatatttcgg

SEQ ID NO: 61105 - DNA, 25 bp, Artificial sequence
  SiRNA target sequence
atacagaaatagataatatttcgga

SEQ ID NO: 61106 - DNA, 25 bp, Artificial sequence
  SiRNA target sequence
tacagaaatagataatatttcggat

SEQ ID NO: 61107 - DNA, 25 bp, Artificial sequence
  SiRNA target sequence
acagaaatagataatatttcggata

SEQ ID NO: 61108 - DNA, 25 bp, Artificial sequence
  SiRNA target sequence
cagaaatagataatatttcggatag

SEQ ID NO: 61109 - DNA, 25 bp, Artificial sequence
  SiRNA target sequence
agaaatagataatatttcggataga

SEQ ID NO: 61110 - DNA, 25 bp, Artificial sequence
  SiRNA target sequence
gaaatagataatatttcggatagaa

SEQ ID NO: 61111 - DNA, 25 bp, Artificial sequence
  SiRNA target sequence
aaatagataatatttcggatagaag

SEQ ID NO: 61112 - DNA, 25 bp, Artificial sequence
  SiRNA target sequence
aatagataatatttcggatagaagt

SEQ ID NO: 61113 - DNA, 25 bp, Artificial sequence
  SiRNA target sequence
atagataatatttcggatagaagtt

SEQ ID NO: 61114 - DNA, 25 bp, Artificial sequence
  SiRNA target sequence
tagataatatttcggatagaagtta

SEQ ID NO: 61115 - DNA, 25 bp, Artificial sequence
  SiRNA target sequence
agataatatttcggatagaagttac

SEQ ID NO: 61116 - DNA, 25 bp, Artificial sequence
  SiRNA target sequence
gataatatttcggatagaagttaca

SEQ ID NO: 61117 - DNA, 25 bp, Artificial sequence
  SiRNA target sequence
ataatatttcggatagaagttacag

SEQ ID NO: 61118 - DNA, 25 bp, Artificial sequence
  SiRNA target sequence
taatatttcggatagaagttacaga

SEQ ID NO: 61119 - DNA, 25 bp, Artificial sequence
  SiRNA target sequence
aatatttcggatagaagttacagaa

SEQ ID NO: 61120 - DNA, 25 bp, Artificial sequence
  SiRNA target sequence
atatttcggatagaagttacagaag

SEQ ID NO: 61121 - DNA, 25 bp, Artificial sequence
  SiRNA target sequence
tatttcggatagaagttacagaagt

SEQ ID NO: 61122 - DNA, 25 bp, Artificial sequence
  SiRNA target sequence
atttcggatagaagttacagaagtt

SEQ ID NO: 61123 - DNA, 25 bp, Artificial sequence
  SiRNA target sequence
tttcggatagaagttacagaagttt

SEQ ID NO: 61124 - DNA, 25 bp, Artificial sequence
  SiRNA target sequence
ttcggatagaagttacagaagttta

SEQ ID NO: 61125 - DNA, 25 bp, Artificial sequence
  SiRNA target sequence
tcggatagaagttacagaagtttaa

SEQ ID NO: 61126 - DNA, 25 bp, Artificial sequence
  SiRNA target sequence
cggatagaagttacagaagtttaat

SEQ ID NO: 61127 - DNA, 25 bp, Artificial sequence
  SiRNA target sequence
ggatagaagttacagaagtttaata

SEQ ID NO: 61128 - DNA, 25 bp, Artificial sequence
  SiRNA target sequence
gatagaagttacagaagtttaatat

SEQ ID NO: 61129 - DNA, 25 bp, Artificial sequence
  SiRNA target sequence
atagaagttacagaagtttaatatc

SEQ ID NO: 61130 - DNA, 25 bp, Artificial sequence
  SiRNA target sequence
tagaagttacagaagtttaatatca

SEQ ID NO: 61131 - DNA, 25 bp, Artificial sequence
  SiRNA target sequence
agaagttacagaagtttaatatcat

SEQ ID NO: 61132 - DNA, 25 bp, Artificial sequence
  SiRNA target sequence
gaagttacagaagtttaatatcata

SEQ ID NO: 61133 - DNA, 25 bp, Artificial sequence
  SiRNA target sequence
aagttacagaagtttaatatcatat

SEQ ID NO: 61134 - DNA, 25 bp, Artificial sequence
  SiRNA target sequence
agttacagaagtttaatatcatatg

SEQ ID NO: 61135 - DNA, 25 bp, Artificial sequence
  SiRNA target sequence
gttacagaagtttaatatcatatgc

SEQ ID NO: 61136 - DNA, 25 bp, Artificial sequence
  SiRNA target sequence
ttacagaagtttaatatcatatgca

SEQ ID NO: 61137 - DNA, 25 bp, Artificial sequence
  SiRNA target sequence
tacagaagtttaatatcatatgcaa

SEQ ID NO: 61138 - DNA, 25 bp, Artificial sequence
  SiRNA target sequence
acagaagtttaatatcatatgcaac

SEQ ID NO: 61139 - DNA, 25 bp, Artificial sequence
  SiRNA target sequence
cagaagtttaatatcatatgcaaca

SEQ ID NO: 61140 - DNA, 25 bp, Artificial sequence
  SiRNA target sequence
agaagtttaatatcatatgcaacac

SEQ ID NO: 61141 - DNA, 25 bp, Artificial sequence
  SiRNA target sequence
gaagtttaatatcatatgcaacaca

SEQ ID NO: 61142 - DNA, 25 bp, Artificial sequence
  SiRNA target sequence
aagtttaatatcatatgcaacacaa

SEQ ID NO: 61143 - DNA, 25 bp, Artificial sequence
  SiRNA target sequence
agtttaatatcatatgcaacacaaa

SEQ ID NO: 61144 - DNA, 25 bp, Artificial sequence
  SiRNA target sequence
gtttaatatcatatgcaacacaaaa

SEQ ID NO: 61145 - DNA, 25 bp, Artificial sequence
  SiRNA target sequence
tttaatatcatatgcaacacaaaac

SEQ ID NO: 61146 - DNA, 25 bp, Artificial sequence
  SiRNA target sequence
ttaatatcatatgcaacacaaaaca

SEQ ID NO: 61147 - DNA, 25 bp, Artificial sequence
  SiRNA target sequence
taatatcatatgcaacacaaaacac

SEQ ID NO: 61148 - DNA, 25 bp, Artificial sequence
  SiRNA target sequence
aatatcatatgcaacacaaaacacg

SEQ ID NO: 61149 - DNA, 25 bp, Artificial sequence
  SiRNA target sequence
atatcatatgcaacacaaaacacgt

SEQ ID NO: 61150 - DNA, 25 bp, Artificial sequence
  SiRNA target sequence
tatcatatgcaacacaaaacacgtt

SEQ ID NO: 61151 - DNA, 25 bp, Artificial sequence
  SiRNA target sequence
atcatatgcaacacaaaacacgttc

SEQ ID NO: 61152 - DNA, 25 bp, Artificial sequence
  SiRNA target sequence
tcatatgcaacacaaaacacgttct

SEQ ID NO: 61153 - DNA, 25 bp, Artificial sequence
  SiRNA target sequence
catatgcaacacaaaacacgttctt

SEQ ID NO: 61154 - DNA, 25 bp, Artificial sequence
  SiRNA target sequence
atatgcaacacaaaacacgttctta

SEQ ID NO: 61155 - DNA, 25 bp, Artificial sequence
  SiRNA target sequence
tatgcaacacaaaacacgttcttat

SEQ ID NO: 61156 - DNA, 25 bp, Artificial sequence
  SiRNA target sequence
atgcaacacaaaacacgttcttatt

SEQ ID NO: 61157 - DNA, 25 bp, Artificial sequence
  SiRNA target sequence
tgcaacacaaaacacgttcttattc

SEQ ID NO: 61158 - DNA, 25 bp, Artificial sequence
  SiRNA target sequence
gcaacacaaaacacgttcttattcg

SEQ ID NO: 61159 - DNA, 25 bp, Artificial sequence
  SiRNA target sequence
caacacaaaacacgttcttattcga

SEQ ID NO: 61160 - DNA, 25 bp, Artificial sequence
  SiRNA target sequence
aacacaaaacacgttcttattcgat

SEQ ID NO: 61161 - DNA, 25 bp, Artificial sequence
  SiRNA target sequence
acacaaaacacgttcttattcgata

SEQ ID NO: 61162 - DNA, 25 bp, Artificial sequence
  SiRNA target sequence
cacaaaacacgttcttattcgataa

SEQ ID NO: 61163 - DNA, 25 bp, Artificial sequence
  SiRNA target sequence
acaaaacacgttcttattcgataat

SEQ ID NO: 61164 - DNA, 25 bp, Artificial sequence
  SiRNA target sequence
caaaacacgttcttattcgataata

SEQ ID NO: 61165 - DNA, 25 bp, Artificial sequence
  SiRNA target sequence
aaaacacgttcttattcgataatac

SEQ ID NO: 61166 - DNA, 25 bp, Artificial sequence
  SiRNA target sequence
aaacacgttcttattcgataatact

SEQ ID NO: 61167 - DNA, 25 bp, Artificial sequence
  SiRNA target sequence
aacacgttcttattcgataatactg

SEQ ID NO: 61168 - DNA, 25 bp, Artificial sequence
  SiRNA target sequence
acacgttcttattcgataatactgt

SEQ ID NO: 61169 - DNA, 25 bp, Artificial sequence
  SiRNA target sequence
cacgttcttattcgataatactgtg

SEQ ID NO: 61170 - DNA, 25 bp, Artificial sequence
  SiRNA target sequence
acgttcttattcgataatactgtga

SEQ ID NO: 61171 - DNA, 25 bp, Artificial sequence
  SiRNA target sequence
cgttcttattcgataatactgtgac

SEQ ID NO: 61172 - DNA, 25 bp, Artificial sequence
  SiRNA target sequence
gttcttattcgataatactgtgaca

SEQ ID NO: 61173 - DNA, 25 bp, Artificial sequence
  SiRNA target sequence
ttcttattcgataatactgtgacat

SEQ ID NO: 61174 - DNA, 25 bp, Artificial sequence
  SiRNA target sequence
tcttattcgataatactgtgacata

SEQ ID NO: 61175 - DNA, 25 bp, Artificial sequence
  SiRNA target sequence
cttattcgataatactgtgacatac

SEQ ID NO: 61176 - DNA, 25 bp, Artificial sequence
  SiRNA target sequence
ttattcgataatactgtgacataca

SEQ ID NO: 61177 - DNA, 25 bp, Artificial sequence
  SiRNA target sequence
tattcgataatactgtgacatacaa

SEQ ID NO: 61178 - DNA, 25 bp, Artificial sequence
  SiRNA target sequence
attcgataatactgtgacatacaat

SEQ ID NO: 61179 - DNA, 25 bp, Artificial sequence
  SiRNA target sequence
ttcgataatactgtgacatacaata

SEQ ID NO: 61180 - DNA, 25 bp, Artificial sequence
  SiRNA target sequence
tcgataatactgtgacatacaatat

SEQ ID NO: 61181 - DNA, 25 bp, Artificial sequence
  SiRNA target sequence
cgataatactgtgacatacaatata

SEQ ID NO: 61182 - DNA, 25 bp, Artificial sequence
  SiRNA target sequence
gataatactgtgacatacaatatat

SEQ ID NO: 61183 - DNA, 25 bp, Artificial sequence
  SiRNA target sequence
ataatactgtgacatacaatatatt

SEQ ID NO: 61184 - DNA, 25 bp, Artificial sequence
  SiRNA target sequence
taatactgtgacatacaatatattt

SEQ ID NO: 61185 - DNA, 25 bp, Artificial sequence
  SiRNA target sequence
aatactgtgacatacaatatatttt

SEQ ID NO: 61186 - DNA, 25 bp, Artificial sequence
  SiRNA target sequence
atactgtgacatacaatatatttta

SEQ ID NO: 61187 - DNA, 25 bp, Artificial sequence
  SiRNA target sequence
tactgtgacatacaatatattttac

SEQ ID NO: 61188 - DNA, 25 bp, Artificial sequence
  SiRNA target sequence
actgtgacatacaatatattttacg

SEQ ID NO: 61189 - DNA, 25 bp, Artificial sequence
  SiRNA target sequence
ctgtgacatacaatatattttacgg

SEQ ID NO: 61190 - DNA, 25 bp, Artificial sequence
  SiRNA target sequence
tgtgacatacaatatattttacggg

SEQ ID NO: 61191 - DNA, 25 bp, Artificial sequence
  SiRNA target sequence
gtgacatacaatatattttacggga

SEQ ID NO: 61192 - DNA, 25 bp, Artificial sequence
  SiRNA target sequence
tgacatacaatatattttacgggac

SEQ ID NO: 61193 - DNA, 25 bp, Artificial sequence
  SiRNA target sequence
gacatacaatatattttacgggact

SEQ ID NO: 61194 - DNA, 25 bp, Artificial sequence
  SiRNA target sequence
acatacaatatattttacgggacta

SEQ ID NO: 61195 - DNA, 25 bp, Artificial sequence
  SiRNA target sequence
catacaatatattttacgggactaa

SEQ ID NO: 61196 - DNA, 25 bp, Artificial sequence
  SiRNA target sequence
atacaatatattttacgggactaaa

SEQ ID NO: 61197 - DNA, 25 bp, Artificial sequence
  SiRNA target sequence
tacaatatattttacgggactaaaa

SEQ ID NO: 61198 - DNA, 25 bp, Artificial sequence
  SiRNA target sequence
acaatatattttacgggactaaaaa

SEQ ID NO: 61199 - DNA, 25 bp, Artificial sequence
  SiRNA target sequence
caatatattttacgggactaaaaac

SEQ ID NO: 61200 - DNA, 25 bp, Artificial sequence
  SiRNA target sequence
aatatattttacgggactaaaaacg

SEQ ID NO: 61201 - DNA, 25 bp, Artificial sequence
  SiRNA target sequence
atatattttacgggactaaaaacgt

SEQ ID NO: 61202 - DNA, 25 bp, Artificial sequence
  SiRNA target sequence
tatattttacgggactaaaaacgta

SEQ ID NO: 61203 - DNA, 25 bp, Artificial sequence
  SiRNA target sequence
atattttacgggactaaaaacgtaa

SEQ ID NO: 61204 - DNA, 25 bp, Artificial sequence
  SiRNA target sequence
tattttacgggactaaaaacgtaac

SEQ ID NO: 61205 - DNA, 25 bp, Artificial sequence
  SiRNA target sequence
attttacgggactaaaaacgtaaca

SEQ ID NO: 61206 - DNA, 25 bp, Artificial sequence
  SiRNA target sequence
ttttacgggactaaaaacgtaacag

SEQ ID NO: 61207 - DNA, 25 bp, Artificial sequence
  SiRNA target sequence
tttacgggactaaaaacgtaacaga

SEQ ID NO: 61208 - DNA, 25 bp, Artificial sequence
  SiRNA target sequence
ttacgggactaaaaacgtaacagaa

SEQ ID NO: 61209 - DNA, 25 bp, Artificial sequence
  SiRNA target sequence
tacgggactaaaaacgtaacagaaa

SEQ ID NO: 61210 - DNA, 25 bp, Artificial sequence
  SiRNA target sequence
acgggactaaaaacgtaacagaaaa

SEQ ID NO: 61211 - DNA, 25 bp, Artificial sequence
  SiRNA target sequence
cgggactaaaaacgtaacagaaaaa

SEQ ID NO: 61212 - DNA, 25 bp, Artificial sequence
  SiRNA target sequence
gggactaaaaacgtaacagaaaaag

SEQ ID NO: 61213 - DNA, 25 bp, Artificial sequence
  SiRNA target sequence
ggactaaaaacgtaacagaaaaaga

SEQ ID NO: 61214 - DNA, 25 bp, Artificial sequence
  SiRNA target sequence
gactaaaaacgtaacagaaaaagaa

SEQ ID NO: 61215 - DNA, 25 bp, Artificial sequence
  SiRNA target sequence
actaaaaacgtaacagaaaaagaag

SEQ ID NO: 61216 - DNA, 25 bp, Artificial sequence
  SiRNA target sequence
ctaaaaacgtaacagaaaaagaagt

SEQ ID NO: 61217 - DNA, 25 bp, Artificial sequence
  SiRNA target sequence
taaaaacgtaacagaaaaagaagtt

SEQ ID NO: 61218 - DNA, 25 bp, Artificial sequence
  SiRNA target sequence
aaaaacgtaacagaaaaagaagttt

SEQ ID NO: 61219 - DNA, 25 bp, Artificial sequence
  SiRNA target sequence
aaaacgtaacagaaaaagaagtttt

SEQ ID NO: 61220 - DNA, 25 bp, Artificial sequence
  SiRNA target sequence
aaacgtaacagaaaaagaagtttta

SEQ ID NO: 61221 - DNA, 25 bp, Artificial sequence
  SiRNA target sequence
aacgtaacagaaaaagaagttttag

SEQ ID NO: 61222 - DNA, 25 bp, Artificial sequence
  SiRNA target sequence
acgtaacagaaaaagaagttttaga

SEQ ID NO: 61223 - DNA, 25 bp, Artificial sequence
  SiRNA target sequence
cgtaacagaaaaagaagttttagaa

SEQ ID NO: 61224 - DNA, 25 bp, Artificial sequence
  SiRNA target sequence
gtaacagaaaaagaagttttagaat

SEQ ID NO: 61225 - DNA, 25 bp, Artificial sequence
  SiRNA target sequence
taacagaaaaagaagttttagaatt

SEQ ID NO: 61226 - DNA, 25 bp, Artificial sequence
  SiRNA target sequence
aacagaaaaagaagttttagaatta

SEQ ID NO: 61227 - DNA, 25 bp, Artificial sequence
  SiRNA target sequence
acagaaaaagaagttttagaattag

SEQ ID NO: 61228 - DNA, 25 bp, Artificial sequence
  SiRNA target sequence
cagaaaaagaagttttagaattagc

SEQ ID NO: 61229 - DNA, 25 bp, Artificial sequence
  SiRNA target sequence
agaaaaagaagttttagaattagcc

SEQ ID NO: 61230 - DNA, 25 bp, Artificial sequence
  SiRNA target sequence
gaaaaagaagttttagaattagcca

SEQ ID NO: 61231 - DNA, 25 bp, Artificial sequence
  SiRNA target sequence
aaaaagaagttttagaattagccaa

SEQ ID NO: 61232 - DNA, 25 bp, Artificial sequence
  SiRNA target sequence
aaaagaagttttagaattagccaaa

SEQ ID NO: 61233 - DNA, 25 bp, Artificial sequence
  SiRNA target sequence
aaagaagttttagaattagccaaaa

SEQ ID NO: 61234 - DNA, 25 bp, Artificial sequence
  SiRNA target sequence
aagaagttttagaattagccaaaaa

SEQ ID NO: 61235 - DNA, 25 bp, Artificial sequence
  SiRNA target sequence
agaagttttagaattagccaaaaaa

SEQ ID NO: 61236 - DNA, 25 bp, Artificial sequence
  SiRNA target sequence
gaagttttagaattagccaaaaaaa

SEQ ID NO: 61237 - DNA, 25 bp, Artificial sequence
  SiRNA target sequence
aagttttagaattagccaaaaaaat

SEQ ID NO: 61238 - DNA, 25 bp, Artificial sequence
  SiRNA target sequence
agttttagaattagccaaaaaaata

SEQ ID NO: 61239 - DNA, 25 bp, Artificial sequence
  SiRNA target sequence
gttttagaattagccaaaaaaatag

SEQ ID NO: 61240 - DNA, 25 bp, Artificial sequence
  SiRNA target sequence
ttttagaattagccaaaaaaatagg

SEQ ID NO: 61241 - DNA, 25 bp, Artificial sequence
  SiRNA target sequence
tttagaattagccaaaaaaataggt

SEQ ID NO: 61242 - DNA, 25 bp, Artificial sequence
  SiRNA target sequence
ttagaattagccaaaaaaataggtg

SEQ ID NO: 61243 - DNA, 25 bp, Artificial sequence
  SiRNA target sequence
tagaattagccaaaaaaataggtgt

SEQ ID NO: 61244 - DNA, 25 bp, Artificial sequence
  SiRNA target sequence
agaattagccaaaaaaataggtgta

SEQ ID NO: 61245 - DNA, 25 bp, Artificial sequence
  SiRNA target sequence
gaattagccaaaaaaataggtgtat

SEQ ID NO: 61246 - DNA, 25 bp, Artificial sequence
  SiRNA target sequence
aattagccaaaaaaataggtgtatt

SEQ ID NO: 61247 - DNA, 25 bp, Artificial sequence
  SiRNA target sequence
attagccaaaaaaataggtgtatta

SEQ ID NO: 61248 - DNA, 25 bp, Artificial sequence
  SiRNA target sequence
ttagccaaaaaaataggtgtattag

SEQ ID NO: 61249 - DNA, 25 bp, Artificial sequence
  SiRNA target sequence
tagccaaaaaaataggtgtattaga

SEQ ID NO: 61250 - DNA, 25 bp, Artificial sequence
  SiRNA target sequence
agccaaaaaaataggtgtattagag

SEQ ID NO: 61251 - DNA, 25 bp, Artificial sequence
  SiRNA target sequence
gccaaaaaaataggtgtattagagt

SEQ ID NO: 61252 - DNA, 25 bp, Artificial sequence
  SiRNA target sequence
ccaaaaaaataggtgtattagagtc

SEQ ID NO: 61253 - DNA, 25 bp, Artificial sequence
  SiRNA target sequence
caaaaaaataggtgtattagagtct

SEQ ID NO: 61254 - DNA, 25 bp, Artificial sequence
  SiRNA target sequence
aaaaaaataggtgtattagagtcta

SEQ ID NO: 61255 - DNA, 25 bp, Artificial sequence
  SiRNA target sequence
aaaaaataggtgtattagagtctat

SEQ ID NO: 61256 - DNA, 25 bp, Artificial sequence
  SiRNA target sequence
aaaaataggtgtattagagtctata

SEQ ID NO: 61257 - DNA, 25 bp, Artificial sequence
  SiRNA target sequence
aaaataggtgtattagagtctatac

SEQ ID NO: 61258 - DNA, 25 bp, Artificial sequence
  SiRNA target sequence
aaataggtgtattagagtctataca

SEQ ID NO: 61259 - DNA, 25 bp, Artificial sequence
  SiRNA target sequence
aataggtgtattagagtctatacag

SEQ ID NO: 61260 - DNA, 25 bp, Artificial sequence
  SiRNA target sequence
ataggtgtattagagtctatacagg

SEQ ID NO: 61261 - DNA, 25 bp, Artificial sequence
  SiRNA target sequence
taggtgtattagagtctatacagga

SEQ ID NO: 61262 - DNA, 25 bp, Artificial sequence
  SiRNA target sequence
aggtgtattagagtctatacaggaa

SEQ ID NO: 61263 - DNA, 25 bp, Artificial sequence
  SiRNA target sequence
ggtgtattagagtctatacaggaat

SEQ ID NO: 61264 - DNA, 25 bp, Artificial sequence
  SiRNA target sequence
gtgtattagagtctatacaggaatt

SEQ ID NO: 61265 - DNA, 25 bp, Artificial sequence
  SiRNA target sequence
tgtattagagtctatacaggaattt

SEQ ID NO: 61266 - DNA, 25 bp, Artificial sequence
  SiRNA target sequence
gtattagagtctatacaggaattta

SEQ ID NO: 61267 - DNA, 25 bp, Artificial sequence
  SiRNA target sequence
tattagagtctatacaggaatttaa

SEQ ID NO: 61268 - DNA, 25 bp, Artificial sequence
  SiRNA target sequence
attagagtctatacaggaatttaaa

SEQ ID NO: 61269 - DNA, 25 bp, Artificial sequence
  SiRNA target sequence
ttagagtctatacaggaatttaaag

SEQ ID NO: 61270 - DNA, 25 bp, Artificial sequence
  SiRNA target sequence
tagagtctatacaggaatttaaaga

SEQ ID NO: 61271 - DNA, 25 bp, Artificial sequence
  SiRNA target sequence
agagtctatacaggaatttaaagat

SEQ ID NO: 61272 - DNA, 25 bp, Artificial sequence
  SiRNA target sequence
gagtctatacaggaatttaaagatg

SEQ ID NO: 61273 - DNA, 25 bp, Artificial sequence
  SiRNA target sequence
agtctatacaggaatttaaagatgg

SEQ ID NO: 61274 - DNA, 25 bp, Artificial sequence
  SiRNA target sequence
gtctatacaggaatttaaagatggg

SEQ ID NO: 61275 - DNA, 25 bp, Artificial sequence
  SiRNA target sequence
tctatacaggaatttaaagatgggt

SEQ ID NO: 61276 - DNA, 25 bp, Artificial sequence
  SiRNA target sequence
ctatacaggaatttaaagatgggtt

SEQ ID NO: 61277 - DNA, 25 bp, Artificial sequence
  SiRNA target sequence
tatacaggaatttaaagatgggttt

SEQ ID NO: 61278 - DNA, 25 bp, Artificial sequence
  SiRNA target sequence
atacaggaatttaaagatgggttta

SEQ ID NO: 61279 - DNA, 25 bp, Artificial sequence
  SiRNA target sequence
tacaggaatttaaagatgggtttag

SEQ ID NO: 61280 - DNA, 25 bp, Artificial sequence
  SiRNA target sequence
acaggaatttaaagatgggtttagc

SEQ ID NO: 61281 - DNA, 25 bp, Artificial sequence
  SiRNA target sequence
caggaatttaaagatgggtttagca

SEQ ID NO: 61282 - DNA, 25 bp, Artificial sequence
  SiRNA target sequence
aggaatttaaagatgggtttagcac

SEQ ID NO: 61283 - DNA, 25 bp, Artificial sequence
  SiRNA target sequence
ggaatttaaagatgggtttagcaca

SEQ ID NO: 61284 - DNA, 25 bp, Artificial sequence
  SiRNA target sequence
gaatttaaagatgggtttagcacat

SEQ ID NO: 61285 - DNA, 25 bp, Artificial sequence
  SiRNA target sequence
aatttaaagatgggtttagcacatc

SEQ ID NO: 61286 - DNA, 25 bp, Artificial sequence
  SiRNA target sequence
atttaaagatgggtttagcacatcg

SEQ ID NO: 61287 - DNA, 25 bp, Artificial sequence
  SiRNA target sequence
tttaaagatgggtttagcacatcgg

SEQ ID NO: 61288 - DNA, 25 bp, Artificial sequence
  SiRNA target sequence
ttaaagatgggtttagcacatcggt

SEQ ID NO: 61289 - DNA, 25 bp, Artificial sequence
  SiRNA target sequence
taaagatgggtttagcacatcggtc

SEQ ID NO: 61290 - DNA, 25 bp, Artificial sequence
  SiRNA target sequence
aaagatgggtttagcacatcggtcg

SEQ ID NO: 61291 - DNA, 25 bp, Artificial sequence
  SiRNA target sequence
aagatgggtttagcacatcggtcgg

SEQ ID NO: 61292 - DNA, 25 bp, Artificial sequence
  SiRNA target sequence
agatgggtttagcacatcggtcggt

SEQ ID NO: 61293 - DNA, 25 bp, Artificial sequence
  SiRNA target sequence
gatgggtttagcacatcggtcggtg

SEQ ID NO: 61294 - DNA, 25 bp, Artificial sequence
  SiRNA target sequence
atgggtttagcacatcggtcggtga

SEQ ID NO: 61295 - DNA, 25 bp, Artificial sequence
  SiRNA target sequence
tgggtttagcacatcggtcggtgaa

SEQ ID NO: 61296 - DNA, 25 bp, Artificial sequence
  SiRNA target sequence
gggtttagcacatcggtcggtgaac

SEQ ID NO: 61297 - DNA, 25 bp, Artificial sequence
  SiRNA target sequence
ggtttagcacatcggtcggtgaacg

SEQ ID NO: 61298 - DNA, 25 bp, Artificial sequence
  SiRNA target sequence
gtttagcacatcggtcggtgaacgc

SEQ ID NO: 61299 - DNA, 25 bp, Artificial sequence
  SiRNA target sequence
tttagcacatcggtcggtgaacgcg

SEQ ID NO: 61300 - DNA, 25 bp, Artificial sequence
  SiRNA target sequence
ttagcacatcggtcggtgaacgcgg

SEQ ID NO: 61301 - DNA, 25 bp, Artificial sequence
  SiRNA target sequence
tagcacatcggtcggtgaacgcgga

SEQ ID NO: 61302 - DNA, 25 bp, Artificial sequence
  SiRNA target sequence
agcacatcggtcggtgaacgcggaa

SEQ ID NO: 61303 - DNA, 25 bp, Artificial sequence
  SiRNA target sequence
gcacatcggtcggtgaacgcggaag

SEQ ID NO: 61304 - DNA, 25 bp, Artificial sequence
  SiRNA target sequence
cacatcggtcggtgaacgcggaaga

SEQ ID NO: 61305 - DNA, 25 bp, Artificial sequence
  SiRNA target sequence
acatcggtcggtgaacgcggaagat

SEQ ID NO: 61306 - DNA, 25 bp, Artificial sequence
  SiRNA target sequence
catcggtcggtgaacgcggaagatt

SEQ ID NO: 61307 - DNA, 25 bp, Artificial sequence
  SiRNA target sequence
atcggtcggtgaacgcggaagattt

SEQ ID NO: 61308 - DNA, 25 bp, Artificial sequence
  SiRNA target sequence
tcggtcggtgaacgcggaagatttt

SEQ ID NO: 61309 - DNA, 25 bp, Artificial sequence
  SiRNA target sequence
cggtcggtgaacgcggaagattttt

SEQ ID NO: 61310 - DNA, 25 bp, Artificial sequence
  SiRNA target sequence
ggtcggtgaacgcggaagattttta

SEQ ID NO: 61311 - DNA, 25 bp, Artificial sequence
  SiRNA target sequence
gtcggtgaacgcggaagatttttat

SEQ ID NO: 61312 - DNA, 25 bp, Artificial sequence
  SiRNA target sequence
tcggtgaacgcggaagatttttatc

SEQ ID NO: 61313 - DNA, 25 bp, Artificial sequence
  SiRNA target sequence
cggtgaacgcggaagatttttatct

SEQ ID NO: 61314 - DNA, 25 bp, Artificial sequence
  SiRNA target sequence
ggtgaacgcggaagatttttatctg

SEQ ID NO: 61315 - DNA, 25 bp, Artificial sequence
  SiRNA target sequence
gtgaacgcggaagatttttatctgg

SEQ ID NO: 61316 - DNA, 25 bp, Artificial sequence
  SiRNA target sequence
tgaacgcggaagatttttatctggt

SEQ ID NO: 61317 - DNA, 25 bp, Artificial sequence
  SiRNA target sequence
gaacgcggaagatttttatctggtg

SEQ ID NO: 61318 - DNA, 25 bp, Artificial sequence
  SiRNA target sequence
aacgcggaagatttttatctggtgg

SEQ ID NO: 61319 - DNA, 25 bp, Artificial sequence
  SiRNA target sequence
acgcggaagatttttatctggtggt

SEQ ID NO: 61320 - DNA, 25 bp, Artificial sequence
  SiRNA target sequence
cgcggaagatttttatctggtggtg

SEQ ID NO: 61321 - DNA, 25 bp, Artificial sequence
  SiRNA target sequence
gcggaagatttttatctggtggtga

SEQ ID NO: 61322 - DNA, 25 bp, Artificial sequence
  SiRNA target sequence
cggaagatttttatctggtggtgaa

SEQ ID NO: 61323 - DNA, 25 bp, Artificial sequence
  SiRNA target sequence
ggaagatttttatctggtggtgaaa

SEQ ID NO: 61324 - DNA, 25 bp, Artificial sequence
  SiRNA target sequence
gaagatttttatctggtggtgaaag

SEQ ID NO: 61325 - DNA, 25 bp, Artificial sequence
  SiRNA target sequence
aagatttttatctggtggtgaaagg

SEQ ID NO: 61326 - DNA, 25 bp, Artificial sequence
  SiRNA target sequence
agatttttatctggtggtgaaaggc

SEQ ID NO: 61327 - DNA, 25 bp, Artificial sequence
  SiRNA target sequence
gatttttatctggtggtgaaaggca

SEQ ID NO: 61328 - DNA, 25 bp, Artificial sequence
  SiRNA target sequence
atttttatctggtggtgaaaggcaa

SEQ ID NO: 61329 - DNA, 25 bp, Artificial sequence
  SiRNA target sequence
tttttatctggtggtgaaaggcaaa

SEQ ID NO: 61330 - DNA, 25 bp, Artificial sequence
  SiRNA target sequence
ttttatctggtggtgaaaggcaaaa

SEQ ID NO: 61331 - DNA, 25 bp, Artificial sequence
  SiRNA target sequence
tttatctggtggtgaaaggcaaaaa

SEQ ID NO: 61332 - DNA, 25 bp, Artificial sequence
  SiRNA target sequence
ttatctggtggtgaaaggcaaaaaa

SEQ ID NO: 61333 - DNA, 25 bp, Artificial sequence
  SiRNA target sequence
tatctggtggtgaaaggcaaaaaat

SEQ ID NO: 61334 - DNA, 25 bp, Artificial sequence
  SiRNA target sequence
atctggtggtgaaaggcaaaaaatt

SEQ ID NO: 61335 - DNA, 25 bp, Artificial sequence
  SiRNA target sequence
tctggtggtgaaaggcaaaaaatta

SEQ ID NO: 61336 - DNA, 25 bp, Artificial sequence
  SiRNA target sequence
ctggtggtgaaaggcaaaaaattat

SEQ ID NO: 61337 - DNA, 25 bp, Artificial sequence
  SiRNA target sequence
tggtggtgaaaggcaaaaaattatg

SEQ ID NO: 61338 - DNA, 25 bp, Artificial sequence
  SiRNA target sequence
ggtggtgaaaggcaaaaaattatgc

SEQ ID NO: 61339 - DNA, 25 bp, Artificial sequence
  SiRNA target sequence
gtggtgaaaggcaaaaaattatgct

SEQ ID NO: 61340 - DNA, 25 bp, Artificial sequence
  SiRNA target sequence
tggtgaaaggcaaaaaattatgctg

SEQ ID NO: 61341 - DNA, 25 bp, Artificial sequence
  SiRNA target sequence
ggtgaaaggcaaaaaattatgctga

SEQ ID NO: 61342 - DNA, 25 bp, Artificial sequence
  SiRNA target sequence
gtgaaaggcaaaaaattatgctgat

SEQ ID NO: 61343 - DNA, 25 bp, Artificial sequence
  SiRNA target sequence
tgaaaggcaaaaaattatgctgatg

SEQ ID NO: 61344 - DNA, 25 bp, Artificial sequence
  SiRNA target sequence
gaaaggcaaaaaattatgctgatgc

SEQ ID NO: 61345 - DNA, 25 bp, Artificial sequence
  SiRNA target sequence
aaaggcaaaaaattatgctgatgcg

SEQ ID NO: 61346 - DNA, 25 bp, Artificial sequence
  SiRNA target sequence
aaggcaaaaaattatgctgatgcgt

SEQ ID NO: 61347 - DNA, 25 bp, Artificial sequence
  SiRNA target sequence
aggcaaaaaattatgctgatgcgtg

SEQ ID NO: 61348 - DNA, 25 bp, Artificial sequence
  SiRNA target sequence
ggcaaaaaattatgctgatgcgtgc

SEQ ID NO: 61349 - DNA, 25 bp, Artificial sequence
  SiRNA target sequence
gcaaaaaattatgctgatgcgtgca

SEQ ID NO: 61350 - DNA, 25 bp, Artificial sequence
  SiRNA target sequence
caaaaaattatgctgatgcgtgcat

SEQ ID NO: 61351 - DNA, 25 bp, Artificial sequence
  SiRNA target sequence
aaaaaattatgctgatgcgtgcatt

SEQ ID NO: 61352 - DNA, 25 bp, Artificial sequence
  SiRNA target sequence
aaaaattatgctgatgcgtgcattg

SEQ ID NO: 61353 - DNA, 25 bp, Artificial sequence
  SiRNA target sequence
aaaattatgctgatgcgtgcattgc

SEQ ID NO: 61354 - DNA, 25 bp, Artificial sequence
  SiRNA target sequence
aaattatgctgatgcgtgcattgct

SEQ ID NO: 61355 - DNA, 25 bp, Artificial sequence
  SiRNA target sequence
aattatgctgatgcgtgcattgctt

SEQ ID NO: 61356 - DNA, 25 bp, Artificial sequence
  SiRNA target sequence
attatgctgatgcgtgcattgctta

SEQ ID NO: 61357 - DNA, 25 bp, Artificial sequence
  SiRNA target sequence
ttatgctgatgcgtgcattgcttaa

SEQ ID NO: 61358 - DNA, 25 bp, Artificial sequence
  SiRNA target sequence
tatgctgatgcgtgcattgcttaaa

SEQ ID NO: 61359 - DNA, 25 bp, Artificial sequence
  SiRNA target sequence
atgctgatgcgtgcattgcttaaaa

SEQ ID NO: 61360 - DNA, 25 bp, Artificial sequence
  SiRNA target sequence
tgctgatgcgtgcattgcttaaaaa

SEQ ID NO: 61361 - DNA, 25 bp, Artificial sequence
  SiRNA target sequence
gctgatgcgtgcattgcttaaaaat

SEQ ID NO: 61362 - DNA, 25 bp, Artificial sequence
  SiRNA target sequence
ctgatgcgtgcattgcttaaaaatt

SEQ ID NO: 61363 - DNA, 25 bp, Artificial sequence
  SiRNA target sequence
tgatgcgtgcattgcttaaaaattc

SEQ ID NO: 61364 - DNA, 25 bp, Artificial sequence
  SiRNA target sequence
gatgcgtgcattgcttaaaaattca

SEQ ID NO: 61365 - DNA, 25 bp, Artificial sequence
  SiRNA target sequence
atgcgtgcattgcttaaaaattcag

SEQ ID NO: 61366 - DNA, 25 bp, Artificial sequence
  SiRNA target sequence
tgcgtgcattgcttaaaaattcaga

SEQ ID NO: 61367 - DNA, 25 bp, Artificial sequence
  SiRNA target sequence
gcgtgcattgcttaaaaattcagag

SEQ ID NO: 61368 - DNA, 25 bp, Artificial sequence
  SiRNA target sequence
cgtgcattgcttaaaaattcagaga

SEQ ID NO: 61369 - DNA, 25 bp, Artificial sequence
  SiRNA target sequence
gtgcattgcttaaaaattcagagat

SEQ ID NO: 61370 - DNA, 25 bp, Artificial sequence
  SiRNA target sequence
tgcattgcttaaaaattcagagatc

SEQ ID NO: 61371 - DNA, 25 bp, Artificial sequence
  SiRNA target sequence
gcattgcttaaaaattcagagatcg

SEQ ID NO: 61372 - DNA, 25 bp, Artificial sequence
  SiRNA target sequence
cattgcttaaaaattcagagatcgt

SEQ ID NO: 61373 - DNA, 25 bp, Artificial sequence
  SiRNA target sequence
attgcttaaaaattcagagatcgtt

SEQ ID NO: 61374 - DNA, 25 bp, Artificial sequence
  SiRNA target sequence
ttgcttaaaaattcagagatcgttt

SEQ ID NO: 61375 - DNA, 25 bp, Artificial sequence
  SiRNA target sequence
tgcttaaaaattcagagatcgtttt

SEQ ID NO: 61376 - DNA, 25 bp, Artificial sequence
  SiRNA target sequence
gcttaaaaattcagagatcgtttta

SEQ ID NO: 61377 - DNA, 25 bp, Artificial sequence
  SiRNA target sequence
cttaaaaattcagagatcgttttat

SEQ ID NO: 61378 - DNA, 25 bp, Artificial sequence
  SiRNA target sequence
ttaaaaattcagagatcgttttatt

SEQ ID NO: 61379 - DNA, 25 bp, Artificial sequence
  SiRNA target sequence
taaaaattcagagatcgttttatta

SEQ ID NO: 61380 - DNA, 25 bp, Artificial sequence
  SiRNA target sequence
aaaaattcagagatcgttttattag

SEQ ID NO: 61381 - DNA, 25 bp, Artificial sequence
  SiRNA target sequence
aaaattcagagatcgttttattaga

SEQ ID NO: 61382 - DNA, 25 bp, Artificial sequence
  SiRNA target sequence
aaattcagagatcgttttattagac

SEQ ID NO: 61383 - DNA, 25 bp, Artificial sequence
  SiRNA target sequence
aattcagagatcgttttattagacg

SEQ ID NO: 61384 - DNA, 25 bp, Artificial sequence
  SiRNA target sequence
attcagagatcgttttattagacga

SEQ ID NO: 61385 - DNA, 25 bp, Artificial sequence
  SiRNA target sequence
ttcagagatcgttttattagacgag

SEQ ID NO: 61386 - DNA, 25 bp, Artificial sequence
  SiRNA target sequence
tcagagatcgttttattagacgagc

SEQ ID NO: 61387 - DNA, 25 bp, Artificial sequence
  SiRNA target sequence
cagagatcgttttattagacgagcc

SEQ ID NO: 61388 - DNA, 25 bp, Artificial sequence
  SiRNA target sequence
agagatcgttttattagacgagcca

SEQ ID NO: 61389 - DNA, 25 bp, Artificial sequence
  SiRNA target sequence
gagatcgttttattagacgagccaa

SEQ ID NO: 61390 - DNA, 25 bp, Artificial sequence
  SiRNA target sequence
agatcgttttattagacgagccaac

SEQ ID NO: 61391 - DNA, 25 bp, Artificial sequence
  SiRNA target sequence
gatcgttttattagacgagccaacc

SEQ ID NO: 61392 - DNA, 25 bp, Artificial sequence
  SiRNA target sequence
atcgttttattagacgagccaacct

SEQ ID NO: 61393 - DNA, 25 bp, Artificial sequence
  SiRNA target sequence
tcgttttattagacgagccaacctc

SEQ ID NO: 61394 - DNA, 25 bp, Artificial sequence
  SiRNA target sequence
cgttttattagacgagccaacctca

SEQ ID NO: 61395 - DNA, 25 bp, Artificial sequence
  SiRNA target sequence
gttttattagacgagccaacctcag

SEQ ID NO: 61396 - DNA, 25 bp, Artificial sequence
  SiRNA target sequence
ttttattagacgagccaacctcagc

SEQ ID NO: 61397 - DNA, 25 bp, Artificial sequence
  SiRNA target sequence
tttattagacgagccaacctcagca

SEQ ID NO: 61398 - DNA, 25 bp, Artificial sequence
  SiRNA target sequence
ttattagacgagccaacctcagcac

SEQ ID NO: 61399 - DNA, 25 bp, Artificial sequence
  SiRNA target sequence
tattagacgagccaacctcagcact

SEQ ID NO: 61400 - DNA, 25 bp, Artificial sequence
  SiRNA target sequence
attagacgagccaacctcagcacta

SEQ ID NO: 61401 - DNA, 25 bp, Artificial sequence
  SiRNA target sequence
ttagacgagccaacctcagcactag

SEQ ID NO: 61402 - DNA, 25 bp, Artificial sequence
  SiRNA target sequence
tagacgagccaacctcagcactaga

SEQ ID NO: 61403 - DNA, 25 bp, Artificial sequence
  SiRNA target sequence
agacgagccaacctcagcactagat

SEQ ID NO: 61404 - DNA, 25 bp, Artificial sequence
  SiRNA target sequence
gacgagccaacctcagcactagata

SEQ ID NO: 61405 - DNA, 25 bp, Artificial sequence
  SiRNA target sequence
acgagccaacctcagcactagataa

SEQ ID NO: 61406 - DNA, 25 bp, Artificial sequence
  SiRNA target sequence
cgagccaacctcagcactagataaa

SEQ ID NO: 61407 - DNA, 25 bp, Artificial sequence
  SiRNA target sequence
gagccaacctcagcactagataaaa

SEQ ID NO: 61408 - DNA, 25 bp, Artificial sequence
  SiRNA target sequence
agccaacctcagcactagataaaaa

SEQ ID NO: 61409 - DNA, 25 bp, Artificial sequence
  SiRNA target sequence
gccaacctcagcactagataaaaag

SEQ ID NO: 61410 - DNA, 25 bp, Artificial sequence
  SiRNA target sequence
ccaacctcagcactagataaaaaga

SEQ ID NO: 61411 - DNA, 25 bp, Artificial sequence
  SiRNA target sequence
caacctcagcactagataaaaagag

SEQ ID NO: 61412 - DNA, 25 bp, Artificial sequence
  SiRNA target sequence
aacctcagcactagataaaaagagt

SEQ ID NO: 61413 - DNA, 25 bp, Artificial sequence
  SiRNA target sequence
acctcagcactagataaaaagagtg

SEQ ID NO: 61414 - DNA, 25 bp, Artificial sequence
  SiRNA target sequence
cctcagcactagataaaaagagtga

SEQ ID NO: 61415 - DNA, 25 bp, Artificial sequence
  SiRNA target sequence
ctcagcactagataaaaagagtgaa

SEQ ID NO: 61416 - DNA, 25 bp, Artificial sequence
  SiRNA target sequence
tcagcactagataaaaagagtgaac

SEQ ID NO: 61417 - DNA, 25 bp, Artificial sequence
  SiRNA target sequence
cagcactagataaaaagagtgaact

SEQ ID NO: 61418 - DNA, 25 bp, Artificial sequence
  SiRNA target sequence
agcactagataaaaagagtgaacta

SEQ ID NO: 61419 - DNA, 25 bp, Artificial sequence
  SiRNA target sequence
gcactagataaaaagagtgaactag

SEQ ID NO: 61420 - DNA, 25 bp, Artificial sequence
  SiRNA target sequence
cactagataaaaagagtgaactaga

SEQ ID NO: 61421 - DNA, 25 bp, Artificial sequence
  SiRNA target sequence
actagataaaaagagtgaactagaa

SEQ ID NO: 61422 - DNA, 25 bp, Artificial sequence
  SiRNA target sequence
ctagataaaaagagtgaactagaaa

SEQ ID NO: 61423 - DNA, 25 bp, Artificial sequence
  SiRNA target sequence
tagataaaaagagtgaactagaaac

SEQ ID NO: 61424 - DNA, 25 bp, Artificial sequence
  SiRNA target sequence
agataaaaagagtgaactagaaact

SEQ ID NO: 61425 - DNA, 25 bp, Artificial sequence
  SiRNA target sequence
gataaaaagagtgaactagaaacta

SEQ ID NO: 61426 - DNA, 25 bp, Artificial sequence
  SiRNA target sequence
ataaaaagagtgaactagaaactat

SEQ ID NO: 61427 - DNA, 25 bp, Artificial sequence
  SiRNA target sequence
taaaaagagtgaactagaaactatg

SEQ ID NO: 61428 - DNA, 25 bp, Artificial sequence
  SiRNA target sequence
aaaaagagtgaactagaaactatga

SEQ ID NO: 61429 - DNA, 25 bp, Artificial sequence
  SiRNA target sequence
aaaagagtgaactagaaactatgac

SEQ ID NO: 61430 - DNA, 25 bp, Artificial sequence
  SiRNA target sequence
aaagagtgaactagaaactatgaca

SEQ ID NO: 61431 - DNA, 25 bp, Artificial sequence
  SiRNA target sequence
aagagtgaactagaaactatgacat

SEQ ID NO: 61432 - DNA, 25 bp, Artificial sequence
  SiRNA target sequence
agagtgaactagaaactatgacata

SEQ ID NO: 61433 - DNA, 25 bp, Artificial sequence
  SiRNA target sequence
gagtgaactagaaactatgacatat

SEQ ID NO: 61434 - DNA, 25 bp, Artificial sequence
  SiRNA target sequence
agtgaactagaaactatgacatata

SEQ ID NO: 61435 - DNA, 25 bp, Artificial sequence
  SiRNA target sequence
gtgaactagaaactatgacatatat

SEQ ID NO: 61436 - DNA, 25 bp, Artificial sequence
  SiRNA target sequence
tgaactagaaactatgacatatatt

SEQ ID NO: 61437 - DNA, 25 bp, Artificial sequence
  SiRNA target sequence
gaactagaaactatgacatatattt

SEQ ID NO: 61438 - DNA, 25 bp, Artificial sequence
  SiRNA target sequence
aactagaaactatgacatatatttt

SEQ ID NO: 61439 - DNA, 25 bp, Artificial sequence
  SiRNA target sequence
actagaaactatgacatatattttt

SEQ ID NO: 61440 - DNA, 25 bp, Artificial sequence
  SiRNA target sequence
ctagaaactatgacatatattttta

SEQ ID NO: 61441 - DNA, 25 bp, Artificial sequence
  SiRNA target sequence
tagaaactatgacatatatttttaa

SEQ ID NO: 61442 - DNA, 25 bp, Artificial sequence
  SiRNA target sequence
agaaactatgacatatatttttaat

SEQ ID NO: 61443 - DNA, 25 bp, Artificial sequence
  SiRNA target sequence
gaaactatgacatatatttttaatg

SEQ ID NO: 61444 - DNA, 25 bp, Artificial sequence
  SiRNA target sequence
aaactatgacatatatttttaatga

SEQ ID NO: 61445 - DNA, 25 bp, Artificial sequence
  SiRNA target sequence
aactatgacatatatttttaatgaa

SEQ ID NO: 61446 - DNA, 25 bp, Artificial sequence
  SiRNA target sequence
actatgacatatatttttaatgaat

SEQ ID NO: 61447 - DNA, 25 bp, Artificial sequence
  SiRNA target sequence
ctatgacatatatttttaatgaatt

SEQ ID NO: 61448 - DNA, 25 bp, Artificial sequence
  SiRNA target sequence
tatgacatatatttttaatgaattt

SEQ ID NO: 61449 - DNA, 25 bp, Artificial sequence
  SiRNA target sequence
atgacatatatttttaatgaattta

SEQ ID NO: 61450 - DNA, 25 bp, Artificial sequence
  SiRNA target sequence
tgacatatatttttaatgaatttaa

SEQ ID NO: 61451 - DNA, 25 bp, Artificial sequence
  SiRNA target sequence
gacatatatttttaatgaatttaag

SEQ ID NO: 61452 - DNA, 25 bp, Artificial sequence
  SiRNA target sequence
acatatatttttaatgaatttaagt

SEQ ID NO: 61453 - DNA, 25 bp, Artificial sequence
  SiRNA target sequence
catatatttttaatgaatttaagta

SEQ ID NO: 61454 - DNA, 25 bp, Artificial sequence
  SiRNA target sequence
atatatttttaatgaatttaagtac

SEQ ID NO: 61455 - DNA, 25 bp, Artificial sequence
  SiRNA target sequence
tatatttttaatgaatttaagtacc

SEQ ID NO: 61456 - DNA, 25 bp, Artificial sequence
  SiRNA target sequence
atatttttaatgaatttaagtacca

SEQ ID NO: 61457 - DNA, 25 bp, Artificial sequence
  SiRNA target sequence
tatttttaatgaatttaagtaccat

SEQ ID NO: 61458 - DNA, 25 bp, Artificial sequence
  SiRNA target sequence
atttttaatgaatttaagtaccata

SEQ ID NO: 61459 - DNA, 25 bp, Artificial sequence
  SiRNA target sequence
tttttaatgaatttaagtaccatac

SEQ ID NO: 61460 - DNA, 25 bp, Artificial sequence
  SiRNA target sequence
ttttaatgaatttaagtaccatact

SEQ ID NO: 61461 - DNA, 25 bp, Artificial sequence
  SiRNA target sequence
tttaatgaatttaagtaccatactt

SEQ ID NO: 61462 - DNA, 25 bp, Artificial sequence
  SiRNA target sequence
ttaatgaatttaagtaccatacttt

SEQ ID NO: 61463 - DNA, 25 bp, Artificial sequence
  SiRNA target sequence
taatgaatttaagtaccatactttt

SEQ ID NO: 61464 - DNA, 25 bp, Artificial sequence
  SiRNA target sequence
aatgaatttaagtaccatacttttg

SEQ ID NO: 61465 - DNA, 25 bp, Artificial sequence
  SiRNA target sequence
atgaatttaagtaccatacttttgt

SEQ ID NO: 61466 - DNA, 25 bp, Artificial sequence
  SiRNA target sequence
tgaatttaagtaccatacttttgta

SEQ ID NO: 61467 - DNA, 25 bp, Artificial sequence
  SiRNA target sequence
gaatttaagtaccatacttttgtaa

SEQ ID NO: 61468 - DNA, 25 bp, Artificial sequence
  SiRNA target sequence
aatttaagtaccatacttttgtaat

SEQ ID NO: 61469 - DNA, 25 bp, Artificial sequence
  SiRNA target sequence
atttaagtaccatacttttgtaata

SEQ ID NO: 61470 - DNA, 25 bp, Artificial sequence
  SiRNA target sequence
tttaagtaccatacttttgtaataa

SEQ ID NO: 61471 - DNA, 25 bp, Artificial sequence
  SiRNA target sequence
ttaagtaccatacttttgtaataat

SEQ ID NO: 61472 - DNA, 25 bp, Artificial sequence
  SiRNA target sequence
taagtaccatacttttgtaataatt

SEQ ID NO: 61473 - DNA, 25 bp, Artificial sequence
  SiRNA target sequence
aagtaccatacttttgtaataattg

SEQ ID NO: 61474 - DNA, 25 bp, Artificial sequence
  SiRNA target sequence
agtaccatacttttgtaataattgt

SEQ ID NO: 61475 - DNA, 25 bp, Artificial sequence
  SiRNA target sequence
gtaccatacttttgtaataattgta

SEQ ID NO: 61476 - DNA, 25 bp, Artificial sequence
  SiRNA target sequence
taccatacttttgtaataattgtac

SEQ ID NO: 61477 - DNA, 25 bp, Artificial sequence
  SiRNA target sequence
accatacttttgtaataattgtaca

SEQ ID NO: 61478 - DNA, 25 bp, Artificial sequence
  SiRNA target sequence
ccatacttttgtaataattgtacac

SEQ ID NO: 61479 - DNA, 25 bp, Artificial sequence
  SiRNA target sequence
catacttttgtaataattgtacaca

SEQ ID NO: 61480 - DNA, 25 bp, Artificial sequence
  SiRNA target sequence
atacttttgtaataattgtacacaa

SEQ ID NO: 61481 - DNA, 25 bp, Artificial sequence
  SiRNA target sequence
tacttttgtaataattgtacacaat

SEQ ID NO: 61482 - DNA, 25 bp, Artificial sequence
  SiRNA target sequence
acttttgtaataattgtacacaatc

SEQ ID NO: 61483 - DNA, 25 bp, Artificial sequence
  SiRNA target sequence
cttttgtaataattgtacacaatct

SEQ ID NO: 61484 - DNA, 25 bp, Artificial sequence
  SiRNA target sequence
ttttgtaataattgtacacaatcta

SEQ ID NO: 61485 - DNA, 25 bp, Artificial sequence
  SiRNA target sequence
tttgtaataattgtacacaatctag

SEQ ID NO: 61486 - DNA, 25 bp, Artificial sequence
  SiRNA target sequence
ttgtaataattgtacacaatctaga

SEQ ID NO: 61487 - DNA, 25 bp, Artificial sequence
  SiRNA target sequence
tgtaataattgtacacaatctagaa

SEQ ID NO: 61488 - DNA, 25 bp, Artificial sequence
  SiRNA target sequence
gtaataattgtacacaatctagaat

SEQ ID NO: 61489 - DNA, 25 bp, Artificial sequence
  SiRNA target sequence
taataattgtacacaatctagaatt

SEQ ID NO: 61490 - DNA, 25 bp, Artificial sequence
  SiRNA target sequence
aataattgtacacaatctagaatta

SEQ ID NO: 61491 - DNA, 25 bp, Artificial sequence
  SiRNA target sequence
ataattgtacacaatctagaattat

SEQ ID NO: 61492 - DNA, 25 bp, Artificial sequence
  SiRNA target sequence
taattgtacacaatctagaattatt

SEQ ID NO: 61493 - DNA, 25 bp, Artificial sequence
  SiRNA target sequence
aattgtacacaatctagaattattg

SEQ ID NO: 61494 - DNA, 25 bp, Artificial sequence
  SiRNA target sequence
attgtacacaatctagaattattgg

SEQ ID NO: 61495 - DNA, 25 bp, Artificial sequence
  SiRNA target sequence
ttgtacacaatctagaattattggc

SEQ ID NO: 61496 - DNA, 25 bp, Artificial sequence
  SiRNA target sequence
tgtacacaatctagaattattggct

SEQ ID NO: 61497 - DNA, 25 bp, Artificial sequence
  SiRNA target sequence
gtacacaatctagaattattggctt

SEQ ID NO: 61498 - DNA, 25 bp, Artificial sequence
  SiRNA target sequence
tacacaatctagaattattggcttt

SEQ ID NO: 61499 - DNA, 25 bp, Artificial sequence
  SiRNA target sequence
acacaatctagaattattggctttg

SEQ ID NO: 61500 - DNA, 25 bp, Artificial sequence
  SiRNA target sequence
cacaatctagaattattggctttgt

SEQ ID NO: 61501 - DNA, 25 bp, Artificial sequence
  SiRNA target sequence
acaatctagaattattggctttgtt

SEQ ID NO: 61502 - DNA, 25 bp, Artificial sequence
  SiRNA target sequence
caatctagaattattggctttgttt

SEQ ID NO: 61503 - DNA, 25 bp, Artificial sequence
  SiRNA target sequence
aatctagaattattggctttgtttg

SEQ ID NO: 61504 - DNA, 25 bp, Artificial sequence
  SiRNA target sequence
atctagaattattggctttgtttga

SEQ ID NO: 61505 - DNA, 25 bp, Artificial sequence
  SiRNA target sequence
tctagaattattggctttgtttgat

SEQ ID NO: 61506 - DNA, 25 bp, Artificial sequence
  SiRNA target sequence
ctagaattattggctttgtttgata

SEQ ID NO: 61507 - DNA, 25 bp, Artificial sequence
  SiRNA target sequence
tagaattattggctttgtttgataa

SEQ ID NO: 61508 - DNA, 25 bp, Artificial sequence
  SiRNA target sequence
agaattattggctttgtttgataaa

SEQ ID NO: 61509 - DNA, 25 bp, Artificial sequence
  SiRNA target sequence
gaattattggctttgtttgataaaa

SEQ ID NO: 61510 - DNA, 25 bp, Artificial sequence
  SiRNA target sequence
aattattggctttgtttgataaaat

SEQ ID NO: 61511 - DNA, 25 bp, Artificial sequence
  SiRNA target sequence
attattggctttgtttgataaaatt

SEQ ID NO: 61512 - DNA, 25 bp, Artificial sequence
  SiRNA target sequence
ttattggctttgtttgataaaattt

SEQ ID NO: 61513 - DNA, 25 bp, Artificial sequence
  SiRNA target sequence
tattggctttgtttgataaaatttt

SEQ ID NO: 61514 - DNA, 25 bp, Artificial sequence
  SiRNA target sequence
attggctttgtttgataaaatttta

SEQ ID NO: 61515 - DNA, 25 bp, Artificial sequence
  SiRNA target sequence
ttggctttgtttgataaaattttat

SEQ ID NO: 61516 - DNA, 25 bp, Artificial sequence
  SiRNA target sequence
tggctttgtttgataaaattttatt

SEQ ID NO: 61517 - DNA, 25 bp, Artificial sequence
  SiRNA target sequence
ggctttgtttgataaaattttattt

SEQ ID NO: 61518 - DNA, 25 bp, Artificial sequence
  SiRNA target sequence
gctttgtttgataaaattttatttg

SEQ ID NO: 61519 - DNA, 25 bp, Artificial sequence
  SiRNA target sequence
ctttgtttgataaaattttatttgt

SEQ ID NO: 61520 - DNA, 25 bp, Artificial sequence
  SiRNA target sequence
tttgtttgataaaattttatttgta

SEQ ID NO: 61521 - DNA, 25 bp, Artificial sequence
  SiRNA target sequence
ttgtttgataaaattttatttgtaa

SEQ ID NO: 61522 - DNA, 25 bp, Artificial sequence
  SiRNA target sequence
tgtttgataaaattttatttgtaaa

SEQ ID NO: 61523 - DNA, 25 bp, Artificial sequence
  SiRNA target sequence
gtttgataaaattttatttgtaaat

SEQ ID NO: 61524 - DNA, 25 bp, Artificial sequence
  SiRNA target sequence
tttgataaaattttatttgtaaatg

SEQ ID NO: 61525 - DNA, 25 bp, Artificial sequence
  SiRNA target sequence
ttgataaaattttatttgtaaatgg

SEQ ID NO: 61526 - DNA, 25 bp, Artificial sequence
  SiRNA target sequence
tgataaaattttatttgtaaatggt

SEQ ID NO: 61527 - DNA, 25 bp, Artificial sequence
  SiRNA target sequence
gataaaattttatttgtaaatggta

SEQ ID NO: 61528 - DNA, 25 bp, Artificial sequence
  SiRNA target sequence
ataaaattttatttgtaaatggtaa

SEQ ID NO: 61529 - DNA, 25 bp, Artificial sequence
  SiRNA target sequence
taaaattttatttgtaaatggtaat

SEQ ID NO: 61530 - DNA, 25 bp, Artificial sequence
  SiRNA target sequence
aaaattttatttgtaaatggtaatg

SEQ ID NO: 61531 - DNA, 25 bp, Artificial sequence
  SiRNA target sequence
aaattttatttgtaaatggtaatga

SEQ ID NO: 61532 - DNA, 25 bp, Artificial sequence
  SiRNA target sequence
aattttatttgtaaatggtaatgag

SEQ ID NO: 61533 - DNA, 25 bp, Artificial sequence
  SiRNA target sequence
attttatttgtaaatggtaatgagg

SEQ ID NO: 61534 - DNA, 25 bp, Artificial sequence
  SiRNA target sequence
ttttatttgtaaatggtaatgaggt

SEQ ID NO: 61535 - DNA, 25 bp, Artificial sequence
  SiRNA target sequence
tttatttgtaaatggtaatgaggta

SEQ ID NO: 61536 - DNA, 25 bp, Artificial sequence
  SiRNA target sequence
ttatttgtaaatggtaatgaggtaa

SEQ ID NO: 61537 - DNA, 25 bp, Artificial sequence
  SiRNA target sequence
tatttgtaaatggtaatgaggtaac

SEQ ID NO: 61538 - DNA, 25 bp, Artificial sequence
  SiRNA target sequence
atttgtaaatggtaatgaggtaaca

SEQ ID NO: 61539 - DNA, 25 bp, Artificial sequence
  SiRNA target sequence
tttgtaaatggtaatgaggtaacaa

SEQ ID NO: 61540 - DNA, 25 bp, Artificial sequence
  SiRNA target sequence
ttgtaaatggtaatgaggtaacaat

SEQ ID NO: 61541 - DNA, 25 bp, Artificial sequence
  SiRNA target sequence
tgtaaatggtaatgaggtaacaatg

SEQ ID NO: 61542 - DNA, 25 bp, Artificial sequence
  SiRNA target sequence
gtaaatggtaatgaggtaacaatga

SEQ ID NO: 61543 - DNA, 25 bp, Artificial sequence
  SiRNA target sequence
taaatggtaatgaggtaacaatgat

SEQ ID NO: 61544 - DNA, 25 bp, Artificial sequence
  SiRNA target sequence
aaatggtaatgaggtaacaatgata

SEQ ID NO: 61545 - DNA, 25 bp, Artificial sequence
  SiRNA target sequence
aatggtaatgaggtaacaatgatag

SEQ ID NO: 61546 - DNA, 25 bp, Artificial sequence
  SiRNA target sequence
atggtaatgaggtaacaatgataga

SEQ ID NO: 61547 - DNA, 25 bp, Artificial sequence
  SiRNA target sequence
tggtaatgaggtaacaatgatagaa

SEQ ID NO: 61548 - DNA, 25 bp, Artificial sequence
  SiRNA target sequence
ggtaatgaggtaacaatgatagaag

SEQ ID NO: 61549 - DNA, 25 bp, Artificial sequence
  SiRNA target sequence
gtaatgaggtaacaatgatagaaga

SEQ ID NO: 61550 - DNA, 25 bp, Artificial sequence
  SiRNA target sequence
taatgaggtaacaatgatagaagac

SEQ ID NO: 61551 - DNA, 25 bp, Artificial sequence
  SiRNA target sequence
aatgaggtaacaatgatagaagaca

SEQ ID NO: 61552 - DNA, 25 bp, Artificial sequence
  SiRNA target sequence
atgaggtaacaatgatagaagacat

SEQ ID NO: 61553 - DNA, 25 bp, Artificial sequence
  SiRNA target sequence
tgaggtaacaatgatagaagacatt

SEQ ID NO: 61554 - DNA, 25 bp, Artificial sequence
  SiRNA target sequence
gaggtaacaatgatagaagacatta

SEQ ID NO: 61555 - DNA, 25 bp, Artificial sequence
  SiRNA target sequence
aggtaacaatgatagaagacattaa

SEQ ID NO: 61556 - DNA, 25 bp, Artificial sequence
  SiRNA target sequence
ggtaacaatgatagaagacattaac

SEQ ID NO: 61557 - DNA, 25 bp, Artificial sequence
  SiRNA target sequence
gtaacaatgatagaagacattaaca

SEQ ID NO: 61558 - DNA, 25 bp, Artificial sequence
  SiRNA target sequence
taacaatgatagaagacattaacaa

SEQ ID NO: 61559 - DNA, 25 bp, Artificial sequence
  SiRNA target sequence
aacaatgatagaagacattaacaaa

SEQ ID NO: 61560 - DNA, 25 bp, Artificial sequence
  SiRNA target sequence
acaatgatagaagacattaacaaaa

SEQ ID NO: 61561 - DNA, 25 bp, Artificial sequence
  SiRNA target sequence
caatgatagaagacattaacaaaaa

SEQ ID NO: 61562 - DNA, 25 bp, Artificial sequence
  SiRNA target sequence
aatgatagaagacattaacaaaaaa

SEQ ID NO: 61563 - DNA, 25 bp, Artificial sequence
  SiRNA target sequence
atgatagaagacattaacaaaaaac

SEQ ID NO: 61564 - DNA, 25 bp, Artificial sequence
  SiRNA target sequence
tgatagaagacattaacaaaaaact

SEQ ID NO: 61565 - DNA, 25 bp, Artificial sequence
  SiRNA target sequence
gatagaagacattaacaaaaaactt

SEQ ID NO: 61566 - DNA, 25 bp, Artificial sequence
  SiRNA target sequence
atagaagacattaacaaaaaacttg

SEQ ID NO: 61567 - DNA, 25 bp, Artificial sequence
  SiRNA target sequence
tagaagacattaacaaaaaacttga

SEQ ID NO: 61568 - DNA, 25 bp, Artificial sequence
  SiRNA target sequence
agaagacattaacaaaaaacttgaa

SEQ ID NO: 61569 - DNA, 25 bp, Artificial sequence
  SiRNA target sequence
gaagacattaacaaaaaacttgaag

SEQ ID NO: 61570 - DNA, 25 bp, Artificial sequence
  SiRNA target sequence
aagacattaacaaaaaacttgaaga

SEQ ID NO: 61571 - DNA, 25 bp, Artificial sequence
  SiRNA target sequence
agacattaacaaaaaacttgaagaa

SEQ ID NO: 61572 - DNA, 25 bp, Artificial sequence
  SiRNA target sequence
gacattaacaaaaaacttgaagaaa

SEQ ID NO: 61573 - DNA, 25 bp, Artificial sequence
  SiRNA target sequence
acattaacaaaaaacttgaagaaaa

SEQ ID NO: 61574 - DNA, 25 bp, Artificial sequence
  SiRNA target sequence
cattaacaaaaaacttgaagaaaat

SEQ ID NO: 61575 - DNA, 25 bp, Artificial sequence
  SiRNA target sequence
attaacaaaaaacttgaagaaaatt

SEQ ID NO: 61576 - DNA, 25 bp, Artificial sequence
  SiRNA target sequence
ttaacaaaaaacttgaagaaaattc

SEQ ID NO: 61577 - DNA, 25 bp, Artificial sequence
  SiRNA target sequence
taacaaaaaacttgaagaaaattca

SEQ ID NO: 61578 - DNA, 25 bp, Artificial sequence
  SiRNA target sequence
aacaaaaaacttgaagaaaattcaa

SEQ ID NO: 61579 - DNA, 25 bp, Artificial sequence
  SiRNA target sequence
acaaaaaacttgaagaaaattcaaa

SEQ ID NO: 61580 - DNA, 25 bp, Artificial sequence
  SiRNA target sequence
caaaaaacttgaagaaaattcaaag

SEQ ID NO: 61581 - DNA, 25 bp, Artificial sequence
  SiRNA target sequence
aaaaaacttgaagaaaattcaaagt

SEQ ID NO: 61582 - DNA, 25 bp, Artificial sequence
  SiRNA target sequence
aaaaacttgaagaaaattcaaagta

SEQ ID NO: 61583 - DNA, 25 bp, Artificial sequence
  SiRNA target sequence
aaaacttgaagaaaattcaaagtat

SEQ ID NO: 61584 - DNA, 25 bp, Artificial sequence
  SiRNA target sequence
aaacttgaagaaaattcaaagtatt

SEQ ID NO: 61585 - DNA, 25 bp, Artificial sequence
  SiRNA target sequence
aacttgaagaaaattcaaagtattt

SEQ ID NO: 61586 - DNA, 25 bp, Artificial sequence
  SiRNA target sequence
acttgaagaaaattcaaagtatttt

SEQ ID NO: 61587 - DNA, 25 bp, Artificial sequence
  SiRNA target sequence
cttgaagaaaattcaaagtattttg

SEQ ID NO: 61588 - DNA, 25 bp, Artificial sequence
  SiRNA target sequence
ttgaagaaaattcaaagtattttgc

SEQ ID NO: 61589 - DNA, 25 bp, Artificial sequence
  SiRNA target sequence
tgaagaaaattcaaagtattttgca

SEQ ID NO: 61590 - DNA, 25 bp, Artificial sequence
  SiRNA target sequence
gaagaaaattcaaagtattttgcag

SEQ ID NO: 61591 - DNA, 25 bp, Artificial sequence
  SiRNA target sequence
aagaaaattcaaagtattttgcaga

SEQ ID NO: 61592 - DNA, 25 bp, Artificial sequence
  SiRNA target sequence
agaaaattcaaagtattttgcagat

SEQ ID NO: 61593 - DNA, 25 bp, Artificial sequence
  SiRNA target sequence
gaaaattcaaagtattttgcagata

SEQ ID NO: 61594 - DNA, 25 bp, Artificial sequence
  SiRNA target sequence
aaaattcaaagtattttgcagatat

SEQ ID NO: 61595 - DNA, 25 bp, Artificial sequence
  SiRNA target sequence
aaattcaaagtattttgcagatatt

SEQ ID NO: 61596 - DNA, 25 bp, Artificial sequence
  SiRNA target sequence
aattcaaagtattttgcagatattt

SEQ ID NO: 61597 - DNA, 25 bp, Artificial sequence
  SiRNA target sequence
attcaaagtattttgcagatatttt

SEQ ID NO: 61598 - DNA, 25 bp, Artificial sequence
  SiRNA target sequence
ttcaaagtattttgcagatatttta

SEQ ID NO: 61599 - DNA, 25 bp, Artificial sequence
  SiRNA target sequence
tcaaagtattttgcagatattttaa

SEQ ID NO: 61600 - DNA, 25 bp, Artificial sequence
  SiRNA target sequence
caaagtattttgcagatattttaaa

SEQ ID NO: 61601 - DNA, 25 bp, Artificial sequence
  SiRNA target sequence
aaagtattttgcagatattttaaac

SEQ ID NO: 61602 - DNA, 25 bp, Artificial sequence
  SiRNA target sequence
aagtattttgcagatattttaaaca

SEQ ID NO: 61603 - DNA, 25 bp, Artificial sequence
  SiRNA target sequence
agtattttgcagatattttaaacaa

SEQ ID NO: 61604 - DNA, 25 bp, Artificial sequence
  SiRNA target sequence
gtattttgcagatattttaaacaac

SEQ ID NO: 61605 - DNA, 25 bp, Artificial sequence
  SiRNA target sequence
tattttgcagatattttaaacaacg

SEQ ID NO: 61606 - DNA, 25 bp, Artificial sequence
  SiRNA target sequence
attttgcagatattttaaacaacga

SEQ ID NO: 61607 - DNA, 25 bp, Artificial sequence
  SiRNA target sequence
ttttgcagatattttaaacaacgaa

SEQ ID NO: 61608 - DNA, 25 bp, Artificial sequence
  SiRNA target sequence
tttgcagatattttaaacaacgaat

SEQ ID NO: 61609 - DNA, 25 bp, Artificial sequence
  SiRNA target sequence
ttgcagatattttaaacaacgaata

SEQ ID NO: 61610 - DNA, 25 bp, Artificial sequence
  SiRNA target sequence
tgcagatattttaaacaacgaataa

SEQ ID NO: 61611 - DNA, 26 bp, Artificial sequence
  SiRNA target sequence
atgaaggaaaaaaccaattatgaaat

SEQ ID NO: 61612 - DNA, 26 bp, Artificial sequence
  SiRNA target sequence
tgaaggaaaaaaccaattatgaaatt

SEQ ID NO: 61613 - DNA, 26 bp, Artificial sequence
  SiRNA target sequence
gaaggaaaaaaccaattatgaaattt

SEQ ID NO: 61614 - DNA, 26 bp, Artificial sequence
  SiRNA target sequence
aaggaaaaaaccaattatgaaatttt

SEQ ID NO: 61615 - DNA, 26 bp, Artificial sequence
  SiRNA target sequence
aggaaaaaaccaattatgaaatttta

SEQ ID NO: 61616 - DNA, 26 bp, Artificial sequence
  SiRNA target sequence
ggaaaaaaccaattatgaaattttat

SEQ ID NO: 61617 - DNA, 26 bp, Artificial sequence
  SiRNA target sequence
gaaaaaaccaattatgaaattttata

SEQ ID NO: 61618 - DNA, 26 bp, Artificial sequence
  SiRNA target sequence
aaaaaaccaattatgaaattttatat

SEQ ID NO: 61619 - DNA, 26 bp, Artificial sequence
  SiRNA target sequence
aaaaaccaattatgaaattttatatg

SEQ ID NO: 61620 - DNA, 26 bp, Artificial sequence
  SiRNA target sequence
aaaaccaattatgaaattttatatga

SEQ ID NO: 61621 - DNA, 26 bp, Artificial sequence
  SiRNA target sequence
aaaccaattatgaaattttatatgat

SEQ ID NO: 61622 - DNA, 26 bp, Artificial sequence
  SiRNA target sequence
aaccaattatgaaattttatatgata

SEQ ID NO: 61623 - DNA, 26 bp, Artificial sequence
  SiRNA target sequence
accaattatgaaattttatatgatac

SEQ ID NO: 61624 - DNA, 26 bp, Artificial sequence
  SiRNA target sequence
ccaattatgaaattttatatgataca

SEQ ID NO: 61625 - DNA, 26 bp, Artificial sequence
  SiRNA target sequence
caattatgaaattttatatgatacat

SEQ ID NO: 61626 - DNA, 26 bp, Artificial sequence
  SiRNA target sequence
aattatgaaattttatatgatacatt

SEQ ID NO: 61627 - DNA, 26 bp, Artificial sequence
  SiRNA target sequence
attatgaaattttatatgatacattt

SEQ ID NO: 61628 - DNA, 26 bp, Artificial sequence
  SiRNA target sequence
ttatgaaattttatatgatacatttg

SEQ ID NO: 61629 - DNA, 26 bp, Artificial sequence
  SiRNA target sequence
tatgaaattttatatgatacatttgt

SEQ ID NO: 61630 - DNA, 26 bp, Artificial sequence
  SiRNA target sequence
atgaaattttatatgatacatttgta

SEQ ID NO: 61631 - DNA, 26 bp, Artificial sequence
  SiRNA target sequence
tgaaattttatatgatacatttgtaa

SEQ ID NO: 61632 - DNA, 26 bp, Artificial sequence
  SiRNA target sequence
gaaattttatatgatacatttgtaaa

SEQ ID NO: 61633 - DNA, 26 bp, Artificial sequence
  SiRNA target sequence
aaattttatatgatacatttgtaaaa

SEQ ID NO: 61634 - DNA, 26 bp, Artificial sequence
  SiRNA target sequence
aattttatatgatacatttgtaaaat

SEQ ID NO: 61635 - DNA, 26 bp, Artificial sequence
  SiRNA target sequence
attttatatgatacatttgtaaaata

SEQ ID NO: 61636 - DNA, 26 bp, Artificial sequence
  SiRNA target sequence
ttttatatgatacatttgtaaaatat

SEQ ID NO: 61637 - DNA, 26 bp, Artificial sequence
  SiRNA target sequence
tttatatgatacatttgtaaaatatt

SEQ ID NO: 61638 - DNA, 26 bp, Artificial sequence
  SiRNA target sequence
ttatatgatacatttgtaaaatattg

SEQ ID NO: 61639 - DNA, 26 bp, Artificial sequence
  SiRNA target sequence
tatatgatacatttgtaaaatattgt

SEQ ID NO: 61640 - DNA, 26 bp, Artificial sequence
  SiRNA target sequence
atatgatacatttgtaaaatattgtt

SEQ ID NO: 61641 - DNA, 26 bp, Artificial sequence
  SiRNA target sequence
tatgatacatttgtaaaatattgtta

SEQ ID NO: 61642 - DNA, 26 bp, Artificial sequence
  SiRNA target sequence
atgatacatttgtaaaatattgttac

SEQ ID NO: 61643 - DNA, 26 bp, Artificial sequence
  SiRNA target sequence
tgatacatttgtaaaatattgttaca

SEQ ID NO: 61644 - DNA, 26 bp, Artificial sequence
  SiRNA target sequence
gatacatttgtaaaatattgttacaa

SEQ ID NO: 61645 - DNA, 26 bp, Artificial sequence
  SiRNA target sequence
atacatttgtaaaatattgttacaat

SEQ ID NO: 61646 - DNA, 26 bp, Artificial sequence
  SiRNA target sequence
tacatttgtaaaatattgttacaata

SEQ ID NO: 61647 - DNA, 26 bp, Artificial sequence
  SiRNA target sequence
acatttgtaaaatattgttacaatat

SEQ ID NO: 61648 - DNA, 26 bp, Artificial sequence
  SiRNA target sequence
catttgtaaaatattgttacaatatt

SEQ ID NO: 61649 - DNA, 26 bp, Artificial sequence
  SiRNA target sequence
atttgtaaaatattgttacaatattt

SEQ ID NO: 61650 - DNA, 26 bp, Artificial sequence
  SiRNA target sequence
tttgtaaaatattgttacaatatttc

SEQ ID NO: 61651 - DNA, 26 bp, Artificial sequence
  SiRNA target sequence
ttgtaaaatattgttacaatatttcc

SEQ ID NO: 61652 - DNA, 26 bp, Artificial sequence
  SiRNA target sequence
tgtaaaatattgttacaatatttcct

SEQ ID NO: 61653 - DNA, 26 bp, Artificial sequence
  SiRNA target sequence
gtaaaatattgttacaatatttccta

SEQ ID NO: 61654 - DNA, 26 bp, Artificial sequence
  SiRNA target sequence
taaaatattgttacaatatttcctat

SEQ ID NO: 61655 - DNA, 26 bp, Artificial sequence
  SiRNA target sequence
aaaatattgttacaatatttcctata

SEQ ID NO: 61656 - DNA, 26 bp, Artificial sequence
  SiRNA target sequence
aaatattgttacaatatttcctatat

SEQ ID NO: 61657 - DNA, 26 bp, Artificial sequence
  SiRNA target sequence
aatattgttacaatatttcctatata

SEQ ID NO: 61658 - DNA, 26 bp, Artificial sequence
  SiRNA target sequence
atattgttacaatatttcctatataa

SEQ ID NO: 61659 - DNA, 26 bp, Artificial sequence
  SiRNA target sequence
tattgttacaatatttcctatataag

SEQ ID NO: 61660 - DNA, 26 bp, Artificial sequence
  SiRNA target sequence
attgttacaatatttcctatataagg

SEQ ID NO: 61661 - DNA, 26 bp, Artificial sequence
  SiRNA target sequence
ttgttacaatatttcctatataaggt

SEQ ID NO: 61662 - DNA, 26 bp, Artificial sequence
  SiRNA target sequence
tgttacaatatttcctatataaggta

SEQ ID NO: 61663 - DNA, 26 bp, Artificial sequence
  SiRNA target sequence
gttacaatatttcctatataaggtac

SEQ ID NO: 61664 - DNA, 26 bp, Artificial sequence
  SiRNA target sequence
ttacaatatttcctatataaggtacg

SEQ ID NO: 61665 - DNA, 26 bp, Artificial sequence
  SiRNA target sequence
tacaatatttcctatataaggtacgt

SEQ ID NO: 61666 - DNA, 26 bp, Artificial sequence
  SiRNA target sequence
acaatatttcctatataaggtacgta

SEQ ID NO: 61667 - DNA, 26 bp, Artificial sequence
  SiRNA target sequence
caatatttcctatataaggtacgtaa

SEQ ID NO: 61668 - DNA, 26 bp, Artificial sequence
  SiRNA target sequence
aatatttcctatataaggtacgtaat

SEQ ID NO: 61669 - DNA, 26 bp, Artificial sequence
  SiRNA target sequence
atatttcctatataaggtacgtaatg

SEQ ID NO: 61670 - DNA, 26 bp, Artificial sequence
  SiRNA target sequence
tatttcctatataaggtacgtaatgt

SEQ ID NO: 61671 - DNA, 26 bp, Artificial sequence
  SiRNA target sequence
atttcctatataaggtacgtaatgtt

SEQ ID NO: 61672 - DNA, 26 bp, Artificial sequence
  SiRNA target sequence
tttcctatataaggtacgtaatgttt

SEQ ID NO: 61673 - DNA, 26 bp, Artificial sequence
  SiRNA target sequence
ttcctatataaggtacgtaatgtttc

SEQ ID NO: 61674 - DNA, 26 bp, Artificial sequence
  SiRNA target sequence
tcctatataaggtacgtaatgtttcc

SEQ ID NO: 61675 - DNA, 26 bp, Artificial sequence
  SiRNA target sequence
cctatataaggtacgtaatgtttccc

SEQ ID NO: 61676 - DNA, 26 bp, Artificial sequence
  SiRNA target sequence
ctatataaggtacgtaatgtttccca

SEQ ID NO: 61677 - DNA, 26 bp, Artificial sequence
  SiRNA target sequence
tatataaggtacgtaatgtttcccat

SEQ ID NO: 61678 - DNA, 26 bp, Artificial sequence
  SiRNA target sequence
atataaggtacgtaatgtttcccata

SEQ ID NO: 61679 - DNA, 26 bp, Artificial sequence
  SiRNA target sequence
tataaggtacgtaatgtttcccatat

SEQ ID NO: 61680 - DNA, 26 bp, Artificial sequence
  SiRNA target sequence
ataaggtacgtaatgtttcccatatt

SEQ ID NO: 61681 - DNA, 26 bp, Artificial sequence
  SiRNA target sequence
taaggtacgtaatgtttcccatatta

SEQ ID NO: 61682 - DNA, 26 bp, Artificial sequence
  SiRNA target sequence
aaggtacgtaatgtttcccatattac

SEQ ID NO: 61683 - DNA, 26 bp, Artificial sequence
  SiRNA target sequence
aggtacgtaatgtttcccatattact

SEQ ID NO: 61684 - DNA, 26 bp, Artificial sequence
  SiRNA target sequence
ggtacgtaatgtttcccatattactg

SEQ ID NO: 61685 - DNA, 26 bp, Artificial sequence
  SiRNA target sequence
gtacgtaatgtttcccatattactgt

SEQ ID NO: 61686 - DNA, 26 bp, Artificial sequence
  SiRNA target sequence
tacgtaatgtttcccatattactgtc

SEQ ID NO: 61687 - DNA, 26 bp, Artificial sequence
  SiRNA target sequence
acgtaatgtttcccatattactgtct

SEQ ID NO: 61688 - DNA, 26 bp, Artificial sequence
  SiRNA target sequence
cgtaatgtttcccatattactgtcta

SEQ ID NO: 61689 - DNA, 26 bp, Artificial sequence
  SiRNA target sequence
gtaatgtttcccatattactgtctac

SEQ ID NO: 61690 - DNA, 26 bp, Artificial sequence
  SiRNA target sequence
taatgtttcccatattactgtctaca

SEQ ID NO: 61691 - DNA, 26 bp, Artificial sequence
  SiRNA target sequence
aatgtttcccatattactgtctacaa

SEQ ID NO: 61692 - DNA, 26 bp, Artificial sequence
  SiRNA target sequence
atgtttcccatattactgtctacaat

SEQ ID NO: 61693 - DNA, 26 bp, Artificial sequence
  SiRNA target sequence
tgtttcccatattactgtctacaatt

SEQ ID NO: 61694 - DNA, 26 bp, Artificial sequence
  SiRNA target sequence
gtttcccatattactgtctacaatta

SEQ ID NO: 61695 - DNA, 26 bp, Artificial sequence
  SiRNA target sequence
tttcccatattactgtctacaattat

SEQ ID NO: 61696 - DNA, 26 bp, Artificial sequence
  SiRNA target sequence
ttcccatattactgtctacaattata

SEQ ID NO: 61697 - DNA, 26 bp, Artificial sequence
  SiRNA target sequence
tcccatattactgtctacaattatag

SEQ ID NO: 61698 - DNA, 26 bp, Artificial sequence
  SiRNA target sequence
cccatattactgtctacaattatagc

SEQ ID NO: 61699 - DNA, 26 bp, Artificial sequence
  SiRNA target sequence
ccatattactgtctacaattatagct

SEQ ID NO: 61700 - DNA, 26 bp, Artificial sequence
  SiRNA target sequence
catattactgtctacaattatagctt

SEQ ID NO: 61701 - DNA, 26 bp, Artificial sequence
  SiRNA target sequence
atattactgtctacaattatagcttg

SEQ ID NO: 61702 - DNA, 26 bp, Artificial sequence
  SiRNA target sequence
tattactgtctacaattatagcttgt

SEQ ID NO: 61703 - DNA, 26 bp, Artificial sequence
  SiRNA target sequence
attactgtctacaattatagcttgtt

SEQ ID NO: 61704 - DNA, 26 bp, Artificial sequence
  SiRNA target sequence
ttactgtctacaattatagcttgtta

SEQ ID NO: 61705 - DNA, 26 bp, Artificial sequence
  SiRNA target sequence
tactgtctacaattatagcttgttat

SEQ ID NO: 61706 - DNA, 26 bp, Artificial sequence
  SiRNA target sequence
actgtctacaattatagcttgttatc

SEQ ID NO: 61707 - DNA, 26 bp, Artificial sequence
  SiRNA target sequence
ctgtctacaattatagcttgttatct

SEQ ID NO: 61708 - DNA, 26 bp, Artificial sequence
  SiRNA target sequence
tgtctacaattatagcttgttatctc

SEQ ID NO: 61709 - DNA, 26 bp, Artificial sequence
  SiRNA target sequence
gtctacaattatagcttgttatctcg

SEQ ID NO: 61710 - DNA, 26 bp, Artificial sequence
  SiRNA target sequence
tctacaattatagcttgttatctcga

SEQ ID NO: 61711 - DNA, 26 bp, Artificial sequence
  SiRNA target sequence
ctacaattatagcttgttatctcgaa

SEQ ID NO: 61712 - DNA, 26 bp, Artificial sequence
  SiRNA target sequence
tacaattatagcttgttatctcgaag

SEQ ID NO: 61713 - DNA, 26 bp, Artificial sequence
  SiRNA target sequence
acaattatagcttgttatctcgaagt

SEQ ID NO: 61714 - DNA, 26 bp, Artificial sequence
  SiRNA target sequence
caattatagcttgttatctcgaagtt

SEQ ID NO: 61715 - DNA, 26 bp, Artificial sequence
  SiRNA target sequence
aattatagcttgttatctcgaagttc

SEQ ID NO: 61716 - DNA, 26 bp, Artificial sequence
  SiRNA target sequence
attatagcttgttatctcgaagttca

SEQ ID NO: 61717 - DNA, 26 bp, Artificial sequence
  SiRNA target sequence
ttatagcttgttatctcgaagttcag

SEQ ID NO: 61718 - DNA, 26 bp, Artificial sequence
  SiRNA target sequence
tatagcttgttatctcgaagttcagg

SEQ ID NO: 61719 - DNA, 26 bp, Artificial sequence
  SiRNA target sequence
atagcttgttatctcgaagttcaggc

SEQ ID NO: 61720 - DNA, 26 bp, Artificial sequence
  SiRNA target sequence
tagcttgttatctcgaagttcaggca

SEQ ID NO: 61721 - DNA, 26 bp, Artificial sequence
  SiRNA target sequence
agcttgttatctcgaagttcaggcaa

SEQ ID NO: 61722 - DNA, 26 bp, Artificial sequence
  SiRNA target sequence
gcttgttatctcgaagttcaggcaag

SEQ ID NO: 61723 - DNA, 26 bp, Artificial sequence
  SiRNA target sequence
cttgttatctcgaagttcaggcaagt

SEQ ID NO: 61724 - DNA, 26 bp, Artificial sequence
  SiRNA target sequence
ttgttatctcgaagttcaggcaagta

SEQ ID NO: 61725 - DNA, 26 bp, Artificial sequence
  SiRNA target sequence
tgttatctcgaagttcaggcaagtaa

SEQ ID NO: 61726 - DNA, 26 bp, Artificial sequence
  SiRNA target sequence
gttatctcgaagttcaggcaagtaac

SEQ ID NO: 61727 - DNA, 26 bp, Artificial sequence
  SiRNA target sequence
ttatctcgaagttcaggcaagtaaca

SEQ ID NO: 61728 - DNA, 26 bp, Artificial sequence
  SiRNA target sequence
tatctcgaagttcaggcaagtaacat

SEQ ID NO: 61729 - DNA, 26 bp, Artificial sequence
  SiRNA target sequence
atctcgaagttcaggcaagtaacata

SEQ ID NO: 61730 - DNA, 26 bp, Artificial sequence
  SiRNA target sequence
tctcgaagttcaggcaagtaacatat

SEQ ID NO: 61731 - DNA, 26 bp, Artificial sequence
  SiRNA target sequence
ctcgaagttcaggcaagtaacatatc

SEQ ID NO: 61732 - DNA, 26 bp, Artificial sequence
  SiRNA target sequence
tcgaagttcaggcaagtaacatatca

SEQ ID NO: 61733 - DNA, 26 bp, Artificial sequence
  SiRNA target sequence
cgaagttcaggcaagtaacatatcaa

SEQ ID NO: 61734 - DNA, 26 bp, Artificial sequence
  SiRNA target sequence
gaagttcaggcaagtaacatatcaaa

SEQ ID NO: 61735 - DNA, 26 bp, Artificial sequence
  SiRNA target sequence
aagttcaggcaagtaacatatcaaaa

SEQ ID NO: 61736 - DNA, 26 bp, Artificial sequence
  SiRNA target sequence
agttcaggcaagtaacatatcaaaaa

SEQ ID NO: 61737 - DNA, 26 bp, Artificial sequence
  SiRNA target sequence
gttcaggcaagtaacatatcaaaaag

SEQ ID NO: 61738 - DNA, 26 bp, Artificial sequence
  SiRNA target sequence
ttcaggcaagtaacatatcaaaaaga

SEQ ID NO: 61739 - DNA, 26 bp, Artificial sequence
  SiRNA target sequence
tcaggcaagtaacatatcaaaaagaa

SEQ ID NO: 61740 - DNA, 26 bp, Artificial sequence
  SiRNA target sequence
caggcaagtaacatatcaaaaagaat

SEQ ID NO: 61741 - DNA, 26 bp, Artificial sequence
  SiRNA target sequence
aggcaagtaacatatcaaaaagaatt

SEQ ID NO: 61742 - DNA, 26 bp, Artificial sequence
  SiRNA target sequence
ggcaagtaacatatcaaaaagaattg

SEQ ID NO: 61743 - DNA, 26 bp, Artificial sequence
  SiRNA target sequence
gcaagtaacatatcaaaaagaattgc

SEQ ID NO: 61744 - DNA, 26 bp, Artificial sequence
  SiRNA target sequence
caagtaacatatcaaaaagaattgca

SEQ ID NO: 61745 - DNA, 26 bp, Artificial sequence
  SiRNA target sequence
aagtaacatatcaaaaagaattgcag

SEQ ID NO: 61746 - DNA, 26 bp, Artificial sequence
  SiRNA target sequence
agtaacatatcaaaaagaattgcaga

SEQ ID NO: 61747 - DNA, 26 bp, Artificial sequence
  SiRNA target sequence
gtaacatatcaaaaagaattgcagaa

SEQ ID NO: 61748 - DNA, 26 bp, Artificial sequence
  SiRNA target sequence
taacatatcaaaaagaattgcagaag

SEQ ID NO: 61749 - DNA, 26 bp, Artificial sequence
  SiRNA target sequence
aacatatcaaaaagaattgcagaaga

SEQ ID NO: 61750 - DNA, 26 bp, Artificial sequence
  SiRNA target sequence
acatatcaaaaagaattgcagaagat

SEQ ID NO: 61751 - DNA, 26 bp, Artificial sequence
  SiRNA target sequence
catatcaaaaagaattgcagaagatt

SEQ ID NO: 61752 - DNA, 26 bp, Artificial sequence
  SiRNA target sequence
atatcaaaaagaattgcagaagattt

SEQ ID NO: 61753 - DNA, 26 bp, Artificial sequence
  SiRNA target sequence
tatcaaaaagaattgcagaagatttt

SEQ ID NO: 61754 - DNA, 26 bp, Artificial sequence
  SiRNA target sequence
atcaaaaagaattgcagaagattttg

SEQ ID NO: 61755 - DNA, 26 bp, Artificial sequence
  SiRNA target sequence
tcaaaaagaattgcagaagattttga

SEQ ID NO: 61756 - DNA, 26 bp, Artificial sequence
  SiRNA target sequence
caaaaagaattgcagaagattttgaa

SEQ ID NO: 61757 - DNA, 26 bp, Artificial sequence
  SiRNA target sequence
aaaaagaattgcagaagattttgaaa

SEQ ID NO: 61758 - DNA, 26 bp, Artificial sequence
  SiRNA target sequence
aaaagaattgcagaagattttgaaaa

SEQ ID NO: 61759 - DNA, 26 bp, Artificial sequence
  SiRNA target sequence
aaagaattgcagaagattttgaaaat

SEQ ID NO: 61760 - DNA, 26 bp, Artificial sequence
  SiRNA target sequence
aagaattgcagaagattttgaaaata

SEQ ID NO: 61761 - DNA, 26 bp, Artificial sequence
  SiRNA target sequence
agaattgcagaagattttgaaaataa

SEQ ID NO: 61762 - DNA, 26 bp, Artificial sequence
  SiRNA target sequence
gaattgcagaagattttgaaaataaa

SEQ ID NO: 61763 - DNA, 26 bp, Artificial sequence
  SiRNA target sequence
aattgcagaagattttgaaaataaaa

SEQ ID NO: 61764 - DNA, 26 bp, Artificial sequence
  SiRNA target sequence
attgcagaagattttgaaaataaaat

SEQ ID NO: 61765 - DNA, 26 bp, Artificial sequence
  SiRNA target sequence
ttgcagaagattttgaaaataaaata

SEQ ID NO: 61766 - DNA, 26 bp, Artificial sequence
  SiRNA target sequence
tgcagaagattttgaaaataaaataa

SEQ ID NO: 61767 - DNA, 26 bp, Artificial sequence
  SiRNA target sequence
gcagaagattttgaaaataaaataaa

SEQ ID NO: 61768 - DNA, 26 bp, Artificial sequence
  SiRNA target sequence
cagaagattttgaaaataaaataaat

SEQ ID NO: 61769 - DNA, 26 bp, Artificial sequence
  SiRNA target sequence
agaagattttgaaaataaaataaatg

SEQ ID NO: 61770 - DNA, 26 bp, Artificial sequence
  SiRNA target sequence
gaagattttgaaaataaaataaatgc

SEQ ID NO: 61771 - DNA, 26 bp, Artificial sequence
  SiRNA target sequence
aagattttgaaaataaaataaatgca

SEQ ID NO: 61772 - DNA, 26 bp, Artificial sequence
  SiRNA target sequence
agattttgaaaataaaataaatgcag

SEQ ID NO: 61773 - DNA, 26 bp, Artificial sequence
  SiRNA target sequence
gattttgaaaataaaataaatgcagg

SEQ ID NO: 61774 - DNA, 26 bp, Artificial sequence
  SiRNA target sequence
attttgaaaataaaataaatgcagga

SEQ ID NO: 61775 - DNA, 26 bp, Artificial sequence
  SiRNA target sequence
ttttgaaaataaaataaatgcaggaa

SEQ ID NO: 61776 - DNA, 26 bp, Artificial sequence
  SiRNA target sequence
tttgaaaataaaataaatgcaggaaa

SEQ ID NO: 61777 - DNA, 26 bp, Artificial sequence
  SiRNA target sequence
ttgaaaataaaataaatgcaggaaaa

SEQ ID NO: 61778 - DNA, 26 bp, Artificial sequence
  SiRNA target sequence
tgaaaataaaataaatgcaggaaaaa

SEQ ID NO: 61779 - DNA, 26 bp, Artificial sequence
  SiRNA target sequence
gaaaataaaataaatgcaggaaaaag

SEQ ID NO: 61780 - DNA, 26 bp, Artificial sequence
  SiRNA target sequence
aaaataaaataaatgcaggaaaaagt

SEQ ID NO: 61781 - DNA, 26 bp, Artificial sequence
  SiRNA target sequence
aaataaaataaatgcaggaaaaagta

SEQ ID NO: 61782 - DNA, 26 bp, Artificial sequence
  SiRNA target sequence
aataaaataaatgcaggaaaaagtat

SEQ ID NO: 61783 - DNA, 26 bp, Artificial sequence
  SiRNA target sequence
ataaaataaatgcaggaaaaagtata

SEQ ID NO: 61784 - DNA, 26 bp, Artificial sequence
  SiRNA target sequence
taaaataaatgcaggaaaaagtatat

SEQ ID NO: 61785 - DNA, 26 bp, Artificial sequence
  SiRNA target sequence
aaaataaatgcaggaaaaagtatatt

SEQ ID NO: 61786 - DNA, 26 bp, Artificial sequence
  SiRNA target sequence
aaataaatgcaggaaaaagtatattt

SEQ ID NO: 61787 - DNA, 26 bp, Artificial sequence
  SiRNA target sequence
aataaatgcaggaaaaagtatattta

SEQ ID NO: 61788 - DNA, 26 bp, Artificial sequence
  SiRNA target sequence
ataaatgcaggaaaaagtatatttaa

SEQ ID NO: 61789 - DNA, 26 bp, Artificial sequence
  SiRNA target sequence
taaatgcaggaaaaagtatatttaaa

SEQ ID NO: 61790 - DNA, 26 bp, Artificial sequence
  SiRNA target sequence
aaatgcaggaaaaagtatatttaaat

SEQ ID NO: 61791 - DNA, 26 bp, Artificial sequence
  SiRNA target sequence
aatgcaggaaaaagtatatttaaata

SEQ ID NO: 61792 - DNA, 26 bp, Artificial sequence
  SiRNA target sequence
atgcaggaaaaagtatatttaaatat

SEQ ID NO: 61793 - DNA, 26 bp, Artificial sequence
  SiRNA target sequence
tgcaggaaaaagtatatttaaatata

SEQ ID NO: 61794 - DNA, 26 bp, Artificial sequence
  SiRNA target sequence
gcaggaaaaagtatatttaaatatat

SEQ ID NO: 61795 - DNA, 26 bp, Artificial sequence
  SiRNA target sequence
caggaaaaagtatatttaaatatatt

SEQ ID NO: 61796 - DNA, 26 bp, Artificial sequence
  SiRNA target sequence
aggaaaaagtatatttaaatatattt

SEQ ID NO: 61797 - DNA, 26 bp, Artificial sequence
  SiRNA target sequence
ggaaaaagtatatttaaatatatttt

SEQ ID NO: 61798 - DNA, 26 bp, Artificial sequence
  SiRNA target sequence
gaaaaagtatatttaaatatatttta

SEQ ID NO: 61799 - DNA, 26 bp, Artificial sequence
  SiRNA target sequence
aaaaagtatatttaaatatattttat

SEQ ID NO: 61800 - DNA, 26 bp, Artificial sequence
  SiRNA target sequence
aaaagtatatttaaatatattttatt

SEQ ID NO: 61801 - DNA, 26 bp, Artificial sequence
  SiRNA target sequence
aaagtatatttaaatatattttattt

SEQ ID NO: 61802 - DNA, 26 bp, Artificial sequence
  SiRNA target sequence
aagtatatttaaatatattttatttt

SEQ ID NO: 61803 - DNA, 26 bp, Artificial sequence
  SiRNA target sequence
agtatatttaaatatattttattttt

SEQ ID NO: 61804 - DNA, 26 bp, Artificial sequence
  SiRNA target sequence
gtatatttaaatatattttattttta

SEQ ID NO: 61805 - DNA, 26 bp, Artificial sequence
  SiRNA target sequence
tatatttaaatatattttatttttaa

SEQ ID NO: 61806 - DNA, 26 bp, Artificial sequence
  SiRNA target sequence
atatttaaatatattttatttttaac

SEQ ID NO: 61807 - DNA, 26 bp, Artificial sequence
  SiRNA target sequence
tatttaaatatattttatttttaact

SEQ ID NO: 61808 - DNA, 26 bp, Artificial sequence
  SiRNA target sequence
atttaaatatattttatttttaactt

SEQ ID NO: 61809 - DNA, 26 bp, Artificial sequence
  SiRNA target sequence
tttaaatatattttatttttaacttc

SEQ ID NO: 61810 - DNA, 26 bp, Artificial sequence
  SiRNA target sequence
ttaaatatattttatttttaacttca

SEQ ID NO: 61811 - DNA, 26 bp, Artificial sequence
  SiRNA target sequence
taaatatattttatttttaacttcat

SEQ ID NO: 61812 - DNA, 26 bp, Artificial sequence
  SiRNA target sequence
aaatatattttatttttaacttcatc

SEQ ID NO: 61813 - DNA, 26 bp, Artificial sequence
  SiRNA target sequence
aatatattttatttttaacttcatca

SEQ ID NO: 61814 - DNA, 26 bp, Artificial sequence
  SiRNA target sequence
atatattttatttttaacttcatcaa

SEQ ID NO: 61815 - DNA, 26 bp, Artificial sequence
  SiRNA target sequence
tatattttatttttaacttcatcaat

SEQ ID NO: 61816 - DNA, 26 bp, Artificial sequence
  SiRNA target sequence
atattttatttttaacttcatcaata

SEQ ID NO: 61817 - DNA, 26 bp, Artificial sequence
  SiRNA target sequence
tattttatttttaacttcatcaatag

SEQ ID NO: 61818 - DNA, 26 bp, Artificial sequence
  SiRNA target sequence
attttatttttaacttcatcaatagt

SEQ ID NO: 61819 - DNA, 26 bp, Artificial sequence
  SiRNA target sequence
ttttatttttaacttcatcaatagta

SEQ ID NO: 61820 - DNA, 26 bp, Artificial sequence
  SiRNA target sequence
tttatttttaacttcatcaatagtat

SEQ ID NO: 61821 - DNA, 26 bp, Artificial sequence
  SiRNA target sequence
ttatttttaacttcatcaatagtatt

SEQ ID NO: 61822 - DNA, 26 bp, Artificial sequence
  SiRNA target sequence
tatttttaacttcatcaatagtatta

SEQ ID NO: 61823 - DNA, 26 bp, Artificial sequence
  SiRNA target sequence
atttttaacttcatcaatagtattaa

SEQ ID NO: 61824 - DNA, 26 bp, Artificial sequence
  SiRNA target sequence
tttttaacttcatcaatagtattaag

SEQ ID NO: 61825 - DNA, 26 bp, Artificial sequence
  SiRNA target sequence
ttttaacttcatcaatagtattaaga

SEQ ID NO: 61826 - DNA, 26 bp, Artificial sequence
  SiRNA target sequence
tttaacttcatcaatagtattaagac

SEQ ID NO: 61827 - DNA, 26 bp, Artificial sequence
  SiRNA target sequence
ttaacttcatcaatagtattaagaca

SEQ ID NO: 61828 - DNA, 26 bp, Artificial sequence
  SiRNA target sequence
taacttcatcaatagtattaagacaa

SEQ ID NO: 61829 - DNA, 26 bp, Artificial sequence
  SiRNA target sequence
aacttcatcaatagtattaagacaaa

SEQ ID NO: 61830 - DNA, 26 bp, Artificial sequence
  SiRNA target sequence
acttcatcaatagtattaagacaaat

SEQ ID NO: 61831 - DNA, 26 bp, Artificial sequence
  SiRNA target sequence
cttcatcaatagtattaagacaaatt

SEQ ID NO: 61832 - DNA, 26 bp, Artificial sequence
  SiRNA target sequence
ttcatcaatagtattaagacaaatta

SEQ ID NO: 61833 - DNA, 26 bp, Artificial sequence
  SiRNA target sequence
tcatcaatagtattaagacaaattaa

SEQ ID NO: 61834 - DNA, 26 bp, Artificial sequence
  SiRNA target sequence
catcaatagtattaagacaaattaat

SEQ ID NO: 61835 - DNA, 26 bp, Artificial sequence
  SiRNA target sequence
atcaatagtattaagacaaattaatg

SEQ ID NO: 61836 - DNA, 26 bp, Artificial sequence
  SiRNA target sequence
tcaatagtattaagacaaattaatga

SEQ ID NO: 61837 - DNA, 26 bp, Artificial sequence
  SiRNA target sequence
caatagtattaagacaaattaatgat

SEQ ID NO: 61838 - DNA, 26 bp, Artificial sequence
  SiRNA target sequence
aatagtattaagacaaattaatgata

SEQ ID NO: 61839 - DNA, 26 bp, Artificial sequence
  SiRNA target sequence
atagtattaagacaaattaatgatat

SEQ ID NO: 61840 - DNA, 26 bp, Artificial sequence
  SiRNA target sequence
tagtattaagacaaattaatgatatt

SEQ ID NO: 61841 - DNA, 26 bp, Artificial sequence
  SiRNA target sequence
agtattaagacaaattaatgatattg

SEQ ID NO: 61842 - DNA, 26 bp, Artificial sequence
  SiRNA target sequence
gtattaagacaaattaatgatattgt

SEQ ID NO: 61843 - DNA, 26 bp, Artificial sequence
  SiRNA target sequence
tattaagacaaattaatgatattgtg

SEQ ID NO: 61844 - DNA, 26 bp, Artificial sequence
  SiRNA target sequence
attaagacaaattaatgatattgtgt

SEQ ID NO: 61845 - DNA, 26 bp, Artificial sequence
  SiRNA target sequence
ttaagacaaattaatgatattgtgtt

SEQ ID NO: 61846 - DNA, 26 bp, Artificial sequence
  SiRNA target sequence
taagacaaattaatgatattgtgttt

SEQ ID NO: 61847 - DNA, 26 bp, Artificial sequence
  SiRNA target sequence
aagacaaattaatgatattgtgttta

SEQ ID NO: 61848 - DNA, 26 bp, Artificial sequence
  SiRNA target sequence
agacaaattaatgatattgtgtttag

SEQ ID NO: 61849 - DNA, 26 bp, Artificial sequence
  SiRNA target sequence
gacaaattaatgatattgtgtttagc

SEQ ID NO: 61850 - DNA, 26 bp, Artificial sequence
  SiRNA target sequence
acaaattaatgatattgtgtttagcg

SEQ ID NO: 61851 - DNA, 26 bp, Artificial sequence
  SiRNA target sequence
caaattaatgatattgtgtttagcgg

SEQ ID NO: 61852 - DNA, 26 bp, Artificial sequence
  SiRNA target sequence
aaattaatgatattgtgtttagcggg

SEQ ID NO: 61853 - DNA, 26 bp, Artificial sequence
  SiRNA target sequence
aattaatgatattgtgtttagcgggc

SEQ ID NO: 61854 - DNA, 26 bp, Artificial sequence
  SiRNA target sequence
attaatgatattgtgtttagcgggcc

SEQ ID NO: 61855 - DNA, 26 bp, Artificial sequence
  SiRNA target sequence
ttaatgatattgtgtttagcgggcca

SEQ ID NO: 61856 - DNA, 26 bp, Artificial sequence
  SiRNA target sequence
taatgatattgtgtttagcgggccaa

SEQ ID NO: 61857 - DNA, 26 bp, Artificial sequence
  SiRNA target sequence
aatgatattgtgtttagcgggccaat

SEQ ID NO: 61858 - DNA, 26 bp, Artificial sequence
  SiRNA target sequence
atgatattgtgtttagcgggccaata

SEQ ID NO: 61859 - DNA, 26 bp, Artificial sequence
  SiRNA target sequence
tgatattgtgtttagcgggccaatac

SEQ ID NO: 61860 - DNA, 26 bp, Artificial sequence
  SiRNA target sequence
gatattgtgtttagcgggccaataca

SEQ ID NO: 61861 - DNA, 26 bp, Artificial sequence
  SiRNA target sequence
atattgtgtttagcgggccaatacaa

SEQ ID NO: 61862 - DNA, 26 bp, Artificial sequence
  SiRNA target sequence
tattgtgtttagcgggccaatacaat

SEQ ID NO: 61863 - DNA, 26 bp, Artificial sequence
  SiRNA target sequence
attgtgtttagcgggccaatacaatt

SEQ ID NO: 61864 - DNA, 26 bp, Artificial sequence
  SiRNA target sequence
ttgtgtttagcgggccaatacaattt

SEQ ID NO: 61865 - DNA, 26 bp, Artificial sequence
  SiRNA target sequence
tgtgtttagcgggccaatacaatttt

SEQ ID NO: 61866 - DNA, 26 bp, Artificial sequence
  SiRNA target sequence
gtgtttagcgggccaatacaattttt

SEQ ID NO: 61867 - DNA, 26 bp, Artificial sequence
  SiRNA target sequence
tgtttagcgggccaatacaattttta

SEQ ID NO: 61868 - DNA, 26 bp, Artificial sequence
  SiRNA target sequence
gtttagcgggccaatacaatttttat

SEQ ID NO: 61869 - DNA, 26 bp, Artificial sequence
  SiRNA target sequence
tttagcgggccaatacaatttttata

SEQ ID NO: 61870 - DNA, 26 bp, Artificial sequence
  SiRNA target sequence
ttagcgggccaatacaatttttatat

SEQ ID NO: 61871 - DNA, 26 bp, Artificial sequence
  SiRNA target sequence
tagcgggccaatacaatttttatata

SEQ ID NO: 61872 - DNA, 26 bp, Artificial sequence
  SiRNA target sequence
agcgggccaatacaatttttatataa

SEQ ID NO: 61873 - DNA, 26 bp, Artificial sequence
  SiRNA target sequence
gcgggccaatacaatttttatataaa

SEQ ID NO: 61874 - DNA, 26 bp, Artificial sequence
  SiRNA target sequence
cgggccaatacaatttttatataaaa

SEQ ID NO: 61875 - DNA, 26 bp, Artificial sequence
  SiRNA target sequence
gggccaatacaatttttatataaaat

SEQ ID NO: 61876 - DNA, 26 bp, Artificial sequence
  SiRNA target sequence
ggccaatacaatttttatataaaatt

SEQ ID NO: 61877 - DNA, 26 bp, Artificial sequence
  SiRNA target sequence
gccaatacaatttttatataaaattg

SEQ ID NO: 61878 - DNA, 26 bp, Artificial sequence
  SiRNA target sequence
ccaatacaatttttatataaaattgt

SEQ ID NO: 61879 - DNA, 26 bp, Artificial sequence
  SiRNA target sequence
caatacaatttttatataaaattgtt

SEQ ID NO: 61880 - DNA, 26 bp, Artificial sequence
  SiRNA target sequence
aatacaatttttatataaaattgttg

SEQ ID NO: 61881 - DNA, 26 bp, Artificial sequence
  SiRNA target sequence
atacaatttttatataaaattgttgg

SEQ ID NO: 61882 - DNA, 26 bp, Artificial sequence
  SiRNA target sequence
tacaatttttatataaaattgttgga

SEQ ID NO: 61883 - DNA, 26 bp, Artificial sequence
  SiRNA target sequence
acaatttttatataaaattgttggag

SEQ ID NO: 61884 - DNA, 26 bp, Artificial sequence
  SiRNA target sequence
caatttttatataaaattgttggagt

SEQ ID NO: 61885 - DNA, 26 bp, Artificial sequence
  SiRNA target sequence
aatttttatataaaattgttggagtt

SEQ ID NO: 61886 - DNA, 26 bp, Artificial sequence
  SiRNA target sequence
atttttatataaaattgttggagttg

SEQ ID NO: 61887 - DNA, 26 bp, Artificial sequence
  SiRNA target sequence
tttttatataaaattgttggagttga

SEQ ID NO: 61888 - DNA, 26 bp, Artificial sequence
  SiRNA target sequence
ttttatataaaattgttggagttgaa

SEQ ID NO: 61889 - DNA, 26 bp, Artificial sequence
  SiRNA target sequence
tttatataaaattgttggagttgaag

SEQ ID NO: 61890 - DNA, 26 bp, Artificial sequence
  SiRNA target sequence
ttatataaaattgttggagttgaagc

SEQ ID NO: 61891 - DNA, 26 bp, Artificial sequence
  SiRNA target sequence
tatataaaattgttggagttgaagca

SEQ ID NO: 61892 - DNA, 26 bp, Artificial sequence
  SiRNA target sequence
atataaaattgttggagttgaagcat

SEQ ID NO: 61893 - DNA, 26 bp, Artificial sequence
  SiRNA target sequence
tataaaattgttggagttgaagcatt

SEQ ID NO: 61894 - DNA, 26 bp, Artificial sequence
  SiRNA target sequence
ataaaattgttggagttgaagcattt

SEQ ID NO: 61895 - DNA, 26 bp, Artificial sequence
  SiRNA target sequence
taaaattgttggagttgaagcatttt

SEQ ID NO: 61896 - DNA, 26 bp, Artificial sequence
  SiRNA target sequence
aaaattgttggagttgaagcatttta

SEQ ID NO: 61897 - DNA, 26 bp, Artificial sequence
  SiRNA target sequence
aaattgttggagttgaagcattttat

SEQ ID NO: 61898 - DNA, 26 bp, Artificial sequence
  SiRNA target sequence
aattgttggagttgaagcattttatc

SEQ ID NO: 61899 - DNA, 26 bp, Artificial sequence
  SiRNA target sequence
attgttggagttgaagcattttatca

SEQ ID NO: 61900 - DNA, 26 bp, Artificial sequence
  SiRNA target sequence
ttgttggagttgaagcattttatcat

SEQ ID NO: 61901 - DNA, 26 bp, Artificial sequence
  SiRNA target sequence
tgttggagttgaagcattttatcatt

SEQ ID NO: 61902 - DNA, 26 bp, Artificial sequence
  SiRNA target sequence
gttggagttgaagcattttatcatta

SEQ ID NO: 61903 - DNA, 26 bp, Artificial sequence
  SiRNA target sequence
ttggagttgaagcattttatcattac

SEQ ID NO: 61904 - DNA, 26 bp, Artificial sequence
  SiRNA target sequence
tggagttgaagcattttatcattaca

SEQ ID NO: 61905 - DNA, 26 bp, Artificial sequence
  SiRNA target sequence
ggagttgaagcattttatcattacat

SEQ ID NO: 61906 - DNA, 26 bp, Artificial sequence
  SiRNA target sequence
gagttgaagcattttatcattacatt

SEQ ID NO: 61907 - DNA, 26 bp, Artificial sequence
  SiRNA target sequence
agttgaagcattttatcattacattt

SEQ ID NO: 61908 - DNA, 26 bp, Artificial sequence
  SiRNA target sequence
gttgaagcattttatcattacatttc

SEQ ID NO: 61909 - DNA, 26 bp, Artificial sequence
  SiRNA target sequence
ttgaagcattttatcattacatttca

SEQ ID NO: 61910 - DNA, 26 bp, Artificial sequence
  SiRNA target sequence
tgaagcattttatcattacatttcat

SEQ ID NO: 61911 - DNA, 26 bp, Artificial sequence
  SiRNA target sequence
gaagcattttatcattacatttcatt

SEQ ID NO: 61912 - DNA, 26 bp, Artificial sequence
  SiRNA target sequence
aagcattttatcattacatttcatta

SEQ ID NO: 61913 - DNA, 26 bp, Artificial sequence
  SiRNA target sequence
agcattttatcattacatttcattaa

SEQ ID NO: 61914 - DNA, 26 bp, Artificial sequence
  SiRNA target sequence
gcattttatcattacatttcattaaa

SEQ ID NO: 61915 - DNA, 26 bp, Artificial sequence
  SiRNA target sequence
cattttatcattacatttcattaaac

SEQ ID NO: 61916 - DNA, 26 bp, Artificial sequence
  SiRNA target sequence
attttatcattacatttcattaaact

SEQ ID NO: 61917 - DNA, 26 bp, Artificial sequence
  SiRNA target sequence
ttttatcattacatttcattaaactt

SEQ ID NO: 61918 - DNA, 26 bp, Artificial sequence
  SiRNA target sequence
tttatcattacatttcattaaactta

SEQ ID NO: 61919 - DNA, 26 bp, Artificial sequence
  SiRNA target sequence
ttatcattacatttcattaaacttag

SEQ ID NO: 61920 - DNA, 26 bp, Artificial sequence
  SiRNA target sequence
tatcattacatttcattaaacttaga

SEQ ID NO: 61921 - DNA, 26 bp, Artificial sequence
  SiRNA target sequence
atcattacatttcattaaacttagaa

SEQ ID NO: 61922 - DNA, 26 bp, Artificial sequence
  SiRNA target sequence
tcattacatttcattaaacttagaaa

SEQ ID NO: 61923 - DNA, 26 bp, Artificial sequence
  SiRNA target sequence
cattacatttcattaaacttagaaaa

SEQ ID NO: 61924 - DNA, 26 bp, Artificial sequence
  SiRNA target sequence
attacatttcattaaacttagaaaat

SEQ ID NO: 61925 - DNA, 26 bp, Artificial sequence
  SiRNA target sequence
ttacatttcattaaacttagaaaatt

SEQ ID NO: 61926 - DNA, 26 bp, Artificial sequence
  SiRNA target sequence
tacatttcattaaacttagaaaattt

SEQ ID NO: 61927 - DNA, 26 bp, Artificial sequence
  SiRNA target sequence
acatttcattaaacttagaaaatttt

SEQ ID NO: 61928 - DNA, 26 bp, Artificial sequence
  SiRNA target sequence
catttcattaaacttagaaaatttta

SEQ ID NO: 61929 - DNA, 26 bp, Artificial sequence
  SiRNA target sequence
atttcattaaacttagaaaattttaa

SEQ ID NO: 61930 - DNA, 26 bp, Artificial sequence
  SiRNA target sequence
tttcattaaacttagaaaattttaac

SEQ ID NO: 61931 - DNA, 26 bp, Artificial sequence
  SiRNA target sequence
ttcattaaacttagaaaattttaaca

SEQ ID NO: 61932 - DNA, 26 bp, Artificial sequence
  SiRNA target sequence
tcattaaacttagaaaattttaacaa

SEQ ID NO: 61933 - DNA, 26 bp, Artificial sequence
  SiRNA target sequence
cattaaacttagaaaattttaacaaa

SEQ ID NO: 61934 - DNA, 26 bp, Artificial sequence
  SiRNA target sequence
attaaacttagaaaattttaacaaaa

SEQ ID NO: 61935 - DNA, 26 bp, Artificial sequence
  SiRNA target sequence
ttaaacttagaaaattttaacaaaat

SEQ ID NO: 61936 - DNA, 26 bp, Artificial sequence
  SiRNA target sequence
taaacttagaaaattttaacaaaata

SEQ ID NO: 61937 - DNA, 26 bp, Artificial sequence
  SiRNA target sequence
aaacttagaaaattttaacaaaatag

SEQ ID NO: 61938 - DNA, 26 bp, Artificial sequence
  SiRNA target sequence
aacttagaaaattttaacaaaatagg

SEQ ID NO: 61939 - DNA, 26 bp, Artificial sequence
  SiRNA target sequence
acttagaaaattttaacaaaatagga

SEQ ID NO: 61940 - DNA, 26 bp, Artificial sequence
  SiRNA target sequence
cttagaaaattttaacaaaataggaa

SEQ ID NO: 61941 - DNA, 26 bp, Artificial sequence
  SiRNA target sequence
ttagaaaattttaacaaaataggaag

SEQ ID NO: 61942 - DNA, 26 bp, Artificial sequence
  SiRNA target sequence
tagaaaattttaacaaaataggaagt

SEQ ID NO: 61943 - DNA, 26 bp, Artificial sequence
  SiRNA target sequence
agaaaattttaacaaaataggaagtg

SEQ ID NO: 61944 - DNA, 26 bp, Artificial sequence
  SiRNA target sequence
gaaaattttaacaaaataggaagtgg

SEQ ID NO: 61945 - DNA, 26 bp, Artificial sequence
  SiRNA target sequence
aaaattttaacaaaataggaagtgga

SEQ ID NO: 61946 - DNA, 26 bp, Artificial sequence
  SiRNA target sequence
aaattttaacaaaataggaagtggag

SEQ ID NO: 61947 - DNA, 26 bp, Artificial sequence
  SiRNA target sequence
aattttaacaaaataggaagtggaga

SEQ ID NO: 61948 - DNA, 26 bp, Artificial sequence
  SiRNA target sequence
attttaacaaaataggaagtggagag

SEQ ID NO: 61949 - DNA, 26 bp, Artificial sequence
  SiRNA target sequence
ttttaacaaaataggaagtggagaga

SEQ ID NO: 61950 - DNA, 26 bp, Artificial sequence
  SiRNA target sequence
tttaacaaaataggaagtggagagat

SEQ ID NO: 61951 - DNA, 26 bp, Artificial sequence
  SiRNA target sequence
ttaacaaaataggaagtggagagata

SEQ ID NO: 61952 - DNA, 26 bp, Artificial sequence
  SiRNA target sequence
taacaaaataggaagtggagagatac

SEQ ID NO: 61953 - DNA, 26 bp, Artificial sequence
  SiRNA target sequence
aacaaaataggaagtggagagataca

SEQ ID NO: 61954 - DNA, 26 bp, Artificial sequence
  SiRNA target sequence
acaaaataggaagtggagagatacaa

SEQ ID NO: 61955 - DNA, 26 bp, Artificial sequence
  SiRNA target sequence
caaaataggaagtggagagatacaaa

SEQ ID NO: 61956 - DNA, 26 bp, Artificial sequence
  SiRNA target sequence
aaaataggaagtggagagatacaaat

SEQ ID NO: 61957 - DNA, 26 bp, Artificial sequence
  SiRNA target sequence
aaataggaagtggagagatacaaatg

SEQ ID NO: 61958 - DNA, 26 bp, Artificial sequence
  SiRNA target sequence
aataggaagtggagagatacaaatga

SEQ ID NO: 61959 - DNA, 26 bp, Artificial sequence
  SiRNA target sequence
ataggaagtggagagatacaaatgat

SEQ ID NO: 61960 - DNA, 26 bp, Artificial sequence
  SiRNA target sequence
taggaagtggagagatacaaatgatt

SEQ ID NO: 61961 - DNA, 26 bp, Artificial sequence
  SiRNA target sequence
aggaagtggagagatacaaatgatta

SEQ ID NO: 61962 - DNA, 26 bp, Artificial sequence
  SiRNA target sequence
ggaagtggagagatacaaatgattat

SEQ ID NO: 61963 - DNA, 26 bp, Artificial sequence
  SiRNA target sequence
gaagtggagagatacaaatgattatt

SEQ ID NO: 61964 - DNA, 26 bp, Artificial sequence
  SiRNA target sequence
aagtggagagatacaaatgattattg

SEQ ID NO: 61965 - DNA, 26 bp, Artificial sequence
  SiRNA target sequence
agtggagagatacaaatgattattga

SEQ ID NO: 61966 - DNA, 26 bp, Artificial sequence
  SiRNA target sequence
gtggagagatacaaatgattattgag

SEQ ID NO: 61967 - DNA, 26 bp, Artificial sequence
  SiRNA target sequence
tggagagatacaaatgattattgagc

SEQ ID NO: 61968 - DNA, 26 bp, Artificial sequence
  SiRNA target sequence
ggagagatacaaatgattattgagcg

SEQ ID NO: 61969 - DNA, 26 bp, Artificial sequence
  SiRNA target sequence
gagagatacaaatgattattgagcgg

SEQ ID NO: 61970 - DNA, 26 bp, Artificial sequence
  SiRNA target sequence
agagatacaaatgattattgagcgga

SEQ ID NO: 61971 - DNA, 26 bp, Artificial sequence
  SiRNA target sequence
gagatacaaatgattattgagcggaa

SEQ ID NO: 61972 - DNA, 26 bp, Artificial sequence
  SiRNA target sequence
agatacaaatgattattgagcggaaa

SEQ ID NO: 61973 - DNA, 26 bp, Artificial sequence
  SiRNA target sequence
gatacaaatgattattgagcggaaaa

SEQ ID NO: 61974 - DNA, 26 bp, Artificial sequence
  SiRNA target sequence
atacaaatgattattgagcggaaaag

SEQ ID NO: 61975 - DNA, 26 bp, Artificial sequence
  SiRNA target sequence
tacaaatgattattgagcggaaaagt

SEQ ID NO: 61976 - DNA, 26 bp, Artificial sequence
  SiRNA target sequence
acaaatgattattgagcggaaaagta

SEQ ID NO: 61977 - DNA, 26 bp, Artificial sequence
  SiRNA target sequence
caaatgattattgagcggaaaagtag

SEQ ID NO: 61978 - DNA, 26 bp, Artificial sequence
  SiRNA target sequence
aaatgattattgagcggaaaagtaga

SEQ ID NO: 61979 - DNA, 26 bp, Artificial sequence
  SiRNA target sequence
aatgattattgagcggaaaagtagag

SEQ ID NO: 61980 - DNA, 26 bp, Artificial sequence
  SiRNA target sequence
atgattattgagcggaaaagtagagc

SEQ ID NO: 61981 - DNA, 26 bp, Artificial sequence
  SiRNA target sequence
tgattattgagcggaaaagtagagca

SEQ ID NO: 61982 - DNA, 26 bp, Artificial sequence
  SiRNA target sequence
gattattgagcggaaaagtagagcat

SEQ ID NO: 61983 - DNA, 26 bp, Artificial sequence
  SiRNA target sequence
attattgagcggaaaagtagagcata

SEQ ID NO: 61984 - DNA, 26 bp, Artificial sequence
  SiRNA target sequence
ttattgagcggaaaagtagagcatat

SEQ ID NO: 61985 - DNA, 26 bp, Artificial sequence
  SiRNA target sequence
tattgagcggaaaagtagagcatatg

SEQ ID NO: 61986 - DNA, 26 bp, Artificial sequence
  SiRNA target sequence
attgagcggaaaagtagagcatatgg

SEQ ID NO: 61987 - DNA, 26 bp, Artificial sequence
  SiRNA target sequence
ttgagcggaaaagtagagcatatggt

SEQ ID NO: 61988 - DNA, 26 bp, Artificial sequence
  SiRNA target sequence
tgagcggaaaagtagagcatatggtg

SEQ ID NO: 61989 - DNA, 26 bp, Artificial sequence
  SiRNA target sequence
gagcggaaaagtagagcatatggtga

SEQ ID NO: 61990 - DNA, 26 bp, Artificial sequence
  SiRNA target sequence
agcggaaaagtagagcatatggtgac

SEQ ID NO: 61991 - DNA, 26 bp, Artificial sequence
  SiRNA target sequence
gcggaaaagtagagcatatggtgaca

SEQ ID NO: 61992 - DNA, 26 bp, Artificial sequence
  SiRNA target sequence
cggaaaagtagagcatatggtgacat

SEQ ID NO: 61993 - DNA, 26 bp, Artificial sequence
  SiRNA target sequence
ggaaaagtagagcatatggtgacata

SEQ ID NO: 61994 - DNA, 26 bp, Artificial sequence
  SiRNA target sequence
gaaaagtagagcatatggtgacatac

SEQ ID NO: 61995 - DNA, 26 bp, Artificial sequence
  SiRNA target sequence
aaaagtagagcatatggtgacatact

SEQ ID NO: 61996 - DNA, 26 bp, Artificial sequence
  SiRNA target sequence
aaagtagagcatatggtgacatacta

SEQ ID NO: 61997 - DNA, 26 bp, Artificial sequence
  SiRNA target sequence
aagtagagcatatggtgacatactag

SEQ ID NO: 61998 - DNA, 26 bp, Artificial sequence
  SiRNA target sequence
agtagagcatatggtgacatactaga

SEQ ID NO: 61999 - DNA, 26 bp, Artificial sequence
  SiRNA target sequence
gtagagcatatggtgacatactagaa

SEQ ID NO: 62000 - DNA, 26 bp, Artificial sequence
  SiRNA target sequence
tagagcatatggtgacatactagaac

SEQ ID NO: 62001 - DNA, 26 bp, Artificial sequence
  SiRNA target sequence
agagcatatggtgacatactagaact

SEQ ID NO: 62002 - DNA, 26 bp, Artificial sequence
  SiRNA target sequence
gagcatatggtgacatactagaacta

SEQ ID NO: 62003 - DNA, 26 bp, Artificial sequence
  SiRNA target sequence
agcatatggtgacatactagaactaa

SEQ ID NO: 62004 - DNA, 26 bp, Artificial sequence
  SiRNA target sequence
gcatatggtgacatactagaactaac

SEQ ID NO: 62005 - DNA, 26 bp, Artificial sequence
  SiRNA target sequence
catatggtgacatactagaactaact

SEQ ID NO: 62006 - DNA, 26 bp, Artificial sequence
  SiRNA target sequence
atatggtgacatactagaactaacta

SEQ ID NO: 62007 - DNA, 26 bp, Artificial sequence
  SiRNA target sequence
tatggtgacatactagaactaactac

SEQ ID NO: 62008 - DNA, 26 bp, Artificial sequence
  SiRNA target sequence
atggtgacatactagaactaactact

SEQ ID NO: 62009 - DNA, 26 bp, Artificial sequence
  SiRNA target sequence
tggtgacatactagaactaactactc

SEQ ID NO: 62010 - DNA, 26 bp, Artificial sequence
  SiRNA target sequence
ggtgacatactagaactaactactct

SEQ ID NO: 62011 - DNA, 26 bp, Artificial sequence
  SiRNA target sequence
gtgacatactagaactaactactctc

SEQ ID NO: 62012 - DNA, 26 bp, Artificial sequence
  SiRNA target sequence
tgacatactagaactaactactctct

SEQ ID NO: 62013 - DNA, 26 bp, Artificial sequence
  SiRNA target sequence
gacatactagaactaactactctctc

SEQ ID NO: 62014 - DNA, 26 bp, Artificial sequence
  SiRNA target sequence
acatactagaactaactactctctcg

SEQ ID NO: 62015 - DNA, 26 bp, Artificial sequence
  SiRNA target sequence
catactagaactaactactctctcgg

SEQ ID NO: 62016 - DNA, 26 bp, Artificial sequence
  SiRNA target sequence
atactagaactaactactctctcggc

SEQ ID NO: 62017 - DNA, 26 bp, Artificial sequence
  SiRNA target sequence
tactagaactaactactctctcggcc

SEQ ID NO: 62018 - DNA, 26 bp, Artificial sequence
  SiRNA target sequence
actagaactaactactctctcggccg

SEQ ID NO: 62019 - DNA, 26 bp, Artificial sequence
  SiRNA target sequence
ctagaactaactactctctcggccgt

SEQ ID NO: 62020 - DNA, 26 bp, Artificial sequence
  SiRNA target sequence
tagaactaactactctctcggccgta

SEQ ID NO: 62021 - DNA, 26 bp, Artificial sequence
  SiRNA target sequence
agaactaactactctctcggccgtac

SEQ ID NO: 62022 - DNA, 26 bp, Artificial sequence
  SiRNA target sequence
gaactaactactctctcggccgtacc

SEQ ID NO: 62023 - DNA, 26 bp, Artificial sequence
  SiRNA target sequence
aactaactactctctcggccgtacca

SEQ ID NO: 62024 - DNA, 26 bp, Artificial sequence
  SiRNA target sequence
actaactactctctcggccgtaccaa

SEQ ID NO: 62025 - DNA, 26 bp, Artificial sequence
  SiRNA target sequence
ctaactactctctcggccgtaccaac

SEQ ID NO: 62026 - DNA, 26 bp, Artificial sequence
  SiRNA target sequence
taactactctctcggccgtaccaacc

SEQ ID NO: 62027 - DNA, 26 bp, Artificial sequence
  SiRNA target sequence
aactactctctcggccgtaccaacct

SEQ ID NO: 62028 - DNA, 26 bp, Artificial sequence
  SiRNA target sequence
actactctctcggccgtaccaacctg

SEQ ID NO: 62029 - DNA, 26 bp, Artificial sequence
  SiRNA target sequence
ctactctctcggccgtaccaacctgt

SEQ ID NO: 62030 - DNA, 26 bp, Artificial sequence
  SiRNA target sequence
tactctctcggccgtaccaacctgta

SEQ ID NO: 62031 - DNA, 26 bp, Artificial sequence
  SiRNA target sequence
actctctcggccgtaccaacctgtat

SEQ ID NO: 62032 - DNA, 26 bp, Artificial sequence
  SiRNA target sequence
ctctctcggccgtaccaacctgtatt

SEQ ID NO: 62033 - DNA, 26 bp, Artificial sequence
  SiRNA target sequence
tctctcggccgtaccaacctgtattg

SEQ ID NO: 62034 - DNA, 26 bp, Artificial sequence
  SiRNA target sequence
ctctcggccgtaccaacctgtattgt

SEQ ID NO: 62035 - DNA, 26 bp, Artificial sequence
  SiRNA target sequence
tctcggccgtaccaacctgtattgta

SEQ ID NO: 62036 - DNA, 26 bp, Artificial sequence
  SiRNA target sequence
ctcggccgtaccaacctgtattgtag

SEQ ID NO: 62037 - DNA, 26 bp, Artificial sequence
  SiRNA target sequence
tcggccgtaccaacctgtattgtagt

SEQ ID NO: 62038 - DNA, 26 bp, Artificial sequence
  SiRNA target sequence
cggccgtaccaacctgtattgtagtt

SEQ ID NO: 62039 - DNA, 26 bp, Artificial sequence
  SiRNA target sequence
ggccgtaccaacctgtattgtagtta

SEQ ID NO: 62040 - DNA, 26 bp, Artificial sequence
  SiRNA target sequence
gccgtaccaacctgtattgtagttat

SEQ ID NO: 62041 - DNA, 26 bp, Artificial sequence
  SiRNA target sequence
ccgtaccaacctgtattgtagttatt

SEQ ID NO: 62042 - DNA, 26 bp, Artificial sequence
  SiRNA target sequence
cgtaccaacctgtattgtagttatta

SEQ ID NO: 62043 - DNA, 26 bp, Artificial sequence
  SiRNA target sequence
gtaccaacctgtattgtagttattat

SEQ ID NO: 62044 - DNA, 26 bp, Artificial sequence
  SiRNA target sequence
taccaacctgtattgtagttattatg

SEQ ID NO: 62045 - DNA, 26 bp, Artificial sequence
  SiRNA target sequence
accaacctgtattgtagttattatgt

SEQ ID NO: 62046 - DNA, 26 bp, Artificial sequence
  SiRNA target sequence
ccaacctgtattgtagttattatgtc

SEQ ID NO: 62047 - DNA, 26 bp, Artificial sequence
  SiRNA target sequence
caacctgtattgtagttattatgtcg

SEQ ID NO: 62048 - DNA, 26 bp, Artificial sequence
  SiRNA target sequence
aacctgtattgtagttattatgtcgt

SEQ ID NO: 62049 - DNA, 26 bp, Artificial sequence
  SiRNA target sequence
acctgtattgtagttattatgtcgtt

SEQ ID NO: 62050 - DNA, 26 bp, Artificial sequence
  SiRNA target sequence
cctgtattgtagttattatgtcgttt

SEQ ID NO: 62051 - DNA, 26 bp, Artificial sequence
  SiRNA target sequence
ctgtattgtagttattatgtcgtttt

SEQ ID NO: 62052 - DNA, 26 bp, Artificial sequence
  SiRNA target sequence
tgtattgtagttattatgtcgttttt

SEQ ID NO: 62053 - DNA, 26 bp, Artificial sequence
  SiRNA target sequence
gtattgtagttattatgtcgtttttc

SEQ ID NO: 62054 - DNA, 26 bp, Artificial sequence
  SiRNA target sequence
tattgtagttattatgtcgtttttct

SEQ ID NO: 62055 - DNA, 26 bp, Artificial sequence
  SiRNA target sequence
attgtagttattatgtcgtttttctc

SEQ ID NO: 62056 - DNA, 26 bp, Artificial sequence
  SiRNA target sequence
ttgtagttattatgtcgtttttctca

SEQ ID NO: 62057 - DNA, 26 bp, Artificial sequence
  SiRNA target sequence
tgtagttattatgtcgtttttctcag

SEQ ID NO: 62058 - DNA, 26 bp, Artificial sequence
  SiRNA target sequence
gtagttattatgtcgtttttctcagt

SEQ ID NO: 62059 - DNA, 26 bp, Artificial sequence
  SiRNA target sequence
tagttattatgtcgtttttctcagta

SEQ ID NO: 62060 - DNA, 26 bp, Artificial sequence
  SiRNA target sequence
agttattatgtcgtttttctcagtat

SEQ ID NO: 62061 - DNA, 26 bp, Artificial sequence
  SiRNA target sequence
gttattatgtcgtttttctcagtata

SEQ ID NO: 62062 - DNA, 26 bp, Artificial sequence
  SiRNA target sequence
ttattatgtcgtttttctcagtatat

SEQ ID NO: 62063 - DNA, 26 bp, Artificial sequence
  SiRNA target sequence
tattatgtcgtttttctcagtatata

SEQ ID NO: 62064 - DNA, 26 bp, Artificial sequence
  SiRNA target sequence
attatgtcgtttttctcagtatataa

SEQ ID NO: 62065 - DNA, 26 bp, Artificial sequence
  SiRNA target sequence
ttatgtcgtttttctcagtatataaa

SEQ ID NO: 62066 - DNA, 26 bp, Artificial sequence
  SiRNA target sequence
tatgtcgtttttctcagtatataaaa

SEQ ID NO: 62067 - DNA, 26 bp, Artificial sequence
  SiRNA target sequence
atgtcgtttttctcagtatataaaaa

SEQ ID NO: 62068 - DNA, 26 bp, Artificial sequence
  SiRNA target sequence
tgtcgtttttctcagtatataaaaat

SEQ ID NO: 62069 - DNA, 26 bp, Artificial sequence
  SiRNA target sequence
gtcgtttttctcagtatataaaaatt

SEQ ID NO: 62070 - DNA, 26 bp, Artificial sequence
  SiRNA target sequence
tcgtttttctcagtatataaaaattt

SEQ ID NO: 62071 - DNA, 26 bp, Artificial sequence
  SiRNA target sequence
cgtttttctcagtatataaaaatttg

SEQ ID NO: 62072 - DNA, 26 bp, Artificial sequence
  SiRNA target sequence
gtttttctcagtatataaaaatttgg

SEQ ID NO: 62073 - DNA, 26 bp, Artificial sequence
  SiRNA target sequence
tttttctcagtatataaaaatttggg

SEQ ID NO: 62074 - DNA, 26 bp, Artificial sequence
  SiRNA target sequence
ttttctcagtatataaaaatttggga

SEQ ID NO: 62075 - DNA, 26 bp, Artificial sequence
  SiRNA target sequence
tttctcagtatataaaaatttgggaa

SEQ ID NO: 62076 - DNA, 26 bp, Artificial sequence
  SiRNA target sequence
ttctcagtatataaaaatttgggaag

SEQ ID NO: 62077 - DNA, 26 bp, Artificial sequence
  SiRNA target sequence
tctcagtatataaaaatttgggaaga

SEQ ID NO: 62078 - DNA, 26 bp, Artificial sequence
  SiRNA target sequence
ctcagtatataaaaatttgggaagag

SEQ ID NO: 62079 - DNA, 26 bp, Artificial sequence
  SiRNA target sequence
tcagtatataaaaatttgggaagaga

SEQ ID NO: 62080 - DNA, 26 bp, Artificial sequence
  SiRNA target sequence
cagtatataaaaatttgggaagagat

SEQ ID NO: 62081 - DNA, 26 bp, Artificial sequence
  SiRNA target sequence
agtatataaaaatttgggaagagatg

SEQ ID NO: 62082 - DNA, 26 bp, Artificial sequence
  SiRNA target sequence
gtatataaaaatttgggaagagatgc

SEQ ID NO: 62083 - DNA, 26 bp, Artificial sequence
  SiRNA target sequence
tatataaaaatttgggaagagatgca

SEQ ID NO: 62084 - DNA, 26 bp, Artificial sequence
  SiRNA target sequence
atataaaaatttgggaagagatgcac

SEQ ID NO: 62085 - DNA, 26 bp, Artificial sequence
  SiRNA target sequence
tataaaaatttgggaagagatgcact

SEQ ID NO: 62086 - DNA, 26 bp, Artificial sequence
  SiRNA target sequence
ataaaaatttgggaagagatgcactc

SEQ ID NO: 62087 - DNA, 26 bp, Artificial sequence
  SiRNA target sequence
taaaaatttgggaagagatgcactct

SEQ ID NO: 62088 - DNA, 26 bp, Artificial sequence
  SiRNA target sequence
aaaaatttgggaagagatgcactcta

SEQ ID NO: 62089 - DNA, 26 bp, Artificial sequence
  SiRNA target sequence
aaaatttgggaagagatgcactctac

SEQ ID NO: 62090 - DNA, 26 bp, Artificial sequence
  SiRNA target sequence
aaatttgggaagagatgcactctacg

SEQ ID NO: 62091 - DNA, 26 bp, Artificial sequence
  SiRNA target sequence
aatttgggaagagatgcactctacgt

SEQ ID NO: 62092 - DNA, 26 bp, Artificial sequence
  SiRNA target sequence
atttgggaagagatgcactctacgta

SEQ ID NO: 62093 - DNA, 26 bp, Artificial sequence
  SiRNA target sequence
tttgggaagagatgcactctacgtaa

SEQ ID NO: 62094 - DNA, 26 bp, Artificial sequence
  SiRNA target sequence
ttgggaagagatgcactctacgtaat

SEQ ID NO: 62095 - DNA, 26 bp, Artificial sequence
  SiRNA target sequence
tgggaagagatgcactctacgtaatg

SEQ ID NO: 62096 - DNA, 26 bp, Artificial sequence
  SiRNA target sequence
gggaagagatgcactctacgtaatgt

SEQ ID NO: 62097 - DNA, 26 bp, Artificial sequence
  SiRNA target sequence
ggaagagatgcactctacgtaatgtt

SEQ ID NO: 62098 - DNA, 26 bp, Artificial sequence
  SiRNA target sequence
gaagagatgcactctacgtaatgttg

SEQ ID NO: 62099 - DNA, 26 bp, Artificial sequence
  SiRNA target sequence
aagagatgcactctacgtaatgttgg

SEQ ID NO: 62100 - DNA, 26 bp, Artificial sequence
  SiRNA target sequence
agagatgcactctacgtaatgttggc

SEQ ID NO: 62101 - DNA, 26 bp, Artificial sequence
  SiRNA target sequence
gagatgcactctacgtaatgttggct

SEQ ID NO: 62102 - DNA, 26 bp, Artificial sequence
  SiRNA target sequence
agatgcactctacgtaatgttggcta

SEQ ID NO: 62103 - DNA, 26 bp, Artificial sequence
  SiRNA target sequence
gatgcactctacgtaatgttggctac

SEQ ID NO: 62104 - DNA, 26 bp, Artificial sequence
  SiRNA target sequence
atgcactctacgtaatgttggctaca

SEQ ID NO: 62105 - DNA, 26 bp, Artificial sequence
  SiRNA target sequence
tgcactctacgtaatgttggctacaa

SEQ ID NO: 62106 - DNA, 26 bp, Artificial sequence
  SiRNA target sequence
gcactctacgtaatgttggctacaag

SEQ ID NO: 62107 - DNA, 26 bp, Artificial sequence
  SiRNA target sequence
cactctacgtaatgttggctacaagt

SEQ ID NO: 62108 - DNA, 26 bp, Artificial sequence
  SiRNA target sequence
actctacgtaatgttggctacaagtg

SEQ ID NO: 62109 - DNA, 26 bp, Artificial sequence
  SiRNA target sequence
ctctacgtaatgttggctacaagtgc

SEQ ID NO: 62110 - DNA, 26 bp, Artificial sequence
  SiRNA target sequence
tctacgtaatgttggctacaagtgcc

SEQ ID NO: 62111 - DNA, 26 bp, Artificial sequence
  SiRNA target sequence
ctacgtaatgttggctacaagtgcct

SEQ ID NO: 62112 - DNA, 26 bp, Artificial sequence
  SiRNA target sequence
tacgtaatgttggctacaagtgcctt

SEQ ID NO: 62113 - DNA, 26 bp, Artificial sequence
  SiRNA target sequence
acgtaatgttggctacaagtgccttg

SEQ ID NO: 62114 - DNA, 26 bp, Artificial sequence
  SiRNA target sequence
cgtaatgttggctacaagtgccttgt

SEQ ID NO: 62115 - DNA, 26 bp, Artificial sequence
  SiRNA target sequence
gtaatgttggctacaagtgccttgta

SEQ ID NO: 62116 - DNA, 26 bp, Artificial sequence
  SiRNA target sequence
taatgttggctacaagtgccttgtat

SEQ ID NO: 62117 - DNA, 26 bp, Artificial sequence
  SiRNA target sequence
aatgttggctacaagtgccttgtatg

SEQ ID NO: 62118 - DNA, 26 bp, Artificial sequence
  SiRNA target sequence
atgttggctacaagtgccttgtatgt

SEQ ID NO: 62119 - DNA, 26 bp, Artificial sequence
  SiRNA target sequence
tgttggctacaagtgccttgtatgtg

SEQ ID NO: 62120 - DNA, 26 bp, Artificial sequence
  SiRNA target sequence
gttggctacaagtgccttgtatgtgt

SEQ ID NO: 62121 - DNA, 26 bp, Artificial sequence
  SiRNA target sequence
ttggctacaagtgccttgtatgtgta

SEQ ID NO: 62122 - DNA, 26 bp, Artificial sequence
  SiRNA target sequence
tggctacaagtgccttgtatgtgtat

SEQ ID NO: 62123 - DNA, 26 bp, Artificial sequence
  SiRNA target sequence
ggctacaagtgccttgtatgtgtatt

SEQ ID NO: 62124 - DNA, 26 bp, Artificial sequence
  SiRNA target sequence
gctacaagtgccttgtatgtgtattt

SEQ ID NO: 62125 - DNA, 26 bp, Artificial sequence
  SiRNA target sequence
ctacaagtgccttgtatgtgtatttt

SEQ ID NO: 62126 - DNA, 26 bp, Artificial sequence
  SiRNA target sequence
tacaagtgccttgtatgtgtatttta

SEQ ID NO: 62127 - DNA, 26 bp, Artificial sequence
  SiRNA target sequence
acaagtgccttgtatgtgtattttac

SEQ ID NO: 62128 - DNA, 26 bp, Artificial sequence
  SiRNA target sequence
caagtgccttgtatgtgtattttaca

SEQ ID NO: 62129 - DNA, 26 bp, Artificial sequence
  SiRNA target sequence
aagtgccttgtatgtgtattttacat

SEQ ID NO: 62130 - DNA, 26 bp, Artificial sequence
  SiRNA target sequence
agtgccttgtatgtgtattttacatt

SEQ ID NO: 62131 - DNA, 26 bp, Artificial sequence
  SiRNA target sequence
gtgccttgtatgtgtattttacattt

SEQ ID NO: 62132 - DNA, 26 bp, Artificial sequence
  SiRNA target sequence
tgccttgtatgtgtattttacatttg

SEQ ID NO: 62133 - DNA, 26 bp, Artificial sequence
  SiRNA target sequence
gccttgtatgtgtattttacatttgt

SEQ ID NO: 62134 - DNA, 26 bp, Artificial sequence
  SiRNA target sequence
ccttgtatgtgtattttacatttgta

SEQ ID NO: 62135 - DNA, 26 bp, Artificial sequence
  SiRNA target sequence
cttgtatgtgtattttacatttgtat

SEQ ID NO: 62136 - DNA, 26 bp, Artificial sequence
  SiRNA target sequence
ttgtatgtgtattttacatttgtatt

SEQ ID NO: 62137 - DNA, 26 bp, Artificial sequence
  SiRNA target sequence
tgtatgtgtattttacatttgtattt

SEQ ID NO: 62138 - DNA, 26 bp, Artificial sequence
  SiRNA target sequence
gtatgtgtattttacatttgtatttt

SEQ ID NO: 62139 - DNA, 26 bp, Artificial sequence
  SiRNA target sequence
tatgtgtattttacatttgtattttc

SEQ ID NO: 62140 - DNA, 26 bp, Artificial sequence
  SiRNA target sequence
atgtgtattttacatttgtattttca

SEQ ID NO: 62141 - DNA, 26 bp, Artificial sequence
  SiRNA target sequence
tgtgtattttacatttgtattttcaa

SEQ ID NO: 62142 - DNA, 26 bp, Artificial sequence
  SiRNA target sequence
gtgtattttacatttgtattttcaat

SEQ ID NO: 62143 - DNA, 26 bp, Artificial sequence
  SiRNA target sequence
tgtattttacatttgtattttcaata

SEQ ID NO: 62144 - DNA, 26 bp, Artificial sequence
  SiRNA target sequence
gtattttacatttgtattttcaatat

SEQ ID NO: 62145 - DNA, 26 bp, Artificial sequence
  SiRNA target sequence
tattttacatttgtattttcaatatg

SEQ ID NO: 62146 - DNA, 26 bp, Artificial sequence
  SiRNA target sequence
attttacatttgtattttcaatatgg

SEQ ID NO: 62147 - DNA, 26 bp, Artificial sequence
  SiRNA target sequence
ttttacatttgtattttcaatatgga

SEQ ID NO: 62148 - DNA, 26 bp, Artificial sequence
  SiRNA target sequence
tttacatttgtattttcaatatggag

SEQ ID NO: 62149 - DNA, 26 bp, Artificial sequence
  SiRNA target sequence
ttacatttgtattttcaatatggaga

SEQ ID NO: 62150 - DNA, 26 bp, Artificial sequence
  SiRNA target sequence
tacatttgtattttcaatatggagaa

SEQ ID NO: 62151 - DNA, 26 bp, Artificial sequence
  SiRNA target sequence
acatttgtattttcaatatggagaaa

SEQ ID NO: 62152 - DNA, 26 bp, Artificial sequence
  SiRNA target sequence
catttgtattttcaatatggagaaac

SEQ ID NO: 62153 - DNA, 26 bp, Artificial sequence
  SiRNA target sequence
atttgtattttcaatatggagaaaca

SEQ ID NO: 62154 - DNA, 26 bp, Artificial sequence
  SiRNA target sequence
tttgtattttcaatatggagaaacaa

SEQ ID NO: 62155 - DNA, 26 bp, Artificial sequence
  SiRNA target sequence
ttgtattttcaatatggagaaacaat

SEQ ID NO: 62156 - DNA, 26 bp, Artificial sequence
  SiRNA target sequence
tgtattttcaatatggagaaacaata

SEQ ID NO: 62157 - DNA, 26 bp, Artificial sequence
  SiRNA target sequence
gtattttcaatatggagaaacaatat

SEQ ID NO: 62158 - DNA, 26 bp, Artificial sequence
  SiRNA target sequence
tattttcaatatggagaaacaatatt

SEQ ID NO: 62159 - DNA, 26 bp, Artificial sequence
  SiRNA target sequence
attttcaatatggagaaacaatatta

SEQ ID NO: 62160 - DNA, 26 bp, Artificial sequence
  SiRNA target sequence
ttttcaatatggagaaacaatattag

SEQ ID NO: 62161 - DNA, 26 bp, Artificial sequence
  SiRNA target sequence
tttcaatatggagaaacaatattaga

SEQ ID NO: 62162 - DNA, 26 bp, Artificial sequence
  SiRNA target sequence
ttcaatatggagaaacaatattagaa

SEQ ID NO: 62163 - DNA, 26 bp, Artificial sequence
  SiRNA target sequence
tcaatatggagaaacaatattagaag

SEQ ID NO: 62164 - DNA, 26 bp, Artificial sequence
  SiRNA target sequence
caatatggagaaacaatattagaaga

SEQ ID NO: 62165 - DNA, 26 bp, Artificial sequence
  SiRNA target sequence
aatatggagaaacaatattagaagac

SEQ ID NO: 62166 - DNA, 26 bp, Artificial sequence
  SiRNA target sequence
atatggagaaacaatattagaagaca

SEQ ID NO: 62167 - DNA, 26 bp, Artificial sequence
  SiRNA target sequence
tatggagaaacaatattagaagacaa

SEQ ID NO: 62168 - DNA, 26 bp, Artificial sequence
  SiRNA target sequence
atggagaaacaatattagaagacaat

SEQ ID NO: 62169 - DNA, 26 bp, Artificial sequence
  SiRNA target sequence
tggagaaacaatattagaagacaata

SEQ ID NO: 62170 - DNA, 26 bp, Artificial sequence
  SiRNA target sequence
ggagaaacaatattagaagacaatat

SEQ ID NO: 62171 - DNA, 26 bp, Artificial sequence
  SiRNA target sequence
gagaaacaatattagaagacaatata

SEQ ID NO: 62172 - DNA, 26 bp, Artificial sequence
  SiRNA target sequence
agaaacaatattagaagacaatataa

SEQ ID NO: 62173 - DNA, 26 bp, Artificial sequence
  SiRNA target sequence
gaaacaatattagaagacaatataat

SEQ ID NO: 62174 - DNA, 26 bp, Artificial sequence
  SiRNA target sequence
aaacaatattagaagacaatataata

SEQ ID NO: 62175 - DNA, 26 bp, Artificial sequence
  SiRNA target sequence
aacaatattagaagacaatataataa

SEQ ID NO: 62176 - DNA, 26 bp, Artificial sequence
  SiRNA target sequence
acaatattagaagacaatataataag

SEQ ID NO: 62177 - DNA, 26 bp, Artificial sequence
  SiRNA target sequence
caatattagaagacaatataataagt

SEQ ID NO: 62178 - DNA, 26 bp, Artificial sequence
  SiRNA target sequence
aatattagaagacaatataataagtc

SEQ ID NO: 62179 - DNA, 26 bp, Artificial sequence
  SiRNA target sequence
atattagaagacaatataataagtca

SEQ ID NO: 62180 - DNA, 26 bp, Artificial sequence
  SiRNA target sequence
tattagaagacaatataataagtcac

SEQ ID NO: 62181 - DNA, 26 bp, Artificial sequence
  SiRNA target sequence
attagaagacaatataataagtcaca

SEQ ID NO: 62182 - DNA, 26 bp, Artificial sequence
  SiRNA target sequence
ttagaagacaatataataagtcacag

SEQ ID NO: 62183 - DNA, 26 bp, Artificial sequence
  SiRNA target sequence
tagaagacaatataataagtcacagg

SEQ ID NO: 62184 - DNA, 26 bp, Artificial sequence
  SiRNA target sequence
agaagacaatataataagtcacagga

SEQ ID NO: 62185 - DNA, 26 bp, Artificial sequence
  SiRNA target sequence
gaagacaatataataagtcacaggat

SEQ ID NO: 62186 - DNA, 26 bp, Artificial sequence
  SiRNA target sequence
aagacaatataataagtcacaggata

SEQ ID NO: 62187 - DNA, 26 bp, Artificial sequence
  SiRNA target sequence
agacaatataataagtcacaggataa

SEQ ID NO: 62188 - DNA, 26 bp, Artificial sequence
  SiRNA target sequence
gacaatataataagtcacaggataaa

SEQ ID NO: 62189 - DNA, 26 bp, Artificial sequence
  SiRNA target sequence
acaatataataagtcacaggataaat

SEQ ID NO: 62190 - DNA, 26 bp, Artificial sequence
  SiRNA target sequence
caatataataagtcacaggataaatt

SEQ ID NO: 62191 - DNA, 26 bp, Artificial sequence
  SiRNA target sequence
aatataataagtcacaggataaatta

SEQ ID NO: 62192 - DNA, 26 bp, Artificial sequence
  SiRNA target sequence
atataataagtcacaggataaattat

SEQ ID NO: 62193 - DNA, 26 bp, Artificial sequence
  SiRNA target sequence
tataataagtcacaggataaattatc

SEQ ID NO: 62194 - DNA, 26 bp, Artificial sequence
  SiRNA target sequence
ataataagtcacaggataaattatcg

SEQ ID NO: 62195 - DNA, 26 bp, Artificial sequence
  SiRNA target sequence
taataagtcacaggataaattatcga

SEQ ID NO: 62196 - DNA, 26 bp, Artificial sequence
  SiRNA target sequence
aataagtcacaggataaattatcgaa

SEQ ID NO: 62197 - DNA, 26 bp, Artificial sequence
  SiRNA target sequence
ataagtcacaggataaattatcgaat

SEQ ID NO: 62198 - DNA, 26 bp, Artificial sequence
  SiRNA target sequence
taagtcacaggataaattatcgaata

SEQ ID NO: 62199 - DNA, 26 bp, Artificial sequence
  SiRNA target sequence
aagtcacaggataaattatcgaataa

SEQ ID NO: 62200 - DNA, 26 bp, Artificial sequence
  SiRNA target sequence
agtcacaggataaattatcgaataaa

SEQ ID NO: 62201 - DNA, 26 bp, Artificial sequence
  SiRNA target sequence
gtcacaggataaattatcgaataaat

SEQ ID NO: 62202 - DNA, 26 bp, Artificial sequence
  SiRNA target sequence
tcacaggataaattatcgaataaatt

SEQ ID NO: 62203 - DNA, 26 bp, Artificial sequence
  SiRNA target sequence
cacaggataaattatcgaataaatta

SEQ ID NO: 62204 - DNA, 26 bp, Artificial sequence
  SiRNA target sequence
acaggataaattatcgaataaattac

SEQ ID NO: 62205 - DNA, 26 bp, Artificial sequence
  SiRNA target sequence
caggataaattatcgaataaattaca

SEQ ID NO: 62206 - DNA, 26 bp, Artificial sequence
  SiRNA target sequence
aggataaattatcgaataaattacaa

SEQ ID NO: 62207 - DNA, 26 bp, Artificial sequence
  SiRNA target sequence
ggataaattatcgaataaattacaag

SEQ ID NO: 62208 - DNA, 26 bp, Artificial sequence
  SiRNA target sequence
gataaattatcgaataaattacaaga

SEQ ID NO: 62209 - DNA, 26 bp, Artificial sequence
  SiRNA target sequence
ataaattatcgaataaattacaagat

SEQ ID NO: 62210 - DNA, 26 bp, Artificial sequence
  SiRNA target sequence
taaattatcgaataaattacaagatt

SEQ ID NO: 62211 - DNA, 26 bp, Artificial sequence
  SiRNA target sequence
aaattatcgaataaattacaagattt

SEQ ID NO: 62212 - DNA, 26 bp, Artificial sequence
  SiRNA target sequence
aattatcgaataaattacaagatttt

SEQ ID NO: 62213 - DNA, 26 bp, Artificial sequence
  SiRNA target sequence
attatcgaataaattacaagattttt

SEQ ID NO: 62214 - DNA, 26 bp, Artificial sequence
  SiRNA target sequence
ttatcgaataaattacaagatttttt

SEQ ID NO: 62215 - DNA, 26 bp, Artificial sequence
  SiRNA target sequence
tatcgaataaattacaagatttttta

SEQ ID NO: 62216 - DNA, 26 bp, Artificial sequence
  SiRNA target sequence
atcgaataaattacaagattttttag

SEQ ID NO: 62217 - DNA, 26 bp, Artificial sequence
  SiRNA target sequence
tcgaataaattacaagattttttagc

SEQ ID NO: 62218 - DNA, 26 bp, Artificial sequence
  SiRNA target sequence
cgaataaattacaagattttttagct

SEQ ID NO: 62219 - DNA, 26 bp, Artificial sequence
  SiRNA target sequence
gaataaattacaagattttttagcta

SEQ ID NO: 62220 - DNA, 26 bp, Artificial sequence
  SiRNA target sequence
aataaattacaagattttttagctaa

SEQ ID NO: 62221 - DNA, 26 bp, Artificial sequence
  SiRNA target sequence
ataaattacaagattttttagctaat

SEQ ID NO: 62222 - DNA, 26 bp, Artificial sequence
  SiRNA target sequence
taaattacaagattttttagctaatc

SEQ ID NO: 62223 - DNA, 26 bp, Artificial sequence
  SiRNA target sequence
aaattacaagattttttagctaatca

SEQ ID NO: 62224 - DNA, 26 bp, Artificial sequence
  SiRNA target sequence
aattacaagattttttagctaatcat

SEQ ID NO: 62225 - DNA, 26 bp, Artificial sequence
  SiRNA target sequence
attacaagattttttagctaatcatg

SEQ ID NO: 62226 - DNA, 26 bp, Artificial sequence
  SiRNA target sequence
ttacaagattttttagctaatcatga

SEQ ID NO: 62227 - DNA, 26 bp, Artificial sequence
  SiRNA target sequence
tacaagattttttagctaatcatgaa

SEQ ID NO: 62228 - DNA, 26 bp, Artificial sequence
  SiRNA target sequence
acaagattttttagctaatcatgaaa

SEQ ID NO: 62229 - DNA, 26 bp, Artificial sequence
  SiRNA target sequence
caagattttttagctaatcatgaaac

SEQ ID NO: 62230 - DNA, 26 bp, Artificial sequence
  SiRNA target sequence
aagattttttagctaatcatgaaaca

SEQ ID NO: 62231 - DNA, 26 bp, Artificial sequence
  SiRNA target sequence
agattttttagctaatcatgaaacaa

SEQ ID NO: 62232 - DNA, 26 bp, Artificial sequence
  SiRNA target sequence
gattttttagctaatcatgaaacaat

SEQ ID NO: 62233 - DNA, 26 bp, Artificial sequence
  SiRNA target sequence
attttttagctaatcatgaaacaatt

SEQ ID NO: 62234 - DNA, 26 bp, Artificial sequence
  SiRNA target sequence
ttttttagctaatcatgaaacaatta

SEQ ID NO: 62235 - DNA, 26 bp, Artificial sequence
  SiRNA target sequence
tttttagctaatcatgaaacaattaa

SEQ ID NO: 62236 - DNA, 26 bp, Artificial sequence
  SiRNA target sequence
ttttagctaatcatgaaacaattaaa

SEQ ID NO: 62237 - DNA, 26 bp, Artificial sequence
  SiRNA target sequence
tttagctaatcatgaaacaattaaag

SEQ ID NO: 62238 - DNA, 26 bp, Artificial sequence
  SiRNA target sequence
ttagctaatcatgaaacaattaaagc

SEQ ID NO: 62239 - DNA, 26 bp, Artificial sequence
  SiRNA target sequence
tagctaatcatgaaacaattaaagcc

SEQ ID NO: 62240 - DNA, 26 bp, Artificial sequence
  SiRNA target sequence
agctaatcatgaaacaattaaagcct

SEQ ID NO: 62241 - DNA, 26 bp, Artificial sequence
  SiRNA target sequence
gctaatcatgaaacaattaaagccta

SEQ ID NO: 62242 - DNA, 26 bp, Artificial sequence
  SiRNA target sequence
ctaatcatgaaacaattaaagcctat

SEQ ID NO: 62243 - DNA, 26 bp, Artificial sequence
  SiRNA target sequence
taatcatgaaacaattaaagcctata

SEQ ID NO: 62244 - DNA, 26 bp, Artificial sequence
  SiRNA target sequence
aatcatgaaacaattaaagcctataa

SEQ ID NO: 62245 - DNA, 26 bp, Artificial sequence
  SiRNA target sequence
atcatgaaacaattaaagcctataat

SEQ ID NO: 62246 - DNA, 26 bp, Artificial sequence
  SiRNA target sequence
tcatgaaacaattaaagcctataata

SEQ ID NO: 62247 - DNA, 26 bp, Artificial sequence
  SiRNA target sequence
catgaaacaattaaagcctataatat

SEQ ID NO: 62248 - DNA, 26 bp, Artificial sequence
  SiRNA target sequence
atgaaacaattaaagcctataatatg

SEQ ID NO: 62249 - DNA, 26 bp, Artificial sequence
  SiRNA target sequence
tgaaacaattaaagcctataatatgg

SEQ ID NO: 62250 - DNA, 26 bp, Artificial sequence
  SiRNA target sequence
gaaacaattaaagcctataatatgga

SEQ ID NO: 62251 - DNA, 26 bp, Artificial sequence
  SiRNA target sequence
aaacaattaaagcctataatatggaa

SEQ ID NO: 62252 - DNA, 26 bp, Artificial sequence
  SiRNA target sequence
aacaattaaagcctataatatggaag

SEQ ID NO: 62253 - DNA, 26 bp, Artificial sequence
  SiRNA target sequence
acaattaaagcctataatatggaaga

SEQ ID NO: 62254 - DNA, 26 bp, Artificial sequence
  SiRNA target sequence
caattaaagcctataatatggaagaa

SEQ ID NO: 62255 - DNA, 26 bp, Artificial sequence
  SiRNA target sequence
aattaaagcctataatatggaagaag

SEQ ID NO: 62256 - DNA, 26 bp, Artificial sequence
  SiRNA target sequence
attaaagcctataatatggaagaaga

SEQ ID NO: 62257 - DNA, 26 bp, Artificial sequence
  SiRNA target sequence
ttaaagcctataatatggaagaagaa

SEQ ID NO: 62258 - DNA, 26 bp, Artificial sequence
  SiRNA target sequence
taaagcctataatatggaagaagaaa

SEQ ID NO: 62259 - DNA, 26 bp, Artificial sequence
  SiRNA target sequence
aaagcctataatatggaagaagaaac

SEQ ID NO: 62260 - DNA, 26 bp, Artificial sequence
  SiRNA target sequence
aagcctataatatggaagaagaaact

SEQ ID NO: 62261 - DNA, 26 bp, Artificial sequence
  SiRNA target sequence
agcctataatatggaagaagaaacta

SEQ ID NO: 62262 - DNA, 26 bp, Artificial sequence
  SiRNA target sequence
gcctataatatggaagaagaaactat

SEQ ID NO: 62263 - DNA, 26 bp, Artificial sequence
  SiRNA target sequence
cctataatatggaagaagaaactatt

SEQ ID NO: 62264 - DNA, 26 bp, Artificial sequence
  SiRNA target sequence
ctataatatggaagaagaaactatta

SEQ ID NO: 62265 - DNA, 26 bp, Artificial sequence
  SiRNA target sequence
tataatatggaagaagaaactattac

SEQ ID NO: 62266 - DNA, 26 bp, Artificial sequence
  SiRNA target sequence
ataatatggaagaagaaactattaca

SEQ ID NO: 62267 - DNA, 26 bp, Artificial sequence
  SiRNA target sequence
taatatggaagaagaaactattacat

SEQ ID NO: 62268 - DNA, 26 bp, Artificial sequence
  SiRNA target sequence
aatatggaagaagaaactattacata

SEQ ID NO: 62269 - DNA, 26 bp, Artificial sequence
  SiRNA target sequence
atatggaagaagaaactattacatat

SEQ ID NO: 62270 - DNA, 26 bp, Artificial sequence
  SiRNA target sequence
tatggaagaagaaactattacatatt

SEQ ID NO: 62271 - DNA, 26 bp, Artificial sequence
  SiRNA target sequence
atggaagaagaaactattacatattt

SEQ ID NO: 62272 - DNA, 26 bp, Artificial sequence
  SiRNA target sequence
tggaagaagaaactattacatatttt

SEQ ID NO: 62273 - DNA, 26 bp, Artificial sequence
  SiRNA target sequence
ggaagaagaaactattacatattttg

SEQ ID NO: 62274 - DNA, 26 bp, Artificial sequence
  SiRNA target sequence
gaagaagaaactattacatattttga

SEQ ID NO: 62275 - DNA, 26 bp, Artificial sequence
  SiRNA target sequence
aagaagaaactattacatattttgat

SEQ ID NO: 62276 - DNA, 26 bp, Artificial sequence
  SiRNA target sequence
agaagaaactattacatattttgatg

SEQ ID NO: 62277 - DNA, 26 bp, Artificial sequence
  SiRNA target sequence
gaagaaactattacatattttgatga

SEQ ID NO: 62278 - DNA, 26 bp, Artificial sequence
  SiRNA target sequence
aagaaactattacatattttgatgaa

SEQ ID NO: 62279 - DNA, 26 bp, Artificial sequence
  SiRNA target sequence
agaaactattacatattttgatgaaa

SEQ ID NO: 62280 - DNA, 26 bp, Artificial sequence
  SiRNA target sequence
gaaactattacatattttgatgaaaa

SEQ ID NO: 62281 - DNA, 26 bp, Artificial sequence
  SiRNA target sequence
aaactattacatattttgatgaaaat

SEQ ID NO: 62282 - DNA, 26 bp, Artificial sequence
  SiRNA target sequence
aactattacatattttgatgaaaatc

SEQ ID NO: 62283 - DNA, 26 bp, Artificial sequence
  SiRNA target sequence
actattacatattttgatgaaaatca

SEQ ID NO: 62284 - DNA, 26 bp, Artificial sequence
  SiRNA target sequence
ctattacatattttgatgaaaatcaa

SEQ ID NO: 62285 - DNA, 26 bp, Artificial sequence
  SiRNA target sequence
tattacatattttgatgaaaatcaaa

SEQ ID NO: 62286 - DNA, 26 bp, Artificial sequence
  SiRNA target sequence
attacatattttgatgaaaatcaaaa

SEQ ID NO: 62287 - DNA, 26 bp, Artificial sequence
  SiRNA target sequence
ttacatattttgatgaaaatcaaaaa

SEQ ID NO: 62288 - DNA, 26 bp, Artificial sequence
  SiRNA target sequence
tacatattttgatgaaaatcaaaaac

SEQ ID NO: 62289 - DNA, 26 bp, Artificial sequence
  SiRNA target sequence
acatattttgatgaaaatcaaaaacc

SEQ ID NO: 62290 - DNA, 26 bp, Artificial sequence
  SiRNA target sequence
catattttgatgaaaatcaaaaaccg

SEQ ID NO: 62291 - DNA, 26 bp, Artificial sequence
  SiRNA target sequence
atattttgatgaaaatcaaaaaccgg

SEQ ID NO: 62292 - DNA, 26 bp, Artificial sequence
  SiRNA target sequence
tattttgatgaaaatcaaaaaccggt

SEQ ID NO: 62293 - DNA, 26 bp, Artificial sequence
  SiRNA target sequence
attttgatgaaaatcaaaaaccggta

SEQ ID NO: 62294 - DNA, 26 bp, Artificial sequence
  SiRNA target sequence
ttttgatgaaaatcaaaaaccggtag

SEQ ID NO: 62295 - DNA, 26 bp, Artificial sequence
  SiRNA target sequence
tttgatgaaaatcaaaaaccggtaga

SEQ ID NO: 62296 - DNA, 26 bp, Artificial sequence
  SiRNA target sequence
ttgatgaaaatcaaaaaccggtagaa

SEQ ID NO: 62297 - DNA, 26 bp, Artificial sequence
  SiRNA target sequence
tgatgaaaatcaaaaaccggtagaat

SEQ ID NO: 62298 - DNA, 26 bp, Artificial sequence
  SiRNA target sequence
gatgaaaatcaaaaaccggtagaata

SEQ ID NO: 62299 - DNA, 26 bp, Artificial sequence
  SiRNA target sequence
atgaaaatcaaaaaccggtagaatat

SEQ ID NO: 62300 - DNA, 26 bp, Artificial sequence
  SiRNA target sequence
tgaaaatcaaaaaccggtagaatatt

SEQ ID NO: 62301 - DNA, 26 bp, Artificial sequence
  SiRNA target sequence
gaaaatcaaaaaccggtagaatattt

SEQ ID NO: 62302 - DNA, 26 bp, Artificial sequence
  SiRNA target sequence
aaaatcaaaaaccggtagaatatttt

SEQ ID NO: 62303 - DNA, 26 bp, Artificial sequence
  SiRNA target sequence
aaatcaaaaaccggtagaatattttg

SEQ ID NO: 62304 - DNA, 26 bp, Artificial sequence
  SiRNA target sequence
aatcaaaaaccggtagaatattttgg

SEQ ID NO: 62305 - DNA, 26 bp, Artificial sequence
  SiRNA target sequence
atcaaaaaccggtagaatattttggg

SEQ ID NO: 62306 - DNA, 26 bp, Artificial sequence
  SiRNA target sequence
tcaaaaaccggtagaatattttgggg

SEQ ID NO: 62307 - DNA, 26 bp, Artificial sequence
  SiRNA target sequence
caaaaaccggtagaatattttggggt

SEQ ID NO: 62308 - DNA, 26 bp, Artificial sequence
  SiRNA target sequence
aaaaaccggtagaatattttggggta

SEQ ID NO: 62309 - DNA, 26 bp, Artificial sequence
  SiRNA target sequence
aaaaccggtagaatattttggggtaa

SEQ ID NO: 62310 - DNA, 26 bp, Artificial sequence
  SiRNA target sequence
aaaccggtagaatattttggggtaaa

SEQ ID NO: 62311 - DNA, 26 bp, Artificial sequence
  SiRNA target sequence
aaccggtagaatattttggggtaaag

SEQ ID NO: 62312 - DNA, 26 bp, Artificial sequence
  SiRNA target sequence
accggtagaatattttggggtaaagt

SEQ ID NO: 62313 - DNA, 26 bp, Artificial sequence
  SiRNA target sequence
ccggtagaatattttggggtaaagtc

SEQ ID NO: 62314 - DNA, 26 bp, Artificial sequence
  SiRNA target sequence
cggtagaatattttggggtaaagtct

SEQ ID NO: 62315 - DNA, 26 bp, Artificial sequence
  SiRNA target sequence
ggtagaatattttggggtaaagtctc

SEQ ID NO: 62316 - DNA, 26 bp, Artificial sequence
  SiRNA target sequence
gtagaatattttggggtaaagtctca

SEQ ID NO: 62317 - DNA, 26 bp, Artificial sequence
  SiRNA target sequence
tagaatattttggggtaaagtctcac

SEQ ID NO: 62318 - DNA, 26 bp, Artificial sequence
  SiRNA target sequence
agaatattttggggtaaagtctcaca

SEQ ID NO: 62319 - DNA, 26 bp, Artificial sequence
  SiRNA target sequence
gaatattttggggtaaagtctcacag

SEQ ID NO: 62320 - DNA, 26 bp, Artificial sequence
  SiRNA target sequence
aatattttggggtaaagtctcacaga

SEQ ID NO: 62321 - DNA, 26 bp, Artificial sequence
  SiRNA target sequence
atattttggggtaaagtctcacagaa

SEQ ID NO: 62322 - DNA, 26 bp, Artificial sequence
  SiRNA target sequence
tattttggggtaaagtctcacagaat

SEQ ID NO: 62323 - DNA, 26 bp, Artificial sequence
  SiRNA target sequence
attttggggtaaagtctcacagaatt

SEQ ID NO: 62324 - DNA, 26 bp, Artificial sequence
  SiRNA target sequence
ttttggggtaaagtctcacagaattt

SEQ ID NO: 62325 - DNA, 26 bp, Artificial sequence
  SiRNA target sequence
tttggggtaaagtctcacagaatttt

SEQ ID NO: 62326 - DNA, 26 bp, Artificial sequence
  SiRNA target sequence
ttggggtaaagtctcacagaattttg

SEQ ID NO: 62327 - DNA, 26 bp, Artificial sequence
  SiRNA target sequence
tggggtaaagtctcacagaattttgt

SEQ ID NO: 62328 - DNA, 26 bp, Artificial sequence
  SiRNA target sequence
ggggtaaagtctcacagaattttgtt

SEQ ID NO: 62329 - DNA, 26 bp, Artificial sequence
  SiRNA target sequence
gggtaaagtctcacagaattttgttc

SEQ ID NO: 62330 - DNA, 26 bp, Artificial sequence
  SiRNA target sequence
ggtaaagtctcacagaattttgttct

SEQ ID NO: 62331 - DNA, 26 bp, Artificial sequence
  SiRNA target sequence
gtaaagtctcacagaattttgttctc

SEQ ID NO: 62332 - DNA, 26 bp, Artificial sequence
  SiRNA target sequence
taaagtctcacagaattttgttctct

SEQ ID NO: 62333 - DNA, 26 bp, Artificial sequence
  SiRNA target sequence
aaagtctcacagaattttgttctctc

SEQ ID NO: 62334 - DNA, 26 bp, Artificial sequence
  SiRNA target sequence
aagtctcacagaattttgttctctct

SEQ ID NO: 62335 - DNA, 26 bp, Artificial sequence
  SiRNA target sequence
agtctcacagaattttgttctctctt

SEQ ID NO: 62336 - DNA, 26 bp, Artificial sequence
  SiRNA target sequence
gtctcacagaattttgttctctcttt

SEQ ID NO: 62337 - DNA, 26 bp, Artificial sequence
  SiRNA target sequence
tctcacagaattttgttctctctttt

SEQ ID NO: 62338 - DNA, 26 bp, Artificial sequence
  SiRNA target sequence
ctcacagaattttgttctctctttta

SEQ ID NO: 62339 - DNA, 26 bp, Artificial sequence
  SiRNA target sequence
tcacagaattttgttctctcttttat

SEQ ID NO: 62340 - DNA, 26 bp, Artificial sequence
  SiRNA target sequence
cacagaattttgttctctcttttata

SEQ ID NO: 62341 - DNA, 26 bp, Artificial sequence
  SiRNA target sequence
acagaattttgttctctcttttatat

SEQ ID NO: 62342 - DNA, 26 bp, Artificial sequence
  SiRNA target sequence
cagaattttgttctctcttttatata

SEQ ID NO: 62343 - DNA, 26 bp, Artificial sequence
  SiRNA target sequence
agaattttgttctctcttttatatat

SEQ ID NO: 62344 - DNA, 26 bp, Artificial sequence
  SiRNA target sequence
gaattttgttctctcttttatatata

SEQ ID NO: 62345 - DNA, 26 bp, Artificial sequence
  SiRNA target sequence
aattttgttctctcttttatatatac

SEQ ID NO: 62346 - DNA, 26 bp, Artificial sequence
  SiRNA target sequence
attttgttctctcttttatatataca

SEQ ID NO: 62347 - DNA, 26 bp, Artificial sequence
  SiRNA target sequence
ttttgttctctcttttatatatacaa

SEQ ID NO: 62348 - DNA, 26 bp, Artificial sequence
  SiRNA target sequence
tttgttctctcttttatatatacaaa

SEQ ID NO: 62349 - DNA, 26 bp, Artificial sequence
  SiRNA target sequence
ttgttctctcttttatatatacaaaa

SEQ ID NO: 62350 - DNA, 26 bp, Artificial sequence
  SiRNA target sequence
tgttctctcttttatatatacaaaaa

SEQ ID NO: 62351 - DNA, 26 bp, Artificial sequence
  SiRNA target sequence
gttctctcttttatatatacaaaaaa

SEQ ID NO: 62352 - DNA, 26 bp, Artificial sequence
  SiRNA target sequence
ttctctcttttatatatacaaaaaat

SEQ ID NO: 62353 - DNA, 26 bp, Artificial sequence
  SiRNA target sequence
tctctcttttatatatacaaaaaatg

SEQ ID NO: 62354 - DNA, 26 bp, Artificial sequence
  SiRNA target sequence
ctctcttttatatatacaaaaaatga

SEQ ID NO: 62355 - DNA, 26 bp, Artificial sequence
  SiRNA target sequence
tctcttttatatatacaaaaaatgac

SEQ ID NO: 62356 - DNA, 26 bp, Artificial sequence
  SiRNA target sequence
ctcttttatatatacaaaaaatgaca

SEQ ID NO: 62357 - DNA, 26 bp, Artificial sequence
  SiRNA target sequence
tcttttatatatacaaaaaatgacat

SEQ ID NO: 62358 - DNA, 26 bp, Artificial sequence
  SiRNA target sequence
cttttatatatacaaaaaatgacatt

SEQ ID NO: 62359 - DNA, 26 bp, Artificial sequence
  SiRNA target sequence
ttttatatatacaaaaaatgacattt

SEQ ID NO: 62360 - DNA, 26 bp, Artificial sequence
  SiRNA target sequence
tttatatatacaaaaaatgacatttg

SEQ ID NO: 62361 - DNA, 26 bp, Artificial sequence
  SiRNA target sequence
ttatatatacaaaaaatgacatttgc

SEQ ID NO: 62362 - DNA, 26 bp, Artificial sequence
  SiRNA target sequence
tatatatacaaaaaatgacatttgcg

SEQ ID NO: 62363 - DNA, 26 bp, Artificial sequence
  SiRNA target sequence
atatatacaaaaaatgacatttgcga

SEQ ID NO: 62364 - DNA, 26 bp, Artificial sequence
  SiRNA target sequence
tatatacaaaaaatgacatttgcgat

SEQ ID NO: 62365 - DNA, 26 bp, Artificial sequence
  SiRNA target sequence
atatacaaaaaatgacatttgcgata

SEQ ID NO: 62366 - DNA, 26 bp, Artificial sequence
  SiRNA target sequence
tatacaaaaaatgacatttgcgatac

SEQ ID NO: 62367 - DNA, 26 bp, Artificial sequence
  SiRNA target sequence
atacaaaaaatgacatttgcgataca

SEQ ID NO: 62368 - DNA, 26 bp, Artificial sequence
  SiRNA target sequence
tacaaaaaatgacatttgcgatacag

SEQ ID NO: 62369 - DNA, 26 bp, Artificial sequence
  SiRNA target sequence
acaaaaaatgacatttgcgatacagg

SEQ ID NO: 62370 - DNA, 26 bp, Artificial sequence
  SiRNA target sequence
caaaaaatgacatttgcgatacaggc

SEQ ID NO: 62371 - DNA, 26 bp, Artificial sequence
  SiRNA target sequence
aaaaaatgacatttgcgatacaggca

SEQ ID NO: 62372 - DNA, 26 bp, Artificial sequence
  SiRNA target sequence
aaaaatgacatttgcgatacaggcaa

SEQ ID NO: 62373 - DNA, 26 bp, Artificial sequence
  SiRNA target sequence
aaaatgacatttgcgatacaggcaat

SEQ ID NO: 62374 - DNA, 26 bp, Artificial sequence
  SiRNA target sequence
aaatgacatttgcgatacaggcaatt

SEQ ID NO: 62375 - DNA, 26 bp, Artificial sequence
  SiRNA target sequence
aatgacatttgcgatacaggcaatta

SEQ ID NO: 62376 - DNA, 26 bp, Artificial sequence
  SiRNA target sequence
atgacatttgcgatacaggcaattat

SEQ ID NO: 62377 - DNA, 26 bp, Artificial sequence
  SiRNA target sequence
tgacatttgcgatacaggcaattatt

SEQ ID NO: 62378 - DNA, 26 bp, Artificial sequence
  SiRNA target sequence
gacatttgcgatacaggcaattatta

SEQ ID NO: 62379 - DNA, 26 bp, Artificial sequence
  SiRNA target sequence
acatttgcgatacaggcaattattat

SEQ ID NO: 62380 - DNA, 26 bp, Artificial sequence
  SiRNA target sequence
catttgcgatacaggcaattattatt

SEQ ID NO: 62381 - DNA, 26 bp, Artificial sequence
  SiRNA target sequence
atttgcgatacaggcaattattatta

SEQ ID NO: 62382 - DNA, 26 bp, Artificial sequence
  SiRNA target sequence
tttgcgatacaggcaattattattat

SEQ ID NO: 62383 - DNA, 26 bp, Artificial sequence
  SiRNA target sequence
ttgcgatacaggcaattattattatc

SEQ ID NO: 62384 - DNA, 26 bp, Artificial sequence
  SiRNA target sequence
tgcgatacaggcaattattattatca

SEQ ID NO: 62385 - DNA, 26 bp, Artificial sequence
  SiRNA target sequence
gcgatacaggcaattattattatcac

SEQ ID NO: 62386 - DNA, 26 bp, Artificial sequence
  SiRNA target sequence
cgatacaggcaattattattatcaca

SEQ ID NO: 62387 - DNA, 26 bp, Artificial sequence
  SiRNA target sequence
gatacaggcaattattattatcacat

SEQ ID NO: 62388 - DNA, 26 bp, Artificial sequence
  SiRNA target sequence
atacaggcaattattattatcacatt

SEQ ID NO: 62389 - DNA, 26 bp, Artificial sequence
  SiRNA target sequence
tacaggcaattattattatcacatta

SEQ ID NO: 62390 - DNA, 26 bp, Artificial sequence
  SiRNA target sequence
acaggcaattattattatcacattag

SEQ ID NO: 62391 - DNA, 26 bp, Artificial sequence
  SiRNA target sequence
caggcaattattattatcacattagg

SEQ ID NO: 62392 - DNA, 26 bp, Artificial sequence
  SiRNA target sequence
aggcaattattattatcacattagga

SEQ ID NO: 62393 - DNA, 26 bp, Artificial sequence
  SiRNA target sequence
ggcaattattattatcacattaggat

SEQ ID NO: 62394 - DNA, 26 bp, Artificial sequence
  SiRNA target sequence
gcaattattattatcacattaggatc

SEQ ID NO: 62395 - DNA, 26 bp, Artificial sequence
  SiRNA target sequence
caattattattatcacattaggatct

SEQ ID NO: 62396 - DNA, 26 bp, Artificial sequence
  SiRNA target sequence
aattattattatcacattaggatctt

SEQ ID NO: 62397 - DNA, 26 bp, Artificial sequence
  SiRNA target sequence
attattattatcacattaggatcttt

SEQ ID NO: 62398 - DNA, 26 bp, Artificial sequence
  SiRNA target sequence
ttattattatcacattaggatctttt

SEQ ID NO: 62399 - DNA, 26 bp, Artificial sequence
  SiRNA target sequence
tattattatcacattaggatcttttg

SEQ ID NO: 62400 - DNA, 26 bp, Artificial sequence
  SiRNA target sequence
attattatcacattaggatcttttgg

SEQ ID NO: 62401 - DNA, 26 bp, Artificial sequence
  SiRNA target sequence
ttattatcacattaggatcttttgga

SEQ ID NO: 62402 - DNA, 26 bp, Artificial sequence
  SiRNA target sequence
tattatcacattaggatcttttggat

SEQ ID NO: 62403 - DNA, 26 bp, Artificial sequence
  SiRNA target sequence
attatcacattaggatcttttggata

SEQ ID NO: 62404 - DNA, 26 bp, Artificial sequence
  SiRNA target sequence
ttatcacattaggatcttttggatat

SEQ ID NO: 62405 - DNA, 26 bp, Artificial sequence
  SiRNA target sequence
tatcacattaggatcttttggatatt

SEQ ID NO: 62406 - DNA, 26 bp, Artificial sequence
  SiRNA target sequence
atcacattaggatcttttggatattt

SEQ ID NO: 62407 - DNA, 26 bp, Artificial sequence
  SiRNA target sequence
tcacattaggatcttttggatatttt

SEQ ID NO: 62408 - DNA, 26 bp, Artificial sequence
  SiRNA target sequence
cacattaggatcttttggatattttc

SEQ ID NO: 62409 - DNA, 26 bp, Artificial sequence
  SiRNA target sequence
acattaggatcttttggatattttcc

SEQ ID NO: 62410 - DNA, 26 bp, Artificial sequence
  SiRNA target sequence
cattaggatcttttggatattttccg

SEQ ID NO: 62411 - DNA, 26 bp, Artificial sequence
  SiRNA target sequence
attaggatcttttggatattttccga

SEQ ID NO: 62412 - DNA, 26 bp, Artificial sequence
  SiRNA target sequence
ttaggatcttttggatattttccgat

SEQ ID NO: 62413 - DNA, 26 bp, Artificial sequence
  SiRNA target sequence
taggatcttttggatattttccgatt

SEQ ID NO: 62414 - DNA, 26 bp, Artificial sequence
  SiRNA target sequence
aggatcttttggatattttccgatta

SEQ ID NO: 62415 - DNA, 26 bp, Artificial sequence
  SiRNA target sequence
ggatcttttggatattttccgattaa

SEQ ID NO: 62416 - DNA, 26 bp, Artificial sequence
  SiRNA target sequence
gatcttttggatattttccgattaaa

SEQ ID NO: 62417 - DNA, 26 bp, Artificial sequence
  SiRNA target sequence
atcttttggatattttccgattaaat

SEQ ID NO: 62418 - DNA, 26 bp, Artificial sequence
  SiRNA target sequence
tcttttggatattttccgattaaatt

SEQ ID NO: 62419 - DNA, 26 bp, Artificial sequence
  SiRNA target sequence
cttttggatattttccgattaaatta

SEQ ID NO: 62420 - DNA, 26 bp, Artificial sequence
  SiRNA target sequence
ttttggatattttccgattaaattat

SEQ ID NO: 62421 - DNA, 26 bp, Artificial sequence
  SiRNA target sequence
tttggatattttccgattaaattatc

SEQ ID NO: 62422 - DNA, 26 bp, Artificial sequence
  SiRNA target sequence
ttggatattttccgattaaattatcc

SEQ ID NO: 62423 - DNA, 26 bp, Artificial sequence
  SiRNA target sequence
tggatattttccgattaaattatcct

SEQ ID NO: 62424 - DNA, 26 bp, Artificial sequence
  SiRNA target sequence
ggatattttccgattaaattatcctc

SEQ ID NO: 62425 - DNA, 26 bp, Artificial sequence
  SiRNA target sequence
gatattttccgattaaattatcctct

SEQ ID NO: 62426 - DNA, 26 bp, Artificial sequence
  SiRNA target sequence
atattttccgattaaattatcctctc

SEQ ID NO: 62427 - DNA, 26 bp, Artificial sequence
  SiRNA target sequence
tattttccgattaaattatcctctca

SEQ ID NO: 62428 - DNA, 26 bp, Artificial sequence
  SiRNA target sequence
attttccgattaaattatcctctcaa

SEQ ID NO: 62429 - DNA, 26 bp, Artificial sequence
  SiRNA target sequence
ttttccgattaaattatcctctcaac

SEQ ID NO: 62430 - DNA, 26 bp, Artificial sequence
  SiRNA target sequence
tttccgattaaattatcctctcaaca

SEQ ID NO: 62431 - DNA, 26 bp, Artificial sequence
  SiRNA target sequence
ttccgattaaattatcctctcaacag

SEQ ID NO: 62432 - DNA, 26 bp, Artificial sequence
  SiRNA target sequence
tccgattaaattatcctctcaacagt

SEQ ID NO: 62433 - DNA, 26 bp, Artificial sequence
  SiRNA target sequence
ccgattaaattatcctctcaacagtt

SEQ ID NO: 62434 - DNA, 26 bp, Artificial sequence
  SiRNA target sequence
cgattaaattatcctctcaacagtta

SEQ ID NO: 62435 - DNA, 26 bp, Artificial sequence
  SiRNA target sequence
gattaaattatcctctcaacagttag

SEQ ID NO: 62436 - DNA, 26 bp, Artificial sequence
  SiRNA target sequence
attaaattatcctctcaacagttagt

SEQ ID NO: 62437 - DNA, 26 bp, Artificial sequence
  SiRNA target sequence
ttaaattatcctctcaacagttagtc

SEQ ID NO: 62438 - DNA, 26 bp, Artificial sequence
  SiRNA target sequence
taaattatcctctcaacagttagtct

SEQ ID NO: 62439 - DNA, 26 bp, Artificial sequence
  SiRNA target sequence
aaattatcctctcaacagttagtctt

SEQ ID NO: 62440 - DNA, 26 bp, Artificial sequence
  SiRNA target sequence
aattatcctctcaacagttagtcttt

SEQ ID NO: 62441 - DNA, 26 bp, Artificial sequence
  SiRNA target sequence
attatcctctcaacagttagtctttt

SEQ ID NO: 62442 - DNA, 26 bp, Artificial sequence
  SiRNA target sequence
ttatcctctcaacagttagtctttta

SEQ ID NO: 62443 - DNA, 26 bp, Artificial sequence
  SiRNA target sequence
tatcctctcaacagttagtcttttat

SEQ ID NO: 62444 - DNA, 26 bp, Artificial sequence
  SiRNA target sequence
atcctctcaacagttagtcttttata

SEQ ID NO: 62445 - DNA, 26 bp, Artificial sequence
  SiRNA target sequence
tcctctcaacagttagtcttttatat

SEQ ID NO: 62446 - DNA, 26 bp, Artificial sequence
  SiRNA target sequence
cctctcaacagttagtcttttatatt

SEQ ID NO: 62447 - DNA, 26 bp, Artificial sequence
  SiRNA target sequence
ctctcaacagttagtcttttatattt

SEQ ID NO: 62448 - DNA, 26 bp, Artificial sequence
  SiRNA target sequence
tctcaacagttagtcttttatatttc

SEQ ID NO: 62449 - DNA, 26 bp, Artificial sequence
  SiRNA target sequence
ctcaacagttagtcttttatatttcg

SEQ ID NO: 62450 - DNA, 26 bp, Artificial sequence
  SiRNA target sequence
tcaacagttagtcttttatatttcga

SEQ ID NO: 62451 - DNA, 26 bp, Artificial sequence
  SiRNA target sequence
caacagttagtcttttatatttcgat

SEQ ID NO: 62452 - DNA, 26 bp, Artificial sequence
  SiRNA target sequence
aacagttagtcttttatatttcgatt

SEQ ID NO: 62453 - DNA, 26 bp, Artificial sequence
  SiRNA target sequence
acagttagtcttttatatttcgatta

SEQ ID NO: 62454 - DNA, 26 bp, Artificial sequence
  SiRNA target sequence
cagttagtcttttatatttcgattag

SEQ ID NO: 62455 - DNA, 26 bp, Artificial sequence
  SiRNA target sequence
agttagtcttttatatttcgattagt

SEQ ID NO: 62456 - DNA, 26 bp, Artificial sequence
  SiRNA target sequence
gttagtcttttatatttcgattagta

SEQ ID NO: 62457 - DNA, 26 bp, Artificial sequence
  SiRNA target sequence
ttagtcttttatatttcgattagtaa

SEQ ID NO: 62458 - DNA, 26 bp, Artificial sequence
  SiRNA target sequence
tagtcttttatatttcgattagtaaa

SEQ ID NO: 62459 - DNA, 26 bp, Artificial sequence
  SiRNA target sequence
agtcttttatatttcgattagtaaaa

SEQ ID NO: 62460 - DNA, 26 bp, Artificial sequence
  SiRNA target sequence
gtcttttatatttcgattagtaaaac

SEQ ID NO: 62461 - DNA, 26 bp, Artificial sequence
  SiRNA target sequence
tcttttatatttcgattagtaaaacg

SEQ ID NO: 62462 - DNA, 26 bp, Artificial sequence
  SiRNA target sequence
cttttatatttcgattagtaaaacgt

SEQ ID NO: 62463 - DNA, 26 bp, Artificial sequence
  SiRNA target sequence
ttttatatttcgattagtaaaacgtt

SEQ ID NO: 62464 - DNA, 26 bp, Artificial sequence
  SiRNA target sequence
tttatatttcgattagtaaaacgttg

SEQ ID NO: 62465 - DNA, 26 bp, Artificial sequence
  SiRNA target sequence
ttatatttcgattagtaaaacgttga

SEQ ID NO: 62466 - DNA, 26 bp, Artificial sequence
  SiRNA target sequence
tatatttcgattagtaaaacgttgac

SEQ ID NO: 62467 - DNA, 26 bp, Artificial sequence
  SiRNA target sequence
atatttcgattagtaaaacgttgaca

SEQ ID NO: 62468 - DNA, 26 bp, Artificial sequence
  SiRNA target sequence
tatttcgattagtaaaacgttgacaa

SEQ ID NO: 62469 - DNA, 26 bp, Artificial sequence
  SiRNA target sequence
atttcgattagtaaaacgttgacaaa

SEQ ID NO: 62470 - DNA, 26 bp, Artificial sequence
  SiRNA target sequence
tttcgattagtaaaacgttgacaaat

SEQ ID NO: 62471 - DNA, 26 bp, Artificial sequence
  SiRNA target sequence
ttcgattagtaaaacgttgacaaatt

SEQ ID NO: 62472 - DNA, 26 bp, Artificial sequence
  SiRNA target sequence
tcgattagtaaaacgttgacaaattc

SEQ ID NO: 62473 - DNA, 26 bp, Artificial sequence
  SiRNA target sequence
cgattagtaaaacgttgacaaattcg

SEQ ID NO: 62474 - DNA, 26 bp, Artificial sequence
  SiRNA target sequence
gattagtaaaacgttgacaaattcgt

SEQ ID NO: 62475 - DNA, 26 bp, Artificial sequence
  SiRNA target sequence
attagtaaaacgttgacaaattcgtt

SEQ ID NO: 62476 - DNA, 26 bp, Artificial sequence
  SiRNA target sequence
ttagtaaaacgttgacaaattcgttg

SEQ ID NO: 62477 - DNA, 26 bp, Artificial sequence
  SiRNA target sequence
tagtaaaacgttgacaaattcgttga

SEQ ID NO: 62478 - DNA, 26 bp, Artificial sequence
  SiRNA target sequence
agtaaaacgttgacaaattcgttgag

SEQ ID NO: 62479 - DNA, 26 bp, Artificial sequence
  SiRNA target sequence
gtaaaacgttgacaaattcgttgagc

SEQ ID NO: 62480 - DNA, 26 bp, Artificial sequence
  SiRNA target sequence
taaaacgttgacaaattcgttgagcg

SEQ ID NO: 62481 - DNA, 26 bp, Artificial sequence
  SiRNA target sequence
aaaacgttgacaaattcgttgagcga

SEQ ID NO: 62482 - DNA, 26 bp, Artificial sequence
  SiRNA target sequence
aaacgttgacaaattcgttgagcgaa

SEQ ID NO: 62483 - DNA, 26 bp, Artificial sequence
  SiRNA target sequence
aacgttgacaaattcgttgagcgaaa

SEQ ID NO: 62484 - DNA, 26 bp, Artificial sequence
  SiRNA target sequence
acgttgacaaattcgttgagcgaaat

SEQ ID NO: 62485 - DNA, 26 bp, Artificial sequence
  SiRNA target sequence
cgttgacaaattcgttgagcgaaatg

SEQ ID NO: 62486 - DNA, 26 bp, Artificial sequence
  SiRNA target sequence
gttgacaaattcgttgagcgaaatgg

SEQ ID NO: 62487 - DNA, 26 bp, Artificial sequence
  SiRNA target sequence
ttgacaaattcgttgagcgaaatggg

SEQ ID NO: 62488 - DNA, 26 bp, Artificial sequence
  SiRNA target sequence
tgacaaattcgttgagcgaaatggga

SEQ ID NO: 62489 - DNA, 26 bp, Artificial sequence
  SiRNA target sequence
gacaaattcgttgagcgaaatgggaa

SEQ ID NO: 62490 - DNA, 26 bp, Artificial sequence
  SiRNA target sequence
acaaattcgttgagcgaaatgggaat

SEQ ID NO: 62491 - DNA, 26 bp, Artificial sequence
  SiRNA target sequence
caaattcgttgagcgaaatgggaatg

SEQ ID NO: 62492 - DNA, 26 bp, Artificial sequence
  SiRNA target sequence
aaattcgttgagcgaaatgggaatgc

SEQ ID NO: 62493 - DNA, 26 bp, Artificial sequence
  SiRNA target sequence
aattcgttgagcgaaatgggaatgct

SEQ ID NO: 62494 - DNA, 26 bp, Artificial sequence
  SiRNA target sequence
attcgttgagcgaaatgggaatgcta

SEQ ID NO: 62495 - DNA, 26 bp, Artificial sequence
  SiRNA target sequence
ttcgttgagcgaaatgggaatgctat

SEQ ID NO: 62496 - DNA, 26 bp, Artificial sequence
  SiRNA target sequence
tcgttgagcgaaatgggaatgctata

SEQ ID NO: 62497 - DNA, 26 bp, Artificial sequence
  SiRNA target sequence
cgttgagcgaaatgggaatgctatac

SEQ ID NO: 62498 - DNA, 26 bp, Artificial sequence
  SiRNA target sequence
gttgagcgaaatgggaatgctataca

SEQ ID NO: 62499 - DNA, 26 bp, Artificial sequence
  SiRNA target sequence
ttgagcgaaatgggaatgctatacac

SEQ ID NO: 62500 - DNA, 26 bp, Artificial sequence
  SiRNA target sequence
tgagcgaaatgggaatgctatacaca

SEQ ID NO: 62501 - DNA, 26 bp, Artificial sequence
  SiRNA target sequence
gagcgaaatgggaatgctatacacaa

SEQ ID NO: 62502 - DNA, 26 bp, Artificial sequence
  SiRNA target sequence
agcgaaatgggaatgctatacacaag

SEQ ID NO: 62503 - DNA, 26 bp, Artificial sequence
  SiRNA target sequence
gcgaaatgggaatgctatacacaaga

SEQ ID NO: 62504 - DNA, 26 bp, Artificial sequence
  SiRNA target sequence
cgaaatgggaatgctatacacaagat

SEQ ID NO: 62505 - DNA, 26 bp, Artificial sequence
  SiRNA target sequence
gaaatgggaatgctatacacaagata

SEQ ID NO: 62506 - DNA, 26 bp, Artificial sequence
  SiRNA target sequence
aaatgggaatgctatacacaagatat

SEQ ID NO: 62507 - DNA, 26 bp, Artificial sequence
  SiRNA target sequence
aatgggaatgctatacacaagatatg

SEQ ID NO: 62508 - DNA, 26 bp, Artificial sequence
  SiRNA target sequence
atgggaatgctatacacaagatatgt

SEQ ID NO: 62509 - DNA, 26 bp, Artificial sequence
  SiRNA target sequence
tgggaatgctatacacaagatatgta

SEQ ID NO: 62510 - DNA, 26 bp, Artificial sequence
  SiRNA target sequence
gggaatgctatacacaagatatgtac

SEQ ID NO: 62511 - DNA, 26 bp, Artificial sequence
  SiRNA target sequence
ggaatgctatacacaagatatgtaca

SEQ ID NO: 62512 - DNA, 26 bp, Artificial sequence
  SiRNA target sequence
gaatgctatacacaagatatgtacaa

SEQ ID NO: 62513 - DNA, 26 bp, Artificial sequence
  SiRNA target sequence
aatgctatacacaagatatgtacaag

SEQ ID NO: 62514 - DNA, 26 bp, Artificial sequence
  SiRNA target sequence
atgctatacacaagatatgtacaagg

SEQ ID NO: 62515 - DNA, 26 bp, Artificial sequence
  SiRNA target sequence
tgctatacacaagatatgtacaagga

SEQ ID NO: 62516 - DNA, 26 bp, Artificial sequence
  SiRNA target sequence
gctatacacaagatatgtacaaggat

SEQ ID NO: 62517 - DNA, 26 bp, Artificial sequence
  SiRNA target sequence
ctatacacaagatatgtacaaggatt

SEQ ID NO: 62518 - DNA, 26 bp, Artificial sequence
  SiRNA target sequence
tatacacaagatatgtacaaggattt

SEQ ID NO: 62519 - DNA, 26 bp, Artificial sequence
  SiRNA target sequence
atacacaagatatgtacaaggatttt

SEQ ID NO: 62520 - DNA, 26 bp, Artificial sequence
  SiRNA target sequence
tacacaagatatgtacaaggattttt

SEQ ID NO: 62521 - DNA, 26 bp, Artificial sequence
  SiRNA target sequence
acacaagatatgtacaaggattttta

SEQ ID NO: 62522 - DNA, 26 bp, Artificial sequence
  SiRNA target sequence
cacaagatatgtacaaggatttttaa

SEQ ID NO: 62523 - DNA, 26 bp, Artificial sequence
  SiRNA target sequence
acaagatatgtacaaggatttttaaa

SEQ ID NO: 62524 - DNA, 26 bp, Artificial sequence
  SiRNA target sequence
caagatatgtacaaggatttttaaat

SEQ ID NO: 62525 - DNA, 26 bp, Artificial sequence
  SiRNA target sequence
aagatatgtacaaggatttttaaatg

SEQ ID NO: 62526 - DNA, 26 bp, Artificial sequence
  SiRNA target sequence
agatatgtacaaggatttttaaatgc

SEQ ID NO: 62527 - DNA, 26 bp, Artificial sequence
  SiRNA target sequence
gatatgtacaaggatttttaaatgca

SEQ ID NO: 62528 - DNA, 26 bp, Artificial sequence
  SiRNA target sequence
atatgtacaaggatttttaaatgcaa

SEQ ID NO: 62529 - DNA, 26 bp, Artificial sequence
  SiRNA target sequence
tatgtacaaggatttttaaatgcaaa

SEQ ID NO: 62530 - DNA, 26 bp, Artificial sequence
  SiRNA target sequence
atgtacaaggatttttaaatgcaaag

SEQ ID NO: 62531 - DNA, 26 bp, Artificial sequence
  SiRNA target sequence
tgtacaaggatttttaaatgcaaagt

SEQ ID NO: 62532 - DNA, 26 bp, Artificial sequence
  SiRNA target sequence
gtacaaggatttttaaatgcaaagtc

SEQ ID NO: 62533 - DNA, 26 bp, Artificial sequence
  SiRNA target sequence
tacaaggatttttaaatgcaaagtct

SEQ ID NO: 62534 - DNA, 26 bp, Artificial sequence
  SiRNA target sequence
acaaggatttttaaatgcaaagtctg

SEQ ID NO: 62535 - DNA, 26 bp, Artificial sequence
  SiRNA target sequence
caaggatttttaaatgcaaagtctgg

SEQ ID NO: 62536 - DNA, 26 bp, Artificial sequence
  SiRNA target sequence
aaggatttttaaatgcaaagtctgga

SEQ ID NO: 62537 - DNA, 26 bp, Artificial sequence
  SiRNA target sequence
aggatttttaaatgcaaagtctggat

SEQ ID NO: 62538 - DNA, 26 bp, Artificial sequence
  SiRNA target sequence
ggatttttaaatgcaaagtctggata

SEQ ID NO: 62539 - DNA, 26 bp, Artificial sequence
  SiRNA target sequence
gatttttaaatgcaaagtctggatat

SEQ ID NO: 62540 - DNA, 26 bp, Artificial sequence
  SiRNA target sequence
atttttaaatgcaaagtctggatatt

SEQ ID NO: 62541 - DNA, 26 bp, Artificial sequence
  SiRNA target sequence
tttttaaatgcaaagtctggatatta

SEQ ID NO: 62542 - DNA, 26 bp, Artificial sequence
  SiRNA target sequence
ttttaaatgcaaagtctggatattac

SEQ ID NO: 62543 - DNA, 26 bp, Artificial sequence
  SiRNA target sequence
tttaaatgcaaagtctggatattacg

SEQ ID NO: 62544 - DNA, 26 bp, Artificial sequence
  SiRNA target sequence
ttaaatgcaaagtctggatattacga

SEQ ID NO: 62545 - DNA, 26 bp, Artificial sequence
  SiRNA target sequence
taaatgcaaagtctggatattacgag

SEQ ID NO: 62546 - DNA, 26 bp, Artificial sequence
  SiRNA target sequence
aaatgcaaagtctggatattacgagt

SEQ ID NO: 62547 - DNA, 26 bp, Artificial sequence
  SiRNA target sequence
aatgcaaagtctggatattacgagtt

SEQ ID NO: 62548 - DNA, 26 bp, Artificial sequence
  SiRNA target sequence
atgcaaagtctggatattacgagttt

SEQ ID NO: 62549 - DNA, 26 bp, Artificial sequence
  SiRNA target sequence
tgcaaagtctggatattacgagttta

SEQ ID NO: 62550 - DNA, 26 bp, Artificial sequence
  SiRNA target sequence
gcaaagtctggatattacgagtttaa

SEQ ID NO: 62551 - DNA, 26 bp, Artificial sequence
  SiRNA target sequence
caaagtctggatattacgagtttaaa

SEQ ID NO: 62552 - DNA, 26 bp, Artificial sequence
  SiRNA target sequence
aaagtctggatattacgagtttaaag

SEQ ID NO: 62553 - DNA, 26 bp, Artificial sequence
  SiRNA target sequence
aagtctggatattacgagtttaaaga

SEQ ID NO: 62554 - DNA, 26 bp, Artificial sequence
  SiRNA target sequence
agtctggatattacgagtttaaagag

SEQ ID NO: 62555 - DNA, 26 bp, Artificial sequence
  SiRNA target sequence
gtctggatattacgagtttaaagagg

SEQ ID NO: 62556 - DNA, 26 bp, Artificial sequence
  SiRNA target sequence
tctggatattacgagtttaaagagga

SEQ ID NO: 62557 - DNA, 26 bp, Artificial sequence
  SiRNA target sequence
ctggatattacgagtttaaagaggat

SEQ ID NO: 62558 - DNA, 26 bp, Artificial sequence
  SiRNA target sequence
tggatattacgagtttaaagaggata

SEQ ID NO: 62559 - DNA, 26 bp, Artificial sequence
  SiRNA target sequence
ggatattacgagtttaaagaggatac

SEQ ID NO: 62560 - DNA, 26 bp, Artificial sequence
  SiRNA target sequence
gatattacgagtttaaagaggataca

SEQ ID NO: 62561 - DNA, 26 bp, Artificial sequence
  SiRNA target sequence
atattacgagtttaaagaggatacac

SEQ ID NO: 62562 - DNA, 26 bp, Artificial sequence
  SiRNA target sequence
tattacgagtttaaagaggatacaca

SEQ ID NO: 62563 - DNA, 26 bp, Artificial sequence
  SiRNA target sequence
attacgagtttaaagaggatacacaa

SEQ ID NO: 62564 - DNA, 26 bp, Artificial sequence
  SiRNA target sequence
ttacgagtttaaagaggatacacaaa

SEQ ID NO: 62565 - DNA, 26 bp, Artificial sequence
  SiRNA target sequence
tacgagtttaaagaggatacacaaac

SEQ ID NO: 62566 - DNA, 26 bp, Artificial sequence
  SiRNA target sequence
acgagtttaaagaggatacacaaact

SEQ ID NO: 62567 - DNA, 26 bp, Artificial sequence
  SiRNA target sequence
cgagtttaaagaggatacacaaactg

SEQ ID NO: 62568 - DNA, 26 bp, Artificial sequence
  SiRNA target sequence
gagtttaaagaggatacacaaactga

SEQ ID NO: 62569 - DNA, 26 bp, Artificial sequence
  SiRNA target sequence
agtttaaagaggatacacaaactgat

SEQ ID NO: 62570 - DNA, 26 bp, Artificial sequence
  SiRNA target sequence
gtttaaagaggatacacaaactgata

SEQ ID NO: 62571 - DNA, 26 bp, Artificial sequence
  SiRNA target sequence
tttaaagaggatacacaaactgataa

SEQ ID NO: 62572 - DNA, 26 bp, Artificial sequence
  SiRNA target sequence
ttaaagaggatacacaaactgataaa

SEQ ID NO: 62573 - DNA, 26 bp, Artificial sequence
  SiRNA target sequence
taaagaggatacacaaactgataaaa

SEQ ID NO: 62574 - DNA, 26 bp, Artificial sequence
  SiRNA target sequence
aaagaggatacacaaactgataaaat

SEQ ID NO: 62575 - DNA, 26 bp, Artificial sequence
  SiRNA target sequence
aagaggatacacaaactgataaaata

SEQ ID NO: 62576 - DNA, 26 bp, Artificial sequence
  SiRNA target sequence
agaggatacacaaactgataaaataa

SEQ ID NO: 62577 - DNA, 26 bp, Artificial sequence
  SiRNA target sequence
gaggatacacaaactgataaaataag

SEQ ID NO: 62578 - DNA, 26 bp, Artificial sequence
  SiRNA target sequence
aggatacacaaactgataaaataaga

SEQ ID NO: 62579 - DNA, 26 bp, Artificial sequence
  SiRNA target sequence
ggatacacaaactgataaaataagac

SEQ ID NO: 62580 - DNA, 26 bp, Artificial sequence
  SiRNA target sequence
gatacacaaactgataaaataagact

SEQ ID NO: 62581 - DNA, 26 bp, Artificial sequence
  SiRNA target sequence
atacacaaactgataaaataagactg

SEQ ID NO: 62582 - DNA, 26 bp, Artificial sequence
  SiRNA target sequence
tacacaaactgataaaataagactga

SEQ ID NO: 62583 - DNA, 26 bp, Artificial sequence
  SiRNA target sequence
acacaaactgataaaataagactgat

SEQ ID NO: 62584 - DNA, 26 bp, Artificial sequence
  SiRNA target sequence
cacaaactgataaaataagactgata

SEQ ID NO: 62585 - DNA, 26 bp, Artificial sequence
  SiRNA target sequence
acaaactgataaaataagactgatag

SEQ ID NO: 62586 - DNA, 26 bp, Artificial sequence
  SiRNA target sequence
caaactgataaaataagactgataga

SEQ ID NO: 62587 - DNA, 26 bp, Artificial sequence
  SiRNA target sequence
aaactgataaaataagactgatagat

SEQ ID NO: 62588 - DNA, 26 bp, Artificial sequence
  SiRNA target sequence
aactgataaaataagactgatagatt

SEQ ID NO: 62589 - DNA, 26 bp, Artificial sequence
  SiRNA target sequence
actgataaaataagactgatagattt

SEQ ID NO: 62590 - DNA, 26 bp, Artificial sequence
  SiRNA target sequence
ctgataaaataagactgatagatttt

SEQ ID NO: 62591 - DNA, 26 bp, Artificial sequence
  SiRNA target sequence
tgataaaataagactgatagatttta

SEQ ID NO: 62592 - DNA, 26 bp, Artificial sequence
  SiRNA target sequence
gataaaataagactgatagattttaa

SEQ ID NO: 62593 - DNA, 26 bp, Artificial sequence
  SiRNA target sequence
ataaaataagactgatagattttaat

SEQ ID NO: 62594 - DNA, 26 bp, Artificial sequence
  SiRNA target sequence
taaaataagactgatagattttaatg

SEQ ID NO: 62595 - DNA, 26 bp, Artificial sequence
  SiRNA target sequence
aaaataagactgatagattttaatga

SEQ ID NO: 62596 - DNA, 26 bp, Artificial sequence
  SiRNA target sequence
aaataagactgatagattttaatgaa

SEQ ID NO: 62597 - DNA, 26 bp, Artificial sequence
  SiRNA target sequence
aataagactgatagattttaatgaaa

SEQ ID NO: 62598 - DNA, 26 bp, Artificial sequence
  SiRNA target sequence
ataagactgatagattttaatgaaaa

SEQ ID NO: 62599 - DNA, 26 bp, Artificial sequence
  SiRNA target sequence
taagactgatagattttaatgaaaag

SEQ ID NO: 62600 - DNA, 26 bp, Artificial sequence
  SiRNA target sequence
aagactgatagattttaatgaaaagc

SEQ ID NO: 62601 - DNA, 26 bp, Artificial sequence
  SiRNA target sequence
agactgatagattttaatgaaaagct

SEQ ID NO: 62602 - DNA, 26 bp, Artificial sequence
  SiRNA target sequence
gactgatagattttaatgaaaagcta

SEQ ID NO: 62603 - DNA, 26 bp, Artificial sequence
  SiRNA target sequence
actgatagattttaatgaaaagctag

SEQ ID NO: 62604 - DNA, 26 bp, Artificial sequence
  SiRNA target sequence
ctgatagattttaatgaaaagctaga

SEQ ID NO: 62605 - DNA, 26 bp, Artificial sequence
  SiRNA target sequence
tgatagattttaatgaaaagctagaa

SEQ ID NO: 62606 - DNA, 26 bp, Artificial sequence
  SiRNA target sequence
gatagattttaatgaaaagctagaat

SEQ ID NO: 62607 - DNA, 26 bp, Artificial sequence
  SiRNA target sequence
atagattttaatgaaaagctagaatt

SEQ ID NO: 62608 - DNA, 26 bp, Artificial sequence
  SiRNA target sequence
tagattttaatgaaaagctagaattt

SEQ ID NO: 62609 - DNA, 26 bp, Artificial sequence
  SiRNA target sequence
agattttaatgaaaagctagaattta

SEQ ID NO: 62610 - DNA, 26 bp, Artificial sequence
  SiRNA target sequence
gattttaatgaaaagctagaatttag

SEQ ID NO: 62611 - DNA, 26 bp, Artificial sequence
  SiRNA target sequence
attttaatgaaaagctagaatttaga

SEQ ID NO: 62612 - DNA, 26 bp, Artificial sequence
  SiRNA target sequence
ttttaatgaaaagctagaatttagaa

SEQ ID NO: 62613 - DNA, 26 bp, Artificial sequence
  SiRNA target sequence
tttaatgaaaagctagaatttagaaa

SEQ ID NO: 62614 - DNA, 26 bp, Artificial sequence
  SiRNA target sequence
ttaatgaaaagctagaatttagaaat

SEQ ID NO: 62615 - DNA, 26 bp, Artificial sequence
  SiRNA target sequence
taatgaaaagctagaatttagaaatg

SEQ ID NO: 62616 - DNA, 26 bp, Artificial sequence
  SiRNA target sequence
aatgaaaagctagaatttagaaatgt

SEQ ID NO: 62617 - DNA, 26 bp, Artificial sequence
  SiRNA target sequence
atgaaaagctagaatttagaaatgta

SEQ ID NO: 62618 - DNA, 26 bp, Artificial sequence
  SiRNA target sequence
tgaaaagctagaatttagaaatgtat

SEQ ID NO: 62619 - DNA, 26 bp, Artificial sequence
  SiRNA target sequence
gaaaagctagaatttagaaatgtatc

SEQ ID NO: 62620 - DNA, 26 bp, Artificial sequence
  SiRNA target sequence
aaaagctagaatttagaaatgtatct

SEQ ID NO: 62621 - DNA, 26 bp, Artificial sequence
  SiRNA target sequence
aaagctagaatttagaaatgtatctt

SEQ ID NO: 62622 - DNA, 26 bp, Artificial sequence
  SiRNA target sequence
aagctagaatttagaaatgtatcttt

SEQ ID NO: 62623 - DNA, 26 bp, Artificial sequence
  SiRNA target sequence
agctagaatttagaaatgtatctttt

SEQ ID NO: 62624 - DNA, 26 bp, Artificial sequence
  SiRNA target sequence
gctagaatttagaaatgtatctttta

SEQ ID NO: 62625 - DNA, 26 bp, Artificial sequence
  SiRNA target sequence
ctagaatttagaaatgtatcttttag

SEQ ID NO: 62626 - DNA, 26 bp, Artificial sequence
  SiRNA target sequence
tagaatttagaaatgtatcttttagt

SEQ ID NO: 62627 - DNA, 26 bp, Artificial sequence
  SiRNA target sequence
agaatttagaaatgtatcttttagtt

SEQ ID NO: 62628 - DNA, 26 bp, Artificial sequence
  SiRNA target sequence
gaatttagaaatgtatcttttagtta

SEQ ID NO: 62629 - DNA, 26 bp, Artificial sequence
  SiRNA target sequence
aatttagaaatgtatcttttagttat

SEQ ID NO: 62630 - DNA, 26 bp, Artificial sequence
  SiRNA target sequence
atttagaaatgtatcttttagttatt

SEQ ID NO: 62631 - DNA, 26 bp, Artificial sequence
  SiRNA target sequence
tttagaaatgtatcttttagttattt

SEQ ID NO: 62632 - DNA, 26 bp, Artificial sequence
  SiRNA target sequence
ttagaaatgtatcttttagttattta

SEQ ID NO: 62633 - DNA, 26 bp, Artificial sequence
  SiRNA target sequence
tagaaatgtatcttttagttatttaa

SEQ ID NO: 62634 - DNA, 26 bp, Artificial sequence
  SiRNA target sequence
agaaatgtatcttttagttatttaaa

SEQ ID NO: 62635 - DNA, 26 bp, Artificial sequence
  SiRNA target sequence
gaaatgtatcttttagttatttaaat

SEQ ID NO: 62636 - DNA, 26 bp, Artificial sequence
  SiRNA target sequence
aaatgtatcttttagttatttaaata

SEQ ID NO: 62637 - DNA, 26 bp, Artificial sequence
  SiRNA target sequence
aatgtatcttttagttatttaaataa

SEQ ID NO: 62638 - DNA, 26 bp, Artificial sequence
  SiRNA target sequence
atgtatcttttagttatttaaataag

SEQ ID NO: 62639 - DNA, 26 bp, Artificial sequence
  SiRNA target sequence
tgtatcttttagttatttaaataagc

SEQ ID NO: 62640 - DNA, 26 bp, Artificial sequence
  SiRNA target sequence
gtatcttttagttatttaaataagcc

SEQ ID NO: 62641 - DNA, 26 bp, Artificial sequence
  SiRNA target sequence
tatcttttagttatttaaataagcct

SEQ ID NO: 62642 - DNA, 26 bp, Artificial sequence
  SiRNA target sequence
atcttttagttatttaaataagccta

SEQ ID NO: 62643 - DNA, 26 bp, Artificial sequence
  SiRNA target sequence
tcttttagttatttaaataagcctat

SEQ ID NO: 62644 - DNA, 26 bp, Artificial sequence
  SiRNA target sequence
cttttagttatttaaataagcctatt

SEQ ID NO: 62645 - DNA, 26 bp, Artificial sequence
  SiRNA target sequence
ttttagttatttaaataagcctattt

SEQ ID NO: 62646 - DNA, 26 bp, Artificial sequence
  SiRNA target sequence
tttagttatttaaataagcctatttt

SEQ ID NO: 62647 - DNA, 26 bp, Artificial sequence
  SiRNA target sequence
ttagttatttaaataagcctatttta

SEQ ID NO: 62648 - DNA, 26 bp, Artificial sequence
  SiRNA target sequence
tagttatttaaataagcctattttag

SEQ ID NO: 62649 - DNA, 26 bp, Artificial sequence
  SiRNA target sequence
agttatttaaataagcctattttagt

SEQ ID NO: 62650 - DNA, 26 bp, Artificial sequence
  SiRNA target sequence
gttatttaaataagcctattttagtg

SEQ ID NO: 62651 - DNA, 26 bp, Artificial sequence
  SiRNA target sequence
ttatttaaataagcctattttagtga

SEQ ID NO: 62652 - DNA, 26 bp, Artificial sequence
  SiRNA target sequence
tatttaaataagcctattttagtgaa

SEQ ID NO: 62653 - DNA, 26 bp, Artificial sequence
  SiRNA target sequence
atttaaataagcctattttagtgaat

SEQ ID NO: 62654 - DNA, 26 bp, Artificial sequence
  SiRNA target sequence
tttaaataagcctattttagtgaatg

SEQ ID NO: 62655 - DNA, 26 bp, Artificial sequence
  SiRNA target sequence
ttaaataagcctattttagtgaatgc

SEQ ID NO: 62656 - DNA, 26 bp, Artificial sequence
  SiRNA target sequence
taaataagcctattttagtgaatgct

SEQ ID NO: 62657 - DNA, 26 bp, Artificial sequence
  SiRNA target sequence
aaataagcctattttagtgaatgcta

SEQ ID NO: 62658 - DNA, 26 bp, Artificial sequence
  SiRNA target sequence
aataagcctattttagtgaatgctaa

SEQ ID NO: 62659 - DNA, 26 bp, Artificial sequence
  SiRNA target sequence
ataagcctattttagtgaatgctaat

SEQ ID NO: 62660 - DNA, 26 bp, Artificial sequence
  SiRNA target sequence
taagcctattttagtgaatgctaatt

SEQ ID NO: 62661 - DNA, 26 bp, Artificial sequence
  SiRNA target sequence
aagcctattttagtgaatgctaattt

SEQ ID NO: 62662 - DNA, 26 bp, Artificial sequence
  SiRNA target sequence
agcctattttagtgaatgctaatttc

SEQ ID NO: 62663 - DNA, 26 bp, Artificial sequence
  SiRNA target sequence
gcctattttagtgaatgctaatttcg

SEQ ID NO: 62664 - DNA, 26 bp, Artificial sequence
  SiRNA target sequence
cctattttagtgaatgctaatttcgt

SEQ ID NO: 62665 - DNA, 26 bp, Artificial sequence
  SiRNA target sequence
ctattttagtgaatgctaatttcgtt

SEQ ID NO: 62666 - DNA, 26 bp, Artificial sequence
  SiRNA target sequence
tattttagtgaatgctaatttcgtta

SEQ ID NO: 62667 - DNA, 26 bp, Artificial sequence
  SiRNA target sequence
attttagtgaatgctaatttcgttat

SEQ ID NO: 62668 - DNA, 26 bp, Artificial sequence
  SiRNA target sequence
ttttagtgaatgctaatttcgttatt

SEQ ID NO: 62669 - DNA, 26 bp, Artificial sequence
  SiRNA target sequence
tttagtgaatgctaatttcgttatta

SEQ ID NO: 62670 - DNA, 26 bp, Artificial sequence
  SiRNA target sequence
ttagtgaatgctaatttcgttattaa

SEQ ID NO: 62671 - DNA, 26 bp, Artificial sequence
  SiRNA target sequence
tagtgaatgctaatttcgttattaat

SEQ ID NO: 62672 - DNA, 26 bp, Artificial sequence
  SiRNA target sequence
agtgaatgctaatttcgttattaata

SEQ ID NO: 62673 - DNA, 26 bp, Artificial sequence
  SiRNA target sequence
gtgaatgctaatttcgttattaataa

SEQ ID NO: 62674 - DNA, 26 bp, Artificial sequence
  SiRNA target sequence
tgaatgctaatttcgttattaataaa

SEQ ID NO: 62675 - DNA, 26 bp, Artificial sequence
  SiRNA target sequence
gaatgctaatttcgttattaataaag

SEQ ID NO: 62676 - DNA, 26 bp, Artificial sequence
  SiRNA target sequence
aatgctaatttcgttattaataaagg

SEQ ID NO: 62677 - DNA, 26 bp, Artificial sequence
  SiRNA target sequence
atgctaatttcgttattaataaaggg

SEQ ID NO: 62678 - DNA, 26 bp, Artificial sequence
  SiRNA target sequence
tgctaatttcgttattaataaagggg

SEQ ID NO: 62679 - DNA, 26 bp, Artificial sequence
  SiRNA target sequence
gctaatttcgttattaataaagggga

SEQ ID NO: 62680 - DNA, 26 bp, Artificial sequence
  SiRNA target sequence
ctaatttcgttattaataaaggggag

SEQ ID NO: 62681 - DNA, 26 bp, Artificial sequence
  SiRNA target sequence
taatttcgttattaataaaggggagc

SEQ ID NO: 62682 - DNA, 26 bp, Artificial sequence
  SiRNA target sequence
aatttcgttattaataaaggggagcg

SEQ ID NO: 62683 - DNA, 26 bp, Artificial sequence
  SiRNA target sequence
atttcgttattaataaaggggagcgt

SEQ ID NO: 62684 - DNA, 26 bp, Artificial sequence
  SiRNA target sequence
tttcgttattaataaaggggagcgtg

SEQ ID NO: 62685 - DNA, 26 bp, Artificial sequence
  SiRNA target sequence
ttcgttattaataaaggggagcgtgt

SEQ ID NO: 62686 - DNA, 26 bp, Artificial sequence
  SiRNA target sequence
tcgttattaataaaggggagcgtgtt

SEQ ID NO: 62687 - DNA, 26 bp, Artificial sequence
  SiRNA target sequence
cgttattaataaaggggagcgtgttg

SEQ ID NO: 62688 - DNA, 26 bp, Artificial sequence
  SiRNA target sequence
gttattaataaaggggagcgtgttgc

SEQ ID NO: 62689 - DNA, 26 bp, Artificial sequence
  SiRNA target sequence
ttattaataaaggggagcgtgttgct

SEQ ID NO: 62690 - DNA, 26 bp, Artificial sequence
  SiRNA target sequence
tattaataaaggggagcgtgttgcta

SEQ ID NO: 62691 - DNA, 26 bp, Artificial sequence
  SiRNA target sequence
attaataaaggggagcgtgttgctat

SEQ ID NO: 62692 - DNA, 26 bp, Artificial sequence
  SiRNA target sequence
ttaataaaggggagcgtgttgctatt

SEQ ID NO: 62693 - DNA, 26 bp, Artificial sequence
  SiRNA target sequence
taataaaggggagcgtgttgctatta

SEQ ID NO: 62694 - DNA, 26 bp, Artificial sequence
  SiRNA target sequence
aataaaggggagcgtgttgctattat

SEQ ID NO: 62695 - DNA, 26 bp, Artificial sequence
  SiRNA target sequence
ataaaggggagcgtgttgctattata

SEQ ID NO: 62696 - DNA, 26 bp, Artificial sequence
  SiRNA target sequence
taaaggggagcgtgttgctattatag

SEQ ID NO: 62697 - DNA, 26 bp, Artificial sequence
  SiRNA target sequence
aaaggggagcgtgttgctattatagg

SEQ ID NO: 62698 - DNA, 26 bp, Artificial sequence
  SiRNA target sequence
aaggggagcgtgttgctattatagga

SEQ ID NO: 62699 - DNA, 26 bp, Artificial sequence
  SiRNA target sequence
aggggagcgtgttgctattataggaa

SEQ ID NO: 62700 - DNA, 26 bp, Artificial sequence
  SiRNA target sequence
ggggagcgtgttgctattataggaaa

SEQ ID NO: 62701 - DNA, 26 bp, Artificial sequence
  SiRNA target sequence
gggagcgtgttgctattataggaaaa

SEQ ID NO: 62702 - DNA, 26 bp, Artificial sequence
  SiRNA target sequence
ggagcgtgttgctattataggaaaaa

SEQ ID NO: 62703 - DNA, 26 bp, Artificial sequence
  SiRNA target sequence
gagcgtgttgctattataggaaaaaa

SEQ ID NO: 62704 - DNA, 26 bp, Artificial sequence
  SiRNA target sequence
agcgtgttgctattataggaaaaaat

SEQ ID NO: 62705 - DNA, 26 bp, Artificial sequence
  SiRNA target sequence
gcgtgttgctattataggaaaaaatg

SEQ ID NO: 62706 - DNA, 26 bp, Artificial sequence
  SiRNA target sequence
cgtgttgctattataggaaaaaatgg

SEQ ID NO: 62707 - DNA, 26 bp, Artificial sequence
  SiRNA target sequence
gtgttgctattataggaaaaaatgga

SEQ ID NO: 62708 - DNA, 26 bp, Artificial sequence
  SiRNA target sequence
tgttgctattataggaaaaaatggaa

SEQ ID NO: 62709 - DNA, 26 bp, Artificial sequence
  SiRNA target sequence
gttgctattataggaaaaaatggaac

SEQ ID NO: 62710 - DNA, 26 bp, Artificial sequence
  SiRNA target sequence
ttgctattataggaaaaaatggaaca

SEQ ID NO: 62711 - DNA, 26 bp, Artificial sequence
  SiRNA target sequence
tgctattataggaaaaaatggaacag

SEQ ID NO: 62712 - DNA, 26 bp, Artificial sequence
  SiRNA target sequence
gctattataggaaaaaatggaacagg

SEQ ID NO: 62713 - DNA, 26 bp, Artificial sequence
  SiRNA target sequence
ctattataggaaaaaatggaacaggt

SEQ ID NO: 62714 - DNA, 26 bp, Artificial sequence
  SiRNA target sequence
tattataggaaaaaatggaacaggta

SEQ ID NO: 62715 - DNA, 26 bp, Artificial sequence
  SiRNA target sequence
attataggaaaaaatggaacaggtaa

SEQ ID NO: 62716 - DNA, 26 bp, Artificial sequence
  SiRNA target sequence
ttataggaaaaaatggaacaggtaaa

SEQ ID NO: 62717 - DNA, 26 bp, Artificial sequence
  SiRNA target sequence
tataggaaaaaatggaacaggtaaaa

SEQ ID NO: 62718 - DNA, 26 bp, Artificial sequence
  SiRNA target sequence
ataggaaaaaatggaacaggtaaaag

SEQ ID NO: 62719 - DNA, 26 bp, Artificial sequence
  SiRNA target sequence
taggaaaaaatggaacaggtaaaagt

SEQ ID NO: 62720 - DNA, 26 bp, Artificial sequence
  SiRNA target sequence
aggaaaaaatggaacaggtaaaagta

SEQ ID NO: 62721 - DNA, 26 bp, Artificial sequence
  SiRNA target sequence
ggaaaaaatggaacaggtaaaagtac

SEQ ID NO: 62722 - DNA, 26 bp, Artificial sequence
  SiRNA target sequence
gaaaaaatggaacaggtaaaagtaca

SEQ ID NO: 62723 - DNA, 26 bp, Artificial sequence
  SiRNA target sequence
aaaaaatggaacaggtaaaagtacaa

SEQ ID NO: 62724 - DNA, 26 bp, Artificial sequence
  SiRNA target sequence
aaaaatggaacaggtaaaagtacaat

SEQ ID NO: 62725 - DNA, 26 bp, Artificial sequence
  SiRNA target sequence
aaaatggaacaggtaaaagtacaata

SEQ ID NO: 62726 - DNA, 26 bp, Artificial sequence
  SiRNA target sequence
aaatggaacaggtaaaagtacaataa

SEQ ID NO: 62727 - DNA, 26 bp, Artificial sequence
  SiRNA target sequence
aatggaacaggtaaaagtacaataat

SEQ ID NO: 62728 - DNA, 26 bp, Artificial sequence
  SiRNA target sequence
atggaacaggtaaaagtacaataata

SEQ ID NO: 62729 - DNA, 26 bp, Artificial sequence
  SiRNA target sequence
tggaacaggtaaaagtacaataataa

SEQ ID NO: 62730 - DNA, 26 bp, Artificial sequence
  SiRNA target sequence
ggaacaggtaaaagtacaataataaa

SEQ ID NO: 62731 - DNA, 26 bp, Artificial sequence
  SiRNA target sequence
gaacaggtaaaagtacaataataaaa

SEQ ID NO: 62732 - DNA, 26 bp, Artificial sequence
  SiRNA target sequence
aacaggtaaaagtacaataataaaat

SEQ ID NO: 62733 - DNA, 26 bp, Artificial sequence
  SiRNA target sequence
acaggtaaaagtacaataataaaatt

SEQ ID NO: 62734 - DNA, 26 bp, Artificial sequence
  SiRNA target sequence
caggtaaaagtacaataataaaattg

SEQ ID NO: 62735 - DNA, 26 bp, Artificial sequence
  SiRNA target sequence
aggtaaaagtacaataataaaattgt

SEQ ID NO: 62736 - DNA, 26 bp, Artificial sequence
  SiRNA target sequence
ggtaaaagtacaataataaaattgtt

SEQ ID NO: 62737 - DNA, 26 bp, Artificial sequence
  SiRNA target sequence
gtaaaagtacaataataaaattgtta

SEQ ID NO: 62738 - DNA, 26 bp, Artificial sequence
  SiRNA target sequence
taaaagtacaataataaaattgttaa

SEQ ID NO: 62739 - DNA, 26 bp, Artificial sequence
  SiRNA target sequence
aaaagtacaataataaaattgttaat

SEQ ID NO: 62740 - DNA, 26 bp, Artificial sequence
  SiRNA target sequence
aaagtacaataataaaattgttaatg

SEQ ID NO: 62741 - DNA, 26 bp, Artificial sequence
  SiRNA target sequence
aagtacaataataaaattgttaatga

SEQ ID NO: 62742 - DNA, 26 bp, Artificial sequence
  SiRNA target sequence
agtacaataataaaattgttaatgaa

SEQ ID NO: 62743 - DNA, 26 bp, Artificial sequence
  SiRNA target sequence
gtacaataataaaattgttaatgaaa

SEQ ID NO: 62744 - DNA, 26 bp, Artificial sequence
  SiRNA target sequence
tacaataataaaattgttaatgaaat

SEQ ID NO: 62745 - DNA, 26 bp, Artificial sequence
  SiRNA target sequence
acaataataaaattgttaatgaaatt

SEQ ID NO: 62746 - DNA, 26 bp, Artificial sequence
  SiRNA target sequence
caataataaaattgttaatgaaattt

SEQ ID NO: 62747 - DNA, 26 bp, Artificial sequence
  SiRNA target sequence
aataataaaattgttaatgaaatttt

SEQ ID NO: 62748 - DNA, 26 bp, Artificial sequence
  SiRNA target sequence
ataataaaattgttaatgaaatttta

SEQ ID NO: 62749 - DNA, 26 bp, Artificial sequence
  SiRNA target sequence
taataaaattgttaatgaaattttat

SEQ ID NO: 62750 - DNA, 26 bp, Artificial sequence
  SiRNA target sequence
aataaaattgttaatgaaattttata

SEQ ID NO: 62751 - DNA, 26 bp, Artificial sequence
  SiRNA target sequence
ataaaattgttaatgaaattttataa

SEQ ID NO: 62752 - DNA, 26 bp, Artificial sequence
  SiRNA target sequence
taaaattgttaatgaaattttataaa

SEQ ID NO: 62753 - DNA, 26 bp, Artificial sequence
  SiRNA target sequence
aaaattgttaatgaaattttataaat

SEQ ID NO: 62754 - DNA, 26 bp, Artificial sequence
  SiRNA target sequence
aaattgttaatgaaattttataaata

SEQ ID NO: 62755 - DNA, 26 bp, Artificial sequence
  SiRNA target sequence
aattgttaatgaaattttataaatat

SEQ ID NO: 62756 - DNA, 26 bp, Artificial sequence
  SiRNA target sequence
attgttaatgaaattttataaatatg

SEQ ID NO: 62757 - DNA, 26 bp, Artificial sequence
  SiRNA target sequence
ttgttaatgaaattttataaatatga

SEQ ID NO: 62758 - DNA, 26 bp, Artificial sequence
  SiRNA target sequence
tgttaatgaaattttataaatatgat

SEQ ID NO: 62759 - DNA, 26 bp, Artificial sequence
  SiRNA target sequence
gttaatgaaattttataaatatgatg

SEQ ID NO: 62760 - DNA, 26 bp, Artificial sequence
  SiRNA target sequence
ttaatgaaattttataaatatgatgg

SEQ ID NO: 62761 - DNA, 26 bp, Artificial sequence
  SiRNA target sequence
taatgaaattttataaatatgatgga

SEQ ID NO: 62762 - DNA, 26 bp, Artificial sequence
  SiRNA target sequence
aatgaaattttataaatatgatggag

SEQ ID NO: 62763 - DNA, 26 bp, Artificial sequence
  SiRNA target sequence
atgaaattttataaatatgatggaga

SEQ ID NO: 62764 - DNA, 26 bp, Artificial sequence
  SiRNA target sequence
tgaaattttataaatatgatggagat

SEQ ID NO: 62765 - DNA, 26 bp, Artificial sequence
  SiRNA target sequence
gaaattttataaatatgatggagata

SEQ ID NO: 62766 - DNA, 26 bp, Artificial sequence
  SiRNA target sequence
aaattttataaatatgatggagatat

SEQ ID NO: 62767 - DNA, 26 bp, Artificial sequence
  SiRNA target sequence
aattttataaatatgatggagatata

SEQ ID NO: 62768 - DNA, 26 bp, Artificial sequence
  SiRNA target sequence
attttataaatatgatggagatatat

SEQ ID NO: 62769 - DNA, 26 bp, Artificial sequence
  SiRNA target sequence
ttttataaatatgatggagatatatt

SEQ ID NO: 62770 - DNA, 26 bp, Artificial sequence
  SiRNA target sequence
tttataaatatgatggagatatatta

SEQ ID NO: 62771 - DNA, 26 bp, Artificial sequence
  SiRNA target sequence
ttataaatatgatggagatatattaa

SEQ ID NO: 62772 - DNA, 26 bp, Artificial sequence
  SiRNA target sequence
tataaatatgatggagatatattaat

SEQ ID NO: 62773 - DNA, 26 bp, Artificial sequence
  SiRNA target sequence
ataaatatgatggagatatattaatt

SEQ ID NO: 62774 - DNA, 26 bp, Artificial sequence
  SiRNA target sequence
taaatatgatggagatatattaattg

SEQ ID NO: 62775 - DNA, 26 bp, Artificial sequence
  SiRNA target sequence
aaatatgatggagatatattaattga

SEQ ID NO: 62776 - DNA, 26 bp, Artificial sequence
  SiRNA target sequence
aatatgatggagatatattaattgat

SEQ ID NO: 62777 - DNA, 26 bp, Artificial sequence
  SiRNA target sequence
atatgatggagatatattaattgatg

SEQ ID NO: 62778 - DNA, 26 bp, Artificial sequence
  SiRNA target sequence
tatgatggagatatattaattgatga

SEQ ID NO: 62779 - DNA, 26 bp, Artificial sequence
  SiRNA target sequence
atgatggagatatattaattgatgat

SEQ ID NO: 62780 - DNA, 26 bp, Artificial sequence
  SiRNA target sequence
tgatggagatatattaattgatgata

SEQ ID NO: 62781 - DNA, 26 bp, Artificial sequence
  SiRNA target sequence
gatggagatatattaattgatgatac

SEQ ID NO: 62782 - DNA, 26 bp, Artificial sequence
  SiRNA target sequence
atggagatatattaattgatgataca

SEQ ID NO: 62783 - DNA, 26 bp, Artificial sequence
  SiRNA target sequence
tggagatatattaattgatgatacag

SEQ ID NO: 62784 - DNA, 26 bp, Artificial sequence
  SiRNA target sequence
ggagatatattaattgatgatacaga

SEQ ID NO: 62785 - DNA, 26 bp, Artificial sequence
  SiRNA target sequence
gagatatattaattgatgatacagaa

SEQ ID NO: 62786 - DNA, 26 bp, Artificial sequence
  SiRNA target sequence
agatatattaattgatgatacagaaa

SEQ ID NO: 62787 - DNA, 26 bp, Artificial sequence
  SiRNA target sequence
gatatattaattgatgatacagaaat

SEQ ID NO: 62788 - DNA, 26 bp, Artificial sequence
  SiRNA target sequence
atatattaattgatgatacagaaata

SEQ ID NO: 62789 - DNA, 26 bp, Artificial sequence
  SiRNA target sequence
tatattaattgatgatacagaaatag

SEQ ID NO: 62790 - DNA, 26 bp, Artificial sequence
  SiRNA target sequence
atattaattgatgatacagaaataga

SEQ ID NO: 62791 - DNA, 26 bp, Artificial sequence
  SiRNA target sequence
tattaattgatgatacagaaatagat

SEQ ID NO: 62792 - DNA, 26 bp, Artificial sequence
  SiRNA target sequence
attaattgatgatacagaaatagata

SEQ ID NO: 62793 - DNA, 26 bp, Artificial sequence
  SiRNA target sequence
ttaattgatgatacagaaatagataa

SEQ ID NO: 62794 - DNA, 26 bp, Artificial sequence
  SiRNA target sequence
taattgatgatacagaaatagataat

SEQ ID NO: 62795 - DNA, 26 bp, Artificial sequence
  SiRNA target sequence
aattgatgatacagaaatagataata

SEQ ID NO: 62796 - DNA, 26 bp, Artificial sequence
  SiRNA target sequence
attgatgatacagaaatagataatat

SEQ ID NO: 62797 - DNA, 26 bp, Artificial sequence
  SiRNA target sequence
ttgatgatacagaaatagataatatt

SEQ ID NO: 62798 - DNA, 26 bp, Artificial sequence
  SiRNA target sequence
tgatgatacagaaatagataatattt

SEQ ID NO: 62799 - DNA, 26 bp, Artificial sequence
  SiRNA target sequence
gatgatacagaaatagataatatttc

SEQ ID NO: 62800 - DNA, 26 bp, Artificial sequence
  SiRNA target sequence
atgatacagaaatagataatatttcg

SEQ ID NO: 62801 - DNA, 26 bp, Artificial sequence
  SiRNA target sequence
tgatacagaaatagataatatttcgg

SEQ ID NO: 62802 - DNA, 26 bp, Artificial sequence
  SiRNA target sequence
gatacagaaatagataatatttcgga

SEQ ID NO: 62803 - DNA, 26 bp, Artificial sequence
  SiRNA target sequence
atacagaaatagataatatttcggat

SEQ ID NO: 62804 - DNA, 26 bp, Artificial sequence
  SiRNA target sequence
tacagaaatagataatatttcggata

SEQ ID NO: 62805 - DNA, 26 bp, Artificial sequence
  SiRNA target sequence
acagaaatagataatatttcggatag

SEQ ID NO: 62806 - DNA, 26 bp, Artificial sequence
  SiRNA target sequence
cagaaatagataatatttcggataga

SEQ ID NO: 62807 - DNA, 26 bp, Artificial sequence
  SiRNA target sequence
agaaatagataatatttcggatagaa

SEQ ID NO: 62808 - DNA, 26 bp, Artificial sequence
  SiRNA target sequence
gaaatagataatatttcggatagaag

SEQ ID NO: 62809 - DNA, 26 bp, Artificial sequence
  SiRNA target sequence
aaatagataatatttcggatagaagt

SEQ ID NO: 62810 - DNA, 26 bp, Artificial sequence
  SiRNA target sequence
aatagataatatttcggatagaagtt

SEQ ID NO: 62811 - DNA, 26 bp, Artificial sequence
  SiRNA target sequence
atagataatatttcggatagaagtta

SEQ ID NO: 62812 - DNA, 26 bp, Artificial sequence
  SiRNA target sequence
tagataatatttcggatagaagttac

SEQ ID NO: 62813 - DNA, 26 bp, Artificial sequence
  SiRNA target sequence
agataatatttcggatagaagttaca

SEQ ID NO: 62814 - DNA, 26 bp, Artificial sequence
  SiRNA target sequence
gataatatttcggatagaagttacag

SEQ ID NO: 62815 - DNA, 26 bp, Artificial sequence
  SiRNA target sequence
ataatatttcggatagaagttacaga

SEQ ID NO: 62816 - DNA, 26 bp, Artificial sequence
  SiRNA target sequence
taatatttcggatagaagttacagaa

SEQ ID NO: 62817 - DNA, 26 bp, Artificial sequence
  SiRNA target sequence
aatatttcggatagaagttacagaag

SEQ ID NO: 62818 - DNA, 26 bp, Artificial sequence
  SiRNA target sequence
atatttcggatagaagttacagaagt

SEQ ID NO: 62819 - DNA, 26 bp, Artificial sequence
  SiRNA target sequence
tatttcggatagaagttacagaagtt

SEQ ID NO: 62820 - DNA, 26 bp, Artificial sequence
  SiRNA target sequence
atttcggatagaagttacagaagttt

SEQ ID NO: 62821 - DNA, 26 bp, Artificial sequence
  SiRNA target sequence
tttcggatagaagttacagaagttta

SEQ ID NO: 62822 - DNA, 26 bp, Artificial sequence
  SiRNA target sequence
ttcggatagaagttacagaagtttaa

SEQ ID NO: 62823 - DNA, 26 bp, Artificial sequence
  SiRNA target sequence
tcggatagaagttacagaagtttaat

SEQ ID NO: 62824 - DNA, 26 bp, Artificial sequence
  SiRNA target sequence
cggatagaagttacagaagtttaata

SEQ ID NO: 62825 - DNA, 26 bp, Artificial sequence
  SiRNA target sequence
ggatagaagttacagaagtttaatat

SEQ ID NO: 62826 - DNA, 26 bp, Artificial sequence
  SiRNA target sequence
gatagaagttacagaagtttaatatc

SEQ ID NO: 62827 - DNA, 26 bp, Artificial sequence
  SiRNA target sequence
atagaagttacagaagtttaatatca

SEQ ID NO: 62828 - DNA, 26 bp, Artificial sequence
  SiRNA target sequence
tagaagttacagaagtttaatatcat

SEQ ID NO: 62829 - DNA, 26 bp, Artificial sequence
  SiRNA target sequence
agaagttacagaagtttaatatcata

SEQ ID NO: 62830 - DNA, 26 bp, Artificial sequence
  SiRNA target sequence
gaagttacagaagtttaatatcatat

SEQ ID NO: 62831 - DNA, 26 bp, Artificial sequence
  SiRNA target sequence
aagttacagaagtttaatatcatatg

SEQ ID NO: 62832 - DNA, 26 bp, Artificial sequence
  SiRNA target sequence
agttacagaagtttaatatcatatgc

SEQ ID NO: 62833 - DNA, 26 bp, Artificial sequence
  SiRNA target sequence
gttacagaagtttaatatcatatgca

SEQ ID NO: 62834 - DNA, 26 bp, Artificial sequence
  SiRNA target sequence
ttacagaagtttaatatcatatgcaa

SEQ ID NO: 62835 - DNA, 26 bp, Artificial sequence
  SiRNA target sequence
tacagaagtttaatatcatatgcaac

SEQ ID NO: 62836 - DNA, 26 bp, Artificial sequence
  SiRNA target sequence
acagaagtttaatatcatatgcaaca

SEQ ID NO: 62837 - DNA, 26 bp, Artificial sequence
  SiRNA target sequence
cagaagtttaatatcatatgcaacac

SEQ ID NO: 62838 - DNA, 26 bp, Artificial sequence
  SiRNA target sequence
agaagtttaatatcatatgcaacaca

SEQ ID NO: 62839 - DNA, 26 bp, Artificial sequence
  SiRNA target sequence
gaagtttaatatcatatgcaacacaa

SEQ ID NO: 62840 - DNA, 26 bp, Artificial sequence
  SiRNA target sequence
aagtttaatatcatatgcaacacaaa

SEQ ID NO: 62841 - DNA, 26 bp, Artificial sequence
  SiRNA target sequence
agtttaatatcatatgcaacacaaaa

SEQ ID NO: 62842 - DNA, 26 bp, Artificial sequence
  SiRNA target sequence
gtttaatatcatatgcaacacaaaac

SEQ ID NO: 62843 - DNA, 26 bp, Artificial sequence
  SiRNA target sequence
tttaatatcatatgcaacacaaaaca

SEQ ID NO: 62844 - DNA, 26 bp, Artificial sequence
  SiRNA target sequence
ttaatatcatatgcaacacaaaacac

SEQ ID NO: 62845 - DNA, 26 bp, Artificial sequence
  SiRNA target sequence
taatatcatatgcaacacaaaacacg

SEQ ID NO: 62846 - DNA, 26 bp, Artificial sequence
  SiRNA target sequence
aatatcatatgcaacacaaaacacgt

SEQ ID NO: 62847 - DNA, 26 bp, Artificial sequence
  SiRNA target sequence
atatcatatgcaacacaaaacacgtt

SEQ ID NO: 62848 - DNA, 26 bp, Artificial sequence
  SiRNA target sequence
tatcatatgcaacacaaaacacgttc

SEQ ID NO: 62849 - DNA, 26 bp, Artificial sequence
  SiRNA target sequence
atcatatgcaacacaaaacacgttct

SEQ ID NO: 62850 - DNA, 26 bp, Artificial sequence
  SiRNA target sequence
tcatatgcaacacaaaacacgttctt

SEQ ID NO: 62851 - DNA, 26 bp, Artificial sequence
  SiRNA target sequence
catatgcaacacaaaacacgttctta

SEQ ID NO: 62852 - DNA, 26 bp, Artificial sequence
  SiRNA target sequence
atatgcaacacaaaacacgttcttat

SEQ ID NO: 62853 - DNA, 26 bp, Artificial sequence
  SiRNA target sequence
tatgcaacacaaaacacgttcttatt

SEQ ID NO: 62854 - DNA, 26 bp, Artificial sequence
  SiRNA target sequence
atgcaacacaaaacacgttcttattc

SEQ ID NO: 62855 - DNA, 26 bp, Artificial sequence
  SiRNA target sequence
tgcaacacaaaacacgttcttattcg

SEQ ID NO: 62856 - DNA, 26 bp, Artificial sequence
  SiRNA target sequence
gcaacacaaaacacgttcttattcga

SEQ ID NO: 62857 - DNA, 26 bp, Artificial sequence
  SiRNA target sequence
caacacaaaacacgttcttattcgat

SEQ ID NO: 62858 - DNA, 26 bp, Artificial sequence
  SiRNA target sequence
aacacaaaacacgttcttattcgata

SEQ ID NO: 62859 - DNA, 26 bp, Artificial sequence
  SiRNA target sequence
acacaaaacacgttcttattcgataa

SEQ ID NO: 62860 - DNA, 26 bp, Artificial sequence
  SiRNA target sequence
cacaaaacacgttcttattcgataat

SEQ ID NO: 62861 - DNA, 26 bp, Artificial sequence
  SiRNA target sequence
acaaaacacgttcttattcgataata

SEQ ID NO: 62862 - DNA, 26 bp, Artificial sequence
  SiRNA target sequence
caaaacacgttcttattcgataatac

SEQ ID NO: 62863 - DNA, 26 bp, Artificial sequence
  SiRNA target sequence
aaaacacgttcttattcgataatact

SEQ ID NO: 62864 - DNA, 26 bp, Artificial sequence
  SiRNA target sequence
aaacacgttcttattcgataatactg

SEQ ID NO: 62865 - DNA, 26 bp, Artificial sequence
  SiRNA target sequence
aacacgttcttattcgataatactgt

SEQ ID NO: 62866 - DNA, 26 bp, Artificial sequence
  SiRNA target sequence
acacgttcttattcgataatactgtg

SEQ ID NO: 62867 - DNA, 26 bp, Artificial sequence
  SiRNA target sequence
cacgttcttattcgataatactgtga

SEQ ID NO: 62868 - DNA, 26 bp, Artificial sequence
  SiRNA target sequence
acgttcttattcgataatactgtgac

SEQ ID NO: 62869 - DNA, 26 bp, Artificial sequence
  SiRNA target sequence
cgttcttattcgataatactgtgaca

SEQ ID NO: 62870 - DNA, 26 bp, Artificial sequence
  SiRNA target sequence
gttcttattcgataatactgtgacat

SEQ ID NO: 62871 - DNA, 26 bp, Artificial sequence
  SiRNA target sequence
ttcttattcgataatactgtgacata

SEQ ID NO: 62872 - DNA, 26 bp, Artificial sequence
  SiRNA target sequence
tcttattcgataatactgtgacatac

SEQ ID NO: 62873 - DNA, 26 bp, Artificial sequence
  SiRNA target sequence
cttattcgataatactgtgacataca

SEQ ID NO: 62874 - DNA, 26 bp, Artificial sequence
  SiRNA target sequence
ttattcgataatactgtgacatacaa

SEQ ID NO: 62875 - DNA, 26 bp, Artificial sequence
  SiRNA target sequence
tattcgataatactgtgacatacaat

SEQ ID NO: 62876 - DNA, 26 bp, Artificial sequence
  SiRNA target sequence
attcgataatactgtgacatacaata

SEQ ID NO: 62877 - DNA, 26 bp, Artificial sequence
  SiRNA target sequence
ttcgataatactgtgacatacaatat

SEQ ID NO: 62878 - DNA, 26 bp, Artificial sequence
  SiRNA target sequence
tcgataatactgtgacatacaatata

SEQ ID NO: 62879 - DNA, 26 bp, Artificial sequence
  SiRNA target sequence
cgataatactgtgacatacaatatat

SEQ ID NO: 62880 - DNA, 26 bp, Artificial sequence
  SiRNA target sequence
gataatactgtgacatacaatatatt

SEQ ID NO: 62881 - DNA, 26 bp, Artificial sequence
  SiRNA target sequence
ataatactgtgacatacaatatattt

SEQ ID NO: 62882 - DNA, 26 bp, Artificial sequence
  SiRNA target sequence
taatactgtgacatacaatatatttt

SEQ ID NO: 62883 - DNA, 26 bp, Artificial sequence
  SiRNA target sequence
aatactgtgacatacaatatatttta

SEQ ID NO: 62884 - DNA, 26 bp, Artificial sequence
  SiRNA target sequence
atactgtgacatacaatatattttac

SEQ ID NO: 62885 - DNA, 26 bp, Artificial sequence
  SiRNA target sequence
tactgtgacatacaatatattttacg

SEQ ID NO: 62886 - DNA, 26 bp, Artificial sequence
  SiRNA target sequence
actgtgacatacaatatattttacgg

SEQ ID NO: 62887 - DNA, 26 bp, Artificial sequence
  SiRNA target sequence
ctgtgacatacaatatattttacggg

SEQ ID NO: 62888 - DNA, 26 bp, Artificial sequence
  SiRNA target sequence
tgtgacatacaatatattttacggga

SEQ ID NO: 62889 - DNA, 26 bp, Artificial sequence
  SiRNA target sequence
gtgacatacaatatattttacgggac

SEQ ID NO: 62890 - DNA, 26 bp, Artificial sequence
  SiRNA target sequence
tgacatacaatatattttacgggact

SEQ ID NO: 62891 - DNA, 26 bp, Artificial sequence
  SiRNA target sequence
gacatacaatatattttacgggacta

SEQ ID NO: 62892 - DNA, 26 bp, Artificial sequence
  SiRNA target sequence
acatacaatatattttacgggactaa

SEQ ID NO: 62893 - DNA, 26 bp, Artificial sequence
  SiRNA target sequence
catacaatatattttacgggactaaa

SEQ ID NO: 62894 - DNA, 26 bp, Artificial sequence
  SiRNA target sequence
atacaatatattttacgggactaaaa

SEQ ID NO: 62895 - DNA, 26 bp, Artificial sequence
  SiRNA target sequence
tacaatatattttacgggactaaaaa

SEQ ID NO: 62896 - DNA, 26 bp, Artificial sequence
  SiRNA target sequence
acaatatattttacgggactaaaaac

SEQ ID NO: 62897 - DNA, 26 bp, Artificial sequence
  SiRNA target sequence
caatatattttacgggactaaaaacg

SEQ ID NO: 62898 - DNA, 26 bp, Artificial sequence
  SiRNA target sequence
aatatattttacgggactaaaaacgt

SEQ ID NO: 62899 - DNA, 26 bp, Artificial sequence
  SiRNA target sequence
atatattttacgggactaaaaacgta

SEQ ID NO: 62900 - DNA, 26 bp, Artificial sequence
  SiRNA target sequence
tatattttacgggactaaaaacgtaa

SEQ ID NO: 62901 - DNA, 26 bp, Artificial sequence
  SiRNA target sequence
atattttacgggactaaaaacgtaac

SEQ ID NO: 62902 - DNA, 26 bp, Artificial sequence
  SiRNA target sequence
tattttacgggactaaaaacgtaaca

SEQ ID NO: 62903 - DNA, 26 bp, Artificial sequence
  SiRNA target sequence
attttacgggactaaaaacgtaacag

SEQ ID NO: 62904 - DNA, 26 bp, Artificial sequence
  SiRNA target sequence
ttttacgggactaaaaacgtaacaga

SEQ ID NO: 62905 - DNA, 26 bp, Artificial sequence
  SiRNA target sequence
tttacgggactaaaaacgtaacagaa

SEQ ID NO: 62906 - DNA, 26 bp, Artificial sequence
  SiRNA target sequence
ttacgggactaaaaacgtaacagaaa

SEQ ID NO: 62907 - DNA, 26 bp, Artificial sequence
  SiRNA target sequence
tacgggactaaaaacgtaacagaaaa

SEQ ID NO: 62908 - DNA, 26 bp, Artificial sequence
  SiRNA target sequence
acgggactaaaaacgtaacagaaaaa

SEQ ID NO: 62909 - DNA, 26 bp, Artificial sequence
  SiRNA target sequence
cgggactaaaaacgtaacagaaaaag

SEQ ID NO: 62910 - DNA, 26 bp, Artificial sequence
  SiRNA target sequence
gggactaaaaacgtaacagaaaaaga

SEQ ID NO: 62911 - DNA, 26 bp, Artificial sequence
  SiRNA target sequence
ggactaaaaacgtaacagaaaaagaa

SEQ ID NO: 62912 - DNA, 26 bp, Artificial sequence
  SiRNA target sequence
gactaaaaacgtaacagaaaaagaag

SEQ ID NO: 62913 - DNA, 26 bp, Artificial sequence
  SiRNA target sequence
actaaaaacgtaacagaaaaagaagt

SEQ ID NO: 62914 - DNA, 26 bp, Artificial sequence
  SiRNA target sequence
ctaaaaacgtaacagaaaaagaagtt

SEQ ID NO: 62915 - DNA, 26 bp, Artificial sequence
  SiRNA target sequence
taaaaacgtaacagaaaaagaagttt

SEQ ID NO: 62916 - DNA, 26 bp, Artificial sequence
  SiRNA target sequence
aaaaacgtaacagaaaaagaagtttt

SEQ ID NO: 62917 - DNA, 26 bp, Artificial sequence
  SiRNA target sequence
aaaacgtaacagaaaaagaagtttta

SEQ ID NO: 62918 - DNA, 26 bp, Artificial sequence
  SiRNA target sequence
aaacgtaacagaaaaagaagttttag

SEQ ID NO: 62919 - DNA, 26 bp, Artificial sequence
  SiRNA target sequence
aacgtaacagaaaaagaagttttaga

SEQ ID NO: 62920 - DNA, 26 bp, Artificial sequence
  SiRNA target sequence
acgtaacagaaaaagaagttttagaa

SEQ ID NO: 62921 - DNA, 26 bp, Artificial sequence
  SiRNA target sequence
cgtaacagaaaaagaagttttagaat

SEQ ID NO: 62922 - DNA, 26 bp, Artificial sequence
  SiRNA target sequence
gtaacagaaaaagaagttttagaatt

SEQ ID NO: 62923 - DNA, 26 bp, Artificial sequence
  SiRNA target sequence
taacagaaaaagaagttttagaatta

SEQ ID NO: 62924 - DNA, 26 bp, Artificial sequence
  SiRNA target sequence
aacagaaaaagaagttttagaattag

SEQ ID NO: 62925 - DNA, 26 bp, Artificial sequence
  SiRNA target sequence
acagaaaaagaagttttagaattagc

SEQ ID NO: 62926 - DNA, 26 bp, Artificial sequence
  SiRNA target sequence
cagaaaaagaagttttagaattagcc

SEQ ID NO: 62927 - DNA, 26 bp, Artificial sequence
  SiRNA target sequence
agaaaaagaagttttagaattagcca

SEQ ID NO: 62928 - DNA, 26 bp, Artificial sequence
  SiRNA target sequence
gaaaaagaagttttagaattagccaa

SEQ ID NO: 62929 - DNA, 26 bp, Artificial sequence
  SiRNA target sequence
aaaaagaagttttagaattagccaaa

SEQ ID NO: 62930 - DNA, 26 bp, Artificial sequence
  SiRNA target sequence
aaaagaagttttagaattagccaaaa

SEQ ID NO: 62931 - DNA, 26 bp, Artificial sequence
  SiRNA target sequence
aaagaagttttagaattagccaaaaa

SEQ ID NO: 62932 - DNA, 26 bp, Artificial sequence
  SiRNA target sequence
aagaagttttagaattagccaaaaaa

SEQ ID NO: 62933 - DNA, 26 bp, Artificial sequence
  SiRNA target sequence
agaagttttagaattagccaaaaaaa

SEQ ID NO: 62934 - DNA, 26 bp, Artificial sequence
  SiRNA target sequence
gaagttttagaattagccaaaaaaat

SEQ ID NO: 62935 - DNA, 26 bp, Artificial sequence
  SiRNA target sequence
aagttttagaattagccaaaaaaata

SEQ ID NO: 62936 - DNA, 26 bp, Artificial sequence
  SiRNA target sequence
agttttagaattagccaaaaaaatag

SEQ ID NO: 62937 - DNA, 26 bp, Artificial sequence
  SiRNA target sequence
gttttagaattagccaaaaaaatagg

SEQ ID NO: 62938 - DNA, 26 bp, Artificial sequence
  SiRNA target sequence
ttttagaattagccaaaaaaataggt

SEQ ID NO: 62939 - DNA, 26 bp, Artificial sequence
  SiRNA target sequence
tttagaattagccaaaaaaataggtg

SEQ ID NO: 62940 - DNA, 26 bp, Artificial sequence
  SiRNA target sequence
ttagaattagccaaaaaaataggtgt

SEQ ID NO: 62941 - DNA, 26 bp, Artificial sequence
  SiRNA target sequence
tagaattagccaaaaaaataggtgta

SEQ ID NO: 62942 - DNA, 26 bp, Artificial sequence
  SiRNA target sequence
agaattagccaaaaaaataggtgtat

SEQ ID NO: 62943 - DNA, 26 bp, Artificial sequence
  SiRNA target sequence
gaattagccaaaaaaataggtgtatt

SEQ ID NO: 62944 - DNA, 26 bp, Artificial sequence
  SiRNA target sequence
aattagccaaaaaaataggtgtatta

SEQ ID NO: 62945 - DNA, 26 bp, Artificial sequence
  SiRNA target sequence
attagccaaaaaaataggtgtattag

SEQ ID NO: 62946 - DNA, 26 bp, Artificial sequence
  SiRNA target sequence
ttagccaaaaaaataggtgtattaga

SEQ ID NO: 62947 - DNA, 26 bp, Artificial sequence
  SiRNA target sequence
tagccaaaaaaataggtgtattagag

SEQ ID NO: 62948 - DNA, 26 bp, Artificial sequence
  SiRNA target sequence
agccaaaaaaataggtgtattagagt

SEQ ID NO: 62949 - DNA, 26 bp, Artificial sequence
  SiRNA target sequence
gccaaaaaaataggtgtattagagtc

SEQ ID NO: 62950 - DNA, 26 bp, Artificial sequence
  SiRNA target sequence
ccaaaaaaataggtgtattagagtct

SEQ ID NO: 62951 - DNA, 26 bp, Artificial sequence
  SiRNA target sequence
caaaaaaataggtgtattagagtcta

SEQ ID NO: 62952 - DNA, 26 bp, Artificial sequence
  SiRNA target sequence
aaaaaaataggtgtattagagtctat

SEQ ID NO: 62953 - DNA, 26 bp, Artificial sequence
  SiRNA target sequence
aaaaaataggtgtattagagtctata

SEQ ID NO: 62954 - DNA, 26 bp, Artificial sequence
  SiRNA target sequence
aaaaataggtgtattagagtctatac

SEQ ID NO: 62955 - DNA, 26 bp, Artificial sequence
  SiRNA target sequence
aaaataggtgtattagagtctataca

SEQ ID NO: 62956 - DNA, 26 bp, Artificial sequence
  SiRNA target sequence
aaataggtgtattagagtctatacag

SEQ ID NO: 62957 - DNA, 26 bp, Artificial sequence
  SiRNA target sequence
aataggtgtattagagtctatacagg

SEQ ID NO: 62958 - DNA, 26 bp, Artificial sequence
  SiRNA target sequence
ataggtgtattagagtctatacagga

SEQ ID NO: 62959 - DNA, 26 bp, Artificial sequence
  SiRNA target sequence
taggtgtattagagtctatacaggaa

SEQ ID NO: 62960 - DNA, 26 bp, Artificial sequence
  SiRNA target sequence
aggtgtattagagtctatacaggaat

SEQ ID NO: 62961 - DNA, 26 bp, Artificial sequence
  SiRNA target sequence
ggtgtattagagtctatacaggaatt

SEQ ID NO: 62962 - DNA, 26 bp, Artificial sequence
  SiRNA target sequence
gtgtattagagtctatacaggaattt

SEQ ID NO: 62963 - DNA, 26 bp, Artificial sequence
  SiRNA target sequence
tgtattagagtctatacaggaattta

SEQ ID NO: 62964 - DNA, 26 bp, Artificial sequence
  SiRNA target sequence
gtattagagtctatacaggaatttaa

SEQ ID NO: 62965 - DNA, 26 bp, Artificial sequence
  SiRNA target sequence
tattagagtctatacaggaatttaaa

SEQ ID NO: 62966 - DNA, 26 bp, Artificial sequence
  SiRNA target sequence
attagagtctatacaggaatttaaag

SEQ ID NO: 62967 - DNA, 26 bp, Artificial sequence
  SiRNA target sequence
ttagagtctatacaggaatttaaaga

SEQ ID NO: 62968 - DNA, 26 bp, Artificial sequence
  SiRNA target sequence
tagagtctatacaggaatttaaagat

SEQ ID NO: 62969 - DNA, 26 bp, Artificial sequence
  SiRNA target sequence
agagtctatacaggaatttaaagatg

SEQ ID NO: 62970 - DNA, 26 bp, Artificial sequence
  SiRNA target sequence
gagtctatacaggaatttaaagatgg

SEQ ID NO: 62971 - DNA, 26 bp, Artificial sequence
  SiRNA target sequence
agtctatacaggaatttaaagatggg

SEQ ID NO: 62972 - DNA, 26 bp, Artificial sequence
  SiRNA target sequence
gtctatacaggaatttaaagatgggt

SEQ ID NO: 62973 - DNA, 26 bp, Artificial sequence
  SiRNA target sequence
tctatacaggaatttaaagatgggtt

SEQ ID NO: 62974 - DNA, 26 bp, Artificial sequence
  SiRNA target sequence
ctatacaggaatttaaagatgggttt

SEQ ID NO: 62975 - DNA, 26 bp, Artificial sequence
  SiRNA target sequence
tatacaggaatttaaagatgggttta

SEQ ID NO: 62976 - DNA, 26 bp, Artificial sequence
  SiRNA target sequence
atacaggaatttaaagatgggtttag

SEQ ID NO: 62977 - DNA, 26 bp, Artificial sequence
  SiRNA target sequence
tacaggaatttaaagatgggtttagc

SEQ ID NO: 62978 - DNA, 26 bp, Artificial sequence
  SiRNA target sequence
acaggaatttaaagatgggtttagca

SEQ ID NO: 62979 - DNA, 26 bp, Artificial sequence
  SiRNA target sequence
caggaatttaaagatgggtttagcac

SEQ ID NO: 62980 - DNA, 26 bp, Artificial sequence
  SiRNA target sequence
aggaatttaaagatgggtttagcaca

SEQ ID NO: 62981 - DNA, 26 bp, Artificial sequence
  SiRNA target sequence
ggaatttaaagatgggtttagcacat

SEQ ID NO: 62982 - DNA, 26 bp, Artificial sequence
  SiRNA target sequence
gaatttaaagatgggtttagcacatc

SEQ ID NO: 62983 - DNA, 26 bp, Artificial sequence
  SiRNA target sequence
aatttaaagatgggtttagcacatcg

SEQ ID NO: 62984 - DNA, 26 bp, Artificial sequence
  SiRNA target sequence
atttaaagatgggtttagcacatcgg

SEQ ID NO: 62985 - DNA, 26 bp, Artificial sequence
  SiRNA target sequence
tttaaagatgggtttagcacatcggt

SEQ ID NO: 62986 - DNA, 26 bp, Artificial sequence
  SiRNA target sequence
ttaaagatgggtttagcacatcggtc

SEQ ID NO: 62987 - DNA, 26 bp, Artificial sequence
  SiRNA target sequence
taaagatgggtttagcacatcggtcg

SEQ ID NO: 62988 - DNA, 26 bp, Artificial sequence
  SiRNA target sequence
aaagatgggtttagcacatcggtcgg

SEQ ID NO: 62989 - DNA, 26 bp, Artificial sequence
  SiRNA target sequence
aagatgggtttagcacatcggtcggt

SEQ ID NO: 62990 - DNA, 26 bp, Artificial sequence
  SiRNA target sequence
agatgggtttagcacatcggtcggtg

SEQ ID NO: 62991 - DNA, 26 bp, Artificial sequence
  SiRNA target sequence
gatgggtttagcacatcggtcggtga

SEQ ID NO: 62992 - DNA, 26 bp, Artificial sequence
  SiRNA target sequence
atgggtttagcacatcggtcggtgaa

SEQ ID NO: 62993 - DNA, 26 bp, Artificial sequence
  SiRNA target sequence
tgggtttagcacatcggtcggtgaac

SEQ ID NO: 62994 - DNA, 26 bp, Artificial sequence
  SiRNA target sequence
gggtttagcacatcggtcggtgaacg

SEQ ID NO: 62995 - DNA, 26 bp, Artificial sequence
  SiRNA target sequence
ggtttagcacatcggtcggtgaacgc

SEQ ID NO: 62996 - DNA, 26 bp, Artificial sequence
  SiRNA target sequence
gtttagcacatcggtcggtgaacgcg

SEQ ID NO: 62997 - DNA, 26 bp, Artificial sequence
  SiRNA target sequence
tttagcacatcggtcggtgaacgcgg

SEQ ID NO: 62998 - DNA, 26 bp, Artificial sequence
  SiRNA target sequence
ttagcacatcggtcggtgaacgcgga

SEQ ID NO: 62999 - DNA, 26 bp, Artificial sequence
  SiRNA target sequence
tagcacatcggtcggtgaacgcggaa

SEQ ID NO: 63000 - DNA, 26 bp, Artificial sequence
  SiRNA target sequence
agcacatcggtcggtgaacgcggaag

SEQ ID NO: 63001 - DNA, 26 bp, Artificial sequence
  SiRNA target sequence
gcacatcggtcggtgaacgcggaaga

SEQ ID NO: 63002 - DNA, 26 bp, Artificial sequence
  SiRNA target sequence
cacatcggtcggtgaacgcggaagat

SEQ ID NO: 63003 - DNA, 26 bp, Artificial sequence
  SiRNA target sequence
acatcggtcggtgaacgcggaagatt

SEQ ID NO: 63004 - DNA, 26 bp, Artificial sequence
  SiRNA target sequence
catcggtcggtgaacgcggaagattt

SEQ ID NO: 63005 - DNA, 26 bp, Artificial sequence
  SiRNA target sequence
atcggtcggtgaacgcggaagatttt

SEQ ID NO: 63006 - DNA, 26 bp, Artificial sequence
  SiRNA target sequence
tcggtcggtgaacgcggaagattttt

SEQ ID NO: 63007 - DNA, 26 bp, Artificial sequence
  SiRNA target sequence
cggtcggtgaacgcggaagattttta

SEQ ID NO: 63008 - DNA, 26 bp, Artificial sequence
  SiRNA target sequence
ggtcggtgaacgcggaagatttttat

SEQ ID NO: 63009 - DNA, 26 bp, Artificial sequence
  SiRNA target sequence
gtcggtgaacgcggaagatttttatc

SEQ ID NO: 63010 - DNA, 26 bp, Artificial sequence
  SiRNA target sequence
tcggtgaacgcggaagatttttatct

SEQ ID NO: 63011 - DNA, 26 bp, Artificial sequence
  SiRNA target sequence
cggtgaacgcggaagatttttatctg

SEQ ID NO: 63012 - DNA, 26 bp, Artificial sequence
  SiRNA target sequence
ggtgaacgcggaagatttttatctgg

SEQ ID NO: 63013 - DNA, 26 bp, Artificial sequence
  SiRNA target sequence
gtgaacgcggaagatttttatctggt

SEQ ID NO: 63014 - DNA, 26 bp, Artificial sequence
  SiRNA target sequence
tgaacgcggaagatttttatctggtg

SEQ ID NO: 63015 - DNA, 26 bp, Artificial sequence
  SiRNA target sequence
gaacgcggaagatttttatctggtgg

SEQ ID NO: 63016 - DNA, 26 bp, Artificial sequence
  SiRNA target sequence
aacgcggaagatttttatctggtggt

SEQ ID NO: 63017 - DNA, 26 bp, Artificial sequence
  SiRNA target sequence
acgcggaagatttttatctggtggtg

SEQ ID NO: 63018 - DNA, 26 bp, Artificial sequence
  SiRNA target sequence
cgcggaagatttttatctggtggtga

SEQ ID NO: 63019 - DNA, 26 bp, Artificial sequence
  SiRNA target sequence
gcggaagatttttatctggtggtgaa

SEQ ID NO: 63020 - DNA, 26 bp, Artificial sequence
  SiRNA target sequence
cggaagatttttatctggtggtgaaa

SEQ ID NO: 63021 - DNA, 26 bp, Artificial sequence
  SiRNA target sequence
ggaagatttttatctggtggtgaaag

SEQ ID NO: 63022 - DNA, 26 bp, Artificial sequence
  SiRNA target sequence
gaagatttttatctggtggtgaaagg

SEQ ID NO: 63023 - DNA, 26 bp, Artificial sequence
  SiRNA target sequence
aagatttttatctggtggtgaaaggc

SEQ ID NO: 63024 - DNA, 26 bp, Artificial sequence
  SiRNA target sequence
agatttttatctggtggtgaaaggca

SEQ ID NO: 63025 - DNA, 26 bp, Artificial sequence
  SiRNA target sequence
gatttttatctggtggtgaaaggcaa

SEQ ID NO: 63026 - DNA, 26 bp, Artificial sequence
  SiRNA target sequence
atttttatctggtggtgaaaggcaaa

SEQ ID NO: 63027 - DNA, 26 bp, Artificial sequence
  SiRNA target sequence
tttttatctggtggtgaaaggcaaaa

SEQ ID NO: 63028 - DNA, 26 bp, Artificial sequence
  SiRNA target sequence
ttttatctggtggtgaaaggcaaaaa

SEQ ID NO: 63029 - DNA, 26 bp, Artificial sequence
  SiRNA target sequence
tttatctggtggtgaaaggcaaaaaa

SEQ ID NO: 63030 - DNA, 26 bp, Artificial sequence
  SiRNA target sequence
ttatctggtggtgaaaggcaaaaaat

SEQ ID NO: 63031 - DNA, 26 bp, Artificial sequence
  SiRNA target sequence
tatctggtggtgaaaggcaaaaaatt

SEQ ID NO: 63032 - DNA, 26 bp, Artificial sequence
  SiRNA target sequence
atctggtggtgaaaggcaaaaaatta

SEQ ID NO: 63033 - DNA, 26 bp, Artificial sequence
  SiRNA target sequence
tctggtggtgaaaggcaaaaaattat

SEQ ID NO: 63034 - DNA, 26 bp, Artificial sequence
  SiRNA target sequence
ctggtggtgaaaggcaaaaaattatg

SEQ ID NO: 63035 - DNA, 26 bp, Artificial sequence
  SiRNA target sequence
tggtggtgaaaggcaaaaaattatgc

SEQ ID NO: 63036 - DNA, 26 bp, Artificial sequence
  SiRNA target sequence
ggtggtgaaaggcaaaaaattatgct

SEQ ID NO: 63037 - DNA, 26 bp, Artificial sequence
  SiRNA target sequence
gtggtgaaaggcaaaaaattatgctg

SEQ ID NO: 63038 - DNA, 26 bp, Artificial sequence
  SiRNA target sequence
tggtgaaaggcaaaaaattatgctga

SEQ ID NO: 63039 - DNA, 26 bp, Artificial sequence
  SiRNA target sequence
ggtgaaaggcaaaaaattatgctgat

SEQ ID NO: 63040 - DNA, 26 bp, Artificial sequence
  SiRNA target sequence
gtgaaaggcaaaaaattatgctgatg

SEQ ID NO: 63041 - DNA, 26 bp, Artificial sequence
  SiRNA target sequence
tgaaaggcaaaaaattatgctgatgc

SEQ ID NO: 63042 - DNA, 26 bp, Artificial sequence
  SiRNA target sequence
gaaaggcaaaaaattatgctgatgcg

SEQ ID NO: 63043 - DNA, 26 bp, Artificial sequence
  SiRNA target sequence
aaaggcaaaaaattatgctgatgcgt

SEQ ID NO: 63044 - DNA, 26 bp, Artificial sequence
  SiRNA target sequence
aaggcaaaaaattatgctgatgcgtg

SEQ ID NO: 63045 - DNA, 26 bp, Artificial sequence
  SiRNA target sequence
aggcaaaaaattatgctgatgcgtgc

SEQ ID NO: 63046 - DNA, 26 bp, Artificial sequence
  SiRNA target sequence
ggcaaaaaattatgctgatgcgtgca

SEQ ID NO: 63047 - DNA, 26 bp, Artificial sequence
  SiRNA target sequence
gcaaaaaattatgctgatgcgtgcat

SEQ ID NO: 63048 - DNA, 26 bp, Artificial sequence
  SiRNA target sequence
caaaaaattatgctgatgcgtgcatt

SEQ ID NO: 63049 - DNA, 26 bp, Artificial sequence
  SiRNA target sequence
aaaaaattatgctgatgcgtgcattg

SEQ ID NO: 63050 - DNA, 26 bp, Artificial sequence
  SiRNA target sequence
aaaaattatgctgatgcgtgcattgc

SEQ ID NO: 63051 - DNA, 26 bp, Artificial sequence
  SiRNA target sequence
aaaattatgctgatgcgtgcattgct

SEQ ID NO: 63052 - DNA, 26 bp, Artificial sequence
  SiRNA target sequence
aaattatgctgatgcgtgcattgctt

SEQ ID NO: 63053 - DNA, 26 bp, Artificial sequence
  SiRNA target sequence
aattatgctgatgcgtgcattgctta

SEQ ID NO: 63054 - DNA, 26 bp, Artificial sequence
  SiRNA target sequence
attatgctgatgcgtgcattgcttaa

SEQ ID NO: 63055 - DNA, 26 bp, Artificial sequence
  SiRNA target sequence
ttatgctgatgcgtgcattgcttaaa

SEQ ID NO: 63056 - DNA, 26 bp, Artificial sequence
  SiRNA target sequence
tatgctgatgcgtgcattgcttaaaa

SEQ ID NO: 63057 - DNA, 26 bp, Artificial sequence
  SiRNA target sequence
atgctgatgcgtgcattgcttaaaaa

SEQ ID NO: 63058 - DNA, 26 bp, Artificial sequence
  SiRNA target sequence
tgctgatgcgtgcattgcttaaaaat

SEQ ID NO: 63059 - DNA, 26 bp, Artificial sequence
  SiRNA target sequence
gctgatgcgtgcattgcttaaaaatt

SEQ ID NO: 63060 - DNA, 26 bp, Artificial sequence
  SiRNA target sequence
ctgatgcgtgcattgcttaaaaattc

SEQ ID NO: 63061 - DNA, 26 bp, Artificial sequence
  SiRNA target sequence
tgatgcgtgcattgcttaaaaattca

SEQ ID NO: 63062 - DNA, 26 bp, Artificial sequence
  SiRNA target sequence
gatgcgtgcattgcttaaaaattcag

SEQ ID NO: 63063 - DNA, 26 bp, Artificial sequence
  SiRNA target sequence
atgcgtgcattgcttaaaaattcaga

SEQ ID NO: 63064 - DNA, 26 bp, Artificial sequence
  SiRNA target sequence
tgcgtgcattgcttaaaaattcagag

SEQ ID NO: 63065 - DNA, 26 bp, Artificial sequence
  SiRNA target sequence
gcgtgcattgcttaaaaattcagaga

SEQ ID NO: 63066 - DNA, 26 bp, Artificial sequence
  SiRNA target sequence
cgtgcattgcttaaaaattcagagat

SEQ ID NO: 63067 - DNA, 26 bp, Artificial sequence
  SiRNA target sequence
gtgcattgcttaaaaattcagagatc

SEQ ID NO: 63068 - DNA, 26 bp, Artificial sequence
  SiRNA target sequence
tgcattgcttaaaaattcagagatcg

SEQ ID NO: 63069 - DNA, 26 bp, Artificial sequence
  SiRNA target sequence
gcattgcttaaaaattcagagatcgt

SEQ ID NO: 63070 - DNA, 26 bp, Artificial sequence
  SiRNA target sequence
cattgcttaaaaattcagagatcgtt

SEQ ID NO: 63071 - DNA, 26 bp, Artificial sequence
  SiRNA target sequence
attgcttaaaaattcagagatcgttt

SEQ ID NO: 63072 - DNA, 26 bp, Artificial sequence
  SiRNA target sequence
ttgcttaaaaattcagagatcgtttt

SEQ ID NO: 63073 - DNA, 26 bp, Artificial sequence
  SiRNA target sequence
tgcttaaaaattcagagatcgtttta

SEQ ID NO: 63074 - DNA, 26 bp, Artificial sequence
  SiRNA target sequence
gcttaaaaattcagagatcgttttat

SEQ ID NO: 63075 - DNA, 26 bp, Artificial sequence
  SiRNA target sequence
cttaaaaattcagagatcgttttatt

SEQ ID NO: 63076 - DNA, 26 bp, Artificial sequence
  SiRNA target sequence
ttaaaaattcagagatcgttttatta

SEQ ID NO: 63077 - DNA, 26 bp, Artificial sequence
  SiRNA target sequence
taaaaattcagagatcgttttattag

SEQ ID NO: 63078 - DNA, 26 bp, Artificial sequence
  SiRNA target sequence
aaaaattcagagatcgttttattaga

SEQ ID NO: 63079 - DNA, 26 bp, Artificial sequence
  SiRNA target sequence
aaaattcagagatcgttttattagac

SEQ ID NO: 63080 - DNA, 26 bp, Artificial sequence
  SiRNA target sequence
aaattcagagatcgttttattagacg

SEQ ID NO: 63081 - DNA, 26 bp, Artificial sequence
  SiRNA target sequence
aattcagagatcgttttattagacga

SEQ ID NO: 63082 - DNA, 26 bp, Artificial sequence
  SiRNA target sequence
attcagagatcgttttattagacgag

SEQ ID NO: 63083 - DNA, 26 bp, Artificial sequence
  SiRNA target sequence
ttcagagatcgttttattagacgagc

SEQ ID NO: 63084 - DNA, 26 bp, Artificial sequence
  SiRNA target sequence
tcagagatcgttttattagacgagcc

SEQ ID NO: 63085 - DNA, 26 bp, Artificial sequence
  SiRNA target sequence
cagagatcgttttattagacgagcca

SEQ ID NO: 63086 - DNA, 26 bp, Artificial sequence
  SiRNA target sequence
agagatcgttttattagacgagccaa

SEQ ID NO: 63087 - DNA, 26 bp, Artificial sequence
  SiRNA target sequence
gagatcgttttattagacgagccaac

SEQ ID NO: 63088 - DNA, 26 bp, Artificial sequence
  SiRNA target sequence
agatcgttttattagacgagccaacc

SEQ ID NO: 63089 - DNA, 26 bp, Artificial sequence
  SiRNA target sequence
gatcgttttattagacgagccaacct

SEQ ID NO: 63090 - DNA, 26 bp, Artificial sequence
  SiRNA target sequence
atcgttttattagacgagccaacctc

SEQ ID NO: 63091 - DNA, 26 bp, Artificial sequence
  SiRNA target sequence
tcgttttattagacgagccaacctca

SEQ ID NO: 63092 - DNA, 26 bp, Artificial sequence
  SiRNA target sequence
cgttttattagacgagccaacctcag

SEQ ID NO: 63093 - DNA, 26 bp, Artificial sequence
  SiRNA target sequence
gttttattagacgagccaacctcagc

SEQ ID NO: 63094 - DNA, 26 bp, Artificial sequence
  SiRNA target sequence
ttttattagacgagccaacctcagca

SEQ ID NO: 63095 - DNA, 26 bp, Artificial sequence
  SiRNA target sequence
tttattagacgagccaacctcagcac

SEQ ID NO: 63096 - DNA, 26 bp, Artificial sequence
  SiRNA target sequence
ttattagacgagccaacctcagcact

SEQ ID NO: 63097 - DNA, 26 bp, Artificial sequence
  SiRNA target sequence
tattagacgagccaacctcagcacta

SEQ ID NO: 63098 - DNA, 26 bp, Artificial sequence
  SiRNA target sequence
attagacgagccaacctcagcactag

SEQ ID NO: 63099 - DNA, 26 bp, Artificial sequence
  SiRNA target sequence
ttagacgagccaacctcagcactaga

SEQ ID NO: 63100 - DNA, 26 bp, Artificial sequence
  SiRNA target sequence
tagacgagccaacctcagcactagat

SEQ ID NO: 63101 - DNA, 26 bp, Artificial sequence
  SiRNA target sequence
agacgagccaacctcagcactagata

SEQ ID NO: 63102 - DNA, 26 bp, Artificial sequence
  SiRNA target sequence
gacgagccaacctcagcactagataa

SEQ ID NO: 63103 - DNA, 26 bp, Artificial sequence
  SiRNA target sequence
acgagccaacctcagcactagataaa

SEQ ID NO: 63104 - DNA, 26 bp, Artificial sequence
  SiRNA target sequence
cgagccaacctcagcactagataaaa

SEQ ID NO: 63105 - DNA, 26 bp, Artificial sequence
  SiRNA target sequence
gagccaacctcagcactagataaaaa

SEQ ID NO: 63106 - DNA, 26 bp, Artificial sequence
  SiRNA target sequence
agccaacctcagcactagataaaaag

SEQ ID NO: 63107 - DNA, 26 bp, Artificial sequence
  SiRNA target sequence
gccaacctcagcactagataaaaaga

SEQ ID NO: 63108 - DNA, 26 bp, Artificial sequence
  SiRNA target sequence
ccaacctcagcactagataaaaagag

SEQ ID NO: 63109 - DNA, 26 bp, Artificial sequence
  SiRNA target sequence
caacctcagcactagataaaaagagt

SEQ ID NO: 63110 - DNA, 26 bp, Artificial sequence
  SiRNA target sequence
aacctcagcactagataaaaagagtg

SEQ ID NO: 63111 - DNA, 26 bp, Artificial sequence
  SiRNA target sequence
acctcagcactagataaaaagagtga

SEQ ID NO: 63112 - DNA, 26 bp, Artificial sequence
  SiRNA target sequence
cctcagcactagataaaaagagtgaa

SEQ ID NO: 63113 - DNA, 26 bp, Artificial sequence
  SiRNA target sequence
ctcagcactagataaaaagagtgaac

SEQ ID NO: 63114 - DNA, 26 bp, Artificial sequence
  SiRNA target sequence
tcagcactagataaaaagagtgaact

SEQ ID NO: 63115 - DNA, 26 bp, Artificial sequence
  SiRNA target sequence
cagcactagataaaaagagtgaacta

SEQ ID NO: 63116 - DNA, 26 bp, Artificial sequence
  SiRNA target sequence
agcactagataaaaagagtgaactag

SEQ ID NO: 63117 - DNA, 26 bp, Artificial sequence
  SiRNA target sequence
gcactagataaaaagagtgaactaga

SEQ ID NO: 63118 - DNA, 26 bp, Artificial sequence
  SiRNA target sequence
cactagataaaaagagtgaactagaa

SEQ ID NO: 63119 - DNA, 26 bp, Artificial sequence
  SiRNA target sequence
actagataaaaagagtgaactagaaa

SEQ ID NO: 63120 - DNA, 26 bp, Artificial sequence
  SiRNA target sequence
ctagataaaaagagtgaactagaaac

SEQ ID NO: 63121 - DNA, 26 bp, Artificial sequence
  SiRNA target sequence
tagataaaaagagtgaactagaaact

SEQ ID NO: 63122 - DNA, 26 bp, Artificial sequence
  SiRNA target sequence
agataaaaagagtgaactagaaacta

SEQ ID NO: 63123 - DNA, 26 bp, Artificial sequence
  SiRNA target sequence
gataaaaagagtgaactagaaactat

SEQ ID NO: 63124 - DNA, 26 bp, Artificial sequence
  SiRNA target sequence
ataaaaagagtgaactagaaactatg

SEQ ID NO: 63125 - DNA, 26 bp, Artificial sequence
  SiRNA target sequence
taaaaagagtgaactagaaactatga

SEQ ID NO: 63126 - DNA, 26 bp, Artificial sequence
  SiRNA target sequence
aaaaagagtgaactagaaactatgac

SEQ ID NO: 63127 - DNA, 26 bp, Artificial sequence
  SiRNA target sequence
aaaagagtgaactagaaactatgaca

SEQ ID NO: 63128 - DNA, 26 bp, Artificial sequence
  SiRNA target sequence
aaagagtgaactagaaactatgacat

SEQ ID NO: 63129 - DNA, 26 bp, Artificial sequence
  SiRNA target sequence
aagagtgaactagaaactatgacata

SEQ ID NO: 63130 - DNA, 26 bp, Artificial sequence
  SiRNA target sequence
agagtgaactagaaactatgacatat

SEQ ID NO: 63131 - DNA, 26 bp, Artificial sequence
  SiRNA target sequence
gagtgaactagaaactatgacatata

SEQ ID NO: 63132 - DNA, 26 bp, Artificial sequence
  SiRNA target sequence
agtgaactagaaactatgacatatat

SEQ ID NO: 63133 - DNA, 26 bp, Artificial sequence
  SiRNA target sequence
gtgaactagaaactatgacatatatt

SEQ ID NO: 63134 - DNA, 26 bp, Artificial sequence
  SiRNA target sequence
tgaactagaaactatgacatatattt

SEQ ID NO: 63135 - DNA, 26 bp, Artificial sequence
  SiRNA target sequence
gaactagaaactatgacatatatttt

SEQ ID NO: 63136 - DNA, 26 bp, Artificial sequence
  SiRNA target sequence
aactagaaactatgacatatattttt

SEQ ID NO: 63137 - DNA, 26 bp, Artificial sequence
  SiRNA target sequence
actagaaactatgacatatattttta

SEQ ID NO: 63138 - DNA, 26 bp, Artificial sequence
  SiRNA target sequence
ctagaaactatgacatatatttttaa

SEQ ID NO: 63139 - DNA, 26 bp, Artificial sequence
  SiRNA target sequence
tagaaactatgacatatatttttaat

SEQ ID NO: 63140 - DNA, 26 bp, Artificial sequence
  SiRNA target sequence
agaaactatgacatatatttttaatg

SEQ ID NO: 63141 - DNA, 26 bp, Artificial sequence
  SiRNA target sequence
gaaactatgacatatatttttaatga

SEQ ID NO: 63142 - DNA, 26 bp, Artificial sequence
  SiRNA target sequence
aaactatgacatatatttttaatgaa

SEQ ID NO: 63143 - DNA, 26 bp, Artificial sequence
  SiRNA target sequence
aactatgacatatatttttaatgaat

SEQ ID NO: 63144 - DNA, 26 bp, Artificial sequence
  SiRNA target sequence
actatgacatatatttttaatgaatt

SEQ ID NO: 63145 - DNA, 26 bp, Artificial sequence
  SiRNA target sequence
ctatgacatatatttttaatgaattt

SEQ ID NO: 63146 - DNA, 26 bp, Artificial sequence
  SiRNA target sequence
tatgacatatatttttaatgaattta

SEQ ID NO: 63147 - DNA, 26 bp, Artificial sequence
  SiRNA target sequence
atgacatatatttttaatgaatttaa

SEQ ID NO: 63148 - DNA, 26 bp, Artificial sequence
  SiRNA target sequence
tgacatatatttttaatgaatttaag

SEQ ID NO: 63149 - DNA, 26 bp, Artificial sequence
  SiRNA target sequence
gacatatatttttaatgaatttaagt

SEQ ID NO: 63150 - DNA, 26 bp, Artificial sequence
  SiRNA target sequence
acatatatttttaatgaatttaagta

SEQ ID NO: 63151 - DNA, 26 bp, Artificial sequence
  SiRNA target sequence
catatatttttaatgaatttaagtac

SEQ ID NO: 63152 - DNA, 26 bp, Artificial sequence
  SiRNA target sequence
atatatttttaatgaatttaagtacc

SEQ ID NO: 63153 - DNA, 26 bp, Artificial sequence
  SiRNA target sequence
tatatttttaatgaatttaagtacca

SEQ ID NO: 63154 - DNA, 26 bp, Artificial sequence
  SiRNA target sequence
atatttttaatgaatttaagtaccat

SEQ ID NO: 63155 - DNA, 26 bp, Artificial sequence
  SiRNA target sequence
tatttttaatgaatttaagtaccata

SEQ ID NO: 63156 - DNA, 26 bp, Artificial sequence
  SiRNA target sequence
atttttaatgaatttaagtaccatac

SEQ ID NO: 63157 - DNA, 26 bp, Artificial sequence
  SiRNA target sequence
tttttaatgaatttaagtaccatact

SEQ ID NO: 63158 - DNA, 26 bp, Artificial sequence
  SiRNA target sequence
ttttaatgaatttaagtaccatactt

SEQ ID NO: 63159 - DNA, 26 bp, Artificial sequence
  SiRNA target sequence
tttaatgaatttaagtaccatacttt

SEQ ID NO: 63160 - DNA, 26 bp, Artificial sequence
  SiRNA target sequence
ttaatgaatttaagtaccatactttt

SEQ ID NO: 63161 - DNA, 26 bp, Artificial sequence
  SiRNA target sequence
taatgaatttaagtaccatacttttg

SEQ ID NO: 63162 - DNA, 26 bp, Artificial sequence
  SiRNA target sequence
aatgaatttaagtaccatacttttgt

SEQ ID NO: 63163 - DNA, 26 bp, Artificial sequence
  SiRNA target sequence
atgaatttaagtaccatacttttgta

SEQ ID NO: 63164 - DNA, 26 bp, Artificial sequence
  SiRNA target sequence
tgaatttaagtaccatacttttgtaa

SEQ ID NO: 63165 - DNA, 26 bp, Artificial sequence
  SiRNA target sequence
gaatttaagtaccatacttttgtaat

SEQ ID NO: 63166 - DNA, 26 bp, Artificial sequence
  SiRNA target sequence
aatttaagtaccatacttttgtaata

SEQ ID NO: 63167 - DNA, 26 bp, Artificial sequence
  SiRNA target sequence
atttaagtaccatacttttgtaataa

SEQ ID NO: 63168 - DNA, 26 bp, Artificial sequence
  SiRNA target sequence
tttaagtaccatacttttgtaataat

SEQ ID NO: 63169 - DNA, 26 bp, Artificial sequence
  SiRNA target sequence
ttaagtaccatacttttgtaataatt

SEQ ID NO: 63170 - DNA, 26 bp, Artificial sequence
  SiRNA target sequence
taagtaccatacttttgtaataattg

SEQ ID NO: 63171 - DNA, 26 bp, Artificial sequence
  SiRNA target sequence
aagtaccatacttttgtaataattgt

SEQ ID NO: 63172 - DNA, 26 bp, Artificial sequence
  SiRNA target sequence
agtaccatacttttgtaataattgta

SEQ ID NO: 63173 - DNA, 26 bp, Artificial sequence
  SiRNA target sequence
gtaccatacttttgtaataattgtac

SEQ ID NO: 63174 - DNA, 26 bp, Artificial sequence
  SiRNA target sequence
taccatacttttgtaataattgtaca

SEQ ID NO: 63175 - DNA, 26 bp, Artificial sequence
  SiRNA target sequence
accatacttttgtaataattgtacac

SEQ ID NO: 63176 - DNA, 26 bp, Artificial sequence
  SiRNA target sequence
ccatacttttgtaataattgtacaca

SEQ ID NO: 63177 - DNA, 26 bp, Artificial sequence
  SiRNA target sequence
catacttttgtaataattgtacacaa

SEQ ID NO: 63178 - DNA, 26 bp, Artificial sequence
  SiRNA target sequence
atacttttgtaataattgtacacaat

SEQ ID NO: 63179 - DNA, 26 bp, Artificial sequence
  SiRNA target sequence
tacttttgtaataattgtacacaatc

SEQ ID NO: 63180 - DNA, 26 bp, Artificial sequence
  SiRNA target sequence
acttttgtaataattgtacacaatct

SEQ ID NO: 63181 - DNA, 26 bp, Artificial sequence
  SiRNA target sequence
cttttgtaataattgtacacaatcta

SEQ ID NO: 63182 - DNA, 26 bp, Artificial sequence
  SiRNA target sequence
ttttgtaataattgtacacaatctag

SEQ ID NO: 63183 - DNA, 26 bp, Artificial sequence
  SiRNA target sequence
tttgtaataattgtacacaatctaga

SEQ ID NO: 63184 - DNA, 26 bp, Artificial sequence
  SiRNA target sequence
ttgtaataattgtacacaatctagaa

SEQ ID NO: 63185 - DNA, 26 bp, Artificial sequence
  SiRNA target sequence
tgtaataattgtacacaatctagaat

SEQ ID NO: 63186 - DNA, 26 bp, Artificial sequence
  SiRNA target sequence
gtaataattgtacacaatctagaatt

SEQ ID NO: 63187 - DNA, 26 bp, Artificial sequence
  SiRNA target sequence
taataattgtacacaatctagaatta

SEQ ID NO: 63188 - DNA, 26 bp, Artificial sequence
  SiRNA target sequence
aataattgtacacaatctagaattat

SEQ ID NO: 63189 - DNA, 26 bp, Artificial sequence
  SiRNA target sequence
ataattgtacacaatctagaattatt

SEQ ID NO: 63190 - DNA, 26 bp, Artificial sequence
  SiRNA target sequence
taattgtacacaatctagaattattg

SEQ ID NO: 63191 - DNA, 26 bp, Artificial sequence
  SiRNA target sequence
aattgtacacaatctagaattattgg

SEQ ID NO: 63192 - DNA, 26 bp, Artificial sequence
  SiRNA target sequence
attgtacacaatctagaattattggc

SEQ ID NO: 63193 - DNA, 26 bp, Artificial sequence
  SiRNA target sequence
ttgtacacaatctagaattattggct

SEQ ID NO: 63194 - DNA, 26 bp, Artificial sequence
  SiRNA target sequence
tgtacacaatctagaattattggctt

SEQ ID NO: 63195 - DNA, 26 bp, Artificial sequence
  SiRNA target sequence
gtacacaatctagaattattggcttt

SEQ ID NO: 63196 - DNA, 26 bp, Artificial sequence
  SiRNA target sequence
tacacaatctagaattattggctttg

SEQ ID NO: 63197 - DNA, 26 bp, Artificial sequence
  SiRNA target sequence
acacaatctagaattattggctttgt

SEQ ID NO: 63198 - DNA, 26 bp, Artificial sequence
  SiRNA target sequence
cacaatctagaattattggctttgtt

SEQ ID NO: 63199 - DNA, 26 bp, Artificial sequence
  SiRNA target sequence
acaatctagaattattggctttgttt

SEQ ID NO: 63200 - DNA, 26 bp, Artificial sequence
  SiRNA target sequence
caatctagaattattggctttgtttg

SEQ ID NO: 63201 - DNA, 26 bp, Artificial sequence
  SiRNA target sequence
aatctagaattattggctttgtttga

SEQ ID NO: 63202 - DNA, 26 bp, Artificial sequence
  SiRNA target sequence
atctagaattattggctttgtttgat

SEQ ID NO: 63203 - DNA, 26 bp, Artificial sequence
  SiRNA target sequence
tctagaattattggctttgtttgata

SEQ ID NO: 63204 - DNA, 26 bp, Artificial sequence
  SiRNA target sequence
ctagaattattggctttgtttgataa

SEQ ID NO: 63205 - DNA, 26 bp, Artificial sequence
  SiRNA target sequence
tagaattattggctttgtttgataaa

SEQ ID NO: 63206 - DNA, 26 bp, Artificial sequence
  SiRNA target sequence
agaattattggctttgtttgataaaa

SEQ ID NO: 63207 - DNA, 26 bp, Artificial sequence
  SiRNA target sequence
gaattattggctttgtttgataaaat

SEQ ID NO: 63208 - DNA, 26 bp, Artificial sequence
  SiRNA target sequence
aattattggctttgtttgataaaatt

SEQ ID NO: 63209 - DNA, 26 bp, Artificial sequence
  SiRNA target sequence
attattggctttgtttgataaaattt

SEQ ID NO: 63210 - DNA, 26 bp, Artificial sequence
  SiRNA target sequence
ttattggctttgtttgataaaatttt

SEQ ID NO: 63211 - DNA, 26 bp, Artificial sequence
  SiRNA target sequence
tattggctttgtttgataaaatttta

SEQ ID NO: 63212 - DNA, 26 bp, Artificial sequence
  SiRNA target sequence
attggctttgtttgataaaattttat

SEQ ID NO: 63213 - DNA, 26 bp, Artificial sequence
  SiRNA target sequence
ttggctttgtttgataaaattttatt

SEQ ID NO: 63214 - DNA, 26 bp, Artificial sequence
  SiRNA target sequence
tggctttgtttgataaaattttattt

SEQ ID NO: 63215 - DNA, 26 bp, Artificial sequence
  SiRNA target sequence
ggctttgtttgataaaattttatttg

SEQ ID NO: 63216 - DNA, 26 bp, Artificial sequence
  SiRNA target sequence
gctttgtttgataaaattttatttgt

SEQ ID NO: 63217 - DNA, 26 bp, Artificial sequence
  SiRNA target sequence
ctttgtttgataaaattttatttgta

SEQ ID NO: 63218 - DNA, 26 bp, Artificial sequence
  SiRNA target sequence
tttgtttgataaaattttatttgtaa

SEQ ID NO: 63219 - DNA, 26 bp, Artificial sequence
  SiRNA target sequence
ttgtttgataaaattttatttgtaaa

SEQ ID NO: 63220 - DNA, 26 bp, Artificial sequence
  SiRNA target sequence
tgtttgataaaattttatttgtaaat

SEQ ID NO: 63221 - DNA, 26 bp, Artificial sequence
  SiRNA target sequence
gtttgataaaattttatttgtaaatg

SEQ ID NO: 63222 - DNA, 26 bp, Artificial sequence
  SiRNA target sequence
tttgataaaattttatttgtaaatgg

SEQ ID NO: 63223 - DNA, 26 bp, Artificial sequence
  SiRNA target sequence
ttgataaaattttatttgtaaatggt

SEQ ID NO: 63224 - DNA, 26 bp, Artificial sequence
  SiRNA target sequence
tgataaaattttatttgtaaatggta

SEQ ID NO: 63225 - DNA, 26 bp, Artificial sequence
  SiRNA target sequence
gataaaattttatttgtaaatggtaa

SEQ ID NO: 63226 - DNA, 26 bp, Artificial sequence
  SiRNA target sequence
ataaaattttatttgtaaatggtaat

SEQ ID NO: 63227 - DNA, 26 bp, Artificial sequence
  SiRNA target sequence
taaaattttatttgtaaatggtaatg

SEQ ID NO: 63228 - DNA, 26 bp, Artificial sequence
  SiRNA target sequence
aaaattttatttgtaaatggtaatga

SEQ ID NO: 63229 - DNA, 26 bp, Artificial sequence
  SiRNA target sequence
aaattttatttgtaaatggtaatgag

SEQ ID NO: 63230 - DNA, 26 bp, Artificial sequence
  SiRNA target sequence
aattttatttgtaaatggtaatgagg

SEQ ID NO: 63231 - DNA, 26 bp, Artificial sequence
  SiRNA target sequence
attttatttgtaaatggtaatgaggt

SEQ ID NO: 63232 - DNA, 26 bp, Artificial sequence
  SiRNA target sequence
ttttatttgtaaatggtaatgaggta

SEQ ID NO: 63233 - DNA, 26 bp, Artificial sequence
  SiRNA target sequence
tttatttgtaaatggtaatgaggtaa

SEQ ID NO: 63234 - DNA, 26 bp, Artificial sequence
  SiRNA target sequence
ttatttgtaaatggtaatgaggtaac

SEQ ID NO: 63235 - DNA, 26 bp, Artificial sequence
  SiRNA target sequence
tatttgtaaatggtaatgaggtaaca

SEQ ID NO: 63236 - DNA, 26 bp, Artificial sequence
  SiRNA target sequence
atttgtaaatggtaatgaggtaacaa

SEQ ID NO: 63237 - DNA, 26 bp, Artificial sequence
  SiRNA target sequence
tttgtaaatggtaatgaggtaacaat

SEQ ID NO: 63238 - DNA, 26 bp, Artificial sequence
  SiRNA target sequence
ttgtaaatggtaatgaggtaacaatg

SEQ ID NO: 63239 - DNA, 26 bp, Artificial sequence
  SiRNA target sequence
tgtaaatggtaatgaggtaacaatga

SEQ ID NO: 63240 - DNA, 26 bp, Artificial sequence
  SiRNA target sequence
gtaaatggtaatgaggtaacaatgat

SEQ ID NO: 63241 - DNA, 26 bp, Artificial sequence
  SiRNA target sequence
taaatggtaatgaggtaacaatgata

SEQ ID NO: 63242 - DNA, 26 bp, Artificial sequence
  SiRNA target sequence
aaatggtaatgaggtaacaatgatag

SEQ ID NO: 63243 - DNA, 26 bp, Artificial sequence
  SiRNA target sequence
aatggtaatgaggtaacaatgataga

SEQ ID NO: 63244 - DNA, 26 bp, Artificial sequence
  SiRNA target sequence
atggtaatgaggtaacaatgatagaa

SEQ ID NO: 63245 - DNA, 26 bp, Artificial sequence
  SiRNA target sequence
tggtaatgaggtaacaatgatagaag

SEQ ID NO: 63246 - DNA, 26 bp, Artificial sequence
  SiRNA target sequence
ggtaatgaggtaacaatgatagaaga

SEQ ID NO: 63247 - DNA, 26 bp, Artificial sequence
  SiRNA target sequence
gtaatgaggtaacaatgatagaagac

SEQ ID NO: 63248 - DNA, 26 bp, Artificial sequence
  SiRNA target sequence
taatgaggtaacaatgatagaagaca

SEQ ID NO: 63249 - DNA, 26 bp, Artificial sequence
  SiRNA target sequence
aatgaggtaacaatgatagaagacat

SEQ ID NO: 63250 - DNA, 26 bp, Artificial sequence
  SiRNA target sequence
atgaggtaacaatgatagaagacatt

SEQ ID NO: 63251 - DNA, 26 bp, Artificial sequence
  SiRNA target sequence
tgaggtaacaatgatagaagacatta

SEQ ID NO: 63252 - DNA, 26 bp, Artificial sequence
  SiRNA target sequence
gaggtaacaatgatagaagacattaa

SEQ ID NO: 63253 - DNA, 26 bp, Artificial sequence
  SiRNA target sequence
aggtaacaatgatagaagacattaac

SEQ ID NO: 63254 - DNA, 26 bp, Artificial sequence
  SiRNA target sequence
ggtaacaatgatagaagacattaaca

SEQ ID NO: 63255 - DNA, 26 bp, Artificial sequence
  SiRNA target sequence
gtaacaatgatagaagacattaacaa

SEQ ID NO: 63256 - DNA, 26 bp, Artificial sequence
  SiRNA target sequence
taacaatgatagaagacattaacaaa

SEQ ID NO: 63257 - DNA, 26 bp, Artificial sequence
  SiRNA target sequence
aacaatgatagaagacattaacaaaa

SEQ ID NO: 63258 - DNA, 26 bp, Artificial sequence
  SiRNA target sequence
acaatgatagaagacattaacaaaaa

SEQ ID NO: 63259 - DNA, 26 bp, Artificial sequence
  SiRNA target sequence
caatgatagaagacattaacaaaaaa

SEQ ID NO: 63260 - DNA, 26 bp, Artificial sequence
  SiRNA target sequence
aatgatagaagacattaacaaaaaac

SEQ ID NO: 63261 - DNA, 26 bp, Artificial sequence
  SiRNA target sequence
atgatagaagacattaacaaaaaact

SEQ ID NO: 63262 - DNA, 26 bp, Artificial sequence
  SiRNA target sequence
tgatagaagacattaacaaaaaactt

SEQ ID NO: 63263 - DNA, 26 bp, Artificial sequence
  SiRNA target sequence
gatagaagacattaacaaaaaacttg

SEQ ID NO: 63264 - DNA, 26 bp, Artificial sequence
  SiRNA target sequence
atagaagacattaacaaaaaacttga

SEQ ID NO: 63265 - DNA, 26 bp, Artificial sequence
  SiRNA target sequence
tagaagacattaacaaaaaacttgaa

SEQ ID NO: 63266 - DNA, 26 bp, Artificial sequence
  SiRNA target sequence
agaagacattaacaaaaaacttgaag

SEQ ID NO: 63267 - DNA, 26 bp, Artificial sequence
  SiRNA target sequence
gaagacattaacaaaaaacttgaaga

SEQ ID NO: 63268 - DNA, 26 bp, Artificial sequence
  SiRNA target sequence
aagacattaacaaaaaacttgaagaa

SEQ ID NO: 63269 - DNA, 26 bp, Artificial sequence
  SiRNA target sequence
agacattaacaaaaaacttgaagaaa

SEQ ID NO: 63270 - DNA, 26 bp, Artificial sequence
  SiRNA target sequence
gacattaacaaaaaacttgaagaaaa

SEQ ID NO: 63271 - DNA, 26 bp, Artificial sequence
  SiRNA target sequence
acattaacaaaaaacttgaagaaaat

SEQ ID NO: 63272 - DNA, 26 bp, Artificial sequence
  SiRNA target sequence
cattaacaaaaaacttgaagaaaatt

SEQ ID NO: 63273 - DNA, 26 bp, Artificial sequence
  SiRNA target sequence
attaacaaaaaacttgaagaaaattc

SEQ ID NO: 63274 - DNA, 26 bp, Artificial sequence
  SiRNA target sequence
ttaacaaaaaacttgaagaaaattca

SEQ ID NO: 63275 - DNA, 26 bp, Artificial sequence
  SiRNA target sequence
taacaaaaaacttgaagaaaattcaa

SEQ ID NO: 63276 - DNA, 26 bp, Artificial sequence
  SiRNA target sequence
aacaaaaaacttgaagaaaattcaaa

SEQ ID NO: 63277 - DNA, 26 bp, Artificial sequence
  SiRNA target sequence
acaaaaaacttgaagaaaattcaaag

SEQ ID NO: 63278 - DNA, 26 bp, Artificial sequence
  SiRNA target sequence
caaaaaacttgaagaaaattcaaagt

SEQ ID NO: 63279 - DNA, 26 bp, Artificial sequence
  SiRNA target sequence
aaaaaacttgaagaaaattcaaagta

SEQ ID NO: 63280 - DNA, 26 bp, Artificial sequence
  SiRNA target sequence
aaaaacttgaagaaaattcaaagtat

SEQ ID NO: 63281 - DNA, 26 bp, Artificial sequence
  SiRNA target sequence
aaaacttgaagaaaattcaaagtatt

SEQ ID NO: 63282 - DNA, 26 bp, Artificial sequence
  SiRNA target sequence
aaacttgaagaaaattcaaagtattt

SEQ ID NO: 63283 - DNA, 26 bp, Artificial sequence
  SiRNA target sequence
aacttgaagaaaattcaaagtatttt

SEQ ID NO: 63284 - DNA, 26 bp, Artificial sequence
  SiRNA target sequence
acttgaagaaaattcaaagtattttg

SEQ ID NO: 63285 - DNA, 26 bp, Artificial sequence
  SiRNA target sequence
cttgaagaaaattcaaagtattttgc

SEQ ID NO: 63286 - DNA, 26 bp, Artificial sequence
  SiRNA target sequence
ttgaagaaaattcaaagtattttgca

SEQ ID NO: 63287 - DNA, 26 bp, Artificial sequence
  SiRNA target sequence
tgaagaaaattcaaagtattttgcag

SEQ ID NO: 63288 - DNA, 26 bp, Artificial sequence
  SiRNA target sequence
gaagaaaattcaaagtattttgcaga

SEQ ID NO: 63289 - DNA, 26 bp, Artificial sequence
  SiRNA target sequence
aagaaaattcaaagtattttgcagat

SEQ ID NO: 63290 - DNA, 26 bp, Artificial sequence
  SiRNA target sequence
agaaaattcaaagtattttgcagata

SEQ ID NO: 63291 - DNA, 26 bp, Artificial sequence
  SiRNA target sequence
gaaaattcaaagtattttgcagatat

SEQ ID NO: 63292 - DNA, 26 bp, Artificial sequence
  SiRNA target sequence
aaaattcaaagtattttgcagatatt

SEQ ID NO: 63293 - DNA, 26 bp, Artificial sequence
  SiRNA target sequence
aaattcaaagtattttgcagatattt

SEQ ID NO: 63294 - DNA, 26 bp, Artificial sequence
  SiRNA target sequence
aattcaaagtattttgcagatatttt

SEQ ID NO: 63295 - DNA, 26 bp, Artificial sequence
  SiRNA target sequence
attcaaagtattttgcagatatttta

SEQ ID NO: 63296 - DNA, 26 bp, Artificial sequence
  SiRNA target sequence
ttcaaagtattttgcagatattttaa

SEQ ID NO: 63297 - DNA, 26 bp, Artificial sequence
  SiRNA target sequence
tcaaagtattttgcagatattttaaa

SEQ ID NO: 63298 - DNA, 26 bp, Artificial sequence
  SiRNA target sequence
caaagtattttgcagatattttaaac

SEQ ID NO: 63299 - DNA, 26 bp, Artificial sequence
  SiRNA target sequence
aaagtattttgcagatattttaaaca

SEQ ID NO: 63300 - DNA, 26 bp, Artificial sequence
  SiRNA target sequence
aagtattttgcagatattttaaacaa

SEQ ID NO: 63301 - DNA, 26 bp, Artificial sequence
  SiRNA target sequence
agtattttgcagatattttaaacaac

SEQ ID NO: 63302 - DNA, 26 bp, Artificial sequence
  SiRNA target sequence
gtattttgcagatattttaaacaacg

SEQ ID NO: 63303 - DNA, 26 bp, Artificial sequence
  SiRNA target sequence
tattttgcagatattttaaacaacga

SEQ ID NO: 63304 - DNA, 26 bp, Artificial sequence
  SiRNA target sequence
attttgcagatattttaaacaacgaa

SEQ ID NO: 63305 - DNA, 26 bp, Artificial sequence
  SiRNA target sequence
ttttgcagatattttaaacaacgaat

SEQ ID NO: 63306 - DNA, 26 bp, Artificial sequence
  SiRNA target sequence
tttgcagatattttaaacaacgaata

SEQ ID NO: 63307 - DNA, 26 bp, Artificial sequence
  SiRNA target sequence
ttgcagatattttaaacaacgaataa

SEQ ID NO: 63308 - DNA, 27 bp, Artificial sequence
  SiRNA target sequence
atgaaggaaaaaaccaattatgaaatt

SEQ ID NO: 63309 - DNA, 27 bp, Artificial sequence
  SiRNA target sequence
tgaaggaaaaaaccaattatgaaattt

SEQ ID NO: 63310 - DNA, 27 bp, Artificial sequence
  SiRNA target sequence
gaaggaaaaaaccaattatgaaatttt

SEQ ID NO: 63311 - DNA, 27 bp, Artificial sequence
  SiRNA target sequence
aaggaaaaaaccaattatgaaatttta

SEQ ID NO: 63312 - DNA, 27 bp, Artificial sequence
  SiRNA target sequence
aggaaaaaaccaattatgaaattttat

SEQ ID NO: 63313 - DNA, 27 bp, Artificial sequence
  SiRNA target sequence
ggaaaaaaccaattatgaaattttata

SEQ ID NO: 63314 - DNA, 27 bp, Artificial sequence
  SiRNA target sequence
gaaaaaaccaattatgaaattttatat

SEQ ID NO: 63315 - DNA, 27 bp, Artificial sequence
  SiRNA target sequence
aaaaaaccaattatgaaattttatatg

SEQ ID NO: 63316 - DNA, 27 bp, Artificial sequence
  SiRNA target sequence
aaaaaccaattatgaaattttatatga

SEQ ID NO: 63317 - DNA, 27 bp, Artificial sequence
  SiRNA target sequence
aaaaccaattatgaaattttatatgat

SEQ ID NO: 63318 - DNA, 27 bp, Artificial sequence
  SiRNA target sequence
aaaccaattatgaaattttatatgata

SEQ ID NO: 63319 - DNA, 27 bp, Artificial sequence
  SiRNA target sequence
aaccaattatgaaattttatatgatac

SEQ ID NO: 63320 - DNA, 27 bp, Artificial sequence
  SiRNA target sequence
accaattatgaaattttatatgataca

SEQ ID NO: 63321 - DNA, 27 bp, Artificial sequence
  SiRNA target sequence
ccaattatgaaattttatatgatacat

SEQ ID NO: 63322 - DNA, 27 bp, Artificial sequence
  SiRNA target sequence
caattatgaaattttatatgatacatt

SEQ ID NO: 63323 - DNA, 27 bp, Artificial sequence
  SiRNA target sequence
aattatgaaattttatatgatacattt

SEQ ID NO: 63324 - DNA, 27 bp, Artificial sequence
  SiRNA target sequence
attatgaaattttatatgatacatttg

SEQ ID NO: 63325 - DNA, 27 bp, Artificial sequence
  SiRNA target sequence
ttatgaaattttatatgatacatttgt

SEQ ID NO: 63326 - DNA, 27 bp, Artificial sequence
  SiRNA target sequence
tatgaaattttatatgatacatttgta

SEQ ID NO: 63327 - DNA, 27 bp, Artificial sequence
  SiRNA target sequence
atgaaattttatatgatacatttgtaa

SEQ ID NO: 63328 - DNA, 27 bp, Artificial sequence
  SiRNA target sequence
tgaaattttatatgatacatttgtaaa

SEQ ID NO: 63329 - DNA, 27 bp, Artificial sequence
  SiRNA target sequence
gaaattttatatgatacatttgtaaaa

SEQ ID NO: 63330 - DNA, 27 bp, Artificial sequence
  SiRNA target sequence
aaattttatatgatacatttgtaaaat

SEQ ID NO: 63331 - DNA, 27 bp, Artificial sequence
  SiRNA target sequence
aattttatatgatacatttgtaaaata

SEQ ID NO: 63332 - DNA, 27 bp, Artificial sequence
  SiRNA target sequence
attttatatgatacatttgtaaaatat

SEQ ID NO: 63333 - DNA, 27 bp, Artificial sequence
  SiRNA target sequence
ttttatatgatacatttgtaaaatatt

SEQ ID NO: 63334 - DNA, 27 bp, Artificial sequence
  SiRNA target sequence
tttatatgatacatttgtaaaatattg

SEQ ID NO: 63335 - DNA, 27 bp, Artificial sequence
  SiRNA target sequence
ttatatgatacatttgtaaaatattgt

SEQ ID NO: 63336 - DNA, 27 bp, Artificial sequence
  SiRNA target sequence
tatatgatacatttgtaaaatattgtt

SEQ ID NO: 63337 - DNA, 27 bp, Artificial sequence
  SiRNA target sequence
atatgatacatttgtaaaatattgtta

SEQ ID NO: 63338 - DNA, 27 bp, Artificial sequence
  SiRNA target sequence
tatgatacatttgtaaaatattgttac

SEQ ID NO: 63339 - DNA, 27 bp, Artificial sequence
  SiRNA target sequence
atgatacatttgtaaaatattgttaca

SEQ ID NO: 63340 - DNA, 27 bp, Artificial sequence
  SiRNA target sequence
tgatacatttgtaaaatattgttacaa

SEQ ID NO: 63341 - DNA, 27 bp, Artificial sequence
  SiRNA target sequence
gatacatttgtaaaatattgttacaat

SEQ ID NO: 63342 - DNA, 27 bp, Artificial sequence
  SiRNA target sequence
atacatttgtaaaatattgttacaata

SEQ ID NO: 63343 - DNA, 27 bp, Artificial sequence
  SiRNA target sequence
tacatttgtaaaatattgttacaatat

SEQ ID NO: 63344 - DNA, 27 bp, Artificial sequence
  SiRNA target sequence
acatttgtaaaatattgttacaatatt

SEQ ID NO: 63345 - DNA, 27 bp, Artificial sequence
  SiRNA target sequence
catttgtaaaatattgttacaatattt

SEQ ID NO: 63346 - DNA, 27 bp, Artificial sequence
  SiRNA target sequence
atttgtaaaatattgttacaatatttc

SEQ ID NO: 63347 - DNA, 27 bp, Artificial sequence
  SiRNA target sequence
tttgtaaaatattgttacaatatttcc

SEQ ID NO: 63348 - DNA, 27 bp, Artificial sequence
  SiRNA target sequence
ttgtaaaatattgttacaatatttcct

SEQ ID NO: 63349 - DNA, 27 bp, Artificial sequence
  SiRNA target sequence
tgtaaaatattgttacaatatttccta

SEQ ID NO: 63350 - DNA, 27 bp, Artificial sequence
  SiRNA target sequence
gtaaaatattgttacaatatttcctat

SEQ ID NO: 63351 - DNA, 27 bp, Artificial sequence
  SiRNA target sequence
taaaatattgttacaatatttcctata

SEQ ID NO: 63352 - DNA, 27 bp, Artificial sequence
  SiRNA target sequence
aaaatattgttacaatatttcctatat

SEQ ID NO: 63353 - DNA, 27 bp, Artificial sequence
  SiRNA target sequence
aaatattgttacaatatttcctatata

SEQ ID NO: 63354 - DNA, 27 bp, Artificial sequence
  SiRNA target sequence
aatattgttacaatatttcctatataa

SEQ ID NO: 63355 - DNA, 27 bp, Artificial sequence
  SiRNA target sequence
atattgttacaatatttcctatataag

SEQ ID NO: 63356 - DNA, 27 bp, Artificial sequence
  SiRNA target sequence
tattgttacaatatttcctatataagg

SEQ ID NO: 63357 - DNA, 27 bp, Artificial sequence
  SiRNA target sequence
attgttacaatatttcctatataaggt

SEQ ID NO: 63358 - DNA, 27 bp, Artificial sequence
  SiRNA target sequence
ttgttacaatatttcctatataaggta

SEQ ID NO: 63359 - DNA, 27 bp, Artificial sequence
  SiRNA target sequence
tgttacaatatttcctatataaggtac

SEQ ID NO: 63360 - DNA, 27 bp, Artificial sequence
  SiRNA target sequence
gttacaatatttcctatataaggtacg

SEQ ID NO: 63361 - DNA, 27 bp, Artificial sequence
  SiRNA target sequence
ttacaatatttcctatataaggtacgt

SEQ ID NO: 63362 - DNA, 27 bp, Artificial sequence
  SiRNA target sequence
tacaatatttcctatataaggtacgta

SEQ ID NO: 63363 - DNA, 27 bp, Artificial sequence
  SiRNA target sequence
acaatatttcctatataaggtacgtaa

SEQ ID NO: 63364 - DNA, 27 bp, Artificial sequence
  SiRNA target sequence
caatatttcctatataaggtacgtaat

SEQ ID NO: 63365 - DNA, 27 bp, Artificial sequence
  SiRNA target sequence
aatatttcctatataaggtacgtaatg

SEQ ID NO: 63366 - DNA, 27 bp, Artificial sequence
  SiRNA target sequence
atatttcctatataaggtacgtaatgt

SEQ ID NO: 63367 - DNA, 27 bp, Artificial sequence
  SiRNA target sequence
tatttcctatataaggtacgtaatgtt

SEQ ID NO: 63368 - DNA, 27 bp, Artificial sequence
  SiRNA target sequence
atttcctatataaggtacgtaatgttt

SEQ ID NO: 63369 - DNA, 27 bp, Artificial sequence
  SiRNA target sequence
tttcctatataaggtacgtaatgtttc

SEQ ID NO: 63370 - DNA, 27 bp, Artificial sequence
  SiRNA target sequence
ttcctatataaggtacgtaatgtttcc

SEQ ID NO: 63371 - DNA, 27 bp, Artificial sequence
  SiRNA target sequence
tcctatataaggtacgtaatgtttccc

SEQ ID NO: 63372 - DNA, 27 bp, Artificial sequence
  SiRNA target sequence
cctatataaggtacgtaatgtttccca

SEQ ID NO: 63373 - DNA, 27 bp, Artificial sequence
  SiRNA target sequence
ctatataaggtacgtaatgtttcccat

SEQ ID NO: 63374 - DNA, 27 bp, Artificial sequence
  SiRNA target sequence
tatataaggtacgtaatgtttcccata

SEQ ID NO: 63375 - DNA, 27 bp, Artificial sequence
  SiRNA target sequence
atataaggtacgtaatgtttcccatat

SEQ ID NO: 63376 - DNA, 27 bp, Artificial sequence
  SiRNA target sequence
tataaggtacgtaatgtttcccatatt

SEQ ID NO: 63377 - DNA, 27 bp, Artificial sequence
  SiRNA target sequence
ataaggtacgtaatgtttcccatatta

SEQ ID NO: 63378 - DNA, 27 bp, Artificial sequence
  SiRNA target sequence
taaggtacgtaatgtttcccatattac

SEQ ID NO: 63379 - DNA, 27 bp, Artificial sequence
  SiRNA target sequence
aaggtacgtaatgtttcccatattact

SEQ ID NO: 63380 - DNA, 27 bp, Artificial sequence
  SiRNA target sequence
aggtacgtaatgtttcccatattactg

SEQ ID NO: 63381 - DNA, 27 bp, Artificial sequence
  SiRNA target sequence
ggtacgtaatgtttcccatattactgt

SEQ ID NO: 63382 - DNA, 27 bp, Artificial sequence
  SiRNA target sequence
gtacgtaatgtttcccatattactgtc

SEQ ID NO: 63383 - DNA, 27 bp, Artificial sequence
  SiRNA target sequence
tacgtaatgtttcccatattactgtct

SEQ ID NO: 63384 - DNA, 27 bp, Artificial sequence
  SiRNA target sequence
acgtaatgtttcccatattactgtcta

SEQ ID NO: 63385 - DNA, 27 bp, Artificial sequence
  SiRNA target sequence
cgtaatgtttcccatattactgtctac

SEQ ID NO: 63386 - DNA, 27 bp, Artificial sequence
  SiRNA target sequence
gtaatgtttcccatattactgtctaca

SEQ ID NO: 63387 - DNA, 27 bp, Artificial sequence
  SiRNA target sequence
taatgtttcccatattactgtctacaa

SEQ ID NO: 63388 - DNA, 27 bp, Artificial sequence
  SiRNA target sequence
aatgtttcccatattactgtctacaat

SEQ ID NO: 63389 - DNA, 27 bp, Artificial sequence
  SiRNA target sequence
atgtttcccatattactgtctacaatt

SEQ ID NO: 63390 - DNA, 27 bp, Artificial sequence
  SiRNA target sequence
tgtttcccatattactgtctacaatta

SEQ ID NO: 63391 - DNA, 27 bp, Artificial sequence
  SiRNA target sequence
gtttcccatattactgtctacaattat

SEQ ID NO: 63392 - DNA, 27 bp, Artificial sequence
  SiRNA target sequence
tttcccatattactgtctacaattata

SEQ ID NO: 63393 - DNA, 27 bp, Artificial sequence
  SiRNA target sequence
ttcccatattactgtctacaattatag

SEQ ID NO: 63394 - DNA, 27 bp, Artificial sequence
  SiRNA target sequence
tcccatattactgtctacaattatagc

SEQ ID NO: 63395 - DNA, 27 bp, Artificial sequence
  SiRNA target sequence
cccatattactgtctacaattatagct

SEQ ID NO: 63396 - DNA, 27 bp, Artificial sequence
  SiRNA target sequence
ccatattactgtctacaattatagctt

SEQ ID NO: 63397 - DNA, 27 bp, Artificial sequence
  SiRNA target sequence
catattactgtctacaattatagcttg

SEQ ID NO: 63398 - DNA, 27 bp, Artificial sequence
  SiRNA target sequence
atattactgtctacaattatagcttgt

SEQ ID NO: 63399 - DNA, 27 bp, Artificial sequence
  SiRNA target sequence
tattactgtctacaattatagcttgtt

SEQ ID NO: 63400 - DNA, 27 bp, Artificial sequence
  SiRNA target sequence
attactgtctacaattatagcttgtta

SEQ ID NO: 63401 - DNA, 27 bp, Artificial sequence
  SiRNA target sequence
ttactgtctacaattatagcttgttat

SEQ ID NO: 63402 - DNA, 27 bp, Artificial sequence
  SiRNA target sequence
tactgtctacaattatagcttgttatc

SEQ ID NO: 63403 - DNA, 27 bp, Artificial sequence
  SiRNA target sequence
actgtctacaattatagcttgttatct

SEQ ID NO: 63404 - DNA, 27 bp, Artificial sequence
  SiRNA target sequence
ctgtctacaattatagcttgttatctc

SEQ ID NO: 63405 - DNA, 27 bp, Artificial sequence
  SiRNA target sequence
tgtctacaattatagcttgttatctcg

SEQ ID NO: 63406 - DNA, 27 bp, Artificial sequence
  SiRNA target sequence
gtctacaattatagcttgttatctcga

SEQ ID NO: 63407 - DNA, 27 bp, Artificial sequence
  SiRNA target sequence
tctacaattatagcttgttatctcgaa

SEQ ID NO: 63408 - DNA, 27 bp, Artificial sequence
  SiRNA target sequence
ctacaattatagcttgttatctcgaag

SEQ ID NO: 63409 - DNA, 27 bp, Artificial sequence
  SiRNA target sequence
tacaattatagcttgttatctcgaagt

SEQ ID NO: 63410 - DNA, 27 bp, Artificial sequence
  SiRNA target sequence
acaattatagcttgttatctcgaagtt

SEQ ID NO: 63411 - DNA, 27 bp, Artificial sequence
  SiRNA target sequence
caattatagcttgttatctcgaagttc

SEQ ID NO: 63412 - DNA, 27 bp, Artificial sequence
  SiRNA target sequence
aattatagcttgttatctcgaagttca

SEQ ID NO: 63413 - DNA, 27 bp, Artificial sequence
  SiRNA target sequence
attatagcttgttatctcgaagttcag

SEQ ID NO: 63414 - DNA, 27 bp, Artificial sequence
  SiRNA target sequence
ttatagcttgttatctcgaagttcagg

SEQ ID NO: 63415 - DNA, 27 bp, Artificial sequence
  SiRNA target sequence
tatagcttgttatctcgaagttcaggc

SEQ ID NO: 63416 - DNA, 27 bp, Artificial sequence
  SiRNA target sequence
atagcttgttatctcgaagttcaggca

SEQ ID NO: 63417 - DNA, 27 bp, Artificial sequence
  SiRNA target sequence
tagcttgttatctcgaagttcaggcaa

SEQ ID NO: 63418 - DNA, 27 bp, Artificial sequence
  SiRNA target sequence
agcttgttatctcgaagttcaggcaag

SEQ ID NO: 63419 - DNA, 27 bp, Artificial sequence
  SiRNA target sequence
gcttgttatctcgaagttcaggcaagt

SEQ ID NO: 63420 - DNA, 27 bp, Artificial sequence
  SiRNA target sequence
cttgttatctcgaagttcaggcaagta

SEQ ID NO: 63421 - DNA, 27 bp, Artificial sequence
  SiRNA target sequence
ttgttatctcgaagttcaggcaagtaa

SEQ ID NO: 63422 - DNA, 27 bp, Artificial sequence
  SiRNA target sequence
tgttatctcgaagttcaggcaagtaac

SEQ ID NO: 63423 - DNA, 27 bp, Artificial sequence
  SiRNA target sequence
gttatctcgaagttcaggcaagtaaca

SEQ ID NO: 63424 - DNA, 27 bp, Artificial sequence
  SiRNA target sequence
ttatctcgaagttcaggcaagtaacat

SEQ ID NO: 63425 - DNA, 27 bp, Artificial sequence
  SiRNA target sequence
tatctcgaagttcaggcaagtaacata

SEQ ID NO: 63426 - DNA, 27 bp, Artificial sequence
  SiRNA target sequence
atctcgaagttcaggcaagtaacatat

SEQ ID NO: 63427 - DNA, 27 bp, Artificial sequence
  SiRNA target sequence
tctcgaagttcaggcaagtaacatatc

SEQ ID NO: 63428 - DNA, 27 bp, Artificial sequence
  SiRNA target sequence
ctcgaagttcaggcaagtaacatatca

SEQ ID NO: 63429 - DNA, 27 bp, Artificial sequence
  SiRNA target sequence
tcgaagttcaggcaagtaacatatcaa

SEQ ID NO: 63430 - DNA, 27 bp, Artificial sequence
  SiRNA target sequence
cgaagttcaggcaagtaacatatcaaa

SEQ ID NO: 63431 - DNA, 27 bp, Artificial sequence
  SiRNA target sequence
gaagttcaggcaagtaacatatcaaaa

SEQ ID NO: 63432 - DNA, 27 bp, Artificial sequence
  SiRNA target sequence
aagttcaggcaagtaacatatcaaaaa

SEQ ID NO: 63433 - DNA, 27 bp, Artificial sequence
  SiRNA target sequence
agttcaggcaagtaacatatcaaaaag

SEQ ID NO: 63434 - DNA, 27 bp, Artificial sequence
  SiRNA target sequence
gttcaggcaagtaacatatcaaaaaga

SEQ ID NO: 63435 - DNA, 27 bp, Artificial sequence
  SiRNA target sequence
ttcaggcaagtaacatatcaaaaagaa

SEQ ID NO: 63436 - DNA, 27 bp, Artificial sequence
  SiRNA target sequence
tcaggcaagtaacatatcaaaaagaat

SEQ ID NO: 63437 - DNA, 27 bp, Artificial sequence
  SiRNA target sequence
caggcaagtaacatatcaaaaagaatt

SEQ ID NO: 63438 - DNA, 27 bp, Artificial sequence
  SiRNA target sequence
aggcaagtaacatatcaaaaagaattg

SEQ ID NO: 63439 - DNA, 27 bp, Artificial sequence
  SiRNA target sequence
ggcaagtaacatatcaaaaagaattgc

SEQ ID NO: 63440 - DNA, 27 bp, Artificial sequence
  SiRNA target sequence
gcaagtaacatatcaaaaagaattgca

SEQ ID NO: 63441 - DNA, 27 bp, Artificial sequence
  SiRNA target sequence
caagtaacatatcaaaaagaattgcag

SEQ ID NO: 63442 - DNA, 27 bp, Artificial sequence
  SiRNA target sequence
aagtaacatatcaaaaagaattgcaga

SEQ ID NO: 63443 - DNA, 27 bp, Artificial sequence
  SiRNA target sequence
agtaacatatcaaaaagaattgcagaa

SEQ ID NO: 63444 - DNA, 27 bp, Artificial sequence
  SiRNA target sequence
gtaacatatcaaaaagaattgcagaag

SEQ ID NO: 63445 - DNA, 27 bp, Artificial sequence
  SiRNA target sequence
taacatatcaaaaagaattgcagaaga

SEQ ID NO: 63446 - DNA, 27 bp, Artificial sequence
  SiRNA target sequence
aacatatcaaaaagaattgcagaagat

SEQ ID NO: 63447 - DNA, 27 bp, Artificial sequence
  SiRNA target sequence
acatatcaaaaagaattgcagaagatt

SEQ ID NO: 63448 - DNA, 27 bp, Artificial sequence
  SiRNA target sequence
catatcaaaaagaattgcagaagattt

SEQ ID NO: 63449 - DNA, 27 bp, Artificial sequence
  SiRNA target sequence
atatcaaaaagaattgcagaagatttt

SEQ ID NO: 63450 - DNA, 27 bp, Artificial sequence
  SiRNA target sequence
tatcaaaaagaattgcagaagattttg

SEQ ID NO: 63451 - DNA, 27 bp, Artificial sequence
  SiRNA target sequence
atcaaaaagaattgcagaagattttga

SEQ ID NO: 63452 - DNA, 27 bp, Artificial sequence
  SiRNA target sequence
tcaaaaagaattgcagaagattttgaa

SEQ ID NO: 63453 - DNA, 27 bp, Artificial sequence
  SiRNA target sequence
caaaaagaattgcagaagattttgaaa

SEQ ID NO: 63454 - DNA, 27 bp, Artificial sequence
  SiRNA target sequence
aaaaagaattgcagaagattttgaaaa

SEQ ID NO: 63455 - DNA, 27 bp, Artificial sequence
  SiRNA target sequence
aaaagaattgcagaagattttgaaaat

SEQ ID NO: 63456 - DNA, 27 bp, Artificial sequence
  SiRNA target sequence
aaagaattgcagaagattttgaaaata

SEQ ID NO: 63457 - DNA, 27 bp, Artificial sequence
  SiRNA target sequence
aagaattgcagaagattttgaaaataa

SEQ ID NO: 63458 - DNA, 27 bp, Artificial sequence
  SiRNA target sequence
agaattgcagaagattttgaaaataaa

SEQ ID NO: 63459 - DNA, 27 bp, Artificial sequence
  SiRNA target sequence
gaattgcagaagattttgaaaataaaa

SEQ ID NO: 63460 - DNA, 27 bp, Artificial sequence
  SiRNA target sequence
aattgcagaagattttgaaaataaaat

SEQ ID NO: 63461 - DNA, 27 bp, Artificial sequence
  SiRNA target sequence
attgcagaagattttgaaaataaaata

SEQ ID NO: 63462 - DNA, 27 bp, Artificial sequence
  SiRNA target sequence
ttgcagaagattttgaaaataaaataa

SEQ ID NO: 63463 - DNA, 27 bp, Artificial sequence
  SiRNA target sequence
tgcagaagattttgaaaataaaataaa

SEQ ID NO: 63464 - DNA, 27 bp, Artificial sequence
  SiRNA target sequence
gcagaagattttgaaaataaaataaat

SEQ ID NO: 63465 - DNA, 27 bp, Artificial sequence
  SiRNA target sequence
cagaagattttgaaaataaaataaatg

SEQ ID NO: 63466 - DNA, 27 bp, Artificial sequence
  SiRNA target sequence
agaagattttgaaaataaaataaatgc

SEQ ID NO: 63467 - DNA, 27 bp, Artificial sequence
  SiRNA target sequence
gaagattttgaaaataaaataaatgca

SEQ ID NO: 63468 - DNA, 27 bp, Artificial sequence
  SiRNA target sequence
aagattttgaaaataaaataaatgcag

SEQ ID NO: 63469 - DNA, 27 bp, Artificial sequence
  SiRNA target sequence
agattttgaaaataaaataaatgcagg

SEQ ID NO: 63470 - DNA, 27 bp, Artificial sequence
  SiRNA target sequence
gattttgaaaataaaataaatgcagga

SEQ ID NO: 63471 - DNA, 27 bp, Artificial sequence
  SiRNA target sequence
attttgaaaataaaataaatgcaggaa

SEQ ID NO: 63472 - DNA, 27 bp, Artificial sequence
  SiRNA target sequence
ttttgaaaataaaataaatgcaggaaa

SEQ ID NO: 63473 - DNA, 27 bp, Artificial sequence
  SiRNA target sequence
tttgaaaataaaataaatgcaggaaaa

SEQ ID NO: 63474 - DNA, 27 bp, Artificial sequence
  SiRNA target sequence
ttgaaaataaaataaatgcaggaaaaa

SEQ ID NO: 63475 - DNA, 27 bp, Artificial sequence
  SiRNA target sequence
tgaaaataaaataaatgcaggaaaaag

SEQ ID NO: 63476 - DNA, 27 bp, Artificial sequence
  SiRNA target sequence
gaaaataaaataaatgcaggaaaaagt

SEQ ID NO: 63477 - DNA, 27 bp, Artificial sequence
  SiRNA target sequence
aaaataaaataaatgcaggaaaaagta

SEQ ID NO: 63478 - DNA, 27 bp, Artificial sequence
  SiRNA target sequence
aaataaaataaatgcaggaaaaagtat

SEQ ID NO: 63479 - DNA, 27 bp, Artificial sequence
  SiRNA target sequence
aataaaataaatgcaggaaaaagtata

SEQ ID NO: 63480 - DNA, 27 bp, Artificial sequence
  SiRNA target sequence
ataaaataaatgcaggaaaaagtatat

SEQ ID NO: 63481 - DNA, 27 bp, Artificial sequence
  SiRNA target sequence
taaaataaatgcaggaaaaagtatatt

SEQ ID NO: 63482 - DNA, 27 bp, Artificial sequence
  SiRNA target sequence
aaaataaatgcaggaaaaagtatattt

SEQ ID NO: 63483 - DNA, 27 bp, Artificial sequence
  SiRNA target sequence
aaataaatgcaggaaaaagtatattta

SEQ ID NO: 63484 - DNA, 27 bp, Artificial sequence
  SiRNA target sequence
aataaatgcaggaaaaagtatatttaa

SEQ ID NO: 63485 - DNA, 27 bp, Artificial sequence
  SiRNA target sequence
ataaatgcaggaaaaagtatatttaaa

SEQ ID NO: 63486 - DNA, 27 bp, Artificial sequence
  SiRNA target sequence
taaatgcaggaaaaagtatatttaaat

SEQ ID NO: 63487 - DNA, 27 bp, Artificial sequence
  SiRNA target sequence
aaatgcaggaaaaagtatatttaaata

SEQ ID NO: 63488 - DNA, 27 bp, Artificial sequence
  SiRNA target sequence
aatgcaggaaaaagtatatttaaatat

SEQ ID NO: 63489 - DNA, 27 bp, Artificial sequence
  SiRNA target sequence
atgcaggaaaaagtatatttaaatata

SEQ ID NO: 63490 - DNA, 27 bp, Artificial sequence
  SiRNA target sequence
tgcaggaaaaagtatatttaaatatat

SEQ ID NO: 63491 - DNA, 27 bp, Artificial sequence
  SiRNA target sequence
gcaggaaaaagtatatttaaatatatt

SEQ ID NO: 63492 - DNA, 27 bp, Artificial sequence
  SiRNA target sequence
caggaaaaagtatatttaaatatattt

SEQ ID NO: 63493 - DNA, 27 bp, Artificial sequence
  SiRNA target sequence
aggaaaaagtatatttaaatatatttt

SEQ ID NO: 63494 - DNA, 27 bp, Artificial sequence
  SiRNA target sequence
ggaaaaagtatatttaaatatatttta

SEQ ID NO: 63495 - DNA, 27 bp, Artificial sequence
  SiRNA target sequence
gaaaaagtatatttaaatatattttat

SEQ ID NO: 63496 - DNA, 27 bp, Artificial sequence
  SiRNA target sequence
aaaaagtatatttaaatatattttatt

SEQ ID NO: 63497 - DNA, 27 bp, Artificial sequence
  SiRNA target sequence
aaaagtatatttaaatatattttattt

SEQ ID NO: 63498 - DNA, 27 bp, Artificial sequence
  SiRNA target sequence
aaagtatatttaaatatattttatttt

SEQ ID NO: 63499 - DNA, 27 bp, Artificial sequence
  SiRNA target sequence
aagtatatttaaatatattttattttt

SEQ ID NO: 63500 - DNA, 27 bp, Artificial sequence
  SiRNA target sequence
agtatatttaaatatattttattttta

SEQ ID NO: 63501 - DNA, 27 bp, Artificial sequence
  SiRNA target sequence
gtatatttaaatatattttatttttaa

SEQ ID NO: 63502 - DNA, 27 bp, Artificial sequence
  SiRNA target sequence
tatatttaaatatattttatttttaac

SEQ ID NO: 63503 - DNA, 27 bp, Artificial sequence
  SiRNA target sequence
atatttaaatatattttatttttaact

SEQ ID NO: 63504 - DNA, 27 bp, Artificial sequence
  SiRNA target sequence
tatttaaatatattttatttttaactt

SEQ ID NO: 63505 - DNA, 27 bp, Artificial sequence
  SiRNA target sequence
atttaaatatattttatttttaacttc

SEQ ID NO: 63506 - DNA, 27 bp, Artificial sequence
  SiRNA target sequence
tttaaatatattttatttttaacttca

SEQ ID NO: 63507 - DNA, 27 bp, Artificial sequence
  SiRNA target sequence
ttaaatatattttatttttaacttcat

SEQ ID NO: 63508 - DNA, 27 bp, Artificial sequence
  SiRNA target sequence
taaatatattttatttttaacttcatc

SEQ ID NO: 63509 - DNA, 27 bp, Artificial sequence
  SiRNA target sequence
aaatatattttatttttaacttcatca

SEQ ID NO: 63510 - DNA, 27 bp, Artificial sequence
  SiRNA target sequence
aatatattttatttttaacttcatcaa

SEQ ID NO: 63511 - DNA, 27 bp, Artificial sequence
  SiRNA target sequence
atatattttatttttaacttcatcaat

SEQ ID NO: 63512 - DNA, 27 bp, Artificial sequence
  SiRNA target sequence
tatattttatttttaacttcatcaata

SEQ ID NO: 63513 - DNA, 27 bp, Artificial sequence
  SiRNA target sequence
atattttatttttaacttcatcaatag

SEQ ID NO: 63514 - DNA, 27 bp, Artificial sequence
  SiRNA target sequence
tattttatttttaacttcatcaatagt

SEQ ID NO: 63515 - DNA, 27 bp, Artificial sequence
  SiRNA target sequence
attttatttttaacttcatcaatagta

SEQ ID NO: 63516 - DNA, 27 bp, Artificial sequence
  SiRNA target sequence
ttttatttttaacttcatcaatagtat

SEQ ID NO: 63517 - DNA, 27 bp, Artificial sequence
  SiRNA target sequence
tttatttttaacttcatcaatagtatt

SEQ ID NO: 63518 - DNA, 27 bp, Artificial sequence
  SiRNA target sequence
ttatttttaacttcatcaatagtatta

SEQ ID NO: 63519 - DNA, 27 bp, Artificial sequence
  SiRNA target sequence
tatttttaacttcatcaatagtattaa

SEQ ID NO: 63520 - DNA, 27 bp, Artificial sequence
  SiRNA target sequence
atttttaacttcatcaatagtattaag

SEQ ID NO: 63521 - DNA, 27 bp, Artificial sequence
  SiRNA target sequence
tttttaacttcatcaatagtattaaga

SEQ ID NO: 63522 - DNA, 27 bp, Artificial sequence
  SiRNA target sequence
ttttaacttcatcaatagtattaagac

SEQ ID NO: 63523 - DNA, 27 bp, Artificial sequence
  SiRNA target sequence
tttaacttcatcaatagtattaagaca

SEQ ID NO: 63524 - DNA, 27 bp, Artificial sequence
  SiRNA target sequence
ttaacttcatcaatagtattaagacaa

SEQ ID NO: 63525 - DNA, 27 bp, Artificial sequence
  SiRNA target sequence
taacttcatcaatagtattaagacaaa

SEQ ID NO: 63526 - DNA, 27 bp, Artificial sequence
  SiRNA target sequence
aacttcatcaatagtattaagacaaat

SEQ ID NO: 63527 - DNA, 27 bp, Artificial sequence
  SiRNA target sequence
acttcatcaatagtattaagacaaatt

SEQ ID NO: 63528 - DNA, 27 bp, Artificial sequence
  SiRNA target sequence
cttcatcaatagtattaagacaaatta

SEQ ID NO: 63529 - DNA, 27 bp, Artificial sequence
  SiRNA target sequence
ttcatcaatagtattaagacaaattaa

SEQ ID NO: 63530 - DNA, 27 bp, Artificial sequence
  SiRNA target sequence
tcatcaatagtattaagacaaattaat

SEQ ID NO: 63531 - DNA, 27 bp, Artificial sequence
  SiRNA target sequence
catcaatagtattaagacaaattaatg

SEQ ID NO: 63532 - DNA, 27 bp, Artificial sequence
  SiRNA target sequence
atcaatagtattaagacaaattaatga

SEQ ID NO: 63533 - DNA, 27 bp, Artificial sequence
  SiRNA target sequence
tcaatagtattaagacaaattaatgat

SEQ ID NO: 63534 - DNA, 27 bp, Artificial sequence
  SiRNA target sequence
caatagtattaagacaaattaatgata

SEQ ID NO: 63535 - DNA, 27 bp, Artificial sequence
  SiRNA target sequence
aatagtattaagacaaattaatgatat

SEQ ID NO: 63536 - DNA, 27 bp, Artificial sequence
  SiRNA target sequence
atagtattaagacaaattaatgatatt

SEQ ID NO: 63537 - DNA, 27 bp, Artificial sequence
  SiRNA target sequence
tagtattaagacaaattaatgatattg

SEQ ID NO: 63538 - DNA, 27 bp, Artificial sequence
  SiRNA target sequence
agtattaagacaaattaatgatattgt

SEQ ID NO: 63539 - DNA, 27 bp, Artificial sequence
  SiRNA target sequence
gtattaagacaaattaatgatattgtg

SEQ ID NO: 63540 - DNA, 27 bp, Artificial sequence
  SiRNA target sequence
tattaagacaaattaatgatattgtgt

SEQ ID NO: 63541 - DNA, 27 bp, Artificial sequence
  SiRNA target sequence
attaagacaaattaatgatattgtgtt

SEQ ID NO: 63542 - DNA, 27 bp, Artificial sequence
  SiRNA target sequence
ttaagacaaattaatgatattgtgttt

SEQ ID NO: 63543 - DNA, 27 bp, Artificial sequence
  SiRNA target sequence
taagacaaattaatgatattgtgttta

SEQ ID NO: 63544 - DNA, 27 bp, Artificial sequence
  SiRNA target sequence
aagacaaattaatgatattgtgtttag

SEQ ID NO: 63545 - DNA, 27 bp, Artificial sequence
  SiRNA target sequence
agacaaattaatgatattgtgtttagc

SEQ ID NO: 63546 - DNA, 27 bp, Artificial sequence
  SiRNA target sequence
gacaaattaatgatattgtgtttagcg

SEQ ID NO: 63547 - DNA, 27 bp, Artificial sequence
  SiRNA target sequence
acaaattaatgatattgtgtttagcgg

SEQ ID NO: 63548 - DNA, 27 bp, Artificial sequence
  SiRNA target sequence
caaattaatgatattgtgtttagcggg

SEQ ID NO: 63549 - DNA, 27 bp, Artificial sequence
  SiRNA target sequence
aaattaatgatattgtgtttagcgggc

SEQ ID NO: 63550 - DNA, 27 bp, Artificial sequence
  SiRNA target sequence
aattaatgatattgtgtttagcgggcc

SEQ ID NO: 63551 - DNA, 27 bp, Artificial sequence
  SiRNA target sequence
attaatgatattgtgtttagcgggcca

SEQ ID NO: 63552 - DNA, 27 bp, Artificial sequence
  SiRNA target sequence
ttaatgatattgtgtttagcgggccaa

SEQ ID NO: 63553 - DNA, 27 bp, Artificial sequence
  SiRNA target sequence
taatgatattgtgtttagcgggccaat

SEQ ID NO: 63554 - DNA, 27 bp, Artificial sequence
  SiRNA target sequence
aatgatattgtgtttagcgggccaata

SEQ ID NO: 63555 - DNA, 27 bp, Artificial sequence
  SiRNA target sequence
atgatattgtgtttagcgggccaatac

SEQ ID NO: 63556 - DNA, 27 bp, Artificial sequence
  SiRNA target sequence
tgatattgtgtttagcgggccaataca

SEQ ID NO: 63557 - DNA, 27 bp, Artificial sequence
  SiRNA target sequence
gatattgtgtttagcgggccaatacaa

SEQ ID NO: 63558 - DNA, 27 bp, Artificial sequence
  SiRNA target sequence
atattgtgtttagcgggccaatacaat

SEQ ID NO: 63559 - DNA, 27 bp, Artificial sequence
  SiRNA target sequence
tattgtgtttagcgggccaatacaatt

SEQ ID NO: 63560 - DNA, 27 bp, Artificial sequence
  SiRNA target sequence
attgtgtttagcgggccaatacaattt

SEQ ID NO: 63561 - DNA, 27 bp, Artificial sequence
  SiRNA target sequence
ttgtgtttagcgggccaatacaatttt

SEQ ID NO: 63562 - DNA, 27 bp, Artificial sequence
  SiRNA target sequence
tgtgtttagcgggccaatacaattttt

SEQ ID NO: 63563 - DNA, 27 bp, Artificial sequence
  SiRNA target sequence
gtgtttagcgggccaatacaattttta

SEQ ID NO: 63564 - DNA, 27 bp, Artificial sequence
  SiRNA target sequence
tgtttagcgggccaatacaatttttat

SEQ ID NO: 63565 - DNA, 27 bp, Artificial sequence
  SiRNA target sequence
gtttagcgggccaatacaatttttata

SEQ ID NO: 63566 - DNA, 27 bp, Artificial sequence
  SiRNA target sequence
tttagcgggccaatacaatttttatat

SEQ ID NO: 63567 - DNA, 27 bp, Artificial sequence
  SiRNA target sequence
ttagcgggccaatacaatttttatata

SEQ ID NO: 63568 - DNA, 27 bp, Artificial sequence
  SiRNA target sequence
tagcgggccaatacaatttttatataa

SEQ ID NO: 63569 - DNA, 27 bp, Artificial sequence
  SiRNA target sequence
agcgggccaatacaatttttatataaa

SEQ ID NO: 63570 - DNA, 27 bp, Artificial sequence
  SiRNA target sequence
gcgggccaatacaatttttatataaaa

SEQ ID NO: 63571 - DNA, 27 bp, Artificial sequence
  SiRNA target sequence
cgggccaatacaatttttatataaaat

SEQ ID NO: 63572 - DNA, 27 bp, Artificial sequence
  SiRNA target sequence
gggccaatacaatttttatataaaatt

SEQ ID NO: 63573 - DNA, 27 bp, Artificial sequence
  SiRNA target sequence
ggccaatacaatttttatataaaattg

SEQ ID NO: 63574 - DNA, 27 bp, Artificial sequence
  SiRNA target sequence
gccaatacaatttttatataaaattgt

SEQ ID NO: 63575 - DNA, 27 bp, Artificial sequence
  SiRNA target sequence
ccaatacaatttttatataaaattgtt

SEQ ID NO: 63576 - DNA, 27 bp, Artificial sequence
  SiRNA target sequence
caatacaatttttatataaaattgttg

SEQ ID NO: 63577 - DNA, 27 bp, Artificial sequence
  SiRNA target sequence
aatacaatttttatataaaattgttgg

SEQ ID NO: 63578 - DNA, 27 bp, Artificial sequence
  SiRNA target sequence
atacaatttttatataaaattgttgga

SEQ ID NO: 63579 - DNA, 27 bp, Artificial sequence
  SiRNA target sequence
tacaatttttatataaaattgttggag

SEQ ID NO: 63580 - DNA, 27 bp, Artificial sequence
  SiRNA target sequence
acaatttttatataaaattgttggagt

SEQ ID NO: 63581 - DNA, 27 bp, Artificial sequence
  SiRNA target sequence
caatttttatataaaattgttggagtt

SEQ ID NO: 63582 - DNA, 27 bp, Artificial sequence
  SiRNA target sequence
aatttttatataaaattgttggagttg

SEQ ID NO: 63583 - DNA, 27 bp, Artificial sequence
  SiRNA target sequence
atttttatataaaattgttggagttga

SEQ ID NO: 63584 - DNA, 27 bp, Artificial sequence
  SiRNA target sequence
tttttatataaaattgttggagttgaa

SEQ ID NO: 63585 - DNA, 27 bp, Artificial sequence
  SiRNA target sequence
ttttatataaaattgttggagttgaag

SEQ ID NO: 63586 - DNA, 27 bp, Artificial sequence
  SiRNA target sequence
tttatataaaattgttggagttgaagc

SEQ ID NO: 63587 - DNA, 27 bp, Artificial sequence
  SiRNA target sequence
ttatataaaattgttggagttgaagca

SEQ ID NO: 63588 - DNA, 27 bp, Artificial sequence
  SiRNA target sequence
tatataaaattgttggagttgaagcat

SEQ ID NO: 63589 - DNA, 27 bp, Artificial sequence
  SiRNA target sequence
atataaaattgttggagttgaagcatt

SEQ ID NO: 63590 - DNA, 27 bp, Artificial sequence
  SiRNA target sequence
tataaaattgttggagttgaagcattt

SEQ ID NO: 63591 - DNA, 27 bp, Artificial sequence
  SiRNA target sequence
ataaaattgttggagttgaagcatttt

SEQ ID NO: 63592 - DNA, 27 bp, Artificial sequence
  SiRNA target sequence
taaaattgttggagttgaagcatttta

SEQ ID NO: 63593 - DNA, 27 bp, Artificial sequence
  SiRNA target sequence
aaaattgttggagttgaagcattttat

SEQ ID NO: 63594 - DNA, 27 bp, Artificial sequence
  SiRNA target sequence
aaattgttggagttgaagcattttatc

SEQ ID NO: 63595 - DNA, 27 bp, Artificial sequence
  SiRNA target sequence
aattgttggagttgaagcattttatca

SEQ ID NO: 63596 - DNA, 27 bp, Artificial sequence
  SiRNA target sequence
attgttggagttgaagcattttatcat

SEQ ID NO: 63597 - DNA, 27 bp, Artificial sequence
  SiRNA target sequence
ttgttggagttgaagcattttatcatt

SEQ ID NO: 63598 - DNA, 27 bp, Artificial sequence
  SiRNA target sequence
tgttggagttgaagcattttatcatta

SEQ ID NO: 63599 - DNA, 27 bp, Artificial sequence
  SiRNA target sequence
gttggagttgaagcattttatcattac

SEQ ID NO: 63600 - DNA, 27 bp, Artificial sequence
  SiRNA target sequence
ttggagttgaagcattttatcattaca

SEQ ID NO: 63601 - DNA, 27 bp, Artificial sequence
  SiRNA target sequence
tggagttgaagcattttatcattacat

SEQ ID NO: 63602 - DNA, 27 bp, Artificial sequence
  SiRNA target sequence
ggagttgaagcattttatcattacatt

SEQ ID NO: 63603 - DNA, 27 bp, Artificial sequence
  SiRNA target sequence
gagttgaagcattttatcattacattt

SEQ ID NO: 63604 - DNA, 27 bp, Artificial sequence
  SiRNA target sequence
agttgaagcattttatcattacatttc

SEQ ID NO: 63605 - DNA, 27 bp, Artificial sequence
  SiRNA target sequence
gttgaagcattttatcattacatttca

SEQ ID NO: 63606 - DNA, 27 bp, Artificial sequence
  SiRNA target sequence
ttgaagcattttatcattacatttcat

SEQ ID NO: 63607 - DNA, 27 bp, Artificial sequence
  SiRNA target sequence
tgaagcattttatcattacatttcatt

SEQ ID NO: 63608 - DNA, 27 bp, Artificial sequence
  SiRNA target sequence
gaagcattttatcattacatttcatta

SEQ ID NO: 63609 - DNA, 27 bp, Artificial sequence
  SiRNA target sequence
aagcattttatcattacatttcattaa

SEQ ID NO: 63610 - DNA, 27 bp, Artificial sequence
  SiRNA target sequence
agcattttatcattacatttcattaaa

SEQ ID NO: 63611 - DNA, 27 bp, Artificial sequence
  SiRNA target sequence
gcattttatcattacatttcattaaac

SEQ ID NO: 63612 - DNA, 27 bp, Artificial sequence
  SiRNA target sequence
cattttatcattacatttcattaaact

SEQ ID NO: 63613 - DNA, 27 bp, Artificial sequence
  SiRNA target sequence
attttatcattacatttcattaaactt

SEQ ID NO: 63614 - DNA, 27 bp, Artificial sequence
  SiRNA target sequence
ttttatcattacatttcattaaactta

SEQ ID NO: 63615 - DNA, 27 bp, Artificial sequence
  SiRNA target sequence
tttatcattacatttcattaaacttag

SEQ ID NO: 63616 - DNA, 27 bp, Artificial sequence
  SiRNA target sequence
ttatcattacatttcattaaacttaga

SEQ ID NO: 63617 - DNA, 27 bp, Artificial sequence
  SiRNA target sequence
tatcattacatttcattaaacttagaa

SEQ ID NO: 63618 - DNA, 27 bp, Artificial sequence
  SiRNA target sequence
atcattacatttcattaaacttagaaa

SEQ ID NO: 63619 - DNA, 27 bp, Artificial sequence
  SiRNA target sequence
tcattacatttcattaaacttagaaaa

SEQ ID NO: 63620 - DNA, 27 bp, Artificial sequence
  SiRNA target sequence
cattacatttcattaaacttagaaaat

SEQ ID NO: 63621 - DNA, 27 bp, Artificial sequence
  SiRNA target sequence
attacatttcattaaacttagaaaatt

SEQ ID NO: 63622 - DNA, 27 bp, Artificial sequence
  SiRNA target sequence
ttacatttcattaaacttagaaaattt

SEQ ID NO: 63623 - DNA, 27 bp, Artificial sequence
  SiRNA target sequence
tacatttcattaaacttagaaaatttt

SEQ ID NO: 63624 - DNA, 27 bp, Artificial sequence
  SiRNA target sequence
acatttcattaaacttagaaaatttta

SEQ ID NO: 63625 - DNA, 27 bp, Artificial sequence
  SiRNA target sequence
catttcattaaacttagaaaattttaa

SEQ ID NO: 63626 - DNA, 27 bp, Artificial sequence
  SiRNA target sequence
atttcattaaacttagaaaattttaac

SEQ ID NO: 63627 - DNA, 27 bp, Artificial sequence
  SiRNA target sequence
tttcattaaacttagaaaattttaaca

SEQ ID NO: 63628 - DNA, 27 bp, Artificial sequence
  SiRNA target sequence
ttcattaaacttagaaaattttaacaa

SEQ ID NO: 63629 - DNA, 27 bp, Artificial sequence
  SiRNA target sequence
tcattaaacttagaaaattttaacaaa

SEQ ID NO: 63630 - DNA, 27 bp, Artificial sequence
  SiRNA target sequence
cattaaacttagaaaattttaacaaaa

SEQ ID NO: 63631 - DNA, 27 bp, Artificial sequence
  SiRNA target sequence
attaaacttagaaaattttaacaaaat

SEQ ID NO: 63632 - DNA, 27 bp, Artificial sequence
  SiRNA target sequence
ttaaacttagaaaattttaacaaaata

SEQ ID NO: 63633 - DNA, 27 bp, Artificial sequence
  SiRNA target sequence
taaacttagaaaattttaacaaaatag

SEQ ID NO: 63634 - DNA, 27 bp, Artificial sequence
  SiRNA target sequence
aaacttagaaaattttaacaaaatagg

SEQ ID NO: 63635 - DNA, 27 bp, Artificial sequence
  SiRNA target sequence
aacttagaaaattttaacaaaatagga

SEQ ID NO: 63636 - DNA, 27 bp, Artificial sequence
  SiRNA target sequence
acttagaaaattttaacaaaataggaa

SEQ ID NO: 63637 - DNA, 27 bp, Artificial sequence
  SiRNA target sequence
cttagaaaattttaacaaaataggaag

SEQ ID NO: 63638 - DNA, 27 bp, Artificial sequence
  SiRNA target sequence
ttagaaaattttaacaaaataggaagt

SEQ ID NO: 63639 - DNA, 27 bp, Artificial sequence
  SiRNA target sequence
tagaaaattttaacaaaataggaagtg

SEQ ID NO: 63640 - DNA, 27 bp, Artificial sequence
  SiRNA target sequence
agaaaattttaacaaaataggaagtgg

SEQ ID NO: 63641 - DNA, 27 bp, Artificial sequence
  SiRNA target sequence
gaaaattttaacaaaataggaagtgga

SEQ ID NO: 63642 - DNA, 27 bp, Artificial sequence
  SiRNA target sequence
aaaattttaacaaaataggaagtggag

SEQ ID NO: 63643 - DNA, 27 bp, Artificial sequence
  SiRNA target sequence
aaattttaacaaaataggaagtggaga

SEQ ID NO: 63644 - DNA, 27 bp, Artificial sequence
  SiRNA target sequence
aattttaacaaaataggaagtggagag

SEQ ID NO: 63645 - DNA, 27 bp, Artificial sequence
  SiRNA target sequence
attttaacaaaataggaagtggagaga

SEQ ID NO: 63646 - DNA, 27 bp, Artificial sequence
  SiRNA target sequence
ttttaacaaaataggaagtggagagat

SEQ ID NO: 63647 - DNA, 27 bp, Artificial sequence
  SiRNA target sequence
tttaacaaaataggaagtggagagata

SEQ ID NO: 63648 - DNA, 27 bp, Artificial sequence
  SiRNA target sequence
ttaacaaaataggaagtggagagatac

SEQ ID NO: 63649 - DNA, 27 bp, Artificial sequence
  SiRNA target sequence
taacaaaataggaagtggagagataca

SEQ ID NO: 63650 - DNA, 27 bp, Artificial sequence
  SiRNA target sequence
aacaaaataggaagtggagagatacaa

SEQ ID NO: 63651 - DNA, 27 bp, Artificial sequence
  SiRNA target sequence
acaaaataggaagtggagagatacaaa

SEQ ID NO: 63652 - DNA, 27 bp, Artificial sequence
  SiRNA target sequence
caaaataggaagtggagagatacaaat

SEQ ID NO: 63653 - DNA, 27 bp, Artificial sequence
  SiRNA target sequence
aaaataggaagtggagagatacaaatg

SEQ ID NO: 63654 - DNA, 27 bp, Artificial sequence
  SiRNA target sequence
aaataggaagtggagagatacaaatga

SEQ ID NO: 63655 - DNA, 27 bp, Artificial sequence
  SiRNA target sequence
aataggaagtggagagatacaaatgat

SEQ ID NO: 63656 - DNA, 27 bp, Artificial sequence
  SiRNA target sequence
ataggaagtggagagatacaaatgatt

SEQ ID NO: 63657 - DNA, 27 bp, Artificial sequence
  SiRNA target sequence
taggaagtggagagatacaaatgatta

SEQ ID NO: 63658 - DNA, 27 bp, Artificial sequence
  SiRNA target sequence
aggaagtggagagatacaaatgattat

SEQ ID NO: 63659 - DNA, 27 bp, Artificial sequence
  SiRNA target sequence
ggaagtggagagatacaaatgattatt

SEQ ID NO: 63660 - DNA, 27 bp, Artificial sequence
  SiRNA target sequence
gaagtggagagatacaaatgattattg

SEQ ID NO: 63661 - DNA, 27 bp, Artificial sequence
  SiRNA target sequence
aagtggagagatacaaatgattattga

SEQ ID NO: 63662 - DNA, 27 bp, Artificial sequence
  SiRNA target sequence
agtggagagatacaaatgattattgag

SEQ ID NO: 63663 - DNA, 27 bp, Artificial sequence
  SiRNA target sequence
gtggagagatacaaatgattattgagc

SEQ ID NO: 63664 - DNA, 27 bp, Artificial sequence
  SiRNA target sequence
tggagagatacaaatgattattgagcg

SEQ ID NO: 63665 - DNA, 27 bp, Artificial sequence
  SiRNA target sequence
ggagagatacaaatgattattgagcgg

SEQ ID NO: 63666 - DNA, 27 bp, Artificial sequence
  SiRNA target sequence
gagagatacaaatgattattgagcgga

SEQ ID NO: 63667 - DNA, 27 bp, Artificial sequence
  SiRNA target sequence
agagatacaaatgattattgagcggaa

SEQ ID NO: 63668 - DNA, 27 bp, Artificial sequence
  SiRNA target sequence
gagatacaaatgattattgagcggaaa

SEQ ID NO: 63669 - DNA, 27 bp, Artificial sequence
  SiRNA target sequence
agatacaaatgattattgagcggaaaa

SEQ ID NO: 63670 - DNA, 27 bp, Artificial sequence
  SiRNA target sequence
gatacaaatgattattgagcggaaaag

SEQ ID NO: 63671 - DNA, 27 bp, Artificial sequence
  SiRNA target sequence
atacaaatgattattgagcggaaaagt

SEQ ID NO: 63672 - DNA, 27 bp, Artificial sequence
  SiRNA target sequence
tacaaatgattattgagcggaaaagta

SEQ ID NO: 63673 - DNA, 27 bp, Artificial sequence
  SiRNA target sequence
acaaatgattattgagcggaaaagtag

SEQ ID NO: 63674 - DNA, 27 bp, Artificial sequence
  SiRNA target sequence
caaatgattattgagcggaaaagtaga

SEQ ID NO: 63675 - DNA, 27 bp, Artificial sequence
  SiRNA target sequence
aaatgattattgagcggaaaagtagag

SEQ ID NO: 63676 - DNA, 27 bp, Artificial sequence
  SiRNA target sequence
aatgattattgagcggaaaagtagagc

SEQ ID NO: 63677 - DNA, 27 bp, Artificial sequence
  SiRNA target sequence
atgattattgagcggaaaagtagagca

SEQ ID NO: 63678 - DNA, 27 bp, Artificial sequence
  SiRNA target sequence
tgattattgagcggaaaagtagagcat

SEQ ID NO: 63679 - DNA, 27 bp, Artificial sequence
  SiRNA target sequence
gattattgagcggaaaagtagagcata

SEQ ID NO: 63680 - DNA, 27 bp, Artificial sequence
  SiRNA target sequence
attattgagcggaaaagtagagcatat

SEQ ID NO: 63681 - DNA, 27 bp, Artificial sequence
  SiRNA target sequence
ttattgagcggaaaagtagagcatatg

SEQ ID NO: 63682 - DNA, 27 bp, Artificial sequence
  SiRNA target sequence
tattgagcggaaaagtagagcatatgg

SEQ ID NO: 63683 - DNA, 27 bp, Artificial sequence
  SiRNA target sequence
attgagcggaaaagtagagcatatggt

SEQ ID NO: 63684 - DNA, 27 bp, Artificial sequence
  SiRNA target sequence
ttgagcggaaaagtagagcatatggtg

SEQ ID NO: 63685 - DNA, 27 bp, Artificial sequence
  SiRNA target sequence
tgagcggaaaagtagagcatatggtga

SEQ ID NO: 63686 - DNA, 27 bp, Artificial sequence
  SiRNA target sequence
gagcggaaaagtagagcatatggtgac

SEQ ID NO: 63687 - DNA, 27 bp, Artificial sequence
  SiRNA target sequence
agcggaaaagtagagcatatggtgaca

SEQ ID NO: 63688 - DNA, 27 bp, Artificial sequence
  SiRNA target sequence
gcggaaaagtagagcatatggtgacat

SEQ ID NO: 63689 - DNA, 27 bp, Artificial sequence
  SiRNA target sequence
cggaaaagtagagcatatggtgacata

SEQ ID NO: 63690 - DNA, 27 bp, Artificial sequence
  SiRNA target sequence
ggaaaagtagagcatatggtgacatac

SEQ ID NO: 63691 - DNA, 27 bp, Artificial sequence
  SiRNA target sequence
gaaaagtagagcatatggtgacatact

SEQ ID NO: 63692 - DNA, 27 bp, Artificial sequence
  SiRNA target sequence
aaaagtagagcatatggtgacatacta

SEQ ID NO: 63693 - DNA, 27 bp, Artificial sequence
  SiRNA target sequence
aaagtagagcatatggtgacatactag

SEQ ID NO: 63694 - DNA, 27 bp, Artificial sequence
  SiRNA target sequence
aagtagagcatatggtgacatactaga

SEQ ID NO: 63695 - DNA, 27 bp, Artificial sequence
  SiRNA target sequence
agtagagcatatggtgacatactagaa

SEQ ID NO: 63696 - DNA, 27 bp, Artificial sequence
  SiRNA target sequence
gtagagcatatggtgacatactagaac

SEQ ID NO: 63697 - DNA, 27 bp, Artificial sequence
  SiRNA target sequence
tagagcatatggtgacatactagaact

SEQ ID NO: 63698 - DNA, 27 bp, Artificial sequence
  SiRNA target sequence
agagcatatggtgacatactagaacta

SEQ ID NO: 63699 - DNA, 27 bp, Artificial sequence
  SiRNA target sequence
gagcatatggtgacatactagaactaa

SEQ ID NO: 63700 - DNA, 27 bp, Artificial sequence
  SiRNA target sequence
agcatatggtgacatactagaactaac

SEQ ID NO: 63701 - DNA, 27 bp, Artificial sequence
  SiRNA target sequence
gcatatggtgacatactagaactaact

SEQ ID NO: 63702 - DNA, 27 bp, Artificial sequence
  SiRNA target sequence
catatggtgacatactagaactaacta

SEQ ID NO: 63703 - DNA, 27 bp, Artificial sequence
  SiRNA target sequence
atatggtgacatactagaactaactac

SEQ ID NO: 63704 - DNA, 27 bp, Artificial sequence
  SiRNA target sequence
tatggtgacatactagaactaactact

SEQ ID NO: 63705 - DNA, 27 bp, Artificial sequence
  SiRNA target sequence
atggtgacatactagaactaactactc

SEQ ID NO: 63706 - DNA, 27 bp, Artificial sequence
  SiRNA target sequence
tggtgacatactagaactaactactct

SEQ ID NO: 63707 - DNA, 27 bp, Artificial sequence
  SiRNA target sequence
ggtgacatactagaactaactactctc

SEQ ID NO: 63708 - DNA, 27 bp, Artificial sequence
  SiRNA target sequence
gtgacatactagaactaactactctct

SEQ ID NO: 63709 - DNA, 27 bp, Artificial sequence
  SiRNA target sequence
tgacatactagaactaactactctctc

SEQ ID NO: 63710 - DNA, 27 bp, Artificial sequence
  SiRNA target sequence
gacatactagaactaactactctctcg

SEQ ID NO: 63711 - DNA, 27 bp, Artificial sequence
  SiRNA target sequence
acatactagaactaactactctctcgg

SEQ ID NO: 63712 - DNA, 27 bp, Artificial sequence
  SiRNA target sequence
catactagaactaactactctctcggc

SEQ ID NO: 63713 - DNA, 27 bp, Artificial sequence
  SiRNA target sequence
atactagaactaactactctctcggcc

SEQ ID NO: 63714 - DNA, 27 bp, Artificial sequence
  SiRNA target sequence
tactagaactaactactctctcggccg

SEQ ID NO: 63715 - DNA, 27 bp, Artificial sequence
  SiRNA target sequence
actagaactaactactctctcggccgt

SEQ ID NO: 63716 - DNA, 27 bp, Artificial sequence
  SiRNA target sequence
ctagaactaactactctctcggccgta

SEQ ID NO: 63717 - DNA, 27 bp, Artificial sequence
  SiRNA target sequence
tagaactaactactctctcggccgtac

SEQ ID NO: 63718 - DNA, 27 bp, Artificial sequence
  SiRNA target sequence
agaactaactactctctcggccgtacc

SEQ ID NO: 63719 - DNA, 27 bp, Artificial sequence
  SiRNA target sequence
gaactaactactctctcggccgtacca

SEQ ID NO: 63720 - DNA, 27 bp, Artificial sequence
  SiRNA target sequence
aactaactactctctcggccgtaccaa

SEQ ID NO: 63721 - DNA, 27 bp, Artificial sequence
  SiRNA target sequence
actaactactctctcggccgtaccaac

SEQ ID NO: 63722 - DNA, 27 bp, Artificial sequence
  SiRNA target sequence
ctaactactctctcggccgtaccaacc

SEQ ID NO: 63723 - DNA, 27 bp, Artificial sequence
  SiRNA target sequence
taactactctctcggccgtaccaacct

SEQ ID NO: 63724 - DNA, 27 bp, Artificial sequence
  SiRNA target sequence
aactactctctcggccgtaccaacctg

SEQ ID NO: 63725 - DNA, 27 bp, Artificial sequence
  SiRNA target sequence
actactctctcggccgtaccaacctgt

SEQ ID NO: 63726 - DNA, 27 bp, Artificial sequence
  SiRNA target sequence
ctactctctcggccgtaccaacctgta

SEQ ID NO: 63727 - DNA, 27 bp, Artificial sequence
  SiRNA target sequence
tactctctcggccgtaccaacctgtat

SEQ ID NO: 63728 - DNA, 27 bp, Artificial sequence
  SiRNA target sequence
actctctcggccgtaccaacctgtatt

SEQ ID NO: 63729 - DNA, 27 bp, Artificial sequence
  SiRNA target sequence
ctctctcggccgtaccaacctgtattg

SEQ ID NO: 63730 - DNA, 27 bp, Artificial sequence
  SiRNA target sequence
tctctcggccgtaccaacctgtattgt

SEQ ID NO: 63731 - DNA, 27 bp, Artificial sequence
  SiRNA target sequence
ctctcggccgtaccaacctgtattgta

SEQ ID NO: 63732 - DNA, 27 bp, Artificial sequence
  SiRNA target sequence
tctcggccgtaccaacctgtattgtag

SEQ ID NO: 63733 - DNA, 27 bp, Artificial sequence
  SiRNA target sequence
ctcggccgtaccaacctgtattgtagt

SEQ ID NO: 63734 - DNA, 27 bp, Artificial sequence
  SiRNA target sequence
tcggccgtaccaacctgtattgtagtt

SEQ ID NO: 63735 - DNA, 27 bp, Artificial sequence
  SiRNA target sequence
cggccgtaccaacctgtattgtagtta

SEQ ID NO: 63736 - DNA, 27 bp, Artificial sequence
  SiRNA target sequence
ggccgtaccaacctgtattgtagttat

SEQ ID NO: 63737 - DNA, 27 bp, Artificial sequence
  SiRNA target sequence
gccgtaccaacctgtattgtagttatt

SEQ ID NO: 63738 - DNA, 27 bp, Artificial sequence
  SiRNA target sequence
ccgtaccaacctgtattgtagttatta

SEQ ID NO: 63739 - DNA, 27 bp, Artificial sequence
  SiRNA target sequence
cgtaccaacctgtattgtagttattat

SEQ ID NO: 63740 - DNA, 27 bp, Artificial sequence
  SiRNA target sequence
gtaccaacctgtattgtagttattatg

SEQ ID NO: 63741 - DNA, 27 bp, Artificial sequence
  SiRNA target sequence
taccaacctgtattgtagttattatgt

SEQ ID NO: 63742 - DNA, 27 bp, Artificial sequence
  SiRNA target sequence
accaacctgtattgtagttattatgtc

SEQ ID NO: 63743 - DNA, 27 bp, Artificial sequence
  SiRNA target sequence
ccaacctgtattgtagttattatgtcg

SEQ ID NO: 63744 - DNA, 27 bp, Artificial sequence
  SiRNA target sequence
caacctgtattgtagttattatgtcgt

SEQ ID NO: 63745 - DNA, 27 bp, Artificial sequence
  SiRNA target sequence
aacctgtattgtagttattatgtcgtt

SEQ ID NO: 63746 - DNA, 27 bp, Artificial sequence
  SiRNA target sequence
acctgtattgtagttattatgtcgttt

SEQ ID NO: 63747 - DNA, 27 bp, Artificial sequence
  SiRNA target sequence
cctgtattgtagttattatgtcgtttt

SEQ ID NO: 63748 - DNA, 27 bp, Artificial sequence
  SiRNA target sequence
ctgtattgtagttattatgtcgttttt

SEQ ID NO: 63749 - DNA, 27 bp, Artificial sequence
  SiRNA target sequence
tgtattgtagttattatgtcgtttttc

SEQ ID NO: 63750 - DNA, 27 bp, Artificial sequence
  SiRNA target sequence
gtattgtagttattatgtcgtttttct

SEQ ID NO: 63751 - DNA, 27 bp, Artificial sequence
  SiRNA target sequence
tattgtagttattatgtcgtttttctc

SEQ ID NO: 63752 - DNA, 27 bp, Artificial sequence
  SiRNA target sequence
attgtagttattatgtcgtttttctca

SEQ ID NO: 63753 - DNA, 27 bp, Artificial sequence
  SiRNA target sequence
ttgtagttattatgtcgtttttctcag

SEQ ID NO: 63754 - DNA, 27 bp, Artificial sequence
  SiRNA target sequence
tgtagttattatgtcgtttttctcagt

SEQ ID NO: 63755 - DNA, 27 bp, Artificial sequence
  SiRNA target sequence
gtagttattatgtcgtttttctcagta

SEQ ID NO: 63756 - DNA, 27 bp, Artificial sequence
  SiRNA target sequence
tagttattatgtcgtttttctcagtat

SEQ ID NO: 63757 - DNA, 27 bp, Artificial sequence
  SiRNA target sequence
agttattatgtcgtttttctcagtata

SEQ ID NO: 63758 - DNA, 27 bp, Artificial sequence
  SiRNA target sequence
gttattatgtcgtttttctcagtatat

SEQ ID NO: 63759 - DNA, 27 bp, Artificial sequence
  SiRNA target sequence
ttattatgtcgtttttctcagtatata

SEQ ID NO: 63760 - DNA, 27 bp, Artificial sequence
  SiRNA target sequence
tattatgtcgtttttctcagtatataa

SEQ ID NO: 63761 - DNA, 27 bp, Artificial sequence
  SiRNA target sequence
attatgtcgtttttctcagtatataaa

SEQ ID NO: 63762 - DNA, 27 bp, Artificial sequence
  SiRNA target sequence
ttatgtcgtttttctcagtatataaaa

SEQ ID NO: 63763 - DNA, 27 bp, Artificial sequence
  SiRNA target sequence
tatgtcgtttttctcagtatataaaaa

SEQ ID NO: 63764 - DNA, 27 bp, Artificial sequence
  SiRNA target sequence
atgtcgtttttctcagtatataaaaat

SEQ ID NO: 63765 - DNA, 27 bp, Artificial sequence
  SiRNA target sequence
tgtcgtttttctcagtatataaaaatt

SEQ ID NO: 63766 - DNA, 27 bp, Artificial sequence
  SiRNA target sequence
gtcgtttttctcagtatataaaaattt

SEQ ID NO: 63767 - DNA, 27 bp, Artificial sequence
  SiRNA target sequence
tcgtttttctcagtatataaaaatttg

SEQ ID NO: 63768 - DNA, 27 bp, Artificial sequence
  SiRNA target sequence
cgtttttctcagtatataaaaatttgg

SEQ ID NO: 63769 - DNA, 27 bp, Artificial sequence
  SiRNA target sequence
gtttttctcagtatataaaaatttggg

SEQ ID NO: 63770 - DNA, 27 bp, Artificial sequence
  SiRNA target sequence
tttttctcagtatataaaaatttggga

SEQ ID NO: 63771 - DNA, 27 bp, Artificial sequence
  SiRNA target sequence
ttttctcagtatataaaaatttgggaa

SEQ ID NO: 63772 - DNA, 27 bp, Artificial sequence
  SiRNA target sequence
tttctcagtatataaaaatttgggaag

SEQ ID NO: 63773 - DNA, 27 bp, Artificial sequence
  SiRNA target sequence
ttctcagtatataaaaatttgggaaga

SEQ ID NO: 63774 - DNA, 27 bp, Artificial sequence
  SiRNA target sequence
tctcagtatataaaaatttgggaagag

SEQ ID NO: 63775 - DNA, 27 bp, Artificial sequence
  SiRNA target sequence
ctcagtatataaaaatttgggaagaga

SEQ ID NO: 63776 - DNA, 27 bp, Artificial sequence
  SiRNA target sequence
tcagtatataaaaatttgggaagagat

SEQ ID NO: 63777 - DNA, 27 bp, Artificial sequence
  SiRNA target sequence
cagtatataaaaatttgggaagagatg

SEQ ID NO: 63778 - DNA, 27 bp, Artificial sequence
  SiRNA target sequence
agtatataaaaatttgggaagagatgc

SEQ ID NO: 63779 - DNA, 27 bp, Artificial sequence
  SiRNA target sequence
gtatataaaaatttgggaagagatgca

SEQ ID NO: 63780 - DNA, 27 bp, Artificial sequence
  SiRNA target sequence
tatataaaaatttgggaagagatgcac

SEQ ID NO: 63781 - DNA, 27 bp, Artificial sequence
  SiRNA target sequence
atataaaaatttgggaagagatgcact

SEQ ID NO: 63782 - DNA, 27 bp, Artificial sequence
  SiRNA target sequence
tataaaaatttgggaagagatgcactc

SEQ ID NO: 63783 - DNA, 27 bp, Artificial sequence
  SiRNA target sequence
ataaaaatttgggaagagatgcactct

SEQ ID NO: 63784 - DNA, 27 bp, Artificial sequence
  SiRNA target sequence
taaaaatttgggaagagatgcactcta

SEQ ID NO: 63785 - DNA, 27 bp, Artificial sequence
  SiRNA target sequence
aaaaatttgggaagagatgcactctac

SEQ ID NO: 63786 - DNA, 27 bp, Artificial sequence
  SiRNA target sequence
aaaatttgggaagagatgcactctacg

SEQ ID NO: 63787 - DNA, 27 bp, Artificial sequence
  SiRNA target sequence
aaatttgggaagagatgcactctacgt

SEQ ID NO: 63788 - DNA, 27 bp, Artificial sequence
  SiRNA target sequence
aatttgggaagagatgcactctacgta

SEQ ID NO: 63789 - DNA, 27 bp, Artificial sequence
  SiRNA target sequence
atttgggaagagatgcactctacgtaa

SEQ ID NO: 63790 - DNA, 27 bp, Artificial sequence
  SiRNA target sequence
tttgggaagagatgcactctacgtaat

SEQ ID NO: 63791 - DNA, 27 bp, Artificial sequence
  SiRNA target sequence
ttgggaagagatgcactctacgtaatg

SEQ ID NO: 63792 - DNA, 27 bp, Artificial sequence
  SiRNA target sequence
tgggaagagatgcactctacgtaatgt

SEQ ID NO: 63793 - DNA, 27 bp, Artificial sequence
  SiRNA target sequence
gggaagagatgcactctacgtaatgtt

SEQ ID NO: 63794 - DNA, 27 bp, Artificial sequence
  SiRNA target sequence
ggaagagatgcactctacgtaatgttg

SEQ ID NO: 63795 - DNA, 27 bp, Artificial sequence
  SiRNA target sequence
gaagagatgcactctacgtaatgttgg

SEQ ID NO: 63796 - DNA, 27 bp, Artificial sequence
  SiRNA target sequence
aagagatgcactctacgtaatgttggc

SEQ ID NO: 63797 - DNA, 27 bp, Artificial sequence
  SiRNA target sequence
agagatgcactctacgtaatgttggct

SEQ ID NO: 63798 - DNA, 27 bp, Artificial sequence
  SiRNA target sequence
gagatgcactctacgtaatgttggcta

SEQ ID NO: 63799 - DNA, 27 bp, Artificial sequence
  SiRNA target sequence
agatgcactctacgtaatgttggctac

SEQ ID NO: 63800 - DNA, 27 bp, Artificial sequence
  SiRNA target sequence
gatgcactctacgtaatgttggctaca

SEQ ID NO: 63801 - DNA, 27 bp, Artificial sequence
  SiRNA target sequence
atgcactctacgtaatgttggctacaa

SEQ ID NO: 63802 - DNA, 27 bp, Artificial sequence
  SiRNA target sequence
tgcactctacgtaatgttggctacaag

SEQ ID NO: 63803 - DNA, 27 bp, Artificial sequence
  SiRNA target sequence
gcactctacgtaatgttggctacaagt

SEQ ID NO: 63804 - DNA, 27 bp, Artificial sequence
  SiRNA target sequence
cactctacgtaatgttggctacaagtg

SEQ ID NO: 63805 - DNA, 27 bp, Artificial sequence
  SiRNA target sequence
actctacgtaatgttggctacaagtgc

SEQ ID NO: 63806 - DNA, 27 bp, Artificial sequence
  SiRNA target sequence
ctctacgtaatgttggctacaagtgcc

SEQ ID NO: 63807 - DNA, 27 bp, Artificial sequence
  SiRNA target sequence
tctacgtaatgttggctacaagtgcct

SEQ ID NO: 63808 - DNA, 27 bp, Artificial sequence
  SiRNA target sequence
ctacgtaatgttggctacaagtgcctt

SEQ ID NO: 63809 - DNA, 27 bp, Artificial sequence
  SiRNA target sequence
tacgtaatgttggctacaagtgccttg

SEQ ID NO: 63810 - DNA, 27 bp, Artificial sequence
  SiRNA target sequence
acgtaatgttggctacaagtgccttgt

SEQ ID NO: 63811 - DNA, 27 bp, Artificial sequence
  SiRNA target sequence
cgtaatgttggctacaagtgccttgta

SEQ ID NO: 63812 - DNA, 27 bp, Artificial sequence
  SiRNA target sequence
gtaatgttggctacaagtgccttgtat

SEQ ID NO: 63813 - DNA, 27 bp, Artificial sequence
  SiRNA target sequence
taatgttggctacaagtgccttgtatg

SEQ ID NO: 63814 - DNA, 27 bp, Artificial sequence
  SiRNA target sequence
aatgttggctacaagtgccttgtatgt

SEQ ID NO: 63815 - DNA, 27 bp, Artificial sequence
  SiRNA target sequence
atgttggctacaagtgccttgtatgtg

SEQ ID NO: 63816 - DNA, 27 bp, Artificial sequence
  SiRNA target sequence
tgttggctacaagtgccttgtatgtgt

SEQ ID NO: 63817 - DNA, 27 bp, Artificial sequence
  SiRNA target sequence
gttggctacaagtgccttgtatgtgta

SEQ ID NO: 63818 - DNA, 27 bp, Artificial sequence
  SiRNA target sequence
ttggctacaagtgccttgtatgtgtat

SEQ ID NO: 63819 - DNA, 27 bp, Artificial sequence
  SiRNA target sequence
tggctacaagtgccttgtatgtgtatt

SEQ ID NO: 63820 - DNA, 27 bp, Artificial sequence
  SiRNA target sequence
ggctacaagtgccttgtatgtgtattt

SEQ ID NO: 63821 - DNA, 27 bp, Artificial sequence
  SiRNA target sequence
gctacaagtgccttgtatgtgtatttt

SEQ ID NO: 63822 - DNA, 27 bp, Artificial sequence
  SiRNA target sequence
ctacaagtgccttgtatgtgtatttta

SEQ ID NO: 63823 - DNA, 27 bp, Artificial sequence
  SiRNA target sequence
tacaagtgccttgtatgtgtattttac

SEQ ID NO: 63824 - DNA, 27 bp, Artificial sequence
  SiRNA target sequence
acaagtgccttgtatgtgtattttaca

SEQ ID NO: 63825 - DNA, 27 bp, Artificial sequence
  SiRNA target sequence
caagtgccttgtatgtgtattttacat

SEQ ID NO: 63826 - DNA, 27 bp, Artificial sequence
  SiRNA target sequence
aagtgccttgtatgtgtattttacatt

SEQ ID NO: 63827 - DNA, 27 bp, Artificial sequence
  SiRNA target sequence
agtgccttgtatgtgtattttacattt

SEQ ID NO: 63828 - DNA, 27 bp, Artificial sequence
  SiRNA target sequence
gtgccttgtatgtgtattttacatttg

SEQ ID NO: 63829 - DNA, 27 bp, Artificial sequence
  SiRNA target sequence
tgccttgtatgtgtattttacatttgt

SEQ ID NO: 63830 - DNA, 27 bp, Artificial sequence
  SiRNA target sequence
gccttgtatgtgtattttacatttgta

SEQ ID NO: 63831 - DNA, 27 bp, Artificial sequence
  SiRNA target sequence
ccttgtatgtgtattttacatttgtat

SEQ ID NO: 63832 - DNA, 27 bp, Artificial sequence
  SiRNA target sequence
cttgtatgtgtattttacatttgtatt

SEQ ID NO: 63833 - DNA, 27 bp, Artificial sequence
  SiRNA target sequence
ttgtatgtgtattttacatttgtattt

SEQ ID NO: 63834 - DNA, 27 bp, Artificial sequence
  SiRNA target sequence
tgtatgtgtattttacatttgtatttt

SEQ ID NO: 63835 - DNA, 27 bp, Artificial sequence
  SiRNA target sequence
gtatgtgtattttacatttgtattttc

SEQ ID NO: 63836 - DNA, 27 bp, Artificial sequence
  SiRNA target sequence
tatgtgtattttacatttgtattttca

SEQ ID NO: 63837 - DNA, 27 bp, Artificial sequence
  SiRNA target sequence
atgtgtattttacatttgtattttcaa

SEQ ID NO: 63838 - DNA, 27 bp, Artificial sequence
  SiRNA target sequence
tgtgtattttacatttgtattttcaat

SEQ ID NO: 63839 - DNA, 27 bp, Artificial sequence
  SiRNA target sequence
gtgtattttacatttgtattttcaata

SEQ ID NO: 63840 - DNA, 27 bp, Artificial sequence
  SiRNA target sequence
tgtattttacatttgtattttcaatat

SEQ ID NO: 63841 - DNA, 27 bp, Artificial sequence
  SiRNA target sequence
gtattttacatttgtattttcaatatg

SEQ ID NO: 63842 - DNA, 27 bp, Artificial sequence
  SiRNA target sequence
tattttacatttgtattttcaatatgg

SEQ ID NO: 63843 - DNA, 27 bp, Artificial sequence
  SiRNA target sequence
attttacatttgtattttcaatatgga

SEQ ID NO: 63844 - DNA, 27 bp, Artificial sequence
  SiRNA target sequence
ttttacatttgtattttcaatatggag

SEQ ID NO: 63845 - DNA, 27 bp, Artificial sequence
  SiRNA target sequence
tttacatttgtattttcaatatggaga

SEQ ID NO: 63846 - DNA, 27 bp, Artificial sequence
  SiRNA target sequence
ttacatttgtattttcaatatggagaa

SEQ ID NO: 63847 - DNA, 27 bp, Artificial sequence
  SiRNA target sequence
tacatttgtattttcaatatggagaaa

SEQ ID NO: 63848 - DNA, 27 bp, Artificial sequence
  SiRNA target sequence
acatttgtattttcaatatggagaaac

SEQ ID NO: 63849 - DNA, 27 bp, Artificial sequence
  SiRNA target sequence
catttgtattttcaatatggagaaaca

SEQ ID NO: 63850 - DNA, 27 bp, Artificial sequence
  SiRNA target sequence
atttgtattttcaatatggagaaacaa

SEQ ID NO: 63851 - DNA, 27 bp, Artificial sequence
  SiRNA target sequence
tttgtattttcaatatggagaaacaat

SEQ ID NO: 63852 - DNA, 27 bp, Artificial sequence
  SiRNA target sequence
ttgtattttcaatatggagaaacaata

SEQ ID NO: 63853 - DNA, 27 bp, Artificial sequence
  SiRNA target sequence
tgtattttcaatatggagaaacaatat

SEQ ID NO: 63854 - DNA, 27 bp, Artificial sequence
  SiRNA target sequence
gtattttcaatatggagaaacaatatt

SEQ ID NO: 63855 - DNA, 27 bp, Artificial sequence
  SiRNA target sequence
tattttcaatatggagaaacaatatta

SEQ ID NO: 63856 - DNA, 27 bp, Artificial sequence
  SiRNA target sequence
attttcaatatggagaaacaatattag

SEQ ID NO: 63857 - DNA, 27 bp, Artificial sequence
  SiRNA target sequence
ttttcaatatggagaaacaatattaga

SEQ ID NO: 63858 - DNA, 27 bp, Artificial sequence
  SiRNA target sequence
tttcaatatggagaaacaatattagaa

SEQ ID NO: 63859 - DNA, 27 bp, Artificial sequence
  SiRNA target sequence
ttcaatatggagaaacaatattagaag

SEQ ID NO: 63860 - DNA, 27 bp, Artificial sequence
  SiRNA target sequence
tcaatatggagaaacaatattagaaga

SEQ ID NO: 63861 - DNA, 27 bp, Artificial sequence
  SiRNA target sequence
caatatggagaaacaatattagaagac

SEQ ID NO: 63862 - DNA, 27 bp, Artificial sequence
  SiRNA target sequence
aatatggagaaacaatattagaagaca

SEQ ID NO: 63863 - DNA, 27 bp, Artificial sequence
  SiRNA target sequence
atatggagaaacaatattagaagacaa

SEQ ID NO: 63864 - DNA, 27 bp, Artificial sequence
  SiRNA target sequence
tatggagaaacaatattagaagacaat

SEQ ID NO: 63865 - DNA, 27 bp, Artificial sequence
  SiRNA target sequence
atggagaaacaatattagaagacaata

SEQ ID NO: 63866 - DNA, 27 bp, Artificial sequence
  SiRNA target sequence
tggagaaacaatattagaagacaatat

SEQ ID NO: 63867 - DNA, 27 bp, Artificial sequence
  SiRNA target sequence
ggagaaacaatattagaagacaatata

SEQ ID NO: 63868 - DNA, 27 bp, Artificial sequence
  SiRNA target sequence
gagaaacaatattagaagacaatataa

SEQ ID NO: 63869 - DNA, 27 bp, Artificial sequence
  SiRNA target sequence
agaaacaatattagaagacaatataat

SEQ ID NO: 63870 - DNA, 27 bp, Artificial sequence
  SiRNA target sequence
gaaacaatattagaagacaatataata

SEQ ID NO: 63871 - DNA, 27 bp, Artificial sequence
  SiRNA target sequence
aaacaatattagaagacaatataataa

SEQ ID NO: 63872 - DNA, 27 bp, Artificial sequence
  SiRNA target sequence
aacaatattagaagacaatataataag

SEQ ID NO: 63873 - DNA, 27 bp, Artificial sequence
  SiRNA target sequence
acaatattagaagacaatataataagt

SEQ ID NO: 63874 - DNA, 27 bp, Artificial sequence
  SiRNA target sequence
caatattagaagacaatataataagtc

SEQ ID NO: 63875 - DNA, 27 bp, Artificial sequence
  SiRNA target sequence
aatattagaagacaatataataagtca

SEQ ID NO: 63876 - DNA, 27 bp, Artificial sequence
  SiRNA target sequence
atattagaagacaatataataagtcac

SEQ ID NO: 63877 - DNA, 27 bp, Artificial sequence
  SiRNA target sequence
tattagaagacaatataataagtcaca

SEQ ID NO: 63878 - DNA, 27 bp, Artificial sequence
  SiRNA target sequence
attagaagacaatataataagtcacag

SEQ ID NO: 63879 - DNA, 27 bp, Artificial sequence
  SiRNA target sequence
ttagaagacaatataataagtcacagg

SEQ ID NO: 63880 - DNA, 27 bp, Artificial sequence
  SiRNA target sequence
tagaagacaatataataagtcacagga

SEQ ID NO: 63881 - DNA, 27 bp, Artificial sequence
  SiRNA target sequence
agaagacaatataataagtcacaggat

SEQ ID NO: 63882 - DNA, 27 bp, Artificial sequence
  SiRNA target sequence
gaagacaatataataagtcacaggata

SEQ ID NO: 63883 - DNA, 27 bp, Artificial sequence
  SiRNA target sequence
aagacaatataataagtcacaggataa

SEQ ID NO: 63884 - DNA, 27 bp, Artificial sequence
  SiRNA target sequence
agacaatataataagtcacaggataaa

SEQ ID NO: 63885 - DNA, 27 bp, Artificial sequence
  SiRNA target sequence
gacaatataataagtcacaggataaat

SEQ ID NO: 63886 - DNA, 27 bp, Artificial sequence
  SiRNA target sequence
acaatataataagtcacaggataaatt

SEQ ID NO: 63887 - DNA, 27 bp, Artificial sequence
  SiRNA target sequence
caatataataagtcacaggataaatta

SEQ ID NO: 63888 - DNA, 27 bp, Artificial sequence
  SiRNA target sequence
aatataataagtcacaggataaattat

SEQ ID NO: 63889 - DNA, 27 bp, Artificial sequence
  SiRNA target sequence
atataataagtcacaggataaattatc

SEQ ID NO: 63890 - DNA, 27 bp, Artificial sequence
  SiRNA target sequence
tataataagtcacaggataaattatcg

SEQ ID NO: 63891 - DNA, 27 bp, Artificial sequence
  SiRNA target sequence
ataataagtcacaggataaattatcga

SEQ ID NO: 63892 - DNA, 27 bp, Artificial sequence
  SiRNA target sequence
taataagtcacaggataaattatcgaa

SEQ ID NO: 63893 - DNA, 27 bp, Artificial sequence
  SiRNA target sequence
aataagtcacaggataaattatcgaat

SEQ ID NO: 63894 - DNA, 27 bp, Artificial sequence
  SiRNA target sequence
ataagtcacaggataaattatcgaata

SEQ ID NO: 63895 - DNA, 27 bp, Artificial sequence
  SiRNA target sequence
taagtcacaggataaattatcgaataa

SEQ ID NO: 63896 - DNA, 27 bp, Artificial sequence
  SiRNA target sequence
aagtcacaggataaattatcgaataaa

SEQ ID NO: 63897 - DNA, 27 bp, Artificial sequence
  SiRNA target sequence
agtcacaggataaattatcgaataaat

SEQ ID NO: 63898 - DNA, 27 bp, Artificial sequence
  SiRNA target sequence
gtcacaggataaattatcgaataaatt

SEQ ID NO: 63899 - DNA, 27 bp, Artificial sequence
  SiRNA target sequence
tcacaggataaattatcgaataaatta

SEQ ID NO: 63900 - DNA, 27 bp, Artificial sequence
  SiRNA target sequence
cacaggataaattatcgaataaattac

SEQ ID NO: 63901 - DNA, 27 bp, Artificial sequence
  SiRNA target sequence
acaggataaattatcgaataaattaca

SEQ ID NO: 63902 - DNA, 27 bp, Artificial sequence
  SiRNA target sequence
caggataaattatcgaataaattacaa

SEQ ID NO: 63903 - DNA, 27 bp, Artificial sequence
  SiRNA target sequence
aggataaattatcgaataaattacaag

SEQ ID NO: 63904 - DNA, 27 bp, Artificial sequence
  SiRNA target sequence
ggataaattatcgaataaattacaaga

SEQ ID NO: 63905 - DNA, 27 bp, Artificial sequence
  SiRNA target sequence
gataaattatcgaataaattacaagat

SEQ ID NO: 63906 - DNA, 27 bp, Artificial sequence
  SiRNA target sequence
ataaattatcgaataaattacaagatt

SEQ ID NO: 63907 - DNA, 27 bp, Artificial sequence
  SiRNA target sequence
taaattatcgaataaattacaagattt

SEQ ID NO: 63908 - DNA, 27 bp, Artificial sequence
  SiRNA target sequence
aaattatcgaataaattacaagatttt

SEQ ID NO: 63909 - DNA, 27 bp, Artificial sequence
  SiRNA target sequence
aattatcgaataaattacaagattttt

SEQ ID NO: 63910 - DNA, 27 bp, Artificial sequence
  SiRNA target sequence
attatcgaataaattacaagatttttt

SEQ ID NO: 63911 - DNA, 27 bp, Artificial sequence
  SiRNA target sequence
ttatcgaataaattacaagatttttta

SEQ ID NO: 63912 - DNA, 27 bp, Artificial sequence
  SiRNA target sequence
tatcgaataaattacaagattttttag

SEQ ID NO: 63913 - DNA, 27 bp, Artificial sequence
  SiRNA target sequence
atcgaataaattacaagattttttagc

SEQ ID NO: 63914 - DNA, 27 bp, Artificial sequence
  SiRNA target sequence
tcgaataaattacaagattttttagct

SEQ ID NO: 63915 - DNA, 27 bp, Artificial sequence
  SiRNA target sequence
cgaataaattacaagattttttagcta

SEQ ID NO: 63916 - DNA, 27 bp, Artificial sequence
  SiRNA target sequence
gaataaattacaagattttttagctaa

SEQ ID NO: 63917 - DNA, 27 bp, Artificial sequence
  SiRNA target sequence
aataaattacaagattttttagctaat

SEQ ID NO: 63918 - DNA, 27 bp, Artificial sequence
  SiRNA target sequence
ataaattacaagattttttagctaatc

SEQ ID NO: 63919 - DNA, 27 bp, Artificial sequence
  SiRNA target sequence
taaattacaagattttttagctaatca

SEQ ID NO: 63920 - DNA, 27 bp, Artificial sequence
  SiRNA target sequence
aaattacaagattttttagctaatcat

SEQ ID NO: 63921 - DNA, 27 bp, Artificial sequence
  SiRNA target sequence
aattacaagattttttagctaatcatg

SEQ ID NO: 63922 - DNA, 27 bp, Artificial sequence
  SiRNA target sequence
attacaagattttttagctaatcatga

SEQ ID NO: 63923 - DNA, 27 bp, Artificial sequence
  SiRNA target sequence
ttacaagattttttagctaatcatgaa

SEQ ID NO: 63924 - DNA, 27 bp, Artificial sequence
  SiRNA target sequence
tacaagattttttagctaatcatgaaa

SEQ ID NO: 63925 - DNA, 27 bp, Artificial sequence
  SiRNA target sequence
acaagattttttagctaatcatgaaac

SEQ ID NO: 63926 - DNA, 27 bp, Artificial sequence
  SiRNA target sequence
caagattttttagctaatcatgaaaca

SEQ ID NO: 63927 - DNA, 27 bp, Artificial sequence
  SiRNA target sequence
aagattttttagctaatcatgaaacaa

SEQ ID NO: 63928 - DNA, 27 bp, Artificial sequence
  SiRNA target sequence
agattttttagctaatcatgaaacaat

SEQ ID NO: 63929 - DNA, 27 bp, Artificial sequence
  SiRNA target sequence
gattttttagctaatcatgaaacaatt

SEQ ID NO: 63930 - DNA, 27 bp, Artificial sequence
  SiRNA target sequence
attttttagctaatcatgaaacaatta

SEQ ID NO: 63931 - DNA, 27 bp, Artificial sequence
  SiRNA target sequence
ttttttagctaatcatgaaacaattaa

SEQ ID NO: 63932 - DNA, 27 bp, Artificial sequence
  SiRNA target sequence
tttttagctaatcatgaaacaattaaa

SEQ ID NO: 63933 - DNA, 27 bp, Artificial sequence
  SiRNA target sequence
ttttagctaatcatgaaacaattaaag

SEQ ID NO: 63934 - DNA, 27 bp, Artificial sequence
  SiRNA target sequence
tttagctaatcatgaaacaattaaagc

SEQ ID NO: 63935 - DNA, 27 bp, Artificial sequence
  SiRNA target sequence
ttagctaatcatgaaacaattaaagcc

SEQ ID NO: 63936 - DNA, 27 bp, Artificial sequence
  SiRNA target sequence
tagctaatcatgaaacaattaaagcct

SEQ ID NO: 63937 - DNA, 27 bp, Artificial sequence
  SiRNA target sequence
agctaatcatgaaacaattaaagccta

SEQ ID NO: 63938 - DNA, 27 bp, Artificial sequence
  SiRNA target sequence
gctaatcatgaaacaattaaagcctat

SEQ ID NO: 63939 - DNA, 27 bp, Artificial sequence
  SiRNA target sequence
ctaatcatgaaacaattaaagcctata

SEQ ID NO: 63940 - DNA, 27 bp, Artificial sequence
  SiRNA target sequence
taatcatgaaacaattaaagcctataa

SEQ ID NO: 63941 - DNA, 27 bp, Artificial sequence
  SiRNA target sequence
aatcatgaaacaattaaagcctataat

SEQ ID NO: 63942 - DNA, 27 bp, Artificial sequence
  SiRNA target sequence
atcatgaaacaattaaagcctataata

SEQ ID NO: 63943 - DNA, 27 bp, Artificial sequence
  SiRNA target sequence
tcatgaaacaattaaagcctataatat

SEQ ID NO: 63944 - DNA, 27 bp, Artificial sequence
  SiRNA target sequence
catgaaacaattaaagcctataatatg

SEQ ID NO: 63945 - DNA, 27 bp, Artificial sequence
  SiRNA target sequence
atgaaacaattaaagcctataatatgg

SEQ ID NO: 63946 - DNA, 27 bp, Artificial sequence
  SiRNA target sequence
tgaaacaattaaagcctataatatgga

SEQ ID NO: 63947 - DNA, 27 bp, Artificial sequence
  SiRNA target sequence
gaaacaattaaagcctataatatggaa

SEQ ID NO: 63948 - DNA, 27 bp, Artificial sequence
  SiRNA target sequence
aaacaattaaagcctataatatggaag

SEQ ID NO: 63949 - DNA, 27 bp, Artificial sequence
  SiRNA target sequence
aacaattaaagcctataatatggaaga

SEQ ID NO: 63950 - DNA, 27 bp, Artificial sequence
  SiRNA target sequence
acaattaaagcctataatatggaagaa

SEQ ID NO: 63951 - DNA, 27 bp, Artificial sequence
  SiRNA target sequence
caattaaagcctataatatggaagaag

SEQ ID NO: 63952 - DNA, 27 bp, Artificial sequence
  SiRNA target sequence
aattaaagcctataatatggaagaaga

SEQ ID NO: 63953 - DNA, 27 bp, Artificial sequence
  SiRNA target sequence
attaaagcctataatatggaagaagaa

SEQ ID NO: 63954 - DNA, 27 bp, Artificial sequence
  SiRNA target sequence
ttaaagcctataatatggaagaagaaa

SEQ ID NO: 63955 - DNA, 27 bp, Artificial sequence
  SiRNA target sequence
taaagcctataatatggaagaagaaac

SEQ ID NO: 63956 - DNA, 27 bp, Artificial sequence
  SiRNA target sequence
aaagcctataatatggaagaagaaact

SEQ ID NO: 63957 - DNA, 27 bp, Artificial sequence
  SiRNA target sequence
aagcctataatatggaagaagaaacta

SEQ ID NO: 63958 - DNA, 27 bp, Artificial sequence
  SiRNA target sequence
agcctataatatggaagaagaaactat

SEQ ID NO: 63959 - DNA, 27 bp, Artificial sequence
  SiRNA target sequence
gcctataatatggaagaagaaactatt

SEQ ID NO: 63960 - DNA, 27 bp, Artificial sequence
  SiRNA target sequence
cctataatatggaagaagaaactatta

SEQ ID NO: 63961 - DNA, 27 bp, Artificial sequence
  SiRNA target sequence
ctataatatggaagaagaaactattac

SEQ ID NO: 63962 - DNA, 27 bp, Artificial sequence
  SiRNA target sequence
tataatatggaagaagaaactattaca

SEQ ID NO: 63963 - DNA, 27 bp, Artificial sequence
  SiRNA target sequence
ataatatggaagaagaaactattacat

SEQ ID NO: 63964 - DNA, 27 bp, Artificial sequence
  SiRNA target sequence
taatatggaagaagaaactattacata

SEQ ID NO: 63965 - DNA, 27 bp, Artificial sequence
  SiRNA target sequence
aatatggaagaagaaactattacatat

SEQ ID NO: 63966 - DNA, 27 bp, Artificial sequence
  SiRNA target sequence
atatggaagaagaaactattacatatt

SEQ ID NO: 63967 - DNA, 27 bp, Artificial sequence
  SiRNA target sequence
tatggaagaagaaactattacatattt

SEQ ID NO: 63968 - DNA, 27 bp, Artificial sequence
  SiRNA target sequence
atggaagaagaaactattacatatttt

SEQ ID NO: 63969 - DNA, 27 bp, Artificial sequence
  SiRNA target sequence
tggaagaagaaactattacatattttg

SEQ ID NO: 63970 - DNA, 27 bp, Artificial sequence
  SiRNA target sequence
ggaagaagaaactattacatattttga

SEQ ID NO: 63971 - DNA, 27 bp, Artificial sequence
  SiRNA target sequence
gaagaagaaactattacatattttgat

SEQ ID NO: 63972 - DNA, 27 bp, Artificial sequence
  SiRNA target sequence
aagaagaaactattacatattttgatg

SEQ ID NO: 63973 - DNA, 27 bp, Artificial sequence
  SiRNA target sequence
agaagaaactattacatattttgatga

SEQ ID NO: 63974 - DNA, 27 bp, Artificial sequence
  SiRNA target sequence
gaagaaactattacatattttgatgaa

SEQ ID NO: 63975 - DNA, 27 bp, Artificial sequence
  SiRNA target sequence
aagaaactattacatattttgatgaaa

SEQ ID NO: 63976 - DNA, 27 bp, Artificial sequence
  SiRNA target sequence
agaaactattacatattttgatgaaaa

SEQ ID NO: 63977 - DNA, 27 bp, Artificial sequence
  SiRNA target sequence
gaaactattacatattttgatgaaaat

SEQ ID NO: 63978 - DNA, 27 bp, Artificial sequence
  SiRNA target sequence
aaactattacatattttgatgaaaatc

SEQ ID NO: 63979 - DNA, 27 bp, Artificial sequence
  SiRNA target sequence
aactattacatattttgatgaaaatca

SEQ ID NO: 63980 - DNA, 27 bp, Artificial sequence
  SiRNA target sequence
actattacatattttgatgaaaatcaa

SEQ ID NO: 63981 - DNA, 27 bp, Artificial sequence
  SiRNA target sequence
ctattacatattttgatgaaaatcaaa

SEQ ID NO: 63982 - DNA, 27 bp, Artificial sequence
  SiRNA target sequence
tattacatattttgatgaaaatcaaaa

SEQ ID NO: 63983 - DNA, 27 bp, Artificial sequence
  SiRNA target sequence
attacatattttgatgaaaatcaaaaa

SEQ ID NO: 63984 - DNA, 27 bp, Artificial sequence
  SiRNA target sequence
ttacatattttgatgaaaatcaaaaac

SEQ ID NO: 63985 - DNA, 27 bp, Artificial sequence
  SiRNA target sequence
tacatattttgatgaaaatcaaaaacc

SEQ ID NO: 63986 - DNA, 27 bp, Artificial sequence
  SiRNA target sequence
acatattttgatgaaaatcaaaaaccg

SEQ ID NO: 63987 - DNA, 27 bp, Artificial sequence
  SiRNA target sequence
catattttgatgaaaatcaaaaaccgg

SEQ ID NO: 63988 - DNA, 27 bp, Artificial sequence
  SiRNA target sequence
atattttgatgaaaatcaaaaaccggt

SEQ ID NO: 63989 - DNA, 27 bp, Artificial sequence
  SiRNA target sequence
tattttgatgaaaatcaaaaaccggta

SEQ ID NO: 63990 - DNA, 27 bp, Artificial sequence
  SiRNA target sequence
attttgatgaaaatcaaaaaccggtag

SEQ ID NO: 63991 - DNA, 27 bp, Artificial sequence
  SiRNA target sequence
ttttgatgaaaatcaaaaaccggtaga

SEQ ID NO: 63992 - DNA, 27 bp, Artificial sequence
  SiRNA target sequence
tttgatgaaaatcaaaaaccggtagaa

SEQ ID NO: 63993 - DNA, 27 bp, Artificial sequence
  SiRNA target sequence
ttgatgaaaatcaaaaaccggtagaat

SEQ ID NO: 63994 - DNA, 27 bp, Artificial sequence
  SiRNA target sequence
tgatgaaaatcaaaaaccggtagaata

SEQ ID NO: 63995 - DNA, 27 bp, Artificial sequence
  SiRNA target sequence
gatgaaaatcaaaaaccggtagaatat

SEQ ID NO: 63996 - DNA, 27 bp, Artificial sequence
  SiRNA target sequence
atgaaaatcaaaaaccggtagaatatt

SEQ ID NO: 63997 - DNA, 27 bp, Artificial sequence
  SiRNA target sequence
tgaaaatcaaaaaccggtagaatattt

SEQ ID NO: 63998 - DNA, 27 bp, Artificial sequence
  SiRNA target sequence
gaaaatcaaaaaccggtagaatatttt

SEQ ID NO: 63999 - DNA, 27 bp, Artificial sequence
  SiRNA target sequence
aaaatcaaaaaccggtagaatattttg

SEQ ID NO: 64000 - DNA, 27 bp, Artificial sequence
  SiRNA target sequence
aaatcaaaaaccggtagaatattttgg

SEQ ID NO: 64001 - DNA, 27 bp, Artificial sequence
  SiRNA target sequence
aatcaaaaaccggtagaatattttggg

SEQ ID NO: 64002 - DNA, 27 bp, Artificial sequence
  SiRNA target sequence
atcaaaaaccggtagaatattttgggg

SEQ ID NO: 64003 - DNA, 27 bp, Artificial sequence
  SiRNA target sequence
tcaaaaaccggtagaatattttggggt

SEQ ID NO: 64004 - DNA, 27 bp, Artificial sequence
  SiRNA target sequence
caaaaaccggtagaatattttggggta

SEQ ID NO: 64005 - DNA, 27 bp, Artificial sequence
  SiRNA target sequence
aaaaaccggtagaatattttggggtaa

SEQ ID NO: 64006 - DNA, 27 bp, Artificial sequence
  SiRNA target sequence
aaaaccggtagaatattttggggtaaa

SEQ ID NO: 64007 - DNA, 27 bp, Artificial sequence
  SiRNA target sequence
aaaccggtagaatattttggggtaaag

SEQ ID NO: 64008 - DNA, 27 bp, Artificial sequence
  SiRNA target sequence
aaccggtagaatattttggggtaaagt

SEQ ID NO: 64009 - DNA, 27 bp, Artificial sequence
  SiRNA target sequence
accggtagaatattttggggtaaagtc

SEQ ID NO: 64010 - DNA, 27 bp, Artificial sequence
  SiRNA target sequence
ccggtagaatattttggggtaaagtct

SEQ ID NO: 64011 - DNA, 27 bp, Artificial sequence
  SiRNA target sequence
cggtagaatattttggggtaaagtctc

SEQ ID NO: 64012 - DNA, 27 bp, Artificial sequence
  SiRNA target sequence
ggtagaatattttggggtaaagtctca

SEQ ID NO: 64013 - DNA, 27 bp, Artificial sequence
  SiRNA target sequence
gtagaatattttggggtaaagtctcac

SEQ ID NO: 64014 - DNA, 27 bp, Artificial sequence
  SiRNA target sequence
tagaatattttggggtaaagtctcaca

SEQ ID NO: 64015 - DNA, 27 bp, Artificial sequence
  SiRNA target sequence
agaatattttggggtaaagtctcacag

SEQ ID NO: 64016 - DNA, 27 bp, Artificial sequence
  SiRNA target sequence
gaatattttggggtaaagtctcacaga

SEQ ID NO: 64017 - DNA, 27 bp, Artificial sequence
  SiRNA target sequence
aatattttggggtaaagtctcacagaa

SEQ ID NO: 64018 - DNA, 27 bp, Artificial sequence
  SiRNA target sequence
atattttggggtaaagtctcacagaat

SEQ ID NO: 64019 - DNA, 27 bp, Artificial sequence
  SiRNA target sequence
tattttggggtaaagtctcacagaatt

SEQ ID NO: 64020 - DNA, 27 bp, Artificial sequence
  SiRNA target sequence
attttggggtaaagtctcacagaattt

SEQ ID NO: 64021 - DNA, 27 bp, Artificial sequence
  SiRNA target sequence
ttttggggtaaagtctcacagaatttt

SEQ ID NO: 64022 - DNA, 27 bp, Artificial sequence
  SiRNA target sequence
tttggggtaaagtctcacagaattttg

SEQ ID NO: 64023 - DNA, 27 bp, Artificial sequence
  SiRNA target sequence
ttggggtaaagtctcacagaattttgt

SEQ ID NO: 64024 - DNA, 27 bp, Artificial sequence
  SiRNA target sequence
tggggtaaagtctcacagaattttgtt

SEQ ID NO: 64025 - DNA, 27 bp, Artificial sequence
  SiRNA target sequence
ggggtaaagtctcacagaattttgttc

SEQ ID NO: 64026 - DNA, 27 bp, Artificial sequence
  SiRNA target sequence
gggtaaagtctcacagaattttgttct

SEQ ID NO: 64027 - DNA, 27 bp, Artificial sequence
  SiRNA target sequence
ggtaaagtctcacagaattttgttctc

SEQ ID NO: 64028 - DNA, 27 bp, Artificial sequence
  SiRNA target sequence
gtaaagtctcacagaattttgttctct

SEQ ID NO: 64029 - DNA, 27 bp, Artificial sequence
  SiRNA target sequence
taaagtctcacagaattttgttctctc

SEQ ID NO: 64030 - DNA, 27 bp, Artificial sequence
  SiRNA target sequence
aaagtctcacagaattttgttctctct

SEQ ID NO: 64031 - DNA, 27 bp, Artificial sequence
  SiRNA target sequence
aagtctcacagaattttgttctctctt

SEQ ID NO: 64032 - DNA, 27 bp, Artificial sequence
  SiRNA target sequence
agtctcacagaattttgttctctcttt

SEQ ID NO: 64033 - DNA, 27 bp, Artificial sequence
  SiRNA target sequence
gtctcacagaattttgttctctctttt

SEQ ID NO: 64034 - DNA, 27 bp, Artificial sequence
  SiRNA target sequence
tctcacagaattttgttctctctttta

SEQ ID NO: 64035 - DNA, 27 bp, Artificial sequence
  SiRNA target sequence
ctcacagaattttgttctctcttttat

SEQ ID NO: 64036 - DNA, 27 bp, Artificial sequence
  SiRNA target sequence
tcacagaattttgttctctcttttata

SEQ ID NO: 64037 - DNA, 27 bp, Artificial sequence
  SiRNA target sequence
cacagaattttgttctctcttttatat

SEQ ID NO: 64038 - DNA, 27 bp, Artificial sequence
  SiRNA target sequence
acagaattttgttctctcttttatata

SEQ ID NO: 64039 - DNA, 27 bp, Artificial sequence
  SiRNA target sequence
cagaattttgttctctcttttatatat

SEQ ID NO: 64040 - DNA, 27 bp, Artificial sequence
  SiRNA target sequence
agaattttgttctctcttttatatata

SEQ ID NO: 64041 - DNA, 27 bp, Artificial sequence
  SiRNA target sequence
gaattttgttctctcttttatatatac

SEQ ID NO: 64042 - DNA, 27 bp, Artificial sequence
  SiRNA target sequence
aattttgttctctcttttatatataca

SEQ ID NO: 64043 - DNA, 27 bp, Artificial sequence
  SiRNA target sequence
attttgttctctcttttatatatacaa

SEQ ID NO: 64044 - DNA, 27 bp, Artificial sequence
  SiRNA target sequence
ttttgttctctcttttatatatacaaa

SEQ ID NO: 64045 - DNA, 27 bp, Artificial sequence
  SiRNA target sequence
tttgttctctcttttatatatacaaaa

SEQ ID NO: 64046 - DNA, 27 bp, Artificial sequence
  SiRNA target sequence
ttgttctctcttttatatatacaaaaa

SEQ ID NO: 64047 - DNA, 27 bp, Artificial sequence
  SiRNA target sequence
tgttctctcttttatatatacaaaaaa

SEQ ID NO: 64048 - DNA, 27 bp, Artificial sequence
  SiRNA target sequence
gttctctcttttatatatacaaaaaat

SEQ ID NO: 64049 - DNA, 27 bp, Artificial sequence
  SiRNA target sequence
ttctctcttttatatatacaaaaaatg

SEQ ID NO: 64050 - DNA, 27 bp, Artificial sequence
  SiRNA target sequence
tctctcttttatatatacaaaaaatga

SEQ ID NO: 64051 - DNA, 27 bp, Artificial sequence
  SiRNA target sequence
ctctcttttatatatacaaaaaatgac

SEQ ID NO: 64052 - DNA, 27 bp, Artificial sequence
  SiRNA target sequence
tctcttttatatatacaaaaaatgaca

SEQ ID NO: 64053 - DNA, 27 bp, Artificial sequence
  SiRNA target sequence
ctcttttatatatacaaaaaatgacat

SEQ ID NO: 64054 - DNA, 27 bp, Artificial sequence
  SiRNA target sequence
tcttttatatatacaaaaaatgacatt

SEQ ID NO: 64055 - DNA, 27 bp, Artificial sequence
  SiRNA target sequence
cttttatatatacaaaaaatgacattt

SEQ ID NO: 64056 - DNA, 27 bp, Artificial sequence
  SiRNA target sequence
ttttatatatacaaaaaatgacatttg

SEQ ID NO: 64057 - DNA, 27 bp, Artificial sequence
  SiRNA target sequence
tttatatatacaaaaaatgacatttgc

SEQ ID NO: 64058 - DNA, 27 bp, Artificial sequence
  SiRNA target sequence
ttatatatacaaaaaatgacatttgcg

SEQ ID NO: 64059 - DNA, 27 bp, Artificial sequence
  SiRNA target sequence
tatatatacaaaaaatgacatttgcga

SEQ ID NO: 64060 - DNA, 27 bp, Artificial sequence
  SiRNA target sequence
atatatacaaaaaatgacatttgcgat

SEQ ID NO: 64061 - DNA, 27 bp, Artificial sequence
  SiRNA target sequence
tatatacaaaaaatgacatttgcgata

SEQ ID NO: 64062 - DNA, 27 bp, Artificial sequence
  SiRNA target sequence
atatacaaaaaatgacatttgcgatac

SEQ ID NO: 64063 - DNA, 27 bp, Artificial sequence
  SiRNA target sequence
tatacaaaaaatgacatttgcgataca

SEQ ID NO: 64064 - DNA, 27 bp, Artificial sequence
  SiRNA target sequence
atacaaaaaatgacatttgcgatacag

SEQ ID NO: 64065 - DNA, 27 bp, Artificial sequence
  SiRNA target sequence
tacaaaaaatgacatttgcgatacagg

SEQ ID NO: 64066 - DNA, 27 bp, Artificial sequence
  SiRNA target sequence
acaaaaaatgacatttgcgatacaggc

SEQ ID NO: 64067 - DNA, 27 bp, Artificial sequence
  SiRNA target sequence
caaaaaatgacatttgcgatacaggca

SEQ ID NO: 64068 - DNA, 27 bp, Artificial sequence
  SiRNA target sequence
aaaaaatgacatttgcgatacaggcaa

SEQ ID NO: 64069 - DNA, 27 bp, Artificial sequence
  SiRNA target sequence
aaaaatgacatttgcgatacaggcaat

SEQ ID NO: 64070 - DNA, 27 bp, Artificial sequence
  SiRNA target sequence
aaaatgacatttgcgatacaggcaatt

SEQ ID NO: 64071 - DNA, 27 bp, Artificial sequence
  SiRNA target sequence
aaatgacatttgcgatacaggcaatta

SEQ ID NO: 64072 - DNA, 27 bp, Artificial sequence
  SiRNA target sequence
aatgacatttgcgatacaggcaattat

SEQ ID NO: 64073 - DNA, 27 bp, Artificial sequence
  SiRNA target sequence
atgacatttgcgatacaggcaattatt

SEQ ID NO: 64074 - DNA, 27 bp, Artificial sequence
  SiRNA target sequence
tgacatttgcgatacaggcaattatta

SEQ ID NO: 64075 - DNA, 27 bp, Artificial sequence
  SiRNA target sequence
gacatttgcgatacaggcaattattat

SEQ ID NO: 64076 - DNA, 27 bp, Artificial sequence
  SiRNA target sequence
acatttgcgatacaggcaattattatt

SEQ ID NO: 64077 - DNA, 27 bp, Artificial sequence
  SiRNA target sequence
catttgcgatacaggcaattattatta

SEQ ID NO: 64078 - DNA, 27 bp, Artificial sequence
  SiRNA target sequence
atttgcgatacaggcaattattattat

SEQ ID NO: 64079 - DNA, 27 bp, Artificial sequence
  SiRNA target sequence
tttgcgatacaggcaattattattatc

SEQ ID NO: 64080 - DNA, 27 bp, Artificial sequence
  SiRNA target sequence
ttgcgatacaggcaattattattatca

SEQ ID NO: 64081 - DNA, 27 bp, Artificial sequence
  SiRNA target sequence
tgcgatacaggcaattattattatcac

SEQ ID NO: 64082 - DNA, 27 bp, Artificial sequence
  SiRNA target sequence
gcgatacaggcaattattattatcaca

SEQ ID NO: 64083 - DNA, 27 bp, Artificial sequence
  SiRNA target sequence
cgatacaggcaattattattatcacat

SEQ ID NO: 64084 - DNA, 27 bp, Artificial sequence
  SiRNA target sequence
gatacaggcaattattattatcacatt

SEQ ID NO: 64085 - DNA, 27 bp, Artificial sequence
  SiRNA target sequence
atacaggcaattattattatcacatta

SEQ ID NO: 64086 - DNA, 27 bp, Artificial sequence
  SiRNA target sequence
tacaggcaattattattatcacattag

SEQ ID NO: 64087 - DNA, 27 bp, Artificial sequence
  SiRNA target sequence
acaggcaattattattatcacattagg

SEQ ID NO: 64088 - DNA, 27 bp, Artificial sequence
  SiRNA target sequence
caggcaattattattatcacattagga

SEQ ID NO: 64089 - DNA, 27 bp, Artificial sequence
  SiRNA target sequence
aggcaattattattatcacattaggat

SEQ ID NO: 64090 - DNA, 27 bp, Artificial sequence
  SiRNA target sequence
ggcaattattattatcacattaggatc

SEQ ID NO: 64091 - DNA, 27 bp, Artificial sequence
  SiRNA target sequence
gcaattattattatcacattaggatct

SEQ ID NO: 64092 - DNA, 27 bp, Artificial sequence
  SiRNA target sequence
caattattattatcacattaggatctt

SEQ ID NO: 64093 - DNA, 27 bp, Artificial sequence
  SiRNA target sequence
aattattattatcacattaggatcttt

SEQ ID NO: 64094 - DNA, 27 bp, Artificial sequence
  SiRNA target sequence
attattattatcacattaggatctttt

SEQ ID NO: 64095 - DNA, 27 bp, Artificial sequence
  SiRNA target sequence
ttattattatcacattaggatcttttg

SEQ ID NO: 64096 - DNA, 27 bp, Artificial sequence
  SiRNA target sequence
tattattatcacattaggatcttttgg

SEQ ID NO: 64097 - DNA, 27 bp, Artificial sequence
  SiRNA target sequence
attattatcacattaggatcttttgga

SEQ ID NO: 64098 - DNA, 27 bp, Artificial sequence
  SiRNA target sequence
ttattatcacattaggatcttttggat

SEQ ID NO: 64099 - DNA, 27 bp, Artificial sequence
  SiRNA target sequence
tattatcacattaggatcttttggata

SEQ ID NO: 64100 - DNA, 27 bp, Artificial sequence
  SiRNA target sequence
attatcacattaggatcttttggatat

SEQ ID NO: 64101 - DNA, 27 bp, Artificial sequence
  SiRNA target sequence
ttatcacattaggatcttttggatatt

SEQ ID NO: 64102 - DNA, 27 bp, Artificial sequence
  SiRNA target sequence
tatcacattaggatcttttggatattt

SEQ ID NO: 64103 - DNA, 27 bp, Artificial sequence
  SiRNA target sequence
atcacattaggatcttttggatatttt

SEQ ID NO: 64104 - DNA, 27 bp, Artificial sequence
  SiRNA target sequence
tcacattaggatcttttggatattttc

SEQ ID NO: 64105 - DNA, 27 bp, Artificial sequence
  SiRNA target sequence
cacattaggatcttttggatattttcc

SEQ ID NO: 64106 - DNA, 27 bp, Artificial sequence
  SiRNA target sequence
acattaggatcttttggatattttccg

SEQ ID NO: 64107 - DNA, 27 bp, Artificial sequence
  SiRNA target sequence
cattaggatcttttggatattttccga

SEQ ID NO: 64108 - DNA, 27 bp, Artificial sequence
  SiRNA target sequence
attaggatcttttggatattttccgat

SEQ ID NO: 64109 - DNA, 27 bp, Artificial sequence
  SiRNA target sequence
ttaggatcttttggatattttccgatt

SEQ ID NO: 64110 - DNA, 27 bp, Artificial sequence
  SiRNA target sequence
taggatcttttggatattttccgatta

SEQ ID NO: 64111 - DNA, 27 bp, Artificial sequence
  SiRNA target sequence
aggatcttttggatattttccgattaa

SEQ ID NO: 64112 - DNA, 27 bp, Artificial sequence
  SiRNA target sequence
ggatcttttggatattttccgattaaa

SEQ ID NO: 64113 - DNA, 27 bp, Artificial sequence
  SiRNA target sequence
gatcttttggatattttccgattaaat

SEQ ID NO: 64114 - DNA, 27 bp, Artificial sequence
  SiRNA target sequence
atcttttggatattttccgattaaatt

SEQ ID NO: 64115 - DNA, 27 bp, Artificial sequence
  SiRNA target sequence
tcttttggatattttccgattaaatta

SEQ ID NO: 64116 - DNA, 27 bp, Artificial sequence
  SiRNA target sequence
cttttggatattttccgattaaattat

SEQ ID NO: 64117 - DNA, 27 bp, Artificial sequence
  SiRNA target sequence
ttttggatattttccgattaaattatc

SEQ ID NO: 64118 - DNA, 27 bp, Artificial sequence
  SiRNA target sequence
tttggatattttccgattaaattatcc

SEQ ID NO: 64119 - DNA, 27 bp, Artificial sequence
  SiRNA target sequence
ttggatattttccgattaaattatcct

SEQ ID NO: 64120 - DNA, 27 bp, Artificial sequence
  SiRNA target sequence
tggatattttccgattaaattatcctc

SEQ ID NO: 64121 - DNA, 27 bp, Artificial sequence
  SiRNA target sequence
ggatattttccgattaaattatcctct

SEQ ID NO: 64122 - DNA, 27 bp, Artificial sequence
  SiRNA target sequence
gatattttccgattaaattatcctctc

SEQ ID NO: 64123 - DNA, 27 bp, Artificial sequence
  SiRNA target sequence
atattttccgattaaattatcctctca

SEQ ID NO: 64124 - DNA, 27 bp, Artificial sequence
  SiRNA target sequence
tattttccgattaaattatcctctcaa

SEQ ID NO: 64125 - DNA, 27 bp, Artificial sequence
  SiRNA target sequence
attttccgattaaattatcctctcaac

SEQ ID NO: 64126 - DNA, 27 bp, Artificial sequence
  SiRNA target sequence
ttttccgattaaattatcctctcaaca

SEQ ID NO: 64127 - DNA, 27 bp, Artificial sequence
  SiRNA target sequence
tttccgattaaattatcctctcaacag

SEQ ID NO: 64128 - DNA, 27 bp, Artificial sequence
  SiRNA target sequence
ttccgattaaattatcctctcaacagt

SEQ ID NO: 64129 - DNA, 27 bp, Artificial sequence
  SiRNA target sequence
tccgattaaattatcctctcaacagtt

SEQ ID NO: 64130 - DNA, 27 bp, Artificial sequence
  SiRNA target sequence
ccgattaaattatcctctcaacagtta

SEQ ID NO: 64131 - DNA, 27 bp, Artificial sequence
  SiRNA target sequence
cgattaaattatcctctcaacagttag

SEQ ID NO: 64132 - DNA, 27 bp, Artificial sequence
  SiRNA target sequence
gattaaattatcctctcaacagttagt

SEQ ID NO: 64133 - DNA, 27 bp, Artificial sequence
  SiRNA target sequence
attaaattatcctctcaacagttagtc

SEQ ID NO: 64134 - DNA, 27 bp, Artificial sequence
  SiRNA target sequence
ttaaattatcctctcaacagttagtct

SEQ ID NO: 64135 - DNA, 27 bp, Artificial sequence
  SiRNA target sequence
taaattatcctctcaacagttagtctt

SEQ ID NO: 64136 - DNA, 27 bp, Artificial sequence
  SiRNA target sequence
aaattatcctctcaacagttagtcttt

SEQ ID NO: 64137 - DNA, 27 bp, Artificial sequence
  SiRNA target sequence
aattatcctctcaacagttagtctttt

SEQ ID NO: 64138 - DNA, 27 bp, Artificial sequence
  SiRNA target sequence
attatcctctcaacagttagtctttta

SEQ ID NO: 64139 - DNA, 27 bp, Artificial sequence
  SiRNA target sequence
ttatcctctcaacagttagtcttttat

SEQ ID NO: 64140 - DNA, 27 bp, Artificial sequence
  SiRNA target sequence
tatcctctcaacagttagtcttttata

SEQ ID NO: 64141 - DNA, 27 bp, Artificial sequence
  SiRNA target sequence
atcctctcaacagttagtcttttatat

SEQ ID NO: 64142 - DNA, 27 bp, Artificial sequence
  SiRNA target sequence
tcctctcaacagttagtcttttatatt

SEQ ID NO: 64143 - DNA, 27 bp, Artificial sequence
  SiRNA target sequence
cctctcaacagttagtcttttatattt

SEQ ID NO: 64144 - DNA, 27 bp, Artificial sequence
  SiRNA target sequence
ctctcaacagttagtcttttatatttc

SEQ ID NO: 64145 - DNA, 27 bp, Artificial sequence
  SiRNA target sequence
tctcaacagttagtcttttatatttcg

SEQ ID NO: 64146 - DNA, 27 bp, Artificial sequence
  SiRNA target sequence
ctcaacagttagtcttttatatttcga

SEQ ID NO: 64147 - DNA, 27 bp, Artificial sequence
  SiRNA target sequence
tcaacagttagtcttttatatttcgat

SEQ ID NO: 64148 - DNA, 27 bp, Artificial sequence
  SiRNA target sequence
caacagttagtcttttatatttcgatt

SEQ ID NO: 64149 - DNA, 27 bp, Artificial sequence
  SiRNA target sequence
aacagttagtcttttatatttcgatta

SEQ ID NO: 64150 - DNA, 27 bp, Artificial sequence
  SiRNA target sequence
acagttagtcttttatatttcgattag

SEQ ID NO: 64151 - DNA, 27 bp, Artificial sequence
  SiRNA target sequence
cagttagtcttttatatttcgattagt

SEQ ID NO: 64152 - DNA, 27 bp, Artificial sequence
  SiRNA target sequence
agttagtcttttatatttcgattagta

SEQ ID NO: 64153 - DNA, 27 bp, Artificial sequence
  SiRNA target sequence
gttagtcttttatatttcgattagtaa

SEQ ID NO: 64154 - DNA, 27 bp, Artificial sequence
  SiRNA target sequence
ttagtcttttatatttcgattagtaaa

SEQ ID NO: 64155 - DNA, 27 bp, Artificial sequence
  SiRNA target sequence
tagtcttttatatttcgattagtaaaa

SEQ ID NO: 64156 - DNA, 27 bp, Artificial sequence
  SiRNA target sequence
agtcttttatatttcgattagtaaaac

SEQ ID NO: 64157 - DNA, 27 bp, Artificial sequence
  SiRNA target sequence
gtcttttatatttcgattagtaaaacg

SEQ ID NO: 64158 - DNA, 27 bp, Artificial sequence
  SiRNA target sequence
tcttttatatttcgattagtaaaacgt

SEQ ID NO: 64159 - DNA, 27 bp, Artificial sequence
  SiRNA target sequence
cttttatatttcgattagtaaaacgtt

SEQ ID NO: 64160 - DNA, 27 bp, Artificial sequence
  SiRNA target sequence
ttttatatttcgattagtaaaacgttg

SEQ ID NO: 64161 - DNA, 27 bp, Artificial sequence
  SiRNA target sequence
tttatatttcgattagtaaaacgttga

SEQ ID NO: 64162 - DNA, 27 bp, Artificial sequence
  SiRNA target sequence
ttatatttcgattagtaaaacgttgac

SEQ ID NO: 64163 - DNA, 27 bp, Artificial sequence
  SiRNA target sequence
tatatttcgattagtaaaacgttgaca

SEQ ID NO: 64164 - DNA, 27 bp, Artificial sequence
  SiRNA target sequence
atatttcgattagtaaaacgttgacaa

SEQ ID NO: 64165 - DNA, 27 bp, Artificial sequence
  SiRNA target sequence
tatttcgattagtaaaacgttgacaaa

SEQ ID NO: 64166 - DNA, 27 bp, Artificial sequence
  SiRNA target sequence
atttcgattagtaaaacgttgacaaat

SEQ ID NO: 64167 - DNA, 27 bp, Artificial sequence
  SiRNA target sequence
tttcgattagtaaaacgttgacaaatt

SEQ ID NO: 64168 - DNA, 27 bp, Artificial sequence
  SiRNA target sequence
ttcgattagtaaaacgttgacaaattc

SEQ ID NO: 64169 - DNA, 27 bp, Artificial sequence
  SiRNA target sequence
tcgattagtaaaacgttgacaaattcg

SEQ ID NO: 64170 - DNA, 27 bp, Artificial sequence
  SiRNA target sequence
cgattagtaaaacgttgacaaattcgt

SEQ ID NO: 64171 - DNA, 27 bp, Artificial sequence
  SiRNA target sequence
gattagtaaaacgttgacaaattcgtt

SEQ ID NO: 64172 - DNA, 27 bp, Artificial sequence
  SiRNA target sequence
attagtaaaacgttgacaaattcgttg

SEQ ID NO: 64173 - DNA, 27 bp, Artificial sequence
  SiRNA target sequence
ttagtaaaacgttgacaaattcgttga

SEQ ID NO: 64174 - DNA, 27 bp, Artificial sequence
  SiRNA target sequence
tagtaaaacgttgacaaattcgttgag

SEQ ID NO: 64175 - DNA, 27 bp, Artificial sequence
  SiRNA target sequence
agtaaaacgttgacaaattcgttgagc

SEQ ID NO: 64176 - DNA, 27 bp, Artificial sequence
  SiRNA target sequence
gtaaaacgttgacaaattcgttgagcg

SEQ ID NO: 64177 - DNA, 27 bp, Artificial sequence
  SiRNA target sequence
taaaacgttgacaaattcgttgagcga

SEQ ID NO: 64178 - DNA, 27 bp, Artificial sequence
  SiRNA target sequence
aaaacgttgacaaattcgttgagcgaa

SEQ ID NO: 64179 - DNA, 27 bp, Artificial sequence
  SiRNA target sequence
aaacgttgacaaattcgttgagcgaaa

SEQ ID NO: 64180 - DNA, 27 bp, Artificial sequence
  SiRNA target sequence
aacgttgacaaattcgttgagcgaaat

SEQ ID NO: 64181 - DNA, 27 bp, Artificial sequence
  SiRNA target sequence
acgttgacaaattcgttgagcgaaatg

SEQ ID NO: 64182 - DNA, 27 bp, Artificial sequence
  SiRNA target sequence
cgttgacaaattcgttgagcgaaatgg

SEQ ID NO: 64183 - DNA, 27 bp, Artificial sequence
  SiRNA target sequence
gttgacaaattcgttgagcgaaatggg

SEQ ID NO: 64184 - DNA, 27 bp, Artificial sequence
  SiRNA target sequence
ttgacaaattcgttgagcgaaatggga

SEQ ID NO: 64185 - DNA, 27 bp, Artificial sequence
  SiRNA target sequence
tgacaaattcgttgagcgaaatgggaa

SEQ ID NO: 64186 - DNA, 27 bp, Artificial sequence
  SiRNA target sequence
gacaaattcgttgagcgaaatgggaat

SEQ ID NO: 64187 - DNA, 27 bp, Artificial sequence
  SiRNA target sequence
acaaattcgttgagcgaaatgggaatg

SEQ ID NO: 64188 - DNA, 27 bp, Artificial sequence
  SiRNA target sequence
caaattcgttgagcgaaatgggaatgc

SEQ ID NO: 64189 - DNA, 27 bp, Artificial sequence
  SiRNA target sequence
aaattcgttgagcgaaatgggaatgct

SEQ ID NO: 64190 - DNA, 27 bp, Artificial sequence
  SiRNA target sequence
aattcgttgagcgaaatgggaatgcta

SEQ ID NO: 64191 - DNA, 27 bp, Artificial sequence
  SiRNA target sequence
attcgttgagcgaaatgggaatgctat

SEQ ID NO: 64192 - DNA, 27 bp, Artificial sequence
  SiRNA target sequence
ttcgttgagcgaaatgggaatgctata

SEQ ID NO: 64193 - DNA, 27 bp, Artificial sequence
  SiRNA target sequence
tcgttgagcgaaatgggaatgctatac

SEQ ID NO: 64194 - DNA, 27 bp, Artificial sequence
  SiRNA target sequence
cgttgagcgaaatgggaatgctataca

SEQ ID NO: 64195 - DNA, 27 bp, Artificial sequence
  SiRNA target sequence
gttgagcgaaatgggaatgctatacac

SEQ ID NO: 64196 - DNA, 27 bp, Artificial sequence
  SiRNA target sequence
ttgagcgaaatgggaatgctatacaca

SEQ ID NO: 64197 - DNA, 27 bp, Artificial sequence
  SiRNA target sequence
tgagcgaaatgggaatgctatacacaa

SEQ ID NO: 64198 - DNA, 27 bp, Artificial sequence
  SiRNA target sequence
gagcgaaatgggaatgctatacacaag

SEQ ID NO: 64199 - DNA, 27 bp, Artificial sequence
  SiRNA target sequence
agcgaaatgggaatgctatacacaaga

SEQ ID NO: 64200 - DNA, 27 bp, Artificial sequence
  SiRNA target sequence
gcgaaatgggaatgctatacacaagat

SEQ ID NO: 64201 - DNA, 27 bp, Artificial sequence
  SiRNA target sequence
cgaaatgggaatgctatacacaagata

SEQ ID NO: 64202 - DNA, 27 bp, Artificial sequence
  SiRNA target sequence
gaaatgggaatgctatacacaagatat

SEQ ID NO: 64203 - DNA, 27 bp, Artificial sequence
  SiRNA target sequence
aaatgggaatgctatacacaagatatg

SEQ ID NO: 64204 - DNA, 27 bp, Artificial sequence
  SiRNA target sequence
aatgggaatgctatacacaagatatgt

SEQ ID NO: 64205 - DNA, 27 bp, Artificial sequence
  SiRNA target sequence
atgggaatgctatacacaagatatgta

SEQ ID NO: 64206 - DNA, 27 bp, Artificial sequence
  SiRNA target sequence
tgggaatgctatacacaagatatgtac

SEQ ID NO: 64207 - DNA, 27 bp, Artificial sequence
  SiRNA target sequence
gggaatgctatacacaagatatgtaca

SEQ ID NO: 64208 - DNA, 27 bp, Artificial sequence
  SiRNA target sequence
ggaatgctatacacaagatatgtacaa

SEQ ID NO: 64209 - DNA, 27 bp, Artificial sequence
  SiRNA target sequence
gaatgctatacacaagatatgtacaag

SEQ ID NO: 64210 - DNA, 27 bp, Artificial sequence
  SiRNA target sequence
aatgctatacacaagatatgtacaagg

SEQ ID NO: 64211 - DNA, 27 bp, Artificial sequence
  SiRNA target sequence
atgctatacacaagatatgtacaagga

SEQ ID NO: 64212 - DNA, 27 bp, Artificial sequence
  SiRNA target sequence
tgctatacacaagatatgtacaaggat

SEQ ID NO: 64213 - DNA, 27 bp, Artificial sequence
  SiRNA target sequence
gctatacacaagatatgtacaaggatt

SEQ ID NO: 64214 - DNA, 27 bp, Artificial sequence
  SiRNA target sequence
ctatacacaagatatgtacaaggattt

SEQ ID NO: 64215 - DNA, 27 bp, Artificial sequence
  SiRNA target sequence
tatacacaagatatgtacaaggatttt

SEQ ID NO: 64216 - DNA, 27 bp, Artificial sequence
  SiRNA target sequence
atacacaagatatgtacaaggattttt

SEQ ID NO: 64217 - DNA, 27 bp, Artificial sequence
  SiRNA target sequence
tacacaagatatgtacaaggattttta

SEQ ID NO: 64218 - DNA, 27 bp, Artificial sequence
  SiRNA target sequence
acacaagatatgtacaaggatttttaa

SEQ ID NO: 64219 - DNA, 27 bp, Artificial sequence
  SiRNA target sequence
cacaagatatgtacaaggatttttaaa

SEQ ID NO: 64220 - DNA, 27 bp, Artificial sequence
  SiRNA target sequence
acaagatatgtacaaggatttttaaat

SEQ ID NO: 64221 - DNA, 27 bp, Artificial sequence
  SiRNA target sequence
caagatatgtacaaggatttttaaatg

SEQ ID NO: 64222 - DNA, 27 bp, Artificial sequence
  SiRNA target sequence
aagatatgtacaaggatttttaaatgc

SEQ ID NO: 64223 - DNA, 27 bp, Artificial sequence
  SiRNA target sequence
agatatgtacaaggatttttaaatgca

SEQ ID NO: 64224 - DNA, 27 bp, Artificial sequence
  SiRNA target sequence
gatatgtacaaggatttttaaatgcaa

SEQ ID NO: 64225 - DNA, 27 bp, Artificial sequence
  SiRNA target sequence
atatgtacaaggatttttaaatgcaaa

SEQ ID NO: 64226 - DNA, 27 bp, Artificial sequence
  SiRNA target sequence
tatgtacaaggatttttaaatgcaaag

SEQ ID NO: 64227 - DNA, 27 bp, Artificial sequence
  SiRNA target sequence
atgtacaaggatttttaaatgcaaagt

SEQ ID NO: 64228 - DNA, 27 bp, Artificial sequence
  SiRNA target sequence
tgtacaaggatttttaaatgcaaagtc

SEQ ID NO: 64229 - DNA, 27 bp, Artificial sequence
  SiRNA target sequence
gtacaaggatttttaaatgcaaagtct

SEQ ID NO: 64230 - DNA, 27 bp, Artificial sequence
  SiRNA target sequence
tacaaggatttttaaatgcaaagtctg

SEQ ID NO: 64231 - DNA, 27 bp, Artificial sequence
  SiRNA target sequence
acaaggatttttaaatgcaaagtctgg

SEQ ID NO: 64232 - DNA, 27 bp, Artificial sequence
  SiRNA target sequence
caaggatttttaaatgcaaagtctgga

SEQ ID NO: 64233 - DNA, 27 bp, Artificial sequence
  SiRNA target sequence
aaggatttttaaatgcaaagtctggat

SEQ ID NO: 64234 - DNA, 27 bp, Artificial sequence
  SiRNA target sequence
aggatttttaaatgcaaagtctggata

SEQ ID NO: 64235 - DNA, 27 bp, Artificial sequence
  SiRNA target sequence
ggatttttaaatgcaaagtctggatat

SEQ ID NO: 64236 - DNA, 27 bp, Artificial sequence
  SiRNA target sequence
gatttttaaatgcaaagtctggatatt

SEQ ID NO: 64237 - DNA, 27 bp, Artificial sequence
  SiRNA target sequence
atttttaaatgcaaagtctggatatta

SEQ ID NO: 64238 - DNA, 27 bp, Artificial sequence
  SiRNA target sequence
tttttaaatgcaaagtctggatattac

SEQ ID NO: 64239 - DNA, 27 bp, Artificial sequence
  SiRNA target sequence
ttttaaatgcaaagtctggatattacg

SEQ ID NO: 64240 - DNA, 27 bp, Artificial sequence
  SiRNA target sequence
tttaaatgcaaagtctggatattacga

SEQ ID NO: 64241 - DNA, 27 bp, Artificial sequence
  SiRNA target sequence
ttaaatgcaaagtctggatattacgag

SEQ ID NO: 64242 - DNA, 27 bp, Artificial sequence
  SiRNA target sequence
taaatgcaaagtctggatattacgagt

SEQ ID NO: 64243 - DNA, 27 bp, Artificial sequence
  SiRNA target sequence
aaatgcaaagtctggatattacgagtt

SEQ ID NO: 64244 - DNA, 27 bp, Artificial sequence
  SiRNA target sequence
aatgcaaagtctggatattacgagttt

SEQ ID NO: 64245 - DNA, 27 bp, Artificial sequence
  SiRNA target sequence
atgcaaagtctggatattacgagttta

SEQ ID NO: 64246 - DNA, 27 bp, Artificial sequence
  SiRNA target sequence
tgcaaagtctggatattacgagtttaa

SEQ ID NO: 64247 - DNA, 27 bp, Artificial sequence
  SiRNA target sequence
gcaaagtctggatattacgagtttaaa

SEQ ID NO: 64248 - DNA, 27 bp, Artificial sequence
  SiRNA target sequence
caaagtctggatattacgagtttaaag

SEQ ID NO: 64249 - DNA, 27 bp, Artificial sequence
  SiRNA target sequence
aaagtctggatattacgagtttaaaga

SEQ ID NO: 64250 - DNA, 27 bp, Artificial sequence
  SiRNA target sequence
aagtctggatattacgagtttaaagag

SEQ ID NO: 64251 - DNA, 27 bp, Artificial sequence
  SiRNA target sequence
agtctggatattacgagtttaaagagg

SEQ ID NO: 64252 - DNA, 27 bp, Artificial sequence
  SiRNA target sequence
gtctggatattacgagtttaaagagga

SEQ ID NO: 64253 - DNA, 27 bp, Artificial sequence
  SiRNA target sequence
tctggatattacgagtttaaagaggat

SEQ ID NO: 64254 - DNA, 27 bp, Artificial sequence
  SiRNA target sequence
ctggatattacgagtttaaagaggata

SEQ ID NO: 64255 - DNA, 27 bp, Artificial sequence
  SiRNA target sequence
tggatattacgagtttaaagaggatac

SEQ ID NO: 64256 - DNA, 27 bp, Artificial sequence
  SiRNA target sequence
ggatattacgagtttaaagaggataca

SEQ ID NO: 64257 - DNA, 27 bp, Artificial sequence
  SiRNA target sequence
gatattacgagtttaaagaggatacac

SEQ ID NO: 64258 - DNA, 27 bp, Artificial sequence
  SiRNA target sequence
atattacgagtttaaagaggatacaca

SEQ ID NO: 64259 - DNA, 27 bp, Artificial sequence
  SiRNA target sequence
tattacgagtttaaagaggatacacaa

SEQ ID NO: 64260 - DNA, 27 bp, Artificial sequence
  SiRNA target sequence
attacgagtttaaagaggatacacaaa

SEQ ID NO: 64261 - DNA, 27 bp, Artificial sequence
  SiRNA target sequence
ttacgagtttaaagaggatacacaaac

SEQ ID NO: 64262 - DNA, 27 bp, Artificial sequence
  SiRNA target sequence
tacgagtttaaagaggatacacaaact

SEQ ID NO: 64263 - DNA, 27 bp, Artificial sequence
  SiRNA target sequence
acgagtttaaagaggatacacaaactg

SEQ ID NO: 64264 - DNA, 27 bp, Artificial sequence
  SiRNA target sequence
cgagtttaaagaggatacacaaactga

SEQ ID NO: 64265 - DNA, 27 bp, Artificial sequence
  SiRNA target sequence
gagtttaaagaggatacacaaactgat

SEQ ID NO: 64266 - DNA, 27 bp, Artificial sequence
  SiRNA target sequence
agtttaaagaggatacacaaactgata

SEQ ID NO: 64267 - DNA, 27 bp, Artificial sequence
  SiRNA target sequence
gtttaaagaggatacacaaactgataa

SEQ ID NO: 64268 - DNA, 27 bp, Artificial sequence
  SiRNA target sequence
tttaaagaggatacacaaactgataaa

SEQ ID NO: 64269 - DNA, 27 bp, Artificial sequence
  SiRNA target sequence
ttaaagaggatacacaaactgataaaa

SEQ ID NO: 64270 - DNA, 27 bp, Artificial sequence
  SiRNA target sequence
taaagaggatacacaaactgataaaat

SEQ ID NO: 64271 - DNA, 27 bp, Artificial sequence
  SiRNA target sequence
aaagaggatacacaaactgataaaata

SEQ ID NO: 64272 - DNA, 27 bp, Artificial sequence
  SiRNA target sequence
aagaggatacacaaactgataaaataa

SEQ ID NO: 64273 - DNA, 27 bp, Artificial sequence
  SiRNA target sequence
agaggatacacaaactgataaaataag

SEQ ID NO: 64274 - DNA, 27 bp, Artificial sequence
  SiRNA target sequence
gaggatacacaaactgataaaataaga

SEQ ID NO: 64275 - DNA, 27 bp, Artificial sequence
  SiRNA target sequence
aggatacacaaactgataaaataagac

SEQ ID NO: 64276 - DNA, 27 bp, Artificial sequence
  SiRNA target sequence
ggatacacaaactgataaaataagact

SEQ ID NO: 64277 - DNA, 27 bp, Artificial sequence
  SiRNA target sequence
gatacacaaactgataaaataagactg

SEQ ID NO: 64278 - DNA, 27 bp, Artificial sequence
  SiRNA target sequence
atacacaaactgataaaataagactga

SEQ ID NO: 64279 - DNA, 27 bp, Artificial sequence
  SiRNA target sequence
tacacaaactgataaaataagactgat

SEQ ID NO: 64280 - DNA, 27 bp, Artificial sequence
  SiRNA target sequence
acacaaactgataaaataagactgata

SEQ ID NO: 64281 - DNA, 27 bp, Artificial sequence
  SiRNA target sequence
cacaaactgataaaataagactgatag

SEQ ID NO: 64282 - DNA, 27 bp, Artificial sequence
  SiRNA target sequence
acaaactgataaaataagactgataga

SEQ ID NO: 64283 - DNA, 27 bp, Artificial sequence
  SiRNA target sequence
caaactgataaaataagactgatagat

SEQ ID NO: 64284 - DNA, 27 bp, Artificial sequence
  SiRNA target sequence
aaactgataaaataagactgatagatt

SEQ ID NO: 64285 - DNA, 27 bp, Artificial sequence
  SiRNA target sequence
aactgataaaataagactgatagattt

SEQ ID NO: 64286 - DNA, 27 bp, Artificial sequence
  SiRNA target sequence
actgataaaataagactgatagatttt

SEQ ID NO: 64287 - DNA, 27 bp, Artificial sequence
  SiRNA target sequence
ctgataaaataagactgatagatttta

SEQ ID NO: 64288 - DNA, 27 bp, Artificial sequence
  SiRNA target sequence
tgataaaataagactgatagattttaa

SEQ ID NO: 64289 - DNA, 27 bp, Artificial sequence
  SiRNA target sequence
gataaaataagactgatagattttaat

SEQ ID NO: 64290 - DNA, 27 bp, Artificial sequence
  SiRNA target sequence
ataaaataagactgatagattttaatg

SEQ ID NO: 64291 - DNA, 27 bp, Artificial sequence
  SiRNA target sequence
taaaataagactgatagattttaatga

SEQ ID NO: 64292 - DNA, 27 bp, Artificial sequence
  SiRNA target sequence
aaaataagactgatagattttaatgaa

SEQ ID NO: 64293 - DNA, 27 bp, Artificial sequence
  SiRNA target sequence
aaataagactgatagattttaatgaaa

SEQ ID NO: 64294 - DNA, 27 bp, Artificial sequence
  SiRNA target sequence
aataagactgatagattttaatgaaaa

SEQ ID NO: 64295 - DNA, 27 bp, Artificial sequence
  SiRNA target sequence
ataagactgatagattttaatgaaaag

SEQ ID NO: 64296 - DNA, 27 bp, Artificial sequence
  SiRNA target sequence
taagactgatagattttaatgaaaagc

SEQ ID NO: 64297 - DNA, 27 bp, Artificial sequence
  SiRNA target sequence
aagactgatagattttaatgaaaagct

SEQ ID NO: 64298 - DNA, 27 bp, Artificial sequence
  SiRNA target sequence
agactgatagattttaatgaaaagcta

SEQ ID NO: 64299 - DNA, 27 bp, Artificial sequence
  SiRNA target sequence
gactgatagattttaatgaaaagctag

SEQ ID NO: 64300 - DNA, 27 bp, Artificial sequence
  SiRNA target sequence
actgatagattttaatgaaaagctaga

SEQ ID NO: 64301 - DNA, 27 bp, Artificial sequence
  SiRNA target sequence
ctgatagattttaatgaaaagctagaa

SEQ ID NO: 64302 - DNA, 27 bp, Artificial sequence
  SiRNA target sequence
tgatagattttaatgaaaagctagaat

SEQ ID NO: 64303 - DNA, 27 bp, Artificial sequence
  SiRNA target sequence
gatagattttaatgaaaagctagaatt

SEQ ID NO: 64304 - DNA, 27 bp, Artificial sequence
  SiRNA target sequence
atagattttaatgaaaagctagaattt

SEQ ID NO: 64305 - DNA, 27 bp, Artificial sequence
  SiRNA target sequence
tagattttaatgaaaagctagaattta

SEQ ID NO: 64306 - DNA, 27 bp, Artificial sequence
  SiRNA target sequence
agattttaatgaaaagctagaatttag

SEQ ID NO: 64307 - DNA, 27 bp, Artificial sequence
  SiRNA target sequence
gattttaatgaaaagctagaatttaga

SEQ ID NO: 64308 - DNA, 27 bp, Artificial sequence
  SiRNA target sequence
attttaatgaaaagctagaatttagaa

SEQ ID NO: 64309 - DNA, 27 bp, Artificial sequence
  SiRNA target sequence
ttttaatgaaaagctagaatttagaaa

SEQ ID NO: 64310 - DNA, 27 bp, Artificial sequence
  SiRNA target sequence
tttaatgaaaagctagaatttagaaat

SEQ ID NO: 64311 - DNA, 27 bp, Artificial sequence
  SiRNA target sequence
ttaatgaaaagctagaatttagaaatg

SEQ ID NO: 64312 - DNA, 27 bp, Artificial sequence
  SiRNA target sequence
taatgaaaagctagaatttagaaatgt

SEQ ID NO: 64313 - DNA, 27 bp, Artificial sequence
  SiRNA target sequence
aatgaaaagctagaatttagaaatgta

SEQ ID NO: 64314 - DNA, 27 bp, Artificial sequence
  SiRNA target sequence
atgaaaagctagaatttagaaatgtat

SEQ ID NO: 64315 - DNA, 27 bp, Artificial sequence
  SiRNA target sequence
tgaaaagctagaatttagaaatgtatc

SEQ ID NO: 64316 - DNA, 27 bp, Artificial sequence
  SiRNA target sequence
gaaaagctagaatttagaaatgtatct

SEQ ID NO: 64317 - DNA, 27 bp, Artificial sequence
  SiRNA target sequence
aaaagctagaatttagaaatgtatctt

SEQ ID NO: 64318 - DNA, 27 bp, Artificial sequence
  SiRNA target sequence
aaagctagaatttagaaatgtatcttt

SEQ ID NO: 64319 - DNA, 27 bp, Artificial sequence
  SiRNA target sequence
aagctagaatttagaaatgtatctttt

SEQ ID NO: 64320 - DNA, 27 bp, Artificial sequence
  SiRNA target sequence
agctagaatttagaaatgtatctttta

SEQ ID NO: 64321 - DNA, 27 bp, Artificial sequence
  SiRNA target sequence
gctagaatttagaaatgtatcttttag

SEQ ID NO: 64322 - DNA, 27 bp, Artificial sequence
  SiRNA target sequence
ctagaatttagaaatgtatcttttagt

SEQ ID NO: 64323 - DNA, 27 bp, Artificial sequence
  SiRNA target sequence
tagaatttagaaatgtatcttttagtt

SEQ ID NO: 64324 - DNA, 27 bp, Artificial sequence
  SiRNA target sequence
agaatttagaaatgtatcttttagtta

SEQ ID NO: 64325 - DNA, 27 bp, Artificial sequence
  SiRNA target sequence
gaatttagaaatgtatcttttagttat

SEQ ID NO: 64326 - DNA, 27 bp, Artificial sequence
  SiRNA target sequence
aatttagaaatgtatcttttagttatt

SEQ ID NO: 64327 - DNA, 27 bp, Artificial sequence
  SiRNA target sequence
atttagaaatgtatcttttagttattt

SEQ ID NO: 64328 - DNA, 27 bp, Artificial sequence
  SiRNA target sequence
tttagaaatgtatcttttagttattta

SEQ ID NO: 64329 - DNA, 27 bp, Artificial sequence
  SiRNA target sequence
ttagaaatgtatcttttagttatttaa

SEQ ID NO: 64330 - DNA, 27 bp, Artificial sequence
  SiRNA target sequence
tagaaatgtatcttttagttatttaaa

SEQ ID NO: 64331 - DNA, 27 bp, Artificial sequence
  SiRNA target sequence
agaaatgtatcttttagttatttaaat

SEQ ID NO: 64332 - DNA, 27 bp, Artificial sequence
  SiRNA target sequence
gaaatgtatcttttagttatttaaata

SEQ ID NO: 64333 - DNA, 27 bp, Artificial sequence
  SiRNA target sequence
aaatgtatcttttagttatttaaataa

SEQ ID NO: 64334 - DNA, 27 bp, Artificial sequence
  SiRNA target sequence
aatgtatcttttagttatttaaataag

SEQ ID NO: 64335 - DNA, 27 bp, Artificial sequence
  SiRNA target sequence
atgtatcttttagttatttaaataagc

SEQ ID NO: 64336 - DNA, 27 bp, Artificial sequence
  SiRNA target sequence
tgtatcttttagttatttaaataagcc

SEQ ID NO: 64337 - DNA, 27 bp, Artificial sequence
  SiRNA target sequence
gtatcttttagttatttaaataagcct

SEQ ID NO: 64338 - DNA, 27 bp, Artificial sequence
  SiRNA target sequence
tatcttttagttatttaaataagccta

SEQ ID NO: 64339 - DNA, 27 bp, Artificial sequence
  SiRNA target sequence
atcttttagttatttaaataagcctat

SEQ ID NO: 64340 - DNA, 27 bp, Artificial sequence
  SiRNA target sequence
tcttttagttatttaaataagcctatt

SEQ ID NO: 64341 - DNA, 27 bp, Artificial sequence
  SiRNA target sequence
cttttagttatttaaataagcctattt

SEQ ID NO: 64342 - DNA, 27 bp, Artificial sequence
  SiRNA target sequence
ttttagttatttaaataagcctatttt

SEQ ID NO: 64343 - DNA, 27 bp, Artificial sequence
  SiRNA target sequence
tttagttatttaaataagcctatttta

SEQ ID NO: 64344 - DNA, 27 bp, Artificial sequence
  SiRNA target sequence
ttagttatttaaataagcctattttag

SEQ ID NO: 64345 - DNA, 27 bp, Artificial sequence
  SiRNA target sequence
tagttatttaaataagcctattttagt

SEQ ID NO: 64346 - DNA, 27 bp, Artificial sequence
  SiRNA target sequence
agttatttaaataagcctattttagtg

SEQ ID NO: 64347 - DNA, 27 bp, Artificial sequence
  SiRNA target sequence
gttatttaaataagcctattttagtga

SEQ ID NO: 64348 - DNA, 27 bp, Artificial sequence
  SiRNA target sequence
ttatttaaataagcctattttagtgaa

SEQ ID NO: 64349 - DNA, 27 bp, Artificial sequence
  SiRNA target sequence
tatttaaataagcctattttagtgaat

SEQ ID NO: 64350 - DNA, 27 bp, Artificial sequence
  SiRNA target sequence
atttaaataagcctattttagtgaatg

SEQ ID NO: 64351 - DNA, 27 bp, Artificial sequence
  SiRNA target sequence
tttaaataagcctattttagtgaatgc

SEQ ID NO: 64352 - DNA, 27 bp, Artificial sequence
  SiRNA target sequence
ttaaataagcctattttagtgaatgct

SEQ ID NO: 64353 - DNA, 27 bp, Artificial sequence
  SiRNA target sequence
taaataagcctattttagtgaatgcta

SEQ ID NO: 64354 - DNA, 27 bp, Artificial sequence
  SiRNA target sequence
aaataagcctattttagtgaatgctaa

SEQ ID NO: 64355 - DNA, 27 bp, Artificial sequence
  SiRNA target sequence
aataagcctattttagtgaatgctaat

SEQ ID NO: 64356 - DNA, 27 bp, Artificial sequence
  SiRNA target sequence
ataagcctattttagtgaatgctaatt

SEQ ID NO: 64357 - DNA, 27 bp, Artificial sequence
  SiRNA target sequence
taagcctattttagtgaatgctaattt

SEQ ID NO: 64358 - DNA, 27 bp, Artificial sequence
  SiRNA target sequence
aagcctattttagtgaatgctaatttc

SEQ ID NO: 64359 - DNA, 27 bp, Artificial sequence
  SiRNA target sequence
agcctattttagtgaatgctaatttcg

SEQ ID NO: 64360 - DNA, 27 bp, Artificial sequence
  SiRNA target sequence
gcctattttagtgaatgctaatttcgt

SEQ ID NO: 64361 - DNA, 27 bp, Artificial sequence
  SiRNA target sequence
cctattttagtgaatgctaatttcgtt

SEQ ID NO: 64362 - DNA, 27 bp, Artificial sequence
  SiRNA target sequence
ctattttagtgaatgctaatttcgtta

SEQ ID NO: 64363 - DNA, 27 bp, Artificial sequence
  SiRNA target sequence
tattttagtgaatgctaatttcgttat

SEQ ID NO: 64364 - DNA, 27 bp, Artificial sequence
  SiRNA target sequence
attttagtgaatgctaatttcgttatt

SEQ ID NO: 64365 - DNA, 27 bp, Artificial sequence
  SiRNA target sequence
ttttagtgaatgctaatttcgttatta

SEQ ID NO: 64366 - DNA, 27 bp, Artificial sequence
  SiRNA target sequence
tttagtgaatgctaatttcgttattaa

SEQ ID NO: 64367 - DNA, 27 bp, Artificial sequence
  SiRNA target sequence
ttagtgaatgctaatttcgttattaat

SEQ ID NO: 64368 - DNA, 27 bp, Artificial sequence
  SiRNA target sequence
tagtgaatgctaatttcgttattaata

SEQ ID NO: 64369 - DNA, 27 bp, Artificial sequence
  SiRNA target sequence
agtgaatgctaatttcgttattaataa

SEQ ID NO: 64370 - DNA, 27 bp, Artificial sequence
  SiRNA target sequence
gtgaatgctaatttcgttattaataaa

SEQ ID NO: 64371 - DNA, 27 bp, Artificial sequence
  SiRNA target sequence
tgaatgctaatttcgttattaataaag

SEQ ID NO: 64372 - DNA, 27 bp, Artificial sequence
  SiRNA target sequence
gaatgctaatttcgttattaataaagg

SEQ ID NO: 64373 - DNA, 27 bp, Artificial sequence
  SiRNA target sequence
aatgctaatttcgttattaataaaggg

SEQ ID NO: 64374 - DNA, 27 bp, Artificial sequence
  SiRNA target sequence
atgctaatttcgttattaataaagggg

SEQ ID NO: 64375 - DNA, 27 bp, Artificial sequence
  SiRNA target sequence
tgctaatttcgttattaataaagggga

SEQ ID NO: 64376 - DNA, 27 bp, Artificial sequence
  SiRNA target sequence
gctaatttcgttattaataaaggggag

SEQ ID NO: 64377 - DNA, 27 bp, Artificial sequence
  SiRNA target sequence
ctaatttcgttattaataaaggggagc

SEQ ID NO: 64378 - DNA, 27 bp, Artificial sequence
  SiRNA target sequence
taatttcgttattaataaaggggagcg

SEQ ID NO: 64379 - DNA, 27 bp, Artificial sequence
  SiRNA target sequence
aatttcgttattaataaaggggagcgt

SEQ ID NO: 64380 - DNA, 27 bp, Artificial sequence
  SiRNA target sequence
atttcgttattaataaaggggagcgtg

SEQ ID NO: 64381 - DNA, 27 bp, Artificial sequence
  SiRNA target sequence
tttcgttattaataaaggggagcgtgt

SEQ ID NO: 64382 - DNA, 27 bp, Artificial sequence
  SiRNA target sequence
ttcgttattaataaaggggagcgtgtt

SEQ ID NO: 64383 - DNA, 27 bp, Artificial sequence
  SiRNA target sequence
tcgttattaataaaggggagcgtgttg

SEQ ID NO: 64384 - DNA, 27 bp, Artificial sequence
  SiRNA target sequence
cgttattaataaaggggagcgtgttgc

SEQ ID NO: 64385 - DNA, 27 bp, Artificial sequence
  SiRNA target sequence
gttattaataaaggggagcgtgttgct

SEQ ID NO: 64386 - DNA, 27 bp, Artificial sequence
  SiRNA target sequence
ttattaataaaggggagcgtgttgcta

SEQ ID NO: 64387 - DNA, 27 bp, Artificial sequence
  SiRNA target sequence
tattaataaaggggagcgtgttgctat

SEQ ID NO: 64388 - DNA, 27 bp, Artificial sequence
  SiRNA target sequence
attaataaaggggagcgtgttgctatt

SEQ ID NO: 64389 - DNA, 27 bp, Artificial sequence
  SiRNA target sequence
ttaataaaggggagcgtgttgctatta

SEQ ID NO: 64390 - DNA, 27 bp, Artificial sequence
  SiRNA target sequence
taataaaggggagcgtgttgctattat

SEQ ID NO: 64391 - DNA, 27 bp, Artificial sequence
  SiRNA target sequence
aataaaggggagcgtgttgctattata

SEQ ID NO: 64392 - DNA, 27 bp, Artificial sequence
  SiRNA target sequence
ataaaggggagcgtgttgctattatag

SEQ ID NO: 64393 - DNA, 27 bp, Artificial sequence
  SiRNA target sequence
taaaggggagcgtgttgctattatagg

SEQ ID NO: 64394 - DNA, 27 bp, Artificial sequence
  SiRNA target sequence
aaaggggagcgtgttgctattatagga

SEQ ID NO: 64395 - DNA, 27 bp, Artificial sequence
  SiRNA target sequence
aaggggagcgtgttgctattataggaa

SEQ ID NO: 64396 - DNA, 27 bp, Artificial sequence
  SiRNA target sequence
aggggagcgtgttgctattataggaaa

SEQ ID NO: 64397 - DNA, 27 bp, Artificial sequence
  SiRNA target sequence
ggggagcgtgttgctattataggaaaa

SEQ ID NO: 64398 - DNA, 27 bp, Artificial sequence
  SiRNA target sequence
gggagcgtgttgctattataggaaaaa

SEQ ID NO: 64399 - DNA, 27 bp, Artificial sequence
  SiRNA target sequence
ggagcgtgttgctattataggaaaaaa

SEQ ID NO: 64400 - DNA, 27 bp, Artificial sequence
  SiRNA target sequence
gagcgtgttgctattataggaaaaaat

SEQ ID NO: 64401 - DNA, 27 bp, Artificial sequence
  SiRNA target sequence
agcgtgttgctattataggaaaaaatg

SEQ ID NO: 64402 - DNA, 27 bp, Artificial sequence
  SiRNA target sequence
gcgtgttgctattataggaaaaaatgg

SEQ ID NO: 64403 - DNA, 27 bp, Artificial sequence
  SiRNA target sequence
cgtgttgctattataggaaaaaatgga

SEQ ID NO: 64404 - DNA, 27 bp, Artificial sequence
  SiRNA target sequence
gtgttgctattataggaaaaaatggaa

SEQ ID NO: 64405 - DNA, 27 bp, Artificial sequence
  SiRNA target sequence
tgttgctattataggaaaaaatggaac

SEQ ID NO: 64406 - DNA, 27 bp, Artificial sequence
  SiRNA target sequence
gttgctattataggaaaaaatggaaca

SEQ ID NO: 64407 - DNA, 27 bp, Artificial sequence
  SiRNA target sequence
ttgctattataggaaaaaatggaacag

SEQ ID NO: 64408 - DNA, 27 bp, Artificial sequence
  SiRNA target sequence
tgctattataggaaaaaatggaacagg

SEQ ID NO: 64409 - DNA, 27 bp, Artificial sequence
  SiRNA target sequence
gctattataggaaaaaatggaacaggt

SEQ ID NO: 64410 - DNA, 27 bp, Artificial sequence
  SiRNA target sequence
ctattataggaaaaaatggaacaggta

SEQ ID NO: 64411 - DNA, 27 bp, Artificial sequence
  SiRNA target sequence
tattataggaaaaaatggaacaggtaa

SEQ ID NO: 64412 - DNA, 27 bp, Artificial sequence
  SiRNA target sequence
attataggaaaaaatggaacaggtaaa

SEQ ID NO: 64413 - DNA, 27 bp, Artificial sequence
  SiRNA target sequence
ttataggaaaaaatggaacaggtaaaa

SEQ ID NO: 64414 - DNA, 27 bp, Artificial sequence
  SiRNA target sequence
tataggaaaaaatggaacaggtaaaag

SEQ ID NO: 64415 - DNA, 27 bp, Artificial sequence
  SiRNA target sequence
ataggaaaaaatggaacaggtaaaagt

SEQ ID NO: 64416 - DNA, 27 bp, Artificial sequence
  SiRNA target sequence
taggaaaaaatggaacaggtaaaagta

SEQ ID NO: 64417 - DNA, 27 bp, Artificial sequence
  SiRNA target sequence
aggaaaaaatggaacaggtaaaagtac

SEQ ID NO: 64418 - DNA, 27 bp, Artificial sequence
  SiRNA target sequence
ggaaaaaatggaacaggtaaaagtaca

SEQ ID NO: 64419 - DNA, 27 bp, Artificial sequence
  SiRNA target sequence
gaaaaaatggaacaggtaaaagtacaa

SEQ ID NO: 64420 - DNA, 27 bp, Artificial sequence
  SiRNA target sequence
aaaaaatggaacaggtaaaagtacaat

SEQ ID NO: 64421 - DNA, 27 bp, Artificial sequence
  SiRNA target sequence
aaaaatggaacaggtaaaagtacaata

SEQ ID NO: 64422 - DNA, 27 bp, Artificial sequence
  SiRNA target sequence
aaaatggaacaggtaaaagtacaataa

SEQ ID NO: 64423 - DNA, 27 bp, Artificial sequence
  SiRNA target sequence
aaatggaacaggtaaaagtacaataat

SEQ ID NO: 64424 - DNA, 27 bp, Artificial sequence
  SiRNA target sequence
aatggaacaggtaaaagtacaataata

SEQ ID NO: 64425 - DNA, 27 bp, Artificial sequence
  SiRNA target sequence
atggaacaggtaaaagtacaataataa

SEQ ID NO: 64426 - DNA, 27 bp, Artificial sequence
  SiRNA target sequence
tggaacaggtaaaagtacaataataaa

SEQ ID NO: 64427 - DNA, 27 bp, Artificial sequence
  SiRNA target sequence
ggaacaggtaaaagtacaataataaaa

SEQ ID NO: 64428 - DNA, 27 bp, Artificial sequence
  SiRNA target sequence
gaacaggtaaaagtacaataataaaat

SEQ ID NO: 64429 - DNA, 27 bp, Artificial sequence
  SiRNA target sequence
aacaggtaaaagtacaataataaaatt

SEQ ID NO: 64430 - DNA, 27 bp, Artificial sequence
  SiRNA target sequence
acaggtaaaagtacaataataaaattg

SEQ ID NO: 64431 - DNA, 27 bp, Artificial sequence
  SiRNA target sequence
caggtaaaagtacaataataaaattgt

SEQ ID NO: 64432 - DNA, 27 bp, Artificial sequence
  SiRNA target sequence
aggtaaaagtacaataataaaattgtt

SEQ ID NO: 64433 - DNA, 27 bp, Artificial sequence
  SiRNA target sequence
ggtaaaagtacaataataaaattgtta

SEQ ID NO: 64434 - DNA, 27 bp, Artificial sequence
  SiRNA target sequence
gtaaaagtacaataataaaattgttaa

SEQ ID NO: 64435 - DNA, 27 bp, Artificial sequence
  SiRNA target sequence
taaaagtacaataataaaattgttaat

SEQ ID NO: 64436 - DNA, 27 bp, Artificial sequence
  SiRNA target sequence
aaaagtacaataataaaattgttaatg

SEQ ID NO: 64437 - DNA, 27 bp, Artificial sequence
  SiRNA target sequence
aaagtacaataataaaattgttaatga

SEQ ID NO: 64438 - DNA, 27 bp, Artificial sequence
  SiRNA target sequence
aagtacaataataaaattgttaatgaa

SEQ ID NO: 64439 - DNA, 27 bp, Artificial sequence
  SiRNA target sequence
agtacaataataaaattgttaatgaaa

SEQ ID NO: 64440 - DNA, 27 bp, Artificial sequence
  SiRNA target sequence
gtacaataataaaattgttaatgaaat

SEQ ID NO: 64441 - DNA, 27 bp, Artificial sequence
  SiRNA target sequence
tacaataataaaattgttaatgaaatt

SEQ ID NO: 64442 - DNA, 27 bp, Artificial sequence
  SiRNA target sequence
acaataataaaattgttaatgaaattt

SEQ ID NO: 64443 - DNA, 27 bp, Artificial sequence
  SiRNA target sequence
caataataaaattgttaatgaaatttt

SEQ ID NO: 64444 - DNA, 27 bp, Artificial sequence
  SiRNA target sequence
aataataaaattgttaatgaaatttta

SEQ ID NO: 64445 - DNA, 27 bp, Artificial sequence
  SiRNA target sequence
ataataaaattgttaatgaaattttat

SEQ ID NO: 64446 - DNA, 27 bp, Artificial sequence
  SiRNA target sequence
taataaaattgttaatgaaattttata

SEQ ID NO: 64447 - DNA, 27 bp, Artificial sequence
  SiRNA target sequence
aataaaattgttaatgaaattttataa

SEQ ID NO: 64448 - DNA, 27 bp, Artificial sequence
  SiRNA target sequence
ataaaattgttaatgaaattttataaa

SEQ ID NO: 64449 - DNA, 27 bp, Artificial sequence
  SiRNA target sequence
taaaattgttaatgaaattttataaat

SEQ ID NO: 64450 - DNA, 27 bp, Artificial sequence
  SiRNA target sequence
aaaattgttaatgaaattttataaata

SEQ ID NO: 64451 - DNA, 27 bp, Artificial sequence
  SiRNA target sequence
aaattgttaatgaaattttataaatat

SEQ ID NO: 64452 - DNA, 27 bp, Artificial sequence
  SiRNA target sequence
aattgttaatgaaattttataaatatg

SEQ ID NO: 64453 - DNA, 27 bp, Artificial sequence
  SiRNA target sequence
attgttaatgaaattttataaatatga

SEQ ID NO: 64454 - DNA, 27 bp, Artificial sequence
  SiRNA target sequence
ttgttaatgaaattttataaatatgat

SEQ ID NO: 64455 - DNA, 27 bp, Artificial sequence
  SiRNA target sequence
tgttaatgaaattttataaatatgatg

SEQ ID NO: 64456 - DNA, 27 bp, Artificial sequence
  SiRNA target sequence
gttaatgaaattttataaatatgatgg

SEQ ID NO: 64457 - DNA, 27 bp, Artificial sequence
  SiRNA target sequence
ttaatgaaattttataaatatgatgga

SEQ ID NO: 64458 - DNA, 27 bp, Artificial sequence
  SiRNA target sequence
taatgaaattttataaatatgatggag

SEQ ID NO: 64459 - DNA, 27 bp, Artificial sequence
  SiRNA target sequence
aatgaaattttataaatatgatggaga

SEQ ID NO: 64460 - DNA, 27 bp, Artificial sequence
  SiRNA target sequence
atgaaattttataaatatgatggagat

SEQ ID NO: 64461 - DNA, 27 bp, Artificial sequence
  SiRNA target sequence
tgaaattttataaatatgatggagata

SEQ ID NO: 64462 - DNA, 27 bp, Artificial sequence
  SiRNA target sequence
gaaattttataaatatgatggagatat

SEQ ID NO: 64463 - DNA, 27 bp, Artificial sequence
  SiRNA target sequence
aaattttataaatatgatggagatata

SEQ ID NO: 64464 - DNA, 27 bp, Artificial sequence
  SiRNA target sequence
aattttataaatatgatggagatatat

SEQ ID NO: 64465 - DNA, 27 bp, Artificial sequence
  SiRNA target sequence
attttataaatatgatggagatatatt

SEQ ID NO: 64466 - DNA, 27 bp, Artificial sequence
  SiRNA target sequence
ttttataaatatgatggagatatatta

SEQ ID NO: 64467 - DNA, 27 bp, Artificial sequence
  SiRNA target sequence
tttataaatatgatggagatatattaa

SEQ ID NO: 64468 - DNA, 27 bp, Artificial sequence
  SiRNA target sequence
ttataaatatgatggagatatattaat

SEQ ID NO: 64469 - DNA, 27 bp, Artificial sequence
  SiRNA target sequence
tataaatatgatggagatatattaatt

SEQ ID NO: 64470 - DNA, 27 bp, Artificial sequence
  SiRNA target sequence
ataaatatgatggagatatattaattg

SEQ ID NO: 64471 - DNA, 27 bp, Artificial sequence
  SiRNA target sequence
taaatatgatggagatatattaattga

SEQ ID NO: 64472 - DNA, 27 bp, Artificial sequence
  SiRNA target sequence
aaatatgatggagatatattaattgat

SEQ ID NO: 64473 - DNA, 27 bp, Artificial sequence
  SiRNA target sequence
aatatgatggagatatattaattgatg

SEQ ID NO: 64474 - DNA, 27 bp, Artificial sequence
  SiRNA target sequence
atatgatggagatatattaattgatga

SEQ ID NO: 64475 - DNA, 27 bp, Artificial sequence
  SiRNA target sequence
tatgatggagatatattaattgatgat

SEQ ID NO: 64476 - DNA, 27 bp, Artificial sequence
  SiRNA target sequence
atgatggagatatattaattgatgata

SEQ ID NO: 64477 - DNA, 27 bp, Artificial sequence
  SiRNA target sequence
tgatggagatatattaattgatgatac

SEQ ID NO: 64478 - DNA, 27 bp, Artificial sequence
  SiRNA target sequence
gatggagatatattaattgatgataca

SEQ ID NO: 64479 - DNA, 27 bp, Artificial sequence
  SiRNA target sequence
atggagatatattaattgatgatacag

SEQ ID NO: 64480 - DNA, 27 bp, Artificial sequence
  SiRNA target sequence
tggagatatattaattgatgatacaga

SEQ ID NO: 64481 - DNA, 27 bp, Artificial sequence
  SiRNA target sequence
ggagatatattaattgatgatacagaa

SEQ ID NO: 64482 - DNA, 27 bp, Artificial sequence
  SiRNA target sequence
gagatatattaattgatgatacagaaa

SEQ ID NO: 64483 - DNA, 27 bp, Artificial sequence
  SiRNA target sequence
agatatattaattgatgatacagaaat

SEQ ID NO: 64484 - DNA, 27 bp, Artificial sequence
  SiRNA target sequence
gatatattaattgatgatacagaaata

SEQ ID NO: 64485 - DNA, 27 bp, Artificial sequence
  SiRNA target sequence
atatattaattgatgatacagaaatag

SEQ ID NO: 64486 - DNA, 27 bp, Artificial sequence
  SiRNA target sequence
tatattaattgatgatacagaaataga

SEQ ID NO: 64487 - DNA, 27 bp, Artificial sequence
  SiRNA target sequence
atattaattgatgatacagaaatagat

SEQ ID NO: 64488 - DNA, 27 bp, Artificial sequence
  SiRNA target sequence
tattaattgatgatacagaaatagata

SEQ ID NO: 64489 - DNA, 27 bp, Artificial sequence
  SiRNA target sequence
attaattgatgatacagaaatagataa

SEQ ID NO: 64490 - DNA, 27 bp, Artificial sequence
  SiRNA target sequence
ttaattgatgatacagaaatagataat

SEQ ID NO: 64491 - DNA, 27 bp, Artificial sequence
  SiRNA target sequence
taattgatgatacagaaatagataata

SEQ ID NO: 64492 - DNA, 27 bp, Artificial sequence
  SiRNA target sequence
aattgatgatacagaaatagataatat

SEQ ID NO: 64493 - DNA, 27 bp, Artificial sequence
  SiRNA target sequence
attgatgatacagaaatagataatatt

SEQ ID NO: 64494 - DNA, 27 bp, Artificial sequence
  SiRNA target sequence
ttgatgatacagaaatagataatattt

SEQ ID NO: 64495 - DNA, 27 bp, Artificial sequence
  SiRNA target sequence
tgatgatacagaaatagataatatttc

SEQ ID NO: 64496 - DNA, 27 bp, Artificial sequence
  SiRNA target sequence
gatgatacagaaatagataatatttcg

SEQ ID NO: 64497 - DNA, 27 bp, Artificial sequence
  SiRNA target sequence
atgatacagaaatagataatatttcgg

SEQ ID NO: 64498 - DNA, 27 bp, Artificial sequence
  SiRNA target sequence
tgatacagaaatagataatatttcgga

SEQ ID NO: 64499 - DNA, 27 bp, Artificial sequence
  SiRNA target sequence
gatacagaaatagataatatttcggat

SEQ ID NO: 64500 - DNA, 27 bp, Artificial sequence
  SiRNA target sequence
atacagaaatagataatatttcggata

SEQ ID NO: 64501 - DNA, 27 bp, Artificial sequence
  SiRNA target sequence
tacagaaatagataatatttcggatag

SEQ ID NO: 64502 - DNA, 27 bp, Artificial sequence
  SiRNA target sequence
acagaaatagataatatttcggataga

SEQ ID NO: 64503 - DNA, 27 bp, Artificial sequence
  SiRNA target sequence
cagaaatagataatatttcggatagaa

SEQ ID NO: 64504 - DNA, 27 bp, Artificial sequence
  SiRNA target sequence
agaaatagataatatttcggatagaag

SEQ ID NO: 64505 - DNA, 27 bp, Artificial sequence
  SiRNA target sequence
gaaatagataatatttcggatagaagt

SEQ ID NO: 64506 - DNA, 27 bp, Artificial sequence
  SiRNA target sequence
aaatagataatatttcggatagaagtt

SEQ ID NO: 64507 - DNA, 27 bp, Artificial sequence
  SiRNA target sequence
aatagataatatttcggatagaagtta

SEQ ID NO: 64508 - DNA, 27 bp, Artificial sequence
  SiRNA target sequence
atagataatatttcggatagaagttac

SEQ ID NO: 64509 - DNA, 27 bp, Artificial sequence
  SiRNA target sequence
tagataatatttcggatagaagttaca

SEQ ID NO: 64510 - DNA, 27 bp, Artificial sequence
  SiRNA target sequence
agataatatttcggatagaagttacag

SEQ ID NO: 64511 - DNA, 27 bp, Artificial sequence
  SiRNA target sequence
gataatatttcggatagaagttacaga

SEQ ID NO: 64512 - DNA, 27 bp, Artificial sequence
  SiRNA target sequence
ataatatttcggatagaagttacagaa
